United States Patent Application Publication US 2018/0305689 A1 - sequence listing, part 76

SEQ ID NO: 1085092 - RNA, 19 nt, Artificial Sequence
  Description of Artificial Sequence: Synthetic oligonucleotide
  Sense strand starting at position 100 of SEQ ID NO: 915508
ccaugagugcucugaaauc

SEQ ID NO: 1085093 - RNA, 19 nt, Artificial Sequence
  Description of Artificial Sequence: Synthetic oligonucleotide
  Antisense strand to SEQ ID NO: 1085092
gauuucagagcacucaugg

SEQ ID NO: 1085094 - RNA, 19 nt, Artificial Sequence
  Description of Artificial Sequence: Synthetic oligonucleotide
  Sense strand starting at position 139 of SEQ ID NO: 915508
acugaagaaucauagauuu

SEQ ID NO: 1085095 - RNA, 19 nt, Artificial Sequence
  Description of Artificial Sequence: Synthetic oligonucleotide
  Antisense strand to SEQ ID NO: 1085094
aaaucuaugauucuucagu

SEQ ID NO: 1085096 - RNA, 19 nt, Artificial Sequence
  Description of Artificial Sequence: Synthetic oligonucleotide
  Sense strand starting at position 147 of SEQ ID NO: 915508
aucauagauuuguaaagca

SEQ ID NO: 1085097 - RNA, 19 nt, Artificial Sequence
  Description of Artificial Sequence: Synthetic oligonucleotide
  Antisense strand to SEQ ID NO: 1085096
ugcuuuacaaaucuaugau

SEQ ID NO: 1085098 - RNA, 19 nt, Artificial Sequence
  Description of Artificial Sequence: Synthetic oligonucleotide
  Sense strand starting at position 306 of SEQ ID NO: 915508
ucauaaguuuagccaagau

SEQ ID NO: 1085099 - RNA, 19 nt, Artificial Sequence
  Description of Artificial Sequence: Synthetic oligonucleotide
  Antisense strand to SEQ ID NO: 1085098
aucuuggcuaaacuuauga

SEQ ID NO: 1085100 - RNA, 19 nt, Artificial Sequence
  Description of Artificial Sequence: Synthetic oligonucleotide
  Sense strand starting at position 439 of SEQ ID NO: 915508
ggcagaaacucccuacauu

SEQ ID NO: 1085101 - RNA, 19 nt, Artificial Sequence
  Description of Artificial Sequence: Synthetic oligonucleotide
  Antisense strand to SEQ ID NO: 1085100
aauguagggaguuucugcc

SEQ ID NO: 1085102 - RNA, 19 nt, Artificial Sequence
  Description of Artificial Sequence: Synthetic oligonucleotide
  Sense strand starting at position 535 of SEQ ID NO: 915508
agccgaucagacugagauc

SEQ ID NO: 1085103 - RNA, 19 nt, Artificial Sequence
  Description of Artificial Sequence: Synthetic oligonucleotide
  Antisense strand to SEQ ID NO: 1085102
gaucucagucugaucggcu

SEQ ID NO: 1085104 - RNA, 19 nt, Artificial Sequence
  Description of Artificial Sequence: Synthetic oligonucleotide
  Sense strand starting at position 538 of SEQ ID NO: 915508
cgaucagacugagaucuaa

SEQ ID NO: 1085105 - RNA, 19 nt, Artificial Sequence
  Description of Artificial Sequence: Synthetic oligonucleotide
  Antisense strand to SEQ ID NO: 1085104
uuagaucucagucugaucg

SEQ ID NO: 1085106 - RNA, 19 nt, Artificial Sequence
  Description of Artificial Sequence: Synthetic oligonucleotide
  Sense strand starting at position 695 of SEQ ID NO: 915508
gagcuauccuugguacggu

SEQ ID NO: 1085107 - RNA, 19 nt, Artificial Sequence
  Description of Artificial Sequence: Synthetic oligonucleotide
  Antisense strand to SEQ ID NO: 1085106
accguaccaaggauagcuc

SEQ ID NO: 1085108 - RNA, 19 nt, Artificial Sequence
  Description of Artificial Sequence: Synthetic oligonucleotide
  Sense strand starting at position 716 of SEQ ID NO: 915508
ccauucugguuccucaaga

SEQ ID NO: 1085109 - RNA, 19 nt, Artificial Sequence
  Description of Artificial Sequence: Synthetic oligonucleotide
  Antisense strand to SEQ ID NO: 1085108
ucuugaggaaccagaaugg

SEQ ID NO: 1085110 - RNA, 19 nt, Artificial Sequence
  Description of Artificial Sequence: Synthetic oligonucleotide
  Sense strand starting at position 1809 of SEQ ID NO: 915508
gagccucaguccuucuuga

SEQ ID NO: 1085111 - RNA, 19 nt, Artificial Sequence
  Description of Artificial Sequence: Synthetic oligonucleotide
  Antisense strand to SEQ ID NO: 1085110
ucaagaaggacugaggcuc

SEQ ID NO: 1085112 - RNA, 19 nt, Artificial Sequence
  Description of Artificial Sequence: Synthetic oligonucleotide
  Sense strand starting at position 1905 of SEQ ID NO: 915508
gcgcgcacuucauuuguua

SEQ ID NO: 1085113 - RNA, 19 nt, Artificial Sequence
  Description of Artificial Sequence: Synthetic oligonucleotide
  Antisense strand to SEQ ID NO: 1085112
uaacaaaugaagugcgcgc

SEQ ID NO: 1085114 - RNA, 19 nt, Artificial Sequence
  Description of Artificial Sequence: Synthetic oligonucleotide
  Sense strand starting at position 1916 of SEQ ID NO: 915508
auuuguuacugcgugaacu

SEQ ID NO: 1085115 - RNA, 19 nt, Artificial Sequence
  Description of Artificial Sequence: Synthetic oligonucleotide
  Antisense strand to SEQ ID NO: 1085114
aguucacgcaguaacaaau

SEQ ID NO: 1085116 - RNA, 19 nt, Artificial Sequence
  Description of Artificial Sequence: Synthetic oligonucleotide
  Sense strand starting at position 1917 of SEQ ID NO: 915508
uuuguuacugcgugaacug

SEQ ID NO: 1085117 - RNA, 19 nt, Artificial Sequence
  Description of Artificial Sequence: Synthetic oligonucleotide
  Antisense strand to SEQ ID NO: 1085116
caguucacgcaguaacaaa

SEQ ID NO: 1085118 - RNA, 19 nt, Artificial Sequence
  Description of Artificial Sequence: Synthetic oligonucleotide
  Sense strand starting at position 1918 of SEQ ID NO: 915508
uuguuacugcgugaacuga

SEQ ID NO: 1085119 - RNA, 19 nt, Artificial Sequence
  Description of Artificial Sequence: Synthetic oligonucleotide
  Antisense strand to SEQ ID NO: 1085118
ucaguucacgcaguaacaa

SEQ ID NO: 1085120 - RNA, 19 nt, Artificial Sequence
  Description of Artificial Sequence: Synthetic oligonucleotide
  Sense strand starting at position 1968 of SEQ ID NO: 915508
gggcgaacucuaugacgga

SEQ ID NO: 1085121 - RNA, 19 nt, Artificial Sequence
  Description of Artificial Sequence: Synthetic oligonucleotide
  Antisense strand to SEQ ID NO: 1085120
uccgucauagaguucgccc

SEQ ID NO: 1085122 - RNA, 19 nt, Artificial Sequence
  Description of Artificial Sequence: Synthetic oligonucleotide
  Sense strand starting at position 2106 of SEQ ID NO: 915508
gcaguuucuccgggauuaa

SEQ ID NO: 1085123 - RNA, 19 nt, Artificial Sequence
  Description of Artificial Sequence: Synthetic oligonucleotide
  Antisense strand to SEQ ID NO: 1085122
uuaaucccggagaaacugc

SEQ ID NO: 1085124 - RNA, 19 nt, Artificial Sequence
  Description of Artificial Sequence: Synthetic oligonucleotide
  Sense strand starting at position 2107 of SEQ ID NO: 915508
caguuucuccgggauuaag

SEQ ID NO: 1085125 - RNA, 19 nt, Artificial Sequence
  Description of Artificial Sequence: Synthetic oligonucleotide
  Antisense strand to SEQ ID NO: 1085124
cuuaaucccggagaaacug

SEQ ID NO: 1085126 - RNA, 19 nt, Artificial Sequence
  Description of Artificial Sequence: Synthetic oligonucleotide
  Sense strand starting at position 2485 of SEQ ID NO: 915508
gcaacaacauauuagauga

SEQ ID NO: 1085127 - RNA, 19 nt, Artificial Sequence
  Description of Artificial Sequence: Synthetic oligonucleotide
  Antisense strand to SEQ ID NO: 1085126
ucaucuaauauguuguugc

SEQ ID NO: 1085128 - RNA, 19 nt, Artificial Sequence
  Description of Artificial Sequence: Synthetic oligonucleotide
  Sense strand starting at position 2507 of SEQ ID NO: 915508
guaacagaagguugucagu

SEQ ID NO: 1085129 - RNA, 19 nt, Artificial Sequence
  Description of Artificial Sequence: Synthetic oligonucleotide
  Antisense strand to SEQ ID NO: 1085128
acugacaaccuucuguuac

SEQ ID NO: 1085130 - RNA, 19 nt, Artificial Sequence
  Description of Artificial Sequence: Synthetic oligonucleotide
  Sense strand starting at position 2552 of SEQ ID NO: 915508
uuggaaucuccacggaguu

SEQ ID NO: 1085131 - RNA, 19 nt, Artificial Sequence
  Description of Artificial Sequence: Synthetic oligonucleotide
  Antisense strand to SEQ ID NO: 1085130
aacuccguggagauuccaa

SEQ ID NO: 1085132 - RNA, 19 nt, Artificial Sequence
  Description of Artificial Sequence: Synthetic oligonucleotide
  Sense strand starting at position 2956 of SEQ ID NO: 915508
cuugccuuuccagaugaca

SEQ ID NO: 1085133 - RNA, 19 nt, Artificial Sequence
  Description of Artificial Sequence: Synthetic oligonucleotide
  Antisense strand to SEQ ID NO: 1085132
ugucaucuggaaaggcaag

SEQ ID NO: 1085134 - RNA, 19 nt, Artificial Sequence
  Description of Artificial Sequence: Synthetic oligonucleotide
  Sense strand starting at position 3287 of SEQ ID NO: 915508
uaugauauuguugguagga

SEQ ID NO: 1085135 - RNA, 19 nt, Artificial Sequence
  Description of Artificial Sequence: Synthetic oligonucleotide
  Antisense strand to SEQ ID NO: 1085134
uccuaccaacaauaucaua

SEQ ID NO: 1085136 - RNA, 19 nt, Artificial Sequence
  Description of Artificial Sequence: Synthetic oligonucleotide
  Sense strand starting at position 3288 of SEQ ID NO: 915508
augauauuguugguaggaa

SEQ ID NO: 1085137 - RNA, 19 nt, Artificial Sequence
  Description of Artificial Sequence: Synthetic oligonucleotide
  Antisense strand to SEQ ID NO: 1085136
uuccuaccaacaauaucau

SEQ ID NO: 1085138 - RNA, 19 nt, Artificial Sequence
  Description of Artificial Sequence: Synthetic oligonucleotide
  Sense strand starting at position 3289 of SEQ ID NO: 915508
ugauauuguugguaggaaa

SEQ ID NO: 1085139 - RNA, 19 nt, Artificial Sequence
  Description of Artificial Sequence: Synthetic oligonucleotide
  Antisense strand to SEQ ID NO: 1085138
uuuccuaccaacaauauca

SEQ ID NO: 1085140 - RNA, 19 nt, Artificial Sequence
  Description of Artificial Sequence: Synthetic oligonucleotide
  Sense strand starting at position 3311 of SEQ ID NO: 915508
acauuagugcaacagaauc

SEQ ID NO: 1085141 - RNA, 19 nt, Artificial Sequence
  Description of Artificial Sequence: Synthetic oligonucleotide
  Antisense strand to SEQ ID NO: 1085140
gauucuguugcacuaaugu

SEQ ID NO: 1085142 - RNA, 19 nt, Artificial Sequence
  Description of Artificial Sequence: Synthetic oligonucleotide
  Sense strand starting at position 3383 of SEQ ID NO: 915508
ugauaaauggcguagaauc

SEQ ID NO: 1085143 - RNA, 19 nt, Artificial Sequence
  Description of Artificial Sequence: Synthetic oligonucleotide
  Antisense strand to SEQ ID NO: 1085142
gauucuacgccauuuauca

SEQ ID NO: 1085144 - RNA, 19 nt, Artificial Sequence
  Description of Artificial Sequence: Synthetic oligonucleotide
  Sense strand starting at position 3391 of SEQ ID NO: 915508
ggcguagaaucuuaaauuu

SEQ ID NO: 1085145 - RNA, 19 nt, Artificial Sequence
  Description of Artificial Sequence: Synthetic oligonucleotide
  Antisense strand to SEQ ID NO: 1085144
aaauuuaagauucuacgcc

SEQ ID NO: 1085146 - RNA, 19 nt, Artificial Sequence
  Description of Artificial Sequence: Synthetic oligonucleotide
  Sense strand starting at position 3438 of SEQ ID NO: 915508
aggagacuauaaggguauu

SEQ ID NO: 1085147 - RNA, 19 nt, Artificial Sequence
  Description of Artificial Sequence: Synthetic oligonucleotide
  Antisense strand to SEQ ID NO: 1085146
aauacccuuauagucuccu

SEQ ID NO: 1085148 - RNA, 19 nt, Artificial Sequence
  Description of Artificial Sequence: Synthetic oligonucleotide
  Sense strand starting at position 3676 of SEQ ID NO: 915508
auggacaugucucagaaga

SEQ ID NO: 1085149 - RNA, 19 nt, Artificial Sequence
  Description of Artificial Sequence: Synthetic oligonucleotide
  Antisense strand to SEQ ID NO: 1085148
ucuucugagacauguccau

SEQ ID NO: 1085150 - RNA, 19 nt, Artificial Sequence
  Description of Artificial Sequence: Synthetic oligonucleotide
  Sense strand starting at position 3678 of SEQ ID NO: 915508
ggacaugucucagaagaac

SEQ ID NO: 1085151 - RNA, 19 nt, Artificial Sequence
  Description of Artificial Sequence: Synthetic oligonucleotide
  Antisense strand to SEQ ID NO: 1085150
guucuucugagacaugucc

SEQ ID NO: 1085152 - RNA, 19 nt, Artificial Sequence
  Description of Artificial Sequence: Synthetic oligonucleotide
  Sense strand starting at position 3803 of SEQ ID NO: 915508
gagagaggugacugugauc

SEQ ID NO: 1085153 - RNA, 19 nt, Artificial Sequence
  Description of Artificial Sequence: Synthetic oligonucleotide
  Antisense strand to SEQ ID NO: 1085152
gaucacagucaccucucuc

SEQ ID NO: 1085154 - RNA, 19 nt, Artificial Sequence
  Description of Artificial Sequence: Synthetic oligonucleotide
  Sense strand starting at position 3806 of SEQ ID NO: 915508
agaggugacugugaucuca

SEQ ID NO: 1085155 - RNA, 19 nt, Artificial Sequence
  Description of Artificial Sequence: Synthetic oligonucleotide
  Antisense strand to SEQ ID NO: 1085154
ugagaucacagucaccucu

SEQ ID NO: 1085156 - RNA, 19 nt, Artificial Sequence
  Description of Artificial Sequence: Synthetic oligonucleotide
  Sense strand starting at position 3876 of SEQ ID NO: 915508
uuucuuguucuguacaauu

SEQ ID NO: 1085157 - RNA, 19 nt, Artificial Sequence
  Description of Artificial Sequence: Synthetic oligonucleotide
  Antisense strand to SEQ ID NO: 1085156
aauuguacagaacaagaaa

SEQ ID NO: 1085158 - RNA, 19 nt, Artificial Sequence
  Description of Artificial Sequence: Synthetic oligonucleotide
  Sense strand starting at position 3878 of SEQ ID NO: 915508
ucuuguucuguacaauuau

SEQ ID NO: 1085159 - RNA, 19 nt, Artificial Sequence
  Description of Artificial Sequence: Synthetic oligonucleotide
  Antisense strand to SEQ ID NO: 1085158
auaauuguacagaacaaga

SEQ ID NO: 1085160 - RNA, 19 nt, Artificial Sequence
  Description of Artificial Sequence: Synthetic oligonucleotide
  Sense strand starting at position 3887 of SEQ ID NO: 915508
guacaauuauuggagagaa

SEQ ID NO: 1085161 - RNA, 19 nt, Artificial Sequence
  Description of Artificial Sequence: Synthetic oligonucleotide
  Antisense strand to SEQ ID NO: 1085160
uucucuccaauaauuguac

SEQ ID NO: 1085162 - RNA, 19 nt, Artificial Sequence
  Description of Artificial Sequence: Synthetic oligonucleotide
  Sense strand starting at position 3924 of SEQ ID NO: 915508
ccugcugccuucuuaauga

SEQ ID NO: 1085163 - RNA, 19 nt, Artificial Sequence
  Description of Artificial Sequence: Synthetic oligonucleotide
  Antisense strand to SEQ ID NO: 1085162
ucauuaagaaggcagcagg

SEQ ID NO: 1085164 - RNA, 19 nt, Artificial Sequence
  Description of Artificial Sequence: Synthetic oligonucleotide
  Sense strand starting at position 581 of SEQ ID NO: 915509
aaguauuaagccuggcaug

SEQ ID NO: 1085165 - RNA, 19 nt, Artificial Sequence
  Description of Artificial Sequence: Synthetic oligonucleotide
  Antisense strand to SEQ ID NO: 1085164
caugccaggcuuaauacuu

SEQ ID NO: 1085166 - RNA, 19 nt, Artificial Sequence
  Description of Artificial Sequence: Synthetic oligonucleotide
  Sense strand starting at position 884 of SEQ ID NO: 915509
aagcgaucgucccaucuaa

SEQ ID NO: 1085167 - RNA, 19 nt, Artificial Sequence
  Description of Artificial Sequence: Synthetic oligonucleotide
  Antisense strand to SEQ ID NO: 1085166
uuagaugggacgaucgcuu

SEQ ID NO: 1085168 - RNA, 19 nt, Artificial Sequence
  Description of Artificial Sequence: Synthetic oligonucleotide
  Sense strand starting at position 986 of SEQ ID NO: 915509
aggcaagugucagcaucaa

SEQ ID NO: 1085169 - RNA, 19 nt, Artificial Sequence
  Description of Artificial Sequence: Synthetic oligonucleotide
  Antisense strand to SEQ ID NO: 1085168
uugaugcugacacuugccu

SEQ ID NO: 1085170 - RNA, 19 nt, Artificial Sequence
  Description of Artificial Sequence: Synthetic oligonucleotide
  Sense strand starting at position 1022 of SEQ ID NO: 915509
ucacaauucugucauggca

SEQ ID NO: 1085171 - RNA, 19 nt, Artificial Sequence
  Description of Artificial Sequence: Synthetic oligonucleotide
  Antisense strand to SEQ ID NO: 1085170
ugccaugacagaauuguga

SEQ ID NO: 1085172 - RNA, 19 nt, Artificial Sequence
  Description of Artificial Sequence: Synthetic oligonucleotide
  Sense strand starting at position 1024 of SEQ ID NO: 915509
acaauucugucauggcagu

SEQ ID NO: 1085173 - RNA, 19 nt, Artificial Sequence
  Description of Artificial Sequence: Synthetic oligonucleotide
  Antisense strand to SEQ ID NO: 1085172
acugccaugacagaauugu

SEQ ID NO: 1085174 - RNA, 19 nt, Artificial Sequence
  Description of Artificial Sequence: Synthetic oligonucleotide
  Sense strand starting at position 1025 of SEQ ID NO: 915509
caauucugucauggcagua

SEQ ID NO: 1085175 - RNA, 19 nt, Artificial Sequence
  Description of Artificial Sequence: Synthetic oligonucleotide
  Antisense strand to SEQ ID NO: 1085174
uacugccaugacagaauug

SEQ ID NO: 1085176 - RNA, 19 nt, Artificial Sequence
  Description of Artificial Sequence: Synthetic oligonucleotide
  Sense strand starting at position 1124 of SEQ ID NO: 915509
gcgaguaaugugcaagggu

SEQ ID NO: 1085177 - RNA, 19 nt, Artificial Sequence
  Description of Artificial Sequence: Synthetic oligonucleotide
  Antisense strand to SEQ ID NO: 1085176
acccuugcacauuacucgc

SEQ ID NO: 1085178 - RNA, 19 nt, Artificial Sequence
  Description of Artificial Sequence: Synthetic oligonucleotide
  Sense strand starting at position 1140 of SEQ ID NO: 915509
ggugucacaucucacacau

SEQ ID NO: 1085179 - RNA, 19 nt, Artificial Sequence
  Description of Artificial Sequence: Synthetic oligonucleotide
  Antisense strand to SEQ ID NO: 1085178
augugugagaugugacacc

SEQ ID NO: 1085180 - RNA, 19 nt, Artificial Sequence
  Description of Artificial Sequence: Synthetic oligonucleotide
  Sense strand starting at position 1307 of SEQ ID NO: 915509
gcacgaugccagucugcaa

SEQ ID NO: 1085181 - RNA, 19 nt, Artificial Sequence
  Description of Artificial Sequence: Synthetic oligonucleotide
  Antisense strand to SEQ ID NO: 1085180
uugcagacuggcaucgugc

SEQ ID NO: 1085182 - RNA, 19 nt, Artificial Sequence
  Description of Artificial Sequence: Synthetic oligonucleotide
  Sense strand starting at position 1335 of SEQ ID NO: 915509
gacucuaggucaguccaaa

SEQ ID NO: 1085183 - RNA, 19 nt, Artificial Sequence
  Description of Artificial Sequence: Synthetic oligonucleotide
  Antisense strand to SEQ ID NO: 1085182
uuuggacugaccuagaguc

SEQ ID NO: 1085184 - RNA, 19 nt, Artificial Sequence
  Description of Artificial Sequence: Synthetic oligonucleotide
  Sense strand starting at position 1520 of SEQ ID NO: 915509
ccuugcugugccgagauaa

SEQ ID NO: 1085185 - RNA, 19 nt, Artificial Sequence
  Description of Artificial Sequence: Synthetic oligonucleotide
  Antisense strand to SEQ ID NO: 1085184
uuaucucggcacagcaagg

SEQ ID NO: 1085186 - RNA, 19 nt, Artificial Sequence
  Description of Artificial Sequence: Synthetic oligonucleotide
  Sense strand starting at position 1680 of SEQ ID NO: 915509
ggcaaaguacacgaucaau

SEQ ID NO: 1085187 - RNA, 19 nt, Artificial Sequence
  Description of Artificial Sequence: Synthetic oligonucleotide
  Antisense strand to SEQ ID NO: 1085186
auugaucguguacuuugcc

SEQ ID NO: 1085188 - RNA, 19 nt, Artificial Sequence
  Description of Artificial Sequence: Synthetic oligonucleotide
  Sense strand starting at position 1753 of SEQ ID NO: 915509
acccgagucucccggguaa

SEQ ID NO: 1085189 - RNA, 19 nt, Artificial Sequence
  Description of Artificial Sequence: Synthetic oligonucleotide
  Antisense strand to SEQ ID NO: 1085188
uuacccgggagacucgggu

SEQ ID NO: 1085190 - RNA, 19 nt, Artificial Sequence
  Description of Artificial Sequence: Synthetic oligonucleotide
  Sense strand starting at position 2318 of SEQ ID NO: 915509
agcgaaggcucucaagcuu

SEQ ID NO: 1085191 - RNA, 19 nt, Artificial Sequence
  Description of Artificial Sequence: Synthetic oligonucleotide
  Antisense strand to SEQ ID NO: 1085190
aagcuugagagccuucgcu

SEQ ID NO: 1085192 - RNA, 19 nt, Artificial Sequence
  Description of Artificial Sequence: Synthetic oligonucleotide
  Sense strand starting at position 2443 of SEQ ID NO: 915509
ggagccgaugccugggaua

SEQ ID NO: 1085193 - RNA, 19 nt, Artificial Sequence
  Description of Artificial Sequence: Synthetic oligonucleotide
  Antisense strand to SEQ ID NO: 1085192
uaucccaggcaucggcucc

SEQ ID NO: 1085194 - RNA, 19 nt, Artificial Sequence
  Description of Artificial Sequence: Synthetic oligonucleotide
  Sense strand starting at position 2445 of SEQ ID NO: 915509
agccgaugccugggauaaa

SEQ ID NO: 1085195 - RNA, 19 nt, Artificial Sequence
  Description of Artificial Sequence: Synthetic oligonucleotide
  Antisense strand to SEQ ID NO: 1085194
uuuaucccaggcaucggcu

SEQ ID NO: 1085196 - RNA, 19 nt, Artificial Sequence
  Description of Artificial Sequence: Synthetic oligonucleotide
  Sense strand starting at position 2504 of SEQ ID NO: 915509
ccggaugaaugggcugaaa

SEQ ID NO: 1085197 - RNA, 19 nt, Artificial Sequence
  Description of Artificial Sequence: Synthetic oligonucleotide
  Antisense strand to SEQ ID NO: 1085196
uuucagcccauucauccgg

SEQ ID NO: 1085198 - RNA, 19 nt, Artificial Sequence
  Description of Artificial Sequence: Synthetic oligonucleotide
  Sense strand starting at position 2626 of SEQ ID NO: 915509
gcucaaaugucgucuucuc

SEQ ID NO: 1085199 - RNA, 19 nt, Artificial Sequence
  Description of Artificial Sequence: Synthetic oligonucleotide
  Antisense strand to SEQ ID NO: 1085198
gagaagacgacauuugagc

SEQ ID NO: 1085200 - RNA, 19 nt, Artificial Sequence
  Description of Artificial Sequence: Synthetic oligonucleotide
  Sense strand starting at position 2683 of SEQ ID NO: 915509
cucccauaauacguucgaa

SEQ ID NO: 1085201 - RNA, 19 nt, Artificial Sequence
  Description of Artificial Sequence: Synthetic oligonucleotide
  Antisense strand to SEQ ID NO: 1085200
uucgaacguauuaugggag

SEQ ID NO: 1085202 - RNA, 19 nt, Artificial Sequence
  Description of Artificial Sequence: Synthetic oligonucleotide
  Sense strand starting at position 2686 of SEQ ID NO: 915509
ccauaauacguucgaaucu

SEQ ID NO: 1085203 - RNA, 19 nt, Artificial Sequence
  Description of Artificial Sequence: Synthetic oligonucleotide
  Antisense strand to SEQ ID NO: 1085202
agauucgaacguauuaugg

SEQ ID NO: 1085204 - RNA, 19 nt, Artificial Sequence
  Description of Artificial Sequence: Synthetic oligonucleotide
  Sense strand starting at position 2759 of SEQ ID NO: 915509
ugagcagggacuugaucau

SEQ ID NO: 1085205 - RNA, 19 nt, Artificial Sequence
  Description of Artificial Sequence: Synthetic oligonucleotide
  Antisense strand to SEQ ID NO: 1085204
augaucaagucccugcuca

SEQ ID NO: 1085206 - RNA, 19 nt, Artificial Sequence
  Description of Artificial Sequence: Synthetic oligonucleotide
  Sense strand starting at position 2802 of SEQ ID NO: 915509
ucaagaggcgcccaauaaa

SEQ ID NO: 1085207 - RNA, 19 nt, Artificial Sequence
  Description of Artificial Sequence: Synthetic oligonucleotide
  Antisense strand to SEQ ID NO: 1085206
uuuauugggcgccucuuga

SEQ ID NO: 1085208 - RNA, 19 nt, Artificial Sequence
  Description of Artificial Sequence: Synthetic oligonucleotide
  Sense strand starting at position 2838 of SEQ ID NO: 915509
ggaacaauguuucugguga

SEQ ID NO: 1085209 - RNA, 19 nt, Artificial Sequence
  Description of Artificial Sequence: Synthetic oligonucleotide
  Antisense strand to SEQ ID NO: 1085208
ucaccagaaacauuguucc

SEQ ID NO: 1085210 - RNA, 19 nt, Artificial Sequence
  Description of Artificial Sequence: Synthetic oligonucleotide
  Sense strand starting at position 2839 of SEQ ID NO: 915509
gaacaauguuucuggugaa

SEQ ID NO: 1085211 - RNA, 19 nt, Artificial Sequence
  Description of Artificial Sequence: Synthetic oligonucleotide
  Antisense strand to SEQ ID NO: 1085210
uucaccagaaacauuguuc

SEQ ID NO: 1085212 - RNA, 19 nt, Artificial Sequence
  Description of Artificial Sequence: Synthetic oligonucleotide
  Sense strand starting at position 2840 of SEQ ID NO: 915509
aacaauguuucuggugaaa

SEQ ID NO: 1085213 - RNA, 19 nt, Artificial Sequence
  Description of Artificial Sequence: Synthetic oligonucleotide
  Antisense strand to SEQ ID NO: 1085212
uuucaccagaaacauuguu

SEQ ID NO: 1085214 - RNA, 19 nt, Artificial Sequence
  Description of Artificial Sequence: Synthetic oligonucleotide
  Sense strand starting at position 2842 of SEQ ID NO: 915509
caauguuucuggugaaagc

SEQ ID NO: 1085215 - RNA, 19 nt, Artificial Sequence
  Description of Artificial Sequence: Synthetic oligonucleotide
  Antisense strand to SEQ ID NO: 1085214
gcuuucaccagaaacauug

SEQ ID NO: 1085216 - RNA, 19 nt, Artificial Sequence
  Description of Artificial Sequence: Synthetic oligonucleotide
  Sense strand starting at position 2843 of SEQ ID NO: 915509
aauguuucuggugaaagca

SEQ ID NO: 1085217 - RNA, 19 nt, Artificial Sequence
  Description of Artificial Sequence: Synthetic oligonucleotide
  Antisense strand to SEQ ID NO: 1085216
ugcuuucaccagaaacauu

SEQ ID NO: 1085218 - RNA, 19 nt, Artificial Sequence
  Description of Artificial Sequence: Synthetic oligonucleotide
  Sense strand starting at position 2852 of SEQ ID NO: 915509
ggugaaagcauuugugucu

SEQ ID NO: 1085219 - RNA, 19 nt, Artificial Sequence
  Description of Artificial Sequence: Synthetic oligonucleotide
  Antisense strand to SEQ ID NO: 1085218
agacacaaaugcuuucacc

SEQ ID NO: 1085220 - RNA, 19 nt, Artificial Sequence
  Description of Artificial Sequence: Synthetic oligonucleotide
  Sense strand starting at position 2853 of SEQ ID NO: 915509
gugaaagcauuugugucuu

SEQ ID NO: 1085221 - RNA, 19 nt, Artificial Sequence
  Description of Artificial Sequence: Synthetic oligonucleotide
  Antisense strand to SEQ ID NO: 1085220
aagacacaaaugcuuucac

SEQ ID NO: 1085222 - RNA, 19 nt, Artificial Sequence
  Description of Artificial Sequence: Synthetic oligonucleotide
  Sense strand starting at position 2996 of SEQ ID NO: 915509
agggauucuugccugccua

SEQ ID NO: 1085223 - RNA, 19 nt, Artificial Sequence
  Description of Artificial Sequence: Synthetic oligonucleotide
  Antisense strand to SEQ ID NO: 1085222
uaggcaggcaagaaucccu

SEQ ID NO: 1085224 - RNA, 19 nt, Artificial Sequence
  Description of Artificial Sequence: Synthetic oligonucleotide
  Sense strand starting at position 3278 of SEQ ID NO: 915509
gaaggugagguuugggaga

SEQ ID NO: 1085225 - RNA, 19 nt, Artificial Sequence
  Description of Artificial Sequence: Synthetic oligonucleotide
  Antisense strand to SEQ ID NO: 1085224
ucucccaaaccucaccuuc

SEQ ID NO: 1085226 - RNA, 19 nt, Artificial Sequence
  Description of Artificial Sequence: Synthetic oligonucleotide
  Sense strand starting at position 3280 of SEQ ID NO: 915509
aggugagguuugggagaga

SEQ ID NO: 1085227 - RNA, 19 nt, Artificial Sequence
  Description of Artificial Sequence: Synthetic oligonucleotide
  Antisense strand to SEQ ID NO: 1085226
ucucucccaaaccucaccu

SEQ ID NO: 1085228 - RNA, 19 nt, Artificial Sequence
  Description of Artificial Sequence: Synthetic oligonucleotide
  Sense strand starting at position 3317 of SEQ ID NO: 915509
ugagaaagguuggcucaca

SEQ ID NO: 1085229 - RNA, 19 nt, Artificial Sequence
  Description of Artificial Sequence: Synthetic oligonucleotide
  Antisense strand to SEQ ID NO: 1085228
ugugagccaaccuuucuca

SEQ ID NO: 1085230 - RNA, 19 nt, Artificial Sequence
  Description of Artificial Sequence: Synthetic oligonucleotide
  Sense strand starting at position 3318 of SEQ ID NO: 915509
gagaaagguuggcucacau

SEQ ID NO: 1085231 - RNA, 19 nt, Artificial Sequence
  Description of Artificial Sequence: Synthetic oligonucleotide
  Antisense strand to SEQ ID NO: 1085230
augugagccaaccuuucuc

SEQ ID NO: 1085232 - RNA, 19 nt, Artificial Sequence
  Description of Artificial Sequence: Synthetic oligonucleotide
  Sense strand starting at position 3632 of SEQ ID NO: 915509
gggucucugaggcaggaua

SEQ ID NO: 1085233 - RNA, 19 nt, Artificial Sequence
  Description of Artificial Sequence: Synthetic oligonucleotide
  Antisense strand to SEQ ID NO: 1085232
uauccugccucagagaccc

SEQ ID NO: 1085234 - RNA, 19 nt, Artificial Sequence
  Description of Artificial Sequence: Synthetic oligonucleotide
  Sense strand starting at position 3634 of SEQ ID NO: 915509
gucucugaggcaggauaaa

SEQ ID NO: 1085235 - RNA, 19 nt, Artificial Sequence
  Description of Artificial Sequence: Synthetic oligonucleotide
  Antisense strand to SEQ ID NO: 1085234
uuuauccugccucagagac

SEQ ID NO: 1085236 - RNA, 19 nt, Artificial Sequence
  Description of Artificial Sequence: Synthetic oligonucleotide
  Sense strand starting at position 69 of SEQ ID NO: 915510
agugcuucugcacaaggga

SEQ ID NO: 1085237 - RNA, 19 nt, Artificial Sequence
  Description of Artificial Sequence: Synthetic oligonucleotide
  Antisense strand to SEQ ID NO: 1085236
ucccuugugcagaagcacu

SEQ ID NO: 1085238 - RNA, 19 nt, Artificial Sequence
  Description of Artificial Sequence: Synthetic oligonucleotide
  Sense strand starting at position 211 of SEQ ID NO: 915510
ggaggacacuuguccacau

SEQ ID NO: 1085239 - RNA, 19 nt, Artificial Sequence
  Description of Artificial Sequence: Synthetic oligonucleotide
  Antisense strand to SEQ ID NO: 1085238
auguggacaaguguccucc

SEQ ID NO: 1085240 - RNA, 19 nt, Artificial Sequence
  Description of Artificial Sequence: Synthetic oligonucleotide
  Sense strand starting at position 556 of SEQ ID NO: 915510
auaugcguggcuucaguua

SEQ ID NO: 1085241 - RNA, 19 nt, Artificial Sequence
  Description of Artificial Sequence: Synthetic oligonucleotide
  Antisense strand to SEQ ID NO: 1085240
uaacugaagccacgcauau

SEQ ID NO: 1085242 - RNA, 19 nt, Artificial Sequence
  Description of Artificial Sequence: Synthetic oligonucleotide
  Sense strand starting at position 751 of SEQ ID NO: 915510
gagagaaaguacuuagguu

SEQ ID NO: 1085243 - RNA, 19 nt, Artificial Sequence
  Description of Artificial Sequence: Synthetic oligonucleotide
  Antisense strand to SEQ ID NO: 1085242
aaccuaaguacuuucucuc

SEQ ID NO: 1085244 - RNA, 19 nt, Artificial Sequence
  Description of Artificial Sequence: Synthetic oligonucleotide
  Sense strand starting at position 755 of SEQ ID NO: 915510
gaaaguacuuagguuauau

SEQ ID NO: 1085245 - RNA, 19 nt, Artificial Sequence
  Description of Artificial Sequence: Synthetic oligonucleotide
  Antisense strand to SEQ ID NO: 1085244
auauaaccuaaguacuuuc

SEQ ID NO: 1085246 - RNA, 19 nt, Artificial Sequence
  Description of Artificial Sequence: Synthetic oligonucleotide
  Sense strand starting at position 881 of SEQ ID NO: 915510
gcccuuccacaguauuaag

SEQ ID NO: 1085247 - RNA, 19 nt, Artificial Sequence
  Description of Artificial Sequence: Synthetic oligonucleotide
  Antisense strand to SEQ ID NO: 1085246
cuuaauacuguggaagggc

SEQ ID NO: 1085248 - RNA, 19 nt, Artificial Sequence
  Description of Artificial Sequence: Synthetic oligonucleotide
  Sense strand starting at position 1145 of SEQ ID NO: 915510
ccacacagaucugucuuua

SEQ ID NO: 1085249 - RNA, 19 nt, Artificial Sequence
  Description of Artificial Sequence: Synthetic oligonucleotide
  Antisense strand to SEQ ID NO: 1085248
uaaagacagaucugugugg

SEQ ID NO: 1085250 - RNA, 19 nt, Artificial Sequence
  Description of Artificial Sequence: Synthetic oligonucleotide
  Sense strand starting at position 1149 of SEQ ID NO: 915510
acagaucugucuuuauggu

SEQ ID NO: 1085251 - RNA, 19 nt, Artificial Sequence
  Description of Artificial Sequence: Synthetic oligonucleotide
  Antisense strand to SEQ ID NO: 1085250
accauaaagacagaucugu

SEQ ID NO: 1085252 - RNA, 19 nt, Artificial Sequence
  Description of Artificial Sequence: Synthetic oligonucleotide
  Sense strand starting at position 1158 of SEQ ID NO: 915510
ucuuuauggucccugguau

SEQ ID NO: 1085253 - RNA, 19 nt, Artificial Sequence
  Description of Artificial Sequence: Synthetic oligonucleotide
  Antisense strand to SEQ ID NO: 1085252
auaccagggaccauaaaga

SEQ ID NO: 1085254 - RNA, 19 nt, Artificial Sequence
  Description of Artificial Sequence: Synthetic oligonucleotide
  Sense strand starting at position 1159 of SEQ ID NO: 915510
cuuuauggucccugguaua

SEQ ID NO: 1085255 - RNA, 19 nt, Artificial Sequence
  Description of Artificial Sequence: Synthetic oligonucleotide
  Antisense strand to SEQ ID NO: 1085254
uauaccagggaccauaaag

SEQ ID NO: 1085256 - RNA, 19 nt, Artificial Sequence
  Description of Artificial Sequence: Synthetic oligonucleotide
  Sense strand starting at position 1276 of SEQ ID NO: 915510
ccaaguaucuaacugcuga

SEQ ID NO: 1085257 - RNA, 19 nt, Artificial Sequence
  Description of Artificial Sequence: Synthetic oligonucleotide
  Antisense strand to SEQ ID NO: 1085256
ucagcaguuagauacuugg

SEQ ID NO: 1085258 - RNA, 19 nt, Artificial Sequence
  Description of Artificial Sequence: Synthetic oligonucleotide
  Sense strand starting at position 1354 of SEQ ID NO: 915510
gucagcgucaacguugaua

SEQ ID NO: 1085259 - RNA, 19 nt, Artificial Sequence
  Description of Artificial Sequence: Synthetic oligonucleotide
  Antisense strand to SEQ ID NO: 1085258
uaucaacguugacgcugac

SEQ ID NO: 1085260 - RNA, 19 nt, Artificial Sequence
  Description of Artificial Sequence: Synthetic oligonucleotide
  Sense strand starting at position 1357 of SEQ ID NO: 915510
agcgucaacguugauaaga

SEQ ID NO: 1085261 - RNA, 19 nt, Artificial Sequence
  Description of Artificial Sequence: Synthetic oligonucleotide
  Antisense strand to SEQ ID NO: 1085260
ucuuaucaacguugacgcu

SEQ ID NO: 1085262 - RNA, 19 nt, Artificial Sequence
  Description of Artificial Sequence: Synthetic oligonucleotide
  Sense strand starting at position 1368 of SEQ ID NO: 915510
ugauaagauacuuggcaga

SEQ ID NO: 1085263 - RNA, 19 nt, Artificial Sequence
  Description of Artificial Sequence: Synthetic oligonucleotide
  Antisense strand to SEQ ID NO: 1085262
ucugccaaguaucuuauca

SEQ ID NO: 1085264 - RNA, 19 nt, Artificial Sequence
  Description of Artificial Sequence: Synthetic oligonucleotide
  Sense strand starting at position 1390 of SEQ ID NO: 915510
ggccuuuaagcacauuaca

SEQ ID NO: 1085265 - RNA, 19 nt, Artificial Sequence
  Description of Artificial Sequence: Synthetic oligonucleotide
  Antisense strand to SEQ ID NO: 1085264
uguaaugugcuuaaaggcc

SEQ ID NO: 1085266 - RNA, 19 nt, Artificial Sequence
  Description of Artificial Sequence: Synthetic oligonucleotide
  Sense strand starting at position 1433 of SEQ ID NO: 915510
agaggaggcgcucaagaau

SEQ ID NO: 1085267 - RNA, 19 nt, Artificial Sequence
  Description of Artificial Sequence: Synthetic oligonucleotide
  Antisense strand to SEQ ID NO: 1085266
auucuugagcgccuccucu

SEQ ID NO: 1085268 - RNA, 19 nt, Artificial Sequence
  Description of Artificial Sequence: Synthetic oligonucleotide
  Sense strand starting at position 1436 of SEQ ID NO: 915510
ggaggcgcucaagaauaga

SEQ ID NO: 1085269 - RNA, 19 nt, Artificial Sequence
  Description of Artificial Sequence: Synthetic oligonucleotide
  Antisense strand to SEQ ID NO: 1085268
ucuauucuugagcgccucc

SEQ ID NO: 1085270 - RNA, 19 nt, Artificial Sequence
  Description of Artificial Sequence: Synthetic oligonucleotide
  Sense strand starting at position 1889 of SEQ ID NO: 915510
guuauaacucaccagaggu

SEQ ID NO: 1085271 - RNA, 19 nt, Artificial Sequence
  Description of Artificial Sequence: Synthetic oligonucleotide
  Antisense strand to SEQ ID NO: 1085270
accucuggugaguuauaac

SEQ ID NO: 1085272 - RNA, 19 nt, Artificial Sequence
  Description of Artificial Sequence: Synthetic oligonucleotide
  Sense strand starting at position 1943 of SEQ ID NO: 915510
gcaggaacugucuguauuc

SEQ ID NO: 1085273 - RNA, 19 nt, Artificial Sequence
  Description of Artificial Sequence: Synthetic oligonucleotide
  Antisense strand to SEQ ID NO: 1085272
gaauacagacaguuccugc

SEQ ID NO: 1085274 - RNA, 19 nt, Artificial Sequence
  Description of Artificial Sequence: Synthetic oligonucleotide
  Sense strand starting at position 1945 of SEQ ID NO: 915510
aggaacugucuguauucua

SEQ ID NO: 1085275 - RNA, 19 nt, Artificial Sequence
  Description of Artificial Sequence: Synthetic oligonucleotide
  Antisense strand to SEQ ID NO: 1085274
uagaauacagacaguuccu

SEQ ID NO: 1085276 - RNA, 19 nt, Artificial Sequence
  Description of Artificial Sequence: Synthetic oligonucleotide
  Sense strand starting at position 1954 of SEQ ID NO: 915510
cuguauucuagagggccaa

SEQ ID NO: 1085277 - RNA, 19 nt, Artificial Sequence
  Description of Artificial Sequence: Synthetic oligonucleotide
  Antisense strand to SEQ ID NO: 1085276
uuggcccucuagaauacag

SEQ ID NO: 1085278 - RNA, 19 nt, Artificial Sequence
  Description of Artificial Sequence: Synthetic oligonucleotide
  Sense strand starting at position 1955 of SEQ ID NO: 915510
uguauucuagagggccaaa

SEQ ID NO: 1085279 - RNA, 19 nt, Artificial Sequence
  Description of Artificial Sequence: Synthetic oligonucleotide
  Antisense strand to SEQ ID NO: 1085278
uuuggcccucuagaauaca

SEQ ID NO: 1085280 - RNA, 19 nt, Artificial Sequence
  Description of Artificial Sequence: Synthetic oligonucleotide
  Sense strand starting at position 1984 of SEQ ID NO: 915510
uggagagauuuccagaccu

SEQ ID NO: 1085281 - RNA, 19 nt, Artificial Sequence
  Description of Artificial Sequence: Synthetic oligonucleotide
  Antisense strand to SEQ ID NO: 1085280
aggucuggaaaucucucca

SEQ ID NO: 1085282 - RNA, 19 nt, Artificial Sequence
  Description of Artificial Sequence: Synthetic oligonucleotide
  Sense strand starting at position 2043 of SEQ ID NO: 915510
uguugagaggcacauguua

SEQ ID NO: 1085283 - RNA, 19 nt, Artificial Sequence
  Description of Artificial Sequence: Synthetic oligonucleotide
  Antisense strand to SEQ ID NO: 1085282
uaacaugugccucucaaca

SEQ ID NO: 1085284 - RNA, 19 nt, Artificial Sequence
  Description of Artificial Sequence: Synthetic oligonucleotide
  Sense strand starting at position 2045 of SEQ ID NO: 915510
uugagaggcacauguuaaa

SEQ ID NO: 1085285 - RNA, 19 nt, Artificial Sequence
  Description of Artificial Sequence: Synthetic oligonucleotide
  Antisense strand to SEQ ID NO: 1085284
uuuaacaugugccucucaa

SEQ ID NO: 1085286 - RNA, 19 nt, Artificial Sequence
  Description of Artificial Sequence: Synthetic oligonucleotide
  Sense strand starting at position 2070 of SEQ ID NO: 915510
uguagauucugauauuucu

SEQ ID NO: 1085287 - RNA, 19 nt, Artificial Sequence
  Description of Artificial Sequence: Synthetic oligonucleotide
  Antisense strand to SEQ ID NO: 1085286
agaaauaucagaaucuaca

SEQ ID NO: 1085288 - RNA, 19 nt, Artificial Sequence
  Description of Artificial Sequence: Synthetic oligonucleotide
  Sense strand starting at position 2357 of SEQ ID NO: 915510
gcauauucucuuuagucga

SEQ ID NO: 1085289 - RNA, 19 nt, Artificial Sequence
  Description of Artificial Sequence: Synthetic oligonucleotide
  Antisense strand to SEQ ID NO: 1085288
ucgacuaaagagaauaugc

SEQ ID NO: 1085290 - RNA, 19 nt, Artificial Sequence
  Description of Artificial Sequence: Synthetic oligonucleotide
  Sense strand starting at position 2359 of SEQ ID NO: 915510
auauucucuuuagucgaaa

SEQ ID NO: 1085291 - RNA, 19 nt, Artificial Sequence
  Description of Artificial Sequence: Synthetic oligonucleotide
  Antisense strand to SEQ ID NO: 1085290
uuucgacuaaagagaauau

SEQ ID NO: 1085292 - RNA, 19 nt, Artificial Sequence
  Description of Artificial Sequence: Synthetic oligonucleotide
  Sense strand starting at position 2360 of SEQ ID NO: 915510
uauucucuuuagucgaaag

SEQ ID NO: 1085293 - RNA, 19 nt, Artificial Sequence
  Description of Artificial Sequence: Synthetic oligonucleotide
  Antisense strand to SEQ ID NO: 1085292
cuuucgacuaaagagaaua

SEQ ID NO: 1085294 - RNA, 19 nt, Artificial Sequence
  Description of Artificial Sequence: Synthetic oligonucleotide
  Sense strand starting at position 2362 of SEQ ID NO: 915510
uucucuuuagucgaaagac

SEQ ID NO: 1085295 - RNA, 19 nt, Artificial Sequence
  Description of Artificial Sequence: Synthetic oligonucleotide
  Antisense strand to SEQ ID NO: 1085294
gucuuucgacuaaagagaa

SEQ ID NO: 1085296 - RNA, 19 nt, Artificial Sequence
  Description of Artificial Sequence: Synthetic oligonucleotide
  Sense strand starting at position 2508 of SEQ ID NO: 915510
cacccuguguggcuauaau

SEQ ID NO: 1085297 - RNA, 19 nt, Artificial Sequence
  Description of Artificial Sequence: Synthetic oligonucleotide
  Antisense strand to SEQ ID NO: 1085296
auuauagccacacagggug

SEQ ID NO: 1085298 - RNA, 19 nt, Artificial Sequence
  Description of Artificial Sequence: Synthetic oligonucleotide
  Sense strand starting at position 2618 of SEQ ID NO: 915510
ucacuccggcauuaguaua

SEQ ID NO: 1085299 - RNA, 19 nt, Artificial Sequence
  Description of Artificial Sequence: Synthetic oligonucleotide
  Antisense strand to SEQ ID NO: 1085298
uauacuaaugccggaguga

SEQ ID NO: 1085300 - RNA, 19 nt, Artificial Sequence
  Description of Artificial Sequence: Synthetic oligonucleotide
  Sense strand starting at position 2663 of SEQ ID NO: 915510
uggcaccugucaguaauga

SEQ ID NO: 1085301 - RNA, 19 nt, Artificial Sequence
  Description of Artificial Sequence: Synthetic oligonucleotide
  Antisense strand to SEQ ID NO: 1085300
ucauuacugacaggugcca

SEQ ID NO: 1085302 - RNA, 19 nt, Artificial Sequence
  Description of Artificial Sequence: Synthetic oligonucleotide
  Sense strand starting at position 2777 of SEQ ID NO: 915510
auacaaauauguccaaguu

SEQ ID NO: 1085303 - RNA, 19 nt, Artificial Sequence
  Description of Artificial Sequence: Synthetic oligonucleotide
  Antisense strand to SEQ ID NO: 1085302
aacuuggacauauuuguau

SEQ ID NO: 1085304 - RNA, 19 nt, Artificial Sequence
  Description of Artificial Sequence: Synthetic oligonucleotide
  Sense strand starting at position 2887 of SEQ ID NO: 915510
augucaggaugaucugaca

SEQ ID NO: 1085305 - RNA, 19 nt, Artificial Sequence
  Description of Artificial Sequence: Synthetic oligonucleotide
  Antisense strand to SEQ ID NO: 1085304
ugucagaucauccugacau

SEQ ID NO: 1085306 - RNA, 19 nt, Artificial Sequence
  Description of Artificial Sequence: Synthetic oligonucleotide
  Sense strand starting at position 2890 of SEQ ID NO: 915510
ucaggaugaucugacaaag

SEQ ID NO: 1085307 - RNA, 19 nt, Artificial Sequence
  Description of Artificial Sequence: Synthetic oligonucleotide
  Antisense strand to SEQ ID NO: 1085306
cuuugucagaucauccuga

SEQ ID NO: 1085308 - RNA, 19 nt, Artificial Sequence
  Description of Artificial Sequence: Synthetic oligonucleotide
  Sense strand starting at position 3102 of SEQ ID NO: 915510
uggaucacucaagguuaga

SEQ ID NO: 1085309 - RNA, 19 nt, Artificial Sequence
  Description of Artificial Sequence: Synthetic oligonucleotide
  Antisense strand to SEQ ID NO: 1085308
ucuaaccuugagugaucca

SEQ ID NO: 1085310 - RNA, 19 nt, Artificial Sequence
  Description of Artificial Sequence: Synthetic oligonucleotide
  Sense strand starting at position 3357 of SEQ ID NO: 915510
agaauacaguaacuguaau

SEQ ID NO: 1085311 - RNA, 19 nt, Artificial Sequence
  Description of Artificial Sequence: Synthetic oligonucleotide
  Antisense strand to SEQ ID NO: 1085310
auuacaguuacuguauucu

SEQ ID NO: 1085312 - RNA, 19 nt, Artificial Sequence
  Description of Artificial Sequence: Synthetic oligonucleotide
  Sense strand starting at position 3505 of SEQ ID NO: 915510
cagagucucagggaguuau

SEQ ID NO: 1085313 - RNA, 19 nt, Artificial Sequence
  Description of Artificial Sequence: Synthetic oligonucleotide
  Antisense strand to SEQ ID NO: 1085312
auaacucccugagacucug

SEQ ID NO: 1085314 - RNA, 19 nt, Artificial Sequence
  Description of Artificial Sequence: Synthetic oligonucleotide
  Sense strand starting at position 3612 of SEQ ID NO: 915510
ucccaaauuugcugagaga

SEQ ID NO: 1085315 - RNA, 19 nt, Artificial Sequence
  Description of Artificial Sequence: Synthetic oligonucleotide
  Antisense strand to SEQ ID NO: 1085314
ucucucagcaaauuuggga

SEQ ID NO: 1085316 - RNA, 19 nt, Artificial Sequence
  Description of Artificial Sequence: Synthetic oligonucleotide
  Sense strand starting at position 75 of SEQ ID NO: 915511
agccgguguuggugugaau

SEQ ID NO: 1085317 - RNA, 19 nt, Artificial Sequence
  Description of Artificial Sequence: Synthetic oligonucleotide
  Antisense strand to SEQ ID NO: 1085316
auucacaccaacaccggcu

SEQ ID NO: 1085318 - RNA, 19 nt, Artificial Sequence
  Description of Artificial Sequence: Synthetic oligonucleotide
  Sense strand starting at position 76 of SEQ ID NO: 915511
gccgguguuggugugaauu

SEQ ID NO: 1085319 - RNA, 19 nt, Artificial Sequence
  Description of Artificial Sequence: Synthetic oligonucleotide
  Antisense strand to SEQ ID NO: 1085318
aauucacaccaacaccggc

SEQ ID NO: 1085320 - RNA, 19 nt, Artificial Sequence
  Description of Artificial Sequence: Synthetic oligonucleotide
  Sense strand starting at position 78 of SEQ ID NO: 915511
cgguguuggugugaauucu

SEQ ID NO: 1085321 - RNA, 19 nt, Artificial Sequence
  Description of Artificial Sequence: Synthetic oligonucleotide
  Antisense strand to SEQ ID NO: 1085320
agaauucacaccaacaccg

SEQ ID NO: 1085322 - RNA, 19 nt, Artificial Sequence
  Description of Artificial Sequence: Synthetic oligonucleotide
  Sense strand starting at position 134 of SEQ ID NO: 915511
gguuacaagccugggagau

SEQ ID NO: 1085323 - RNA, 19 nt, Artificial Sequence
  Description of Artificial Sequence: Synthetic oligonucleotide
  Antisense strand to SEQ ID NO: 1085322
aucucccaggcuuguaacc

SEQ ID NO: 1085324 - RNA, 19 nt, Artificial Sequence
  Description of Artificial Sequence: Synthetic oligonucleotide
  Sense strand starting at position 147 of SEQ ID NO: 915511
ggagaugucuuccaaguuc

SEQ ID NO: 1085325 - RNA, 19 nt, Artificial Sequence
  Description of Artificial Sequence: Synthetic oligonucleotide
  Antisense strand to SEQ ID NO: 1085324
gaacuuggaagacaucucc

SEQ ID NO: 1085326 - RNA, 19 nt, Artificial Sequence
  Description of Artificial Sequence: Synthetic oligonucleotide
  Sense strand starting at position 338 of SEQ ID NO: 915511
cuuggccucucugcugaaa

SEQ ID NO: 1085327 - RNA, 19 nt, Artificial Sequence
  Description of Artificial Sequence: Synthetic oligonucleotide
  Antisense strand to SEQ ID NO: 1085326
uuucagcagagaggccaag

SEQ ID NO: 1085328 - RNA, 19 nt, Artificial Sequence
  Description of Artificial Sequence: Synthetic oligonucleotide
  Sense strand starting at position 363 of SEQ ID NO: 915511
gauaaugugcucuguggua

SEQ ID NO: 1085329 - RNA, 19 nt, Artificial Sequence
  Description of Artificial Sequence: Synthetic oligonucleotide
  Antisense strand to SEQ ID NO: 1085328
uaccacagagcacauuauc

SEQ ID NO: 1085330 - RNA, 19 nt, Artificial Sequence
  Description of Artificial Sequence: Synthetic oligonucleotide
  Sense strand starting at position 365 of SEQ ID NO: 915511
uaaugugcucugugguaca

SEQ ID NO: 1085331 - RNA, 19 nt, Artificial Sequence
  Description of Artificial Sequence: Synthetic oligonucleotide
  Antisense strand to SEQ ID NO: 1085330
uguaccacagagcacauua

SEQ ID NO: 1085332 - RNA, 19 nt, Artificial Sequence
  Description of Artificial Sequence: Synthetic oligonucleotide
  Sense strand starting at position 384 of SEQ ID NO: 915511
ugucuacacgccugucauu

SEQ ID NO: 1085333 - RNA, 19 nt, Artificial Sequence
  Description of Artificial Sequence: Synthetic oligonucleotide
  Antisense strand to SEQ ID NO: 1085332
aaugacaggcguguagaca

SEQ ID NO: 1085334 - RNA, 19 nt, Artificial Sequence
  Description of Artificial Sequence: Synthetic oligonucleotide
  Sense strand starting at position 412 of SEQ ID NO: 915511
agcaucagugacuaaacau

SEQ ID NO: 1085335 - RNA, 19 nt, Artificial Sequence
  Description of Artificial Sequence: Synthetic oligonucleotide
  Antisense strand to SEQ ID NO: 1085334
auguuuagucacugaugcu

SEQ ID NO: 1085336 - RNA, 19 nt, Artificial Sequence
  Description of Artificial Sequence: Synthetic oligonucleotide
  Sense strand starting at position 594 of SEQ ID NO: 915511
uuggaaugugcucaugagu

SEQ ID NO: 1085337 - RNA, 19 nt, Artificial Sequence
  Description of Artificial Sequence: Synthetic oligonucleotide
  Antisense strand to SEQ ID NO: 1085336
acucaugagcacauuccaa

SEQ ID NO: 1085338 - RNA, 19 nt, Artificial Sequence
  Description of Artificial Sequence: Synthetic oligonucleotide
  Sense strand starting at position 603 of SEQ ID NO: 915511
gcucaugaguccucucuac

SEQ ID NO: 1085339 - RNA, 19 nt, Artificial Sequence
  Description of Artificial Sequence: Synthetic oligonucleotide
  Antisense strand to SEQ ID NO: 1085338
guagagaggacucaugagc

SEQ ID NO: 1085340 - RNA, 19 nt, Artificial Sequence
  Description of Artificial Sequence: Synthetic oligonucleotide
  Sense strand starting at position 1014 of SEQ ID NO: 915511
gcgcguaagcuccaagaug

SEQ ID NO: 1085341 - RNA, 19 nt, Artificial Sequence
  Description of Artificial Sequence: Synthetic oligonucleotide
  Antisense strand to SEQ ID NO: 1085340
caucuuggagcuuacgcgc

SEQ ID NO: 1085342 - RNA, 19 nt, Artificial Sequence
  Description of Artificial Sequence: Synthetic oligonucleotide
  Sense strand starting at position 1230 of SEQ ID NO: 915511
gggaccaucuugucacauu

SEQ ID NO: 1085343 - RNA, 19 nt, Artificial Sequence
  Description of Artificial Sequence: Synthetic oligonucleotide
  Antisense strand to SEQ ID NO: 1085342
aaugugacaagaugguccc

SEQ ID NO: 1085344 - RNA, 19 nt, Artificial Sequence
  Description of Artificial Sequence: Synthetic oligonucleotide
  Sense strand starting at position 1231 of SEQ ID NO: 915511
ggaccaucuugucacauuu

SEQ ID NO: 1085345 - RNA, 19 nt, Artificial Sequence
  Description of Artificial Sequence: Synthetic oligonucleotide
  Antisense strand to SEQ ID NO: 1085344
aaaugugacaagauggucc

SEQ ID NO: 1085346 - RNA, 19 nt, Artificial Sequence
  Description of Artificial Sequence: Synthetic oligonucleotide
  Sense strand starting at position 1252 of SEQ ID NO: 915511
uuugcaaagucaccuuaga

SEQ ID NO: 1085347 - RNA, 19 nt, Artificial Sequence
  Description of Artificial Sequence: Synthetic oligonucleotide
  Antisense strand to SEQ ID NO: 1085346
ucuaaggugacuuugcaaa

SEQ ID NO: 1085348 - RNA, 19 nt, Artificial Sequence
  Description of Artificial Sequence: Synthetic oligonucleotide
  Sense strand starting at position 1326 of SEQ ID NO: 915511
gcaguuucuaggugccuga

SEQ ID NO: 1085349 - RNA, 19 nt, Artificial Sequence
  Description of Artificial Sequence: Synthetic oligonucleotide
  Antisense strand to SEQ ID NO: 1085348
ucaggcaccuagaaacugc

SEQ ID NO: 1085350 - RNA, 19 nt, Artificial Sequence
  Description of Artificial Sequence: Synthetic oligonucleotide
  Sense strand starting at position 1330 of SEQ ID NO: 915511
uuucuaggugccugaaacu

SEQ ID NO: 1085351 - RNA, 19 nt, Artificial Sequence
  Description of Artificial Sequence: Synthetic oligonucleotide
  Antisense strand to SEQ ID NO: 1085350
aguuucaggcaccuagaaa

SEQ ID NO: 1085352 - RNA, 19 nt, Artificial Sequence
  Description of Artificial Sequence: Synthetic oligonucleotide
  Sense strand starting at position 1556 of SEQ ID NO: 915511
gcacaaugugaaggaacau

SEQ ID NO: 1085353 - RNA, 19 nt, Artificial Sequence
  Description of Artificial Sequence: Synthetic oligonucleotide
  Antisense strand to SEQ ID NO: 1085352
auguuccuucacauugugc

SEQ ID NO: 1085354 - RNA, 19 nt, Artificial Sequence
  Description of Artificial Sequence: Synthetic oligonucleotide
  Sense strand starting at position 1565 of SEQ ID NO: 915511
gaaggaacaugguugucua

SEQ ID NO: 1085355 - RNA, 19 nt, Artificial Sequence
  Description of Artificial Sequence: Synthetic oligonucleotide
  Antisense strand to SEQ ID NO: 1085354
uagacaaccauguuccuuc

SEQ ID NO: 1085356 - RNA, 19 nt, Artificial Sequence
  Description of Artificial Sequence: Synthetic oligonucleotide
  Sense strand starting at position 1568 of SEQ ID NO: 915511
ggaacaugguugucuagca

SEQ ID NO: 1085357 - RNA, 19 nt, Artificial Sequence
  Description of Artificial Sequence: Synthetic oligonucleotide
  Antisense strand to SEQ ID NO: 1085356
ugcuagacaaccauguucc

SEQ ID NO: 1085358 - RNA, 19 nt, Artificial Sequence
  Description of Artificial Sequence: Synthetic oligonucleotide
  Sense strand starting at position 1569 of SEQ ID NO: 915511
gaacaugguugucuagcaa

SEQ ID NO: 1085359 - RNA, 19 nt, Artificial Sequence
  Description of Artificial Sequence: Synthetic oligonucleotide
  Antisense strand to SEQ ID NO: 1085358
uugcuagacaaccauguuc

SEQ ID NO: 1085360 - RNA, 19 nt, Artificial Sequence
  Description of Artificial Sequence: Synthetic oligonucleotide
  Sense strand starting at position 1573 of SEQ ID NO: 915511
augguugucuagcaacuga

SEQ ID NO: 1085361 - RNA, 19 nt, Artificial Sequence
  Description of Artificial Sequence: Synthetic oligonucleotide
  Antisense strand to SEQ ID NO: 1085360
ucaguugcuagacaaccau

SEQ ID NO: 1085362 - RNA, 19 nt, Artificial Sequence
  Description of Artificial Sequence: Synthetic oligonucleotide
  Sense strand starting at position 1858 of SEQ ID NO: 915511
gacagcgaccauuauugua

SEQ ID NO: 1085363 - RNA, 19 nt, Artificial Sequence
  Description of Artificial Sequence: Synthetic oligonucleotide
  Antisense strand to SEQ ID NO: 1085362
uacaauaauggucgcuguc

SEQ ID NO: 1085364 - RNA, 19 nt, Artificial Sequence
  Description of Artificial Sequence: Synthetic oligonucleotide
  Sense strand starting at position 2269 of SEQ ID NO: 915511
acacgcaucuuccagggaa

SEQ ID NO: 1085365 - RNA, 19 nt, Artificial Sequence
  Description of Artificial Sequence: Synthetic oligonucleotide
  Antisense strand to SEQ ID NO: 1085364
uucccuggaagaugcgugu

SEQ ID NO: 1085366 - RNA, 19 nt, Artificial Sequence
  Description of Artificial Sequence: Synthetic oligonucleotide
  Sense strand starting at position 2308 of SEQ ID NO: 915511
ggagaaaugaggcagcagu

SEQ ID NO: 1085367 - RNA, 19 nt, Artificial Sequence
  Description of Artificial Sequence: Synthetic oligonucleotide
  Antisense strand to SEQ ID NO: 1085366
acugcugccucauuucucc

SEQ ID NO: 1085368 - RNA, 19 nt, Artificial Sequence
  Description of Artificial Sequence: Synthetic oligonucleotide
  Sense strand starting at position 2703 of SEQ ID NO: 915511
ucaggacauuucgguguua

SEQ ID NO: 1085369 - RNA, 19 nt, Artificial Sequence
  Description of Artificial Sequence: Synthetic oligonucleotide
  Antisense strand to SEQ ID NO: 1085368
uaacaccgaaauguccuga

SEQ ID NO: 1085370 - RNA, 19 nt, Artificial Sequence
  Description of Artificial Sequence: Synthetic oligonucleotide
  Sense strand starting at position 3106 of SEQ ID NO: 915511
ugcugcugcccggaaguua

SEQ ID NO: 1085371 - RNA, 19 nt, Artificial Sequence
  Description of Artificial Sequence: Synthetic oligonucleotide
  Antisense strand to SEQ ID NO: 1085370
uaacuuccgggcagcagca

SEQ ID NO: 1085372 - RNA, 19 nt, Artificial Sequence
  Description of Artificial Sequence: Synthetic oligonucleotide
  Sense strand starting at position 3275 of SEQ ID NO: 915511
gcagaugggucaugaggaa

SEQ ID NO: 1085373 - RNA, 19 nt, Artificial Sequence
  Description of Artificial Sequence: Synthetic oligonucleotide
  Antisense strand to SEQ ID NO: 1085372
uuccucaugacccaucugc

SEQ ID NO: 1085374 - RNA, 19 nt, Artificial Sequence
  Description of Artificial Sequence: Synthetic oligonucleotide
  Sense strand starting at position 3363 of SEQ ID NO: 915511
gacucuuggucccagagga

SEQ ID NO: 1085375 - RNA, 19 nt, Artificial Sequence
  Description of Artificial Sequence: Synthetic oligonucleotide
  Antisense strand to SEQ ID NO: 1085374
uccucugggaccaagaguc

SEQ ID NO: 1085376 - RNA, 19 nt, Artificial Sequence
  Description of Artificial Sequence: Synthetic oligonucleotide
  Sense strand starting at position 3530 of SEQ ID NO: 915511
ggcucaguauccuggacaa

SEQ ID NO: 1085377 - RNA, 19 nt, Artificial Sequence
  Description of Artificial Sequence: Synthetic oligonucleotide
  Antisense strand to SEQ ID NO: 1085376
uuguccaggauacugagcc

SEQ ID NO: 1085378 - RNA, 19 nt, Artificial Sequence
  Description of Artificial Sequence: Synthetic oligonucleotide
  Sense strand starting at position 3708 of SEQ ID NO: 915511
gacccugucuuccaggaau

SEQ ID NO: 1085379 - RNA, 19 nt, Artificial Sequence
  Description of Artificial Sequence: Synthetic oligonucleotide
  Antisense strand to SEQ ID NO: 1085378
auuccuggaagacaggguc

SEQ ID NO: 1085380 - RNA, 19 nt, Artificial Sequence
  Description of Artificial Sequence: Synthetic oligonucleotide
  Sense strand starting at position 3710 of SEQ ID NO: 915511
cccugucuuccaggaauag

SEQ ID NO: 1085381 - RNA, 19 nt, Artificial Sequence
  Description of Artificial Sequence: Synthetic oligonucleotide
  Antisense strand to SEQ ID NO: 1085380
cuauuccuggaagacaggg

SEQ ID NO: 1085382 - RNA, 19 nt, Artificial Sequence
  Description of Artificial Sequence: Synthetic oligonucleotide
  Sense strand starting at position 3722 of SEQ ID NO: 915511
ggaauagcccagcaugaau

SEQ ID NO: 1085383 - RNA, 19 nt, Artificial Sequence
  Description of Artificial Sequence: Synthetic oligonucleotide
  Antisense strand to SEQ ID NO: 1085382
auucaugcugggcuauucc

SEQ ID NO: 1085384 - RNA, 19 nt, Artificial Sequence
  Description of Artificial Sequence: Synthetic oligonucleotide
  Sense strand starting at position 442 of SEQ ID NO: 915512
ugggucaugcuucagaagu

SEQ ID NO: 1085385 - RNA, 19 nt, Artificial Sequence
  Description of Artificial Sequence: Synthetic oligonucleotide
  Antisense strand to SEQ ID NO: 1085384
acuucugaagcaugaccca

SEQ ID NO: 1085386 - RNA, 19 nt, Artificial Sequence
  Description of Artificial Sequence: Synthetic oligonucleotide
  Sense strand starting at position 470 of SEQ ID NO: 915512
gggaaagauugugcaacuu

SEQ ID NO: 1085387 - RNA, 19 nt, Artificial Sequence
  Description of Artificial Sequence: Synthetic oligonucleotide
  Antisense strand to SEQ ID NO: 1085386
aaguugcacaaucuuuccc

SEQ ID NO: 1085388 - RNA, 19 nt, Artificial Sequence
  Description of Artificial Sequence: Synthetic oligonucleotide
  Sense strand starting at position 559 of SEQ ID NO: 915512
aaggucuucucagcaauug

SEQ ID NO: 1085389 - RNA, 19 nt, Artificial Sequence
  Description of Artificial Sequence: Synthetic oligonucleotide
  Antisense strand to SEQ ID NO: 1085388
caauugcugagaagaccuu

SEQ ID NO: 1085390 - RNA, 19 nt, Artificial Sequence
  Description of Artificial Sequence: Synthetic oligonucleotide
  Sense strand starting at position 560 of SEQ ID NO: 915512
aggucuucucagcaauuga

SEQ ID NO: 1085391 - RNA, 19 nt, Artificial Sequence
  Description of Artificial Sequence: Synthetic oligonucleotide
  Antisense strand to SEQ ID NO: 1085390
ucaauugcugagaagaccu

SEQ ID NO: 1085392 - RNA, 19 nt, Artificial Sequence
  Description of Artificial Sequence: Synthetic oligonucleotide
  Sense strand starting at position 610 of SEQ ID NO: 915512
ucuaaauuccugugugaua

SEQ ID NO: 1085393 - RNA, 19 nt, Artificial Sequence
  Description of Artificial Sequence: Synthetic oligonucleotide
  Antisense strand to SEQ ID NO: 1085392
uaucacacaggaauuuaga

SEQ ID NO: 1085394 - RNA, 19 nt, Artificial Sequence
  Description of Artificial Sequence: Synthetic oligonucleotide
  Sense strand starting at position 611 of SEQ ID NO: 915512
cuaaauuccugugugauag

SEQ ID NO: 1085395 - RNA, 19 nt, Artificial Sequence
  Description of Artificial Sequence: Synthetic oligonucleotide
  Antisense strand to SEQ ID NO: 1085394
cuaucacacaggaauuuag

SEQ ID NO: 1085396 - RNA, 19 nt, Artificial Sequence
  Description of Artificial Sequence: Synthetic oligonucleotide
  Sense strand starting at position 650 of SEQ ID NO: 915512
ugagcauauaaaggguaaa

SEQ ID NO: 1085397 - RNA, 19 nt, Artificial Sequence
  Description of Artificial Sequence: Synthetic oligonucleotide
  Antisense strand to SEQ ID NO: 1085396
uuuacccuuuauaugcuca

SEQ ID NO: 1085398 - RNA, 19 nt, Artificial Sequence
  Description of Artificial Sequence: Synthetic oligonucleotide
  Sense strand starting at position 1492 of SEQ ID NO: 915512
uccugagaugaguaucugu

SEQ ID NO: 1085399 - RNA, 19 nt, Artificial Sequence
  Description of Artificial Sequence: Synthetic oligonucleotide
  Antisense strand to SEQ ID NO: 1085398
acagauacucaucucagga

SEQ ID NO: 1085400 - RNA, 19 nt, Artificial Sequence
  Description of Artificial Sequence: Synthetic oligonucleotide
  Sense strand starting at position 1607 of SEQ ID NO: 915512
auaugaaacuguucugcaa

SEQ ID NO: 1085401 - RNA, 19 nt, Artificial Sequence
  Description of Artificial Sequence: Synthetic oligonucleotide
  Antisense strand to SEQ ID NO: 1085400
uugcagaacaguuucauau

SEQ ID NO: 1085402 - RNA, 19 nt, Artificial Sequence
  Description of Artificial Sequence: Synthetic oligonucleotide
  Sense strand starting at position 1610 of SEQ ID NO: 915512
ugaaacuguucugcaauaa

SEQ ID NO: 1085403 - RNA, 19 nt, Artificial Sequence
  Description of Artificial Sequence: Synthetic oligonucleotide
  Antisense strand to SEQ ID NO: 1085402
uuauugcagaacaguuuca

SEQ ID NO: 1085404 - RNA, 19 nt, Artificial Sequence
  Description of Artificial Sequence: Synthetic oligonucleotide
  Sense strand starting at position 1662 of SEQ ID NO: 915512
ccaguuuggaaagguaauu

SEQ ID NO: 1085405 - RNA, 19 nt, Artificial Sequence
  Description of Artificial Sequence: Synthetic oligonucleotide
  Antisense strand to SEQ ID NO: 1085404
aauuaccuuuccaaacugg

SEQ ID NO: 1085406 - RNA, 19 nt, Artificial Sequence
  Description of Artificial Sequence: Synthetic oligonucleotide
  Sense strand starting at position 1942 of SEQ ID NO: 915512
acgguagugagcuaugauu

SEQ ID NO: 1085407 - RNA, 19 nt, Artificial Sequence
  Description of Artificial Sequence: Synthetic oligonucleotide
  Antisense strand to SEQ ID NO: 1085406
aaucauagcucacuaccgu

SEQ ID NO: 1085408 - RNA, 19 nt, Artificial Sequence
  Description of Artificial Sequence: Synthetic oligonucleotide
  Sense strand starting at position 1944 of SEQ ID NO: 915512
gguagugagcuaugauuaa

SEQ ID NO: 1085409 - RNA, 19 nt, Artificial Sequence
  Description of Artificial Sequence: Synthetic oligonucleotide
  Antisense strand to SEQ ID NO: 1085408
uuaaucauagcucacuacc

SEQ ID NO: 1085410 - RNA, 19 nt, Artificial Sequence
  Description of Artificial Sequence: Synthetic oligonucleotide
  Sense strand starting at position 1948 of SEQ ID NO: 915512
gugagcuaugauuaaaccu

SEQ ID NO: 1085411 - RNA, 19 nt, Artificial Sequence
  Description of Artificial Sequence: Synthetic oligonucleotide
  Antisense strand to SEQ ID NO: 1085410
agguuuaaucauagcucac

SEQ ID NO: 1085412 - RNA, 19 nt, Artificial Sequence
  Description of Artificial Sequence: Synthetic oligonucleotide
  Sense strand starting at position 1956 of SEQ ID NO: 915512
ugauuaaaccugugaauag

SEQ ID NO: 1085413 - RNA, 19 nt, Artificial Sequence
  Description of Artificial Sequence: Synthetic oligonucleotide
  Antisense strand to SEQ ID NO: 1085412
cuauucacagguuuaauca

SEQ ID NO: 1085414 - RNA, 19 nt, Artificial Sequence
  Description of Artificial Sequence: Synthetic oligonucleotide
  Sense strand starting at position 2021 of SEQ ID NO: 915512
cuggaaagccauuguugau

SEQ ID NO: 1085415 - RNA, 19 nt, Artificial Sequence
  Description of Artificial Sequence: Synthetic oligonucleotide
  Antisense strand to SEQ ID NO: 1085414
aucaacaauggcuuuccag

SEQ ID NO: 1085416 - RNA, 19 nt, Artificial Sequence
  Description of Artificial Sequence: Synthetic oligonucleotide
  Sense strand starting at position 2025 of SEQ ID NO: 915512
aaagccauuguugauuaga

SEQ ID NO: 1085417 - RNA, 19 nt, Artificial Sequence
  Description of Artificial Sequence: Synthetic oligonucleotide
  Antisense strand to SEQ ID NO: 1085416
ucuaaucaacaauggcuuu

SEQ ID NO: 1085418 - RNA, 19 nt, Artificial Sequence
  Description of Artificial Sequence: Synthetic oligonucleotide
  Sense strand starting at position 2027 of SEQ ID NO: 915512
agccauuguugauuagaac

SEQ ID NO: 1085419 - RNA, 19 nt, Artificial Sequence
  Description of Artificial Sequence: Synthetic oligonucleotide
  Antisense strand to SEQ ID NO: 1085418
guucuaaucaacaauggcu

SEQ ID NO: 1085420 - RNA, 19 nt, Artificial Sequence
  Description of Artificial Sequence: Synthetic oligonucleotide
  Sense strand starting at position 2028 of SEQ ID NO: 915512
gccauuguugauuagaaca

SEQ ID NO: 1085421 - RNA, 19 nt, Artificial Sequence
  Description of Artificial Sequence: Synthetic oligonucleotide
  Antisense strand to SEQ ID NO: 1085420
uguucuaaucaacaauggc

SEQ ID NO: 1085422 - RNA, 19 nt, Artificial Sequence
  Description of Artificial Sequence: Synthetic oligonucleotide
  Sense strand starting at position 2091 of SEQ ID NO: 915512
auucuaacagagugguaaa

SEQ ID NO: 1085423 - RNA, 19 nt, Artificial Sequence
  Description of Artificial Sequence: Synthetic oligonucleotide
  Antisense strand to SEQ ID NO: 1085422
uuuaccacucuguuagaau

SEQ ID NO: 1085424 - RNA, 19 nt, Artificial Sequence
  Description of Artificial Sequence: Synthetic oligonucleotide
  Sense strand starting at position 2380 of SEQ ID NO: 915512
uuagaagaggaacguuauu

SEQ ID NO: 1085425 - RNA, 19 nt, Artificial Sequence
  Description of Artificial Sequence: Synthetic oligonucleotide
  Antisense strand to SEQ ID NO: 1085424
aauaacguuccucuucuaa

SEQ ID NO: 1085426 - RNA, 19 nt, Artificial Sequence
  Description of Artificial Sequence: Synthetic oligonucleotide
  Sense strand starting at position 2492 of SEQ ID NO: 915512
cugauuaccuuggugacaa

SEQ ID NO: 1085427 - RNA, 19 nt, Artificial Sequence
  Description of Artificial Sequence: Synthetic oligonucleotide
  Antisense strand to SEQ ID NO: 1085426
uugucaccaagguaaucag

SEQ ID NO: 1085428 - RNA, 19 nt, Artificial Sequence
  Description of Artificial Sequence: Synthetic oligonucleotide
  Sense strand starting at position 2541 of SEQ ID NO: 915512
agaguuuaaccauguaaca

SEQ ID NO: 1085429 - RNA, 19 nt, Artificial Sequence
  Description of Artificial Sequence: Synthetic oligonucleotide
  Antisense strand to SEQ ID NO: 1085428
uguuacaugguuaaacucu

SEQ ID NO: 1085430 - RNA, 19 nt, Artificial Sequence
  Description of Artificial Sequence: Synthetic oligonucleotide
  Sense strand starting at position 2742 of SEQ ID NO: 915512
aaacauuugcgucauuguu

SEQ ID NO: 1085431 - RNA, 19 nt, Artificial Sequence
  Description of Artificial Sequence: Synthetic oligonucleotide
  Antisense strand to SEQ ID NO: 1085430
aacaaugacgcaaauguuu

SEQ ID NO: 1085432 - RNA, 19 nt, Artificial Sequence
  Description of Artificial Sequence: Synthetic oligonucleotide
  Sense strand starting at position 2744 of SEQ ID NO: 915512
acauuugcgucauuguuac

SEQ ID NO: 1085433 - RNA, 19 nt, Artificial Sequence
  Description of Artificial Sequence: Synthetic oligonucleotide
  Antisense strand to SEQ ID NO: 1085432
guaacaaugacgcaaaugu

SEQ ID NO: 1085434 - RNA, 19 nt, Artificial Sequence
  Description of Artificial Sequence: Synthetic oligonucleotide
  Sense strand starting at position 3022 of SEQ ID NO: 915512
ggugguuacuacucuuaau

SEQ ID NO: 1085435 - RNA, 19 nt, Artificial Sequence
  Description of Artificial Sequence: Synthetic oligonucleotide
  Antisense strand to SEQ ID NO: 1085434
auuaagaguaguaaccacc

SEQ ID NO: 1085436 - RNA, 19 nt, Artificial Sequence
  Description of Artificial Sequence: Synthetic oligonucleotide
  Sense strand starting at position 3057 of SEQ ID NO: 915512
gggaacauguuaguauaug

SEQ ID NO: 1085437 - RNA, 19 nt, Artificial Sequence
  Description of Artificial Sequence: Synthetic oligonucleotide
  Antisense strand to SEQ ID NO: 1085436
cauauacuaacauguuccc

SEQ ID NO: 1085438 - RNA, 19 nt, Artificial Sequence
  Description of Artificial Sequence: Synthetic oligonucleotide
  Sense strand starting at position 3179 of SEQ ID NO: 915512
auuccaaauuagucgagua

SEQ ID NO: 1085439 - RNA, 19 nt, Artificial Sequence
  Description of Artificial Sequence: Synthetic oligonucleotide
  Antisense strand to SEQ ID NO: 1085438
uacucgacuaauuuggaau

SEQ ID NO: 1085440 - RNA, 19 nt, Artificial Sequence
  Description of Artificial Sequence: Synthetic oligonucleotide
  Sense strand starting at position 3181 of SEQ ID NO: 915512
uccaaauuagucgaguaua

SEQ ID NO: 1085441 - RNA, 19 nt, Artificial Sequence
  Description of Artificial Sequence: Synthetic oligonucleotide
  Antisense strand to SEQ ID NO: 1085440
uauacucgacuaauuugga

SEQ ID NO: 1085442 - RNA, 19 nt, Artificial Sequence
  Description of Artificial Sequence: Synthetic oligonucleotide
  Sense strand starting at position 3251 of SEQ ID NO: 915512
auuucucuauaagagaaga

SEQ ID NO: 1085443 - RNA, 19 nt, Artificial Sequence
  Description of Artificial Sequence: Synthetic oligonucleotide
  Antisense strand to SEQ ID NO: 1085442
ucuucucuuauagagaaau

SEQ ID NO: 1085444 - RNA, 19 nt, Artificial Sequence
  Description of Artificial Sequence: Synthetic oligonucleotide
  Sense strand starting at position 3429 of SEQ ID NO: 915512
uuuauaucccaauggguua

SEQ ID NO: 1085445 - RNA, 19 nt, Artificial Sequence
  Description of Artificial Sequence: Synthetic oligonucleotide
  Antisense strand to SEQ ID NO: 1085444
uaacccauugggauauaaa

SEQ ID NO: 1085446 - RNA, 19 nt, Artificial Sequence
  Description of Artificial Sequence: Synthetic oligonucleotide
  Sense strand starting at position 3432 of SEQ ID NO: 915512
auaucccaauggguuaaua

SEQ ID NO: 1085447 - RNA, 19 nt, Artificial Sequence
  Description of Artificial Sequence: Synthetic oligonucleotide
  Antisense strand to SEQ ID NO: 1085446
uauuaacccauugggauau

SEQ ID NO: 1085448 - RNA, 19 nt, Artificial Sequence
  Description of Artificial Sequence: Synthetic oligonucleotide
  Sense strand starting at position 3440 of SEQ ID NO: 915512
auggguuaauagcccuaau

SEQ ID NO: 1085449 - RNA, 19 nt, Artificial Sequence
  Description of Artificial Sequence: Synthetic oligonucleotide
  Antisense strand to SEQ ID NO: 1085448
auuagggcuauuaacccau

SEQ ID NO: 1085450 - RNA, 19 nt, Artificial Sequence
  Description of Artificial Sequence: Synthetic oligonucleotide
  Sense strand starting at position 3443 of SEQ ID NO: 915512
gguuaauagcccuaauaaa

SEQ ID NO: 1085451 - RNA, 19 nt, Artificial Sequence
  Description of Artificial Sequence: Synthetic oligonucleotide
  Antisense strand to SEQ ID NO: 1085450
uuuauuagggcuauuaacc

SEQ ID NO: 1085452 - RNA, 19 nt, Artificial Sequence
  Description of Artificial Sequence: Synthetic oligonucleotide
  Sense strand starting at position 3483 of SEQ ID NO: 915512
guguuauaggcuuauagaa

SEQ ID NO: 1085453 - RNA, 19 nt, Artificial Sequence
  Description of Artificial Sequence: Synthetic oligonucleotide
  Antisense strand to SEQ ID NO: 1085452
uucuauaagccuauaacac

SEQ ID NO: 1085454 - RNA, 19 nt, Artificial Sequence
  Description of Artificial Sequence: Synthetic oligonucleotide
  Sense strand starting at position 3703 of SEQ ID NO: 915512
auauacauugcugguagau

SEQ ID NO: 1085455 - RNA, 19 nt, Artificial Sequence
  Description of Artificial Sequence: Synthetic oligonucleotide
  Antisense strand to SEQ ID NO: 1085454
aucuaccagcaauguauau

SEQ ID NO: 1085456 - RNA, 19 nt, Artificial Sequence
  Description of Artificial Sequence: Synthetic oligonucleotide
  Sense strand starting at position 3826 of SEQ ID NO: 915512
gcaucauucuuuguagaaa

SEQ ID NO: 1085457 - RNA, 19 nt, Artificial Sequence
  Description of Artificial Sequence: Synthetic oligonucleotide
  Antisense strand to SEQ ID NO: 1085456
uuucuacaaagaaugaugc

SEQ ID NO: 1085458 - RNA, 19 nt, Artificial Sequence
  Description of Artificial Sequence: Synthetic oligonucleotide
  Sense strand starting at position 3859 of SEQ ID NO: 915512
acaggaguuugagugaaca

SEQ ID NO: 1085459 - RNA, 19 nt, Artificial Sequence
  Description of Artificial Sequence: Synthetic oligonucleotide
  Antisense strand to SEQ ID NO: 1085458
uguucacucaaacuccugu

SEQ ID NO: 1085460 - RNA, 19 nt, Artificial Sequence
  Description of Artificial Sequence: Synthetic oligonucleotide
  Sense strand starting at position 3929 of SEQ ID NO: 915512
ugagaacuaucucucgaua

SEQ ID NO: 1085461 - RNA, 19 nt, Artificial Sequence
  Description of Artificial Sequence: Synthetic oligonucleotide
  Antisense strand to SEQ ID NO: 1085460
uaucgagagauaguucuca

SEQ ID NO: 1085462 - RNA, 19 nt, Artificial Sequence
  Description of Artificial Sequence: Synthetic oligonucleotide
  Sense strand starting at position 3942 of SEQ ID NO: 915512
ucgauaauacuauggauga

SEQ ID NO: 1085463 - RNA, 19 nt, Artificial Sequence
  Description of Artificial Sequence: Synthetic oligonucleotide
  Antisense strand to SEQ ID NO: 1085462
ucauccauaguauuaucga

SEQ ID NO: 1085464 - RNA, 19 nt, Artificial Sequence
  Description of Artificial Sequence: Synthetic oligonucleotide
  Sense strand starting at position 423 of SEQ ID NO: 915513
ugaggagcuccggaugcau

SEQ ID NO: 1085465 - RNA, 19 nt, Artificial Sequence
  Description of Artificial Sequence: Synthetic oligonucleotide
  Antisense strand to SEQ ID NO: 1085464
augcauccggagcuccuca

SEQ ID NO: 1085466 - RNA, 19 nt, Artificial Sequence
  Description of Artificial Sequence: Synthetic oligonucleotide
  Sense strand starting at position 462 of SEQ ID NO: 915513
ggcucaauagacuggcaau

SEQ ID NO: 1085467 - RNA, 19 nt, Artificial Sequence
  Description of Artificial Sequence: Synthetic oligonucleotide
  Antisense strand to SEQ ID NO: 1085466
auugccagucuauugagcc

SEQ ID NO: 1085468 - RNA, 19 nt, Artificial Sequence
  Description of Artificial Sequence: Synthetic oligonucleotide
  Sense strand starting at position 662 of SEQ ID NO: 915513
uguuaaugaaggugaugua

SEQ ID NO: 1085469 - RNA, 19 nt, Artificial Sequence
  Description of Artificial Sequence: Synthetic oligonucleotide
  Antisense strand to SEQ ID NO: 1085468
uacaucaccuucauuaaca

SEQ ID NO: 1085470 - RNA, 19 nt, Artificial Sequence
  Description of Artificial Sequence: Synthetic oligonucleotide
  Sense strand starting at position 663 of SEQ ID NO: 915513
guuaaugaaggugauguaa

SEQ ID NO: 1085471 - RNA, 19 nt, Artificial Sequence
  Description of Artificial Sequence: Synthetic oligonucleotide
  Antisense strand to SEQ ID NO: 1085470
uuacaucaccuucauuaac

SEQ ID NO: 1085472 - RNA, 19 nt, Artificial Sequence
  Description of Artificial Sequence: Synthetic oligonucleotide
  Sense strand starting at position 787 of SEQ ID NO: 915513
aggucacugaguggagaua

SEQ ID NO: 1085473 - RNA, 19 nt, Artificial Sequence
  Description of Artificial Sequence: Synthetic oligonucleotide
  Antisense strand to SEQ ID NO: 1085472
uaucuccacucagugaccu

SEQ ID NO: 1085474 - RNA, 19 nt, Artificial Sequence
  Description of Artificial Sequence: Synthetic oligonucleotide
  Sense strand starting at position 847 of SEQ ID NO: 915513
uuuguuagacucugaacaa

SEQ ID NO: 1085475 - RNA, 19 nt, Artificial Sequence
  Description of Artificial Sequence: Synthetic oligonucleotide
  Antisense strand to SEQ ID NO: 1085474
uuguucagagucuaacaaa

SEQ ID NO: 1085476 - RNA, 19 nt, Artificial Sequence
  Description of Artificial Sequence: Synthetic oligonucleotide
  Sense strand starting at position 866 of SEQ ID NO: 915513
ucauuuaugggcugcaguu

SEQ ID NO: 1085477 - RNA, 19 nt, Artificial Sequence
  Description of Artificial Sequence: Synthetic oligonucleotide
  Antisense strand to SEQ ID NO: 1085476
aacugcagcccauaaauga

SEQ ID NO: 1085478 - RNA, 19 nt, Artificial Sequence
  Description of Artificial Sequence: Synthetic oligonucleotide
  Sense strand starting at position 886 of SEQ ID NO: 915513
gucugaaucuagguacuuu

SEQ ID NO: 1085479 - RNA, 19 nt, Artificial Sequence
  Description of Artificial Sequence: Synthetic oligonucleotide
  Antisense strand to SEQ ID NO: 1085478
aaaguaccuagauucagac

SEQ ID NO: 1085480 - RNA, 19 nt, Artificial Sequence
  Description of Artificial Sequence: Synthetic oligonucleotide
  Sense strand starting at position 963 of SEQ ID NO: 915513
aucauuucuuaacagggau

SEQ ID NO: 1085481 - RNA, 19 nt, Artificial Sequence
  Description of Artificial Sequence: Synthetic oligonucleotide
  Antisense strand to SEQ ID NO: 1085480
aucccuguuaagaaaugau

SEQ ID NO: 1085482 - RNA, 19 nt, Artificial Sequence
  Description of Artificial Sequence: Synthetic oligonucleotide
  Sense strand starting at position 987 of SEQ ID NO: 915513
ggguccacucuuugagugu

SEQ ID NO: 1085483 - RNA, 19 nt, Artificial Sequence
  Description of Artificial Sequence: Synthetic oligonucleotide
  Antisense strand to SEQ ID NO: 1085482
acacucaaagaguggaccc

SEQ ID NO: 1085484 - RNA, 19 nt, Artificial Sequence
  Description of Artificial Sequence: Synthetic oligonucleotide
  Sense strand starting at position 1036 of SEQ ID NO: 915513
aucacuuuaguuugcauua

SEQ ID NO: 1085485 - RNA, 19 nt, Artificial Sequence
  Description of Artificial Sequence: Synthetic oligonucleotide
  Antisense strand to SEQ ID NO: 1085484
uaaugcaaacuaaagugau

SEQ ID NO: 1085486 - RNA, 19 nt, Artificial Sequence
  Description of Artificial Sequence: Synthetic oligonucleotide
  Sense strand starting at position 1037 of SEQ ID NO: 915513
ucacuuuaguuugcauuau

SEQ ID NO: 1085487 - RNA, 19 nt, Artificial Sequence
  Description of Artificial Sequence: Synthetic oligonucleotide
  Antisense strand to SEQ ID NO: 1085486
auaaugcaaacuaaaguga

SEQ ID NO: 1085488 - RNA, 19 nt, Artificial Sequence
  Description of Artificial Sequence: Synthetic oligonucleotide
  Sense strand starting at position 1041 of SEQ ID NO: 915513
uuuaguuugcauuaucaga

SEQ ID NO: 1085489 - RNA, 19 nt, Artificial Sequence
  Description of Artificial Sequence: Synthetic oligonucleotide
  Antisense strand to SEQ ID NO: 1085488
ucugauaaugcaaacuaaa

SEQ ID NO: 1085490 - RNA, 19 nt, Artificial Sequence
  Description of Artificial Sequence: Synthetic oligonucleotide
  Sense strand starting at position 1108 of SEQ ID NO: 915513
aggguauucgaauggcaag

SEQ ID NO: 1085491 - RNA, 19 nt, Artificial Sequence
  Description of Artificial Sequence: Synthetic oligonucleotide
  Antisense strand to SEQ ID NO: 1085490
cuugccauucgaauacccu

SEQ ID NO: 1085492 - RNA, 19 nt, Artificial Sequence
  Description of Artificial Sequence: Synthetic oligonucleotide
  Sense strand starting at position 1109 of SEQ ID NO: 915513
ggguauucgaauggcaaga

SEQ ID NO: 1085493 - RNA, 19 nt, Artificial Sequence
  Description of Artificial Sequence: Synthetic oligonucleotide
  Antisense strand to SEQ ID NO: 1085492
ucuugccauucgaauaccc

SEQ ID NO: 1085494 - RNA, 19 nt, Artificial Sequence
  Description of Artificial Sequence: Synthetic oligonucleotide
  Sense strand starting at position 1198 of SEQ ID NO: 915513
aucuguaagcgguaccaga

SEQ ID NO: 1085495 - RNA, 19 nt, Artificial Sequence
  Description of Artificial Sequence: Synthetic oligonucleotide
  Antisense strand to SEQ ID NO: 1085494
ucugguaccgcuuacagau

SEQ ID NO: 1085496 - RNA, 19 nt, Artificial Sequence
  Description of Artificial Sequence: Synthetic oligonucleotide
  Sense strand starting at position 1383 of SEQ ID NO: 915513
ucagucaccuguuuccaaa

SEQ ID NO: 1085497 - RNA, 19 nt, Artificial Sequence
  Description of Artificial Sequence: Synthetic oligonucleotide
  Antisense strand to SEQ ID NO: 1085496
uuuggaaacaggugacuga

SEQ ID NO: 1085498 - RNA, 19 nt, Artificial Sequence
  Description of Artificial Sequence: Synthetic oligonucleotide
  Sense strand starting at position 1385 of SEQ ID NO: 915513
agucaccuguuuccaaaua

SEQ ID NO: 1085499 - RNA, 19 nt, Artificial Sequence
  Description of Artificial Sequence: Synthetic oligonucleotide
  Antisense strand to SEQ ID NO: 1085498
uauuuggaaacaggugacu

SEQ ID NO: 1085500 - RNA, 19 nt, Artificial Sequence
  Description of Artificial Sequence: Synthetic oligonucleotide
  Sense strand starting at position 1532 of SEQ ID NO: 915513
cugcaugucagggauggua

SEQ ID NO: 1085501 - RNA, 19 nt, Artificial Sequence
  Description of Artificial Sequence: Synthetic oligonucleotide
  Antisense strand to SEQ ID NO: 1085500
uaccaucccugacaugcag

SEQ ID NO: 1085502 - RNA, 19 nt, Artificial Sequence
  Description of Artificial Sequence: Synthetic oligonucleotide
  Sense strand starting at position 1651 of SEQ ID NO: 915513
cuucgucgaccuugagaaa

SEQ ID NO: 1085503 - RNA, 19 nt, Artificial Sequence
  Description of Artificial Sequence: Synthetic oligonucleotide
  Antisense strand to SEQ ID NO: 1085502
uuucucaaggucgacgaag

SEQ ID NO: 1085504 - RNA, 19 nt, Artificial Sequence
  Description of Artificial Sequence: Synthetic oligonucleotide
  Sense strand starting at position 2317 of SEQ ID NO: 915513
acucuagaaugguucgaua

SEQ ID NO: 1085505 - RNA, 19 nt, Artificial Sequence
  Description of Artificial Sequence: Synthetic oligonucleotide
  Antisense strand to SEQ ID NO: 1085504
uaucgaaccauucuagagu

SEQ ID NO: 1085506 - RNA, 19 nt, Artificial Sequence
  Description of Artificial Sequence: Synthetic oligonucleotide
  Sense strand starting at position 2506 of SEQ ID NO: 915513
uccauagucugagccucau

SEQ ID NO: 1085507 - RNA, 19 nt, Artificial Sequence
  Description of Artificial Sequence: Synthetic oligonucleotide
  Antisense strand to SEQ ID NO: 1085506
augaggcucagacuaugga

SEQ ID NO: 1085508 - RNA, 19 nt, Artificial Sequence
  Description of Artificial Sequence: Synthetic oligonucleotide
  Sense strand starting at position 2512 of SEQ ID NO: 915513
gucugagccucauuaaacc

SEQ ID NO: 1085509 - RNA, 19 nt, Artificial Sequence
  Description of Artificial Sequence: Synthetic oligonucleotide
  Antisense strand to SEQ ID NO: 1085508
gguuuaaugaggcucagac

SEQ ID NO: 1085510 - RNA, 19 nt, Artificial Sequence
  Description of Artificial Sequence: Synthetic oligonucleotide
  Sense strand starting at position 2864 of SEQ ID NO: 915513
ugggucaugcuucagaagu

SEQ ID NO: 1085511 - RNA, 19 nt, Artificial Sequence
  Description of Artificial Sequence: Synthetic oligonucleotide
  Antisense strand to SEQ ID NO: 1085510
acuucugaagcaugaccca

SEQ ID NO: 1085512 - RNA, 19 nt, Artificial Sequence
  Description of Artificial Sequence: Synthetic oligonucleotide
  Sense strand starting at position 2892 of SEQ ID NO: 915513
gggaaagauugugcaacuu

SEQ ID NO: 1085513 - RNA, 19 nt, Artificial Sequence
  Description of Artificial Sequence: Synthetic oligonucleotide
  Antisense strand to SEQ ID NO: 1085512
aaguugcacaaucuuuccc

SEQ ID NO: 1085514 - RNA, 19 nt, Artificial Sequence
  Description of Artificial Sequence: Synthetic oligonucleotide
  Sense strand starting at position 2981 of SEQ ID NO: 915513
aaggucuucucagcaauug

SEQ ID NO: 1085515 - RNA, 19 nt, Artificial Sequence
  Description of Artificial Sequence: Synthetic oligonucleotide
  Antisense strand to SEQ ID NO: 1085514
caauugcugagaagaccuu

SEQ ID NO: 1085516 - RNA, 19 nt, Artificial Sequence
  Description of Artificial Sequence: Synthetic oligonucleotide
  Sense strand starting at position 2982 of SEQ ID NO: 915513
aggucuucucagcaauuga

SEQ ID NO: 1085517 - RNA, 19 nt, Artificial Sequence
  Description of Artificial Sequence: Synthetic oligonucleotide
  Antisense strand to SEQ ID NO: 1085516
ucaauugcugagaagaccu

SEQ ID NO: 1085518 - RNA, 19 nt, Artificial Sequence
  Description of Artificial Sequence: Synthetic oligonucleotide
  Sense strand starting at position 3032 of SEQ ID NO: 915513
ucuaaauuccugugugaua

SEQ ID NO: 1085519 - RNA, 19 nt, Artificial Sequence
  Description of Artificial Sequence: Synthetic oligonucleotide
  Antisense strand to SEQ ID NO: 1085518
uaucacacaggaauuuaga

SEQ ID NO: 1085520 - RNA, 19 nt, Artificial Sequence
  Description of Artificial Sequence: Synthetic oligonucleotide
  Sense strand starting at position 3033 of SEQ ID NO: 915513
cuaaauuccugugugauag

SEQ ID NO: 1085521 - RNA, 19 nt, Artificial Sequence
  Description of Artificial Sequence: Synthetic oligonucleotide
  Antisense strand to SEQ ID NO: 1085520
cuaucacacaggaauuuag

SEQ ID NO: 1085522 - RNA, 19 nt, Artificial Sequence
  Description of Artificial Sequence: Synthetic oligonucleotide
  Sense strand starting at position 3072 of SEQ ID NO: 915513
ugagcauauaaaggguaaa

SEQ ID NO: 1085523 - RNA, 19 nt, Artificial Sequence
  Description of Artificial Sequence: Synthetic oligonucleotide
  Antisense strand to SEQ ID NO: 1085522
uuuacccuuuauaugcuca

SEQ ID NO: 1085524 - RNA, 19 nt, Artificial Sequence
  Description of Artificial Sequence: Synthetic oligonucleotide
  Sense strand starting at position 3151 of SEQ ID NO: 915513
agugaaugggucuguguuu

SEQ ID NO: 1085525 - RNA, 19 nt, Artificial Sequence
  Description of Artificial Sequence: Synthetic oligonucleotide
  Antisense strand to SEQ ID NO: 1085524
aaacacagacccauucacu

SEQ ID NO: 1085526 - RNA, 19 nt, Artificial Sequence
  Description of Artificial Sequence: Synthetic oligonucleotide
  Sense strand starting at position 3255 of SEQ ID NO: 915513
aguccagauguaugagucu

SEQ ID NO: 1085527 - RNA, 19 nt, Artificial Sequence
  Description of Artificial Sequence: Synthetic oligonucleotide
  Antisense strand to SEQ ID NO: 1085526
agacucauacaucuggacu

SEQ ID NO: 1085528 - RNA, 19 nt, Artificial Sequence
  Description of Artificial Sequence: Synthetic oligonucleotide
  Sense strand starting at position 3276 of SEQ ID NO: 915513
gaaauaauuuguuggcaua

SEQ ID NO: 1085529 - RNA, 19 nt, Artificial Sequence
  Description of Artificial Sequence: Synthetic oligonucleotide
  Antisense strand to SEQ ID NO: 1085528
uaugccaacaaauuauuuc

SEQ ID NO: 1085530 - RNA, 19 nt, Artificial Sequence
  Description of Artificial Sequence: Synthetic oligonucleotide
  Sense strand starting at position 3662 of SEQ ID NO: 915513
aguucuugcucuuugaaac

SEQ ID NO: 1085531 - RNA, 19 nt, Artificial Sequence
  Description of Artificial Sequence: Synthetic oligonucleotide
  Antisense strand to SEQ ID NO: 1085530
guuucaaagagcaagaacu

SEQ ID NO: 1085532 - RNA, 19 nt, Artificial Sequence
  Description of Artificial Sequence: Synthetic oligonucleotide
  Sense strand starting at position 3663 of SEQ ID NO: 915513
guucuugcucuuugaaaca

SEQ ID NO: 1085533 - RNA, 19 nt, Artificial Sequence
  Description of Artificial Sequence: Synthetic oligonucleotide
  Antisense strand to SEQ ID NO: 1085532
uguuucaaagagcaagaac

SEQ ID NO: 1085534 - RNA, 19 nt, Artificial Sequence
  Description of Artificial Sequence: Synthetic oligonucleotide
  Sense strand starting at position 3682 of SEQ ID NO: 915513
guauguaccucuuugauau

SEQ ID NO: 1085535 - RNA, 19 nt, Artificial Sequence
  Description of Artificial Sequence: Synthetic oligonucleotide
  Antisense strand to SEQ ID NO: 1085534
auaucaaagagguacauac

SEQ ID NO: 1085536 - RNA, 19 nt, Artificial Sequence
  Description of Artificial Sequence: Synthetic oligonucleotide
  Sense strand starting at position 3809 of SEQ ID NO: 915513
auacauuucucgggagaaa

SEQ ID NO: 1085537 - RNA, 19 nt, Artificial Sequence
  Description of Artificial Sequence: Synthetic oligonucleotide
  Antisense strand to SEQ ID NO: 1085536
uuucucccgagaaauguau

SEQ ID NO: 1085538 - RNA, 19 nt, Artificial Sequence
  Description of Artificial Sequence: Synthetic oligonucleotide
  Sense strand starting at position 3914 of SEQ ID NO: 915513
uccugagaugaguaucugu

SEQ ID NO: 1085539 - RNA, 19 nt, Artificial Sequence
  Description of Artificial Sequence: Synthetic oligonucleotide
  Antisense strand to SEQ ID NO: 1085538
acagauacucaucucagga

SEQ ID NO: 1085540 - RNA, 19 nt, Artificial Sequence
  Description of Artificial Sequence: Synthetic oligonucleotide
  Sense strand starting at position 3919 of SEQ ID NO: 915513
agaugaguaucugugguuu

SEQ ID NO: 1085541 - RNA, 19 nt, Artificial Sequence
  Description of Artificial Sequence: Synthetic oligonucleotide
  Antisense strand to SEQ ID NO: 1085540
aaaccacagauacucaucu

SEQ ID NO: 1085542 - RNA, 19 nt, Artificial Sequence
  Description of Artificial Sequence: Synthetic oligonucleotide
  Sense strand starting at position 3923 of SEQ ID NO: 915513
gaguaucugugguuuccuu

SEQ ID NO: 1085543 - RNA, 19 nt, Artificial Sequence
  Description of Artificial Sequence: Synthetic oligonucleotide
  Antisense strand to SEQ ID NO: 1085542
aaggaaaccacagauacuc

SEQ ID NO: 1085544 - RNA, 19 nt, Artificial Sequence
  Description of Artificial Sequence: Synthetic oligonucleotide
  Sense strand starting at position 193 of SEQ ID NO: 915514
agaagugcuccucaaccuu

SEQ ID NO: 1085545 - RNA, 19 nt, Artificial Sequence
  Description of Artificial Sequence: Synthetic oligonucleotide
  Antisense strand to SEQ ID NO: 1085544
aagguugaggagcacuucu

SEQ ID NO: 1085546 - RNA, 19 nt, Artificial Sequence
  Description of Artificial Sequence: Synthetic oligonucleotide
  Sense strand starting at position 294 of SEQ ID NO: 915514
uauugaaggccauguugua

SEQ ID NO: 1085547 - RNA, 19 nt, Artificial Sequence
  Description of Artificial Sequence: Synthetic oligonucleotide
  Antisense strand to SEQ ID NO: 1085546
uacaacauggccuucaaua

SEQ ID NO: 1085548 - RNA, 19 nt, Artificial Sequence
  Description of Artificial Sequence: Synthetic oligonucleotide
  Sense strand starting at position 406 of SEQ ID NO: 915514
gugacucacgcuuguagca

SEQ ID NO: 1085549 - RNA, 19 nt, Artificial Sequence
  Description of Artificial Sequence: Synthetic oligonucleotide
  Antisense strand to SEQ ID NO: 1085548
ugcuacaagcgugagucac

SEQ ID NO: 1085550 - RNA, 19 nt, Artificial Sequence
  Description of Artificial Sequence: Synthetic oligonucleotide
  Sense strand starting at position 766 of SEQ ID NO: 915514
ccaaaucgaucuuggaaug

SEQ ID NO: 1085551 - RNA, 19 nt, Artificial Sequence
  Description of Artificial Sequence: Synthetic oligonucleotide
  Antisense strand to SEQ ID NO: 1085550
cauuccaagaucgauuugg

SEQ ID NO: 1085552 - RNA, 19 nt, Artificial Sequence
  Description of Artificial Sequence: Synthetic oligonucleotide
  Sense strand starting at position 786 of SEQ ID NO: 915514
uuguuauugggcugcugaa

SEQ ID NO: 1085553 - RNA, 19 nt, Artificial Sequence
  Description of Artificial Sequence: Synthetic oligonucleotide
  Antisense strand to SEQ ID NO: 1085552
uucagcagcccaauaacaa

SEQ ID NO: 1085554 - RNA, 19 nt, Artificial Sequence
  Description of Artificial Sequence: Synthetic oligonucleotide
  Sense strand starting at position 856 of SEQ ID NO: 915514
agugccuuuagauauggga

SEQ ID NO: 1085555 - RNA, 19 nt, Artificial Sequence
  Description of Artificial Sequence: Synthetic oligonucleotide
  Antisense strand to SEQ ID NO: 1085554
ucccauaucuaaaggcacu

SEQ ID NO: 1085556 - RNA, 19 nt, Artificial Sequence
  Description of Artificial Sequence: Synthetic oligonucleotide
  Sense strand starting at position 858 of SEQ ID NO: 915514
ugccuuuagauaugggaaa

SEQ ID NO: 1085557 - RNA, 19 nt, Artificial Sequence
  Description of Artificial Sequence: Synthetic oligonucleotide
  Antisense strand to SEQ ID NO: 1085556
uuucccauaucuaaaggca

SEQ ID NO: 1085558 - RNA, 19 nt, Artificial Sequence
  Description of Artificial Sequence: Synthetic oligonucleotide
  Sense strand starting at position 1114 of SEQ ID NO: 915514
ggucuagacuucccacacu

SEQ ID NO: 1085559 - RNA, 19 nt, Artificial Sequence
  Description of Artificial Sequence: Synthetic oligonucleotide
  Antisense strand to SEQ ID NO: 1085558
agugugggaagucuagacc

SEQ ID NO: 1085560 - RNA, 19 nt, Artificial Sequence
  Description of Artificial Sequence: Synthetic oligonucleotide
  Sense strand starting at position 1345 of SEQ ID NO: 915514
gggagucugagauguaacu

SEQ ID NO: 1085561 - RNA, 19 nt, Artificial Sequence
  Description of Artificial Sequence: Synthetic oligonucleotide
  Antisense strand to SEQ ID NO: 1085560
aguuacaucucagacuccc

SEQ ID NO: 1085562 - RNA, 19 nt, Artificial Sequence
  Description of Artificial Sequence: Synthetic oligonucleotide
  Sense strand starting at position 1355 of SEQ ID NO: 915514
gauguaacuugccugcaca

SEQ ID NO: 1085563 - RNA, 19 nt, Artificial Sequence
  Description of Artificial Sequence: Synthetic oligonucleotide
  Antisense strand to SEQ ID NO: 1085562
ugugcaggcaaguuacauc

SEQ ID NO: 1085564 - RNA, 19 nt, Artificial Sequence
  Description of Artificial Sequence: Synthetic oligonucleotide
  Sense strand starting at position 1418 of SEQ ID NO: 915514
gggcaagcccaguaauaag

SEQ ID NO: 1085565 - RNA, 19 nt, Artificial Sequence
  Description of Artificial Sequence: Synthetic oligonucleotide
  Antisense strand to SEQ ID NO: 1085564
cuuauuacugggcuugccc

SEQ ID NO: 1085566 - RNA, 19 nt, Artificial Sequence
  Description of Artificial Sequence: Synthetic oligonucleotide
  Sense strand starting at position 1596 of SEQ ID NO: 915514
gagaaacauugguggcaaa

SEQ ID NO: 1085567 - RNA, 19 nt, Artificial Sequence
  Description of Artificial Sequence: Synthetic oligonucleotide
  Antisense strand to SEQ ID NO: 1085566
uuugccaccaauguuucuc

SEQ ID NO: 1085568 - RNA, 19 nt, Artificial Sequence
  Description of Artificial Sequence: Synthetic oligonucleotide
  Sense strand starting at position 1640 of SEQ ID NO: 915514
cagugugguucugggaacu

SEQ ID NO: 1085569 - RNA, 19 nt, Artificial Sequence
  Description of Artificial Sequence: Synthetic oligonucleotide
  Antisense strand to SEQ ID NO: 1085568
aguucccagaaccacacug

SEQ ID NO: 1085570 - RNA, 19 nt, Artificial Sequence
  Description of Artificial Sequence: Synthetic oligonucleotide
  Sense strand starting at position 2092 of SEQ ID NO: 915514
gccugagauuaggaaaugu

SEQ ID NO: 1085571 - RNA, 19 nt, Artificial Sequence
  Description of Artificial Sequence: Synthetic oligonucleotide
  Antisense strand to SEQ ID NO: 1085570
acauuuccuaaucucaggc

SEQ ID NO: 1085572 - RNA, 19 nt, Artificial Sequence
  Description of Artificial Sequence: Synthetic oligonucleotide
  Sense strand starting at position 2379 of SEQ ID NO: 915514
gcgugauaggugguagcua

SEQ ID NO: 1085573 - RNA, 19 nt, Artificial Sequence
  Description of Artificial Sequence: Synthetic oligonucleotide
  Antisense strand to SEQ ID NO: 1085572
uagcuaccaccuaucacgc

SEQ ID NO: 1085574 - RNA, 19 nt, Artificial Sequence
  Description of Artificial Sequence: Synthetic oligonucleotide
  Sense strand starting at position 2651 of SEQ ID NO: 915514
ccaacucucucccgugauu

SEQ ID NO: 1085575 - RNA, 19 nt, Artificial Sequence
  Description of Artificial Sequence: Synthetic oligonucleotide
  Antisense strand to SEQ ID NO: 1085574
aaucacgggagagaguugg

SEQ ID NO: 1085576 - RNA, 19 nt, Artificial Sequence
  Description of Artificial Sequence: Synthetic oligonucleotide
  Sense strand starting at position 2678 of SEQ ID NO: 915514
cucugaaacucacguugga

SEQ ID NO: 1085577 - RNA, 19 nt, Artificial Sequence
  Description of Artificial Sequence: Synthetic oligonucleotide
  Antisense strand to SEQ ID NO: 1085576
uccaacgugaguuucagag

SEQ ID NO: 1085578 - RNA, 19 nt, Artificial Sequence
  Description of Artificial Sequence: Synthetic oligonucleotide
  Sense strand starting at position 2681 of SEQ ID NO: 915514
ugaaacucacguuggaaua

SEQ ID NO: 1085579 - RNA, 19 nt, Artificial Sequence
  Description of Artificial Sequence: Synthetic oligonucleotide
  Antisense strand to SEQ ID NO: 1085578
uauuccaacgugaguuuca

SEQ ID NO: 1085580 - RNA, 19 nt, Artificial Sequence
  Description of Artificial Sequence: Synthetic oligonucleotide
  Sense strand starting at position 2692 of SEQ ID NO: 915514
uuggaauaggcagauguuu

SEQ ID NO: 1085581 - RNA, 19 nt, Artificial Sequence
  Description of Artificial Sequence: Synthetic oligonucleotide
  Antisense strand to SEQ ID NO: 1085580
aaacaucugccuauuccaa

SEQ ID NO: 1085582 - RNA, 19 nt, Artificial Sequence
  Description of Artificial Sequence: Synthetic oligonucleotide
  Sense strand starting at position 2694 of SEQ ID NO: 915514
ggaauaggcagauguuucu

SEQ ID NO: 1085583 - RNA, 19 nt, Artificial Sequence
  Description of Artificial Sequence: Synthetic oligonucleotide
  Antisense strand to SEQ ID NO: 1085582
agaaacaucugccuauucc

SEQ ID NO: 1085584 - RNA, 19 nt, Artificial Sequence
  Description of Artificial Sequence: Synthetic oligonucleotide
  Sense strand starting at position 2700 of SEQ ID NO: 915514
ggcagauguuucuguuaac

SEQ ID NO: 1085585 - RNA, 19 nt, Artificial Sequence
  Description of Artificial Sequence: Synthetic oligonucleotide
  Antisense strand to SEQ ID NO: 1085584
guuaacagaaacaucugcc

SEQ ID NO: 1085586 - RNA, 19 nt, Artificial Sequence
  Description of Artificial Sequence: Synthetic oligonucleotide
  Sense strand starting at position 2701 of SEQ ID NO: 915514
gcagauguuucuguuaaca

SEQ ID NO: 1085587 - RNA, 19 nt, Artificial Sequence
  Description of Artificial Sequence: Synthetic oligonucleotide
  Antisense strand to SEQ ID NO: 1085586
uguuaacagaaacaucugc

SEQ ID NO: 1085588 - RNA, 19 nt, Artificial Sequence
  Description of Artificial Sequence: Synthetic oligonucleotide
  Sense strand starting at position 2703 of SEQ ID NO: 915514
agauguuucuguuaacaau

SEQ ID NO: 1085589 - RNA, 19 nt, Artificial Sequence
  Description of Artificial Sequence: Synthetic oligonucleotide
  Antisense strand to SEQ ID NO: 1085588
auuguuaacagaaacaucu

SEQ ID NO: 1085590 - RNA, 19 nt, Artificial Sequence
  Description of Artificial Sequence: Synthetic oligonucleotide
  Sense strand starting at position 2713 of SEQ ID NO: 915514
guuaacaaucuccaagugu

SEQ ID NO: 1085591 - RNA, 19 nt, Artificial Sequence
  Description of Artificial Sequence: Synthetic oligonucleotide
  Antisense strand to SEQ ID NO: 1085590
acacuuggagauuguuaac

SEQ ID NO: 1085592 - RNA, 19 nt, Artificial Sequence
  Description of Artificial Sequence: Synthetic oligonucleotide
  Sense strand starting at position 2731 of SEQ ID NO: 915514
uuggguucuugcugaacaa

SEQ ID NO: 1085593 - RNA, 19 nt, Artificial Sequence
  Description of Artificial Sequence: Synthetic oligonucleotide
  Antisense strand to SEQ ID NO: 1085592
uuguucagcaagaacccaa

SEQ ID NO: 1085594 - RNA, 19 nt, Artificial Sequence
  Description of Artificial Sequence: Synthetic oligonucleotide
  Sense strand starting at position 3165 of SEQ ID NO: 915514
uggacucuauccuaaggaa

SEQ ID NO: 1085595 - RNA, 19 nt, Artificial Sequence
  Description of Artificial Sequence: Synthetic oligonucleotide
  Antisense strand to SEQ ID NO: 1085594
uuccuuaggauagagucca

SEQ ID NO: 1085596 - RNA, 19 nt, Artificial Sequence
  Description of Artificial Sequence: Synthetic oligonucleotide
  Sense strand starting at position 3210 of SEQ ID NO: 915514
ggcagcuacgcuuaucacu

SEQ ID NO: 1085597 - RNA, 19 nt, Artificial Sequence
  Description of Artificial Sequence: Synthetic oligonucleotide
  Antisense strand to SEQ ID NO: 1085596
agugauaagcguagcugcc

SEQ ID NO: 1085598 - RNA, 19 nt, Artificial Sequence
  Description of Artificial Sequence: Synthetic oligonucleotide
  Sense strand starting at position 3215 of SEQ ID NO: 915514
cuacgcuuaucacugugau

SEQ ID NO: 1085599 - RNA, 19 nt, Artificial Sequence
  Description of Artificial Sequence: Synthetic oligonucleotide
  Antisense strand to SEQ ID NO: 1085598
aucacagugauaagcguag

SEQ ID NO: 1085600 - RNA, 19 nt, Artificial Sequence
  Description of Artificial Sequence: Synthetic oligonucleotide
  Sense strand starting at position 3216 of SEQ ID NO: 915514
uacgcuuaucacugugaua

SEQ ID NO: 1085601 - RNA, 19 nt, Artificial Sequence
  Description of Artificial Sequence: Synthetic oligonucleotide
  Antisense strand to SEQ ID NO: 1085600
uaucacagugauaagcgua

SEQ ID NO: 1085602 - RNA, 19 nt, Artificial Sequence
  Description of Artificial Sequence: Synthetic oligonucleotide
  Sense strand starting at position 3218 of SEQ ID NO: 915514
cgcuuaucacugugauauu

SEQ ID NO: 1085603 - RNA, 19 nt, Artificial Sequence
  Description of Artificial Sequence: Synthetic oligonucleotide
  Antisense strand to SEQ ID NO: 1085602
aauaucacagugauaagcg

SEQ ID NO: 1085604 - RNA, 19 nt, Artificial Sequence
  Description of Artificial Sequence: Synthetic oligonucleotide
  Sense strand starting at position 3219 of SEQ ID NO: 915514
gcuuaucacugugauauuu

SEQ ID NO: 1085605 - RNA, 19 nt, Artificial Sequence
  Description of Artificial Sequence: Synthetic oligonucleotide
  Antisense strand to SEQ ID NO: 1085604
aaauaucacagugauaagc

SEQ ID NO: 1085606 - RNA, 19 nt, Artificial Sequence
  Description of Artificial Sequence: Synthetic oligonucleotide
  Sense strand starting at position 3266 of SEQ ID NO: 915514
ggauauccauaaugaggga

SEQ ID NO: 1085607 - RNA, 19 nt, Artificial Sequence
  Description of Artificial Sequence: Synthetic oligonucleotide
  Antisense strand to SEQ ID NO: 1085606
ucccucauuauggauaucc

SEQ ID NO: 1085608 - RNA, 19 nt, Artificial Sequence
  Description of Artificial Sequence: Synthetic oligonucleotide
  Sense strand starting at position 3287 of SEQ ID NO: 915514
gguuaaaugcacuaucaug

SEQ ID NO: 1085609 - RNA, 19 nt, Artificial Sequence
  Description of Artificial Sequence: Synthetic oligonucleotide
  Antisense strand to SEQ ID NO: 1085608
caugauagugcauuuaacc

SEQ ID NO: 1085610 - RNA, 19 nt, Artificial Sequence
  Description of Artificial Sequence: Synthetic oligonucleotide
  Sense strand starting at position 3578 of SEQ ID NO: 915514
aggagaaucgcuuaacucu

SEQ ID NO: 1085611 - RNA, 19 nt, Artificial Sequence
  Description of Artificial Sequence: Synthetic oligonucleotide
  Antisense strand to SEQ ID NO: 1085610
agaguuaagcgauucuccu

SEQ ID NO: 1085612 - RNA, 19 nt, Artificial Sequence
  Description of Artificial Sequence: Synthetic oligonucleotide
  Sense strand starting at position 3760 of SEQ ID NO: 915514
uuagcaaugucuccagaaa

SEQ ID NO: 1085613 - RNA, 19 nt, Artificial Sequence
  Description of Artificial Sequence: Synthetic oligonucleotide
  Antisense strand to SEQ ID NO: 1085612
uuucuggagacauugcuaa

SEQ ID NO: 1085614 - RNA, 19 nt, Artificial Sequence
  Description of Artificial Sequence: Synthetic oligonucleotide
  Sense strand starting at position 3761 of SEQ ID NO: 915514
uagcaaugucuccagaaag

SEQ ID NO: 1085615 - RNA, 19 nt, Artificial Sequence
  Description of Artificial Sequence: Synthetic oligonucleotide
  Antisense strand to SEQ ID NO: 1085614
cuuucuggagacauugcua

SEQ ID NO: 1085616 - RNA, 19 nt, Artificial Sequence
  Description of Artificial Sequence: Synthetic oligonucleotide
  Sense strand starting at position 3806 of SEQ ID NO: 915514
agcaguaguuaucuuugaa

SEQ ID NO: 1085617 - RNA, 19 nt, Artificial Sequence
  Description of Artificial Sequence: Synthetic oligonucleotide
  Antisense strand to SEQ ID NO: 1085616
uucaaagauaacuacugcu

SEQ ID NO: 1085618 - RNA, 19 nt, Artificial Sequence
  Description of Artificial Sequence: Synthetic oligonucleotide
  Sense strand starting at position 3810 of SEQ ID NO: 915514
guaguuaucuuugaauuac

SEQ ID NO: 1085619 - RNA, 19 nt, Artificial Sequence
  Description of Artificial Sequence: Synthetic oligonucleotide
  Antisense strand to SEQ ID NO: 1085618
guaauucaaagauaacuac

SEQ ID NO: 1085620 - RNA, 19 nt, Artificial Sequence
  Description of Artificial Sequence: Synthetic oligonucleotide
  Sense strand starting at position 3909 of SEQ ID NO: 915514
uggauugugagugguucuu

SEQ ID NO: 1085621 - RNA, 19 nt, Artificial Sequence
  Description of Artificial Sequence: Synthetic oligonucleotide
  Antisense strand to SEQ ID NO: 1085620
aagaaccacucacaaucca

SEQ ID NO: 1085622 - RNA, 19 nt, Artificial Sequence
  Description of Artificial Sequence: Synthetic oligonucleotide
  Sense strand starting at position 3911 of SEQ ID NO: 915514
gauugugagugguucuuaa

SEQ ID NO: 1085623 - RNA, 19 nt, Artificial Sequence
  Description of Artificial Sequence: Synthetic oligonucleotide
  Antisense strand to SEQ ID NO: 1085622
uuaagaaccacucacaauc

SEQ ID NO: 1085624 - RNA, 19 nt, Artificial Sequence
  Description of Artificial Sequence: Synthetic oligonucleotide
  Sense strand starting at position 108 of SEQ ID NO: 915515
augugucuuugaccucuga

SEQ ID NO: 1085625 - RNA, 19 nt, Artificial Sequence
  Description of Artificial Sequence: Synthetic oligonucleotide
  Antisense strand to SEQ ID NO: 1085624
ucagaggucaaagacacau

SEQ ID NO: 1085626 - RNA, 19 nt, Artificial Sequence
  Description of Artificial Sequence: Synthetic oligonucleotide
  Sense strand starting at position 437 of SEQ ID NO: 915515
gcugguauugcccacagaa

SEQ ID NO: 1085627 - RNA, 19 nt, Artificial Sequence
  Description of Artificial Sequence: Synthetic oligonucleotide
  Antisense strand to SEQ ID NO: 1085626
uucugugggcaauaccagc

SEQ ID NO: 1085628 - RNA, 19 nt, Artificial Sequence
  Description of Artificial Sequence: Synthetic oligonucleotide
  Sense strand starting at position 439 of SEQ ID NO: 915515
ugguauugcccacagaauc

SEQ ID NO: 1085629 - RNA, 19 nt, Artificial Sequence
  Description of Artificial Sequence: Synthetic oligonucleotide
  Antisense strand to SEQ ID NO: 1085628
gauucugugggcaauacca

SEQ ID NO: 1085630 - RNA, 19 nt, Artificial Sequence
  Description of Artificial Sequence: Synthetic oligonucleotide
  Sense strand starting at position 582 of SEQ ID NO: 915515
cagguacuugucugacuga

SEQ ID NO: 1085631 - RNA, 19 nt, Artificial Sequence
  Description of Artificial Sequence: Synthetic oligonucleotide
  Antisense strand to SEQ ID NO: 1085630
ucagucagacaaguaccug

SEQ ID NO: 1085632 - RNA, 19 nt, Artificial Sequence
  Description of Artificial Sequence: Synthetic oligonucleotide
  Sense strand starting at position 585 of SEQ ID NO: 915515
guacuugucugacugaguc

SEQ ID NO: 1085633 - RNA, 19 nt, Artificial Sequence
  Description of Artificial Sequence: Synthetic oligonucleotide
  Antisense strand to SEQ ID NO: 1085632
gacucagucagacaaguac

SEQ ID NO: 1085634 - RNA, 19 nt, Artificial Sequence
  Description of Artificial Sequence: Synthetic oligonucleotide
  Sense strand starting at position 633 of SEQ ID NO: 915515
gguacucagccuuggguga

SEQ ID NO: 1085635 - RNA, 19 nt, Artificial Sequence
  Description of Artificial Sequence: Synthetic oligonucleotide
  Antisense strand to SEQ ID NO: 1085634
ucacccaaggcugaguacc

SEQ ID NO: 1085636 - RNA, 19 nt, Artificial Sequence
  Description of Artificial Sequence: Synthetic oligonucleotide
  Sense strand starting at position 634 of SEQ ID NO: 915515
guacucagccuugggugau

SEQ ID NO: 1085637 - RNA, 19 nt, Artificial Sequence
  Description of Artificial Sequence: Synthetic oligonucleotide
  Antisense strand to SEQ ID NO: 1085636
aucacccaaggcugaguac

SEQ ID NO: 1085638 - RNA, 19 nt, Artificial Sequence
  Description of Artificial Sequence: Synthetic oligonucleotide
  Sense strand starting at position 1118 of SEQ ID NO: 915515
ccuugagguucuuagaaag

SEQ ID NO: 1085639 - RNA, 19 nt, Artificial Sequence
  Description of Artificial Sequence: Synthetic oligonucleotide
  Antisense strand to SEQ ID NO: 1085638
cuuucuaagaaccucaagg

SEQ ID NO: 1085640 - RNA, 19 nt, Artificial Sequence
  Description of Artificial Sequence: Synthetic oligonucleotide
  Sense strand starting at position 1798 of SEQ ID NO: 915515
cgagccauuuccugagaga

SEQ ID NO: 1085641 - RNA, 19 nt, Artificial Sequence
  Description of Artificial Sequence: Synthetic oligonucleotide
  Antisense strand to SEQ ID NO: 1085640
ucucucaggaaauggcucg

SEQ ID NO: 1085642 - RNA, 19 nt, Artificial Sequence
  Description of Artificial Sequence: Synthetic oligonucleotide
  Sense strand starting at position 2466 of SEQ ID NO: 915515
cgggucuguuucccaucua

SEQ ID NO: 1085643 - RNA, 19 nt, Artificial Sequence
  Description of Artificial Sequence: Synthetic oligonucleotide
  Antisense strand to SEQ ID NO: 1085642
uagaugggaaacagacccg

SEQ ID NO: 1085644 - RNA, 19 nt, Artificial Sequence
  Description of Artificial Sequence: Synthetic oligonucleotide
  Sense strand starting at position 2669 of SEQ ID NO: 915515
ccaggaaauuugcgccagu

SEQ ID NO: 1085645 - RNA, 19 nt, Artificial Sequence
  Description of Artificial Sequence: Synthetic oligonucleotide
  Antisense strand to SEQ ID NO: 1085644
acuggcgcaaauuuccugg

SEQ ID NO: 1085646 - RNA, 19 nt, Artificial Sequence
  Description of Artificial Sequence: Synthetic oligonucleotide
  Sense strand starting at position 2670 of SEQ ID NO: 915515
caggaaauuugcgccaguu

SEQ ID NO: 1085647 - RNA, 19 nt, Artificial Sequence
  Description of Artificial Sequence: Synthetic oligonucleotide
  Antisense strand to SEQ ID NO: 1085646
aacuggcgcaaauuuccug

SEQ ID NO: 1085648 - RNA, 19 nt, Artificial Sequence
  Description of Artificial Sequence: Synthetic oligonucleotide
  Sense strand starting at position 3162 of SEQ ID NO: 915515
cggcgaugagcuugaugca

SEQ ID NO: 1085649 - RNA, 19 nt, Artificial Sequence
  Description of Artificial Sequence: Synthetic oligonucleotide
  Antisense strand to SEQ ID NO: 1085648
ugcaucaagcucaucgccg

SEQ ID NO: 1085650 - RNA, 19 nt, Artificial Sequence
  Description of Artificial Sequence: Synthetic oligonucleotide
  Sense strand starting at position 3165 of SEQ ID NO: 915515
cgaugagcuugaugcacaa

SEQ ID NO: 1085651 - RNA, 19 nt, Artificial Sequence
  Description of Artificial Sequence: Synthetic oligonucleotide
  Antisense strand to SEQ ID NO: 1085650
uugugcaucaagcucaucg

SEQ ID NO: 1085652 - RNA, 19 nt, Artificial Sequence
  Description of Artificial Sequence: Synthetic oligonucleotide
  Sense strand starting at position 3310 of SEQ ID NO: 915515
gguucuggcucaccucaaa

SEQ ID NO: 1085653 - RNA, 19 nt, Artificial Sequence
  Description of Artificial Sequence: Synthetic oligonucleotide
  Antisense strand to SEQ ID NO: 1085652
uuugaggugagccagaacc

SEQ ID NO: 1085654 - RNA, 19 nt, Artificial Sequence
  Description of Artificial Sequence: Synthetic oligonucleotide
  Sense strand starting at position 3366 of SEQ ID NO: 915515
cagaacugcucggagaagu

SEQ ID NO: 1085655 - RNA, 19 nt, Artificial Sequence
  Description of Artificial Sequence: Synthetic oligonucleotide
  Antisense strand to SEQ ID NO: 1085654
acuucuccgagcaguucug

SEQ ID NO: 1085656 - RNA, 19 nt, Artificial Sequence
  Description of Artificial Sequence: Synthetic oligonucleotide
  Sense strand starting at position 3400 of SEQ ID NO: 915515
ugcgguagucccuguaucu

SEQ ID NO: 1085657 - RNA, 19 nt, Artificial Sequence
  Description of Artificial Sequence: Synthetic oligonucleotide
  Antisense strand to SEQ ID NO: 1085656
agauacagggacuaccgca

SEQ ID NO: 1085658 - RNA, 19 nt, Artificial Sequence
  Description of Artificial Sequence: Synthetic oligonucleotide
  Sense strand starting at position 3537 of SEQ ID NO: 915515
ggaaguccuugguguggaa

SEQ ID NO: 1085659 - RNA, 19 nt, Artificial Sequence
  Description of Artificial Sequence: Synthetic oligonucleotide
  Antisense strand to SEQ ID NO: 1085658
uuccacaccaaggacuucc

SEQ ID NO: 1085660 - RNA, 19 nt, Artificial Sequence
  Description of Artificial Sequence: Synthetic oligonucleotide
  Sense strand starting at position 3539 of SEQ ID NO: 915515
aaguccuugguguggaaga

SEQ ID NO: 1085661 - RNA, 19 nt, Artificial Sequence
  Description of Artificial Sequence: Synthetic oligonucleotide
  Antisense strand to SEQ ID NO: 1085660
ucuuccacaccaaggacuu

SEQ ID NO: 1085662 - RNA, 19 nt, Artificial Sequence
  Description of Artificial Sequence: Synthetic oligonucleotide
  Sense strand starting at position 3849 of SEQ ID NO: 915515
guggcuccucgaggucaga

SEQ ID NO: 1085663 - RNA, 19 nt, Artificial Sequence
  Description of Artificial Sequence: Synthetic oligonucleotide
  Antisense strand to SEQ ID NO: 1085662
ucugaccucgaggagccac

SEQ ID NO: 1085664 - RNA, 19 nt, Artificial Sequence
  Description of Artificial Sequence: Synthetic oligonucleotide
  Sense strand starting at position 3860 of SEQ ID NO: 915515
aggucagagagcuggauaa

SEQ ID NO: 1085665 - RNA, 19 nt, Artificial Sequence
  Description of Artificial Sequence: Synthetic oligonucleotide
  Antisense strand to SEQ ID NO: 1085664
uuauccagcucucugaccu

SEQ ID NO: 1085666 - RNA, 19 nt, Artificial Sequence
  Description of Artificial Sequence: Synthetic oligonucleotide
  Sense strand starting at position 259 of SEQ ID NO: 915516
guuugacuguuuggcaguu

SEQ ID NO: 1085667 - RNA, 19 nt, Artificial Sequence
  Description of Artificial Sequence: Synthetic oligonucleotide
  Antisense strand to SEQ ID NO: 1085666
aacugccaaacagucaaac

SEQ ID NO: 1085668 - RNA, 19 nt, Artificial Sequence
  Description of Artificial Sequence: Synthetic oligonucleotide
  Sense strand starting at position 269 of SEQ ID NO: 915516
uuggcaguuuccucgggaa

SEQ ID NO: 1085669 - RNA, 19 nt, Artificial Sequence
  Description of Artificial Sequence: Synthetic oligonucleotide
  Antisense strand to SEQ ID NO: 1085668
uucccgaggaaacugccaa

SEQ ID NO: 1085670 - RNA, 19 nt, Artificial Sequence
  Description of Artificial Sequence: Synthetic oligonucleotide
  Sense strand starting at position 273 of SEQ ID NO: 915516
caguuuccucgggaaccga

SEQ ID NO: 1085671 - RNA, 19 nt, Artificial Sequence
  Description of Artificial Sequence: Synthetic oligonucleotide
  Antisense strand to SEQ ID NO: 1085670
ucgguucccgaggaaacug

SEQ ID NO: 1085672 - RNA, 19 nt, Artificial Sequence
  Description of Artificial Sequence: Synthetic oligonucleotide
  Sense strand starting at position 337 of SEQ ID NO: 915516
gaagaaguccuuugcggug

SEQ ID NO: 1085673 - RNA, 19 nt, Artificial Sequence
  Description of Artificial Sequence: Synthetic oligonucleotide
  Antisense strand to SEQ ID NO: 1085672
caccgcaaaggacuucuuc

SEQ ID NO: 1085674 - RNA, 19 nt, Artificial Sequence
  Description of Artificial Sequence: Synthetic oligonucleotide
  Sense strand starting at position 342 of SEQ ID NO: 915516
aguccuuugcgguggagga

SEQ ID NO: 1085675 - RNA, 19 nt, Artificial Sequence
  Description of Artificial Sequence: Synthetic oligonucleotide
  Antisense strand to SEQ ID NO: 1085674
uccuccaccgcaaaggacu

SEQ ID NO: 1085676 - RNA, 19 nt, Artificial Sequence
  Description of Artificial Sequence: Synthetic oligonucleotide
  Sense strand starting at position 367 of SEQ ID NO: 915516
aaggaaaguccuugaccca

SEQ ID NO: 1085677 - RNA, 19 nt, Artificial Sequence
  Description of Artificial Sequence: Synthetic oligonucleotide
  Antisense strand to SEQ ID NO: 1085676
ugggucaaggacuuuccuu

SEQ ID NO: 1085678 - RNA, 19 nt, Artificial Sequence
  Description of Artificial Sequence: Synthetic oligonucleotide
  Sense strand starting at position 414 of SEQ ID NO: 915516
gcacacacuucccaggaaa

SEQ ID NO: 1085679 - RNA, 19 nt, Artificial Sequence
  Description of Artificial Sequence: Synthetic oligonucleotide
  Antisense strand to SEQ ID NO: 1085678
uuuccugggaagugugugc

SEQ ID NO: 1085680 - RNA, 19 nt, Artificial Sequence
  Description of Artificial Sequence: Synthetic oligonucleotide
  Sense strand starting at position 555 of SEQ ID NO: 915516
cucagagccuucuggaagu

SEQ ID NO: 1085681 - RNA, 19 nt, Artificial Sequence
  Description of Artificial Sequence: Synthetic oligonucleotide
  Antisense strand to SEQ ID NO: 1085680
acuuccagaaggcucugag

SEQ ID NO: 1085682 - RNA, 19 nt, Artificial Sequence
  Description of Artificial Sequence: Synthetic oligonucleotide
  Sense strand starting at position 1572 of SEQ ID NO: 915516
ucacacaacuguugaguau

SEQ ID NO: 1085683 - RNA, 19 nt, Artificial Sequence
  Description of Artificial Sequence: Synthetic oligonucleotide
  Antisense strand to SEQ ID NO: 1085682
auacucaacaguuguguga

SEQ ID NO: 1085684 - RNA, 19 nt, Artificial Sequence
  Description of Artificial Sequence: Synthetic oligonucleotide
  Sense strand starting at position 1601 of SEQ ID NO: 915516
cauugcaacgcuugucaca

SEQ ID NO: 1085685 - RNA, 19 nt, Artificial Sequence
  Description of Artificial Sequence: Synthetic oligonucleotide
  Antisense strand to SEQ ID NO: 1085684
ugugacaagcguugcaaug

SEQ ID NO: 1085686 - RNA, 19 nt, Artificial Sequence
  Description of Artificial Sequence: Synthetic oligonucleotide
  Sense strand starting at position 1603 of SEQ ID NO: 915516
uugcaacgcuugucacaga

SEQ ID NO: 1085687 - RNA, 19 nt, Artificial Sequence
  Description of Artificial Sequence: Synthetic oligonucleotide
  Antisense strand to SEQ ID NO: 1085686
ucugugacaagcguugcaa

SEQ ID NO: 1085688 - RNA, 19 nt, Artificial Sequence
  Description of Artificial Sequence: Synthetic oligonucleotide
  Sense strand starting at position 1608 of SEQ ID NO: 915516
acgcuugucacagagccua

SEQ ID NO: 1085689 - RNA, 19 nt, Artificial Sequence
  Description of Artificial Sequence: Synthetic oligonucleotide
  Antisense strand to SEQ ID NO: 1085688
uaggcucugugacaagcgu

SEQ ID NO: 1085690 - RNA, 19 nt, Artificial Sequence
  Description of Artificial Sequence: Synthetic oligonucleotide
  Sense strand starting at position 1848 of SEQ ID NO: 915516
gggcaaauguuggucauug

SEQ ID NO: 1085691 - RNA, 19 nt, Artificial Sequence
  Description of Artificial Sequence: Synthetic oligonucleotide
  Antisense strand to SEQ ID NO: 1085690
caaugaccaacauuugccc

SEQ ID NO: 1085692 - RNA, 19 nt, Artificial Sequence
  Description of Artificial Sequence: Synthetic oligonucleotide
  Sense strand starting at position 1850 of SEQ ID NO: 915516
gcaaauguuggucauuggu

SEQ ID NO: 1085693 - RNA, 19 nt, Artificial Sequence
  Description of Artificial Sequence: Synthetic oligonucleotide
  Antisense strand to SEQ ID NO: 1085692
accaaugaccaacauuugc

SEQ ID NO: 1085694 - RNA, 19 nt, Artificial Sequence
  Description of Artificial Sequence: Synthetic oligonucleotide
  Sense strand starting at position 1965 of SEQ ID NO: 915516
uggcuugugucuuugugua

SEQ ID NO: 1085695 - RNA, 19 nt, Artificial Sequence
  Description of Artificial Sequence: Synthetic oligonucleotide
  Antisense strand to SEQ ID NO: 1085694
uacacaaagacacaagcca

SEQ ID NO: 1085696 - RNA, 19 nt, Artificial Sequence
  Description of Artificial Sequence: Synthetic oligonucleotide
  Sense strand starting at position 1967 of SEQ ID NO: 915516
gcuugugucuuuguguauu

SEQ ID NO: 1085697 - RNA, 19 nt, Artificial Sequence
  Description of Artificial Sequence: Synthetic oligonucleotide
  Antisense strand to SEQ ID NO: 1085696
aauacacaaagacacaagc

SEQ ID NO: 1085698 - RNA, 19 nt, Artificial Sequence
  Description of Artificial Sequence: Synthetic oligonucleotide
  Sense strand starting at position 2128 of SEQ ID NO: 915516
uccuguagcucugagucaa

SEQ ID NO: 1085699 - RNA, 19 nt, Artificial Sequence
  Description of Artificial Sequence: Synthetic oligonucleotide
  Antisense strand to SEQ ID NO: 1085698
uugacucagagcuacagga

SEQ ID NO: 1085700 - RNA, 19 nt, Artificial Sequence
  Description of Artificial Sequence: Synthetic oligonucleotide
  Sense strand starting at position 2506 of SEQ ID NO: 915516
augugucuuugaccucuga

SEQ ID NO: 1085701 - RNA, 19 nt, Artificial Sequence
  Description of Artificial Sequence: Synthetic oligonucleotide
  Antisense strand to SEQ ID NO: 1085700
ucagaggucaaagacacau

SEQ ID NO: 1085702 - RNA, 19 nt, Artificial Sequence
  Description of Artificial Sequence: Synthetic oligonucleotide
  Sense strand starting at position 2835 of SEQ ID NO: 915516
gcugguauugcccacagaa

SEQ ID NO: 1085703 - RNA, 19 nt, Artificial Sequence
  Description of Artificial Sequence: Synthetic oligonucleotide
  Antisense strand to SEQ ID NO: 1085702
uucugugggcaauaccagc

SEQ ID NO: 1085704 - RNA, 19 nt, Artificial Sequence
  Description of Artificial Sequence: Synthetic oligonucleotide
  Sense strand starting at position 2837 of SEQ ID NO: 915516
ugguauugcccacagaauc

SEQ ID NO: 1085705 - RNA, 19 nt, Artificial Sequence
  Description of Artificial Sequence: Synthetic oligonucleotide
  Antisense strand to SEQ ID NO: 1085704
gauucugugggcaauacca

SEQ ID NO: 1085706 - RNA, 19 nt, Artificial Sequence
  Description of Artificial Sequence: Synthetic oligonucleotide
  Sense strand starting at position 2980 of SEQ ID NO: 915516
cagguacuugucugacuga

SEQ ID NO: 1085707 - RNA, 19 nt, Artificial Sequence
  Description of Artificial Sequence: Synthetic oligonucleotide
  Antisense strand to SEQ ID NO: 1085706
ucagucagacaaguaccug

SEQ ID NO: 1085708 - RNA, 19 nt, Artificial Sequence
  Description of Artificial Sequence: Synthetic oligonucleotide
  Sense strand starting at position 2983 of SEQ ID NO: 915516
guacuugucugacugaguc

SEQ ID NO: 1085709 - RNA, 19 nt, Artificial Sequence
  Description of Artificial Sequence: Synthetic oligonucleotide
  Antisense strand to SEQ ID NO: 1085708
gacucagucagacaaguac

SEQ ID NO: 1085710 - RNA, 19 nt, Artificial Sequence
  Description of Artificial Sequence: Synthetic oligonucleotide
  Sense strand starting at position 3031 of SEQ ID NO: 915516
gguacucagccuuggguga

SEQ ID NO: 1085711 - RNA, 19 nt, Artificial Sequence
  Description of Artificial Sequence: Synthetic oligonucleotide
  Antisense strand to SEQ ID NO: 1085710
ucacccaaggcugaguacc

SEQ ID NO: 1085712 - RNA, 19 nt, Artificial Sequence
  Description of Artificial Sequence: Synthetic oligonucleotide
  Sense strand starting at position 3032 of SEQ ID NO: 915516
guacucagccuugggugau

SEQ ID NO: 1085713 - RNA, 19 nt, Artificial Sequence
  Description of Artificial Sequence: Synthetic oligonucleotide
  Antisense strand to SEQ ID NO: 1085712
aucacccaaggcugaguac

SEQ ID NO: 1085714 - RNA, 19 nt, Artificial Sequence
  Description of Artificial Sequence: Synthetic oligonucleotide
  Sense strand starting at position 3516 of SEQ ID NO: 915516
ccuugagguucuuagaaag

SEQ ID NO: 1085715 - RNA, 19 nt, Artificial Sequence
  Description of Artificial Sequence: Synthetic oligonucleotide
  Antisense strand to SEQ ID NO: 1085714
cuuucuaagaaccucaagg

SEQ ID NO: 1085716 - RNA, 19 nt, Artificial Sequence
  Description of Artificial Sequence: Synthetic oligonucleotide
  Sense strand starting at position 132 of SEQ ID NO: 915517
uuuagaaagucauuaagca

SEQ ID NO: 1085717 - RNA, 19 nt, Artificial Sequence
  Description of Artificial Sequence: Synthetic oligonucleotide
  Antisense strand to SEQ ID NO: 1085716
ugcuuaaugacuuucuaaa

SEQ ID NO: 1085718 - RNA, 19 nt, Artificial Sequence
  Description of Artificial Sequence: Synthetic oligonucleotide
  Sense strand starting at position 136 of SEQ ID NO: 915517
gaaagucauuaagcaagga

SEQ ID NO: 1085719 - RNA, 19 nt, Artificial Sequence
  Description of Artificial Sequence: Synthetic oligonucleotide
  Antisense strand to SEQ ID NO: 1085718
uccuugcuuaaugacuuuc

SEQ ID NO: 1085720 - RNA, 19 nt, Artificial Sequence
  Description of Artificial Sequence: Synthetic oligonucleotide
  Sense strand starting at position 140 of SEQ ID NO: 915517
gucauuaagcaaggacuca

SEQ ID NO: 1085721 - RNA, 19 nt, Artificial Sequence
  Description of Artificial Sequence: Synthetic oligonucleotide
  Antisense strand to SEQ ID NO: 1085720
ugaguccuugcuuaaugac

SEQ ID NO: 1085722 - RNA, 19 nt, Artificial Sequence
  Description of Artificial Sequence: Synthetic oligonucleotide
  Sense strand starting at position 199 of SEQ ID NO: 915517
agggaaauggcauggcaua

SEQ ID NO: 1085723 - RNA, 19 nt, Artificial Sequence
  Description of Artificial Sequence: Synthetic oligonucleotide
  Antisense strand to SEQ ID NO: 1085722
uaugccaugccauuucccu

SEQ ID NO: 1085724 - RNA, 19 nt, Artificial Sequence
  Description of Artificial Sequence: Synthetic oligonucleotide
  Sense strand starting at position 292 of SEQ ID NO: 915517
auaucacuauagucaaguu

SEQ ID NO: 1085725 - RNA, 19 nt, Artificial Sequence
  Description of Artificial Sequence: Synthetic oligonucleotide
  Antisense strand to SEQ ID NO: 1085724
aacuugacuauagugauau

SEQ ID NO: 1085726 - RNA, 19 nt, Artificial Sequence
  Description of Artificial Sequence: Synthetic oligonucleotide
  Sense strand starting at position 332 of SEQ ID NO: 915517
cuaaauugcuaacugguaa

SEQ ID NO: 1085727 - RNA, 19 nt, Artificial Sequence
  Description of Artificial Sequence: Synthetic oligonucleotide
  Antisense strand to SEQ ID NO: 1085726
uuaccaguuagcaauuuag

SEQ ID NO: 1085728 - RNA, 19 nt, Artificial Sequence
  Description of Artificial Sequence: Synthetic oligonucleotide
  Sense strand starting at position 343 of SEQ ID NO: 915517
acugguaaaucugugagaa

SEQ ID NO: 1085729 - RNA, 19 nt, Artificial Sequence
  Description of Artificial Sequence: Synthetic oligonucleotide
  Antisense strand to SEQ ID NO: 1085728
uucucacagauuuaccagu

SEQ ID NO: 1085730 - RNA, 19 nt, Artificial Sequence
  Description of Artificial Sequence: Synthetic oligonucleotide
  Sense strand starting at position 344 of SEQ ID NO: 915517
cugguaaaucugugagaag

SEQ ID NO: 1085731 - RNA, 19 nt, Artificial Sequence
  Description of Artificial Sequence: Synthetic oligonucleotide
  Antisense strand to SEQ ID NO: 1085730
cuucucacagauuuaccag

SEQ ID NO: 1085732 - RNA, 19 nt, Artificial Sequence
  Description of Artificial Sequence: Synthetic oligonucleotide
  Sense strand starting at position 372 of SEQ ID NO: 915517
gaccuugguccugauucua

SEQ ID NO: 1085733 - RNA, 19 nt, Artificial Sequence
  Description of Artificial Sequence: Synthetic oligonucleotide
  Antisense strand to SEQ ID NO: 1085732
uagaaucaggaccaagguc

SEQ ID NO: 1085734 - RNA, 19 nt, Artificial Sequence
  Description of Artificial Sequence: Synthetic oligonucleotide
  Sense strand starting at position 542 of SEQ ID NO: 915517
gugcccuucgccuuacaua

SEQ ID NO: 1085735 - RNA, 19 nt, Artificial Sequence
  Description of Artificial Sequence: Synthetic oligonucleotide
  Antisense strand to SEQ ID NO: 1085734
uauguaaggcgaagggcac

SEQ ID NO: 1085736 - RNA, 19 nt, Artificial Sequence
  Description of Artificial Sequence: Synthetic oligonucleotide
  Sense strand starting at position 705 of SEQ ID NO: 915517
cagaguagaguacgucaaa

SEQ ID NO: 1085737 - RNA, 19 nt, Artificial Sequence
  Description of Artificial Sequence: Synthetic oligonucleotide
  Antisense strand to SEQ ID NO: 1085736
uuugacguacucuacucug

SEQ ID NO: 1085738 - RNA, 19 nt, Artificial Sequence
  Description of Artificial Sequence: Synthetic oligonucleotide
  Sense strand starting at position 874 of SEQ ID NO: 915517
agaguaugugcggugcauu

SEQ ID NO: 1085739 - RNA, 19 nt, Artificial Sequence
  Description of Artificial Sequence: Synthetic oligonucleotide
  Antisense strand to SEQ ID NO: 1085738
aaugcaccgcacauacucu

SEQ ID NO: 1085740 - RNA, 19 nt, Artificial Sequence
  Description of Artificial Sequence: Synthetic oligonucleotide
  Sense strand starting at position 888 of SEQ ID NO: 915517
gcauuagaaugugcaauga

SEQ ID NO: 1085741 - RNA, 19 nt, Artificial Sequence
  Description of Artificial Sequence: Synthetic oligonucleotide
  Antisense strand to SEQ ID NO: 1085740
ucauugcacauucuaaugc

SEQ ID NO: 1085742 - RNA, 19 nt, Artificial Sequence
  Description of Artificial Sequence: Synthetic oligonucleotide
  Sense strand starting at position 936 of SEQ ID NO: 915517
aguugagggcuuuaugagu

SEQ ID NO: 1085743 - RNA, 19 nt, Artificial Sequence
  Description of Artificial Sequence: Synthetic oligonucleotide
  Antisense strand to SEQ ID NO: 1085742
acucauaaagcccucaacu

SEQ ID NO: 1085744 - RNA, 19 nt, Artificial Sequence
  Description of Artificial Sequence: Synthetic oligonucleotide
  Sense strand starting at position 985 of SEQ ID NO: 915517
gcguauuacagccagaaug

SEQ ID NO: 1085745 - RNA, 19 nt, Artificial Sequence
  Description of Artificial Sequence: Synthetic oligonucleotide
  Antisense strand to SEQ ID NO: 1085744
cauucuggcuguaauacgc

SEQ ID NO: 1085746 - RNA, 19 nt, Artificial Sequence
  Description of Artificial Sequence: Synthetic oligonucleotide
  Sense strand starting at position 987 of SEQ ID NO: 915517
guauuacagccagaaugca

SEQ ID NO: 1085747 - RNA, 19 nt, Artificial Sequence
  Description of Artificial Sequence: Synthetic oligonucleotide
  Antisense strand to SEQ ID NO: 1085746
ugcauucuggcuguaauac

SEQ ID NO: 1085748 - RNA, 19 nt, Artificial Sequence
  Description of Artificial Sequence: Synthetic oligonucleotide
  Sense strand starting at position 2420 of SEQ ID NO: 915517
aguacagcgcguccuaaau

SEQ ID NO: 1085749 - RNA, 19 nt, Artificial Sequence
  Description of Artificial Sequence: Synthetic oligonucleotide
  Antisense strand to SEQ ID NO: 1085748
auuuaggacgcgcuguacu

SEQ ID NO: 1085750 - RNA, 19 nt, Artificial Sequence
  Description of Artificial Sequence: Synthetic oligonucleotide
  Sense strand starting at position 2451 of SEQ ID NO: 915517
aagaacuguggcugagcaa

SEQ ID NO: 1085751 - RNA, 19 nt, Artificial Sequence
  Description of Artificial Sequence: Synthetic oligonucleotide
  Antisense strand to SEQ ID NO: 1085750
uugcucagccacaguucuu

SEQ ID NO: 1085752 - RNA, 19 nt, Artificial Sequence
  Description of Artificial Sequence: Synthetic oligonucleotide
  Sense strand starting at position 2462 of SEQ ID NO: 915517
cugagcaaugcguugcuca

SEQ ID NO: 1085753 - RNA, 19 nt, Artificial Sequence
  Description of Artificial Sequence: Synthetic oligonucleotide
  Antisense strand to SEQ ID NO: 1085752
ugagcaacgcauugcucag

SEQ ID NO: 1085754 - RNA, 19 nt, Artificial Sequence
  Description of Artificial Sequence: Synthetic oligonucleotide
  Sense strand starting at position 2464 of SEQ ID NO: 915517
gagcaaugcguugcucaca

SEQ ID NO: 1085755 - RNA, 19 nt, Artificial Sequence
  Description of Artificial Sequence: Synthetic oligonucleotide
  Antisense strand to SEQ ID NO: 1085754
ugugagcaacgcauugcuc

SEQ ID NO: 1085756 - RNA, 19 nt, Artificial Sequence
  Description of Artificial Sequence: Synthetic oligonucleotide
  Sense strand starting at position 2545 of SEQ ID NO: 915517
ugaugucuccgaggaguca

SEQ ID NO: 1085757 - RNA, 19 nt, Artificial Sequence
  Description of Artificial Sequence: Synthetic oligonucleotide
  Antisense strand to SEQ ID NO: 1085756
ugacuccucggagacauca

SEQ ID NO: 1085758 - RNA, 19 nt, Artificial Sequence
  Description of Artificial Sequence: Synthetic oligonucleotide
  Sense strand starting at position 2546 of SEQ ID NO: 915517
gaugucuccgaggagucau

SEQ ID NO: 1085759 - RNA, 19 nt, Artificial Sequence
  Description of Artificial Sequence: Synthetic oligonucleotide
  Antisense strand to SEQ ID NO: 1085758
augacuccucggagacauc

SEQ ID NO: 1085760 - RNA, 19 nt, Artificial Sequence
  Description of Artificial Sequence: Synthetic oligonucleotide
  Sense strand starting at position 2571 of SEQ ID NO: 915517
agcagugcagucgcuuaua

SEQ ID NO: 1085761 - RNA, 19 nt, Artificial Sequence
  Description of Artificial Sequence: Synthetic oligonucleotide
  Antisense strand to SEQ ID NO: 1085760
uauaagcgacugcacugcu

SEQ ID NO: 1085762 - RNA, 19 nt, Artificial Sequence
  Description of Artificial Sequence: Synthetic oligonucleotide
  Sense strand starting at position 2850 of SEQ ID NO: 915517
gggaauugccuaggucaca

SEQ ID NO: 1085763 - RNA, 19 nt, Artificial Sequence
  Description of Artificial Sequence: Synthetic oligonucleotide
  Antisense strand to SEQ ID NO: 1085762
ugugaccuaggcaauuccc

SEQ ID NO: 1085764 - RNA, 19 nt, Artificial Sequence
  Description of Artificial Sequence: Synthetic oligonucleotide
  Sense strand starting at position 2871 of SEQ ID NO: 915517
ggcaauagucgagguagga

SEQ ID NO: 1085765 - RNA, 19 nt, Artificial Sequence
  Description of Artificial Sequence: Synthetic oligonucleotide
  Antisense strand to SEQ ID NO: 1085764
uccuaccucgacuauugcc

SEQ ID NO: 1085766 - RNA, 19 nt, Artificial Sequence
  Description of Artificial Sequence: Synthetic oligonucleotide
  Sense strand starting at position 2972 of SEQ ID NO: 915517
cuuuauaucuugguuucua

SEQ ID NO: 1085767 - RNA, 19 nt, Artificial Sequence
  Description of Artificial Sequence: Synthetic oligonucleotide
  Antisense strand to SEQ ID NO: 1085766
uagaaaccaagauauaaag

SEQ ID NO: 1085768 - RNA, 19 nt, Artificial Sequence
  Description of Artificial Sequence: Synthetic oligonucleotide
  Sense strand starting at position 3089 of SEQ ID NO: 915517
uccuuaaagcaaggagauu

SEQ ID NO: 1085769 - RNA, 19 nt, Artificial Sequence
  Description of Artificial Sequence: Synthetic oligonucleotide
  Antisense strand to SEQ ID NO: 1085768
aaucuccuugcuuuaagga

SEQ ID NO: 1085770 - RNA, 19 nt, Artificial Sequence
  Description of Artificial Sequence: Synthetic oligonucleotide
  Sense strand starting at position 3111 of SEQ ID NO: 915517
uggcuaugucaaggaagau

SEQ ID NO: 1085771 - RNA, 19 nt, Artificial Sequence
  Description of Artificial Sequence: Synthetic oligonucleotide
  Antisense strand to SEQ ID NO: 1085770
aucuuccuugacauagcca

SEQ ID NO: 1085772 - RNA, 19 nt, Artificial Sequence
  Description of Artificial Sequence: Synthetic oligonucleotide
  Sense strand starting at position 3291 of SEQ ID NO: 915517
aagacuagccugugugaaa

SEQ ID NO: 1085773 - RNA, 19 nt, Artificial Sequence
  Description of Artificial Sequence: Synthetic oligonucleotide
  Antisense strand to SEQ ID NO: 1085772
uuucacacaggcuagucuu

SEQ ID NO: 1085774 - RNA, 19 nt, Artificial Sequence
  Description of Artificial Sequence: Synthetic oligonucleotide
  Sense strand starting at position 3292 of SEQ ID NO: 915517
agacuagccugugugaaac

SEQ ID NO: 1085775 - RNA, 19 nt, Artificial Sequence
  Description of Artificial Sequence: Synthetic oligonucleotide
  Antisense strand to SEQ ID NO: 1085774
guuucacacaggcuagucu

SEQ ID NO: 1085776 - RNA, 19 nt, Artificial Sequence
  Description of Artificial Sequence: Synthetic oligonucleotide
  Sense strand starting at position 3596 of SEQ ID NO: 915517
aagugaaaugacgguggaa

SEQ ID NO: 1085777 - RNA, 19 nt, Artificial Sequence
  Description of Artificial Sequence: Synthetic oligonucleotide
  Antisense strand to SEQ ID NO: 1085776
uuccaccgucauuucacuu

SEQ ID NO: 1085778 - RNA, 19 nt, Artificial Sequence
  Description of Artificial Sequence: Synthetic oligonucleotide
  Sense strand starting at position 3598 of SEQ ID NO: 915517
gugaaaugacgguggaaug

SEQ ID NO: 1085779 - RNA, 19 nt, Artificial Sequence
  Description of Artificial Sequence: Synthetic oligonucleotide
  Antisense strand to SEQ ID NO: 1085778
cauuccaccgucauuucac

SEQ ID NO: 1085780 - RNA, 19 nt, Artificial Sequence
  Description of Artificial Sequence: Synthetic oligonucleotide
  Sense strand starting at position 3747 of SEQ ID NO: 915517
uugcacagucuuuggauuu

SEQ ID NO: 1085781 - RNA, 19 nt, Artificial Sequence
  Description of Artificial Sequence: Synthetic oligonucleotide
  Antisense strand to SEQ ID NO: 1085780
aaauccaaagacugugcaa

SEQ ID NO: 1085782 - RNA, 19 nt, Artificial Sequence
  Description of Artificial Sequence: Synthetic oligonucleotide
  Sense strand starting at position 3793 of SEQ ID NO: 915517
guaccucuacaguggagaa

SEQ ID NO: 1085783 - RNA, 19 nt, Artificial Sequence
  Description of Artificial Sequence: Synthetic oligonucleotide
  Antisense strand to SEQ ID NO: 1085782
uucuccacuguagagguac

SEQ ID NO: 1085784 - RNA, 19 nt, Artificial Sequence
  Description of Artificial Sequence: Synthetic oligonucleotide
  Sense strand starting at position 3803 of SEQ ID NO: 915517
aguggagaaaucugaccga

SEQ ID NO: 1085785 - RNA, 19 nt, Artificial Sequence
  Description of Artificial Sequence: Synthetic oligonucleotide
  Antisense strand to SEQ ID NO: 1085784
ucggucagauuucuccacu

SEQ ID NO: 1085786 - RNA, 19 nt, Artificial Sequence
  Description of Artificial Sequence: Synthetic oligonucleotide
  Sense strand starting at position 3807 of SEQ ID NO: 915517
gagaaaucugaccgacacu

SEQ ID NO: 1085787 - RNA, 19 nt, Artificial Sequence
  Description of Artificial Sequence: Synthetic oligonucleotide
  Antisense strand to SEQ ID NO: 1085786
agugucggucagauuucuc

SEQ ID NO: 1085788 - RNA, 19 nt, Artificial Sequence
  Description of Artificial Sequence: Synthetic oligonucleotide
  Sense strand starting at position 3845 of SEQ ID NO: 915517
aguuaaugucaccaauuau

SEQ ID NO: 1085789 - RNA, 19 nt, Artificial Sequence
  Description of Artificial Sequence: Synthetic oligonucleotide
  Antisense strand to SEQ ID NO: 1085788
auaauuggugacauuaacu

SEQ ID NO: 1085790 - RNA, 19 nt, Artificial Sequence
  Description of Artificial Sequence: Synthetic oligonucleotide
  Sense strand starting at position 3852 of SEQ ID NO: 915517
gucaccaauuaugugauaa

SEQ ID NO: 1085791 - RNA, 19 nt, Artificial Sequence
  Description of Artificial Sequence: Synthetic oligonucleotide
  Antisense strand to SEQ ID NO: 1085790
uuaucacauaauuggugac

SEQ ID NO: 1085792 - RNA, 19 nt, Artificial Sequence
  Description of Artificial Sequence: Synthetic oligonucleotide
  Sense strand starting at position 3907 of SEQ ID NO: 915517
guuacaauaucucuuaagu

SEQ ID NO: 1085793 - RNA, 19 nt, Artificial Sequence
  Description of Artificial Sequence: Synthetic oligonucleotide
  Antisense strand to SEQ ID NO: 1085792
acuuaagagauauuguaac

SEQ ID NO: 1085794 - RNA, 19 nt, Artificial Sequence
  Description of Artificial Sequence: Synthetic oligonucleotide
  Sense strand starting at position 3956 of SEQ ID NO: 915517
cuagaaacaucagaaagau

SEQ ID NO: 1085795 - RNA, 19 nt, Artificial Sequence
  Description of Artificial Sequence: Synthetic oligonucleotide
  Antisense strand to SEQ ID NO: 1085794
aucuuucugauguuucuag

SEQ ID NO: 1085796 - RNA, 19 nt, Artificial Sequence
  Description of Artificial Sequence: Synthetic oligonucleotide
  Sense strand starting at position 9 of SEQ ID NO: 915518
aaggcauauuguuuguaaa

SEQ ID NO: 1085797 - RNA, 19 nt, Artificial Sequence
  Description of Artificial Sequence: Synthetic oligonucleotide
  Antisense strand to SEQ ID NO: 1085796
uuuacaaacaauaugccuu

SEQ ID NO: 1085798 - RNA, 19 nt, Artificial Sequence
  Description of Artificial Sequence: Synthetic oligonucleotide
  Sense strand starting at position 39 of SEQ ID NO: 915518
cuuggcuaauagucaacua

SEQ ID NO: 1085799 - RNA, 19 nt, Artificial Sequence
  Description of Artificial Sequence: Synthetic oligonucleotide
  Antisense strand to SEQ ID NO: 1085798
uaguugacuauuagccaag

SEQ ID NO: 1085800 - RNA, 19 nt, Artificial Sequence
  Description of Artificial Sequence: Synthetic oligonucleotide
  Sense strand starting at position 102 of SEQ ID NO: 915518
accaaagucuuggcucaau

SEQ ID NO: 1085801 - RNA, 19 nt, Artificial Sequence
  Description of Artificial Sequence: Synthetic oligonucleotide
  Antisense strand to SEQ ID NO: 1085800
auugagccaagacuuuggu

SEQ ID NO: 1085802 - RNA, 19 nt, Artificial Sequence
  Description of Artificial Sequence: Synthetic oligonucleotide
  Sense strand starting at position 105 of SEQ ID NO: 915518
aaagucuuggcucaaucga

SEQ ID NO: 1085803 - RNA, 19 nt, Artificial Sequence
  Description of Artificial Sequence: Synthetic oligonucleotide
  Antisense strand to SEQ ID NO: 1085802
ucgauugagccaagacuuu

SEQ ID NO: 1085804 - RNA, 19 nt, Artificial Sequence
  Description of Artificial Sequence: Synthetic oligonucleotide
  Sense strand starting at position 287 of SEQ ID NO: 915518
cccugacacccugguaaga

SEQ ID NO: 1085805 - RNA, 19 nt, Artificial Sequence
  Description of Artificial Sequence: Synthetic oligonucleotide
  Antisense strand to SEQ ID NO: 1085804
ucuuaccagggugucaggg

SEQ ID NO: 1085806 - RNA, 19 nt, Artificial Sequence
  Description of Artificial Sequence: Synthetic oligonucleotide
  Sense strand starting at position 317 of SEQ ID NO: 915518
uagccucaggcagaaagau

SEQ ID NO: 1085807 - RNA, 19 nt, Artificial Sequence
  Description of Artificial Sequence: Synthetic oligonucleotide
  Antisense strand to SEQ ID NO: 1085806
aucuuucugccugaggcua

SEQ ID NO: 1085808 - RNA, 19 nt, Artificial Sequence
  Description of Artificial Sequence: Synthetic oligonucleotide
  Sense strand starting at position 355 of SEQ ID NO: 915518
guugcaagugaucaggaga

SEQ ID NO: 1085809 - RNA, 19 nt, Artificial Sequence
  Description of Artificial Sequence: Synthetic oligonucleotide
  Antisense strand to SEQ ID NO: 1085808
ucuccugaucacuugcaac

SEQ ID NO: 1085810 - RNA, 19 nt, Artificial Sequence
  Description of Artificial Sequence: Synthetic oligonucleotide
  Sense strand starting at position 380 of SEQ ID NO: 915518
cuagauaagucacuggcuu

SEQ ID NO: 1085811 - RNA, 19 nt, Artificial Sequence
  Description of Artificial Sequence: Synthetic oligonucleotide
  Antisense strand to SEQ ID NO: 1085810
aagccagugacuuaucuag

SEQ ID NO: 1085812 - RNA, 19 nt, Artificial Sequence
  Description of Artificial Sequence: Synthetic oligonucleotide
  Sense strand starting at position 600 of SEQ ID NO: 915518
guaagauauugagcaaaga

SEQ ID NO: 1085813 - RNA, 19 nt, Artificial Sequence
  Description of Artificial Sequence: Synthetic oligonucleotide
  Antisense strand to SEQ ID NO: 1085812
ucuuugcucaauaucuuac

SEQ ID NO: 1085814 - RNA, 19 nt, Artificial Sequence
  Description of Artificial Sequence: Synthetic oligonucleotide
  Sense strand starting at position 669 of SEQ ID NO: 915518
uccuccugaugucuuagau

SEQ ID NO: 1085815 - RNA, 19 nt, Artificial Sequence
  Description of Artificial Sequence: Synthetic oligonucleotide
  Antisense strand to SEQ ID NO: 1085814
aucuaagacaucaggagga

SEQ ID NO: 1085816 - RNA, 19 nt, Artificial Sequence
  Description of Artificial Sequence: Synthetic oligonucleotide
  Sense strand starting at position 767 of SEQ ID NO: 915518
ccuaauugaccuuggccaa

SEQ ID NO: 1085817 - RNA, 19 nt, Artificial Sequence
  Description of Artificial Sequence: Synthetic oligonucleotide
  Antisense strand to SEQ ID NO: 1085816
uuggccaaggucaauuagg

SEQ ID NO: 1085818 - RNA, 19 nt, Artificial Sequence
  Description of Artificial Sequence: Synthetic oligonucleotide
  Sense strand starting at position 768 of SEQ ID NO: 915518
cuaauugaccuuggccaau

SEQ ID NO: 1085819 - RNA, 19 nt, Artificial Sequence
  Description of Artificial Sequence: Synthetic oligonucleotide
  Antisense strand to SEQ ID NO: 1085818
auuggccaaggucaauuag

SEQ ID NO: 1085820 - RNA, 19 nt, Artificial Sequence
  Description of Artificial Sequence: Synthetic oligonucleotide
  Sense strand starting at position 819 of SEQ ID NO: 915518
aacuaagggcucgaugagu

SEQ ID NO: 1085821 - RNA, 19 nt, Artificial Sequence
  Description of Artificial Sequence: Synthetic oligonucleotide
  Antisense strand to SEQ ID NO: 1085820
acucaucgagcccuuaguu

SEQ ID NO: 1085822 - RNA, 19 nt, Artificial Sequence
  Description of Artificial Sequence: Synthetic oligonucleotide
  Sense strand starting at position 1156 of SEQ ID NO: 915518
agucuuagaugaucaaaug

SEQ ID NO: 1085823 - RNA, 19 nt, Artificial Sequence
  Description of Artificial Sequence: Synthetic oligonucleotide
  Antisense strand to SEQ ID NO: 1085822
cauuugaucaucuaagacu

SEQ ID NO: 1085824 - RNA, 19 nt, Artificial Sequence
  Description of Artificial Sequence: Synthetic oligonucleotide
  Sense strand starting at position 1173 of SEQ ID NO: 915518
ugcggauuccugucucugu

SEQ ID NO: 1085825 - RNA, 19 nt, Artificial Sequence
  Description of Artificial Sequence: Synthetic oligonucleotide
  Antisense strand to SEQ ID NO: 1085824
acagagacaggaauccgca

SEQ ID NO: 1085826 - RNA, 19 nt, Artificial Sequence
  Description of Artificial Sequence: Synthetic oligonucleotide
  Sense strand starting at position 1383 of SEQ ID NO: 915518
agagucuucugggcuuaca

SEQ ID NO: 1085827 - RNA, 19 nt, Artificial Sequence
  Description of Artificial Sequence: Synthetic oligonucleotide
  Antisense strand to SEQ ID NO: 1085826
uguaagcccagaagacucu

SEQ ID NO: 1085828 - RNA, 19 nt, Artificial Sequence
  Description of Artificial Sequence: Synthetic oligonucleotide
  Sense strand starting at position 2450 of SEQ ID NO: 915518
aguguuuccucaucaccaa

SEQ ID NO: 1085829 - RNA, 19 nt, Artificial Sequence
  Description of Artificial Sequence: Synthetic oligonucleotide
  Antisense strand to SEQ ID NO: 1085828
uuggugaugaggaaacacu

SEQ ID NO: 1085830 - RNA, 19 nt, Artificial Sequence
  Description of Artificial Sequence: Synthetic oligonucleotide
  Sense strand starting at position 2451 of SEQ ID NO: 915518
guguuuccucaucaccaaa

SEQ ID NO: 1085831 - RNA, 19 nt, Artificial Sequence
  Description of Artificial Sequence: Synthetic oligonucleotide
  Antisense strand to SEQ ID NO: 1085830
uuuggugaugaggaaacac

SEQ ID NO: 1085832 - RNA, 19 nt, Artificial Sequence
  Description of Artificial Sequence: Synthetic oligonucleotide
  Sense strand starting at position 2622 of SEQ ID NO: 915518
accuaauugucaccgaaua

SEQ ID NO: 1085833 - RNA, 19 nt, Artificial Sequence
  Description of Artificial Sequence: Synthetic oligonucleotide
  Antisense strand to SEQ ID NO: 1085832
uauucggugacaauuaggu

SEQ ID NO: 1085834 - RNA, 19 nt, Artificial Sequence
  Description of Artificial Sequence: Synthetic oligonucleotide
  Sense strand starting at position 2623 of SEQ ID NO: 915518
ccuaauugucaccgaauau

SEQ ID NO: 1085835 - RNA, 19 nt, Artificial Sequence
  Description of Artificial Sequence: Synthetic oligonucleotide
  Antisense strand to SEQ ID NO: 1085834
auauucggugacaauuagg

SEQ ID NO: 1085836 - RNA, 19 nt, Artificial Sequence
  Description of Artificial Sequence: Synthetic oligonucleotide
  Sense strand starting at position 2657 of SEQ ID NO: 915518
cuaggauuugcguguucaa

SEQ ID NO: 1085837 - RNA, 19 nt, Artificial Sequence
  Description of Artificial Sequence: Synthetic oligonucleotide
  Antisense strand to SEQ ID NO: 1085836
uugaacacgcaaauccuag

SEQ ID NO: 1085838 - RNA, 19 nt, Artificial Sequence
  Description of Artificial Sequence: Synthetic oligonucleotide
  Sense strand starting at position 2705 of SEQ ID NO: 915518
ccagucauuggguggguga

SEQ ID NO: 1085839 - RNA, 19 nt, Artificial Sequence
  Description of Artificial Sequence: Synthetic oligonucleotide
  Antisense strand to SEQ ID NO: 1085838
ucacccacccaaugacugg

SEQ ID NO: 1085840 - RNA, 19 nt, Artificial Sequence
  Description of Artificial Sequence: Synthetic oligonucleotide
  Sense strand starting at position 2707 of SEQ ID NO: 915518
agucauugggugggugaca

SEQ ID NO: 1085841 - RNA, 19 nt, Artificial Sequence
  Description of Artificial Sequence: Synthetic oligonucleotide
  Antisense strand to SEQ ID NO: 1085840
ugucacccacccaaugacu

SEQ ID NO: 1085842 - RNA, 19 nt, Artificial Sequence
  Description of Artificial Sequence: Synthetic oligonucleotide
  Sense strand starting at position 2809 of SEQ ID NO: 915518
cuauuucuguugcuuguau

SEQ ID NO: 1085843 - RNA, 19 nt, Artificial Sequence
  Description of Artificial Sequence: Synthetic oligonucleotide
  Antisense strand to SEQ ID NO: 1085842
auacaagcaacagaaauag

SEQ ID NO: 1085844 - RNA, 19 nt, Artificial Sequence
  Description of Artificial Sequence: Synthetic oligonucleotide
  Sense strand starting at position 2811 of SEQ ID NO: 915518
auuucuguugcuuguauaa

SEQ ID NO: 1085845 - RNA, 19 nt, Artificial Sequence
  Description of Artificial Sequence: Synthetic oligonucleotide
  Antisense strand to SEQ ID NO: 1085844
uuauacaagcaacagaaau

SEQ ID NO: 1085846 - RNA, 19 nt, Artificial Sequence
  Description of Artificial Sequence: Synthetic oligonucleotide
  Sense strand starting at position 2821 of SEQ ID NO: 915518
cuuguauaacccugaugaa

SEQ ID NO: 1085847 - RNA, 19 nt, Artificial Sequence
  Description of Artificial Sequence: Synthetic oligonucleotide
  Antisense strand to SEQ ID NO: 1085846
uucaucaggguuauacaag

SEQ ID NO: 1085848 - RNA, 19 nt, Artificial Sequence
  Description of Artificial Sequence: Synthetic oligonucleotide
  Sense strand starting at position 2880 of SEQ ID NO: 915518
acaacagucgguuaagcaa

SEQ ID NO: 1085849 - RNA, 19 nt, Artificial Sequence
  Description of Artificial Sequence: Synthetic oligonucleotide
  Antisense strand to SEQ ID NO: 1085848
uugcuuaaccgacuguugu

SEQ ID NO: 1085850 - RNA, 19 nt, Artificial Sequence
  Description of Artificial Sequence: Synthetic oligonucleotide
  Sense strand starting at position 2921 of SEQ ID NO: 915518
auuccauccuuccuaguga

SEQ ID NO: 1085851 - RNA, 19 nt, Artificial Sequence
  Description of Artificial Sequence: Synthetic oligonucleotide
  Antisense strand to SEQ ID NO: 1085850
ucacuaggaaggauggaau

SEQ ID NO: 1085852 - RNA, 19 nt, Artificial Sequence
  Description of Artificial Sequence: Synthetic oligonucleotide
  Sense strand starting at position 2936 of SEQ ID NO: 915518
gugacucuccgaggacauu

SEQ ID NO: 1085853 - RNA, 19 nt, Artificial Sequence
  Description of Artificial Sequence: Synthetic oligonucleotide
  Antisense strand to SEQ ID NO: 1085852
aauguccucggagagucac

SEQ ID NO: 1085854 - RNA, 19 nt, Artificial Sequence
  Description of Artificial Sequence: Synthetic oligonucleotide
  Sense strand starting at position 2951 of SEQ ID NO: 915518
cauugagggucaucaaguu

SEQ ID NO: 1085855 - RNA, 19 nt, Artificial Sequence
  Description of Artificial Sequence: Synthetic oligonucleotide
  Antisense strand to SEQ ID NO: 1085854
aacuugaugacccucaaug

SEQ ID NO: 1085856 - RNA, 19 nt, Artificial Sequence
  Description of Artificial Sequence: Synthetic oligonucleotide
  Sense strand starting at position 3167 of SEQ ID NO: 915518
gauugugaauauuccaaug

SEQ ID NO: 1085857 - RNA, 19 nt, Artificial Sequence
  Description of Artificial Sequence: Synthetic oligonucleotide
  Antisense strand to SEQ ID NO: 1085856
cauuggaauauucacaauc

SEQ ID NO: 1085858 - RNA, 19 nt, Artificial Sequence
  Description of Artificial Sequence: Synthetic oligonucleotide
  Sense strand starting at position 3202 of SEQ ID NO: 915518
uggacuaguccugauccau

SEQ ID NO: 1085859 - RNA, 19 nt, Artificial Sequence
  Description of Artificial Sequence: Synthetic oligonucleotide
  Antisense strand to SEQ ID NO: 1085858
auggaucaggacuagucca

SEQ ID NO: 1085860 - RNA, 19 nt, Artificial Sequence
  Description of Artificial Sequence: Synthetic oligonucleotide
  Sense strand starting at position 3266 of SEQ ID NO: 915518
cugcaugcacaguauuaaa

SEQ ID NO: 1085861 - RNA, 19 nt, Artificial Sequence
  Description of Artificial Sequence: Synthetic oligonucleotide
  Antisense strand to SEQ ID NO: 1085860
uuuaauacugugcaugcag

SEQ ID NO: 1085862 - RNA, 19 nt, Artificial Sequence
  Description of Artificial Sequence: Synthetic oligonucleotide
  Sense strand starting at position 3303 of SEQ ID NO: 915518
uguaaauguguggaaggau

SEQ ID NO: 1085863 - RNA, 19 nt, Artificial Sequence
  Description of Artificial Sequence: Synthetic oligonucleotide
  Antisense strand to SEQ ID NO: 1085862
auccuuccacacauuuaca

SEQ ID NO: 1085864 - RNA, 19 nt, Artificial Sequence
  Description of Artificial Sequence: Synthetic oligonucleotide
  Sense strand starting at position 3328 of SEQ ID NO: 915518
uguuuacucgcugaccaaa

SEQ ID NO: 1085865 - RNA, 19 nt, Artificial Sequence
  Description of Artificial Sequence: Synthetic oligonucleotide
  Antisense strand to SEQ ID NO: 1085864
uuuggucagcgaguaaaca

SEQ ID NO: 1085866 - RNA, 19 nt, Artificial Sequence
  Description of Artificial Sequence: Synthetic oligonucleotide
  Sense strand starting at position 3382 of SEQ ID NO: 915518
augaguaauggcugggacu

SEQ ID NO: 1085867 - RNA, 19 nt, Artificial Sequence
  Description of Artificial Sequence: Synthetic oligonucleotide
  Antisense strand to SEQ ID NO: 1085866
agucccagccauuacucau

SEQ ID NO: 1085868 - RNA, 19 nt, Artificial Sequence
  Description of Artificial Sequence: Synthetic oligonucleotide
  Sense strand starting at position 3383 of SEQ ID NO: 915518
ugaguaauggcugggacuu

SEQ ID NO: 1085869 - RNA, 19 nt, Artificial Sequence
  Description of Artificial Sequence: Synthetic oligonucleotide
  Antisense strand to SEQ ID NO: 1085868
aagucccagccauuacuca

SEQ ID NO: 1085870 - RNA, 19 nt, Artificial Sequence
  Description of Artificial Sequence: Synthetic oligonucleotide
  Sense strand starting at position 3384 of SEQ ID NO: 915518
gaguaauggcugggacuua

SEQ ID NO: 1085871 - RNA, 19 nt, Artificial Sequence
  Description of Artificial Sequence: Synthetic oligonucleotide
  Antisense strand to SEQ ID NO: 1085870
uaagucccagccauuacuc

SEQ ID NO: 1085872 - RNA, 19 nt, Artificial Sequence
  Description of Artificial Sequence: Synthetic oligonucleotide
  Sense strand starting at position 3425 of SEQ ID NO: 915518
cacaauggucuuggaucua

SEQ ID NO: 1085873 - RNA, 19 nt, Artificial Sequence
  Description of Artificial Sequence: Synthetic oligonucleotide
  Antisense strand to SEQ ID NO: 1085872
uagauccaagaccauugug

SEQ ID NO: 1085874 - RNA, 19 nt, Artificial Sequence
  Description of Artificial Sequence: Synthetic oligonucleotide
  Sense strand starting at position 3435 of SEQ ID NO: 915518
uuggaucuauucccuggua

SEQ ID NO: 1085875 - RNA, 19 nt, Artificial Sequence
  Description of Artificial Sequence: Synthetic oligonucleotide
  Antisense strand to SEQ ID NO: 1085874
uaccagggaauagauccaa

SEQ ID NO: 1085876 - RNA, 19 nt, Artificial Sequence
  Description of Artificial Sequence: Synthetic oligonucleotide
  Sense strand starting at position 152 of SEQ ID NO: 915519
aggagaugcucuugccuga

SEQ ID NO: 1085877 - RNA, 19 nt, Artificial Sequence
  Description of Artificial Sequence: Synthetic oligonucleotide
  Antisense strand to SEQ ID NO: 1085876
ucaggcaagagcaucuccu

SEQ ID NO: 1085878 - RNA, 19 nt, Artificial Sequence
  Description of Artificial Sequence: Synthetic oligonucleotide
  Sense strand starting at position 156 of SEQ ID NO: 915519
gaugcucuugccugaagca

SEQ ID NO: 1085879 - RNA, 19 nt, Artificial Sequence
  Description of Artificial Sequence: Synthetic oligonucleotide
  Antisense strand to SEQ ID NO: 1085878
ugcuucaggcaagagcauc

SEQ ID NO: 1085880 - RNA, 19 nt, Artificial Sequence
  Description of Artificial Sequence: Synthetic oligonucleotide
  Sense strand starting at position 157 of SEQ ID NO: 915519
augcucuugccugaagcaa

SEQ ID NO: 1085881 - RNA, 19 nt, Artificial Sequence
  Description of Artificial Sequence: Synthetic oligonucleotide
  Antisense strand to SEQ ID NO: 1085880
uugcuucaggcaagagcau

SEQ ID NO: 1085882 - RNA, 19 nt, Artificial Sequence
  Description of Artificial Sequence: Synthetic oligonucleotide
  Sense strand starting at position 169 of SEQ ID NO: 915519
gaagcaauuccgugucaga

SEQ ID NO: 1085883 - RNA, 19 nt, Artificial Sequence
  Description of Artificial Sequence: Synthetic oligonucleotide
  Antisense strand to SEQ ID NO: 1085882
ucugacacggaauugcuuc

SEQ ID NO: 1085884 - RNA, 19 nt, Artificial Sequence
  Description of Artificial Sequence: Synthetic oligonucleotide
  Sense strand starting at position 172 of SEQ ID NO: 915519
gcaauuccgugucagagcu

SEQ ID NO: 1085885 - RNA, 19 nt, Artificial Sequence
  Description of Artificial Sequence: Synthetic oligonucleotide
  Antisense strand to SEQ ID NO: 1085884
agcucugacacggaauugc

SEQ ID NO: 1085886 - RNA, 19 nt, Artificial Sequence
  Description of Artificial Sequence: Synthetic oligonucleotide
  Sense strand starting at position 378 of SEQ ID NO: 915519
ugcaaaugguggugugaga

SEQ ID NO: 1085887 - RNA, 19 nt, Artificial Sequence
  Description of Artificial Sequence: Synthetic oligonucleotide
  Antisense strand to SEQ ID NO: 1085886
ucucacaccaccauuugca

SEQ ID NO: 1085888 - RNA, 19 nt, Artificial Sequence
  Description of Artificial Sequence: Synthetic oligonucleotide
  Sense strand starting at position 615 of SEQ ID NO: 915519
aggugcuucuaccuugauu

SEQ ID NO: 1085889 - RNA, 19 nt, Artificial Sequence
  Description of Artificial Sequence: Synthetic oligonucleotide
  Antisense strand to SEQ ID NO: 1085888
aaucaagguagaagcaccu

SEQ ID NO: 1085890 - RNA, 19 nt, Artificial Sequence
  Description of Artificial Sequence: Synthetic oligonucleotide
  Sense strand starting at position 617 of SEQ ID NO: 915519
gugcuucuaccuugauuuc

SEQ ID NO: 1085891 - RNA, 19 nt, Artificial Sequence
  Description of Artificial Sequence: Synthetic oligonucleotide
  Antisense strand to SEQ ID NO: 1085890
gaaaucaagguagaagcac

SEQ ID NO: 1085892 - RNA, 19 nt, Artificial Sequence
  Description of Artificial Sequence: Synthetic oligonucleotide
  Sense strand starting at position 1035 of SEQ ID NO: 915519
cugagagacugagaagaau

SEQ ID NO: 1085893 - RNA, 19 nt, Artificial Sequence
  Description of Artificial Sequence: Synthetic oligonucleotide
  Antisense strand to SEQ ID NO: 1085892
auucuucucagucucucag

SEQ ID NO: 1085894 - RNA, 19 nt, Artificial Sequence
  Description of Artificial Sequence: Synthetic oligonucleotide
  Sense strand starting at position 1046 of SEQ ID NO: 915519
agaagaaugaggugagugu

SEQ ID NO: 1085895 - RNA, 19 nt, Artificial Sequence
  Description of Artificial Sequence: Synthetic oligonucleotide
  Antisense strand to SEQ ID NO: 1085894
acacucaccucauucuucu

SEQ ID NO: 1085896 - RNA, 19 nt, Artificial Sequence
  Description of Artificial Sequence: Synthetic oligonucleotide
  Sense strand starting at position 1055 of SEQ ID NO: 915519
aggugagugucgcuagcua

SEQ ID NO: 1085897 - RNA, 19 nt, Artificial Sequence
  Description of Artificial Sequence: Synthetic oligonucleotide
  Antisense strand to SEQ ID NO: 1085896
uagcuagcgacacucaccu

SEQ ID NO: 1085898 - RNA, 19 nt, Artificial Sequence
  Description of Artificial Sequence: Synthetic oligonucleotide
  Sense strand starting at position 1057 of SEQ ID NO: 915519
gugagugucgcuagcuaug

SEQ ID NO: 1085899 - RNA, 19 nt, Artificial Sequence
  Description of Artificial Sequence: Synthetic oligonucleotide
  Antisense strand to SEQ ID NO: 1085898
cauagcuagcgacacucac

SEQ ID NO: 1085900 - RNA, 19 nt, Artificial Sequence
  Description of Artificial Sequence: Synthetic oligonucleotide
  Sense strand starting at position 1145 of SEQ ID NO: 915519
ggcuauagugugugaagga

SEQ ID NO: 1085901 - RNA, 19 nt, Artificial Sequence
  Description of Artificial Sequence: Synthetic oligonucleotide
  Antisense strand to SEQ ID NO: 1085900
uccuucacacacuauagcc

SEQ ID NO: 1085902 - RNA, 19 nt, Artificial Sequence
  Description of Artificial Sequence: Synthetic oligonucleotide
  Sense strand starting at position 1230 of SEQ ID NO: 915519
ggaagugagaucugugcau

SEQ ID NO: 1085903 - RNA, 19 nt, Artificial Sequence
  Description of Artificial Sequence: Synthetic oligonucleotide
  Antisense strand to SEQ ID NO: 1085902
augcacagaucucacuucc

SEQ ID NO: 1085904 - RNA, 19 nt, Artificial Sequence
  Description of Artificial Sequence: Synthetic oligonucleotide
  Sense strand starting at position 1232 of SEQ ID NO: 915519
aagugagaucugugcaugu

SEQ ID NO: 1085905 - RNA, 19 nt, Artificial Sequence
  Description of Artificial Sequence: Synthetic oligonucleotide
  Antisense strand to SEQ ID NO: 1085904
acaugcacagaucucacuu

SEQ ID NO: 1085906 - RNA, 19 nt, Artificial Sequence
  Description of Artificial Sequence: Synthetic oligonucleotide
  Sense strand starting at position 1234 of SEQ ID NO: 915519
gugagaucugugcaugugu

SEQ ID NO: 1085907 - RNA, 19 nt, Artificial Sequence
  Description of Artificial Sequence: Synthetic oligonucleotide
  Antisense strand to SEQ ID NO: 1085906
acacaugcacagaucucac

SEQ ID NO: 1085908 - RNA, 19 nt, Artificial Sequence
  Description of Artificial Sequence: Synthetic oligonucleotide
  Sense strand starting at position 1583 of SEQ ID NO: 915519
agaggagccucagaauaag

SEQ ID NO: 1085909 - RNA, 19 nt, Artificial Sequence
  Description of Artificial Sequence: Synthetic oligonucleotide
  Antisense strand to SEQ ID NO: 1085908
cuuauucugaggcuccucu

SEQ ID NO: 1085910 - RNA, 19 nt, Artificial Sequence
  Description of Artificial Sequence: Synthetic oligonucleotide
  Sense strand starting at position 1754 of SEQ ID NO: 915519
uggacauauugacucggga

SEQ ID NO: 1085911 - RNA, 19 nt, Artificial Sequence
  Description of Artificial Sequence: Synthetic oligonucleotide
  Antisense strand to SEQ ID NO: 1085910
ucccgagucaauaugucca

SEQ ID NO: 1085912 - RNA, 19 nt, Artificial Sequence
  Description of Artificial Sequence: Synthetic oligonucleotide
  Sense strand starting at position 1758 of SEQ ID NO: 915519
cauauugacucgggacuga

SEQ ID NO: 1085913 - RNA, 19 nt, Artificial Sequence
  Description of Artificial Sequence: Synthetic oligonucleotide
  Antisense strand to SEQ ID NO: 1085912
ucagucccgagucaauaug

SEQ ID NO: 1085914 - RNA, 19 nt, Artificial Sequence
  Description of Artificial Sequence: Synthetic oligonucleotide
  Sense strand starting at position 2124 of SEQ ID NO: 915519
ccgagcagugcucauucua

SEQ ID NO: 1085915 - RNA, 19 nt, Artificial Sequence
  Description of Artificial Sequence: Synthetic oligonucleotide
  Antisense strand to SEQ ID NO: 1085914
uagaaugagcacugcucgg

SEQ ID NO: 1085916 - RNA, 19 nt, Artificial Sequence
  Description of Artificial Sequence: Synthetic oligonucleotide
  Sense strand starting at position 2230 of SEQ ID NO: 915519
ccagcaggugcucaagagu

SEQ ID NO: 1085917 - RNA, 19 nt, Artificial Sequence
  Description of Artificial Sequence: Synthetic oligonucleotide
  Antisense strand to SEQ ID NO: 1085916
acucuugagcaccugcugg

SEQ ID NO: 1085918 - RNA, 19 nt, Artificial Sequence
  Description of Artificial Sequence: Synthetic oligonucleotide
  Sense strand starting at position 2239 of SEQ ID NO: 915519
gcucaagagucugccacua

SEQ ID NO: 1085919 - RNA, 19 nt, Artificial Sequence
  Description of Artificial Sequence: Synthetic oligonucleotide
  Antisense strand to SEQ ID NO: 1085918
uaguggcagacucuugagc

SEQ ID NO: 1085920 - RNA, 19 nt, Artificial Sequence
  Description of Artificial Sequence: Synthetic oligonucleotide
  Sense strand starting at position 2241 of SEQ ID NO: 915519
ucaagagucugccacuauu

SEQ ID NO: 1085921 - RNA, 19 nt, Artificial Sequence
  Description of Artificial Sequence: Synthetic oligonucleotide
  Antisense strand to SEQ ID NO: 1085920
aauaguggcagacucuuga

SEQ ID NO: 1085922 - RNA, 19 nt, Artificial Sequence
  Description of Artificial Sequence: Synthetic oligonucleotide
  Sense strand starting at position 2301 of SEQ ID NO: 915519
ccacuagcgcgcucucauu

SEQ ID NO: 1085923 - RNA, 19 nt, Artificial Sequence
  Description of Artificial Sequence: Synthetic oligonucleotide
  Antisense strand to SEQ ID NO: 1085922
aaugagagcgcgcuagugg

SEQ ID NO: 1085924 - RNA, 19 nt, Artificial Sequence
  Description of Artificial Sequence: Synthetic oligonucleotide
  Sense strand starting at position 2331 of SEQ ID NO: 915519
caccuuagauaggugucau

SEQ ID NO: 1085925 - RNA, 19 nt, Artificial Sequence
  Description of Artificial Sequence: Synthetic oligonucleotide
  Antisense strand to SEQ ID NO: 1085924
augacaccuaucuaaggug

SEQ ID NO: 1085926 - RNA, 19 nt, Artificial Sequence
  Description of Artificial Sequence: Synthetic oligonucleotide
  Sense strand starting at position 2335 of SEQ ID NO: 915519
uuagauaggugucaucucu

SEQ ID NO: 1085927 - RNA, 19 nt, Artificial Sequence
  Description of Artificial Sequence: Synthetic oligonucleotide
  Antisense strand to SEQ ID NO: 1085926
agagaugacaccuaucuaa

SEQ ID NO: 1085928 - RNA, 19 nt, Artificial Sequence
  Description of Artificial Sequence: Synthetic oligonucleotide
  Sense strand starting at position 2379 of SEQ ID NO: 915519
agagaaaggcuuuggccaa

SEQ ID NO: 1085929 - RNA, 19 nt, Artificial Sequence
  Description of Artificial Sequence: Synthetic oligonucleotide
  Antisense strand to SEQ ID NO: 1085928
uuggccaaagccuuucucu

SEQ ID NO: 1085930 - RNA, 19 nt, Artificial Sequence
  Description of Artificial Sequence: Synthetic oligonucleotide
  Sense strand starting at position 2431 of SEQ ID NO: 915519
cuggaagucugaccauaug

SEQ ID NO: 1085931 - RNA, 19 nt, Artificial Sequence
  Description of Artificial Sequence: Synthetic oligonucleotide
  Antisense strand to SEQ ID NO: 1085930
cauauggucagacuuccag

SEQ ID NO: 1085932 - RNA, 19 nt, Artificial Sequence
  Description of Artificial Sequence: Synthetic oligonucleotide
  Sense strand starting at position 2439 of SEQ ID NO: 915519
cugaccauauggugggaaa

SEQ ID NO: 1085933 - RNA, 19 nt, Artificial Sequence
  Description of Artificial Sequence: Synthetic oligonucleotide
  Antisense strand to SEQ ID NO: 1085932
uuucccaccauauggucag

SEQ ID NO: 1085934 - RNA, 19 nt, Artificial Sequence
  Description of Artificial Sequence: Synthetic oligonucleotide
  Sense strand starting at position 2548 of SEQ ID NO: 915519
gcccuugaucucuacuaga

SEQ ID NO: 1085935 - RNA, 19 nt, Artificial Sequence
  Description of Artificial Sequence: Synthetic oligonucleotide
  Antisense strand to SEQ ID NO: 1085934
ucuaguagagaucaagggc

SEQ ID NO: 1085936 - RNA, 19 nt, Artificial Sequence
  Description of Artificial Sequence: Synthetic oligonucleotide
  Sense strand starting at position 3408 of SEQ ID NO: 915519
aggugccuuaccugagauu

SEQ ID NO: 1085937 - RNA, 19 nt, Artificial Sequence
  Description of Artificial Sequence: Synthetic oligonucleotide
  Antisense strand to SEQ ID NO: 1085936
aaucucagguaaggcaccu

SEQ ID NO: 1085938 - RNA, 19 nt, Artificial Sequence
  Description of Artificial Sequence: Synthetic oligonucleotide
  Sense strand starting at position 3707 of SEQ ID NO: 915519
gucaccauugccuguagga

SEQ ID NO: 1085939 - RNA, 19 nt, Artificial Sequence
  Description of Artificial Sequence: Synthetic oligonucleotide
  Antisense strand to SEQ ID NO: 1085938
uccuacaggcaauggugac

SEQ ID NO: 1085940 - RNA, 19 nt, Artificial Sequence
  Description of Artificial Sequence: Synthetic oligonucleotide
  Sense strand starting at position 3709 of SEQ ID NO: 915519
caccauugccuguaggaga

SEQ ID NO: 1085941 - RNA, 19 nt, Artificial Sequence
  Description of Artificial Sequence: Synthetic oligonucleotide
  Antisense strand to SEQ ID NO: 1085940
ucuccuacaggcaauggug

SEQ ID NO: 1085942 - RNA, 19 nt, Artificial Sequence
  Description of Artificial Sequence: Synthetic oligonucleotide
  Sense strand starting at position 347 of SEQ ID NO: 915520
uaagaaggugguugaaagu

SEQ ID NO: 1085943 - RNA, 19 nt, Artificial Sequence
  Description of Artificial Sequence: Synthetic oligonucleotide
  Antisense strand to SEQ ID NO: 1085942
acuuucaaccaccuucuua

SEQ ID NO: 1085944 - RNA, 19 nt, Artificial Sequence
  Description of Artificial Sequence: Synthetic oligonucleotide
  Sense strand starting at position 518 of SEQ ID NO: 915520
ucaccuuugccauagaagu

SEQ ID NO: 1085945 - RNA, 19 nt, Artificial Sequence
  Description of Artificial Sequence: Synthetic oligonucleotide
  Antisense strand to SEQ ID NO: 1085944
acuucuauggcaaagguga

SEQ ID NO: 1085946 - RNA, 19 nt, Artificial Sequence
  Description of Artificial Sequence: Synthetic oligonucleotide
  Sense strand starting at position 1503 of SEQ ID NO: 915520
gggucuugguccugagggu

SEQ ID NO: 1085947 - RNA, 19 nt, Artificial Sequence
  Description of Artificial Sequence: Synthetic oligonucleotide
  Antisense strand to SEQ ID NO: 1085946
acccucaggaccaagaccc

SEQ ID NO: 1085948 - RNA, 19 nt, Artificial Sequence
  Description of Artificial Sequence: Synthetic oligonucleotide
  Sense strand starting at position 2166 of SEQ ID NO: 915520
aggagaugcucuugccuga

SEQ ID NO: 1085949 - RNA, 19 nt, Artificial Sequence
  Description of Artificial Sequence: Synthetic oligonucleotide
  Antisense strand to SEQ ID NO: 1085948
ucaggcaagagcaucuccu

SEQ ID NO: 1085950 - RNA, 19 nt, Artificial Sequence
  Description of Artificial Sequence: Synthetic oligonucleotide
  Sense strand starting at position 2170 of SEQ ID NO: 915520
gaugcucuugccugaagca

SEQ ID NO: 1085951 - RNA, 19 nt, Artificial Sequence
  Description of Artificial Sequence: Synthetic oligonucleotide
  Antisense strand to SEQ ID NO: 1085950
ugcuucaggcaagagcauc

SEQ ID NO: 1085952 - RNA, 19 nt, Artificial Sequence
  Description of Artificial Sequence: Synthetic oligonucleotide
  Sense strand starting at position 2171 of SEQ ID NO: 915520
augcucuugccugaagcaa

SEQ ID NO: 1085953 - RNA, 19 nt, Artificial Sequence
  Description of Artificial Sequence: Synthetic oligonucleotide
  Antisense strand to SEQ ID NO: 1085952
uugcuucaggcaagagcau

SEQ ID NO: 1085954 - RNA, 19 nt, Artificial Sequence
  Description of Artificial Sequence: Synthetic oligonucleotide
  Sense strand starting at position 2183 of SEQ ID NO: 915520
gaagcaauuccgugucaga

SEQ ID NO: 1085955 - RNA, 19 nt, Artificial Sequence
  Description of Artificial Sequence: Synthetic oligonucleotide
  Antisense strand to SEQ ID NO: 1085954
ucugacacggaauugcuuc

SEQ ID NO: 1085956 - RNA, 19 nt, Artificial Sequence
  Description of Artificial Sequence: Synthetic oligonucleotide
  Sense strand starting at position 2186 of SEQ ID NO: 915520
gcaauuccgugucagagcu

SEQ ID NO: 1085957 - RNA, 19 nt, Artificial Sequence
  Description of Artificial Sequence: Synthetic oligonucleotide
  Antisense strand to SEQ ID NO: 1085956
agcucugacacggaauugc

SEQ ID NO: 1085958 - RNA, 19 nt, Artificial Sequence
  Description of Artificial Sequence: Synthetic oligonucleotide
  Sense strand starting at position 2392 of SEQ ID NO: 915520
ugcaaaugguggugugaga

SEQ ID NO: 1085959 - RNA, 19 nt, Artificial Sequence
  Description of Artificial Sequence: Synthetic oligonucleotide
  Antisense strand to SEQ ID NO: 1085958
ucucacaccaccauuugca

SEQ ID NO: 1085960 - RNA, 19 nt, Artificial Sequence
  Description of Artificial Sequence: Synthetic oligonucleotide
  Sense strand starting at position 2629 of SEQ ID NO: 915520
aggugcuucuaccuugauu

SEQ ID NO: 1085961 - RNA, 19 nt, Artificial Sequence
  Description of Artificial Sequence: Synthetic oligonucleotide
  Antisense strand to SEQ ID NO: 1085960
aaucaagguagaagcaccu

SEQ ID NO: 1085962 - RNA, 19 nt, Artificial Sequence
  Description of Artificial Sequence: Synthetic oligonucleotide
  Sense strand starting at position 2631 of SEQ ID NO: 915520
gugcuucuaccuugauuuc

SEQ ID NO: 1085963 - RNA, 19 nt, Artificial Sequence
  Description of Artificial Sequence: Synthetic oligonucleotide
  Antisense strand to SEQ ID NO: 1085962
gaaaucaagguagaagcac

SEQ ID NO: 1085964 - RNA, 19 nt, Artificial Sequence
  Description of Artificial Sequence: Synthetic oligonucleotide
  Sense strand starting at position 3049 of SEQ ID NO: 915520
cugagagacugagaagaau

SEQ ID NO: 1085965 - RNA, 19 nt, Artificial Sequence
  Description of Artificial Sequence: Synthetic oligonucleotide
  Antisense strand to SEQ ID NO: 1085964
auucuucucagucucucag

SEQ ID NO: 1085966 - RNA, 19 nt, Artificial Sequence
  Description of Artificial Sequence: Synthetic oligonucleotide
  Sense strand starting at position 3060 of SEQ ID NO: 915520
agaagaaugaggugagugu

SEQ ID NO: 1085967 - RNA, 19 nt, Artificial Sequence
  Description of Artificial Sequence: Synthetic oligonucleotide
  Antisense strand to SEQ ID NO: 1085966
acacucaccucauucuucu

SEQ ID NO: 1085968 - RNA, 19 nt, Artificial Sequence
  Description of Artificial Sequence: Synthetic oligonucleotide
  Sense strand starting at position 3069 of SEQ ID NO: 915520
aggugagugucgcuagcua

SEQ ID NO: 1085969 - RNA, 19 nt, Artificial Sequence
  Description of Artificial Sequence: Synthetic oligonucleotide
  Antisense strand to SEQ ID NO: 1085968
uagcuagcgacacucaccu

SEQ ID NO: 1085970 - RNA, 19 nt, Artificial Sequence
  Description of Artificial Sequence: Synthetic oligonucleotide
  Sense strand starting at position 3071 of SEQ ID NO: 915520
gugagugucgcuagcuaug

SEQ ID NO: 1085971 - RNA, 19 nt, Artificial Sequence
  Description of Artificial Sequence: Synthetic oligonucleotide
  Antisense strand to SEQ ID NO: 1085970
cauagcuagcgacacucac

SEQ ID NO: 1085972 - RNA, 19 nt, Artificial Sequence
  Description of Artificial Sequence: Synthetic oligonucleotide
  Sense strand starting at position 3159 of SEQ ID NO: 915520
ggcuauagugugugaagga

SEQ ID NO: 1085973 - RNA, 19 nt, Artificial Sequence
  Description of Artificial Sequence: Synthetic oligonucleotide
  Antisense strand to SEQ ID NO: 1085972
uccuucacacacuauagcc

SEQ ID NO: 1085974 - RNA, 19 nt, Artificial Sequence
  Description of Artificial Sequence: Synthetic oligonucleotide
  Sense strand starting at position 3244 of SEQ ID NO: 915520
ggaagugagaucugugcau

SEQ ID NO: 1085975 - RNA, 19 nt, Artificial Sequence
  Description of Artificial Sequence: Synthetic oligonucleotide
  Antisense strand to SEQ ID NO: 1085974
augcacagaucucacuucc

SEQ ID NO: 1085976 - RNA, 19 nt, Artificial Sequence
  Description of Artificial Sequence: Synthetic oligonucleotide
  Sense strand starting at position 3246 of SEQ ID NO: 915520
aagugagaucugugcaugu

SEQ ID NO: 1085977 - RNA, 19 nt, Artificial Sequence
  Description of Artificial Sequence: Synthetic oligonucleotide
  Antisense strand to SEQ ID NO: 1085976
acaugcacagaucucacuu

SEQ ID NO: 1085978 - RNA, 19 nt, Artificial Sequence
  Description of Artificial Sequence: Synthetic oligonucleotide
  Sense strand starting at position 3248 of SEQ ID NO: 915520
gugagaucugugcaugugu

SEQ ID NO: 1085979 - RNA, 19 nt, Artificial Sequence
  Description of Artificial Sequence: Synthetic oligonucleotide
  Antisense strand to SEQ ID NO: 1085978
acacaugcacagaucucac

SEQ ID NO: 1085980 - RNA, 19 nt, Artificial Sequence
  Description of Artificial Sequence: Synthetic oligonucleotide
  Sense strand starting at position 3597 of SEQ ID NO: 915520
agaggagccucagaauaag

SEQ ID NO: 1085981 - RNA, 19 nt, Artificial Sequence
  Description of Artificial Sequence: Synthetic oligonucleotide
  Antisense strand to SEQ ID NO: 1085980
cuuauucugaggcuccucu

SEQ ID NO: 1085982 - RNA, 19 nt, Artificial Sequence
  Description of Artificial Sequence: Synthetic oligonucleotide
  Sense strand starting at position 3768 of SEQ ID NO: 915520
uggacauauugacucggga

SEQ ID NO: 1085983 - RNA, 19 nt, Artificial Sequence
  Description of Artificial Sequence: Synthetic oligonucleotide
  Antisense strand to SEQ ID NO: 1085982
ucccgagucaauaugucca

SEQ ID NO: 1085984 - RNA, 19 nt, Artificial Sequence
  Description of Artificial Sequence: Synthetic oligonucleotide
  Sense strand starting at position 3772 of SEQ ID NO: 915520
cauauugacucgggacuga

SEQ ID NO: 1085985 - RNA, 19 nt, Artificial Sequence
  Description of Artificial Sequence: Synthetic oligonucleotide
  Antisense strand to SEQ ID NO: 1085984
ucagucccgagucaauaug

SEQ ID NO: 1085986 - RNA, 19 nt, Artificial Sequence
  Description of Artificial Sequence: Synthetic oligonucleotide
  Sense strand starting at position 485 of SEQ ID NO: 915521
gggcuucuuggaugaacga

SEQ ID NO: 1085987 - RNA, 19 nt, Artificial Sequence
  Description of Artificial Sequence: Synthetic oligonucleotide
  Antisense strand to SEQ ID NO: 1085986
ucguucauccaagaagccc

SEQ ID NO: 1085988 - RNA, 19 nt, Artificial Sequence
  Description of Artificial Sequence: Synthetic oligonucleotide
  Sense strand starting at position 500 of SEQ ID NO: 915521
acgacugacucuucgggau

SEQ ID NO: 1085989 - RNA, 19 nt, Artificial Sequence
  Description of Artificial Sequence: Synthetic oligonucleotide
  Antisense strand to SEQ ID NO: 1085988
aucccgaagagucagucgu

SEQ ID NO: 1085990 - RNA, 19 nt, Artificial Sequence
  Description of Artificial Sequence: Synthetic oligonucleotide
  Sense strand starting at position 504 of SEQ ID NO: 915521
cugacucuucgggaucuuu

SEQ ID NO: 1085991 - RNA, 19 nt, Artificial Sequence
  Description of Artificial Sequence: Synthetic oligonucleotide
  Antisense strand to SEQ ID NO: 1085990
aaagaucccgaagagucag

SEQ ID NO: 1085992 - RNA, 19 nt, Artificial Sequence
  Description of Artificial Sequence: Synthetic oligonucleotide
  Sense strand starting at position 967 of SEQ ID NO: 915521
aggaguaacugggacaaca

SEQ ID NO: 1085993 - RNA, 19 nt, Artificial Sequence
  Description of Artificial Sequence: Synthetic oligonucleotide
  Antisense strand to SEQ ID NO: 1085992
uguugucccaguuacuccu

SEQ ID NO: 1085994 - RNA, 19 nt, Artificial Sequence
  Description of Artificial Sequence: Synthetic oligonucleotide
  Sense strand starting at position 1167 of SEQ ID NO: 915521
aguugugucagacagcaag

SEQ ID NO: 1085995 - RNA, 19 nt, Artificial Sequence
  Description of Artificial Sequence: Synthetic oligonucleotide
  Antisense strand to SEQ ID NO: 1085994
cuugcugucugacacaacu

SEQ ID NO: 1085996 - RNA, 19 nt, Artificial Sequence
  Description of Artificial Sequence: Synthetic oligonucleotide
  Sense strand starting at position 1226 of SEQ ID NO: 915521
ggcaucugauaccuaacaa

SEQ ID NO: 1085997 - RNA, 19 nt, Artificial Sequence
  Description of Artificial Sequence: Synthetic oligonucleotide
  Antisense strand to SEQ ID NO: 1085996
uuguuagguaucagaugcc

SEQ ID NO: 1085998 - RNA, 19 nt, Artificial Sequence
  Description of Artificial Sequence: Synthetic oligonucleotide
  Sense strand starting at position 1327 of SEQ ID NO: 915521
gggaguauuaaccgcacaa

SEQ ID NO: 1085999 - RNA, 19 nt, Artificial Sequence
  Description of Artificial Sequence: Synthetic oligonucleotide
  Antisense strand to SEQ ID NO: 1085998
uugugcgguuaauacuccc

SEQ ID NO: 1086000 - RNA, 19 nt, Artificial Sequence
  Description of Artificial Sequence: Synthetic oligonucleotide
  Sense strand starting at position 1329 of SEQ ID NO: 915521
gaguauuaaccgcacaaca

SEQ ID NO: 1086001 - RNA, 19 nt, Artificial Sequence
  Description of Artificial Sequence: Synthetic oligonucleotide
  Antisense strand to SEQ ID NO: 1086000
uguugugcgguuaauacuc

SEQ ID NO: 1086002 - RNA, 19 nt, Artificial Sequence
  Description of Artificial Sequence: Synthetic oligonucleotide
  Sense strand starting at position 1331 of SEQ ID NO: 915521
guauuaaccgcacaacauu

SEQ ID NO: 1086003 - RNA, 19 nt, Artificial Sequence
  Description of Artificial Sequence: Synthetic oligonucleotide
  Antisense strand to SEQ ID NO: 1086002
aauguugugcgguuaauac

SEQ ID NO: 1086004 - RNA, 19 nt, Artificial Sequence
  Description of Artificial Sequence: Synthetic oligonucleotide
  Sense strand starting at position 1340 of SEQ ID NO: 915521
gcacaacauuuaugaggga

SEQ ID NO: 1086005 - RNA, 19 nt, Artificial Sequence
  Description of Artificial Sequence: Synthetic oligonucleotide
  Antisense strand to SEQ ID NO: 1086004
ucccucauaaauguugugc

SEQ ID NO: 1086006 - RNA, 19 nt, Artificial Sequence
  Description of Artificial Sequence: Synthetic oligonucleotide
  Sense strand starting at position 1356 of SEQ ID NO: 915521
ggaucauuaaagcguuaaa

SEQ ID NO: 1086007 - RNA, 19 nt, Artificial Sequence
  Description of Artificial Sequence: Synthetic oligonucleotide
  Antisense strand to SEQ ID NO: 1086006
uuuaacgcuuuaaugaucc

SEQ ID NO: 1086008 - RNA, 19 nt, Artificial Sequence
  Description of Artificial Sequence: Synthetic oligonucleotide
  Sense strand starting at position 1367 of SEQ ID NO: 915521
gcguuaaaugcauauacuu

SEQ ID NO: 1086009 - RNA, 19 nt, Artificial Sequence
  Description of Artificial Sequence: Synthetic oligonucleotide
  Antisense strand to SEQ ID NO: 1086008
aaguauaugcauuuaacgc

SEQ ID NO: 1086010 - RNA, 19 nt, Artificial Sequence
  Description of Artificial Sequence: Synthetic oligonucleotide
  Sense strand starting at position 1527 of SEQ ID NO: 915521
auaagugacguccacagau

SEQ ID NO: 1086011 - RNA, 19 nt, Artificial Sequence
  Description of Artificial Sequence: Synthetic oligonucleotide
  Antisense strand to SEQ ID NO: 1086010
aucuguggacgucacuuau

SEQ ID NO: 1086012 - RNA, 19 nt, Artificial Sequence
  Description of Artificial Sequence: Synthetic oligonucleotide
  Sense strand starting at position 1529 of SEQ ID NO: 915521
aagugacguccacagauca

SEQ ID NO: 1086013 - RNA, 19 nt, Artificial Sequence
  Description of Artificial Sequence: Synthetic oligonucleotide
  Antisense strand to SEQ ID NO: 1086012
ugaucuguggacgucacuu

SEQ ID NO: 1086014 - RNA, 19 nt, Artificial Sequence
  Description of Artificial Sequence: Synthetic oligonucleotide
  Sense strand starting at position 1536 of SEQ ID NO: 915521
guccacagaucagcauaaa

SEQ ID NO: 1086015 - RNA, 19 nt, Artificial Sequence
  Description of Artificial Sequence: Synthetic oligonucleotide
  Antisense strand to SEQ ID NO: 1086014
uuuaugcugaucuguggac

SEQ ID NO: 1086016 - RNA, 19 nt, Artificial Sequence
  Description of Artificial Sequence: Synthetic oligonucleotide
  Sense strand starting at position 1663 of SEQ ID NO: 915521
gugcuuguccuugcccaaa

SEQ ID NO: 1086017 - RNA, 19 nt, Artificial Sequence
  Description of Artificial Sequence: Synthetic oligonucleotide
  Antisense strand to SEQ ID NO: 1086016
uuugggcaaggacaagcac

SEQ ID NO: 1086018 - RNA, 19 nt, Artificial Sequence
  Description of Artificial Sequence: Synthetic oligonucleotide
  Sense strand starting at position 2170 of SEQ ID NO: 915521
agaggaaguucccuagucu

SEQ ID NO: 1086019 - RNA, 19 nt, Artificial Sequence
  Description of Artificial Sequence: Synthetic oligonucleotide
  Antisense strand to SEQ ID NO: 1086018
agacuagggaacuuccucu

SEQ ID NO: 1086020 - RNA, 19 nt, Artificial Sequence
  Description of Artificial Sequence: Synthetic oligonucleotide
  Sense strand starting at position 2270 of SEQ ID NO: 915521
ggcggugauaguuaauacu

SEQ ID NO: 1086021 - RNA, 19 nt, Artificial Sequence
  Description of Artificial Sequence: Synthetic oligonucleotide
  Antisense strand to SEQ ID NO: 1086020
aguauuaacuaucaccgcc

SEQ ID NO: 1086022 - RNA, 19 nt, Artificial Sequence
  Description of Artificial Sequence: Synthetic oligonucleotide
  Sense strand starting at position 2371 of SEQ ID NO: 915521
ggagcaauuccgggucaca

SEQ ID NO: 1086023 - RNA, 19 nt, Artificial Sequence
  Description of Artificial Sequence: Synthetic oligonucleotide
  Antisense strand to SEQ ID NO: 1086022
ugugacccggaauugcucc

SEQ ID NO: 1086024 - RNA, 19 nt, Artificial Sequence
  Description of Artificial Sequence: Synthetic oligonucleotide
  Sense strand starting at position 3000 of SEQ ID NO: 915521
agcuguagccaggauguuu

SEQ ID NO: 1086025 - RNA, 19 nt, Artificial Sequence
  Description of Artificial Sequence: Synthetic oligonucleotide
  Antisense strand to SEQ ID NO: 1086024
aaacauccuggcuacagcu

SEQ ID NO: 1086026 - RNA, 19 nt, Artificial Sequence
  Description of Artificial Sequence: Synthetic oligonucleotide
  Sense strand starting at position 3175 of SEQ ID NO: 915521
gggaaacauguuggugauu

SEQ ID NO: 1086027 - RNA, 19 nt, Artificial Sequence
  Description of Artificial Sequence: Synthetic oligonucleotide
  Antisense strand to SEQ ID NO: 1086026
aaucaccaacauguuuccc

SEQ ID NO: 1086028 - RNA, 19 nt, Artificial Sequence
  Description of Artificial Sequence: Synthetic oligonucleotide
  Sense strand starting at position 3193 of SEQ ID NO: 915521
ucgugcuuagccuugucau

SEQ ID NO: 1086029 - RNA, 19 nt, Artificial Sequence
  Description of Artificial Sequence: Synthetic oligonucleotide
  Antisense strand to SEQ ID NO: 1086028
augacaaggcuaagcacga

SEQ ID NO: 1086030 - RNA, 19 nt, Artificial Sequence
  Description of Artificial Sequence: Synthetic oligonucleotide
  Sense strand starting at position 3238 of SEQ ID NO: 915521
ucucauggucuggaguuga

SEQ ID NO: 1086031 - RNA, 19 nt, Artificial Sequence
  Description of Artificial Sequence: Synthetic oligonucleotide
  Antisense strand to SEQ ID NO: 1086030
ucaacuccagaccaugaga

SEQ ID NO: 1086032 - RNA, 19 nt, Artificial Sequence
  Description of Artificial Sequence: Synthetic oligonucleotide
  Sense strand starting at position 3242 of SEQ ID NO: 915521
auggucuggaguugauaaa

SEQ ID NO: 1086033 - RNA, 19 nt, Artificial Sequence
  Description of Artificial Sequence: Synthetic oligonucleotide
  Antisense strand to SEQ ID NO: 1086032
uuuaucaacuccagaccau

SEQ ID NO: 1086034 - RNA, 19 nt, Artificial Sequence
  Description of Artificial Sequence: Synthetic oligonucleotide
  Sense strand starting at position 3359 of SEQ ID NO: 915521
uguauuucucaugggcuuu

SEQ ID NO: 1086035 - RNA, 19 nt, Artificial Sequence
  Description of Artificial Sequence: Synthetic oligonucleotide
  Antisense strand to SEQ ID NO: 1086034
aaagcccaugagaaauaca

SEQ ID NO: 1086036 - RNA, 19 nt, Artificial Sequence
  Description of Artificial Sequence: Synthetic oligonucleotide
  Sense strand starting at position 3399 of SEQ ID NO: 915521
aguuuagguuuguuuagaa

SEQ ID NO: 1086037 - RNA, 19 nt, Artificial Sequence
  Description of Artificial Sequence: Synthetic oligonucleotide
  Antisense strand to SEQ ID NO: 1086036
uucuaaacaaaccuaaacu

SEQ ID NO: 1086038 - RNA, 19 nt, Artificial Sequence
  Description of Artificial Sequence: Synthetic oligonucleotide
  Sense strand starting at position 3424 of SEQ ID NO: 915521
ugaauugcagagcaauuaa

SEQ ID NO: 1086039 - RNA, 19 nt, Artificial Sequence
  Description of Artificial Sequence: Synthetic oligonucleotide
  Antisense strand to SEQ ID NO: 1086038
uuaauugcucugcaauuca

SEQ ID NO: 1086040 - RNA, 19 nt, Artificial Sequence
  Description of Artificial Sequence: Synthetic oligonucleotide
  Sense strand starting at position 3480 of SEQ ID NO: 915521
gaauaaauugcuggcauug

SEQ ID NO: 1086041 - RNA, 19 nt, Artificial Sequence
  Description of Artificial Sequence: Synthetic oligonucleotide
  Antisense strand to SEQ ID NO: 1086040
caaugccagcaauuuauuc

SEQ ID NO: 1086042 - RNA, 19 nt, Artificial Sequence
  Description of Artificial Sequence: Synthetic oligonucleotide
  Sense strand starting at position 3521 of SEQ ID NO: 915521
auacaucuccuguaguaac

SEQ ID NO: 1086043 - RNA, 19 nt, Artificial Sequence
  Description of Artificial Sequence: Synthetic oligonucleotide
  Antisense strand to SEQ ID NO: 1086042
guuacuacaggagauguau

SEQ ID NO: 1086044 - RNA, 19 nt, Artificial Sequence
  Description of Artificial Sequence: Synthetic oligonucleotide
  Sense strand starting at position 3532 of SEQ ID NO: 915521
guaguaaccucccuguuaa

SEQ ID NO: 1086045 - RNA, 19 nt, Artificial Sequence
  Description of Artificial Sequence: Synthetic oligonucleotide
  Antisense strand to SEQ ID NO: 1086044
uuaacagggagguuacuac

SEQ ID NO: 1086046 - RNA, 19 nt, Artificial Sequence
  Description of Artificial Sequence: Synthetic oligonucleotide
  Sense strand starting at position 3579 of SEQ ID NO: 915521
auagauguuccauacaugu

SEQ ID NO: 1086047 - RNA, 19 nt, Artificial Sequence
  Description of Artificial Sequence: Synthetic oligonucleotide
  Antisense strand to SEQ ID NO: 1086046
acauguauggaacaucuau

SEQ ID NO: 1086048 - RNA, 19 nt, Artificial Sequence
  Description of Artificial Sequence: Synthetic oligonucleotide
  Sense strand starting at position 3598 of SEQ ID NO: 915521
uuugaugauguuuagcauu

SEQ ID NO: 1086049 - RNA, 19 nt, Artificial Sequence
  Description of Artificial Sequence: Synthetic oligonucleotide
  Antisense strand to SEQ ID NO: 1086048
aaugcuaaacaucaucaaa

SEQ ID NO: 1086050 - RNA, 19 nt, Artificial Sequence
  Description of Artificial Sequence: Synthetic oligonucleotide
  Sense strand starting at position 3649 of SEQ ID NO: 915521
gcaaauuaauguuuggcaa

SEQ ID NO: 1086051 - RNA, 19 nt, Artificial Sequence
  Description of Artificial Sequence: Synthetic oligonucleotide
  Antisense strand to SEQ ID NO: 1086050
uugccaaacauuaauuugc

SEQ ID NO: 1086052 - RNA, 19 nt, Artificial Sequence
  Description of Artificial Sequence: Synthetic oligonucleotide
  Sense strand starting at position 3665 of SEQ ID NO: 915521
caaauaaugguuuguguug

SEQ ID NO: 1086053 - RNA, 19 nt, Artificial Sequence
  Description of Artificial Sequence: Synthetic oligonucleotide
  Antisense strand to SEQ ID NO: 1086052
caacacaaaccauuauuug

SEQ ID NO: 1086054 - RNA, 19 nt, Artificial Sequence
  Description of Artificial Sequence: Synthetic oligonucleotide
  Sense strand starting at position 3681 of SEQ ID NO: 915521
uuggauagcacuugguaau

SEQ ID NO: 1086055 - RNA, 19 nt, Artificial Sequence
  Description of Artificial Sequence: Synthetic oligonucleotide
  Antisense strand to SEQ ID NO: 1086054
auuaccaagugcuauccaa

SEQ ID NO: 1086056 - RNA, 19 nt, Artificial Sequence
  Description of Artificial Sequence: Synthetic oligonucleotide
  Sense strand starting at position 3682 of SEQ ID NO: 915521
uggauagcacuugguaauu

SEQ ID NO: 1086057 - RNA, 19 nt, Artificial Sequence
  Description of Artificial Sequence: Synthetic oligonucleotide
  Antisense strand to SEQ ID NO: 1086056
aauuaccaagugcuaucca

SEQ ID NO: 1086058 - RNA, 19 nt, Artificial Sequence
  Description of Artificial Sequence: Synthetic oligonucleotide
  Sense strand starting at position 3727 of SEQ ID NO: 915521
aauauuagccuuuggguuu

SEQ ID NO: 1086059 - RNA, 19 nt, Artificial Sequence
  Description of Artificial Sequence: Synthetic oligonucleotide
  Antisense strand to SEQ ID NO: 1086058
aaacccaaaggcuaauauu

SEQ ID NO: 1086060 - RNA, 19 nt, Artificial Sequence
  Description of Artificial Sequence: Synthetic oligonucleotide
  Sense strand starting at position 3843 of SEQ ID NO: 915521
uuaauugccuucccugaga

SEQ ID NO: 1086061 - RNA, 19 nt, Artificial Sequence
  Description of Artificial Sequence: Synthetic oligonucleotide
  Antisense strand to SEQ ID NO: 1086060
ucucagggaaggcaauuaa

SEQ ID NO: 1086062 - RNA, 19 nt, Artificial Sequence
  Description of Artificial Sequence: Synthetic oligonucleotide
  Sense strand starting at position 3856 of SEQ ID NO: 915521
cugagauacucagcuaaua

SEQ ID NO: 1086063 - RNA, 19 nt, Artificial Sequence
  Description of Artificial Sequence: Synthetic oligonucleotide
  Antisense strand to SEQ ID NO: 1086062
uauuagcugaguaucucag

SEQ ID NO: 1086064 - RNA, 19 nt, Artificial Sequence
  Description of Artificial Sequence: Synthetic oligonucleotide
  Sense strand starting at position 3894 of SEQ ID NO: 915521
caaguuagauauguaugau

SEQ ID NO: 1086065 - RNA, 19 nt, Artificial Sequence
  Description of Artificial Sequence: Synthetic oligonucleotide
  Antisense strand to SEQ ID NO: 1086064
aucauacauaucuaacuug

SEQ ID NO: 1086066 - RNA, 19 nt, Artificial Sequence
  Description of Artificial Sequence: Synthetic oligonucleotide
  Sense strand starting at position 18 of SEQ ID NO: 915522
ugaucauaccacugugaca

SEQ ID NO: 1086067 - RNA, 19 nt, Artificial Sequence
  Description of Artificial Sequence: Synthetic oligonucleotide
  Antisense strand to SEQ ID NO: 1086066
ugucacagugguaugauca

SEQ ID NO: 1086068 - RNA, 19 nt, Artificial Sequence
  Description of Artificial Sequence: Synthetic oligonucleotide
  Sense strand starting at position 46 of SEQ ID NO: 915522
caguuuccuuucguugaca

SEQ ID NO: 1086069 - RNA, 19 nt, Artificial Sequence
  Description of Artificial Sequence: Synthetic oligonucleotide
  Antisense strand to SEQ ID NO: 1086068
ugucaacgaaaggaaacug

SEQ ID NO: 1086070 - RNA, 19 nt, Artificial Sequence
  Description of Artificial Sequence: Synthetic oligonucleotide
  Sense strand starting at position 82 of SEQ ID NO: 915522
gcugcaguccuaucuguau

SEQ ID NO: 1086071 - RNA, 19 nt, Artificial Sequence
  Description of Artificial Sequence: Synthetic oligonucleotide
  Antisense strand to SEQ ID NO: 1086070
auacagauaggacugcagc

SEQ ID NO: 1086072 - RNA, 19 nt, Artificial Sequence
  Description of Artificial Sequence: Synthetic oligonucleotide
  Sense strand starting at position 181 of SEQ ID NO: 915522
cuaauaucccacugggaac

SEQ ID NO: 1086073 - RNA, 19 nt, Artificial Sequence
  Description of Artificial Sequence: Synthetic oligonucleotide
  Antisense strand to SEQ ID NO: 1086072
guucccagugggauauuag

SEQ ID NO: 1086074 - RNA, 19 nt, Artificial Sequence
  Description of Artificial Sequence: Synthetic oligonucleotide
  Sense strand starting at position 216 of SEQ ID NO: 915522
ccguguuguugggcauuua

SEQ ID NO: 1086075 - RNA, 19 nt, Artificial Sequence
  Description of Artificial Sequence: Synthetic oligonucleotide
  Antisense strand to SEQ ID NO: 1086074
uaaaugcccaacaacacgg

SEQ ID NO: 1086076 - RNA, 19 nt, Artificial Sequence
  Description of Artificial Sequence: Synthetic oligonucleotide
  Sense strand starting at position 354 of SEQ ID NO: 915522
auaaaugaguucuugccca

SEQ ID NO: 1086077 - RNA, 19 nt, Artificial Sequence
  Description of Artificial Sequence: Synthetic oligonucleotide
  Antisense strand to SEQ ID NO: 1086076
ugggcaagaacucauuuau

SEQ ID NO: 1086078 - RNA, 19 nt, Artificial Sequence
  Description of Artificial Sequence: Synthetic oligonucleotide
  Sense strand starting at position 573 of SEQ ID NO: 915522
guugauuaaugccaugaaa

SEQ ID NO: 1086079 - RNA, 19 nt, Artificial Sequence
  Description of Artificial Sequence: Synthetic oligonucleotide
  Antisense strand to SEQ ID NO: 1086078
uuucauggcauuaaucaac

SEQ ID NO: 1086080 - RNA, 19 nt, Artificial Sequence
  Description of Artificial Sequence: Synthetic oligonucleotide
  Sense strand starting at position 575 of SEQ ID NO: 915522
ugauuaaugccaugaaacc

SEQ ID NO: 1086081 - RNA, 19 nt, Artificial Sequence
  Description of Artificial Sequence: Synthetic oligonucleotide
  Antisense strand to SEQ ID NO: 1086080
gguuucauggcauuaauca

SEQ ID NO: 1086082 - RNA, 19 nt, Artificial Sequence
  Description of Artificial Sequence: Synthetic oligonucleotide
  Sense strand starting at position 595 of SEQ ID NO: 915522
cucagugucuuucucugua

SEQ ID NO: 1086083 - RNA, 19 nt, Artificial Sequence
  Description of Artificial Sequence: Synthetic oligonucleotide
  Antisense strand to SEQ ID NO: 1086082
uacagagaaagacacugag

SEQ ID NO: 1086084 - RNA, 19 nt, Artificial Sequence
  Description of Artificial Sequence: Synthetic oligonucleotide
  Sense strand starting at position 632 of SEQ ID NO: 915522
cuacuuccuggguggugaa

SEQ ID NO: 1086085 - RNA, 19 nt, Artificial Sequence
  Description of Artificial Sequence: Synthetic oligonucleotide
  Antisense strand to SEQ ID NO: 1086084
uucaccacccaggaaguag

SEQ ID NO: 1086086 - RNA, 19 nt, Artificial Sequence
  Description of Artificial Sequence: Synthetic oligonucleotide
  Sense strand starting at position 639 of SEQ ID NO: 915522
cuggguggugaagaguauu

SEQ ID NO: 1086087 - RNA, 19 nt, Artificial Sequence
  Description of Artificial Sequence: Synthetic oligonucleotide
  Antisense strand to SEQ ID NO: 1086086
aauacucuucaccacccag

SEQ ID NO: 1086088 - RNA, 19 nt, Artificial Sequence
  Description of Artificial Sequence: Synthetic oligonucleotide
  Sense strand starting at position 645 of SEQ ID NO: 915522
ggugaagaguauuaaauca

SEQ ID NO: 1086089 - RNA, 19 nt, Artificial Sequence
  Description of Artificial Sequence: Synthetic oligonucleotide
  Antisense strand to SEQ ID NO: 1086088
ugauuuaauacucuucacc

SEQ ID NO: 1086090 - RNA, 19 nt, Artificial Sequence
  Description of Artificial Sequence: Synthetic oligonucleotide
  Sense strand starting at position 661 of SEQ ID NO: 915522
ucaguuaaacagugaaagu

SEQ ID NO: 1086091 - RNA, 19 nt, Artificial Sequence
  Description of Artificial Sequence: Synthetic oligonucleotide
  Antisense strand to SEQ ID NO: 1086090
acuuucacuguuuaacuga

SEQ ID NO: 1086092 - RNA, 19 nt, Artificial Sequence
  Description of Artificial Sequence: Synthetic oligonucleotide
  Sense strand starting at position 670 of SEQ ID NO: 915522
cagugaaagugcuuagcau

SEQ ID NO: 1086093 - RNA, 19 nt, Artificial Sequence
  Description of Artificial Sequence: Synthetic oligonucleotide
  Antisense strand to SEQ ID NO: 1086092
augcuaagcacuuucacug

SEQ ID NO: 1086094 - RNA, 19 nt, Artificial Sequence
  Description of Artificial Sequence: Synthetic oligonucleotide
  Sense strand starting at position 671 of SEQ ID NO: 915522
agugaaagugcuuagcaua

SEQ ID NO: 1086095 - RNA, 19 nt, Artificial Sequence
  Description of Artificial Sequence: Synthetic oligonucleotide
  Antisense strand to SEQ ID NO: 1086094
uaugcuaagcacuuucacu

SEQ ID NO: 1086096 - RNA, 19 nt, Artificial Sequence
  Description of Artificial Sequence: Synthetic oligonucleotide
  Sense strand starting at position 1121 of SEQ ID NO: 915522
ccugguuugucccagguca

SEQ ID NO: 1086097 - RNA, 19 nt, Artificial Sequence
  Description of Artificial Sequence: Synthetic oligonucleotide
  Antisense strand to SEQ ID NO: 1086096
ugaccugggacaaaccagg

SEQ ID NO: 1086098 - RNA, 19 nt, Artificial Sequence
  Description of Artificial Sequence: Synthetic oligonucleotide
  Sense strand starting at position 1362 of SEQ ID NO: 915522
gggcaucucuccgcagaag

SEQ ID NO: 1086099 - RNA, 19 nt, Artificial Sequence
  Description of Artificial Sequence: Synthetic oligonucleotide
  Antisense strand to SEQ ID NO: 1086098
cuucugcggagagaugccc

SEQ ID NO: 1086100 - RNA, 19 nt, Artificial Sequence
  Description of Artificial Sequence: Synthetic oligonucleotide
  Sense strand starting at position 2368 of SEQ ID NO: 915522
ucucucggcuucuugagaa

SEQ ID NO: 1086101 - RNA, 19 nt, Artificial Sequence
  Description of Artificial Sequence: Synthetic oligonucleotide
  Antisense strand to SEQ ID NO: 1086100
uucucaagaagccgagaga

SEQ ID NO: 1086102 - RNA, 19 nt, Artificial Sequence
  Description of Artificial Sequence: Synthetic oligonucleotide
  Sense strand starting at position 2458 of SEQ ID NO: 915522
cuggguguuuaggagaagu

SEQ ID NO: 1086103 - RNA, 19 nt, Artificial Sequence
  Description of Artificial Sequence: Synthetic oligonucleotide
  Antisense strand to SEQ ID NO: 1086102
acuucuccuaaacacccag

SEQ ID NO: 1086104 - RNA, 19 nt, Artificial Sequence
  Description of Artificial Sequence: Synthetic oligonucleotide
  Sense strand starting at position 2460 of SEQ ID NO: 915522
ggguguuuaggagaaguga

SEQ ID NO: 1086105 - RNA, 19 nt, Artificial Sequence
  Description of Artificial Sequence: Synthetic oligonucleotide
  Antisense strand to SEQ ID NO: 1086104
ucacuucuccuaaacaccc

SEQ ID NO: 1086106 - RNA, 19 nt, Artificial Sequence
  Description of Artificial Sequence: Synthetic oligonucleotide
  Sense strand starting at position 2474 of SEQ ID NO: 915522
agugaaagccugggucaca

SEQ ID NO: 1086107 - RNA, 19 nt, Artificial Sequence
  Description of Artificial Sequence: Synthetic oligonucleotide
  Antisense strand to SEQ ID NO: 1086106
ugugacccaggcuuucacu

SEQ ID NO: 1086108 - RNA, 19 nt, Artificial Sequence
  Description of Artificial Sequence: Synthetic oligonucleotide
  Sense strand starting at position 2715 of SEQ ID NO: 915522
ccugcaucauuuggucaca

SEQ ID NO: 1086109 - RNA, 19 nt, Artificial Sequence
  Description of Artificial Sequence: Synthetic oligonucleotide
  Antisense strand to SEQ ID NO: 1086108
ugugaccaaaugaugcagg

SEQ ID NO: 1086110 - RNA, 19 nt, Artificial Sequence
  Description of Artificial Sequence: Synthetic oligonucleotide
  Sense strand starting at position 2717 of SEQ ID NO: 915522
ugcaucauuuggucacacu

SEQ ID NO: 1086111 - RNA, 19 nt, Artificial Sequence
  Description of Artificial Sequence: Synthetic oligonucleotide
  Antisense strand to SEQ ID NO: 1086110
agugugaccaaaugaugca

SEQ ID NO: 1086112 - RNA, 19 nt, Artificial Sequence
  Description of Artificial Sequence: Synthetic oligonucleotide
  Sense strand starting at position 2792 of SEQ ID NO: 915522
aaagauugguuccugguaa

SEQ ID NO: 1086113 - RNA, 19 nt, Artificial Sequence
  Description of Artificial Sequence: Synthetic oligonucleotide
  Antisense strand to SEQ ID NO: 1086112
uuaccaggaaccaaucuuu

SEQ ID NO: 1086114 - RNA, 19 nt, Artificial Sequence
  Description of Artificial Sequence: Synthetic oligonucleotide
  Sense strand starting at position 2793 of SEQ ID NO: 915522
aagauugguuccugguaac

SEQ ID NO: 1086115 - RNA, 19 nt, Artificial Sequence
  Description of Artificial Sequence: Synthetic oligonucleotide
  Antisense strand to SEQ ID NO: 1086114
guuaccaggaaccaaucuu

SEQ ID NO: 1086116 - RNA, 19 nt, Artificial Sequence
  Description of Artificial Sequence: Synthetic oligonucleotide
  Sense strand starting at position 2841 of SEQ ID NO: 915522
uccugaguggcagggaaau

SEQ ID NO: 1086117 - RNA, 19 nt, Artificial Sequence
  Description of Artificial Sequence: Synthetic oligonucleotide
  Antisense strand to SEQ ID NO: 1086116
auuucccugccacucagga

SEQ ID NO: 1086118 - RNA, 19 nt, Artificial Sequence
  Description of Artificial Sequence: Synthetic oligonucleotide
  Sense strand starting at position 2865 of SEQ ID NO: 915522
gcgcaauucggauugcaca

SEQ ID NO: 1086119 - RNA, 19 nt, Artificial Sequence
  Description of Artificial Sequence: Synthetic oligonucleotide
  Antisense strand to SEQ ID NO: 1086118
ugugcaauccgaauugcgc

SEQ ID NO: 1086120 - RNA, 19 nt, Artificial Sequence
  Description of Artificial Sequence: Synthetic oligonucleotide
  Sense strand starting at position 2942 of SEQ ID NO: 915522
ccacaagugagucgggauu

SEQ ID NO: 1086121 - RNA, 19 nt, Artificial Sequence
  Description of Artificial Sequence: Synthetic oligonucleotide
  Antisense strand to SEQ ID NO: 1086120
aaucccgacucacuugugg

SEQ ID NO: 1086122 - RNA, 19 nt, Artificial Sequence
  Description of Artificial Sequence: Synthetic oligonucleotide
  Sense strand starting at position 2944 of SEQ ID NO: 915522
acaagugagucgggauuga

SEQ ID NO: 1086123 - RNA, 19 nt, Artificial Sequence
  Description of Artificial Sequence: Synthetic oligonucleotide
  Antisense strand to SEQ ID NO: 1086122
ucaaucccgacucacuugu

SEQ ID NO: 1086124 - RNA, 19 nt, Artificial Sequence
  Description of Artificial Sequence: Synthetic oligonucleotide
  Sense strand starting at position 2988 of SEQ ID NO: 915522
cagagucagccucagaacu

SEQ ID NO: 1086125 - RNA, 19 nt, Artificial Sequence
  Description of Artificial Sequence: Synthetic oligonucleotide
  Antisense strand to SEQ ID NO: 1086124
aguucugaggcugacucug

SEQ ID NO: 1086126 - RNA, 19 nt, Artificial Sequence
  Description of Artificial Sequence: Synthetic oligonucleotide
  Sense strand starting at position 3214 of SEQ ID NO: 915522
ggcugcuucucuuuauuga

SEQ ID NO: 1086127 - RNA, 19 nt, Artificial Sequence
  Description of Artificial Sequence: Synthetic oligonucleotide
  Antisense strand to SEQ ID NO: 1086126
ucaauaaagagaagcagcc

SEQ ID NO: 1086128 - RNA, 19 nt, Artificial Sequence
  Description of Artificial Sequence: Synthetic oligonucleotide
  Sense strand starting at position 3240 of SEQ ID NO: 915522
gcauauaugucuccuuugu

SEQ ID NO: 1086129 - RNA, 19 nt, Artificial Sequence
  Description of Artificial Sequence: Synthetic oligonucleotide
  Antisense strand to SEQ ID NO: 1086128
acaaaggagacauauaugc

SEQ ID NO: 1086130 - RNA, 19 nt, Artificial Sequence
  Description of Artificial Sequence: Synthetic oligonucleotide
  Sense strand starting at position 3242 of SEQ ID NO: 915522
auauaugucuccuuuguag

SEQ ID NO: 1086131 - RNA, 19 nt, Artificial Sequence
  Description of Artificial Sequence: Synthetic oligonucleotide
  Antisense strand to SEQ ID NO: 1086130
cuacaaaggagacauauau

SEQ ID NO: 1086132 - RNA, 19 nt, Artificial Sequence
  Description of Artificial Sequence: Synthetic oligonucleotide
  Sense strand starting at position 3279 of SEQ ID NO: 915522
ccaucuaaguaguuuccua

SEQ ID NO: 1086133 - RNA, 19 nt, Artificial Sequence
  Description of Artificial Sequence: Synthetic oligonucleotide
  Antisense strand to SEQ ID NO: 1086132
uaggaaacuacuuagaugg

SEQ ID NO: 1086134 - RNA, 19 nt, Artificial Sequence
  Description of Artificial Sequence: Synthetic oligonucleotide
  Sense strand starting at position 3440 of SEQ ID NO: 915522
cuucccagugcuuggcaaa

SEQ ID NO: 1086135 - RNA, 19 nt, Artificial Sequence
  Description of Artificial Sequence: Synthetic oligonucleotide
  Antisense strand to SEQ ID NO: 1086134
uuugccaagcacugggaag

SEQ ID NO: 1086136 - RNA, 19 nt, Artificial Sequence
  Description of Artificial Sequence: Synthetic oligonucleotide
  Sense strand starting at position 3441 of SEQ ID NO: 915522
uucccagugcuuggcaaau

SEQ ID NO: 1086137 - RNA, 19 nt, Artificial Sequence
  Description of Artificial Sequence: Synthetic oligonucleotide
  Antisense strand to SEQ ID NO: 1086136
auuugccaagcacugggaa

SEQ ID NO: 1086138 - RNA, 19 nt, Artificial Sequence
  Description of Artificial Sequence: Synthetic oligonucleotide
  Sense strand starting at position 3468 of SEQ ID NO: 915522
cucaauaaguauugccuga

SEQ ID NO: 1086139 - RNA, 19 nt, Artificial Sequence
  Description of Artificial Sequence: Synthetic oligonucleotide
  Antisense strand to SEQ ID NO: 1086138
ucaggcaauacuuauugag

SEQ ID NO: 1086140 - RNA, 19 nt, Artificial Sequence
  Description of Artificial Sequence: Synthetic oligonucleotide
  Sense strand starting at position 3472 of SEQ ID NO: 915522
auaaguauugccugaauca

SEQ ID NO: 1086141 - RNA, 19 nt, Artificial Sequence
  Description of Artificial Sequence: Synthetic oligonucleotide
  Antisense strand to SEQ ID NO: 1086140
ugauucaggcaauacuuau

SEQ ID NO: 1086142 - RNA, 19 nt, Artificial Sequence
  Description of Artificial Sequence: Synthetic oligonucleotide
  Sense strand starting at position 3498 of SEQ ID NO: 915522
gaaagagugucccaaggca

SEQ ID NO: 1086143 - RNA, 19 nt, Artificial Sequence
  Description of Artificial Sequence: Synthetic oligonucleotide
  Antisense strand to SEQ ID NO: 1086142
ugccuugggacacucuuuc

SEQ ID NO: 1086144 - RNA, 19 nt, Artificial Sequence
  Description of Artificial Sequence: Synthetic oligonucleotide
  Sense strand starting at position 3576 of SEQ ID NO: 915522
agcuauagauaccagcaaa

SEQ ID NO: 1086145 - RNA, 19 nt, Artificial Sequence
  Description of Artificial Sequence: Synthetic oligonucleotide
  Antisense strand to SEQ ID NO: 1086144
uuugcugguaucuauagcu

SEQ ID NO: 1086146 - RNA, 19 nt, Artificial Sequence
  Description of Artificial Sequence: Synthetic oligonucleotide
  Sense strand starting at position 13 of SEQ ID NO: 915523
uacugcugucaagaaguuu

SEQ ID NO: 1086147 - RNA, 19 nt, Artificial Sequence
  Description of Artificial Sequence: Synthetic oligonucleotide
  Antisense strand to SEQ ID NO: 1086146
aaacuucuugacagcagua

SEQ ID NO: 1086148 - RNA, 19 nt, Artificial Sequence
  Description of Artificial Sequence: Synthetic oligonucleotide
  Sense strand starting at position 59 of SEQ ID NO: 915523
uuccgaauucuauaacgua

SEQ ID NO: 1086149 - RNA, 19 nt, Artificial Sequence
  Description of Artificial Sequence: Synthetic oligonucleotide
  Antisense strand to SEQ ID NO: 1086148
uacguuauagaauucggaa

SEQ ID NO: 1086150 - RNA, 19 nt, Artificial Sequence
  Description of Artificial Sequence: Synthetic oligonucleotide
  Sense strand starting at position 72 of SEQ ID NO: 915523
aacguagcaccuggagaau

SEQ ID NO: 1086151 - RNA, 19 nt, Artificial Sequence
  Description of Artificial Sequence: Synthetic oligonucleotide
  Antisense strand to SEQ ID NO: 1086150
auucuccaggugcuacguu

SEQ ID NO: 1086152 - RNA, 19 nt, Artificial Sequence
  Description of Artificial Sequence: Synthetic oligonucleotide
  Sense strand starting at position 100 of SEQ ID NO: 915523
agguauuuguggcuagguu

SEQ ID NO: 1086153 - RNA, 19 nt, Artificial Sequence
  Description of Artificial Sequence: Synthetic oligonucleotide
  Antisense strand to SEQ ID NO: 1086152
aaccuagccacaaauaccu

SEQ ID NO: 1086154 - RNA, 19 nt, Artificial Sequence
  Description of Artificial Sequence: Synthetic oligonucleotide
  Sense strand starting at position 226 of SEQ ID NO: 915523
uugcuucgugugcucaaau

SEQ ID NO: 1086155 - RNA, 19 nt, Artificial Sequence
  Description of Artificial Sequence: Synthetic oligonucleotide
  Antisense strand to SEQ ID NO: 1086154
auuugagcacacgaagcaa

SEQ ID NO: 1086156 - RNA, 19 nt, Artificial Sequence
  Description of Artificial Sequence: Synthetic oligonucleotide
  Sense strand starting at position 271 of SEQ ID NO: 915523
ggcaguuguacugggaaag

SEQ ID NO: 1086157 - RNA, 19 nt, Artificial Sequence
  Description of Artificial Sequence: Synthetic oligonucleotide
  Antisense strand to SEQ ID NO: 1086156
cuuucccaguacaacugcc

SEQ ID NO: 1086158 - RNA, 19 nt, Artificial Sequence
  Description of Artificial Sequence: Synthetic oligonucleotide
  Sense strand starting at position 272 of SEQ ID NO: 915523
gcaguuguacugggaaaga

SEQ ID NO: 1086159 - RNA, 19 nt, Artificial Sequence
  Description of Artificial Sequence: Synthetic oligonucleotide
  Antisense strand to SEQ ID NO: 1086158
ucuuucccaguacaacugc

SEQ ID NO: 1086160 - RNA, 19 nt, Artificial Sequence
  Description of Artificial Sequence: Synthetic oligonucleotide
  Sense strand starting at position 331 of SEQ ID NO: 915523
gcgguaucuacugccgcau

SEQ ID NO: 1086161 - RNA, 19 nt, Artificial Sequence
  Description of Artificial Sequence: Synthetic oligonucleotide
  Antisense strand to SEQ ID NO: 1086160
augcggcaguagauaccgc

SEQ ID NO: 1086162 - RNA, 19 nt, Artificial Sequence
  Description of Artificial Sequence: Synthetic oligonucleotide
  Sense strand starting at position 332 of SEQ ID NO: 915523
cgguaucuacugccgcaua

SEQ ID NO: 1086163 - RNA, 19 nt, Artificial Sequence
  Description of Artificial Sequence: Synthetic oligonucleotide
  Antisense strand to SEQ ID NO: 1086162
uaugcggcaguagauaccg

SEQ ID NO: 1086164 - RNA, 19 nt, Artificial Sequence
  Description of Artificial Sequence: Synthetic oligonucleotide
  Sense strand starting at position 352 of SEQ ID NO: 915523
gugcauaaucgugccuaca

SEQ ID NO: 1086165 - RNA, 19 nt, Artificial Sequence
  Description of Artificial Sequence: Synthetic oligonucleotide
  Antisense strand to SEQ ID NO: 1086164
uguaggcacgauuaugcac

SEQ ID NO: 1086166 - RNA, 19 nt, Artificial Sequence
  Description of Artificial Sequence: Synthetic oligonucleotide
  Sense strand starting at position 355 of SEQ ID NO: 915523
cauaaucgugccuacauga

SEQ ID NO: 1086167 - RNA, 19 nt, Artificial Sequence
  Description of Artificial Sequence: Synthetic oligonucleotide
  Antisense strand to SEQ ID NO: 1086166
ucauguaggcacgauuaug

SEQ ID NO: 1086168 - RNA, 19 nt, Artificial Sequence
  Description of Artificial Sequence: Synthetic oligonucleotide
  Sense strand starting at position 513 of SEQ ID NO: 915523
cugcccugucgucuugauu

SEQ ID NO: 1086169 - RNA, 19 nt, Artificial Sequence
  Description of Artificial Sequence: Synthetic oligonucleotide
  Antisense strand to SEQ ID NO: 1086168
aaucaagacgacagggcag

SEQ ID NO: 1086170 - RNA, 19 nt, Artificial Sequence
  Description of Artificial Sequence: Synthetic oligonucleotide
  Sense strand starting at position 603 of SEQ ID NO: 915523
gcauaauuaguauagugac

SEQ ID NO: 1086171 - RNA, 19 nt, Artificial Sequence
  Description of Artificial Sequence: Synthetic oligonucleotide
  Antisense strand to SEQ ID NO: 1086170
gucacuauacuaauuaugc

SEQ ID NO: 1086172 - RNA, 19 nt, Artificial Sequence
  Description of Artificial Sequence: Synthetic oligonucleotide
  Sense strand starting at position 1213 of SEQ ID NO: 915523
agauaaauccuguguagua

SEQ ID NO: 1086173 - RNA, 19 nt, Artificial Sequence
  Description of Artificial Sequence: Synthetic oligonucleotide
  Antisense strand to SEQ ID NO: 1086172
uacuacacaggauuuaucu

SEQ ID NO: 1086174 - RNA, 19 nt, Artificial Sequence
  Description of Artificial Sequence: Synthetic oligonucleotide
  Sense strand starting at position 1214 of SEQ ID NO: 915523
gauaaauccuguguaguaa

SEQ ID NO: 1086175 - RNA, 19 nt, Artificial Sequence
  Description of Artificial Sequence: Synthetic oligonucleotide
  Antisense strand to SEQ ID NO: 1086174
uuacuacacaggauuuauc

SEQ ID NO: 1086176 - RNA, 19 nt, Artificial Sequence
  Description of Artificial Sequence: Synthetic oligonucleotide
  Sense strand starting at position 1215 of SEQ ID NO: 915523
auaaauccuguguaguaaa

SEQ ID NO: 1086177 - RNA, 19 nt, Artificial Sequence
  Description of Artificial Sequence: Synthetic oligonucleotide
  Antisense strand to SEQ ID NO: 1086176
uuuacuacacaggauuuau

SEQ ID NO: 1086178 - RNA, 19 nt, Artificial Sequence
  Description of Artificial Sequence: Synthetic oligonucleotide
  Sense strand starting at position 1222 of SEQ ID NO: 915523
cuguguaguaaaggacaaa

SEQ ID NO: 1086179 - RNA, 19 nt, Artificial Sequence
  Description of Artificial Sequence: Synthetic oligonucleotide
  Antisense strand to SEQ ID NO: 1086178
uuuguccuuuacuacacag

SEQ ID NO: 1086180 - RNA, 19 nt, Artificial Sequence
  Description of Artificial Sequence: Synthetic oligonucleotide
  Sense strand starting at position 1481 of SEQ ID NO: 915523
gcaaguguucgcuuugucu

SEQ ID NO: 1086181 - RNA, 19 nt, Artificial Sequence
  Description of Artificial Sequence: Synthetic oligonucleotide
  Antisense strand to SEQ ID NO: 1086180
agacaaagcgaacacuugc

SEQ ID NO: 1086182 - RNA, 19 nt, Artificial Sequence
  Description of Artificial Sequence: Synthetic oligonucleotide
  Sense strand starting at position 1494 of SEQ ID NO: 915523
uugucuuaccuguagaucu

SEQ ID NO: 1086183 - RNA, 19 nt, Artificial Sequence
  Description of Artificial Sequence: Synthetic oligonucleotide
  Antisense strand to SEQ ID NO: 1086182
agaucuacagguaagacaa

SEQ ID NO: 1086184 - RNA, 19 nt, Artificial Sequence
  Description of Artificial Sequence: Synthetic oligonucleotide
  Sense strand starting at position 2017 of SEQ ID NO: 915523
cacagaagccuugggaaca

SEQ ID NO: 1086185 - RNA, 19 nt, Artificial Sequence
  Description of Artificial Sequence: Synthetic oligonucleotide
  Antisense strand to SEQ ID NO: 1086184
uguucccaaggcuucugug

SEQ ID NO: 1086186 - RNA, 19 nt, Artificial Sequence
  Description of Artificial Sequence: Synthetic oligonucleotide
  Sense strand starting at position 2118 of SEQ ID NO: 915523
caggucucaggugagcaau

SEQ ID NO: 1086187 - RNA, 19 nt, Artificial Sequence
  Description of Artificial Sequence: Synthetic oligonucleotide
  Antisense strand to SEQ ID NO: 1086186
auugcucaccugagaccug

SEQ ID NO: 1086188 - RNA, 19 nt, Artificial Sequence
  Description of Artificial Sequence: Synthetic oligonucleotide
  Sense strand starting at position 2192 of SEQ ID NO: 915523
gucugcucugcgguagagu

SEQ ID NO: 1086189 - RNA, 19 nt, Artificial Sequence
  Description of Artificial Sequence: Synthetic oligonucleotide
  Antisense strand to SEQ ID NO: 1086188
acucuaccgcagagcagac

SEQ ID NO: 1086190 - RNA, 19 nt, Artificial Sequence
  Description of Artificial Sequence: Synthetic oligonucleotide
  Sense strand starting at position 2239 of SEQ ID NO: 915523
cuuugaggacgugaguaaa

SEQ ID NO: 1086191 - RNA, 19 nt, Artificial Sequence
  Description of Artificial Sequence: Synthetic oligonucleotide
  Antisense strand to SEQ ID NO: 1086190
uuuacucacguccucaaag

SEQ ID NO: 1086192 - RNA, 19 nt, Artificial Sequence
  Description of Artificial Sequence: Synthetic oligonucleotide
  Sense strand starting at position 2505 of SEQ ID NO: 915523
augucaucaucuccagagu

SEQ ID NO: 1086193 - RNA, 19 nt, Artificial Sequence
  Description of Artificial Sequence: Synthetic oligonucleotide
  Antisense strand to SEQ ID NO: 1086192
acucuggagaugaugacau

SEQ ID NO: 1086194 - RNA, 19 nt, Artificial Sequence
  Description of Artificial Sequence: Synthetic oligonucleotide
  Sense strand starting at position 2506 of SEQ ID NO: 915523
ugucaucaucuccagaguu

SEQ ID NO: 1086195 - RNA, 19 nt, Artificial Sequence
  Description of Artificial Sequence: Synthetic oligonucleotide
  Antisense strand to SEQ ID NO: 1086194
aacucuggagaugaugaca

SEQ ID NO: 1086196 - RNA, 19 nt, Artificial Sequence
  Description of Artificial Sequence: Synthetic oligonucleotide
  Sense strand starting at position 2508 of SEQ ID NO: 915523
ucaucaucuccagaguuug

SEQ ID NO: 1086197 - RNA, 19 nt, Artificial Sequence
  Description of Artificial Sequence: Synthetic oligonucleotide
  Antisense strand to SEQ ID NO: 1086196
caaacucuggagaugauga

SEQ ID NO: 1086198 - RNA, 19 nt, Artificial Sequence
  Description of Artificial Sequence: Synthetic oligonucleotide
  Sense strand starting at position 2518 of SEQ ID NO: 915523
cagaguuugcagggagaau

SEQ ID NO: 1086199 - RNA, 19 nt, Artificial Sequence
  Description of Artificial Sequence: Synthetic oligonucleotide
  Antisense strand to SEQ ID NO: 1086198
auucucccugcaaacucug

SEQ ID NO: 1086200 - RNA, 19 nt, Artificial Sequence
  Description of Artificial Sequence: Synthetic oligonucleotide
  Sense strand starting at position 2544 of SEQ ID NO: 915523
uuagcucugcuagggaaga

SEQ ID NO: 1086201 - RNA, 19 nt, Artificial Sequence
  Description of Artificial Sequence: Synthetic oligonucleotide
  Antisense strand to SEQ ID NO: 1086200
ucuucccuagcagagcuaa

SEQ ID NO: 1086202 - RNA, 19 nt, Artificial Sequence
  Description of Artificial Sequence: Synthetic oligonucleotide
  Sense strand starting at position 2625 of SEQ ID NO: 915523
ccaguauugcagggaagaa

SEQ ID NO: 1086203 - RNA, 19 nt, Artificial Sequence
  Description of Artificial Sequence: Synthetic oligonucleotide
  Antisense strand to SEQ ID NO: 1086202
uucuucccugcaauacugg

SEQ ID NO: 1086204 - RNA, 19 nt, Artificial Sequence
  Description of Artificial Sequence: Synthetic oligonucleotide
  Sense strand starting at position 2688 of SEQ ID NO: 915523
cuaggcucccuugaauaua

SEQ ID NO: 1086205 - RNA, 19 nt, Artificial Sequence
  Description of Artificial Sequence: Synthetic oligonucleotide
  Antisense strand to SEQ ID NO: 1086204
uauauucaagggagccuag

SEQ ID NO: 1086206 - RNA, 19 nt, Artificial Sequence
  Description of Artificial Sequence: Synthetic oligonucleotide
  Sense strand starting at position 2865 of SEQ ID NO: 915523
gcuauaaacucagugaagu

SEQ ID NO: 1086207 - RNA, 19 nt, Artificial Sequence
  Description of Artificial Sequence: Synthetic oligonucleotide
  Antisense strand to SEQ ID NO: 1086206
acuucacugaguuuauagc

SEQ ID NO: 1086208 - RNA, 19 nt, Artificial Sequence
  Description of Artificial Sequence: Synthetic oligonucleotide
  Sense strand starting at position 2866 of SEQ ID NO: 915523
cuauaaacucagugaaguu

SEQ ID NO: 1086209 - RNA, 19 nt, Artificial Sequence
  Description of Artificial Sequence: Synthetic oligonucleotide
  Antisense strand to SEQ ID NO: 1086208
aacuucacugaguuuauag

SEQ ID NO: 1086210 - RNA, 19 nt, Artificial Sequence
  Description of Artificial Sequence: Synthetic oligonucleotide
  Sense strand starting at position 2875 of SEQ ID NO: 915523
cagugaaguugauuaaaua

SEQ ID NO: 1086211 - RNA, 19 nt, Artificial Sequence
  Description of Artificial Sequence: Synthetic oligonucleotide
  Antisense strand to SEQ ID NO: 1086210
uauuuaaucaacuucacug

SEQ ID NO: 1086212 - RNA, 19 nt, Artificial Sequence
  Description of Artificial Sequence: Synthetic oligonucleotide
  Sense strand starting at position 2982 of SEQ ID NO: 915523
ugaugaaauauguggcuau

SEQ ID NO: 1086213 - RNA, 19 nt, Artificial Sequence
  Description of Artificial Sequence: Synthetic oligonucleotide
  Antisense strand to SEQ ID NO: 1086212
auagccacauauuucauca

SEQ ID NO: 1086214 - RNA, 19 nt, Artificial Sequence
  Description of Artificial Sequence: Synthetic oligonucleotide
  Sense strand starting at position 2986 of SEQ ID NO: 915523
gaaauauguggcuauaccu

SEQ ID NO: 1086215 - RNA, 19 nt, Artificial Sequence
  Description of Artificial Sequence: Synthetic oligonucleotide
  Antisense strand to SEQ ID NO: 1086214
agguauagccacauauuuc

SEQ ID NO: 1086216 - RNA, 19 nt, Artificial Sequence
  Description of Artificial Sequence: Synthetic oligonucleotide
  Sense strand starting at position 3454 of SEQ ID NO: 915523
augauauaauggcuaugua

SEQ ID NO: 1086217 - RNA, 19 nt, Artificial Sequence
  Description of Artificial Sequence: Synthetic oligonucleotide
  Antisense strand to SEQ ID NO: 1086216
uacauagccauuauaucau

SEQ ID NO: 1086218 - RNA, 19 nt, Artificial Sequence
  Description of Artificial Sequence: Synthetic oligonucleotide
  Sense strand starting at position 3455 of SEQ ID NO: 915523
ugauauaauggcuauguau

SEQ ID NO: 1086219 - RNA, 19 nt, Artificial Sequence
  Description of Artificial Sequence: Synthetic oligonucleotide
  Antisense strand to SEQ ID NO: 1086218
auacauagccauuauauca

SEQ ID NO: 1086220 - RNA, 19 nt, Artificial Sequence
  Description of Artificial Sequence: Synthetic oligonucleotide
  Sense strand starting at position 3802 of SEQ ID NO: 915523
ggacuugacuuaucuaggu

SEQ ID NO: 1086221 - RNA, 19 nt, Artificial Sequence
  Description of Artificial Sequence: Synthetic oligonucleotide
  Antisense strand to SEQ ID NO: 1086220
accuagauaagucaagucc

SEQ ID NO: 1086222 - RNA, 19 nt, Artificial Sequence
  Description of Artificial Sequence: Synthetic oligonucleotide
  Sense strand starting at position 3899 of SEQ ID NO: 915523
uuuggaauucugggaaguu

SEQ ID NO: 1086223 - RNA, 19 nt, Artificial Sequence
  Description of Artificial Sequence: Synthetic oligonucleotide
  Antisense strand to SEQ ID NO: 1086222
aacuucccagaauuccaaa

SEQ ID NO: 1086224 - RNA, 19 nt, Artificial Sequence
  Description of Artificial Sequence: Synthetic oligonucleotide
  Sense strand starting at position 3959 of SEQ ID NO: 915523
gggugaugauauguaaaug

SEQ ID NO: 1086225 - RNA, 19 nt, Artificial Sequence
  Description of Artificial Sequence: Synthetic oligonucleotide
  Antisense strand to SEQ ID NO: 1086224
cauuuacauaucaucaccc

SEQ ID NO: 1086226 - RNA, 19 nt, Artificial Sequence
  Description of Artificial Sequence: Synthetic oligonucleotide
  Sense strand starting at position 28 of SEQ ID NO: 915524
cugggagauacugguccaa

SEQ ID NO: 1086227 - RNA, 19 nt, Artificial Sequence
  Description of Artificial Sequence: Synthetic oligonucleotide
  Antisense strand to SEQ ID NO: 1086226
uuggaccaguaucucccag

SEQ ID NO: 1086228 - RNA, 19 nt, Artificial Sequence
  Description of Artificial Sequence: Synthetic oligonucleotide
  Sense strand starting at position 53 of SEQ ID NO: 915524
uguggaccuuuccuuugau

SEQ ID NO: 1086229 - RNA, 19 nt, Artificial Sequence
  Description of Artificial Sequence: Synthetic oligonucleotide
  Antisense strand to SEQ ID NO: 1086228
aucaaaggaaagguccaca

SEQ ID NO: 1086230 - RNA, 19 nt, Artificial Sequence
  Description of Artificial Sequence: Synthetic oligonucleotide
  Sense strand starting at position 56 of SEQ ID NO: 915524
ggaccuuuccuuugaugug

SEQ ID NO: 1086231 - RNA, 19 nt, Artificial Sequence
  Description of Artificial Sequence: Synthetic oligonucleotide
  Antisense strand to SEQ ID NO: 1086230
cacaucaaaggaaaggucc

SEQ ID NO: 1086232 - RNA, 19 nt, Artificial Sequence
  Description of Artificial Sequence: Synthetic oligonucleotide
  Sense strand starting at position 128 of SEQ ID NO: 915524
agacaauugucuuuaguua

SEQ ID NO: 1086233 - RNA, 19 nt, Artificial Sequence
  Description of Artificial Sequence: Synthetic oligonucleotide
  Antisense strand to SEQ ID NO: 1086232
uaacuaaagacaauugucu

SEQ ID NO: 1086234 - RNA, 19 nt, Artificial Sequence
  Description of Artificial Sequence: Synthetic oligonucleotide
  Sense strand starting at position 141 of SEQ ID NO: 915524
uaguuaucacugcgaggga

SEQ ID NO: 1086235 - RNA, 19 nt, Artificial Sequence
  Description of Artificial Sequence: Synthetic oligonucleotide
  Antisense strand to SEQ ID NO: 1086234
ucccucgcagugauaacua

SEQ ID NO: 1086236 - RNA, 19 nt, Artificial Sequence
  Description of Artificial Sequence: Synthetic oligonucleotide
  Sense strand starting at position 335 of SEQ ID NO: 915524
agagcuagccagggagauu

SEQ ID NO: 1086237 - RNA, 19 nt, Artificial Sequence
  Description of Artificial Sequence: Synthetic oligonucleotide
  Antisense strand to SEQ ID NO: 1086236
aaucucccuggcuagcucu

SEQ ID NO: 1086238 - RNA, 19 nt, Artificial Sequence
  Description of Artificial Sequence: Synthetic oligonucleotide
  Sense strand starting at position 704 of SEQ ID NO: 915524
agcagcaaucuccaggaaa

SEQ ID NO: 1086239 - RNA, 19 nt, Artificial Sequence
  Description of Artificial Sequence: Synthetic oligonucleotide
  Antisense strand to SEQ ID NO: 1086238
uuuccuggagauugcugcu

SEQ ID NO: 1086240 - RNA, 19 nt, Artificial Sequence
  Description of Artificial Sequence: Synthetic oligonucleotide
  Sense strand starting at position 990 of SEQ ID NO: 915524
ggccgggagcgguauuuaa

SEQ ID NO: 1086241 - RNA, 19 nt, Artificial Sequence
  Description of Artificial Sequence: Synthetic oligonucleotide
  Antisense strand to SEQ ID NO: 1086240
uuaaauaccgcucccggcc

SEQ ID NO: 1086242 - RNA, 19 nt, Artificial Sequence
  Description of Artificial Sequence: Synthetic oligonucleotide
  Sense strand starting at position 1413 of SEQ ID NO: 915524
gagggauugcaagguuuag

SEQ ID NO: 1086243 - RNA, 19 nt, Artificial Sequence
  Description of Artificial Sequence: Synthetic oligonucleotide
  Antisense strand to SEQ ID NO: 1086242
cuaaaccuugcaaucccuc

SEQ ID NO: 1086244 - RNA, 19 nt, Artificial Sequence
  Description of Artificial Sequence: Synthetic oligonucleotide
  Sense strand starting at position 1581 of SEQ ID NO: 915524
agccucucgccauaaauua

SEQ ID NO: 1086245 - RNA, 19 nt, Artificial Sequence
  Description of Artificial Sequence: Synthetic oligonucleotide
  Antisense strand to SEQ ID NO: 1086244
uaauuuauggcgagaggcu

SEQ ID NO: 1086246 - RNA, 19 nt, Artificial Sequence
  Description of Artificial Sequence: Synthetic oligonucleotide
  Sense strand starting at position 1588 of SEQ ID NO: 915524
cgccauaaauuagccaaau

SEQ ID NO: 1086247 - RNA, 19 nt, Artificial Sequence
  Description of Artificial Sequence: Synthetic oligonucleotide
  Antisense strand to SEQ ID NO: 1086246
auuuggcuaauuuauggcg

SEQ ID NO: 1086248 - RNA, 19 nt, Artificial Sequence
  Description of Artificial Sequence: Synthetic oligonucleotide
  Sense strand starting at position 1983 of SEQ ID NO: 915524
cgaauaaaucucuggccuu

SEQ ID NO: 1086249 - RNA, 19 nt, Artificial Sequence
  Description of Artificial Sequence: Synthetic oligonucleotide
  Antisense strand to SEQ ID NO: 1086248
aaggccagagauuuauucg

SEQ ID NO: 1086250 - RNA, 19 nt, Artificial Sequence
  Description of Artificial Sequence: Synthetic oligonucleotide
  Sense strand starting at position 2230 of SEQ ID NO: 915524
gacagaugggcuugugcaa

SEQ ID NO: 1086251 - RNA, 19 nt, Artificial Sequence
  Description of Artificial Sequence: Synthetic oligonucleotide
  Antisense strand to SEQ ID NO: 1086250
uugcacaagcccaucuguc

SEQ ID NO: 1086252 - RNA, 19 nt, Artificial Sequence
  Description of Artificial Sequence: Synthetic oligonucleotide
  Sense strand starting at position 2304 of SEQ ID NO: 915524
cuuugauuaucucuggaau

SEQ ID NO: 1086253 - RNA, 19 nt, Artificial Sequence
  Description of Artificial Sequence: Synthetic oligonucleotide
  Antisense strand to SEQ ID NO: 1086252
auuccagagauaaucaaag

SEQ ID NO: 1086254 - RNA, 19 nt, Artificial Sequence
  Description of Artificial Sequence: Synthetic oligonucleotide
  Sense strand starting at position 2305 of SEQ ID NO: 915524
uuugauuaucucuggaaua

SEQ ID NO: 1086255 - RNA, 19 nt, Artificial Sequence
  Description of Artificial Sequence: Synthetic oligonucleotide
  Antisense strand to SEQ ID NO: 1086254
uauuccagagauaaucaaa

SEQ ID NO: 1086256 - RNA, 19 nt, Artificial Sequence
  Description of Artificial Sequence: Synthetic oligonucleotide
  Sense strand starting at position 2468 of SEQ ID NO: 915524
gguagacgaucuucggauu

SEQ ID NO: 1086257 - RNA, 19 nt, Artificial Sequence
  Description of Artificial Sequence: Synthetic oligonucleotide
  Antisense strand to SEQ ID NO: 1086256
aauccgaagaucgucuacc

SEQ ID NO: 1086258 - RNA, 19 nt, Artificial Sequence
  Description of Artificial Sequence: Synthetic oligonucleotide
  Sense strand starting at position 2469 of SEQ ID NO: 915524
guagacgaucuucggauuu

SEQ ID NO: 1086259 - RNA, 19 nt, Artificial Sequence
  Description of Artificial Sequence: Synthetic oligonucleotide
  Antisense strand to SEQ ID NO: 1086258
aaauccgaagaucgucuac

SEQ ID NO: 1086260 - RNA, 19 nt, Artificial Sequence
  Description of Artificial Sequence: Synthetic oligonucleotide
  Sense strand starting at position 2499 of SEQ ID NO: 915524
gaccuuguuagacgaugga

SEQ ID NO: 1086261 - RNA, 19 nt, Artificial Sequence
  Description of Artificial Sequence: Synthetic oligonucleotide
  Antisense strand to SEQ ID NO: 1086260
uccaucgucuaacaagguc

SEQ ID NO: 1086262 - RNA, 19 nt, Artificial Sequence
  Description of Artificial Sequence: Synthetic oligonucleotide
  Sense strand starting at position 2532 of SEQ ID NO: 915524
gugcaaacucucugaguag

SEQ ID NO: 1086263 - RNA, 19 nt, Artificial Sequence
  Description of Artificial Sequence: Synthetic oligonucleotide
  Antisense strand to SEQ ID NO: 1086262
cuacucagagaguuugcac

SEQ ID NO: 1086264 - RNA, 19 nt, Artificial Sequence
  Description of Artificial Sequence: Synthetic oligonucleotide
  Sense strand starting at position 2591 of SEQ ID NO: 915524
accgauugguaguuaaaug

SEQ ID NO: 1086265 - RNA, 19 nt, Artificial Sequence
  Description of Artificial Sequence: Synthetic oligonucleotide
  Antisense strand to SEQ ID NO: 1086264
cauuuaacuaccaaucggu

SEQ ID NO: 1086266 - RNA, 19 nt, Artificial Sequence
  Description of Artificial Sequence: Synthetic oligonucleotide
  Sense strand starting at position 2709 of SEQ ID NO: 915524
gggacuaucuucucccacu

SEQ ID NO: 1086267 - RNA, 19 nt, Artificial Sequence
  Description of Artificial Sequence: Synthetic oligonucleotide
  Antisense strand to SEQ ID NO: 1086266
agugggagaagauaguccc

SEQ ID NO: 1086268 - RNA, 19 nt, Artificial Sequence
  Description of Artificial Sequence: Synthetic oligonucleotide
  Sense strand starting at position 3046 of SEQ ID NO: 915524
uccugucugcaccauuaga

SEQ ID NO: 1086269 - RNA, 19 nt, Artificial Sequence
  Description of Artificial Sequence: Synthetic oligonucleotide
  Antisense strand to SEQ ID NO: 1086268
ucuaauggugcagacagga

SEQ ID NO: 1086270 - RNA, 19 nt, Artificial Sequence
  Description of Artificial Sequence: Synthetic oligonucleotide
  Sense strand starting at position 3065 of SEQ ID NO: 915524
auaaucaugucuguaccuu

SEQ ID NO: 1086271 - RNA, 19 nt, Artificial Sequence
  Description of Artificial Sequence: Synthetic oligonucleotide
  Antisense strand to SEQ ID NO: 1086270
aagguacagacaugauuau

SEQ ID NO: 1086272 - RNA, 19 nt, Artificial Sequence
  Description of Artificial Sequence: Synthetic oligonucleotide
  Sense strand starting at position 3184 of SEQ ID NO: 915524
guacucuucucuuccgaaa

SEQ ID NO: 1086273 - RNA, 19 nt, Artificial Sequence
  Description of Artificial Sequence: Synthetic oligonucleotide
  Antisense strand to SEQ ID NO: 1086272
uuucggaagagaagaguac

SEQ ID NO: 1086274 - RNA, 19 nt, Artificial Sequence
  Description of Artificial Sequence: Synthetic oligonucleotide
  Sense strand starting at position 3211 of SEQ ID NO: 915524
auuguuuaaccugguaaau

SEQ ID NO: 1086275 - RNA, 19 nt, Artificial Sequence
  Description of Artificial Sequence: Synthetic oligonucleotide
  Antisense strand to SEQ ID NO: 1086274
auuuaccagguuaaacaau

SEQ ID NO: 1086276 - RNA, 19 nt, Artificial Sequence
  Description of Artificial Sequence: Synthetic oligonucleotide
  Sense strand starting at position 3220 of SEQ ID NO: 915524
ccugguaaauguguuuaaa

SEQ ID NO: 1086277 - RNA, 19 nt, Artificial Sequence
  Description of Artificial Sequence: Synthetic oligonucleotide
  Antisense strand to SEQ ID NO: 1086276
uuuaaacacauuuaccagg

SEQ ID NO: 1086278 - RNA, 19 nt, Artificial Sequence
  Description of Artificial Sequence: Synthetic oligonucleotide
  Sense strand starting at position 3274 of SEQ ID NO: 915524
uugguauuauguuugacac

SEQ ID NO: 1086279 - RNA, 19 nt, Artificial Sequence
  Description of Artificial Sequence: Synthetic oligonucleotide
  Antisense strand to SEQ ID NO: 1086278
gugucaaacauaauaccaa

SEQ ID NO: 1086280 - RNA, 19 nt, Artificial Sequence
  Description of Artificial Sequence: Synthetic oligonucleotide
  Sense strand starting at position 3284 of SEQ ID NO: 915524
guuugacacucuccucuua

SEQ ID NO: 1086281 - RNA, 19 nt, Artificial Sequence
  Description of Artificial Sequence: Synthetic oligonucleotide
  Antisense strand to SEQ ID NO: 1086280
uaagaggagagugucaaac

SEQ ID NO: 1086282 - RNA, 19 nt, Artificial Sequence
  Description of Artificial Sequence: Synthetic oligonucleotide
  Sense strand starting at position 3331 of SEQ ID NO: 915524
uguaucugaaguugucaca

SEQ ID NO: 1086283 - RNA, 19 nt, Artificial Sequence
  Description of Artificial Sequence: Synthetic oligonucleotide
  Antisense strand to SEQ ID NO: 1086282
ugugacaacuucagauaca

SEQ ID NO: 1086284 - RNA, 19 nt, Artificial Sequence
  Description of Artificial Sequence: Synthetic oligonucleotide
  Sense strand starting at position 3359 of SEQ ID NO: 915524
uuuacagucuaauugucua

SEQ ID NO: 1086285 - RNA, 19 nt, Artificial Sequence
  Description of Artificial Sequence: Synthetic oligonucleotide
  Antisense strand to SEQ ID NO: 1086284
uagacaauuagacuguaaa

SEQ ID NO: 1086286 - RNA, 19 nt, Artificial Sequence
  Description of Artificial Sequence: Synthetic oligonucleotide
  Sense strand starting at position 3362 of SEQ ID NO: 915524
acagucuaauugucuaacu

SEQ ID NO: 1086287 - RNA, 19 nt, Artificial Sequence
  Description of Artificial Sequence: Synthetic oligonucleotide
  Antisense strand to SEQ ID NO: 1086286
aguuagacaauuagacugu

SEQ ID NO: 1086288 - RNA, 19 nt, Artificial Sequence
  Description of Artificial Sequence: Synthetic oligonucleotide
  Sense strand starting at position 3364 of SEQ ID NO: 915524
agucuaauugucuaacuuu

SEQ ID NO: 1086289 - RNA, 19 nt, Artificial Sequence
  Description of Artificial Sequence: Synthetic oligonucleotide
  Antisense strand to SEQ ID NO: 1086288
aaaguuagacaauuagacu

SEQ ID NO: 1086290 - RNA, 19 nt, Artificial Sequence
  Description of Artificial Sequence: Synthetic oligonucleotide
  Sense strand starting at position 3370 of SEQ ID NO: 915524
auugucuaacuuuacaagu

SEQ ID NO: 1086291 - RNA, 19 nt, Artificial Sequence
  Description of Artificial Sequence: Synthetic oligonucleotide
  Antisense strand to SEQ ID NO: 1086290
acuuguaaaguuagacaau

SEQ ID NO: 1086292 - RNA, 19 nt, Artificial Sequence
  Description of Artificial Sequence: Synthetic oligonucleotide
  Sense strand starting at position 3466 of SEQ ID NO: 915524
uaauaaucgcaggagcacu

SEQ ID NO: 1086293 - RNA, 19 nt, Artificial Sequence
  Description of Artificial Sequence: Synthetic oligonucleotide
  Antisense strand to SEQ ID NO: 1086292
agugcuccugcgauuauua

SEQ ID NO: 1086294 - RNA, 19 nt, Artificial Sequence
  Description of Artificial Sequence: Synthetic oligonucleotide
  Sense strand starting at position 3506 of SEQ ID NO: 915524
uuaacaugagcaugaauga

SEQ ID NO: 1086295 - RNA, 19 nt, Artificial Sequence
  Description of Artificial Sequence: Synthetic oligonucleotide
  Antisense strand to SEQ ID NO: 1086294
ucauucaugcucauguuaa

SEQ ID NO: 1086296 - RNA, 19 nt, Artificial Sequence
  Description of Artificial Sequence: Synthetic oligonucleotide
  Sense strand starting at position 3740 of SEQ ID NO: 915524
aggugaaucauccagcaug

SEQ ID NO: 1086297 - RNA, 19 nt, Artificial Sequence
  Description of Artificial Sequence: Synthetic oligonucleotide
  Antisense strand to SEQ ID NO: 1086296
caugcuggaugauucaccu

SEQ ID NO: 1086298 - RNA, 19 nt, Artificial Sequence
  Description of Artificial Sequence: Synthetic oligonucleotide
  Sense strand starting at position 3759 of SEQ ID NO: 915524
gccgaauuagauggaguca

SEQ ID NO: 1086299 - RNA, 19 nt, Artificial Sequence
  Description of Artificial Sequence: Synthetic oligonucleotide
  Antisense strand to SEQ ID NO: 1086298
ugacuccaucuaauucggc

SEQ ID NO: 1086300 - RNA, 19 nt, Artificial Sequence
  Description of Artificial Sequence: Synthetic oligonucleotide
  Sense strand starting at position 3818 of SEQ ID NO: 915524
cguucuacacgugagaaac

SEQ ID NO: 1086301 - RNA, 19 nt, Artificial Sequence
  Description of Artificial Sequence: Synthetic oligonucleotide
  Antisense strand to SEQ ID NO: 1086300
guuucucacguguagaacg

SEQ ID NO: 1086302 - RNA, 19 nt, Artificial Sequence
  Description of Artificial Sequence: Synthetic oligonucleotide
  Sense strand starting at position 3853 of SEQ ID NO: 915524
ccuggaagaccaggucuau

SEQ ID NO: 1086303 - RNA, 19 nt, Artificial Sequence
  Description of Artificial Sequence: Synthetic oligonucleotide
  Antisense strand to SEQ ID NO: 1086302
auagaccuggucuuccagg

SEQ ID NO: 1086304 - RNA, 19 nt, Artificial Sequence
  Description of Artificial Sequence: Synthetic oligonucleotide
  Sense strand starting at position 3894 of SEQ ID NO: 915524
agauaauucuggcuaacaa

SEQ ID NO: 1086305 - RNA, 19 nt, Artificial Sequence
  Description of Artificial Sequence: Synthetic oligonucleotide
  Antisense strand to SEQ ID NO: 1086304
uuguuagccagaauuaucu

SEQ ID NO: 1086306 - RNA, 19 nt, Artificial Sequence
  Description of Artificial Sequence: Synthetic oligonucleotide
  Sense strand starting at position 49 of SEQ ID NO: 915525
acaggugucuuccugaaac

SEQ ID NO: 1086307 - RNA, 19 nt, Artificial Sequence
  Description of Artificial Sequence: Synthetic oligonucleotide
  Antisense strand to SEQ ID NO: 1086306
guuucaggaagacaccugu

SEQ ID NO: 1086308 - RNA, 19 nt, Artificial Sequence
  Description of Artificial Sequence: Synthetic oligonucleotide
  Sense strand starting at position 51 of SEQ ID NO: 915525
aggugucuuccugaaacau

SEQ ID NO: 1086309 - RNA, 19 nt, Artificial Sequence
  Description of Artificial Sequence: Synthetic oligonucleotide
  Antisense strand to SEQ ID NO: 1086308
auguuucaggaagacaccu

SEQ ID NO: 1086310 - RNA, 19 nt, Artificial Sequence
  Description of Artificial Sequence: Synthetic oligonucleotide
  Sense strand starting at position 193 of SEQ ID NO: 915525
augaauuccuucuccugga

SEQ ID NO: 1086311 - RNA, 19 nt, Artificial Sequence
  Description of Artificial Sequence: Synthetic oligonucleotide
  Antisense strand to SEQ ID NO: 1086310
uccaggagaaggaauucau

SEQ ID NO: 1086312 - RNA, 19 nt, Artificial Sequence
  Description of Artificial Sequence: Synthetic oligonucleotide
  Sense strand starting at position 197 of SEQ ID NO: 915525
auuccuucuccuggacaga

SEQ ID NO: 1086313 - RNA, 19 nt, Artificial Sequence
  Description of Artificial Sequence: Synthetic oligonucleotide
  Antisense strand to SEQ ID NO: 1086312
ucuguccaggagaaggaau

SEQ ID NO: 1086314 - RNA, 19 nt, Artificial Sequence
  Description of Artificial Sequence: Synthetic oligonucleotide
  Sense strand starting at position 238 of SEQ ID NO: 915525
ccuucuauuggagauugca

SEQ ID NO: 1086315 - RNA, 19 nt, Artificial Sequence
  Description of Artificial Sequence: Synthetic oligonucleotide
  Antisense strand to SEQ ID NO: 1086314
ugcaaucuccaauagaagg

SEQ ID NO: 1086316 - RNA, 19 nt, Artificial Sequence
  Description of Artificial Sequence: Synthetic oligonucleotide
  Sense strand starting at position 250 of SEQ ID NO: 915525
gauugcagucuagagaucu

SEQ ID NO: 1086317 - RNA, 19 nt, Artificial Sequence
  Description of Artificial Sequence: Synthetic oligonucleotide
  Antisense strand to SEQ ID NO: 1086316
agaucucuagacugcaauc

SEQ ID NO: 1086318 - RNA, 19 nt, Artificial Sequence
  Description of Artificial Sequence: Synthetic oligonucleotide
  Sense strand starting at position 256 of SEQ ID NO: 915525
agucuagagaucuggcuuu

SEQ ID NO: 1086319 - RNA, 19 nt, Artificial Sequence
  Description of Artificial Sequence: Synthetic oligonucleotide
  Antisense strand to SEQ ID NO: 1086318
aaagccagaucucuagacu

SEQ ID NO: 1086320 - RNA, 19 nt, Artificial Sequence
  Description of Artificial Sequence: Synthetic oligonucleotide
  Sense strand starting at position 262 of SEQ ID NO: 915525
gagaucuggcuuuggauac

SEQ ID NO: 1086321 - RNA, 19 nt, Artificial Sequence
  Description of Artificial Sequence: Synthetic oligonucleotide
  Antisense strand to SEQ ID NO: 1086320
guauccaaagccagaucuc

SEQ ID NO: 1086322 - RNA, 19 nt, Artificial Sequence
  Description of Artificial Sequence: Synthetic oligonucleotide
  Sense strand starting at position 426 of SEQ ID NO: 915525
uugugaucgcuugcaagug

SEQ ID NO: 1086323 - RNA, 19 nt, Artificial Sequence
  Description of Artificial Sequence: Synthetic oligonucleotide
  Antisense strand to SEQ ID NO: 1086322
cacuugcaagcgaucacaa

SEQ ID NO: 1086324 - RNA, 19 nt, Artificial Sequence
  Description of Artificial Sequence: Synthetic oligonucleotide
  Sense strand starting at position 533 of SEQ ID NO: 915525
cugggagauacugguccaa

SEQ ID NO: 1086325 - RNA, 19 nt, Artificial Sequence
  Description of Artificial Sequence: Synthetic oligonucleotide
  Antisense strand to SEQ ID NO: 1086324
uuggaccaguaucucccag

SEQ ID NO: 1086326 - RNA, 19 nt, Artificial Sequence
  Description of Artificial Sequence: Synthetic oligonucleotide
  Sense strand starting at position 558 of SEQ ID NO: 915525
uguggaccuuuccuuugau

SEQ ID NO: 1086327 - RNA, 19 nt, Artificial Sequence
  Description of Artificial Sequence: Synthetic oligonucleotide
  Antisense strand to SEQ ID NO: 1086326
aucaaaggaaagguccaca

SEQ ID NO: 1086328 - RNA, 19 nt, Artificial Sequence
  Description of Artificial Sequence: Synthetic oligonucleotide
  Sense strand starting at position 561 of SEQ ID NO: 915525
ggaccuuuccuuugaugug

SEQ ID NO: 1086329 - RNA, 19 nt, Artificial Sequence
  Description of Artificial Sequence: Synthetic oligonucleotide
  Antisense strand to SEQ ID NO: 1086328
cacaucaaaggaaaggucc

SEQ ID NO: 1086330 - RNA, 19 nt, Artificial Sequence
  Description of Artificial Sequence: Synthetic oligonucleotide
  Sense strand starting at position 633 of SEQ ID NO: 915525
agacaauugucuuuaguua

SEQ ID NO: 1086331 - RNA, 19 nt, Artificial Sequence
  Description of Artificial Sequence: Synthetic oligonucleotide
  Antisense strand to SEQ ID NO: 1086330
uaacuaaagacaauugucu

SEQ ID NO: 1086332 - RNA, 19 nt, Artificial Sequence
  Description of Artificial Sequence: Synthetic oligonucleotide
  Sense strand starting at position 646 of SEQ ID NO: 915525
uaguuaucacugcgaggga

SEQ ID NO: 1086333 - RNA, 19 nt, Artificial Sequence
  Description of Artificial Sequence: Synthetic oligonucleotide
  Antisense strand to SEQ ID NO: 1086332
ucccucgcagugauaacua

SEQ ID NO: 1086334 - RNA, 19 nt, Artificial Sequence
  Description of Artificial Sequence: Synthetic oligonucleotide
  Sense strand starting at position 840 of SEQ ID NO: 915525
agagcuagccagggagauu

SEQ ID NO: 1086335 - RNA, 19 nt, Artificial Sequence
  Description of Artificial Sequence: Synthetic oligonucleotide
  Antisense strand to SEQ ID NO: 1086334
aaucucccuggcuagcucu

SEQ ID NO: 1086336 - RNA, 19 nt, Artificial Sequence
  Description of Artificial Sequence: Synthetic oligonucleotide
  Sense strand starting at position 1209 of SEQ ID NO: 915525
agcagcaaucuccaggaaa

SEQ ID NO: 1086337 - RNA, 19 nt, Artificial Sequence
  Description of Artificial Sequence: Synthetic oligonucleotide
  Antisense strand to SEQ ID NO: 1086336
uuuccuggagauugcugcu

SEQ ID NO: 1086338 - RNA, 19 nt, Artificial Sequence
  Description of Artificial Sequence: Synthetic oligonucleotide
  Sense strand starting at position 1495 of SEQ ID NO: 915525
ggccgggagcgguauuuaa

SEQ ID NO: 1086339 - RNA, 19 nt, Artificial Sequence
  Description of Artificial Sequence: Synthetic oligonucleotide
  Antisense strand to SEQ ID NO: 1086338
uuaaauaccgcucccggcc

SEQ ID NO: 1086340 - RNA, 19 nt, Artificial Sequence
  Description of Artificial Sequence: Synthetic oligonucleotide
  Sense strand starting at position 1918 of SEQ ID NO: 915525
gagggauugcaagguuuag

SEQ ID NO: 1086341 - RNA, 19 nt, Artificial Sequence
  Description of Artificial Sequence: Synthetic oligonucleotide
  Antisense strand to SEQ ID NO: 1086340
cuaaaccuugcaaucccuc

SEQ ID NO: 1086342 - RNA, 19 nt, Artificial Sequence
  Description of Artificial Sequence: Synthetic oligonucleotide
  Sense strand starting at position 2086 of SEQ ID NO: 915525
agccucucgccauaaauua

SEQ ID NO: 1086343 - RNA, 19 nt, Artificial Sequence
  Description of Artificial Sequence: Synthetic oligonucleotide
  Antisense strand to SEQ ID NO: 1086342
uaauuuauggcgagaggcu

SEQ ID NO: 1086344 - RNA, 19 nt, Artificial Sequence
  Description of Artificial Sequence: Synthetic oligonucleotide
  Sense strand starting at position 2093 of SEQ ID NO: 915525
cgccauaaauuagccaaau

SEQ ID NO: 1086345 - RNA, 19 nt, Artificial Sequence
  Description of Artificial Sequence: Synthetic oligonucleotide
  Antisense strand to SEQ ID NO: 1086344
auuuggcuaauuuauggcg

SEQ ID NO: 1086346 - RNA, 19 nt, Artificial Sequence
  Description of Artificial Sequence: Synthetic oligonucleotide
  Sense strand starting at position 2488 of SEQ ID NO: 915525
cgaauaaaucucuggccuu

SEQ ID NO: 1086347 - RNA, 19 nt, Artificial Sequence
  Description of Artificial Sequence: Synthetic oligonucleotide
  Antisense strand to SEQ ID NO: 1086346
aaggccagagauuuauucg

SEQ ID NO: 1086348 - RNA, 19 nt, Artificial Sequence
  Description of Artificial Sequence: Synthetic oligonucleotide
  Sense strand starting at position 2735 of SEQ ID NO: 915525
gacagaugggcuugugcaa

SEQ ID NO: 1086349 - RNA, 19 nt, Artificial Sequence
  Description of Artificial Sequence: Synthetic oligonucleotide
  Antisense strand to SEQ ID NO: 1086348
uugcacaagcccaucuguc

SEQ ID NO: 1086350 - RNA, 19 nt, Artificial Sequence
  Description of Artificial Sequence: Synthetic oligonucleotide
  Sense strand starting at position 2809 of SEQ ID NO: 915525
cuuugauuaucucuggaau

SEQ ID NO: 1086351 - RNA, 19 nt, Artificial Sequence
  Description of Artificial Sequence: Synthetic oligonucleotide
  Antisense strand to SEQ ID NO: 1086350
auuccagagauaaucaaag

SEQ ID NO: 1086352 - RNA, 19 nt, Artificial Sequence
  Description of Artificial Sequence: Synthetic oligonucleotide
  Sense strand starting at position 2810 of SEQ ID NO: 915525
uuugauuaucucuggaaua

SEQ ID NO: 1086353 - RNA, 19 nt, Artificial Sequence
  Description of Artificial Sequence: Synthetic oligonucleotide
  Antisense strand to SEQ ID NO: 1086352
uauuccagagauaaucaaa

SEQ ID NO: 1086354 - RNA, 19 nt, Artificial Sequence
  Description of Artificial Sequence: Synthetic oligonucleotide
  Sense strand starting at position 2973 of SEQ ID NO: 915525
gguagacgaucuucggauu

SEQ ID NO: 1086355 - RNA, 19 nt, Artificial Sequence
  Description of Artificial Sequence: Synthetic oligonucleotide
  Antisense strand to SEQ ID NO: 1086354
aauccgaagaucgucuacc

SEQ ID NO: 1086356 - RNA, 19 nt, Artificial Sequence
  Description of Artificial Sequence: Synthetic oligonucleotide
  Sense strand starting at position 2974 of SEQ ID NO: 915525
guagacgaucuucggauuu

SEQ ID NO: 1086357 - RNA, 19 nt, Artificial Sequence
  Description of Artificial Sequence: Synthetic oligonucleotide
  Antisense strand to SEQ ID NO: 1086356
aaauccgaagaucgucuac

SEQ ID NO: 1086358 - RNA, 19 nt, Artificial Sequence
  Description of Artificial Sequence: Synthetic oligonucleotide
  Sense strand starting at position 3004 of SEQ ID NO: 915525
gaccuuguuagacgaugga

SEQ ID NO: 1086359 - RNA, 19 nt, Artificial Sequence
  Description of Artificial Sequence: Synthetic oligonucleotide
  Antisense strand to SEQ ID NO: 1086358
uccaucgucuaacaagguc

SEQ ID NO: 1086360 - RNA, 19 nt, Artificial Sequence
  Description of Artificial Sequence: Synthetic oligonucleotide
  Sense strand starting at position 3096 of SEQ ID NO: 915525
accgauugguaguuaaaug

SEQ ID NO: 1086361 - RNA, 19 nt, Artificial Sequence
  Description of Artificial Sequence: Synthetic oligonucleotide
  Antisense strand to SEQ ID NO: 1086360
cauuuaacuaccaaucggu

SEQ ID NO: 1086362 - RNA, 19 nt, Artificial Sequence
  Description of Artificial Sequence: Synthetic oligonucleotide
  Sense strand starting at position 3214 of SEQ ID NO: 915525
gggacuaucuucucccacu

SEQ ID NO: 1086363 - RNA, 19 nt, Artificial Sequence
  Description of Artificial Sequence: Synthetic oligonucleotide
  Antisense strand to SEQ ID NO: 1086362
agugggagaagauaguccc

SEQ ID NO: 1086364 - RNA, 19 nt, Artificial Sequence
  Description of Artificial Sequence: Synthetic oligonucleotide
  Sense strand starting at position 3551 of SEQ ID NO: 915525
uccugucugcaccauuaga

SEQ ID NO: 1086365 - RNA, 19 nt, Artificial Sequence
  Description of Artificial Sequence: Synthetic oligonucleotide
  Antisense strand to SEQ ID NO: 1086364
ucuaauggugcagacagga

SEQ ID NO: 1086366 - RNA, 19 nt, Artificial Sequence
  Description of Artificial Sequence: Synthetic oligonucleotide
  Sense strand starting at position 3570 of SEQ ID NO: 915525
auaaucaugucuguaccuu

SEQ ID NO: 1086367 - RNA, 19 nt, Artificial Sequence
  Description of Artificial Sequence: Synthetic oligonucleotide
  Antisense strand to SEQ ID NO: 1086366
aagguacagacaugauuau

SEQ ID NO: 1086368 - RNA, 19 nt, Artificial Sequence
  Description of Artificial Sequence: Synthetic oligonucleotide
  Sense strand starting at position 3716 of SEQ ID NO: 915525
auuguuuaaccugguaaau

SEQ ID NO: 1086369 - RNA, 19 nt, Artificial Sequence
  Description of Artificial Sequence: Synthetic oligonucleotide
  Antisense strand to SEQ ID NO: 1086368
auuuaccagguuaaacaau

SEQ ID NO: 1086370 - RNA, 19 nt, Artificial Sequence
  Description of Artificial Sequence: Synthetic oligonucleotide
  Sense strand starting at position 3725 of SEQ ID NO: 915525
ccugguaaauguguuuaaa

SEQ ID NO: 1086371 - RNA, 19 nt, Artificial Sequence
  Description of Artificial Sequence: Synthetic oligonucleotide
  Antisense strand to SEQ ID NO: 1086370
uuuaaacacauuuaccagg

SEQ ID NO: 1086372 - RNA, 19 nt, Artificial Sequence
  Description of Artificial Sequence: Synthetic oligonucleotide
  Sense strand starting at position 3779 of SEQ ID NO: 915525
uugguauuauguuugacac

SEQ ID NO: 1086373 - RNA, 19 nt, Artificial Sequence
  Description of Artificial Sequence: Synthetic oligonucleotide
  Antisense strand to SEQ ID NO: 1086372
gugucaaacauaauaccaa

SEQ ID NO: 1086374 - RNA, 19 nt, Artificial Sequence
  Description of Artificial Sequence: Synthetic oligonucleotide
  Sense strand starting at position 3789 of SEQ ID NO: 915525
guuugacacucuccucuua

SEQ ID NO: 1086375 - RNA, 19 nt, Artificial Sequence
  Description of Artificial Sequence: Synthetic oligonucleotide
  Antisense strand to SEQ ID NO: 1086374
uaagaggagagugucaaac

SEQ ID NO: 1086376 - RNA, 19 nt, Artificial Sequence
  Description of Artificial Sequence: Synthetic oligonucleotide
  Sense strand starting at position 3864 of SEQ ID NO: 915525
uuuacagucuaauugucua

SEQ ID NO: 1086377 - RNA, 19 nt, Artificial Sequence
  Description of Artificial Sequence: Synthetic oligonucleotide
  Antisense strand to SEQ ID NO: 1086376
uagacaauuagacuguaaa

SEQ ID NO: 1086378 - RNA, 19 nt, Artificial Sequence
  Description of Artificial Sequence: Synthetic oligonucleotide
  Sense strand starting at position 3867 of SEQ ID NO: 915525
acagucuaauugucuaacu

SEQ ID NO: 1086379 - RNA, 19 nt, Artificial Sequence
  Description of Artificial Sequence: Synthetic oligonucleotide
  Antisense strand to SEQ ID NO: 1086378
aguuagacaauuagacugu

SEQ ID NO: 1086380 - RNA, 19 nt, Artificial Sequence
  Description of Artificial Sequence: Synthetic oligonucleotide
  Sense strand starting at position 3869 of SEQ ID NO: 915525
agucuaauugucuaacuuu

SEQ ID NO: 1086381 - RNA, 19 nt, Artificial Sequence
  Description of Artificial Sequence: Synthetic oligonucleotide
  Antisense strand to SEQ ID NO: 1086380
aaaguuagacaauuagacu

SEQ ID NO: 1086382 - RNA, 19 nt, Artificial Sequence
  Description of Artificial Sequence: Synthetic oligonucleotide
  Sense strand starting at position 3875 of SEQ ID NO: 915525
auugucuaacuuuacaagu

SEQ ID NO: 1086383 - RNA, 19 nt, Artificial Sequence
  Description of Artificial Sequence: Synthetic oligonucleotide
  Antisense strand to SEQ ID NO: 1086382
acuuguaaaguuagacaau

SEQ ID NO: 1086384 - RNA, 19 nt, Artificial Sequence
  Description of Artificial Sequence: Synthetic oligonucleotide
  Sense strand starting at position 3971 of SEQ ID NO: 915525
uaauaaucgcaggagcacu

SEQ ID NO: 1086385 - RNA, 19 nt, Artificial Sequence
  Description of Artificial Sequence: Synthetic oligonucleotide
  Antisense strand to SEQ ID NO: 1086384
agugcuccugcgauuauua

SEQ ID NO: 1086386 - RNA, 19 nt, Artificial Sequence
  Description of Artificial Sequence: Synthetic oligonucleotide
  Sense strand starting at position 116 of SEQ ID NO: 915526
cagagaucucuguggcaac

SEQ ID NO: 1086387 - RNA, 19 nt, Artificial Sequence
  Description of Artificial Sequence: Synthetic oligonucleotide
  Antisense strand to SEQ ID NO: 1086386
guugccacagagaucucug

SEQ ID NO: 1086388 - RNA, 19 nt, Artificial Sequence
  Description of Artificial Sequence: Synthetic oligonucleotide
  Sense strand starting at position 208 of SEQ ID NO: 915526
guguaaauugcauauugua

SEQ ID NO: 1086389 - RNA, 19 nt, Artificial Sequence
  Description of Artificial Sequence: Synthetic oligonucleotide
  Antisense strand to SEQ ID NO: 1086388
uacaauaugcaauuuacac

SEQ ID NO: 1086390 - RNA, 19 nt, Artificial Sequence
  Description of Artificial Sequence: Synthetic oligonucleotide
  Sense strand starting at position 283 of SEQ ID NO: 915526
gaguaaugauaacccugau

SEQ ID NO: 1086391 - RNA, 19 nt, Artificial Sequence
  Description of Artificial Sequence: Synthetic oligonucleotide
  Antisense strand to SEQ ID NO: 1086390
aucaggguuaucauuacuc

SEQ ID NO: 1086392 - RNA, 19 nt, Artificial Sequence
  Description of Artificial Sequence: Synthetic oligonucleotide
  Sense strand starting at position 552 of SEQ ID NO: 915526
caagucuuggcuuaagcau

SEQ ID NO: 1086393 - RNA, 19 nt, Artificial Sequence
  Description of Artificial Sequence: Synthetic oligonucleotide
  Antisense strand to SEQ ID NO: 1086392
augcuuaagccaagacuug

SEQ ID NO: 1086394 - RNA, 19 nt, Artificial Sequence
  Description of Artificial Sequence: Synthetic oligonucleotide
  Sense strand starting at position 646 of SEQ ID NO: 915526
auaccucagugguucucaa

SEQ ID NO: 1086395 - RNA, 19 nt, Artificial Sequence
  Description of Artificial Sequence: Synthetic oligonucleotide
  Antisense strand to SEQ ID NO: 1086394
uugagaaccacugagguau

SEQ ID NO: 1086396 - RNA, 19 nt, Artificial Sequence
  Description of Artificial Sequence: Synthetic oligonucleotide
  Sense strand starting at position 732 of SEQ ID NO: 915526
ugauuugcuucuguaacau

SEQ ID NO: 1086397 - RNA, 19 nt, Artificial Sequence
  Description of Artificial Sequence: Synthetic oligonucleotide
  Antisense strand to SEQ ID NO: 1086396
auguuacagaagcaaauca

SEQ ID NO: 1086398 - RNA, 19 nt, Artificial Sequence
  Description of Artificial Sequence: Synthetic oligonucleotide
  Sense strand starting at position 799 of SEQ ID NO: 915526
gcaacuuaggcugagaaca

SEQ ID NO: 1086399 - RNA, 19 nt, Artificial Sequence
  Description of Artificial Sequence: Synthetic oligonucleotide
  Antisense strand to SEQ ID NO: 1086398
uguucucagccuaaguugc

SEQ ID NO: 1086400 - RNA, 19 nt, Artificial Sequence
  Description of Artificial Sequence: Synthetic oligonucleotide
  Sense strand starting at position 920 of SEQ ID NO: 915526
caauguaagugccugacaa

SEQ ID NO: 1086401 - RNA, 19 nt, Artificial Sequence
  Description of Artificial Sequence: Synthetic oligonucleotide
  Antisense strand to SEQ ID NO: 1086400
uugucaggcacuuacauug

SEQ ID NO: 1086402 - RNA, 19 nt, Artificial Sequence
  Description of Artificial Sequence: Synthetic oligonucleotide
  Sense strand starting at position 921 of SEQ ID NO: 915526
aauguaagugccugacaau

SEQ ID NO: 1086403 - RNA, 19 nt, Artificial Sequence
  Description of Artificial Sequence: Synthetic oligonucleotide
  Antisense strand to SEQ ID NO: 1086402
auugucaggcacuuacauu

SEQ ID NO: 1086404 - RNA, 19 nt, Artificial Sequence
  Description of Artificial Sequence: Synthetic oligonucleotide
  Sense strand starting at position 922 of SEQ ID NO: 915526
auguaagugccugacaauu

SEQ ID NO: 1086405 - RNA, 19 nt, Artificial Sequence
  Description of Artificial Sequence: Synthetic oligonucleotide
  Antisense strand to SEQ ID NO: 1086404
aauugucaggcacuuacau

SEQ ID NO: 1086406 - RNA, 19 nt, Artificial Sequence
  Description of Artificial Sequence: Synthetic oligonucleotide
  Sense strand starting at position 984 of SEQ ID NO: 915526
aggacuuucggguggauca

SEQ ID NO: 1086407 - RNA, 19 nt, Artificial Sequence
  Description of Artificial Sequence: Synthetic oligonucleotide
  Antisense strand to SEQ ID NO: 1086406
ugauccacccgaaaguccu

SEQ ID NO: 1086408 - RNA, 19 nt, Artificial Sequence
  Description of Artificial Sequence: Synthetic oligonucleotide
  Sense strand starting at position 1284 of SEQ ID NO: 915526
cugagugcugacuacacua

SEQ ID NO: 1086409 - RNA, 19 nt, Artificial Sequence
  Description of Artificial Sequence: Synthetic oligonucleotide
  Antisense strand to SEQ ID NO: 1086408
uaguguagucagcacucag

SEQ ID NO: 1086410 - RNA, 19 nt, Artificial Sequence
  Description of Artificial Sequence: Synthetic oligonucleotide
  Sense strand starting at position 1353 of SEQ ID NO: 915526
uggauuguguauccagaac

SEQ ID NO: 1086411 - RNA, 19 nt, Artificial Sequence
  Description of Artificial Sequence: Synthetic oligonucleotide
  Antisense strand to SEQ ID NO: 1086410
guucuggauacacaaucca

SEQ ID NO: 1086412 - RNA, 19 nt, Artificial Sequence
  Description of Artificial Sequence: Synthetic oligonucleotide
  Sense strand starting at position 1359 of SEQ ID NO: 915526
guguauccagaacagguua

SEQ ID NO: 1086413 - RNA, 19 nt, Artificial Sequence
  Description of Artificial Sequence: Synthetic oligonucleotide
  Antisense strand to SEQ ID NO: 1086412
uaaccuguucuggauacac

SEQ ID NO: 1086414 - RNA, 19 nt, Artificial Sequence
  Description of Artificial Sequence: Synthetic oligonucleotide
  Sense strand starting at position 1986 of SEQ ID NO: 915526
ucaggagguagauguuauu

SEQ ID NO: 1086415 - RNA, 19 nt, Artificial Sequence
  Description of Artificial Sequence: Synthetic oligonucleotide
  Antisense strand to SEQ ID NO: 1086414
aauaacaucuaccuccuga

SEQ ID NO: 1086416 - RNA, 19 nt, Artificial Sequence
  Description of Artificial Sequence: Synthetic oligonucleotide
  Sense strand starting at position 2034 of SEQ ID NO: 915526
agauacuucuagcuguuga

SEQ ID NO: 1086417 - RNA, 19 nt, Artificial Sequence
  Description of Artificial Sequence: Synthetic oligonucleotide
  Antisense strand to SEQ ID NO: 1086416
ucaacagcuagaaguaucu

SEQ ID NO: 1086418 - RNA, 19 nt, Artificial Sequence
  Description of Artificial Sequence: Synthetic oligonucleotide
  Sense strand starting at position 2039 of SEQ ID NO: 915526
cuucuagcuguugacaaua

SEQ ID NO: 1086419 - RNA, 19 nt, Artificial Sequence
  Description of Artificial Sequence: Synthetic oligonucleotide
  Antisense strand to SEQ ID NO: 1086418
uauugucaacagcuagaag

SEQ ID NO: 1086420 - RNA, 19 nt, Artificial Sequence
  Description of Artificial Sequence: Synthetic oligonucleotide
  Sense strand starting at position 2088 of SEQ ID NO: 915526
uauguuuguccucaaguga

SEQ ID NO: 1086421 - RNA, 19 nt, Artificial Sequence
  Description of Artificial Sequence: Synthetic oligonucleotide
  Antisense strand to SEQ ID NO: 1086420
ucacuugaggacaaacaua

SEQ ID NO: 1086422 - RNA, 19 nt, Artificial Sequence
  Description of Artificial Sequence: Synthetic oligonucleotide
  Sense strand starting at position 2108 of SEQ ID NO: 915526
ucaugaaauuuacauugga

SEQ ID NO: 1086423 - RNA, 19 nt, Artificial Sequence
  Description of Artificial Sequence: Synthetic oligonucleotide
  Antisense strand to SEQ ID NO: 1086422
uccaauguaaauuucauga

SEQ ID NO: 1086424 - RNA, 19 nt, Artificial Sequence
  Description of Artificial Sequence: Synthetic oligonucleotide
  Sense strand starting at position 2134 of SEQ ID NO: 915526
auguacauguucucuaaau

SEQ ID NO: 1086425 - RNA, 19 nt, Artificial Sequence
  Description of Artificial Sequence: Synthetic oligonucleotide
  Antisense strand to SEQ ID NO: 1086424
auuuagagaacauguacau

SEQ ID NO: 1086426 - RNA, 19 nt, Artificial Sequence
  Description of Artificial Sequence: Synthetic oligonucleotide
  Sense strand starting at position 2135 of SEQ ID NO: 915526
uguacauguucucuaaaua

SEQ ID NO: 1086427 - RNA, 19 nt, Artificial Sequence
  Description of Artificial Sequence: Synthetic oligonucleotide
  Antisense strand to SEQ ID NO: 1086426
uauuuagagaacauguaca

SEQ ID NO: 1086428 - RNA, 19 nt, Artificial Sequence
  Description of Artificial Sequence: Synthetic oligonucleotide
  Sense strand starting at position 2136 of SEQ ID NO: 915526
guacauguucucuaaauaa

SEQ ID NO: 1086429 - RNA, 19 nt, Artificial Sequence
  Description of Artificial Sequence: Synthetic oligonucleotide
  Antisense strand to SEQ ID NO: 1086428
uuauuuagagaacauguac

SEQ ID NO: 1086430 - RNA, 19 nt, Artificial Sequence
  Description of Artificial Sequence: Synthetic oligonucleotide
  Sense strand starting at position 2341 of SEQ ID NO: 915526
agcaaauuggaaugugaug

SEQ ID NO: 1086431 - RNA, 19 nt, Artificial Sequence
  Description of Artificial Sequence: Synthetic oligonucleotide
  Antisense strand to SEQ ID NO: 1086430
caucacauuccaauuugcu

SEQ ID NO: 1086432 - RNA, 19 nt, Artificial Sequence
  Description of Artificial Sequence: Synthetic oligonucleotide
  Sense strand starting at position 2352 of SEQ ID NO: 915526
augugaugccauuacuauc

SEQ ID NO: 1086433 - RNA, 19 nt, Artificial Sequence
  Description of Artificial Sequence: Synthetic oligonucleotide
  Antisense strand to SEQ ID NO: 1086432
gauaguaauggcaucacau

SEQ ID NO: 1086434 - RNA, 19 nt, Artificial Sequence
  Description of Artificial Sequence: Synthetic oligonucleotide
  Sense strand starting at position 2479 of SEQ ID NO: 915526
gaguuuauuuccuugggcu

SEQ ID NO: 1086435 - RNA, 19 nt, Artificial Sequence
  Description of Artificial Sequence: Synthetic oligonucleotide
  Antisense strand to SEQ ID NO: 1086434
agcccaaggaaauaaacuc

SEQ ID NO: 1086436 - RNA, 19 nt, Artificial Sequence
  Description of Artificial Sequence: Synthetic oligonucleotide
  Sense strand starting at position 2480 of SEQ ID NO: 915526
aguuuauuuccuugggcuu

SEQ ID NO: 1086437 - RNA, 19 nt, Artificial Sequence
  Description of Artificial Sequence: Synthetic oligonucleotide
  Antisense strand to SEQ ID NO: 1086436
aagcccaaggaaauaaacu

SEQ ID NO: 1086438 - RNA, 19 nt, Artificial Sequence
  Description of Artificial Sequence: Synthetic oligonucleotide
  Sense strand starting at position 2481 of SEQ ID NO: 915526
guuuauuuccuugggcuua

SEQ ID NO: 1086439 - RNA, 19 nt, Artificial Sequence
  Description of Artificial Sequence: Synthetic oligonucleotide
  Antisense strand to SEQ ID NO: 1086438
uaagcccaaggaaauaaac

SEQ ID NO: 1086440 - RNA, 19 nt, Artificial Sequence
  Description of Artificial Sequence: Synthetic oligonucleotide
  Sense strand starting at position 2590 of SEQ ID NO: 915526
ugccucuaucucuagugau

SEQ ID NO: 1086441 - RNA, 19 nt, Artificial Sequence
  Description of Artificial Sequence: Synthetic oligonucleotide
  Antisense strand to SEQ ID NO: 1086440
aucacuagagauagaggca

SEQ ID NO: 1086442 - RNA, 19 nt, Artificial Sequence
  Description of Artificial Sequence: Synthetic oligonucleotide
  Sense strand starting at position 2867 of SEQ ID NO: 915526
aguauaauaccaggaucuu

SEQ ID NO: 1086443 - RNA, 19 nt, Artificial Sequence
  Description of Artificial Sequence: Synthetic oligonucleotide
  Antisense strand to SEQ ID NO: 1086442
aagauccugguauuauacu

SEQ ID NO: 1086444 - RNA, 19 nt, Artificial Sequence
  Description of Artificial Sequence: Synthetic oligonucleotide
  Sense strand starting at position 2929 of SEQ ID NO: 915526
gguuuaucuguauccgugu

SEQ ID NO: 1086445 - RNA, 19 nt, Artificial Sequence
  Description of Artificial Sequence: Synthetic oligonucleotide
  Antisense strand to SEQ ID NO: 1086444
acacggauacagauaaacc

SEQ ID NO: 1086446 - RNA, 19 nt, Artificial Sequence
  Description of Artificial Sequence: Synthetic oligonucleotide
  Sense strand starting at position 2934 of SEQ ID NO: 915526
aucuguauccguguaugca

SEQ ID NO: 1086447 - RNA, 19 nt, Artificial Sequence
  Description of Artificial Sequence: Synthetic oligonucleotide
  Antisense strand to SEQ ID NO: 1086446
ugcauacacggauacagau

SEQ ID NO: 1086448 - RNA, 19 nt, Artificial Sequence
  Description of Artificial Sequence: Synthetic oligonucleotide
  Sense strand starting at position 2977 of SEQ ID NO: 915526
uguaauuuagugugcccau

SEQ ID NO: 1086449 - RNA, 19 nt, Artificial Sequence
  Description of Artificial Sequence: Synthetic oligonucleotide
  Antisense strand to SEQ ID NO: 1086448
augggcacacuaaauuaca

SEQ ID NO: 1086450 - RNA, 19 nt, Artificial Sequence
  Description of Artificial Sequence: Synthetic oligonucleotide
  Sense strand starting at position 3016 of SEQ ID NO: 915526
acaguuacaucuccacaga

SEQ ID NO: 1086451 - RNA, 19 nt, Artificial Sequence
  Description of Artificial Sequence: Synthetic oligonucleotide
  Antisense strand to SEQ ID NO: 1086450
ucuguggagauguaacugu

SEQ ID NO: 1086452 - RNA, 19 nt, Artificial Sequence
  Description of Artificial Sequence: Synthetic oligonucleotide
  Sense strand starting at position 3037 of SEQ ID NO: 915526
ucccuccuucuaggagaau

SEQ ID NO: 1086453 - RNA, 19 nt, Artificial Sequence
  Description of Artificial Sequence: Synthetic oligonucleotide
  Antisense strand to SEQ ID NO: 1086452
auucuccuagaaggaggga

SEQ ID NO: 1086454 - RNA, 19 nt, Artificial Sequence
  Description of Artificial Sequence: Synthetic oligonucleotide
  Sense strand starting at position 3119 of SEQ ID NO: 915526
uaaguugcuguauauauga

SEQ ID NO: 1086455 - RNA, 19 nt, Artificial Sequence
  Description of Artificial Sequence: Synthetic oligonucleotide
  Antisense strand to SEQ ID NO: 1086454
ucauauauacagcaacuua

SEQ ID NO: 1086456 - RNA, 19 nt, Artificial Sequence
  Description of Artificial Sequence: Synthetic oligonucleotide
  Sense strand starting at position 3158 of SEQ ID NO: 915526
gcugaauauuauuccauag

SEQ ID NO: 1086457 - RNA, 19 nt, Artificial Sequence
  Description of Artificial Sequence: Synthetic oligonucleotide
  Antisense strand to SEQ ID NO: 1086456
cuauggaauaauauucagc

SEQ ID NO: 1086458 - RNA, 19 nt, Artificial Sequence
  Description of Artificial Sequence: Synthetic oligonucleotide
  Sense strand starting at position 3434 of SEQ ID NO: 915526
ucuccuguuguacaugaga

SEQ ID NO: 1086459 - RNA, 19 nt, Artificial Sequence
  Description of Artificial Sequence: Synthetic oligonucleotide
  Antisense strand to SEQ ID NO: 1086458
ucucauguacaacaggaga

SEQ ID NO: 1086460 - RNA, 19 nt, Artificial Sequence
  Description of Artificial Sequence: Synthetic oligonucleotide
  Sense strand starting at position 3567 of SEQ ID NO: 915526
cucuauguacuugaccaua

SEQ ID NO: 1086461 - RNA, 19 nt, Artificial Sequence
  Description of Artificial Sequence: Synthetic oligonucleotide
  Antisense strand to SEQ ID NO: 1086460
uauggucaaguacauagag

SEQ ID NO: 1086462 - RNA, 19 nt, Artificial Sequence
  Description of Artificial Sequence: Synthetic oligonucleotide
  Sense strand starting at position 3569 of SEQ ID NO: 915526
cuauguacuugaccauacu

SEQ ID NO: 1086463 - RNA, 19 nt, Artificial Sequence
  Description of Artificial Sequence: Synthetic oligonucleotide
  Antisense strand to SEQ ID NO: 1086462
aguauggucaaguacauag

SEQ ID NO: 1086464 - RNA, 19 nt, Artificial Sequence
  Description of Artificial Sequence: Synthetic oligonucleotide
  Sense strand starting at position 3572 of SEQ ID NO: 915526
uguacuugaccauacuuga

SEQ ID NO: 1086465 - RNA, 19 nt, Artificial Sequence
  Description of Artificial Sequence: Synthetic oligonucleotide
  Antisense strand to SEQ ID NO: 1086464
ucaaguauggucaaguaca

SEQ ID NO: 1086466 - RNA, 19 nt, Artificial Sequence
  Description of Artificial Sequence: Synthetic oligonucleotide
  Sense strand starting at position 187 of SEQ ID NO: 915527
aauguauccucuuuggaga

SEQ ID NO: 1086467 - RNA, 19 nt, Artificial Sequence
  Description of Artificial Sequence: Synthetic oligonucleotide
  Antisense strand to SEQ ID NO: 1086466
ucuccaaagaggauacauu

SEQ ID NO: 1086468 - RNA, 19 nt, Artificial Sequence
  Description of Artificial Sequence: Synthetic oligonucleotide
  Sense strand starting at position 310 of SEQ ID NO: 915527
ccugacugccgggauugaa

SEQ ID NO: 1086469 - RNA, 19 nt, Artificial Sequence
  Description of Artificial Sequence: Synthetic oligonucleotide
  Antisense strand to SEQ ID NO: 1086468
uucaaucccggcagucagg

SEQ ID NO: 1086470 - RNA, 19 nt, Artificial Sequence
  Description of Artificial Sequence: Synthetic oligonucleotide
  Sense strand starting at position 369 of SEQ ID NO: 915527
cccuuaaccucucuguguu

SEQ ID NO: 1086471 - RNA, 19 nt, Artificial Sequence
  Description of Artificial Sequence: Synthetic oligonucleotide
  Antisense strand to SEQ ID NO: 1086470
aacacagagagguuaaggg

SEQ ID NO: 1086472 - RNA, 19 nt, Artificial Sequence
  Description of Artificial Sequence: Synthetic oligonucleotide
  Sense strand starting at position 398 of SEQ ID NO: 915527
ccguuauuaaaugaggacu

SEQ ID NO: 1086473 - RNA, 19 nt, Artificial Sequence
  Description of Artificial Sequence: Synthetic oligonucleotide
  Antisense strand to SEQ ID NO: 1086472
aguccucauuuaauaacgg

SEQ ID NO: 1086474 - RNA, 19 nt, Artificial Sequence
  Description of Artificial Sequence: Synthetic oligonucleotide
  Sense strand starting at position 404 of SEQ ID NO: 915527
uuaaaugaggacugucaua

SEQ ID NO: 1086475 - RNA, 19 nt, Artificial Sequence
  Description of Artificial Sequence: Synthetic oligonucleotide
  Antisense strand to SEQ ID NO: 1086474
uaugacaguccucauuuaa

SEQ ID NO: 1086476 - RNA, 19 nt, Artificial Sequence
  Description of Artificial Sequence: Synthetic oligonucleotide
  Sense strand starting at position 462 of SEQ ID NO: 915527
gggacacauuuggaaaugu

SEQ ID NO: 1086477 - RNA, 19 nt, Artificial Sequence
  Description of Artificial Sequence: Synthetic oligonucleotide
  Antisense strand to SEQ ID NO: 1086476
acauuuccaaauguguccc

SEQ ID NO: 1086478 - RNA, 19 nt, Artificial Sequence
  Description of Artificial Sequence: Synthetic oligonucleotide
  Sense strand starting at position 472 of SEQ ID NO: 915527
uggaaaugugucugccacu

SEQ ID NO: 1086479 - RNA, 19 nt, Artificial Sequence
  Description of Artificial Sequence: Synthetic oligonucleotide
  Antisense strand to SEQ ID NO: 1086478
aguggcagacacauuucca

SEQ ID NO: 1086480 - RNA, 19 nt, Artificial Sequence
  Description of Artificial Sequence: Synthetic oligonucleotide
  Sense strand starting at position 473 of SEQ ID NO: 915527
ggaaaugugucugccacuu

SEQ ID NO: 1086481 - RNA, 19 nt, Artificial Sequence
  Description of Artificial Sequence: Synthetic oligonucleotide
  Antisense strand to SEQ ID NO: 1086480
aaguggcagacacauuucc

SEQ ID NO: 1086482 - RNA, 19 nt, Artificial Sequence
  Description of Artificial Sequence: Synthetic oligonucleotide
  Sense strand starting at position 537 of SEQ ID NO: 915527
aaugucaacugagugaauu

SEQ ID NO: 1086483 - RNA, 19 nt, Artificial Sequence
  Description of Artificial Sequence: Synthetic oligonucleotide
  Antisense strand to SEQ ID NO: 1086482
aauucacucaguugacauu

SEQ ID NO: 1086484 - RNA, 19 nt, Artificial Sequence
  Description of Artificial Sequence: Synthetic oligonucleotide
  Sense strand starting at position 538 of SEQ ID NO: 915527
augucaacugagugaauuc

SEQ ID NO: 1086485 - RNA, 19 nt, Artificial Sequence
  Description of Artificial Sequence: Synthetic oligonucleotide
  Antisense strand to SEQ ID NO: 1086484
gaauucacucaguugacau

SEQ ID NO: 1086486 - RNA, 19 nt, Artificial Sequence
  Description of Artificial Sequence: Synthetic oligonucleotide
  Sense strand starting at position 547 of SEQ ID NO: 915527
gagugaauucaccggugga

SEQ ID NO: 1086487 - RNA, 19 nt, Artificial Sequence
  Description of Artificial Sequence: Synthetic oligonucleotide
  Antisense strand to SEQ ID NO: 1086486
uccaccggugaauucacuc

SEQ ID NO: 1086488 - RNA, 19 nt, Artificial Sequence
  Description of Artificial Sequence: Synthetic oligonucleotide
  Sense strand starting at position 550 of SEQ ID NO: 915527
ugaauucaccgguggaaug

SEQ ID NO: 1086489 - RNA, 19 nt, Artificial Sequence
  Description of Artificial Sequence: Synthetic oligonucleotide
  Antisense strand to SEQ ID NO: 1086488
cauuccaccggugaauuca

SEQ ID NO: 1086490 - RNA, 19 nt, Artificial Sequence
  Description of Artificial Sequence: Synthetic oligonucleotide
  Sense strand starting at position 565 of SEQ ID NO: 915527
aauggaugcuucuugaagu

SEQ ID NO: 1086491 - RNA, 19 nt, Artificial Sequence
  Description of Artificial Sequence: Synthetic oligonucleotide
  Antisense strand to SEQ ID NO: 1086490
acuucaagaagcauccauu

SEQ ID NO: 1086492 - RNA, 19 nt, Artificial Sequence
  Description of Artificial Sequence: Synthetic oligonucleotide
  Sense strand starting at position 665 of SEQ ID NO: 915527
gaaugcuuugcuuggccaa

SEQ ID NO: 1086493 - RNA, 19 nt, Artificial Sequence
  Description of Artificial Sequence: Synthetic oligonucleotide
  Antisense strand to SEQ ID NO: 1086492
uuggccaagcaaagcauuc

SEQ ID NO: 1086494 - RNA, 19 nt, Artificial Sequence
  Description of Artificial Sequence: Synthetic oligonucleotide
  Sense strand starting at position 720 of SEQ ID NO: 915527
ucuggcgcuuccucauaaa

SEQ ID NO: 1086495 - RNA, 19 nt, Artificial Sequence
  Description of Artificial Sequence: Synthetic oligonucleotide
  Antisense strand to SEQ ID NO: 1086494
uuuaugaggaagcgccaga

SEQ ID NO: 1086496 - RNA, 19 nt, Artificial Sequence
  Description of Artificial Sequence: Synthetic oligonucleotide
  Sense strand starting at position 762 of SEQ ID NO: 915527
gcugaaucaguuuagcaag

SEQ ID NO: 1086497 - RNA, 19 nt, Artificial Sequence
  Description of Artificial Sequence: Synthetic oligonucleotide
  Antisense strand to SEQ ID NO: 1086496
cuugcuaaacugauucagc

SEQ ID NO: 1086498 - RNA, 19 nt, Artificial Sequence
  Description of Artificial Sequence: Synthetic oligonucleotide
  Sense strand starting at position 800 of SEQ ID NO: 915527
ccucaacauugaucagguu

SEQ ID NO: 1086499 - RNA, 19 nt, Artificial Sequence
  Description of Artificial Sequence: Synthetic oligonucleotide
  Antisense strand to SEQ ID NO: 1086498
aaccugaucaauguugagg

SEQ ID NO: 1086500 - RNA, 19 nt, Artificial Sequence
  Description of Artificial Sequence: Synthetic oligonucleotide
  Sense strand starting at position 858 of SEQ ID NO: 915527
uggccugucucagcaagaa

SEQ ID NO: 1086501 - RNA, 19 nt, Artificial Sequence
  Description of Artificial Sequence: Synthetic oligonucleotide
  Antisense strand to SEQ ID NO: 1086500
uucuugcugagacaggcca

SEQ ID NO: 1086502 - RNA, 19 nt, Artificial Sequence
  Description of Artificial Sequence: Synthetic oligonucleotide
  Sense strand starting at position 928 of SEQ ID NO: 915527
agcugaguugucuggaguc

SEQ ID NO: 1086503 - RNA, 19 nt, Artificial Sequence
  Description of Artificial Sequence: Synthetic oligonucleotide
  Antisense strand to SEQ ID NO: 1086502
gacuccagacaacucagcu

SEQ ID NO: 1086504 - RNA, 19 nt, Artificial Sequence
  Description of Artificial Sequence: Synthetic oligonucleotide
  Sense strand starting at position 986 of SEQ ID NO: 915527
ggcgaauguccagaugcca

SEQ ID NO: 1086505 - RNA, 19 nt, Artificial Sequence
  Description of Artificial Sequence: Synthetic oligonucleotide
  Antisense strand to SEQ ID NO: 1086504
uggcaucuggacauucgcc

SEQ ID NO: 1086506 - RNA, 19 nt, Artificial Sequence
  Description of Artificial Sequence: Synthetic oligonucleotide
  Sense strand starting at position 1992 of SEQ ID NO: 915527
ucaggcagauucuauuuaa

SEQ ID NO: 1086507 - RNA, 19 nt, Artificial Sequence
  Description of Artificial Sequence: Synthetic oligonucleotide
  Antisense strand to SEQ ID NO: 1086506
uuaaauagaaucugccuga

SEQ ID NO: 1086508 - RNA, 19 nt, Artificial Sequence
  Description of Artificial Sequence: Synthetic oligonucleotide
  Sense strand starting at position 2036 of SEQ ID NO: 915527
gaauuacaguuuggaagaa

SEQ ID NO: 1086509 - RNA, 19 nt, Artificial Sequence
  Description of Artificial Sequence: Synthetic oligonucleotide
  Antisense strand to SEQ ID NO: 1086508
uucuuccaaacuguaauuc

SEQ ID NO: 1086510 - RNA, 19 nt, Artificial Sequence
  Description of Artificial Sequence: Synthetic oligonucleotide
  Sense strand starting at position 2072 of SEQ ID NO: 915527
gccucacugaguugguuaa

SEQ ID NO: 1086511 - RNA, 19 nt, Artificial Sequence
  Description of Artificial Sequence: Synthetic oligonucleotide
  Antisense strand to SEQ ID NO: 1086510
uuaaccaacucagugaggc

SEQ ID NO: 1086512 - RNA, 19 nt, Artificial Sequence
  Description of Artificial Sequence: Synthetic oligonucleotide
  Sense strand starting at position 2073 of SEQ ID NO: 915527
ccucacugaguugguuaaa

SEQ ID NO: 1086513 - RNA, 19 nt, Artificial Sequence
  Description of Artificial Sequence: Synthetic oligonucleotide
  Antisense strand to SEQ ID NO: 1086512
uuuaaccaacucagugagg

SEQ ID NO: 1086514 - RNA, 19 nt, Artificial Sequence
  Description of Artificial Sequence: Synthetic oligonucleotide
  Sense strand starting at position 2076 of SEQ ID NO: 915527
cacugaguugguuaaaguu

SEQ ID NO: 1086515 - RNA, 19 nt, Artificial Sequence
  Description of Artificial Sequence: Synthetic oligonucleotide
  Antisense strand to SEQ ID NO: 1086514
aacuuuaaccaacucagug

SEQ ID NO: 1086516 - RNA, 19 nt, Artificial Sequence
  Description of Artificial Sequence: Synthetic oligonucleotide
  Sense strand starting at position 2105 of SEQ ID NO: 915527
gugggcuucugagugagga

SEQ ID NO: 1086517 - RNA, 19 nt, Artificial Sequence
  Description of Artificial Sequence: Synthetic oligonucleotide
  Antisense strand to SEQ ID NO: 1086516
uccucacucagaagcccac

SEQ ID NO: 1086518 - RNA, 19 nt, Artificial Sequence
  Description of Artificial Sequence: Synthetic oligonucleotide
  Sense strand starting at position 2106 of SEQ ID NO: 915527
ugggcuucugagugaggaa

SEQ ID NO: 1086519 - RNA, 19 nt, Artificial Sequence
  Description of Artificial Sequence: Synthetic oligonucleotide
  Antisense strand to SEQ ID NO: 1086518
uuccucacucagaagccca

SEQ ID NO: 1086520 - RNA, 19 nt, Artificial Sequence
  Description of Artificial Sequence: Synthetic oligonucleotide
  Sense strand starting at position 2125 of SEQ ID NO: 915527
ggcaguucaugucucagga

SEQ ID NO: 1086521 - RNA, 19 nt, Artificial Sequence
  Description of Artificial Sequence: Synthetic oligonucleotide
  Antisense strand to SEQ ID NO: 1086520
uccugagacaugaacugcc

SEQ ID NO: 1086522 - RNA, 19 nt, Artificial Sequence
  Description of Artificial Sequence: Synthetic oligonucleotide
  Sense strand starting at position 2449 of SEQ ID NO: 915527
cucacuauuucgggaagcu

SEQ ID NO: 1086523 - RNA, 19 nt, Artificial Sequence
  Description of Artificial Sequence: Synthetic oligonucleotide
  Antisense strand to SEQ ID NO: 1086522
agcuucccgaaauagugag

SEQ ID NO: 1086524 - RNA, 19 nt, Artificial Sequence
  Description of Artificial Sequence: Synthetic oligonucleotide
  Sense strand starting at position 2482 of SEQ ID NO: 915527
uuagguugccuuuauuaga

SEQ ID NO: 1086525 - RNA, 19 nt, Artificial Sequence
  Description of Artificial Sequence: Synthetic oligonucleotide
  Antisense strand to SEQ ID NO: 1086524
ucuaauaaaggcaaccuaa

SEQ ID NO: 1086526 - RNA, 19 nt, Artificial Sequence
  Description of Artificial Sequence: Synthetic oligonucleotide
  Sense strand starting at position 2885 of SEQ ID NO: 915527
gccugagcuuucucugaug

SEQ ID NO: 1086527 - RNA, 19 nt, Artificial Sequence
  Description of Artificial Sequence: Synthetic oligonucleotide
  Antisense strand to SEQ ID NO: 1086526
caucagagaaagcucaggc

SEQ ID NO: 1086528 - RNA, 19 nt, Artificial Sequence
  Description of Artificial Sequence: Synthetic oligonucleotide
  Sense strand starting at position 2972 of SEQ ID NO: 915527
ggauuugggucagaaugag

SEQ ID NO: 1086529 - RNA, 19 nt, Artificial Sequence
  Description of Artificial Sequence: Synthetic oligonucleotide
  Antisense strand to SEQ ID NO: 1086528
cucauucugacccaaaucc

SEQ ID NO: 1086530 - RNA, 19 nt, Artificial Sequence
  Description of Artificial Sequence: Synthetic oligonucleotide
  Sense strand starting at position 3035 of SEQ ID NO: 915527
gagucaguuccggagagaa

SEQ ID NO: 1086531 - RNA, 19 nt, Artificial Sequence
  Description of Artificial Sequence: Synthetic oligonucleotide
  Antisense strand to SEQ ID NO: 1086530
uucucuccggaacugacuc

SEQ ID NO: 1086532 - RNA, 19 nt, Artificial Sequence
  Description of Artificial Sequence: Synthetic oligonucleotide
  Sense strand starting at position 3037 of SEQ ID NO: 915527
gucaguuccggagagaagu

SEQ ID NO: 1086533 - RNA, 19 nt, Artificial Sequence
  Description of Artificial Sequence: Synthetic oligonucleotide
  Antisense strand to SEQ ID NO: 1086532
acuucucuccggaacugac

SEQ ID NO: 1086534 - RNA, 19 nt, Artificial Sequence
  Description of Artificial Sequence: Synthetic oligonucleotide
  Sense strand starting at position 3057 of SEQ ID NO: 915527
cgagaagugcuggaagugu

SEQ ID NO: 1086535 - RNA, 19 nt, Artificial Sequence
  Description of Artificial Sequence: Synthetic oligonucleotide
  Antisense strand to SEQ ID NO: 1086534
acacuuccagcacuucucg

SEQ ID NO: 1086536 - RNA, 19 nt, Artificial Sequence
  Description of Artificial Sequence: Synthetic oligonucleotide
  Sense strand starting at position 3237 of SEQ ID NO: 915527
aggaaaucauuaggauaaa

SEQ ID NO: 1086537 - RNA, 19 nt, Artificial Sequence
  Description of Artificial Sequence: Synthetic oligonucleotide
  Antisense strand to SEQ ID NO: 1086536
uuuauccuaaugauuuccu

SEQ ID NO: 1086538 - RNA, 19 nt, Artificial Sequence
  Description of Artificial Sequence: Synthetic oligonucleotide
  Sense strand starting at position 3358 of SEQ ID NO: 915527
agcccaaaggccuaaucua

SEQ ID NO: 1086539 - RNA, 19 nt, Artificial Sequence
  Description of Artificial Sequence: Synthetic oligonucleotide
  Antisense strand to SEQ ID NO: 1086538
uagauuaggccuuugggcu

SEQ ID NO: 1086540 - RNA, 19 nt, Artificial Sequence
  Description of Artificial Sequence: Synthetic oligonucleotide
  Sense strand starting at position 3434 of SEQ ID NO: 915527
aggccuggcccugagacau

SEQ ID NO: 1086541 - RNA, 19 nt, Artificial Sequence
  Description of Artificial Sequence: Synthetic oligonucleotide
  Antisense strand to SEQ ID NO: 1086540
augucucagggccaggccu

SEQ ID NO: 1086542 - RNA, 19 nt, Artificial Sequence
  Description of Artificial Sequence: Synthetic oligonucleotide
  Sense strand starting at position 3502 of SEQ ID NO: 915527
gagugaaguguguugcugu

SEQ ID NO: 1086543 - RNA, 19 nt, Artificial Sequence
  Description of Artificial Sequence: Synthetic oligonucleotide
  Antisense strand to SEQ ID NO: 1086542
acagcaacacacuucacuc

SEQ ID NO: 1086544 - RNA, 19 nt, Artificial Sequence
  Description of Artificial Sequence: Synthetic oligonucleotide
  Sense strand starting at position 3517 of SEQ ID NO: 915527
cuguguuggugucugcaaa

SEQ ID NO: 1086545 - RNA, 19 nt, Artificial Sequence
  Description of Artificial Sequence: Synthetic oligonucleotide
  Antisense strand to SEQ ID NO: 1086544
uuugcagacaccaacacag

SEQ ID NO: 1086546 - RNA, 19 nt, Artificial Sequence
  Description of Artificial Sequence: Synthetic oligonucleotide
  Sense strand starting at position 23 of SEQ ID NO: 915528
cgagguuccacugauggga

SEQ ID NO: 1086547 - RNA, 19 nt, Artificial Sequence
  Description of Artificial Sequence: Synthetic oligonucleotide
  Antisense strand to SEQ ID NO: 1086546
ucccaucaguggaaccucg

SEQ ID NO: 1086548 - RNA, 19 nt, Artificial Sequence
  Description of Artificial Sequence: Synthetic oligonucleotide
  Sense strand starting at position 367 of SEQ ID NO: 915528
uccuguucuuuauaaagag

SEQ ID NO: 1086549 - RNA, 19 nt, Artificial Sequence
  Description of Artificial Sequence: Synthetic oligonucleotide
  Antisense strand to SEQ ID NO: 1086548
cucuuuauaaagaacagga

SEQ ID NO: 1086550 - RNA, 19 nt, Artificial Sequence
  Description of Artificial Sequence: Synthetic oligonucleotide
  Sense strand starting at position 503 of SEQ ID NO: 915528
uccagugaauugucacuga

SEQ ID NO: 1086551 - RNA, 19 nt, Artificial Sequence
  Description of Artificial Sequence: Synthetic oligonucleotide
  Antisense strand to SEQ ID NO: 1086550
ucagugacaauucacugga

SEQ ID NO: 1086552 - RNA, 19 nt, Artificial Sequence
  Description of Artificial Sequence: Synthetic oligonucleotide
  Sense strand starting at position 506 of SEQ ID NO: 915528
agugaauugucacugaguc

SEQ ID NO: 1086553 - RNA, 19 nt, Artificial Sequence
  Description of Artificial Sequence: Synthetic oligonucleotide
  Antisense strand to SEQ ID NO: 1086552
gacucagugacaauucacu

SEQ ID NO: 1086554 - RNA, 19 nt, Artificial Sequence
  Description of Artificial Sequence: Synthetic oligonucleotide
  Sense strand starting at position 507 of SEQ ID NO: 915528
gugaauugucacugagucc

SEQ ID NO: 1086555 - RNA, 19 nt, Artificial Sequence
  Description of Artificial Sequence: Synthetic oligonucleotide
  Antisense strand to SEQ ID NO: 1086554
ggacucagugacaauucac

SEQ ID NO: 1086556 - RNA, 19 nt, Artificial Sequence
  Description of Artificial Sequence: Synthetic oligonucleotide
  Sense strand starting at position 773 of SEQ ID NO: 915528
gaccuuugagucugaccca

SEQ ID NO: 1086557 - RNA, 19 nt, Artificial Sequence
  Description of Artificial Sequence: Synthetic oligonucleotide
  Antisense strand to SEQ ID NO: 1086556
ugggucagacucaaagguc

SEQ ID NO: 1086558 - RNA, 19 nt, Artificial Sequence
  Description of Artificial Sequence: Synthetic oligonucleotide
  Sense strand starting at position 790 of SEQ ID NO: 915528
caccgugauccaugacuga

SEQ ID NO: 1086559 - RNA, 19 nt, Artificial Sequence
  Description of Artificial Sequence: Synthetic oligonucleotide
  Antisense strand to SEQ ID NO: 1086558
ucagucauggaucacggug

SEQ ID NO: 1086560 - RNA, 19 nt, Artificial Sequence
  Description of Artificial Sequence: Synthetic oligonucleotide
  Sense strand starting at position 2371 of SEQ ID NO: 915528
gcgagcccuugggucaaau

SEQ ID NO: 1086561 - RNA, 19 nt, Artificial Sequence
  Description of Artificial Sequence: Synthetic oligonucleotide
  Antisense strand to SEQ ID NO: 1086560
auuugacccaagggcucgc

SEQ ID NO: 1086562 - RNA, 19 nt, Artificial Sequence
  Description of Artificial Sequence: Synthetic oligonucleotide
  Sense strand starting at position 2530 of SEQ ID NO: 915528
cucgauagcuaauucugua

SEQ ID NO: 1086563 - RNA, 19 nt, Artificial Sequence
  Description of Artificial Sequence: Synthetic oligonucleotide
  Antisense strand to SEQ ID NO: 1086562
uacagaauuagcuaucgag

SEQ ID NO: 1086564 - RNA, 19 nt, Artificial Sequence
  Description of Artificial Sequence: Synthetic oligonucleotide
  Sense strand starting at position 2535 of SEQ ID NO: 915528
uagcuaauucuguaggcga

SEQ ID NO: 1086565 - RNA, 19 nt, Artificial Sequence
  Description of Artificial Sequence: Synthetic oligonucleotide
  Antisense strand to SEQ ID NO: 1086564
ucgccuacagaauuagcua

SEQ ID NO: 1086566 - RNA, 19 nt, Artificial Sequence
  Description of Artificial Sequence: Synthetic oligonucleotide
  Sense strand starting at position 2537 of SEQ ID NO: 915528
gcuaauucuguaggcgaaa

SEQ ID NO: 1086567 - RNA, 19 nt, Artificial Sequence
  Description of Artificial Sequence: Synthetic oligonucleotide
  Antisense strand to SEQ ID NO: 1086566
uuucgccuacagaauuagc

SEQ ID NO: 1086568 - RNA, 19 nt, Artificial Sequence
  Description of Artificial Sequence: Synthetic oligonucleotide
  Sense strand starting at position 2910 of SEQ ID NO: 915528
aaagaaguguauguauaug

SEQ ID NO: 1086569 - RNA, 19 nt, Artificial Sequence
  Description of Artificial Sequence: Synthetic oligonucleotide
  Antisense strand to SEQ ID NO: 1086568
cauauacauacacuucuuu

SEQ ID NO: 1086570 - RNA, 19 nt, Artificial Sequence
  Description of Artificial Sequence: Synthetic oligonucleotide
  Sense strand starting at position 2935 of SEQ ID NO: 915528
ugugcacaugucuguguau

SEQ ID NO: 1086571 - RNA, 19 nt, Artificial Sequence
  Description of Artificial Sequence: Synthetic oligonucleotide
  Antisense strand to SEQ ID NO: 1086570
auacacagacaugugcaca

SEQ ID NO: 1086572 - RNA, 19 nt, Artificial Sequence
  Description of Artificial Sequence: Synthetic oligonucleotide
  Sense strand starting at position 2937 of SEQ ID NO: 915528
ugcacaugucuguguaugu

SEQ ID NO: 1086573 - RNA, 19 nt, Artificial Sequence
  Description of Artificial Sequence: Synthetic oligonucleotide
  Antisense strand to SEQ ID NO: 1086572
acauacacagacaugugca

SEQ ID NO: 1086574 - RNA, 19 nt, Artificial Sequence
  Description of Artificial Sequence: Synthetic oligonucleotide
  Sense strand starting at position 2958 of SEQ ID NO: 915528
gcacauguguuugcacaag

SEQ ID NO: 1086575 - RNA, 19 nt, Artificial Sequence
  Description of Artificial Sequence: Synthetic oligonucleotide
  Antisense strand to SEQ ID NO: 1086574
cuugugcaaacacaugugc

SEQ ID NO: 1086576 - RNA, 19 nt, Artificial Sequence
  Description of Artificial Sequence: Synthetic oligonucleotide
  Sense strand starting at position 2970 of SEQ ID NO: 915528
gcacaagugcaugugugua

SEQ ID NO: 1086577 - RNA, 19 nt, Artificial Sequence
  Description of Artificial Sequence: Synthetic oligonucleotide
  Antisense strand to SEQ ID NO: 1086576
uacacacaugcacuugugc

SEQ ID NO: 1086578 - RNA, 19 nt, Artificial Sequence
  Description of Artificial Sequence: Synthetic oligonucleotide
  Sense strand starting at position 2988 of SEQ ID NO: 915528
acaugugugcaugcguaua

SEQ ID NO: 1086579 - RNA, 19 nt, Artificial Sequence
  Description of Artificial Sequence: Synthetic oligonucleotide
  Antisense strand to SEQ ID NO: 1086578
uauacgcaugcacacaugu

SEQ ID NO: 1086580 - RNA, 19 nt, Artificial Sequence
  Description of Artificial Sequence: Synthetic oligonucleotide
  Sense strand starting at position 3032 of SEQ ID NO: 915528
ccagguguuugcucuuaug

SEQ ID NO: 1086581 - RNA, 19 nt, Artificial Sequence
  Description of Artificial Sequence: Synthetic oligonucleotide
  Antisense strand to SEQ ID NO: 1086580
cauaagagcaaacaccugg

SEQ ID NO: 1086582 - RNA, 19 nt, Artificial Sequence
  Description of Artificial Sequence: Synthetic oligonucleotide
  Sense strand starting at position 3044 of SEQ ID NO: 915528
ucuuaugagcuuugggcau

SEQ ID NO: 1086583 - RNA, 19 nt, Artificial Sequence
  Description of Artificial Sequence: Synthetic oligonucleotide
  Antisense strand to SEQ ID NO: 1086582
augcccaaagcucauaaga

SEQ ID NO: 1086584 - RNA, 19 nt, Artificial Sequence
  Description of Artificial Sequence: Synthetic oligonucleotide
  Sense strand starting at position 3067 of SEQ ID NO: 915528
cucuccauuugaggcauaa

SEQ ID NO: 1086585 - RNA, 19 nt, Artificial Sequence
  Description of Artificial Sequence: Synthetic oligonucleotide
  Antisense strand to SEQ ID NO: 1086584
uuaugccucaaauggagag

SEQ ID NO: 1086586 - RNA, 19 nt, Artificial Sequence
  Description of Artificial Sequence: Synthetic oligonucleotide
  Sense strand starting at position 3217 of SEQ ID NO: 915528
uguacaugcuuucucaguu

SEQ ID NO: 1086587 - RNA, 19 nt, Artificial Sequence
  Description of Artificial Sequence: Synthetic oligonucleotide
  Antisense strand to SEQ ID NO: 1086586
aacugagaaagcauguaca

SEQ ID NO: 1086588 - RNA, 19 nt, Artificial Sequence
  Description of Artificial Sequence: Synthetic oligonucleotide
  Sense strand starting at position 3294 of SEQ ID NO: 915528
ggccacauacuguguggaa

SEQ ID NO: 1086589 - RNA, 19 nt, Artificial Sequence
  Description of Artificial Sequence: Synthetic oligonucleotide
  Antisense strand to SEQ ID NO: 1086588
uuccacacaguauguggcc

SEQ ID NO: 1086590 - RNA, 19 nt, Artificial Sequence
  Description of Artificial Sequence: Synthetic oligonucleotide
  Sense strand starting at position 3295 of SEQ ID NO: 915528
gccacauacuguguggaau

SEQ ID NO: 1086591 - RNA, 19 nt, Artificial Sequence
  Description of Artificial Sequence: Synthetic oligonucleotide
  Antisense strand to SEQ ID NO: 1086590
auuccacacaguauguggc

SEQ ID NO: 1086592 - RNA, 19 nt, Artificial Sequence
  Description of Artificial Sequence: Synthetic oligonucleotide
  Sense strand starting at position 3368 of SEQ ID NO: 915528
acaacuagggcucagaguu

SEQ ID NO: 1086593 - RNA, 19 nt, Artificial Sequence
  Description of Artificial Sequence: Synthetic oligonucleotide
  Antisense strand to SEQ ID NO: 1086592
aacucugagcccuaguugu

SEQ ID NO: 1086594 - RNA, 19 nt, Artificial Sequence
  Description of Artificial Sequence: Synthetic oligonucleotide
  Sense strand starting at position 3374 of SEQ ID NO: 915528
agggcucagaguugucagu

SEQ ID NO: 1086595 - RNA, 19 nt, Artificial Sequence
  Description of Artificial Sequence: Synthetic oligonucleotide
  Antisense strand to SEQ ID NO: 1086594
acugacaacucugagcccu

SEQ ID NO: 1086596 - RNA, 19 nt, Artificial Sequence
  Description of Artificial Sequence: Synthetic oligonucleotide
  Sense strand starting at position 3380 of SEQ ID NO: 915528
cagaguugucaguggaauc

SEQ ID NO: 1086597 - RNA, 19 nt, Artificial Sequence
  Description of Artificial Sequence: Synthetic oligonucleotide
  Antisense strand to SEQ ID NO: 1086596
gauuccacugacaacucug

SEQ ID NO: 1086598 - RNA, 19 nt, Artificial Sequence
  Description of Artificial Sequence: Synthetic oligonucleotide
  Sense strand starting at position 3390 of SEQ ID NO: 915528
aguggaaucucaucuuuac

SEQ ID NO: 1086599 - RNA, 19 nt, Artificial Sequence
  Description of Artificial Sequence: Synthetic oligonucleotide
  Antisense strand to SEQ ID NO: 1086598
guaaagaugagauuccacu

SEQ ID NO: 1086600 - RNA, 19 nt, Artificial Sequence
  Description of Artificial Sequence: Synthetic oligonucleotide
  Sense strand starting at position 3508 of SEQ ID NO: 915528
cuucuauuaugguccaguu

SEQ ID NO: 1086601 - RNA, 19 nt, Artificial Sequence
  Description of Artificial Sequence: Synthetic oligonucleotide
  Antisense strand to SEQ ID NO: 1086600
aacuggaccauaauagaag

SEQ ID NO: 1086602 - RNA, 19 nt, Artificial Sequence
  Description of Artificial Sequence: Synthetic oligonucleotide
  Sense strand starting at position 3517 of SEQ ID NO: 915528
ugguccaguuggucuuauu

SEQ ID NO: 1086603 - RNA, 19 nt, Artificial Sequence
  Description of Artificial Sequence: Synthetic oligonucleotide
  Antisense strand to SEQ ID NO: 1086602
aauaagaccaacuggacca

SEQ ID NO: 1086604 - RNA, 19 nt, Artificial Sequence
  Description of Artificial Sequence: Synthetic oligonucleotide
  Sense strand starting at position 3529 of SEQ ID NO: 915528
ucuuauuuccagugagcuc

SEQ ID NO: 1086605 - RNA, 19 nt, Artificial Sequence
  Description of Artificial Sequence: Synthetic oligonucleotide
  Antisense strand to SEQ ID NO: 1086604
gagcucacuggaaauaaga

SEQ ID NO: 1086606 - RNA, 19 nt, Artificial Sequence
  Description of Artificial Sequence: Synthetic oligonucleotide
  Sense strand starting at position 3612 of SEQ ID NO: 915528
cauggagacuugcugaagu

SEQ ID NO: 1086607 - RNA, 19 nt, Artificial Sequence
  Description of Artificial Sequence: Synthetic oligonucleotide
  Antisense strand to SEQ ID NO: 1086606
acuucagcaagucuccaug

SEQ ID NO: 1086608 - RNA, 19 nt, Artificial Sequence
  Description of Artificial Sequence: Synthetic oligonucleotide
  Sense strand starting at position 3622 of SEQ ID NO: 915528
ugcugaagugcauggauga

SEQ ID NO: 1086609 - RNA, 19 nt, Artificial Sequence
  Description of Artificial Sequence: Synthetic oligonucleotide
  Antisense strand to SEQ ID NO: 1086608
ucauccaugcacuucagca

SEQ ID NO: 1086610 - RNA, 19 nt, Artificial Sequence
  Description of Artificial Sequence: Synthetic oligonucleotide
  Sense strand starting at position 3623 of SEQ ID NO: 915528
gcugaagugcauggaugau

SEQ ID NO: 1086611 - RNA, 19 nt, Artificial Sequence
  Description of Artificial Sequence: Synthetic oligonucleotide
  Antisense strand to SEQ ID NO: 1086610
aucauccaugcacuucagc

SEQ ID NO: 1086612 - RNA, 19 nt, Artificial Sequence
  Description of Artificial Sequence: Synthetic oligonucleotide
  Sense strand starting at position 3741 of SEQ ID NO: 915528
cucaucaaccagugaguua

SEQ ID NO: 1086613 - RNA, 19 nt, Artificial Sequence
  Description of Artificial Sequence: Synthetic oligonucleotide
  Antisense strand to SEQ ID NO: 1086612
uaacucacugguugaugag

SEQ ID NO: 1086614 - RNA, 19 nt, Artificial Sequence
  Description of Artificial Sequence: Synthetic oligonucleotide
  Sense strand starting at position 3765 of SEQ ID NO: 915528
cuguuuacaguuuggugua

SEQ ID NO: 1086615 - RNA, 19 nt, Artificial Sequence
  Description of Artificial Sequence: Synthetic oligonucleotide
  Antisense strand to SEQ ID NO: 1086614
uacaccaaacuguaaacag

SEQ ID NO: 1086616 - RNA, 19 nt, Artificial Sequence
  Description of Artificial Sequence: Synthetic oligonucleotide
  Sense strand starting at position 3767 of SEQ ID NO: 915528
guuuacaguuugguguaaa

SEQ ID NO: 1086617 - RNA, 19 nt, Artificial Sequence
  Description of Artificial Sequence: Synthetic oligonucleotide
  Antisense strand to SEQ ID NO: 1086616
uuuacaccaaacuguaaac

SEQ ID NO: 1086618 - RNA, 19 nt, Artificial Sequence
  Description of Artificial Sequence: Synthetic oligonucleotide
  Sense strand starting at position 3777 of SEQ ID NO: 915528
ugguguaaauaugugcaga

SEQ ID NO: 1086619 - RNA, 19 nt, Artificial Sequence
  Description of Artificial Sequence: Synthetic oligonucleotide
  Antisense strand to SEQ ID NO: 1086618
ucugcacauauuuacacca

SEQ ID NO: 1086620 - RNA, 19 nt, Artificial Sequence
  Description of Artificial Sequence: Synthetic oligonucleotide
  Sense strand starting at position 3778 of SEQ ID NO: 915528
gguguaaauaugugcagac

SEQ ID NO: 1086621 - RNA, 19 nt, Artificial Sequence
  Description of Artificial Sequence: Synthetic oligonucleotide
  Antisense strand to SEQ ID NO: 1086620
gucugcacauauuuacacc

SEQ ID NO: 1086622 - RNA, 19 nt, Artificial Sequence
  Description of Artificial Sequence: Synthetic oligonucleotide
  Sense strand starting at position 3779 of SEQ ID NO: 915528
guguaaauaugugcagacu

SEQ ID NO: 1086623 - RNA, 19 nt, Artificial Sequence
  Description of Artificial Sequence: Synthetic oligonucleotide
  Antisense strand to SEQ ID NO: 1086622
agucugcacauauuuacac

SEQ ID NO: 1086624 - RNA, 19 nt, Artificial Sequence
  Description of Artificial Sequence: Synthetic oligonucleotide
  Sense strand starting at position 3780 of SEQ ID NO: 915528
uguaaauaugugcagacuu

SEQ ID NO: 1086625 - RNA, 19 nt, Artificial Sequence
  Description of Artificial Sequence: Synthetic oligonucleotide
  Antisense strand to SEQ ID NO: 1086624
aagucugcacauauuuaca

SEQ ID NO: 1086626 - RNA, 19 nt, Artificial Sequence
  Description of Artificial Sequence: Synthetic oligonucleotide
  Sense strand starting at position 96 of SEQ ID NO: 915529
gagcuucuuggugauguga

SEQ ID NO: 1086627 - RNA, 19 nt, Artificial Sequence
  Description of Artificial Sequence: Synthetic oligonucleotide
  Antisense strand to SEQ ID NO: 1086626
ucacaucaccaagaagcuc

SEQ ID NO: 1086628 - RNA, 19 nt, Artificial Sequence
  Description of Artificial Sequence: Synthetic oligonucleotide
  Sense strand starting at position 98 of SEQ ID NO: 915529
gcuucuuggugaugugaga

SEQ ID NO: 1086629 - RNA, 19 nt, Artificial Sequence
  Description of Artificial Sequence: Synthetic oligonucleotide
  Antisense strand to SEQ ID NO: 1086628
ucucacaucaccaagaagc

SEQ ID NO: 1086630 - RNA, 19 nt, Artificial Sequence
  Description of Artificial Sequence: Synthetic oligonucleotide
  Sense strand starting at position 109 of SEQ ID NO: 915529
augugagacuuuguuccca

SEQ ID NO: 1086631 - RNA, 19 nt, Artificial Sequence
  Description of Artificial Sequence: Synthetic oligonucleotide
  Antisense strand to SEQ ID NO: 1086630
ugggaacaaagucucacau

SEQ ID NO: 1086632 - RNA, 19 nt, Artificial Sequence
  Description of Artificial Sequence: Synthetic oligonucleotide
  Sense strand starting at position 111 of SEQ ID NO: 915529
gugagacuuuguucccaag

SEQ ID NO: 1086633 - RNA, 19 nt, Artificial Sequence
  Description of Artificial Sequence: Synthetic oligonucleotide
  Antisense strand to SEQ ID NO: 1086632
cuugggaacaaagucucac

SEQ ID NO: 1086634 - RNA, 19 nt, Artificial Sequence
  Description of Artificial Sequence: Synthetic oligonucleotide
  Sense strand starting at position 114 of SEQ ID NO: 915529
agacuuuguucccaagccu

SEQ ID NO: 1086635 - RNA, 19 nt, Artificial Sequence
  Description of Artificial Sequence: Synthetic oligonucleotide
  Antisense strand to SEQ ID NO: 1086634
aggcuugggaacaaagucu

SEQ ID NO: 1086636 - RNA, 19 nt, Artificial Sequence
  Description of Artificial Sequence: Synthetic oligonucleotide
  Sense strand starting at position 131 of SEQ ID NO: 915529
cucuccagacuuggugaau

SEQ ID NO: 1086637 - RNA, 19 nt, Artificial Sequence
  Description of Artificial Sequence: Synthetic oligonucleotide
  Antisense strand to SEQ ID NO: 1086636
auucaccaagucuggagag

SEQ ID NO: 1086638 - RNA, 19 nt, Artificial Sequence
  Description of Artificial Sequence: Synthetic oligonucleotide
  Sense strand starting at position 132 of SEQ ID NO: 915529
ucuccagacuuggugaaua

SEQ ID NO: 1086639 - RNA, 19 nt, Artificial Sequence
  Description of Artificial Sequence: Synthetic oligonucleotide
  Antisense strand to SEQ ID NO: 1086638
uauucaccaagucuggaga

SEQ ID NO: 1086640 - RNA, 19 nt, Artificial Sequence
  Description of Artificial Sequence: Synthetic oligonucleotide
  Sense strand starting at position 186 of SEQ ID NO: 915529
cacacugugguauagacua

SEQ ID NO: 1086641 - RNA, 19 nt, Artificial Sequence
  Description of Artificial Sequence: Synthetic oligonucleotide
  Antisense strand to SEQ ID NO: 1086640
uagucuauaccacagugug

SEQ ID NO: 1086642 - RNA, 19 nt, Artificial Sequence
  Description of Artificial Sequence: Synthetic oligonucleotide
  Sense strand starting at position 194 of SEQ ID NO: 915529
gguauagacuacugaauga

SEQ ID NO: 1086643 - RNA, 19 nt, Artificial Sequence
  Description of Artificial Sequence: Synthetic oligonucleotide
  Antisense strand to SEQ ID NO: 1086642
ucauucaguagucuauacc

SEQ ID NO: 1086644 - RNA, 19 nt, Artificial Sequence
  Description of Artificial Sequence: Synthetic oligonucleotide
  Sense strand starting at position 238 of SEQ ID NO: 915529
aaugaaauguuuccgcauu

SEQ ID NO: 1086645 - RNA, 19 nt, Artificial Sequence
  Description of Artificial Sequence: Synthetic oligonucleotide
  Antisense strand to SEQ ID NO: 1086644
aaugcggaaacauuucauu

SEQ ID NO: 1086646 - RNA, 19 nt, Artificial Sequence
  Description of Artificial Sequence: Synthetic oligonucleotide
  Sense strand starting at position 239 of SEQ ID NO: 915529
augaaauguuuccgcauuu

SEQ ID NO: 1086647 - RNA, 19 nt, Artificial Sequence
  Description of Artificial Sequence: Synthetic oligonucleotide
  Antisense strand to SEQ ID NO: 1086646
aaaugcggaaacauuucau

SEQ ID NO: 1086648 - RNA, 19 nt, Artificial Sequence
  Description of Artificial Sequence: Synthetic oligonucleotide
  Sense strand starting at position 240 of SEQ ID NO: 915529
ugaaauguuuccgcauuug

SEQ ID NO: 1086649 - RNA, 19 nt, Artificial Sequence
  Description of Artificial Sequence: Synthetic oligonucleotide
  Antisense strand to SEQ ID NO: 1086648
caaaugcggaaacauuuca

SEQ ID NO: 1086650 - RNA, 19 nt, Artificial Sequence
  Description of Artificial Sequence: Synthetic oligonucleotide
  Sense strand starting at position 313 of SEQ ID NO: 915529
agaucaauuugccgccaca

SEQ ID NO: 1086651 - RNA, 19 nt, Artificial Sequence
  Description of Artificial Sequence: Synthetic oligonucleotide
  Antisense strand to SEQ ID NO: 1086650
uguggcggcaaauugaucu

SEQ ID NO: 1086652 - RNA, 19 nt, Artificial Sequence
  Description of Artificial Sequence: Synthetic oligonucleotide
  Sense strand starting at position 330 of SEQ ID NO: 915529
cagaucauuuaguggacaa

SEQ ID NO: 1086653 - RNA, 19 nt, Artificial Sequence
  Description of Artificial Sequence: Synthetic oligonucleotide
  Antisense strand to SEQ ID NO: 1086652
uuguccacuaaaugaucug

SEQ ID NO: 1086654 - RNA, 19 nt, Artificial Sequence
  Description of Artificial Sequence: Synthetic oligonucleotide
  Sense strand starting at position 623 of SEQ ID NO: 915529
gaggcagaguccuuaacuu

SEQ ID NO: 1086655 - RNA, 19 nt, Artificial Sequence
  Description of Artificial Sequence: Synthetic oligonucleotide
  Antisense strand to SEQ ID NO: 1086654
aaguuaaggacucugccuc

SEQ ID NO: 1086656 - RNA, 19 nt, Artificial Sequence
  Description of Artificial Sequence: Synthetic oligonucleotide
  Sense strand starting at position 645 of SEQ ID NO: 915529
cagcuuaagcguggcauga

SEQ ID NO: 1086657 - RNA, 19 nt, Artificial Sequence
  Description of Artificial Sequence: Synthetic oligonucleotide
  Antisense strand to SEQ ID NO: 1086656
ucaugccacgcuuaagcug

SEQ ID NO: 1086658 - RNA, 19 nt, Artificial Sequence
  Description of Artificial Sequence: Synthetic oligonucleotide
  Sense strand starting at position 1061 of SEQ ID NO: 915529
uggccuugccugcaagaga

SEQ ID NO: 1086659 - RNA, 19 nt, Artificial Sequence
  Description of Artificial Sequence: Synthetic oligonucleotide
  Antisense strand to SEQ ID NO: 1086658
ucucuugcaggcaaggcca

SEQ ID NO: 1086660 - RNA, 19 nt, Artificial Sequence
  Description of Artificial Sequence: Synthetic oligonucleotide
  Sense strand starting at position 1519 of SEQ ID NO: 915529
ggagacauagcucagccuu

SEQ ID NO: 1086661 - RNA, 19 nt, Artificial Sequence
  Description of Artificial Sequence: Synthetic oligonucleotide
  Antisense strand to SEQ ID NO: 1086660
aaggcugagcuaugucucc

SEQ ID NO: 1086662 - RNA, 19 nt, Artificial Sequence
  Description of Artificial Sequence: Synthetic oligonucleotide
  Sense strand starting at position 1899 of SEQ ID NO: 915529
uccggagugugcucgagua

SEQ ID NO: 1086663 - RNA, 19 nt, Artificial Sequence
  Description of Artificial Sequence: Synthetic oligonucleotide
  Antisense strand to SEQ ID NO: 1086662
uacucgagcacacuccgga

SEQ ID NO: 1086664 - RNA, 19 nt, Artificial Sequence
  Description of Artificial Sequence: Synthetic oligonucleotide
  Sense strand starting at position 2013 of SEQ ID NO: 915529
ccgcccuuucgggagauga

SEQ ID NO: 1086665 - RNA, 19 nt, Artificial Sequence
  Description of Artificial Sequence: Synthetic oligonucleotide
  Antisense strand to SEQ ID NO: 1086664
ucaucucccgaaagggcgg

SEQ ID NO: 1086666 - RNA, 19 nt, Artificial Sequence
  Description of Artificial Sequence: Synthetic oligonucleotide
  Sense strand starting at position 2015 of SEQ ID NO: 915529
gcccuuucgggagaugacu

SEQ ID NO: 1086667 - RNA, 19 nt, Artificial Sequence
  Description of Artificial Sequence: Synthetic oligonucleotide
  Antisense strand to SEQ ID NO: 1086666
agucaucucccgaaagggc

SEQ ID NO: 1086668 - RNA, 19 nt, Artificial Sequence
  Description of Artificial Sequence: Synthetic oligonucleotide
  Sense strand starting at position 2755 of SEQ ID NO: 915529
cccugacugucacuaagua

SEQ ID NO: 1086669 - RNA, 19 nt, Artificial Sequence
  Description of Artificial Sequence: Synthetic oligonucleotide
  Antisense strand to SEQ ID NO: 1086668
uacuuagugacagucaggg

SEQ ID NO: 1086670 - RNA, 19 nt, Artificial Sequence
  Description of Artificial Sequence: Synthetic oligonucleotide
  Sense strand starting at position 2858 of SEQ ID NO: 915529
ccugccaugugucaaucau

SEQ ID NO: 1086671 - RNA, 19 nt, Artificial Sequence
  Description of Artificial Sequence: Synthetic oligonucleotide
  Antisense strand to SEQ ID NO: 1086670
augauugacacauggcagg

SEQ ID NO: 1086672 - RNA, 19 nt, Artificial Sequence
  Description of Artificial Sequence: Synthetic oligonucleotide
  Sense strand starting at position 2867 of SEQ ID NO: 915529
ugucaaucaucgcuccaca

SEQ ID NO: 1086673 - RNA, 19 nt, Artificial Sequence
  Description of Artificial Sequence: Synthetic oligonucleotide
  Antisense strand to SEQ ID NO: 1086672
uguggagcgaugauugaca

SEQ ID NO: 1086674 - RNA, 19 nt, Artificial Sequence
  Description of Artificial Sequence: Synthetic oligonucleotide
  Sense strand starting at position 3024 of SEQ ID NO: 915529
gggagugguucagcagcua

SEQ ID NO: 1086675 - RNA, 19 nt, Artificial Sequence
  Description of Artificial Sequence: Synthetic oligonucleotide
  Antisense strand to SEQ ID NO: 1086674
uagcugcugaaccacuccc

SEQ ID NO: 1086676 - RNA, 19 nt, Artificial Sequence
  Description of Artificial Sequence: Synthetic oligonucleotide
  Sense strand starting at position 3058 of SEQ ID NO: 915529
cucagauauguugggcauc

SEQ ID NO: 1086677 - RNA, 19 nt, Artificial Sequence
  Description of Artificial Sequence: Synthetic oligonucleotide
  Antisense strand to SEQ ID NO: 1086676
gaugcccaacauaucugag

SEQ ID NO: 1086678 - RNA, 19 nt, Artificial Sequence
  Description of Artificial Sequence: Synthetic oligonucleotide
  Sense strand starting at position 3059 of SEQ ID NO: 915529
ucagauauguugggcauca

SEQ ID NO: 1086679 - RNA, 19 nt, Artificial Sequence
  Description of Artificial Sequence: Synthetic oligonucleotide
  Antisense strand to SEQ ID NO: 1086678
ugaugcccaacauaucuga

SEQ ID NO: 1086680 - RNA, 19 nt, Artificial Sequence
  Description of Artificial Sequence: Synthetic oligonucleotide
  Sense strand starting at position 3107 of SEQ ID NO: 915529
gaagcagcuucggaagaaa

SEQ ID NO: 1086681 - RNA, 19 nt, Artificial Sequence
  Description of Artificial Sequence: Synthetic oligonucleotide
  Antisense strand to SEQ ID NO: 1086680
uuucuuccgaagcugcuuc

SEQ ID NO: 1086682 - RNA, 19 nt, Artificial Sequence
  Description of Artificial Sequence: Synthetic oligonucleotide
  Sense strand starting at position 3213 of SEQ ID NO: 915529
cagggcaggucauagaaau

SEQ ID NO: 1086683 - RNA, 19 nt, Artificial Sequence
  Description of Artificial Sequence: Synthetic oligonucleotide
  Antisense strand to SEQ ID NO: 1086682
auuucuaugaccugcccug

SEQ ID NO: 1086684 - RNA, 19 nt, Artificial Sequence
  Description of Artificial Sequence: Synthetic oligonucleotide
  Sense strand starting at position 3294 of SEQ ID NO: 915529
ccaccuuuguguuuagaag

SEQ ID NO: 1086685 - RNA, 19 nt, Artificial Sequence
  Description of Artificial Sequence: Synthetic oligonucleotide
  Antisense strand to SEQ ID NO: 1086684
cuucuaaacacaaaggugg

SEQ ID NO: 1086686 - RNA, 19 nt, Artificial Sequence
  Description of Artificial Sequence: Synthetic oligonucleotide
  Sense strand starting at position 3303 of SEQ ID NO: 915529
uguuuagaagcuggccaua

SEQ ID NO: 1086687 - RNA, 19 nt, Artificial Sequence
  Description of Artificial Sequence: Synthetic oligonucleotide
  Antisense strand to SEQ ID NO: 1086686
uauggccagcuucuaaaca

SEQ ID NO: 1086688 - RNA, 19 nt, Artificial Sequence
  Description of Artificial Sequence: Synthetic oligonucleotide
  Sense strand starting at position 3305 of SEQ ID NO: 915529
uuuagaagcuggccauaaa

SEQ ID NO: 1086689 - RNA, 19 nt, Artificial Sequence
  Description of Artificial Sequence: Synthetic oligonucleotide
  Antisense strand to SEQ ID NO: 1086688
uuuauggccagcuucuaaa

SEQ ID NO: 1086690 - RNA, 19 nt, Artificial Sequence
  Description of Artificial Sequence: Synthetic oligonucleotide
  Sense strand starting at position 3306 of SEQ ID NO: 915529
uuagaagcuggccauaaau

SEQ ID NO: 1086691 - RNA, 19 nt, Artificial Sequence
  Description of Artificial Sequence: Synthetic oligonucleotide
  Antisense strand to SEQ ID NO: 1086690
auuuauggccagcuucuaa

SEQ ID NO: 1086692 - RNA, 19 nt, Artificial Sequence
  Description of Artificial Sequence: Synthetic oligonucleotide
  Sense strand starting at position 3308 of SEQ ID NO: 915529
agaagcuggccauaaauua

SEQ ID NO: 1086693 - RNA, 19 nt, Artificial Sequence
  Description of Artificial Sequence: Synthetic oligonucleotide
  Antisense strand to SEQ ID NO: 1086692
uaauuuauggccagcuucu

SEQ ID NO: 1086694 - RNA, 19 nt, Artificial Sequence
  Description of Artificial Sequence: Synthetic oligonucleotide
  Sense strand starting at position 3329 of SEQ ID NO: 915529
ugaccucucuuguuugacu

SEQ ID NO: 1086695 - RNA, 19 nt, Artificial Sequence
  Description of Artificial Sequence: Synthetic oligonucleotide
  Antisense strand to SEQ ID NO: 1086694
agucaaacaagagagguca

SEQ ID NO: 1086696 - RNA, 19 nt, Artificial Sequence
  Description of Artificial Sequence: Synthetic oligonucleotide
  Sense strand starting at position 3381 of SEQ ID NO: 915529
gcuccaugcccagaaggaa

SEQ ID NO: 1086697 - RNA, 19 nt, Artificial Sequence
  Description of Artificial Sequence: Synthetic oligonucleotide
  Antisense strand to SEQ ID NO: 1086696
uuccuucugggcauggagc

SEQ ID NO: 1086698 - RNA, 19 nt, Artificial Sequence
  Description of Artificial Sequence: Synthetic oligonucleotide
  Sense strand starting at position 3398 of SEQ ID NO: 915529
aaggaaugcugcucagaaa

SEQ ID NO: 1086699 - RNA, 19 nt, Artificial Sequence
  Description of Artificial Sequence: Synthetic oligonucleotide
  Antisense strand to SEQ ID NO: 1086698
uuucugagcagcauuccuu

SEQ ID NO: 1086700 - RNA, 19 nt, Artificial Sequence
  Description of Artificial Sequence: Synthetic oligonucleotide
  Sense strand starting at position 3401 of SEQ ID NO: 915529
gaaugcugcucagaaaguu

SEQ ID NO: 1086701 - RNA, 19 nt, Artificial Sequence
  Description of Artificial Sequence: Synthetic oligonucleotide
  Antisense strand to SEQ ID NO: 1086700
aacuuucugagcagcauuc

SEQ ID NO: 1086702 - RNA, 19 nt, Artificial Sequence
  Description of Artificial Sequence: Synthetic oligonucleotide
  Sense strand starting at position 3880 of SEQ ID NO: 915529
cccauaucuuugggucuuu

SEQ ID NO: 1086703 - RNA, 19 nt, Artificial Sequence
  Description of Artificial Sequence: Synthetic oligonucleotide
  Antisense strand to SEQ ID NO: 1086702
aaagacccaaagauauggg

SEQ ID NO: 1086704 - RNA, 19 nt, Artificial Sequence
  Description of Artificial Sequence: Synthetic oligonucleotide
  Sense strand starting at position 3889 of SEQ ID NO: 915529
uugggucuuuguucugaaa

SEQ ID NO: 1086705 - RNA, 19 nt, Artificial Sequence
  Description of Artificial Sequence: Synthetic oligonucleotide
  Antisense strand to SEQ ID NO: 1086704
uuucagaacaaagacccaa

SEQ ID NO: 1086706 - RNA, 19 nt, Artificial Sequence
  Description of Artificial Sequence: Synthetic oligonucleotide
  Sense strand starting at position 194 of SEQ ID NO: 915530
cccugacugucacuaagua

SEQ ID NO: 1086707 - RNA, 19 nt, Artificial Sequence
  Description of Artificial Sequence: Synthetic oligonucleotide
  Antisense strand to SEQ ID NO: 1086706
uacuuagugacagucaggg

SEQ ID NO: 1086708 - RNA, 19 nt, Artificial Sequence
  Description of Artificial Sequence: Synthetic oligonucleotide
  Sense strand starting at position 497 of SEQ ID NO: 915530
cucagauauguugggcauc

SEQ ID NO: 1086709 - RNA, 19 nt, Artificial Sequence
  Description of Artificial Sequence: Synthetic oligonucleotide
  Antisense strand to SEQ ID NO: 1086708
gaugcccaacauaucugag

SEQ ID NO: 1086710 - RNA, 19 nt, Artificial Sequence
  Description of Artificial Sequence: Synthetic oligonucleotide
  Sense strand starting at position 733 of SEQ ID NO: 915530
ccaccuuuguguuuagaag

SEQ ID NO: 1086711 - RNA, 19 nt, Artificial Sequence
  Description of Artificial Sequence: Synthetic oligonucleotide
  Antisense strand to SEQ ID NO: 1086710
cuucuaaacacaaaggugg

SEQ ID NO: 1086712 - RNA, 19 nt, Artificial Sequence
  Description of Artificial Sequence: Synthetic oligonucleotide
  Sense strand starting at position 744 of SEQ ID NO: 915530
uuuagaagcuggccauaaa

SEQ ID NO: 1086713 - RNA, 19 nt, Artificial Sequence
  Description of Artificial Sequence: Synthetic oligonucleotide
  Antisense strand to SEQ ID NO: 1086712
uuuauggccagcuucuaaa

SEQ ID NO: 1086714 - RNA, 19 nt, Artificial Sequence
  Description of Artificial Sequence: Synthetic oligonucleotide
  Sense strand starting at position 745 of SEQ ID NO: 915530
uuagaagcuggccauaaau

SEQ ID NO: 1086715 - RNA, 19 nt, Artificial Sequence
  Description of Artificial Sequence: Synthetic oligonucleotide
  Antisense strand to SEQ ID NO: 1086714
auuuauggccagcuucuaa

SEQ ID NO: 1086716 - RNA, 19 nt, Artificial Sequence
  Description of Artificial Sequence: Synthetic oligonucleotide
  Sense strand starting at position 747 of SEQ ID NO: 915530
agaagcuggccauaaauua

SEQ ID NO: 1086717 - RNA, 19 nt, Artificial Sequence
  Description of Artificial Sequence: Synthetic oligonucleotide
  Antisense strand to SEQ ID NO: 1086716
uaauuuauggccagcuucu

SEQ ID NO: 1086718 - RNA, 19 nt, Artificial Sequence
  Description of Artificial Sequence: Synthetic oligonucleotide
  Sense strand starting at position 768 of SEQ ID NO: 915530
ugaccucucuuguuugacu

SEQ ID NO: 1086719 - RNA, 19 nt, Artificial Sequence
  Description of Artificial Sequence: Synthetic oligonucleotide
  Antisense strand to SEQ ID NO: 1086718
agucaaacaagagagguca

SEQ ID NO: 1086720 - RNA, 19 nt, Artificial Sequence
  Description of Artificial Sequence: Synthetic oligonucleotide
  Sense strand starting at position 820 of SEQ ID NO: 915530
gcuccaugcccagaaggaa

SEQ ID NO: 1086721 - RNA, 19 nt, Artificial Sequence
  Description of Artificial Sequence: Synthetic oligonucleotide
  Antisense strand to SEQ ID NO: 1086720
uuccuucugggcauggagc

SEQ ID NO: 1086722 - RNA, 19 nt, Artificial Sequence
  Description of Artificial Sequence: Synthetic oligonucleotide
  Sense strand starting at position 837 of SEQ ID NO: 915530
aaggaaugcugcucagaaa

SEQ ID NO: 1086723 - RNA, 19 nt, Artificial Sequence
  Description of Artificial Sequence: Synthetic oligonucleotide
  Antisense strand to SEQ ID NO: 1086722
uuucugagcagcauuccuu

SEQ ID NO: 1086724 - RNA, 19 nt, Artificial Sequence
  Description of Artificial Sequence: Synthetic oligonucleotide
  Sense strand starting at position 1328 of SEQ ID NO: 915530
uugggucuuuguucugaaa

SEQ ID NO: 1086725 - RNA, 19 nt, Artificial Sequence
  Description of Artificial Sequence: Synthetic oligonucleotide
  Antisense strand to SEQ ID NO: 1086724
uuucagaacaaagacccaa

SEQ ID NO: 1086726 - RNA, 19 nt, Artificial Sequence
  Description of Artificial Sequence: Synthetic oligonucleotide
  Sense strand starting at position 1477 of SEQ ID NO: 915530
agugcaaacguguuugcau

SEQ ID NO: 1086727 - RNA, 19 nt, Artificial Sequence
  Description of Artificial Sequence: Synthetic oligonucleotide
  Antisense strand to SEQ ID NO: 1086726
augcaaacacguuugcacu

SEQ ID NO: 1086728 - RNA, 19 nt, Artificial Sequence
  Description of Artificial Sequence: Synthetic oligonucleotide
  Sense strand starting at position 1603 of SEQ ID NO: 915530
cagccagaguuuccuggaa

SEQ ID NO: 1086729 - RNA, 19 nt, Artificial Sequence
  Description of Artificial Sequence: Synthetic oligonucleotide
  Antisense strand to SEQ ID NO: 1086728
uuccaggaaacucuggcug

SEQ ID NO: 1086730 - RNA, 19 nt, Artificial Sequence
  Description of Artificial Sequence: Synthetic oligonucleotide
  Sense strand starting at position 1667 of SEQ ID NO: 915530
ggagucucagagugucuua

SEQ ID NO: 1086731 - RNA, 19 nt, Artificial Sequence
  Description of Artificial Sequence: Synthetic oligonucleotide
  Antisense strand to SEQ ID NO: 1086730
uaagacacucugagacucc

SEQ ID NO: 1086732 - RNA, 19 nt, Artificial Sequence
  Description of Artificial Sequence: Synthetic oligonucleotide
  Sense strand starting at position 1670 of SEQ ID NO: 915530
gucucagagugucuuagau

SEQ ID NO: 1086733 - RNA, 19 nt, Artificial Sequence
  Description of Artificial Sequence: Synthetic oligonucleotide
  Antisense strand to SEQ ID NO: 1086732
aucuaagacacucugagac

SEQ ID NO: 1086734 - RNA, 19 nt, Artificial Sequence
  Description of Artificial Sequence: Synthetic oligonucleotide
  Sense strand starting at position 1827 of SEQ ID NO: 915530
ugggaugaguuaccaaacu

SEQ ID NO: 1086735 - RNA, 19 nt, Artificial Sequence
  Description of Artificial Sequence: Synthetic oligonucleotide
  Antisense strand to SEQ ID NO: 1086734
aguuugguaacucauccca

SEQ ID NO: 1086736 - RNA, 19 nt, Artificial Sequence
  Description of Artificial Sequence: Synthetic oligonucleotide
  Sense strand starting at position 1903 of SEQ ID NO: 915530
gcuggaaacuuaccacugu

SEQ ID NO: 1086737 - RNA, 19 nt, Artificial Sequence
  Description of Artificial Sequence: Synthetic oligonucleotide
  Antisense strand to SEQ ID NO: 1086736
acagugguaaguuuccagc

SEQ ID NO: 1086738 - RNA, 19 nt, Artificial Sequence
  Description of Artificial Sequence: Synthetic oligonucleotide
  Sense strand starting at position 2033 of SEQ ID NO: 915530
ccugguucugagggaaugu

SEQ ID NO: 1086739 - RNA, 19 nt, Artificial Sequence
  Description of Artificial Sequence: Synthetic oligonucleotide
  Antisense strand to SEQ ID NO: 1086738
acauucccucagaaccagg

SEQ ID NO: 1086740 - RNA, 19 nt, Artificial Sequence
  Description of Artificial Sequence: Synthetic oligonucleotide
  Sense strand starting at position 2063 of SEQ ID NO: 915530
ccuuuaggcugggugaaga

SEQ ID NO: 1086741 - RNA, 19 nt, Artificial Sequence
  Description of Artificial Sequence: Synthetic oligonucleotide
  Antisense strand to SEQ ID NO: 1086740
ucuucacccagccuaaagg

SEQ ID NO: 1086742 - RNA, 19 nt, Artificial Sequence
  Description of Artificial Sequence: Synthetic oligonucleotide
  Sense strand starting at position 2205 of SEQ ID NO: 915530
gacaguucugccggaugag

SEQ ID NO: 1086743 - RNA, 19 nt, Artificial Sequence
  Description of Artificial Sequence: Synthetic oligonucleotide
  Antisense strand to SEQ ID NO: 1086742
cucauccggcagaacuguc

SEQ ID NO: 1086744 - RNA, 19 nt, Artificial Sequence
  Description of Artificial Sequence: Synthetic oligonucleotide
  Sense strand starting at position 2206 of SEQ ID NO: 915530
acaguucugccggaugaga

SEQ ID NO: 1086745 - RNA, 19 nt, Artificial Sequence
  Description of Artificial Sequence: Synthetic oligonucleotide
  Antisense strand to SEQ ID NO: 1086744
ucucauccggcagaacugu

SEQ ID NO: 1086746 - RNA, 19 nt, Artificial Sequence
  Description of Artificial Sequence: Synthetic oligonucleotide
  Sense strand starting at position 2335 of SEQ ID NO: 915530
ggauuguuuggguauggga

SEQ ID NO: 1086747 - RNA, 19 nt, Artificial Sequence
  Description of Artificial Sequence: Synthetic oligonucleotide
  Antisense strand to SEQ ID NO: 1086746
ucccauacccaaacaaucc

SEQ ID NO: 1086748 - RNA, 19 nt, Artificial Sequence
  Description of Artificial Sequence: Synthetic oligonucleotide
  Sense strand starting at position 2355 of SEQ ID NO: 915530
gggcauccuggcugagaga

SEQ ID NO: 1086749 - RNA, 19 nt, Artificial Sequence
  Description of Artificial Sequence: Synthetic oligonucleotide
  Antisense strand to SEQ ID NO: 1086748
ucucucagccaggaugccc

SEQ ID NO: 1086750 - RNA, 19 nt, Artificial Sequence
  Description of Artificial Sequence: Synthetic oligonucleotide
  Sense strand starting at position 2356 of SEQ ID NO: 915530
ggcauccuggcugagagaa

SEQ ID NO: 1086751 - RNA, 19 nt, Artificial Sequence
  Description of Artificial Sequence: Synthetic oligonucleotide
  Antisense strand to SEQ ID NO: 1086750
uucucucagccaggaugcc

SEQ ID NO: 1086752 - RNA, 19 nt, Artificial Sequence
  Description of Artificial Sequence: Synthetic oligonucleotide
  Sense strand starting at position 2380 of SEQ ID NO: 915530
uagauaacggcuuagaggu

SEQ ID NO: 1086753 - RNA, 19 nt, Artificial Sequence
  Description of Artificial Sequence: Synthetic oligonucleotide
  Antisense strand to SEQ ID NO: 1086752
accucuaagccguuaucua

SEQ ID NO: 1086754 - RNA, 19 nt, Artificial Sequence
  Description of Artificial Sequence: Synthetic oligonucleotide
  Sense strand starting at position 2475 of SEQ ID NO: 915530
ggcagaaagugagucuaga

SEQ ID NO: 1086755 - RNA, 19 nt, Artificial Sequence
  Description of Artificial Sequence: Synthetic oligonucleotide
  Antisense strand to SEQ ID NO: 1086754
ucuagacucacuuucugcc

SEQ ID NO: 1086756 - RNA, 19 nt, Artificial Sequence
  Description of Artificial Sequence: Synthetic oligonucleotide
  Sense strand starting at position 2544 of SEQ ID NO: 915530
ugagaaguauugcucugaa

SEQ ID NO: 1086757 - RNA, 19 nt, Artificial Sequence
  Description of Artificial Sequence: Synthetic oligonucleotide
  Antisense strand to SEQ ID NO: 1086756
uucagagcaauacuucuca

SEQ ID NO: 1086758 - RNA, 19 nt, Artificial Sequence
  Description of Artificial Sequence: Synthetic oligonucleotide
  Sense strand starting at position 2547 of SEQ ID NO: 915530
gaaguauugcucugaacac

SEQ ID NO: 1086759 - RNA, 19 nt, Artificial Sequence
  Description of Artificial Sequence: Synthetic oligonucleotide
  Antisense strand to SEQ ID NO: 1086758
guguucagagcaauacuuc

SEQ ID NO: 1086760 - RNA, 19 nt, Artificial Sequence
  Description of Artificial Sequence: Synthetic oligonucleotide
  Sense strand starting at position 2664 of SEQ ID NO: 915530
uggcuuugggccuaucuua

SEQ ID NO: 1086761 - RNA, 19 nt, Artificial Sequence
  Description of Artificial Sequence: Synthetic oligonucleotide
  Antisense strand to SEQ ID NO: 1086760
uaagauaggcccaaagcca

SEQ ID NO: 1086762 - RNA, 19 nt, Artificial Sequence
  Description of Artificial Sequence: Synthetic oligonucleotide
  Sense strand starting at position 2672 of SEQ ID NO: 915530
ggccuaucuuaacccgaca

SEQ ID NO: 1086763 - RNA, 19 nt, Artificial Sequence
  Description of Artificial Sequence: Synthetic oligonucleotide
  Antisense strand to SEQ ID NO: 1086762
ugucggguuaagauaggcc

SEQ ID NO: 1086764 - RNA, 19 nt, Artificial Sequence
  Description of Artificial Sequence: Synthetic oligonucleotide
  Sense strand starting at position 2770 of SEQ ID NO: 915530
gguagcuugcaucauuaga

SEQ ID NO: 1086765 - RNA, 19 nt, Artificial Sequence
  Description of Artificial Sequence: Synthetic oligonucleotide
  Antisense strand to SEQ ID NO: 1086764
ucuaaugaugcaagcuacc

SEQ ID NO: 1086766 - RNA, 19 nt, Artificial Sequence
  Description of Artificial Sequence: Synthetic oligonucleotide
  Sense strand starting at position 2843 of SEQ ID NO: 915530
ggaaaugacucacugccua

SEQ ID NO: 1086767 - RNA, 19 nt, Artificial Sequence
  Description of Artificial Sequence: Synthetic oligonucleotide
  Antisense strand to SEQ ID NO: 1086766
uaggcagugagucauuucc

SEQ ID NO: 1086768 - RNA, 19 nt, Artificial Sequence
  Description of Artificial Sequence: Synthetic oligonucleotide
  Sense strand starting at position 2917 of SEQ ID NO: 915530
cccuucuguucuccaagga

SEQ ID NO: 1086769 - RNA, 19 nt, Artificial Sequence
  Description of Artificial Sequence: Synthetic oligonucleotide
  Antisense strand to SEQ ID NO: 1086768
uccuuggagaacagaaggg

SEQ ID NO: 1086770 - RNA, 19 nt, Artificial Sequence
  Description of Artificial Sequence: Synthetic oligonucleotide
  Sense strand starting at position 2992 of SEQ ID NO: 915530
ugcugugguccagaugaga

SEQ ID NO: 1086771 - RNA, 19 nt, Artificial Sequence
  Description of Artificial Sequence: Synthetic oligonucleotide
  Antisense strand to SEQ ID NO: 1086770
ucucaucuggaccacagca

SEQ ID NO: 1086772 - RNA, 19 nt, Artificial Sequence
  Description of Artificial Sequence: Synthetic oligonucleotide
  Sense strand starting at position 3243 of SEQ ID NO: 915530
gcauguggucugagcugga

SEQ ID NO: 1086773 - RNA, 19 nt, Artificial Sequence
  Description of Artificial Sequence: Synthetic oligonucleotide
  Antisense strand to SEQ ID NO: 1086772
uccagcucagaccacaugc

SEQ ID NO: 1086774 - RNA, 19 nt, Artificial Sequence
  Description of Artificial Sequence: Synthetic oligonucleotide
  Sense strand starting at position 3653 of SEQ ID NO: 915530
gagagaaccuuuguuuaca

SEQ ID NO: 1086775 - RNA, 19 nt, Artificial Sequence
  Description of Artificial Sequence: Synthetic oligonucleotide
  Antisense strand to SEQ ID NO: 1086774
uguaaacaaagguucucuc

SEQ ID NO: 1086776 - RNA, 19 nt, Artificial Sequence
  Description of Artificial Sequence: Synthetic oligonucleotide
  Sense strand starting at position 3654 of SEQ ID NO: 915530
agagaaccuuuguuuacaa

SEQ ID NO: 1086777 - RNA, 19 nt, Artificial Sequence
  Description of Artificial Sequence: Synthetic oligonucleotide
  Antisense strand to SEQ ID NO: 1086776
uuguaaacaaagguucucu

SEQ ID NO: 1086778 - RNA, 19 nt, Artificial Sequence
  Description of Artificial Sequence: Synthetic oligonucleotide
  Sense strand starting at position 3885 of SEQ ID NO: 915530
gccauuacuccauggguga

SEQ ID NO: 1086779 - RNA, 19 nt, Artificial Sequence
  Description of Artificial Sequence: Synthetic oligonucleotide
  Antisense strand to SEQ ID NO: 1086778
ucacccauggaguaauggc

SEQ ID NO: 1086780 - RNA, 19 nt, Artificial Sequence
  Description of Artificial Sequence: Synthetic oligonucleotide
  Sense strand starting at position 3886 of SEQ ID NO: 915530
ccauuacuccaugggugaa

SEQ ID NO: 1086781 - RNA, 19 nt, Artificial Sequence
  Description of Artificial Sequence: Synthetic oligonucleotide
  Antisense strand to SEQ ID NO: 1086780
uucacccauggaguaaugg

SEQ ID NO: 1086782 - RNA, 19 nt, Artificial Sequence
  Description of Artificial Sequence: Synthetic oligonucleotide
  Sense strand starting at position 3922 of SEQ ID NO: 915530
gaggcuuuguacucuuacu

SEQ ID NO: 1086783 - RNA, 19 nt, Artificial Sequence
  Description of Artificial Sequence: Synthetic oligonucleotide
  Antisense strand to SEQ ID NO: 1086782
aguaagaguacaaagccuc

SEQ ID NO: 1086784 - RNA, 19 nt, Artificial Sequence
  Description of Artificial Sequence: Synthetic oligonucleotide
  Sense strand starting at position 3940 of SEQ ID NO: 915530
uccuaugauucuccaagga

SEQ ID NO: 1086785 - RNA, 19 nt, Artificial Sequence
  Description of Artificial Sequence: Synthetic oligonucleotide
  Antisense strand to SEQ ID NO: 1086784
uccuuggagaaucauagga

SEQ ID NO: 1086786 - RNA, 19 nt, Artificial Sequence
  Description of Artificial Sequence: Synthetic oligonucleotide
  Sense strand starting at position 303 of SEQ ID NO: 915531
caagucaucucccgaaagg

SEQ ID NO: 1086787 - RNA, 19 nt, Artificial Sequence
  Description of Artificial Sequence: Synthetic oligonucleotide
  Antisense strand to SEQ ID NO: 1086786
ccuuucgggagaugacuug

SEQ ID NO: 1086788 - RNA, 19 nt, Artificial Sequence
  Description of Artificial Sequence: Synthetic oligonucleotide
  Sense strand starting at position 652 of SEQ ID NO: 915531
ugugcagucagcuguuaau

SEQ ID NO: 1086789 - RNA, 19 nt, Artificial Sequence
  Description of Artificial Sequence: Synthetic oligonucleotide
  Antisense strand to SEQ ID NO: 1086788
auuaacagcugacugcaca

SEQ ID NO: 1086790 - RNA, 19 nt, Artificial Sequence
  Description of Artificial Sequence: Synthetic oligonucleotide
  Sense strand starting at position 654 of SEQ ID NO: 915531
ugcagucagcuguuaaugu

SEQ ID NO: 1086791 - RNA, 19 nt, Artificial Sequence
  Description of Artificial Sequence: Synthetic oligonucleotide
  Antisense strand to SEQ ID NO: 1086790
acauuaacagcugacugca

SEQ ID NO: 1086792 - RNA, 19 nt, Artificial Sequence
  Description of Artificial Sequence: Synthetic oligonucleotide
  Sense strand starting at position 974 of SEQ ID NO: 915531
cacagaaggcgcugaugau

SEQ ID NO: 1086793 - RNA, 19 nt, Artificial Sequence
  Description of Artificial Sequence: Synthetic oligonucleotide
  Antisense strand to SEQ ID NO: 1086792
aucaucagcgccuucugug

SEQ ID NO: 1086794 - RNA, 19 nt, Artificial Sequence
  Description of Artificial Sequence: Synthetic oligonucleotide
  Sense strand starting at position 975 of SEQ ID NO: 915531
acagaaggcgcugaugauu

SEQ ID NO: 1086795 - RNA, 19 nt, Artificial Sequence
  Description of Artificial Sequence: Synthetic oligonucleotide
  Antisense strand to SEQ ID NO: 1086794
aaucaucagcgccuucugu

SEQ ID NO: 1086796 - RNA, 19 nt, Artificial Sequence
  Description of Artificial Sequence: Synthetic oligonucleotide
  Sense strand starting at position 984 of SEQ ID NO: 915531
gcugaugauuugaggugga

SEQ ID NO: 1086797 - RNA, 19 nt, Artificial Sequence
  Description of Artificial Sequence: Synthetic oligonucleotide
  Antisense strand to SEQ ID NO: 1086796
uccaccucaaaucaucagc

SEQ ID NO: 1086798 - RNA, 19 nt, Artificial Sequence
  Description of Artificial Sequence: Synthetic oligonucleotide
  Sense strand starting at position 1153 of SEQ ID NO: 915531
ggagaccagagcugucaaa

SEQ ID NO: 1086799 - RNA, 19 nt, Artificial Sequence
  Description of Artificial Sequence: Synthetic oligonucleotide
  Antisense strand to SEQ ID NO: 1086798
uuugacagcucuggucucc

SEQ ID NO: 1086800 - RNA, 19 nt, Artificial Sequence
  Description of Artificial Sequence: Synthetic oligonucleotide
  Sense strand starting at position 1190 of SEQ ID NO: 915531
ccugauguguccucuaagg

SEQ ID NO: 1086801 - RNA, 19 nt, Artificial Sequence
  Description of Artificial Sequence: Synthetic oligonucleotide
  Antisense strand to SEQ ID NO: 1086800
ccuuagaggacacaucagg

SEQ ID NO: 1086802 - RNA, 19 nt, Artificial Sequence
  Description of Artificial Sequence: Synthetic oligonucleotide
  Sense strand starting at position 1192 of SEQ ID NO: 915531
ugauguguccucuaagguc

SEQ ID NO: 1086803 - RNA, 19 nt, Artificial Sequence
  Description of Artificial Sequence: Synthetic oligonucleotide
  Antisense strand to SEQ ID NO: 1086802
gaccuuagaggacacauca

SEQ ID NO: 1086804 - RNA, 19 nt, Artificial Sequence
  Description of Artificial Sequence: Synthetic oligonucleotide
  Sense strand starting at position 1671 of SEQ ID NO: 915531
ggacucaugccacgcuuaa

SEQ ID NO: 1086805 - RNA, 19 nt, Artificial Sequence
  Description of Artificial Sequence: Synthetic oligonucleotide
  Antisense strand to SEQ ID NO: 1086804
uuaagcguggcaugagucc

SEQ ID NO: 1086806 - RNA, 19 nt, Artificial Sequence
  Description of Artificial Sequence: Synthetic oligonucleotide
  Sense strand starting at position 1680 of SEQ ID NO: 915531
ccacgcuuaagcugaguaa

SEQ ID NO: 1086807 - RNA, 19 nt, Artificial Sequence
  Description of Artificial Sequence: Synthetic oligonucleotide
  Antisense strand to SEQ ID NO: 1086806
uuacucagcuuaagcgugg

SEQ ID NO: 1086808 - RNA, 19 nt, Artificial Sequence
  Description of Artificial Sequence: Synthetic oligonucleotide
  Sense strand starting at position 1683 of SEQ ID NO: 915531
cgcuuaagcugaguaaguu

SEQ ID NO: 1086809 - RNA, 19 nt, Artificial Sequence
  Description of Artificial Sequence: Synthetic oligonucleotide
  Antisense strand to SEQ ID NO: 1086808
aacuuacucagcuuaagcg

SEQ ID NO: 1086810 - RNA, 19 nt, Artificial Sequence
  Description of Artificial Sequence: Synthetic oligonucleotide
  Sense strand starting at position 1684 of SEQ ID NO: 915531
gcuuaagcugaguaaguua

SEQ ID NO: 1086811 - RNA, 19 nt, Artificial Sequence
  Description of Artificial Sequence: Synthetic oligonucleotide
  Antisense strand to SEQ ID NO: 1086810
uaacuuacucagcuuaagc

SEQ ID NO: 1086812 - RNA, 19 nt, Artificial Sequence
  Description of Artificial Sequence: Synthetic oligonucleotide
  Sense strand starting at position 1982 of SEQ ID NO: 915531
gguccuuguuguccacuaa

SEQ ID NO: 1086813 - RNA, 19 nt, Artificial Sequence
  Description of Artificial Sequence: Synthetic oligonucleotide
  Antisense strand to SEQ ID NO: 1086812
uuaguggacaacaaggacc

SEQ ID NO: 1086814 - RNA, 19 nt, Artificial Sequence
  Description of Artificial Sequence: Synthetic oligonucleotide
  Sense strand starting at position 1983 of SEQ ID NO: 915531
guccuuguuguccacuaaa

SEQ ID NO: 1086815 - RNA, 19 nt, Artificial Sequence
  Description of Artificial Sequence: Synthetic oligonucleotide
  Antisense strand to SEQ ID NO: 1086814
uuuaguggacaacaaggac

SEQ ID NO: 1086816 - RNA, 19 nt, Artificial Sequence
  Description of Artificial Sequence: Synthetic oligonucleotide
  Sense strand starting at position 1986 of SEQ ID NO: 915531
cuuguuguccacuaaauga

SEQ ID NO: 1086817 - RNA, 19 nt, Artificial Sequence
  Description of Artificial Sequence: Synthetic oligonucleotide
  Antisense strand to SEQ ID NO: 1086816
ucauuuaguggacaacaag

SEQ ID NO: 1086818 - RNA, 19 nt, Artificial Sequence
  Description of Artificial Sequence: Synthetic oligonucleotide
  Sense strand starting at position 2000 of SEQ ID NO: 915531
aaugaucuguggcggcaaa

SEQ ID NO: 1086819 - RNA, 19 nt, Artificial Sequence
  Description of Artificial Sequence: Synthetic oligonucleotide
  Antisense strand to SEQ ID NO: 1086818
uuugccgccacagaucauu

SEQ ID NO: 1086820 - RNA, 19 nt, Artificial Sequence
  Description of Artificial Sequence: Synthetic oligonucleotide
  Sense strand starting at position 2001 of SEQ ID NO: 915531
augaucuguggcggcaaau

SEQ ID NO: 1086821 - RNA, 19 nt, Artificial Sequence
  Description of Artificial Sequence: Synthetic oligonucleotide
  Antisense strand to SEQ ID NO: 1086820
auuugccgccacagaucau

SEQ ID NO: 1086822 - RNA, 19 nt, Artificial Sequence
  Description of Artificial Sequence: Synthetic oligonucleotide
  Sense strand starting at position 2011 of SEQ ID NO: 915531
gcggcaaauugaucucaag

SEQ ID NO: 1086823 - RNA, 19 nt, Artificial Sequence
  Description of Artificial Sequence: Synthetic oligonucleotide
  Antisense strand to SEQ ID NO: 1086822
cuugagaucaauuugccgc

SEQ ID NO: 1086824 - RNA, 19 nt, Artificial Sequence
  Description of Artificial Sequence: Synthetic oligonucleotide
  Sense strand starting at position 2014 of SEQ ID NO: 915531
gcaaauugaucucaagcuu

SEQ ID NO: 1086825 - RNA, 19 nt, Artificial Sequence
  Description of Artificial Sequence: Synthetic oligonucleotide
  Antisense strand to SEQ ID NO: 1086824
aagcuugagaucaauuugc

SEQ ID NO: 1086826 - RNA, 19 nt, Artificial Sequence
  Description of Artificial Sequence: Synthetic oligonucleotide
  Sense strand starting at position 2043 of SEQ ID NO: 915531
gagauagaaugcugucuua

SEQ ID NO: 1086827 - RNA, 19 nt, Artificial Sequence
  Description of Artificial Sequence: Synthetic oligonucleotide
  Antisense strand to SEQ ID NO: 1086826
uaagacagcauucuaucuc

SEQ ID NO: 1086828 - RNA, 19 nt, Artificial Sequence
  Description of Artificial Sequence: Synthetic oligonucleotide
  Sense strand starting at position 2063 of SEQ ID NO: 915531
uuuauuaucucuguugcca

SEQ ID NO: 1086829 - RNA, 19 nt, Artificial Sequence
  Description of Artificial Sequence: Synthetic oligonucleotide
  Antisense strand to SEQ ID NO: 1086828
uggcaacagagauaauaaa

SEQ ID NO: 1086830 - RNA, 19 nt, Artificial Sequence
  Description of Artificial Sequence: Synthetic oligonucleotide
  Sense strand starting at position 2076 of SEQ ID NO: 915531
uugccaaaugcggaaacau

SEQ ID NO: 1086831 - RNA, 19 nt, Artificial Sequence
  Description of Artificial Sequence: Synthetic oligonucleotide
  Antisense strand to SEQ ID NO: 1086830
auguuuccgcauuuggcaa

SEQ ID NO: 1086832 - RNA, 19 nt, Artificial Sequence
  Description of Artificial Sequence: Synthetic oligonucleotide
  Sense strand starting at position 2112 of SEQ ID NO: 915531
guuaguuuaguguaucauu

SEQ ID NO: 1086833 - RNA, 19 nt, Artificial Sequence
  Description of Artificial Sequence: Synthetic oligonucleotide
  Antisense strand to SEQ ID NO: 1086832
aaugauacacuaaacuaac

SEQ ID NO: 1086834 - RNA, 19 nt, Artificial Sequence
  Description of Artificial Sequence: Synthetic oligonucleotide
  Sense strand starting at position 2154 of SEQ ID NO: 915531
ggcucuggaagcuguaaua

SEQ ID NO: 1086835 - RNA, 19 nt, Artificial Sequence
  Description of Artificial Sequence: Synthetic oligonucleotide
  Antisense strand to SEQ ID NO: 1086834
uauuacagcuuccagagcc

SEQ ID NO: 1086836 - RNA, 19 nt, Artificial Sequence
  Description of Artificial Sequence: Synthetic oligonucleotide
  Sense strand starting at position 2213 of SEQ ID NO: 915531
ggaacaaagucucacauca

SEQ ID NO: 1086837 - RNA, 19 nt, Artificial Sequence
  Description of Artificial Sequence: Synthetic oligonucleotide
  Antisense strand to SEQ ID NO: 1086836
ugaugugagacuuuguucc

SEQ ID NO: 1086838 - RNA, 19 nt, Artificial Sequence
  Description of Artificial Sequence: Synthetic oligonucleotide
  Sense strand starting at position 2570 of SEQ ID NO: 915531
agucccucccuguaggauu

SEQ ID NO: 1086839 - RNA, 19 nt, Artificial Sequence
  Description of Artificial Sequence: Synthetic oligonucleotide
  Antisense strand to SEQ ID NO: 1086838
aauccuacagggagggacu

SEQ ID NO: 1086840 - RNA, 19 nt, Artificial Sequence
  Description of Artificial Sequence: Synthetic oligonucleotide
  Sense strand starting at position 2683 of SEQ ID NO: 915531
gggaguaacuccgugcuga

SEQ ID NO: 1086841 - RNA, 19 nt, Artificial Sequence
  Description of Artificial Sequence: Synthetic oligonucleotide
  Antisense strand to SEQ ID NO: 1086840
ucagcacggaguuacuccc

SEQ ID NO: 1086842 - RNA, 19 nt, Artificial Sequence
  Description of Artificial Sequence: Synthetic oligonucleotide
  Sense strand starting at position 2684 of SEQ ID NO: 915531
ggaguaacuccgugcugag

SEQ ID NO: 1086843 - RNA, 19 nt, Artificial Sequence
  Description of Artificial Sequence: Synthetic oligonucleotide
  Antisense strand to SEQ ID NO: 1086842
cucagcacggaguuacucc

SEQ ID NO: 1086844 - RNA, 19 nt, Artificial Sequence
  Description of Artificial Sequence: Synthetic oligonucleotide
  Sense strand starting at position 2733 of SEQ ID NO: 915531
ugaaauauugcagagugua

SEQ ID NO: 1086845 - RNA, 19 nt, Artificial Sequence
  Description of Artificial Sequence: Synthetic oligonucleotide
  Antisense strand to SEQ ID NO: 1086844
uacacucugcaauauuuca

SEQ ID NO: 1086846 - RNA, 19 nt, Artificial Sequence
  Description of Artificial Sequence: Synthetic oligonucleotide
  Sense strand starting at position 2821 of SEQ ID NO: 915531
cgaggucuuccucauagag

SEQ ID NO: 1086847 - RNA, 19 nt, Artificial Sequence
  Description of Artificial Sequence: Synthetic oligonucleotide
  Antisense strand to SEQ ID NO: 1086846
cucuaugaggaagaccucg

SEQ ID NO: 1086848 - RNA, 19 nt, Artificial Sequence
  Description of Artificial Sequence: Synthetic oligonucleotide
  Sense strand starting at position 2823 of SEQ ID NO: 915531
aggucuuccucauagagaa

SEQ ID NO: 1086849 - RNA, 19 nt, Artificial Sequence
  Description of Artificial Sequence: Synthetic oligonucleotide
  Antisense strand to SEQ ID NO: 1086848
uucucuaugaggaagaccu

SEQ ID NO: 1086850 - RNA, 19 nt, Artificial Sequence
  Description of Artificial Sequence: Synthetic oligonucleotide
  Sense strand starting at position 2946 of SEQ ID NO: 915531
ccaccugcugcucaaagaa

SEQ ID NO: 1086851 - RNA, 19 nt, Artificial Sequence
  Description of Artificial Sequence: Synthetic oligonucleotide
  Antisense strand to SEQ ID NO: 1086850
uucuuugagcagcaggugg

SEQ ID NO: 1086852 - RNA, 19 nt, Artificial Sequence
  Description of Artificial Sequence: Synthetic oligonucleotide
  Sense strand starting at position 3015 of SEQ ID NO: 915531
auguguugucaauggacug

SEQ ID NO: 1086853 - RNA, 19 nt, Artificial Sequence
  Description of Artificial Sequence: Synthetic oligonucleotide
  Antisense strand to SEQ ID NO: 1086852
caguccauugacaacacau

SEQ ID NO: 1086854 - RNA, 19 nt, Artificial Sequence
  Description of Artificial Sequence: Synthetic oligonucleotide
  Sense strand starting at position 3029 of SEQ ID NO: 915531
gacuguagugggugugaga

SEQ ID NO: 1086855 - RNA, 19 nt, Artificial Sequence
  Description of Artificial Sequence: Synthetic oligonucleotide
  Antisense strand to SEQ ID NO: 1086854
ucucacacccacuacaguc

SEQ ID NO: 1086856 - RNA, 19 nt, Artificial Sequence
  Description of Artificial Sequence: Synthetic oligonucleotide
  Sense strand starting at position 3031 of SEQ ID NO: 915531
cuguagugggugugagaga

SEQ ID NO: 1086857 - RNA, 19 nt, Artificial Sequence
  Description of Artificial Sequence: Synthetic oligonucleotide
  Antisense strand to SEQ ID NO: 1086856
ucucucacacccacuacag

SEQ ID NO: 1086858 - RNA, 19 nt, Artificial Sequence
  Description of Artificial Sequence: Synthetic oligonucleotide
  Sense strand starting at position 3148 of SEQ ID NO: 915531
gguugaguuugagacgauu

SEQ ID NO: 1086859 - RNA, 19 nt, Artificial Sequence
  Description of Artificial Sequence: Synthetic oligonucleotide
  Antisense strand to SEQ ID NO: 1086858
aaucgucucaaacucaacc

SEQ ID NO: 1086860 - RNA, 19 nt, Artificial Sequence
  Description of Artificial Sequence: Synthetic oligonucleotide
  Sense strand starting at position 3670 of SEQ ID NO: 915531
uaaacagugccgcgauaaa

SEQ ID NO: 1086861 - RNA, 19 nt, Artificial Sequence
  Description of Artificial Sequence: Synthetic oligonucleotide
  Antisense strand to SEQ ID NO: 1086860
uuuaucgcggcacuguuua

SEQ ID NO: 1086862 - RNA, 19 nt, Artificial Sequence
  Description of Artificial Sequence: Synthetic oligonucleotide
  Sense strand starting at position 3808 of SEQ ID NO: 915531
cccucaaauaugugggagu

SEQ ID NO: 1086863 - RNA, 19 nt, Artificial Sequence
  Description of Artificial Sequence: Synthetic oligonucleotide
  Antisense strand to SEQ ID NO: 1086862
acucccacauauuugaggg

SEQ ID NO: 1086864 - RNA, 19 nt, Artificial Sequence
  Description of Artificial Sequence: Synthetic oligonucleotide
  Sense strand starting at position 3809 of SEQ ID NO: 915531
ccucaaauaugugggagua

SEQ ID NO: 1086865 - RNA, 19 nt, Artificial Sequence
  Description of Artificial Sequence: Synthetic oligonucleotide
  Antisense strand to SEQ ID NO: 1086864
uacucccacauauuugagg

SEQ ID NO: 1086866 - RNA, 19 nt, Artificial Sequence
  Description of Artificial Sequence: Synthetic oligonucleotide
  Sense strand starting at position 169 of SEQ ID NO: 915532
gaggguuggugacaaacaa

SEQ ID NO: 1086867 - RNA, 19 nt, Artificial Sequence
  Description of Artificial Sequence: Synthetic oligonucleotide
  Antisense strand to SEQ ID NO: 1086866
uuguuugucaccaacccuc

SEQ ID NO: 1086868 - RNA, 19 nt, Artificial Sequence
  Description of Artificial Sequence: Synthetic oligonucleotide
  Sense strand starting at position 184 of SEQ ID NO: 915532
acaagacauucuggauaag

SEQ ID NO: 1086869 - RNA, 19 nt, Artificial Sequence
  Description of Artificial Sequence: Synthetic oligonucleotide
  Antisense strand to SEQ ID NO: 1086868
cuuauccagaaugucuugu

SEQ ID NO: 1086870 - RNA, 19 nt, Artificial Sequence
  Description of Artificial Sequence: Synthetic oligonucleotide
  Sense strand starting at position 218 of SEQ ID NO: 915532
uagaaagaccaggguguau

SEQ ID NO: 1086871 - RNA, 19 nt, Artificial Sequence
  Description of Artificial Sequence: Synthetic oligonucleotide
  Antisense strand to SEQ ID NO: 1086870
auacacccuggucuuucua

SEQ ID NO: 1086872 - RNA, 19 nt, Artificial Sequence
  Description of Artificial Sequence: Synthetic oligonucleotide
  Sense strand starting at position 233 of SEQ ID NO: 915532
guaucaugacacgguguga

SEQ ID NO: 1086873 - RNA, 19 nt, Artificial Sequence
  Description of Artificial Sequence: Synthetic oligonucleotide
  Antisense strand to SEQ ID NO: 1086872
ucacaccgugucaugauac

SEQ ID NO: 1086874 - RNA, 19 nt, Artificial Sequence
  Description of Artificial Sequence: Synthetic oligonucleotide
  Sense strand starting at position 447 of SEQ ID NO: 915532
cugcacaucgucugucaau

SEQ ID NO: 1086875 - RNA, 19 nt, Artificial Sequence
  Description of Artificial Sequence: Synthetic oligonucleotide
  Antisense strand to SEQ ID NO: 1086874
auugacagacgaugugcag

SEQ ID NO: 1086876 - RNA, 19 nt, Artificial Sequence
  Description of Artificial Sequence: Synthetic oligonucleotide
  Sense strand starting at position 448 of SEQ ID NO: 915532
ugcacaucgucugucaaua

SEQ ID NO: 1086877 - RNA, 19 nt, Artificial Sequence
  Description of Artificial Sequence: Synthetic oligonucleotide
  Antisense strand to SEQ ID NO: 1086876
uauugacagacgaugugca

SEQ ID NO: 1086878 - RNA, 19 nt, Artificial Sequence
  Description of Artificial Sequence: Synthetic oligonucleotide
  Sense strand starting at position 717 of SEQ ID NO: 915532
gcugcagagagcuauguuu

SEQ ID NO: 1086879 - RNA, 19 nt, Artificial Sequence
  Description of Artificial Sequence: Synthetic oligonucleotide
  Antisense strand to SEQ ID NO: 1086878
aaacauagcucucugcagc

SEQ ID NO: 1086880 - RNA, 19 nt, Artificial Sequence
  Description of Artificial Sequence: Synthetic oligonucleotide
  Sense strand starting at position 719 of SEQ ID NO: 915532
ugcagagagcuauguuugu

SEQ ID NO: 1086881 - RNA, 19 nt, Artificial Sequence
  Description of Artificial Sequence: Synthetic oligonucleotide
  Antisense strand to SEQ ID NO: 1086880
acaaacauagcucucugca

SEQ ID NO: 1086882 - RNA, 19 nt, Artificial Sequence
  Description of Artificial Sequence: Synthetic oligonucleotide
  Sense strand starting at position 723 of SEQ ID NO: 915532
gagagcuauguuuguacca

SEQ ID NO: 1086883 - RNA, 19 nt, Artificial Sequence
  Description of Artificial Sequence: Synthetic oligonucleotide
  Antisense strand to SEQ ID NO: 1086882
ugguacaaacauagcucuc

SEQ ID NO: 1086884 - RNA, 19 nt, Artificial Sequence
  Description of Artificial Sequence: Synthetic oligonucleotide
  Sense strand starting at position 831 of SEQ ID NO: 915532
uguaaagacuaggaggaau

SEQ ID NO: 1086885 - RNA, 19 nt, Artificial Sequence
  Description of Artificial Sequence: Synthetic oligonucleotide
  Antisense strand to SEQ ID NO: 1086884
auuccuccuagucuuuaca

SEQ ID NO: 1086886 - RNA, 19 nt, Artificial Sequence
  Description of Artificial Sequence: Synthetic oligonucleotide
  Sense strand starting at position 849 of SEQ ID NO: 915532
ugggacagcucuuucugaa

SEQ ID NO: 1086887 - RNA, 19 nt, Artificial Sequence
  Description of Artificial Sequence: Synthetic oligonucleotide
  Antisense strand to SEQ ID NO: 1086886
uucagaaagagcuguccca

SEQ ID NO: 1086888 - RNA, 19 nt, Artificial Sequence
  Description of Artificial Sequence: Synthetic oligonucleotide
  Sense strand starting at position 852 of SEQ ID NO: 915532
gacagcucuuucugaagga

SEQ ID NO: 1086889 - RNA, 19 nt, Artificial Sequence
  Description of Artificial Sequence: Synthetic oligonucleotide
  Antisense strand to SEQ ID NO: 1086888
uccuucagaaagagcuguc

SEQ ID NO: 1086890 - RNA, 19 nt, Artificial Sequence
  Description of Artificial Sequence: Synthetic oligonucleotide
  Sense strand starting at position 856 of SEQ ID NO: 915532
gcucuuucugaaggaauag

SEQ ID NO: 1086891 - RNA, 19 nt, Artificial Sequence
  Description of Artificial Sequence: Synthetic oligonucleotide
  Antisense strand to SEQ ID NO: 1086890
cuauuccuucagaaagagc

SEQ ID NO: 1086892 - RNA, 19 nt, Artificial Sequence
  Description of Artificial Sequence: Synthetic oligonucleotide
  Sense strand starting at position 993 of SEQ ID NO: 915532
ggagaacugcuugaccgua

SEQ ID NO: 1086893 - RNA, 19 nt, Artificial Sequence
  Description of Artificial Sequence: Synthetic oligonucleotide
  Antisense strand to SEQ ID NO: 1086892
uacggucaagcaguucucc

SEQ ID NO: 1086894 - RNA, 19 nt, Artificial Sequence
  Description of Artificial Sequence: Synthetic oligonucleotide
  Sense strand starting at position 998 of SEQ ID NO: 915532
acugcuugaccguagaagu

SEQ ID NO: 1086895 - RNA, 19 nt, Artificial Sequence
  Description of Artificial Sequence: Synthetic oligonucleotide
  Antisense strand to SEQ ID NO: 1086894
acuucuacggucaagcagu

SEQ ID NO: 1086896 - RNA, 19 nt, Artificial Sequence
  Description of Artificial Sequence: Synthetic oligonucleotide
  Sense strand starting at position 1138 of SEQ ID NO: 915532
cuugcuugacugcauagaa

SEQ ID NO: 1086897 - RNA, 19 nt, Artificial Sequence
  Description of Artificial Sequence: Synthetic oligonucleotide
  Antisense strand to SEQ ID NO: 1086896
uucuaugcagucaagcaag

SEQ ID NO: 1086898 - RNA, 19 nt, Artificial Sequence
  Description of Artificial Sequence: Synthetic oligonucleotide
  Sense strand starting at position 1257 of SEQ ID NO: 915532
uucugugccuuucgggauu

SEQ ID NO: 1086899 - RNA, 19 nt, Artificial Sequence
  Description of Artificial Sequence: Synthetic oligonucleotide
  Antisense strand to SEQ ID NO: 1086898
aaucccgaaaggcacagaa

SEQ ID NO: 1086900 - RNA, 19 nt, Artificial Sequence
  Description of Artificial Sequence: Synthetic oligonucleotide
  Sense strand starting at position 1283 of SEQ ID NO: 915532
augugaauguacuauaugu

SEQ ID NO: 1086901 - RNA, 19 nt, Artificial Sequence
  Description of Artificial Sequence: Synthetic oligonucleotide
  Antisense strand to SEQ ID NO: 1086900
acauauaguacauucacau

SEQ ID NO: 1086902 - RNA, 19 nt, Artificial Sequence
  Description of Artificial Sequence: Synthetic oligonucleotide
  Sense strand starting at position 1285 of SEQ ID NO: 915532
gugaauguacuauauguau

SEQ ID NO: 1086903 - RNA, 19 nt, Artificial Sequence
  Description of Artificial Sequence: Synthetic oligonucleotide
  Antisense strand to SEQ ID NO: 1086902
auacauauaguacauucac

SEQ ID NO: 1086904 - RNA, 19 nt, Artificial Sequence
  Description of Artificial Sequence: Synthetic oligonucleotide
  Sense strand starting at position 2363 of SEQ ID NO: 915532
gucucuaggcuccaaauca

SEQ ID NO: 1086905 - RNA, 19 nt, Artificial Sequence
  Description of Artificial Sequence: Synthetic oligonucleotide
  Antisense strand to SEQ ID NO: 1086904
ugauuuggagccuagagac

SEQ ID NO: 1086906 - RNA, 19 nt, Artificial Sequence
  Description of Artificial Sequence: Synthetic oligonucleotide
  Sense strand starting at position 2389 of SEQ ID NO: 915532
agccuuaagugcugagagu

SEQ ID NO: 1086907 - RNA, 19 nt, Artificial Sequence
  Description of Artificial Sequence: Synthetic oligonucleotide
  Antisense strand to SEQ ID NO: 1086906
acucucagcacuuaaggcu

SEQ ID NO: 1086908 - RNA, 19 nt, Artificial Sequence
  Description of Artificial Sequence: Synthetic oligonucleotide
  Sense strand starting at position 2390 of SEQ ID NO: 915532
gccuuaagugcugagaguu

SEQ ID NO: 1086909 - RNA, 19 nt, Artificial Sequence
  Description of Artificial Sequence: Synthetic oligonucleotide
  Antisense strand to SEQ ID NO: 1086908
aacucucagcacuuaaggc

SEQ ID NO: 1086910 - RNA, 19 nt, Artificial Sequence
  Description of Artificial Sequence: Synthetic oligonucleotide
  Sense strand starting at position 2450 of SEQ ID NO: 915532
cccacuucccgagaaagca

SEQ ID NO: 1086911 - RNA, 19 nt, Artificial Sequence
  Description of Artificial Sequence: Synthetic oligonucleotide
  Antisense strand to SEQ ID NO: 1086910
ugcuuucucgggaaguggg

SEQ ID NO: 1086912 - RNA, 19 nt, Artificial Sequence
  Description of Artificial Sequence: Synthetic oligonucleotide
  Sense strand starting at position 2482 of SEQ ID NO: 915532
acaggugacacgugggaaa

SEQ ID NO: 1086913 - RNA, 19 nt, Artificial Sequence
  Description of Artificial Sequence: Synthetic oligonucleotide
  Antisense strand to SEQ ID NO: 1086912
uuucccacgugucaccugu

SEQ ID NO: 1086914 - RNA, 19 nt, Artificial Sequence
  Description of Artificial Sequence: Synthetic oligonucleotide
  Sense strand starting at position 2891 of SEQ ID NO: 915532
cucagugacucagaguuua

SEQ ID NO: 1086915 - RNA, 19 nt, Artificial Sequence
  Description of Artificial Sequence: Synthetic oligonucleotide
  Antisense strand to SEQ ID NO: 1086914
uaaacucugagucacugag

SEQ ID NO: 1086916 - RNA, 19 nt, Artificial Sequence
  Description of Artificial Sequence: Synthetic oligonucleotide
  Sense strand starting at position 2899 of SEQ ID NO: 915532
cucagaguuuaugagaggu

SEQ ID NO: 1086917 - RNA, 19 nt, Artificial Sequence
  Description of Artificial Sequence: Synthetic oligonucleotide
  Antisense strand to SEQ ID NO: 1086916
accucucauaaacucugag

SEQ ID NO: 1086918 - RNA, 19 nt, Artificial Sequence
  Description of Artificial Sequence: Synthetic oligonucleotide
  Sense strand starting at position 2901 of SEQ ID NO: 915532
cagaguuuaugagagguua

SEQ ID NO: 1086919 - RNA, 19 nt, Artificial Sequence
  Description of Artificial Sequence: Synthetic oligonucleotide
  Antisense strand to SEQ ID NO: 1086918
uaaccucucauaaacucug

SEQ ID NO: 1086920 - RNA, 19 nt, Artificial Sequence
  Description of Artificial Sequence: Synthetic oligonucleotide
  Sense strand starting at position 2984 of SEQ ID NO: 915532
caaguaaggguuugagcaa

SEQ ID NO: 1086921 - RNA, 19 nt, Artificial Sequence
  Description of Artificial Sequence: Synthetic oligonucleotide
  Antisense strand to SEQ ID NO: 1086920
uugcucaaacccuuacuug

SEQ ID NO: 1086922 - RNA, 19 nt, Artificial Sequence
  Description of Artificial Sequence: Synthetic oligonucleotide
  Sense strand starting at position 3335 of SEQ ID NO: 915532
acucuuaucucugguaaga

SEQ ID NO: 1086923 - RNA, 19 nt, Artificial Sequence
  Description of Artificial Sequence: Synthetic oligonucleotide
  Antisense strand to SEQ ID NO: 1086922
ucuuaccagagauaagagu

SEQ ID NO: 1086924 - RNA, 19 nt, Artificial Sequence
  Description of Artificial Sequence: Synthetic oligonucleotide
  Sense strand starting at position 3337 of SEQ ID NO: 915532
ucuuaucucugguaagaaa

SEQ ID NO: 1086925 - RNA, 19 nt, Artificial Sequence
  Description of Artificial Sequence: Synthetic oligonucleotide
  Antisense strand to SEQ ID NO: 1086924
uuucuuaccagagauaaga

SEQ ID NO: 1086926 - RNA, 19 nt, Artificial Sequence
  Description of Artificial Sequence: Synthetic oligonucleotide
  Sense strand starting at position 3375 of SEQ ID NO: 915532
ccuggagcggcuuauguaa

SEQ ID NO: 1086927 - RNA, 19 nt, Artificial Sequence
  Description of Artificial Sequence: Synthetic oligonucleotide
  Antisense strand to SEQ ID NO: 1086926
uuacauaagccgcuccagg

SEQ ID NO: 1086928 - RNA, 19 nt, Artificial Sequence
  Description of Artificial Sequence: Synthetic oligonucleotide
  Sense strand starting at position 3472 of SEQ ID NO: 915532
gccgggugugugcuaagua

SEQ ID NO: 1086929 - RNA, 19 nt, Artificial Sequence
  Description of Artificial Sequence: Synthetic oligonucleotide
  Antisense strand to SEQ ID NO: 1086928
uacuuagcacacacccggc

SEQ ID NO: 1086930 - RNA, 19 nt, Artificial Sequence
  Description of Artificial Sequence: Synthetic oligonucleotide
  Sense strand starting at position 3475 of SEQ ID NO: 915532
gggugugugcuaaguagag

SEQ ID NO: 1086931 - RNA, 19 nt, Artificial Sequence
  Description of Artificial Sequence: Synthetic oligonucleotide
  Antisense strand to SEQ ID NO: 1086930
cucuacuuagcacacaccc

SEQ ID NO: 1086932 - RNA, 19 nt, Artificial Sequence
  Description of Artificial Sequence: Synthetic oligonucleotide
  Sense strand starting at position 3481 of SEQ ID NO: 915532
gugcuaaguagagguuuga

SEQ ID NO: 1086933 - RNA, 19 nt, Artificial Sequence
  Description of Artificial Sequence: Synthetic oligonucleotide
  Antisense strand to SEQ ID NO: 1086932
ucaaaccucuacuuagcac

SEQ ID NO: 1086934 - RNA, 19 nt, Artificial Sequence
  Description of Artificial Sequence: Synthetic oligonucleotide
  Sense strand starting at position 3526 of SEQ ID NO: 915532
ggccgaagugugcaagaaa

SEQ ID NO: 1086935 - RNA, 19 nt, Artificial Sequence
  Description of Artificial Sequence: Synthetic oligonucleotide
  Antisense strand to SEQ ID NO: 1086934
uuucuugcacacuucggcc

SEQ ID NO: 1086936 - RNA, 19 nt, Artificial Sequence
  Description of Artificial Sequence: Synthetic oligonucleotide
  Sense strand starting at position 3527 of SEQ ID NO: 915532
gccgaagugugcaagaaag

SEQ ID NO: 1086937 - RNA, 19 nt, Artificial Sequence
  Description of Artificial Sequence: Synthetic oligonucleotide
  Antisense strand to SEQ ID NO: 1086936
cuuucuugcacacuucggc

SEQ ID NO: 1086938 - RNA, 19 nt, Artificial Sequence
  Description of Artificial Sequence: Synthetic oligonucleotide
  Sense strand starting at position 3529 of SEQ ID NO: 915532
cgaagugugcaagaaaggu

SEQ ID NO: 1086939 - RNA, 19 nt, Artificial Sequence
  Description of Artificial Sequence: Synthetic oligonucleotide
  Antisense strand to SEQ ID NO: 1086938
accuuucuugcacacuucg

SEQ ID NO: 1086940 - RNA, 19 nt, Artificial Sequence
  Description of Artificial Sequence: Synthetic oligonucleotide
  Sense strand starting at position 3670 of SEQ ID NO: 915532
gguggucuugcccagauac

SEQ ID NO: 1086941 - RNA, 19 nt, Artificial Sequence
  Description of Artificial Sequence: Synthetic oligonucleotide
  Antisense strand to SEQ ID NO: 1086940
guaucugggcaagaccacc

SEQ ID NO: 1086942 - RNA, 19 nt, Artificial Sequence
  Description of Artificial Sequence: Synthetic oligonucleotide
  Sense strand starting at position 49 of SEQ ID NO: 915533
uggagugauagauggccuu

SEQ ID NO: 1086943 - RNA, 19 nt, Artificial Sequence
  Description of Artificial Sequence: Synthetic oligonucleotide
  Antisense strand to SEQ ID NO: 1086942
aaggccaucuaucacucca

SEQ ID NO: 1086944 - RNA, 19 nt, Artificial Sequence
  Description of Artificial Sequence: Synthetic oligonucleotide
  Sense strand starting at position 653 of SEQ ID NO: 915533
ggagacuaauuugaguagu

SEQ ID NO: 1086945 - RNA, 19 nt, Artificial Sequence
  Description of Artificial Sequence: Synthetic oligonucleotide
  Antisense strand to SEQ ID NO: 1086944
acuacucaaauuagucucc

SEQ ID NO: 1086946 - RNA, 19 nt, Artificial Sequence
  Description of Artificial Sequence: Synthetic oligonucleotide
  Sense strand starting at position 985 of SEQ ID NO: 915533
uguaucguagaguauuaau

SEQ ID NO: 1086947 - RNA, 19 nt, Artificial Sequence
  Description of Artificial Sequence: Synthetic oligonucleotide
  Antisense strand to SEQ ID NO: 1086946
auuaauacucuacgauaca

SEQ ID NO: 1086948 - RNA, 19 nt, Artificial Sequence
  Description of Artificial Sequence: Synthetic oligonucleotide
  Sense strand starting at position 1098 of SEQ ID NO: 915533
uuguguuaacuccaaacac

SEQ ID NO: 1086949 - RNA, 19 nt, Artificial Sequence
  Description of Artificial Sequence: Synthetic oligonucleotide
  Antisense strand to SEQ ID NO: 1086948
guguuuggaguuaacacaa

SEQ ID NO: 1086950 - RNA, 19 nt, Artificial Sequence
  Description of Artificial Sequence: Synthetic oligonucleotide
  Sense strand starting at position 1282 of SEQ ID NO: 915533
ggauaaagcgcugacacuu

SEQ ID NO: 1086951 - RNA, 19 nt, Artificial Sequence
  Description of Artificial Sequence: Synthetic oligonucleotide
  Antisense strand to SEQ ID NO: 1086950
aagugucagcgcuuuaucc

SEQ ID NO: 1086952 - RNA, 19 nt, Artificial Sequence
  Description of Artificial Sequence: Synthetic oligonucleotide
  Sense strand starting at position 1436 of SEQ ID NO: 915533
agugaaguucuccaacaca

SEQ ID NO: 1086953 - RNA, 19 nt, Artificial Sequence
  Description of Artificial Sequence: Synthetic oligonucleotide
  Antisense strand to SEQ ID NO: 1086952
uguguuggagaacuucacu

SEQ ID NO: 1086954 - RNA, 19 nt, Artificial Sequence
  Description of Artificial Sequence: Synthetic oligonucleotide
  Sense strand starting at position 1793 of SEQ ID NO: 915533
auaauuauuuggcaaagag

SEQ ID NO: 1086955 - RNA, 19 nt, Artificial Sequence
  Description of Artificial Sequence: Synthetic oligonucleotide
  Antisense strand to SEQ ID NO: 1086954
cucuuugccaaauaauuau

SEQ ID NO: 1086956 - RNA, 19 nt, Artificial Sequence
  Description of Artificial Sequence: Synthetic oligonucleotide
  Sense strand starting at position 1860 of SEQ ID NO: 915533
agauccugaucucugaguu

SEQ ID NO: 1086957 - RNA, 19 nt, Artificial Sequence
  Description of Artificial Sequence: Synthetic oligonucleotide
  Antisense strand to SEQ ID NO: 1086956
aacucagagaucaggaucu

SEQ ID NO: 1086958 - RNA, 19 nt, Artificial Sequence
  Description of Artificial Sequence: Synthetic oligonucleotide
  Sense strand starting at position 1861 of SEQ ID NO: 915533
gauccugaucucugaguuu

SEQ ID NO: 1086959 - RNA, 19 nt, Artificial Sequence
  Description of Artificial Sequence: Synthetic oligonucleotide
  Antisense strand to SEQ ID NO: 1086958
aaacucagagaucaggauc

SEQ ID NO: 1086960 - RNA, 19 nt, Artificial Sequence
  Description of Artificial Sequence: Synthetic oligonucleotide
  Sense strand starting at position 1868 of SEQ ID NO: 915533
aucucugaguuuccugaua

SEQ ID NO: 1086961 - RNA, 19 nt, Artificial Sequence
  Description of Artificial Sequence: Synthetic oligonucleotide
  Antisense strand to SEQ ID NO: 1086960
uaucaggaaacucagagau

SEQ ID NO: 1086962 - RNA, 19 nt, Artificial Sequence
  Description of Artificial Sequence: Synthetic oligonucleotide
  Sense strand starting at position 1881 of SEQ ID NO: 915533
cugauaagucaacggugga

SEQ ID NO: 1086963 - RNA, 19 nt, Artificial Sequence
  Description of Artificial Sequence: Synthetic oligonucleotide
  Antisense strand to SEQ ID NO: 1086962
uccaccguugacuuaucag

SEQ ID NO: 1086964 - RNA, 19 nt, Artificial Sequence
  Description of Artificial Sequence: Synthetic oligonucleotide
  Sense strand starting at position 1882 of SEQ ID NO: 915533
ugauaagucaacgguggau

SEQ ID NO: 1086965 - RNA, 19 nt, Artificial Sequence
  Description of Artificial Sequence: Synthetic oligonucleotide
  Antisense strand to SEQ ID NO: 1086964
auccaccguugacuuauca

SEQ ID NO: 1086966 - RNA, 19 nt, Artificial Sequence
  Description of Artificial Sequence: Synthetic oligonucleotide
  Sense strand starting at position 1988 of SEQ ID NO: 915533
caaagugaauugcuuuaug

SEQ ID NO: 1086967 - RNA, 19 nt, Artificial Sequence
  Description of Artificial Sequence: Synthetic oligonucleotide
  Antisense strand to SEQ ID NO: 1086966
cauaaagcaauucacuuug

SEQ ID NO: 1086968 - RNA, 19 nt, Artificial Sequence
  Description of Artificial Sequence: Synthetic oligonucleotide
  Sense strand starting at position 1991 of SEQ ID NO: 915533
agugaauugcuuuaugaug

SEQ ID NO: 1086969 - RNA, 19 nt, Artificial Sequence
  Description of Artificial Sequence: Synthetic oligonucleotide
  Antisense strand to SEQ ID NO: 1086968
caucauaaagcaauucacu

SEQ ID NO: 1086970 - RNA, 19 nt, Artificial Sequence
  Description of Artificial Sequence: Synthetic oligonucleotide
  Sense strand starting at position 2006 of SEQ ID NO: 915533
gauguucuuguacaaagau

SEQ ID NO: 1086971 - RNA, 19 nt, Artificial Sequence
  Description of Artificial Sequence: Synthetic oligonucleotide
  Antisense strand to SEQ ID NO: 1086970
aucuuuguacaagaacauc

SEQ ID NO: 1086972 - RNA, 19 nt, Artificial Sequence
  Description of Artificial Sequence: Synthetic oligonucleotide
  Sense strand starting at position 2101 of SEQ ID NO: 915533
guggaauguugaguuuaaa

SEQ ID NO: 1086973 - RNA, 19 nt, Artificial Sequence
  Description of Artificial Sequence: Synthetic oligonucleotide
  Antisense strand to SEQ ID NO: 1086972
uuuaaacucaacauuccac

SEQ ID NO: 1086974 - RNA, 19 nt, Artificial Sequence
  Description of Artificial Sequence: Synthetic oligonucleotide
  Sense strand starting at position 2135 of SEQ ID NO: 915533
aguguaguucugcuucagu

SEQ ID NO: 1086975 - RNA, 19 nt, Artificial Sequence
  Description of Artificial Sequence: Synthetic oligonucleotide
  Antisense strand to SEQ ID NO: 1086974
acugaagcagaacuacacu

SEQ ID NO: 1086976 - RNA, 19 nt, Artificial Sequence
  Description of Artificial Sequence: Synthetic oligonucleotide
  Sense strand starting at position 2195 of SEQ ID NO: 915533
uagggaaauuaggauaaga

SEQ ID NO: 1086977 - RNA, 19 nt, Artificial Sequence
  Description of Artificial Sequence: Synthetic oligonucleotide
  Antisense strand to SEQ ID NO: 1086976
ucuuauccuaauuucccua

SEQ ID NO: 1086978 - RNA, 19 nt, Artificial Sequence
  Description of Artificial Sequence: Synthetic oligonucleotide
  Sense strand starting at position 2372 of SEQ ID NO: 915533
ugagcucaaugucucauau

SEQ ID NO: 1086979 - RNA, 19 nt, Artificial Sequence
  Description of Artificial Sequence: Synthetic oligonucleotide
  Antisense strand to SEQ ID NO: 1086978
auaugagacauugagcuca

SEQ ID NO: 1086980 - RNA, 19 nt, Artificial Sequence
  Description of Artificial Sequence: Synthetic oligonucleotide
  Sense strand starting at position 2416 of SEQ ID NO: 915533
acuguaaugucaucauaua

SEQ ID NO: 1086981 - RNA, 19 nt, Artificial Sequence
  Description of Artificial Sequence: Synthetic oligonucleotide
  Antisense strand to SEQ ID NO: 1086980
uauaugaugacauuacagu

SEQ ID NO: 1086982 - RNA, 19 nt, Artificial Sequence
  Description of Artificial Sequence: Synthetic oligonucleotide
  Sense strand starting at position 2417 of SEQ ID NO: 915533
cuguaaugucaucauauaa

SEQ ID NO: 1086983 - RNA, 19 nt, Artificial Sequence
  Description of Artificial Sequence: Synthetic oligonucleotide
  Antisense strand to SEQ ID NO: 1086982
uuauaugaugacauuacag

SEQ ID NO: 1086984 - RNA, 19 nt, Artificial Sequence
  Description of Artificial Sequence: Synthetic oligonucleotide
  Sense strand starting at position 2443 of SEQ ID NO: 915533
gaagauacacagugugcua

SEQ ID NO: 1086985 - RNA, 19 nt, Artificial Sequence
  Description of Artificial Sequence: Synthetic oligonucleotide
  Antisense strand to SEQ ID NO: 1086984
uagcacacuguguaucuuc

SEQ ID NO: 1086986 - RNA, 19 nt, Artificial Sequence
  Description of Artificial Sequence: Synthetic oligonucleotide
  Sense strand starting at position 2450 of SEQ ID NO: 915533
cacagugugcuauggaaga

SEQ ID NO: 1086987 - RNA, 19 nt, Artificial Sequence
  Description of Artificial Sequence: Synthetic oligonucleotide
  Antisense strand to SEQ ID NO: 1086986
ucuuccauagcacacugug

SEQ ID NO: 1086988 - RNA, 19 nt, Artificial Sequence
  Description of Artificial Sequence: Synthetic oligonucleotide
  Sense strand starting at position 2452 of SEQ ID NO: 915533
cagugugcuauggaagauu

SEQ ID NO: 1086989 - RNA, 19 nt, Artificial Sequence
  Description of Artificial Sequence: Synthetic oligonucleotide
  Antisense strand to SEQ ID NO: 1086988
aaucuuccauagcacacug

SEQ ID NO: 1086990 - RNA, 19 nt, Artificial Sequence
  Description of Artificial Sequence: Synthetic oligonucleotide
  Sense strand starting at position 2461 of SEQ ID NO: 915533
auggaagauuaaggagaaa

SEQ ID NO: 1086991 - RNA, 19 nt, Artificial Sequence
  Description of Artificial Sequence: Synthetic oligonucleotide
  Antisense strand to SEQ ID NO: 1086990
uuucuccuuaaucuuccau

SEQ ID NO: 1086992 - RNA, 19 nt, Artificial Sequence
  Description of Artificial Sequence: Synthetic oligonucleotide
  Sense strand starting at position 2482 of SEQ ID NO: 915533
guuuaaugauaccuggaua

SEQ ID NO: 1086993 - RNA, 19 nt, Artificial Sequence
  Description of Artificial Sequence: Synthetic oligonucleotide
  Antisense strand to SEQ ID NO: 1086992
uauccagguaucauuaaac

SEQ ID NO: 1086994 - RNA, 19 nt, Artificial Sequence
  Description of Artificial Sequence: Synthetic oligonucleotide
  Sense strand starting at position 2851 of SEQ ID NO: 915533
ccuacucuugugggaagau

SEQ ID NO: 1086995 - RNA, 19 nt, Artificial Sequence
  Description of Artificial Sequence: Synthetic oligonucleotide
  Antisense strand to SEQ ID NO: 1086994
aucuucccacaagaguagg

SEQ ID NO: 1086996 - RNA, 19 nt, Artificial Sequence
  Description of Artificial Sequence: Synthetic oligonucleotide
  Sense strand starting at position 2951 of SEQ ID NO: 915533
aaagguguggcauaauugu

SEQ ID NO: 1086997 - RNA, 19 nt, Artificial Sequence
  Description of Artificial Sequence: Synthetic oligonucleotide
  Antisense strand to SEQ ID NO: 1086996
acaauuaugccacaccuuu

SEQ ID NO: 1086998 - RNA, 19 nt, Artificial Sequence
  Description of Artificial Sequence: Synthetic oligonucleotide
  Sense strand starting at position 2959 of SEQ ID NO: 915533
ggcauaauuguguaccuac

SEQ ID NO: 1086999 - RNA, 19 nt, Artificial Sequence
  Description of Artificial Sequence: Synthetic oligonucleotide
  Antisense strand to SEQ ID NO: 1086998
guagguacacaauuaugcc

SEQ ID NO: 1087000 - RNA, 19 nt, Artificial Sequence
  Description of Artificial Sequence: Synthetic oligonucleotide
  Sense strand starting at position 2968 of SEQ ID NO: 915533
guguaccuacaaggauauu

SEQ ID NO: 1087001 - RNA, 19 nt, Artificial Sequence
  Description of Artificial Sequence: Synthetic oligonucleotide
  Antisense strand to SEQ ID NO: 1087000
aauauccuuguagguacac

SEQ ID NO: 1087002 - RNA, 19 nt, Artificial Sequence
  Description of Artificial Sequence: Synthetic oligonucleotide
  Sense strand starting at position 3003 of SEQ ID NO: 915533
aauagcaugcacggauaua

SEQ ID NO: 1087003 - RNA, 19 nt, Artificial Sequence
  Description of Artificial Sequence: Synthetic oligonucleotide
  Antisense strand to SEQ ID NO: 1087002
uauauccgugcaugcuauu

SEQ ID NO: 1087004 - RNA, 19 nt, Artificial Sequence
  Description of Artificial Sequence: Synthetic oligonucleotide
  Sense strand starting at position 3004 of SEQ ID NO: 915533
auagcaugcacggauauaa

SEQ ID NO: 1087005 - RNA, 19 nt, Artificial Sequence
  Description of Artificial Sequence: Synthetic oligonucleotide
  Antisense strand to SEQ ID NO: 1087004
uuauauccgugcaugcuau

SEQ ID NO: 1087006 - RNA, 19 nt, Artificial Sequence
  Description of Artificial Sequence: Synthetic oligonucleotide
  Sense strand starting at position 3081 of SEQ ID NO: 915533
uuauucugccuacaagaag

SEQ ID NO: 1087007 - RNA, 19 nt, Artificial Sequence
  Description of Artificial Sequence: Synthetic oligonucleotide
  Antisense strand to SEQ ID NO: 1087006
cuucuuguaggcagaauaa

SEQ ID NO: 1087008 - RNA, 19 nt, Artificial Sequence
  Description of Artificial Sequence: Synthetic oligonucleotide
  Sense strand starting at position 3120 of SEQ ID NO: 915533
acuggucacccgugaaaca

SEQ ID NO: 1087009 - RNA, 19 nt, Artificial Sequence
  Description of Artificial Sequence: Synthetic oligonucleotide
  Antisense strand to SEQ ID NO: 1087008
uguuucacgggugaccagu

SEQ ID NO: 1087010 - RNA, 19 nt, Artificial Sequence
  Description of Artificial Sequence: Synthetic oligonucleotide
  Sense strand starting at position 3121 of SEQ ID NO: 915533
cuggucacccgugaaacau

SEQ ID NO: 1087011 - RNA, 19 nt, Artificial Sequence
  Description of Artificial Sequence: Synthetic oligonucleotide
  Antisense strand to SEQ ID NO: 1087010
auguuucacgggugaccag

SEQ ID NO: 1087012 - RNA, 19 nt, Artificial Sequence
  Description of Artificial Sequence: Synthetic oligonucleotide
  Sense strand starting at position 3147 of SEQ ID NO: 915533
ugcagauuccuggaugggu

SEQ ID NO: 1087013 - RNA, 19 nt, Artificial Sequence
  Description of Artificial Sequence: Synthetic oligonucleotide
  Antisense strand to SEQ ID NO: 1087012
acccauccaggaaucugca

SEQ ID NO: 1087014 - RNA, 19 nt, Artificial Sequence
  Description of Artificial Sequence: Synthetic oligonucleotide
  Sense strand starting at position 3504 of SEQ ID NO: 915533
ggugacuuuacagaaguuu

SEQ ID NO: 1087015 - RNA, 19 nt, Artificial Sequence
  Description of Artificial Sequence: Synthetic oligonucleotide
  Antisense strand to SEQ ID NO: 1087014
aaacuucuguaaagucacc

SEQ ID NO: 1087016 - RNA, 19 nt, Artificial Sequence
  Description of Artificial Sequence: Synthetic oligonucleotide
  Sense strand starting at position 3574 of SEQ ID NO: 915533
uuugauuuccucugagccu

SEQ ID NO: 1087017 - RNA, 19 nt, Artificial Sequence
  Description of Artificial Sequence: Synthetic oligonucleotide
  Antisense strand to SEQ ID NO: 1087016
aggcucagaggaaaucaaa

SEQ ID NO: 1087018 - RNA, 19 nt, Artificial Sequence
  Description of Artificial Sequence: Synthetic oligonucleotide
  Sense strand starting at position 3889 of SEQ ID NO: 915533
guaagaagugaacguucca

SEQ ID NO: 1087019 - RNA, 19 nt, Artificial Sequence
  Description of Artificial Sequence: Synthetic oligonucleotide
  Antisense strand to SEQ ID NO: 1087018
uggaacguucacuucuuac

SEQ ID NO: 1087020 - RNA, 19 nt, Artificial Sequence
  Description of Artificial Sequence: Synthetic oligonucleotide
  Sense strand starting at position 3954 of SEQ ID NO: 915533
ugauuacagcugugaauuc

SEQ ID NO: 1087021 - RNA, 19 nt, Artificial Sequence
  Description of Artificial Sequence: Synthetic oligonucleotide
  Antisense strand to SEQ ID NO: 1087020
gaauucacagcuguaauca

SEQ ID NO: 1087022 - RNA, 19 nt, Artificial Sequence
  Description of Artificial Sequence: Synthetic oligonucleotide
  Sense strand starting at position 58 of SEQ ID NO: 915534
aguagaacuugccuagaag

SEQ ID NO: 1087023 - RNA, 19 nt, Artificial Sequence
  Description of Artificial Sequence: Synthetic oligonucleotide
  Antisense strand to SEQ ID NO: 1087022
cuucuaggcaaguucuacu

SEQ ID NO: 1087024 - RNA, 19 nt, Artificial Sequence
  Description of Artificial Sequence: Synthetic oligonucleotide
  Sense strand starting at position 59 of SEQ ID NO: 915534
guagaacuugccuagaagu

SEQ ID NO: 1087025 - RNA, 19 nt, Artificial Sequence
  Description of Artificial Sequence: Synthetic oligonucleotide
  Antisense strand to SEQ ID NO: 1087024
acuucuaggcaaguucuac

SEQ ID NO: 1087026 - RNA, 19 nt, Artificial Sequence
  Description of Artificial Sequence: Synthetic oligonucleotide
  Sense strand starting at position 140 of SEQ ID NO: 915534
gauggcaaggcuuaccaaa

SEQ ID NO: 1087027 - RNA, 19 nt, Artificial Sequence
  Description of Artificial Sequence: Synthetic oligonucleotide
  Antisense strand to SEQ ID NO: 1087026
uuugguaagccuugccauc

SEQ ID NO: 1087028 - RNA, 19 nt, Artificial Sequence
  Description of Artificial Sequence: Synthetic oligonucleotide
  Sense strand starting at position 521 of SEQ ID NO: 915534
gcuucuguucugucaucuu

SEQ ID NO: 1087029 - RNA, 19 nt, Artificial Sequence
  Description of Artificial Sequence: Synthetic oligonucleotide
  Antisense strand to SEQ ID NO: 1087028
aagaugacagaacagaagc

SEQ ID NO: 1087030 - RNA, 19 nt, Artificial Sequence
  Description of Artificial Sequence: Synthetic oligonucleotide
  Sense strand starting at position 602 of SEQ ID NO: 915534
ugaaauuucugugucuugu

SEQ ID NO: 1087031 - RNA, 19 nt, Artificial Sequence
  Description of Artificial Sequence: Synthetic oligonucleotide
  Antisense strand to SEQ ID NO: 1087030
acaagacacagaaauuuca

SEQ ID NO: 1087032 - RNA, 19 nt, Artificial Sequence
  Description of Artificial Sequence: Synthetic oligonucleotide
  Sense strand starting at position 784 of SEQ ID NO: 915534
agagcuaugcuccauagac

SEQ ID NO: 1087033 - RNA, 19 nt, Artificial Sequence
  Description of Artificial Sequence: Synthetic oligonucleotide
  Antisense strand to SEQ ID NO: 1087032
gucuauggagcauagcucu

SEQ ID NO: 1087034 - RNA, 19 nt, Artificial Sequence
  Description of Artificial Sequence: Synthetic oligonucleotide
  Sense strand starting at position 786 of SEQ ID NO: 915534
agcuaugcuccauagacac

SEQ ID NO: 1087035 - RNA, 19 nt, Artificial Sequence
  Description of Artificial Sequence: Synthetic oligonucleotide
  Antisense strand to SEQ ID NO: 1087034
gugucuauggagcauagcu

SEQ ID NO: 1087036 - RNA, 19 nt, Artificial Sequence
  Description of Artificial Sequence: Synthetic oligonucleotide
  Sense strand starting at position 812 of SEQ ID NO: 915534
ucugacaaauggccauaua

SEQ ID NO: 1087037 - RNA, 19 nt, Artificial Sequence
  Description of Artificial Sequence: Synthetic oligonucleotide
  Antisense strand to SEQ ID NO: 1087036
uauauggccauuugucaga

SEQ ID NO: 1087038 - RNA, 19 nt, Artificial Sequence
  Description of Artificial Sequence: Synthetic oligonucleotide
  Sense strand starting at position 877 of SEQ ID NO: 915534
ugaauucagugguugagau

SEQ ID NO: 1087039 - RNA, 19 nt, Artificial Sequence
  Description of Artificial Sequence: Synthetic oligonucleotide
  Antisense strand to SEQ ID NO: 1087038
aucucaaccacugaauuca

SEQ ID NO: 1087040 - RNA, 19 nt, Artificial Sequence
  Description of Artificial Sequence: Synthetic oligonucleotide
  Sense strand starting at position 889 of SEQ ID NO: 915534
uugagauucgcauaccaga

SEQ ID NO: 1087041 - RNA, 19 nt, Artificial Sequence
  Description of Artificial Sequence: Synthetic oligonucleotide
  Antisense strand to SEQ ID NO: 1087040
ucugguaugcgaaucucaa

SEQ ID NO: 1087042 - RNA, 19 nt, Artificial Sequence
  Description of Artificial Sequence: Synthetic oligonucleotide
  Sense strand starting at position 1067 of SEQ ID NO: 915534
gcacaacuuucucuuggaa

SEQ ID NO: 1087043 - RNA, 19 nt, Artificial Sequence
  Description of Artificial Sequence: Synthetic oligonucleotide
  Antisense strand to SEQ ID NO: 1087042
uuccaagagaaaguugugc

SEQ ID NO: 1087044 - RNA, 19 nt, Artificial Sequence
  Description of Artificial Sequence: Synthetic oligonucleotide
  Sense strand starting at position 1079 of SEQ ID NO: 915534
cuuggaagcuauuccuaaa

SEQ ID NO: 1087045 - RNA, 19 nt, Artificial Sequence
  Description of Artificial Sequence: Synthetic oligonucleotide
  Antisense strand to SEQ ID NO: 1087044
uuuaggaauagcuuccaag

SEQ ID NO: 1087046 - RNA, 19 nt, Artificial Sequence
  Description of Artificial Sequence: Synthetic oligonucleotide
  Sense strand starting at position 1162 of SEQ ID NO: 915534
gugaaaucauuugagaacc

SEQ ID NO: 1087047 - RNA, 19 nt, Artificial Sequence
  Description of Artificial Sequence: Synthetic oligonucleotide
  Antisense strand to SEQ ID NO: 1087046
gguucucaaaugauuucac

SEQ ID NO: 1087048 - RNA, 19 nt, Artificial Sequence
  Description of Artificial Sequence: Synthetic oligonucleotide
  Sense strand starting at position 1222 of SEQ ID NO: 915534
cucauaugauuguuguaag

SEQ ID NO: 1087049 - RNA, 19 nt, Artificial Sequence
  Description of Artificial Sequence: Synthetic oligonucleotide
  Antisense strand to SEQ ID NO: 1087048
cuuacaacaaucauaugag

SEQ ID NO: 1087050 - RNA, 19 nt, Artificial Sequence
  Description of Artificial Sequence: Synthetic oligonucleotide
  Sense strand starting at position 1237 of SEQ ID NO: 915534
uaagauauagucuggacuu

SEQ ID NO: 1087051 - RNA, 19 nt, Artificial Sequence
  Description of Artificial Sequence: Synthetic oligonucleotide
  Antisense strand to SEQ ID NO: 1087050
aaguccagacuauaucuua

SEQ ID NO: 1087052 - RNA, 19 nt, Artificial Sequence
  Description of Artificial Sequence: Synthetic oligonucleotide
  Sense strand starting at position 1272 of SEQ ID NO: 915534
uucccagagguuuauaauu

SEQ ID NO: 1087053 - RNA, 19 nt, Artificial Sequence
  Description of Artificial Sequence: Synthetic oligonucleotide
  Antisense strand to SEQ ID NO: 1087052
aauuauaaaccucugggaa

SEQ ID NO: 1087054 - RNA, 19 nt, Artificial Sequence
  Description of Artificial Sequence: Synthetic oligonucleotide
  Sense strand starting at position 1390 of SEQ ID NO: 915534
cuaugauagcagggucaca

SEQ ID NO: 1087055 - RNA, 19 nt, Artificial Sequence
  Description of Artificial Sequence: Synthetic oligonucleotide
  Antisense strand to SEQ ID NO: 1087054
ugugacccugcuaucauag

SEQ ID NO: 1087056 - RNA, 19 nt, Artificial Sequence
  Description of Artificial Sequence: Synthetic oligonucleotide
  Sense strand starting at position 1431 of SEQ ID NO: 915534
ucauuaaaugugcagguau

SEQ ID NO: 1087057 - RNA, 19 nt, Artificial Sequence
  Description of Artificial Sequence: Synthetic oligonucleotide
  Antisense strand to SEQ ID NO: 1087056
auaccugcacauuuaauga

SEQ ID NO: 1087058 - RNA, 19 nt, Artificial Sequence
  Description of Artificial Sequence: Synthetic oligonucleotide
  Sense strand starting at position 1467 of SEQ ID NO: 915534
agcaauuaauguuuccuga

SEQ ID NO: 1087059 - RNA, 19 nt, Artificial Sequence
  Description of Artificial Sequence: Synthetic oligonucleotide
  Antisense strand to SEQ ID NO: 1087058
ucaggaaacauuaauugcu

SEQ ID NO: 1087060 - RNA, 19 nt, Artificial Sequence
  Description of Artificial Sequence: Synthetic oligonucleotide
  Sense strand starting at position 1528 of SEQ ID NO: 915534
gcacaaucauuucuugugu

SEQ ID NO: 1087061 - RNA, 19 nt, Artificial Sequence
  Description of Artificial Sequence: Synthetic oligonucleotide
  Antisense strand to SEQ ID NO: 1087060
acacaagaaaugauugugc

SEQ ID NO: 1087062 - RNA, 19 nt, Artificial Sequence
  Description of Artificial Sequence: Synthetic oligonucleotide
  Sense strand starting at position 1599 of SEQ ID NO: 915534
cuuagucacaaugguggaa

SEQ ID NO: 1087063 - RNA, 19 nt, Artificial Sequence
  Description of Artificial Sequence: Synthetic oligonucleotide
  Antisense strand to SEQ ID NO: 1087062
uuccaccauugugacuaag

SEQ ID NO: 1087064 - RNA, 19 nt, Artificial Sequence
  Description of Artificial Sequence: Synthetic oligonucleotide
  Sense strand starting at position 1622 of SEQ ID NO: 915534
aggagcuuuggucauauac

SEQ ID NO: 1087065 - RNA, 19 nt, Artificial Sequence
  Description of Artificial Sequence: Synthetic oligonucleotide
  Antisense strand to SEQ ID NO: 1087064
guauaugaccaaagcuccu

SEQ ID NO: 1087066 - RNA, 19 nt, Artificial Sequence
  Description of Artificial Sequence: Synthetic oligonucleotide
  Sense strand starting at position 1760 of SEQ ID NO: 915534
agucgaaugggauggagau

SEQ ID NO: 1087067 - RNA, 19 nt, Artificial Sequence
  Description of Artificial Sequence: Synthetic oligonucleotide
  Antisense strand to SEQ ID NO: 1087066
aucuccaucccauucgacu

SEQ ID NO: 1087068 - RNA, 19 nt, Artificial Sequence
  Description of Artificial Sequence: Synthetic oligonucleotide
  Sense strand starting at position 1761 of SEQ ID NO: 915534
gucgaaugggauggagauu

SEQ ID NO: 1087069 - RNA, 19 nt, Artificial Sequence
  Description of Artificial Sequence: Synthetic oligonucleotide
  Antisense strand to SEQ ID NO: 1087068
aaucuccaucccauucgac

SEQ ID NO: 1087070 - RNA, 19 nt, Artificial Sequence
  Description of Artificial Sequence: Synthetic oligonucleotide
  Sense strand starting at position 1812 of SEQ ID NO: 915534
gucauugucagggauagug

SEQ ID NO: 1087071 - RNA, 19 nt, Artificial Sequence
  Description of Artificial Sequence: Synthetic oligonucleotide
  Antisense strand to SEQ ID NO: 1087070
cacuaucccugacaaugac

SEQ ID NO: 1087072 - RNA, 19 nt, Artificial Sequence
  Description of Artificial Sequence: Synthetic oligonucleotide
  Sense strand starting at position 1830 of SEQ ID NO: 915534
gucauuguccaguauauga

SEQ ID NO: 1087073 - RNA, 19 nt, Artificial Sequence
  Description of Artificial Sequence: Synthetic oligonucleotide
  Antisense strand to SEQ ID NO: 1087072
ucauauacuggacaaugac

SEQ ID NO: 1087074 - RNA, 19 nt, Artificial Sequence
  Description of Artificial Sequence: Synthetic oligonucleotide
  Sense strand starting at position 1907 of SEQ ID NO: 915534
auacuaugacguugaacau

SEQ ID NO: 1087075 - RNA, 19 nt, Artificial Sequence
  Description of Artificial Sequence: Synthetic oligonucleotide
  Antisense strand to SEQ ID NO: 1087074
auguucaacgucauaguau

SEQ ID NO: 1087076 - RNA, 19 nt, Artificial Sequence
  Description of Artificial Sequence: Synthetic oligonucleotide
  Sense strand starting at position 1908 of SEQ ID NO: 915534
uacuaugacguugaacauu

SEQ ID NO: 1087077 - RNA, 19 nt, Artificial Sequence
  Description of Artificial Sequence: Synthetic oligonucleotide
  Antisense strand to SEQ ID NO: 1087076
aauguucaacgucauagua

SEQ ID NO: 1087078 - RNA, 19 nt, Artificial Sequence
  Description of Artificial Sequence: Synthetic oligonucleotide
  Sense strand starting at position 1966 of SEQ ID NO: 915534
ccuccaacuugaucuagga

SEQ ID NO: 1087079 - RNA, 19 nt, Artificial Sequence
  Description of Artificial Sequence: Synthetic oligonucleotide
  Antisense strand to SEQ ID NO: 1087078
uccuagaucaaguuggagg

SEQ ID NO: 1087080 - RNA, 19 nt, Artificial Sequence
  Description of Artificial Sequence: Synthetic oligonucleotide
  Sense strand starting at position 2079 of SEQ ID NO: 915534
cuuaaaucacacuaagugu

SEQ ID NO: 1087081 - RNA, 19 nt, Artificial Sequence
  Description of Artificial Sequence: Synthetic oligonucleotide
  Antisense strand to SEQ ID NO: 1087080
acacuuagugugauuuaag

SEQ ID NO: 1087082 - RNA, 19 nt, Artificial Sequence
  Description of Artificial Sequence: Synthetic oligonucleotide
  Sense strand starting at position 2758 of SEQ ID NO: 915534
cuugaauaauguguacaac

SEQ ID NO: 1087083 - RNA, 19 nt, Artificial Sequence
  Description of Artificial Sequence: Synthetic oligonucleotide
  Antisense strand to SEQ ID NO: 1087082
guuguacacauuauucaag

SEQ ID NO: 1087084 - RNA, 19 nt, Artificial Sequence
  Description of Artificial Sequence: Synthetic oligonucleotide
  Sense strand starting at position 2841 of SEQ ID NO: 915534
uguaaauauuaugugagac

SEQ ID NO: 1087085 - RNA, 19 nt, Artificial Sequence
  Description of Artificial Sequence: Synthetic oligonucleotide
  Antisense strand to SEQ ID NO: 1087084
gucucacauaauauuuaca

SEQ ID NO: 1087086 - RNA, 19 nt, Artificial Sequence
  Description of Artificial Sequence: Synthetic oligonucleotide
  Sense strand starting at position 2842 of SEQ ID NO: 915534
guaaauauuaugugagacg

SEQ ID NO: 1087087 - RNA, 19 nt, Artificial Sequence
  Description of Artificial Sequence: Synthetic oligonucleotide
  Antisense strand to SEQ ID NO: 1087086
cgucucacauaauauuuac

SEQ ID NO: 1087088 - RNA, 19 nt, Artificial Sequence
  Description of Artificial Sequence: Synthetic oligonucleotide
  Sense strand starting at position 2861 of SEQ ID NO: 915534
cacaaugugcuauggaaga

SEQ ID NO: 1087089 - RNA, 19 nt, Artificial Sequence
  Description of Artificial Sequence: Synthetic oligonucleotide
  Antisense strand to SEQ ID NO: 1087088
ucuuccauagcacauugug

SEQ ID NO: 1087090 - RNA, 19 nt, Artificial Sequence
  Description of Artificial Sequence: Synthetic oligonucleotide
  Sense strand starting at position 2937 of SEQ ID NO: 915534
auguauaccucauugaggu

SEQ ID NO: 1087091 - RNA, 19 nt, Artificial Sequence
  Description of Artificial Sequence: Synthetic oligonucleotide
  Antisense strand to SEQ ID NO: 1087090
accucaaugagguauacau

SEQ ID NO: 1087092 - RNA, 19 nt, Artificial Sequence
  Description of Artificial Sequence: Synthetic oligonucleotide
  Sense strand starting at position 2938 of SEQ ID NO: 915534
uguauaccucauugaggua

SEQ ID NO: 1087093 - RNA, 19 nt, Artificial Sequence
  Description of Artificial Sequence: Synthetic oligonucleotide
  Antisense strand to SEQ ID NO: 1087092
uaccucaaugagguauaca

SEQ ID NO: 1087094 - RNA, 19 nt, Artificial Sequence
  Description of Artificial Sequence: Synthetic oligonucleotide
  Sense strand starting at position 3262 of SEQ ID NO: 915534
ccuugagauaguugguuga

SEQ ID NO: 1087095 - RNA, 19 nt, Artificial Sequence
  Description of Artificial Sequence: Synthetic oligonucleotide
  Antisense strand to SEQ ID NO: 1087094
ucaaccaacuaucucaagg

SEQ ID NO: 1087096 - RNA, 19 nt, Artificial Sequence
  Description of Artificial Sequence: Synthetic oligonucleotide
  Sense strand starting at position 3264 of SEQ ID NO: 915534
uugagauaguugguugaga

SEQ ID NO: 1087097 - RNA, 19 nt, Artificial Sequence
  Description of Artificial Sequence: Synthetic oligonucleotide
  Antisense strand to SEQ ID NO: 1087096
ucucaaccaacuaucucaa

SEQ ID NO: 1087098 - RNA, 19 nt, Artificial Sequence
  Description of Artificial Sequence: Synthetic oligonucleotide
  Sense strand starting at position 3265 of SEQ ID NO: 915534
ugagauaguugguugagaa

SEQ ID NO: 1087099 - RNA, 19 nt, Artificial Sequence
  Description of Artificial Sequence: Synthetic oligonucleotide
  Antisense strand to SEQ ID NO: 1087098
uucucaaccaacuaucuca

SEQ ID NO: 1087100 - RNA, 19 nt, Artificial Sequence
  Description of Artificial Sequence: Synthetic oligonucleotide
  Sense strand starting at position 3266 of SEQ ID NO: 915534
gagauaguugguugagaag

SEQ ID NO: 1087101 - RNA, 19 nt, Artificial Sequence
  Description of Artificial Sequence: Synthetic oligonucleotide
  Antisense strand to SEQ ID NO: 1087100
cuucucaaccaacuaucuc

SEQ ID NO: 1087102 - RNA, 19 nt, Artificial Sequence
  Description of Artificial Sequence: Synthetic oligonucleotide
  Sense strand starting at position 351 of SEQ ID NO: 915535
gcggcaugagccugagaaa

SEQ ID NO: 1087103 - RNA, 19 nt, Artificial Sequence
  Description of Artificial Sequence: Synthetic oligonucleotide
  Antisense strand to SEQ ID NO: 1087102
uuucucaggcucaugccgc

SEQ ID NO: 1087104 - RNA, 19 nt, Artificial Sequence
  Description of Artificial Sequence: Synthetic oligonucleotide
  Sense strand starting at position 371 of SEQ ID NO: 915535
gguuguucuauuggcagga

SEQ ID NO: 1087105 - RNA, 19 nt, Artificial Sequence
  Description of Artificial Sequence: Synthetic oligonucleotide
  Antisense strand to SEQ ID NO: 1087104
uccugccaauagaacaacc

SEQ ID NO: 1087106 - RNA, 19 nt, Artificial Sequence
  Description of Artificial Sequence: Synthetic oligonucleotide
  Sense strand starting at position 372 of SEQ ID NO: 915535
guuguucuauuggcaggaa

SEQ ID NO: 1087107 - RNA, 19 nt, Artificial Sequence
  Description of Artificial Sequence: Synthetic oligonucleotide
  Antisense strand to SEQ ID NO: 1087106
uuccugccaauagaacaac

SEQ ID NO: 1087108 - RNA, 19 nt, Artificial Sequence
  Description of Artificial Sequence: Synthetic oligonucleotide
  Sense strand starting at position 375 of SEQ ID NO: 915535
guucuauuggcaggaaggu

SEQ ID NO: 1087109 - RNA, 19 nt, Artificial Sequence
  Description of Artificial Sequence: Synthetic oligonucleotide
  Antisense strand to SEQ ID NO: 1087108
accuuccugccaauagaac

SEQ ID NO: 1087110 - RNA, 19 nt, Artificial Sequence
  Description of Artificial Sequence: Synthetic oligonucleotide
  Sense strand starting at position 513 of SEQ ID NO: 915535
cucagugucaugcaguuga

SEQ ID NO: 1087111 - RNA, 19 nt, Artificial Sequence
  Description of Artificial Sequence: Synthetic oligonucleotide
  Antisense strand to SEQ ID NO: 1087110
ucaacugcaugacacugag

SEQ ID NO: 1087112 - RNA, 19 nt, Artificial Sequence
  Description of Artificial Sequence: Synthetic oligonucleotide
  Sense strand starting at position 517 of SEQ ID NO: 915535
gugucaugcaguugaggga

SEQ ID NO: 1087113 - RNA, 19 nt, Artificial Sequence
  Description of Artificial Sequence: Synthetic oligonucleotide
  Antisense strand to SEQ ID NO: 1087112
ucccucaacugcaugacac

SEQ ID NO: 1087114 - RNA, 19 nt, Artificial Sequence
  Description of Artificial Sequence: Synthetic oligonucleotide
  Sense strand starting at position 802 of SEQ ID NO: 915535
gcuguagauccucaaacca

SEQ ID NO: 1087115 - RNA, 19 nt, Artificial Sequence
  Description of Artificial Sequence: Synthetic oligonucleotide
  Antisense strand to SEQ ID NO: 1087114
ugguuugaggaucuacagc

SEQ ID NO: 1087116 - RNA, 19 nt, Artificial Sequence
  Description of Artificial Sequence: Synthetic oligonucleotide
  Sense strand starting at position 916 of SEQ ID NO: 915535
cugaccugucugcaaggua

SEQ ID NO: 1087117 - RNA, 19 nt, Artificial Sequence
  Description of Artificial Sequence: Synthetic oligonucleotide
  Antisense strand to SEQ ID NO: 1087116
uaccuugcagacaggucag

SEQ ID NO: 1087118 - RNA, 19 nt, Artificial Sequence
  Description of Artificial Sequence: Synthetic oligonucleotide
  Sense strand starting at position 1206 of SEQ ID NO: 915535
gcaguuaauuucuccaugu

SEQ ID NO: 1087119 - RNA, 19 nt, Artificial Sequence
  Description of Artificial Sequence: Synthetic oligonucleotide
  Antisense strand to SEQ ID NO: 1087118
acauggagaaauuaacugc

SEQ ID NO: 1087120 - RNA, 19 nt, Artificial Sequence
  Description of Artificial Sequence: Synthetic oligonucleotide
  Sense strand starting at position 1299 of SEQ ID NO: 915535
cucagucacgaugguagau

SEQ ID NO: 1087121 - RNA, 19 nt, Artificial Sequence
  Description of Artificial Sequence: Synthetic oligonucleotide
  Antisense strand to SEQ ID NO: 1087120
aucuaccaucgugacugag

SEQ ID NO: 1087122 - RNA, 19 nt, Artificial Sequence
  Description of Artificial Sequence: Synthetic oligonucleotide
  Sense strand starting at position 1326 of SEQ ID NO: 915535
gcuguugucauagauccag

SEQ ID NO: 1087123 - RNA, 19 nt, Artificial Sequence
  Description of Artificial Sequence: Synthetic oligonucleotide
  Antisense strand to SEQ ID NO: 1087122
cuggaucuaugacaacagc

SEQ ID NO: 1087124 - RNA, 19 nt, Artificial Sequence
  Description of Artificial Sequence: Synthetic oligonucleotide
  Sense strand starting at position 1383 of SEQ ID NO: 915535
uucugugccauugagaaag

SEQ ID NO: 1087125 - RNA, 19 nt, Artificial Sequence
  Description of Artificial Sequence: Synthetic oligonucleotide
  Antisense strand to SEQ ID NO: 1087124
cuuucucaauggcacagaa

SEQ ID NO: 1087126 - RNA, 19 nt, Artificial Sequence
  Description of Artificial Sequence: Synthetic oligonucleotide
  Sense strand starting at position 1544 of SEQ ID NO: 915535
cagugaaguucugcagggu

SEQ ID NO: 1087127 - RNA, 19 nt, Artificial Sequence
  Description of Artificial Sequence: Synthetic oligonucleotide
  Antisense strand to SEQ ID NO: 1087126
acccugcagaacuucacug

SEQ ID NO: 1087128 - RNA, 19 nt, Artificial Sequence
  Description of Artificial Sequence: Synthetic oligonucleotide
  Sense strand starting at position 1643 of SEQ ID NO: 915535
gcugcaggaggucauuaaa

SEQ ID NO: 1087129 - RNA, 19 nt, Artificial Sequence
  Description of Artificial Sequence: Synthetic oligonucleotide
  Antisense strand to SEQ ID NO: 1087128
uuuaaugaccuccugcagc

SEQ ID NO: 1087130 - RNA, 19 nt, Artificial Sequence
  Description of Artificial Sequence: Synthetic oligonucleotide
  Sense strand starting at position 1995 of SEQ ID NO: 915535
ugaguuaaagugugacuug

SEQ ID NO: 1087131 - RNA, 19 nt, Artificial Sequence
  Description of Artificial Sequence: Synthetic oligonucleotide
  Antisense strand to SEQ ID NO: 1087130
caagucacacuuuaacuca

SEQ ID NO: 1087132 - RNA, 19 nt, Artificial Sequence
  Description of Artificial Sequence: Synthetic oligonucleotide
  Sense strand starting at position 1998 of SEQ ID NO: 915535
guuaaagugugacuuggua

SEQ ID NO: 1087133 - RNA, 19 nt, Artificial Sequence
  Description of Artificial Sequence: Synthetic oligonucleotide
  Antisense strand to SEQ ID NO: 1087132
uaccaagucacacuuuaac

SEQ ID NO: 1087134 - RNA, 19 nt, Artificial Sequence
  Description of Artificial Sequence: Synthetic oligonucleotide
  Sense strand starting at position 2041 of SEQ ID NO: 915535
uuccuugugucaguggaau

SEQ ID NO: 1087135 - RNA, 19 nt, Artificial Sequence
  Description of Artificial Sequence: Synthetic oligonucleotide
  Antisense strand to SEQ ID NO: 1087134
auuccacugacacaaggaa

SEQ ID NO: 1087136 - RNA, 19 nt, Artificial Sequence
  Description of Artificial Sequence: Synthetic oligonucleotide
  Sense strand starting at position 2043 of SEQ ID NO: 915535
ccuugugucaguggaauuu

SEQ ID NO: 1087137 - RNA, 19 nt, Artificial Sequence
  Description of Artificial Sequence: Synthetic oligonucleotide
  Antisense strand to SEQ ID NO: 1087136
aaauuccacugacacaagg

SEQ ID NO: 1087138 - RNA, 19 nt, Artificial Sequence
  Description of Artificial Sequence: Synthetic oligonucleotide
  Sense strand starting at position 2060 of SEQ ID NO: 915535
uucuccaagugguuauaaa

SEQ ID NO: 1087139 - RNA, 19 nt, Artificial Sequence
  Description of Artificial Sequence: Synthetic oligonucleotide
  Antisense strand to SEQ ID NO: 1087138
uuuauaaccacuuggagaa

SEQ ID NO: 1087140 - RNA, 19 nt, Artificial Sequence
  Description of Artificial Sequence: Synthetic oligonucleotide
  Sense strand starting at position 2061 of SEQ ID NO: 915535
ucuccaagugguuauaaag

SEQ ID NO: 1087141 - RNA, 19 nt, Artificial Sequence
  Description of Artificial Sequence: Synthetic oligonucleotide
  Antisense strand to SEQ ID NO: 1087140
cuuuauaaccacuuggaga

SEQ ID NO: 1087142 - RNA, 19 nt, Artificial Sequence
  Description of Artificial Sequence: Synthetic oligonucleotide
  Sense strand starting at position 2156 of SEQ ID NO: 915535
gugggaucuauuggaccua

SEQ ID NO: 1087143 - RNA, 19 nt, Artificial Sequence
  Description of Artificial Sequence: Synthetic oligonucleotide
  Antisense strand to SEQ ID NO: 1087142
uagguccaauagaucccac

SEQ ID NO: 1087144 - RNA, 19 nt, Artificial Sequence
  Description of Artificial Sequence: Synthetic oligonucleotide
  Sense strand starting at position 2227 of SEQ ID NO: 915535
ugaggaguuucugcccuuu

SEQ ID NO: 1087145 - RNA, 19 nt, Artificial Sequence
  Description of Artificial Sequence: Synthetic oligonucleotide
  Antisense strand to SEQ ID NO: 1087144
aaagggcagaaacuccuca

SEQ ID NO: 1087146 - RNA, 19 nt, Artificial Sequence
  Description of Artificial Sequence: Synthetic oligonucleotide
  Sense strand starting at position 2280 of SEQ ID NO: 915535
aaggguugccagggaaauu

SEQ ID NO: 1087147 - RNA, 19 nt, Artificial Sequence
  Description of Artificial Sequence: Synthetic oligonucleotide
  Antisense strand to SEQ ID NO: 1087146
aauuucccuggcaacccuu

SEQ ID NO: 1087148 - RNA, 19 nt, Artificial Sequence
  Description of Artificial Sequence: Synthetic oligonucleotide
  Sense strand starting at position 2348 of SEQ ID NO: 915535
aaguaugaguaugucucua

SEQ ID NO: 1087149 - RNA, 19 nt, Artificial Sequence
  Description of Artificial Sequence: Synthetic oligonucleotide
  Antisense strand to SEQ ID NO: 1087148
uagagacauacucauacuu

SEQ ID NO: 1087150 - RNA, 19 nt, Artificial Sequence
  Description of Artificial Sequence: Synthetic oligonucleotide
  Sense strand starting at position 2350 of SEQ ID NO: 915535
guaugaguaugucucuaau

SEQ ID NO: 1087151 - RNA, 19 nt, Artificial Sequence
  Description of Artificial Sequence: Synthetic oligonucleotide
  Antisense strand to SEQ ID NO: 1087150
auuagagacauacucauac

SEQ ID NO: 1087152 - RNA, 19 nt, Artificial Sequence
  Description of Artificial Sequence: Synthetic oligonucleotide
  Sense strand starting at position 2352 of SEQ ID NO: 915535
augaguaugucucuaauau

SEQ ID NO: 1087153 - RNA, 19 nt, Artificial Sequence
  Description of Artificial Sequence: Synthetic oligonucleotide
  Antisense strand to SEQ ID NO: 1087152
auauuagagacauacucau

SEQ ID NO: 1087154 - RNA, 19 nt, Artificial Sequence
  Description of Artificial Sequence: Synthetic oligonucleotide
  Sense strand starting at position 2353 of SEQ ID NO: 915535
ugaguaugucucuaauauu

SEQ ID NO: 1087155 - RNA, 19 nt, Artificial Sequence
  Description of Artificial Sequence: Synthetic oligonucleotide
  Antisense strand to SEQ ID NO: 1087154
aauauuagagacauacuca

SEQ ID NO: 1087156 - RNA, 19 nt, Artificial Sequence
  Description of Artificial Sequence: Synthetic oligonucleotide
  Sense strand starting at position 2363 of SEQ ID NO: 915535
ucuaauauugcaugagaca

SEQ ID NO: 1087157 - RNA, 19 nt, Artificial Sequence
  Description of Artificial Sequence: Synthetic oligonucleotide
  Antisense strand to SEQ ID NO: 1087156
ugucucaugcaauauuaga

SEQ ID NO: 1087158 - RNA, 19 nt, Artificial Sequence
  Description of Artificial Sequence: Synthetic oligonucleotide
  Sense strand starting at position 2565 of SEQ ID NO: 915535
accuaagaccaacgucaua

SEQ ID NO: 1087159 - RNA, 19 nt, Artificial Sequence
  Description of Artificial Sequence: Synthetic oligonucleotide
  Antisense strand to SEQ ID NO: 1087158
uaugacguuggucuuaggu

SEQ ID NO: 1087160 - RNA, 19 nt, Artificial Sequence
  Description of Artificial Sequence: Synthetic oligonucleotide
  Sense strand starting at position 2584 of SEQ ID NO: 915535
cacaaugucgggugauucu

SEQ ID NO: 1087161 - RNA, 19 nt, Artificial Sequence
  Description of Artificial Sequence: Synthetic oligonucleotide
  Antisense strand to SEQ ID NO: 1087160
agaaucacccgacauugug

SEQ ID NO: 1087162 - RNA, 19 nt, Artificial Sequence
  Description of Artificial Sequence: Synthetic oligonucleotide
  Sense strand starting at position 3182 of SEQ ID NO: 915535
cucagauuaucuucccagu

SEQ ID NO: 1087163 - RNA, 19 nt, Artificial Sequence
  Description of Artificial Sequence: Synthetic oligonucleotide
  Antisense strand to SEQ ID NO: 1087162
acugggaagauaaucugag

SEQ ID NO: 1087164 - RNA, 19 nt, Artificial Sequence
  Description of Artificial Sequence: Synthetic oligonucleotide
  Sense strand starting at position 3449 of SEQ ID NO: 915535
cgugaauuccuccaacaga

SEQ ID NO: 1087165 - RNA, 19 nt, Artificial Sequence
  Description of Artificial Sequence: Synthetic oligonucleotide
  Antisense strand to SEQ ID NO: 1087164
ucuguuggaggaauucacg

SEQ ID NO: 1087166 - RNA, 19 nt, Artificial Sequence
  Description of Artificial Sequence: Synthetic oligonucleotide
  Sense strand starting at position 3470 of SEQ ID NO: 915535
uuuggcuccugaguuacau

SEQ ID NO: 1087167 - RNA, 19 nt, Artificial Sequence
  Description of Artificial Sequence: Synthetic oligonucleotide
  Antisense strand to SEQ ID NO: 1087166
auguaacucaggagccaaa

SEQ ID NO: 1087168 - RNA, 19 nt, Artificial Sequence
  Description of Artificial Sequence: Synthetic oligonucleotide
  Sense strand starting at position 3478 of SEQ ID NO: 915535
cugaguuacaugugaucag

SEQ ID NO: 1087169 - RNA, 19 nt, Artificial Sequence
  Description of Artificial Sequence: Synthetic oligonucleotide
  Antisense strand to SEQ ID NO: 1087168
cugaucacauguaacucag

SEQ ID NO: 1087170 - RNA, 19 nt, Artificial Sequence
  Description of Artificial Sequence: Synthetic oligonucleotide
  Sense strand starting at position 3481 of SEQ ID NO: 915535
aguuacaugugaucaggga

SEQ ID NO: 1087171 - RNA, 19 nt, Artificial Sequence
  Description of Artificial Sequence: Synthetic oligonucleotide
  Antisense strand to SEQ ID NO: 1087170
ucccugaucacauguaacu

SEQ ID NO: 1087172 - RNA, 19 nt, Artificial Sequence
  Description of Artificial Sequence: Synthetic oligonucleotide
  Sense strand starting at position 3485 of SEQ ID NO: 915535
acaugugaucagggaagug

SEQ ID NO: 1087173 - RNA, 19 nt, Artificial Sequence
  Description of Artificial Sequence: Synthetic oligonucleotide
  Antisense strand to SEQ ID NO: 1087172
cacuucccugaucacaugu

SEQ ID NO: 1087174 - RNA, 19 nt, Artificial Sequence
  Description of Artificial Sequence: Synthetic oligonucleotide
  Sense strand starting at position 3669 of SEQ ID NO: 915535
acacuuacuggcuguggaa

SEQ ID NO: 1087175 - RNA, 19 nt, Artificial Sequence
  Description of Artificial Sequence: Synthetic oligonucleotide
  Antisense strand to SEQ ID NO: 1087174
uuccacagccaguaagugu

SEQ ID NO: 1087176 - RNA, 19 nt, Artificial Sequence
  Description of Artificial Sequence: Synthetic oligonucleotide
  Sense strand starting at position 3722 of SEQ ID NO: 915535
guguccucauuugcaagau

SEQ ID NO: 1087177 - RNA, 19 nt, Artificial Sequence
  Description of Artificial Sequence: Synthetic oligonucleotide
  Antisense strand to SEQ ID NO: 1087176
aucuugcaaaugaggacac

SEQ ID NO: 1087178 - RNA, 19 nt, Artificial Sequence
  Description of Artificial Sequence: Synthetic oligonucleotide
  Sense strand starting at position 3806 of SEQ ID NO: 915535
agcuuaaaguagcucauau

SEQ ID NO: 1087179 - RNA, 19 nt, Artificial Sequence
  Description of Artificial Sequence: Synthetic oligonucleotide
  Antisense strand to SEQ ID NO: 1087178
auaugagcuacuuuaagcu

SEQ ID NO: 1087180 - RNA, 19 nt, Artificial Sequence
  Description of Artificial Sequence: Synthetic oligonucleotide
  Sense strand starting at position 3853 of SEQ ID NO: 915535
ucuuauuuguuucugguga

SEQ ID NO: 1087181 - RNA, 19 nt, Artificial Sequence
  Description of Artificial Sequence: Synthetic oligonucleotide
  Antisense strand to SEQ ID NO: 1087180
ucaccagaaacaaauaaga

SEQ ID NO: 1087182 - RNA, 19 nt, Artificial Sequence
  Description of Artificial Sequence: Synthetic oligonucleotide
  Sense strand starting at position 46 of SEQ ID NO: 915536
auugaagagucugauuuaa

SEQ ID NO: 1087183 - RNA, 19 nt, Artificial Sequence
  Description of Artificial Sequence: Synthetic oligonucleotide
  Antisense strand to SEQ ID NO: 1087182
uuaaaucagacucuucaau

SEQ ID NO: 1087184 - RNA, 19 nt, Artificial Sequence
  Description of Artificial Sequence: Synthetic oligonucleotide
  Sense strand starting at position 57 of SEQ ID NO: 915536
ugauuuaacucuggauuuc

SEQ ID NO: 1087185 - RNA, 19 nt, Artificial Sequence
  Description of Artificial Sequence: Synthetic oligonucleotide
  Antisense strand to SEQ ID NO: 1087184
gaaauccagaguuaaauca

SEQ ID NO: 1087186 - RNA, 19 nt, Artificial Sequence
  Description of Artificial Sequence: Synthetic oligonucleotide
  Sense strand starting at position 297 of SEQ ID NO: 915536
uugacugauguuuauaucu

SEQ ID NO: 1087187 - RNA, 19 nt, Artificial Sequence
  Description of Artificial Sequence: Synthetic oligonucleotide
  Antisense strand to SEQ ID NO: 1087186
agauauaaacaucagucaa

SEQ ID NO: 1087188 - RNA, 19 nt, Artificial Sequence
  Description of Artificial Sequence: Synthetic oligonucleotide
  Sense strand starting at position 302 of SEQ ID NO: 915536
ugauguuuauaucucaguu

SEQ ID NO: 1087189 - RNA, 19 nt, Artificial Sequence
  Description of Artificial Sequence: Synthetic oligonucleotide
  Antisense strand to SEQ ID NO: 1087188
aacugagauauaaacauca

SEQ ID NO: 1087190 - RNA, 19 nt, Artificial Sequence
  Description of Artificial Sequence: Synthetic oligonucleotide
  Sense strand starting at position 306 of SEQ ID NO: 915536
guuuauaucucaguuccag

SEQ ID NO: 1087191 - RNA, 19 nt, Artificial Sequence
  Description of Artificial Sequence: Synthetic oligonucleotide
  Antisense strand to SEQ ID NO: 1087190
cuggaacugagauauaaac

SEQ ID NO: 1087192 - RNA, 19 nt, Artificial Sequence
  Description of Artificial Sequence: Synthetic oligonucleotide
  Sense strand starting at position 404 of SEQ ID NO: 915536
agugcaaggucacuuugaa

SEQ ID NO: 1087193 - RNA, 19 nt, Artificial Sequence
  Description of Artificial Sequence: Synthetic oligonucleotide
  Antisense strand to SEQ ID NO: 1087192
uucaaagugaccuugcacu

SEQ ID NO: 1087194 - RNA, 19 nt, Artificial Sequence
  Description of Artificial Sequence: Synthetic oligonucleotide
  Sense strand starting at position 435 of SEQ ID NO: 915536
cacuuauuugugugguguu

SEQ ID NO: 1087195 - RNA, 19 nt, Artificial Sequence
  Description of Artificial Sequence: Synthetic oligonucleotide
  Antisense strand to SEQ ID NO: 1087194
aacaccacacaaauaagug

SEQ ID NO: 1087196 - RNA, 19 nt, Artificial Sequence
  Description of Artificial Sequence: Synthetic oligonucleotide
  Sense strand starting at position 515 of SEQ ID NO: 915536
uuuguauucccagagcuua

SEQ ID NO: 1087197 - RNA, 19 nt, Artificial Sequence
  Description of Artificial Sequence: Synthetic oligonucleotide
  Antisense strand to SEQ ID NO: 1087196
uaagcucugggaauacaaa

SEQ ID NO: 1087198 - RNA, 19 nt, Artificial Sequence
  Description of Artificial Sequence: Synthetic oligonucleotide
  Sense strand starting at position 586 of SEQ ID NO: 915536
cuuggacucugagugggaa

SEQ ID NO: 1087199 - RNA, 19 nt, Artificial Sequence
  Description of Artificial Sequence: Synthetic oligonucleotide
  Antisense strand to SEQ ID NO: 1087198
uucccacucagaguccaag

SEQ ID NO: 1087200 - RNA, 19 nt, Artificial Sequence
  Description of Artificial Sequence: Synthetic oligonucleotide
  Sense strand starting at position 673 of SEQ ID NO: 915536
uccucaguuccugggaaca

SEQ ID NO: 1087201 - RNA, 19 nt, Artificial Sequence
  Description of Artificial Sequence: Synthetic oligonucleotide
  Antisense strand to SEQ ID NO: 1087200
uguucccaggaacugagga

SEQ ID NO: 1087202 - RNA, 19 nt, Artificial Sequence
  Description of Artificial Sequence: Synthetic oligonucleotide
  Sense strand starting at position 773 of SEQ ID NO: 915536
aggcauaccucugucacaa

SEQ ID NO: 1087203 - RNA, 19 nt, Artificial Sequence
  Description of Artificial Sequence: Synthetic oligonucleotide
  Antisense strand to SEQ ID NO: 1087202
uugugacagagguaugccu

SEQ ID NO: 1087204 - RNA, 19 nt, Artificial Sequence
  Description of Artificial Sequence: Synthetic oligonucleotide
  Sense strand starting at position 1063 of SEQ ID NO: 915536
cuggaaauggcccaugcuu

SEQ ID NO: 1087205 - RNA, 19 nt, Artificial Sequence
  Description of Artificial Sequence: Synthetic oligonucleotide
  Antisense strand to SEQ ID NO: 1087204
aagcaugggccauuuccag

SEQ ID NO: 1087206 - RNA, 19 nt, Artificial Sequence
  Description of Artificial Sequence: Synthetic oligonucleotide
  Sense strand starting at position 1167 of SEQ ID NO: 915536
guauauuugugccugguag

SEQ ID NO: 1087207 - RNA, 19 nt, Artificial Sequence
  Description of Artificial Sequence: Synthetic oligonucleotide
  Antisense strand to SEQ ID NO: 1087206
cuaccaggcacaaauauac

SEQ ID NO: 1087208 - RNA, 19 nt, Artificial Sequence
  Description of Artificial Sequence: Synthetic oligonucleotide
  Sense strand starting at position 1168 of SEQ ID NO: 915536
uauauuugugccugguagu

SEQ ID NO: 1087209 - RNA, 19 nt, Artificial Sequence
  Description of Artificial Sequence: Synthetic oligonucleotide
  Antisense strand to SEQ ID NO: 1087208
acuaccaggcacaaauaua

SEQ ID NO: 1087210 - RNA, 19 nt, Artificial Sequence
  Description of Artificial Sequence: Synthetic oligonucleotide
  Sense strand starting at position 1189 of SEQ ID NO: 915536
gugggucuauggaacgaua

SEQ ID NO: 1087211 - RNA, 19 nt, Artificial Sequence
  Description of Artificial Sequence: Synthetic oligonucleotide
  Antisense strand to SEQ ID NO: 1087210
uaucguuccauagacccac

SEQ ID NO: 1087212 - RNA, 19 nt, Artificial Sequence
  Description of Artificial Sequence: Synthetic oligonucleotide
  Sense strand starting at position 1191 of SEQ ID NO: 915536
gggucuauggaacgauaug

SEQ ID NO: 1087213 - RNA, 19 nt, Artificial Sequence
  Description of Artificial Sequence: Synthetic oligonucleotide
  Antisense strand to SEQ ID NO: 1087212
cauaucguuccauagaccc

SEQ ID NO: 1087214 - RNA, 19 nt, Artificial Sequence
  Description of Artificial Sequence: Synthetic oligonucleotide
  Sense strand starting at position 1192 of SEQ ID NO: 915536
ggucuauggaacgauaugu

SEQ ID NO: 1087215 - RNA, 19 nt, Artificial Sequence
  Description of Artificial Sequence: Synthetic oligonucleotide
  Antisense strand to SEQ ID NO: 1087214
acauaucguuccauagacc

SEQ ID NO: 1087216 - RNA, 19 nt, Artificial Sequence
  Description of Artificial Sequence: Synthetic oligonucleotide
  Sense strand starting at position 1200 of SEQ ID NO: 915536
gaacgauaugugggagggu

SEQ ID NO: 1087217 - RNA, 19 nt, Artificial Sequence
  Description of Artificial Sequence: Synthetic oligonucleotide
  Antisense strand to SEQ ID NO: 1087216
acccucccacauaucguuc

SEQ ID NO: 1087218 - RNA, 19 nt, Artificial Sequence
  Description of Artificial Sequence: Synthetic oligonucleotide
  Sense strand starting at position 1203 of SEQ ID NO: 915536
cgauaugugggagggugaa

SEQ ID NO: 1087219 - RNA, 19 nt, Artificial Sequence
  Description of Artificial Sequence: Synthetic oligonucleotide
  Antisense strand to SEQ ID NO: 1087218
uucacccucccacauaucg

SEQ ID NO: 1087220 - RNA, 19 nt, Artificial Sequence
  Description of Artificial Sequence: Synthetic oligonucleotide
  Sense strand starting at position 1215 of SEQ ID NO: 915536
gggugaaccagguggauau

SEQ ID NO: 1087221 - RNA, 19 nt, Artificial Sequence
  Description of Artificial Sequence: Synthetic oligonucleotide
  Antisense strand to SEQ ID NO: 1087220
auauccaccugguucaccc

SEQ ID NO: 1087222 - RNA, 19 nt, Artificial Sequence
  Description of Artificial Sequence: Synthetic oligonucleotide
  Sense strand starting at position 1260 of SEQ ID NO: 915536
auguguaaguguguaaaga

SEQ ID NO: 1087223 - RNA, 19 nt, Artificial Sequence
  Description of Artificial Sequence: Synthetic oligonucleotide
  Antisense strand to SEQ ID NO: 1087222
ucuuuacacacuuacacau

SEQ ID NO: 1087224 - RNA, 19 nt, Artificial Sequence
  Description of Artificial Sequence: Synthetic oligonucleotide
  Sense strand starting at position 1261 of SEQ ID NO: 915536
uguguaaguguguaaagau

SEQ ID NO: 1087225 - RNA, 19 nt, Artificial Sequence
  Description of Artificial Sequence: Synthetic oligonucleotide
  Antisense strand to SEQ ID NO: 1087224
aucuuuacacacuuacaca

SEQ ID NO: 1087226 - RNA, 19 nt, Artificial Sequence
  Description of Artificial Sequence: Synthetic oligonucleotide
  Sense strand starting at position 1304 of SEQ ID NO: 915536
gcagauucuuguguggaug

SEQ ID NO: 1087227 - RNA, 19 nt, Artificial Sequence
  Description of Artificial Sequence: Synthetic oligonucleotide
  Antisense strand to SEQ ID NO: 1087226
cauccacacaagaaucugc

SEQ ID NO: 1087228 - RNA, 19 nt, Artificial Sequence
  Description of Artificial Sequence: Synthetic oligonucleotide
  Sense strand starting at position 1305 of SEQ ID NO: 915536
cagauucuuguguggaugu

SEQ ID NO: 1087229 - RNA, 19 nt, Artificial Sequence
  Description of Artificial Sequence: Synthetic oligonucleotide
  Antisense strand to SEQ ID NO: 1087228
acauccacacaagaaucug

SEQ ID NO: 1087230 - RNA, 19 nt, Artificial Sequence
  Description of Artificial Sequence: Synthetic oligonucleotide
  Sense strand starting at position 1397 of SEQ ID NO: 915536
aagguaucuauggguaugu

SEQ ID NO: 1087231 - RNA, 19 nt, Artificial Sequence
  Description of Artificial Sequence: Synthetic oligonucleotide
  Antisense strand to SEQ ID NO: 1087230
acauacccauagauaccuu

SEQ ID NO: 1087232 - RNA, 19 nt, Artificial Sequence
  Description of Artificial Sequence: Synthetic oligonucleotide
  Sense strand starting at position 1406 of SEQ ID NO: 915536
auggguaugugcucauuua

SEQ ID NO: 1087233 - RNA, 19 nt, Artificial Sequence
  Description of Artificial Sequence: Synthetic oligonucleotide
  Antisense strand to SEQ ID NO: 1087232
uaaaugagcacauacccau

SEQ ID NO: 1087234 - RNA, 19 nt, Artificial Sequence
  Description of Artificial Sequence: Synthetic oligonucleotide
  Sense strand starting at position 1580 of SEQ ID NO: 915536
cuuggauguuggcuacaaa

SEQ ID NO: 1087235 - RNA, 19 nt, Artificial Sequence
  Description of Artificial Sequence: Synthetic oligonucleotide
  Antisense strand to SEQ ID NO: 1087234
uuuguagccaacauccaag

SEQ ID NO: 1087236 - RNA, 19 nt, Artificial Sequence
  Description of Artificial Sequence: Synthetic oligonucleotide
  Sense strand starting at position 1747 of SEQ ID NO: 915536
gcuggaguaucuguaagag

SEQ ID NO: 1087237 - RNA, 19 nt, Artificial Sequence
  Description of Artificial Sequence: Synthetic oligonucleotide
  Antisense strand to SEQ ID NO: 1087236
cucuuacagauacuccagc

SEQ ID NO: 1087238 - RNA, 19 nt, Artificial Sequence
  Description of Artificial Sequence: Synthetic oligonucleotide
  Sense strand starting at position 1824 of SEQ ID NO: 915536
uugggagaucccugggauu

SEQ ID NO: 1087239 - RNA, 19 nt, Artificial Sequence
  Description of Artificial Sequence: Synthetic oligonucleotide
  Antisense strand to SEQ ID NO: 1087238
aaucccagggaucucccaa

SEQ ID NO: 1087240 - RNA, 19 nt, Artificial Sequence
  Description of Artificial Sequence: Synthetic oligonucleotide
  Sense strand starting at position 1913 of SEQ ID NO: 915536
uggugaucaguguaguuga

SEQ ID NO: 1087241 - RNA, 19 nt, Artificial Sequence
  Description of Artificial Sequence: Synthetic oligonucleotide
  Antisense strand to SEQ ID NO: 1087240
ucaacuacacugaucacca

SEQ ID NO: 1087242 - RNA, 19 nt, Artificial Sequence
  Description of Artificial Sequence: Synthetic oligonucleotide
  Sense strand starting at position 2458 of SEQ ID NO: 915536
ggauuugccucucaggaag

SEQ ID NO: 1087243 - RNA, 19 nt, Artificial Sequence
  Description of Artificial Sequence: Synthetic oligonucleotide
  Antisense strand to SEQ ID NO: 1087242
cuuccugagaggcaaaucc

SEQ ID NO: 1087244 - RNA, 19 nt, Artificial Sequence
  Description of Artificial Sequence: Synthetic oligonucleotide
  Sense strand starting at position 2792 of SEQ ID NO: 915536
uguccagucucaccugaga

SEQ ID NO: 1087245 - RNA, 19 nt, Artificial Sequence
  Description of Artificial Sequence: Synthetic oligonucleotide
  Antisense strand to SEQ ID NO: 1087244
ucucaggugagacuggaca

SEQ ID NO: 1087246 - RNA, 19 nt, Artificial Sequence
  Description of Artificial Sequence: Synthetic oligonucleotide
  Sense strand starting at position 2910 of SEQ ID NO: 915536
cugugacuagucuagcauu

SEQ ID NO: 1087247 - RNA, 19 nt, Artificial Sequence
  Description of Artificial Sequence: Synthetic oligonucleotide
  Antisense strand to SEQ ID NO: 1087246
aaugcuagacuagucacag

SEQ ID NO: 1087248 - RNA, 19 nt, Artificial Sequence
  Description of Artificial Sequence: Synthetic oligonucleotide
  Sense strand starting at position 3697 of SEQ ID NO: 915536
gggcccagcaguuauugau

SEQ ID NO: 1087249 - RNA, 19 nt, Artificial Sequence
  Description of Artificial Sequence: Synthetic oligonucleotide
  Antisense strand to SEQ ID NO: 1087248
aucaauaacugcugggccc

SEQ ID NO: 1087250 - RNA, 19 nt, Artificial Sequence
  Description of Artificial Sequence: Synthetic oligonucleotide
  Sense strand starting at position 3706 of SEQ ID NO: 915536
aguuauugauguucucaga

SEQ ID NO: 1087251 - RNA, 19 nt, Artificial Sequence
  Description of Artificial Sequence: Synthetic oligonucleotide
  Antisense strand to SEQ ID NO: 1087250
ucugagaacaucaauaacu

SEQ ID NO: 1087252 - RNA, 19 nt, Artificial Sequence
  Description of Artificial Sequence: Synthetic oligonucleotide
  Sense strand starting at position 3738 of SEQ ID NO: 915536
gggcgagaucuggagucau

SEQ ID NO: 1087253 - RNA, 19 nt, Artificial Sequence
  Description of Artificial Sequence: Synthetic oligonucleotide
  Antisense strand to SEQ ID NO: 1087252
augacuccagaucucgccc

SEQ ID NO: 1087254 - RNA, 19 nt, Artificial Sequence
  Description of Artificial Sequence: Synthetic oligonucleotide
  Sense strand starting at position 3897 of SEQ ID NO: 915536
uccuaauuggcuuggguua

SEQ ID NO: 1087255 - RNA, 19 nt, Artificial Sequence
  Description of Artificial Sequence: Synthetic oligonucleotide
  Antisense strand to SEQ ID NO: 1087254
uaacccaagccaauuagga

SEQ ID NO: 1087256 - RNA, 19 nt, Artificial Sequence
  Description of Artificial Sequence: Synthetic oligonucleotide
  Sense strand starting at position 3898 of SEQ ID NO: 915536
ccuaauuggcuuggguuau

SEQ ID NO: 1087257 - RNA, 19 nt, Artificial Sequence
  Description of Artificial Sequence: Synthetic oligonucleotide
  Antisense strand to SEQ ID NO: 1087256
auaacccaagccaauuagg

SEQ ID NO: 1087258 - RNA, 19 nt, Artificial Sequence
  Description of Artificial Sequence: Synthetic oligonucleotide
  Sense strand starting at position 3934 of SEQ ID NO: 915536
aguggaauguuguuuaaag

SEQ ID NO: 1087259 - RNA, 19 nt, Artificial Sequence
  Description of Artificial Sequence: Synthetic oligonucleotide
  Antisense strand to SEQ ID NO: 1087258
cuuuaaacaacauuccacu

SEQ ID NO: 1087260 - RNA, 19 nt, Artificial Sequence
  Description of Artificial Sequence: Synthetic oligonucleotide
  Sense strand starting at position 3935 of SEQ ID NO: 915536
guggaauguuguuuaaagg

SEQ ID NO: 1087261 - RNA, 19 nt, Artificial Sequence
  Description of Artificial Sequence: Synthetic oligonucleotide
  Antisense strand to SEQ ID NO: 1087260
ccuuuaaacaacauuccac

SEQ ID NO: 1087262 - RNA, 19 nt, Artificial Sequence
  Description of Artificial Sequence: Synthetic oligonucleotide
  Sense strand starting at position 222 of SEQ ID NO: 915537
ggcugaauccuaugugaug

SEQ ID NO: 1087263 - RNA, 19 nt, Artificial Sequence
  Description of Artificial Sequence: Synthetic oligonucleotide
  Antisense strand to SEQ ID NO: 1087262
caucacauaggauucagcc

SEQ ID NO: 1087264 - RNA, 19 nt, Artificial Sequence
  Description of Artificial Sequence: Synthetic oligonucleotide
  Sense strand starting at position 223 of SEQ ID NO: 915537
gcugaauccuaugugauga

SEQ ID NO: 1087265 - RNA, 19 nt, Artificial Sequence
  Description of Artificial Sequence: Synthetic oligonucleotide
  Antisense strand to SEQ ID NO: 1087264
ucaucacauaggauucagc

SEQ ID NO: 1087266 - RNA, 19 nt, Artificial Sequence
  Description of Artificial Sequence: Synthetic oligonucleotide
  Sense strand starting at position 228 of SEQ ID NO: 915537
auccuaugugaugaaacgu

SEQ ID NO: 1087267 - RNA, 19 nt, Artificial Sequence
  Description of Artificial Sequence: Synthetic oligonucleotide
  Antisense strand to SEQ ID NO: 1087266
acguuucaucacauaggau

SEQ ID NO: 1087268 - RNA, 19 nt, Artificial Sequence
  Description of Artificial Sequence: Synthetic oligonucleotide
  Sense strand starting at position 237 of SEQ ID NO: 915537
gaugaaacgucuuccuuuc

SEQ ID NO: 1087269 - RNA, 19 nt, Artificial Sequence
  Description of Artificial Sequence: Synthetic oligonucleotide
  Antisense strand to SEQ ID NO: 1087268
gaaaggaagacguuucauc

SEQ ID NO: 1087270 - RNA, 19 nt, Artificial Sequence
  Description of Artificial Sequence: Synthetic oligonucleotide
  Sense strand starting at position 239 of SEQ ID NO: 915537
ugaaacgucuuccuuucua

SEQ ID NO: 1087271 - RNA, 19 nt, Artificial Sequence
  Description of Artificial Sequence: Synthetic oligonucleotide
  Antisense strand to SEQ ID NO: 1087270
uagaaaggaagacguuuca

SEQ ID NO: 1087272 - RNA, 19 nt, Artificial Sequence
  Description of Artificial Sequence: Synthetic oligonucleotide
  Sense strand starting at position 299 of SEQ ID NO: 915537
ugugguaccuucucucuaa

SEQ ID NO: 1087273 - RNA, 19 nt, Artificial Sequence
  Description of Artificial Sequence: Synthetic oligonucleotide
  Antisense strand to SEQ ID NO: 1087272
uuagagagaagguaccaca

SEQ ID NO: 1087274 - RNA, 19 nt, Artificial Sequence
  Description of Artificial Sequence: Synthetic oligonucleotide
  Sense strand starting at position 300 of SEQ ID NO: 915537
gugguaccuucucucuaaa

SEQ ID NO: 1087275 - RNA, 19 nt, Artificial Sequence
  Description of Artificial Sequence: Synthetic oligonucleotide
  Antisense strand to SEQ ID NO: 1087274
uuuagagagaagguaccac

SEQ ID NO: 1087276 - RNA, 19 nt, Artificial Sequence
  Description of Artificial Sequence: Synthetic oligonucleotide
  Sense strand starting at position 355 of SEQ ID NO: 915537
ucauuucuguguccugcau

SEQ ID NO: 1087277 - RNA, 19 nt, Artificial Sequence
  Description of Artificial Sequence: Synthetic oligonucleotide
  Antisense strand to SEQ ID NO: 1087276
augcaggacacagaaauga

SEQ ID NO: 1087278 - RNA, 19 nt, Artificial Sequence
  Description of Artificial Sequence: Synthetic oligonucleotide
  Sense strand starting at position 448 of SEQ ID NO: 915537
gccucaggagaauguaauu

SEQ ID NO: 1087279 - RNA, 19 nt, Artificial Sequence
  Description of Artificial Sequence: Synthetic oligonucleotide
  Antisense strand to SEQ ID NO: 1087278
aauuacauucuccugaggc

SEQ ID NO: 1087280 - RNA, 19 nt, Artificial Sequence
  Description of Artificial Sequence: Synthetic oligonucleotide
  Sense strand starting at position 457 of SEQ ID NO: 915537
gaauguaauuugcaguaag

SEQ ID NO: 1087281 - RNA, 19 nt, Artificial Sequence
  Description of Artificial Sequence: Synthetic oligonucleotide
  Antisense strand to SEQ ID NO: 1087280
cuuacugcaaauuacauuc

SEQ ID NO: 1087282 - RNA, 19 nt, Artificial Sequence
  Description of Artificial Sequence: Synthetic oligonucleotide
  Sense strand starting at position 467 of SEQ ID NO: 915537
ugcaguaaguaauucuaga

SEQ ID NO: 1087283 - RNA, 19 nt, Artificial Sequence
  Description of Artificial Sequence: Synthetic oligonucleotide
  Antisense strand to SEQ ID NO: 1087282
ucuagaauuacuuacugca

SEQ ID NO: 1087284 - RNA, 19 nt, Artificial Sequence
  Description of Artificial Sequence: Synthetic oligonucleotide
  Sense strand starting at position 522 of SEQ ID NO: 915537
uaaagagagcuguguucca

SEQ ID NO: 1087285 - RNA, 19 nt, Artificial Sequence
  Description of Artificial Sequence: Synthetic oligonucleotide
  Antisense strand to SEQ ID NO: 1087284
uggaacacagcucucuuua

SEQ ID NO: 1087286 - RNA, 19 nt, Artificial Sequence
  Description of Artificial Sequence: Synthetic oligonucleotide
  Sense strand starting at position 529 of SEQ ID NO: 915537
agcuguguuccauacacac

SEQ ID NO: 1087287 - RNA, 19 nt, Artificial Sequence
  Description of Artificial Sequence: Synthetic oligonucleotide
  Antisense strand to SEQ ID NO: 1087286
guguguauggaacacagcu

SEQ ID NO: 1087288 - RNA, 19 nt, Artificial Sequence
  Description of Artificial Sequence: Synthetic oligonucleotide
  Sense strand starting at position 718 of SEQ ID NO: 915537
uucuuagcaugaucugcaa

SEQ ID NO: 1087289 - RNA, 19 nt, Artificial Sequence
  Description of Artificial Sequence: Synthetic oligonucleotide
  Antisense strand to SEQ ID NO: 1087288
uugcagaucaugcuaagaa

SEQ ID NO: 1087290 - RNA, 19 nt, Artificial Sequence
  Description of Artificial Sequence: Synthetic oligonucleotide
  Sense strand starting at position 721 of SEQ ID NO: 915537
uuagcaugaucugcaaguu

SEQ ID NO: 1087291 - RNA, 19 nt, Artificial Sequence
  Description of Artificial Sequence: Synthetic oligonucleotide
  Antisense strand to SEQ ID NO: 1087290
aacuugcagaucaugcuaa

SEQ ID NO: 1087292 - RNA, 19 nt, Artificial Sequence
  Description of Artificial Sequence: Synthetic oligonucleotide
  Sense strand starting at position 722 of SEQ ID NO: 915537
uagcaugaucugcaaguuu

SEQ ID NO: 1087293 - RNA, 19 nt, Artificial Sequence
  Description of Artificial Sequence: Synthetic oligonucleotide
  Antisense strand to SEQ ID NO: 1087292
aaacuugcagaucaugcua

SEQ ID NO: 1087294 - RNA, 19 nt, Artificial Sequence
  Description of Artificial Sequence: Synthetic oligonucleotide
  Sense strand starting at position 787 of SEQ ID NO: 915537
uuaccugaccuuuguuauu

SEQ ID NO: 1087295 - RNA, 19 nt, Artificial Sequence
  Description of Artificial Sequence: Synthetic oligonucleotide
  Antisense strand to SEQ ID NO: 1087294
aauaacaaaggucagguaa

SEQ ID NO: 1087296 - RNA, 19 nt, Artificial Sequence
  Description of Artificial Sequence: Synthetic oligonucleotide
  Sense strand starting at position 900 of SEQ ID NO: 915537
ggugcaaucacuugaagac

SEQ ID NO: 1087297 - RNA, 19 nt, Artificial Sequence
  Description of Artificial Sequence: Synthetic oligonucleotide
  Antisense strand to SEQ ID NO: 1087296
gucuucaagugauugcacc

SEQ ID NO: 1087298 - RNA, 19 nt, Artificial Sequence
  Description of Artificial Sequence: Synthetic oligonucleotide
  Sense strand starting at position 976 of SEQ ID NO: 915537
uaggguauacucugggcau

SEQ ID NO: 1087299 - RNA, 19 nt, Artificial Sequence
  Description of Artificial Sequence: Synthetic oligonucleotide
  Antisense strand to SEQ ID NO: 1087298
augcccagaguauacccua

SEQ ID NO: 1087300 - RNA, 19 nt, Artificial Sequence
  Description of Artificial Sequence: Synthetic oligonucleotide
  Sense strand starting at position 1141 of SEQ ID NO: 915537
ugccuucuacuuuggaauu

SEQ ID NO: 1087301 - RNA, 19 nt, Artificial Sequence
  Description of Artificial Sequence: Synthetic oligonucleotide
  Antisense strand to SEQ ID NO: 1087300
aauuccaaaguagaaggca

SEQ ID NO: 1087302 - RNA, 19 nt, Artificial Sequence
  Description of Artificial Sequence: Synthetic oligonucleotide
  Sense strand starting at position 1204 of SEQ ID NO: 915537
auuaguauuugcugaaaga

SEQ ID NO: 1087303 - RNA, 19 nt, Artificial Sequence
  Description of Artificial Sequence: Synthetic oligonucleotide
  Antisense strand to SEQ ID NO: 1087302
ucuuucagcaaauacuaau

SEQ ID NO: 1087304 - RNA, 19 nt, Artificial Sequence
  Description of Artificial Sequence: Synthetic oligonucleotide
  Sense strand starting at position 1261 of SEQ ID NO: 915537
gcaugauuauuacuugugu

SEQ ID NO: 1087305 - RNA, 19 nt, Artificial Sequence
  Description of Artificial Sequence: Synthetic oligonucleotide
  Antisense strand to SEQ ID NO: 1087304
acacaaguaauaaucaugc

SEQ ID NO: 1087306 - RNA, 19 nt, Artificial Sequence
  Description of Artificial Sequence: Synthetic oligonucleotide
  Sense strand starting at position 2051 of SEQ ID NO: 915537
uggacuuuggucuacacuu

SEQ ID NO: 1087307 - RNA, 19 nt, Artificial Sequence
  Description of Artificial Sequence: Synthetic oligonucleotide
  Antisense strand to SEQ ID NO: 1087306
aaguguagaccaaagucca

SEQ ID NO: 1087308 - RNA, 19 nt, Artificial Sequence
  Description of Artificial Sequence: Synthetic oligonucleotide
  Sense strand starting at position 2109 of SEQ ID NO: 915537
cggucauuccaggaagcau

SEQ ID NO: 1087309 - RNA, 19 nt, Artificial Sequence
  Description of Artificial Sequence: Synthetic oligonucleotide
  Antisense strand to SEQ ID NO: 1087308
augcuuccuggaaugaccg

SEQ ID NO: 1087310 - RNA, 19 nt, Artificial Sequence
  Description of Artificial Sequence: Synthetic oligonucleotide
  Sense strand starting at position 2332 of SEQ ID NO: 915537
cuggaaauacauugcuuga

SEQ ID NO: 1087311 - RNA, 19 nt, Artificial Sequence
  Description of Artificial Sequence: Synthetic oligonucleotide
  Antisense strand to SEQ ID NO: 1087310
ucaagcaauguauuuccag

SEQ ID NO: 1087312 - RNA, 19 nt, Artificial Sequence
  Description of Artificial Sequence: Synthetic oligonucleotide
  Sense strand starting at position 2457 of SEQ ID NO: 915537
ccaugcuaguuccuaaagu

SEQ ID NO: 1087313 - RNA, 19 nt, Artificial Sequence
  Description of Artificial Sequence: Synthetic oligonucleotide
  Antisense strand to SEQ ID NO: 1087312
acuuuaggaacuagcaugg

SEQ ID NO: 1087314 - RNA, 19 nt, Artificial Sequence
  Description of Artificial Sequence: Synthetic oligonucleotide
  Sense strand starting at position 2468 of SEQ ID NO: 915537
ccuaaaguaacguguguga

SEQ ID NO: 1087315 - RNA, 19 nt, Artificial Sequence
  Description of Artificial Sequence: Synthetic oligonucleotide
  Antisense strand to SEQ ID NO: 1087314
ucacacacguuacuuuagg

SEQ ID NO: 1087316 - RNA, 19 nt, Artificial Sequence
  Description of Artificial Sequence: Synthetic oligonucleotide
  Sense strand starting at position 2470 of SEQ ID NO: 915537
uaaaguaacgugugugaca

SEQ ID NO: 1087317 - RNA, 19 nt, Artificial Sequence
  Description of Artificial Sequence: Synthetic oligonucleotide
  Antisense strand to SEQ ID NO: 1087316
ugucacacacguuacuuua

SEQ ID NO: 1087318 - RNA, 19 nt, Artificial Sequence
  Description of Artificial Sequence: Synthetic oligonucleotide
  Sense strand starting at position 2471 of SEQ ID NO: 915537
aaaguaacgugugugacaa

SEQ ID NO: 1087319 - RNA, 19 nt, Artificial Sequence
  Description of Artificial Sequence: Synthetic oligonucleotide
  Antisense strand to SEQ ID NO: 1087318
uugucacacacguuacuuu

SEQ ID NO: 1087320 - RNA, 19 nt, Artificial Sequence
  Description of Artificial Sequence: Synthetic oligonucleotide
  Sense strand starting at position 2481 of SEQ ID NO: 915537
gugugacaaguucaaggau

SEQ ID NO: 1087321 - RNA, 19 nt, Artificial Sequence
  Description of Artificial Sequence: Synthetic oligonucleotide
  Antisense strand to SEQ ID NO: 1087320
auccuugaacuugucacac

SEQ ID NO: 1087322 - RNA, 19 nt, Artificial Sequence
  Description of Artificial Sequence: Synthetic oligonucleotide
  Sense strand starting at position 2495 of SEQ ID NO: 915537
aggaucuuauaguugagua

SEQ ID NO: 1087323 - RNA, 19 nt, Artificial Sequence
  Description of Artificial Sequence: Synthetic oligonucleotide
  Antisense strand to SEQ ID NO: 1087322
uacucaacuauaagauccu

SEQ ID NO: 1087324 - RNA, 19 nt, Artificial Sequence
  Description of Artificial Sequence: Synthetic oligonucleotide
  Sense strand starting at position 2496 of SEQ ID NO: 915537
ggaucuuauaguugaguaa

SEQ ID NO: 1087325 - RNA, 19 nt, Artificial Sequence
  Description of Artificial Sequence: Synthetic oligonucleotide
  Antisense strand to SEQ ID NO: 1087324
uuacucaacuauaagaucc

SEQ ID NO: 1087326 - RNA, 19 nt, Artificial Sequence
  Description of Artificial Sequence: Synthetic oligonucleotide
  Sense strand starting at position 2499 of SEQ ID NO: 915537
ucuuauaguugaguaagua

SEQ ID NO: 1087327 - RNA, 19 nt, Artificial Sequence
  Description of Artificial Sequence: Synthetic oligonucleotide
  Antisense strand to SEQ ID NO: 1087326
uacuuacucaacuauaaga

SEQ ID NO: 1087328 - RNA, 19 nt, Artificial Sequence
  Description of Artificial Sequence: Synthetic oligonucleotide
  Sense strand starting at position 2500 of SEQ ID NO: 915537
cuuauaguugaguaaguaa

SEQ ID NO: 1087329 - RNA, 19 nt, Artificial Sequence
  Description of Artificial Sequence: Synthetic oligonucleotide
  Antisense strand to SEQ ID NO: 1087328
uuacuuacucaacuauaag

SEQ ID NO: 1087330 - RNA, 19 nt, Artificial Sequence
  Description of Artificial Sequence: Synthetic oligonucleotide
  Sense strand starting at position 2571 of SEQ ID NO: 915537
cacuaugugcuguggaaga

SEQ ID NO: 1087331 - RNA, 19 nt, Artificial Sequence
  Description of Artificial Sequence: Synthetic oligonucleotide
  Antisense strand to SEQ ID NO: 1087330
ucuuccacagcacauagug

SEQ ID NO: 1087332 - RNA, 19 nt, Artificial Sequence
  Description of Artificial Sequence: Synthetic oligonucleotide
  Sense strand starting at position 2750 of SEQ ID NO: 915537
acuacuauaucguuacaga

SEQ ID NO: 1087333 - RNA, 19 nt, Artificial Sequence
  Description of Artificial Sequence: Synthetic oligonucleotide
  Antisense strand to SEQ ID NO: 1087332
ucuguaacgauauaguagu

SEQ ID NO: 1087334 - RNA, 19 nt, Artificial Sequence
  Description of Artificial Sequence: Synthetic oligonucleotide
  Sense strand starting at position 2751 of SEQ ID NO: 915537
cuacuauaucguuacagag

SEQ ID NO: 1087335 - RNA, 19 nt, Artificial Sequence
  Description of Artificial Sequence: Synthetic oligonucleotide
  Antisense strand to SEQ ID NO: 1087334
cucuguaacgauauaguag

SEQ ID NO: 1087336 - RNA, 19 nt, Artificial Sequence
  Description of Artificial Sequence: Synthetic oligonucleotide
  Sense strand starting at position 2846 of SEQ ID NO: 915537
ccgcuaauuuacuuucuga

SEQ ID NO: 1087337 - RNA, 19 nt, Artificial Sequence
  Description of Artificial Sequence: Synthetic oligonucleotide
  Antisense strand to SEQ ID NO: 1087336
ucagaaaguaaauuagcgg

SEQ ID NO: 1087338 - RNA, 19 nt, Artificial Sequence
  Description of Artificial Sequence: Synthetic oligonucleotide
  Sense strand starting at position 2859 of SEQ ID NO: 915537
uucugauucuaaggauuug

SEQ ID NO: 1087339 - RNA, 19 nt, Artificial Sequence
  Description of Artificial Sequence: Synthetic oligonucleotide
  Antisense strand to SEQ ID NO: 1087338
caaauccuuagaaucagaa

SEQ ID NO: 1087340 - RNA, 19 nt, Artificial Sequence
  Description of Artificial Sequence: Synthetic oligonucleotide
  Sense strand starting at position 2916 of SEQ ID NO: 915537
auacuugacuuuguauauc

SEQ ID NO: 1087341 - RNA, 19 nt, Artificial Sequence
  Description of Artificial Sequence: Synthetic oligonucleotide
  Antisense strand to SEQ ID NO: 1087340
gauauacaaagucaaguau

SEQ ID NO: 1087342 - RNA, 19 nt, Artificial Sequence
  Description of Artificial Sequence: Synthetic oligonucleotide
  Sense strand starting at position 503 of SEQ ID NO: 915538
uggguugaacccuauagca

SEQ ID NO: 1087343 - RNA, 19 nt, Artificial Sequence
  Description of Artificial Sequence: Synthetic oligonucleotide
  Antisense strand to SEQ ID NO: 1087342
ugcuauaggguucaaccca

SEQ ID NO: 1087344 - RNA, 19 nt, Artificial Sequence
  Description of Artificial Sequence: Synthetic oligonucleotide
  Sense strand starting at position 505 of SEQ ID NO: 915538
gguugaacccuauagcauu

SEQ ID NO: 1087345 - RNA, 19 nt, Artificial Sequence
  Description of Artificial Sequence: Synthetic oligonucleotide
  Antisense strand to SEQ ID NO: 1087344
aaugcuauaggguucaacc

SEQ ID NO: 1087346 - RNA, 19 nt, Artificial Sequence
  Description of Artificial Sequence: Synthetic oligonucleotide
  Sense strand starting at position 547 of SEQ ID NO: 915538
cugguacucugagaaugag

SEQ ID NO: 1087347 - RNA, 19 nt, Artificial Sequence
  Description of Artificial Sequence: Synthetic oligonucleotide
  Antisense strand to SEQ ID NO: 1087346
cucauucucagaguaccag

SEQ ID NO: 1087348 - RNA, 19 nt, Artificial Sequence
  Description of Artificial Sequence: Synthetic oligonucleotide
  Sense strand starting at position 613 of SEQ ID NO: 915538
ggugcuguggagcagagau

SEQ ID NO: 1087349 - RNA, 19 nt, Artificial Sequence
  Description of Artificial Sequence: Synthetic oligonucleotide
  Antisense strand to SEQ ID NO: 1087348
aucucugcuccacagcacc

SEQ ID NO: 1087350 - RNA, 19 nt, Artificial Sequence
  Description of Artificial Sequence: Synthetic oligonucleotide
  Sense strand starting at position 642 of SEQ ID NO: 915538
ccacucgugucugugggau

SEQ ID NO: 1087351 - RNA, 19 nt, Artificial Sequence
  Description of Artificial Sequence: Synthetic oligonucleotide
  Antisense strand to SEQ ID NO: 1087350
aucccacagacacgagugg

SEQ ID NO: 1087352 - RNA, 19 nt, Artificial Sequence
  Description of Artificial Sequence: Synthetic oligonucleotide
  Sense strand starting at position 676 of SEQ ID NO: 915538
gcagaugcaugucagggaa

SEQ ID NO: 1087353 - RNA, 19 nt, Artificial Sequence
  Description of Artificial Sequence: Synthetic oligonucleotide
  Antisense strand to SEQ ID NO: 1087352
uucccugacaugcaucugc

SEQ ID NO: 1087354 - RNA, 19 nt, Artificial Sequence
  Description of Artificial Sequence: Synthetic oligonucleotide
  Sense strand starting at position 1165 of SEQ ID NO: 915538
ggccauucgucccaagaag

SEQ ID NO: 1087355 - RNA, 19 nt, Artificial Sequence
  Description of Artificial Sequence: Synthetic oligonucleotide
  Antisense strand to SEQ ID NO: 1087354
cuucuugggacgaauggcc

SEQ ID NO: 1087356 - RNA, 19 nt, Artificial Sequence
  Description of Artificial Sequence: Synthetic oligonucleotide
  Sense strand starting at position 1254 of SEQ ID NO: 915538
ggagcuucuggguggagaa

SEQ ID NO: 1087357 - RNA, 19 nt, Artificial Sequence
  Description of Artificial Sequence: Synthetic oligonucleotide
  Antisense strand to SEQ ID NO: 1087356
uucuccacccagaagcucc

SEQ ID NO: 1087358 - RNA, 19 nt, Artificial Sequence
  Description of Artificial Sequence: Synthetic oligonucleotide
  Sense strand starting at position 1255 of SEQ ID NO: 915538
gagcuucuggguggagaau

SEQ ID NO: 1087359 - RNA, 19 nt, Artificial Sequence
  Description of Artificial Sequence: Synthetic oligonucleotide
  Antisense strand to SEQ ID NO: 1087358
auucuccacccagaagcuc

SEQ ID NO: 1087360 - RNA, 19 nt, Artificial Sequence
  Description of Artificial Sequence: Synthetic oligonucleotide
  Sense strand starting at position 1264 of SEQ ID NO: 915538
gguggagaaugaugacagu

SEQ ID NO: 1087361 - RNA, 19 nt, Artificial Sequence
  Description of Artificial Sequence: Synthetic oligonucleotide
  Antisense strand to SEQ ID NO: 1087360
acugucaucauucuccacc

SEQ ID NO: 1087362 - RNA, 19 nt, Artificial Sequence
  Description of Artificial Sequence: Synthetic oligonucleotide
  Sense strand starting at position 1405 of SEQ ID NO: 915538
cugcacugauguugcuaua

SEQ ID NO: 1087363 - RNA, 19 nt, Artificial Sequence
  Description of Artificial Sequence: Synthetic oligonucleotide
  Antisense strand to SEQ ID NO: 1087362
uauagcaacaucagugcag

SEQ ID NO: 1087364 - RNA, 19 nt, Artificial Sequence
  Description of Artificial Sequence: Synthetic oligonucleotide
  Sense strand starting at position 1408 of SEQ ID NO: 915538
cacugauguugcuauagaa

SEQ ID NO: 1087365 - RNA, 19 nt, Artificial Sequence
  Description of Artificial Sequence: Synthetic oligonucleotide
  Antisense strand to SEQ ID NO: 1087364
uucuauagcaacaucagug

SEQ ID NO: 1087366 - RNA, 19 nt, Artificial Sequence
  Description of Artificial Sequence: Synthetic oligonucleotide
  Sense strand starting at position 1452 of SEQ ID NO: 915538
ggcugugagccgucacugu

SEQ ID NO: 1087367 - RNA, 19 nt, Artificial Sequence
  Description of Artificial Sequence: Synthetic oligonucleotide
  Antisense strand to SEQ ID NO: 1087366
acagugacggcucacagcc

SEQ ID NO: 1087368 - RNA, 19 nt, Artificial Sequence
  Description of Artificial Sequence: Synthetic oligonucleotide
  Sense strand starting at position 3173 of SEQ ID NO: 915538
aaaucaagcucugagguga

SEQ ID NO: 1087369 - RNA, 19 nt, Artificial Sequence
  Description of Artificial Sequence: Synthetic oligonucleotide
  Antisense strand to SEQ ID NO: 1087368
ucaccucagagcuugauuu

SEQ ID NO: 1087370 - RNA, 19 nt, Artificial Sequence
  Description of Artificial Sequence: Synthetic oligonucleotide
  Sense strand starting at position 3389 of SEQ ID NO: 915538
gucggaugcuguccuggua

SEQ ID NO: 1087371 - RNA, 19 nt, Artificial Sequence
  Description of Artificial Sequence: Synthetic oligonucleotide
  Antisense strand to SEQ ID NO: 1087370
uaccaggacagcauccgac

SEQ ID NO: 1087372 - RNA, 19 nt, Artificial Sequence
  Description of Artificial Sequence: Synthetic oligonucleotide
  Sense strand starting at position 3392 of SEQ ID NO: 915538
ggaugcuguccugguacuu

SEQ ID NO: 1087373 - RNA, 19 nt, Artificial Sequence
  Description of Artificial Sequence: Synthetic oligonucleotide
  Antisense strand to SEQ ID NO: 1087372
aaguaccaggacagcaucc

SEQ ID NO: 1087374 - RNA, 19 nt, Artificial Sequence
  Description of Artificial Sequence: Synthetic oligonucleotide
  Sense strand starting at position 3547 of SEQ ID NO: 915538
cggaucugcucauccagau

SEQ ID NO: 1087375 - RNA, 19 nt, Artificial Sequence
  Description of Artificial Sequence: Synthetic oligonucleotide
  Antisense strand to SEQ ID NO: 1087374
aucuggaugagcagauccg

SEQ ID NO: 1087376 - RNA, 19 nt, Artificial Sequence
  Description of Artificial Sequence: Synthetic oligonucleotide
  Sense strand starting at position 3730 of SEQ ID NO: 915538
ggaagaaacuucugucaga

SEQ ID NO: 1087377 - RNA, 19 nt, Artificial Sequence
  Description of Artificial Sequence: Synthetic oligonucleotide
  Antisense strand to SEQ ID NO: 1087376
ucugacagaaguuucuucc

SEQ ID NO: 1087378 - RNA, 19 nt, Artificial Sequence
  Description of Artificial Sequence: Synthetic oligonucleotide
  Sense strand starting at position 3733 of SEQ ID NO: 915538
agaaacuucugucagaauc

SEQ ID NO: 1087379 - RNA, 19 nt, Artificial Sequence
  Description of Artificial Sequence: Synthetic oligonucleotide
  Antisense strand to SEQ ID NO: 1087378
gauucugacagaaguuucu

SEQ ID NO: 1087380 - RNA, 19 nt, Artificial Sequence
  Description of Artificial Sequence: Synthetic oligonucleotide
  Sense strand starting at position 3918 of SEQ ID NO: 915538
cagguugcucugcgucaga

SEQ ID NO: 1087381 - RNA, 19 nt, Artificial Sequence
  Description of Artificial Sequence: Synthetic oligonucleotide
  Antisense strand to SEQ ID NO: 1087380
ucugacgcagagcaaccug

SEQ ID NO: 1087382 - RNA, 19 nt, Artificial Sequence
  Description of Artificial Sequence: Synthetic oligonucleotide
  Sense strand starting at position 3921 of SEQ ID NO: 915538
guugcucugcgucagaaag

SEQ ID NO: 1087383 - RNA, 19 nt, Artificial Sequence
  Description of Artificial Sequence: Synthetic oligonucleotide
  Antisense strand to SEQ ID NO: 1087382
cuuucugacgcagagcaac

SEQ ID NO: 1087384 - RNA, 19 nt, Artificial Sequence
  Description of Artificial Sequence: Synthetic oligonucleotide
  Sense strand starting at position 229 of SEQ ID NO: 915539
uggguugaacccuauagca

SEQ ID NO: 1087385 - RNA, 19 nt, Artificial Sequence
  Description of Artificial Sequence: Synthetic oligonucleotide
  Antisense strand to SEQ ID NO: 1087384
ugcuauaggguucaaccca

SEQ ID NO: 1087386 - RNA, 19 nt, Artificial Sequence
  Description of Artificial Sequence: Synthetic oligonucleotide
  Sense strand starting at position 231 of SEQ ID NO: 915539
gguugaacccuauagcauu

SEQ ID NO: 1087387 - RNA, 19 nt, Artificial Sequence
  Description of Artificial Sequence: Synthetic oligonucleotide
  Antisense strand to SEQ ID NO: 1087386
aaugcuauaggguucaacc

SEQ ID NO: 1087388 - RNA, 19 nt, Artificial Sequence
  Description of Artificial Sequence: Synthetic oligonucleotide
  Sense strand starting at position 273 of SEQ ID NO: 915539
cugguacucugagaaugag

SEQ ID NO: 1087389 - RNA, 19 nt, Artificial Sequence
  Description of Artificial Sequence: Synthetic oligonucleotide
  Antisense strand to SEQ ID NO: 1087388
cucauucucagaguaccag

SEQ ID NO: 1087390 - RNA, 19 nt, Artificial Sequence
  Description of Artificial Sequence: Synthetic oligonucleotide
  Sense strand starting at position 339 of SEQ ID NO: 915539
ggugcuguggagcagagau

SEQ ID NO: 1087391 - RNA, 19 nt, Artificial Sequence
  Description of Artificial Sequence: Synthetic oligonucleotide
  Antisense strand to SEQ ID NO: 1087390
aucucugcuccacagcacc

SEQ ID NO: 1087392 - RNA, 19 nt, Artificial Sequence
  Description of Artificial Sequence: Synthetic oligonucleotide
  Sense strand starting at position 368 of SEQ ID NO: 915539
ccacucgugucugugggau

SEQ ID NO: 1087393 - RNA, 19 nt, Artificial Sequence
  Description of Artificial Sequence: Synthetic oligonucleotide
  Antisense strand to SEQ ID NO: 1087392
aucccacagacacgagugg

SEQ ID NO: 1087394 - RNA, 19 nt, Artificial Sequence
  Description of Artificial Sequence: Synthetic oligonucleotide
  Sense strand starting at position 402 of SEQ ID NO: 915539
gcagaugcaugucagggaa

SEQ ID NO: 1087395 - RNA, 19 nt, Artificial Sequence
  Description of Artificial Sequence: Synthetic oligonucleotide
  Antisense strand to SEQ ID NO: 1087394
uucccugacaugcaucugc

SEQ ID NO: 1087396 - RNA, 19 nt, Artificial Sequence
  Description of Artificial Sequence: Synthetic oligonucleotide
  Sense strand starting at position 891 of SEQ ID NO: 915539
ggccauucgucccaagaag

SEQ ID NO: 1087397 - RNA, 19 nt, Artificial Sequence
  Description of Artificial Sequence: Synthetic oligonucleotide
  Antisense strand to SEQ ID NO: 1087396
cuucuugggacgaauggcc

SEQ ID NO: 1087398 - RNA, 19 nt, Artificial Sequence
  Description of Artificial Sequence: Synthetic oligonucleotide
  Sense strand starting at position 980 of SEQ ID NO: 915539
ggagcuucuggguggagaa

SEQ ID NO: 1087399 - RNA, 19 nt, Artificial Sequence
  Description of Artificial Sequence: Synthetic oligonucleotide
  Antisense strand to SEQ ID NO: 1087398
uucuccacccagaagcucc

SEQ ID NO: 1087400 - RNA, 19 nt, Artificial Sequence
  Description of Artificial Sequence: Synthetic oligonucleotide
  Sense strand starting at position 981 of SEQ ID NO: 915539
gagcuucuggguggagaau

SEQ ID NO: 1087401 - RNA, 19 nt, Artificial Sequence
  Description of Artificial Sequence: Synthetic oligonucleotide
  Antisense strand to SEQ ID NO: 1087400
auucuccacccagaagcuc

SEQ ID NO: 1087402 - RNA, 19 nt, Artificial Sequence
  Description of Artificial Sequence: Synthetic oligonucleotide
  Sense strand starting at position 990 of SEQ ID NO: 915539
gguggagaaugaugacagu

SEQ ID NO: 1087403 - RNA, 19 nt, Artificial Sequence
  Description of Artificial Sequence: Synthetic oligonucleotide
  Antisense strand to SEQ ID NO: 1087402
acugucaucauucuccacc

SEQ ID NO: 1087404 - RNA, 19 nt, Artificial Sequence
  Description of Artificial Sequence: Synthetic oligonucleotide
  Sense strand starting at position 1131 of SEQ ID NO: 915539
cugcacugauguugcuaua

SEQ ID NO: 1087405 - RNA, 19 nt, Artificial Sequence
  Description of Artificial Sequence: Synthetic oligonucleotide
  Antisense strand to SEQ ID NO: 1087404
uauagcaacaucagugcag

SEQ ID NO: 1087406 - RNA, 19 nt, Artificial Sequence
  Description of Artificial Sequence: Synthetic oligonucleotide
  Sense strand starting at position 1134 of SEQ ID NO: 915539
cacugauguugcuauagaa

SEQ ID NO: 1087407 - RNA, 19 nt, Artificial Sequence
  Description of Artificial Sequence: Synthetic oligonucleotide
  Antisense strand to SEQ ID NO: 1087406
uucuauagcaacaucagug

SEQ ID NO: 1087408 - RNA, 19 nt, Artificial Sequence
  Description of Artificial Sequence: Synthetic oligonucleotide
  Sense strand starting at position 1178 of SEQ ID NO: 915539
ggcugugagccgucacugu

SEQ ID NO: 1087409 - RNA, 19 nt, Artificial Sequence
  Description of Artificial Sequence: Synthetic oligonucleotide
  Antisense strand to SEQ ID NO: 1087408
acagugacggcucacagcc

SEQ ID NO: 1087410 - RNA, 19 nt, Artificial Sequence
  Description of Artificial Sequence: Synthetic oligonucleotide
  Sense strand starting at position 2899 of SEQ ID NO: 915539
aaaucaagcucugagguga

SEQ ID NO: 1087411 - RNA, 19 nt, Artificial Sequence
  Description of Artificial Sequence: Synthetic oligonucleotide
  Antisense strand to SEQ ID NO: 1087410
ucaccucagagcuugauuu

SEQ ID NO: 1087412 - RNA, 19 nt, Artificial Sequence
  Description of Artificial Sequence: Synthetic oligonucleotide
  Sense strand starting at position 3115 of SEQ ID NO: 915539
gucggaugcuguccuggua

SEQ ID NO: 1087413 - RNA, 19 nt, Artificial Sequence
  Description of Artificial Sequence: Synthetic oligonucleotide
  Antisense strand to SEQ ID NO: 1087412
uaccaggacagcauccgac

SEQ ID NO: 1087414 - RNA, 19 nt, Artificial Sequence
  Description of Artificial Sequence: Synthetic oligonucleotide
  Sense strand starting at position 3118 of SEQ ID NO: 915539
ggaugcuguccugguacuu

SEQ ID NO: 1087415 - RNA, 19 nt, Artificial Sequence
  Description of Artificial Sequence: Synthetic oligonucleotide
  Antisense strand to SEQ ID NO: 1087414
aaguaccaggacagcaucc

SEQ ID NO: 1087416 - RNA, 19 nt, Artificial Sequence
  Description of Artificial Sequence: Synthetic oligonucleotide
  Sense strand starting at position 3273 of SEQ ID NO: 915539
cggaucugcucauccagau

SEQ ID NO: 1087417 - RNA, 19 nt, Artificial Sequence
  Description of Artificial Sequence: Synthetic oligonucleotide
  Antisense strand to SEQ ID NO: 1087416
aucuggaugagcagauccg

SEQ ID NO: 1087418 - RNA, 19 nt, Artificial Sequence
  Description of Artificial Sequence: Synthetic oligonucleotide
  Sense strand starting at position 3456 of SEQ ID NO: 915539
ggaagaaacuucugucaga

SEQ ID NO: 1087419 - RNA, 19 nt, Artificial Sequence
  Description of Artificial Sequence: Synthetic oligonucleotide
  Antisense strand to SEQ ID NO: 1087418
ucugacagaaguuucuucc

SEQ ID NO: 1087420 - RNA, 19 nt, Artificial Sequence
  Description of Artificial Sequence: Synthetic oligonucleotide
  Sense strand starting at position 3459 of SEQ ID NO: 915539
agaaacuucugucagaauc

SEQ ID NO: 1087421 - RNA, 19 nt, Artificial Sequence
  Description of Artificial Sequence: Synthetic oligonucleotide
  Antisense strand to SEQ ID NO: 1087420
gauucugacagaaguuucu

SEQ ID NO: 1087422 - RNA, 19 nt, Artificial Sequence
  Description of Artificial Sequence: Synthetic oligonucleotide
  Sense strand starting at position 3644 of SEQ ID NO: 915539
cagguugcucugcgucaga

SEQ ID NO: 1087423 - RNA, 19 nt, Artificial Sequence
  Description of Artificial Sequence: Synthetic oligonucleotide
  Antisense strand to SEQ ID NO: 1087422
ucugacgcagagcaaccug

SEQ ID NO: 1087424 - RNA, 19 nt, Artificial Sequence
  Description of Artificial Sequence: Synthetic oligonucleotide
  Sense strand starting at position 3647 of SEQ ID NO: 915539
guugcucugcgucagaaag

SEQ ID NO: 1087425 - RNA, 19 nt, Artificial Sequence
  Description of Artificial Sequence: Synthetic oligonucleotide
  Antisense strand to SEQ ID NO: 1087424
cuuucugacgcagagcaac

SEQ ID NO: 1087426 - RNA, 19 nt, Artificial Sequence
  Description of Artificial Sequence: Synthetic oligonucleotide
  Sense strand starting at position 3735 of SEQ ID NO: 915539
ccucgaagucucuguugga

SEQ ID NO: 1087427 - RNA, 19 nt, Artificial Sequence
  Description of Artificial Sequence: Synthetic oligonucleotide
  Antisense strand to SEQ ID NO: 1087426
uccaacagagacuucgagg

SEQ ID NO: 1087428 - RNA, 19 nt, Artificial Sequence
  Description of Artificial Sequence: Synthetic oligonucleotide
  Sense strand starting at position 3736 of SEQ ID NO: 915539
cucgaagucucuguuggaa

SEQ ID NO: 1087429 - RNA, 19 nt, Artificial Sequence
  Description of Artificial Sequence: Synthetic oligonucleotide
  Antisense strand to SEQ ID NO: 1087428
uuccaacagagacuucgag

SEQ ID NO: 1087430 - RNA, 19 nt, Artificial Sequence
  Description of Artificial Sequence: Synthetic oligonucleotide
  Sense strand starting at position 3739 of SEQ ID NO: 915539
gaagucucuguuggaagga

SEQ ID NO: 1087431 - RNA, 19 nt, Artificial Sequence
  Description of Artificial Sequence: Synthetic oligonucleotide
  Antisense strand to SEQ ID NO: 1087430
uccuuccaacagagacuuc

SEQ ID NO: 1087432 - RNA, 19 nt, Artificial Sequence
  Description of Artificial Sequence: Synthetic oligonucleotide
  Sense strand starting at position 3740 of SEQ ID NO: 915539
aagucucuguuggaaggaa

SEQ ID NO: 1087433 - RNA, 19 nt, Artificial Sequence
  Description of Artificial Sequence: Synthetic oligonucleotide
  Antisense strand to SEQ ID NO: 1087432
uuccuuccaacagagacuu

SEQ ID NO: 1087434 - RNA, 19 nt, Artificial Sequence
  Description of Artificial Sequence: Synthetic oligonucleotide
  Sense strand starting at position 315 of SEQ ID NO: 915540
acugucuagggcugauaga

SEQ ID NO: 1087435 - RNA, 19 nt, Artificial Sequence
  Description of Artificial Sequence: Synthetic oligonucleotide
  Antisense strand to SEQ ID NO: 1087434
ucuaucagcccuagacagu

SEQ ID NO: 1087436 - RNA, 19 nt, Artificial Sequence
  Description of Artificial Sequence: Synthetic oligonucleotide
  Sense strand starting at position 316 of SEQ ID NO: 915540
cugucuagggcugauagaa

SEQ ID NO: 1087437 - RNA, 19 nt, Artificial Sequence
  Description of Artificial Sequence: Synthetic oligonucleotide
  Antisense strand to SEQ ID NO: 1087436
uucuaucagcccuagacag

SEQ ID NO: 1087438 - RNA, 19 nt, Artificial Sequence
  Description of Artificial Sequence: Synthetic oligonucleotide
  Sense strand starting at position 408 of SEQ ID NO: 915540
ccguuucccuucugucaaa

SEQ ID NO: 1087439 - RNA, 19 nt, Artificial Sequence
  Description of Artificial Sequence: Synthetic oligonucleotide
  Antisense strand to SEQ ID NO: 1087438
uuugacagaagggaaacgg

SEQ ID NO: 1087440 - RNA, 19 nt, Artificial Sequence
  Description of Artificial Sequence: Synthetic oligonucleotide
  Sense strand starting at position 562 of SEQ ID NO: 915540
uggccaggucgaugggaaa

SEQ ID NO: 1087441 - RNA, 19 nt, Artificial Sequence
  Description of Artificial Sequence: Synthetic oligonucleotide
  Antisense strand to SEQ ID NO: 1087440
uuucccaucgaccuggcca

SEQ ID NO: 1087442 - RNA, 19 nt, Artificial Sequence
  Description of Artificial Sequence: Synthetic oligonucleotide
  Sense strand starting at position 604 of SEQ ID NO: 915540
cggcgaugccgccauugau

SEQ ID NO: 1087443 - RNA, 19 nt, Artificial Sequence
  Description of Artificial Sequence: Synthetic oligonucleotide
  Antisense strand to SEQ ID NO: 1087442
aucaauggcggcaucgccg

SEQ ID NO: 1087444 - RNA, 19 nt, Artificial Sequence
  Description of Artificial Sequence: Synthetic oligonucleotide
  Sense strand starting at position 894 of SEQ ID NO: 915540
cgccacuucuguccuagaa

SEQ ID NO: 1087445 - RNA, 19 nt, Artificial Sequence
  Description of Artificial Sequence: Synthetic oligonucleotide
  Antisense strand to SEQ ID NO: 1087444
uucuaggacagaaguggcg

SEQ ID NO: 1087446 - RNA, 19 nt, Artificial Sequence
  Description of Artificial Sequence: Synthetic oligonucleotide
  Sense strand starting at position 942 of SEQ ID NO: 915540
gggccacccgaagaguaau

SEQ ID NO: 1087447 - RNA, 19 nt, Artificial Sequence
  Description of Artificial Sequence: Synthetic oligonucleotide
  Antisense strand to SEQ ID NO: 1087446
auuacucuucggguggccc

SEQ ID NO: 1087448 - RNA, 19 nt, Artificial Sequence
  Description of Artificial Sequence: Synthetic oligonucleotide
  Sense strand starting at position 1384 of SEQ ID NO: 915540
ucagcuaucccagguauag

SEQ ID NO: 1087449 - RNA, 19 nt, Artificial Sequence
  Description of Artificial Sequence: Synthetic oligonucleotide
  Antisense strand to SEQ ID NO: 1087448
cuauaccugggauagcuga

SEQ ID NO: 1087450 - RNA, 19 nt, Artificial Sequence
  Description of Artificial Sequence: Synthetic oligonucleotide
  Sense strand starting at position 2235 of SEQ ID NO: 915540
uggguugaacccuauagca

SEQ ID NO: 1087451 - RNA, 19 nt, Artificial Sequence
  Description of Artificial Sequence: Synthetic oligonucleotide
  Antisense strand to SEQ ID NO: 1087450
ugcuauaggguucaaccca

SEQ ID NO: 1087452 - RNA, 19 nt, Artificial Sequence
  Description of Artificial Sequence: Synthetic oligonucleotide
  Sense strand starting at position 2237 of SEQ ID NO: 915540
gguugaacccuauagcauu

SEQ ID NO: 1087453 - RNA, 19 nt, Artificial Sequence
  Description of Artificial Sequence: Synthetic oligonucleotide
  Antisense strand to SEQ ID NO: 1087452
aaugcuauaggguucaacc

SEQ ID NO: 1087454 - RNA, 19 nt, Artificial Sequence
  Description of Artificial Sequence: Synthetic oligonucleotide
  Sense strand starting at position 2279 of SEQ ID NO: 915540
cugguacucugagaaugag

SEQ ID NO: 1087455 - RNA, 19 nt, Artificial Sequence
  Description of Artificial Sequence: Synthetic oligonucleotide
  Antisense strand to SEQ ID NO: 1087454
cucauucucagaguaccag

SEQ ID NO: 1087456 - RNA, 19 nt, Artificial Sequence
  Description of Artificial Sequence: Synthetic oligonucleotide
  Sense strand starting at position 2345 of SEQ ID NO: 915540
ggugcuguggagcagagau

SEQ ID NO: 1087457 - RNA, 19 nt, Artificial Sequence
  Description of Artificial Sequence: Synthetic oligonucleotide
  Antisense strand to SEQ ID NO: 1087456
aucucugcuccacagcacc

SEQ ID NO: 1087458 - RNA, 19 nt, Artificial Sequence
  Description of Artificial Sequence: Synthetic oligonucleotide
  Sense strand starting at position 2374 of SEQ ID NO: 915540
ccacucgugucugugggau

SEQ ID NO: 1087459 - RNA, 19 nt, Artificial Sequence
  Description of Artificial Sequence: Synthetic oligonucleotide
  Antisense strand to SEQ ID NO: 1087458
aucccacagacacgagugg

SEQ ID NO: 1087460 - RNA, 19 nt, Artificial Sequence
  Description of Artificial Sequence: Synthetic oligonucleotide
  Sense strand starting at position 2408 of SEQ ID NO: 915540
gcagaugcaugucagggaa

SEQ ID NO: 1087461 - RNA, 19 nt, Artificial Sequence
  Description of Artificial Sequence: Synthetic oligonucleotide
  Antisense strand to SEQ ID NO: 1087460
uucccugacaugcaucugc

SEQ ID NO: 1087462 - RNA, 19 nt, Artificial Sequence
  Description of Artificial Sequence: Synthetic oligonucleotide
  Sense strand starting at position 2897 of SEQ ID NO: 915540
ggccauucgucccaagaag

SEQ ID NO: 1087463 - RNA, 19 nt, Artificial Sequence
  Description of Artificial Sequence: Synthetic oligonucleotide
  Antisense strand to SEQ ID NO: 1087462
cuucuugggacgaauggcc

SEQ ID NO: 1087464 - RNA, 19 nt, Artificial Sequence
  Description of Artificial Sequence: Synthetic oligonucleotide
  Sense strand starting at position 2986 of SEQ ID NO: 915540
ggagcuucuggguggagaa

SEQ ID NO: 1087465 - RNA, 19 nt, Artificial Sequence
  Description of Artificial Sequence: Synthetic oligonucleotide
  Antisense strand to SEQ ID NO: 1087464
uucuccacccagaagcucc

SEQ ID NO: 1087466 - RNA, 19 nt, Artificial Sequence
  Description of Artificial Sequence: Synthetic oligonucleotide
  Sense strand starting at position 2987 of SEQ ID NO: 915540
gagcuucuggguggagaau

SEQ ID NO: 1087467 - RNA, 19 nt, Artificial Sequence
  Description of Artificial Sequence: Synthetic oligonucleotide
  Antisense strand to SEQ ID NO: 1087466
auucuccacccagaagcuc

SEQ ID NO: 1087468 - RNA, 19 nt, Artificial Sequence
  Description of Artificial Sequence: Synthetic oligonucleotide
  Sense strand starting at position 2996 of SEQ ID NO: 915540
gguggagaaugaugacagu

SEQ ID NO: 1087469 - RNA, 19 nt, Artificial Sequence
  Description of Artificial Sequence: Synthetic oligonucleotide
  Antisense strand to SEQ ID NO: 1087468
acugucaucauucuccacc

SEQ ID NO: 1087470 - RNA, 19 nt, Artificial Sequence
  Description of Artificial Sequence: Synthetic oligonucleotide
  Sense strand starting at position 3137 of SEQ ID NO: 915540
cugcacugauguugcuaua

SEQ ID NO: 1087471 - RNA, 19 nt, Artificial Sequence
  Description of Artificial Sequence: Synthetic oligonucleotide
  Antisense strand to SEQ ID NO: 1087470
uauagcaacaucagugcag

SEQ ID NO: 1087472 - RNA, 19 nt, Artificial Sequence
  Description of Artificial Sequence: Synthetic oligonucleotide
  Sense strand starting at position 3140 of SEQ ID NO: 915540
cacugauguugcuauagaa

SEQ ID NO: 1087473 - RNA, 19 nt, Artificial Sequence
  Description of Artificial Sequence: Synthetic oligonucleotide
  Antisense strand to SEQ ID NO: 1087472
uucuauagcaacaucagug

SEQ ID NO: 1087474 - RNA, 19 nt, Artificial Sequence
  Description of Artificial Sequence: Synthetic oligonucleotide
  Sense strand starting at position 3184 of SEQ ID NO: 915540
ggcugugagccgucacugu

SEQ ID NO: 1087475 - RNA, 19 nt, Artificial Sequence
  Description of Artificial Sequence: Synthetic oligonucleotide
  Antisense strand to SEQ ID NO: 1087474
acagugacggcucacagcc

SEQ ID NO: 1087476 - RNA, 19 nt, Artificial Sequence
  Description of Artificial Sequence: Synthetic oligonucleotide
  Sense strand starting at position 233 of SEQ ID NO: 915541
ugaggucaaaggugaacuu

SEQ ID NO: 1087477 - RNA, 19 nt, Artificial Sequence
  Description of Artificial Sequence: Synthetic oligonucleotide
  Antisense strand to SEQ ID NO: 1087476
aaguucaccuuugaccuca

SEQ ID NO: 1087478 - RNA, 19 nt, Artificial Sequence
  Description of Artificial Sequence: Synthetic oligonucleotide
  Sense strand starting at position 242 of SEQ ID NO: 915541
aggugaacuuccuuuguaa

SEQ ID NO: 1087479 - RNA, 19 nt, Artificial Sequence
  Description of Artificial Sequence: Synthetic oligonucleotide
  Antisense strand to SEQ ID NO: 1087478
uuacaaaggaaguucaccu

SEQ ID NO: 1087480 - RNA, 19 nt, Artificial Sequence
  Description of Artificial Sequence: Synthetic oligonucleotide
  Sense strand starting at position 489 of SEQ ID NO: 915541
ugguguuguccaggcugga

SEQ ID NO: 1087481 - RNA, 19 nt, Artificial Sequence
  Description of Artificial Sequence: Synthetic oligonucleotide
  Antisense strand to SEQ ID NO: 1087480
uccagccuggacaacacca

SEQ ID NO: 1087482 - RNA, 19 nt, Artificial Sequence
  Description of Artificial Sequence: Synthetic oligonucleotide
  Sense strand starting at position 665 of SEQ ID NO: 915541
cagccuggucucgaaaucu

SEQ ID NO: 1087483 - RNA, 19 nt, Artificial Sequence
  Description of Artificial Sequence: Synthetic oligonucleotide
  Antisense strand to SEQ ID NO: 1087482
agauuucgagaccaggcug

SEQ ID NO: 1087484 - RNA, 19 nt, Artificial Sequence
  Description of Artificial Sequence: Synthetic oligonucleotide
  Sense strand starting at position 1203 of SEQ ID NO: 915541
uugggugugaugugacaga

SEQ ID NO: 1087485 - RNA, 19 nt, Artificial Sequence
  Description of Artificial Sequence: Synthetic oligonucleotide
  Antisense strand to SEQ ID NO: 1087484
ucugucacaucacacccaa

SEQ ID NO: 1087486 - RNA, 19 nt, Artificial Sequence
  Description of Artificial Sequence: Synthetic oligonucleotide
  Sense strand starting at position 1471 of SEQ ID NO: 915541
ggaggagucgugcagagua

SEQ ID NO: 1087487 - RNA, 19 nt, Artificial Sequence
  Description of Artificial Sequence: Synthetic oligonucleotide
  Antisense strand to SEQ ID NO: 1087486
uacucugcacgacuccucc

SEQ ID NO: 1087488 - RNA, 19 nt, Artificial Sequence
  Description of Artificial Sequence: Synthetic oligonucleotide
  Sense strand starting at position 1473 of SEQ ID NO: 915541
aggagucgugcagaguaca

SEQ ID NO: 1087489 - RNA, 19 nt, Artificial Sequence
  Description of Artificial Sequence: Synthetic oligonucleotide
  Antisense strand to SEQ ID NO: 1087488
uguacucugcacgacuccu

SEQ ID NO: 1087490 - RNA, 19 nt, Artificial Sequence
  Description of Artificial Sequence: Synthetic oligonucleotide
  Sense strand starting at position 1546 of SEQ ID NO: 915541
caaugauccucgcucugag

SEQ ID NO: 1087491 - RNA, 19 nt, Artificial Sequence
  Description of Artificial Sequence: Synthetic oligonucleotide
  Antisense strand to SEQ ID NO: 1087490
cucagagcgaggaucauug

SEQ ID NO: 1087492 - RNA, 19 nt, Artificial Sequence
  Description of Artificial Sequence: Synthetic oligonucleotide
  Sense strand starting at position 1549 of SEQ ID NO: 915541
ugauccucgcucugaggau

SEQ ID NO: 1087493 - RNA, 19 nt, Artificial Sequence
  Description of Artificial Sequence: Synthetic oligonucleotide
  Antisense strand to SEQ ID NO: 1087492
auccucagagcgaggauca

SEQ ID NO: 1087494 - RNA, 19 nt, Artificial Sequence
  Description of Artificial Sequence: Synthetic oligonucleotide
  Sense strand starting at position 1819 of SEQ ID NO: 915541
ggcuguucucuucaggguu

SEQ ID NO: 1087495 - RNA, 19 nt, Artificial Sequence
  Description of Artificial Sequence: Synthetic oligonucleotide
  Antisense strand to SEQ ID NO: 1087494
aacccugaagagaacagcc

SEQ ID NO: 1087496 - RNA, 19 nt, Artificial Sequence
  Description of Artificial Sequence: Synthetic oligonucleotide
  Sense strand starting at position 1927 of SEQ ID NO: 915541
uauuuaaagugcguguuga

SEQ ID NO: 1087497 - RNA, 19 nt, Artificial Sequence
  Description of Artificial Sequence: Synthetic oligonucleotide
  Antisense strand to SEQ ID NO: 1087496
ucaacacgcacuuuaaaua

SEQ ID NO: 1087498 - RNA, 19 nt, Artificial Sequence
  Description of Artificial Sequence: Synthetic oligonucleotide
  Sense strand starting at position 1928 of SEQ ID NO: 915541
auuuaaagugcguguugau

SEQ ID NO: 1087499 - RNA, 19 nt, Artificial Sequence
  Description of Artificial Sequence: Synthetic oligonucleotide
  Antisense strand to SEQ ID NO: 1087498
aucaacacgcacuuuaaau

SEQ ID NO: 1087500 - RNA, 19 nt, Artificial Sequence
  Description of Artificial Sequence: Synthetic oligonucleotide
  Sense strand starting at position 1935 of SEQ ID NO: 915541
gugcguguugaucugcaau

SEQ ID NO: 1087501 - RNA, 19 nt, Artificial Sequence
  Description of Artificial Sequence: Synthetic oligonucleotide
  Antisense strand to SEQ ID NO: 1087500
auugcagaucaacacgcac

SEQ ID NO: 1087502 - RNA, 19 nt, Artificial Sequence
  Description of Artificial Sequence: Synthetic oligonucleotide
  Sense strand starting at position 1955 of SEQ ID NO: 915541
gcaccauucugcucaguca

SEQ ID NO: 1087503 - RNA, 19 nt, Artificial Sequence
  Description of Artificial Sequence: Synthetic oligonucleotide
  Antisense strand to SEQ ID NO: 1087502
ugacugagcagaauggugc

SEQ ID NO: 1087504 - RNA, 19 nt, Artificial Sequence
  Description of Artificial Sequence: Synthetic oligonucleotide
  Sense strand starting at position 2283 of SEQ ID NO: 915541
augggaagaacuugucugu

SEQ ID NO: 1087505 - RNA, 19 nt, Artificial Sequence
  Description of Artificial Sequence: Synthetic oligonucleotide
  Antisense strand to SEQ ID NO: 1087504
acagacaaguucuucccau

SEQ ID NO: 1087506 - RNA, 19 nt, Artificial Sequence
  Description of Artificial Sequence: Synthetic oligonucleotide
  Sense strand starting at position 2286 of SEQ ID NO: 915541
ggaagaacuugucugucug

SEQ ID NO: 1087507 - RNA, 19 nt, Artificial Sequence
  Description of Artificial Sequence: Synthetic oligonucleotide
  Antisense strand to SEQ ID NO: 1087506
cagacagacaaguucuucc

SEQ ID NO: 1087508 - RNA, 19 nt, Artificial Sequence
  Description of Artificial Sequence: Synthetic oligonucleotide
  Sense strand starting at position 2290 of SEQ ID NO: 915541
gaacuugucugucuggaca

SEQ ID NO: 1087509 - RNA, 19 nt, Artificial Sequence
  Description of Artificial Sequence: Synthetic oligonucleotide
  Antisense strand to SEQ ID NO: 1087508
uguccagacagacaaguuc

SEQ ID NO: 1087510 - RNA, 19 nt, Artificial Sequence
  Description of Artificial Sequence: Synthetic oligonucleotide
  Sense strand starting at position 2355 of SEQ ID NO: 915541
cucaauaaauccugaguga

SEQ ID NO: 1087511 - RNA, 19 nt, Artificial Sequence
  Description of Artificial Sequence: Synthetic oligonucleotide
  Antisense strand to SEQ ID NO: 1087510
ucacucaggauuuauugag

SEQ ID NO: 1087512 - RNA, 19 nt, Artificial Sequence
  Description of Artificial Sequence: Synthetic oligonucleotide
  Sense strand starting at position 2358 of SEQ ID NO: 915541
aauaaauccugagugacug

SEQ ID NO: 1087513 - RNA, 19 nt, Artificial Sequence
  Description of Artificial Sequence: Synthetic oligonucleotide
  Antisense strand to SEQ ID NO: 1087512
cagucacucaggauuuauu

SEQ ID NO: 1087514 - RNA, 19 nt, Artificial Sequence
  Description of Artificial Sequence: Synthetic oligonucleotide
  Sense strand starting at position 2359 of SEQ ID NO: 915541
auaaauccugagugacuga

SEQ ID NO: 1087515 - RNA, 19 nt, Artificial Sequence
  Description of Artificial Sequence: Synthetic oligonucleotide
  Antisense strand to SEQ ID NO: 1087514
ucagucacucaggauuuau

SEQ ID NO: 1087516 - RNA, 19 nt, Artificial Sequence
  Description of Artificial Sequence: Synthetic oligonucleotide
  Sense strand starting at position 2612 of SEQ ID NO: 915541
gguggacagauucgggaaa

SEQ ID NO: 1087517 - RNA, 19 nt, Artificial Sequence
  Description of Artificial Sequence: Synthetic oligonucleotide
  Antisense strand to SEQ ID NO: 1087516
uuucccgaaucuguccacc

SEQ ID NO: 1087518 - RNA, 19 nt, Artificial Sequence
  Description of Artificial Sequence: Synthetic oligonucleotide
  Sense strand starting at position 2614 of SEQ ID NO: 915541
uggacagauucgggaaaca

SEQ ID NO: 1087519 - RNA, 19 nt, Artificial Sequence
  Description of Artificial Sequence: Synthetic oligonucleotide
  Antisense strand to SEQ ID NO: 1087518
uguuucccgaaucugucca

SEQ ID NO: 1087520 - RNA, 19 nt, Artificial Sequence
  Description of Artificial Sequence: Synthetic oligonucleotide
  Sense strand starting at position 3250 of SEQ ID NO: 915541
cagugauguugagcaaccu

SEQ ID NO: 1087521 - RNA, 19 nt, Artificial Sequence
  Description of Artificial Sequence: Synthetic oligonucleotide
  Antisense strand to SEQ ID NO: 1087520
agguugcucaacaucacug

SEQ ID NO: 1087522 - RNA, 19 nt, Artificial Sequence
  Description of Artificial Sequence: Synthetic oligonucleotide
  Sense strand starting at position 3285 of SEQ ID NO: 915541
ggucuauuauuguuugcca

SEQ ID NO: 1087523 - RNA, 19 nt, Artificial Sequence
  Description of Artificial Sequence: Synthetic oligonucleotide
  Antisense strand to SEQ ID NO: 1087522
uggcaaacaauaauagacc

SEQ ID NO: 1087524 - RNA, 19 nt, Artificial Sequence
  Description of Artificial Sequence: Synthetic oligonucleotide
  Sense strand starting at position 3286 of SEQ ID NO: 915541
gucuauuauuguuugccaa

SEQ ID NO: 1087525 - RNA, 19 nt, Artificial Sequence
  Description of Artificial Sequence: Synthetic oligonucleotide
  Antisense strand to SEQ ID NO: 1087524
uuggcaaacaauaauagac

SEQ ID NO: 1087526 - RNA, 19 nt, Artificial Sequence
  Description of Artificial Sequence: Synthetic oligonucleotide
  Sense strand starting at position 3288 of SEQ ID NO: 915541
cuauuauuguuugccaaag

SEQ ID NO: 1087527 - RNA, 19 nt, Artificial Sequence
  Description of Artificial Sequence: Synthetic oligonucleotide
  Antisense strand to SEQ ID NO: 1087526
cuuuggcaaacaauaauag

SEQ ID NO: 1087528 - RNA, 19 nt, Artificial Sequence
  Description of Artificial Sequence: Synthetic oligonucleotide
  Sense strand starting at position 3290 of SEQ ID NO: 915541
auuauuguuugccaaagua

SEQ ID NO: 1087529 - RNA, 19 nt, Artificial Sequence
  Description of Artificial Sequence: Synthetic oligonucleotide
  Antisense strand to SEQ ID NO: 1087528
uacuuuggcaaacaauaau

SEQ ID NO: 1087530 - RNA, 19 nt, Artificial Sequence
  Description of Artificial Sequence: Synthetic oligonucleotide
  Sense strand starting at position 3319 of SEQ ID NO: 915541
cgggcuaauugaugucuaa

SEQ ID NO: 1087531 - RNA, 19 nt, Artificial Sequence
  Description of Artificial Sequence: Synthetic oligonucleotide
  Antisense strand to SEQ ID NO: 1087530
uuagacaucaauuagcccg

SEQ ID NO: 1087532 - RNA, 19 nt, Artificial Sequence
  Description of Artificial Sequence: Synthetic oligonucleotide
  Sense strand starting at position 3323 of SEQ ID NO: 915541
cuaauugaugucuaagccu

SEQ ID NO: 1087533 - RNA, 19 nt, Artificial Sequence
  Description of Artificial Sequence: Synthetic oligonucleotide
  Antisense strand to SEQ ID NO: 1087532
aggcuuagacaucaauuag

SEQ ID NO: 1087534 - RNA, 19 nt, Artificial Sequence
  Description of Artificial Sequence: Synthetic oligonucleotide
  Sense strand starting at position 3490 of SEQ ID NO: 915541
ggcgucaucuugugaaucu

SEQ ID NO: 1087535 - RNA, 19 nt, Artificial Sequence
  Description of Artificial Sequence: Synthetic oligonucleotide
  Antisense strand to SEQ ID NO: 1087534
agauucacaagaugacgcc

SEQ ID NO: 1087536 - RNA, 19 nt, Artificial Sequence
  Description of Artificial Sequence: Synthetic oligonucleotide
  Sense strand starting at position 3491 of SEQ ID NO: 915541
gcgucaucuugugaaucuc

SEQ ID NO: 1087537 - RNA, 19 nt, Artificial Sequence
  Description of Artificial Sequence: Synthetic oligonucleotide
  Antisense strand to SEQ ID NO: 1087536
gagauucacaagaugacgc

SEQ ID NO: 1087538 - RNA, 19 nt, Artificial Sequence
  Description of Artificial Sequence: Synthetic oligonucleotide
  Sense strand starting at position 3501 of SEQ ID NO: 915541
gugaaucucuagcucacaa

SEQ ID NO: 1087539 - RNA, 19 nt, Artificial Sequence
  Description of Artificial Sequence: Synthetic oligonucleotide
  Antisense strand to SEQ ID NO: 1087538
uugugagcuagagauucac

SEQ ID NO: 1087540 - RNA, 19 nt, Artificial Sequence
  Description of Artificial Sequence: Synthetic oligonucleotide
  Sense strand starting at position 3730 of SEQ ID NO: 915541
ugacuagacccggguucua

SEQ ID NO: 1087541 - RNA, 19 nt, Artificial Sequence
  Description of Artificial Sequence: Synthetic oligonucleotide
  Antisense strand to SEQ ID NO: 1087540
uagaacccgggucuaguca

SEQ ID NO: 1087542 - RNA, 19 nt, Artificial Sequence
  Description of Artificial Sequence: Synthetic oligonucleotide
  Sense strand starting at position 3778 of SEQ ID NO: 915541
aggugucagucuuugacau

SEQ ID NO: 1087543 - RNA, 19 nt, Artificial Sequence
  Description of Artificial Sequence: Synthetic oligonucleotide
  Antisense strand to SEQ ID NO: 1087542
augucaaagacugacaccu

SEQ ID NO: 1087544 - RNA, 19 nt, Artificial Sequence
  Description of Artificial Sequence: Synthetic oligonucleotide
  Sense strand starting at position 3779 of SEQ ID NO: 915541
ggugucagucuuugacaua

SEQ ID NO: 1087545 - RNA, 19 nt, Artificial Sequence
  Description of Artificial Sequence: Synthetic oligonucleotide
  Antisense strand to SEQ ID NO: 1087544
uaugucaaagacugacacc

SEQ ID NO: 1087546 - RNA, 19 nt, Artificial Sequence
  Description of Artificial Sequence: Synthetic oligonucleotide
  Sense strand starting at position 3780 of SEQ ID NO: 915541
gugucagucuuugacauaa

SEQ ID NO: 1087547 - RNA, 19 nt, Artificial Sequence
  Description of Artificial Sequence: Synthetic oligonucleotide
  Antisense strand to SEQ ID NO: 1087546
uuaugucaaagacugacac

SEQ ID NO: 1087548 - RNA, 19 nt, Artificial Sequence
  Description of Artificial Sequence: Synthetic oligonucleotide
  Sense strand starting at position 3806 of SEQ ID NO: 915541
augugauacucaccucuua

SEQ ID NO: 1087549 - RNA, 19 nt, Artificial Sequence
  Description of Artificial Sequence: Synthetic oligonucleotide
  Antisense strand to SEQ ID NO: 1087548
uaagaggugaguaucacau

SEQ ID NO: 1087550 - RNA, 19 nt, Artificial Sequence
  Description of Artificial Sequence: Synthetic oligonucleotide
  Sense strand starting at position 3817 of SEQ ID NO: 915541
accucuuagugaguucuaa

SEQ ID NO: 1087551 - RNA, 19 nt, Artificial Sequence
  Description of Artificial Sequence: Synthetic oligonucleotide
  Antisense strand to SEQ ID NO: 1087550
uuagaacucacuaagaggu

SEQ ID NO: 1087552 - RNA, 19 nt, Artificial Sequence
  Description of Artificial Sequence: Synthetic oligonucleotide
  Sense strand starting at position 3821 of SEQ ID NO: 915541
cuuagugaguucuaaggau

SEQ ID NO: 1087553 - RNA, 19 nt, Artificial Sequence
  Description of Artificial Sequence: Synthetic oligonucleotide
  Antisense strand to SEQ ID NO: 1087552
auccuuagaacucacuaag

SEQ ID NO: 1087554 - RNA, 19 nt, Artificial Sequence
  Description of Artificial Sequence: Synthetic oligonucleotide
  Sense strand starting at position 3904 of SEQ ID NO: 915541
gacgcaugagaaugacaca

SEQ ID NO: 1087555 - RNA, 19 nt, Artificial Sequence
  Description of Artificial Sequence: Synthetic oligonucleotide
  Antisense strand to SEQ ID NO: 1087554
ugugucauucucaugcguc

SEQ ID NO: 1087556 - RNA, 19 nt, Artificial Sequence
  Description of Artificial Sequence: Synthetic oligonucleotide
  Sense strand starting at position 114 of SEQ ID NO: 915542
cgcgggacucugggagaau

SEQ ID NO: 1087557 - RNA, 19 nt, Artificial Sequence
  Description of Artificial Sequence: Synthetic oligonucleotide
  Antisense strand to SEQ ID NO: 1087556
auucucccagagucccgcg

SEQ ID NO: 1087558 - RNA, 19 nt, Artificial Sequence
  Description of Artificial Sequence: Synthetic oligonucleotide
  Sense strand starting at position 144 of SEQ ID NO: 915542
ccaccucuccgagagcuuu

SEQ ID NO: 1087559 - RNA, 19 nt, Artificial Sequence
  Description of Artificial Sequence: Synthetic oligonucleotide
  Antisense strand to SEQ ID NO: 1087558
aaagcucucggagaggugg

SEQ ID NO: 1087560 - RNA, 19 nt, Artificial Sequence
  Description of Artificial Sequence: Synthetic oligonucleotide
  Sense strand starting at position 150 of SEQ ID NO: 915542
cuccgagagcuuuacucuu

SEQ ID NO: 1087561 - RNA, 19 nt, Artificial Sequence
  Description of Artificial Sequence: Synthetic oligonucleotide
  Antisense strand to SEQ ID NO: 1087560
aagaguaaagcucucggag

SEQ ID NO: 1087562 - RNA, 19 nt, Artificial Sequence
  Description of Artificial Sequence: Synthetic oligonucleotide
  Sense strand starting at position 521 of SEQ ID NO: 915542
ugaggucaaaggugaacuu

SEQ ID NO: 1087563 - RNA, 19 nt, Artificial Sequence
  Description of Artificial Sequence: Synthetic oligonucleotide
  Antisense strand to SEQ ID NO: 1087562
aaguucaccuuugaccuca

SEQ ID NO: 1087564 - RNA, 19 nt, Artificial Sequence
  Description of Artificial Sequence: Synthetic oligonucleotide
  Sense strand starting at position 530 of SEQ ID NO: 915542
aggugaacuuccuuuguaa

SEQ ID NO: 1087565 - RNA, 19 nt, Artificial Sequence
  Description of Artificial Sequence: Synthetic oligonucleotide
  Antisense strand to SEQ ID NO: 1087564
uuacaaaggaaguucaccu

SEQ ID NO: 1087566 - RNA, 19 nt, Artificial Sequence
  Description of Artificial Sequence: Synthetic oligonucleotide
  Sense strand starting at position 777 of SEQ ID NO: 915542
ugguguuguccaggcugga

SEQ ID NO: 1087567 - RNA, 19 nt, Artificial Sequence
  Description of Artificial Sequence: Synthetic oligonucleotide
  Antisense strand to SEQ ID NO: 1087566
uccagccuggacaacacca

SEQ ID NO: 1087568 - RNA, 19 nt, Artificial Sequence
  Description of Artificial Sequence: Synthetic oligonucleotide
  Sense strand starting at position 953 of SEQ ID NO: 915542
cagccuggucucgaaaucu

SEQ ID NO: 1087569 - RNA, 19 nt, Artificial Sequence
  Description of Artificial Sequence: Synthetic oligonucleotide
  Antisense strand to SEQ ID NO: 1087568
agauuucgagaccaggcug

SEQ ID NO: 1087570 - RNA, 19 nt, Artificial Sequence
  Description of Artificial Sequence: Synthetic oligonucleotide
  Sense strand starting at position 1491 of SEQ ID NO: 915542
uugggugugaugugacaga

SEQ ID NO: 1087571 - RNA, 19 nt, Artificial Sequence
  Description of Artificial Sequence: Synthetic oligonucleotide
  Antisense strand to SEQ ID NO: 1087570
ucugucacaucacacccaa

SEQ ID NO: 1087572 - RNA, 19 nt, Artificial Sequence
  Description of Artificial Sequence: Synthetic oligonucleotide
  Sense strand starting at position 1759 of SEQ ID NO: 915542
ggaggagucgugcagagua

SEQ ID NO: 1087573 - RNA, 19 nt, Artificial Sequence
  Description of Artificial Sequence: Synthetic oligonucleotide
  Antisense strand to SEQ ID NO: 1087572
uacucugcacgacuccucc

SEQ ID NO: 1087574 - RNA, 19 nt, Artificial Sequence
  Description of Artificial Sequence: Synthetic oligonucleotide
  Sense strand starting at position 1761 of SEQ ID NO: 915542
aggagucgugcagaguaca

SEQ ID NO: 1087575 - RNA, 19 nt, Artificial Sequence
  Description of Artificial Sequence: Synthetic oligonucleotide
  Antisense strand to SEQ ID NO: 1087574
uguacucugcacgacuccu

SEQ ID NO: 1087576 - RNA, 19 nt, Artificial Sequence
  Description of Artificial Sequence: Synthetic oligonucleotide
  Sense strand starting at position 1834 of SEQ ID NO: 915542
caaugauccucgcucugag

SEQ ID NO: 1087577 - RNA, 19 nt, Artificial Sequence
  Description of Artificial Sequence: Synthetic oligonucleotide
  Antisense strand to SEQ ID NO: 1087576
cucagagcgaggaucauug

SEQ ID NO: 1087578 - RNA, 19 nt, Artificial Sequence
  Description of Artificial Sequence: Synthetic oligonucleotide
  Sense strand starting at position 1837 of SEQ ID NO: 915542
ugauccucgcucugaggau

SEQ ID NO: 1087579 - RNA, 19 nt, Artificial Sequence
  Description of Artificial Sequence: Synthetic oligonucleotide
  Antisense strand to SEQ ID NO: 1087578
auccucagagcgaggauca

SEQ ID NO: 1087580 - RNA, 19 nt, Artificial Sequence
  Description of Artificial Sequence: Synthetic oligonucleotide
  Sense strand starting at position 2107 of SEQ ID NO: 915542
ggcuguucucuucaggguu

SEQ ID NO: 1087581 - RNA, 19 nt, Artificial Sequence
  Description of Artificial Sequence: Synthetic oligonucleotide
  Antisense strand to SEQ ID NO: 1087580
aacccugaagagaacagcc

SEQ ID NO: 1087582 - RNA, 19 nt, Artificial Sequence
  Description of Artificial Sequence: Synthetic oligonucleotide
  Sense strand starting at position 2215 of SEQ ID NO: 915542
uauuuaaagugcguguuga

SEQ ID NO: 1087583 - RNA, 19 nt, Artificial Sequence
  Description of Artificial Sequence: Synthetic oligonucleotide
  Antisense strand to SEQ ID NO: 1087582
ucaacacgcacuuuaaaua

SEQ ID NO: 1087584 - RNA, 19 nt, Artificial Sequence
  Description of Artificial Sequence: Synthetic oligonucleotide
  Sense strand starting at position 2216 of SEQ ID NO: 915542
auuuaaagugcguguugau

SEQ ID NO: 1087585 - RNA, 19 nt, Artificial Sequence
  Description of Artificial Sequence: Synthetic oligonucleotide
  Antisense strand to SEQ ID NO: 1087584
aucaacacgcacuuuaaau

SEQ ID NO: 1087586 - RNA, 19 nt, Artificial Sequence
  Description of Artificial Sequence: Synthetic oligonucleotide
  Sense strand starting at position 2223 of SEQ ID NO: 915542
gugcguguugaucugcaau

SEQ ID NO: 1087587 - RNA, 19 nt, Artificial Sequence
  Description of Artificial Sequence: Synthetic oligonucleotide
  Antisense strand to SEQ ID NO: 1087586
auugcagaucaacacgcac

SEQ ID NO: 1087588 - RNA, 19 nt, Artificial Sequence
  Description of Artificial Sequence: Synthetic oligonucleotide
  Sense strand starting at position 2243 of SEQ ID NO: 915542
gcaccauucugcucaguca

SEQ ID NO: 1087589 - RNA, 19 nt, Artificial Sequence
  Description of Artificial Sequence: Synthetic oligonucleotide
  Antisense strand to SEQ ID NO: 1087588
ugacugagcagaauggugc

SEQ ID NO: 1087590 - RNA, 19 nt, Artificial Sequence
  Description of Artificial Sequence: Synthetic oligonucleotide
  Sense strand starting at position 2571 of SEQ ID NO: 915542
augggaagaacuugucugu

SEQ ID NO: 1087591 - RNA, 19 nt, Artificial Sequence
  Description of Artificial Sequence: Synthetic oligonucleotide
  Antisense strand to SEQ ID NO: 1087590
acagacaaguucuucccau

SEQ ID NO: 1087592 - RNA, 19 nt, Artificial Sequence
  Description of Artificial Sequence: Synthetic oligonucleotide
  Sense strand starting at position 2574 of SEQ ID NO: 915542
ggaagaacuugucugucug

SEQ ID NO: 1087593 - RNA, 19 nt, Artificial Sequence
  Description of Artificial Sequence: Synthetic oligonucleotide
  Antisense strand to SEQ ID NO: 1087592
cagacagacaaguucuucc

SEQ ID NO: 1087594 - RNA, 19 nt, Artificial Sequence
  Description of Artificial Sequence: Synthetic oligonucleotide
  Sense strand starting at position 2578 of SEQ ID NO: 915542
gaacuugucugucuggaca

SEQ ID NO: 1087595 - RNA, 19 nt, Artificial Sequence
  Description of Artificial Sequence: Synthetic oligonucleotide
  Antisense strand to SEQ ID NO: 1087594
uguccagacagacaaguuc

SEQ ID NO: 1087596 - RNA, 19 nt, Artificial Sequence
  Description of Artificial Sequence: Synthetic oligonucleotide
  Sense strand starting at position 2643 of SEQ ID NO: 915542
cucaauaaauccugaguga

SEQ ID NO: 1087597 - RNA, 19 nt, Artificial Sequence
  Description of Artificial Sequence: Synthetic oligonucleotide
  Antisense strand to SEQ ID NO: 1087596
ucacucaggauuuauugag

SEQ ID NO: 1087598 - RNA, 19 nt, Artificial Sequence
  Description of Artificial Sequence: Synthetic oligonucleotide
  Sense strand starting at position 2646 of SEQ ID NO: 915542
aauaaauccugagugacug

SEQ ID NO: 1087599 - RNA, 19 nt, Artificial Sequence
  Description of Artificial Sequence: Synthetic oligonucleotide
  Antisense strand to SEQ ID NO: 1087598
cagucacucaggauuuauu

SEQ ID NO: 1087600 - RNA, 19 nt, Artificial Sequence
  Description of Artificial Sequence: Synthetic oligonucleotide
  Sense strand starting at position 2647 of SEQ ID NO: 915542
auaaauccugagugacuga

SEQ ID NO: 1087601 - RNA, 19 nt, Artificial Sequence
  Description of Artificial Sequence: Synthetic oligonucleotide
  Antisense strand to SEQ ID NO: 1087600
ucagucacucaggauuuau

SEQ ID NO: 1087602 - RNA, 19 nt, Artificial Sequence
  Description of Artificial Sequence: Synthetic oligonucleotide
  Sense strand starting at position 2900 of SEQ ID NO: 915542
gguggacagauucgggaaa

SEQ ID NO: 1087603 - RNA, 19 nt, Artificial Sequence
  Description of Artificial Sequence: Synthetic oligonucleotide
  Antisense strand to SEQ ID NO: 1087602
uuucccgaaucuguccacc

SEQ ID NO: 1087604 - RNA, 19 nt, Artificial Sequence
  Description of Artificial Sequence: Synthetic oligonucleotide
  Sense strand starting at position 2902 of SEQ ID NO: 915542
uggacagauucgggaaaca

SEQ ID NO: 1087605 - RNA, 19 nt, Artificial Sequence
  Description of Artificial Sequence: Synthetic oligonucleotide
  Antisense strand to SEQ ID NO: 1087604
uguuucccgaaucugucca

SEQ ID NO: 1087606 - RNA, 19 nt, Artificial Sequence
  Description of Artificial Sequence: Synthetic oligonucleotide
  Sense strand starting at position 3538 of SEQ ID NO: 915542
cagugauguugagcaaccu

SEQ ID NO: 1087607 - RNA, 19 nt, Artificial Sequence
  Description of Artificial Sequence: Synthetic oligonucleotide
  Antisense strand to SEQ ID NO: 1087606
agguugcucaacaucacug

SEQ ID NO: 1087608 - RNA, 19 nt, Artificial Sequence
  Description of Artificial Sequence: Synthetic oligonucleotide
  Sense strand starting at position 3573 of SEQ ID NO: 915542
ggucuauuauuguuugcca

SEQ ID NO: 1087609 - RNA, 19 nt, Artificial Sequence
  Description of Artificial Sequence: Synthetic oligonucleotide
  Antisense strand to SEQ ID NO: 1087608
uggcaaacaauaauagacc

SEQ ID NO: 1087610 - RNA, 19 nt, Artificial Sequence
  Description of Artificial Sequence: Synthetic oligonucleotide
  Sense strand starting at position 3574 of SEQ ID NO: 915542
gucuauuauuguuugccaa

SEQ ID NO: 1087611 - RNA, 19 nt, Artificial Sequence
  Description of Artificial Sequence: Synthetic oligonucleotide
  Antisense strand to SEQ ID NO: 1087610
uuggcaaacaauaauagac

SEQ ID NO: 1087612 - RNA, 19 nt, Artificial Sequence
  Description of Artificial Sequence: Synthetic oligonucleotide
  Sense strand starting at position 3576 of SEQ ID NO: 915542
cuauuauuguuugccaaag

SEQ ID NO: 1087613 - RNA, 19 nt, Artificial Sequence
  Description of Artificial Sequence: Synthetic oligonucleotide
  Antisense strand to SEQ ID NO: 1087612
cuuuggcaaacaauaauag

SEQ ID NO: 1087614 - RNA, 19 nt, Artificial Sequence
  Description of Artificial Sequence: Synthetic oligonucleotide
  Sense strand starting at position 3578 of SEQ ID NO: 915542
auuauuguuugccaaagua

SEQ ID NO: 1087615 - RNA, 19 nt, Artificial Sequence
  Description of Artificial Sequence: Synthetic oligonucleotide
  Antisense strand to SEQ ID NO: 1087614
uacuuuggcaaacaauaau

SEQ ID NO: 1087616 - RNA, 19 nt, Artificial Sequence
  Description of Artificial Sequence: Synthetic oligonucleotide
  Sense strand starting at position 3607 of SEQ ID NO: 915542
cgggcuaauugaugucuaa

SEQ ID NO: 1087617 - RNA, 19 nt, Artificial Sequence
  Description of Artificial Sequence: Synthetic oligonucleotide
  Antisense strand to SEQ ID NO: 1087616
uuagacaucaauuagcccg

SEQ ID NO: 1087618 - RNA, 19 nt, Artificial Sequence
  Description of Artificial Sequence: Synthetic oligonucleotide
  Sense strand starting at position 3611 of SEQ ID NO: 915542
cuaauugaugucuaagccu

SEQ ID NO: 1087619 - RNA, 19 nt, Artificial Sequence
  Description of Artificial Sequence: Synthetic oligonucleotide
  Antisense strand to SEQ ID NO: 1087618
aggcuuagacaucaauuag

SEQ ID NO: 1087620 - RNA, 19 nt, Artificial Sequence
  Description of Artificial Sequence: Synthetic oligonucleotide
  Sense strand starting at position 3778 of SEQ ID NO: 915542
ggcgucaucuugugaaucu

SEQ ID NO: 1087621 - RNA, 19 nt, Artificial Sequence
  Description of Artificial Sequence: Synthetic oligonucleotide
  Antisense strand to SEQ ID NO: 1087620
agauucacaagaugacgcc

SEQ ID NO: 1087622 - RNA, 19 nt, Artificial Sequence
  Description of Artificial Sequence: Synthetic oligonucleotide
  Sense strand starting at position 3779 of SEQ ID NO: 915542
gcgucaucuugugaaucuc

SEQ ID NO: 1087623 - RNA, 19 nt, Artificial Sequence
  Description of Artificial Sequence: Synthetic oligonucleotide
  Antisense strand to SEQ ID NO: 1087622
gagauucacaagaugacgc

SEQ ID NO: 1087624 - RNA, 19 nt, Artificial Sequence
  Description of Artificial Sequence: Synthetic oligonucleotide
  Sense strand starting at position 3789 of SEQ ID NO: 915542
gugaaucucuagcucacaa

SEQ ID NO: 1087625 - RNA, 19 nt, Artificial Sequence
  Description of Artificial Sequence: Synthetic oligonucleotide
  Antisense strand to SEQ ID NO: 1087624
uugugagcuagagauucac

SEQ ID NO: 1087626 - RNA, 19 nt, Artificial Sequence
  Description of Artificial Sequence: Synthetic oligonucleotide
  Sense strand starting at position 3932 of SEQ ID NO: 915542
uaaccaugcucgugcaguu

SEQ ID NO: 1087627 - RNA, 19 nt, Artificial Sequence
  Description of Artificial Sequence: Synthetic oligonucleotide
  Antisense strand to SEQ ID NO: 1087626
aacugcacgagcaugguua

SEQ ID NO: 1087628 - RNA, 19 nt, Artificial Sequence
  Description of Artificial Sequence: Synthetic oligonucleotide
  Sense strand starting at position 176 of SEQ ID NO: 915543
uugggugugaugugacaga

SEQ ID NO: 1087629 - RNA, 19 nt, Artificial Sequence
  Description of Artificial Sequence: Synthetic oligonucleotide
  Antisense strand to SEQ ID NO: 1087628
ucugucacaucacacccaa

SEQ ID NO: 1087630 - RNA, 19 nt, Artificial Sequence
  Description of Artificial Sequence: Synthetic oligonucleotide
  Sense strand starting at position 444 of SEQ ID NO: 915543
ggaggagucgugcagagua

SEQ ID NO: 1087631 - RNA, 19 nt, Artificial Sequence
  Description of Artificial Sequence: Synthetic oligonucleotide
  Antisense strand to SEQ ID NO: 1087630
uacucugcacgacuccucc

SEQ ID NO: 1087632 - RNA, 19 nt, Artificial Sequence
  Description of Artificial Sequence: Synthetic oligonucleotide
  Sense strand starting at position 446 of SEQ ID NO: 915543
aggagucgugcagaguaca

SEQ ID NO: 1087633 - RNA, 19 nt, Artificial Sequence
  Description of Artificial Sequence: Synthetic oligonucleotide
  Antisense strand to SEQ ID NO: 1087632
uguacucugcacgacuccu

SEQ ID NO: 1087634 - RNA, 19 nt, Artificial Sequence
  Description of Artificial Sequence: Synthetic oligonucleotide
  Sense strand starting at position 519 of SEQ ID NO: 915543
caaugauccucgcucugag

SEQ ID NO: 1087635 - RNA, 19 nt, Artificial Sequence
  Description of Artificial Sequence: Synthetic oligonucleotide
  Antisense strand to SEQ ID NO: 1087634
cucagagcgaggaucauug

SEQ ID NO: 1087636 - RNA, 19 nt, Artificial Sequence
  Description of Artificial Sequence: Synthetic oligonucleotide
  Sense strand starting at position 522 of SEQ ID NO: 915543
ugauccucgcucugaggau

SEQ ID NO: 1087637 - RNA, 19 nt, Artificial Sequence
  Description of Artificial Sequence: Synthetic oligonucleotide
  Antisense strand to SEQ ID NO: 1087636
auccucagagcgaggauca

SEQ ID NO: 1087638 - RNA, 19 nt, Artificial Sequence
  Description of Artificial Sequence: Synthetic oligonucleotide
  Sense strand starting at position 792 of SEQ ID NO: 915543
ggcuguucucuucaggguu

SEQ ID NO: 1087639 - RNA, 19 nt, Artificial Sequence
  Description of Artificial Sequence: Synthetic oligonucleotide
  Antisense strand to SEQ ID NO: 1087638
aacccugaagagaacagcc

SEQ ID NO: 1087640 - RNA, 19 nt, Artificial Sequence
  Description of Artificial Sequence: Synthetic oligonucleotide
  Sense strand starting at position 900 of SEQ ID NO: 915543
uauuuaaagugcguguuga

SEQ ID NO: 1087641 - RNA, 19 nt, Artificial Sequence
  Description of Artificial Sequence: Synthetic oligonucleotide
  Antisense strand to SEQ ID NO: 1087640
ucaacacgcacuuuaaaua

SEQ ID NO: 1087642 - RNA, 19 nt, Artificial Sequence
  Description of Artificial Sequence: Synthetic oligonucleotide
  Sense strand starting at position 901 of SEQ ID NO: 915543
auuuaaagugcguguugau

SEQ ID NO: 1087643 - RNA, 19 nt, Artificial Sequence
  Description of Artificial Sequence: Synthetic oligonucleotide
  Antisense strand to SEQ ID NO: 1087642
aucaacacgcacuuuaaau

SEQ ID NO: 1087644 - RNA, 19 nt, Artificial Sequence
  Description of Artificial Sequence: Synthetic oligonucleotide
  Sense strand starting at position 908 of SEQ ID NO: 915543
gugcguguugaucugcaau

SEQ ID NO: 1087645 - RNA, 19 nt, Artificial Sequence
  Description of Artificial Sequence: Synthetic oligonucleotide
  Antisense strand to SEQ ID NO: 1087644
auugcagaucaacacgcac

SEQ ID NO: 1087646 - RNA, 19 nt, Artificial Sequence
  Description of Artificial Sequence: Synthetic oligonucleotide
  Sense strand starting at position 928 of SEQ ID NO: 915543
gcaccauucugcucaguca

SEQ ID NO: 1087647 - RNA, 19 nt, Artificial Sequence
  Description of Artificial Sequence: Synthetic oligonucleotide
  Antisense strand to SEQ ID NO: 1087646
ugacugagcagaauggugc

SEQ ID NO: 1087648 - RNA, 19 nt, Artificial Sequence
  Description of Artificial Sequence: Synthetic oligonucleotide
  Sense strand starting at position 1256 of SEQ ID NO: 915543
augggaagaacuugucugu

SEQ ID NO: 1087649 - RNA, 19 nt, Artificial Sequence
  Description of Artificial Sequence: Synthetic oligonucleotide
  Antisense strand to SEQ ID NO: 1087648
acagacaaguucuucccau

SEQ ID NO: 1087650 - RNA, 19 nt, Artificial Sequence
  Description of Artificial Sequence: Synthetic oligonucleotide
  Sense strand starting at position 1259 of SEQ ID NO: 915543
ggaagaacuugucugucug

SEQ ID NO: 1087651 - RNA, 19 nt, Artificial Sequence
  Description of Artificial Sequence: Synthetic oligonucleotide
  Antisense strand to SEQ ID NO: 1087650
cagacagacaaguucuucc

SEQ ID NO: 1087652 - RNA, 19 nt, Artificial Sequence
  Description of Artificial Sequence: Synthetic oligonucleotide
  Sense strand starting at position 1263 of SEQ ID NO: 915543
gaacuugucugucuggaca

SEQ ID NO: 1087653 - RNA, 19 nt, Artificial Sequence
  Description of Artificial Sequence: Synthetic oligonucleotide
  Antisense strand to SEQ ID NO: 1087652
uguccagacagacaaguuc

SEQ ID NO: 1087654 - RNA, 19 nt, Artificial Sequence
  Description of Artificial Sequence: Synthetic oligonucleotide
  Sense strand starting at position 1331 of SEQ ID NO: 915543
aauaaauccugagugacug

SEQ ID NO: 1087655 - RNA, 19 nt, Artificial Sequence
  Description of Artificial Sequence: Synthetic oligonucleotide
  Antisense strand to SEQ ID NO: 1087654
cagucacucaggauuuauu

SEQ ID NO: 1087656 - RNA, 19 nt, Artificial Sequence
  Description of Artificial Sequence: Synthetic oligonucleotide
  Sense strand starting at position 1332 of SEQ ID NO: 915543
auaaauccugagugacuga

SEQ ID NO: 1087657 - RNA, 19 nt, Artificial Sequence
  Description of Artificial Sequence: Synthetic oligonucleotide
  Antisense strand to SEQ ID NO: 1087656
ucagucacucaggauuuau

SEQ ID NO: 1087658 - RNA, 19 nt, Artificial Sequence
  Description of Artificial Sequence: Synthetic oligonucleotide
  Sense strand starting at position 1585 of SEQ ID NO: 915543
gguggacagauucgggaaa

SEQ ID NO: 1087659 - RNA, 19 nt, Artificial Sequence
  Description of Artificial Sequence: Synthetic oligonucleotide
  Antisense strand to SEQ ID NO: 1087658
uuucccgaaucuguccacc

SEQ ID NO: 1087660 - RNA, 19 nt, Artificial Sequence
  Description of Artificial Sequence: Synthetic oligonucleotide
  Sense strand starting at position 1587 of SEQ ID NO: 915543
uggacagauucgggaaaca

SEQ ID NO: 1087661 - RNA, 19 nt, Artificial Sequence
  Description of Artificial Sequence: Synthetic oligonucleotide
  Antisense strand to SEQ ID NO: 1087660
uguuucccgaaucugucca

SEQ ID NO: 1087662 - RNA, 19 nt, Artificial Sequence
  Description of Artificial Sequence: Synthetic oligonucleotide
  Sense strand starting at position 2223 of SEQ ID NO: 915543
cagugauguugagcaaccu

SEQ ID NO: 1087663 - RNA, 19 nt, Artificial Sequence
  Description of Artificial Sequence: Synthetic oligonucleotide
  Antisense strand to SEQ ID NO: 1087662
agguugcucaacaucacug

SEQ ID NO: 1087664 - RNA, 19 nt, Artificial Sequence
  Description of Artificial Sequence: Synthetic oligonucleotide
  Sense strand starting at position 2258 of SEQ ID NO: 915543
ggucuauuauuguuugcca

SEQ ID NO: 1087665 - RNA, 19 nt, Artificial Sequence
  Description of Artificial Sequence: Synthetic oligonucleotide
  Antisense strand to SEQ ID NO: 1087664
uggcaaacaauaauagacc

SEQ ID NO: 1087666 - RNA, 19 nt, Artificial Sequence
  Description of Artificial Sequence: Synthetic oligonucleotide
  Sense strand starting at position 2259 of SEQ ID NO: 915543
gucuauuauuguuugccaa

SEQ ID NO: 1087667 - RNA, 19 nt, Artificial Sequence
  Description of Artificial Sequence: Synthetic oligonucleotide
  Antisense strand to SEQ ID NO: 1087666
uuggcaaacaauaauagac

SEQ ID NO: 1087668 - RNA, 19 nt, Artificial Sequence
  Description of Artificial Sequence: Synthetic oligonucleotide
  Sense strand starting at position 2261 of SEQ ID NO: 915543
cuauuauuguuugccaaag

SEQ ID NO: 1087669 - RNA, 19 nt, Artificial Sequence
  Description of Artificial Sequence: Synthetic oligonucleotide
  Antisense strand to SEQ ID NO: 1087668
cuuuggcaaacaauaauag

SEQ ID NO: 1087670 - RNA, 19 nt, Artificial Sequence
  Description of Artificial Sequence: Synthetic oligonucleotide
  Sense strand starting at position 2296 of SEQ ID NO: 915543
cuaauugaugucuaagccu

SEQ ID NO: 1087671 - RNA, 19 nt, Artificial Sequence
  Description of Artificial Sequence: Synthetic oligonucleotide
  Antisense strand to SEQ ID NO: 1087670
aggcuuagacaucaauuag

SEQ ID NO: 1087672 - RNA, 19 nt, Artificial Sequence
  Description of Artificial Sequence: Synthetic oligonucleotide
  Sense strand starting at position 2474 of SEQ ID NO: 915543
gugaaucucuagcucacaa

SEQ ID NO: 1087673 - RNA, 19 nt, Artificial Sequence
  Description of Artificial Sequence: Synthetic oligonucleotide
  Antisense strand to SEQ ID NO: 1087672
uugugagcuagagauucac

SEQ ID NO: 1087674 - RNA, 19 nt, Artificial Sequence
  Description of Artificial Sequence: Synthetic oligonucleotide
  Sense strand starting at position 2703 of SEQ ID NO: 915543
ugacuagacccggguucua

SEQ ID NO: 1087675 - RNA, 19 nt, Artificial Sequence
  Description of Artificial Sequence: Synthetic oligonucleotide
  Antisense strand to SEQ ID NO: 1087674
uagaacccgggucuaguca

SEQ ID NO: 1087676 - RNA, 19 nt, Artificial Sequence
  Description of Artificial Sequence: Synthetic oligonucleotide
  Sense strand starting at position 2751 of SEQ ID NO: 915543
aggugucagucuuugacau

SEQ ID NO: 1087677 - RNA, 19 nt, Artificial Sequence
  Description of Artificial Sequence: Synthetic oligonucleotide
  Antisense strand to SEQ ID NO: 1087676
augucaaagacugacaccu

SEQ ID NO: 1087678 - RNA, 19 nt, Artificial Sequence
  Description of Artificial Sequence: Synthetic oligonucleotide
  Sense strand starting at position 2752 of SEQ ID NO: 915543
ggugucagucuuugacaua

SEQ ID NO: 1087679 - RNA, 19 nt, Artificial Sequence
  Description of Artificial Sequence: Synthetic oligonucleotide
  Antisense strand to SEQ ID NO: 1087678
uaugucaaagacugacacc

SEQ ID NO: 1087680 - RNA, 19 nt, Artificial Sequence
  Description of Artificial Sequence: Synthetic oligonucleotide
  Sense strand starting at position 2779 of SEQ ID NO: 915543
augugauacucaccucuua

SEQ ID NO: 1087681 - RNA, 19 nt, Artificial Sequence
  Description of Artificial Sequence: Synthetic oligonucleotide
  Antisense strand to SEQ ID NO: 1087680
uaagaggugaguaucacau

SEQ ID NO: 1087682 - RNA, 19 nt, Artificial Sequence
  Description of Artificial Sequence: Synthetic oligonucleotide
  Sense strand starting at position 2790 of SEQ ID NO: 915543
accucuuagugaguucuaa

SEQ ID NO: 1087683 - RNA, 19 nt, Artificial Sequence
  Description of Artificial Sequence: Synthetic oligonucleotide
  Antisense strand to SEQ ID NO: 1087682
uuagaacucacuaagaggu

SEQ ID NO: 1087684 - RNA, 19 nt, Artificial Sequence
  Description of Artificial Sequence: Synthetic oligonucleotide
  Sense strand starting at position 2794 of SEQ ID NO: 915543
cuuagugaguucuaaggau

SEQ ID NO: 1087685 - RNA, 19 nt, Artificial Sequence
  Description of Artificial Sequence: Synthetic oligonucleotide
  Antisense strand to SEQ ID NO: 1087684
auccuuagaacucacuaag

SEQ ID NO: 1087686 - RNA, 19 nt, Artificial Sequence
  Description of Artificial Sequence: Synthetic oligonucleotide
  Sense strand starting at position 2877 of SEQ ID NO: 915543
gacgcaugagaaugacaca

SEQ ID NO: 1087687 - RNA, 19 nt, Artificial Sequence
  Description of Artificial Sequence: Synthetic oligonucleotide
  Antisense strand to SEQ ID NO: 1087686
ugugucauucucaugcguc

SEQ ID NO: 1087688 - RNA, 19 nt, Artificial Sequence
  Description of Artificial Sequence: Synthetic oligonucleotide
  Sense strand starting at position 2991 of SEQ ID NO: 915543
cugucaucuucugugguuu

SEQ ID NO: 1087689 - RNA, 19 nt, Artificial Sequence
  Description of Artificial Sequence: Synthetic oligonucleotide
  Antisense strand to SEQ ID NO: 1087688
aaaccacagaagaugacag

SEQ ID NO: 1087690 - RNA, 19 nt, Artificial Sequence
  Description of Artificial Sequence: Synthetic oligonucleotide
  Sense strand starting at position 3063 of SEQ ID NO: 915543
gcaggauggcgcuaucaga

SEQ ID NO: 1087691 - RNA, 19 nt, Artificial Sequence
  Description of Artificial Sequence: Synthetic oligonucleotide
  Antisense strand to SEQ ID NO: 1087690
ucugauagcgccauccugc

SEQ ID NO: 1087692 - RNA, 19 nt, Artificial Sequence
  Description of Artificial Sequence: Synthetic oligonucleotide
  Sense strand starting at position 3593 of SEQ ID NO: 915543
uccucaaguccuuaaguca

SEQ ID NO: 1087693 - RNA, 19 nt, Artificial Sequence
  Description of Artificial Sequence: Synthetic oligonucleotide
  Antisense strand to SEQ ID NO: 1087692
ugacuuaaggacuugagga

SEQ ID NO: 1087694 - RNA, 19 nt, Artificial Sequence
  Description of Artificial Sequence: Synthetic oligonucleotide
  Sense strand starting at position 3626 of SEQ ID NO: 915543
augugaugucaugggcuca

SEQ ID NO: 1087695 - RNA, 19 nt, Artificial Sequence
  Description of Artificial Sequence: Synthetic oligonucleotide
  Antisense strand to SEQ ID NO: 1087694
ugagcccaugacaucacau

SEQ ID NO: 1087696 - RNA, 19 nt, Artificial Sequence
  Description of Artificial Sequence: Synthetic oligonucleotide
  Sense strand starting at position 3652 of SEQ ID NO: 915543
ggcaguguggaucauagga

SEQ ID NO: 1087697 - RNA, 19 nt, Artificial Sequence
  Description of Artificial Sequence: Synthetic oligonucleotide
  Antisense strand to SEQ ID NO: 1087696
uccuaugauccacacugcc

SEQ ID NO: 1087698 - RNA, 19 nt, Artificial Sequence
  Description of Artificial Sequence: Synthetic oligonucleotide
  Sense strand starting at position 3796 of SEQ ID NO: 915543
acugcugucacuugggaca

SEQ ID NO: 1087699 - RNA, 19 nt, Artificial Sequence
  Description of Artificial Sequence: Synthetic oligonucleotide
  Antisense strand to SEQ ID NO: 1087698
ugucccaagugacagcagu

SEQ ID NO: 1087700 - RNA, 19 nt, Artificial Sequence
  Description of Artificial Sequence: Synthetic oligonucleotide
  Sense strand starting at position 3864 of SEQ ID NO: 915543
cccugaguuccacaucuca

SEQ ID NO: 1087701 - RNA, 19 nt, Artificial Sequence
  Description of Artificial Sequence: Synthetic oligonucleotide
  Antisense strand to SEQ ID NO: 1087700
ugagauguggaacucaggg

SEQ ID NO: 1087702 - RNA, 19 nt, Artificial Sequence
  Description of Artificial Sequence: Synthetic oligonucleotide
  Sense strand starting at position 3894 of SEQ ID NO: 915543
guugcauuaccaggacaug

SEQ ID NO: 1087703 - RNA, 19 nt, Artificial Sequence
  Description of Artificial Sequence: Synthetic oligonucleotide
  Antisense strand to SEQ ID NO: 1087702
cauguccugguaaugcaac

SEQ ID NO: 1087704 - RNA, 19 nt, Artificial Sequence
  Description of Artificial Sequence: Synthetic oligonucleotide
  Sense strand starting at position 3904 of SEQ ID NO: 915543
caggacaugucagugacau

SEQ ID NO: 1087705 - RNA, 19 nt, Artificial Sequence
  Description of Artificial Sequence: Synthetic oligonucleotide
  Antisense strand to SEQ ID NO: 1087704
augucacugacauguccug

SEQ ID NO: 1087706 - RNA, 19 nt, Artificial Sequence
  Description of Artificial Sequence: Synthetic oligonucleotide
  Sense strand starting at position 3929 of SEQ ID NO: 915543
gaggguaggugguuucaca

SEQ ID NO: 1087707 - RNA, 19 nt, Artificial Sequence
  Description of Artificial Sequence: Synthetic oligonucleotide
  Antisense strand to SEQ ID NO: 1087706
ugugaaaccaccuacccuc

SEQ ID NO: 1087708 - RNA, 19 nt, Artificial Sequence
  Description of Artificial Sequence: Synthetic oligonucleotide
  Sense strand starting at position 56 of SEQ ID NO: 915544
gugccugcuccacaguaga

SEQ ID NO: 1087709 - RNA, 19 nt, Artificial Sequence
  Description of Artificial Sequence: Synthetic oligonucleotide
  Antisense strand to SEQ ID NO: 1087708
ucuacuguggagcaggcac

SEQ ID NO: 1087710 - RNA, 19 nt, Artificial Sequence
  Description of Artificial Sequence: Synthetic oligonucleotide
  Sense strand starting at position 456 of SEQ ID NO: 915544
ucaaacguucgauaaccga

SEQ ID NO: 1087711 - RNA, 19 nt, Artificial Sequence
  Description of Artificial Sequence: Synthetic oligonucleotide
  Antisense strand to SEQ ID NO: 1087710
ucgguuaucgaacguuuga

SEQ ID NO: 1087712 - RNA, 19 nt, Artificial Sequence
  Description of Artificial Sequence: Synthetic oligonucleotide
  Sense strand starting at position 525 of SEQ ID NO: 915544
cgccuuugcucauuccaga

SEQ ID NO: 1087713 - RNA, 19 nt, Artificial Sequence
  Description of Artificial Sequence: Synthetic oligonucleotide
  Antisense strand to SEQ ID NO: 1087712
ucuggaaugagcaaaggcg

SEQ ID NO: 1087714 - RNA, 19 nt, Artificial Sequence
  Description of Artificial Sequence: Synthetic oligonucleotide
  Sense strand starting at position 573 of SEQ ID NO: 915544
agaugugggcauugcugaa

SEQ ID NO: 1087715 - RNA, 19 nt, Artificial Sequence
  Description of Artificial Sequence: Synthetic oligonucleotide
  Antisense strand to SEQ ID NO: 1087714
uucagcaaugcccacaucu

SEQ ID NO: 1087716 - RNA, 19 nt, Artificial Sequence
  Description of Artificial Sequence: Synthetic oligonucleotide
  Sense strand starting at position 755 of SEQ ID NO: 915544
ccaggagucucaccgggau

SEQ ID NO: 1087717 - RNA, 19 nt, Artificial Sequence
  Description of Artificial Sequence: Synthetic oligonucleotide
  Antisense strand to SEQ ID NO: 1087716
aucccggugagacuccugg

SEQ ID NO: 1087718 - RNA, 19 nt, Artificial Sequence
  Description of Artificial Sequence: Synthetic oligonucleotide
  Sense strand starting at position 767 of SEQ ID NO: 915544
ccgggauggcggugaugaa

SEQ ID NO: 1087719 - RNA, 19 nt, Artificial Sequence
  Description of Artificial Sequence: Synthetic oligonucleotide
  Antisense strand to SEQ ID NO: 1087718
uucaucaccgccaucccgg

SEQ ID NO: 1087720 - RNA, 19 nt, Artificial Sequence
  Description of Artificial Sequence: Synthetic oligonucleotide
  Sense strand starting at position 984 of SEQ ID NO: 915544
ugggaauuguaguucgauc

SEQ ID NO: 1087721 - RNA, 19 nt, Artificial Sequence
  Description of Artificial Sequence: Synthetic oligonucleotide
  Antisense strand to SEQ ID NO: 1087720
gaucgaacuacaauuccca

SEQ ID NO: 1087722 - RNA, 19 nt, Artificial Sequence
  Description of Artificial Sequence: Synthetic oligonucleotide
  Sense strand starting at position 1265 of SEQ ID NO: 915544
ggcggauuucggcgugucu

SEQ ID NO: 1087723 - RNA, 19 nt, Artificial Sequence
  Description of Artificial Sequence: Synthetic oligonucleotide
  Antisense strand to SEQ ID NO: 1087722
agacacgccgaaauccgcc

SEQ ID NO: 1087724 - RNA, 19 nt, Artificial Sequence
  Description of Artificial Sequence: Synthetic oligonucleotide
  Sense strand starting at position 1591 of SEQ ID NO: 915544
ucgucagcuccgaggugau

SEQ ID NO: 1087725 - RNA, 19 nt, Artificial Sequence
  Description of Artificial Sequence: Synthetic oligonucleotide
  Antisense strand to SEQ ID NO: 1087724
aucaccucggagcugacga

SEQ ID NO: 1087726 - RNA, 19 nt, Artificial Sequence
  Description of Artificial Sequence: Synthetic oligonucleotide
  Sense strand starting at position 1882 of SEQ ID NO: 915544
ucucauaaucuacgaauag

SEQ ID NO: 1087727 - RNA, 19 nt, Artificial Sequence
  Description of Artificial Sequence: Synthetic oligonucleotide
  Antisense strand to SEQ ID NO: 1087726
cuauucguagauuaugaga

SEQ ID NO: 1087728 - RNA, 19 nt, Artificial Sequence
  Description of Artificial Sequence: Synthetic oligonucleotide
  Sense strand starting at position 1899 of SEQ ID NO: 915544
agguguggguucucugcaa

SEQ ID NO: 1087729 - RNA, 19 nt, Artificial Sequence
  Description of Artificial Sequence: Synthetic oligonucleotide
  Antisense strand to SEQ ID NO: 1087728
uugcagagaacccacaccu

SEQ ID NO: 1087730 - RNA, 19 nt, Artificial Sequence
  Description of Artificial Sequence: Synthetic oligonucleotide
  Sense strand starting at position 2437 of SEQ ID NO: 915544
agcgccguugagugauaaa

SEQ ID NO: 1087731 - RNA, 19 nt, Artificial Sequence
  Description of Artificial Sequence: Synthetic oligonucleotide
  Antisense strand to SEQ ID NO: 1087730
uuuaucacucaacggcgcu

SEQ ID NO: 1087732 - RNA, 19 nt, Artificial Sequence
  Description of Artificial Sequence: Synthetic oligonucleotide
  Sense strand starting at position 2446 of SEQ ID NO: 915544
gagugauaaaugggugguu

SEQ ID NO: 1087733 - RNA, 19 nt, Artificial Sequence
  Description of Artificial Sequence: Synthetic oligonucleotide
  Antisense strand to SEQ ID NO: 1087732
aaccacccauuuaucacuc

SEQ ID NO: 1087734 - RNA, 19 nt, Artificial Sequence
  Description of Artificial Sequence: Synthetic oligonucleotide
  Sense strand starting at position 2449 of SEQ ID NO: 915544
ugauaaaugggugguugca

SEQ ID NO: 1087735 - RNA, 19 nt, Artificial Sequence
  Description of Artificial Sequence: Synthetic oligonucleotide
  Antisense strand to SEQ ID NO: 1087734
ugcaaccacccauuuauca

SEQ ID NO: 1087736 - RNA, 19 nt, Artificial Sequence
  Description of Artificial Sequence: Synthetic oligonucleotide
  Sense strand starting at position 2554 of SEQ ID NO: 915544
cucugaauaugucaagggu

SEQ ID NO: 1087737 - RNA, 19 nt, Artificial Sequence
  Description of Artificial Sequence: Synthetic oligonucleotide
  Antisense strand to SEQ ID NO: 1087736
acccuugacauauucagag

SEQ ID NO: 1087738 - RNA, 19 nt, Artificial Sequence
  Description of Artificial Sequence: Synthetic oligonucleotide
  Sense strand starting at position 2557 of SEQ ID NO: 915544
ugaauaugucaaggguguu

SEQ ID NO: 1087739 - RNA, 19 nt, Artificial Sequence
  Description of Artificial Sequence: Synthetic oligonucleotide
  Antisense strand to SEQ ID NO: 1087738
aacacccuugacauauuca

SEQ ID NO: 1087740 - RNA, 19 nt, Artificial Sequence
  Description of Artificial Sequence: Synthetic oligonucleotide
  Sense strand starting at position 2558 of SEQ ID NO: 915544
gaauaugucaaggguguua

SEQ ID NO: 1087741 - RNA, 19 nt, Artificial Sequence
  Description of Artificial Sequence: Synthetic oligonucleotide
  Antisense strand to SEQ ID NO: 1087740
uaacacccuugacauauuc

SEQ ID NO: 1087742 - RNA, 19 nt, Artificial Sequence
  Description of Artificial Sequence: Synthetic oligonucleotide
  Sense strand starting at position 2571 of SEQ ID NO: 915544
guguuaacagguugcuaac

SEQ ID NO: 1087743 - RNA, 19 nt, Artificial Sequence
  Description of Artificial Sequence: Synthetic oligonucleotide
  Antisense strand to SEQ ID NO: 1087742
guuagcaaccuguuaacac

SEQ ID NO: 1087744 - RNA, 19 nt, Artificial Sequence
  Description of Artificial Sequence: Synthetic oligonucleotide
  Sense strand starting at position 2878 of SEQ ID NO: 915544
cacugaauuuguugagaca

SEQ ID NO: 1087745 - RNA, 19 nt, Artificial Sequence
  Description of Artificial Sequence: Synthetic oligonucleotide
  Antisense strand to SEQ ID NO: 1087744
ugucucaacaaauucagug

SEQ ID NO: 1087746 - RNA, 19 nt, Artificial Sequence
  Description of Artificial Sequence: Synthetic oligonucleotide
  Sense strand starting at position 2954 of SEQ ID NO: 915544
acaagagagugcugacaca

SEQ ID NO: 1087747 - RNA, 19 nt, Artificial Sequence
  Description of Artificial Sequence: Synthetic oligonucleotide
  Antisense strand to SEQ ID NO: 1087746
ugugucagcacucucuugu

SEQ ID NO: 1087748 - RNA, 19 nt, Artificial Sequence
  Description of Artificial Sequence: Synthetic oligonucleotide
  Sense strand starting at position 2965 of SEQ ID NO: 915544
cugacacauucugggacau

SEQ ID NO: 1087749 - RNA, 19 nt, Artificial Sequence
  Description of Artificial Sequence: Synthetic oligonucleotide
  Antisense strand to SEQ ID NO: 1087748
augucccagaaugugucag

SEQ ID NO: 1087750 - RNA, 19 nt, Artificial Sequence
  Description of Artificial Sequence: Synthetic oligonucleotide
  Sense strand starting at position 2967 of SEQ ID NO: 915544
gacacauucugggacauac

SEQ ID NO: 1087751 - RNA, 19 nt, Artificial Sequence
  Description of Artificial Sequence: Synthetic oligonucleotide
  Antisense strand to SEQ ID NO: 1087750
guaugucccagaauguguc

SEQ ID NO: 1087752 - RNA, 19 nt, Artificial Sequence
  Description of Artificial Sequence: Synthetic oligonucleotide
  Sense strand starting at position 3058 of SEQ ID NO: 915544
aagucugagggcugauuaa

SEQ ID NO: 1087753 - RNA, 19 nt, Artificial Sequence
  Description of Artificial Sequence: Synthetic oligonucleotide
  Antisense strand to SEQ ID NO: 1087752
uuaaucagcccucagacuu

SEQ ID NO: 1087754 - RNA, 19 nt, Artificial Sequence
  Description of Artificial Sequence: Synthetic oligonucleotide
  Sense strand starting at position 3122 of SEQ ID NO: 915544
auuccaucguccuuguaau

SEQ ID NO: 1087755 - RNA, 19 nt, Artificial Sequence
  Description of Artificial Sequence: Synthetic oligonucleotide
  Antisense strand to SEQ ID NO: 1087754
auuacaaggacgauggaau

SEQ ID NO: 1087756 - RNA, 19 nt, Artificial Sequence
  Description of Artificial Sequence: Synthetic oligonucleotide
  Sense strand starting at position 3123 of SEQ ID NO: 915544
uuccaucguccuuguaaua

SEQ ID NO: 1087757 - RNA, 19 nt, Artificial Sequence
  Description of Artificial Sequence: Synthetic oligonucleotide
  Antisense strand to SEQ ID NO: 1087756
uauuacaaggacgauggaa

SEQ ID NO: 1087758 - RNA, 19 nt, Artificial Sequence
  Description of Artificial Sequence: Synthetic oligonucleotide
  Sense strand starting at position 3128 of SEQ ID NO: 915544
ucguccuuguaauaaauau

SEQ ID NO: 1087759 - RNA, 19 nt, Artificial Sequence
  Description of Artificial Sequence: Synthetic oligonucleotide
  Antisense strand to SEQ ID NO: 1087758
auauuuauuacaaggacga

SEQ ID NO: 1087760 - RNA, 19 nt, Artificial Sequence
  Description of Artificial Sequence: Synthetic oligonucleotide
  Sense strand starting at position 3148 of SEQ ID NO: 915544
uuguuacuauccugcaaug

SEQ ID NO: 1087761 - RNA, 19 nt, Artificial Sequence
  Description of Artificial Sequence: Synthetic oligonucleotide
  Antisense strand to SEQ ID NO: 1087760
cauugcaggauaguaacaa

SEQ ID NO: 1087762 - RNA, 19 nt, Artificial Sequence
  Description of Artificial Sequence: Synthetic oligonucleotide
  Sense strand starting at position 3150 of SEQ ID NO: 915544
guuacuauccugcaaugaa

SEQ ID NO: 1087763 - RNA, 19 nt, Artificial Sequence
  Description of Artificial Sequence: Synthetic oligonucleotide
  Antisense strand to SEQ ID NO: 1087762
uucauugcaggauaguaac

SEQ ID NO: 1087764 - RNA, 19 nt, Artificial Sequence
  Description of Artificial Sequence: Synthetic oligonucleotide
  Sense strand starting at position 3213 of SEQ ID NO: 915544
ucgagauaauauccugauu

SEQ ID NO: 1087765 - RNA, 19 nt, Artificial Sequence
  Description of Artificial Sequence: Synthetic oligonucleotide
  Antisense strand to SEQ ID NO: 1087764
aaucaggauauuaucucga

SEQ ID NO: 1087766 - RNA, 19 nt, Artificial Sequence
  Description of Artificial Sequence: Synthetic oligonucleotide
  Sense strand starting at position 3237 of SEQ ID NO: 915544
gcagaugaaucauaaggga

SEQ ID NO: 1087767 - RNA, 19 nt, Artificial Sequence
  Description of Artificial Sequence: Synthetic oligonucleotide
  Antisense strand to SEQ ID NO: 1087766
ucccuuaugauucaucugc

SEQ ID NO: 1087768 - RNA, 19 nt, Artificial Sequence
  Description of Artificial Sequence: Synthetic oligonucleotide
  Sense strand starting at position 3240 of SEQ ID NO: 915544
gaugaaucauaagggaaau

SEQ ID NO: 1087769 - RNA, 19 nt, Artificial Sequence
  Description of Artificial Sequence: Synthetic oligonucleotide
  Antisense strand to SEQ ID NO: 1087768
auuucccuuaugauucauc

SEQ ID NO: 1087770 - RNA, 19 nt, Artificial Sequence
  Description of Artificial Sequence: Synthetic oligonucleotide
  Sense strand starting at position 3263 of SEQ ID NO: 915544
uaguaauaacauggugugu

SEQ ID NO: 1087771 - RNA, 19 nt, Artificial Sequence
  Description of Artificial Sequence: Synthetic oligonucleotide
  Antisense strand to SEQ ID NO: 1087770
acacaccauguuauuacua

SEQ ID NO: 1087772 - RNA, 19 nt, Artificial Sequence
  Description of Artificial Sequence: Synthetic oligonucleotide
  Sense strand starting at position 3278 of SEQ ID NO: 915544
gugugugaauguguuaaua

SEQ ID NO: 1087773 - RNA, 19 nt, Artificial Sequence
  Description of Artificial Sequence: Synthetic oligonucleotide
  Antisense strand to SEQ ID NO: 1087772
uauuaacacauucacacac

SEQ ID NO: 1087774 - RNA, 19 nt, Artificial Sequence
  Description of Artificial Sequence: Synthetic oligonucleotide
  Sense strand starting at position 3280 of SEQ ID NO: 915544
gugugaauguguuaauauu

SEQ ID NO: 1087775 - RNA, 19 nt, Artificial Sequence
  Description of Artificial Sequence: Synthetic oligonucleotide
  Antisense strand to SEQ ID NO: 1087774
aauauuaacacauucacac

SEQ ID NO: 1087776 - RNA, 19 nt, Artificial Sequence
  Description of Artificial Sequence: Synthetic oligonucleotide
  Sense strand starting at position 3302 of SEQ ID NO: 915544
gguacaugaagcugucaaa

SEQ ID NO: 1087777 - RNA, 19 nt, Artificial Sequence
  Description of Artificial Sequence: Synthetic oligonucleotide
  Antisense strand to SEQ ID NO: 1087776
uuugacagcuucauguacc

SEQ ID NO: 1087778 - RNA, 19 nt, Artificial Sequence
  Description of Artificial Sequence: Synthetic oligonucleotide
  Sense strand starting at position 3345 of SEQ ID NO: 915544
cagugaauccacggcuaca

SEQ ID NO: 1087779 - RNA, 19 nt, Artificial Sequence
  Description of Artificial Sequence: Synthetic oligonucleotide
  Antisense strand to SEQ ID NO: 1087778
uguagccguggauucacug

SEQ ID NO: 1087780 - RNA, 19 nt, Artificial Sequence
  Description of Artificial Sequence: Synthetic oligonucleotide
  Sense strand starting at position 82 of SEQ ID NO: 915545
cugcauucucucuagagca

SEQ ID NO: 1087781 - RNA, 19 nt, Artificial Sequence
  Description of Artificial Sequence: Synthetic oligonucleotide
  Antisense strand to SEQ ID NO: 1087780
ugcucuagagagaaugcag

SEQ ID NO: 1087782 - RNA, 19 nt, Artificial Sequence
  Description of Artificial Sequence: Synthetic oligonucleotide
  Sense strand starting at position 84 of SEQ ID NO: 915545
gcauucucucuagagcaca

SEQ ID NO: 1087783 - RNA, 19 nt, Artificial Sequence
  Description of Artificial Sequence: Synthetic oligonucleotide
  Antisense strand to SEQ ID NO: 1087782
ugugcucuagagagaaugc

SEQ ID NO: 1087784 - RNA, 19 nt, Artificial Sequence
  Description of Artificial Sequence: Synthetic oligonucleotide
  Sense strand starting at position 476 of SEQ ID NO: 915545
uggaaugucacgcaucaug

SEQ ID NO: 1087785 - RNA, 19 nt, Artificial Sequence
  Description of Artificial Sequence: Synthetic oligonucleotide
  Antisense strand to SEQ ID NO: 1087784
caugaugcgugacauucca

SEQ ID NO: 1087786 - RNA, 19 nt, Artificial Sequence
  Description of Artificial Sequence: Synthetic oligonucleotide
  Sense strand starting at position 479 of SEQ ID NO: 915545
aaugucacgcaucauguua

SEQ ID NO: 1087787 - RNA, 19 nt, Artificial Sequence
  Description of Artificial Sequence: Synthetic oligonucleotide
  Antisense strand to SEQ ID NO: 1087786
uaacaugaugcgugacauu

SEQ ID NO: 1087788 - RNA, 19 nt, Artificial Sequence
  Description of Artificial Sequence: Synthetic oligonucleotide
  Sense strand starting at position 580 of SEQ ID NO: 915545
gccaguacccaagaagcau

SEQ ID NO: 1087789 - RNA, 19 nt, Artificial Sequence
  Description of Artificial Sequence: Synthetic oligonucleotide
  Antisense strand to SEQ ID NO: 1087788
augcuucuuggguacuggc

SEQ ID NO: 1087790 - RNA, 19 nt, Artificial Sequence
  Description of Artificial Sequence: Synthetic oligonucleotide
  Sense strand starting at position 605 of SEQ ID NO: 915545
aguuguugcagugaauaca

SEQ ID NO: 1087791 - RNA, 19 nt, Artificial Sequence
  Description of Artificial Sequence: Synthetic oligonucleotide
  Antisense strand to SEQ ID NO: 1087790
uguauucacugcaacaacu

SEQ ID NO: 1087792 - RNA, 19 nt, Artificial Sequence
  Description of Artificial Sequence: Synthetic oligonucleotide
  Sense strand starting at position 608 of SEQ ID NO: 915545
uguugcagugaauacagau

SEQ ID NO: 1087793 - RNA, 19 nt, Artificial Sequence
  Description of Artificial Sequence: Synthetic oligonucleotide
  Antisense strand to SEQ ID NO: 1087792
aucuguauucacugcaaca

SEQ ID NO: 1087794 - RNA, 19 nt, Artificial Sequence
  Description of Artificial Sequence: Synthetic oligonucleotide
  Sense strand starting at position 712 of SEQ ID NO: 915545
gugccugcuccacaguaga

SEQ ID NO: 1087795 - RNA, 19 nt, Artificial Sequence
  Description of Artificial Sequence: Synthetic oligonucleotide
  Antisense strand to SEQ ID NO: 1087794
ucuacuguggagcaggcac

SEQ ID NO: 1087796 - RNA, 19 nt, Artificial Sequence
  Description of Artificial Sequence: Synthetic oligonucleotide
  Sense strand starting at position 1112 of SEQ ID NO: 915545
ucaaacguucgauaaccga

SEQ ID NO: 1087797 - RNA, 19 nt, Artificial Sequence
  Description of Artificial Sequence: Synthetic oligonucleotide
  Antisense strand to SEQ ID NO: 1087796
ucgguuaucgaacguuuga

SEQ ID NO: 1087798 - RNA, 19 nt, Artificial Sequence
  Description of Artificial Sequence: Synthetic oligonucleotide
  Sense strand starting at position 1181 of SEQ ID NO: 915545
cgccuuugcucauuccaga

SEQ ID NO: 1087799 - RNA, 19 nt, Artificial Sequence
  Description of Artificial Sequence: Synthetic oligonucleotide
  Antisense strand to SEQ ID NO: 1087798
ucuggaaugagcaaaggcg

SEQ ID NO: 1087800 - RNA, 19 nt, Artificial Sequence
  Description of Artificial Sequence: Synthetic oligonucleotide
  Sense strand starting at position 1229 of SEQ ID NO: 915545
agaugugggcauugcugaa

SEQ ID NO: 1087801 - RNA, 19 nt, Artificial Sequence
  Description of Artificial Sequence: Synthetic oligonucleotide
  Antisense strand to SEQ ID NO: 1087800
uucagcaaugcccacaucu

SEQ ID NO: 1087802 - RNA, 19 nt, Artificial Sequence
  Description of Artificial Sequence: Synthetic oligonucleotide
  Sense strand starting at position 1411 of SEQ ID NO: 915545
ccaggagucucaccgggau

SEQ ID NO: 1087803 - RNA, 19 nt, Artificial Sequence
  Description of Artificial Sequence: Synthetic oligonucleotide
  Antisense strand to SEQ ID NO: 1087802
aucccggugagacuccugg

SEQ ID NO: 1087804 - RNA, 19 nt, Artificial Sequence
  Description of Artificial Sequence: Synthetic oligonucleotide
  Sense strand starting at position 1423 of SEQ ID NO: 915545
ccgggauggcggugaugaa

SEQ ID NO: 1087805 - RNA, 19 nt, Artificial Sequence
  Description of Artificial Sequence: Synthetic oligonucleotide
  Antisense strand to SEQ ID NO: 1087804
uucaucaccgccaucccgg

SEQ ID NO: 1087806 - RNA, 19 nt, Artificial Sequence
  Description of Artificial Sequence: Synthetic oligonucleotide
  Sense strand starting at position 1640 of SEQ ID NO: 915545
ugggaauuguaguucgauc

SEQ ID NO: 1087807 - RNA, 19 nt, Artificial Sequence
  Description of Artificial Sequence: Synthetic oligonucleotide
  Antisense strand to SEQ ID NO: 1087806
gaucgaacuacaauuccca

SEQ ID NO: 1087808 - RNA, 19 nt, Artificial Sequence
  Description of Artificial Sequence: Synthetic oligonucleotide
  Sense strand starting at position 1921 of SEQ ID NO: 915545
ggcggauuucggcgugucu

SEQ ID NO: 1087809 - RNA, 19 nt, Artificial Sequence
  Description of Artificial Sequence: Synthetic oligonucleotide
  Antisense strand to SEQ ID NO: 1087808
agacacgccgaaauccgcc

SEQ ID NO: 1087810 - RNA, 19 nt, Artificial Sequence
  Description of Artificial Sequence: Synthetic oligonucleotide
  Sense strand starting at position 2247 of SEQ ID NO: 915545
ucgucagcuccgaggugau

SEQ ID NO: 1087811 - RNA, 19 nt, Artificial Sequence
  Description of Artificial Sequence: Synthetic oligonucleotide
  Antisense strand to SEQ ID NO: 1087810
aucaccucggagcugacga

SEQ ID NO: 1087812 - RNA, 19 nt, Artificial Sequence
  Description of Artificial Sequence: Synthetic oligonucleotide
  Sense strand starting at position 2538 of SEQ ID NO: 915545
ucucauaaucuacgaauag

SEQ ID NO: 1087813 - RNA, 19 nt, Artificial Sequence
  Description of Artificial Sequence: Synthetic oligonucleotide
  Antisense strand to SEQ ID NO: 1087812
cuauucguagauuaugaga

SEQ ID NO: 1087814 - RNA, 19 nt, Artificial Sequence
  Description of Artificial Sequence: Synthetic oligonucleotide
  Sense strand starting at position 2555 of SEQ ID NO: 915545
agguguggguucucugcaa

SEQ ID NO: 1087815 - RNA, 19 nt, Artificial Sequence
  Description of Artificial Sequence: Synthetic oligonucleotide
  Antisense strand to SEQ ID NO: 1087814
uugcagagaacccacaccu

SEQ ID NO: 1087816 - RNA, 19 nt, Artificial Sequence
  Description of Artificial Sequence: Synthetic oligonucleotide
  Sense strand starting at position 3093 of SEQ ID NO: 915545
agcgccguugagugauaaa

SEQ ID NO: 1087817 - RNA, 19 nt, Artificial Sequence
  Description of Artificial Sequence: Synthetic oligonucleotide
  Antisense strand to SEQ ID NO: 1087816
uuuaucacucaacggcgcu

SEQ ID NO: 1087818 - RNA, 19 nt, Artificial Sequence
  Description of Artificial Sequence: Synthetic oligonucleotide
  Sense strand starting at position 3102 of SEQ ID NO: 915545
gagugauaaaugggugguu

SEQ ID NO: 1087819 - RNA, 19 nt, Artificial Sequence
  Description of Artificial Sequence: Synthetic oligonucleotide
  Antisense strand to SEQ ID NO: 1087818
aaccacccauuuaucacuc

SEQ ID NO: 1087820 - RNA, 19 nt, Artificial Sequence
  Description of Artificial Sequence: Synthetic oligonucleotide
  Sense strand starting at position 3105 of SEQ ID NO: 915545
ugauaaaugggugguugca

SEQ ID NO: 1087821 - RNA, 19 nt, Artificial Sequence
  Description of Artificial Sequence: Synthetic oligonucleotide
  Antisense strand to SEQ ID NO: 1087820
ugcaaccacccauuuauca

SEQ ID NO: 1087822 - RNA, 19 nt, Artificial Sequence
  Description of Artificial Sequence: Synthetic oligonucleotide
  Sense strand starting at position 3210 of SEQ ID NO: 915545
cucugaauaugucaagggu

SEQ ID NO: 1087823 - RNA, 19 nt, Artificial Sequence
  Description of Artificial Sequence: Synthetic oligonucleotide
  Antisense strand to SEQ ID NO: 1087822
acccuugacauauucagag

SEQ ID NO: 1087824 - RNA, 19 nt, Artificial Sequence
  Description of Artificial Sequence: Synthetic oligonucleotide
  Sense strand starting at position 3213 of SEQ ID NO: 915545
ugaauaugucaaggguguu

SEQ ID NO: 1087825 - RNA, 19 nt, Artificial Sequence
  Description of Artificial Sequence: Synthetic oligonucleotide
  Antisense strand to SEQ ID NO: 1087824
aacacccuugacauauuca

SEQ ID NO: 1087826 - RNA, 19 nt, Artificial Sequence
  Description of Artificial Sequence: Synthetic oligonucleotide
  Sense strand starting at position 3214 of SEQ ID NO: 915545
gaauaugucaaggguguua

SEQ ID NO: 1087827 - RNA, 19 nt, Artificial Sequence
  Description of Artificial Sequence: Synthetic oligonucleotide
  Antisense strand to SEQ ID NO: 1087826
uaacacccuugacauauuc

SEQ ID NO: 1087828 - RNA, 19 nt, Artificial Sequence
  Description of Artificial Sequence: Synthetic oligonucleotide
  Sense strand starting at position 3227 of SEQ ID NO: 915545
guguuaacagguugcuaac

SEQ ID NO: 1087829 - RNA, 19 nt, Artificial Sequence
  Description of Artificial Sequence: Synthetic oligonucleotide
  Antisense strand to SEQ ID NO: 1087828
guuagcaaccuguuaacac

SEQ ID NO: 1087830 - RNA, 19 nt, Artificial Sequence
  Description of Artificial Sequence: Synthetic oligonucleotide
  Sense strand starting at position 3534 of SEQ ID NO: 915545
cacugaauuuguugagaca

SEQ ID NO: 1087831 - RNA, 19 nt, Artificial Sequence
  Description of Artificial Sequence: Synthetic oligonucleotide
  Antisense strand to SEQ ID NO: 1087830
ugucucaacaaauucagug

SEQ ID NO: 1087832 - RNA, 19 nt, Artificial Sequence
  Description of Artificial Sequence: Synthetic oligonucleotide
  Sense strand starting at position 3610 of SEQ ID NO: 915545
acaagagagugcugacaca

SEQ ID NO: 1087833 - RNA, 19 nt, Artificial Sequence
  Description of Artificial Sequence: Synthetic oligonucleotide
  Antisense strand to SEQ ID NO: 1087832
ugugucagcacucucuugu

SEQ ID NO: 1087834 - RNA, 19 nt, Artificial Sequence
  Description of Artificial Sequence: Synthetic oligonucleotide
  Sense strand starting at position 3621 of SEQ ID NO: 915545
cugacacauucugggacau

SEQ ID NO: 1087835 - RNA, 19 nt, Artificial Sequence
  Description of Artificial Sequence: Synthetic oligonucleotide
  Antisense strand to SEQ ID NO: 1087834
augucccagaaugugucag

SEQ ID NO: 1087836 - RNA, 19 nt, Artificial Sequence
  Description of Artificial Sequence: Synthetic oligonucleotide
  Sense strand starting at position 3623 of SEQ ID NO: 915545
gacacauucugggacauac

SEQ ID NO: 1087837 - RNA, 19 nt, Artificial Sequence
  Description of Artificial Sequence: Synthetic oligonucleotide
  Antisense strand to SEQ ID NO: 1087836
guaugucccagaauguguc

SEQ ID NO: 1087838 - RNA, 19 nt, Artificial Sequence
  Description of Artificial Sequence: Synthetic oligonucleotide
  Sense strand starting at position 3714 of SEQ ID NO: 915545
aagucugagggcugauuaa

SEQ ID NO: 1087839 - RNA, 19 nt, Artificial Sequence
  Description of Artificial Sequence: Synthetic oligonucleotide
  Antisense strand to SEQ ID NO: 1087838
uuaaucagcccucagacuu

SEQ ID NO: 1087840 - RNA, 19 nt, Artificial Sequence
  Description of Artificial Sequence: Synthetic oligonucleotide
  Sense strand starting at position 3778 of SEQ ID NO: 915545
auuccaucguccuuguaau

SEQ ID NO: 1087841 - RNA, 19 nt, Artificial Sequence
  Description of Artificial Sequence: Synthetic oligonucleotide
  Antisense strand to SEQ ID NO: 1087840
auuacaaggacgauggaau

SEQ ID NO: 1087842 - RNA, 19 nt, Artificial Sequence
  Description of Artificial Sequence: Synthetic oligonucleotide
  Sense strand starting at position 3779 of SEQ ID NO: 915545
uuccaucguccuuguaaua

SEQ ID NO: 1087843 - RNA, 19 nt, Artificial Sequence
  Description of Artificial Sequence: Synthetic oligonucleotide
  Antisense strand to SEQ ID NO: 1087842
uauuacaaggacgauggaa

SEQ ID NO: 1087844 - RNA, 19 nt, Artificial Sequence
  Description of Artificial Sequence: Synthetic oligonucleotide
  Sense strand starting at position 3784 of SEQ ID NO: 915545
ucguccuuguaauaaauau

SEQ ID NO: 1087845 - RNA, 19 nt, Artificial Sequence
  Description of Artificial Sequence: Synthetic oligonucleotide
  Antisense strand to SEQ ID NO: 1087844
auauuuauuacaaggacga

SEQ ID NO: 1087846 - RNA, 19 nt, Artificial Sequence
  Description of Artificial Sequence: Synthetic oligonucleotide
  Sense strand starting at position 3806 of SEQ ID NO: 915545
guuacuauccugcaaugaa

SEQ ID NO: 1087847 - RNA, 19 nt, Artificial Sequence
  Description of Artificial Sequence: Synthetic oligonucleotide
  Antisense strand to SEQ ID NO: 1087846
uucauugcaggauaguaac

SEQ ID NO: 1087848 - RNA, 19 nt, Artificial Sequence
  Description of Artificial Sequence: Synthetic oligonucleotide
  Sense strand starting at position 3869 of SEQ ID NO: 915545
ucgagauaauauccugauu

SEQ ID NO: 1087849 - RNA, 19 nt, Artificial Sequence
  Description of Artificial Sequence: Synthetic oligonucleotide
  Antisense strand to SEQ ID NO: 1087848
aaucaggauauuaucucga

SEQ ID NO: 1087850 - RNA, 19 nt, Artificial Sequence
  Description of Artificial Sequence: Synthetic oligonucleotide
  Sense strand starting at position 3893 of SEQ ID NO: 915545
gcagaugaaucauaaggga

SEQ ID NO: 1087851 - RNA, 19 nt, Artificial Sequence
  Description of Artificial Sequence: Synthetic oligonucleotide
  Antisense strand to SEQ ID NO: 1087850
ucccuuaugauucaucugc

SEQ ID NO: 1087852 - RNA, 19 nt, Artificial Sequence
  Description of Artificial Sequence: Synthetic oligonucleotide
  Sense strand starting at position 3896 of SEQ ID NO: 915545
gaugaaucauaagggaaau

SEQ ID NO: 1087853 - RNA, 19 nt, Artificial Sequence
  Description of Artificial Sequence: Synthetic oligonucleotide
  Antisense strand to SEQ ID NO: 1087852
auuucccuuaugauucauc

SEQ ID NO: 1087854 - RNA, 19 nt, Artificial Sequence
  Description of Artificial Sequence: Synthetic oligonucleotide
  Sense strand starting at position 3919 of SEQ ID NO: 915545
uaguaauaacauggugugu

SEQ ID NO: 1087855 - RNA, 19 nt, Artificial Sequence
  Description of Artificial Sequence: Synthetic oligonucleotide
  Antisense strand to SEQ ID NO: 1087854
acacaccauguuauuacua

SEQ ID NO: 1087856 - RNA, 19 nt, Artificial Sequence
  Description of Artificial Sequence: Synthetic oligonucleotide
  Sense strand starting at position 3934 of SEQ ID NO: 915545
gugugugaauguguuaaua

SEQ ID NO: 1087857 - RNA, 19 nt, Artificial Sequence
  Description of Artificial Sequence: Synthetic oligonucleotide
  Antisense strand to SEQ ID NO: 1087856
uauuaacacauucacacac

SEQ ID NO: 1087858 - RNA, 19 nt, Artificial Sequence
  Description of Artificial Sequence: Synthetic oligonucleotide
  Sense strand starting at position 3958 of SEQ ID NO: 915545
gguacaugaagcugucaaa

SEQ ID NO: 1087859 - RNA, 19 nt, Artificial Sequence
  Description of Artificial Sequence: Synthetic oligonucleotide
  Antisense strand to SEQ ID NO: 1087858
uuugacagcuucauguacc

SEQ ID NO: 1087860 - RNA, 19 nt, Artificial Sequence
  Description of Artificial Sequence: Synthetic oligonucleotide
  Sense strand starting at position 1337 of SEQ ID NO: 915546
cgagcucacucuuccauaa

SEQ ID NO: 1087861 - RNA, 19 nt, Artificial Sequence
  Description of Artificial Sequence: Synthetic oligonucleotide
  Antisense strand to SEQ ID NO: 1087860
uuauggaagagugagcucg

SEQ ID NO: 1087862 - RNA, 19 nt, Artificial Sequence
  Description of Artificial Sequence: Synthetic oligonucleotide
  Sense strand starting at position 2172 of SEQ ID NO: 915546
cuccgacggccugaguuau

SEQ ID NO: 1087863 - RNA, 19 nt, Artificial Sequence
  Description of Artificial Sequence: Synthetic oligonucleotide
  Antisense strand to SEQ ID NO: 1087862
auaacucaggccgucggag

SEQ ID NO: 1087864 - RNA, 19 nt, Artificial Sequence
  Description of Artificial Sequence: Synthetic oligonucleotide
  Sense strand starting at position 2244 of SEQ ID NO: 915546
cccagaacucuagguggua

SEQ ID NO: 1087865 - RNA, 19 nt, Artificial Sequence
  Description of Artificial Sequence: Synthetic oligonucleotide
  Antisense strand to SEQ ID NO: 1087864
uaccaccuagaguucuggg

SEQ ID NO: 1087866 - RNA, 19 nt, Artificial Sequence
  Description of Artificial Sequence: Synthetic oligonucleotide
  Sense strand starting at position 2245 of SEQ ID NO: 915546
ccagaacucuaggugguau

SEQ ID NO: 1087867 - RNA, 19 nt, Artificial Sequence
  Description of Artificial Sequence: Synthetic oligonucleotide
  Antisense strand to SEQ ID NO: 1087866
auaccaccuagaguucugg

SEQ ID NO: 1087868 - RNA, 19 nt, Artificial Sequence
  Description of Artificial Sequence: Synthetic oligonucleotide
  Sense strand starting at position 2256 of SEQ ID NO: 915546
ggugguauggucgaacaua

SEQ ID NO: 1087869 - RNA, 19 nt, Artificial Sequence
  Description of Artificial Sequence: Synthetic oligonucleotide
  Antisense strand to SEQ ID NO: 1087868
uauguucgaccauaccacc

SEQ ID NO: 1087870 - RNA, 19 nt, Artificial Sequence
  Description of Artificial Sequence: Synthetic oligonucleotide
  Sense strand starting at position 2257 of SEQ ID NO: 915546
gugguauggucgaacauag

SEQ ID NO: 1087871 - RNA, 19 nt, Artificial Sequence
  Description of Artificial Sequence: Synthetic oligonucleotide
  Antisense strand to SEQ ID NO: 1087870
cuauguucgaccauaccac

SEQ ID NO: 1087872 - RNA, 19 nt, Artificial Sequence
  Description of Artificial Sequence: Synthetic oligonucleotide
  Sense strand starting at position 2268 of SEQ ID NO: 915546
gaacauagauguuuguaau

SEQ ID NO: 1087873 - RNA, 19 nt, Artificial Sequence
  Description of Artificial Sequence: Synthetic oligonucleotide
  Antisense strand to SEQ ID NO: 1087872
auuacaaacaucuauguuc

SEQ ID NO: 1087874 - RNA, 19 nt, Artificial Sequence
  Description of Artificial Sequence: Synthetic oligonucleotide
  Sense strand starting at position 2332 of SEQ ID NO: 915546
ugaugucauggcugggauu

SEQ ID NO: 1087875 - RNA, 19 nt, Artificial Sequence
  Description of Artificial Sequence: Synthetic oligonucleotide
  Antisense strand to SEQ ID NO: 1087874
aaucccagccaugacauca

SEQ ID NO: 1087876 - RNA, 19 nt, Artificial Sequence
  Description of Artificial Sequence: Synthetic oligonucleotide
  Sense strand starting at position 2733 of SEQ ID NO: 915546
aagauaagccauugauagu

SEQ ID NO: 1087877 - RNA, 19 nt, Artificial Sequence
  Description of Artificial Sequence: Synthetic oligonucleotide
  Antisense strand to SEQ ID NO: 1087876
acuaucaauggcuuaucuu

SEQ ID NO: 1087878 - RNA, 19 nt, Artificial Sequence
  Description of Artificial Sequence: Synthetic oligonucleotide
  Sense strand starting at position 2802 of SEQ ID NO: 915546
uuguguacauuugcaaauu

SEQ ID NO: 1087879 - RNA, 19 nt, Artificial Sequence
  Description of Artificial Sequence: Synthetic oligonucleotide
  Antisense strand to SEQ ID NO: 1087878
aauuugcaaauguacacaa

SEQ ID NO: 1087880 - RNA, 19 nt, Artificial Sequence
  Description of Artificial Sequence: Synthetic oligonucleotide
  Sense strand starting at position 2803 of SEQ ID NO: 915546
uguguacauuugcaaauuu

SEQ ID NO: 1087881 - RNA, 19 nt, Artificial Sequence
  Description of Artificial Sequence: Synthetic oligonucleotide
  Antisense strand to SEQ ID NO: 1087880
aaauuugcaaauguacaca

SEQ ID NO: 1087882 - RNA, 19 nt, Artificial Sequence
  Description of Artificial Sequence: Synthetic oligonucleotide
  Sense strand starting at position 2840 of SEQ ID NO: 915546
accuauauaguacgcuuaa

SEQ ID NO: 1087883 - RNA, 19 nt, Artificial Sequence
  Description of Artificial Sequence: Synthetic oligonucleotide
  Antisense strand to SEQ ID NO: 1087882
uuaagcguacuauauaggu

SEQ ID NO: 1087884 - RNA, 19 nt, Artificial Sequence
  Description of Artificial Sequence: Synthetic oligonucleotide
  Sense strand starting at position 2841 of SEQ ID NO: 915546
ccuauauaguacgcuuaaa

SEQ ID NO: 1087885 - RNA, 19 nt, Artificial Sequence
  Description of Artificial Sequence: Synthetic oligonucleotide
  Antisense strand to SEQ ID NO: 1087884
uuuaagcguacuauauagg

SEQ ID NO: 1087886 - RNA, 19 nt, Artificial Sequence
  Description of Artificial Sequence: Synthetic oligonucleotide
  Sense strand starting at position 3093 of SEQ ID NO: 915546
cugguuaccuugucacuuu

SEQ ID NO: 1087887 - RNA, 19 nt, Artificial Sequence
  Description of Artificial Sequence: Synthetic oligonucleotide
  Antisense strand to SEQ ID NO: 1087886
aaagugacaagguaaccag

SEQ ID NO: 1087888 - RNA, 19 nt, Artificial Sequence
  Description of Artificial Sequence: Synthetic oligonucleotide
  Sense strand starting at position 3184 of SEQ ID NO: 915546
agagucuaccucugggauu

SEQ ID NO: 1087889 - RNA, 19 nt, Artificial Sequence
  Description of Artificial Sequence: Synthetic oligonucleotide
  Antisense strand to SEQ ID NO: 1087888
aaucccagagguagacucu

SEQ ID NO: 1087890 - RNA, 19 nt, Artificial Sequence
  Description of Artificial Sequence: Synthetic oligonucleotide
  Sense strand starting at position 3264 of SEQ ID NO: 915546
ucucuuaugcccgagaguu

SEQ ID NO: 1087891 - RNA, 19 nt, Artificial Sequence
  Description of Artificial Sequence: Synthetic oligonucleotide
  Antisense strand to SEQ ID NO: 1087890
aacucucgggcauaagaga

SEQ ID NO: 1087892 - RNA, 19 nt, Artificial Sequence
  Description of Artificial Sequence: Synthetic oligonucleotide
  Sense strand starting at position 3314 of SEQ ID NO: 915546
gcaaacuugucccugagag

SEQ ID NO: 1087893 - RNA, 19 nt, Artificial Sequence
  Description of Artificial Sequence: Synthetic oligonucleotide
  Antisense strand to SEQ ID NO: 1087892
cucucagggacaaguuugc

SEQ ID NO: 1087894 - RNA, 19 nt, Artificial Sequence
  Description of Artificial Sequence: Synthetic oligonucleotide
  Sense strand starting at position 3315 of SEQ ID NO: 915546
caaacuugucccugagagg

SEQ ID NO: 1087895 - RNA, 19 nt, Artificial Sequence
  Description of Artificial Sequence: Synthetic oligonucleotide
  Antisense strand to SEQ ID NO: 1087894
ccucucagggacaaguuug

SEQ ID NO: 1087896 - RNA, 19 nt, Artificial Sequence
  Description of Artificial Sequence: Synthetic oligonucleotide
  Sense strand starting at position 3350 of SEQ ID NO: 915546
gggccuucuccuuagcaca

SEQ ID NO: 1087897 - RNA, 19 nt, Artificial Sequence
  Description of Artificial Sequence: Synthetic oligonucleotide
  Antisense strand to SEQ ID NO: 1087896
ugugcuaaggagaaggccc

SEQ ID NO: 1087898 - RNA, 19 nt, Artificial Sequence
  Description of Artificial Sequence: Synthetic oligonucleotide
  Sense strand starting at position 3372 of SEQ ID NO: 915546
gcaggaacuugucugauga

SEQ ID NO: 1087899 - RNA, 19 nt, Artificial Sequence
  Description of Artificial Sequence: Synthetic oligonucleotide
  Antisense strand to SEQ ID NO: 1087898
ucaucagacaaguuccugc

SEQ ID NO: 1087900 - RNA, 19 nt, Artificial Sequence
  Description of Artificial Sequence: Synthetic oligonucleotide
  Sense strand starting at position 3373 of SEQ ID NO: 915546
caggaacuugucugaugac

SEQ ID NO: 1087901 - RNA, 19 nt, Artificial Sequence
  Description of Artificial Sequence: Synthetic oligonucleotide
  Antisense strand to SEQ ID NO: 1087900
gucaucagacaaguuccug

SEQ ID NO: 1087902 - RNA, 19 nt, Artificial Sequence
  Description of Artificial Sequence: Synthetic oligonucleotide
  Sense strand starting at position 3441 of SEQ ID NO: 915546
gaugcacuucgcugagaga

SEQ ID NO: 1087903 - RNA, 19 nt, Artificial Sequence
  Description of Artificial Sequence: Synthetic oligonucleotide
  Antisense strand to SEQ ID NO: 1087902
ucucucagcgaagugcauc

SEQ ID NO: 1087904 - RNA, 19 nt, Artificial Sequence
  Description of Artificial Sequence: Synthetic oligonucleotide
  Sense strand starting at position 3557 of SEQ ID NO: 915546
gaaauucugucauuagugu

SEQ ID NO: 1087905 - RNA, 19 nt, Artificial Sequence
  Description of Artificial Sequence: Synthetic oligonucleotide
  Antisense strand to SEQ ID NO: 1087904
acacuaaugacagaauuuc

SEQ ID NO: 1087906 - RNA, 19 nt, Artificial Sequence
  Description of Artificial Sequence: Synthetic oligonucleotide
  Sense strand starting at position 3566 of SEQ ID NO: 915546
ucauuagugucacucccuu

SEQ ID NO: 1087907 - RNA, 19 nt, Artificial Sequence
  Description of Artificial Sequence: Synthetic oligonucleotide
  Antisense strand to SEQ ID NO: 1087906
aagggagugacacuaauga

SEQ ID NO: 1087908 - RNA, 19 nt, Artificial Sequence
  Description of Artificial Sequence: Synthetic oligonucleotide
  Sense strand starting at position 3572 of SEQ ID NO: 915546
gugucacucccuuggauua

SEQ ID NO: 1087909 - RNA, 19 nt, Artificial Sequence
  Description of Artificial Sequence: Synthetic oligonucleotide
  Antisense strand to SEQ ID NO: 1087908
uaauccaagggagugacac

SEQ ID NO: 1087910 - RNA, 19 nt, Artificial Sequence
  Description of Artificial Sequence: Synthetic oligonucleotide
  Sense strand starting at position 3573 of SEQ ID NO: 915546
ugucacucccuuggauuaa

SEQ ID NO: 1087911 - RNA, 19 nt, Artificial Sequence
  Description of Artificial Sequence: Synthetic oligonucleotide
  Antisense strand to SEQ ID NO: 1087910
uuaauccaagggagugaca

SEQ ID NO: 1087912 - RNA, 19 nt, Artificial Sequence
  Description of Artificial Sequence: Synthetic oligonucleotide
  Sense strand starting at position 3583 of SEQ ID NO: 915546
uuggauuaagguuguuaac

SEQ ID NO: 1087913 - RNA, 19 nt, Artificial Sequence
  Description of Artificial Sequence: Synthetic oligonucleotide
  Antisense strand to SEQ ID NO: 1087912
guuaacaaccuuaauccaa

SEQ ID NO: 1087914 - RNA, 19 nt, Artificial Sequence
  Description of Artificial Sequence: Synthetic oligonucleotide
  Sense strand starting at position 3585 of SEQ ID NO: 915546
ggauuaagguuguuaacag

SEQ ID NO: 1087915 - RNA, 19 nt, Artificial Sequence
  Description of Artificial Sequence: Synthetic oligonucleotide
  Antisense strand to SEQ ID NO: 1087914
cuguuaacaaccuuaaucc

SEQ ID NO: 1087916 - RNA, 19 nt, Artificial Sequence
  Description of Artificial Sequence: Synthetic oligonucleotide
  Sense strand starting at position 3610 of SEQ ID NO: 915546
acagcaaguuuccuggauu

SEQ ID NO: 1087917 - RNA, 19 nt, Artificial Sequence
  Description of Artificial Sequence: Synthetic oligonucleotide
  Antisense strand to SEQ ID NO: 1087916
aauccaggaaacuugcugu

SEQ ID NO: 1087918 - RNA, 19 nt, Artificial Sequence
  Description of Artificial Sequence: Synthetic oligonucleotide
  Sense strand starting at position 3613 of SEQ ID NO: 915546
gcaaguuuccuggauucua

SEQ ID NO: 1087919 - RNA, 19 nt, Artificial Sequence
  Description of Artificial Sequence: Synthetic oligonucleotide
  Antisense strand to SEQ ID NO: 1087918
uagaauccaggaaacuugc

SEQ ID NO: 1087920 - RNA, 19 nt, Artificial Sequence
  Description of Artificial Sequence: Synthetic oligonucleotide
  Sense strand starting at position 3697 of SEQ ID NO: 915546
ggaauuguguaccuugcau

SEQ ID NO: 1087921 - RNA, 19 nt, Artificial Sequence
  Description of Artificial Sequence: Synthetic oligonucleotide
  Antisense strand to SEQ ID NO: 1087920
augcaagguacacaauucc

SEQ ID NO: 1087922 - RNA, 19 nt, Artificial Sequence
  Description of Artificial Sequence: Synthetic oligonucleotide
  Sense strand starting at position 3786 of SEQ ID NO: 915546
aggucuugccaacagugau

SEQ ID NO: 1087923 - RNA, 19 nt, Artificial Sequence
  Description of Artificial Sequence: Synthetic oligonucleotide
  Antisense strand to SEQ ID NO: 1087922
aucacuguuggcaagaccu

SEQ ID NO: 1087924 - RNA, 19 nt, Artificial Sequence
  Description of Artificial Sequence: Synthetic oligonucleotide
  Sense strand starting at position 3789 of SEQ ID NO: 915546
ucuugccaacagugauuau

SEQ ID NO: 1087925 - RNA, 19 nt, Artificial Sequence
  Description of Artificial Sequence: Synthetic oligonucleotide
  Antisense strand to SEQ ID NO: 1087924
auaaucacuguuggcaaga

SEQ ID NO: 1087926 - RNA, 19 nt, Artificial Sequence
  Description of Artificial Sequence: Synthetic oligonucleotide
  Sense strand starting at position 3800 of SEQ ID NO: 915546
gugauuauccaggguguga

SEQ ID NO: 1087927 - RNA, 19 nt, Artificial Sequence
  Description of Artificial Sequence: Synthetic oligonucleotide
  Antisense strand to SEQ ID NO: 1087926
ucacacccuggauaaucac

SEQ ID NO: 1087928 - RNA, 19 nt, Artificial Sequence
  Description of Artificial Sequence: Synthetic oligonucleotide
  Sense strand starting at position 3802 of SEQ ID NO: 915546
gauuauccagggugugaau

SEQ ID NO: 1087929 - RNA, 19 nt, Artificial Sequence
  Description of Artificial Sequence: Synthetic oligonucleotide
  Antisense strand to SEQ ID NO: 1087928
auucacacccuggauaauc

SEQ ID NO: 1087930 - RNA, 19 nt, Artificial Sequence
  Description of Artificial Sequence: Synthetic oligonucleotide
  Sense strand starting at position 3835 of SEQ ID NO: 915546
agcauaagaucaucaacgu

SEQ ID NO: 1087931 - RNA, 19 nt, Artificial Sequence
  Description of Artificial Sequence: Synthetic oligonucleotide
  Antisense strand to SEQ ID NO: 1087930
acguugaugaucuuaugcu

SEQ ID NO: 1087932 - RNA, 19 nt, Artificial Sequence
  Description of Artificial Sequence: Synthetic oligonucleotide
  Sense strand starting at position 3858 of SEQ ID NO: 915546
gcugaagggcuguaauagu

SEQ ID NO: 1087933 - RNA, 19 nt, Artificial Sequence
  Description of Artificial Sequence: Synthetic oligonucleotide
  Antisense strand to SEQ ID NO: 1087932
acuauuacagcccuucagc

SEQ ID NO: 1087934 - RNA, 19 nt, Artificial Sequence
  Description of Artificial Sequence: Synthetic oligonucleotide
  Sense strand starting at position 3867 of SEQ ID NO: 915546
cuguaauaguuccuuuaug

SEQ ID NO: 1087935 - RNA, 19 nt, Artificial Sequence
  Description of Artificial Sequence: Synthetic oligonucleotide
  Antisense strand to SEQ ID NO: 1087934
cauaaaggaacuauuacag

SEQ ID NO: 1087936 - RNA, 19 nt, Artificial Sequence
  Description of Artificial Sequence: Synthetic oligonucleotide
  Sense strand starting at position 3922 of SEQ ID NO: 915546
cuaauaaugucagcaggaa

SEQ ID NO: 1087937 - RNA, 19 nt, Artificial Sequence
  Description of Artificial Sequence: Synthetic oligonucleotide
  Antisense strand to SEQ ID NO: 1087936
uuccugcugacauuauuag

SEQ ID NO: 1087938 - RNA, 19 nt, Artificial Sequence
  Description of Artificial Sequence: Synthetic oligonucleotide
  Sense strand starting at position 3950 of SEQ ID NO: 915546
gccagucacagugaacaga

SEQ ID NO: 1087939 - RNA, 19 nt, Artificial Sequence
  Description of Artificial Sequence: Synthetic oligonucleotide
  Antisense strand to SEQ ID NO: 1087938
ucuguucacugugacuggc

SEQ ID NO: 1087940 - RNA, 19 nt, Artificial Sequence
  Description of Artificial Sequence: Synthetic oligonucleotide
  Sense strand starting at position 52 of SEQ ID NO: 915547
ggagaugcuauaugugaaa

SEQ ID NO: 1087941 - RNA, 19 nt, Artificial Sequence
  Description of Artificial Sequence: Synthetic oligonucleotide
  Antisense strand to SEQ ID NO: 1087940
uuucacauauagcaucucc

SEQ ID NO: 1087942 - RNA, 19 nt, Artificial Sequence
  Description of Artificial Sequence: Synthetic oligonucleotide
  Sense strand starting at position 55 of SEQ ID NO: 915547
gaugcuauaugugaaauaa

SEQ ID NO: 1087943 - RNA, 19 nt, Artificial Sequence
  Description of Artificial Sequence: Synthetic oligonucleotide
  Antisense strand to SEQ ID NO: 1087942
uuauuucacauauagcauc

SEQ ID NO: 1087944 - RNA, 19 nt, Artificial Sequence
  Description of Artificial Sequence: Synthetic oligonucleotide
  Sense strand starting at position 148 of SEQ ID NO: 915547
gcauauugcuugcuacugu

SEQ ID NO: 1087945 - RNA, 19 nt, Artificial Sequence
  Description of Artificial Sequence: Synthetic oligonucleotide
  Antisense strand to SEQ ID NO: 1087944
acaguagcaagcaauaugc

SEQ ID NO: 1087946 - RNA, 19 nt, Artificial Sequence
  Description of Artificial Sequence: Synthetic oligonucleotide
  Sense strand starting at position 216 of SEQ ID NO: 915547
gacguauuguccucuacua

SEQ ID NO: 1087947 - RNA, 19 nt, Artificial Sequence
  Description of Artificial Sequence: Synthetic oligonucleotide
  Antisense strand to SEQ ID NO: 1087946
uaguagaggacaauacguc

SEQ ID NO: 1087948 - RNA, 19 nt, Artificial Sequence
  Description of Artificial Sequence: Synthetic oligonucleotide
  Sense strand starting at position 218 of SEQ ID NO: 915547
cguauuguccucuacuaag

SEQ ID NO: 1087949 - RNA, 19 nt, Artificial Sequence
  Description of Artificial Sequence: Synthetic oligonucleotide
  Antisense strand to SEQ ID NO: 1087948
cuuaguagaggacaauacg

SEQ ID NO: 1087950 - RNA, 19 nt, Artificial Sequence
  Description of Artificial Sequence: Synthetic oligonucleotide
  Sense strand starting at position 235 of SEQ ID NO: 915547
agagcacuggcugggaaau

SEQ ID NO: 1087951 - RNA, 19 nt, Artificial Sequence
  Description of Artificial Sequence: Synthetic oligonucleotide
  Antisense strand to SEQ ID NO: 1087950
auuucccagccagugcucu

SEQ ID NO: 1087952 - RNA, 19 nt, Artificial Sequence
  Description of Artificial Sequence: Synthetic oligonucleotide
  Sense strand starting at position 262 of SEQ ID NO: 915547
cugagcucuugagaaacaa

SEQ ID NO: 1087953 - RNA, 19 nt, Artificial Sequence
  Description of Artificial Sequence: Synthetic oligonucleotide
  Antisense strand to SEQ ID NO: 1087952
uuguuucucaagagcucag

SEQ ID NO: 1087954 - RNA, 19 nt, Artificial Sequence
  Description of Artificial Sequence: Synthetic oligonucleotide
  Sense strand starting at position 296 of SEQ ID NO: 915547
gggcaugugaacugugaag

SEQ ID NO: 1087955 - RNA, 19 nt, Artificial Sequence
  Description of Artificial Sequence: Synthetic oligonucleotide
  Antisense strand to SEQ ID NO: 1087954
cuucacaguucacaugccc

SEQ ID NO: 1087956 - RNA, 19 nt, Artificial Sequence
  Description of Artificial Sequence: Synthetic oligonucleotide
  Sense strand starting at position 312 of SEQ ID NO: 915547
aagccagauugcuugaguu

SEQ ID NO: 1087957 - RNA, 19 nt, Artificial Sequence
  Description of Artificial Sequence: Synthetic oligonucleotide
  Antisense strand to SEQ ID NO: 1087956
aacucaagcaaucuggcuu

SEQ ID NO: 1087958 - RNA, 19 nt, Artificial Sequence
  Description of Artificial Sequence: Synthetic oligonucleotide
  Sense strand starting at position 420 of SEQ ID NO: 915547
ggauuauaaucccaucuug

SEQ ID NO: 1087959 - RNA, 19 nt, Artificial Sequence
  Description of Artificial Sequence: Synthetic oligonucleotide
  Antisense strand to SEQ ID NO: 1087958
caagaugggauuauaaucc

SEQ ID NO: 1087960 - RNA, 19 nt, Artificial Sequence
  Description of Artificial Sequence: Synthetic oligonucleotide
  Sense strand starting at position 428 of SEQ ID NO: 915547
aucccaucuuguuaugaag

SEQ ID NO: 1087961 - RNA, 19 nt, Artificial Sequence
  Description of Artificial Sequence: Synthetic oligonucleotide
  Antisense strand to SEQ ID NO: 1087960
cuucauaacaagaugggau

SEQ ID NO: 1087962 - RNA, 19 nt, Artificial Sequence
  Description of Artificial Sequence: Synthetic oligonucleotide
  Sense strand starting at position 431 of SEQ ID NO: 915547
ccaucuuguuaugaagauu

SEQ ID NO: 1087963 - RNA, 19 nt, Artificial Sequence
  Description of Artificial Sequence: Synthetic oligonucleotide
  Antisense strand to SEQ ID NO: 1087962
aaucuucauaacaagaugg

SEQ ID NO: 1087964 - RNA, 19 nt, Artificial Sequence
  Description of Artificial Sequence: Synthetic oligonucleotide
  Sense strand starting at position 439 of SEQ ID NO: 915547
uuaugaagauuagcugagu

SEQ ID NO: 1087965 - RNA, 19 nt, Artificial Sequence
  Description of Artificial Sequence: Synthetic oligonucleotide
  Antisense strand to SEQ ID NO: 1087964
acucagcuaaucuucauaa

SEQ ID NO: 1087966 - RNA, 19 nt, Artificial Sequence
  Description of Artificial Sequence: Synthetic oligonucleotide
  Sense strand starting at position 440 of SEQ ID NO: 915547
uaugaagauuagcugaguu

SEQ ID NO: 1087967 - RNA, 19 nt, Artificial Sequence
  Description of Artificial Sequence: Synthetic oligonucleotide
  Antisense strand to SEQ ID NO: 1087966
aacucagcuaaucuucaua

SEQ ID NO: 1087968 - RNA, 19 nt, Artificial Sequence
  Description of Artificial Sequence: Synthetic oligonucleotide
  Sense strand starting at position 444 of SEQ ID NO: 915547
aagauuagcugaguuaaua

SEQ ID NO: 1087969 - RNA, 19 nt, Artificial Sequence
  Description of Artificial Sequence: Synthetic oligonucleotide
  Antisense strand to SEQ ID NO: 1087968
uauuaacucagcuaaucuu

SEQ ID NO: 1087970 - RNA, 19 nt, Artificial Sequence
  Description of Artificial Sequence: Synthetic oligonucleotide
  Sense strand starting at position 454 of SEQ ID NO: 915547
gaguuaauauggcuaagau

SEQ ID NO: 1087971 - RNA, 19 nt, Artificial Sequence
  Description of Artificial Sequence: Synthetic oligonucleotide
  Antisense strand to SEQ ID NO: 1087970
aucuuagccauauuaacuc

SEQ ID NO: 1087972 - RNA, 19 nt, Artificial Sequence
  Description of Artificial Sequence: Synthetic oligonucleotide
  Sense strand starting at position 455 of SEQ ID NO: 915547
aguuaauauggcuaagauc

SEQ ID NO: 1087973 - RNA, 19 nt, Artificial Sequence
  Description of Artificial Sequence: Synthetic oligonucleotide
  Antisense strand to SEQ ID NO: 1087972
gaucuuagccauauuaacu

SEQ ID NO: 1087974 - RNA, 19 nt, Artificial Sequence
  Description of Artificial Sequence: Synthetic oligonucleotide
  Sense strand starting at position 464 of SEQ ID NO: 915547
ggcuaagauccaugugccu

SEQ ID NO: 1087975 - RNA, 19 nt, Artificial Sequence
  Description of Artificial Sequence: Synthetic oligonucleotide
  Antisense strand to SEQ ID NO: 1087974
aggcacauggaucuuagcc

SEQ ID NO: 1087976 - RNA, 19 nt, Artificial Sequence
  Description of Artificial Sequence: Synthetic oligonucleotide
  Sense strand starting at position 470 of SEQ ID NO: 915547
gauccaugugccuggcaca

SEQ ID NO: 1087977 - RNA, 19 nt, Artificial Sequence
  Description of Artificial Sequence: Synthetic oligonucleotide
  Antisense strand to SEQ ID NO: 1087976
ugugccaggcacauggauc

SEQ ID NO: 1087978 - RNA, 19 nt, Artificial Sequence
  Description of Artificial Sequence: Synthetic oligonucleotide
  Sense strand starting at position 580 of SEQ ID NO: 915547
cugggugaccuuuaguaag

SEQ ID NO: 1087979 - RNA, 19 nt, Artificial Sequence
  Description of Artificial Sequence: Synthetic oligonucleotide
  Antisense strand to SEQ ID NO: 1087978
cuuacuaaaggucacccag

SEQ ID NO: 1087980 - RNA, 19 nt, Artificial Sequence
  Description of Artificial Sequence: Synthetic oligonucleotide
  Sense strand starting at position 582 of SEQ ID NO: 915547
gggugaccuuuaguaaguu

SEQ ID NO: 1087981 - RNA, 19 nt, Artificial Sequence
  Description of Artificial Sequence: Synthetic oligonucleotide
  Antisense strand to SEQ ID NO: 1087980
aacuuacuaaaggucaccc

SEQ ID NO: 1087982 - RNA, 19 nt, Artificial Sequence
  Description of Artificial Sequence: Synthetic oligonucleotide
  Sense strand starting at position 583 of SEQ ID NO: 915547
ggugaccuuuaguaaguua

SEQ ID NO: 1087983 - RNA, 19 nt, Artificial Sequence
  Description of Artificial Sequence: Synthetic oligonucleotide
  Antisense strand to SEQ ID NO: 1087982
uaacuuacuaaaggucacc

SEQ ID NO: 1087984 - RNA, 19 nt, Artificial Sequence
  Description of Artificial Sequence: Synthetic oligonucleotide
  Sense strand starting at position 634 of SEQ ID NO: 915547
cuaugacugcugcaccaaa

SEQ ID NO: 1087985 - RNA, 19 nt, Artificial Sequence
  Description of Artificial Sequence: Synthetic oligonucleotide
  Antisense strand to SEQ ID NO: 1087984
uuuggugcagcagucauag

SEQ ID NO: 1087986 - RNA, 19 nt, Artificial Sequence
  Description of Artificial Sequence: Synthetic oligonucleotide
  Sense strand starting at position 746 of SEQ ID NO: 915547
gccacucaccgaugaugau

SEQ ID NO: 1087987 - RNA, 19 nt, Artificial Sequence
  Description of Artificial Sequence: Synthetic oligonucleotide
  Antisense strand to SEQ ID NO: 1087986
aucaucaucggugaguggc

SEQ ID NO: 1087988 - RNA, 19 nt, Artificial Sequence
  Description of Artificial Sequence: Synthetic oligonucleotide
  Sense strand starting at position 2355 of SEQ ID NO: 915547
cgagcucacucuuccauaa

SEQ ID NO: 1087989 - RNA, 19 nt, Artificial Sequence
  Description of Artificial Sequence: Synthetic oligonucleotide
  Antisense strand to SEQ ID NO: 1087988
uuauggaagagugagcucg

SEQ ID NO: 1087990 - RNA, 19 nt, Artificial Sequence
  Description of Artificial Sequence: Synthetic oligonucleotide
  Sense strand starting at position 3190 of SEQ ID NO: 915547
cuccgacggccugaguuau

SEQ ID NO: 1087991 - RNA, 19 nt, Artificial Sequence
  Description of Artificial Sequence: Synthetic oligonucleotide
  Antisense strand to SEQ ID NO: 1087990
auaacucaggccgucggag

SEQ ID NO: 1087992 - RNA, 19 nt, Artificial Sequence
  Description of Artificial Sequence: Synthetic oligonucleotide
  Sense strand starting at position 3262 of SEQ ID NO: 915547
cccagaacucuagguggua

SEQ ID NO: 1087993 - RNA, 19 nt, Artificial Sequence
  Description of Artificial Sequence: Synthetic oligonucleotide
  Antisense strand to SEQ ID NO: 1087992
uaccaccuagaguucuggg

SEQ ID NO: 1087994 - RNA, 19 nt, Artificial Sequence
  Description of Artificial Sequence: Synthetic oligonucleotide
  Sense strand starting at position 3263 of SEQ ID NO: 915547
ccagaacucuaggugguau

SEQ ID NO: 1087995 - RNA, 19 nt, Artificial Sequence
  Description of Artificial Sequence: Synthetic oligonucleotide
  Antisense strand to SEQ ID NO: 1087994
auaccaccuagaguucugg

SEQ ID NO: 1087996 - RNA, 19 nt, Artificial Sequence
  Description of Artificial Sequence: Synthetic oligonucleotide
  Sense strand starting at position 3274 of SEQ ID NO: 915547
ggugguauggucgaacaua

SEQ ID NO: 1087997 - RNA, 19 nt, Artificial Sequence
  Description of Artificial Sequence: Synthetic oligonucleotide
  Antisense strand to SEQ ID NO: 1087996
uauguucgaccauaccacc

SEQ ID NO: 1087998 - RNA, 19 nt, Artificial Sequence
  Description of Artificial Sequence: Synthetic oligonucleotide
  Sense strand starting at position 3275 of SEQ ID NO: 915547
gugguauggucgaacauag

SEQ ID NO: 1087999 - RNA, 19 nt, Artificial Sequence
  Description of Artificial Sequence: Synthetic oligonucleotide
  Antisense strand to SEQ ID NO: 1087998
cuauguucgaccauaccac

SEQ ID NO: 1088000 - RNA, 19 nt, Artificial Sequence
  Description of Artificial Sequence: Synthetic oligonucleotide
  Sense strand starting at position 3286 of SEQ ID NO: 915547
gaacauagauguuuguaau

SEQ ID NO: 1088001 - RNA, 19 nt, Artificial Sequence
  Description of Artificial Sequence: Synthetic oligonucleotide
  Antisense strand to SEQ ID NO: 1088000
auuacaaacaucuauguuc

SEQ ID NO: 1088002 - RNA, 19 nt, Artificial Sequence
  Description of Artificial Sequence: Synthetic oligonucleotide
  Sense strand starting at position 3329 of SEQ ID NO: 915547
ccauuuaauuaacggguaa

SEQ ID NO: 1088003 - RNA, 19 nt, Artificial Sequence
  Description of Artificial Sequence: Synthetic oligonucleotide
  Antisense strand to SEQ ID NO: 1088002
uuacccguuaauuaaaugg

SEQ ID NO: 1088004 - RNA, 19 nt, Artificial Sequence
  Description of Artificial Sequence: Synthetic oligonucleotide
  Sense strand starting at position 3350 of SEQ ID NO: 915547
ugaugucauggcugggauu

SEQ ID NO: 1088005 - RNA, 19 nt, Artificial Sequence
  Description of Artificial Sequence: Synthetic oligonucleotide
  Antisense strand to SEQ ID NO: 1088004
aaucccagccaugacauca

SEQ ID NO: 1088006 - RNA, 19 nt, Artificial Sequence
  Description of Artificial Sequence: Synthetic oligonucleotide
  Sense strand starting at position 3751 of SEQ ID NO: 915547
aagauaagccauugauagu

SEQ ID NO: 1088007 - RNA, 19 nt, Artificial Sequence
  Description of Artificial Sequence: Synthetic oligonucleotide
  Antisense strand to SEQ ID NO: 1088006
acuaucaauggcuuaucuu

SEQ ID NO: 1088008 - RNA, 19 nt, Artificial Sequence
  Description of Artificial Sequence: Synthetic oligonucleotide
  Sense strand starting at position 3758 of SEQ ID NO: 915547
gccauugauaguuguagcu

SEQ ID NO: 1088009 - RNA, 19 nt, Artificial Sequence
  Description of Artificial Sequence: Synthetic oligonucleotide
  Antisense strand to SEQ ID NO: 1088008
agcuacaacuaucaauggc

SEQ ID NO: 1088010 - RNA, 19 nt, Artificial Sequence
  Description of Artificial Sequence: Synthetic oligonucleotide
  Sense strand starting at position 3768 of SEQ ID NO: 915547
guuguagcuaggcguagau

SEQ ID NO: 1088011 - RNA, 19 nt, Artificial Sequence
  Description of Artificial Sequence: Synthetic oligonucleotide
  Antisense strand to SEQ ID NO: 1088010
aucuacgccuagcuacaac

SEQ ID NO: 1088012 - RNA, 19 nt, Artificial Sequence
  Description of Artificial Sequence: Synthetic oligonucleotide
  Sense strand starting at position 3820 of SEQ ID NO: 915547
uuguguacauuugcaaauu

SEQ ID NO: 1088013 - RNA, 19 nt, Artificial Sequence
  Description of Artificial Sequence: Synthetic oligonucleotide
  Antisense strand to SEQ ID NO: 1088012
aauuugcaaauguacacaa

SEQ ID NO: 1088014 - RNA, 19 nt, Artificial Sequence
  Description of Artificial Sequence: Synthetic oligonucleotide
  Sense strand starting at position 3821 of SEQ ID NO: 915547
uguguacauuugcaaauuu

SEQ ID NO: 1088015 - RNA, 19 nt, Artificial Sequence
  Description of Artificial Sequence: Synthetic oligonucleotide
  Antisense strand to SEQ ID NO: 1088014
aaauuugcaaauguacaca

SEQ ID NO: 1088016 - RNA, 19 nt, Artificial Sequence
  Description of Artificial Sequence: Synthetic oligonucleotide
  Sense strand starting at position 3858 of SEQ ID NO: 915547
accuauauaguacgcuuaa

SEQ ID NO: 1088017 - RNA, 19 nt, Artificial Sequence
  Description of Artificial Sequence: Synthetic oligonucleotide
  Antisense strand to SEQ ID NO: 1088016
uuaagcguacuauauaggu

SEQ ID NO: 1088018 - RNA, 19 nt, Artificial Sequence
  Description of Artificial Sequence: Synthetic oligonucleotide
  Sense strand starting at position 3859 of SEQ ID NO: 915547
ccuauauaguacgcuuaaa

SEQ ID NO: 1088019 - RNA, 19 nt, Artificial Sequence
  Description of Artificial Sequence: Synthetic oligonucleotide
  Antisense strand to SEQ ID NO: 1088018
uuuaagcguacuauauagg

SEQ ID NO: 1088020 - RNA, 19 nt, Artificial Sequence
  Description of Artificial Sequence: Synthetic oligonucleotide
  Sense strand starting at position 310 of SEQ ID NO: 915548
acaaauguaucaggacaua

SEQ ID NO: 1088021 - RNA, 19 nt, Artificial Sequence
  Description of Artificial Sequence: Synthetic oligonucleotide
  Antisense strand to SEQ ID NO: 1088020
uauguccugauacauuugu

SEQ ID NO: 1088022 - RNA, 19 nt, Artificial Sequence
  Description of Artificial Sequence: Synthetic oligonucleotide
  Sense strand starting at position 415 of SEQ ID NO: 915548
ugcuuacaccuuuaucgau

SEQ ID NO: 1088023 - RNA, 19 nt, Artificial Sequence
  Description of Artificial Sequence: Synthetic oligonucleotide
  Antisense strand to SEQ ID NO: 1088022
aucgauaaagguguaagca

SEQ ID NO: 1088024 - RNA, 19 nt, Artificial Sequence
  Description of Artificial Sequence: Synthetic oligonucleotide
  Sense strand starting at position 474 of SEQ ID NO: 915548
acaaucguuaaagggaaau

SEQ ID NO: 1088025 - RNA, 19 nt, Artificial Sequence
  Description of Artificial Sequence: Synthetic oligonucleotide
  Antisense strand to SEQ ID NO: 1088024
auuucccuuuaacgauugu

SEQ ID NO: 1088026 - RNA, 19 nt, Artificial Sequence
  Description of Artificial Sequence: Synthetic oligonucleotide
  Sense strand starting at position 484 of SEQ ID NO: 915548
aagggaaauucgcuuuguu

SEQ ID NO: 1088027 - RNA, 19 nt, Artificial Sequence
  Description of Artificial Sequence: Synthetic oligonucleotide
  Antisense strand to SEQ ID NO: 1088026
aacaaagcgaauuucccuu

SEQ ID NO: 1088028 - RNA, 19 nt, Artificial Sequence
  Description of Artificial Sequence: Synthetic oligonucleotide
  Sense strand starting at position 487 of SEQ ID NO: 915548
ggaaauucgcuuuguuaau

SEQ ID NO: 1088029 - RNA, 19 nt, Artificial Sequence
  Description of Artificial Sequence: Synthetic oligonucleotide
  Antisense strand to SEQ ID NO: 1088028
auuaacaaagcgaauuucc

SEQ ID NO: 1088030 - RNA, 19 nt, Artificial Sequence
  Description of Artificial Sequence: Synthetic oligonucleotide
  Sense strand starting at position 488 of SEQ ID NO: 915548
gaaauucgcuuuguuaaua

SEQ ID NO: 1088031 - RNA, 19 nt, Artificial Sequence
  Description of Artificial Sequence: Synthetic oligonucleotide
  Antisense strand to SEQ ID NO: 1088030
uauuaacaaagcgaauuuc

SEQ ID NO: 1088032 - RNA, 19 nt, Artificial Sequence
  Description of Artificial Sequence: Synthetic oligonucleotide
  Sense strand starting at position 533 of SEQ ID NO: 915548
augaguugucaguggccaa

SEQ ID NO: 1088033 - RNA, 19 nt, Artificial Sequence
  Description of Artificial Sequence: Synthetic oligonucleotide
  Antisense strand to SEQ ID NO: 1088032
uuggccacugacaacucau

SEQ ID NO: 1088034 - RNA, 19 nt, Artificial Sequence
  Description of Artificial Sequence: Synthetic oligonucleotide
  Sense strand starting at position 534 of SEQ ID NO: 915548
ugaguugucaguggccaac

SEQ ID NO: 1088035 - RNA, 19 nt, Artificial Sequence
  Description of Artificial Sequence: Synthetic oligonucleotide
  Antisense strand to SEQ ID NO: 1088034
guuggccacugacaacuca

SEQ ID NO: 1088036 - RNA, 19 nt, Artificial Sequence
  Description of Artificial Sequence: Synthetic oligonucleotide
  Sense strand starting at position 596 of SEQ ID NO: 915548
ucuuguggccuugggcaaa

SEQ ID NO: 1088037 - RNA, 19 nt, Artificial Sequence
  Description of Artificial Sequence: Synthetic oligonucleotide
  Antisense strand to SEQ ID NO: 1088036
uuugcccaaggccacaaga

SEQ ID NO: 1088038 - RNA, 19 nt, Artificial Sequence
  Description of Artificial Sequence: Synthetic oligonucleotide
  Sense strand starting at position 628 of SEQ ID NO: 915548
uuuguuucuccagcggcaa

SEQ ID NO: 1088039 - RNA, 19 nt, Artificial Sequence
  Description of Artificial Sequence: Synthetic oligonucleotide
  Antisense strand to SEQ ID NO: 1088038
uugccgcuggagaaacaaa

SEQ ID NO: 1088040 - RNA, 19 nt, Artificial Sequence
  Description of Artificial Sequence: Synthetic oligonucleotide
  Sense strand starting at position 641 of SEQ ID NO: 915548
cggcaaaguggauauaaca

SEQ ID NO: 1088041 - RNA, 19 nt, Artificial Sequence
  Description of Artificial Sequence: Synthetic oligonucleotide
  Antisense strand to SEQ ID NO: 1088040
uguuauauccacuuugccg

SEQ ID NO: 1088042 - RNA, 19 nt, Artificial Sequence
  Description of Artificial Sequence: Synthetic oligonucleotide
  Sense strand starting at position 671 of SEQ ID NO: 915548
uccuaaaguggugaggauu

SEQ ID NO: 1088043 - RNA, 19 nt, Artificial Sequence
  Description of Artificial Sequence: Synthetic oligonucleotide
  Antisense strand to SEQ ID NO: 1088042
aauccucaccacuuuagga

SEQ ID NO: 1088044 - RNA, 19 nt, Artificial Sequence
  Description of Artificial Sequence: Synthetic oligonucleotide
  Sense strand starting at position 679 of SEQ ID NO: 915548
uggugaggauuagcugaua

SEQ ID NO: 1088045 - RNA, 19 nt, Artificial Sequence
  Description of Artificial Sequence: Synthetic oligonucleotide
  Antisense strand to SEQ ID NO: 1088044
uaucagcuaauccucacca

SEQ ID NO: 1088046 - RNA, 19 nt, Artificial Sequence
  Description of Artificial Sequence: Synthetic oligonucleotide
  Sense strand starting at position 706 of SEQ ID NO: 915548
auaaauuguuaugcacagu

SEQ ID NO: 1088047 - RNA, 19 nt, Artificial Sequence
  Description of Artificial Sequence: Synthetic oligonucleotide
  Antisense strand to SEQ ID NO: 1088046
acugugcauaacaauuuau

SEQ ID NO: 1088048 - RNA, 19 nt, Artificial Sequence
  Description of Artificial Sequence: Synthetic oligonucleotide
  Sense strand starting at position 737 of SEQ ID NO: 915548
gcgagugcccaauaaaugu

SEQ ID NO: 1088049 - RNA, 19 nt, Artificial Sequence
  Description of Artificial Sequence: Synthetic oligonucleotide
  Antisense strand to SEQ ID NO: 1088048
acauuuauugggcacucgc

SEQ ID NO: 1088050 - RNA, 19 nt, Artificial Sequence
  Description of Artificial Sequence: Synthetic oligonucleotide
  Sense strand starting at position 777 of SEQ ID NO: 915548
guucucucauuuccagagu

SEQ ID NO: 1088051 - RNA, 19 nt, Artificial Sequence
  Description of Artificial Sequence: Synthetic oligonucleotide
  Antisense strand to SEQ ID NO: 1088050
acucuggaaaugagagaac

SEQ ID NO: 1088052 - RNA, 19 nt, Artificial Sequence
  Description of Artificial Sequence: Synthetic oligonucleotide
  Sense strand starting at position 815 of SEQ ID NO: 915548
cagaaacgcuuucuagagu

SEQ ID NO: 1088053 - RNA, 19 nt, Artificial Sequence
  Description of Artificial Sequence: Synthetic oligonucleotide
  Antisense strand to SEQ ID NO: 1088052
acucuagaaagcguuucug

SEQ ID NO: 1088054 - RNA, 19 nt, Artificial Sequence
  Description of Artificial Sequence: Synthetic oligonucleotide
  Sense strand starting at position 1471 of SEQ ID NO: 915548
aggugaagaguuugccuuu

SEQ ID NO: 1088055 - RNA, 19 nt, Artificial Sequence
  Description of Artificial Sequence: Synthetic oligonucleotide
  Antisense strand to SEQ ID NO: 1088054
aaaggcaaacucuucaccu

SEQ ID NO: 1088056 - RNA, 19 nt, Artificial Sequence
  Description of Artificial Sequence: Synthetic oligonucleotide
  Sense strand starting at position 1742 of SEQ ID NO: 915548
gcgaccaaucauuaacugu

SEQ ID NO: 1088057 - RNA, 19 nt, Artificial Sequence
  Description of Artificial Sequence: Synthetic oligonucleotide
  Antisense strand to SEQ ID NO: 1088056
acaguuaaugauuggucgc

SEQ ID NO: 1088058 - RNA, 19 nt, Artificial Sequence
  Description of Artificial Sequence: Synthetic oligonucleotide
  Sense strand starting at position 1901 of SEQ ID NO: 915548
uaggguuccuuguuugaaa

SEQ ID NO: 1088059 - RNA, 19 nt, Artificial Sequence
  Description of Artificial Sequence: Synthetic oligonucleotide
  Antisense strand to SEQ ID NO: 1088058
uuucaaacaaggaacccua

SEQ ID NO: 1088060 - RNA, 19 nt, Artificial Sequence
  Description of Artificial Sequence: Synthetic oligonucleotide
  Sense strand starting at position 1932 of SEQ ID NO: 915548
gugacacgagguuauugua

SEQ ID NO: 1088061 - RNA, 19 nt, Artificial Sequence
  Description of Artificial Sequence: Synthetic oligonucleotide
  Antisense strand to SEQ ID NO: 1088060
uacaauaaccucgugucac

SEQ ID NO: 1088062 - RNA, 19 nt, Artificial Sequence
  Description of Artificial Sequence: Synthetic oligonucleotide
  Sense strand starting at position 1939 of SEQ ID NO: 915548
gagguuauuguaggugauu

SEQ ID NO: 1088063 - RNA, 19 nt, Artificial Sequence
  Description of Artificial Sequence: Synthetic oligonucleotide
  Antisense strand to SEQ ID NO: 1088062
aaucaccuacaauaaccuc

SEQ ID NO: 1088064 - RNA, 19 nt, Artificial Sequence
  Description of Artificial Sequence: Synthetic oligonucleotide
  Sense strand starting at position 1944 of SEQ ID NO: 915548
uauuguaggugauuccuaa

SEQ ID NO: 1088065 - RNA, 19 nt, Artificial Sequence
  Description of Artificial Sequence: Synthetic oligonucleotide
  Antisense strand to SEQ ID NO: 1088064
uuaggaaucaccuacaaua

SEQ ID NO: 1088066 - RNA, 19 nt, Artificial Sequence
  Description of Artificial Sequence: Synthetic oligonucleotide
  Sense strand starting at position 1974 of SEQ ID NO: 915548
gugagugagcagugaguua

SEQ ID NO: 1088067 - RNA, 19 nt, Artificial Sequence
  Description of Artificial Sequence: Synthetic oligonucleotide
  Antisense strand to SEQ ID NO: 1088066
uaacucacugcucacucac

SEQ ID NO: 1088068 - RNA, 19 nt, Artificial Sequence
  Description of Artificial Sequence: Synthetic oligonucleotide
  Sense strand starting at position 2331 of SEQ ID NO: 915548
gcgguugugagccaagauc

SEQ ID NO: 1088069 - RNA, 19 nt, Artificial Sequence
  Description of Artificial Sequence: Synthetic oligonucleotide
  Antisense strand to SEQ ID NO: 1088068
gaucuuggcucacaaccgc

SEQ ID NO: 1088070 - RNA, 19 nt, Artificial Sequence
  Description of Artificial Sequence: Synthetic oligonucleotide
  Sense strand starting at position 2377 of SEQ ID NO: 915548
agagggagacgucgucuua

SEQ ID NO: 1088071 - RNA, 19 nt, Artificial Sequence
  Description of Artificial Sequence: Synthetic oligonucleotide
  Antisense strand to SEQ ID NO: 1088070
uaagacgacgucucccucu

SEQ ID NO: 1088072 - RNA, 19 nt, Artificial Sequence
  Description of Artificial Sequence: Synthetic oligonucleotide
  Sense strand starting at position 2645 of SEQ ID NO: 915548
gaggcuuccacgggcuaaa

SEQ ID NO: 1088073 - RNA, 19 nt, Artificial Sequence
  Description of Artificial Sequence: Synthetic oligonucleotide
  Antisense strand to SEQ ID NO: 1088072
uuuagcccguggaagccuc

SEQ ID NO: 1088074 - RNA, 19 nt, Artificial Sequence
  Description of Artificial Sequence: Synthetic oligonucleotide
  Sense strand starting at position 2655 of SEQ ID NO: 915548
cgggcuaaagagggauuaa

SEQ ID NO: 1088075 - RNA, 19 nt, Artificial Sequence
  Description of Artificial Sequence: Synthetic oligonucleotide
  Antisense strand to SEQ ID NO: 1088074
uuaaucccucuuuagcccg

SEQ ID NO: 1088076 - RNA, 19 nt, Artificial Sequence
  Description of Artificial Sequence: Synthetic oligonucleotide
  Sense strand starting at position 2971 of SEQ ID NO: 915548
cguggucauccguagagac

SEQ ID NO: 1088077 - RNA, 19 nt, Artificial Sequence
  Description of Artificial Sequence: Synthetic oligonucleotide
  Antisense strand to SEQ ID NO: 1088076
gucucuacggaugaccacg

SEQ ID NO: 1088078 - RNA, 19 nt, Artificial Sequence
  Description of Artificial Sequence: Synthetic oligonucleotide
  Sense strand starting at position 2973 of SEQ ID NO: 915548
uggucauccguagagacua

SEQ ID NO: 1088079 - RNA, 19 nt, Artificial Sequence
  Description of Artificial Sequence: Synthetic oligonucleotide
  Antisense strand to SEQ ID NO: 1088078
uagucucuacggaugacca

SEQ ID NO: 1088080 - RNA, 19 nt, Artificial Sequence
  Description of Artificial Sequence: Synthetic oligonucleotide
  Sense strand starting at position 2975 of SEQ ID NO: 915548
gucauccguagagacuaau

SEQ ID NO: 1088081 - RNA, 19 nt, Artificial Sequence
  Description of Artificial Sequence: Synthetic oligonucleotide
  Antisense strand to SEQ ID NO: 1088080
auuagucucuacggaugac

SEQ ID NO: 1088082 - RNA, 19 nt, Artificial Sequence
  Description of Artificial Sequence: Synthetic oligonucleotide
  Sense strand starting at position 2981 of SEQ ID NO: 915548
cguagagacuaauuaagua

SEQ ID NO: 1088083 - RNA, 19 nt, Artificial Sequence
  Description of Artificial Sequence: Synthetic oligonucleotide
  Antisense strand to SEQ ID NO: 1088082
uacuuaauuagucucuacg

SEQ ID NO: 1088084 - RNA, 19 nt, Artificial Sequence
  Description of Artificial Sequence: Synthetic oligonucleotide
  Sense strand starting at position 3088 of SEQ ID NO: 915548
gcauauugacaacguugaa

SEQ ID NO: 1088085 - RNA, 19 nt, Artificial Sequence
  Description of Artificial Sequence: Synthetic oligonucleotide
  Antisense strand to SEQ ID NO: 1088084
uucaacguugucaauaugc

SEQ ID NO: 1088086 - RNA, 19 nt, Artificial Sequence
  Description of Artificial Sequence: Synthetic oligonucleotide
  Sense strand starting at position 3091 of SEQ ID NO: 915548
uauugacaacguugaauuc

SEQ ID NO: 1088087 - RNA, 19 nt, Artificial Sequence
  Description of Artificial Sequence: Synthetic oligonucleotide
  Antisense strand to SEQ ID NO: 1088086
gaauucaacguugucaaua

SEQ ID NO: 1088088 - RNA, 19 nt, Artificial Sequence
  Description of Artificial Sequence: Synthetic oligonucleotide
  Sense strand starting at position 3118 of SEQ ID NO: 915548
cccugugcuccuggaaagu

SEQ ID NO: 1088089 - RNA, 19 nt, Artificial Sequence
  Description of Artificial Sequence: Synthetic oligonucleotide
  Antisense strand to SEQ ID NO: 1088088
acuuuccaggagcacaggg

SEQ ID NO: 1088090 - RNA, 19 nt, Artificial Sequence
  Description of Artificial Sequence: Synthetic oligonucleotide
  Sense strand starting at position 3217 of SEQ ID NO: 915548
cggauuacuccugagguca

SEQ ID NO: 1088091 - RNA, 19 nt, Artificial Sequence
  Description of Artificial Sequence: Synthetic oligonucleotide
  Antisense strand to SEQ ID NO: 1088090
ugaccucaggaguaauccg

SEQ ID NO: 1088092 - RNA, 19 nt, Artificial Sequence
  Description of Artificial Sequence: Synthetic oligonucleotide
  Sense strand starting at position 3639 of SEQ ID NO: 915548
ggugaaacauucucuaauc

SEQ ID NO: 1088093 - RNA, 19 nt, Artificial Sequence
  Description of Artificial Sequence: Synthetic oligonucleotide
  Antisense strand to SEQ ID NO: 1088092
gauuagagaauguuucacc

SEQ ID NO: 1088094 - RNA, 19 nt, Artificial Sequence
  Description of Artificial Sequence: Synthetic oligonucleotide
  Sense strand starting at position 3656 of SEQ ID NO: 915548
ucuauuauccaguggagag

SEQ ID NO: 1088095 - RNA, 19 nt, Artificial Sequence
  Description of Artificial Sequence: Synthetic oligonucleotide
  Antisense strand to SEQ ID NO: 1088094
cucuccacuggauaauaga

SEQ ID NO: 1088096 - RNA, 19 nt, Artificial Sequence
  Description of Artificial Sequence: Synthetic oligonucleotide
  Sense strand starting at position 3900 of SEQ ID NO: 915548
aggugacuagaguauagua

SEQ ID NO: 1088097 - RNA, 19 nt, Artificial Sequence
  Description of Artificial Sequence: Synthetic oligonucleotide
  Antisense strand to SEQ ID NO: 1088096
uacuauacucuagucaccu

SEQ ID NO: 1088098 - RNA, 19 nt, Artificial Sequence
  Description of Artificial Sequence: Synthetic oligonucleotide
  Sense strand starting at position 3905 of SEQ ID NO: 915548
acuagaguauaguaagaua

SEQ ID NO: 1088099 - RNA, 19 nt, Artificial Sequence
  Description of Artificial Sequence: Synthetic oligonucleotide
  Antisense strand to SEQ ID NO: 1088098
uaucuuacuauacucuagu

SEQ ID NO: 1088100 - RNA, 19 nt, Artificial Sequence
  Description of Artificial Sequence: Synthetic oligonucleotide
  Sense strand starting at position 7 of SEQ ID NO: 915549
cuaccauacugcucugaag

SEQ ID NO: 1088101 - RNA, 19 nt, Artificial Sequence
  Description of Artificial Sequence: Synthetic oligonucleotide
  Antisense strand to SEQ ID NO: 1088100
cuucagagcaguaugguag

SEQ ID NO: 1088102 - RNA, 19 nt, Artificial Sequence
  Description of Artificial Sequence: Synthetic oligonucleotide
  Sense strand starting at position 9 of SEQ ID NO: 915549
accauacugcucugaagga

SEQ ID NO: 1088103 - RNA, 19 nt, Artificial Sequence
  Description of Artificial Sequence: Synthetic oligonucleotide
  Antisense strand to SEQ ID NO: 1088102
uccuucagagcaguauggu

SEQ ID NO: 1088104 - RNA, 19 nt, Artificial Sequence
  Description of Artificial Sequence: Synthetic oligonucleotide
  Sense strand starting at position 278 of SEQ ID NO: 915549
uugcuauuccuuuaguuau

SEQ ID NO: 1088105 - RNA, 19 nt, Artificial Sequence
  Description of Artificial Sequence: Synthetic oligonucleotide
  Antisense strand to SEQ ID NO: 1088104
auaacuaaaggaauagcaa

SEQ ID NO: 1088106 - RNA, 19 nt, Artificial Sequence
  Description of Artificial Sequence: Synthetic oligonucleotide
  Sense strand starting at position 838 of SEQ ID NO: 915549
ucuugauauaaguaugggu

SEQ ID NO: 1088107 - RNA, 19 nt, Artificial Sequence
  Description of Artificial Sequence: Synthetic oligonucleotide
  Antisense strand to SEQ ID NO: 1088106
acccauacuuauaucaaga

SEQ ID NO: 1088108 - RNA, 19 nt, Artificial Sequence
  Description of Artificial Sequence: Synthetic oligonucleotide
  Sense strand starting at position 840 of SEQ ID NO: 915549
uugauauaaguauggguua

SEQ ID NO: 1088109 - RNA, 19 nt, Artificial Sequence
  Description of Artificial Sequence: Synthetic oligonucleotide
  Antisense strand to SEQ ID NO: 1088108
uaacccauacuuauaucaa

SEQ ID NO: 1088110 - RNA, 19 nt, Artificial Sequence
  Description of Artificial Sequence: Synthetic oligonucleotide
  Sense strand starting at position 843 of SEQ ID NO: 915549
auauaaguauggguuacau

SEQ ID NO: 1088111 - RNA, 19 nt, Artificial Sequence
  Description of Artificial Sequence: Synthetic oligonucleotide
  Antisense strand to SEQ ID NO: 1088110
auguaacccauacuuauau

SEQ ID NO: 1088112 - RNA, 19 nt, Artificial Sequence
  Description of Artificial Sequence: Synthetic oligonucleotide
  Sense strand starting at position 875 of SEQ ID NO: 915549
gggaaauauucugaaggag

SEQ ID NO: 1088113 - RNA, 19 nt, Artificial Sequence
  Description of Artificial Sequence: Synthetic oligonucleotide
  Antisense strand to SEQ ID NO: 1088112
cuccuucagaauauuuccc

SEQ ID NO: 1088114 - RNA, 19 nt, Artificial Sequence
  Description of Artificial Sequence: Synthetic oligonucleotide
  Sense strand starting at position 1255 of SEQ ID NO: 915549
gccagcaaugcaugagaau

SEQ ID NO: 1088115 - RNA, 19 nt, Artificial Sequence
  Description of Artificial Sequence: Synthetic oligonucleotide
  Antisense strand to SEQ ID NO: 1088114
auucucaugcauugcuggc

SEQ ID NO: 1088116 - RNA, 19 nt, Artificial Sequence
  Description of Artificial Sequence: Synthetic oligonucleotide
  Sense strand starting at position 1256 of SEQ ID NO: 915549
ccagcaaugcaugagaaua

SEQ ID NO: 1088117 - RNA, 19 nt, Artificial Sequence
  Description of Artificial Sequence: Synthetic oligonucleotide
  Antisense strand to SEQ ID NO: 1088116
uauucucaugcauugcugg

SEQ ID NO: 1088118 - RNA, 19 nt, Artificial Sequence
  Description of Artificial Sequence: Synthetic oligonucleotide
  Sense strand starting at position 1336 of SEQ ID NO: 915549
ggguucugccauuaauaag

SEQ ID NO: 1088119 - RNA, 19 nt, Artificial Sequence
  Description of Artificial Sequence: Synthetic oligonucleotide
  Antisense strand to SEQ ID NO: 1088118
cuuauuaauggcagaaccc

SEQ ID NO: 1088120 - RNA, 19 nt, Artificial Sequence
  Description of Artificial Sequence: Synthetic oligonucleotide
  Sense strand starting at position 1487 of SEQ ID NO: 915549
aguuuauuguuucuaccau

SEQ ID NO: 1088121 - RNA, 19 nt, Artificial Sequence
  Description of Artificial Sequence: Synthetic oligonucleotide
  Antisense strand to SEQ ID NO: 1088120
augguagaaacaauaaacu

SEQ ID NO: 1088122 - RNA, 19 nt, Artificial Sequence
  Description of Artificial Sequence: Synthetic oligonucleotide
  Sense strand starting at position 1616 of SEQ ID NO: 915549
ucuugaagauuccauuuag

SEQ ID NO: 1088123 - RNA, 19 nt, Artificial Sequence
  Description of Artificial Sequence: Synthetic oligonucleotide
  Antisense strand to SEQ ID NO: 1088122
cuaaauggaaucuucaaga

SEQ ID NO: 1088124 - RNA, 19 nt, Artificial Sequence
  Description of Artificial Sequence: Synthetic oligonucleotide
  Sense strand starting at position 1654 of SEQ ID NO: 915549
uuuaaucagcaucgaauga

SEQ ID NO: 1088125 - RNA, 19 nt, Artificial Sequence
  Description of Artificial Sequence: Synthetic oligonucleotide
  Antisense strand to SEQ ID NO: 1088124
ucauucgaugcugauuaaa

SEQ ID NO: 1088126 - RNA, 19 nt, Artificial Sequence
  Description of Artificial Sequence: Synthetic oligonucleotide
  Sense strand starting at position 1682 of SEQ ID NO: 915549
ccaaguacaguacguauaa

SEQ ID NO: 1088127 - RNA, 19 nt, Artificial Sequence
  Description of Artificial Sequence: Synthetic oligonucleotide
  Antisense strand to SEQ ID NO: 1088126
uuauacguacuguacuugg

SEQ ID NO: 1088128 - RNA, 19 nt, Artificial Sequence
  Description of Artificial Sequence: Synthetic oligonucleotide
  Sense strand starting at position 1695 of SEQ ID NO: 915549
guauaacugggagagcgau

SEQ ID NO: 1088129 - RNA, 19 nt, Artificial Sequence
  Description of Artificial Sequence: Synthetic oligonucleotide
  Antisense strand to SEQ ID NO: 1088128
aucgcucucccaguuauac

SEQ ID NO: 1088130 - RNA, 19 nt, Artificial Sequence
  Description of Artificial Sequence: Synthetic oligonucleotide
  Sense strand starting at position 1883 of SEQ ID NO: 915549
uucgaaacucugggauaac

SEQ ID NO: 1088131 - RNA, 19 nt, Artificial Sequence
  Description of Artificial Sequence: Synthetic oligonucleotide
  Antisense strand to SEQ ID NO: 1088130
guuaucccagaguuucgaa

SEQ ID NO: 1088132 - RNA, 19 nt, Artificial Sequence
  Description of Artificial Sequence: Synthetic oligonucleotide
  Sense strand starting at position 1978 of SEQ ID NO: 915549
cuuaaagcaucauugggaa

SEQ ID NO: 1088133 - RNA, 19 nt, Artificial Sequence
  Description of Artificial Sequence: Synthetic oligonucleotide
  Antisense strand to SEQ ID NO: 1088132
uucccaaugaugcuuuaag

SEQ ID NO: 1088134 - RNA, 19 nt, Artificial Sequence
  Description of Artificial Sequence: Synthetic oligonucleotide
  Sense strand starting at position 2715 of SEQ ID NO: 915549
uaaagaugacggcgaacuu

SEQ ID NO: 1088135 - RNA, 19 nt, Artificial Sequence
  Description of Artificial Sequence: Synthetic oligonucleotide
  Antisense strand to SEQ ID NO: 1088134
aaguucgccgucaucuuua

SEQ ID NO: 1088136 - RNA, 19 nt, Artificial Sequence
  Description of Artificial Sequence: Synthetic oligonucleotide
  Sense strand starting at position 2716 of SEQ ID NO: 915549
aaagaugacggcgaacuua

SEQ ID NO: 1088137 - RNA, 19 nt, Artificial Sequence
  Description of Artificial Sequence: Synthetic oligonucleotide
  Antisense strand to SEQ ID NO: 1088136
uaaguucgccgucaucuuu

SEQ ID NO: 1088138 - RNA, 19 nt, Artificial Sequence
  Description of Artificial Sequence: Synthetic oligonucleotide
  Sense strand starting at position 2760 of SEQ ID NO: 915549
aggcguuagcguucuguaa

SEQ ID NO: 1088139 - RNA, 19 nt, Artificial Sequence
  Description of Artificial Sequence: Synthetic oligonucleotide
  Antisense strand to SEQ ID NO: 1088138
uuacagaacgcuaacgccu

SEQ ID NO: 1088140 - RNA, 19 nt, Artificial Sequence
  Description of Artificial Sequence: Synthetic oligonucleotide
  Sense strand starting at position 2761 of SEQ ID NO: 915549
ggcguuagcguucuguaag

SEQ ID NO: 1088141 - RNA, 19 nt, Artificial Sequence
  Description of Artificial Sequence: Synthetic oligonucleotide
  Antisense strand to SEQ ID NO: 1088140
cuuacagaacgcuaacgcc

SEQ ID NO: 1088142 - RNA, 19 nt, Artificial Sequence
  Description of Artificial Sequence: Synthetic oligonucleotide
  Sense strand starting at position 2775 of SEQ ID NO: 915549
guaagucaccuuggagaau

SEQ ID NO: 1088143 - RNA, 19 nt, Artificial Sequence
  Description of Artificial Sequence: Synthetic oligonucleotide
  Antisense strand to SEQ ID NO: 1088142
auucuccaaggugacuuac

SEQ ID NO: 1088144 - RNA, 19 nt, Artificial Sequence
  Description of Artificial Sequence: Synthetic oligonucleotide
  Sense strand starting at position 2831 of SEQ ID NO: 915549
gguucugacuacucugguu

SEQ ID NO: 1088145 - RNA, 19 nt, Artificial Sequence
  Description of Artificial Sequence: Synthetic oligonucleotide
  Antisense strand to SEQ ID NO: 1088144
aaccagaguagucagaacc

SEQ ID NO: 1088146 - RNA, 19 nt, Artificial Sequence
  Description of Artificial Sequence: Synthetic oligonucleotide
  Sense strand starting at position 2845 of SEQ ID NO: 915549
ugguuauucgucucccugu

SEQ ID NO: 1088147 - RNA, 19 nt, Artificial Sequence
  Description of Artificial Sequence: Synthetic oligonucleotide
  Antisense strand to SEQ ID NO: 1088146
acagggagacgaauaacca

SEQ ID NO: 1088148 - RNA, 19 nt, Artificial Sequence
  Description of Artificial Sequence: Synthetic oligonucleotide
  Sense strand starting at position 2847 of SEQ ID NO: 915549
guuauucgucucccuguuu

SEQ ID NO: 1088149 - RNA, 19 nt, Artificial Sequence
  Description of Artificial Sequence: Synthetic oligonucleotide
  Antisense strand to SEQ ID NO: 1088148
aaacagggagacgaauaac

SEQ ID NO: 1088150 - RNA, 19 nt, Artificial Sequence
  Description of Artificial Sequence: Synthetic oligonucleotide
  Sense strand starting at position 2861 of SEQ ID NO: 915549
uguuucuauaguuagaguu

SEQ ID NO: 1088151 - RNA, 19 nt, Artificial Sequence
  Description of Artificial Sequence: Synthetic oligonucleotide
  Antisense strand to SEQ ID NO: 1088150
aacucuaacuauagaaaca

SEQ ID NO: 1088152 - RNA, 19 nt, Artificial Sequence
  Description of Artificial Sequence: Synthetic oligonucleotide
  Sense strand starting at position 2871 of SEQ ID NO: 915549
guuagaguuacaggagaca

SEQ ID NO: 1088153 - RNA, 19 nt, Artificial Sequence
  Description of Artificial Sequence: Synthetic oligonucleotide
  Antisense strand to SEQ ID NO: 1088152
ugucuccuguaacucuaac

SEQ ID NO: 1088154 - RNA, 19 nt, Artificial Sequence
  Description of Artificial Sequence: Synthetic oligonucleotide
  Sense strand starting at position 2953 of SEQ ID NO: 915549
gauauuugacguugaccgu

SEQ ID NO: 1088155 - RNA, 19 nt, Artificial Sequence
  Description of Artificial Sequence: Synthetic oligonucleotide
  Antisense strand to SEQ ID NO: 1088154
acggucaacgucaaauauc

SEQ ID NO: 1088156 - RNA, 19 nt, Artificial Sequence
  Description of Artificial Sequence: Synthetic oligonucleotide
  Sense strand starting at position 2966 of SEQ ID NO: 915549
gaccguggugcugaaagaa

SEQ ID NO: 1088157 - RNA, 19 nt, Artificial Sequence
  Description of Artificial Sequence: Synthetic oligonucleotide
  Antisense strand to SEQ ID NO: 1088156
uucuuucagcaccacgguc

SEQ ID NO: 1088158 - RNA, 19 nt, Artificial Sequence
  Description of Artificial Sequence: Synthetic oligonucleotide
  Sense strand starting at position 2991 of SEQ ID NO: 915549
gguaaagacuaaguguacu

SEQ ID NO: 1088159 - RNA, 19 nt, Artificial Sequence
  Description of Artificial Sequence: Synthetic oligonucleotide
  Antisense strand to SEQ ID NO: 1088158
aguacacuuagucuuuacc

SEQ ID NO: 1088160 - RNA, 19 nt, Artificial Sequence
  Description of Artificial Sequence: Synthetic oligonucleotide
  Sense strand starting at position 3061 of SEQ ID NO: 915549
gacuacaauuugugagaua

SEQ ID NO: 1088161 - RNA, 19 nt, Artificial Sequence
  Description of Artificial Sequence: Synthetic oligonucleotide
  Antisense strand to SEQ ID NO: 1088160
uaucucacaaauuguaguc

SEQ ID NO: 1088162 - RNA, 19 nt, Artificial Sequence
  Description of Artificial Sequence: Synthetic oligonucleotide
  Sense strand starting at position 3062 of SEQ ID NO: 915549
acuacaauuugugagauaa

SEQ ID NO: 1088163 - RNA, 19 nt, Artificial Sequence
  Description of Artificial Sequence: Synthetic oligonucleotide
  Antisense strand to SEQ ID NO: 1088162
uuaucucacaaauuguagu

SEQ ID NO: 1088164 - RNA, 19 nt, Artificial Sequence
  Description of Artificial Sequence: Synthetic oligonucleotide
  Sense strand starting at position 3090 of SEQ ID NO: 915549
uuacauuaacgcuaaagau

SEQ ID NO: 1088165 - RNA, 19 nt, Artificial Sequence
  Description of Artificial Sequence: Synthetic oligonucleotide
  Antisense strand to SEQ ID NO: 1088164
aucuuuagcguuaauguaa

SEQ ID NO: 1088166 - RNA, 19 nt, Artificial Sequence
  Description of Artificial Sequence: Synthetic oligonucleotide
  Sense strand starting at position 3153 of SEQ ID NO: 915549
aagcuuguacauggcagaa

SEQ ID NO: 1088167 - RNA, 19 nt, Artificial Sequence
  Description of Artificial Sequence: Synthetic oligonucleotide
  Antisense strand to SEQ ID NO: 1088166
uucugccauguacaagcuu

SEQ ID NO: 1088168 - RNA, 19 nt, Artificial Sequence
  Description of Artificial Sequence: Synthetic oligonucleotide
  Sense strand starting at position 3443 of SEQ ID NO: 915549
gauuaacagucacugaugu

SEQ ID NO: 1088169 - RNA, 19 nt, Artificial Sequence
  Description of Artificial Sequence: Synthetic oligonucleotide
  Antisense strand to SEQ ID NO: 1088168
acaucagugacuguuaauc

SEQ ID NO: 1088170 - RNA, 19 nt, Artificial Sequence
  Description of Artificial Sequence: Synthetic oligonucleotide
  Sense strand starting at position 3444 of SEQ ID NO: 915549
auuaacagucacugaugua

SEQ ID NO: 1088171 - RNA, 19 nt, Artificial Sequence
  Description of Artificial Sequence: Synthetic oligonucleotide
  Antisense strand to SEQ ID NO: 1088170
uacaucagugacuguuaau

SEQ ID NO: 1088172 - RNA, 19 nt, Artificial Sequence
  Description of Artificial Sequence: Synthetic oligonucleotide
  Sense strand starting at position 3464 of SEQ ID NO: 915549
cuauauggcaaugguguua

SEQ ID NO: 1088173 - RNA, 19 nt, Artificial Sequence
  Description of Artificial Sequence: Synthetic oligonucleotide
  Antisense strand to SEQ ID NO: 1088172
uaacaccauugccauauag

SEQ ID NO: 1088174 - RNA, 19 nt, Artificial Sequence
  Description of Artificial Sequence: Synthetic oligonucleotide
  Sense strand starting at position 3676 of SEQ ID NO: 915549
ugaaguguuccugacaaau

SEQ ID NO: 1088175 - RNA, 19 nt, Artificial Sequence
  Description of Artificial Sequence: Synthetic oligonucleotide
  Antisense strand to SEQ ID NO: 1088174
auuugucaggaacacuuca

SEQ ID NO: 1088176 - RNA, 19 nt, Artificial Sequence
  Description of Artificial Sequence: Synthetic oligonucleotide
  Sense strand starting at position 3787 of SEQ ID NO: 915549
gguggaucaccugguuaaa

SEQ ID NO: 1088177 - RNA, 19 nt, Artificial Sequence
  Description of Artificial Sequence: Synthetic oligonucleotide
  Antisense strand to SEQ ID NO: 1088176
uuuaaccaggugauccacc

SEQ ID NO: 1088178 - RNA, 19 nt, Artificial Sequence
  Description of Artificial Sequence: Synthetic oligonucleotide
  Sense strand starting at position 3789 of SEQ ID NO: 915549
uggaucaccugguuaaaga

SEQ ID NO: 1088179 - RNA, 19 nt, Artificial Sequence
  Description of Artificial Sequence: Synthetic oligonucleotide
  Antisense strand to SEQ ID NO: 1088178
ucuuuaaccaggugaucca

SEQ ID NO: 1088180 - RNA, 19 nt, Artificial Sequence
  Description of Artificial Sequence: Synthetic oligonucleotide
  Sense strand starting at position 318 of SEQ ID NO: 915550
ucuugauauaaguaugggu

SEQ ID NO: 1088181 - RNA, 19 nt, Artificial Sequence
  Description of Artificial Sequence: Synthetic oligonucleotide
  Antisense strand to SEQ ID NO: 1088180
acccauacuuauaucaaga

SEQ ID NO: 1088182 - RNA, 19 nt, Artificial Sequence
  Description of Artificial Sequence: Synthetic oligonucleotide
  Sense strand starting at position 320 of SEQ ID NO: 915550
uugauauaaguauggguua

SEQ ID NO: 1088183 - RNA, 19 nt, Artificial Sequence
  Description of Artificial Sequence: Synthetic oligonucleotide
  Antisense strand to SEQ ID NO: 1088182
uaacccauacuuauaucaa

SEQ ID NO: 1088184 - RNA, 19 nt, Artificial Sequence
  Description of Artificial Sequence: Synthetic oligonucleotide
  Sense strand starting at position 323 of SEQ ID NO: 915550
auauaaguauggguuacau

SEQ ID NO: 1088185 - RNA, 19 nt, Artificial Sequence
  Description of Artificial Sequence: Synthetic oligonucleotide
  Antisense strand to SEQ ID NO: 1088184
auguaacccauacuuauau

SEQ ID NO: 1088186 - RNA, 19 nt, Artificial Sequence
  Description of Artificial Sequence: Synthetic oligonucleotide
  Sense strand starting at position 355 of SEQ ID NO: 915550
gggaaauauucugaaggag

SEQ ID NO: 1088187 - RNA, 19 nt, Artificial Sequence
  Description of Artificial Sequence: Synthetic oligonucleotide
  Antisense strand to SEQ ID NO: 1088186
cuccuucagaauauuuccc

SEQ ID NO: 1088188 - RNA, 19 nt, Artificial Sequence
  Description of Artificial Sequence: Synthetic oligonucleotide
  Sense strand starting at position 736 of SEQ ID NO: 915550
ccagcaaugcaugagaaua

SEQ ID NO: 1088189 - RNA, 19 nt, Artificial Sequence
  Description of Artificial Sequence: Synthetic oligonucleotide
  Antisense strand to SEQ ID NO: 1088188
uauucucaugcauugcugg

SEQ ID NO: 1088190 - RNA, 19 nt, Artificial Sequence
  Description of Artificial Sequence: Synthetic oligonucleotide
  Sense strand starting at position 816 of SEQ ID NO: 915550
ggguucugccauuaauaag

SEQ ID NO: 1088191 - RNA, 19 nt, Artificial Sequence
  Description of Artificial Sequence: Synthetic oligonucleotide
  Antisense strand to SEQ ID NO: 1088190
cuuauuaauggcagaaccc

SEQ ID NO: 1088192 - RNA, 19 nt, Artificial Sequence
  Description of Artificial Sequence: Synthetic oligonucleotide
  Sense strand starting at position 1096 of SEQ ID NO: 915550
ucuugaagauuccauuuag

SEQ ID NO: 1088193 - RNA, 19 nt, Artificial Sequence
  Description of Artificial Sequence: Synthetic oligonucleotide
  Antisense strand to SEQ ID NO: 1088192
cuaaauggaaucuucaaga

SEQ ID NO: 1088194 - RNA, 19 nt, Artificial Sequence
  Description of Artificial Sequence: Synthetic oligonucleotide
  Sense strand starting at position 1134 of SEQ ID NO: 915550
uuuaaucagcaucgaauga

SEQ ID NO: 1088195 - RNA, 19 nt, Artificial Sequence
  Description of Artificial Sequence: Synthetic oligonucleotide
  Antisense strand to SEQ ID NO: 1088194
ucauucgaugcugauuaaa

SEQ ID NO: 1088196 - RNA, 19 nt, Artificial Sequence
  Description of Artificial Sequence: Synthetic oligonucleotide
  Sense strand starting at position 1175 of SEQ ID NO: 915550
guauaacugggagagcgau

SEQ ID NO: 1088197 - RNA, 19 nt, Artificial Sequence
  Description of Artificial Sequence: Synthetic oligonucleotide
  Antisense strand to SEQ ID NO: 1088196
aucgcucucccaguuauac

SEQ ID NO: 1088198 - RNA, 19 nt, Artificial Sequence
  Description of Artificial Sequence: Synthetic oligonucleotide
  Sense strand starting at position 1363 of SEQ ID NO: 915550
uucgaaacucugggauaac

SEQ ID NO: 1088199 - RNA, 19 nt, Artificial Sequence
  Description of Artificial Sequence: Synthetic oligonucleotide
  Antisense strand to SEQ ID NO: 1088198
guuaucccagaguuucgaa

SEQ ID NO: 1088200 - RNA, 19 nt, Artificial Sequence
  Description of Artificial Sequence: Synthetic oligonucleotide
  Sense strand starting at position 1458 of SEQ ID NO: 915550
cuuaaagcaucauugggaa

SEQ ID NO: 1088201 - RNA, 19 nt, Artificial Sequence
  Description of Artificial Sequence: Synthetic oligonucleotide
  Antisense strand to SEQ ID NO: 1088200
uucccaaugaugcuuuaag

SEQ ID NO: 1088202 - RNA, 19 nt, Artificial Sequence
  Description of Artificial Sequence: Synthetic oligonucleotide
  Sense strand starting at position 2195 of SEQ ID NO: 915550
uaaagaugacggcgaacuu

SEQ ID NO: 1088203 - RNA, 19 nt, Artificial Sequence
  Description of Artificial Sequence: Synthetic oligonucleotide
  Antisense strand to SEQ ID NO: 1088202
aaguucgccgucaucuuua

SEQ ID NO: 1088204 - RNA, 19 nt, Artificial Sequence
  Description of Artificial Sequence: Synthetic oligonucleotide
  Sense strand starting at position 2196 of SEQ ID NO: 915550
aaagaugacggcgaacuua

SEQ ID NO: 1088205 - RNA, 19 nt, Artificial Sequence
  Description of Artificial Sequence: Synthetic oligonucleotide
  Antisense strand to SEQ ID NO: 1088204
uaaguucgccgucaucuuu

SEQ ID NO: 1088206 - RNA, 19 nt, Artificial Sequence
  Description of Artificial Sequence: Synthetic oligonucleotide
  Sense strand starting at position 2240 of SEQ ID NO: 915550
aggcguuagcguucuguaa

SEQ ID NO: 1088207 - RNA, 19 nt, Artificial Sequence
  Description of Artificial Sequence: Synthetic oligonucleotide
  Antisense strand to SEQ ID NO: 1088206
uuacagaacgcuaacgccu

SEQ ID NO: 1088208 - RNA, 19 nt, Artificial Sequence
  Description of Artificial Sequence: Synthetic oligonucleotide
  Sense strand starting at position 2241 of SEQ ID NO: 915550
ggcguuagcguucuguaag

SEQ ID NO: 1088209 - RNA, 19 nt, Artificial Sequence
  Description of Artificial Sequence: Synthetic oligonucleotide
  Antisense strand to SEQ ID NO: 1088208
cuuacagaacgcuaacgcc

SEQ ID NO: 1088210 - RNA, 19 nt, Artificial Sequence
  Description of Artificial Sequence: Synthetic oligonucleotide
  Sense strand starting at position 2255 of SEQ ID NO: 915550
guaagucaccuuggagaau

SEQ ID NO: 1088211 - RNA, 19 nt, Artificial Sequence
  Description of Artificial Sequence: Synthetic oligonucleotide
  Antisense strand to SEQ ID NO: 1088210
auucuccaaggugacuuac

SEQ ID NO: 1088212 - RNA, 19 nt, Artificial Sequence
  Description of Artificial Sequence: Synthetic oligonucleotide
  Sense strand starting at position 2325 of SEQ ID NO: 915550
ugguuauucgucucccugu

SEQ ID NO: 1088213 - RNA, 19 nt, Artificial Sequence
  Description of Artificial Sequence: Synthetic oligonucleotide
  Antisense strand to SEQ ID NO: 1088212
acagggagacgaauaacca

SEQ ID NO: 1088214 - RNA, 19 nt, Artificial Sequence
  Description of Artificial Sequence: Synthetic oligonucleotide
  Sense strand starting at position 2327 of SEQ ID NO: 915550
guuauucgucucccuguuu

SEQ ID NO: 1088215 - RNA, 19 nt, Artificial Sequence
  Description of Artificial Sequence: Synthetic oligonucleotide
  Antisense strand to SEQ ID NO: 1088214
aaacagggagacgaauaac

SEQ ID NO: 1088216 - RNA, 19 nt, Artificial Sequence
  Description of Artificial Sequence: Synthetic oligonucleotide
  Sense strand starting at position 2341 of SEQ ID NO: 915550
uguuucuauaguuagaguu

SEQ ID NO: 1088217 - RNA, 19 nt, Artificial Sequence
  Description of Artificial Sequence: Synthetic oligonucleotide
  Antisense strand to SEQ ID NO: 1088216
aacucuaacuauagaaaca

SEQ ID NO: 1088218 - RNA, 19 nt, Artificial Sequence
  Description of Artificial Sequence: Synthetic oligonucleotide
  Sense strand starting at position 2351 of SEQ ID NO: 915550
guuagaguuacaggagaca

SEQ ID NO: 1088219 - RNA, 19 nt, Artificial Sequence
  Description of Artificial Sequence: Synthetic oligonucleotide
  Antisense strand to SEQ ID NO: 1088218
ugucuccuguaacucuaac

SEQ ID NO: 1088220 - RNA, 19 nt, Artificial Sequence
  Description of Artificial Sequence: Synthetic oligonucleotide
  Sense strand starting at position 2433 of SEQ ID NO: 915550
gauauuugacguugaccgu

SEQ ID NO: 1088221 - RNA, 19 nt, Artificial Sequence
  Description of Artificial Sequence: Synthetic oligonucleotide
  Antisense strand to SEQ ID NO: 1088220
acggucaacgucaaauauc

SEQ ID NO: 1088222 - RNA, 19 nt, Artificial Sequence
  Description of Artificial Sequence: Synthetic oligonucleotide
  Sense strand starting at position 2446 of SEQ ID NO: 915550
gaccguggugcugaaagaa

SEQ ID NO: 1088223 - RNA, 19 nt, Artificial Sequence
  Description of Artificial Sequence: Synthetic oligonucleotide
  Antisense strand to SEQ ID NO: 1088222
uucuuucagcaccacgguc

SEQ ID NO: 1088224 - RNA, 19 nt, Artificial Sequence
  Description of Artificial Sequence: Synthetic oligonucleotide
  Sense strand starting at position 2471 of SEQ ID NO: 915550
gguaaagacuaaguguacu

SEQ ID NO: 1088225 - RNA, 19 nt, Artificial Sequence
  Description of Artificial Sequence: Synthetic oligonucleotide
  Antisense strand to SEQ ID NO: 1088224
aguacacuuagucuuuacc

SEQ ID NO: 1088226 - RNA, 19 nt, Artificial Sequence
  Description of Artificial Sequence: Synthetic oligonucleotide
  Sense strand starting at position 2542 of SEQ ID NO: 915550
acuacaauuugugagauaa

SEQ ID NO: 1088227 - RNA, 19 nt, Artificial Sequence
  Description of Artificial Sequence: Synthetic oligonucleotide
  Antisense strand to SEQ ID NO: 1088226
uuaucucacaaauuguagu

SEQ ID NO: 1088228 - RNA, 19 nt, Artificial Sequence
  Description of Artificial Sequence: Synthetic oligonucleotide
  Sense strand starting at position 2570 of SEQ ID NO: 915550
uuacauuaacgcuaaagau

SEQ ID NO: 1088229 - RNA, 19 nt, Artificial Sequence
  Description of Artificial Sequence: Synthetic oligonucleotide
  Antisense strand to SEQ ID NO: 1088228
aucuuuagcguuaauguaa

SEQ ID NO: 1088230 - RNA, 19 nt, Artificial Sequence
  Description of Artificial Sequence: Synthetic oligonucleotide
  Sense strand starting at position 2923 of SEQ ID NO: 915550
gauuaacagucacugaugu

SEQ ID NO: 1088231 - RNA, 19 nt, Artificial Sequence
  Description of Artificial Sequence: Synthetic oligonucleotide
  Antisense strand to SEQ ID NO: 1088230
acaucagugacuguuaauc

SEQ ID NO: 1088232 - RNA, 19 nt, Artificial Sequence
  Description of Artificial Sequence: Synthetic oligonucleotide
  Sense strand starting at position 2924 of SEQ ID NO: 915550
auuaacagucacugaugua

SEQ ID NO: 1088233 - RNA, 19 nt, Artificial Sequence
  Description of Artificial Sequence: Synthetic oligonucleotide
  Antisense strand to SEQ ID NO: 1088232
uacaucagugacuguuaau

SEQ ID NO: 1088234 - RNA, 19 nt, Artificial Sequence
  Description of Artificial Sequence: Synthetic oligonucleotide
  Sense strand starting at position 3156 of SEQ ID NO: 915550
ugaaguguuccugacaaau

SEQ ID NO: 1088235 - RNA, 19 nt, Artificial Sequence
  Description of Artificial Sequence: Synthetic oligonucleotide
  Antisense strand to SEQ ID NO: 1088234
auuugucaggaacacuuca

SEQ ID NO: 1088236 - RNA, 19 nt, Artificial Sequence
  Description of Artificial Sequence: Synthetic oligonucleotide
  Sense strand starting at position 3267 of SEQ ID NO: 915550
gguggaucaccugguuaaa

SEQ ID NO: 1088237 - RNA, 19 nt, Artificial Sequence
  Description of Artificial Sequence: Synthetic oligonucleotide
  Antisense strand to SEQ ID NO: 1088236
uuuaaccaggugauccacc

SEQ ID NO: 1088238 - RNA, 19 nt, Artificial Sequence
  Description of Artificial Sequence: Synthetic oligonucleotide
  Sense strand starting at position 3269 of SEQ ID NO: 915550
uggaucaccugguuaaaga

SEQ ID NO: 1088239 - RNA, 19 nt, Artificial Sequence
  Description of Artificial Sequence: Synthetic oligonucleotide
  Antisense strand to SEQ ID NO: 1088238
ucuuuaaccaggugaucca

SEQ ID NO: 1088240 - RNA, 19 nt, Artificial Sequence
  Description of Artificial Sequence: Synthetic oligonucleotide
  Sense strand starting at position 3496 of SEQ ID NO: 915550
uaguauaggccugaaaucu

SEQ ID NO: 1088241 - RNA, 19 nt, Artificial Sequence
  Description of Artificial Sequence: Synthetic oligonucleotide
  Antisense strand to SEQ ID NO: 1088240
agauuucaggccuauacua

SEQ ID NO: 1088242 - RNA, 19 nt, Artificial Sequence
  Description of Artificial Sequence: Synthetic oligonucleotide
  Sense strand starting at position 3553 of SEQ ID NO: 915550
uuuacagugauguggagau

SEQ ID NO: 1088243 - RNA, 19 nt, Artificial Sequence
  Description of Artificial Sequence: Synthetic oligonucleotide
  Antisense strand to SEQ ID NO: 1088242
aucuccacaucacuguaaa

SEQ ID NO: 1088244 - RNA, 19 nt, Artificial Sequence
  Description of Artificial Sequence: Synthetic oligonucleotide
  Sense strand starting at position 3621 of SEQ ID NO: 915550
augcaucucuacuugagaa

SEQ ID NO: 1088245 - RNA, 19 nt, Artificial Sequence
  Description of Artificial Sequence: Synthetic oligonucleotide
  Antisense strand to SEQ ID NO: 1088244
uucucaaguagagaugcau

SEQ ID NO: 1088246 - RNA, 19 nt, Artificial Sequence
  Description of Artificial Sequence: Synthetic oligonucleotide
  Sense strand starting at position 3653 of SEQ ID NO: 915550
acuucuacuccaggucuua

SEQ ID NO: 1088247 - RNA, 19 nt, Artificial Sequence
  Description of Artificial Sequence: Synthetic oligonucleotide
  Antisense strand to SEQ ID NO: 1088246
uaagaccuggaguagaagu

SEQ ID NO: 1088248 - RNA, 19 nt, Artificial Sequence
  Description of Artificial Sequence: Synthetic oligonucleotide
  Sense strand starting at position 3821 of SEQ ID NO: 915550
uuuguucguaucucuguua

SEQ ID NO: 1088249 - RNA, 19 nt, Artificial Sequence
  Description of Artificial Sequence: Synthetic oligonucleotide
  Antisense strand to SEQ ID NO: 1088248
uaacagagauacgaacaaa

SEQ ID NO: 1088250 - RNA, 19 nt, Artificial Sequence
  Description of Artificial Sequence: Synthetic oligonucleotide
  Sense strand starting at position 3868 of SEQ ID NO: 915550
cuuucugggcuuuauacua

SEQ ID NO: 1088251 - RNA, 19 nt, Artificial Sequence
  Description of Artificial Sequence: Synthetic oligonucleotide
  Antisense strand to SEQ ID NO: 1088250
uaguauaaagcccagaaag

SEQ ID NO: 1088252 - RNA, 19 nt, Artificial Sequence
  Description of Artificial Sequence: Synthetic oligonucleotide
  Sense strand starting at position 3894 of SEQ ID NO: 915550
uacuauuaugugcaaggca

SEQ ID NO: 1088253 - RNA, 19 nt, Artificial Sequence
  Description of Artificial Sequence: Synthetic oligonucleotide
  Antisense strand to SEQ ID NO: 1088252
ugccuugcacauaauagua

SEQ ID NO: 1088254 - RNA, 19 nt, Artificial Sequence
  Description of Artificial Sequence: Synthetic oligonucleotide
  Sense strand starting at position 3939 of SEQ ID NO: 915550
cuguauuugucuuugucca

SEQ ID NO: 1088255 - RNA, 19 nt, Artificial Sequence
  Description of Artificial Sequence: Synthetic oligonucleotide
  Antisense strand to SEQ ID NO: 1088254
uggacaaagacaaauacag

SEQ ID NO: 1088256 - RNA, 19 nt, Artificial Sequence
  Description of Artificial Sequence: Synthetic oligonucleotide
  Sense strand starting at position 3940 of SEQ ID NO: 915550
uguauuugucuuuguccaa

SEQ ID NO: 1088257 - RNA, 19 nt, Artificial Sequence
  Description of Artificial Sequence: Synthetic oligonucleotide
  Antisense strand to SEQ ID NO: 1088256
uuggacaaagacaaauaca

SEQ ID NO: 1088258 - RNA, 19 nt, Artificial Sequence
  Description of Artificial Sequence: Synthetic oligonucleotide
  Sense strand starting at position 3941 of SEQ ID NO: 915550
guauuugucuuuguccaaa

SEQ ID NO: 1088259 - RNA, 19 nt, Artificial Sequence
  Description of Artificial Sequence: Synthetic oligonucleotide
  Antisense strand to SEQ ID NO: 1088258
uuuggacaaagacaaauac

SEQ ID NO: 1088260 - RNA, 19 nt, Artificial Sequence
  Description of Artificial Sequence: Synthetic oligonucleotide
  Sense strand starting at position 5 of SEQ ID NO: 915551
ugaagugguagguaacuga

SEQ ID NO: 1088261 - RNA, 19 nt, Artificial Sequence
  Description of Artificial Sequence: Synthetic oligonucleotide
  Antisense strand to SEQ ID NO: 1088260
ucaguuaccuaccacuuca

SEQ ID NO: 1088262 - RNA, 19 nt, Artificial Sequence
  Description of Artificial Sequence: Synthetic oligonucleotide
  Sense strand starting at position 8 of SEQ ID NO: 915551
agugguagguaacugagaa

SEQ ID NO: 1088263 - RNA, 19 nt, Artificial Sequence
  Description of Artificial Sequence: Synthetic oligonucleotide
  Antisense strand to SEQ ID NO: 1088262
uucucaguuaccuaccacu

SEQ ID NO: 1088264 - RNA, 19 nt, Artificial Sequence
  Description of Artificial Sequence: Synthetic oligonucleotide
  Sense strand starting at position 57 of SEQ ID NO: 915551
ucaguagucuucccucaca

SEQ ID NO: 1088265 - RNA, 19 nt, Artificial Sequence
  Description of Artificial Sequence: Synthetic oligonucleotide
  Antisense strand to SEQ ID NO: 1088264
ugugagggaagacuacuga

SEQ ID NO: 1088266 - RNA, 19 nt, Artificial Sequence
  Description of Artificial Sequence: Synthetic oligonucleotide
  Sense strand starting at position 410 of SEQ ID NO: 915551
auucuuaugucuuugugag

SEQ ID NO: 1088267 - RNA, 19 nt, Artificial Sequence
  Description of Artificial Sequence: Synthetic oligonucleotide
  Antisense strand to SEQ ID NO: 1088266
cucacaaagacauaagaau

SEQ ID NO: 1088268 - RNA, 19 nt, Artificial Sequence
  Description of Artificial Sequence: Synthetic oligonucleotide
  Sense strand starting at position 411 of SEQ ID NO: 915551
uucuuaugucuuugugaga

SEQ ID NO: 1088269 - RNA, 19 nt, Artificial Sequence
  Description of Artificial Sequence: Synthetic oligonucleotide
  Antisense strand to SEQ ID NO: 1088268
ucucacaaagacauaagaa

SEQ ID NO: 1088270 - RNA, 19 nt, Artificial Sequence
  Description of Artificial Sequence: Synthetic oligonucleotide
  Sense strand starting at position 412 of SEQ ID NO: 915551
ucuuaugucuuugugagag

SEQ ID NO: 1088271 - RNA, 19 nt, Artificial Sequence
  Description of Artificial Sequence: Synthetic oligonucleotide
  Antisense strand to SEQ ID NO: 1088270
cucucacaaagacauaaga

SEQ ID NO: 1088272 - RNA, 19 nt, Artificial Sequence
  Description of Artificial Sequence: Synthetic oligonucleotide
  Sense strand starting at position 420 of SEQ ID NO: 915551
cuuugugagagucaggauu

SEQ ID NO: 1088273 - RNA, 19 nt, Artificial Sequence
  Description of Artificial Sequence: Synthetic oligonucleotide
  Antisense strand to SEQ ID NO: 1088272
aauccugacucucacaaag

SEQ ID NO: 1088274 - RNA, 19 nt, Artificial Sequence
  Description of Artificial Sequence: Synthetic oligonucleotide
  Sense strand starting at position 511 of SEQ ID NO: 915551
ugaagaagguuagaauuga

SEQ ID NO: 1088275 - RNA, 19 nt, Artificial Sequence
  Description of Artificial Sequence: Synthetic oligonucleotide
  Antisense strand to SEQ ID NO: 1088274
ucaauucuaaccuucuuca

SEQ ID NO: 1088276 - RNA, 19 nt, Artificial Sequence
  Description of Artificial Sequence: Synthetic oligonucleotide
  Sense strand starting at position 561 of SEQ ID NO: 915551
gguagccaauugucucauu

SEQ ID NO: 1088277 - RNA, 19 nt, Artificial Sequence
  Description of Artificial Sequence: Synthetic oligonucleotide
  Antisense strand to SEQ ID NO: 1088276
aaugagacaauuggcuacc

SEQ ID NO: 1088278 - RNA, 19 nt, Artificial Sequence
  Description of Artificial Sequence: Synthetic oligonucleotide
  Sense strand starting at position 562 of SEQ ID NO: 915551
guagccaauugucucauuu

SEQ ID NO: 1088279 - RNA, 19 nt, Artificial Sequence
  Description of Artificial Sequence: Synthetic oligonucleotide
  Antisense strand to SEQ ID NO: 1088278
aaaugagacaauuggcuac

SEQ ID NO: 1088280 - RNA, 19 nt, Artificial Sequence
  Description of Artificial Sequence: Synthetic oligonucleotide
  Sense strand starting at position 709 of SEQ ID NO: 915551
ccaguauugcuacaucauc

SEQ ID NO: 1088281 - RNA, 19 nt, Artificial Sequence
  Description of Artificial Sequence: Synthetic oligonucleotide
  Antisense strand to SEQ ID NO: 1088280
gaugauguagcaauacugg

SEQ ID NO: 1088282 - RNA, 19 nt, Artificial Sequence
  Description of Artificial Sequence: Synthetic oligonucleotide
  Sense strand starting at position 2223 of SEQ ID NO: 915551
ugacuaaucucgguacucu

SEQ ID NO: 1088283 - RNA, 19 nt, Artificial Sequence
  Description of Artificial Sequence: Synthetic oligonucleotide
  Antisense strand to SEQ ID NO: 1088282
agaguaccgagauuaguca

SEQ ID NO: 1088284 - RNA, 19 nt, Artificial Sequence
  Description of Artificial Sequence: Synthetic oligonucleotide
  Sense strand starting at position 2224 of SEQ ID NO: 915551
gacuaaucucgguacucuc

SEQ ID NO: 1088285 - RNA, 19 nt, Artificial Sequence
  Description of Artificial Sequence: Synthetic oligonucleotide
  Antisense strand to SEQ ID NO: 1088284
gagaguaccgagauuaguc

SEQ ID NO: 1088286 - RNA, 19 nt, Artificial Sequence
  Description of Artificial Sequence: Synthetic oligonucleotide
  Sense strand starting at position 2468 of SEQ ID NO: 915551
ggacuucugugguccugaa

SEQ ID NO: 1088287 - RNA, 19 nt, Artificial Sequence
  Description of Artificial Sequence: Synthetic oligonucleotide
  Antisense strand to SEQ ID NO: 1088286
uucaggaccacagaagucc

SEQ ID NO: 1088288 - RNA, 19 nt, Artificial Sequence
  Description of Artificial Sequence: Synthetic oligonucleotide
  Sense strand starting at position 2472 of SEQ ID NO: 915551
uucugugguccugaaagug

SEQ ID NO: 1088289 - RNA, 19 nt, Artificial Sequence
  Description of Artificial Sequence: Synthetic oligonucleotide
  Antisense strand to SEQ ID NO: 1088288
cacuuucaggaccacagaa

SEQ ID NO: 1088290 - RNA, 19 nt, Artificial Sequence
  Description of Artificial Sequence: Synthetic oligonucleotide
  Sense strand starting at position 2492 of SEQ ID NO: 915551
cugccucuagccugaagau

SEQ ID NO: 1088291 - RNA, 19 nt, Artificial Sequence
  Description of Artificial Sequence: Synthetic oligonucleotide
  Antisense strand to SEQ ID NO: 1088290
aucuucaggcuagaggcag

SEQ ID NO: 1088292 - RNA, 19 nt, Artificial Sequence
  Description of Artificial Sequence: Synthetic oligonucleotide
  Sense strand starting at position 2493 of SEQ ID NO: 915551
ugccucuagccugaagauu

SEQ ID NO: 1088293 - RNA, 19 nt, Artificial Sequence
  Description of Artificial Sequence: Synthetic oligonucleotide
  Antisense strand to SEQ ID NO: 1088292
aaucuucaggcuagaggca

SEQ ID NO: 1088294 - RNA, 19 nt, Artificial Sequence
  Description of Artificial Sequence: Synthetic oligonucleotide
  Sense strand starting at position 2501 of SEQ ID NO: 915551
gccugaagauuucagggua

SEQ ID NO: 1088295 - RNA, 19 nt, Artificial Sequence
  Description of Artificial Sequence: Synthetic oligonucleotide
  Antisense strand to SEQ ID NO: 1088294
uacccugaaaucuucaggc

SEQ ID NO: 1088296 - RNA, 19 nt, Artificial Sequence
  Description of Artificial Sequence: Synthetic oligonucleotide
  Sense strand starting at position 2517 of SEQ ID NO: 915551
guauguuuccacugauaau

SEQ ID NO: 1088297 - RNA, 19 nt, Artificial Sequence
  Description of Artificial Sequence: Synthetic oligonucleotide
  Antisense strand to SEQ ID NO: 1088296
auuaucaguggaaacauac

SEQ ID NO: 1088298 - RNA, 19 nt, Artificial Sequence
  Description of Artificial Sequence: Synthetic oligonucleotide
  Sense strand starting at position 2535 of SEQ ID NO: 915551
uugugagauccuuguacau

SEQ ID NO: 1088299 - RNA, 19 nt, Artificial Sequence
  Description of Artificial Sequence: Synthetic oligonucleotide
  Antisense strand to SEQ ID NO: 1088298
auguacaaggaucucacaa

SEQ ID NO: 1088300 - RNA, 19 nt, Artificial Sequence
  Description of Artificial Sequence: Synthetic oligonucleotide
  Sense strand starting at position 2773 of SEQ ID NO: 915551
guaccagcccuagaaucaa

SEQ ID NO: 1088301 - RNA, 19 nt, Artificial Sequence
  Description of Artificial Sequence: Synthetic oligonucleotide
  Antisense strand to SEQ ID NO: 1088300
uugauucuagggcugguac

SEQ ID NO: 1088302 - RNA, 19 nt, Artificial Sequence
  Description of Artificial Sequence: Synthetic oligonucleotide
  Sense strand starting at position 2853 of SEQ ID NO: 915551
ggucuaguggcagaaauga

SEQ ID NO: 1088303 - RNA, 19 nt, Artificial Sequence
  Description of Artificial Sequence: Synthetic oligonucleotide
  Antisense strand to SEQ ID NO: 1088302
ucauuucugccacuagacc

SEQ ID NO: 1088304 - RNA, 19 nt, Artificial Sequence
  Description of Artificial Sequence: Synthetic oligonucleotide
  Sense strand starting at position 2951 of SEQ ID NO: 915551
ggugcagaggcuugaaaca

SEQ ID NO: 1088305 - RNA, 19 nt, Artificial Sequence
  Description of Artificial Sequence: Synthetic oligonucleotide
  Antisense strand to SEQ ID NO: 1088304
uguuucaagccucugcacc

SEQ ID NO: 1088306 - RNA, 19 nt, Artificial Sequence
  Description of Artificial Sequence: Synthetic oligonucleotide
  Sense strand starting at position 2981 of SEQ ID NO: 915551
gugucauuagcggcaauuc

SEQ ID NO: 1088307 - RNA, 19 nt, Artificial Sequence
  Description of Artificial Sequence: Synthetic oligonucleotide
  Antisense strand to SEQ ID NO: 1088306
gaauugccgcuaaugacac

SEQ ID NO: 1088308 - RNA, 19 nt, Artificial Sequence
  Description of Artificial Sequence: Synthetic oligonucleotide
  Sense strand starting at position 3063 of SEQ ID NO: 915551
aagucaguuagguggcuau

SEQ ID NO: 1088309 - RNA, 19 nt, Artificial Sequence
  Description of Artificial Sequence: Synthetic oligonucleotide
  Antisense strand to SEQ ID NO: 1088308
auagccaccuaacugacuu

SEQ ID NO: 1088310 - RNA, 19 nt, Artificial Sequence
  Description of Artificial Sequence: Synthetic oligonucleotide
  Sense strand starting at position 3110 of SEQ ID NO: 915551
ccugguuugccugggacaa

SEQ ID NO: 1088311 - RNA, 19 nt, Artificial Sequence
  Description of Artificial Sequence: Synthetic oligonucleotide
  Antisense strand to SEQ ID NO: 1088310
uugucccaggcaaaccagg

SEQ ID NO: 1088312 - RNA, 19 nt, Artificial Sequence
  Description of Artificial Sequence: Synthetic oligonucleotide
  Sense strand starting at position 3111 of SEQ ID NO: 915551
cugguuugccugggacaau

SEQ ID NO: 1088313 - RNA, 19 nt, Artificial Sequence
  Description of Artificial Sequence: Synthetic oligonucleotide
  Antisense strand to SEQ ID NO: 1088312
auugucccaggcaaaccag

SEQ ID NO: 1088314 - RNA, 19 nt, Artificial Sequence
  Description of Artificial Sequence: Synthetic oligonucleotide
  Sense strand starting at position 3141 of SEQ ID NO: 915551
ccugcugucccagaaucua

SEQ ID NO: 1088315 - RNA, 19 nt, Artificial Sequence
  Description of Artificial Sequence: Synthetic oligonucleotide
  Antisense strand to SEQ ID NO: 1088314
uagauucugggacagcagg

SEQ ID NO: 1088316 - RNA, 19 nt, Artificial Sequence
  Description of Artificial Sequence: Synthetic oligonucleotide
  Sense strand starting at position 3199 of SEQ ID NO: 915551
agguuaagguacuccuuua

SEQ ID NO: 1088317 - RNA, 19 nt, Artificial Sequence
  Description of Artificial Sequence: Synthetic oligonucleotide
  Antisense strand to SEQ ID NO: 1088316
uaaaggaguaccuuaaccu

SEQ ID NO: 1088318 - RNA, 19 nt, Artificial Sequence
  Description of Artificial Sequence: Synthetic oligonucleotide
  Sense strand starting at position 3262 of SEQ ID NO: 915551
agggaauuauuccuacgcu

SEQ ID NO: 1088319 - RNA, 19 nt, Artificial Sequence
  Description of Artificial Sequence: Synthetic oligonucleotide
  Antisense strand to SEQ ID NO: 1088318
agcguaggaauaauucccu

SEQ ID NO: 1088320 - RNA, 19 nt, Artificial Sequence
  Description of Artificial Sequence: Synthetic oligonucleotide
  Sense strand starting at position 3279 of SEQ ID NO: 915551
cugcuuauuucugagggac

SEQ ID NO: 1088321 - RNA, 19 nt, Artificial Sequence
  Description of Artificial Sequence: Synthetic oligonucleotide
  Antisense strand to SEQ ID NO: 1088320
gucccucagaaauaagcag

SEQ ID NO: 1088322 - RNA, 19 nt, Artificial Sequence
  Description of Artificial Sequence: Synthetic oligonucleotide
  Sense strand starting at position 3420 of SEQ ID NO: 915551
agaggugcuguccagacuu

SEQ ID NO: 1088323 - RNA, 19 nt, Artificial Sequence
  Description of Artificial Sequence: Synthetic oligonucleotide
  Antisense strand to SEQ ID NO: 1088322
aagucuggacagcaccucu

SEQ ID NO: 1088324 - RNA, 19 nt, Artificial Sequence
  Description of Artificial Sequence: Synthetic oligonucleotide
  Sense strand starting at position 3433 of SEQ ID NO: 915551
agacuucagcaguguggaa

SEQ ID NO: 1088325 - RNA, 19 nt, Artificial Sequence
  Description of Artificial Sequence: Synthetic oligonucleotide
  Antisense strand to SEQ ID NO: 1088324
uuccacacugcugaagucu

SEQ ID NO: 1088326 - RNA, 19 nt, Artificial Sequence
  Description of Artificial Sequence: Synthetic oligonucleotide
  Sense strand starting at position 3579 of SEQ ID NO: 915551
ggaauaugcccucauggua

SEQ ID NO: 1088327 - RNA, 19 nt, Artificial Sequence
  Description of Artificial Sequence: Synthetic oligonucleotide
  Antisense strand to SEQ ID NO: 1088326
uaccaugagggcauauucc

SEQ ID NO: 1088328 - RNA, 19 nt, Artificial Sequence
  Description of Artificial Sequence: Synthetic oligonucleotide
  Sense strand starting at position 3671 of SEQ ID NO: 915551
aguuacuuccugugaauuc

SEQ ID NO: 1088329 - RNA, 19 nt, Artificial Sequence
  Description of Artificial Sequence: Synthetic oligonucleotide
  Antisense strand to SEQ ID NO: 1088328
gaauucacaggaaguaacu

SEQ ID NO: 1088330 - RNA, 19 nt, Artificial Sequence
  Description of Artificial Sequence: Synthetic oligonucleotide
  Sense strand starting at position 3682 of SEQ ID NO: 915551
gugaauuccagccacguau

SEQ ID NO: 1088331 - RNA, 19 nt, Artificial Sequence
  Description of Artificial Sequence: Synthetic oligonucleotide
  Antisense strand to SEQ ID NO: 1088330
auacguggcuggaauucac

SEQ ID NO: 1088332 - RNA, 19 nt, Artificial Sequence
  Description of Artificial Sequence: Synthetic oligonucleotide
  Sense strand starting at position 3780 of SEQ ID NO: 915551
cuggaugaucucugugcuu

SEQ ID NO: 1088333 - RNA, 19 nt, Artificial Sequence
  Description of Artificial Sequence: Synthetic oligonucleotide
  Antisense strand to SEQ ID NO: 1088332
aagcacagagaucauccag

SEQ ID NO: 1088334 - RNA, 19 nt, Artificial Sequence
  Description of Artificial Sequence: Synthetic oligonucleotide
  Sense strand starting at position 3827 of SEQ ID NO: 915551
gauauugugccucagggag

SEQ ID NO: 1088335 - RNA, 19 nt, Artificial Sequence
  Description of Artificial Sequence: Synthetic oligonucleotide
  Antisense strand to SEQ ID NO: 1088334
cucccugaggcacaauauc

SEQ ID NO: 1088336 - RNA, 19 nt, Artificial Sequence
  Description of Artificial Sequence: Synthetic oligonucleotide
  Sense strand starting at position 3879 of SEQ ID NO: 915551
cgacucaccuucuuguuau

SEQ ID NO: 1088337 - RNA, 19 nt, Artificial Sequence
  Description of Artificial Sequence: Synthetic oligonucleotide
  Antisense strand to SEQ ID NO: 1088336
auaacaagaaggugagucg

SEQ ID NO: 1088338 - RNA, 19 nt, Artificial Sequence
  Description of Artificial Sequence: Synthetic oligonucleotide
  Sense strand starting at position 3936 of SEQ ID NO: 915551
ugcagaauguggagaggau

SEQ ID NO: 1088339 - RNA, 19 nt, Artificial Sequence
  Description of Artificial Sequence: Synthetic oligonucleotide
  Antisense strand to SEQ ID NO: 1088338
auccucuccacauucugca

SEQ ID NO: 1088340 - RNA, 19 nt, Artificial Sequence
  Description of Artificial Sequence: Synthetic oligonucleotide
  Sense strand starting at position 69 of SEQ ID NO: 915552
ucaaacacucucggaauaa

SEQ ID NO: 1088341 - RNA, 19 nt, Artificial Sequence
  Description of Artificial Sequence: Synthetic oligonucleotide
  Antisense strand to SEQ ID NO: 1088340
uuauuccgagaguguuuga

SEQ ID NO: 1088342 - RNA, 19 nt, Artificial Sequence
  Description of Artificial Sequence: Synthetic oligonucleotide
  Sense strand starting at position 374 of SEQ ID NO: 915552
ggucuugcgauugaaguaa

SEQ ID NO: 1088343 - RNA, 19 nt, Artificial Sequence
  Description of Artificial Sequence: Synthetic oligonucleotide
  Antisense strand to SEQ ID NO: 1088342
uuacuucaaucgcaagacc

SEQ ID NO: 1088344 - RNA, 19 nt, Artificial Sequence
  Description of Artificial Sequence: Synthetic oligonucleotide
  Sense strand starting at position 378 of SEQ ID NO: 915552
uugcgauugaaguaauaca

SEQ ID NO: 1088345 - RNA, 19 nt, Artificial Sequence
  Description of Artificial Sequence: Synthetic oligonucleotide
  Antisense strand to SEQ ID NO: 1088344
uguauuacuucaaucgcaa

SEQ ID NO: 1088346 - RNA, 19 nt, Artificial Sequence
  Description of Artificial Sequence: Synthetic oligonucleotide
  Sense strand starting at position 385 of SEQ ID NO: 915552
ugaaguaauacaggcugua

SEQ ID NO: 1088347 - RNA, 19 nt, Artificial Sequence
  Description of Artificial Sequence: Synthetic oligonucleotide
  Antisense strand to SEQ ID NO: 1088346
uacagccuguauuacuuca

SEQ ID NO: 1088348 - RNA, 19 nt, Artificial Sequence
  Description of Artificial Sequence: Synthetic oligonucleotide
  Sense strand starting at position 421 of SEQ ID NO: 915552
agaagaucacagugcgaua

SEQ ID NO: 1088349 - RNA, 19 nt, Artificial Sequence
  Description of Artificial Sequence: Synthetic oligonucleotide
  Antisense strand to SEQ ID NO: 1088348
uaucgcacugugaucuucu

SEQ ID NO: 1088350 - RNA, 19 nt, Artificial Sequence
  Description of Artificial Sequence: Synthetic oligonucleotide
  Sense strand starting at position 423 of SEQ ID NO: 915552
aagaucacagugcgauaau

SEQ ID NO: 1088351 - RNA, 19 nt, Artificial Sequence
  Description of Artificial Sequence: Synthetic oligonucleotide
  Antisense strand to SEQ ID NO: 1088350
auuaucgcacugugaucuu

SEQ ID NO: 1088352 - RNA, 19 nt, Artificial Sequence
  Description of Artificial Sequence: Synthetic oligonucleotide
  Sense strand starting at position 606 of SEQ ID NO: 915552
ccgccuucuggacaaucau

SEQ ID NO: 1088353 - RNA, 19 nt, Artificial Sequence
  Description of Artificial Sequence: Synthetic oligonucleotide
  Antisense strand to SEQ ID NO: 1088352
augauuguccagaaggcgg

SEQ ID NO: 1088354 - RNA, 19 nt, Artificial Sequence
  Description of Artificial Sequence: Synthetic oligonucleotide
  Sense strand starting at position 679 of SEQ ID NO: 915552
agagauuacugagcgccaa

SEQ ID NO: 1088355 - RNA, 19 nt, Artificial Sequence
  Description of Artificial Sequence: Synthetic oligonucleotide
  Antisense strand to SEQ ID NO: 1088354
uuggcgcucaguaaucucu

SEQ ID NO: 1088356 - RNA, 19 nt, Artificial Sequence
  Description of Artificial Sequence: Synthetic oligonucleotide
  Sense strand starting at position 680 of SEQ ID NO: 915552
gagauuacugagcgccaaa

SEQ ID NO: 1088357 - RNA, 19 nt, Artificial Sequence
  Description of Artificial Sequence: Synthetic oligonucleotide
  Antisense strand to SEQ ID NO: 1088356
uuuggcgcucaguaaucuc

SEQ ID NO: 1088358 - RNA, 19 nt, Artificial Sequence
  Description of Artificial Sequence: Synthetic oligonucleotide
  Sense strand starting at position 808 of SEQ ID NO: 915552
ugaaaccagcuuugauuaa

SEQ ID NO: 1088359 - RNA, 19 nt, Artificial Sequence
  Description of Artificial Sequence: Synthetic oligonucleotide
  Antisense strand to SEQ ID NO: 1088358
uuaaucaaagcugguuuca

SEQ ID NO: 1088360 - RNA, 19 nt, Artificial Sequence
  Description of Artificial Sequence: Synthetic oligonucleotide
  Sense strand starting at position 812 of SEQ ID NO: 915552
accagcuuugauuaaaggu

SEQ ID NO: 1088361 - RNA, 19 nt, Artificial Sequence
  Description of Artificial Sequence: Synthetic oligonucleotide
  Antisense strand to SEQ ID NO: 1088360
accuuuaaucaaagcuggu

SEQ ID NO: 1088362 - RNA, 19 nt, Artificial Sequence
  Description of Artificial Sequence: Synthetic oligonucleotide
  Sense strand starting at position 940 of SEQ ID NO: 915552
acggaagguuuauuaacuu

SEQ ID NO: 1088363 - RNA, 19 nt, Artificial Sequence
  Description of Artificial Sequence: Synthetic oligonucleotide
  Antisense strand to SEQ ID NO: 1088362
aaguuaauaaaccuuccgu

SEQ ID NO: 1088364 - RNA, 19 nt, Artificial Sequence
  Description of Artificial Sequence: Synthetic oligonucleotide
  Sense strand starting at position 975 of SEQ ID NO: 915552
ugcacuuggcacuauuagu

SEQ ID NO: 1088365 - RNA, 19 nt, Artificial Sequence
  Description of Artificial Sequence: Synthetic oligonucleotide
  Antisense strand to SEQ ID NO: 1088364
acuaauagugccaagugca

SEQ ID NO: 1088366 - RNA, 19 nt, Artificial Sequence
  Description of Artificial Sequence: Synthetic oligonucleotide
  Sense strand starting at position 1120 of SEQ ID NO: 915552
uuuaauuguuuccuacagu

SEQ ID NO: 1088367 - RNA, 19 nt, Artificial Sequence
  Description of Artificial Sequence: Synthetic oligonucleotide
  Antisense strand to SEQ ID NO: 1088366
acuguaggaaacaauuaaa

SEQ ID NO: 1088368 - RNA, 19 nt, Artificial Sequence
  Description of Artificial Sequence: Synthetic oligonucleotide
  Sense strand starting at position 1144 of SEQ ID NO: 915552
cuuguaauucugugcaagg

SEQ ID NO: 1088369 - RNA, 19 nt, Artificial Sequence
  Description of Artificial Sequence: Synthetic oligonucleotide
  Antisense strand to SEQ ID NO: 1088368
ccuugcacagaauuacaag

SEQ ID NO: 1088370 - RNA, 19 nt, Artificial Sequence
  Description of Artificial Sequence: Synthetic oligonucleotide
  Sense strand starting at position 1743 of SEQ ID NO: 915552
caggacuggcgcgauagaa

SEQ ID NO: 1088371 - RNA, 19 nt, Artificial Sequence
  Description of Artificial Sequence: Synthetic oligonucleotide
  Antisense strand to SEQ ID NO: 1088370
uucuaucgcgccaguccug

SEQ ID NO: 1088372 - RNA, 19 nt, Artificial Sequence
  Description of Artificial Sequence: Synthetic oligonucleotide
  Sense strand starting at position 1812 of SEQ ID NO: 915552
caugaauugucucuggaac

SEQ ID NO: 1088373 - RNA, 19 nt, Artificial Sequence
  Description of Artificial Sequence: Synthetic oligonucleotide
  Antisense strand to SEQ ID NO: 1088372
guuccagagacaauucaug

SEQ ID NO: 1088374 - RNA, 19 nt, Artificial Sequence
  Description of Artificial Sequence: Synthetic oligonucleotide
  Sense strand starting at position 1813 of SEQ ID NO: 915552
augaauugucucuggaacu

SEQ ID NO: 1088375 - RNA, 19 nt, Artificial Sequence
  Description of Artificial Sequence: Synthetic oligonucleotide
  Antisense strand to SEQ ID NO: 1088374
aguuccagagacaauucau

SEQ ID NO: 1088376 - RNA, 19 nt, Artificial Sequence
  Description of Artificial Sequence: Synthetic oligonucleotide
  Sense strand starting at position 2226 of SEQ ID NO: 915552
cgaacacuaaggugauaau

SEQ ID NO: 1088377 - RNA, 19 nt, Artificial Sequence
  Description of Artificial Sequence: Synthetic oligonucleotide
  Antisense strand to SEQ ID NO: 1088376
auuaucaccuuaguguucg

SEQ ID NO: 1088378 - RNA, 19 nt, Artificial Sequence
  Description of Artificial Sequence: Synthetic oligonucleotide
  Sense strand starting at position 2619 of SEQ ID NO: 915552
uuuaacuugugguuagauu

SEQ ID NO: 1088379 - RNA, 19 nt, Artificial Sequence
  Description of Artificial Sequence: Synthetic oligonucleotide
  Antisense strand to SEQ ID NO: 1088378
aaucuaaccacaaguuaaa

SEQ ID NO: 1088380 - RNA, 19 nt, Artificial Sequence
  Description of Artificial Sequence: Synthetic oligonucleotide
  Sense strand starting at position 2691 of SEQ ID NO: 915552
acagcauucuaacuguaug

SEQ ID NO: 1088381 - RNA, 19 nt, Artificial Sequence
  Description of Artificial Sequence: Synthetic oligonucleotide
  Antisense strand to SEQ ID NO: 1088380
cauacaguuagaaugcugu

SEQ ID NO: 1088382 - RNA, 19 nt, Artificial Sequence
  Description of Artificial Sequence: Synthetic oligonucleotide
  Sense strand starting at position 2702 of SEQ ID NO: 915552
acuguaugaccuugguuaa

SEQ ID NO: 1088383 - RNA, 19 nt, Artificial Sequence
  Description of Artificial Sequence: Synthetic oligonucleotide
  Antisense strand to SEQ ID NO: 1088382
uuaaccaaggucauacagu

SEQ ID NO: 1088384 - RNA, 19 nt, Artificial Sequence
  Description of Artificial Sequence: Synthetic oligonucleotide
  Sense strand starting at position 2703 of SEQ ID NO: 915552
cuguaugaccuugguuaau

SEQ ID NO: 1088385 - RNA, 19 nt, Artificial Sequence
  Description of Artificial Sequence: Synthetic oligonucleotide
  Antisense strand to SEQ ID NO: 1088384
auuaaccaaggucauacag

SEQ ID NO: 1088386 - RNA, 19 nt, Artificial Sequence
  Description of Artificial Sequence: Synthetic oligonucleotide
  Sense strand starting at position 2705 of SEQ ID NO: 915552
guaugaccuugguuaaucu

SEQ ID NO: 1088387 - RNA, 19 nt, Artificial Sequence
  Description of Artificial Sequence: Synthetic oligonucleotide
  Antisense strand to SEQ ID NO: 1088386
agauuaaccaaggucauac

SEQ ID NO: 1088388 - RNA, 19 nt, Artificial Sequence
  Description of Artificial Sequence: Synthetic oligonucleotide
  Sense strand starting at position 2712 of SEQ ID NO: 915552
cuugguuaaucucuaugag

SEQ ID NO: 1088389 - RNA, 19 nt, Artificial Sequence
  Description of Artificial Sequence: Synthetic oligonucleotide
  Antisense strand to SEQ ID NO: 1088388
cucauagagauuaaccaag

SEQ ID NO: 1088390 - RNA, 19 nt, Artificial Sequence
  Description of Artificial Sequence: Synthetic oligonucleotide
  Sense strand starting at position 2713 of SEQ ID NO: 915552
uugguuaaucucuaugagc

SEQ ID NO: 1088391 - RNA, 19 nt, Artificial Sequence
  Description of Artificial Sequence: Synthetic oligonucleotide
  Antisense strand to SEQ ID NO: 1088390
gcucauagagauuaaccaa

SEQ ID NO: 1088392 - RNA, 19 nt, Artificial Sequence
  Description of Artificial Sequence: Synthetic oligonucleotide
  Sense strand starting at position 2715 of SEQ ID NO: 915552
gguuaaucucuaugagcuc

SEQ ID NO: 1088393 - RNA, 19 nt, Artificial Sequence
  Description of Artificial Sequence: Synthetic oligonucleotide
  Antisense strand to SEQ ID NO: 1088392
gagcucauagagauuaacc

SEQ ID NO: 1088394 - RNA, 19 nt, Artificial Sequence
  Description of Artificial Sequence: Synthetic oligonucleotide
  Sense strand starting at position 2748 of SEQ ID NO: 915552
ccugguagaucauugugaa

SEQ ID NO: 1088395 - RNA, 19 nt, Artificial Sequence
  Description of Artificial Sequence: Synthetic oligonucleotide
  Antisense strand to SEQ ID NO: 1088394
uucacaaugaucuaccagg

SEQ ID NO: 1088396 - RNA, 19 nt, Artificial Sequence
  Description of Artificial Sequence: Synthetic oligonucleotide
  Sense strand starting at position 2749 of SEQ ID NO: 915552
cugguagaucauugugaag

SEQ ID NO: 1088397 - RNA, 19 nt, Artificial Sequence
  Description of Artificial Sequence: Synthetic oligonucleotide
  Antisense strand to SEQ ID NO: 1088396
cuucacaaugaucuaccag

SEQ ID NO: 1088398 - RNA, 19 nt, Artificial Sequence
  Description of Artificial Sequence: Synthetic oligonucleotide
  Sense strand starting at position 2778 of SEQ ID NO: 915552
ugauuuagauaagagcuca

SEQ ID NO: 1088399 - RNA, 19 nt, Artificial Sequence
  Description of Artificial Sequence: Synthetic oligonucleotide
  Antisense strand to SEQ ID NO: 1088398
ugagcucuuaucuaaauca

SEQ ID NO: 1088400 - RNA, 19 nt, Artificial Sequence
  Description of Artificial Sequence: Synthetic oligonucleotide
  Sense strand starting at position 2849 of SEQ ID NO: 915552
aguugugaggaguaacagu

SEQ ID NO: 1088401 - RNA, 19 nt, Artificial Sequence
  Description of Artificial Sequence: Synthetic oligonucleotide
  Antisense strand to SEQ ID NO: 1088400
acuguuacuccucacaacu

SEQ ID NO: 1088402 - RNA, 19 nt, Artificial Sequence
  Description of Artificial Sequence: Synthetic oligonucleotide
  Sense strand starting at position 2886 of SEQ ID NO: 915552
caaugaugacuguguucuc

SEQ ID NO: 1088403 - RNA, 19 nt, Artificial Sequence
  Description of Artificial Sequence: Synthetic oligonucleotide
  Antisense strand to SEQ ID NO: 1088402
gagaacacagucaucauug

SEQ ID NO: 1088404 - RNA, 19 nt, Artificial Sequence
  Description of Artificial Sequence: Synthetic oligonucleotide
  Sense strand starting at position 2887 of SEQ ID NO: 915552
aaugaugacuguguucuca

SEQ ID NO: 1088405 - RNA, 19 nt, Artificial Sequence
  Description of Artificial Sequence: Synthetic oligonucleotide
  Antisense strand to SEQ ID NO: 1088404
ugagaacacagucaucauu

SEQ ID NO: 1088406 - RNA, 19 nt, Artificial Sequence
  Description of Artificial Sequence: Synthetic oligonucleotide
  Sense strand starting at position 2889 of SEQ ID NO: 915552
ugaugacuguguucucaga

SEQ ID NO: 1088407 - RNA, 19 nt, Artificial Sequence
  Description of Artificial Sequence: Synthetic oligonucleotide
  Antisense strand to SEQ ID NO: 1088406
ucugagaacacagucauca

SEQ ID NO: 1088408 - RNA, 19 nt, Artificial Sequence
  Description of Artificial Sequence: Synthetic oligonucleotide
  Sense strand starting at position 3174 of SEQ ID NO: 915552
ggcugaaggaauuguaagu

SEQ ID NO: 1088409 - RNA, 19 nt, Artificial Sequence
  Description of Artificial Sequence: Synthetic oligonucleotide
  Antisense strand to SEQ ID NO: 1088408
acuuacaauuccuucagcc

SEQ ID NO: 1088410 - RNA, 19 nt, Artificial Sequence
  Description of Artificial Sequence: Synthetic oligonucleotide
  Sense strand starting at position 3180 of SEQ ID NO: 915552
aggaauuguaaguguucca

SEQ ID NO: 1088411 - RNA, 19 nt, Artificial Sequence
  Description of Artificial Sequence: Synthetic oligonucleotide
  Antisense strand to SEQ ID NO: 1088410
uggaacacuuacaauuccu

SEQ ID NO: 1088412 - RNA, 19 nt, Artificial Sequence
  Description of Artificial Sequence: Synthetic oligonucleotide
  Sense strand starting at position 3586 of SEQ ID NO: 915552
ugacgaugucacugaacuu

SEQ ID NO: 1088413 - RNA, 19 nt, Artificial Sequence
  Description of Artificial Sequence: Synthetic oligonucleotide
  Antisense strand to SEQ ID NO: 1088412
aaguucagugacaucguca

SEQ ID NO: 1088414 - RNA, 19 nt, Artificial Sequence
  Description of Artificial Sequence: Synthetic oligonucleotide
  Sense strand starting at position 3593 of SEQ ID NO: 915552
gucacugaacuucguuaau

SEQ ID NO: 1088415 - RNA, 19 nt, Artificial Sequence
  Description of Artificial Sequence: Synthetic oligonucleotide
  Antisense strand to SEQ ID NO: 1088414
auuaacgaaguucagugac

SEQ ID NO: 1088416 - RNA, 19 nt, Artificial Sequence
  Description of Artificial Sequence: Synthetic oligonucleotide
  Sense strand starting at position 3679 of SEQ ID NO: 915552
ggaaacaguuccuccgaaa

SEQ ID NO: 1088417 - RNA, 19 nt, Artificial Sequence
  Description of Artificial Sequence: Synthetic oligonucleotide
  Antisense strand to SEQ ID NO: 1088416
uuucggaggaacuguuucc

SEQ ID NO: 1088418 - RNA, 19 nt, Artificial Sequence
  Description of Artificial Sequence: Synthetic oligonucleotide
  Sense strand starting at position 3736 of SEQ ID NO: 915552
guaggaagccaucagguuu

SEQ ID NO: 1088419 - RNA, 19 nt, Artificial Sequence
  Description of Artificial Sequence: Synthetic oligonucleotide
  Antisense strand to SEQ ID NO: 1088418
aaaccugauggcuuccuac

SEQ ID NO: 1088420 - RNA, 19 nt, Artificial Sequence
  Description of Artificial Sequence: Synthetic oligonucleotide
  Sense strand starting at position 208 of SEQ ID NO: 915553
caaggaugguugccaggau

SEQ ID NO: 1088421 - RNA, 19 nt, Artificial Sequence
  Description of Artificial Sequence: Synthetic oligonucleotide
  Antisense strand to SEQ ID NO: 1088420
auccuggcaaccauccuug

SEQ ID NO: 1088422 - RNA, 19 nt, Artificial Sequence
  Description of Artificial Sequence: Synthetic oligonucleotide
  Sense strand starting at position 209 of SEQ ID NO: 915553
aaggaugguugccaggaua

SEQ ID NO: 1088423 - RNA, 19 nt, Artificial Sequence
  Description of Artificial Sequence: Synthetic oligonucleotide
  Antisense strand to SEQ ID NO: 1088422
uauccuggcaaccauccuu

SEQ ID NO: 1088424 - RNA, 19 nt, Artificial Sequence
  Description of Artificial Sequence: Synthetic oligonucleotide
  Sense strand starting at position 567 of SEQ ID NO: 915553
ccacaugcucuuuaggcau

SEQ ID NO: 1088425 - RNA, 19 nt, Artificial Sequence
  Description of Artificial Sequence: Synthetic oligonucleotide
  Antisense strand to SEQ ID NO: 1088424
augccuaaagagcaugugg

SEQ ID NO: 1088426 - RNA, 19 nt, Artificial Sequence
  Description of Artificial Sequence: Synthetic oligonucleotide
  Sense strand starting at position 578 of SEQ ID NO: 915553
uuaggcauccucuaugaca

SEQ ID NO: 1088427 - RNA, 19 nt, Artificial Sequence
  Description of Artificial Sequence: Synthetic oligonucleotide
  Antisense strand to SEQ ID NO: 1088426
ugucauagaggaugccuaa

SEQ ID NO: 1088428 - RNA, 19 nt, Artificial Sequence
  Description of Artificial Sequence: Synthetic oligonucleotide
  Sense strand starting at position 580 of SEQ ID NO: 915553
aggcauccucuaugacaau

SEQ ID NO: 1088429 - RNA, 19 nt, Artificial Sequence
  Description of Artificial Sequence: Synthetic oligonucleotide
  Antisense strand to SEQ ID NO: 1088428
auugucauagaggaugccu

SEQ ID NO: 1088430 - RNA, 19 nt, Artificial Sequence
  Description of Artificial Sequence: Synthetic oligonucleotide
  Sense strand starting at position 780 of SEQ ID NO: 915553
gcacucaucuggucagaca

SEQ ID NO: 1088431 - RNA, 19 nt, Artificial Sequence
  Description of Artificial Sequence: Synthetic oligonucleotide
  Antisense strand to SEQ ID NO: 1088430
ugucugaccagaugagugc

SEQ ID NO: 1088432 - RNA, 19 nt, Artificial Sequence
  Description of Artificial Sequence: Synthetic oligonucleotide
  Sense strand starting at position 963 of SEQ ID NO: 915553
cagguuacuucccagagga

SEQ ID NO: 1088433 - RNA, 19 nt, Artificial Sequence
  Description of Artificial Sequence: Synthetic oligonucleotide
  Antisense strand to SEQ ID NO: 1088432
uccucugggaaguaaccug

SEQ ID NO: 1088434 - RNA, 19 nt, Artificial Sequence
  Description of Artificial Sequence: Synthetic oligonucleotide
  Sense strand starting at position 1076 of SEQ ID NO: 915553
ccaugauucucagcuacag

SEQ ID NO: 1088435 - RNA, 19 nt, Artificial Sequence
  Description of Artificial Sequence: Synthetic oligonucleotide
  Antisense strand to SEQ ID NO: 1088434
cuguagcugagaaucaugg

SEQ ID NO: 1088436 - RNA, 19 nt, Artificial Sequence
  Description of Artificial Sequence: Synthetic oligonucleotide
  Sense strand starting at position 1090 of SEQ ID NO: 915553
uacaguugucagggaacaa

SEQ ID NO: 1088437 - RNA, 19 nt, Artificial Sequence
  Description of Artificial Sequence: Synthetic oligonucleotide
  Antisense strand to SEQ ID NO: 1088436
uuguucccugacaacugua

SEQ ID NO: 1088438 - RNA, 19 nt, Artificial Sequence
  Description of Artificial Sequence: Synthetic oligonucleotide
  Sense strand starting at position 1143 of SEQ ID NO: 915553
ggauuugcauaugggauuu

SEQ ID NO: 1088439 - RNA, 19 nt, Artificial Sequence
  Description of Artificial Sequence: Synthetic oligonucleotide
  Antisense strand to SEQ ID NO: 1088438
aaaucccauaugcaaaucc

SEQ ID NO: 1088440 - RNA, 19 nt, Artificial Sequence
  Description of Artificial Sequence: Synthetic oligonucleotide
  Sense strand starting at position 1226 of SEQ ID NO: 915553
gggcaaagggcucaggauu

SEQ ID NO: 1088441 - RNA, 19 nt, Artificial Sequence
  Description of Artificial Sequence: Synthetic oligonucleotide
  Antisense strand to SEQ ID NO: 1088440
aauccugagcccuuugccc

SEQ ID NO: 1088442 - RNA, 19 nt, Artificial Sequence
  Description of Artificial Sequence: Synthetic oligonucleotide
  Sense strand starting at position 1289 of SEQ ID NO: 915553
acaugaagucguugugcca

SEQ ID NO: 1088443 - RNA, 19 nt, Artificial Sequence
  Description of Artificial Sequence: Synthetic oligonucleotide
  Antisense strand to SEQ ID NO: 1088442
uggcacaacgacuucaugu

SEQ ID NO: 1088444 - RNA, 19 nt, Artificial Sequence
  Description of Artificial Sequence: Synthetic oligonucleotide
  Sense strand starting at position 1407 of SEQ ID NO: 915553
ucaaacacucucggaauaa

SEQ ID NO: 1088445 - RNA, 19 nt, Artificial Sequence
  Description of Artificial Sequence: Synthetic oligonucleotide
  Antisense strand to SEQ ID NO: 1088444
uuauuccgagaguguuuga

SEQ ID NO: 1088446 - RNA, 19 nt, Artificial Sequence
  Description of Artificial Sequence: Synthetic oligonucleotide
  Sense strand starting at position 1673 of SEQ ID NO: 915553
agggaucucuuccaccaau

SEQ ID NO: 1088447 - RNA, 19 nt, Artificial Sequence
  Description of Artificial Sequence: Synthetic oligonucleotide
  Antisense strand to SEQ ID NO: 1088446
auugguggaagagaucccu

SEQ ID NO: 1088448 - RNA, 19 nt, Artificial Sequence
  Description of Artificial Sequence: Synthetic oligonucleotide
  Sense strand starting at position 1711 of SEQ ID NO: 915553
aggucuugcgauugaagua

SEQ ID NO: 1088449 - RNA, 19 nt, Artificial Sequence
  Description of Artificial Sequence: Synthetic oligonucleotide
  Antisense strand to SEQ ID NO: 1088448
uacuucaaucgcaagaccu

SEQ ID NO: 1088450 - RNA, 19 nt, Artificial Sequence
  Description of Artificial Sequence: Synthetic oligonucleotide
  Sense strand starting at position 1712 of SEQ ID NO: 915553
ggucuugcgauugaaguaa

SEQ ID NO: 1088451 - RNA, 19 nt, Artificial Sequence
  Description of Artificial Sequence: Synthetic oligonucleotide
  Antisense strand to SEQ ID NO: 1088450
uuacuucaaucgcaagacc

SEQ ID NO: 1088452 - RNA, 19 nt, Artificial Sequence
  Description of Artificial Sequence: Synthetic oligonucleotide
  Sense strand starting at position 1716 of SEQ ID NO: 915553
uugcgauugaaguaauaca

SEQ ID NO: 1088453 - RNA, 19 nt, Artificial Sequence
  Description of Artificial Sequence: Synthetic oligonucleotide
  Antisense strand to SEQ ID NO: 1088452
uguauuacuucaaucgcaa

SEQ ID NO: 1088454 - RNA, 19 nt, Artificial Sequence
  Description of Artificial Sequence: Synthetic oligonucleotide
  Sense strand starting at position 1723 of SEQ ID NO: 915553
ugaaguaauacaggcugua

SEQ ID NO: 1088455 - RNA, 19 nt, Artificial Sequence
  Description of Artificial Sequence: Synthetic oligonucleotide
  Antisense strand to SEQ ID NO: 1088454
uacagccuguauuacuuca

SEQ ID NO: 1088456 - RNA, 19 nt, Artificial Sequence
  Description of Artificial Sequence: Synthetic oligonucleotide
  Sense strand starting at position 1759 of SEQ ID NO: 915553
agaagaucacagugcgaua

SEQ ID NO: 1088457 - RNA, 19 nt, Artificial Sequence
  Description of Artificial Sequence: Synthetic oligonucleotide
  Antisense strand to SEQ ID NO: 1088456
uaucgcacugugaucuucu

SEQ ID NO: 1088458 - RNA, 19 nt, Artificial Sequence
  Description of Artificial Sequence: Synthetic oligonucleotide
  Sense strand starting at position 1761 of SEQ ID NO: 915553
aagaucacagugcgauaau

SEQ ID NO: 1088459 - RNA, 19 nt, Artificial Sequence
  Description of Artificial Sequence: Synthetic oligonucleotide
  Antisense strand to SEQ ID NO: 1088458
auuaucgcacugugaucuu

SEQ ID NO: 1088460 - RNA, 19 nt, Artificial Sequence
  Description of Artificial Sequence: Synthetic oligonucleotide
  Sense strand starting at position 1944 of SEQ ID NO: 915553
ccgccuucuggacaaucau

SEQ ID NO: 1088461 - RNA, 19 nt, Artificial Sequence
  Description of Artificial Sequence: Synthetic oligonucleotide
  Antisense strand to SEQ ID NO: 1088460
augauuguccagaaggcgg

SEQ ID NO: 1088462 - RNA, 19 nt, Artificial Sequence
  Description of Artificial Sequence: Synthetic oligonucleotide
  Sense strand starting at position 2017 of SEQ ID NO: 915553
agagauuacugagcgccaa

SEQ ID NO: 1088463 - RNA, 19 nt, Artificial Sequence
  Description of Artificial Sequence: Synthetic oligonucleotide
  Antisense strand to SEQ ID NO: 1088462
uuggcgcucaguaaucucu

SEQ ID NO: 1088464 - RNA, 19 nt, Artificial Sequence
  Description of Artificial Sequence: Synthetic oligonucleotide
  Sense strand starting at position 2018 of SEQ ID NO: 915553
gagauuacugagcgccaaa

SEQ ID NO: 1088465 - RNA, 19 nt, Artificial Sequence
  Description of Artificial Sequence: Synthetic oligonucleotide
  Antisense strand to SEQ ID NO: 1088464
uuuggcgcucaguaaucuc

SEQ ID NO: 1088466 - RNA, 19 nt, Artificial Sequence
  Description of Artificial Sequence: Synthetic oligonucleotide
  Sense strand starting at position 2131 of SEQ ID NO: 915553
augucugcuugccugugaa

SEQ ID NO: 1088467 - RNA, 19 nt, Artificial Sequence
  Description of Artificial Sequence: Synthetic oligonucleotide
  Antisense strand to SEQ ID NO: 1088466
uucacaggcaagcagacau

SEQ ID NO: 1088468 - RNA, 19 nt, Artificial Sequence
  Description of Artificial Sequence: Synthetic oligonucleotide
  Sense strand starting at position 2146 of SEQ ID NO: 915553
ugaaaccagcuuugauuaa

SEQ ID NO: 1088469 - RNA, 19 nt, Artificial Sequence
  Description of Artificial Sequence: Synthetic oligonucleotide
  Antisense strand to SEQ ID NO: 1088468
uuaaucaaagcugguuuca

SEQ ID NO: 1088470 - RNA, 19 nt, Artificial Sequence
  Description of Artificial Sequence: Synthetic oligonucleotide
  Sense strand starting at position 2150 of SEQ ID NO: 915553
accagcuuugauuaaaggu

SEQ ID NO: 1088471 - RNA, 19 nt, Artificial Sequence
  Description of Artificial Sequence: Synthetic oligonucleotide
  Antisense strand to SEQ ID NO: 1088470
accuuuaaucaaagcuggu

SEQ ID NO: 1088472 - RNA, 19 nt, Artificial Sequence
  Description of Artificial Sequence: Synthetic oligonucleotide
  Sense strand starting at position 2278 of SEQ ID NO: 915553
acggaagguuuauuaacuu

SEQ ID NO: 1088473 - RNA, 19 nt, Artificial Sequence
  Description of Artificial Sequence: Synthetic oligonucleotide
  Antisense strand to SEQ ID NO: 1088472
aaguuaauaaaccuuccgu

SEQ ID NO: 1088474 - RNA, 19 nt, Artificial Sequence
  Description of Artificial Sequence: Synthetic oligonucleotide
  Sense strand starting at position 2313 of SEQ ID NO: 915553
ugcacuuggcacuauuagu

SEQ ID NO: 1088475 - RNA, 19 nt, Artificial Sequence
  Description of Artificial Sequence: Synthetic oligonucleotide
  Antisense strand to SEQ ID NO: 1088474
acuaauagugccaagugca

SEQ ID NO: 1088476 - RNA, 19 nt, Artificial Sequence
  Description of Artificial Sequence: Synthetic oligonucleotide
  Sense strand starting at position 2397 of SEQ ID NO: 915553
uucuaagccuucuagagag

SEQ ID NO: 1088477 - RNA, 19 nt, Artificial Sequence
  Description of Artificial Sequence: Synthetic oligonucleotide
  Antisense strand to SEQ ID NO: 1088476
cucucuagaaggcuuagaa

SEQ ID NO: 1088478 - RNA, 19 nt, Artificial Sequence
  Description of Artificial Sequence: Synthetic oligonucleotide
  Sense strand starting at position 2416 of SEQ ID NO: 915553
ggccucaauccguggaacu

SEQ ID NO: 1088479 - RNA, 19 nt, Artificial Sequence
  Description of Artificial Sequence: Synthetic oligonucleotide
  Antisense strand to SEQ ID NO: 1088478
aguuccacggauugaggcc

SEQ ID NO: 1088480 - RNA, 19 nt, Artificial Sequence
  Description of Artificial Sequence: Synthetic oligonucleotide
  Sense strand starting at position 2458 of SEQ ID NO: 915553
uuuaauuguuuccuacagu

SEQ ID NO: 1088481 - RNA, 19 nt, Artificial Sequence
  Description of Artificial Sequence: Synthetic oligonucleotide
  Antisense strand to SEQ ID NO: 1088480
acuguaggaaacaauuaaa

SEQ ID NO: 1088482 - RNA, 19 nt, Artificial Sequence
  Description of Artificial Sequence: Synthetic oligonucleotide
  Sense strand starting at position 2481 of SEQ ID NO: 915553
ccuuguaauucugugcaag

SEQ ID NO: 1088483 - RNA, 19 nt, Artificial Sequence
  Description of Artificial Sequence: Synthetic oligonucleotide
  Antisense strand to SEQ ID NO: 1088482
cuugcacagaauuacaagg

SEQ ID NO: 1088484 - RNA, 19 nt, Artificial Sequence
  Description of Artificial Sequence: Synthetic oligonucleotide
  Sense strand starting at position 2482 of SEQ ID NO: 915553
cuuguaauucugugcaagg

SEQ ID NO: 1088485 - RNA, 19 nt, Artificial Sequence
  Description of Artificial Sequence: Synthetic oligonucleotide
  Antisense strand to SEQ ID NO: 1088484
ccuugcacagaauuacaag

SEQ ID NO: 1088486 - RNA, 19 nt, Artificial Sequence
  Description of Artificial Sequence: Synthetic oligonucleotide
  Sense strand starting at position 3081 of SEQ ID NO: 915553
caggacuggcgcgauagaa

SEQ ID NO: 1088487 - RNA, 19 nt, Artificial Sequence
  Description of Artificial Sequence: Synthetic oligonucleotide
  Antisense strand to SEQ ID NO: 1088486
uucuaucgcgccaguccug

SEQ ID NO: 1088488 - RNA, 19 nt, Artificial Sequence
  Description of Artificial Sequence: Synthetic oligonucleotide
  Sense strand starting at position 3150 of SEQ ID NO: 915553
caugaauugucucuggaac

SEQ ID NO: 1088489 - RNA, 19 nt, Artificial Sequence
  Description of Artificial Sequence: Synthetic oligonucleotide
  Antisense strand to SEQ ID NO: 1088488
guuccagagacaauucaug

SEQ ID NO: 1088490 - RNA, 19 nt, Artificial Sequence
  Description of Artificial Sequence: Synthetic oligonucleotide
  Sense strand starting at position 3151 of SEQ ID NO: 915553
augaauugucucuggaacu

SEQ ID NO: 1088491 - RNA, 19 nt, Artificial Sequence
  Description of Artificial Sequence: Synthetic oligonucleotide
  Antisense strand to SEQ ID NO: 1088490
aguuccagagacaauucau

SEQ ID NO: 1088492 - RNA, 19 nt, Artificial Sequence
  Description of Artificial Sequence: Synthetic oligonucleotide
  Sense strand starting at position 3562 of SEQ ID NO: 915553
accgaacacuaaggugaua

SEQ ID NO: 1088493 - RNA, 19 nt, Artificial Sequence
  Description of Artificial Sequence: Synthetic oligonucleotide
  Antisense strand to SEQ ID NO: 1088492
uaucaccuuaguguucggu

SEQ ID NO: 1088494 - RNA, 19 nt, Artificial Sequence
  Description of Artificial Sequence: Synthetic oligonucleotide
  Sense strand starting at position 3564 of SEQ ID NO: 915553
cgaacacuaaggugauaau

SEQ ID NO: 1088495 - RNA, 19 nt, Artificial Sequence
  Description of Artificial Sequence: Synthetic oligonucleotide
  Antisense strand to SEQ ID NO: 1088494
auuaucaccuuaguguucg

SEQ ID NO: 1088496 - RNA, 19 nt, Artificial Sequence
  Description of Artificial Sequence: Synthetic oligonucleotide
  Sense strand starting at position 3567 of SEQ ID NO: 915553
acacuaaggugauaaucau

SEQ ID NO: 1088497 - RNA, 19 nt, Artificial Sequence
  Description of Artificial Sequence: Synthetic oligonucleotide
  Antisense strand to SEQ ID NO: 1088496
augauuaucaccuuagugu

SEQ ID NO: 1088498 - RNA, 19 nt, Artificial Sequence
  Description of Artificial Sequence: Synthetic oligonucleotide
  Sense strand starting at position 3957 of SEQ ID NO: 915553
uuuaacuugugguuagauu

SEQ ID NO: 1088499 - RNA, 19 nt, Artificial Sequence
  Description of Artificial Sequence: Synthetic oligonucleotide
  Antisense strand to SEQ ID NO: 1088498
aaucuaaccacaaguuaaa

SEQ ID NO: 1088500 - RNA, 19 nt, Artificial Sequence
  Description of Artificial Sequence: Synthetic oligonucleotide
  Sense strand starting at position 453 of SEQ ID NO: 915554
cgcacaccugcuuaggaaa

SEQ ID NO: 1088501 - RNA, 19 nt, Artificial Sequence
  Description of Artificial Sequence: Synthetic oligonucleotide
  Antisense strand to SEQ ID NO: 1088500
uuuccuaagcaggugugcg

SEQ ID NO: 1088502 - RNA, 19 nt, Artificial Sequence
  Description of Artificial Sequence: Synthetic oligonucleotide
  Sense strand starting at position 595 of SEQ ID NO: 915554
uccugagcacugcguauuu

SEQ ID NO: 1088503 - RNA, 19 nt, Artificial Sequence
  Description of Artificial Sequence: Synthetic oligonucleotide
  Antisense strand to SEQ ID NO: 1088502
aaauacgcagugcucagga

SEQ ID NO: 1088504 - RNA, 19 nt, Artificial Sequence
  Description of Artificial Sequence: Synthetic oligonucleotide
  Sense strand starting at position 658 of SEQ ID NO: 915554
ggcuaaacuuucccuaaug

SEQ ID NO: 1088505 - RNA, 19 nt, Artificial Sequence
  Description of Artificial Sequence: Synthetic oligonucleotide
  Antisense strand to SEQ ID NO: 1088504
cauuagggaaaguuuagcc

SEQ ID NO: 1088506 - RNA, 19 nt, Artificial Sequence
  Description of Artificial Sequence: Synthetic oligonucleotide
  Sense strand starting at position 1002 of SEQ ID NO: 915554
cggugaauucuaugcugca

SEQ ID NO: 1088507 - RNA, 19 nt, Artificial Sequence
  Description of Artificial Sequence: Synthetic oligonucleotide
  Antisense strand to SEQ ID NO: 1088506
ugcagcauagaauucaccg

SEQ ID NO: 1088508 - RNA, 19 nt, Artificial Sequence
  Description of Artificial Sequence: Synthetic oligonucleotide
  Sense strand starting at position 1003 of SEQ ID NO: 915554
ggugaauucuaugcugcac

SEQ ID NO: 1088509 - RNA, 19 nt, Artificial Sequence
  Description of Artificial Sequence: Synthetic oligonucleotide
  Antisense strand to SEQ ID NO: 1088508
gugcagcauagaauucacc

SEQ ID NO: 1088510 - RNA, 19 nt, Artificial Sequence
  Description of Artificial Sequence: Synthetic oligonucleotide
  Sense strand starting at position 1021 of SEQ ID NO: 915554
cuuugagcugucuaacucu

SEQ ID NO: 1088511 - RNA, 19 nt, Artificial Sequence
  Description of Artificial Sequence: Synthetic oligonucleotide
  Antisense strand to SEQ ID NO: 1088510
agaguuagacagcucaaag

SEQ ID NO: 1088512 - RNA, 19 nt, Artificial Sequence
  Description of Artificial Sequence: Synthetic oligonucleotide
  Sense strand starting at position 1027 of SEQ ID NO: 915554
gcugucuaacucugggcaa

SEQ ID NO: 1088513 - RNA, 19 nt, Artificial Sequence
  Description of Artificial Sequence: Synthetic oligonucleotide
  Antisense strand to SEQ ID NO: 1088512
uugcccagaguuagacagc

SEQ ID NO: 1088514 - RNA, 19 nt, Artificial Sequence
  Description of Artificial Sequence: Synthetic oligonucleotide
  Sense strand starting at position 1029 of SEQ ID NO: 915554
ugucuaacucugggcaaau

SEQ ID NO: 1088515 - RNA, 19 nt, Artificial Sequence
  Description of Artificial Sequence: Synthetic oligonucleotide
  Antisense strand to SEQ ID NO: 1088514
auuugcccagaguuagaca

SEQ ID NO: 1088516 - RNA, 19 nt, Artificial Sequence
  Description of Artificial Sequence: Synthetic oligonucleotide
  Sense strand starting at position 1030 of SEQ ID NO: 915554
gucuaacucugggcaaauc

SEQ ID NO: 1088517 - RNA, 19 nt, Artificial Sequence
  Description of Artificial Sequence: Synthetic oligonucleotide
  Antisense strand to SEQ ID NO: 1088516
gauuugcccagaguuagac

SEQ ID NO: 1088518 - RNA, 19 nt, Artificial Sequence
  Description of Artificial Sequence: Synthetic oligonucleotide
  Sense strand starting at position 1115 of SEQ ID NO: 915554
agcugugaggacgagauaa

SEQ ID NO: 1088519 - RNA, 19 nt, Artificial Sequence
  Description of Artificial Sequence: Synthetic oligonucleotide
  Antisense strand to SEQ ID NO: 1088518
uuaucucguccucacagcu

SEQ ID NO: 1088520 - RNA, 19 nt, Artificial Sequence
  Description of Artificial Sequence: Synthetic oligonucleotide
  Sense strand starting at position 1125 of SEQ ID NO: 915554
acgagauaagccugaaagu

SEQ ID NO: 1088521 - RNA, 19 nt, Artificial Sequence
  Description of Artificial Sequence: Synthetic oligonucleotide
  Antisense strand to SEQ ID NO: 1088520
acuuucaggcuuaucucgu

SEQ ID NO: 1088522 - RNA, 19 nt, Artificial Sequence
  Description of Artificial Sequence: Synthetic oligonucleotide
  Sense strand starting at position 1126 of SEQ ID NO: 915554
cgagauaagccugaaagug

SEQ ID NO: 1088523 - RNA, 19 nt, Artificial Sequence
  Description of Artificial Sequence: Synthetic oligonucleotide
  Antisense strand to SEQ ID NO: 1088522
cacuuucaggcuuaucucg

SEQ ID NO: 1088524 - RNA, 19 nt, Artificial Sequence
  Description of Artificial Sequence: Synthetic oligonucleotide
  Sense strand starting at position 1246 of SEQ ID NO: 915554
ggauguggacgugagucaa

SEQ ID NO: 1088525 - RNA, 19 nt, Artificial Sequence
  Description of Artificial Sequence: Synthetic oligonucleotide
  Antisense strand to SEQ ID NO: 1088524
uugacucacguccacaucc

SEQ ID NO: 1088526 - RNA, 19 nt, Artificial Sequence
  Description of Artificial Sequence: Synthetic oligonucleotide
  Sense strand starting at position 1293 of SEQ ID NO: 915554
gggcaugagguuuaaaugu

SEQ ID NO: 1088527 - RNA, 19 nt, Artificial Sequence
  Description of Artificial Sequence: Synthetic oligonucleotide
  Antisense strand to SEQ ID NO: 1088526
acauuuaaaccucaugccc

SEQ ID NO: 1088528 - RNA, 19 nt, Artificial Sequence
  Description of Artificial Sequence: Synthetic oligonucleotide
  Sense strand starting at position 1302 of SEQ ID NO: 915554
guuuaaauguggucugcuc

SEQ ID NO: 1088529 - RNA, 19 nt, Artificial Sequence
  Description of Artificial Sequence: Synthetic oligonucleotide
  Antisense strand to SEQ ID NO: 1088528
gagcagaccacauuuaaac

SEQ ID NO: 1088530 - RNA, 19 nt, Artificial Sequence
  Description of Artificial Sequence: Synthetic oligonucleotide
  Sense strand starting at position 1348 of SEQ ID NO: 915554
uggugaugucccugccuca

SEQ ID NO: 1088531 - RNA, 19 nt, Artificial Sequence
  Description of Artificial Sequence: Synthetic oligonucleotide
  Antisense strand to SEQ ID NO: 1088530
ugaggcagggacaucacca

SEQ ID NO: 1088532 - RNA, 19 nt, Artificial Sequence
  Description of Artificial Sequence: Synthetic oligonucleotide
  Sense strand starting at position 1424 of SEQ ID NO: 915554
ggcagagaugcccaugucu

SEQ ID NO: 1088533 - RNA, 19 nt, Artificial Sequence
  Description of Artificial Sequence: Synthetic oligonucleotide
  Antisense strand to SEQ ID NO: 1088532
agacaugggcaucucugcc

SEQ ID NO: 1088534 - RNA, 19 nt, Artificial Sequence
  Description of Artificial Sequence: Synthetic oligonucleotide
  Sense strand starting at position 1426 of SEQ ID NO: 915554
cagagaugcccaugucuag

SEQ ID NO: 1088535 - RNA, 19 nt, Artificial Sequence
  Description of Artificial Sequence: Synthetic oligonucleotide
  Antisense strand to SEQ ID NO: 1088534
cuagacaugggcaucucug

SEQ ID NO: 1088536 - RNA, 19 nt, Artificial Sequence
  Description of Artificial Sequence: Synthetic oligonucleotide
  Sense strand starting at position 2358 of SEQ ID NO: 915554
cuggcuccuccaugagcaa

SEQ ID NO: 1088537 - RNA, 19 nt, Artificial Sequence
  Description of Artificial Sequence: Synthetic oligonucleotide
  Antisense strand to SEQ ID NO: 1088536
uugcucauggaggagccag

SEQ ID NO: 1088538 - RNA, 19 nt, Artificial Sequence
  Description of Artificial Sequence: Synthetic oligonucleotide
  Sense strand starting at position 2619 of SEQ ID NO: 915554
ugaccucuuugguuagacu

SEQ ID NO: 1088539 - RNA, 19 nt, Artificial Sequence
  Description of Artificial Sequence: Synthetic oligonucleotide
  Antisense strand to SEQ ID NO: 1088538
agucuaaccaaagagguca

SEQ ID NO: 1088540 - RNA, 19 nt, Artificial Sequence
  Description of Artificial Sequence: Synthetic oligonucleotide
  Sense strand starting at position 2620 of SEQ ID NO: 915554
gaccucuuugguuagacua

SEQ ID NO: 1088541 - RNA, 19 nt, Artificial Sequence
  Description of Artificial Sequence: Synthetic oligonucleotide
  Antisense strand to SEQ ID NO: 1088540
uagucuaaccaaagagguc

SEQ ID NO: 1088542 - RNA, 19 nt, Artificial Sequence
  Description of Artificial Sequence: Synthetic oligonucleotide
  Sense strand starting at position 2713 of SEQ ID NO: 915554
cgcacuaucucacugaauc

SEQ ID NO: 1088543 - RNA, 19 nt, Artificial Sequence
  Description of Artificial Sequence: Synthetic oligonucleotide
  Antisense strand to SEQ ID NO: 1088542
gauucagugagauagugcg

SEQ ID NO: 1088544 - RNA, 19 nt, Artificial Sequence
  Description of Artificial Sequence: Synthetic oligonucleotide
  Sense strand starting at position 2821 of SEQ ID NO: 915554
gaagccagaguaugugaua

SEQ ID NO: 1088545 - RNA, 19 nt, Artificial Sequence
  Description of Artificial Sequence: Synthetic oligonucleotide
  Antisense strand to SEQ ID NO: 1088544
uaucacauacucuggcuuc

SEQ ID NO: 1088546 - RNA, 19 nt, Artificial Sequence
  Description of Artificial Sequence: Synthetic oligonucleotide
  Sense strand starting at position 2884 of SEQ ID NO: 915554
uggcguuucgaguuuguau

SEQ ID NO: 1088547 - RNA, 19 nt, Artificial Sequence
  Description of Artificial Sequence: Synthetic oligonucleotide
  Antisense strand to SEQ ID NO: 1088546
auacaaacucgaaacgcca

SEQ ID NO: 1088548 - RNA, 19 nt, Artificial Sequence
  Description of Artificial Sequence: Synthetic oligonucleotide
  Sense strand starting at position 2885 of SEQ ID NO: 915554
ggcguuucgaguuuguauu

SEQ ID NO: 1088549 - RNA, 19 nt, Artificial Sequence
  Description of Artificial Sequence: Synthetic oligonucleotide
  Antisense strand to SEQ ID NO: 1088548
aauacaaacucgaaacgcc

SEQ ID NO: 1088550 - RNA, 19 nt, Artificial Sequence
  Description of Artificial Sequence: Synthetic oligonucleotide
  Sense strand starting at position 2896 of SEQ ID NO: 915554
uuuguauucuucucuggaa

SEQ ID NO: 1088551 - RNA, 19 nt, Artificial Sequence
  Description of Artificial Sequence: Synthetic oligonucleotide
  Antisense strand to SEQ ID NO: 1088550
uuccagagaagaauacaaa

SEQ ID NO: 1088552 - RNA, 19 nt, Artificial Sequence
  Description of Artificial Sequence: Synthetic oligonucleotide
  Sense strand starting at position 2897 of SEQ ID NO: 915554
uuguauucuucucuggaaa

SEQ ID NO: 1088553 - RNA, 19 nt, Artificial Sequence
  Description of Artificial Sequence: Synthetic oligonucleotide
  Antisense strand to SEQ ID NO: 1088552
uuuccagagaagaauacaa

SEQ ID NO: 1088554 - RNA, 19 nt, Artificial Sequence
  Description of Artificial Sequence: Synthetic oligonucleotide
  Sense strand starting at position 2898 of SEQ ID NO: 915554
uguauucuucucuggaaau

SEQ ID NO: 1088555 - RNA, 19 nt, Artificial Sequence
  Description of Artificial Sequence: Synthetic oligonucleotide
  Antisense strand to SEQ ID NO: 1088554
auuuccagagaagaauaca

SEQ ID NO: 1088556 - RNA, 19 nt, Artificial Sequence
  Description of Artificial Sequence: Synthetic oligonucleotide
  Sense strand starting at position 2982 of SEQ ID NO: 915554
gaguacaggucucuuaagu

SEQ ID NO: 1088557 - RNA, 19 nt, Artificial Sequence
  Description of Artificial Sequence: Synthetic oligonucleotide
  Antisense strand to SEQ ID NO: 1088556
acuuaagagaccuguacuc

SEQ ID NO: 1088558 - RNA, 19 nt, Artificial Sequence
  Description of Artificial Sequence: Synthetic oligonucleotide
  Sense strand starting at position 3235 of SEQ ID NO: 915554
ucuguucccucccugaguu

SEQ ID NO: 1088559 - RNA, 19 nt, Artificial Sequence
  Description of Artificial Sequence: Synthetic oligonucleotide
  Antisense strand to SEQ ID NO: 1088558
aacucagggagggaacaga

SEQ ID NO: 1088560 - RNA, 19 nt, Artificial Sequence
  Description of Artificial Sequence: Synthetic oligonucleotide
  Sense strand starting at position 3259 of SEQ ID NO: 915554
auggaaucccuggguuagu

SEQ ID NO: 1088561 - RNA, 19 nt, Artificial Sequence
  Description of Artificial Sequence: Synthetic oligonucleotide
  Antisense strand to SEQ ID NO: 1088560
acuaacccagggauuccau

SEQ ID NO: 1088562 - RNA, 19 nt, Artificial Sequence
  Description of Artificial Sequence: Synthetic oligonucleotide
  Sense strand starting at position 3260 of SEQ ID NO: 915554
uggaaucccuggguuaguu

SEQ ID NO: 1088563 - RNA, 19 nt, Artificial Sequence
  Description of Artificial Sequence: Synthetic oligonucleotide
  Antisense strand to SEQ ID NO: 1088562
aacuaacccagggauucca

SEQ ID NO: 1088564 - RNA, 19 nt, Artificial Sequence
  Description of Artificial Sequence: Synthetic oligonucleotide
  Sense strand starting at position 3269 of SEQ ID NO: 915554
uggguuaguuucuuggcaa

SEQ ID NO: 1088565 - RNA, 19 nt, Artificial Sequence
  Description of Artificial Sequence: Synthetic oligonucleotide
  Antisense strand to SEQ ID NO: 1088564
uugccaagaaacuaaccca

SEQ ID NO: 1088566 - RNA, 19 nt, Artificial Sequence
  Description of Artificial Sequence: Synthetic oligonucleotide
  Sense strand starting at position 3272 of SEQ ID NO: 915554
guuaguuucuuggcaaaga

SEQ ID NO: 1088567 - RNA, 19 nt, Artificial Sequence
  Description of Artificial Sequence: Synthetic oligonucleotide
  Antisense strand to SEQ ID NO: 1088566
ucuuugccaagaaacuaac

SEQ ID NO: 1088568 - RNA, 19 nt, Artificial Sequence
  Description of Artificial Sequence: Synthetic oligonucleotide
  Sense strand starting at position 3869 of SEQ ID NO: 915554
gguuuccaggugugugaga

SEQ ID NO: 1088569 - RNA, 19 nt, Artificial Sequence
  Description of Artificial Sequence: Synthetic oligonucleotide
  Antisense strand to SEQ ID NO: 1088568
ucucacacaccuggaaacc

SEQ ID NO: 1088570 - RNA, 19 nt, Artificial Sequence
  Description of Artificial Sequence: Synthetic oligonucleotide
  Sense strand starting at position 3870 of SEQ ID NO: 915554
guuuccaggugugugagaa

SEQ ID NO: 1088571 - RNA, 19 nt, Artificial Sequence
  Description of Artificial Sequence: Synthetic oligonucleotide
  Antisense strand to SEQ ID NO: 1088570
uucucacacaccuggaaac

SEQ ID NO: 1088572 - RNA, 19 nt, Artificial Sequence
  Description of Artificial Sequence: Synthetic oligonucleotide
  Sense strand starting at position 3871 of SEQ ID NO: 915554
uuuccaggugugugagaaa

SEQ ID NO: 1088573 - RNA, 19 nt, Artificial Sequence
  Description of Artificial Sequence: Synthetic oligonucleotide
  Antisense strand to SEQ ID NO: 1088572
uuucucacacaccuggaaa

SEQ ID NO: 1088574 - RNA, 19 nt, Artificial Sequence
  Description of Artificial Sequence: Synthetic oligonucleotide
  Sense strand starting at position 3974 of SEQ ID NO: 915554
cuuguauauguguauguga

SEQ ID NO: 1088575 - RNA, 19 nt, Artificial Sequence
  Description of Artificial Sequence: Synthetic oligonucleotide
  Antisense strand to SEQ ID NO: 1088574
ucacauacacauauacaag

SEQ ID NO: 1088576 - RNA, 19 nt, Artificial Sequence
  Description of Artificial Sequence: Synthetic oligonucleotide
  Sense strand starting at position 3981 of SEQ ID NO: 915554
auguguaugugauuaaagg

SEQ ID NO: 1088577 - RNA, 19 nt, Artificial Sequence
  Description of Artificial Sequence: Synthetic oligonucleotide
  Antisense strand to SEQ ID NO: 1088576
ccuuuaaucacauacacau

SEQ ID NO: 1088578 - RNA, 19 nt, Artificial Sequence
  Description of Artificial Sequence: Synthetic oligonucleotide
  Sense strand starting at position 3982 of SEQ ID NO: 915554
uguguaugugauuaaaggu

SEQ ID NO: 1088579 - RNA, 19 nt, Artificial Sequence
  Description of Artificial Sequence: Synthetic oligonucleotide
  Antisense strand to SEQ ID NO: 1088578
accuuuaaucacauacaca

SEQ ID NO: 1088580 - RNA, 19 nt, Artificial Sequence
  Description of Artificial Sequence: Synthetic oligonucleotide
  Sense strand starting at position 27 of SEQ ID NO: 915555
aggaaauacuuuccaguuu

SEQ ID NO: 1088581 - RNA, 19 nt, Artificial Sequence
  Description of Artificial Sequence: Synthetic oligonucleotide
  Antisense strand to SEQ ID NO: 1088580
aaacuggaaaguauuuccu

SEQ ID NO: 1088582 - RNA, 19 nt, Artificial Sequence
  Description of Artificial Sequence: Synthetic oligonucleotide
  Sense strand starting at position 199 of SEQ ID NO: 915555
gcauuucccgacugccauu

SEQ ID NO: 1088583 - RNA, 19 nt, Artificial Sequence
  Description of Artificial Sequence: Synthetic oligonucleotide
  Antisense strand to SEQ ID NO: 1088582
aauggcagucgggaaaugc

SEQ ID NO: 1088584 - RNA, 19 nt, Artificial Sequence
  Description of Artificial Sequence: Synthetic oligonucleotide
  Sense strand starting at position 489 of SEQ ID NO: 915555
uguagagaucgguaugggu

SEQ ID NO: 1088585 - RNA, 19 nt, Artificial Sequence
  Description of Artificial Sequence: Synthetic oligonucleotide
  Antisense strand to SEQ ID NO: 1088584
acccauaccgaucucuaca

SEQ ID NO: 1088586 - RNA, 19 nt, Artificial Sequence
  Description of Artificial Sequence: Synthetic oligonucleotide
  Sense strand starting at position 491 of SEQ ID NO: 915555
uagagaucgguauggguuu

SEQ ID NO: 1088587 - RNA, 19 nt, Artificial Sequence
  Description of Artificial Sequence: Synthetic oligonucleotide
  Antisense strand to SEQ ID NO: 1088586
aaacccauaccgaucucua

SEQ ID NO: 1088588 - RNA, 19 nt, Artificial Sequence
  Description of Artificial Sequence: Synthetic oligonucleotide
  Sense strand starting at position 721 of SEQ ID NO: 915555
auuaguguggcaugaugau

SEQ ID NO: 1088589 - RNA, 19 nt, Artificial Sequence
  Description of Artificial Sequence: Synthetic oligonucleotide
  Antisense strand to SEQ ID NO: 1088588
aucaucaugccacacuaau

SEQ ID NO: 1088590 - RNA, 19 nt, Artificial Sequence
  Description of Artificial Sequence: Synthetic oligonucleotide
  Sense strand starting at position 862 of SEQ ID NO: 915555
agccuccgucuugaaagaa

SEQ ID NO: 1088591 - RNA, 19 nt, Artificial Sequence
  Description of Artificial Sequence: Synthetic oligonucleotide
  Antisense strand to SEQ ID NO: 1088590
uucuuucaagacggaggcu

SEQ ID NO: 1088592 - RNA, 19 nt, Artificial Sequence
  Description of Artificial Sequence: Synthetic oligonucleotide
  Sense strand starting at position 1208 of SEQ ID NO: 915555
gugugcuuguacacguaga

SEQ ID NO: 1088593 - RNA, 19 nt, Artificial Sequence
  Description of Artificial Sequence: Synthetic oligonucleotide
  Antisense strand to SEQ ID NO: 1088592
ucuacguguacaagcacac

SEQ ID NO: 1088594 - RNA, 19 nt, Artificial Sequence
  Description of Artificial Sequence: Synthetic oligonucleotide
  Sense strand starting at position 1219 of SEQ ID NO: 915555
cacguagauguuuaccaca

SEQ ID NO: 1088595 - RNA, 19 nt, Artificial Sequence
  Description of Artificial Sequence: Synthetic oligonucleotide
  Antisense strand to SEQ ID NO: 1088594
ugugguaaacaucuacgug

SEQ ID NO: 1088596 - RNA, 19 nt, Artificial Sequence
  Description of Artificial Sequence: Synthetic oligonucleotide
  Sense strand starting at position 1221 of SEQ ID NO: 915555
cguagauguuuaccacaaa

SEQ ID NO: 1088597 - RNA, 19 nt, Artificial Sequence
  Description of Artificial Sequence: Synthetic oligonucleotide
  Antisense strand to SEQ ID NO: 1088596
uuugugguaaacaucuacg

SEQ ID NO: 1088598 - RNA, 19 nt, Artificial Sequence
  Description of Artificial Sequence: Synthetic oligonucleotide
  Sense strand starting at position 1430 of SEQ ID NO: 915555
aacggugcuccauaaaugu

SEQ ID NO: 1088599 - RNA, 19 nt, Artificial Sequence
  Description of Artificial Sequence: Synthetic oligonucleotide
  Antisense strand to SEQ ID NO: 1088598
acauuuauggagcaccguu

SEQ ID NO: 1088600 - RNA, 19 nt, Artificial Sequence
  Description of Artificial Sequence: Synthetic oligonucleotide
  Sense strand starting at position 1465 of SEQ ID NO: 915555
guaguaguccaagaucuaa

SEQ ID NO: 1088601 - RNA, 19 nt, Artificial Sequence
  Description of Artificial Sequence: Synthetic oligonucleotide
  Antisense strand to SEQ ID NO: 1088600
uuagaucuuggacuacuac

SEQ ID NO: 1088602 - RNA, 19 nt, Artificial Sequence
  Description of Artificial Sequence: Synthetic oligonucleotide
  Sense strand starting at position 2152 of SEQ ID NO: 915555
aguggcuucguggucuuua

SEQ ID NO: 1088603 - RNA, 19 nt, Artificial Sequence
  Description of Artificial Sequence: Synthetic oligonucleotide
  Antisense strand to SEQ ID NO: 1088602
uaaagaccacgaagccacu

SEQ ID NO: 1088604 - RNA, 19 nt, Artificial Sequence
  Description of Artificial Sequence: Synthetic oligonucleotide
  Sense strand starting at position 2245 of SEQ ID NO: 915555
gcacuaugccuucuguguu

SEQ ID NO: 1088605 - RNA, 19 nt, Artificial Sequence
  Description of Artificial Sequence: Synthetic oligonucleotide
  Antisense strand to SEQ ID NO: 1088604
aacacagaaggcauagugc

SEQ ID NO: 1088606 - RNA, 19 nt, Artificial Sequence
  Description of Artificial Sequence: Synthetic oligonucleotide
  Sense strand starting at position 2334 of SEQ ID NO: 915555
gggcuuugugaaggacaaa

SEQ ID NO: 1088607 - RNA, 19 nt, Artificial Sequence
  Description of Artificial Sequence: Synthetic oligonucleotide
  Antisense strand to SEQ ID NO: 1088606
uuuguccuucacaaagccc

SEQ ID NO: 1088608 - RNA, 19 nt, Artificial Sequence
  Description of Artificial Sequence: Synthetic oligonucleotide
  Sense strand starting at position 2417 of SEQ ID NO: 915555
gagcuccgugaggauaaau

SEQ ID NO: 1088609 - RNA, 19 nt, Artificial Sequence
  Description of Artificial Sequence: Synthetic oligonucleotide
  Antisense strand to SEQ ID NO: 1088608
auuuauccucacggagcuc

SEQ ID NO: 1088610 - RNA, 19 nt, Artificial Sequence
  Description of Artificial Sequence: Synthetic oligonucleotide
  Sense strand starting at position 2430 of SEQ ID NO: 915555
auaaauaacucugaggaga

SEQ ID NO: 1088611 - RNA, 19 nt, Artificial Sequence
  Description of Artificial Sequence: Synthetic oligonucleotide
  Antisense strand to SEQ ID NO: 1088610
ucuccucagaguuauuuau

SEQ ID NO: 1088612 - RNA, 19 nt, Artificial Sequence
  Description of Artificial Sequence: Synthetic oligonucleotide
  Sense strand starting at position 2498 of SEQ ID NO: 915555
ucgaaaugcccugaguuga

SEQ ID NO: 1088613 - RNA, 19 nt, Artificial Sequence
  Description of Artificial Sequence: Synthetic oligonucleotide
  Antisense strand to SEQ ID NO: 1088612
ucaacucagggcauuucga

SEQ ID NO: 1088614 - RNA, 19 nt, Artificial Sequence
  Description of Artificial Sequence: Synthetic oligonucleotide
  Sense strand starting at position 2575 of SEQ ID NO: 915555
agcucuguuguugcaguaa

SEQ ID NO: 1088615 - RNA, 19 nt, Artificial Sequence
  Description of Artificial Sequence: Synthetic oligonucleotide
  Antisense strand to SEQ ID NO: 1088614
uuacugcaacaacagagcu

SEQ ID NO: 1088616 - RNA, 19 nt, Artificial Sequence
  Description of Artificial Sequence: Synthetic oligonucleotide
  Sense strand starting at position 2578 of SEQ ID NO: 915555
ucuguuguugcaguaaguu

SEQ ID NO: 1088617 - RNA, 19 nt, Artificial Sequence
  Description of Artificial Sequence: Synthetic oligonucleotide
  Antisense strand to SEQ ID NO: 1088616
aacuuacugcaacaacaga

SEQ ID NO: 1088618 - RNA, 19 nt, Artificial Sequence
  Description of Artificial Sequence: Synthetic oligonucleotide
  Sense strand starting at position 2714 of SEQ ID NO: 915555
ugaguagcacuguacugua

SEQ ID NO: 1088619 - RNA, 19 nt, Artificial Sequence
  Description of Artificial Sequence: Synthetic oligonucleotide
  Antisense strand to SEQ ID NO: 1088618
uacaguacagugcuacuca

SEQ ID NO: 1088620 - RNA, 19 nt, Artificial Sequence
  Description of Artificial Sequence: Synthetic oligonucleotide
  Sense strand starting at position 2741 of SEQ ID NO: 915555
augucagggcccuauugau

SEQ ID NO: 1088621 - RNA, 19 nt, Artificial Sequence
  Description of Artificial Sequence: Synthetic oligonucleotide
  Antisense strand to SEQ ID NO: 1088620
aucaauagggcccugacau

SEQ ID NO: 1088622 - RNA, 19 nt, Artificial Sequence
  Description of Artificial Sequence: Synthetic oligonucleotide
  Sense strand starting at position 2758 of SEQ ID NO: 915555
auuugucugagguguuagu

SEQ ID NO: 1088623 - RNA, 19 nt, Artificial Sequence
  Description of Artificial Sequence: Synthetic oligonucleotide
  Antisense strand to SEQ ID NO: 1088622
acuaacaccucagacaaau

SEQ ID NO: 1088624 - RNA, 19 nt, Artificial Sequence
  Description of Artificial Sequence: Synthetic oligonucleotide
  Sense strand starting at position 2765 of SEQ ID NO: 915555
ugagguguuagugaagggu

SEQ ID NO: 1088625 - RNA, 19 nt, Artificial Sequence
  Description of Artificial Sequence: Synthetic oligonucleotide
  Antisense strand to SEQ ID NO: 1088624
acccuucacuaacaccuca

SEQ ID NO: 1088626 - RNA, 19 nt, Artificial Sequence
  Description of Artificial Sequence: Synthetic oligonucleotide
  Sense strand starting at position 2870 of SEQ ID NO: 915555
uaauguuccagguaggugu

SEQ ID NO: 1088627 - RNA, 19 nt, Artificial Sequence
  Description of Artificial Sequence: Synthetic oligonucleotide
  Antisense strand to SEQ ID NO: 1088626
acaccuaccuggaacauua

SEQ ID NO: 1088628 - RNA, 19 nt, Artificial Sequence
  Description of Artificial Sequence: Synthetic oligonucleotide
  Sense strand starting at position 3133 of SEQ ID NO: 915555
uccaaauugguguauguca

SEQ ID NO: 1088629 - RNA, 19 nt, Artificial Sequence
  Description of Artificial Sequence: Synthetic oligonucleotide
  Antisense strand to SEQ ID NO: 1088628
ugacauacaccaauuugga

SEQ ID NO: 1088630 - RNA, 19 nt, Artificial Sequence
  Description of Artificial Sequence: Synthetic oligonucleotide
  Sense strand starting at position 3297 of SEQ ID NO: 915555
ccauauaucgaucacguua

SEQ ID NO: 1088631 - RNA, 19 nt, Artificial Sequence
  Description of Artificial Sequence: Synthetic oligonucleotide
  Antisense strand to SEQ ID NO: 1088630
uaacgugaucgauauaugg

SEQ ID NO: 1088632 - RNA, 19 nt, Artificial Sequence
  Description of Artificial Sequence: Synthetic oligonucleotide
  Sense strand starting at position 3318 of SEQ ID NO: 915555
gucagaugauuugaauuga

SEQ ID NO: 1088633 - RNA, 19 nt, Artificial Sequence
  Description of Artificial Sequence: Synthetic oligonucleotide
  Antisense strand to SEQ ID NO: 1088632
ucaauucaaaucaucugac

SEQ ID NO: 1088634 - RNA, 19 nt, Artificial Sequence
  Description of Artificial Sequence: Synthetic oligonucleotide
  Sense strand starting at position 3362 of SEQ ID NO: 915555
aaguuaauagcauguuaga

SEQ ID NO: 1088635 - RNA, 19 nt, Artificial Sequence
  Description of Artificial Sequence: Synthetic oligonucleotide
  Antisense strand to SEQ ID NO: 1088634
ucuaacaugcuauuaacuu

SEQ ID NO: 1088636 - RNA, 19 nt, Artificial Sequence
  Description of Artificial Sequence: Synthetic oligonucleotide
  Sense strand starting at position 3396 of SEQ ID NO: 915555
guuguuuaugaauaagcuu

SEQ ID NO: 1088637 - RNA, 19 nt, Artificial Sequence
  Description of Artificial Sequence: Synthetic oligonucleotide
  Antisense strand to SEQ ID NO: 1088636
aagcuuauucauaaacaac

SEQ ID NO: 1088638 - RNA, 19 nt, Artificial Sequence
  Description of Artificial Sequence: Synthetic oligonucleotide
  Sense strand starting at position 3474 of SEQ ID NO: 915555
acagucugccucuaucuua

SEQ ID NO: 1088639 - RNA, 19 nt, Artificial Sequence
  Description of Artificial Sequence: Synthetic oligonucleotide
  Antisense strand to SEQ ID NO: 1088638
uaagauagaggcagacugu

SEQ ID NO: 1088640 - RNA, 19 nt, Artificial Sequence
  Description of Artificial Sequence: Synthetic oligonucleotide
  Sense strand starting at position 3511 of SEQ ID NO: 915555
auucuaugggccuauuauc

SEQ ID NO: 1088641 - RNA, 19 nt, Artificial Sequence
  Description of Artificial Sequence: Synthetic oligonucleotide
  Antisense strand to SEQ ID NO: 1088640
gauaauaggcccauagaau

SEQ ID NO: 1088642 - RNA, 19 nt, Artificial Sequence
  Description of Artificial Sequence: Synthetic oligonucleotide
  Sense strand starting at position 3516 of SEQ ID NO: 915555
augggccuauuaucuaaua

SEQ ID NO: 1088643 - RNA, 19 nt, Artificial Sequence
  Description of Artificial Sequence: Synthetic oligonucleotide
  Antisense strand to SEQ ID NO: 1088642
uauuagauaauaggcccau

SEQ ID NO: 1088644 - RNA, 19 nt, Artificial Sequence
  Description of Artificial Sequence: Synthetic oligonucleotide
  Sense strand starting at position 3626 of SEQ ID NO: 915555
auagaugcccacugauaua

SEQ ID NO: 1088645 - RNA, 19 nt, Artificial Sequence
  Description of Artificial Sequence: Synthetic oligonucleotide
  Antisense strand to SEQ ID NO: 1088644
uauaucagugggcaucuau

SEQ ID NO: 1088646 - RNA, 19 nt, Artificial Sequence
  Description of Artificial Sequence: Synthetic oligonucleotide
  Sense strand starting at position 3717 of SEQ ID NO: 915555
ccaggauucugcuccaaug

SEQ ID NO: 1088647 - RNA, 19 nt, Artificial Sequence
  Description of Artificial Sequence: Synthetic oligonucleotide
  Antisense strand to SEQ ID NO: 1088646
cauuggagcagaauccugg

SEQ ID NO: 1088648 - RNA, 19 nt, Artificial Sequence
  Description of Artificial Sequence: Synthetic oligonucleotide
  Sense strand starting at position 3772 of SEQ ID NO: 915555
gggaaccaguaauugugaa

SEQ ID NO: 1088649 - RNA, 19 nt, Artificial Sequence
  Description of Artificial Sequence: Synthetic oligonucleotide
  Antisense strand to SEQ ID NO: 1088648
uucacaauuacugguuccc

SEQ ID NO: 1088650 - RNA, 19 nt, Artificial Sequence
  Description of Artificial Sequence: Synthetic oligonucleotide
  Sense strand starting at position 3786 of SEQ ID NO: 915555
gugaacucaccaggguuaa

SEQ ID NO: 1088651 - RNA, 19 nt, Artificial Sequence
  Description of Artificial Sequence: Synthetic oligonucleotide
  Antisense strand to SEQ ID NO: 1088650
uuaacccuggugaguucac

SEQ ID NO: 1088652 - RNA, 19 nt, Artificial Sequence
  Description of Artificial Sequence: Synthetic oligonucleotide
  Sense strand starting at position 3817 of SEQ ID NO: 915555
augagagcuuauuccauaa

SEQ ID NO: 1088653 - RNA, 19 nt, Artificial Sequence
  Description of Artificial Sequence: Synthetic oligonucleotide
  Antisense strand to SEQ ID NO: 1088652
uuauggaauaagcucucau

SEQ ID NO: 1088654 - RNA, 19 nt, Artificial Sequence
  Description of Artificial Sequence: Synthetic oligonucleotide
  Sense strand starting at position 3836 of SEQ ID NO: 915555
ggaauugucugagacauuu

SEQ ID NO: 1088655 - RNA, 19 nt, Artificial Sequence
  Description of Artificial Sequence: Synthetic oligonucleotide
  Antisense strand to SEQ ID NO: 1088654
aaaugucucagacaauucc

SEQ ID NO: 1088656 - RNA, 19 nt, Artificial Sequence
  Description of Artificial Sequence: Synthetic oligonucleotide
  Sense strand starting at position 3905 of SEQ ID NO: 915555
ggcuguuugggauaauuag

SEQ ID NO: 1088657 - RNA, 19 nt, Artificial Sequence
  Description of Artificial Sequence: Synthetic oligonucleotide
  Antisense strand to SEQ ID NO: 1088656
cuaauuaucccaaacagcc

SEQ ID NO: 1088658 - RNA, 19 nt, Artificial Sequence
  Description of Artificial Sequence: Synthetic oligonucleotide
  Sense strand starting at position 3911 of SEQ ID NO: 915555
uugggauaauuagcuaauu

SEQ ID NO: 1088659 - RNA, 19 nt, Artificial Sequence
  Description of Artificial Sequence: Synthetic oligonucleotide
  Antisense strand to SEQ ID NO: 1088658
aauuagcuaauuaucccaa

SEQ ID NO: 1088660 - RNA, 19 nt, Artificial Sequence
  Description of Artificial Sequence: Synthetic oligonucleotide
  Sense strand starting at position 34 of SEQ ID NO: 915556
augcaagucacugaguguu

SEQ ID NO: 1088661 - RNA, 19 nt, Artificial Sequence
  Description of Artificial Sequence: Synthetic oligonucleotide
  Antisense strand to SEQ ID NO: 1088660
aacacucagugacuugcau

SEQ ID NO: 1088662 - RNA, 19 nt, Artificial Sequence
  Description of Artificial Sequence: Synthetic oligonucleotide
  Sense strand starting at position 40 of SEQ ID NO: 915556
gucacugaguguuuccuau

SEQ ID NO: 1088663 - RNA, 19 nt, Artificial Sequence
  Description of Artificial Sequence: Synthetic oligonucleotide
  Antisense strand to SEQ ID NO: 1088662
auaggaaacacucagugac

SEQ ID NO: 1088664 - RNA, 19 nt, Artificial Sequence
  Description of Artificial Sequence: Synthetic oligonucleotide
  Sense strand starting at position 46 of SEQ ID NO: 915556
gaguguuuccuauguauua

SEQ ID NO: 1088665 - RNA, 19 nt, Artificial Sequence
  Description of Artificial Sequence: Synthetic oligonucleotide
  Antisense strand to SEQ ID NO: 1088664
uaauacauaggaaacacuc

SEQ ID NO: 1088666 - RNA, 19 nt, Artificial Sequence
  Description of Artificial Sequence: Synthetic oligonucleotide
  Sense strand starting at position 47 of SEQ ID NO: 915556
aguguuuccuauguauuac

SEQ ID NO: 1088667 - RNA, 19 nt, Artificial Sequence
  Description of Artificial Sequence: Synthetic oligonucleotide
  Antisense strand to SEQ ID NO: 1088666
guaauacauaggaaacacu

SEQ ID NO: 1088668 - RNA, 19 nt, Artificial Sequence
  Description of Artificial Sequence: Synthetic oligonucleotide
  Sense strand starting at position 53 of SEQ ID NO: 915556
uccuauguauuacuuggua

SEQ ID NO: 1088669 - RNA, 19 nt, Artificial Sequence
  Description of Artificial Sequence: Synthetic oligonucleotide
  Antisense strand to SEQ ID NO: 1088668
uaccaaguaauacauagga

SEQ ID NO: 1088670 - RNA, 19 nt, Artificial Sequence
  Description of Artificial Sequence: Synthetic oligonucleotide
  Sense strand starting at position 57 of SEQ ID NO: 915556
auguauuacuugguacaaa

SEQ ID NO: 1088671 - RNA, 19 nt, Artificial Sequence
  Description of Artificial Sequence: Synthetic oligonucleotide
  Antisense strand to SEQ ID NO: 1088670
uuuguaccaaguaauacau

SEQ ID NO: 1088672 - RNA, 19 nt, Artificial Sequence
  Description of Artificial Sequence: Synthetic oligonucleotide
  Sense strand starting at position 134 of SEQ ID NO: 915556
ggccuuaagauaugggaag

SEQ ID NO: 1088673 - RNA, 19 nt, Artificial Sequence
  Description of Artificial Sequence: Synthetic oligonucleotide
  Antisense strand to SEQ ID NO: 1088672
cuucccauaucuuaaggcc

SEQ ID NO: 1088674 - RNA, 19 nt, Artificial Sequence
  Description of Artificial Sequence: Synthetic oligonucleotide
  Sense strand starting at position 396 of SEQ ID NO: 915556
gcagaaaguuuauagugca

SEQ ID NO: 1088675 - RNA, 19 nt, Artificial Sequence
  Description of Artificial Sequence: Synthetic oligonucleotide
  Antisense strand to SEQ ID NO: 1088674
ugcacuauaaacuuucugc

SEQ ID NO: 1088676 - RNA, 19 nt, Artificial Sequence
  Description of Artificial Sequence: Synthetic oligonucleotide
  Sense strand starting at position 399 of SEQ ID NO: 915556
gaaaguuuauagugcagag

SEQ ID NO: 1088677 - RNA, 19 nt, Artificial Sequence
  Description of Artificial Sequence: Synthetic oligonucleotide
  Antisense strand to SEQ ID NO: 1088676
cucugcacuauaaacuuuc

SEQ ID NO: 1088678 - RNA, 19 nt, Artificial Sequence
  Description of Artificial Sequence: Synthetic oligonucleotide
  Sense strand starting at position 401 of SEQ ID NO: 915556
aaguuuauagugcagagaa

SEQ ID NO: 1088679 - RNA, 19 nt, Artificial Sequence
  Description of Artificial Sequence: Synthetic oligonucleotide
  Antisense strand to SEQ ID NO: 1088678
uucucugcacuauaaacuu

SEQ ID NO: 1088680 - RNA, 19 nt, Artificial Sequence
  Description of Artificial Sequence: Synthetic oligonucleotide
  Sense strand starting at position 403 of SEQ ID NO: 915556
guuuauagugcagagaagu

SEQ ID NO: 1088681 - RNA, 19 nt, Artificial Sequence
  Description of Artificial Sequence: Synthetic oligonucleotide
  Antisense strand to SEQ ID NO: 1088680
acuucucugcacuauaaac

SEQ ID NO: 1088682 - RNA, 19 nt, Artificial Sequence
  Description of Artificial Sequence: Synthetic oligonucleotide
  Sense strand starting at position 465 of SEQ ID NO: 915556
gugucuauaucgagucgua

SEQ ID NO: 1088683 - RNA, 19 nt, Artificial Sequence
  Description of Artificial Sequence: Synthetic oligonucleotide
  Antisense strand to SEQ ID NO: 1088682
uacgacucgauauagacac

SEQ ID NO: 1088684 - RNA, 19 nt, Artificial Sequence
  Description of Artificial Sequence: Synthetic oligonucleotide
  Sense strand starting at position 540 of SEQ ID NO: 915556
accacugguuuaguaaaua

SEQ ID NO: 1088685 - RNA, 19 nt, Artificial Sequence
  Description of Artificial Sequence: Synthetic oligonucleotide
  Antisense strand to SEQ ID NO: 1088684
uauuuacuaaaccaguggu

SEQ ID NO: 1088686 - RNA, 19 nt, Artificial Sequence
  Description of Artificial Sequence: Synthetic oligonucleotide
  Sense strand starting at position 665 of SEQ ID NO: 915556
gcugaagacuaacaaaucu

SEQ ID NO: 1088687 - RNA, 19 nt, Artificial Sequence
  Description of Artificial Sequence: Synthetic oligonucleotide
  Antisense strand to SEQ ID NO: 1088686
agauuuguuagucuucagc

SEQ ID NO: 1088688 - RNA, 19 nt, Artificial Sequence
  Description of Artificial Sequence: Synthetic oligonucleotide
  Sense strand starting at position 773 of SEQ ID NO: 915556
cuagcuguuuccuugggaa

SEQ ID NO: 1088689 - RNA, 19 nt, Artificial Sequence
  Description of Artificial Sequence: Synthetic oligonucleotide
  Antisense strand to SEQ ID NO: 1088688
uucccaaggaaacagcuag

SEQ ID NO: 1088690 - RNA, 19 nt, Artificial Sequence
  Description of Artificial Sequence: Synthetic oligonucleotide
  Sense strand starting at position 1236 of SEQ ID NO: 915556
gcgggucggcuuucuucaa

SEQ ID NO: 1088691 - RNA, 19 nt, Artificial Sequence
  Description of Artificial Sequence: Synthetic oligonucleotide
  Antisense strand to SEQ ID NO: 1088690
uugaagaaagccgacccgc

SEQ ID NO: 1088692 - RNA, 19 nt, Artificial Sequence
  Description of Artificial Sequence: Synthetic oligonucleotide
  Sense strand starting at position 1237 of SEQ ID NO: 915556
cgggucggcuuucuucaaa

SEQ ID NO: 1088693 - RNA, 19 nt, Artificial Sequence
  Description of Artificial Sequence: Synthetic oligonucleotide
  Antisense strand to SEQ ID NO: 1088692
uuugaagaaagccgacccg

SEQ ID NO: 1088694 - RNA, 19 nt, Artificial Sequence
  Description of Artificial Sequence: Synthetic oligonucleotide
  Sense strand starting at position 2145 of SEQ ID NO: 915556
ccugucuaacccuaaaguu

SEQ ID NO: 1088695 - RNA, 19 nt, Artificial Sequence
  Description of Artificial Sequence: Synthetic oligonucleotide
  Antisense strand to SEQ ID NO: 1088694
aacuuuaggguuagacagg

SEQ ID NO: 1088696 - RNA, 19 nt, Artificial Sequence
  Description of Artificial Sequence: Synthetic oligonucleotide
  Sense strand starting at position 2212 of SEQ ID NO: 915556
ggacuaggccugugauccu

SEQ ID NO: 1088697 - RNA, 19 nt, Artificial Sequence
  Description of Artificial Sequence: Synthetic oligonucleotide
  Antisense strand to SEQ ID NO: 1088696
aggaucacaggccuagucc

SEQ ID NO: 1088698 - RNA, 19 nt, Artificial Sequence
  Description of Artificial Sequence: Synthetic oligonucleotide
  Sense strand starting at position 2474 of SEQ ID NO: 915556
gcgcuagaccucugcuaga

SEQ ID NO: 1088699 - RNA, 19 nt, Artificial Sequence
  Description of Artificial Sequence: Synthetic oligonucleotide
  Antisense strand to SEQ ID NO: 1088698
ucuagcagaggucuagcgc

SEQ ID NO: 1088700 - RNA, 19 nt, Artificial Sequence
  Description of Artificial Sequence: Synthetic oligonucleotide
  Sense strand starting at position 2556 of SEQ ID NO: 915556
agaaauuccucaugcagca

SEQ ID NO: 1088701 - RNA, 19 nt, Artificial Sequence
  Description of Artificial Sequence: Synthetic oligonucleotide
  Antisense strand to SEQ ID NO: 1088700
ugcugcaugaggaauuucu

SEQ ID NO: 1088702 - RNA, 19 nt, Artificial Sequence
  Description of Artificial Sequence: Synthetic oligonucleotide
  Sense strand starting at position 2572 of SEQ ID NO: 915556
gcaacuauuuauuguguac

SEQ ID NO: 1088703 - RNA, 19 nt, Artificial Sequence
  Description of Artificial Sequence: Synthetic oligonucleotide
  Antisense strand to SEQ ID NO: 1088702
guacacaauaaauaguugc

SEQ ID NO: 1088704 - RNA, 19 nt, Artificial Sequence
  Description of Artificial Sequence: Synthetic oligonucleotide
  Sense strand starting at position 2583 of SEQ ID NO: 915556
uuguguacucacuacaaua

SEQ ID NO: 1088705 - RNA, 19 nt, Artificial Sequence
  Description of Artificial Sequence: Synthetic oligonucleotide
  Antisense strand to SEQ ID NO: 1088704
uauuguagugaguacacaa

SEQ ID NO: 1088706 - RNA, 19 nt, Artificial Sequence
  Description of Artificial Sequence: Synthetic oligonucleotide
  Sense strand starting at position 2585 of SEQ ID NO: 915556
guguacucacuacaauacu

SEQ ID NO: 1088707 - RNA, 19 nt, Artificial Sequence
  Description of Artificial Sequence: Synthetic oligonucleotide
  Antisense strand to SEQ ID NO: 1088706
aguauuguagugaguacac

SEQ ID NO: 1088708 - RNA, 19 nt, Artificial Sequence
  Description of Artificial Sequence: Synthetic oligonucleotide
  Sense strand starting at position 2740 of SEQ ID NO: 915556
auguuuggcagcuaggaau

SEQ ID NO: 1088709 - RNA, 19 nt, Artificial Sequence
  Description of Artificial Sequence: Synthetic oligonucleotide
  Antisense strand to SEQ ID NO: 1088708
auuccuagcugccaaacau

SEQ ID NO: 1088710 - RNA, 19 nt, Artificial Sequence
  Description of Artificial Sequence: Synthetic oligonucleotide
  Sense strand starting at position 2747 of SEQ ID NO: 915556
gcagcuaggaaucagacau

SEQ ID NO: 1088711 - RNA, 19 nt, Artificial Sequence
  Description of Artificial Sequence: Synthetic oligonucleotide
  Antisense strand to SEQ ID NO: 1088710
augucugauuccuagcugc

SEQ ID NO: 1088712 - RNA, 19 nt, Artificial Sequence
  Description of Artificial Sequence: Synthetic oligonucleotide
  Sense strand starting at position 2774 of SEQ ID NO: 915556
gacugauagggcuguaaug

SEQ ID NO: 1088713 - RNA, 19 nt, Artificial Sequence
  Description of Artificial Sequence: Synthetic oligonucleotide
  Antisense strand to SEQ ID NO: 1088712
cauuacagcccuaucaguc

SEQ ID NO: 1088714 - RNA, 19 nt, Artificial Sequence
  Description of Artificial Sequence: Synthetic oligonucleotide
  Sense strand starting at position 3087 of SEQ ID NO: 915556
aggaacuccuuguuccuaa

SEQ ID NO: 1088715 - RNA, 19 nt, Artificial Sequence
  Description of Artificial Sequence: Synthetic oligonucleotide
  Antisense strand to SEQ ID NO: 1088714
uuaggaacaaggaguuccu

SEQ ID NO: 1088716 - RNA, 19 nt, Artificial Sequence
  Description of Artificial Sequence: Synthetic oligonucleotide
  Sense strand starting at position 3088 of SEQ ID NO: 915556
ggaacuccuuguuccuaaa

SEQ ID NO: 1088717 - RNA, 19 nt, Artificial Sequence
  Description of Artificial Sequence: Synthetic oligonucleotide
  Antisense strand to SEQ ID NO: 1088716
uuuaggaacaaggaguucc

SEQ ID NO: 1088718 - RNA, 19 nt, Artificial Sequence
  Description of Artificial Sequence: Synthetic oligonucleotide
  Sense strand starting at position 3118 of SEQ ID NO: 915556
gggcuacuuucagagagga

SEQ ID NO: 1088719 - RNA, 19 nt, Artificial Sequence
  Description of Artificial Sequence: Synthetic oligonucleotide
  Antisense strand to SEQ ID NO: 1088718
uccucucugaaaguagccc

SEQ ID NO: 1088720 - RNA, 19 nt, Artificial Sequence
  Description of Artificial Sequence: Synthetic oligonucleotide
  Sense strand starting at position 3180 of SEQ ID NO: 915556
aagccaagauugcugugua

SEQ ID NO: 1088721 - RNA, 19 nt, Artificial Sequence
  Description of Artificial Sequence: Synthetic oligonucleotide
  Antisense strand to SEQ ID NO: 1088720
uacacagcaaucuuggcuu

SEQ ID NO: 1088722 - RNA, 19 nt, Artificial Sequence
  Description of Artificial Sequence: Synthetic oligonucleotide
  Sense strand starting at position 3183 of SEQ ID NO: 915556
ccaagauugcuguguauuu

SEQ ID NO: 1088723 - RNA, 19 nt, Artificial Sequence
  Description of Artificial Sequence: Synthetic oligonucleotide
  Antisense strand to SEQ ID NO: 1088722
aaauacacagcaaucuugg

SEQ ID NO: 1088724 - RNA, 19 nt, Artificial Sequence
  Description of Artificial Sequence: Synthetic oligonucleotide
  Sense strand starting at position 3184 of SEQ ID NO: 915556
caagauugcuguguauuug

SEQ ID NO: 1088725 - RNA, 19 nt, Artificial Sequence
  Description of Artificial Sequence: Synthetic oligonucleotide
  Antisense strand to SEQ ID NO: 1088724
caaauacacagcaaucuug

SEQ ID NO: 1088726 - RNA, 19 nt, Artificial Sequence
  Description of Artificial Sequence: Synthetic oligonucleotide
  Sense strand starting at position 3356 of SEQ ID NO: 915556
ucagaccagugcucaaaga

SEQ ID NO: 1088727 - RNA, 19 nt, Artificial Sequence
  Description of Artificial Sequence: Synthetic oligonucleotide
  Antisense strand to SEQ ID NO: 1088726
ucuuugagcacuggucuga

SEQ ID NO: 1088728 - RNA, 19 nt, Artificial Sequence
  Description of Artificial Sequence: Synthetic oligonucleotide
  Sense strand starting at position 3357 of SEQ ID NO: 915556
cagaccagugcucaaagau

SEQ ID NO: 1088729 - RNA, 19 nt, Artificial Sequence
  Description of Artificial Sequence: Synthetic oligonucleotide
  Antisense strand to SEQ ID NO: 1088728
aucuuugagcacuggucug

SEQ ID NO: 1088730 - RNA, 19 nt, Artificial Sequence
  Description of Artificial Sequence: Synthetic oligonucleotide
  Sense strand starting at position 3366 of SEQ ID NO: 915556
gcucaaagauaauaagaga

SEQ ID NO: 1088731 - RNA, 19 nt, Artificial Sequence
  Description of Artificial Sequence: Synthetic oligonucleotide
  Antisense strand to SEQ ID NO: 1088730
ucucuuauuaucuuugagc

SEQ ID NO: 1088732 - RNA, 19 nt, Artificial Sequence
  Description of Artificial Sequence: Synthetic oligonucleotide
  Sense strand starting at position 3398 of SEQ ID NO: 915556
gcaugugccagauaagaag

SEQ ID NO: 1088733 - RNA, 19 nt, Artificial Sequence
  Description of Artificial Sequence: Synthetic oligonucleotide
  Antisense strand to SEQ ID NO: 1088732
cuucuuaucuggcacaugc

SEQ ID NO: 1088734 - RNA, 19 nt, Artificial Sequence
  Description of Artificial Sequence: Synthetic oligonucleotide
  Sense strand starting at position 3422 of SEQ ID NO: 915556
accagagguucugaaugga

SEQ ID NO: 1088735 - RNA, 19 nt, Artificial Sequence
  Description of Artificial Sequence: Synthetic oligonucleotide
  Antisense strand to SEQ ID NO: 1088734
uccauucagaaccucuggu

SEQ ID NO: 1088736 - RNA, 19 nt, Artificial Sequence
  Description of Artificial Sequence: Synthetic oligonucleotide
  Sense strand starting at position 3438 of SEQ ID NO: 915556
ggacuauaucucgagcaca

SEQ ID NO: 1088737 - RNA, 19 nt, Artificial Sequence
  Description of Artificial Sequence: Synthetic oligonucleotide
  Antisense strand to SEQ ID NO: 1088736
ugugcucgagauauagucc

SEQ ID NO: 1088738 - RNA, 19 nt, Artificial Sequence
  Description of Artificial Sequence: Synthetic oligonucleotide
  Sense strand starting at position 3683 of SEQ ID NO: 915556
caugcuguggcaugagaau

SEQ ID NO: 1088739 - RNA, 19 nt, Artificial Sequence
  Description of Artificial Sequence: Synthetic oligonucleotide
  Antisense strand to SEQ ID NO: 1088738
auucucaugccacagcaug

SEQ ID NO: 1088740 - RNA, 19 nt, Artificial Sequence
  Description of Artificial Sequence: Synthetic oligonucleotide
  Sense strand starting at position 5 of SEQ ID NO: 915557
cgcuguucagagcagugau

SEQ ID NO: 1088741 - RNA, 19 nt, Artificial Sequence
  Description of Artificial Sequence: Synthetic oligonucleotide
  Antisense strand to SEQ ID NO: 1088740
aucacugcucugaacagcg

SEQ ID NO: 1088742 - RNA, 19 nt, Artificial Sequence
  Description of Artificial Sequence: Synthetic oligonucleotide
  Sense strand starting at position 213 of SEQ ID NO: 915557
acugaagcucaauguuuaa

SEQ ID NO: 1088743 - RNA, 19 nt, Artificial Sequence
  Description of Artificial Sequence: Synthetic oligonucleotide
  Antisense strand to SEQ ID NO: 1088742
uuaaacauugagcuucagu

SEQ ID NO: 1088744 - RNA, 19 nt, Artificial Sequence
  Description of Artificial Sequence: Synthetic oligonucleotide
  Sense strand starting at position 216 of SEQ ID NO: 915557
gaagcucaauguuuaagga

SEQ ID NO: 1088745 - RNA, 19 nt, Artificial Sequence
  Description of Artificial Sequence: Synthetic oligonucleotide
  Antisense strand to SEQ ID NO: 1088744
uccuuaaacauugagcuuc

SEQ ID NO: 1088746 - RNA, 19 nt, Artificial Sequence
  Description of Artificial Sequence: Synthetic oligonucleotide
  Sense strand starting at position 505 of SEQ ID NO: 915557
uguaguuacugcucccaaa

SEQ ID NO: 1088747 - RNA, 19 nt, Artificial Sequence
  Description of Artificial Sequence: Synthetic oligonucleotide
  Antisense strand to SEQ ID NO: 1088746
uuugggagcaguaacuaca

SEQ ID NO: 1088748 - RNA, 19 nt, Artificial Sequence
  Description of Artificial Sequence: Synthetic oligonucleotide
  Sense strand starting at position 515 of SEQ ID NO: 915557
gcucccaaagaguguuaga

SEQ ID NO: 1088749 - RNA, 19 nt, Artificial Sequence
  Description of Artificial Sequence: Synthetic oligonucleotide
  Antisense strand to SEQ ID NO: 1088748
ucuaacacucuuugggagc

SEQ ID NO: 1088750 - RNA, 19 nt, Artificial Sequence
  Description of Artificial Sequence: Synthetic oligonucleotide
  Sense strand starting at position 567 of SEQ ID NO: 915557
aggugauugaaguggaaac

SEQ ID NO: 1088751 - RNA, 19 nt, Artificial Sequence
  Description of Artificial Sequence: Synthetic oligonucleotide
  Antisense strand to SEQ ID NO: 1088750
guuuccacuucaaucaccu

SEQ ID NO: 1088752 - RNA, 19 nt, Artificial Sequence
  Description of Artificial Sequence: Synthetic oligonucleotide
  Sense strand starting at position 603 of SEQ ID NO: 915557
gcccuccuagaguaaauga

SEQ ID NO: 1088753 - RNA, 19 nt, Artificial Sequence
  Description of Artificial Sequence: Synthetic oligonucleotide
  Antisense strand to SEQ ID NO: 1088752
ucauuuacucuaggagggc

SEQ ID NO: 1088754 - RNA, 19 nt, Artificial Sequence
  Description of Artificial Sequence: Synthetic oligonucleotide
  Sense strand starting at position 613 of SEQ ID NO: 915557
aguaaaugaggcuauguaa

SEQ ID NO: 1088755 - RNA, 19 nt, Artificial Sequence
  Description of Artificial Sequence: Synthetic oligonucleotide
  Antisense strand to SEQ ID NO: 1088754
uuacauagccucauuuacu

SEQ ID NO: 1088756 - RNA, 19 nt, Artificial Sequence
  Description of Artificial Sequence: Synthetic oligonucleotide
  Sense strand starting at position 616 of SEQ ID NO: 915557
aaaugaggcuauguaacuu

SEQ ID NO: 1088757 - RNA, 19 nt, Artificial Sequence
  Description of Artificial Sequence: Synthetic oligonucleotide
  Antisense strand to SEQ ID NO: 1088756
aaguuacauagccucauuu

SEQ ID NO: 1088758 - RNA, 19 nt, Artificial Sequence
  Description of Artificial Sequence: Synthetic oligonucleotide
  Sense strand starting at position 624 of SEQ ID NO: 915557
cuauguaacuuuguccaaa

SEQ ID NO: 1088759 - RNA, 19 nt, Artificial Sequence
  Description of Artificial Sequence: Synthetic oligonucleotide
  Antisense strand to SEQ ID NO: 1088758
uuuggacaaaguuacauag

SEQ ID NO: 1088760 - RNA, 19 nt, Artificial Sequence
  Description of Artificial Sequence: Synthetic oligonucleotide
  Sense strand starting at position 737 of SEQ ID NO: 915557
gucuuaugauagcccuauu

SEQ ID NO: 1088761 - RNA, 19 nt, Artificial Sequence
  Description of Artificial Sequence: Synthetic oligonucleotide
  Antisense strand to SEQ ID NO: 1088760
aauagggcuaucauaagac

SEQ ID NO: 1088762 - RNA, 19 nt, Artificial Sequence
  Description of Artificial Sequence: Synthetic oligonucleotide
  Sense strand starting at position 740 of SEQ ID NO: 915557
uuaugauagcccuauuaag

SEQ ID NO: 1088763 - RNA, 19 nt, Artificial Sequence
  Description of Artificial Sequence: Synthetic oligonucleotide
  Antisense strand to SEQ ID NO: 1088762
cuuaauagggcuaucauaa

SEQ ID NO: 1088764 - RNA, 19 nt, Artificial Sequence
  Description of Artificial Sequence: Synthetic oligonucleotide
  Sense strand starting at position 814 of SEQ ID NO: 915557
ggcuuaggacucugccuau

SEQ ID NO: 1088765 - RNA, 19 nt, Artificial Sequence
  Description of Artificial Sequence: Synthetic oligonucleotide
  Antisense strand to SEQ ID NO: 1088764
auaggcagaguccuaagcc

SEQ ID NO: 1088766 - RNA, 19 nt, Artificial Sequence
  Description of Artificial Sequence: Synthetic oligonucleotide
  Sense strand starting at position 818 of SEQ ID NO: 915557
uaggacucugccuauuagu

SEQ ID NO: 1088767 - RNA, 19 nt, Artificial Sequence
  Description of Artificial Sequence: Synthetic oligonucleotide
  Antisense strand to SEQ ID NO: 1088766
acuaauaggcagaguccua

SEQ ID NO: 1088768 - RNA, 19 nt, Artificial Sequence
  Description of Artificial Sequence: Synthetic oligonucleotide
  Sense strand starting at position 935 of SEQ ID NO: 915557
guuugaagaggucgagaag

SEQ ID NO: 1088769 - RNA, 19 nt, Artificial Sequence
  Description of Artificial Sequence: Synthetic oligonucleotide
  Antisense strand to SEQ ID NO: 1088768
cuucucgaccucuucaaac

SEQ ID NO: 1088770 - RNA, 19 nt, Artificial Sequence
  Description of Artificial Sequence: Synthetic oligonucleotide
  Sense strand starting at position 936 of SEQ ID NO: 915557
uuugaagaggucgagaagu

SEQ ID NO: 1088771 - RNA, 19 nt, Artificial Sequence
  Description of Artificial Sequence: Synthetic oligonucleotide
  Antisense strand to SEQ ID NO: 1088770
acuucucgaccucuucaaa

SEQ ID NO: 1088772 - RNA, 19 nt, Artificial Sequence
  Description of Artificial Sequence: Synthetic oligonucleotide
  Sense strand starting at position 1088 of SEQ ID NO: 915557
aauagaagcccucguucuu

SEQ ID NO: 1088773 - RNA, 19 nt, Artificial Sequence
  Description of Artificial Sequence: Synthetic oligonucleotide
  Antisense strand to SEQ ID NO: 1088772
aagaacgagggcuucuauu

SEQ ID NO: 1088774 - RNA, 19 nt, Artificial Sequence
  Description of Artificial Sequence: Synthetic oligonucleotide
  Sense strand starting at position 1635 of SEQ ID NO: 915557
ggacucucgcgccaggaaa

SEQ ID NO: 1088775 - RNA, 19 nt, Artificial Sequence
  Description of Artificial Sequence: Synthetic oligonucleotide
  Antisense strand to SEQ ID NO: 1088774
uuuccuggcgcgagagucc

SEQ ID NO: 1088776 - RNA, 19 nt, Artificial Sequence
  Description of Artificial Sequence: Synthetic oligonucleotide
  Sense strand starting at position 2035 of SEQ ID NO: 915557
gcggguguguuuaccaaag

SEQ ID NO: 1088777 - RNA, 19 nt, Artificial Sequence
  Description of Artificial Sequence: Synthetic oligonucleotide
  Antisense strand to SEQ ID NO: 1088776
cuuugguaaacacacccgc

SEQ ID NO: 1088778 - RNA, 19 nt, Artificial Sequence
  Description of Artificial Sequence: Synthetic oligonucleotide
  Sense strand starting at position 2237 of SEQ ID NO: 915557
ucgguauucucaucuguga

SEQ ID NO: 1088779 - RNA, 19 nt, Artificial Sequence
  Description of Artificial Sequence: Synthetic oligonucleotide
  Antisense strand to SEQ ID NO: 1088778
ucacagaugagaauaccga

SEQ ID NO: 1088780 - RNA, 19 nt, Artificial Sequence
  Description of Artificial Sequence: Synthetic oligonucleotide
  Sense strand starting at position 2445 of SEQ ID NO: 915557
aacggucuuuccuugggaa

SEQ ID NO: 1088781 - RNA, 19 nt, Artificial Sequence
  Description of Artificial Sequence: Synthetic oligonucleotide
  Antisense strand to SEQ ID NO: 1088780
uucccaaggaaagaccguu

SEQ ID NO: 1088782 - RNA, 19 nt, Artificial Sequence
  Description of Artificial Sequence: Synthetic oligonucleotide
  Sense strand starting at position 2815 of SEQ ID NO: 915557
aguggaucugcggaguuga

SEQ ID NO: 1088783 - RNA, 19 nt, Artificial Sequence
  Description of Artificial Sequence: Synthetic oligonucleotide
  Antisense strand to SEQ ID NO: 1088782
ucaacuccgcagauccacu

SEQ ID NO: 1088784 - RNA, 19 nt, Artificial Sequence
  Description of Artificial Sequence: Synthetic oligonucleotide
  Sense strand starting at position 2816 of SEQ ID NO: 915557
guggaucugcggaguugau

SEQ ID NO: 1088785 - RNA, 19 nt, Artificial Sequence
  Description of Artificial Sequence: Synthetic oligonucleotide
  Antisense strand to SEQ ID NO: 1088784
aucaacuccgcagauccac

SEQ ID NO: 1088786 - RNA, 19 nt, Artificial Sequence
  Description of Artificial Sequence: Synthetic oligonucleotide
  Sense strand starting at position 2823 of SEQ ID NO: 915557
ugcggaguugauaguugua

SEQ ID NO: 1088787 - RNA, 19 nt, Artificial Sequence
  Description of Artificial Sequence: Synthetic oligonucleotide
  Antisense strand to SEQ ID NO: 1088786
uacaacuaucaacuccgca

SEQ ID NO: 1088788 - RNA, 19 nt, Artificial Sequence
  Description of Artificial Sequence: Synthetic oligonucleotide
  Sense strand starting at position 2825 of SEQ ID NO: 915557
cggaguugauaguuguauu

SEQ ID NO: 1088789 - RNA, 19 nt, Artificial Sequence
  Description of Artificial Sequence: Synthetic oligonucleotide
  Antisense strand to SEQ ID NO: 1088788
aauacaacuaucaacuccg

SEQ ID NO: 1088790 - RNA, 19 nt, Artificial Sequence
  Description of Artificial Sequence: Synthetic oligonucleotide
  Sense strand starting at position 2828 of SEQ ID NO: 915557
aguugauaguuguauuuac

SEQ ID NO: 1088791 - RNA, 19 nt, Artificial Sequence
  Description of Artificial Sequence: Synthetic oligonucleotide
  Antisense strand to SEQ ID NO: 1088790
guaaauacaacuaucaacu

SEQ ID NO: 1088792 - RNA, 19 nt, Artificial Sequence
  Description of Artificial Sequence: Synthetic oligonucleotide
  Sense strand starting at position 3184 of SEQ ID NO: 915557
uagucagaucgaggucuga

SEQ ID NO: 1088793 - RNA, 19 nt, Artificial Sequence
  Description of Artificial Sequence: Synthetic oligonucleotide
  Antisense strand to SEQ ID NO: 1088792
ucagaccucgaucugacua

SEQ ID NO: 1088794 - RNA, 19 nt, Artificial Sequence
  Description of Artificial Sequence: Synthetic oligonucleotide
  Sense strand starting at position 3216 of SEQ ID NO: 915557
aacugacuacccuggguua

SEQ ID NO: 1088795 - RNA, 19 nt, Artificial Sequence
  Description of Artificial Sequence: Synthetic oligonucleotide
  Antisense strand to SEQ ID NO: 1088794
uaacccaggguagucaguu

SEQ ID NO: 1088796 - RNA, 19 nt, Artificial Sequence
  Description of Artificial Sequence: Synthetic oligonucleotide
  Sense strand starting at position 3308 of SEQ ID NO: 915557
gcccaaaggaaucgcgauu

SEQ ID NO: 1088797 - RNA, 19 nt, Artificial Sequence
  Description of Artificial Sequence: Synthetic oligonucleotide
  Antisense strand to SEQ ID NO: 1088796
aaucgcgauuccuuugggc

SEQ ID NO: 1088798 - RNA, 19 nt, Artificial Sequence
  Description of Artificial Sequence: Synthetic oligonucleotide
  Sense strand starting at position 3314 of SEQ ID NO: 915557
aggaaucgcgauugugaug

SEQ ID NO: 1088799 - RNA, 19 nt, Artificial Sequence
  Description of Artificial Sequence: Synthetic oligonucleotide
  Antisense strand to SEQ ID NO: 1088798
caucacaaucgcgauuccu

SEQ ID NO: 1088800 - RNA, 19 nt, Artificial Sequence
  Description of Artificial Sequence: Synthetic oligonucleotide
  Sense strand starting at position 3320 of SEQ ID NO: 915557
cgcgauugugaugcaggua

SEQ ID NO: 1088801 - RNA, 19 nt, Artificial Sequence
  Description of Artificial Sequence: Synthetic oligonucleotide
  Antisense strand to SEQ ID NO: 1088800
uaccugcaucacaaucgcg

SEQ ID NO: 1088802 - RNA, 19 nt, Artificial Sequence
  Description of Artificial Sequence: Synthetic oligonucleotide
  Sense strand starting at position 3321 of SEQ ID NO: 915557
gcgauugugaugcagguaa

SEQ ID NO: 1088803 - RNA, 19 nt, Artificial Sequence
  Description of Artificial Sequence: Synthetic oligonucleotide
  Antisense strand to SEQ ID NO: 1088802
uuaccugcaucacaaucgc

SEQ ID NO: 1088804 - RNA, 19 nt, Artificial Sequence
  Description of Artificial Sequence: Synthetic oligonucleotide
  Sense strand starting at position 3349 of SEQ ID NO: 915557
cauagcauuuggcauagua

SEQ ID NO: 1088805 - RNA, 19 nt, Artificial Sequence
  Description of Artificial Sequence: Synthetic oligonucleotide
  Antisense strand to SEQ ID NO: 1088804
uacuaugccaaaugcuaug

SEQ ID NO: 1088806 - RNA, 19 nt, Artificial Sequence
  Description of Artificial Sequence: Synthetic oligonucleotide
  Sense strand starting at position 3357 of SEQ ID NO: 915557
uuggcauaguaagcauaau

SEQ ID NO: 1088807 - RNA, 19 nt, Artificial Sequence
  Description of Artificial Sequence: Synthetic oligonucleotide
  Antisense strand to SEQ ID NO: 1088806
auuaugcuuacuaugccaa

SEQ ID NO: 1088808 - RNA, 19 nt, Artificial Sequence
  Description of Artificial Sequence: Synthetic oligonucleotide
  Sense strand starting at position 3380 of SEQ ID NO: 915557
auuguugcugcugucauua

SEQ ID NO: 1088809 - RNA, 19 nt, Artificial Sequence
  Description of Artificial Sequence: Synthetic oligonucleotide
  Antisense strand to SEQ ID NO: 1088808
uaaugacagcagcaacaau

SEQ ID NO: 1088810 - RNA, 19 nt, Artificial Sequence
  Description of Artificial Sequence: Synthetic oligonucleotide
  Sense strand starting at position 3502 of SEQ ID NO: 915557
acuacuaugguguggagua

SEQ ID NO: 1088811 - RNA, 19 nt, Artificial Sequence
  Description of Artificial Sequence: Synthetic oligonucleotide
  Antisense strand to SEQ ID NO: 1088810
uacuccacaccauaguagu

SEQ ID NO: 1088812 - RNA, 19 nt, Artificial Sequence
  Description of Artificial Sequence: Synthetic oligonucleotide
  Sense strand starting at position 3504 of SEQ ID NO: 915557
uacuaugguguggaguaau

SEQ ID NO: 1088813 - RNA, 19 nt, Artificial Sequence
  Description of Artificial Sequence: Synthetic oligonucleotide
  Antisense strand to SEQ ID NO: 1088812
auuacuccacaccauagua

SEQ ID NO: 1088814 - RNA, 19 nt, Artificial Sequence
  Description of Artificial Sequence: Synthetic oligonucleotide
  Sense strand starting at position 3545 of SEQ ID NO: 915557
gaguuuaauuguguguuaa

SEQ ID NO: 1088815 - RNA, 19 nt, Artificial Sequence
  Description of Artificial Sequence: Synthetic oligonucleotide
  Antisense strand to SEQ ID NO: 1088814
uuaacacacaauuaaacuc

SEQ ID NO: 1088816 - RNA, 19 nt, Artificial Sequence
  Description of Artificial Sequence: Synthetic oligonucleotide
  Sense strand starting at position 3546 of SEQ ID NO: 915557
aguuuaauuguguguuaag

SEQ ID NO: 1088817 - RNA, 19 nt, Artificial Sequence
  Description of Artificial Sequence: Synthetic oligonucleotide
  Antisense strand to SEQ ID NO: 1088816
cuuaacacacaauuaaacu

SEQ ID NO: 1088818 - RNA, 19 nt, Artificial Sequence
  Description of Artificial Sequence: Synthetic oligonucleotide
  Sense strand starting at position 3547 of SEQ ID NO: 915557
guuuaauuguguguuaaga

SEQ ID NO: 1088819 - RNA, 19 nt, Artificial Sequence
  Description of Artificial Sequence: Synthetic oligonucleotide
  Antisense strand to SEQ ID NO: 1088818
ucuuaacacacaauuaaac

SEQ ID NO: 1088820 - RNA, 19 nt, Artificial Sequence
  Description of Artificial Sequence: Synthetic oligonucleotide
  Sense strand starting at position 101 of SEQ ID NO: 915558
guuugaagaggucgagaag

SEQ ID NO: 1088821 - RNA, 19 nt, Artificial Sequence
  Description of Artificial Sequence: Synthetic oligonucleotide
  Antisense strand to SEQ ID NO: 1088820
cuucucgaccucuucaaac

SEQ ID NO: 1088822 - RNA, 19 nt, Artificial Sequence
  Description of Artificial Sequence: Synthetic oligonucleotide
  Sense strand starting at position 102 of SEQ ID NO: 915558
uuugaagaggucgagaagu

SEQ ID NO: 1088823 - RNA, 19 nt, Artificial Sequence
  Description of Artificial Sequence: Synthetic oligonucleotide
  Antisense strand to SEQ ID NO: 1088822
acuucucgaccucuucaaa

SEQ ID NO: 1088824 - RNA, 19 nt, Artificial Sequence
  Description of Artificial Sequence: Synthetic oligonucleotide
  Sense strand starting at position 254 of SEQ ID NO: 915558
aauagaagcccucguucuu

SEQ ID NO: 1088825 - RNA, 19 nt, Artificial Sequence
  Description of Artificial Sequence: Synthetic oligonucleotide
  Antisense strand to SEQ ID NO: 1088824
aagaacgagggcuucuauu

SEQ ID NO: 1088826 - RNA, 19 nt, Artificial Sequence
  Description of Artificial Sequence: Synthetic oligonucleotide
  Sense strand starting at position 616 of SEQ ID NO: 915558
gagccacuaucggaaacaa

SEQ ID NO: 1088827 - RNA, 19 nt, Artificial Sequence
  Description of Artificial Sequence: Synthetic oligonucleotide
  Antisense strand to SEQ ID NO: 1088826
uuguuuccgauaguggcuc

SEQ ID NO: 1088828 - RNA, 19 nt, Artificial Sequence
  Description of Artificial Sequence: Synthetic oligonucleotide
  Sense strand starting at position 801 of SEQ ID NO: 915558
ggacucucgcgccaggaaa

SEQ ID NO: 1088829 - RNA, 19 nt, Artificial Sequence
  Description of Artificial Sequence: Synthetic oligonucleotide
  Antisense strand to SEQ ID NO: 1088828
uuuccuggcgcgagagucc

SEQ ID NO: 1088830 - RNA, 19 nt, Artificial Sequence
  Description of Artificial Sequence: Synthetic oligonucleotide
  Sense strand starting at position 1199 of SEQ ID NO: 915558
gggcggguguguuuaccaa

SEQ ID NO: 1088831 - RNA, 19 nt, Artificial Sequence
  Description of Artificial Sequence: Synthetic oligonucleotide
  Antisense strand to SEQ ID NO: 1088830
uugguaaacacacccgccc

SEQ ID NO: 1088832 - RNA, 19 nt, Artificial Sequence
  Description of Artificial Sequence: Synthetic oligonucleotide
  Sense strand starting at position 1201 of SEQ ID NO: 915558
gcggguguguuuaccaaag

SEQ ID NO: 1088833 - RNA, 19 nt, Artificial Sequence
  Description of Artificial Sequence: Synthetic oligonucleotide
  Antisense strand to SEQ ID NO: 1088832
cuuugguaaacacacccgc

SEQ ID NO: 1088834 - RNA, 19 nt, Artificial Sequence
  Description of Artificial Sequence: Synthetic oligonucleotide
  Sense strand starting at position 1403 of SEQ ID NO: 915558
ucgguauucucaucuguga

SEQ ID NO: 1088835 - RNA, 19 nt, Artificial Sequence
  Description of Artificial Sequence: Synthetic oligonucleotide
  Antisense strand to SEQ ID NO: 1088834
ucacagaugagaauaccga

SEQ ID NO: 1088836 - RNA, 19 nt, Artificial Sequence
  Description of Artificial Sequence: Synthetic oligonucleotide
  Sense strand starting at position 1611 of SEQ ID NO: 915558
aacggucuuuccuugggaa

SEQ ID NO: 1088837 - RNA, 19 nt, Artificial Sequence
  Description of Artificial Sequence: Synthetic oligonucleotide
  Antisense strand to SEQ ID NO: 1088836
uucccaaggaaagaccguu

SEQ ID NO: 1088838 - RNA, 19 nt, Artificial Sequence
  Description of Artificial Sequence: Synthetic oligonucleotide
  Sense strand starting at position 1905 of SEQ ID NO: 915558
cgcugucuccucggaagaa

SEQ ID NO: 1088839 - RNA, 19 nt, Artificial Sequence
  Description of Artificial Sequence: Synthetic oligonucleotide
  Antisense strand to SEQ ID NO: 1088838
uucuuccgaggagacagcg

SEQ ID NO: 1088840 - RNA, 19 nt, Artificial Sequence
  Description of Artificial Sequence: Synthetic oligonucleotide
  Sense strand starting at position 1981 of SEQ ID NO: 915558
aguggaucugcggaguuga

SEQ ID NO: 1088841 - RNA, 19 nt, Artificial Sequence
  Description of Artificial Sequence: Synthetic oligonucleotide
  Antisense strand to SEQ ID NO: 1088840
ucaacuccgcagauccacu

SEQ ID NO: 1088842 - RNA, 19 nt, Artificial Sequence
  Description of Artificial Sequence: Synthetic oligonucleotide
  Sense strand starting at position 1982 of SEQ ID NO: 915558
guggaucugcggaguugau

SEQ ID NO: 1088843 - RNA, 19 nt, Artificial Sequence
  Description of Artificial Sequence: Synthetic oligonucleotide
  Antisense strand to SEQ ID NO: 1088842
aucaacuccgcagauccac

SEQ ID NO: 1088844 - RNA, 19 nt, Artificial Sequence
  Description of Artificial Sequence: Synthetic oligonucleotide
  Sense strand starting at position 1989 of SEQ ID NO: 915558
ugcggaguugauaguugua

SEQ ID NO: 1088845 - RNA, 19 nt, Artificial Sequence
  Description of Artificial Sequence: Synthetic oligonucleotide
  Antisense strand to SEQ ID NO: 1088844
uacaacuaucaacuccgca

SEQ ID NO: 1088846 - RNA, 19 nt, Artificial Sequence
  Description of Artificial Sequence: Synthetic oligonucleotide
  Sense strand starting at position 1991 of SEQ ID NO: 915558
cggaguugauaguuguauu

SEQ ID NO: 1088847 - RNA, 19 nt, Artificial Sequence
  Description of Artificial Sequence: Synthetic oligonucleotide
  Antisense strand to SEQ ID NO: 1088846
aauacaacuaucaacuccg

SEQ ID NO: 1088848 - RNA, 19 nt, Artificial Sequence
  Description of Artificial Sequence: Synthetic oligonucleotide
  Sense strand starting at position 1994 of SEQ ID NO: 915558
aguugauaguuguauuuac

SEQ ID NO: 1088849 - RNA, 19 nt, Artificial Sequence
  Description of Artificial Sequence: Synthetic oligonucleotide
  Antisense strand to SEQ ID NO: 1088848
guaaauacaacuaucaacu

SEQ ID NO: 1088850 - RNA, 19 nt, Artificial Sequence
  Description of Artificial Sequence: Synthetic oligonucleotide
  Sense strand starting at position 2350 of SEQ ID NO: 915558
uagucagaucgaggucuga

SEQ ID NO: 1088851 - RNA, 19 nt, Artificial Sequence
  Description of Artificial Sequence: Synthetic oligonucleotide
  Antisense strand to SEQ ID NO: 1088850
ucagaccucgaucugacua

SEQ ID NO: 1088852 - RNA, 19 nt, Artificial Sequence
  Description of Artificial Sequence: Synthetic oligonucleotide
  Sense strand starting at position 2382 of SEQ ID NO: 915558
aacugacuacccuggguua

SEQ ID NO: 1088853 - RNA, 19 nt, Artificial Sequence
  Description of Artificial Sequence: Synthetic oligonucleotide
  Antisense strand to SEQ ID NO: 1088852
uaacccaggguagucaguu

SEQ ID NO: 1088854 - RNA, 19 nt, Artificial Sequence
  Description of Artificial Sequence: Synthetic oligonucleotide
  Sense strand starting at position 2474 of SEQ ID NO: 915558
gcccaaaggaaucgcgauu

SEQ ID NO: 1088855 - RNA, 19 nt, Artificial Sequence
  Description of Artificial Sequence: Synthetic oligonucleotide
  Antisense strand to SEQ ID NO: 1088854
aaucgcgauuccuuugggc

SEQ ID NO: 1088856 - RNA, 19 nt, Artificial Sequence
  Description of Artificial Sequence: Synthetic oligonucleotide
  Sense strand starting at position 2480 of SEQ ID NO: 915558
aggaaucgcgauugugaug

SEQ ID NO: 1088857 - RNA, 19 nt, Artificial Sequence
  Description of Artificial Sequence: Synthetic oligonucleotide
  Antisense strand to SEQ ID NO: 1088856
caucacaaucgcgauuccu

SEQ ID NO: 1088858 - RNA, 19 nt, Artificial Sequence
  Description of Artificial Sequence: Synthetic oligonucleotide
  Sense strand starting at position 2486 of SEQ ID NO: 915558
cgcgauugugaugcaggua

SEQ ID NO: 1088859 - RNA, 19 nt, Artificial Sequence
  Description of Artificial Sequence: Synthetic oligonucleotide
  Antisense strand to SEQ ID NO: 1088858
uaccugcaucacaaucgcg

SEQ ID NO: 1088860 - RNA, 19 nt, Artificial Sequence
  Description of Artificial Sequence: Synthetic oligonucleotide
  Sense strand starting at position 2487 of SEQ ID NO: 915558
gcgauugugaugcagguaa

SEQ ID NO: 1088861 - RNA, 19 nt, Artificial Sequence
  Description of Artificial Sequence: Synthetic oligonucleotide
  Antisense strand to SEQ ID NO: 1088860
uuaccugcaucacaaucgc

SEQ ID NO: 1088862 - RNA, 19 nt, Artificial Sequence
  Description of Artificial Sequence: Synthetic oligonucleotide
  Sense strand starting at position 2515 of SEQ ID NO: 915558
cauagcauuuggcauagua

SEQ ID NO: 1088863 - RNA, 19 nt, Artificial Sequence
  Description of Artificial Sequence: Synthetic oligonucleotide
  Antisense strand to SEQ ID NO: 1088862
uacuaugccaaaugcuaug

SEQ ID NO: 1088864 - RNA, 19 nt, Artificial Sequence
  Description of Artificial Sequence: Synthetic oligonucleotide
  Sense strand starting at position 2523 of SEQ ID NO: 915558
uuggcauaguaagcauaau

SEQ ID NO: 1088865 - RNA, 19 nt, Artificial Sequence
  Description of Artificial Sequence: Synthetic oligonucleotide
  Antisense strand to SEQ ID NO: 1088864
auuaugcuuacuaugccaa

SEQ ID NO: 1088866 - RNA, 19 nt, Artificial Sequence
  Description of Artificial Sequence: Synthetic oligonucleotide
  Sense strand starting at position 2546 of SEQ ID NO: 915558
auuguugcugcugucauua

SEQ ID NO: 1088867 - RNA, 19 nt, Artificial Sequence
  Description of Artificial Sequence: Synthetic oligonucleotide
  Antisense strand to SEQ ID NO: 1088866
uaaugacagcagcaacaau

SEQ ID NO: 1088868 - RNA, 19 nt, Artificial Sequence
  Description of Artificial Sequence: Synthetic oligonucleotide
  Sense strand starting at position 2668 of SEQ ID NO: 915558
acuacuaugguguggagua

SEQ ID NO: 1088869 - RNA, 19 nt, Artificial Sequence
  Description of Artificial Sequence: Synthetic oligonucleotide
  Antisense strand to SEQ ID NO: 1088868
uacuccacaccauaguagu

SEQ ID NO: 1088870 - RNA, 19 nt, Artificial Sequence
  Description of Artificial Sequence: Synthetic oligonucleotide
  Sense strand starting at position 2670 of SEQ ID NO: 915558
uacuaugguguggaguaau

SEQ ID NO: 1088871 - RNA, 19 nt, Artificial Sequence
  Description of Artificial Sequence: Synthetic oligonucleotide
  Antisense strand to SEQ ID NO: 1088870
auuacuccacaccauagua

SEQ ID NO: 1088872 - RNA, 19 nt, Artificial Sequence
  Description of Artificial Sequence: Synthetic oligonucleotide
  Sense strand starting at position 2711 of SEQ ID NO: 915558
gaguuuaauuguguguuaa

SEQ ID NO: 1088873 - RNA, 19 nt, Artificial Sequence
  Description of Artificial Sequence: Synthetic oligonucleotide
  Antisense strand to SEQ ID NO: 1088872
uuaacacacaauuaaacuc

SEQ ID NO: 1088874 - RNA, 19 nt, Artificial Sequence
  Description of Artificial Sequence: Synthetic oligonucleotide
  Sense strand starting at position 2712 of SEQ ID NO: 915558
aguuuaauuguguguuaag

SEQ ID NO: 1088875 - RNA, 19 nt, Artificial Sequence
  Description of Artificial Sequence: Synthetic oligonucleotide
  Antisense strand to SEQ ID NO: 1088874
cuuaacacacaauuaaacu

SEQ ID NO: 1088876 - RNA, 19 nt, Artificial Sequence
  Description of Artificial Sequence: Synthetic oligonucleotide
  Sense strand starting at position 2713 of SEQ ID NO: 915558
guuuaauuguguguuaaga

SEQ ID NO: 1088877 - RNA, 19 nt, Artificial Sequence
  Description of Artificial Sequence: Synthetic oligonucleotide
  Antisense strand to SEQ ID NO: 1088876
ucuuaacacacaauuaaac

SEQ ID NO: 1088878 - RNA, 19 nt, Artificial Sequence
  Description of Artificial Sequence: Synthetic oligonucleotide
  Sense strand starting at position 3488 of SEQ ID NO: 915558
aaggcuuagcugugggaau

SEQ ID NO: 1088879 - RNA, 19 nt, Artificial Sequence
  Description of Artificial Sequence: Synthetic oligonucleotide
  Antisense strand to SEQ ID NO: 1088878
auucccacagcuaagccuu

SEQ ID NO: 1088880 - RNA, 19 nt, Artificial Sequence
  Description of Artificial Sequence: Synthetic oligonucleotide
  Sense strand starting at position 3513 of SEQ ID NO: 915558
aggaguucucgguggccaa

SEQ ID NO: 1088881 - RNA, 19 nt, Artificial Sequence
  Description of Artificial Sequence: Synthetic oligonucleotide
  Antisense strand to SEQ ID NO: 1088880
uuggccaccgagaacuccu

SEQ ID NO: 1088882 - RNA, 19 nt, Artificial Sequence
  Description of Artificial Sequence: Synthetic oligonucleotide
  Sense strand starting at position 3514 of SEQ ID NO: 915558
ggaguucucgguggccaaa

SEQ ID NO: 1088883 - RNA, 19 nt, Artificial Sequence
  Description of Artificial Sequence: Synthetic oligonucleotide
  Antisense strand to SEQ ID NO: 1088882
uuuggccaccgagaacucc

SEQ ID NO: 1088884 - RNA, 19 nt, Artificial Sequence
  Description of Artificial Sequence: Synthetic oligonucleotide
  Sense strand starting at position 3540 of SEQ ID NO: 915558
ucaggcucugaugguuuaa

SEQ ID NO: 1088885 - RNA, 19 nt, Artificial Sequence
  Description of Artificial Sequence: Synthetic oligonucleotide
  Antisense strand to SEQ ID NO: 1088884
uuaaaccaucagagccuga

SEQ ID NO: 1088886 - RNA, 19 nt, Artificial Sequence
  Description of Artificial Sequence: Synthetic oligonucleotide
  Sense strand starting at position 3589 of SEQ ID NO: 915558
cuuccagaucaaggucaaa

SEQ ID NO: 1088887 - RNA, 19 nt, Artificial Sequence
  Description of Artificial Sequence: Synthetic oligonucleotide
  Antisense strand to SEQ ID NO: 1088886
uuugaccuugaucuggaag

SEQ ID NO: 1088888 - RNA, 19 nt, Artificial Sequence
  Description of Artificial Sequence: Synthetic oligonucleotide
  Sense strand starting at position 3634 of SEQ ID NO: 915558
agagucaacuuucuaagcu

SEQ ID NO: 1088889 - RNA, 19 nt, Artificial Sequence
  Description of Artificial Sequence: Synthetic oligonucleotide
  Antisense strand to SEQ ID NO: 1088888
agcuuagaaaguugacucu

SEQ ID NO: 1088890 - RNA, 19 nt, Artificial Sequence
  Description of Artificial Sequence: Synthetic oligonucleotide
  Sense strand starting at position 3638 of SEQ ID NO: 915558
ucaacuuucuaagcuagga

SEQ ID NO: 1088891 - RNA, 19 nt, Artificial Sequence
  Description of Artificial Sequence: Synthetic oligonucleotide
  Antisense strand to SEQ ID NO: 1088890
uccuagcuuagaaaguuga

SEQ ID NO: 1088892 - RNA, 19 nt, Artificial Sequence
  Description of Artificial Sequence: Synthetic oligonucleotide
  Sense strand starting at position 3642 of SEQ ID NO: 915558
cuuucuaagcuaggagagu

SEQ ID NO: 1088893 - RNA, 19 nt, Artificial Sequence
  Description of Artificial Sequence: Synthetic oligonucleotide
  Antisense strand to SEQ ID NO: 1088892
acucuccuagcuuagaaag

SEQ ID NO: 1088894 - RNA, 19 nt, Artificial Sequence
  Description of Artificial Sequence: Synthetic oligonucleotide
  Sense strand starting at position 3662 of SEQ ID NO: 915558
auggaucccuuugagaaua

SEQ ID NO: 1088895 - RNA, 19 nt, Artificial Sequence
  Description of Artificial Sequence: Synthetic oligonucleotide
  Antisense strand to SEQ ID NO: 1088894
uauucucaaagggauccau

SEQ ID NO: 1088896 - RNA, 19 nt, Artificial Sequence
  Description of Artificial Sequence: Synthetic oligonucleotide
  Sense strand starting at position 3664 of SEQ ID NO: 915558
ggaucccuuugagaauaca

SEQ ID NO: 1088897 - RNA, 19 nt, Artificial Sequence
  Description of Artificial Sequence: Synthetic oligonucleotide
  Antisense strand to SEQ ID NO: 1088896
uguauucucaaagggaucc

SEQ ID NO: 1088898 - RNA, 19 nt, Artificial Sequence
  Description of Artificial Sequence: Synthetic oligonucleotide
  Sense strand starting at position 3875 of SEQ ID NO: 915558
uaggaugaucccugagccu

SEQ ID NO: 1088899 - RNA, 19 nt, Artificial Sequence
  Description of Artificial Sequence: Synthetic oligonucleotide
  Antisense strand to SEQ ID NO: 1088898
aggcucagggaucauccua

SEQ ID NO: 1088900 - RNA, 19 nt, Artificial Sequence
  Description of Artificial Sequence: Synthetic oligonucleotide
  Sense strand starting at position 125 of SEQ ID NO: 915559
ggcucaauucagcacguga

SEQ ID NO: 1088901 - RNA, 19 nt, Artificial Sequence
  Description of Artificial Sequence: Synthetic oligonucleotide
  Antisense strand to SEQ ID NO: 1088900
ucacgugcugaauugagcc

SEQ ID NO: 1088902 - RNA, 19 nt, Artificial Sequence
  Description of Artificial Sequence: Synthetic oligonucleotide
  Sense strand starting at position 209 of SEQ ID NO: 915559
gugggcaagucuagagaga

SEQ ID NO: 1088903 - RNA, 19 nt, Artificial Sequence
  Description of Artificial Sequence: Synthetic oligonucleotide
  Antisense strand to SEQ ID NO: 1088902
ucucucuagacuugcccac

SEQ ID NO: 1088904 - RNA, 19 nt, Artificial Sequence
  Description of Artificial Sequence: Synthetic oligonucleotide
  Sense strand starting at position 302 of SEQ ID NO: 915559
gcugucugacucuggauuu

SEQ ID NO: 1088905 - RNA, 19 nt, Artificial Sequence
  Description of Artificial Sequence: Synthetic oligonucleotide
  Antisense strand to SEQ ID NO: 1088904
aaauccagagucagacagc

SEQ ID NO: 1088906 - RNA, 19 nt, Artificial Sequence
  Description of Artificial Sequence: Synthetic oligonucleotide
  Sense strand starting at position 382 of SEQ ID NO: 915559
uugggacuuacauggcuau

SEQ ID NO: 1088907 - RNA, 19 nt, Artificial Sequence
  Description of Artificial Sequence: Synthetic oligonucleotide
  Antisense strand to SEQ ID NO: 1088906
auagccauguaagucccaa

SEQ ID NO: 1088908 - RNA, 19 nt, Artificial Sequence
  Description of Artificial Sequence: Synthetic oligonucleotide
  Sense strand starting at position 414 of SEQ ID NO: 915559
guggucuugaaccggucaa

SEQ ID NO: 1088909 - RNA, 19 nt, Artificial Sequence
  Description of Artificial Sequence: Synthetic oligonucleotide
  Antisense strand to SEQ ID NO: 1088908
uugaccgguucaagaccac

SEQ ID NO: 1088910 - RNA, 19 nt, Artificial Sequence
  Description of Artificial Sequence: Synthetic oligonucleotide
  Sense strand starting at position 415 of SEQ ID NO: 915559
uggucuugaaccggucaaa

SEQ ID NO: 1088911 - RNA, 19 nt, Artificial Sequence
  Description of Artificial Sequence: Synthetic oligonucleotide
  Antisense strand to SEQ ID NO: 1088910
uuugaccgguucaagacca

SEQ ID NO: 1088912 - RNA, 19 nt, Artificial Sequence
  Description of Artificial Sequence: Synthetic oligonucleotide
  Sense strand starting at position 418 of SEQ ID NO: 915559
ucuugaaccggucaaagau

SEQ ID NO: 1088913 - RNA, 19 nt, Artificial Sequence
  Description of Artificial Sequence: Synthetic oligonucleotide
  Antisense strand to SEQ ID NO: 1088912
aucuuugaccgguucaaga

SEQ ID NO: 1088914 - RNA, 19 nt, Artificial Sequence
  Description of Artificial Sequence: Synthetic oligonucleotide
  Sense strand starting at position 603 of SEQ ID NO: 915559
acagcuugucggucgcaaa

SEQ ID NO: 1088915 - RNA, 19 nt, Artificial Sequence
  Description of Artificial Sequence: Synthetic oligonucleotide
  Antisense strand to SEQ ID NO: 1088914
uuugcgaccgacaagcugu

SEQ ID NO: 1088916 - RNA, 19 nt, Artificial Sequence
  Description of Artificial Sequence: Synthetic oligonucleotide
  Sense strand starting at position 627 of SEQ ID NO: 915559
cccuuaagcugaguugaaa

SEQ ID NO: 1088917 - RNA, 19 nt, Artificial Sequence
  Description of Artificial Sequence: Synthetic oligonucleotide
  Antisense strand to SEQ ID NO: 1088916
uuucaacucagcuuaaggg

SEQ ID NO: 1088918 - RNA, 19 nt, Artificial Sequence
  Description of Artificial Sequence: Synthetic oligonucleotide
  Sense strand starting at position 873 of SEQ ID NO: 915559
gcaucugguccacacagau

SEQ ID NO: 1088919 - RNA, 19 nt, Artificial Sequence
  Description of Artificial Sequence: Synthetic oligonucleotide
  Antisense strand to SEQ ID NO: 1088918
aucuguguggaccagaugc

SEQ ID NO: 1088920 - RNA, 19 nt, Artificial Sequence
  Description of Artificial Sequence: Synthetic oligonucleotide
  Sense strand starting at position 1177 of SEQ ID NO: 915559
aaaccaucagcgggugauu

SEQ ID NO: 1088921 - RNA, 19 nt, Artificial Sequence
  Description of Artificial Sequence: Synthetic oligonucleotide
  Antisense strand to SEQ ID NO: 1088920
aaucacccgcugaugguuu

SEQ ID NO: 1088922 - RNA, 19 nt, Artificial Sequence
  Description of Artificial Sequence: Synthetic oligonucleotide
  Sense strand starting at position 1186 of SEQ ID NO: 915559
gcgggugauucucuggauc

SEQ ID NO: 1088923 - RNA, 19 nt, Artificial Sequence
  Description of Artificial Sequence: Synthetic oligonucleotide
  Antisense strand to SEQ ID NO: 1088922
gauccagagaaucacccgc

SEQ ID NO: 1088924 - RNA, 19 nt, Artificial Sequence
  Description of Artificial Sequence: Synthetic oligonucleotide
  Sense strand starting at position 1270 of SEQ ID NO: 915559
uuauuugugaggugcauua

SEQ ID NO: 1088925 - RNA, 19 nt, Artificial Sequence
  Description of Artificial Sequence: Synthetic oligonucleotide
  Antisense strand to SEQ ID NO: 1088924
uaaugcaccucacaaauaa

SEQ ID NO: 1088926 - RNA, 19 nt, Artificial Sequence
  Description of Artificial Sequence: Synthetic oligonucleotide
  Sense strand starting at position 1409 of SEQ ID NO: 915559
ccuggagucacaggugaga

SEQ ID NO: 1088927 - RNA, 19 nt, Artificial Sequence
  Description of Artificial Sequence: Synthetic oligonucleotide
  Antisense strand to SEQ ID NO: 1088926
ucucaccugugacuccagg

SEQ ID NO: 1088928 - RNA, 19 nt, Artificial Sequence
  Description of Artificial Sequence: Synthetic oligonucleotide
  Sense strand starting at position 1411 of SEQ ID NO: 915559
uggagucacaggugagaua

SEQ ID NO: 1088929 - RNA, 19 nt, Artificial Sequence
  Description of Artificial Sequence: Synthetic oligonucleotide
  Antisense strand to SEQ ID NO: 1088928
uaucucaccugugacucca

SEQ ID NO: 1088930 - RNA, 19 nt, Artificial Sequence
  Description of Artificial Sequence: Synthetic oligonucleotide
  Sense strand starting at position 1420 of SEQ ID NO: 915559
aggugagauaaacgacuua

SEQ ID NO: 1088931 - RNA, 19 nt, Artificial Sequence
  Description of Artificial Sequence: Synthetic oligonucleotide
  Antisense strand to SEQ ID NO: 1088930
uaagucguuuaucucaccu

SEQ ID NO: 1088932 - RNA, 19 nt, Artificial Sequence
  Description of Artificial Sequence: Synthetic oligonucleotide
  Sense strand starting at position 1471 of SEQ ID NO: 915559
ggagcuccugcgcucgaau

SEQ ID NO: 1088933 - RNA, 19 nt, Artificial Sequence
  Description of Artificial Sequence: Synthetic oligonucleotide
  Antisense strand to SEQ ID NO: 1088932
auucgagcgcaggagcucc

SEQ ID NO: 1088934 - RNA, 19 nt, Artificial Sequence
  Description of Artificial Sequence: Synthetic oligonucleotide
  Sense strand starting at position 1472 of SEQ ID NO: 915559
gagcuccugcgcucgaauu

SEQ ID NO: 1088935 - RNA, 19 nt, Artificial Sequence
  Description of Artificial Sequence: Synthetic oligonucleotide
  Antisense strand to SEQ ID NO: 1088934
aauucgagcgcaggagcuc

SEQ ID NO: 1088936 - RNA, 19 nt, Artificial Sequence
  Description of Artificial Sequence: Synthetic oligonucleotide
  Sense strand starting at position 2595 of SEQ ID NO: 915559
gccagacugcauugauuaa

SEQ ID NO: 1088937 - RNA, 19 nt, Artificial Sequence
  Description of Artificial Sequence: Synthetic oligonucleotide
  Antisense strand to SEQ ID NO: 1088936
uuaaucaaugcagucuggc

SEQ ID NO: 1088938 - RNA, 19 nt, Artificial Sequence
  Description of Artificial Sequence: Synthetic oligonucleotide
  Sense strand starting at position 2791 of SEQ ID NO: 915559
gagcuucuugcguauuaga

SEQ ID NO: 1088939 - RNA, 19 nt, Artificial Sequence
  Description of Artificial Sequence: Synthetic oligonucleotide
  Antisense strand to SEQ ID NO: 1088938
ucuaauacgcaagaagcuc

SEQ ID NO: 1088940 - RNA, 19 nt, Artificial Sequence
  Description of Artificial Sequence: Synthetic oligonucleotide
  Sense strand starting at position 3043 of SEQ ID NO: 915559
gcuacucacuaguuauaca

SEQ ID NO: 1088941 - RNA, 19 nt, Artificial Sequence
  Description of Artificial Sequence: Synthetic oligonucleotide
  Antisense strand to SEQ ID NO: 1088940
uguauaacuagugaguagc

SEQ ID NO: 1088942 - RNA, 19 nt, Artificial Sequence
  Description of Artificial Sequence: Synthetic oligonucleotide
  Sense strand starting at position 3090 of SEQ ID NO: 915559
ccuguaagacgaggacaau

SEQ ID NO: 1088943 - RNA, 19 nt, Artificial Sequence
  Description of Artificial Sequence: Synthetic oligonucleotide
  Antisense strand to SEQ ID NO: 1088942
auuguccucgucuuacagg

SEQ ID NO: 1088944 - RNA, 19 nt, Artificial Sequence
  Description of Artificial Sequence: Synthetic oligonucleotide
  Sense strand starting at position 3102 of SEQ ID NO: 915559
ggacaauaguaccuuaauu

SEQ ID NO: 1088945 - RNA, 19 nt, Artificial Sequence
  Description of Artificial Sequence: Synthetic oligonucleotide
  Antisense strand to SEQ ID NO: 1088944
aauuaagguacuauugucc

SEQ ID NO: 1088946 - RNA, 19 nt, Artificial Sequence
  Description of Artificial Sequence: Synthetic oligonucleotide
  Sense strand starting at position 3139 of SEQ ID NO: 915559
gaaguauaagaugggugua

SEQ ID NO: 1088947 - RNA, 19 nt, Artificial Sequence
  Description of Artificial Sequence: Synthetic oligonucleotide
  Antisense strand to SEQ ID NO: 1088946
uacacccaucuuauacuuc

SEQ ID NO: 1088948 - RNA, 19 nt, Artificial Sequence
  Description of Artificial Sequence: Synthetic oligonucleotide
  Sense strand starting at position 3140 of SEQ ID NO: 915559
aaguauaagauggguguau

SEQ ID NO: 1088949 - RNA, 19 nt, Artificial Sequence
  Description of Artificial Sequence: Synthetic oligonucleotide
  Antisense strand to SEQ ID NO: 1088948
auacacccaucuuauacuu

SEQ ID NO: 1088950 - RNA, 19 nt, Artificial Sequence
  Description of Artificial Sequence: Synthetic oligonucleotide
  Sense strand starting at position 3142 of SEQ ID NO: 915559
guauaagauggguguauga

SEQ ID NO: 1088951 - RNA, 19 nt, Artificial Sequence
  Description of Artificial Sequence: Synthetic oligonucleotide
  Antisense strand to SEQ ID NO: 1088950
ucauacacccaucuuauac

SEQ ID NO: 1088952 - RNA, 19 nt, Artificial Sequence
  Description of Artificial Sequence: Synthetic oligonucleotide
  Sense strand starting at position 3179 of SEQ ID NO: 915559
gugcuauaggcagauugua

SEQ ID NO: 1088953 - RNA, 19 nt, Artificial Sequence
  Description of Artificial Sequence: Synthetic oligonucleotide
  Antisense strand to SEQ ID NO: 1088952
uacaaucugccuauagcac

SEQ ID NO: 1088954 - RNA, 19 nt, Artificial Sequence
  Description of Artificial Sequence: Synthetic oligonucleotide
  Sense strand starting at position 3189 of SEQ ID NO: 915559
cagauuguaggguaguaga

SEQ ID NO: 1088955 - RNA, 19 nt, Artificial Sequence
  Description of Artificial Sequence: Synthetic oligonucleotide
  Antisense strand to SEQ ID NO: 1088954
ucuacuacccuacaaucug

SEQ ID NO: 1088956 - RNA, 19 nt, Artificial Sequence
  Description of Artificial Sequence: Synthetic oligonucleotide
  Sense strand starting at position 3215 of SEQ ID NO: 915559
gucugcaguuauguagaca

SEQ ID NO: 1088957 - RNA, 19 nt, Artificial Sequence
  Description of Artificial Sequence: Synthetic oligonucleotide
  Antisense strand to SEQ ID NO: 1088956
ugucuacauaacugcagac

SEQ ID NO: 1088958 - RNA, 19 nt, Artificial Sequence
  Description of Artificial Sequence: Synthetic oligonucleotide
  Sense strand starting at position 3544 of SEQ ID NO: 915559
gggaucaguaaguguggaa

SEQ ID NO: 1088959 - RNA, 19 nt, Artificial Sequence
  Description of Artificial Sequence: Synthetic oligonucleotide
  Antisense strand to SEQ ID NO: 1088958
uuccacacuuacugauccc

SEQ ID NO: 1088960 - RNA, 19 nt, Artificial Sequence
  Description of Artificial Sequence: Synthetic oligonucleotide
  Sense strand starting at position 3611 of SEQ ID NO: 915559
gaauguuaaucugcaggag

SEQ ID NO: 1088961 - RNA, 19 nt, Artificial Sequence
  Description of Artificial Sequence: Synthetic oligonucleotide
  Antisense strand to SEQ ID NO: 1088960
cuccugcagauuaacauuc

SEQ ID NO: 1088962 - RNA, 19 nt, Artificial Sequence
  Description of Artificial Sequence: Synthetic oligonucleotide
  Sense strand starting at position 3703 of SEQ ID NO: 915559
caggguucuguccaccuua

SEQ ID NO: 1088963 - RNA, 19 nt, Artificial Sequence
  Description of Artificial Sequence: Synthetic oligonucleotide
  Antisense strand to SEQ ID NO: 1088962
uaagguggacagaacccug

SEQ ID NO: 1088964 - RNA, 19 nt, Artificial Sequence
  Description of Artificial Sequence: Synthetic oligonucleotide
  Sense strand starting at position 3765 of SEQ ID NO: 915559
cccaucaaugucugcagaa

SEQ ID NO: 1088965 - RNA, 19 nt, Artificial Sequence
  Description of Artificial Sequence: Synthetic oligonucleotide
  Antisense strand to SEQ ID NO: 1088964
uucugcagacauugauggg

SEQ ID NO: 1088966 - RNA, 19 nt, Artificial Sequence
  Description of Artificial Sequence: Synthetic oligonucleotide
  Sense strand starting at position 3766 of SEQ ID NO: 915559
ccaucaaugucugcagaag

SEQ ID NO: 1088967 - RNA, 19 nt, Artificial Sequence
  Description of Artificial Sequence: Synthetic oligonucleotide
  Antisense strand to SEQ ID NO: 1088966
cuucugcagacauugaugg

SEQ ID NO: 1088968 - RNA, 19 nt, Artificial Sequence
  Description of Artificial Sequence: Synthetic oligonucleotide
  Sense strand starting at position 3767 of SEQ ID NO: 915559
caucaaugucugcagaaga

SEQ ID NO: 1088969 - RNA, 19 nt, Artificial Sequence
  Description of Artificial Sequence: Synthetic oligonucleotide
  Antisense strand to SEQ ID NO: 1088968
ucuucugcagacauugaug

SEQ ID NO: 1088970 - RNA, 19 nt, Artificial Sequence
  Description of Artificial Sequence: Synthetic oligonucleotide
  Sense strand starting at position 3856 of SEQ ID NO: 915559
ccauguucuuugguucgaa

SEQ ID NO: 1088971 - RNA, 19 nt, Artificial Sequence
  Description of Artificial Sequence: Synthetic oligonucleotide
  Antisense strand to SEQ ID NO: 1088970
uucgaaccaaagaacaugg

SEQ ID NO: 1088972 - RNA, 19 nt, Artificial Sequence
  Description of Artificial Sequence: Synthetic oligonucleotide
  Sense strand starting at position 3857 of SEQ ID NO: 915559
cauguucuuugguucgaau

SEQ ID NO: 1088973 - RNA, 19 nt, Artificial Sequence
  Description of Artificial Sequence: Synthetic oligonucleotide
  Antisense strand to SEQ ID NO: 1088972
auucgaaccaaagaacaug

SEQ ID NO: 1088974 - RNA, 19 nt, Artificial Sequence
  Description of Artificial Sequence: Synthetic oligonucleotide
  Sense strand starting at position 3892 of SEQ ID NO: 915559
ggcagaugcuauucugauc

SEQ ID NO: 1088975 - RNA, 19 nt, Artificial Sequence
  Description of Artificial Sequence: Synthetic oligonucleotide
  Antisense strand to SEQ ID NO: 1088974
gaucagaauagcaucugcc

SEQ ID NO: 1088976 - RNA, 19 nt, Artificial Sequence
  Description of Artificial Sequence: Synthetic oligonucleotide
  Sense strand starting at position 3920 of SEQ ID NO: 915559
cguggcuccaaugaggauu

SEQ ID NO: 1088977 - RNA, 19 nt, Artificial Sequence
  Description of Artificial Sequence: Synthetic oligonucleotide
  Antisense strand to SEQ ID NO: 1088976
aauccucauuggagccacg

SEQ ID NO: 1088978 - RNA, 19 nt, Artificial Sequence
  Description of Artificial Sequence: Synthetic oligonucleotide
  Sense strand starting at position 3936 of SEQ ID NO: 915559
auuaaugaguaacaucaga

SEQ ID NO: 1088979 - RNA, 19 nt, Artificial Sequence
  Description of Artificial Sequence: Synthetic oligonucleotide
  Antisense strand to SEQ ID NO: 1088978
ucugauguuacucauuaau

SEQ ID NO: 1088980 - RNA, 19 nt, Artificial Sequence
  Description of Artificial Sequence: Synthetic oligonucleotide
  Sense strand starting at position 186 of SEQ ID NO: 915560
ggcucaauucagcacguga

SEQ ID NO: 1088981 - RNA, 19 nt, Artificial Sequence
  Description of Artificial Sequence: Synthetic oligonucleotide
  Antisense strand to SEQ ID NO: 1088980
ucacgugcugaauugagcc

SEQ ID NO: 1088982 - RNA, 19 nt, Artificial Sequence
  Description of Artificial Sequence: Synthetic oligonucleotide
  Sense strand starting at position 270 of SEQ ID NO: 915560
gugggcaagucuagagaga

SEQ ID NO: 1088983 - RNA, 19 nt, Artificial Sequence
  Description of Artificial Sequence: Synthetic oligonucleotide
  Antisense strand to SEQ ID NO: 1088982
ucucucuagacuugcccac

SEQ ID NO: 1088984 - RNA, 19 nt, Artificial Sequence
  Description of Artificial Sequence: Synthetic oligonucleotide
  Sense strand starting at position 363 of SEQ ID NO: 915560
gcugucugacucuggauuu

SEQ ID NO: 1088985 - RNA, 19 nt, Artificial Sequence
  Description of Artificial Sequence: Synthetic oligonucleotide
  Antisense strand to SEQ ID NO: 1088984
aaauccagagucagacagc

SEQ ID NO: 1088986 - RNA, 19 nt, Artificial Sequence
  Description of Artificial Sequence: Synthetic oligonucleotide
  Sense strand starting at position 443 of SEQ ID NO: 915560
uugggacuuacauggcuau

SEQ ID NO: 1088987 - RNA, 19 nt, Artificial Sequence
  Description of Artificial Sequence: Synthetic oligonucleotide
  Antisense strand to SEQ ID NO: 1088986
auagccauguaagucccaa

SEQ ID NO: 1088988 - RNA, 19 nt, Artificial Sequence
  Description of Artificial Sequence: Synthetic oligonucleotide
  Sense strand starting at position 475 of SEQ ID NO: 915560
guggucuugaaccggucaa

SEQ ID NO: 1088989 - RNA, 19 nt, Artificial Sequence
  Description of Artificial Sequence: Synthetic oligonucleotide
  Antisense strand to SEQ ID NO: 1088988
uugaccgguucaagaccac

SEQ ID NO: 1088990 - RNA, 19 nt, Artificial Sequence
  Description of Artificial Sequence: Synthetic oligonucleotide
  Sense strand starting at position 476 of SEQ ID NO: 915560
uggucuugaaccggucaaa

SEQ ID NO: 1088991 - RNA, 19 nt, Artificial Sequence
  Description of Artificial Sequence: Synthetic oligonucleotide
  Antisense strand to SEQ ID NO: 1088990
uuugaccgguucaagacca

SEQ ID NO: 1088992 - RNA, 19 nt, Artificial Sequence
  Description of Artificial Sequence: Synthetic oligonucleotide
  Sense strand starting at position 479 of SEQ ID NO: 915560
ucuugaaccggucaaagau

SEQ ID NO: 1088993 - RNA, 19 nt, Artificial Sequence
  Description of Artificial Sequence: Synthetic oligonucleotide
  Antisense strand to SEQ ID NO: 1088992
aucuuugaccgguucaaga

SEQ ID NO: 1088994 - RNA, 19 nt, Artificial Sequence
  Description of Artificial Sequence: Synthetic oligonucleotide
  Sense strand starting at position 664 of SEQ ID NO: 915560
acagcuugucggucgcaaa

SEQ ID NO: 1088995 - RNA, 19 nt, Artificial Sequence
  Description of Artificial Sequence: Synthetic oligonucleotide
  Antisense strand to SEQ ID NO: 1088994
uuugcgaccgacaagcugu

SEQ ID NO: 1088996 - RNA, 19 nt, Artificial Sequence
  Description of Artificial Sequence: Synthetic oligonucleotide
  Sense strand starting at position 676 of SEQ ID NO: 915560
ucgcaaacuugucccuuaa

SEQ ID NO: 1088997 - RNA, 19 nt, Artificial Sequence
  Description of Artificial Sequence: Synthetic oligonucleotide
  Antisense strand to SEQ ID NO: 1088996
uuaagggacaaguuugcga

SEQ ID NO: 1088998 - RNA, 19 nt, Artificial Sequence
  Description of Artificial Sequence: Synthetic oligonucleotide
  Sense strand starting at position 688 of SEQ ID NO: 915560
cccuuaagcugaguugaaa

SEQ ID NO: 1088999 - RNA, 19 nt, Artificial Sequence
  Description of Artificial Sequence: Synthetic oligonucleotide
  Antisense strand to SEQ ID NO: 1088998
uuucaacucagcuuaaggg

SEQ ID NO: 1089000 - RNA, 19 nt, Artificial Sequence
  Description of Artificial Sequence: Synthetic oligonucleotide
  Sense strand starting at position 934 of SEQ ID NO: 915560
gcaucugguccacacagau

SEQ ID NO: 1089001 - RNA, 19 nt, Artificial Sequence
  Description of Artificial Sequence: Synthetic oligonucleotide
  Antisense strand to SEQ ID NO: 1089000
aucuguguggaccagaugc

SEQ ID NO: 1089002 - RNA, 19 nt, Artificial Sequence
  Description of Artificial Sequence: Synthetic oligonucleotide
  Sense strand starting at position 1238 of SEQ ID NO: 915560
aaaccaucagcgggugauu

SEQ ID NO: 1089003 - RNA, 19 nt, Artificial Sequence
  Description of Artificial Sequence: Synthetic oligonucleotide
  Antisense strand to SEQ ID NO: 1089002
aaucacccgcugaugguuu

SEQ ID NO: 1089004 - RNA, 19 nt, Artificial Sequence
  Description of Artificial Sequence: Synthetic oligonucleotide
  Sense strand starting at position 1247 of SEQ ID NO: 915560
gcgggugauucucuggauc

SEQ ID NO: 1089005 - RNA, 19 nt, Artificial Sequence
  Description of Artificial Sequence: Synthetic oligonucleotide
  Antisense strand to SEQ ID NO: 1089004
gauccagagaaucacccgc

SEQ ID NO: 1089006 - RNA, 19 nt, Artificial Sequence
  Description of Artificial Sequence: Synthetic oligonucleotide
  Sense strand starting at position 1331 of SEQ ID NO: 915560
uuauuugugaggugcauua

SEQ ID NO: 1089007 - RNA, 19 nt, Artificial Sequence
  Description of Artificial Sequence: Synthetic oligonucleotide
  Antisense strand to SEQ ID NO: 1089006
uaaugcaccucacaaauaa

SEQ ID NO: 1089008 - RNA, 19 nt, Artificial Sequence
  Description of Artificial Sequence: Synthetic oligonucleotide
  Sense strand starting at position 1470 of SEQ ID NO: 915560
ccuggagucacaggugaga

SEQ ID NO: 1089009 - RNA, 19 nt, Artificial Sequence
  Description of Artificial Sequence: Synthetic oligonucleotide
  Antisense strand to SEQ ID NO: 1089008
ucucaccugugacuccagg

SEQ ID NO: 1089010 - RNA, 19 nt, Artificial Sequence
  Description of Artificial Sequence: Synthetic oligonucleotide
  Sense strand starting at position 1472 of SEQ ID NO: 915560
uggagucacaggugagaua

SEQ ID NO: 1089011 - RNA, 19 nt, Artificial Sequence
  Description of Artificial Sequence: Synthetic oligonucleotide
  Antisense strand to SEQ ID NO: 1089010
uaucucaccugugacucca

SEQ ID NO: 1089012 - RNA, 19 nt, Artificial Sequence
  Description of Artificial Sequence: Synthetic oligonucleotide
  Sense strand starting at position 1481 of SEQ ID NO: 915560
aggugagauaaacgacuua

SEQ ID NO: 1089013 - RNA, 19 nt, Artificial Sequence
  Description of Artificial Sequence: Synthetic oligonucleotide
  Antisense strand to SEQ ID NO: 1089012
uaagucguuuaucucaccu

SEQ ID NO: 1089014 - RNA, 19 nt, Artificial Sequence
  Description of Artificial Sequence: Synthetic oligonucleotide
  Sense strand starting at position 1532 of SEQ ID NO: 915560
ggagcuccugcgcucgaau

SEQ ID NO: 1089015 - RNA, 19 nt, Artificial Sequence
  Description of Artificial Sequence: Synthetic oligonucleotide
  Antisense strand to SEQ ID NO: 1089014
auucgagcgcaggagcucc

SEQ ID NO: 1089016 - RNA, 19 nt, Artificial Sequence
  Description of Artificial Sequence: Synthetic oligonucleotide
  Sense strand starting at position 1533 of SEQ ID NO: 915560
gagcuccugcgcucgaauu

SEQ ID NO: 1089017 - RNA, 19 nt, Artificial Sequence
  Description of Artificial Sequence: Synthetic oligonucleotide
  Antisense strand to SEQ ID NO: 1089016
aauucgagcgcaggagcuc

SEQ ID NO: 1089018 - RNA, 19 nt, Artificial Sequence
  Description of Artificial Sequence: Synthetic oligonucleotide
  Sense strand starting at position 2656 of SEQ ID NO: 915560
gccagacugcauugauuaa

SEQ ID NO: 1089019 - RNA, 19 nt, Artificial Sequence
  Description of Artificial Sequence: Synthetic oligonucleotide
  Antisense strand to SEQ ID NO: 1089018
uuaaucaaugcagucuggc

SEQ ID NO: 1089020 - RNA, 19 nt, Artificial Sequence
  Description of Artificial Sequence: Synthetic oligonucleotide
  Sense strand starting at position 2852 of SEQ ID NO: 915560
gagcuucuugcguauuaga

SEQ ID NO: 1089021 - RNA, 19 nt, Artificial Sequence
  Description of Artificial Sequence: Synthetic oligonucleotide
  Antisense strand to SEQ ID NO: 1089020
ucuaauacgcaagaagcuc

SEQ ID NO: 1089022 - RNA, 19 nt, Artificial Sequence
  Description of Artificial Sequence: Synthetic oligonucleotide
  Sense strand starting at position 3104 of SEQ ID NO: 915560
gcuacucacuaguuauaca

SEQ ID NO: 1089023 - RNA, 19 nt, Artificial Sequence
  Description of Artificial Sequence: Synthetic oligonucleotide
  Antisense strand to SEQ ID NO: 1089022
uguauaacuagugaguagc

SEQ ID NO: 1089024 - RNA, 19 nt, Artificial Sequence
  Description of Artificial Sequence: Synthetic oligonucleotide
  Sense strand starting at position 3151 of SEQ ID NO: 915560
ccuguaagacgaggacaau

SEQ ID NO: 1089025 - RNA, 19 nt, Artificial Sequence
  Description of Artificial Sequence: Synthetic oligonucleotide
  Antisense strand to SEQ ID NO: 1089024
auuguccucgucuuacagg

SEQ ID NO: 1089026 - RNA, 19 nt, Artificial Sequence
  Description of Artificial Sequence: Synthetic oligonucleotide
  Sense strand starting at position 3163 of SEQ ID NO: 915560
ggacaauaguaccuuaauu

SEQ ID NO: 1089027 - RNA, 19 nt, Artificial Sequence
  Description of Artificial Sequence: Synthetic oligonucleotide
  Antisense strand to SEQ ID NO: 1089026
aauuaagguacuauugucc

SEQ ID NO: 1089028 - RNA, 19 nt, Artificial Sequence
  Description of Artificial Sequence: Synthetic oligonucleotide
  Sense strand starting at position 3200 of SEQ ID NO: 915560
gaaguauaagaugggugua

SEQ ID NO: 1089029 - RNA, 19 nt, Artificial Sequence
  Description of Artificial Sequence: Synthetic oligonucleotide
  Antisense strand to SEQ ID NO: 1089028
uacacccaucuuauacuuc

SEQ ID NO: 1089030 - RNA, 19 nt, Artificial Sequence
  Description of Artificial Sequence: Synthetic oligonucleotide
  Sense strand starting at position 3201 of SEQ ID NO: 915560
aaguauaagauggguguau

SEQ ID NO: 1089031 - RNA, 19 nt, Artificial Sequence
  Description of Artificial Sequence: Synthetic oligonucleotide
  Antisense strand to SEQ ID NO: 1089030
auacacccaucuuauacuu

SEQ ID NO: 1089032 - RNA, 19 nt, Artificial Sequence
  Description of Artificial Sequence: Synthetic oligonucleotide
  Sense strand starting at position 3203 of SEQ ID NO: 915560
guauaagauggguguauga

SEQ ID NO: 1089033 - RNA, 19 nt, Artificial Sequence
  Description of Artificial Sequence: Synthetic oligonucleotide
  Antisense strand to SEQ ID NO: 1089032
ucauacacccaucuuauac

SEQ ID NO: 1089034 - RNA, 19 nt, Artificial Sequence
  Description of Artificial Sequence: Synthetic oligonucleotide
  Sense strand starting at position 3240 of SEQ ID NO: 915560
gugcuauaggcagauugua

SEQ ID NO: 1089035 - RNA, 19 nt, Artificial Sequence
  Description of Artificial Sequence: Synthetic oligonucleotide
  Antisense strand to SEQ ID NO: 1089034
uacaaucugccuauagcac

SEQ ID NO: 1089036 - RNA, 19 nt, Artificial Sequence
  Description of Artificial Sequence: Synthetic oligonucleotide
  Sense strand starting at position 3250 of SEQ ID NO: 915560
cagauuguaggguaguaga

SEQ ID NO: 1089037 - RNA, 19 nt, Artificial Sequence
  Description of Artificial Sequence: Synthetic oligonucleotide
  Antisense strand to SEQ ID NO: 1089036
ucuacuacccuacaaucug

SEQ ID NO: 1089038 - RNA, 19 nt, Artificial Sequence
  Description of Artificial Sequence: Synthetic oligonucleotide
  Sense strand starting at position 3276 of SEQ ID NO: 915560
gucugcaguuauguagaca

SEQ ID NO: 1089039 - RNA, 19 nt, Artificial Sequence
  Description of Artificial Sequence: Synthetic oligonucleotide
  Antisense strand to SEQ ID NO: 1089038
ugucuacauaacugcagac

SEQ ID NO: 1089040 - RNA, 19 nt, Artificial Sequence
  Description of Artificial Sequence: Synthetic oligonucleotide
  Sense strand starting at position 3605 of SEQ ID NO: 915560
gggaucaguaaguguggaa

SEQ ID NO: 1089041 - RNA, 19 nt, Artificial Sequence
  Description of Artificial Sequence: Synthetic oligonucleotide
  Antisense strand to SEQ ID NO: 1089040
uuccacacuuacugauccc

SEQ ID NO: 1089042 - RNA, 19 nt, Artificial Sequence
  Description of Artificial Sequence: Synthetic oligonucleotide
  Sense strand starting at position 3672 of SEQ ID NO: 915560
gaauguuaaucugcaggag

SEQ ID NO: 1089043 - RNA, 19 nt, Artificial Sequence
  Description of Artificial Sequence: Synthetic oligonucleotide
  Antisense strand to SEQ ID NO: 1089042
cuccugcagauuaacauuc

SEQ ID NO: 1089044 - RNA, 19 nt, Artificial Sequence
  Description of Artificial Sequence: Synthetic oligonucleotide
  Sense strand starting at position 3764 of SEQ ID NO: 915560
caggguucuguccaccuua

SEQ ID NO: 1089045 - RNA, 19 nt, Artificial Sequence
  Description of Artificial Sequence: Synthetic oligonucleotide
  Antisense strand to SEQ ID NO: 1089044
uaagguggacagaacccug

SEQ ID NO: 1089046 - RNA, 19 nt, Artificial Sequence
  Description of Artificial Sequence: Synthetic oligonucleotide
  Sense strand starting at position 3826 of SEQ ID NO: 915560
cccaucaaugucugcagaa

SEQ ID NO: 1089047 - RNA, 19 nt, Artificial Sequence
  Description of Artificial Sequence: Synthetic oligonucleotide
  Antisense strand to SEQ ID NO: 1089046
uucugcagacauugauggg

SEQ ID NO: 1089048 - RNA, 19 nt, Artificial Sequence
  Description of Artificial Sequence: Synthetic oligonucleotide
  Sense strand starting at position 3827 of SEQ ID NO: 915560
ccaucaaugucugcagaag

SEQ ID NO: 1089049 - RNA, 19 nt, Artificial Sequence
  Description of Artificial Sequence: Synthetic oligonucleotide
  Antisense strand to SEQ ID NO: 1089048
cuucugcagacauugaugg

SEQ ID NO: 1089050 - RNA, 19 nt, Artificial Sequence
  Description of Artificial Sequence: Synthetic oligonucleotide
  Sense strand starting at position 3828 of SEQ ID NO: 915560
caucaaugucugcagaaga

SEQ ID NO: 1089051 - RNA, 19 nt, Artificial Sequence
  Description of Artificial Sequence: Synthetic oligonucleotide
  Antisense strand to SEQ ID NO: 1089050
ucuucugcagacauugaug

SEQ ID NO: 1089052 - RNA, 19 nt, Artificial Sequence
  Description of Artificial Sequence: Synthetic oligonucleotide
  Sense strand starting at position 3917 of SEQ ID NO: 915560
ccauguucuuugguucgaa

SEQ ID NO: 1089053 - RNA, 19 nt, Artificial Sequence
  Description of Artificial Sequence: Synthetic oligonucleotide
  Antisense strand to SEQ ID NO: 1089052
uucgaaccaaagaacaugg

SEQ ID NO: 1089054 - RNA, 19 nt, Artificial Sequence
  Description of Artificial Sequence: Synthetic oligonucleotide
  Sense strand starting at position 3918 of SEQ ID NO: 915560
cauguucuuugguucgaau

SEQ ID NO: 1089055 - RNA, 19 nt, Artificial Sequence
  Description of Artificial Sequence: Synthetic oligonucleotide
  Antisense strand to SEQ ID NO: 1089054
auucgaaccaaagaacaug

SEQ ID NO: 1089056 - RNA, 19 nt, Artificial Sequence
  Description of Artificial Sequence: Synthetic oligonucleotide
  Sense strand starting at position 3953 of SEQ ID NO: 915560
ggcagaugcuauucugauc

SEQ ID NO: 1089057 - RNA, 19 nt, Artificial Sequence
  Description of Artificial Sequence: Synthetic oligonucleotide
  Antisense strand to SEQ ID NO: 1089056
gaucagaauagcaucugcc

SEQ ID NO: 1089058 - RNA, 19 nt, Artificial Sequence
  Description of Artificial Sequence: Synthetic oligonucleotide
  Sense strand starting at position 3981 of SEQ ID NO: 915560
cguggcuccaaugaggauu

SEQ ID NO: 1089059 - RNA, 19 nt, Artificial Sequence
  Description of Artificial Sequence: Synthetic oligonucleotide
  Antisense strand to SEQ ID NO: 1089058
aauccucauuggagccacg

SEQ ID NO: 1089060 - RNA, 19 nt, Artificial Sequence
  Description of Artificial Sequence: Synthetic oligonucleotide
  Sense strand starting at position 171 of SEQ ID NO: 915561
acagcuugucggucgcaaa

SEQ ID NO: 1089061 - RNA, 19 nt, Artificial Sequence
  Description of Artificial Sequence: Synthetic oligonucleotide
  Antisense strand to SEQ ID NO: 1089060
uuugcgaccgacaagcugu

SEQ ID NO: 1089062 - RNA, 19 nt, Artificial Sequence
  Description of Artificial Sequence: Synthetic oligonucleotide
  Sense strand starting at position 183 of SEQ ID NO: 915561
ucgcaaacuugucccuuaa

SEQ ID NO: 1089063 - RNA, 19 nt, Artificial Sequence
  Description of Artificial Sequence: Synthetic oligonucleotide
  Antisense strand to SEQ ID NO: 1089062
uuaagggacaaguuugcga

SEQ ID NO: 1089064 - RNA, 19 nt, Artificial Sequence
  Description of Artificial Sequence: Synthetic oligonucleotide
  Sense strand starting at position 195 of SEQ ID NO: 915561
cccuuaagcugaguugaaa

SEQ ID NO: 1089065 - RNA, 19 nt, Artificial Sequence
  Description of Artificial Sequence: Synthetic oligonucleotide
  Antisense strand to SEQ ID NO: 1089064
uuucaacucagcuuaaggg

SEQ ID NO: 1089066 - RNA, 19 nt, Artificial Sequence
  Description of Artificial Sequence: Synthetic oligonucleotide
  Sense strand starting at position 441 of SEQ ID NO: 915561
gcaucugguccacacagau

SEQ ID NO: 1089067 - RNA, 19 nt, Artificial Sequence
  Description of Artificial Sequence: Synthetic oligonucleotide
  Antisense strand to SEQ ID NO: 1089066
aucuguguggaccagaugc

SEQ ID NO: 1089068 - RNA, 19 nt, Artificial Sequence
  Description of Artificial Sequence: Synthetic oligonucleotide
  Sense strand starting at position 745 of SEQ ID NO: 915561
aaaccaucagcgggugauu

SEQ ID NO: 1089069 - RNA, 19 nt, Artificial Sequence
  Description of Artificial Sequence: Synthetic oligonucleotide
  Antisense strand to SEQ ID NO: 1089068
aaucacccgcugaugguuu

SEQ ID NO: 1089070 - RNA, 19 nt, Artificial Sequence
  Description of Artificial Sequence: Synthetic oligonucleotide
  Sense strand starting at position 754 of SEQ ID NO: 915561
gcgggugauucucuggauc

SEQ ID NO: 1089071 - RNA, 19 nt, Artificial Sequence
  Description of Artificial Sequence: Synthetic oligonucleotide
  Antisense strand to SEQ ID NO: 1089070
gauccagagaaucacccgc

SEQ ID NO: 1089072 - RNA, 19 nt, Artificial Sequence
  Description of Artificial Sequence: Synthetic oligonucleotide
  Sense strand starting at position 838 of SEQ ID NO: 915561
uuauuugugaggugcauua

SEQ ID NO: 1089073 - RNA, 19 nt, Artificial Sequence
  Description of Artificial Sequence: Synthetic oligonucleotide
  Antisense strand to SEQ ID NO: 1089072
uaaugcaccucacaaauaa

SEQ ID NO: 1089074 - RNA, 19 nt, Artificial Sequence
  Description of Artificial Sequence: Synthetic oligonucleotide
  Sense strand starting at position 977 of SEQ ID NO: 915561
ccuggagucacaggugaga

SEQ ID NO: 1089075 - RNA, 19 nt, Artificial Sequence
  Description of Artificial Sequence: Synthetic oligonucleotide
  Antisense strand to SEQ ID NO: 1089074
ucucaccugugacuccagg

SEQ ID NO: 1089076 - RNA, 19 nt, Artificial Sequence
  Description of Artificial Sequence: Synthetic oligonucleotide
  Sense strand starting at position 979 of SEQ ID NO: 915561
uggagucacaggugagaua

SEQ ID NO: 1089077 - RNA, 19 nt, Artificial Sequence
  Description of Artificial Sequence: Synthetic oligonucleotide
  Antisense strand to SEQ ID NO: 1089076
uaucucaccugugacucca

SEQ ID NO: 1089078 - RNA, 19 nt, Artificial Sequence
  Description of Artificial Sequence: Synthetic oligonucleotide
  Sense strand starting at position 988 of SEQ ID NO: 915561
aggugagauaaacgacuua

SEQ ID NO: 1089079 - RNA, 19 nt, Artificial Sequence
  Description of Artificial Sequence: Synthetic oligonucleotide
  Antisense strand to SEQ ID NO: 1089078
uaagucguuuaucucaccu

SEQ ID NO: 1089080 - RNA, 19 nt, Artificial Sequence
  Description of Artificial Sequence: Synthetic oligonucleotide
  Sense strand starting at position 1039 of SEQ ID NO: 915561
ggagcuccugcgcucgaau

SEQ ID NO: 1089081 - RNA, 19 nt, Artificial Sequence
  Description of Artificial Sequence: Synthetic oligonucleotide
  Antisense strand to SEQ ID NO: 1089080
auucgagcgcaggagcucc

SEQ ID NO: 1089082 - RNA, 19 nt, Artificial Sequence
  Description of Artificial Sequence: Synthetic oligonucleotide
  Sense strand starting at position 1040 of SEQ ID NO: 915561
gagcuccugcgcucgaauu

SEQ ID NO: 1089083 - RNA, 19 nt, Artificial Sequence
  Description of Artificial Sequence: Synthetic oligonucleotide
  Antisense strand to SEQ ID NO: 1089082
aauucgagcgcaggagcuc

SEQ ID NO: 1089084 - RNA, 19 nt, Artificial Sequence
  Description of Artificial Sequence: Synthetic oligonucleotide
  Sense strand starting at position 1224 of SEQ ID NO: 915561
gggcuaguuuagucacgac

SEQ ID NO: 1089085 - RNA, 19 nt, Artificial Sequence
  Description of Artificial Sequence: Synthetic oligonucleotide
  Antisense strand to SEQ ID NO: 1089084
gucgugacuaaacuagccc

SEQ ID NO: 1089086 - RNA, 19 nt, Artificial Sequence
  Description of Artificial Sequence: Synthetic oligonucleotide
  Sense strand starting at position 2163 of SEQ ID NO: 915561
gccagacugcauugauuaa

SEQ ID NO: 1089087 - RNA, 19 nt, Artificial Sequence
  Description of Artificial Sequence: Synthetic oligonucleotide
  Antisense strand to SEQ ID NO: 1089086
uuaaucaaugcagucuggc

SEQ ID NO: 1089088 - RNA, 19 nt, Artificial Sequence
  Description of Artificial Sequence: Synthetic oligonucleotide
  Sense strand starting at position 2359 of SEQ ID NO: 915561
gagcuucuugcguauuaga

SEQ ID NO: 1089089 - RNA, 19 nt, Artificial Sequence
  Description of Artificial Sequence: Synthetic oligonucleotide
  Antisense strand to SEQ ID NO: 1089088
ucuaauacgcaagaagcuc

SEQ ID NO: 1089090 - RNA, 19 nt, Artificial Sequence
  Description of Artificial Sequence: Synthetic oligonucleotide
  Sense strand starting at position 2611 of SEQ ID NO: 915561
gcuacucacuaguuauaca

SEQ ID NO: 1089091 - RNA, 19 nt, Artificial Sequence
  Description of Artificial Sequence: Synthetic oligonucleotide
  Antisense strand to SEQ ID NO: 1089090
uguauaacuagugaguagc

SEQ ID NO: 1089092 - RNA, 19 nt, Artificial Sequence
  Description of Artificial Sequence: Synthetic oligonucleotide
  Sense strand starting at position 2658 of SEQ ID NO: 915561
ccuguaagacgaggacaau

SEQ ID NO: 1089093 - RNA, 19 nt, Artificial Sequence
  Description of Artificial Sequence: Synthetic oligonucleotide
  Antisense strand to SEQ ID NO: 1089092
auuguccucgucuuacagg

SEQ ID NO: 1089094 - RNA, 19 nt, Artificial Sequence
  Description of Artificial Sequence: Synthetic oligonucleotide
  Sense strand starting at position 2670 of SEQ ID NO: 915561
ggacaauaguaccuuaauu

SEQ ID NO: 1089095 - RNA, 19 nt, Artificial Sequence
  Description of Artificial Sequence: Synthetic oligonucleotide
  Antisense strand to SEQ ID NO: 1089094
aauuaagguacuauugucc

SEQ ID NO: 1089096 - RNA, 19 nt, Artificial Sequence
  Description of Artificial Sequence: Synthetic oligonucleotide
  Sense strand starting at position 2707 of SEQ ID NO: 915561
gaaguauaagaugggugua

SEQ ID NO: 1089097 - RNA, 19 nt, Artificial Sequence
  Description of Artificial Sequence: Synthetic oligonucleotide
  Antisense strand to SEQ ID NO: 1089096
uacacccaucuuauacuuc

SEQ ID NO: 1089098 - RNA, 19 nt, Artificial Sequence
  Description of Artificial Sequence: Synthetic oligonucleotide
  Sense strand starting at position 2708 of SEQ ID NO: 915561
aaguauaagauggguguau

SEQ ID NO: 1089099 - RNA, 19 nt, Artificial Sequence
  Description of Artificial Sequence: Synthetic oligonucleotide
  Antisense strand to SEQ ID NO: 1089098
auacacccaucuuauacuu

SEQ ID NO: 1089100 - RNA, 19 nt, Artificial Sequence
  Description of Artificial Sequence: Synthetic oligonucleotide
  Sense strand starting at position 2710 of SEQ ID NO: 915561
guauaagauggguguauga

SEQ ID NO: 1089101 - RNA, 19 nt, Artificial Sequence
  Description of Artificial Sequence: Synthetic oligonucleotide
  Antisense strand to SEQ ID NO: 1089100
ucauacacccaucuuauac

SEQ ID NO: 1089102 - RNA, 19 nt, Artificial Sequence
  Description of Artificial Sequence: Synthetic oligonucleotide
  Sense strand starting at position 2747 of SEQ ID NO: 915561
gugcuauaggcagauugua

SEQ ID NO: 1089103 - RNA, 19 nt, Artificial Sequence
  Description of Artificial Sequence: Synthetic oligonucleotide
  Antisense strand to SEQ ID NO: 1089102
uacaaucugccuauagcac

SEQ ID NO: 1089104 - RNA, 19 nt, Artificial Sequence
  Description of Artificial Sequence: Synthetic oligonucleotide
  Sense strand starting at position 2757 of SEQ ID NO: 915561
cagauuguaggguaguaga

SEQ ID NO: 1089105 - RNA, 19 nt, Artificial Sequence
  Description of Artificial Sequence: Synthetic oligonucleotide
  Antisense strand to SEQ ID NO: 1089104
ucuacuacccuacaaucug

SEQ ID NO: 1089106 - RNA, 19 nt, Artificial Sequence
  Description of Artificial Sequence: Synthetic oligonucleotide
  Sense strand starting at position 2783 of SEQ ID NO: 915561
gucugcaguuauguagaca

SEQ ID NO: 1089107 - RNA, 19 nt, Artificial Sequence
  Description of Artificial Sequence: Synthetic oligonucleotide
  Antisense strand to SEQ ID NO: 1089106
ugucuacauaacugcagac

SEQ ID NO: 1089108 - RNA, 19 nt, Artificial Sequence
  Description of Artificial Sequence: Synthetic oligonucleotide
  Sense strand starting at position 3112 of SEQ ID NO: 915561
gggaucaguaaguguggaa

SEQ ID NO: 1089109 - RNA, 19 nt, Artificial Sequence
  Description of Artificial Sequence: Synthetic oligonucleotide
  Antisense strand to SEQ ID NO: 1089108
uuccacacuuacugauccc

SEQ ID NO: 1089110 - RNA, 19 nt, Artificial Sequence
  Description of Artificial Sequence: Synthetic oligonucleotide
  Sense strand starting at position 3179 of SEQ ID NO: 915561
gaauguuaaucugcaggag

SEQ ID NO: 1089111 - RNA, 19 nt, Artificial Sequence
  Description of Artificial Sequence: Synthetic oligonucleotide
  Antisense strand to SEQ ID NO: 1089110
cuccugcagauuaacauuc

SEQ ID NO: 1089112 - RNA, 19 nt, Artificial Sequence
  Description of Artificial Sequence: Synthetic oligonucleotide
  Sense strand starting at position 3271 of SEQ ID NO: 915561
caggguucuguccaccuua

SEQ ID NO: 1089113 - RNA, 19 nt, Artificial Sequence
  Description of Artificial Sequence: Synthetic oligonucleotide
  Antisense strand to SEQ ID NO: 1089112
uaagguggacagaacccug

SEQ ID NO: 1089114 - RNA, 19 nt, Artificial Sequence
  Description of Artificial Sequence: Synthetic oligonucleotide
  Sense strand starting at position 3333 of SEQ ID NO: 915561
cccaucaaugucugcagaa

SEQ ID NO: 1089115 - RNA, 19 nt, Artificial Sequence
  Description of Artificial Sequence: Synthetic oligonucleotide
  Antisense strand to SEQ ID NO: 1089114
uucugcagacauugauggg

SEQ ID NO: 1089116 - RNA, 19 nt, Artificial Sequence
  Description of Artificial Sequence: Synthetic oligonucleotide
  Sense strand starting at position 3334 of SEQ ID NO: 915561
ccaucaaugucugcagaag

SEQ ID NO: 1089117 - RNA, 19 nt, Artificial Sequence
  Description of Artificial Sequence: Synthetic oligonucleotide
  Antisense strand to SEQ ID NO: 1089116
cuucugcagacauugaugg

SEQ ID NO: 1089118 - RNA, 19 nt, Artificial Sequence
  Description of Artificial Sequence: Synthetic oligonucleotide
  Sense strand starting at position 3335 of SEQ ID NO: 915561
caucaaugucugcagaaga

SEQ ID NO: 1089119 - RNA, 19 nt, Artificial Sequence
  Description of Artificial Sequence: Synthetic oligonucleotide
  Antisense strand to SEQ ID NO: 1089118
ucuucugcagacauugaug

SEQ ID NO: 1089120 - RNA, 19 nt, Artificial Sequence
  Description of Artificial Sequence: Synthetic oligonucleotide
  Sense strand starting at position 3424 of SEQ ID NO: 915561
ccauguucuuugguucgaa

SEQ ID NO: 1089121 - RNA, 19 nt, Artificial Sequence
  Description of Artificial Sequence: Synthetic oligonucleotide
  Antisense strand to SEQ ID NO: 1089120
uucgaaccaaagaacaugg

SEQ ID NO: 1089122 - RNA, 19 nt, Artificial Sequence
  Description of Artificial Sequence: Synthetic oligonucleotide
  Sense strand starting at position 3425 of SEQ ID NO: 915561
cauguucuuugguucgaau

SEQ ID NO: 1089123 - RNA, 19 nt, Artificial Sequence
  Description of Artificial Sequence: Synthetic oligonucleotide
  Antisense strand to SEQ ID NO: 1089122
auucgaaccaaagaacaug

SEQ ID NO: 1089124 - RNA, 19 nt, Artificial Sequence
  Description of Artificial Sequence: Synthetic oligonucleotide
  Sense strand starting at position 3427 of SEQ ID NO: 915561
uguucuuugguucgaauuc

SEQ ID NO: 1089125 - RNA, 19 nt, Artificial Sequence
  Description of Artificial Sequence: Synthetic oligonucleotide
  Antisense strand to SEQ ID NO: 1089124
gaauucgaaccaaagaaca

SEQ ID NO: 1089126 - RNA, 19 nt, Artificial Sequence
  Description of Artificial Sequence: Synthetic oligonucleotide
  Sense strand starting at position 3460 of SEQ ID NO: 915561
ggcagaugcuauucugauc

SEQ ID NO: 1089127 - RNA, 19 nt, Artificial Sequence
  Description of Artificial Sequence: Synthetic oligonucleotide
  Antisense strand to SEQ ID NO: 1089126
gaucagaauagcaucugcc

SEQ ID NO: 1089128 - RNA, 19 nt, Artificial Sequence
  Description of Artificial Sequence: Synthetic oligonucleotide
  Sense strand starting at position 3488 of SEQ ID NO: 915561
cguggcuccaaugaggauu

SEQ ID NO: 1089129 - RNA, 19 nt, Artificial Sequence
  Description of Artificial Sequence: Synthetic oligonucleotide
  Antisense strand to SEQ ID NO: 1089128
aauccucauuggagccacg

SEQ ID NO: 1089130 - RNA, 19 nt, Artificial Sequence
  Description of Artificial Sequence: Synthetic oligonucleotide
  Sense strand starting at position 3504 of SEQ ID NO: 915561
auuaaugaguaacaucaga

SEQ ID NO: 1089131 - RNA, 19 nt, Artificial Sequence
  Description of Artificial Sequence: Synthetic oligonucleotide
  Antisense strand to SEQ ID NO: 1089130
ucugauguuacucauuaau

SEQ ID NO: 1089132 - RNA, 19 nt, Artificial Sequence
  Description of Artificial Sequence: Synthetic oligonucleotide
  Sense strand starting at position 3674 of SEQ ID NO: 915561
ccgggauucguagagaaga

SEQ ID NO: 1089133 - RNA, 19 nt, Artificial Sequence
  Description of Artificial Sequence: Synthetic oligonucleotide
  Antisense strand to SEQ ID NO: 1089132
ucuucucuacgaaucccgg

SEQ ID NO: 1089134 - RNA, 19 nt, Artificial Sequence
  Description of Artificial Sequence: Synthetic oligonucleotide
  Sense strand starting at position 3675 of SEQ ID NO: 915561
cgggauucguagagaagag

SEQ ID NO: 1089135 - RNA, 19 nt, Artificial Sequence
  Description of Artificial Sequence: Synthetic oligonucleotide
  Antisense strand to SEQ ID NO: 1089134
cucuucucuacgaaucccg

SEQ ID NO: 1089136 - RNA, 19 nt, Artificial Sequence
  Description of Artificial Sequence: Synthetic oligonucleotide
  Sense strand starting at position 3719 of SEQ ID NO: 915561
cauucucuugugggagaga

SEQ ID NO: 1089137 - RNA, 19 nt, Artificial Sequence
  Description of Artificial Sequence: Synthetic oligonucleotide
  Antisense strand to SEQ ID NO: 1089136
ucucucccacaagagaaug

SEQ ID NO: 1089138 - RNA, 19 nt, Artificial Sequence
  Description of Artificial Sequence: Synthetic oligonucleotide
  Sense strand starting at position 3901 of SEQ ID NO: 915561
caucuaagugagggcauua

SEQ ID NO: 1089139 - RNA, 19 nt, Artificial Sequence
  Description of Artificial Sequence: Synthetic oligonucleotide
  Antisense strand to SEQ ID NO: 1089138
uaaugcccucacuuagaug

SEQ ID NO: 1089140 - RNA, 19 nt, Artificial Sequence
  Description of Artificial Sequence: Synthetic oligonucleotide
  Sense strand starting at position 67 of SEQ ID NO: 915562
uuucuuacacaguauaugu

SEQ ID NO: 1089141 - RNA, 19 nt, Artificial Sequence
  Description of Artificial Sequence: Synthetic oligonucleotide
  Antisense strand to SEQ ID NO: 1089140
acauauacuguguaagaaa

SEQ ID NO: 1089142 - RNA, 19 nt, Artificial Sequence
  Description of Artificial Sequence: Synthetic oligonucleotide
  Sense strand starting at position 109 of SEQ ID NO: 915562
ugaaguaagcuccaugaca

SEQ ID NO: 1089143 - RNA, 19 nt, Artificial Sequence
  Description of Artificial Sequence: Synthetic oligonucleotide
  Antisense strand to SEQ ID NO: 1089142
ugucauggagcuuacuuca

SEQ ID NO: 1089144 - RNA, 19 nt, Artificial Sequence
  Description of Artificial Sequence: Synthetic oligonucleotide
  Sense strand starting at position 373 of SEQ ID NO: 915562
aagaguagaugcuuaauga

SEQ ID NO: 1089145 - RNA, 19 nt, Artificial Sequence
  Description of Artificial Sequence: Synthetic oligonucleotide
  Antisense strand to SEQ ID NO: 1089144
ucauuaagcaucuacucuu

SEQ ID NO: 1089146 - RNA, 19 nt, Artificial Sequence
  Description of Artificial Sequence: Synthetic oligonucleotide
  Sense strand starting at position 399 of SEQ ID NO: 915562
cugagugaauagucauaaa

SEQ ID NO: 1089147 - RNA, 19 nt, Artificial Sequence
  Description of Artificial Sequence: Synthetic oligonucleotide
  Antisense strand to SEQ ID NO: 1089146
uuuaugacuauucacucag

SEQ ID NO: 1089148 - RNA, 19 nt, Artificial Sequence
  Description of Artificial Sequence: Synthetic oligonucleotide
  Sense strand starting at position 477 of SEQ ID NO: 915562
ucauuugccugagugacuu

SEQ ID NO: 1089149 - RNA, 19 nt, Artificial Sequence
  Description of Artificial Sequence: Synthetic oligonucleotide
  Antisense strand to SEQ ID NO: 1089148
aagucacucaggcaaauga

SEQ ID NO: 1089150 - RNA, 19 nt, Artificial Sequence
  Description of Artificial Sequence: Synthetic oligonucleotide
  Sense strand starting at position 622 of SEQ ID NO: 915562
agaaacuuauguuugauca

SEQ ID NO: 1089151 - RNA, 19 nt, Artificial Sequence
  Description of Artificial Sequence: Synthetic oligonucleotide
  Antisense strand to SEQ ID NO: 1089150
ugaucaaacauaaguuucu

SEQ ID NO: 1089152 - RNA, 19 nt, Artificial Sequence
  Description of Artificial Sequence: Synthetic oligonucleotide
  Sense strand starting at position 626 of SEQ ID NO: 915562
acuuauguuugaucacauu

SEQ ID NO: 1089153 - RNA, 19 nt, Artificial Sequence
  Description of Artificial Sequence: Synthetic oligonucleotide
  Antisense strand to SEQ ID NO: 1089152
aaugugaucaaacauaagu

SEQ ID NO: 1089154 - RNA, 19 nt, Artificial Sequence
  Description of Artificial Sequence: Synthetic oligonucleotide
  Sense strand starting at position 646 of SEQ ID NO: 915562
cuauauagagcaugcaaau

SEQ ID NO: 1089155 - RNA, 19 nt, Artificial Sequence
  Description of Artificial Sequence: Synthetic oligonucleotide
  Antisense strand to SEQ ID NO: 1089154
auuugcaugcucuauauag

SEQ ID NO: 1089156 - RNA, 19 nt, Artificial Sequence
  Description of Artificial Sequence: Synthetic oligonucleotide
  Sense strand starting at position 985 of SEQ ID NO: 915562
ugccguacucaugagaaau

SEQ ID NO: 1089157 - RNA, 19 nt, Artificial Sequence
  Description of Artificial Sequence: Synthetic oligonucleotide
  Antisense strand to SEQ ID NO: 1089156
auuucucaugaguacggca

SEQ ID NO: 1089158 - RNA, 19 nt, Artificial Sequence
  Description of Artificial Sequence: Synthetic oligonucleotide
  Sense strand starting at position 1094 of SEQ ID NO: 915562
acauuaagugcucacauag

SEQ ID NO: 1089159 - RNA, 19 nt, Artificial Sequence
  Description of Artificial Sequence: Synthetic oligonucleotide
  Antisense strand to SEQ ID NO: 1089158
cuaugugagcacuuaaugu

SEQ ID NO: 1089160 - RNA, 19 nt, Artificial Sequence
  Description of Artificial Sequence: Synthetic oligonucleotide
  Sense strand starting at position 1108 of SEQ ID NO: 915562
cauagagguucucauuuga

SEQ ID NO: 1089161 - RNA, 19 nt, Artificial Sequence
  Description of Artificial Sequence: Synthetic oligonucleotide
  Antisense strand to SEQ ID NO: 1089160
ucaaaugagaaccucuaug

SEQ ID NO: 1089162 - RNA, 19 nt, Artificial Sequence
  Description of Artificial Sequence: Synthetic oligonucleotide
  Sense strand starting at position 1143 of SEQ ID NO: 915562
gugggauugucaucauuau

SEQ ID NO: 1089163 - RNA, 19 nt, Artificial Sequence
  Description of Artificial Sequence: Synthetic oligonucleotide
  Antisense strand to SEQ ID NO: 1089162
auaaugaugacaaucccac

SEQ ID NO: 1089164 - RNA, 19 nt, Artificial Sequence
  Description of Artificial Sequence: Synthetic oligonucleotide
  Sense strand starting at position 1183 of SEQ ID NO: 915562
auagauaugucugucucca

SEQ ID NO: 1089165 - RNA, 19 nt, Artificial Sequence
  Description of Artificial Sequence: Synthetic oligonucleotide
  Antisense strand to SEQ ID NO: 1089164
uggagacagacauaucuau

SEQ ID NO: 1089166 - RNA, 19 nt, Artificial Sequence
  Description of Artificial Sequence: Synthetic oligonucleotide
  Sense strand starting at position 1245 of SEQ ID NO: 915562
auguguaauuauccugaaa

SEQ ID NO: 1089167 - RNA, 19 nt, Artificial Sequence
  Description of Artificial Sequence: Synthetic oligonucleotide
  Antisense strand to SEQ ID NO: 1089166
uuucaggauaauuacacau

SEQ ID NO: 1089168 - RNA, 19 nt, Artificial Sequence
  Description of Artificial Sequence: Synthetic oligonucleotide
  Sense strand starting at position 1388 of SEQ ID NO: 915562
gagaaagagcucugauguu

SEQ ID NO: 1089169 - RNA, 19 nt, Artificial Sequence
  Description of Artificial Sequence: Synthetic oligonucleotide
  Antisense strand to SEQ ID NO: 1089168
aacaucagagcucuuucuc

SEQ ID NO: 1089170 - RNA, 19 nt, Artificial Sequence
  Description of Artificial Sequence: Synthetic oligonucleotide
  Sense strand starting at position 1433 of SEQ ID NO: 915562
gaagaagacuaggaaggau

SEQ ID NO: 1089171 - RNA, 19 nt, Artificial Sequence
  Description of Artificial Sequence: Synthetic oligonucleotide
  Antisense strand to SEQ ID NO: 1089170
auccuuccuagucuucuuc

SEQ ID NO: 1089172 - RNA, 19 nt, Artificial Sequence
  Description of Artificial Sequence: Synthetic oligonucleotide
  Sense strand starting at position 1561 of SEQ ID NO: 915562
ccaggaacucucgggaagu

SEQ ID NO: 1089173 - RNA, 19 nt, Artificial Sequence
  Description of Artificial Sequence: Synthetic oligonucleotide
  Antisense strand to SEQ ID NO: 1089172
acuucccgagaguuccugg

SEQ ID NO: 1089174 - RNA, 19 nt, Artificial Sequence
  Description of Artificial Sequence: Synthetic oligonucleotide
  Sense strand starting at position 1769 of SEQ ID NO: 915562
ggaugcuuugcugagagga

SEQ ID NO: 1089175 - RNA, 19 nt, Artificial Sequence
  Description of Artificial Sequence: Synthetic oligonucleotide
  Antisense strand to SEQ ID NO: 1089174
uccucucagcaaagcaucc

SEQ ID NO: 1089176 - RNA, 19 nt, Artificial Sequence
  Description of Artificial Sequence: Synthetic oligonucleotide
  Sense strand starting at position 1790 of SEQ ID NO: 915562
gacugugauucccugaaga

SEQ ID NO: 1089177 - RNA, 19 nt, Artificial Sequence
  Description of Artificial Sequence: Synthetic oligonucleotide
  Antisense strand to SEQ ID NO: 1089176
ucuucagggaaucacaguc

SEQ ID NO: 1089178 - RNA, 19 nt, Artificial Sequence
  Description of Artificial Sequence: Synthetic oligonucleotide
  Sense strand starting at position 1851 of SEQ ID NO: 915562
cguguacuuagugaagauc

SEQ ID NO: 1089179 - RNA, 19 nt, Artificial Sequence
  Description of Artificial Sequence: Synthetic oligonucleotide
  Antisense strand to SEQ ID NO: 1089178
gaucuucacuaaguacacg

SEQ ID NO: 1089180 - RNA, 19 nt, Artificial Sequence
  Description of Artificial Sequence: Synthetic oligonucleotide
  Sense strand starting at position 1854 of SEQ ID NO: 915562
guacuuagugaagaucuca

SEQ ID NO: 1089181 - RNA, 19 nt, Artificial Sequence
  Description of Artificial Sequence: Synthetic oligonucleotide
  Antisense strand to SEQ ID NO: 1089180
ugagaucuucacuaaguac

SEQ ID NO: 1089182 - RNA, 19 nt, Artificial Sequence
  Description of Artificial Sequence: Synthetic oligonucleotide
  Sense strand starting at position 1888 of SEQ ID NO: 915562
gaagaaucuggugguggua

SEQ ID NO: 1089183 - RNA, 19 nt, Artificial Sequence
  Description of Artificial Sequence: Synthetic oligonucleotide
  Antisense strand to SEQ ID NO: 1089182
uaccaccaccagauucuuc

SEQ ID NO: 1089184 - RNA, 19 nt, Artificial Sequence
  Description of Artificial Sequence: Synthetic oligonucleotide
  Sense strand starting at position 2087 of SEQ ID NO: 915562
uuaaacauuucugggaaac

SEQ ID NO: 1089185 - RNA, 19 nt, Artificial Sequence
  Description of Artificial Sequence: Synthetic oligonucleotide
  Antisense strand to SEQ ID NO: 1089184
guuucccagaaauguuuaa

SEQ ID NO: 1089186 - RNA, 19 nt, Artificial Sequence
  Description of Artificial Sequence: Synthetic oligonucleotide
  Sense strand starting at position 2188 of SEQ ID NO: 915562
ugucuuccucuugaagaag

SEQ ID NO: 1089187 - RNA, 19 nt, Artificial Sequence
  Description of Artificial Sequence: Synthetic oligonucleotide
  Antisense strand to SEQ ID NO: 1089186
cuucuucaagaggaagaca

SEQ ID NO: 1089188 - RNA, 19 nt, Artificial Sequence
  Description of Artificial Sequence: Synthetic oligonucleotide
  Sense strand starting at position 2302 of SEQ ID NO: 915562
cuggcucaaccacgagaaa

SEQ ID NO: 1089189 - RNA, 19 nt, Artificial Sequence
  Description of Artificial Sequence: Synthetic oligonucleotide
  Antisense strand to SEQ ID NO: 1089188
uuucucgugguugagccag

SEQ ID NO: 1089190 - RNA, 19 nt, Artificial Sequence
  Description of Artificial Sequence: Synthetic oligonucleotide
  Sense strand starting at position 2313 of SEQ ID NO: 915562
acgagaaagccaugaaaca

SEQ ID NO: 1089191 - RNA, 19 nt, Artificial Sequence
  Description of Artificial Sequence: Synthetic oligonucleotide
  Antisense strand to SEQ ID NO: 1089190
uguuucauggcuuucucgu

SEQ ID NO: 1089192 - RNA, 19 nt, Artificial Sequence
  Description of Artificial Sequence: Synthetic oligonucleotide
  Sense strand starting at position 2388 of SEQ ID NO: 915562
cuuacaaggucuuuaaaga

SEQ ID NO: 1089193 - RNA, 19 nt, Artificial Sequence
  Description of Artificial Sequence: Synthetic oligonucleotide
  Antisense strand to SEQ ID NO: 1089192
ucuuuaaagaccuuguaag

SEQ ID NO: 1089194 - RNA, 19 nt, Artificial Sequence
  Description of Artificial Sequence: Synthetic oligonucleotide
  Sense strand starting at position 2830 of SEQ ID NO: 915562
uuguguauucuacaagauc

SEQ ID NO: 1089195 - RNA, 19 nt, Artificial Sequence
  Description of Artificial Sequence: Synthetic oligonucleotide
  Antisense strand to SEQ ID NO: 1089194
gaucuuguagaauacacaa

SEQ ID NO: 1089196 - RNA, 19 nt, Artificial Sequence
  Description of Artificial Sequence: Synthetic oligonucleotide
  Sense strand starting at position 2961 of SEQ ID NO: 915562
agggaaucucuauguaacc

SEQ ID NO: 1089197 - RNA, 19 nt, Artificial Sequence
  Description of Artificial Sequence: Synthetic oligonucleotide
  Antisense strand to SEQ ID NO: 1089196
gguuacauagagauucccu

SEQ ID NO: 1089198 - RNA, 19 nt, Artificial Sequence
  Description of Artificial Sequence: Synthetic oligonucleotide
  Sense strand starting at position 3359 of SEQ ID NO: 915562
ugauaaauguuacugcaaa

SEQ ID NO: 1089199 - RNA, 19 nt, Artificial Sequence
  Description of Artificial Sequence: Synthetic oligonucleotide
  Antisense strand to SEQ ID NO: 1089198
uuugcaguaacauuuauca

SEQ ID NO: 1089200 - RNA, 19 nt, Artificial Sequence
  Description of Artificial Sequence: Synthetic oligonucleotide
  Sense strand starting at position 3504 of SEQ ID NO: 915562
acuugacuccuuuauaguu

SEQ ID NO: 1089201 - RNA, 19 nt, Artificial Sequence
  Description of Artificial Sequence: Synthetic oligonucleotide
  Antisense strand to SEQ ID NO: 1089200
aacuauaaaggagucaagu

SEQ ID NO: 1089202 - RNA, 19 nt, Artificial Sequence
  Description of Artificial Sequence: Synthetic oligonucleotide
  Sense strand starting at position 3575 of SEQ ID NO: 915562
ccuuguauaagucagguua

SEQ ID NO: 1089203 - RNA, 19 nt, Artificial Sequence
  Description of Artificial Sequence: Synthetic oligonucleotide
  Antisense strand to SEQ ID NO: 1089202
uaaccugacuuauacaagg

SEQ ID NO: 1089204 - RNA, 19 nt, Artificial Sequence
  Description of Artificial Sequence: Synthetic oligonucleotide
  Sense strand starting at position 3657 of SEQ ID NO: 915562
aagaguuaaugaguacuga

SEQ ID NO: 1089205 - RNA, 19 nt, Artificial Sequence
  Description of Artificial Sequence: Synthetic oligonucleotide
  Antisense strand to SEQ ID NO: 1089204
ucaguacucauuaacucuu

SEQ ID NO: 1089206 - RNA, 19 nt, Artificial Sequence
  Description of Artificial Sequence: Synthetic oligonucleotide
  Sense strand starting at position 3702 of SEQ ID NO: 915562
acaguauuaucugcaugac

SEQ ID NO: 1089207 - RNA, 19 nt, Artificial Sequence
  Description of Artificial Sequence: Synthetic oligonucleotide
  Antisense strand to SEQ ID NO: 1089206
gucaugcagauaauacugu

SEQ ID NO: 1089208 - RNA, 19 nt, Artificial Sequence
  Description of Artificial Sequence: Synthetic oligonucleotide
  Sense strand starting at position 3748 of SEQ ID NO: 915562
uagggagcagauugguuaa

SEQ ID NO: 1089209 - RNA, 19 nt, Artificial Sequence
  Description of Artificial Sequence: Synthetic oligonucleotide
  Antisense strand to SEQ ID NO: 1089208
uuaaccaaucugcucccua

SEQ ID NO: 1089210 - RNA, 19 nt, Artificial Sequence
  Description of Artificial Sequence: Synthetic oligonucleotide
  Sense strand starting at position 3759 of SEQ ID NO: 915562
uugguuaauaccugggaua

SEQ ID NO: 1089211 - RNA, 19 nt, Artificial Sequence
  Description of Artificial Sequence: Synthetic oligonucleotide
  Antisense strand to SEQ ID NO: 1089210
uaucccagguauuaaccaa

SEQ ID NO: 1089212 - RNA, 19 nt, Artificial Sequence
  Description of Artificial Sequence: Synthetic oligonucleotide
  Sense strand starting at position 3760 of SEQ ID NO: 915562
ugguuaauaccugggauau

SEQ ID NO: 1089213 - RNA, 19 nt, Artificial Sequence
  Description of Artificial Sequence: Synthetic oligonucleotide
  Antisense strand to SEQ ID NO: 1089212
auaucccagguauuaacca

SEQ ID NO: 1089214 - RNA, 19 nt, Artificial Sequence
  Description of Artificial Sequence: Synthetic oligonucleotide
  Sense strand starting at position 3761 of SEQ ID NO: 915562
gguuaauaccugggauaug

SEQ ID NO: 1089215 - RNA, 19 nt, Artificial Sequence
  Description of Artificial Sequence: Synthetic oligonucleotide
  Antisense strand to SEQ ID NO: 1089214
cauaucccagguauuaacc

SEQ ID NO: 1089216 - RNA, 19 nt, Artificial Sequence
  Description of Artificial Sequence: Synthetic oligonucleotide
  Sense strand starting at position 3778 of SEQ ID NO: 915562
ugaagaaaccuuuaugccu

SEQ ID NO: 1089217 - RNA, 19 nt, Artificial Sequence
  Description of Artificial Sequence: Synthetic oligonucleotide
  Antisense strand to SEQ ID NO: 1089216
aggcauaaagguuucuuca

SEQ ID NO: 1089218 - RNA, 19 nt, Artificial Sequence
  Description of Artificial Sequence: Synthetic oligonucleotide
  Sense strand starting at position 3907 of SEQ ID NO: 915562
guagcauucguuguccuca

SEQ ID NO: 1089219 - RNA, 19 nt, Artificial Sequence
  Description of Artificial Sequence: Synthetic oligonucleotide
  Antisense strand to SEQ ID NO: 1089218
ugaggacaacgaaugcuac

SEQ ID NO: 1089220 - RNA, 19 nt, Artificial Sequence
  Description of Artificial Sequence: Synthetic oligonucleotide
  Sense strand starting at position 282 of SEQ ID NO: 915563
caaugucaaguucgugcaa

SEQ ID NO: 1089221 - RNA, 19 nt, Artificial Sequence
  Description of Artificial Sequence: Synthetic oligonucleotide
  Antisense strand to SEQ ID NO: 1089220
uugcacgaacuugacauug

SEQ ID NO: 1089222 - RNA, 19 nt, Artificial Sequence
  Description of Artificial Sequence: Synthetic oligonucleotide
  Sense strand starting at position 283 of SEQ ID NO: 915563
aaugucaaguucgugcaaa

SEQ ID NO: 1089223 - RNA, 19 nt, Artificial Sequence
  Description of Artificial Sequence: Synthetic oligonucleotide
  Antisense strand to SEQ ID NO: 1089222
uuugcacgaacuugacauu

SEQ ID NO: 1089224 - RNA, 19 nt, Artificial Sequence
  Description of Artificial Sequence: Synthetic oligonucleotide
  Sense strand starting at position 553 of SEQ ID NO: 915563
uggaaauagcccuggaguc

SEQ ID NO: 1089225 - RNA, 19 nt, Artificial Sequence
  Description of Artificial Sequence: Synthetic oligonucleotide
  Antisense strand to SEQ ID NO: 1089224
gacuccagggcuauuucca

SEQ ID NO: 1089226 - RNA, 19 nt, Artificial Sequence
  Description of Artificial Sequence: Synthetic oligonucleotide
  Sense strand starting at position 554 of SEQ ID NO: 915563
ggaaauagcccuggaguca

SEQ ID NO: 1089227 - RNA, 19 nt, Artificial Sequence
  Description of Artificial Sequence: Synthetic oligonucleotide
  Antisense strand to SEQ ID NO: 1089226
ugacuccagggcuauuucc

SEQ ID NO: 1089228 - RNA, 19 nt, Artificial Sequence
  Description of Artificial Sequence: Synthetic oligonucleotide
  Sense strand starting at position 555 of SEQ ID NO: 915563
gaaauagcccuggagucau

SEQ ID NO: 1089229 - RNA, 19 nt, Artificial Sequence
  Description of Artificial Sequence: Synthetic oligonucleotide
  Antisense strand to SEQ ID NO: 1089228
augacuccagggcuauuuc

SEQ ID NO: 1089230 - RNA, 19 nt, Artificial Sequence
  Description of Artificial Sequence: Synthetic oligonucleotide
  Sense strand starting at position 1116 of SEQ ID NO: 915563
acucuaagcuugcuugagu

SEQ ID NO: 1089231 - RNA, 19 nt, Artificial Sequence
  Description of Artificial Sequence: Synthetic oligonucleotide
  Antisense strand to SEQ ID NO: 1089230
acucaagcaagcuuagagu

SEQ ID NO: 1089232 - RNA, 19 nt, Artificial Sequence
  Description of Artificial Sequence: Synthetic oligonucleotide
  Sense strand starting at position 1117 of SEQ ID NO: 915563
cucuaagcuugcuugagua

SEQ ID NO: 1089233 - RNA, 19 nt, Artificial Sequence
  Description of Artificial Sequence: Synthetic oligonucleotide
  Antisense strand to SEQ ID NO: 1089232
uacucaagcaagcuuagag

SEQ ID NO: 1089234 - RNA, 19 nt, Artificial Sequence
  Description of Artificial Sequence: Synthetic oligonucleotide
  Sense strand starting at position 1121 of SEQ ID NO: 915563
aagcuugcuugaguaccaa

SEQ ID NO: 1089235 - RNA, 19 nt, Artificial Sequence
  Description of Artificial Sequence: Synthetic oligonucleotide
  Antisense strand to SEQ ID NO: 1089234
uugguacucaagcaagcuu

SEQ ID NO: 1089236 - RNA, 19 nt, Artificial Sequence
  Description of Artificial Sequence: Synthetic oligonucleotide
  Sense strand starting at position 1362 of SEQ ID NO: 915563
cuccucgauuugcacaaau

SEQ ID NO: 1089237 - RNA, 19 nt, Artificial Sequence
  Description of Artificial Sequence: Synthetic oligonucleotide
  Antisense strand to SEQ ID NO: 1089236
auuugugcaaaucgaggag

SEQ ID NO: 1089238 - RNA, 19 nt, Artificial Sequence
  Description of Artificial Sequence: Synthetic oligonucleotide
  Sense strand starting at position 1403 of SEQ ID NO: 915563
gcauuugucucaguagccu

SEQ ID NO: 1089239 - RNA, 19 nt, Artificial Sequence
  Description of Artificial Sequence: Synthetic oligonucleotide
  Antisense strand to SEQ ID NO: 1089238
aggcuacugagacaaaugc

SEQ ID NO: 1089240 - RNA, 19 nt, Artificial Sequence
  Description of Artificial Sequence: Synthetic oligonucleotide
  Sense strand starting at position 1521 of SEQ ID NO: 915563
agcucuacagccuaggaaa

SEQ ID NO: 1089241 - RNA, 19 nt, Artificial Sequence
  Description of Artificial Sequence: Synthetic oligonucleotide
  Antisense strand to SEQ ID NO: 1089240
uuuccuaggcuguagagcu

SEQ ID NO: 1089242 - RNA, 19 nt, Artificial Sequence
  Description of Artificial Sequence: Synthetic oligonucleotide
  Sense strand starting at position 1577 of SEQ ID NO: 915563
uaccuagggcugcgagaau

SEQ ID NO: 1089243 - RNA, 19 nt, Artificial Sequence
  Description of Artificial Sequence: Synthetic oligonucleotide
  Antisense strand to SEQ ID NO: 1089242
auucucgcagcccuaggua

SEQ ID NO: 1089244 - RNA, 19 nt, Artificial Sequence
  Description of Artificial Sequence: Synthetic oligonucleotide
  Sense strand starting at position 1589 of SEQ ID NO: 915563
cgagaauuguucuccucgu

SEQ ID NO: 1089245 - RNA, 19 nt, Artificial Sequence
  Description of Artificial Sequence: Synthetic oligonucleotide
  Antisense strand to SEQ ID NO: 1089244
acgaggagaacaauucucg

SEQ ID NO: 1089246 - RNA, 19 nt, Artificial Sequence
  Description of Artificial Sequence: Synthetic oligonucleotide
  Sense strand starting at position 1590 of SEQ ID NO: 915563
gagaauuguucuccucguc

SEQ ID NO: 1089247 - RNA, 19 nt, Artificial Sequence
  Description of Artificial Sequence: Synthetic oligonucleotide
  Antisense strand to SEQ ID NO: 1089246
gacgaggagaacaauucuc

SEQ ID NO: 1089248 - RNA, 19 nt, Artificial Sequence
  Description of Artificial Sequence: Synthetic oligonucleotide
  Sense strand starting at position 2000 of SEQ ID NO: 915563
ugacucauguggucugauu

SEQ ID NO: 1089249 - RNA, 19 nt, Artificial Sequence
  Description of Artificial Sequence: Synthetic oligonucleotide
  Antisense strand to SEQ ID NO: 1089248
aaucagaccacaugaguca

SEQ ID NO: 1089250 - RNA, 19 nt, Artificial Sequence
  Description of Artificial Sequence: Synthetic oligonucleotide
  Sense strand starting at position 2002 of SEQ ID NO: 915563
acucauguggucugauuac

SEQ ID NO: 1089251 - RNA, 19 nt, Artificial Sequence
  Description of Artificial Sequence: Synthetic oligonucleotide
  Antisense strand to SEQ ID NO: 1089250
guaaucagaccacaugagu

SEQ ID NO: 1089252 - RNA, 19 nt, Artificial Sequence
  Description of Artificial Sequence: Synthetic oligonucleotide
  Sense strand starting at position 2161 of SEQ ID NO: 915563
ggguuaaaucacugucuau

SEQ ID NO: 1089253 - RNA, 19 nt, Artificial Sequence
  Description of Artificial Sequence: Synthetic oligonucleotide
  Antisense strand to SEQ ID NO: 1089252
auagacagugauuuaaccc

SEQ ID NO: 1089254 - RNA, 19 nt, Artificial Sequence
  Description of Artificial Sequence: Synthetic oligonucleotide
  Sense strand starting at position 2277 of SEQ ID NO: 915563
acagcucugcgaugacuga

SEQ ID NO: 1089255 - RNA, 19 nt, Artificial Sequence
  Description of Artificial Sequence: Synthetic oligonucleotide
  Antisense strand to SEQ ID NO: 1089254
ucagucaucgcagagcugu

SEQ ID NO: 1089256 - RNA, 19 nt, Artificial Sequence
  Description of Artificial Sequence: Synthetic oligonucleotide
  Sense strand starting at position 2311 of SEQ ID NO: 915563
ugcauuuaucaagguguac

SEQ ID NO: 1089257 - RNA, 19 nt, Artificial Sequence
  Description of Artificial Sequence: Synthetic oligonucleotide
  Antisense strand to SEQ ID NO: 1089256
guacaccuugauaaaugca

SEQ ID NO: 1089258 - RNA, 19 nt, Artificial Sequence
  Description of Artificial Sequence: Synthetic oligonucleotide
  Sense strand starting at position 2380 of SEQ ID NO: 915563
acagucagucuuggaggaa

SEQ ID NO: 1089259 - RNA, 19 nt, Artificial Sequence
  Description of Artificial Sequence: Synthetic oligonucleotide
  Antisense strand to SEQ ID NO: 1089258
uuccuccaagacugacugu

SEQ ID NO: 1089260 - RNA, 19 nt, Artificial Sequence
  Description of Artificial Sequence: Synthetic oligonucleotide
  Sense strand starting at position 2427 of SEQ ID NO: 915563
ucugguauuuccguuccua

SEQ ID NO: 1089261 - RNA, 19 nt, Artificial Sequence
  Description of Artificial Sequence: Synthetic oligonucleotide
  Antisense strand to SEQ ID NO: 1089260
uaggaacggaaauaccaga

SEQ ID NO: 1089262 - RNA, 19 nt, Artificial Sequence
  Description of Artificial Sequence: Synthetic oligonucleotide
  Sense strand starting at position 2439 of SEQ ID NO: 915563
guuccuauuucuguuauca

SEQ ID NO: 1089263 - RNA, 19 nt, Artificial Sequence
  Description of Artificial Sequence: Synthetic oligonucleotide
  Antisense strand to SEQ ID NO: 1089262
ugauaacagaaauaggaac

SEQ ID NO: 1089264 - RNA, 19 nt, Artificial Sequence
  Description of Artificial Sequence: Synthetic oligonucleotide
  Sense strand starting at position 2561 of SEQ ID NO: 915563
ccuaguucuuaggucacuu

SEQ ID NO: 1089265 - RNA, 19 nt, Artificial Sequence
  Description of Artificial Sequence: Synthetic oligonucleotide
  Antisense strand to SEQ ID NO: 1089264
aagugaccuaagaacuagg

SEQ ID NO: 1089266 - RNA, 19 nt, Artificial Sequence
  Description of Artificial Sequence: Synthetic oligonucleotide
  Sense strand starting at position 2709 of SEQ ID NO: 915563
gggaaugagagcuggcaau

SEQ ID NO: 1089267 - RNA, 19 nt, Artificial Sequence
  Description of Artificial Sequence: Synthetic oligonucleotide
  Antisense strand to SEQ ID NO: 1089266
auugccagcucucauuccc

SEQ ID NO: 1089268 - RNA, 19 nt, Artificial Sequence
  Description of Artificial Sequence: Synthetic oligonucleotide
  Sense strand starting at position 2810 of SEQ ID NO: 915563
ucuuguuguguguacaaug

SEQ ID NO: 1089269 - RNA, 19 nt, Artificial Sequence
  Description of Artificial Sequence: Synthetic oligonucleotide
  Antisense strand to SEQ ID NO: 1089268
cauuguacacacaacaaga

SEQ ID NO: 1089270 - RNA, 19 nt, Artificial Sequence
  Description of Artificial Sequence: Synthetic oligonucleotide
  Sense strand starting at position 2815 of SEQ ID NO: 915563
uuguguguacaaugcaaua

SEQ ID NO: 1089271 - RNA, 19 nt, Artificial Sequence
  Description of Artificial Sequence: Synthetic oligonucleotide
  Antisense strand to SEQ ID NO: 1089270
uauugcauuguacacacaa

SEQ ID NO: 1089272 - RNA, 19 nt, Artificial Sequence
  Description of Artificial Sequence: Synthetic oligonucleotide
  Sense strand starting at position 2872 of SEQ ID NO: 915563
gguguaguuuggagacuag

SEQ ID NO: 1089273 - RNA, 19 nt, Artificial Sequence
  Description of Artificial Sequence: Synthetic oligonucleotide
  Antisense strand to SEQ ID NO: 1089272
cuagucuccaaacuacacc

SEQ ID NO: 1089274 - RNA, 19 nt, Artificial Sequence
  Description of Artificial Sequence: Synthetic oligonucleotide
  Sense strand starting at position 3174 of SEQ ID NO: 915563
gcccgagaguguuuggaug

SEQ ID NO: 1089275 - RNA, 19 nt, Artificial Sequence
  Description of Artificial Sequence: Synthetic oligonucleotide
  Antisense strand to SEQ ID NO: 1089274
cauccaaacacucucgggc

SEQ ID NO: 1089276 - RNA, 19 nt, Artificial Sequence
  Description of Artificial Sequence: Synthetic oligonucleotide
  Sense strand starting at position 3297 of SEQ ID NO: 915563
uugagacgccuugaggauu

SEQ ID NO: 1089277 - RNA, 19 nt, Artificial Sequence
  Description of Artificial Sequence: Synthetic oligonucleotide
  Antisense strand to SEQ ID NO: 1089276
aauccucaaggcgucucaa

SEQ ID NO: 1089278 - RNA, 19 nt, Artificial Sequence
  Description of Artificial Sequence: Synthetic oligonucleotide
  Sense strand starting at position 3340 of SEQ ID NO: 915563
ugagcuaacgucuauugag

SEQ ID NO: 1089279 - RNA, 19 nt, Artificial Sequence
  Description of Artificial Sequence: Synthetic oligonucleotide
  Antisense strand to SEQ ID NO: 1089278
cucaauagacguuagcuca

SEQ ID NO: 1089280 - RNA, 19 nt, Artificial Sequence
  Description of Artificial Sequence: Synthetic oligonucleotide
  Sense strand starting at position 3372 of SEQ ID NO: 915563
accauugugcaagggauau

SEQ ID NO: 1089281 - RNA, 19 nt, Artificial Sequence
  Description of Artificial Sequence: Synthetic oligonucleotide
  Antisense strand to SEQ ID NO: 1089280
auaucccuugcacaauggu

SEQ ID NO: 1089282 - RNA, 19 nt, Artificial Sequence
  Description of Artificial Sequence: Synthetic oligonucleotide
  Sense strand starting at position 3393 of SEQ ID NO: 915563
augaauuaucucgguuaga

SEQ ID NO: 1089283 - RNA, 19 nt, Artificial Sequence
  Description of Artificial Sequence: Synthetic oligonucleotide
  Antisense strand to SEQ ID NO: 1089282
ucuaaccgagauaauucau

SEQ ID NO: 1089284 - RNA, 19 nt, Artificial Sequence
  Description of Artificial Sequence: Synthetic oligonucleotide
  Sense strand starting at position 3394 of SEQ ID NO: 915563
ugaauuaucucgguuagau

SEQ ID NO: 1089285 - RNA, 19 nt, Artificial Sequence
  Description of Artificial Sequence: Synthetic oligonucleotide
  Antisense strand to SEQ ID NO: 1089284
aucuaaccgagauaauuca

SEQ ID NO: 1089286 - RNA, 19 nt, Artificial Sequence
  Description of Artificial Sequence: Synthetic oligonucleotide
  Sense strand starting at position 3619 of SEQ ID NO: 915563
ggaggagggucgucugagu

SEQ ID NO: 1089287 - RNA, 19 nt, Artificial Sequence
  Description of Artificial Sequence: Synthetic oligonucleotide
  Antisense strand to SEQ ID NO: 1089286
acucagacgacccuccucc

SEQ ID NO: 1089288 - RNA, 19 nt, Artificial Sequence
  Description of Artificial Sequence: Synthetic oligonucleotide
  Sense strand starting at position 3635 of SEQ ID NO: 915563
agugggugggacugagaau

SEQ ID NO: 1089289 - RNA, 19 nt, Artificial Sequence
  Description of Artificial Sequence: Synthetic oligonucleotide
  Antisense strand to SEQ ID NO: 1089288
auucucagucccacccacu

SEQ ID NO: 1089290 - RNA, 19 nt, Artificial Sequence
  Description of Artificial Sequence: Synthetic oligonucleotide
  Sense strand starting at position 3740 of SEQ ID NO: 915563
acgaguguuucugccuaaa

SEQ ID NO: 1089291 - RNA, 19 nt, Artificial Sequence
  Description of Artificial Sequence: Synthetic oligonucleotide
  Antisense strand to SEQ ID NO: 1089290
uuuaggcagaaacacucgu

SEQ ID NO: 1089292 - RNA, 19 nt, Artificial Sequence
  Description of Artificial Sequence: Synthetic oligonucleotide
  Sense strand starting at position 3742 of SEQ ID NO: 915563
gaguguuucugccuaaaca

SEQ ID NO: 1089293 - RNA, 19 nt, Artificial Sequence
  Description of Artificial Sequence: Synthetic oligonucleotide
  Antisense strand to SEQ ID NO: 1089292
uguuuaggcagaaacacuc

SEQ ID NO: 1089294 - RNA, 19 nt, Artificial Sequence
  Description of Artificial Sequence: Synthetic oligonucleotide
  Sense strand starting at position 3743 of SEQ ID NO: 915563
aguguuucugccuaaacag

SEQ ID NO: 1089295 - RNA, 19 nt, Artificial Sequence
  Description of Artificial Sequence: Synthetic oligonucleotide
  Antisense strand to SEQ ID NO: 1089294
cuguuuaggcagaaacacu

SEQ ID NO: 1089296 - RNA, 19 nt, Artificial Sequence
  Description of Artificial Sequence: Synthetic oligonucleotide
  Sense strand starting at position 3785 of SEQ ID NO: 915563
agacgaaugcgagaacugu

SEQ ID NO: 1089297 - RNA, 19 nt, Artificial Sequence
  Description of Artificial Sequence: Synthetic oligonucleotide
  Antisense strand to SEQ ID NO: 1089296
acaguucucgcauucgucu

SEQ ID NO: 1089298 - RNA, 19 nt, Artificial Sequence
  Description of Artificial Sequence: Synthetic oligonucleotide
  Sense strand starting at position 3789 of SEQ ID NO: 915563
gaaugcgagaacuguagaa

SEQ ID NO: 1089299 - RNA, 19 nt, Artificial Sequence
  Description of Artificial Sequence: Synthetic oligonucleotide
  Antisense strand to SEQ ID NO: 1089298
uucuacaguucucgcauuc

SEQ ID NO: 1089300 - RNA, 19 nt, Artificial Sequence
  Description of Artificial Sequence: Synthetic oligonucleotide
  Sense strand starting at position 197 of SEQ ID NO: 915564
ucaggauuccucugaucug

SEQ ID NO: 1089301 - RNA, 19 nt, Artificial Sequence
  Description of Artificial Sequence: Synthetic oligonucleotide
  Antisense strand to SEQ ID NO: 1089300
cagaucagaggaauccuga

SEQ ID NO: 1089302 - RNA, 19 nt, Artificial Sequence
  Description of Artificial Sequence: Synthetic oligonucleotide
  Sense strand starting at position 227 of SEQ ID NO: 915564
cucuaucuccagggcuaaa

SEQ ID NO: 1089303 - RNA, 19 nt, Artificial Sequence
  Description of Artificial Sequence: Synthetic oligonucleotide
  Antisense strand to SEQ ID NO: 1089302
uuuagcccuggagauagag

SEQ ID NO: 1089304 - RNA, 19 nt, Artificial Sequence
  Description of Artificial Sequence: Synthetic oligonucleotide
  Sense strand starting at position 471 of SEQ ID NO: 915564
uaagaagucccguacccau

SEQ ID NO: 1089305 - RNA, 19 nt, Artificial Sequence
  Description of Artificial Sequence: Synthetic oligonucleotide
  Antisense strand to SEQ ID NO: 1089304
auggguacgggacuucuua

SEQ ID NO: 1089306 - RNA, 19 nt, Artificial Sequence
  Description of Artificial Sequence: Synthetic oligonucleotide
  Sense strand starting at position 673 of SEQ ID NO: 915564
acaaauuuguauggagaca

SEQ ID NO: 1089307 - RNA, 19 nt, Artificial Sequence
  Description of Artificial Sequence: Synthetic oligonucleotide
  Antisense strand to SEQ ID NO: 1089306
ugucuccauacaaauuugu

SEQ ID NO: 1089308 - RNA, 19 nt, Artificial Sequence
  Description of Artificial Sequence: Synthetic oligonucleotide
  Sense strand starting at position 700 of SEQ ID NO: 915564
caauucucuuggguguaca

SEQ ID NO: 1089309 - RNA, 19 nt, Artificial Sequence
  Description of Artificial Sequence: Synthetic oligonucleotide
  Antisense strand to SEQ ID NO: 1089308
uguacacccaagagaauug

SEQ ID NO: 1089310 - RNA, 19 nt, Artificial Sequence
  Description of Artificial Sequence: Synthetic oligonucleotide
  Sense strand starting at position 766 of SEQ ID NO: 915564
uguuuaaccaugugaggaa

SEQ ID NO: 1089311 - RNA, 19 nt, Artificial Sequence
  Description of Artificial Sequence: Synthetic oligonucleotide
  Antisense strand to SEQ ID NO: 1089310
uuccucacaugguuaaaca

SEQ ID NO: 1089312 - RNA, 19 nt, Artificial Sequence
  Description of Artificial Sequence: Synthetic oligonucleotide
  Sense strand starting at position 995 of SEQ ID NO: 915564
uguauaucuugcuuuggag

SEQ ID NO: 1089313 - RNA, 19 nt, Artificial Sequence
  Description of Artificial Sequence: Synthetic oligonucleotide
  Antisense strand to SEQ ID NO: 1089312
cuccaaagcaagauauaca

SEQ ID NO: 1089314 - RNA, 19 nt, Artificial Sequence
  Description of Artificial Sequence: Synthetic oligonucleotide
  Sense strand starting at position 1001 of SEQ ID NO: 915564
ucuugcuuuggagaaaugu

SEQ ID NO: 1089315 - RNA, 19 nt, Artificial Sequence
  Description of Artificial Sequence: Synthetic oligonucleotide
  Antisense strand to SEQ ID NO: 1089314
acauuucuccaaagcaaga

SEQ ID NO: 1089316 - RNA, 19 nt, Artificial Sequence
  Description of Artificial Sequence: Synthetic oligonucleotide
  Sense strand starting at position 1025 of SEQ ID NO: 915564
caaacagguugaggaauuu

SEQ ID NO: 1089317 - RNA, 19 nt, Artificial Sequence
  Description of Artificial Sequence: Synthetic oligonucleotide
  Antisense strand to SEQ ID NO: 1089316
aaauuccucaaccuguuug

SEQ ID NO: 1089318 - RNA, 19 nt, Artificial Sequence
  Description of Artificial Sequence: Synthetic oligonucleotide
  Sense strand starting at position 1174 of SEQ ID NO: 915564
aggagugucaugggacacu

SEQ ID NO: 1089319 - RNA, 19 nt, Artificial Sequence
  Description of Artificial Sequence: Synthetic oligonucleotide
  Antisense strand to SEQ ID NO: 1089318
agugucccaugacacuccu

SEQ ID NO: 1089320 - RNA, 19 nt, Artificial Sequence
  Description of Artificial Sequence: Synthetic oligonucleotide
  Sense strand starting at position 1191 of SEQ ID NO: 915564
cucagugggagucacuuua

SEQ ID NO: 1089321 - RNA, 19 nt, Artificial Sequence
  Description of Artificial Sequence: Synthetic oligonucleotide
  Antisense strand to SEQ ID NO: 1089320
uaaagugacucccacugag

SEQ ID NO: 1089322 - RNA, 19 nt, Artificial Sequence
  Description of Artificial Sequence: Synthetic oligonucleotide
  Sense strand starting at position 1303 of SEQ ID NO: 915564
guggguuuccugcuguagu

SEQ ID NO: 1089323 - RNA, 19 nt, Artificial Sequence
  Description of Artificial Sequence: Synthetic oligonucleotide
  Antisense strand to SEQ ID NO: 1089322
acuacagcaggaaacccac

SEQ ID NO: 1089324 - RNA, 19 nt, Artificial Sequence
  Description of Artificial Sequence: Synthetic oligonucleotide
  Sense strand starting at position 1474 of SEQ ID NO: 915564
agcccagguaaguguuaaa

SEQ ID NO: 1089325 - RNA, 19 nt, Artificial Sequence
  Description of Artificial Sequence: Synthetic oligonucleotide
  Antisense strand to SEQ ID NO: 1089324
uuuaacacuuaccugggcu

SEQ ID NO: 1089326 - RNA, 19 nt, Artificial Sequence
  Description of Artificial Sequence: Synthetic oligonucleotide
  Sense strand starting at position 1985 of SEQ ID NO: 915564
cugggaguacuuuauccuu

SEQ ID NO: 1089327 - RNA, 19 nt, Artificial Sequence
  Description of Artificial Sequence: Synthetic oligonucleotide
  Antisense strand to SEQ ID NO: 1089326
aaggauaaaguacucccag

SEQ ID NO: 1089328 - RNA, 19 nt, Artificial Sequence
  Description of Artificial Sequence: Synthetic oligonucleotide
  Sense strand starting at position 1987 of SEQ ID NO: 915564
gggaguacuuuauccuuua

SEQ ID NO: 1089329 - RNA, 19 nt, Artificial Sequence
  Description of Artificial Sequence: Synthetic oligonucleotide
  Antisense strand to SEQ ID NO: 1089328
uaaaggauaaaguacuccc

SEQ ID NO: 1089330 - RNA, 19 nt, Artificial Sequence
  Description of Artificial Sequence: Synthetic oligonucleotide
  Sense strand starting at position 1988 of SEQ ID NO: 915564
ggaguacuuuauccuuuag

SEQ ID NO: 1089331 - RNA, 19 nt, Artificial Sequence
  Description of Artificial Sequence: Synthetic oligonucleotide
  Antisense strand to SEQ ID NO: 1089330
cuaaaggauaaaguacucc

SEQ ID NO: 1089332 - RNA, 19 nt, Artificial Sequence
  Description of Artificial Sequence: Synthetic oligonucleotide
  Sense strand starting at position 2000 of SEQ ID NO: 915564
ccuuuagagauauggcugu

SEQ ID NO: 1089333 - RNA, 19 nt, Artificial Sequence
  Description of Artificial Sequence: Synthetic oligonucleotide
  Antisense strand to SEQ ID NO: 1089332
acagccauaucucuaaagg

SEQ ID NO: 1089334 - RNA, 19 nt, Artificial Sequence
  Description of Artificial Sequence: Synthetic oligonucleotide
  Sense strand starting at position 2004 of SEQ ID NO: 915564
uagagauauggcuguuugu

SEQ ID NO: 1089335 - RNA, 19 nt, Artificial Sequence
  Description of Artificial Sequence: Synthetic oligonucleotide
  Antisense strand to SEQ ID NO: 1089334
acaaacagccauaucucua

SEQ ID NO: 1089336 - RNA, 19 nt, Artificial Sequence
  Description of Artificial Sequence: Synthetic oligonucleotide
  Sense strand starting at position 2007 of SEQ ID NO: 915564
agauauggcuguuugugga

SEQ ID NO: 1089337 - RNA, 19 nt, Artificial Sequence
  Description of Artificial Sequence: Synthetic oligonucleotide
  Antisense strand to SEQ ID NO: 1089336
uccacaaacagccauaucu

SEQ ID NO: 1089338 - RNA, 19 nt, Artificial Sequence
  Description of Artificial Sequence: Synthetic oligonucleotide
  Sense strand starting at position 2096 of SEQ ID NO: 915564
aggagcacgagucauguau

SEQ ID NO: 1089339 - RNA, 19 nt, Artificial Sequence
  Description of Artificial Sequence: Synthetic oligonucleotide
  Antisense strand to SEQ ID NO: 1089338
auacaugacucgugcuccu

SEQ ID NO: 1089340 - RNA, 19 nt, Artificial Sequence
  Description of Artificial Sequence: Synthetic oligonucleotide
  Sense strand starting at position 2642 of SEQ ID NO: 915564
gggcuacugucuuucagga

SEQ ID NO: 1089341 - RNA, 19 nt, Artificial Sequence
  Description of Artificial Sequence: Synthetic oligonucleotide
  Antisense strand to SEQ ID NO: 1089340
uccugaaagacaguagccc

SEQ ID NO: 1089342 - RNA, 19 nt, Artificial Sequence
  Description of Artificial Sequence: Synthetic oligonucleotide
  Sense strand starting at position 2695 of SEQ ID NO: 915564
ccugcagcuccucauaaga

SEQ ID NO: 1089343 - RNA, 19 nt, Artificial Sequence
  Description of Artificial Sequence: Synthetic oligonucleotide
  Antisense strand to SEQ ID NO: 1089342
ucuuaugaggagcugcagg

SEQ ID NO: 1089344 - RNA, 19 nt, Artificial Sequence
  Description of Artificial Sequence: Synthetic oligonucleotide
  Sense strand starting at position 2731 of SEQ ID NO: 915564
gaaagucugucagccacaa

SEQ ID NO: 1089345 - RNA, 19 nt, Artificial Sequence
  Description of Artificial Sequence: Synthetic oligonucleotide
  Antisense strand to SEQ ID NO: 1089344
uuguggcugacagacuuuc

SEQ ID NO: 1089346 - RNA, 19 nt, Artificial Sequence
  Description of Artificial Sequence: Synthetic oligonucleotide
  Sense strand starting at position 2735 of SEQ ID NO: 915564
gucugucagccacaaacuu

SEQ ID NO: 1089347 - RNA, 19 nt, Artificial Sequence
  Description of Artificial Sequence: Synthetic oligonucleotide
  Antisense strand to SEQ ID NO: 1089346
aaguuuguggcugacagac

SEQ ID NO: 1089348 - RNA, 19 nt, Artificial Sequence
  Description of Artificial Sequence: Synthetic oligonucleotide
  Sense strand starting at position 2748 of SEQ ID NO: 915564
aaacuucguuucccaggua

SEQ ID NO: 1089349 - RNA, 19 nt, Artificial Sequence
  Description of Artificial Sequence: Synthetic oligonucleotide
  Antisense strand to SEQ ID NO: 1089348
uaccugggaaacgaaguuu

SEQ ID NO: 1089350 - RNA, 19 nt, Artificial Sequence
  Description of Artificial Sequence: Synthetic oligonucleotide
  Sense strand starting at position 2760 of SEQ ID NO: 915564
ccagguaucuggucaguca

SEQ ID NO: 1089351 - RNA, 19 nt, Artificial Sequence
  Description of Artificial Sequence: Synthetic oligonucleotide
  Antisense strand to SEQ ID NO: 1089350
ugacugaccagauaccugg

SEQ ID NO: 1089352 - RNA, 19 nt, Artificial Sequence
  Description of Artificial Sequence: Synthetic oligonucleotide
  Sense strand starting at position 2835 of SEQ ID NO: 915564
accugagucugggugauga

SEQ ID NO: 1089353 - RNA, 19 nt, Artificial Sequence
  Description of Artificial Sequence: Synthetic oligonucleotide
  Antisense strand to SEQ ID NO: 1089352
ucaucacccagacucaggu

SEQ ID NO: 1089354 - RNA, 19 nt, Artificial Sequence
  Description of Artificial Sequence: Synthetic oligonucleotide
  Sense strand starting at position 2902 of SEQ ID NO: 915564
accuguucucugugggaaa

SEQ ID NO: 1089355 - RNA, 19 nt, Artificial Sequence
  Description of Artificial Sequence: Synthetic oligonucleotide
  Antisense strand to SEQ ID NO: 1089354
uuucccacagagaacaggu

SEQ ID NO: 1089356 - RNA, 19 nt, Artificial Sequence
  Description of Artificial Sequence: Synthetic oligonucleotide
  Sense strand starting at position 2986 of SEQ ID NO: 915564
ggcugagaauaggcuuuaa

SEQ ID NO: 1089357 - RNA, 19 nt, Artificial Sequence
  Description of Artificial Sequence: Synthetic oligonucleotide
  Antisense strand to SEQ ID NO: 1089356
uuaaagccuauucucagcc

SEQ ID NO: 1089358 - RNA, 19 nt, Artificial Sequence
  Description of Artificial Sequence: Synthetic oligonucleotide
  Sense strand starting at position 3021 of SEQ ID NO: 915564
uggaaucccagaugugcua

SEQ ID NO: 1089359 - RNA, 19 nt, Artificial Sequence
  Description of Artificial Sequence: Synthetic oligonucleotide
  Antisense strand to SEQ ID NO: 1089358
uagcacaucugggauucca

SEQ ID NO: 1089360 - RNA, 19 nt, Artificial Sequence
  Description of Artificial Sequence: Synthetic oligonucleotide
  Sense strand starting at position 3060 of SEQ ID NO: 915564
gggcacaucccugagcuuu

SEQ ID NO: 1089361 - RNA, 19 nt, Artificial Sequence
  Description of Artificial Sequence: Synthetic oligonucleotide
  Antisense strand to SEQ ID NO: 1089360
aaagcucagggaugugccc

SEQ ID NO: 1089362 - RNA, 19 nt, Artificial Sequence
  Description of Artificial Sequence: Synthetic oligonucleotide
  Sense strand starting at position 3114 of SEQ ID NO: 915564
aacaguauuuacugaugga

SEQ ID NO: 1089363 - RNA, 19 nt, Artificial Sequence
  Description of Artificial Sequence: Synthetic oligonucleotide
  Antisense strand to SEQ ID NO: 1089362
uccaucaguaaauacuguu

SEQ ID NO: 1089364 - RNA, 19 nt, Artificial Sequence
  Description of Artificial Sequence: Synthetic oligonucleotide
  Sense strand starting at position 3117 of SEQ ID NO: 915564
aguauuuacugauggaauu

SEQ ID NO: 1089365 - RNA, 19 nt, Artificial Sequence
  Description of Artificial Sequence: Synthetic oligonucleotide
  Antisense strand to SEQ ID NO: 1089364
aauuccaucaguaaauacu

SEQ ID NO: 1089366 - RNA, 19 nt, Artificial Sequence
  Description of Artificial Sequence: Synthetic oligonucleotide
  Sense strand starting at position 3264 of SEQ ID NO: 915564
agauucucauuugagaguu

SEQ ID NO: 1089367 - RNA, 19 nt, Artificial Sequence
  Description of Artificial Sequence: Synthetic oligonucleotide
  Antisense strand to SEQ ID NO: 1089366
aacucucaaaugagaaucu

SEQ ID NO: 1089368 - RNA, 19 nt, Artificial Sequence
  Description of Artificial Sequence: Synthetic oligonucleotide
  Sense strand starting at position 3272 of SEQ ID NO: 915564
auuugagaguugcugucuu

SEQ ID NO: 1089369 - RNA, 19 nt, Artificial Sequence
  Description of Artificial Sequence: Synthetic oligonucleotide
  Antisense strand to SEQ ID NO: 1089368
aagacagcaacucucaaau

SEQ ID NO: 1089370 - RNA, 19 nt, Artificial Sequence
  Description of Artificial Sequence: Synthetic oligonucleotide
  Sense strand starting at position 3284 of SEQ ID NO: 915564
cugucuuuguaccuggaga

SEQ ID NO: 1089371 - RNA, 19 nt, Artificial Sequence
  Description of Artificial Sequence: Synthetic oligonucleotide
  Antisense strand to SEQ ID NO: 1089370
ucuccagguacaaagacag

SEQ ID NO: 1089372 - RNA, 19 nt, Artificial Sequence
  Description of Artificial Sequence: Synthetic oligonucleotide
  Sense strand starting at position 3285 of SEQ ID NO: 915564
ugucuuuguaccuggagaa

SEQ ID NO: 1089373 - RNA, 19 nt, Artificial Sequence
  Description of Artificial Sequence: Synthetic oligonucleotide
  Antisense strand to SEQ ID NO: 1089372
uucuccagguacaaagaca

SEQ ID NO: 1089374 - RNA, 19 nt, Artificial Sequence
  Description of Artificial Sequence: Synthetic oligonucleotide
  Sense strand starting at position 3286 of SEQ ID NO: 915564
gucuuuguaccuggagaaa

SEQ ID NO: 1089375 - RNA, 19 nt, Artificial Sequence
  Description of Artificial Sequence: Synthetic oligonucleotide
  Antisense strand to SEQ ID NO: 1089374
uuucuccagguacaaagac

SEQ ID NO: 1089376 - RNA, 19 nt, Artificial Sequence
  Description of Artificial Sequence: Synthetic oligonucleotide
  Sense strand starting at position 3383 of SEQ ID NO: 915564
guguaucaccauuagcuca

SEQ ID NO: 1089377 - RNA, 19 nt, Artificial Sequence
  Description of Artificial Sequence: Synthetic oligonucleotide
  Antisense strand to SEQ ID NO: 1089376
ugagcuaauggugauacac

SEQ ID NO: 1089378 - RNA, 19 nt, Artificial Sequence
  Description of Artificial Sequence: Synthetic oligonucleotide
  Sense strand starting at position 3929 of SEQ ID NO: 915564
cagaguagccugggugaca

SEQ ID NO: 1089379 - RNA, 19 nt, Artificial Sequence
  Description of Artificial Sequence: Synthetic oligonucleotide
  Antisense strand to SEQ ID NO: 1089378
ugucacccaggcuacucug

SEQ ID NO: 1089380 - RNA, 19 nt, Artificial Sequence
  Description of Artificial Sequence: Synthetic oligonucleotide
  Sense strand starting at position 336 of SEQ ID NO: 915565
agccaaagucucuaguuag

SEQ ID NO: 1089381 - RNA, 19 nt, Artificial Sequence
  Description of Artificial Sequence: Synthetic oligonucleotide
  Antisense strand to SEQ ID NO: 1089380
cuaacuagagacuuuggcu

SEQ ID NO: 1089382 - RNA, 19 nt, Artificial Sequence
  Description of Artificial Sequence: Synthetic oligonucleotide
  Sense strand starting at position 712 of SEQ ID NO: 915565
ggccaaaggugacugcuau

SEQ ID NO: 1089383 - RNA, 19 nt, Artificial Sequence
  Description of Artificial Sequence: Synthetic oligonucleotide
  Antisense strand to SEQ ID NO: 1089382
auagcagucaccuuuggcc

SEQ ID NO: 1089384 - RNA, 19 nt, Artificial Sequence
  Description of Artificial Sequence: Synthetic oligonucleotide
  Sense strand starting at position 713 of SEQ ID NO: 915565
gccaaaggugacugcuaua

SEQ ID NO: 1089385 - RNA, 19 nt, Artificial Sequence
  Description of Artificial Sequence: Synthetic oligonucleotide
  Antisense strand to SEQ ID NO: 1089384
uauagcagucaccuuuggc

SEQ ID NO: 1089386 - RNA, 19 nt, Artificial Sequence
  Description of Artificial Sequence: Synthetic oligonucleotide
  Sense strand starting at position 757 of SEQ ID NO: 915565
guagaaagauccuuuguuu

SEQ ID NO: 1089387 - RNA, 19 nt, Artificial Sequence
  Description of Artificial Sequence: Synthetic oligonucleotide
  Antisense strand to SEQ ID NO: 1089386
aaacaaaggaucuuucuac

SEQ ID NO: 1089388 - RNA, 19 nt, Artificial Sequence
  Description of Artificial Sequence: Synthetic oligonucleotide
  Sense strand starting at position 1117 of SEQ ID NO: 915565
guuugaccucccuaccuuu

SEQ ID NO: 1089389 - RNA, 19 nt, Artificial Sequence
  Description of Artificial Sequence: Synthetic oligonucleotide
  Antisense strand to SEQ ID NO: 1089388
aaagguagggaggucaaac

SEQ ID NO: 1089390 - RNA, 19 nt, Artificial Sequence
  Description of Artificial Sequence: Synthetic oligonucleotide
  Sense strand starting at position 1264 of SEQ ID NO: 915565
aucuuugucuccuuugaga

SEQ ID NO: 1089391 - RNA, 19 nt, Artificial Sequence
  Description of Artificial Sequence: Synthetic oligonucleotide
  Antisense strand to SEQ ID NO: 1089390
ucucaaaggagacaaagau

SEQ ID NO: 1089392 - RNA, 19 nt, Artificial Sequence
  Description of Artificial Sequence: Synthetic oligonucleotide
  Sense strand starting at position 1341 of SEQ ID NO: 915565
ggucucaucaacgagguuu

SEQ ID NO: 1089393 - RNA, 19 nt, Artificial Sequence
  Description of Artificial Sequence: Synthetic oligonucleotide
  Antisense strand to SEQ ID NO: 1089392
aaaccucguugaugagacc

SEQ ID NO: 1089394 - RNA, 19 nt, Artificial Sequence
  Description of Artificial Sequence: Synthetic oligonucleotide
  Sense strand starting at position 1371 of SEQ ID NO: 915565
cuggcuccagcugaguaaa

SEQ ID NO: 1089395 - RNA, 19 nt, Artificial Sequence
  Description of Artificial Sequence: Synthetic oligonucleotide
  Antisense strand to SEQ ID NO: 1089394
uuuacucagcuggagccag

SEQ ID NO: 1089396 - RNA, 19 nt, Artificial Sequence
  Description of Artificial Sequence: Synthetic oligonucleotide
  Sense strand starting at position 1569 of SEQ ID NO: 915565
uccuuaauuuguucggacu

SEQ ID NO: 1089397 - RNA, 19 nt, Artificial Sequence
  Description of Artificial Sequence: Synthetic oligonucleotide
  Antisense strand to SEQ ID NO: 1089396
aguccgaacaaauuaagga

SEQ ID NO: 1089398 - RNA, 19 nt, Artificial Sequence
  Description of Artificial Sequence: Synthetic oligonucleotide
  Sense strand starting at position 1570 of SEQ ID NO: 915565
ccuuaauuuguucggacuu

SEQ ID NO: 1089399 - RNA, 19 nt, Artificial Sequence
  Description of Artificial Sequence: Synthetic oligonucleotide
  Antisense strand to SEQ ID NO: 1089398
aaguccgaacaaauuaagg

SEQ ID NO: 1089400 - RNA, 19 nt, Artificial Sequence
  Description of Artificial Sequence: Synthetic oligonucleotide
  Sense strand starting at position 2360 of SEQ ID NO: 915565
ggcucuguccacuaaguau

SEQ ID NO: 1089401 - RNA, 19 nt, Artificial Sequence
  Description of Artificial Sequence: Synthetic oligonucleotide
  Antisense strand to SEQ ID NO: 1089400
auacuuaguggacagagcc

SEQ ID NO: 1089402 - RNA, 19 nt, Artificial Sequence
  Description of Artificial Sequence: Synthetic oligonucleotide
  Sense strand starting at position 2397 of SEQ ID NO: 915565
gguggagcucaugguagaa

SEQ ID NO: 1089403 - RNA, 19 nt, Artificial Sequence
  Description of Artificial Sequence: Synthetic oligonucleotide
  Antisense strand to SEQ ID NO: 1089402
uucuaccaugagcuccacc

SEQ ID NO: 1089404 - RNA, 19 nt, Artificial Sequence
  Description of Artificial Sequence: Synthetic oligonucleotide
  Sense strand starting at position 2523 of SEQ ID NO: 915565
cagagagaucuggguccca

SEQ ID NO: 1089405 - RNA, 19 nt, Artificial Sequence
  Description of Artificial Sequence: Synthetic oligonucleotide
  Antisense strand to SEQ ID NO: 1089404
ugggacccagaucucucug

SEQ ID NO: 1089406 - RNA, 19 nt, Artificial Sequence
  Description of Artificial Sequence: Synthetic oligonucleotide
  Sense strand starting at position 2546 of SEQ ID NO: 915565
aguuguuauuugcugguca

SEQ ID NO: 1089407 - RNA, 19 nt, Artificial Sequence
  Description of Artificial Sequence: Synthetic oligonucleotide
  Antisense strand to SEQ ID NO: 1089406
ugaccagcaaauaacaacu

SEQ ID NO: 1089408 - RNA, 19 nt, Artificial Sequence
  Description of Artificial Sequence: Synthetic oligonucleotide
  Sense strand starting at position 2548 of SEQ ID NO: 915565
uuguuauuugcuggucaag

SEQ ID NO: 1089409 - RNA, 19 nt, Artificial Sequence
  Description of Artificial Sequence: Synthetic oligonucleotide
  Antisense strand to SEQ ID NO: 1089408
cuugaccagcaaauaacaa

SEQ ID NO: 1089410 - RNA, 19 nt, Artificial Sequence
  Description of Artificial Sequence: Synthetic oligonucleotide
  Sense strand starting at position 2550 of SEQ ID NO: 915565
guuauuugcuggucaagug

SEQ ID NO: 1089411 - RNA, 19 nt, Artificial Sequence
  Description of Artificial Sequence: Synthetic oligonucleotide
  Antisense strand to SEQ ID NO: 1089410
cacuugaccagcaaauaac

SEQ ID NO: 1089412 - RNA, 19 nt, Artificial Sequence
  Description of Artificial Sequence: Synthetic oligonucleotide
  Sense strand starting at position 2627 of SEQ ID NO: 915565
acaguaaucccuugcagag

SEQ ID NO: 1089413 - RNA, 19 nt, Artificial Sequence
  Description of Artificial Sequence: Synthetic oligonucleotide
  Antisense strand to SEQ ID NO: 1089412
cucugcaagggauuacugu

SEQ ID NO: 1089414 - RNA, 19 nt, Artificial Sequence
  Description of Artificial Sequence: Synthetic oligonucleotide
  Sense strand starting at position 2651 of SEQ ID NO: 915565
gugaagguucggugaagga

SEQ ID NO: 1089415 - RNA, 19 nt, Artificial Sequence
  Description of Artificial Sequence: Synthetic oligonucleotide
  Antisense strand to SEQ ID NO: 1089414
uccuucaccgaaccuucac

SEQ ID NO: 1089416 - RNA, 19 nt, Artificial Sequence
  Description of Artificial Sequence: Synthetic oligonucleotide
  Sense strand starting at position 2866 of SEQ ID NO: 915565
cauggagucucaguaacuu

SEQ ID NO: 1089417 - RNA, 19 nt, Artificial Sequence
  Description of Artificial Sequence: Synthetic oligonucleotide
  Antisense strand to SEQ ID NO: 1089416
aaguuacugagacuccaug

SEQ ID NO: 1089418 - RNA, 19 nt, Artificial Sequence
  Description of Artificial Sequence: Synthetic oligonucleotide
  Sense strand starting at position 2874 of SEQ ID NO: 915565
cucaguaacuugccagaga

SEQ ID NO: 1089419 - RNA, 19 nt, Artificial Sequence
  Description of Artificial Sequence: Synthetic oligonucleotide
  Antisense strand to SEQ ID NO: 1089418
ucucuggcaaguuacugag

SEQ ID NO: 1089420 - RNA, 19 nt, Artificial Sequence
  Description of Artificial Sequence: Synthetic oligonucleotide
  Sense strand starting at position 3019 of SEQ ID NO: 915565
ugacccugucucuggaaua

SEQ ID NO: 1089421 - RNA, 19 nt, Artificial Sequence
  Description of Artificial Sequence: Synthetic oligonucleotide
  Antisense strand to SEQ ID NO: 1089420
uauuccagagacaggguca

SEQ ID NO: 1089422 - RNA, 19 nt, Artificial Sequence
  Description of Artificial Sequence: Synthetic oligonucleotide
  Sense strand starting at position 3039 of SEQ ID NO: 915565
agucuuugcguggaaugag

SEQ ID NO: 1089423 - RNA, 19 nt, Artificial Sequence
  Description of Artificial Sequence: Synthetic oligonucleotide
  Antisense strand to SEQ ID NO: 1089422
cucauuccacgcaaagacu

SEQ ID NO: 1089424 - RNA, 19 nt, Artificial Sequence
  Description of Artificial Sequence: Synthetic oligonucleotide
  Sense strand starting at position 3063 of SEQ ID NO: 915565
ggguuuggagucuaacuuu

SEQ ID NO: 1089425 - RNA, 19 nt, Artificial Sequence
  Description of Artificial Sequence: Synthetic oligonucleotide
  Antisense strand to SEQ ID NO: 1089424
aaaguuagacuccaaaccc

SEQ ID NO: 1089426 - RNA, 19 nt, Artificial Sequence
  Description of Artificial Sequence: Synthetic oligonucleotide
  Sense strand starting at position 3152 of SEQ ID NO: 915565
ggauguagggaauguguga

SEQ ID NO: 1089427 - RNA, 19 nt, Artificial Sequence
  Description of Artificial Sequence: Synthetic oligonucleotide
  Antisense strand to SEQ ID NO: 1089426
ucacacauucccuacaucc

SEQ ID NO: 1089428 - RNA, 19 nt, Artificial Sequence
  Description of Artificial Sequence: Synthetic oligonucleotide
  Sense strand starting at position 3248 of SEQ ID NO: 915565
ccagaaaugugaguacaug

SEQ ID NO: 1089429 - RNA, 19 nt, Artificial Sequence
  Description of Artificial Sequence: Synthetic oligonucleotide
  Antisense strand to SEQ ID NO: 1089428
cauguacucacauuucugg

SEQ ID NO: 1089430 - RNA, 19 nt, Artificial Sequence
  Description of Artificial Sequence: Synthetic oligonucleotide
  Sense strand starting at position 3254 of SEQ ID NO: 915565
augugaguacaugaccauu

SEQ ID NO: 1089431 - RNA, 19 nt, Artificial Sequence
  Description of Artificial Sequence: Synthetic oligonucleotide
  Antisense strand to SEQ ID NO: 1089430
aauggucauguacucacau

SEQ ID NO: 1089432 - RNA, 19 nt, Artificial Sequence
  Description of Artificial Sequence: Synthetic oligonucleotide
  Sense strand starting at position 3287 of SEQ ID NO: 915565
caagaacuggcuuggauua

SEQ ID NO: 1089433 - RNA, 19 nt, Artificial Sequence
  Description of Artificial Sequence: Synthetic oligonucleotide
  Antisense strand to SEQ ID NO: 1089432
uaauccaagccaguucuug

SEQ ID NO: 1089434 - RNA, 19 nt, Artificial Sequence
  Description of Artificial Sequence: Synthetic oligonucleotide
  Sense strand starting at position 3288 of SEQ ID NO: 915565
aagaacuggcuuggauuaa

SEQ ID NO: 1089435 - RNA, 19 nt, Artificial Sequence
  Description of Artificial Sequence: Synthetic oligonucleotide
  Antisense strand to SEQ ID NO: 1089434
uuaauccaagccaguucuu

SEQ ID NO: 1089436 - RNA, 19 nt, Artificial Sequence
  Description of Artificial Sequence: Synthetic oligonucleotide
  Sense strand starting at position 3377 of SEQ ID NO: 915565
uugggucuaucucuccaaa

SEQ ID NO: 1089437 - RNA, 19 nt, Artificial Sequence
  Description of Artificial Sequence: Synthetic oligonucleotide
  Antisense strand to SEQ ID NO: 1089436
uuuggagagauagacccaa

SEQ ID NO: 1089438 - RNA, 19 nt, Artificial Sequence
  Description of Artificial Sequence: Synthetic oligonucleotide
  Sense strand starting at position 3379 of SEQ ID NO: 915565
gggucuaucucuccaaauc

SEQ ID NO: 1089439 - RNA, 19 nt, Artificial Sequence
  Description of Artificial Sequence: Synthetic oligonucleotide
  Antisense strand to SEQ ID NO: 1089438
gauuuggagagauagaccc

SEQ ID NO: 1089440 - RNA, 19 nt, Artificial Sequence
  Description of Artificial Sequence: Synthetic oligonucleotide
  Sense strand starting at position 3473 of SEQ ID NO: 915565
guaugaagaucccuuuaaa

SEQ ID NO: 1089441 - RNA, 19 nt, Artificial Sequence
  Description of Artificial Sequence: Synthetic oligonucleotide
  Antisense strand to SEQ ID NO: 1089440
uuuaaagggaucuucauac

SEQ ID NO: 1089442 - RNA, 19 nt, Artificial Sequence
  Description of Artificial Sequence: Synthetic oligonucleotide
  Sense strand starting at position 3484 of SEQ ID NO: 915565
ccuuuaaacuuucuggaag

SEQ ID NO: 1089443 - RNA, 19 nt, Artificial Sequence
  Description of Artificial Sequence: Synthetic oligonucleotide
  Antisense strand to SEQ ID NO: 1089442
cuuccagaaaguuuaaagg

SEQ ID NO: 1089444 - RNA, 19 nt, Artificial Sequence
  Description of Artificial Sequence: Synthetic oligonucleotide
  Sense strand starting at position 3536 of SEQ ID NO: 915565
agaaguucugugcauggaa

SEQ ID NO: 1089445 - RNA, 19 nt, Artificial Sequence
  Description of Artificial Sequence: Synthetic oligonucleotide
  Antisense strand to SEQ ID NO: 1089444
uuccaugcacagaacuucu

SEQ ID NO: 1089446 - RNA, 19 nt, Artificial Sequence
  Description of Artificial Sequence: Synthetic oligonucleotide
  Sense strand starting at position 3582 of SEQ ID NO: 915565
uggcuaaguuuaucugauu

SEQ ID NO: 1089447 - RNA, 19 nt, Artificial Sequence
  Description of Artificial Sequence: Synthetic oligonucleotide
  Antisense strand to SEQ ID NO: 1089446
aaucagauaaacuuagcca

SEQ ID NO: 1089448 - RNA, 19 nt, Artificial Sequence
  Description of Artificial Sequence: Synthetic oligonucleotide
  Sense strand starting at position 3583 of SEQ ID NO: 915565
ggcuaaguuuaucugauug

SEQ ID NO: 1089449 - RNA, 19 nt, Artificial Sequence
  Description of Artificial Sequence: Synthetic oligonucleotide
  Antisense strand to SEQ ID NO: 1089448
caaucagauaaacuuagcc

SEQ ID NO: 1089450 - RNA, 19 nt, Artificial Sequence
  Description of Artificial Sequence: Synthetic oligonucleotide
  Sense strand starting at position 3588 of SEQ ID NO: 915565
aguuuaucugauugaucuu

SEQ ID NO: 1089451 - RNA, 19 nt, Artificial Sequence
  Description of Artificial Sequence: Synthetic oligonucleotide
  Antisense strand to SEQ ID NO: 1089450
aagaucaaucagauaaacu

SEQ ID NO: 1089452 - RNA, 19 nt, Artificial Sequence
  Description of Artificial Sequence: Synthetic oligonucleotide
  Sense strand starting at position 3932 of SEQ ID NO: 915565
ggccuaucucauugaucuu

SEQ ID NO: 1089453 - RNA, 19 nt, Artificial Sequence
  Description of Artificial Sequence: Synthetic oligonucleotide
  Antisense strand to SEQ ID NO: 1089452
aagaucaaugagauaggcc

SEQ ID NO: 1089454 - RNA, 19 nt, Artificial Sequence
  Description of Artificial Sequence: Synthetic oligonucleotide
  Sense strand starting at position 3938 of SEQ ID NO: 915565
ucucauugaucuuugaguc

SEQ ID NO: 1089455 - RNA, 19 nt, Artificial Sequence
  Description of Artificial Sequence: Synthetic oligonucleotide
  Antisense strand to SEQ ID NO: 1089454
gacucaaagaucaaugaga

SEQ ID NO: 1089456 - RNA, 19 nt, Artificial Sequence
  Description of Artificial Sequence: Synthetic oligonucleotide
  Sense strand starting at position 3939 of SEQ ID NO: 915565
cucauugaucuuugaguca

SEQ ID NO: 1089457 - RNA, 19 nt, Artificial Sequence
  Description of Artificial Sequence: Synthetic oligonucleotide
  Antisense strand to SEQ ID NO: 1089456
ugacucaaagaucaaugag

SEQ ID NO: 1089458 - RNA, 19 nt, Artificial Sequence
  Description of Artificial Sequence: Synthetic oligonucleotide
  Sense strand starting at position 3979 of SEQ ID NO: 915565
gggcaugguauauacagua

SEQ ID NO: 1089459 - RNA, 19 nt, Artificial Sequence
  Description of Artificial Sequence: Synthetic oligonucleotide
  Antisense strand to SEQ ID NO: 1089458
uacuguauauaccaugccc

SEQ ID NO: 1089460 - RNA, 19 nt, Artificial Sequence
  Description of Artificial Sequence: Synthetic oligonucleotide
  Sense strand starting at position 119 of SEQ ID NO: 915566
aguccaaauguccaucuau

SEQ ID NO: 1089461 - RNA, 19 nt, Artificial Sequence
  Description of Artificial Sequence: Synthetic oligonucleotide
  Antisense strand to SEQ ID NO: 1089460
auagauggacauuuggacu

SEQ ID NO: 1089462 - RNA, 19 nt, Artificial Sequence
  Description of Artificial Sequence: Synthetic oligonucleotide
  Sense strand starting at position 138 of SEQ ID NO: 915566
uuggguaaguucucaagaa

SEQ ID NO: 1089463 - RNA, 19 nt, Artificial Sequence
  Description of Artificial Sequence: Synthetic oligonucleotide
  Antisense strand to SEQ ID NO: 1089462
uucuugagaacuuacccaa

SEQ ID NO: 1089464 - RNA, 19 nt, Artificial Sequence
  Description of Artificial Sequence: Synthetic oligonucleotide
  Sense strand starting at position 142 of SEQ ID NO: 915566
guaaguucucaagaaaugc

SEQ ID NO: 1089465 - RNA, 19 nt, Artificial Sequence
  Description of Artificial Sequence: Synthetic oligonucleotide
  Antisense strand to SEQ ID NO: 1089464
gcauuucuugagaacuuac

SEQ ID NO: 1089466 - RNA, 19 nt, Artificial Sequence
  Description of Artificial Sequence: Synthetic oligonucleotide
  Sense strand starting at position 258 of SEQ ID NO: 915566
cuguuaagucaugggaauc

SEQ ID NO: 1089467 - RNA, 19 nt, Artificial Sequence
  Description of Artificial Sequence: Synthetic oligonucleotide
  Antisense strand to SEQ ID NO: 1089466
gauucccaugacuuaacag

SEQ ID NO: 1089468 - RNA, 19 nt, Artificial Sequence
  Description of Artificial Sequence: Synthetic oligonucleotide
  Sense strand starting at position 259 of SEQ ID NO: 915566
uguuaagucaugggaauca

SEQ ID NO: 1089469 - RNA, 19 nt, Artificial Sequence
  Description of Artificial Sequence: Synthetic oligonucleotide
  Antisense strand to SEQ ID NO: 1089468
ugauucccaugacuuaaca

SEQ ID NO: 1089470 - RNA, 19 nt, Artificial Sequence
  Description of Artificial Sequence: Synthetic oligonucleotide
  Sense strand starting at position 347 of SEQ ID NO: 915566
guuuguguuaccuucgcaa

SEQ ID NO: 1089471 - RNA, 19 nt, Artificial Sequence
  Description of Artificial Sequence: Synthetic oligonucleotide
  Antisense strand to SEQ ID NO: 1089470
uugcgaagguaacacaaac

SEQ ID NO: 1089472 - RNA, 19 nt, Artificial Sequence
  Description of Artificial Sequence: Synthetic oligonucleotide
  Sense strand starting at position 374 of SEQ ID NO: 915566
gcaaguguuacugcaguuu

SEQ ID NO: 1089473 - RNA, 19 nt, Artificial Sequence
  Description of Artificial Sequence: Synthetic oligonucleotide
  Antisense strand to SEQ ID NO: 1089472
aaacugcaguaacacuugc

SEQ ID NO: 1089474 - RNA, 19 nt, Artificial Sequence
  Description of Artificial Sequence: Synthetic oligonucleotide
  Sense strand starting at position 437 of SEQ ID NO: 915566
aggagauuaagauguuugu

SEQ ID NO: 1089475 - RNA, 19 nt, Artificial Sequence
  Description of Artificial Sequence: Synthetic oligonucleotide
  Antisense strand to SEQ ID NO: 1089474
acaaacaucuuaaucuccu

SEQ ID NO: 1089476 - RNA, 19 nt, Artificial Sequence
  Description of Artificial Sequence: Synthetic oligonucleotide
  Sense strand starting at position 501 of SEQ ID NO: 915566
uggaacuaguuacuagaau

SEQ ID NO: 1089477 - RNA, 19 nt, Artificial Sequence
  Description of Artificial Sequence: Synthetic oligonucleotide
  Antisense strand to SEQ ID NO: 1089476
auucuaguaacuaguucca

SEQ ID NO: 1089478 - RNA, 19 nt, Artificial Sequence
  Description of Artificial Sequence: Synthetic oligonucleotide
  Sense strand starting at position 513 of SEQ ID NO: 915566
cuagaauuccuaggaguua

SEQ ID NO: 1089479 - RNA, 19 nt, Artificial Sequence
  Description of Artificial Sequence: Synthetic oligonucleotide
  Antisense strand to SEQ ID NO: 1089478
uaacuccuaggaauucuag

SEQ ID NO: 1089480 - RNA, 19 nt, Artificial Sequence
  Description of Artificial Sequence: Synthetic oligonucleotide
  Sense strand starting at position 695 of SEQ ID NO: 915566
gugcgugccagguuacaua

SEQ ID NO: 1089481 - RNA, 19 nt, Artificial Sequence
  Description of Artificial Sequence: Synthetic oligonucleotide
  Antisense strand to SEQ ID NO: 1089480
uauguaaccuggcacgcac

SEQ ID NO: 1089482 - RNA, 19 nt, Artificial Sequence
  Description of Artificial Sequence: Synthetic oligonucleotide
  Sense strand starting at position 883 of SEQ ID NO: 915566
aauauaauuguugggugaa

SEQ ID NO: 1089483 - RNA, 19 nt, Artificial Sequence
  Description of Artificial Sequence: Synthetic oligonucleotide
  Antisense strand to SEQ ID NO: 1089482
uucacccaacaauuauauu

SEQ ID NO: 1089484 - RNA, 19 nt, Artificial Sequence
  Description of Artificial Sequence: Synthetic oligonucleotide
  Sense strand starting at position 885 of SEQ ID NO: 915566
uauaauuguugggugaaag

SEQ ID NO: 1089485 - RNA, 19 nt, Artificial Sequence
  Description of Artificial Sequence: Synthetic oligonucleotide
  Antisense strand to SEQ ID NO: 1089484
cuuucacccaacaauuaua

SEQ ID NO: 1089486 - RNA, 19 nt, Artificial Sequence
  Description of Artificial Sequence: Synthetic oligonucleotide
  Sense strand starting at position 886 of SEQ ID NO: 915566
auaauuguugggugaaaga

SEQ ID NO: 1089487 - RNA, 19 nt, Artificial Sequence
  Description of Artificial Sequence: Synthetic oligonucleotide
  Antisense strand to SEQ ID NO: 1089486
ucuuucacccaacaauuau

SEQ ID NO: 1089488 - RNA, 19 nt, Artificial Sequence
  Description of Artificial Sequence: Synthetic oligonucleotide
  Sense strand starting at position 957 of SEQ ID NO: 915566
uagggagguuaaucauauu

SEQ ID NO: 1089489 - RNA, 19 nt, Artificial Sequence
  Description of Artificial Sequence: Synthetic oligonucleotide
  Antisense strand to SEQ ID NO: 1089488
aauaugauuaaccucccua

SEQ ID NO: 1089490 - RNA, 19 nt, Artificial Sequence
  Description of Artificial Sequence: Synthetic oligonucleotide
  Sense strand starting at position 986 of SEQ ID NO: 915566
gcagacauagauggucaaa

SEQ ID NO: 1089491 - RNA, 19 nt, Artificial Sequence
  Description of Artificial Sequence: Synthetic oligonucleotide
  Antisense strand to SEQ ID NO: 1089490
uuugaccaucuaugucugc

SEQ ID NO: 1089492 - RNA, 19 nt, Artificial Sequence
  Description of Artificial Sequence: Synthetic oligonucleotide
  Sense strand starting at position 1096 of SEQ ID NO: 915566
uguuucuugaccuggauga

SEQ ID NO: 1089493 - RNA, 19 nt, Artificial Sequence
  Description of Artificial Sequence: Synthetic oligonucleotide
  Antisense strand to SEQ ID NO: 1089492
ucauccaggucaagaaaca

SEQ ID NO: 1089494 - RNA, 19 nt, Artificial Sequence
  Description of Artificial Sequence: Synthetic oligonucleotide
  Sense strand starting at position 1097 of SEQ ID NO: 915566
guuucuugaccuggaugau

SEQ ID NO: 1089495 - RNA, 19 nt, Artificial Sequence
  Description of Artificial Sequence: Synthetic oligonucleotide
  Antisense strand to SEQ ID NO: 1089494
aucauccaggucaagaaac

SEQ ID NO: 1089496 - RNA, 19 nt, Artificial Sequence
  Description of Artificial Sequence: Synthetic oligonucleotide
  Sense strand starting at position 1100 of SEQ ID NO: 915566
ucuugaccuggaugauaau

SEQ ID NO: 1089497 - RNA, 19 nt, Artificial Sequence
  Description of Artificial Sequence: Synthetic oligonucleotide
  Antisense strand to SEQ ID NO: 1089496
auuaucauccaggucaaga

SEQ ID NO: 1089498 - RNA, 19 nt, Artificial Sequence
  Description of Artificial Sequence: Synthetic oligonucleotide
  Sense strand starting at position 1136 of SEQ ID NO: 915566
ucaguuauuguuuaaacug

SEQ ID NO: 1089499 - RNA, 19 nt, Artificial Sequence
  Description of Artificial Sequence: Synthetic oligonucleotide
  Antisense strand to SEQ ID NO: 1089498
caguuuaaacaauaacuga

SEQ ID NO: 1089500 - RNA, 19 nt, Artificial Sequence
  Description of Artificial Sequence: Synthetic oligonucleotide
  Sense strand starting at position 1263 of SEQ ID NO: 915566
cuuuaauggugaccuugaa

SEQ ID NO: 1089501 - RNA, 19 nt, Artificial Sequence
  Description of Artificial Sequence: Synthetic oligonucleotide
  Antisense strand to SEQ ID NO: 1089500
uucaaggucaccauuaaag

SEQ ID NO: 1089502 - RNA, 19 nt, Artificial Sequence
  Description of Artificial Sequence: Synthetic oligonucleotide
  Sense strand starting at position 1275 of SEQ ID NO: 915566
ccuugaauauuuguuguuu

SEQ ID NO: 1089503 - RNA, 19 nt, Artificial Sequence
  Description of Artificial Sequence: Synthetic oligonucleotide
  Antisense strand to SEQ ID NO: 1089502
aaacaacaaauauucaagg

SEQ ID NO: 1089504 - RNA, 19 nt, Artificial Sequence
  Description of Artificial Sequence: Synthetic oligonucleotide
  Sense strand starting at position 1323 of SEQ ID NO: 915566
gaguuaaggugagaauuuc

SEQ ID NO: 1089505 - RNA, 19 nt, Artificial Sequence
  Description of Artificial Sequence: Synthetic oligonucleotide
  Antisense strand to SEQ ID NO: 1089504
gaaauucucaccuuaacuc

SEQ ID NO: 1089506 - RNA, 19 nt, Artificial Sequence
  Description of Artificial Sequence: Synthetic oligonucleotide
  Sense strand starting at position 1434 of SEQ ID NO: 915566
accaguuaggcagaaauuc

SEQ ID NO: 1089507 - RNA, 19 nt, Artificial Sequence
  Description of Artificial Sequence: Synthetic oligonucleotide
  Antisense strand to SEQ ID NO: 1089506
gaauuucugccuaacuggu

SEQ ID NO: 1089508 - RNA, 19 nt, Artificial Sequence
  Description of Artificial Sequence: Synthetic oligonucleotide
  Sense strand starting at position 1530 of SEQ ID NO: 915566
aaggucaugccauaugauc

SEQ ID NO: 1089509 - RNA, 19 nt, Artificial Sequence
  Description of Artificial Sequence: Synthetic oligonucleotide
  Antisense strand to SEQ ID NO: 1089508
gaucauauggcaugaccuu

SEQ ID NO: 1089510 - RNA, 19 nt, Artificial Sequence
  Description of Artificial Sequence: Synthetic oligonucleotide
  Sense strand starting at position 1543 of SEQ ID NO: 915566
augauccagugauugcaaa

SEQ ID NO: 1089511 - RNA, 19 nt, Artificial Sequence
  Description of Artificial Sequence: Synthetic oligonucleotide
  Antisense strand to SEQ ID NO: 1089510
uuugcaaucacuggaucau

SEQ ID NO: 1089512 - RNA, 19 nt, Artificial Sequence
  Description of Artificial Sequence: Synthetic oligonucleotide
  Sense strand starting at position 1544 of SEQ ID NO: 915566
ugauccagugauugcaaau

SEQ ID NO: 1089513 - RNA, 19 nt, Artificial Sequence
  Description of Artificial Sequence: Synthetic oligonucleotide
  Antisense strand to SEQ ID NO: 1089512
auuugcaaucacuggauca

SEQ ID NO: 1089514 - RNA, 19 nt, Artificial Sequence
  Description of Artificial Sequence: Synthetic oligonucleotide
  Sense strand starting at position 1550 of SEQ ID NO: 915566
agugauugcaaauggauga

SEQ ID NO: 1089515 - RNA, 19 nt, Artificial Sequence
  Description of Artificial Sequence: Synthetic oligonucleotide
  Antisense strand to SEQ ID NO: 1089514
ucauccauuugcaaucacu

SEQ ID NO: 1089516 - RNA, 19 nt, Artificial Sequence
  Description of Artificial Sequence: Synthetic oligonucleotide
  Sense strand starting at position 1551 of SEQ ID NO: 915566
gugauugcaaauggaugaa

SEQ ID NO: 1089517 - RNA, 19 nt, Artificial Sequence
  Description of Artificial Sequence: Synthetic oligonucleotide
  Antisense strand to SEQ ID NO: 1089516
uucauccauuugcaaucac

SEQ ID NO: 1089518 - RNA, 19 nt, Artificial Sequence
  Description of Artificial Sequence: Synthetic oligonucleotide
  Sense strand starting at position 1554 of SEQ ID NO: 915566
auugcaaauggaugaacua

SEQ ID NO: 1089519 - RNA, 19 nt, Artificial Sequence
  Description of Artificial Sequence: Synthetic oligonucleotide
  Antisense strand to SEQ ID NO: 1089518
uaguucauccauuugcaau

SEQ ID NO: 1089520 - RNA, 19 nt, Artificial Sequence
  Description of Artificial Sequence: Synthetic oligonucleotide
  Sense strand starting at position 1588 of SEQ ID NO: 915566
ugaauaaauugugcaggaa

SEQ ID NO: 1089521 - RNA, 19 nt, Artificial Sequence
  Description of Artificial Sequence: Synthetic oligonucleotide
  Antisense strand to SEQ ID NO: 1089520
uuccugcacaauuuauuca

SEQ ID NO: 1089522 - RNA, 19 nt, Artificial Sequence
  Description of Artificial Sequence: Synthetic oligonucleotide
  Sense strand starting at position 1592 of SEQ ID NO: 915566
uaaauugugcaggaaguuu

SEQ ID NO: 1089523 - RNA, 19 nt, Artificial Sequence
  Description of Artificial Sequence: Synthetic oligonucleotide
  Antisense strand to SEQ ID NO: 1089522
aaacuuccugcacaauuua

SEQ ID NO: 1089524 - RNA, 19 nt, Artificial Sequence
  Description of Artificial Sequence: Synthetic oligonucleotide
  Sense strand starting at position 1628 of SEQ ID NO: 915566
aauggagacuuagagaaga

SEQ ID NO: 1089525 - RNA, 19 nt, Artificial Sequence
  Description of Artificial Sequence: Synthetic oligonucleotide
  Antisense strand to SEQ ID NO: 1089524
ucuucucuaagucuccauu

SEQ ID NO: 1089526 - RNA, 19 nt, Artificial Sequence
  Description of Artificial Sequence: Synthetic oligonucleotide
  Sense strand starting at position 2133 of SEQ ID NO: 915566
ugacuaagacuuuguuccu

SEQ ID NO: 1089527 - RNA, 19 nt, Artificial Sequence
  Description of Artificial Sequence: Synthetic oligonucleotide
  Antisense strand to SEQ ID NO: 1089526
aggaacaaagucuuaguca

SEQ ID NO: 1089528 - RNA, 19 nt, Artificial Sequence
  Description of Artificial Sequence: Synthetic oligonucleotide
  Sense strand starting at position 2815 of SEQ ID NO: 915566
agacuaagaugaguuugua

SEQ ID NO: 1089529 - RNA, 19 nt, Artificial Sequence
  Description of Artificial Sequence: Synthetic oligonucleotide
  Antisense strand to SEQ ID NO: 1089528
uacaaacucaucuuagucu

SEQ ID NO: 1089530 - RNA, 19 nt, Artificial Sequence
  Description of Artificial Sequence: Synthetic oligonucleotide
  Sense strand starting at position 2819 of SEQ ID NO: 915566
uaagaugaguuuguaacca

SEQ ID NO: 1089531 - RNA, 19 nt, Artificial Sequence
  Description of Artificial Sequence: Synthetic oligonucleotide
  Antisense strand to SEQ ID NO: 1089530
ugguuacaaacucaucuua

SEQ ID NO: 1089532 - RNA, 19 nt, Artificial Sequence
  Description of Artificial Sequence: Synthetic oligonucleotide
  Sense strand starting at position 3211 of SEQ ID NO: 915566
agugacagagaguguauaa

SEQ ID NO: 1089533 - RNA, 19 nt, Artificial Sequence
  Description of Artificial Sequence: Synthetic oligonucleotide
  Antisense strand to SEQ ID NO: 1089532
uuauacacucucugucacu

SEQ ID NO: 1089534 - RNA, 19 nt, Artificial Sequence
  Description of Artificial Sequence: Synthetic oligonucleotide
  Sense strand starting at position 3272 of SEQ ID NO: 915566
cuggcaaacuccuugaaug

SEQ ID NO: 1089535 - RNA, 19 nt, Artificial Sequence
  Description of Artificial Sequence: Synthetic oligonucleotide
  Antisense strand to SEQ ID NO: 1089534
cauucaaggaguuugccag

SEQ ID NO: 1089536 - RNA, 19 nt, Artificial Sequence
  Description of Artificial Sequence: Synthetic oligonucleotide
  Sense strand starting at position 3274 of SEQ ID NO: 915566
ggcaaacuccuugaaugua

SEQ ID NO: 1089537 - RNA, 19 nt, Artificial Sequence
  Description of Artificial Sequence: Synthetic oligonucleotide
  Antisense strand to SEQ ID NO: 1089536
uacauucaaggaguuugcc

SEQ ID NO: 1089538 - RNA, 19 nt, Artificial Sequence
  Description of Artificial Sequence: Synthetic oligonucleotide
  Sense strand starting at position 3282 of SEQ ID NO: 915566
ccuugaauguaaucagagu

SEQ ID NO: 1089539 - RNA, 19 nt, Artificial Sequence
  Description of Artificial Sequence: Synthetic oligonucleotide
  Antisense strand to SEQ ID NO: 1089538
acucugauuacauucaagg

SEQ ID NO: 1089540 - RNA, 19 nt, Artificial Sequence
  Description of Artificial Sequence: Synthetic oligonucleotide
  Sense strand starting at position 224 of SEQ ID NO: 915567
cggguccacaggugaaaua

SEQ ID NO: 1089541 - RNA, 19 nt, Artificial Sequence
  Description of Artificial Sequence: Synthetic oligonucleotide
  Antisense strand to SEQ ID NO: 1089540
uauuucaccuguggacccg

SEQ ID NO: 1089542 - RNA, 19 nt, Artificial Sequence
  Description of Artificial Sequence: Synthetic oligonucleotide
  Sense strand starting at position 272 of SEQ ID NO: 915567
auaguagauagcuggacaa

SEQ ID NO: 1089543 - RNA, 19 nt, Artificial Sequence
  Description of Artificial Sequence: Synthetic oligonucleotide
  Antisense strand to SEQ ID NO: 1089542
uuguccagcuaucuacuau

SEQ ID NO: 1089544 - RNA, 19 nt, Artificial Sequence
  Description of Artificial Sequence: Synthetic oligonucleotide
  Sense strand starting at position 330 of SEQ ID NO: 915567
uuguaaaucgaguaccaac

SEQ ID NO: 1089545 - RNA, 19 nt, Artificial Sequence
  Description of Artificial Sequence: Synthetic oligonucleotide
  Antisense strand to SEQ ID NO: 1089544
guugguacucgauuuacaa

SEQ ID NO: 1089546 - RNA, 19 nt, Artificial Sequence
  Description of Artificial Sequence: Synthetic oligonucleotide
  Sense strand starting at position 457 of SEQ ID NO: 915567
cugauccagccuuacaaga

SEQ ID NO: 1089547 - RNA, 19 nt, Artificial Sequence
  Description of Artificial Sequence: Synthetic oligonucleotide
  Antisense strand to SEQ ID NO: 1089546
ucuuguaaggcuggaucag

SEQ ID NO: 1089548 - RNA, 19 nt, Artificial Sequence
  Description of Artificial Sequence: Synthetic oligonucleotide
  Sense strand starting at position 600 of SEQ ID NO: 915567
aggucaaacuucuugcuaa

SEQ ID NO: 1089549 - RNA, 19 nt, Artificial Sequence
  Description of Artificial Sequence: Synthetic oligonucleotide
  Antisense strand to SEQ ID NO: 1089548
uuagcaagaaguuugaccu

SEQ ID NO: 1089550 - RNA, 19 nt, Artificial Sequence
  Description of Artificial Sequence: Synthetic oligonucleotide
  Sense strand starting at position 667 of SEQ ID NO: 915567
ugccguaucacugcugcaa

SEQ ID NO: 1089551 - RNA, 19 nt, Artificial Sequence
  Description of Artificial Sequence: Synthetic oligonucleotide
  Antisense strand to SEQ ID NO: 1089550
uugcagcagugauacggca

SEQ ID NO: 1089552 - RNA, 19 nt, Artificial Sequence
  Description of Artificial Sequence: Synthetic oligonucleotide
  Sense strand starting at position 668 of SEQ ID NO: 915567
gccguaucacugcugcaaa

SEQ ID NO: 1089553 - RNA, 19 nt, Artificial Sequence
  Description of Artificial Sequence: Synthetic oligonucleotide
  Antisense strand to SEQ ID NO: 1089552
uuugcagcagugauacggc

SEQ ID NO: 1089554 - RNA, 19 nt, Artificial Sequence
  Description of Artificial Sequence: Synthetic oligonucleotide
  Sense strand starting at position 671 of SEQ ID NO: 915567
guaucacugcugcaaauga

SEQ ID NO: 1089555 - RNA, 19 nt, Artificial Sequence
  Description of Artificial Sequence: Synthetic oligonucleotide
  Antisense strand to SEQ ID NO: 1089554
ucauuugcagcagugauac

SEQ ID NO: 1089556 - RNA, 19 nt, Artificial Sequence
  Description of Artificial Sequence: Synthetic oligonucleotide
  Sense strand starting at position 779 of SEQ ID NO: 915567
ccacacagguuguucuaau

SEQ ID NO: 1089557 - RNA, 19 nt, Artificial Sequence
  Description of Artificial Sequence: Synthetic oligonucleotide
  Antisense strand to SEQ ID NO: 1089556
auuagaacaaccugugugg

SEQ ID NO: 1089558 - RNA, 19 nt, Artificial Sequence
  Description of Artificial Sequence: Synthetic oligonucleotide
  Sense strand starting at position 816 of SEQ ID NO: 915567
agaaccacuuguuucugaa

SEQ ID NO: 1089559 - RNA, 19 nt, Artificial Sequence
  Description of Artificial Sequence: Synthetic oligonucleotide
  Antisense strand to SEQ ID NO: 1089558
uucagaaacaagugguucu

SEQ ID NO: 1089560 - RNA, 19 nt, Artificial Sequence
  Description of Artificial Sequence: Synthetic oligonucleotide
  Sense strand starting at position 921 of SEQ ID NO: 915567
gggaucuagaggugucacu

SEQ ID NO: 1089561 - RNA, 19 nt, Artificial Sequence
  Description of Artificial Sequence: Synthetic oligonucleotide
  Antisense strand to SEQ ID NO: 1089560
agugacaccucuagauccc

SEQ ID NO: 1089562 - RNA, 19 nt, Artificial Sequence
  Description of Artificial Sequence: Synthetic oligonucleotide
  Sense strand starting at position 965 of SEQ ID NO: 915567
ggcaguacugacuggauga

SEQ ID NO: 1089563 - RNA, 19 nt, Artificial Sequence
  Description of Artificial Sequence: Synthetic oligonucleotide
  Antisense strand to SEQ ID NO: 1089562
ucauccagucaguacugcc

SEQ ID NO: 1089564 - RNA, 19 nt, Artificial Sequence
  Description of Artificial Sequence: Synthetic oligonucleotide
  Sense strand starting at position 1021 of SEQ ID NO: 915567
cugacagcucccggagaua

SEQ ID NO: 1089565 - RNA, 19 nt, Artificial Sequence
  Description of Artificial Sequence: Synthetic oligonucleotide
  Antisense strand to SEQ ID NO: 1089564
uaucuccgggagcugucag

SEQ ID NO: 1089566 - RNA, 19 nt, Artificial Sequence
  Description of Artificial Sequence: Synthetic oligonucleotide
  Sense strand starting at position 1300 of SEQ ID NO: 915567
agggucggucccgaaagaa

SEQ ID NO: 1089567 - RNA, 19 nt, Artificial Sequence
  Description of Artificial Sequence: Synthetic oligonucleotide
  Antisense strand to SEQ ID NO: 1089566
uucuuucgggaccgacccu

SEQ ID NO: 1089568 - RNA, 19 nt, Artificial Sequence
  Description of Artificial Sequence: Synthetic oligonucleotide
  Sense strand starting at position 2279 of SEQ ID NO: 915567
guugauauauuuccugcuu

SEQ ID NO: 1089569 - RNA, 19 nt, Artificial Sequence
  Description of Artificial Sequence: Synthetic oligonucleotide
  Antisense strand to SEQ ID NO: 1089568
aagcaggaaauauaucaac

SEQ ID NO: 1089570 - RNA, 19 nt, Artificial Sequence
  Description of Artificial Sequence: Synthetic oligonucleotide
  Sense strand starting at position 2354 of SEQ ID NO: 915567
acgccaugucuguuguguu

SEQ ID NO: 1089571 - RNA, 19 nt, Artificial Sequence
  Description of Artificial Sequence: Synthetic oligonucleotide
  Antisense strand to SEQ ID NO: 1089570
aacacaacagacauggcgu

SEQ ID NO: 1089572 - RNA, 19 nt, Artificial Sequence
  Description of Artificial Sequence: Synthetic oligonucleotide
  Sense strand starting at position 2416 of SEQ ID NO: 915567
uacugaagugcgcaauaaa

SEQ ID NO: 1089573 - RNA, 19 nt, Artificial Sequence
  Description of Artificial Sequence: Synthetic oligonucleotide
  Antisense strand to SEQ ID NO: 1089572
uuuauugcgcacuucagua

SEQ ID NO: 1089574 - RNA, 19 nt, Artificial Sequence
  Description of Artificial Sequence: Synthetic oligonucleotide
  Sense strand starting at position 2419 of SEQ ID NO: 915567
ugaagugcgcaauaaauac

SEQ ID NO: 1089575 - RNA, 19 nt, Artificial Sequence
  Description of Artificial Sequence: Synthetic oligonucleotide
  Antisense strand to SEQ ID NO: 1089574
guauuuauugcgcacuuca

SEQ ID NO: 1089576 - RNA, 19 nt, Artificial Sequence
  Description of Artificial Sequence: Synthetic oligonucleotide
  Sense strand starting at position 2426 of SEQ ID NO: 915567
cgcaauaaauacuugugaa

SEQ ID NO: 1089577 - RNA, 19 nt, Artificial Sequence
  Description of Artificial Sequence: Synthetic oligonucleotide
  Antisense strand to SEQ ID NO: 1089576
uucacaaguauuuauugcg

SEQ ID NO: 1089578 - RNA, 19 nt, Artificial Sequence
  Description of Artificial Sequence: Synthetic oligonucleotide
  Sense strand starting at position 2573 of SEQ ID NO: 915567
cgcagcucagcauaaauaa

SEQ ID NO: 1089579 - RNA, 19 nt, Artificial Sequence
  Description of Artificial Sequence: Synthetic oligonucleotide
  Antisense strand to SEQ ID NO: 1089578
uuauuuaugcugagcugcg

SEQ ID NO: 1089580 - RNA, 19 nt, Artificial Sequence
  Description of Artificial Sequence: Synthetic oligonucleotide
  Sense strand starting at position 2671 of SEQ ID NO: 915567
gucaaacacguuuagguuu

SEQ ID NO: 1089581 - RNA, 19 nt, Artificial Sequence
  Description of Artificial Sequence: Synthetic oligonucleotide
  Antisense strand to SEQ ID NO: 1089580
aaaccuaaacguguuugac

SEQ ID NO: 1089582 - RNA, 19 nt, Artificial Sequence
  Description of Artificial Sequence: Synthetic oligonucleotide
  Sense strand starting at position 2746 of SEQ ID NO: 915567
agugaacacgucuauaaau

SEQ ID NO: 1089583 - RNA, 19 nt, Artificial Sequence
  Description of Artificial Sequence: Synthetic oligonucleotide
  Antisense strand to SEQ ID NO: 1089582
auuuauagacguguucacu

SEQ ID NO: 1089584 - RNA, 19 nt, Artificial Sequence
  Description of Artificial Sequence: Synthetic oligonucleotide
  Sense strand starting at position 2810 of SEQ ID NO: 915567
gauggugcacuauaaaguu

SEQ ID NO: 1089585 - RNA, 19 nt, Artificial Sequence
  Description of Artificial Sequence: Synthetic oligonucleotide
  Antisense strand to SEQ ID NO: 1089584
aacuuuauagugcaccauc

SEQ ID NO: 1089586 - RNA, 19 nt, Artificial Sequence
  Description of Artificial Sequence: Synthetic oligonucleotide
  Sense strand starting at position 2841 of SEQ ID NO: 915567
ccgaugugugcggugguau

SEQ ID NO: 1089587 - RNA, 19 nt, Artificial Sequence
  Description of Artificial Sequence: Synthetic oligonucleotide
  Antisense strand to SEQ ID NO: 1089586
auaccaccgcacacaucgg

SEQ ID NO: 1089588 - RNA, 19 nt, Artificial Sequence
  Description of Artificial Sequence: Synthetic oligonucleotide
  Sense strand starting at position 3129 of SEQ ID NO: 915567
uguggccaaucucuuaauu

SEQ ID NO: 1089589 - RNA, 19 nt, Artificial Sequence
  Description of Artificial Sequence: Synthetic oligonucleotide
  Antisense strand to SEQ ID NO: 1089588
aauuaagagauuggccaca

SEQ ID NO: 1089590 - RNA, 19 nt, Artificial Sequence
  Description of Artificial Sequence: Synthetic oligonucleotide
  Sense strand starting at position 3380 of SEQ ID NO: 915567
aacgguaaacuguggagaa

SEQ ID NO: 1089591 - RNA, 19 nt, Artificial Sequence
  Description of Artificial Sequence: Synthetic oligonucleotide
  Antisense strand to SEQ ID NO: 1089590
uucuccacaguuuaccguu

SEQ ID NO: 1089592 - RNA, 19 nt, Artificial Sequence
  Description of Artificial Sequence: Synthetic oligonucleotide
  Sense strand starting at position 3382 of SEQ ID NO: 915567
cgguaaacuguggagaaua

SEQ ID NO: 1089593 - RNA, 19 nt, Artificial Sequence
  Description of Artificial Sequence: Synthetic oligonucleotide
  Antisense strand to SEQ ID NO: 1089592
uauucuccacaguuuaccg

SEQ ID NO: 1089594 - RNA, 19 nt, Artificial Sequence
  Description of Artificial Sequence: Synthetic oligonucleotide
  Sense strand starting at position 3404 of SEQ ID NO: 915567
ccuugucacauugggagau

SEQ ID NO: 1089595 - RNA, 19 nt, Artificial Sequence
  Description of Artificial Sequence: Synthetic oligonucleotide
  Antisense strand to SEQ ID NO: 1089594
aucucccaaugugacaagg

SEQ ID NO: 1089596 - RNA, 19 nt, Artificial Sequence
  Description of Artificial Sequence: Synthetic oligonucleotide
  Sense strand starting at position 3433 of SEQ ID NO: 915567
ccggucugugaaggaaaua

SEQ ID NO: 1089597 - RNA, 19 nt, Artificial Sequence
  Description of Artificial Sequence: Synthetic oligonucleotide
  Antisense strand to SEQ ID NO: 1089596
uauuuccuucacagaccgg

SEQ ID NO: 1089598 - RNA, 19 nt, Artificial Sequence
  Description of Artificial Sequence: Synthetic oligonucleotide
  Sense strand starting at position 3434 of SEQ ID NO: 915567
cggucugugaaggaaauaa

SEQ ID NO: 1089599 - RNA, 19 nt, Artificial Sequence
  Description of Artificial Sequence: Synthetic oligonucleotide
  Antisense strand to SEQ ID NO: 1089598
uuauuuccuucacagaccg

SEQ ID NO: 1089600 - RNA, 19 nt, Artificial Sequence
  Description of Artificial Sequence: Synthetic oligonucleotide
  Sense strand starting at position 3499 of SEQ ID NO: 915567
ucaguuuauuuagcaugua

SEQ ID NO: 1089601 - RNA, 19 nt, Artificial Sequence
  Description of Artificial Sequence: Synthetic oligonucleotide
  Antisense strand to SEQ ID NO: 1089600
uacaugcuaaauaaacuga

SEQ ID NO: 1089602 - RNA, 19 nt, Artificial Sequence
  Description of Artificial Sequence: Synthetic oligonucleotide
  Sense strand starting at position 3539 of SEQ ID NO: 915567
guucuaugcgcugaaagaa

SEQ ID NO: 1089603 - RNA, 19 nt, Artificial Sequence
  Description of Artificial Sequence: Synthetic oligonucleotide
  Antisense strand to SEQ ID NO: 1089602
uucuuucagcgcauagaac

SEQ ID NO: 1089604 - RNA, 19 nt, Artificial Sequence
  Description of Artificial Sequence: Synthetic oligonucleotide
  Sense strand starting at position 3577 of SEQ ID NO: 915567
ugagguaaguuuccuaccu

SEQ ID NO: 1089605 - RNA, 19 nt, Artificial Sequence
  Description of Artificial Sequence: Synthetic oligonucleotide
  Antisense strand to SEQ ID NO: 1089604
agguaggaaacuuaccuca

SEQ ID NO: 1089606 - RNA, 19 nt, Artificial Sequence
  Description of Artificial Sequence: Synthetic oligonucleotide
  Sense strand starting at position 3578 of SEQ ID NO: 915567
gagguaaguuuccuaccuu

SEQ ID NO: 1089607 - RNA, 19 nt, Artificial Sequence
  Description of Artificial Sequence: Synthetic oligonucleotide
  Antisense strand to SEQ ID NO: 1089606
aagguaggaaacuuaccuc

SEQ ID NO: 1089608 - RNA, 19 nt, Artificial Sequence
  Description of Artificial Sequence: Synthetic oligonucleotide
  Sense strand starting at position 3648 of SEQ ID NO: 915567
augggaugcagcuaaauau

SEQ ID NO: 1089609 - RNA, 19 nt, Artificial Sequence
  Description of Artificial Sequence: Synthetic oligonucleotide
  Antisense strand to SEQ ID NO: 1089608
auauuuagcugcaucccau

SEQ ID NO: 1089610 - RNA, 19 nt, Artificial Sequence
  Description of Artificial Sequence: Synthetic oligonucleotide
  Sense strand starting at position 3700 of SEQ ID NO: 915567
agugguacugccgugugaa

SEQ ID NO: 1089611 - RNA, 19 nt, Artificial Sequence
  Description of Artificial Sequence: Synthetic oligonucleotide
  Antisense strand to SEQ ID NO: 1089610
uucacacggcaguaccacu

SEQ ID NO: 1089612 - RNA, 19 nt, Artificial Sequence
  Description of Artificial Sequence: Synthetic oligonucleotide
  Sense strand starting at position 3839 of SEQ ID NO: 915567
aggacucagucccuuaaua

SEQ ID NO: 1089613 - RNA, 19 nt, Artificial Sequence
  Description of Artificial Sequence: Synthetic oligonucleotide
  Antisense strand to SEQ ID NO: 1089612
uauuaagggacugaguccu

SEQ ID NO: 1089614 - RNA, 19 nt, Artificial Sequence
  Description of Artificial Sequence: Synthetic oligonucleotide
  Sense strand starting at position 3895 of SEQ ID NO: 915567
uagauauugugucugugaa

SEQ ID NO: 1089615 - RNA, 19 nt, Artificial Sequence
  Description of Artificial Sequence: Synthetic oligonucleotide
  Antisense strand to SEQ ID NO: 1089614
uucacagacacaauaucua

SEQ ID NO: 1089616 - RNA, 19 nt, Artificial Sequence
  Description of Artificial Sequence: Synthetic oligonucleotide
  Sense strand starting at position 3896 of SEQ ID NO: 915567
agauauugugucugugaaa

SEQ ID NO: 1089617 - RNA, 19 nt, Artificial Sequence
  Description of Artificial Sequence: Synthetic oligonucleotide
  Antisense strand to SEQ ID NO: 1089616
uuucacagacacaauaucu

SEQ ID NO: 1089618 - RNA, 19 nt, Artificial Sequence
  Description of Artificial Sequence: Synthetic oligonucleotide
  Sense strand starting at position 3897 of SEQ ID NO: 915567
gauauugugucugugaaag

SEQ ID NO: 1089619 - RNA, 19 nt, Artificial Sequence
  Description of Artificial Sequence: Synthetic oligonucleotide
  Antisense strand to SEQ ID NO: 1089618
cuuucacagacacaauauc

SEQ ID NO: 1089620 - RNA, 19 nt, Artificial Sequence
  Description of Artificial Sequence: Synthetic oligonucleotide
  Sense strand starting at position 155 of SEQ ID NO: 915568
ggacucaugcuagagcaau

SEQ ID NO: 1089621 - RNA, 19 nt, Artificial Sequence
  Description of Artificial Sequence: Synthetic oligonucleotide
  Antisense strand to SEQ ID NO: 1089620
auugcucuagcaugagucc

SEQ ID NO: 1089622 - RNA, 19 nt, Artificial Sequence
  Description of Artificial Sequence: Synthetic oligonucleotide
  Sense strand starting at position 234 of SEQ ID NO: 915568
cuggguuuccacggacgau

SEQ ID NO: 1089623 - RNA, 19 nt, Artificial Sequence
  Description of Artificial Sequence: Synthetic oligonucleotide
  Antisense strand to SEQ ID NO: 1089622
aucguccguggaaacccag

SEQ ID NO: 1089624 - RNA, 19 nt, Artificial Sequence
  Description of Artificial Sequence: Synthetic oligonucleotide
  Sense strand starting at position 235 of SEQ ID NO: 915568
uggguuuccacggacgaua

SEQ ID NO: 1089625 - RNA, 19 nt, Artificial Sequence
  Description of Artificial Sequence: Synthetic oligonucleotide
  Antisense strand to SEQ ID NO: 1089624
uaucguccguggaaaccca

SEQ ID NO: 1089626 - RNA, 19 nt, Artificial Sequence
  Description of Artificial Sequence: Synthetic oligonucleotide
  Sense strand starting at position 248 of SEQ ID NO: 915568
acgauaaguaccugagggu

SEQ ID NO: 1089627 - RNA, 19 nt, Artificial Sequence
  Description of Artificial Sequence: Synthetic oligonucleotide
  Antisense strand to SEQ ID NO: 1089626
acccucagguacuuaucgu

SEQ ID NO: 1089628 - RNA, 19 nt, Artificial Sequence
  Description of Artificial Sequence: Synthetic oligonucleotide
  Sense strand starting at position 1176 of SEQ ID NO: 915568
uccagauauugcccuguaa

SEQ ID NO: 1089629 - RNA, 19 nt, Artificial Sequence
  Description of Artificial Sequence: Synthetic oligonucleotide
  Antisense strand to SEQ ID NO: 1089628
uuacagggcaauaucugga

SEQ ID NO: 1089630 - RNA, 19 nt, Artificial Sequence
  Description of Artificial Sequence: Synthetic oligonucleotide
  Sense strand starting at position 1277 of SEQ ID NO: 915568
aggcacugucugcauuauu

SEQ ID NO: 1089631 - RNA, 19 nt, Artificial Sequence
  Description of Artificial Sequence: Synthetic oligonucleotide
  Antisense strand to SEQ ID NO: 1089630
aauaaugcagacagugccu

SEQ ID NO: 1089632 - RNA, 19 nt, Artificial Sequence
  Description of Artificial Sequence: Synthetic oligonucleotide
  Sense strand starting at position 1360 of SEQ ID NO: 915568
gagcaaacucagugaugga

SEQ ID NO: 1089633 - RNA, 19 nt, Artificial Sequence
  Description of Artificial Sequence: Synthetic oligonucleotide
  Antisense strand to SEQ ID NO: 1089632
uccaucacugaguuugcuc

SEQ ID NO: 1089634 - RNA, 19 nt, Artificial Sequence
  Description of Artificial Sequence: Synthetic oligonucleotide
  Sense strand starting at position 2196 of SEQ ID NO: 915568
uuuggagcuccaugugaug

SEQ ID NO: 1089635 - RNA, 19 nt, Artificial Sequence
  Description of Artificial Sequence: Synthetic oligonucleotide
  Antisense strand to SEQ ID NO: 1089634
caucacauggagcuccaaa

SEQ ID NO: 1089636 - RNA, 19 nt, Artificial Sequence
  Description of Artificial Sequence: Synthetic oligonucleotide
  Sense strand starting at position 2210 of SEQ ID NO: 915568
ugauguggucgguggaaga

SEQ ID NO: 1089637 - RNA, 19 nt, Artificial Sequence
  Description of Artificial Sequence: Synthetic oligonucleotide
  Antisense strand to SEQ ID NO: 1089636
ucuuccaccgaccacauca

SEQ ID NO: 1089638 - RNA, 19 nt, Artificial Sequence
  Description of Artificial Sequence: Synthetic oligonucleotide
  Sense strand starting at position 2224 of SEQ ID NO: 915568
gaagacgucuccuuuguca

SEQ ID NO: 1089639 - RNA, 19 nt, Artificial Sequence
  Description of Artificial Sequence: Synthetic oligonucleotide
  Antisense strand to SEQ ID NO: 1089638
ugacaaaggagacgucuuc

SEQ ID NO: 1089640 - RNA, 19 nt, Artificial Sequence
  Description of Artificial Sequence: Synthetic oligonucleotide
  Sense strand starting at position 2226 of SEQ ID NO: 915568
agacgucuccuuugucaga

SEQ ID NO: 1089641 - RNA, 19 nt, Artificial Sequence
  Description of Artificial Sequence: Synthetic oligonucleotide
  Antisense strand to SEQ ID NO: 1089640
ucugacaaaggagacgucu

SEQ ID NO: 1089642 - RNA, 19 nt, Artificial Sequence
  Description of Artificial Sequence: Synthetic oligonucleotide
  Sense strand starting at position 2227 of SEQ ID NO: 915568
gacgucuccuuugucagaa

SEQ ID NO: 1089643 - RNA, 19 nt, Artificial Sequence
  Description of Artificial Sequence: Synthetic oligonucleotide
  Antisense strand to SEQ ID NO: 1089642
uucugacaaaggagacguc

SEQ ID NO: 1089644 - RNA, 19 nt, Artificial Sequence
  Description of Artificial Sequence: Synthetic oligonucleotide
  Sense strand starting at position 2426 of SEQ ID NO: 915568
gagaaucacucaccuguga

SEQ ID NO: 1089645 - RNA, 19 nt, Artificial Sequence
  Description of Artificial Sequence: Synthetic oligonucleotide
  Antisense strand to SEQ ID NO: 1089644
ucacaggugagugauucuc

SEQ ID NO: 1089646 - RNA, 19 nt, Artificial Sequence
  Description of Artificial Sequence: Synthetic oligonucleotide
  Sense strand starting at position 2556 of SEQ ID NO: 915568
ccguguauccacgacagua

SEQ ID NO: 1089647 - RNA, 19 nt, Artificial Sequence
  Description of Artificial Sequence: Synthetic oligonucleotide
  Antisense strand to SEQ ID NO: 1089646
uacugucguggauacacgg

SEQ ID NO: 1089648 - RNA, 19 nt, Artificial Sequence
  Description of Artificial Sequence: Synthetic oligonucleotide
  Sense strand starting at position 2558 of SEQ ID NO: 915568
guguauccacgacaguaaa

SEQ ID NO: 1089649 - RNA, 19 nt, Artificial Sequence
  Description of Artificial Sequence: Synthetic oligonucleotide
  Antisense strand to SEQ ID NO: 1089648
uuuacugucguggauacac

SEQ ID NO: 1089650 - RNA, 19 nt, Artificial Sequence
  Description of Artificial Sequence: Synthetic oligonucleotide
  Sense strand starting at position 2587 of SEQ ID NO: 915568
uauggaguuguuuaugaug

SEQ ID NO: 1089651 - RNA, 19 nt, Artificial Sequence
  Description of Artificial Sequence: Synthetic oligonucleotide
  Antisense strand to SEQ ID NO: 1089650
caucauaaacaacuccaua

SEQ ID NO: 1089652 - RNA, 19 nt, Artificial Sequence
  Description of Artificial Sequence: Synthetic oligonucleotide
  Sense strand starting at position 2712 of SEQ ID NO: 915568
ggugguuugacuuacuaag

SEQ ID NO: 1089653 - RNA, 19 nt, Artificial Sequence
  Description of Artificial Sequence: Synthetic oligonucleotide
  Antisense strand to SEQ ID NO: 1089652
cuuaguaagucaaaccacc

SEQ ID NO: 1089654 - RNA, 19 nt, Artificial Sequence
  Description of Artificial Sequence: Synthetic oligonucleotide
  Sense strand starting at position 2714 of SEQ ID NO: 915568
ugguuugacuuacuaaguu

SEQ ID NO: 1089655 - RNA, 19 nt, Artificial Sequence
  Description of Artificial Sequence: Synthetic oligonucleotide
  Antisense strand to SEQ ID NO: 1089654
aacuuaguaagucaaacca

SEQ ID NO: 1089656 - RNA, 19 nt, Artificial Sequence
  Description of Artificial Sequence: Synthetic oligonucleotide
  Sense strand starting at position 2882 of SEQ ID NO: 915568
acaugauaaugugcuaguu

SEQ ID NO: 1089657 - RNA, 19 nt, Artificial Sequence
  Description of Artificial Sequence: Synthetic oligonucleotide
  Antisense strand to SEQ ID NO: 1089656
aacuagcacauuaucaugu

SEQ ID NO: 1089658 - RNA, 19 nt, Artificial Sequence
  Description of Artificial Sequence: Synthetic oligonucleotide
  Sense strand starting at position 2898 of SEQ ID NO: 915568
guuaaucuguucccugauc

SEQ ID NO: 1089659 - RNA, 19 nt, Artificial Sequence
  Description of Artificial Sequence: Synthetic oligonucleotide
  Antisense strand to SEQ ID NO: 1089658
gaucagggaacagauuaac

SEQ ID NO: 1089660 - RNA, 19 nt, Artificial Sequence
  Description of Artificial Sequence: Synthetic oligonucleotide
  Sense strand starting at position 2991 of SEQ ID NO: 915568
ucugaacucgucugggaag

SEQ ID NO: 1089661 - RNA, 19 nt, Artificial Sequence
  Description of Artificial Sequence: Synthetic oligonucleotide
  Antisense strand to SEQ ID NO: 1089660
cuucccagacgaguucaga

SEQ ID NO: 1089662 - RNA, 19 nt, Artificial Sequence
  Description of Artificial Sequence: Synthetic oligonucleotide
  Sense strand starting at position 3121 of SEQ ID NO: 915568
agggaaaguuucccuuggu

SEQ ID NO: 1089663 - RNA, 19 nt, Artificial Sequence
  Description of Artificial Sequence: Synthetic oligonucleotide
  Antisense strand to SEQ ID NO: 1089662
accaagggaaacuuucccu

SEQ ID NO: 1089664 - RNA, 19 nt, Artificial Sequence
  Description of Artificial Sequence: Synthetic oligonucleotide
  Sense strand starting at position 3122 of SEQ ID NO: 915568
gggaaaguuucccuugguc

SEQ ID NO: 1089665 - RNA, 19 nt, Artificial Sequence
  Description of Artificial Sequence: Synthetic oligonucleotide
  Antisense strand to SEQ ID NO: 1089664
gaccaagggaaacuuuccc

SEQ ID NO: 1089666 - RNA, 19 nt, Artificial Sequence
  Description of Artificial Sequence: Synthetic oligonucleotide
  Sense strand starting at position 3130 of SEQ ID NO: 915568
uucccuuggucccugcaaa

SEQ ID NO: 1089667 - RNA, 19 nt, Artificial Sequence
  Description of Artificial Sequence: Synthetic oligonucleotide
  Antisense strand to SEQ ID NO: 1089666
uuugcagggaccaagggaa

SEQ ID NO: 1089668 - RNA, 19 nt, Artificial Sequence
  Description of Artificial Sequence: Synthetic oligonucleotide
  Sense strand starting at position 3217 of SEQ ID NO: 915568
acccuaagcuguuugacga

SEQ ID NO: 1089669 - RNA, 19 nt, Artificial Sequence
  Description of Artificial Sequence: Synthetic oligonucleotide
  Antisense strand to SEQ ID NO: 1089668
ucgucaaacagcuuagggu

SEQ ID NO: 1089670 - RNA, 19 nt, Artificial Sequence
  Description of Artificial Sequence: Synthetic oligonucleotide
  Sense strand starting at position 3235 of SEQ ID NO: 915568
agugcuucugaggaauccu

SEQ ID NO: 1089671 - RNA, 19 nt, Artificial Sequence
  Description of Artificial Sequence: Synthetic oligonucleotide
  Antisense strand to SEQ ID NO: 1089670
aggauuccucagaagcacu

SEQ ID NO: 1089672 - RNA, 19 nt, Artificial Sequence
  Description of Artificial Sequence: Synthetic oligonucleotide
  Sense strand starting at position 3272 of SEQ ID NO: 915568
ucaguucuuuccuuugaua

SEQ ID NO: 1089673 - RNA, 19 nt, Artificial Sequence
  Description of Artificial Sequence: Synthetic oligonucleotide
  Antisense strand to SEQ ID NO: 1089672
uaucaaaggaaagaacuga

SEQ ID NO: 1089674 - RNA, 19 nt, Artificial Sequence
  Description of Artificial Sequence: Synthetic oligonucleotide
  Sense strand starting at position 3324 of SEQ ID NO: 915568
gggacaucaucucagauag

SEQ ID NO: 1089675 - RNA, 19 nt, Artificial Sequence
  Description of Artificial Sequence: Synthetic oligonucleotide
  Antisense strand to SEQ ID NO: 1089674
cuaucugagaugauguccc

SEQ ID NO: 1089676 - RNA, 19 nt, Artificial Sequence
  Description of Artificial Sequence: Synthetic oligonucleotide
  Sense strand starting at position 3326 of SEQ ID NO: 915568
gacaucaucucagauagag

SEQ ID NO: 1089677 - RNA, 19 nt, Artificial Sequence
  Description of Artificial Sequence: Synthetic oligonucleotide
  Antisense strand to SEQ ID NO: 1089676
cucuaucugagaugauguc

SEQ ID NO: 1089678 - RNA, 19 nt, Artificial Sequence
  Description of Artificial Sequence: Synthetic oligonucleotide
  Sense strand starting at position 3336 of SEQ ID NO: 915568
cagauagaguacucacagu

SEQ ID NO: 1089679 - RNA, 19 nt, Artificial Sequence
  Description of Artificial Sequence: Synthetic oligonucleotide
  Antisense strand to SEQ ID NO: 1089678
acugugaguacucuaucug

SEQ ID NO: 1089680 - RNA, 19 nt, Artificial Sequence
  Description of Artificial Sequence: Synthetic oligonucleotide
  Sense strand starting at position 3552 of SEQ ID NO: 915568
ugccauacaccuuauaguu

SEQ ID NO: 1089681 - RNA, 19 nt, Artificial Sequence
  Description of Artificial Sequence: Synthetic oligonucleotide
  Antisense strand to SEQ ID NO: 1089680
aacuauaagguguauggca

SEQ ID NO: 1089682 - RNA, 19 nt, Artificial Sequence
  Description of Artificial Sequence: Synthetic oligonucleotide
  Sense strand starting at position 3587 of SEQ ID NO: 915568
agcgcuaaacaauguauaa

SEQ ID NO: 1089683 - RNA, 19 nt, Artificial Sequence
  Description of Artificial Sequence: Synthetic oligonucleotide
  Antisense strand to SEQ ID NO: 1089682
uuauacauuguuuagcgcu

SEQ ID NO: 1089684 - RNA, 19 nt, Artificial Sequence
  Description of Artificial Sequence: Synthetic oligonucleotide
  Sense strand starting at position 3598 of SEQ ID NO: 915568
auguauaaccaguguuauu

SEQ ID NO: 1089685 - RNA, 19 nt, Artificial Sequence
  Description of Artificial Sequence: Synthetic oligonucleotide
  Antisense strand to SEQ ID NO: 1089684
aauaacacugguuauacau

SEQ ID NO: 1089686 - RNA, 19 nt, Artificial Sequence
  Description of Artificial Sequence: Synthetic oligonucleotide
  Sense strand starting at position 3785 of SEQ ID NO: 915568
cgaauaacccucuguaggu

SEQ ID NO: 1089687 - RNA, 19 nt, Artificial Sequence
  Description of Artificial Sequence: Synthetic oligonucleotide
  Antisense strand to SEQ ID NO: 1089686
accuacagaggguuauucg

SEQ ID NO: 1089688 - RNA, 19 nt, Artificial Sequence
  Description of Artificial Sequence: Synthetic oligonucleotide
  Sense strand starting at position 3786 of SEQ ID NO: 915568
gaauaacccucuguaggua

SEQ ID NO: 1089689 - RNA, 19 nt, Artificial Sequence
  Description of Artificial Sequence: Synthetic oligonucleotide
  Antisense strand to SEQ ID NO: 1089688
uaccuacagaggguuauuc

SEQ ID NO: 1089690 - RNA, 19 nt, Artificial Sequence
  Description of Artificial Sequence: Synthetic oligonucleotide
  Sense strand starting at position 3808 of SEQ ID NO: 915568
uucugaggacucugccuua

SEQ ID NO: 1089691 - RNA, 19 nt, Artificial Sequence
  Description of Artificial Sequence: Synthetic oligonucleotide
  Antisense strand to SEQ ID NO: 1089690
uaaggcagaguccucagaa

SEQ ID NO: 1089692 - RNA, 19 nt, Artificial Sequence
  Description of Artificial Sequence: Synthetic oligonucleotide
  Sense strand starting at position 3813 of SEQ ID NO: 915568
aggacucugccuuacguua

SEQ ID NO: 1089693 - RNA, 19 nt, Artificial Sequence
  Description of Artificial Sequence: Synthetic oligonucleotide
  Antisense strand to SEQ ID NO: 1089692
uaacguaaggcagaguccu

SEQ ID NO: 1089694 - RNA, 19 nt, Artificial Sequence
  Description of Artificial Sequence: Synthetic oligonucleotide
  Sense strand starting at position 3846 of SEQ ID NO: 915568
uuuggaagucgguauuaua

SEQ ID NO: 1089695 - RNA, 19 nt, Artificial Sequence
  Description of Artificial Sequence: Synthetic oligonucleotide
  Antisense strand to SEQ ID NO: 1089694
uauaauaccgacuuccaaa

SEQ ID NO: 1089696 - RNA, 19 nt, Artificial Sequence
  Description of Artificial Sequence: Synthetic oligonucleotide
  Sense strand starting at position 3898 of SEQ ID NO: 915568
uuaaguaaguggcucaaga

SEQ ID NO: 1089697 - RNA, 19 nt, Artificial Sequence
  Description of Artificial Sequence: Synthetic oligonucleotide
  Antisense strand to SEQ ID NO: 1089696
ucuugagccacuuacuuaa

SEQ ID NO: 1089698 - RNA, 19 nt, Artificial Sequence
  Description of Artificial Sequence: Synthetic oligonucleotide
  Sense strand starting at position 3900 of SEQ ID NO: 915568
aaguaaguggcucaagauc

SEQ ID NO: 1089699 - RNA, 19 nt, Artificial Sequence
  Description of Artificial Sequence: Synthetic oligonucleotide
  Antisense strand to SEQ ID NO: 1089698
gaucuugagccacuuacuu

SEQ ID NO: 1089700 - RNA, 19 nt, Artificial Sequence
  Description of Artificial Sequence: Synthetic oligonucleotide
  Sense strand starting at position 9 of SEQ ID NO: 915569
agaagagguucagugacau

SEQ ID NO: 1089701 - RNA, 19 nt, Artificial Sequence
  Description of Artificial Sequence: Synthetic oligonucleotide
  Antisense strand to SEQ ID NO: 1089700
augucacugaaccucuucu

SEQ ID NO: 1089702 - RNA, 19 nt, Artificial Sequence
  Description of Artificial Sequence: Synthetic oligonucleotide
  Sense strand starting at position 75 of SEQ ID NO: 915569
gggcuuucugaucaugcuu

SEQ ID NO: 1089703 - RNA, 19 nt, Artificial Sequence
  Description of Artificial Sequence: Synthetic oligonucleotide
  Antisense strand to SEQ ID NO: 1089702
aagcaugaucagaaagccc

SEQ ID NO: 1089704 - RNA, 19 nt, Artificial Sequence
  Description of Artificial Sequence: Synthetic oligonucleotide
  Sense strand starting at position 148 of SEQ ID NO: 915569
ugaagugucagggaugcca

SEQ ID NO: 1089705 - RNA, 19 nt, Artificial Sequence
  Description of Artificial Sequence: Synthetic oligonucleotide
  Antisense strand to SEQ ID NO: 1089704
uggcaucccugacacuuca

SEQ ID NO: 1089706 - RNA, 19 nt, Artificial Sequence
  Description of Artificial Sequence: Synthetic oligonucleotide
  Sense strand starting at position 502 of SEQ ID NO: 915569
ccaagagugccgggauuac

SEQ ID NO: 1089707 - RNA, 19 nt, Artificial Sequence
  Description of Artificial Sequence: Synthetic oligonucleotide
  Antisense strand to SEQ ID NO: 1089706
guaaucccggcacucuugg

SEQ ID NO: 1089708 - RNA, 19 nt, Artificial Sequence
  Description of Artificial Sequence: Synthetic oligonucleotide
  Sense strand starting at position 569 of SEQ ID NO: 915569
ugggcucugcccugggaua

SEQ ID NO: 1089709 - RNA, 19 nt, Artificial Sequence
  Description of Artificial Sequence: Synthetic oligonucleotide
  Antisense strand to SEQ ID NO: 1089708
uaucccagggcagagccca

SEQ ID NO: 1089710 - RNA, 19 nt, Artificial Sequence
  Description of Artificial Sequence: Synthetic oligonucleotide
  Sense strand starting at position 589 of SEQ ID NO: 915569
gaagcugaaugccaggaau

SEQ ID NO: 1089711 - RNA, 19 nt, Artificial Sequence
  Description of Artificial Sequence: Synthetic oligonucleotide
  Antisense strand to SEQ ID NO: 1089710
auuccuggcauucagcuuc

SEQ ID NO: 1089712 - RNA, 19 nt, Artificial Sequence
  Description of Artificial Sequence: Synthetic oligonucleotide
  Sense strand starting at position 592 of SEQ ID NO: 915569
gcugaaugccaggaauccu

SEQ ID NO: 1089713 - RNA, 19 nt, Artificial Sequence
  Description of Artificial Sequence: Synthetic oligonucleotide
  Antisense strand to SEQ ID NO: 1089712
aggauuccuggcauucagc

SEQ ID NO: 1089714 - RNA, 19 nt, Artificial Sequence
  Description of Artificial Sequence: Synthetic oligonucleotide
  Sense strand starting at position 606 of SEQ ID NO: 915569
auccucgaauaucuugaaa

SEQ ID NO: 1089715 - RNA, 19 nt, Artificial Sequence
  Description of Artificial Sequence: Synthetic oligonucleotide
  Antisense strand to SEQ ID NO: 1089714
uuucaagauauucgaggau

SEQ ID NO: 1089716 - RNA, 19 nt, Artificial Sequence
  Description of Artificial Sequence: Synthetic oligonucleotide
  Sense strand starting at position 712 of SEQ ID NO: 915569
uugacauuaccuggcugaa

SEQ ID NO: 1089717 - RNA, 19 nt, Artificial Sequence
  Description of Artificial Sequence: Synthetic oligonucleotide
  Antisense strand to SEQ ID NO: 1089716
uucagccagguaaugucaa

SEQ ID NO: 1089718 - RNA, 19 nt, Artificial Sequence
  Description of Artificial Sequence: Synthetic oligonucleotide
  Sense strand starting at position 1039 of SEQ ID NO: 915569
gugagcucauggucacaca

SEQ ID NO: 1089719 - RNA, 19 nt, Artificial Sequence
  Description of Artificial Sequence: Synthetic oligonucleotide
  Antisense strand to SEQ ID NO: 1089718
ugugugaccaugagcucac

SEQ ID NO: 1089720 - RNA, 19 nt, Artificial Sequence
  Description of Artificial Sequence: Synthetic oligonucleotide
  Sense strand starting at position 1144 of SEQ ID NO: 915569
cacccugggcucuggaaau

SEQ ID NO: 1089721 - RNA, 19 nt, Artificial Sequence
  Description of Artificial Sequence: Synthetic oligonucleotide
  Antisense strand to SEQ ID NO: 1089720
auuuccagagcccagggug

SEQ ID NO: 1089722 - RNA, 19 nt, Artificial Sequence
  Description of Artificial Sequence: Synthetic oligonucleotide
  Sense strand starting at position 1156 of SEQ ID NO: 915569
uggaaaucaucaggaggaa

SEQ ID NO: 1089723 - RNA, 19 nt, Artificial Sequence
  Description of Artificial Sequence: Synthetic oligonucleotide
  Antisense strand to SEQ ID NO: 1089722
uuccuccugaugauuucca

SEQ ID NO: 1089724 - RNA, 19 nt, Artificial Sequence
  Description of Artificial Sequence: Synthetic oligonucleotide
  Sense strand starting at position 1176 of SEQ ID NO: 915569
acuggacuuucccaacuga

SEQ ID NO: 1089725 - RNA, 19 nt, Artificial Sequence
  Description of Artificial Sequence: Synthetic oligonucleotide
  Antisense strand to SEQ ID NO: 1089724
ucaguugggaaaguccagu

SEQ ID NO: 1089726 - RNA, 19 nt, Artificial Sequence
  Description of Artificial Sequence: Synthetic oligonucleotide
  Sense strand starting at position 1990 of SEQ ID NO: 915569
ucugcuccaucucuggaaa

SEQ ID NO: 1089727 - RNA, 19 nt, Artificial Sequence
  Description of Artificial Sequence: Synthetic oligonucleotide
  Antisense strand to SEQ ID NO: 1089726
uuuccagagauggagcaga

SEQ ID NO: 1089728 - RNA, 19 nt, Artificial Sequence
  Description of Artificial Sequence: Synthetic oligonucleotide
  Sense strand starting at position 2088 of SEQ ID NO: 915569
ucaggaaguccgugguuca

SEQ ID NO: 1089729 - RNA, 19 nt, Artificial Sequence
  Description of Artificial Sequence: Synthetic oligonucleotide
  Antisense strand to SEQ ID NO: 1089728
ugaaccacggacuuccuga

SEQ ID NO: 1089730 - RNA, 19 nt, Artificial Sequence
  Description of Artificial Sequence: Synthetic oligonucleotide
  Sense strand starting at position 2182 of SEQ ID NO: 915569
gcuacauugacaugacguu

SEQ ID NO: 1089731 - RNA, 19 nt, Artificial Sequence
  Description of Artificial Sequence: Synthetic oligonucleotide
  Antisense strand to SEQ ID NO: 1089730
aacgucaugucaauguagc

SEQ ID NO: 1089732 - RNA, 19 nt, Artificial Sequence
  Description of Artificial Sequence: Synthetic oligonucleotide
  Sense strand starting at position 2235 of SEQ ID NO: 915569
uggcuuuggcuuuaaagaa

SEQ ID NO: 1089733 - RNA, 19 nt, Artificial Sequence
  Description of Artificial Sequence: Synthetic oligonucleotide
  Antisense strand to SEQ ID NO: 1089732
uucuuuaaagccaaagcca

SEQ ID NO: 1089734 - RNA, 19 nt, Artificial Sequence
  Description of Artificial Sequence: Synthetic oligonucleotide
  Sense strand starting at position 2305 of SEQ ID NO: 915569
cacugagguggucacaauu

SEQ ID NO: 1089735 - RNA, 19 nt, Artificial Sequence
  Description of Artificial Sequence: Synthetic oligonucleotide
  Antisense strand to SEQ ID NO: 1089734
aauugugaccaccucagug

SEQ ID NO: 1089736 - RNA, 19 nt, Artificial Sequence
  Description of Artificial Sequence: Synthetic oligonucleotide
  Sense strand starting at position 2800 of SEQ ID NO: 915569
guaagugauacugaguuuc

SEQ ID NO: 1089737 - RNA, 19 nt, Artificial Sequence
  Description of Artificial Sequence: Synthetic oligonucleotide
  Antisense strand to SEQ ID NO: 1089736
gaaacucaguaucacuuac

SEQ ID NO: 1089738 - RNA, 19 nt, Artificial Sequence
  Description of Artificial Sequence: Synthetic oligonucleotide
  Sense strand starting at position 2907 of SEQ ID NO: 915569
gaauauaggcagugcagau

SEQ ID NO: 1089739 - RNA, 19 nt, Artificial Sequence
  Description of Artificial Sequence: Synthetic oligonucleotide
  Antisense strand to SEQ ID NO: 1089738
aucugcacugccuauauuc

SEQ ID NO: 1089740 - RNA, 19 nt, Artificial Sequence
  Description of Artificial Sequence: Synthetic oligonucleotide
  Sense strand starting at position 2932 of SEQ ID NO: 915569
aaauuauagagguggugua

SEQ ID NO: 1089741 - RNA, 19 nt, Artificial Sequence
  Description of Artificial Sequence: Synthetic oligonucleotide
  Antisense strand to SEQ ID NO: 1089740
uacaccaccucuauaauuu

SEQ ID NO: 1089742 - RNA, 19 nt, Artificial Sequence
  Description of Artificial Sequence: Synthetic oligonucleotide
  Sense strand starting at position 2933 of SEQ ID NO: 915569
aauuauagaggugguguau

SEQ ID NO: 1089743 - RNA, 19 nt, Artificial Sequence
  Description of Artificial Sequence: Synthetic oligonucleotide
  Antisense strand to SEQ ID NO: 1089742
auacaccaccucuauaauu

SEQ ID NO: 1089744 - RNA, 19 nt, Artificial Sequence
  Description of Artificial Sequence: Synthetic oligonucleotide
  Sense strand starting at position 3050 of SEQ ID NO: 915569
ggaagcguuuccuugagug

SEQ ID NO: 1089745 - RNA, 19 nt, Artificial Sequence
  Description of Artificial Sequence: Synthetic oligonucleotide
  Antisense strand to SEQ ID NO: 1089744
cacucaaggaaacgcuucc

SEQ ID NO: 1089746 - RNA, 19 nt, Artificial Sequence
  Description of Artificial Sequence: Synthetic oligonucleotide
  Sense strand starting at position 3052 of SEQ ID NO: 915569
aagcguuuccuugagugaa

SEQ ID NO: 1089747 - RNA, 19 nt, Artificial Sequence
  Description of Artificial Sequence: Synthetic oligonucleotide
  Antisense strand to SEQ ID NO: 1089746
uucacucaaggaaacgcuu

SEQ ID NO: 1089748 - RNA, 19 nt, Artificial Sequence
  Description of Artificial Sequence: Synthetic oligonucleotide
  Sense strand starting at position 3054 of SEQ ID NO: 915569
gcguuuccuugagugaaga

SEQ ID NO: 1089749 - RNA, 19 nt, Artificial Sequence
  Description of Artificial Sequence: Synthetic oligonucleotide
  Antisense strand to SEQ ID NO: 1089748
ucuucacucaaggaaacgc

SEQ ID NO: 1089750 - RNA, 19 nt, Artificial Sequence
  Description of Artificial Sequence: Synthetic oligonucleotide
  Sense strand starting at position 3055 of SEQ ID NO: 915569
cguuuccuugagugaagaa

SEQ ID NO: 1089751 - RNA, 19 nt, Artificial Sequence
  Description of Artificial Sequence: Synthetic oligonucleotide
  Antisense strand to SEQ ID NO: 1089750
uucuucacucaaggaaacg

SEQ ID NO: 1089752 - RNA, 19 nt, Artificial Sequence
  Description of Artificial Sequence: Synthetic oligonucleotide
  Sense strand starting at position 3056 of SEQ ID NO: 915569
guuuccuugagugaagaau

SEQ ID NO: 1089753 - RNA, 19 nt, Artificial Sequence
  Description of Artificial Sequence: Synthetic oligonucleotide
  Antisense strand to SEQ ID NO: 1089752
auucuucacucaaggaaac

SEQ ID NO: 1089754 - RNA, 19 nt, Artificial Sequence
  Description of Artificial Sequence: Synthetic oligonucleotide
  Sense strand starting at position 3101 of SEQ ID NO: 915569
ugagcaaucugacucucca

SEQ ID NO: 1089755 - RNA, 19 nt, Artificial Sequence
  Description of Artificial Sequence: Synthetic oligonucleotide
  Antisense strand to SEQ ID NO: 1089754
uggagagucagauugcuca

SEQ ID NO: 1089756 - RNA, 19 nt, Artificial Sequence
  Description of Artificial Sequence: Synthetic oligonucleotide
  Sense strand starting at position 3140 of SEQ ID NO: 915569
gguagauuaugacaucuua

SEQ ID NO: 1089757 - RNA, 19 nt, Artificial Sequence
  Description of Artificial Sequence: Synthetic oligonucleotide
  Antisense strand to SEQ ID NO: 1089756
uaagaugucauaaucuacc

SEQ ID NO: 1089758 - RNA, 19 nt, Artificial Sequence
  Description of Artificial Sequence: Synthetic oligonucleotide
  Sense strand starting at position 3151 of SEQ ID NO: 915569
acaucuuaacucggaguuu

SEQ ID NO: 1089759 - RNA, 19 nt, Artificial Sequence
  Description of Artificial Sequence: Synthetic oligonucleotide
  Antisense strand to SEQ ID NO: 1089758
aaacuccgaguuaagaugu

SEQ ID NO: 1089760 - RNA, 19 nt, Artificial Sequence
  Description of Artificial Sequence: Synthetic oligonucleotide
  Sense strand starting at position 3160 of SEQ ID NO: 915569
cucggaguuuccuauuuaa

SEQ ID NO: 1089761 - RNA, 19 nt, Artificial Sequence
  Description of Artificial Sequence: Synthetic oligonucleotide
  Antisense strand to SEQ ID NO: 1089760
uuaaauaggaaacuccgag

SEQ ID NO: 1089762 - RNA, 19 nt, Artificial Sequence
  Description of Artificial Sequence: Synthetic oligonucleotide
  Sense strand starting at position 3181 of SEQ ID NO: 915569
acuguauauacuggaggau

SEQ ID NO: 1089763 - RNA, 19 nt, Artificial Sequence
  Description of Artificial Sequence: Synthetic oligonucleotide
  Antisense strand to SEQ ID NO: 1089762
auccuccaguauauacagu

SEQ ID NO: 1089764 - RNA, 19 nt, Artificial Sequence
  Description of Artificial Sequence: Synthetic oligonucleotide
  Sense strand starting at position 3184 of SEQ ID NO: 915569
guauauacuggaggaucua

SEQ ID NO: 1089765 - RNA, 19 nt, Artificial Sequence
  Description of Artificial Sequence: Synthetic oligonucleotide
  Antisense strand to SEQ ID NO: 1089764
uagauccuccaguauauac

SEQ ID NO: 1089766 - RNA, 19 nt, Artificial Sequence
  Description of Artificial Sequence: Synthetic oligonucleotide
  Sense strand starting at position 3303 of SEQ ID NO: 915569
gcaugacucaggcaguaag

SEQ ID NO: 1089767 - RNA, 19 nt, Artificial Sequence
  Description of Artificial Sequence: Synthetic oligonucleotide
  Antisense strand to SEQ ID NO: 1089766
cuuacugccugagucaugc

SEQ ID NO: 1089768 - RNA, 19 nt, Artificial Sequence
  Description of Artificial Sequence: Synthetic oligonucleotide
  Sense strand starting at position 3371 of SEQ ID NO: 915569
guaccaucuuucucaguga

SEQ ID NO: 1089769 - RNA, 19 nt, Artificial Sequence
  Description of Artificial Sequence: Synthetic oligonucleotide
  Antisense strand to SEQ ID NO: 1089768
ucacugagaaagaugguac

SEQ ID NO: 1089770 - RNA, 19 nt, Artificial Sequence
  Description of Artificial Sequence: Synthetic oligonucleotide
  Sense strand starting at position 3374 of SEQ ID NO: 915569
ccaucuuucucagugauag

SEQ ID NO: 1089771 - RNA, 19 nt, Artificial Sequence
  Description of Artificial Sequence: Synthetic oligonucleotide
  Antisense strand to SEQ ID NO: 1089770
cuaucacugagaaagaugg

SEQ ID NO: 1089772 - RNA, 19 nt, Artificial Sequence
  Description of Artificial Sequence: Synthetic oligonucleotide
  Sense strand starting at position 3472 of SEQ ID NO: 915569
gggucuuacccagaguccu

SEQ ID NO: 1089773 - RNA, 19 nt, Artificial Sequence
  Description of Artificial Sequence: Synthetic oligonucleotide
  Antisense strand to SEQ ID NO: 1089772
aggacucuggguaagaccc

SEQ ID NO: 1089774 - RNA, 19 nt, Artificial Sequence
  Description of Artificial Sequence: Synthetic oligonucleotide
  Sense strand starting at position 3502 of SEQ ID NO: 915569
auucgaugcccucacuauu

SEQ ID NO: 1089775 - RNA, 19 nt, Artificial Sequence
  Description of Artificial Sequence: Synthetic oligonucleotide
  Antisense strand to SEQ ID NO: 1089774
aauagugagggcaucgaau

SEQ ID NO: 1089776 - RNA, 19 nt, Artificial Sequence
  Description of Artificial Sequence: Synthetic oligonucleotide
  Sense strand starting at position 3541 of SEQ ID NO: 915569
uuguaaagaugcucacacu

SEQ ID NO: 1089777 - RNA, 19 nt, Artificial Sequence
  Description of Artificial Sequence: Synthetic oligonucleotide
  Antisense strand to SEQ ID NO: 1089776
agugugagcaucuuuacaa

SEQ ID NO: 1089778 - RNA, 19 nt, Artificial Sequence
  Description of Artificial Sequence: Synthetic oligonucleotide
  Sense strand starting at position 3610 of SEQ ID NO: 915569
gucuuaaaguaagagggaa

SEQ ID NO: 1089779 - RNA, 19 nt, Artificial Sequence
  Description of Artificial Sequence: Synthetic oligonucleotide
  Antisense strand to SEQ ID NO: 1089778
uucccucuuacuuuaagac

SEQ ID NO: 1089780 - RNA, 19 nt, Artificial Sequence
  Description of Artificial Sequence: Synthetic oligonucleotide
  Sense strand starting at position 603 of SEQ ID NO: 915570
ugggaagacuuauaauaaa

SEQ ID NO: 1089781 - RNA, 19 nt, Artificial Sequence
  Description of Artificial Sequence: Synthetic oligonucleotide
  Antisense strand to SEQ ID NO: 1089780
uuuauuauaagucuuccca

SEQ ID NO: 1089782 - RNA, 19 nt, Artificial Sequence
  Description of Artificial Sequence: Synthetic oligonucleotide
  Sense strand starting at position 667 of SEQ ID NO: 915570
cagucuaucuucccaggga

SEQ ID NO: 1089783 - RNA, 19 nt, Artificial Sequence
  Description of Artificial Sequence: Synthetic oligonucleotide
  Antisense strand to SEQ ID NO: 1089782
ucccugggaagauagacug

SEQ ID NO: 1089784 - RNA, 19 nt, Artificial Sequence
  Description of Artificial Sequence: Synthetic oligonucleotide
  Sense strand starting at position 670 of SEQ ID NO: 915570
ucuaucuucccagggacaa

SEQ ID NO: 1089785 - RNA, 19 nt, Artificial Sequence
  Description of Artificial Sequence: Synthetic oligonucleotide
  Antisense strand to SEQ ID NO: 1089784
uugucccugggaagauaga

SEQ ID NO: 1089786 - RNA, 19 nt, Artificial Sequence
  Description of Artificial Sequence: Synthetic oligonucleotide
  Sense strand starting at position 671 of SEQ ID NO: 915570
cuaucuucccagggacaau

SEQ ID NO: 1089787 - RNA, 19 nt, Artificial Sequence
  Description of Artificial Sequence: Synthetic oligonucleotide
  Antisense strand to SEQ ID NO: 1089786
auugucccugggaagauag

SEQ ID NO: 1089788 - RNA, 19 nt, Artificial Sequence
  Description of Artificial Sequence: Synthetic oligonucleotide
  Sense strand starting at position 931 of SEQ ID NO: 915570
agcuaagauucugcacuua

SEQ ID NO: 1089789 - RNA, 19 nt, Artificial Sequence
  Description of Artificial Sequence: Synthetic oligonucleotide
  Antisense strand to SEQ ID NO: 1089788
uaagugcagaaucuuagcu

SEQ ID NO: 1089790 - RNA, 19 nt, Artificial Sequence
  Description of Artificial Sequence: Synthetic oligonucleotide
  Sense strand starting at position 943 of SEQ ID NO: 915570
gcacuuagaucacuuugga

SEQ ID NO: 1089791 - RNA, 19 nt, Artificial Sequence
  Description of Artificial Sequence: Synthetic oligonucleotide
  Antisense strand to SEQ ID NO: 1089790
uccaaagugaucuaagugc

SEQ ID NO: 1089792 - RNA, 19 nt, Artificial Sequence
  Description of Artificial Sequence: Synthetic oligonucleotide
  Sense strand starting at position 946 of SEQ ID NO: 915570
cuuagaucacuuuggaagu

SEQ ID NO: 1089793 - RNA, 19 nt, Artificial Sequence
  Description of Artificial Sequence: Synthetic oligonucleotide
  Antisense strand to SEQ ID NO: 1089792
acuuccaaagugaucuaag

SEQ ID NO: 1089794 - RNA, 19 nt, Artificial Sequence
  Description of Artificial Sequence: Synthetic oligonucleotide
  Sense strand starting at position 957 of SEQ ID NO: 915570
uuggaaguguccuuaugug

SEQ ID NO: 1089795 - RNA, 19 nt, Artificial Sequence
  Description of Artificial Sequence: Synthetic oligonucleotide
  Antisense strand to SEQ ID NO: 1089794
cacauaaggacacuuccaa

SEQ ID NO: 1089796 - RNA, 19 nt, Artificial Sequence
  Description of Artificial Sequence: Synthetic oligonucleotide
  Sense strand starting at position 1207 of SEQ ID NO: 915570
auaaauugugcuuaugaug

SEQ ID NO: 1089797 - RNA, 19 nt, Artificial Sequence
  Description of Artificial Sequence: Synthetic oligonucleotide
  Antisense strand to SEQ ID NO: 1089796
caucauaagcacaauuuau

SEQ ID NO: 1089798 - RNA, 19 nt, Artificial Sequence
  Description of Artificial Sequence: Synthetic oligonucleotide
  Sense strand starting at position 1367 of SEQ ID NO: 915570
ugguuaaacucguuaaagg

SEQ ID NO: 1089799 - RNA, 19 nt, Artificial Sequence
  Description of Artificial Sequence: Synthetic oligonucleotide
  Antisense strand to SEQ ID NO: 1089798
ccuuuaacgaguuuaacca

SEQ ID NO: 1089800 - RNA, 19 nt, Artificial Sequence
  Description of Artificial Sequence: Synthetic oligonucleotide
  Sense strand starting at position 1374 of SEQ ID NO: 915570
acucguuaaagggaguuua

SEQ ID NO: 1089801 - RNA, 19 nt, Artificial Sequence
  Description of Artificial Sequence: Synthetic oligonucleotide
  Antisense strand to SEQ ID NO: 1089800
uaaacucccuuuaacgagu

SEQ ID NO: 1089802 - RNA, 19 nt, Artificial Sequence
  Description of Artificial Sequence: Synthetic oligonucleotide
  Sense strand starting at position 1495 of SEQ ID NO: 915570
gccugaugcccagacacua

SEQ ID NO: 1089803 - RNA, 19 nt, Artificial Sequence
  Description of Artificial Sequence: Synthetic oligonucleotide
  Antisense strand to SEQ ID NO: 1089802
uagugucugggcaucaggc

SEQ ID NO: 1089804 - RNA, 19 nt, Artificial Sequence
  Description of Artificial Sequence: Synthetic oligonucleotide
  Sense strand starting at position 1608 of SEQ ID NO: 915570
ggugguuaaagauguaaac

SEQ ID NO: 1089805 - RNA, 19 nt, Artificial Sequence
  Description of Artificial Sequence: Synthetic oligonucleotide
  Antisense strand to SEQ ID NO: 1089804
guuuacaucuuuaaccacc

SEQ ID NO: 1089806 - RNA, 19 nt, Artificial Sequence
  Description of Artificial Sequence: Synthetic oligonucleotide
  Sense strand starting at position 1699 of SEQ ID NO: 915570
accgccuuuccuuaaggua

SEQ ID NO: 1089807 - RNA, 19 nt, Artificial Sequence
  Description of Artificial Sequence: Synthetic oligonucleotide
  Antisense strand to SEQ ID NO: 1089806
uaccuuaaggaaaggcggu

SEQ ID NO: 1089808 - RNA, 19 nt, Artificial Sequence
  Description of Artificial Sequence: Synthetic oligonucleotide
  Sense strand starting at position 2115 of SEQ ID NO: 915570
ugggaucacucgucucauu

SEQ ID NO: 1089809 - RNA, 19 nt, Artificial Sequence
  Description of Artificial Sequence: Synthetic oligonucleotide
  Antisense strand to SEQ ID NO: 1089808
aaugagacgagugauccca

SEQ ID NO: 1089810 - RNA, 19 nt, Artificial Sequence
  Description of Artificial Sequence: Synthetic oligonucleotide
  Sense strand starting at position 2128 of SEQ ID NO: 915570
cucauuucugccgggugau

SEQ ID NO: 1089811 - RNA, 19 nt, Artificial Sequence
  Description of Artificial Sequence: Synthetic oligonucleotide
  Antisense strand to SEQ ID NO: 1089810
aucacccggcagaaaugag

SEQ ID NO: 1089812 - RNA, 19 nt, Artificial Sequence
  Description of Artificial Sequence: Synthetic oligonucleotide
  Sense strand starting at position 2129 of SEQ ID NO: 915570
ucauuucugccgggugauc

SEQ ID NO: 1089813 - RNA, 19 nt, Artificial Sequence
  Description of Artificial Sequence: Synthetic oligonucleotide
  Antisense strand to SEQ ID NO: 1089812
gaucacccggcagaaauga

SEQ ID NO: 1089814 - RNA, 19 nt, Artificial Sequence
  Description of Artificial Sequence: Synthetic oligonucleotide
  Sense strand starting at position 2131 of SEQ ID NO: 915570
auuucugccgggugaucaa

SEQ ID NO: 1089815 - RNA, 19 nt, Artificial Sequence
  Description of Artificial Sequence: Synthetic oligonucleotide
  Antisense strand to SEQ ID NO: 1089814
uugaucacccggcagaaau

SEQ ID NO: 1089816 - RNA, 19 nt, Artificial Sequence
  Description of Artificial Sequence: Synthetic oligonucleotide
  Sense strand starting at position 2166 of SEQ ID NO: 915570
cguaaacccuugucacaga

SEQ ID NO: 1089817 - RNA, 19 nt, Artificial Sequence
  Description of Artificial Sequence: Synthetic oligonucleotide
  Antisense strand to SEQ ID NO: 1089816
ucugugacaaggguuuacg

SEQ ID NO: 1089818 - RNA, 19 nt, Artificial Sequence
  Description of Artificial Sequence: Synthetic oligonucleotide
  Sense strand starting at position 2241 of SEQ ID NO: 915570
ucuuauuguguccaguaug

SEQ ID NO: 1089819 - RNA, 19 nt, Artificial Sequence
  Description of Artificial Sequence: Synthetic oligonucleotide
  Antisense strand to SEQ ID NO: 1089818
cauacuggacacaauaaga

SEQ ID NO: 1089820 - RNA, 19 nt, Artificial Sequence
  Description of Artificial Sequence: Synthetic oligonucleotide
  Sense strand starting at position 2244 of SEQ ID NO: 915570
uauuguguccaguauguac

SEQ ID NO: 1089821 - RNA, 19 nt, Artificial Sequence
  Description of Artificial Sequence: Synthetic oligonucleotide
  Antisense strand to SEQ ID NO: 1089820
guacauacuggacacaaua

SEQ ID NO: 1089822 - RNA, 19 nt, Artificial Sequence
  Description of Artificial Sequence: Synthetic oligonucleotide
  Sense strand starting at position 2387 of SEQ ID NO: 915570
ucuuacuagcuguaggagu

SEQ ID NO: 1089823 - RNA, 19 nt, Artificial Sequence
  Description of Artificial Sequence: Synthetic oligonucleotide
  Antisense strand to SEQ ID NO: 1089822
acuccuacagcuaguaaga

SEQ ID NO: 1089824 - RNA, 19 nt, Artificial Sequence
  Description of Artificial Sequence: Synthetic oligonucleotide
  Sense strand starting at position 2398 of SEQ ID NO: 915570
guaggaguuucccuuaacu

SEQ ID NO: 1089825 - RNA, 19 nt, Artificial Sequence
  Description of Artificial Sequence: Synthetic oligonucleotide
  Antisense strand to SEQ ID NO: 1089824
aguuaagggaaacuccuac

SEQ ID NO: 1089826 - RNA, 19 nt, Artificial Sequence
  Description of Artificial Sequence: Synthetic oligonucleotide
  Sense strand starting at position 2400 of SEQ ID NO: 915570
aggaguuucccuuaacuac

SEQ ID NO: 1089827 - RNA, 19 nt, Artificial Sequence
  Description of Artificial Sequence: Synthetic oligonucleotide
  Antisense strand to SEQ ID NO: 1089826
guaguuaagggaaacuccu

SEQ ID NO: 1089828 - RNA, 19 nt, Artificial Sequence
  Description of Artificial Sequence: Synthetic oligonucleotide
  Sense strand starting at position 2439 of SEQ ID NO: 915570
guagaauggagauguuuau

SEQ ID NO: 1089829 - RNA, 19 nt, Artificial Sequence
  Description of Artificial Sequence: Synthetic oligonucleotide
  Antisense strand to SEQ ID NO: 1089828
auaaacaucuccauucuac

SEQ ID NO: 1089830 - RNA, 19 nt, Artificial Sequence
  Description of Artificial Sequence: Synthetic oligonucleotide
  Sense strand starting at position 3009 of SEQ ID NO: 915570
ggucuuggguaagcugaaa

SEQ ID NO: 1089831 - RNA, 19 nt, Artificial Sequence
  Description of Artificial Sequence: Synthetic oligonucleotide
  Antisense strand to SEQ ID NO: 1089830
uuucagcuuacccaagacc

SEQ ID NO: 1089832 - RNA, 19 nt, Artificial Sequence
  Description of Artificial Sequence: Synthetic oligonucleotide
  Sense strand starting at position 3022 of SEQ ID NO: 915570
cugaaaguugaacgugaga

SEQ ID NO: 1089833 - RNA, 19 nt, Artificial Sequence
  Description of Artificial Sequence: Synthetic oligonucleotide
  Antisense strand to SEQ ID NO: 1089832
ucucacguucaacuuucag

SEQ ID NO: 1089834 - RNA, 19 nt, Artificial Sequence
  Description of Artificial Sequence: Synthetic oligonucleotide
  Sense strand starting at position 3024 of SEQ ID NO: 915570
gaaaguugaacgugagagu

SEQ ID NO: 1089835 - RNA, 19 nt, Artificial Sequence
  Description of Artificial Sequence: Synthetic oligonucleotide
  Antisense strand to SEQ ID NO: 1089834
acucucacguucaacuuuc

SEQ ID NO: 1089836 - RNA, 19 nt, Artificial Sequence
  Description of Artificial Sequence: Synthetic oligonucleotide
  Sense strand starting at position 3031 of SEQ ID NO: 915570
gaacgugagagugguauca

SEQ ID NO: 1089837 - RNA, 19 nt, Artificial Sequence
  Description of Artificial Sequence: Synthetic oligonucleotide
  Antisense strand to SEQ ID NO: 1089836
ugauaccacucucacguuc

SEQ ID NO: 1089838 - RNA, 19 nt, Artificial Sequence
  Description of Artificial Sequence: Synthetic oligonucleotide
  Sense strand starting at position 3260 of SEQ ID NO: 915570
aaacuaauuguugguguua

SEQ ID NO: 1089839 - RNA, 19 nt, Artificial Sequence
  Description of Artificial Sequence: Synthetic oligonucleotide
  Antisense strand to SEQ ID NO: 1089838
uaacaccaacaauuaguuu

SEQ ID NO: 1089840 - RNA, 19 nt, Artificial Sequence
  Description of Artificial Sequence: Synthetic oligonucleotide
  Sense strand starting at position 3505 of SEQ ID NO: 915570
ggcagagaauugccugaaa

SEQ ID NO: 1089841 - RNA, 19 nt, Artificial Sequence
  Description of Artificial Sequence: Synthetic oligonucleotide
  Antisense strand to SEQ ID NO: 1089840
uuucaggcaauucucugcc

SEQ ID NO: 1089842 - RNA, 19 nt, Artificial Sequence
  Description of Artificial Sequence: Synthetic oligonucleotide
  Sense strand starting at position 3670 of SEQ ID NO: 915570
uuaagaaauuggcuacaac

SEQ ID NO: 1089843 - RNA, 19 nt, Artificial Sequence
  Description of Artificial Sequence: Synthetic oligonucleotide
  Antisense strand to SEQ ID NO: 1089842
guuguagccaauuucuuaa

SEQ ID NO: 1089844 - RNA, 19 nt, Artificial Sequence
  Description of Artificial Sequence: Synthetic oligonucleotide
  Sense strand starting at position 3679 of SEQ ID NO: 915570
uggcuacaacucugacaua

SEQ ID NO: 1089845 - RNA, 19 nt, Artificial Sequence
  Description of Artificial Sequence: Synthetic oligonucleotide
  Antisense strand to SEQ ID NO: 1089844
uaugucagaguuguagcca

SEQ ID NO: 1089846 - RNA, 19 nt, Artificial Sequence
  Description of Artificial Sequence: Synthetic oligonucleotide
  Sense strand starting at position 3697 of SEQ ID NO: 915570
aguaguauuugugccaaua

SEQ ID NO: 1089847 - RNA, 19 nt, Artificial Sequence
  Description of Artificial Sequence: Synthetic oligonucleotide
  Antisense strand to SEQ ID NO: 1089846
uauuggcacaaauacuacu

SEQ ID NO: 1089848 - RNA, 19 nt, Artificial Sequence
  Description of Artificial Sequence: Synthetic oligonucleotide
  Sense strand starting at position 3709 of SEQ ID NO: 915570
gccaauaucugguuggagu

SEQ ID NO: 1089849 - RNA, 19 nt, Artificial Sequence
  Description of Artificial Sequence: Synthetic oligonucleotide
  Antisense strand to SEQ ID NO: 1089848
acuccaaccagauauuggc

SEQ ID NO: 1089850 - RNA, 19 nt, Artificial Sequence
  Description of Artificial Sequence: Synthetic oligonucleotide
  Sense strand starting at position 3710 of SEQ ID NO: 915570
ccaauaucugguuggagug

SEQ ID NO: 1089851 - RNA, 19 nt, Artificial Sequence
  Description of Artificial Sequence: Synthetic oligonucleotide
  Antisense strand to SEQ ID NO: 1089850
cacuccaaccagauauugg

SEQ ID NO: 1089852 - RNA, 19 nt, Artificial Sequence
  Description of Artificial Sequence: Synthetic oligonucleotide
  Sense strand starting at position 3716 of SEQ ID NO: 915570
ucugguuggaguggucaca

SEQ ID NO: 1089853 - RNA, 19 nt, Artificial Sequence
  Description of Artificial Sequence: Synthetic oligonucleotide
  Antisense strand to SEQ ID NO: 1089852
ugugaccacuccaaccaga

SEQ ID NO: 1089854 - RNA, 19 nt, Artificial Sequence
  Description of Artificial Sequence: Synthetic oligonucleotide
  Sense strand starting at position 3821 of SEQ ID NO: 915570
ucggaagcucuagaucaca

SEQ ID NO: 1089855 - RNA, 19 nt, Artificial Sequence
  Description of Artificial Sequence: Synthetic oligonucleotide
  Antisense strand to SEQ ID NO: 1089854
ugugaucuagagcuuccga

SEQ ID NO: 1089856 - RNA, 19 nt, Artificial Sequence
  Description of Artificial Sequence: Synthetic oligonucleotide
  Sense strand starting at position 3927 of SEQ ID NO: 915570
ggagacugguguucccaaa

SEQ ID NO: 1089857 - RNA, 19 nt, Artificial Sequence
  Description of Artificial Sequence: Synthetic oligonucleotide
  Antisense strand to SEQ ID NO: 1089856
uuugggaacaccagucucc

SEQ ID NO: 1089858 - RNA, 19 nt, Artificial Sequence
  Description of Artificial Sequence: Synthetic oligonucleotide
  Sense strand starting at position 3979 of SEQ ID NO: 915570
aguguuagaauugaagcaa

SEQ ID NO: 1089859 - RNA, 19 nt, Artificial Sequence
  Description of Artificial Sequence: Synthetic oligonucleotide
  Antisense strand to SEQ ID NO: 1089858
uugcuucaauucuaacacu

SEQ ID NO: 1089860 - RNA, 19 nt, Artificial Sequence
  Description of Artificial Sequence: Synthetic oligonucleotide
  Sense strand starting at position 109 of SEQ ID NO: 915571
auggaucucugggcaggaa

SEQ ID NO: 1089861 - RNA, 19 nt, Artificial Sequence
  Description of Artificial Sequence: Synthetic oligonucleotide
  Antisense strand to SEQ ID NO: 1089860
uuccugcccagagauccau

SEQ ID NO: 1089862 - RNA, 19 nt, Artificial Sequence
  Description of Artificial Sequence: Synthetic oligonucleotide
  Sense strand starting at position 270 of SEQ ID NO: 915571
agagaaagcugccuggagu

SEQ ID NO: 1089863 - RNA, 19 nt, Artificial Sequence
  Description of Artificial Sequence: Synthetic oligonucleotide
  Antisense strand to SEQ ID NO: 1089862
acuccaggcagcuuucucu

SEQ ID NO: 1089864 - RNA, 19 nt, Artificial Sequence
  Description of Artificial Sequence: Synthetic oligonucleotide
  Sense strand starting at position 273 of SEQ ID NO: 915571
gaaagcugccuggagucau

SEQ ID NO: 1089865 - RNA, 19 nt, Artificial Sequence
  Description of Artificial Sequence: Synthetic oligonucleotide
  Antisense strand to SEQ ID NO: 1089864
augacuccaggcagcuuuc

SEQ ID NO: 1089866 - RNA, 19 nt, Artificial Sequence
  Description of Artificial Sequence: Synthetic oligonucleotide
  Sense strand starting at position 494 of SEQ ID NO: 915571
ucuggcucacuguaacuua

SEQ ID NO: 1089867 - RNA, 19 nt, Artificial Sequence
  Description of Artificial Sequence: Synthetic oligonucleotide
  Antisense strand to SEQ ID NO: 1089866
uaaguuacagugagccaga

SEQ ID NO: 1089868 - RNA, 19 nt, Artificial Sequence
  Description of Artificial Sequence: Synthetic oligonucleotide
  Sense strand starting at position 580 of SEQ ID NO: 915571
cagagaugucggcacugag

SEQ ID NO: 1089869 - RNA, 19 nt, Artificial Sequence
  Description of Artificial Sequence: Synthetic oligonucleotide
  Antisense strand to SEQ ID NO: 1089868
cucagugccgacaucucug

SEQ ID NO: 1089870 - RNA, 19 nt, Artificial Sequence
  Description of Artificial Sequence: Synthetic oligonucleotide
  Sense strand starting at position 712 of SEQ ID NO: 915571
gauuacauugcaugugaug

SEQ ID NO: 1089871 - RNA, 19 nt, Artificial Sequence
  Description of Artificial Sequence: Synthetic oligonucleotide
  Antisense strand to SEQ ID NO: 1089870
caucacaugcaauguaauc

SEQ ID NO: 1089872 - RNA, 19 nt, Artificial Sequence
  Description of Artificial Sequence: Synthetic oligonucleotide
  Sense strand starting at position 714 of SEQ ID NO: 915571
uuacauugcaugugaugag

SEQ ID NO: 1089873 - RNA, 19 nt, Artificial Sequence
  Description of Artificial Sequence: Synthetic oligonucleotide
  Antisense strand to SEQ ID NO: 1089872
cucaucacaugcaauguaa

SEQ ID NO: 1089874 - RNA, 19 nt, Artificial Sequence
  Description of Artificial Sequence: Synthetic oligonucleotide
  Sense strand starting at position 974 of SEQ ID NO: 915571
gucagaacacucugggcaa

SEQ ID NO: 1089875 - RNA, 19 nt, Artificial Sequence
  Description of Artificial Sequence: Synthetic oligonucleotide
  Antisense strand to SEQ ID NO: 1089874
uugcccagaguguucugac

SEQ ID NO: 1089876 - RNA, 19 nt, Artificial Sequence
  Description of Artificial Sequence: Synthetic oligonucleotide
  Sense strand starting at position 1119 of SEQ ID NO: 915571
cucgaauaaucaucuggau

SEQ ID NO: 1089877 - RNA, 19 nt, Artificial Sequence
  Description of Artificial Sequence: Synthetic oligonucleotide
  Antisense strand to SEQ ID NO: 1089876
auccagaugauuauucgag

SEQ ID NO: 1089878 - RNA, 19 nt, Artificial Sequence
  Description of Artificial Sequence: Synthetic oligonucleotide
  Sense strand starting at position 1414 of SEQ ID NO: 915571
uggaguuuccuggaacggu

SEQ ID NO: 1089879 - RNA, 19 nt, Artificial Sequence
  Description of Artificial Sequence: Synthetic oligonucleotide
  Antisense strand to SEQ ID NO: 1089878
accguuccaggaaacucca

SEQ ID NO: 1089880 - RNA, 19 nt, Artificial Sequence
  Description of Artificial Sequence: Synthetic oligonucleotide
  Sense strand starting at position 1524 of SEQ ID NO: 915571
caugaacugugucucagau

SEQ ID NO: 1089881 - RNA, 19 nt, Artificial Sequence
  Description of Artificial Sequence: Synthetic oligonucleotide
  Antisense strand to SEQ ID NO: 1089880
aucugagacacaguucaug

SEQ ID NO: 1089882 - RNA, 19 nt, Artificial Sequence
  Description of Artificial Sequence: Synthetic oligonucleotide
  Sense strand starting at position 2254 of SEQ ID NO: 915571
ccuaguucugguuauuaaa

SEQ ID NO: 1089883 - RNA, 19 nt, Artificial Sequence
  Description of Artificial Sequence: Synthetic oligonucleotide
  Antisense strand to SEQ ID NO: 1089882
uuuaauaaccagaacuagg

SEQ ID NO: 1089884 - RNA, 19 nt, Artificial Sequence
  Description of Artificial Sequence: Synthetic oligonucleotide
  Sense strand starting at position 2256 of SEQ ID NO: 915571
uaguucugguuauuaaaug

SEQ ID NO: 1089885 - RNA, 19 nt, Artificial Sequence
  Description of Artificial Sequence: Synthetic oligonucleotide
  Antisense strand to SEQ ID NO: 1089884
cauuuaauaaccagaacua

SEQ ID NO: 1089886 - RNA, 19 nt, Artificial Sequence
  Description of Artificial Sequence: Synthetic oligonucleotide
  Sense strand starting at position 2427 of SEQ ID NO: 915571
guugucaggaauugcagaa

SEQ ID NO: 1089887 - RNA, 19 nt, Artificial Sequence
  Description of Artificial Sequence: Synthetic oligonucleotide
  Antisense strand to SEQ ID NO: 1089886
uucugcaauuccugacaac

SEQ ID NO: 1089888 - RNA, 19 nt, Artificial Sequence
  Description of Artificial Sequence: Synthetic oligonucleotide
  Sense strand starting at position 2508 of SEQ ID NO: 915571
aaucaaauuugugauugag

SEQ ID NO: 1089889 - RNA, 19 nt, Artificial Sequence
  Description of Artificial Sequence: Synthetic oligonucleotide
  Antisense strand to SEQ ID NO: 1089888
cucaaucacaaauuugauu

SEQ ID NO: 1089890 - RNA, 19 nt, Artificial Sequence
  Description of Artificial Sequence: Synthetic oligonucleotide
  Sense strand starting at position 2526 of SEQ ID NO: 915571
ggguuauuugcugguggca

SEQ ID NO: 1089891 - RNA, 19 nt, Artificial Sequence
  Description of Artificial Sequence: Synthetic oligonucleotide
  Antisense strand to SEQ ID NO: 1089890
ugccaccagcaaauaaccc

SEQ ID NO: 1089892 - RNA, 19 nt, Artificial Sequence
  Description of Artificial Sequence: Synthetic oligonucleotide
  Sense strand starting at position 2667 of SEQ ID NO: 915571
cgcgauuggcuaucuagua

SEQ ID NO: 1089893 - RNA, 19 nt, Artificial Sequence
  Description of Artificial Sequence: Synthetic oligonucleotide
  Antisense strand to SEQ ID NO: 1089892
uacuagauagccaaucgcg

SEQ ID NO: 1089894 - RNA, 19 nt, Artificial Sequence
  Description of Artificial Sequence: Synthetic oligonucleotide
  Sense strand starting at position 2681 of SEQ ID NO: 915571
uaguaaugccagucagcgu

SEQ ID NO: 1089895 - RNA, 19 nt, Artificial Sequence
  Description of Artificial Sequence: Synthetic oligonucleotide
  Antisense strand to SEQ ID NO: 1089894
acgcugacuggcauuacua

SEQ ID NO: 1089896 - RNA, 19 nt, Artificial Sequence
  Description of Artificial Sequence: Synthetic oligonucleotide
  Sense strand starting at position 2688 of SEQ ID NO: 915571
gccagucagcgugcgauau

SEQ ID NO: 1089897 - RNA, 19 nt, Artificial Sequence
  Description of Artificial Sequence: Synthetic oligonucleotide
  Antisense strand to SEQ ID NO: 1089896
auaucgcacgcugacuggc

SEQ ID NO: 1089898 - RNA, 19 nt, Artificial Sequence
  Description of Artificial Sequence: Synthetic oligonucleotide
  Sense strand starting at position 2741 of SEQ ID NO: 915571
aggagagaucacugugggu

SEQ ID NO: 1089899 - RNA, 19 nt, Artificial Sequence
  Description of Artificial Sequence: Synthetic oligonucleotide
  Antisense strand to SEQ ID NO: 1089898
acccacagugaucucuccu

SEQ ID NO: 1089900 - RNA, 19 nt, Artificial Sequence
  Description of Artificial Sequence: Synthetic oligonucleotide
  Sense strand starting at position 2743 of SEQ ID NO: 915571
gagagaucacuguggguug

SEQ ID NO: 1089901 - RNA, 19 nt, Artificial Sequence
  Description of Artificial Sequence: Synthetic oligonucleotide
  Antisense strand to SEQ ID NO: 1089900
caacccacagugaucucuc

SEQ ID NO: 1089902 - RNA, 19 nt, Artificial Sequence
  Description of Artificial Sequence: Synthetic oligonucleotide
  Sense strand starting at position 2802 of SEQ ID NO: 915571
cugagucuucaaggaugag

SEQ ID NO: 1089903 - RNA, 19 nt, Artificial Sequence
  Description of Artificial Sequence: Synthetic oligonucleotide
  Antisense strand to SEQ ID NO: 1089902
cucauccuugaagacucag

SEQ ID NO: 1089904 - RNA, 19 nt, Artificial Sequence
  Description of Artificial Sequence: Synthetic oligonucleotide
  Sense strand starting at position 2882 of SEQ ID NO: 915571
cagagauagagguguccuu

SEQ ID NO: 1089905 - RNA, 19 nt, Artificial Sequence
  Description of Artificial Sequence: Synthetic oligonucleotide
  Antisense strand to SEQ ID NO: 1089904
aaggacaccucuaucucug

SEQ ID NO: 1089906 - RNA, 19 nt, Artificial Sequence
  Description of Artificial Sequence: Synthetic oligonucleotide
  Sense strand starting at position 2918 of SEQ ID NO: 915571
auauuugcuuuggaauaug

SEQ ID NO: 1089907 - RNA, 19 nt, Artificial Sequence
  Description of Artificial Sequence: Synthetic oligonucleotide
  Antisense strand to SEQ ID NO: 1089906
cauauuccaaagcaaauau

SEQ ID NO: 1089908 - RNA, 19 nt, Artificial Sequence
  Description of Artificial Sequence: Synthetic oligonucleotide
  Sense strand starting at position 2926 of SEQ ID NO: 915571
uuuggaauaugcucuaugu

SEQ ID NO: 1089909 - RNA, 19 nt, Artificial Sequence
  Description of Artificial Sequence: Synthetic oligonucleotide
  Antisense strand to SEQ ID NO: 1089908
acauagagcauauuccaaa

SEQ ID NO: 1089910 - RNA, 19 nt, Artificial Sequence
  Description of Artificial Sequence: Synthetic oligonucleotide
  Sense strand starting at position 2928 of SEQ ID NO: 915571
uggaauaugcucuauguug

SEQ ID NO: 1089911 - RNA, 19 nt, Artificial Sequence
  Description of Artificial Sequence: Synthetic oligonucleotide
  Antisense strand to SEQ ID NO: 1089910
caacauagagcauauucca

SEQ ID NO: 1089912 - RNA, 19 nt, Artificial Sequence
  Description of Artificial Sequence: Synthetic oligonucleotide
  Sense strand starting at position 2930 of SEQ ID NO: 915571
gaauaugcucuauguugga

SEQ ID NO: 1089913 - RNA, 19 nt, Artificial Sequence
  Description of Artificial Sequence: Synthetic oligonucleotide
  Antisense strand to SEQ ID NO: 1089912
uccaacauagagcauauuc

SEQ ID NO: 1089914 - RNA, 19 nt, Artificial Sequence
  Description of Artificial Sequence: Synthetic oligonucleotide
  Sense strand starting at position 3057 of SEQ ID NO: 915571
gcgugaagccagcuuccau

SEQ ID NO: 1089915 - RNA, 19 nt, Artificial Sequence
  Description of Artificial Sequence: Synthetic oligonucleotide
  Antisense strand to SEQ ID NO: 1089914
auggaagcuggcuucacgc

SEQ ID NO: 1089916 - RNA, 19 nt, Artificial Sequence
  Description of Artificial Sequence: Synthetic oligonucleotide
  Sense strand starting at position 3217 of SEQ ID NO: 915571
uggacuacucccuagaugu

SEQ ID NO: 1089917 - RNA, 19 nt, Artificial Sequence
  Description of Artificial Sequence: Synthetic oligonucleotide
  Antisense strand to SEQ ID NO: 1089916
acaucuagggaguagucca

SEQ ID NO: 1089918 - RNA, 19 nt, Artificial Sequence
  Description of Artificial Sequence: Synthetic oligonucleotide
  Sense strand starting at position 3325 of SEQ ID NO: 915571
ggcagagacuuccuuugaa

SEQ ID NO: 1089919 - RNA, 19 nt, Artificial Sequence
  Description of Artificial Sequence: Synthetic oligonucleotide
  Antisense strand to SEQ ID NO: 1089918
uucaaaggaagucucugcc

SEQ ID NO: 1089920 - RNA, 19 nt, Artificial Sequence
  Description of Artificial Sequence: Synthetic oligonucleotide
  Sense strand starting at position 3328 of SEQ ID NO: 915571
agagacuuccuuugaauac

SEQ ID NO: 1089921 - RNA, 19 nt, Artificial Sequence
  Description of Artificial Sequence: Synthetic oligonucleotide
  Antisense strand to SEQ ID NO: 1089920
guauucaaaggaagucucu

SEQ ID NO: 1089922 - RNA, 19 nt, Artificial Sequence
  Description of Artificial Sequence: Synthetic oligonucleotide
  Sense strand starting at position 3364 of SEQ ID NO: 915571
agaugugacccguaguuua

SEQ ID NO: 1089923 - RNA, 19 nt, Artificial Sequence
  Description of Artificial Sequence: Synthetic oligonucleotide
  Antisense strand to SEQ ID NO: 1089922
uaaacuacgggucacaucu

SEQ ID NO: 1089924 - RNA, 19 nt, Artificial Sequence
  Description of Artificial Sequence: Synthetic oligonucleotide
  Sense strand starting at position 3397 of SEQ ID NO: 915571
uaaagcaaaugguuugauu

SEQ ID NO: 1089925 - RNA, 19 nt, Artificial Sequence
  Description of Artificial Sequence: Synthetic oligonucleotide
  Antisense strand to SEQ ID NO: 1089924
aaucaaaccauuugcuuua

SEQ ID NO: 1089926 - RNA, 19 nt, Artificial Sequence
  Description of Artificial Sequence: Synthetic oligonucleotide
  Sense strand starting at position 3416 of SEQ ID NO: 915571
uaggaucaguguccacuaa

SEQ ID NO: 1089927 - RNA, 19 nt, Artificial Sequence
  Description of Artificial Sequence: Synthetic oligonucleotide
  Antisense strand to SEQ ID NO: 1089926
uuaguggacacugauccua

SEQ ID NO: 1089928 - RNA, 19 nt, Artificial Sequence
  Description of Artificial Sequence: Synthetic oligonucleotide
  Sense strand starting at position 3568 of SEQ ID NO: 915571
auucuaauguccucaggag

SEQ ID NO: 1089929 - RNA, 19 nt, Artificial Sequence
  Description of Artificial Sequence: Synthetic oligonucleotide
  Antisense strand to SEQ ID NO: 1089928
cuccugaggacauuagaau

SEQ ID NO: 1089930 - RNA, 19 nt, Artificial Sequence
  Description of Artificial Sequence: Synthetic oligonucleotide
  Sense strand starting at position 3709 of SEQ ID NO: 915571
agagaaaguuuacuuggca

SEQ ID NO: 1089931 - RNA, 19 nt, Artificial Sequence
  Description of Artificial Sequence: Synthetic oligonucleotide
  Antisense strand to SEQ ID NO: 1089930
ugccaaguaaacuuucucu

SEQ ID NO: 1089932 - RNA, 19 nt, Artificial Sequence
  Description of Artificial Sequence: Synthetic oligonucleotide
  Sense strand starting at position 3726 of SEQ ID NO: 915571
cagcauaaucuggaguguu

SEQ ID NO: 1089933 - RNA, 19 nt, Artificial Sequence
  Description of Artificial Sequence: Synthetic oligonucleotide
  Antisense strand to SEQ ID NO: 1089932
aacacuccagauuaugcug

SEQ ID NO: 1089934 - RNA, 19 nt, Artificial Sequence
  Description of Artificial Sequence: Synthetic oligonucleotide
  Sense strand starting at position 3738 of SEQ ID NO: 915571
gaguguucagggcaguaag

SEQ ID NO: 1089935 - RNA, 19 nt, Artificial Sequence
  Description of Artificial Sequence: Synthetic oligonucleotide
  Antisense strand to SEQ ID NO: 1089934
cuuacugcccugaacacuc

SEQ ID NO: 1089936 - RNA, 19 nt, Artificial Sequence
  Description of Artificial Sequence: Synthetic oligonucleotide
  Sense strand starting at position 3820 of SEQ ID NO: 915571
aagagugccuuccugauuc

SEQ ID NO: 1089937 - RNA, 19 nt, Artificial Sequence
  Description of Artificial Sequence: Synthetic oligonucleotide
  Antisense strand to SEQ ID NO: 1089936
gaaucaggaaggcacucuu

SEQ ID NO: 1089938 - RNA, 19 nt, Artificial Sequence
  Description of Artificial Sequence: Synthetic oligonucleotide
  Sense strand starting at position 3872 of SEQ ID NO: 915571
gucauuuggacggguguga

SEQ ID NO: 1089939 - RNA, 19 nt, Artificial Sequence
  Description of Artificial Sequence: Synthetic oligonucleotide
  Antisense strand to SEQ ID NO: 1089938
ucacacccguccaaaugac

SEQ ID NO: 1089940 - RNA, 19 nt, Artificial Sequence
  Description of Artificial Sequence: Synthetic oligonucleotide
  Sense strand starting at position 125 of SEQ ID NO: 915572
uuucuuggcuucucugaca

SEQ ID NO: 1089941 - RNA, 19 nt, Artificial Sequence
  Description of Artificial Sequence: Synthetic oligonucleotide
  Antisense strand to SEQ ID NO: 1089940
ugucagagaagccaagaaa

SEQ ID NO: 1089942 - RNA, 19 nt, Artificial Sequence
  Description of Artificial Sequence: Synthetic oligonucleotide
  Sense strand starting at position 241 of SEQ ID NO: 915572
gccuuaguaucucuacucu

SEQ ID NO: 1089943 - RNA, 19 nt, Artificial Sequence
  Description of Artificial Sequence: Synthetic oligonucleotide
  Antisense strand to SEQ ID NO: 1089942
agaguagagauacuaaggc

SEQ ID NO: 1089944 - RNA, 19 nt, Artificial Sequence
  Description of Artificial Sequence: Synthetic oligonucleotide
  Sense strand starting at position 247 of SEQ ID NO: 915572
guaucucuacucugaccua

SEQ ID NO: 1089945 - RNA, 19 nt, Artificial Sequence
  Description of Artificial Sequence: Synthetic oligonucleotide
  Antisense strand to SEQ ID NO: 1089944
uaggucagaguagagauac

SEQ ID NO: 1089946 - RNA, 19 nt, Artificial Sequence
  Description of Artificial Sequence: Synthetic oligonucleotide
  Sense strand starting at position 420 of SEQ ID NO: 915572
cucgacaacucuuugcuga

SEQ ID NO: 1089947 - RNA, 19 nt, Artificial Sequence
  Description of Artificial Sequence: Synthetic oligonucleotide
  Antisense strand to SEQ ID NO: 1089946
ucagcaaagaguugucgag

SEQ ID NO: 1089948 - RNA, 19 nt, Artificial Sequence
  Description of Artificial Sequence: Synthetic oligonucleotide
  Sense strand starting at position 421 of SEQ ID NO: 915572
ucgacaacucuuugcugaa

SEQ ID NO: 1089949 - RNA, 19 nt, Artificial Sequence
  Description of Artificial Sequence: Synthetic oligonucleotide
  Antisense strand to SEQ ID NO: 1089948
uucagcaaagaguugucga

SEQ ID NO: 1089950 - RNA, 19 nt, Artificial Sequence
  Description of Artificial Sequence: Synthetic oligonucleotide
  Sense strand starting at position 422 of SEQ ID NO: 915572
cgacaacucuuugcugaag

SEQ ID NO: 1089951 - RNA, 19 nt, Artificial Sequence
  Description of Artificial Sequence: Synthetic oligonucleotide
  Antisense strand to SEQ ID NO: 1089950
cuucagcaaagaguugucg

SEQ ID NO: 1089952 - RNA, 19 nt, Artificial Sequence
  Description of Artificial Sequence: Synthetic oligonucleotide
  Sense strand starting at position 458 of SEQ ID NO: 915572
auggucuuaucauuacaug

SEQ ID NO: 1089953 - RNA, 19 nt, Artificial Sequence
  Description of Artificial Sequence: Synthetic oligonucleotide
  Antisense strand to SEQ ID NO: 1089952
cauguaaugauaagaccau

SEQ ID NO: 1089954 - RNA, 19 nt, Artificial Sequence
  Description of Artificial Sequence: Synthetic oligonucleotide
  Sense strand starting at position 459 of SEQ ID NO: 915572
uggucuuaucauuacauga

SEQ ID NO: 1089955 - RNA, 19 nt, Artificial Sequence
  Description of Artificial Sequence: Synthetic oligonucleotide
  Antisense strand to SEQ ID NO: 1089954
ucauguaaugauaagacca

SEQ ID NO: 1089956 - RNA, 19 nt, Artificial Sequence
  Description of Artificial Sequence: Synthetic oligonucleotide
  Sense strand starting at position 515 of SEQ ID NO: 915572
auucucucgccuugggaaa

SEQ ID NO: 1089957 - RNA, 19 nt, Artificial Sequence
  Description of Artificial Sequence: Synthetic oligonucleotide
  Antisense strand to SEQ ID NO: 1089956
uuucccaaggcgagagaau

SEQ ID NO: 1089958 - RNA, 19 nt, Artificial Sequence
  Description of Artificial Sequence: Synthetic oligonucleotide
  Sense strand starting at position 673 of SEQ ID NO: 915572
cccuuuccaucuguaagga

SEQ ID NO: 1089959 - RNA, 19 nt, Artificial Sequence
  Description of Artificial Sequence: Synthetic oligonucleotide
  Antisense strand to SEQ ID NO: 1089958
uccuuacagauggaaaggg

SEQ ID NO: 1089960 - RNA, 19 nt, Artificial Sequence
  Description of Artificial Sequence: Synthetic oligonucleotide
  Sense strand starting at position 1637 of SEQ ID NO: 915572
cagacauaugcaggcacau

SEQ ID NO: 1089961 - RNA, 19 nt, Artificial Sequence
  Description of Artificial Sequence: Synthetic oligonucleotide
  Antisense strand to SEQ ID NO: 1089960
augugccugcauaugucug

SEQ ID NO: 1089962 - RNA, 19 nt, Artificial Sequence
  Description of Artificial Sequence: Synthetic oligonucleotide
  Sense strand starting at position 1783 of SEQ ID NO: 915572
acgggcuuucauggaguga

SEQ ID NO: 1089963 - RNA, 19 nt, Artificial Sequence
  Description of Artificial Sequence: Synthetic oligonucleotide
  Antisense strand to SEQ ID NO: 1089962
ucacuccaugaaagcccgu

SEQ ID NO: 1089964 - RNA, 19 nt, Artificial Sequence
  Description of Artificial Sequence: Synthetic oligonucleotide
  Sense strand starting at position 2151 of SEQ ID NO: 915572
ggagagugggccggugaua

SEQ ID NO: 1089965 - RNA, 19 nt, Artificial Sequence
  Description of Artificial Sequence: Synthetic oligonucleotide
  Antisense strand to SEQ ID NO: 1089964
uaucaccggcccacucucc

SEQ ID NO: 1089966 - RNA, 19 nt, Artificial Sequence
  Description of Artificial Sequence: Synthetic oligonucleotide
  Sense strand starting at position 2459 of SEQ ID NO: 915572
gggacaaugucuguggaga

SEQ ID NO: 1089967 - RNA, 19 nt, Artificial Sequence
  Description of Artificial Sequence: Synthetic oligonucleotide
  Antisense strand to SEQ ID NO: 1089966
ucuccacagacauuguccc

SEQ ID NO: 1089968 - RNA, 19 nt, Artificial Sequence
  Description of Artificial Sequence: Synthetic oligonucleotide
  Sense strand starting at position 2460 of SEQ ID NO: 915572
ggacaaugucuguggagaa

SEQ ID NO: 1089969 - RNA, 19 nt, Artificial Sequence
  Description of Artificial Sequence: Synthetic oligonucleotide
  Antisense strand to SEQ ID NO: 1089968
uucuccacagacauugucc

SEQ ID NO: 1089970 - RNA, 19 nt, Artificial Sequence
  Description of Artificial Sequence: Synthetic oligonucleotide
  Sense strand starting at position 2635 of SEQ ID NO: 915572
gccgaugcugcgagagaaa

SEQ ID NO: 1089971 - RNA, 19 nt, Artificial Sequence
  Description of Artificial Sequence: Synthetic oligonucleotide
  Antisense strand to SEQ ID NO: 1089970
uuucucucgcagcaucggc

SEQ ID NO: 1089972 - RNA, 19 nt, Artificial Sequence
  Description of Artificial Sequence: Synthetic oligonucleotide
  Sense strand starting at position 2673 of SEQ ID NO: 915572
ggcucaugguaauugggaa

SEQ ID NO: 1089973 - RNA, 19 nt, Artificial Sequence
  Description of Artificial Sequence: Synthetic oligonucleotide
  Antisense strand to SEQ ID NO: 1089972
uucccaauuaccaugagcc

SEQ ID NO: 1089974 - RNA, 19 nt, Artificial Sequence
  Description of Artificial Sequence: Synthetic oligonucleotide
  Sense strand starting at position 2677 of SEQ ID NO: 915572
caugguaauugggaagaga

SEQ ID NO: 1089975 - RNA, 19 nt, Artificial Sequence
  Description of Artificial Sequence: Synthetic oligonucleotide
  Antisense strand to SEQ ID NO: 1089974
ucucuucccaauuaccaug

SEQ ID NO: 1089976 - RNA, 19 nt, Artificial Sequence
  Description of Artificial Sequence: Synthetic oligonucleotide
  Sense strand starting at position 2695 of SEQ ID NO: 915572
aguggagcuccugacuaga

SEQ ID NO: 1089977 - RNA, 19 nt, Artificial Sequence
  Description of Artificial Sequence: Synthetic oligonucleotide
  Antisense strand to SEQ ID NO: 1089976
ucuagucaggagcuccacu

SEQ ID NO: 1089978 - RNA, 19 nt, Artificial Sequence
  Description of Artificial Sequence: Synthetic oligonucleotide
  Sense strand starting at position 2697 of SEQ ID NO: 915572
uggagcuccugacuagaaa

SEQ ID NO: 1089979 - RNA, 19 nt, Artificial Sequence
  Description of Artificial Sequence: Synthetic oligonucleotide
  Antisense strand to SEQ ID NO: 1089978
uuucuagucaggagcucca

SEQ ID NO: 1089980 - RNA, 19 nt, Artificial Sequence
  Description of Artificial Sequence: Synthetic oligonucleotide
  Sense strand starting at position 2822 of SEQ ID NO: 915572
cugcuauaccguggagcaa

SEQ ID NO: 1089981 - RNA, 19 nt, Artificial Sequence
  Description of Artificial Sequence: Synthetic oligonucleotide
  Antisense strand to SEQ ID NO: 1089980
uugcuccacgguauagcag

SEQ ID NO: 1089982 - RNA, 19 nt, Artificial Sequence
  Description of Artificial Sequence: Synthetic oligonucleotide
  Sense strand starting at position 2966 of SEQ ID NO: 915572
gggucuggguuugaagaga

SEQ ID NO: 1089983 - RNA, 19 nt, Artificial Sequence
  Description of Artificial Sequence: Synthetic oligonucleotide
  Antisense strand to SEQ ID NO: 1089982
ucucuucaaacccagaccc

SEQ ID NO: 1089984 - RNA, 19 nt, Artificial Sequence
  Description of Artificial Sequence: Synthetic oligonucleotide
  Sense strand starting at position 3072 of SEQ ID NO: 915572
ugaggucuaguguagacaa

SEQ ID NO: 1089985 - RNA, 19 nt, Artificial Sequence
  Description of Artificial Sequence: Synthetic oligonucleotide
  Antisense strand to SEQ ID NO: 1089984
uugucuacacuagaccuca

SEQ ID NO: 1089986 - RNA, 19 nt, Artificial Sequence
  Description of Artificial Sequence: Synthetic oligonucleotide
  Sense strand starting at position 3074 of SEQ ID NO: 915572
aggucuaguguagacaaga

SEQ ID NO: 1089987 - RNA, 19 nt, Artificial Sequence
  Description of Artificial Sequence: Synthetic oligonucleotide
  Antisense strand to SEQ ID NO: 1089986
ucuugucuacacuagaccu

SEQ ID NO: 1089988 - RNA, 19 nt, Artificial Sequence
  Description of Artificial Sequence: Synthetic oligonucleotide
  Sense strand starting at position 3109 of SEQ ID NO: 915572
gaagcugaggucuacuagu

SEQ ID NO: 1089989 - RNA, 19 nt, Artificial Sequence
  Description of Artificial Sequence: Synthetic oligonucleotide
  Antisense strand to SEQ ID NO: 1089988
acuaguagaccucagcuuc

SEQ ID NO: 1089990 - RNA, 19 nt, Artificial Sequence
  Description of Artificial Sequence: Synthetic oligonucleotide
  Sense strand starting at position 3189 of SEQ ID NO: 915572
gcagaaagcugagaucaag

SEQ ID NO: 1089991 - RNA, 19 nt, Artificial Sequence
  Description of Artificial Sequence: Synthetic oligonucleotide
  Antisense strand to SEQ ID NO: 1089990
cuugaucucagcuuucugc

SEQ ID NO: 1089992 - RNA, 19 nt, Artificial Sequence
  Description of Artificial Sequence: Synthetic oligonucleotide
  Sense strand starting at position 3304 of SEQ ID NO: 915572
gagguugaguggagagaug

SEQ ID NO: 1089993 - RNA, 19 nt, Artificial Sequence
  Description of Artificial Sequence: Synthetic oligonucleotide
  Antisense strand to SEQ ID NO: 1089992
caucucuccacucaaccuc

SEQ ID NO: 1089994 - RNA, 19 nt, Artificial Sequence
  Description of Artificial Sequence: Synthetic oligonucleotide
  Sense strand starting at position 3315 of SEQ ID NO: 915572
gagagaugcugagaucaau

SEQ ID NO: 1089995 - RNA, 19 nt, Artificial Sequence
  Description of Artificial Sequence: Synthetic oligonucleotide
  Antisense strand to SEQ ID NO: 1089994
auugaucucagcaucucuc

SEQ ID NO: 1089996 - RNA, 19 nt, Artificial Sequence
  Description of Artificial Sequence: Synthetic oligonucleotide
  Sense strand starting at position 3324 of SEQ ID NO: 915572
ugagaucaaucagagagaa

SEQ ID NO: 1089997 - RNA, 19 nt, Artificial Sequence
  Description of Artificial Sequence: Synthetic oligonucleotide
  Antisense strand to SEQ ID NO: 1089996
uucucucugauugaucuca

SEQ ID NO: 1089998 - RNA, 19 nt, Artificial Sequence
  Description of Artificial Sequence: Synthetic oligonucleotide
  Sense strand starting at position 3836 of SEQ ID NO: 915572
guagaaguuacuggcgaug

SEQ ID NO: 1089999 - RNA, 19 nt, Artificial Sequence
  Description of Artificial Sequence: Synthetic oligonucleotide
  Antisense strand to SEQ ID NO: 1089998
caucgccaguaacuucuac

SEQ ID NO: 1090000 - RNA, 19 nt, Artificial Sequence
  Description of Artificial Sequence: Synthetic oligonucleotide
  Sense strand starting at position 3839 of SEQ ID NO: 915572
gaaguuacuggcgaugaaa

SEQ ID NO: 1090001 - RNA, 19 nt, Artificial Sequence
  Description of Artificial Sequence: Synthetic oligonucleotide
  Antisense strand to SEQ ID NO: 1090000
uuucaucgccaguaacuuc

SEQ ID NO: 1090002 - RNA, 19 nt, Artificial Sequence
  Description of Artificial Sequence: Synthetic oligonucleotide
  Sense strand starting at position 3841 of SEQ ID NO: 915572
aguuacuggcgaugaaaga

SEQ ID NO: 1090003 - RNA, 19 nt, Artificial Sequence
  Description of Artificial Sequence: Synthetic oligonucleotide
  Antisense strand to SEQ ID NO: 1090002
ucuuucaucgccaguaacu

SEQ ID NO: 1090004 - RNA, 19 nt, Artificial Sequence
  Description of Artificial Sequence: Synthetic oligonucleotide
  Sense strand starting at position 3850 of SEQ ID NO: 915572
cgaugaaagagugauggca

SEQ ID NO: 1090005 - RNA, 19 nt, Artificial Sequence
  Description of Artificial Sequence: Synthetic oligonucleotide
  Antisense strand to SEQ ID NO: 1090004
ugccaucacucuuucaucg

SEQ ID NO: 1090006 - RNA, 19 nt, Artificial Sequence
  Description of Artificial Sequence: Synthetic oligonucleotide
  Sense strand starting at position 3865 of SEQ ID NO: 915572
ggcauuuacucaugaugag

SEQ ID NO: 1090007 - RNA, 19 nt, Artificial Sequence
  Description of Artificial Sequence: Synthetic oligonucleotide
  Antisense strand to SEQ ID NO: 1090006
cucaucaugaguaaaugcc

SEQ ID NO: 1090008 - RNA, 19 nt, Artificial Sequence
  Description of Artificial Sequence: Synthetic oligonucleotide
  Sense strand starting at position 3868 of SEQ ID NO: 915572
auuuacucaugaugagaug

SEQ ID NO: 1090009 - RNA, 19 nt, Artificial Sequence
  Description of Artificial Sequence: Synthetic oligonucleotide
  Antisense strand to SEQ ID NO: 1090008
caucucaucaugaguaaau

SEQ ID NO: 1090010 - RNA, 19 nt, Artificial Sequence
  Description of Artificial Sequence: Synthetic oligonucleotide
  Sense strand starting at position 3871 of SEQ ID NO: 915572
uacucaugaugagauggaa

SEQ ID NO: 1090011 - RNA, 19 nt, Artificial Sequence
  Description of Artificial Sequence: Synthetic oligonucleotide
  Antisense strand to SEQ ID NO: 1090010
uuccaucucaucaugagua

SEQ ID NO: 1090012 - RNA, 19 nt, Artificial Sequence
  Description of Artificial Sequence: Synthetic oligonucleotide
  Sense strand starting at position 3958 of SEQ ID NO: 915572
gggcaucuugagugaagug

SEQ ID NO: 1090013 - RNA, 19 nt, Artificial Sequence
  Description of Artificial Sequence: Synthetic oligonucleotide
  Antisense strand to SEQ ID NO: 1090012
cacuucacucaagaugccc

SEQ ID NO: 1090014 - RNA, 19 nt, Artificial Sequence
  Description of Artificial Sequence: Synthetic oligonucleotide
  Sense strand starting at position 3959 of SEQ ID NO: 915572
ggcaucuugagugaaguga

SEQ ID NO: 1090015 - RNA, 19 nt, Artificial Sequence
  Description of Artificial Sequence: Synthetic oligonucleotide
  Antisense strand to SEQ ID NO: 1090014
ucacuucacucaagaugcc

SEQ ID NO: 1090016 - RNA, 19 nt, Artificial Sequence
  Description of Artificial Sequence: Synthetic oligonucleotide
  Sense strand starting at position 3963 of SEQ ID NO: 915572
ucuugagugaagugaaaga

SEQ ID NO: 1090017 - RNA, 19 nt, Artificial Sequence
  Description of Artificial Sequence: Synthetic oligonucleotide
  Antisense strand to SEQ ID NO: 1090016
ucuuucacuucacucaaga

SEQ ID NO: 1090018 - RNA, 19 nt, Artificial Sequence
  Description of Artificial Sequence: Synthetic oligonucleotide
  Sense strand starting at position 3979 of SEQ ID NO: 915572
agauaucacugaugaaucu

SEQ ID NO: 1090019 - RNA, 19 nt, Artificial Sequence
  Description of Artificial Sequence: Synthetic oligonucleotide
  Antisense strand to SEQ ID NO: 1090018
agauucaucagugauaucu

SEQ ID NO: 1090020 - RNA, 19 nt, Artificial Sequence
  Description of Artificial Sequence: Synthetic oligonucleotide
  Sense strand starting at position 38 of SEQ ID NO: 915573
gcuggugucgcuguuaaga

SEQ ID NO: 1090021 - RNA, 19 nt, Artificial Sequence
  Description of Artificial Sequence: Synthetic oligonucleotide
  Antisense strand to SEQ ID NO: 1090020
ucuuaacagcgacaccagc

SEQ ID NO: 1090022 - RNA, 19 nt, Artificial Sequence
  Description of Artificial Sequence: Synthetic oligonucleotide
  Sense strand starting at position 201 of SEQ ID NO: 915573
acacauucuugcccaggga

SEQ ID NO: 1090023 - RNA, 19 nt, Artificial Sequence
  Description of Artificial Sequence: Synthetic oligonucleotide
  Antisense strand to SEQ ID NO: 1090022
ucccugggcaagaaugugu

SEQ ID NO: 1090024 - RNA, 19 nt, Artificial Sequence
  Description of Artificial Sequence: Synthetic oligonucleotide
  Sense strand starting at position 350 of SEQ ID NO: 915573
agcaaaggucacugagaca

SEQ ID NO: 1090025 - RNA, 19 nt, Artificial Sequence
  Description of Artificial Sequence: Synthetic oligonucleotide
  Antisense strand to SEQ ID NO: 1090024
ugucucagugaccuuugcu

SEQ ID NO: 1090026 - RNA, 19 nt, Artificial Sequence
  Description of Artificial Sequence: Synthetic oligonucleotide
  Sense strand starting at position 402 of SEQ ID NO: 915573
ccgguaugaccuuggacua

SEQ ID NO: 1090027 - RNA, 19 nt, Artificial Sequence
  Description of Artificial Sequence: Synthetic oligonucleotide
  Antisense strand to SEQ ID NO: 1090026
uaguccaaggucauaccgg

SEQ ID NO: 1090028 - RNA, 19 nt, Artificial Sequence
  Description of Artificial Sequence: Synthetic oligonucleotide
  Sense strand starting at position 467 of SEQ ID NO: 915573
acaauagggugauauguuu

SEQ ID NO: 1090029 - RNA, 19 nt, Artificial Sequence
  Description of Artificial Sequence: Synthetic oligonucleotide
  Antisense strand to SEQ ID NO: 1090028
aaacauaucacccuauugu

SEQ ID NO: 1090030 - RNA, 19 nt, Artificial Sequence
  Description of Artificial Sequence: Synthetic oligonucleotide
  Sense strand starting at position 549 of SEQ ID NO: 915573
aagugaaauuagugagaaa

SEQ ID NO: 1090031 - RNA, 19 nt, Artificial Sequence
  Description of Artificial Sequence: Synthetic oligonucleotide
  Antisense strand to SEQ ID NO: 1090030
uuucucacuaauuucacuu

SEQ ID NO: 1090032 - RNA, 19 nt, Artificial Sequence
  Description of Artificial Sequence: Synthetic oligonucleotide
  Sense strand starting at position 569 of SEQ ID NO: 915573
ggcagaacucaggguaauc

SEQ ID NO: 1090033 - RNA, 19 nt, Artificial Sequence
  Description of Artificial Sequence: Synthetic oligonucleotide
  Antisense strand to SEQ ID NO: 1090032
gauuacccugaguucugcc

SEQ ID NO: 1090034 - RNA, 19 nt, Artificial Sequence
  Description of Artificial Sequence: Synthetic oligonucleotide
  Sense strand starting at position 735 of SEQ ID NO: 915573
aggcaauaacacggucaaa

SEQ ID NO: 1090035 - RNA, 19 nt, Artificial Sequence
  Description of Artificial Sequence: Synthetic oligonucleotide
  Antisense strand to SEQ ID NO: 1090034
uuugaccguguuauugccu

SEQ ID NO: 1090036 - RNA, 19 nt, Artificial Sequence
  Description of Artificial Sequence: Synthetic oligonucleotide
  Sense strand starting at position 836 of SEQ ID NO: 915573
cguuacuuaugaucuaaua

SEQ ID NO: 1090037 - RNA, 19 nt, Artificial Sequence
  Description of Artificial Sequence: Synthetic oligonucleotide
  Antisense strand to SEQ ID NO: 1090036
uauuagaucauaaguaacg

SEQ ID NO: 1090038 - RNA, 19 nt, Artificial Sequence
  Description of Artificial Sequence: Synthetic oligonucleotide
  Sense strand starting at position 855 of SEQ ID NO: 915573
aaccuauugccuggguaga

SEQ ID NO: 1090039 - RNA, 19 nt, Artificial Sequence
  Description of Artificial Sequence: Synthetic oligonucleotide
  Antisense strand to SEQ ID NO: 1090038
ucuacccaggcaauagguu

SEQ ID NO: 1090040 - RNA, 19 nt, Artificial Sequence
  Description of Artificial Sequence: Synthetic oligonucleotide
  Sense strand starting at position 856 of SEQ ID NO: 915573
accuauugccuggguagaa

SEQ ID NO: 1090041 - RNA, 19 nt, Artificial Sequence
  Description of Artificial Sequence: Synthetic oligonucleotide
  Antisense strand to SEQ ID NO: 1090040
uucuacccaggcaauaggu

SEQ ID NO: 1090042 - RNA, 19 nt, Artificial Sequence
  Description of Artificial Sequence: Synthetic oligonucleotide
  Sense strand starting at position 857 of SEQ ID NO: 915573
ccuauugccuggguagaaa

SEQ ID NO: 1090043 - RNA, 19 nt, Artificial Sequence
  Description of Artificial Sequence: Synthetic oligonucleotide
  Antisense strand to SEQ ID NO: 1090042
uuucuacccaggcaauagg

SEQ ID NO: 1090044 - RNA, 19 nt, Artificial Sequence
  Description of Artificial Sequence: Synthetic oligonucleotide
  Sense strand starting at position 983 of SEQ ID NO: 915573
gugggagagucagcaucuu

SEQ ID NO: 1090045 - RNA, 19 nt, Artificial Sequence
  Description of Artificial Sequence: Synthetic oligonucleotide
  Antisense strand to SEQ ID NO: 1090044
aagaugcugacucucccac

SEQ ID NO: 1090046 - RNA, 19 nt, Artificial Sequence
  Description of Artificial Sequence: Synthetic oligonucleotide
  Sense strand starting at position 1098 of SEQ ID NO: 915573
ccucuugucugacuguaca

SEQ ID NO: 1090047 - RNA, 19 nt, Artificial Sequence
  Description of Artificial Sequence: Synthetic oligonucleotide
  Antisense strand to SEQ ID NO: 1090046
uguacagucagacaagagg

SEQ ID NO: 1090048 - RNA, 19 nt, Artificial Sequence
  Description of Artificial Sequence: Synthetic oligonucleotide
  Sense strand starting at position 1116 of SEQ ID NO: 915573
agagauagucgacaagcuu

SEQ ID NO: 1090049 - RNA, 19 nt, Artificial Sequence
  Description of Artificial Sequence: Synthetic oligonucleotide
  Antisense strand to SEQ ID NO: 1090048
aagcuugucgacuaucucu

SEQ ID NO: 1090050 - RNA, 19 nt, Artificial Sequence
  Description of Artificial Sequence: Synthetic oligonucleotide
  Sense strand starting at position 1305 of SEQ ID NO: 915573
ccuauaccugccggaaacu

SEQ ID NO: 1090051 - RNA, 19 nt, Artificial Sequence
  Description of Artificial Sequence: Synthetic oligonucleotide
  Antisense strand to SEQ ID NO: 1090050
aguuuccggcagguauagg

SEQ ID NO: 1090052 - RNA, 19 nt, Artificial Sequence
  Description of Artificial Sequence: Synthetic oligonucleotide
  Sense strand starting at position 1306 of SEQ ID NO: 915573
cuauaccugccggaaacua

SEQ ID NO: 1090053 - RNA, 19 nt, Artificial Sequence
  Description of Artificial Sequence: Synthetic oligonucleotide
  Antisense strand to SEQ ID NO: 1090052
uaguuuccggcagguauag

SEQ ID NO: 1090054 - RNA, 19 nt, Artificial Sequence
  Description of Artificial Sequence: Synthetic oligonucleotide
  Sense strand starting at position 1365 of SEQ ID NO: 915573
cggcgaguuaccuggaaua

SEQ ID NO: 1090055 - RNA, 19 nt, Artificial Sequence
  Description of Artificial Sequence: Synthetic oligonucleotide
  Antisense strand to SEQ ID NO: 1090054
uauuccagguaacucgccg

SEQ ID NO: 1090056 - RNA, 19 nt, Artificial Sequence
  Description of Artificial Sequence: Synthetic oligonucleotide
  Sense strand starting at position 1367 of SEQ ID NO: 915573
gcgaguuaccuggaauacg

SEQ ID NO: 1090057 - RNA, 19 nt, Artificial Sequence
  Description of Artificial Sequence: Synthetic oligonucleotide
  Antisense strand to SEQ ID NO: 1090056
cguauuccagguaacucgc

SEQ ID NO: 1090058 - RNA, 19 nt, Artificial Sequence
  Description of Artificial Sequence: Synthetic oligonucleotide
  Sense strand starting at position 1376 of SEQ ID NO: 915573
cuggaauacguuuacuaaa

SEQ ID NO: 1090059 - RNA, 19 nt, Artificial Sequence
  Description of Artificial Sequence: Synthetic oligonucleotide
  Antisense strand to SEQ ID NO: 1090058
uuuaguaaacguauuccag

SEQ ID NO: 1090060 - RNA, 19 nt, Artificial Sequence
  Description of Artificial Sequence: Synthetic oligonucleotide
  Sense strand starting at position 1378 of SEQ ID NO: 915573
ggaauacguuuacuaaauc

SEQ ID NO: 1090061 - RNA, 19 nt, Artificial Sequence
  Description of Artificial Sequence: Synthetic oligonucleotide
  Antisense strand to SEQ ID NO: 1090060
gauuuaguaaacguauucc

SEQ ID NO: 1090062 - RNA, 19 nt, Artificial Sequence
  Description of Artificial Sequence: Synthetic oligonucleotide
  Sense strand starting at position 1407 of SEQ ID NO: 915573
aggaaagaucaaugcgauu

SEQ ID NO: 1090063 - RNA, 19 nt, Artificial Sequence
  Description of Artificial Sequence: Synthetic oligonucleotide
  Antisense strand to SEQ ID NO: 1090062
aaucgcauugaucuuuccu

SEQ ID NO: 1090064 - RNA, 19 nt, Artificial Sequence
  Description of Artificial Sequence: Synthetic oligonucleotide
  Sense strand starting at position 1434 of SEQ ID NO: 915573
gacgguuguacucgugaag

SEQ ID NO: 1090065 - RNA, 19 nt, Artificial Sequence
  Description of Artificial Sequence: Synthetic oligonucleotide
  Antisense strand to SEQ ID NO: 1090064
cuucacgaguacaaccguc

SEQ ID NO: 1090066 - RNA, 19 nt, Artificial Sequence
  Description of Artificial Sequence: Synthetic oligonucleotide
  Sense strand starting at position 1437 of SEQ ID NO: 915573
gguuguacucgugaaggaa

SEQ ID NO: 1090067 - RNA, 19 nt, Artificial Sequence
  Description of Artificial Sequence: Synthetic oligonucleotide
  Antisense strand to SEQ ID NO: 1090066
uuccuucacgaguacaacc

SEQ ID NO: 1090068 - RNA, 19 nt, Artificial Sequence
  Description of Artificial Sequence: Synthetic oligonucleotide
  Sense strand starting at position 2211 of SEQ ID NO: 915573
ccuuguucucccugcagga

SEQ ID NO: 1090069 - RNA, 19 nt, Artificial Sequence
  Description of Artificial Sequence: Synthetic oligonucleotide
  Antisense strand to SEQ ID NO: 1090068
uccugcagggagaacaagg

SEQ ID NO: 1090070 - RNA, 19 nt, Artificial Sequence
  Description of Artificial Sequence: Synthetic oligonucleotide
  Sense strand starting at position 2213 of SEQ ID NO: 915573
uuguucucccugcaggaau

SEQ ID NO: 1090071 - RNA, 19 nt, Artificial Sequence
  Description of Artificial Sequence: Synthetic oligonucleotide
  Antisense strand to SEQ ID NO: 1090070
auuccugcagggagaacaa

SEQ ID NO: 1090072 - RNA, 19 nt, Artificial Sequence
  Description of Artificial Sequence: Synthetic oligonucleotide
  Sense strand starting at position 2264 of SEQ ID NO: 915573
ggaguuaguugcguccuau

SEQ ID NO: 1090073 - RNA, 19 nt, Artificial Sequence
  Description of Artificial Sequence: Synthetic oligonucleotide
  Antisense strand to SEQ ID NO: 1090072
auaggacgcaacuaacucc

SEQ ID NO: 1090074 - RNA, 19 nt, Artificial Sequence
  Description of Artificial Sequence: Synthetic oligonucleotide
  Sense strand starting at position 2267 of SEQ ID NO: 915573
guuaguugcguccuauaca

SEQ ID NO: 1090075 - RNA, 19 nt, Artificial Sequence
  Description of Artificial Sequence: Synthetic oligonucleotide
  Antisense strand to SEQ ID NO: 1090074
uguauaggacgcaacuaac

SEQ ID NO: 1090076 - RNA, 19 nt, Artificial Sequence
  Description of Artificial Sequence: Synthetic oligonucleotide
  Sense strand starting at position 2316 of SEQ ID NO: 915573
ccacuuuccugagugcaca

SEQ ID NO: 1090077 - RNA, 19 nt, Artificial Sequence
  Description of Artificial Sequence: Synthetic oligonucleotide
  Antisense strand to SEQ ID NO: 1090076
ugugcacucaggaaagugg

SEQ ID NO: 1090078 - RNA, 19 nt, Artificial Sequence
  Description of Artificial Sequence: Synthetic oligonucleotide
  Sense strand starting at position 2399 of SEQ ID NO: 915573
aguccagagccacagaauu

SEQ ID NO: 1090079 - RNA, 19 nt, Artificial Sequence
  Description of Artificial Sequence: Synthetic oligonucleotide
  Antisense strand to SEQ ID NO: 1090078
aauucuguggcucuggacu

SEQ ID NO: 1090080 - RNA, 19 nt, Artificial Sequence
  Description of Artificial Sequence: Synthetic oligonucleotide
  Sense strand starting at position 2605 of SEQ ID NO: 915573
ggguacaucugacaaagaa

SEQ ID NO: 1090081 - RNA, 19 nt, Artificial Sequence
  Description of Artificial Sequence: Synthetic oligonucleotide
  Antisense strand to SEQ ID NO: 1090080
uucuuugucagauguaccc

SEQ ID NO: 1090082 - RNA, 19 nt, Artificial Sequence
  Description of Artificial Sequence: Synthetic oligonucleotide
  Sense strand starting at position 2625 of SEQ ID NO: 915573
gcaccacaccuggacaauu

SEQ ID NO: 1090083 - RNA, 19 nt, Artificial Sequence
  Description of Artificial Sequence: Synthetic oligonucleotide
  Antisense strand to SEQ ID NO: 1090082
aauuguccagguguggugc

SEQ ID NO: 1090084 - RNA, 19 nt, Artificial Sequence
  Description of Artificial Sequence: Synthetic oligonucleotide
  Sense strand starting at position 2719 of SEQ ID NO: 915573
ugcuuaugaucccuccaag

SEQ ID NO: 1090085 - RNA, 19 nt, Artificial Sequence
  Description of Artificial Sequence: Synthetic oligonucleotide
  Antisense strand to SEQ ID NO: 1090084
cuuggagggaucauaagca

SEQ ID NO: 1090086 - RNA, 19 nt, Artificial Sequence
  Description of Artificial Sequence: Synthetic oligonucleotide
  Sense strand starting at position 2968 of SEQ ID NO: 915573
agccaaagucuauguacua

SEQ ID NO: 1090087 - RNA, 19 nt, Artificial Sequence
  Description of Artificial Sequence: Synthetic oligonucleotide
  Antisense strand to SEQ ID NO: 1090086
uaguacauagacuuuggcu

SEQ ID NO: 1090088 - RNA, 19 nt, Artificial Sequence
  Description of Artificial Sequence: Synthetic oligonucleotide
  Sense strand starting at position 3088 of SEQ ID NO: 915573
cuaccuuuauaguugcaua

SEQ ID NO: 1090089 - RNA, 19 nt, Artificial Sequence
  Description of Artificial Sequence: Synthetic oligonucleotide
  Antisense strand to SEQ ID NO: 1090088
uaugcaacuauaaagguag

SEQ ID NO: 1090090 - RNA, 19 nt, Artificial Sequence
  Description of Artificial Sequence: Synthetic oligonucleotide
  Sense strand starting at position 3417 of SEQ ID NO: 915573
gaugaugucuuucugucca

SEQ ID NO: 1090091 - RNA, 19 nt, Artificial Sequence
  Description of Artificial Sequence: Synthetic oligonucleotide
  Antisense strand to SEQ ID NO: 1090090
uggacagaaagacaucauc

SEQ ID NO: 1090092 - RNA, 19 nt, Artificial Sequence
  Description of Artificial Sequence: Synthetic oligonucleotide
  Sense strand starting at position 3481 of SEQ ID NO: 915573
ucaugcauucucuauguua

SEQ ID NO: 1090093 - RNA, 19 nt, Artificial Sequence
  Description of Artificial Sequence: Synthetic oligonucleotide
  Antisense strand to SEQ ID NO: 1090092
uaacauagagaaugcauga

SEQ ID NO: 1090094 - RNA, 19 nt, Artificial Sequence
  Description of Artificial Sequence: Synthetic oligonucleotide
  Sense strand starting at position 3668 of SEQ ID NO: 915573
agaggaacgccuugcucau

SEQ ID NO: 1090095 - RNA, 19 nt, Artificial Sequence
  Description of Artificial Sequence: Synthetic oligonucleotide
  Antisense strand to SEQ ID NO: 1090094
augagcaaggcguuccucu

SEQ ID NO: 1090096 - RNA, 19 nt, Artificial Sequence
  Description of Artificial Sequence: Synthetic oligonucleotide
  Sense strand starting at position 3849 of SEQ ID NO: 915573
gcaucaccuuaccaggaau

SEQ ID NO: 1090097 - RNA, 19 nt, Artificial Sequence
  Description of Artificial Sequence: Synthetic oligonucleotide
  Antisense strand to SEQ ID NO: 1090096
auuccugguaaggugaugc

SEQ ID NO: 1090098 - RNA, 19 nt, Artificial Sequence
  Description of Artificial Sequence: Synthetic oligonucleotide
  Sense strand starting at position 3940 of SEQ ID NO: 915573
aagggaauauggcuaaagu

SEQ ID NO: 1090099 - RNA, 19 nt, Artificial Sequence
  Description of Artificial Sequence: Synthetic oligonucleotide
  Antisense strand to SEQ ID NO: 1090098
acuuuagccauauucccuu

SEQ ID NO: 1090100 - RNA, 19 nt, Artificial Sequence
  Description of Artificial Sequence: Synthetic oligonucleotide
  Sense strand starting at position 84 of SEQ ID NO: 915574
agcuauuaagcugauccua

SEQ ID NO: 1090101 - RNA, 19 nt, Artificial Sequence
  Description of Artificial Sequence: Synthetic oligonucleotide
  Antisense strand to SEQ ID NO: 1090100
uaggaucagcuuaauagcu

SEQ ID NO: 1090102 - RNA, 19 nt, Artificial Sequence
  Description of Artificial Sequence: Synthetic oligonucleotide
  Sense strand starting at position 133 of SEQ ID NO: 915574
uguacugaauuauugugaa

SEQ ID NO: 1090103 - RNA, 19 nt, Artificial Sequence
  Description of Artificial Sequence: Synthetic oligonucleotide
  Antisense strand to SEQ ID NO: 1090102
uucacaauaauucaguaca

SEQ ID NO: 1090104 - RNA, 19 nt, Artificial Sequence
  Description of Artificial Sequence: Synthetic oligonucleotide
  Sense strand starting at position 242 of SEQ ID NO: 915574
cuaucuaauggcuacuaga

SEQ ID NO: 1090105 - RNA, 19 nt, Artificial Sequence
  Description of Artificial Sequence: Synthetic oligonucleotide
  Antisense strand to SEQ ID NO: 1090104
ucuaguagccauuagauag

SEQ ID NO: 1090106 - RNA, 19 nt, Artificial Sequence
  Description of Artificial Sequence: Synthetic oligonucleotide
  Sense strand starting at position 364 of SEQ ID NO: 915574
ccacaauagcaguguuuaa

SEQ ID NO: 1090107 - RNA, 19 nt, Artificial Sequence
  Description of Artificial Sequence: Synthetic oligonucleotide
  Antisense strand to SEQ ID NO: 1090106
uuaaacacugcuauugugg

SEQ ID NO: 1090108 - RNA, 19 nt, Artificial Sequence
  Description of Artificial Sequence: Synthetic oligonucleotide
  Sense strand starting at position 487 of SEQ ID NO: 915574
augagaaagugcccuagaa

SEQ ID NO: 1090109 - RNA, 19 nt, Artificial Sequence
  Description of Artificial Sequence: Synthetic oligonucleotide
  Antisense strand to SEQ ID NO: 1090108
uucuagggcacuuucucau

SEQ ID NO: 1090110 - RNA, 19 nt, Artificial Sequence
  Description of Artificial Sequence: Synthetic oligonucleotide
  Sense strand starting at position 494 of SEQ ID NO: 915574
agugcccuagaauaagauu

SEQ ID NO: 1090111 - RNA, 19 nt, Artificial Sequence
  Description of Artificial Sequence: Synthetic oligonucleotide
  Antisense strand to SEQ ID NO: 1090110
aaucuuauucuagggcacu

SEQ ID NO: 1090112 - RNA, 19 nt, Artificial Sequence
  Description of Artificial Sequence: Synthetic oligonucleotide
  Sense strand starting at position 566 of SEQ ID NO: 915574
ugaggaaaguauccacgau

SEQ ID NO: 1090113 - RNA, 19 nt, Artificial Sequence
  Description of Artificial Sequence: Synthetic oligonucleotide
  Antisense strand to SEQ ID NO: 1090112
aucguggauacuuuccuca

SEQ ID NO: 1090114 - RNA, 19 nt, Artificial Sequence
  Description of Artificial Sequence: Synthetic oligonucleotide
  Sense strand starting at position 581 of SEQ ID NO: 915574
cgaugauugcaucaguuuc

SEQ ID NO: 1090115 - RNA, 19 nt, Artificial Sequence
  Description of Artificial Sequence: Synthetic oligonucleotide
  Antisense strand to SEQ ID NO: 1090114
gaaacugaugcaaucaucg

SEQ ID NO: 1090116 - RNA, 19 nt, Artificial Sequence
  Description of Artificial Sequence: Synthetic oligonucleotide
  Sense strand starting at position 628 of SEQ ID NO: 915574
uguagcuuuagggauauau

SEQ ID NO: 1090117 - RNA, 19 nt, Artificial Sequence
  Description of Artificial Sequence: Synthetic oligonucleotide
  Antisense strand to SEQ ID NO: 1090116
auauaucccuaaagcuaca

SEQ ID NO: 1090118 - RNA, 19 nt, Artificial Sequence
  Description of Artificial Sequence: Synthetic oligonucleotide
  Sense strand starting at position 630 of SEQ ID NO: 915574
uagcuuuagggauauaucu

SEQ ID NO: 1090119 - RNA, 19 nt, Artificial Sequence
  Description of Artificial Sequence: Synthetic oligonucleotide
  Antisense strand to SEQ ID NO: 1090118
agauauaucccuaaagcua

SEQ ID NO: 1090120 - RNA, 19 nt, Artificial Sequence
  Description of Artificial Sequence: Synthetic oligonucleotide
  Sense strand starting at position 700 of SEQ ID NO: 915574
gagugauuaccgggcagaa

SEQ ID NO: 1090121 - RNA, 19 nt, Artificial Sequence
  Description of Artificial Sequence: Synthetic oligonucleotide
  Antisense strand to SEQ ID NO: 1090120
uucugcccgguaaucacuc

SEQ ID NO: 1090122 - RNA, 19 nt, Artificial Sequence
  Description of Artificial Sequence: Synthetic oligonucleotide
  Sense strand starting at position 702 of SEQ ID NO: 915574
gugauuaccgggcagaauu

SEQ ID NO: 1090123 - RNA, 19 nt, Artificial Sequence
  Description of Artificial Sequence: Synthetic oligonucleotide
  Antisense strand to SEQ ID NO: 1090122
aauucugcccgguaaucac

SEQ ID NO: 1090124 - RNA, 19 nt, Artificial Sequence
  Description of Artificial Sequence: Synthetic oligonucleotide
  Sense strand starting at position 727 of SEQ ID NO: 915574
ccuuguggcaagggaaaua

SEQ ID NO: 1090125 - RNA, 19 nt, Artificial Sequence
  Description of Artificial Sequence: Synthetic oligonucleotide
  Antisense strand to SEQ ID NO: 1090124
uauuucccuugccacaagg

SEQ ID NO: 1090126 - RNA, 19 nt, Artificial Sequence
  Description of Artificial Sequence: Synthetic oligonucleotide
  Sense strand starting at position 852 of SEQ ID NO: 915574
ugacaaugagguugccaaa

SEQ ID NO: 1090127 - RNA, 19 nt, Artificial Sequence
  Description of Artificial Sequence: Synthetic oligonucleotide
  Antisense strand to SEQ ID NO: 1090126
uuuggcaaccucauuguca

SEQ ID NO: 1090128 - RNA, 19 nt, Artificial Sequence
  Description of Artificial Sequence: Synthetic oligonucleotide
  Sense strand starting at position 1093 of SEQ ID NO: 915574
aaaguaaagcccugaguga

SEQ ID NO: 1090129 - RNA, 19 nt, Artificial Sequence
  Description of Artificial Sequence: Synthetic oligonucleotide
  Antisense strand to SEQ ID NO: 1090128
ucacucagggcuuuacuuu

SEQ ID NO: 1090130 - RNA, 19 nt, Artificial Sequence
  Description of Artificial Sequence: Synthetic oligonucleotide
  Sense strand starting at position 1094 of SEQ ID NO: 915574
aaguaaagcccugagugau

SEQ ID NO: 1090131 - RNA, 19 nt, Artificial Sequence
  Description of Artificial Sequence: Synthetic oligonucleotide
  Antisense strand to SEQ ID NO: 1090130
aucacucagggcuuuacuu

SEQ ID NO: 1090132 - RNA, 19 nt, Artificial Sequence
  Description of Artificial Sequence: Synthetic oligonucleotide
  Sense strand starting at position 1281 of SEQ ID NO: 915574
aaggcuugugcccucguua

SEQ ID NO: 1090133 - RNA, 19 nt, Artificial Sequence
  Description of Artificial Sequence: Synthetic oligonucleotide
  Antisense strand to SEQ ID NO: 1090132
uaacgagggcacaagccuu

SEQ ID NO: 1090134 - RNA, 19 nt, Artificial Sequence
  Description of Artificial Sequence: Synthetic oligonucleotide
  Sense strand starting at position 1282 of SEQ ID NO: 915574
aggcuugugcccucguuaa

SEQ ID NO: 1090135 - RNA, 19 nt, Artificial Sequence
  Description of Artificial Sequence: Synthetic oligonucleotide
  Antisense strand to SEQ ID NO: 1090134
uuaacgagggcacaagccu

SEQ ID NO: 1090136 - RNA, 19 nt, Artificial Sequence
  Description of Artificial Sequence: Synthetic oligonucleotide
  Sense strand starting at position 1284 of SEQ ID NO: 915574
gcuugugcccucguuaaua

SEQ ID NO: 1090137 - RNA, 19 nt, Artificial Sequence
  Description of Artificial Sequence: Synthetic oligonucleotide
  Antisense strand to SEQ ID NO: 1090136
uauuaacgagggcacaagc

SEQ ID NO: 1090138 - RNA, 19 nt, Artificial Sequence
  Description of Artificial Sequence: Synthetic oligonucleotide
  Sense strand starting at position 1294 of SEQ ID NO: 915574
ucguuaauacugcauucua

SEQ ID NO: 1090139 - RNA, 19 nt, Artificial Sequence
  Description of Artificial Sequence: Synthetic oligonucleotide
  Antisense strand to SEQ ID NO: 1090138
uagaaugcaguauuaacga

SEQ ID NO: 1090140 - RNA, 19 nt, Artificial Sequence
  Description of Artificial Sequence: Synthetic oligonucleotide
  Sense strand starting at position 1492 of SEQ ID NO: 915574
gcucgaacuccuuaagaac

SEQ ID NO: 1090141 - RNA, 19 nt, Artificial Sequence
  Description of Artificial Sequence: Synthetic oligonucleotide
  Antisense strand to SEQ ID NO: 1090140
guucuuaaggaguucgagc

SEQ ID NO: 1090142 - RNA, 19 nt, Artificial Sequence
  Description of Artificial Sequence: Synthetic oligonucleotide
  Sense strand starting at position 1573 of SEQ ID NO: 915574
acauauaucucaucuggua

SEQ ID NO: 1090143 - RNA, 19 nt, Artificial Sequence
  Description of Artificial Sequence: Synthetic oligonucleotide
  Antisense strand to SEQ ID NO: 1090142
uaccagaugagauauaugu

SEQ ID NO: 1090144 - RNA, 19 nt, Artificial Sequence
  Description of Artificial Sequence: Synthetic oligonucleotide
  Sense strand starting at position 1692 of SEQ ID NO: 915574
ccagucacaucagauauuu

SEQ ID NO: 1090145 - RNA, 19 nt, Artificial Sequence
  Description of Artificial Sequence: Synthetic oligonucleotide
  Antisense strand to SEQ ID NO: 1090144
aaauaucugaugugacugg

SEQ ID NO: 1090146 - RNA, 19 nt, Artificial Sequence
  Description of Artificial Sequence: Synthetic oligonucleotide
  Sense strand starting at position 1785 of SEQ ID NO: 915574
ggucaaauuacaugugaag

SEQ ID NO: 1090147 - RNA, 19 nt, Artificial Sequence
  Description of Artificial Sequence: Synthetic oligonucleotide
  Antisense strand to SEQ ID NO: 1090146
cuucacauguaauuugacc

SEQ ID NO: 1090148 - RNA, 19 nt, Artificial Sequence
  Description of Artificial Sequence: Synthetic oligonucleotide
  Sense strand starting at position 1998 of SEQ ID NO: 915574
aggaaagacucacaagaag

SEQ ID NO: 1090149 - RNA, 19 nt, Artificial Sequence
  Description of Artificial Sequence: Synthetic oligonucleotide
  Antisense strand to SEQ ID NO: 1090148
cuucuugugagucuuuccu

SEQ ID NO: 1090150 - RNA, 19 nt, Artificial Sequence
  Description of Artificial Sequence: Synthetic oligonucleotide
  Sense strand starting at position 2024 of SEQ ID NO: 915574
ucauaaauggcucaaugua

SEQ ID NO: 1090151 - RNA, 19 nt, Artificial Sequence
  Description of Artificial Sequence: Synthetic oligonucleotide
  Antisense strand to SEQ ID NO: 1090150
uacauugagccauuuauga

SEQ ID NO: 1090152 - RNA, 19 nt, Artificial Sequence
  Description of Artificial Sequence: Synthetic oligonucleotide
  Sense strand starting at position 2093 of SEQ ID NO: 915574
uuauaaaggacauguggua

SEQ ID NO: 1090153 - RNA, 19 nt, Artificial Sequence
  Description of Artificial Sequence: Synthetic oligonucleotide
  Antisense strand to SEQ ID NO: 1090152
uaccacauguccuuuauaa

SEQ ID NO: 1090154 - RNA, 19 nt, Artificial Sequence
  Description of Artificial Sequence: Synthetic oligonucleotide
  Sense strand starting at position 2242 of SEQ ID NO: 915574
ucugaauuccaauggauua

SEQ ID NO: 1090155 - RNA, 19 nt, Artificial Sequence
  Description of Artificial Sequence: Synthetic oligonucleotide
  Antisense strand to SEQ ID NO: 1090154
uaauccauuggaauucaga

SEQ ID NO: 1090156 - RNA, 19 nt, Artificial Sequence
  Description of Artificial Sequence: Synthetic oligonucleotide
  Sense strand starting at position 2445 of SEQ ID NO: 915574
cuauguuggguuuauguuu

SEQ ID NO: 1090157 - RNA, 19 nt, Artificial Sequence
  Description of Artificial Sequence: Synthetic oligonucleotide
  Antisense strand to SEQ ID NO: 1090156
aaacauaaacccaacauag

SEQ ID NO: 1090158 - RNA, 19 nt, Artificial Sequence
  Description of Artificial Sequence: Synthetic oligonucleotide
  Sense strand starting at position 2525 of SEQ ID NO: 915574
ugcaaaugccucuaggaga

SEQ ID NO: 1090159 - RNA, 19 nt, Artificial Sequence
  Description of Artificial Sequence: Synthetic oligonucleotide
  Antisense strand to SEQ ID NO: 1090158
ucuccuagaggcauuugca

SEQ ID NO: 1090160 - RNA, 19 nt, Artificial Sequence
  Description of Artificial Sequence: Synthetic oligonucleotide
  Sense strand starting at position 2532 of SEQ ID NO: 915574
gccucuaggagagguaaua

SEQ ID NO: 1090161 - RNA, 19 nt, Artificial Sequence
  Description of Artificial Sequence: Synthetic oligonucleotide
  Antisense strand to SEQ ID NO: 1090160
uauuaccucuccuagaggc

SEQ ID NO: 1090162 - RNA, 19 nt, Artificial Sequence
  Description of Artificial Sequence: Synthetic oligonucleotide
  Sense strand starting at position 2545 of SEQ ID NO: 915574
guaauaucaugaguuccuu

SEQ ID NO: 1090163 - RNA, 19 nt, Artificial Sequence
  Description of Artificial Sequence: Synthetic oligonucleotide
  Antisense strand to SEQ ID NO: 1090162
aaggaacucaugauauuac

SEQ ID NO: 1090164 - RNA, 19 nt, Artificial Sequence
  Description of Artificial Sequence: Synthetic oligonucleotide
  Sense strand starting at position 3183 of SEQ ID NO: 915574
ggaggaacacaugguaagu

SEQ ID NO: 1090165 - RNA, 19 nt, Artificial Sequence
  Description of Artificial Sequence: Synthetic oligonucleotide
  Antisense strand to SEQ ID NO: 1090164
acuuaccauguguuccucc

SEQ ID NO: 1090166 - RNA, 19 nt, Artificial Sequence
  Description of Artificial Sequence: Synthetic oligonucleotide
  Sense strand starting at position 3452 of SEQ ID NO: 915574
guuuguguaggucaugaca

SEQ ID NO: 1090167 - RNA, 19 nt, Artificial Sequence
  Description of Artificial Sequence: Synthetic oligonucleotide
  Antisense strand to SEQ ID NO: 1090166
ugucaugaccuacacaaac

SEQ ID NO: 1090168 - RNA, 19 nt, Artificial Sequence
  Description of Artificial Sequence: Synthetic oligonucleotide
  Sense strand starting at position 3473 of SEQ ID NO: 915574
cucuuuguggugggaaaua

SEQ ID NO: 1090169 - RNA, 19 nt, Artificial Sequence
  Description of Artificial Sequence: Synthetic oligonucleotide
  Antisense strand to SEQ ID NO: 1090168
uauuucccaccacaaagag

SEQ ID NO: 1090170 - RNA, 19 nt, Artificial Sequence
  Description of Artificial Sequence: Synthetic oligonucleotide
  Sense strand starting at position 3672 of SEQ ID NO: 915574
acacuagccuguguaauga

SEQ ID NO: 1090171 - RNA, 19 nt, Artificial Sequence
  Description of Artificial Sequence: Synthetic oligonucleotide
  Antisense strand to SEQ ID NO: 1090170
ucauuacacaggcuagugu

SEQ ID NO: 1090172 - RNA, 19 nt, Artificial Sequence
  Description of Artificial Sequence: Synthetic oligonucleotide
  Sense strand starting at position 3682 of SEQ ID NO: 915574
guguaaugaagugaaaccu

SEQ ID NO: 1090173 - RNA, 19 nt, Artificial Sequence
  Description of Artificial Sequence: Synthetic oligonucleotide
  Antisense strand to SEQ ID NO: 1090172
agguuucacuucauuacac

SEQ ID NO: 1090174 - RNA, 19 nt, Artificial Sequence
  Description of Artificial Sequence: Synthetic oligonucleotide
  Sense strand starting at position 3763 of SEQ ID NO: 915574
acuugagggagcugagauu

SEQ ID NO: 1090175 - RNA, 19 nt, Artificial Sequence
  Description of Artificial Sequence: Synthetic oligonucleotide
  Antisense strand to SEQ ID NO: 1090174
aaucucagcucccucaagu

SEQ ID NO: 1090176 - RNA, 19 nt, Artificial Sequence
  Description of Artificial Sequence: Synthetic oligonucleotide
  Sense strand starting at position 3949 of SEQ ID NO: 915574
gaugauauacuguggaagu

SEQ ID NO: 1090177 - RNA, 19 nt, Artificial Sequence
  Description of Artificial Sequence: Synthetic oligonucleotide
  Antisense strand to SEQ ID NO: 1090176
acuuccacaguauaucauc

SEQ ID NO: 1090178 - RNA, 19 nt, Artificial Sequence
  Description of Artificial Sequence: Synthetic oligonucleotide
  Sense strand starting at position 3951 of SEQ ID NO: 915574
ugauauacuguggaagugu

SEQ ID NO: 1090179 - RNA, 19 nt, Artificial Sequence
  Description of Artificial Sequence: Synthetic oligonucleotide
  Antisense strand to SEQ ID NO: 1090178
acacuuccacaguauauca

SEQ ID NO: 1090180 - RNA, 19 nt, Artificial Sequence
  Description of Artificial Sequence: Synthetic oligonucleotide
  Sense strand starting at position 369 of SEQ ID NO: 915575
ccaagaaagguuugcagau

SEQ ID NO: 1090181 - RNA, 19 nt, Artificial Sequence
  Description of Artificial Sequence: Synthetic oligonucleotide
  Antisense strand to SEQ ID NO: 1090180
aucugcaaaccuuucuugg

SEQ ID NO: 1090182 - RNA, 19 nt, Artificial Sequence
  Description of Artificial Sequence: Synthetic oligonucleotide
  Sense strand starting at position 370 of SEQ ID NO: 915575
caagaaagguuugcagauu

SEQ ID NO: 1090183 - RNA, 19 nt, Artificial Sequence
  Description of Artificial Sequence: Synthetic oligonucleotide
  Antisense strand to SEQ ID NO: 1090182
aaucugcaaaccuuucuug

SEQ ID NO: 1090184 - RNA, 19 nt, Artificial Sequence
  Description of Artificial Sequence: Synthetic oligonucleotide
  Sense strand starting at position 687 of SEQ ID NO: 915575
guggucuaccucuaauuag

SEQ ID NO: 1090185 - RNA, 19 nt, Artificial Sequence
  Description of Artificial Sequence: Synthetic oligonucleotide
  Antisense strand to SEQ ID NO: 1090184
cuaauuagagguagaccac

SEQ ID NO: 1090186 - RNA, 19 nt, Artificial Sequence
  Description of Artificial Sequence: Synthetic oligonucleotide
  Sense strand starting at position 694 of SEQ ID NO: 915575
accucuaauuagucaaguu

SEQ ID NO: 1090187 - RNA, 19 nt, Artificial Sequence
  Description of Artificial Sequence: Synthetic oligonucleotide
  Antisense strand to SEQ ID NO: 1090186
aacuugacuaauuagaggu

SEQ ID NO: 1090188 - RNA, 19 nt, Artificial Sequence
  Description of Artificial Sequence: Synthetic oligonucleotide
  Sense strand starting at position 794 of SEQ ID NO: 915575
gucauuaagcucuaaaguu

SEQ ID NO: 1090189 - RNA, 19 nt, Artificial Sequence
  Description of Artificial Sequence: Synthetic oligonucleotide
  Antisense strand to SEQ ID NO: 1090188
aacuuuagagcuuaaugac

SEQ ID NO: 1090190 - RNA, 19 nt, Artificial Sequence
  Description of Artificial Sequence: Synthetic oligonucleotide
  Sense strand starting at position 823 of SEQ ID NO: 915575
acuuuaagucuaugaggua

SEQ ID NO: 1090191 - RNA, 19 nt, Artificial Sequence
  Description of Artificial Sequence: Synthetic oligonucleotide
  Antisense strand to SEQ ID NO: 1090190
uaccucauagacuuaaagu

SEQ ID NO: 1090192 - RNA, 19 nt, Artificial Sequence
  Description of Artificial Sequence: Synthetic oligonucleotide
  Sense strand starting at position 989 of SEQ ID NO: 915575
acauaaagguuguuuggga

SEQ ID NO: 1090193 - RNA, 19 nt, Artificial Sequence
  Description of Artificial Sequence: Synthetic oligonucleotide
  Antisense strand to SEQ ID NO: 1090192
ucccaaacaaccuuuaugu

SEQ ID NO: 1090194 - RNA, 19 nt, Artificial Sequence
  Description of Artificial Sequence: Synthetic oligonucleotide
  Sense strand starting at position 997 of SEQ ID NO: 915575
guuguuugggacuauagag

SEQ ID NO: 1090195 - RNA, 19 nt, Artificial Sequence
  Description of Artificial Sequence: Synthetic oligonucleotide
  Antisense strand to SEQ ID NO: 1090194
cucuauagucccaaacaac

SEQ ID NO: 1090196 - RNA, 19 nt, Artificial Sequence
  Description of Artificial Sequence: Synthetic oligonucleotide
  Sense strand starting at position 1024 of SEQ ID NO: 915575
auaugaagguuucucaaau

SEQ ID NO: 1090197 - RNA, 19 nt, Artificial Sequence
  Description of Artificial Sequence: Synthetic oligonucleotide
  Antisense strand to SEQ ID NO: 1090196
auuugagaaaccuucauau

SEQ ID NO: 1090198 - RNA, 19 nt, Artificial Sequence
  Description of Artificial Sequence: Synthetic oligonucleotide
  Sense strand starting at position 1346 of SEQ ID NO: 915575
ucuuauguacauggagaaa

SEQ ID NO: 1090199 - RNA, 19 nt, Artificial Sequence
  Description of Artificial Sequence: Synthetic oligonucleotide
  Antisense strand to SEQ ID NO: 1090198
uuucuccauguacauaaga

SEQ ID NO: 1090200 - RNA, 19 nt, Artificial Sequence
  Description of Artificial Sequence: Synthetic oligonucleotide
  Sense strand starting at position 1390 of SEQ ID NO: 915575
ucuaaacaguuuccuguaa

SEQ ID NO: 1090201 - RNA, 19 nt, Artificial Sequence
  Description of Artificial Sequence: Synthetic oligonucleotide
  Antisense strand to SEQ ID NO: 1090200
uuacaggaaacuguuuaga

SEQ ID NO: 1090202 - RNA, 19 nt, Artificial Sequence
  Description of Artificial Sequence: Synthetic oligonucleotide
  Sense strand starting at position 1391 of SEQ ID NO: 915575
cuaaacaguuuccuguaaa

SEQ ID NO: 1090203 - RNA, 19 nt, Artificial Sequence
  Description of Artificial Sequence: Synthetic oligonucleotide
  Antisense strand to SEQ ID NO: 1090202
uuuacaggaaacuguuuag

SEQ ID NO: 1090204 - RNA, 19 nt, Artificial Sequence
  Description of Artificial Sequence: Synthetic oligonucleotide
  Sense strand starting at position 1720 of SEQ ID NO: 915575
uaucgcuuuguuuaaugaa

SEQ ID NO: 1090205 - RNA, 19 nt, Artificial Sequence
  Description of Artificial Sequence: Synthetic oligonucleotide
  Antisense strand to SEQ ID NO: 1090204
uucauuaaacaaagcgaua

SEQ ID NO: 1090206 - RNA, 19 nt, Artificial Sequence
  Description of Artificial Sequence: Synthetic oligonucleotide
  Sense strand starting at position 1834 of SEQ ID NO: 915575
cugacuaaacuguagguau

SEQ ID NO: 1090207 - RNA, 19 nt, Artificial Sequence
  Description of Artificial Sequence: Synthetic oligonucleotide
  Antisense strand to SEQ ID NO: 1090206
auaccuacaguuuagucag

SEQ ID NO: 1090208 - RNA, 19 nt, Artificial Sequence
  Description of Artificial Sequence: Synthetic oligonucleotide
  Sense strand starting at position 1845 of SEQ ID NO: 915575
guagguauuuguuccauca

SEQ ID NO: 1090209 - RNA, 19 nt, Artificial Sequence
  Description of Artificial Sequence: Synthetic oligonucleotide
  Antisense strand to SEQ ID NO: 1090208
ugauggaacaaauaccuac

SEQ ID NO: 1090210 - RNA, 19 nt, Artificial Sequence
  Description of Artificial Sequence: Synthetic oligonucleotide
  Sense strand starting at position 2018 of SEQ ID NO: 915575
ggcugaauuccagauuguc

SEQ ID NO: 1090211 - RNA, 19 nt, Artificial Sequence
  Description of Artificial Sequence: Synthetic oligonucleotide
  Antisense strand to SEQ ID NO: 1090210
gacaaucuggaauucagcc

SEQ ID NO: 1090212 - RNA, 19 nt, Artificial Sequence
  Description of Artificial Sequence: Synthetic oligonucleotide
  Sense strand starting at position 2021 of SEQ ID NO: 915575
ugaauuccagauugucaua

SEQ ID NO: 1090213 - RNA, 19 nt, Artificial Sequence
  Description of Artificial Sequence: Synthetic oligonucleotide
  Antisense strand to SEQ ID NO: 1090212
uaugacaaucuggaauuca

SEQ ID NO: 1090214 - RNA, 19 nt, Artificial Sequence
  Description of Artificial Sequence: Synthetic oligonucleotide
  Sense strand starting at position 2314 of SEQ ID NO: 915575
acguaccuccagcaaauau

SEQ ID NO: 1090215 - RNA, 19 nt, Artificial Sequence
  Description of Artificial Sequence: Synthetic oligonucleotide
  Antisense strand to SEQ ID NO: 1090214
auauuugcuggagguacgu

SEQ ID NO: 1090216 - RNA, 19 nt, Artificial Sequence
  Description of Artificial Sequence: Synthetic oligonucleotide
  Sense strand starting at position 2377 of SEQ ID NO: 915575
uuauuagagaagggcauua

SEQ ID NO: 1090217 - RNA, 19 nt, Artificial Sequence
  Description of Artificial Sequence: Synthetic oligonucleotide
  Antisense strand to SEQ ID NO: 1090216
uaaugcccuucucuaauaa

SEQ ID NO: 1090218 - RNA, 19 nt, Artificial Sequence
  Description of Artificial Sequence: Synthetic oligonucleotide
  Sense strand starting at position 2433 of SEQ ID NO: 915575
ucuggucuuguccauugaa

SEQ ID NO: 1090219 - RNA, 19 nt, Artificial Sequence
  Description of Artificial Sequence: Synthetic oligonucleotide
  Antisense strand to SEQ ID NO: 1090218
uucaauggacaagaccaga

SEQ ID NO: 1090220 - RNA, 19 nt, Artificial Sequence
  Description of Artificial Sequence: Synthetic oligonucleotide
  Sense strand starting at position 2529 of SEQ ID NO: 915575
accggcacucuguagaauu

SEQ ID NO: 1090221 - RNA, 19 nt, Artificial Sequence
  Description of Artificial Sequence: Synthetic oligonucleotide
  Antisense strand to SEQ ID NO: 1090220
aauucuacagagugccggu

SEQ ID NO: 1090222 - RNA, 19 nt, Artificial Sequence
  Description of Artificial Sequence: Synthetic oligonucleotide
  Sense strand starting at position 2600 of SEQ ID NO: 915575
aaaggcgauugucuggaua

SEQ ID NO: 1090223 - RNA, 19 nt, Artificial Sequence
  Description of Artificial Sequence: Synthetic oligonucleotide
  Antisense strand to SEQ ID NO: 1090222
uauccagacaaucgccuuu

SEQ ID NO: 1090224 - RNA, 19 nt, Artificial Sequence
  Description of Artificial Sequence: Synthetic oligonucleotide
  Sense strand starting at position 2789 of SEQ ID NO: 915575
aaguacuucugagcagaaa

SEQ ID NO: 1090225 - RNA, 19 nt, Artificial Sequence
  Description of Artificial Sequence: Synthetic oligonucleotide
  Antisense strand to SEQ ID NO: 1090224
uuucugcucagaaguacuu

SEQ ID NO: 1090226 - RNA, 19 nt, Artificial Sequence
  Description of Artificial Sequence: Synthetic oligonucleotide
  Sense strand starting at position 2834 of SEQ ID NO: 915575
ggauaaagcucauuaauca

SEQ ID NO: 1090227 - RNA, 19 nt, Artificial Sequence
  Description of Artificial Sequence: Synthetic oligonucleotide
  Antisense strand to SEQ ID NO: 1090226
ugauuaaugagcuuuaucc

SEQ ID NO: 1090228 - RNA, 19 nt, Artificial Sequence
  Description of Artificial Sequence: Synthetic oligonucleotide
  Sense strand starting at position 2841 of SEQ ID NO: 915575
gcucauuaaucacugaaag

SEQ ID NO: 1090229 - RNA, 19 nt, Artificial Sequence
  Description of Artificial Sequence: Synthetic oligonucleotide
  Antisense strand to SEQ ID NO: 1090228
cuuucagugauuaaugagc

SEQ ID NO: 1090230 - RNA, 19 nt, Artificial Sequence
  Description of Artificial Sequence: Synthetic oligonucleotide
  Sense strand starting at position 2893 of SEQ ID NO: 915575
ucuguacaauugcuaaaga

SEQ ID NO: 1090231 - RNA, 19 nt, Artificial Sequence
  Description of Artificial Sequence: Synthetic oligonucleotide
  Antisense strand to SEQ ID NO: 1090230
ucuuuagcaauuguacaga

SEQ ID NO: 1090232 - RNA, 19 nt, Artificial Sequence
  Description of Artificial Sequence: Synthetic oligonucleotide
  Sense strand starting at position 2960 of SEQ ID NO: 915575
uuugaacuucuuugguuaa

SEQ ID NO: 1090233 - RNA, 19 nt, Artificial Sequence
  Description of Artificial Sequence: Synthetic oligonucleotide
  Antisense strand to SEQ ID NO: 1090232
uuaaccaaagaaguucaaa

SEQ ID NO: 1090234 - RNA, 19 nt, Artificial Sequence
  Description of Artificial Sequence: Synthetic oligonucleotide
  Sense strand starting at position 3054 of SEQ ID NO: 915575
acccaaagguuucuagaua

SEQ ID NO: 1090235 - RNA, 19 nt, Artificial Sequence
  Description of Artificial Sequence: Synthetic oligonucleotide
  Antisense strand to SEQ ID NO: 1090234
uaucuagaaaccuuugggu

SEQ ID NO: 1090236 - RNA, 19 nt, Artificial Sequence
  Description of Artificial Sequence: Synthetic oligonucleotide
  Sense strand starting at position 3130 of SEQ ID NO: 915575
gguuaacuaguguaggauu

SEQ ID NO: 1090237 - RNA, 19 nt, Artificial Sequence
  Description of Artificial Sequence: Synthetic oligonucleotide
  Antisense strand to SEQ ID NO: 1090236
aauccuacacuaguuaacc

SEQ ID NO: 1090238 - RNA, 19 nt, Artificial Sequence
  Description of Artificial Sequence: Synthetic oligonucleotide
  Sense strand starting at position 3142 of SEQ ID NO: 915575
uaggauucuuagcuguaga

SEQ ID NO: 1090239 - RNA, 19 nt, Artificial Sequence
  Description of Artificial Sequence: Synthetic oligonucleotide
  Antisense strand to SEQ ID NO: 1090238
ucuacagcuaagaauccua

SEQ ID NO: 1090240 - RNA, 19 nt, Artificial Sequence
  Description of Artificial Sequence: Synthetic oligonucleotide
  Sense strand starting at position 3143 of SEQ ID NO: 915575
aggauucuuagcuguagaa

SEQ ID NO: 1090241 - RNA, 19 nt, Artificial Sequence
  Description of Artificial Sequence: Synthetic oligonucleotide
  Antisense strand to SEQ ID NO: 1090240
uucuacagcuaagaauccu

SEQ ID NO: 1090242 - RNA, 19 nt, Artificial Sequence
  Description of Artificial Sequence: Synthetic oligonucleotide
  Sense strand starting at position 3466 of SEQ ID NO: 915575
ucaaauaauggccgguaua

SEQ ID NO: 1090243 - RNA, 19 nt, Artificial Sequence
  Description of Artificial Sequence: Synthetic oligonucleotide
  Antisense strand to SEQ ID NO: 1090242
uauaccggccauuauuuga

SEQ ID NO: 1090244 - RNA, 19 nt, Artificial Sequence
  Description of Artificial Sequence: Synthetic oligonucleotide
  Sense strand starting at position 3467 of SEQ ID NO: 915575
caaauaauggccgguauau

SEQ ID NO: 1090245 - RNA, 19 nt, Artificial Sequence
  Description of Artificial Sequence: Synthetic oligonucleotide
  Antisense strand to SEQ ID NO: 1090244
auauaccggccauuauuug

SEQ ID NO: 1090246 - RNA, 19 nt, Artificial Sequence
  Description of Artificial Sequence: Synthetic oligonucleotide
  Sense strand starting at position 3469 of SEQ ID NO: 915575
aauaauggccgguauauua

SEQ ID NO: 1090247 - RNA, 19 nt, Artificial Sequence
  Description of Artificial Sequence: Synthetic oligonucleotide
  Antisense strand to SEQ ID NO: 1090246
uaauauaccggccauuauu

SEQ ID NO: 1090248 - RNA, 19 nt, Artificial Sequence
  Description of Artificial Sequence: Synthetic oligonucleotide
  Sense strand starting at position 3502 of SEQ ID NO: 915575
acgggaauucugcaacacu

SEQ ID NO: 1090249 - RNA, 19 nt, Artificial Sequence
  Description of Artificial Sequence: Synthetic oligonucleotide
  Antisense strand to SEQ ID NO: 1090248
aguguugcagaauucccgu

SEQ ID NO: 1090250 - RNA, 19 nt, Artificial Sequence
  Description of Artificial Sequence: Synthetic oligonucleotide
  Sense strand starting at position 3505 of SEQ ID NO: 915575
ggaauucugcaacacuacu

SEQ ID NO: 1090251 - RNA, 19 nt, Artificial Sequence
  Description of Artificial Sequence: Synthetic oligonucleotide
  Antisense strand to SEQ ID NO: 1090250
aguaguguugcagaauucc

SEQ ID NO: 1090252 - RNA, 19 nt, Artificial Sequence
  Description of Artificial Sequence: Synthetic oligonucleotide
  Sense strand starting at position 3526 of SEQ ID NO: 915575
uaagaagaguuucugugua

SEQ ID NO: 1090253 - RNA, 19 nt, Artificial Sequence
  Description of Artificial Sequence: Synthetic oligonucleotide
  Antisense strand to SEQ ID NO: 1090252
uacacagaaacucuucuua

SEQ ID NO: 1090254 - RNA, 19 nt, Artificial Sequence
  Description of Artificial Sequence: Synthetic oligonucleotide
  Sense strand starting at position 3528 of SEQ ID NO: 915575
agaagaguuucuguguauc

SEQ ID NO: 1090255 - RNA, 19 nt, Artificial Sequence
  Description of Artificial Sequence: Synthetic oligonucleotide
  Antisense strand to SEQ ID NO: 1090254
gauacacagaaacucuucu

SEQ ID NO: 1090256 - RNA, 19 nt, Artificial Sequence
  Description of Artificial Sequence: Synthetic oligonucleotide
  Sense strand starting at position 3530 of SEQ ID NO: 915575
aagaguuucuguguaucaa

SEQ ID NO: 1090257 - RNA, 19 nt, Artificial Sequence
  Description of Artificial Sequence: Synthetic oligonucleotide
  Antisense strand to SEQ ID NO: 1090256
uugauacacagaaacucuu

SEQ ID NO: 1090258 - RNA, 19 nt, Artificial Sequence
  Description of Artificial Sequence: Synthetic oligonucleotide
  Sense strand starting at position 3971 of SEQ ID NO: 915575
accugaaacucuguggcau

SEQ ID NO: 1090259 - RNA, 19 nt, Artificial Sequence
  Description of Artificial Sequence: Synthetic oligonucleotide
  Antisense strand to SEQ ID NO: 1090258
augccacagaguuucaggu

SEQ ID NO: 1090260 - RNA, 19 nt, Artificial Sequence
  Description of Artificial Sequence: Synthetic oligonucleotide
  Sense strand starting at position 79 of SEQ ID NO: 915576
cagaauggaugcucuguua

SEQ ID NO: 1090261 - RNA, 19 nt, Artificial Sequence
  Description of Artificial Sequence: Synthetic oligonucleotide
  Antisense strand to SEQ ID NO: 1090260
uaacagagcauccauucug

SEQ ID NO: 1090262 - RNA, 19 nt, Artificial Sequence
  Description of Artificial Sequence: Synthetic oligonucleotide
  Sense strand starting at position 158 of SEQ ID NO: 915576
gugcauuaucaaugagaaa

SEQ ID NO: 1090263 - RNA, 19 nt, Artificial Sequence
  Description of Artificial Sequence: Synthetic oligonucleotide
  Antisense strand to SEQ ID NO: 1090262
uuucucauugauaaugcac

SEQ ID NO: 1090264 - RNA, 19 nt, Artificial Sequence
  Description of Artificial Sequence: Synthetic oligonucleotide
  Sense strand starting at position 316 of SEQ ID NO: 915576
uccuaaaggcccuaagauu

SEQ ID NO: 1090265 - RNA, 19 nt, Artificial Sequence
  Description of Artificial Sequence: Synthetic oligonucleotide
  Antisense strand to SEQ ID NO: 1090264
aaucuuagggccuuuagga

SEQ ID NO: 1090266 - RNA, 19 nt, Artificial Sequence
  Description of Artificial Sequence: Synthetic oligonucleotide
  Sense strand starting at position 448 of SEQ ID NO: 915576
aucaaaguccuagauagca

SEQ ID NO: 1090267 - RNA, 19 nt, Artificial Sequence
  Description of Artificial Sequence: Synthetic oligonucleotide
  Antisense strand to SEQ ID NO: 1090266
ugcuaucuaggacuuugau

SEQ ID NO: 1090268 - RNA, 19 nt, Artificial Sequence
  Description of Artificial Sequence: Synthetic oligonucleotide
  Sense strand starting at position 501 of SEQ ID NO: 915576
gaaagucugugguuugaug

SEQ ID NO: 1090269 - RNA, 19 nt, Artificial Sequence
  Description of Artificial Sequence: Synthetic oligonucleotide
  Antisense strand to SEQ ID NO: 1090268
caucaaaccacagacuuuc

SEQ ID NO: 1090270 - RNA, 19 nt, Artificial Sequence
  Description of Artificial Sequence: Synthetic oligonucleotide
  Sense strand starting at position 505 of SEQ ID NO: 915576
gucugugguuugauguagu

SEQ ID NO: 1090271 - RNA, 19 nt, Artificial Sequence
  Description of Artificial Sequence: Synthetic oligonucleotide
  Antisense strand to SEQ ID NO: 1090270
acuacaucaaaccacagac

SEQ ID NO: 1090272 - RNA, 19 nt, Artificial Sequence
  Description of Artificial Sequence: Synthetic oligonucleotide
  Sense strand starting at position 536 of SEQ ID NO: 915576
uggucuuaccuagaucuuc

SEQ ID NO: 1090273 - RNA, 19 nt, Artificial Sequence
  Description of Artificial Sequence: Synthetic oligonucleotide
  Antisense strand to SEQ ID NO: 1090272
gaagaucuagguaagacca

SEQ ID NO: 1090274 - RNA, 19 nt, Artificial Sequence
  Description of Artificial Sequence: Synthetic oligonucleotide
  Sense strand starting at position 610 of SEQ ID NO: 915576
uguuaaggagacugcuauu

SEQ ID NO: 1090275 - RNA, 19 nt, Artificial Sequence
  Description of Artificial Sequence: Synthetic oligonucleotide
  Antisense strand to SEQ ID NO: 1090274
aauagcagucuccuuaaca

SEQ ID NO: 1090276 - RNA, 19 nt, Artificial Sequence
  Description of Artificial Sequence: Synthetic oligonucleotide
  Sense strand starting at position 765 of SEQ ID NO: 915576
uggcucauuuggucuucua

SEQ ID NO: 1090277 - RNA, 19 nt, Artificial Sequence
  Description of Artificial Sequence: Synthetic oligonucleotide
  Antisense strand to SEQ ID NO: 1090276
uagaagaccaaaugagcca

SEQ ID NO: 1090278 - RNA, 19 nt, Artificial Sequence
  Description of Artificial Sequence: Synthetic oligonucleotide
  Sense strand starting at position 978 of SEQ ID NO: 915576
uucguagcuguugauuuaa

SEQ ID NO: 1090279 - RNA, 19 nt, Artificial Sequence
  Description of Artificial Sequence: Synthetic oligonucleotide
  Antisense strand to SEQ ID NO: 1090278
uuaaaucaacagcuacgaa

SEQ ID NO: 1090280 - RNA, 19 nt, Artificial Sequence
  Description of Artificial Sequence: Synthetic oligonucleotide
  Sense strand starting at position 988 of SEQ ID NO: 915576
uugauuuaaugugagacuu

SEQ ID NO: 1090281 - RNA, 19 nt, Artificial Sequence
  Description of Artificial Sequence: Synthetic oligonucleotide
  Antisense strand to SEQ ID NO: 1090280
aagucucacauuaaaucaa

SEQ ID NO: 1090282 - RNA, 19 nt, Artificial Sequence
  Description of Artificial Sequence: Synthetic oligonucleotide
  Sense strand starting at position 1244 of SEQ ID NO: 915576
cuaauuauagaucgucaua

SEQ ID NO: 1090283 - RNA, 19 nt, Artificial Sequence
  Description of Artificial Sequence: Synthetic oligonucleotide
  Antisense strand to SEQ ID NO: 1090282
uaugacgaucuauaauuag

SEQ ID NO: 1090284 - RNA, 19 nt, Artificial Sequence
  Description of Artificial Sequence: Synthetic oligonucleotide
  Sense strand starting at position 1453 of SEQ ID NO: 915576
gagguaugccuguacauua

SEQ ID NO: 1090285 - RNA, 19 nt, Artificial Sequence
  Description of Artificial Sequence: Synthetic oligonucleotide
  Antisense strand to SEQ ID NO: 1090284
uaauguacaggcauaccuc

SEQ ID NO: 1090286 - RNA, 19 nt, Artificial Sequence
  Description of Artificial Sequence: Synthetic oligonucleotide
  Sense strand starting at position 1484 of SEQ ID NO: 915576
cugacagcucuuugaauuc

SEQ ID NO: 1090287 - RNA, 19 nt, Artificial Sequence
  Description of Artificial Sequence: Synthetic oligonucleotide
  Antisense strand to SEQ ID NO: 1090286
gaauucaaagagcugucag

SEQ ID NO: 1090288 - RNA, 19 nt, Artificial Sequence
  Description of Artificial Sequence: Synthetic oligonucleotide
  Sense strand starting at position 1576 of SEQ ID NO: 915576
agaaguuaucaguguaaau

SEQ ID NO: 1090289 - RNA, 19 nt, Artificial Sequence
  Description of Artificial Sequence: Synthetic oligonucleotide
  Antisense strand to SEQ ID NO: 1090288
auuuacacugauaacuucu

SEQ ID NO: 1090290 - RNA, 19 nt, Artificial Sequence
  Description of Artificial Sequence: Synthetic oligonucleotide
  Sense strand starting at position 1645 of SEQ ID NO: 915576
ugagcccuauucucaaaga

SEQ ID NO: 1090291 - RNA, 19 nt, Artificial Sequence
  Description of Artificial Sequence: Synthetic oligonucleotide
  Antisense strand to SEQ ID NO: 1090290
ucuuugagaauagggcuca

SEQ ID NO: 1090292 - RNA, 19 nt, Artificial Sequence
  Description of Artificial Sequence: Synthetic oligonucleotide
  Sense strand starting at position 1661 of SEQ ID NO: 915576
agaguaagauaguuauucu

SEQ ID NO: 1090293 - RNA, 19 nt, Artificial Sequence
  Description of Artificial Sequence: Synthetic oligonucleotide
  Antisense strand to SEQ ID NO: 1090292
agaauaacuaucuuacucu

SEQ ID NO: 1090294 - RNA, 19 nt, Artificial Sequence
  Description of Artificial Sequence: Synthetic oligonucleotide
  Sense strand starting at position 1967 of SEQ ID NO: 915576
acugguaaauugccuuuga

SEQ ID NO: 1090295 - RNA, 19 nt, Artificial Sequence
  Description of Artificial Sequence: Synthetic oligonucleotide
  Antisense strand to SEQ ID NO: 1090294
ucaaaggcaauuuaccagu

SEQ ID NO: 1090296 - RNA, 19 nt, Artificial Sequence
  Description of Artificial Sequence: Synthetic oligonucleotide
  Sense strand starting at position 1968 of SEQ ID NO: 915576
cugguaaauugccuuugaa

SEQ ID NO: 1090297 - RNA, 19 nt, Artificial Sequence
  Description of Artificial Sequence: Synthetic oligonucleotide
  Antisense strand to SEQ ID NO: 1090296
uucaaaggcaauuuaccag

SEQ ID NO: 1090298 - RNA, 19 nt, Artificial Sequence
  Description of Artificial Sequence: Synthetic oligonucleotide
  Sense strand starting at position 2066 of SEQ ID NO: 915576
gaaguauacuuucuggcua

SEQ ID NO: 1090299 - RNA, 19 nt, Artificial Sequence
  Description of Artificial Sequence: Synthetic oligonucleotide
  Antisense strand to SEQ ID NO: 1090298
uagccagaaaguauacuuc

SEQ ID NO: 1090300 - RNA, 19 nt, Artificial Sequence
  Description of Artificial Sequence: Synthetic oligonucleotide
  Sense strand starting at position 2233 of SEQ ID NO: 915576
gguaauaaaguaggugaua

SEQ ID NO: 1090301 - RNA, 19 nt, Artificial Sequence
  Description of Artificial Sequence: Synthetic oligonucleotide
  Antisense strand to SEQ ID NO: 1090300
uaucaccuacuuuauuacc

SEQ ID NO: 1090302 - RNA, 19 nt, Artificial Sequence
  Description of Artificial Sequence: Synthetic oligonucleotide
  Sense strand starting at position 2234 of SEQ ID NO: 915576
guaauaaaguaggugauaa

SEQ ID NO: 1090303 - RNA, 19 nt, Artificial Sequence
  Description of Artificial Sequence: Synthetic oligonucleotide
  Antisense strand to SEQ ID NO: 1090302
uuaucaccuacuuuauuac

SEQ ID NO: 1090304 - RNA, 19 nt, Artificial Sequence
  Description of Artificial Sequence: Synthetic oligonucleotide
  Sense strand starting at position 2336 of SEQ ID NO: 915576
uuaauuuaugucugcaagu

SEQ ID NO: 1090305 - RNA, 19 nt, Artificial Sequence
  Description of Artificial Sequence: Synthetic oligonucleotide
  Antisense strand to SEQ ID NO: 1090304
acuugcagacauaaauuaa

SEQ ID NO: 1090306 - RNA, 19 nt, Artificial Sequence
  Description of Artificial Sequence: Synthetic oligonucleotide
  Sense strand starting at position 2384 of SEQ ID NO: 915576
uuaaaugugccugacagga

SEQ ID NO: 1090307 - RNA, 19 nt, Artificial Sequence
  Description of Artificial Sequence: Synthetic oligonucleotide
  Antisense strand to SEQ ID NO: 1090306
uccugucaggcacauuuaa

SEQ ID NO: 1090308 - RNA, 19 nt, Artificial Sequence
  Description of Artificial Sequence: Synthetic oligonucleotide
  Sense strand starting at position 2397 of SEQ ID NO: 915576
acaggaauaccuuguaggu

SEQ ID NO: 1090309 - RNA, 19 nt, Artificial Sequence
  Description of Artificial Sequence: Synthetic oligonucleotide
  Antisense strand to SEQ ID NO: 1090308
accuacaagguauuccugu

SEQ ID NO: 1090310 - RNA, 19 nt, Artificial Sequence
  Description of Artificial Sequence: Synthetic oligonucleotide
  Sense strand starting at position 2401 of SEQ ID NO: 915576
gaauaccuuguagguagaa

SEQ ID NO: 1090311 - RNA, 19 nt, Artificial Sequence
  Description of Artificial Sequence: Synthetic oligonucleotide
  Antisense strand to SEQ ID NO: 1090310
uucuaccuacaagguauuc

SEQ ID NO: 1090312 - RNA, 19 nt, Artificial Sequence
  Description of Artificial Sequence: Synthetic oligonucleotide
  Sense strand starting at position 2402 of SEQ ID NO: 915576
aauaccuuguagguagaau

SEQ ID NO: 1090313 - RNA, 19 nt, Artificial Sequence
  Description of Artificial Sequence: Synthetic oligonucleotide
  Antisense strand to SEQ ID NO: 1090312
auucuaccuacaagguauu

SEQ ID NO: 1090314 - RNA, 19 nt, Artificial Sequence
  Description of Artificial Sequence: Synthetic oligonucleotide
  Sense strand starting at position 2465 of SEQ ID NO: 915576
ccauaagaugcuuaggcua

SEQ ID NO: 1090315 - RNA, 19 nt, Artificial Sequence
  Description of Artificial Sequence: Synthetic oligonucleotide
  Antisense strand to SEQ ID NO: 1090314
uagccuaagcaucuuaugg

SEQ ID NO: 1090316 - RNA, 19 nt, Artificial Sequence
  Description of Artificial Sequence: Synthetic oligonucleotide
  Sense strand starting at position 2472 of SEQ ID NO: 915576
augcuuaggcuauauacaa

SEQ ID NO: 1090317 - RNA, 19 nt, Artificial Sequence
  Description of Artificial Sequence: Synthetic oligonucleotide
  Antisense strand to SEQ ID NO: 1090316
uuguauauagccuaagcau

SEQ ID NO: 1090318 - RNA, 19 nt, Artificial Sequence
  Description of Artificial Sequence: Synthetic oligonucleotide
  Sense strand starting at position 2490 of SEQ ID NO: 915576
augcauucuguauaagcca

SEQ ID NO: 1090319 - RNA, 19 nt, Artificial Sequence
  Description of Artificial Sequence: Synthetic oligonucleotide
  Antisense strand to SEQ ID NO: 1090318
uggcuuauacagaaugcau

SEQ ID NO: 1090320 - RNA, 19 nt, Artificial Sequence
  Description of Artificial Sequence: Synthetic oligonucleotide
  Sense strand starting at position 2543 of SEQ ID NO: 915576
uuuaguucuggcugaagag

SEQ ID NO: 1090321 - RNA, 19 nt, Artificial Sequence
  Description of Artificial Sequence: Synthetic oligonucleotide
  Antisense strand to SEQ ID NO: 1090320
cucuucagccagaacuaaa

SEQ ID NO: 1090322 - RNA, 19 nt, Artificial Sequence
  Description of Artificial Sequence: Synthetic oligonucleotide
  Sense strand starting at position 2681 of SEQ ID NO: 915576
gugguuugguaguuuauuu

SEQ ID NO: 1090323 - RNA, 19 nt, Artificial Sequence
  Description of Artificial Sequence: Synthetic oligonucleotide
  Antisense strand to SEQ ID NO: 1090322
aaauaaacuaccaaaccac

SEQ ID NO: 1090324 - RNA, 19 nt, Artificial Sequence
  Description of Artificial Sequence: Synthetic oligonucleotide
  Sense strand starting at position 2796 of SEQ ID NO: 915576
gugaguaguagucaacuaa

SEQ ID NO: 1090325 - RNA, 19 nt, Artificial Sequence
  Description of Artificial Sequence: Synthetic oligonucleotide
  Antisense strand to SEQ ID NO: 1090324
uuaguugacuacuacucac

SEQ ID NO: 1090326 - RNA, 19 nt, Artificial Sequence
  Description of Artificial Sequence: Synthetic oligonucleotide
  Sense strand starting at position 2822 of SEQ ID NO: 915576
aauagagcuuggguuccua

SEQ ID NO: 1090327 - RNA, 19 nt, Artificial Sequence
  Description of Artificial Sequence: Synthetic oligonucleotide
  Antisense strand to SEQ ID NO: 1090326
uaggaacccaagcucuauu

SEQ ID NO: 1090328 - RNA, 19 nt, Artificial Sequence
  Description of Artificial Sequence: Synthetic oligonucleotide
  Sense strand starting at position 2835 of SEQ ID NO: 915576
uuccuaaauuaggucagaa

SEQ ID NO: 1090329 - RNA, 19 nt, Artificial Sequence
  Description of Artificial Sequence: Synthetic oligonucleotide
  Antisense strand to SEQ ID NO: 1090328
uucugaccuaauuuaggaa

SEQ ID NO: 1090330 - RNA, 19 nt, Artificial Sequence
  Description of Artificial Sequence: Synthetic oligonucleotide
  Sense strand starting at position 2926 of SEQ ID NO: 915576
aguuacagcuaacuagauu

SEQ ID NO: 1090331 - RNA, 19 nt, Artificial Sequence
  Description of Artificial Sequence: Synthetic oligonucleotide
  Antisense strand to SEQ ID NO: 1090330
aaucuaguuagcuguaacu

SEQ ID NO: 1090332 - RNA, 19 nt, Artificial Sequence
  Description of Artificial Sequence: Synthetic oligonucleotide
  Sense strand starting at position 3047 of SEQ ID NO: 915576
gguauaggcaucugaaauu

SEQ ID NO: 1090333 - RNA, 19 nt, Artificial Sequence
  Description of Artificial Sequence: Synthetic oligonucleotide
  Antisense strand to SEQ ID NO: 1090332
aauuucagaugccuauacc

SEQ ID NO: 1090334 - RNA, 19 nt, Artificial Sequence
  Description of Artificial Sequence: Synthetic oligonucleotide
  Sense strand starting at position 3127 of SEQ ID NO: 915576
cuaaaugauccagguaauu

SEQ ID NO: 1090335 - RNA, 19 nt, Artificial Sequence
  Description of Artificial Sequence: Synthetic oligonucleotide
  Antisense strand to SEQ ID NO: 1090334
aauuaccuggaucauuuag

SEQ ID NO: 1090336 - RNA, 19 nt, Artificial Sequence
  Description of Artificial Sequence: Synthetic oligonucleotide
  Sense strand starting at position 3353 of SEQ ID NO: 915576
uuuggacagcuuuaagcau

SEQ ID NO: 1090337 - RNA, 19 nt, Artificial Sequence
  Description of Artificial Sequence: Synthetic oligonucleotide
  Antisense strand to SEQ ID NO: 1090336
augcuuaaagcuguccaaa

SEQ ID NO: 1090338 - RNA, 19 nt, Artificial Sequence
  Description of Artificial Sequence: Synthetic oligonucleotide
  Sense strand starting at position 3570 of SEQ ID NO: 915576
uguuuagggaucugggaga

SEQ ID NO: 1090339 - RNA, 19 nt, Artificial Sequence
  Description of Artificial Sequence: Synthetic oligonucleotide
  Antisense strand to SEQ ID NO: 1090338
ucucccagaucccuaaaca

SEQ ID NO: 1090340 - RNA, 19 nt, Artificial Sequence
  Description of Artificial Sequence: Synthetic oligonucleotide
  Sense strand starting at position 132 of SEQ ID NO: 915577
acugauuucucccgagaaa

SEQ ID NO: 1090341 - RNA, 19 nt, Artificial Sequence
  Description of Artificial Sequence: Synthetic oligonucleotide
  Antisense strand to SEQ ID NO: 1090340
uuucucgggagaaaucagu

SEQ ID NO: 1090342 - RNA, 19 nt, Artificial Sequence
  Description of Artificial Sequence: Synthetic oligonucleotide
  Sense strand starting at position 144 of SEQ ID NO: 915577
cgagaaauguaugcucuuu

SEQ ID NO: 1090343 - RNA, 19 nt, Artificial Sequence
  Description of Artificial Sequence: Synthetic oligonucleotide
  Antisense strand to SEQ ID NO: 1090342
aaagagcauacauuucucg

SEQ ID NO: 1090344 - RNA, 19 nt, Artificial Sequence
  Description of Artificial Sequence: Synthetic oligonucleotide
  Sense strand starting at position 180 of SEQ ID NO: 915577
cuguauguccgugagaaau

SEQ ID NO: 1090345 - RNA, 19 nt, Artificial Sequence
  Description of Artificial Sequence: Synthetic oligonucleotide
  Antisense strand to SEQ ID NO: 1090344
auuucucacggacauacag

SEQ ID NO: 1090346 - RNA, 19 nt, Artificial Sequence
  Description of Artificial Sequence: Synthetic oligonucleotide
  Sense strand starting at position 186 of SEQ ID NO: 915577
guccgugagaaauacaaug

SEQ ID NO: 1090347 - RNA, 19 nt, Artificial Sequence
  Description of Artificial Sequence: Synthetic oligonucleotide
  Antisense strand to SEQ ID NO: 1090346
cauuguauuucucacggac

SEQ ID NO: 1090348 - RNA, 19 nt, Artificial Sequence
  Description of Artificial Sequence: Synthetic oligonucleotide
  Sense strand starting at position 224 of SEQ ID NO: 915577
acugguaaucuucgauaau

SEQ ID NO: 1090349 - RNA, 19 nt, Artificial Sequence
  Description of Artificial Sequence: Synthetic oligonucleotide
  Antisense strand to SEQ ID NO: 1090348
auuaucgaagauuaccagu

SEQ ID NO: 1090350 - RNA, 19 nt, Artificial Sequence
  Description of Artificial Sequence: Synthetic oligonucleotide
  Sense strand starting at position 227 of SEQ ID NO: 915577
gguaaucuucgauaauaug

SEQ ID NO: 1090351 - RNA, 19 nt, Artificial Sequence
  Description of Artificial Sequence: Synthetic oligonucleotide
  Antisense strand to SEQ ID NO: 1090350
cauauuaucgaagauuacc

SEQ ID NO: 1090352 - RNA, 19 nt, Artificial Sequence
  Description of Artificial Sequence: Synthetic oligonucleotide
  Sense strand starting at position 328 of SEQ ID NO: 915577
aaaggcuuucugcagaaug

SEQ ID NO: 1090353 - RNA, 19 nt, Artificial Sequence
  Description of Artificial Sequence: Synthetic oligonucleotide
  Antisense strand to SEQ ID NO: 1090352
cauucugcagaaagccuuu

SEQ ID NO: 1090354 - RNA, 19 nt, Artificial Sequence
  Description of Artificial Sequence: Synthetic oligonucleotide
  Sense strand starting at position 330 of SEQ ID NO: 915577
aggcuuucugcagaaugga

SEQ ID NO: 1090355 - RNA, 19 nt, Artificial Sequence
  Description of Artificial Sequence: Synthetic oligonucleotide
  Antisense strand to SEQ ID NO: 1090354
uccauucugcagaaagccu

SEQ ID NO: 1090356 - RNA, 19 nt, Artificial Sequence
  Description of Artificial Sequence: Synthetic oligonucleotide
  Sense strand starting at position 339 of SEQ ID NO: 915577
gcagaauggagauggucuu

SEQ ID NO: 1090357 - RNA, 19 nt, Artificial Sequence
  Description of Artificial Sequence: Synthetic oligonucleotide
  Antisense strand to SEQ ID NO: 1090356
aagaccaucuccauucugc

SEQ ID NO: 1090358 - RNA, 19 nt, Artificial Sequence
  Description of Artificial Sequence: Synthetic oligonucleotide
  Sense strand starting at position 623 of SEQ ID NO: 915577
agaguacugucuuuaaauu

SEQ ID NO: 1090359 - RNA, 19 nt, Artificial Sequence
  Description of Artificial Sequence: Synthetic oligonucleotide
  Antisense strand to SEQ ID NO: 1090358
aauuuaaagacaguacucu

SEQ ID NO: 1090360 - RNA, 19 nt, Artificial Sequence
  Description of Artificial Sequence: Synthetic oligonucleotide
  Sense strand starting at position 765 of SEQ ID NO: 915577
ugaaaucuccauugugaau

SEQ ID NO: 1090361 - RNA, 19 nt, Artificial Sequence
  Description of Artificial Sequence: Synthetic oligonucleotide
  Antisense strand to SEQ ID NO: 1090360
auucacaauggagauuuca

SEQ ID NO: 1090362 - RNA, 19 nt, Artificial Sequence
  Description of Artificial Sequence: Synthetic oligonucleotide
  Sense strand starting at position 959 of SEQ ID NO: 915577
cauugucaauugcugagaa

SEQ ID NO: 1090363 - RNA, 19 nt, Artificial Sequence
  Description of Artificial Sequence: Synthetic oligonucleotide
  Antisense strand to SEQ ID NO: 1090362
uucucagcaauugacaaug

SEQ ID NO: 1090364 - RNA, 19 nt, Artificial Sequence
  Description of Artificial Sequence: Synthetic oligonucleotide
  Sense strand starting at position 961 of SEQ ID NO: 915577
uugucaauugcugagaaga

SEQ ID NO: 1090365 - RNA, 19 nt, Artificial Sequence
  Description of Artificial Sequence: Synthetic oligonucleotide
  Antisense strand to SEQ ID NO: 1090364
ucuucucagcaauugacaa

SEQ ID NO: 1090366 - RNA, 19 nt, Artificial Sequence
  Description of Artificial Sequence: Synthetic oligonucleotide
  Sense strand starting at position 974 of SEQ ID NO: 915577
agaagaccuucuuugaggu

SEQ ID NO: 1090367 - RNA, 19 nt, Artificial Sequence
  Description of Artificial Sequence: Synthetic oligonucleotide
  Antisense strand to SEQ ID NO: 1090366
accucaaagaaggucuucu

SEQ ID NO: 1090368 - RNA, 19 nt, Artificial Sequence
  Description of Artificial Sequence: Synthetic oligonucleotide
  Sense strand starting at position 1009 of SEQ ID NO: 915577
aguagaaauuaguccuggu

SEQ ID NO: 1090369 - RNA, 19 nt, Artificial Sequence
  Description of Artificial Sequence: Synthetic oligonucleotide
  Antisense strand to SEQ ID NO: 1090368
accaggacuaauuucuacu

SEQ ID NO: 1090370 - RNA, 19 nt, Artificial Sequence
  Description of Artificial Sequence: Synthetic oligonucleotide
  Sense strand starting at position 1013 of SEQ ID NO: 915577
gaaauuaguccugguucua

SEQ ID NO: 1090371 - RNA, 19 nt, Artificial Sequence
  Description of Artificial Sequence: Synthetic oligonucleotide
  Antisense strand to SEQ ID NO: 1090370
uagaaccaggacuaauuuc

SEQ ID NO: 1090372 - RNA, 19 nt, Artificial Sequence
  Description of Artificial Sequence: Synthetic oligonucleotide
  Sense strand starting at position 1238 of SEQ ID NO: 915577
guuucuucuugaucagguu

SEQ ID NO: 1090373 - RNA, 19 nt, Artificial Sequence
  Description of Artificial Sequence: Synthetic oligonucleotide
  Antisense strand to SEQ ID NO: 1090372
aaccugaucaagaagaaac

SEQ ID NO: 1090374 - RNA, 19 nt, Artificial Sequence
  Description of Artificial Sequence: Synthetic oligonucleotide
  Sense strand starting at position 1317 of SEQ ID NO: 915577
agcuacuacugaguaugaa

SEQ ID NO: 1090375 - RNA, 19 nt, Artificial Sequence
  Description of Artificial Sequence: Synthetic oligonucleotide
  Antisense strand to SEQ ID NO: 1090374
uucauacucaguaguagcu

SEQ ID NO: 1090376 - RNA, 19 nt, Artificial Sequence
  Description of Artificial Sequence: Synthetic oligonucleotide
  Sense strand starting at position 1318 of SEQ ID NO: 915577
gcuacuacugaguaugaaa

SEQ ID NO: 1090377 - RNA, 19 nt, Artificial Sequence
  Description of Artificial Sequence: Synthetic oligonucleotide
  Antisense strand to SEQ ID NO: 1090376
uuucauacucaguaguagc

SEQ ID NO: 1090378 - RNA, 19 nt, Artificial Sequence
  Description of Artificial Sequence: Synthetic oligonucleotide
  Sense strand starting at position 1374 of SEQ ID NO: 915577
ugcgucaaugcggaauaga

SEQ ID NO: 1090379 - RNA, 19 nt, Artificial Sequence
  Description of Artificial Sequence: Synthetic oligonucleotide
  Antisense strand to SEQ ID NO: 1090378
ucuauuccgcauugacgca

SEQ ID NO: 1090380 - RNA, 19 nt, Artificial Sequence
  Description of Artificial Sequence: Synthetic oligonucleotide
  Sense strand starting at position 1421 of SEQ ID NO: 915577
gggagaacuggacgguuua

SEQ ID NO: 1090381 - RNA, 19 nt, Artificial Sequence
  Description of Artificial Sequence: Synthetic oligonucleotide
  Antisense strand to SEQ ID NO: 1090380
uaaaccguccaguucuccc

SEQ ID NO: 1090382 - RNA, 19 nt, Artificial Sequence
  Description of Artificial Sequence: Synthetic oligonucleotide
  Sense strand starting at position 1422 of SEQ ID NO: 915577
ggagaacuggacgguuuaa

SEQ ID NO: 1090383 - RNA, 19 nt, Artificial Sequence
  Description of Artificial Sequence: Synthetic oligonucleotide
  Antisense strand to SEQ ID NO: 1090382
uuaaaccguccaguucucc

SEQ ID NO: 1090384 - RNA, 19 nt, Artificial Sequence
  Description of Artificial Sequence: Synthetic oligonucleotide
  Sense strand starting at position 1546 of SEQ ID NO: 915577
ucccgagcaauugggauua

SEQ ID NO: 1090385 - RNA, 19 nt, Artificial Sequence
  Description of Artificial Sequence: Synthetic oligonucleotide
  Antisense strand to SEQ ID NO: 1090384
uaaucccaauugcucggga

SEQ ID NO: 1090386 - RNA, 19 nt, Artificial Sequence
  Description of Artificial Sequence: Synthetic oligonucleotide
  Sense strand starting at position 1635 of SEQ ID NO: 915577
accauucuagaguggugaa

SEQ ID NO: 1090387 - RNA, 19 nt, Artificial Sequence
  Description of Artificial Sequence: Synthetic oligonucleotide
  Antisense strand to SEQ ID NO: 1090386
uucaccacucuagaauggu

SEQ ID NO: 1090388 - RNA, 19 nt, Artificial Sequence
  Description of Artificial Sequence: Synthetic oligonucleotide
  Sense strand starting at position 1636 of SEQ ID NO: 915577
ccauucuagaguggugaaa

SEQ ID NO: 1090389 - RNA, 19 nt, Artificial Sequence
  Description of Artificial Sequence: Synthetic oligonucleotide
  Antisense strand to SEQ ID NO: 1090388
uuucaccacucuagaaugg

SEQ ID NO: 1090390 - RNA, 19 nt, Artificial Sequence
  Description of Artificial Sequence: Synthetic oligonucleotide
  Sense strand starting at position 2363 of SEQ ID NO: 915577
aggagucugcuggguugaa

SEQ ID NO: 1090391 - RNA, 19 nt, Artificial Sequence
  Description of Artificial Sequence: Synthetic oligonucleotide
  Antisense strand to SEQ ID NO: 1090390
uucaacccagcagacuccu

SEQ ID NO: 1090392 - RNA, 19 nt, Artificial Sequence
  Description of Artificial Sequence: Synthetic oligonucleotide
  Sense strand starting at position 2474 of SEQ ID NO: 915577
gcccaaaugugcccagaaa

SEQ ID NO: 1090393 - RNA, 19 nt, Artificial Sequence
  Description of Artificial Sequence: Synthetic oligonucleotide
  Antisense strand to SEQ ID NO: 1090392
uuucugggcacauuugggc

SEQ ID NO: 1090394 - RNA, 19 nt, Artificial Sequence
  Description of Artificial Sequence: Synthetic oligonucleotide
  Sense strand starting at position 2542 of SEQ ID NO: 915577
ggcgaagcuaguuagguaa

SEQ ID NO: 1090395 - RNA, 19 nt, Artificial Sequence
  Description of Artificial Sequence: Synthetic oligonucleotide
  Antisense strand to SEQ ID NO: 1090394
uuaccuaacuagcuucgcc

SEQ ID NO: 1090396 - RNA, 19 nt, Artificial Sequence
  Description of Artificial Sequence: Synthetic oligonucleotide
  Sense strand starting at position 2545 of SEQ ID NO: 915577
gaagcuaguuagguaauau

SEQ ID NO: 1090397 - RNA, 19 nt, Artificial Sequence
  Description of Artificial Sequence: Synthetic oligonucleotide
  Antisense strand to SEQ ID NO: 1090396
auauuaccuaacuagcuuc

SEQ ID NO: 1090398 - RNA, 19 nt, Artificial Sequence
  Description of Artificial Sequence: Synthetic oligonucleotide
  Sense strand starting at position 2555 of SEQ ID NO: 915577
agguaauauuuggaaacag

SEQ ID NO: 1090399 - RNA, 19 nt, Artificial Sequence
  Description of Artificial Sequence: Synthetic oligonucleotide
  Antisense strand to SEQ ID NO: 1090398
cuguuuccaaauauuaccu

SEQ ID NO: 1090400 - RNA, 19 nt, Artificial Sequence
  Description of Artificial Sequence: Synthetic oligonucleotide
  Sense strand starting at position 2680 of SEQ ID NO: 915577
agugguuaucagggcuaag

SEQ ID NO: 1090401 - RNA, 19 nt, Artificial Sequence
  Description of Artificial Sequence: Synthetic oligonucleotide
  Antisense strand to SEQ ID NO: 1090400
cuuagcccugauaaccacu

SEQ ID NO: 1090402 - RNA, 19 nt, Artificial Sequence
  Description of Artificial Sequence: Synthetic oligonucleotide
  Sense strand starting at position 2748 of SEQ ID NO: 915577
ucugguaccgcuuacagau

SEQ ID NO: 1090403 - RNA, 19 nt, Artificial Sequence
  Description of Artificial Sequence: Synthetic oligonucleotide
  Antisense strand to SEQ ID NO: 1090402
aucuguaagcgguaccaga

SEQ ID NO: 1090404 - RNA, 19 nt, Artificial Sequence
  Description of Artificial Sequence: Synthetic oligonucleotide
  Sense strand starting at position 2761 of SEQ ID NO: 915577
acagauauuggugguggga

SEQ ID NO: 1090405 - RNA, 19 nt, Artificial Sequence
  Description of Artificial Sequence: Synthetic oligonucleotide
  Antisense strand to SEQ ID NO: 1090404
ucccaccaccaauaucugu

SEQ ID NO: 1090406 - RNA, 19 nt, Artificial Sequence
  Description of Artificial Sequence: Synthetic oligonucleotide
  Sense strand starting at position 2894 of SEQ ID NO: 915577
ggugcaaucugucugauaa

SEQ ID NO: 1090407 - RNA, 19 nt, Artificial Sequence
  Description of Artificial Sequence: Synthetic oligonucleotide
  Antisense strand to SEQ ID NO: 1090406
uuaucagacagauugcacc

SEQ ID NO: 1090408 - RNA, 19 nt, Artificial Sequence
  Description of Artificial Sequence: Synthetic oligonucleotide
  Sense strand starting at position 2924 of SEQ ID NO: 915577
gugauaauguuggauuucu

SEQ ID NO: 1090409 - RNA, 19 nt, Artificial Sequence
  Description of Artificial Sequence: Synthetic oligonucleotide
  Antisense strand to SEQ ID NO: 1090408
agaaauccaacauuaucac

SEQ ID NO: 1090410 - RNA, 19 nt, Artificial Sequence
  Description of Artificial Sequence: Synthetic oligonucleotide
  Sense strand starting at position 2976 of SEQ ID NO: 915577
cccagagaucccuguuaag

SEQ ID NO: 1090411 - RNA, 19 nt, Artificial Sequence
  Description of Artificial Sequence: Synthetic oligonucleotide
  Antisense strand to SEQ ID NO: 1090410
cuuaacagggaucucuggg

SEQ ID NO: 1090412 - RNA, 19 nt, Artificial Sequence
  Description of Artificial Sequence: Synthetic oligonucleotide
  Sense strand starting at position 3167 of SEQ ID NO: 915577
cucagugaccuuugagauc

SEQ ID NO: 1090413 - RNA, 19 nt, Artificial Sequence
  Description of Artificial Sequence: Synthetic oligonucleotide
  Antisense strand to SEQ ID NO: 1090412
gaucucaaaggucacugag

SEQ ID NO: 1090414 - RNA, 19 nt, Artificial Sequence
  Description of Artificial Sequence: Synthetic oligonucleotide
  Sense strand starting at position 3382 of SEQ ID NO: 915577
ccauguuuaccauguaaug

SEQ ID NO: 1090415 - RNA, 19 nt, Artificial Sequence
  Description of Artificial Sequence: Synthetic oligonucleotide
  Antisense strand to SEQ ID NO: 1090414
cauuacaugguaaacaugg

SEQ ID NO: 1090416 - RNA, 19 nt, Artificial Sequence
  Description of Artificial Sequence: Synthetic oligonucleotide
  Sense strand starting at position 3391 of SEQ ID NO: 915577
ccauguaaugcuugagaug

SEQ ID NO: 1090417 - RNA, 19 nt, Artificial Sequence
  Description of Artificial Sequence: Synthetic oligonucleotide
  Antisense strand to SEQ ID NO: 1090416
caucucaagcauuacaugg

SEQ ID NO: 1090418 - RNA, 19 nt, Artificial Sequence
  Description of Artificial Sequence: Synthetic oligonucleotide
  Sense strand starting at position 3392 of SEQ ID NO: 915577
cauguaaugcuugagaugu

SEQ ID NO: 1090419 - RNA, 19 nt, Artificial Sequence
  Description of Artificial Sequence: Synthetic oligonucleotide
  Antisense strand to SEQ ID NO: 1090418
acaucucaagcauuacaug

SEQ ID NO: 1090420 - RNA, 19 nt, Artificial Sequence
  Description of Artificial Sequence: Synthetic oligonucleotide
  Sense strand starting at position 43 of SEQ ID NO: 915578
ggagaagucuccuucaggu

SEQ ID NO: 1090421 - RNA, 19 nt, Artificial Sequence
  Description of Artificial Sequence: Synthetic oligonucleotide
  Antisense strand to SEQ ID NO: 1090420
accugaaggagacuucucc

SEQ ID NO: 1090422 - RNA, 19 nt, Artificial Sequence
  Description of Artificial Sequence: Synthetic oligonucleotide
  Sense strand starting at position 159 of SEQ ID NO: 915578
uaggaaagccucugucuga

SEQ ID NO: 1090423 - RNA, 19 nt, Artificial Sequence
  Description of Artificial Sequence: Synthetic oligonucleotide
  Antisense strand to SEQ ID NO: 1090422
ucagacagaggcuuuccua

SEQ ID NO: 1090424 - RNA, 19 nt, Artificial Sequence
  Description of Artificial Sequence: Synthetic oligonucleotide
  Sense strand starting at position 160 of SEQ ID NO: 915578
aggaaagccucugucugaa

SEQ ID NO: 1090425 - RNA, 19 nt, Artificial Sequence
  Description of Artificial Sequence: Synthetic oligonucleotide
  Antisense strand to SEQ ID NO: 1090424
uucagacagaggcuuuccu

SEQ ID NO: 1090426 - RNA, 19 nt, Artificial Sequence
  Description of Artificial Sequence: Synthetic oligonucleotide
  Sense strand starting at position 291 of SEQ ID NO: 915578
accauaaccgagugcagaa

SEQ ID NO: 1090427 - RNA, 19 nt, Artificial Sequence
  Description of Artificial Sequence: Synthetic oligonucleotide
  Antisense strand to SEQ ID NO: 1090426
uucugcacucgguuauggu

SEQ ID NO: 1090428 - RNA, 19 nt, Artificial Sequence
  Description of Artificial Sequence: Synthetic oligonucleotide
  Sense strand starting at position 342 of SEQ ID NO: 915578
accucaguugcagaugaaa

SEQ ID NO: 1090429 - RNA, 19 nt, Artificial Sequence
  Description of Artificial Sequence: Synthetic oligonucleotide
  Antisense strand to SEQ ID NO: 1090428
uuucaucugcaacugaggu

SEQ ID NO: 1090430 - RNA, 19 nt, Artificial Sequence
  Description of Artificial Sequence: Synthetic oligonucleotide
  Sense strand starting at position 414 of SEQ ID NO: 915578
gccacuucugagcaacuca

SEQ ID NO: 1090431 - RNA, 19 nt, Artificial Sequence
  Description of Artificial Sequence: Synthetic oligonucleotide
  Antisense strand to SEQ ID NO: 1090430
ugaguugcucagaaguggc

SEQ ID NO: 1090432 - RNA, 19 nt, Artificial Sequence
  Description of Artificial Sequence: Synthetic oligonucleotide
  Sense strand starting at position 546 of SEQ ID NO: 915578
ucaagauagcaaggauauu

SEQ ID NO: 1090433 - RNA, 19 nt, Artificial Sequence
  Description of Artificial Sequence: Synthetic oligonucleotide
  Antisense strand to SEQ ID NO: 1090432
aauauccuugcuaucuuga

SEQ ID NO: 1090434 - RNA, 19 nt, Artificial Sequence
  Description of Artificial Sequence: Synthetic oligonucleotide
  Sense strand starting at position 630 of SEQ ID NO: 915578
aucugaggguucgugaaga

SEQ ID NO: 1090435 - RNA, 19 nt, Artificial Sequence
  Description of Artificial Sequence: Synthetic oligonucleotide
  Antisense strand to SEQ ID NO: 1090434
ucuucacgaacccucagau

SEQ ID NO: 1090436 - RNA, 19 nt, Artificial Sequence
  Description of Artificial Sequence: Synthetic oligonucleotide
  Sense strand starting at position 632 of SEQ ID NO: 915578
cugaggguucgugaagaga

SEQ ID NO: 1090437 - RNA, 19 nt, Artificial Sequence
  Description of Artificial Sequence: Synthetic oligonucleotide
  Antisense strand to SEQ ID NO: 1090436
ucucuucacgaacccucag

SEQ ID NO: 1090438 - RNA, 19 nt, Artificial Sequence
  Description of Artificial Sequence: Synthetic oligonucleotide
  Sense strand starting at position 758 of SEQ ID NO: 915578
cugguuugccaacaaauca

SEQ ID NO: 1090439 - RNA, 19 nt, Artificial Sequence
  Description of Artificial Sequence: Synthetic oligonucleotide
  Antisense strand to SEQ ID NO: 1090438
ugauuuguuggcaaaccag

SEQ ID NO: 1090440 - RNA, 19 nt, Artificial Sequence
  Description of Artificial Sequence: Synthetic oligonucleotide
  Sense strand starting at position 1097 of SEQ ID NO: 915578
uucugucugaaaggugaga

SEQ ID NO: 1090441 - RNA, 19 nt, Artificial Sequence
  Description of Artificial Sequence: Synthetic oligonucleotide
  Antisense strand to SEQ ID NO: 1090440
ucucaccuuucagacagaa

SEQ ID NO: 1090442 - RNA, 19 nt, Artificial Sequence
  Description of Artificial Sequence: Synthetic oligonucleotide
  Sense strand starting at position 1099 of SEQ ID NO: 915578
cugucugaaaggugagaaa

SEQ ID NO: 1090443 - RNA, 19 nt, Artificial Sequence
  Description of Artificial Sequence: Synthetic oligonucleotide
  Antisense strand to SEQ ID NO: 1090442
uuucucaccuuucagacag

SEQ ID NO: 1090444 - RNA, 19 nt, Artificial Sequence
  Description of Artificial Sequence: Synthetic oligonucleotide
  Sense strand starting at position 1110 of SEQ ID NO: 915578
gugagaaauucccucugaa

SEQ ID NO: 1090445 - RNA, 19 nt, Artificial Sequence
  Description of Artificial Sequence: Synthetic oligonucleotide
  Antisense strand to SEQ ID NO: 1090444
uucagagggaauuucucac

SEQ ID NO: 1090446 - RNA, 19 nt, Artificial Sequence
  Description of Artificial Sequence: Synthetic oligonucleotide
  Sense strand starting at position 1263 of SEQ ID NO: 915578
ccuguaaaguccucagaac

SEQ ID NO: 1090447 - RNA, 19 nt, Artificial Sequence
  Description of Artificial Sequence: Synthetic oligonucleotide
  Antisense strand to SEQ ID NO: 1090446
guucugaggacuuuacagg

SEQ ID NO: 1090448 - RNA, 19 nt, Artificial Sequence
  Description of Artificial Sequence: Synthetic oligonucleotide
  Sense strand starting at position 1264 of SEQ ID NO: 915578
cuguaaaguccucagaacu

SEQ ID NO: 1090449 - RNA, 19 nt, Artificial Sequence
  Description of Artificial Sequence: Synthetic oligonucleotide
  Antisense strand to SEQ ID NO: 1090448
aguucugaggacuuuacag

SEQ ID NO: 1090450 - RNA, 19 nt, Artificial Sequence
  Description of Artificial Sequence: Synthetic oligonucleotide
  Sense strand starting at position 1305 of SEQ ID NO: 915578
caagguguuccugagacac

SEQ ID NO: 1090451 - RNA, 19 nt, Artificial Sequence
  Description of Artificial Sequence: Synthetic oligonucleotide
  Antisense strand to SEQ ID NO: 1090450
gugucucaggaacaccuug

SEQ ID NO: 1090452 - RNA, 19 nt, Artificial Sequence
  Description of Artificial Sequence: Synthetic oligonucleotide
  Sense strand starting at position 1344 of SEQ ID NO: 915578
agcugaaacccuuaagcca

SEQ ID NO: 1090453 - RNA, 19 nt, Artificial Sequence
  Description of Artificial Sequence: Synthetic oligonucleotide
  Antisense strand to SEQ ID NO: 1090452
uggcuuaaggguuucagcu

SEQ ID NO: 1090454 - RNA, 19 nt, Artificial Sequence
  Description of Artificial Sequence: Synthetic oligonucleotide
  Sense strand starting at position 1357 of SEQ ID NO: 915578
aagccaggaugcuugagaa

SEQ ID NO: 1090455 - RNA, 19 nt, Artificial Sequence
  Description of Artificial Sequence: Synthetic oligonucleotide
  Antisense strand to SEQ ID NO: 1090454
uucucaagcauccuggcuu

SEQ ID NO: 1090456 - RNA, 19 nt, Artificial Sequence
  Description of Artificial Sequence: Synthetic oligonucleotide
  Sense strand starting at position 1384 of SEQ ID NO: 915578
gcguuagugguggugcuaa

SEQ ID NO: 1090457 - RNA, 19 nt, Artificial Sequence
  Description of Artificial Sequence: Synthetic oligonucleotide
  Antisense strand to SEQ ID NO: 1090456
uuagcaccaccacuaacgc

SEQ ID NO: 1090458 - RNA, 19 nt, Artificial Sequence
  Description of Artificial Sequence: Synthetic oligonucleotide
  Sense strand starting at position 1497 of SEQ ID NO: 915578
guuccaguuccaugaagaa

SEQ ID NO: 1090459 - RNA, 19 nt, Artificial Sequence
  Description of Artificial Sequence: Synthetic oligonucleotide
  Antisense strand to SEQ ID NO: 1090458
uucuucauggaacuggaac

SEQ ID NO: 1090460 - RNA, 19 nt, Artificial Sequence
  Description of Artificial Sequence: Synthetic oligonucleotide
  Sense strand starting at position 1560 of SEQ ID NO: 915578
uuuggauauccugagucau

SEQ ID NO: 1090461 - RNA, 19 nt, Artificial Sequence
  Description of Artificial Sequence: Synthetic oligonucleotide
  Antisense strand to SEQ ID NO: 1090460
augacucaggauauccaaa

SEQ ID NO: 1090462 - RNA, 19 nt, Artificial Sequence
  Description of Artificial Sequence: Synthetic oligonucleotide
  Sense strand starting at position 1562 of SEQ ID NO: 915578
uggauauccugagucauaa

SEQ ID NO: 1090463 - RNA, 19 nt, Artificial Sequence
  Description of Artificial Sequence: Synthetic oligonucleotide
  Antisense strand to SEQ ID NO: 1090462
uuaugacucaggauaucca

SEQ ID NO: 1090464 - RNA, 19 nt, Artificial Sequence
  Description of Artificial Sequence: Synthetic oligonucleotide
  Sense strand starting at position 1740 of SEQ ID NO: 915578
uuuguaagaucucuaugaa

SEQ ID NO: 1090465 - RNA, 19 nt, Artificial Sequence
  Description of Artificial Sequence: Synthetic oligonucleotide
  Antisense strand to SEQ ID NO: 1090464
uucauagagaucuuacaaa

SEQ ID NO: 1090466 - RNA, 19 nt, Artificial Sequence
  Description of Artificial Sequence: Synthetic oligonucleotide
  Sense strand starting at position 1743 of SEQ ID NO: 915578
guaagaucucuaugaagug

SEQ ID NO: 1090467 - RNA, 19 nt, Artificial Sequence
  Description of Artificial Sequence: Synthetic oligonucleotide
  Antisense strand to SEQ ID NO: 1090466
cacuucauagagaucuuac

SEQ ID NO: 1090468 - RNA, 19 nt, Artificial Sequence
  Description of Artificial Sequence: Synthetic oligonucleotide
  Sense strand starting at position 1866 of SEQ ID NO: 915578
cuuuccgagcaagaauaua

SEQ ID NO: 1090469 - RNA, 19 nt, Artificial Sequence
  Description of Artificial Sequence: Synthetic oligonucleotide
  Antisense strand to SEQ ID NO: 1090468
uauauucuugcucggaaag

SEQ ID NO: 1090470 - RNA, 19 nt, Artificial Sequence
  Description of Artificial Sequence: Synthetic oligonucleotide
  Sense strand starting at position 1950 of SEQ ID NO: 915578
cauugaagcugccugagaa

SEQ ID NO: 1090471 - RNA, 19 nt, Artificial Sequence
  Description of Artificial Sequence: Synthetic oligonucleotide
  Antisense strand to SEQ ID NO: 1090470
uucucaggcagcuucaaug

SEQ ID NO: 1090472 - RNA, 19 nt, Artificial Sequence
  Description of Artificial Sequence: Synthetic oligonucleotide
  Sense strand starting at position 1951 of SEQ ID NO: 915578
auugaagcugccugagaac

SEQ ID NO: 1090473 - RNA, 19 nt, Artificial Sequence
  Description of Artificial Sequence: Synthetic oligonucleotide
  Antisense strand to SEQ ID NO: 1090472
guucucaggcagcuucaau

SEQ ID NO: 1090474 - RNA, 19 nt, Artificial Sequence
  Description of Artificial Sequence: Synthetic oligonucleotide
  Sense strand starting at position 2007 of SEQ ID NO: 915578
accugauuggcugacccau

SEQ ID NO: 1090475 - RNA, 19 nt, Artificial Sequence
  Description of Artificial Sequence: Synthetic oligonucleotide
  Antisense strand to SEQ ID NO: 1090474
augggucagccaaucaggu

SEQ ID NO: 1090476 - RNA, 19 nt, Artificial Sequence
  Description of Artificial Sequence: Synthetic oligonucleotide
  Sense strand starting at position 2056 of SEQ ID NO: 915578
ugauguaugugaguauaaa

SEQ ID NO: 1090477 - RNA, 19 nt, Artificial Sequence
  Description of Artificial Sequence: Synthetic oligonucleotide
  Antisense strand to SEQ ID NO: 1090476
uuuauacucacauacauca

SEQ ID NO: 1090478 - RNA, 19 nt, Artificial Sequence
  Description of Artificial Sequence: Synthetic oligonucleotide
  Sense strand starting at position 2057 of SEQ ID NO: 915578
gauguaugugaguauaaau

SEQ ID NO: 1090479 - RNA, 19 nt, Artificial Sequence
  Description of Artificial Sequence: Synthetic oligonucleotide
  Antisense strand to SEQ ID NO: 1090478
auuuauacucacauacauc

SEQ ID NO: 1090480 - RNA, 19 nt, Artificial Sequence
  Description of Artificial Sequence: Synthetic oligonucleotide
  Sense strand starting at position 2400 of SEQ ID NO: 915578
cugaaaguaucucugauug

SEQ ID NO: 1090481 - RNA, 19 nt, Artificial Sequence
  Description of Artificial Sequence: Synthetic oligonucleotide
  Antisense strand to SEQ ID NO: 1090480
caaucagagauacuuucag

SEQ ID NO: 1090482 - RNA, 19 nt, Artificial Sequence
  Description of Artificial Sequence: Synthetic oligonucleotide
  Sense strand starting at position 2527 of SEQ ID NO: 915578
gacugaucaugagccacua

SEQ ID NO: 1090483 - RNA, 19 nt, Artificial Sequence
  Description of Artificial Sequence: Synthetic oligonucleotide
  Antisense strand to SEQ ID NO: 1090482
uaguggcucaugaucaguc

SEQ ID NO: 1090484 - RNA, 19 nt, Artificial Sequence
  Description of Artificial Sequence: Synthetic oligonucleotide
  Sense strand starting at position 2711 of SEQ ID NO: 915578
uuguccauuucuuuguuua

SEQ ID NO: 1090485 - RNA, 19 nt, Artificial Sequence
  Description of Artificial Sequence: Synthetic oligonucleotide
  Antisense strand to SEQ ID NO: 1090484
uaaacaaagaaauggacaa

SEQ ID NO: 1090486 - RNA, 19 nt, Artificial Sequence
  Description of Artificial Sequence: Synthetic oligonucleotide
  Sense strand starting at position 2712 of SEQ ID NO: 915578
uguccauuucuuuguuuaa

SEQ ID NO: 1090487 - RNA, 19 nt, Artificial Sequence
  Description of Artificial Sequence: Synthetic oligonucleotide
  Antisense strand to SEQ ID NO: 1090486
uuaaacaaagaaauggaca

SEQ ID NO: 1090488 - RNA, 19 nt, Artificial Sequence
  Description of Artificial Sequence: Synthetic oligonucleotide
  Sense strand starting at position 2713 of SEQ ID NO: 915578
guccauuucuuuguuuaag

SEQ ID NO: 1090489 - RNA, 19 nt, Artificial Sequence
  Description of Artificial Sequence: Synthetic oligonucleotide
  Antisense strand to SEQ ID NO: 1090488
cuuaaacaaagaaauggac

SEQ ID NO: 1090490 - RNA, 19 nt, Artificial Sequence
  Description of Artificial Sequence: Synthetic oligonucleotide
  Sense strand starting at position 2786 of SEQ ID NO: 915578
ucaugugcucuugaccuaa

SEQ ID NO: 1090491 - RNA, 19 nt, Artificial Sequence
  Description of Artificial Sequence: Synthetic oligonucleotide
  Antisense strand to SEQ ID NO: 1090490
uuaggucaagagcacauga

SEQ ID NO: 1090492 - RNA, 19 nt, Artificial Sequence
  Description of Artificial Sequence: Synthetic oligonucleotide
  Sense strand starting at position 3110 of SEQ ID NO: 915578
cgugcaaguuggguaauuu

SEQ ID NO: 1090493 - RNA, 19 nt, Artificial Sequence
  Description of Artificial Sequence: Synthetic oligonucleotide
  Antisense strand to SEQ ID NO: 1090492
aaauuacccaacuugcacg

SEQ ID NO: 1090494 - RNA, 19 nt, Artificial Sequence
  Description of Artificial Sequence: Synthetic oligonucleotide
  Sense strand starting at position 3219 of SEQ ID NO: 915578
gaggaaucaggucaguguu

SEQ ID NO: 1090495 - RNA, 19 nt, Artificial Sequence
  Description of Artificial Sequence: Synthetic oligonucleotide
  Antisense strand to SEQ ID NO: 1090494
aacacugaccugauuccuc

SEQ ID NO: 1090496 - RNA, 19 nt, Artificial Sequence
  Description of Artificial Sequence: Synthetic oligonucleotide
  Sense strand starting at position 3546 of SEQ ID NO: 915578
uaguuucucgacgacauau

SEQ ID NO: 1090497 - RNA, 19 nt, Artificial Sequence
  Description of Artificial Sequence: Synthetic oligonucleotide
  Antisense strand to SEQ ID NO: 1090496
auaugucgucgagaaacua

SEQ ID NO: 1090498 - RNA, 19 nt, Artificial Sequence
  Description of Artificial Sequence: Synthetic oligonucleotide
  Sense strand starting at position 3910 of SEQ ID NO: 915578
agacuuuagauauguguag

SEQ ID NO: 1090499 - RNA, 19 nt, Artificial Sequence
  Description of Artificial Sequence: Synthetic oligonucleotide
  Antisense strand to SEQ ID NO: 1090498
cuacacauaucuaaagucu

SEQ ID NO: 1090500 - RNA, 19 nt, Artificial Sequence
  Description of Artificial Sequence: Synthetic oligonucleotide
  Sense strand starting at position 28 of SEQ ID NO: 915579
gguuaagugacuugccaau

SEQ ID NO: 1090501 - RNA, 19 nt, Artificial Sequence
  Description of Artificial Sequence: Synthetic oligonucleotide
  Antisense strand to SEQ ID NO: 1090500
auuggcaagucacuuaacc

SEQ ID NO: 1090502 - RNA, 19 nt, Artificial Sequence
  Description of Artificial Sequence: Synthetic oligonucleotide
  Sense strand starting at position 30 of SEQ ID NO: 915579
uuaagugacuugccaaucu

SEQ ID NO: 1090503 - RNA, 19 nt, Artificial Sequence
  Description of Artificial Sequence: Synthetic oligonucleotide
  Antisense strand to SEQ ID NO: 1090502
agauuggcaagucacuuaa

SEQ ID NO: 1090504 - RNA, 19 nt, Artificial Sequence
  Description of Artificial Sequence: Synthetic oligonucleotide
  Sense strand starting at position 53 of SEQ ID NO: 915579
acuguuagcaaguagcaga

SEQ ID NO: 1090505 - RNA, 19 nt, Artificial Sequence
  Description of Artificial Sequence: Synthetic oligonucleotide
  Antisense strand to SEQ ID NO: 1090504
ucugcuacuugcuaacagu

SEQ ID NO: 1090506 - RNA, 19 nt, Artificial Sequence
  Description of Artificial Sequence: Synthetic oligonucleotide
  Sense strand starting at position 163 of SEQ ID NO: 915579
ucuauacugccuuagcaga

SEQ ID NO: 1090507 - RNA, 19 nt, Artificial Sequence
  Description of Artificial Sequence: Synthetic oligonucleotide
  Antisense strand to SEQ ID NO: 1090506
ucugcuaaggcaguauaga

SEQ ID NO: 1090508 - RNA, 19 nt, Artificial Sequence
  Description of Artificial Sequence: Synthetic oligonucleotide
  Sense strand starting at position 177 of SEQ ID NO: 915579
gcagaaugcccauacuuaa

SEQ ID NO: 1090509 - RNA, 19 nt, Artificial Sequence
  Description of Artificial Sequence: Synthetic oligonucleotide
  Antisense strand to SEQ ID NO: 1090508
uuaaguaugggcauucugc

SEQ ID NO: 1090510 - RNA, 19 nt, Artificial Sequence
  Description of Artificial Sequence: Synthetic oligonucleotide
  Sense strand starting at position 188 of SEQ ID NO: 915579
auacuuaauguuugcugau

SEQ ID NO: 1090511 - RNA, 19 nt, Artificial Sequence
  Description of Artificial Sequence: Synthetic oligonucleotide
  Antisense strand to SEQ ID NO: 1090510
aucagcaaacauuaaguau

SEQ ID NO: 1090512 - RNA, 19 nt, Artificial Sequence
  Description of Artificial Sequence: Synthetic oligonucleotide
  Sense strand starting at position 190 of SEQ ID NO: 915579
acuuaauguuugcugauga

SEQ ID NO: 1090513 - RNA, 19 nt, Artificial Sequence
  Description of Artificial Sequence: Synthetic oligonucleotide
  Antisense strand to SEQ ID NO: 1090512
ucaucagcaaacauuaagu

SEQ ID NO: 1090514 - RNA, 19 nt, Artificial Sequence
  Description of Artificial Sequence: Synthetic oligonucleotide
  Sense strand starting at position 329 of SEQ ID NO: 915579
cucacaugucuugaagcaa

SEQ ID NO: 1090515 - RNA, 19 nt, Artificial Sequence
  Description of Artificial Sequence: Synthetic oligonucleotide
  Antisense strand to SEQ ID NO: 1090514
uugcuucaagacaugugag

SEQ ID NO: 1090516 - RNA, 19 nt, Artificial Sequence
  Description of Artificial Sequence: Synthetic oligonucleotide
  Sense strand starting at position 363 of SEQ ID NO: 915579
uccagaauauguuucugua

SEQ ID NO: 1090517 - RNA, 19 nt, Artificial Sequence
  Description of Artificial Sequence: Synthetic oligonucleotide
  Antisense strand to SEQ ID NO: 1090516
uacagaaacauauucugga

SEQ ID NO: 1090518 - RNA, 19 nt, Artificial Sequence
  Description of Artificial Sequence: Synthetic oligonucleotide
  Sense strand starting at position 463 of SEQ ID NO: 915579
ucucuugaggcccaggaau

SEQ ID NO: 1090519 - RNA, 19 nt, Artificial Sequence
  Description of Artificial Sequence: Synthetic oligonucleotide
  Antisense strand to SEQ ID NO: 1090518
auuccugggccucaagaga

SEQ ID NO: 1090520 - RNA, 19 nt, Artificial Sequence
  Description of Artificial Sequence: Synthetic oligonucleotide
  Sense strand starting at position 798 of SEQ ID NO: 915579
auguguuaugcacagggaa

SEQ ID NO: 1090521 - RNA, 19 nt, Artificial Sequence
  Description of Artificial Sequence: Synthetic oligonucleotide
  Antisense strand to SEQ ID NO: 1090520
uucccugugcauaacacau

SEQ ID NO: 1090522 - RNA, 19 nt, Artificial Sequence
  Description of Artificial Sequence: Synthetic oligonucleotide
  Sense strand starting at position 968 of SEQ ID NO: 915579
ucucacuuugcagaugaga

SEQ ID NO: 1090523 - RNA, 19 nt, Artificial Sequence
  Description of Artificial Sequence: Synthetic oligonucleotide
  Antisense strand to SEQ ID NO: 1090522
ucucaucugcaaagugaga

SEQ ID NO: 1090524 - RNA, 19 nt, Artificial Sequence
  Description of Artificial Sequence: Synthetic oligonucleotide
  Sense strand starting at position 1070 of SEQ ID NO: 915579
gcaacuguuucuuccaaga

SEQ ID NO: 1090525 - RNA, 19 nt, Artificial Sequence
  Description of Artificial Sequence: Synthetic oligonucleotide
  Antisense strand to SEQ ID NO: 1090524
ucuuggaagaaacaguugc

SEQ ID NO: 1090526 - RNA, 19 nt, Artificial Sequence
  Description of Artificial Sequence: Synthetic oligonucleotide
  Sense strand starting at position 1083 of SEQ ID NO: 915579
ccaagaugcugugcaaaga

SEQ ID NO: 1090527 - RNA, 19 nt, Artificial Sequence
  Description of Artificial Sequence: Synthetic oligonucleotide
  Antisense strand to SEQ ID NO: 1090526
ucuuugcacagcaucuugg

SEQ ID NO: 1090528 - RNA, 19 nt, Artificial Sequence
  Description of Artificial Sequence: Synthetic oligonucleotide
  Sense strand starting at position 1318 of SEQ ID NO: 915579
gcuucuugucagcccagua

SEQ ID NO: 1090529 - RNA, 19 nt, Artificial Sequence
  Description of Artificial Sequence: Synthetic oligonucleotide
  Antisense strand to SEQ ID NO: 1090528
uacugggcugacaagaagc

SEQ ID NO: 1090530 - RNA, 19 nt, Artificial Sequence
  Description of Artificial Sequence: Synthetic oligonucleotide
  Sense strand starting at position 1360 of SEQ ID NO: 915579
ucaguauucgccuaucaug

SEQ ID NO: 1090531 - RNA, 19 nt, Artificial Sequence
  Description of Artificial Sequence: Synthetic oligonucleotide
  Antisense strand to SEQ ID NO: 1090530
caugauaggcgaauacuga

SEQ ID NO: 1090532 - RNA, 19 nt, Artificial Sequence
  Description of Artificial Sequence: Synthetic oligonucleotide
  Sense strand starting at position 1472 of SEQ ID NO: 915579
ggauacugauucuuuaauc

SEQ ID NO: 1090533 - RNA, 19 nt, Artificial Sequence
  Description of Artificial Sequence: Synthetic oligonucleotide
  Antisense strand to SEQ ID NO: 1090532
gauuaaagaaucaguaucc

SEQ ID NO: 1090534 - RNA, 19 nt, Artificial Sequence
  Description of Artificial Sequence: Synthetic oligonucleotide
  Sense strand starting at position 1667 of SEQ ID NO: 915579
ccagguuugaagugugaug

SEQ ID NO: 1090535 - RNA, 19 nt, Artificial Sequence
  Description of Artificial Sequence: Synthetic oligonucleotide
  Antisense strand to SEQ ID NO: 1090534
caucacacuucaaaccugg

SEQ ID NO: 1090536 - RNA, 19 nt, Artificial Sequence
  Description of Artificial Sequence: Synthetic oligonucleotide
  Sense strand starting at position 1718 of SEQ ID NO: 915579
uugugauaguggucacaca

SEQ ID NO: 1090537 - RNA, 19 nt, Artificial Sequence
  Description of Artificial Sequence: Synthetic oligonucleotide
  Antisense strand to SEQ ID NO: 1090536
ugugugaccacuaucacaa

SEQ ID NO: 1090538 - RNA, 19 nt, Artificial Sequence
  Description of Artificial Sequence: Synthetic oligonucleotide
  Sense strand starting at position 1719 of SEQ ID NO: 915579
ugugauaguggucacacaa

SEQ ID NO: 1090539 - RNA, 19 nt, Artificial Sequence
  Description of Artificial Sequence: Synthetic oligonucleotide
  Antisense strand to SEQ ID NO: 1090538
uugugugaccacuaucaca

SEQ ID NO: 1090540 - RNA, 19 nt, Artificial Sequence
  Description of Artificial Sequence: Synthetic oligonucleotide
  Sense strand starting at position 2317 of SEQ ID NO: 915579
gcaggugcgacugaaacuu

SEQ ID NO: 1090541 - RNA, 19 nt, Artificial Sequence
  Description of Artificial Sequence: Synthetic oligonucleotide
  Antisense strand to SEQ ID NO: 1090540
aaguuucagucgcaccugc

SEQ ID NO: 1090542 - RNA, 19 nt, Artificial Sequence
  Description of Artificial Sequence: Synthetic oligonucleotide
  Sense strand starting at position 2427 of SEQ ID NO: 915579
guggcacuuaccgauuauu

SEQ ID NO: 1090543 - RNA, 19 nt, Artificial Sequence
  Description of Artificial Sequence: Synthetic oligonucleotide
  Antisense strand to SEQ ID NO: 1090542
aauaaucgguaagugccac

SEQ ID NO: 1090544 - RNA, 19 nt, Artificial Sequence
  Description of Artificial Sequence: Synthetic oligonucleotide
  Sense strand starting at position 2430 of SEQ ID NO: 915579
gcacuuaccgauuauucuc

SEQ ID NO: 1090545 - RNA, 19 nt, Artificial Sequence
  Description of Artificial Sequence: Synthetic oligonucleotide
  Antisense strand to SEQ ID NO: 1090544
gagaauaaucgguaagugc

SEQ ID NO: 1090546 - RNA, 19 nt, Artificial Sequence
  Description of Artificial Sequence: Synthetic oligonucleotide
  Sense strand starting at position 2578 of SEQ ID NO: 915579
ccacaacagcccuguuaga

SEQ ID NO: 1090547 - RNA, 19 nt, Artificial Sequence
  Description of Artificial Sequence: Synthetic oligonucleotide
  Antisense strand to SEQ ID NO: 1090546
ucuaacagggcuguugugg

SEQ ID NO: 1090548 - RNA, 19 nt, Artificial Sequence
  Description of Artificial Sequence: Synthetic oligonucleotide
  Sense strand starting at position 2630 of SEQ ID NO: 915579
gauagcauguaucugaacu

SEQ ID NO: 1090549 - RNA, 19 nt, Artificial Sequence
  Description of Artificial Sequence: Synthetic oligonucleotide
  Antisense strand to SEQ ID NO: 1090548
aguucagauacaugcuauc

SEQ ID NO: 1090550 - RNA, 19 nt, Artificial Sequence
  Description of Artificial Sequence: Synthetic oligonucleotide
  Sense strand starting at position 2765 of SEQ ID NO: 915579
auguauauugagcaccaau

SEQ ID NO: 1090551 - RNA, 19 nt, Artificial Sequence
  Description of Artificial Sequence: Synthetic oligonucleotide
  Antisense strand to SEQ ID NO: 1090550
auuggugcucaauauacau

SEQ ID NO: 1090552 - RNA, 19 nt, Artificial Sequence
  Description of Artificial Sequence: Synthetic oligonucleotide
  Sense strand starting at position 2833 of SEQ ID NO: 915579
guggacuacuacuccauga

SEQ ID NO: 1090553 - RNA, 19 nt, Artificial Sequence
  Description of Artificial Sequence: Synthetic oligonucleotide
  Antisense strand to SEQ ID NO: 1090552
ucauggaguaguaguccac

SEQ ID NO: 1090554 - RNA, 19 nt, Artificial Sequence
  Description of Artificial Sequence: Synthetic oligonucleotide
  Sense strand starting at position 2859 of SEQ ID NO: 915579
aucaaauagcaguauugua

SEQ ID NO: 1090555 - RNA, 19 nt, Artificial Sequence
  Description of Artificial Sequence: Synthetic oligonucleotide
  Antisense strand to SEQ ID NO: 1090554
uacaauacugcuauuugau

SEQ ID NO: 1090556 - RNA, 19 nt, Artificial Sequence
  Description of Artificial Sequence: Synthetic oligonucleotide
  Sense strand starting at position 2874 of SEQ ID NO: 915579
uguauuauaccaugcucua

SEQ ID NO: 1090557 - RNA, 19 nt, Artificial Sequence
  Description of Artificial Sequence: Synthetic oligonucleotide
  Antisense strand to SEQ ID NO: 1090556
uagagcaugguauaauaca

SEQ ID NO: 1090558 - RNA, 19 nt, Artificial Sequence
  Description of Artificial Sequence: Synthetic oligonucleotide
  Sense strand starting at position 2887 of SEQ ID NO: 915579
gcucuauuacguuguauuu

SEQ ID NO: 1090559 - RNA, 19 nt, Artificial Sequence
  Description of Artificial Sequence: Synthetic oligonucleotide
  Antisense strand to SEQ ID NO: 1090558
aaauacaacguaauagagc

SEQ ID NO: 1090560 - RNA, 19 nt, Artificial Sequence
  Description of Artificial Sequence: Synthetic oligonucleotide
  Sense strand starting at position 3088 of SEQ ID NO: 915579
cccauaagcgucuaaagaa

SEQ ID NO: 1090561 - RNA, 19 nt, Artificial Sequence
  Description of Artificial Sequence: Synthetic oligonucleotide
  Antisense strand to SEQ ID NO: 1090560
uucuuuagacgcuuauggg

SEQ ID NO: 1090562 - RNA, 19 nt, Artificial Sequence
  Description of Artificial Sequence: Synthetic oligonucleotide
  Sense strand starting at position 3121 of SEQ ID NO: 915579
uugaguuucuuacuaugua

SEQ ID NO: 1090563 - RNA, 19 nt, Artificial Sequence
  Description of Artificial Sequence: Synthetic oligonucleotide
  Antisense strand to SEQ ID NO: 1090562
uacauaguaagaaacucaa

SEQ ID NO: 1090564 - RNA, 19 nt, Artificial Sequence
  Description of Artificial Sequence: Synthetic oligonucleotide
  Sense strand starting at position 3144 of SEQ ID NO: 915579
gcacuauucuagucaccag

SEQ ID NO: 1090565 - RNA, 19 nt, Artificial Sequence
  Description of Artificial Sequence: Synthetic oligonucleotide
  Antisense strand to SEQ ID NO: 1090564
cuggugacuagaauagugc

SEQ ID NO: 1090566 - RNA, 19 nt, Artificial Sequence
  Description of Artificial Sequence: Synthetic oligonucleotide
  Sense strand starting at position 3151 of SEQ ID NO: 915579
ucuagucaccagggauaua

SEQ ID NO: 1090567 - RNA, 19 nt, Artificial Sequence
  Description of Artificial Sequence: Synthetic oligonucleotide
  Antisense strand to SEQ ID NO: 1090566
uauaucccuggugacuaga

SEQ ID NO: 1090568 - RNA, 19 nt, Artificial Sequence
  Description of Artificial Sequence: Synthetic oligonucleotide
  Sense strand starting at position 3553 of SEQ ID NO: 915579
ucauuaccucugugaagca

SEQ ID NO: 1090569 - RNA, 19 nt, Artificial Sequence
  Description of Artificial Sequence: Synthetic oligonucleotide
  Antisense strand to SEQ ID NO: 1090568
ugcuucacagagguaauga

SEQ ID NO: 1090570 - RNA, 19 nt, Artificial Sequence
  Description of Artificial Sequence: Synthetic oligonucleotide
  Sense strand starting at position 3566 of SEQ ID NO: 915579
gaagcaauccguggacacu

SEQ ID NO: 1090571 - RNA, 19 nt, Artificial Sequence
  Description of Artificial Sequence: Synthetic oligonucleotide
  Antisense strand to SEQ ID NO: 1090570
aguguccacggauugcuuc

SEQ ID NO: 1090572 - RNA, 19 nt, Artificial Sequence
  Description of Artificial Sequence: Synthetic oligonucleotide
  Sense strand starting at position 3567 of SEQ ID NO: 915579
aagcaauccguggacacua

SEQ ID NO: 1090573 - RNA, 19 nt, Artificial Sequence
  Description of Artificial Sequence: Synthetic oligonucleotide
  Antisense strand to SEQ ID NO: 1090572
uaguguccacggauugcuu

SEQ ID NO: 1090574 - RNA, 19 nt, Artificial Sequence
  Description of Artificial Sequence: Synthetic oligonucleotide
  Sense strand starting at position 3575 of SEQ ID NO: 915579
cguggacacuagucagauc

SEQ ID NO: 1090575 - RNA, 19 nt, Artificial Sequence
  Description of Artificial Sequence: Synthetic oligonucleotide
  Antisense strand to SEQ ID NO: 1090574
gaucugacuaguguccacg

SEQ ID NO: 1090576 - RNA, 19 nt, Artificial Sequence
  Description of Artificial Sequence: Synthetic oligonucleotide
  Sense strand starting at position 3894 of SEQ ID NO: 915579
aggauuucgccguguugga

SEQ ID NO: 1090577 - RNA, 19 nt, Artificial Sequence
  Description of Artificial Sequence: Synthetic oligonucleotide
  Antisense strand to SEQ ID NO: 1090576
uccaacacggcgaaauccu

SEQ ID NO: 1090578 - RNA, 19 nt, Artificial Sequence
  Description of Artificial Sequence: Synthetic oligonucleotide
  Sense strand starting at position 3909 of SEQ ID NO: 915579
uggacagccuagucuugaa

SEQ ID NO: 1090579 - RNA, 19 nt, Artificial Sequence
  Description of Artificial Sequence: Synthetic oligonucleotide
  Antisense strand to SEQ ID NO: 1090578
uucaagacuaggcugucca

SEQ ID NO: 1090580 - RNA, 19 nt, Artificial Sequence
  Description of Artificial Sequence: Synthetic oligonucleotide
  Sense strand starting at position 18 of SEQ ID NO: 915580
uuaguuauucucugaggag

SEQ ID NO: 1090581 - RNA, 19 nt, Artificial Sequence
  Description of Artificial Sequence: Synthetic oligonucleotide
  Antisense strand to SEQ ID NO: 1090580
cuccucagagaauaacuaa

SEQ ID NO: 1090582 - RNA, 19 nt, Artificial Sequence
  Description of Artificial Sequence: Synthetic oligonucleotide
  Sense strand starting at position 19 of SEQ ID NO: 915580
uaguuauucucugaggagg

SEQ ID NO: 1090583 - RNA, 19 nt, Artificial Sequence
  Description of Artificial Sequence: Synthetic oligonucleotide
  Antisense strand to SEQ ID NO: 1090582
ccuccucagagaauaacua

SEQ ID NO: 1090584 - RNA, 19 nt, Artificial Sequence
  Description of Artificial Sequence: Synthetic oligonucleotide
  Sense strand starting at position 21 of SEQ ID NO: 915580
guuauucucugaggaggag

SEQ ID NO: 1090585 - RNA, 19 nt, Artificial Sequence
  Description of Artificial Sequence: Synthetic oligonucleotide
  Antisense strand to SEQ ID NO: 1090584
cuccuccucagagaauaac

SEQ ID NO: 1090586 - RNA, 19 nt, Artificial Sequence
  Description of Artificial Sequence: Synthetic oligonucleotide
  Sense strand starting at position 106 of SEQ ID NO: 915580
ggugggaaguggugugcaa

SEQ ID NO: 1090587 - RNA, 19 nt, Artificial Sequence
  Description of Artificial Sequence: Synthetic oligonucleotide
  Antisense strand to SEQ ID NO: 1090586
uugcacaccacuucccacc

SEQ ID NO: 1090588 - RNA, 19 nt, Artificial Sequence
  Description of Artificial Sequence: Synthetic oligonucleotide
  Sense strand starting at position 110 of SEQ ID NO: 915580
ggaaguggugugcaaagau

SEQ ID NO: 1090589 - RNA, 19 nt, Artificial Sequence
  Description of Artificial Sequence: Synthetic oligonucleotide
  Antisense strand to SEQ ID NO: 1090588
aucuuugcacaccacuucc

SEQ ID NO: 1090590 - RNA, 19 nt, Artificial Sequence
  Description of Artificial Sequence: Synthetic oligonucleotide
  Sense strand starting at position 343 of SEQ ID NO: 915580
ggagaagaguggcaucaga

SEQ ID NO: 1090591 - RNA, 19 nt, Artificial Sequence
  Description of Artificial Sequence: Synthetic oligonucleotide
  Antisense strand to SEQ ID NO: 1090590
ucugaugccacucuucucc

SEQ ID NO: 1090592 - RNA, 19 nt, Artificial Sequence
  Description of Artificial Sequence: Synthetic oligonucleotide
  Sense strand starting at position 537 of SEQ ID NO: 915580
ggauuauagguaugacuca

SEQ ID NO: 1090593 - RNA, 19 nt, Artificial Sequence
  Description of Artificial Sequence: Synthetic oligonucleotide
  Antisense strand to SEQ ID NO: 1090592
ugagucauaccuauaaucc

SEQ ID NO: 1090594 - RNA, 19 nt, Artificial Sequence
  Description of Artificial Sequence: Synthetic oligonucleotide
  Sense strand starting at position 571 of SEQ ID NO: 915580
aauccaguuucugagagga

SEQ ID NO: 1090595 - RNA, 19 nt, Artificial Sequence
  Description of Artificial Sequence: Synthetic oligonucleotide
  Antisense strand to SEQ ID NO: 1090594
uccucucagaaacuggauu

SEQ ID NO: 1090596 - RNA, 19 nt, Artificial Sequence
  Description of Artificial Sequence: Synthetic oligonucleotide
  Sense strand starting at position 640 of SEQ ID NO: 915580
ggucucagaugucuguaca

SEQ ID NO: 1090597 - RNA, 19 nt, Artificial Sequence
  Description of Artificial Sequence: Synthetic oligonucleotide
  Antisense strand to SEQ ID NO: 1090596
uguacagacaucugagacc

SEQ ID NO: 1090598 - RNA, 19 nt, Artificial Sequence
  Description of Artificial Sequence: Synthetic oligonucleotide
  Sense strand starting at position 641 of SEQ ID NO: 915580
gucucagaugucuguacag

SEQ ID NO: 1090599 - RNA, 19 nt, Artificial Sequence
  Description of Artificial Sequence: Synthetic oligonucleotide
  Antisense strand to SEQ ID NO: 1090598
cuguacagacaucugagac

SEQ ID NO: 1090600 - RNA, 19 nt, Artificial Sequence
  Description of Artificial Sequence: Synthetic oligonucleotide
  Sense strand starting at position 948 of SEQ ID NO: 915580
ccgugaugcucacaaauca

SEQ ID NO: 1090601 - RNA, 19 nt, Artificial Sequence
  Description of Artificial Sequence: Synthetic oligonucleotide
  Antisense strand to SEQ ID NO: 1090600
ugauuugugagcaucacgg

SEQ ID NO: 1090602 - RNA, 19 nt, Artificial Sequence
  Description of Artificial Sequence: Synthetic oligonucleotide
  Sense strand starting at position 1194 of SEQ ID NO: 915580
gcuuaagggccuuaucuua

SEQ ID NO: 1090603 - RNA, 19 nt, Artificial Sequence
  Description of Artificial Sequence: Synthetic oligonucleotide
  Antisense strand to SEQ ID NO: 1090602
uaagauaaggcccuuaagc

SEQ ID NO: 1090604 - RNA, 19 nt, Artificial Sequence
  Description of Artificial Sequence: Synthetic oligonucleotide
  Sense strand starting at position 1220 of SEQ ID NO: 915580
cugguaaggagguaaguuu

SEQ ID NO: 1090605 - RNA, 19 nt, Artificial Sequence
  Description of Artificial Sequence: Synthetic oligonucleotide
  Antisense strand to SEQ ID NO: 1090604
aaacuuaccuccuuaccag

SEQ ID NO: 1090606 - RNA, 19 nt, Artificial Sequence
  Description of Artificial Sequence: Synthetic oligonucleotide
  Sense strand starting at position 1277 of SEQ ID NO: 915580
ggccuaacagccgguuaaa

SEQ ID NO: 1090607 - RNA, 19 nt, Artificial Sequence
  Description of Artificial Sequence: Synthetic oligonucleotide
  Antisense strand to SEQ ID NO: 1090606
uuuaaccggcuguuaggcc

SEQ ID NO: 1090608 - RNA, 19 nt, Artificial Sequence
  Description of Artificial Sequence: Synthetic oligonucleotide
  Sense strand starting at position 2015 of SEQ ID NO: 915580
ccgcgagugcgcuuauaua

SEQ ID NO: 1090609 - RNA, 19 nt, Artificial Sequence
  Description of Artificial Sequence: Synthetic oligonucleotide
  Antisense strand to SEQ ID NO: 1090608
uauauaagcgcacucgcgg

SEQ ID NO: 1090610 - RNA, 19 nt, Artificial Sequence
  Description of Artificial Sequence: Synthetic oligonucleotide
  Sense strand starting at position 2355 of SEQ ID NO: 915580
cauugauugugccuugcua

SEQ ID NO: 1090611 - RNA, 19 nt, Artificial Sequence
  Description of Artificial Sequence: Synthetic oligonucleotide
  Antisense strand to SEQ ID NO: 1090610
uagcaaggcacaaucaaug

SEQ ID NO: 1090612 - RNA, 19 nt, Artificial Sequence
  Description of Artificial Sequence: Synthetic oligonucleotide
  Sense strand starting at position 2527 of SEQ ID NO: 915580
cugagucucucaguuucuu

SEQ ID NO: 1090613 - RNA, 19 nt, Artificial Sequence
  Description of Artificial Sequence: Synthetic oligonucleotide
  Antisense strand to SEQ ID NO: 1090612
aagaaacugagagacucag

SEQ ID NO: 1090614 - RNA, 19 nt, Artificial Sequence
  Description of Artificial Sequence: Synthetic oligonucleotide
  Sense strand starting at position 2812 of SEQ ID NO: 915580
uacugaggagucugugaug

SEQ ID NO: 1090615 - RNA, 19 nt, Artificial Sequence
  Description of Artificial Sequence: Synthetic oligonucleotide
  Antisense strand to SEQ ID NO: 1090614
caucacagacuccucagua

SEQ ID NO: 1090616 - RNA, 19 nt, Artificial Sequence
  Description of Artificial Sequence: Synthetic oligonucleotide
  Sense strand starting at position 2815 of SEQ ID NO: 915580
ugaggagucugugauggaa

SEQ ID NO: 1090617 - RNA, 19 nt, Artificial Sequence
  Description of Artificial Sequence: Synthetic oligonucleotide
  Antisense strand to SEQ ID NO: 1090616
uuccaucacagacuccuca

SEQ ID NO: 1090618 - RNA, 19 nt, Artificial Sequence
  Description of Artificial Sequence: Synthetic oligonucleotide
  Sense strand starting at position 2817 of SEQ ID NO: 915580
aggagucugugauggaauc

SEQ ID NO: 1090619 - RNA, 19 nt, Artificial Sequence
  Description of Artificial Sequence: Synthetic oligonucleotide
  Antisense strand to SEQ ID NO: 1090618
gauuccaucacagacuccu

SEQ ID NO: 1090620 - RNA, 19 nt, Artificial Sequence
  Description of Artificial Sequence: Synthetic oligonucleotide
  Sense strand starting at position 2818 of SEQ ID NO: 915580
ggagucugugauggaauca

SEQ ID NO: 1090621 - RNA, 19 nt, Artificial Sequence
  Description of Artificial Sequence: Synthetic oligonucleotide
  Antisense strand to SEQ ID NO: 1090620
ugauuccaucacagacucc

SEQ ID NO: 1090622 - RNA, 19 nt, Artificial Sequence
  Description of Artificial Sequence: Synthetic oligonucleotide
  Sense strand starting at position 2839 of SEQ ID NO: 915580
ucacguguuccucacagca

SEQ ID NO: 1090623 - RNA, 19 nt, Artificial Sequence
  Description of Artificial Sequence: Synthetic oligonucleotide
  Antisense strand to SEQ ID NO: 1090622
ugcugugaggaacacguga

SEQ ID NO: 1090624 - RNA, 19 nt, Artificial Sequence
  Description of Artificial Sequence: Synthetic oligonucleotide
  Sense strand starting at position 2852 of SEQ ID NO: 915580
acagcaagcccgugaaguu

SEQ ID NO: 1090625 - RNA, 19 nt, Artificial Sequence
  Description of Artificial Sequence: Synthetic oligonucleotide
  Antisense strand to SEQ ID NO: 1090624
aacuucacgggcuugcugu

SEQ ID NO: 1090626 - RNA, 19 nt, Artificial Sequence
  Description of Artificial Sequence: Synthetic oligonucleotide
  Sense strand starting at position 2859 of SEQ ID NO: 915580
gcccgugaaguugaugaga

SEQ ID NO: 1090627 - RNA, 19 nt, Artificial Sequence
  Description of Artificial Sequence: Synthetic oligonucleotide
  Antisense strand to SEQ ID NO: 1090626
ucucaucaacuucacgggc

SEQ ID NO: 1090628 - RNA, 19 nt, Artificial Sequence
  Description of Artificial Sequence: Synthetic oligonucleotide
  Sense strand starting at position 2861 of SEQ ID NO: 915580
ccgugaaguugaugagaau

SEQ ID NO: 1090629 - RNA, 19 nt, Artificial Sequence
  Description of Artificial Sequence: Synthetic oligonucleotide
  Antisense strand to SEQ ID NO: 1090628
auucucaucaacuucacgg

SEQ ID NO: 1090630 - RNA, 19 nt, Artificial Sequence
  Description of Artificial Sequence: Synthetic oligonucleotide
  Sense strand starting at position 2862 of SEQ ID NO: 915580
cgugaaguugaugagaaug

SEQ ID NO: 1090631 - RNA, 19 nt, Artificial Sequence
  Description of Artificial Sequence: Synthetic oligonucleotide
  Antisense strand to SEQ ID NO: 1090630
cauucucaucaacuucacg

SEQ ID NO: 1090632 - RNA, 19 nt, Artificial Sequence
  Description of Artificial Sequence: Synthetic oligonucleotide
  Sense strand starting at position 2864 of SEQ ID NO: 915580
ugaaguugaugagaaugau

SEQ ID NO: 1090633 - RNA, 19 nt, Artificial Sequence
  Description of Artificial Sequence: Synthetic oligonucleotide
  Antisense strand to SEQ ID NO: 1090632
aucauucucaucaacuuca

SEQ ID NO: 1090634 - RNA, 19 nt, Artificial Sequence
  Description of Artificial Sequence: Synthetic oligonucleotide
  Sense strand starting at position 2870 of SEQ ID NO: 915580
ugaugagaaugaugagaag

SEQ ID NO: 1090635 - RNA, 19 nt, Artificial Sequence
  Description of Artificial Sequence: Synthetic oligonucleotide
  Antisense strand to SEQ ID NO: 1090634
cuucucaucauucucauca

SEQ ID NO: 1090636 - RNA, 19 nt, Artificial Sequence
  Description of Artificial Sequence: Synthetic oligonucleotide
  Sense strand starting at position 2971 of SEQ ID NO: 915580
ucagcugguaaguagagau

SEQ ID NO: 1090637 - RNA, 19 nt, Artificial Sequence
  Description of Artificial Sequence: Synthetic oligonucleotide
  Antisense strand to SEQ ID NO: 1090636
aucucuacuuaccagcuga

SEQ ID NO: 1090638 - RNA, 19 nt, Artificial Sequence
  Description of Artificial Sequence: Synthetic oligonucleotide
  Sense strand starting at position 3071 of SEQ ID NO: 915580
cagagaagguguuccauga

SEQ ID NO: 1090639 - RNA, 19 nt, Artificial Sequence
  Description of Artificial Sequence: Synthetic oligonucleotide
  Antisense strand to SEQ ID NO: 1090638
ucauggaacaccuucucug

SEQ ID NO: 1090640 - RNA, 19 nt, Artificial Sequence
  Description of Artificial Sequence: Synthetic oligonucleotide
  Sense strand starting at position 3075 of SEQ ID NO: 915580
gaagguguuccaugaaacc

SEQ ID NO: 1090641 - RNA, 19 nt, Artificial Sequence
  Description of Artificial Sequence: Synthetic oligonucleotide
  Antisense strand to SEQ ID NO: 1090640
gguuucauggaacaccuuc

SEQ ID NO: 1090642 - RNA, 19 nt, Artificial Sequence
  Description of Artificial Sequence: Synthetic oligonucleotide
  Sense strand starting at position 3092 of SEQ ID NO: 915580
ccgaaugaaucuccuagac

SEQ ID NO: 1090643 - RNA, 19 nt, Artificial Sequence
  Description of Artificial Sequence: Synthetic oligonucleotide
  Antisense strand to SEQ ID NO: 1090642
gucuaggagauucauucgg

SEQ ID NO: 1090644 - RNA, 19 nt, Artificial Sequence
  Description of Artificial Sequence: Synthetic oligonucleotide
  Sense strand starting at position 3141 of SEQ ID NO: 915580
cccaguaauuaagguuaga

SEQ ID NO: 1090645 - RNA, 19 nt, Artificial Sequence
  Description of Artificial Sequence: Synthetic oligonucleotide
  Antisense strand to SEQ ID NO: 1090644
ucuaaccuuaauuacuggg

SEQ ID NO: 1090646 - RNA, 19 nt, Artificial Sequence
  Description of Artificial Sequence: Synthetic oligonucleotide
  Sense strand starting at position 3146 of SEQ ID NO: 915580
uaauuaagguuagagauca

SEQ ID NO: 1090647 - RNA, 19 nt, Artificial Sequence
  Description of Artificial Sequence: Synthetic oligonucleotide
  Antisense strand to SEQ ID NO: 1090646
ugaucucuaaccuuaauua

SEQ ID NO: 1090648 - RNA, 19 nt, Artificial Sequence
  Description of Artificial Sequence: Synthetic oligonucleotide
  Sense strand starting at position 180 of SEQ ID NO: 915581
cagcguguggcccaggauu

SEQ ID NO: 1090649 - RNA, 19 nt, Artificial Sequence
  Description of Artificial Sequence: Synthetic oligonucleotide
  Antisense strand to SEQ ID NO: 1090648
aauccugggccacacgcug

SEQ ID NO: 1090650 - RNA, 19 nt, Artificial Sequence
  Description of Artificial Sequence: Synthetic oligonucleotide
  Sense strand starting at position 406 of SEQ ID NO: 915581
uggcuuucuugaggcagaa

SEQ ID NO: 1090651 - RNA, 19 nt, Artificial Sequence
  Description of Artificial Sequence: Synthetic oligonucleotide
  Antisense strand to SEQ ID NO: 1090650
uucugccucaagaaagcca

SEQ ID NO: 1090652 - RNA, 19 nt, Artificial Sequence
  Description of Artificial Sequence: Synthetic oligonucleotide
  Sense strand starting at position 408 of SEQ ID NO: 915581
gcuuucuugaggcagaauu

SEQ ID NO: 1090653 - RNA, 19 nt, Artificial Sequence
  Description of Artificial Sequence: Synthetic oligonucleotide
  Antisense strand to SEQ ID NO: 1090652
aauucugccucaagaaagc

SEQ ID NO: 1090654 - RNA, 19 nt, Artificial Sequence
  Description of Artificial Sequence: Synthetic oligonucleotide
  Sense strand starting at position 421 of SEQ ID NO: 915581
agaauuggcucuuucugag

SEQ ID NO: 1090655 - RNA, 19 nt, Artificial Sequence
  Description of Artificial Sequence: Synthetic oligonucleotide
  Antisense strand to SEQ ID NO: 1090654
cucagaaagagccaauucu

SEQ ID NO: 1090656 - RNA, 19 nt, Artificial Sequence
  Description of Artificial Sequence: Synthetic oligonucleotide
  Sense strand starting at position 424 of SEQ ID NO: 915581
auuggcucuuucugagaca

SEQ ID NO: 1090657 - RNA, 19 nt, Artificial Sequence
  Description of Artificial Sequence: Synthetic oligonucleotide
  Antisense strand to SEQ ID NO: 1090656
ugucucagaaagagccaau

SEQ ID NO: 1090658 - RNA, 19 nt, Artificial Sequence
  Description of Artificial Sequence: Synthetic oligonucleotide
  Sense strand starting at position 425 of SEQ ID NO: 915581
uuggcucuuucugagacaa

SEQ ID NO: 1090659 - RNA, 19 nt, Artificial Sequence
  Description of Artificial Sequence: Synthetic oligonucleotide
  Antisense strand to SEQ ID NO: 1090658
uugucucagaaagagccaa

SEQ ID NO: 1090660 - RNA, 19 nt, Artificial Sequence
  Description of Artificial Sequence: Synthetic oligonucleotide
  Sense strand starting at position 598 of SEQ ID NO: 915581
uggguuuccagguaguaca

SEQ ID NO: 1090661 - RNA, 19 nt, Artificial Sequence
  Description of Artificial Sequence: Synthetic oligonucleotide
  Antisense strand to SEQ ID NO: 1090660
uguacuaccuggaaaccca

SEQ ID NO: 1090662 - RNA, 19 nt, Artificial Sequence
  Description of Artificial Sequence: Synthetic oligonucleotide
  Sense strand starting at position 648 of SEQ ID NO: 915581
ucggguuggugugauguca

SEQ ID NO: 1090663 - RNA, 19 nt, Artificial Sequence
  Description of Artificial Sequence: Synthetic oligonucleotide
  Antisense strand to SEQ ID NO: 1090662
ugacaucacaccaacccga

SEQ ID NO: 1090664 - RNA, 19 nt, Artificial Sequence
  Description of Artificial Sequence: Synthetic oligonucleotide
  Sense strand starting at position 833 of SEQ ID NO: 915581
ggagaaggguccuuuccga

SEQ ID NO: 1090665 - RNA, 19 nt, Artificial Sequence
  Description of Artificial Sequence: Synthetic oligonucleotide
  Antisense strand to SEQ ID NO: 1090664
ucggaaaggacccuucucc

SEQ ID NO: 1090666 - RNA, 19 nt, Artificial Sequence
  Description of Artificial Sequence: Synthetic oligonucleotide
  Sense strand starting at position 881 of SEQ ID NO: 915581
ugcaacugucacugagagu

SEQ ID NO: 1090667 - RNA, 19 nt, Artificial Sequence
  Description of Artificial Sequence: Synthetic oligonucleotide
  Antisense strand to SEQ ID NO: 1090666
acucucagugacaguugca

SEQ ID NO: 1090668 - RNA, 19 nt, Artificial Sequence
  Description of Artificial Sequence: Synthetic oligonucleotide
  Sense strand starting at position 882 of SEQ ID NO: 915581
gcaacugucacugagagug

SEQ ID NO: 1090669 - RNA, 19 nt, Artificial Sequence
  Description of Artificial Sequence: Synthetic oligonucleotide
  Antisense strand to SEQ ID NO: 1090668
cacucucagugacaguugc

SEQ ID NO: 1090670 - RNA, 19 nt, Artificial Sequence
  Description of Artificial Sequence: Synthetic oligonucleotide
  Sense strand starting at position 1206 of SEQ ID NO: 915581
ugacccuuuggucaacaau

SEQ ID NO: 1090671 - RNA, 19 nt, Artificial Sequence
  Description of Artificial Sequence: Synthetic oligonucleotide
  Antisense strand to SEQ ID NO: 1090670
auuguugaccaaaggguca

SEQ ID NO: 1090672 - RNA, 19 nt, Artificial Sequence
  Description of Artificial Sequence: Synthetic oligonucleotide
  Sense strand starting at position 1309 of SEQ ID NO: 915581
ggccaagacuucugcccau

SEQ ID NO: 1090673 - RNA, 19 nt, Artificial Sequence
  Description of Artificial Sequence: Synthetic oligonucleotide
  Antisense strand to SEQ ID NO: 1090672
augggcagaagucuuggcc

SEQ ID NO: 1090674 - RNA, 19 nt, Artificial Sequence
  Description of Artificial Sequence: Synthetic oligonucleotide
  Sense strand starting at position 1473 of SEQ ID NO: 915581
ccgagcccugucuauaaau

SEQ ID NO: 1090675 - RNA, 19 nt, Artificial Sequence
  Description of Artificial Sequence: Synthetic oligonucleotide
  Antisense strand to SEQ ID NO: 1090674
auuuauagacagggcucgg

SEQ ID NO: 1090676 - RNA, 19 nt, Artificial Sequence
  Description of Artificial Sequence: Synthetic oligonucleotide
  Sense strand starting at position 2023 of SEQ ID NO: 915581
ccaacccguuugcauaaau

SEQ ID NO: 1090677 - RNA, 19 nt, Artificial Sequence
  Description of Artificial Sequence: Synthetic oligonucleotide
  Antisense strand to SEQ ID NO: 1090676
auuuaugcaaacggguugg

SEQ ID NO: 1090678 - RNA, 19 nt, Artificial Sequence
  Description of Artificial Sequence: Synthetic oligonucleotide
  Sense strand starting at position 2034 of SEQ ID NO: 915581
gcauaaaucucuugcgcua

SEQ ID NO: 1090679 - RNA, 19 nt, Artificial Sequence
  Description of Artificial Sequence: Synthetic oligonucleotide
  Antisense strand to SEQ ID NO: 1090678
uagcgcaagagauuuaugc

SEQ ID NO: 1090680 - RNA, 19 nt, Artificial Sequence
  Description of Artificial Sequence: Synthetic oligonucleotide
  Sense strand starting at position 2036 of SEQ ID NO: 915581
auaaaucucuugcgcuaca

SEQ ID NO: 1090681 - RNA, 19 nt, Artificial Sequence
  Description of Artificial Sequence: Synthetic oligonucleotide
  Antisense strand to SEQ ID NO: 1090680
uguagcgcaagagauuuau

SEQ ID NO: 1090682 - RNA, 19 nt, Artificial Sequence
  Description of Artificial Sequence: Synthetic oligonucleotide
  Sense strand starting at position 2358 of SEQ ID NO: 915581
gggugagggcucugaucua

SEQ ID NO: 1090683 - RNA, 19 nt, Artificial Sequence
  Description of Artificial Sequence: Synthetic oligonucleotide
  Antisense strand to SEQ ID NO: 1090682
uagaucagagcccucaccc

SEQ ID NO: 1090684 - RNA, 19 nt, Artificial Sequence
  Description of Artificial Sequence: Synthetic oligonucleotide
  Sense strand starting at position 2455 of SEQ ID NO: 915581
gguguagggucuucagcau

SEQ ID NO: 1090685 - RNA, 19 nt, Artificial Sequence
  Description of Artificial Sequence: Synthetic oligonucleotide
  Antisense strand to SEQ ID NO: 1090684
augcugaagacccuacacc

SEQ ID NO: 1090686 - RNA, 19 nt, Artificial Sequence
  Description of Artificial Sequence: Synthetic oligonucleotide
  Sense strand starting at position 2634 of SEQ ID NO: 915581
cuuggcaaugccugaauau

SEQ ID NO: 1090687 - RNA, 19 nt, Artificial Sequence
  Description of Artificial Sequence: Synthetic oligonucleotide
  Antisense strand to SEQ ID NO: 1090686
auauucaggcauugccaag

SEQ ID NO: 1090688 - RNA, 19 nt, Artificial Sequence
  Description of Artificial Sequence: Synthetic oligonucleotide
  Sense strand starting at position 2635 of SEQ ID NO: 915581
uuggcaaugccugaauauc

SEQ ID NO: 1090689 - RNA, 19 nt, Artificial Sequence
  Description of Artificial Sequence: Synthetic oligonucleotide
  Antisense strand to SEQ ID NO: 1090688
gauauucaggcauugccaa

SEQ ID NO: 1090690 - RNA, 19 nt, Artificial Sequence
  Description of Artificial Sequence: Synthetic oligonucleotide
  Sense strand starting at position 2715 of SEQ ID NO: 915581
gcaucuauuugucugucua

SEQ ID NO: 1090691 - RNA, 19 nt, Artificial Sequence
  Description of Artificial Sequence: Synthetic oligonucleotide
  Antisense strand to SEQ ID NO: 1090690
uagacagacaaauagaugc

SEQ ID NO: 1090692 - RNA, 19 nt, Artificial Sequence
  Description of Artificial Sequence: Synthetic oligonucleotide
  Sense strand starting at position 2717 of SEQ ID NO: 915581
aucuauuugucugucuauu

SEQ ID NO: 1090693 - RNA, 19 nt, Artificial Sequence
  Description of Artificial Sequence: Synthetic oligonucleotide
  Antisense strand to SEQ ID NO: 1090692
aauagacagacaaauagau

SEQ ID NO: 1090694 - RNA, 19 nt, Artificial Sequence
  Description of Artificial Sequence: Synthetic oligonucleotide
  Sense strand starting at position 2727 of SEQ ID NO: 915581
cugucuauuuguccaucca

SEQ ID NO: 1090695 - RNA, 19 nt, Artificial Sequence
  Description of Artificial Sequence: Synthetic oligonucleotide
  Antisense strand to SEQ ID NO: 1090694
uggauggacaaauagacag

SEQ ID NO: 1090696 - RNA, 19 nt, Artificial Sequence
  Description of Artificial Sequence: Synthetic oligonucleotide
  Sense strand starting at position 2794 of SEQ ID NO: 915581
uccaacuguccguuuguuu

SEQ ID NO: 1090697 - RNA, 19 nt, Artificial Sequence
  Description of Artificial Sequence: Synthetic oligonucleotide
  Antisense strand to SEQ ID NO: 1090696
aaacaaacggacaguugga

SEQ ID NO: 1090698 - RNA, 19 nt, Artificial Sequence
  Description of Artificial Sequence: Synthetic oligonucleotide
  Sense strand starting at position 2801 of SEQ ID NO: 915581
guccguuuguuuguucauu

SEQ ID NO: 1090699 - RNA, 19 nt, Artificial Sequence
  Description of Artificial Sequence: Synthetic oligonucleotide
  Antisense strand to SEQ ID NO: 1090698
aaugaacaaacaaacggac

SEQ ID NO: 1090700 - RNA, 19 nt, Artificial Sequence
  Description of Artificial Sequence: Synthetic oligonucleotide
  Sense strand starting at position 2907 of SEQ ID NO: 915581
cugcuaucaguccaucagu

SEQ ID NO: 1090701 - RNA, 19 nt, Artificial Sequence
  Description of Artificial Sequence: Synthetic oligonucleotide
  Antisense strand to SEQ ID NO: 1090700
acugauggacugauagcag

SEQ ID NO: 1090702 - RNA, 19 nt, Artificial Sequence
  Description of Artificial Sequence: Synthetic oligonucleotide
  Sense strand starting at position 2915 of SEQ ID NO: 915581
aguccaucaguccacaauu

SEQ ID NO: 1090703 - RNA, 19 nt, Artificial Sequence
  Description of Artificial Sequence: Synthetic oligonucleotide
  Antisense strand to SEQ ID NO: 1090702
aauuguggacugauggacu

SEQ ID NO: 1090704 - RNA, 19 nt, Artificial Sequence
  Description of Artificial Sequence: Synthetic oligonucleotide
  Sense strand starting at position 3225 of SEQ ID NO: 915581
uucugcguuguuucgcaua

SEQ ID NO: 1090705 - RNA, 19 nt, Artificial Sequence
  Description of Artificial Sequence: Synthetic oligonucleotide
  Antisense strand to SEQ ID NO: 1090704
uaugcgaaacaacgcagaa

SEQ ID NO: 1090706 - RNA, 19 nt, Artificial Sequence
  Description of Artificial Sequence: Synthetic oligonucleotide
  Sense strand starting at position 3228 of SEQ ID NO: 915581
ugcguuguuucgcauauga

SEQ ID NO: 1090707 - RNA, 19 nt, Artificial Sequence
  Description of Artificial Sequence: Synthetic oligonucleotide
  Antisense strand to SEQ ID NO: 1090706
ucauaugcgaaacaacgca

SEQ ID NO: 1090708 - RNA, 19 nt, Artificial Sequence
  Description of Artificial Sequence: Synthetic oligonucleotide
  Sense strand starting at position 3230 of SEQ ID NO: 915581
cguuguuucgcauaugaua

SEQ ID NO: 1090709 - RNA, 19 nt, Artificial Sequence
  Description of Artificial Sequence: Synthetic oligonucleotide
  Antisense strand to SEQ ID NO: 1090708
uaucauaugcgaaacaacg

SEQ ID NO: 1090710 - RNA, 19 nt, Artificial Sequence
  Description of Artificial Sequence: Synthetic oligonucleotide
  Sense strand starting at position 3851 of SEQ ID NO: 915581
gcaucuucccaauguugag

SEQ ID NO: 1090711 - RNA, 19 nt, Artificial Sequence
  Description of Artificial Sequence: Synthetic oligonucleotide
  Antisense strand to SEQ ID NO: 1090710
cucaacauugggaagaugc

SEQ ID NO: 1090712 - RNA, 19 nt, Artificial Sequence
  Description of Artificial Sequence: Synthetic oligonucleotide
  Sense strand starting at position 3863 of SEQ ID NO: 915581
uguugaguuccaggcucua

SEQ ID NO: 1090713 - RNA, 19 nt, Artificial Sequence
  Description of Artificial Sequence: Synthetic oligonucleotide
  Antisense strand to SEQ ID NO: 1090712
uagagccuggaacucaaca

SEQ ID NO: 1090714 - RNA, 19 nt, Artificial Sequence
  Description of Artificial Sequence: Synthetic oligonucleotide
  Sense strand starting at position 3880 of SEQ ID NO: 915581
uaagcugagcgcugggaaa

SEQ ID NO: 1090715 - RNA, 19 nt, Artificial Sequence
  Description of Artificial Sequence: Synthetic oligonucleotide
  Antisense strand to SEQ ID NO: 1090714
uuucccagcgcucagcuua

SEQ ID NO: 1090716 - RNA, 19 nt, Artificial Sequence
  Description of Artificial Sequence: Synthetic oligonucleotide
  Sense strand starting at position 3930 of SEQ ID NO: 915581
cagagaguuccugaucuuu

SEQ ID NO: 1090717 - RNA, 19 nt, Artificial Sequence
  Description of Artificial Sequence: Synthetic oligonucleotide
  Antisense strand to SEQ ID NO: 1090716
aaagaucaggaacucucug

SEQ ID NO: 1090718 - RNA, 19 nt, Artificial Sequence
  Description of Artificial Sequence: Synthetic oligonucleotide
  Sense strand starting at position 3961 of SEQ ID NO: 915581
agggaugaguagaggcauu

SEQ ID NO: 1090719 - RNA, 19 nt, Artificial Sequence
  Description of Artificial Sequence: Synthetic oligonucleotide
  Antisense strand to SEQ ID NO: 1090718
aaugccucuacucaucccu

SEQ ID NO: 1090720 - RNA, 19 nt, Artificial Sequence
  Description of Artificial Sequence: Synthetic oligonucleotide
  Sense strand starting at position 26 of SEQ ID NO: 915582
gucagacuguuccucgcaa

SEQ ID NO: 1090721 - RNA, 19 nt, Artificial Sequence
  Description of Artificial Sequence: Synthetic oligonucleotide
  Antisense strand to SEQ ID NO: 1090720
uugcgaggaacagucugac

SEQ ID NO: 1090722 - RNA, 19 nt, Artificial Sequence
  Description of Artificial Sequence: Synthetic oligonucleotide
  Sense strand starting at position 27 of SEQ ID NO: 915582
ucagacuguuccucgcaaa

SEQ ID NO: 1090723 - RNA, 19 nt, Artificial Sequence
  Description of Artificial Sequence: Synthetic oligonucleotide
  Antisense strand to SEQ ID NO: 1090722
uuugcgaggaacagucuga

SEQ ID NO: 1090724 - RNA, 19 nt, Artificial Sequence
  Description of Artificial Sequence: Synthetic oligonucleotide
  Sense strand starting at position 28 of SEQ ID NO: 915582
cagacuguuccucgcaaag

SEQ ID NO: 1090725 - RNA, 19 nt, Artificial Sequence
  Description of Artificial Sequence: Synthetic oligonucleotide
  Antisense strand to SEQ ID NO: 1090724
cuuugcgaggaacagucug

SEQ ID NO: 1090726 - RNA, 19 nt, Artificial Sequence
  Description of Artificial Sequence: Synthetic oligonucleotide
  Sense strand starting at position 818 of SEQ ID NO: 915582
cugggaaccuguucuggaa

SEQ ID NO: 1090727 - RNA, 19 nt, Artificial Sequence
  Description of Artificial Sequence: Synthetic oligonucleotide
  Antisense strand to SEQ ID NO: 1090726
uuccagaacagguucccag

SEQ ID NO: 1090728 - RNA, 19 nt, Artificial Sequence
  Description of Artificial Sequence: Synthetic oligonucleotide
  Sense strand starting at position 845 of SEQ ID NO: 915582
uacucuaucucgucuggga

SEQ ID NO: 1090729 - RNA, 19 nt, Artificial Sequence
  Description of Artificial Sequence: Synthetic oligonucleotide
  Antisense strand to SEQ ID NO: 1090728
ucccagacgagauagagua

SEQ ID NO: 1090730 - RNA, 19 nt, Artificial Sequence
  Description of Artificial Sequence: Synthetic oligonucleotide
  Sense strand starting at position 895 of SEQ ID NO: 915582
ggacccuuucgaggagcuu

SEQ ID NO: 1090731 - RNA, 19 nt, Artificial Sequence
  Description of Artificial Sequence: Synthetic oligonucleotide
  Antisense strand to SEQ ID NO: 1090730
aagcuccucgaaagggucc

SEQ ID NO: 1090732 - RNA, 19 nt, Artificial Sequence
  Description of Artificial Sequence: Synthetic oligonucleotide
  Sense strand starting at position 896 of SEQ ID NO: 915582
gacccuuucgaggagcuuu

SEQ ID NO: 1090733 - RNA, 19 nt, Artificial Sequence
  Description of Artificial Sequence: Synthetic oligonucleotide
  Antisense strand to SEQ ID NO: 1090732
aaagcuccucgaaaggguc

SEQ ID NO: 1090734 - RNA, 19 nt, Artificial Sequence
  Description of Artificial Sequence: Synthetic oligonucleotide
  Sense strand starting at position 970 of SEQ ID NO: 915582
gucccuucuccugaaggga

SEQ ID NO: 1090735 - RNA, 19 nt, Artificial Sequence
  Description of Artificial Sequence: Synthetic oligonucleotide
  Antisense strand to SEQ ID NO: 1090734
ucccuucaggagaagggac

SEQ ID NO: 1090736 - RNA, 19 nt, Artificial Sequence
  Description of Artificial Sequence: Synthetic oligonucleotide
  Sense strand starting at position 1023 of SEQ ID NO: 915582
agggccagucuuugagaau

SEQ ID NO: 1090737 - RNA, 19 nt, Artificial Sequence
  Description of Artificial Sequence: Synthetic oligonucleotide
  Antisense strand to SEQ ID NO: 1090736
auucucaaagacuggcccu

SEQ ID NO: 1090738 - RNA, 19 nt, Artificial Sequence
  Description of Artificial Sequence: Synthetic oligonucleotide
  Sense strand starting at position 2209 of SEQ ID NO: 915582
gggaaagccugagaaauaa

SEQ ID NO: 1090739 - RNA, 19 nt, Artificial Sequence
  Description of Artificial Sequence: Synthetic oligonucleotide
  Antisense strand to SEQ ID NO: 1090738
uuauuucucaggcuuuccc

SEQ ID NO: 1090740 - RNA, 19 nt, Artificial Sequence
  Description of Artificial Sequence: Synthetic oligonucleotide
  Sense strand starting at position 2330 of SEQ ID NO: 915582
uuucgcucacuuuauagau

SEQ ID NO: 1090741 - RNA, 19 nt, Artificial Sequence
  Description of Artificial Sequence: Synthetic oligonucleotide
  Antisense strand to SEQ ID NO: 1090740
aucuauaaagugagcgaaa

SEQ ID NO: 1090742 - RNA, 19 nt, Artificial Sequence
  Description of Artificial Sequence: Synthetic oligonucleotide
  Sense strand starting at position 2478 of SEQ ID NO: 915582
gcgcuuagggcccacgaua

SEQ ID NO: 1090743 - RNA, 19 nt, Artificial Sequence
  Description of Artificial Sequence: Synthetic oligonucleotide
  Antisense strand to SEQ ID NO: 1090742
uaucgugggcccuaagcgc

SEQ ID NO: 1090744 - RNA, 19 nt, Artificial Sequence
  Description of Artificial Sequence: Synthetic oligonucleotide
  Sense strand starting at position 2614 of SEQ ID NO: 915582
auaugcuugacuuggagga

SEQ ID NO: 1090745 - RNA, 19 nt, Artificial Sequence
  Description of Artificial Sequence: Synthetic oligonucleotide
  Antisense strand to SEQ ID NO: 1090744
uccuccaagucaagcauau

SEQ ID NO: 1090746 - RNA, 19 nt, Artificial Sequence
  Description of Artificial Sequence: Synthetic oligonucleotide
  Sense strand starting at position 2615 of SEQ ID NO: 915582
uaugcuugacuuggaggaa

SEQ ID NO: 1090747 - RNA, 19 nt, Artificial Sequence
  Description of Artificial Sequence: Synthetic oligonucleotide
  Antisense strand to SEQ ID NO: 1090746
uuccuccaagucaagcaua

SEQ ID NO: 1090748 - RNA, 19 nt, Artificial Sequence
  Description of Artificial Sequence: Synthetic oligonucleotide
  Sense strand starting at position 2616 of SEQ ID NO: 915582
augcuugacuuggaggaaa

SEQ ID NO: 1090749 - RNA, 19 nt, Artificial Sequence
  Description of Artificial Sequence: Synthetic oligonucleotide
  Antisense strand to SEQ ID NO: 1090748
uuuccuccaagucaagcau

SEQ ID NO: 1090750 - RNA, 19 nt, Artificial Sequence
  Description of Artificial Sequence: Synthetic oligonucleotide
  Sense strand starting at position 2618 of SEQ ID NO: 915582
gcuugacuuggaggaaaga

SEQ ID NO: 1090751 - RNA, 19 nt, Artificial Sequence
  Description of Artificial Sequence: Synthetic oligonucleotide
  Antisense strand to SEQ ID NO: 1090750
ucuuuccuccaagucaagc

SEQ ID NO: 1090752 - RNA, 19 nt, Artificial Sequence
  Description of Artificial Sequence: Synthetic oligonucleotide
  Sense strand starting at position 2709 of SEQ ID NO: 915582
caaugaagagccuguguuu

SEQ ID NO: 1090753 - RNA, 19 nt, Artificial Sequence
  Description of Artificial Sequence: Synthetic oligonucleotide
  Antisense strand to SEQ ID NO: 1090752
aaacacaggcucuucauug

SEQ ID NO: 1090754 - RNA, 19 nt, Artificial Sequence
  Description of Artificial Sequence: Synthetic oligonucleotide
  Sense strand starting at position 2821 of SEQ ID NO: 915582
gcaagaaucucucccagug

SEQ ID NO: 1090755 - RNA, 19 nt, Artificial Sequence
  Description of Artificial Sequence: Synthetic oligonucleotide
  Antisense strand to SEQ ID NO: 1090754
cacugggagagauucuugc

SEQ ID NO: 1090756 - RNA, 19 nt, Artificial Sequence
  Description of Artificial Sequence: Synthetic oligonucleotide
  Sense strand starting at position 2833 of SEQ ID NO: 915582
cccagugucucucugggaa

SEQ ID NO: 1090757 - RNA, 19 nt, Artificial Sequence
  Description of Artificial Sequence: Synthetic oligonucleotide
  Antisense strand to SEQ ID NO: 1090756
uucccagagagacacuggg

SEQ ID NO: 1090758 - RNA, 19 nt, Artificial Sequence
  Description of Artificial Sequence: Synthetic oligonucleotide
  Sense strand starting at position 2887 of SEQ ID NO: 915582
cauugugaagcuugggcua

SEQ ID NO: 1090759 - RNA, 19 nt, Artificial Sequence
  Description of Artificial Sequence: Synthetic oligonucleotide
  Antisense strand to SEQ ID NO: 1090758
uagcccaagcuucacaaug

SEQ ID NO: 1090760 - RNA, 19 nt, Artificial Sequence
  Description of Artificial Sequence: Synthetic oligonucleotide
  Sense strand starting at position 2890 of SEQ ID NO: 915582
ugugaagcuugggcuaguu

SEQ ID NO: 1090761 - RNA, 19 nt, Artificial Sequence
  Description of Artificial Sequence: Synthetic oligonucleotide
  Antisense strand to SEQ ID NO: 1090760
aacuagcccaagcuucaca

SEQ ID NO: 1090762 - RNA, 19 nt, Artificial Sequence
  Description of Artificial Sequence: Synthetic oligonucleotide
  Sense strand starting at position 2892 of SEQ ID NO: 915582
ugaagcuugggcuaguuau

SEQ ID NO: 1090763 - RNA, 19 nt, Artificial Sequence
  Description of Artificial Sequence: Synthetic oligonucleotide
  Antisense strand to SEQ ID NO: 1090762
auaacuagcccaagcuuca

SEQ ID NO: 1090764 - RNA, 19 nt, Artificial Sequence
  Description of Artificial Sequence: Synthetic oligonucleotide
  Sense strand starting at position 2926 of SEQ ID NO: 915582
uguuuccugcucuggagaa

SEQ ID NO: 1090765 - RNA, 19 nt, Artificial Sequence
  Description of Artificial Sequence: Synthetic oligonucleotide
  Antisense strand to SEQ ID NO: 1090764
uucuccagagcaggaaaca

SEQ ID NO: 1090766 - RNA, 19 nt, Artificial Sequence
  Description of Artificial Sequence: Synthetic oligonucleotide
  Sense strand starting at position 2928 of SEQ ID NO: 915582
uuuccugcucuggagaaca

SEQ ID NO: 1090767 - RNA, 19 nt, Artificial Sequence
  Description of Artificial Sequence: Synthetic oligonucleotide
  Antisense strand to SEQ ID NO: 1090766
uguucuccagagcaggaaa

SEQ ID NO: 1090768 - RNA, 19 nt, Artificial Sequence
  Description of Artificial Sequence: Synthetic oligonucleotide
  Sense strand starting at position 2992 of SEQ ID NO: 915582
ggugauaugcuagaaguaa

SEQ ID NO: 1090769 - RNA, 19 nt, Artificial Sequence
  Description of Artificial Sequence: Synthetic oligonucleotide
  Antisense strand to SEQ ID NO: 1090768
uuacuucuagcauaucacc

SEQ ID NO: 1090770 - RNA, 19 nt, Artificial Sequence
  Description of Artificial Sequence: Synthetic oligonucleotide
  Sense strand starting at position 3000 of SEQ ID NO: 915582
gcuagaaguaaaugauaug

SEQ ID NO: 1090771 - RNA, 19 nt, Artificial Sequence
  Description of Artificial Sequence: Synthetic oligonucleotide
  Antisense strand to SEQ ID NO: 1090770
cauaucauuuacuucuagc

SEQ ID NO: 1090772 - RNA, 19 nt, Artificial Sequence
  Description of Artificial Sequence: Synthetic oligonucleotide
  Sense strand starting at position 3487 of SEQ ID NO: 915582
ggcucagauccaugucuga

SEQ ID NO: 1090773 - RNA, 19 nt, Artificial Sequence
  Description of Artificial Sequence: Synthetic oligonucleotide
  Antisense strand to SEQ ID NO: 1090772
ucagacauggaucugagcc

SEQ ID NO: 1090774 - RNA, 19 nt, Artificial Sequence
  Description of Artificial Sequence: Synthetic oligonucleotide
  Sense strand starting at position 3511 of SEQ ID NO: 915582
gagggaauugucugcaucu

SEQ ID NO: 1090775 - RNA, 19 nt, Artificial Sequence
  Description of Artificial Sequence: Synthetic oligonucleotide
  Antisense strand to SEQ ID NO: 1090774
agaugcagacaauucccuc

SEQ ID NO: 1090776 - RNA, 19 nt, Artificial Sequence
  Description of Artificial Sequence: Synthetic oligonucleotide
  Sense strand starting at position 3512 of SEQ ID NO: 915582
agggaauugucugcaucuu

SEQ ID NO: 1090777 - RNA, 19 nt, Artificial Sequence
  Description of Artificial Sequence: Synthetic oligonucleotide
  Antisense strand to SEQ ID NO: 1090776
aagaugcagacaauucccu

SEQ ID NO: 1090778 - RNA, 19 nt, Artificial Sequence
  Description of Artificial Sequence: Synthetic oligonucleotide
  Sense strand starting at position 3513 of SEQ ID NO: 915582
gggaauugucugcaucuuc

SEQ ID NO: 1090779 - RNA, 19 nt, Artificial Sequence
  Description of Artificial Sequence: Synthetic oligonucleotide
  Antisense strand to SEQ ID NO: 1090778
gaagaugcagacaauuccc

SEQ ID NO: 1090780 - RNA, 19 nt, Artificial Sequence
  Description of Artificial Sequence: Synthetic oligonucleotide
  Sense strand starting at position 3601 of SEQ ID NO: 915582
aaguguagauuuggagcua

SEQ ID NO: 1090781 - RNA, 19 nt, Artificial Sequence
  Description of Artificial Sequence: Synthetic oligonucleotide
  Antisense strand to SEQ ID NO: 1090780
uagcuccaaaucuacacuu

SEQ ID NO: 1090782 - RNA, 19 nt, Artificial Sequence
  Description of Artificial Sequence: Synthetic oligonucleotide
  Sense strand starting at position 3614 of SEQ ID NO: 915582
gagcuagacucugugcuga

SEQ ID NO: 1090783 - RNA, 19 nt, Artificial Sequence
  Description of Artificial Sequence: Synthetic oligonucleotide
  Antisense strand to SEQ ID NO: 1090782
ucagcacagagucuagcuc

SEQ ID NO: 1090784 - RNA, 19 nt, Artificial Sequence
  Description of Artificial Sequence: Synthetic oligonucleotide
  Sense strand starting at position 3725 of SEQ ID NO: 915582
ugcucagugcuuggauaca

SEQ ID NO: 1090785 - RNA, 19 nt, Artificial Sequence
  Description of Artificial Sequence: Synthetic oligonucleotide
  Antisense strand to SEQ ID NO: 1090784
uguauccaagcacugagca

SEQ ID NO: 1090786 - RNA, 19 nt, Artificial Sequence
  Description of Artificial Sequence: Synthetic oligonucleotide
  Sense strand starting at position 3752 of SEQ ID NO: 915582
auauguuacuugccuuuga

SEQ ID NO: 1090787 - RNA, 19 nt, Artificial Sequence
  Description of Artificial Sequence: Synthetic oligonucleotide
  Antisense strand to SEQ ID NO: 1090786
ucaaaggcaaguaacauau

SEQ ID NO: 1090788 - RNA, 19 nt, Artificial Sequence
  Description of Artificial Sequence: Synthetic oligonucleotide
  Sense strand starting at position 3756 of SEQ ID NO: 915582
guuacuugccuuugaggau

SEQ ID NO: 1090789 - RNA, 19 nt, Artificial Sequence
  Description of Artificial Sequence: Synthetic oligonucleotide
  Antisense strand to SEQ ID NO: 1090788
auccucaaaggcaaguaac

SEQ ID NO: 1090790 - RNA, 19 nt, Artificial Sequence
  Description of Artificial Sequence: Synthetic oligonucleotide
  Sense strand starting at position 3837 of SEQ ID NO: 915582
aauugugauguaugcuaca

SEQ ID NO: 1090791 - RNA, 19 nt, Artificial Sequence
  Description of Artificial Sequence: Synthetic oligonucleotide
  Antisense strand to SEQ ID NO: 1090790
uguagcauacaucacaauu

SEQ ID NO: 1090792 - RNA, 19 nt, Artificial Sequence
  Description of Artificial Sequence: Synthetic oligonucleotide
  Sense strand starting at position 3842 of SEQ ID NO: 915582
ugauguaugcuacaaacua

SEQ ID NO: 1090793 - RNA, 19 nt, Artificial Sequence
  Description of Artificial Sequence: Synthetic oligonucleotide
  Antisense strand to SEQ ID NO: 1090792
uaguuuguagcauacauca

SEQ ID NO: 1090794 - RNA, 19 nt, Artificial Sequence
  Description of Artificial Sequence: Synthetic oligonucleotide
  Sense strand starting at position 3876 of SEQ ID NO: 915582
gaaaguguaccugaucuua

SEQ ID NO: 1090795 - RNA, 19 nt, Artificial Sequence
  Description of Artificial Sequence: Synthetic oligonucleotide
  Antisense strand to SEQ ID NO: 1090794
uaagaucagguacacuuuc

SEQ ID NO: 1090796 - RNA, 19 nt, Artificial Sequence
  Description of Artificial Sequence: Synthetic oligonucleotide
  Sense strand starting at position 3969 of SEQ ID NO: 915582
agcucaaaucugugcucuu

SEQ ID NO: 1090797 - RNA, 19 nt, Artificial Sequence
  Description of Artificial Sequence: Synthetic oligonucleotide
  Antisense strand to SEQ ID NO: 1090796
aagagcacagauuugagcu

SEQ ID NO: 1090798 - RNA, 19 nt, Artificial Sequence
  Description of Artificial Sequence: Synthetic oligonucleotide
  Sense strand starting at position 3972 of SEQ ID NO: 915582
ucaaaucugugcucuugaa

SEQ ID NO: 1090799 - RNA, 19 nt, Artificial Sequence
  Description of Artificial Sequence: Synthetic oligonucleotide
  Antisense strand to SEQ ID NO: 1090798
uucaagagcacagauuuga

SEQ ID NO: 1090800 - RNA, 19 nt, Artificial Sequence
  Description of Artificial Sequence: Synthetic oligonucleotide
  Sense strand starting at position 63 of SEQ ID NO: 915583
gacacagugcuaggcaaau

SEQ ID NO: 1090801 - RNA, 19 nt, Artificial Sequence
  Description of Artificial Sequence: Synthetic oligonucleotide
  Antisense strand to SEQ ID NO: 1090800
auuugccuagcacuguguc

SEQ ID NO: 1090802 - RNA, 19 nt, Artificial Sequence
  Description of Artificial Sequence: Synthetic oligonucleotide
  Sense strand starting at position 113 of SEQ ID NO: 915583
aguucagugguggagauaa

SEQ ID NO: 1090803 - RNA, 19 nt, Artificial Sequence
  Description of Artificial Sequence: Synthetic oligonucleotide
  Antisense strand to SEQ ID NO: 1090802
uuaucuccaccacugaacu

SEQ ID NO: 1090804 - RNA, 19 nt, Artificial Sequence
  Description of Artificial Sequence: Synthetic oligonucleotide
  Sense strand starting at position 262 of SEQ ID NO: 915583
gugagaguccugggaggca

SEQ ID NO: 1090805 - RNA, 19 nt, Artificial Sequence
  Description of Artificial Sequence: Synthetic oligonucleotide
  Antisense strand to SEQ ID NO: 1090804
ugccucccaggacucucac

SEQ ID NO: 1090806 - RNA, 19 nt, Artificial Sequence
  Description of Artificial Sequence: Synthetic oligonucleotide
  Sense strand starting at position 271 of SEQ ID NO: 915583
cugggaggcauguguccua

SEQ ID NO: 1090807 - RNA, 19 nt, Artificial Sequence
  Description of Artificial Sequence: Synthetic oligonucleotide
  Antisense strand to SEQ ID NO: 1090806
uaggacacaugccucccag

SEQ ID NO: 1090808 - RNA, 19 nt, Artificial Sequence
  Description of Artificial Sequence: Synthetic oligonucleotide
  Sense strand starting at position 320 of SEQ ID NO: 915583
gcauuugucaugugugcaa

SEQ ID NO: 1090809 - RNA, 19 nt, Artificial Sequence
  Description of Artificial Sequence: Synthetic oligonucleotide
  Antisense strand to SEQ ID NO: 1090808
uugcacacaugacaaaugc

SEQ ID NO: 1090810 - RNA, 19 nt, Artificial Sequence
  Description of Artificial Sequence: Synthetic oligonucleotide
  Sense strand starting at position 322 of SEQ ID NO: 915583
auuugucaugugugcaaac

SEQ ID NO: 1090811 - RNA, 19 nt, Artificial Sequence
  Description of Artificial Sequence: Synthetic oligonucleotide
  Antisense strand to SEQ ID NO: 1090810
guuugcacacaugacaaau

SEQ ID NO: 1090812 - RNA, 19 nt, Artificial Sequence
  Description of Artificial Sequence: Synthetic oligonucleotide
  Sense strand starting at position 324 of SEQ ID NO: 915583
uugucaugugugcaaacau

SEQ ID NO: 1090813 - RNA, 19 nt, Artificial Sequence
  Description of Artificial Sequence: Synthetic oligonucleotide
  Antisense strand to SEQ ID NO: 1090812
auguuugcacacaugacaa

SEQ ID NO: 1090814 - RNA, 19 nt, Artificial Sequence
  Description of Artificial Sequence: Synthetic oligonucleotide
  Sense strand starting at position 351 of SEQ ID NO: 915583
gcacauguuguacacacau

SEQ ID NO: 1090815 - RNA, 19 nt, Artificial Sequence
  Description of Artificial Sequence: Synthetic oligonucleotide
  Antisense strand to SEQ ID NO: 1090814
auguguguacaacaugugc

SEQ ID NO: 1090816 - RNA, 19 nt, Artificial Sequence
  Description of Artificial Sequence: Synthetic oligonucleotide
  Sense strand starting at position 377 of SEQ ID NO: 915583
augacaguucuagaggcua

SEQ ID NO: 1090817 - RNA, 19 nt, Artificial Sequence
  Description of Artificial Sequence: Synthetic oligonucleotide
  Antisense strand to SEQ ID NO: 1090816
uagccucuagaacugucau

SEQ ID NO: 1090818 - RNA, 19 nt, Artificial Sequence
  Description of Artificial Sequence: Synthetic oligonucleotide
  Sense strand starting at position 408 of SEQ ID NO: 915583
accagagugccaggaacau

SEQ ID NO: 1090819 - RNA, 19 nt, Artificial Sequence
  Description of Artificial Sequence: Synthetic oligonucleotide
  Antisense strand to SEQ ID NO: 1090818
auguuccuggcacucuggu

SEQ ID NO: 1090820 - RNA, 19 nt, Artificial Sequence
  Description of Artificial Sequence: Synthetic oligonucleotide
  Sense strand starting at position 675 of SEQ ID NO: 915583
aacuuauugugucuaggga

SEQ ID NO: 1090821 - RNA, 19 nt, Artificial Sequence
  Description of Artificial Sequence: Synthetic oligonucleotide
  Antisense strand to SEQ ID NO: 1090820
ucccuagacacaauaaguu

SEQ ID NO: 1090822 - RNA, 19 nt, Artificial Sequence
  Description of Artificial Sequence: Synthetic oligonucleotide
  Sense strand starting at position 775 of SEQ ID NO: 915583
uggagucucucuucuucua

SEQ ID NO: 1090823 - RNA, 19 nt, Artificial Sequence
  Description of Artificial Sequence: Synthetic oligonucleotide
  Antisense strand to SEQ ID NO: 1090822
uagaagaagagagacucca

SEQ ID NO: 1090824 - RNA, 19 nt, Artificial Sequence
  Description of Artificial Sequence: Synthetic oligonucleotide
  Sense strand starting at position 822 of SEQ ID NO: 915583
accaccucucggugagagu

SEQ ID NO: 1090825 - RNA, 19 nt, Artificial Sequence
  Description of Artificial Sequence: Synthetic oligonucleotide
  Antisense strand to SEQ ID NO: 1090824
acucucaccgagagguggu

SEQ ID NO: 1090826 - RNA, 19 nt, Artificial Sequence
  Description of Artificial Sequence: Synthetic oligonucleotide
  Sense strand starting at position 823 of SEQ ID NO: 915583
ccaccucucggugagagua

SEQ ID NO: 1090827 - RNA, 19 nt, Artificial Sequence
  Description of Artificial Sequence: Synthetic oligonucleotide
  Antisense strand to SEQ ID NO: 1090826
uacucucaccgagaggugg

SEQ ID NO: 1090828 - RNA, 19 nt, Artificial Sequence
  Description of Artificial Sequence: Synthetic oligonucleotide
  Sense strand starting at position 1011 of SEQ ID NO: 915583
ucuuguugccaugacaacu

SEQ ID NO: 1090829 - RNA, 19 nt, Artificial Sequence
  Description of Artificial Sequence: Synthetic oligonucleotide
  Antisense strand to SEQ ID NO: 1090828
aguugucauggcaacaaga

SEQ ID NO: 1090830 - RNA, 19 nt, Artificial Sequence
  Description of Artificial Sequence: Synthetic oligonucleotide
  Sense strand starting at position 1059 of SEQ ID NO: 915583
acgaguuuccgcucagagc

SEQ ID NO: 1090831 - RNA, 19 nt, Artificial Sequence
  Description of Artificial Sequence: Synthetic oligonucleotide
  Antisense strand to SEQ ID NO: 1090830
gcucugagcggaaacucgu

SEQ ID NO: 1090832 - RNA, 19 nt, Artificial Sequence
  Description of Artificial Sequence: Synthetic oligonucleotide
  Sense strand starting at position 1376 of SEQ ID NO: 915583
gagagugccgaaggaugaa

SEQ ID NO: 1090833 - RNA, 19 nt, Artificial Sequence
  Description of Artificial Sequence: Synthetic oligonucleotide
  Antisense strand to SEQ ID NO: 1090832
uucauccuucggcacucuc

SEQ ID NO: 1090834 - RNA, 19 nt, Artificial Sequence
  Description of Artificial Sequence: Synthetic oligonucleotide
  Sense strand starting at position 1460 of SEQ ID NO: 915583
gccagugaagcgucucuau

SEQ ID NO: 1090835 - RNA, 19 nt, Artificial Sequence
  Description of Artificial Sequence: Synthetic oligonucleotide
  Antisense strand to SEQ ID NO: 1090834
auagagacgcuucacuggc

SEQ ID NO: 1090836 - RNA, 19 nt, Artificial Sequence
  Description of Artificial Sequence: Synthetic oligonucleotide
  Sense strand starting at position 1557 of SEQ ID NO: 915583
gauagagugcucugggucu

SEQ ID NO: 1090837 - RNA, 19 nt, Artificial Sequence
  Description of Artificial Sequence: Synthetic oligonucleotide
  Antisense strand to SEQ ID NO: 1090836
agacccagagcacucuauc

SEQ ID NO: 1090838 - RNA, 19 nt, Artificial Sequence
  Description of Artificial Sequence: Synthetic oligonucleotide
  Sense strand starting at position 1594 of SEQ ID NO: 915583
ucagucuucccauaaaguu

SEQ ID NO: 1090839 - RNA, 19 nt, Artificial Sequence
  Description of Artificial Sequence: Synthetic oligonucleotide
  Antisense strand to SEQ ID NO: 1090838
aacuuuaugggaagacuga

SEQ ID NO: 1090840 - RNA, 19 nt, Artificial Sequence
  Description of Artificial Sequence: Synthetic oligonucleotide
  Sense strand starting at position 1693 of SEQ ID NO: 915583
gccuuaaugcgagaccucu

SEQ ID NO: 1090841 - RNA, 19 nt, Artificial Sequence
  Description of Artificial Sequence: Synthetic oligonucleotide
  Antisense strand to SEQ ID NO: 1090840
agaggucucgcauuaaggc

SEQ ID NO: 1090842 - RNA, 19 nt, Artificial Sequence
  Description of Artificial Sequence: Synthetic oligonucleotide
  Sense strand starting at position 1869 of SEQ ID NO: 915583
aggagaauguggccaguga

SEQ ID NO: 1090843 - RNA, 19 nt, Artificial Sequence
  Description of Artificial Sequence: Synthetic oligonucleotide
  Antisense strand to SEQ ID NO: 1090842
ucacuggccacauucuccu

SEQ ID NO: 1090844 - RNA, 19 nt, Artificial Sequence
  Description of Artificial Sequence: Synthetic oligonucleotide
  Sense strand starting at position 2577 of SEQ ID NO: 915583
gcaccuuagagcgagacua

SEQ ID NO: 1090845 - RNA, 19 nt, Artificial Sequence
  Description of Artificial Sequence: Synthetic oligonucleotide
  Antisense strand to SEQ ID NO: 1090844
uagucucgcucuaaggugc

SEQ ID NO: 1090846 - RNA, 19 nt, Artificial Sequence
  Description of Artificial Sequence: Synthetic oligonucleotide
  Sense strand starting at position 2579 of SEQ ID NO: 915583
accuuagagcgagacuagu

SEQ ID NO: 1090847 - RNA, 19 nt, Artificial Sequence
  Description of Artificial Sequence: Synthetic oligonucleotide
  Antisense strand to SEQ ID NO: 1090846
acuagucucgcucuaaggu

SEQ ID NO: 1090848 - RNA, 19 nt, Artificial Sequence
  Description of Artificial Sequence: Synthetic oligonucleotide
  Sense strand starting at position 2613 of SEQ ID NO: 915583
ccuagauucugcucuugag

SEQ ID NO: 1090849 - RNA, 19 nt, Artificial Sequence
  Description of Artificial Sequence: Synthetic oligonucleotide
  Antisense strand to SEQ ID NO: 1090848
cucaagagcagaaucuagg

SEQ ID NO: 1090850 - RNA, 19 nt, Artificial Sequence
  Description of Artificial Sequence: Synthetic oligonucleotide
  Sense strand starting at position 2617 of SEQ ID NO: 915583
gauucugcucuugaguuaa

SEQ ID NO: 1090851 - RNA, 19 nt, Artificial Sequence
  Description of Artificial Sequence: Synthetic oligonucleotide
  Antisense strand to SEQ ID NO: 1090850
uuaacucaagagcagaauc

SEQ ID NO: 1090852 - RNA, 19 nt, Artificial Sequence
  Description of Artificial Sequence: Synthetic oligonucleotide
  Sense strand starting at position 2619 of SEQ ID NO: 915583
uucugcucuugaguuaaga

SEQ ID NO: 1090853 - RNA, 19 nt, Artificial Sequence
  Description of Artificial Sequence: Synthetic oligonucleotide
  Antisense strand to SEQ ID NO: 1090852
ucuuaacucaagagcagaa

SEQ ID NO: 1090854 - RNA, 19 nt, Artificial Sequence
  Description of Artificial Sequence: Synthetic oligonucleotide
  Sense strand starting at position 2662 of SEQ ID NO: 915583
cugacacacuguuuagcaa

SEQ ID NO: 1090855 - RNA, 19 nt, Artificial Sequence
  Description of Artificial Sequence: Synthetic oligonucleotide
  Antisense strand to SEQ ID NO: 1090854
uugcuaaacagugugucag

SEQ ID NO: 1090856 - RNA, 19 nt, Artificial Sequence
  Description of Artificial Sequence: Synthetic oligonucleotide
  Sense strand starting at position 2730 of SEQ ID NO: 915583
uccuuugguuugccacaga

SEQ ID NO: 1090857 - RNA, 19 nt, Artificial Sequence
  Description of Artificial Sequence: Synthetic oligonucleotide
  Antisense strand to SEQ ID NO: 1090856
ucuguggcaaaccaaagga

SEQ ID NO: 1090858 - RNA, 19 nt, Artificial Sequence
  Description of Artificial Sequence: Synthetic oligonucleotide
  Sense strand starting at position 2733 of SEQ ID NO: 915583
uuugguuugccacagagaa

SEQ ID NO: 1090859 - RNA, 19 nt, Artificial Sequence
  Description of Artificial Sequence: Synthetic oligonucleotide
  Antisense strand to SEQ ID NO: 1090858
uucucuguggcaaaccaaa

SEQ ID NO: 1090860 - RNA, 19 nt, Artificial Sequence
  Description of Artificial Sequence: Synthetic oligonucleotide
  Sense strand starting at position 2735 of SEQ ID NO: 915583
ugguuugccacagagaaug

SEQ ID NO: 1090861 - RNA, 19 nt, Artificial Sequence
  Description of Artificial Sequence: Synthetic oligonucleotide
  Antisense strand to SEQ ID NO: 1090860
cauucucuguggcaaacca

SEQ ID NO: 1090862 - RNA, 19 nt, Artificial Sequence
  Description of Artificial Sequence: Synthetic oligonucleotide
  Sense strand starting at position 2745 of SEQ ID NO: 915583
cagagaauguuaguaagua

SEQ ID NO: 1090863 - RNA, 19 nt, Artificial Sequence
  Description of Artificial Sequence: Synthetic oligonucleotide
  Antisense strand to SEQ ID NO: 1090862
uacuuacuaacauucucug

SEQ ID NO: 1090864 - RNA, 19 nt, Artificial Sequence
  Description of Artificial Sequence: Synthetic oligonucleotide
  Sense strand starting at position 2749 of SEQ ID NO: 915583
gaauguuaguaaguacuca

SEQ ID NO: 1090865 - RNA, 19 nt, Artificial Sequence
  Description of Artificial Sequence: Synthetic oligonucleotide
  Antisense strand to SEQ ID NO: 1090864
ugaguacuuacuaacauuc

SEQ ID NO: 1090866 - RNA, 19 nt, Artificial Sequence
  Description of Artificial Sequence: Synthetic oligonucleotide
  Sense strand starting at position 2766 of SEQ ID NO: 915583
caauaaaugucggcuguga

SEQ ID NO: 1090867 - RNA, 19 nt, Artificial Sequence
  Description of Artificial Sequence: Synthetic oligonucleotide
  Antisense strand to SEQ ID NO: 1090866
ucacagccgacauuuauug

SEQ ID NO: 1090868 - RNA, 19 nt, Artificial Sequence
  Description of Artificial Sequence: Synthetic oligonucleotide
  Sense strand starting at position 2780 of SEQ ID NO: 915583
ugugacauaucccugccau

SEQ ID NO: 1090869 - RNA, 19 nt, Artificial Sequence
  Description of Artificial Sequence: Synthetic oligonucleotide
  Antisense strand to SEQ ID NO: 1090868
auggcagggauaugucaca

SEQ ID NO: 1090870 - RNA, 19 nt, Artificial Sequence
  Description of Artificial Sequence: Synthetic oligonucleotide
  Sense strand starting at position 2781 of SEQ ID NO: 915583
gugacauaucccugccauu

SEQ ID NO: 1090871 - RNA, 19 nt, Artificial Sequence
  Description of Artificial Sequence: Synthetic oligonucleotide
  Antisense strand to SEQ ID NO: 1090870
aauggcagggauaugucac

SEQ ID NO: 1090872 - RNA, 19 nt, Artificial Sequence
  Description of Artificial Sequence: Synthetic oligonucleotide
  Sense strand starting at position 2805 of SEQ ID NO: 915583
gcaucacgucaccauaacu

SEQ ID NO: 1090873 - RNA, 19 nt, Artificial Sequence
  Description of Artificial Sequence: Synthetic oligonucleotide
  Antisense strand to SEQ ID NO: 1090872
aguuauggugacgugaugc

SEQ ID NO: 1090874 - RNA, 19 nt, Artificial Sequence
  Description of Artificial Sequence: Synthetic oligonucleotide
  Sense strand starting at position 3818 of SEQ ID NO: 915583
accucuacuguccaaaguu

SEQ ID NO: 1090875 - RNA, 19 nt, Artificial Sequence
  Description of Artificial Sequence: Synthetic oligonucleotide
  Antisense strand to SEQ ID NO: 1090874
aacuuuggacaguagaggu

SEQ ID NO: 1090876 - RNA, 19 nt, Artificial Sequence
  Description of Artificial Sequence: Synthetic oligonucleotide
  Sense strand starting at position 3834 of SEQ ID NO: 915583
guucuuguguaauuuagca

SEQ ID NO: 1090877 - RNA, 19 nt, Artificial Sequence
  Description of Artificial Sequence: Synthetic oligonucleotide
  Antisense strand to SEQ ID NO: 1090876
ugcuaaauuacacaagaac

SEQ ID NO: 1090878 - RNA, 19 nt, Artificial Sequence
  Description of Artificial Sequence: Synthetic oligonucleotide
  Sense strand starting at position 3879 of SEQ ID NO: 915583
gggacugggucuguaacuu

SEQ ID NO: 1090879 - RNA, 19 nt, Artificial Sequence
  Description of Artificial Sequence: Synthetic oligonucleotide
  Antisense strand to SEQ ID NO: 1090878
aaguuacagacccaguccc

SEQ ID NO: 1090880 - RNA, 19 nt, Artificial Sequence
  Description of Artificial Sequence: Synthetic oligonucleotide
  Sense strand starting at position 330 of SEQ ID NO: 915584
agaaaugacuuaguucuga

SEQ ID NO: 1090881 - RNA, 19 nt, Artificial Sequence
  Description of Artificial Sequence: Synthetic oligonucleotide
  Antisense strand to SEQ ID NO: 1090880
ucagaacuaagucauuucu

SEQ ID NO: 1090882 - RNA, 19 nt, Artificial Sequence
  Description of Artificial Sequence: Synthetic oligonucleotide
  Sense strand starting at position 507 of SEQ ID NO: 915584
gaaaguaaaucuguugauc

SEQ ID NO: 1090883 - RNA, 19 nt, Artificial Sequence
  Description of Artificial Sequence: Synthetic oligonucleotide
  Antisense strand to SEQ ID NO: 1090882
gaucaacagauuuacuuuc

SEQ ID NO: 1090884 - RNA, 19 nt, Artificial Sequence
  Description of Artificial Sequence: Synthetic oligonucleotide
  Sense strand starting at position 535 of SEQ ID NO: 915584
aagguuugagucuauaccu

SEQ ID NO: 1090885 - RNA, 19 nt, Artificial Sequence
  Description of Artificial Sequence: Synthetic oligonucleotide
  Antisense strand to SEQ ID NO: 1090884
agguauagacucaaaccuu

SEQ ID NO: 1090886 - RNA, 19 nt, Artificial Sequence
  Description of Artificial Sequence: Synthetic oligonucleotide
  Sense strand starting at position 579 of SEQ ID NO: 915584
ggcuuagaggaaugguuau

SEQ ID NO: 1090887 - RNA, 19 nt, Artificial Sequence
  Description of Artificial Sequence: Synthetic oligonucleotide
  Antisense strand to SEQ ID NO: 1090886
auaaccauuccucuaagcc

SEQ ID NO: 1090888 - RNA, 19 nt, Artificial Sequence
  Description of Artificial Sequence: Synthetic oligonucleotide
  Sense strand starting at position 586 of SEQ ID NO: 915584
aggaaugguuauucagagu

SEQ ID NO: 1090889 - RNA, 19 nt, Artificial Sequence
  Description of Artificial Sequence: Synthetic oligonucleotide
  Antisense strand to SEQ ID NO: 1090888
acucugaauaaccauuccu

SEQ ID NO: 1090890 - RNA, 19 nt, Artificial Sequence
  Description of Artificial Sequence: Synthetic oligonucleotide
  Sense strand starting at position 751 of SEQ ID NO: 915584
cgaauauugcaauauacga

SEQ ID NO: 1090891 - RNA, 19 nt, Artificial Sequence
  Description of Artificial Sequence: Synthetic oligonucleotide
  Antisense strand to SEQ ID NO: 1090890
ucguauauugcaauauucg

SEQ ID NO: 1090892 - RNA, 19 nt, Artificial Sequence
  Description of Artificial Sequence: Synthetic oligonucleotide
  Sense strand starting at position 759 of SEQ ID NO: 915584
gcaauauacgaauaucuag

SEQ ID NO: 1090893 - RNA, 19 nt, Artificial Sequence
  Description of Artificial Sequence: Synthetic oligonucleotide
  Antisense strand to SEQ ID NO: 1090892
cuagauauucguauauugc

SEQ ID NO: 1090894 - RNA, 19 nt, Artificial Sequence
  Description of Artificial Sequence: Synthetic oligonucleotide
  Sense strand starting at position 795 of SEQ ID NO: 915584
gucggagcucaauaaauuc

SEQ ID NO: 1090895 - RNA, 19 nt, Artificial Sequence
  Description of Artificial Sequence: Synthetic oligonucleotide
  Antisense strand to SEQ ID NO: 1090894
gaauuuauugagcuccgac

SEQ ID NO: 1090896 - RNA, 19 nt, Artificial Sequence
  Description of Artificial Sequence: Synthetic oligonucleotide
  Sense strand starting at position 927 of SEQ ID NO: 915584
uggaaaugauuagcuuaug

SEQ ID NO: 1090897 - RNA, 19 nt, Artificial Sequence
  Description of Artificial Sequence: Synthetic oligonucleotide
  Antisense strand to SEQ ID NO: 1090896
cauaagcuaaucauuucca

SEQ ID NO: 1090898 - RNA, 19 nt, Artificial Sequence
  Description of Artificial Sequence: Synthetic oligonucleotide
  Sense strand starting at position 1020 of SEQ ID NO: 915584
cuguaagcgaacugacaaa

SEQ ID NO: 1090899 - RNA, 19 nt, Artificial Sequence
  Description of Artificial Sequence: Synthetic oligonucleotide
  Antisense strand to SEQ ID NO: 1090898
uuugucaguucgcuuacag

SEQ ID NO: 1090900 - RNA, 19 nt, Artificial Sequence
  Description of Artificial Sequence: Synthetic oligonucleotide
  Sense strand starting at position 1126 of SEQ ID NO: 915584
uauucuguuggccaaggau

SEQ ID NO: 1090901 - RNA, 19 nt, Artificial Sequence
  Description of Artificial Sequence: Synthetic oligonucleotide
  Antisense strand to SEQ ID NO: 1090900
auccuuggccaacagaaua

SEQ ID NO: 1090902 - RNA, 19 nt, Artificial Sequence
  Description of Artificial Sequence: Synthetic oligonucleotide
  Sense strand starting at position 1236 of SEQ ID NO: 915584
ggccgagucagagaauucu

SEQ ID NO: 1090903 - RNA, 19 nt, Artificial Sequence
  Description of Artificial Sequence: Synthetic oligonucleotide
  Antisense strand to SEQ ID NO: 1090902
agaauucucugacucggcc

SEQ ID NO: 1090904 - RNA, 19 nt, Artificial Sequence
  Description of Artificial Sequence: Synthetic oligonucleotide
  Sense strand starting at position 1256 of SEQ ID NO: 915584
ucaagaaaucgcuaaacgu

SEQ ID NO: 1090905 - RNA, 19 nt, Artificial Sequence
  Description of Artificial Sequence: Synthetic oligonucleotide
  Antisense strand to SEQ ID NO: 1090904
acguuuagcgauuucuuga

SEQ ID NO: 1090906 - RNA, 19 nt, Artificial Sequence
  Description of Artificial Sequence: Synthetic oligonucleotide
  Sense strand starting at position 1270 of SEQ ID NO: 915584
aacguuugacuugaagauc

SEQ ID NO: 1090907 - RNA, 19 nt, Artificial Sequence
  Description of Artificial Sequence: Synthetic oligonucleotide
  Antisense strand to SEQ ID NO: 1090906
gaucuucaagucaaacguu

SEQ ID NO: 1090908 - RNA, 19 nt, Artificial Sequence
  Description of Artificial Sequence: Synthetic oligonucleotide
  Sense strand starting at position 1273 of SEQ ID NO: 915584
guuugacuugaagaucgau

SEQ ID NO: 1090909 - RNA, 19 nt, Artificial Sequence
  Description of Artificial Sequence: Synthetic oligonucleotide
  Antisense strand to SEQ ID NO: 1090908
aucgaucuucaagucaaac

SEQ ID NO: 1090910 - RNA, 19 nt, Artificial Sequence
  Description of Artificial Sequence: Synthetic oligonucleotide
  Sense strand starting at position 1378 of SEQ ID NO: 915584
gaaguuuauguggaagcca

SEQ ID NO: 1090911 - RNA, 19 nt, Artificial Sequence
  Description of Artificial Sequence: Synthetic oligonucleotide
  Antisense strand to SEQ ID NO: 1090910
uggcuuccacauaaacuuc

SEQ ID NO: 1090912 - RNA, 19 nt, Artificial Sequence
  Description of Artificial Sequence: Synthetic oligonucleotide
  Sense strand starting at position 1565 of SEQ ID NO: 915584
ccgaguucccaagaguaua

SEQ ID NO: 1090913 - RNA, 19 nt, Artificial Sequence
  Description of Artificial Sequence: Synthetic oligonucleotide
  Antisense strand to SEQ ID NO: 1090912
uauacucuugggaacucgg

SEQ ID NO: 1090914 - RNA, 19 nt, Artificial Sequence
  Description of Artificial Sequence: Synthetic oligonucleotide
  Sense strand starting at position 1764 of SEQ ID NO: 915584
gagaauuucucugaagucc

SEQ ID NO: 1090915 - RNA, 19 nt, Artificial Sequence
  Description of Artificial Sequence: Synthetic oligonucleotide
  Antisense strand to SEQ ID NO: 1090914
ggacuucagagaaauucuc

SEQ ID NO: 1090916 - RNA, 19 nt, Artificial Sequence
  Description of Artificial Sequence: Synthetic oligonucleotide
  Sense strand starting at position 2478 of SEQ ID NO: 915584
ccguuuagaaaguaaguuu

SEQ ID NO: 1090917 - RNA, 19 nt, Artificial Sequence
  Description of Artificial Sequence: Synthetic oligonucleotide
  Antisense strand to SEQ ID NO: 1090916
aaacuuacuuucuaaacgg

SEQ ID NO: 1090918 - RNA, 19 nt, Artificial Sequence
  Description of Artificial Sequence: Synthetic oligonucleotide
  Sense strand starting at position 2566 of SEQ ID NO: 915584
uugacauaacuuuggugua

SEQ ID NO: 1090919 - RNA, 19 nt, Artificial Sequence
  Description of Artificial Sequence: Synthetic oligonucleotide
  Antisense strand to SEQ ID NO: 1090918
uacaccaaaguuaugucaa

SEQ ID NO: 1090920 - RNA, 19 nt, Artificial Sequence
  Description of Artificial Sequence: Synthetic oligonucleotide
  Sense strand starting at position 2568 of SEQ ID NO: 915584
gacauaacuuugguguacu

SEQ ID NO: 1090921 - RNA, 19 nt, Artificial Sequence
  Description of Artificial Sequence: Synthetic oligonucleotide
  Antisense strand to SEQ ID NO: 1090920
aguacaccaaaguuauguc

SEQ ID NO: 1090922 - RNA, 19 nt, Artificial Sequence
  Description of Artificial Sequence: Synthetic oligonucleotide
  Sense strand starting at position 2571 of SEQ ID NO: 915584
auaacuuugguguacugau

SEQ ID NO: 1090923 - RNA, 19 nt, Artificial Sequence
  Description of Artificial Sequence: Synthetic oligonucleotide
  Antisense strand to SEQ ID NO: 1090922
aucaguacaccaaaguuau

SEQ ID NO: 1090924 - RNA, 19 nt, Artificial Sequence
  Description of Artificial Sequence: Synthetic oligonucleotide
  Sense strand starting at position 2639 of SEQ ID NO: 915584
uuuggagaguuaucuugga

SEQ ID NO: 1090925 - RNA, 19 nt, Artificial Sequence
  Description of Artificial Sequence: Synthetic oligonucleotide
  Antisense strand to SEQ ID NO: 1090924
uccaagauaacucuccaaa

SEQ ID NO: 1090926 - RNA, 19 nt, Artificial Sequence
  Description of Artificial Sequence: Synthetic oligonucleotide
  Sense strand starting at position 2643 of SEQ ID NO: 915584
gagaguuaucuuggaucug

SEQ ID NO: 1090927 - RNA, 19 nt, Artificial Sequence
  Description of Artificial Sequence: Synthetic oligonucleotide
  Antisense strand to SEQ ID NO: 1090926
cagauccaagauaacucuc

SEQ ID NO: 1090928 - RNA, 19 nt, Artificial Sequence
  Description of Artificial Sequence: Synthetic oligonucleotide
  Sense strand starting at position 2649 of SEQ ID NO: 915584
uaucuuggaucuguaaggu

SEQ ID NO: 1090929 - RNA, 19 nt, Artificial Sequence
  Description of Artificial Sequence: Synthetic oligonucleotide
  Antisense strand to SEQ ID NO: 1090928
accuuacagauccaagaua

SEQ ID NO: 1090930 - RNA, 19 nt, Artificial Sequence
  Description of Artificial Sequence: Synthetic oligonucleotide
  Sense strand starting at position 2658 of SEQ ID NO: 915584
ucuguaaggucauuucgac

SEQ ID NO: 1090931 - RNA, 19 nt, Artificial Sequence
  Description of Artificial Sequence: Synthetic oligonucleotide
  Antisense strand to SEQ ID NO: 1090930
gucgaaaugaccuuacaga

SEQ ID NO: 1090932 - RNA, 19 nt, Artificial Sequence
  Description of Artificial Sequence: Synthetic oligonucleotide
  Sense strand starting at position 2750 of SEQ ID NO: 915584
acagguacucgggaucuuu

SEQ ID NO: 1090933 - RNA, 19 nt, Artificial Sequence
  Description of Artificial Sequence: Synthetic oligonucleotide
  Antisense strand to SEQ ID NO: 1090932
aaagaucccgaguaccugu

SEQ ID NO: 1090934 - RNA, 19 nt, Artificial Sequence
  Description of Artificial Sequence: Synthetic oligonucleotide
  Sense strand starting at position 2838 of SEQ ID NO: 915584
acacuuaagacgggugaga

SEQ ID NO: 1090935 - RNA, 19 nt, Artificial Sequence
  Description of Artificial Sequence: Synthetic oligonucleotide
  Antisense strand to SEQ ID NO: 1090934
ucucacccgucuuaagugu

SEQ ID NO: 1090936 - RNA, 19 nt, Artificial Sequence
  Description of Artificial Sequence: Synthetic oligonucleotide
  Sense strand starting at position 2840 of SEQ ID NO: 915584
acuuaagacgggugagaau

SEQ ID NO: 1090937 - RNA, 19 nt, Artificial Sequence
  Description of Artificial Sequence: Synthetic oligonucleotide
  Antisense strand to SEQ ID NO: 1090936
auucucacccgucuuaagu

SEQ ID NO: 1090938 - RNA, 19 nt, Artificial Sequence
  Description of Artificial Sequence: Synthetic oligonucleotide
  Sense strand starting at position 3227 of SEQ ID NO: 915584
uuacucuuugaugguuuaa

SEQ ID NO: 1090939 - RNA, 19 nt, Artificial Sequence
  Description of Artificial Sequence: Synthetic oligonucleotide
  Antisense strand to SEQ ID NO: 1090938
uuaaaccaucaaagaguaa

SEQ ID NO: 1090940 - RNA, 19 nt, Artificial Sequence
  Description of Artificial Sequence: Synthetic oligonucleotide
  Sense strand starting at position 3229 of SEQ ID NO: 915584
acucuuugaugguuuaaug

SEQ ID NO: 1090941 - RNA, 19 nt, Artificial Sequence
  Description of Artificial Sequence: Synthetic oligonucleotide
  Antisense strand to SEQ ID NO: 1090940
cauuaaaccaucaaagagu

SEQ ID NO: 1090942 - RNA, 19 nt, Artificial Sequence
  Description of Artificial Sequence: Synthetic oligonucleotide
  Sense strand starting at position 3346 of SEQ ID NO: 915584
gcguuuguuccucugauua

SEQ ID NO: 1090943 - RNA, 19 nt, Artificial Sequence
  Description of Artificial Sequence: Synthetic oligonucleotide
  Antisense strand to SEQ ID NO: 1090942
uaaucagaggaacaaacgc

SEQ ID NO: 1090944 - RNA, 19 nt, Artificial Sequence
  Description of Artificial Sequence: Synthetic oligonucleotide
  Sense strand starting at position 3735 of SEQ ID NO: 915584
uuggcuauaucugugauag

SEQ ID NO: 1090945 - RNA, 19 nt, Artificial Sequence
  Description of Artificial Sequence: Synthetic oligonucleotide
  Antisense strand to SEQ ID NO: 1090944
cuaucacagauauagccaa

SEQ ID NO: 1090946 - RNA, 19 nt, Artificial Sequence
  Description of Artificial Sequence: Synthetic oligonucleotide
  Sense strand starting at position 3736 of SEQ ID NO: 915584
uggcuauaucugugauaga

SEQ ID NO: 1090947 - RNA, 19 nt, Artificial Sequence
  Description of Artificial Sequence: Synthetic oligonucleotide
  Antisense strand to SEQ ID NO: 1090946
ucuaucacagauauagcca

SEQ ID NO: 1090948 - RNA, 19 nt, Artificial Sequence
  Description of Artificial Sequence: Synthetic oligonucleotide
  Sense strand starting at position 3745 of SEQ ID NO: 915584
cugugauagacagagcuau

SEQ ID NO: 1090949 - RNA, 19 nt, Artificial Sequence
  Description of Artificial Sequence: Synthetic oligonucleotide
  Antisense strand to SEQ ID NO: 1090948
auagcucugucuaucacag

SEQ ID NO: 1090950 - RNA, 19 nt, Artificial Sequence
  Description of Artificial Sequence: Synthetic oligonucleotide
  Sense strand starting at position 3914 of SEQ ID NO: 915584
agcauacauugagccauua

SEQ ID NO: 1090951 - RNA, 19 nt, Artificial Sequence
  Description of Artificial Sequence: Synthetic oligonucleotide
  Antisense strand to SEQ ID NO: 1090950
uaauggcucaauguaugcu

SEQ ID NO: 1090952 - RNA, 19 nt, Artificial Sequence
  Description of Artificial Sequence: Synthetic oligonucleotide
  Sense strand starting at position 3949 of SEQ ID NO: 915584
ugacauggauuaucugacu

SEQ ID NO: 1090953 - RNA, 19 nt, Artificial Sequence
  Description of Artificial Sequence: Synthetic oligonucleotide
  Antisense strand to SEQ ID NO: 1090952
agucagauaauccauguca

SEQ ID NO: 1090954 - RNA, 19 nt, Artificial Sequence
  Description of Artificial Sequence: Synthetic oligonucleotide
  Sense strand starting at position 3954 of SEQ ID NO: 915584
uggauuaucugacuugauc

SEQ ID NO: 1090955 - RNA, 19 nt, Artificial Sequence
  Description of Artificial Sequence: Synthetic oligonucleotide
  Antisense strand to SEQ ID NO: 1090954
gaucaagucagauaaucca

SEQ ID NO: 1090956 - RNA, 19 nt, Artificial Sequence
  Description of Artificial Sequence: Synthetic oligonucleotide
  Sense strand starting at position 3963 of SEQ ID NO: 915584
ugacuugaucaugaguguu

SEQ ID NO: 1090957 - RNA, 19 nt, Artificial Sequence
  Description of Artificial Sequence: Synthetic oligonucleotide
  Antisense strand to SEQ ID NO: 1090956
aacacucaugaucaaguca

SEQ ID NO: 1090958 - RNA, 19 nt, Artificial Sequence
  Description of Artificial Sequence: Synthetic oligonucleotide
  Sense strand starting at position 3973 of SEQ ID NO: 915584
augaguguuguauaaggca

SEQ ID NO: 1090959 - RNA, 19 nt, Artificial Sequence
  Description of Artificial Sequence: Synthetic oligonucleotide
  Antisense strand to SEQ ID NO: 1090958
ugccuuauacaacacucau

SEQ ID NO: 1090960 - RNA, 19 nt, Artificial Sequence
  Description of Artificial Sequence: Synthetic oligonucleotide
  Sense strand starting at position 98 of SEQ ID NO: 915585
gcagguaagcaaugacaaa

SEQ ID NO: 1090961 - RNA, 19 nt, Artificial Sequence
  Description of Artificial Sequence: Synthetic oligonucleotide
  Antisense strand to SEQ ID NO: 1090960
uuugucauugcuuaccugc

SEQ ID NO: 1090962 - RNA, 19 nt, Artificial Sequence
  Description of Artificial Sequence: Synthetic oligonucleotide
  Sense strand starting at position 133 of SEQ ID NO: 915585
guccuuagcaccguguuaa

SEQ ID NO: 1090963 - RNA, 19 nt, Artificial Sequence
  Description of Artificial Sequence: Synthetic oligonucleotide
  Antisense strand to SEQ ID NO: 1090962
uuaacacggugcuaaggac

SEQ ID NO: 1090964 - RNA, 19 nt, Artificial Sequence
  Description of Artificial Sequence: Synthetic oligonucleotide
  Sense strand starting at position 162 of SEQ ID NO: 915585
gucccaguauauccaaaga

SEQ ID NO: 1090965 - RNA, 19 nt, Artificial Sequence
  Description of Artificial Sequence: Synthetic oligonucleotide
  Antisense strand to SEQ ID NO: 1090964
ucuuuggauauacugggac

SEQ ID NO: 1090966 - RNA, 19 nt, Artificial Sequence
  Description of Artificial Sequence: Synthetic oligonucleotide
  Sense strand starting at position 458 of SEQ ID NO: 915585
gcaaauuaggaaugucuuu

SEQ ID NO: 1090967 - RNA, 19 nt, Artificial Sequence
  Description of Artificial Sequence: Synthetic oligonucleotide
  Antisense strand to SEQ ID NO: 1090966
aaagacauuccuaauuugc

SEQ ID NO: 1090968 - RNA, 19 nt, Artificial Sequence
  Description of Artificial Sequence: Synthetic oligonucleotide
  Sense strand starting at position 463 of SEQ ID NO: 915585
uuaggaaugucuuugaaca

SEQ ID NO: 1090969 - RNA, 19 nt, Artificial Sequence
  Description of Artificial Sequence: Synthetic oligonucleotide
  Antisense strand to SEQ ID NO: 1090968
uguucaaagacauuccuaa

SEQ ID NO: 1090970 - RNA, 19 nt, Artificial Sequence
  Description of Artificial Sequence: Synthetic oligonucleotide
  Sense strand starting at position 464 of SEQ ID NO: 915585
uaggaaugucuuugaacac

SEQ ID NO: 1090971 - RNA, 19 nt, Artificial Sequence
  Description of Artificial Sequence: Synthetic oligonucleotide
  Antisense strand to SEQ ID NO: 1090970
guguucaaagacauuccua

SEQ ID NO: 1090972 - RNA, 19 nt, Artificial Sequence
  Description of Artificial Sequence: Synthetic oligonucleotide
  Sense strand starting at position 649 of SEQ ID NO: 915585
gguacuugucccgaaacag

SEQ ID NO: 1090973 - RNA, 19 nt, Artificial Sequence
  Description of Artificial Sequence: Synthetic oligonucleotide
  Antisense strand to SEQ ID NO: 1090972
cuguuucgggacaaguacc

SEQ ID NO: 1090974 - RNA, 19 nt, Artificial Sequence
  Description of Artificial Sequence: Synthetic oligonucleotide
  Sense strand starting at position 666 of SEQ ID NO: 915585
agccgaugcacgucaucua

SEQ ID NO: 1090975 - RNA, 19 nt, Artificial Sequence
  Description of Artificial Sequence: Synthetic oligonucleotide
  Antisense strand to SEQ ID NO: 1090974
uagaugacgugcaucggcu

SEQ ID NO: 1090976 - RNA, 19 nt, Artificial Sequence
  Description of Artificial Sequence: Synthetic oligonucleotide
  Sense strand starting at position 706 of SEQ ID NO: 915585
gugucaggaucuucugaaa

SEQ ID NO: 1090977 - RNA, 19 nt, Artificial Sequence
  Description of Artificial Sequence: Synthetic oligonucleotide
  Antisense strand to SEQ ID NO: 1090976
uuucagaagauccugacac

SEQ ID NO: 1090978 - RNA, 19 nt, Artificial Sequence
  Description of Artificial Sequence: Synthetic oligonucleotide
  Sense strand starting at position 833 of SEQ ID NO: 915585
gccgguuucccuguccuga

SEQ ID NO: 1090979 - RNA, 19 nt, Artificial Sequence
  Description of Artificial Sequence: Synthetic oligonucleotide
  Antisense strand to SEQ ID NO: 1090978
ucaggacagggaaaccggc

SEQ ID NO: 1090980 - RNA, 19 nt, Artificial Sequence
  Description of Artificial Sequence: Synthetic oligonucleotide
  Sense strand starting at position 969 of SEQ ID NO: 915585
aaaucagggcuauguuaac

SEQ ID NO: 1090981 - RNA, 19 nt, Artificial Sequence
  Description of Artificial Sequence: Synthetic oligonucleotide
  Antisense strand to SEQ ID NO: 1090980
guuaacauagcccugauuu

SEQ ID NO: 1090982 - RNA, 19 nt, Artificial Sequence
  Description of Artificial Sequence: Synthetic oligonucleotide
  Sense strand starting at position 1107 of SEQ ID NO: 915585
ggagaaagaguaugucuca

SEQ ID NO: 1090983 - RNA, 19 nt, Artificial Sequence
  Description of Artificial Sequence: Synthetic oligonucleotide
  Antisense strand to SEQ ID NO: 1090982
ugagacauacucuuucucc

SEQ ID NO: 1090984 - RNA, 19 nt, Artificial Sequence
  Description of Artificial Sequence: Synthetic oligonucleotide
  Sense strand starting at position 1110 of SEQ ID NO: 915585
gaaagaguaugucucagug

SEQ ID NO: 1090985 - RNA, 19 nt, Artificial Sequence
  Description of Artificial Sequence: Synthetic oligonucleotide
  Antisense strand to SEQ ID NO: 1090984
cacugagacauacucuuuc

SEQ ID NO: 1090986 - RNA, 19 nt, Artificial Sequence
  Description of Artificial Sequence: Synthetic oligonucleotide
  Sense strand starting at position 1253 of SEQ ID NO: 915585
cuggcauuccaccagaaau

SEQ ID NO: 1090987 - RNA, 19 nt, Artificial Sequence
  Description of Artificial Sequence: Synthetic oligonucleotide
  Antisense strand to SEQ ID NO: 1090986
auuucugguggaaugccag

SEQ ID NO: 1090988 - RNA, 19 nt, Artificial Sequence
  Description of Artificial Sequence: Synthetic oligonucleotide
  Sense strand starting at position 1487 of SEQ ID NO: 915585
ggaauucggcuagaguuga

SEQ ID NO: 1090989 - RNA, 19 nt, Artificial Sequence
  Description of Artificial Sequence: Synthetic oligonucleotide
  Antisense strand to SEQ ID NO: 1090988
ucaacucuagccgaauucc

SEQ ID NO: 1090990 - RNA, 19 nt, Artificial Sequence
  Description of Artificial Sequence: Synthetic oligonucleotide
  Sense strand starting at position 2536 of SEQ ID NO: 915585
cagucagacugauugauaa

SEQ ID NO: 1090991 - RNA, 19 nt, Artificial Sequence
  Description of Artificial Sequence: Synthetic oligonucleotide
  Antisense strand to SEQ ID NO: 1090990
uuaucaaucagucugacug

SEQ ID NO: 1090992 - RNA, 19 nt, Artificial Sequence
  Description of Artificial Sequence: Synthetic oligonucleotide
  Sense strand starting at position 2560 of SEQ ID NO: 915585
ggcacagaugugcauuaag

SEQ ID NO: 1090993 - RNA, 19 nt, Artificial Sequence
  Description of Artificial Sequence: Synthetic oligonucleotide
  Antisense strand to SEQ ID NO: 1090992
cuuaaugcacaucugugcc

SEQ ID NO: 1090994 - RNA, 19 nt, Artificial Sequence
  Description of Artificial Sequence: Synthetic oligonucleotide
  Sense strand starting at position 2604 of SEQ ID NO: 915585
cuuagugcuguugcgguaa

SEQ ID NO: 1090995 - RNA, 19 nt, Artificial Sequence
  Description of Artificial Sequence: Synthetic oligonucleotide
  Antisense strand to SEQ ID NO: 1090994
uuaccgcaacagcacuaag

SEQ ID NO: 1090996 - RNA, 19 nt, Artificial Sequence
  Description of Artificial Sequence: Synthetic oligonucleotide
  Sense strand starting at position 2667 of SEQ ID NO: 915585
gcuagaguguaccuagaga

SEQ ID NO: 1090997 - RNA, 19 nt, Artificial Sequence
  Description of Artificial Sequence: Synthetic oligonucleotide
  Antisense strand to SEQ ID NO: 1090996
ucucuagguacacucuagc

SEQ ID NO: 1090998 - RNA, 19 nt, Artificial Sequence
  Description of Artificial Sequence: Synthetic oligonucleotide
  Sense strand starting at position 3066 of SEQ ID NO: 915585
cuaguauaacgguagaagu

SEQ ID NO: 1090999 - RNA, 19 nt, Artificial Sequence
  Description of Artificial Sequence: Synthetic oligonucleotide
  Antisense strand to SEQ ID NO: 1090998
acuucuaccguuauacuag

SEQ ID NO: 1091000 - RNA, 19 nt, Artificial Sequence
  Description of Artificial Sequence: Synthetic oligonucleotide
  Sense strand starting at position 3121 of SEQ ID NO: 915585
gauguuuacuggcuuaaga

SEQ ID NO: 1091001 - RNA, 19 nt, Artificial Sequence
  Description of Artificial Sequence: Synthetic oligonucleotide
  Antisense strand to SEQ ID NO: 1091000
ucuuaagccaguaaacauc

SEQ ID NO: 1091002 - RNA, 19 nt, Artificial Sequence
  Description of Artificial Sequence: Synthetic oligonucleotide
  Sense strand starting at position 3123 of SEQ ID NO: 915585
uguuuacuggcuuaagaaa

SEQ ID NO: 1091003 - RNA, 19 nt, Artificial Sequence
  Description of Artificial Sequence: Synthetic oligonucleotide
  Antisense strand to SEQ ID NO: 1091002
uuucuuaagccaguaaaca

SEQ ID NO: 1091004 - RNA, 19 nt, Artificial Sequence
  Description of Artificial Sequence: Synthetic oligonucleotide
  Sense strand starting at position 3148 of SEQ ID NO: 915585
uguuccagucucuaaauaa

SEQ ID NO: 1091005 - RNA, 19 nt, Artificial Sequence
  Description of Artificial Sequence: Synthetic oligonucleotide
  Antisense strand to SEQ ID NO: 1091004
uuauuuagagacuggaaca

SEQ ID NO: 1091006 - RNA, 19 nt, Artificial Sequence
  Description of Artificial Sequence: Synthetic oligonucleotide
  Sense strand starting at position 3159 of SEQ ID NO: 915585
cuaaauaacugagugcaga

SEQ ID NO: 1091007 - RNA, 19 nt, Artificial Sequence
  Description of Artificial Sequence: Synthetic oligonucleotide
  Antisense strand to SEQ ID NO: 1091006
ucugcacucaguuauuuag

SEQ ID NO: 1091008 - RNA, 19 nt, Artificial Sequence
  Description of Artificial Sequence: Synthetic oligonucleotide
  Sense strand starting at position 3238 of SEQ ID NO: 915585
ugaguaguagcaugaaaug

SEQ ID NO: 1091009 - RNA, 19 nt, Artificial Sequence
  Description of Artificial Sequence: Synthetic oligonucleotide
  Antisense strand to SEQ ID NO: 1091008
cauuucaugcuacuacuca

SEQ ID NO: 1091010 - RNA, 19 nt, Artificial Sequence
  Description of Artificial Sequence: Synthetic oligonucleotide
  Sense strand starting at position 3297 of SEQ ID NO: 915585
uccagugcugcugagaaga

SEQ ID NO: 1091011 - RNA, 19 nt, Artificial Sequence
  Description of Artificial Sequence: Synthetic oligonucleotide
  Antisense strand to SEQ ID NO: 1091010
ucuucucagcagcacugga

SEQ ID NO: 1091012 - RNA, 19 nt, Artificial Sequence
  Description of Artificial Sequence: Synthetic oligonucleotide
  Sense strand starting at position 3307 of SEQ ID NO: 915585
cugagaagaguuugaguga

SEQ ID NO: 1091013 - RNA, 19 nt, Artificial Sequence
  Description of Artificial Sequence: Synthetic oligonucleotide
  Antisense strand to SEQ ID NO: 1091012
ucacucaaacucuucucag

SEQ ID NO: 1091014 - RNA, 19 nt, Artificial Sequence
  Description of Artificial Sequence: Synthetic oligonucleotide
  Sense strand starting at position 3310 of SEQ ID NO: 915585
agaagaguuugagugaggu

SEQ ID NO: 1091015 - RNA, 19 nt, Artificial Sequence
  Description of Artificial Sequence: Synthetic oligonucleotide
  Antisense strand to SEQ ID NO: 1091014
accucacucaaacucuucu

SEQ ID NO: 1091016 - RNA, 19 nt, Artificial Sequence
  Description of Artificial Sequence: Synthetic oligonucleotide
  Sense strand starting at position 3312 of SEQ ID NO: 915585
aagaguuugagugagguau

SEQ ID NO: 1091017 - RNA, 19 nt, Artificial Sequence
  Description of Artificial Sequence: Synthetic oligonucleotide
  Antisense strand to SEQ ID NO: 1091016
auaccucacucaaacucuu

SEQ ID NO: 1091018 - RNA, 19 nt, Artificial Sequence
  Description of Artificial Sequence: Synthetic oligonucleotide
  Sense strand starting at position 3316 of SEQ ID NO: 915585
guuugagugagguaugaaa

SEQ ID NO: 1091019 - RNA, 19 nt, Artificial Sequence
  Description of Artificial Sequence: Synthetic oligonucleotide
  Antisense strand to SEQ ID NO: 1091018
uuucauaccucacucaaac

SEQ ID NO: 1091020 - RNA, 19 nt, Artificial Sequence
  Description of Artificial Sequence: Synthetic oligonucleotide
  Sense strand starting at position 3318 of SEQ ID NO: 915585
uugagugagguaugaaaug

SEQ ID NO: 1091021 - RNA, 19 nt, Artificial Sequence
  Description of Artificial Sequence: Synthetic oligonucleotide
  Antisense strand to SEQ ID NO: 1091020
cauuucauaccucacucaa

SEQ ID NO: 1091022 - RNA, 19 nt, Artificial Sequence
  Description of Artificial Sequence: Synthetic oligonucleotide
  Sense strand starting at position 3323 of SEQ ID NO: 915585
ugagguaugaaauggcaaa

SEQ ID NO: 1091023 - RNA, 19 nt, Artificial Sequence
  Description of Artificial Sequence: Synthetic oligonucleotide
  Antisense strand to SEQ ID NO: 1091022
uuugccauuucauaccuca

SEQ ID NO: 1091024 - RNA, 19 nt, Artificial Sequence
  Description of Artificial Sequence: Synthetic oligonucleotide
  Sense strand starting at position 3355 of SEQ ID NO: 915585
uuaagauacuuacugagca

SEQ ID NO: 1091025 - RNA, 19 nt, Artificial Sequence
  Description of Artificial Sequence: Synthetic oligonucleotide
  Antisense strand to SEQ ID NO: 1091024
ugcucaguaaguaucuuaa

SEQ ID NO: 1091026 - RNA, 19 nt, Artificial Sequence
  Description of Artificial Sequence: Synthetic oligonucleotide
  Sense strand starting at position 3406 of SEQ ID NO: 915585
agauucaguggugaaggua

SEQ ID NO: 1091027 - RNA, 19 nt, Artificial Sequence
  Description of Artificial Sequence: Synthetic oligonucleotide
  Antisense strand to SEQ ID NO: 1091026
uaccuucaccacugaaucu

SEQ ID NO: 1091028 - RNA, 19 nt, Artificial Sequence
  Description of Artificial Sequence: Synthetic oligonucleotide
  Sense strand starting at position 3476 of SEQ ID NO: 915585
aguuguguccaagagauca

SEQ ID NO: 1091029 - RNA, 19 nt, Artificial Sequence
  Description of Artificial Sequence: Synthetic oligonucleotide
  Antisense strand to SEQ ID NO: 1091028
ugaucucuuggacacaacu

SEQ ID NO: 1091030 - RNA, 19 nt, Artificial Sequence
  Description of Artificial Sequence: Synthetic oligonucleotide
  Sense strand starting at position 3679 of SEQ ID NO: 915585
cagauugugcaguaucuua

SEQ ID NO: 1091031 - RNA, 19 nt, Artificial Sequence
  Description of Artificial Sequence: Synthetic oligonucleotide
  Antisense strand to SEQ ID NO: 1091030
uaagauacugcacaaucug

SEQ ID NO: 1091032 - RNA, 19 nt, Artificial Sequence
  Description of Artificial Sequence: Synthetic oligonucleotide
  Sense strand starting at position 3718 of SEQ ID NO: 915585
ggacuuugguucuuagagu

SEQ ID NO: 1091033 - RNA, 19 nt, Artificial Sequence
  Description of Artificial Sequence: Synthetic oligonucleotide
  Antisense strand to SEQ ID NO: 1091032
acucuaagaaccaaagucc

SEQ ID NO: 1091034 - RNA, 19 nt, Artificial Sequence
  Description of Artificial Sequence: Synthetic oligonucleotide
  Sense strand starting at position 3724 of SEQ ID NO: 915585
ugguucuuagaguaaugga

SEQ ID NO: 1091035 - RNA, 19 nt, Artificial Sequence
  Description of Artificial Sequence: Synthetic oligonucleotide
  Antisense strand to SEQ ID NO: 1091034
uccauuacucuaagaacca

SEQ ID NO: 1091036 - RNA, 19 nt, Artificial Sequence
  Description of Artificial Sequence: Synthetic oligonucleotide
  Sense strand starting at position 3768 of SEQ ID NO: 915585
gaggguuugugauuaaauu

SEQ ID NO: 1091037 - RNA, 19 nt, Artificial Sequence
  Description of Artificial Sequence: Synthetic oligonucleotide
  Antisense strand to SEQ ID NO: 1091036
aauuuaaucacaaacccuc

SEQ ID NO: 1091038 - RNA, 19 nt, Artificial Sequence
  Description of Artificial Sequence: Synthetic oligonucleotide
  Sense strand starting at position 3983 of SEQ ID NO: 915585
cgcagaacuugauuaugga

SEQ ID NO: 1091039 - RNA, 19 nt, Artificial Sequence
  Description of Artificial Sequence: Synthetic oligonucleotide
  Antisense strand to SEQ ID NO: 1091038
uccauaaucaaguucugcg

SEQ ID NO: 1091040 - RNA, 19 nt, Artificial Sequence
  Description of Artificial Sequence: Synthetic oligonucleotide
  Sense strand starting at position 399 of SEQ ID NO: 915586
guugaagcaugucuugaca

SEQ ID NO: 1091041 - RNA, 19 nt, Artificial Sequence
  Description of Artificial Sequence: Synthetic oligonucleotide
  Antisense strand to SEQ ID NO: 1091040
ugucaagacaugcuucaac

SEQ ID NO: 1091042 - RNA, 19 nt, Artificial Sequence
  Description of Artificial Sequence: Synthetic oligonucleotide
  Sense strand starting at position 2007 of SEQ ID NO: 915586
ucccuauuauucuacguuu

SEQ ID NO: 1091043 - RNA, 19 nt, Artificial Sequence
  Description of Artificial Sequence: Synthetic oligonucleotide
  Antisense strand to SEQ ID NO: 1091042
aaacguagaauaauaggga

SEQ ID NO: 1091044 - RNA, 19 nt, Artificial Sequence
  Description of Artificial Sequence: Synthetic oligonucleotide
  Sense strand starting at position 2060 of SEQ ID NO: 915586
aggucaauuuaugggaaca

SEQ ID NO: 1091045 - RNA, 19 nt, Artificial Sequence
  Description of Artificial Sequence: Synthetic oligonucleotide
  Antisense strand to SEQ ID NO: 1091044
uguucccauaaauugaccu

SEQ ID NO: 1091046 - RNA, 19 nt, Artificial Sequence
  Description of Artificial Sequence: Synthetic oligonucleotide
  Sense strand starting at position 2197 of SEQ ID NO: 915586
acauuacagugaugaacuu

SEQ ID NO: 1091047 - RNA, 19 nt, Artificial Sequence
  Description of Artificial Sequence: Synthetic oligonucleotide
  Antisense strand to SEQ ID NO: 1091046
aaguucaucacuguaaugu

SEQ ID NO: 1091048 - RNA, 19 nt, Artificial Sequence
  Description of Artificial Sequence: Synthetic oligonucleotide
  Sense strand starting at position 2246 of SEQ ID NO: 915586
agccaagacugagaguuau

SEQ ID NO: 1091049 - RNA, 19 nt, Artificial Sequence
  Description of Artificial Sequence: Synthetic oligonucleotide
  Antisense strand to SEQ ID NO: 1091048
auaacucucagucuuggcu

SEQ ID NO: 1091050 - RNA, 19 nt, Artificial Sequence
  Description of Artificial Sequence: Synthetic oligonucleotide
  Sense strand starting at position 2252 of SEQ ID NO: 915586
gacugagaguuauaaggua

SEQ ID NO: 1091051 - RNA, 19 nt, Artificial Sequence
  Description of Artificial Sequence: Synthetic oligonucleotide
  Antisense strand to SEQ ID NO: 1091050
uaccuuauaacucucaguc

SEQ ID NO: 1091052 - RNA, 19 nt, Artificial Sequence
  Description of Artificial Sequence: Synthetic oligonucleotide
  Sense strand starting at position 2283 of SEQ ID NO: 915586
cugcacucaugauggaagu

SEQ ID NO: 1091053 - RNA, 19 nt, Artificial Sequence
  Description of Artificial Sequence: Synthetic oligonucleotide
  Antisense strand to SEQ ID NO: 1091052
acuuccaucaugagugcag

SEQ ID NO: 1091054 - RNA, 19 nt, Artificial Sequence
  Description of Artificial Sequence: Synthetic oligonucleotide
  Sense strand starting at position 2284 of SEQ ID NO: 915586
ugcacucaugauggaaguu

SEQ ID NO: 1091055 - RNA, 19 nt, Artificial Sequence
  Description of Artificial Sequence: Synthetic oligonucleotide
  Antisense strand to SEQ ID NO: 1091054
aacuuccaucaugagugca

SEQ ID NO: 1091056 - RNA, 19 nt, Artificial Sequence
  Description of Artificial Sequence: Synthetic oligonucleotide
  Sense strand starting at position 2285 of SEQ ID NO: 915586
gcacucaugauggaaguuu

SEQ ID NO: 1091057 - RNA, 19 nt, Artificial Sequence
  Description of Artificial Sequence: Synthetic oligonucleotide
  Antisense strand to SEQ ID NO: 1091056
aaacuuccaucaugagugc

SEQ ID NO: 1091058 - RNA, 19 nt, Artificial Sequence
  Description of Artificial Sequence: Synthetic oligonucleotide
  Sense strand starting at position 2328 of SEQ ID NO: 915586
cucagaaaucaauagugca

SEQ ID NO: 1091059 - RNA, 19 nt, Artificial Sequence
  Description of Artificial Sequence: Synthetic oligonucleotide
  Antisense strand to SEQ ID NO: 1091058
ugcacuauugauuucugag

SEQ ID NO: 1091060 - RNA, 19 nt, Artificial Sequence
  Description of Artificial Sequence: Synthetic oligonucleotide
  Sense strand starting at position 2509 of SEQ ID NO: 915586
ucuggaccucagugaaaua

SEQ ID NO: 1091061 - RNA, 19 nt, Artificial Sequence
  Description of Artificial Sequence: Synthetic oligonucleotide
  Antisense strand to SEQ ID NO: 1091060
uauuucacugagguccaga

SEQ ID NO: 1091062 - RNA, 19 nt, Artificial Sequence
  Description of Artificial Sequence: Synthetic oligonucleotide
  Sense strand starting at position 2611 of SEQ ID NO: 915586
guugaagucaagcaauuag

SEQ ID NO: 1091063 - RNA, 19 nt, Artificial Sequence
  Description of Artificial Sequence: Synthetic oligonucleotide
  Antisense strand to SEQ ID NO: 1091062
cuaauugcuugacuucaac

SEQ ID NO: 1091064 - RNA, 19 nt, Artificial Sequence
  Description of Artificial Sequence: Synthetic oligonucleotide
  Sense strand starting at position 2929 of SEQ ID NO: 915586
auggccaaaucuugaacaa

SEQ ID NO: 1091065 - RNA, 19 nt, Artificial Sequence
  Description of Artificial Sequence: Synthetic oligonucleotide
  Antisense strand to SEQ ID NO: 1091064
uuguucaagauuuggccau

SEQ ID NO: 1091066 - RNA, 19 nt, Artificial Sequence
  Description of Artificial Sequence: Synthetic oligonucleotide
  Sense strand starting at position 3002 of SEQ ID NO: 915586
auuaaucugugcuguugua

SEQ ID NO: 1091067 - RNA, 19 nt, Artificial Sequence
  Description of Artificial Sequence: Synthetic oligonucleotide
  Antisense strand to SEQ ID NO: 1091066
uacaacagcacagauuaau

SEQ ID NO: 1091068 - RNA, 19 nt, Artificial Sequence
  Description of Artificial Sequence: Synthetic oligonucleotide
  Sense strand starting at position 3073 of SEQ ID NO: 915586
gcaggagaauucuaaauua

SEQ ID NO: 1091069 - RNA, 19 nt, Artificial Sequence
  Description of Artificial Sequence: Synthetic oligonucleotide
  Antisense strand to SEQ ID NO: 1091068
uaauuuagaauucuccugc

SEQ ID NO: 1091070 - RNA, 19 nt, Artificial Sequence
  Description of Artificial Sequence: Synthetic oligonucleotide
  Sense strand starting at position 3192 of SEQ ID NO: 915586
ccucaucuauguguuccau

SEQ ID NO: 1091071 - RNA, 19 nt, Artificial Sequence
  Description of Artificial Sequence: Synthetic oligonucleotide
  Antisense strand to SEQ ID NO: 1091070
auggaacacauagaugagg

SEQ ID NO: 1091072 - RNA, 19 nt, Artificial Sequence
  Description of Artificial Sequence: Synthetic oligonucleotide
  Sense strand starting at position 3194 of SEQ ID NO: 915586
ucaucuauguguuccaugu

SEQ ID NO: 1091073 - RNA, 19 nt, Artificial Sequence
  Description of Artificial Sequence: Synthetic oligonucleotide
  Antisense strand to SEQ ID NO: 1091072
acauggaacacauagauga

SEQ ID NO: 1091074 - RNA, 19 nt, Artificial Sequence
  Description of Artificial Sequence: Synthetic oligonucleotide
  Sense strand starting at position 3198 of SEQ ID NO: 915586
cuauguguuccauguagcu

SEQ ID NO: 1091075 - RNA, 19 nt, Artificial Sequence
  Description of Artificial Sequence: Synthetic oligonucleotide
  Antisense strand to SEQ ID NO: 1091074
agcuacauggaacacauag

SEQ ID NO: 1091076 - RNA, 19 nt, Artificial Sequence
  Description of Artificial Sequence: Synthetic oligonucleotide
  Sense strand starting at position 3254 of SEQ ID NO: 915586
gguauaaauguuugugcug

SEQ ID NO: 1091077 - RNA, 19 nt, Artificial Sequence
  Description of Artificial Sequence: Synthetic oligonucleotide
  Antisense strand to SEQ ID NO: 1091076
cagcacaaacauuuauacc

SEQ ID NO: 1091078 - RNA, 19 nt, Artificial Sequence
  Description of Artificial Sequence: Synthetic oligonucleotide
  Sense strand starting at position 3255 of SEQ ID NO: 915586
guauaaauguuugugcugu

SEQ ID NO: 1091079 - RNA, 19 nt, Artificial Sequence
  Description of Artificial Sequence: Synthetic oligonucleotide
  Antisense strand to SEQ ID NO: 1091078
acagcacaaacauuuauac

SEQ ID NO: 1091080 - RNA, 19 nt, Artificial Sequence
  Description of Artificial Sequence: Synthetic oligonucleotide
  Sense strand starting at position 3259 of SEQ ID NO: 915586
aaauguuugugcuguugau

SEQ ID NO: 1091081 - RNA, 19 nt, Artificial Sequence
  Description of Artificial Sequence: Synthetic oligonucleotide
  Antisense strand to SEQ ID NO: 1091080
aucaacagcacaaacauuu

SEQ ID NO: 1091082 - RNA, 19 nt, Artificial Sequence
  Description of Artificial Sequence: Synthetic oligonucleotide
  Sense strand starting at position 3312 of SEQ ID NO: 915586
caguguugcucagaacaug

SEQ ID NO: 1091083 - RNA, 19 nt, Artificial Sequence
  Description of Artificial Sequence: Synthetic oligonucleotide
  Antisense strand to SEQ ID NO: 1091082
cauguucugagcaacacug

SEQ ID NO: 1091084 - RNA, 19 nt, Artificial Sequence
  Description of Artificial Sequence: Synthetic oligonucleotide
  Sense strand starting at position 3321 of SEQ ID NO: 915586
ucagaacaugcuuggacau

SEQ ID NO: 1091085 - RNA, 19 nt, Artificial Sequence
  Description of Artificial Sequence: Synthetic oligonucleotide
  Antisense strand to SEQ ID NO: 1091084
auguccaagcauguucuga

SEQ ID NO: 1091086 - RNA, 19 nt, Artificial Sequence
  Description of Artificial Sequence: Synthetic oligonucleotide
  Sense strand starting at position 3355 of SEQ ID NO: 915586
uguguccucuuagguauga

SEQ ID NO: 1091087 - RNA, 19 nt, Artificial Sequence
  Description of Artificial Sequence: Synthetic oligonucleotide
  Antisense strand to SEQ ID NO: 1091086
ucauaccuaagaggacaca

SEQ ID NO: 1091088 - RNA, 19 nt, Artificial Sequence
  Description of Artificial Sequence: Synthetic oligonucleotide
  Sense strand starting at position 3356 of SEQ ID NO: 915586
guguccucuuagguaugaa

SEQ ID NO: 1091089 - RNA, 19 nt, Artificial Sequence
  Description of Artificial Sequence: Synthetic oligonucleotide
  Antisense strand to SEQ ID NO: 1091088
uucauaccuaagaggacac

SEQ ID NO: 1091090 - RNA, 19 nt, Artificial Sequence
  Description of Artificial Sequence: Synthetic oligonucleotide
  Sense strand starting at position 3360 of SEQ ID NO: 915586
ccucuuagguaugaaugga

SEQ ID NO: 1091091 - RNA, 19 nt, Artificial Sequence
  Description of Artificial Sequence: Synthetic oligonucleotide
  Antisense strand to SEQ ID NO: 1091090
uccauucauaccuaagagg

SEQ ID NO: 1091092 - RNA, 19 nt, Artificial Sequence
  Description of Artificial Sequence: Synthetic oligonucleotide
  Sense strand starting at position 3370 of SEQ ID NO: 915586
augaauggaucccuuguca

SEQ ID NO: 1091093 - RNA, 19 nt, Artificial Sequence
  Description of Artificial Sequence: Synthetic oligonucleotide
  Antisense strand to SEQ ID NO: 1091092
ugacaagggauccauucau

SEQ ID NO: 1091094 - RNA, 19 nt, Artificial Sequence
  Description of Artificial Sequence: Synthetic oligonucleotide
  Sense strand starting at position 3374 of SEQ ID NO: 915586
auggaucccuugucacaga

SEQ ID NO: 1091095 - RNA, 19 nt, Artificial Sequence
  Description of Artificial Sequence: Synthetic oligonucleotide
  Antisense strand to SEQ ID NO: 1091094
ucugugacaagggauccau

SEQ ID NO: 1091096 - RNA, 19 nt, Artificial Sequence
  Description of Artificial Sequence: Synthetic oligonucleotide
  Sense strand starting at position 3375 of SEQ ID NO: 915586
uggaucccuugucacagaa

SEQ ID NO: 1091097 - RNA, 19 nt, Artificial Sequence
  Description of Artificial Sequence: Synthetic oligonucleotide
  Antisense strand to SEQ ID NO: 1091096
uucugugacaagggaucca

SEQ ID NO: 1091098 - RNA, 19 nt, Artificial Sequence
  Description of Artificial Sequence: Synthetic oligonucleotide
  Sense strand starting at position 3440 of SEQ ID NO: 915586
gccaacuguggguagaaau

SEQ ID NO: 1091099 - RNA, 19 nt, Artificial Sequence
  Description of Artificial Sequence: Synthetic oligonucleotide
  Antisense strand to SEQ ID NO: 1091098
auuucuacccacaguuggc

SEQ ID NO: 1091100 - RNA, 19 nt, Artificial Sequence
  Description of Artificial Sequence: Synthetic oligonucleotide
  Sense strand starting at position 3554 of SEQ ID NO: 915586
ugacuuaaaguauguugga

SEQ ID NO: 1091101 - RNA, 19 nt, Artificial Sequence
  Description of Artificial Sequence: Synthetic oligonucleotide
  Antisense strand to SEQ ID NO: 1091100
uccaacauacuuuaaguca

SEQ ID NO: 1091102 - RNA, 19 nt, Artificial Sequence
  Description of Artificial Sequence: Synthetic oligonucleotide
  Sense strand starting at position 3555 of SEQ ID NO: 915586
gacuuaaaguauguuggaa

SEQ ID NO: 1091103 - RNA, 19 nt, Artificial Sequence
  Description of Artificial Sequence: Synthetic oligonucleotide
  Antisense strand to SEQ ID NO: 1091102
uuccaacauacuuuaaguc

SEQ ID NO: 1091104 - RNA, 19 nt, Artificial Sequence
  Description of Artificial Sequence: Synthetic oligonucleotide
  Sense strand starting at position 3585 of SEQ ID NO: 915586
guuacaugcucauaccaag

SEQ ID NO: 1091105 - RNA, 19 nt, Artificial Sequence
  Description of Artificial Sequence: Synthetic oligonucleotide
  Antisense strand to SEQ ID NO: 1091104
cuugguaugagcauguaac

SEQ ID NO: 1091106 - RNA, 19 nt, Artificial Sequence
  Description of Artificial Sequence: Synthetic oligonucleotide
  Sense strand starting at position 3686 of SEQ ID NO: 915586
gggacaacuguaugugaau

SEQ ID NO: 1091107 - RNA, 19 nt, Artificial Sequence
  Description of Artificial Sequence: Synthetic oligonucleotide
  Antisense strand to SEQ ID NO: 1091106
auucacauacaguuguccc

SEQ ID NO: 1091108 - RNA, 19 nt, Artificial Sequence
  Description of Artificial Sequence: Synthetic oligonucleotide
  Sense strand starting at position 3687 of SEQ ID NO: 915586
ggacaacuguaugugaauu

SEQ ID NO: 1091109 - RNA, 19 nt, Artificial Sequence
  Description of Artificial Sequence: Synthetic oligonucleotide
  Antisense strand to SEQ ID NO: 1091108
aauucacauacaguugucc

SEQ ID NO: 1091110 - RNA, 19 nt, Artificial Sequence
  Description of Artificial Sequence: Synthetic oligonucleotide
  Sense strand starting at position 3756 of SEQ ID NO: 915586
acaggauagcuguguauga

SEQ ID NO: 1091111 - RNA, 19 nt, Artificial Sequence
  Description of Artificial Sequence: Synthetic oligonucleotide
  Antisense strand to SEQ ID NO: 1091110
ucauacacagcuauccugu

SEQ ID NO: 1091112 - RNA, 19 nt, Artificial Sequence
  Description of Artificial Sequence: Synthetic oligonucleotide
  Sense strand starting at position 3796 of SEQ ID NO: 915586
uuugcaaaccuuuggugaa

SEQ ID NO: 1091113 - RNA, 19 nt, Artificial Sequence
  Description of Artificial Sequence: Synthetic oligonucleotide
  Antisense strand to SEQ ID NO: 1091112
uucaccaaagguuugcaaa

SEQ ID NO: 1091114 - RNA, 19 nt, Artificial Sequence
  Description of Artificial Sequence: Synthetic oligonucleotide
  Sense strand starting at position 3797 of SEQ ID NO: 915586
uugcaaaccuuuggugaau

SEQ ID NO: 1091115 - RNA, 19 nt, Artificial Sequence
  Description of Artificial Sequence: Synthetic oligonucleotide
  Antisense strand to SEQ ID NO: 1091114
auucaccaaagguuugcaa

SEQ ID NO: 1091116 - RNA, 19 nt, Artificial Sequence
  Description of Artificial Sequence: Synthetic oligonucleotide
  Sense strand starting at position 3806 of SEQ ID NO: 915586
uuuggugaauaucagacuu

SEQ ID NO: 1091117 - RNA, 19 nt, Artificial Sequence
  Description of Artificial Sequence: Synthetic oligonucleotide
  Antisense strand to SEQ ID NO: 1091116
aagucugauauucaccaaa

SEQ ID NO: 1091118 - RNA, 19 nt, Artificial Sequence
  Description of Artificial Sequence: Synthetic oligonucleotide
  Sense strand starting at position 3958 of SEQ ID NO: 915586
ugcaaaugagagugaguaa

SEQ ID NO: 1091119 - RNA, 19 nt, Artificial Sequence
  Description of Artificial Sequence: Synthetic oligonucleotide
  Antisense strand to SEQ ID NO: 1091118
uuacucacucucauuugca

SEQ ID NO: 1091120 - RNA, 19 nt, Artificial Sequence
  Description of Artificial Sequence: Synthetic oligonucleotide
  Sense strand starting at position 799 of SEQ ID NO: 915587
ggucgauaggucuagagug

SEQ ID NO: 1091121 - RNA, 19 nt, Artificial Sequence
  Description of Artificial Sequence: Synthetic oligonucleotide
  Antisense strand to SEQ ID NO: 1091120
cacucuagaccuaucgacc

SEQ ID NO: 1091122 - RNA, 19 nt, Artificial Sequence
  Description of Artificial Sequence: Synthetic oligonucleotide
  Sense strand starting at position 801 of SEQ ID NO: 915587
ucgauaggucuagagugga

SEQ ID NO: 1091123 - RNA, 19 nt, Artificial Sequence
  Description of Artificial Sequence: Synthetic oligonucleotide
  Antisense strand to SEQ ID NO: 1091122
uccacucuagaccuaucga

SEQ ID NO: 1091124 - RNA, 19 nt, Artificial Sequence
  Description of Artificial Sequence: Synthetic oligonucleotide
  Sense strand starting at position 855 of SEQ ID NO: 915587
uuggcaauauugcugagaa

SEQ ID NO: 1091125 - RNA, 19 nt, Artificial Sequence
  Description of Artificial Sequence: Synthetic oligonucleotide
  Antisense strand to SEQ ID NO: 1091124
uucucagcaauauugccaa

SEQ ID NO: 1091126 - RNA, 19 nt, Artificial Sequence
  Description of Artificial Sequence: Synthetic oligonucleotide
  Sense strand starting at position 856 of SEQ ID NO: 915587
uggcaauauugcugagaac

SEQ ID NO: 1091127 - RNA, 19 nt, Artificial Sequence
  Description of Artificial Sequence: Synthetic oligonucleotide
  Antisense strand to SEQ ID NO: 1091126
guucucagcaauauugcca

SEQ ID NO: 1091128 - RNA, 19 nt, Artificial Sequence
  Description of Artificial Sequence: Synthetic oligonucleotide
  Sense strand starting at position 2493 of SEQ ID NO: 915587
gcggaagugacuugcgcaa

SEQ ID NO: 1091129 - RNA, 19 nt, Artificial Sequence
  Description of Artificial Sequence: Synthetic oligonucleotide
  Antisense strand to SEQ ID NO: 1091128
uugcgcaagucacuuccgc

SEQ ID NO: 1091130 - RNA, 19 nt, Artificial Sequence
  Description of Artificial Sequence: Synthetic oligonucleotide
  Sense strand starting at position 3497 of SEQ ID NO: 915587
gcagauagcgcugcugaca

SEQ ID NO: 1091131 - RNA, 19 nt, Artificial Sequence
  Description of Artificial Sequence: Synthetic oligonucleotide
  Antisense strand to SEQ ID NO: 1091130
ugucagcagcgcuaucugc

SEQ ID NO: 1091132 - RNA, 19 nt, Artificial Sequence
  Description of Artificial Sequence: Synthetic oligonucleotide
  Sense strand starting at position 485 of SEQ ID NO: 915588
uagcaaucacaggguuaca

SEQ ID NO: 1091133 - RNA, 19 nt, Artificial Sequence
  Description of Artificial Sequence: Synthetic oligonucleotide
  Antisense strand to SEQ ID NO: 1091132
uguaacccugugauugcua

SEQ ID NO: 1091134 - RNA, 19 nt, Artificial Sequence
  Description of Artificial Sequence: Synthetic oligonucleotide
  Sense strand starting at position 559 of SEQ ID NO: 915588
gaggcuuauagccauggga

SEQ ID NO: 1091135 - RNA, 19 nt, Artificial Sequence
  Description of Artificial Sequence: Synthetic oligonucleotide
  Antisense strand to SEQ ID NO: 1091134
ucccauggcuauaagccuc

SEQ ID NO: 1091136 - RNA, 19 nt, Artificial Sequence
  Description of Artificial Sequence: Synthetic oligonucleotide
  Sense strand starting at position 561 of SEQ ID NO: 915588
ggcuuauagccaugggaca

SEQ ID NO: 1091137 - RNA, 19 nt, Artificial Sequence
  Description of Artificial Sequence: Synthetic oligonucleotide
  Antisense strand to SEQ ID NO: 1091136
ugucccauggcuauaagcc

SEQ ID NO: 1091138 - RNA, 19 nt, Artificial Sequence
  Description of Artificial Sequence: Synthetic oligonucleotide
  Sense strand starting at position 562 of SEQ ID NO: 915588
gcuuauagccaugggacau

SEQ ID NO: 1091139 - RNA, 19 nt, Artificial Sequence
  Description of Artificial Sequence: Synthetic oligonucleotide
  Antisense strand to SEQ ID NO: 1091138
augucccauggcuauaagc

SEQ ID NO: 1091140 - RNA, 19 nt, Artificial Sequence
  Description of Artificial Sequence: Synthetic oligonucleotide
  Sense strand starting at position 574 of SEQ ID NO: 915588
gggacaucucaccgauucu

SEQ ID NO: 1091141 - RNA, 19 nt, Artificial Sequence
  Description of Artificial Sequence: Synthetic oligonucleotide
  Antisense strand to SEQ ID NO: 1091140
agaaucggugagauguccc

SEQ ID NO: 1091142 - RNA, 19 nt, Artificial Sequence
  Description of Artificial Sequence: Synthetic oligonucleotide
  Sense strand starting at position 591 of SEQ ID NO: 915588
cucggaagccaucauacuu

SEQ ID NO: 1091143 - RNA, 19 nt, Artificial Sequence
  Description of Artificial Sequence: Synthetic oligonucleotide
  Antisense strand to SEQ ID NO: 1091142
aaguaugauggcuuccgag

SEQ ID NO: 1091144 - RNA, 19 nt, Artificial Sequence
  Description of Artificial Sequence: Synthetic oligonucleotide
  Sense strand starting at position 664 of SEQ ID NO: 915588
gcgccagauaccuucuguu

SEQ ID NO: 1091145 - RNA, 19 nt, Artificial Sequence
  Description of Artificial Sequence: Synthetic oligonucleotide
  Antisense strand to SEQ ID NO: 1091144
aacagaagguaucuggcgc

SEQ ID NO: 1091146 - RNA, 19 nt, Artificial Sequence
  Description of Artificial Sequence: Synthetic oligonucleotide
  Sense strand starting at position 753 of SEQ ID NO: 915588
accucagucgaccaucauu

SEQ ID NO: 1091147 - RNA, 19 nt, Artificial Sequence
  Description of Artificial Sequence: Synthetic oligonucleotide
  Antisense strand to SEQ ID NO: 1091146
aaugauggucgacugaggu

SEQ ID NO: 1091148 - RNA, 19 nt, Artificial Sequence
  Description of Artificial Sequence: Synthetic oligonucleotide
  Sense strand starting at position 861 of SEQ ID NO: 915588
guggacuggccagauuauc

SEQ ID NO: 1091149 - RNA, 19 nt, Artificial Sequence
  Description of Artificial Sequence: Synthetic oligonucleotide
  Antisense strand to SEQ ID NO: 1091148
gauaaucuggccaguccac

SEQ ID NO: 1091150 - RNA, 19 nt, Artificial Sequence
  Description of Artificial Sequence: Synthetic oligonucleotide
  Sense strand starting at position 870 of SEQ ID NO: 915588
ccagauuaucaaugcagga

SEQ ID NO: 1091151 - RNA, 19 nt, Artificial Sequence
  Description of Artificial Sequence: Synthetic oligonucleotide
  Antisense strand to SEQ ID NO: 1091150
uccugcauugauaaucugg

SEQ ID NO: 1091152 - RNA, 19 nt, Artificial Sequence
  Description of Artificial Sequence: Synthetic oligonucleotide
  Sense strand starting at position 1003 of SEQ ID NO: 915588
auauacggucccuauaacu

SEQ ID NO: 1091153 - RNA, 19 nt, Artificial Sequence
  Description of Artificial Sequence: Synthetic oligonucleotide
  Antisense strand to SEQ ID NO: 1091152
aguuauagggaccguauau

SEQ ID NO: 1091154 - RNA, 19 nt, Artificial Sequence
  Description of Artificial Sequence: Synthetic oligonucleotide
  Sense strand starting at position 1022 of SEQ ID NO: 915588
cugagacuaucucucagua

SEQ ID NO: 1091155 - RNA, 19 nt, Artificial Sequence
  Description of Artificial Sequence: Synthetic oligonucleotide
  Antisense strand to SEQ ID NO: 1091154
uacugagagauagucucag

SEQ ID NO: 1091156 - RNA, 19 nt, Artificial Sequence
  Description of Artificial Sequence: Synthetic oligonucleotide
  Sense strand starting at position 1044 of SEQ ID NO: 915588
ccuugaguugguggagaca

SEQ ID NO: 1091157 - RNA, 19 nt, Artificial Sequence
  Description of Artificial Sequence: Synthetic oligonucleotide
  Antisense strand to SEQ ID NO: 1091156
ugucuccaccaacucaagg

SEQ ID NO: 1091158 - RNA, 19 nt, Artificial Sequence
  Description of Artificial Sequence: Synthetic oligonucleotide
  Sense strand starting at position 1071 of SEQ ID NO: 915588
acauuauacugagucuucu

SEQ ID NO: 1091159 - RNA, 19 nt, Artificial Sequence
  Description of Artificial Sequence: Synthetic oligonucleotide
  Antisense strand to SEQ ID NO: 1091158
agaagacucaguauaaugu

SEQ ID NO: 1091160 - RNA, 19 nt, Artificial Sequence
  Description of Artificial Sequence: Synthetic oligonucleotide
  Sense strand starting at position 1113 of SEQ ID NO: 915588
gcaagcucucauuaaugga

SEQ ID NO: 1091161 - RNA, 19 nt, Artificial Sequence
  Description of Artificial Sequence: Synthetic oligonucleotide
  Antisense strand to SEQ ID NO: 1091160
uccauuaaugagagcuugc

SEQ ID NO: 1091162 - RNA, 19 nt, Artificial Sequence
  Description of Artificial Sequence: Synthetic oligonucleotide
  Sense strand starting at position 1179 of SEQ ID NO: 915588
agccauucucaccauggaa

SEQ ID NO: 1091163 - RNA, 19 nt, Artificial Sequence
  Description of Artificial Sequence: Synthetic oligonucleotide
  Antisense strand to SEQ ID NO: 1091162
uuccauggugagaauggcu

SEQ ID NO: 1091164 - RNA, 19 nt, Artificial Sequence
  Description of Artificial Sequence: Synthetic oligonucleotide
  Sense strand starting at position 1208 of SEQ ID NO: 915588
ccugauagacgucguugaa

SEQ ID NO: 1091165 - RNA, 19 nt, Artificial Sequence
  Description of Artificial Sequence: Synthetic oligonucleotide
  Antisense strand to SEQ ID NO: 1091164
uucaacgacgucuaucagg

SEQ ID NO: 1091166 - RNA, 19 nt, Artificial Sequence
  Description of Artificial Sequence: Synthetic oligonucleotide
  Sense strand starting at position 1211 of SEQ ID NO: 915588
gauagacgucguugaacuc

SEQ ID NO: 1091167 - RNA, 19 nt, Artificial Sequence
  Description of Artificial Sequence: Synthetic oligonucleotide
  Antisense strand to SEQ ID NO: 1091166
gaguucaacgacgucuauc

SEQ ID NO: 1091168 - RNA, 19 nt, Artificial Sequence
  Description of Artificial Sequence: Synthetic oligonucleotide
  Sense strand starting at position 1775 of SEQ ID NO: 915588
gcggaaugguccaugucga

SEQ ID NO: 1091169 - RNA, 19 nt, Artificial Sequence
  Description of Artificial Sequence: Synthetic oligonucleotide
  Antisense strand to SEQ ID NO: 1091168
ucgacauggaccauuccgc

SEQ ID NO: 1091170 - RNA, 19 nt, Artificial Sequence
  Description of Artificial Sequence: Synthetic oligonucleotide
  Sense strand starting at position 2271 of SEQ ID NO: 915588
ggaaugaugcgugcccguu

SEQ ID NO: 1091171 - RNA, 19 nt, Artificial Sequence
  Description of Artificial Sequence: Synthetic oligonucleotide
  Antisense strand to SEQ ID NO: 1091170
aacgggcacgcaucauucc

SEQ ID NO: 1091172 - RNA, 19 nt, Artificial Sequence
  Description of Artificial Sequence: Synthetic oligonucleotide
  Sense strand starting at position 2272 of SEQ ID NO: 915588
gaaugaugcgugcccguuu

SEQ ID NO: 1091173 - RNA, 19 nt, Artificial Sequence
  Description of Artificial Sequence: Synthetic oligonucleotide
  Antisense strand to SEQ ID NO: 1091172
aaacgggcacgcaucauuc

SEQ ID NO: 1091174 - RNA, 19 nt, Artificial Sequence
  Description of Artificial Sequence: Synthetic oligonucleotide
  Sense strand starting at position 2304 of SEQ ID NO: 915588
uuucuaugucauggaaagg

SEQ ID NO: 1091175 - RNA, 19 nt, Artificial Sequence
  Description of Artificial Sequence: Synthetic oligonucleotide
  Antisense strand to SEQ ID NO: 1091174
ccuuuccaugacauagaaa

SEQ ID NO: 1091176 - RNA, 19 nt, Artificial Sequence
  Description of Artificial Sequence: Synthetic oligonucleotide
  Sense strand starting at position 2339 of SEQ ID NO: 915588
agagaaguauuugaacagu

SEQ ID NO: 1091177 - RNA, 19 nt, Artificial Sequence
  Description of Artificial Sequence: Synthetic oligonucleotide
  Antisense strand to SEQ ID NO: 1091176
acuguucaaauacuucucu

SEQ ID NO: 1091178 - RNA, 19 nt, Artificial Sequence
  Description of Artificial Sequence: Synthetic oligonucleotide
  Sense strand starting at position 2350 of SEQ ID NO: 915588
ugaacaguugugggaggaa

SEQ ID NO: 1091179 - RNA, 19 nt, Artificial Sequence
  Description of Artificial Sequence: Synthetic oligonucleotide
  Antisense strand to SEQ ID NO: 1091178
uuccucccacaacuguuca

SEQ ID NO: 1091180 - RNA, 19 nt, Artificial Sequence
  Description of Artificial Sequence: Synthetic oligonucleotide
  Sense strand starting at position 2618 of SEQ ID NO: 915588
cguauaaucccagagugca

SEQ ID NO: 1091181 - RNA, 19 nt, Artificial Sequence
  Description of Artificial Sequence: Synthetic oligonucleotide
  Antisense strand to SEQ ID NO: 1091180
ugcacucugggauuauacg

SEQ ID NO: 1091182 - RNA, 19 nt, Artificial Sequence
  Description of Artificial Sequence: Synthetic oligonucleotide
  Sense strand starting at position 2744 of SEQ ID NO: 915588
ggucucagugcguuggcaa

SEQ ID NO: 1091183 - RNA, 19 nt, Artificial Sequence
  Description of Artificial Sequence: Synthetic oligonucleotide
  Antisense strand to SEQ ID NO: 1091182
uugccaacgcacugagacc

SEQ ID NO: 1091184 - RNA, 19 nt, Artificial Sequence
  Description of Artificial Sequence: Synthetic oligonucleotide
  Sense strand starting at position 2817 of SEQ ID NO: 915588
ucauaaucacagugacugu

SEQ ID NO: 1091185 - RNA, 19 nt, Artificial Sequence
  Description of Artificial Sequence: Synthetic oligonucleotide
  Antisense strand to SEQ ID NO: 1091184
acagucacugugauuauga

SEQ ID NO: 1091186 - RNA, 19 nt, Artificial Sequence
  Description of Artificial Sequence: Synthetic oligonucleotide
  Sense strand starting at position 2851 of SEQ ID NO: 915588
auugauauguguccuacau

SEQ ID NO: 1091187 - RNA, 19 nt, Artificial Sequence
  Description of Artificial Sequence: Synthetic oligonucleotide
  Antisense strand to SEQ ID NO: 1091186
auguaggacacauaucaau

SEQ ID NO: 1091188 - RNA, 19 nt, Artificial Sequence
  Description of Artificial Sequence: Synthetic oligonucleotide
  Sense strand starting at position 2855 of SEQ ID NO: 915588
auauguguccuacaugaag

SEQ ID NO: 1091189 - RNA, 19 nt, Artificial Sequence
  Description of Artificial Sequence: Synthetic oligonucleotide
  Antisense strand to SEQ ID NO: 1091188
cuucauguaggacacauau

SEQ ID NO: 1091190 - RNA, 19 nt, Artificial Sequence
  Description of Artificial Sequence: Synthetic oligonucleotide
  Sense strand starting at position 2869 of SEQ ID NO: 915588
ugaagacauuaguacagaa

SEQ ID NO: 1091191 - RNA, 19 nt, Artificial Sequence
  Description of Artificial Sequence: Synthetic oligonucleotide
  Antisense strand to SEQ ID NO: 1091190
uucuguacuaaugucuuca

SEQ ID NO: 1091192 - RNA, 19 nt, Artificial Sequence
  Description of Artificial Sequence: Synthetic oligonucleotide
  Sense strand starting at position 2988 of SEQ ID NO: 915588
agcuuuaaccucugaguag

SEQ ID NO: 1091193 - RNA, 19 nt, Artificial Sequence
  Description of Artificial Sequence: Synthetic oligonucleotide
  Antisense strand to SEQ ID NO: 1091192
cuacucagagguuaaagcu

SEQ ID NO: 1091194 - RNA, 19 nt, Artificial Sequence
  Description of Artificial Sequence: Synthetic oligonucleotide
  Sense strand starting at position 2999 of SEQ ID NO: 915588
cugaguaguggcuauucca

SEQ ID NO: 1091195 - RNA, 19 nt, Artificial Sequence
  Description of Artificial Sequence: Synthetic oligonucleotide
  Antisense strand to SEQ ID NO: 1091194
uggaauagccacuacucag

SEQ ID NO: 1091196 - RNA, 19 nt, Artificial Sequence
  Description of Artificial Sequence: Synthetic oligonucleotide
  Sense strand starting at position 3007 of SEQ ID NO: 915588
uggcuauuccagcauuauc

SEQ ID NO: 1091197 - RNA, 19 nt, Artificial Sequence
  Description of Artificial Sequence: Synthetic oligonucleotide
  Antisense strand to SEQ ID NO: 1091196
gauaaugcuggaauagcca

SEQ ID NO: 1091198 - RNA, 19 nt, Artificial Sequence
  Description of Artificial Sequence: Synthetic oligonucleotide
  Sense strand starting at position 3056 of SEQ ID NO: 915588
auagauauugagggccuau

SEQ ID NO: 1091199 - RNA, 19 nt, Artificial Sequence
  Description of Artificial Sequence: Synthetic oligonucleotide
  Antisense strand to SEQ ID NO: 1091198
auaggcccucaauaucuau

SEQ ID NO: 1091200 - RNA, 19 nt, Artificial Sequence
  Description of Artificial Sequence: Synthetic oligonucleotide
  Sense strand starting at position 3085 of SEQ ID NO: 915588
gcacacuucucagauuuga

SEQ ID NO: 1091201 - RNA, 19 nt, Artificial Sequence
  Description of Artificial Sequence: Synthetic oligonucleotide
  Antisense strand to SEQ ID NO: 1091200
ucaaaucugagaagugugc

SEQ ID NO: 1091202 - RNA, 19 nt, Artificial Sequence
  Description of Artificial Sequence: Synthetic oligonucleotide
  Sense strand starting at position 3838 of SEQ ID NO: 915588
aauguaaaugacggguaua

SEQ ID NO: 1091203 - RNA, 19 nt, Artificial Sequence
  Description of Artificial Sequence: Synthetic oligonucleotide
  Antisense strand to SEQ ID NO: 1091202
uauacccgucauuuacauu

SEQ ID NO: 1091204 - RNA, 19 nt, Artificial Sequence
  Description of Artificial Sequence: Synthetic oligonucleotide
  Sense strand starting at position 3839 of SEQ ID NO: 915588
auguaaaugacggguauau

SEQ ID NO: 1091205 - RNA, 19 nt, Artificial Sequence
  Description of Artificial Sequence: Synthetic oligonucleotide
  Antisense strand to SEQ ID NO: 1091204
auauacccgucauuuacau

SEQ ID NO: 1091206 - RNA, 19 nt, Artificial Sequence
  Description of Artificial Sequence: Synthetic oligonucleotide
  Sense strand starting at position 3849 of SEQ ID NO: 915588
cggguauauuuacaguuaa

SEQ ID NO: 1091207 - RNA, 19 nt, Artificial Sequence
  Description of Artificial Sequence: Synthetic oligonucleotide
  Antisense strand to SEQ ID NO: 1091206
uuaacuguaaauauacccg

SEQ ID NO: 1091208 - RNA, 19 nt, Artificial Sequence
  Description of Artificial Sequence: Synthetic oligonucleotide
  Sense strand starting at position 3860 of SEQ ID NO: 915588
acaguuaacgggugcaaca

SEQ ID NO: 1091209 - RNA, 19 nt, Artificial Sequence
  Description of Artificial Sequence: Synthetic oligonucleotide
  Antisense strand to SEQ ID NO: 1091208
uguugcacccguuaacugu

SEQ ID NO: 1091210 - RNA, 19 nt, Artificial Sequence
  Description of Artificial Sequence: Synthetic oligonucleotide
  Sense strand starting at position 3925 of SEQ ID NO: 915588
gcagguuuaccauagaacu

SEQ ID NO: 1091211 - RNA, 19 nt, Artificial Sequence
  Description of Artificial Sequence: Synthetic oligonucleotide
  Antisense strand to SEQ ID NO: 1091210
aguucuaugguaaaccugc

SEQ ID NO: 1091212 - RNA, 19 nt, Artificial Sequence
  Description of Artificial Sequence: Synthetic oligonucleotide
  Sense strand starting at position 177 of SEQ ID NO: 915589
ugaucuaacaguggaguca

SEQ ID NO: 1091213 - RNA, 19 nt, Artificial Sequence
  Description of Artificial Sequence: Synthetic oligonucleotide
  Antisense strand to SEQ ID NO: 1091212
ugacuccacuguuagauca

SEQ ID NO: 1091214 - RNA, 19 nt, Artificial Sequence
  Description of Artificial Sequence: Synthetic oligonucleotide
  Sense strand starting at position 283 of SEQ ID NO: 915589
gugggcaugagaugggaua

SEQ ID NO: 1091215 - RNA, 19 nt, Artificial Sequence
  Description of Artificial Sequence: Synthetic oligonucleotide
  Antisense strand to SEQ ID NO: 1091214
uaucccaucucaugcccac

SEQ ID NO: 1091216 - RNA, 19 nt, Artificial Sequence
  Description of Artificial Sequence: Synthetic oligonucleotide
  Sense strand starting at position 470 of SEQ ID NO: 915589
ggcuauggcuucuuccuua

SEQ ID NO: 1091217 - RNA, 19 nt, Artificial Sequence
  Description of Artificial Sequence: Synthetic oligonucleotide
  Antisense strand to SEQ ID NO: 1091216
uaaggaagaagccauagcc

SEQ ID NO: 1091218 - RNA, 19 nt, Artificial Sequence
  Description of Artificial Sequence: Synthetic oligonucleotide
  Sense strand starting at position 474 of SEQ ID NO: 915589
auggcuucuuccuuagaaa

SEQ ID NO: 1091219 - RNA, 19 nt, Artificial Sequence
  Description of Artificial Sequence: Synthetic oligonucleotide
  Antisense strand to SEQ ID NO: 1091218
uuucuaaggaagaagccau

SEQ ID NO: 1091220 - RNA, 19 nt, Artificial Sequence
  Description of Artificial Sequence: Synthetic oligonucleotide
  Sense strand starting at position 1213 of SEQ ID NO: 915589
guaucacauuuaugcccua

SEQ ID NO: 1091221 - RNA, 19 nt, Artificial Sequence
  Description of Artificial Sequence: Synthetic oligonucleotide
  Antisense strand to SEQ ID NO: 1091220
uagggcauaaaugugauac

SEQ ID NO: 1091222 - RNA, 19 nt, Artificial Sequence
  Description of Artificial Sequence: Synthetic oligonucleotide
  Sense strand starting at position 1300 of SEQ ID NO: 915589
ggugcuuggugcucuuauu

SEQ ID NO: 1091223 - RNA, 19 nt, Artificial Sequence
  Description of Artificial Sequence: Synthetic oligonucleotide
  Antisense strand to SEQ ID NO: 1091222
aauaagagcaccaagcacc

SEQ ID NO: 1091224 - RNA, 19 nt, Artificial Sequence
  Description of Artificial Sequence: Synthetic oligonucleotide
  Sense strand starting at position 1306 of SEQ ID NO: 915589
uggugcucuuauugaguua

SEQ ID NO: 1091225 - RNA, 19 nt, Artificial Sequence
  Description of Artificial Sequence: Synthetic oligonucleotide
  Antisense strand to SEQ ID NO: 1091224
uaacucaauaagagcacca

SEQ ID NO: 1091226 - RNA, 19 nt, Artificial Sequence
  Description of Artificial Sequence: Synthetic oligonucleotide
  Sense strand starting at position 1307 of SEQ ID NO: 915589
ggugcucuuauugaguuaa

SEQ ID NO: 1091227 - RNA, 19 nt, Artificial Sequence
  Description of Artificial Sequence: Synthetic oligonucleotide
  Antisense strand to SEQ ID NO: 1091226
uuaacucaauaagagcacc

SEQ ID NO: 1091228 - RNA, 19 nt, Artificial Sequence
  Description of Artificial Sequence: Synthetic oligonucleotide
  Sense strand starting at position 1311 of SEQ ID NO: 915589
cucuuauugaguuaagggu

SEQ ID NO: 1091229 - RNA, 19 nt, Artificial Sequence
  Description of Artificial Sequence: Synthetic oligonucleotide
  Antisense strand to SEQ ID NO: 1091228
acccuuaacucaauaagag

SEQ ID NO: 1091230 - RNA, 19 nt, Artificial Sequence
  Description of Artificial Sequence: Synthetic oligonucleotide
  Sense strand starting at position 1320 of SEQ ID NO: 915589
aguuaaggguccucuuuag

SEQ ID NO: 1091231 - RNA, 19 nt, Artificial Sequence
  Description of Artificial Sequence: Synthetic oligonucleotide
  Antisense strand to SEQ ID NO: 1091230
cuaaagaggacccuuaacu

SEQ ID NO: 1091232 - RNA, 19 nt, Artificial Sequence
  Description of Artificial Sequence: Synthetic oligonucleotide
  Sense strand starting at position 1413 of SEQ ID NO: 915589
gggccucuaucaccacuua

SEQ ID NO: 1091233 - RNA, 19 nt, Artificial Sequence
  Description of Artificial Sequence: Synthetic oligonucleotide
  Antisense strand to SEQ ID NO: 1091232
uaaguggugauagaggccc

SEQ ID NO: 1091234 - RNA, 19 nt, Artificial Sequence
  Description of Artificial Sequence: Synthetic oligonucleotide
  Sense strand starting at position 1480 of SEQ ID NO: 915589
uuacucuuaccgggauuau

SEQ ID NO: 1091235 - RNA, 19 nt, Artificial Sequence
  Description of Artificial Sequence: Synthetic oligonucleotide
  Antisense strand to SEQ ID NO: 1091234
auaaucccgguaagaguaa

SEQ ID NO: 1091236 - RNA, 19 nt, Artificial Sequence
  Description of Artificial Sequence: Synthetic oligonucleotide
  Sense strand starting at position 1481 of SEQ ID NO: 915589
uacucuuaccgggauuauc

SEQ ID NO: 1091237 - RNA, 19 nt, Artificial Sequence
  Description of Artificial Sequence: Synthetic oligonucleotide
  Antisense strand to SEQ ID NO: 1091236
gauaaucccgguaagagua

SEQ ID NO: 1091238 - RNA, 19 nt, Artificial Sequence
  Description of Artificial Sequence: Synthetic oligonucleotide
  Sense strand starting at position 2207 of SEQ ID NO: 915589
aggagcgucuccuugguaa

SEQ ID NO: 1091239 - RNA, 19 nt, Artificial Sequence
  Description of Artificial Sequence: Synthetic oligonucleotide
  Antisense strand to SEQ ID NO: 1091238
uuaccaaggagacgcuccu

SEQ ID NO: 1091240 - RNA, 19 nt, Artificial Sequence
  Description of Artificial Sequence: Synthetic oligonucleotide
  Sense strand starting at position 2209 of SEQ ID NO: 915589
gagcgucuccuugguaacu

SEQ ID NO: 1091241 - RNA, 19 nt, Artificial Sequence
  Description of Artificial Sequence: Synthetic oligonucleotide
  Antisense strand to SEQ ID NO: 1091240
aguuaccaaggagacgcuc

SEQ ID NO: 1091242 - RNA, 19 nt, Artificial Sequence
  Description of Artificial Sequence: Synthetic oligonucleotide
  Sense strand starting at position 2603 of SEQ ID NO: 915589
ccgaccguucuuugaaguu

SEQ ID NO: 1091243 - RNA, 19 nt, Artificial Sequence
  Description of Artificial Sequence: Synthetic oligonucleotide
  Antisense strand to SEQ ID NO: 1091242
aacuucaaagaacggucgg

SEQ ID NO: 1091244 - RNA, 19 nt, Artificial Sequence
  Description of Artificial Sequence: Synthetic oligonucleotide
  Sense strand starting at position 2733 of SEQ ID NO: 915589
acauacucuugcgaccauu

SEQ ID NO: 1091245 - RNA, 19 nt, Artificial Sequence
  Description of Artificial Sequence: Synthetic oligonucleotide
  Antisense strand to SEQ ID NO: 1091244
aauggucgcaagaguaugu

SEQ ID NO: 1091246 - RNA, 19 nt, Artificial Sequence
  Description of Artificial Sequence: Synthetic oligonucleotide
  Sense strand starting at position 2753 of SEQ ID NO: 915589
ggcucuucuugggugaguu

SEQ ID NO: 1091247 - RNA, 19 nt, Artificial Sequence
  Description of Artificial Sequence: Synthetic oligonucleotide
  Antisense strand to SEQ ID NO: 1091246
aacucacccaagaagagcc

SEQ ID NO: 1091248 - RNA, 19 nt, Artificial Sequence
  Description of Artificial Sequence: Synthetic oligonucleotide
  Sense strand starting at position 2761 of SEQ ID NO: 915589
uugggugaguugcaaguua

SEQ ID NO: 1091249 - RNA, 19 nt, Artificial Sequence
  Description of Artificial Sequence: Synthetic oligonucleotide
  Antisense strand to SEQ ID NO: 1091248
uaacuugcaacucacccaa

SEQ ID NO: 1091250 - RNA, 19 nt, Artificial Sequence
  Description of Artificial Sequence: Synthetic oligonucleotide
  Sense strand starting at position 3057 of SEQ ID NO: 915589
cucuuccuuccacguagaa

SEQ ID NO: 1091251 - RNA, 19 nt, Artificial Sequence
  Description of Artificial Sequence: Synthetic oligonucleotide
  Antisense strand to SEQ ID NO: 1091250
uucuacguggaaggaagag

SEQ ID NO: 1091252 - RNA, 19 nt, Artificial Sequence
  Description of Artificial Sequence: Synthetic oligonucleotide
  Sense strand starting at position 3200 of SEQ ID NO: 915589
ucguuucuaucaggcugaa

SEQ ID NO: 1091253 - RNA, 19 nt, Artificial Sequence
  Description of Artificial Sequence: Synthetic oligonucleotide
  Antisense strand to SEQ ID NO: 1091252
uucagccugauagaaacga

SEQ ID NO: 1091254 - RNA, 19 nt, Artificial Sequence
  Description of Artificial Sequence: Synthetic oligonucleotide
  Sense strand starting at position 3203 of SEQ ID NO: 915589
uuucuaucaggcugaauag

SEQ ID NO: 1091255 - RNA, 19 nt, Artificial Sequence
  Description of Artificial Sequence: Synthetic oligonucleotide
  Antisense strand to SEQ ID NO: 1091254
cuauucagccugauagaaa

SEQ ID NO: 1091256 - RNA, 19 nt, Artificial Sequence
  Description of Artificial Sequence: Synthetic oligonucleotide
  Sense strand starting at position 3399 of SEQ ID NO: 915589
aggaacugucucugaacca

SEQ ID NO: 1091257 - RNA, 19 nt, Artificial Sequence
  Description of Artificial Sequence: Synthetic oligonucleotide
  Antisense strand to SEQ ID NO: 1091256
ugguucagagacaguuccu

SEQ ID NO: 1091258 - RNA, 19 nt, Artificial Sequence
  Description of Artificial Sequence: Synthetic oligonucleotide
  Sense strand starting at position 3400 of SEQ ID NO: 915589
ggaacugucucugaaccau

SEQ ID NO: 1091259 - RNA, 19 nt, Artificial Sequence
  Description of Artificial Sequence: Synthetic oligonucleotide
  Antisense strand to SEQ ID NO: 1091258
augguucagagacaguucc

SEQ ID NO: 1091260 - RNA, 19 nt, Artificial Sequence
  Description of Artificial Sequence: Synthetic oligonucleotide
  Sense strand starting at position 3502 of SEQ ID NO: 915589
ccgacuaugucaccaucau

SEQ ID NO: 1091261 - RNA, 19 nt, Artificial Sequence
  Description of Artificial Sequence: Synthetic oligonucleotide
  Antisense strand to SEQ ID NO: 1091260
augauggugacauagucgg

SEQ ID NO: 1091262 - RNA, 19 nt, Artificial Sequence
  Description of Artificial Sequence: Synthetic oligonucleotide
  Sense strand starting at position 3503 of SEQ ID NO: 915589
cgacuaugucaccaucaug

SEQ ID NO: 1091263 - RNA, 19 nt, Artificial Sequence
  Description of Artificial Sequence: Synthetic oligonucleotide
  Antisense strand to SEQ ID NO: 1091262
caugauggugacauagucg

SEQ ID NO: 1091264 - RNA, 19 nt, Artificial Sequence
  Description of Artificial Sequence: Synthetic oligonucleotide
  Sense strand starting at position 3561 of SEQ ID NO: 915589
caaagagccuuacaugagu

SEQ ID NO: 1091265 - RNA, 19 nt, Artificial Sequence
  Description of Artificial Sequence: Synthetic oligonucleotide
  Antisense strand to SEQ ID NO: 1091264
acucauguaaggcucuuug

SEQ ID NO: 1091266 - RNA, 19 nt, Artificial Sequence
  Description of Artificial Sequence: Synthetic oligonucleotide
  Sense strand starting at position 3570 of SEQ ID NO: 915589
uuacaugaguccucucacu

SEQ ID NO: 1091267 - RNA, 19 nt, Artificial Sequence
  Description of Artificial Sequence: Synthetic oligonucleotide
  Antisense strand to SEQ ID NO: 1091266
agugagaggacucauguaa

SEQ ID NO: 1091268 - RNA, 19 nt, Artificial Sequence
  Description of Artificial Sequence: Synthetic oligonucleotide
  Sense strand starting at position 3667 of SEQ ID NO: 915589
cagugucguucuuguacua

SEQ ID NO: 1091269 - RNA, 19 nt, Artificial Sequence
  Description of Artificial Sequence: Synthetic oligonucleotide
  Antisense strand to SEQ ID NO: 1091268
uaguacaagaacgacacug

SEQ ID NO: 1091270 - RNA, 19 nt, Artificial Sequence
  Description of Artificial Sequence: Synthetic oligonucleotide
  Sense strand starting at position 3750 of SEQ ID NO: 915589
gcgggcagaugucuugaga

SEQ ID NO: 1091271 - RNA, 19 nt, Artificial Sequence
  Description of Artificial Sequence: Synthetic oligonucleotide
  Antisense strand to SEQ ID NO: 1091270
ucucaagacaucugcccgc

SEQ ID NO: 1091272 - RNA, 19 nt, Artificial Sequence
  Description of Artificial Sequence: Synthetic oligonucleotide
  Sense strand starting at position 3753 of SEQ ID NO: 915589
ggcagaugucuugagauca

SEQ ID NO: 1091273 - RNA, 19 nt, Artificial Sequence
  Description of Artificial Sequence: Synthetic oligonucleotide
  Antisense strand to SEQ ID NO: 1091272
ugaucucaagacaucugcc

SEQ ID NO: 1091274 - RNA, 19 nt, Artificial Sequence
  Description of Artificial Sequence: Synthetic oligonucleotide
  Sense strand starting at position 190 of SEQ ID NO: 915590
ugaucuaacaguggaguca

SEQ ID NO: 1091275 - RNA, 19 nt, Artificial Sequence
  Description of Artificial Sequence: Synthetic oligonucleotide
  Antisense strand to SEQ ID NO: 1091274
ugacuccacuguuagauca

SEQ ID NO: 1091276 - RNA, 19 nt, Artificial Sequence
  Description of Artificial Sequence: Synthetic oligonucleotide
  Sense strand starting at position 296 of SEQ ID NO: 915590
gugggcaugagaugggaua

SEQ ID NO: 1091277 - RNA, 19 nt, Artificial Sequence
  Description of Artificial Sequence: Synthetic oligonucleotide
  Antisense strand to SEQ ID NO: 1091276
uaucccaucucaugcccac

SEQ ID NO: 1091278 - RNA, 19 nt, Artificial Sequence
  Description of Artificial Sequence: Synthetic oligonucleotide
  Sense strand starting at position 483 of SEQ ID NO: 915590
ggcuauggcuucuuccuua

SEQ ID NO: 1091279 - RNA, 19 nt, Artificial Sequence
  Description of Artificial Sequence: Synthetic oligonucleotide
  Antisense strand to SEQ ID NO: 1091278
uaaggaagaagccauagcc

SEQ ID NO: 1091280 - RNA, 19 nt, Artificial Sequence
  Description of Artificial Sequence: Synthetic oligonucleotide
  Sense strand starting at position 487 of SEQ ID NO: 915590
auggcuucuuccuuagaaa

SEQ ID NO: 1091281 - RNA, 19 nt, Artificial Sequence
  Description of Artificial Sequence: Synthetic oligonucleotide
  Antisense strand to SEQ ID NO: 1091280
uuucuaaggaagaagccau

SEQ ID NO: 1091282 - RNA, 19 nt, Artificial Sequence
  Description of Artificial Sequence: Synthetic oligonucleotide
  Sense strand starting at position 1226 of SEQ ID NO: 915590
guaucacauuuaugcccua

SEQ ID NO: 1091283 - RNA, 19 nt, Artificial Sequence
  Description of Artificial Sequence: Synthetic oligonucleotide
  Antisense strand to SEQ ID NO: 1091282
uagggcauaaaugugauac

SEQ ID NO: 1091284 - RNA, 19 nt, Artificial Sequence
  Description of Artificial Sequence: Synthetic oligonucleotide
  Sense strand starting at position 1313 of SEQ ID NO: 915590
ggugcuuggugcucuuauu

SEQ ID NO: 1091285 - RNA, 19 nt, Artificial Sequence
  Description of Artificial Sequence: Synthetic oligonucleotide
  Antisense strand to SEQ ID NO: 1091284
aauaagagcaccaagcacc

SEQ ID NO: 1091286 - RNA, 19 nt, Artificial Sequence
  Description of Artificial Sequence: Synthetic oligonucleotide
  Sense strand starting at position 1319 of SEQ ID NO: 915590
uggugcucuuauugaguua

SEQ ID NO: 1091287 - RNA, 19 nt, Artificial Sequence
  Description of Artificial Sequence: Synthetic oligonucleotide
  Antisense strand to SEQ ID NO: 1091286
uaacucaauaagagcacca

SEQ ID NO: 1091288 - RNA, 19 nt, Artificial Sequence
  Description of Artificial Sequence: Synthetic oligonucleotide
  Sense strand starting at position 1320 of SEQ ID NO: 915590
ggugcucuuauugaguuaa

SEQ ID NO: 1091289 - RNA, 19 nt, Artificial Sequence
  Description of Artificial Sequence: Synthetic oligonucleotide
  Antisense strand to SEQ ID NO: 1091288
uuaacucaauaagagcacc

SEQ ID NO: 1091290 - RNA, 19 nt, Artificial Sequence
  Description of Artificial Sequence: Synthetic oligonucleotide
  Sense strand starting at position 1324 of SEQ ID NO: 915590
cucuuauugaguuaagggu

SEQ ID NO: 1091291 - RNA, 19 nt, Artificial Sequence
  Description of Artificial Sequence: Synthetic oligonucleotide
  Antisense strand to SEQ ID NO: 1091290
acccuuaacucaauaagag

SEQ ID NO: 1091292 - RNA, 19 nt, Artificial Sequence
  Description of Artificial Sequence: Synthetic oligonucleotide
  Sense strand starting at position 1333 of SEQ ID NO: 915590
aguuaaggguccucuuuag

SEQ ID NO: 1091293 - RNA, 19 nt, Artificial Sequence
  Description of Artificial Sequence: Synthetic oligonucleotide
  Antisense strand to SEQ ID NO: 1091292
cuaaagaggacccuuaacu

SEQ ID NO: 1091294 - RNA, 19 nt, Artificial Sequence
  Description of Artificial Sequence: Synthetic oligonucleotide
  Sense strand starting at position 1426 of SEQ ID NO: 915590
gggccucuaucaccacuua

SEQ ID NO: 1091295 - RNA, 19 nt, Artificial Sequence
  Description of Artificial Sequence: Synthetic oligonucleotide
  Antisense strand to SEQ ID NO: 1091294
uaaguggugauagaggccc

SEQ ID NO: 1091296 - RNA, 19 nt, Artificial Sequence
  Description of Artificial Sequence: Synthetic oligonucleotide
  Sense strand starting at position 1493 of SEQ ID NO: 915590
uuacucuuaccgggauuau

SEQ ID NO: 1091297 - RNA, 19 nt, Artificial Sequence
  Description of Artificial Sequence: Synthetic oligonucleotide
  Antisense strand to SEQ ID NO: 1091296
auaaucccgguaagaguaa

SEQ ID NO: 1091298 - RNA, 19 nt, Artificial Sequence
  Description of Artificial Sequence: Synthetic oligonucleotide
  Sense strand starting at position 1494 of SEQ ID NO: 915590
uacucuuaccgggauuauc

SEQ ID NO: 1091299 - RNA, 19 nt, Artificial Sequence
  Description of Artificial Sequence: Synthetic oligonucleotide
  Antisense strand to SEQ ID NO: 1091298
gauaaucccgguaagagua

SEQ ID NO: 1091300 - RNA, 19 nt, Artificial Sequence
  Description of Artificial Sequence: Synthetic oligonucleotide
  Sense strand starting at position 2220 of SEQ ID NO: 915590
aggagcgucuccuugguaa

SEQ ID NO: 1091301 - RNA, 19 nt, Artificial Sequence
  Description of Artificial Sequence: Synthetic oligonucleotide
  Antisense strand to SEQ ID NO: 1091300
uuaccaaggagacgcuccu

SEQ ID NO: 1091302 - RNA, 19 nt, Artificial Sequence
  Description of Artificial Sequence: Synthetic oligonucleotide
  Sense strand starting at position 2222 of SEQ ID NO: 915590
gagcgucuccuugguaacu

SEQ ID NO: 1091303 - RNA, 19 nt, Artificial Sequence
  Description of Artificial Sequence: Synthetic oligonucleotide
  Antisense strand to SEQ ID NO: 1091302
aguuaccaaggagacgcuc

SEQ ID NO: 1091304 - RNA, 19 nt, Artificial Sequence
  Description of Artificial Sequence: Synthetic oligonucleotide
  Sense strand starting at position 2616 of SEQ ID NO: 915590
ccgaccguucuuugaaguu

SEQ ID NO: 1091305 - RNA, 19 nt, Artificial Sequence
  Description of Artificial Sequence: Synthetic oligonucleotide
  Antisense strand to SEQ ID NO: 1091304
aacuucaaagaacggucgg

SEQ ID NO: 1091306 - RNA, 19 nt, Artificial Sequence
  Description of Artificial Sequence: Synthetic oligonucleotide
  Sense strand starting at position 2746 of SEQ ID NO: 915590
acauacucuugcgaccauu

SEQ ID NO: 1091307 - RNA, 19 nt, Artificial Sequence
  Description of Artificial Sequence: Synthetic oligonucleotide
  Antisense strand to SEQ ID NO: 1091306
aauggucgcaagaguaugu

SEQ ID NO: 1091308 - RNA, 19 nt, Artificial Sequence
  Description of Artificial Sequence: Synthetic oligonucleotide
  Sense strand starting at position 2766 of SEQ ID NO: 915590
ggcucuucuugggugaguu

SEQ ID NO: 1091309 - RNA, 19 nt, Artificial Sequence
  Description of Artificial Sequence: Synthetic oligonucleotide
  Antisense strand to SEQ ID NO: 1091308
aacucacccaagaagagcc

SEQ ID NO: 1091310 - RNA, 19 nt, Artificial Sequence
  Description of Artificial Sequence: Synthetic oligonucleotide
  Sense strand starting at position 2774 of SEQ ID NO: 915590
uugggugaguugcaaguua

SEQ ID NO: 1091311 - RNA, 19 nt, Artificial Sequence
  Description of Artificial Sequence: Synthetic oligonucleotide
  Antisense strand to SEQ ID NO: 1091310
uaacuugcaacucacccaa

SEQ ID NO: 1091312 - RNA, 19 nt, Artificial Sequence
  Description of Artificial Sequence: Synthetic oligonucleotide
  Sense strand starting at position 3070 of SEQ ID NO: 915590
cucuuccuuccacguagaa

SEQ ID NO: 1091313 - RNA, 19 nt, Artificial Sequence
  Description of Artificial Sequence: Synthetic oligonucleotide
  Antisense strand to SEQ ID NO: 1091312
uucuacguggaaggaagag

SEQ ID NO: 1091314 - RNA, 19 nt, Artificial Sequence
  Description of Artificial Sequence: Synthetic oligonucleotide
  Sense strand starting at position 3213 of SEQ ID NO: 915590
ucguuucuaucaggcugaa

SEQ ID NO: 1091315 - RNA, 19 nt, Artificial Sequence
  Description of Artificial Sequence: Synthetic oligonucleotide
  Antisense strand to SEQ ID NO: 1091314
uucagccugauagaaacga

SEQ ID NO: 1091316 - RNA, 19 nt, Artificial Sequence
  Description of Artificial Sequence: Synthetic oligonucleotide
  Sense strand starting at position 3216 of SEQ ID NO: 915590
uuucuaucaggcugaauag

SEQ ID NO: 1091317 - RNA, 19 nt, Artificial Sequence
  Description of Artificial Sequence: Synthetic oligonucleotide
  Antisense strand to SEQ ID NO: 1091316
cuauucagccugauagaaa

SEQ ID NO: 1091318 - RNA, 19 nt, Artificial Sequence
  Description of Artificial Sequence: Synthetic oligonucleotide
  Sense strand starting at position 3412 of SEQ ID NO: 915590
aggaacugucucugaacca

SEQ ID NO: 1091319 - RNA, 19 nt, Artificial Sequence
  Description of Artificial Sequence: Synthetic oligonucleotide
  Antisense strand to SEQ ID NO: 1091318
ugguucagagacaguuccu

SEQ ID NO: 1091320 - RNA, 19 nt, Artificial Sequence
  Description of Artificial Sequence: Synthetic oligonucleotide
  Sense strand starting at position 3413 of SEQ ID NO: 915590
ggaacugucucugaaccau

SEQ ID NO: 1091321 - RNA, 19 nt, Artificial Sequence
  Description of Artificial Sequence: Synthetic oligonucleotide
  Antisense strand to SEQ ID NO: 1091320
augguucagagacaguucc

SEQ ID NO: 1091322 - RNA, 19 nt, Artificial Sequence
  Description of Artificial Sequence: Synthetic oligonucleotide
  Sense strand starting at position 3515 of SEQ ID NO: 915590
ccgacuaugucaccaucau

SEQ ID NO: 1091323 - RNA, 19 nt, Artificial Sequence
  Description of Artificial Sequence: Synthetic oligonucleotide
  Antisense strand to SEQ ID NO: 1091322
augauggugacauagucgg

SEQ ID NO: 1091324 - RNA, 19 nt, Artificial Sequence
  Description of Artificial Sequence: Synthetic oligonucleotide
  Sense strand starting at position 3516 of SEQ ID NO: 915590
cgacuaugucaccaucaug

SEQ ID NO: 1091325 - RNA, 19 nt, Artificial Sequence
  Description of Artificial Sequence: Synthetic oligonucleotide
  Antisense strand to SEQ ID NO: 1091324
caugauggugacauagucg

SEQ ID NO: 1091326 - RNA, 19 nt, Artificial Sequence
  Description of Artificial Sequence: Synthetic oligonucleotide
  Sense strand starting at position 3574 of SEQ ID NO: 915590
caaagagccuuacaugagu

SEQ ID NO: 1091327 - RNA, 19 nt, Artificial Sequence
  Description of Artificial Sequence: Synthetic oligonucleotide
  Antisense strand to SEQ ID NO: 1091326
acucauguaaggcucuuug

SEQ ID NO: 1091328 - RNA, 19 nt, Artificial Sequence
  Description of Artificial Sequence: Synthetic oligonucleotide
  Sense strand starting at position 3583 of SEQ ID NO: 915590
uuacaugaguccucucacu

SEQ ID NO: 1091329 - RNA, 19 nt, Artificial Sequence
  Description of Artificial Sequence: Synthetic oligonucleotide
  Antisense strand to SEQ ID NO: 1091328
agugagaggacucauguaa

SEQ ID NO: 1091330 - RNA, 19 nt, Artificial Sequence
  Description of Artificial Sequence: Synthetic oligonucleotide
  Sense strand starting at position 3680 of SEQ ID NO: 915590
cagugucguucuuguacua

SEQ ID NO: 1091331 - RNA, 19 nt, Artificial Sequence
  Description of Artificial Sequence: Synthetic oligonucleotide
  Antisense strand to SEQ ID NO: 1091330
uaguacaagaacgacacug

SEQ ID NO: 1091332 - RNA, 19 nt, Artificial Sequence
  Description of Artificial Sequence: Synthetic oligonucleotide
  Sense strand starting at position 3763 of SEQ ID NO: 915590
gcgggcagaugucuugaga

SEQ ID NO: 1091333 - RNA, 19 nt, Artificial Sequence
  Description of Artificial Sequence: Synthetic oligonucleotide
  Antisense strand to SEQ ID NO: 1091332
ucucaagacaucugcccgc

SEQ ID NO: 1091334 - RNA, 19 nt, Artificial Sequence
  Description of Artificial Sequence: Synthetic oligonucleotide
  Sense strand starting at position 3766 of SEQ ID NO: 915590
ggcagaugucuugagauca

SEQ ID NO: 1091335 - RNA, 19 nt, Artificial Sequence
  Description of Artificial Sequence: Synthetic oligonucleotide
  Antisense strand to SEQ ID NO: 1091334
ugaucucaagacaucugcc

SEQ ID NO: 1091336 - RNA, 19 nt, Artificial Sequence
  Description of Artificial Sequence: Synthetic oligonucleotide
  Sense strand starting at position 170 of SEQ ID NO: 915591
caagacaaguccgcugaau

SEQ ID NO: 1091337 - RNA, 19 nt, Artificial Sequence
  Description of Artificial Sequence: Synthetic oligonucleotide
  Antisense strand to SEQ ID NO: 1091336
auucagcggacuugucuug

SEQ ID NO: 1091338 - RNA, 19 nt, Artificial Sequence
  Description of Artificial Sequence: Synthetic oligonucleotide
  Sense strand starting at position 172 of SEQ ID NO: 915591
agacaaguccgcugaaugu

SEQ ID NO: 1091339 - RNA, 19 nt, Artificial Sequence
  Description of Artificial Sequence: Synthetic oligonucleotide
  Antisense strand to SEQ ID NO: 1091338
acauucagcggacuugucu

SEQ ID NO: 1091340 - RNA, 19 nt, Artificial Sequence
  Description of Artificial Sequence: Synthetic oligonucleotide
  Sense strand starting at position 359 of SEQ ID NO: 915591
accggacugcccugaaaua

SEQ ID NO: 1091341 - RNA, 19 nt, Artificial Sequence
  Description of Artificial Sequence: Synthetic oligonucleotide
  Antisense strand to SEQ ID NO: 1091340
uauuucagggcaguccggu

SEQ ID NO: 1091342 - RNA, 19 nt, Artificial Sequence
  Description of Artificial Sequence: Synthetic oligonucleotide
  Sense strand starting at position 360 of SEQ ID NO: 915591
ccggacugcccugaaauaa

SEQ ID NO: 1091343 - RNA, 19 nt, Artificial Sequence
  Description of Artificial Sequence: Synthetic oligonucleotide
  Antisense strand to SEQ ID NO: 1091342
uuauuucagggcaguccgg

SEQ ID NO: 1091344 - RNA, 19 nt, Artificial Sequence
  Description of Artificial Sequence: Synthetic oligonucleotide
  Sense strand starting at position 559 of SEQ ID NO: 915591
cuccuugcugagggugaaa

SEQ ID NO: 1091345 - RNA, 19 nt, Artificial Sequence
  Description of Artificial Sequence: Synthetic oligonucleotide
  Antisense strand to SEQ ID NO: 1091344
uuucacccucagcaaggag

SEQ ID NO: 1091346 - RNA, 19 nt, Artificial Sequence
  Description of Artificial Sequence: Synthetic oligonucleotide
  Sense strand starting at position 672 of SEQ ID NO: 915591
ucgggaugcugcuuggaca

SEQ ID NO: 1091347 - RNA, 19 nt, Artificial Sequence
  Description of Artificial Sequence: Synthetic oligonucleotide
  Antisense strand to SEQ ID NO: 1091346
uguccaagcagcaucccga

SEQ ID NO: 1091348 - RNA, 19 nt, Artificial Sequence
  Description of Artificial Sequence: Synthetic oligonucleotide
  Sense strand starting at position 673 of SEQ ID NO: 915591
cgggaugcugcuuggacaa

SEQ ID NO: 1091349 - RNA, 19 nt, Artificial Sequence
  Description of Artificial Sequence: Synthetic oligonucleotide
  Antisense strand to SEQ ID NO: 1091348
uuguccaagcagcaucccg

SEQ ID NO: 1091350 - RNA, 19 nt, Artificial Sequence
  Description of Artificial Sequence: Synthetic oligonucleotide
  Sense strand starting at position 693 of SEQ ID NO: 915591
aggaauugaucugagacag

SEQ ID NO: 1091351 - RNA, 19 nt, Artificial Sequence
  Description of Artificial Sequence: Synthetic oligonucleotide
  Antisense strand to SEQ ID NO: 1091350
cugucucagaucaauuccu

SEQ ID NO: 1091352 - RNA, 19 nt, Artificial Sequence
  Description of Artificial Sequence: Synthetic oligonucleotide
  Sense strand starting at position 810 of SEQ ID NO: 915591
ggccaucauuugcagagga

SEQ ID NO: 1091353 - RNA, 19 nt, Artificial Sequence
  Description of Artificial Sequence: Synthetic oligonucleotide
  Antisense strand to SEQ ID NO: 1091352
uccucugcaaaugauggcc

SEQ ID NO: 1091354 - RNA, 19 nt, Artificial Sequence
  Description of Artificial Sequence: Synthetic oligonucleotide
  Sense strand starting at position 972 of SEQ ID NO: 915591
guggguccgucaaugaagu

SEQ ID NO: 1091355 - RNA, 19 nt, Artificial Sequence
  Description of Artificial Sequence: Synthetic oligonucleotide
  Antisense strand to SEQ ID NO: 1091354
acuucauugacggacccac

SEQ ID NO: 1091356 - RNA, 19 nt, Artificial Sequence
  Description of Artificial Sequence: Synthetic oligonucleotide
  Sense strand starting at position 1060 of SEQ ID NO: 915591
auuguucuuucugccaaag

SEQ ID NO: 1091357 - RNA, 19 nt, Artificial Sequence
  Description of Artificial Sequence: Synthetic oligonucleotide
  Antisense strand to SEQ ID NO: 1091356
cuuuggcagaaagaacaau

SEQ ID NO: 1091358 - RNA, 19 nt, Artificial Sequence
  Description of Artificial Sequence: Synthetic oligonucleotide
  Sense strand starting at position 1115 of SEQ ID NO: 915591
agacauguguguucccaca

SEQ ID NO: 1091359 - RNA, 19 nt, Artificial Sequence
  Description of Artificial Sequence: Synthetic oligonucleotide
  Antisense strand to SEQ ID NO: 1091358
ugugggaacacacaugucu

SEQ ID NO: 1091360 - RNA, 19 nt, Artificial Sequence
  Description of Artificial Sequence: Synthetic oligonucleotide
  Sense strand starting at position 2345 of SEQ ID NO: 915591
aggacuaaaucgcauuuau

SEQ ID NO: 1091361 - RNA, 19 nt, Artificial Sequence
  Description of Artificial Sequence: Synthetic oligonucleotide
  Antisense strand to SEQ ID NO: 1091360
auaaaugcgauuuaguccu

SEQ ID NO: 1091362 - RNA, 19 nt, Artificial Sequence
  Description of Artificial Sequence: Synthetic oligonucleotide
  Sense strand starting at position 2615 of SEQ ID NO: 915591
augucaugauucccaaagu

SEQ ID NO: 1091363 - RNA, 19 nt, Artificial Sequence
  Description of Artificial Sequence: Synthetic oligonucleotide
  Antisense strand to SEQ ID NO: 1091362
acuuugggaaucaugacau

SEQ ID NO: 1091364 - RNA, 19 nt, Artificial Sequence
  Description of Artificial Sequence: Synthetic oligonucleotide
  Sense strand starting at position 2797 of SEQ ID NO: 915591
uguauucuguagccaauga

SEQ ID NO: 1091365 - RNA, 19 nt, Artificial Sequence
  Description of Artificial Sequence: Synthetic oligonucleotide
  Antisense strand to SEQ ID NO: 1091364
ucauuggcuacagaauaca

SEQ ID NO: 1091366 - RNA, 19 nt, Artificial Sequence
  Description of Artificial Sequence: Synthetic oligonucleotide
  Sense strand starting at position 2801 of SEQ ID NO: 915591
uucuguagccaaugaacau

SEQ ID NO: 1091367 - RNA, 19 nt, Artificial Sequence
  Description of Artificial Sequence: Synthetic oligonucleotide
  Antisense strand to SEQ ID NO: 1091366
auguucauuggcuacagaa

SEQ ID NO: 1091368 - RNA, 19 nt, Artificial Sequence
  Description of Artificial Sequence: Synthetic oligonucleotide
  Sense strand starting at position 2967 of SEQ ID NO: 915591
agcauucucccaggcucaa

SEQ ID NO: 1091369 - RNA, 19 nt, Artificial Sequence
  Description of Artificial Sequence: Synthetic oligonucleotide
  Antisense strand to SEQ ID NO: 1091368
uugagccugggagaaugcu

SEQ ID NO: 1091370 - RNA, 19 nt, Artificial Sequence
  Description of Artificial Sequence: Synthetic oligonucleotide
  Sense strand starting at position 2979 of SEQ ID NO: 915591
ggcucaaauccuggaauca

SEQ ID NO: 1091371 - RNA, 19 nt, Artificial Sequence
  Description of Artificial Sequence: Synthetic oligonucleotide
  Antisense strand to SEQ ID NO: 1091370
ugauuccaggauuugagcc

SEQ ID NO: 1091372 - RNA, 19 nt, Artificial Sequence
  Description of Artificial Sequence: Synthetic oligonucleotide
  Sense strand starting at position 2980 of SEQ ID NO: 915591
gcucaaauccuggaaucau

SEQ ID NO: 1091373 - RNA, 19 nt, Artificial Sequence
  Description of Artificial Sequence: Synthetic oligonucleotide
  Antisense strand to SEQ ID NO: 1091372
augauuccaggauuugagc

SEQ ID NO: 1091374 - RNA, 19 nt, Artificial Sequence
  Description of Artificial Sequence: Synthetic oligonucleotide
  Sense strand starting at position 3079 of SEQ ID NO: 915591
uccauuccugcgcauuaga

SEQ ID NO: 1091375 - RNA, 19 nt, Artificial Sequence
  Description of Artificial Sequence: Synthetic oligonucleotide
  Antisense strand to SEQ ID NO: 1091374
ucuaaugcgcaggaaugga

SEQ ID NO: 1091376 - RNA, 19 nt, Artificial Sequence
  Description of Artificial Sequence: Synthetic oligonucleotide
  Sense strand starting at position 3082 of SEQ ID NO: 915591
auuccugcgcauuagaaga

SEQ ID NO: 1091377 - RNA, 19 nt, Artificial Sequence
  Description of Artificial Sequence: Synthetic oligonucleotide
  Antisense strand to SEQ ID NO: 1091376
ucuucuaaugcgcaggaau

SEQ ID NO: 1091378 - RNA, 19 nt, Artificial Sequence
  Description of Artificial Sequence: Synthetic oligonucleotide
  Sense strand starting at position 3090 of SEQ ID NO: 915591
gcauuagaagaccgcuauu

SEQ ID NO: 1091379 - RNA, 19 nt, Artificial Sequence
  Description of Artificial Sequence: Synthetic oligonucleotide
  Antisense strand to SEQ ID NO: 1091378
aauagcggucuucuaaugc

SEQ ID NO: 1091380 - RNA, 19 nt, Artificial Sequence
  Description of Artificial Sequence: Synthetic oligonucleotide
  Sense strand starting at position 3093 of SEQ ID NO: 915591
uuagaagaccgcuauucga

SEQ ID NO: 1091381 - RNA, 19 nt, Artificial Sequence
  Description of Artificial Sequence: Synthetic oligonucleotide
  Antisense strand to SEQ ID NO: 1091380
ucgaauagcggucuucuaa

SEQ ID NO: 1091382 - RNA, 19 nt, Artificial Sequence
  Description of Artificial Sequence: Synthetic oligonucleotide
  Sense strand starting at position 3122 of SEQ ID NO: 915591
cccuuugccugguuaagaa

SEQ ID NO: 1091383 - RNA, 19 nt, Artificial Sequence
  Description of Artificial Sequence: Synthetic oligonucleotide
  Antisense strand to SEQ ID NO: 1091382
uucuuaaccaggcaaaggg

SEQ ID NO: 1091384 - RNA, 19 nt, Artificial Sequence
  Description of Artificial Sequence: Synthetic oligonucleotide
  Sense strand starting at position 3229 of SEQ ID NO: 915591
ccgugucucccggaucaaa

SEQ ID NO: 1091385 - RNA, 19 nt, Artificial Sequence
  Description of Artificial Sequence: Synthetic oligonucleotide
  Antisense strand to SEQ ID NO: 1091384
uuugauccgggagacacgg

SEQ ID NO: 1091386 - RNA, 19 nt, Artificial Sequence
  Description of Artificial Sequence: Synthetic oligonucleotide
  Sense strand starting at position 3411 of SEQ ID NO: 915591
cgcauauugggucgaagac

SEQ ID NO: 1091387 - RNA, 19 nt, Artificial Sequence
  Description of Artificial Sequence: Synthetic oligonucleotide
  Antisense strand to SEQ ID NO: 1091386
gucuucgacccaauaugcg

SEQ ID NO: 1091388 - RNA, 19 nt, Artificial Sequence
  Description of Artificial Sequence: Synthetic oligonucleotide
  Sense strand starting at position 3412 of SEQ ID NO: 915591
gcauauugggucgaagaca

SEQ ID NO: 1091389 - RNA, 19 nt, Artificial Sequence
  Description of Artificial Sequence: Synthetic oligonucleotide
  Antisense strand to SEQ ID NO: 1091388
ugucuucgacccaauaugc

SEQ ID NO: 1091390 - RNA, 19 nt, Artificial Sequence
  Description of Artificial Sequence: Synthetic oligonucleotide
  Sense strand starting at position 3516 of SEQ ID NO: 915591
ugaaguuagguauggcagu

SEQ ID NO: 1091391 - RNA, 19 nt, Artificial Sequence
  Description of Artificial Sequence: Synthetic oligonucleotide
  Antisense strand to SEQ ID NO: 1091390
acugccauaccuaacuuca

SEQ ID NO: 1091392 - RNA, 19 nt, Artificial Sequence
  Description of Artificial Sequence: Synthetic oligonucleotide
  Sense strand starting at position 3529 of SEQ ID NO: 915591
ggcaguauggcuagcggua

SEQ ID NO: 1091393 - RNA, 19 nt, Artificial Sequence
  Description of Artificial Sequence: Synthetic oligonucleotide
  Antisense strand to SEQ ID NO: 1091392
uaccgcuagccauacugcc

SEQ ID NO: 1091394 - RNA, 19 nt, Artificial Sequence
  Description of Artificial Sequence: Synthetic oligonucleotide
  Sense strand starting at position 3530 of SEQ ID NO: 915591
gcaguauggcuagcgguaa

SEQ ID NO: 1091395 - RNA, 19 nt, Artificial Sequence
  Description of Artificial Sequence: Synthetic oligonucleotide
  Antisense strand to SEQ ID NO: 1091394
uuaccgcuagccauacugc

SEQ ID NO: 1091396 - RNA, 19 nt, Artificial Sequence
  Description of Artificial Sequence: Synthetic oligonucleotide
  Sense strand starting at position 3626 of SEQ ID NO: 915591
uucugagagguuuaacucu

SEQ ID NO: 1091397 - RNA, 19 nt, Artificial Sequence
  Description of Artificial Sequence: Synthetic oligonucleotide
  Antisense strand to SEQ ID NO: 1091396
agaguuaaaccucucagaa

SEQ ID NO: 1091398 - RNA, 19 nt, Artificial Sequence
  Description of Artificial Sequence: Synthetic oligonucleotide
  Sense strand starting at position 3632 of SEQ ID NO: 915591
gagguuuaacucugugacc

SEQ ID NO: 1091399 - RNA, 19 nt, Artificial Sequence
  Description of Artificial Sequence: Synthetic oligonucleotide
  Antisense strand to SEQ ID NO: 1091398
ggucacagaguuaaaccuc

SEQ ID NO: 1091400 - RNA, 19 nt, Artificial Sequence
  Description of Artificial Sequence: Synthetic oligonucleotide
  Sense strand starting at position 3683 of SEQ ID NO: 915591
ggauauguagcaugaauga

SEQ ID NO: 1091401 - RNA, 19 nt, Artificial Sequence
  Description of Artificial Sequence: Synthetic oligonucleotide
  Antisense strand to SEQ ID NO: 1091400
ucauucaugcuacauaucc

SEQ ID NO: 1091402 - RNA, 19 nt, Artificial Sequence
  Description of Artificial Sequence: Synthetic oligonucleotide
  Sense strand starting at position 3699 of SEQ ID NO: 915591
ugaggagucagucagcuuu

SEQ ID NO: 1091403 - RNA, 19 nt, Artificial Sequence
  Description of Artificial Sequence: Synthetic oligonucleotide
  Antisense strand to SEQ ID NO: 1091402
aaagcugacugacuccuca

SEQ ID NO: 1091404 - RNA, 19 nt, Artificial Sequence
  Description of Artificial Sequence: Synthetic oligonucleotide
  Sense strand starting at position 3751 of SEQ ID NO: 915591
uuguuauugcugcaaaccu

SEQ ID NO: 1091405 - RNA, 19 nt, Artificial Sequence
  Description of Artificial Sequence: Synthetic oligonucleotide
  Antisense strand to SEQ ID NO: 1091404
agguuugcagcaauaacaa

SEQ ID NO: 1091406 - RNA, 19 nt, Artificial Sequence
  Description of Artificial Sequence: Synthetic oligonucleotide
  Sense strand starting at position 3770 of SEQ ID NO: 915591
cacgcuuccugacugauau

SEQ ID NO: 1091407 - RNA, 19 nt, Artificial Sequence
  Description of Artificial Sequence: Synthetic oligonucleotide
  Antisense strand to SEQ ID NO: 1091406
auaucagucaggaagcgug

SEQ ID NO: 1091408 - RNA, 19 nt, Artificial Sequence
  Description of Artificial Sequence: Synthetic oligonucleotide
  Sense strand starting at position 3771 of SEQ ID NO: 915591
acgcuuccugacugauaug

SEQ ID NO: 1091409 - RNA, 19 nt, Artificial Sequence
  Description of Artificial Sequence: Synthetic oligonucleotide
  Antisense strand to SEQ ID NO: 1091408
cauaucagucaggaagcgu

SEQ ID NO: 1091410 - RNA, 19 nt, Artificial Sequence
  Description of Artificial Sequence: Synthetic oligonucleotide
  Sense strand starting at position 3804 of SEQ ID NO: 915591
ggaguuuccuucccucuca

SEQ ID NO: 1091411 - RNA, 19 nt, Artificial Sequence
  Description of Artificial Sequence: Synthetic oligonucleotide
  Antisense strand to SEQ ID NO: 1091410
ugagagggaaggaaacucc

SEQ ID NO: 1091412 - RNA, 19 nt, Artificial Sequence
  Description of Artificial Sequence: Synthetic oligonucleotide
  Sense strand starting at position 3826 of SEQ ID NO: 915591
agaacuagcucuguuugua

SEQ ID NO: 1091413 - RNA, 19 nt, Artificial Sequence
  Description of Artificial Sequence: Synthetic oligonucleotide
  Antisense strand to SEQ ID NO: 1091412
uacaaacagagcuaguucu

SEQ ID NO: 1091414 - RNA, 19 nt, Artificial Sequence
  Description of Artificial Sequence: Synthetic oligonucleotide
  Sense strand starting at position 3936 of SEQ ID NO: 915591
acaauauauugggucaauu

SEQ ID NO: 1091415 - RNA, 19 nt, Artificial Sequence
  Description of Artificial Sequence: Synthetic oligonucleotide
  Antisense strand to SEQ ID NO: 1091414
aauugacccaauauauugu

SEQ ID NO: 1091416 - RNA, 19 nt, Artificial Sequence
  Description of Artificial Sequence: Synthetic oligonucleotide
  Sense strand starting at position 7 of SEQ ID NO: 915592
agcagauucuuaguucuau

SEQ ID NO: 1091417 - RNA, 19 nt, Artificial Sequence
  Description of Artificial Sequence: Synthetic oligonucleotide
  Antisense strand to SEQ ID NO: 1091416
auagaacuaagaaucugcu

SEQ ID NO: 1091418 - RNA, 19 nt, Artificial Sequence
  Description of Artificial Sequence: Synthetic oligonucleotide
  Sense strand starting at position 8 of SEQ ID NO: 915592
gcagauucuuaguucuauc

SEQ ID NO: 1091419 - RNA, 19 nt, Artificial Sequence
  Description of Artificial Sequence: Synthetic oligonucleotide
  Antisense strand to SEQ ID NO: 1091418
gauagaacuaagaaucugc

SEQ ID NO: 1091420 - RNA, 19 nt, Artificial Sequence
  Description of Artificial Sequence: Synthetic oligonucleotide
  Sense strand starting at position 79 of SEQ ID NO: 915592
ggcacucucuuccugagaa

SEQ ID NO: 1091421 - RNA, 19 nt, Artificial Sequence
  Description of Artificial Sequence: Synthetic oligonucleotide
  Antisense strand to SEQ ID NO: 1091420
uucucaggaagagagugcc

SEQ ID NO: 1091422 - RNA, 19 nt, Artificial Sequence
  Description of Artificial Sequence: Synthetic oligonucleotide
  Sense strand starting at position 111 of SEQ ID NO: 915592
cacugcuucccguagggaa

SEQ ID NO: 1091423 - RNA, 19 nt, Artificial Sequence
  Description of Artificial Sequence: Synthetic oligonucleotide
  Antisense strand to SEQ ID NO: 1091422
uucccuacgggaagcagug

SEQ ID NO: 1091424 - RNA, 19 nt, Artificial Sequence
  Description of Artificial Sequence: Synthetic oligonucleotide
  Sense strand starting at position 180 of SEQ ID NO: 915592
cccuguugucucugaacaa

SEQ ID NO: 1091425 - RNA, 19 nt, Artificial Sequence
  Description of Artificial Sequence: Synthetic oligonucleotide
  Antisense strand to SEQ ID NO: 1091424
uuguucagagacaacaggg

SEQ ID NO: 1091426 - RNA, 19 nt, Artificial Sequence
  Description of Artificial Sequence: Synthetic oligonucleotide
  Sense strand starting at position 565 of SEQ ID NO: 915592
agaauuaucgggcagcuuu

SEQ ID NO: 1091427 - RNA, 19 nt, Artificial Sequence
  Description of Artificial Sequence: Synthetic oligonucleotide
  Antisense strand to SEQ ID NO: 1091426
aaagcugcccgauaauucu

SEQ ID NO: 1091428 - RNA, 19 nt, Artificial Sequence
  Description of Artificial Sequence: Synthetic oligonucleotide
  Sense strand starting at position 617 of SEQ ID NO: 915592
agugaauauuuauacagcu

SEQ ID NO: 1091429 - RNA, 19 nt, Artificial Sequence
  Description of Artificial Sequence: Synthetic oligonucleotide
  Antisense strand to SEQ ID NO: 1091428
agcuguauaaauauucacu

SEQ ID NO: 1091430 - RNA, 19 nt, Artificial Sequence
  Description of Artificial Sequence: Synthetic oligonucleotide
  Sense strand starting at position 643 of SEQ ID NO: 915592
cgugcaggcgccuuucaaa

SEQ ID NO: 1091431 - RNA, 19 nt, Artificial Sequence
  Description of Artificial Sequence: Synthetic oligonucleotide
  Antisense strand to SEQ ID NO: 1091430
uuugaaaggcgccugcacg

SEQ ID NO: 1091432 - RNA, 19 nt, Artificial Sequence
  Description of Artificial Sequence: Synthetic oligonucleotide
  Sense strand starting at position 792 of SEQ ID NO: 915592
gagaacucagccuguacca

SEQ ID NO: 1091433 - RNA, 19 nt, Artificial Sequence
  Description of Artificial Sequence: Synthetic oligonucleotide
  Antisense strand to SEQ ID NO: 1091432
ugguacaggcugaguucuc

SEQ ID NO: 1091434 - RNA, 19 nt, Artificial Sequence
  Description of Artificial Sequence: Synthetic oligonucleotide
  Sense strand starting at position 2276 of SEQ ID NO: 915592
gcucgcucccgggaacaau

SEQ ID NO: 1091435 - RNA, 19 nt, Artificial Sequence
  Description of Artificial Sequence: Synthetic oligonucleotide
  Antisense strand to SEQ ID NO: 1091434
auuguucccgggagcgagc

SEQ ID NO: 1091436 - RNA, 19 nt, Artificial Sequence
  Description of Artificial Sequence: Synthetic oligonucleotide
  Sense strand starting at position 2516 of SEQ ID NO: 915592
ucuuuaucuuggccucaga

SEQ ID NO: 1091437 - RNA, 19 nt, Artificial Sequence
  Description of Artificial Sequence: Synthetic oligonucleotide
  Antisense strand to SEQ ID NO: 1091436
ucugaggccaagauaaaga

SEQ ID NO: 1091438 - RNA, 19 nt, Artificial Sequence
  Description of Artificial Sequence: Synthetic oligonucleotide
  Sense strand starting at position 2519 of SEQ ID NO: 915592
uuaucuuggccucagaaag

SEQ ID NO: 1091439 - RNA, 19 nt, Artificial Sequence
  Description of Artificial Sequence: Synthetic oligonucleotide
  Antisense strand to SEQ ID NO: 1091438
cuuucugaggccaagauaa

SEQ ID NO: 1091440 - RNA, 19 nt, Artificial Sequence
  Description of Artificial Sequence: Synthetic oligonucleotide
  Sense strand starting at position 2529 of SEQ ID NO: 915592
cucagaaaguuucucaguu

SEQ ID NO: 1091441 - RNA, 19 nt, Artificial Sequence
  Description of Artificial Sequence: Synthetic oligonucleotide
  Antisense strand to SEQ ID NO: 1091440
aacugagaaacuuucugag

SEQ ID NO: 1091442 - RNA, 19 nt, Artificial Sequence
  Description of Artificial Sequence: Synthetic oligonucleotide
  Sense strand starting at position 2546 of SEQ ID NO: 915592
uuuccuuuccguuauugaa

SEQ ID NO: 1091443 - RNA, 19 nt, Artificial Sequence
  Description of Artificial Sequence: Synthetic oligonucleotide
  Antisense strand to SEQ ID NO: 1091442
uucaauaacggaaaggaaa

SEQ ID NO: 1091444 - RNA, 19 nt, Artificial Sequence
  Description of Artificial Sequence: Synthetic oligonucleotide
  Sense strand starting at position 2572 of SEQ ID NO: 915592
ggcauccugucuccaggaa

SEQ ID NO: 1091445 - RNA, 19 nt, Artificial Sequence
  Description of Artificial Sequence: Synthetic oligonucleotide
  Antisense strand to SEQ ID NO: 1091444
uuccuggagacaggaugcc

SEQ ID NO: 1091446 - RNA, 19 nt, Artificial Sequence
  Description of Artificial Sequence: Synthetic oligonucleotide
  Sense strand starting at position 2796 of SEQ ID NO: 915592
aggaaacuaucagacccau

SEQ ID NO: 1091447 - RNA, 19 nt, Artificial Sequence
  Description of Artificial Sequence: Synthetic oligonucleotide
  Antisense strand to SEQ ID NO: 1091446
augggucugauaguuuccu

SEQ ID NO: 1091448 - RNA, 19 nt, Artificial Sequence
  Description of Artificial Sequence: Synthetic oligonucleotide
  Sense strand starting at position 2900 of SEQ ID NO: 915592
gaauaagugcaagguguga

SEQ ID NO: 1091449 - RNA, 19 nt, Artificial Sequence
  Description of Artificial Sequence: Synthetic oligonucleotide
  Antisense strand to SEQ ID NO: 1091448
ucacaccuugcacuuauuc

SEQ ID NO: 1091450 - RNA, 19 nt, Artificial Sequence
  Description of Artificial Sequence: Synthetic oligonucleotide
  Sense strand starting at position 2913 of SEQ ID NO: 915592
gugugagugacugacagua

SEQ ID NO: 1091451 - RNA, 19 nt, Artificial Sequence
  Description of Artificial Sequence: Synthetic oligonucleotide
  Antisense strand to SEQ ID NO: 1091450
uacugucagucacucacac

SEQ ID NO: 1091452 - RNA, 19 nt, Artificial Sequence
  Description of Artificial Sequence: Synthetic oligonucleotide
  Sense strand starting at position 2986 of SEQ ID NO: 915592
gagggcuuaucugucaaga

SEQ ID NO: 1091453 - RNA, 19 nt, Artificial Sequence
  Description of Artificial Sequence: Synthetic oligonucleotide
  Antisense strand to SEQ ID NO: 1091452
ucuugacagauaagcccuc

SEQ ID NO: 1091454 - RNA, 19 nt, Artificial Sequence
  Description of Artificial Sequence: Synthetic oligonucleotide
  Sense strand starting at position 3018 of SEQ ID NO: 915592
gaagcucugcuccaaguga

SEQ ID NO: 1091455 - RNA, 19 nt, Artificial Sequence
  Description of Artificial Sequence: Synthetic oligonucleotide
  Antisense strand to SEQ ID NO: 1091454
ucacuuggagcagagcuuc

SEQ ID NO: 1091456 - RNA, 19 nt, Artificial Sequence
  Description of Artificial Sequence: Synthetic oligonucleotide
  Sense strand starting at position 3027 of SEQ ID NO: 915592
cuccaagugagcugaguaa

SEQ ID NO: 1091457 - RNA, 19 nt, Artificial Sequence
  Description of Artificial Sequence: Synthetic oligonucleotide
  Antisense strand to SEQ ID NO: 1091456
uuacucagcucacuuggag

SEQ ID NO: 1091458 - RNA, 19 nt, Artificial Sequence
  Description of Artificial Sequence: Synthetic oligonucleotide
  Sense strand starting at position 3078 of SEQ ID NO: 915592
gugacugugcuccaugcua

SEQ ID NO: 1091459 - RNA, 19 nt, Artificial Sequence
  Description of Artificial Sequence: Synthetic oligonucleotide
  Antisense strand to SEQ ID NO: 1091458
uagcauggagcacagucac

SEQ ID NO: 1091460 - RNA, 19 nt, Artificial Sequence
  Description of Artificial Sequence: Synthetic oligonucleotide
  Sense strand starting at position 3080 of SEQ ID NO: 915592
gacugugcuccaugcuaaa

SEQ ID NO: 1091461 - RNA, 19 nt, Artificial Sequence
  Description of Artificial Sequence: Synthetic oligonucleotide
  Antisense strand to SEQ ID NO: 1091460
uuuagcauggagcacaguc

SEQ ID NO: 1091462 - RNA, 19 nt, Artificial Sequence
  Description of Artificial Sequence: Synthetic oligonucleotide
  Sense strand starting at position 3162 of SEQ ID NO: 915592
gugccuuuggcuuaaucag

SEQ ID NO: 1091463 - RNA, 19 nt, Artificial Sequence
  Description of Artificial Sequence: Synthetic oligonucleotide
  Antisense strand to SEQ ID NO: 1091462
cugauuaagccaaaggcac

SEQ ID NO: 1091464 - RNA, 19 nt, Artificial Sequence
  Description of Artificial Sequence: Synthetic oligonucleotide
  Sense strand starting at position 3534 of SEQ ID NO: 915592
ucuccaggccuggaauuaa

SEQ ID NO: 1091465 - RNA, 19 nt, Artificial Sequence
  Description of Artificial Sequence: Synthetic oligonucleotide
  Antisense strand to SEQ ID NO: 1091464
uuaauuccaggccuggaga

SEQ ID NO: 1091466 - RNA, 19 nt, Artificial Sequence
  Description of Artificial Sequence: Synthetic oligonucleotide
  Sense strand starting at position 3543 of SEQ ID NO: 915592
cuggaauuaagcuggguau

SEQ ID NO: 1091467 - RNA, 19 nt, Artificial Sequence
  Description of Artificial Sequence: Synthetic oligonucleotide
  Antisense strand to SEQ ID NO: 1091466
auacccagcuuaauuccag

SEQ ID NO: 1091468 - RNA, 19 nt, Artificial Sequence
  Description of Artificial Sequence: Synthetic oligonucleotide
  Sense strand starting at position 3544 of SEQ ID NO: 915592
uggaauuaagcuggguaua

SEQ ID NO: 1091469 - RNA, 19 nt, Artificial Sequence
  Description of Artificial Sequence: Synthetic oligonucleotide
  Antisense strand to SEQ ID NO: 1091468
uauacccagcuuaauucca

SEQ ID NO: 1091470 - RNA, 19 nt, Artificial Sequence
  Description of Artificial Sequence: Synthetic oligonucleotide
  Sense strand starting at position 3545 of SEQ ID NO: 915592
ggaauuaagcuggguauaa

SEQ ID NO: 1091471 - RNA, 19 nt, Artificial Sequence
  Description of Artificial Sequence: Synthetic oligonucleotide
  Antisense strand to SEQ ID NO: 1091470
uuauacccagcuuaauucc

SEQ ID NO: 1091472 - RNA, 19 nt, Artificial Sequence
  Description of Artificial Sequence: Synthetic oligonucleotide
  Sense strand starting at position 3546 of SEQ ID NO: 915592
gaauuaagcuggguauaaa

SEQ ID NO: 1091473 - RNA, 19 nt, Artificial Sequence
  Description of Artificial Sequence: Synthetic oligonucleotide
  Antisense strand to SEQ ID NO: 1091472
uuuauacccagcuuaauuc

SEQ ID NO: 1091474 - RNA, 19 nt, Artificial Sequence
  Description of Artificial Sequence: Synthetic oligonucleotide
  Sense strand starting at position 3609 of SEQ ID NO: 915592
ggaagagccuccuuguucu

SEQ ID NO: 1091475 - RNA, 19 nt, Artificial Sequence
  Description of Artificial Sequence: Synthetic oligonucleotide
  Antisense strand to SEQ ID NO: 1091474
agaacaaggaggcucuucc

SEQ ID NO: 1091476 - RNA, 19 nt, Artificial Sequence
  Description of Artificial Sequence: Synthetic oligonucleotide
  Sense strand starting at position 3676 of SEQ ID NO: 915592
cuaagugaaucugacagaa

SEQ ID NO: 1091477 - RNA, 19 nt, Artificial Sequence
  Description of Artificial Sequence: Synthetic oligonucleotide
  Antisense strand to SEQ ID NO: 1091476
uucugucagauucacuuag

SEQ ID NO: 1091478 - RNA, 19 nt, Artificial Sequence
  Description of Artificial Sequence: Synthetic oligonucleotide
  Sense strand starting at position 3725 of SEQ ID NO: 915592
uuggccauuugaugaacua

SEQ ID NO: 1091479 - RNA, 19 nt, Artificial Sequence
  Description of Artificial Sequence: Synthetic oligonucleotide
  Antisense strand to SEQ ID NO: 1091478
uaguucaucaaauggccaa

SEQ ID NO: 1091480 - RNA, 19 nt, Artificial Sequence
  Description of Artificial Sequence: Synthetic oligonucleotide
  Sense strand starting at position 3760 of SEQ ID NO: 915592
gcaguucuugccgugaauc

SEQ ID NO: 1091481 - RNA, 19 nt, Artificial Sequence
  Description of Artificial Sequence: Synthetic oligonucleotide
  Antisense strand to SEQ ID NO: 1091480
gauucacggcaagaacugc

SEQ ID NO: 1091482 - RNA, 19 nt, Artificial Sequence
  Description of Artificial Sequence: Synthetic oligonucleotide
  Sense strand starting at position 3762 of SEQ ID NO: 915592
aguucuugccgugaaucac

SEQ ID NO: 1091483 - RNA, 19 nt, Artificial Sequence
  Description of Artificial Sequence: Synthetic oligonucleotide
  Antisense strand to SEQ ID NO: 1091482
gugauucacggcaagaacu

SEQ ID NO: 1091484 - RNA, 19 nt, Artificial Sequence
  Description of Artificial Sequence: Synthetic oligonucleotide
  Sense strand starting at position 3770 of SEQ ID NO: 915592
ccgugaaucacguaaaugu

SEQ ID NO: 1091485 - RNA, 19 nt, Artificial Sequence
  Description of Artificial Sequence: Synthetic oligonucleotide
  Antisense strand to SEQ ID NO: 1091484
acauuuacgugauucacgg

SEQ ID NO: 1091486 - RNA, 19 nt, Artificial Sequence
  Description of Artificial Sequence: Synthetic oligonucleotide
  Sense strand starting at position 3848 of SEQ ID NO: 915592
acucuugucucugccacua

SEQ ID NO: 1091487 - RNA, 19 nt, Artificial Sequence
  Description of Artificial Sequence: Synthetic oligonucleotide
  Antisense strand to SEQ ID NO: 1091486
uaguggcagagacaagagu

SEQ ID NO: 1091488 - RNA, 19 nt, Artificial Sequence
  Description of Artificial Sequence: Synthetic oligonucleotide
  Sense strand starting at position 3927 of SEQ ID NO: 915592
agggcuauuguuggcauua

SEQ ID NO: 1091489 - RNA, 19 nt, Artificial Sequence
  Description of Artificial Sequence: Synthetic oligonucleotide
  Antisense strand to SEQ ID NO: 1091488
uaaugccaacaauagcccu

SEQ ID NO: 1091490 - RNA, 19 nt, Artificial Sequence
  Description of Artificial Sequence: Synthetic oligonucleotide
  Sense strand starting at position 3928 of SEQ ID NO: 915592
gggcuauuguuggcauuaa

SEQ ID NO: 1091491 - RNA, 19 nt, Artificial Sequence
  Description of Artificial Sequence: Synthetic oligonucleotide
  Antisense strand to SEQ ID NO: 1091490
uuaaugccaacaauagccc

SEQ ID NO: 1091492 - RNA, 19 nt, Artificial Sequence
  Description of Artificial Sequence: Synthetic oligonucleotide
  Sense strand starting at position 3961 of SEQ ID NO: 915592
gcgaauuuggucugaaagc

SEQ ID NO: 1091493 - RNA, 19 nt, Artificial Sequence
  Description of Artificial Sequence: Synthetic oligonucleotide
  Antisense strand to SEQ ID NO: 1091492
gcuuucagaccaaauucgc

SEQ ID NO: 1091494 - RNA, 19 nt, Artificial Sequence
  Description of Artificial Sequence: Synthetic oligonucleotide
  Sense strand starting at position 3962 of SEQ ID NO: 915592
cgaauuuggucugaaagca

SEQ ID NO: 1091495 - RNA, 19 nt, Artificial Sequence
  Description of Artificial Sequence: Synthetic oligonucleotide
  Antisense strand to SEQ ID NO: 1091494
ugcuuucagaccaaauucg

SEQ ID NO: 1091496 - RNA, 19 nt, Artificial Sequence
  Description of Artificial Sequence: Synthetic oligonucleotide
  Sense strand starting at position 37 of SEQ ID NO: 915593
agaugcuuccaguaagggu

SEQ ID NO: 1091497 - RNA, 19 nt, Artificial Sequence
  Description of Artificial Sequence: Synthetic oligonucleotide
  Antisense strand to SEQ ID NO: 1091496
acccuuacuggaagcaucu

SEQ ID NO: 1091498 - RNA, 19 nt, Artificial Sequence
  Description of Artificial Sequence: Synthetic oligonucleotide
  Sense strand starting at position 44 of SEQ ID NO: 915593
uccaguaagggugaaggua

SEQ ID NO: 1091499 - RNA, 19 nt, Artificial Sequence
  Description of Artificial Sequence: Synthetic oligonucleotide
  Antisense strand to SEQ ID NO: 1091498
uaccuucacccuuacugga

SEQ ID NO: 1091500 - RNA, 19 nt, Artificial Sequence
  Description of Artificial Sequence: Synthetic oligonucleotide
  Sense strand starting at position 118 of SEQ ID NO: 915593
agcagaggcuuccucacaa

SEQ ID NO: 1091501 - RNA, 19 nt, Artificial Sequence
  Description of Artificial Sequence: Synthetic oligonucleotide
  Antisense strand to SEQ ID NO: 1091500
uugugaggaagccucugcu

SEQ ID NO: 1091502 - RNA, 19 nt, Artificial Sequence
  Description of Artificial Sequence: Synthetic oligonucleotide
  Sense strand starting at position 249 of SEQ ID NO: 915593
gcuuccugaugaucuggau

SEQ ID NO: 1091503 - RNA, 19 nt, Artificial Sequence
  Description of Artificial Sequence: Synthetic oligonucleotide
  Antisense strand to SEQ ID NO: 1091502
auccagaucaucaggaagc

SEQ ID NO: 1091504 - RNA, 19 nt, Artificial Sequence
  Description of Artificial Sequence: Synthetic oligonucleotide
  Sense strand starting at position 267 of SEQ ID NO: 915593
ucagaagaguccuuuggac

SEQ ID NO: 1091505 - RNA, 19 nt, Artificial Sequence
  Description of Artificial Sequence: Synthetic oligonucleotide
  Antisense strand to SEQ ID NO: 1091504
guccaaaggacucuucuga

SEQ ID NO: 1091506 - RNA, 19 nt, Artificial Sequence
  Description of Artificial Sequence: Synthetic oligonucleotide
  Sense strand starting at position 269 of SEQ ID NO: 915593
agaagaguccuuuggacca

SEQ ID NO: 1091507 - RNA, 19 nt, Artificial Sequence
  Description of Artificial Sequence: Synthetic oligonucleotide
  Antisense strand to SEQ ID NO: 1091506
ugguccaaaggacucuucu

SEQ ID NO: 1091508 - RNA, 19 nt, Artificial Sequence
  Description of Artificial Sequence: Synthetic oligonucleotide
  Sense strand starting at position 344 of SEQ ID NO: 915593
cugaguauggccugggaca

SEQ ID NO: 1091509 - RNA, 19 nt, Artificial Sequence
  Description of Artificial Sequence: Synthetic oligonucleotide
  Antisense strand to SEQ ID NO: 1091508
ugucccaggccauacucag

SEQ ID NO: 1091510 - RNA, 19 nt, Artificial Sequence
  Description of Artificial Sequence: Synthetic oligonucleotide
  Sense strand starting at position 711 of SEQ ID NO: 915593
ccuaguccuguccaguaaa

SEQ ID NO: 1091511 - RNA, 19 nt, Artificial Sequence
  Description of Artificial Sequence: Synthetic oligonucleotide
  Antisense strand to SEQ ID NO: 1091510
uuuacuggacaggacuagg

SEQ ID NO: 1091512 - RNA, 19 nt, Artificial Sequence
  Description of Artificial Sequence: Synthetic oligonucleotide
  Sense strand starting at position 714 of SEQ ID NO: 915593
aguccuguccaguaaagaa

SEQ ID NO: 1091513 - RNA, 19 nt, Artificial Sequence
  Description of Artificial Sequence: Synthetic oligonucleotide
  Antisense strand to SEQ ID NO: 1091512
uucuuuacuggacaggacu

SEQ ID NO: 1091514 - RNA, 19 nt, Artificial Sequence
  Description of Artificial Sequence: Synthetic oligonucleotide
  Sense strand starting at position 733 of SEQ ID NO: 915593
aagugaucaguuuguaauc

SEQ ID NO: 1091515 - RNA, 19 nt, Artificial Sequence
  Description of Artificial Sequence: Synthetic oligonucleotide
  Antisense strand to SEQ ID NO: 1091514
gauuacaaacugaucacuu

SEQ ID NO: 1091516 - RNA, 19 nt, Artificial Sequence
  Description of Artificial Sequence: Synthetic oligonucleotide
  Sense strand starting at position 734 of SEQ ID NO: 915593
agugaucaguuuguaauca

SEQ ID NO: 1091517 - RNA, 19 nt, Artificial Sequence
  Description of Artificial Sequence: Synthetic oligonucleotide
  Antisense strand to SEQ ID NO: 1091516
ugauuacaaacugaucacu

SEQ ID NO: 1091518 - RNA, 19 nt, Artificial Sequence
  Description of Artificial Sequence: Synthetic oligonucleotide
  Sense strand starting at position 742 of SEQ ID NO: 915593
guuuguaaucagcaggagu

SEQ ID NO: 1091519 - RNA, 19 nt, Artificial Sequence
  Description of Artificial Sequence: Synthetic oligonucleotide
  Antisense strand to SEQ ID NO: 1091518
acuccugcugauuacaaac

SEQ ID NO: 1091520 - RNA, 19 nt, Artificial Sequence
  Description of Artificial Sequence: Synthetic oligonucleotide
  Sense strand starting at position 792 of SEQ ID NO: 915593
cccgacagcucuucugaaa

SEQ ID NO: 1091521 - RNA, 19 nt, Artificial Sequence
  Description of Artificial Sequence: Synthetic oligonucleotide
  Antisense strand to SEQ ID NO: 1091520
uuucagaagagcugucggg

SEQ ID NO: 1091522 - RNA, 19 nt, Artificial Sequence
  Description of Artificial Sequence: Synthetic oligonucleotide
  Sense strand starting at position 850 of SEQ ID NO: 915593
ugagucguucccuacacau

SEQ ID NO: 1091523 - RNA, 19 nt, Artificial Sequence
  Description of Artificial Sequence: Synthetic oligonucleotide
  Antisense strand to SEQ ID NO: 1091522
auguguagggaacgacuca

SEQ ID NO: 1091524 - RNA, 19 nt, Artificial Sequence
  Description of Artificial Sequence: Synthetic oligonucleotide
  Sense strand starting at position 894 of SEQ ID NO: 915593
cccaucugucaucagcuua

SEQ ID NO: 1091525 - RNA, 19 nt, Artificial Sequence
  Description of Artificial Sequence: Synthetic oligonucleotide
  Antisense strand to SEQ ID NO: 1091524
uaagcugaugacagauggg

SEQ ID NO: 1091526 - RNA, 19 nt, Artificial Sequence
  Description of Artificial Sequence: Synthetic oligonucleotide
  Sense strand starting at position 948 of SEQ ID NO: 915593
ggauauaagcucugugagg

SEQ ID NO: 1091527 - RNA, 19 nt, Artificial Sequence
  Description of Artificial Sequence: Synthetic oligonucleotide
  Antisense strand to SEQ ID NO: 1091526
ccucacagagcuuauaucc

SEQ ID NO: 1091528 - RNA, 19 nt, Artificial Sequence
  Description of Artificial Sequence: Synthetic oligonucleotide
  Sense strand starting at position 957 of SEQ ID NO: 915593
cucugugaggguuggaauu

SEQ ID NO: 1091529 - RNA, 19 nt, Artificial Sequence
  Description of Artificial Sequence: Synthetic oligonucleotide
  Antisense strand to SEQ ID NO: 1091528
aauuccaacccucacagag

SEQ ID NO: 1091530 - RNA, 19 nt, Artificial Sequence
  Description of Artificial Sequence: Synthetic oligonucleotide
  Sense strand starting at position 994 of SEQ ID NO: 915593
gcucuagucccacauguag

SEQ ID NO: 1091531 - RNA, 19 nt, Artificial Sequence
  Description of Artificial Sequence: Synthetic oligonucleotide
  Antisense strand to SEQ ID NO: 1091530
cuacaugugggacuagagc

SEQ ID NO: 1091532 - RNA, 19 nt, Artificial Sequence
  Description of Artificial Sequence: Synthetic oligonucleotide
  Sense strand starting at position 1104 of SEQ ID NO: 915593
ugcaguuuccuugcuguca

SEQ ID NO: 1091533 - RNA, 19 nt, Artificial Sequence
  Description of Artificial Sequence: Synthetic oligonucleotide
  Antisense strand to SEQ ID NO: 1091532
ugacagcaaggaaacugca

SEQ ID NO: 1091534 - RNA, 19 nt, Artificial Sequence
  Description of Artificial Sequence: Synthetic oligonucleotide
  Sense strand starting at position 1115 of SEQ ID NO: 915593
ugcugucaaacugagaagu

SEQ ID NO: 1091535 - RNA, 19 nt, Artificial Sequence
  Description of Artificial Sequence: Synthetic oligonucleotide
  Antisense strand to SEQ ID NO: 1091534
acuucucaguuugacagca

SEQ ID NO: 1091536 - RNA, 19 nt, Artificial Sequence
  Description of Artificial Sequence: Synthetic oligonucleotide
  Sense strand starting at position 1266 of SEQ ID NO: 915593
ucaucuaucuguccaaguu

SEQ ID NO: 1091537 - RNA, 19 nt, Artificial Sequence
  Description of Artificial Sequence: Synthetic oligonucleotide
  Antisense strand to SEQ ID NO: 1091536
aacuuggacagauagauga

SEQ ID NO: 1091538 - RNA, 19 nt, Artificial Sequence
  Description of Artificial Sequence: Synthetic oligonucleotide
  Sense strand starting at position 1293 of SEQ ID NO: 915593
acuggucaagccugauauu

SEQ ID NO: 1091539 - RNA, 19 nt, Artificial Sequence
  Description of Artificial Sequence: Synthetic oligonucleotide
  Antisense strand to SEQ ID NO: 1091538
aauaucaggcuugaccagu

SEQ ID NO: 1091540 - RNA, 19 nt, Artificial Sequence
  Description of Artificial Sequence: Synthetic oligonucleotide
  Sense strand starting at position 1311 of SEQ ID NO: 915593
ucuugauuauggcugaaga

SEQ ID NO: 1091541 - RNA, 19 nt, Artificial Sequence
  Description of Artificial Sequence: Synthetic oligonucleotide
  Antisense strand to SEQ ID NO: 1091540
ucuucagccauaaucaaga

SEQ ID NO: 1091542 - RNA, 19 nt, Artificial Sequence
  Description of Artificial Sequence: Synthetic oligonucleotide
  Sense strand starting at position 1312 of SEQ ID NO: 915593
cuugauuauggcugaagaa

SEQ ID NO: 1091543 - RNA, 19 nt, Artificial Sequence
  Description of Artificial Sequence: Synthetic oligonucleotide
  Antisense strand to SEQ ID NO: 1091542
uucuucagccauaaucaag

SEQ ID NO: 1091544 - RNA, 19 nt, Artificial Sequence
  Description of Artificial Sequence: Synthetic oligonucleotide
  Sense strand starting at position 1393 of SEQ ID NO: 915593
cuagaaauucuggguuaau

SEQ ID NO: 1091545 - RNA, 19 nt, Artificial Sequence
  Description of Artificial Sequence: Synthetic oligonucleotide
  Antisense strand to SEQ ID NO: 1091544
auuaacccagaauuucuag

SEQ ID NO: 1091546 - RNA, 19 nt, Artificial Sequence
  Description of Artificial Sequence: Synthetic oligonucleotide
  Sense strand starting at position 1489 of SEQ ID NO: 915593
cuggaugaucuguggguga

SEQ ID NO: 1091547 - RNA, 19 nt, Artificial Sequence
  Description of Artificial Sequence: Synthetic oligonucleotide
  Antisense strand to SEQ ID NO: 1091546
ucacccacagaucauccag

SEQ ID NO: 1091548 - RNA, 19 nt, Artificial Sequence
  Description of Artificial Sequence: Synthetic oligonucleotide
  Sense strand starting at position 1496 of SEQ ID NO: 915593
aucugugggugaccugaaa

SEQ ID NO: 1091549 - RNA, 19 nt, Artificial Sequence
  Description of Artificial Sequence: Synthetic oligonucleotide
  Antisense strand to SEQ ID NO: 1091548
uuucaggucacccacagau

SEQ ID NO: 1091550 - RNA, 19 nt, Artificial Sequence
  Description of Artificial Sequence: Synthetic oligonucleotide
  Sense strand starting at position 1847 of SEQ ID NO: 915593
cccacucuccgagauguuu

SEQ ID NO: 1091551 - RNA, 19 nt, Artificial Sequence
  Description of Artificial Sequence: Synthetic oligonucleotide
  Antisense strand to SEQ ID NO: 1091550
aaacaucucggagaguggg

SEQ ID NO: 1091552 - RNA, 19 nt, Artificial Sequence
  Description of Artificial Sequence: Synthetic oligonucleotide
  Sense strand starting at position 1924 of SEQ ID NO: 915593
gccguaccuccucugugau

SEQ ID NO: 1091553 - RNA, 19 nt, Artificial Sequence
  Description of Artificial Sequence: Synthetic oligonucleotide
  Antisense strand to SEQ ID NO: 1091552
aucacagaggagguacggc

SEQ ID NO: 1091554 - RNA, 19 nt, Artificial Sequence
  Description of Artificial Sequence: Synthetic oligonucleotide
  Sense strand starting at position 2177 of SEQ ID NO: 915593
gucaguguugcgcuaagca

SEQ ID NO: 1091555 - RNA, 19 nt, Artificial Sequence
  Description of Artificial Sequence: Synthetic oligonucleotide
  Antisense strand to SEQ ID NO: 1091554
ugcuuagcgcaacacugac

SEQ ID NO: 1091556 - RNA, 19 nt, Artificial Sequence
  Description of Artificial Sequence: Synthetic oligonucleotide
  Sense strand starting at position 2567 of SEQ ID NO: 915593
caagaugucccuggccgaa

SEQ ID NO: 1091557 - RNA, 19 nt, Artificial Sequence
  Description of Artificial Sequence: Synthetic oligonucleotide
  Antisense strand to SEQ ID NO: 1091556
uucggccagggacaucuug

SEQ ID NO: 1091558 - RNA, 19 nt, Artificial Sequence
  Description of Artificial Sequence: Synthetic oligonucleotide
  Sense strand starting at position 2595 of SEQ ID NO: 915593
ucaguucugccacagaacu

SEQ ID NO: 1091559 - RNA, 19 nt, Artificial Sequence
  Description of Artificial Sequence: Synthetic oligonucleotide
  Antisense strand to SEQ ID NO: 1091558
aguucuguggcagaacuga

SEQ ID NO: 1091560 - RNA, 19 nt, Artificial Sequence
  Description of Artificial Sequence: Synthetic oligonucleotide
  Sense strand starting at position 2817 of SEQ ID NO: 915593
agcgauauggcuuaauguu

SEQ ID NO: 1091561 - RNA, 19 nt, Artificial Sequence
  Description of Artificial Sequence: Synthetic oligonucleotide
  Antisense strand to SEQ ID NO: 1091560
aacauuaagccauaucgcu

SEQ ID NO: 1091562 - RNA, 19 nt, Artificial Sequence
  Description of Artificial Sequence: Synthetic oligonucleotide
  Sense strand starting at position 2868 of SEQ ID NO: 915593
agaagcucgcgguuuacuu

SEQ ID NO: 1091563 - RNA, 19 nt, Artificial Sequence
  Description of Artificial Sequence: Synthetic oligonucleotide
  Antisense strand to SEQ ID NO: 1091562
aaguaaaccgcgagcuucu

SEQ ID NO: 1091564 - RNA, 19 nt, Artificial Sequence
  Description of Artificial Sequence: Synthetic oligonucleotide
  Sense strand starting at position 2888 of SEQ ID NO: 915593
cugguucugugaucacaag

SEQ ID NO: 1091565 - RNA, 19 nt, Artificial Sequence
  Description of Artificial Sequence: Synthetic oligonucleotide
  Antisense strand to SEQ ID NO: 1091564
cuugugaucacagaaccag

SEQ ID NO: 1091566 - RNA, 19 nt, Artificial Sequence
  Description of Artificial Sequence: Synthetic oligonucleotide
  Sense strand starting at position 3250 of SEQ ID NO: 915593
guccucaguucuguaggga

SEQ ID NO: 1091567 - RNA, 19 nt, Artificial Sequence
  Description of Artificial Sequence: Synthetic oligonucleotide
  Antisense strand to SEQ ID NO: 1091566
ucccuacagaacugaggac

SEQ ID NO: 1091568 - RNA, 19 nt, Artificial Sequence
  Description of Artificial Sequence: Synthetic oligonucleotide
  Sense strand starting at position 3251 of SEQ ID NO: 915593
uccucaguucuguagggaa

SEQ ID NO: 1091569 - RNA, 19 nt, Artificial Sequence
  Description of Artificial Sequence: Synthetic oligonucleotide
  Antisense strand to SEQ ID NO: 1091568
uucccuacagaacugagga

SEQ ID NO: 1091570 - RNA, 19 nt, Artificial Sequence
  Description of Artificial Sequence: Synthetic oligonucleotide
  Sense strand starting at position 3529 of SEQ ID NO: 915593
cuccuucccucagugauca

SEQ ID NO: 1091571 - RNA, 19 nt, Artificial Sequence
  Description of Artificial Sequence: Synthetic oligonucleotide
  Antisense strand to SEQ ID NO: 1091570
ugaucacugagggaaggag

SEQ ID NO: 1091572 - RNA, 19 nt, Artificial Sequence
  Description of Artificial Sequence: Synthetic oligonucleotide
  Sense strand starting at position 3674 of SEQ ID NO: 915593
uuaagaaaggucuauuguc

SEQ ID NO: 1091573 - RNA, 19 nt, Artificial Sequence
  Description of Artificial Sequence: Synthetic oligonucleotide
  Antisense strand to SEQ ID NO: 1091572
gacaauagaccuuucuuaa

SEQ ID NO: 1091574 - RNA, 19 nt, Artificial Sequence
  Description of Artificial Sequence: Synthetic oligonucleotide
  Sense strand starting at position 3709 of SEQ ID NO: 915593
cucagaggccuuugauguu

SEQ ID NO: 1091575 - RNA, 19 nt, Artificial Sequence
  Description of Artificial Sequence: Synthetic oligonucleotide
  Antisense strand to SEQ ID NO: 1091574
aacaucaaaggccucugag

SEQ ID NO: 1091576 - RNA, 19 nt, Artificial Sequence
  Description of Artificial Sequence: Synthetic oligonucleotide
  Sense strand starting at position 91 of SEQ ID NO: 915594
uagaaagaggaguggucua

SEQ ID NO: 1091577 - RNA, 19 nt, Artificial Sequence
  Description of Artificial Sequence: Synthetic oligonucleotide
  Antisense strand to SEQ ID NO: 1091576
uagaccacuccucuuucua

SEQ ID NO: 1091578 - RNA, 19 nt, Artificial Sequence
  Description of Artificial Sequence: Synthetic oligonucleotide
  Sense strand starting at position 96 of SEQ ID NO: 915594
agaggaguggucuauguca

SEQ ID NO: 1091579 - RNA, 19 nt, Artificial Sequence
  Description of Artificial Sequence: Synthetic oligonucleotide
  Antisense strand to SEQ ID NO: 1091578
ugacauagaccacuccucu

SEQ ID NO: 1091580 - RNA, 19 nt, Artificial Sequence
  Description of Artificial Sequence: Synthetic oligonucleotide
  Sense strand starting at position 233 of SEQ ID NO: 915594
uagggucaugcugacuuua

SEQ ID NO: 1091581 - RNA, 19 nt, Artificial Sequence
  Description of Artificial Sequence: Synthetic oligonucleotide
  Antisense strand to SEQ ID NO: 1091580
uaaagucagcaugacccua

SEQ ID NO: 1091582 - RNA, 19 nt, Artificial Sequence
  Description of Artificial Sequence: Synthetic oligonucleotide
  Sense strand starting at position 235 of SEQ ID NO: 915594
gggucaugcugacuuuaca

SEQ ID NO: 1091583 - RNA, 19 nt, Artificial Sequence
  Description of Artificial Sequence: Synthetic oligonucleotide
  Antisense strand to SEQ ID NO: 1091582
uguaaagucagcaugaccc

SEQ ID NO: 1091584 - RNA, 19 nt, Artificial Sequence
  Description of Artificial Sequence: Synthetic oligonucleotide
  Sense strand starting at position 253 of SEQ ID NO: 915594
agcccugggcuuuguaaga

SEQ ID NO: 1091585 - RNA, 19 nt, Artificial Sequence
  Description of Artificial Sequence: Synthetic oligonucleotide
  Antisense strand to SEQ ID NO: 1091584
ucuuacaaagcccagggcu

SEQ ID NO: 1091586 - RNA, 19 nt, Artificial Sequence
  Description of Artificial Sequence: Synthetic oligonucleotide
  Sense strand starting at position 420 of SEQ ID NO: 915594
augagaauuggcugggaug

SEQ ID NO: 1091587 - RNA, 19 nt, Artificial Sequence
  Description of Artificial Sequence: Synthetic oligonucleotide
  Antisense strand to SEQ ID NO: 1091586
caucccagccaauucucau

SEQ ID NO: 1091588 - RNA, 19 nt, Artificial Sequence
  Description of Artificial Sequence: Synthetic oligonucleotide
  Sense strand starting at position 439 of SEQ ID NO: 915594
guaccaguccaugacuguu

SEQ ID NO: 1091589 - RNA, 19 nt, Artificial Sequence
  Description of Artificial Sequence: Synthetic oligonucleotide
  Antisense strand to SEQ ID NO: 1091588
aacagucauggacugguac

SEQ ID NO: 1091590 - RNA, 19 nt, Artificial Sequence
  Description of Artificial Sequence: Synthetic oligonucleotide
  Sense strand starting at position 597 of SEQ ID NO: 915594
aggagcagauccucuacaa

SEQ ID NO: 1091591 - RNA, 19 nt, Artificial Sequence
  Description of Artificial Sequence: Synthetic oligonucleotide
  Antisense strand to SEQ ID NO: 1091590
uuguagaggaucugcuccu

SEQ ID NO: 1091592 - RNA, 19 nt, Artificial Sequence
  Description of Artificial Sequence: Synthetic oligonucleotide
  Sense strand starting at position 636 of SEQ ID NO: 915594
ugaugugacagauagcauu

SEQ ID NO: 1091593 - RNA, 19 nt, Artificial Sequence
  Description of Artificial Sequence: Synthetic oligonucleotide
  Antisense strand to SEQ ID NO: 1091592
aaugcuaucugucacauca

SEQ ID NO: 1091594 - RNA, 19 nt, Artificial Sequence
  Description of Artificial Sequence: Synthetic oligonucleotide
  Sense strand starting at position 992 of SEQ ID NO: 915594
ggguuaggcccaugacuaa

SEQ ID NO: 1091595 - RNA, 19 nt, Artificial Sequence
  Description of Artificial Sequence: Synthetic oligonucleotide
  Antisense strand to SEQ ID NO: 1091594
uuagucaugggccuaaccc

SEQ ID NO: 1091596 - RNA, 19 nt, Artificial Sequence
  Description of Artificial Sequence: Synthetic oligonucleotide
  Sense strand starting at position 1151 of SEQ ID NO: 915594
aguacuuacuugccaaaga

SEQ ID NO: 1091597 - RNA, 19 nt, Artificial Sequence
  Description of Artificial Sequence: Synthetic oligonucleotide
  Antisense strand to SEQ ID NO: 1091596
ucuuuggcaaguaaguacu

SEQ ID NO: 1091598 - RNA, 19 nt, Artificial Sequence
  Description of Artificial Sequence: Synthetic oligonucleotide
  Sense strand starting at position 1379 of SEQ ID NO: 915594
aacccaaguccuugaggau

SEQ ID NO: 1091599 - RNA, 19 nt, Artificial Sequence
  Description of Artificial Sequence: Synthetic oligonucleotide
  Antisense strand to SEQ ID NO: 1091598
auccucaaggacuuggguu

SEQ ID NO: 1091600 - RNA, 19 nt, Artificial Sequence
  Description of Artificial Sequence: Synthetic oligonucleotide
  Sense strand starting at position 1618 of SEQ ID NO: 915594
gaacucacagcucgaugua

SEQ ID NO: 1091601 - RNA, 19 nt, Artificial Sequence
  Description of Artificial Sequence: Synthetic oligonucleotide
  Antisense strand to SEQ ID NO: 1091600
uacaucgagcugugaguuc

SEQ ID NO: 1091602 - RNA, 19 nt, Artificial Sequence
  Description of Artificial Sequence: Synthetic oligonucleotide
  Sense strand starting at position 2472 of SEQ ID NO: 915594
uagccaacucacuguguga

SEQ ID NO: 1091603 - RNA, 19 nt, Artificial Sequence
  Description of Artificial Sequence: Synthetic oligonucleotide
  Antisense strand to SEQ ID NO: 1091602
ucacacagugaguuggcua

SEQ ID NO: 1091604 - RNA, 19 nt, Artificial Sequence
  Description of Artificial Sequence: Synthetic oligonucleotide
  Sense strand starting at position 2736 of SEQ ID NO: 915594
gagggaagguguuuaaaug

SEQ ID NO: 1091605 - RNA, 19 nt, Artificial Sequence
  Description of Artificial Sequence: Synthetic oligonucleotide
  Antisense strand to SEQ ID NO: 1091604
cauuuaaacaccuucccuc

SEQ ID NO: 1091606 - RNA, 19 nt, Artificial Sequence
  Description of Artificial Sequence: Synthetic oligonucleotide
  Sense strand starting at position 2803 of SEQ ID NO: 915594
agaugcuuccaguaagggu

SEQ ID NO: 1091607 - RNA, 19 nt, Artificial Sequence
  Description of Artificial Sequence: Synthetic oligonucleotide
  Antisense strand to SEQ ID NO: 1091606
acccuuacuggaagcaucu

SEQ ID NO: 1091608 - RNA, 19 nt, Artificial Sequence
  Description of Artificial Sequence: Synthetic oligonucleotide
  Sense strand starting at position 2810 of SEQ ID NO: 915594
uccaguaagggugaaggua

SEQ ID NO: 1091609 - RNA, 19 nt, Artificial Sequence
  Description of Artificial Sequence: Synthetic oligonucleotide
  Antisense strand to SEQ ID NO: 1091608
uaccuucacccuuacugga

SEQ ID NO: 1091610 - RNA, 19 nt, Artificial Sequence
  Description of Artificial Sequence: Synthetic oligonucleotide
  Sense strand starting at position 2884 of SEQ ID NO: 915594
agcagaggcuuccucacaa

SEQ ID NO: 1091611 - RNA, 19 nt, Artificial Sequence
  Description of Artificial Sequence: Synthetic oligonucleotide
  Antisense strand to SEQ ID NO: 1091610
uugugaggaagccucugcu

SEQ ID NO: 1091612 - RNA, 19 nt, Artificial Sequence
  Description of Artificial Sequence: Synthetic oligonucleotide
  Sense strand starting at position 3008 of SEQ ID NO: 915594
acgccaugcuuccugauga

SEQ ID NO: 1091613 - RNA, 19 nt, Artificial Sequence
  Description of Artificial Sequence: Synthetic oligonucleotide
  Antisense strand to SEQ ID NO: 1091612
ucaucaggaagcauggcgu

SEQ ID NO: 1091614 - RNA, 19 nt, Artificial Sequence
  Description of Artificial Sequence: Synthetic oligonucleotide
  Sense strand starting at position 3015 of SEQ ID NO: 915594
gcuuccugaugaucuggau

SEQ ID NO: 1091615 - RNA, 19 nt, Artificial Sequence
  Description of Artificial Sequence: Synthetic oligonucleotide
  Antisense strand to SEQ ID NO: 1091614
auccagaucaucaggaagc

SEQ ID NO: 1091616 - RNA, 19 nt, Artificial Sequence
  Description of Artificial Sequence: Synthetic oligonucleotide
  Sense strand starting at position 3033 of SEQ ID NO: 915594
ucagaagaguccuuuggac

SEQ ID NO: 1091617 - RNA, 19 nt, Artificial Sequence
  Description of Artificial Sequence: Synthetic oligonucleotide
  Antisense strand to SEQ ID NO: 1091616
guccaaaggacucuucuga

SEQ ID NO: 1091618 - RNA, 19 nt, Artificial Sequence
  Description of Artificial Sequence: Synthetic oligonucleotide
  Sense strand starting at position 3035 of SEQ ID NO: 915594
agaagaguccuuuggacca

SEQ ID NO: 1091619 - RNA, 19 nt, Artificial Sequence
  Description of Artificial Sequence: Synthetic oligonucleotide
  Antisense strand to SEQ ID NO: 1091618
ugguccaaaggacucuucu

SEQ ID NO: 1091620 - RNA, 19 nt, Artificial Sequence
  Description of Artificial Sequence: Synthetic oligonucleotide
  Sense strand starting at position 3110 of SEQ ID NO: 915594
cugaguauggccugggaca

SEQ ID NO: 1091621 - RNA, 19 nt, Artificial Sequence
  Description of Artificial Sequence: Synthetic oligonucleotide
  Antisense strand to SEQ ID NO: 1091620
ugucccaggccauacucag

SEQ ID NO: 1091622 - RNA, 19 nt, Artificial Sequence
  Description of Artificial Sequence: Synthetic oligonucleotide
  Sense strand starting at position 3286 of SEQ ID NO: 915594
gauccugagcccuguccua

SEQ ID NO: 1091623 - RNA, 19 nt, Artificial Sequence
  Description of Artificial Sequence: Synthetic oligonucleotide
  Antisense strand to SEQ ID NO: 1091622
uaggacagggcucaggauc

SEQ ID NO: 1091624 - RNA, 19 nt, Artificial Sequence
  Description of Artificial Sequence: Synthetic oligonucleotide
  Sense strand starting at position 3477 of SEQ ID NO: 915594
ccuaguccuguccaguaaa

SEQ ID NO: 1091625 - RNA, 19 nt, Artificial Sequence
  Description of Artificial Sequence: Synthetic oligonucleotide
  Antisense strand to SEQ ID NO: 1091624
uuuacuggacaggacuagg

SEQ ID NO: 1091626 - RNA, 19 nt, Artificial Sequence
  Description of Artificial Sequence: Synthetic oligonucleotide
  Sense strand starting at position 3480 of SEQ ID NO: 915594
aguccuguccaguaaagaa

SEQ ID NO: 1091627 - RNA, 19 nt, Artificial Sequence
  Description of Artificial Sequence: Synthetic oligonucleotide
  Antisense strand to SEQ ID NO: 1091626
uucuuuacuggacaggacu

SEQ ID NO: 1091628 - RNA, 19 nt, Artificial Sequence
  Description of Artificial Sequence: Synthetic oligonucleotide
  Sense strand starting at position 3499 of SEQ ID NO: 915594
aagugaucaguuuguaauc

SEQ ID NO: 1091629 - RNA, 19 nt, Artificial Sequence
  Description of Artificial Sequence: Synthetic oligonucleotide
  Antisense strand to SEQ ID NO: 1091628
gauuacaaacugaucacuu

SEQ ID NO: 1091630 - RNA, 19 nt, Artificial Sequence
  Description of Artificial Sequence: Synthetic oligonucleotide
  Sense strand starting at position 3500 of SEQ ID NO: 915594
agugaucaguuuguaauca

SEQ ID NO: 1091631 - RNA, 19 nt, Artificial Sequence
  Description of Artificial Sequence: Synthetic oligonucleotide
  Antisense strand to SEQ ID NO: 1091630
ugauuacaaacugaucacu

SEQ ID NO: 1091632 - RNA, 19 nt, Artificial Sequence
  Description of Artificial Sequence: Synthetic oligonucleotide
  Sense strand starting at position 3508 of SEQ ID NO: 915594
guuuguaaucagcaggagu

SEQ ID NO: 1091633 - RNA, 19 nt, Artificial Sequence
  Description of Artificial Sequence: Synthetic oligonucleotide
  Antisense strand to SEQ ID NO: 1091632
acuccugcugauuacaaac

SEQ ID NO: 1091634 - RNA, 19 nt, Artificial Sequence
  Description of Artificial Sequence: Synthetic oligonucleotide
  Sense strand starting at position 3558 of SEQ ID NO: 915594
cccgacagcucuucugaaa

SEQ ID NO: 1091635 - RNA, 19 nt, Artificial Sequence
  Description of Artificial Sequence: Synthetic oligonucleotide
  Antisense strand to SEQ ID NO: 1091634
uuucagaagagcugucggg

SEQ ID NO: 1091636 - RNA, 19 nt, Artificial Sequence
  Description of Artificial Sequence: Synthetic oligonucleotide
  Sense strand starting at position 3611 of SEQ ID NO: 915594
aucucugagucguucccua

SEQ ID NO: 1091637 - RNA, 19 nt, Artificial Sequence
  Description of Artificial Sequence: Synthetic oligonucleotide
  Antisense strand to SEQ ID NO: 1091636
uagggaacgacucagagau

SEQ ID NO: 1091638 - RNA, 19 nt, Artificial Sequence
  Description of Artificial Sequence: Synthetic oligonucleotide
  Sense strand starting at position 3615 of SEQ ID NO: 915594
cugagucguucccuacaca

SEQ ID NO: 1091639 - RNA, 19 nt, Artificial Sequence
  Description of Artificial Sequence: Synthetic oligonucleotide
  Antisense strand to SEQ ID NO: 1091638
uguguagggaacgacucag

SEQ ID NO: 1091640 - RNA, 19 nt, Artificial Sequence
  Description of Artificial Sequence: Synthetic oligonucleotide
  Sense strand starting at position 3616 of SEQ ID NO: 915594
ugagucguucccuacacau

SEQ ID NO: 1091641 - RNA, 19 nt, Artificial Sequence
  Description of Artificial Sequence: Synthetic oligonucleotide
  Antisense strand to SEQ ID NO: 1091640
auguguagggaacgacuca

SEQ ID NO: 1091642 - RNA, 19 nt, Artificial Sequence
  Description of Artificial Sequence: Synthetic oligonucleotide
  Sense strand starting at position 3659 of SEQ ID NO: 915594
ucccaucugucaucagcuu

SEQ ID NO: 1091643 - RNA, 19 nt, Artificial Sequence
  Description of Artificial Sequence: Synthetic oligonucleotide
  Antisense strand to SEQ ID NO: 1091642
aagcugaugacagauggga

SEQ ID NO: 1091644 - RNA, 19 nt, Artificial Sequence
  Description of Artificial Sequence: Synthetic oligonucleotide
  Sense strand starting at position 3660 of SEQ ID NO: 915594
cccaucugucaucagcuua

SEQ ID NO: 1091645 - RNA, 19 nt, Artificial Sequence
  Description of Artificial Sequence: Synthetic oligonucleotide
  Antisense strand to SEQ ID NO: 1091644
uaagcugaugacagauggg

SEQ ID NO: 1091646 - RNA, 19 nt, Artificial Sequence
  Description of Artificial Sequence: Synthetic oligonucleotide
  Sense strand starting at position 3714 of SEQ ID NO: 915594
ggauauaagcucugugagg

SEQ ID NO: 1091647 - RNA, 19 nt, Artificial Sequence
  Description of Artificial Sequence: Synthetic oligonucleotide
  Antisense strand to SEQ ID NO: 1091646
ccucacagagcuuauaucc

SEQ ID NO: 1091648 - RNA, 19 nt, Artificial Sequence
  Description of Artificial Sequence: Synthetic oligonucleotide
  Sense strand starting at position 3723 of SEQ ID NO: 915594
cucugugaggguuggaauu

SEQ ID NO: 1091649 - RNA, 19 nt, Artificial Sequence
  Description of Artificial Sequence: Synthetic oligonucleotide
  Antisense strand to SEQ ID NO: 1091648
aauuccaacccucacagag

SEQ ID NO: 1091650 - RNA, 19 nt, Artificial Sequence
  Description of Artificial Sequence: Synthetic oligonucleotide
  Sense strand starting at position 3760 of SEQ ID NO: 915594
gcucuagucccacauguag

SEQ ID NO: 1091651 - RNA, 19 nt, Artificial Sequence
  Description of Artificial Sequence: Synthetic oligonucleotide
  Antisense strand to SEQ ID NO: 1091650
cuacaugugggacuagagc

SEQ ID NO: 1091652 - RNA, 19 nt, Artificial Sequence
  Description of Artificial Sequence: Synthetic oligonucleotide
  Sense strand starting at position 3870 of SEQ ID NO: 915594
ugcaguuuccuugcuguca

SEQ ID NO: 1091653 - RNA, 19 nt, Artificial Sequence
  Description of Artificial Sequence: Synthetic oligonucleotide
  Antisense strand to SEQ ID NO: 1091652
ugacagcaaggaaacugca

SEQ ID NO: 1091654 - RNA, 19 nt, Artificial Sequence
  Description of Artificial Sequence: Synthetic oligonucleotide
  Sense strand starting at position 3881 of SEQ ID NO: 915594
ugcugucaaacugagaagu

SEQ ID NO: 1091655 - RNA, 19 nt, Artificial Sequence
  Description of Artificial Sequence: Synthetic oligonucleotide
  Antisense strand to SEQ ID NO: 1091654
acuucucaguuugacagca

SEQ ID NO: 1091656 - RNA, 19 nt, Artificial Sequence
  Description of Artificial Sequence: Synthetic oligonucleotide
  Sense strand starting at position 3 of SEQ ID NO: 915595
ggugcaaaccuuugagcca

SEQ ID NO: 1091657 - RNA, 19 nt, Artificial Sequence
  Description of Artificial Sequence: Synthetic oligonucleotide
  Antisense strand to SEQ ID NO: 1091656
uggcucaaagguuugcacc

SEQ ID NO: 1091658 - RNA, 19 nt, Artificial Sequence
  Description of Artificial Sequence: Synthetic oligonucleotide
  Sense strand starting at position 14 of SEQ ID NO: 915595
uugagccauucugagaaga

SEQ ID NO: 1091659 - RNA, 19 nt, Artificial Sequence
  Description of Artificial Sequence: Synthetic oligonucleotide
  Antisense strand to SEQ ID NO: 1091658
ucuucucagaauggcucaa

SEQ ID NO: 1091660 - RNA, 19 nt, Artificial Sequence
  Description of Artificial Sequence: Synthetic oligonucleotide
  Sense strand starting at position 16 of SEQ ID NO: 915595
gagccauucugagaagaau

SEQ ID NO: 1091661 - RNA, 19 nt, Artificial Sequence
  Description of Artificial Sequence: Synthetic oligonucleotide
  Antisense strand to SEQ ID NO: 1091660
auucuucucagaauggcuc

SEQ ID NO: 1091662 - RNA, 19 nt, Artificial Sequence
  Description of Artificial Sequence: Synthetic oligonucleotide
  Sense strand starting at position 35 of SEQ ID NO: 915595
ucccaauuccauugggaca

SEQ ID NO: 1091663 - RNA, 19 nt, Artificial Sequence
  Description of Artificial Sequence: Synthetic oligonucleotide
  Antisense strand to SEQ ID NO: 1091662
ugucccaauggaauuggga

SEQ ID NO: 1091664 - RNA, 19 nt, Artificial Sequence
  Description of Artificial Sequence: Synthetic oligonucleotide
  Sense strand starting at position 225 of SEQ ID NO: 915595
agcccuuuccaggauuaaa

SEQ ID NO: 1091665 - RNA, 19 nt, Artificial Sequence
  Description of Artificial Sequence: Synthetic oligonucleotide
  Antisense strand to SEQ ID NO: 1091664
uuuaauccuggaaagggcu

SEQ ID NO: 1091666 - RNA, 19 nt, Artificial Sequence
  Description of Artificial Sequence: Synthetic oligonucleotide
  Sense strand starting at position 256 of SEQ ID NO: 915595
agcagauucuuaguucuau

SEQ ID NO: 1091667 - RNA, 19 nt, Artificial Sequence
  Description of Artificial Sequence: Synthetic oligonucleotide
  Antisense strand to SEQ ID NO: 1091666
auagaacuaagaaucugcu

SEQ ID NO: 1091668 - RNA, 19 nt, Artificial Sequence
  Description of Artificial Sequence: Synthetic oligonucleotide
  Sense strand starting at position 257 of SEQ ID NO: 915595
gcagauucuuaguucuauc

SEQ ID NO: 1091669 - RNA, 19 nt, Artificial Sequence
  Description of Artificial Sequence: Synthetic oligonucleotide
  Antisense strand to SEQ ID NO: 1091668
gauagaacuaagaaucugc

SEQ ID NO: 1091670 - RNA, 19 nt, Artificial Sequence
  Description of Artificial Sequence: Synthetic oligonucleotide
  Sense strand starting at position 328 of SEQ ID NO: 915595
ggcacucucuuccugagaa

SEQ ID NO: 1091671 - RNA, 19 nt, Artificial Sequence
  Description of Artificial Sequence: Synthetic oligonucleotide
  Antisense strand to SEQ ID NO: 1091670
uucucaggaagagagugcc

SEQ ID NO: 1091672 - RNA, 19 nt, Artificial Sequence
  Description of Artificial Sequence: Synthetic oligonucleotide
  Sense strand starting at position 360 of SEQ ID NO: 915595
cacugcuucccguagggaa

SEQ ID NO: 1091673 - RNA, 19 nt, Artificial Sequence
  Description of Artificial Sequence: Synthetic oligonucleotide
  Antisense strand to SEQ ID NO: 1091672
uucccuacgggaagcagug

SEQ ID NO: 1091674 - RNA, 19 nt, Artificial Sequence
  Description of Artificial Sequence: Synthetic oligonucleotide
  Sense strand starting at position 429 of SEQ ID NO: 915595
cccuguugucucugaacaa

SEQ ID NO: 1091675 - RNA, 19 nt, Artificial Sequence
  Description of Artificial Sequence: Synthetic oligonucleotide
  Antisense strand to SEQ ID NO: 1091674
uuguucagagacaacaggg

SEQ ID NO: 1091676 - RNA, 19 nt, Artificial Sequence
  Description of Artificial Sequence: Synthetic oligonucleotide
  Sense strand starting at position 814 of SEQ ID NO: 915595
agaauuaucgggcagcuuu

SEQ ID NO: 1091677 - RNA, 19 nt, Artificial Sequence
  Description of Artificial Sequence: Synthetic oligonucleotide
  Antisense strand to SEQ ID NO: 1091676
aaagcugcccgauaauucu

SEQ ID NO: 1091678 - RNA, 19 nt, Artificial Sequence
  Description of Artificial Sequence: Synthetic oligonucleotide
  Sense strand starting at position 866 of SEQ ID NO: 915595
agugaauauuuauacagcu

SEQ ID NO: 1091679 - RNA, 19 nt, Artificial Sequence
  Description of Artificial Sequence: Synthetic oligonucleotide
  Antisense strand to SEQ ID NO: 1091678
agcuguauaaauauucacu

SEQ ID NO: 1091680 - RNA, 19 nt, Artificial Sequence
  Description of Artificial Sequence: Synthetic oligonucleotide
  Sense strand starting at position 892 of SEQ ID NO: 915595
cgugcaggcgccuuucaaa

SEQ ID NO: 1091681 - RNA, 19 nt, Artificial Sequence
  Description of Artificial Sequence: Synthetic oligonucleotide
  Antisense strand to SEQ ID NO: 1091680
uuugaaaggcgccugcacg

SEQ ID NO: 1091682 - RNA, 19 nt, Artificial Sequence
  Description of Artificial Sequence: Synthetic oligonucleotide
  Sense strand starting at position 1041 of SEQ ID NO: 915595
gagaacucagccuguacca

SEQ ID NO: 1091683 - RNA, 19 nt, Artificial Sequence
  Description of Artificial Sequence: Synthetic oligonucleotide
  Antisense strand to SEQ ID NO: 1091682
ugguacaggcugaguucuc

SEQ ID NO: 1091684 - RNA, 19 nt, Artificial Sequence
  Description of Artificial Sequence: Synthetic oligonucleotide
  Sense strand starting at position 1375 of SEQ ID NO: 915595
ggcagacauguuggcaguu

SEQ ID NO: 1091685 - RNA, 19 nt, Artificial Sequence
  Description of Artificial Sequence: Synthetic oligonucleotide
  Antisense strand to SEQ ID NO: 1091684
aacugccaacaugucugcc

SEQ ID NO: 1091686 - RNA, 19 nt, Artificial Sequence
  Description of Artificial Sequence: Synthetic oligonucleotide
  Sense strand starting at position 2525 of SEQ ID NO: 915595
gcucgcucccgggaacaau

SEQ ID NO: 1091687 - RNA, 19 nt, Artificial Sequence
  Description of Artificial Sequence: Synthetic oligonucleotide
  Antisense strand to SEQ ID NO: 1091686
auuguucccgggagcgagc

SEQ ID NO: 1091688 - RNA, 19 nt, Artificial Sequence
  Description of Artificial Sequence: Synthetic oligonucleotide
  Sense strand starting at position 2558 of SEQ ID NO: 915595
ggugcagugcucuauccca

SEQ ID NO: 1091689 - RNA, 19 nt, Artificial Sequence
  Description of Artificial Sequence: Synthetic oligonucleotide
  Antisense strand to SEQ ID NO: 1091688
ugggauagagcacugcacc

SEQ ID NO: 1091690 - RNA, 19 nt, Artificial Sequence
  Description of Artificial Sequence: Synthetic oligonucleotide
  Sense strand starting at position 2765 of SEQ ID NO: 915595
ucuuuaucuuggccucaga

SEQ ID NO: 1091691 - RNA, 19 nt, Artificial Sequence
  Description of Artificial Sequence: Synthetic oligonucleotide
  Antisense strand to SEQ ID NO: 1091690
ucugaggccaagauaaaga

SEQ ID NO: 1091692 - RNA, 19 nt, Artificial Sequence
  Description of Artificial Sequence: Synthetic oligonucleotide
  Sense strand starting at position 2768 of SEQ ID NO: 915595
uuaucuuggccucagaaag

SEQ ID NO: 1091693 - RNA, 19 nt, Artificial Sequence
  Description of Artificial Sequence: Synthetic oligonucleotide
  Antisense strand to SEQ ID NO: 1091692
cuuucugaggccaagauaa

SEQ ID NO: 1091694 - RNA, 19 nt, Artificial Sequence
  Description of Artificial Sequence: Synthetic oligonucleotide
  Sense strand starting at position 2778 of SEQ ID NO: 915595
cucagaaaguuucucaguu

SEQ ID NO: 1091695 - RNA, 19 nt, Artificial Sequence
  Description of Artificial Sequence: Synthetic oligonucleotide
  Antisense strand to SEQ ID NO: 1091694
aacugagaaacuuucugag

SEQ ID NO: 1091696 - RNA, 19 nt, Artificial Sequence
  Description of Artificial Sequence: Synthetic oligonucleotide
  Sense strand starting at position 2795 of SEQ ID NO: 915595
uuuccuuuccguuauugaa

SEQ ID NO: 1091697 - RNA, 19 nt, Artificial Sequence
  Description of Artificial Sequence: Synthetic oligonucleotide
  Antisense strand to SEQ ID NO: 1091696
uucaauaacggaaaggaaa

SEQ ID NO: 1091698 - RNA, 19 nt, Artificial Sequence
  Description of Artificial Sequence: Synthetic oligonucleotide
  Sense strand starting at position 2821 of SEQ ID NO: 915595
ggcauccugucuccaggaa

SEQ ID NO: 1091699 - RNA, 19 nt, Artificial Sequence
  Description of Artificial Sequence: Synthetic oligonucleotide
  Antisense strand to SEQ ID NO: 1091698
uuccuggagacaggaugcc

SEQ ID NO: 1091700 - RNA, 19 nt, Artificial Sequence
  Description of Artificial Sequence: Synthetic oligonucleotide
  Sense strand starting at position 3045 of SEQ ID NO: 915595
aggaaacuaucagacccau

SEQ ID NO: 1091701 - RNA, 19 nt, Artificial Sequence
  Description of Artificial Sequence: Synthetic oligonucleotide
  Antisense strand to SEQ ID NO: 1091700
augggucugauaguuuccu

SEQ ID NO: 1091702 - RNA, 19 nt, Artificial Sequence
  Description of Artificial Sequence: Synthetic oligonucleotide
  Sense strand starting at position 3149 of SEQ ID NO: 915595
gaauaagugcaagguguga

SEQ ID NO: 1091703 - RNA, 19 nt, Artificial Sequence
  Description of Artificial Sequence: Synthetic oligonucleotide
  Antisense strand to SEQ ID NO: 1091702
ucacaccuugcacuuauuc

SEQ ID NO: 1091704 - RNA, 19 nt, Artificial Sequence
  Description of Artificial Sequence: Synthetic oligonucleotide
  Sense strand starting at position 3162 of SEQ ID NO: 915595
gugugagugacugacagua

SEQ ID NO: 1091705 - RNA, 19 nt, Artificial Sequence
  Description of Artificial Sequence: Synthetic oligonucleotide
  Antisense strand to SEQ ID NO: 1091704
uacugucagucacucacac

SEQ ID NO: 1091706 - RNA, 19 nt, Artificial Sequence
  Description of Artificial Sequence: Synthetic oligonucleotide
  Sense strand starting at position 3235 of SEQ ID NO: 915595
gagggcuuaucugucaaga

SEQ ID NO: 1091707 - RNA, 19 nt, Artificial Sequence
  Description of Artificial Sequence: Synthetic oligonucleotide
  Antisense strand to SEQ ID NO: 1091706
ucuugacagauaagcccuc

SEQ ID NO: 1091708 - RNA, 19 nt, Artificial Sequence
  Description of Artificial Sequence: Synthetic oligonucleotide
  Sense strand starting at position 3267 of SEQ ID NO: 915595
gaagcucugcuccaaguga

SEQ ID NO: 1091709 - RNA, 19 nt, Artificial Sequence
  Description of Artificial Sequence: Synthetic oligonucleotide
  Antisense strand to SEQ ID NO: 1091708
ucacuuggagcagagcuuc

SEQ ID NO: 1091710 - RNA, 19 nt, Artificial Sequence
  Description of Artificial Sequence: Synthetic oligonucleotide
  Sense strand starting at position 3276 of SEQ ID NO: 915595
cuccaagugagcugaguaa

SEQ ID NO: 1091711 - RNA, 19 nt, Artificial Sequence
  Description of Artificial Sequence: Synthetic oligonucleotide
  Antisense strand to SEQ ID NO: 1091710
uuacucagcucacuuggag

SEQ ID NO: 1091712 - RNA, 19 nt, Artificial Sequence
  Description of Artificial Sequence: Synthetic oligonucleotide
  Sense strand starting at position 3327 of SEQ ID NO: 915595
gugacugugcuccaugcua

SEQ ID NO: 1091713 - RNA, 19 nt, Artificial Sequence
  Description of Artificial Sequence: Synthetic oligonucleotide
  Antisense strand to SEQ ID NO: 1091712
uagcauggagcacagucac

SEQ ID NO: 1091714 - RNA, 19 nt, Artificial Sequence
  Description of Artificial Sequence: Synthetic oligonucleotide
  Sense strand starting at position 3329 of SEQ ID NO: 915595
gacugugcuccaugcuaaa

SEQ ID NO: 1091715 - RNA, 19 nt, Artificial Sequence
  Description of Artificial Sequence: Synthetic oligonucleotide
  Antisense strand to SEQ ID NO: 1091714
uuuagcauggagcacaguc

SEQ ID NO: 1091716 - RNA, 19 nt, Artificial Sequence
  Description of Artificial Sequence: Synthetic oligonucleotide
  Sense strand starting at position 3362 of SEQ ID NO: 915595
ggcagaagcuguuuggcau

SEQ ID NO: 1091717 - RNA, 19 nt, Artificial Sequence
  Description of Artificial Sequence: Synthetic oligonucleotide
  Antisense strand to SEQ ID NO: 1091716
augccaaacagcuucugcc

SEQ ID NO: 1091718 - RNA, 19 nt, Artificial Sequence
  Description of Artificial Sequence: Synthetic oligonucleotide
  Sense strand starting at position 3411 of SEQ ID NO: 915595
gugccuuuggcuuaaucag

SEQ ID NO: 1091719 - RNA, 19 nt, Artificial Sequence
  Description of Artificial Sequence: Synthetic oligonucleotide
  Antisense strand to SEQ ID NO: 1091718
cugauuaagccaaaggcac

SEQ ID NO: 1091720 - RNA, 19 nt, Artificial Sequence
  Description of Artificial Sequence: Synthetic oligonucleotide
  Sense strand starting at position 3783 of SEQ ID NO: 915595
ucuccaggccuggaauuaa

SEQ ID NO: 1091721 - RNA, 19 nt, Artificial Sequence
  Description of Artificial Sequence: Synthetic oligonucleotide
  Antisense strand to SEQ ID NO: 1091720
uuaauuccaggccuggaga

SEQ ID NO: 1091722 - RNA, 19 nt, Artificial Sequence
  Description of Artificial Sequence: Synthetic oligonucleotide
  Sense strand starting at position 3792 of SEQ ID NO: 915595
cuggaauuaagcuggguau

SEQ ID NO: 1091723 - RNA, 19 nt, Artificial Sequence
  Description of Artificial Sequence: Synthetic oligonucleotide
  Antisense strand to SEQ ID NO: 1091722
auacccagcuuaauuccag

SEQ ID NO: 1091724 - RNA, 19 nt, Artificial Sequence
  Description of Artificial Sequence: Synthetic oligonucleotide
  Sense strand starting at position 3793 of SEQ ID NO: 915595
uggaauuaagcuggguaua

SEQ ID NO: 1091725 - RNA, 19 nt, Artificial Sequence
  Description of Artificial Sequence: Synthetic oligonucleotide
  Antisense strand to SEQ ID NO: 1091724
uauacccagcuuaauucca

SEQ ID NO: 1091726 - RNA, 19 nt, Artificial Sequence
  Description of Artificial Sequence: Synthetic oligonucleotide
  Sense strand starting at position 3794 of SEQ ID NO: 915595
ggaauuaagcuggguauaa

SEQ ID NO: 1091727 - RNA, 19 nt, Artificial Sequence
  Description of Artificial Sequence: Synthetic oligonucleotide
  Antisense strand to SEQ ID NO: 1091726
uuauacccagcuuaauucc

SEQ ID NO: 1091728 - RNA, 19 nt, Artificial Sequence
  Description of Artificial Sequence: Synthetic oligonucleotide
  Sense strand starting at position 3795 of SEQ ID NO: 915595
gaauuaagcuggguauaaa

SEQ ID NO: 1091729 - RNA, 19 nt, Artificial Sequence
  Description of Artificial Sequence: Synthetic oligonucleotide
  Antisense strand to SEQ ID NO: 1091728
uuuauacccagcuuaauuc

SEQ ID NO: 1091730 - RNA, 19 nt, Artificial Sequence
  Description of Artificial Sequence: Synthetic oligonucleotide
  Sense strand starting at position 3858 of SEQ ID NO: 915595
ggaagagccuccuuguucu

SEQ ID NO: 1091731 - RNA, 19 nt, Artificial Sequence
  Description of Artificial Sequence: Synthetic oligonucleotide
  Antisense strand to SEQ ID NO: 1091730
agaacaaggaggcucuucc

SEQ ID NO: 1091732 - RNA, 19 nt, Artificial Sequence
  Description of Artificial Sequence: Synthetic oligonucleotide
  Sense strand starting at position 3925 of SEQ ID NO: 915595
cuaagugaaucugacagaa

SEQ ID NO: 1091733 - RNA, 19 nt, Artificial Sequence
  Description of Artificial Sequence: Synthetic oligonucleotide
  Antisense strand to SEQ ID NO: 1091732
uucugucagauucacuuag

SEQ ID NO: 1091734 - RNA, 19 nt, Artificial Sequence
  Description of Artificial Sequence: Synthetic oligonucleotide
  Sense strand starting at position 3974 of SEQ ID NO: 915595
uuggccauuugaugaacua

SEQ ID NO: 1091735 - RNA, 19 nt, Artificial Sequence
  Description of Artificial Sequence: Synthetic oligonucleotide
  Antisense strand to SEQ ID NO: 1091734
uaguucaucaaauggccaa

SEQ ID NO: 1091736 - RNA, 19 nt, Artificial Sequence
  Description of Artificial Sequence: Synthetic oligonucleotide
  Sense strand starting at position 48 of SEQ ID NO: 915596
uaguccuuacugugacaga

SEQ ID NO: 1091737 - RNA, 19 nt, Artificial Sequence
  Description of Artificial Sequence: Synthetic oligonucleotide
  Antisense strand to SEQ ID NO: 1091736
ucugucacaguaaggacua

SEQ ID NO: 1091738 - RNA, 19 nt, Artificial Sequence
  Description of Artificial Sequence: Synthetic oligonucleotide
  Sense strand starting at position 51 of SEQ ID NO: 915596
uccuuacugugacagacaa

SEQ ID NO: 1091739 - RNA, 19 nt, Artificial Sequence
  Description of Artificial Sequence: Synthetic oligonucleotide
  Antisense strand to SEQ ID NO: 1091738
uugucugucacaguaagga

SEQ ID NO: 1091740 - RNA, 19 nt, Artificial Sequence
  Description of Artificial Sequence: Synthetic oligonucleotide
  Sense strand starting at position 127 of SEQ ID NO: 915596
ucaagaagcucagucuaaa

SEQ ID NO: 1091741 - RNA, 19 nt, Artificial Sequence
  Description of Artificial Sequence: Synthetic oligonucleotide
  Antisense strand to SEQ ID NO: 1091740
uuuagacugagcuucuuga

SEQ ID NO: 1091742 - RNA, 19 nt, Artificial Sequence
  Description of Artificial Sequence: Synthetic oligonucleotide
  Sense strand starting at position 202 of SEQ ID NO: 915596
gaaguaauauguuugccca

SEQ ID NO: 1091743 - RNA, 19 nt, Artificial Sequence
  Description of Artificial Sequence: Synthetic oligonucleotide
  Antisense strand to SEQ ID NO: 1091742
ugggcaaacauauuacuuc

SEQ ID NO: 1091744 - RNA, 19 nt, Artificial Sequence
  Description of Artificial Sequence: Synthetic oligonucleotide
  Sense strand starting at position 204 of SEQ ID NO: 915596
aguaauauguuugcccaga

SEQ ID NO: 1091745 - RNA, 19 nt, Artificial Sequence
  Description of Artificial Sequence: Synthetic oligonucleotide
  Antisense strand to SEQ ID NO: 1091744
ucugggcaaacauauuacu

SEQ ID NO: 1091746 - RNA, 19 nt, Artificial Sequence
  Description of Artificial Sequence: Synthetic oligonucleotide
  Sense strand starting at position 205 of SEQ ID NO: 915596
guaauauguuugcccagaa

SEQ ID NO: 1091747 - RNA, 19 nt, Artificial Sequence
  Description of Artificial Sequence: Synthetic oligonucleotide
  Antisense strand to SEQ ID NO: 1091746
uucugggcaaacauauuac

SEQ ID NO: 1091748 - RNA, 19 nt, Artificial Sequence
  Description of Artificial Sequence: Synthetic oligonucleotide
  Sense strand starting at position 302 of SEQ ID NO: 915596
gggcgugguggcugaagaa

SEQ ID NO: 1091749 - RNA, 19 nt, Artificial Sequence
  Description of Artificial Sequence: Synthetic oligonucleotide
  Antisense strand to SEQ ID NO: 1091748
uucuucagccaccacgccc

SEQ ID NO: 1091750 - RNA, 19 nt, Artificial Sequence
  Description of Artificial Sequence: Synthetic oligonucleotide
  Sense strand starting at position 396 of SEQ ID NO: 915596
gggugauacccucguuucu

SEQ ID NO: 1091751 - RNA, 19 nt, Artificial Sequence
  Description of Artificial Sequence: Synthetic oligonucleotide
  Antisense strand to SEQ ID NO: 1091750
agaaacgaggguaucaccc

SEQ ID NO: 1091752 - RNA, 19 nt, Artificial Sequence
  Description of Artificial Sequence: Synthetic oligonucleotide
  Sense strand starting at position 398 of SEQ ID NO: 915596
gugauacccucguuucuuu

SEQ ID NO: 1091753 - RNA, 19 nt, Artificial Sequence
  Description of Artificial Sequence: Synthetic oligonucleotide
  Antisense strand to SEQ ID NO: 1091752
aaagaaacgaggguaucac

SEQ ID NO: 1091754 - RNA, 19 nt, Artificial Sequence
  Description of Artificial Sequence: Synthetic oligonucleotide
  Sense strand starting at position 557 of SEQ ID NO: 915596
agcucucccgaguggauau

SEQ ID NO: 1091755 - RNA, 19 nt, Artificial Sequence
  Description of Artificial Sequence: Synthetic oligonucleotide
  Antisense strand to SEQ ID NO: 1091754
auauccacucgggagagcu

SEQ ID NO: 1091756 - RNA, 19 nt, Artificial Sequence
  Description of Artificial Sequence: Synthetic oligonucleotide
  Sense strand starting at position 558 of SEQ ID NO: 915596
gcucucccgaguggauaua

SEQ ID NO: 1091757 - RNA, 19 nt, Artificial Sequence
  Description of Artificial Sequence: Synthetic oligonucleotide
  Antisense strand to SEQ ID NO: 1091756
uauauccacucgggagagc

SEQ ID NO: 1091758 - RNA, 19 nt, Artificial Sequence
  Description of Artificial Sequence: Synthetic oligonucleotide
  Sense strand starting at position 592 of SEQ ID NO: 915596
guacaaccacuauguucua

SEQ ID NO: 1091759 - RNA, 19 nt, Artificial Sequence
  Description of Artificial Sequence: Synthetic oligonucleotide
  Antisense strand to SEQ ID NO: 1091758
uagaacauagugguuguac

SEQ ID NO: 1091760 - RNA, 19 nt, Artificial Sequence
  Description of Artificial Sequence: Synthetic oligonucleotide
  Sense strand starting at position 597 of SEQ ID NO: 915596
accacuauguucuaaagga

SEQ ID NO: 1091761 - RNA, 19 nt, Artificial Sequence
  Description of Artificial Sequence: Synthetic oligonucleotide
  Antisense strand to SEQ ID NO: 1091760
uccuuuagaacauaguggu

SEQ ID NO: 1091762 - RNA, 19 nt, Artificial Sequence
  Description of Artificial Sequence: Synthetic oligonucleotide
  Sense strand starting at position 601 of SEQ ID NO: 915596
cuauguucuaaaggaggca

SEQ ID NO: 1091763 - RNA, 19 nt, Artificial Sequence
  Description of Artificial Sequence: Synthetic oligonucleotide
  Antisense strand to SEQ ID NO: 1091762
ugccuccuuuagaacauag

SEQ ID NO: 1091764 - RNA, 19 nt, Artificial Sequence
  Description of Artificial Sequence: Synthetic oligonucleotide
  Sense strand starting at position 748 of SEQ ID NO: 915596
aaaguuaaguagcauagaa

SEQ ID NO: 1091765 - RNA, 19 nt, Artificial Sequence
  Description of Artificial Sequence: Synthetic oligonucleotide
  Antisense strand to SEQ ID NO: 1091764
uucuaugcuacuuaacuuu

SEQ ID NO: 1091766 - RNA, 19 nt, Artificial Sequence
  Description of Artificial Sequence: Synthetic oligonucleotide
  Sense strand starting at position 803 of SEQ ID NO: 915596
cugauaauugcucaucaag

SEQ ID NO: 1091767 - RNA, 19 nt, Artificial Sequence
  Description of Artificial Sequence: Synthetic oligonucleotide
  Antisense strand to SEQ ID NO: 1091766
cuugaugagcaauuaucag

SEQ ID NO: 1091768 - RNA, 19 nt, Artificial Sequence
  Description of Artificial Sequence: Synthetic oligonucleotide
  Sense strand starting at position 819 of SEQ ID NO: 915596
aagccaucuguugagacua

SEQ ID NO: 1091769 - RNA, 19 nt, Artificial Sequence
  Description of Artificial Sequence: Synthetic oligonucleotide
  Antisense strand to SEQ ID NO: 1091768
uagucucaacagauggcuu

SEQ ID NO: 1091770 - RNA, 19 nt, Artificial Sequence
  Description of Artificial Sequence: Synthetic oligonucleotide
  Sense strand starting at position 926 of SEQ ID NO: 915596
gagcgugucccucaaagug

SEQ ID NO: 1091771 - RNA, 19 nt, Artificial Sequence
  Description of Artificial Sequence: Synthetic oligonucleotide
  Antisense strand to SEQ ID NO: 1091770
cacuuugagggacacgcuc

SEQ ID NO: 1091772 - RNA, 19 nt, Artificial Sequence
  Description of Artificial Sequence: Synthetic oligonucleotide
  Sense strand starting at position 986 of SEQ ID NO: 915596
gcggcugagucacuaauua

SEQ ID NO: 1091773 - RNA, 19 nt, Artificial Sequence
  Description of Artificial Sequence: Synthetic oligonucleotide
  Antisense strand to SEQ ID NO: 1091772
uaauuagugacucagccgc

SEQ ID NO: 1091774 - RNA, 19 nt, Artificial Sequence
  Description of Artificial Sequence: Synthetic oligonucleotide
  Sense strand starting at position 1053 of SEQ ID NO: 915596
agugacagguccuuacuua

SEQ ID NO: 1091775 - RNA, 19 nt, Artificial Sequence
  Description of Artificial Sequence: Synthetic oligonucleotide
  Antisense strand to SEQ ID NO: 1091774
uaaguaaggaccugucacu

SEQ ID NO: 1091776 - RNA, 19 nt, Artificial Sequence
  Description of Artificial Sequence: Synthetic oligonucleotide
  Sense strand starting at position 1054 of SEQ ID NO: 915596
gugacagguccuuacuuaa

SEQ ID NO: 1091777 - RNA, 19 nt, Artificial Sequence
  Description of Artificial Sequence: Synthetic oligonucleotide
  Antisense strand to SEQ ID NO: 1091776
uuaaguaaggaccugucac

SEQ ID NO: 1091778 - RNA, 19 nt, Artificial Sequence
  Description of Artificial Sequence: Synthetic oligonucleotide
  Sense strand starting at position 1067 of SEQ ID NO: 915596
acuuaaacaugguuuaagu

SEQ ID NO: 1091779 - RNA, 19 nt, Artificial Sequence
  Description of Artificial Sequence: Synthetic oligonucleotide
  Antisense strand to SEQ ID NO: 1091778
acuuaaaccauguuuaagu

SEQ ID NO: 1091780 - RNA, 19 nt, Artificial Sequence
  Description of Artificial Sequence: Synthetic oligonucleotide
  Sense strand starting at position 1203 of SEQ ID NO: 915596
agagcugcgcugagggauu

SEQ ID NO: 1091781 - RNA, 19 nt, Artificial Sequence
  Description of Artificial Sequence: Synthetic oligonucleotide
  Antisense strand to SEQ ID NO: 1091780
aaucccucagcgcagcucu

SEQ ID NO: 1091782 - RNA, 19 nt, Artificial Sequence
  Description of Artificial Sequence: Synthetic oligonucleotide
  Sense strand starting at position 2833 of SEQ ID NO: 915596
uggaaaggaucagaacaau

SEQ ID NO: 1091783 - RNA, 19 nt, Artificial Sequence
  Description of Artificial Sequence: Synthetic oligonucleotide
  Antisense strand to SEQ ID NO: 1091782
auuguucugauccuuucca

SEQ ID NO: 1091784 - RNA, 19 nt, Artificial Sequence
  Description of Artificial Sequence: Synthetic oligonucleotide
  Sense strand starting at position 2874 of SEQ ID NO: 915596
cgcuuuacauuugacagau

SEQ ID NO: 1091785 - RNA, 19 nt, Artificial Sequence
  Description of Artificial Sequence: Synthetic oligonucleotide
  Antisense strand to SEQ ID NO: 1091784
aucugucaaauguaaagcg

SEQ ID NO: 1091786 - RNA, 19 nt, Artificial Sequence
  Description of Artificial Sequence: Synthetic oligonucleotide
  Sense strand starting at position 2886 of SEQ ID NO: 915596
gacagauucuuguugggua

SEQ ID NO: 1091787 - RNA, 19 nt, Artificial Sequence
  Description of Artificial Sequence: Synthetic oligonucleotide
  Antisense strand to SEQ ID NO: 1091786
uacccaacaagaaucuguc

SEQ ID NO: 1091788 - RNA, 19 nt, Artificial Sequence
  Description of Artificial Sequence: Synthetic oligonucleotide
  Sense strand starting at position 2908 of SEQ ID NO: 915596
guagaauaacgguaguguu

SEQ ID NO: 1091789 - RNA, 19 nt, Artificial Sequence
  Description of Artificial Sequence: Synthetic oligonucleotide
  Antisense strand to SEQ ID NO: 1091788
aacacuaccguuauucuac

SEQ ID NO: 1091790 - RNA, 19 nt, Artificial Sequence
  Description of Artificial Sequence: Synthetic oligonucleotide
  Sense strand starting at position 3230 of SEQ ID NO: 915596
gagcgaaaccuccgucuca

SEQ ID NO: 1091791 - RNA, 19 nt, Artificial Sequence
  Description of Artificial Sequence: Synthetic oligonucleotide
  Antisense strand to SEQ ID NO: 1091790
ugagacggagguuucgcuc

SEQ ID NO: 1091792 - RNA, 19 nt, Artificial Sequence
  Description of Artificial Sequence: Synthetic oligonucleotide
  Sense strand starting at position 3231 of SEQ ID NO: 915596
agcgaaaccuccgucucaa

SEQ ID NO: 1091793 - RNA, 19 nt, Artificial Sequence
  Description of Artificial Sequence: Synthetic oligonucleotide
  Antisense strand to SEQ ID NO: 1091792
uugagacggagguuucgcu

SEQ ID NO: 1091794 - RNA, 19 nt, Artificial Sequence
  Description of Artificial Sequence: Synthetic oligonucleotide
  Sense strand starting at position 3305 of SEQ ID NO: 915596
gcaagccugucucuuagau

SEQ ID NO: 1091795 - RNA, 19 nt, Artificial Sequence
  Description of Artificial Sequence: Synthetic oligonucleotide
  Antisense strand to SEQ ID NO: 1091794
aucuaagagacaggcuugc

SEQ ID NO: 1091796 - RNA, 19 nt, Artificial Sequence
  Description of Artificial Sequence: Synthetic oligonucleotide
  Sense strand starting at position 3315 of SEQ ID NO: 915596
cucuuagauccuggauaaa

SEQ ID NO: 1091797 - RNA, 19 nt, Artificial Sequence
  Description of Artificial Sequence: Synthetic oligonucleotide
  Antisense strand to SEQ ID NO: 1091796
uuuauccaggaucuaagag

SEQ ID NO: 1091798 - RNA, 19 nt, Artificial Sequence
  Description of Artificial Sequence: Synthetic oligonucleotide
  Sense strand starting at position 3327 of SEQ ID NO: 915596
ggauaaauugcaugucuau

SEQ ID NO: 1091799 - RNA, 19 nt, Artificial Sequence
  Description of Artificial Sequence: Synthetic oligonucleotide
  Antisense strand to SEQ ID NO: 1091798
auagacaugcaauuuaucc

SEQ ID NO: 1091800 - RNA, 19 nt, Artificial Sequence
  Description of Artificial Sequence: Synthetic oligonucleotide
  Sense strand starting at position 3371 of SEQ ID NO: 915596
auaacaucguucuuucuga

SEQ ID NO: 1091801 - RNA, 19 nt, Artificial Sequence
  Description of Artificial Sequence: Synthetic oligonucleotide
  Antisense strand to SEQ ID NO: 1091800
ucagaaagaacgauguuau

SEQ ID NO: 1091802 - RNA, 19 nt, Artificial Sequence
  Description of Artificial Sequence: Synthetic oligonucleotide
  Sense strand starting at position 3635 of SEQ ID NO: 915596
uuggaucuuucuggaauuu

SEQ ID NO: 1091803 - RNA, 19 nt, Artificial Sequence
  Description of Artificial Sequence: Synthetic oligonucleotide
  Antisense strand to SEQ ID NO: 1091802
aaauuccagaaagauccaa

SEQ ID NO: 1091804 - RNA, 19 nt, Artificial Sequence
  Description of Artificial Sequence: Synthetic oligonucleotide
  Sense strand starting at position 3644 of SEQ ID NO: 915596
ucuggaauuuacggagaau

SEQ ID NO: 1091805 - RNA, 19 nt, Artificial Sequence
  Description of Artificial Sequence: Synthetic oligonucleotide
  Antisense strand to SEQ ID NO: 1091804
auucuccguaaauuccaga

SEQ ID NO: 1091806 - RNA, 19 nt, Artificial Sequence
  Description of Artificial Sequence: Synthetic oligonucleotide
  Sense strand starting at position 3699 of SEQ ID NO: 915596
gucagauuguaaucaguca

SEQ ID NO: 1091807 - RNA, 19 nt, Artificial Sequence
  Description of Artificial Sequence: Synthetic oligonucleotide
  Antisense strand to SEQ ID NO: 1091806
ugacugauuacaaucugac

SEQ ID NO: 1091808 - RNA, 19 nt, Artificial Sequence
  Description of Artificial Sequence: Synthetic oligonucleotide
  Sense strand starting at position 3707 of SEQ ID NO: 915596
guaaucagucaaggacuua

SEQ ID NO: 1091809 - RNA, 19 nt, Artificial Sequence
  Description of Artificial Sequence: Synthetic oligonucleotide
  Antisense strand to SEQ ID NO: 1091808
uaaguccuugacugauuac

SEQ ID NO: 1091810 - RNA, 19 nt, Artificial Sequence
  Description of Artificial Sequence: Synthetic oligonucleotide
  Sense strand starting at position 3791 of SEQ ID NO: 915596
cugacaauauagcaaugaa

SEQ ID NO: 1091811 - RNA, 19 nt, Artificial Sequence
  Description of Artificial Sequence: Synthetic oligonucleotide
  Antisense strand to SEQ ID NO: 1091810
uucauugcuauauugucag

SEQ ID NO: 1091812 - RNA, 19 nt, Artificial Sequence
  Description of Artificial Sequence: Synthetic oligonucleotide
  Sense strand starting at position 3822 of SEQ ID NO: 915596
gucuucugcccucagugau

SEQ ID NO: 1091813 - RNA, 19 nt, Artificial Sequence
  Description of Artificial Sequence: Synthetic oligonucleotide
  Antisense strand to SEQ ID NO: 1091812
aucacugagggcagaagac

SEQ ID NO: 1091814 - RNA, 19 nt, Artificial Sequence
  Description of Artificial Sequence: Synthetic oligonucleotide
  Sense strand starting at position 3863 of SEQ ID NO: 915596
auagcuuauuugccgaauu

SEQ ID NO: 1091815 - RNA, 19 nt, Artificial Sequence
  Description of Artificial Sequence: Synthetic oligonucleotide
  Antisense strand to SEQ ID NO: 1091814
aauucggcaaauaagcuau

SEQ ID NO: 1091816 - RNA, 19 nt, Artificial Sequence
  Description of Artificial Sequence: Synthetic oligonucleotide
  Sense strand starting at position 119 of SEQ ID NO: 915597
gacauaacauggcucaagu

SEQ ID NO: 1091817 - RNA, 19 nt, Artificial Sequence
  Description of Artificial Sequence: Synthetic oligonucleotide
  Antisense strand to SEQ ID NO: 1091816
acuugagccauguuauguc

SEQ ID NO: 1091818 - RNA, 19 nt, Artificial Sequence
  Description of Artificial Sequence: Synthetic oligonucleotide
  Sense strand starting at position 325 of SEQ ID NO: 915597
uaggacaaucaguguagga

SEQ ID NO: 1091819 - RNA, 19 nt, Artificial Sequence
  Description of Artificial Sequence: Synthetic oligonucleotide
  Antisense strand to SEQ ID NO: 1091818
uccuacacugauuguccua

SEQ ID NO: 1091820 - RNA, 19 nt, Artificial Sequence
  Description of Artificial Sequence: Synthetic oligonucleotide
  Sense strand starting at position 327 of SEQ ID NO: 915597
ggacaaucaguguaggagu

SEQ ID NO: 1091821 - RNA, 19 nt, Artificial Sequence
  Description of Artificial Sequence: Synthetic oligonucleotide
  Antisense strand to SEQ ID NO: 1091820
acuccuacacugauugucc

SEQ ID NO: 1091822 - RNA, 19 nt, Artificial Sequence
  Description of Artificial Sequence: Synthetic oligonucleotide
  Sense strand starting at position 455 of SEQ ID NO: 915597
gagagcucacucugggaca

SEQ ID NO: 1091823 - RNA, 19 nt, Artificial Sequence
  Description of Artificial Sequence: Synthetic oligonucleotide
  Antisense strand to SEQ ID NO: 1091822
ugucccagagugagcucuc

SEQ ID NO: 1091824 - RNA, 19 nt, Artificial Sequence
  Description of Artificial Sequence: Synthetic oligonucleotide
  Sense strand starting at position 535 of SEQ ID NO: 915597
uaggaaagucugugaucga

SEQ ID NO: 1091825 - RNA, 19 nt, Artificial Sequence
  Description of Artificial Sequence: Synthetic oligonucleotide
  Antisense strand to SEQ ID NO: 1091824
ucgaucacagacuuuccua

SEQ ID NO: 1091826 - RNA, 19 nt, Artificial Sequence
  Description of Artificial Sequence: Synthetic oligonucleotide
  Sense strand starting at position 538 of SEQ ID NO: 915597
gaaagucugugaucgaccu

SEQ ID NO: 1091827 - RNA, 19 nt, Artificial Sequence
  Description of Artificial Sequence: Synthetic oligonucleotide
  Antisense strand to SEQ ID NO: 1091826
aggucgaucacagacuuuc

SEQ ID NO: 1091828 - RNA, 19 nt, Artificial Sequence
  Description of Artificial Sequence: Synthetic oligonucleotide
  Sense strand starting at position 574 of SEQ ID NO: 915597
gcuugauucuuaccaagcu

SEQ ID NO: 1091829 - RNA, 19 nt, Artificial Sequence
  Description of Artificial Sequence: Synthetic oligonucleotide
  Antisense strand to SEQ ID NO: 1091828
agcuugguaagaaucaagc

SEQ ID NO: 1091830 - RNA, 19 nt, Artificial Sequence
  Description of Artificial Sequence: Synthetic oligonucleotide
  Sense strand starting at position 625 of SEQ ID NO: 915597
caggcaucccugugacagu

SEQ ID NO: 1091831 - RNA, 19 nt, Artificial Sequence
  Description of Artificial Sequence: Synthetic oligonucleotide
  Antisense strand to SEQ ID NO: 1091830
acugucacagggaugccug

SEQ ID NO: 1091832 - RNA, 19 nt, Artificial Sequence
  Description of Artificial Sequence: Synthetic oligonucleotide
  Sense strand starting at position 652 of SEQ ID NO: 915597
ccuaauaaaugcucuagag

SEQ ID NO: 1091833 - RNA, 19 nt, Artificial Sequence
  Description of Artificial Sequence: Synthetic oligonucleotide
  Antisense strand to SEQ ID NO: 1091832
cucuagagcauuuauuagg

SEQ ID NO: 1091834 - RNA, 19 nt, Artificial Sequence
  Description of Artificial Sequence: Synthetic oligonucleotide
  Sense strand starting at position 981 of SEQ ID NO: 915597
ucagcuagauuugcaaagu

SEQ ID NO: 1091835 - RNA, 19 nt, Artificial Sequence
  Description of Artificial Sequence: Synthetic oligonucleotide
  Antisense strand to SEQ ID NO: 1091834
acuuugcaaaucuagcuga

SEQ ID NO: 1091836 - RNA, 19 nt, Artificial Sequence
  Description of Artificial Sequence: Synthetic oligonucleotide
  Sense strand starting at position 1606 of SEQ ID NO: 915597
ugaacugcuccugggaacu

SEQ ID NO: 1091837 - RNA, 19 nt, Artificial Sequence
  Description of Artificial Sequence: Synthetic oligonucleotide
  Antisense strand to SEQ ID NO: 1091836
aguucccaggagcaguuca

SEQ ID NO: 1091838 - RNA, 19 nt, Artificial Sequence
  Description of Artificial Sequence: Synthetic oligonucleotide
  Sense strand starting at position 1616 of SEQ ID NO: 915597
cugggaacuugcuugaaca

SEQ ID NO: 1091839 - RNA, 19 nt, Artificial Sequence
  Description of Artificial Sequence: Synthetic oligonucleotide
  Antisense strand to SEQ ID NO: 1091838
uguucaagcaaguucccag

SEQ ID NO: 1091840 - RNA, 19 nt, Artificial Sequence
  Description of Artificial Sequence: Synthetic oligonucleotide
  Sense strand starting at position 1617 of SEQ ID NO: 915597
ugggaacuugcuugaacag

SEQ ID NO: 1091841 - RNA, 19 nt, Artificial Sequence
  Description of Artificial Sequence: Synthetic oligonucleotide
  Antisense strand to SEQ ID NO: 1091840
cuguucaagcaaguuccca

SEQ ID NO: 1091842 - RNA, 19 nt, Artificial Sequence
  Description of Artificial Sequence: Synthetic oligonucleotide
  Sense strand starting at position 1822 of SEQ ID NO: 915597
guuugugcacuugggauuu

SEQ ID NO: 1091843 - RNA, 19 nt, Artificial Sequence
  Description of Artificial Sequence: Synthetic oligonucleotide
  Antisense strand to SEQ ID NO: 1091842
aaaucccaagugcacaaac

SEQ ID NO: 1091844 - RNA, 19 nt, Artificial Sequence
  Description of Artificial Sequence: Synthetic oligonucleotide
  Sense strand starting at position 2037 of SEQ ID NO: 915597
ggaagaauccugggcaagu

SEQ ID NO: 1091845 - RNA, 19 nt, Artificial Sequence
  Description of Artificial Sequence: Synthetic oligonucleotide
  Antisense strand to SEQ ID NO: 1091844
acuugcccaggauucuucc

SEQ ID NO: 1091846 - RNA, 19 nt, Artificial Sequence
  Description of Artificial Sequence: Synthetic oligonucleotide
  Sense strand starting at position 2038 of SEQ ID NO: 915597
gaagaauccugggcaaguc

SEQ ID NO: 1091847 - RNA, 19 nt, Artificial Sequence
  Description of Artificial Sequence: Synthetic oligonucleotide
  Antisense strand to SEQ ID NO: 1091846
gacuugcccaggauucuuc

SEQ ID NO: 1091848 - RNA, 19 nt, Artificial Sequence
  Description of Artificial Sequence: Synthetic oligonucleotide
  Sense strand starting at position 2155 of SEQ ID NO: 915597
cugucacagucgguaauaa

SEQ ID NO: 1091849 - RNA, 19 nt, Artificial Sequence
  Description of Artificial Sequence: Synthetic oligonucleotide
  Antisense strand to SEQ ID NO: 1091848
uuauuaccgacugugacag

SEQ ID NO: 1091850 - RNA, 19 nt, Artificial Sequence
  Description of Artificial Sequence: Synthetic oligonucleotide
  Sense strand starting at position 2156 of SEQ ID NO: 915597
ugucacagucgguaauaau

SEQ ID NO: 1091851 - RNA, 19 nt, Artificial Sequence
  Description of Artificial Sequence: Synthetic oligonucleotide
  Antisense strand to SEQ ID NO: 1091850
auuauuaccgacugugaca

SEQ ID NO: 1091852 - RNA, 19 nt, Artificial Sequence
  Description of Artificial Sequence: Synthetic oligonucleotide
  Sense strand starting at position 2167 of SEQ ID NO: 915597
guaauaauauugcuccugu

SEQ ID NO: 1091853 - RNA, 19 nt, Artificial Sequence
  Description of Artificial Sequence: Synthetic oligonucleotide
  Antisense strand to SEQ ID NO: 1091852
acaggagcaauauuauuac

SEQ ID NO: 1091854 - RNA, 19 nt, Artificial Sequence
  Description of Artificial Sequence: Synthetic oligonucleotide
  Sense strand starting at position 2871 of SEQ ID NO: 915597
uuugauaacugguuaugag

SEQ ID NO: 1091855 - RNA, 19 nt, Artificial Sequence
  Description of Artificial Sequence: Synthetic oligonucleotide
  Antisense strand to SEQ ID NO: 1091854
cucauaaccaguuaucaaa

SEQ ID NO: 1091856 - RNA, 19 nt, Artificial Sequence
  Description of Artificial Sequence: Synthetic oligonucleotide
  Sense strand starting at position 2879 of SEQ ID NO: 915597
cugguuaugagauaacgcu

SEQ ID NO: 1091857 - RNA, 19 nt, Artificial Sequence
  Description of Artificial Sequence: Synthetic oligonucleotide
  Antisense strand to SEQ ID NO: 1091856
agcguuaucucauaaccag

SEQ ID NO: 1091858 - RNA, 19 nt, Artificial Sequence
  Description of Artificial Sequence: Synthetic oligonucleotide
  Sense strand starting at position 2913 of SEQ ID NO: 915597
gguggagaauccuuguaag

SEQ ID NO: 1091859 - RNA, 19 nt, Artificial Sequence
  Description of Artificial Sequence: Synthetic oligonucleotide
  Antisense strand to SEQ ID NO: 1091858
cuuacaaggauucuccacc

SEQ ID NO: 1091860 - RNA, 19 nt, Artificial Sequence
  Description of Artificial Sequence: Synthetic oligonucleotide
  Sense strand starting at position 2927 of SEQ ID NO: 915597
guaaguuguggcgagauag

SEQ ID NO: 1091861 - RNA, 19 nt, Artificial Sequence
  Description of Artificial Sequence: Synthetic oligonucleotide
  Antisense strand to SEQ ID NO: 1091860
cuaucucgccacaacuuac

SEQ ID NO: 1091862 - RNA, 19 nt, Artificial Sequence
  Description of Artificial Sequence: Synthetic oligonucleotide
  Sense strand starting at position 2939 of SEQ ID NO: 915597
gagauaggcugacuaccau

SEQ ID NO: 1091863 - RNA, 19 nt, Artificial Sequence
  Description of Artificial Sequence: Synthetic oligonucleotide
  Antisense strand to SEQ ID NO: 1091862
augguagucagccuaucuc

SEQ ID NO: 1091864 - RNA, 19 nt, Artificial Sequence
  Description of Artificial Sequence: Synthetic oligonucleotide
  Sense strand starting at position 3101 of SEQ ID NO: 915597
acaugacaggucugaaagu

SEQ ID NO: 1091865 - RNA, 19 nt, Artificial Sequence
  Description of Artificial Sequence: Synthetic oligonucleotide
  Antisense strand to SEQ ID NO: 1091864
acuuucagaccugucaugu

SEQ ID NO: 1091866 - RNA, 19 nt, Artificial Sequence
  Description of Artificial Sequence: Synthetic oligonucleotide
  Sense strand starting at position 3114 of SEQ ID NO: 915597
gaaaguuaggauuggcauu

SEQ ID NO: 1091867 - RNA, 19 nt, Artificial Sequence
  Description of Artificial Sequence: Synthetic oligonucleotide
  Antisense strand to SEQ ID NO: 1091866
aaugccaauccuaacuuuc

SEQ ID NO: 1091868 - RNA, 19 nt, Artificial Sequence
  Description of Artificial Sequence: Synthetic oligonucleotide
  Sense strand starting at position 3116 of SEQ ID NO: 915597
aaguuaggauuggcauuau

SEQ ID NO: 1091869 - RNA, 19 nt, Artificial Sequence
  Description of Artificial Sequence: Synthetic oligonucleotide
  Antisense strand to SEQ ID NO: 1091868
auaaugccaauccuaacuu

SEQ ID NO: 1091870 - RNA, 19 nt, Artificial Sequence
  Description of Artificial Sequence: Synthetic oligonucleotide
  Sense strand starting at position 3291 of SEQ ID NO: 915597
gucagaagaccuuggcagu

SEQ ID NO: 1091871 - RNA, 19 nt, Artificial Sequence
  Description of Artificial Sequence: Synthetic oligonucleotide
  Antisense strand to SEQ ID NO: 1091870
acugccaaggucuucugac

SEQ ID NO: 1091872 - RNA, 19 nt, Artificial Sequence
  Description of Artificial Sequence: Synthetic oligonucleotide
  Sense strand starting at position 3412 of SEQ ID NO: 915597
aagagaugcuguccgugaa

SEQ ID NO: 1091873 - RNA, 19 nt, Artificial Sequence
  Description of Artificial Sequence: Synthetic oligonucleotide
  Antisense strand to SEQ ID NO: 1091872
uucacggacagcaucucuu

SEQ ID NO: 1091874 - RNA, 19 nt, Artificial Sequence
  Description of Artificial Sequence: Synthetic oligonucleotide
  Sense strand starting at position 3413 of SEQ ID NO: 915597
agagaugcuguccgugaaa

SEQ ID NO: 1091875 - RNA, 19 nt, Artificial Sequence
  Description of Artificial Sequence: Synthetic oligonucleotide
  Antisense strand to SEQ ID NO: 1091874
uuucacggacagcaucucu

SEQ ID NO: 1091876 - RNA, 19 nt, Artificial Sequence
  Description of Artificial Sequence: Synthetic oligonucleotide
  Sense strand starting at position 3544 of SEQ ID NO: 915597
gaggcuuaaggaggauauu

SEQ ID NO: 1091877 - RNA, 19 nt, Artificial Sequence
  Description of Artificial Sequence: Synthetic oligonucleotide
  Antisense strand to SEQ ID NO: 1091876
aauauccuccuuaagccuc

SEQ ID NO: 1091878 - RNA, 19 nt, Artificial Sequence
  Description of Artificial Sequence: Synthetic oligonucleotide
  Sense strand starting at position 3601 of SEQ ID NO: 915597
agguccugauguuauuuau

SEQ ID NO: 1091879 - RNA, 19 nt, Artificial Sequence
  Description of Artificial Sequence: Synthetic oligonucleotide
  Antisense strand to SEQ ID NO: 1091878
auaaauaacaucaggaccu

SEQ ID NO: 1091880 - RNA, 19 nt, Artificial Sequence
  Description of Artificial Sequence: Synthetic oligonucleotide
  Sense strand starting at position 3718 of SEQ ID NO: 915597
ggauuauagguguguacua

SEQ ID NO: 1091881 - RNA, 19 nt, Artificial Sequence
  Description of Artificial Sequence: Synthetic oligonucleotide
  Antisense strand to SEQ ID NO: 1091880
uaguacacaccuauaaucc

SEQ ID NO: 1091882 - RNA, 19 nt, Artificial Sequence
  Description of Artificial Sequence: Synthetic oligonucleotide
  Sense strand starting at position 3764 of SEQ ID NO: 915597
ugcaacauccuaugcagaa

SEQ ID NO: 1091883 - RNA, 19 nt, Artificial Sequence
  Description of Artificial Sequence: Synthetic oligonucleotide
  Antisense strand to SEQ ID NO: 1091882
uucugcauaggauguugca

SEQ ID NO: 1091884 - RNA, 19 nt, Artificial Sequence
  Description of Artificial Sequence: Synthetic oligonucleotide
  Sense strand starting at position 3765 of SEQ ID NO: 915597
gcaacauccuaugcagaau

SEQ ID NO: 1091885 - RNA, 19 nt, Artificial Sequence
  Description of Artificial Sequence: Synthetic oligonucleotide
  Antisense strand to SEQ ID NO: 1091884
auucugcauaggauguugc

SEQ ID NO: 1091886 - RNA, 19 nt, Artificial Sequence
  Description of Artificial Sequence: Synthetic oligonucleotide
  Sense strand starting at position 3836 of SEQ ID NO: 915597
gauucugauugacuugagu

SEQ ID NO: 1091887 - RNA, 19 nt, Artificial Sequence
  Description of Artificial Sequence: Synthetic oligonucleotide
  Antisense strand to SEQ ID NO: 1091886
acucaagucaaucagaauc

SEQ ID NO: 1091888 - RNA, 19 nt, Artificial Sequence
  Description of Artificial Sequence: Synthetic oligonucleotide
  Sense strand starting at position 3839 of SEQ ID NO: 915597
ucugauugacuugaguuua

SEQ ID NO: 1091889 - RNA, 19 nt, Artificial Sequence
  Description of Artificial Sequence: Synthetic oligonucleotide
  Antisense strand to SEQ ID NO: 1091888
uaaacucaagucaaucaga

SEQ ID NO: 1091890 - RNA, 19 nt, Artificial Sequence
  Description of Artificial Sequence: Synthetic oligonucleotide
  Sense strand starting at position 3882 of SEQ ID NO: 915597
aagguaggaaaguguuaua

SEQ ID NO: 1091891 - RNA, 19 nt, Artificial Sequence
  Description of Artificial Sequence: Synthetic oligonucleotide
  Antisense strand to SEQ ID NO: 1091890
uauaacacuuuccuaccuu

SEQ ID NO: 1091892 - RNA, 19 nt, Artificial Sequence
  Description of Artificial Sequence: Synthetic oligonucleotide
  Sense strand starting at position 3946 of SEQ ID NO: 915597
gcacuacugcuuuagugaa

SEQ ID NO: 1091893 - RNA, 19 nt, Artificial Sequence
  Description of Artificial Sequence: Synthetic oligonucleotide
  Antisense strand to SEQ ID NO: 1091892
uucacuaaagcaguagugc

SEQ ID NO: 1091894 - RNA, 19 nt, Artificial Sequence
  Description of Artificial Sequence: Synthetic oligonucleotide
  Sense strand starting at position 3954 of SEQ ID NO: 915597
gcuuuagugaagcaaucag

SEQ ID NO: 1091895 - RNA, 19 nt, Artificial Sequence
  Description of Artificial Sequence: Synthetic oligonucleotide
  Antisense strand to SEQ ID NO: 1091894
cugauugcuucacuaaagc

SEQ ID NO: 1091896 - RNA, 19 nt, Artificial Sequence
  Description of Artificial Sequence: Synthetic oligonucleotide
  Sense strand starting at position 1 of SEQ ID NO: 915598
acaacacgguucguuagau

SEQ ID NO: 1091897 - RNA, 19 nt, Artificial Sequence
  Description of Artificial Sequence: Synthetic oligonucleotide
  Antisense strand to SEQ ID NO: 1091896
aucuaacgaaccguguugu

SEQ ID NO: 1091898 - RNA, 19 nt, Artificial Sequence
  Description of Artificial Sequence: Synthetic oligonucleotide
  Sense strand starting at position 2 of SEQ ID NO: 915598
caacacgguucguuagaua

SEQ ID NO: 1091899 - RNA, 19 nt, Artificial Sequence
  Description of Artificial Sequence: Synthetic oligonucleotide
  Antisense strand to SEQ ID NO: 1091898
uaucuaacgaaccguguug

SEQ ID NO: 1091900 - RNA, 19 nt, Artificial Sequence
  Description of Artificial Sequence: Synthetic oligonucleotide
  Sense strand starting at position 21 of SEQ ID NO: 915598
ggacgugacuuguuucaaa

SEQ ID NO: 1091901 - RNA, 19 nt, Artificial Sequence
  Description of Artificial Sequence: Synthetic oligonucleotide
  Antisense strand to SEQ ID NO: 1091900
uuugaaacaagucacgucc

SEQ ID NO: 1091902 - RNA, 19 nt, Artificial Sequence
  Description of Artificial Sequence: Synthetic oligonucleotide
  Sense strand starting at position 73 of SEQ ID NO: 915598
ccaacaguccugugaaguu

SEQ ID NO: 1091903 - RNA, 19 nt, Artificial Sequence
  Description of Artificial Sequence: Synthetic oligonucleotide
  Antisense strand to SEQ ID NO: 1091902
aacuucacaggacuguugg

SEQ ID NO: 1091904 - RNA, 19 nt, Artificial Sequence
  Description of Artificial Sequence: Synthetic oligonucleotide
  Sense strand starting at position 128 of SEQ ID NO: 915598
agcuccuauuaguuaagau

SEQ ID NO: 1091905 - RNA, 19 nt, Artificial Sequence
  Description of Artificial Sequence: Synthetic oligonucleotide
  Antisense strand to SEQ ID NO: 1091904
aucuuaacuaauaggagcu

SEQ ID NO: 1091906 - RNA, 19 nt, Artificial Sequence
  Description of Artificial Sequence: Synthetic oligonucleotide
  Sense strand starting at position 175 of SEQ ID NO: 915598
gaaucuagccgucgacuca

SEQ ID NO: 1091907 - RNA, 19 nt, Artificial Sequence
  Description of Artificial Sequence: Synthetic oligonucleotide
  Antisense strand to SEQ ID NO: 1091906
ugagucgacggcuagauuc

SEQ ID NO: 1091908 - RNA, 19 nt, Artificial Sequence
  Description of Artificial Sequence: Synthetic oligonucleotide
  Sense strand starting at position 503 of SEQ ID NO: 915598
ggaguucacccuuguggac

SEQ ID NO: 1091909 - RNA, 19 nt, Artificial Sequence
  Description of Artificial Sequence: Synthetic oligonucleotide
  Antisense strand to SEQ ID NO: 1091908
guccacaagggugaacucc

SEQ ID NO: 1091910 - RNA, 19 nt, Artificial Sequence
  Description of Artificial Sequence: Synthetic oligonucleotide
  Sense strand starting at position 608 of SEQ ID NO: 915598
auccgaaguuaaucagaau

SEQ ID NO: 1091911 - RNA, 19 nt, Artificial Sequence
  Description of Artificial Sequence: Synthetic oligonucleotide
  Antisense strand to SEQ ID NO: 1091910
auucugauuaacuucggau

SEQ ID NO: 1091912 - RNA, 19 nt, Artificial Sequence
  Description of Artificial Sequence: Synthetic oligonucleotide
  Sense strand starting at position 630 of SEQ ID NO: 915598
cccucauuguuugccagaa

SEQ ID NO: 1091913 - RNA, 19 nt, Artificial Sequence
  Description of Artificial Sequence: Synthetic oligonucleotide
  Antisense strand to SEQ ID NO: 1091912
uucuggcaaacaaugaggg

SEQ ID NO: 1091914 - RNA, 19 nt, Artificial Sequence
  Description of Artificial Sequence: Synthetic oligonucleotide
  Sense strand starting at position 631 of SEQ ID NO: 915598
ccucauuguuugccagaau

SEQ ID NO: 1091915 - RNA, 19 nt, Artificial Sequence
  Description of Artificial Sequence: Synthetic oligonucleotide
  Antisense strand to SEQ ID NO: 1091914
auucuggcaaacaaugagg

SEQ ID NO: 1091916 - RNA, 19 nt, Artificial Sequence
  Description of Artificial Sequence: Synthetic oligonucleotide
  Sense strand starting at position 777 of SEQ ID NO: 915598
gacauaacauggcucaagu

SEQ ID NO: 1091917 - RNA, 19 nt, Artificial Sequence
  Description of Artificial Sequence: Synthetic oligonucleotide
  Antisense strand to SEQ ID NO: 1091916
acuugagccauguuauguc

SEQ ID NO: 1091918 - RNA, 19 nt, Artificial Sequence
  Description of Artificial Sequence: Synthetic oligonucleotide
  Sense strand starting at position 983 of SEQ ID NO: 915598
uaggacaaucaguguagga

SEQ ID NO: 1091919 - RNA, 19 nt, Artificial Sequence
  Description of Artificial Sequence: Synthetic oligonucleotide
  Antisense strand to SEQ ID NO: 1091918
uccuacacugauuguccua

SEQ ID NO: 1091920 - RNA, 19 nt, Artificial Sequence
  Description of Artificial Sequence: Synthetic oligonucleotide
  Sense strand starting at position 985 of SEQ ID NO: 915598
ggacaaucaguguaggagu

SEQ ID NO: 1091921 - RNA, 19 nt, Artificial Sequence
  Description of Artificial Sequence: Synthetic oligonucleotide
  Antisense strand to SEQ ID NO: 1091920
acuccuacacugauugucc

SEQ ID NO: 1091922 - RNA, 19 nt, Artificial Sequence
  Description of Artificial Sequence: Synthetic oligonucleotide
  Sense strand starting at position 1113 of SEQ ID NO: 915598
gagagcucacucugggaca

SEQ ID NO: 1091923 - RNA, 19 nt, Artificial Sequence
  Description of Artificial Sequence: Synthetic oligonucleotide
  Antisense strand to SEQ ID NO: 1091922
ugucccagagugagcucuc

SEQ ID NO: 1091924 - RNA, 19 nt, Artificial Sequence
  Description of Artificial Sequence: Synthetic oligonucleotide
  Sense strand starting at position 1193 of SEQ ID NO: 915598
uaggaaagucugugaucga

SEQ ID NO: 1091925 - RNA, 19 nt, Artificial Sequence
  Description of Artificial Sequence: Synthetic oligonucleotide
  Antisense strand to SEQ ID NO: 1091924
ucgaucacagacuuuccua

SEQ ID NO: 1091926 - RNA, 19 nt, Artificial Sequence
  Description of Artificial Sequence: Synthetic oligonucleotide
  Sense strand starting at position 1196 of SEQ ID NO: 915598
gaaagucugugaucgaccu

SEQ ID NO: 1091927 - RNA, 19 nt, Artificial Sequence
  Description of Artificial Sequence: Synthetic oligonucleotide
  Antisense strand to SEQ ID NO: 1091926
aggucgaucacagacuuuc

SEQ ID NO: 1091928 - RNA, 19 nt, Artificial Sequence
  Description of Artificial Sequence: Synthetic oligonucleotide
  Sense strand starting at position 1232 of SEQ ID NO: 915598
gcuugauucuuaccaagcu

SEQ ID NO: 1091929 - RNA, 19 nt, Artificial Sequence
  Description of Artificial Sequence: Synthetic oligonucleotide
  Antisense strand to SEQ ID NO: 1091928
agcuugguaagaaucaagc

SEQ ID NO: 1091930 - RNA, 19 nt, Artificial Sequence
  Description of Artificial Sequence: Synthetic oligonucleotide
  Sense strand starting at position 1283 of SEQ ID NO: 915598
caggcaucccugugacagu

SEQ ID NO: 1091931 - RNA, 19 nt, Artificial Sequence
  Description of Artificial Sequence: Synthetic oligonucleotide
  Antisense strand to SEQ ID NO: 1091930
acugucacagggaugccug

SEQ ID NO: 1091932 - RNA, 19 nt, Artificial Sequence
  Description of Artificial Sequence: Synthetic oligonucleotide
  Sense strand starting at position 1310 of SEQ ID NO: 915598
ccuaauaaaugcucuagag

SEQ ID NO: 1091933 - RNA, 19 nt, Artificial Sequence
  Description of Artificial Sequence: Synthetic oligonucleotide
  Antisense strand to SEQ ID NO: 1091932
cucuagagcauuuauuagg

SEQ ID NO: 1091934 - RNA, 19 nt, Artificial Sequence
  Description of Artificial Sequence: Synthetic oligonucleotide
  Sense strand starting at position 1639 of SEQ ID NO: 915598
ucagcuagauuugcaaagu

SEQ ID NO: 1091935 - RNA, 19 nt, Artificial Sequence
  Description of Artificial Sequence: Synthetic oligonucleotide
  Antisense strand to SEQ ID NO: 1091934
acuuugcaaaucuagcuga

SEQ ID NO: 1091936 - RNA, 19 nt, Artificial Sequence
  Description of Artificial Sequence: Synthetic oligonucleotide
  Sense strand starting at position 2264 of SEQ ID NO: 915598
ugaacugcuccugggaacu

SEQ ID NO: 1091937 - RNA, 19 nt, Artificial Sequence
  Description of Artificial Sequence: Synthetic oligonucleotide
  Antisense strand to SEQ ID NO: 1091936
aguucccaggagcaguuca

SEQ ID NO: 1091938 - RNA, 19 nt, Artificial Sequence
  Description of Artificial Sequence: Synthetic oligonucleotide
  Sense strand starting at position 2274 of SEQ ID NO: 915598
cugggaacuugcuugaaca

SEQ ID NO: 1091939 - RNA, 19 nt, Artificial Sequence
  Description of Artificial Sequence: Synthetic oligonucleotide
  Antisense strand to SEQ ID NO: 1091938
uguucaagcaaguucccag

SEQ ID NO: 1091940 - RNA, 19 nt, Artificial Sequence
  Description of Artificial Sequence: Synthetic oligonucleotide
  Sense strand starting at position 2275 of SEQ ID NO: 915598
ugggaacuugcuugaacag

SEQ ID NO: 1091941 - RNA, 19 nt, Artificial Sequence
  Description of Artificial Sequence: Synthetic oligonucleotide
  Antisense strand to SEQ ID NO: 1091940
cuguucaagcaaguuccca

SEQ ID NO: 1091942 - RNA, 19 nt, Artificial Sequence
  Description of Artificial Sequence: Synthetic oligonucleotide
  Sense strand starting at position 2480 of SEQ ID NO: 915598
guuugugcacuugggauuu

SEQ ID NO: 1091943 - RNA, 19 nt, Artificial Sequence
  Description of Artificial Sequence: Synthetic oligonucleotide
  Antisense strand to SEQ ID NO: 1091942
aaaucccaagugcacaaac

SEQ ID NO: 1091944 - RNA, 19 nt, Artificial Sequence
  Description of Artificial Sequence: Synthetic oligonucleotide
  Sense strand starting at position 2695 of SEQ ID NO: 915598
ggaagaauccugggcaagu

SEQ ID NO: 1091945 - RNA, 19 nt, Artificial Sequence
  Description of Artificial Sequence: Synthetic oligonucleotide
  Antisense strand to SEQ ID NO: 1091944
acuugcccaggauucuucc

SEQ ID NO: 1091946 - RNA, 19 nt, Artificial Sequence
  Description of Artificial Sequence: Synthetic oligonucleotide
  Sense strand starting at position 2696 of SEQ ID NO: 915598
gaagaauccugggcaaguc

SEQ ID NO: 1091947 - RNA, 19 nt, Artificial Sequence
  Description of Artificial Sequence: Synthetic oligonucleotide
  Antisense strand to SEQ ID NO: 1091946
gacuugcccaggauucuuc

SEQ ID NO: 1091948 - RNA, 19 nt, Artificial Sequence
  Description of Artificial Sequence: Synthetic oligonucleotide
  Sense strand starting at position 2732 of SEQ ID NO: 915598
cgacaaaccugauacaaau

SEQ ID NO: 1091949 - RNA, 19 nt, Artificial Sequence
  Description of Artificial Sequence: Synthetic oligonucleotide
  Antisense strand to SEQ ID NO: 1091948
auuuguaucagguuugucg

SEQ ID NO: 1091950 - RNA, 19 nt, Artificial Sequence
  Description of Artificial Sequence: Synthetic oligonucleotide
  Sense strand starting at position 2813 of SEQ ID NO: 915598
cugucacagucgguaauaa

SEQ ID NO: 1091951 - RNA, 19 nt, Artificial Sequence
  Description of Artificial Sequence: Synthetic oligonucleotide
  Antisense strand to SEQ ID NO: 1091950
uuauuaccgacugugacag

SEQ ID NO: 1091952 - RNA, 19 nt, Artificial Sequence
  Description of Artificial Sequence: Synthetic oligonucleotide
  Sense strand starting at position 2814 of SEQ ID NO: 915598
ugucacagucgguaauaau

SEQ ID NO: 1091953 - RNA, 19 nt, Artificial Sequence
  Description of Artificial Sequence: Synthetic oligonucleotide
  Antisense strand to SEQ ID NO: 1091952
auuauuaccgacugugaca

SEQ ID NO: 1091954 - RNA, 19 nt, Artificial Sequence
  Description of Artificial Sequence: Synthetic oligonucleotide
  Sense strand starting at position 2825 of SEQ ID NO: 915598
guaauaauauugcuccugu

SEQ ID NO: 1091955 - RNA, 19 nt, Artificial Sequence
  Description of Artificial Sequence: Synthetic oligonucleotide
  Antisense strand to SEQ ID NO: 1091954
acaggagcaauauuauuac

SEQ ID NO: 1091956 - RNA, 19 nt, Artificial Sequence
  Description of Artificial Sequence: Synthetic oligonucleotide
  Sense strand starting at position 3529 of SEQ ID NO: 915598
uuugauaacugguuaugag

SEQ ID NO: 1091957 - RNA, 19 nt, Artificial Sequence
  Description of Artificial Sequence: Synthetic oligonucleotide
  Antisense strand to SEQ ID NO: 1091956
cucauaaccaguuaucaaa

SEQ ID NO: 1091958 - RNA, 19 nt, Artificial Sequence
  Description of Artificial Sequence: Synthetic oligonucleotide
  Sense strand starting at position 3533 of SEQ ID NO: 915598
auaacugguuaugagauaa

SEQ ID NO: 1091959 - RNA, 19 nt, Artificial Sequence
  Description of Artificial Sequence: Synthetic oligonucleotide
  Antisense strand to SEQ ID NO: 1091958
uuaucucauaaccaguuau

SEQ ID NO: 1091960 - RNA, 19 nt, Artificial Sequence
  Description of Artificial Sequence: Synthetic oligonucleotide
  Sense strand starting at position 3537 of SEQ ID NO: 915598
cugguuaugagauaacgcu

SEQ ID NO: 1091961 - RNA, 19 nt, Artificial Sequence
  Description of Artificial Sequence: Synthetic oligonucleotide
  Antisense strand to SEQ ID NO: 1091960
agcguuaucucauaaccag

SEQ ID NO: 1091962 - RNA, 19 nt, Artificial Sequence
  Description of Artificial Sequence: Synthetic oligonucleotide
  Sense strand starting at position 3571 of SEQ ID NO: 915598
gguggagaauccuuguaag

SEQ ID NO: 1091963 - RNA, 19 nt, Artificial Sequence
  Description of Artificial Sequence: Synthetic oligonucleotide
  Antisense strand to SEQ ID NO: 1091962
cuuacaaggauucuccacc

SEQ ID NO: 1091964 - RNA, 19 nt, Artificial Sequence
  Description of Artificial Sequence: Synthetic oligonucleotide
  Sense strand starting at position 3585 of SEQ ID NO: 915598
guaaguuguggcgagauag

SEQ ID NO: 1091965 - RNA, 19 nt, Artificial Sequence
  Description of Artificial Sequence: Synthetic oligonucleotide
  Antisense strand to SEQ ID NO: 1091964
cuaucucgccacaacuuac

SEQ ID NO: 1091966 - RNA, 19 nt, Artificial Sequence
  Description of Artificial Sequence: Synthetic oligonucleotide
  Sense strand starting at position 3597 of SEQ ID NO: 915598
gagauaggcugacuaccau

SEQ ID NO: 1091967 - RNA, 19 nt, Artificial Sequence
  Description of Artificial Sequence: Synthetic oligonucleotide
  Antisense strand to SEQ ID NO: 1091966
augguagucagccuaucuc

SEQ ID NO: 1091968 - RNA, 19 nt, Artificial Sequence
  Description of Artificial Sequence: Synthetic oligonucleotide
  Sense strand starting at position 3759 of SEQ ID NO: 915598
acaugacaggucugaaagu

SEQ ID NO: 1091969 - RNA, 19 nt, Artificial Sequence
  Description of Artificial Sequence: Synthetic oligonucleotide
  Antisense strand to SEQ ID NO: 1091968
acuuucagaccugucaugu

SEQ ID NO: 1091970 - RNA, 19 nt, Artificial Sequence
  Description of Artificial Sequence: Synthetic oligonucleotide
  Sense strand starting at position 3772 of SEQ ID NO: 915598
gaaaguuaggauuggcauu

SEQ ID NO: 1091971 - RNA, 19 nt, Artificial Sequence
  Description of Artificial Sequence: Synthetic oligonucleotide
  Antisense strand to SEQ ID NO: 1091970
aaugccaauccuaacuuuc

SEQ ID NO: 1091972 - RNA, 19 nt, Artificial Sequence
  Description of Artificial Sequence: Synthetic oligonucleotide
  Sense strand starting at position 3774 of SEQ ID NO: 915598
aaguuaggauuggcauuau

SEQ ID NO: 1091973 - RNA, 19 nt, Artificial Sequence
  Description of Artificial Sequence: Synthetic oligonucleotide
  Antisense strand to SEQ ID NO: 1091972
auaaugccaauccuaacuu

SEQ ID NO: 1091974 - RNA, 19 nt, Artificial Sequence
  Description of Artificial Sequence: Synthetic oligonucleotide
  Sense strand starting at position 3949 of SEQ ID NO: 915598
gucagaagaccuuggcagu

SEQ ID NO: 1091975 - RNA, 19 nt, Artificial Sequence
  Description of Artificial Sequence: Synthetic oligonucleotide
  Antisense strand to SEQ ID NO: 1091974
acugccaaggucuucugac

SEQ ID NO: 1091976 - RNA, 19 nt, Artificial Sequence
  Description of Artificial Sequence: Synthetic oligonucleotide
  Sense strand starting at position 81 of SEQ ID NO: 915599
uaauuaaaugcuuggaggu

SEQ ID NO: 1091977 - RNA, 19 nt, Artificial Sequence
  Description of Artificial Sequence: Synthetic oligonucleotide
  Antisense strand to SEQ ID NO: 1091976
accuccaagcauuuaauua

SEQ ID NO: 1091978 - RNA, 19 nt, Artificial Sequence
  Description of Artificial Sequence: Synthetic oligonucleotide
  Sense strand starting at position 126 of SEQ ID NO: 915599
uccauugaauuaucuugga

SEQ ID NO: 1091979 - RNA, 19 nt, Artificial Sequence
  Description of Artificial Sequence: Synthetic oligonucleotide
  Antisense strand to SEQ ID NO: 1091978
uccaagauaauucaaugga

SEQ ID NO: 1091980 - RNA, 19 nt, Artificial Sequence
  Description of Artificial Sequence: Synthetic oligonucleotide
  Sense strand starting at position 130 of SEQ ID NO: 915599
uugaauuaucuuggauacc

SEQ ID NO: 1091981 - RNA, 19 nt, Artificial Sequence
  Description of Artificial Sequence: Synthetic oligonucleotide
  Antisense strand to SEQ ID NO: 1091980
gguauccaagauaauucaa

SEQ ID NO: 1091982 - RNA, 19 nt, Artificial Sequence
  Description of Artificial Sequence: Synthetic oligonucleotide
  Sense strand starting at position 131 of SEQ ID NO: 915599
ugaauuaucuuggauaccu

SEQ ID NO: 1091983 - RNA, 19 nt, Artificial Sequence
  Description of Artificial Sequence: Synthetic oligonucleotide
  Antisense strand to SEQ ID NO: 1091982
agguauccaagauaauuca

SEQ ID NO: 1091984 - RNA, 19 nt, Artificial Sequence
  Description of Artificial Sequence: Synthetic oligonucleotide
  Sense strand starting at position 662 of SEQ ID NO: 915599
cuugaaggaucuuggauuu

SEQ ID NO: 1091985 - RNA, 19 nt, Artificial Sequence
  Description of Artificial Sequence: Synthetic oligonucleotide
  Antisense strand to SEQ ID NO: 1091984
aaauccaagauccuucaag

SEQ ID NO: 1091986 - RNA, 19 nt, Artificial Sequence
  Description of Artificial Sequence: Synthetic oligonucleotide
  Sense strand starting at position 1024 of SEQ ID NO: 915599
gauggaguuaccugaguac

SEQ ID NO: 1091987 - RNA, 19 nt, Artificial Sequence
  Description of Artificial Sequence: Synthetic oligonucleotide
  Antisense strand to SEQ ID NO: 1091986
guacucagguaacuccauc

SEQ ID NO: 1091988 - RNA, 19 nt, Artificial Sequence
  Description of Artificial Sequence: Synthetic oligonucleotide
  Sense strand starting at position 1027 of SEQ ID NO: 915599
ggaguuaccugaguaccca

SEQ ID NO: 1091989 - RNA, 19 nt, Artificial Sequence
  Description of Artificial Sequence: Synthetic oligonucleotide
  Antisense strand to SEQ ID NO: 1091988
uggguacucagguaacucc

SEQ ID NO: 1091990 - RNA, 19 nt, Artificial Sequence
  Description of Artificial Sequence: Synthetic oligonucleotide
  Sense strand starting at position 1028 of SEQ ID NO: 915599
gaguuaccugaguacccaa

SEQ ID NO: 1091991 - RNA, 19 nt, Artificial Sequence
  Description of Artificial Sequence: Synthetic oligonucleotide
  Antisense strand to SEQ ID NO: 1091990
uuggguacucagguaacuc

SEQ ID NO: 1091992 - RNA, 19 nt, Artificial Sequence
  Description of Artificial Sequence: Synthetic oligonucleotide
  Sense strand starting at position 1140 of SEQ ID NO: 915599
uggguucuuucccuuacuu

SEQ ID NO: 1091993 - RNA, 19 nt, Artificial Sequence
  Description of Artificial Sequence: Synthetic oligonucleotide
  Antisense strand to SEQ ID NO: 1091992
aaguaagggaaagaaccca

SEQ ID NO: 1091994 - RNA, 19 nt, Artificial Sequence
  Description of Artificial Sequence: Synthetic oligonucleotide
  Sense strand starting at position 1345 of SEQ ID NO: 915599
gguacagucagucaaucua

SEQ ID NO: 1091995 - RNA, 19 nt, Artificial Sequence
  Description of Artificial Sequence: Synthetic oligonucleotide
  Antisense strand to SEQ ID NO: 1091994
uagauugacugacuguacc

SEQ ID NO: 1091996 - RNA, 19 nt, Artificial Sequence
  Description of Artificial Sequence: Synthetic oligonucleotide
  Sense strand starting at position 1365 of SEQ ID NO: 915599
gccuguauccaacaaagac

SEQ ID NO: 1091997 - RNA, 19 nt, Artificial Sequence
  Description of Artificial Sequence: Synthetic oligonucleotide
  Antisense strand to SEQ ID NO: 1091996
gucuuuguuggauacaggc

SEQ ID NO: 1091998 - RNA, 19 nt, Artificial Sequence
  Description of Artificial Sequence: Synthetic oligonucleotide
  Sense strand starting at position 1494 of SEQ ID NO: 915599
ggcccucagguuugcaauu

SEQ ID NO: 1091999 - RNA, 19 nt, Artificial Sequence
  Description of Artificial Sequence: Synthetic oligonucleotide
  Antisense strand to SEQ ID NO: 1091998
aauugcaaaccugagggcc

SEQ ID NO: 1092000 - RNA, 19 nt, Artificial Sequence
  Description of Artificial Sequence: Synthetic oligonucleotide
  Sense strand starting at position 1523 of SEQ ID NO: 915599
ggaaauggguuccucaauc

SEQ ID NO: 1092001 - RNA, 19 nt, Artificial Sequence
  Description of Artificial Sequence: Synthetic oligonucleotide
  Antisense strand to SEQ ID NO: 1092000
gauugaggaacccauuucc

SEQ ID NO: 1092002 - RNA, 19 nt, Artificial Sequence
  Description of Artificial Sequence: Synthetic oligonucleotide
  Sense strand starting at position 1585 of SEQ ID NO: 915599
guggguaaauuccugaaag

SEQ ID NO: 1092003 - RNA, 19 nt, Artificial Sequence
  Description of Artificial Sequence: Synthetic oligonucleotide
  Antisense strand to SEQ ID NO: 1092002
cuuucaggaauuuacccac

SEQ ID NO: 1092004 - RNA, 19 nt, Artificial Sequence
  Description of Artificial Sequence: Synthetic oligonucleotide
  Sense strand starting at position 1676 of SEQ ID NO: 915599
agcucaguucccuaaggga

SEQ ID NO: 1092005 - RNA, 19 nt, Artificial Sequence
  Description of Artificial Sequence: Synthetic oligonucleotide
  Antisense strand to SEQ ID NO: 1092004
ucccuuagggaacugagcu

SEQ ID NO: 1092006 - RNA, 19 nt, Artificial Sequence
  Description of Artificial Sequence: Synthetic oligonucleotide
  Sense strand starting at position 1739 of SEQ ID NO: 915599
ggugcaguccuugaauccu

SEQ ID NO: 1092007 - RNA, 19 nt, Artificial Sequence
  Description of Artificial Sequence: Synthetic oligonucleotide
  Antisense strand to SEQ ID NO: 1092006
aggauucaaggacugcacc

SEQ ID NO: 1092008 - RNA, 19 nt, Artificial Sequence
  Description of Artificial Sequence: Synthetic oligonucleotide
  Sense strand starting at position 1770 of SEQ ID NO: 915599
guccuuuacucucuaugau

SEQ ID NO: 1092009 - RNA, 19 nt, Artificial Sequence
  Description of Artificial Sequence: Synthetic oligonucleotide
  Antisense strand to SEQ ID NO: 1092008
aucauagagaguaaaggac

SEQ ID NO: 1092010 - RNA, 19 nt, Artificial Sequence
  Description of Artificial Sequence: Synthetic oligonucleotide
  Sense strand starting at position 1780 of SEQ ID NO: 915599
cucuaugaugcuggaaauc

SEQ ID NO: 1092011 - RNA, 19 nt, Artificial Sequence
  Description of Artificial Sequence: Synthetic oligonucleotide
  Antisense strand to SEQ ID NO: 1092010
gauuuccagcaucauagag

SEQ ID NO: 1092012 - RNA, 19 nt, Artificial Sequence
  Description of Artificial Sequence: Synthetic oligonucleotide
  Sense strand starting at position 1790 of SEQ ID NO: 915599
cuggaaaucugccugacuu

SEQ ID NO: 1092013 - RNA, 19 nt, Artificial Sequence
  Description of Artificial Sequence: Synthetic oligonucleotide
  Antisense strand to SEQ ID NO: 1092012
aagucaggcagauuuccag

SEQ ID NO: 1092014 - RNA, 19 nt, Artificial Sequence
  Description of Artificial Sequence: Synthetic oligonucleotide
  Sense strand starting at position 1791 of SEQ ID NO: 915599
uggaaaucugccugacuuc

SEQ ID NO: 1092015 - RNA, 19 nt, Artificial Sequence
  Description of Artificial Sequence: Synthetic oligonucleotide
  Antisense strand to SEQ ID NO: 1092014
gaagucaggcagauuucca

SEQ ID NO: 1092016 - RNA, 19 nt, Artificial Sequence
  Description of Artificial Sequence: Synthetic oligonucleotide
  Sense strand starting at position 1874 of SEQ ID NO: 915599
gagggucauuccuugugaa

SEQ ID NO: 1092017 - RNA, 19 nt, Artificial Sequence
  Description of Artificial Sequence: Synthetic oligonucleotide
  Antisense strand to SEQ ID NO: 1092016
uucacaaggaaugacccuc

SEQ ID NO: 1092018 - RNA, 19 nt, Artificial Sequence
  Description of Artificial Sequence: Synthetic oligonucleotide
  Sense strand starting at position 1875 of SEQ ID NO: 915599
agggucauuccuugugaau

SEQ ID NO: 1092019 - RNA, 19 nt, Artificial Sequence
  Description of Artificial Sequence: Synthetic oligonucleotide
  Antisense strand to SEQ ID NO: 1092018
auucacaaggaaugacccu

SEQ ID NO: 1092020 - RNA, 19 nt, Artificial Sequence
  Description of Artificial Sequence: Synthetic oligonucleotide
  Sense strand starting at position 1926 of SEQ ID NO: 915599
accguuagguuacuauuua

SEQ ID NO: 1092021 - RNA, 19 nt, Artificial Sequence
  Description of Artificial Sequence: Synthetic oligonucleotide
  Antisense strand to SEQ ID NO: 1092020
uaaauaguaaccuaacggu

SEQ ID NO: 1092022 - RNA, 19 nt, Artificial Sequence
  Description of Artificial Sequence: Synthetic oligonucleotide
  Sense strand starting at position 2340 of SEQ ID NO: 915599
acuggagaccgcggugaau

SEQ ID NO: 1092023 - RNA, 19 nt, Artificial Sequence
  Description of Artificial Sequence: Synthetic oligonucleotide
  Antisense strand to SEQ ID NO: 1092022
auucaccgcggucuccagu

SEQ ID NO: 1092024 - RNA, 19 nt, Artificial Sequence
  Description of Artificial Sequence: Synthetic oligonucleotide
  Sense strand starting at position 2352 of SEQ ID NO: 915599
ggugaauuccaccggaaug

SEQ ID NO: 1092025 - RNA, 19 nt, Artificial Sequence
  Description of Artificial Sequence: Synthetic oligonucleotide
  Antisense strand to SEQ ID NO: 1092024
cauuccgguggaauucacc

SEQ ID NO: 1092026 - RNA, 19 nt, Artificial Sequence
  Description of Artificial Sequence: Synthetic oligonucleotide
  Sense strand starting at position 2579 of SEQ ID NO: 915599
guuugaguugggcaggagu

SEQ ID NO: 1092027 - RNA, 19 nt, Artificial Sequence
  Description of Artificial Sequence: Synthetic oligonucleotide
  Antisense strand to SEQ ID NO: 1092026
acuccugcccaacucaaac

SEQ ID NO: 1092028 - RNA, 19 nt, Artificial Sequence
  Description of Artificial Sequence: Synthetic oligonucleotide
  Sense strand starting at position 2581 of SEQ ID NO: 915599
uugaguugggcaggaguua

SEQ ID NO: 1092029 - RNA, 19 nt, Artificial Sequence
  Description of Artificial Sequence: Synthetic oligonucleotide
  Antisense strand to SEQ ID NO: 1092028
uaacuccugcccaacucaa

SEQ ID NO: 1092030 - RNA, 19 nt, Artificial Sequence
  Description of Artificial Sequence: Synthetic oligonucleotide
  Sense strand starting at position 2663 of SEQ ID NO: 915599
aguugugugaucugagcga

SEQ ID NO: 1092031 - RNA, 19 nt, Artificial Sequence
  Description of Artificial Sequence: Synthetic oligonucleotide
  Antisense strand to SEQ ID NO: 1092030
ucgcucagaucacacaacu

SEQ ID NO: 1092032 - RNA, 19 nt, Artificial Sequence
  Description of Artificial Sequence: Synthetic oligonucleotide
  Sense strand starting at position 2667 of SEQ ID NO: 915599
gugugaucugagcgaucaa

SEQ ID NO: 1092033 - RNA, 19 nt, Artificial Sequence
  Description of Artificial Sequence: Synthetic oligonucleotide
  Antisense strand to SEQ ID NO: 1092032
uugaucgcucagaucacac

SEQ ID NO: 1092034 - RNA, 19 nt, Artificial Sequence
  Description of Artificial Sequence: Synthetic oligonucleotide
  Sense strand starting at position 2668 of SEQ ID NO: 915599
ugugaucugagcgaucaag

SEQ ID NO: 1092035 - RNA, 19 nt, Artificial Sequence
  Description of Artificial Sequence: Synthetic oligonucleotide
  Antisense strand to SEQ ID NO: 1092034
cuugaucgcucagaucaca

SEQ ID NO: 1092036 - RNA, 19 nt, Artificial Sequence
  Description of Artificial Sequence: Synthetic oligonucleotide
  Sense strand starting at position 3006 of SEQ ID NO: 915599
uugucagacucuucuuuac

SEQ ID NO: 1092037 - RNA, 19 nt, Artificial Sequence
  Description of Artificial Sequence: Synthetic oligonucleotide
  Antisense strand to SEQ ID NO: 1092036
guaaagaagagucugacaa

SEQ ID NO: 1092038 - RNA, 19 nt, Artificial Sequence
  Description of Artificial Sequence: Synthetic oligonucleotide
  Sense strand starting at position 3008 of SEQ ID NO: 915599
gucagacucuucuuuacug

SEQ ID NO: 1092039 - RNA, 19 nt, Artificial Sequence
  Description of Artificial Sequence: Synthetic oligonucleotide
  Antisense strand to SEQ ID NO: 1092038
caguaaagaagagucugac

SEQ ID NO: 1092040 - RNA, 19 nt, Artificial Sequence
  Description of Artificial Sequence: Synthetic oligonucleotide
  Sense strand starting at position 3090 of SEQ ID NO: 915599
ccugauaaguaacugcaga

SEQ ID NO: 1092041 - RNA, 19 nt, Artificial Sequence
  Description of Artificial Sequence: Synthetic oligonucleotide
  Antisense strand to SEQ ID NO: 1092040
ucugcaguuacuuaucagg

SEQ ID NO: 1092042 - RNA, 19 nt, Artificial Sequence
  Description of Artificial Sequence: Synthetic oligonucleotide
  Sense strand starting at position 3152 of SEQ ID NO: 915599
uguguuuguguccuauagu

SEQ ID NO: 1092043 - RNA, 19 nt, Artificial Sequence
  Description of Artificial Sequence: Synthetic oligonucleotide
  Antisense strand to SEQ ID NO: 1092042
acuauaggacacaaacaca

SEQ ID NO: 1092044 - RNA, 19 nt, Artificial Sequence
  Description of Artificial Sequence: Synthetic oligonucleotide
  Sense strand starting at position 3155 of SEQ ID NO: 915599
guuuguguccuauagucca

SEQ ID NO: 1092045 - RNA, 19 nt, Artificial Sequence
  Description of Artificial Sequence: Synthetic oligonucleotide
  Antisense strand to SEQ ID NO: 1092044
uggacuauaggacacaaac

SEQ ID NO: 1092046 - RNA, 19 nt, Artificial Sequence
  Description of Artificial Sequence: Synthetic oligonucleotide
  Sense strand starting at position 3243 of SEQ ID NO: 915599
acauauguuacagguguuu

SEQ ID NO: 1092047 - RNA, 19 nt, Artificial Sequence
  Description of Artificial Sequence: Synthetic oligonucleotide
  Antisense strand to SEQ ID NO: 1092046
aaacaccuguaacauaugu

SEQ ID NO: 1092048 - RNA, 19 nt, Artificial Sequence
  Description of Artificial Sequence: Synthetic oligonucleotide
  Sense strand starting at position 3245 of SEQ ID NO: 915599
auauguuacagguguuuac

SEQ ID NO: 1092049 - RNA, 19 nt, Artificial Sequence
  Description of Artificial Sequence: Synthetic oligonucleotide
  Antisense strand to SEQ ID NO: 1092048
guaaacaccuguaacauau

SEQ ID NO: 1092050 - RNA, 19 nt, Artificial Sequence
  Description of Artificial Sequence: Synthetic oligonucleotide
  Sense strand starting at position 3321 of SEQ ID NO: 915599
gcugaauauguaugauuau

SEQ ID NO: 1092051 - RNA, 19 nt, Artificial Sequence
  Description of Artificial Sequence: Synthetic oligonucleotide
  Antisense strand to SEQ ID NO: 1092050
auaaucauacauauucagc

SEQ ID NO: 1092052 - RNA, 19 nt, Artificial Sequence
  Description of Artificial Sequence: Synthetic oligonucleotide
  Sense strand starting at position 3755 of SEQ ID NO: 915599
aacugaugucgcuaaugaa

SEQ ID NO: 1092053 - RNA, 19 nt, Artificial Sequence
  Description of Artificial Sequence: Synthetic oligonucleotide
  Antisense strand to SEQ ID NO: 1092052
uucauuagcgacaucaguu

SEQ ID NO: 1092054 - RNA, 19 nt, Artificial Sequence
  Description of Artificial Sequence: Synthetic oligonucleotide
  Sense strand starting at position 3797 of SEQ ID NO: 915599
ccugguguucuagagggua

SEQ ID NO: 1092055 - RNA, 19 nt, Artificial Sequence
  Description of Artificial Sequence: Synthetic oligonucleotide
  Antisense strand to SEQ ID NO: 1092054
uacccucuagaacaccagg

SEQ ID NO: 1092056 - RNA, 19 nt, Artificial Sequence
  Description of Artificial Sequence: Synthetic oligonucleotide
  Sense strand starting at position 22 of SEQ ID NO: 915600
acuugcuuaugcucagaaa

SEQ ID NO: 1092057 - RNA, 19 nt, Artificial Sequence
  Description of Artificial Sequence: Synthetic oligonucleotide
  Antisense strand to SEQ ID NO: 1092056
uuucugagcauaagcaagu

SEQ ID NO: 1092058 - RNA, 19 nt, Artificial Sequence
  Description of Artificial Sequence: Synthetic oligonucleotide
  Sense strand starting at position 23 of SEQ ID NO: 915600
cuugcuuaugcucagaaac

SEQ ID NO: 1092059 - RNA, 19 nt, Artificial Sequence
  Description of Artificial Sequence: Synthetic oligonucleotide
  Antisense strand to SEQ ID NO: 1092058
guuucugagcauaagcaag

SEQ ID NO: 1092060 - RNA, 19 nt, Artificial Sequence
  Description of Artificial Sequence: Synthetic oligonucleotide
  Sense strand starting at position 77 of SEQ ID NO: 915600
cagcuuugggcagaucaca

SEQ ID NO: 1092061 - RNA, 19 nt, Artificial Sequence
  Description of Artificial Sequence: Synthetic oligonucleotide
  Antisense strand to SEQ ID NO: 1092060
ugugaucugcccaaagcug

SEQ ID NO: 1092062 - RNA, 19 nt, Artificial Sequence
  Description of Artificial Sequence: Synthetic oligonucleotide
  Sense strand starting at position 131 of SEQ ID NO: 915600
ucucguaagccuuauguaa

SEQ ID NO: 1092063 - RNA, 19 nt, Artificial Sequence
  Description of Artificial Sequence: Synthetic oligonucleotide
  Antisense strand to SEQ ID NO: 1092062
uuacauaaggcuuacgaga

SEQ ID NO: 1092064 - RNA, 19 nt, Artificial Sequence
  Description of Artificial Sequence: Synthetic oligonucleotide
  Sense strand starting at position 162 of SEQ ID NO: 915600
uuaauagaguuccuugaug

SEQ ID NO: 1092065 - RNA, 19 nt, Artificial Sequence
  Description of Artificial Sequence: Synthetic oligonucleotide
  Antisense strand to SEQ ID NO: 1092064
caucaaggaacucuauuaa

SEQ ID NO: 1092066 - RNA, 19 nt, Artificial Sequence
  Description of Artificial Sequence: Synthetic oligonucleotide
  Sense strand starting at position 605 of SEQ ID NO: 915600
aaaccuguagcauggaauu

SEQ ID NO: 1092067 - RNA, 19 nt, Artificial Sequence
  Description of Artificial Sequence: Synthetic oligonucleotide
  Antisense strand to SEQ ID NO: 1092066
aauuccaugcuacagguuu

SEQ ID NO: 1092068 - RNA, 19 nt, Artificial Sequence
  Description of Artificial Sequence: Synthetic oligonucleotide
  Sense strand starting at position 677 of SEQ ID NO: 915600
uuauaucaugucuauguca

SEQ ID NO: 1092069 - RNA, 19 nt, Artificial Sequence
  Description of Artificial Sequence: Synthetic oligonucleotide
  Antisense strand to SEQ ID NO: 1092068
ugacauagacaugauauaa

SEQ ID NO: 1092070 - RNA, 19 nt, Artificial Sequence
  Description of Artificial Sequence: Synthetic oligonucleotide
  Sense strand starting at position 679 of SEQ ID NO: 915600
auaucaugucuaugucaag

SEQ ID NO: 1092071 - RNA, 19 nt, Artificial Sequence
  Description of Artificial Sequence: Synthetic oligonucleotide
  Antisense strand to SEQ ID NO: 1092070
cuugacauagacaugauau

SEQ ID NO: 1092072 - RNA, 19 nt, Artificial Sequence
  Description of Artificial Sequence: Synthetic oligonucleotide
  Sense strand starting at position 708 of SEQ ID NO: 915600
uuaacacccuaguuguaaa

SEQ ID NO: 1092073 - RNA, 19 nt, Artificial Sequence
  Description of Artificial Sequence: Synthetic oligonucleotide
  Antisense strand to SEQ ID NO: 1092072
uuuacaacuaggguguuaa

SEQ ID NO: 1092074 - RNA, 19 nt, Artificial Sequence
  Description of Artificial Sequence: Synthetic oligonucleotide
  Sense strand starting at position 739 of SEQ ID NO: 915600
uaagaaaccgccuggauau

SEQ ID NO: 1092075 - RNA, 19 nt, Artificial Sequence
  Description of Artificial Sequence: Synthetic oligonucleotide
  Antisense strand to SEQ ID NO: 1092074
auauccaggcgguuucuua

SEQ ID NO: 1092076 - RNA, 19 nt, Artificial Sequence
  Description of Artificial Sequence: Synthetic oligonucleotide
  Sense strand starting at position 740 of SEQ ID NO: 915600
aagaaaccgccuggauauu

SEQ ID NO: 1092077 - RNA, 19 nt, Artificial Sequence
  Description of Artificial Sequence: Synthetic oligonucleotide
  Antisense strand to SEQ ID NO: 1092076
aauauccaggcgguuucuu

SEQ ID NO: 1092078 - RNA, 19 nt, Artificial Sequence
  Description of Artificial Sequence: Synthetic oligonucleotide
  Sense strand starting at position 973 of SEQ ID NO: 915600
gccauucuuccagacaagu

SEQ ID NO: 1092079 - RNA, 19 nt, Artificial Sequence
  Description of Artificial Sequence: Synthetic oligonucleotide
  Antisense strand to SEQ ID NO: 1092078
acuugucuggaagaauggc

SEQ ID NO: 1092080 - RNA, 19 nt, Artificial Sequence
  Description of Artificial Sequence: Synthetic oligonucleotide
  Sense strand starting at position 1089 of SEQ ID NO: 915600
ugaggaaaguuguucagga

SEQ ID NO: 1092081 - RNA, 19 nt, Artificial Sequence
  Description of Artificial Sequence: Synthetic oligonucleotide
  Antisense strand to SEQ ID NO: 1092080
uccugaacaacuuuccuca

SEQ ID NO: 1092082 - RNA, 19 nt, Artificial Sequence
  Description of Artificial Sequence: Synthetic oligonucleotide
  Sense strand starting at position 1177 of SEQ ID NO: 915600
augugugaauccuccauga

SEQ ID NO: 1092083 - RNA, 19 nt, Artificial Sequence
  Description of Artificial Sequence: Synthetic oligonucleotide
  Antisense strand to SEQ ID NO: 1092082
ucauggaggauucacacau

SEQ ID NO: 1092084 - RNA, 19 nt, Artificial Sequence
  Description of Artificial Sequence: Synthetic oligonucleotide
  Sense strand starting at position 1179 of SEQ ID NO: 915600
gugugaauccuccaugaac

SEQ ID NO: 1092085 - RNA, 19 nt, Artificial Sequence
  Description of Artificial Sequence: Synthetic oligonucleotide
  Antisense strand to SEQ ID NO: 1092084
guucauggaggauucacac

SEQ ID NO: 1092086 - RNA, 19 nt, Artificial Sequence
  Description of Artificial Sequence: Synthetic oligonucleotide
  Sense strand starting at position 1181 of SEQ ID NO: 915600
gugaauccuccaugaaccu

SEQ ID NO: 1092087 - RNA, 19 nt, Artificial Sequence
  Description of Artificial Sequence: Synthetic oligonucleotide
  Antisense strand to SEQ ID NO: 1092086
agguucauggaggauucac

SEQ ID NO: 1092088 - RNA, 19 nt, Artificial Sequence
  Description of Artificial Sequence: Synthetic oligonucleotide
  Sense strand starting at position 1239 of SEQ ID NO: 915600
ccacucaguccugagccaa

SEQ ID NO: 1092089 - RNA, 19 nt, Artificial Sequence
  Description of Artificial Sequence: Synthetic oligonucleotide
  Antisense strand to SEQ ID NO: 1092088
uuggcucaggacugagugg

SEQ ID NO: 1092090 - RNA, 19 nt, Artificial Sequence
  Description of Artificial Sequence: Synthetic oligonucleotide
  Sense strand starting at position 2161 of SEQ ID NO: 915600
cggaauaaccggugaagac

SEQ ID NO: 1092091 - RNA, 19 nt, Artificial Sequence
  Description of Artificial Sequence: Synthetic oligonucleotide
  Antisense strand to SEQ ID NO: 1092090
gucuucaccgguuauuccg

SEQ ID NO: 1092092 - RNA, 19 nt, Artificial Sequence
  Description of Artificial Sequence: Synthetic oligonucleotide
  Sense strand starting at position 2333 of SEQ ID NO: 915600
cccgcaguuacucagguaa

SEQ ID NO: 1092093 - RNA, 19 nt, Artificial Sequence
  Description of Artificial Sequence: Synthetic oligonucleotide
  Antisense strand to SEQ ID NO: 1092092
uuaccugaguaacugcggg

SEQ ID NO: 1092094 - RNA, 19 nt, Artificial Sequence
  Description of Artificial Sequence: Synthetic oligonucleotide
  Sense strand starting at position 2429 of SEQ ID NO: 915600
ucuagagcugucuaaacag

SEQ ID NO: 1092095 - RNA, 19 nt, Artificial Sequence
  Description of Artificial Sequence: Synthetic oligonucleotide
  Antisense strand to SEQ ID NO: 1092094
cuguuuagacagcucuaga

SEQ ID NO: 1092096 - RNA, 19 nt, Artificial Sequence
  Description of Artificial Sequence: Synthetic oligonucleotide
  Sense strand starting at position 2795 of SEQ ID NO: 915600
aaaugaugaugccagaaag

SEQ ID NO: 1092097 - RNA, 19 nt, Artificial Sequence
  Description of Artificial Sequence: Synthetic oligonucleotide
  Antisense strand to SEQ ID NO: 1092096
cuuucuggcaucaucauuu

SEQ ID NO: 1092098 - RNA, 19 nt, Artificial Sequence
  Description of Artificial Sequence: Synthetic oligonucleotide
  Sense strand starting at position 2852 of SEQ ID NO: 915600
cuacacauuccuugagucu

SEQ ID NO: 1092099 - RNA, 19 nt, Artificial Sequence
  Description of Artificial Sequence: Synthetic oligonucleotide
  Antisense strand to SEQ ID NO: 1092098
agacucaaggaauguguag

SEQ ID NO: 1092100 - RNA, 19 nt, Artificial Sequence
  Description of Artificial Sequence: Synthetic oligonucleotide
  Sense strand starting at position 2979 of SEQ ID NO: 915600
cucucagcccuuuaagguu

SEQ ID NO: 1092101 - RNA, 19 nt, Artificial Sequence
  Description of Artificial Sequence: Synthetic oligonucleotide
  Antisense strand to SEQ ID NO: 1092100
aaccuuaaagggcugagag

SEQ ID NO: 1092102 - RNA, 19 nt, Artificial Sequence
  Description of Artificial Sequence: Synthetic oligonucleotide
  Sense strand starting at position 3062 of SEQ ID NO: 915600
ggaggugucagcgacuuga

SEQ ID NO: 1092103 - RNA, 19 nt, Artificial Sequence
  Description of Artificial Sequence: Synthetic oligonucleotide
  Antisense strand to SEQ ID NO: 1092102
ucaagucgcugacaccucc

SEQ ID NO: 1092104 - RNA, 19 nt, Artificial Sequence
  Description of Artificial Sequence: Synthetic oligonucleotide
  Sense strand starting at position 3066 of SEQ ID NO: 915600
gugucagcgacuugagaau

SEQ ID NO: 1092105 - RNA, 19 nt, Artificial Sequence
  Description of Artificial Sequence: Synthetic oligonucleotide
  Antisense strand to SEQ ID NO: 1092104
auucucaagucgcugacac

SEQ ID NO: 1092106 - RNA, 19 nt, Artificial Sequence
  Description of Artificial Sequence: Synthetic oligonucleotide
  Sense strand starting at position 3078 of SEQ ID NO: 915600
ugagaaugagugcgccaaa

SEQ ID NO: 1092107 - RNA, 19 nt, Artificial Sequence
  Description of Artificial Sequence: Synthetic oligonucleotide
  Antisense strand to SEQ ID NO: 1092106
uuuggcgcacucauucuca

SEQ ID NO: 1092108 - RNA, 19 nt, Artificial Sequence
  Description of Artificial Sequence: Synthetic oligonucleotide
  Sense strand starting at position 3081 of SEQ ID NO: 915600
gaaugagugcgccaaagaa

SEQ ID NO: 1092109 - RNA, 19 nt, Artificial Sequence
  Description of Artificial Sequence: Synthetic oligonucleotide
  Antisense strand to SEQ ID NO: 1092108
uucuuuggcgcacucauuc

SEQ ID NO: 1092110 - RNA, 19 nt, Artificial Sequence
  Description of Artificial Sequence: Synthetic oligonucleotide
  Sense strand starting at position 3169 of SEQ ID NO: 915600
gcagaucuugacugaaacc

SEQ ID NO: 1092111 - RNA, 19 nt, Artificial Sequence
  Description of Artificial Sequence: Synthetic oligonucleotide
  Antisense strand to SEQ ID NO: 1092110
gguuucagucaagaucugc

SEQ ID NO: 1092112 - RNA, 19 nt, Artificial Sequence
  Description of Artificial Sequence: Synthetic oligonucleotide
  Sense strand starting at position 3249 of SEQ ID NO: 915600
ucugacugacagugcuaaa

SEQ ID NO: 1092113 - RNA, 19 nt, Artificial Sequence
  Description of Artificial Sequence: Synthetic oligonucleotide
  Antisense strand to SEQ ID NO: 1092112
uuuagcacugucagucaga

SEQ ID NO: 1092114 - RNA, 19 nt, Artificial Sequence
  Description of Artificial Sequence: Synthetic oligonucleotide
  Sense strand starting at position 3366 of SEQ ID NO: 915600
uggcuaauguaaccuacua

SEQ ID NO: 1092115 - RNA, 19 nt, Artificial Sequence
  Description of Artificial Sequence: Synthetic oligonucleotide
  Antisense strand to SEQ ID NO: 1092114
uaguagguuacauuagcca

SEQ ID NO: 1092116 - RNA, 19 nt, Artificial Sequence
  Description of Artificial Sequence: Synthetic oligonucleotide
  Sense strand starting at position 3424 of SEQ ID NO: 915600
uucguuaaguuccuaacca

SEQ ID NO: 1092117 - RNA, 19 nt, Artificial Sequence
  Description of Artificial Sequence: Synthetic oligonucleotide
  Antisense strand to SEQ ID NO: 1092116
ugguuaggaacuuaacgaa

SEQ ID NO: 1092118 - RNA, 19 nt, Artificial Sequence
  Description of Artificial Sequence: Synthetic oligonucleotide
  Sense strand starting at position 3431 of SEQ ID NO: 915600
aguuccuaaccacgucaaa

SEQ ID NO: 1092119 - RNA, 19 nt, Artificial Sequence
  Description of Artificial Sequence: Synthetic oligonucleotide
  Antisense strand to SEQ ID NO: 1092118
uuugacgugguuaggaacu

SEQ ID NO: 1092120 - RNA, 19 nt, Artificial Sequence
  Description of Artificial Sequence: Synthetic oligonucleotide
  Sense strand starting at position 3480 of SEQ ID NO: 915600
guugcuucugcaugaaaca

SEQ ID NO: 1092121 - RNA, 19 nt, Artificial Sequence
  Description of Artificial Sequence: Synthetic oligonucleotide
  Antisense strand to SEQ ID NO: 1092120
uguuucaugcagaagcaac

SEQ ID NO: 1092122 - RNA, 19 nt, Artificial Sequence
  Description of Artificial Sequence: Synthetic oligonucleotide
  Sense strand starting at position 3531 of SEQ ID NO: 915600
gucucuuacucuuccagau

SEQ ID NO: 1092123 - RNA, 19 nt, Artificial Sequence
  Description of Artificial Sequence: Synthetic oligonucleotide
  Antisense strand to SEQ ID NO: 1092122
aucuggaagaguaagagac

SEQ ID NO: 1092124 - RNA, 19 nt, Artificial Sequence
  Description of Artificial Sequence: Synthetic oligonucleotide
  Sense strand starting at position 3554 of SEQ ID NO: 915600
cucaaugugucuccuuaga

SEQ ID NO: 1092125 - RNA, 19 nt, Artificial Sequence
  Description of Artificial Sequence: Synthetic oligonucleotide
  Antisense strand to SEQ ID NO: 1092124
ucuaaggagacacauugag

SEQ ID NO: 1092126 - RNA, 19 nt, Artificial Sequence
  Description of Artificial Sequence: Synthetic oligonucleotide
  Sense strand starting at position 3675 of SEQ ID NO: 915600
gucagagacugugccuuau

SEQ ID NO: 1092127 - RNA, 19 nt, Artificial Sequence
  Description of Artificial Sequence: Synthetic oligonucleotide
  Antisense strand to SEQ ID NO: 1092126
auaaggcacagucucugac

SEQ ID NO: 1092128 - RNA, 19 nt, Artificial Sequence
  Description of Artificial Sequence: Synthetic oligonucleotide
  Sense strand starting at position 3754 of SEQ ID NO: 915600
gcuggauuacaugaguuaa

SEQ ID NO: 1092129 - RNA, 19 nt, Artificial Sequence
  Description of Artificial Sequence: Synthetic oligonucleotide
  Antisense strand to SEQ ID NO: 1092128
uuaacucauguaauccagc

SEQ ID NO: 1092130 - RNA, 19 nt, Artificial Sequence
  Description of Artificial Sequence: Synthetic oligonucleotide
  Sense strand starting at position 3756 of SEQ ID NO: 915600
uggauuacaugaguuaauu

SEQ ID NO: 1092131 - RNA, 19 nt, Artificial Sequence
  Description of Artificial Sequence: Synthetic oligonucleotide
  Antisense strand to SEQ ID NO: 1092130
aauuaacucauguaaucca

SEQ ID NO: 1092132 - RNA, 19 nt, Artificial Sequence
  Description of Artificial Sequence: Synthetic oligonucleotide
  Sense strand starting at position 3843 of SEQ ID NO: 915600
cuaccuagguucuccuaga

SEQ ID NO: 1092133 - RNA, 19 nt, Artificial Sequence
  Description of Artificial Sequence: Synthetic oligonucleotide
  Antisense strand to SEQ ID NO: 1092132
ucuaggagaaccuagguag

SEQ ID NO: 1092134 - RNA, 19 nt, Artificial Sequence
  Description of Artificial Sequence: Synthetic oligonucleotide
  Sense strand starting at position 3859 of SEQ ID NO: 915600
agaccuauucucugagcca

SEQ ID NO: 1092135 - RNA, 19 nt, Artificial Sequence
  Description of Artificial Sequence: Synthetic oligonucleotide
  Antisense strand to SEQ ID NO: 1092134
uggcucagagaauaggucu

SEQ ID NO: 1092136 - RNA, 19 nt, Artificial Sequence
  Description of Artificial Sequence: Synthetic oligonucleotide
  Sense strand starting at position 132 of SEQ ID NO: 915601
cccucaaaugcucaguaga

SEQ ID NO: 1092137 - RNA, 19 nt, Artificial Sequence
  Description of Artificial Sequence: Synthetic oligonucleotide
  Antisense strand to SEQ ID NO: 1092136
ucuacugagcauuugaggg

SEQ ID NO: 1092138 - RNA, 19 nt, Artificial Sequence
  Description of Artificial Sequence: Synthetic oligonucleotide
  Sense strand starting at position 156 of SEQ ID NO: 915601
auaacuuccagcgguugau

SEQ ID NO: 1092139 - RNA, 19 nt, Artificial Sequence
  Description of Artificial Sequence: Synthetic oligonucleotide
  Antisense strand to SEQ ID NO: 1092138
aucaaccgcuggaaguuau

SEQ ID NO: 1092140 - RNA, 19 nt, Artificial Sequence
  Description of Artificial Sequence: Synthetic oligonucleotide
  Sense strand starting at position 165 of SEQ ID NO: 915601
agcgguugaucucuguaaa

SEQ ID NO: 1092141 - RNA, 19 nt, Artificial Sequence
  Description of Artificial Sequence: Synthetic oligonucleotide
  Antisense strand to SEQ ID NO: 1092140
uuuacagagaucaaccgcu

SEQ ID NO: 1092142 - RNA, 19 nt, Artificial Sequence
  Description of Artificial Sequence: Synthetic oligonucleotide
  Sense strand starting at position 166 of SEQ ID NO: 915601
gcgguugaucucuguaaau

SEQ ID NO: 1092143 - RNA, 19 nt, Artificial Sequence
  Description of Artificial Sequence: Synthetic oligonucleotide
  Antisense strand to SEQ ID NO: 1092142
auuuacagagaucaaccgc

SEQ ID NO: 1092144 - RNA, 19 nt, Artificial Sequence
  Description of Artificial Sequence: Synthetic oligonucleotide
  Sense strand starting at position 168 of SEQ ID NO: 915601
gguugaucucuguaaauug

SEQ ID NO: 1092145 - RNA, 19 nt, Artificial Sequence
  Description of Artificial Sequence: Synthetic oligonucleotide
  Antisense strand to SEQ ID NO: 1092144
caauuuacagagaucaacc

SEQ ID NO: 1092146 - RNA, 19 nt, Artificial Sequence
  Description of Artificial Sequence: Synthetic oligonucleotide
  Sense strand starting at position 175 of SEQ ID NO: 915601
cucuguaaauugucuacaa

SEQ ID NO: 1092147 - RNA, 19 nt, Artificial Sequence
  Description of Artificial Sequence: Synthetic oligonucleotide
  Antisense strand to SEQ ID NO: 1092146
uuguagacaauuuacagag

SEQ ID NO: 1092148 - RNA, 19 nt, Artificial Sequence
  Description of Artificial Sequence: Synthetic oligonucleotide
  Sense strand starting at position 176 of SEQ ID NO: 915601
ucuguaaauugucuacaac

SEQ ID NO: 1092149 - RNA, 19 nt, Artificial Sequence
  Description of Artificial Sequence: Synthetic oligonucleotide
  Antisense strand to SEQ ID NO: 1092148
guuguagacaauuuacaga

SEQ ID NO: 1092150 - RNA, 19 nt, Artificial Sequence
  Description of Artificial Sequence: Synthetic oligonucleotide
  Sense strand starting at position 179 of SEQ ID NO: 915601
guaaauugucuacaaccac

SEQ ID NO: 1092151 - RNA, 19 nt, Artificial Sequence
  Description of Artificial Sequence: Synthetic oligonucleotide
  Antisense strand to SEQ ID NO: 1092150
gugguuguagacaauuuac

SEQ ID NO: 1092152 - RNA, 19 nt, Artificial Sequence
  Description of Artificial Sequence: Synthetic oligonucleotide
  Sense strand starting at position 240 of SEQ ID NO: 915601
aaguguugguccucgguca

SEQ ID NO: 1092153 - RNA, 19 nt, Artificial Sequence
  Description of Artificial Sequence: Synthetic oligonucleotide
  Antisense strand to SEQ ID NO: 1092152
ugaccgaggaccaacacuu

SEQ ID NO: 1092154 - RNA, 19 nt, Artificial Sequence
  Description of Artificial Sequence: Synthetic oligonucleotide
  Sense strand starting at position 483 of SEQ ID NO: 915601
cugcuaagauccucggcua

SEQ ID NO: 1092155 - RNA, 19 nt, Artificial Sequence
  Description of Artificial Sequence: Synthetic oligonucleotide
  Antisense strand to SEQ ID NO: 1092154
uagccgaggaucuuagcag

SEQ ID NO: 1092156 - RNA, 19 nt, Artificial Sequence
  Description of Artificial Sequence: Synthetic oligonucleotide
  Sense strand starting at position 552 of SEQ ID NO: 915601
ggcuaagucccgagcgguu

SEQ ID NO: 1092157 - RNA, 19 nt, Artificial Sequence
  Description of Artificial Sequence: Synthetic oligonucleotide
  Antisense strand to SEQ ID NO: 1092156
aaccgcucgggacuuagcc

SEQ ID NO: 1092158 - RNA, 19 nt, Artificial Sequence
  Description of Artificial Sequence: Synthetic oligonucleotide
  Sense strand starting at position 1166 of SEQ ID NO: 915601
gucugugcugcucuacuau

SEQ ID NO: 1092159 - RNA, 19 nt, Artificial Sequence
  Description of Artificial Sequence: Synthetic oligonucleotide
  Antisense strand to SEQ ID NO: 1092158
auaguagagcagcacagac

SEQ ID NO: 1092160 - RNA, 19 nt, Artificial Sequence
  Description of Artificial Sequence: Synthetic oligonucleotide
  Sense strand starting at position 1178 of SEQ ID NO: 915601
cuacuauuggcuugagguc

SEQ ID NO: 1092161 - RNA, 19 nt, Artificial Sequence
  Description of Artificial Sequence: Synthetic oligonucleotide
  Antisense strand to SEQ ID NO: 1092160
gaccucaagccaauaguag

SEQ ID NO: 1092162 - RNA, 19 nt, Artificial Sequence
  Description of Artificial Sequence: Synthetic oligonucleotide
  Sense strand starting at position 1234 of SEQ ID NO: 915601
gggaguaauucccucaacc

SEQ ID NO: 1092163 - RNA, 19 nt, Artificial Sequence
  Description of Artificial Sequence: Synthetic oligonucleotide
  Antisense strand to SEQ ID NO: 1092162
gguugagggaauuacuccc

SEQ ID NO: 1092164 - RNA, 19 nt, Artificial Sequence
  Description of Artificial Sequence: Synthetic oligonucleotide
  Sense strand starting at position 1995 of SEQ ID NO: 915601
ggaauucgugcgguguuga

SEQ ID NO: 1092165 - RNA, 19 nt, Artificial Sequence
  Description of Artificial Sequence: Synthetic oligonucleotide
  Antisense strand to SEQ ID NO: 1092164
ucaacaccgcacgaauucc

SEQ ID NO: 1092166 - RNA, 19 nt, Artificial Sequence
  Description of Artificial Sequence: Synthetic oligonucleotide
  Sense strand starting at position 2018 of SEQ ID NO: 915601
gcgggaagcacuuaacgaa

SEQ ID NO: 1092167 - RNA, 19 nt, Artificial Sequence
  Description of Artificial Sequence: Synthetic oligonucleotide
  Antisense strand to SEQ ID NO: 1092166
uucguuaagugcuucccgc

SEQ ID NO: 1092168 - RNA, 19 nt, Artificial Sequence
  Description of Artificial Sequence: Synthetic oligonucleotide
  Sense strand starting at position 2057 of SEQ ID NO: 915601
ucgugaguccgauguaaag

SEQ ID NO: 1092169 - RNA, 19 nt, Artificial Sequence
  Description of Artificial Sequence: Synthetic oligonucleotide
  Antisense strand to SEQ ID NO: 1092168
cuuuacaucggacucacga

SEQ ID NO: 1092170 - RNA, 19 nt, Artificial Sequence
  Description of Artificial Sequence: Synthetic oligonucleotide
  Sense strand starting at position 2059 of SEQ ID NO: 915601
gugaguccgauguaaagga

SEQ ID NO: 1092171 - RNA, 19 nt, Artificial Sequence
  Description of Artificial Sequence: Synthetic oligonucleotide
  Antisense strand to SEQ ID NO: 1092170
uccuuuacaucggacucac

SEQ ID NO: 1092172 - RNA, 19 nt, Artificial Sequence
  Description of Artificial Sequence: Synthetic oligonucleotide
  Sense strand starting at position 2063 of SEQ ID NO: 915601
guccgauguaaaggaguga

SEQ ID NO: 1092173 - RNA, 19 nt, Artificial Sequence
  Description of Artificial Sequence: Synthetic oligonucleotide
  Antisense strand to SEQ ID NO: 1092172
ucacuccuuuacaucggac

SEQ ID NO: 1092174 - RNA, 19 nt, Artificial Sequence
  Description of Artificial Sequence: Synthetic oligonucleotide
  Sense strand starting at position 2334 of SEQ ID NO: 915601
ggguaaugauaucuuccca

SEQ ID NO: 1092175 - RNA, 19 nt, Artificial Sequence
  Description of Artificial Sequence: Synthetic oligonucleotide
  Antisense strand to SEQ ID NO: 1092174
ugggaagauaucauuaccc

SEQ ID NO: 1092176 - RNA, 19 nt, Artificial Sequence
  Description of Artificial Sequence: Synthetic oligonucleotide
  Sense strand starting at position 2338 of SEQ ID NO: 915601
aaugauaucuucccagggu

SEQ ID NO: 1092177 - RNA, 19 nt, Artificial Sequence
  Description of Artificial Sequence: Synthetic oligonucleotide
  Antisense strand to SEQ ID NO: 1092176
acccugggaagauaucauu

SEQ ID NO: 1092178 - RNA, 19 nt, Artificial Sequence
  Description of Artificial Sequence: Synthetic oligonucleotide
  Sense strand starting at position 2339 of SEQ ID NO: 915601
augauaucuucccaggguu

SEQ ID NO: 1092179 - RNA, 19 nt, Artificial Sequence
  Description of Artificial Sequence: Synthetic oligonucleotide
  Antisense strand to SEQ ID NO: 1092178
aacccugggaagauaucau

SEQ ID NO: 1092180 - RNA, 19 nt, Artificial Sequence
  Description of Artificial Sequence: Synthetic oligonucleotide
  Sense strand starting at position 2341 of SEQ ID NO: 915601
gauaucuucccaggguuua

SEQ ID NO: 1092181 - RNA, 19 nt, Artificial Sequence
  Description of Artificial Sequence: Synthetic oligonucleotide
  Antisense strand to SEQ ID NO: 1092180
uaaacccugggaagauauc

SEQ ID NO: 1092182 - RNA, 19 nt, Artificial Sequence
  Description of Artificial Sequence: Synthetic oligonucleotide
  Sense strand starting at position 2342 of SEQ ID NO: 915601
auaucuucccaggguuuaa

SEQ ID NO: 1092183 - RNA, 19 nt, Artificial Sequence
  Description of Artificial Sequence: Synthetic oligonucleotide
  Antisense strand to SEQ ID NO: 1092182
uuaaacccugggaagauau

SEQ ID NO: 1092184 - RNA, 19 nt, Artificial Sequence
  Description of Artificial Sequence: Synthetic oligonucleotide
  Sense strand starting at position 2354 of SEQ ID NO: 915601
gguuuaaaguguguccucu

SEQ ID NO: 1092185 - RNA, 19 nt, Artificial Sequence
  Description of Artificial Sequence: Synthetic oligonucleotide
  Antisense strand to SEQ ID NO: 1092184
agaggacacacuuuaaacc

SEQ ID NO: 1092186 - RNA, 19 nt, Artificial Sequence
  Description of Artificial Sequence: Synthetic oligonucleotide
  Sense strand starting at position 2362 of SEQ ID NO: 915601
guguguccucucugccagu

SEQ ID NO: 1092187 - RNA, 19 nt, Artificial Sequence
  Description of Artificial Sequence: Synthetic oligonucleotide
  Antisense strand to SEQ ID NO: 1092186
acuggcagagaggacacac

SEQ ID NO: 1092188 - RNA, 19 nt, Artificial Sequence
  Description of Artificial Sequence: Synthetic oligonucleotide
  Sense strand starting at position 2465 of SEQ ID NO: 915601
cugguaaucccucacuuga

SEQ ID NO: 1092189 - RNA, 19 nt, Artificial Sequence
  Description of Artificial Sequence: Synthetic oligonucleotide
  Antisense strand to SEQ ID NO: 1092188
ucaagugagggauuaccag

SEQ ID NO: 1092190 - RNA, 19 nt, Artificial Sequence
  Description of Artificial Sequence: Synthetic oligonucleotide
  Sense strand starting at position 2467 of SEQ ID NO: 915601
gguaaucccucacuugaaa

SEQ ID NO: 1092191 - RNA, 19 nt, Artificial Sequence
  Description of Artificial Sequence: Synthetic oligonucleotide
  Antisense strand to SEQ ID NO: 1092190
uuucaagugagggauuacc

SEQ ID NO: 1092192 - RNA, 19 nt, Artificial Sequence
  Description of Artificial Sequence: Synthetic oligonucleotide
  Sense strand starting at position 2482 of SEQ ID NO: 915601
gaaagugcuggaggcuuua

SEQ ID NO: 1092193 - RNA, 19 nt, Artificial Sequence
  Description of Artificial Sequence: Synthetic oligonucleotide
  Antisense strand to SEQ ID NO: 1092192
uaaagccuccagcacuuuc

SEQ ID NO: 1092194 - RNA, 19 nt, Artificial Sequence
  Description of Artificial Sequence: Synthetic oligonucleotide
  Sense strand starting at position 2761 of SEQ ID NO: 915601
uggauuucgccauguuguc

SEQ ID NO: 1092195 - RNA, 19 nt, Artificial Sequence
  Description of Artificial Sequence: Synthetic oligonucleotide
  Antisense strand to SEQ ID NO: 1092194
gacaacauggcgaaaucca

SEQ ID NO: 1092196 - RNA, 19 nt, Artificial Sequence
  Description of Artificial Sequence: Synthetic oligonucleotide
  Sense strand starting at position 2889 of SEQ ID NO: 915601
cuaccaguuagcugggauu

SEQ ID NO: 1092197 - RNA, 19 nt, Artificial Sequence
  Description of Artificial Sequence: Synthetic oligonucleotide
  Antisense strand to SEQ ID NO: 1092196
aaucccagcuaacugguag

SEQ ID NO: 1092198 - RNA, 19 nt, Artificial Sequence
  Description of Artificial Sequence: Synthetic oligonucleotide
  Sense strand starting at position 3284 of SEQ ID NO: 915601
ggccauugcuacuccugaa

SEQ ID NO: 1092199 - RNA, 19 nt, Artificial Sequence
  Description of Artificial Sequence: Synthetic oligonucleotide
  Antisense strand to SEQ ID NO: 1092198
uucaggaguagcaauggcc

SEQ ID NO: 1092200 - RNA, 19 nt, Artificial Sequence
  Description of Artificial Sequence: Synthetic oligonucleotide
  Sense strand starting at position 3422 of SEQ ID NO: 915601
uaguaaucccagggagcca

SEQ ID NO: 1092201 - RNA, 19 nt, Artificial Sequence
  Description of Artificial Sequence: Synthetic oligonucleotide
  Antisense strand to SEQ ID NO: 1092200
uggcucccugggauuacua

SEQ ID NO: 1092202 - RNA, 19 nt, Artificial Sequence
  Description of Artificial Sequence: Synthetic oligonucleotide
  Sense strand starting at position 3777 of SEQ ID NO: 915601
gaagcuucugcucacagga

SEQ ID NO: 1092203 - RNA, 19 nt, Artificial Sequence
  Description of Artificial Sequence: Synthetic oligonucleotide
  Antisense strand to SEQ ID NO: 1092202
uccugugagcagaagcuuc

SEQ ID NO: 1092204 - RNA, 19 nt, Artificial Sequence
  Description of Artificial Sequence: Synthetic oligonucleotide
  Sense strand starting at position 3836 of SEQ ID NO: 915601
gugugacuuuaagcaacuu

SEQ ID NO: 1092205 - RNA, 19 nt, Artificial Sequence
  Description of Artificial Sequence: Synthetic oligonucleotide
  Antisense strand to SEQ ID NO: 1092204
aaguugcuuaaagucacac

SEQ ID NO: 1092206 - RNA, 19 nt, Artificial Sequence
  Description of Artificial Sequence: Synthetic oligonucleotide
  Sense strand starting at position 3905 of SEQ ID NO: 915601
aaguguugacaucauagug

SEQ ID NO: 1092207 - RNA, 19 nt, Artificial Sequence
  Description of Artificial Sequence: Synthetic oligonucleotide
  Antisense strand to SEQ ID NO: 1092206
cacuaugaugucaacacuu

SEQ ID NO: 1092208 - RNA, 19 nt, Artificial Sequence
  Description of Artificial Sequence: Synthetic oligonucleotide
  Sense strand starting at position 3917 of SEQ ID NO: 915601
cauagugguugugaggauu

SEQ ID NO: 1092209 - RNA, 19 nt, Artificial Sequence
  Description of Artificial Sequence: Synthetic oligonucleotide
  Antisense strand to SEQ ID NO: 1092208
aauccucacaaccacuaug

SEQ ID NO: 1092210 - RNA, 19 nt, Artificial Sequence
  Description of Artificial Sequence: Synthetic oligonucleotide
  Sense strand starting at position 3925 of SEQ ID NO: 915601
uugugaggauuacaugauu

SEQ ID NO: 1092211 - RNA, 19 nt, Artificial Sequence
  Description of Artificial Sequence: Synthetic oligonucleotide
  Antisense strand to SEQ ID NO: 1092210
aaucauguaauccucacaa

SEQ ID NO: 1092212 - RNA, 19 nt, Artificial Sequence
  Description of Artificial Sequence: Synthetic oligonucleotide
  Sense strand starting at position 3958 of SEQ ID NO: 915601
gcacuuagaacuugugaag

SEQ ID NO: 1092213 - RNA, 19 nt, Artificial Sequence
  Description of Artificial Sequence: Synthetic oligonucleotide
  Antisense strand to SEQ ID NO: 1092212
cuucacaaguucuaagugc

SEQ ID NO: 1092214 - RNA, 19 nt, Artificial Sequence
  Description of Artificial Sequence: Synthetic oligonucleotide
  Sense strand starting at position 3961 of SEQ ID NO: 915601
cuuagaacuugugaagaag

SEQ ID NO: 1092215 - RNA, 19 nt, Artificial Sequence
  Description of Artificial Sequence: Synthetic oligonucleotide
  Antisense strand to SEQ ID NO: 1092214
cuucuucacaaguucuaag

SEQ ID NO: 1092216 - RNA, 19 nt, Artificial Sequence
  Description of Artificial Sequence: Synthetic oligonucleotide
  Sense strand starting at position 419 of SEQ ID NO: 915602
agagcaacgucuuauucca

SEQ ID NO: 1092217 - RNA, 19 nt, Artificial Sequence
  Description of Artificial Sequence: Synthetic oligonucleotide
  Antisense strand to SEQ ID NO: 1092216
uggaauaagacguugcucu

SEQ ID NO: 1092218 - RNA, 19 nt, Artificial Sequence
  Description of Artificial Sequence: Synthetic oligonucleotide
  Sense strand starting at position 421 of SEQ ID NO: 915602
agcaacgucuuauuccaga

SEQ ID NO: 1092219 - RNA, 19 nt, Artificial Sequence
  Description of Artificial Sequence: Synthetic oligonucleotide
  Antisense strand to SEQ ID NO: 1092218
ucuggaauaagacguugcu

SEQ ID NO: 1092220 - RNA, 19 nt, Artificial Sequence
  Description of Artificial Sequence: Synthetic oligonucleotide
  Sense strand starting at position 426 of SEQ ID NO: 915602
cgucuuauuccagaaaucu

SEQ ID NO: 1092221 - RNA, 19 nt, Artificial Sequence
  Description of Artificial Sequence: Synthetic oligonucleotide
  Antisense strand to SEQ ID NO: 1092220
agauuucuggaauaagacg

SEQ ID NO: 1092222 - RNA, 19 nt, Artificial Sequence
  Description of Artificial Sequence: Synthetic oligonucleotide
  Sense strand starting at position 554 of SEQ ID NO: 915602
gcucgagcuuugccuaaag

SEQ ID NO: 1092223 - RNA, 19 nt, Artificial Sequence
  Description of Artificial Sequence: Synthetic oligonucleotide
  Antisense strand to SEQ ID NO: 1092222
cuuuaggcaaagcucgagc

SEQ ID NO: 1092224 - RNA, 19 nt, Artificial Sequence
  Description of Artificial Sequence: Synthetic oligonucleotide
  Sense strand starting at position 556 of SEQ ID NO: 915602
ucgagcuuugccuaaagca

SEQ ID NO: 1092225 - RNA, 19 nt, Artificial Sequence
  Description of Artificial Sequence: Synthetic oligonucleotide
  Antisense strand to SEQ ID NO: 1092224
ugcuuuaggcaaagcucga

SEQ ID NO: 1092226 - RNA, 19 nt, Artificial Sequence
  Description of Artificial Sequence: Synthetic oligonucleotide
  Sense strand starting at position 628 of SEQ ID NO: 915602
gaugguagucacuagucca

SEQ ID NO: 1092227 - RNA, 19 nt, Artificial Sequence
  Description of Artificial Sequence: Synthetic oligonucleotide
  Antisense strand to SEQ ID NO: 1092226
uggacuagugacuaccauc

SEQ ID NO: 1092228 - RNA, 19 nt, Artificial Sequence
  Description of Artificial Sequence: Synthetic oligonucleotide
  Sense strand starting at position 668 of SEQ ID NO: 915602
gagagugugggcgaucuua

SEQ ID NO: 1092229 - RNA, 19 nt, Artificial Sequence
  Description of Artificial Sequence: Synthetic oligonucleotide
  Antisense strand to SEQ ID NO: 1092228
uaagaucgcccacacucuc

SEQ ID NO: 1092230 - RNA, 19 nt, Artificial Sequence
  Description of Artificial Sequence: Synthetic oligonucleotide
  Sense strand starting at position 914 of SEQ ID NO: 915602
gcaagcuacugaggacaua

SEQ ID NO: 1092231 - RNA, 19 nt, Artificial Sequence
  Description of Artificial Sequence: Synthetic oligonucleotide
  Antisense strand to SEQ ID NO: 1092230
uauguccucaguagcuugc

SEQ ID NO: 1092232 - RNA, 19 nt, Artificial Sequence
  Description of Artificial Sequence: Synthetic oligonucleotide
  Sense strand starting at position 975 of SEQ ID NO: 915602
cccucaaaugcucaguaga

SEQ ID NO: 1092233 - RNA, 19 nt, Artificial Sequence
  Description of Artificial Sequence: Synthetic oligonucleotide
  Antisense strand to SEQ ID NO: 1092232
ucuacugagcauuugaggg

SEQ ID NO: 1092234 - RNA, 19 nt, Artificial Sequence
  Description of Artificial Sequence: Synthetic oligonucleotide
  Sense strand starting at position 999 of SEQ ID NO: 915602
auaacuuccagcgguugau

SEQ ID NO: 1092235 - RNA, 19 nt, Artificial Sequence
  Description of Artificial Sequence: Synthetic oligonucleotide
  Antisense strand to SEQ ID NO: 1092234
aucaaccgcuggaaguuau

SEQ ID NO: 1092236 - RNA, 19 nt, Artificial Sequence
  Description of Artificial Sequence: Synthetic oligonucleotide
  Sense strand starting at position 1008 of SEQ ID NO: 915602
agcgguugaucucuguaaa

SEQ ID NO: 1092237 - RNA, 19 nt, Artificial Sequence
  Description of Artificial Sequence: Synthetic oligonucleotide
  Antisense strand to SEQ ID NO: 1092236
uuuacagagaucaaccgcu

SEQ ID NO: 1092238 - RNA, 19 nt, Artificial Sequence
  Description of Artificial Sequence: Synthetic oligonucleotide
  Sense strand starting at position 1009 of SEQ ID NO: 915602
gcgguugaucucuguaaau

SEQ ID NO: 1092239 - RNA, 19 nt, Artificial Sequence
  Description of Artificial Sequence: Synthetic oligonucleotide
  Antisense strand to SEQ ID NO: 1092238
auuuacagagaucaaccgc

SEQ ID NO: 1092240 - RNA, 19 nt, Artificial Sequence
  Description of Artificial Sequence: Synthetic oligonucleotide
  Sense strand starting at position 1011 of SEQ ID NO: 915602
gguugaucucuguaaauug

SEQ ID NO: 1092241 - RNA, 19 nt, Artificial Sequence
  Description of Artificial Sequence: Synthetic oligonucleotide
  Antisense strand to SEQ ID NO: 1092240
caauuuacagagaucaacc

SEQ ID NO: 1092242 - RNA, 19 nt, Artificial Sequence
  Description of Artificial Sequence: Synthetic oligonucleotide
  Sense strand starting at position 1018 of SEQ ID NO: 915602
cucuguaaauugucuacaa

SEQ ID NO: 1092243 - RNA, 19 nt, Artificial Sequence
  Description of Artificial Sequence: Synthetic oligonucleotide
  Antisense strand to SEQ ID NO: 1092242
uuguagacaauuuacagag

SEQ ID NO: 1092244 - RNA, 19 nt, Artificial Sequence
  Description of Artificial Sequence: Synthetic oligonucleotide
  Sense strand starting at position 1019 of SEQ ID NO: 915602
ucuguaaauugucuacaac

SEQ ID NO: 1092245 - RNA, 19 nt, Artificial Sequence
  Description of Artificial Sequence: Synthetic oligonucleotide
  Antisense strand to SEQ ID NO: 1092244
guuguagacaauuuacaga

SEQ ID NO: 1092246 - RNA, 19 nt, Artificial Sequence
  Description of Artificial Sequence: Synthetic oligonucleotide
  Sense strand starting at position 1022 of SEQ ID NO: 915602
guaaauugucuacaaccac

SEQ ID NO: 1092247 - RNA, 19 nt, Artificial Sequence
  Description of Artificial Sequence: Synthetic oligonucleotide
  Antisense strand to SEQ ID NO: 1092246
gugguuguagacaauuuac

SEQ ID NO: 1092248 - RNA, 19 nt, Artificial Sequence
  Description of Artificial Sequence: Synthetic oligonucleotide
  Sense strand starting at position 1083 of SEQ ID NO: 915602
aaguguugguccucgguca

SEQ ID NO: 1092249 - RNA, 19 nt, Artificial Sequence
  Description of Artificial Sequence: Synthetic oligonucleotide
  Antisense strand to SEQ ID NO: 1092248
ugaccgaggaccaacacuu

SEQ ID NO: 1092250 - RNA, 19 nt, Artificial Sequence
  Description of Artificial Sequence: Synthetic oligonucleotide
  Sense strand starting at position 1326 of SEQ ID NO: 915602
cugcuaagauccucggcua

SEQ ID NO: 1092251 - RNA, 19 nt, Artificial Sequence
  Description of Artificial Sequence: Synthetic oligonucleotide
  Antisense strand to SEQ ID NO: 1092250
uagccgaggaucuuagcag

SEQ ID NO: 1092252 - RNA, 19 nt, Artificial Sequence
  Description of Artificial Sequence: Synthetic oligonucleotide
  Sense strand starting at position 1395 of SEQ ID NO: 915602
ggcuaagucccgagcgguu

SEQ ID NO: 1092253 - RNA, 19 nt, Artificial Sequence
  Description of Artificial Sequence: Synthetic oligonucleotide
  Antisense strand to SEQ ID NO: 1092252
aaccgcucgggacuuagcc

SEQ ID NO: 1092254 - RNA, 19 nt, Artificial Sequence
  Description of Artificial Sequence: Synthetic oligonucleotide
  Sense strand starting at position 2009 of SEQ ID NO: 915602
gucugugcugcucuacuau

SEQ ID NO: 1092255 - RNA, 19 nt, Artificial Sequence
  Description of Artificial Sequence: Synthetic oligonucleotide
  Antisense strand to SEQ ID NO: 1092254
auaguagagcagcacagac

SEQ ID NO: 1092256 - RNA, 19 nt, Artificial Sequence
  Description of Artificial Sequence: Synthetic oligonucleotide
  Sense strand starting at position 2021 of SEQ ID NO: 915602
cuacuauuggcuugagguc

SEQ ID NO: 1092257 - RNA, 19 nt, Artificial Sequence
  Description of Artificial Sequence: Synthetic oligonucleotide
  Antisense strand to SEQ ID NO: 1092256
gaccucaagccaauaguag

SEQ ID NO: 1092258 - RNA, 19 nt, Artificial Sequence
  Description of Artificial Sequence: Synthetic oligonucleotide
  Sense strand starting at position 2077 of SEQ ID NO: 915602
gggaguaauucccucaacc

SEQ ID NO: 1092259 - RNA, 19 nt, Artificial Sequence
  Description of Artificial Sequence: Synthetic oligonucleotide
  Antisense strand to SEQ ID NO: 1092258
gguugagggaauuacuccc

SEQ ID NO: 1092260 - RNA, 19 nt, Artificial Sequence
  Description of Artificial Sequence: Synthetic oligonucleotide
  Sense strand starting at position 2838 of SEQ ID NO: 915602
ggaauucgugcgguguuga

SEQ ID NO: 1092261 - RNA, 19 nt, Artificial Sequence
  Description of Artificial Sequence: Synthetic oligonucleotide
  Antisense strand to SEQ ID NO: 1092260
ucaacaccgcacgaauucc

SEQ ID NO: 1092262 - RNA, 19 nt, Artificial Sequence
  Description of Artificial Sequence: Synthetic oligonucleotide
  Sense strand starting at position 2861 of SEQ ID NO: 915602
gcgggaagcacuuaacgaa

SEQ ID NO: 1092263 - RNA, 19 nt, Artificial Sequence
  Description of Artificial Sequence: Synthetic oligonucleotide
  Antisense strand to SEQ ID NO: 1092262
uucguuaagugcuucccgc

SEQ ID NO: 1092264 - RNA, 19 nt, Artificial Sequence
  Description of Artificial Sequence: Synthetic oligonucleotide
  Sense strand starting at position 2900 of SEQ ID NO: 915602
ucgugaguccgauguaaag

SEQ ID NO: 1092265 - RNA, 19 nt, Artificial Sequence
  Description of Artificial Sequence: Synthetic oligonucleotide
  Antisense strand to SEQ ID NO: 1092264
cuuuacaucggacucacga

SEQ ID NO: 1092266 - RNA, 19 nt, Artificial Sequence
  Description of Artificial Sequence: Synthetic oligonucleotide
  Sense strand starting at position 2902 of SEQ ID NO: 915602
gugaguccgauguaaagga

SEQ ID NO: 1092267 - RNA, 19 nt, Artificial Sequence
  Description of Artificial Sequence: Synthetic oligonucleotide
  Antisense strand to SEQ ID NO: 1092266
uccuuuacaucggacucac

SEQ ID NO: 1092268 - RNA, 19 nt, Artificial Sequence
  Description of Artificial Sequence: Synthetic oligonucleotide
  Sense strand starting at position 2906 of SEQ ID NO: 915602
guccgauguaaaggaguga

SEQ ID NO: 1092269 - RNA, 19 nt, Artificial Sequence
  Description of Artificial Sequence: Synthetic oligonucleotide
  Antisense strand to SEQ ID NO: 1092268
ucacuccuuuacaucggac

SEQ ID NO: 1092270 - RNA, 19 nt, Artificial Sequence
  Description of Artificial Sequence: Synthetic oligonucleotide
  Sense strand starting at position 3089 of SEQ ID NO: 915602
agccuugguuccuggaaca

SEQ ID NO: 1092271 - RNA, 19 nt, Artificial Sequence
  Description of Artificial Sequence: Synthetic oligonucleotide
  Antisense strand to SEQ ID NO: 1092270
uguuccaggaaccaaggcu

SEQ ID NO: 1092272 - RNA, 19 nt, Artificial Sequence
  Description of Artificial Sequence: Synthetic oligonucleotide
  Sense strand starting at position 3177 of SEQ ID NO: 915602
ggguaaugauaucuuccca

SEQ ID NO: 1092273 - RNA, 19 nt, Artificial Sequence
  Description of Artificial Sequence: Synthetic oligonucleotide
  Antisense strand to SEQ ID NO: 1092272
ugggaagauaucauuaccc

SEQ ID NO: 1092274 - RNA, 19 nt, Artificial Sequence
  Description of Artificial Sequence: Synthetic oligonucleotide
  Sense strand starting at position 3181 of SEQ ID NO: 915602
aaugauaucuucccagggu

SEQ ID NO: 1092275 - RNA, 19 nt, Artificial Sequence
  Description of Artificial Sequence: Synthetic oligonucleotide
  Antisense strand to SEQ ID NO: 1092274
acccugggaagauaucauu

SEQ ID NO: 1092276 - RNA, 19 nt, Artificial Sequence
  Description of Artificial Sequence: Synthetic oligonucleotide
  Sense strand starting at position 3182 of SEQ ID NO: 915602
augauaucuucccaggguu

SEQ ID NO: 1092277 - RNA, 19 nt, Artificial Sequence
  Description of Artificial Sequence: Synthetic oligonucleotide
  Antisense strand to SEQ ID NO: 1092276
aacccugggaagauaucau

SEQ ID NO: 1092278 - RNA, 19 nt, Artificial Sequence
  Description of Artificial Sequence: Synthetic oligonucleotide
  Sense strand starting at position 3184 of SEQ ID NO: 915602
gauaucuucccaggguuua

SEQ ID NO: 1092279 - RNA, 19 nt, Artificial Sequence
  Description of Artificial Sequence: Synthetic oligonucleotide
  Antisense strand to SEQ ID NO: 1092278
uaaacccugggaagauauc

SEQ ID NO: 1092280 - RNA, 19 nt, Artificial Sequence
  Description of Artificial Sequence: Synthetic oligonucleotide
  Sense strand starting at position 3185 of SEQ ID NO: 915602
auaucuucccaggguuuaa

SEQ ID NO: 1092281 - RNA, 19 nt, Artificial Sequence
  Description of Artificial Sequence: Synthetic oligonucleotide
  Antisense strand to SEQ ID NO: 1092280
uuaaacccugggaagauau

SEQ ID NO: 1092282 - RNA, 19 nt, Artificial Sequence
  Description of Artificial Sequence: Synthetic oligonucleotide
  Sense strand starting at position 3197 of SEQ ID NO: 915602
gguuuaaaguguguccucu

SEQ ID NO: 1092283 - RNA, 19 nt, Artificial Sequence
  Description of Artificial Sequence: Synthetic oligonucleotide
  Antisense strand to SEQ ID NO: 1092282
agaggacacacuuuaaacc

SEQ ID NO: 1092284 - RNA, 19 nt, Artificial Sequence
  Description of Artificial Sequence: Synthetic oligonucleotide
  Sense strand starting at position 3205 of SEQ ID NO: 915602
guguguccucucugccagu

SEQ ID NO: 1092285 - RNA, 19 nt, Artificial Sequence
  Description of Artificial Sequence: Synthetic oligonucleotide
  Antisense strand to SEQ ID NO: 1092284
acuggcagagaggacacac

SEQ ID NO: 1092286 - RNA, 19 nt, Artificial Sequence
  Description of Artificial Sequence: Synthetic oligonucleotide
  Sense strand starting at position 3308 of SEQ ID NO: 915602
cugguaaucccucacuuga

SEQ ID NO: 1092287 - RNA, 19 nt, Artificial Sequence
  Description of Artificial Sequence: Synthetic oligonucleotide
  Antisense strand to SEQ ID NO: 1092286
ucaagugagggauuaccag

SEQ ID NO: 1092288 - RNA, 19 nt, Artificial Sequence
  Description of Artificial Sequence: Synthetic oligonucleotide
  Sense strand starting at position 3310 of SEQ ID NO: 915602
gguaaucccucacuugaaa

SEQ ID NO: 1092289 - RNA, 19 nt, Artificial Sequence
  Description of Artificial Sequence: Synthetic oligonucleotide
  Antisense strand to SEQ ID NO: 1092288
uuucaagugagggauuacc

SEQ ID NO: 1092290 - RNA, 19 nt, Artificial Sequence
  Description of Artificial Sequence: Synthetic oligonucleotide
  Sense strand starting at position 3325 of SEQ ID NO: 915602
gaaagugcuggaggcuuua

SEQ ID NO: 1092291 - RNA, 19 nt, Artificial Sequence
  Description of Artificial Sequence: Synthetic oligonucleotide
  Antisense strand to SEQ ID NO: 1092290
uaaagccuccagcacuuuc

SEQ ID NO: 1092292 - RNA, 19 nt, Artificial Sequence
  Description of Artificial Sequence: Synthetic oligonucleotide
  Sense strand starting at position 3604 of SEQ ID NO: 915602
uggauuucgccauguuguc

SEQ ID NO: 1092293 - RNA, 19 nt, Artificial Sequence
  Description of Artificial Sequence: Synthetic oligonucleotide
  Antisense strand to SEQ ID NO: 1092292
gacaacauggcgaaaucca

SEQ ID NO: 1092294 - RNA, 19 nt, Artificial Sequence
  Description of Artificial Sequence: Synthetic oligonucleotide
  Sense strand starting at position 3732 of SEQ ID NO: 915602
cuaccaguuagcugggauu

SEQ ID NO: 1092295 - RNA, 19 nt, Artificial Sequence
  Description of Artificial Sequence: Synthetic oligonucleotide
  Antisense strand to SEQ ID NO: 1092294
aaucccagcuaacugguag

SEQ ID NO: 1092296 - RNA, 19 nt, Artificial Sequence
  Description of Artificial Sequence: Synthetic oligonucleotide
  Sense strand starting at position 219 of SEQ ID NO: 915603
uuggcauaaucuuucugaa

SEQ ID NO: 1092297 - RNA, 19 nt, Artificial Sequence
  Description of Artificial Sequence: Synthetic oligonucleotide
  Antisense strand to SEQ ID NO: 1092296
uucagaaagauuaugccaa

SEQ ID NO: 1092298 - RNA, 19 nt, Artificial Sequence
  Description of Artificial Sequence: Synthetic oligonucleotide
  Sense strand starting at position 586 of SEQ ID NO: 915603
aagaauggaugggaauauu

SEQ ID NO: 1092299 - RNA, 19 nt, Artificial Sequence
  Description of Artificial Sequence: Synthetic oligonucleotide
  Antisense strand to SEQ ID NO: 1092298
aauauucccauccauucuu

SEQ ID NO: 1092300 - RNA, 19 nt, Artificial Sequence
  Description of Artificial Sequence: Synthetic oligonucleotide
  Sense strand starting at position 622 of SEQ ID NO: 915603
accuuuagauuaguuaaga

SEQ ID NO: 1092301 - RNA, 19 nt, Artificial Sequence
  Description of Artificial Sequence: Synthetic oligonucleotide
  Antisense strand to SEQ ID NO: 1092300
ucuuaacuaaucuaaaggu

SEQ ID NO: 1092302 - RNA, 19 nt, Artificial Sequence
  Description of Artificial Sequence: Synthetic oligonucleotide
  Sense strand starting at position 623 of SEQ ID NO: 915603
ccuuuagauuaguuaagag

SEQ ID NO: 1092303 - RNA, 19 nt, Artificial Sequence
  Description of Artificial Sequence: Synthetic oligonucleotide
  Antisense strand to SEQ ID NO: 1092302
cucuuaacuaaucuaaagg

SEQ ID NO: 1092304 - RNA, 19 nt, Artificial Sequence
  Description of Artificial Sequence: Synthetic oligonucleotide
  Sense strand starting at position 665 of SEQ ID NO: 915603
gguagauuggucuagggua

SEQ ID NO: 1092305 - RNA, 19 nt, Artificial Sequence
  Description of Artificial Sequence: Synthetic oligonucleotide
  Antisense strand to SEQ ID NO: 1092304
uacccuagaccaaucuacc

SEQ ID NO: 1092306 - RNA, 19 nt, Artificial Sequence
  Description of Artificial Sequence: Synthetic oligonucleotide
  Sense strand starting at position 667 of SEQ ID NO: 915603
uagauuggucuaggguaau

SEQ ID NO: 1092307 - RNA, 19 nt, Artificial Sequence
  Description of Artificial Sequence: Synthetic oligonucleotide
  Antisense strand to SEQ ID NO: 1092306
auuacccuagaccaaucua

SEQ ID NO: 1092308 - RNA, 19 nt, Artificial Sequence
  Description of Artificial Sequence: Synthetic oligonucleotide
  Sense strand starting at position 670 of SEQ ID NO: 915603
auuggucuaggguaauagu

SEQ ID NO: 1092309 - RNA, 19 nt, Artificial Sequence
  Description of Artificial Sequence: Synthetic oligonucleotide
  Antisense strand to SEQ ID NO: 1092308
acuauuacccuagaccaau

SEQ ID NO: 1092310 - RNA, 19 nt, Artificial Sequence
  Description of Artificial Sequence: Synthetic oligonucleotide
  Sense strand starting at position 718 of SEQ ID NO: 915603
gagauuugguuugaagaua

SEQ ID NO: 1092311 - RNA, 19 nt, Artificial Sequence
  Description of Artificial Sequence: Synthetic oligonucleotide
  Antisense strand to SEQ ID NO: 1092310
uaucuucaaaccaaaucuc

SEQ ID NO: 1092312 - RNA, 19 nt, Artificial Sequence
  Description of Artificial Sequence: Synthetic oligonucleotide
  Sense strand starting at position 748 of SEQ ID NO: 915603
acuugaugauuguuuggau

SEQ ID NO: 1092313 - RNA, 19 nt, Artificial Sequence
  Description of Artificial Sequence: Synthetic oligonucleotide
  Antisense strand to SEQ ID NO: 1092312
auccaaacaaucaucaagu

SEQ ID NO: 1092314 - RNA, 19 nt, Artificial Sequence
  Description of Artificial Sequence: Synthetic oligonucleotide
  Sense strand starting at position 749 of SEQ ID NO: 915603
cuugaugauuguuuggaua

SEQ ID NO: 1092315 - RNA, 19 nt, Artificial Sequence
  Description of Artificial Sequence: Synthetic oligonucleotide
  Antisense strand to SEQ ID NO: 1092314
uauccaaacaaucaucaag

SEQ ID NO: 1092316 - RNA, 19 nt, Artificial Sequence
  Description of Artificial Sequence: Synthetic oligonucleotide
  Sense strand starting at position 802 of SEQ ID NO: 915603
ggccaagauuucugauuug

SEQ ID NO: 1092317 - RNA, 19 nt, Artificial Sequence
  Description of Artificial Sequence: Synthetic oligonucleotide
  Antisense strand to SEQ ID NO: 1092316
caaaucagaaaucuuggcc

SEQ ID NO: 1092318 - RNA, 19 nt, Artificial Sequence
  Description of Artificial Sequence: Synthetic oligonucleotide
  Sense strand starting at position 831 of SEQ ID NO: 915603
guugguaugacccauugag

SEQ ID NO: 1092319 - RNA, 19 nt, Artificial Sequence
  Description of Artificial Sequence: Synthetic oligonucleotide
  Antisense strand to SEQ ID NO: 1092318
cucaaugggucauaccaac

SEQ ID NO: 1092320 - RNA, 19 nt, Artificial Sequence
  Description of Artificial Sequence: Synthetic oligonucleotide
  Sense strand starting at position 877 of SEQ ID NO: 915603
aaauuuaaaugcgcgauau

SEQ ID NO: 1092321 - RNA, 19 nt, Artificial Sequence
  Description of Artificial Sequence: Synthetic oligonucleotide
  Antisense strand to SEQ ID NO: 1092320
auaucgcgcauuuaaauuu

SEQ ID NO: 1092322 - RNA, 19 nt, Artificial Sequence
  Description of Artificial Sequence: Synthetic oligonucleotide
  Sense strand starting at position 878 of SEQ ID NO: 915603
aauuuaaaugcgcgauaua

SEQ ID NO: 1092323 - RNA, 19 nt, Artificial Sequence
  Description of Artificial Sequence: Synthetic oligonucleotide
  Antisense strand to SEQ ID NO: 1092322
uauaucgcgcauuuaaauu

SEQ ID NO: 1092324 - RNA, 19 nt, Artificial Sequence
  Description of Artificial Sequence: Synthetic oligonucleotide
  Sense strand starting at position 1037 of SEQ ID NO: 915603
gucauuugguggucaggca

SEQ ID NO: 1092325 - RNA, 19 nt, Artificial Sequence
  Description of Artificial Sequence: Synthetic oligonucleotide
  Antisense strand to SEQ ID NO: 1092324
ugccugaccaccaaaugac

SEQ ID NO: 1092326 - RNA, 19 nt, Artificial Sequence
  Description of Artificial Sequence: Synthetic oligonucleotide
  Sense strand starting at position 1323 of SEQ ID NO: 915603
ggugcaagagacuaucuua

SEQ ID NO: 1092327 - RNA, 19 nt, Artificial Sequence
  Description of Artificial Sequence: Synthetic oligonucleotide
  Antisense strand to SEQ ID NO: 1092326
uaagauagucucuugcacc

SEQ ID NO: 1092328 - RNA, 19 nt, Artificial Sequence
  Description of Artificial Sequence: Synthetic oligonucleotide
  Sense strand starting at position 1434 of SEQ ID NO: 915603
ggauguuucccacacacuu

SEQ ID NO: 1092329 - RNA, 19 nt, Artificial Sequence
  Description of Artificial Sequence: Synthetic oligonucleotide
  Antisense strand to SEQ ID NO: 1092328
aagugugugggaaacaucc

SEQ ID NO: 1092330 - RNA, 19 nt, Artificial Sequence
  Description of Artificial Sequence: Synthetic oligonucleotide
  Sense strand starting at position 1859 of SEQ ID NO: 915603
ggaauucugcaccgggaga

SEQ ID NO: 1092331 - RNA, 19 nt, Artificial Sequence
  Description of Artificial Sequence: Synthetic oligonucleotide
  Antisense strand to SEQ ID NO: 1092330
ucucccggugcagaauucc

SEQ ID NO: 1092332 - RNA, 19 nt, Artificial Sequence
  Description of Artificial Sequence: Synthetic oligonucleotide
  Sense strand starting at position 1860 of SEQ ID NO: 915603
gaauucugcaccgggagaa

SEQ ID NO: 1092333 - RNA, 19 nt, Artificial Sequence
  Description of Artificial Sequence: Synthetic oligonucleotide
  Antisense strand to SEQ ID NO: 1092332
uucucccggugcagaauuc

SEQ ID NO: 1092334 - RNA, 19 nt, Artificial Sequence
  Description of Artificial Sequence: Synthetic oligonucleotide
  Sense strand starting at position 1861 of SEQ ID NO: 915603
aauucugcaccgggagaaa

SEQ ID NO: 1092335 - RNA, 19 nt, Artificial Sequence
  Description of Artificial Sequence: Synthetic oligonucleotide
  Antisense strand to SEQ ID NO: 1092334
uuucucccggugcagaauu

SEQ ID NO: 1092336 - RNA, 19 nt, Artificial Sequence
  Description of Artificial Sequence: Synthetic oligonucleotide
  Sense strand starting at position 2139 of SEQ ID NO: 915603
acaguacugaggugauuga

SEQ ID NO: 1092337 - RNA, 19 nt, Artificial Sequence
  Description of Artificial Sequence: Synthetic oligonucleotide
  Antisense strand to SEQ ID NO: 1092336
ucaaucaccucaguacugu

SEQ ID NO: 1092338 - RNA, 19 nt, Artificial Sequence
  Description of Artificial Sequence: Synthetic oligonucleotide
  Sense strand starting at position 2140 of SEQ ID NO: 915603
caguacugaggugauugau

SEQ ID NO: 1092339 - RNA, 19 nt, Artificial Sequence
  Description of Artificial Sequence: Synthetic oligonucleotide
  Antisense strand to SEQ ID NO: 1092338
aucaaucaccucaguacug

SEQ ID NO: 1092340 - RNA, 19 nt, Artificial Sequence
  Description of Artificial Sequence: Synthetic oligonucleotide
  Sense strand starting at position 2150 of SEQ ID NO: 915603
gugauugaugcucaggcca

SEQ ID NO: 1092341 - RNA, 19 nt, Artificial Sequence
  Description of Artificial Sequence: Synthetic oligonucleotide
  Antisense strand to SEQ ID NO: 1092340
uggccugagcaucaaucac

SEQ ID NO: 1092342 - RNA, 19 nt, Artificial Sequence
  Description of Artificial Sequence: Synthetic oligonucleotide
  Sense strand starting at position 2334 of SEQ ID NO: 915603
gacgauucucagggauaug

SEQ ID NO: 1092343 - RNA, 19 nt, Artificial Sequence
  Description of Artificial Sequence: Synthetic oligonucleotide
  Antisense strand to SEQ ID NO: 1092342
cauaucccugagaaucguc

SEQ ID NO: 1092344 - RNA, 19 nt, Artificial Sequence
  Description of Artificial Sequence: Synthetic oligonucleotide
  Sense strand starting at position 2335 of SEQ ID NO: 915603
acgauucucagggauaugu

SEQ ID NO: 1092345 - RNA, 19 nt, Artificial Sequence
  Description of Artificial Sequence: Synthetic oligonucleotide
  Antisense strand to SEQ ID NO: 1092344
acauaucccugagaaucgu

SEQ ID NO: 1092346 - RNA, 19 nt, Artificial Sequence
  Description of Artificial Sequence: Synthetic oligonucleotide
  Sense strand starting at position 2358 of SEQ ID NO: 915603
gcuacaaaccuaugagaac

SEQ ID NO: 1092347 - RNA, 19 nt, Artificial Sequence
  Description of Artificial Sequence: Synthetic oligonucleotide
  Antisense strand to SEQ ID NO: 1092346
guucucauagguuuguagc

SEQ ID NO: 1092348 - RNA, 19 nt, Artificial Sequence
  Description of Artificial Sequence: Synthetic oligonucleotide
  Sense strand starting at position 2527 of SEQ ID NO: 915603
ugaggcagauguucucuaa

SEQ ID NO: 1092349 - RNA, 19 nt, Artificial Sequence
  Description of Artificial Sequence: Synthetic oligonucleotide
  Antisense strand to SEQ ID NO: 1092348
uuagagaacaucugccuca

SEQ ID NO: 1092350 - RNA, 19 nt, Artificial Sequence
  Description of Artificial Sequence: Synthetic oligonucleotide
  Sense strand starting at position 2558 of SEQ ID NO: 915603
gauagccaguaacuugaua

SEQ ID NO: 1092351 - RNA, 19 nt, Artificial Sequence
  Description of Artificial Sequence: Synthetic oligonucleotide
  Antisense strand to SEQ ID NO: 1092350
uaucaaguuacuggcuauc

SEQ ID NO: 1092352 - RNA, 19 nt, Artificial Sequence
  Description of Artificial Sequence: Synthetic oligonucleotide
  Sense strand starting at position 2666 of SEQ ID NO: 915603
cauaaugggugacugguaa

SEQ ID NO: 1092353 - RNA, 19 nt, Artificial Sequence
  Description of Artificial Sequence: Synthetic oligonucleotide
  Antisense strand to SEQ ID NO: 1092352
uuaccagucacccauuaug

SEQ ID NO: 1092354 - RNA, 19 nt, Artificial Sequence
  Description of Artificial Sequence: Synthetic oligonucleotide
  Sense strand starting at position 3135 of SEQ ID NO: 915603
gcaacauugcaugaaccaa

SEQ ID NO: 1092355 - RNA, 19 nt, Artificial Sequence
  Description of Artificial Sequence: Synthetic oligonucleotide
  Antisense strand to SEQ ID NO: 1092354
uugguucaugcaauguugc

SEQ ID NO: 1092356 - RNA, 19 nt, Artificial Sequence
  Description of Artificial Sequence: Synthetic oligonucleotide
  Sense strand starting at position 3150 of SEQ ID NO: 915603
ccaagucauguuuagcacu

SEQ ID NO: 1092357 - RNA, 19 nt, Artificial Sequence
  Description of Artificial Sequence: Synthetic oligonucleotide
  Antisense strand to SEQ ID NO: 1092356
agugcuaaacaugacuugg

SEQ ID NO: 1092358 - RNA, 19 nt, Artificial Sequence
  Description of Artificial Sequence: Synthetic oligonucleotide
  Sense strand starting at position 3362 of SEQ ID NO: 915603
auacacagguacucauaua

SEQ ID NO: 1092359 - RNA, 19 nt, Artificial Sequence
  Description of Artificial Sequence: Synthetic oligonucleotide
  Antisense strand to SEQ ID NO: 1092358
uauaugaguaccuguguau

SEQ ID NO: 1092360 - RNA, 19 nt, Artificial Sequence
  Description of Artificial Sequence: Synthetic oligonucleotide
  Sense strand starting at position 3465 of SEQ ID NO: 915603
guuucuacccacuaauggu

SEQ ID NO: 1092361 - RNA, 19 nt, Artificial Sequence
  Description of Artificial Sequence: Synthetic oligonucleotide
  Antisense strand to SEQ ID NO: 1092360
accauuaguggguagaaac

SEQ ID NO: 1092362 - RNA, 19 nt, Artificial Sequence
  Description of Artificial Sequence: Synthetic oligonucleotide
  Sense strand starting at position 3520 of SEQ ID NO: 915603
gcaguauaaccagaugucu

SEQ ID NO: 1092363 - RNA, 19 nt, Artificial Sequence
  Description of Artificial Sequence: Synthetic oligonucleotide
  Antisense strand to SEQ ID NO: 1092362
agacaucugguuauacugc

SEQ ID NO: 1092364 - RNA, 19 nt, Artificial Sequence
  Description of Artificial Sequence: Synthetic oligonucleotide
  Sense strand starting at position 3592 of SEQ ID NO: 915603
acaguugauugcuccaaua

SEQ ID NO: 1092365 - RNA, 19 nt, Artificial Sequence
  Description of Artificial Sequence: Synthetic oligonucleotide
  Antisense strand to SEQ ID NO: 1092364
uauuggagcaaucaacugu

SEQ ID NO: 1092366 - RNA, 19 nt, Artificial Sequence
  Description of Artificial Sequence: Synthetic oligonucleotide
  Sense strand starting at position 3594 of SEQ ID NO: 915603
aguugauugcuccaauagu

SEQ ID NO: 1092367 - RNA, 19 nt, Artificial Sequence
  Description of Artificial Sequence: Synthetic oligonucleotide
  Antisense strand to SEQ ID NO: 1092366
acuauuggagcaaucaacu

SEQ ID NO: 1092368 - RNA, 19 nt, Artificial Sequence
  Description of Artificial Sequence: Synthetic oligonucleotide
  Sense strand starting at position 3679 of SEQ ID NO: 915603
uugcaaucuuucucuagga

SEQ ID NO: 1092369 - RNA, 19 nt, Artificial Sequence
  Description of Artificial Sequence: Synthetic oligonucleotide
  Antisense strand to SEQ ID NO: 1092368
uccuagagaaagauugcaa

SEQ ID NO: 1092370 - RNA, 19 nt, Artificial Sequence
  Description of Artificial Sequence: Synthetic oligonucleotide
  Sense strand starting at position 3680 of SEQ ID NO: 915603
ugcaaucuuucucuaggaa

SEQ ID NO: 1092371 - RNA, 19 nt, Artificial Sequence
  Description of Artificial Sequence: Synthetic oligonucleotide
  Antisense strand to SEQ ID NO: 1092370
uuccuagagaaagauugca

SEQ ID NO: 1092372 - RNA, 19 nt, Artificial Sequence
  Description of Artificial Sequence: Synthetic oligonucleotide
  Sense strand starting at position 3681 of SEQ ID NO: 915603
gcaaucuuucucuaggaag

SEQ ID NO: 1092373 - RNA, 19 nt, Artificial Sequence
  Description of Artificial Sequence: Synthetic oligonucleotide
  Antisense strand to SEQ ID NO: 1092372
cuuccuagagaaagauugc

SEQ ID NO: 1092374 - RNA, 19 nt, Artificial Sequence
  Description of Artificial Sequence: Synthetic oligonucleotide
  Sense strand starting at position 3942 of SEQ ID NO: 915603
uuuccaacucuuuggaguu

SEQ ID NO: 1092375 - RNA, 19 nt, Artificial Sequence
  Description of Artificial Sequence: Synthetic oligonucleotide
  Antisense strand to SEQ ID NO: 1092374
aacuccaaagaguuggaaa

SEQ ID NO: 1092376 - RNA, 19 nt, Artificial Sequence
  Description of Artificial Sequence: Synthetic oligonucleotide
  Sense strand starting at position 500 of SEQ ID NO: 915604
uuggcauaaucuuucugaa

SEQ ID NO: 1092377 - RNA, 19 nt, Artificial Sequence
  Description of Artificial Sequence: Synthetic oligonucleotide
  Antisense strand to SEQ ID NO: 1092376
uucagaaagauuaugccaa

SEQ ID NO: 1092378 - RNA, 19 nt, Artificial Sequence
  Description of Artificial Sequence: Synthetic oligonucleotide
  Sense strand starting at position 867 of SEQ ID NO: 915604
aagaauggaugggaauauu

SEQ ID NO: 1092379 - RNA, 19 nt, Artificial Sequence
  Description of Artificial Sequence: Synthetic oligonucleotide
  Antisense strand to SEQ ID NO: 1092378
aauauucccauccauucuu

SEQ ID NO: 1092380 - RNA, 19 nt, Artificial Sequence
  Description of Artificial Sequence: Synthetic oligonucleotide
  Sense strand starting at position 903 of SEQ ID NO: 915604
accuuuagauuaguuaaga

SEQ ID NO: 1092381 - RNA, 19 nt, Artificial Sequence
  Description of Artificial Sequence: Synthetic oligonucleotide
  Antisense strand to SEQ ID NO: 1092380
ucuuaacuaaucuaaaggu

SEQ ID NO: 1092382 - RNA, 19 nt, Artificial Sequence
  Description of Artificial Sequence: Synthetic oligonucleotide
  Sense strand starting at position 904 of SEQ ID NO: 915604
ccuuuagauuaguuaagag

SEQ ID NO: 1092383 - RNA, 19 nt, Artificial Sequence
  Description of Artificial Sequence: Synthetic oligonucleotide
  Antisense strand to SEQ ID NO: 1092382
cucuuaacuaaucuaaagg

SEQ ID NO: 1092384 - RNA, 19 nt, Artificial Sequence
  Description of Artificial Sequence: Synthetic oligonucleotide
  Sense strand starting at position 946 of SEQ ID NO: 915604
gguagauuggucuagggua

SEQ ID NO: 1092385 - RNA, 19 nt, Artificial Sequence
  Description of Artificial Sequence: Synthetic oligonucleotide
  Antisense strand to SEQ ID NO: 1092384
uacccuagaccaaucuacc

SEQ ID NO: 1092386 - RNA, 19 nt, Artificial Sequence
  Description of Artificial Sequence: Synthetic oligonucleotide
  Sense strand starting at position 948 of SEQ ID NO: 915604
uagauuggucuaggguaau

SEQ ID NO: 1092387 - RNA, 19 nt, Artificial Sequence
  Description of Artificial Sequence: Synthetic oligonucleotide
  Antisense strand to SEQ ID NO: 1092386
auuacccuagaccaaucua

SEQ ID NO: 1092388 - RNA, 19 nt, Artificial Sequence
  Description of Artificial Sequence: Synthetic oligonucleotide
  Sense strand starting at position 951 of SEQ ID NO: 915604
auuggucuaggguaauagu

SEQ ID NO: 1092389 - RNA, 19 nt, Artificial Sequence
  Description of Artificial Sequence: Synthetic oligonucleotide
  Antisense strand to SEQ ID NO: 1092388
acuauuacccuagaccaau

SEQ ID NO: 1092390 - RNA, 19 nt, Artificial Sequence
  Description of Artificial Sequence: Synthetic oligonucleotide
  Sense strand starting at position 999 of SEQ ID NO: 915604
gagauuugguuugaagaua

SEQ ID NO: 1092391 - RNA, 19 nt, Artificial Sequence
  Description of Artificial Sequence: Synthetic oligonucleotide
  Antisense strand to SEQ ID NO: 1092390
uaucuucaaaccaaaucuc

SEQ ID NO: 1092392 - RNA, 19 nt, Artificial Sequence
  Description of Artificial Sequence: Synthetic oligonucleotide
  Sense strand starting at position 1029 of SEQ ID NO: 915604
acuugaugauuguuuggau

SEQ ID NO: 1092393 - RNA, 19 nt, Artificial Sequence
  Description of Artificial Sequence: Synthetic oligonucleotide
  Antisense strand to SEQ ID NO: 1092392
auccaaacaaucaucaagu

SEQ ID NO: 1092394 - RNA, 19 nt, Artificial Sequence
  Description of Artificial Sequence: Synthetic oligonucleotide
  Sense strand starting at position 1030 of SEQ ID NO: 915604
cuugaugauuguuuggaua

SEQ ID NO: 1092395 - RNA, 19 nt, Artificial Sequence
  Description of Artificial Sequence: Synthetic oligonucleotide
  Antisense strand to SEQ ID NO: 1092394
uauccaaacaaucaucaag

SEQ ID NO: 1092396 - RNA, 19 nt, Artificial Sequence
  Description of Artificial Sequence: Synthetic oligonucleotide
  Sense strand starting at position 1083 of SEQ ID NO: 915604
ggccaagauuucugauuug

SEQ ID NO: 1092397 - RNA, 19 nt, Artificial Sequence
  Description of Artificial Sequence: Synthetic oligonucleotide
  Antisense strand to SEQ ID NO: 1092396
caaaucagaaaucuuggcc

SEQ ID NO: 1092398 - RNA, 19 nt, Artificial Sequence
  Description of Artificial Sequence: Synthetic oligonucleotide
  Sense strand starting at position 1112 of SEQ ID NO: 915604
guugguaugacccauugag

SEQ ID NO: 1092399 - RNA, 19 nt, Artificial Sequence
  Description of Artificial Sequence: Synthetic oligonucleotide
  Antisense strand to SEQ ID NO: 1092398
cucaaugggucauaccaac

SEQ ID NO: 1092400 - RNA, 19 nt, Artificial Sequence
  Description of Artificial Sequence: Synthetic oligonucleotide
  Sense strand starting at position 1158 of SEQ ID NO: 915604
aaauuuaaaugcgcgauau

SEQ ID NO: 1092401 - RNA, 19 nt, Artificial Sequence
  Description of Artificial Sequence: Synthetic oligonucleotide
  Antisense strand to SEQ ID NO: 1092400
auaucgcgcauuuaaauuu

SEQ ID NO: 1092402 - RNA, 19 nt, Artificial Sequence
  Description of Artificial Sequence: Synthetic oligonucleotide
  Sense strand starting at position 1159 of SEQ ID NO: 915604
aauuuaaaugcgcgauaua

SEQ ID NO: 1092403 - RNA, 19 nt, Artificial Sequence
  Description of Artificial Sequence: Synthetic oligonucleotide
  Antisense strand to SEQ ID NO: 1092402
uauaucgcgcauuuaaauu

SEQ ID NO: 1092404 - RNA, 19 nt, Artificial Sequence
  Description of Artificial Sequence: Synthetic oligonucleotide
  Sense strand starting at position 1318 of SEQ ID NO: 915604
gucauuugguggucaggca

SEQ ID NO: 1092405 - RNA, 19 nt, Artificial Sequence
  Description of Artificial Sequence: Synthetic oligonucleotide
  Antisense strand to SEQ ID NO: 1092404
ugccugaccaccaaaugac

SEQ ID NO: 1092406 - RNA, 19 nt, Artificial Sequence
  Description of Artificial Sequence: Synthetic oligonucleotide
  Sense strand starting at position 1604 of SEQ ID NO: 915604
ggugcaagagacuaucuua

SEQ ID NO: 1092407 - RNA, 19 nt, Artificial Sequence
  Description of Artificial Sequence: Synthetic oligonucleotide
  Antisense strand to SEQ ID NO: 1092406
uaagauagucucuugcacc

SEQ ID NO: 1092408 - RNA, 19 nt, Artificial Sequence
  Description of Artificial Sequence: Synthetic oligonucleotide
  Sense strand starting at position 1715 of SEQ ID NO: 915604
ggauguuucccacacacuu

SEQ ID NO: 1092409 - RNA, 19 nt, Artificial Sequence
  Description of Artificial Sequence: Synthetic oligonucleotide
  Antisense strand to SEQ ID NO: 1092408
aagugugugggaaacaucc

SEQ ID NO: 1092410 - RNA, 19 nt, Artificial Sequence
  Description of Artificial Sequence: Synthetic oligonucleotide
  Sense strand starting at position 2140 of SEQ ID NO: 915604
ggaauucugcaccgggaga

SEQ ID NO: 1092411 - RNA, 19 nt, Artificial Sequence
  Description of Artificial Sequence: Synthetic oligonucleotide
  Antisense strand to SEQ ID NO: 1092410
ucucccggugcagaauucc

SEQ ID NO: 1092412 - RNA, 19 nt, Artificial Sequence
  Description of Artificial Sequence: Synthetic oligonucleotide
  Sense strand starting at position 2141 of SEQ ID NO: 915604
gaauucugcaccgggagaa

SEQ ID NO: 1092413 - RNA, 19 nt, Artificial Sequence
  Description of Artificial Sequence: Synthetic oligonucleotide
  Antisense strand to SEQ ID NO: 1092412
uucucccggugcagaauuc

SEQ ID NO: 1092414 - RNA, 19 nt, Artificial Sequence
  Description of Artificial Sequence: Synthetic oligonucleotide
  Sense strand starting at position 2142 of SEQ ID NO: 915604
aauucugcaccgggagaaa

SEQ ID NO: 1092415 - RNA, 19 nt, Artificial Sequence
  Description of Artificial Sequence: Synthetic oligonucleotide
  Antisense strand to SEQ ID NO: 1092414
uuucucccggugcagaauu

SEQ ID NO: 1092416 - RNA, 19 nt, Artificial Sequence
  Description of Artificial Sequence: Synthetic oligonucleotide
  Sense strand starting at position 2420 of SEQ ID NO: 915604
acaguacugaggugauuga

SEQ ID NO: 1092417 - RNA, 19 nt, Artificial Sequence
  Description of Artificial Sequence: Synthetic oligonucleotide
  Antisense strand to SEQ ID NO: 1092416
ucaaucaccucaguacugu

SEQ ID NO: 1092418 - RNA, 19 nt, Artificial Sequence
  Description of Artificial Sequence: Synthetic oligonucleotide
  Sense strand starting at position 2421 of SEQ ID NO: 915604
caguacugaggugauugau

SEQ ID NO: 1092419 - RNA, 19 nt, Artificial Sequence
  Description of Artificial Sequence: Synthetic oligonucleotide
  Antisense strand to SEQ ID NO: 1092418
aucaaucaccucaguacug

SEQ ID NO: 1092420 - RNA, 19 nt, Artificial Sequence
  Description of Artificial Sequence: Synthetic oligonucleotide
  Sense strand starting at position 2431 of SEQ ID NO: 915604
gugauugaugcucaggcca

SEQ ID NO: 1092421 - RNA, 19 nt, Artificial Sequence
  Description of Artificial Sequence: Synthetic oligonucleotide
  Antisense strand to SEQ ID NO: 1092420
uggccugagcaucaaucac

SEQ ID NO: 1092422 - RNA, 19 nt, Artificial Sequence
  Description of Artificial Sequence: Synthetic oligonucleotide
  Sense strand starting at position 2615 of SEQ ID NO: 915604
gacgauucucagggauaug

SEQ ID NO: 1092423 - RNA, 19 nt, Artificial Sequence
  Description of Artificial Sequence: Synthetic oligonucleotide
  Antisense strand to SEQ ID NO: 1092422
cauaucccugagaaucguc

SEQ ID NO: 1092424 - RNA, 19 nt, Artificial Sequence
  Description of Artificial Sequence: Synthetic oligonucleotide
  Sense strand starting at position 2616 of SEQ ID NO: 915604
acgauucucagggauaugu

SEQ ID NO: 1092425 - RNA, 19 nt, Artificial Sequence
  Description of Artificial Sequence: Synthetic oligonucleotide
  Antisense strand to SEQ ID NO: 1092424
acauaucccugagaaucgu

SEQ ID NO: 1092426 - RNA, 19 nt, Artificial Sequence
  Description of Artificial Sequence: Synthetic oligonucleotide
  Sense strand starting at position 2639 of SEQ ID NO: 915604
gcuacaaaccuaugagaac

SEQ ID NO: 1092427 - RNA, 19 nt, Artificial Sequence
  Description of Artificial Sequence: Synthetic oligonucleotide
  Antisense strand to SEQ ID NO: 1092426
guucucauagguuuguagc

SEQ ID NO: 1092428 - RNA, 19 nt, Artificial Sequence
  Description of Artificial Sequence: Synthetic oligonucleotide
  Sense strand starting at position 2808 of SEQ ID NO: 915604
ugaggcagauguucucuaa

SEQ ID NO: 1092429 - RNA, 19 nt, Artificial Sequence
  Description of Artificial Sequence: Synthetic oligonucleotide
  Antisense strand to SEQ ID NO: 1092428
uuagagaacaucugccuca

SEQ ID NO: 1092430 - RNA, 19 nt, Artificial Sequence
  Description of Artificial Sequence: Synthetic oligonucleotide
  Sense strand starting at position 2839 of SEQ ID NO: 915604
gauagccaguaacuugaua

SEQ ID NO: 1092431 - RNA, 19 nt, Artificial Sequence
  Description of Artificial Sequence: Synthetic oligonucleotide
  Antisense strand to SEQ ID NO: 1092430
uaucaaguuacuggcuauc

SEQ ID NO: 1092432 - RNA, 19 nt, Artificial Sequence
  Description of Artificial Sequence: Synthetic oligonucleotide
  Sense strand starting at position 2947 of SEQ ID NO: 915604
cauaaugggugacugguaa

SEQ ID NO: 1092433 - RNA, 19 nt, Artificial Sequence
  Description of Artificial Sequence: Synthetic oligonucleotide
  Antisense strand to SEQ ID NO: 1092432
uuaccagucacccauuaug

SEQ ID NO: 1092434 - RNA, 19 nt, Artificial Sequence
  Description of Artificial Sequence: Synthetic oligonucleotide
  Sense strand starting at position 3209 of SEQ ID NO: 915604
cuaggauaaucucccgcau

SEQ ID NO: 1092435 - RNA, 19 nt, Artificial Sequence
  Description of Artificial Sequence: Synthetic oligonucleotide
  Antisense strand to SEQ ID NO: 1092434
augcgggagauuauccuag

SEQ ID NO: 1092436 - RNA, 19 nt, Artificial Sequence
  Description of Artificial Sequence: Synthetic oligonucleotide
  Sense strand starting at position 3416 of SEQ ID NO: 915604
gcaacauugcaugaaccaa

SEQ ID NO: 1092437 - RNA, 19 nt, Artificial Sequence
  Description of Artificial Sequence: Synthetic oligonucleotide
  Antisense strand to SEQ ID NO: 1092436
uugguucaugcaauguugc

SEQ ID NO: 1092438 - RNA, 19 nt, Artificial Sequence
  Description of Artificial Sequence: Synthetic oligonucleotide
  Sense strand starting at position 3431 of SEQ ID NO: 915604
ccaagucauguuuagcacu

SEQ ID NO: 1092439 - RNA, 19 nt, Artificial Sequence
  Description of Artificial Sequence: Synthetic oligonucleotide
  Antisense strand to SEQ ID NO: 1092438
agugcuaaacaugacuugg

SEQ ID NO: 1092440 - RNA, 19 nt, Artificial Sequence
  Description of Artificial Sequence: Synthetic oligonucleotide
  Sense strand starting at position 3643 of SEQ ID NO: 915604
auacacagguacucauaua

SEQ ID NO: 1092441 - RNA, 19 nt, Artificial Sequence
  Description of Artificial Sequence: Synthetic oligonucleotide
  Antisense strand to SEQ ID NO: 1092440
uauaugaguaccuguguau

SEQ ID NO: 1092442 - RNA, 19 nt, Artificial Sequence
  Description of Artificial Sequence: Synthetic oligonucleotide
  Sense strand starting at position 3746 of SEQ ID NO: 915604
guuucuacccacuaauggu

SEQ ID NO: 1092443 - RNA, 19 nt, Artificial Sequence
  Description of Artificial Sequence: Synthetic oligonucleotide
  Antisense strand to SEQ ID NO: 1092442
accauuaguggguagaaac

SEQ ID NO: 1092444 - RNA, 19 nt, Artificial Sequence
  Description of Artificial Sequence: Synthetic oligonucleotide
  Sense strand starting at position 3801 of SEQ ID NO: 915604
gcaguauaaccagaugucu

SEQ ID NO: 1092445 - RNA, 19 nt, Artificial Sequence
  Description of Artificial Sequence: Synthetic oligonucleotide
  Antisense strand to SEQ ID NO: 1092444
agacaucugguuauacugc

SEQ ID NO: 1092446 - RNA, 19 nt, Artificial Sequence
  Description of Artificial Sequence: Synthetic oligonucleotide
  Sense strand starting at position 3873 of SEQ ID NO: 915604
acaguugauugcuccaaua

SEQ ID NO: 1092447 - RNA, 19 nt, Artificial Sequence
  Description of Artificial Sequence: Synthetic oligonucleotide
  Antisense strand to SEQ ID NO: 1092446
uauuggagcaaucaacugu

SEQ ID NO: 1092448 - RNA, 19 nt, Artificial Sequence
  Description of Artificial Sequence: Synthetic oligonucleotide
  Sense strand starting at position 3875 of SEQ ID NO: 915604
aguugauugcuccaauagu

SEQ ID NO: 1092449 - RNA, 19 nt, Artificial Sequence
  Description of Artificial Sequence: Synthetic oligonucleotide
  Antisense strand to SEQ ID NO: 1092448
acuauuggagcaaucaacu

SEQ ID NO: 1092450 - RNA, 19 nt, Artificial Sequence
  Description of Artificial Sequence: Synthetic oligonucleotide
  Sense strand starting at position 3960 of SEQ ID NO: 915604
uugcaaucuuucucuagga

SEQ ID NO: 1092451 - RNA, 19 nt, Artificial Sequence
  Description of Artificial Sequence: Synthetic oligonucleotide
  Antisense strand to SEQ ID NO: 1092450
uccuagagaaagauugcaa

SEQ ID NO: 1092452 - RNA, 19 nt, Artificial Sequence
  Description of Artificial Sequence: Synthetic oligonucleotide
  Sense strand starting at position 3961 of SEQ ID NO: 915604
ugcaaucuuucucuaggaa

SEQ ID NO: 1092453 - RNA, 19 nt, Artificial Sequence
  Description of Artificial Sequence: Synthetic oligonucleotide
  Antisense strand to SEQ ID NO: 1092452
uuccuagagaaagauugca

SEQ ID NO: 1092454 - RNA, 19 nt, Artificial Sequence
  Description of Artificial Sequence: Synthetic oligonucleotide
  Sense strand starting at position 3962 of SEQ ID NO: 915604
gcaaucuuucucuaggaag

SEQ ID NO: 1092455 - RNA, 19 nt, Artificial Sequence
  Description of Artificial Sequence: Synthetic oligonucleotide
  Antisense strand to SEQ ID NO: 1092454
cuuccuagagaaagauugc

SEQ ID NO: 1092456 - RNA, 19 nt, Artificial Sequence
  Description of Artificial Sequence: Synthetic oligonucleotide
  Sense strand starting at position 157 of SEQ ID NO: 915605
uagguuaguuauucuugua

SEQ ID NO: 1092457 - RNA, 19 nt, Artificial Sequence
  Description of Artificial Sequence: Synthetic oligonucleotide
  Antisense strand to SEQ ID NO: 1092456
uacaagaauaacuaaccua

SEQ ID NO: 1092458 - RNA, 19 nt, Artificial Sequence
  Description of Artificial Sequence: Synthetic oligonucleotide
  Sense strand starting at position 164 of SEQ ID NO: 915605
guuauucuuguauaagaca

SEQ ID NO: 1092459 - RNA, 19 nt, Artificial Sequence
  Description of Artificial Sequence: Synthetic oligonucleotide
  Antisense strand to SEQ ID NO: 1092458
ugucuuauacaagaauaac

SEQ ID NO: 1092460 - RNA, 19 nt, Artificial Sequence
  Description of Artificial Sequence: Synthetic oligonucleotide
  Sense strand starting at position 167 of SEQ ID NO: 915605
auucuuguauaagacagua

SEQ ID NO: 1092461 - RNA, 19 nt, Artificial Sequence
  Description of Artificial Sequence: Synthetic oligonucleotide
  Antisense strand to SEQ ID NO: 1092460
uacugucuuauacaagaau

SEQ ID NO: 1092462 - RNA, 19 nt, Artificial Sequence
  Description of Artificial Sequence: Synthetic oligonucleotide
  Sense strand starting at position 172 of SEQ ID NO: 915605
uguauaagacaguacuacu

SEQ ID NO: 1092463 - RNA, 19 nt, Artificial Sequence
  Description of Artificial Sequence: Synthetic oligonucleotide
  Antisense strand to SEQ ID NO: 1092462
aguaguacugucuuauaca

SEQ ID NO: 1092464 - RNA, 19 nt, Artificial Sequence
  Description of Artificial Sequence: Synthetic oligonucleotide
  Sense strand starting at position 504 of SEQ ID NO: 915605
uuuaaauuacaaggugauc

SEQ ID NO: 1092465 - RNA, 19 nt, Artificial Sequence
  Description of Artificial Sequence: Synthetic oligonucleotide
  Antisense strand to SEQ ID NO: 1092464
gaucaccuuguaauuuaaa

SEQ ID NO: 1092466 - RNA, 19 nt, Artificial Sequence
  Description of Artificial Sequence: Synthetic oligonucleotide
  Sense strand starting at position 517 of SEQ ID NO: 915605
gugaucaagagcuaaguua

SEQ ID NO: 1092467 - RNA, 19 nt, Artificial Sequence
  Description of Artificial Sequence: Synthetic oligonucleotide
  Antisense strand to SEQ ID NO: 1092466
uaacuuagcucuugaucac

SEQ ID NO: 1092468 - RNA, 19 nt, Artificial Sequence
  Description of Artificial Sequence: Synthetic oligonucleotide
  Sense strand starting at position 621 of SEQ ID NO: 915605
uggaguacagugugacauu

SEQ ID NO: 1092469 - RNA, 19 nt, Artificial Sequence
  Description of Artificial Sequence: Synthetic oligonucleotide
  Antisense strand to SEQ ID NO: 1092468
aaugucacacuguacucca

SEQ ID NO: 1092470 - RNA, 19 nt, Artificial Sequence
  Description of Artificial Sequence: Synthetic oligonucleotide
  Sense strand starting at position 662 of SEQ ID NO: 915605
aaugaucaagucgggaaau

SEQ ID NO: 1092471 - RNA, 19 nt, Artificial Sequence
  Description of Artificial Sequence: Synthetic oligonucleotide
  Antisense strand to SEQ ID NO: 1092470
auuucccgacuugaucauu

SEQ ID NO: 1092472 - RNA, 19 nt, Artificial Sequence
  Description of Artificial Sequence: Synthetic oligonucleotide
  Sense strand starting at position 675 of SEQ ID NO: 915605
ggaaauaauuaguagauuc

SEQ ID NO: 1092473 - RNA, 19 nt, Artificial Sequence
  Description of Artificial Sequence: Synthetic oligonucleotide
  Antisense strand to SEQ ID NO: 1092472
gaaucuacuaauuauuucc

SEQ ID NO: 1092474 - RNA, 19 nt, Artificial Sequence
  Description of Artificial Sequence: Synthetic oligonucleotide
  Sense strand starting at position 827 of SEQ ID NO: 915605
auuccuaucuaguuguacu

SEQ ID NO: 1092475 - RNA, 19 nt, Artificial Sequence
  Description of Artificial Sequence: Synthetic oligonucleotide
  Antisense strand to SEQ ID NO: 1092474
aguacaacuagauaggaau

SEQ ID NO: 1092476 - RNA, 19 nt, Artificial Sequence
  Description of Artificial Sequence: Synthetic oligonucleotide
  Sense strand starting at position 834 of SEQ ID NO: 915605
ucuaguuguacuuguguau

SEQ ID NO: 1092477 - RNA, 19 nt, Artificial Sequence
  Description of Artificial Sequence: Synthetic oligonucleotide
  Antisense strand to SEQ ID NO: 1092476
auacacaaguacaacuaga

SEQ ID NO: 1092478 - RNA, 19 nt, Artificial Sequence
  Description of Artificial Sequence: Synthetic oligonucleotide
  Sense strand starting at position 841 of SEQ ID NO: 915605
guacuuguguaucccuuaa

SEQ ID NO: 1092479 - RNA, 19 nt, Artificial Sequence
  Description of Artificial Sequence: Synthetic oligonucleotide
  Antisense strand to SEQ ID NO: 1092478
uuaagggauacacaaguac

SEQ ID NO: 1092480 - RNA, 19 nt, Artificial Sequence
  Description of Artificial Sequence: Synthetic oligonucleotide
  Sense strand starting at position 843 of SEQ ID NO: 915605
acuuguguaucccuuaaca

SEQ ID NO: 1092481 - RNA, 19 nt, Artificial Sequence
  Description of Artificial Sequence: Synthetic oligonucleotide
  Antisense strand to SEQ ID NO: 1092480
uguuaagggauacacaagu

SEQ ID NO: 1092482 - RNA, 19 nt, Artificial Sequence
  Description of Artificial Sequence: Synthetic oligonucleotide
  Sense strand starting at position 868 of SEQ ID NO: 915605
ugucuauccuccuccauga

SEQ ID NO: 1092483 - RNA, 19 nt, Artificial Sequence
  Description of Artificial Sequence: Synthetic oligonucleotide
  Antisense strand to SEQ ID NO: 1092482
ucauggaggaggauagaca

SEQ ID NO: 1092484 - RNA, 19 nt, Artificial Sequence
  Description of Artificial Sequence: Synthetic oligonucleotide
  Sense strand starting at position 982 of SEQ ID NO: 915605
ugagaagucaagcauguuc

SEQ ID NO: 1092485 - RNA, 19 nt, Artificial Sequence
  Description of Artificial Sequence: Synthetic oligonucleotide
  Antisense strand to SEQ ID NO: 1092484
gaacaugcuugacuucuca

SEQ ID NO: 1092486 - RNA, 19 nt, Artificial Sequence
  Description of Artificial Sequence: Synthetic oligonucleotide
  Sense strand starting at position 1025 of SEQ ID NO: 915605
gcaguuuagaaauguguuu

SEQ ID NO: 1092487 - RNA, 19 nt, Artificial Sequence
  Description of Artificial Sequence: Synthetic oligonucleotide
  Antisense strand to SEQ ID NO: 1092486
aaacacauuucuaaacugc

SEQ ID NO: 1092488 - RNA, 19 nt, Artificial Sequence
  Description of Artificial Sequence: Synthetic oligonucleotide
  Sense strand starting at position 1040 of SEQ ID NO: 915605
guuuaaguauagucccaaa

SEQ ID NO: 1092489 - RNA, 19 nt, Artificial Sequence
  Description of Artificial Sequence: Synthetic oligonucleotide
  Antisense strand to SEQ ID NO: 1092488
uuugggacuauacuuaaac

SEQ ID NO: 1092490 - RNA, 19 nt, Artificial Sequence
  Description of Artificial Sequence: Synthetic oligonucleotide
  Sense strand starting at position 1058 of SEQ ID NO: 915605
agggaaagcuuacuuugca

SEQ ID NO: 1092491 - RNA, 19 nt, Artificial Sequence
  Description of Artificial Sequence: Synthetic oligonucleotide
  Antisense strand to SEQ ID NO: 1092490
ugcaaaguaagcuuucccu

SEQ ID NO: 1092492 - RNA, 19 nt, Artificial Sequence
  Description of Artificial Sequence: Synthetic oligonucleotide
  Sense strand starting at position 1059 of SEQ ID NO: 915605
gggaaagcuuacuuugcaa

SEQ ID NO: 1092493 - RNA, 19 nt, Artificial Sequence
  Description of Artificial Sequence: Synthetic oligonucleotide
  Antisense strand to SEQ ID NO: 1092492
uugcaaaguaagcuuuccc

SEQ ID NO: 1092494 - RNA, 19 nt, Artificial Sequence
  Description of Artificial Sequence: Synthetic oligonucleotide
  Sense strand starting at position 1210 of SEQ ID NO: 915605
aaaugagacugcuaggauc

SEQ ID NO: 1092495 - RNA, 19 nt, Artificial Sequence
  Description of Artificial Sequence: Synthetic oligonucleotide
  Antisense strand to SEQ ID NO: 1092494
gauccuagcagucucauuu

SEQ ID NO: 1092496 - RNA, 19 nt, Artificial Sequence
  Description of Artificial Sequence: Synthetic oligonucleotide
  Sense strand starting at position 1244 of SEQ ID NO: 915605
gaguaaacgagcuagucau

SEQ ID NO: 1092497 - RNA, 19 nt, Artificial Sequence
  Description of Artificial Sequence: Synthetic oligonucleotide
  Antisense strand to SEQ ID NO: 1092496
augacuagcucguuuacuc

SEQ ID NO: 1092498 - RNA, 19 nt, Artificial Sequence
  Description of Artificial Sequence: Synthetic oligonucleotide
  Sense strand starting at position 1417 of SEQ ID NO: 915605
gccucuaguuucccagacu

SEQ ID NO: 1092499 - RNA, 19 nt, Artificial Sequence
  Description of Artificial Sequence: Synthetic oligonucleotide
  Antisense strand to SEQ ID NO: 1092498
agucugggaaacuagaggc

SEQ ID NO: 1092500 - RNA, 19 nt, Artificial Sequence
  Description of Artificial Sequence: Synthetic oligonucleotide
  Sense strand starting at position 1420 of SEQ ID NO: 915605
ucuaguuucccagacugca

SEQ ID NO: 1092501 - RNA, 19 nt, Artificial Sequence
  Description of Artificial Sequence: Synthetic oligonucleotide
  Antisense strand to SEQ ID NO: 1092500
ugcagucugggaaacuaga

SEQ ID NO: 1092502 - RNA, 19 nt, Artificial Sequence
  Description of Artificial Sequence: Synthetic oligonucleotide
  Sense strand starting at position 2028 of SEQ ID NO: 915605
cucggaacugucugucaaa

SEQ ID NO: 1092503 - RNA, 19 nt, Artificial Sequence
  Description of Artificial Sequence: Synthetic oligonucleotide
  Antisense strand to SEQ ID NO: 1092502
uuugacagacaguuccgag

SEQ ID NO: 1092504 - RNA, 19 nt, Artificial Sequence
  Description of Artificial Sequence: Synthetic oligonucleotide
  Sense strand starting at position 2029 of SEQ ID NO: 915605
ucggaacugucugucaaau

SEQ ID NO: 1092505 - RNA, 19 nt, Artificial Sequence
  Description of Artificial Sequence: Synthetic oligonucleotide
  Antisense strand to SEQ ID NO: 1092504
auuugacagacaguuccga

SEQ ID NO: 1092506 - RNA, 19 nt, Artificial Sequence
  Description of Artificial Sequence: Synthetic oligonucleotide
  Sense strand starting at position 2040 of SEQ ID NO: 915605
ugucaaauccggaggcgua

SEQ ID NO: 1092507 - RNA, 19 nt, Artificial Sequence
  Description of Artificial Sequence: Synthetic oligonucleotide
  Antisense strand to SEQ ID NO: 1092506
uacgccuccggauuugaca

SEQ ID NO: 1092508 - RNA, 19 nt, Artificial Sequence
  Description of Artificial Sequence: Synthetic oligonucleotide
  Sense strand starting at position 2041 of SEQ ID NO: 915605
gucaaauccggaggcguaa

SEQ ID NO: 1092509 - RNA, 19 nt, Artificial Sequence
  Description of Artificial Sequence: Synthetic oligonucleotide
  Antisense strand to SEQ ID NO: 1092508
uuacgccuccggauuugac

SEQ ID NO: 1092510 - RNA, 19 nt, Artificial Sequence
  Description of Artificial Sequence: Synthetic oligonucleotide
  Sense strand starting at position 2297 of SEQ ID NO: 915605
cggaaacuacgcugaaaua

SEQ ID NO: 1092511 - RNA, 19 nt, Artificial Sequence
  Description of Artificial Sequence: Synthetic oligonucleotide
  Antisense strand to SEQ ID NO: 1092510
uauuucagcguaguuuccg

SEQ ID NO: 1092512 - RNA, 19 nt, Artificial Sequence
  Description of Artificial Sequence: Synthetic oligonucleotide
  Sense strand starting at position 2378 of SEQ ID NO: 915605
gguagaaauuguuaccuaa

SEQ ID NO: 1092513 - RNA, 19 nt, Artificial Sequence
  Description of Artificial Sequence: Synthetic oligonucleotide
  Antisense strand to SEQ ID NO: 1092512
uuagguaacaauuucuacc

SEQ ID NO: 1092514 - RNA, 19 nt, Artificial Sequence
  Description of Artificial Sequence: Synthetic oligonucleotide
  Sense strand starting at position 2460 of SEQ ID NO: 915605
gcggacugguccagacagu

SEQ ID NO: 1092515 - RNA, 19 nt, Artificial Sequence
  Description of Artificial Sequence: Synthetic oligonucleotide
  Antisense strand to SEQ ID NO: 1092514
acugucuggaccaguccgc

SEQ ID NO: 1092516 - RNA, 19 nt, Artificial Sequence
  Description of Artificial Sequence: Synthetic oligonucleotide
  Sense strand starting at position 2461 of SEQ ID NO: 915605
cggacugguccagacaguu

SEQ ID NO: 1092517 - RNA, 19 nt, Artificial Sequence
  Description of Artificial Sequence: Synthetic oligonucleotide
  Antisense strand to SEQ ID NO: 1092516
aacugucuggaccaguccg

SEQ ID NO: 1092518 - RNA, 19 nt, Artificial Sequence
  Description of Artificial Sequence: Synthetic oligonucleotide
  Sense strand starting at position 2488 of SEQ ID NO: 915605
gcaggaugugccugauagu

SEQ ID NO: 1092519 - RNA, 19 nt, Artificial Sequence
  Description of Artificial Sequence: Synthetic oligonucleotide
  Antisense strand to SEQ ID NO: 1092518
acuaucaggcacauccugc

SEQ ID NO: 1092520 - RNA, 19 nt, Artificial Sequence
  Description of Artificial Sequence: Synthetic oligonucleotide
  Sense strand starting at position 2489 of SEQ ID NO: 915605
caggaugugccugauaguu

SEQ ID NO: 1092521 - RNA, 19 nt, Artificial Sequence
  Description of Artificial Sequence: Synthetic oligonucleotide
  Antisense strand to SEQ ID NO: 1092520
aacuaucaggcacauccug

SEQ ID NO: 1092522 - RNA, 19 nt, Artificial Sequence
  Description of Artificial Sequence: Synthetic oligonucleotide
  Sense strand starting at position 2501 of SEQ ID NO: 915605
gauaguugacucgagcuuu

SEQ ID NO: 1092523 - RNA, 19 nt, Artificial Sequence
  Description of Artificial Sequence: Synthetic oligonucleotide
  Antisense strand to SEQ ID NO: 1092522
aaagcucgagucaacuauc

SEQ ID NO: 1092524 - RNA, 19 nt, Artificial Sequence
  Description of Artificial Sequence: Synthetic oligonucleotide
  Sense strand starting at position 2548 of SEQ ID NO: 915605
ugggaaccuugacagaguu

SEQ ID NO: 1092525 - RNA, 19 nt, Artificial Sequence
  Description of Artificial Sequence: Synthetic oligonucleotide
  Antisense strand to SEQ ID NO: 1092524
aacucugucaagguuccca

SEQ ID NO: 1092526 - RNA, 19 nt, Artificial Sequence
  Description of Artificial Sequence: Synthetic oligonucleotide
  Sense strand starting at position 3021 of SEQ ID NO: 915605
guuuccuauucucccauga

SEQ ID NO: 1092527 - RNA, 19 nt, Artificial Sequence
  Description of Artificial Sequence: Synthetic oligonucleotide
  Antisense strand to SEQ ID NO: 1092526
ucaugggagaauaggaaac

SEQ ID NO: 1092528 - RNA, 19 nt, Artificial Sequence
  Description of Artificial Sequence: Synthetic oligonucleotide
  Sense strand starting at position 3177 of SEQ ID NO: 915605
uuuaguaguaaguguucga

SEQ ID NO: 1092529 - RNA, 19 nt, Artificial Sequence
  Description of Artificial Sequence: Synthetic oligonucleotide
  Antisense strand to SEQ ID NO: 1092528
ucgaacacuuacuacuaaa

SEQ ID NO: 1092530 - RNA, 19 nt, Artificial Sequence
  Description of Artificial Sequence: Synthetic oligonucleotide
  Sense strand starting at position 3180 of SEQ ID NO: 915605
aguaguaaguguucgaugu

SEQ ID NO: 1092531 - RNA, 19 nt, Artificial Sequence
  Description of Artificial Sequence: Synthetic oligonucleotide
  Antisense strand to SEQ ID NO: 1092530
acaucgaacacuuacuacu

SEQ ID NO: 1092532 - RNA, 19 nt, Artificial Sequence
  Description of Artificial Sequence: Synthetic oligonucleotide
  Sense strand starting at position 3181 of SEQ ID NO: 915605
guaguaaguguucgaugua

SEQ ID NO: 1092533 - RNA, 19 nt, Artificial Sequence
  Description of Artificial Sequence: Synthetic oligonucleotide
  Antisense strand to SEQ ID NO: 1092532
uacaucgaacacuuacuac

SEQ ID NO: 1092534 - RNA, 19 nt, Artificial Sequence
  Description of Artificial Sequence: Synthetic oligonucleotide
  Sense strand starting at position 3184 of SEQ ID NO: 915605
guaaguguucgauguaauu

SEQ ID NO: 1092535 - RNA, 19 nt, Artificial Sequence
  Description of Artificial Sequence: Synthetic oligonucleotide
  Antisense strand to SEQ ID NO: 1092534
aauuacaucgaacacuuac

SEQ ID NO: 1092536 - RNA, 19 nt, Artificial Sequence
  Description of Artificial Sequence: Synthetic oligonucleotide
  Sense strand starting at position 141 of SEQ ID NO: 915606
aggauaaacucuuguaaca

SEQ ID NO: 1092537 - RNA, 19 nt, Artificial Sequence
  Description of Artificial Sequence: Synthetic oligonucleotide
  Antisense strand to SEQ ID NO: 1092536
uguuacaagaguuuauccu

SEQ ID NO: 1092538 - RNA, 19 nt, Artificial Sequence
  Description of Artificial Sequence: Synthetic oligonucleotide
  Sense strand starting at position 407 of SEQ ID NO: 915606
acuguaaugugcccaugaa

SEQ ID NO: 1092539 - RNA, 19 nt, Artificial Sequence
  Description of Artificial Sequence: Synthetic oligonucleotide
  Antisense strand to SEQ ID NO: 1092538
uucaugggcacauuacagu

SEQ ID NO: 1092540 - RNA, 19 nt, Artificial Sequence
  Description of Artificial Sequence: Synthetic oligonucleotide
  Sense strand starting at position 408 of SEQ ID NO: 915606
cuguaaugugcccaugaau

SEQ ID NO: 1092541 - RNA, 19 nt, Artificial Sequence
  Description of Artificial Sequence: Synthetic oligonucleotide
  Antisense strand to SEQ ID NO: 1092540
auucaugggcacauuacag

SEQ ID NO: 1092542 - RNA, 19 nt, Artificial Sequence
  Description of Artificial Sequence: Synthetic oligonucleotide
  Sense strand starting at position 521 of SEQ ID NO: 915606
gacuaaacucuugaguguc

SEQ ID NO: 1092543 - RNA, 19 nt, Artificial Sequence
  Description of Artificial Sequence: Synthetic oligonucleotide
  Antisense strand to SEQ ID NO: 1092542
gacacucaagaguuuaguc

SEQ ID NO: 1092544 - RNA, 19 nt, Artificial Sequence
  Description of Artificial Sequence: Synthetic oligonucleotide
  Sense strand starting at position 523 of SEQ ID NO: 915606
cuaaacucuugagugucaa

SEQ ID NO: 1092545 - RNA, 19 nt, Artificial Sequence
  Description of Artificial Sequence: Synthetic oligonucleotide
  Antisense strand to SEQ ID NO: 1092544
uugacacucaagaguuuag

SEQ ID NO: 1092546 - RNA, 19 nt, Artificial Sequence
  Description of Artificial Sequence: Synthetic oligonucleotide
  Sense strand starting at position 524 of SEQ ID NO: 915606
uaaacucuugagugucaag

SEQ ID NO: 1092547 - RNA, 19 nt, Artificial Sequence
  Description of Artificial Sequence: Synthetic oligonucleotide
  Antisense strand to SEQ ID NO: 1092546
cuugacacucaagaguuua

SEQ ID NO: 1092548 - RNA, 19 nt, Artificial Sequence
  Description of Artificial Sequence: Synthetic oligonucleotide
  Sense strand starting at position 632 of SEQ ID NO: 915606
uuauguacugaaugaguca

SEQ ID NO: 1092549 - RNA, 19 nt, Artificial Sequence
  Description of Artificial Sequence: Synthetic oligonucleotide
  Antisense strand to SEQ ID NO: 1092548
ugacucauucaguacauaa

SEQ ID NO: 1092550 - RNA, 19 nt, Artificial Sequence
  Description of Artificial Sequence: Synthetic oligonucleotide
  Sense strand starting at position 723 of SEQ ID NO: 915606
ccaacaaauuccuagggua

SEQ ID NO: 1092551 - RNA, 19 nt, Artificial Sequence
  Description of Artificial Sequence: Synthetic oligonucleotide
  Antisense strand to SEQ ID NO: 1092550
uacccuaggaauuuguugg

SEQ ID NO: 1092552 - RNA, 19 nt, Artificial Sequence
  Description of Artificial Sequence: Synthetic oligonucleotide
  Sense strand starting at position 725 of SEQ ID NO: 915606
aacaaauuccuaggguaug

SEQ ID NO: 1092553 - RNA, 19 nt, Artificial Sequence
  Description of Artificial Sequence: Synthetic oligonucleotide
  Antisense strand to SEQ ID NO: 1092552
cauacccuaggaauuuguu

SEQ ID NO: 1092554 - RNA, 19 nt, Artificial Sequence
  Description of Artificial Sequence: Synthetic oligonucleotide
  Sense strand starting at position 726 of SEQ ID NO: 915606
acaaauuccuaggguauga

SEQ ID NO: 1092555 - RNA, 19 nt, Artificial Sequence
  Description of Artificial Sequence: Synthetic oligonucleotide
  Antisense strand to SEQ ID NO: 1092554
ucauacccuaggaauuugu

SEQ ID NO: 1092556 - RNA, 19 nt, Artificial Sequence
  Description of Artificial Sequence: Synthetic oligonucleotide
  Sense strand starting at position 730 of SEQ ID NO: 915606
auuccuaggguaugaucau

SEQ ID NO: 1092557 - RNA, 19 nt, Artificial Sequence
  Description of Artificial Sequence: Synthetic oligonucleotide
  Antisense strand to SEQ ID NO: 1092556
augaucauacccuaggaau

SEQ ID NO: 1092558 - RNA, 19 nt, Artificial Sequence
  Description of Artificial Sequence: Synthetic oligonucleotide
  Sense strand starting at position 736 of SEQ ID NO: 915606
aggguaugaucauucccau

SEQ ID NO: 1092559 - RNA, 19 nt, Artificial Sequence
  Description of Artificial Sequence: Synthetic oligonucleotide
  Antisense strand to SEQ ID NO: 1092558
augggaaugaucauacccu

SEQ ID NO: 1092560 - RNA, 19 nt, Artificial Sequence
  Description of Artificial Sequence: Synthetic oligonucleotide
  Sense strand starting at position 1069 of SEQ ID NO: 915606
gaggcugguccugggcaua

SEQ ID NO: 1092561 - RNA, 19 nt, Artificial Sequence
  Description of Artificial Sequence: Synthetic oligonucleotide
  Antisense strand to SEQ ID NO: 1092560
uaugcccaggaccagccuc

SEQ ID NO: 1092562 - RNA, 19 nt, Artificial Sequence
  Description of Artificial Sequence: Synthetic oligonucleotide
  Sense strand starting at position 1199 of SEQ ID NO: 915606
guuagaggcguucaggaaa

SEQ ID NO: 1092563 - RNA, 19 nt, Artificial Sequence
  Description of Artificial Sequence: Synthetic oligonucleotide
  Antisense strand to SEQ ID NO: 1092562
uuuccugaacgccucuaac

SEQ ID NO: 1092564 - RNA, 19 nt, Artificial Sequence
  Description of Artificial Sequence: Synthetic oligonucleotide
  Sense strand starting at position 1221 of SEQ ID NO: 915606
auugccuagcgaugaauca

SEQ ID NO: 1092565 - RNA, 19 nt, Artificial Sequence
  Description of Artificial Sequence: Synthetic oligonucleotide
  Antisense strand to SEQ ID NO: 1092564
ugauucaucgcuaggcaau

SEQ ID NO: 1092566 - RNA, 19 nt, Artificial Sequence
  Description of Artificial Sequence: Synthetic oligonucleotide
  Sense strand starting at position 1230 of SEQ ID NO: 915606
cgaugaaucaccgggcaca

SEQ ID NO: 1092567 - RNA, 19 nt, Artificial Sequence
  Description of Artificial Sequence: Synthetic oligonucleotide
  Antisense strand to SEQ ID NO: 1092566
ugugcccggugauucaucg

SEQ ID NO: 1092568 - RNA, 19 nt, Artificial Sequence
  Description of Artificial Sequence: Synthetic oligonucleotide
  Sense strand starting at position 1231 of SEQ ID NO: 915606
gaugaaucaccgggcacau

SEQ ID NO: 1092569 - RNA, 19 nt, Artificial Sequence
  Description of Artificial Sequence: Synthetic oligonucleotide
  Antisense strand to SEQ ID NO: 1092568
augugcccggugauucauc

SEQ ID NO: 1092570 - RNA, 19 nt, Artificial Sequence
  Description of Artificial Sequence: Synthetic oligonucleotide
  Sense strand starting at position 2017 of SEQ ID NO: 915606
gacaaugugaugugggcua

SEQ ID NO: 1092571 - RNA, 19 nt, Artificial Sequence
  Description of Artificial Sequence: Synthetic oligonucleotide
  Antisense strand to SEQ ID NO: 1092570
uagcccacaucacauuguc

SEQ ID NO: 1092572 - RNA, 19 nt, Artificial Sequence
  Description of Artificial Sequence: Synthetic oligonucleotide
  Sense strand starting at position 2019 of SEQ ID NO: 915606
caaugugaugugggcuaca

SEQ ID NO: 1092573 - RNA, 19 nt, Artificial Sequence
  Description of Artificial Sequence: Synthetic oligonucleotide
  Antisense strand to SEQ ID NO: 1092572
uguagcccacaucacauug

SEQ ID NO: 1092574 - RNA, 19 nt, Artificial Sequence
  Description of Artificial Sequence: Synthetic oligonucleotide
  Sense strand starting at position 2117 of SEQ ID NO: 915606
ggcugcuggcagugaaagu

SEQ ID NO: 1092575 - RNA, 19 nt, Artificial Sequence
  Description of Artificial Sequence: Synthetic oligonucleotide
  Antisense strand to SEQ ID NO: 1092574
acuuucacugccagcagcc

SEQ ID NO: 1092576 - RNA, 19 nt, Artificial Sequence
  Description of Artificial Sequence: Synthetic oligonucleotide
  Sense strand starting at position 2201 of SEQ ID NO: 915606
gucagagaauuuggaucuu

SEQ ID NO: 1092577 - RNA, 19 nt, Artificial Sequence
  Description of Artificial Sequence: Synthetic oligonucleotide
  Antisense strand to SEQ ID NO: 1092576
aagauccaaauucucugac

SEQ ID NO: 1092578 - RNA, 19 nt, Artificial Sequence
  Description of Artificial Sequence: Synthetic oligonucleotide
  Sense strand starting at position 2234 of SEQ ID NO: 915606
ucgggaccgcuccgagaaa

SEQ ID NO: 1092579 - RNA, 19 nt, Artificial Sequence
  Description of Artificial Sequence: Synthetic oligonucleotide
  Antisense strand to SEQ ID NO: 1092578
uuucucggagcggucccga

SEQ ID NO: 1092580 - RNA, 19 nt, Artificial Sequence
  Description of Artificial Sequence: Synthetic oligonucleotide
  Sense strand starting at position 2304 of SEQ ID NO: 915606
uuugcagacguuugggaaa

SEQ ID NO: 1092581 - RNA, 19 nt, Artificial Sequence
  Description of Artificial Sequence: Synthetic oligonucleotide
  Antisense strand to SEQ ID NO: 1092580
uuucccaaacgucugcaaa

SEQ ID NO: 1092582 - RNA, 19 nt, Artificial Sequence
  Description of Artificial Sequence: Synthetic oligonucleotide
  Sense strand starting at position 2315 of SEQ ID NO: 915606
uugggaaagcaucguuucu

SEQ ID NO: 1092583 - RNA, 19 nt, Artificial Sequence
  Description of Artificial Sequence: Synthetic oligonucleotide
  Antisense strand to SEQ ID NO: 1092582
agaaacgaugcuuucccaa

SEQ ID NO: 1092584 - RNA, 19 nt, Artificial Sequence
  Description of Artificial Sequence: Synthetic oligonucleotide
  Sense strand starting at position 2317 of SEQ ID NO: 915606
gggaaagcaucguuucuca

SEQ ID NO: 1092585 - RNA, 19 nt, Artificial Sequence
  Description of Artificial Sequence: Synthetic oligonucleotide
  Antisense strand to SEQ ID NO: 1092584
ugagaaacgaugcuuuccc

SEQ ID NO: 1092586 - RNA, 19 nt, Artificial Sequence
  Description of Artificial Sequence: Synthetic oligonucleotide
  Sense strand starting at position 2320 of SEQ ID NO: 915606
aaagcaucguuucucaaga

SEQ ID NO: 1092587 - RNA, 19 nt, Artificial Sequence
  Description of Artificial Sequence: Synthetic oligonucleotide
  Antisense strand to SEQ ID NO: 1092586
ucuugagaaacgaugcuuu

SEQ ID NO: 1092588 - RNA, 19 nt, Artificial Sequence
  Description of Artificial Sequence: Synthetic oligonucleotide
  Sense strand starting at position 2352 of SEQ ID NO: 915606
gugucuguaaaucagagau

SEQ ID NO: 1092589 - RNA, 19 nt, Artificial Sequence
  Description of Artificial Sequence: Synthetic oligonucleotide
  Antisense strand to SEQ ID NO: 1092588
aucucugauuuacagacac

SEQ ID NO: 1092590 - RNA, 19 nt, Artificial Sequence
  Description of Artificial Sequence: Synthetic oligonucleotide
  Sense strand starting at position 2391 of SEQ ID NO: 915606
cugugaagccugugagcga

SEQ ID NO: 1092591 - RNA, 19 nt, Artificial Sequence
  Description of Artificial Sequence: Synthetic oligonucleotide
  Antisense strand to SEQ ID NO: 1092590
ucgcucacaggcuucacag

SEQ ID NO: 1092592 - RNA, 19 nt, Artificial Sequence
  Description of Artificial Sequence: Synthetic oligonucleotide
  Sense strand starting at position 2490 of SEQ ID NO: 915606
gcggcuucugcuuccgaaa

SEQ ID NO: 1092593 - RNA, 19 nt, Artificial Sequence
  Description of Artificial Sequence: Synthetic oligonucleotide
  Antisense strand to SEQ ID NO: 1092592
uuucggaagcagaagccgc

SEQ ID NO: 1092594 - RNA, 19 nt, Artificial Sequence
  Description of Artificial Sequence: Synthetic oligonucleotide
  Sense strand starting at position 2509 of SEQ ID NO: 915606
agcagaucgucccuuuauc

SEQ ID NO: 1092595 - RNA, 19 nt, Artificial Sequence
  Description of Artificial Sequence: Synthetic oligonucleotide
  Antisense strand to SEQ ID NO: 1092594
gauaaagggacgaucugcu

SEQ ID NO: 1092596 - RNA, 19 nt, Artificial Sequence
  Description of Artificial Sequence: Synthetic oligonucleotide
  Sense strand starting at position 2518 of SEQ ID NO: 915606
ucccuuuaucucgagucuu

SEQ ID NO: 1092597 - RNA, 19 nt, Artificial Sequence
  Description of Artificial Sequence: Synthetic oligonucleotide
  Antisense strand to SEQ ID NO: 1092596
aagacucgagauaaaggga

SEQ ID NO: 1092598 - RNA, 19 nt, Artificial Sequence
  Description of Artificial Sequence: Synthetic oligonucleotide
  Sense strand starting at position 2569 of SEQ ID NO: 915606
uugucuucuugggaacaaa

SEQ ID NO: 1092599 - RNA, 19 nt, Artificial Sequence
  Description of Artificial Sequence: Synthetic oligonucleotide
  Antisense strand to SEQ ID NO: 1092598
uuuguucccaagaagacaa

SEQ ID NO: 1092600 - RNA, 19 nt, Artificial Sequence
  Description of Artificial Sequence: Synthetic oligonucleotide
  Sense strand starting at position 2684 of SEQ ID NO: 915606
agcuguaaauaucuuugua

SEQ ID NO: 1092601 - RNA, 19 nt, Artificial Sequence
  Description of Artificial Sequence: Synthetic oligonucleotide
  Antisense strand to SEQ ID NO: 1092600
uacaaagauauuuacagcu

SEQ ID NO: 1092602 - RNA, 19 nt, Artificial Sequence
  Description of Artificial Sequence: Synthetic oligonucleotide
  Sense strand starting at position 2946 of SEQ ID NO: 915606
gcgaguagaucagaaauac

SEQ ID NO: 1092603 - RNA, 19 nt, Artificial Sequence
  Description of Artificial Sequence: Synthetic oligonucleotide
  Antisense strand to SEQ ID NO: 1092602
guauuucugaucuacucgc

SEQ ID NO: 1092604 - RNA, 19 nt, Artificial Sequence
  Description of Artificial Sequence: Synthetic oligonucleotide
  Sense strand starting at position 3394 of SEQ ID NO: 915606
ccgcgagaggccgagauau

SEQ ID NO: 1092605 - RNA, 19 nt, Artificial Sequence
  Description of Artificial Sequence: Synthetic oligonucleotide
  Antisense strand to SEQ ID NO: 1092604
auaucucggccucucgcgg

SEQ ID NO: 1092606 - RNA, 19 nt, Artificial Sequence
  Description of Artificial Sequence: Synthetic oligonucleotide
  Sense strand starting at position 3396 of SEQ ID NO: 915606
gcgagaggccgagauauga

SEQ ID NO: 1092607 - RNA, 19 nt, Artificial Sequence
  Description of Artificial Sequence: Synthetic oligonucleotide
  Antisense strand to SEQ ID NO: 1092606
ucauaucucggccucucgc

SEQ ID NO: 1092608 - RNA, 19 nt, Artificial Sequence
  Description of Artificial Sequence: Synthetic oligonucleotide
  Sense strand starting at position 3517 of SEQ ID NO: 915606
gaggguuccuguuacagga

SEQ ID NO: 1092609 - RNA, 19 nt, Artificial Sequence
  Description of Artificial Sequence: Synthetic oligonucleotide
  Antisense strand to SEQ ID NO: 1092608
uccuguaacaggaacccuc

SEQ ID NO: 1092610 - RNA, 19 nt, Artificial Sequence
  Description of Artificial Sequence: Synthetic oligonucleotide
  Sense strand starting at position 3637 of SEQ ID NO: 915606
uagcccuguccagaggaaa

SEQ ID NO: 1092611 - RNA, 19 nt, Artificial Sequence
  Description of Artificial Sequence: Synthetic oligonucleotide
  Antisense strand to SEQ ID NO: 1092610
uuuccucuggacagggcua

SEQ ID NO: 1092612 - RNA, 19 nt, Artificial Sequence
  Description of Artificial Sequence: Synthetic oligonucleotide
  Sense strand starting at position 3692 of SEQ ID NO: 915606
ugcugaaacgaacauguua

SEQ ID NO: 1092613 - RNA, 19 nt, Artificial Sequence
  Description of Artificial Sequence: Synthetic oligonucleotide
  Antisense strand to SEQ ID NO: 1092612
uaacauguucguuucagca

SEQ ID NO: 1092614 - RNA, 19 nt, Artificial Sequence
  Description of Artificial Sequence: Synthetic oligonucleotide
  Sense strand starting at position 3867 of SEQ ID NO: 915606
gcgugauagugcacgccua

SEQ ID NO: 1092615 - RNA, 19 nt, Artificial Sequence
  Description of Artificial Sequence: Synthetic oligonucleotide
  Antisense strand to SEQ ID NO: 1092614
uaggcgugcacuaucacgc

SEQ ID NO: 1092616 - RNA, 19 nt, Artificial Sequence
  Description of Artificial Sequence: Synthetic oligonucleotide
  Sense strand starting at position 282 of SEQ ID NO: 915607
agacacugccuguacgaaa

SEQ ID NO: 1092617 - RNA, 19 nt, Artificial Sequence
  Description of Artificial Sequence: Synthetic oligonucleotide
  Antisense strand to SEQ ID NO: 1092616
uuucguacaggcagugucu

SEQ ID NO: 1092618 - RNA, 19 nt, Artificial Sequence
  Description of Artificial Sequence: Synthetic oligonucleotide
  Sense strand starting at position 314 of SEQ ID NO: 915607
agcugaguggugcauccau

SEQ ID NO: 1092619 - RNA, 19 nt, Artificial Sequence
  Description of Artificial Sequence: Synthetic oligonucleotide
  Antisense strand to SEQ ID NO: 1092618
auggaugcaccacucagcu

SEQ ID NO: 1092620 - RNA, 19 nt, Artificial Sequence
  Description of Artificial Sequence: Synthetic oligonucleotide
  Sense strand starting at position 496 of SEQ ID NO: 915607
uguccuuaaucuuacagag

SEQ ID NO: 1092621 - RNA, 19 nt, Artificial Sequence
  Description of Artificial Sequence: Synthetic oligonucleotide
  Antisense strand to SEQ ID NO: 1092620
cucuguaagauuaaggaca

SEQ ID NO: 1092622 - RNA, 19 nt, Artificial Sequence
  Description of Artificial Sequence: Synthetic oligonucleotide
  Sense strand starting at position 599 of SEQ ID NO: 915607
ggugcauguuucucagcua

SEQ ID NO: 1092623 - RNA, 19 nt, Artificial Sequence
  Description of Artificial Sequence: Synthetic oligonucleotide
  Antisense strand to SEQ ID NO: 1092622
uagcugagaaacaugcacc

SEQ ID NO: 1092624 - RNA, 19 nt, Artificial Sequence
  Description of Artificial Sequence: Synthetic oligonucleotide
  Sense strand starting at position 602 of SEQ ID NO: 915607
gcauguuucucagcuaaag

SEQ ID NO: 1092625 - RNA, 19 nt, Artificial Sequence
  Description of Artificial Sequence: Synthetic oligonucleotide
  Antisense strand to SEQ ID NO: 1092624
cuuuagcugagaaacaugc

SEQ ID NO: 1092626 - RNA, 19 nt, Artificial Sequence
  Description of Artificial Sequence: Synthetic oligonucleotide
  Sense strand starting at position 614 of SEQ ID NO: 915607
gcuaaaggcucuuccuaga

SEQ ID NO: 1092627 - RNA, 19 nt, Artificial Sequence
  Description of Artificial Sequence: Synthetic oligonucleotide
  Antisense strand to SEQ ID NO: 1092626
ucuaggaagagccuuuagc

SEQ ID NO: 1092628 - RNA, 19 nt, Artificial Sequence
  Description of Artificial Sequence: Synthetic oligonucleotide
  Sense strand starting at position 666 of SEQ ID NO: 915607
ccaaguacucucugaagua

SEQ ID NO: 1092629 - RNA, 19 nt, Artificial Sequence
  Description of Artificial Sequence: Synthetic oligonucleotide
  Antisense strand to SEQ ID NO: 1092628
uacuucagagaguacuugg

SEQ ID NO: 1092630 - RNA, 19 nt, Artificial Sequence
  Description of Artificial Sequence: Synthetic oligonucleotide
  Sense strand starting at position 841 of SEQ ID NO: 915607
aauuacuucgguuaacagu

SEQ ID NO: 1092631 - RNA, 19 nt, Artificial Sequence
  Description of Artificial Sequence: Synthetic oligonucleotide
  Antisense strand to SEQ ID NO: 1092630
acuguuaaccgaaguaauu

SEQ ID NO: 1092632 - RNA, 19 nt, Artificial Sequence
  Description of Artificial Sequence: Synthetic oligonucleotide
  Sense strand starting at position 1077 of SEQ ID NO: 915607
ggaccugugucuuugagag

SEQ ID NO: 1092633 - RNA, 19 nt, Artificial Sequence
  Description of Artificial Sequence: Synthetic oligonucleotide
  Antisense strand to SEQ ID NO: 1092632
cucucaaagacacaggucc

SEQ ID NO: 1092634 - RNA, 19 nt, Artificial Sequence
  Description of Artificial Sequence: Synthetic oligonucleotide
  Sense strand starting at position 1107 of SEQ ID NO: 915607
cacccugauccguguucuu

SEQ ID NO: 1092635 - RNA, 19 nt, Artificial Sequence
  Description of Artificial Sequence: Synthetic oligonucleotide
  Antisense strand to SEQ ID NO: 1092634
aagaacacggaucagggug

SEQ ID NO: 1092636 - RNA, 19 nt, Artificial Sequence
  Description of Artificial Sequence: Synthetic oligonucleotide
  Sense strand starting at position 1110 of SEQ ID NO: 915607
ccugauccguguucuuaga

SEQ ID NO: 1092637 - RNA, 19 nt, Artificial Sequence
  Description of Artificial Sequence: Synthetic oligonucleotide
  Antisense strand to SEQ ID NO: 1092636
ucuaagaacacggaucagg

SEQ ID NO: 1092638 - RNA, 19 nt, Artificial Sequence
  Description of Artificial Sequence: Synthetic oligonucleotide
  Sense strand starting at position 1121 of SEQ ID NO: 915607
uucuuagacccguagcguu

SEQ ID NO: 1092639 - RNA, 19 nt, Artificial Sequence
  Description of Artificial Sequence: Synthetic oligonucleotide
  Antisense strand to SEQ ID NO: 1092638
aacgcuacgggucuaagaa

SEQ ID NO: 1092640 - RNA, 19 nt, Artificial Sequence
  Description of Artificial Sequence: Synthetic oligonucleotide
  Sense strand starting at position 1143 of SEQ ID NO: 915607
gcgggaucauugagacgca

SEQ ID NO: 1092641 - RNA, 19 nt, Artificial Sequence
  Description of Artificial Sequence: Synthetic oligonucleotide
  Antisense strand to SEQ ID NO: 1092640
ugcgucucaaugaucccgc

SEQ ID NO: 1092642 - RNA, 19 nt, Artificial Sequence
  Description of Artificial Sequence: Synthetic oligonucleotide
  Sense strand starting at position 1146 of SEQ ID NO: 915607
ggaucauugagacgcauaa

SEQ ID NO: 1092643 - RNA, 19 nt, Artificial Sequence
  Description of Artificial Sequence: Synthetic oligonucleotide
  Antisense strand to SEQ ID NO: 1092642
uuaugcgucucaaugaucc

SEQ ID NO: 1092644 - RNA, 19 nt, Artificial Sequence
  Description of Artificial Sequence: Synthetic oligonucleotide
  Sense strand starting at position 1697 of SEQ ID NO: 915607
agaggcuuuccugauugga

SEQ ID NO: 1092645 - RNA, 19 nt, Artificial Sequence
  Description of Artificial Sequence: Synthetic oligonucleotide
  Antisense strand to SEQ ID NO: 1092644
uccaaucaggaaagccucu

SEQ ID NO: 1092646 - RNA, 19 nt, Artificial Sequence
  Description of Artificial Sequence: Synthetic oligonucleotide
  Sense strand starting at position 2212 of SEQ ID NO: 915607
agaguggucgugcagguau

SEQ ID NO: 1092647 - RNA, 19 nt, Artificial Sequence
  Description of Artificial Sequence: Synthetic oligonucleotide
  Antisense strand to SEQ ID NO: 1092646
auaccugcacgaccacucu

SEQ ID NO: 1092648 - RNA, 19 nt, Artificial Sequence
  Description of Artificial Sequence: Synthetic oligonucleotide
  Sense strand starting at position 2223 of SEQ ID NO: 915607
gcagguauacguuagaaau

SEQ ID NO: 1092649 - RNA, 19 nt, Artificial Sequence
  Description of Artificial Sequence: Synthetic oligonucleotide
  Antisense strand to SEQ ID NO: 1092648
auuucuaacguauaccugc

SEQ ID NO: 1092650 - RNA, 19 nt, Artificial Sequence
  Description of Artificial Sequence: Synthetic oligonucleotide
  Sense strand starting at position 2225 of SEQ ID NO: 915607
agguauacguuagaaauuu

SEQ ID NO: 1092651 - RNA, 19 nt, Artificial Sequence
  Description of Artificial Sequence: Synthetic oligonucleotide
  Antisense strand to SEQ ID NO: 1092650
aaauuucuaacguauaccu

SEQ ID NO: 1092652 - RNA, 19 nt, Artificial Sequence
  Description of Artificial Sequence: Synthetic oligonucleotide
  Sense strand starting at position 2325 of SEQ ID NO: 915607
ggacucuccugcuuccgaa

SEQ ID NO: 1092653 - RNA, 19 nt, Artificial Sequence
  Description of Artificial Sequence: Synthetic oligonucleotide
  Antisense strand to SEQ ID NO: 1092652
uucggaagcaggagagucc

SEQ ID NO: 1092654 - RNA, 19 nt, Artificial Sequence
  Description of Artificial Sequence: Synthetic oligonucleotide
  Sense strand starting at position 2337 of SEQ ID NO: 915607
uuccgaaucuggucugguu

SEQ ID NO: 1092655 - RNA, 19 nt, Artificial Sequence
  Description of Artificial Sequence: Synthetic oligonucleotide
  Antisense strand to SEQ ID NO: 1092654
aaccagaccagauucggaa

SEQ ID NO: 1092656 - RNA, 19 nt, Artificial Sequence
  Description of Artificial Sequence: Synthetic oligonucleotide
  Sense strand starting at position 2429 of SEQ ID NO: 915607
gcuuucguucgacuuguga

SEQ ID NO: 1092657 - RNA, 19 nt, Artificial Sequence
  Description of Artificial Sequence: Synthetic oligonucleotide
  Antisense strand to SEQ ID NO: 1092656
ucacaagucgaacgaaagc

SEQ ID NO: 1092658 - RNA, 19 nt, Artificial Sequence
  Description of Artificial Sequence: Synthetic oligonucleotide
  Sense strand starting at position 2431 of SEQ ID NO: 915607
uuucguucgacuugugauu

SEQ ID NO: 1092659 - RNA, 19 nt, Artificial Sequence
  Description of Artificial Sequence: Synthetic oligonucleotide
  Antisense strand to SEQ ID NO: 1092658
aaucacaagucgaacgaaa

SEQ ID NO: 1092660 - RNA, 19 nt, Artificial Sequence
  Description of Artificial Sequence: Synthetic oligonucleotide
  Sense strand starting at position 2436 of SEQ ID NO: 915607
uucgacuugugauucggau

SEQ ID NO: 1092661 - RNA, 19 nt, Artificial Sequence
  Description of Artificial Sequence: Synthetic oligonucleotide
  Antisense strand to SEQ ID NO: 1092660
auccgaaucacaagucgaa

SEQ ID NO: 1092662 - RNA, 19 nt, Artificial Sequence
  Description of Artificial Sequence: Synthetic oligonucleotide
  Sense strand starting at position 2462 of SEQ ID NO: 915607
ggaguucaagucgauaucu

SEQ ID NO: 1092663 - RNA, 19 nt, Artificial Sequence
  Description of Artificial Sequence: Synthetic oligonucleotide
  Antisense strand to SEQ ID NO: 1092662
agauaucgacuugaacucc

SEQ ID NO: 1092664 - RNA, 19 nt, Artificial Sequence
  Description of Artificial Sequence: Synthetic oligonucleotide
  Sense strand starting at position 2563 of SEQ ID NO: 915607
gugugucuguggucucauc

SEQ ID NO: 1092665 - RNA, 19 nt, Artificial Sequence
  Description of Artificial Sequence: Synthetic oligonucleotide
  Antisense strand to SEQ ID NO: 1092664
gaugagaccacagacacac

SEQ ID NO: 1092666 - RNA, 19 nt, Artificial Sequence
  Description of Artificial Sequence: Synthetic oligonucleotide
  Sense strand starting at position 2610 of SEQ ID NO: 915607
uuggacugcucaucagaca

SEQ ID NO: 1092667 - RNA, 19 nt, Artificial Sequence
  Description of Artificial Sequence: Synthetic oligonucleotide
  Antisense strand to SEQ ID NO: 1092666
ugucugaugagcaguccaa

SEQ ID NO: 1092668 - RNA, 19 nt, Artificial Sequence
  Description of Artificial Sequence: Synthetic oligonucleotide
  Sense strand starting at position 2611 of SEQ ID NO: 915607
uggacugcucaucagacau

SEQ ID NO: 1092669 - RNA, 19 nt, Artificial Sequence
  Description of Artificial Sequence: Synthetic oligonucleotide
  Antisense strand to SEQ ID NO: 1092668
augucugaugagcagucca

SEQ ID NO: 1092670 - RNA, 19 nt, Artificial Sequence
  Description of Artificial Sequence: Synthetic oligonucleotide
  Sense strand starting at position 2628 of SEQ ID NO: 915607
aucucaaaguccuugucuu

SEQ ID NO: 1092671 - RNA, 19 nt, Artificial Sequence
  Description of Artificial Sequence: Synthetic oligonucleotide
  Antisense strand to SEQ ID NO: 1092670
aagacaaggacuuugagau

SEQ ID NO: 1092672 - RNA, 19 nt, Artificial Sequence
  Description of Artificial Sequence: Synthetic oligonucleotide
  Sense strand starting at position 2819 of SEQ ID NO: 915607
guggguguucagcaguuua

SEQ ID NO: 1092673 - RNA, 19 nt, Artificial Sequence
  Description of Artificial Sequence: Synthetic oligonucleotide
  Antisense strand to SEQ ID NO: 1092672
uaaacugcugaacacccac

SEQ ID NO: 1092674 - RNA, 19 nt, Artificial Sequence
  Description of Artificial Sequence: Synthetic oligonucleotide
  Sense strand starting at position 3040 of SEQ ID NO: 915607
ccuggugagugggaagaaa

SEQ ID NO: 1092675 - RNA, 19 nt, Artificial Sequence
  Description of Artificial Sequence: Synthetic oligonucleotide
  Antisense strand to SEQ ID NO: 1092674
uuucuucccacucaccagg

SEQ ID NO: 1092676 - RNA, 19 nt, Artificial Sequence
  Description of Artificial Sequence: Synthetic oligonucleotide
  Sense strand starting at position 3275 of SEQ ID NO: 915607
gacccuggcugagaaagaa

SEQ ID NO: 1092677 - RNA, 19 nt, Artificial Sequence
  Description of Artificial Sequence: Synthetic oligonucleotide
  Antisense strand to SEQ ID NO: 1092676
uucuuucucagccaggguc

SEQ ID NO: 1092678 - RNA, 19 nt, Artificial Sequence
  Description of Artificial Sequence: Synthetic oligonucleotide
  Sense strand starting at position 3398 of SEQ ID NO: 915607
gaaauuaagugaccaggca

SEQ ID NO: 1092679 - RNA, 19 nt, Artificial Sequence
  Description of Artificial Sequence: Synthetic oligonucleotide
  Antisense strand to SEQ ID NO: 1092678
ugccuggucacuuaauuuc

SEQ ID NO: 1092680 - RNA, 19 nt, Artificial Sequence
  Description of Artificial Sequence: Synthetic oligonucleotide
  Sense strand starting at position 3529 of SEQ ID NO: 915607
cccaguugucccugccuga

SEQ ID NO: 1092681 - RNA, 19 nt, Artificial Sequence
  Description of Artificial Sequence: Synthetic oligonucleotide
  Antisense strand to SEQ ID NO: 1092680
ucaggcagggacaacuggg

SEQ ID NO: 1092682 - RNA, 19 nt, Artificial Sequence
  Description of Artificial Sequence: Synthetic oligonucleotide
  Sense strand starting at position 3532 of SEQ ID NO: 915607
aguugucccugccugacaa

SEQ ID NO: 1092683 - RNA, 19 nt, Artificial Sequence
  Description of Artificial Sequence: Synthetic oligonucleotide
  Antisense strand to SEQ ID NO: 1092682
uugucaggcagggacaacu

SEQ ID NO: 1092684 - RNA, 19 nt, Artificial Sequence
  Description of Artificial Sequence: Synthetic oligonucleotide
  Sense strand starting at position 3730 of SEQ ID NO: 915607
uccuguguauccucaagac

SEQ ID NO: 1092685 - RNA, 19 nt, Artificial Sequence
  Description of Artificial Sequence: Synthetic oligonucleotide
  Antisense strand to SEQ ID NO: 1092684
gucuugaggauacacagga

SEQ ID NO: 1092686 - RNA, 19 nt, Artificial Sequence
  Description of Artificial Sequence: Synthetic oligonucleotide
  Sense strand starting at position 3859 of SEQ ID NO: 915607
ggaagcauccgugauaacu

SEQ ID NO: 1092687 - RNA, 19 nt, Artificial Sequence
  Description of Artificial Sequence: Synthetic oligonucleotide
  Antisense strand to SEQ ID NO: 1092686
aguuaucacggaugcuucc

SEQ ID NO: 1092688 - RNA, 19 nt, Artificial Sequence
  Description of Artificial Sequence: Synthetic oligonucleotide
  Sense strand starting at position 3869 of SEQ ID NO: 915607
gugauaacuggcuggccaa

SEQ ID NO: 1092689 - RNA, 19 nt, Artificial Sequence
  Description of Artificial Sequence: Synthetic oligonucleotide
  Antisense strand to SEQ ID NO: 1092688
uuggccagccaguuaucac

SEQ ID NO: 1092690 - RNA, 19 nt, Artificial Sequence
  Description of Artificial Sequence: Synthetic oligonucleotide
  Sense strand starting at position 3870 of SEQ ID NO: 915607
ugauaacuggcuggccaau

SEQ ID NO: 1092691 - RNA, 19 nt, Artificial Sequence
  Description of Artificial Sequence: Synthetic oligonucleotide
  Antisense strand to SEQ ID NO: 1092690
auuggccagccaguuauca

SEQ ID NO: 1092692 - RNA, 19 nt, Artificial Sequence
  Description of Artificial Sequence: Synthetic oligonucleotide
  Sense strand starting at position 3901 of SEQ ID NO: 915607
auuguuuccuguuccaauc

SEQ ID NO: 1092693 - RNA, 19 nt, Artificial Sequence
  Description of Artificial Sequence: Synthetic oligonucleotide
  Antisense strand to SEQ ID NO: 1092692
gauuggaacaggaaacaau

SEQ ID NO: 1092694 - RNA, 19 nt, Artificial Sequence
  Description of Artificial Sequence: Synthetic oligonucleotide
  Sense strand starting at position 3962 of SEQ ID NO: 915607
uggagcuucuacuaauauu

SEQ ID NO: 1092695 - RNA, 19 nt, Artificial Sequence
  Description of Artificial Sequence: Synthetic oligonucleotide
  Antisense strand to SEQ ID NO: 1092694
aauauuaguagaagcucca

SEQ ID NO: 1092696 - RNA, 19 nt, Artificial Sequence
  Description of Artificial Sequence: Synthetic oligonucleotide
  Sense strand starting at position 10 of SEQ ID NO: 915608
gcgagagcacuuggaaaug

SEQ ID NO: 1092697 - RNA, 19 nt, Artificial Sequence
  Description of Artificial Sequence: Synthetic oligonucleotide
  Antisense strand to SEQ ID NO: 1092696
cauuuccaagugcucucgc

SEQ ID NO: 1092698 - RNA, 19 nt, Artificial Sequence
  Description of Artificial Sequence: Synthetic oligonucleotide
  Sense strand starting at position 21 of SEQ ID NO: 915608
uggaaaugaucauggauaa

SEQ ID NO: 1092699 - RNA, 19 nt, Artificial Sequence
  Description of Artificial Sequence: Synthetic oligonucleotide
  Antisense strand to SEQ ID NO: 1092698
uuauccaugaucauuucca

SEQ ID NO: 1092700 - RNA, 19 nt, Artificial Sequence
  Description of Artificial Sequence: Synthetic oligonucleotide
  Sense strand starting at position 182 of SEQ ID NO: 915608
gcuugacaacuuggagauu

SEQ ID NO: 1092701 - RNA, 19 nt, Artificial Sequence
  Description of Artificial Sequence: Synthetic oligonucleotide
  Antisense strand to SEQ ID NO: 1092700
aaucuccaaguugucaagc

SEQ ID NO: 1092702 - RNA, 19 nt, Artificial Sequence
  Description of Artificial Sequence: Synthetic oligonucleotide
  Sense strand starting at position 183 of SEQ ID NO: 915608
cuugacaacuuggagauua

SEQ ID NO: 1092703 - RNA, 19 nt, Artificial Sequence
  Description of Artificial Sequence: Synthetic oligonucleotide
  Antisense strand to SEQ ID NO: 1092702
uaaucuccaaguugucaag

SEQ ID NO: 1092704 - RNA, 19 nt, Artificial Sequence
  Description of Artificial Sequence: Synthetic oligonucleotide
  Sense strand starting at position 472 of SEQ ID NO: 915608
cagaaugucgaauguuuag

SEQ ID NO: 1092705 - RNA, 19 nt, Artificial Sequence
  Description of Artificial Sequence: Synthetic oligonucleotide
  Antisense strand to SEQ ID NO: 1092704
cuaaacauucgacauucug

SEQ ID NO: 1092706 - RNA, 19 nt, Artificial Sequence
  Description of Artificial Sequence: Synthetic oligonucleotide
  Sense strand starting at position 475 of SEQ ID NO: 915608
aaugucgaauguuuagaga

SEQ ID NO: 1092707 - RNA, 19 nt, Artificial Sequence
  Description of Artificial Sequence: Synthetic oligonucleotide
  Antisense strand to SEQ ID NO: 1092706
ucucuaaacauucgacauu

SEQ ID NO: 1092708 - RNA, 19 nt, Artificial Sequence
  Description of Artificial Sequence: Synthetic oligonucleotide
  Sense strand starting at position 478 of SEQ ID NO: 915608
gucgaauguuuagagauua

SEQ ID NO: 1092709 - RNA, 19 nt, Artificial Sequence
  Description of Artificial Sequence: Synthetic oligonucleotide
  Antisense strand to SEQ ID NO: 1092708
uaaucucuaaacauucgac

SEQ ID NO: 1092710 - RNA, 19 nt, Artificial Sequence
  Description of Artificial Sequence: Synthetic oligonucleotide
  Sense strand starting at position 531 of SEQ ID NO: 915608
ccgggauuagagcguuugu

SEQ ID NO: 1092711 - RNA, 19 nt, Artificial Sequence
  Description of Artificial Sequence: Synthetic oligonucleotide
  Antisense strand to SEQ ID NO: 1092710
acaaacgcucuaaucccgg

SEQ ID NO: 1092712 - RNA, 19 nt, Artificial Sequence
  Description of Artificial Sequence: Synthetic oligonucleotide
  Sense strand starting at position 552 of SEQ ID NO: 915608
acucuaaccugggaauaua

SEQ ID NO: 1092713 - RNA, 19 nt, Artificial Sequence
  Description of Artificial Sequence: Synthetic oligonucleotide
  Antisense strand to SEQ ID NO: 1092712
uauauucccagguuagagu

SEQ ID NO: 1092714 - RNA, 19 nt, Artificial Sequence
  Description of Artificial Sequence: Synthetic oligonucleotide
  Sense strand starting at position 755 of SEQ ID NO: 915608
ucaauauuauaggcguguu

SEQ ID NO: 1092715 - RNA, 19 nt, Artificial Sequence
  Description of Artificial Sequence: Synthetic oligonucleotide
  Antisense strand to SEQ ID NO: 1092714
aacacgccuauaauauuga

SEQ ID NO: 1092716 - RNA, 19 nt, Artificial Sequence
  Description of Artificial Sequence: Synthetic oligonucleotide
  Sense strand starting at position 758 of SEQ ID NO: 915608
auauuauaggcguguucuc

SEQ ID NO: 1092717 - RNA, 19 nt, Artificial Sequence
  Description of Artificial Sequence: Synthetic oligonucleotide
  Antisense strand to SEQ ID NO: 1092716
gagaacacgccuauaauau

SEQ ID NO: 1092718 - RNA, 19 nt, Artificial Sequence
  Description of Artificial Sequence: Synthetic oligonucleotide
  Sense strand starting at position 763 of SEQ ID NO: 915608
auaggcguguucucaauau

SEQ ID NO: 1092719 - RNA, 19 nt, Artificial Sequence
  Description of Artificial Sequence: Synthetic oligonucleotide
  Antisense strand to SEQ ID NO: 1092718
auauugagaacacgccuau

SEQ ID NO: 1092720 - RNA, 19 nt, Artificial Sequence
  Description of Artificial Sequence: Synthetic oligonucleotide
  Sense strand starting at position 767 of SEQ ID NO: 915608
gcguguucucaauauuaaa

SEQ ID NO: 1092721 - RNA, 19 nt, Artificial Sequence
  Description of Artificial Sequence: Synthetic oligonucleotide
  Antisense strand to SEQ ID NO: 1092720
uuuaauauugagaacacgc

SEQ ID NO: 1092722 - RNA, 19 nt, Artificial Sequence
  Description of Artificial Sequence: Synthetic oligonucleotide
  Sense strand starting at position 798 of SEQ ID NO: 915608
aaaguuauagcuggcaacu

SEQ ID NO: 1092723 - RNA, 19 nt, Artificial Sequence
  Description of Artificial Sequence: Synthetic oligonucleotide
  Antisense strand to SEQ ID NO: 1092722
aguugccagcuauaacuuu

SEQ ID NO: 1092724 - RNA, 19 nt, Artificial Sequence
  Description of Artificial Sequence: Synthetic oligonucleotide
  Sense strand starting at position 810 of SEQ ID NO: 915608
ggcaacugcuuccucuaaa

SEQ ID NO: 1092725 - RNA, 19 nt, Artificial Sequence
  Description of Artificial Sequence: Synthetic oligonucleotide
  Antisense strand to SEQ ID NO: 1092724
uuuagaggaagcaguugcc

SEQ ID NO: 1092726 - RNA, 19 nt, Artificial Sequence
  Description of Artificial Sequence: Synthetic oligonucleotide
  Sense strand starting at position 811 of SEQ ID NO: 915608
gcaacugcuuccucuaaag

SEQ ID NO: 1092727 - RNA, 19 nt, Artificial Sequence
  Description of Artificial Sequence: Synthetic oligonucleotide
  Antisense strand to SEQ ID NO: 1092726
cuuuagaggaagcaguugc

SEQ ID NO: 1092728 - RNA, 19 nt, Artificial Sequence
  Description of Artificial Sequence: Synthetic oligonucleotide
  Sense strand starting at position 949 of SEQ ID NO: 915608
ugcccucuauucuaaggaa

SEQ ID NO: 1092729 - RNA, 19 nt, Artificial Sequence
  Description of Artificial Sequence: Synthetic oligonucleotide
  Antisense strand to SEQ ID NO: 1092728
uuccuuagaauagagggca

SEQ ID NO: 1092730 - RNA, 19 nt, Artificial Sequence
  Description of Artificial Sequence: Synthetic oligonucleotide
  Sense strand starting at position 1078 of SEQ ID NO: 915608
uuaaguuacuguuccagac

SEQ ID NO: 1092731 - RNA, 19 nt, Artificial Sequence
  Description of Artificial Sequence: Synthetic oligonucleotide
  Antisense strand to SEQ ID NO: 1092730
gucuggaacaguaacuuaa

SEQ ID NO: 1092732 - RNA, 19 nt, Artificial Sequence
  Description of Artificial Sequence: Synthetic oligonucleotide
  Sense strand starting at position 1150 of SEQ ID NO: 915608
aucuuaauccagcaaguug

SEQ ID NO: 1092733 - RNA, 19 nt, Artificial Sequence
  Description of Artificial Sequence: Synthetic oligonucleotide
  Antisense strand to SEQ ID NO: 1092732
caacuugcuggauuaagau

SEQ ID NO: 1092734 - RNA, 19 nt, Artificial Sequence
  Description of Artificial Sequence: Synthetic oligonucleotide
  Sense strand starting at position 1161 of SEQ ID NO: 915608
gcaaguugcaucgaguugu

SEQ ID NO: 1092735 - RNA, 19 nt, Artificial Sequence
  Description of Artificial Sequence: Synthetic oligonucleotide
  Antisense strand to SEQ ID NO: 1092734
acaacucgaugcaacuugc

SEQ ID NO: 1092736 - RNA, 19 nt, Artificial Sequence
  Description of Artificial Sequence: Synthetic oligonucleotide
  Sense strand starting at position 1165 of SEQ ID NO: 915608
guugcaucgaguugucauu

SEQ ID NO: 1092737 - RNA, 19 nt, Artificial Sequence
  Description of Artificial Sequence: Synthetic oligonucleotide
  Antisense strand to SEQ ID NO: 1092736
aaugacaacucgaugcaac

SEQ ID NO: 1092738 - RNA, 19 nt, Artificial Sequence
  Description of Artificial Sequence: Synthetic oligonucleotide
  Sense strand starting at position 1167 of SEQ ID NO: 915608
ugcaucgaguugucauugu

SEQ ID NO: 1092739 - RNA, 19 nt, Artificial Sequence
  Description of Artificial Sequence: Synthetic oligonucleotide
  Antisense strand to SEQ ID NO: 1092738
acaaugacaacucgaugca

SEQ ID NO: 1092740 - RNA, 19 nt, Artificial Sequence
  Description of Artificial Sequence: Synthetic oligonucleotide
  Sense strand starting at position 1171 of SEQ ID NO: 915608
ucgaguugucauuguuccu

SEQ ID NO: 1092741 - RNA, 19 nt, Artificial Sequence
  Description of Artificial Sequence: Synthetic oligonucleotide
  Antisense strand to SEQ ID NO: 1092740
aggaacaaugacaacucga

SEQ ID NO: 1092742 - RNA, 19 nt, Artificial Sequence
  Description of Artificial Sequence: Synthetic oligonucleotide
  Sense strand starting at position 1214 of SEQ ID NO: 915608
gugcacaucauccgcgaau

SEQ ID NO: 1092743 - RNA, 19 nt, Artificial Sequence
  Description of Artificial Sequence: Synthetic oligonucleotide
  Antisense strand to SEQ ID NO: 1092742
auucgcggaugaugugcac

SEQ ID NO: 1092744 - RNA, 19 nt, Artificial Sequence
  Description of Artificial Sequence: Synthetic oligonucleotide
  Sense strand starting at position 1215 of SEQ ID NO: 915608
ugcacaucauccgcgaaua

SEQ ID NO: 1092745 - RNA, 19 nt, Artificial Sequence
  Description of Artificial Sequence: Synthetic oligonucleotide
  Antisense strand to SEQ ID NO: 1092744
uauucgcggaugaugugca

SEQ ID NO: 1092746 - RNA, 19 nt, Artificial Sequence
  Description of Artificial Sequence: Synthetic oligonucleotide
  Sense strand starting at position 1216 of SEQ ID NO: 915608
gcacaucauccgcgaauac

SEQ ID NO: 1092747 - RNA, 19 nt, Artificial Sequence
  Description of Artificial Sequence: Synthetic oligonucleotide
  Antisense strand to SEQ ID NO: 1092746
guauucgcggaugaugugc

SEQ ID NO: 1092748 - RNA, 19 nt, Artificial Sequence
  Description of Artificial Sequence: Synthetic oligonucleotide
  Sense strand starting at position 1227 of SEQ ID NO: 915608
gcgaauacguggaaggaca

SEQ ID NO: 1092749 - RNA, 19 nt, Artificial Sequence
  Description of Artificial Sequence: Synthetic oligonucleotide
  Antisense strand to SEQ ID NO: 1092748
uguccuuccacguauucgc

SEQ ID NO: 1092750 - RNA, 19 nt, Artificial Sequence
  Description of Artificial Sequence: Synthetic oligonucleotide
  Sense strand starting at position 3168 of SEQ ID NO: 915608
gaucuuguaguccagacaa

SEQ ID NO: 1092751 - RNA, 19 nt, Artificial Sequence
  Description of Artificial Sequence: Synthetic oligonucleotide
  Antisense strand to SEQ ID NO: 1092750
uugucuggacuacaagauc

SEQ ID NO: 1092752 - RNA, 19 nt, Artificial Sequence
  Description of Artificial Sequence: Synthetic oligonucleotide
  Sense strand starting at position 3170 of SEQ ID NO: 915608
ucuuguaguccagacaaca

SEQ ID NO: 1092753 - RNA, 19 nt, Artificial Sequence
  Description of Artificial Sequence: Synthetic oligonucleotide
  Antisense strand to SEQ ID NO: 1092752
uguugucuggacuacaaga

SEQ ID NO: 1092754 - RNA, 19 nt, Artificial Sequence
  Description of Artificial Sequence: Synthetic oligonucleotide
  Sense strand starting at position 3321 of SEQ ID NO: 915608
cagggaguuccgugaccuc

SEQ ID NO: 1092755 - RNA, 19 nt, Artificial Sequence
  Description of Artificial Sequence: Synthetic oligonucleotide
  Antisense strand to SEQ ID NO: 1092754
gaggucacggaacucccug

SEQ ID NO: 1092756 - RNA, 19 nt, Artificial Sequence
  Description of Artificial Sequence: Synthetic oligonucleotide
  Sense strand starting at position 3324 of SEQ ID NO: 915608
ggaguuccgugaccucuau

SEQ ID NO: 1092757 - RNA, 19 nt, Artificial Sequence
  Description of Artificial Sequence: Synthetic oligonucleotide
  Antisense strand to SEQ ID NO: 1092756
auagaggucacggaacucc

SEQ ID NO: 1092758 - RNA, 19 nt, Artificial Sequence
  Description of Artificial Sequence: Synthetic oligonucleotide
  Sense strand starting at position 3328 of SEQ ID NO: 915608
uuccgugaccucuaugaca

SEQ ID NO: 1092759 - RNA, 19 nt, Artificial Sequence
  Description of Artificial Sequence: Synthetic oligonucleotide
  Antisense strand to SEQ ID NO: 1092758
ugucauagaggucacggaa

SEQ ID NO: 1092760 - RNA, 19 nt, Artificial Sequence
  Description of Artificial Sequence: Synthetic oligonucleotide
  Sense strand starting at position 3330 of SEQ ID NO: 915608
ccgugaccucuaugacaac

SEQ ID NO: 1092761 - RNA, 19 nt, Artificial Sequence
  Description of Artificial Sequence: Synthetic oligonucleotide
  Antisense strand to SEQ ID NO: 1092760
guugucauagaggucacgg

SEQ ID NO: 1092762 - RNA, 19 nt, Artificial Sequence
  Description of Artificial Sequence: Synthetic oligonucleotide
  Sense strand starting at position 3374 of SEQ ID NO: 915608
cuuucagcauucgggugaa

SEQ ID NO: 1092763 - RNA, 19 nt, Artificial Sequence
  Description of Artificial Sequence: Synthetic oligonucleotide
  Antisense strand to SEQ ID NO: 1092762
uucacccgaaugcugaaag

SEQ ID NO: 1092764 - RNA, 19 nt, Artificial Sequence
  Description of Artificial Sequence: Synthetic oligonucleotide
  Sense strand starting at position 3434 of SEQ ID NO: 915608
agaaguugagguuggcaua

SEQ ID NO: 1092765 - RNA, 19 nt, Artificial Sequence
  Description of Artificial Sequence: Synthetic oligonucleotide
  Antisense strand to SEQ ID NO: 1092764
uaugccaaccucaacuucu

SEQ ID NO: 1092766 - RNA, 19 nt, Artificial Sequence
  Description of Artificial Sequence: Synthetic oligonucleotide
  Sense strand starting at position 3511 of SEQ ID NO: 915608
gugugaauuggagcguguu

SEQ ID NO: 1092767 - RNA, 19 nt, Artificial Sequence
  Description of Artificial Sequence: Synthetic oligonucleotide
  Antisense strand to SEQ ID NO: 1092766
aacacgcuccaauucacac

SEQ ID NO: 1092768 - RNA, 19 nt, Artificial Sequence
  Description of Artificial Sequence: Synthetic oligonucleotide
  Sense strand starting at position 3565 of SEQ ID NO: 915608
gggaccagccagugucaaa

SEQ ID NO: 1092769 - RNA, 19 nt, Artificial Sequence
  Description of Artificial Sequence: Synthetic oligonucleotide
  Antisense strand to SEQ ID NO: 1092768
uuugacacuggcugguccc

SEQ ID NO: 1092770 - RNA, 19 nt, Artificial Sequence
  Description of Artificial Sequence: Synthetic oligonucleotide
  Sense strand starting at position 3699 of SEQ ID NO: 915608
gggccaucauccuccacaa

SEQ ID NO: 1092771 - RNA, 19 nt, Artificial Sequence
  Description of Artificial Sequence: Synthetic oligonucleotide
  Antisense strand to SEQ ID NO: 1092770
uuguggaggaugauggccc

SEQ ID NO: 1092772 - RNA, 19 nt, Artificial Sequence
  Description of Artificial Sequence: Synthetic oligonucleotide
  Sense strand starting at position 3822 of SEQ ID NO: 915608
cuugacuuuggcugguaga

SEQ ID NO: 1092773 - RNA, 19 nt, Artificial Sequence
  Description of Artificial Sequence: Synthetic oligonucleotide
  Antisense strand to SEQ ID NO: 1092772
ucuaccagccaaagucaag

SEQ ID NO: 1092774 - RNA, 19 nt, Artificial Sequence
  Description of Artificial Sequence: Synthetic oligonucleotide
  Sense strand starting at position 3825 of SEQ ID NO: 915608
gacuuuggcugguagacau

SEQ ID NO: 1092775 - RNA, 19 nt, Artificial Sequence
  Description of Artificial Sequence: Synthetic oligonucleotide
  Antisense strand to SEQ ID NO: 1092774
augucuaccagccaaaguc

SEQ ID NO: 1092776 - RNA, 19 nt, Artificial Sequence
  Description of Artificial Sequence: Synthetic oligonucleotide
  Sense strand starting at position 45 of SEQ ID NO: 915609
cagaaugucgaauguuuag

SEQ ID NO: 1092777 - RNA, 19 nt, Artificial Sequence
  Description of Artificial Sequence: Synthetic oligonucleotide
  Antisense strand to SEQ ID NO: 1092776
cuaaacauucgacauucug

SEQ ID NO: 1092778 - RNA, 19 nt, Artificial Sequence
  Description of Artificial Sequence: Synthetic oligonucleotide
  Sense strand starting at position 48 of SEQ ID NO: 915609
aaugucgaauguuuagaga

SEQ ID NO: 1092779 - RNA, 19 nt, Artificial Sequence
  Description of Artificial Sequence: Synthetic oligonucleotide
  Antisense strand to SEQ ID NO: 1092778
ucucuaaacauucgacauu

SEQ ID NO: 1092780 - RNA, 19 nt, Artificial Sequence
  Description of Artificial Sequence: Synthetic oligonucleotide
  Sense strand starting at position 51 of SEQ ID NO: 915609
gucgaauguuuagagauua

SEQ ID NO: 1092781 - RNA, 19 nt, Artificial Sequence
  Description of Artificial Sequence: Synthetic oligonucleotide
  Antisense strand to SEQ ID NO: 1092780
uaaucucuaaacauucgac

SEQ ID NO: 1092782 - RNA, 19 nt, Artificial Sequence
  Description of Artificial Sequence: Synthetic oligonucleotide
  Sense strand starting at position 104 of SEQ ID NO: 915609
ccgggauuagagcguuugu

SEQ ID NO: 1092783 - RNA, 19 nt, Artificial Sequence
  Description of Artificial Sequence: Synthetic oligonucleotide
  Antisense strand to SEQ ID NO: 1092782
acaaacgcucuaaucccgg

SEQ ID NO: 1092784 - RNA, 19 nt, Artificial Sequence
  Description of Artificial Sequence: Synthetic oligonucleotide
  Sense strand starting at position 125 of SEQ ID NO: 915609
acucuaaccugggaauaua

SEQ ID NO: 1092785 - RNA, 19 nt, Artificial Sequence
  Description of Artificial Sequence: Synthetic oligonucleotide
  Antisense strand to SEQ ID NO: 1092784
uauauucccagguuagagu

SEQ ID NO: 1092786 - RNA, 19 nt, Artificial Sequence
  Description of Artificial Sequence: Synthetic oligonucleotide
  Sense strand starting at position 328 of SEQ ID NO: 915609
ucaauauuauaggcguguu

SEQ ID NO: 1092787 - RNA, 19 nt, Artificial Sequence
  Description of Artificial Sequence: Synthetic oligonucleotide
  Antisense strand to SEQ ID NO: 1092786
aacacgccuauaauauuga

SEQ ID NO: 1092788 - RNA, 19 nt, Artificial Sequence
  Description of Artificial Sequence: Synthetic oligonucleotide
  Sense strand starting at position 331 of SEQ ID NO: 915609
auauuauaggcguguucuc

SEQ ID NO: 1092789 - RNA, 19 nt, Artificial Sequence
  Description of Artificial Sequence: Synthetic oligonucleotide
  Antisense strand to SEQ ID NO: 1092788
gagaacacgccuauaauau

SEQ ID NO: 1092790 - RNA, 19 nt, Artificial Sequence
  Description of Artificial Sequence: Synthetic oligonucleotide
  Sense strand starting at position 336 of SEQ ID NO: 915609
auaggcguguucucaauau

SEQ ID NO: 1092791 - RNA, 19 nt, Artificial Sequence
  Description of Artificial Sequence: Synthetic oligonucleotide
  Antisense strand to SEQ ID NO: 1092790
auauugagaacacgccuau

SEQ ID NO: 1092792 - RNA, 19 nt, Artificial Sequence
  Description of Artificial Sequence: Synthetic oligonucleotide
  Sense strand starting at position 340 of SEQ ID NO: 915609
gcguguucucaauauuaaa

SEQ ID NO: 1092793 - RNA, 19 nt, Artificial Sequence
  Description of Artificial Sequence: Synthetic oligonucleotide
  Antisense strand to SEQ ID NO: 1092792
uuuaauauugagaacacgc

SEQ ID NO: 1092794 - RNA, 19 nt, Artificial Sequence
  Description of Artificial Sequence: Synthetic oligonucleotide
  Sense strand starting at position 371 of SEQ ID NO: 915609
aaaguuauagcuggcaacu

SEQ ID NO: 1092795 - RNA, 19 nt, Artificial Sequence
  Description of Artificial Sequence: Synthetic oligonucleotide
  Antisense strand to SEQ ID NO: 1092794
aguugccagcuauaacuuu

SEQ ID NO: 1092796 - RNA, 19 nt, Artificial Sequence
  Description of Artificial Sequence: Synthetic oligonucleotide
  Sense strand starting at position 383 of SEQ ID NO: 915609
ggcaacugcuuccucuaaa

SEQ ID NO: 1092797 - RNA, 19 nt, Artificial Sequence
  Description of Artificial Sequence: Synthetic oligonucleotide
  Antisense strand to SEQ ID NO: 1092796
uuuagaggaagcaguugcc

SEQ ID NO: 1092798 - RNA, 19 nt, Artificial Sequence
  Description of Artificial Sequence: Synthetic oligonucleotide
  Sense strand starting at position 384 of SEQ ID NO: 915609
gcaacugcuuccucuaaag

SEQ ID NO: 1092799 - RNA, 19 nt, Artificial Sequence
  Description of Artificial Sequence: Synthetic oligonucleotide
  Antisense strand to SEQ ID NO: 1092798
cuuuagaggaagcaguugc

SEQ ID NO: 1092800 - RNA, 19 nt, Artificial Sequence
  Description of Artificial Sequence: Synthetic oligonucleotide
  Sense strand starting at position 522 of SEQ ID NO: 915609
ugcccucuauucuaaggaa

SEQ ID NO: 1092801 - RNA, 19 nt, Artificial Sequence
  Description of Artificial Sequence: Synthetic oligonucleotide
  Antisense strand to SEQ ID NO: 1092800
uuccuuagaauagagggca

SEQ ID NO: 1092802 - RNA, 19 nt, Artificial Sequence
  Description of Artificial Sequence: Synthetic oligonucleotide
  Sense strand starting at position 651 of SEQ ID NO: 915609
uuaaguuacuguuccagac

SEQ ID NO: 1092803 - RNA, 19 nt, Artificial Sequence
  Description of Artificial Sequence: Synthetic oligonucleotide
  Antisense strand to SEQ ID NO: 1092802
gucuggaacaguaacuuaa

SEQ ID NO: 1092804 - RNA, 19 nt, Artificial Sequence
  Description of Artificial Sequence: Synthetic oligonucleotide
  Sense strand starting at position 723 of SEQ ID NO: 915609
aucuuaauccagcaaguug

SEQ ID NO: 1092805 - RNA, 19 nt, Artificial Sequence
  Description of Artificial Sequence: Synthetic oligonucleotide
  Antisense strand to SEQ ID NO: 1092804
caacuugcuggauuaagau

SEQ ID NO: 1092806 - RNA, 19 nt, Artificial Sequence
  Description of Artificial Sequence: Synthetic oligonucleotide
  Sense strand starting at position 734 of SEQ ID NO: 915609
gcaaguugcaucgaguugu

SEQ ID NO: 1092807 - RNA, 19 nt, Artificial Sequence
  Description of Artificial Sequence: Synthetic oligonucleotide
  Antisense strand to SEQ ID NO: 1092806
acaacucgaugcaacuugc

SEQ ID NO: 1092808 - RNA, 19 nt, Artificial Sequence
  Description of Artificial Sequence: Synthetic oligonucleotide
  Sense strand starting at position 738 of SEQ ID NO: 915609
guugcaucgaguugucauu

SEQ ID NO: 1092809 - RNA, 19 nt, Artificial Sequence
  Description of Artificial Sequence: Synthetic oligonucleotide
  Antisense strand to SEQ ID NO: 1092808
aaugacaacucgaugcaac

SEQ ID NO: 1092810 - RNA, 19 nt, Artificial Sequence
  Description of Artificial Sequence: Synthetic oligonucleotide
  Sense strand starting at position 740 of SEQ ID NO: 915609
ugcaucgaguugucauugu

SEQ ID NO: 1092811 - RNA, 19 nt, Artificial Sequence
  Description of Artificial Sequence: Synthetic oligonucleotide
  Antisense strand to SEQ ID NO: 1092810
acaaugacaacucgaugca

SEQ ID NO: 1092812 - RNA, 19 nt, Artificial Sequence
  Description of Artificial Sequence: Synthetic oligonucleotide
  Sense strand starting at position 744 of SEQ ID NO: 915609
ucgaguugucauuguuccu

SEQ ID NO: 1092813 - RNA, 19 nt, Artificial Sequence
  Description of Artificial Sequence: Synthetic oligonucleotide
  Antisense strand to SEQ ID NO: 1092812
aggaacaaugacaacucga

SEQ ID NO: 1092814 - RNA, 19 nt, Artificial Sequence
  Description of Artificial Sequence: Synthetic oligonucleotide
  Sense strand starting at position 787 of SEQ ID NO: 915609
gugcacaucauccgcgaau

SEQ ID NO: 1092815 - RNA, 19 nt, Artificial Sequence
  Description of Artificial Sequence: Synthetic oligonucleotide
  Antisense strand to SEQ ID NO: 1092814
auucgcggaugaugugcac

SEQ ID NO: 1092816 - RNA, 19 nt, Artificial Sequence
  Description of Artificial Sequence: Synthetic oligonucleotide
  Sense strand starting at position 788 of SEQ ID NO: 915609
ugcacaucauccgcgaaua

SEQ ID NO: 1092817 - RNA, 19 nt, Artificial Sequence
  Description of Artificial Sequence: Synthetic oligonucleotide
  Antisense strand to SEQ ID NO: 1092816
uauucgcggaugaugugca

SEQ ID NO: 1092818 - RNA, 19 nt, Artificial Sequence
  Description of Artificial Sequence: Synthetic oligonucleotide
  Sense strand starting at position 789 of SEQ ID NO: 915609
gcacaucauccgcgaauac

SEQ ID NO: 1092819 - RNA, 19 nt, Artificial Sequence
  Description of Artificial Sequence: Synthetic oligonucleotide
  Antisense strand to SEQ ID NO: 1092818
guauucgcggaugaugugc

SEQ ID NO: 1092820 - RNA, 19 nt, Artificial Sequence
  Description of Artificial Sequence: Synthetic oligonucleotide
  Sense strand starting at position 800 of SEQ ID NO: 915609
gcgaauacguggaaggaca

SEQ ID NO: 1092821 - RNA, 19 nt, Artificial Sequence
  Description of Artificial Sequence: Synthetic oligonucleotide
  Antisense strand to SEQ ID NO: 1092820
uguccuuccacguauucgc

SEQ ID NO: 1092822 - RNA, 19 nt, Artificial Sequence
  Description of Artificial Sequence: Synthetic oligonucleotide
  Sense strand starting at position 2741 of SEQ ID NO: 915609
gaucuuguaguccagacaa

SEQ ID NO: 1092823 - RNA, 19 nt, Artificial Sequence
  Description of Artificial Sequence: Synthetic oligonucleotide
  Antisense strand to SEQ ID NO: 1092822
uugucuggacuacaagauc

SEQ ID NO: 1092824 - RNA, 19 nt, Artificial Sequence
  Description of Artificial Sequence: Synthetic oligonucleotide
  Sense strand starting at position 2743 of SEQ ID NO: 915609
ucuuguaguccagacaaca

SEQ ID NO: 1092825 - RNA, 19 nt, Artificial Sequence
  Description of Artificial Sequence: Synthetic oligonucleotide
  Antisense strand to SEQ ID NO: 1092824
uguugucuggacuacaaga

SEQ ID NO: 1092826 - RNA, 19 nt, Artificial Sequence
  Description of Artificial Sequence: Synthetic oligonucleotide
  Sense strand starting at position 2894 of SEQ ID NO: 915609
cagggaguuccgugaccuc

SEQ ID NO: 1092827 - RNA, 19 nt, Artificial Sequence
  Description of Artificial Sequence: Synthetic oligonucleotide
  Antisense strand to SEQ ID NO: 1092826
gaggucacggaacucccug

SEQ ID NO: 1092828 - RNA, 19 nt, Artificial Sequence
  Description of Artificial Sequence: Synthetic oligonucleotide
  Sense strand starting at position 2897 of SEQ ID NO: 915609
ggaguuccgugaccucuau

SEQ ID NO: 1092829 - RNA, 19 nt, Artificial Sequence
  Description of Artificial Sequence: Synthetic oligonucleotide
  Antisense strand to SEQ ID NO: 1092828
auagaggucacggaacucc

SEQ ID NO: 1092830 - RNA, 19 nt, Artificial Sequence
  Description of Artificial Sequence: Synthetic oligonucleotide
  Sense strand starting at position 2901 of SEQ ID NO: 915609
uuccgugaccucuaugaca

SEQ ID NO: 1092831 - RNA, 19 nt, Artificial Sequence
  Description of Artificial Sequence: Synthetic oligonucleotide
  Antisense strand to SEQ ID NO: 1092830
ugucauagaggucacggaa

SEQ ID NO: 1092832 - RNA, 19 nt, Artificial Sequence
  Description of Artificial Sequence: Synthetic oligonucleotide
  Sense strand starting at position 2903 of SEQ ID NO: 915609
ccgugaccucuaugacaac

SEQ ID NO: 1092833 - RNA, 19 nt, Artificial Sequence
  Description of Artificial Sequence: Synthetic oligonucleotide
  Antisense strand to SEQ ID NO: 1092832
guugucauagaggucacgg

SEQ ID NO: 1092834 - RNA, 19 nt, Artificial Sequence
  Description of Artificial Sequence: Synthetic oligonucleotide
  Sense strand starting at position 3007 of SEQ ID NO: 915609
agaaguugagguuggcaua

SEQ ID NO: 1092835 - RNA, 19 nt, Artificial Sequence
  Description of Artificial Sequence: Synthetic oligonucleotide
  Antisense strand to SEQ ID NO: 1092834
uaugccaaccucaacuucu

SEQ ID NO: 1092836 - RNA, 19 nt, Artificial Sequence
  Description of Artificial Sequence: Synthetic oligonucleotide
  Sense strand starting at position 3084 of SEQ ID NO: 915609
gugugaauuggagcguguu

SEQ ID NO: 1092837 - RNA, 19 nt, Artificial Sequence
  Description of Artificial Sequence: Synthetic oligonucleotide
  Antisense strand to SEQ ID NO: 1092836
aacacgcuccaauucacac

SEQ ID NO: 1092838 - RNA, 19 nt, Artificial Sequence
  Description of Artificial Sequence: Synthetic oligonucleotide
  Sense strand starting at position 3138 of SEQ ID NO: 915609
gggaccagccagugucaaa

SEQ ID NO: 1092839 - RNA, 19 nt, Artificial Sequence
  Description of Artificial Sequence: Synthetic oligonucleotide
  Antisense strand to SEQ ID NO: 1092838
uuugacacuggcugguccc

SEQ ID NO: 1092840 - RNA, 19 nt, Artificial Sequence
  Description of Artificial Sequence: Synthetic oligonucleotide
  Sense strand starting at position 3272 of SEQ ID NO: 915609
gggccaucauccuccacaa

SEQ ID NO: 1092841 - RNA, 19 nt, Artificial Sequence
  Description of Artificial Sequence: Synthetic oligonucleotide
  Antisense strand to SEQ ID NO: 1092840
uuguggaggaugauggccc

SEQ ID NO: 1092842 - RNA, 19 nt, Artificial Sequence
  Description of Artificial Sequence: Synthetic oligonucleotide
  Sense strand starting at position 3395 of SEQ ID NO: 915609
cuugacuuuggcugguaga

SEQ ID NO: 1092843 - RNA, 19 nt, Artificial Sequence
  Description of Artificial Sequence: Synthetic oligonucleotide
  Antisense strand to SEQ ID NO: 1092842
ucuaccagccaaagucaag

SEQ ID NO: 1092844 - RNA, 19 nt, Artificial Sequence
  Description of Artificial Sequence: Synthetic oligonucleotide
  Sense strand starting at position 3666 of SEQ ID NO: 915609
ccacguucgucuuugcaga

SEQ ID NO: 1092845 - RNA, 19 nt, Artificial Sequence
  Description of Artificial Sequence: Synthetic oligonucleotide
  Antisense strand to SEQ ID NO: 1092844
ucugcaaagacgaacgugg

SEQ ID NO: 1092846 - RNA, 19 nt, Artificial Sequence
  Description of Artificial Sequence: Synthetic oligonucleotide
  Sense strand starting at position 3695 of SEQ ID NO: 915609
aaaugauugcuuugguguu

SEQ ID NO: 1092847 - RNA, 19 nt, Artificial Sequence
  Description of Artificial Sequence: Synthetic oligonucleotide
  Antisense strand to SEQ ID NO: 1092846
aacaccaaagcaaucauuu

SEQ ID NO: 1092848 - RNA, 19 nt, Artificial Sequence
  Description of Artificial Sequence: Synthetic oligonucleotide
  Sense strand starting at position 3714 of SEQ ID NO: 915609
cuugguuucugguuuauca

SEQ ID NO: 1092849 - RNA, 19 nt, Artificial Sequence
  Description of Artificial Sequence: Synthetic oligonucleotide
  Antisense strand to SEQ ID NO: 1092848
ugauaaaccagaaaccaag

SEQ ID NO: 1092850 - RNA, 19 nt, Artificial Sequence
  Description of Artificial Sequence: Synthetic oligonucleotide
  Sense strand starting at position 3716 of SEQ ID NO: 915609
ugguuucugguuuaucaga

SEQ ID NO: 1092851 - RNA, 19 nt, Artificial Sequence
  Description of Artificial Sequence: Synthetic oligonucleotide
  Antisense strand to SEQ ID NO: 1092850
ucugauaaaccagaaacca

SEQ ID NO: 1092852 - RNA, 19 nt, Artificial Sequence
  Description of Artificial Sequence: Synthetic oligonucleotide
  Sense strand starting at position 3718 of SEQ ID NO: 915609
guuucugguuuaucagaaa

SEQ ID NO: 1092853 - RNA, 19 nt, Artificial Sequence
  Description of Artificial Sequence: Synthetic oligonucleotide
  Antisense strand to SEQ ID NO: 1092852
uuucugauaaaccagaaac

SEQ ID NO: 1092854 - RNA, 19 nt, Artificial Sequence
  Description of Artificial Sequence: Synthetic oligonucleotide
  Sense strand starting at position 3721 of SEQ ID NO: 915609
ucugguuuaucagaaacuu

SEQ ID NO: 1092855 - RNA, 19 nt, Artificial Sequence
  Description of Artificial Sequence: Synthetic oligonucleotide
  Antisense strand to SEQ ID NO: 1092854
aaguuucugauaaaccaga

SEQ ID NO: 1092856 - RNA, 19 nt, Artificial Sequence
  Description of Artificial Sequence: Synthetic oligonucleotide
  Sense strand starting at position 38 of SEQ ID NO: 915610
gcgagagcacuuggaaaug

SEQ ID NO: 1092857 - RNA, 19 nt, Artificial Sequence
  Description of Artificial Sequence: Synthetic oligonucleotide
  Antisense strand to SEQ ID NO: 1092856
cauuuccaagugcucucgc

SEQ ID NO: 1092858 - RNA, 19 nt, Artificial Sequence
  Description of Artificial Sequence: Synthetic oligonucleotide
  Sense strand starting at position 49 of SEQ ID NO: 915610
uggaaaugaucauggauaa

SEQ ID NO: 1092859 - RNA, 19 nt, Artificial Sequence
  Description of Artificial Sequence: Synthetic oligonucleotide
  Antisense strand to SEQ ID NO: 1092858
uuauccaugaucauuucca

SEQ ID NO: 1092860 - RNA, 19 nt, Artificial Sequence
  Description of Artificial Sequence: Synthetic oligonucleotide
  Sense strand starting at position 210 of SEQ ID NO: 915610
gcuugacaacuuggagauu

SEQ ID NO: 1092861 - RNA, 19 nt, Artificial Sequence
  Description of Artificial Sequence: Synthetic oligonucleotide
  Antisense strand to SEQ ID NO: 1092860
aaucuccaaguugucaagc

SEQ ID NO: 1092862 - RNA, 19 nt, Artificial Sequence
  Description of Artificial Sequence: Synthetic oligonucleotide
  Sense strand starting at position 211 of SEQ ID NO: 915610
cuugacaacuuggagauua

SEQ ID NO: 1092863 - RNA, 19 nt, Artificial Sequence
  Description of Artificial Sequence: Synthetic oligonucleotide
  Antisense strand to SEQ ID NO: 1092862
uaaucuccaaguugucaag

SEQ ID NO: 1092864 - RNA, 19 nt, Artificial Sequence
  Description of Artificial Sequence: Synthetic oligonucleotide
  Sense strand starting at position 500 of SEQ ID NO: 915610
cagaaugucgaauguuuag

SEQ ID NO: 1092865 - RNA, 19 nt, Artificial Sequence
  Description of Artificial Sequence: Synthetic oligonucleotide
  Antisense strand to SEQ ID NO: 1092864
cuaaacauucgacauucug

SEQ ID NO: 1092866 - RNA, 19 nt, Artificial Sequence
  Description of Artificial Sequence: Synthetic oligonucleotide
  Sense strand starting at position 503 of SEQ ID NO: 915610
aaugucgaauguuuagaga

SEQ ID NO: 1092867 - RNA, 19 nt, Artificial Sequence
  Description of Artificial Sequence: Synthetic oligonucleotide
  Antisense strand to SEQ ID NO: 1092866
ucucuaaacauucgacauu

SEQ ID NO: 1092868 - RNA, 19 nt, Artificial Sequence
  Description of Artificial Sequence: Synthetic oligonucleotide
  Sense strand starting at position 506 of SEQ ID NO: 915610
gucgaauguuuagagauua

SEQ ID NO: 1092869 - RNA, 19 nt, Artificial Sequence
  Description of Artificial Sequence: Synthetic oligonucleotide
  Antisense strand to SEQ ID NO: 1092868
uaaucucuaaacauucgac

SEQ ID NO: 1092870 - RNA, 19 nt, Artificial Sequence
  Description of Artificial Sequence: Synthetic oligonucleotide
  Sense strand starting at position 559 of SEQ ID NO: 915610
ccgggauuagagcguuugu

SEQ ID NO: 1092871 - RNA, 19 nt, Artificial Sequence
  Description of Artificial Sequence: Synthetic oligonucleotide
  Antisense strand to SEQ ID NO: 1092870
acaaacgcucuaaucccgg

SEQ ID NO: 1092872 - RNA, 19 nt, Artificial Sequence
  Description of Artificial Sequence: Synthetic oligonucleotide
  Sense strand starting at position 580 of SEQ ID NO: 915610
acucuaaccugggaauaua

SEQ ID NO: 1092873 - RNA, 19 nt, Artificial Sequence
  Description of Artificial Sequence: Synthetic oligonucleotide
  Antisense strand to SEQ ID NO: 1092872
uauauucccagguuagagu

SEQ ID NO: 1092874 - RNA, 19 nt, Artificial Sequence
  Description of Artificial Sequence: Synthetic oligonucleotide
  Sense strand starting at position 783 of SEQ ID NO: 915610
ucaauauuauaggcguguu

SEQ ID NO: 1092875 - RNA, 19 nt, Artificial Sequence
  Description of Artificial Sequence: Synthetic oligonucleotide
  Antisense strand to SEQ ID NO: 1092874
aacacgccuauaauauuga

SEQ ID NO: 1092876 - RNA, 19 nt, Artificial Sequence
  Description of Artificial Sequence: Synthetic oligonucleotide
  Sense strand starting at position 786 of SEQ ID NO: 915610
auauuauaggcguguucuc

SEQ ID NO: 1092877 - RNA, 19 nt, Artificial Sequence
  Description of Artificial Sequence: Synthetic oligonucleotide
  Antisense strand to SEQ ID NO: 1092876
gagaacacgccuauaauau

SEQ ID NO: 1092878 - RNA, 19 nt, Artificial Sequence
  Description of Artificial Sequence: Synthetic oligonucleotide
  Sense strand starting at position 791 of SEQ ID NO: 915610
auaggcguguucucaauau

SEQ ID NO: 1092879 - RNA, 19 nt, Artificial Sequence
  Description of Artificial Sequence: Synthetic oligonucleotide
  Antisense strand to SEQ ID NO: 1092878
auauugagaacacgccuau

SEQ ID NO: 1092880 - RNA, 19 nt, Artificial Sequence
  Description of Artificial Sequence: Synthetic oligonucleotide
  Sense strand starting at position 795 of SEQ ID NO: 915610
gcguguucucaauauuaaa

SEQ ID NO: 1092881 - RNA, 19 nt, Artificial Sequence
  Description of Artificial Sequence: Synthetic oligonucleotide
  Antisense strand to SEQ ID NO: 1092880
uuuaauauugagaacacgc

SEQ ID NO: 1092882 - RNA, 19 nt, Artificial Sequence
  Description of Artificial Sequence: Synthetic oligonucleotide
  Sense strand starting at position 826 of SEQ ID NO: 915610
aaaguuauagcuggcaacu

SEQ ID NO: 1092883 - RNA, 19 nt, Artificial Sequence
  Description of Artificial Sequence: Synthetic oligonucleotide
  Antisense strand to SEQ ID NO: 1092882
aguugccagcuauaacuuu

SEQ ID NO: 1092884 - RNA, 19 nt, Artificial Sequence
  Description of Artificial Sequence: Synthetic oligonucleotide
  Sense strand starting at position 838 of SEQ ID NO: 915610
ggcaacugcuuccucuaaa

SEQ ID NO: 1092885 - RNA, 19 nt, Artificial Sequence
  Description of Artificial Sequence: Synthetic oligonucleotide
  Antisense strand to SEQ ID NO: 1092884
uuuagaggaagcaguugcc

SEQ ID NO: 1092886 - RNA, 19 nt, Artificial Sequence
  Description of Artificial Sequence: Synthetic oligonucleotide
  Sense strand starting at position 839 of SEQ ID NO: 915610
gcaacugcuuccucuaaag

SEQ ID NO: 1092887 - RNA, 19 nt, Artificial Sequence
  Description of Artificial Sequence: Synthetic oligonucleotide
  Antisense strand to SEQ ID NO: 1092886
cuuuagaggaagcaguugc

SEQ ID NO: 1092888 - RNA, 19 nt, Artificial Sequence
  Description of Artificial Sequence: Synthetic oligonucleotide
  Sense strand starting at position 977 of SEQ ID NO: 915610
ugcccucuauucuaaggaa

SEQ ID NO: 1092889 - RNA, 19 nt, Artificial Sequence
  Description of Artificial Sequence: Synthetic oligonucleotide
  Antisense strand to SEQ ID NO: 1092888
uuccuuagaauagagggca

SEQ ID NO: 1092890 - RNA, 19 nt, Artificial Sequence
  Description of Artificial Sequence: Synthetic oligonucleotide
  Sense strand starting at position 1106 of SEQ ID NO: 915610
uuaaguuacuguuccagac

SEQ ID NO: 1092891 - RNA, 19 nt, Artificial Sequence
  Description of Artificial Sequence: Synthetic oligonucleotide
  Antisense strand to SEQ ID NO: 1092890
gucuggaacaguaacuuaa

SEQ ID NO: 1092892 - RNA, 19 nt, Artificial Sequence
  Description of Artificial Sequence: Synthetic oligonucleotide
  Sense strand starting at position 1178 of SEQ ID NO: 915610
aucuuaauccagcaaguug

SEQ ID NO: 1092893 - RNA, 19 nt, Artificial Sequence
  Description of Artificial Sequence: Synthetic oligonucleotide
  Antisense strand to SEQ ID NO: 1092892
caacuugcuggauuaagau

SEQ ID NO: 1092894 - RNA, 19 nt, Artificial Sequence
  Description of Artificial Sequence: Synthetic oligonucleotide
  Sense strand starting at position 1189 of SEQ ID NO: 915610
gcaaguugcaucgaguugu

SEQ ID NO: 1092895 - RNA, 19 nt, Artificial Sequence
  Description of Artificial Sequence: Synthetic oligonucleotide
  Antisense strand to SEQ ID NO: 1092894
acaacucgaugcaacuugc

SEQ ID NO: 1092896 - RNA, 19 nt, Artificial Sequence
  Description of Artificial Sequence: Synthetic oligonucleotide
  Sense strand starting at position 1193 of SEQ ID NO: 915610
guugcaucgaguugucauu

SEQ ID NO: 1092897 - RNA, 19 nt, Artificial Sequence
  Description of Artificial Sequence: Synthetic oligonucleotide
  Antisense strand to SEQ ID NO: 1092896
aaugacaacucgaugcaac

SEQ ID NO: 1092898 - RNA, 19 nt, Artificial Sequence
  Description of Artificial Sequence: Synthetic oligonucleotide
  Sense strand starting at position 1195 of SEQ ID NO: 915610
ugcaucgaguugucauugu

SEQ ID NO: 1092899 - RNA, 19 nt, Artificial Sequence
  Description of Artificial Sequence: Synthetic oligonucleotide
  Antisense strand to SEQ ID NO: 1092898
acaaugacaacucgaugca

SEQ ID NO: 1092900 - RNA, 19 nt, Artificial Sequence
  Description of Artificial Sequence: Synthetic oligonucleotide
  Sense strand starting at position 1199 of SEQ ID NO: 915610
ucgaguugucauuguuccu

SEQ ID NO: 1092901 - RNA, 19 nt, Artificial Sequence
  Description of Artificial Sequence: Synthetic oligonucleotide
  Antisense strand to SEQ ID NO: 1092900
aggaacaaugacaacucga

SEQ ID NO: 1092902 - RNA, 19 nt, Artificial Sequence
  Description of Artificial Sequence: Synthetic oligonucleotide
  Sense strand starting at position 1242 of SEQ ID NO: 915610
gugcacaucauccgcgaau

SEQ ID NO: 1092903 - RNA, 19 nt, Artificial Sequence
  Description of Artificial Sequence: Synthetic oligonucleotide
  Antisense strand to SEQ ID NO: 1092902
auucgcggaugaugugcac

SEQ ID NO: 1092904 - RNA, 19 nt, Artificial Sequence
  Description of Artificial Sequence: Synthetic oligonucleotide
  Sense strand starting at position 1243 of SEQ ID NO: 915610
ugcacaucauccgcgaaua

SEQ ID NO: 1092905 - RNA, 19 nt, Artificial Sequence
  Description of Artificial Sequence: Synthetic oligonucleotide
  Antisense strand to SEQ ID NO: 1092904
uauucgcggaugaugugca

SEQ ID NO: 1092906 - RNA, 19 nt, Artificial Sequence
  Description of Artificial Sequence: Synthetic oligonucleotide
  Sense strand starting at position 1244 of SEQ ID NO: 915610
gcacaucauccgcgaauac

SEQ ID NO: 1092907 - RNA, 19 nt, Artificial Sequence
  Description of Artificial Sequence: Synthetic oligonucleotide
  Antisense strand to SEQ ID NO: 1092906
guauucgcggaugaugugc

SEQ ID NO: 1092908 - RNA, 19 nt, Artificial Sequence
  Description of Artificial Sequence: Synthetic oligonucleotide
  Sense strand starting at position 1255 of SEQ ID NO: 915610
gcgaauacguggaaggaca

SEQ ID NO: 1092909 - RNA, 19 nt, Artificial Sequence
  Description of Artificial Sequence: Synthetic oligonucleotide
  Antisense strand to SEQ ID NO: 1092908
uguccuuccacguauucgc

SEQ ID NO: 1092910 - RNA, 19 nt, Artificial Sequence
  Description of Artificial Sequence: Synthetic oligonucleotide
  Sense strand starting at position 3196 of SEQ ID NO: 915610
gaucuuguaguccagacaa

SEQ ID NO: 1092911 - RNA, 19 nt, Artificial Sequence
  Description of Artificial Sequence: Synthetic oligonucleotide
  Antisense strand to SEQ ID NO: 1092910
uugucuggacuacaagauc

SEQ ID NO: 1092912 - RNA, 19 nt, Artificial Sequence
  Description of Artificial Sequence: Synthetic oligonucleotide
  Sense strand starting at position 3198 of SEQ ID NO: 915610
ucuuguaguccagacaaca

SEQ ID NO: 1092913 - RNA, 19 nt, Artificial Sequence
  Description of Artificial Sequence: Synthetic oligonucleotide
  Antisense strand to SEQ ID NO: 1092912
uguugucuggacuacaaga

SEQ ID NO: 1092914 - RNA, 19 nt, Artificial Sequence
  Description of Artificial Sequence: Synthetic oligonucleotide
  Sense strand starting at position 3349 of SEQ ID NO: 915610
cagggaguuccgugaccuc

SEQ ID NO: 1092915 - RNA, 19 nt, Artificial Sequence
  Description of Artificial Sequence: Synthetic oligonucleotide
  Antisense strand to SEQ ID NO: 1092914
gaggucacggaacucccug

SEQ ID NO: 1092916 - RNA, 19 nt, Artificial Sequence
  Description of Artificial Sequence: Synthetic oligonucleotide
  Sense strand starting at position 3352 of SEQ ID NO: 915610
ggaguuccgugaccucuau

SEQ ID NO: 1092917 - RNA, 19 nt, Artificial Sequence
  Description of Artificial Sequence: Synthetic oligonucleotide
  Antisense strand to SEQ ID NO: 1092916
auagaggucacggaacucc

SEQ ID NO: 1092918 - RNA, 19 nt, Artificial Sequence
  Description of Artificial Sequence: Synthetic oligonucleotide
  Sense strand starting at position 3356 of SEQ ID NO: 915610
uuccgugaccucuaugaca

SEQ ID NO: 1092919 - RNA, 19 nt, Artificial Sequence
  Description of Artificial Sequence: Synthetic oligonucleotide
  Antisense strand to SEQ ID NO: 1092918
ugucauagaggucacggaa

SEQ ID NO: 1092920 - RNA, 19 nt, Artificial Sequence
  Description of Artificial Sequence: Synthetic oligonucleotide
  Sense strand starting at position 3358 of SEQ ID NO: 915610
ccgugaccucuaugacaac

SEQ ID NO: 1092921 - RNA, 19 nt, Artificial Sequence
  Description of Artificial Sequence: Synthetic oligonucleotide
  Antisense strand to SEQ ID NO: 1092920
guugucauagaggucacgg

SEQ ID NO: 1092922 - RNA, 19 nt, Artificial Sequence
  Description of Artificial Sequence: Synthetic oligonucleotide
  Sense strand starting at position 3402 of SEQ ID NO: 915610
cuuucagcauucgggugaa

SEQ ID NO: 1092923 - RNA, 19 nt, Artificial Sequence
  Description of Artificial Sequence: Synthetic oligonucleotide
  Antisense strand to SEQ ID NO: 1092922
uucacccgaaugcugaaag

SEQ ID NO: 1092924 - RNA, 19 nt, Artificial Sequence
  Description of Artificial Sequence: Synthetic oligonucleotide
  Sense strand starting at position 3462 of SEQ ID NO: 915610
agaaguugagguuggcaua

SEQ ID NO: 1092925 - RNA, 19 nt, Artificial Sequence
  Description of Artificial Sequence: Synthetic oligonucleotide
  Antisense strand to SEQ ID NO: 1092924
uaugccaaccucaacuucu

SEQ ID NO: 1092926 - RNA, 19 nt, Artificial Sequence
  Description of Artificial Sequence: Synthetic oligonucleotide
  Sense strand starting at position 3539 of SEQ ID NO: 915610
gugugaauuggagcguguu

SEQ ID NO: 1092927 - RNA, 19 nt, Artificial Sequence
  Description of Artificial Sequence: Synthetic oligonucleotide
  Antisense strand to SEQ ID NO: 1092926
aacacgcuccaauucacac

SEQ ID NO: 1092928 - RNA, 19 nt, Artificial Sequence
  Description of Artificial Sequence: Synthetic oligonucleotide
  Sense strand starting at position 3593 of SEQ ID NO: 915610
gggaccagccagugucaaa

SEQ ID NO: 1092929 - RNA, 19 nt, Artificial Sequence
  Description of Artificial Sequence: Synthetic oligonucleotide
  Antisense strand to SEQ ID NO: 1092928
uuugacacuggcugguccc

SEQ ID NO: 1092930 - RNA, 19 nt, Artificial Sequence
  Description of Artificial Sequence: Synthetic oligonucleotide
  Sense strand starting at position 3727 of SEQ ID NO: 915610
gggccaucauccuccacaa

SEQ ID NO: 1092931 - RNA, 19 nt, Artificial Sequence
  Description of Artificial Sequence: Synthetic oligonucleotide
  Antisense strand to SEQ ID NO: 1092930
uuguggaggaugauggccc

SEQ ID NO: 1092932 - RNA, 19 nt, Artificial Sequence
  Description of Artificial Sequence: Synthetic oligonucleotide
  Sense strand starting at position 3850 of SEQ ID NO: 915610
cuugacuuuggcugguaga

SEQ ID NO: 1092933 - RNA, 19 nt, Artificial Sequence
  Description of Artificial Sequence: Synthetic oligonucleotide
  Antisense strand to SEQ ID NO: 1092932
ucuaccagccaaagucaag

SEQ ID NO: 1092934 - RNA, 19 nt, Artificial Sequence
  Description of Artificial Sequence: Synthetic oligonucleotide
  Sense strand starting at position 3853 of SEQ ID NO: 915610
gacuuuggcugguagacau

SEQ ID NO: 1092935 - RNA, 19 nt, Artificial Sequence
  Description of Artificial Sequence: Synthetic oligonucleotide
  Antisense strand to SEQ ID NO: 1092934
augucuaccagccaaaguc

SEQ ID NO: 1092936 - RNA, 19 nt, Artificial Sequence
  Description of Artificial Sequence: Synthetic oligonucleotide
  Sense strand starting at position 298 of SEQ ID NO: 915611
caagcuagucagggcaaua

SEQ ID NO: 1092937 - RNA, 19 nt, Artificial Sequence
  Description of Artificial Sequence: Synthetic oligonucleotide
  Antisense strand to SEQ ID NO: 1092936
uauugcccugacuagcuug

SEQ ID NO: 1092938 - RNA, 19 nt, Artificial Sequence
  Description of Artificial Sequence: Synthetic oligonucleotide
  Sense strand starting at position 408 of SEQ ID NO: 915611
aggaaagguuaauaaauga

SEQ ID NO: 1092939 - RNA, 19 nt, Artificial Sequence
  Description of Artificial Sequence: Synthetic oligonucleotide
  Antisense strand to SEQ ID NO: 1092938
ucauuuauuaaccuuuccu

SEQ ID NO: 1092940 - RNA, 19 nt, Artificial Sequence
  Description of Artificial Sequence: Synthetic oligonucleotide
  Sense strand starting at position 462 of SEQ ID NO: 915611
ggaguaauuucaugagagg

SEQ ID NO: 1092941 - RNA, 19 nt, Artificial Sequence
  Description of Artificial Sequence: Synthetic oligonucleotide
  Antisense strand to SEQ ID NO: 1092940
ccucucaugaaauuacucc

SEQ ID NO: 1092942 - RNA, 19 nt, Artificial Sequence
  Description of Artificial Sequence: Synthetic oligonucleotide
  Sense strand starting at position 479 of SEQ ID NO: 915611
gguauuguuccauaucaga

SEQ ID NO: 1092943 - RNA, 19 nt, Artificial Sequence
  Description of Artificial Sequence: Synthetic oligonucleotide
  Antisense strand to SEQ ID NO: 1092942
ucugauauggaacaauacc

SEQ ID NO: 1092944 - RNA, 19 nt, Artificial Sequence
  Description of Artificial Sequence: Synthetic oligonucleotide
  Sense strand starting at position 667 of SEQ ID NO: 915611
gauggcauggcagauaagu

SEQ ID NO: 1092945 - RNA, 19 nt, Artificial Sequence
  Description of Artificial Sequence: Synthetic oligonucleotide
  Antisense strand to SEQ ID NO: 1092944
acuuaucugccaugccauc

SEQ ID NO: 1092946 - RNA, 19 nt, Artificial Sequence
  Description of Artificial Sequence: Synthetic oligonucleotide
  Sense strand starting at position 669 of SEQ ID NO: 915611
uggcauggcagauaaguaa

SEQ ID NO: 1092947 - RNA, 19 nt, Artificial Sequence
  Description of Artificial Sequence: Synthetic oligonucleotide
  Antisense strand to SEQ ID NO: 1092946
uuacuuaucugccaugcca

SEQ ID NO: 1092948 - RNA, 19 nt, Artificial Sequence
  Description of Artificial Sequence: Synthetic oligonucleotide
  Sense strand starting at position 772 of SEQ ID NO: 915611
gcagugagccgugugguua

SEQ ID NO: 1092949 - RNA, 19 nt, Artificial Sequence
  Description of Artificial Sequence: Synthetic oligonucleotide
  Antisense strand to SEQ ID NO: 1092948
uaaccacacggcucacugc

SEQ ID NO: 1092950 - RNA, 19 nt, Artificial Sequence
  Description of Artificial Sequence: Synthetic oligonucleotide
  Sense strand starting at position 783 of SEQ ID NO: 915611
ugugguuaucaagggaaga

SEQ ID NO: 1092951 - RNA, 19 nt, Artificial Sequence
  Description of Artificial Sequence: Synthetic oligonucleotide
  Antisense strand to SEQ ID NO: 1092950
ucuucccuugauaaccaca

SEQ ID NO: 1092952 - RNA, 19 nt, Artificial Sequence
  Description of Artificial Sequence: Synthetic oligonucleotide
  Sense strand starting at position 784 of SEQ ID NO: 915611
gugguuaucaagggaagag

SEQ ID NO: 1092953 - RNA, 19 nt, Artificial Sequence
  Description of Artificial Sequence: Synthetic oligonucleotide
  Antisense strand to SEQ ID NO: 1092952
cucuucccuugauaaccac

SEQ ID NO: 1092954 - RNA, 19 nt, Artificial Sequence
  Description of Artificial Sequence: Synthetic oligonucleotide
  Sense strand starting at position 800 of SEQ ID NO: 915611
gaggguauaguaugaggau

SEQ ID NO: 1092955 - RNA, 19 nt, Artificial Sequence
  Description of Artificial Sequence: Synthetic oligonucleotide
  Antisense strand to SEQ ID NO: 1092954
auccucauacuauacccuc

SEQ ID NO: 1092956 - RNA, 19 nt, Artificial Sequence
  Description of Artificial Sequence: Synthetic oligonucleotide
  Sense strand starting at position 959 of SEQ ID NO: 915611
uaucuauaguagcugaaga

SEQ ID NO: 1092957 - RNA, 19 nt, Artificial Sequence
  Description of Artificial Sequence: Synthetic oligonucleotide
  Antisense strand to SEQ ID NO: 1092956
ucuucagcuacuauagaua

SEQ ID NO: 1092958 - RNA, 19 nt, Artificial Sequence
  Description of Artificial Sequence: Synthetic oligonucleotide
  Sense strand starting at position 961 of SEQ ID NO: 915611
ucuauaguagcugaagagu

SEQ ID NO: 1092959 - RNA, 19 nt, Artificial Sequence
  Description of Artificial Sequence: Synthetic oligonucleotide
  Antisense strand to SEQ ID NO: 1092958
acucuucagcuacuauaga

SEQ ID NO: 1092960 - RNA, 19 nt, Artificial Sequence
  Description of Artificial Sequence: Synthetic oligonucleotide
  Sense strand starting at position 964 of SEQ ID NO: 915611
auaguagcugaagaguuaa

SEQ ID NO: 1092961 - RNA, 19 nt, Artificial Sequence
  Description of Artificial Sequence: Synthetic oligonucleotide
  Antisense strand to SEQ ID NO: 1092960
uuaacucuucagcuacuau

SEQ ID NO: 1092962 - RNA, 19 nt, Artificial Sequence
  Description of Artificial Sequence: Synthetic oligonucleotide
  Sense strand starting at position 1056 of SEQ ID NO: 915611
cccuguaaggaguacuaau

SEQ ID NO: 1092963 - RNA, 19 nt, Artificial Sequence
  Description of Artificial Sequence: Synthetic oligonucleotide
  Antisense strand to SEQ ID NO: 1092962
auuaguacuccuuacaggg

SEQ ID NO: 1092964 - RNA, 19 nt, Artificial Sequence
  Description of Artificial Sequence: Synthetic oligonucleotide
  Sense strand starting at position 1151 of SEQ ID NO: 915611
ucagauaagcaaugaguaa

SEQ ID NO: 1092965 - RNA, 19 nt, Artificial Sequence
  Description of Artificial Sequence: Synthetic oligonucleotide
  Antisense strand to SEQ ID NO: 1092964
uuacucauugcuuaucuga

SEQ ID NO: 1092966 - RNA, 19 nt, Artificial Sequence
  Description of Artificial Sequence: Synthetic oligonucleotide
  Sense strand starting at position 1191 of SEQ ID NO: 915611
cuaauauugcauggcacaa

SEQ ID NO: 1092967 - RNA, 19 nt, Artificial Sequence
  Description of Artificial Sequence: Synthetic oligonucleotide
  Antisense strand to SEQ ID NO: 1092966
uugugccaugcaauauuag

SEQ ID NO: 1092968 - RNA, 19 nt, Artificial Sequence
  Description of Artificial Sequence: Synthetic oligonucleotide
  Sense strand starting at position 1225 of SEQ ID NO: 915611
guauuccuuguauaucuga

SEQ ID NO: 1092969 - RNA, 19 nt, Artificial Sequence
  Description of Artificial Sequence: Synthetic oligonucleotide
  Antisense strand to SEQ ID NO: 1092968
ucagauauacaaggaauac

SEQ ID NO: 1092970 - RNA, 19 nt, Artificial Sequence
  Description of Artificial Sequence: Synthetic oligonucleotide
  Sense strand starting at position 1455 of SEQ ID NO: 915611
gcacaucuccuagacgacu

SEQ ID NO: 1092971 - RNA, 19 nt, Artificial Sequence
  Description of Artificial Sequence: Synthetic oligonucleotide
  Antisense strand to SEQ ID NO: 1092970
agucgucuaggagaugugc

SEQ ID NO: 1092972 - RNA, 19 nt, Artificial Sequence
  Description of Artificial Sequence: Synthetic oligonucleotide
  Sense strand starting at position 1473 of SEQ ID NO: 915611
uaaagagcucccggagaaa

SEQ ID NO: 1092973 - RNA, 19 nt, Artificial Sequence
  Description of Artificial Sequence: Synthetic oligonucleotide
  Antisense strand to SEQ ID NO: 1092972
uuucuccgggagcucuuua

SEQ ID NO: 1092974 - RNA, 19 nt, Artificial Sequence
  Description of Artificial Sequence: Synthetic oligonucleotide
  Sense strand starting at position 1484 of SEQ ID NO: 915611
cggagaaagcaaugucuuu

SEQ ID NO: 1092975 - RNA, 19 nt, Artificial Sequence
  Description of Artificial Sequence: Synthetic oligonucleotide
  Antisense strand to SEQ ID NO: 1092974
aaagacauugcuuucuccg

SEQ ID NO: 1092976 - RNA, 19 nt, Artificial Sequence
  Description of Artificial Sequence: Synthetic oligonucleotide
  Sense strand starting at position 2390 of SEQ ID NO: 915611
ggacucugguguccuagaa

SEQ ID NO: 1092977 - RNA, 19 nt, Artificial Sequence
  Description of Artificial Sequence: Synthetic oligonucleotide
  Antisense strand to SEQ ID NO: 1092976
uucuaggacaccagagucc

SEQ ID NO: 1092978 - RNA, 19 nt, Artificial Sequence
  Description of Artificial Sequence: Synthetic oligonucleotide
  Sense strand starting at position 2394 of SEQ ID NO: 915611
ucugguguccuagaaauua

SEQ ID NO: 1092979 - RNA, 19 nt, Artificial Sequence
  Description of Artificial Sequence: Synthetic oligonucleotide
  Antisense strand to SEQ ID NO: 1092978
uaauuucuaggacaccaga

SEQ ID NO: 1092980 - RNA, 19 nt, Artificial Sequence
  Description of Artificial Sequence: Synthetic oligonucleotide
  Sense strand starting at position 2464 of SEQ ID NO: 915611
agugcuauuccagaacaga

SEQ ID NO: 1092981 - RNA, 19 nt, Artificial Sequence
  Description of Artificial Sequence: Synthetic oligonucleotide
  Antisense strand to SEQ ID NO: 1092980
ucuguucuggaauagcacu

SEQ ID NO: 1092982 - RNA, 19 nt, Artificial Sequence
  Description of Artificial Sequence: Synthetic oligonucleotide
  Sense strand starting at position 2502 of SEQ ID NO: 915611
uuauuaugacgaugaaucu

SEQ ID NO: 1092983 - RNA, 19 nt, Artificial Sequence
  Description of Artificial Sequence: Synthetic oligonucleotide
  Antisense strand to SEQ ID NO: 1092982
agauucaucgucauaauaa

SEQ ID NO: 1092984 - RNA, 19 nt, Artificial Sequence
  Description of Artificial Sequence: Synthetic oligonucleotide
  Sense strand starting at position 2514 of SEQ ID NO: 915611
ugaaucuagcgucauaaau

SEQ ID NO: 1092985 - RNA, 19 nt, Artificial Sequence
  Description of Artificial Sequence: Synthetic oligonucleotide
  Antisense strand to SEQ ID NO: 1092984
auuuaugacgcuagauuca

SEQ ID NO: 1092986 - RNA, 19 nt, Artificial Sequence
  Description of Artificial Sequence: Synthetic oligonucleotide
  Sense strand starting at position 2578 of SEQ ID NO: 915611
auuuauccuuccgagagaa

SEQ ID NO: 1092987 - RNA, 19 nt, Artificial Sequence
  Description of Artificial Sequence: Synthetic oligonucleotide
  Antisense strand to SEQ ID NO: 1092986
uucucucggaaggauaaau

SEQ ID NO: 1092988 - RNA, 19 nt, Artificial Sequence
  Description of Artificial Sequence: Synthetic oligonucleotide
  Sense strand starting at position 2656 of SEQ ID NO: 915611
augagaaucagcugggcaa

SEQ ID NO: 1092989 - RNA, 19 nt, Artificial Sequence
  Description of Artificial Sequence: Synthetic oligonucleotide
  Antisense strand to SEQ ID NO: 1092988
uugcccagcugauucucau

SEQ ID NO: 1092990 - RNA, 19 nt, Artificial Sequence
  Description of Artificial Sequence: Synthetic oligonucleotide
  Sense strand starting at position 2685 of SEQ ID NO: 915611
uuuacuugcugauuuagua

SEQ ID NO: 1092991 - RNA, 19 nt, Artificial Sequence
  Description of Artificial Sequence: Synthetic oligonucleotide
  Antisense strand to SEQ ID NO: 1092990
uacuaaaucagcaaguaaa

SEQ ID NO: 1092992 - RNA, 19 nt, Artificial Sequence
  Description of Artificial Sequence: Synthetic oligonucleotide
  Sense strand starting at position 2689 of SEQ ID NO: 915611
cuugcugauuuaguaagua

SEQ ID NO: 1092993 - RNA, 19 nt, Artificial Sequence
  Description of Artificial Sequence: Synthetic oligonucleotide
  Antisense strand to SEQ ID NO: 1092992
uacuuacuaaaucagcaag

SEQ ID NO: 1092994 - RNA, 19 nt, Artificial Sequence
  Description of Artificial Sequence: Synthetic oligonucleotide
  Sense strand starting at position 2708 of SEQ ID NO: 915611
uaaggugggaccugagauu

SEQ ID NO: 1092995 - RNA, 19 nt, Artificial Sequence
  Description of Artificial Sequence: Synthetic oligonucleotide
  Antisense strand to SEQ ID NO: 1092994
aaucucaggucccaccuua

SEQ ID NO: 1092996 - RNA, 19 nt, Artificial Sequence
  Description of Artificial Sequence: Synthetic oligonucleotide
  Sense strand starting at position 2819 of SEQ ID NO: 915611
uuaguuauuucugcuuaug

SEQ ID NO: 1092997 - RNA, 19 nt, Artificial Sequence
  Description of Artificial Sequence: Synthetic oligonucleotide
  Antisense strand to SEQ ID NO: 1092996
cauaagcagaaauaacuaa

SEQ ID NO: 1092998 - RNA, 19 nt, Artificial Sequence
  Description of Artificial Sequence: Synthetic oligonucleotide
  Sense strand starting at position 2910 of SEQ ID NO: 915611
gauauacuugcugguuaau

SEQ ID NO: 1092999 - RNA, 19 nt, Artificial Sequence
  Description of Artificial Sequence: Synthetic oligonucleotide
  Antisense strand to SEQ ID NO: 1092998
auuaaccagcaaguauauc

SEQ ID NO: 1093000 - RNA, 19 nt, Artificial Sequence
  Description of Artificial Sequence: Synthetic oligonucleotide
  Sense strand starting at position 3099 of SEQ ID NO: 915611
ccaggaaacuauuaauuug

SEQ ID NO: 1093001 - RNA, 19 nt, Artificial Sequence
  Description of Artificial Sequence: Synthetic oligonucleotide
  Antisense strand to SEQ ID NO: 1093000
caaauuaauaguuuccugg

SEQ ID NO: 1093002 - RNA, 19 nt, Artificial Sequence
  Description of Artificial Sequence: Synthetic oligonucleotide
  Sense strand starting at position 3153 of SEQ ID NO: 915611
uguuaauaucacuauaguc

SEQ ID NO: 1093003 - RNA, 19 nt, Artificial Sequence
  Description of Artificial Sequence: Synthetic oligonucleotide
  Antisense strand to SEQ ID NO: 1093002
gacuauagugauauuaaca

SEQ ID NO: 1093004 - RNA, 19 nt, Artificial Sequence
  Description of Artificial Sequence: Synthetic oligonucleotide
  Sense strand starting at position 3255 of SEQ ID NO: 915611
acaguaguuuauuccuuaa

SEQ ID NO: 1093005 - RNA, 19 nt, Artificial Sequence
  Description of Artificial Sequence: Synthetic oligonucleotide
  Antisense strand to SEQ ID NO: 1093004
uuaaggaauaaacuacugu

SEQ ID NO: 1093006 - RNA, 19 nt, Artificial Sequence
  Description of Artificial Sequence: Synthetic oligonucleotide
  Sense strand starting at position 3322 of SEQ ID NO: 915611
cguuucuaaggguaaauaa

SEQ ID NO: 1093007 - RNA, 19 nt, Artificial Sequence
  Description of Artificial Sequence: Synthetic oligonucleotide
  Antisense strand to SEQ ID NO: 1093006
uuauuuacccuuagaaacg

SEQ ID NO: 1093008 - RNA, 19 nt, Artificial Sequence
  Description of Artificial Sequence: Synthetic oligonucleotide
  Sense strand starting at position 3440 of SEQ ID NO: 915611
gcgcuaucucugucucacu

SEQ ID NO: 1093009 - RNA, 19 nt, Artificial Sequence
  Description of Artificial Sequence: Synthetic oligonucleotide
  Antisense strand to SEQ ID NO: 1093008
agugagacagagauagcgc

SEQ ID NO: 1093010 - RNA, 19 nt, Artificial Sequence
  Description of Artificial Sequence: Synthetic oligonucleotide
  Sense strand starting at position 3574 of SEQ ID NO: 915611
gggaaacccuuucucuauu

SEQ ID NO: 1093011 - RNA, 19 nt, Artificial Sequence
  Description of Artificial Sequence: Synthetic oligonucleotide
  Antisense strand to SEQ ID NO: 1093010
aauagagaaaggguuuccc

SEQ ID NO: 1093012 - RNA, 19 nt, Artificial Sequence
  Description of Artificial Sequence: Synthetic oligonucleotide
  Sense strand starting at position 3740 of SEQ ID NO: 915611
gagagauugcgucgaaaga

SEQ ID NO: 1093013 - RNA, 19 nt, Artificial Sequence
  Description of Artificial Sequence: Synthetic oligonucleotide
  Antisense strand to SEQ ID NO: 1093012
ucuuucgacgcaaucucuc

SEQ ID NO: 1093014 - RNA, 19 nt, Artificial Sequence
  Description of Artificial Sequence: Synthetic oligonucleotide
  Sense strand starting at position 3741 of SEQ ID NO: 915611
agagauugcgucgaaagaa

SEQ ID NO: 1093015 - RNA, 19 nt, Artificial Sequence
  Description of Artificial Sequence: Synthetic oligonucleotide
  Antisense strand to SEQ ID NO: 1093014
uucuuucgacgcaaucucu

SEQ ID NO: 1093016 - RNA, 19 nt, Artificial Sequence
  Description of Artificial Sequence: Synthetic oligonucleotide
  Sense strand starting at position 300 of SEQ ID NO: 915612
cucacagaugcauggcuaa

SEQ ID NO: 1093017 - RNA, 19 nt, Artificial Sequence
  Description of Artificial Sequence: Synthetic oligonucleotide
  Antisense strand to SEQ ID NO: 1093016
uuagccaugcaucugugag

SEQ ID NO: 1093018 - RNA, 19 nt, Artificial Sequence
  Description of Artificial Sequence: Synthetic oligonucleotide
  Sense strand starting at position 403 of SEQ ID NO: 915612
aggcauuaugcuggguaaa

SEQ ID NO: 1093019 - RNA, 19 nt, Artificial Sequence
  Description of Artificial Sequence: Synthetic oligonucleotide
  Antisense strand to SEQ ID NO: 1093018
uuuacccagcauaaugccu

SEQ ID NO: 1093020 - RNA, 19 nt, Artificial Sequence
  Description of Artificial Sequence: Synthetic oligonucleotide
  Sense strand starting at position 538 of SEQ ID NO: 915612
gggcaacaucagggaguuu

SEQ ID NO: 1093021 - RNA, 19 nt, Artificial Sequence
  Description of Artificial Sequence: Synthetic oligonucleotide
  Antisense strand to SEQ ID NO: 1093020
aaacucccugauguugccc

SEQ ID NO: 1093022 - RNA, 19 nt, Artificial Sequence
  Description of Artificial Sequence: Synthetic oligonucleotide
  Sense strand starting at position 582 of SEQ ID NO: 915612
caugguuguggugauaguu

SEQ ID NO: 1093023 - RNA, 19 nt, Artificial Sequence
  Description of Artificial Sequence: Synthetic oligonucleotide
  Antisense strand to SEQ ID NO: 1093022
aacuaucaccacaaccaug

SEQ ID NO: 1093024 - RNA, 19 nt, Artificial Sequence
  Description of Artificial Sequence: Synthetic oligonucleotide
  Sense strand starting at position 588 of SEQ ID NO: 915612
uguggugauaguuauauaa

SEQ ID NO: 1093025 - RNA, 19 nt, Artificial Sequence
  Description of Artificial Sequence: Synthetic oligonucleotide
  Antisense strand to SEQ ID NO: 1093024
uuauauaacuaucaccaca

SEQ ID NO: 1093026 - RNA, 19 nt, Artificial Sequence
  Description of Artificial Sequence: Synthetic oligonucleotide
  Sense strand starting at position 698 of SEQ ID NO: 915612
cguggaugaucuccaugga

SEQ ID NO: 1093027 - RNA, 19 nt, Artificial Sequence
  Description of Artificial Sequence: Synthetic oligonucleotide
  Antisense strand to SEQ ID NO: 1093026
uccauggagaucauccacg

SEQ ID NO: 1093028 - RNA, 19 nt, Artificial Sequence
  Description of Artificial Sequence: Synthetic oligonucleotide
  Sense strand starting at position 729 of SEQ ID NO: 915612
augauucuaucagugagaa

SEQ ID NO: 1093029 - RNA, 19 nt, Artificial Sequence
  Description of Artificial Sequence: Synthetic oligonucleotide
  Antisense strand to SEQ ID NO: 1093028
uucucacugauagaaucau

SEQ ID NO: 1093030 - RNA, 19 nt, Artificial Sequence
  Description of Artificial Sequence: Synthetic oligonucleotide
  Sense strand starting at position 730 of SEQ ID NO: 915612
ugauucuaucagugagaaa

SEQ ID NO: 1093031 - RNA, 19 nt, Artificial Sequence
  Description of Artificial Sequence: Synthetic oligonucleotide
  Antisense strand to SEQ ID NO: 1093030
uuucucacugauagaauca

SEQ ID NO: 1093032 - RNA, 19 nt, Artificial Sequence
  Description of Artificial Sequence: Synthetic oligonucleotide
  Sense strand starting at position 864 of SEQ ID NO: 915612
agaauuuauucccagaagg

SEQ ID NO: 1093033 - RNA, 19 nt, Artificial Sequence
  Description of Artificial Sequence: Synthetic oligonucleotide
  Antisense strand to SEQ ID NO: 1093032
ccuucugggaauaaauucu

SEQ ID NO: 1093034 - RNA, 19 nt, Artificial Sequence
  Description of Artificial Sequence: Synthetic oligonucleotide
  Sense strand starting at position 924 of SEQ ID NO: 915612
uuuaaaugccuaugaauag

SEQ ID NO: 1093035 - RNA, 19 nt, Artificial Sequence
  Description of Artificial Sequence: Synthetic oligonucleotide
  Antisense strand to SEQ ID NO: 1093034
cuauucauaggcauuuaaa

SEQ ID NO: 1093036 - RNA, 19 nt, Artificial Sequence
  Description of Artificial Sequence: Synthetic oligonucleotide
  Sense strand starting at position 947 of SEQ ID NO: 915612
ucuugucuguuucuauauu

SEQ ID NO: 1093037 - RNA, 19 nt, Artificial Sequence
  Description of Artificial Sequence: Synthetic oligonucleotide
  Antisense strand to SEQ ID NO: 1093036
aauauagaaacagacaaga

SEQ ID NO: 1093038 - RNA, 19 nt, Artificial Sequence
  Description of Artificial Sequence: Synthetic oligonucleotide
  Sense strand starting at position 1397 of SEQ ID NO: 915612
ccuuccucuccuggaguaa

SEQ ID NO: 1093039 - RNA, 19 nt, Artificial Sequence
  Description of Artificial Sequence: Synthetic oligonucleotide
  Antisense strand to SEQ ID NO: 1093038
uuacuccaggagaggaagg

SEQ ID NO: 1093040 - RNA, 19 nt, Artificial Sequence
  Description of Artificial Sequence: Synthetic oligonucleotide
  Sense strand starting at position 2081 of SEQ ID NO: 915612
guggguucugcgagucaag

SEQ ID NO: 1093041 - RNA, 19 nt, Artificial Sequence
  Description of Artificial Sequence: Synthetic oligonucleotide
  Antisense strand to SEQ ID NO: 1093040
cuugacucgcagaacccac

SEQ ID NO: 1093042 - RNA, 19 nt, Artificial Sequence
  Description of Artificial Sequence: Synthetic oligonucleotide
  Sense strand starting at position 2325 of SEQ ID NO: 915612
cggagucacugucugagaa

SEQ ID NO: 1093043 - RNA, 19 nt, Artificial Sequence
  Description of Artificial Sequence: Synthetic oligonucleotide
  Antisense strand to SEQ ID NO: 1093042
uucucagacagugacuccg

SEQ ID NO: 1093044 - RNA, 19 nt, Artificial Sequence
  Description of Artificial Sequence: Synthetic oligonucleotide
  Sense strand starting at position 2326 of SEQ ID NO: 915612
ggagucacugucugagaag

SEQ ID NO: 1093045 - RNA, 19 nt, Artificial Sequence
  Description of Artificial Sequence: Synthetic oligonucleotide
  Antisense strand to SEQ ID NO: 1093044
cuucucagacagugacucc

SEQ ID NO: 1093046 - RNA, 19 nt, Artificial Sequence
  Description of Artificial Sequence: Synthetic oligonucleotide
  Sense strand starting at position 2443 of SEQ ID NO: 915612
cgagggaaguuuguugguu

SEQ ID NO: 1093047 - RNA, 19 nt, Artificial Sequence
  Description of Artificial Sequence: Synthetic oligonucleotide
  Antisense strand to SEQ ID NO: 1093046
aaccaacaaacuucccucg

SEQ ID NO: 1093048 - RNA, 19 nt, Artificial Sequence
  Description of Artificial Sequence: Synthetic oligonucleotide
  Sense strand starting at position 2447 of SEQ ID NO: 915612
ggaaguuuguugguucauu

SEQ ID NO: 1093049 - RNA, 19 nt, Artificial Sequence
  Description of Artificial Sequence: Synthetic oligonucleotide
  Antisense strand to SEQ ID NO: 1093048
aaugaaccaacaaacuucc

SEQ ID NO: 1093050 - RNA, 19 nt, Artificial Sequence
  Description of Artificial Sequence: Synthetic oligonucleotide
  Sense strand starting at position 2603 of SEQ ID NO: 915612
ggguuugaccuggguaaua

SEQ ID NO: 1093051 - RNA, 19 nt, Artificial Sequence
  Description of Artificial Sequence: Synthetic oligonucleotide
  Antisense strand to SEQ ID NO: 1093050
uauuacccaggucaaaccc

SEQ ID NO: 1093052 - RNA, 19 nt, Artificial Sequence
  Description of Artificial Sequence: Synthetic oligonucleotide
  Sense strand starting at position 2615 of SEQ ID NO: 915612
gguaauaccucucuguagu

SEQ ID NO: 1093053 - RNA, 19 nt, Artificial Sequence
  Description of Artificial Sequence: Synthetic oligonucleotide
  Antisense strand to SEQ ID NO: 1093052
acuacagagagguauuacc

SEQ ID NO: 1093054 - RNA, 19 nt, Artificial Sequence
  Description of Artificial Sequence: Synthetic oligonucleotide
  Sense strand starting at position 2616 of SEQ ID NO: 915612
guaauaccucucuguagug

SEQ ID NO: 1093055 - RNA, 19 nt, Artificial Sequence
  Description of Artificial Sequence: Synthetic oligonucleotide
  Antisense strand to SEQ ID NO: 1093054
cacuacagagagguauuac

SEQ ID NO: 1093056 - RNA, 19 nt, Artificial Sequence
  Description of Artificial Sequence: Synthetic oligonucleotide
  Sense strand starting at position 2651 of SEQ ID NO: 915612
auaggagaucugggccaau

SEQ ID NO: 1093057 - RNA, 19 nt, Artificial Sequence
  Description of Artificial Sequence: Synthetic oligonucleotide
  Antisense strand to SEQ ID NO: 1093056
auuggcccagaucuccuau

SEQ ID NO: 1093058 - RNA, 19 nt, Artificial Sequence
  Description of Artificial Sequence: Synthetic oligonucleotide
  Sense strand starting at position 3036 of SEQ ID NO: 915612
auugcagcuguugaauuaa

SEQ ID NO: 1093059 - RNA, 19 nt, Artificial Sequence
  Description of Artificial Sequence: Synthetic oligonucleotide
  Antisense strand to SEQ ID NO: 1093058
uuaauucaacagcugcaau

SEQ ID NO: 1093060 - RNA, 19 nt, Artificial Sequence
  Description of Artificial Sequence: Synthetic oligonucleotide
  Sense strand starting at position 3071 of SEQ ID NO: 915612
ucacaauggucacuugauc

SEQ ID NO: 1093061 - RNA, 19 nt, Artificial Sequence
  Description of Artificial Sequence: Synthetic oligonucleotide
  Antisense strand to SEQ ID NO: 1093060
gaucaagugaccauuguga

SEQ ID NO: 1093062 - RNA, 19 nt, Artificial Sequence
  Description of Artificial Sequence: Synthetic oligonucleotide
  Sense strand starting at position 3082 of SEQ ID NO: 915612
acuugaucucuuugggcuu

SEQ ID NO: 1093063 - RNA, 19 nt, Artificial Sequence
  Description of Artificial Sequence: Synthetic oligonucleotide
  Antisense strand to SEQ ID NO: 1093062
aagcccaaagagaucaagu

SEQ ID NO: 1093064 - RNA, 19 nt, Artificial Sequence
  Description of Artificial Sequence: Synthetic oligonucleotide
  Sense strand starting at position 3134 of SEQ ID NO: 915612
ccagauguucuggaagggu

SEQ ID NO: 1093065 - RNA, 19 nt, Artificial Sequence
  Description of Artificial Sequence: Synthetic oligonucleotide
  Antisense strand to SEQ ID NO: 1093064
acccuuccagaacaucugg

SEQ ID NO: 1093066 - RNA, 19 nt, Artificial Sequence
  Description of Artificial Sequence: Synthetic oligonucleotide
  Sense strand starting at position 3143 of SEQ ID NO: 915612
cuggaaggguucuugcagu

SEQ ID NO: 1093067 - RNA, 19 nt, Artificial Sequence
  Description of Artificial Sequence: Synthetic oligonucleotide
  Antisense strand to SEQ ID NO: 1093066
acugcaagaacccuuccag

SEQ ID NO: 1093068 - RNA, 19 nt, Artificial Sequence
  Description of Artificial Sequence: Synthetic oligonucleotide
  Sense strand starting at position 3162 of SEQ ID NO: 915612
acuagcauccuaggauaau

SEQ ID NO: 1093069 - RNA, 19 nt, Artificial Sequence
  Description of Artificial Sequence: Synthetic oligonucleotide
  Antisense strand to SEQ ID NO: 1093068
auuauccuaggaugcuagu

SEQ ID NO: 1093070 - RNA, 19 nt, Artificial Sequence
  Description of Artificial Sequence: Synthetic oligonucleotide
  Sense strand starting at position 3177 of SEQ ID NO: 915612
uaauaacuauugccgguua

SEQ ID NO: 1093071 - RNA, 19 nt, Artificial Sequence
  Description of Artificial Sequence: Synthetic oligonucleotide
  Antisense strand to SEQ ID NO: 1093070
uaaccggcaauaguuauua

SEQ ID NO: 1093072 - RNA, 19 nt, Artificial Sequence
  Description of Artificial Sequence: Synthetic oligonucleotide
  Sense strand starting at position 3179 of SEQ ID NO: 915612
auaacuauugccgguuaac

SEQ ID NO: 1093073 - RNA, 19 nt, Artificial Sequence
  Description of Artificial Sequence: Synthetic oligonucleotide
  Antisense strand to SEQ ID NO: 1093072
guuaaccggcaauaguuau

SEQ ID NO: 1093074 - RNA, 19 nt, Artificial Sequence
  Description of Artificial Sequence: Synthetic oligonucleotide
  Sense strand starting at position 3182 of SEQ ID NO: 915612
acuauugccgguuaacuaa

SEQ ID NO: 1093075 - RNA, 19 nt, Artificial Sequence
  Description of Artificial Sequence: Synthetic oligonucleotide
  Antisense strand to SEQ ID NO: 1093074
uuaguuaaccggcaauagu

SEQ ID NO: 1093076 - RNA, 19 nt, Artificial Sequence
  Description of Artificial Sequence: Synthetic oligonucleotide
  Sense strand starting at position 3193 of SEQ ID NO: 915612
uuaacuaaggucugauuaa

SEQ ID NO: 1093077 - RNA, 19 nt, Artificial Sequence
  Description of Artificial Sequence: Synthetic oligonucleotide
  Antisense strand to SEQ ID NO: 1093076
uuaaucagaccuuaguuaa

SEQ ID NO: 1093078 - RNA, 19 nt, Artificial Sequence
  Description of Artificial Sequence: Synthetic oligonucleotide
  Sense strand starting at position 3244 of SEQ ID NO: 915612
cuggacuaauuggagagaa

SEQ ID NO: 1093079 - RNA, 19 nt, Artificial Sequence
  Description of Artificial Sequence: Synthetic oligonucleotide
  Antisense strand to SEQ ID NO: 1093078
uucucuccaauuaguccag

SEQ ID NO: 1093080 - RNA, 19 nt, Artificial Sequence
  Description of Artificial Sequence: Synthetic oligonucleotide
  Sense strand starting at position 3292 of SEQ ID NO: 915612
gugguucucagaugaaguu

SEQ ID NO: 1093081 - RNA, 19 nt, Artificial Sequence
  Description of Artificial Sequence: Synthetic oligonucleotide
  Antisense strand to SEQ ID NO: 1093080
aacuucaucugagaaccac

SEQ ID NO: 1093082 - RNA, 19 nt, Artificial Sequence
  Description of Artificial Sequence: Synthetic oligonucleotide
  Sense strand starting at position 3293 of SEQ ID NO: 915612
ugguucucagaugaaguuu

SEQ ID NO: 1093083 - RNA, 19 nt, Artificial Sequence
  Description of Artificial Sequence: Synthetic oligonucleotide
  Antisense strand to SEQ ID NO: 1093082
aaacuucaucugagaacca

SEQ ID NO: 1093084 - RNA, 19 nt, Artificial Sequence
  Description of Artificial Sequence: Synthetic oligonucleotide
  Sense strand starting at position 3345 of SEQ ID NO: 915612
acauguuugccuuauuaag

SEQ ID NO: 1093085 - RNA, 19 nt, Artificial Sequence
  Description of Artificial Sequence: Synthetic oligonucleotide
  Antisense strand to SEQ ID NO: 1093084
cuuaauaaggcaaacaugu

SEQ ID NO: 1093086 - RNA, 19 nt, Artificial Sequence
  Description of Artificial Sequence: Synthetic oligonucleotide
  Sense strand starting at position 3347 of SEQ ID NO: 915612
auguuugccuuauuaagaa

SEQ ID NO: 1093087 - RNA, 19 nt, Artificial Sequence
  Description of Artificial Sequence: Synthetic oligonucleotide
  Antisense strand to SEQ ID NO: 1093086
uucuuaauaaggcaaacau

SEQ ID NO: 1093088 - RNA, 19 nt, Artificial Sequence
  Description of Artificial Sequence: Synthetic oligonucleotide
  Sense strand starting at position 3416 of SEQ ID NO: 915612
ggagccucuucagugaguu

SEQ ID NO: 1093089 - RNA, 19 nt, Artificial Sequence
  Description of Artificial Sequence: Synthetic oligonucleotide
  Antisense strand to SEQ ID NO: 1093088
aacucacugaagaggcucc

SEQ ID NO: 1093090 - RNA, 19 nt, Artificial Sequence
  Description of Artificial Sequence: Synthetic oligonucleotide
  Sense strand starting at position 3525 of SEQ ID NO: 915612
ugugacuguccugaagguu

SEQ ID NO: 1093091 - RNA, 19 nt, Artificial Sequence
  Description of Artificial Sequence: Synthetic oligonucleotide
  Antisense strand to SEQ ID NO: 1093090
aaccuucaggacagucaca

SEQ ID NO: 1093092 - RNA, 19 nt, Artificial Sequence
  Description of Artificial Sequence: Synthetic oligonucleotide
  Sense strand starting at position 3528 of SEQ ID NO: 915612
gacuguccugaagguucua

SEQ ID NO: 1093093 - RNA, 19 nt, Artificial Sequence
  Description of Artificial Sequence: Synthetic oligonucleotide
  Antisense strand to SEQ ID NO: 1093092
uagaaccuucaggacaguc

SEQ ID NO: 1093094 - RNA, 19 nt, Artificial Sequence
  Description of Artificial Sequence: Synthetic oligonucleotide
  Sense strand starting at position 3656 of SEQ ID NO: 915612
gguuuaaccucugauuuau

SEQ ID NO: 1093095 - RNA, 19 nt, Artificial Sequence
  Description of Artificial Sequence: Synthetic oligonucleotide
  Antisense strand to SEQ ID NO: 1093094
auaaaucagagguuaaacc

SEQ ID NO: 1093096 - RNA, 19 nt, Artificial Sequence
  Description of Artificial Sequence: Synthetic oligonucleotide
  Sense strand starting at position 87 of SEQ ID NO: 915613
gugugacuugcccuguguu

SEQ ID NO: 1093097 - RNA, 19 nt, Artificial Sequence
  Description of Artificial Sequence: Synthetic oligonucleotide
  Antisense strand to SEQ ID NO: 1093096
aacacagggcaagucacac

SEQ ID NO: 1093098 - RNA, 19 nt, Artificial Sequence
  Description of Artificial Sequence: Synthetic oligonucleotide
  Sense strand starting at position 90 of SEQ ID NO: 915613
ugacuugcccuguguuauc

SEQ ID NO: 1093099 - RNA, 19 nt, Artificial Sequence
  Description of Artificial Sequence: Synthetic oligonucleotide
  Antisense strand to SEQ ID NO: 1093098
gauaacacagggcaaguca

SEQ ID NO: 1093100 - RNA, 19 nt, Artificial Sequence
  Description of Artificial Sequence: Synthetic oligonucleotide
  Sense strand starting at position 101 of SEQ ID NO: 915613
guguuaucucagcaccgca

SEQ ID NO: 1093101 - RNA, 19 nt, Artificial Sequence
  Description of Artificial Sequence: Synthetic oligonucleotide
  Antisense strand to SEQ ID NO: 1093100
ugcggugcugagauaacac

SEQ ID NO: 1093102 - RNA, 19 nt, Artificial Sequence
  Description of Artificial Sequence: Synthetic oligonucleotide
  Sense strand starting at position 284 of SEQ ID NO: 915613
ugcagagcugcuuaggaaa

SEQ ID NO: 1093103 - RNA, 19 nt, Artificial Sequence
  Description of Artificial Sequence: Synthetic oligonucleotide
  Antisense strand to SEQ ID NO: 1093102
uuuccuaagcagcucugca

SEQ ID NO: 1093104 - RNA, 19 nt, Artificial Sequence
  Description of Artificial Sequence: Synthetic oligonucleotide
  Sense strand starting at position 1102 of SEQ ID NO: 915613
ggcauucguucgugugcaa

SEQ ID NO: 1093105 - RNA, 19 nt, Artificial Sequence
  Description of Artificial Sequence: Synthetic oligonucleotide
  Antisense strand to SEQ ID NO: 1093104
uugcacacgaacgaaugcc

SEQ ID NO: 1093106 - RNA, 19 nt, Artificial Sequence
  Description of Artificial Sequence: Synthetic oligonucleotide
  Sense strand starting at position 1103 of SEQ ID NO: 915613
gcauucguucgugugcaag

SEQ ID NO: 1093107 - RNA, 19 nt, Artificial Sequence
  Description of Artificial Sequence: Synthetic oligonucleotide
  Antisense strand to SEQ ID NO: 1093106
cuugcacacgaacgaaugc

SEQ ID NO: 1093108 - RNA, 19 nt, Artificial Sequence
  Description of Artificial Sequence: Synthetic oligonucleotide
  Sense strand starting at position 1517 of SEQ ID NO: 915613
cccgcucccucuugaauuu

SEQ ID NO: 1093109 - RNA, 19 nt, Artificial Sequence
  Description of Artificial Sequence: Synthetic oligonucleotide
  Antisense strand to SEQ ID NO: 1093108
aaauucaagagggagcggg

SEQ ID NO: 1093110 - RNA, 19 nt, Artificial Sequence
  Description of Artificial Sequence: Synthetic oligonucleotide
  Sense strand starting at position 1756 of SEQ ID NO: 915613
ggguuauccuguucucuuu

SEQ ID NO: 1093111 - RNA, 19 nt, Artificial Sequence
  Description of Artificial Sequence: Synthetic oligonucleotide
  Antisense strand to SEQ ID NO: 1093110
aaagagaacaggauaaccc

SEQ ID NO: 1093112 - RNA, 19 nt, Artificial Sequence
  Description of Artificial Sequence: Synthetic oligonucleotide
  Sense strand starting at position 2114 of SEQ ID NO: 915613
ugcuuucucucccaaagga

SEQ ID NO: 1093113 - RNA, 19 nt, Artificial Sequence
  Description of Artificial Sequence: Synthetic oligonucleotide
  Antisense strand to SEQ ID NO: 1093112
uccuuugggagagaaagca

SEQ ID NO: 1093114 - RNA, 19 nt, Artificial Sequence
  Description of Artificial Sequence: Synthetic oligonucleotide
  Sense strand starting at position 2204 of SEQ ID NO: 915613
cuuccaucuuccgggaaca

SEQ ID NO: 1093115 - RNA, 19 nt, Artificial Sequence
  Description of Artificial Sequence: Synthetic oligonucleotide
  Antisense strand to SEQ ID NO: 1093114
uguucccggaagauggaag

SEQ ID NO: 1093116 - RNA, 19 nt, Artificial Sequence
  Description of Artificial Sequence: Synthetic oligonucleotide
  Sense strand starting at position 2431 of SEQ ID NO: 915613
ggcagugcuuccuggcuca

SEQ ID NO: 1093117 - RNA, 19 nt, Artificial Sequence
  Description of Artificial Sequence: Synthetic oligonucleotide
  Antisense strand to SEQ ID NO: 1093116
ugagccaggaagcacugcc

SEQ ID NO: 1093118 - RNA, 19 nt, Artificial Sequence
  Description of Artificial Sequence: Synthetic oligonucleotide
  Sense strand starting at position 2537 of SEQ ID NO: 915613
ugggcauccuuggucuaga

SEQ ID NO: 1093119 - RNA, 19 nt, Artificial Sequence
  Description of Artificial Sequence: Synthetic oligonucleotide
  Antisense strand to SEQ ID NO: 1093118
ucuagaccaaggaugccca

SEQ ID NO: 1093120 - RNA, 19 nt, Artificial Sequence
  Description of Artificial Sequence: Synthetic oligonucleotide
  Sense strand starting at position 2538 of SEQ ID NO: 915613
gggcauccuuggucuagaa

SEQ ID NO: 1093121 - RNA, 19 nt, Artificial Sequence
  Description of Artificial Sequence: Synthetic oligonucleotide
  Antisense strand to SEQ ID NO: 1093120
uucuagaccaaggaugccc

SEQ ID NO: 1093122 - RNA, 19 nt, Artificial Sequence
  Description of Artificial Sequence: Synthetic oligonucleotide
  Sense strand starting at position 2540 of SEQ ID NO: 915613
gcauccuuggucuagaaga

SEQ ID NO: 1093123 - RNA, 19 nt, Artificial Sequence
  Description of Artificial Sequence: Synthetic oligonucleotide
  Antisense strand to SEQ ID NO: 1093122
ucuucuagaccaaggaugc

SEQ ID NO: 1093124 - RNA, 19 nt, Artificial Sequence
  Description of Artificial Sequence: Synthetic oligonucleotide
  Sense strand starting at position 2787 of SEQ ID NO: 915613
gaaagagagcugcaucuua

SEQ ID NO: 1093125 - RNA, 19 nt, Artificial Sequence
  Description of Artificial Sequence: Synthetic oligonucleotide
  Antisense strand to SEQ ID NO: 1093124
uaagaugcagcucucuuuc

SEQ ID NO: 1093126 - RNA, 19 nt, Artificial Sequence
  Description of Artificial Sequence: Synthetic oligonucleotide
  Sense strand starting at position 2900 of SEQ ID NO: 915613
gguaaugggcccugagcuu

SEQ ID NO: 1093127 - RNA, 19 nt, Artificial Sequence
  Description of Artificial Sequence: Synthetic oligonucleotide
  Antisense strand to SEQ ID NO: 1093126
aagcucagggcccauuacc

SEQ ID NO: 1093128 - RNA, 19 nt, Artificial Sequence
  Description of Artificial Sequence: Synthetic oligonucleotide
  Sense strand starting at position 2960 of SEQ ID NO: 915613
gcagcuuugguacgauuga

SEQ ID NO: 1093129 - RNA, 19 nt, Artificial Sequence
  Description of Artificial Sequence: Synthetic oligonucleotide
  Antisense strand to SEQ ID NO: 1093128
ucaaucguaccaaagcugc

SEQ ID NO: 1093130 - RNA, 19 nt, Artificial Sequence
  Description of Artificial Sequence: Synthetic oligonucleotide
  Sense strand starting at position 3020 of SEQ ID NO: 915613
gggaaugaauggccgaguu

SEQ ID NO: 1093131 - RNA, 19 nt, Artificial Sequence
  Description of Artificial Sequence: Synthetic oligonucleotide
  Antisense strand to SEQ ID NO: 1093130
aacucggccauucauuccc

SEQ ID NO: 1093132 - RNA, 19 nt, Artificial Sequence
  Description of Artificial Sequence: Synthetic oligonucleotide
  Sense strand starting at position 3022 of SEQ ID NO: 915613
gaaugaauggccgaguuuc

SEQ ID NO: 1093133 - RNA, 19 nt, Artificial Sequence
  Description of Artificial Sequence: Synthetic oligonucleotide
  Antisense strand to SEQ ID NO: 1093132
gaaacucggccauucauuc

SEQ ID NO: 1093134 - RNA, 19 nt, Artificial Sequence
  Description of Artificial Sequence: Synthetic oligonucleotide
  Sense strand starting at position 3032 of SEQ ID NO: 915613
ccgaguuucugguuuggaa

SEQ ID NO: 1093135 - RNA, 19 nt, Artificial Sequence
  Description of Artificial Sequence: Synthetic oligonucleotide
  Antisense strand to SEQ ID NO: 1093134
uuccaaaccagaaacucgg

SEQ ID NO: 1093136 - RNA, 19 nt, Artificial Sequence
  Description of Artificial Sequence: Synthetic oligonucleotide
  Sense strand starting at position 3091 of SEQ ID NO: 915613
gccagacucuaauagggua

SEQ ID NO: 1093137 - RNA, 19 nt, Artificial Sequence
  Description of Artificial Sequence: Synthetic oligonucleotide
  Antisense strand to SEQ ID NO: 1093136
uacccuauuagagucuggc

SEQ ID NO: 1093138 - RNA, 19 nt, Artificial Sequence
  Description of Artificial Sequence: Synthetic oligonucleotide
  Sense strand starting at position 3104 of SEQ ID NO: 915613
aggguauucuacccaagca

SEQ ID NO: 1093139 - RNA, 19 nt, Artificial Sequence
  Description of Artificial Sequence: Synthetic oligonucleotide
  Antisense strand to SEQ ID NO: 1093138
ugcuuggguagaauacccu

SEQ ID NO: 1093140 - RNA, 19 nt, Artificial Sequence
  Description of Artificial Sequence: Synthetic oligonucleotide
  Sense strand starting at position 3456 of SEQ ID NO: 915613
gugagcuugaaaugagaga

SEQ ID NO: 1093141 - RNA, 19 nt, Artificial Sequence
  Description of Artificial Sequence: Synthetic oligonucleotide
  Antisense strand to SEQ ID NO: 1093140
ucucucauuucaagcucac

SEQ ID NO: 1093142 - RNA, 19 nt, Artificial Sequence
  Description of Artificial Sequence: Synthetic oligonucleotide
  Sense strand starting at position 3469 of SEQ ID NO: 915613
gagagaucuugucaauuuc

SEQ ID NO: 1093143 - RNA, 19 nt, Artificial Sequence
  Description of Artificial Sequence: Synthetic oligonucleotide
  Antisense strand to SEQ ID NO: 1093142
gaaauugacaagaucucuc

SEQ ID NO: 1093144 - RNA, 19 nt, Artificial Sequence
  Description of Artificial Sequence: Synthetic oligonucleotide
  Sense strand starting at position 3542 of SEQ ID NO: 915613
aggauagaauguugacagu

SEQ ID NO: 1093145 - RNA, 19 nt, Artificial Sequence
  Description of Artificial Sequence: Synthetic oligonucleotide
  Antisense strand to SEQ ID NO: 1093144
acugucaacauucuauccu

SEQ ID NO: 1093146 - RNA, 19 nt, Artificial Sequence
  Description of Artificial Sequence: Synthetic oligonucleotide
  Sense strand starting at position 3605 of SEQ ID NO: 915613
acagaugcauuguggugua

SEQ ID NO: 1093147 - RNA, 19 nt, Artificial Sequence
  Description of Artificial Sequence: Synthetic oligonucleotide
  Antisense strand to SEQ ID NO: 1093146
uacaccacaaugcaucugu

SEQ ID NO: 1093148 - RNA, 19 nt, Artificial Sequence
  Description of Artificial Sequence: Synthetic oligonucleotide
  Sense strand starting at position 3618 of SEQ ID NO: 915613
gguguagugacacaaugga

SEQ ID NO: 1093149 - RNA, 19 nt, Artificial Sequence
  Description of Artificial Sequence: Synthetic oligonucleotide
  Antisense strand to SEQ ID NO: 1093148
uccauugugucacuacacc

SEQ ID NO: 1093150 - RNA, 19 nt, Artificial Sequence
  Description of Artificial Sequence: Synthetic oligonucleotide
  Sense strand starting at position 30 of SEQ ID NO: 915614
gcucgaucauaccuaccua

SEQ ID NO: 1093151 - RNA, 19 nt, Artificial Sequence
  Description of Artificial Sequence: Synthetic oligonucleotide
  Antisense strand to SEQ ID NO: 1093150
uagguagguaugaucgagc

SEQ ID NO: 1093152 - RNA, 19 nt, Artificial Sequence
  Description of Artificial Sequence: Synthetic oligonucleotide
  Sense strand starting at position 65 of SEQ ID NO: 915614
gcuacaugcauguggacau

SEQ ID NO: 1093153 - RNA, 19 nt, Artificial Sequence
  Description of Artificial Sequence: Synthetic oligonucleotide
  Antisense strand to SEQ ID NO: 1093152
auguccacaugcauguagc

SEQ ID NO: 1093154 - RNA, 19 nt, Artificial Sequence
  Description of Artificial Sequence: Synthetic oligonucleotide
  Sense strand starting at position 76 of SEQ ID NO: 915614
guggacauaacaugugcua

SEQ ID NO: 1093155 - RNA, 19 nt, Artificial Sequence
  Description of Artificial Sequence: Synthetic oligonucleotide
  Antisense strand to SEQ ID NO: 1093154
uagcacauguuauguccac

SEQ ID NO: 1093156 - RNA, 19 nt, Artificial Sequence
  Description of Artificial Sequence: Synthetic oligonucleotide
  Sense strand starting at position 78 of SEQ ID NO: 915614
ggacauaacaugugcuaag

SEQ ID NO: 1093157 - RNA, 19 nt, Artificial Sequence
  Description of Artificial Sequence: Synthetic oligonucleotide
  Antisense strand to SEQ ID NO: 1093156
cuuagcacauguuaugucc

SEQ ID NO: 1093158 - RNA, 19 nt, Artificial Sequence
  Description of Artificial Sequence: Synthetic oligonucleotide
  Sense strand starting at position 79 of SEQ ID NO: 915614
gacauaacaugugcuaagu

SEQ ID NO: 1093159 - RNA, 19 nt, Artificial Sequence
  Description of Artificial Sequence: Synthetic oligonucleotide
  Antisense strand to SEQ ID NO: 1093158
acuuagcacauguuauguc

SEQ ID NO: 1093160 - RNA, 19 nt, Artificial Sequence
  Description of Artificial Sequence: Synthetic oligonucleotide
  Sense strand starting at position 89 of SEQ ID NO: 915614
gugcuaagugcuuagcacu

SEQ ID NO: 1093161 - RNA, 19 nt, Artificial Sequence
  Description of Artificial Sequence: Synthetic oligonucleotide
  Antisense strand to SEQ ID NO: 1093160
agugcuaagcacuuagcac

SEQ ID NO: 1093162 - RNA, 19 nt, Artificial Sequence
  Description of Artificial Sequence: Synthetic oligonucleotide
  Sense strand starting at position 114 of SEQ ID NO: 915614
gguuguaguagguacacaa

SEQ ID NO: 1093163 - RNA, 19 nt, Artificial Sequence
  Description of Artificial Sequence: Synthetic oligonucleotide
  Antisense strand to SEQ ID NO: 1093162
uuguguaccuacuacaacc

SEQ ID NO: 1093164 - RNA, 19 nt, Artificial Sequence
  Description of Artificial Sequence: Synthetic oligonucleotide
  Sense strand starting at position 336 of SEQ ID NO: 915614
cccagcuuugcuggaauca

SEQ ID NO: 1093165 - RNA, 19 nt, Artificial Sequence
  Description of Artificial Sequence: Synthetic oligonucleotide
  Antisense strand to SEQ ID NO: 1093164
ugauuccagcaaagcuggg

SEQ ID NO: 1093166 - RNA, 19 nt, Artificial Sequence
  Description of Artificial Sequence: Synthetic oligonucleotide
  Sense strand starting at position 375 of SEQ ID NO: 915614
cugggcuugucagagaauu

SEQ ID NO: 1093167 - RNA, 19 nt, Artificial Sequence
  Description of Artificial Sequence: Synthetic oligonucleotide
  Antisense strand to SEQ ID NO: 1093166
aauucucugacaagcccag

SEQ ID NO: 1093168 - RNA, 19 nt, Artificial Sequence
  Description of Artificial Sequence: Synthetic oligonucleotide
  Sense strand starting at position 377 of SEQ ID NO: 915614
gggcuugucagagaauugg

SEQ ID NO: 1093169 - RNA, 19 nt, Artificial Sequence
  Description of Artificial Sequence: Synthetic oligonucleotide
  Antisense strand to SEQ ID NO: 1093168
ccaauucucugacaagccc

SEQ ID NO: 1093170 - RNA, 19 nt, Artificial Sequence
  Description of Artificial Sequence: Synthetic oligonucleotide
  Sense strand starting at position 381 of SEQ ID NO: 915614
uugucagagaauuggcuuu

SEQ ID NO: 1093171 - RNA, 19 nt, Artificial Sequence
  Description of Artificial Sequence: Synthetic oligonucleotide
  Antisense strand to SEQ ID NO: 1093170
aaagccaauucucugacaa

SEQ ID NO: 1093172 - RNA, 19 nt, Artificial Sequence
  Description of Artificial Sequence: Synthetic oligonucleotide
  Sense strand starting at position 388 of SEQ ID NO: 915614
agaauuggcuuuccaugaa

SEQ ID NO: 1093173 - RNA, 19 nt, Artificial Sequence
  Description of Artificial Sequence: Synthetic oligonucleotide
  Antisense strand to SEQ ID NO: 1093172
uucauggaaagccaauucu

SEQ ID NO: 1093174 - RNA, 19 nt, Artificial Sequence
  Description of Artificial Sequence: Synthetic oligonucleotide
  Sense strand starting at position 391 of SEQ ID NO: 915614
auuggcuuuccaugaaugu

SEQ ID NO: 1093175 - RNA, 19 nt, Artificial Sequence
  Description of Artificial Sequence: Synthetic oligonucleotide
  Antisense strand to SEQ ID NO: 1093174
acauucauggaaagccaau

SEQ ID NO: 1093176 - RNA, 19 nt, Artificial Sequence
  Description of Artificial Sequence: Synthetic oligonucleotide
  Sense strand starting at position 392 of SEQ ID NO: 915614
uuggcuuuccaugaauguu

SEQ ID NO: 1093177 - RNA, 19 nt, Artificial Sequence
  Description of Artificial Sequence: Synthetic oligonucleotide
  Antisense strand to SEQ ID NO: 1093176
aacauucauggaaagccaa

SEQ ID NO: 1093178 - RNA, 19 nt, Artificial Sequence
  Description of Artificial Sequence: Synthetic oligonucleotide
  Sense strand starting at position 485 of SEQ ID NO: 915614
aucauucucuggcuagcaa

SEQ ID NO: 1093179 - RNA, 19 nt, Artificial Sequence
  Description of Artificial Sequence: Synthetic oligonucleotide
  Antisense strand to SEQ ID NO: 1093178
uugcuagccagagaaugau

SEQ ID NO: 1093180 - RNA, 19 nt, Artificial Sequence
  Description of Artificial Sequence: Synthetic oligonucleotide
  Sense strand starting at position 566 of SEQ ID NO: 915614
ucaggaucuuuagguugaa

SEQ ID NO: 1093181 - RNA, 19 nt, Artificial Sequence
  Description of Artificial Sequence: Synthetic oligonucleotide
  Antisense strand to SEQ ID NO: 1093180
uucaaccuaaagauccuga

SEQ ID NO: 1093182 - RNA, 19 nt, Artificial Sequence
  Description of Artificial Sequence: Synthetic oligonucleotide
  Sense strand starting at position 567 of SEQ ID NO: 915614
caggaucuuuagguugaaa

SEQ ID NO: 1093183 - RNA, 19 nt, Artificial Sequence
  Description of Artificial Sequence: Synthetic oligonucleotide
  Antisense strand to SEQ ID NO: 1093182
uuucaaccuaaagauccug

SEQ ID NO: 1093184 - RNA, 19 nt, Artificial Sequence
  Description of Artificial Sequence: Synthetic oligonucleotide
  Sense strand starting at position 602 of SEQ ID NO: 915614
uccuccgcuuucugagaua

SEQ ID NO: 1093185 - RNA, 19 nt, Artificial Sequence
  Description of Artificial Sequence: Synthetic oligonucleotide
  Antisense strand to SEQ ID NO: 1093184
uaucucagaaagcggagga

SEQ ID NO: 1093186 - RNA, 19 nt, Artificial Sequence
  Description of Artificial Sequence: Synthetic oligonucleotide
  Sense strand starting at position 713 of SEQ ID NO: 915614
gugugacuugcccuguguu

SEQ ID NO: 1093187 - RNA, 19 nt, Artificial Sequence
  Description of Artificial Sequence: Synthetic oligonucleotide
  Antisense strand to SEQ ID NO: 1093186
aacacagggcaagucacac

SEQ ID NO: 1093188 - RNA, 19 nt, Artificial Sequence
  Description of Artificial Sequence: Synthetic oligonucleotide
  Sense strand starting at position 716 of SEQ ID NO: 915614
ugacuugcccuguguuauc

SEQ ID NO: 1093189 - RNA, 19 nt, Artificial Sequence
  Description of Artificial Sequence: Synthetic oligonucleotide
  Antisense strand to SEQ ID NO: 1093188
gauaacacagggcaaguca

SEQ ID NO: 1093190 - RNA, 19 nt, Artificial Sequence
  Description of Artificial Sequence: Synthetic oligonucleotide
  Sense strand starting at position 727 of SEQ ID NO: 915614
guguuaucucagcaccgca

SEQ ID NO: 1093191 - RNA, 19 nt, Artificial Sequence
  Description of Artificial Sequence: Synthetic oligonucleotide
  Antisense strand to SEQ ID NO: 1093190
ugcggugcugagauaacac

SEQ ID NO: 1093192 - RNA, 19 nt, Artificial Sequence
  Description of Artificial Sequence: Synthetic oligonucleotide
  Sense strand starting at position 910 of SEQ ID NO: 915614
ugcagagcugcuuaggaaa

SEQ ID NO: 1093193 - RNA, 19 nt, Artificial Sequence
  Description of Artificial Sequence: Synthetic oligonucleotide
  Antisense strand to SEQ ID NO: 1093192
uuuccuaagcagcucugca

SEQ ID NO: 1093194 - RNA, 19 nt, Artificial Sequence
  Description of Artificial Sequence: Synthetic oligonucleotide
  Sense strand starting at position 1728 of SEQ ID NO: 915614
ggcauucguucgugugcaa

SEQ ID NO: 1093195 - RNA, 19 nt, Artificial Sequence
  Description of Artificial Sequence: Synthetic oligonucleotide
  Antisense strand to SEQ ID NO: 1093194
uugcacacgaacgaaugcc

SEQ ID NO: 1093196 - RNA, 19 nt, Artificial Sequence
  Description of Artificial Sequence: Synthetic oligonucleotide
  Sense strand starting at position 1729 of SEQ ID NO: 915614
gcauucguucgugugcaag

SEQ ID NO: 1093197 - RNA, 19 nt, Artificial Sequence
  Description of Artificial Sequence: Synthetic oligonucleotide
  Antisense strand to SEQ ID NO: 1093196
cuugcacacgaacgaaugc

SEQ ID NO: 1093198 - RNA, 19 nt, Artificial Sequence
  Description of Artificial Sequence: Synthetic oligonucleotide
  Sense strand starting at position 2143 of SEQ ID NO: 915614
cccgcucccucuugaauuu

SEQ ID NO: 1093199 - RNA, 19 nt, Artificial Sequence
  Description of Artificial Sequence: Synthetic oligonucleotide
  Antisense strand to SEQ ID NO: 1093198
aaauucaagagggagcggg

SEQ ID NO: 1093200 - RNA, 19 nt, Artificial Sequence
  Description of Artificial Sequence: Synthetic oligonucleotide
  Sense strand starting at position 2382 of SEQ ID NO: 915614
ggguuauccuguucucuuu

SEQ ID NO: 1093201 - RNA, 19 nt, Artificial Sequence
  Description of Artificial Sequence: Synthetic oligonucleotide
  Antisense strand to SEQ ID NO: 1093200
aaagagaacaggauaaccc

SEQ ID NO: 1093202 - RNA, 19 nt, Artificial Sequence
  Description of Artificial Sequence: Synthetic oligonucleotide
  Sense strand starting at position 2740 of SEQ ID NO: 915614
ugcuuucucucccaaagga

SEQ ID NO: 1093203 - RNA, 19 nt, Artificial Sequence
  Description of Artificial Sequence: Synthetic oligonucleotide
  Antisense strand to SEQ ID NO: 1093202
uccuuugggagagaaagca

SEQ ID NO: 1093204 - RNA, 19 nt, Artificial Sequence
  Description of Artificial Sequence: Synthetic oligonucleotide
  Sense strand starting at position 2830 of SEQ ID NO: 915614
cuuccaucuuccgggaaca

SEQ ID NO: 1093205 - RNA, 19 nt, Artificial Sequence
  Description of Artificial Sequence: Synthetic oligonucleotide
  Antisense strand to SEQ ID NO: 1093204
uguucccggaagauggaag

SEQ ID NO: 1093206 - RNA, 19 nt, Artificial Sequence
  Description of Artificial Sequence: Synthetic oligonucleotide
  Sense strand starting at position 3057 of SEQ ID NO: 915614
ggcagugcuuccuggcuca

SEQ ID NO: 1093207 - RNA, 19 nt, Artificial Sequence
  Description of Artificial Sequence: Synthetic oligonucleotide
  Antisense strand to SEQ ID NO: 1093206
ugagccaggaagcacugcc

SEQ ID NO: 1093208 - RNA, 19 nt, Artificial Sequence
  Description of Artificial Sequence: Synthetic oligonucleotide
  Sense strand starting at position 3163 of SEQ ID NO: 915614
ugggcauccuuggucuaga

SEQ ID NO: 1093209 - RNA, 19 nt, Artificial Sequence
  Description of Artificial Sequence: Synthetic oligonucleotide
  Antisense strand to SEQ ID NO: 1093208
ucuagaccaaggaugccca

SEQ ID NO: 1093210 - RNA, 19 nt, Artificial Sequence
  Description of Artificial Sequence: Synthetic oligonucleotide
  Sense strand starting at position 3164 of SEQ ID NO: 915614
gggcauccuuggucuagaa

SEQ ID NO: 1093211 - RNA, 19 nt, Artificial Sequence
  Description of Artificial Sequence: Synthetic oligonucleotide
  Antisense strand to SEQ ID NO: 1093210
uucuagaccaaggaugccc

SEQ ID NO: 1093212 - RNA, 19 nt, Artificial Sequence
  Description of Artificial Sequence: Synthetic oligonucleotide
  Sense strand starting at position 3166 of SEQ ID NO: 915614
gcauccuuggucuagaaga

SEQ ID NO: 1093213 - RNA, 19 nt, Artificial Sequence
  Description of Artificial Sequence: Synthetic oligonucleotide
  Antisense strand to SEQ ID NO: 1093212
ucuucuagaccaaggaugc

SEQ ID NO: 1093214 - RNA, 19 nt, Artificial Sequence
  Description of Artificial Sequence: Synthetic oligonucleotide
  Sense strand starting at position 3413 of SEQ ID NO: 915614
gaaagagagcugcaucuua

SEQ ID NO: 1093215 - RNA, 19 nt, Artificial Sequence
  Description of Artificial Sequence: Synthetic oligonucleotide
  Antisense strand to SEQ ID NO: 1093214
uaagaugcagcucucuuuc

SEQ ID NO: 1093216 - RNA, 19 nt, Artificial Sequence
  Description of Artificial Sequence: Synthetic oligonucleotide
  Sense strand starting at position 3526 of SEQ ID NO: 915614
gguaaugggcccugagcuu

SEQ ID NO: 1093217 - RNA, 19 nt, Artificial Sequence
  Description of Artificial Sequence: Synthetic oligonucleotide
  Antisense strand to SEQ ID NO: 1093216
aagcucagggcccauuacc

SEQ ID NO: 1093218 - RNA, 19 nt, Artificial Sequence
  Description of Artificial Sequence: Synthetic oligonucleotide
  Sense strand starting at position 3586 of SEQ ID NO: 915614
gcagcuuugguacgauuga

SEQ ID NO: 1093219 - RNA, 19 nt, Artificial Sequence
  Description of Artificial Sequence: Synthetic oligonucleotide
  Antisense strand to SEQ ID NO: 1093218
ucaaucguaccaaagcugc

SEQ ID NO: 1093220 - RNA, 19 nt, Artificial Sequence
  Description of Artificial Sequence: Synthetic oligonucleotide
  Sense strand starting at position 3646 of SEQ ID NO: 915614
gggaaugaauggccgaguu

SEQ ID NO: 1093221 - RNA, 19 nt, Artificial Sequence
  Description of Artificial Sequence: Synthetic oligonucleotide
  Antisense strand to SEQ ID NO: 1093220
aacucggccauucauuccc

SEQ ID NO: 1093222 - RNA, 19 nt, Artificial Sequence
  Description of Artificial Sequence: Synthetic oligonucleotide
  Sense strand starting at position 3648 of SEQ ID NO: 915614
gaaugaauggccgaguuuc

SEQ ID NO: 1093223 - RNA, 19 nt, Artificial Sequence
  Description of Artificial Sequence: Synthetic oligonucleotide
  Antisense strand to SEQ ID NO: 1093222
gaaacucggccauucauuc

SEQ ID NO: 1093224 - RNA, 19 nt, Artificial Sequence
  Description of Artificial Sequence: Synthetic oligonucleotide
  Sense strand starting at position 3658 of SEQ ID NO: 915614
ccgaguuucugguuuggaa

SEQ ID NO: 1093225 - RNA, 19 nt, Artificial Sequence
  Description of Artificial Sequence: Synthetic oligonucleotide
  Antisense strand to SEQ ID NO: 1093224
uuccaaaccagaaacucgg

SEQ ID NO: 1093226 - RNA, 19 nt, Artificial Sequence
  Description of Artificial Sequence: Synthetic oligonucleotide
  Sense strand starting at position 3717 of SEQ ID NO: 915614
gccagacucuaauagggua

SEQ ID NO: 1093227 - RNA, 19 nt, Artificial Sequence
  Description of Artificial Sequence: Synthetic oligonucleotide
  Antisense strand to SEQ ID NO: 1093226
uacccuauuagagucuggc

SEQ ID NO: 1093228 - RNA, 19 nt, Artificial Sequence
  Description of Artificial Sequence: Synthetic oligonucleotide
  Sense strand starting at position 3730 of SEQ ID NO: 915614
aggguauucuacccaagca

SEQ ID NO: 1093229 - RNA, 19 nt, Artificial Sequence
  Description of Artificial Sequence: Synthetic oligonucleotide
  Antisense strand to SEQ ID NO: 1093228
ugcuuggguagaauacccu

SEQ ID NO: 1093230 - RNA, 19 nt, Artificial Sequence
  Description of Artificial Sequence: Synthetic oligonucleotide
  Sense strand starting at position 17 of SEQ ID NO: 915615
ccucaucuuuaaguuagga

SEQ ID NO: 1093231 - RNA, 19 nt, Artificial Sequence
  Description of Artificial Sequence: Synthetic oligonucleotide
  Antisense strand to SEQ ID NO: 1093230
uccuaacuuaaagaugagg

SEQ ID NO: 1093232 - RNA, 19 nt, Artificial Sequence
  Description of Artificial Sequence: Synthetic oligonucleotide
  Sense strand starting at position 27 of SEQ ID NO: 915615
aaguuaggaucauucuaug

SEQ ID NO: 1093233 - RNA, 19 nt, Artificial Sequence
  Description of Artificial Sequence: Synthetic oligonucleotide
  Antisense strand to SEQ ID NO: 1093232
cauagaaugauccuaacuu

SEQ ID NO: 1093234 - RNA, 19 nt, Artificial Sequence
  Description of Artificial Sequence: Synthetic oligonucleotide
  Sense strand starting at position 75 of SEQ ID NO: 915615
auuaguguacucugaacag

SEQ ID NO: 1093235 - RNA, 19 nt, Artificial Sequence
  Description of Artificial Sequence: Synthetic oligonucleotide
  Antisense strand to SEQ ID NO: 1093234
cuguucagaguacacuaau

SEQ ID NO: 1093236 - RNA, 19 nt, Artificial Sequence
  Description of Artificial Sequence: Synthetic oligonucleotide
  Sense strand starting at position 140 of SEQ ID NO: 915615
cuuccaagcucagugagaa

SEQ ID NO: 1093237 - RNA, 19 nt, Artificial Sequence
  Description of Artificial Sequence: Synthetic oligonucleotide
  Antisense strand to SEQ ID NO: 1093236
uucucacugagcuuggaag

SEQ ID NO: 1093238 - RNA, 19 nt, Artificial Sequence
  Description of Artificial Sequence: Synthetic oligonucleotide
  Sense strand starting at position 141 of SEQ ID NO: 915615
uuccaagcucagugagaag

SEQ ID NO: 1093239 - RNA, 19 nt, Artificial Sequence
  Description of Artificial Sequence: Synthetic oligonucleotide
  Antisense strand to SEQ ID NO: 1093238
cuucucacugagcuuggaa

SEQ ID NO: 1093240 - RNA, 19 nt, Artificial Sequence
  Description of Artificial Sequence: Synthetic oligonucleotide
  Sense strand starting at position 228 of SEQ ID NO: 915615
ugggcuacuggucaucaau

SEQ ID NO: 1093241 - RNA, 19 nt, Artificial Sequence
  Description of Artificial Sequence: Synthetic oligonucleotide
  Antisense strand to SEQ ID NO: 1093240
auugaugaccaguagccca

SEQ ID NO: 1093242 - RNA, 19 nt, Artificial Sequence
  Description of Artificial Sequence: Synthetic oligonucleotide
  Sense strand starting at position 230 of SEQ ID NO: 915615
ggcuacuggucaucaauaa

SEQ ID NO: 1093243 - RNA, 19 nt, Artificial Sequence
  Description of Artificial Sequence: Synthetic oligonucleotide
  Antisense strand to SEQ ID NO: 1093242
uuauugaugaccaguagcc

SEQ ID NO: 1093244 - RNA, 19 nt, Artificial Sequence
  Description of Artificial Sequence: Synthetic oligonucleotide
  Sense strand starting at position 231 of SEQ ID NO: 915615
gcuacuggucaucaauaag

SEQ ID NO: 1093245 - RNA, 19 nt, Artificial Sequence
  Description of Artificial Sequence: Synthetic oligonucleotide
  Antisense strand to SEQ ID NO: 1093244
cuuauugaugaccaguagc

SEQ ID NO: 1093246 - RNA, 19 nt, Artificial Sequence
  Description of Artificial Sequence: Synthetic oligonucleotide
  Sense strand starting at position 300 of SEQ ID NO: 915615
agugguucucucuaggaag

SEQ ID NO: 1093247 - RNA, 19 nt, Artificial Sequence
  Description of Artificial Sequence: Synthetic oligonucleotide
  Antisense strand to SEQ ID NO: 1093246
cuuccuagagagaaccacu

SEQ ID NO: 1093248 - RNA, 19 nt, Artificial Sequence
  Description of Artificial Sequence: Synthetic oligonucleotide
  Sense strand starting at position 366 of SEQ ID NO: 915615
gcuguuccucaaguguguu

SEQ ID NO: 1093249 - RNA, 19 nt, Artificial Sequence
  Description of Artificial Sequence: Synthetic oligonucleotide
  Antisense strand to SEQ ID NO: 1093248
aacacacuugaggaacagc

SEQ ID NO: 1093250 - RNA, 19 nt, Artificial Sequence
  Description of Artificial Sequence: Synthetic oligonucleotide
  Sense strand starting at position 376 of SEQ ID NO: 915615
aaguguguugggcaggaaa

SEQ ID NO: 1093251 - RNA, 19 nt, Artificial Sequence
  Description of Artificial Sequence: Synthetic oligonucleotide
  Antisense strand to SEQ ID NO: 1093250
uuuccugcccaacacacuu

SEQ ID NO: 1093252 - RNA, 19 nt, Artificial Sequence
  Description of Artificial Sequence: Synthetic oligonucleotide
  Sense strand starting at position 379 of SEQ ID NO: 915615
uguguugggcaggaaagaa

SEQ ID NO: 1093253 - RNA, 19 nt, Artificial Sequence
  Description of Artificial Sequence: Synthetic oligonucleotide
  Antisense strand to SEQ ID NO: 1093252
uucuuuccugcccaacaca

SEQ ID NO: 1093254 - RNA, 19 nt, Artificial Sequence
  Description of Artificial Sequence: Synthetic oligonucleotide
  Sense strand starting at position 542 of SEQ ID NO: 915615
cuguucuuggauuauaagu

SEQ ID NO: 1093255 - RNA, 19 nt, Artificial Sequence
  Description of Artificial Sequence: Synthetic oligonucleotide
  Antisense strand to SEQ ID NO: 1093254
acuuauaauccaagaacag

SEQ ID NO: 1093256 - RNA, 19 nt, Artificial Sequence
  Description of Artificial Sequence: Synthetic oligonucleotide
  Sense strand starting at position 769 of SEQ ID NO: 915615
gggccauccuuccucaaau

SEQ ID NO: 1093257 - RNA, 19 nt, Artificial Sequence
  Description of Artificial Sequence: Synthetic oligonucleotide
  Antisense strand to SEQ ID NO: 1093256
auuugaggaaggauggccc

SEQ ID NO: 1093258 - RNA, 19 nt, Artificial Sequence
  Description of Artificial Sequence: Synthetic oligonucleotide
  Sense strand starting at position 808 of SEQ ID NO: 915615
ccuccugguucuccagaga

SEQ ID NO: 1093259 - RNA, 19 nt, Artificial Sequence
  Description of Artificial Sequence: Synthetic oligonucleotide
  Antisense strand to SEQ ID NO: 1093258
ucucuggagaaccaggagg

SEQ ID NO: 1093260 - RNA, 19 nt, Artificial Sequence
  Description of Artificial Sequence: Synthetic oligonucleotide
  Sense strand starting at position 822 of SEQ ID NO: 915615
agagaacauucugcauucu

SEQ ID NO: 1093261 - RNA, 19 nt, Artificial Sequence
  Description of Artificial Sequence: Synthetic oligonucleotide
  Antisense strand to SEQ ID NO: 1093260
agaaugcagaauguucucu

SEQ ID NO: 1093262 - RNA, 19 nt, Artificial Sequence
  Description of Artificial Sequence: Synthetic oligonucleotide
  Sense strand starting at position 961 of SEQ ID NO: 915615
ggcucuggccaugagcaaa

SEQ ID NO: 1093263 - RNA, 19 nt, Artificial Sequence
  Description of Artificial Sequence: Synthetic oligonucleotide
  Antisense strand to SEQ ID NO: 1093262
uuugcucauggccagagcc

SEQ ID NO: 1093264 - RNA, 19 nt, Artificial Sequence
  Description of Artificial Sequence: Synthetic oligonucleotide
  Sense strand starting at position 972 of SEQ ID NO: 915615
ugagcaaaugcaugggaua

SEQ ID NO: 1093265 - RNA, 19 nt, Artificial Sequence
  Description of Artificial Sequence: Synthetic oligonucleotide
  Antisense strand to SEQ ID NO: 1093264
uaucccaugcauuugcuca

SEQ ID NO: 1093266 - RNA, 19 nt, Artificial Sequence
  Description of Artificial Sequence: Synthetic oligonucleotide
  Sense strand starting at position 973 of SEQ ID NO: 915615
gagcaaaugcaugggauaa

SEQ ID NO: 1093267 - RNA, 19 nt, Artificial Sequence
  Description of Artificial Sequence: Synthetic oligonucleotide
  Antisense strand to SEQ ID NO: 1093266
uuaucccaugcauuugcuc

SEQ ID NO: 1093268 - RNA, 19 nt, Artificial Sequence
  Description of Artificial Sequence: Synthetic oligonucleotide
  Sense strand starting at position 1089 of SEQ ID NO: 915615
ggaagaguccuucagguuc

SEQ ID NO: 1093269 - RNA, 19 nt, Artificial Sequence
  Description of Artificial Sequence: Synthetic oligonucleotide
  Antisense strand to SEQ ID NO: 1093268
gaaccugaaggacucuucc

SEQ ID NO: 1093270 - RNA, 19 nt, Artificial Sequence
  Description of Artificial Sequence: Synthetic oligonucleotide
  Sense strand starting at position 1580 of SEQ ID NO: 915615
ccaagcuuugucgcgcaaa

SEQ ID NO: 1093271 - RNA, 19 nt, Artificial Sequence
  Description of Artificial Sequence: Synthetic oligonucleotide
  Antisense strand to SEQ ID NO: 1093270
uuugcgcgacaaagcuugg

SEQ ID NO: 1093272 - RNA, 19 nt, Artificial Sequence
  Description of Artificial Sequence: Synthetic oligonucleotide
  Sense strand starting at position 1582 of SEQ ID NO: 915615
aagcuuugucgcgcaaaga

SEQ ID NO: 1093273 - RNA, 19 nt, Artificial Sequence
  Description of Artificial Sequence: Synthetic oligonucleotide
  Antisense strand to SEQ ID NO: 1093272
ucuuugcgcgacaaagcuu

SEQ ID NO: 1093274 - RNA, 19 nt, Artificial Sequence
  Description of Artificial Sequence: Synthetic oligonucleotide
  Sense strand starting at position 2271 of SEQ ID NO: 915615
ggagucacuuucccagacu

SEQ ID NO: 1093275 - RNA, 19 nt, Artificial Sequence
  Description of Artificial Sequence: Synthetic oligonucleotide
  Antisense strand to SEQ ID NO: 1093274
agucugggaaagugacucc

SEQ ID NO: 1093276 - RNA, 19 nt, Artificial Sequence
  Description of Artificial Sequence: Synthetic oligonucleotide
  Sense strand starting at position 2274 of SEQ ID NO: 915615
gucacuuucccagacuacu

SEQ ID NO: 1093277 - RNA, 19 nt, Artificial Sequence
  Description of Artificial Sequence: Synthetic oligonucleotide
  Antisense strand to SEQ ID NO: 1093276
aguagucugggaaagugac

SEQ ID NO: 1093278 - RNA, 19 nt, Artificial Sequence
  Description of Artificial Sequence: Synthetic oligonucleotide
  Sense strand starting at position 2403 of SEQ ID NO: 915615
gggagaugguucuuacagg

SEQ ID NO: 1093279 - RNA, 19 nt, Artificial Sequence
  Description of Artificial Sequence: Synthetic oligonucleotide
  Antisense strand to SEQ ID NO: 1093278
ccuguaagaaccaucuccc

SEQ ID NO: 1093280 - RNA, 19 nt, Artificial Sequence
  Description of Artificial Sequence: Synthetic oligonucleotide
  Sense strand starting at position 2547 of SEQ ID NO: 915615
uuaccuaaucagcagguau

SEQ ID NO: 1093281 - RNA, 19 nt, Artificial Sequence
  Description of Artificial Sequence: Synthetic oligonucleotide
  Antisense strand to SEQ ID NO: 1093280
auaccugcugauuagguaa

SEQ ID NO: 1093282 - RNA, 19 nt, Artificial Sequence
  Description of Artificial Sequence: Synthetic oligonucleotide
  Sense strand starting at position 2684 of SEQ ID NO: 915615
cuugucuuaggaggauaaa

SEQ ID NO: 1093283 - RNA, 19 nt, Artificial Sequence
  Description of Artificial Sequence: Synthetic oligonucleotide
  Antisense strand to SEQ ID NO: 1093282
uuuauccuccuaagacaag

SEQ ID NO: 1093284 - RNA, 19 nt, Artificial Sequence
  Description of Artificial Sequence: Synthetic oligonucleotide
  Sense strand starting at position 2782 of SEQ ID NO: 915615
auuagaauuccgggcauga

SEQ ID NO: 1093285 - RNA, 19 nt, Artificial Sequence
  Description of Artificial Sequence: Synthetic oligonucleotide
  Antisense strand to SEQ ID NO: 1093284
ucaugcccggaauucuaau

SEQ ID NO: 1093286 - RNA, 19 nt, Artificial Sequence
  Description of Artificial Sequence: Synthetic oligonucleotide
  Sense strand starting at position 2793 of SEQ ID NO: 915615
gggcaugaggacugucuua

SEQ ID NO: 1093287 - RNA, 19 nt, Artificial Sequence
  Description of Artificial Sequence: Synthetic oligonucleotide
  Antisense strand to SEQ ID NO: 1093286
uaagacaguccucaugccc

SEQ ID NO: 1093288 - RNA, 19 nt, Artificial Sequence
  Description of Artificial Sequence: Synthetic oligonucleotide
  Sense strand starting at position 2803 of SEQ ID NO: 915615
acugucuuagcucaagaaa

SEQ ID NO: 1093289 - RNA, 19 nt, Artificial Sequence
  Description of Artificial Sequence: Synthetic oligonucleotide
  Antisense strand to SEQ ID NO: 1093288
uuucuugagcuaagacagu

SEQ ID NO: 1093290 - RNA, 19 nt, Artificial Sequence
  Description of Artificial Sequence: Synthetic oligonucleotide
  Sense strand starting at position 2844 of SEQ ID NO: 915615
cauuauauggaguguugaa

SEQ ID NO: 1093291 - RNA, 19 nt, Artificial Sequence
  Description of Artificial Sequence: Synthetic oligonucleotide
  Antisense strand to SEQ ID NO: 1093290
uucaacacuccauauaaug

SEQ ID NO: 1093292 - RNA, 19 nt, Artificial Sequence
  Description of Artificial Sequence: Synthetic oligonucleotide
  Sense strand starting at position 3110 of SEQ ID NO: 915615
acuggcuuagaccaguuau

SEQ ID NO: 1093293 - RNA, 19 nt, Artificial Sequence
  Description of Artificial Sequence: Synthetic oligonucleotide
  Antisense strand to SEQ ID NO: 1093292
auaacuggucuaagccagu

SEQ ID NO: 1093294 - RNA, 19 nt, Artificial Sequence
  Description of Artificial Sequence: Synthetic oligonucleotide
  Sense strand starting at position 3570 of SEQ ID NO: 915615
ucucaaagguucuccaaga

SEQ ID NO: 1093295 - RNA, 19 nt, Artificial Sequence
  Description of Artificial Sequence: Synthetic oligonucleotide
  Antisense strand to SEQ ID NO: 1093294
ucuuggagaaccuuugaga

SEQ ID NO: 1093296 - RNA, 19 nt, Artificial Sequence
  Description of Artificial Sequence: Synthetic oligonucleotide
  Sense strand starting at position 3614 of SEQ ID NO: 915615
uccaaaucccuuugugaug

SEQ ID NO: 1093297 - RNA, 19 nt, Artificial Sequence
  Description of Artificial Sequence: Synthetic oligonucleotide
  Antisense strand to SEQ ID NO: 1093296
caucacaaagggauuugga

SEQ ID NO: 1093298 - RNA, 19 nt, Artificial Sequence
  Description of Artificial Sequence: Synthetic oligonucleotide
  Sense strand starting at position 3726 of SEQ ID NO: 915615
agcuaacaucuuuagaguc

SEQ ID NO: 1093299 - RNA, 19 nt, Artificial Sequence
  Description of Artificial Sequence: Synthetic oligonucleotide
  Antisense strand to SEQ ID NO: 1093298
gacucuaaagauguuagcu

SEQ ID NO: 1093300 - RNA, 19 nt, Artificial Sequence
  Description of Artificial Sequence: Synthetic oligonucleotide
  Sense strand starting at position 3780 of SEQ ID NO: 915615
cucaguaaccguggaauaa

SEQ ID NO: 1093301 - RNA, 19 nt, Artificial Sequence
  Description of Artificial Sequence: Synthetic oligonucleotide
  Antisense strand to SEQ ID NO: 1093300
uuauuccacgguuacugag

SEQ ID NO: 1093302 - RNA, 19 nt, Artificial Sequence
  Description of Artificial Sequence: Synthetic oligonucleotide
  Sense strand starting at position 3781 of SEQ ID NO: 915615
ucaguaaccguggaauaau

SEQ ID NO: 1093303 - RNA, 19 nt, Artificial Sequence
  Description of Artificial Sequence: Synthetic oligonucleotide
  Antisense strand to SEQ ID NO: 1093302
auuauuccacgguuacuga

SEQ ID NO: 1093304 - RNA, 19 nt, Artificial Sequence
  Description of Artificial Sequence: Synthetic oligonucleotide
  Sense strand starting at position 3805 of SEQ ID NO: 915615
ugaucaucuuaugcagaau

SEQ ID NO: 1093305 - RNA, 19 nt, Artificial Sequence
  Description of Artificial Sequence: Synthetic oligonucleotide
  Antisense strand to SEQ ID NO: 1093304
auucugcauaagaugauca

SEQ ID NO: 1093306 - RNA, 19 nt, Artificial Sequence
  Description of Artificial Sequence: Synthetic oligonucleotide
  Sense strand starting at position 3896 of SEQ ID NO: 915615
uauugugugccugcuguau

SEQ ID NO: 1093307 - RNA, 19 nt, Artificial Sequence
  Description of Artificial Sequence: Synthetic oligonucleotide
  Antisense strand to SEQ ID NO: 1093306
auacagcaggcacacaaua

SEQ ID NO: 1093308 - RNA, 19 nt, Artificial Sequence
  Description of Artificial Sequence: Synthetic oligonucleotide
  Sense strand starting at position 3980 of SEQ ID NO: 915615
uggugacagccuuagcaau

SEQ ID NO: 1093309 - RNA, 19 nt, Artificial Sequence
  Description of Artificial Sequence: Synthetic oligonucleotide
  Antisense strand to SEQ ID NO: 1093308
auugcuaaggcugucacca

SEQ ID NO: 1093310 - RNA, 19 nt, Artificial Sequence
  Description of Artificial Sequence: Synthetic oligonucleotide
  Sense strand starting at position 103 of SEQ ID NO: 915616
acccuuugccuagaagaug

SEQ ID NO: 1093311 - RNA, 19 nt, Artificial Sequence
  Description of Artificial Sequence: Synthetic oligonucleotide
  Antisense strand to SEQ ID NO: 1093310
caucuucuaggcaaagggu

SEQ ID NO: 1093312 - RNA, 19 nt, Artificial Sequence
  Description of Artificial Sequence: Synthetic oligonucleotide
  Sense strand starting at position 294 of SEQ ID NO: 915616
gauggauaguguccuuauu

SEQ ID NO: 1093313 - RNA, 19 nt, Artificial Sequence
  Description of Artificial Sequence: Synthetic oligonucleotide
  Antisense strand to SEQ ID NO: 1093312
aauaaggacacuauccauc

SEQ ID NO: 1093314 - RNA, 19 nt, Artificial Sequence
  Description of Artificial Sequence: Synthetic oligonucleotide
  Sense strand starting at position 341 of SEQ ID NO: 915616
agagcuggcuucugaacua

SEQ ID NO: 1093315 - RNA, 19 nt, Artificial Sequence
  Description of Artificial Sequence: Synthetic oligonucleotide
  Antisense strand to SEQ ID NO: 1093314
uaguucagaagccagcucu

SEQ ID NO: 1093316 - RNA, 19 nt, Artificial Sequence
  Description of Artificial Sequence: Synthetic oligonucleotide
  Sense strand starting at position 361 of SEQ ID NO: 915616
gcuacuggcuucuaagaag

SEQ ID NO: 1093317 - RNA, 19 nt, Artificial Sequence
  Description of Artificial Sequence: Synthetic oligonucleotide
  Antisense strand to SEQ ID NO: 1093316
cuucuuagaagccaguagc

SEQ ID NO: 1093318 - RNA, 19 nt, Artificial Sequence
  Description of Artificial Sequence: Synthetic oligonucleotide
  Sense strand starting at position 430 of SEQ ID NO: 915616
gcggccucuucgacgaaga

SEQ ID NO: 1093319 - RNA, 19 nt, Artificial Sequence
  Description of Artificial Sequence: Synthetic oligonucleotide
  Antisense strand to SEQ ID NO: 1093318
ucuucgucgaagaggccgc

SEQ ID NO: 1093320 - RNA, 19 nt, Artificial Sequence
  Description of Artificial Sequence: Synthetic oligonucleotide
  Sense strand starting at position 431 of SEQ ID NO: 915616
cggccucuucgacgaagau

SEQ ID NO: 1093321 - RNA, 19 nt, Artificial Sequence
  Description of Artificial Sequence: Synthetic oligonucleotide
  Antisense strand to SEQ ID NO: 1093320
aucuucgucgaagaggccg

SEQ ID NO: 1093322 - RNA, 19 nt, Artificial Sequence
  Description of Artificial Sequence: Synthetic oligonucleotide
  Sense strand starting at position 543 of SEQ ID NO: 915616
ggcgcaagguuccagagaa

SEQ ID NO: 1093323 - RNA, 19 nt, Artificial Sequence
  Description of Artificial Sequence: Synthetic oligonucleotide
  Antisense strand to SEQ ID NO: 1093322
uucucuggaaccuugcgcc

SEQ ID NO: 1093324 - RNA, 19 nt, Artificial Sequence
  Description of Artificial Sequence: Synthetic oligonucleotide
  Sense strand starting at position 584 of SEQ ID NO: 915616
auauccaagugcugaguga

SEQ ID NO: 1093325 - RNA, 19 nt, Artificial Sequence
  Description of Artificial Sequence: Synthetic oligonucleotide
  Antisense strand to SEQ ID NO: 1093324
ucacucagcacuuggauau

SEQ ID NO: 1093326 - RNA, 19 nt, Artificial Sequence
  Description of Artificial Sequence: Synthetic oligonucleotide
  Sense strand starting at position 622 of SEQ ID NO: 915616
gugggucguccucaauauc

SEQ ID NO: 1093327 - RNA, 19 nt, Artificial Sequence
  Description of Artificial Sequence: Synthetic oligonucleotide
  Antisense strand to SEQ ID NO: 1093326
gauauugaggacgacccac

SEQ ID NO: 1093328 - RNA, 19 nt, Artificial Sequence
  Description of Artificial Sequence: Synthetic oligonucleotide
  Sense strand starting at position 633 of SEQ ID NO: 915616
ucaauaucgacuggacuga

SEQ ID NO: 1093329 - RNA, 19 nt, Artificial Sequence
  Description of Artificial Sequence: Synthetic oligonucleotide
  Antisense strand to SEQ ID NO: 1093328
ucaguccagucgauauuga

SEQ ID NO: 1093330 - RNA, 19 nt, Artificial Sequence
  Description of Artificial Sequence: Synthetic oligonucleotide
  Sense strand starting at position 674 of SEQ ID NO: 915616
gccgauuccucaggaggca

SEQ ID NO: 1093331 - RNA, 19 nt, Artificial Sequence
  Description of Artificial Sequence: Synthetic oligonucleotide
  Antisense strand to SEQ ID NO: 1093330
ugccuccugaggaaucggc

SEQ ID NO: 1093332 - RNA, 19 nt, Artificial Sequence
  Description of Artificial Sequence: Synthetic oligonucleotide
  Sense strand starting at position 880 of SEQ ID NO: 915616
ggaggcucuucguuuggga

SEQ ID NO: 1093333 - RNA, 19 nt, Artificial Sequence
  Description of Artificial Sequence: Synthetic oligonucleotide
  Antisense strand to SEQ ID NO: 1093332
ucccaaacgaagagccucc

SEQ ID NO: 1093334 - RNA, 19 nt, Artificial Sequence
  Description of Artificial Sequence: Synthetic oligonucleotide
  Sense strand starting at position 1106 of SEQ ID NO: 915616
cagagcaauuuccgaggaa

SEQ ID NO: 1093335 - RNA, 19 nt, Artificial Sequence
  Description of Artificial Sequence: Synthetic oligonucleotide
  Antisense strand to SEQ ID NO: 1093334
uuccucggaaauugcucug

SEQ ID NO: 1093336 - RNA, 19 nt, Artificial Sequence
  Description of Artificial Sequence: Synthetic oligonucleotide
  Sense strand starting at position 1107 of SEQ ID NO: 915616
agagcaauuuccgaggaag

SEQ ID NO: 1093337 - RNA, 19 nt, Artificial Sequence
  Description of Artificial Sequence: Synthetic oligonucleotide
  Antisense strand to SEQ ID NO: 1093336
cuuccucggaaauugcucu

SEQ ID NO: 1093338 - RNA, 19 nt, Artificial Sequence
  Description of Artificial Sequence: Synthetic oligonucleotide
  Sense strand starting at position 1127 of SEQ ID NO: 915616
cgggaagauucuucggcuu

SEQ ID NO: 1093339 - RNA, 19 nt, Artificial Sequence
  Description of Artificial Sequence: Synthetic oligonucleotide
  Antisense strand to SEQ ID NO: 1093338
aagccgaagaaucuucccg

SEQ ID NO: 1093340 - RNA, 19 nt, Artificial Sequence
  Description of Artificial Sequence: Synthetic oligonucleotide
  Sense strand starting at position 1129 of SEQ ID NO: 915616
ggaagauucuucggcuuug

SEQ ID NO: 1093341 - RNA, 19 nt, Artificial Sequence
  Description of Artificial Sequence: Synthetic oligonucleotide
  Antisense strand to SEQ ID NO: 1093340
caaagccgaagaaucuucc

SEQ ID NO: 1093342 - RNA, 19 nt, Artificial Sequence
  Description of Artificial Sequence: Synthetic oligonucleotide
  Sense strand starting at position 1139 of SEQ ID NO: 915616
ucggcuuuggcuuagagga

SEQ ID NO: 1093343 - RNA, 19 nt, Artificial Sequence
  Description of Artificial Sequence: Synthetic oligonucleotide
  Antisense strand to SEQ ID NO: 1093342
uccucuaagccaaagccga

SEQ ID NO: 1093344 - RNA, 19 nt, Artificial Sequence
  Description of Artificial Sequence: Synthetic oligonucleotide
  Sense strand starting at position 1141 of SEQ ID NO: 915616
ggcuuuggcuuagaggaua

SEQ ID NO: 1093345 - RNA, 19 nt, Artificial Sequence
  Description of Artificial Sequence: Synthetic oligonucleotide
  Antisense strand to SEQ ID NO: 1093344
uauccucuaagccaaagcc

SEQ ID NO: 1093346 - RNA, 19 nt, Artificial Sequence
  Description of Artificial Sequence: Synthetic oligonucleotide
  Sense strand starting at position 2820 of SEQ ID NO: 915616
ggagguuuggccuagugac

SEQ ID NO: 1093347 - RNA, 19 nt, Artificial Sequence
  Description of Artificial Sequence: Synthetic oligonucleotide
  Antisense strand to SEQ ID NO: 1093346
gucacuaggccaaaccucc

SEQ ID NO: 1093348 - RNA, 19 nt, Artificial Sequence
  Description of Artificial Sequence: Synthetic oligonucleotide
  Sense strand starting at position 2891 of SEQ ID NO: 915616
uggcuaucccucuauagca

SEQ ID NO: 1093349 - RNA, 19 nt, Artificial Sequence
  Description of Artificial Sequence: Synthetic oligonucleotide
  Antisense strand to SEQ ID NO: 1093348
ugcuauagagggauagcca

SEQ ID NO: 1093350 - RNA, 19 nt, Artificial Sequence
  Description of Artificial Sequence: Synthetic oligonucleotide
  Sense strand starting at position 3067 of SEQ ID NO: 915616
ucuacagaauuuggaugau

SEQ ID NO: 1093351 - RNA, 19 nt, Artificial Sequence
  Description of Artificial Sequence: Synthetic oligonucleotide
  Antisense strand to SEQ ID NO: 1093350
aucauccaaauucuguaga

SEQ ID NO: 1093352 - RNA, 19 nt, Artificial Sequence
  Description of Artificial Sequence: Synthetic oligonucleotide
  Sense strand starting at position 3111 of SEQ ID NO: 915616
agaccugucuccuaaggau

SEQ ID NO: 1093353 - RNA, 19 nt, Artificial Sequence
  Description of Artificial Sequence: Synthetic oligonucleotide
  Antisense strand to SEQ ID NO: 1093352
auccuuaggagacaggucu

SEQ ID NO: 1093354 - RNA, 19 nt, Artificial Sequence
  Description of Artificial Sequence: Synthetic oligonucleotide
  Sense strand starting at position 3114 of SEQ ID NO: 915616
ccugucuccuaaggauaag

SEQ ID NO: 1093355 - RNA, 19 nt, Artificial Sequence
  Description of Artificial Sequence: Synthetic oligonucleotide
  Antisense strand to SEQ ID NO: 1093354
cuuauccuuaggagacagg

SEQ ID NO: 1093356 - RNA, 19 nt, Artificial Sequence
  Description of Artificial Sequence: Synthetic oligonucleotide
  Sense strand starting at position 3148 of SEQ ID NO: 915616
aaccauuagugguauggua

SEQ ID NO: 1093357 - RNA, 19 nt, Artificial Sequence
  Description of Artificial Sequence: Synthetic oligonucleotide
  Antisense strand to SEQ ID NO: 1093356
uaccauaccacuaaugguu

SEQ ID NO: 1093358 - RNA, 19 nt, Artificial Sequence
  Description of Artificial Sequence: Synthetic oligonucleotide
  Sense strand starting at position 3339 of SEQ ID NO: 915616
acugaugggucagguaaga

SEQ ID NO: 1093359 - RNA, 19 nt, Artificial Sequence
  Description of Artificial Sequence: Synthetic oligonucleotide
  Antisense strand to SEQ ID NO: 1093358
ucuuaccugacccaucagu

SEQ ID NO: 1093360 - RNA, 19 nt, Artificial Sequence
  Description of Artificial Sequence: Synthetic oligonucleotide
  Sense strand starting at position 3424 of SEQ ID NO: 915616
gagccaggcuuccuagagu

SEQ ID NO: 1093361 - RNA, 19 nt, Artificial Sequence
  Description of Artificial Sequence: Synthetic oligonucleotide
  Antisense strand to SEQ ID NO: 1093360
acucuaggaagccuggcuc

SEQ ID NO: 1093362 - RNA, 19 nt, Artificial Sequence
  Description of Artificial Sequence: Synthetic oligonucleotide
  Sense strand starting at position 3431 of SEQ ID NO: 915616
gcuuccuagagucaaggau

SEQ ID NO: 1093363 - RNA, 19 nt, Artificial Sequence
  Description of Artificial Sequence: Synthetic oligonucleotide
  Antisense strand to SEQ ID NO: 1093362
auccuugacucuaggaagc

SEQ ID NO: 1093364 - RNA, 19 nt, Artificial Sequence
  Description of Artificial Sequence: Synthetic oligonucleotide
  Sense strand starting at position 3729 of SEQ ID NO: 915616
ugaagacuguuccagugga

SEQ ID NO: 1093365 - RNA, 19 nt, Artificial Sequence
  Description of Artificial Sequence: Synthetic oligonucleotide
  Antisense strand to SEQ ID NO: 1093364
uccacuggaacagucuuca

SEQ ID NO: 1093366 - RNA, 19 nt, Artificial Sequence
  Description of Artificial Sequence: Synthetic oligonucleotide
  Sense strand starting at position 3751 of SEQ ID NO: 915616
cagauuuccugggaaugaa

SEQ ID NO: 1093367 - RNA, 19 nt, Artificial Sequence
  Description of Artificial Sequence: Synthetic oligonucleotide
  Antisense strand to SEQ ID NO: 1093366
uucauucccaggaaaucug

SEQ ID NO: 1093368 - RNA, 19 nt, Artificial Sequence
  Description of Artificial Sequence: Synthetic oligonucleotide
  Sense strand starting at position 3804 of SEQ ID NO: 915616
guagguuaaggccacaauu

SEQ ID NO: 1093369 - RNA, 19 nt, Artificial Sequence
  Description of Artificial Sequence: Synthetic oligonucleotide
  Antisense strand to SEQ ID NO: 1093368
aauuguggccuuaaccuac

SEQ ID NO: 1093370 - RNA, 19 nt, Artificial Sequence
  Description of Artificial Sequence: Synthetic oligonucleotide
  Sense strand starting at position 3820 of SEQ ID NO: 915616
auuccucaguggccagaaa

SEQ ID NO: 1093371 - RNA, 19 nt, Artificial Sequence
  Description of Artificial Sequence: Synthetic oligonucleotide
  Antisense strand to SEQ ID NO: 1093370
uuucuggccacugaggaau

SEQ ID NO: 1093372 - RNA, 19 nt, Artificial Sequence
  Description of Artificial Sequence: Synthetic oligonucleotide
  Sense strand starting at position 3821 of SEQ ID NO: 915616
uuccucaguggccagaaau

SEQ ID NO: 1093373 - RNA, 19 nt, Artificial Sequence
  Description of Artificial Sequence: Synthetic oligonucleotide
  Antisense strand to SEQ ID NO: 1093372
auuucuggccacugaggaa

SEQ ID NO: 1093374 - RNA, 19 nt, Artificial Sequence
  Description of Artificial Sequence: Synthetic oligonucleotide
  Sense strand starting at position 3947 of SEQ ID NO: 915616
ugcuuugggaccuggcaaa

SEQ ID NO: 1093375 - RNA, 19 nt, Artificial Sequence
  Description of Artificial Sequence: Synthetic oligonucleotide
  Antisense strand to SEQ ID NO: 1093374
uuugccaggucccaaagca

SEQ ID NO: 1093376 - RNA, 19 nt, Artificial Sequence
  Description of Artificial Sequence: Synthetic oligonucleotide
  Sense strand starting at position 562 of SEQ ID NO: 915617
ucggcuucgcucugugaga

SEQ ID NO: 1093377 - RNA, 19 nt, Artificial Sequence
  Description of Artificial Sequence: Synthetic oligonucleotide
  Antisense strand to SEQ ID NO: 1093376
ucucacagagcgaagccga

SEQ ID NO: 1093378 - RNA, 19 nt, Artificial Sequence
  Description of Artificial Sequence: Synthetic oligonucleotide
  Sense strand starting at position 2260 of SEQ ID NO: 915617
cccugcuuugcccacaaga

SEQ ID NO: 1093379 - RNA, 19 nt, Artificial Sequence
  Description of Artificial Sequence: Synthetic oligonucleotide
  Antisense strand to SEQ ID NO: 1093378
ucuugugggcaaagcaggg

SEQ ID NO: 1093380 - RNA, 19 nt, Artificial Sequence
  Description of Artificial Sequence: Synthetic oligonucleotide
  Sense strand starting at position 2333 of SEQ ID NO: 915617
aggccaucccaucgggaau

SEQ ID NO: 1093381 - RNA, 19 nt, Artificial Sequence
  Description of Artificial Sequence: Synthetic oligonucleotide
  Antisense strand to SEQ ID NO: 1093380
auucccgaugggauggccu

SEQ ID NO: 1093382 - RNA, 19 nt, Artificial Sequence
  Description of Artificial Sequence: Synthetic oligonucleotide
  Sense strand starting at position 2334 of SEQ ID NO: 915617
ggccaucccaucgggaaua

SEQ ID NO: 1093383 - RNA, 19 nt, Artificial Sequence
  Description of Artificial Sequence: Synthetic oligonucleotide
  Antisense strand to SEQ ID NO: 1093382
uauucccgaugggauggcc

SEQ ID NO: 1093384 - RNA, 19 nt, Artificial Sequence
  Description of Artificial Sequence: Synthetic oligonucleotide
  Sense strand starting at position 2335 of SEQ ID NO: 915617
gccaucccaucgggaauaa

SEQ ID NO: 1093385 - RNA, 19 nt, Artificial Sequence
  Description of Artificial Sequence: Synthetic oligonucleotide
  Antisense strand to SEQ ID NO: 1093384
uuauucccgaugggauggc

SEQ ID NO: 1093386 - RNA, 19 nt, Artificial Sequence
  Description of Artificial Sequence: Synthetic oligonucleotide
  Sense strand starting at position 2870 of SEQ ID NO: 915617
ggucccugcuugguuuaau

SEQ ID NO: 1093387 - RNA, 19 nt, Artificial Sequence
  Description of Artificial Sequence: Synthetic oligonucleotide
  Antisense strand to SEQ ID NO: 1093386
auuaaaccaagcagggacc

SEQ ID NO: 1093388 - RNA, 19 nt, Artificial Sequence
  Description of Artificial Sequence: Synthetic oligonucleotide
  Sense strand starting at position 3260 of SEQ ID NO: 915617
cuguauacaugcugagauu

SEQ ID NO: 1093389 - RNA, 19 nt, Artificial Sequence
  Description of Artificial Sequence: Synthetic oligonucleotide
  Antisense strand to SEQ ID NO: 1093388
aaucucagcauguauacag

SEQ ID NO: 1093390 - RNA, 19 nt, Artificial Sequence
  Description of Artificial Sequence: Synthetic oligonucleotide
  Sense strand starting at position 3261 of SEQ ID NO: 915617
uguauacaugcugagauua

SEQ ID NO: 1093391 - RNA, 19 nt, Artificial Sequence
  Description of Artificial Sequence: Synthetic oligonucleotide
  Antisense strand to SEQ ID NO: 1093390
uaaucucagcauguauaca

SEQ ID NO: 1093392 - RNA, 19 nt, Artificial Sequence
  Description of Artificial Sequence: Synthetic oligonucleotide
  Sense strand starting at position 3305 of SEQ ID NO: 915617
gguugagauuccggauaag

SEQ ID NO: 1093393 - RNA, 19 nt, Artificial Sequence
  Description of Artificial Sequence: Synthetic oligonucleotide
  Antisense strand to SEQ ID NO: 1093392
cuuauccggaaucucaacc

SEQ ID NO: 1093394 - RNA, 19 nt, Artificial Sequence
  Description of Artificial Sequence: Synthetic oligonucleotide
  Sense strand starting at position 3308 of SEQ ID NO: 915617
ugagauuccggauaaguug

SEQ ID NO: 1093395 - RNA, 19 nt, Artificial Sequence
  Description of Artificial Sequence: Synthetic oligonucleotide
  Antisense strand to SEQ ID NO: 1093394
caacuuauccggaaucuca

SEQ ID NO: 1093396 - RNA, 19 nt, Artificial Sequence
  Description of Artificial Sequence: Synthetic oligonucleotide
  Sense strand starting at position 3316 of SEQ ID NO: 915617
cggauaaguugccaauaca

SEQ ID NO: 1093397 - RNA, 19 nt, Artificial Sequence
  Description of Artificial Sequence: Synthetic oligonucleotide
  Antisense strand to SEQ ID NO: 1093396
uguauuggcaacuuauccg

SEQ ID NO: 1093398 - RNA, 19 nt, Artificial Sequence
  Description of Artificial Sequence: Synthetic oligonucleotide
  Sense strand starting at position 3422 of SEQ ID NO: 915617
ccuuuagucuaagaacagu

SEQ ID NO: 1093399 - RNA, 19 nt, Artificial Sequence
  Description of Artificial Sequence: Synthetic oligonucleotide
  Antisense strand to SEQ ID NO: 1093398
acuguucuuagacuaaagg

SEQ ID NO: 1093400 - RNA, 19 nt, Artificial Sequence
  Description of Artificial Sequence: Synthetic oligonucleotide
  Sense strand starting at position 3897 of SEQ ID NO: 915617
gggaguucacgccauguuu

SEQ ID NO: 1093401 - RNA, 19 nt, Artificial Sequence
  Description of Artificial Sequence: Synthetic oligonucleotide
  Antisense strand to SEQ ID NO: 1093400
aaacauggcgugaacuccc

SEQ ID NO: 1093402 - RNA, 19 nt, Artificial Sequence
  Description of Artificial Sequence: Synthetic oligonucleotide
  Sense strand starting at position 3977 of SEQ ID NO: 915617
uccuuaaggcucuggaaac

SEQ ID NO: 1093403 - RNA, 19 nt, Artificial Sequence
  Description of Artificial Sequence: Synthetic oligonucleotide
  Antisense strand to SEQ ID NO: 1093402
guuuccagagccuuaagga

SEQ ID NO: 1093404 - RNA, 19 nt, Artificial Sequence
  Description of Artificial Sequence: Synthetic oligonucleotide
  Sense strand starting at position 143 of SEQ ID NO: 915618
gggacuccagcuugugaga

SEQ ID NO: 1093405 - RNA, 19 nt, Artificial Sequence
  Description of Artificial Sequence: Synthetic oligonucleotide
  Antisense strand to SEQ ID NO: 1093404
ucucacaagcuggaguccc

SEQ ID NO: 1093406 - RNA, 19 nt, Artificial Sequence
  Description of Artificial Sequence: Synthetic oligonucleotide
  Sense strand starting at position 158 of SEQ ID NO: 915618
gagauaagggacugugguu

SEQ ID NO: 1093407 - RNA, 19 nt, Artificial Sequence
  Description of Artificial Sequence: Synthetic oligonucleotide
  Antisense strand to SEQ ID NO: 1093406
aaccacagucccuuaucuc

SEQ ID NO: 1093408 - RNA, 19 nt, Artificial Sequence
  Description of Artificial Sequence: Synthetic oligonucleotide
  Sense strand starting at position 207 of SEQ ID NO: 915618
gcacauaggcuggacauua

SEQ ID NO: 1093409 - RNA, 19 nt, Artificial Sequence
  Description of Artificial Sequence: Synthetic oligonucleotide
  Antisense strand to SEQ ID NO: 1093408
uaauguccagccuaugugc

SEQ ID NO: 1093410 - RNA, 19 nt, Artificial Sequence
  Description of Artificial Sequence: Synthetic oligonucleotide
  Sense strand starting at position 461 of SEQ ID NO: 915618
gcuauuuaagucuggcuca

SEQ ID NO: 1093411 - RNA, 19 nt, Artificial Sequence
  Description of Artificial Sequence: Synthetic oligonucleotide
  Antisense strand to SEQ ID NO: 1093410
ugagccagacuuaaauagc

SEQ ID NO: 1093412 - RNA, 19 nt, Artificial Sequence
  Description of Artificial Sequence: Synthetic oligonucleotide
  Sense strand starting at position 480 of SEQ ID NO: 915618
gugugacacucuuuauaaa

SEQ ID NO: 1093413 - RNA, 19 nt, Artificial Sequence
  Description of Artificial Sequence: Synthetic oligonucleotide
  Antisense strand to SEQ ID NO: 1093412
uuuauaaagagugucacac

SEQ ID NO: 1093414 - RNA, 19 nt, Artificial Sequence
  Description of Artificial Sequence: Synthetic oligonucleotide
  Sense strand starting at position 680 of SEQ ID NO: 915618
guaaguacuuagguuggga

SEQ ID NO: 1093415 - RNA, 19 nt, Artificial Sequence
  Description of Artificial Sequence: Synthetic oligonucleotide
  Antisense strand to SEQ ID NO: 1093414
ucccaaccuaaguacuuac

SEQ ID NO: 1093416 - RNA, 19 nt, Artificial Sequence
  Description of Artificial Sequence: Synthetic oligonucleotide
  Sense strand starting at position 682 of SEQ ID NO: 915618
aaguacuuagguugggaga

SEQ ID NO: 1093417 - RNA, 19 nt, Artificial Sequence
  Description of Artificial Sequence: Synthetic oligonucleotide
  Antisense strand to SEQ ID NO: 1093416
ucucccaaccuaaguacuu

SEQ ID NO: 1093418 - RNA, 19 nt, Artificial Sequence
  Description of Artificial Sequence: Synthetic oligonucleotide
  Sense strand starting at position 683 of SEQ ID NO: 915618
aguacuuagguugggagaa

SEQ ID NO: 1093419 - RNA, 19 nt, Artificial Sequence
  Description of Artificial Sequence: Synthetic oligonucleotide
  Antisense strand to SEQ ID NO: 1093418
uucucccaaccuaaguacu

SEQ ID NO: 1093420 - RNA, 19 nt, Artificial Sequence
  Description of Artificial Sequence: Synthetic oligonucleotide
  Sense strand starting at position 820 of SEQ ID NO: 915618
agcaaauggcuccacuaaa

SEQ ID NO: 1093421 - RNA, 19 nt, Artificial Sequence
  Description of Artificial Sequence: Synthetic oligonucleotide
  Antisense strand to SEQ ID NO: 1093420
uuuaguggagccauuugcu

SEQ ID NO: 1093422 - RNA, 19 nt, Artificial Sequence
  Description of Artificial Sequence: Synthetic oligonucleotide
  Sense strand starting at position 1138 of SEQ ID NO: 915618
gaacuagacgcuugggaga

SEQ ID NO: 1093423 - RNA, 19 nt, Artificial Sequence
  Description of Artificial Sequence: Synthetic oligonucleotide
  Antisense strand to SEQ ID NO: 1093422
ucucccaagcgucuaguuc

SEQ ID NO: 1093424 - RNA, 19 nt, Artificial Sequence
  Description of Artificial Sequence: Synthetic oligonucleotide
  Sense strand starting at position 2430 of SEQ ID NO: 915618
guuugaaccaugggccuau

SEQ ID NO: 1093425 - RNA, 19 nt, Artificial Sequence
  Description of Artificial Sequence: Synthetic oligonucleotide
  Antisense strand to SEQ ID NO: 1093424
auaggcccaugguucaaac

SEQ ID NO: 1093426 - RNA, 19 nt, Artificial Sequence
  Description of Artificial Sequence: Synthetic oligonucleotide
  Sense strand starting at position 2447 of SEQ ID NO: 915618
augggugucagaugcccaa

SEQ ID NO: 1093427 - RNA, 19 nt, Artificial Sequence
  Description of Artificial Sequence: Synthetic oligonucleotide
  Antisense strand to SEQ ID NO: 1093426
uugggcaucugacacccau

SEQ ID NO: 1093428 - RNA, 19 nt, Artificial Sequence
  Description of Artificial Sequence: Synthetic oligonucleotide
  Sense strand starting at position 2470 of SEQ ID NO: 915618
aggguuuggguccaagauu

SEQ ID NO: 1093429 - RNA, 19 nt, Artificial Sequence
  Description of Artificial Sequence: Synthetic oligonucleotide
  Antisense strand to SEQ ID NO: 1093428
aaucuuggacccaaacccu

SEQ ID NO: 1093430 - RNA, 19 nt, Artificial Sequence
  Description of Artificial Sequence: Synthetic oligonucleotide
  Sense strand starting at position 2479 of SEQ ID NO: 915618
guccaagauucgccaacaa

SEQ ID NO: 1093431 - RNA, 19 nt, Artificial Sequence
  Description of Artificial Sequence: Synthetic oligonucleotide
  Antisense strand to SEQ ID NO: 1093430
uuguuggcgaaucuuggac

SEQ ID NO: 1093432 - RNA, 19 nt, Artificial Sequence
  Description of Artificial Sequence: Synthetic oligonucleotide
  Sense strand starting at position 2652 of SEQ ID NO: 915618
uaagcaaccguuuggaaau

SEQ ID NO: 1093433 - RNA, 19 nt, Artificial Sequence
  Description of Artificial Sequence: Synthetic oligonucleotide
  Antisense strand to SEQ ID NO: 1093432
auuuccaaacgguugcuua

SEQ ID NO: 1093434 - RNA, 19 nt, Artificial Sequence
  Description of Artificial Sequence: Synthetic oligonucleotide
  Sense strand starting at position 2781 of SEQ ID NO: 915618
agcaguaaagccuagaaau

SEQ ID NO: 1093435 - RNA, 19 nt, Artificial Sequence
  Description of Artificial Sequence: Synthetic oligonucleotide
  Antisense strand to SEQ ID NO: 1093434
auuucuaggcuuuacugcu

SEQ ID NO: 1093436 - RNA, 19 nt, Artificial Sequence
  Description of Artificial Sequence: Synthetic oligonucleotide
  Sense strand starting at position 2904 of SEQ ID NO: 915618
cccaacaaggucuguguaa

SEQ ID NO: 1093437 - RNA, 19 nt, Artificial Sequence
  Description of Artificial Sequence: Synthetic oligonucleotide
  Antisense strand to SEQ ID NO: 1093436
uuacacagaccuuguuggg

SEQ ID NO: 1093438 - RNA, 19 nt, Artificial Sequence
  Description of Artificial Sequence: Synthetic oligonucleotide
  Sense strand starting at position 2905 of SEQ ID NO: 915618
ccaacaaggucuguguaau

SEQ ID NO: 1093439 - RNA, 19 nt, Artificial Sequence
  Description of Artificial Sequence: Synthetic oligonucleotide
  Antisense strand to SEQ ID NO: 1093438
auuacacagaccuuguugg

SEQ ID NO: 1093440 - RNA, 19 nt, Artificial Sequence
  Description of Artificial Sequence: Synthetic oligonucleotide
  Sense strand starting at position 2906 of SEQ ID NO: 915618
caacaaggucuguguaauu

SEQ ID NO: 1093441 - RNA, 19 nt, Artificial Sequence
  Description of Artificial Sequence: Synthetic oligonucleotide
  Antisense strand to SEQ ID NO: 1093440
aauuacacagaccuuguug

SEQ ID NO: 1093442 - RNA, 19 nt, Artificial Sequence
  Description of Artificial Sequence: Synthetic oligonucleotide
  Sense strand starting at position 2974 of SEQ ID NO: 915618
guguuacuugcucaaauuc

SEQ ID NO: 1093443 - RNA, 19 nt, Artificial Sequence
  Description of Artificial Sequence: Synthetic oligonucleotide
  Antisense strand to SEQ ID NO: 1093442
gaauuugagcaaguaacac

SEQ ID NO: 1093444 - RNA, 19 nt, Artificial Sequence
  Description of Artificial Sequence: Synthetic oligonucleotide
  Sense strand starting at position 2998 of SEQ ID NO: 915618
ugaugaagguagcuuugau

SEQ ID NO: 1093445 - RNA, 19 nt, Artificial Sequence
  Description of Artificial Sequence: Synthetic oligonucleotide
  Antisense strand to SEQ ID NO: 1093444
aucaaagcuaccuucauca

SEQ ID NO: 1093446 - RNA, 19 nt, Artificial Sequence
  Description of Artificial Sequence: Synthetic oligonucleotide
  Sense strand starting at position 3144 of SEQ ID NO: 915618
ugagguugugccgucucua

SEQ ID NO: 1093447 - RNA, 19 nt, Artificial Sequence
  Description of Artificial Sequence: Synthetic oligonucleotide
  Antisense strand to SEQ ID NO: 1093446
uagagacggcacaaccuca

SEQ ID NO: 1093448 - RNA, 19 nt, Artificial Sequence
  Description of Artificial Sequence: Synthetic oligonucleotide
  Sense strand starting at position 3155 of SEQ ID NO: 915618
cgucucuacggacauauca

SEQ ID NO: 1093449 - RNA, 19 nt, Artificial Sequence
  Description of Artificial Sequence: Synthetic oligonucleotide
  Antisense strand to SEQ ID NO: 1093448
ugauauguccguagagacg

SEQ ID NO: 1093450 - RNA, 19 nt, Artificial Sequence
  Description of Artificial Sequence: Synthetic oligonucleotide
  Sense strand starting at position 3230 of SEQ ID NO: 915618
acaggcaaccuuugaaauc

SEQ ID NO: 1093451 - RNA, 19 nt, Artificial Sequence
  Description of Artificial Sequence: Synthetic oligonucleotide
  Antisense strand to SEQ ID NO: 1093450
gauuucaaagguugccugu

SEQ ID NO: 1093452 - RNA, 19 nt, Artificial Sequence
  Description of Artificial Sequence: Synthetic oligonucleotide
  Sense strand starting at position 3317 of SEQ ID NO: 915618
agguaaagaugccuccaga

SEQ ID NO: 1093453 - RNA, 19 nt, Artificial Sequence
  Description of Artificial Sequence: Synthetic oligonucleotide
  Antisense strand to SEQ ID NO: 1093452
ucuggaggcaucuuuaccu

SEQ ID NO: 1093454 - RNA, 19 nt, Artificial Sequence
  Description of Artificial Sequence: Synthetic oligonucleotide
  Sense strand starting at position 3511 of SEQ ID NO: 915618
acauauaguaauggugaga

SEQ ID NO: 1093455 - RNA, 19 nt, Artificial Sequence
  Description of Artificial Sequence: Synthetic oligonucleotide
  Antisense strand to SEQ ID NO: 1093454
ucucaccauuacuauaugu

SEQ ID NO: 1093456 - RNA, 19 nt, Artificial Sequence
  Description of Artificial Sequence: Synthetic oligonucleotide
  Sense strand starting at position 3528 of SEQ ID NO: 915618
gaagguauguguguugaag

SEQ ID NO: 1093457 - RNA, 19 nt, Artificial Sequence
  Description of Artificial Sequence: Synthetic oligonucleotide
  Antisense strand to SEQ ID NO: 1093456
cuucaacacacauaccuuc

SEQ ID NO: 1093458 - RNA, 19 nt, Artificial Sequence
  Description of Artificial Sequence: Synthetic oligonucleotide
  Sense strand starting at position 3539 of SEQ ID NO: 915618
uguugaagcacauggaaau

SEQ ID NO: 1093459 - RNA, 19 nt, Artificial Sequence
  Description of Artificial Sequence: Synthetic oligonucleotide
  Antisense strand to SEQ ID NO: 1093458
auuuccaugugcuucaaca

SEQ ID NO: 1093460 - RNA, 19 nt, Artificial Sequence
  Description of Artificial Sequence: Synthetic oligonucleotide
  Sense strand starting at position 3540 of SEQ ID NO: 915618
guugaagcacauggaaaua

SEQ ID NO: 1093461 - RNA, 19 nt, Artificial Sequence
  Description of Artificial Sequence: Synthetic oligonucleotide
  Antisense strand to SEQ ID NO: 1093460
uauuuccaugugcuucaac

SEQ ID NO: 1093462 - RNA, 19 nt, Artificial Sequence
  Description of Artificial Sequence: Synthetic oligonucleotide
  Sense strand starting at position 3620 of SEQ ID NO: 915618
uuugauaaaccaggcaaga

SEQ ID NO: 1093463 - RNA, 19 nt, Artificial Sequence
  Description of Artificial Sequence: Synthetic oligonucleotide
  Antisense strand to SEQ ID NO: 1093462
ucuugccugguuuaucaaa

SEQ ID NO: 1093464 - RNA, 19 nt, Artificial Sequence
  Description of Artificial Sequence: Synthetic oligonucleotide
  Sense strand starting at position 3669 of SEQ ID NO: 915618
auuagcugauugcuagaaa

SEQ ID NO: 1093465 - RNA, 19 nt, Artificial Sequence
  Description of Artificial Sequence: Synthetic oligonucleotide
  Antisense strand to SEQ ID NO: 1093464
uuucuagcaaucagcuaau

SEQ ID NO: 1093466 - RNA, 19 nt, Artificial Sequence
  Description of Artificial Sequence: Synthetic oligonucleotide
  Sense strand starting at position 3672 of SEQ ID NO: 915618
agcugauugcuagaaacau

SEQ ID NO: 1093467 - RNA, 19 nt, Artificial Sequence
  Description of Artificial Sequence: Synthetic oligonucleotide
  Antisense strand to SEQ ID NO: 1093466
auguuucuagcaaucagcu

SEQ ID NO: 1093468 - RNA, 19 nt, Artificial Sequence
  Description of Artificial Sequence: Synthetic oligonucleotide
  Sense strand starting at position 3775 of SEQ ID NO: 915618
aaacguuaccugggucaua

SEQ ID NO: 1093469 - RNA, 19 nt, Artificial Sequence
  Description of Artificial Sequence: Synthetic oligonucleotide
  Antisense strand to SEQ ID NO: 1093468
uaugacccagguaacguuu

SEQ ID NO: 1093470 - RNA, 19 nt, Artificial Sequence
  Description of Artificial Sequence: Synthetic oligonucleotide
  Sense strand starting at position 3776 of SEQ ID NO: 915618
aacguuaccugggucauau

SEQ ID NO: 1093471 - RNA, 19 nt, Artificial Sequence
  Description of Artificial Sequence: Synthetic oligonucleotide
  Antisense strand to SEQ ID NO: 1093470
auaugacccagguaacguu

SEQ ID NO: 1093472 - RNA, 19 nt, Artificial Sequence
  Description of Artificial Sequence: Synthetic oligonucleotide
  Sense strand starting at position 3821 of SEQ ID NO: 915618
aaugcaagccuagaguuua

SEQ ID NO: 1093473 - RNA, 19 nt, Artificial Sequence
  Description of Artificial Sequence: Synthetic oligonucleotide
  Antisense strand to SEQ ID NO: 1093472
uaaacucuaggcuugcauu

SEQ ID NO: 1093474 - RNA, 19 nt, Artificial Sequence
  Description of Artificial Sequence: Synthetic oligonucleotide
  Sense strand starting at position 3843 of SEQ ID NO: 915618
gagagugaagacuggcaau

SEQ ID NO: 1093475 - RNA, 19 nt, Artificial Sequence
  Description of Artificial Sequence: Synthetic oligonucleotide
  Antisense strand to SEQ ID NO: 1093474
auugccagucuucacucuc

SEQ ID NO: 1093476 - RNA, 19 nt, Artificial Sequence
  Description of Artificial Sequence: Synthetic oligonucleotide
  Sense strand starting at position 3855 of SEQ ID NO: 915618
uggcaaucaucauuggaaa

SEQ ID NO: 1093477 - RNA, 19 nt, Artificial Sequence
  Description of Artificial Sequence: Synthetic oligonucleotide
  Antisense strand to SEQ ID NO: 1093476
uuuccaaugaugauugcca

SEQ ID NO: 1093478 - RNA, 19 nt, Artificial Sequence
  Description of Artificial Sequence: Synthetic oligonucleotide
  Sense strand starting at position 3856 of SEQ ID NO: 915618
ggcaaucaucauuggaaag

SEQ ID NO: 1093479 - RNA, 19 nt, Artificial Sequence
  Description of Artificial Sequence: Synthetic oligonucleotide
  Antisense strand to SEQ ID NO: 1093478
cuuuccaaugaugauugcc

SEQ ID NO: 1093480 - RNA, 19 nt, Artificial Sequence
  Description of Artificial Sequence: Synthetic oligonucleotide
  Sense strand starting at position 3894 of SEQ ID NO: 915618
augggaugguuccuucaag

SEQ ID NO: 1093481 - RNA, 19 nt, Artificial Sequence
  Description of Artificial Sequence: Synthetic oligonucleotide
  Antisense strand to SEQ ID NO: 1093480
cuugaaggaaccaucccau

SEQ ID NO: 1093482 - RNA, 19 nt, Artificial Sequence
  Description of Artificial Sequence: Synthetic oligonucleotide
  Sense strand starting at position 3895 of SEQ ID NO: 915618
ugggaugguuccuucaaga

SEQ ID NO: 1093483 - RNA, 19 nt, Artificial Sequence
  Description of Artificial Sequence: Synthetic oligonucleotide
  Antisense strand to SEQ ID NO: 1093482
ucuugaaggaaccauccca

SEQ ID NO: 1093484 - RNA, 19 nt, Artificial Sequence
  Description of Artificial Sequence: Synthetic oligonucleotide
  Sense strand starting at position 40 of SEQ ID NO: 915619
gguugcugugaagaacaua

SEQ ID NO: 1093485 - RNA, 19 nt, Artificial Sequence
  Description of Artificial Sequence: Synthetic oligonucleotide
  Antisense strand to SEQ ID NO: 1093484
uauguucuucacagcaacc

SEQ ID NO: 1093486 - RNA, 19 nt, Artificial Sequence
  Description of Artificial Sequence: Synthetic oligonucleotide
  Sense strand starting at position 390 of SEQ ID NO: 915619
ggaguuaacaaaugaguac

SEQ ID NO: 1093487 - RNA, 19 nt, Artificial Sequence
  Description of Artificial Sequence: Synthetic oligonucleotide
  Antisense strand to SEQ ID NO: 1093486
guacucauuuguuaacucc

SEQ ID NO: 1093488 - RNA, 19 nt, Artificial Sequence
  Description of Artificial Sequence: Synthetic oligonucleotide
  Sense strand starting at position 407 of SEQ ID NO: 915619
accuaagacugggauuuga

SEQ ID NO: 1093489 - RNA, 19 nt, Artificial Sequence
  Description of Artificial Sequence: Synthetic oligonucleotide
  Antisense strand to SEQ ID NO: 1093488
ucaaaucccagucuuaggu

SEQ ID NO: 1093490 - RNA, 19 nt, Artificial Sequence
  Description of Artificial Sequence: Synthetic oligonucleotide
  Sense strand starting at position 546 of SEQ ID NO: 915619
aagaguaugugagcucaua

SEQ ID NO: 1093491 - RNA, 19 nt, Artificial Sequence
  Description of Artificial Sequence: Synthetic oligonucleotide
  Antisense strand to SEQ ID NO: 1093490
uaugagcucacauacucuu

SEQ ID NO: 1093492 - RNA, 19 nt, Artificial Sequence
  Description of Artificial Sequence: Synthetic oligonucleotide
  Sense strand starting at position 567 of SEQ ID NO: 915619
aaauaaugggcauguuaag

SEQ ID NO: 1093493 - RNA, 19 nt, Artificial Sequence
  Description of Artificial Sequence: Synthetic oligonucleotide
  Antisense strand to SEQ ID NO: 1093492
cuuaacaugcccauuauuu

SEQ ID NO: 1093494 - RNA, 19 nt, Artificial Sequence
  Description of Artificial Sequence: Synthetic oligonucleotide
  Sense strand starting at position 792 of SEQ ID NO: 915619
uggauaacuccuggagcga

SEQ ID NO: 1093495 - RNA, 19 nt, Artificial Sequence
  Description of Artificial Sequence: Synthetic oligonucleotide
  Antisense strand to SEQ ID NO: 1093494
ucgcuccaggaguuaucca

SEQ ID NO: 1093496 - RNA, 19 nt, Artificial Sequence
  Description of Artificial Sequence: Synthetic oligonucleotide
  Sense strand starting at position 793 of SEQ ID NO: 915619
ggauaacuccuggagcgag

SEQ ID NO: 1093497 - RNA, 19 nt, Artificial Sequence
  Description of Artificial Sequence: Synthetic oligonucleotide
  Antisense strand to SEQ ID NO: 1093496
cucgcuccaggaguuaucc

SEQ ID NO: 1093498 - RNA, 19 nt, Artificial Sequence
  Description of Artificial Sequence: Synthetic oligonucleotide
  Sense strand starting at position 1028 of SEQ ID NO: 915619
gccacuccucuuuauggga

SEQ ID NO: 1093499 - RNA, 19 nt, Artificial Sequence
  Description of Artificial Sequence: Synthetic oligonucleotide
  Antisense strand to SEQ ID NO: 1093498
ucccauaaagaggaguggc

SEQ ID NO: 1093500 - RNA, 19 nt, Artificial Sequence
  Description of Artificial Sequence: Synthetic oligonucleotide
  Sense strand starting at position 1126 of SEQ ID NO: 915619
agaaaugugagcuaguuua

SEQ ID NO: 1093501 - RNA, 19 nt, Artificial Sequence
  Description of Artificial Sequence: Synthetic oligonucleotide
  Antisense strand to SEQ ID NO: 1093500
uaaacuagcucacauuucu

SEQ ID NO: 1093502 - RNA, 19 nt, Artificial Sequence
  Description of Artificial Sequence: Synthetic oligonucleotide
  Sense strand starting at position 1359 of SEQ ID NO: 915619
guaggaguccaguaggaua

SEQ ID NO: 1093503 - RNA, 19 nt, Artificial Sequence
  Description of Artificial Sequence: Synthetic oligonucleotide
  Antisense strand to SEQ ID NO: 1093502
uauccuacuggacuccuac

SEQ ID NO: 1093504 - RNA, 19 nt, Artificial Sequence
  Description of Artificial Sequence: Synthetic oligonucleotide
  Sense strand starting at position 1817 of SEQ ID NO: 915619
agcugauagcaagauccua

SEQ ID NO: 1093505 - RNA, 19 nt, Artificial Sequence
  Description of Artificial Sequence: Synthetic oligonucleotide
  Antisense strand to SEQ ID NO: 1093504
uaggaucuugcuaucagcu

SEQ ID NO: 1093506 - RNA, 19 nt, Artificial Sequence
  Description of Artificial Sequence: Synthetic oligonucleotide
  Sense strand starting at position 1838 of SEQ ID NO: 915619
ugcucuuucccaugaggaa

SEQ ID NO: 1093507 - RNA, 19 nt, Artificial Sequence
  Description of Artificial Sequence: Synthetic oligonucleotide
  Antisense strand to SEQ ID NO: 1093506
uuccucaugggaaagagca

SEQ ID NO: 1093508 - RNA, 19 nt, Artificial Sequence
  Description of Artificial Sequence: Synthetic oligonucleotide
  Sense strand starting at position 1839 of SEQ ID NO: 915619
gcucuuucccaugaggaag

SEQ ID NO: 1093509 - RNA, 19 nt, Artificial Sequence
  Description of Artificial Sequence: Synthetic oligonucleotide
  Antisense strand to SEQ ID NO: 1093508
cuuccucaugggaaagagc

SEQ ID NO: 1093510 - RNA, 19 nt, Artificial Sequence
  Description of Artificial Sequence: Synthetic oligonucleotide
  Sense strand starting at position 2135 of SEQ ID NO: 915619
cgagauggucucugagauc

SEQ ID NO: 1093511 - RNA, 19 nt, Artificial Sequence
  Description of Artificial Sequence: Synthetic oligonucleotide
  Antisense strand to SEQ ID NO: 1093510
gaucucagagaccaucucg

SEQ ID NO: 1093512 - RNA, 19 nt, Artificial Sequence
  Description of Artificial Sequence: Synthetic oligonucleotide
  Sense strand starting at position 2185 of SEQ ID NO: 915619
aaugguaaaugggucauga

SEQ ID NO: 1093513 - RNA, 19 nt, Artificial Sequence
  Description of Artificial Sequence: Synthetic oligonucleotide
  Antisense strand to SEQ ID NO: 1093512
ucaugacccauuuaccauu

SEQ ID NO: 1093514 - RNA, 19 nt, Artificial Sequence
  Description of Artificial Sequence: Synthetic oligonucleotide
  Sense strand starting at position 2353 of SEQ ID NO: 915619
uguuaaaggucaguaagau

SEQ ID NO: 1093515 - RNA, 19 nt, Artificial Sequence
  Description of Artificial Sequence: Synthetic oligonucleotide
  Antisense strand to SEQ ID NO: 1093514
aucuuacugaccuuuaaca

SEQ ID NO: 1093516 - RNA, 19 nt, Artificial Sequence
  Description of Artificial Sequence: Synthetic oligonucleotide
  Sense strand starting at position 2354 of SEQ ID NO: 915619
guuaaaggucaguaagauc

SEQ ID NO: 1093517 - RNA, 19 nt, Artificial Sequence
  Description of Artificial Sequence: Synthetic oligonucleotide
  Antisense strand to SEQ ID NO: 1093516
gaucuuacugaccuuuaac

SEQ ID NO: 1093518 - RNA, 19 nt, Artificial Sequence
  Description of Artificial Sequence: Synthetic oligonucleotide
  Sense strand starting at position 2373 of SEQ ID NO: 915619
agggauaugugauuccagu

SEQ ID NO: 1093519 - RNA, 19 nt, Artificial Sequence
  Description of Artificial Sequence: Synthetic oligonucleotide
  Antisense strand to SEQ ID NO: 1093518
acuggaaucacauaucccu

SEQ ID NO: 1093520 - RNA, 19 nt, Artificial Sequence
  Description of Artificial Sequence: Synthetic oligonucleotide
  Sense strand starting at position 2383 of SEQ ID NO: 915619
gauuccaguggucaagcaa

SEQ ID NO: 1093521 - RNA, 19 nt, Artificial Sequence
  Description of Artificial Sequence: Synthetic oligonucleotide
  Antisense strand to SEQ ID NO: 1093520
uugcuugaccacuggaauc

SEQ ID NO: 1093522 - RNA, 19 nt, Artificial Sequence
  Description of Artificial Sequence: Synthetic oligonucleotide
  Sense strand starting at position 2390 of SEQ ID NO: 915619
guggucaagcaagaaucua

SEQ ID NO: 1093523 - RNA, 19 nt, Artificial Sequence
  Description of Artificial Sequence: Synthetic oligonucleotide
  Antisense strand to SEQ ID NO: 1093522
uagauucuugcuugaccac

SEQ ID NO: 1093524 - RNA, 19 nt, Artificial Sequence
  Description of Artificial Sequence: Synthetic oligonucleotide
  Sense strand starting at position 2464 of SEQ ID NO: 915619
auauaugugcuccauauua

SEQ ID NO: 1093525 - RNA, 19 nt, Artificial Sequence
  Description of Artificial Sequence: Synthetic oligonucleotide
  Antisense strand to SEQ ID NO: 1093524
uaauauggagcacauauau

SEQ ID NO: 1093526 - RNA, 19 nt, Artificial Sequence
  Description of Artificial Sequence: Synthetic oligonucleotide
  Sense strand starting at position 2503 of SEQ ID NO: 915619
uagagauaguuugcagaag

SEQ ID NO: 1093527 - RNA, 19 nt, Artificial Sequence
  Description of Artificial Sequence: Synthetic oligonucleotide
  Antisense strand to SEQ ID NO: 1093526
cuucugcaaacuaucucua

SEQ ID NO: 1093528 - RNA, 19 nt, Artificial Sequence
  Description of Artificial Sequence: Synthetic oligonucleotide
  Sense strand starting at position 2512 of SEQ ID NO: 915619
uuugcagaagagugagaau

SEQ ID NO: 1093529 - RNA, 19 nt, Artificial Sequence
  Description of Artificial Sequence: Synthetic oligonucleotide
  Antisense strand to SEQ ID NO: 1093528
auucucacucuucugcaaa

SEQ ID NO: 1093530 - RNA, 19 nt, Artificial Sequence
  Description of Artificial Sequence: Synthetic oligonucleotide
  Sense strand starting at position 2521 of SEQ ID NO: 915619
gagugagaauuguuauucu

SEQ ID NO: 1093531 - RNA, 19 nt, Artificial Sequence
  Description of Artificial Sequence: Synthetic oligonucleotide
  Antisense strand to SEQ ID NO: 1093530
agaauaacaauucucacuc

SEQ ID NO: 1093532 - RNA, 19 nt, Artificial Sequence
  Description of Artificial Sequence: Synthetic oligonucleotide
  Sense strand starting at position 2633 of SEQ ID NO: 915619
guguauauaaacuggagga

SEQ ID NO: 1093533 - RNA, 19 nt, Artificial Sequence
  Description of Artificial Sequence: Synthetic oligonucleotide
  Antisense strand to SEQ ID NO: 1093532
uccuccaguuuauauacac

SEQ ID NO: 1093534 - RNA, 19 nt, Artificial Sequence
  Description of Artificial Sequence: Synthetic oligonucleotide
  Sense strand starting at position 2706 of SEQ ID NO: 915619
uugcacaaugugcaagaau

SEQ ID NO: 1093535 - RNA, 19 nt, Artificial Sequence
  Description of Artificial Sequence: Synthetic oligonucleotide
  Antisense strand to SEQ ID NO: 1093534
auucuugcacauugugcaa

SEQ ID NO: 1093536 - RNA, 19 nt, Artificial Sequence
  Description of Artificial Sequence: Synthetic oligonucleotide
  Sense strand starting at position 2799 of SEQ ID NO: 915619
cagaaauucggaggugauc

SEQ ID NO: 1093537 - RNA, 19 nt, Artificial Sequence
  Description of Artificial Sequence: Synthetic oligonucleotide
  Antisense strand to SEQ ID NO: 1093536
gaucaccuccgaauuucug

SEQ ID NO: 1093538 - RNA, 19 nt, Artificial Sequence
  Description of Artificial Sequence: Synthetic oligonucleotide
  Sense strand starting at position 2801 of SEQ ID NO: 915619
gaaauucggaggugaucca

SEQ ID NO: 1093539 - RNA, 19 nt, Artificial Sequence
  Description of Artificial Sequence: Synthetic oligonucleotide
  Antisense strand to SEQ ID NO: 1093538
uggaucaccuccgaauuuc

SEQ ID NO: 1093540 - RNA, 19 nt, Artificial Sequence
  Description of Artificial Sequence: Synthetic oligonucleotide
  Sense strand starting at position 2810 of SEQ ID NO: 915619
aggugauccacucaagguu

SEQ ID NO: 1093541 - RNA, 19 nt, Artificial Sequence
  Description of Artificial Sequence: Synthetic oligonucleotide
  Antisense strand to SEQ ID NO: 1093540
aaccuugaguggaucaccu

SEQ ID NO: 1093542 - RNA, 19 nt, Artificial Sequence
  Description of Artificial Sequence: Synthetic oligonucleotide
  Sense strand starting at position 2843 of SEQ ID NO: 915619
aagugcagugcugaacaua

SEQ ID NO: 1093543 - RNA, 19 nt, Artificial Sequence
  Description of Artificial Sequence: Synthetic oligonucleotide
  Antisense strand to SEQ ID NO: 1093542
uauguucagcacugcacuu

SEQ ID NO: 1093544 - RNA, 19 nt, Artificial Sequence
  Description of Artificial Sequence: Synthetic oligonucleotide
  Sense strand starting at position 3235 of SEQ ID NO: 915619
caguauguacauuagugaa

SEQ ID NO: 1093545 - RNA, 19 nt, Artificial Sequence
  Description of Artificial Sequence: Synthetic oligonucleotide
  Antisense strand to SEQ ID NO: 1093544
uucacuaauguacauacug

SEQ ID NO: 1093546 - RNA, 19 nt, Artificial Sequence
  Description of Artificial Sequence: Synthetic oligonucleotide
  Sense strand starting at position 3237 of SEQ ID NO: 915619
guauguacauuagugaaua

SEQ ID NO: 1093547 - RNA, 19 nt, Artificial Sequence
  Description of Artificial Sequence: Synthetic oligonucleotide
  Antisense strand to SEQ ID NO: 1093546
uauucacuaauguacauac

SEQ ID NO: 1093548 - RNA, 19 nt, Artificial Sequence
  Description of Artificial Sequence: Synthetic oligonucleotide
  Sense strand starting at position 3293 of SEQ ID NO: 915619
cugggaaguuauccuucua

SEQ ID NO: 1093549 - RNA, 19 nt, Artificial Sequence
  Description of Artificial Sequence: Synthetic oligonucleotide
  Antisense strand to SEQ ID NO: 1093548
uagaaggauaacuucccag

SEQ ID NO: 1093550 - RNA, 19 nt, Artificial Sequence
  Description of Artificial Sequence: Synthetic oligonucleotide
  Sense strand starting at position 3323 of SEQ ID NO: 915619
cuauaagucauugggcaag

SEQ ID NO: 1093551 - RNA, 19 nt, Artificial Sequence
  Description of Artificial Sequence: Synthetic oligonucleotide
  Antisense strand to SEQ ID NO: 1093550
cuugcccaaugacuuauag

SEQ ID NO: 1093552 - RNA, 19 nt, Artificial Sequence
  Description of Artificial Sequence: Synthetic oligonucleotide
  Sense strand starting at position 3326 of SEQ ID NO: 915619
uaagucauugggcaaguua

SEQ ID NO: 1093553 - RNA, 19 nt, Artificial Sequence
  Description of Artificial Sequence: Synthetic oligonucleotide
  Antisense strand to SEQ ID NO: 1093552
uaacuugcccaaugacuua

SEQ ID NO: 1093554 - RNA, 19 nt, Artificial Sequence
  Description of Artificial Sequence: Synthetic oligonucleotide
  Sense strand starting at position 3366 of SEQ ID NO: 915619
ucucauuugugcuugacau

SEQ ID NO: 1093555 - RNA, 19 nt, Artificial Sequence
  Description of Artificial Sequence: Synthetic oligonucleotide
  Antisense strand to SEQ ID NO: 1093554
augucaagcacaaaugaga

SEQ ID NO: 1093556 - RNA, 19 nt, Artificial Sequence
  Description of Artificial Sequence: Synthetic oligonucleotide
  Sense strand starting at position 3367 of SEQ ID NO: 915619
cucauuugugcuugacauu

SEQ ID NO: 1093557 - RNA, 19 nt, Artificial Sequence
  Description of Artificial Sequence: Synthetic oligonucleotide
  Antisense strand to SEQ ID NO: 1093556
aaugucaagcacaaaugag

SEQ ID NO: 1093558 - RNA, 19 nt, Artificial Sequence
  Description of Artificial Sequence: Synthetic oligonucleotide
  Sense strand starting at position 3654 of SEQ ID NO: 915619
gcauacuguccacaguaau

SEQ ID NO: 1093559 - RNA, 19 nt, Artificial Sequence
  Description of Artificial Sequence: Synthetic oligonucleotide
  Antisense strand to SEQ ID NO: 1093558
auuacuguggacaguaugc

SEQ ID NO: 1093560 - RNA, 19 nt, Artificial Sequence
  Description of Artificial Sequence: Synthetic oligonucleotide
  Sense strand starting at position 3714 of SEQ ID NO: 915619
auuugcaugugcuugcaua

SEQ ID NO: 1093561 - RNA, 19 nt, Artificial Sequence
  Description of Artificial Sequence: Synthetic oligonucleotide
  Antisense strand to SEQ ID NO: 1093560
uaugcaagcacaugcaaau

SEQ ID NO: 1093562 - RNA, 19 nt, Artificial Sequence
  Description of Artificial Sequence: Synthetic oligonucleotide
  Sense strand starting at position 3899 of SEQ ID NO: 915619
ucauguucccaccagagua

SEQ ID NO: 1093563 - RNA, 19 nt, Artificial Sequence
  Description of Artificial Sequence: Synthetic oligonucleotide
  Antisense strand to SEQ ID NO: 1093562
uacucuggugggaacauga

SEQ ID NO: 1093564 - RNA, 19 nt, Artificial Sequence
  Description of Artificial Sequence: Synthetic oligonucleotide
  Sense strand starting at position 97 of SEQ ID NO: 915620
uguuuagucauuugugaga

SEQ ID NO: 1093565 - RNA, 19 nt, Artificial Sequence
  Description of Artificial Sequence: Synthetic oligonucleotide
  Antisense strand to SEQ ID NO: 1093564
ucucacaaaugacuaaaca

SEQ ID NO: 1093566 - RNA, 19 nt, Artificial Sequence
  Description of Artificial Sequence: Synthetic oligonucleotide
  Sense strand starting at position 102 of SEQ ID NO: 915620
agucauuugugagaaagau

SEQ ID NO: 1093567 - RNA, 19 nt, Artificial Sequence
  Description of Artificial Sequence: Synthetic oligonucleotide
  Antisense strand to SEQ ID NO: 1093566
aucuuucucacaaaugacu

SEQ ID NO: 1093568 - RNA, 19 nt, Artificial Sequence
  Description of Artificial Sequence: Synthetic oligonucleotide
  Sense strand starting at position 165 of SEQ ID NO: 915620
ugaucugguuucucaucua

SEQ ID NO: 1093569 - RNA, 19 nt, Artificial Sequence
  Description of Artificial Sequence: Synthetic oligonucleotide
  Antisense strand to SEQ ID NO: 1093568
uagaugagaaaccagauca

SEQ ID NO: 1093570 - RNA, 19 nt, Artificial Sequence
  Description of Artificial Sequence: Synthetic oligonucleotide
  Sense strand starting at position 241 of SEQ ID NO: 915620
gaaaguaaagcucaaaugu

SEQ ID NO: 1093571 - RNA, 19 nt, Artificial Sequence
  Description of Artificial Sequence: Synthetic oligonucleotide
  Antisense strand to SEQ ID NO: 1093570
acauuugagcuuuacuuuc

SEQ ID NO: 1093572 - RNA, 19 nt, Artificial Sequence
  Description of Artificial Sequence: Synthetic oligonucleotide
  Sense strand starting at position 279 of SEQ ID NO: 915620
gcagaauacaucugacagg

SEQ ID NO: 1093573 - RNA, 19 nt, Artificial Sequence
  Description of Artificial Sequence: Synthetic oligonucleotide
  Antisense strand to SEQ ID NO: 1093572
ccugucagauguauucugc

SEQ ID NO: 1093574 - RNA, 19 nt, Artificial Sequence
  Description of Artificial Sequence: Synthetic oligonucleotide
  Sense strand starting at position 496 of SEQ ID NO: 915620
cccagugacugacuaacua

SEQ ID NO: 1093575 - RNA, 19 nt, Artificial Sequence
  Description of Artificial Sequence: Synthetic oligonucleotide
  Antisense strand to SEQ ID NO: 1093574
uaguuagucagucacuggg

SEQ ID NO: 1093576 - RNA, 19 nt, Artificial Sequence
  Description of Artificial Sequence: Synthetic oligonucleotide
  Sense strand starting at position 691 of SEQ ID NO: 915620
gggaaagcucagugaguac

SEQ ID NO: 1093577 - RNA, 19 nt, Artificial Sequence
  Description of Artificial Sequence: Synthetic oligonucleotide
  Antisense strand to SEQ ID NO: 1093576
guacucacugagcuuuccc

SEQ ID NO: 1093578 - RNA, 19 nt, Artificial Sequence
  Description of Artificial Sequence: Synthetic oligonucleotide
  Sense strand starting at position 720 of SEQ ID NO: 915620
gauuauagugaaggcaaau

SEQ ID NO: 1093579 - RNA, 19 nt, Artificial Sequence
  Description of Artificial Sequence: Synthetic oligonucleotide
  Antisense strand to SEQ ID NO: 1093578
auuugccuucacuauaauc

SEQ ID NO: 1093580 - RNA, 19 nt, Artificial Sequence
  Description of Artificial Sequence: Synthetic oligonucleotide
  Sense strand starting at position 1000 of SEQ ID NO: 915620
cugggacucuuuccuuuga

SEQ ID NO: 1093581 - RNA, 19 nt, Artificial Sequence
  Description of Artificial Sequence: Synthetic oligonucleotide
  Antisense strand to SEQ ID NO: 1093580
ucaaaggaaagagucccag

SEQ ID NO: 1093582 - RNA, 19 nt, Artificial Sequence
  Description of Artificial Sequence: Synthetic oligonucleotide
  Sense strand starting at position 1001 of SEQ ID NO: 915620
ugggacucuuuccuuugaa

SEQ ID NO: 1093583 - RNA, 19 nt, Artificial Sequence
  Description of Artificial Sequence: Synthetic oligonucleotide
  Antisense strand to SEQ ID NO: 1093582
uucaaaggaaagaguccca

SEQ ID NO: 1093584 - RNA, 19 nt, Artificial Sequence
  Description of Artificial Sequence: Synthetic oligonucleotide
  Sense strand starting at position 1002 of SEQ ID NO: 915620
gggacucuuuccuuugaau

SEQ ID NO: 1093585 - RNA, 19 nt, Artificial Sequence
  Description of Artificial Sequence: Synthetic oligonucleotide
  Antisense strand to SEQ ID NO: 1093584
auucaaaggaaagaguccc

SEQ ID NO: 1093586 - RNA, 19 nt, Artificial Sequence
  Description of Artificial Sequence: Synthetic oligonucleotide
  Sense strand starting at position 1126 of SEQ ID NO: 915620
caaagaguucugcaaguca

SEQ ID NO: 1093587 - RNA, 19 nt, Artificial Sequence
  Description of Artificial Sequence: Synthetic oligonucleotide
  Antisense strand to SEQ ID NO: 1093586
ugacuugcagaacucuuug

SEQ ID NO: 1093588 - RNA, 19 nt, Artificial Sequence
  Description of Artificial Sequence: Synthetic oligonucleotide
  Sense strand starting at position 1547 of SEQ ID NO: 915620
gaacaaugagauugucccu

SEQ ID NO: 1093589 - RNA, 19 nt, Artificial Sequence
  Description of Artificial Sequence: Synthetic oligonucleotide
  Antisense strand to SEQ ID NO: 1093588
agggacaaucucauuguuc

SEQ ID NO: 1093590 - RNA, 19 nt, Artificial Sequence
  Description of Artificial Sequence: Synthetic oligonucleotide
  Sense strand starting at position 1579 of SEQ ID NO: 915620
guuggaagcaauuagucaa

SEQ ID NO: 1093591 - RNA, 19 nt, Artificial Sequence
  Description of Artificial Sequence: Synthetic oligonucleotide
  Antisense strand to SEQ ID NO: 1093590
uugacuaauugcuuccaac

SEQ ID NO: 1093592 - RNA, 19 nt, Artificial Sequence
  Description of Artificial Sequence: Synthetic oligonucleotide
  Sense strand starting at position 1582 of SEQ ID NO: 915620
ggaagcaauuagucaagau

SEQ ID NO: 1093593 - RNA, 19 nt, Artificial Sequence
  Description of Artificial Sequence: Synthetic oligonucleotide
  Antisense strand to SEQ ID NO: 1093592
aucuugacuaauugcuucc

SEQ ID NO: 1093594 - RNA, 19 nt, Artificial Sequence
  Description of Artificial Sequence: Synthetic oligonucleotide
  Sense strand starting at position 1586 of SEQ ID NO: 915620
gcaauuagucaagaugcaa

SEQ ID NO: 1093595 - RNA, 19 nt, Artificial Sequence
  Description of Artificial Sequence: Synthetic oligonucleotide
  Antisense strand to SEQ ID NO: 1093594
uugcaucuugacuaauugc

SEQ ID NO: 1093596 - RNA, 19 nt, Artificial Sequence
  Description of Artificial Sequence: Synthetic oligonucleotide
  Sense strand starting at position 1736 of SEQ ID NO: 915620
ggguuagaggguuaguuca

SEQ ID NO: 1093597 - RNA, 19 nt, Artificial Sequence
  Description of Artificial Sequence: Synthetic oligonucleotide
  Antisense strand to SEQ ID NO: 1093596
ugaacuaacccucuaaccc

SEQ ID NO: 1093598 - RNA, 19 nt, Artificial Sequence
  Description of Artificial Sequence: Synthetic oligonucleotide
  Sense strand starting at position 1738 of SEQ ID NO: 915620
guuagaggguuaguucaga

SEQ ID NO: 1093599 - RNA, 19 nt, Artificial Sequence
  Description of Artificial Sequence: Synthetic oligonucleotide
  Antisense strand to SEQ ID NO: 1093598
ucugaacuaacccucuaac

SEQ ID NO: 1093600 - RNA, 19 nt, Artificial Sequence
  Description of Artificial Sequence: Synthetic oligonucleotide
  Sense strand starting at position 2025 of SEQ ID NO: 915620
aggaauacccgucagcuga

SEQ ID NO: 1093601 - RNA, 19 nt, Artificial Sequence
  Description of Artificial Sequence: Synthetic oligonucleotide
  Antisense strand to SEQ ID NO: 1093600
ucagcugacggguauuccu

SEQ ID NO: 1093602 - RNA, 19 nt, Artificial Sequence
  Description of Artificial Sequence: Synthetic oligonucleotide
  Sense strand starting at position 2061 of SEQ ID NO: 915620
cccuauacauuccugagua

SEQ ID NO: 1093603 - RNA, 19 nt, Artificial Sequence
  Description of Artificial Sequence: Synthetic oligonucleotide
  Antisense strand to SEQ ID NO: 1093602
uacucaggaauguauaggg

SEQ ID NO: 1093604 - RNA, 19 nt, Artificial Sequence
  Description of Artificial Sequence: Synthetic oligonucleotide
  Sense strand starting at position 2063 of SEQ ID NO: 915620
cuauacauuccugaguacu

SEQ ID NO: 1093605 - RNA, 19 nt, Artificial Sequence
  Description of Artificial Sequence: Synthetic oligonucleotide
  Antisense strand to SEQ ID NO: 1093604
aguacucaggaauguauag

SEQ ID NO: 1093606 - RNA, 19 nt, Artificial Sequence
  Description of Artificial Sequence: Synthetic oligonucleotide
  Sense strand starting at position 2065 of SEQ ID NO: 915620
auacauuccugaguacuuu

SEQ ID NO: 1093607 - RNA, 19 nt, Artificial Sequence
  Description of Artificial Sequence: Synthetic oligonucleotide
  Antisense strand to SEQ ID NO: 1093606
aaaguacucaggaauguau

SEQ ID NO: 1093608 - RNA, 19 nt, Artificial Sequence
  Description of Artificial Sequence: Synthetic oligonucleotide
  Sense strand starting at position 2069 of SEQ ID NO: 915620
auuccugaguacuuuaaag

SEQ ID NO: 1093609 - RNA, 19 nt, Artificial Sequence
  Description of Artificial Sequence: Synthetic oligonucleotide
  Antisense strand to SEQ ID NO: 1093608
cuuuaaaguacucaggaau

SEQ ID NO: 1093610 - RNA, 19 nt, Artificial Sequence
  Description of Artificial Sequence: Synthetic oligonucleotide
  Sense strand starting at position 2071 of SEQ ID NO: 915620
uccugaguacuuuaaagcu

SEQ ID NO: 1093611 - RNA, 19 nt, Artificial Sequence
  Description of Artificial Sequence: Synthetic oligonucleotide
  Antisense strand to SEQ ID NO: 1093610
agcuuuaaaguacucagga

SEQ ID NO: 1093612 - RNA, 19 nt, Artificial Sequence
  Description of Artificial Sequence: Synthetic oligonucleotide
  Sense strand starting at position 2118 of SEQ ID NO: 915620
aggcaagagguuugcuaaa

SEQ ID NO: 1093613 - RNA, 19 nt, Artificial Sequence
  Description of Artificial Sequence: Synthetic oligonucleotide
  Antisense strand to SEQ ID NO: 1093612
uuuagcaaaccucuugccu

SEQ ID NO: 1093614 - RNA, 19 nt, Artificial Sequence
  Description of Artificial Sequence: Synthetic oligonucleotide
  Sense strand starting at position 2137 of SEQ ID NO: 915620
ugggccaauuguucugaga

SEQ ID NO: 1093615 - RNA, 19 nt, Artificial Sequence
  Description of Artificial Sequence: Synthetic oligonucleotide
  Antisense strand to SEQ ID NO: 1093614
ucucagaacaauuggccca

SEQ ID NO: 1093616 - RNA, 19 nt, Artificial Sequence
  Description of Artificial Sequence: Synthetic oligonucleotide
  Sense strand starting at position 2366 of SEQ ID NO: 915620
auuccaagauccuugggau

SEQ ID NO: 1093617 - RNA, 19 nt, Artificial Sequence
  Description of Artificial Sequence: Synthetic oligonucleotide
  Antisense strand to SEQ ID NO: 1093616
aucccaaggaucuuggaau

SEQ ID NO: 1093618 - RNA, 19 nt, Artificial Sequence
  Description of Artificial Sequence: Synthetic oligonucleotide
  Sense strand starting at position 2367 of SEQ ID NO: 915620
uuccaagauccuugggaua

SEQ ID NO: 1093619 - RNA, 19 nt, Artificial Sequence
  Description of Artificial Sequence: Synthetic oligonucleotide
  Antisense strand to SEQ ID NO: 1093618
uaucccaaggaucuuggaa

SEQ ID NO: 1093620 - RNA, 19 nt, Artificial Sequence
  Description of Artificial Sequence: Synthetic oligonucleotide
  Sense strand starting at position 2670 of SEQ ID NO: 915620
ccaagaaaucaugguuucu

SEQ ID NO: 1093621 - RNA, 19 nt, Artificial Sequence
  Description of Artificial Sequence: Synthetic oligonucleotide
  Antisense strand to SEQ ID NO: 1093620
agaaaccaugauuucuugg

SEQ ID NO: 1093622 - RNA, 19 nt, Artificial Sequence
  Description of Artificial Sequence: Synthetic oligonucleotide
  Sense strand starting at position 2732 of SEQ ID NO: 915620
uucugcuaguacucaagaa

SEQ ID NO: 1093623 - RNA, 19 nt, Artificial Sequence
  Description of Artificial Sequence: Synthetic oligonucleotide
  Antisense strand to SEQ ID NO: 1093622
uucuugaguacuagcagaa

SEQ ID NO: 1093624 - RNA, 19 nt, Artificial Sequence
  Description of Artificial Sequence: Synthetic oligonucleotide
  Sense strand starting at position 2983 of SEQ ID NO: 915620
uugauaauagccuguuaau

SEQ ID NO: 1093625 - RNA, 19 nt, Artificial Sequence
  Description of Artificial Sequence: Synthetic oligonucleotide
  Antisense strand to SEQ ID NO: 1093624
auuaacaggcuauuaucaa

SEQ ID NO: 1093626 - RNA, 19 nt, Artificial Sequence
  Description of Artificial Sequence: Synthetic oligonucleotide
  Sense strand starting at position 3012 of SEQ ID NO: 915620
agaucuuccguguaauacu

SEQ ID NO: 1093627 - RNA, 19 nt, Artificial Sequence
  Description of Artificial Sequence: Synthetic oligonucleotide
  Antisense strand to SEQ ID NO: 1093626
aguauuacacggaagaucu

SEQ ID NO: 1093628 - RNA, 19 nt, Artificial Sequence
  Description of Artificial Sequence: Synthetic oligonucleotide
  Sense strand starting at position 3363 of SEQ ID NO: 915620
gcacuuuggagagguuauu

SEQ ID NO: 1093629 - RNA, 19 nt, Artificial Sequence
  Description of Artificial Sequence: Synthetic oligonucleotide
  Antisense strand to SEQ ID NO: 1093628
aauaaccucuccaaagugc

SEQ ID NO: 1093630 - RNA, 19 nt, Artificial Sequence
  Description of Artificial Sequence: Synthetic oligonucleotide
  Sense strand starting at position 3519 of SEQ ID NO: 915620
gaugaaaugucuucuagac

SEQ ID NO: 1093631 - RNA, 19 nt, Artificial Sequence
  Description of Artificial Sequence: Synthetic oligonucleotide
  Antisense strand to SEQ ID NO: 1093630
gucuagaagacauuucauc

SEQ ID NO: 1093632 - RNA, 19 nt, Artificial Sequence
  Description of Artificial Sequence: Synthetic oligonucleotide
  Sense strand starting at position 3627 of SEQ ID NO: 915620
cgaugaacacugcacaaua

SEQ ID NO: 1093633 - RNA, 19 nt, Artificial Sequence
  Description of Artificial Sequence: Synthetic oligonucleotide
  Antisense strand to SEQ ID NO: 1093632
uauugugcaguguucaucg

SEQ ID NO: 1093634 - RNA, 19 nt, Artificial Sequence
  Description of Artificial Sequence: Synthetic oligonucleotide
  Sense strand starting at position 3679 of SEQ ID NO: 915620
auagaaaugguaggcugaa

SEQ ID NO: 1093635 - RNA, 19 nt, Artificial Sequence
  Description of Artificial Sequence: Synthetic oligonucleotide
  Antisense strand to SEQ ID NO: 1093634
uucagccuaccauuucuau

SEQ ID NO: 1093636 - RNA, 19 nt, Artificial Sequence
  Description of Artificial Sequence: Synthetic oligonucleotide
  Sense strand starting at position 3680 of SEQ ID NO: 915620
uagaaaugguaggcugaaa

SEQ ID NO: 1093637 - RNA, 19 nt, Artificial Sequence
  Description of Artificial Sequence: Synthetic oligonucleotide
  Antisense strand to SEQ ID NO: 1093636
uuucagccuaccauuucua

SEQ ID NO: 1093638 - RNA, 19 nt, Artificial Sequence
  Description of Artificial Sequence: Synthetic oligonucleotide
  Sense strand starting at position 3713 of SEQ ID NO: 915620
augaguuucuacuuuaaga

SEQ ID NO: 1093639 - RNA, 19 nt, Artificial Sequence
  Description of Artificial Sequence: Synthetic oligonucleotide
  Antisense strand to SEQ ID NO: 1093638
ucuuaaaguagaaacucau

SEQ ID NO: 1093640 - RNA, 19 nt, Artificial Sequence
  Description of Artificial Sequence: Synthetic oligonucleotide
  Sense strand starting at position 3852 of SEQ ID NO: 915620
auagaaaugugaucucuua

SEQ ID NO: 1093641 - RNA, 19 nt, Artificial Sequence
  Description of Artificial Sequence: Synthetic oligonucleotide
  Antisense strand to SEQ ID NO: 1093640
uaagagaucacauuucuau

SEQ ID NO: 1093642 - RNA, 19 nt, Artificial Sequence
  Description of Artificial Sequence: Synthetic oligonucleotide
  Sense strand starting at position 3901 of SEQ ID NO: 915620
uguccuaugccagacauug

SEQ ID NO: 1093643 - RNA, 19 nt, Artificial Sequence
  Description of Artificial Sequence: Synthetic oligonucleotide
  Antisense strand to SEQ ID NO: 1093642
caaugucuggcauaggaca

SEQ ID NO: 1093644 - RNA, 19 nt, Artificial Sequence
  Description of Artificial Sequence: Synthetic oligonucleotide
  Sense strand starting at position 63 of SEQ ID NO: 915621
gggcuaacgggucagaugu

SEQ ID NO: 1093645 - RNA, 19 nt, Artificial Sequence
  Description of Artificial Sequence: Synthetic oligonucleotide
  Antisense strand to SEQ ID NO: 1093644
acaucugacccguuagccc

SEQ ID NO: 1093646 - RNA, 19 nt, Artificial Sequence
  Description of Artificial Sequence: Synthetic oligonucleotide
  Sense strand starting at position 177 of SEQ ID NO: 915621
guaggccuucuagaacagu

SEQ ID NO: 1093647 - RNA, 19 nt, Artificial Sequence
  Description of Artificial Sequence: Synthetic oligonucleotide
  Antisense strand to SEQ ID NO: 1093646
acuguucuagaaggccuac

SEQ ID NO: 1093648 - RNA, 19 nt, Artificial Sequence
  Description of Artificial Sequence: Synthetic oligonucleotide
  Sense strand starting at position 209 of SEQ ID NO: 915621
ggcuaaggcagucacagau

SEQ ID NO: 1093649 - RNA, 19 nt, Artificial Sequence
  Description of Artificial Sequence: Synthetic oligonucleotide
  Antisense strand to SEQ ID NO: 1093648
aucugugacugccuuagcc

SEQ ID NO: 1093650 - RNA, 19 nt, Artificial Sequence
  Description of Artificial Sequence: Synthetic oligonucleotide
  Sense strand starting at position 219 of SEQ ID NO: 915621
gucacagauuaccuccaga

SEQ ID NO: 1093651 - RNA, 19 nt, Artificial Sequence
  Description of Artificial Sequence: Synthetic oligonucleotide
  Antisense strand to SEQ ID NO: 1093650
ucuggagguaaucugugac

SEQ ID NO: 1093652 - RNA, 19 nt, Artificial Sequence
  Description of Artificial Sequence: Synthetic oligonucleotide
  Sense strand starting at position 242 of SEQ ID NO: 915621
cggaaacuccugcaccaua

SEQ ID NO: 1093653 - RNA, 19 nt, Artificial Sequence
  Description of Artificial Sequence: Synthetic oligonucleotide
  Antisense strand to SEQ ID NO: 1093652
uauggugcaggaguuuccg

SEQ ID NO: 1093654 - RNA, 19 nt, Artificial Sequence
  Description of Artificial Sequence: Synthetic oligonucleotide
  Sense strand starting at position 307 of SEQ ID NO: 915621
gugagaacacaauguuaga

SEQ ID NO: 1093655 - RNA, 19 nt, Artificial Sequence
  Description of Artificial Sequence: Synthetic oligonucleotide
  Antisense strand to SEQ ID NO: 1093654
ucuaacauuguguucucac

SEQ ID NO: 1093656 - RNA, 19 nt, Artificial Sequence
  Description of Artificial Sequence: Synthetic oligonucleotide
  Sense strand starting at position 310 of SEQ ID NO: 915621
agaacacaauguuagacau

SEQ ID NO: 1093657 - RNA, 19 nt, Artificial Sequence
  Description of Artificial Sequence: Synthetic oligonucleotide
  Antisense strand to SEQ ID NO: 1093656
augucuaacauuguguucu

SEQ ID NO: 1093658 - RNA, 19 nt, Artificial Sequence
  Description of Artificial Sequence: Synthetic oligonucleotide
  Sense strand starting at position 348 of SEQ ID NO: 915621
gcuugcucuuacuuaagga

SEQ ID NO: 1093659 - RNA, 19 nt, Artificial Sequence
  Description of Artificial Sequence: Synthetic oligonucleotide
  Antisense strand to SEQ ID NO: 1093658
uccuuaaguaagagcaagc

SEQ ID NO: 1093660 - RNA, 19 nt, Artificial Sequence
  Description of Artificial Sequence: Synthetic oligonucleotide
  Sense strand starting at position 514 of SEQ ID NO: 915621
ucauguggcuuugugagaa

SEQ ID NO: 1093661 - RNA, 19 nt, Artificial Sequence
  Description of Artificial Sequence: Synthetic oligonucleotide
  Antisense strand to SEQ ID NO: 1093660
uucucacaaagccacauga

SEQ ID NO: 1093662 - RNA, 19 nt, Artificial Sequence
  Description of Artificial Sequence: Synthetic oligonucleotide
  Sense strand starting at position 556 of SEQ ID NO: 915621
aagugucuggcccauagua

SEQ ID NO: 1093663 - RNA, 19 nt, Artificial Sequence
  Description of Artificial Sequence: Synthetic oligonucleotide
  Antisense strand to SEQ ID NO: 1093662
uacuaugggccagacacuu

SEQ ID NO: 1093664 - RNA, 19 nt, Artificial Sequence
  Description of Artificial Sequence: Synthetic oligonucleotide
  Sense strand starting at position 569 of SEQ ID NO: 915621
auaguaagugcccacuaaa

SEQ ID NO: 1093665 - RNA, 19 nt, Artificial Sequence
  Description of Artificial Sequence: Synthetic oligonucleotide
  Antisense strand to SEQ ID NO: 1093664
uuuagugggcacuuacuau

SEQ ID NO: 1093666 - RNA, 19 nt, Artificial Sequence
  Description of Artificial Sequence: Synthetic oligonucleotide
  Sense strand starting at position 907 of SEQ ID NO: 915621
cagggucuaucugucugaa

SEQ ID NO: 1093667 - RNA, 19 nt, Artificial Sequence
  Description of Artificial Sequence: Synthetic oligonucleotide
  Antisense strand to SEQ ID NO: 1093666
uucagacagauagacccug

SEQ ID NO: 1093668 - RNA, 19 nt, Artificial Sequence
  Description of Artificial Sequence: Synthetic oligonucleotide
  Sense strand starting at position 976 of SEQ ID NO: 915621
ggcugacagggugauucau

SEQ ID NO: 1093669 - RNA, 19 nt, Artificial Sequence
  Description of Artificial Sequence: Synthetic oligonucleotide
  Antisense strand to SEQ ID NO: 1093668
augaaucacccugucagcc

SEQ ID NO: 1093670 - RNA, 19 nt, Artificial Sequence
  Description of Artificial Sequence: Synthetic oligonucleotide
  Sense strand starting at position 1000 of SEQ ID NO: 915621
guucuuaucuaggcuucua

SEQ ID NO: 1093671 - RNA, 19 nt, Artificial Sequence
  Description of Artificial Sequence: Synthetic oligonucleotide
  Antisense strand to SEQ ID NO: 1093670
uagaagccuagauaagaac

SEQ ID NO: 1093672 - RNA, 19 nt, Artificial Sequence
  Description of Artificial Sequence: Synthetic oligonucleotide
  Sense strand starting at position 1043 of SEQ ID NO: 915621
ggaggcugcuggucacaaa

SEQ ID NO: 1093673 - RNA, 19 nt, Artificial Sequence
  Description of Artificial Sequence: Synthetic oligonucleotide
  Antisense strand to SEQ ID NO: 1093672
uuugugaccagcagccucc

SEQ ID NO: 1093674 - RNA, 19 nt, Artificial Sequence
  Description of Artificial Sequence: Synthetic oligonucleotide
  Sense strand starting at position 1165 of SEQ ID NO: 915621
gcaggaugggugcagagaa

SEQ ID NO: 1093675 - RNA, 19 nt, Artificial Sequence
  Description of Artificial Sequence: Synthetic oligonucleotide
  Antisense strand to SEQ ID NO: 1093674
uucucugcacccauccugc

SEQ ID NO: 1093676 - RNA, 19 nt, Artificial Sequence
  Description of Artificial Sequence: Synthetic oligonucleotide
  Sense strand starting at position 1208 of SEQ ID NO: 915621
gguggagcccugugucuua

SEQ ID NO: 1093677 - RNA, 19 nt, Artificial Sequence
  Description of Artificial Sequence: Synthetic oligonucleotide
  Antisense strand to SEQ ID NO: 1093676
uaagacacagggcuccacc

SEQ ID NO: 1093678 - RNA, 19 nt, Artificial Sequence
  Description of Artificial Sequence: Synthetic oligonucleotide
  Sense strand starting at position 1217 of SEQ ID NO: 915621
cugugucuuagacgcuaaa

SEQ ID NO: 1093679 - RNA, 19 nt, Artificial Sequence
  Description of Artificial Sequence: Synthetic oligonucleotide
  Antisense strand to SEQ ID NO: 1093678
uuuagcgucuaagacacag

SEQ ID NO: 1093680 - RNA, 19 nt, Artificial Sequence
  Description of Artificial Sequence: Synthetic oligonucleotide
  Sense strand starting at position 1268 of SEQ ID NO: 915621
agcccacucguguaguuua

SEQ ID NO: 1093681 - RNA, 19 nt, Artificial Sequence
  Description of Artificial Sequence: Synthetic oligonucleotide
  Antisense strand to SEQ ID NO: 1093680
uaaacuacacgagugggcu

SEQ ID NO: 1093682 - RNA, 19 nt, Artificial Sequence
  Description of Artificial Sequence: Synthetic oligonucleotide
  Sense strand starting at position 1301 of SEQ ID NO: 915621
acgagguguggguauggaa

SEQ ID NO: 1093683 - RNA, 19 nt, Artificial Sequence
  Description of Artificial Sequence: Synthetic oligonucleotide
  Antisense strand to SEQ ID NO: 1093682
uuccauacccacaccucgu

SEQ ID NO: 1093684 - RNA, 19 nt, Artificial Sequence
  Description of Artificial Sequence: Synthetic oligonucleotide
  Sense strand starting at position 1419 of SEQ ID NO: 915621
cuuucugcaccugagcaau

SEQ ID NO: 1093685 - RNA, 19 nt, Artificial Sequence
  Description of Artificial Sequence: Synthetic oligonucleotide
  Antisense strand to SEQ ID NO: 1093684
auugcucaggugcagaaag

SEQ ID NO: 1093686 - RNA, 19 nt, Artificial Sequence
  Description of Artificial Sequence: Synthetic oligonucleotide
  Sense strand starting at position 1579 of SEQ ID NO: 915621
cggagguggcucuggagua

SEQ ID NO: 1093687 - RNA, 19 nt, Artificial Sequence
  Description of Artificial Sequence: Synthetic oligonucleotide
  Antisense strand to SEQ ID NO: 1093686
uacuccagagccaccuccg

SEQ ID NO: 1093688 - RNA, 19 nt, Artificial Sequence
  Description of Artificial Sequence: Synthetic oligonucleotide
  Sense strand starting at position 1732 of SEQ ID NO: 915621
aacaaaguugcccgaggua

SEQ ID NO: 1093689 - RNA, 19 nt, Artificial Sequence
  Description of Artificial Sequence: Synthetic oligonucleotide
  Antisense strand to SEQ ID NO: 1093688
uaccucgggcaacuuuguu

SEQ ID NO: 1093690 - RNA, 19 nt, Artificial Sequence
  Description of Artificial Sequence: Synthetic oligonucleotide
  Sense strand starting at position 1735 of SEQ ID NO: 915621
aaaguugcccgagguaaca

SEQ ID NO: 1093691 - RNA, 19 nt, Artificial Sequence
  Description of Artificial Sequence: Synthetic oligonucleotide
  Antisense strand to SEQ ID NO: 1093690
uguuaccucgggcaacuuu

SEQ ID NO: 1093692 - RNA, 19 nt, Artificial Sequence
  Description of Artificial Sequence: Synthetic oligonucleotide
  Sense strand starting at position 3022 of SEQ ID NO: 915621
caggcaaaccucugaagga

SEQ ID NO: 1093693 - RNA, 19 nt, Artificial Sequence
  Description of Artificial Sequence: Synthetic oligonucleotide
  Antisense strand to SEQ ID NO: 1093692
uccuucagagguuugccug

SEQ ID NO: 1093694 - RNA, 19 nt, Artificial Sequence
  Description of Artificial Sequence: Synthetic oligonucleotide
  Sense strand starting at position 3076 of SEQ ID NO: 915621
ggacuaguguuguccauuu

SEQ ID NO: 1093695 - RNA, 19 nt, Artificial Sequence
  Description of Artificial Sequence: Synthetic oligonucleotide
  Antisense strand to SEQ ID NO: 1093694
aaauggacaacacuagucc

SEQ ID NO: 1093696 - RNA, 19 nt, Artificial Sequence
  Description of Artificial Sequence: Synthetic oligonucleotide
  Sense strand starting at position 3115 of SEQ ID NO: 915621
ugccuuugguucuuccaaa

SEQ ID NO: 1093697 - RNA, 19 nt, Artificial Sequence
  Description of Artificial Sequence: Synthetic oligonucleotide
  Antisense strand to SEQ ID NO: 1093696
uuuggaagaaccaaaggca

SEQ ID NO: 1093698 - RNA, 19 nt, Artificial Sequence
  Description of Artificial Sequence: Synthetic oligonucleotide
  Sense strand starting at position 3116 of SEQ ID NO: 915621
gccuuugguucuuccaaag

SEQ ID NO: 1093699 - RNA, 19 nt, Artificial Sequence
  Description of Artificial Sequence: Synthetic oligonucleotide
  Antisense strand to SEQ ID NO: 1093698
cuuuggaagaaccaaaggc

SEQ ID NO: 1093700 - RNA, 19 nt, Artificial Sequence
  Description of Artificial Sequence: Synthetic oligonucleotide
  Sense strand starting at position 3314 of SEQ ID NO: 915621
ggaauaagccacuggucuu

SEQ ID NO: 1093701 - RNA, 19 nt, Artificial Sequence
  Description of Artificial Sequence: Synthetic oligonucleotide
  Antisense strand to SEQ ID NO: 1093700
aagaccaguggcuuauucc

SEQ ID NO: 1093702 - RNA, 19 nt, Artificial Sequence
  Description of Artificial Sequence: Synthetic oligonucleotide
  Sense strand starting at position 3326 of SEQ ID NO: 915621
uggucuugccuuugaagaa

SEQ ID NO: 1093703 - RNA, 19 nt, Artificial Sequence
  Description of Artificial Sequence: Synthetic oligonucleotide
  Antisense strand to SEQ ID NO: 1093702
uucuucaaaggcaagacca

SEQ ID NO: 1093704 - RNA, 19 nt, Artificial Sequence
  Description of Artificial Sequence: Synthetic oligonucleotide
  Sense strand starting at position 3377 of SEQ ID NO: 915621
guguuauaauagguugaca

SEQ ID NO: 1093705 - RNA, 19 nt, Artificial Sequence
  Description of Artificial Sequence: Synthetic oligonucleotide
  Antisense strand to SEQ ID NO: 1093704
ugucaaccuauuauaacac

SEQ ID NO: 1093706 - RNA, 19 nt, Artificial Sequence
  Description of Artificial Sequence: Synthetic oligonucleotide
  Sense strand starting at position 3379 of SEQ ID NO: 915621
guuauaauagguugacaaa

SEQ ID NO: 1093707 - RNA, 19 nt, Artificial Sequence
  Description of Artificial Sequence: Synthetic oligonucleotide
  Antisense strand to SEQ ID NO: 1093706
uuugucaaccuauuauaac

SEQ ID NO: 1093708 - RNA, 19 nt, Artificial Sequence
  Description of Artificial Sequence: Synthetic oligonucleotide
  Sense strand starting at position 3474 of SEQ ID NO: 915621
gcuacaaauuaggucagau

SEQ ID NO: 1093709 - RNA, 19 nt, Artificial Sequence
  Description of Artificial Sequence: Synthetic oligonucleotide
  Antisense strand to SEQ ID NO: 1093708
aucugaccuaauuuguagc

SEQ ID NO: 1093710 - RNA, 19 nt, Artificial Sequence
  Description of Artificial Sequence: Synthetic oligonucleotide
  Sense strand starting at position 3478 of SEQ ID NO: 915621
caaauuaggucagauugaa

SEQ ID NO: 1093711 - RNA, 19 nt, Artificial Sequence
  Description of Artificial Sequence: Synthetic oligonucleotide
  Antisense strand to SEQ ID NO: 1093710
uucaaucugaccuaauuug

SEQ ID NO: 1093712 - RNA, 19 nt, Artificial Sequence
  Description of Artificial Sequence: Synthetic oligonucleotide
  Sense strand starting at position 3536 of SEQ ID NO: 915621
cauggagaugccugucaua

SEQ ID NO: 1093713 - RNA, 19 nt, Artificial Sequence
  Description of Artificial Sequence: Synthetic oligonucleotide
  Antisense strand to SEQ ID NO: 1093712
uaugacaggcaucuccaug

SEQ ID NO: 1093714 - RNA, 19 nt, Artificial Sequence
  Description of Artificial Sequence: Synthetic oligonucleotide
  Sense strand starting at position 3559 of SEQ ID NO: 915621
acggcuauugcacaggauu

SEQ ID NO: 1093715 - RNA, 19 nt, Artificial Sequence
  Description of Artificial Sequence: Synthetic oligonucleotide
  Antisense strand to SEQ ID NO: 1093714
aauccugugcaauagccgu

SEQ ID NO: 1093716 - RNA, 19 nt, Artificial Sequence
  Description of Artificial Sequence: Synthetic oligonucleotide
  Sense strand starting at position 3663 of SEQ ID NO: 915621
ggcuguguccuguugguga

SEQ ID NO: 1093717 - RNA, 19 nt, Artificial Sequence
  Description of Artificial Sequence: Synthetic oligonucleotide
  Antisense strand to SEQ ID NO: 1093716
ucaccaacaggacacagcc

SEQ ID NO: 1093718 - RNA, 19 nt, Artificial Sequence
  Description of Artificial Sequence: Synthetic oligonucleotide
  Sense strand starting at position 3681 of SEQ ID NO: 915621
auggcuguuggcgaaugau

SEQ ID NO: 1093719 - RNA, 19 nt, Artificial Sequence
  Description of Artificial Sequence: Synthetic oligonucleotide
  Antisense strand to SEQ ID NO: 1093718
aucauucgccaacagccau

SEQ ID NO: 1093720 - RNA, 19 nt, Artificial Sequence
  Description of Artificial Sequence: Synthetic oligonucleotide
  Sense strand starting at position 3851 of SEQ ID NO: 915621
ggcauaggacuuugaagga

SEQ ID NO: 1093721 - RNA, 19 nt, Artificial Sequence
  Description of Artificial Sequence: Synthetic oligonucleotide
  Antisense strand to SEQ ID NO: 1093720
uccuucaaaguccuaugcc

SEQ ID NO: 1093722 - RNA, 19 nt, Artificial Sequence
  Description of Artificial Sequence: Synthetic oligonucleotide
  Sense strand starting at position 3880 of SEQ ID NO: 915621
ugcuguucccaguaucacu

SEQ ID NO: 1093723 - RNA, 19 nt, Artificial Sequence
  Description of Artificial Sequence: Synthetic oligonucleotide
  Antisense strand to SEQ ID NO: 1093722
agugauacugggaacagca

SEQ ID NO: 1093724 - RNA, 19 nt, Artificial Sequence
  Description of Artificial Sequence: Synthetic oligonucleotide
  Sense strand starting at position 267 of SEQ ID NO: 915622
uguuuagucauuugugaga

SEQ ID NO: 1093725 - RNA, 19 nt, Artificial Sequence
  Description of Artificial Sequence: Synthetic oligonucleotide
  Antisense strand to SEQ ID NO: 1093724
ucucacaaaugacuaaaca

SEQ ID NO: 1093726 - RNA, 19 nt, Artificial Sequence
  Description of Artificial Sequence: Synthetic oligonucleotide
  Sense strand starting at position 270 of SEQ ID NO: 915622
uuagucauuugugagaaag

SEQ ID NO: 1093727 - RNA, 19 nt, Artificial Sequence
  Description of Artificial Sequence: Synthetic oligonucleotide
  Antisense strand to SEQ ID NO: 1093726
cuuucucacaaaugacuaa

SEQ ID NO: 1093728 - RNA, 19 nt, Artificial Sequence
  Description of Artificial Sequence: Synthetic oligonucleotide
  Sense strand starting at position 272 of SEQ ID NO: 915622
agucauuugugagaaagau

SEQ ID NO: 1093729 - RNA, 19 nt, Artificial Sequence
  Description of Artificial Sequence: Synthetic oligonucleotide
  Antisense strand to SEQ ID NO: 1093728
aucuuucucacaaaugacu

SEQ ID NO: 1093730 - RNA, 19 nt, Artificial Sequence
  Description of Artificial Sequence: Synthetic oligonucleotide
  Sense strand starting at position 335 of SEQ ID NO: 915622
ugaucugguuucucaucua

SEQ ID NO: 1093731 - RNA, 19 nt, Artificial Sequence
  Description of Artificial Sequence: Synthetic oligonucleotide
  Antisense strand to SEQ ID NO: 1093730
uagaugagaaaccagauca

SEQ ID NO: 1093732 - RNA, 19 nt, Artificial Sequence
  Description of Artificial Sequence: Synthetic oligonucleotide
  Sense strand starting at position 411 of SEQ ID NO: 915622
gaaaguaaagcucaaaugu

SEQ ID NO: 1093733 - RNA, 19 nt, Artificial Sequence
  Description of Artificial Sequence: Synthetic oligonucleotide
  Antisense strand to SEQ ID NO: 1093732
acauuugagcuuuacuuuc

SEQ ID NO: 1093734 - RNA, 19 nt, Artificial Sequence
  Description of Artificial Sequence: Synthetic oligonucleotide
  Sense strand starting at position 449 of SEQ ID NO: 915622
gcagaauacaucugacagg

SEQ ID NO: 1093735 - RNA, 19 nt, Artificial Sequence
  Description of Artificial Sequence: Synthetic oligonucleotide
  Antisense strand to SEQ ID NO: 1093734
ccugucagauguauucugc

SEQ ID NO: 1093736 - RNA, 19 nt, Artificial Sequence
  Description of Artificial Sequence: Synthetic oligonucleotide
  Sense strand starting at position 666 of SEQ ID NO: 915622
cccagugacugacuaacua

SEQ ID NO: 1093737 - RNA, 19 nt, Artificial Sequence
  Description of Artificial Sequence: Synthetic oligonucleotide
  Antisense strand to SEQ ID NO: 1093736
uaguuagucagucacuggg

SEQ ID NO: 1093738 - RNA, 19 nt, Artificial Sequence
  Description of Artificial Sequence: Synthetic oligonucleotide
  Sense strand starting at position 861 of SEQ ID NO: 915622
gggaaagcucagugaguac

SEQ ID NO: 1093739 - RNA, 19 nt, Artificial Sequence
  Description of Artificial Sequence: Synthetic oligonucleotide
  Antisense strand to SEQ ID NO: 1093738
guacucacugagcuuuccc

SEQ ID NO: 1093740 - RNA, 19 nt, Artificial Sequence
  Description of Artificial Sequence: Synthetic oligonucleotide
  Sense strand starting at position 890 of SEQ ID NO: 915622
gauuauagugaaggcaaau

SEQ ID NO: 1093741 - RNA, 19 nt, Artificial Sequence
  Description of Artificial Sequence: Synthetic oligonucleotide
  Antisense strand to SEQ ID NO: 1093740
auuugccuucacuauaauc

SEQ ID NO: 1093742 - RNA, 19 nt, Artificial Sequence
  Description of Artificial Sequence: Synthetic oligonucleotide
  Sense strand starting at position 1170 of SEQ ID NO: 915622
cugggacucuuuccuuuga

SEQ ID NO: 1093743 - RNA, 19 nt, Artificial Sequence
  Description of Artificial Sequence: Synthetic oligonucleotide
  Antisense strand to SEQ ID NO: 1093742
ucaaaggaaagagucccag

SEQ ID NO: 1093744 - RNA, 19 nt, Artificial Sequence
  Description of Artificial Sequence: Synthetic oligonucleotide
  Sense strand starting at position 1171 of SEQ ID NO: 915622
ugggacucuuuccuuugaa

SEQ ID NO: 1093745 - RNA, 19 nt, Artificial Sequence
  Description of Artificial Sequence: Synthetic oligonucleotide
  Antisense strand to SEQ ID NO: 1093744
uucaaaggaaagaguccca

SEQ ID NO: 1093746 - RNA, 19 nt, Artificial Sequence
  Description of Artificial Sequence: Synthetic oligonucleotide
  Sense strand starting at position 1172 of SEQ ID NO: 915622
gggacucuuuccuuugaau

SEQ ID NO: 1093747 - RNA, 19 nt, Artificial Sequence
  Description of Artificial Sequence: Synthetic oligonucleotide
  Antisense strand to SEQ ID NO: 1093746
auucaaaggaaagaguccc

SEQ ID NO: 1093748 - RNA, 19 nt, Artificial Sequence
  Description of Artificial Sequence: Synthetic oligonucleotide
  Sense strand starting at position 1296 of SEQ ID NO: 915622
caaagaguucugcaaguca

SEQ ID NO: 1093749 - RNA, 19 nt, Artificial Sequence
  Description of Artificial Sequence: Synthetic oligonucleotide
  Antisense strand to SEQ ID NO: 1093748
ugacuugcagaacucuuug

SEQ ID NO: 1093750 - RNA, 19 nt, Artificial Sequence
  Description of Artificial Sequence: Synthetic oligonucleotide
  Sense strand starting at position 1717 of SEQ ID NO: 915622
gaacaaugagauugucccu

SEQ ID NO: 1093751 - RNA, 19 nt, Artificial Sequence
  Description of Artificial Sequence: Synthetic oligonucleotide
  Antisense strand to SEQ ID NO: 1093750
agggacaaucucauuguuc

SEQ ID NO: 1093752 - RNA, 19 nt, Artificial Sequence
  Description of Artificial Sequence: Synthetic oligonucleotide
  Sense strand starting at position 1749 of SEQ ID NO: 915622
guuggaagcaauuagucaa

SEQ ID NO: 1093753 - RNA, 19 nt, Artificial Sequence
  Description of Artificial Sequence: Synthetic oligonucleotide
  Antisense strand to SEQ ID NO: 1093752
uugacuaauugcuuccaac

SEQ ID NO: 1093754 - RNA, 19 nt, Artificial Sequence
  Description of Artificial Sequence: Synthetic oligonucleotide
  Sense strand starting at position 1752 of SEQ ID NO: 915622
ggaagcaauuagucaagau

SEQ ID NO: 1093755 - RNA, 19 nt, Artificial Sequence
  Description of Artificial Sequence: Synthetic oligonucleotide
  Antisense strand to SEQ ID NO: 1093754
aucuugacuaauugcuucc

SEQ ID NO: 1093756 - RNA, 19 nt, Artificial Sequence
  Description of Artificial Sequence: Synthetic oligonucleotide
  Sense strand starting at position 1756 of SEQ ID NO: 915622
gcaauuagucaagaugcaa

SEQ ID NO: 1093757 - RNA, 19 nt, Artificial Sequence
  Description of Artificial Sequence: Synthetic oligonucleotide
  Antisense strand to SEQ ID NO: 1093756
uugcaucuugacuaauugc

SEQ ID NO: 1093758 - RNA, 19 nt, Artificial Sequence
  Description of Artificial Sequence: Synthetic oligonucleotide
  Sense strand starting at position 1906 of SEQ ID NO: 915622
ggguuagaggguuaguuca

SEQ ID NO: 1093759 - RNA, 19 nt, Artificial Sequence
  Description of Artificial Sequence: Synthetic oligonucleotide
  Antisense strand to SEQ ID NO: 1093758
ugaacuaacccucuaaccc

SEQ ID NO: 1093760 - RNA, 19 nt, Artificial Sequence
  Description of Artificial Sequence: Synthetic oligonucleotide
  Sense strand starting at position 1908 of SEQ ID NO: 915622
guuagaggguuaguucaga

SEQ ID NO: 1093761 - RNA, 19 nt, Artificial Sequence
  Description of Artificial Sequence: Synthetic oligonucleotide
  Antisense strand to SEQ ID NO: 1093760
ucugaacuaacccucuaac

SEQ ID NO: 1093762 - RNA, 19 nt, Artificial Sequence
  Description of Artificial Sequence: Synthetic oligonucleotide
  Sense strand starting at position 1997 of SEQ ID NO: 915622
ugaugcuagccaugacuaa

SEQ ID NO: 1093763 - RNA, 19 nt, Artificial Sequence
  Description of Artificial Sequence: Synthetic oligonucleotide
  Antisense strand to SEQ ID NO: 1093762
uuagucauggcuagcauca

SEQ ID NO: 1093764 - RNA, 19 nt, Artificial Sequence
  Description of Artificial Sequence: Synthetic oligonucleotide
  Sense strand starting at position 2195 of SEQ ID NO: 915622
aggaauacccgucagcuga

SEQ ID NO: 1093765 - RNA, 19 nt, Artificial Sequence
  Description of Artificial Sequence: Synthetic oligonucleotide
  Antisense strand to SEQ ID NO: 1093764
ucagcugacggguauuccu

SEQ ID NO: 1093766 - RNA, 19 nt, Artificial Sequence
  Description of Artificial Sequence: Synthetic oligonucleotide
  Sense strand starting at position 2231 of SEQ ID NO: 915622
cccuauacauuccugagua

SEQ ID NO: 1093767 - RNA, 19 nt, Artificial Sequence
  Description of Artificial Sequence: Synthetic oligonucleotide
  Antisense strand to SEQ ID NO: 1093766
uacucaggaauguauaggg

SEQ ID NO: 1093768 - RNA, 19 nt, Artificial Sequence
  Description of Artificial Sequence: Synthetic oligonucleotide
  Sense strand starting at position 2233 of SEQ ID NO: 915622
cuauacauuccugaguacu

SEQ ID NO: 1093769 - RNA, 19 nt, Artificial Sequence
  Description of Artificial Sequence: Synthetic oligonucleotide
  Antisense strand to SEQ ID NO: 1093768
aguacucaggaauguauag

SEQ ID NO: 1093770 - RNA, 19 nt, Artificial Sequence
  Description of Artificial Sequence: Synthetic oligonucleotide
  Sense strand starting at position 2235 of SEQ ID NO: 915622
auacauuccugaguacuuu

SEQ ID NO: 1093771 - RNA, 19 nt, Artificial Sequence
  Description of Artificial Sequence: Synthetic oligonucleotide
  Antisense strand to SEQ ID NO: 1093770
aaaguacucaggaauguau

SEQ ID NO: 1093772 - RNA, 19 nt, Artificial Sequence
  Description of Artificial Sequence: Synthetic oligonucleotide
  Sense strand starting at position 2239 of SEQ ID NO: 915622
auuccugaguacuuuaaag

SEQ ID NO: 1093773 - RNA, 19 nt, Artificial Sequence
  Description of Artificial Sequence: Synthetic oligonucleotide
  Antisense strand to SEQ ID NO: 1093772
cuuuaaaguacucaggaau

SEQ ID NO: 1093774 - RNA, 19 nt, Artificial Sequence
  Description of Artificial Sequence: Synthetic oligonucleotide
  Sense strand starting at position 2241 of SEQ ID NO: 915622
uccugaguacuuuaaagcu

SEQ ID NO: 1093775 - RNA, 19 nt, Artificial Sequence
  Description of Artificial Sequence: Synthetic oligonucleotide
  Antisense strand to SEQ ID NO: 1093774
agcuuuaaaguacucagga

SEQ ID NO: 1093776 - RNA, 19 nt, Artificial Sequence
  Description of Artificial Sequence: Synthetic oligonucleotide
  Sense strand starting at position 2288 of SEQ ID NO: 915622
aggcaagagguuugcuaaa

SEQ ID NO: 1093777 - RNA, 19 nt, Artificial Sequence
  Description of Artificial Sequence: Synthetic oligonucleotide
  Antisense strand to SEQ ID NO: 1093776
uuuagcaaaccucuugccu

SEQ ID NO: 1093778 - RNA, 19 nt, Artificial Sequence
  Description of Artificial Sequence: Synthetic oligonucleotide
  Sense strand starting at position 2307 of SEQ ID NO: 915622
ugggccaauuguucugaga

SEQ ID NO: 1093779 - RNA, 19 nt, Artificial Sequence
  Description of Artificial Sequence: Synthetic oligonucleotide
  Antisense strand to SEQ ID NO: 1093778
ucucagaacaauuggccca

SEQ ID NO: 1093780 - RNA, 19 nt, Artificial Sequence
  Description of Artificial Sequence: Synthetic oligonucleotide
  Sense strand starting at position 2536 of SEQ ID NO: 915622
auuccaagauccuugggau

SEQ ID NO: 1093781 - RNA, 19 nt, Artificial Sequence
  Description of Artificial Sequence: Synthetic oligonucleotide
  Antisense strand to SEQ ID NO: 1093780
aucccaaggaucuuggaau

SEQ ID NO: 1093782 - RNA, 19 nt, Artificial Sequence
  Description of Artificial Sequence: Synthetic oligonucleotide
  Sense strand starting at position 2537 of SEQ ID NO: 915622
uuccaagauccuugggaua

SEQ ID NO: 1093783 - RNA, 19 nt, Artificial Sequence
  Description of Artificial Sequence: Synthetic oligonucleotide
  Antisense strand to SEQ ID NO: 1093782
uaucccaaggaucuuggaa

SEQ ID NO: 1093784 - RNA, 19 nt, Artificial Sequence
  Description of Artificial Sequence: Synthetic oligonucleotide
  Sense strand starting at position 2840 of SEQ ID NO: 915622
ccaagaaaucaugguuucu

SEQ ID NO: 1093785 - RNA, 19 nt, Artificial Sequence
  Description of Artificial Sequence: Synthetic oligonucleotide
  Antisense strand to SEQ ID NO: 1093784
agaaaccaugauuucuugg

SEQ ID NO: 1093786 - RNA, 19 nt, Artificial Sequence
  Description of Artificial Sequence: Synthetic oligonucleotide
  Sense strand starting at position 2902 of SEQ ID NO: 915622
uucugcuaguacucaagaa

SEQ ID NO: 1093787 - RNA, 19 nt, Artificial Sequence
  Description of Artificial Sequence: Synthetic oligonucleotide
  Antisense strand to SEQ ID NO: 1093786
uucuugaguacuagcagaa

SEQ ID NO: 1093788 - RNA, 19 nt, Artificial Sequence
  Description of Artificial Sequence: Synthetic oligonucleotide
  Sense strand starting at position 3153 of SEQ ID NO: 915622
uugauaauagccuguuaau

SEQ ID NO: 1093789 - RNA, 19 nt, Artificial Sequence
  Description of Artificial Sequence: Synthetic oligonucleotide
  Antisense strand to SEQ ID NO: 1093788
auuaacaggcuauuaucaa

SEQ ID NO: 1093790 - RNA, 19 nt, Artificial Sequence
  Description of Artificial Sequence: Synthetic oligonucleotide
  Sense strand starting at position 3182 of SEQ ID NO: 915622
agaucuuccguguaauacu

SEQ ID NO: 1093791 - RNA, 19 nt, Artificial Sequence
  Description of Artificial Sequence: Synthetic oligonucleotide
  Antisense strand to SEQ ID NO: 1093790
aguauuacacggaagaucu

SEQ ID NO: 1093792 - RNA, 19 nt, Artificial Sequence
  Description of Artificial Sequence: Synthetic oligonucleotide
  Sense strand starting at position 3533 of SEQ ID NO: 915622
gcacuuuggagagguuauu

SEQ ID NO: 1093793 - RNA, 19 nt, Artificial Sequence
  Description of Artificial Sequence: Synthetic oligonucleotide
  Antisense strand to SEQ ID NO: 1093792
aauaaccucuccaaagugc

SEQ ID NO: 1093794 - RNA, 19 nt, Artificial Sequence
  Description of Artificial Sequence: Synthetic oligonucleotide
  Sense strand starting at position 3689 of SEQ ID NO: 915622
gaugaaaugucuucuagac

SEQ ID NO: 1093795 - RNA, 19 nt, Artificial Sequence
  Description of Artificial Sequence: Synthetic oligonucleotide
  Antisense strand to SEQ ID NO: 1093794
gucuagaagacauuucauc

SEQ ID NO: 1093796 - RNA, 19 nt, Artificial Sequence
  Description of Artificial Sequence: Synthetic oligonucleotide
  Sense strand starting at position 3797 of SEQ ID NO: 915622
cgaugaacacugcacaaua

SEQ ID NO: 1093797 - RNA, 19 nt, Artificial Sequence
  Description of Artificial Sequence: Synthetic oligonucleotide
  Antisense strand to SEQ ID NO: 1093796
uauugugcaguguucaucg

SEQ ID NO: 1093798 - RNA, 19 nt, Artificial Sequence
  Description of Artificial Sequence: Synthetic oligonucleotide
  Sense strand starting at position 3849 of SEQ ID NO: 915622
auagaaaugguaggcugaa

SEQ ID NO: 1093799 - RNA, 19 nt, Artificial Sequence
  Description of Artificial Sequence: Synthetic oligonucleotide
  Antisense strand to SEQ ID NO: 1093798
uucagccuaccauuucuau

SEQ ID NO: 1093800 - RNA, 19 nt, Artificial Sequence
  Description of Artificial Sequence: Synthetic oligonucleotide
  Sense strand starting at position 3850 of SEQ ID NO: 915622
uagaaaugguaggcugaaa

SEQ ID NO: 1093801 - RNA, 19 nt, Artificial Sequence
  Description of Artificial Sequence: Synthetic oligonucleotide
  Antisense strand to SEQ ID NO: 1093800
uuucagccuaccauuucua

SEQ ID NO: 1093802 - RNA, 19 nt, Artificial Sequence
  Description of Artificial Sequence: Synthetic oligonucleotide
  Sense strand starting at position 3883 of SEQ ID NO: 915622
augaguuucuacuuuaaga

SEQ ID NO: 1093803 - RNA, 19 nt, Artificial Sequence
  Description of Artificial Sequence: Synthetic oligonucleotide
  Antisense strand to SEQ ID NO: 1093802
ucuuaaaguagaaacucau

SEQ ID NO: 1093804 - RNA, 19 nt, Artificial Sequence
  Description of Artificial Sequence: Synthetic oligonucleotide
  Sense strand starting at position 126 of SEQ ID NO: 915623
uagccugugcucuggagua

SEQ ID NO: 1093805 - RNA, 19 nt, Artificial Sequence
  Description of Artificial Sequence: Synthetic oligonucleotide
  Antisense strand to SEQ ID NO: 1093804
uacuccagagcacaggcua

SEQ ID NO: 1093806 - RNA, 19 nt, Artificial Sequence
  Description of Artificial Sequence: Synthetic oligonucleotide
  Sense strand starting at position 128 of SEQ ID NO: 915623
gccugugcucuggaguaca

SEQ ID NO: 1093807 - RNA, 19 nt, Artificial Sequence
  Description of Artificial Sequence: Synthetic oligonucleotide
  Antisense strand to SEQ ID NO: 1093806
uguacuccagagcacaggc

SEQ ID NO: 1093808 - RNA, 19 nt, Artificial Sequence
  Description of Artificial Sequence: Synthetic oligonucleotide
  Sense strand starting at position 642 of SEQ ID NO: 915623
cccucaguugcccaaagaa

SEQ ID NO: 1093809 - RNA, 19 nt, Artificial Sequence
  Description of Artificial Sequence: Synthetic oligonucleotide
  Antisense strand to SEQ ID NO: 1093808
uucuuugggcaacugaggg

SEQ ID NO: 1093810 - RNA, 19 nt, Artificial Sequence
  Description of Artificial Sequence: Synthetic oligonucleotide
  Sense strand starting at position 696 of SEQ ID NO: 915623
ggacaaaggccuggaugua

SEQ ID NO: 1093811 - RNA, 19 nt, Artificial Sequence
  Description of Artificial Sequence: Synthetic oligonucleotide
  Antisense strand to SEQ ID NO: 1093810
uacauccaggccuuugucc

SEQ ID NO: 1093812 - RNA, 19 nt, Artificial Sequence
  Description of Artificial Sequence: Synthetic oligonucleotide
  Sense strand starting at position 835 of SEQ ID NO: 915623
gcggcuacuucccuacuua

SEQ ID NO: 1093813 - RNA, 19 nt, Artificial Sequence
  Description of Artificial Sequence: Synthetic oligonucleotide
  Antisense strand to SEQ ID NO: 1093812
uaaguagggaaguagccgc

SEQ ID NO: 1093814 - RNA, 19 nt, Artificial Sequence
  Description of Artificial Sequence: Synthetic oligonucleotide
  Sense strand starting at position 982 of SEQ ID NO: 915623
agaacugguguuugaggua

SEQ ID NO: 1093815 - RNA, 19 nt, Artificial Sequence
  Description of Artificial Sequence: Synthetic oligonucleotide
  Antisense strand to SEQ ID NO: 1093814
uaccucaaacaccaguucu

SEQ ID NO: 1093816 - RNA, 19 nt, Artificial Sequence
  Description of Artificial Sequence: Synthetic oligonucleotide
  Sense strand starting at position 1115 of SEQ ID NO: 915623
gaugcucgugcugugcaaa

SEQ ID NO: 1093817 - RNA, 19 nt, Artificial Sequence
  Description of Artificial Sequence: Synthetic oligonucleotide
  Antisense strand to SEQ ID NO: 1093816
uuugcacagcacgagcauc

SEQ ID NO: 1093818 - RNA, 19 nt, Artificial Sequence
  Description of Artificial Sequence: Synthetic oligonucleotide
  Sense strand starting at position 1188 of SEQ ID NO: 915623
acauuucgcccucgaaauc

SEQ ID NO: 1093819 - RNA, 19 nt, Artificial Sequence
  Description of Artificial Sequence: Synthetic oligonucleotide
  Antisense strand to SEQ ID NO: 1093818
gauuucgagggcgaaaugu

SEQ ID NO: 1093820 - RNA, 19 nt, Artificial Sequence
  Description of Artificial Sequence: Synthetic oligonucleotide
  Sense strand starting at position 1199 of SEQ ID NO: 915623
ucgaaaucaucagacaaag

SEQ ID NO: 1093821 - RNA, 19 nt, Artificial Sequence
  Description of Artificial Sequence: Synthetic oligonucleotide
  Antisense strand to SEQ ID NO: 1093820
cuuugucugaugauuucga

SEQ ID NO: 1093822 - RNA, 19 nt, Artificial Sequence
  Description of Artificial Sequence: Synthetic oligonucleotide
  Sense strand starting at position 1258 of SEQ ID NO: 915623
ggguuaagugaucacacug

SEQ ID NO: 1093823 - RNA, 19 nt, Artificial Sequence
  Description of Artificial Sequence: Synthetic oligonucleotide
  Antisense strand to SEQ ID NO: 1093822
cagugugaucacuuaaccc

SEQ ID NO: 1093824 - RNA, 19 nt, Artificial Sequence
  Description of Artificial Sequence: Synthetic oligonucleotide
  Sense strand starting at position 1263 of SEQ ID NO: 915623
aagugaucacacugacgca

SEQ ID NO: 1093825 - RNA, 19 nt, Artificial Sequence
  Description of Artificial Sequence: Synthetic oligonucleotide
  Antisense strand to SEQ ID NO: 1093824
ugcgucagugugaucacuu

SEQ ID NO: 1093826 - RNA, 19 nt, Artificial Sequence
  Description of Artificial Sequence: Synthetic oligonucleotide
  Sense strand starting at position 2179 of SEQ ID NO: 915623
agguggucggaagguaaua

SEQ ID NO: 1093827 - RNA, 19 nt, Artificial Sequence
  Description of Artificial Sequence: Synthetic oligonucleotide
  Antisense strand to SEQ ID NO: 1093826
uauuaccuuccgaccaccu

SEQ ID NO: 1093828 - RNA, 19 nt, Artificial Sequence
  Description of Artificial Sequence: Synthetic oligonucleotide
  Sense strand starting at position 2399 of SEQ ID NO: 915623
uuaaacauuuagggagagu

SEQ ID NO: 1093829 - RNA, 19 nt, Artificial Sequence
  Description of Artificial Sequence: Synthetic oligonucleotide
  Antisense strand to SEQ ID NO: 1093828
acucucccuaaauguuuaa

SEQ ID NO: 1093830 - RNA, 19 nt, Artificial Sequence
  Description of Artificial Sequence: Synthetic oligonucleotide
  Sense strand starting at position 2416 of SEQ ID NO: 915623
gucacaacaguuugacaaa

SEQ ID NO: 1093831 - RNA, 19 nt, Artificial Sequence
  Description of Artificial Sequence: Synthetic oligonucleotide
  Antisense strand to SEQ ID NO: 1093830
uuugucaaacuguugugac

SEQ ID NO: 1093832 - RNA, 19 nt, Artificial Sequence
  Description of Artificial Sequence: Synthetic oligonucleotide
  Sense strand starting at position 2435 of SEQ ID NO: 915623
uacggugcucucugagaga

SEQ ID NO: 1093833 - RNA, 19 nt, Artificial Sequence
  Description of Artificial Sequence: Synthetic oligonucleotide
  Antisense strand to SEQ ID NO: 1093832
ucucucagagagcaccgua

SEQ ID NO: 1093834 - RNA, 19 nt, Artificial Sequence
  Description of Artificial Sequence: Synthetic oligonucleotide
  Sense strand starting at position 2476 of SEQ ID NO: 915623
uugucuucuccaugaucac

SEQ ID NO: 1093835 - RNA, 19 nt, Artificial Sequence
  Description of Artificial Sequence: Synthetic oligonucleotide
  Antisense strand to SEQ ID NO: 1093834
gugaucauggagaagacaa

SEQ ID NO: 1093836 - RNA, 19 nt, Artificial Sequence
  Description of Artificial Sequence: Synthetic oligonucleotide
  Sense strand starting at position 2497 of SEQ ID NO: 915623
ccacaaguugugugggagu

SEQ ID NO: 1093837 - RNA, 19 nt, Artificial Sequence
  Description of Artificial Sequence: Synthetic oligonucleotide
  Antisense strand to SEQ ID NO: 1093836
acucccacacaacuugugg

SEQ ID NO: 1093838 - RNA, 19 nt, Artificial Sequence
  Description of Artificial Sequence: Synthetic oligonucleotide
  Sense strand starting at position 2499 of SEQ ID NO: 915623
acaaguugugugggaguga

SEQ ID NO: 1093839 - RNA, 19 nt, Artificial Sequence
  Description of Artificial Sequence: Synthetic oligonucleotide
  Antisense strand to SEQ ID NO: 1093838
ucacucccacacaacuugu

SEQ ID NO: 1093840 - RNA, 19 nt, Artificial Sequence
  Description of Artificial Sequence: Synthetic oligonucleotide
  Sense strand starting at position 2534 of SEQ ID NO: 915623
gccacugauugguugcgau

SEQ ID NO: 1093841 - RNA, 19 nt, Artificial Sequence
  Description of Artificial Sequence: Synthetic oligonucleotide
  Antisense strand to SEQ ID NO: 1093840
aucgcaaccaaucaguggc

SEQ ID NO: 1093842 - RNA, 19 nt, Artificial Sequence
  Description of Artificial Sequence: Synthetic oligonucleotide
  Sense strand starting at position 2665 of SEQ ID NO: 915623
gcuccaguuggcugagagu

SEQ ID NO: 1093843 - RNA, 19 nt, Artificial Sequence
  Description of Artificial Sequence: Synthetic oligonucleotide
  Antisense strand to SEQ ID NO: 1093842
acucucagccaacuggagc

SEQ ID NO: 1093844 - RNA, 19 nt, Artificial Sequence
  Description of Artificial Sequence: Synthetic oligonucleotide
  Sense strand starting at position 2695 of SEQ ID NO: 915623
aguccuugggcgagugauc

SEQ ID NO: 1093845 - RNA, 19 nt, Artificial Sequence
  Description of Artificial Sequence: Synthetic oligonucleotide
  Antisense strand to SEQ ID NO: 1093844
gaucacucgcccaaggacu

SEQ ID NO: 1093846 - RNA, 19 nt, Artificial Sequence
  Description of Artificial Sequence: Synthetic oligonucleotide
  Sense strand starting at position 2771 of SEQ ID NO: 915623
acccgagacugggagauua

SEQ ID NO: 1093847 - RNA, 19 nt, Artificial Sequence
  Description of Artificial Sequence: Synthetic oligonucleotide
  Antisense strand to SEQ ID NO: 1093846
uaaucucccagucucgggu

SEQ ID NO: 1093848 - RNA, 19 nt, Artificial Sequence
  Description of Artificial Sequence: Synthetic oligonucleotide
  Sense strand starting at position 2782 of SEQ ID NO: 915623
ggagauuaauuccugcuaa

SEQ ID NO: 1093849 - RNA, 19 nt, Artificial Sequence
  Description of Artificial Sequence: Synthetic oligonucleotide
  Antisense strand to SEQ ID NO: 1093848
uuagcaggaauuaaucucc

SEQ ID NO: 1093850 - RNA, 19 nt, Artificial Sequence
  Description of Artificial Sequence: Synthetic oligonucleotide
  Sense strand starting at position 2814 of SEQ ID NO: 915623
guguucuguuuguucaaag

SEQ ID NO: 1093851 - RNA, 19 nt, Artificial Sequence
  Description of Artificial Sequence: Synthetic oligonucleotide
  Antisense strand to SEQ ID NO: 1093850
cuuugaacaaacagaacac

SEQ ID NO: 1093852 - RNA, 19 nt, Artificial Sequence
  Description of Artificial Sequence: Synthetic oligonucleotide
  Sense strand starting at position 2862 of SEQ ID NO: 915623
gcaucucagugucugauuu

SEQ ID NO: 1093853 - RNA, 19 nt, Artificial Sequence
  Description of Artificial Sequence: Synthetic oligonucleotide
  Antisense strand to SEQ ID NO: 1093852
aaaucagacacugagaugc

SEQ ID NO: 1093854 - RNA, 19 nt, Artificial Sequence
  Description of Artificial Sequence: Synthetic oligonucleotide
  Sense strand starting at position 2900 of SEQ ID NO: 915623
agcucugagccauaagcaa

SEQ ID NO: 1093855 - RNA, 19 nt, Artificial Sequence
  Description of Artificial Sequence: Synthetic oligonucleotide
  Antisense strand to SEQ ID NO: 1093854
uugcuuauggcucagagcu

SEQ ID NO: 1093856 - RNA, 19 nt, Artificial Sequence
  Description of Artificial Sequence: Synthetic oligonucleotide
  Sense strand starting at position 3030 of SEQ ID NO: 915623
uuuccuccgucaucucauu

SEQ ID NO: 1093857 - RNA, 19 nt, Artificial Sequence
  Description of Artificial Sequence: Synthetic oligonucleotide
  Antisense strand to SEQ ID NO: 1093856
aaugagaugacggaggaaa

SEQ ID NO: 1093858 - RNA, 19 nt, Artificial Sequence
  Description of Artificial Sequence: Synthetic oligonucleotide
  Sense strand starting at position 3170 of SEQ ID NO: 915623
cucuaaaucucugugcugu

SEQ ID NO: 1093859 - RNA, 19 nt, Artificial Sequence
  Description of Artificial Sequence: Synthetic oligonucleotide
  Antisense strand to SEQ ID NO: 1093858
acagcacagagauuuagag

SEQ ID NO: 1093860 - RNA, 19 nt, Artificial Sequence
  Description of Artificial Sequence: Synthetic oligonucleotide
  Sense strand starting at position 3260 of SEQ ID NO: 915623
cccguaaggccacguauaa

SEQ ID NO: 1093861 - RNA, 19 nt, Artificial Sequence
  Description of Artificial Sequence: Synthetic oligonucleotide
  Antisense strand to SEQ ID NO: 1093860
uuauacguggccuuacggg

SEQ ID NO: 1093862 - RNA, 19 nt, Artificial Sequence
  Description of Artificial Sequence: Synthetic oligonucleotide
  Sense strand starting at position 3427 of SEQ ID NO: 915623
ccacaagguguugggauua

SEQ ID NO: 1093863 - RNA, 19 nt, Artificial Sequence
  Description of Artificial Sequence: Synthetic oligonucleotide
  Antisense strand to SEQ ID NO: 1093862
uaaucccaacaccuugugg

SEQ ID NO: 1093864 - RNA, 19 nt, Artificial Sequence
  Description of Artificial Sequence: Synthetic oligonucleotide
  Sense strand starting at position 3472 of SEQ ID NO: 915623
aucuguaacuuucuaguga

SEQ ID NO: 1093865 - RNA, 19 nt, Artificial Sequence
  Description of Artificial Sequence: Synthetic oligonucleotide
  Antisense strand to SEQ ID NO: 1093864
ucacuagaaaguuacagau

SEQ ID NO: 1093866 - RNA, 19 nt, Artificial Sequence
  Description of Artificial Sequence: Synthetic oligonucleotide
  Sense strand starting at position 3610 of SEQ ID NO: 915623
gcauguguccucuucucuu

SEQ ID NO: 1093867 - RNA, 19 nt, Artificial Sequence
  Description of Artificial Sequence: Synthetic oligonucleotide
  Antisense strand to SEQ ID NO: 1093866
aagagaagaggacacaugc

SEQ ID NO: 1093868 - RNA, 19 nt, Artificial Sequence
  Description of Artificial Sequence: Synthetic oligonucleotide
  Sense strand starting at position 3689 of SEQ ID NO: 915623
gacccaggugcugaugauu

SEQ ID NO: 1093869 - RNA, 19 nt, Artificial Sequence
  Description of Artificial Sequence: Synthetic oligonucleotide
  Antisense strand to SEQ ID NO: 1093868
aaucaucagcaccuggguc

SEQ ID NO: 1093870 - RNA, 19 nt, Artificial Sequence
  Description of Artificial Sequence: Synthetic oligonucleotide
  Sense strand starting at position 3698 of SEQ ID NO: 915623
gcugaugauuuccuugugu

SEQ ID NO: 1093871 - RNA, 19 nt, Artificial Sequence
  Description of Artificial Sequence: Synthetic oligonucleotide
  Antisense strand to SEQ ID NO: 1093870
acacaaggaaaucaucagc

SEQ ID NO: 1093872 - RNA, 19 nt, Artificial Sequence
  Description of Artificial Sequence: Synthetic oligonucleotide
  Sense strand starting at position 3794 of SEQ ID NO: 915623
cgggcaucaugcucacuau

SEQ ID NO: 1093873 - RNA, 19 nt, Artificial Sequence
  Description of Artificial Sequence: Synthetic oligonucleotide
  Antisense strand to SEQ ID NO: 1093872
auagugagcaugaugcccg

SEQ ID NO: 1093874 - RNA, 19 nt, Artificial Sequence
  Description of Artificial Sequence: Synthetic oligonucleotide
  Sense strand starting at position 3850 of SEQ ID NO: 915623
ucaguuagucuacaaauau

SEQ ID NO: 1093875 - RNA, 19 nt, Artificial Sequence
  Description of Artificial Sequence: Synthetic oligonucleotide
  Antisense strand to SEQ ID NO: 1093874
auauuuguagacuaacuga

SEQ ID NO: 1093876 - RNA, 19 nt, Artificial Sequence
  Description of Artificial Sequence: Synthetic oligonucleotide
  Sense strand starting at position 3890 of SEQ ID NO: 915623
agggacuuaggaugucagu

SEQ ID NO: 1093877 - RNA, 19 nt, Artificial Sequence
  Description of Artificial Sequence: Synthetic oligonucleotide
  Antisense strand to SEQ ID NO: 1093876
acugacauccuaagucccu

SEQ ID NO: 1093878 - RNA, 19 nt, Artificial Sequence
  Description of Artificial Sequence: Synthetic oligonucleotide
  Sense strand starting at position 3893 of SEQ ID NO: 915623
gacuuaggaugucagugaa

SEQ ID NO: 1093879 - RNA, 19 nt, Artificial Sequence
  Description of Artificial Sequence: Synthetic oligonucleotide
  Antisense strand to SEQ ID NO: 1093878
uucacugacauccuaaguc

SEQ ID NO: 1093880 - RNA, 19 nt, Artificial Sequence
  Description of Artificial Sequence: Synthetic oligonucleotide
  Sense strand starting at position 3896 of SEQ ID NO: 915623
uuaggaugucagugaacaa

SEQ ID NO: 1093881 - RNA, 19 nt, Artificial Sequence
  Description of Artificial Sequence: Synthetic oligonucleotide
  Antisense strand to SEQ ID NO: 1093880
uuguucacugacauccuaa

SEQ ID NO: 1093882 - RNA, 19 nt, Artificial Sequence
  Description of Artificial Sequence: Synthetic oligonucleotide
  Sense strand starting at position 3933 of SEQ ID NO: 915623
uguggagcuuauccuagua

SEQ ID NO: 1093883 - RNA, 19 nt, Artificial Sequence
  Description of Artificial Sequence: Synthetic oligonucleotide
  Antisense strand to SEQ ID NO: 1093882
uacuaggauaagcuccaca

SEQ ID NO: 1093884 - RNA, 19 nt, Artificial Sequence
  Description of Artificial Sequence: Synthetic oligonucleotide
  Sense strand starting at position 157 of SEQ ID NO: 915624
guggcuucucucuacauga

SEQ ID NO: 1093885 - RNA, 19 nt, Artificial Sequence
  Description of Artificial Sequence: Synthetic oligonucleotide
  Antisense strand to SEQ ID NO: 1093884
ucauguagagagaagccac

SEQ ID NO: 1093886 - RNA, 19 nt, Artificial Sequence
  Description of Artificial Sequence: Synthetic oligonucleotide
  Sense strand starting at position 159 of SEQ ID NO: 915624
ggcuucucucuacaugaca

SEQ ID NO: 1093887 - RNA, 19 nt, Artificial Sequence
  Description of Artificial Sequence: Synthetic oligonucleotide
  Antisense strand to SEQ ID NO: 1093886
ugucauguagagagaagcc

SEQ ID NO: 1093888 - RNA, 19 nt, Artificial Sequence
  Description of Artificial Sequence: Synthetic oligonucleotide
  Sense strand starting at position 732 of SEQ ID NO: 915624
ggucaaguccuccaugguu

SEQ ID NO: 1093889 - RNA, 19 nt, Artificial Sequence
  Description of Artificial Sequence: Synthetic oligonucleotide
  Antisense strand to SEQ ID NO: 1093888
aaccauggaggacuugacc

SEQ ID NO: 1093890 - RNA, 19 nt, Artificial Sequence
  Description of Artificial Sequence: Synthetic oligonucleotide
  Sense strand starting at position 735 of SEQ ID NO: 915624
caaguccuccaugguuaga

SEQ ID NO: 1093891 - RNA, 19 nt, Artificial Sequence
  Description of Artificial Sequence: Synthetic oligonucleotide
  Antisense strand to SEQ ID NO: 1093890
ucuaaccauggaggacuug

SEQ ID NO: 1093892 - RNA, 19 nt, Artificial Sequence
  Description of Artificial Sequence: Synthetic oligonucleotide
  Sense strand starting at position 886 of SEQ ID NO: 915624
aggauaagccuccacuguu

SEQ ID NO: 1093893 - RNA, 19 nt, Artificial Sequence
  Description of Artificial Sequence: Synthetic oligonucleotide
  Antisense strand to SEQ ID NO: 1093892
aacaguggaggcuuauccu

SEQ ID NO: 1093894 - RNA, 19 nt, Artificial Sequence
  Description of Artificial Sequence: Synthetic oligonucleotide
  Sense strand starting at position 896 of SEQ ID NO: 915624
uccacuguuguggaaggua

SEQ ID NO: 1093895 - RNA, 19 nt, Artificial Sequence
  Description of Artificial Sequence: Synthetic oligonucleotide
  Antisense strand to SEQ ID NO: 1093894
uaccuuccacaacagugga

SEQ ID NO: 1093896 - RNA, 19 nt, Artificial Sequence
  Description of Artificial Sequence: Synthetic oligonucleotide
  Sense strand starting at position 899 of SEQ ID NO: 915624
acuguuguggaagguaauu

SEQ ID NO: 1093897 - RNA, 19 nt, Artificial Sequence
  Description of Artificial Sequence: Synthetic oligonucleotide
  Antisense strand to SEQ ID NO: 1093896
aauuaccuuccacaacagu

SEQ ID NO: 1093898 - RNA, 19 nt, Artificial Sequence
  Description of Artificial Sequence: Synthetic oligonucleotide
  Sense strand starting at position 904 of SEQ ID NO: 915624
uguggaagguaauuacuga

SEQ ID NO: 1093899 - RNA, 19 nt, Artificial Sequence
  Description of Artificial Sequence: Synthetic oligonucleotide
  Antisense strand to SEQ ID NO: 1093898
ucaguaauuaccuuccaca

SEQ ID NO: 1093900 - RNA, 19 nt, Artificial Sequence
  Description of Artificial Sequence: Synthetic oligonucleotide
  Sense strand starting at position 1000 of SEQ ID NO: 915624
agggcaucauuggcaauau

SEQ ID NO: 1093901 - RNA, 19 nt, Artificial Sequence
  Description of Artificial Sequence: Synthetic oligonucleotide
  Antisense strand to SEQ ID NO: 1093900
auauugccaaugaugcccu

SEQ ID NO: 1093902 - RNA, 19 nt, Artificial Sequence
  Description of Artificial Sequence: Synthetic oligonucleotide
  Sense strand starting at position 1198 of SEQ ID NO: 915624
gcaucugggaucugagaaa

SEQ ID NO: 1093903 - RNA, 19 nt, Artificial Sequence
  Description of Artificial Sequence: Synthetic oligonucleotide
  Antisense strand to SEQ ID NO: 1093902
uuucucagaucccagaugc

SEQ ID NO: 1093904 - RNA, 19 nt, Artificial Sequence
  Description of Artificial Sequence: Synthetic oligonucleotide
  Sense strand starting at position 1260 of SEQ ID NO: 915624
aauggauaggccugauuau

SEQ ID NO: 1093905 - RNA, 19 nt, Artificial Sequence
  Description of Artificial Sequence: Synthetic oligonucleotide
  Antisense strand to SEQ ID NO: 1093904
auaaucaggccuauccauu

SEQ ID NO: 1093906 - RNA, 19 nt, Artificial Sequence
  Description of Artificial Sequence: Synthetic oligonucleotide
  Sense strand starting at position 1288 of SEQ ID NO: 915624
cacaguuugggugagcaga

SEQ ID NO: 1093907 - RNA, 19 nt, Artificial Sequence
  Description of Artificial Sequence: Synthetic oligonucleotide
  Antisense strand to SEQ ID NO: 1093906
ucugcucacccaaacugug

SEQ ID NO: 1093908 - RNA, 19 nt, Artificial Sequence
  Description of Artificial Sequence: Synthetic oligonucleotide
  Sense strand starting at position 1360 of SEQ ID NO: 915624
cacgauguggcugaaaguu

SEQ ID NO: 1093909 - RNA, 19 nt, Artificial Sequence
  Description of Artificial Sequence: Synthetic oligonucleotide
  Antisense strand to SEQ ID NO: 1093908
aacuuucagccacaucgug

SEQ ID NO: 1093910 - RNA, 19 nt, Artificial Sequence
  Description of Artificial Sequence: Synthetic oligonucleotide
  Sense strand starting at position 1417 of SEQ ID NO: 915624
caccguaggcguguaaucu

SEQ ID NO: 1093911 - RNA, 19 nt, Artificial Sequence
  Description of Artificial Sequence: Synthetic oligonucleotide
  Antisense strand to SEQ ID NO: 1093910
agauuacacgccuacggug

SEQ ID NO: 1093912 - RNA, 19 nt, Artificial Sequence
  Description of Artificial Sequence: Synthetic oligonucleotide
  Sense strand starting at position 1425 of SEQ ID NO: 915624
gcguguaaucuuccagcug

SEQ ID NO: 1093913 - RNA, 19 nt, Artificial Sequence
  Description of Artificial Sequence: Synthetic oligonucleotide
  Antisense strand to SEQ ID NO: 1093912
cagcuggaagauuacacgc

SEQ ID NO: 1093914 - RNA, 19 nt, Artificial Sequence
  Description of Artificial Sequence: Synthetic oligonucleotide
  Sense strand starting at position 2462 of SEQ ID NO: 915624
ggaggaguuucagccugag

SEQ ID NO: 1093915 - RNA, 19 nt, Artificial Sequence
  Description of Artificial Sequence: Synthetic oligonucleotide
  Antisense strand to SEQ ID NO: 1093914
cucaggcugaaacuccucc

SEQ ID NO: 1093916 - RNA, 19 nt, Artificial Sequence
  Description of Artificial Sequence: Synthetic oligonucleotide
  Sense strand starting at position 2526 of SEQ ID NO: 915624
uucgguguagcagacauuu

SEQ ID NO: 1093917 - RNA, 19 nt, Artificial Sequence
  Description of Artificial Sequence: Synthetic oligonucleotide
  Antisense strand to SEQ ID NO: 1093916
aaaugucugcuacaccgaa

SEQ ID NO: 1093918 - RNA, 19 nt, Artificial Sequence
  Description of Artificial Sequence: Synthetic oligonucleotide
  Sense strand starting at position 2599 of SEQ ID NO: 915624
acacgauucuaguccucua

SEQ ID NO: 1093919 - RNA, 19 nt, Artificial Sequence
  Description of Artificial Sequence: Synthetic oligonucleotide
  Antisense strand to SEQ ID NO: 1093918
uagaggacuagaaucgugu

SEQ ID NO: 1093920 - RNA, 19 nt, Artificial Sequence
  Description of Artificial Sequence: Synthetic oligonucleotide
  Sense strand starting at position 2722 of SEQ ID NO: 915624
gaggaagggcguuaacauc

SEQ ID NO: 1093921 - RNA, 19 nt, Artificial Sequence
  Description of Artificial Sequence: Synthetic oligonucleotide
  Antisense strand to SEQ ID NO: 1093920
gauguuaacgcccuuccuc

SEQ ID NO: 1093922 - RNA, 19 nt, Artificial Sequence
  Description of Artificial Sequence: Synthetic oligonucleotide
  Sense strand starting at position 2784 of SEQ ID NO: 915624
ccacuuuauucccugguga

SEQ ID NO: 1093923 - RNA, 19 nt, Artificial Sequence
  Description of Artificial Sequence: Synthetic oligonucleotide
  Antisense strand to SEQ ID NO: 1093922
ucaccagggaauaaagugg

SEQ ID NO: 1093924 - RNA, 19 nt, Artificial Sequence
  Description of Artificial Sequence: Synthetic oligonucleotide
  Sense strand starting at position 2786 of SEQ ID NO: 915624
acuuuauucccuggugauu

SEQ ID NO: 1093925 - RNA, 19 nt, Artificial Sequence
  Description of Artificial Sequence: Synthetic oligonucleotide
  Antisense strand to SEQ ID NO: 1093924
aaucaccagggaauaaagu

SEQ ID NO: 1093926 - RNA, 19 nt, Artificial Sequence
  Description of Artificial Sequence: Synthetic oligonucleotide
  Sense strand starting at position 2791 of SEQ ID NO: 915624
auucccuggugauuaugaa

SEQ ID NO: 1093927 - RNA, 19 nt, Artificial Sequence
  Description of Artificial Sequence: Synthetic oligonucleotide
  Antisense strand to SEQ ID NO: 1093926
uucauaaucaccagggaau

SEQ ID NO: 1093928 - RNA, 19 nt, Artificial Sequence
  Description of Artificial Sequence: Synthetic oligonucleotide
  Sense strand starting at position 2884 of SEQ ID NO: 915624
ucuccuaguccauaucaga

SEQ ID NO: 1093929 - RNA, 19 nt, Artificial Sequence
  Description of Artificial Sequence: Synthetic oligonucleotide
  Antisense strand to SEQ ID NO: 1093928
ucugauauggacuaggaga

SEQ ID NO: 1093930 - RNA, 19 nt, Artificial Sequence
  Description of Artificial Sequence: Synthetic oligonucleotide
  Sense strand starting at position 3012 of SEQ ID NO: 915624
ugagucuugcaagaauucu

SEQ ID NO: 1093931 - RNA, 19 nt, Artificial Sequence
  Description of Artificial Sequence: Synthetic oligonucleotide
  Antisense strand to SEQ ID NO: 1093930
agaauucuugcaagacuca

SEQ ID NO: 1093932 - RNA, 19 nt, Artificial Sequence
  Description of Artificial Sequence: Synthetic oligonucleotide
  Sense strand starting at position 3030 of SEQ ID NO: 915624
uggaaauuaaccuggcagu

SEQ ID NO: 1093933 - RNA, 19 nt, Artificial Sequence
  Description of Artificial Sequence: Synthetic oligonucleotide
  Antisense strand to SEQ ID NO: 1093932
acugccagguuaauuucca

SEQ ID NO: 1093934 - RNA, 19 nt, Artificial Sequence
  Description of Artificial Sequence: Synthetic oligonucleotide
  Sense strand starting at position 3031 of SEQ ID NO: 915624
ggaaauuaaccuggcaguu

SEQ ID NO: 1093935 - RNA, 19 nt, Artificial Sequence
  Description of Artificial Sequence: Synthetic oligonucleotide
  Antisense strand to SEQ ID NO: 1093934
aacugccagguuaauuucc

SEQ ID NO: 1093936 - RNA, 19 nt, Artificial Sequence
  Description of Artificial Sequence: Synthetic oligonucleotide
  Sense strand starting at position 3158 of SEQ ID NO: 915624
gaagguuugugagcuauga

SEQ ID NO: 1093937 - RNA, 19 nt, Artificial Sequence
  Description of Artificial Sequence: Synthetic oligonucleotide
  Antisense strand to SEQ ID NO: 1093936
ucauagcucacaaaccuuc

SEQ ID NO: 1093938 - RNA, 19 nt, Artificial Sequence
  Description of Artificial Sequence: Synthetic oligonucleotide
  Sense strand starting at position 3160 of SEQ ID NO: 915624
agguuugugagcuaugauu

SEQ ID NO: 1093939 - RNA, 19 nt, Artificial Sequence
  Description of Artificial Sequence: Synthetic oligonucleotide
  Antisense strand to SEQ ID NO: 1093938
aaucauagcucacaaaccu

SEQ ID NO: 1093940 - RNA, 19 nt, Artificial Sequence
  Description of Artificial Sequence: Synthetic oligonucleotide
  Sense strand starting at position 3209 of SEQ ID NO: 915624
ccaguaauccuugaagggu

SEQ ID NO: 1093941 - RNA, 19 nt, Artificial Sequence
  Description of Artificial Sequence: Synthetic oligonucleotide
  Antisense strand to SEQ ID NO: 1093940
acccuucaaggauuacugg

SEQ ID NO: 1093942 - RNA, 19 nt, Artificial Sequence
  Description of Artificial Sequence: Synthetic oligonucleotide
  Sense strand starting at position 3442 of SEQ ID NO: 915624
ggacuuguugauugaggac

SEQ ID NO: 1093943 - RNA, 19 nt, Artificial Sequence
  Description of Artificial Sequence: Synthetic oligonucleotide
  Antisense strand to SEQ ID NO: 1093942
guccucaaucaacaagucc

SEQ ID NO: 1093944 - RNA, 19 nt, Artificial Sequence
  Description of Artificial Sequence: Synthetic oligonucleotide
  Sense strand starting at position 3457 of SEQ ID NO: 915624
ggacuuguugauugaaggu

SEQ ID NO: 1093945 - RNA, 19 nt, Artificial Sequence
  Description of Artificial Sequence: Synthetic oligonucleotide
  Antisense strand to SEQ ID NO: 1093944
accuucaaucaacaagucc

SEQ ID NO: 1093946 - RNA, 19 nt, Artificial Sequence
  Description of Artificial Sequence: Synthetic oligonucleotide
  Sense strand starting at position 3577 of SEQ ID NO: 915624
cgaugaaauguugaguauc

SEQ ID NO: 1093947 - RNA, 19 nt, Artificial Sequence
  Description of Artificial Sequence: Synthetic oligonucleotide
  Antisense strand to SEQ ID NO: 1093946
gauacucaacauuucaucg

SEQ ID NO: 1093948 - RNA, 19 nt, Artificial Sequence
  Description of Artificial Sequence: Synthetic oligonucleotide
  Sense strand starting at position 3630 of SEQ ID NO: 915624
gauagaaagucuuauuuag

SEQ ID NO: 1093949 - RNA, 19 nt, Artificial Sequence
  Description of Artificial Sequence: Synthetic oligonucleotide
  Antisense strand to SEQ ID NO: 1093948
cuaaauaagacuuucuauc

SEQ ID NO: 1093950 - RNA, 19 nt, Artificial Sequence
  Description of Artificial Sequence: Synthetic oligonucleotide
  Sense strand starting at position 3649 of SEQ ID NO: 915624
ugagaugguaaugguugua

SEQ ID NO: 1093951 - RNA, 19 nt, Artificial Sequence
  Description of Artificial Sequence: Synthetic oligonucleotide
  Antisense strand to SEQ ID NO: 1093950
uacaaccauuaccaucuca

SEQ ID NO: 1093952 - RNA, 19 nt, Artificial Sequence
  Description of Artificial Sequence: Synthetic oligonucleotide
  Sense strand starting at position 3652 of SEQ ID NO: 915624
gaugguaaugguuguagau

SEQ ID NO: 1093953 - RNA, 19 nt, Artificial Sequence
  Description of Artificial Sequence: Synthetic oligonucleotide
  Antisense strand to SEQ ID NO: 1093952
aucuacaaccauuaccauc

SEQ ID NO: 1093954 - RNA, 19 nt, Artificial Sequence
  Description of Artificial Sequence: Synthetic oligonucleotide
  Sense strand starting at position 3669 of SEQ ID NO: 915624
augucagugauuuguucca

SEQ ID NO: 1093955 - RNA, 19 nt, Artificial Sequence
  Description of Artificial Sequence: Synthetic oligonucleotide
  Antisense strand to SEQ ID NO: 1093954
uggaacaaaucacugacau

SEQ ID NO: 1093956 - RNA, 19 nt, Artificial Sequence
  Description of Artificial Sequence: Synthetic oligonucleotide
  Sense strand starting at position 3741 of SEQ ID NO: 915624
gucagcauuccaugaagaa

SEQ ID NO: 1093957 - RNA, 19 nt, Artificial Sequence
  Description of Artificial Sequence: Synthetic oligonucleotide
  Antisense strand to SEQ ID NO: 1093956
uucuucauggaaugcugac

SEQ ID NO: 1093958 - RNA, 19 nt, Artificial Sequence
  Description of Artificial Sequence: Synthetic oligonucleotide
  Sense strand starting at position 3799 of SEQ ID NO: 915624
aaguuaagaccuggaagcu

SEQ ID NO: 1093959 - RNA, 19 nt, Artificial Sequence
  Description of Artificial Sequence: Synthetic oligonucleotide
  Antisense strand to SEQ ID NO: 1093958
agcuuccaggucuuaacuu

SEQ ID NO: 1093960 - RNA, 19 nt, Artificial Sequence
  Description of Artificial Sequence: Synthetic oligonucleotide
  Sense strand starting at position 3917 of SEQ ID NO: 915624
aagaguaaacggugacagu

SEQ ID NO: 1093961 - RNA, 19 nt, Artificial Sequence
  Description of Artificial Sequence: Synthetic oligonucleotide
  Antisense strand to SEQ ID NO: 1093960
acugucaccguuuacucuu

SEQ ID NO: 1093962 - RNA, 19 nt, Artificial Sequence
  Description of Artificial Sequence: Synthetic oligonucleotide
  Sense strand starting at position 3918 of SEQ ID NO: 915624
agaguaaacggugacagua

SEQ ID NO: 1093963 - RNA, 19 nt, Artificial Sequence
  Description of Artificial Sequence: Synthetic oligonucleotide
  Antisense strand to SEQ ID NO: 1093962
uacugucaccguuuacucu

SEQ ID NO: 1093964 - RNA, 19 nt, Artificial Sequence
  Description of Artificial Sequence: Synthetic oligonucleotide
  Sense strand starting at position 291 of SEQ ID NO: 915625
gcaacugaacuuugucaua

SEQ ID NO: 1093965 - RNA, 19 nt, Artificial Sequence
  Description of Artificial Sequence: Synthetic oligonucleotide
  Antisense strand to SEQ ID NO: 1093964
uaugacaaaguucaguugc

SEQ ID NO: 1093966 - RNA, 19 nt, Artificial Sequence
  Description of Artificial Sequence: Synthetic oligonucleotide
  Sense strand starting at position 318 of SEQ ID NO: 915625
uugccauuauugguggaaa

SEQ ID NO: 1093967 - RNA, 19 nt, Artificial Sequence
  Description of Artificial Sequence: Synthetic oligonucleotide
  Antisense strand to SEQ ID NO: 1093966
uuuccaccaauaauggcaa

SEQ ID NO: 1093968 - RNA, 19 nt, Artificial Sequence
  Description of Artificial Sequence: Synthetic oligonucleotide
  Sense strand starting at position 320 of SEQ ID NO: 915625
gccauuauugguggaaacu

SEQ ID NO: 1093969 - RNA, 19 nt, Artificial Sequence
  Description of Artificial Sequence: Synthetic oligonucleotide
  Antisense strand to SEQ ID NO: 1093968
aguuuccaccaauaauggc

SEQ ID NO: 1093970 - RNA, 19 nt, Artificial Sequence
  Description of Artificial Sequence: Synthetic oligonucleotide
  Sense strand starting at position 449 of SEQ ID NO: 915625
aaagauuccuucuugugag

SEQ ID NO: 1093971 - RNA, 19 nt, Artificial Sequence
  Description of Artificial Sequence: Synthetic oligonucleotide
  Antisense strand to SEQ ID NO: 1093970
cucacaagaaggaaucuuu

SEQ ID NO: 1093972 - RNA, 19 nt, Artificial Sequence
  Description of Artificial Sequence: Synthetic oligonucleotide
  Sense strand starting at position 615 of SEQ ID NO: 915625
uacggaaauuagccagaau

SEQ ID NO: 1093973 - RNA, 19 nt, Artificial Sequence
  Description of Artificial Sequence: Synthetic oligonucleotide
  Antisense strand to SEQ ID NO: 1093972
auucuggcuaauuuccgua

SEQ ID NO: 1093974 - RNA, 19 nt, Artificial Sequence
  Description of Artificial Sequence: Synthetic oligonucleotide
  Sense strand starting at position 690 of SEQ ID NO: 915625
gguggagcuuguauguagu

SEQ ID NO: 1093975 - RNA, 19 nt, Artificial Sequence
  Description of Artificial Sequence: Synthetic oligonucleotide
  Antisense strand to SEQ ID NO: 1093974
acuacauacaagcuccacc

SEQ ID NO: 1093976 - RNA, 19 nt, Artificial Sequence
  Description of Artificial Sequence: Synthetic oligonucleotide
  Sense strand starting at position 971 of SEQ ID NO: 915625
uuguacaugccuuagucaa

SEQ ID NO: 1093977 - RNA, 19 nt, Artificial Sequence
  Description of Artificial Sequence: Synthetic oligonucleotide
  Antisense strand to SEQ ID NO: 1093976
uugacuaaggcauguacaa

SEQ ID NO: 1093978 - RNA, 19 nt, Artificial Sequence
  Description of Artificial Sequence: Synthetic oligonucleotide
  Sense strand starting at position 1022 of SEQ ID NO: 915625
ugacaugagucauuacaua

SEQ ID NO: 1093979 - RNA, 19 nt, Artificial Sequence
  Description of Artificial Sequence: Synthetic oligonucleotide
  Antisense strand to SEQ ID NO: 1093978
uauguaaugacucauguca

SEQ ID NO: 1093980 - RNA, 19 nt, Artificial Sequence
  Description of Artificial Sequence: Synthetic oligonucleotide
  Sense strand starting at position 1184 of SEQ ID NO: 915625
uuaaauaucgaaugcucaa

SEQ ID NO: 1093981 - RNA, 19 nt, Artificial Sequence
  Description of Artificial Sequence: Synthetic oligonucleotide
  Antisense strand to SEQ ID NO: 1093980
uugagcauucgauauuuaa

SEQ ID NO: 1093982 - RNA, 19 nt, Artificial Sequence
  Description of Artificial Sequence: Synthetic oligonucleotide
  Sense strand starting at position 1239 of SEQ ID NO: 915625
acgguauaccuguaguuaa

SEQ ID NO: 1093983 - RNA, 19 nt, Artificial Sequence
  Description of Artificial Sequence: Synthetic oligonucleotide
  Antisense strand to SEQ ID NO: 1093982
uuaacuacagguauaccgu

SEQ ID NO: 1093984 - RNA, 19 nt, Artificial Sequence
  Description of Artificial Sequence: Synthetic oligonucleotide
  Sense strand starting at position 1242 of SEQ ID NO: 915625
guauaccuguaguuaauuu

SEQ ID NO: 1093985 - RNA, 19 nt, Artificial Sequence
  Description of Artificial Sequence: Synthetic oligonucleotide
  Antisense strand to SEQ ID NO: 1093984
aaauuaacuacagguauac

SEQ ID NO: 1093986 - RNA, 19 nt, Artificial Sequence
  Description of Artificial Sequence: Synthetic oligonucleotide
  Sense strand starting at position 1309 of SEQ ID NO: 915625
uuucgaaguguuuagaaga

SEQ ID NO: 1093987 - RNA, 19 nt, Artificial Sequence
  Description of Artificial Sequence: Synthetic oligonucleotide
  Antisense strand to SEQ ID NO: 1093986
ucuucuaaacacuucgaaa

SEQ ID NO: 1093988 - RNA, 19 nt, Artificial Sequence
  Description of Artificial Sequence: Synthetic oligonucleotide
  Sense strand starting at position 1472 of SEQ ID NO: 915625
gcgaguaauggguaccuca

SEQ ID NO: 1093989 - RNA, 19 nt, Artificial Sequence
  Description of Artificial Sequence: Synthetic oligonucleotide
  Antisense strand to SEQ ID NO: 1093988
ugagguacccauuacucgc

SEQ ID NO: 1093990 - RNA, 19 nt, Artificial Sequence
  Description of Artificial Sequence: Synthetic oligonucleotide
  Sense strand starting at position 1487 of SEQ ID NO: 915625
cucacauacgaagguuaaa

SEQ ID NO: 1093991 - RNA, 19 nt, Artificial Sequence
  Description of Artificial Sequence: Synthetic oligonucleotide
  Antisense strand to SEQ ID NO: 1093990
uuuaaccuucguaugugag

SEQ ID NO: 1093992 - RNA, 19 nt, Artificial Sequence
  Description of Artificial Sequence: Synthetic oligonucleotide
  Sense strand starting at position 1517 of SEQ ID NO: 915625
acguaauaagguuaaacuu

SEQ ID NO: 1093993 - RNA, 19 nt, Artificial Sequence
  Description of Artificial Sequence: Synthetic oligonucleotide
  Antisense strand to SEQ ID NO: 1093992
aaguuuaaccuuauuacgu

SEQ ID NO: 1093994 - RNA, 19 nt, Artificial Sequence
  Description of Artificial Sequence: Synthetic oligonucleotide
  Sense strand starting at position 1602 of SEQ ID NO: 915625
uugugugggacucauacca

SEQ ID NO: 1093995 - RNA, 19 nt, Artificial Sequence
  Description of Artificial Sequence: Synthetic oligonucleotide
  Antisense strand to SEQ ID NO: 1093994
ugguaugagucccacacaa

SEQ ID NO: 1093996 - RNA, 19 nt, Artificial Sequence
  Description of Artificial Sequence: Synthetic oligonucleotide
  Sense strand starting at position 1813 of SEQ ID NO: 915625
gcgcacuugcugcuuguaa

SEQ ID NO: 1093997 - RNA, 19 nt, Artificial Sequence
  Description of Artificial Sequence: Synthetic oligonucleotide
  Antisense strand to SEQ ID NO: 1093996
uuacaagcagcaagugcgc

SEQ ID NO: 1093998 - RNA, 19 nt, Artificial Sequence
  Description of Artificial Sequence: Synthetic oligonucleotide
  Sense strand starting at position 1961 of SEQ ID NO: 915625
uggcuauuuccguggccca

SEQ ID NO: 1093999 - RNA, 19 nt, Artificial Sequence
  Description of Artificial Sequence: Synthetic oligonucleotide
  Antisense strand to SEQ ID NO: 1093998
ugggccacggaaauagcca

SEQ ID NO: 1094000 - RNA, 19 nt, Artificial Sequence
  Description of Artificial Sequence: Synthetic oligonucleotide
  Sense strand starting at position 1962 of SEQ ID NO: 915625
ggcuauuuccguggcccaa

SEQ ID NO: 1094001 - RNA, 19 nt, Artificial Sequence
  Description of Artificial Sequence: Synthetic oligonucleotide
  Antisense strand to SEQ ID NO: 1094000
uugggccacggaaauagcc

SEQ ID NO: 1094002 - RNA, 19 nt, Artificial Sequence
  Description of Artificial Sequence: Synthetic oligonucleotide
  Sense strand starting at position 1993 of SEQ ID NO: 915625
ccgaaaucucgcgauacaa

SEQ ID NO: 1094003 - RNA, 19 nt, Artificial Sequence
  Description of Artificial Sequence: Synthetic oligonucleotide
  Antisense strand to SEQ ID NO: 1094002
uuguaucgcgagauuucgg

SEQ ID NO: 1094004 - RNA, 19 nt, Artificial Sequence
  Description of Artificial Sequence: Synthetic oligonucleotide
  Sense strand starting at position 1995 of SEQ ID NO: 915625
gaaaucucgcgauacaacu

SEQ ID NO: 1094005 - RNA, 19 nt, Artificial Sequence
  Description of Artificial Sequence: Synthetic oligonucleotide
  Antisense strand to SEQ ID NO: 1094004
aguuguaucgcgagauuuc

SEQ ID NO: 1094006 - RNA, 19 nt, Artificial Sequence
  Description of Artificial Sequence: Synthetic oligonucleotide
  Sense strand starting at position 2185 of SEQ ID NO: 915625
cguuuaggugaguggaaua

SEQ ID NO: 1094007 - RNA, 19 nt, Artificial Sequence
  Description of Artificial Sequence: Synthetic oligonucleotide
  Antisense strand to SEQ ID NO: 1094006
uauuccacucaccuaaacg

SEQ ID NO: 1094008 - RNA, 19 nt, Artificial Sequence
  Description of Artificial Sequence: Synthetic oligonucleotide
  Sense strand starting at position 2242 of SEQ ID NO: 915625
cggucacuugugaguggau

SEQ ID NO: 1094009 - RNA, 19 nt, Artificial Sequence
  Description of Artificial Sequence: Synthetic oligonucleotide
  Antisense strand to SEQ ID NO: 1094008
auccacucacaagugaccg

SEQ ID NO: 1094010 - RNA, 19 nt, Artificial Sequence
  Description of Artificial Sequence: Synthetic oligonucleotide
  Sense strand starting at position 2244 of SEQ ID NO: 915625
gucacuugugaguggauga

SEQ ID NO: 1094011 - RNA, 19 nt, Artificial Sequence
  Description of Artificial Sequence: Synthetic oligonucleotide
  Antisense strand to SEQ ID NO: 1094010
ucauccacucacaagugac

SEQ ID NO: 1094012 - RNA, 19 nt, Artificial Sequence
  Description of Artificial Sequence: Synthetic oligonucleotide
  Sense strand starting at position 2324 of SEQ ID NO: 915625
ugucgccuggcuuucuaaa

SEQ ID NO: 1094013 - RNA, 19 nt, Artificial Sequence
  Description of Artificial Sequence: Synthetic oligonucleotide
  Antisense strand to SEQ ID NO: 1094012
uuuagaaagccaggcgaca

SEQ ID NO: 1094014 - RNA, 19 nt, Artificial Sequence
  Description of Artificial Sequence: Synthetic oligonucleotide
  Sense strand starting at position 2325 of SEQ ID NO: 915625
gucgccuggcuuucuaaau

SEQ ID NO: 1094015 - RNA, 19 nt, Artificial Sequence
  Description of Artificial Sequence: Synthetic oligonucleotide
  Antisense strand to SEQ ID NO: 1094014
auuuagaaagccaggcgac

SEQ ID NO: 1094016 - RNA, 19 nt, Artificial Sequence
  Description of Artificial Sequence: Synthetic oligonucleotide
  Sense strand starting at position 2397 of SEQ ID NO: 915625
uguaauccuuugucuauuu

SEQ ID NO: 1094017 - RNA, 19 nt, Artificial Sequence
  Description of Artificial Sequence: Synthetic oligonucleotide
  Antisense strand to SEQ ID NO: 1094016
aaauagacaaaggauuaca

SEQ ID NO: 1094018 - RNA, 19 nt, Artificial Sequence
  Description of Artificial Sequence: Synthetic oligonucleotide
  Sense strand starting at position 2603 of SEQ ID NO: 915625
aagugagaccuguggagga

SEQ ID NO: 1094019 - RNA, 19 nt, Artificial Sequence
  Description of Artificial Sequence: Synthetic oligonucleotide
  Antisense strand to SEQ ID NO: 1094018
uccuccacaggucucacuu

SEQ ID NO: 1094020 - RNA, 19 nt, Artificial Sequence
  Description of Artificial Sequence: Synthetic oligonucleotide
  Sense strand starting at position 2679 of SEQ ID NO: 915625
accgguuccugaguuaaga

SEQ ID NO: 1094021 - RNA, 19 nt, Artificial Sequence
  Description of Artificial Sequence: Synthetic oligonucleotide
  Antisense strand to SEQ ID NO: 1094020
ucuuaacucaggaaccggu

SEQ ID NO: 1094022 - RNA, 19 nt, Artificial Sequence
  Description of Artificial Sequence: Synthetic oligonucleotide
  Sense strand starting at position 2681 of SEQ ID NO: 915625
cgguuccugaguuaagauu

SEQ ID NO: 1094023 - RNA, 19 nt, Artificial Sequence
  Description of Artificial Sequence: Synthetic oligonucleotide
  Antisense strand to SEQ ID NO: 1094022
aaucuuaacucaggaaccg

SEQ ID NO: 1094024 - RNA, 19 nt, Artificial Sequence
  Description of Artificial Sequence: Synthetic oligonucleotide
  Sense strand starting at position 3307 of SEQ ID NO: 915625
gcaagccuagcuguguaau

SEQ ID NO: 1094025 - RNA, 19 nt, Artificial Sequence
  Description of Artificial Sequence: Synthetic oligonucleotide
  Antisense strand to SEQ ID NO: 1094024
auuacacagcuaggcuugc

SEQ ID NO: 1094026 - RNA, 19 nt, Artificial Sequence
  Description of Artificial Sequence: Synthetic oligonucleotide
  Sense strand starting at position 3309 of SEQ ID NO: 915625
aagccuagcuguguaauuu

SEQ ID NO: 1094027 - RNA, 19 nt, Artificial Sequence
  Description of Artificial Sequence: Synthetic oligonucleotide
  Antisense strand to SEQ ID NO: 1094026
aaauuacacagcuaggcuu

SEQ ID NO: 1094028 - RNA, 19 nt, Artificial Sequence
  Description of Artificial Sequence: Synthetic oligonucleotide
  Sense strand starting at position 3313 of SEQ ID NO: 915625
cuagcuguguaauuuguga

SEQ ID NO: 1094029 - RNA, 19 nt, Artificial Sequence
  Description of Artificial Sequence: Synthetic oligonucleotide
  Antisense strand to SEQ ID NO: 1094028
ucacaaauuacacagcuag

SEQ ID NO: 1094030 - RNA, 19 nt, Artificial Sequence
  Description of Artificial Sequence: Synthetic oligonucleotide
  Sense strand starting at position 3385 of SEQ ID NO: 915625
gugcuauuaaagggaagga

SEQ ID NO: 1094031 - RNA, 19 nt, Artificial Sequence
  Description of Artificial Sequence: Synthetic oligonucleotide
  Antisense strand to SEQ ID NO: 1094030
uccuucccuuuaauagcac

SEQ ID NO: 1094032 - RNA, 19 nt, Artificial Sequence
  Description of Artificial Sequence: Synthetic oligonucleotide
  Sense strand starting at position 3768 of SEQ ID NO: 915625
uugguauuucucuguuugu

SEQ ID NO: 1094033 - RNA, 19 nt, Artificial Sequence
  Description of Artificial Sequence: Synthetic oligonucleotide
  Antisense strand to SEQ ID NO: 1094032
acaaacagagaaauaccaa

SEQ ID NO: 1094034 - RNA, 19 nt, Artificial Sequence
  Description of Artificial Sequence: Synthetic oligonucleotide
  Sense strand starting at position 3771 of SEQ ID NO: 915625
guauuucucuguuuguguu

SEQ ID NO: 1094035 - RNA, 19 nt, Artificial Sequence
  Description of Artificial Sequence: Synthetic oligonucleotide
  Antisense strand to SEQ ID NO: 1094034
aacacaaacagagaaauac

SEQ ID NO: 1094036 - RNA, 19 nt, Artificial Sequence
  Description of Artificial Sequence: Synthetic oligonucleotide
  Sense strand starting at position 3773 of SEQ ID NO: 915625
auuucucuguuuguguuau

SEQ ID NO: 1094037 - RNA, 19 nt, Artificial Sequence
  Description of Artificial Sequence: Synthetic oligonucleotide
  Antisense strand to SEQ ID NO: 1094036
auaacacaaacagagaaau

SEQ ID NO: 1094038 - RNA, 19 nt, Artificial Sequence
  Description of Artificial Sequence: Synthetic oligonucleotide
  Sense strand starting at position 3781 of SEQ ID NO: 915625
guuuguguuauagagacag

SEQ ID NO: 1094039 - RNA, 19 nt, Artificial Sequence
  Description of Artificial Sequence: Synthetic oligonucleotide
  Antisense strand to SEQ ID NO: 1094038
cugucucuauaacacaaac

SEQ ID NO: 1094040 - RNA, 19 nt, Artificial Sequence
  Description of Artificial Sequence: Synthetic oligonucleotide
  Sense strand starting at position 3828 of SEQ ID NO: 915625
gcaguugaagcaggauauu

SEQ ID NO: 1094041 - RNA, 19 nt, Artificial Sequence
  Description of Artificial Sequence: Synthetic oligonucleotide
  Antisense strand to SEQ ID NO: 1094040
aauauccugcuucaacugc

SEQ ID NO: 1094042 - RNA, 19 nt, Artificial Sequence
  Description of Artificial Sequence: Synthetic oligonucleotide
  Sense strand starting at position 3837 of SEQ ID NO: 915625
gcaggauauuccucugacc

SEQ ID NO: 1094043 - RNA, 19 nt, Artificial Sequence
  Description of Artificial Sequence: Synthetic oligonucleotide
  Antisense strand to SEQ ID NO: 1094042
ggucagaggaauauccugc

SEQ ID NO: 1094044 - RNA, 19 nt, Artificial Sequence
  Description of Artificial Sequence: Synthetic oligonucleotide
  Sense strand starting at position 155 of SEQ ID NO: 915626
guaauuauaggccaggcau

SEQ ID NO: 1094045 - RNA, 19 nt, Artificial Sequence
  Description of Artificial Sequence: Synthetic oligonucleotide
  Antisense strand to SEQ ID NO: 1094044
augccuggccuauaauuac

SEQ ID NO: 1094046 - RNA, 19 nt, Artificial Sequence
  Description of Artificial Sequence: Synthetic oligonucleotide
  Sense strand starting at position 498 of SEQ ID NO: 915626
uggagaugaugucugaugu

SEQ ID NO: 1094047 - RNA, 19 nt, Artificial Sequence
  Description of Artificial Sequence: Synthetic oligonucleotide
  Antisense strand to SEQ ID NO: 1094046
acaucagacaucaucucca

SEQ ID NO: 1094048 - RNA, 19 nt, Artificial Sequence
  Description of Artificial Sequence: Synthetic oligonucleotide
  Sense strand starting at position 499 of SEQ ID NO: 915626
ggagaugaugucugauguc

SEQ ID NO: 1094049 - RNA, 19 nt, Artificial Sequence
  Description of Artificial Sequence: Synthetic oligonucleotide
  Antisense strand to SEQ ID NO: 1094048
gacaucagacaucaucucc

SEQ ID NO: 1094050 - RNA, 19 nt, Artificial Sequence
  Description of Artificial Sequence: Synthetic oligonucleotide
  Sense strand starting at position 550 of SEQ ID NO: 915626
uugaucucggcucacuaaa

SEQ ID NO: 1094051 - RNA, 19 nt, Artificial Sequence
  Description of Artificial Sequence: Synthetic oligonucleotide
  Antisense strand to SEQ ID NO: 1094050
uuuagugagccgagaucaa

SEQ ID NO: 1094052 - RNA, 19 nt, Artificial Sequence
  Description of Artificial Sequence: Synthetic oligonucleotide
  Sense strand starting at position 1064 of SEQ ID NO: 915626
cacgaauagcacuguacua

SEQ ID NO: 1094053 - RNA, 19 nt, Artificial Sequence
  Description of Artificial Sequence: Synthetic oligonucleotide
  Antisense strand to SEQ ID NO: 1094052
uaguacagugcuauucgug

SEQ ID NO: 1094054 - RNA, 19 nt, Artificial Sequence
  Description of Artificial Sequence: Synthetic oligonucleotide
  Sense strand starting at position 1075 of SEQ ID NO: 915626
cuguacuaugccugagaca

SEQ ID NO: 1094055 - RNA, 19 nt, Artificial Sequence
  Description of Artificial Sequence: Synthetic oligonucleotide
  Antisense strand to SEQ ID NO: 1094054
ugucucaggcauaguacag

SEQ ID NO: 1094056 - RNA, 19 nt, Artificial Sequence
  Description of Artificial Sequence: Synthetic oligonucleotide
  Sense strand starting at position 1076 of SEQ ID NO: 915626
uguacuaugccugagacac

SEQ ID NO: 1094057 - RNA, 19 nt, Artificial Sequence
  Description of Artificial Sequence: Synthetic oligonucleotide
  Antisense strand to SEQ ID NO: 1094056
gugucucaggcauaguaca

SEQ ID NO: 1094058 - RNA, 19 nt, Artificial Sequence
  Description of Artificial Sequence: Synthetic oligonucleotide
  Sense strand starting at position 1093 of SEQ ID NO: 915626
acagcuaagugcuuuauau

SEQ ID NO: 1094059 - RNA, 19 nt, Artificial Sequence
  Description of Artificial Sequence: Synthetic oligonucleotide
  Antisense strand to SEQ ID NO: 1094058
auauaaagcacuuagcugu

SEQ ID NO: 1094060 - RNA, 19 nt, Artificial Sequence
  Description of Artificial Sequence: Synthetic oligonucleotide
  Sense strand starting at position 1191 of SEQ ID NO: 915626
gaggcuaaauguuccauga

SEQ ID NO: 1094061 - RNA, 19 nt, Artificial Sequence
  Description of Artificial Sequence: Synthetic oligonucleotide
  Antisense strand to SEQ ID NO: 1094060
ucauggaacauuuagccuc

SEQ ID NO: 1094062 - RNA, 19 nt, Artificial Sequence
  Description of Artificial Sequence: Synthetic oligonucleotide
  Sense strand starting at position 1224 of SEQ ID NO: 915626
ugaaguaagcacugaguaa

SEQ ID NO: 1094063 - RNA, 19 nt, Artificial Sequence
  Description of Artificial Sequence: Synthetic oligonucleotide
  Antisense strand to SEQ ID NO: 1094062
uuacucagugcuuacuuca

SEQ ID NO: 1094064 - RNA, 19 nt, Artificial Sequence
  Description of Artificial Sequence: Synthetic oligonucleotide
  Sense strand starting at position 1390 of SEQ ID NO: 915626
gccaauagaucguugugaa

SEQ ID NO: 1094065 - RNA, 19 nt, Artificial Sequence
  Description of Artificial Sequence: Synthetic oligonucleotide
  Antisense strand to SEQ ID NO: 1094064
uucacaacgaucuauuggc

SEQ ID NO: 1094066 - RNA, 19 nt, Artificial Sequence
  Description of Artificial Sequence: Synthetic oligonucleotide
  Sense strand starting at position 1391 of SEQ ID NO: 915626
ccaauagaucguugugaag

SEQ ID NO: 1094067 - RNA, 19 nt, Artificial Sequence
  Description of Artificial Sequence: Synthetic oligonucleotide
  Antisense strand to SEQ ID NO: 1094066
cuucacaacgaucuauugg

SEQ ID NO: 1094068 - RNA, 19 nt, Artificial Sequence
  Description of Artificial Sequence: Synthetic oligonucleotide
  Sense strand starting at position 1467 of SEQ ID NO: 915626
gagggaguuucccuauuau

SEQ ID NO: 1094069 - RNA, 19 nt, Artificial Sequence
  Description of Artificial Sequence: Synthetic oligonucleotide
  Antisense strand to SEQ ID NO: 1094068
auaauagggaaacucccuc

SEQ ID NO: 1094070 - RNA, 19 nt, Artificial Sequence
  Description of Artificial Sequence: Synthetic oligonucleotide
  Sense strand starting at position 1478 of SEQ ID NO: 915626
ccuauuauaugaccguaca

SEQ ID NO: 1094071 - RNA, 19 nt, Artificial Sequence
  Description of Artificial Sequence: Synthetic oligonucleotide
  Antisense strand to SEQ ID NO: 1094070
uguacggucauauaauagg

SEQ ID NO: 1094072 - RNA, 19 nt, Artificial Sequence
  Description of Artificial Sequence: Synthetic oligonucleotide
  Sense strand starting at position 1481 of SEQ ID NO: 915626
auuauaugaccguacacga

SEQ ID NO: 1094073 - RNA, 19 nt, Artificial Sequence
  Description of Artificial Sequence: Synthetic oligonucleotide
  Antisense strand to SEQ ID NO: 1094072
ucguguacggucauauaau

SEQ ID NO: 1094074 - RNA, 19 nt, Artificial Sequence
  Description of Artificial Sequence: Synthetic oligonucleotide
  Sense strand starting at position 1502 of SEQ ID NO: 915626
ucuagacugugaccaaagu

SEQ ID NO: 1094075 - RNA, 19 nt, Artificial Sequence
  Description of Artificial Sequence: Synthetic oligonucleotide
  Antisense strand to SEQ ID NO: 1094074
acuuuggucacagucuaga

SEQ ID NO: 1094076 - RNA, 19 nt, Artificial Sequence
  Description of Artificial Sequence: Synthetic oligonucleotide
  Sense strand starting at position 1996 of SEQ ID NO: 915626
uugauuggccagugugaac

SEQ ID NO: 1094077 - RNA, 19 nt, Artificial Sequence
  Description of Artificial Sequence: Synthetic oligonucleotide
  Antisense strand to SEQ ID NO: 1094076
guucacacuggccaaucaa

SEQ ID NO: 1094078 - RNA, 19 nt, Artificial Sequence
  Description of Artificial Sequence: Synthetic oligonucleotide
  Sense strand starting at position 2034 of SEQ ID NO: 915626
ucacgugacgcugaagauu

SEQ ID NO: 1094079 - RNA, 19 nt, Artificial Sequence
  Description of Artificial Sequence: Synthetic oligonucleotide
  Antisense strand to SEQ ID NO: 1094078
aaucuucagcgucacguga

SEQ ID NO: 1094080 - RNA, 19 nt, Artificial Sequence
  Description of Artificial Sequence: Synthetic oligonucleotide
  Sense strand starting at position 2085 of SEQ ID NO: 915626
uugcgaguagguguguauu

SEQ ID NO: 1094081 - RNA, 19 nt, Artificial Sequence
  Description of Artificial Sequence: Synthetic oligonucleotide
  Antisense strand to SEQ ID NO: 1094080
aauacacaccuacucgcaa

SEQ ID NO: 1094082 - RNA, 19 nt, Artificial Sequence
  Description of Artificial Sequence: Synthetic oligonucleotide
  Sense strand starting at position 2203 of SEQ ID NO: 915626
ucuuguuugcucgcgaguu

SEQ ID NO: 1094083 - RNA, 19 nt, Artificial Sequence
  Description of Artificial Sequence: Synthetic oligonucleotide
  Antisense strand to SEQ ID NO: 1094082
aacucgcgagcaaacaaga

SEQ ID NO: 1094084 - RNA, 19 nt, Artificial Sequence
  Description of Artificial Sequence: Synthetic oligonucleotide
  Sense strand starting at position 2356 of SEQ ID NO: 915626
gguguucucggcaggcaga

SEQ ID NO: 1094085 - RNA, 19 nt, Artificial Sequence
  Description of Artificial Sequence: Synthetic oligonucleotide
  Antisense strand to SEQ ID NO: 1094084
ucugccugccgagaacacc

SEQ ID NO: 1094086 - RNA, 19 nt, Artificial Sequence
  Description of Artificial Sequence: Synthetic oligonucleotide
  Sense strand starting at position 2569 of SEQ ID NO: 915626
ggcaguucuuaauugauaa

SEQ ID NO: 1094087 - RNA, 19 nt, Artificial Sequence
  Description of Artificial Sequence: Synthetic oligonucleotide
  Antisense strand to SEQ ID NO: 1094086
uuaucaauuaagaacugcc

SEQ ID NO: 1094088 - RNA, 19 nt, Artificial Sequence
  Description of Artificial Sequence: Synthetic oligonucleotide
  Sense strand starting at position 2593 of SEQ ID NO: 915626
gggcuuagugaguaaagga

SEQ ID NO: 1094089 - RNA, 19 nt, Artificial Sequence
  Description of Artificial Sequence: Synthetic oligonucleotide
  Antisense strand to SEQ ID NO: 1094088
uccuuuacucacuaagccc

SEQ ID NO: 1094090 - RNA, 19 nt, Artificial Sequence
  Description of Artificial Sequence: Synthetic oligonucleotide
  Sense strand starting at position 2600 of SEQ ID NO: 915626
gugaguaaaggaugguauu

SEQ ID NO: 1094091 - RNA, 19 nt, Artificial Sequence
  Description of Artificial Sequence: Synthetic oligonucleotide
  Antisense strand to SEQ ID NO: 1094090
aauaccauccuuuacucac

SEQ ID NO: 1094092 - RNA, 19 nt, Artificial Sequence
  Description of Artificial Sequence: Synthetic oligonucleotide
  Sense strand starting at position 2652 of SEQ ID NO: 915626
acugccuuugggcaaauua

SEQ ID NO: 1094093 - RNA, 19 nt, Artificial Sequence
  Description of Artificial Sequence: Synthetic oligonucleotide
  Antisense strand to SEQ ID NO: 1094092
uaauuugcccaaaggcagu

SEQ ID NO: 1094094 - RNA, 19 nt, Artificial Sequence
  Description of Artificial Sequence: Synthetic oligonucleotide
  Sense strand starting at position 2679 of SEQ ID NO: 915626
ggaguaauaaugcgcacuu

SEQ ID NO: 1094095 - RNA, 19 nt, Artificial Sequence
  Description of Artificial Sequence: Synthetic oligonucleotide
  Antisense strand to SEQ ID NO: 1094094
aagugcgcauuauuacucc

SEQ ID NO: 1094096 - RNA, 19 nt, Artificial Sequence
  Description of Artificial Sequence: Synthetic oligonucleotide
  Sense strand starting at position 2680 of SEQ ID NO: 915626
gaguaauaaugcgcacuuc

SEQ ID NO: 1094097 - RNA, 19 nt, Artificial Sequence
  Description of Artificial Sequence: Synthetic oligonucleotide
  Antisense strand to SEQ ID NO: 1094096
gaagugcgcauuauuacuc

SEQ ID NO: 1094098 - RNA, 19 nt, Artificial Sequence
  Description of Artificial Sequence: Synthetic oligonucleotide
  Sense strand starting at position 2710 of SEQ ID NO: 915626
guaaauuaaugucugugag

SEQ ID NO: 1094099 - RNA, 19 nt, Artificial Sequence
  Description of Artificial Sequence: Synthetic oligonucleotide
  Antisense strand to SEQ ID NO: 1094098
cucacagacauuaauuuac

SEQ ID NO: 1094100 - RNA, 19 nt, Artificial Sequence
  Description of Artificial Sequence: Synthetic oligonucleotide
  Sense strand starting at position 2711 of SEQ ID NO: 915626
uaaauuaaugucugugaga

SEQ ID NO: 1094101 - RNA, 19 nt, Artificial Sequence
  Description of Artificial Sequence: Synthetic oligonucleotide
  Antisense strand to SEQ ID NO: 1094100
ucucacagacauuaauuua

SEQ ID NO: 1094102 - RNA, 19 nt, Artificial Sequence
  Description of Artificial Sequence: Synthetic oligonucleotide
  Sense strand starting at position 2712 of SEQ ID NO: 915626
aaauuaaugucugugagag

SEQ ID NO: 1094103 - RNA, 19 nt, Artificial Sequence
  Description of Artificial Sequence: Synthetic oligonucleotide
  Antisense strand to SEQ ID NO: 1094102
cucucacagacauuaauuu

SEQ ID NO: 1094104 - RNA, 19 nt, Artificial Sequence
  Description of Artificial Sequence: Synthetic oligonucleotide
  Sense strand starting at position 2713 of SEQ ID NO: 915626
aauuaaugucugugagagu

SEQ ID NO: 1094105 - RNA, 19 nt, Artificial Sequence
  Description of Artificial Sequence: Synthetic oligonucleotide
  Antisense strand to SEQ ID NO: 1094104
acucucacagacauuaauu

SEQ ID NO: 1094106 - RNA, 19 nt, Artificial Sequence
  Description of Artificial Sequence: Synthetic oligonucleotide
  Sense strand starting at position 2736 of SEQ ID NO: 915626
ggcagaguuggagguuaaa

SEQ ID NO: 1094107 - RNA, 19 nt, Artificial Sequence
  Description of Artificial Sequence: Synthetic oligonucleotide
  Antisense strand to SEQ ID NO: 1094106
uuuaaccuccaacucugcc

SEQ ID NO: 1094108 - RNA, 19 nt, Artificial Sequence
  Description of Artificial Sequence: Synthetic oligonucleotide
  Sense strand starting at position 3126 of SEQ ID NO: 915626
gguaguuugcacugaguga

SEQ ID NO: 1094109 - RNA, 19 nt, Artificial Sequence
  Description of Artificial Sequence: Synthetic oligonucleotide
  Antisense strand to SEQ ID NO: 1094108
ucacucagugcaaacuacc

SEQ ID NO: 1094110 - RNA, 19 nt, Artificial Sequence
  Description of Artificial Sequence: Synthetic oligonucleotide
  Sense strand starting at position 3127 of SEQ ID NO: 915626
guaguuugcacugagugaa

SEQ ID NO: 1094111 - RNA, 19 nt, Artificial Sequence
  Description of Artificial Sequence: Synthetic oligonucleotide
  Antisense strand to SEQ ID NO: 1094110
uucacucagugcaaacuac

SEQ ID NO: 1094112 - RNA, 19 nt, Artificial Sequence
  Description of Artificial Sequence: Synthetic oligonucleotide
  Sense strand starting at position 3139 of SEQ ID NO: 915626
gagugaacugugggaacau

SEQ ID NO: 1094113 - RNA, 19 nt, Artificial Sequence
  Description of Artificial Sequence: Synthetic oligonucleotide
  Antisense strand to SEQ ID NO: 1094112
auguucccacaguucacuc

SEQ ID NO: 1094114 - RNA, 19 nt, Artificial Sequence
  Description of Artificial Sequence: Synthetic oligonucleotide
  Sense strand starting at position 3266 of SEQ ID NO: 915626
gauggaugcgacugugguu

SEQ ID NO: 1094115 - RNA, 19 nt, Artificial Sequence
  Description of Artificial Sequence: Synthetic oligonucleotide
  Antisense strand to SEQ ID NO: 1094114
aaccacagucgcauccauc

SEQ ID NO: 1094116 - RNA, 19 nt, Artificial Sequence
  Description of Artificial Sequence: Synthetic oligonucleotide
  Sense strand starting at position 3377 of SEQ ID NO: 915626
ccaccugugcguuaaggga

SEQ ID NO: 1094117 - RNA, 19 nt, Artificial Sequence
  Description of Artificial Sequence: Synthetic oligonucleotide
  Antisense strand to SEQ ID NO: 1094116
ucccuuaacgcacaggugg

SEQ ID NO: 1094118 - RNA, 19 nt, Artificial Sequence
  Description of Artificial Sequence: Synthetic oligonucleotide
  Sense strand starting at position 3412 of SEQ ID NO: 915626
uccucuaaggucugacuga

SEQ ID NO: 1094119 - RNA, 19 nt, Artificial Sequence
  Description of Artificial Sequence: Synthetic oligonucleotide
  Antisense strand to SEQ ID NO: 1094118
ucagucagaccuuagagga

SEQ ID NO: 1094120 - RNA, 19 nt, Artificial Sequence
  Description of Artificial Sequence: Synthetic oligonucleotide
  Sense strand starting at position 3554 of SEQ ID NO: 915626
ggaccuauuagauguagug

SEQ ID NO: 1094121 - RNA, 19 nt, Artificial Sequence
  Description of Artificial Sequence: Synthetic oligonucleotide
  Antisense strand to SEQ ID NO: 1094120
cacuacaucuaauaggucc

SEQ ID NO: 1094122 - RNA, 19 nt, Artificial Sequence
  Description of Artificial Sequence: Synthetic oligonucleotide
  Sense strand starting at position 3709 of SEQ ID NO: 915626
gaacuaugauggcuuuggu

SEQ ID NO: 1094123 - RNA, 19 nt, Artificial Sequence
  Description of Artificial Sequence: Synthetic oligonucleotide
  Antisense strand to SEQ ID NO: 1094122
accaaagccaucauaguuc

SEQ ID NO: 1094124 - RNA, 19 nt, Artificial Sequence
  Description of Artificial Sequence: Synthetic oligonucleotide
  Sense strand starting at position 2 of SEQ ID NO: 915627
caucgaagugcccgucauu

SEQ ID NO: 1094125 - RNA, 19 nt, Artificial Sequence
  Description of Artificial Sequence: Synthetic oligonucleotide
  Antisense strand to SEQ ID NO: 1094124
aaugacgggcacuucgaug

SEQ ID NO: 1094126 - RNA, 19 nt, Artificial Sequence
  Description of Artificial Sequence: Synthetic oligonucleotide
  Sense strand starting at position 45 of SEQ ID NO: 915627
uguuuccuuauguguaaag

SEQ ID NO: 1094127 - RNA, 19 nt, Artificial Sequence
  Description of Artificial Sequence: Synthetic oligonucleotide
  Antisense strand to SEQ ID NO: 1094126
cuuuacacauaaggaaaca

SEQ ID NO: 1094128 - RNA, 19 nt, Artificial Sequence
  Description of Artificial Sequence: Synthetic oligonucleotide
  Sense strand starting at position 170 of SEQ ID NO: 915627
ggcagagugcucuguucug

SEQ ID NO: 1094129 - RNA, 19 nt, Artificial Sequence
  Description of Artificial Sequence: Synthetic oligonucleotide
  Antisense strand to SEQ ID NO: 1094128
cagaacagagcacucugcc

SEQ ID NO: 1094130 - RNA, 19 nt, Artificial Sequence
  Description of Artificial Sequence: Synthetic oligonucleotide
  Sense strand starting at position 271 of SEQ ID NO: 915627
aaagaacugugguccaaac

SEQ ID NO: 1094131 - RNA, 19 nt, Artificial Sequence
  Description of Artificial Sequence: Synthetic oligonucleotide
  Antisense strand to SEQ ID NO: 1094130
guuuggaccacaguucuuu

SEQ ID NO: 1094132 - RNA, 19 nt, Artificial Sequence
  Description of Artificial Sequence: Synthetic oligonucleotide
  Sense strand starting at position 737 of SEQ ID NO: 915627
ccuuuagaguccucugaug

SEQ ID NO: 1094133 - RNA, 19 nt, Artificial Sequence
  Description of Artificial Sequence: Synthetic oligonucleotide
  Antisense strand to SEQ ID NO: 1094132
caucagaggacucuaaagg

SEQ ID NO: 1094134 - RNA, 19 nt, Artificial Sequence
  Description of Artificial Sequence: Synthetic oligonucleotide
  Sense strand starting at position 739 of SEQ ID NO: 915627
uuuagaguccucugaugaa

SEQ ID NO: 1094135 - RNA, 19 nt, Artificial Sequence
  Description of Artificial Sequence: Synthetic oligonucleotide
  Antisense strand to SEQ ID NO: 1094134
uucaucagaggacucuaaa

SEQ ID NO: 1094136 - RNA, 19 nt, Artificial Sequence
  Description of Artificial Sequence: Synthetic oligonucleotide
  Sense strand starting at position 1295 of SEQ ID NO: 915627
gugaccucccacugucaga

SEQ ID NO: 1094137 - RNA, 19 nt, Artificial Sequence
  Description of Artificial Sequence: Synthetic oligonucleotide
  Antisense strand to SEQ ID NO: 1094136
ucugacagugggaggucac

SEQ ID NO: 1094138 - RNA, 19 nt, Artificial Sequence
  Description of Artificial Sequence: Synthetic oligonucleotide
  Sense strand starting at position 1380 of SEQ ID NO: 915627
acaagaguucuguggcccu

SEQ ID NO: 1094139 - RNA, 19 nt, Artificial Sequence
  Description of Artificial Sequence: Synthetic oligonucleotide
  Antisense strand to SEQ ID NO: 1094138
agggccacagaacucuugu

SEQ ID NO: 1094140 - RNA, 19 nt, Artificial Sequence
  Description of Artificial Sequence: Synthetic oligonucleotide
  Sense strand starting at position 2148 of SEQ ID NO: 915627
ccgagacauucucugcaug

SEQ ID NO: 1094141 - RNA, 19 nt, Artificial Sequence
  Description of Artificial Sequence: Synthetic oligonucleotide
  Antisense strand to SEQ ID NO: 1094140
caugcagagaaugucucgg

SEQ ID NO: 1094142 - RNA, 19 nt, Artificial Sequence
  Description of Artificial Sequence: Synthetic oligonucleotide
  Sense strand starting at position 2150 of SEQ ID NO: 915627
gagacauucucugcaugcu

SEQ ID NO: 1094143 - RNA, 19 nt, Artificial Sequence
  Description of Artificial Sequence: Synthetic oligonucleotide
  Antisense strand to SEQ ID NO: 1094142
agcaugcagagaaugucuc

SEQ ID NO: 1094144 - RNA, 19 nt, Artificial Sequence
  Description of Artificial Sequence: Synthetic oligonucleotide
  Sense strand starting at position 2151 of SEQ ID NO: 915627
agacauucucugcaugcuu

SEQ ID NO: 1094145 - RNA, 19 nt, Artificial Sequence
  Description of Artificial Sequence: Synthetic oligonucleotide
  Antisense strand to SEQ ID NO: 1094144
aagcaugcagagaaugucu

SEQ ID NO: 1094146 - RNA, 19 nt, Artificial Sequence
  Description of Artificial Sequence: Synthetic oligonucleotide
  Sense strand starting at position 2158 of SEQ ID NO: 915627
cucugcaugcuuuggagau

SEQ ID NO: 1094147 - RNA, 19 nt, Artificial Sequence
  Description of Artificial Sequence: Synthetic oligonucleotide
  Antisense strand to SEQ ID NO: 1094146
aucuccaaagcaugcagag

SEQ ID NO: 1094148 - RNA, 19 nt, Artificial Sequence
  Description of Artificial Sequence: Synthetic oligonucleotide
  Sense strand starting at position 2159 of SEQ ID NO: 915627
ucugcaugcuuuggagaug

SEQ ID NO: 1094149 - RNA, 19 nt, Artificial Sequence
  Description of Artificial Sequence: Synthetic oligonucleotide
  Antisense strand to SEQ ID NO: 1094148
caucuccaaagcaugcaga

SEQ ID NO: 1094150 - RNA, 19 nt, Artificial Sequence
  Description of Artificial Sequence: Synthetic oligonucleotide
  Sense strand starting at position 2315 of SEQ ID NO: 915627
aauagagucuggcuggaga

SEQ ID NO: 1094151 - RNA, 19 nt, Artificial Sequence
  Description of Artificial Sequence: Synthetic oligonucleotide
  Antisense strand to SEQ ID NO: 1094150
ucuccagccagacucuauu

SEQ ID NO: 1094152 - RNA, 19 nt, Artificial Sequence
  Description of Artificial Sequence: Synthetic oligonucleotide
  Sense strand starting at position 2504 of SEQ ID NO: 915627
gugugaggguguaauuaca

SEQ ID NO: 1094153 - RNA, 19 nt, Artificial Sequence
  Description of Artificial Sequence: Synthetic oligonucleotide
  Antisense strand to SEQ ID NO: 1094152
uguaauuacacccucacac

SEQ ID NO: 1094154 - RNA, 19 nt, Artificial Sequence
  Description of Artificial Sequence: Synthetic oligonucleotide
  Sense strand starting at position 2554 of SEQ ID NO: 915627
ccgagugcgucuuccucaa

SEQ ID NO: 1094155 - RNA, 19 nt, Artificial Sequence
  Description of Artificial Sequence: Synthetic oligonucleotide
  Antisense strand to SEQ ID NO: 1094154
uugaggaagacgcacucgg

SEQ ID NO: 1094156 - RNA, 19 nt, Artificial Sequence
  Description of Artificial Sequence: Synthetic oligonucleotide
  Sense strand starting at position 2699 of SEQ ID NO: 915627
gcagguaggucuugaguua

SEQ ID NO: 1094157 - RNA, 19 nt, Artificial Sequence
  Description of Artificial Sequence: Synthetic oligonucleotide
  Antisense strand to SEQ ID NO: 1094156
uaacucaagaccuaccugc

SEQ ID NO: 1094158 - RNA, 19 nt, Artificial Sequence
  Description of Artificial Sequence: Synthetic oligonucleotide
  Sense strand starting at position 2706 of SEQ ID NO: 915627
ggucuugaguuauaugcuu

SEQ ID NO: 1094159 - RNA, 19 nt, Artificial Sequence
  Description of Artificial Sequence: Synthetic oligonucleotide
  Antisense strand to SEQ ID NO: 1094158
aagcauauaacucaagacc

SEQ ID NO: 1094160 - RNA, 19 nt, Artificial Sequence
  Description of Artificial Sequence: Synthetic oligonucleotide
  Sense strand starting at position 2711 of SEQ ID NO: 915627
ugaguuauaugcuuuaguu

SEQ ID NO: 1094161 - RNA, 19 nt, Artificial Sequence
  Description of Artificial Sequence: Synthetic oligonucleotide
  Antisense strand to SEQ ID NO: 1094160
aacuaaagcauauaacuca

SEQ ID NO: 1094162 - RNA, 19 nt, Artificial Sequence
  Description of Artificial Sequence: Synthetic oligonucleotide
  Sense strand starting at position 2739 of SEQ ID NO: 915627
auuugaggguucggcagaa

SEQ ID NO: 1094163 - RNA, 19 nt, Artificial Sequence
  Description of Artificial Sequence: Synthetic oligonucleotide
  Antisense strand to SEQ ID NO: 1094162
uucugccgaacccucaaau

SEQ ID NO: 1094164 - RNA, 19 nt, Artificial Sequence
  Description of Artificial Sequence: Synthetic oligonucleotide
  Sense strand starting at position 2781 of SEQ ID NO: 915627
uccagugggcagugucaau

SEQ ID NO: 1094165 - RNA, 19 nt, Artificial Sequence
  Description of Artificial Sequence: Synthetic oligonucleotide
  Antisense strand to SEQ ID NO: 1094164
auugacacugcccacugga

SEQ ID NO: 1094166 - RNA, 19 nt, Artificial Sequence
  Description of Artificial Sequence: Synthetic oligonucleotide
  Sense strand starting at position 2792 of SEQ ID NO: 915627
gugucaauaagagggucua

SEQ ID NO: 1094167 - RNA, 19 nt, Artificial Sequence
  Description of Artificial Sequence: Synthetic oligonucleotide
  Antisense strand to SEQ ID NO: 1094166
uagacccucuuauugacac

SEQ ID NO: 1094168 - RNA, 19 nt, Artificial Sequence
  Description of Artificial Sequence: Synthetic oligonucleotide
  Sense strand starting at position 2793 of SEQ ID NO: 915627
ugucaauaagagggucuau

SEQ ID NO: 1094169 - RNA, 19 nt, Artificial Sequence
  Description of Artificial Sequence: Synthetic oligonucleotide
  Antisense strand to SEQ ID NO: 1094168
auagacccucuuauugaca

SEQ ID NO: 1094170 - RNA, 19 nt, Artificial Sequence
  Description of Artificial Sequence: Synthetic oligonucleotide
  Sense strand starting at position 3334 of SEQ ID NO: 915627
cugguuguguucugaauuc

SEQ ID NO: 1094171 - RNA, 19 nt, Artificial Sequence
  Description of Artificial Sequence: Synthetic oligonucleotide
  Antisense strand to SEQ ID NO: 1094170
gaauucagaacacaaccag

SEQ ID NO: 1094172 - RNA, 19 nt, Artificial Sequence
  Description of Artificial Sequence: Synthetic oligonucleotide
  Sense strand starting at position 3482 of SEQ ID NO: 915627
gcacgcugagcggauuaua

SEQ ID NO: 1094173 - RNA, 19 nt, Artificial Sequence
  Description of Artificial Sequence: Synthetic oligonucleotide
  Antisense strand to SEQ ID NO: 1094172
uauaauccgcucagcgugc

SEQ ID NO: 1094174 - RNA, 19 nt, Artificial Sequence
  Description of Artificial Sequence: Synthetic oligonucleotide
  Sense strand starting at position 3485 of SEQ ID NO: 915627
cgcugagcggauuauaaac

SEQ ID NO: 1094175 - RNA, 19 nt, Artificial Sequence
  Description of Artificial Sequence: Synthetic oligonucleotide
  Antisense strand to SEQ ID NO: 1094174
guuuauaauccgcucagcg

SEQ ID NO: 1094176 - RNA, 19 nt, Artificial Sequence
  Description of Artificial Sequence: Synthetic oligonucleotide
  Sense strand starting at position 3635 of SEQ ID NO: 915627
agggaugucugcaguggga

SEQ ID NO: 1094177 - RNA, 19 nt, Artificial Sequence
  Description of Artificial Sequence: Synthetic oligonucleotide
  Antisense strand to SEQ ID NO: 1094176
ucccacugcagacaucccu

SEQ ID NO: 1094178 - RNA, 19 nt, Artificial Sequence
  Description of Artificial Sequence: Synthetic oligonucleotide
  Sense strand starting at position 3647 of SEQ ID NO: 915627
agugggauggcgugggaaa

SEQ ID NO: 1094179 - RNA, 19 nt, Artificial Sequence
  Description of Artificial Sequence: Synthetic oligonucleotide
  Antisense strand to SEQ ID NO: 1094178
uuucccacgccaucccacu

SEQ ID NO: 1094180 - RNA, 19 nt, Artificial Sequence
  Description of Artificial Sequence: Synthetic oligonucleotide
  Sense strand starting at position 3704 of SEQ ID NO: 915627
ccgguaaauguuuacugaa

SEQ ID NO: 1094181 - RNA, 19 nt, Artificial Sequence
  Description of Artificial Sequence: Synthetic oligonucleotide
  Antisense strand to SEQ ID NO: 1094180
uucaguaaacauuuaccgg

SEQ ID NO: 1094182 - RNA, 19 nt, Artificial Sequence
  Description of Artificial Sequence: Synthetic oligonucleotide
  Sense strand starting at position 3706 of SEQ ID NO: 915627
gguaaauguuuacugaauu

SEQ ID NO: 1094183 - RNA, 19 nt, Artificial Sequence
  Description of Artificial Sequence: Synthetic oligonucleotide
  Antisense strand to SEQ ID NO: 1094182
aauucaguaaacauuuacc

SEQ ID NO: 1094184 - RNA, 19 nt, Artificial Sequence
  Description of Artificial Sequence: Synthetic oligonucleotide
  Sense strand starting at position 3783 of SEQ ID NO: 915627
agggccauggcuugaagaa

SEQ ID NO: 1094185 - RNA, 19 nt, Artificial Sequence
  Description of Artificial Sequence: Synthetic oligonucleotide
  Antisense strand to SEQ ID NO: 1094184
uucuucaagccauggcccu

SEQ ID NO: 1094186 - RNA, 19 nt, Artificial Sequence
  Description of Artificial Sequence: Synthetic oligonucleotide
  Sense strand starting at position 3784 of SEQ ID NO: 915627
gggccauggcuugaagaau

SEQ ID NO: 1094187 - RNA, 19 nt, Artificial Sequence
  Description of Artificial Sequence: Synthetic oligonucleotide
  Antisense strand to SEQ ID NO: 1094186
auucuucaagccauggccc

SEQ ID NO: 1094188 - RNA, 19 nt, Artificial Sequence
  Description of Artificial Sequence: Synthetic oligonucleotide
  Sense strand starting at position 3878 of SEQ ID NO: 915627
agaacugagucugguuguu

SEQ ID NO: 1094189 - RNA, 19 nt, Artificial Sequence
  Description of Artificial Sequence: Synthetic oligonucleotide
  Antisense strand to SEQ ID NO: 1094188
aacaaccagacucaguucu

SEQ ID NO: 1094190 - RNA, 19 nt, Artificial Sequence
  Description of Artificial Sequence: Synthetic oligonucleotide
  Sense strand starting at position 374 of SEQ ID NO: 915628
uggguguggguuuaggaaa

SEQ ID NO: 1094191 - RNA, 19 nt, Artificial Sequence
  Description of Artificial Sequence: Synthetic oligonucleotide
  Antisense strand to SEQ ID NO: 1094190
uuuccuaaacccacaccca

SEQ ID NO: 1094192 - RNA, 19 nt, Artificial Sequence
  Description of Artificial Sequence: Synthetic oligonucleotide
  Sense strand starting at position 422 of SEQ ID NO: 915628
guguaauggaccugacacu

SEQ ID NO: 1094193 - RNA, 19 nt, Artificial Sequence
  Description of Artificial Sequence: Synthetic oligonucleotide
  Antisense strand to SEQ ID NO: 1094192
agugucagguccauuacac

SEQ ID NO: 1094194 - RNA, 19 nt, Artificial Sequence
  Description of Artificial Sequence: Synthetic oligonucleotide
  Sense strand starting at position 523 of SEQ ID NO: 915628
uauucucagugcuaagaag

SEQ ID NO: 1094195 - RNA, 19 nt, Artificial Sequence
  Description of Artificial Sequence: Synthetic oligonucleotide
  Antisense strand to SEQ ID NO: 1094194
cuucuuagcacugagaaua

SEQ ID NO: 1094196 - RNA, 19 nt, Artificial Sequence
  Description of Artificial Sequence: Synthetic oligonucleotide
  Sense strand starting at position 580 of SEQ ID NO: 915628
ucuggagcuuucuuucuua

SEQ ID NO: 1094197 - RNA, 19 nt, Artificial Sequence
  Description of Artificial Sequence: Synthetic oligonucleotide
  Antisense strand to SEQ ID NO: 1094196
uaagaaagaaagcuccaga

SEQ ID NO: 1094198 - RNA, 19 nt, Artificial Sequence
  Description of Artificial Sequence: Synthetic oligonucleotide
  Sense strand starting at position 583 of SEQ ID NO: 915628
ggagcuuucuuucuuauga

SEQ ID NO: 1094199 - RNA, 19 nt, Artificial Sequence
  Description of Artificial Sequence: Synthetic oligonucleotide
  Antisense strand to SEQ ID NO: 1094198
ucauaagaaagaaagcucc

SEQ ID NO: 1094200 - RNA, 19 nt, Artificial Sequence
  Description of Artificial Sequence: Synthetic oligonucleotide
  Sense strand starting at position 585 of SEQ ID NO: 915628
agcuuucuuucuuaugaag

SEQ ID NO: 1094201 - RNA, 19 nt, Artificial Sequence
  Description of Artificial Sequence: Synthetic oligonucleotide
  Antisense strand to SEQ ID NO: 1094200
cuucauaagaaagaaagcu

SEQ ID NO: 1094202 - RNA, 19 nt, Artificial Sequence
  Description of Artificial Sequence: Synthetic oligonucleotide
  Sense strand starting at position 587 of SEQ ID NO: 915628
cuuucuuucuuaugaagag

SEQ ID NO: 1094203 - RNA, 19 nt, Artificial Sequence
  Description of Artificial Sequence: Synthetic oligonucleotide
  Antisense strand to SEQ ID NO: 1094202
cucuucauaagaaagaaag

SEQ ID NO: 1094204 - RNA, 19 nt, Artificial Sequence
  Description of Artificial Sequence: Synthetic oligonucleotide
  Sense strand starting at position 588 of SEQ ID NO: 915628
uuucuuucuuaugaagaga

SEQ ID NO: 1094205 - RNA, 19 nt, Artificial Sequence
  Description of Artificial Sequence: Synthetic oligonucleotide
  Antisense strand to SEQ ID NO: 1094204
ucucuucauaagaaagaaa

SEQ ID NO: 1094206 - RNA, 19 nt, Artificial Sequence
  Description of Artificial Sequence: Synthetic oligonucleotide
  Sense strand starting at position 759 of SEQ ID NO: 915628
cucucuaggcucugcuaga

SEQ ID NO: 1094207 - RNA, 19 nt, Artificial Sequence
  Description of Artificial Sequence: Synthetic oligonucleotide
  Antisense strand to SEQ ID NO: 1094206
ucuagcagagccuagagag

SEQ ID NO: 1094208 - RNA, 19 nt, Artificial Sequence
  Description of Artificial Sequence: Synthetic oligonucleotide
  Sense strand starting at position 760 of SEQ ID NO: 915628
ucucuaggcucugcuagau

SEQ ID NO: 1094209 - RNA, 19 nt, Artificial Sequence
  Description of Artificial Sequence: Synthetic oligonucleotide
  Antisense strand to SEQ ID NO: 1094208
aucuagcagagccuagaga

SEQ ID NO: 1094210 - RNA, 19 nt, Artificial Sequence
  Description of Artificial Sequence: Synthetic oligonucleotide
  Sense strand starting at position 808 of SEQ ID NO: 915628
ggaauuaaagccuguuucu

SEQ ID NO: 1094211 - RNA, 19 nt, Artificial Sequence
  Description of Artificial Sequence: Synthetic oligonucleotide
  Antisense strand to SEQ ID NO: 1094210
agaaacaggcuuuaauucc

SEQ ID NO: 1094212 - RNA, 19 nt, Artificial Sequence
  Description of Artificial Sequence: Synthetic oligonucleotide
  Sense strand starting at position 1025 of SEQ ID NO: 915628
ccaaguucucuccaaugua

SEQ ID NO: 1094213 - RNA, 19 nt, Artificial Sequence
  Description of Artificial Sequence: Synthetic oligonucleotide
  Antisense strand to SEQ ID NO: 1094212
uacauuggagagaacuugg

SEQ ID NO: 1094214 - RNA, 19 nt, Artificial Sequence
  Description of Artificial Sequence: Synthetic oligonucleotide
  Sense strand starting at position 1028 of SEQ ID NO: 915628
aguucucuccaauguaaac

SEQ ID NO: 1094215 - RNA, 19 nt, Artificial Sequence
  Description of Artificial Sequence: Synthetic oligonucleotide
  Antisense strand to SEQ ID NO: 1094214
guuuacauuggagagaacu

SEQ ID NO: 1094216 - RNA, 19 nt, Artificial Sequence
  Description of Artificial Sequence: Synthetic oligonucleotide
  Sense strand starting at position 1065 of SEQ ID NO: 915628
uccaguauuuaacagugua

SEQ ID NO: 1094217 - RNA, 19 nt, Artificial Sequence
  Description of Artificial Sequence: Synthetic oligonucleotide
  Antisense strand to SEQ ID NO: 1094216
uacacuguuaaauacugga

SEQ ID NO: 1094218 - RNA, 19 nt, Artificial Sequence
  Description of Artificial Sequence: Synthetic oligonucleotide
  Sense strand starting at position 1717 of SEQ ID NO: 915628
gcgcucauuccucccggaa

SEQ ID NO: 1094219 - RNA, 19 nt, Artificial Sequence
  Description of Artificial Sequence: Synthetic oligonucleotide
  Antisense strand to SEQ ID NO: 1094218
uuccgggaggaaugagcgc

SEQ ID NO: 1094220 - RNA, 19 nt, Artificial Sequence
  Description of Artificial Sequence: Synthetic oligonucleotide
  Sense strand starting at position 1720 of SEQ ID NO: 915628
cucauuccucccggaacga

SEQ ID NO: 1094221 - RNA, 19 nt, Artificial Sequence
  Description of Artificial Sequence: Synthetic oligonucleotide
  Antisense strand to SEQ ID NO: 1094220
ucguuccgggaggaaugag

SEQ ID NO: 1094222 - RNA, 19 nt, Artificial Sequence
  Description of Artificial Sequence: Synthetic oligonucleotide
  Sense strand starting at position 2593 of SEQ ID NO: 915628
cuugcagaguuccuuguau

SEQ ID NO: 1094223 - RNA, 19 nt, Artificial Sequence
  Description of Artificial Sequence: Synthetic oligonucleotide
  Antisense strand to SEQ ID NO: 1094222
auacaaggaacucugcaag

SEQ ID NO: 1094224 - RNA, 19 nt, Artificial Sequence
  Description of Artificial Sequence: Synthetic oligonucleotide
  Sense strand starting at position 2595 of SEQ ID NO: 915628
ugcagaguuccuuguauau

SEQ ID NO: 1094225 - RNA, 19 nt, Artificial Sequence
  Description of Artificial Sequence: Synthetic oligonucleotide
  Antisense strand to SEQ ID NO: 1094224
auauacaaggaacucugca

SEQ ID NO: 1094226 - RNA, 19 nt, Artificial Sequence
  Description of Artificial Sequence: Synthetic oligonucleotide
  Sense strand starting at position 2605 of SEQ ID NO: 915628
cuuguauauucugaucaag

SEQ ID NO: 1094227 - RNA, 19 nt, Artificial Sequence
  Description of Artificial Sequence: Synthetic oligonucleotide
  Antisense strand to SEQ ID NO: 1094226
cuugaucagaauauacaag

SEQ ID NO: 1094228 - RNA, 19 nt, Artificial Sequence
  Description of Artificial Sequence: Synthetic oligonucleotide
  Sense strand starting at position 2607 of SEQ ID NO: 915628
uguauauucugaucaaguc

SEQ ID NO: 1094229 - RNA, 19 nt, Artificial Sequence
  Description of Artificial Sequence: Synthetic oligonucleotide
  Antisense strand to SEQ ID NO: 1094228
gacuugaucagaauauaca

SEQ ID NO: 1094230 - RNA, 19 nt, Artificial Sequence
  Description of Artificial Sequence: Synthetic oligonucleotide
  Sense strand starting at position 2608 of SEQ ID NO: 915628
guauauucugaucaagucu

SEQ ID NO: 1094231 - RNA, 19 nt, Artificial Sequence
  Description of Artificial Sequence: Synthetic oligonucleotide
  Antisense strand to SEQ ID NO: 1094230
agacuugaucagaauauac

SEQ ID NO: 1094232 - RNA, 19 nt, Artificial Sequence
  Description of Artificial Sequence: Synthetic oligonucleotide
  Sense strand starting at position 2694 of SEQ ID NO: 915628
cagagucuauugucaagac

SEQ ID NO: 1094233 - RNA, 19 nt, Artificial Sequence
  Description of Artificial Sequence: Synthetic oligonucleotide
  Antisense strand to SEQ ID NO: 1094232
gucuugacaauagacucug

SEQ ID NO: 1094234 - RNA, 19 nt, Artificial Sequence
  Description of Artificial Sequence: Synthetic oligonucleotide
  Sense strand starting at position 2695 of SEQ ID NO: 915628
agagucuauugucaagaca

SEQ ID NO: 1094235 - RNA, 19 nt, Artificial Sequence
  Description of Artificial Sequence: Synthetic oligonucleotide
  Antisense strand to SEQ ID NO: 1094234
ugucuugacaauagacucu

SEQ ID NO: 1094236 - RNA, 19 nt, Artificial Sequence
  Description of Artificial Sequence: Synthetic oligonucleotide
  Sense strand starting at position 2751 of SEQ ID NO: 915628
ccgauuguucgggagacca

SEQ ID NO: 1094237 - RNA, 19 nt, Artificial Sequence
  Description of Artificial Sequence: Synthetic oligonucleotide
  Antisense strand to SEQ ID NO: 1094236
uggucucccgaacaaucgg

SEQ ID NO: 1094238 - RNA, 19 nt, Artificial Sequence
  Description of Artificial Sequence: Synthetic oligonucleotide
  Sense strand starting at position 2858 of SEQ ID NO: 915628
agugcugacuggucagcua

SEQ ID NO: 1094239 - RNA, 19 nt, Artificial Sequence
  Description of Artificial Sequence: Synthetic oligonucleotide
  Antisense strand to SEQ ID NO: 1094238
uagcugaccagucagcacu

SEQ ID NO: 1094240 - RNA, 19 nt, Artificial Sequence
  Description of Artificial Sequence: Synthetic oligonucleotide
  Sense strand starting at position 2894 of SEQ ID NO: 915628
agucgaagcuguccgcuua

SEQ ID NO: 1094241 - RNA, 19 nt, Artificial Sequence
  Description of Artificial Sequence: Synthetic oligonucleotide
  Antisense strand to SEQ ID NO: 1094240
uaagcggacagcuucgacu

SEQ ID NO: 1094242 - RNA, 19 nt, Artificial Sequence
  Description of Artificial Sequence: Synthetic oligonucleotide
  Sense strand starting at position 2917 of SEQ ID NO: 915628
gagucagucccuggguaga

SEQ ID NO: 1094243 - RNA, 19 nt, Artificial Sequence
  Description of Artificial Sequence: Synthetic oligonucleotide
  Antisense strand to SEQ ID NO: 1094242
ucuacccagggacugacuc

SEQ ID NO: 1094244 - RNA, 19 nt, Artificial Sequence
  Description of Artificial Sequence: Synthetic oligonucleotide
  Sense strand starting at position 2966 of SEQ ID NO: 915628
gggccauccgguugucaga

SEQ ID NO: 1094245 - RNA, 19 nt, Artificial Sequence
  Description of Artificial Sequence: Synthetic oligonucleotide
  Antisense strand to SEQ ID NO: 1094244
ucugacaaccggauggccc

SEQ ID NO: 1094246 - RNA, 19 nt, Artificial Sequence
  Description of Artificial Sequence: Synthetic oligonucleotide
  Sense strand starting at position 2968 of SEQ ID NO: 915628
gccauccgguugucagaaa

SEQ ID NO: 1094247 - RNA, 19 nt, Artificial Sequence
  Description of Artificial Sequence: Synthetic oligonucleotide
  Antisense strand to SEQ ID NO: 1094246
uuucugacaaccggauggc

SEQ ID NO: 1094248 - RNA, 19 nt, Artificial Sequence
  Description of Artificial Sequence: Synthetic oligonucleotide
  Sense strand starting at position 3062 of SEQ ID NO: 915628
gcgcgaucuuggcuaacua

SEQ ID NO: 1094249 - RNA, 19 nt, Artificial Sequence
  Description of Artificial Sequence: Synthetic oligonucleotide
  Antisense strand to SEQ ID NO: 1094248
uaguuagccaagaucgcgc

SEQ ID NO: 1094250 - RNA, 19 nt, Artificial Sequence
  Description of Artificial Sequence: Synthetic oligonucleotide
  Sense strand starting at position 3628 of SEQ ID NO: 915628
cuagguucacaguaguguu

SEQ ID NO: 1094251 - RNA, 19 nt, Artificial Sequence
  Description of Artificial Sequence: Synthetic oligonucleotide
  Antisense strand to SEQ ID NO: 1094250
aacacuacugugaaccuag

SEQ ID NO: 1094252 - RNA, 19 nt, Artificial Sequence
  Description of Artificial Sequence: Synthetic oligonucleotide
  Sense strand starting at position 3635 of SEQ ID NO: 915628
cacaguaguguugauaucu

SEQ ID NO: 1094253 - RNA, 19 nt, Artificial Sequence
  Description of Artificial Sequence: Synthetic oligonucleotide
  Antisense strand to SEQ ID NO: 1094252
agauaucaacacuacugug

SEQ ID NO: 1094254 - RNA, 19 nt, Artificial Sequence
  Description of Artificial Sequence: Synthetic oligonucleotide
  Sense strand starting at position 3823 of SEQ ID NO: 915628
ccaagacuuguuuggccua

SEQ ID NO: 1094255 - RNA, 19 nt, Artificial Sequence
  Description of Artificial Sequence: Synthetic oligonucleotide
  Antisense strand to SEQ ID NO: 1094254
uaggccaaacaagucuugg

SEQ ID NO: 1094256 - RNA, 19 nt, Artificial Sequence
  Description of Artificial Sequence: Synthetic oligonucleotide
  Sense strand starting at position 3834 of SEQ ID NO: 915628
uuggccuauggccaguaau

SEQ ID NO: 1094257 - RNA, 19 nt, Artificial Sequence
  Description of Artificial Sequence: Synthetic oligonucleotide
  Antisense strand to SEQ ID NO: 1094256
auuacuggccauaggccaa

SEQ ID NO: 1094258 - RNA, 19 nt, Artificial Sequence
  Description of Artificial Sequence: Synthetic oligonucleotide
  Sense strand starting at position 3837 of SEQ ID NO: 915628
gccuauggccaguaaugga

SEQ ID NO: 1094259 - RNA, 19 nt, Artificial Sequence
  Description of Artificial Sequence: Synthetic oligonucleotide
  Antisense strand to SEQ ID NO: 1094258
uccauuacuggccauaggc

SEQ ID NO: 1094260 - RNA, 19 nt, Artificial Sequence
  Description of Artificial Sequence: Synthetic oligonucleotide
  Sense strand starting at position 3862 of SEQ ID NO: 915628
ccguuugaagguuagaaac

SEQ ID NO: 1094261 - RNA, 19 nt, Artificial Sequence
  Description of Artificial Sequence: Synthetic oligonucleotide
  Antisense strand to SEQ ID NO: 1094260
guuucuaaccuucaaacgg

SEQ ID NO: 1094262 - RNA, 19 nt, Artificial Sequence
  Description of Artificial Sequence: Synthetic oligonucleotide
  Sense strand starting at position 3864 of SEQ ID NO: 915628
guuugaagguuagaaacaa

SEQ ID NO: 1094263 - RNA, 19 nt, Artificial Sequence
  Description of Artificial Sequence: Synthetic oligonucleotide
  Antisense strand to SEQ ID NO: 1094262
uuguuucuaaccuucaaac

SEQ ID NO: 1094264 - RNA, 19 nt, Artificial Sequence
  Description of Artificial Sequence: Synthetic oligonucleotide
  Sense strand starting at position 3886 of SEQ ID NO: 915628
ggaauugguuaagucuguu

SEQ ID NO: 1094265 - RNA, 19 nt, Artificial Sequence
  Description of Artificial Sequence: Synthetic oligonucleotide
  Antisense strand to SEQ ID NO: 1094264
aacagacuuaaccaauucc

SEQ ID NO: 1094266 - RNA, 19 nt, Artificial Sequence
  Description of Artificial Sequence: Synthetic oligonucleotide
  Sense strand starting at position 3889 of SEQ ID NO: 915628
auugguuaagucuguuauc

SEQ ID NO: 1094267 - RNA, 19 nt, Artificial Sequence
  Description of Artificial Sequence: Synthetic oligonucleotide
  Antisense strand to SEQ ID NO: 1094266
gauaacagacuuaaccaau

SEQ ID NO: 1094268 - RNA, 19 nt, Artificial Sequence
  Description of Artificial Sequence: Synthetic oligonucleotide
  Sense strand starting at position 3890 of SEQ ID NO: 915628
uugguuaagucuguuaucu

SEQ ID NO: 1094269 - RNA, 19 nt, Artificial Sequence
  Description of Artificial Sequence: Synthetic oligonucleotide
  Antisense strand to SEQ ID NO: 1094268
agauaacagacuuaaccaa

SEQ ID NO: 1094270 - RNA, 19 nt, Artificial Sequence
  Description of Artificial Sequence: Synthetic oligonucleotide
  Sense strand starting at position 507 of SEQ ID NO: 915629
caucuuuaccuguggguga

SEQ ID NO: 1094271 - RNA, 19 nt, Artificial Sequence
  Description of Artificial Sequence: Synthetic oligonucleotide
  Antisense strand to SEQ ID NO: 1094270
ucacccacagguaaagaug

SEQ ID NO: 1094272 - RNA, 19 nt, Artificial Sequence
  Description of Artificial Sequence: Synthetic oligonucleotide
  Sense strand starting at position 1146 of SEQ ID NO: 915629
agcccagaguccugaguuu

SEQ ID NO: 1094273 - RNA, 19 nt, Artificial Sequence
  Description of Artificial Sequence: Synthetic oligonucleotide
  Antisense strand to SEQ ID NO: 1094272
aaacucaggacucugggcu

SEQ ID NO: 1094274 - RNA, 19 nt, Artificial Sequence
  Description of Artificial Sequence: Synthetic oligonucleotide
  Sense strand starting at position 1152 of SEQ ID NO: 915629
gaguccugaguuugagucu

SEQ ID NO: 1094275 - RNA, 19 nt, Artificial Sequence
  Description of Artificial Sequence: Synthetic oligonucleotide
  Antisense strand to SEQ ID NO: 1094274
agacucaaacucaggacuc

SEQ ID NO: 1094276 - RNA, 19 nt, Artificial Sequence
  Description of Artificial Sequence: Synthetic oligonucleotide
  Sense strand starting at position 1175 of SEQ ID NO: 915629
cugugucugaucuguguga

SEQ ID NO: 1094277 - RNA, 19 nt, Artificial Sequence
  Description of Artificial Sequence: Synthetic oligonucleotide
  Antisense strand to SEQ ID NO: 1094276
ucacacagaucagacacag

SEQ ID NO: 1094278 - RNA, 19 nt, Artificial Sequence
  Description of Artificial Sequence: Synthetic oligonucleotide
  Sense strand starting at position 1179 of SEQ ID NO: 915629
gucugaucugugugaccug

SEQ ID NO: 1094279 - RNA, 19 nt, Artificial Sequence
  Description of Artificial Sequence: Synthetic oligonucleotide
  Antisense strand to SEQ ID NO: 1094278
caggucacacagaucagac

SEQ ID NO: 1094280 - RNA, 19 nt, Artificial Sequence
  Description of Artificial Sequence: Synthetic oligonucleotide
  Sense strand starting at position 1198 of SEQ ID NO: 915629
gggcaaguuucugucuaua

SEQ ID NO: 1094281 - RNA, 19 nt, Artificial Sequence
  Description of Artificial Sequence: Synthetic oligonucleotide
  Antisense strand to SEQ ID NO: 1094280
uauagacagaaacuugccc

SEQ ID NO: 1094282 - RNA, 19 nt, Artificial Sequence
  Description of Artificial Sequence: Synthetic oligonucleotide
  Sense strand starting at position 1200 of SEQ ID NO: 915629
gcaaguuucugucuauauc

SEQ ID NO: 1094283 - RNA, 19 nt, Artificial Sequence
  Description of Artificial Sequence: Synthetic oligonucleotide
  Antisense strand to SEQ ID NO: 1094282
gauauagacagaaacuugc

SEQ ID NO: 1094284 - RNA, 19 nt, Artificial Sequence
  Description of Artificial Sequence: Synthetic oligonucleotide
  Sense strand starting at position 1209 of SEQ ID NO: 915629
ugucuauaucuggacuugu

SEQ ID NO: 1094285 - RNA, 19 nt, Artificial Sequence
  Description of Artificial Sequence: Synthetic oligonucleotide
  Antisense strand to SEQ ID NO: 1094284
acaaguccagauauagaca

SEQ ID NO: 1094286 - RNA, 19 nt, Artificial Sequence
  Description of Artificial Sequence: Synthetic oligonucleotide
  Sense strand starting at position 1222 of SEQ ID NO: 915629
acuuguguuucugucugua

SEQ ID NO: 1094287 - RNA, 19 nt, Artificial Sequence
  Description of Artificial Sequence: Synthetic oligonucleotide
  Antisense strand to SEQ ID NO: 1094286
uacagacagaaacacaagu

SEQ ID NO: 1094288 - RNA, 19 nt, Artificial Sequence
  Description of Artificial Sequence: Synthetic oligonucleotide
  Sense strand starting at position 1226 of SEQ ID NO: 915629
guguuucugucuguagcuu

SEQ ID NO: 1094289 - RNA, 19 nt, Artificial Sequence
  Description of Artificial Sequence: Synthetic oligonucleotide
  Antisense strand to SEQ ID NO: 1094288
aagcuacagacagaaacac

SEQ ID NO: 1094290 - RNA, 19 nt, Artificial Sequence
  Description of Artificial Sequence: Synthetic oligonucleotide
  Sense strand starting at position 1264 of SEQ ID NO: 915629
agguauggguucugugauu

SEQ ID NO: 1094291 - RNA, 19 nt, Artificial Sequence
  Description of Artificial Sequence: Synthetic oligonucleotide
  Antisense strand to SEQ ID NO: 1094290
aaucacagaacccauaccu

SEQ ID NO: 1094292 - RNA, 19 nt, Artificial Sequence
  Description of Artificial Sequence: Synthetic oligonucleotide
  Sense strand starting at position 1289 of SEQ ID NO: 915629
ugggauuccugagccagag

SEQ ID NO: 1094293 - RNA, 19 nt, Artificial Sequence
  Description of Artificial Sequence: Synthetic oligonucleotide
  Antisense strand to SEQ ID NO: 1094292
cucuggcucaggaauccca

SEQ ID NO: 1094294 - RNA, 19 nt, Artificial Sequence
  Description of Artificial Sequence: Synthetic oligonucleotide
  Sense strand starting at position 1480 of SEQ ID NO: 915629
ccggccucccuccagaauu

SEQ ID NO: 1094295 - RNA, 19 nt, Artificial Sequence
  Description of Artificial Sequence: Synthetic oligonucleotide
  Antisense strand to SEQ ID NO: 1094294
aauucuggagggaggccgg

SEQ ID NO: 1094296 - RNA, 19 nt, Artificial Sequence
  Description of Artificial Sequence: Synthetic oligonucleotide
  Sense strand starting at position 1514 of SEQ ID NO: 915629
uguccucugucccagcauu

SEQ ID NO: 1094297 - RNA, 19 nt, Artificial Sequence
  Description of Artificial Sequence: Synthetic oligonucleotide
  Antisense strand to SEQ ID NO: 1094296
aaugcugggacagaggaca

SEQ ID NO: 1094298 - RNA, 19 nt, Artificial Sequence
  Description of Artificial Sequence: Synthetic oligonucleotide
  Sense strand starting at position 2405 of SEQ ID NO: 915629
uugccacauuggucaaacu

SEQ ID NO: 1094299 - RNA, 19 nt, Artificial Sequence
  Description of Artificial Sequence: Synthetic oligonucleotide
  Antisense strand to SEQ ID NO: 1094298
aguuugaccaauguggcaa

SEQ ID NO: 1094300 - RNA, 19 nt, Artificial Sequence
  Description of Artificial Sequence: Synthetic oligonucleotide
  Sense strand starting at position 2500 of SEQ ID NO: 915629
ucauguuuguuucuugaga

SEQ ID NO: 1094301 - RNA, 19 nt, Artificial Sequence
  Description of Artificial Sequence: Synthetic oligonucleotide
  Antisense strand to SEQ ID NO: 1094300
ucucaagaaacaaacauga

SEQ ID NO: 1094302 - RNA, 19 nt, Artificial Sequence
  Description of Artificial Sequence: Synthetic oligonucleotide
  Sense strand starting at position 2501 of SEQ ID NO: 915629
cauguuuguuucuugagac

SEQ ID NO: 1094303 - RNA, 19 nt, Artificial Sequence
  Description of Artificial Sequence: Synthetic oligonucleotide
  Antisense strand to SEQ ID NO: 1094302
gucucaagaaacaaacaug

SEQ ID NO: 1094304 - RNA, 19 nt, Artificial Sequence
  Description of Artificial Sequence: Synthetic oligonucleotide
  Sense strand starting at position 2784 of SEQ ID NO: 915629
acuuccaguucugagguua

SEQ ID NO: 1094305 - RNA, 19 nt, Artificial Sequence
  Description of Artificial Sequence: Synthetic oligonucleotide
  Antisense strand to SEQ ID NO: 1094304
uaaccucagaacuggaagu

SEQ ID NO: 1094306 - RNA, 19 nt, Artificial Sequence
  Description of Artificial Sequence: Synthetic oligonucleotide
  Sense strand starting at position 2795 of SEQ ID NO: 915629
ugagguuacuggcauguaa

SEQ ID NO: 1094307 - RNA, 19 nt, Artificial Sequence
  Description of Artificial Sequence: Synthetic oligonucleotide
  Antisense strand to SEQ ID NO: 1094306
uuacaugccaguaaccuca

SEQ ID NO: 1094308 - RNA, 19 nt, Artificial Sequence
  Description of Artificial Sequence: Synthetic oligonucleotide
  Sense strand starting at position 2797 of SEQ ID NO: 915629
agguuacuggcauguaaag

SEQ ID NO: 1094309 - RNA, 19 nt, Artificial Sequence
  Description of Artificial Sequence: Synthetic oligonucleotide
  Antisense strand to SEQ ID NO: 1094308
cuuuacaugccaguaaccu

SEQ ID NO: 1094310 - RNA, 19 nt, Artificial Sequence
  Description of Artificial Sequence: Synthetic oligonucleotide
  Sense strand starting at position 2848 of SEQ ID NO: 915629
ucauuuaucgucugcucuu

SEQ ID NO: 1094311 - RNA, 19 nt, Artificial Sequence
  Description of Artificial Sequence: Synthetic oligonucleotide
  Antisense strand to SEQ ID NO: 1094310
aagagcagacgauaaauga

SEQ ID NO: 1094312 - RNA, 19 nt, Artificial Sequence
  Description of Artificial Sequence: Synthetic oligonucleotide
  Sense strand starting at position 3128 of SEQ ID NO: 915629
agccacgucugcucauaaa

SEQ ID NO: 1094313 - RNA, 19 nt, Artificial Sequence
  Description of Artificial Sequence: Synthetic oligonucleotide
  Antisense strand to SEQ ID NO: 1094312
uuuaugagcagacguggcu

SEQ ID NO: 1094314 - RNA, 19 nt, Artificial Sequence
  Description of Artificial Sequence: Synthetic oligonucleotide
  Sense strand starting at position 3131 of SEQ ID NO: 915629
cacgucugcucauaaagua

SEQ ID NO: 1094315 - RNA, 19 nt, Artificial Sequence
  Description of Artificial Sequence: Synthetic oligonucleotide
  Antisense strand to SEQ ID NO: 1094314
uacuuuaugagcagacgug

SEQ ID NO: 1094316 - RNA, 19 nt, Artificial Sequence
  Description of Artificial Sequence: Synthetic oligonucleotide
  Sense strand starting at position 3161 of SEQ ID NO: 915629
gugcacacccugcaauauu

SEQ ID NO: 1094317 - RNA, 19 nt, Artificial Sequence
  Description of Artificial Sequence: Synthetic oligonucleotide
  Antisense strand to SEQ ID NO: 1094316
aauauugcagggugugcac

SEQ ID NO: 1094318 - RNA, 19 nt, Artificial Sequence
  Description of Artificial Sequence: Synthetic oligonucleotide
  Sense strand starting at position 3170 of SEQ ID NO: 915629
cugcaauauuacugugcua

SEQ ID NO: 1094319 - RNA, 19 nt, Artificial Sequence
  Description of Artificial Sequence: Synthetic oligonucleotide
  Antisense strand to SEQ ID NO: 1094318
uagcacaguaauauugcag

SEQ ID NO: 1094320 - RNA, 19 nt, Artificial Sequence
  Description of Artificial Sequence: Synthetic oligonucleotide
  Sense strand starting at position 3172 of SEQ ID NO: 915629
gcaauauuacugugcuacu

SEQ ID NO: 1094321 - RNA, 19 nt, Artificial Sequence
  Description of Artificial Sequence: Synthetic oligonucleotide
  Antisense strand to SEQ ID NO: 1094320
aguagcacaguaauauugc

SEQ ID NO: 1094322 - RNA, 19 nt, Artificial Sequence
  Description of Artificial Sequence: Synthetic oligonucleotide
  Sense strand starting at position 3498 of SEQ ID NO: 915629
agcgaauuaugggacuuau

SEQ ID NO: 1094323 - RNA, 19 nt, Artificial Sequence
  Description of Artificial Sequence: Synthetic oligonucleotide
  Antisense strand to SEQ ID NO: 1094322
auaagucccauaauucgcu

SEQ ID NO: 1094324 - RNA, 19 nt, Artificial Sequence
  Description of Artificial Sequence: Synthetic oligonucleotide
  Sense strand starting at position 3547 of SEQ ID NO: 915629
accaaagugcgcugggaau

SEQ ID NO: 1094325 - RNA, 19 nt, Artificial Sequence
  Description of Artificial Sequence: Synthetic oligonucleotide
  Antisense strand to SEQ ID NO: 1094324
auucccagcgcacuuuggu

SEQ ID NO: 1094326 - RNA, 19 nt, Artificial Sequence
  Description of Artificial Sequence: Synthetic oligonucleotide
  Sense strand starting at position 3561 of SEQ ID NO: 915629
ggaauucagccguagcugu

SEQ ID NO: 1094327 - RNA, 19 nt, Artificial Sequence
  Description of Artificial Sequence: Synthetic oligonucleotide
  Antisense strand to SEQ ID NO: 1094326
acagcuacggcugaauucc

SEQ ID NO: 1094328 - RNA, 19 nt, Artificial Sequence
  Description of Artificial Sequence: Synthetic oligonucleotide
  Sense strand starting at position 3569 of SEQ ID NO: 915629
gccguagcugucuuugagu

SEQ ID NO: 1094329 - RNA, 19 nt, Artificial Sequence
  Description of Artificial Sequence: Synthetic oligonucleotide
  Antisense strand to SEQ ID NO: 1094328
acucaaagacagcuacggc

SEQ ID NO: 1094330 - RNA, 19 nt, Artificial Sequence
  Description of Artificial Sequence: Synthetic oligonucleotide
  Sense strand starting at position 3571 of SEQ ID NO: 915629
cguagcugucuuugagugu

SEQ ID NO: 1094331 - RNA, 19 nt, Artificial Sequence
  Description of Artificial Sequence: Synthetic oligonucleotide
  Antisense strand to SEQ ID NO: 1094330
acacucaaagacagcuacg

SEQ ID NO: 1094332 - RNA, 19 nt, Artificial Sequence
  Description of Artificial Sequence: Synthetic oligonucleotide
  Sense strand starting at position 3632 of SEQ ID NO: 915629
ggguccuccgugaaugcga

SEQ ID NO: 1094333 - RNA, 19 nt, Artificial Sequence
  Description of Artificial Sequence: Synthetic oligonucleotide
  Antisense strand to SEQ ID NO: 1094332
ucgcauucacggaggaccc

SEQ ID NO: 1094334 - RNA, 19 nt, Artificial Sequence
  Description of Artificial Sequence: Synthetic oligonucleotide
  Sense strand starting at position 3773 of SEQ ID NO: 915629
gggaaagucuguugggcuu

SEQ ID NO: 1094335 - RNA, 19 nt, Artificial Sequence
  Description of Artificial Sequence: Synthetic oligonucleotide
  Antisense strand to SEQ ID NO: 1094334
aagcccaacagacuuuccc

SEQ ID NO: 1094336 - RNA, 19 nt, Artificial Sequence
  Description of Artificial Sequence: Synthetic oligonucleotide
  Sense strand starting at position 20 of SEQ ID NO: 915630
agaagaauuugggauguuu

SEQ ID NO: 1094337 - RNA, 19 nt, Artificial Sequence
  Description of Artificial Sequence: Synthetic oligonucleotide
  Antisense strand to SEQ ID NO: 1094336
aaacaucccaaauucuucu

SEQ ID NO: 1094338 - RNA, 19 nt, Artificial Sequence
  Description of Artificial Sequence: Synthetic oligonucleotide
  Sense strand starting at position 98 of SEQ ID NO: 915630
uucuuuaacuauguuguga

SEQ ID NO: 1094339 - RNA, 19 nt, Artificial Sequence
  Description of Artificial Sequence: Synthetic oligonucleotide
  Antisense strand to SEQ ID NO: 1094338
ucacaacauaguuaaagaa

SEQ ID NO: 1094340 - RNA, 19 nt, Artificial Sequence
  Description of Artificial Sequence: Synthetic oligonucleotide
  Sense strand starting at position 283 of SEQ ID NO: 915630
ugcuacgugguauaaacau

SEQ ID NO: 1094341 - RNA, 19 nt, Artificial Sequence
  Description of Artificial Sequence: Synthetic oligonucleotide
  Antisense strand to SEQ ID NO: 1094340
auguuuauaccacguagca

SEQ ID NO: 1094342 - RNA, 19 nt, Artificial Sequence
  Description of Artificial Sequence: Synthetic oligonucleotide
  Sense strand starting at position 482 of SEQ ID NO: 915630
aguugugacccacaaauca

SEQ ID NO: 1094343 - RNA, 19 nt, Artificial Sequence
  Description of Artificial Sequence: Synthetic oligonucleotide
  Antisense strand to SEQ ID NO: 1094342
ugauuugugggucacaacu

SEQ ID NO: 1094344 - RNA, 19 nt, Artificial Sequence
  Description of Artificial Sequence: Synthetic oligonucleotide
  Sense strand starting at position 589 of SEQ ID NO: 915630
gguaaauacugcuuuguga

SEQ ID NO: 1094345 - RNA, 19 nt, Artificial Sequence
  Description of Artificial Sequence: Synthetic oligonucleotide
  Antisense strand to SEQ ID NO: 1094344
ucacaaagcaguauuuacc

SEQ ID NO: 1094346 - RNA, 19 nt, Artificial Sequence
  Description of Artificial Sequence: Synthetic oligonucleotide
  Sense strand starting at position 592 of SEQ ID NO: 915630
aaauacugcuuugugaaag

SEQ ID NO: 1094347 - RNA, 19 nt, Artificial Sequence
  Description of Artificial Sequence: Synthetic oligonucleotide
  Antisense strand to SEQ ID NO: 1094346
cuuucacaaagcaguauuu

SEQ ID NO: 1094348 - RNA, 19 nt, Artificial Sequence
  Description of Artificial Sequence: Synthetic oligonucleotide
  Sense strand starting at position 626 of SEQ ID NO: 915630
acguauguacuagaucuga

SEQ ID NO: 1094349 - RNA, 19 nt, Artificial Sequence
  Description of Artificial Sequence: Synthetic oligonucleotide
  Antisense strand to SEQ ID NO: 1094348
ucagaucuaguacauacgu

SEQ ID NO: 1094350 - RNA, 19 nt, Artificial Sequence
  Description of Artificial Sequence: Synthetic oligonucleotide
  Sense strand starting at position 708 of SEQ ID NO: 915630
ccuagagaucugggucuaa

SEQ ID NO: 1094351 - RNA, 19 nt, Artificial Sequence
  Description of Artificial Sequence: Synthetic oligonucleotide
  Antisense strand to SEQ ID NO: 1094350
uuagacccagaucucuagg

SEQ ID NO: 1094352 - RNA, 19 nt, Artificial Sequence
  Description of Artificial Sequence: Synthetic oligonucleotide
  Sense strand starting at position 712 of SEQ ID NO: 915630
gagaucugggucuaaugca

SEQ ID NO: 1094353 - RNA, 19 nt, Artificial Sequence
  Description of Artificial Sequence: Synthetic oligonucleotide
  Antisense strand to SEQ ID NO: 1094352
ugcauuagacccagaucuc

SEQ ID NO: 1094354 - RNA, 19 nt, Artificial Sequence
  Description of Artificial Sequence: Synthetic oligonucleotide
  Sense strand starting at position 783 of SEQ ID NO: 915630
cucuuugcucaagauagac

SEQ ID NO: 1094355 - RNA, 19 nt, Artificial Sequence
  Description of Artificial Sequence: Synthetic oligonucleotide
  Antisense strand to SEQ ID NO: 1094354
gucuaucuugagcaaagag

SEQ ID NO: 1094356 - RNA, 19 nt, Artificial Sequence
  Description of Artificial Sequence: Synthetic oligonucleotide
  Sense strand starting at position 1026 of SEQ ID NO: 915630
gaaucacugugucccaaga

SEQ ID NO: 1094357 - RNA, 19 nt, Artificial Sequence
  Description of Artificial Sequence: Synthetic oligonucleotide
  Antisense strand to SEQ ID NO: 1094356
ucuugggacacagugauuc

SEQ ID NO: 1094358 - RNA, 19 nt, Artificial Sequence
  Description of Artificial Sequence: Synthetic oligonucleotide
  Sense strand starting at position 1467 of SEQ ID NO: 915630
aggugagacgccuagauuc

SEQ ID NO: 1094359 - RNA, 19 nt, Artificial Sequence
  Description of Artificial Sequence: Synthetic oligonucleotide
  Antisense strand to SEQ ID NO: 1094358
gaaucuaggcgucucaccu

SEQ ID NO: 1094360 - RNA, 19 nt, Artificial Sequence
  Description of Artificial Sequence: Synthetic oligonucleotide
  Sense strand starting at position 2208 of SEQ ID NO: 915630
aggaguacacauugucaua

SEQ ID NO: 1094361 - RNA, 19 nt, Artificial Sequence
  Description of Artificial Sequence: Synthetic oligonucleotide
  Antisense strand to SEQ ID NO: 1094360
uaugacaauguguacuccu

SEQ ID NO: 1094362 - RNA, 19 nt, Artificial Sequence
  Description of Artificial Sequence: Synthetic oligonucleotide
  Sense strand starting at position 2262 of SEQ ID NO: 915630
ggcugaaccuuuccagaaa

SEQ ID NO: 1094363 - RNA, 19 nt, Artificial Sequence
  Description of Artificial Sequence: Synthetic oligonucleotide
  Antisense strand to SEQ ID NO: 1094362
uuucuggaaagguucagcc

SEQ ID NO: 1094364 - RNA, 19 nt, Artificial Sequence
  Description of Artificial Sequence: Synthetic oligonucleotide
  Sense strand starting at position 2297 of SEQ ID NO: 915630
cuggcucuguuacugauuu

SEQ ID NO: 1094365 - RNA, 19 nt, Artificial Sequence
  Description of Artificial Sequence: Synthetic oligonucleotide
  Antisense strand to SEQ ID NO: 1094364
aaaucaguaacagagccag

SEQ ID NO: 1094366 - RNA, 19 nt, Artificial Sequence
  Description of Artificial Sequence: Synthetic oligonucleotide
  Sense strand starting at position 2378 of SEQ ID NO: 915630
agggaacuauacuagauga

SEQ ID NO: 1094367 - RNA, 19 nt, Artificial Sequence
  Description of Artificial Sequence: Synthetic oligonucleotide
  Antisense strand to SEQ ID NO: 1094366
ucaucuaguauaguucccu

SEQ ID NO: 1094368 - RNA, 19 nt, Artificial Sequence
  Description of Artificial Sequence: Synthetic oligonucleotide
  Sense strand starting at position 2456 of SEQ ID NO: 915630
ccgagcuuccaacaccaau

SEQ ID NO: 1094369 - RNA, 19 nt, Artificial Sequence
  Description of Artificial Sequence: Synthetic oligonucleotide
  Antisense strand to SEQ ID NO: 1094368
auugguguuggaagcucgg

SEQ ID NO: 1094370 - RNA, 19 nt, Artificial Sequence
  Description of Artificial Sequence: Synthetic oligonucleotide
  Sense strand starting at position 2632 of SEQ ID NO: 915630
aaaugugaccagggugaga

SEQ ID NO: 1094371 - RNA, 19 nt, Artificial Sequence
  Description of Artificial Sequence: Synthetic oligonucleotide
  Antisense strand to SEQ ID NO: 1094370
ucucacccuggucacauuu

SEQ ID NO: 1094372 - RNA, 19 nt, Artificial Sequence
  Description of Artificial Sequence: Synthetic oligonucleotide
  Sense strand starting at position 2634 of SEQ ID NO: 915630
augugaccagggugagauu

SEQ ID NO: 1094373 - RNA, 19 nt, Artificial Sequence
  Description of Artificial Sequence: Synthetic oligonucleotide
  Antisense strand to SEQ ID NO: 1094372
aaucucacccuggucacau

SEQ ID NO: 1094374 - RNA, 19 nt, Artificial Sequence
  Description of Artificial Sequence: Synthetic oligonucleotide
  Sense strand starting at position 2722 of SEQ ID NO: 915630
ugcauaguauuacuauauc

SEQ ID NO: 1094375 - RNA, 19 nt, Artificial Sequence
  Description of Artificial Sequence: Synthetic oligonucleotide
  Antisense strand to SEQ ID NO: 1094374
gauauaguaauacuaugca

SEQ ID NO: 1094376 - RNA, 19 nt, Artificial Sequence
  Description of Artificial Sequence: Synthetic oligonucleotide
  Sense strand starting at position 2733 of SEQ ID NO: 915630
acuauaucugacuguugag

SEQ ID NO: 1094377 - RNA, 19 nt, Artificial Sequence
  Description of Artificial Sequence: Synthetic oligonucleotide
  Antisense strand to SEQ ID NO: 1094376
cucaacagucagauauagu

SEQ ID NO: 1094378 - RNA, 19 nt, Artificial Sequence
  Description of Artificial Sequence: Synthetic oligonucleotide
  Sense strand starting at position 2861 of SEQ ID NO: 915630
ccugaagugcuaggagaug

SEQ ID NO: 1094379 - RNA, 19 nt, Artificial Sequence
  Description of Artificial Sequence: Synthetic oligonucleotide
  Antisense strand to SEQ ID NO: 1094378
caucuccuagcacuucagg

SEQ ID NO: 1094380 - RNA, 19 nt, Artificial Sequence
  Description of Artificial Sequence: Synthetic oligonucleotide
  Sense strand starting at position 2866 of SEQ ID NO: 915630
agugcuaggagaugaagau

SEQ ID NO: 1094381 - RNA, 19 nt, Artificial Sequence
  Description of Artificial Sequence: Synthetic oligonucleotide
  Antisense strand to SEQ ID NO: 1094380
aucuucaucuccuagcacu

SEQ ID NO: 1094382 - RNA, 19 nt, Artificial Sequence
  Description of Artificial Sequence: Synthetic oligonucleotide
  Sense strand starting at position 2879 of SEQ ID NO: 915630
gaagaugucuuugugcaua

SEQ ID NO: 1094383 - RNA, 19 nt, Artificial Sequence
  Description of Artificial Sequence: Synthetic oligonucleotide
  Antisense strand to SEQ ID NO: 1094382
uaugcacaaagacaucuuc

SEQ ID NO: 1094384 - RNA, 19 nt, Artificial Sequence
  Description of Artificial Sequence: Synthetic oligonucleotide
  Sense strand starting at position 2881 of SEQ ID NO: 915630
agaugucuuugugcauaaa

SEQ ID NO: 1094385 - RNA, 19 nt, Artificial Sequence
  Description of Artificial Sequence: Synthetic oligonucleotide
  Antisense strand to SEQ ID NO: 1094384
uuuaugcacaaagacaucu

SEQ ID NO: 1094386 - RNA, 19 nt, Artificial Sequence
  Description of Artificial Sequence: Synthetic oligonucleotide
  Sense strand starting at position 2882 of SEQ ID NO: 915630
gaugucuuugugcauaaag

SEQ ID NO: 1094387 - RNA, 19 nt, Artificial Sequence
  Description of Artificial Sequence: Synthetic oligonucleotide
  Antisense strand to SEQ ID NO: 1094386
cuuuaugcacaaagacauc

SEQ ID NO: 1094388 - RNA, 19 nt, Artificial Sequence
  Description of Artificial Sequence: Synthetic oligonucleotide
  Sense strand starting at position 2965 of SEQ ID NO: 915630
cugcauugguuucuagaag

SEQ ID NO: 1094389 - RNA, 19 nt, Artificial Sequence
  Description of Artificial Sequence: Synthetic oligonucleotide
  Antisense strand to SEQ ID NO: 1094388
cuucuagaaaccaaugcag

SEQ ID NO: 1094390 - RNA, 19 nt, Artificial Sequence
  Description of Artificial Sequence: Synthetic oligonucleotide
  Sense strand starting at position 3017 of SEQ ID NO: 915630
gcaccuuaccaucaucagu

SEQ ID NO: 1094391 - RNA, 19 nt, Artificial Sequence
  Description of Artificial Sequence: Synthetic oligonucleotide
  Antisense strand to SEQ ID NO: 1094390
acugaugaugguaaggugc

SEQ ID NO: 1094392 - RNA, 19 nt, Artificial Sequence
  Description of Artificial Sequence: Synthetic oligonucleotide
  Sense strand starting at position 3028 of SEQ ID NO: 915630
ucaucaguuccuggagacu

SEQ ID NO: 1094393 - RNA, 19 nt, Artificial Sequence
  Description of Artificial Sequence: Synthetic oligonucleotide
  Antisense strand to SEQ ID NO: 1094392
agucuccaggaacugauga

SEQ ID NO: 1094394 - RNA, 19 nt, Artificial Sequence
  Description of Artificial Sequence: Synthetic oligonucleotide
  Sense strand starting at position 3031 of SEQ ID NO: 915630
ucaguuccuggagacuuau

SEQ ID NO: 1094395 - RNA, 19 nt, Artificial Sequence
  Description of Artificial Sequence: Synthetic oligonucleotide
  Antisense strand to SEQ ID NO: 1094394
auaagucuccaggaacuga

SEQ ID NO: 1094396 - RNA, 19 nt, Artificial Sequence
  Description of Artificial Sequence: Synthetic oligonucleotide
  Sense strand starting at position 3071 of SEQ ID NO: 915630
ucucauaucccauagguag

SEQ ID NO: 1094397 - RNA, 19 nt, Artificial Sequence
  Description of Artificial Sequence: Synthetic oligonucleotide
  Antisense strand to SEQ ID NO: 1094396
cuaccuaugggauaugaga

SEQ ID NO: 1094398 - RNA, 19 nt, Artificial Sequence
  Description of Artificial Sequence: Synthetic oligonucleotide
  Sense strand starting at position 3121 of SEQ ID NO: 915630
ccagaaggucauggguaaa

SEQ ID NO: 1094399 - RNA, 19 nt, Artificial Sequence
  Description of Artificial Sequence: Synthetic oligonucleotide
  Antisense strand to SEQ ID NO: 1094398
uuuacccaugaccuucugg

SEQ ID NO: 1094400 - RNA, 19 nt, Artificial Sequence
  Description of Artificial Sequence: Synthetic oligonucleotide
  Sense strand starting at position 3136 of SEQ ID NO: 915630
uaaagaaacugcucugagu

SEQ ID NO: 1094401 - RNA, 19 nt, Artificial Sequence
  Description of Artificial Sequence: Synthetic oligonucleotide
  Antisense strand to SEQ ID NO: 1094400
acucagagcaguuucuuua

SEQ ID NO: 1094402 - RNA, 19 nt, Artificial Sequence
  Description of Artificial Sequence: Synthetic oligonucleotide
  Sense strand starting at position 3138 of SEQ ID NO: 915630
aagaaacugcucugaguau

SEQ ID NO: 1094403 - RNA, 19 nt, Artificial Sequence
  Description of Artificial Sequence: Synthetic oligonucleotide
  Antisense strand to SEQ ID NO: 1094402
auacucagagcaguuucuu

SEQ ID NO: 1094404 - RNA, 19 nt, Artificial Sequence
  Description of Artificial Sequence: Synthetic oligonucleotide
  Sense strand starting at position 3142 of SEQ ID NO: 915630
aacugcucugaguauaaag

SEQ ID NO: 1094405 - RNA, 19 nt, Artificial Sequence
  Description of Artificial Sequence: Synthetic oligonucleotide
  Antisense strand to SEQ ID NO: 1094404
cuuuauacucagagcaguu

SEQ ID NO: 1094406 - RNA, 19 nt, Artificial Sequence
  Description of Artificial Sequence: Synthetic oligonucleotide
  Sense strand starting at position 3164 of SEQ ID NO: 915630
augauuagccaagaauugu

SEQ ID NO: 1094407 - RNA, 19 nt, Artificial Sequence
  Description of Artificial Sequence: Synthetic oligonucleotide
  Antisense strand to SEQ ID NO: 1094406
acaauucuuggcuaaucau

SEQ ID NO: 1094408 - RNA, 19 nt, Artificial Sequence
  Description of Artificial Sequence: Synthetic oligonucleotide
  Sense strand starting at position 3173 of SEQ ID NO: 915630
caagaauuguaucuuaggu

SEQ ID NO: 1094409 - RNA, 19 nt, Artificial Sequence
  Description of Artificial Sequence: Synthetic oligonucleotide
  Antisense strand to SEQ ID NO: 1094408
accuaagauacaauucuug

SEQ ID NO: 1094410 - RNA, 19 nt, Artificial Sequence
  Description of Artificial Sequence: Synthetic oligonucleotide
  Sense strand starting at position 3183 of SEQ ID NO: 915630
aucuuagguugcucaggaa

SEQ ID NO: 1094411 - RNA, 19 nt, Artificial Sequence
  Description of Artificial Sequence: Synthetic oligonucleotide
  Antisense strand to SEQ ID NO: 1094410
uuccugagcaaccuaagau

SEQ ID NO: 1094412 - RNA, 19 nt, Artificial Sequence
  Description of Artificial Sequence: Synthetic oligonucleotide
  Sense strand starting at position 3234 of SEQ ID NO: 915630
gugccuuucuuggcaauuu

SEQ ID NO: 1094413 - RNA, 19 nt, Artificial Sequence
  Description of Artificial Sequence: Synthetic oligonucleotide
  Antisense strand to SEQ ID NO: 1094412
aaauugccaagaaaggcac

SEQ ID NO: 1094414 - RNA, 19 nt, Artificial Sequence
  Description of Artificial Sequence: Synthetic oligonucleotide
  Sense strand starting at position 3276 of SEQ ID NO: 915630
cugagaucauuagcauugu

SEQ ID NO: 1094415 - RNA, 19 nt, Artificial Sequence
  Description of Artificial Sequence: Synthetic oligonucleotide
  Antisense strand to SEQ ID NO: 1094414
acaaugcuaaugaucucag

SEQ ID NO: 1094416 - RNA, 19 nt, Artificial Sequence
  Description of Artificial Sequence: Synthetic oligonucleotide
  Sense strand starting at position 30 of SEQ ID NO: 915631
agaagaauuugggauguuu

SEQ ID NO: 1094417 - RNA, 19 nt, Artificial Sequence
  Description of Artificial Sequence: Synthetic oligonucleotide
  Antisense strand to SEQ ID NO: 1094416
aaacaucccaaauucuucu

SEQ ID NO: 1094418 - RNA, 19 nt, Artificial Sequence
  Description of Artificial Sequence: Synthetic oligonucleotide
  Sense strand starting at position 108 of SEQ ID NO: 915631
uucuuuaacuauguuguga

SEQ ID NO: 1094419 - RNA, 19 nt, Artificial Sequence
  Description of Artificial Sequence: Synthetic oligonucleotide
  Antisense strand to SEQ ID NO: 1094418
ucacaacauaguuaaagaa

SEQ ID NO: 1094420 - RNA, 19 nt, Artificial Sequence
  Description of Artificial Sequence: Synthetic oligonucleotide
  Sense strand starting at position 293 of SEQ ID NO: 915631
ugcuacgugguauaaacau

SEQ ID NO: 1094421 - RNA, 19 nt, Artificial Sequence
  Description of Artificial Sequence: Synthetic oligonucleotide
  Antisense strand to SEQ ID NO: 1094420
auguuuauaccacguagca

SEQ ID NO: 1094422 - RNA, 19 nt, Artificial Sequence
  Description of Artificial Sequence: Synthetic oligonucleotide
  Sense strand starting at position 492 of SEQ ID NO: 915631
aguugugacccacaaauca

SEQ ID NO: 1094423 - RNA, 19 nt, Artificial Sequence
  Description of Artificial Sequence: Synthetic oligonucleotide
  Antisense strand to SEQ ID NO: 1094422
ugauuugugggucacaacu

SEQ ID NO: 1094424 - RNA, 19 nt, Artificial Sequence
  Description of Artificial Sequence: Synthetic oligonucleotide
  Sense strand starting at position 599 of SEQ ID NO: 915631
gguaaauacugcuuuguga

SEQ ID NO: 1094425 - RNA, 19 nt, Artificial Sequence
  Description of Artificial Sequence: Synthetic oligonucleotide
  Antisense strand to SEQ ID NO: 1094424
ucacaaagcaguauuuacc

SEQ ID NO: 1094426 - RNA, 19 nt, Artificial Sequence
  Description of Artificial Sequence: Synthetic oligonucleotide
  Sense strand starting at position 602 of SEQ ID NO: 915631
aaauacugcuuugugaaag

SEQ ID NO: 1094427 - RNA, 19 nt, Artificial Sequence
  Description of Artificial Sequence: Synthetic oligonucleotide
  Antisense strand to SEQ ID NO: 1094426
cuuucacaaagcaguauuu

SEQ ID NO: 1094428 - RNA, 19 nt, Artificial Sequence
  Description of Artificial Sequence: Synthetic oligonucleotide
  Sense strand starting at position 636 of SEQ ID NO: 915631
acguauguacuagaucuga

SEQ ID NO: 1094429 - RNA, 19 nt, Artificial Sequence
  Description of Artificial Sequence: Synthetic oligonucleotide
  Antisense strand to SEQ ID NO: 1094428
ucagaucuaguacauacgu

SEQ ID NO: 1094430 - RNA, 19 nt, Artificial Sequence
  Description of Artificial Sequence: Synthetic oligonucleotide
  Sense strand starting at position 718 of SEQ ID NO: 915631
ccuagagaucugggucuaa

SEQ ID NO: 1094431 - RNA, 19 nt, Artificial Sequence
  Description of Artificial Sequence: Synthetic oligonucleotide
  Antisense strand to SEQ ID NO: 1094430
uuagacccagaucucuagg

SEQ ID NO: 1094432 - RNA, 19 nt, Artificial Sequence
  Description of Artificial Sequence: Synthetic oligonucleotide
  Sense strand starting at position 722 of SEQ ID NO: 915631
gagaucugggucuaaugca

SEQ ID NO: 1094433 - RNA, 19 nt, Artificial Sequence
  Description of Artificial Sequence: Synthetic oligonucleotide
  Antisense strand to SEQ ID NO: 1094432
ugcauuagacccagaucuc

SEQ ID NO: 1094434 - RNA, 19 nt, Artificial Sequence
  Description of Artificial Sequence: Synthetic oligonucleotide
  Sense strand starting at position 793 of SEQ ID NO: 915631
cucuuugcucaagauagac

SEQ ID NO: 1094435 - RNA, 19 nt, Artificial Sequence
  Description of Artificial Sequence: Synthetic oligonucleotide
  Antisense strand to SEQ ID NO: 1094434
gucuaucuugagcaaagag

SEQ ID NO: 1094436 - RNA, 19 nt, Artificial Sequence
  Description of Artificial Sequence: Synthetic oligonucleotide
  Sense strand starting at position 1036 of SEQ ID NO: 915631
gaaucacugugucccaaga

SEQ ID NO: 1094437 - RNA, 19 nt, Artificial Sequence
  Description of Artificial Sequence: Synthetic oligonucleotide
  Antisense strand to SEQ ID NO: 1094436
ucuugggacacagugauuc

SEQ ID NO: 1094438 - RNA, 19 nt, Artificial Sequence
  Description of Artificial Sequence: Synthetic oligonucleotide
  Sense strand starting at position 1477 of SEQ ID NO: 915631
aggugagacgccuagauuc

SEQ ID NO: 1094439 - RNA, 19 nt, Artificial Sequence
  Description of Artificial Sequence: Synthetic oligonucleotide
  Antisense strand to SEQ ID NO: 1094438
gaaucuaggcgucucaccu

SEQ ID NO: 1094440 - RNA, 19 nt, Artificial Sequence
  Description of Artificial Sequence: Synthetic oligonucleotide
  Sense strand starting at position 2218 of SEQ ID NO: 915631
aggaguacacauugucaua

SEQ ID NO: 1094441 - RNA, 19 nt, Artificial Sequence
  Description of Artificial Sequence: Synthetic oligonucleotide
  Antisense strand to SEQ ID NO: 1094440
uaugacaauguguacuccu

SEQ ID NO: 1094442 - RNA, 19 nt, Artificial Sequence
  Description of Artificial Sequence: Synthetic oligonucleotide
  Sense strand starting at position 2272 of SEQ ID NO: 915631
ggcugaaccuuuccagaaa

SEQ ID NO: 1094443 - RNA, 19 nt, Artificial Sequence
  Description of Artificial Sequence: Synthetic oligonucleotide
  Antisense strand to SEQ ID NO: 1094442
uuucuggaaagguucagcc

SEQ ID NO: 1094444 - RNA, 19 nt, Artificial Sequence
  Description of Artificial Sequence: Synthetic oligonucleotide
  Sense strand starting at position 2307 of SEQ ID NO: 915631
cuggcucuguuacugauuu

SEQ ID NO: 1094445 - RNA, 19 nt, Artificial Sequence
  Description of Artificial Sequence: Synthetic oligonucleotide
  Antisense strand to SEQ ID NO: 1094444
aaaucaguaacagagccag

SEQ ID NO: 1094446 - RNA, 19 nt, Artificial Sequence
  Description of Artificial Sequence: Synthetic oligonucleotide
  Sense strand starting at position 2388 of SEQ ID NO: 915631
agggaacuauacuagauga

SEQ ID NO: 1094447 - RNA, 19 nt, Artificial Sequence
  Description of Artificial Sequence: Synthetic oligonucleotide
  Antisense strand to SEQ ID NO: 1094446
ucaucuaguauaguucccu

SEQ ID NO: 1094448 - RNA, 19 nt, Artificial Sequence
  Description of Artificial Sequence: Synthetic oligonucleotide
  Sense strand starting at position 2466 of SEQ ID NO: 915631
ccgagcuuccaacaccaau

SEQ ID NO: 1094449 - RNA, 19 nt, Artificial Sequence
  Description of Artificial Sequence: Synthetic oligonucleotide
  Antisense strand to SEQ ID NO: 1094448
auugguguuggaagcucgg

SEQ ID NO: 1094450 - RNA, 19 nt, Artificial Sequence
  Description of Artificial Sequence: Synthetic oligonucleotide
  Sense strand starting at position 2642 of SEQ ID NO: 915631
aaaugugaccagggugaga

SEQ ID NO: 1094451 - RNA, 19 nt, Artificial Sequence
  Description of Artificial Sequence: Synthetic oligonucleotide
  Antisense strand to SEQ ID NO: 1094450
ucucacccuggucacauuu

SEQ ID NO: 1094452 - RNA, 19 nt, Artificial Sequence
  Description of Artificial Sequence: Synthetic oligonucleotide
  Sense strand starting at position 2644 of SEQ ID NO: 915631
augugaccagggugagauu

SEQ ID NO: 1094453 - RNA, 19 nt, Artificial Sequence
  Description of Artificial Sequence: Synthetic oligonucleotide
  Antisense strand to SEQ ID NO: 1094452
aaucucacccuggucacau

SEQ ID NO: 1094454 - RNA, 19 nt, Artificial Sequence
  Description of Artificial Sequence: Synthetic oligonucleotide
  Sense strand starting at position 2732 of SEQ ID NO: 915631
ugcauaguauuacuauauc

SEQ ID NO: 1094455 - RNA, 19 nt, Artificial Sequence
  Description of Artificial Sequence: Synthetic oligonucleotide
  Antisense strand to SEQ ID NO: 1094454
gauauaguaauacuaugca

SEQ ID NO: 1094456 - RNA, 19 nt, Artificial Sequence
  Description of Artificial Sequence: Synthetic oligonucleotide
  Sense strand starting at position 2743 of SEQ ID NO: 915631
acuauaucugacuguugag

SEQ ID NO: 1094457 - RNA, 19 nt, Artificial Sequence
  Description of Artificial Sequence: Synthetic oligonucleotide
  Antisense strand to SEQ ID NO: 1094456
cucaacagucagauauagu

SEQ ID NO: 1094458 - RNA, 19 nt, Artificial Sequence
  Description of Artificial Sequence: Synthetic oligonucleotide
  Sense strand starting at position 2871 of SEQ ID NO: 915631
ccugaagugcuaggagaug

SEQ ID NO: 1094459 - RNA, 19 nt, Artificial Sequence
  Description of Artificial Sequence: Synthetic oligonucleotide
  Antisense strand to SEQ ID NO: 1094458
caucuccuagcacuucagg

SEQ ID NO: 1094460 - RNA, 19 nt, Artificial Sequence
  Description of Artificial Sequence: Synthetic oligonucleotide
  Sense strand starting at position 2876 of SEQ ID NO: 915631
agugcuaggagaugaagau

SEQ ID NO: 1094461 - RNA, 19 nt, Artificial Sequence
  Description of Artificial Sequence: Synthetic oligonucleotide
  Antisense strand to SEQ ID NO: 1094460
aucuucaucuccuagcacu

SEQ ID NO: 1094462 - RNA, 19 nt, Artificial Sequence
  Description of Artificial Sequence: Synthetic oligonucleotide
  Sense strand starting at position 2889 of SEQ ID NO: 915631
gaagaugucuuugugcaua

SEQ ID NO: 1094463 - RNA, 19 nt, Artificial Sequence
  Description of Artificial Sequence: Synthetic oligonucleotide
  Antisense strand to SEQ ID NO: 1094462
uaugcacaaagacaucuuc

SEQ ID NO: 1094464 - RNA, 19 nt, Artificial Sequence
  Description of Artificial Sequence: Synthetic oligonucleotide
  Sense strand starting at position 2891 of SEQ ID NO: 915631
agaugucuuugugcauaaa

SEQ ID NO: 1094465 - RNA, 19 nt, Artificial Sequence
  Description of Artificial Sequence: Synthetic oligonucleotide
  Antisense strand to SEQ ID NO: 1094464
uuuaugcacaaagacaucu

SEQ ID NO: 1094466 - RNA, 19 nt, Artificial Sequence
  Description of Artificial Sequence: Synthetic oligonucleotide
  Sense strand starting at position 2892 of SEQ ID NO: 915631
gaugucuuugugcauaaag

SEQ ID NO: 1094467 - RNA, 19 nt, Artificial Sequence
  Description of Artificial Sequence: Synthetic oligonucleotide
  Antisense strand to SEQ ID NO: 1094466
cuuuaugcacaaagacauc

SEQ ID NO: 1094468 - RNA, 19 nt, Artificial Sequence
  Description of Artificial Sequence: Synthetic oligonucleotide
  Sense strand starting at position 2975 of SEQ ID NO: 915631
cugcauugguuucuagaag

SEQ ID NO: 1094469 - RNA, 19 nt, Artificial Sequence
  Description of Artificial Sequence: Synthetic oligonucleotide
  Antisense strand to SEQ ID NO: 1094468
cuucuagaaaccaaugcag

SEQ ID NO: 1094470 - RNA, 19 nt, Artificial Sequence
  Description of Artificial Sequence: Synthetic oligonucleotide
  Sense strand starting at position 3027 of SEQ ID NO: 915631
gcaccuuaccaucaucagu

SEQ ID NO: 1094471 - RNA, 19 nt, Artificial Sequence
  Description of Artificial Sequence: Synthetic oligonucleotide
  Antisense strand to SEQ ID NO: 1094470
acugaugaugguaaggugc

SEQ ID NO: 1094472 - RNA, 19 nt, Artificial Sequence
  Description of Artificial Sequence: Synthetic oligonucleotide
  Sense strand starting at position 3038 of SEQ ID NO: 915631
ucaucaguuccuggagacu

SEQ ID NO: 1094473 - RNA, 19 nt, Artificial Sequence
  Description of Artificial Sequence: Synthetic oligonucleotide
  Antisense strand to SEQ ID NO: 1094472
agucuccaggaacugauga

SEQ ID NO: 1094474 - RNA, 19 nt, Artificial Sequence
  Description of Artificial Sequence: Synthetic oligonucleotide
  Sense strand starting at position 3041 of SEQ ID NO: 915631
ucaguuccuggagacuuau

SEQ ID NO: 1094475 - RNA, 19 nt, Artificial Sequence
  Description of Artificial Sequence: Synthetic oligonucleotide
  Antisense strand to SEQ ID NO: 1094474
auaagucuccaggaacuga

SEQ ID NO: 1094476 - RNA, 19 nt, Artificial Sequence
  Description of Artificial Sequence: Synthetic oligonucleotide
  Sense strand starting at position 3081 of SEQ ID NO: 915631
ucucauaucccauagguag

SEQ ID NO: 1094477 - RNA, 19 nt, Artificial Sequence
  Description of Artificial Sequence: Synthetic oligonucleotide
  Antisense strand to SEQ ID NO: 1094476
cuaccuaugggauaugaga

SEQ ID NO: 1094478 - RNA, 19 nt, Artificial Sequence
  Description of Artificial Sequence: Synthetic oligonucleotide
  Sense strand starting at position 3131 of SEQ ID NO: 915631
ccagaaggucauggguaaa

SEQ ID NO: 1094479 - RNA, 19 nt, Artificial Sequence
  Description of Artificial Sequence: Synthetic oligonucleotide
  Antisense strand to SEQ ID NO: 1094478
uuuacccaugaccuucugg

SEQ ID NO: 1094480 - RNA, 19 nt, Artificial Sequence
  Description of Artificial Sequence: Synthetic oligonucleotide
  Sense strand starting at position 3146 of SEQ ID NO: 915631
uaaagaaacugcucugagu

SEQ ID NO: 1094481 - RNA, 19 nt, Artificial Sequence
  Description of Artificial Sequence: Synthetic oligonucleotide
  Antisense strand to SEQ ID NO: 1094480
acucagagcaguuucuuua

SEQ ID NO: 1094482 - RNA, 19 nt, Artificial Sequence
  Description of Artificial Sequence: Synthetic oligonucleotide
  Sense strand starting at position 3148 of SEQ ID NO: 915631
aagaaacugcucugaguau

SEQ ID NO: 1094483 - RNA, 19 nt, Artificial Sequence
  Description of Artificial Sequence: Synthetic oligonucleotide
  Antisense strand to SEQ ID NO: 1094482
auacucagagcaguuucuu

SEQ ID NO: 1094484 - RNA, 19 nt, Artificial Sequence
  Description of Artificial Sequence: Synthetic oligonucleotide
  Sense strand starting at position 3152 of SEQ ID NO: 915631
aacugcucugaguauaaag

SEQ ID NO: 1094485 - RNA, 19 nt, Artificial Sequence
  Description of Artificial Sequence: Synthetic oligonucleotide
  Antisense strand to SEQ ID NO: 1094484
cuuuauacucagagcaguu

SEQ ID NO: 1094486 - RNA, 19 nt, Artificial Sequence
  Description of Artificial Sequence: Synthetic oligonucleotide
  Sense strand starting at position 3174 of SEQ ID NO: 915631
augauuagccaagaauugu

SEQ ID NO: 1094487 - RNA, 19 nt, Artificial Sequence
  Description of Artificial Sequence: Synthetic oligonucleotide
  Antisense strand to SEQ ID NO: 1094486
acaauucuuggcuaaucau

SEQ ID NO: 1094488 - RNA, 19 nt, Artificial Sequence
  Description of Artificial Sequence: Synthetic oligonucleotide
  Sense strand starting at position 3183 of SEQ ID NO: 915631
caagaauuguaucuuaggu

SEQ ID NO: 1094489 - RNA, 19 nt, Artificial Sequence
  Description of Artificial Sequence: Synthetic oligonucleotide
  Antisense strand to SEQ ID NO: 1094488
accuaagauacaauucuug

SEQ ID NO: 1094490 - RNA, 19 nt, Artificial Sequence
  Description of Artificial Sequence: Synthetic oligonucleotide
  Sense strand starting at position 3193 of SEQ ID NO: 915631
aucuuagguugcucaggaa

SEQ ID NO: 1094491 - RNA, 19 nt, Artificial Sequence
  Description of Artificial Sequence: Synthetic oligonucleotide
  Antisense strand to SEQ ID NO: 1094490
uuccugagcaaccuaagau

SEQ ID NO: 1094492 - RNA, 19 nt, Artificial Sequence
  Description of Artificial Sequence: Synthetic oligonucleotide
  Sense strand starting at position 3244 of SEQ ID NO: 915631
gugccuuucuuggcaauuu

SEQ ID NO: 1094493 - RNA, 19 nt, Artificial Sequence
  Description of Artificial Sequence: Synthetic oligonucleotide
  Antisense strand to SEQ ID NO: 1094492
aaauugccaagaaaggcac

SEQ ID NO: 1094494 - RNA, 19 nt, Artificial Sequence
  Description of Artificial Sequence: Synthetic oligonucleotide
  Sense strand starting at position 3286 of SEQ ID NO: 915631
cugagaucauuagcauugu

SEQ ID NO: 1094495 - RNA, 19 nt, Artificial Sequence
  Description of Artificial Sequence: Synthetic oligonucleotide
  Antisense strand to SEQ ID NO: 1094494
acaaugcuaaugaucucag

SEQ ID NO: 1094496 - RNA, 19 nt, Artificial Sequence
  Description of Artificial Sequence: Synthetic oligonucleotide
  Sense strand starting at position 7 of SEQ ID NO: 915632
aagcuuguauuacugagaa

SEQ ID NO: 1094497 - RNA, 19 nt, Artificial Sequence
  Description of Artificial Sequence: Synthetic oligonucleotide
  Antisense strand to SEQ ID NO: 1094496
uucucaguaauacaagcuu

SEQ ID NO: 1094498 - RNA, 19 nt, Artificial Sequence
  Description of Artificial Sequence: Synthetic oligonucleotide
  Sense strand starting at position 9 of SEQ ID NO: 915632
gcuuguauuacugagaaga

SEQ ID NO: 1094499 - RNA, 19 nt, Artificial Sequence
  Description of Artificial Sequence: Synthetic oligonucleotide
  Antisense strand to SEQ ID NO: 1094498
ucuucucaguaauacaagc

SEQ ID NO: 1094500 - RNA, 19 nt, Artificial Sequence
  Description of Artificial Sequence: Synthetic oligonucleotide
  Sense strand starting at position 69 of SEQ ID NO: 915632
agauaaagguagucagguu

SEQ ID NO: 1094501 - RNA, 19 nt, Artificial Sequence
  Description of Artificial Sequence: Synthetic oligonucleotide
  Antisense strand to SEQ ID NO: 1094500
aaccugacuaccuuuaucu

SEQ ID NO: 1094502 - RNA, 19 nt, Artificial Sequence
  Description of Artificial Sequence: Synthetic oligonucleotide
  Sense strand starting at position 88 of SEQ ID NO: 915632
cuacuauggacaggguaua

SEQ ID NO: 1094503 - RNA, 19 nt, Artificial Sequence
  Description of Artificial Sequence: Synthetic oligonucleotide
  Antisense strand to SEQ ID NO: 1094502
uauacccuguccauaguag

SEQ ID NO: 1094504 - RNA, 19 nt, Artificial Sequence
  Description of Artificial Sequence: Synthetic oligonucleotide
  Sense strand starting at position 129 of SEQ ID NO: 915632
ccgggacaucuuugaguga

SEQ ID NO: 1094505 - RNA, 19 nt, Artificial Sequence
  Description of Artificial Sequence: Synthetic oligonucleotide
  Antisense strand to SEQ ID NO: 1094504
ucacucaaagaugucccgg

SEQ ID NO: 1094506 - RNA, 19 nt, Artificial Sequence
  Description of Artificial Sequence: Synthetic oligonucleotide
  Sense strand starting at position 160 of SEQ ID NO: 915632
auuaaugcuuaugccagaa

SEQ ID NO: 1094507 - RNA, 19 nt, Artificial Sequence
  Description of Artificial Sequence: Synthetic oligonucleotide
  Antisense strand to SEQ ID NO: 1094506
uucuggcauaagcauuaau

SEQ ID NO: 1094508 - RNA, 19 nt, Artificial Sequence
  Description of Artificial Sequence: Synthetic oligonucleotide
  Sense strand starting at position 164 of SEQ ID NO: 915632
augcuuaugccagaacaau

SEQ ID NO: 1094509 - RNA, 19 nt, Artificial Sequence
  Description of Artificial Sequence: Synthetic oligonucleotide
  Antisense strand to SEQ ID NO: 1094508
auuguucuggcauaagcau

SEQ ID NO: 1094510 - RNA, 19 nt, Artificial Sequence
  Description of Artificial Sequence: Synthetic oligonucleotide
  Sense strand starting at position 203 of SEQ ID NO: 915632
ugggcaagccaagauuaau

SEQ ID NO: 1094511 - RNA, 19 nt, Artificial Sequence
  Description of Artificial Sequence: Synthetic oligonucleotide
  Antisense strand to SEQ ID NO: 1094510
auuaaucuuggcuugccca

SEQ ID NO: 1094512 - RNA, 19 nt, Artificial Sequence
  Description of Artificial Sequence: Synthetic oligonucleotide
  Sense strand starting at position 483 of SEQ ID NO: 915632
uguaaaugaugacucaauc

SEQ ID NO: 1094513 - RNA, 19 nt, Artificial Sequence
  Description of Artificial Sequence: Synthetic oligonucleotide
  Antisense strand to SEQ ID NO: 1094512
gauugagucaucauuuaca

SEQ ID NO: 1094514 - RNA, 19 nt, Artificial Sequence
  Description of Artificial Sequence: Synthetic oligonucleotide
  Sense strand starting at position 612 of SEQ ID NO: 915632
cauuauguauuugauggaa

SEQ ID NO: 1094515 - RNA, 19 nt, Artificial Sequence
  Description of Artificial Sequence: Synthetic oligonucleotide
  Antisense strand to SEQ ID NO: 1094514
uuccaucaaauacauaaug

SEQ ID NO: 1094516 - RNA, 19 nt, Artificial Sequence
  Description of Artificial Sequence: Synthetic oligonucleotide
  Sense strand starting at position 802 of SEQ ID NO: 915632
uggaauguguauucuaauu

SEQ ID NO: 1094517 - RNA, 19 nt, Artificial Sequence
  Description of Artificial Sequence: Synthetic oligonucleotide
  Antisense strand to SEQ ID NO: 1094516
aauuagaauacacauucca

SEQ ID NO: 1094518 - RNA, 19 nt, Artificial Sequence
  Description of Artificial Sequence: Synthetic oligonucleotide
  Sense strand starting at position 851 of SEQ ID NO: 915632
cugagagacguucaagcuu

SEQ ID NO: 1094519 - RNA, 19 nt, Artificial Sequence
  Description of Artificial Sequence: Synthetic oligonucleotide
  Antisense strand to SEQ ID NO: 1094518
aagcuugaacgucucucag

SEQ ID NO: 1094520 - RNA, 19 nt, Artificial Sequence
  Description of Artificial Sequence: Synthetic oligonucleotide
  Sense strand starting at position 1108 of SEQ ID NO: 915632
ugggcaaagggucaguuau

SEQ ID NO: 1094521 - RNA, 19 nt, Artificial Sequence
  Description of Artificial Sequence: Synthetic oligonucleotide
  Antisense strand to SEQ ID NO: 1094520
auaacugacccuuugccca

SEQ ID NO: 1094522 - RNA, 19 nt, Artificial Sequence
  Description of Artificial Sequence: Synthetic oligonucleotide
  Sense strand starting at position 1176 of SEQ ID NO: 915632
cggaaucagguuuaucuaa

SEQ ID NO: 1094523 - RNA, 19 nt, Artificial Sequence
  Description of Artificial Sequence: Synthetic oligonucleotide
  Antisense strand to SEQ ID NO: 1094522
uuagauaaaccugauuccg

SEQ ID NO: 1094524 - RNA, 19 nt, Artificial Sequence
  Description of Artificial Sequence: Synthetic oligonucleotide
  Sense strand starting at position 1178 of SEQ ID NO: 915632
gaaucagguuuaucuaagu

SEQ ID NO: 1094525 - RNA, 19 nt, Artificial Sequence
  Description of Artificial Sequence: Synthetic oligonucleotide
  Antisense strand to SEQ ID NO: 1094524
acuuagauaaaccugauuc

SEQ ID NO: 1094526 - RNA, 19 nt, Artificial Sequence
  Description of Artificial Sequence: Synthetic oligonucleotide
  Sense strand starting at position 1183 of SEQ ID NO: 915632
agguuuaucuaaguuggag

SEQ ID NO: 1094527 - RNA, 19 nt, Artificial Sequence
  Description of Artificial Sequence: Synthetic oligonucleotide
  Antisense strand to SEQ ID NO: 1094526
cuccaacuuagauaaaccu

SEQ ID NO: 1094528 - RNA, 19 nt, Artificial Sequence
  Description of Artificial Sequence: Synthetic oligonucleotide
  Sense strand starting at position 1199 of SEQ ID NO: 915632
gagucagggcucugacaca

SEQ ID NO: 1094529 - RNA, 19 nt, Artificial Sequence
  Description of Artificial Sequence: Synthetic oligonucleotide
  Antisense strand to SEQ ID NO: 1094528
ugugucagagcccugacuc

SEQ ID NO: 1094530 - RNA, 19 nt, Artificial Sequence
  Description of Artificial Sequence: Synthetic oligonucleotide
  Sense strand starting at position 1214 of SEQ ID NO: 915632
cacaguacccuugggcaaa

SEQ ID NO: 1094531 - RNA, 19 nt, Artificial Sequence
  Description of Artificial Sequence: Synthetic oligonucleotide
  Antisense strand to SEQ ID NO: 1094530
uuugcccaaggguacugug

SEQ ID NO: 1094532 - RNA, 19 nt, Artificial Sequence
  Description of Artificial Sequence: Synthetic oligonucleotide
  Sense strand starting at position 1287 of SEQ ID NO: 915632
gcuguaucucgagaaucaa

SEQ ID NO: 1094533 - RNA, 19 nt, Artificial Sequence
  Description of Artificial Sequence: Synthetic oligonucleotide
  Antisense strand to SEQ ID NO: 1094532
uugauucucgagauacagc

SEQ ID NO: 1094534 - RNA, 19 nt, Artificial Sequence
  Description of Artificial Sequence: Synthetic oligonucleotide
  Sense strand starting at position 1314 of SEQ ID NO: 915632
ccuagaguccugcaguaac

SEQ ID NO: 1094535 - RNA, 19 nt, Artificial Sequence
  Description of Artificial Sequence: Synthetic oligonucleotide
  Antisense strand to SEQ ID NO: 1094534
guuacugcaggacucuagg

SEQ ID NO: 1094536 - RNA, 19 nt, Artificial Sequence
  Description of Artificial Sequence: Synthetic oligonucleotide
  Sense strand starting at position 1401 of SEQ ID NO: 915632
auuauucugcaagacaguu

SEQ ID NO: 1094537 - RNA, 19 nt, Artificial Sequence
  Description of Artificial Sequence: Synthetic oligonucleotide
  Antisense strand to SEQ ID NO: 1094536
aacugucuugcagaauaau

SEQ ID NO: 1094538 - RNA, 19 nt, Artificial Sequence
  Description of Artificial Sequence: Synthetic oligonucleotide
  Sense strand starting at position 1486 of SEQ ID NO: 915632
aguaguaacguauacggaa

SEQ ID NO: 1094539 - RNA, 19 nt, Artificial Sequence
  Description of Artificial Sequence: Synthetic oligonucleotide
  Antisense strand to SEQ ID NO: 1094538
uuccguauacguuacuacu

SEQ ID NO: 1094540 - RNA, 19 nt, Artificial Sequence
  Description of Artificial Sequence: Synthetic oligonucleotide
  Sense strand starting at position 1984 of SEQ ID NO: 915632
aagcccuucccggaaguua

SEQ ID NO: 1094541 - RNA, 19 nt, Artificial Sequence
  Description of Artificial Sequence: Synthetic oligonucleotide
  Antisense strand to SEQ ID NO: 1094540
uaacuuccgggaagggcuu

SEQ ID NO: 1094542 - RNA, 19 nt, Artificial Sequence
  Description of Artificial Sequence: Synthetic oligonucleotide
  Sense strand starting at position 2145 of SEQ ID NO: 915632
uuagcugaaggguacuaua

SEQ ID NO: 1094543 - RNA, 19 nt, Artificial Sequence
  Description of Artificial Sequence: Synthetic oligonucleotide
  Antisense strand to SEQ ID NO: 1094542
uauaguacccuucagcuaa

SEQ ID NO: 1094544 - RNA, 19 nt, Artificial Sequence
  Description of Artificial Sequence: Synthetic oligonucleotide
  Sense strand starting at position 2154 of SEQ ID NO: 915632
ggguacuauaguugaacca

SEQ ID NO: 1094545 - RNA, 19 nt, Artificial Sequence
  Description of Artificial Sequence: Synthetic oligonucleotide
  Antisense strand to SEQ ID NO: 1094544
ugguucaacuauaguaccc

SEQ ID NO: 1094546 - RNA, 19 nt, Artificial Sequence
  Description of Artificial Sequence: Synthetic oligonucleotide
  Sense strand starting at position 2266 of SEQ ID NO: 915632
caggcuuucccagacugua

SEQ ID NO: 1094547 - RNA, 19 nt, Artificial Sequence
  Description of Artificial Sequence: Synthetic oligonucleotide
  Antisense strand to SEQ ID NO: 1094546
uacagucugggaaagccug

SEQ ID NO: 1094548 - RNA, 19 nt, Artificial Sequence
  Description of Artificial Sequence: Synthetic oligonucleotide
  Sense strand starting at position 2434 of SEQ ID NO: 915632
cucuuucuaguagggaaga

SEQ ID NO: 1094549 - RNA, 19 nt, Artificial Sequence
  Description of Artificial Sequence: Synthetic oligonucleotide
  Antisense strand to SEQ ID NO: 1094548
ucuucccuacuagaaagag

SEQ ID NO: 1094550 - RNA, 19 nt, Artificial Sequence
  Description of Artificial Sequence: Synthetic oligonucleotide
  Sense strand starting at position 2551 of SEQ ID NO: 915632
acauguauaugguucuaac

SEQ ID NO: 1094551 - RNA, 19 nt, Artificial Sequence
  Description of Artificial Sequence: Synthetic oligonucleotide
  Antisense strand to SEQ ID NO: 1094550
guuagaaccauauacaugu

SEQ ID NO: 1094552 - RNA, 19 nt, Artificial Sequence
  Description of Artificial Sequence: Synthetic oligonucleotide
  Sense strand starting at position 2773 of SEQ ID NO: 915632
gucugacuuuauuuguauu

SEQ ID NO: 1094553 - RNA, 19 nt, Artificial Sequence
  Description of Artificial Sequence: Synthetic oligonucleotide
  Antisense strand to SEQ ID NO: 1094552
aauacaaauaaagucagac

SEQ ID NO: 1094554 - RNA, 19 nt, Artificial Sequence
  Description of Artificial Sequence: Synthetic oligonucleotide
  Sense strand starting at position 3155 of SEQ ID NO: 915632
aguauagcuuccuuauaag

SEQ ID NO: 1094555 - RNA, 19 nt, Artificial Sequence
  Description of Artificial Sequence: Synthetic oligonucleotide
  Antisense strand to SEQ ID NO: 1094554
cuuauaaggaagcuauacu

SEQ ID NO: 1094556 - RNA, 19 nt, Artificial Sequence
  Description of Artificial Sequence: Synthetic oligonucleotide
  Sense strand starting at position 3200 of SEQ ID NO: 915632
uccaguuauggcuauauua

SEQ ID NO: 1094557 - RNA, 19 nt, Artificial Sequence
  Description of Artificial Sequence: Synthetic oligonucleotide
  Antisense strand to SEQ ID NO: 1094556
uaauauagccauaacugga

SEQ ID NO: 1094558 - RNA, 19 nt, Artificial Sequence
  Description of Artificial Sequence: Synthetic oligonucleotide
  Sense strand starting at position 3324 of SEQ ID NO: 915632
auaugugugcuccacaaag

SEQ ID NO: 1094559 - RNA, 19 nt, Artificial Sequence
  Description of Artificial Sequence: Synthetic oligonucleotide
  Antisense strand to SEQ ID NO: 1094558
cuuuguggagcacacauau

SEQ ID NO: 1094560 - RNA, 19 nt, Artificial Sequence
  Description of Artificial Sequence: Synthetic oligonucleotide
  Sense strand starting at position 3565 of SEQ ID NO: 915632
agauacaucugggcagacu

SEQ ID NO: 1094561 - RNA, 19 nt, Artificial Sequence
  Description of Artificial Sequence: Synthetic oligonucleotide
  Antisense strand to SEQ ID NO: 1094560
agucugcccagauguaucu

SEQ ID NO: 1094562 - RNA, 19 nt, Artificial Sequence
  Description of Artificial Sequence: Synthetic oligonucleotide
  Sense strand starting at position 3601 of SEQ ID NO: 915632
guugguuggcccagugaag

SEQ ID NO: 1094563 - RNA, 19 nt, Artificial Sequence
  Description of Artificial Sequence: Synthetic oligonucleotide
  Antisense strand to SEQ ID NO: 1094562
cuucacugggccaaccaac

SEQ ID NO: 1094564 - RNA, 19 nt, Artificial Sequence
  Description of Artificial Sequence: Synthetic oligonucleotide
  Sense strand starting at position 3686 of SEQ ID NO: 915632
aguugaucagugugaaaga

SEQ ID NO: 1094565 - RNA, 19 nt, Artificial Sequence
  Description of Artificial Sequence: Synthetic oligonucleotide
  Antisense strand to SEQ ID NO: 1094564
ucuuucacacugaucaacu

SEQ ID NO: 1094566 - RNA, 19 nt, Artificial Sequence
  Description of Artificial Sequence: Synthetic oligonucleotide
  Sense strand starting at position 3697 of SEQ ID NO: 915632
gugaaagauguguguagag

SEQ ID NO: 1094567 - RNA, 19 nt, Artificial Sequence
  Description of Artificial Sequence: Synthetic oligonucleotide
  Antisense strand to SEQ ID NO: 1094566
cucuacacacaucuuucac

SEQ ID NO: 1094568 - RNA, 19 nt, Artificial Sequence
  Description of Artificial Sequence: Synthetic oligonucleotide
  Sense strand starting at position 3781 of SEQ ID NO: 915632
aacugaagaguuggacuuu

SEQ ID NO: 1094569 - RNA, 19 nt, Artificial Sequence
  Description of Artificial Sequence: Synthetic oligonucleotide
  Antisense strand to SEQ ID NO: 1094568
aaaguccaacucuucaguu

SEQ ID NO: 1094570 - RNA, 19 nt, Artificial Sequence
  Description of Artificial Sequence: Synthetic oligonucleotide
  Sense strand starting at position 3846 of SEQ ID NO: 915632
agguaaacuuaccugaauc

SEQ ID NO: 1094571 - RNA, 19 nt, Artificial Sequence
  Description of Artificial Sequence: Synthetic oligonucleotide
  Antisense strand to SEQ ID NO: 1094570
gauucagguaaguuuaccu

SEQ ID NO: 1094572 - RNA, 19 nt, Artificial Sequence
  Description of Artificial Sequence: Synthetic oligonucleotide
  Sense strand starting at position 3854 of SEQ ID NO: 915632
uuaccugaaucugucagaa

SEQ ID NO: 1094573 - RNA, 19 nt, Artificial Sequence
  Description of Artificial Sequence: Synthetic oligonucleotide
  Antisense strand to SEQ ID NO: 1094572
uucugacagauucagguaa

SEQ ID NO: 1094574 - RNA, 19 nt, Artificial Sequence
  Description of Artificial Sequence: Synthetic oligonucleotide
  Sense strand starting at position 3909 of SEQ ID NO: 915632
gucuaaauggccuaugcaa

SEQ ID NO: 1094575 - RNA, 19 nt, Artificial Sequence
  Description of Artificial Sequence: Synthetic oligonucleotide
  Antisense strand to SEQ ID NO: 1094574
uugcauaggccauuuagac

SEQ ID NO: 1094576 - RNA, 19 nt, Artificial Sequence
  Description of Artificial Sequence: Synthetic oligonucleotide
  Sense strand starting at position 19 of SEQ ID NO: 915633
ggaaguaacuuauagaaug

SEQ ID NO: 1094577 - RNA, 19 nt, Artificial Sequence
  Description of Artificial Sequence: Synthetic oligonucleotide
  Antisense strand to SEQ ID NO: 1094576
cauucuauaaguuacuucc

SEQ ID NO: 1094578 - RNA, 19 nt, Artificial Sequence
  Description of Artificial Sequence: Synthetic oligonucleotide
  Sense strand starting at position 30 of SEQ ID NO: 915633
auagaaugcugagaaaggu

SEQ ID NO: 1094579 - RNA, 19 nt, Artificial Sequence
  Description of Artificial Sequence: Synthetic oligonucleotide
  Antisense strand to SEQ ID NO: 1094578
accuuucucagcauucuau

SEQ ID NO: 1094580 - RNA, 19 nt, Artificial Sequence
  Description of Artificial Sequence: Synthetic oligonucleotide
  Sense strand starting at position 90 of SEQ ID NO: 915633
aauguuugcuuggaccaau

SEQ ID NO: 1094581 - RNA, 19 nt, Artificial Sequence
  Description of Artificial Sequence: Synthetic oligonucleotide
  Antisense strand to SEQ ID NO: 1094580
auugguccaagcaaacauu

SEQ ID NO: 1094582 - RNA, 19 nt, Artificial Sequence
  Description of Artificial Sequence: Synthetic oligonucleotide
  Sense strand starting at position 93 of SEQ ID NO: 915633
guuugcuuggaccaauaua

SEQ ID NO: 1094583 - RNA, 19 nt, Artificial Sequence
  Description of Artificial Sequence: Synthetic oligonucleotide
  Antisense strand to SEQ ID NO: 1094582
uauauugguccaagcaaac

SEQ ID NO: 1094584 - RNA, 19 nt, Artificial Sequence
  Description of Artificial Sequence: Synthetic oligonucleotide
  Sense strand starting at position 260 of SEQ ID NO: 915633
cuaauuagauggcaggaaa

SEQ ID NO: 1094585 - RNA, 19 nt, Artificial Sequence
  Description of Artificial Sequence: Synthetic oligonucleotide
  Antisense strand to SEQ ID NO: 1094584
uuuccugccaucuaauuag

SEQ ID NO: 1094586 - RNA, 19 nt, Artificial Sequence
  Description of Artificial Sequence: Synthetic oligonucleotide
  Sense strand starting at position 551 of SEQ ID NO: 915633
acacaagugucgcuugaac

SEQ ID NO: 1094587 - RNA, 19 nt, Artificial Sequence
  Description of Artificial Sequence: Synthetic oligonucleotide
  Antisense strand to SEQ ID NO: 1094586
guucaagcgacacuugugu

SEQ ID NO: 1094588 - RNA, 19 nt, Artificial Sequence
  Description of Artificial Sequence: Synthetic oligonucleotide
  Sense strand starting at position 879 of SEQ ID NO: 915633
ccgaguggcuuugggauau

SEQ ID NO: 1094589 - RNA, 19 nt, Artificial Sequence
  Description of Artificial Sequence: Synthetic oligonucleotide
  Antisense strand to SEQ ID NO: 1094588
auaucccaaagccacucgg

SEQ ID NO: 1094590 - RNA, 19 nt, Artificial Sequence
  Description of Artificial Sequence: Synthetic oligonucleotide
  Sense strand starting at position 889 of SEQ ID NO: 915633
uugggauauuuacacgacu

SEQ ID NO: 1094591 - RNA, 19 nt, Artificial Sequence
  Description of Artificial Sequence: Synthetic oligonucleotide
  Antisense strand to SEQ ID NO: 1094590
agucguguaaauaucccaa

SEQ ID NO: 1094592 - RNA, 19 nt, Artificial Sequence
  Description of Artificial Sequence: Synthetic oligonucleotide
  Sense strand starting at position 941 of SEQ ID NO: 915633
ugcuggguguuggagagau

SEQ ID NO: 1094593 - RNA, 19 nt, Artificial Sequence
  Description of Artificial Sequence: Synthetic oligonucleotide
  Antisense strand to SEQ ID NO: 1094592
aucucuccaacacccagca

SEQ ID NO: 1094594 - RNA, 19 nt, Artificial Sequence
  Description of Artificial Sequence: Synthetic oligonucleotide
  Sense strand starting at position 1003 of SEQ ID NO: 915633
cauagcaucugcugaggua

SEQ ID NO: 1094595 - RNA, 19 nt, Artificial Sequence
  Description of Artificial Sequence: Synthetic oligonucleotide
  Antisense strand to SEQ ID NO: 1094594
uaccucagcagaugcuaug

SEQ ID NO: 1094596 - RNA, 19 nt, Artificial Sequence
  Description of Artificial Sequence: Synthetic oligonucleotide
  Sense strand starting at position 1044 of SEQ ID NO: 915633
gggugagcucuuaguaggu

SEQ ID NO: 1094597 - RNA, 19 nt, Artificial Sequence
  Description of Artificial Sequence: Synthetic oligonucleotide
  Antisense strand to SEQ ID NO: 1094596
accuacuaagagcucaccc

SEQ ID NO: 1094598 - RNA, 19 nt, Artificial Sequence
  Description of Artificial Sequence: Synthetic oligonucleotide
  Sense strand starting at position 1123 of SEQ ID NO: 915633
gugcaaaggcccugggauu

SEQ ID NO: 1094599 - RNA, 19 nt, Artificial Sequence
  Description of Artificial Sequence: Synthetic oligonucleotide
  Antisense strand to SEQ ID NO: 1094598
aaucccagggccuuugcac

SEQ ID NO: 1094600 - RNA, 19 nt, Artificial Sequence
  Description of Artificial Sequence: Synthetic oligonucleotide
  Sense strand starting at position 1165 of SEQ ID NO: 915633
gcgucuuugugacagggau

SEQ ID NO: 1094601 - RNA, 19 nt, Artificial Sequence
  Description of Artificial Sequence: Synthetic oligonucleotide
  Antisense strand to SEQ ID NO: 1094600
aucccugucacaaagacgc

SEQ ID NO: 1094602 - RNA, 19 nt, Artificial Sequence
  Description of Artificial Sequence: Synthetic oligonucleotide
  Sense strand starting at position 1304 of SEQ ID NO: 915633
guacgucauccaggugaug

SEQ ID NO: 1094603 - RNA, 19 nt, Artificial Sequence
  Description of Artificial Sequence: Synthetic oligonucleotide
  Antisense strand to SEQ ID NO: 1094602
caucaccuggaugacguac

SEQ ID NO: 1094604 - RNA, 19 nt, Artificial Sequence
  Description of Artificial Sequence: Synthetic oligonucleotide
  Sense strand starting at position 1550 of SEQ ID NO: 915633
gacagcuugccagaagcau

SEQ ID NO: 1094605 - RNA, 19 nt, Artificial Sequence
  Description of Artificial Sequence: Synthetic oligonucleotide
  Antisense strand to SEQ ID NO: 1094604
augcuucuggcaagcuguc

SEQ ID NO: 1094606 - RNA, 19 nt, Artificial Sequence
  Description of Artificial Sequence: Synthetic oligonucleotide
  Sense strand starting at position 1572 of SEQ ID NO: 915633
gugucaagucuggaaggga

SEQ ID NO: 1094607 - RNA, 19 nt, Artificial Sequence
  Description of Artificial Sequence: Synthetic oligonucleotide
  Antisense strand to SEQ ID NO: 1094606
ucccuuccagacuugacac

SEQ ID NO: 1094608 - RNA, 19 nt, Artificial Sequence
  Description of Artificial Sequence: Synthetic oligonucleotide
  Sense strand starting at position 2231 of SEQ ID NO: 915633
gugggaagguucugacguu

SEQ ID NO: 1094609 - RNA, 19 nt, Artificial Sequence
  Description of Artificial Sequence: Synthetic oligonucleotide
  Antisense strand to SEQ ID NO: 1094608
aacgucagaaccuucccac

SEQ ID NO: 1094610 - RNA, 19 nt, Artificial Sequence
  Description of Artificial Sequence: Synthetic oligonucleotide
  Sense strand starting at position 2318 of SEQ ID NO: 915633
ccagccauuccugaucgau

SEQ ID NO: 1094611 - RNA, 19 nt, Artificial Sequence
  Description of Artificial Sequence: Synthetic oligonucleotide
  Antisense strand to SEQ ID NO: 1094610
aucgaucaggaauggcugg

SEQ ID NO: 1094612 - RNA, 19 nt, Artificial Sequence
  Description of Artificial Sequence: Synthetic oligonucleotide
  Sense strand starting at position 2364 of SEQ ID NO: 915633
gugggagagugguucuuga

SEQ ID NO: 1094613 - RNA, 19 nt, Artificial Sequence
  Description of Artificial Sequence: Synthetic oligonucleotide
  Antisense strand to SEQ ID NO: 1094612
ucaagaaccacucucccac

SEQ ID NO: 1094614 - RNA, 19 nt, Artificial Sequence
  Description of Artificial Sequence: Synthetic oligonucleotide
  Sense strand starting at position 2367 of SEQ ID NO: 915633
ggagagugguucuugagga

SEQ ID NO: 1094615 - RNA, 19 nt, Artificial Sequence
  Description of Artificial Sequence: Synthetic oligonucleotide
  Antisense strand to SEQ ID NO: 1094614
uccucaagaaccacucucc

SEQ ID NO: 1094616 - RNA, 19 nt, Artificial Sequence
  Description of Artificial Sequence: Synthetic oligonucleotide
  Sense strand starting at position 2368 of SEQ ID NO: 915633
gagagugguucuugaggac

SEQ ID NO: 1094617 - RNA, 19 nt, Artificial Sequence
  Description of Artificial Sequence: Synthetic oligonucleotide
  Antisense strand to SEQ ID NO: 1094616
guccucaagaaccacucuc

SEQ ID NO: 1094618 - RNA, 19 nt, Artificial Sequence
  Description of Artificial Sequence: Synthetic oligonucleotide
  Sense strand starting at position 2554 of SEQ ID NO: 915633
gcgcaauugucaggagcag

SEQ ID NO: 1094619 - RNA, 19 nt, Artificial Sequence
  Description of Artificial Sequence: Synthetic oligonucleotide
  Antisense strand to SEQ ID NO: 1094618
cugcuccugacaauugcgc

SEQ ID NO: 1094620 - RNA, 19 nt, Artificial Sequence
  Description of Artificial Sequence: Synthetic oligonucleotide
  Sense strand starting at position 2555 of SEQ ID NO: 915633
cgcaauugucaggagcagu

SEQ ID NO: 1094621 - RNA, 19 nt, Artificial Sequence
  Description of Artificial Sequence: Synthetic oligonucleotide
  Antisense strand to SEQ ID NO: 1094620
acugcuccugacaauugcg

SEQ ID NO: 1094622 - RNA, 19 nt, Artificial Sequence
  Description of Artificial Sequence: Synthetic oligonucleotide
  Sense strand starting at position 2769 of SEQ ID NO: 915633
aucucuuccgccugugaug

SEQ ID NO: 1094623 - RNA, 19 nt, Artificial Sequence
  Description of Artificial Sequence: Synthetic oligonucleotide
  Antisense strand to SEQ ID NO: 1094622
caucacaggcggaagagau

SEQ ID NO: 1094624 - RNA, 19 nt, Artificial Sequence
  Description of Artificial Sequence: Synthetic oligonucleotide
  Sense strand starting at position 3062 of SEQ ID NO: 915633
cugccaguuccuugguuga

SEQ ID NO: 1094625 - RNA, 19 nt, Artificial Sequence
  Description of Artificial Sequence: Synthetic oligonucleotide
  Antisense strand to SEQ ID NO: 1094624
ucaaccaaggaacuggcag

SEQ ID NO: 1094626 - RNA, 19 nt, Artificial Sequence
  Description of Artificial Sequence: Synthetic oligonucleotide
  Sense strand starting at position 3064 of SEQ ID NO: 915633
gccaguuccuugguugaga

SEQ ID NO: 1094627 - RNA, 19 nt, Artificial Sequence
  Description of Artificial Sequence: Synthetic oligonucleotide
  Antisense strand to SEQ ID NO: 1094626
ucucaaccaaggaacuggc

SEQ ID NO: 1094628 - RNA, 19 nt, Artificial Sequence
  Description of Artificial Sequence: Synthetic oligonucleotide
  Sense strand starting at position 3066 of SEQ ID NO: 915633
caguuccuugguugagagu

SEQ ID NO: 1094629 - RNA, 19 nt, Artificial Sequence
  Description of Artificial Sequence: Synthetic oligonucleotide
  Antisense strand to SEQ ID NO: 1094628
acucucaaccaaggaacug

SEQ ID NO: 1094630 - RNA, 19 nt, Artificial Sequence
  Description of Artificial Sequence: Synthetic oligonucleotide
  Sense strand starting at position 3079 of SEQ ID NO: 915633
gagagugcucgcuggccuu

SEQ ID NO: 1094631 - RNA, 19 nt, Artificial Sequence
  Description of Artificial Sequence: Synthetic oligonucleotide
  Antisense strand to SEQ ID NO: 1094630
aaggccagcgagcacucuc

SEQ ID NO: 1094632 - RNA, 19 nt, Artificial Sequence
  Description of Artificial Sequence: Synthetic oligonucleotide
  Sense strand starting at position 3191 of SEQ ID NO: 915633
ggccuugauuccuaagagg

SEQ ID NO: 1094633 - RNA, 19 nt, Artificial Sequence
  Description of Artificial Sequence: Synthetic oligonucleotide
  Antisense strand to SEQ ID NO: 1094632
ccucuuaggaaucaaggcc

SEQ ID NO: 1094634 - RNA, 19 nt, Artificial Sequence
  Description of Artificial Sequence: Synthetic oligonucleotide
  Sense strand starting at position 3294 of SEQ ID NO: 915633
ggcucaaucccuugugucu

SEQ ID NO: 1094635 - RNA, 19 nt, Artificial Sequence
  Description of Artificial Sequence: Synthetic oligonucleotide
  Antisense strand to SEQ ID NO: 1094634
agacacaagggauugagcc

SEQ ID NO: 1094636 - RNA, 19 nt, Artificial Sequence
  Description of Artificial Sequence: Synthetic oligonucleotide
  Sense strand starting at position 3303 of SEQ ID NO: 915633
ccuugugucucacaucuca

SEQ ID NO: 1094637 - RNA, 19 nt, Artificial Sequence
  Description of Artificial Sequence: Synthetic oligonucleotide
  Antisense strand to SEQ ID NO: 1094636
ugagaugugagacacaagg

SEQ ID NO: 1094638 - RNA, 19 nt, Artificial Sequence
  Description of Artificial Sequence: Synthetic oligonucleotide
  Sense strand starting at position 3467 of SEQ ID NO: 915633
augggagugcucuguguga

SEQ ID NO: 1094639 - RNA, 19 nt, Artificial Sequence
  Description of Artificial Sequence: Synthetic oligonucleotide
  Antisense strand to SEQ ID NO: 1094638
ucacacagagcacucccau

SEQ ID NO: 1094640 - RNA, 19 nt, Artificial Sequence
  Description of Artificial Sequence: Synthetic oligonucleotide
  Sense strand starting at position 3469 of SEQ ID NO: 915633
gggagugcucugugugagu

SEQ ID NO: 1094641 - RNA, 19 nt, Artificial Sequence
  Description of Artificial Sequence: Synthetic oligonucleotide
  Antisense strand to SEQ ID NO: 1094640
acucacacagagcacuccc

SEQ ID NO: 1094642 - RNA, 19 nt, Artificial Sequence
  Description of Artificial Sequence: Synthetic oligonucleotide
  Sense strand starting at position 3473 of SEQ ID NO: 915633
gugcucugugugaguugga

SEQ ID NO: 1094643 - RNA, 19 nt, Artificial Sequence
  Description of Artificial Sequence: Synthetic oligonucleotide
  Antisense strand to SEQ ID NO: 1094642
uccaacucacacagagcac

SEQ ID NO: 1094644 - RNA, 19 nt, Artificial Sequence
  Description of Artificial Sequence: Synthetic oligonucleotide
  Sense strand starting at position 3593 of SEQ ID NO: 915633
gauccauuccaguacuggu

SEQ ID NO: 1094645 - RNA, 19 nt, Artificial Sequence
  Description of Artificial Sequence: Synthetic oligonucleotide
  Antisense strand to SEQ ID NO: 1094644
accaguacuggaauggauc

SEQ ID NO: 1094646 - RNA, 19 nt, Artificial Sequence
  Description of Artificial Sequence: Synthetic oligonucleotide
  Sense strand starting at position 3689 of SEQ ID NO: 915633
uuugaucugugugauggga

SEQ ID NO: 1094647 - RNA, 19 nt, Artificial Sequence
  Description of Artificial Sequence: Synthetic oligonucleotide
  Antisense strand to SEQ ID NO: 1094646
ucccaucacacagaucaaa

SEQ ID NO: 1094648 - RNA, 19 nt, Artificial Sequence
  Description of Artificial Sequence: Synthetic oligonucleotide
  Sense strand starting at position 3691 of SEQ ID NO: 915633
ugaucugugugaugggaaa

SEQ ID NO: 1094649 - RNA, 19 nt, Artificial Sequence
  Description of Artificial Sequence: Synthetic oligonucleotide
  Antisense strand to SEQ ID NO: 1094648
uuucccaucacacagauca

SEQ ID NO: 1094650 - RNA, 19 nt, Artificial Sequence
  Description of Artificial Sequence: Synthetic oligonucleotide
  Sense strand starting at position 3693 of SEQ ID NO: 915633
aucugugugaugggaaaca

SEQ ID NO: 1094651 - RNA, 19 nt, Artificial Sequence
  Description of Artificial Sequence: Synthetic oligonucleotide
  Antisense strand to SEQ ID NO: 1094650
uguuucccaucacacagau

SEQ ID NO: 1094652 - RNA, 19 nt, Artificial Sequence
  Description of Artificial Sequence: Synthetic oligonucleotide
  Sense strand starting at position 449 of SEQ ID NO: 915634
gugggaaucaguugcuuag

SEQ ID NO: 1094653 - RNA, 19 nt, Artificial Sequence
  Description of Artificial Sequence: Synthetic oligonucleotide
  Antisense strand to SEQ ID NO: 1094652
cuaagcaacugauucccac

SEQ ID NO: 1094654 - RNA, 19 nt, Artificial Sequence
  Description of Artificial Sequence: Synthetic oligonucleotide
  Sense strand starting at position 456 of SEQ ID NO: 915634
ucaguugcuuagcucgaaa

SEQ ID NO: 1094655 - RNA, 19 nt, Artificial Sequence
  Description of Artificial Sequence: Synthetic oligonucleotide
  Antisense strand to SEQ ID NO: 1094654
uuucgagcuaagcaacuga

SEQ ID NO: 1094656 - RNA, 19 nt, Artificial Sequence
  Description of Artificial Sequence: Synthetic oligonucleotide
  Sense strand starting at position 535 of SEQ ID NO: 915634
cugggucugguuuacuuaa

SEQ ID NO: 1094657 - RNA, 19 nt, Artificial Sequence
  Description of Artificial Sequence: Synthetic oligonucleotide
  Antisense strand to SEQ ID NO: 1094656
uuaaguaaaccagacccag

SEQ ID NO: 1094658 - RNA, 19 nt, Artificial Sequence
  Description of Artificial Sequence: Synthetic oligonucleotide
  Sense strand starting at position 537 of SEQ ID NO: 915634
gggucugguuuacuuaacu

SEQ ID NO: 1094659 - RNA, 19 nt, Artificial Sequence
  Description of Artificial Sequence: Synthetic oligonucleotide
  Antisense strand to SEQ ID NO: 1094658
aguuaaguaaaccagaccc

SEQ ID NO: 1094660 - RNA, 19 nt, Artificial Sequence
  Description of Artificial Sequence: Synthetic oligonucleotide
  Sense strand starting at position 729 of SEQ ID NO: 915634
gcugagauuggguguguga

SEQ ID NO: 1094661 - RNA, 19 nt, Artificial Sequence
  Description of Artificial Sequence: Synthetic oligonucleotide
  Antisense strand to SEQ ID NO: 1094660
ucacacacccaaucucagc

SEQ ID NO: 1094662 - RNA, 19 nt, Artificial Sequence
  Description of Artificial Sequence: Synthetic oligonucleotide
  Sense strand starting at position 969 of SEQ ID NO: 915634
agagguaaaguccaauguu

SEQ ID NO: 1094663 - RNA, 19 nt, Artificial Sequence
  Description of Artificial Sequence: Synthetic oligonucleotide
  Antisense strand to SEQ ID NO: 1094662
aacauuggacuuuaccucu

SEQ ID NO: 1094664 - RNA, 19 nt, Artificial Sequence
  Description of Artificial Sequence: Synthetic oligonucleotide
  Sense strand starting at position 972 of SEQ ID NO: 915634
gguaaaguccaauguuaug

SEQ ID NO: 1094665 - RNA, 19 nt, Artificial Sequence
  Description of Artificial Sequence: Synthetic oligonucleotide
  Antisense strand to SEQ ID NO: 1094664
cauaacauuggacuuuacc

SEQ ID NO: 1094666 - RNA, 19 nt, Artificial Sequence
  Description of Artificial Sequence: Synthetic oligonucleotide
  Sense strand starting at position 983 of SEQ ID NO: 915634
auguuaugugcccagcaca

SEQ ID NO: 1094667 - RNA, 19 nt, Artificial Sequence
  Description of Artificial Sequence: Synthetic oligonucleotide
  Antisense strand to SEQ ID NO: 1094666
ugugcugggcacauaacau

SEQ ID NO: 1094668 - RNA, 19 nt, Artificial Sequence
  Description of Artificial Sequence: Synthetic oligonucleotide
  Sense strand starting at position 1014 of SEQ ID NO: 915634
agaggaggguugugucuga

SEQ ID NO: 1094669 - RNA, 19 nt, Artificial Sequence
  Description of Artificial Sequence: Synthetic oligonucleotide
  Antisense strand to SEQ ID NO: 1094668
ucagacacaacccuccucu

SEQ ID NO: 1094670 - RNA, 19 nt, Artificial Sequence
  Description of Artificial Sequence: Synthetic oligonucleotide
  Sense strand starting at position 1048 of SEQ ID NO: 915634
ggcugugcuggccaaauaa

SEQ ID NO: 1094671 - RNA, 19 nt, Artificial Sequence
  Description of Artificial Sequence: Synthetic oligonucleotide
  Antisense strand to SEQ ID NO: 1094670
uuauuuggccagcacagcc

SEQ ID NO: 1094672 - RNA, 19 nt, Artificial Sequence
  Description of Artificial Sequence: Synthetic oligonucleotide
  Sense strand starting at position 1571 of SEQ ID NO: 915634
aguuguguggucucagcuu

SEQ ID NO: 1094673 - RNA, 19 nt, Artificial Sequence
  Description of Artificial Sequence: Synthetic oligonucleotide
  Antisense strand to SEQ ID NO: 1094672
aagcugagaccacacaacu

SEQ ID NO: 1094674 - RNA, 19 nt, Artificial Sequence
  Description of Artificial Sequence: Synthetic oligonucleotide
  Sense strand starting at position 1668 of SEQ ID NO: 915634
ugggcuguguugguaaaca

SEQ ID NO: 1094675 - RNA, 19 nt, Artificial Sequence
  Description of Artificial Sequence: Synthetic oligonucleotide
  Antisense strand to SEQ ID NO: 1094674
uguuuaccaacacagccca

SEQ ID NO: 1094676 - RNA, 19 nt, Artificial Sequence
  Description of Artificial Sequence: Synthetic oligonucleotide
  Sense strand starting at position 2115 of SEQ ID NO: 915634
cgcuuaaucccggagagga

SEQ ID NO: 1094677 - RNA, 19 nt, Artificial Sequence
  Description of Artificial Sequence: Synthetic oligonucleotide
  Antisense strand to SEQ ID NO: 1094676
uccucuccgggauuaagcg

SEQ ID NO: 1094678 - RNA, 19 nt, Artificial Sequence
  Description of Artificial Sequence: Synthetic oligonucleotide
  Sense strand starting at position 2292 of SEQ ID NO: 915634
ccaacauucgcaggcucau

SEQ ID NO: 1094679 - RNA, 19 nt, Artificial Sequence
  Description of Artificial Sequence: Synthetic oligonucleotide
  Antisense strand to SEQ ID NO: 1094678
augagccugcgaauguugg

SEQ ID NO: 1094680 - RNA, 19 nt, Artificial Sequence
  Description of Artificial Sequence: Synthetic oligonucleotide
  Sense strand starting at position 2746 of SEQ ID NO: 915634
cagcucuggugaucccuaa

SEQ ID NO: 1094681 - RNA, 19 nt, Artificial Sequence
  Description of Artificial Sequence: Synthetic oligonucleotide
  Antisense strand to SEQ ID NO: 1094680
uuagggaucaccagagcug

SEQ ID NO: 1094682 - RNA, 19 nt, Artificial Sequence
  Description of Artificial Sequence: Synthetic oligonucleotide
  Sense strand starting at position 2964 of SEQ ID NO: 915634
gcaguaagugccugggaga

SEQ ID NO: 1094683 - RNA, 19 nt, Artificial Sequence
  Description of Artificial Sequence: Synthetic oligonucleotide
  Antisense strand to SEQ ID NO: 1094682
ucucccaggcacuuacugc

SEQ ID NO: 1094684 - RNA, 19 nt, Artificial Sequence
  Description of Artificial Sequence: Synthetic oligonucleotide
  Sense strand starting at position 3020 of SEQ ID NO: 915634
gacugacccgcuuggaaua

SEQ ID NO: 1094685 - RNA, 19 nt, Artificial Sequence
  Description of Artificial Sequence: Synthetic oligonucleotide
  Antisense strand to SEQ ID NO: 1094684
uauuccaagcgggucaguc

SEQ ID NO: 1094686 - RNA, 19 nt, Artificial Sequence
  Description of Artificial Sequence: Synthetic oligonucleotide
  Sense strand starting at position 3027 of SEQ ID NO: 915634
ccgcuuggaauagaaguau

SEQ ID NO: 1094687 - RNA, 19 nt, Artificial Sequence
  Description of Artificial Sequence: Synthetic oligonucleotide
  Antisense strand to SEQ ID NO: 1094686
auacuucuauuccaagcgg

SEQ ID NO: 1094688 - RNA, 19 nt, Artificial Sequence
  Description of Artificial Sequence: Synthetic oligonucleotide
  Sense strand starting at position 3082 of SEQ ID NO: 915634
cggcgguuacgucugggaa

SEQ ID NO: 1094689 - RNA, 19 nt, Artificial Sequence
  Description of Artificial Sequence: Synthetic oligonucleotide
  Antisense strand to SEQ ID NO: 1094688
uucccagacguaaccgccg

SEQ ID NO: 1094690 - RNA, 19 nt, Artificial Sequence
  Description of Artificial Sequence: Synthetic oligonucleotide
  Sense strand starting at position 3083 of SEQ ID NO: 915634
ggcgguuacgucugggaaa

SEQ ID NO: 1094691 - RNA, 19 nt, Artificial Sequence
  Description of Artificial Sequence: Synthetic oligonucleotide
  Antisense strand to SEQ ID NO: 1094690
uuucccagacguaaccgcc

SEQ ID NO: 1094692 - RNA, 19 nt, Artificial Sequence
  Description of Artificial Sequence: Synthetic oligonucleotide
  Sense strand starting at position 3307 of SEQ ID NO: 915634
gauggcaaugccuggucua

SEQ ID NO: 1094693 - RNA, 19 nt, Artificial Sequence
  Description of Artificial Sequence: Synthetic oligonucleotide
  Antisense strand to SEQ ID NO: 1094692
uagaccaggcauugccauc

SEQ ID NO: 1094694 - RNA, 19 nt, Artificial Sequence
  Description of Artificial Sequence: Synthetic oligonucleotide
  Sense strand starting at position 3310 of SEQ ID NO: 915634
ggcaaugccuggucuagga

SEQ ID NO: 1094695 - RNA, 19 nt, Artificial Sequence
  Description of Artificial Sequence: Synthetic oligonucleotide
  Antisense strand to SEQ ID NO: 1094694
uccuagaccaggcauugcc

SEQ ID NO: 1094696 - RNA, 19 nt, Artificial Sequence
  Description of Artificial Sequence: Synthetic oligonucleotide
  Sense strand starting at position 3327 of SEQ ID NO: 915634
gaaggaggcccagguguua

SEQ ID NO: 1094697 - RNA, 19 nt, Artificial Sequence
  Description of Artificial Sequence: Synthetic oligonucleotide
  Antisense strand to SEQ ID NO: 1094696
uaacaccugggccuccuuc

SEQ ID NO: 1094698 - RNA, 19 nt, Artificial Sequence
  Description of Artificial Sequence: Synthetic oligonucleotide
  Sense strand starting at position 3338 of SEQ ID NO: 915634
agguguuagaccugagaaa

SEQ ID NO: 1094699 - RNA, 19 nt, Artificial Sequence
  Description of Artificial Sequence: Synthetic oligonucleotide
  Antisense strand to SEQ ID NO: 1094698
uuucucaggucuaacaccu

SEQ ID NO: 1094700 - RNA, 19 nt, Artificial Sequence
  Description of Artificial Sequence: Synthetic oligonucleotide
  Sense strand starting at position 3418 of SEQ ID NO: 915634
gaaugucuaccaugcagua

SEQ ID NO: 1094701 - RNA, 19 nt, Artificial Sequence
  Description of Artificial Sequence: Synthetic oligonucleotide
  Antisense strand to SEQ ID NO: 1094700
uacugcaugguagacauuc

SEQ ID NO: 1094702 - RNA, 19 nt, Artificial Sequence
  Description of Artificial Sequence: Synthetic oligonucleotide
  Sense strand starting at position 3485 of SEQ ID NO: 915634
ccaggaaacuuguucuuuc

SEQ ID NO: 1094703 - RNA, 19 nt, Artificial Sequence
  Description of Artificial Sequence: Synthetic oligonucleotide
  Antisense strand to SEQ ID NO: 1094702
gaaagaacaaguuuccugg

SEQ ID NO: 1094704 - RNA, 19 nt, Artificial Sequence
  Description of Artificial Sequence: Synthetic oligonucleotide
  Sense strand starting at position 3488 of SEQ ID NO: 915634
ggaaacuuguucuuucgaa

SEQ ID NO: 1094705 - RNA, 19 nt, Artificial Sequence
  Description of Artificial Sequence: Synthetic oligonucleotide
  Antisense strand to SEQ ID NO: 1094704
uucgaaagaacaaguuucc

SEQ ID NO: 1094706 - RNA, 19 nt, Artificial Sequence
  Description of Artificial Sequence: Synthetic oligonucleotide
  Sense strand starting at position 3489 of SEQ ID NO: 915634
gaaacuuguucuuucgaag

SEQ ID NO: 1094707 - RNA, 19 nt, Artificial Sequence
  Description of Artificial Sequence: Synthetic oligonucleotide
  Antisense strand to SEQ ID NO: 1094706
cuucgaaagaacaaguuuc

SEQ ID NO: 1094708 - RNA, 19 nt, Artificial Sequence
  Description of Artificial Sequence: Synthetic oligonucleotide
  Sense strand starting at position 3492 of SEQ ID NO: 915634
acuuguucuuucgaagaag

SEQ ID NO: 1094709 - RNA, 19 nt, Artificial Sequence
  Description of Artificial Sequence: Synthetic oligonucleotide
  Antisense strand to SEQ ID NO: 1094708
cuucuucgaaagaacaagu

SEQ ID NO: 1094710 - RNA, 19 nt, Artificial Sequence
  Description of Artificial Sequence: Synthetic oligonucleotide
  Sense strand starting at position 3495 of SEQ ID NO: 915634
uguucuuucgaagaaguag

SEQ ID NO: 1094711 - RNA, 19 nt, Artificial Sequence
  Description of Artificial Sequence: Synthetic oligonucleotide
  Antisense strand to SEQ ID NO: 1094710
cuacuucuucgaaagaaca

SEQ ID NO: 1094712 - RNA, 19 nt, Artificial Sequence
  Description of Artificial Sequence: Synthetic oligonucleotide
  Sense strand starting at position 3571 of SEQ ID NO: 915634
gggucaaggucucugaacu

SEQ ID NO: 1094713 - RNA, 19 nt, Artificial Sequence
  Description of Artificial Sequence: Synthetic oligonucleotide
  Antisense strand to SEQ ID NO: 1094712
aguucagagaccuugaccc

SEQ ID NO: 1094714 - RNA, 19 nt, Artificial Sequence
  Description of Artificial Sequence: Synthetic oligonucleotide
  Sense strand starting at position 3572 of SEQ ID NO: 915634
ggucaaggucucugaacug

SEQ ID NO: 1094715 - RNA, 19 nt, Artificial Sequence
  Description of Artificial Sequence: Synthetic oligonucleotide
  Antisense strand to SEQ ID NO: 1094714
caguucagagaccuugacc

SEQ ID NO: 1094716 - RNA, 19 nt, Artificial Sequence
  Description of Artificial Sequence: Synthetic oligonucleotide
  Sense strand starting at position 3577 of SEQ ID NO: 915634
aggucucugaacugaguuu

SEQ ID NO: 1094717 - RNA, 19 nt, Artificial Sequence
  Description of Artificial Sequence: Synthetic oligonucleotide
  Antisense strand to SEQ ID NO: 1094716
aaacucaguucagagaccu

SEQ ID NO: 1094718 - RNA, 19 nt, Artificial Sequence
  Description of Artificial Sequence: Synthetic oligonucleotide
  Sense strand starting at position 3649 of SEQ ID NO: 915634
cugguuuccucacugcaaa

SEQ ID NO: 1094719 - RNA, 19 nt, Artificial Sequence
  Description of Artificial Sequence: Synthetic oligonucleotide
  Antisense strand to SEQ ID NO: 1094718
uuugcagugaggaaaccag

SEQ ID NO: 1094720 - RNA, 19 nt, Artificial Sequence
  Description of Artificial Sequence: Synthetic oligonucleotide
  Sense strand starting at position 3650 of SEQ ID NO: 915634
ugguuuccucacugcaaau

SEQ ID NO: 1094721 - RNA, 19 nt, Artificial Sequence
  Description of Artificial Sequence: Synthetic oligonucleotide
  Antisense strand to SEQ ID NO: 1094720
auuugcagugaggaaacca

SEQ ID NO: 1094722 - RNA, 19 nt, Artificial Sequence
  Description of Artificial Sequence: Synthetic oligonucleotide
  Sense strand starting at position 3652 of SEQ ID NO: 915634
guuuccucacugcaaauga

SEQ ID NO: 1094723 - RNA, 19 nt, Artificial Sequence
  Description of Artificial Sequence: Synthetic oligonucleotide
  Antisense strand to SEQ ID NO: 1094722
ucauuugcagugaggaaac

SEQ ID NO: 1094724 - RNA, 19 nt, Artificial Sequence
  Description of Artificial Sequence: Synthetic oligonucleotide
  Sense strand starting at position 3672 of SEQ ID NO: 915634
gugaaauccuuccacagua

SEQ ID NO: 1094725 - RNA, 19 nt, Artificial Sequence
  Description of Artificial Sequence: Synthetic oligonucleotide
  Antisense strand to SEQ ID NO: 1094724
uacuguggaaggauuucac

SEQ ID NO: 1094726 - RNA, 19 nt, Artificial Sequence
  Description of Artificial Sequence: Synthetic oligonucleotide
  Sense strand starting at position 3887 of SEQ ID NO: 915634
cugugucacccucguguga

SEQ ID NO: 1094727 - RNA, 19 nt, Artificial Sequence
  Description of Artificial Sequence: Synthetic oligonucleotide
  Antisense strand to SEQ ID NO: 1094726
ucacacgagggugacacag

SEQ ID NO: 1094728 - RNA, 19 nt, Artificial Sequence
  Description of Artificial Sequence: Synthetic oligonucleotide
  Sense strand starting at position 3889 of SEQ ID NO: 915634
gugucacccucgugugacu

SEQ ID NO: 1094729 - RNA, 19 nt, Artificial Sequence
  Description of Artificial Sequence: Synthetic oligonucleotide
  Antisense strand to SEQ ID NO: 1094728
agucacacgagggugacac

SEQ ID NO: 1094730 - RNA, 19 nt, Artificial Sequence
  Description of Artificial Sequence: Synthetic oligonucleotide
  Sense strand starting at position 3953 of SEQ ID NO: 915634
gccugaguuucugccacuu

SEQ ID NO: 1094731 - RNA, 19 nt, Artificial Sequence
  Description of Artificial Sequence: Synthetic oligonucleotide
  Antisense strand to SEQ ID NO: 1094730
aaguggcagaaacucaggc

SEQ ID NO: 1094732 - RNA, 19 nt, Artificial Sequence
  Description of Artificial Sequence: Synthetic oligonucleotide
  Sense strand starting at position 211 of SEQ ID NO: 915635
uuggcaauugcuugggaaa

SEQ ID NO: 1094733 - RNA, 19 nt, Artificial Sequence
  Description of Artificial Sequence: Synthetic oligonucleotide
  Antisense strand to SEQ ID NO: 1094732
uuucccaagcaauugccaa

SEQ ID NO: 1094734 - RNA, 19 nt, Artificial Sequence
  Description of Artificial Sequence: Synthetic oligonucleotide
  Sense strand starting at position 212 of SEQ ID NO: 915635
uggcaauugcuugggaaag

SEQ ID NO: 1094735 - RNA, 19 nt, Artificial Sequence
  Description of Artificial Sequence: Synthetic oligonucleotide
  Antisense strand to SEQ ID NO: 1094734
cuuucccaagcaauugcca

SEQ ID NO: 1094736 - RNA, 19 nt, Artificial Sequence
  Description of Artificial Sequence: Synthetic oligonucleotide
  Sense strand starting at position 386 of SEQ ID NO: 915635
gaaugaggcuucugacuuu

SEQ ID NO: 1094737 - RNA, 19 nt, Artificial Sequence
  Description of Artificial Sequence: Synthetic oligonucleotide
  Antisense strand to SEQ ID NO: 1094736
aaagucagaagccucauuc

SEQ ID NO: 1094738 - RNA, 19 nt, Artificial Sequence
  Description of Artificial Sequence: Synthetic oligonucleotide
  Sense strand starting at position 389 of SEQ ID NO: 915635
ugaggcuucugacuuuaaa

SEQ ID NO: 1094739 - RNA, 19 nt, Artificial Sequence
  Description of Artificial Sequence: Synthetic oligonucleotide
  Antisense strand to SEQ ID NO: 1094738
uuuaaagucagaagccuca

SEQ ID NO: 1094740 - RNA, 19 nt, Artificial Sequence
  Description of Artificial Sequence: Synthetic oligonucleotide
  Sense strand starting at position 1212 of SEQ ID NO: 915635
acgagacucugagucugaa

SEQ ID NO: 1094741 - RNA, 19 nt, Artificial Sequence
  Description of Artificial Sequence: Synthetic oligonucleotide
  Antisense strand to SEQ ID NO: 1094740
uucagacucagagucucgu

SEQ ID NO: 1094742 - RNA, 19 nt, Artificial Sequence
  Description of Artificial Sequence: Synthetic oligonucleotide
  Sense strand starting at position 1306 of SEQ ID NO: 915635
gcggguguucccagugacu

SEQ ID NO: 1094743 - RNA, 19 nt, Artificial Sequence
  Description of Artificial Sequence: Synthetic oligonucleotide
  Antisense strand to SEQ ID NO: 1094742
agucacugggaacacccgc

SEQ ID NO: 1094744 - RNA, 19 nt, Artificial Sequence
  Description of Artificial Sequence: Synthetic oligonucleotide
  Sense strand starting at position 1308 of SEQ ID NO: 915635
ggguguucccagugacuca

SEQ ID NO: 1094745 - RNA, 19 nt, Artificial Sequence
  Description of Artificial Sequence: Synthetic oligonucleotide
  Antisense strand to SEQ ID NO: 1094744
ugagucacugggaacaccc

SEQ ID NO: 1094746 - RNA, 19 nt, Artificial Sequence
  Description of Artificial Sequence: Synthetic oligonucleotide
  Sense strand starting at position 1323 of SEQ ID NO: 915635
cucaccaguccgugaucuu

SEQ ID NO: 1094747 - RNA, 19 nt, Artificial Sequence
  Description of Artificial Sequence: Synthetic oligonucleotide
  Antisense strand to SEQ ID NO: 1094746
aagaucacggacuggugag

SEQ ID NO: 1094748 - RNA, 19 nt, Artificial Sequence
  Description of Artificial Sequence: Synthetic oligonucleotide
  Sense strand starting at position 2368 of SEQ ID NO: 915635
aguugagguugucucaaca

SEQ ID NO: 1094749 - RNA, 19 nt, Artificial Sequence
  Description of Artificial Sequence: Synthetic oligonucleotide
  Antisense strand to SEQ ID NO: 1094748
uguugagacaaccucaacu

SEQ ID NO: 1094750 - RNA, 19 nt, Artificial Sequence
  Description of Artificial Sequence: Synthetic oligonucleotide
  Sense strand starting at position 2626 of SEQ ID NO: 915635
uccugugucugccugauca

SEQ ID NO: 1094751 - RNA, 19 nt, Artificial Sequence
  Description of Artificial Sequence: Synthetic oligonucleotide
  Antisense strand to SEQ ID NO: 1094750
ugaucaggcagacacagga

SEQ ID NO: 1094752 - RNA, 19 nt, Artificial Sequence
  Description of Artificial Sequence: Synthetic oligonucleotide
  Sense strand starting at position 2628 of SEQ ID NO: 915635
cugugucugccugaucauu

SEQ ID NO: 1094753 - RNA, 19 nt, Artificial Sequence
  Description of Artificial Sequence: Synthetic oligonucleotide
  Antisense strand to SEQ ID NO: 1094752
aaugaucaggcagacacag

SEQ ID NO: 1094754 - RNA, 19 nt, Artificial Sequence
  Description of Artificial Sequence: Synthetic oligonucleotide
  Sense strand starting at position 2630 of SEQ ID NO: 915635
gugucugccugaucauuga

SEQ ID NO: 1094755 - RNA, 19 nt, Artificial Sequence
  Description of Artificial Sequence: Synthetic oligonucleotide
  Antisense strand to SEQ ID NO: 1094754
ucaaugaucaggcagacac

SEQ ID NO: 1094756 - RNA, 19 nt, Artificial Sequence
  Description of Artificial Sequence: Synthetic oligonucleotide
  Sense strand starting at position 2825 of SEQ ID NO: 915635
gagaaagcugucugugccu

SEQ ID NO: 1094757 - RNA, 19 nt, Artificial Sequence
  Description of Artificial Sequence: Synthetic oligonucleotide
  Antisense strand to SEQ ID NO: 1094756
aggcacagacagcuuucuc

SEQ ID NO: 1094758 - RNA, 19 nt, Artificial Sequence
  Description of Artificial Sequence: Synthetic oligonucleotide
  Sense strand starting at position 2899 of SEQ ID NO: 915635
gcucuuaugcuguauucga

SEQ ID NO: 1094759 - RNA, 19 nt, Artificial Sequence
  Description of Artificial Sequence: Synthetic oligonucleotide
  Antisense strand to SEQ ID NO: 1094758
ucgaauacagcauaagagc

SEQ ID NO: 1094760 - RNA, 19 nt, Artificial Sequence
  Description of Artificial Sequence: Synthetic oligonucleotide
  Sense strand starting at position 3113 of SEQ ID NO: 915635
gaagccugccuggaaugua

SEQ ID NO: 1094761 - RNA, 19 nt, Artificial Sequence
  Description of Artificial Sequence: Synthetic oligonucleotide
  Antisense strand to SEQ ID NO: 1094760
uacauuccaggcaggcuuc

SEQ ID NO: 1094762 - RNA, 19 nt, Artificial Sequence
  Description of Artificial Sequence: Synthetic oligonucleotide
  Sense strand starting at position 3874 of SEQ ID NO: 915635
ugaggucacgcagaaagua

SEQ ID NO: 1094763 - RNA, 19 nt, Artificial Sequence
  Description of Artificial Sequence: Synthetic oligonucleotide
  Antisense strand to SEQ ID NO: 1094762
uacuuucugcgugaccuca

SEQ ID NO: 1094764 - RNA, 19 nt, Artificial Sequence
  Description of Artificial Sequence: Synthetic oligonucleotide
  Sense strand starting at position 52 of SEQ ID NO: 915636
gggcaucgagaucauuauu

SEQ ID NO: 1094765 - RNA, 19 nt, Artificial Sequence
  Description of Artificial Sequence: Synthetic oligonucleotide
  Antisense strand to SEQ ID NO: 1094764
aauaaugaucucgaugccc

SEQ ID NO: 1094766 - RNA, 19 nt, Artificial Sequence
  Description of Artificial Sequence: Synthetic oligonucleotide
  Sense strand starting at position 146 of SEQ ID NO: 915636
cacauuauacuguggaagu

SEQ ID NO: 1094767 - RNA, 19 nt, Artificial Sequence
  Description of Artificial Sequence: Synthetic oligonucleotide
  Antisense strand to SEQ ID NO: 1094766
acuuccacaguauaaugug

SEQ ID NO: 1094768 - RNA, 19 nt, Artificial Sequence
  Description of Artificial Sequence: Synthetic oligonucleotide
  Sense strand starting at position 228 of SEQ ID NO: 915636
caggacacuuugucaaugu

SEQ ID NO: 1094769 - RNA, 19 nt, Artificial Sequence
  Description of Artificial Sequence: Synthetic oligonucleotide
  Antisense strand to SEQ ID NO: 1094768
acauugacaaaguguccug

SEQ ID NO: 1094770 - RNA, 19 nt, Artificial Sequence
  Description of Artificial Sequence: Synthetic oligonucleotide
  Sense strand starting at position 302 of SEQ ID NO: 915636
aauggauuagugggagagu

SEQ ID NO: 1094771 - RNA, 19 nt, Artificial Sequence
  Description of Artificial Sequence: Synthetic oligonucleotide
  Antisense strand to SEQ ID NO: 1094770
acucucccacuaauccauu

SEQ ID NO: 1094772 - RNA, 19 nt, Artificial Sequence
  Description of Artificial Sequence: Synthetic oligonucleotide
  Sense strand starting at position 319 of SEQ ID NO: 915636
gugagaagaacaugagguu

SEQ ID NO: 1094773 - RNA, 19 nt, Artificial Sequence
  Description of Artificial Sequence: Synthetic oligonucleotide
  Antisense strand to SEQ ID NO: 1094772
aaccucauguucuucucac

SEQ ID NO: 1094774 - RNA, 19 nt, Artificial Sequence
  Description of Artificial Sequence: Synthetic oligonucleotide
  Sense strand starting at position 370 of SEQ ID NO: 915636
uuaacuuaugacuguggau

SEQ ID NO: 1094775 - RNA, 19 nt, Artificial Sequence
  Description of Artificial Sequence: Synthetic oligonucleotide
  Antisense strand to SEQ ID NO: 1094774
auccacagucauaaguuaa

SEQ ID NO: 1094776 - RNA, 19 nt, Artificial Sequence
  Description of Artificial Sequence: Synthetic oligonucleotide
  Sense strand starting at position 372 of SEQ ID NO: 915636
aacuuaugacuguggauaa

SEQ ID NO: 1094777 - RNA, 19 nt, Artificial Sequence
  Description of Artificial Sequence: Synthetic oligonucleotide
  Antisense strand to SEQ ID NO: 1094776
uuauccacagucauaaguu

SEQ ID NO: 1094778 - RNA, 19 nt, Artificial Sequence
  Description of Artificial Sequence: Synthetic oligonucleotide
  Sense strand starting at position 614 of SEQ ID NO: 915636
aucugaauagagugauugu

SEQ ID NO: 1094779 - RNA, 19 nt, Artificial Sequence
  Description of Artificial Sequence: Synthetic oligonucleotide
  Antisense strand to SEQ ID NO: 1094778
acaaucacucuauucagau

SEQ ID NO: 1094780 - RNA, 19 nt, Artificial Sequence
  Description of Artificial Sequence: Synthetic oligonucleotide
  Sense strand starting at position 617 of SEQ ID NO: 915636
ugaauagagugauuguaga

SEQ ID NO: 1094781 - RNA, 19 nt, Artificial Sequence
  Description of Artificial Sequence: Synthetic oligonucleotide
  Antisense strand to SEQ ID NO: 1094780
ucuacaaucacucuauuca

SEQ ID NO: 1094782 - RNA, 19 nt, Artificial Sequence
  Description of Artificial Sequence: Synthetic oligonucleotide
  Sense strand starting at position 643 of SEQ ID NO: 915636
ugguuuguugcagacacaa

SEQ ID NO: 1094783 - RNA, 19 nt, Artificial Sequence
  Description of Artificial Sequence: Synthetic oligonucleotide
  Antisense strand to SEQ ID NO: 1094782
uugugucugcaacaaacca

SEQ ID NO: 1094784 - RNA, 19 nt, Artificial Sequence
  Description of Artificial Sequence: Synthetic oligonucleotide
  Sense strand starting at position 645 of SEQ ID NO: 915636
guuuguugcagacacaaug

SEQ ID NO: 1094785 - RNA, 19 nt, Artificial Sequence
  Description of Artificial Sequence: Synthetic oligonucleotide
  Antisense strand to SEQ ID NO: 1094784
cauugugucugcaacaaac

SEQ ID NO: 1094786 - RNA, 19 nt, Artificial Sequence
  Description of Artificial Sequence: Synthetic oligonucleotide
  Sense strand starting at position 904 of SEQ ID NO: 915636
gucagaagagucuaugcuu

SEQ ID NO: 1094787 - RNA, 19 nt, Artificial Sequence
  Description of Artificial Sequence: Synthetic oligonucleotide
  Antisense strand to SEQ ID NO: 1094786
aagcauagacucuucugac

SEQ ID NO: 1094788 - RNA, 19 nt, Artificial Sequence
  Description of Artificial Sequence: Synthetic oligonucleotide
  Sense strand starting at position 907 of SEQ ID NO: 915636
agaagagucuaugcuuuag

SEQ ID NO: 1094789 - RNA, 19 nt, Artificial Sequence
  Description of Artificial Sequence: Synthetic oligonucleotide
  Antisense strand to SEQ ID NO: 1094788
cuaaagcauagacucuucu

SEQ ID NO: 1094790 - RNA, 19 nt, Artificial Sequence
  Description of Artificial Sequence: Synthetic oligonucleotide
  Sense strand starting at position 961 of SEQ ID NO: 915636
ucuucuuacugguuagaga

SEQ ID NO: 1094791 - RNA, 19 nt, Artificial Sequence
  Description of Artificial Sequence: Synthetic oligonucleotide
  Antisense strand to SEQ ID NO: 1094790
ucucuaaccaguaagaaga

SEQ ID NO: 1094792 - RNA, 19 nt, Artificial Sequence
  Description of Artificial Sequence: Synthetic oligonucleotide
  Sense strand starting at position 995 of SEQ ID NO: 915636
ccuaguaaucuuuggacug

SEQ ID NO: 1094793 - RNA, 19 nt, Artificial Sequence
  Description of Artificial Sequence: Synthetic oligonucleotide
  Antisense strand to SEQ ID NO: 1094792
caguccaaagauuacuagg

SEQ ID NO: 1094794 - RNA, 19 nt, Artificial Sequence
  Description of Artificial Sequence: Synthetic oligonucleotide
  Sense strand starting at position 1291 of SEQ ID NO: 915636
ccauguguccugggaaaga

SEQ ID NO: 1094795 - RNA, 19 nt, Artificial Sequence
  Description of Artificial Sequence: Synthetic oligonucleotide
  Antisense strand to SEQ ID NO: 1094794
ucuuucccaggacacaugg

SEQ ID NO: 1094796 - RNA, 19 nt, Artificial Sequence
  Description of Artificial Sequence: Synthetic oligonucleotide
  Sense strand starting at position 1503 of SEQ ID NO: 915636
aguuucugggagcauaaau

SEQ ID NO: 1094797 - RNA, 19 nt, Artificial Sequence
  Description of Artificial Sequence: Synthetic oligonucleotide
  Antisense strand to SEQ ID NO: 1094796
auuuaugcucccagaaacu

SEQ ID NO: 1094798 - RNA, 19 nt, Artificial Sequence
  Description of Artificial Sequence: Synthetic oligonucleotide
  Sense strand starting at position 1550 of SEQ ID NO: 915636
gggaguuacuugguaggga

SEQ ID NO: 1094799 - RNA, 19 nt, Artificial Sequence
  Description of Artificial Sequence: Synthetic oligonucleotide
  Antisense strand to SEQ ID NO: 1094798
ucccuaccaaguaacuccc

SEQ ID NO: 1094800 - RNA, 19 nt, Artificial Sequence
  Description of Artificial Sequence: Synthetic oligonucleotide
  Sense strand starting at position 1656 of SEQ ID NO: 915636
gugagacuuuccucaccau

SEQ ID NO: 1094801 - RNA, 19 nt, Artificial Sequence
  Description of Artificial Sequence: Synthetic oligonucleotide
  Antisense strand to SEQ ID NO: 1094800
auggugaggaaagucucac

SEQ ID NO: 1094802 - RNA, 19 nt, Artificial Sequence
  Description of Artificial Sequence: Synthetic oligonucleotide
  Sense strand starting at position 1779 of SEQ ID NO: 915636
aguagacuaucacucuaga

SEQ ID NO: 1094803 - RNA, 19 nt, Artificial Sequence
  Description of Artificial Sequence: Synthetic oligonucleotide
  Antisense strand to SEQ ID NO: 1094802
ucuagagugauagucuacu

SEQ ID NO: 1094804 - RNA, 19 nt, Artificial Sequence
  Description of Artificial Sequence: Synthetic oligonucleotide
  Sense strand starting at position 1835 of SEQ ID NO: 915636
cauaguuggcuuggaauaa

SEQ ID NO: 1094805 - RNA, 19 nt, Artificial Sequence
  Description of Artificial Sequence: Synthetic oligonucleotide
  Antisense strand to SEQ ID NO: 1094804
uuauuccaagccaacuaug

SEQ ID NO: 1094806 - RNA, 19 nt, Artificial Sequence
  Description of Artificial Sequence: Synthetic oligonucleotide
  Sense strand starting at position 1896 of SEQ ID NO: 915636
gucucaucucuccaacagu

SEQ ID NO: 1094807 - RNA, 19 nt, Artificial Sequence
  Description of Artificial Sequence: Synthetic oligonucleotide
  Antisense strand to SEQ ID NO: 1094806
acuguuggagagaugagac

SEQ ID NO: 1094808 - RNA, 19 nt, Artificial Sequence
  Description of Artificial Sequence: Synthetic oligonucleotide
  Sense strand starting at position 1899 of SEQ ID NO: 915636
ucaucucuccaacagugua

SEQ ID NO: 1094809 - RNA, 19 nt, Artificial Sequence
  Description of Artificial Sequence: Synthetic oligonucleotide
  Antisense strand to SEQ ID NO: 1094808
uacacuguuggagagauga

SEQ ID NO: 1094810 - RNA, 19 nt, Artificial Sequence
  Description of Artificial Sequence: Synthetic oligonucleotide
  Sense strand starting at position 1909 of SEQ ID NO: 915636
aacaguguaccagaauguu

SEQ ID NO: 1094811 - RNA, 19 nt, Artificial Sequence
  Description of Artificial Sequence: Synthetic oligonucleotide
  Antisense strand to SEQ ID NO: 1094810
aacauucugguacacuguu

SEQ ID NO: 1094812 - RNA, 19 nt, Artificial Sequence
  Description of Artificial Sequence: Synthetic oligonucleotide
  Sense strand starting at position 1934 of SEQ ID NO: 915636
uuggcuggcuauuuauuaa

SEQ ID NO: 1094813 - RNA, 19 nt, Artificial Sequence
  Description of Artificial Sequence: Synthetic oligonucleotide
  Antisense strand to SEQ ID NO: 1094812
uuaauaaauagccagccaa

SEQ ID NO: 1094814 - RNA, 19 nt, Artificial Sequence
  Description of Artificial Sequence: Synthetic oligonucleotide
  Sense strand starting at position 1946 of SEQ ID NO: 915636
uuauuaagugaugggcaga

SEQ ID NO: 1094815 - RNA, 19 nt, Artificial Sequence
  Description of Artificial Sequence: Synthetic oligonucleotide
  Antisense strand to SEQ ID NO: 1094814
ucugcccaucacuuaauaa

SEQ ID NO: 1094816 - RNA, 19 nt, Artificial Sequence
  Description of Artificial Sequence: Synthetic oligonucleotide
  Sense strand starting at position 2023 of SEQ ID NO: 915636
gagcaaugucaggaggugu

SEQ ID NO: 1094817 - RNA, 19 nt, Artificial Sequence
  Description of Artificial Sequence: Synthetic oligonucleotide
  Antisense strand to SEQ ID NO: 1094816
acaccuccugacauugcuc

SEQ ID NO: 1094818 - RNA, 19 nt, Artificial Sequence
  Description of Artificial Sequence: Synthetic oligonucleotide
  Sense strand starting at position 2042 of SEQ ID NO: 915636
ggucaaguguauuugucca

SEQ ID NO: 1094819 - RNA, 19 nt, Artificial Sequence
  Description of Artificial Sequence: Synthetic oligonucleotide
  Antisense strand to SEQ ID NO: 1094818
uggacaaauacacuugacc

SEQ ID NO: 1094820 - RNA, 19 nt, Artificial Sequence
  Description of Artificial Sequence: Synthetic oligonucleotide
  Sense strand starting at position 2049 of SEQ ID NO: 915636
uguauuuguccaugugaug

SEQ ID NO: 1094821 - RNA, 19 nt, Artificial Sequence
  Description of Artificial Sequence: Synthetic oligonucleotide
  Antisense strand to SEQ ID NO: 1094820
caucacauggacaaauaca

SEQ ID NO: 1094822 - RNA, 19 nt, Artificial Sequence
  Description of Artificial Sequence: Synthetic oligonucleotide
  Sense strand starting at position 2084 of SEQ ID NO: 915636
agacuugaaggaugugguu

SEQ ID NO: 1094823 - RNA, 19 nt, Artificial Sequence
  Description of Artificial Sequence: Synthetic oligonucleotide
  Antisense strand to SEQ ID NO: 1094822
aaccacauccuucaagucu

SEQ ID NO: 1094824 - RNA, 19 nt, Artificial Sequence
  Description of Artificial Sequence: Synthetic oligonucleotide
  Sense strand starting at position 2089 of SEQ ID NO: 915636
ugaaggaugugguuaggga

SEQ ID NO: 1094825 - RNA, 19 nt, Artificial Sequence
  Description of Artificial Sequence: Synthetic oligonucleotide
  Antisense strand to SEQ ID NO: 1094824
ucccuaaccacauccuuca

SEQ ID NO: 1094826 - RNA, 19 nt, Artificial Sequence
  Description of Artificial Sequence: Synthetic oligonucleotide
  Sense strand starting at position 2985 of SEQ ID NO: 915636
ggagaugcggaggguuaau

SEQ ID NO: 1094827 - RNA, 19 nt, Artificial Sequence
  Description of Artificial Sequence: Synthetic oligonucleotide
  Antisense strand to SEQ ID NO: 1094826
auuaacccuccgcaucucc

SEQ ID NO: 1094828 - RNA, 19 nt, Artificial Sequence
  Description of Artificial Sequence: Synthetic oligonucleotide
  Sense strand starting at position 3100 of SEQ ID NO: 915636
cuaauaguauaacuggauu

SEQ ID NO: 1094829 - RNA, 19 nt, Artificial Sequence
  Description of Artificial Sequence: Synthetic oligonucleotide
  Antisense strand to SEQ ID NO: 1094828
aauccaguuauacuauuag

SEQ ID NO: 1094830 - RNA, 19 nt, Artificial Sequence
  Description of Artificial Sequence: Synthetic oligonucleotide
  Sense strand starting at position 3398 of SEQ ID NO: 915636
agaguuuccuaaccaagga

SEQ ID NO: 1094831 - RNA, 19 nt, Artificial Sequence
  Description of Artificial Sequence: Synthetic oligonucleotide
  Antisense strand to SEQ ID NO: 1094830
uccuugguuaggaaacucu

SEQ ID NO: 1094832 - RNA, 19 nt, Artificial Sequence
  Description of Artificial Sequence: Synthetic oligonucleotide
  Sense strand starting at position 3427 of SEQ ID NO: 915636
agagcuauacaucaaaugu

SEQ ID NO: 1094833 - RNA, 19 nt, Artificial Sequence
  Description of Artificial Sequence: Synthetic oligonucleotide
  Antisense strand to SEQ ID NO: 1094832
acauuugauguauagcucu

SEQ ID NO: 1094834 - RNA, 19 nt, Artificial Sequence
  Description of Artificial Sequence: Synthetic oligonucleotide
  Sense strand starting at position 3481 of SEQ ID NO: 915636
agaaguguugccuaucaca

SEQ ID NO: 1094835 - RNA, 19 nt, Artificial Sequence
  Description of Artificial Sequence: Synthetic oligonucleotide
  Antisense strand to SEQ ID NO: 1094834
ugugauaggcaacacuucu

SEQ ID NO: 1094836 - RNA, 19 nt, Artificial Sequence
  Description of Artificial Sequence: Synthetic oligonucleotide
  Sense strand starting at position 3639 of SEQ ID NO: 915636
acuauuucucgauguaucu

SEQ ID NO: 1094837 - RNA, 19 nt, Artificial Sequence
  Description of Artificial Sequence: Synthetic oligonucleotide
  Antisense strand to SEQ ID NO: 1094836
agauacaucgagaaauagu

SEQ ID NO: 1094838 - RNA, 19 nt, Artificial Sequence
  Description of Artificial Sequence: Synthetic oligonucleotide
  Sense strand starting at position 3663 of SEQ ID NO: 915636
gguguuuccagauaggauu

SEQ ID NO: 1094839 - RNA, 19 nt, Artificial Sequence
  Description of Artificial Sequence: Synthetic oligonucleotide
  Antisense strand to SEQ ID NO: 1094838
aauccuaucuggaaacacc

SEQ ID NO: 1094840 - RNA, 19 nt, Artificial Sequence
  Description of Artificial Sequence: Synthetic oligonucleotide
  Sense strand starting at position 3694 of SEQ ID NO: 915636
gguggacucuggaaaguag

SEQ ID NO: 1094841 - RNA, 19 nt, Artificial Sequence
  Description of Artificial Sequence: Synthetic oligonucleotide
  Antisense strand to SEQ ID NO: 1094840
cuacuuuccagaguccacc

SEQ ID NO: 1094842 - RNA, 19 nt, Artificial Sequence
  Description of Artificial Sequence: Synthetic oligonucleotide
  Sense strand starting at position 3967 of SEQ ID NO: 915636
uccauaagggcaugaauca

SEQ ID NO: 1094843 - RNA, 19 nt, Artificial Sequence
  Description of Artificial Sequence: Synthetic oligonucleotide
  Antisense strand to SEQ ID NO: 1094842
ugauucaugcccuuaugga

SEQ ID NO: 1094844 - RNA, 19 nt, Artificial Sequence
  Description of Artificial Sequence: Synthetic oligonucleotide
  Sense strand starting at position 104 of SEQ ID NO: 915637
ucaacugauuuagggaguu

SEQ ID NO: 1094845 - RNA, 19 nt, Artificial Sequence
  Description of Artificial Sequence: Synthetic oligonucleotide
  Antisense strand to SEQ ID NO: 1094844
aacucccuaaaucaguuga

SEQ ID NO: 1094846 - RNA, 19 nt, Artificial Sequence
  Description of Artificial Sequence: Synthetic oligonucleotide
  Sense strand starting at position 124 of SEQ ID NO: 915637
ggcagacuguguucugcau

SEQ ID NO: 1094847 - RNA, 19 nt, Artificial Sequence
  Description of Artificial Sequence: Synthetic oligonucleotide
  Antisense strand to SEQ ID NO: 1094846
augcagaacacagucugcc

SEQ ID NO: 1094848 - RNA, 19 nt, Artificial Sequence
  Description of Artificial Sequence: Synthetic oligonucleotide
  Sense strand starting at position 128 of SEQ ID NO: 915637
gacuguguucugcauauua

SEQ ID NO: 1094849 - RNA, 19 nt, Artificial Sequence
  Description of Artificial Sequence: Synthetic oligonucleotide
  Antisense strand to SEQ ID NO: 1094848
uaauaugcagaacacaguc

SEQ ID NO: 1094850 - RNA, 19 nt, Artificial Sequence
  Description of Artificial Sequence: Synthetic oligonucleotide
  Sense strand starting at position 130 of SEQ ID NO: 915637
cuguguucugcauauuaga

SEQ ID NO: 1094851 - RNA, 19 nt, Artificial Sequence
  Description of Artificial Sequence: Synthetic oligonucleotide
  Antisense strand to SEQ ID NO: 1094850
ucuaauaugcagaacacag

SEQ ID NO: 1094852 - RNA, 19 nt, Artificial Sequence
  Description of Artificial Sequence: Synthetic oligonucleotide
  Sense strand starting at position 158 of SEQ ID NO: 915637
agaaucaccugauagaauu

SEQ ID NO: 1094853 - RNA, 19 nt, Artificial Sequence
  Description of Artificial Sequence: Synthetic oligonucleotide
  Antisense strand to SEQ ID NO: 1094852
aauucuaucaggugauucu

SEQ ID NO: 1094854 - RNA, 19 nt, Artificial Sequence
  Description of Artificial Sequence: Synthetic oligonucleotide
  Sense strand starting at position 166 of SEQ ID NO: 915637
cugauagaauuaugugaaa

SEQ ID NO: 1094855 - RNA, 19 nt, Artificial Sequence
  Description of Artificial Sequence: Synthetic oligonucleotide
  Antisense strand to SEQ ID NO: 1094854
uuucacauaauucuaucag

SEQ ID NO: 1094856 - RNA, 19 nt, Artificial Sequence
  Description of Artificial Sequence: Synthetic oligonucleotide
  Sense strand starting at position 210 of SEQ ID NO: 915637
ugaaguuacugggauugaa

SEQ ID NO: 1094857 - RNA, 19 nt, Artificial Sequence
  Description of Artificial Sequence: Synthetic oligonucleotide
  Antisense strand to SEQ ID NO: 1094856
uucaaucccaguaacuuca

SEQ ID NO: 1094858 - RNA, 19 nt, Artificial Sequence
  Description of Artificial Sequence: Synthetic oligonucleotide
  Sense strand starting at position 544 of SEQ ID NO: 915637
ggcccaggccuguauuaau

SEQ ID NO: 1094859 - RNA, 19 nt, Artificial Sequence
  Description of Artificial Sequence: Synthetic oligonucleotide
  Antisense strand to SEQ ID NO: 1094858
auuaauacaggccugggcc

SEQ ID NO: 1094860 - RNA, 19 nt, Artificial Sequence
  Description of Artificial Sequence: Synthetic oligonucleotide
  Sense strand starting at position 635 of SEQ ID NO: 915637
ucuccucuguguccuaaau

SEQ ID NO: 1094861 - RNA, 19 nt, Artificial Sequence
  Description of Artificial Sequence: Synthetic oligonucleotide
  Antisense strand to SEQ ID NO: 1094860
auuuaggacacagaggaga

SEQ ID NO: 1094862 - RNA, 19 nt, Artificial Sequence
  Description of Artificial Sequence: Synthetic oligonucleotide
  Sense strand starting at position 688 of SEQ ID NO: 915637
ggauaacauuaccagcaua

SEQ ID NO: 1094863 - RNA, 19 nt, Artificial Sequence
  Description of Artificial Sequence: Synthetic oligonucleotide
  Antisense strand to SEQ ID NO: 1094862
uaugcugguaauguuaucc

SEQ ID NO: 1094864 - RNA, 19 nt, Artificial Sequence
  Description of Artificial Sequence: Synthetic oligonucleotide
  Sense strand starting at position 699 of SEQ ID NO: 915637
ccagcauauucugugagaa

SEQ ID NO: 1094865 - RNA, 19 nt, Artificial Sequence
  Description of Artificial Sequence: Synthetic oligonucleotide
  Antisense strand to SEQ ID NO: 1094864
uucucacagaauaugcugg

SEQ ID NO: 1094866 - RNA, 19 nt, Artificial Sequence
  Description of Artificial Sequence: Synthetic oligonucleotide
  Sense strand starting at position 700 of SEQ ID NO: 915637
cagcauauucugugagaaa

SEQ ID NO: 1094867 - RNA, 19 nt, Artificial Sequence
  Description of Artificial Sequence: Synthetic oligonucleotide
  Antisense strand to SEQ ID NO: 1094866
uuucucacagaauaugcug

SEQ ID NO: 1094868 - RNA, 19 nt, Artificial Sequence
  Description of Artificial Sequence: Synthetic oligonucleotide
  Sense strand starting at position 827 of SEQ ID NO: 915637
gucucuaaugcucagcuua

SEQ ID NO: 1094869 - RNA, 19 nt, Artificial Sequence
  Description of Artificial Sequence: Synthetic oligonucleotide
  Antisense strand to SEQ ID NO: 1094868
uaagcugagcauuagagac

SEQ ID NO: 1094870 - RNA, 19 nt, Artificial Sequence
  Description of Artificial Sequence: Synthetic oligonucleotide
  Sense strand starting at position 829 of SEQ ID NO: 915637
cucuaaugcucagcuuagu

SEQ ID NO: 1094871 - RNA, 19 nt, Artificial Sequence
  Description of Artificial Sequence: Synthetic oligonucleotide
  Antisense strand to SEQ ID NO: 1094870
acuaagcugagcauuagag

SEQ ID NO: 1094872 - RNA, 19 nt, Artificial Sequence
  Description of Artificial Sequence: Synthetic oligonucleotide
  Sense strand starting at position 883 of SEQ ID NO: 915637
ugucucuucccaggacacu

SEQ ID NO: 1094873 - RNA, 19 nt, Artificial Sequence
  Description of Artificial Sequence: Synthetic oligonucleotide
  Antisense strand to SEQ ID NO: 1094872
aguguccugggaagagaca

SEQ ID NO: 1094874 - RNA, 19 nt, Artificial Sequence
  Description of Artificial Sequence: Synthetic oligonucleotide
  Sense strand starting at position 964 of SEQ ID NO: 915637
ggcauuugucacugccuua

SEQ ID NO: 1094875 - RNA, 19 nt, Artificial Sequence
  Description of Artificial Sequence: Synthetic oligonucleotide
  Antisense strand to SEQ ID NO: 1094874
uaaggcagugacaaaugcc

SEQ ID NO: 1094876 - RNA, 19 nt, Artificial Sequence
  Description of Artificial Sequence: Synthetic oligonucleotide
  Sense strand starting at position 994 of SEQ ID NO: 915637
aagcgugcuuauuuaaaua

SEQ ID NO: 1094877 - RNA, 19 nt, Artificial Sequence
  Description of Artificial Sequence: Synthetic oligonucleotide
  Antisense strand to SEQ ID NO: 1094876
uauuuaaauaagcacgcuu

SEQ ID NO: 1094878 - RNA, 19 nt, Artificial Sequence
  Description of Artificial Sequence: Synthetic oligonucleotide
  Sense strand starting at position 1087 of SEQ ID NO: 915637
uuaugaaauugcccaggga

SEQ ID NO: 1094879 - RNA, 19 nt, Artificial Sequence
  Description of Artificial Sequence: Synthetic oligonucleotide
  Antisense strand to SEQ ID NO: 1094878
ucccugggcaauuucauaa

SEQ ID NO: 1094880 - RNA, 19 nt, Artificial Sequence
  Description of Artificial Sequence: Synthetic oligonucleotide
  Sense strand starting at position 1090 of SEQ ID NO: 915637
ugaaauugcccagggaaua

SEQ ID NO: 1094881 - RNA, 19 nt, Artificial Sequence
  Description of Artificial Sequence: Synthetic oligonucleotide
  Antisense strand to SEQ ID NO: 1094880
uauucccugggcaauuuca

SEQ ID NO: 1094882 - RNA, 19 nt, Artificial Sequence
  Description of Artificial Sequence: Synthetic oligonucleotide
  Sense strand starting at position 1091 of SEQ ID NO: 915637
gaaauugcccagggaauau

SEQ ID NO: 1094883 - RNA, 19 nt, Artificial Sequence
  Description of Artificial Sequence: Synthetic oligonucleotide
  Antisense strand to SEQ ID NO: 1094882
auauucccugggcaauuuc

SEQ ID NO: 1094884 - RNA, 19 nt, Artificial Sequence
  Description of Artificial Sequence: Synthetic oligonucleotide
  Sense strand starting at position 1310 of SEQ ID NO: 915637
ggaaguggcuagagaugau

SEQ ID NO: 1094885 - RNA, 19 nt, Artificial Sequence
  Description of Artificial Sequence: Synthetic oligonucleotide
  Antisense strand to SEQ ID NO: 1094884
aucaucucuagccacuucc

SEQ ID NO: 1094886 - RNA, 19 nt, Artificial Sequence
  Description of Artificial Sequence: Synthetic oligonucleotide
  Sense strand starting at position 1384 of SEQ ID NO: 915637
ccaccuagauuucgaacuu

SEQ ID NO: 1094887 - RNA, 19 nt, Artificial Sequence
  Description of Artificial Sequence: Synthetic oligonucleotide
  Antisense strand to SEQ ID NO: 1094886
aaguucgaaaucuaggugg

SEQ ID NO: 1094888 - RNA, 19 nt, Artificial Sequence
  Description of Artificial Sequence: Synthetic oligonucleotide
  Sense strand starting at position 1468 of SEQ ID NO: 915637
ccacaaguaucuguugaua

SEQ ID NO: 1094889 - RNA, 19 nt, Artificial Sequence
  Description of Artificial Sequence: Synthetic oligonucleotide
  Antisense strand to SEQ ID NO: 1094888
uaucaacagauacuugugg

SEQ ID NO: 1094890 - RNA, 19 nt, Artificial Sequence
  Description of Artificial Sequence: Synthetic oligonucleotide
  Sense strand starting at position 1489 of SEQ ID NO: 915637
gaugaaucccuacgucauc

SEQ ID NO: 1094891 - RNA, 19 nt, Artificial Sequence
  Description of Artificial Sequence: Synthetic oligonucleotide
  Antisense strand to SEQ ID NO: 1094890
gaugacguagggauucauc

SEQ ID NO: 1094892 - RNA, 19 nt, Artificial Sequence
  Description of Artificial Sequence: Synthetic oligonucleotide
  Sense strand starting at position 1498 of SEQ ID NO: 915637
cuacgucaucucugugaug

SEQ ID NO: 1094893 - RNA, 19 nt, Artificial Sequence
  Description of Artificial Sequence: Synthetic oligonucleotide
  Antisense strand to SEQ ID NO: 1094892
caucacagagaugacguag

SEQ ID NO: 1094894 - RNA, 19 nt, Artificial Sequence
  Description of Artificial Sequence: Synthetic oligonucleotide
  Sense strand starting at position 1499 of SEQ ID NO: 915637
uacgucaucucugugaugu

SEQ ID NO: 1094895 - RNA, 19 nt, Artificial Sequence
  Description of Artificial Sequence: Synthetic oligonucleotide
  Antisense strand to SEQ ID NO: 1094894
acaucacagagaugacgua

SEQ ID NO: 1094896 - RNA, 19 nt, Artificial Sequence
  Description of Artificial Sequence: Synthetic oligonucleotide
  Sense strand starting at position 1500 of SEQ ID NO: 915637
acgucaucucugugauguc

SEQ ID NO: 1094897 - RNA, 19 nt, Artificial Sequence
  Description of Artificial Sequence: Synthetic oligonucleotide
  Antisense strand to SEQ ID NO: 1094896
gacaucacagagaugacgu

SEQ ID NO: 1094898 - RNA, 19 nt, Artificial Sequence
  Description of Artificial Sequence: Synthetic oligonucleotide
  Sense strand starting at position 1509 of SEQ ID NO: 915637
cugugaugucacuguaucu

SEQ ID NO: 1094899 - RNA, 19 nt, Artificial Sequence
  Description of Artificial Sequence: Synthetic oligonucleotide
  Antisense strand to SEQ ID NO: 1094898
agauacagugacaucacag

SEQ ID NO: 1094900 - RNA, 19 nt, Artificial Sequence
  Description of Artificial Sequence: Synthetic oligonucleotide
  Sense strand starting at position 1646 of SEQ ID NO: 915637
agaugaaacgagggauugu

SEQ ID NO: 1094901 - RNA, 19 nt, Artificial Sequence
  Description of Artificial Sequence: Synthetic oligonucleotide
  Antisense strand to SEQ ID NO: 1094900
acaaucccucguuucaucu

SEQ ID NO: 1094902 - RNA, 19 nt, Artificial Sequence
  Description of Artificial Sequence: Synthetic oligonucleotide
  Sense strand starting at position 2147 of SEQ ID NO: 915637
cgaagagaugccugcgacu

SEQ ID NO: 1094903 - RNA, 19 nt, Artificial Sequence
  Description of Artificial Sequence: Synthetic oligonucleotide
  Antisense strand to SEQ ID NO: 1094902
agucgcaggcaucucuucg

SEQ ID NO: 1094904 - RNA, 19 nt, Artificial Sequence
  Description of Artificial Sequence: Synthetic oligonucleotide
  Sense strand starting at position 2149 of SEQ ID NO: 915637
aagagaugccugcgacuug

SEQ ID NO: 1094905 - RNA, 19 nt, Artificial Sequence
  Description of Artificial Sequence: Synthetic oligonucleotide
  Antisense strand to SEQ ID NO: 1094904
caagucgcaggcaucucuu

SEQ ID NO: 1094906 - RNA, 19 nt, Artificial Sequence
  Description of Artificial Sequence: Synthetic oligonucleotide
  Sense strand starting at position 2881 of SEQ ID NO: 915637
auaagaagccauugcaucu

SEQ ID NO: 1094907 - RNA, 19 nt, Artificial Sequence
  Description of Artificial Sequence: Synthetic oligonucleotide
  Antisense strand to SEQ ID NO: 1094906
agaugcaauggcuucuuau

SEQ ID NO: 1094908 - RNA, 19 nt, Artificial Sequence
  Description of Artificial Sequence: Synthetic oligonucleotide
  Sense strand starting at position 3361 of SEQ ID NO: 915637
gaucacauguggguaguua

SEQ ID NO: 1094909 - RNA, 19 nt, Artificial Sequence
  Description of Artificial Sequence: Synthetic oligonucleotide
  Antisense strand to SEQ ID NO: 1094908
uaacuacccacaugugauc

SEQ ID NO: 1094910 - RNA, 19 nt, Artificial Sequence
  Description of Artificial Sequence: Synthetic oligonucleotide
  Sense strand starting at position 3362 of SEQ ID NO: 915637
aucacauguggguaguuau

SEQ ID NO: 1094911 - RNA, 19 nt, Artificial Sequence
  Description of Artificial Sequence: Synthetic oligonucleotide
  Antisense strand to SEQ ID NO: 1094910
auaacuacccacaugugau

SEQ ID NO: 1094912 - RNA, 19 nt, Artificial Sequence
  Description of Artificial Sequence: Synthetic oligonucleotide
  Sense strand starting at position 3481 of SEQ ID NO: 915637
aacagaaguucucugguga

SEQ ID NO: 1094913 - RNA, 19 nt, Artificial Sequence
  Description of Artificial Sequence: Synthetic oligonucleotide
  Antisense strand to SEQ ID NO: 1094912
ucaccagagaacuucuguu

SEQ ID NO: 1094914 - RNA, 19 nt, Artificial Sequence
  Description of Artificial Sequence: Synthetic oligonucleotide
  Sense strand starting at position 3482 of SEQ ID NO: 915637
acagaaguucucuggugaa

SEQ ID NO: 1094915 - RNA, 19 nt, Artificial Sequence
  Description of Artificial Sequence: Synthetic oligonucleotide
  Antisense strand to SEQ ID NO: 1094914
uucaccagagaacuucugu

SEQ ID NO: 1094916 - RNA, 19 nt, Artificial Sequence
  Description of Artificial Sequence: Synthetic oligonucleotide
  Sense strand starting at position 3486 of SEQ ID NO: 915637
aaguucucuggugaagauu

SEQ ID NO: 1094917 - RNA, 19 nt, Artificial Sequence
  Description of Artificial Sequence: Synthetic oligonucleotide
  Antisense strand to SEQ ID NO: 1094916
aaucuucaccagagaacuu

SEQ ID NO: 1094918 - RNA, 19 nt, Artificial Sequence
  Description of Artificial Sequence: Synthetic oligonucleotide
  Sense strand starting at position 3891 of SEQ ID NO: 915637
acaugcaguucuucugagu

SEQ ID NO: 1094919 - RNA, 19 nt, Artificial Sequence
  Description of Artificial Sequence: Synthetic oligonucleotide
  Antisense strand to SEQ ID NO: 1094918
acucagaagaacugcaugu

SEQ ID NO: 1094920 - RNA, 19 nt, Artificial Sequence
  Description of Artificial Sequence: Synthetic oligonucleotide
  Sense strand starting at position 3920 of SEQ ID NO: 915637
accauuaagucucuagugu

SEQ ID NO: 1094921 - RNA, 19 nt, Artificial Sequence
  Description of Artificial Sequence: Synthetic oligonucleotide
  Antisense strand to SEQ ID NO: 1094920
acacuagagacuuaauggu

SEQ ID NO: 1094922 - RNA, 19 nt, Artificial Sequence
  Description of Artificial Sequence: Synthetic oligonucleotide
  Sense strand starting at position 3921 of SEQ ID NO: 915637
ccauuaagucucuaguguu

SEQ ID NO: 1094923 - RNA, 19 nt, Artificial Sequence
  Description of Artificial Sequence: Synthetic oligonucleotide
  Antisense strand to SEQ ID NO: 1094922
aacacuagagacuuaaugg

SEQ ID NO: 1094924 - RNA, 19 nt, Artificial Sequence
  Description of Artificial Sequence: Synthetic oligonucleotide
  Sense strand starting at position 37 of SEQ ID NO: 915638
ucuccucuguguccuaaau

SEQ ID NO: 1094925 - RNA, 19 nt, Artificial Sequence
  Description of Artificial Sequence: Synthetic oligonucleotide
  Antisense strand to SEQ ID NO: 1094924
auuuaggacacagaggaga

SEQ ID NO: 1094926 - RNA, 19 nt, Artificial Sequence
  Description of Artificial Sequence: Synthetic oligonucleotide
  Sense strand starting at position 57 of SEQ ID NO: 915638
cuauuagggucaggaaaug

SEQ ID NO: 1094927 - RNA, 19 nt, Artificial Sequence
  Description of Artificial Sequence: Synthetic oligonucleotide
  Antisense strand to SEQ ID NO: 1094926
cauuuccugacccuaauag

SEQ ID NO: 1094928 - RNA, 19 nt, Artificial Sequence
  Description of Artificial Sequence: Synthetic oligonucleotide
  Sense strand starting at position 90 of SEQ ID NO: 915638
ggauaacauuaccagcaua

SEQ ID NO: 1094929 - RNA, 19 nt, Artificial Sequence
  Description of Artificial Sequence: Synthetic oligonucleotide
  Antisense strand to SEQ ID NO: 1094928
uaugcugguaauguuaucc

SEQ ID NO: 1094930 - RNA, 19 nt, Artificial Sequence
  Description of Artificial Sequence: Synthetic oligonucleotide
  Sense strand starting at position 101 of SEQ ID NO: 915638
ccagcauauucugugagaa

SEQ ID NO: 1094931 - RNA, 19 nt, Artificial Sequence
  Description of Artificial Sequence: Synthetic oligonucleotide
  Antisense strand to SEQ ID NO: 1094930
uucucacagaauaugcugg

SEQ ID NO: 1094932 - RNA, 19 nt, Artificial Sequence
  Description of Artificial Sequence: Synthetic oligonucleotide
  Sense strand starting at position 102 of SEQ ID NO: 915638
cagcauauucugugagaaa

SEQ ID NO: 1094933 - RNA, 19 nt, Artificial Sequence
  Description of Artificial Sequence: Synthetic oligonucleotide
  Antisense strand to SEQ ID NO: 1094932
uuucucacagaauaugcug

SEQ ID NO: 1094934 - RNA, 19 nt, Artificial Sequence
  Description of Artificial Sequence: Synthetic oligonucleotide
  Sense strand starting at position 105 of SEQ ID NO: 915638
cauauucugugagaaacga

SEQ ID NO: 1094935 - RNA, 19 nt, Artificial Sequence
  Description of Artificial Sequence: Synthetic oligonucleotide
  Antisense strand to SEQ ID NO: 1094934
ucguuucucacagaauaug

SEQ ID NO: 1094936 - RNA, 19 nt, Artificial Sequence
  Description of Artificial Sequence: Synthetic oligonucleotide
  Sense strand starting at position 229 of SEQ ID NO: 915638
gucucuaaugcucagcuua

SEQ ID NO: 1094937 - RNA, 19 nt, Artificial Sequence
  Description of Artificial Sequence: Synthetic oligonucleotide
  Antisense strand to SEQ ID NO: 1094936
uaagcugagcauuagagac

SEQ ID NO: 1094938 - RNA, 19 nt, Artificial Sequence
  Description of Artificial Sequence: Synthetic oligonucleotide
  Sense strand starting at position 231 of SEQ ID NO: 915638
cucuaaugcucagcuuagu

SEQ ID NO: 1094939 - RNA, 19 nt, Artificial Sequence
  Description of Artificial Sequence: Synthetic oligonucleotide
  Antisense strand to SEQ ID NO: 1094938
acuaagcugagcauuagag

SEQ ID NO: 1094940 - RNA, 19 nt, Artificial Sequence
  Description of Artificial Sequence: Synthetic oligonucleotide
  Sense strand starting at position 285 of SEQ ID NO: 915638
ugucucuucccaggacacu

SEQ ID NO: 1094941 - RNA, 19 nt, Artificial Sequence
  Description of Artificial Sequence: Synthetic oligonucleotide
  Antisense strand to SEQ ID NO: 1094940
aguguccugggaagagaca

SEQ ID NO: 1094942 - RNA, 19 nt, Artificial Sequence
  Description of Artificial Sequence: Synthetic oligonucleotide
  Sense strand starting at position 366 of SEQ ID NO: 915638
ggcauuugucacugccuua

SEQ ID NO: 1094943 - RNA, 19 nt, Artificial Sequence
  Description of Artificial Sequence: Synthetic oligonucleotide
  Antisense strand to SEQ ID NO: 1094942
uaaggcagugacaaaugcc

SEQ ID NO: 1094944 - RNA, 19 nt, Artificial Sequence
  Description of Artificial Sequence: Synthetic oligonucleotide
  Sense strand starting at position 396 of SEQ ID NO: 915638
aagcgugcuuauuuaaaua

SEQ ID NO: 1094945 - RNA, 19 nt, Artificial Sequence
  Description of Artificial Sequence: Synthetic oligonucleotide
  Antisense strand to SEQ ID NO: 1094944
uauuuaaauaagcacgcuu

SEQ ID NO: 1094946 - RNA, 19 nt, Artificial Sequence
  Description of Artificial Sequence: Synthetic oligonucleotide
  Sense strand starting at position 489 of SEQ ID NO: 915638
uuaugaaauugcccaggga

SEQ ID NO: 1094947 - RNA, 19 nt, Artificial Sequence
  Description of Artificial Sequence: Synthetic oligonucleotide
  Antisense strand to SEQ ID NO: 1094946
ucccugggcaauuucauaa

SEQ ID NO: 1094948 - RNA, 19 nt, Artificial Sequence
  Description of Artificial Sequence: Synthetic oligonucleotide
  Sense strand starting at position 492 of SEQ ID NO: 915638
ugaaauugcccagggaaua

SEQ ID NO: 1094949 - RNA, 19 nt, Artificial Sequence
  Description of Artificial Sequence: Synthetic oligonucleotide
  Antisense strand to SEQ ID NO: 1094948
uauucccugggcaauuuca

SEQ ID NO: 1094950 - RNA, 19 nt, Artificial Sequence
  Description of Artificial Sequence: Synthetic oligonucleotide
  Sense strand starting at position 493 of SEQ ID NO: 915638
gaaauugcccagggaauau

SEQ ID NO: 1094951 - RNA, 19 nt, Artificial Sequence
  Description of Artificial Sequence: Synthetic oligonucleotide
  Antisense strand to SEQ ID NO: 1094950
auauucccugggcaauuuc

SEQ ID NO: 1094952 - RNA, 19 nt, Artificial Sequence
  Description of Artificial Sequence: Synthetic oligonucleotide
  Sense strand starting at position 712 of SEQ ID NO: 915638
ggaaguggcuagagaugau

SEQ ID NO: 1094953 - RNA, 19 nt, Artificial Sequence
  Description of Artificial Sequence: Synthetic oligonucleotide
  Antisense strand to SEQ ID NO: 1094952
aucaucucuagccacuucc

SEQ ID NO: 1094954 - RNA, 19 nt, Artificial Sequence
  Description of Artificial Sequence: Synthetic oligonucleotide
  Sense strand starting at position 786 of SEQ ID NO: 915638
ccaccuagauuucgaacuu

SEQ ID NO: 1094955 - RNA, 19 nt, Artificial Sequence
  Description of Artificial Sequence: Synthetic oligonucleotide
  Antisense strand to SEQ ID NO: 1094954
aaguucgaaaucuaggugg

SEQ ID NO: 1094956 - RNA, 19 nt, Artificial Sequence
  Description of Artificial Sequence: Synthetic oligonucleotide
  Sense strand starting at position 870 of SEQ ID NO: 915638
ccacaaguaucuguugaua

SEQ ID NO: 1094957 - RNA, 19 nt, Artificial Sequence
  Description of Artificial Sequence: Synthetic oligonucleotide
  Antisense strand to SEQ ID NO: 1094956
uaucaacagauacuugugg

SEQ ID NO: 1094958 - RNA, 19 nt, Artificial Sequence
  Description of Artificial Sequence: Synthetic oligonucleotide
  Sense strand starting at position 875 of SEQ ID NO: 915638
aguaucuguugauagagau

SEQ ID NO: 1094959 - RNA, 19 nt, Artificial Sequence
  Description of Artificial Sequence: Synthetic oligonucleotide
  Antisense strand to SEQ ID NO: 1094958
aucucuaucaacagauacu

SEQ ID NO: 1094960 - RNA, 19 nt, Artificial Sequence
  Description of Artificial Sequence: Synthetic oligonucleotide
  Sense strand starting at position 891 of SEQ ID NO: 915638
gaugaaucccuacgucauc

SEQ ID NO: 1094961 - RNA, 19 nt, Artificial Sequence
  Description of Artificial Sequence: Synthetic oligonucleotide
  Antisense strand to SEQ ID NO: 1094960
gaugacguagggauucauc

SEQ ID NO: 1094962 - RNA, 19 nt, Artificial Sequence
  Description of Artificial Sequence: Synthetic oligonucleotide
  Sense strand starting at position 900 of SEQ ID NO: 915638
cuacgucaucucugugaug

SEQ ID NO: 1094963 - RNA, 19 nt, Artificial Sequence
  Description of Artificial Sequence: Synthetic oligonucleotide
  Antisense strand to SEQ ID NO: 1094962
caucacagagaugacguag

SEQ ID NO: 1094964 - RNA, 19 nt, Artificial Sequence
  Description of Artificial Sequence: Synthetic oligonucleotide
  Sense strand starting at position 901 of SEQ ID NO: 915638
uacgucaucucugugaugu

SEQ ID NO: 1094965 - RNA, 19 nt, Artificial Sequence
  Description of Artificial Sequence: Synthetic oligonucleotide
  Antisense strand to SEQ ID NO: 1094964
acaucacagagaugacgua

SEQ ID NO: 1094966 - RNA, 19 nt, Artificial Sequence
  Description of Artificial Sequence: Synthetic oligonucleotide
  Sense strand starting at position 902 of SEQ ID NO: 915638
acgucaucucugugauguc

SEQ ID NO: 1094967 - RNA, 19 nt, Artificial Sequence
  Description of Artificial Sequence: Synthetic oligonucleotide
  Antisense strand to SEQ ID NO: 1094966
gacaucacagagaugacgu

SEQ ID NO: 1094968 - RNA, 19 nt, Artificial Sequence
  Description of Artificial Sequence: Synthetic oligonucleotide
  Sense strand starting at position 911 of SEQ ID NO: 915638
cugugaugucacuguaucu

SEQ ID NO: 1094969 - RNA, 19 nt, Artificial Sequence
  Description of Artificial Sequence: Synthetic oligonucleotide
  Antisense strand to SEQ ID NO: 1094968
agauacagugacaucacag

SEQ ID NO: 1094970 - RNA, 19 nt, Artificial Sequence
  Description of Artificial Sequence: Synthetic oligonucleotide
  Sense strand starting at position 1048 of SEQ ID NO: 915638
agaugaaacgagggauugu

SEQ ID NO: 1094971 - RNA, 19 nt, Artificial Sequence
  Description of Artificial Sequence: Synthetic oligonucleotide
  Antisense strand to SEQ ID NO: 1094970
acaaucccucguuucaucu

SEQ ID NO: 1094972 - RNA, 19 nt, Artificial Sequence
  Description of Artificial Sequence: Synthetic oligonucleotide
  Sense strand starting at position 1549 of SEQ ID NO: 915638
cgaagagaugccugcgacu

SEQ ID NO: 1094973 - RNA, 19 nt, Artificial Sequence
  Description of Artificial Sequence: Synthetic oligonucleotide
  Antisense strand to SEQ ID NO: 1094972
agucgcaggcaucucuucg

SEQ ID NO: 1094974 - RNA, 19 nt, Artificial Sequence
  Description of Artificial Sequence: Synthetic oligonucleotide
  Sense strand starting at position 1551 of SEQ ID NO: 915638
aagagaugccugcgacuug

SEQ ID NO: 1094975 - RNA, 19 nt, Artificial Sequence
  Description of Artificial Sequence: Synthetic oligonucleotide
  Antisense strand to SEQ ID NO: 1094974
caagucgcaggcaucucuu

SEQ ID NO: 1094976 - RNA, 19 nt, Artificial Sequence
  Description of Artificial Sequence: Synthetic oligonucleotide
  Sense strand starting at position 2283 of SEQ ID NO: 915638
auaagaagccauugcaucu

SEQ ID NO: 1094977 - RNA, 19 nt, Artificial Sequence
  Description of Artificial Sequence: Synthetic oligonucleotide
  Antisense strand to SEQ ID NO: 1094976
agaugcaauggcuucuuau

SEQ ID NO: 1094978 - RNA, 19 nt, Artificial Sequence
  Description of Artificial Sequence: Synthetic oligonucleotide
  Sense strand starting at position 2763 of SEQ ID NO: 915638
gaucacauguggguaguua

SEQ ID NO: 1094979 - RNA, 19 nt, Artificial Sequence
  Description of Artificial Sequence: Synthetic oligonucleotide
  Antisense strand to SEQ ID NO: 1094978
uaacuacccacaugugauc

SEQ ID NO: 1094980 - RNA, 19 nt, Artificial Sequence
  Description of Artificial Sequence: Synthetic oligonucleotide
  Sense strand starting at position 2764 of SEQ ID NO: 915638
aucacauguggguaguuau

SEQ ID NO: 1094981 - RNA, 19 nt, Artificial Sequence
  Description of Artificial Sequence: Synthetic oligonucleotide
  Antisense strand to SEQ ID NO: 1094980
auaacuacccacaugugau

SEQ ID NO: 1094982 - RNA, 19 nt, Artificial Sequence
  Description of Artificial Sequence: Synthetic oligonucleotide
  Sense strand starting at position 2883 of SEQ ID NO: 915638
aacagaaguucucugguga

SEQ ID NO: 1094983 - RNA, 19 nt, Artificial Sequence
  Description of Artificial Sequence: Synthetic oligonucleotide
  Antisense strand to SEQ ID NO: 1094982
ucaccagagaacuucuguu

SEQ ID NO: 1094984 - RNA, 19 nt, Artificial Sequence
  Description of Artificial Sequence: Synthetic oligonucleotide
  Sense strand starting at position 2884 of SEQ ID NO: 915638
acagaaguucucuggugaa

SEQ ID NO: 1094985 - RNA, 19 nt, Artificial Sequence
  Description of Artificial Sequence: Synthetic oligonucleotide
  Antisense strand to SEQ ID NO: 1094984
uucaccagagaacuucugu

SEQ ID NO: 1094986 - RNA, 19 nt, Artificial Sequence
  Description of Artificial Sequence: Synthetic oligonucleotide
  Sense strand starting at position 2888 of SEQ ID NO: 915638
aaguucucuggugaagauu

SEQ ID NO: 1094987 - RNA, 19 nt, Artificial Sequence
  Description of Artificial Sequence: Synthetic oligonucleotide
  Antisense strand to SEQ ID NO: 1094986
aaucuucaccagagaacuu

SEQ ID NO: 1094988 - RNA, 19 nt, Artificial Sequence
  Description of Artificial Sequence: Synthetic oligonucleotide
  Sense strand starting at position 3293 of SEQ ID NO: 915638
acaugcaguucuucugagu

SEQ ID NO: 1094989 - RNA, 19 nt, Artificial Sequence
  Description of Artificial Sequence: Synthetic oligonucleotide
  Antisense strand to SEQ ID NO: 1094988
acucagaagaacugcaugu

SEQ ID NO: 1094990 - RNA, 19 nt, Artificial Sequence
  Description of Artificial Sequence: Synthetic oligonucleotide
  Sense strand starting at position 3322 of SEQ ID NO: 915638
accauuaagucucuagugu

SEQ ID NO: 1094991 - RNA, 19 nt, Artificial Sequence
  Description of Artificial Sequence: Synthetic oligonucleotide
  Antisense strand to SEQ ID NO: 1094990
acacuagagacuuaauggu

SEQ ID NO: 1094992 - RNA, 19 nt, Artificial Sequence
  Description of Artificial Sequence: Synthetic oligonucleotide
  Sense strand starting at position 3323 of SEQ ID NO: 915638
ccauuaagucucuaguguu

SEQ ID NO: 1094993 - RNA, 19 nt, Artificial Sequence
  Description of Artificial Sequence: Synthetic oligonucleotide
  Antisense strand to SEQ ID NO: 1094992
aacacuagagacuuaaugg

SEQ ID NO: 1094994 - RNA, 19 nt, Artificial Sequence
  Description of Artificial Sequence: Synthetic oligonucleotide
  Sense strand starting at position 3419 of SEQ ID NO: 915638
ggugaugccagacaaguuu

SEQ ID NO: 1094995 - RNA, 19 nt, Artificial Sequence
  Description of Artificial Sequence: Synthetic oligonucleotide
  Antisense strand to SEQ ID NO: 1094994
aaacuugucuggcaucacc

SEQ ID NO: 1094996 - RNA, 19 nt, Artificial Sequence
  Description of Artificial Sequence: Synthetic oligonucleotide
  Sense strand starting at position 3481 of SEQ ID NO: 915638
uuaauauggcugggugcaa

SEQ ID NO: 1094997 - RNA, 19 nt, Artificial Sequence
  Description of Artificial Sequence: Synthetic oligonucleotide
  Antisense strand to SEQ ID NO: 1094996
uugcacccagccauauuaa

SEQ ID NO: 1094998 - RNA, 19 nt, Artificial Sequence
  Description of Artificial Sequence: Synthetic oligonucleotide
  Sense strand starting at position 3482 of SEQ ID NO: 915638
uaauauggcugggugcaau

SEQ ID NO: 1094999 - RNA, 19 nt, Artificial Sequence
  Description of Artificial Sequence: Synthetic oligonucleotide
  Antisense strand to SEQ ID NO: 1094998
auugcacccagccauauua

SEQ ID NO: 1095000 - RNA, 19 nt, Artificial Sequence
  Description of Artificial Sequence: Synthetic oligonucleotide
  Sense strand starting at position 3812 of SEQ ID NO: 915638
ggagcaagugaaugaauau

SEQ ID NO: 1095001 - RNA, 19 nt, Artificial Sequence
  Description of Artificial Sequence: Synthetic oligonucleotide
  Antisense strand to SEQ ID NO: 1095000
auauucauucacuugcucc

SEQ ID NO: 1095002 - RNA, 19 nt, Artificial Sequence
  Description of Artificial Sequence: Synthetic oligonucleotide
  Sense strand starting at position 3974 of SEQ ID NO: 915638
gcugcaaggacuggaaauu

SEQ ID NO: 1095003 - RNA, 19 nt, Artificial Sequence
  Description of Artificial Sequence: Synthetic oligonucleotide
  Antisense strand to SEQ ID NO: 1095002
aauuuccaguccuugcagc

SEQ ID NO: 1095004 - RNA, 19 nt, Artificial Sequence
  Description of Artificial Sequence: Synthetic oligonucleotide
  Sense strand starting at position 92 of SEQ ID NO: 915639
ggauaugucuacucaggua

SEQ ID NO: 1095005 - RNA, 19 nt, Artificial Sequence
  Description of Artificial Sequence: Synthetic oligonucleotide
  Antisense strand to SEQ ID NO: 1095004
uaccugaguagacauaucc

SEQ ID NO: 1095006 - RNA, 19 nt, Artificial Sequence
  Description of Artificial Sequence: Synthetic oligonucleotide
  Sense strand starting at position 189 of SEQ ID NO: 915639
gaaagaaaucugugguugu

SEQ ID NO: 1095007 - RNA, 19 nt, Artificial Sequence
  Description of Artificial Sequence: Synthetic oligonucleotide
  Antisense strand to SEQ ID NO: 1095006
acaaccacagauuucuuuc

SEQ ID NO: 1095008 - RNA, 19 nt, Artificial Sequence
  Description of Artificial Sequence: Synthetic oligonucleotide
  Sense strand starting at position 192 of SEQ ID NO: 915639
agaaaucugugguuguugu

SEQ ID NO: 1095009 - RNA, 19 nt, Artificial Sequence
  Description of Artificial Sequence: Synthetic oligonucleotide
  Antisense strand to SEQ ID NO: 1095008
acaacaaccacagauuucu

SEQ ID NO: 1095010 - RNA, 19 nt, Artificial Sequence
  Description of Artificial Sequence: Synthetic oligonucleotide
  Sense strand starting at position 203 of SEQ ID NO: 915639
guuguugugaacugauaag

SEQ ID NO: 1095011 - RNA, 19 nt, Artificial Sequence
  Description of Artificial Sequence: Synthetic oligonucleotide
  Antisense strand to SEQ ID NO: 1095010
cuuaucaguucacaacaac

SEQ ID NO: 1095012 - RNA, 19 nt, Artificial Sequence
  Description of Artificial Sequence: Synthetic oligonucleotide
  Sense strand starting at position 220 of SEQ ID NO: 915639
agguucugcuccuuugcaa

SEQ ID NO: 1095013 - RNA, 19 nt, Artificial Sequence
  Description of Artificial Sequence: Synthetic oligonucleotide
  Antisense strand to SEQ ID NO: 1095012
uugcaaaggagcagaaccu

SEQ ID NO: 1095014 - RNA, 19 nt, Artificial Sequence
  Description of Artificial Sequence: Synthetic oligonucleotide
  Sense strand starting at position 275 of SEQ ID NO: 915639
ugaaauguggcaggcuuaa

SEQ ID NO: 1095015 - RNA, 19 nt, Artificial Sequence
  Description of Artificial Sequence: Synthetic oligonucleotide
  Antisense strand to SEQ ID NO: 1095014
uuaagccugccacauuuca

SEQ ID NO: 1095016 - RNA, 19 nt, Artificial Sequence
  Description of Artificial Sequence: Synthetic oligonucleotide
  Sense strand starting at position 372 of SEQ ID NO: 915639
ggaacaucaucugucucua

SEQ ID NO: 1095017 - RNA, 19 nt, Artificial Sequence
  Description of Artificial Sequence: Synthetic oligonucleotide
  Antisense strand to SEQ ID NO: 1095016
uagagacagaugauguucc

SEQ ID NO: 1095018 - RNA, 19 nt, Artificial Sequence
  Description of Artificial Sequence: Synthetic oligonucleotide
  Sense strand starting at position 377 of SEQ ID NO: 915639
aucaucugucucuaaguuu

SEQ ID NO: 1095019 - RNA, 19 nt, Artificial Sequence
  Description of Artificial Sequence: Synthetic oligonucleotide
  Antisense strand to SEQ ID NO: 1095018
aaacuuagagacagaugau

SEQ ID NO: 1095020 - RNA, 19 nt, Artificial Sequence
  Description of Artificial Sequence: Synthetic oligonucleotide
  Sense strand starting at position 782 of SEQ ID NO: 915639
cuagaaguguacccagauu

SEQ ID NO: 1095021 - RNA, 19 nt, Artificial Sequence
  Description of Artificial Sequence: Synthetic oligonucleotide
  Antisense strand to SEQ ID NO: 1095020
aaucuggguacacuucuag

SEQ ID NO: 1095022 - RNA, 19 nt, Artificial Sequence
  Description of Artificial Sequence: Synthetic oligonucleotide
  Sense strand starting at position 847 of SEQ ID NO: 915639
cccaguauuuccuaccgaa

SEQ ID NO: 1095023 - RNA, 19 nt, Artificial Sequence
  Description of Artificial Sequence: Synthetic oligonucleotide
  Antisense strand to SEQ ID NO: 1095022
uucgguaggaaauacuggg

SEQ ID NO: 1095024 - RNA, 19 nt, Artificial Sequence
  Description of Artificial Sequence: Synthetic oligonucleotide
  Sense strand starting at position 850 of SEQ ID NO: 915639
aguauuuccuaccgaaagg

SEQ ID NO: 1095025 - RNA, 19 nt, Artificial Sequence
  Description of Artificial Sequence: Synthetic oligonucleotide
  Antisense strand to SEQ ID NO: 1095024
ccuuucgguaggaaauacu

SEQ ID NO: 1095026 - RNA, 19 nt, Artificial Sequence
  Description of Artificial Sequence: Synthetic oligonucleotide
  Sense strand starting at position 1984 of SEQ ID NO: 915639
ugcuaagaauguucggaau

SEQ ID NO: 1095027 - RNA, 19 nt, Artificial Sequence
  Description of Artificial Sequence: Synthetic oligonucleotide
  Antisense strand to SEQ ID NO: 1095026
auuccgaacauucuuagca

SEQ ID NO: 1095028 - RNA, 19 nt, Artificial Sequence
  Description of Artificial Sequence: Synthetic oligonucleotide
  Sense strand starting at position 1987 of SEQ ID NO: 915639
uaagaauguucggaaugag

SEQ ID NO: 1095029 - RNA, 19 nt, Artificial Sequence
  Description of Artificial Sequence: Synthetic oligonucleotide
  Antisense strand to SEQ ID NO: 1095028
cucauuccgaacauucuua

SEQ ID NO: 1095030 - RNA, 19 nt, Artificial Sequence
  Description of Artificial Sequence: Synthetic oligonucleotide
  Sense strand starting at position 1990 of SEQ ID NO: 915639
gaauguucggaaugaggac

SEQ ID NO: 1095031 - RNA, 19 nt, Artificial Sequence
  Description of Artificial Sequence: Synthetic oligonucleotide
  Antisense strand to SEQ ID NO: 1095030
guccucauuccgaacauuc

SEQ ID NO: 1095032 - RNA, 19 nt, Artificial Sequence
  Description of Artificial Sequence: Synthetic oligonucleotide
  Sense strand starting at position 2332 of SEQ ID NO: 915639
cgaagaacucuggaagccu

SEQ ID NO: 1095033 - RNA, 19 nt, Artificial Sequence
  Description of Artificial Sequence: Synthetic oligonucleotide
  Antisense strand to SEQ ID NO: 1095032
aggcuuccagaguucuucg

SEQ ID NO: 1095034 - RNA, 19 nt, Artificial Sequence
  Description of Artificial Sequence: Synthetic oligonucleotide
  Sense strand starting at position 2451 of SEQ ID NO: 915639
cguugagugcucccggacu

SEQ ID NO: 1095035 - RNA, 19 nt, Artificial Sequence
  Description of Artificial Sequence: Synthetic oligonucleotide
  Antisense strand to SEQ ID NO: 1095034
aguccgggagcacucaacg

SEQ ID NO: 1095036 - RNA, 19 nt, Artificial Sequence
  Description of Artificial Sequence: Synthetic oligonucleotide
  Sense strand starting at position 2481 of SEQ ID NO: 915639
gcaaguguaggguagagaa

SEQ ID NO: 1095037 - RNA, 19 nt, Artificial Sequence
  Description of Artificial Sequence: Synthetic oligonucleotide
  Antisense strand to SEQ ID NO: 1095036
uucucuacccuacacuugc

SEQ ID NO: 1095038 - RNA, 19 nt, Artificial Sequence
  Description of Artificial Sequence: Synthetic oligonucleotide
  Sense strand starting at position 2484 of SEQ ID NO: 915639
aguguaggguagagaaguu

SEQ ID NO: 1095039 - RNA, 19 nt, Artificial Sequence
  Description of Artificial Sequence: Synthetic oligonucleotide
  Antisense strand to SEQ ID NO: 1095038
aacuucucuacccuacacu

SEQ ID NO: 1095040 - RNA, 19 nt, Artificial Sequence
  Description of Artificial Sequence: Synthetic oligonucleotide
  Sense strand starting at position 2508 of SEQ ID NO: 915639
ucuggugaugcagauuguu

SEQ ID NO: 1095041 - RNA, 19 nt, Artificial Sequence
  Description of Artificial Sequence: Synthetic oligonucleotide
  Antisense strand to SEQ ID NO: 1095040
aacaaucugcaucaccaga

SEQ ID NO: 1095042 - RNA, 19 nt, Artificial Sequence
  Description of Artificial Sequence: Synthetic oligonucleotide
  Sense strand starting at position 2517 of SEQ ID NO: 915639
gcagauuguugcucucgag

SEQ ID NO: 1095043 - RNA, 19 nt, Artificial Sequence
  Description of Artificial Sequence: Synthetic oligonucleotide
  Antisense strand to SEQ ID NO: 1095042
cucgagagcaacaaucugc

SEQ ID NO: 1095044 - RNA, 19 nt, Artificial Sequence
  Description of Artificial Sequence: Synthetic oligonucleotide
  Sense strand starting at position 2546 of SEQ ID NO: 915639
gccgucuccgggccagauu

SEQ ID NO: 1095045 - RNA, 19 nt, Artificial Sequence
  Description of Artificial Sequence: Synthetic oligonucleotide
  Antisense strand to SEQ ID NO: 1095044
aaucuggcccggagacggc

SEQ ID NO: 1095046 - RNA, 19 nt, Artificial Sequence
  Description of Artificial Sequence: Synthetic oligonucleotide
  Sense strand starting at position 2634 of SEQ ID NO: 915639
cugucuuacgguugggaaa

SEQ ID NO: 1095047 - RNA, 19 nt, Artificial Sequence
  Description of Artificial Sequence: Synthetic oligonucleotide
  Antisense strand to SEQ ID NO: 1095046
uuucccaaccguaagacag

SEQ ID NO: 1095048 - RNA, 19 nt, Artificial Sequence
  Description of Artificial Sequence: Synthetic oligonucleotide
  Sense strand starting at position 2658 of SEQ ID NO: 915639
accuuuagcuuagcaaaga

SEQ ID NO: 1095049 - RNA, 19 nt, Artificial Sequence
  Description of Artificial Sequence: Synthetic oligonucleotide
  Antisense strand to SEQ ID NO: 1095048
ucuuugcuaagcuaaaggu

SEQ ID NO: 1095050 - RNA, 19 nt, Artificial Sequence
  Description of Artificial Sequence: Synthetic oligonucleotide
  Sense strand starting at position 2675 of SEQ ID NO: 915639
gaaggauaauuacagaguu

SEQ ID NO: 1095051 - RNA, 19 nt, Artificial Sequence
  Description of Artificial Sequence: Synthetic oligonucleotide
  Antisense strand to SEQ ID NO: 1095050
aacucuguaauuauccuuc

SEQ ID NO: 1095052 - RNA, 19 nt, Artificial Sequence
  Description of Artificial Sequence: Synthetic oligonucleotide
  Sense strand starting at position 2682 of SEQ ID NO: 915639
aauuacagaguucguaaua

SEQ ID NO: 1095053 - RNA, 19 nt, Artificial Sequence
  Description of Artificial Sequence: Synthetic oligonucleotide
  Antisense strand to SEQ ID NO: 1095052
uauuacgaacucuguaauu

SEQ ID NO: 1095054 - RNA, 19 nt, Artificial Sequence
  Description of Artificial Sequence: Synthetic oligonucleotide
  Sense strand starting at position 2683 of SEQ ID NO: 915639
auuacagaguucguaauaa

SEQ ID NO: 1095055 - RNA, 19 nt, Artificial Sequence
  Description of Artificial Sequence: Synthetic oligonucleotide
  Antisense strand to SEQ ID NO: 1095054
uuauuacgaacucuguaau

SEQ ID NO: 1095056 - RNA, 19 nt, Artificial Sequence
  Description of Artificial Sequence: Synthetic oligonucleotide
  Sense strand starting at position 2712 of SEQ ID NO: 915639
cuagcaaggucuucuccaa

SEQ ID NO: 1095057 - RNA, 19 nt, Artificial Sequence
  Description of Artificial Sequence: Synthetic oligonucleotide
  Antisense strand to SEQ ID NO: 1095056
uuggagaagaccuugcuag

SEQ ID NO: 1095058 - RNA, 19 nt, Artificial Sequence
  Description of Artificial Sequence: Synthetic oligonucleotide
  Sense strand starting at position 2914 of SEQ ID NO: 915639
agacgcagucgguaaauca

SEQ ID NO: 1095059 - RNA, 19 nt, Artificial Sequence
  Description of Artificial Sequence: Synthetic oligonucleotide
  Antisense strand to SEQ ID NO: 1095058
ugauuuaccgacugcgucu

SEQ ID NO: 1095060 - RNA, 19 nt, Artificial Sequence
  Description of Artificial Sequence: Synthetic oligonucleotide
  Sense strand starting at position 2960 of SEQ ID NO: 915639
gacagaaccgucuaaaguu

SEQ ID NO: 1095061 - RNA, 19 nt, Artificial Sequence
  Description of Artificial Sequence: Synthetic oligonucleotide
  Antisense strand to SEQ ID NO: 1095060
aacuuuagacgguucuguc

SEQ ID NO: 1095062 - RNA, 19 nt, Artificial Sequence
  Description of Artificial Sequence: Synthetic oligonucleotide
  Sense strand starting at position 2972 of SEQ ID NO: 915639
uaaaguuucgggugauugu

SEQ ID NO: 1095063 - RNA, 19 nt, Artificial Sequence
  Description of Artificial Sequence: Synthetic oligonucleotide
  Antisense strand to SEQ ID NO: 1095062
acaaucacccgaaacuuua

SEQ ID NO: 1095064 - RNA, 19 nt, Artificial Sequence
  Description of Artificial Sequence: Synthetic oligonucleotide
  Sense strand starting at position 2973 of SEQ ID NO: 915639
aaaguuucgggugauuguu

SEQ ID NO: 1095065 - RNA, 19 nt, Artificial Sequence
  Description of Artificial Sequence: Synthetic oligonucleotide
  Antisense strand to SEQ ID NO: 1095064
aacaaucacccgaaacuuu

SEQ ID NO: 1095066 - RNA, 19 nt, Artificial Sequence
  Description of Artificial Sequence: Synthetic oligonucleotide
  Sense strand starting at position 2975 of SEQ ID NO: 915639
aguuucgggugauuguuau

SEQ ID NO: 1095067 - RNA, 19 nt, Artificial Sequence
  Description of Artificial Sequence: Synthetic oligonucleotide
  Antisense strand to SEQ ID NO: 1095066
auaacaaucacccgaaacu

SEQ ID NO: 1095068 - RNA, 19 nt, Artificial Sequence
  Description of Artificial Sequence: Synthetic oligonucleotide
  Sense strand starting at position 3554 of SEQ ID NO: 915639
ucuugaaguaaucggagua

SEQ ID NO: 1095069 - RNA, 19 nt, Artificial Sequence
  Description of Artificial Sequence: Synthetic oligonucleotide
  Antisense strand to SEQ ID NO: 1095068
uacuccgauuacuucaaga

SEQ ID NO: 1095070 - RNA, 19 nt, Artificial Sequence
  Description of Artificial Sequence: Synthetic oligonucleotide
  Sense strand starting at position 3555 of SEQ ID NO: 915639
cuugaaguaaucggaguaa

SEQ ID NO: 1095071 - RNA, 19 nt, Artificial Sequence
  Description of Artificial Sequence: Synthetic oligonucleotide
  Antisense strand to SEQ ID NO: 1095070
uuacuccgauuacuucaag

SEQ ID NO: 1095072 - RNA, 19 nt, Artificial Sequence
  Description of Artificial Sequence: Synthetic oligonucleotide
  Sense strand starting at position 3669 of SEQ ID NO: 915639
uugggauauugacauugau

SEQ ID NO: 1095073 - RNA, 19 nt, Artificial Sequence
  Description of Artificial Sequence: Synthetic oligonucleotide
  Antisense strand to SEQ ID NO: 1095072
aucaaugucaauaucccaa

SEQ ID NO: 1095074 - RNA, 19 nt, Artificial Sequence
  Description of Artificial Sequence: Synthetic oligonucleotide
  Sense strand starting at position 3747 of SEQ ID NO: 915639
uguguuuaggucuaugcaa

SEQ ID NO: 1095075 - RNA, 19 nt, Artificial Sequence
  Description of Artificial Sequence: Synthetic oligonucleotide
  Antisense strand to SEQ ID NO: 1095074
uugcauagaccuaaacaca

SEQ ID NO: 1095076 - RNA, 19 nt, Artificial Sequence
  Description of Artificial Sequence: Synthetic oligonucleotide
  Sense strand starting at position 3749 of SEQ ID NO: 915639
uguuuaggucuaugcaauu

SEQ ID NO: 1095077 - RNA, 19 nt, Artificial Sequence
  Description of Artificial Sequence: Synthetic oligonucleotide
  Antisense strand to SEQ ID NO: 1095076
aauugcauagaccuaaaca

SEQ ID NO: 1095078 - RNA, 19 nt, Artificial Sequence
  Description of Artificial Sequence: Synthetic oligonucleotide
  Sense strand starting at position 3762 of SEQ ID NO: 915639
gcaauuuccugacuugugu

SEQ ID NO: 1095079 - RNA, 19 nt, Artificial Sequence
  Description of Artificial Sequence: Synthetic oligonucleotide
  Antisense strand to SEQ ID NO: 1095078
acacaagucaggaaauugc

SEQ ID NO: 1095080 - RNA, 19 nt, Artificial Sequence
  Description of Artificial Sequence: Synthetic oligonucleotide
  Sense strand starting at position 3837 of SEQ ID NO: 915639
aagguaauacagugagguu

SEQ ID NO: 1095081 - RNA, 19 nt, Artificial Sequence
  Description of Artificial Sequence: Synthetic oligonucleotide
  Antisense strand to SEQ ID NO: 1095080
aaccucacuguauuaccuu

SEQ ID NO: 1095082 - RNA, 19 nt, Artificial Sequence
  Description of Artificial Sequence: Synthetic oligonucleotide
  Sense strand starting at position 3979 of SEQ ID NO: 915639
cagauaaauuucgauggca

SEQ ID NO: 1095083 - RNA, 19 nt, Artificial Sequence
  Description of Artificial Sequence: Synthetic oligonucleotide
  Antisense strand to SEQ ID NO: 1095082
ugccaucgaaauuuaucug

SEQ ID NO: 1095084 - RNA, 19 nt, Artificial Sequence
  Description of Artificial Sequence: Synthetic oligonucleotide
  Sense strand starting at position 133 of SEQ ID NO: 915640
ggaguuaugccucaacgga

SEQ ID NO: 1095085 - RNA, 19 nt, Artificial Sequence
  Description of Artificial Sequence: Synthetic oligonucleotide
  Antisense strand to SEQ ID NO: 1095084
uccguugaggcauaacucc

SEQ ID NO: 1095086 - RNA, 19 nt, Artificial Sequence
  Description of Artificial Sequence: Synthetic oligonucleotide
  Sense strand starting at position 212 of SEQ ID NO: 915640
cguguauaugcaucgucca

SEQ ID NO: 1095087 - RNA, 19 nt, Artificial Sequence
  Description of Artificial Sequence: Synthetic oligonucleotide
  Antisense strand to SEQ ID NO: 1095086
uggacgaugcauauacacg

SEQ ID NO: 1095088 - RNA, 19 nt, Artificial Sequence
  Description of Artificial Sequence: Synthetic oligonucleotide
  Sense strand starting at position 304 of SEQ ID NO: 915640
gggcccaugagcuguauuu

SEQ ID NO: 1095089 - RNA, 19 nt, Artificial Sequence
  Description of Artificial Sequence: Synthetic oligonucleotide
  Antisense strand to SEQ ID NO: 1095088
aaauacagcucaugggccc

SEQ ID NO: 1095090 - RNA, 19 nt, Artificial Sequence
  Description of Artificial Sequence: Synthetic oligonucleotide
  Sense strand starting at position 523 of SEQ ID NO: 915640
aggagucaugcccaaguau

SEQ ID NO: 1095091 - RNA, 19 nt, Artificial Sequence
  Description of Artificial Sequence: Synthetic oligonucleotide
  Antisense strand to SEQ ID NO: 1095090
auacuugggcaugacuccu

SEQ ID NO: 1095092 - RNA, 19 nt, Artificial Sequence
  Description of Artificial Sequence: Synthetic oligonucleotide
  Sense strand starting at position 568 of SEQ ID NO: 915640
uuaucaucaucuguaugga

SEQ ID NO: 1095093 - RNA, 19 nt, Artificial Sequence
  Description of Artificial Sequence: Synthetic oligonucleotide
  Antisense strand to SEQ ID NO: 1095092
uccauacagaugaugauaa

SEQ ID NO: 1095094 - RNA, 19 nt, Artificial Sequence
  Description of Artificial Sequence: Synthetic oligonucleotide
  Sense strand starting at position 571 of SEQ ID NO: 915640
ucaucaucuguauggaaag

SEQ ID NO: 1095095 - RNA, 19 nt, Artificial Sequence
  Description of Artificial Sequence: Synthetic oligonucleotide
  Antisense strand to SEQ ID NO: 1095094
cuuuccauacagaugauga

SEQ ID NO: 1095096 - RNA, 19 nt, Artificial Sequence
  Description of Artificial Sequence: Synthetic oligonucleotide
  Sense strand starting at position 619 of SEQ ID NO: 915640
ggccaaucugccuagggaa

SEQ ID NO: 1095097 - RNA, 19 nt, Artificial Sequence
  Description of Artificial Sequence: Synthetic oligonucleotide
  Antisense strand to SEQ ID NO: 1095096
uucccuaggcagauuggcc

SEQ ID NO: 1095098 - RNA, 19 nt, Artificial Sequence
  Description of Artificial Sequence: Synthetic oligonucleotide
  Sense strand starting at position 751 of SEQ ID NO: 915640
gggugauccuaauuaguuc

SEQ ID NO: 1095099 - RNA, 19 nt, Artificial Sequence
  Description of Artificial Sequence: Synthetic oligonucleotide
  Antisense strand to SEQ ID NO: 1095098
gaacuaauuaggaucaccc

SEQ ID NO: 1095100 - RNA, 19 nt, Artificial Sequence
  Description of Artificial Sequence: Synthetic oligonucleotide
  Sense strand starting at position 849 of SEQ ID NO: 915640
gguaaauaauacuugucaa

SEQ ID NO: 1095101 - RNA, 19 nt, Artificial Sequence
  Description of Artificial Sequence: Synthetic oligonucleotide
  Antisense strand to SEQ ID NO: 1095100
uugacaaguauuauuuacc

SEQ ID NO: 1095102 - RNA, 19 nt, Artificial Sequence
  Description of Artificial Sequence: Synthetic oligonucleotide
  Sense strand starting at position 897 of SEQ ID NO: 915640
guagguuuaaacuacggua

SEQ ID NO: 1095103 - RNA, 19 nt, Artificial Sequence
  Description of Artificial Sequence: Synthetic oligonucleotide
  Antisense strand to SEQ ID NO: 1095102
uaccguaguuuaaaccuac

SEQ ID NO: 1095104 - RNA, 19 nt, Artificial Sequence
  Description of Artificial Sequence: Synthetic oligonucleotide
  Sense strand starting at position 899 of SEQ ID NO: 915640
agguuuaaacuacgguaau

SEQ ID NO: 1095105 - RNA, 19 nt, Artificial Sequence
  Description of Artificial Sequence: Synthetic oligonucleotide
  Antisense strand to SEQ ID NO: 1095104
auuaccguaguuuaaaccu

SEQ ID NO: 1095106 - RNA, 19 nt, Artificial Sequence
  Description of Artificial Sequence: Synthetic oligonucleotide
  Sense strand starting at position 924 of SEQ ID NO: 915640
ugcagaagccauuauuauu

SEQ ID NO: 1095107 - RNA, 19 nt, Artificial Sequence
  Description of Artificial Sequence: Synthetic oligonucleotide
  Antisense strand to SEQ ID NO: 1095106
aauaauaauggcuucugca

SEQ ID NO: 1095108 - RNA, 19 nt, Artificial Sequence
  Description of Artificial Sequence: Synthetic oligonucleotide
  Sense strand starting at position 967 of SEQ ID NO: 915640
agcagcauggccuaucaau

SEQ ID NO: 1095109 - RNA, 19 nt, Artificial Sequence
  Description of Artificial Sequence: Synthetic oligonucleotide
  Antisense strand to SEQ ID NO: 1095108
auugauaggccaugcugcu

SEQ ID NO: 1095110 - RNA, 19 nt, Artificial Sequence
  Description of Artificial Sequence: Synthetic oligonucleotide
  Sense strand starting at position 1027 of SEQ ID NO: 915640
uugcccuaagcugagaauu

SEQ ID NO: 1095111 - RNA, 19 nt, Artificial Sequence
  Description of Artificial Sequence: Synthetic oligonucleotide
  Antisense strand to SEQ ID NO: 1095110
aauucucagcuuagggcaa

SEQ ID NO: 1095112 - RNA, 19 nt, Artificial Sequence
  Description of Artificial Sequence: Synthetic oligonucleotide
  Sense strand starting at position 1172 of SEQ ID NO: 915640
gguuuaacugcuuaaauuc

SEQ ID NO: 1095113 - RNA, 19 nt, Artificial Sequence
  Description of Artificial Sequence: Synthetic oligonucleotide
  Antisense strand to SEQ ID NO: 1095112
gaauuuaagcaguuaaacc

SEQ ID NO: 1095114 - RNA, 19 nt, Artificial Sequence
  Description of Artificial Sequence: Synthetic oligonucleotide
  Sense strand starting at position 1285 of SEQ ID NO: 915640
gguaaagaaaggugccuua

SEQ ID NO: 1095115 - RNA, 19 nt, Artificial Sequence
  Description of Artificial Sequence: Synthetic oligonucleotide
  Antisense strand to SEQ ID NO: 1095114
uaaggcaccuuucuuuacc

SEQ ID NO: 1095116 - RNA, 19 nt, Artificial Sequence
  Description of Artificial Sequence: Synthetic oligonucleotide
  Sense strand starting at position 1288 of SEQ ID NO: 915640
aaagaaaggugccuuagaa

SEQ ID NO: 1095117 - RNA, 19 nt, Artificial Sequence
  Description of Artificial Sequence: Synthetic oligonucleotide
  Antisense strand to SEQ ID NO: 1095116
uucuaaggcaccuuucuuu

SEQ ID NO: 1095118 - RNA, 19 nt, Artificial Sequence
  Description of Artificial Sequence: Synthetic oligonucleotide
  Sense strand starting at position 1409 of SEQ ID NO: 915640
ggcagugcuacacagagaa

SEQ ID NO: 1095119 - RNA, 19 nt, Artificial Sequence
  Description of Artificial Sequence: Synthetic oligonucleotide
  Antisense strand to SEQ ID NO: 1095118
uucucuguguagcacugcc

SEQ ID NO: 1095120 - RNA, 19 nt, Artificial Sequence
  Description of Artificial Sequence: Synthetic oligonucleotide
  Sense strand starting at position 1549 of SEQ ID NO: 915640
ccgaaauaaguagauucuu

SEQ ID NO: 1095121 - RNA, 19 nt, Artificial Sequence
  Description of Artificial Sequence: Synthetic oligonucleotide
  Antisense strand to SEQ ID NO: 1095120
aagaaucuacuuauuucgg

SEQ ID NO: 1095122 - RNA, 19 nt, Artificial Sequence
  Description of Artificial Sequence: Synthetic oligonucleotide
  Sense strand starting at position 1607 of SEQ ID NO: 915640
agugaucagacaugaagug

SEQ ID NO: 1095123 - RNA, 19 nt, Artificial Sequence
  Description of Artificial Sequence: Synthetic oligonucleotide
  Antisense strand to SEQ ID NO: 1095122
cacuucaugucugaucacu

SEQ ID NO: 1095124 - RNA, 19 nt, Artificial Sequence
  Description of Artificial Sequence: Synthetic oligonucleotide
  Sense strand starting at position 1852 of SEQ ID NO: 915640
uuacaauugugguuccaau

SEQ ID NO: 1095125 - RNA, 19 nt, Artificial Sequence
  Description of Artificial Sequence: Synthetic oligonucleotide
  Antisense strand to SEQ ID NO: 1095124
auuggaaccacaauuguaa

SEQ ID NO: 1095126 - RNA, 19 nt, Artificial Sequence
  Description of Artificial Sequence: Synthetic oligonucleotide
  Sense strand starting at position 1916 of SEQ ID NO: 915640
uauggaauucuguaguacu

SEQ ID NO: 1095127 - RNA, 19 nt, Artificial Sequence
  Description of Artificial Sequence: Synthetic oligonucleotide
  Antisense strand to SEQ ID NO: 1095126
aguacuacagaauuccaua

SEQ ID NO: 1095128 - RNA, 19 nt, Artificial Sequence
  Description of Artificial Sequence: Synthetic oligonucleotide
  Sense strand starting at position 2036 of SEQ ID NO: 915640
cccagcuugccagaguaaa

SEQ ID NO: 1095129 - RNA, 19 nt, Artificial Sequence
  Description of Artificial Sequence: Synthetic oligonucleotide
  Antisense strand to SEQ ID NO: 1095128
uuuacucuggcaagcuggg

SEQ ID NO: 1095130 - RNA, 19 nt, Artificial Sequence
  Description of Artificial Sequence: Synthetic oligonucleotide
  Sense strand starting at position 2474 of SEQ ID NO: 915640
guguucuacagcuaggaga

SEQ ID NO: 1095131 - RNA, 19 nt, Artificial Sequence
  Description of Artificial Sequence: Synthetic oligonucleotide
  Antisense strand to SEQ ID NO: 1095130
ucuccuagcuguagaacac

SEQ ID NO: 1095132 - RNA, 19 nt, Artificial Sequence
  Description of Artificial Sequence: Synthetic oligonucleotide
  Sense strand starting at position 2476 of SEQ ID NO: 915640
guucuacagcuaggagaau

SEQ ID NO: 1095133 - RNA, 19 nt, Artificial Sequence
  Description of Artificial Sequence: Synthetic oligonucleotide
  Antisense strand to SEQ ID NO: 1095132
auucuccuagcuguagaac

SEQ ID NO: 1095134 - RNA, 19 nt, Artificial Sequence
  Description of Artificial Sequence: Synthetic oligonucleotide
  Sense strand starting at position 2586 of SEQ ID NO: 915640
gacuucccacagugaaaug

SEQ ID NO: 1095135 - RNA, 19 nt, Artificial Sequence
  Description of Artificial Sequence: Synthetic oligonucleotide
  Antisense strand to SEQ ID NO: 1095134
cauuucacugugggaaguc

SEQ ID NO: 1095136 - RNA, 19 nt, Artificial Sequence
  Description of Artificial Sequence: Synthetic oligonucleotide
  Sense strand starting at position 2598 of SEQ ID NO: 915640
ugaaaugaaugauagaaac

SEQ ID NO: 1095137 - RNA, 19 nt, Artificial Sequence
  Description of Artificial Sequence: Synthetic oligonucleotide
  Antisense strand to SEQ ID NO: 1095136
guuucuaucauucauuuca

SEQ ID NO: 1095138 - RNA, 19 nt, Artificial Sequence
  Description of Artificial Sequence: Synthetic oligonucleotide
  Sense strand starting at position 2695 of SEQ ID NO: 915640
ccagcaaguuaauuaaaga

SEQ ID NO: 1095139 - RNA, 19 nt, Artificial Sequence
  Description of Artificial Sequence: Synthetic oligonucleotide
  Antisense strand to SEQ ID NO: 1095138
ucuuuaauuaacuugcugg

SEQ ID NO: 1095140 - RNA, 19 nt, Artificial Sequence
  Description of Artificial Sequence: Synthetic oligonucleotide
  Sense strand starting at position 3015 of SEQ ID NO: 915640
aguugucaaguauauaugu

SEQ ID NO: 1095141 - RNA, 19 nt, Artificial Sequence
  Description of Artificial Sequence: Synthetic oligonucleotide
  Antisense strand to SEQ ID NO: 1095140
acauauauacuugacaacu

SEQ ID NO: 1095142 - RNA, 19 nt, Artificial Sequence
  Description of Artificial Sequence: Synthetic oligonucleotide
  Sense strand starting at position 3080 of SEQ ID NO: 915640
gguacaaagguuuagcaga

SEQ ID NO: 1095143 - RNA, 19 nt, Artificial Sequence
  Description of Artificial Sequence: Synthetic oligonucleotide
  Antisense strand to SEQ ID NO: 1095142
ucugcuaaaccuuuguacc

SEQ ID NO: 1095144 - RNA, 19 nt, Artificial Sequence
  Description of Artificial Sequence: Synthetic oligonucleotide
  Sense strand starting at position 3352 of SEQ ID NO: 915640
cugaaauaaugucugaauc

SEQ ID NO: 1095145 - RNA, 19 nt, Artificial Sequence
  Description of Artificial Sequence: Synthetic oligonucleotide
  Antisense strand to SEQ ID NO: 1095144
gauucagacauuauuucag

SEQ ID NO: 1095146 - RNA, 19 nt, Artificial Sequence
  Description of Artificial Sequence: Synthetic oligonucleotide
  Sense strand starting at position 3353 of SEQ ID NO: 915640
ugaaauaaugucugaaucu

SEQ ID NO: 1095147 - RNA, 19 nt, Artificial Sequence
  Description of Artificial Sequence: Synthetic oligonucleotide
  Antisense strand to SEQ ID NO: 1095146
agauucagacauuauuuca

SEQ ID NO: 1095148 - RNA, 19 nt, Artificial Sequence
  Description of Artificial Sequence: Synthetic oligonucleotide
  Sense strand starting at position 3365 of SEQ ID NO: 915640
ugaaucucguacucuuaaa

SEQ ID NO: 1095149 - RNA, 19 nt, Artificial Sequence
  Description of Artificial Sequence: Synthetic oligonucleotide
  Antisense strand to SEQ ID NO: 1095148
uuuaagaguacgagauuca

SEQ ID NO: 1095150 - RNA, 19 nt, Artificial Sequence
  Description of Artificial Sequence: Synthetic oligonucleotide
  Sense strand starting at position 3394 of SEQ ID NO: 915640
aaguuaguccugcacuaga

SEQ ID NO: 1095151 - RNA, 19 nt, Artificial Sequence
  Description of Artificial Sequence: Synthetic oligonucleotide
  Antisense strand to SEQ ID NO: 1095150
ucuagugcaggacuaacuu

SEQ ID NO: 1095152 - RNA, 19 nt, Artificial Sequence
  Description of Artificial Sequence: Synthetic oligonucleotide
  Sense strand starting at position 3405 of SEQ ID NO: 915640
gcacuagagacagguaagu

SEQ ID NO: 1095153 - RNA, 19 nt, Artificial Sequence
  Description of Artificial Sequence: Synthetic oligonucleotide
  Antisense strand to SEQ ID NO: 1095152
acuuaccugucucuagugc

SEQ ID NO: 1095154 - RNA, 19 nt, Artificial Sequence
  Description of Artificial Sequence: Synthetic oligonucleotide
  Sense strand starting at position 3421 of SEQ ID NO: 915640
aguguugagcugcaaucaa

SEQ ID NO: 1095155 - RNA, 19 nt, Artificial Sequence
  Description of Artificial Sequence: Synthetic oligonucleotide
  Antisense strand to SEQ ID NO: 1095154
uugauugcagcucaacacu

SEQ ID NO: 1095156 - RNA, 19 nt, Artificial Sequence
  Description of Artificial Sequence: Synthetic oligonucleotide
  Sense strand starting at position 3595 of SEQ ID NO: 915640
gggccuuucugaucagaau

SEQ ID NO: 1095157 - RNA, 19 nt, Artificial Sequence
  Description of Artificial Sequence: Synthetic oligonucleotide
  Antisense strand to SEQ ID NO: 1095156
auucugaucagaaaggccc

SEQ ID NO: 1095158 - RNA, 19 nt, Artificial Sequence
  Description of Artificial Sequence: Synthetic oligonucleotide
  Sense strand starting at position 3596 of SEQ ID NO: 915640
ggccuuucugaucagaauc

SEQ ID NO: 1095159 - RNA, 19 nt, Artificial Sequence
  Description of Artificial Sequence: Synthetic oligonucleotide
  Antisense strand to SEQ ID NO: 1095158
gauucugaucagaaaggcc

SEQ ID NO: 1095160 - RNA, 19 nt, Artificial Sequence
  Description of Artificial Sequence: Synthetic oligonucleotide
  Sense strand starting at position 3811 of SEQ ID NO: 915640
acagauaggcucuacucua

SEQ ID NO: 1095161 - RNA, 19 nt, Artificial Sequence
  Description of Artificial Sequence: Synthetic oligonucleotide
  Antisense strand to SEQ ID NO: 1095160
uagaguagagccuaucugu

SEQ ID NO: 1095162 - RNA, 19 nt, Artificial Sequence
  Description of Artificial Sequence: Synthetic oligonucleotide
  Sense strand starting at position 3837 of SEQ ID NO: 915640
acagguaugcaugaaguau

SEQ ID NO: 1095163 - RNA, 19 nt, Artificial Sequence
  Description of Artificial Sequence: Synthetic oligonucleotide
  Antisense strand to SEQ ID NO: 1095162
auacuucaugcauaccugu

SEQ ID NO: 1095164 - RNA, 19 nt, Artificial Sequence
  Description of Artificial Sequence: Synthetic oligonucleotide
  Sense strand starting at position 332 of SEQ ID NO: 915641
ucaggcuugucuuucgaga

SEQ ID NO: 1095165 - RNA, 19 nt, Artificial Sequence
  Description of Artificial Sequence: Synthetic oligonucleotide
  Antisense strand to SEQ ID NO: 1095164
ucucgaaagacaagccuga

SEQ ID NO: 1095166 - RNA, 19 nt, Artificial Sequence
  Description of Artificial Sequence: Synthetic oligonucleotide
  Sense strand starting at position 364 of SEQ ID NO: 915641
aucacaguuccggguaauc

SEQ ID NO: 1095167 - RNA, 19 nt, Artificial Sequence
  Description of Artificial Sequence: Synthetic oligonucleotide
  Antisense strand to SEQ ID NO: 1095166
gauuacccggaacugugau

SEQ ID NO: 1095168 - RNA, 19 nt, Artificial Sequence
  Description of Artificial Sequence: Synthetic oligonucleotide
  Sense strand starting at position 366 of SEQ ID NO: 915641
cacaguuccggguaaucac

SEQ ID NO: 1095169 - RNA, 19 nt, Artificial Sequence
  Description of Artificial Sequence: Synthetic oligonucleotide
  Antisense strand to SEQ ID NO: 1095168
gugauuacccggaacugug

SEQ ID NO: 1095170 - RNA, 19 nt, Artificial Sequence
  Description of Artificial Sequence: Synthetic oligonucleotide
  Sense strand starting at position 373 of SEQ ID NO: 915641
ccggguaaucaccgaggca

SEQ ID NO: 1095171 - RNA, 19 nt, Artificial Sequence
  Description of Artificial Sequence: Synthetic oligonucleotide
  Antisense strand to SEQ ID NO: 1095170
ugccucggugauuacccgg

SEQ ID NO: 1095172 - RNA, 19 nt, Artificial Sequence
  Description of Artificial Sequence: Synthetic oligonucleotide
  Sense strand starting at position 541 of SEQ ID NO: 915641
gggugaucucgugugcuac

SEQ ID NO: 1095173 - RNA, 19 nt, Artificial Sequence
  Description of Artificial Sequence: Synthetic oligonucleotide
  Antisense strand to SEQ ID NO: 1095172
guagcacacgagaucaccc

SEQ ID NO: 1095174 - RNA, 19 nt, Artificial Sequence
  Description of Artificial Sequence: Synthetic oligonucleotide
  Sense strand starting at position 739 of SEQ ID NO: 915641
ccaacugagcaguaauaca

SEQ ID NO: 1095175 - RNA, 19 nt, Artificial Sequence
  Description of Artificial Sequence: Synthetic oligonucleotide
  Antisense strand to SEQ ID NO: 1095174
uguauuacugcucaguugg

SEQ ID NO: 1095176 - RNA, 19 nt, Artificial Sequence
  Description of Artificial Sequence: Synthetic oligonucleotide
  Sense strand starting at position 812 of SEQ ID NO: 915641
ggagccaauuuccaaaguu

SEQ ID NO: 1095177 - RNA, 19 nt, Artificial Sequence
  Description of Artificial Sequence: Synthetic oligonucleotide
  Antisense strand to SEQ ID NO: 1095176
aacuuuggaaauuggcucc

SEQ ID NO: 1095178 - RNA, 19 nt, Artificial Sequence
  Description of Artificial Sequence: Synthetic oligonucleotide
  Sense strand starting at position 1109 of SEQ ID NO: 915641
gacugaggagcucggugau

SEQ ID NO: 1095179 - RNA, 19 nt, Artificial Sequence
  Description of Artificial Sequence: Synthetic oligonucleotide
  Antisense strand to SEQ ID NO: 1095178
aucaccgagcuccucaguc

SEQ ID NO: 1095180 - RNA, 19 nt, Artificial Sequence
  Description of Artificial Sequence: Synthetic oligonucleotide
  Sense strand starting at position 1115 of SEQ ID NO: 915641
ggagcucggugaucacauu

SEQ ID NO: 1095181 - RNA, 19 nt, Artificial Sequence
  Description of Artificial Sequence: Synthetic oligonucleotide
  Antisense strand to SEQ ID NO: 1095180
aaugugaucaccgagcucc

SEQ ID NO: 1095182 - RNA, 19 nt, Artificial Sequence
  Description of Artificial Sequence: Synthetic oligonucleotide
  Sense strand starting at position 1163 of SEQ ID NO: 915641
gggugagaguagucauaca

SEQ ID NO: 1095183 - RNA, 19 nt, Artificial Sequence
  Description of Artificial Sequence: Synthetic oligonucleotide
  Antisense strand to SEQ ID NO: 1095182
uguaugacuacucucaccc

SEQ ID NO: 1095184 - RNA, 19 nt, Artificial Sequence
  Description of Artificial Sequence: Synthetic oligonucleotide
  Sense strand starting at position 1168 of SEQ ID NO: 915641
agaguagucauacagucac

SEQ ID NO: 1095185 - RNA, 19 nt, Artificial Sequence
  Description of Artificial Sequence: Synthetic oligonucleotide
  Antisense strand to SEQ ID NO: 1095184
gugacuguaugacuacucu

SEQ ID NO: 1095186 - RNA, 19 nt, Artificial Sequence
  Description of Artificial Sequence: Synthetic oligonucleotide
  Sense strand starting at position 2595 of SEQ ID NO: 915641
gcuuucucgaguucuccga

SEQ ID NO: 1095187 - RNA, 19 nt, Artificial Sequence
  Description of Artificial Sequence: Synthetic oligonucleotide
  Antisense strand to SEQ ID NO: 1095186
ucggagaacucgagaaagc

SEQ ID NO: 1095188 - RNA, 19 nt, Artificial Sequence
  Description of Artificial Sequence: Synthetic oligonucleotide
  Sense strand starting at position 2617 of SEQ ID NO: 915641
cucucaguucgguaucuuu

SEQ ID NO: 1095189 - RNA, 19 nt, Artificial Sequence
  Description of Artificial Sequence: Synthetic oligonucleotide
  Antisense strand to SEQ ID NO: 1095188
aaagauaccgaacugagag

SEQ ID NO: 1095190 - RNA, 19 nt, Artificial Sequence
  Description of Artificial Sequence: Synthetic oligonucleotide
  Sense strand starting at position 2628 of SEQ ID NO: 915641
guaucuuucuggucucuuu

SEQ ID NO: 1095191 - RNA, 19 nt, Artificial Sequence
  Description of Artificial Sequence: Synthetic oligonucleotide
  Antisense strand to SEQ ID NO: 1095190
aaagagaccagaaagauac

SEQ ID NO: 1095192 - RNA, 19 nt, Artificial Sequence
  Description of Artificial Sequence: Synthetic oligonucleotide
  Sense strand starting at position 2945 of SEQ ID NO: 915641
guaauuaagagcugagauc

SEQ ID NO: 1095193 - RNA, 19 nt, Artificial Sequence
  Description of Artificial Sequence: Synthetic oligonucleotide
  Antisense strand to SEQ ID NO: 1095192
gaucucagcucuuaauuac

SEQ ID NO: 1095194 - RNA, 19 nt, Artificial Sequence
  Description of Artificial Sequence: Synthetic oligonucleotide
  Sense strand starting at position 2956 of SEQ ID NO: 915641
cugagaucuugaguuccuu

SEQ ID NO: 1095195 - RNA, 19 nt, Artificial Sequence
  Description of Artificial Sequence: Synthetic oligonucleotide
  Antisense strand to SEQ ID NO: 1095194
aaggaacucaagaucucag

SEQ ID NO: 1095196 - RNA, 19 nt, Artificial Sequence
  Description of Artificial Sequence: Synthetic oligonucleotide
  Sense strand starting at position 3043 of SEQ ID NO: 915641
cagcuacugagucgugaua

SEQ ID NO: 1095197 - RNA, 19 nt, Artificial Sequence
  Description of Artificial Sequence: Synthetic oligonucleotide
  Antisense strand to SEQ ID NO: 1095196
uaucacgacucaguagcug

SEQ ID NO: 1095198 - RNA, 19 nt, Artificial Sequence
  Description of Artificial Sequence: Synthetic oligonucleotide
  Sense strand starting at position 3083 of SEQ ID NO: 915641
gugauugcgguccaagaga

SEQ ID NO: 1095199 - RNA, 19 nt, Artificial Sequence
  Description of Artificial Sequence: Synthetic oligonucleotide
  Antisense strand to SEQ ID NO: 1095198
ucucuuggaccgcaaucac

SEQ ID NO: 1095200 - RNA, 19 nt, Artificial Sequence
  Description of Artificial Sequence: Synthetic oligonucleotide
  Sense strand starting at position 3101 of SEQ ID NO: 915641
auuucugucccucgaaugu

SEQ ID NO: 1095201 - RNA, 19 nt, Artificial Sequence
  Description of Artificial Sequence: Synthetic oligonucleotide
  Antisense strand to SEQ ID NO: 1095200
acauucgagggacagaaau

SEQ ID NO: 1095202 - RNA, 19 nt, Artificial Sequence
  Description of Artificial Sequence: Synthetic oligonucleotide
  Sense strand starting at position 3114 of SEQ ID NO: 915641
gaauguuuggaucgugaug

SEQ ID NO: 1095203 - RNA, 19 nt, Artificial Sequence
  Description of Artificial Sequence: Synthetic oligonucleotide
  Antisense strand to SEQ ID NO: 1095202
caucacgauccaaacauuc

SEQ ID NO: 1095204 - RNA, 19 nt, Artificial Sequence
  Description of Artificial Sequence: Synthetic oligonucleotide
  Sense strand starting at position 3164 of SEQ ID NO: 915641
augugaugagagcgguagu

SEQ ID NO: 1095205 - RNA, 19 nt, Artificial Sequence
  Description of Artificial Sequence: Synthetic oligonucleotide
  Antisense strand to SEQ ID NO: 1095204
acuaccgcucucaucacau

SEQ ID NO: 1095206 - RNA, 19 nt, Artificial Sequence
  Description of Artificial Sequence: Synthetic oligonucleotide
  Sense strand starting at position 3174 of SEQ ID NO: 915641
agcgguaguuugacugagu

SEQ ID NO: 1095207 - RNA, 19 nt, Artificial Sequence
  Description of Artificial Sequence: Synthetic oligonucleotide
  Antisense strand to SEQ ID NO: 1095206
acucagucaaacuaccgcu

SEQ ID NO: 1095208 - RNA, 19 nt, Artificial Sequence
  Description of Artificial Sequence: Synthetic oligonucleotide
  Sense strand starting at position 3179 of SEQ ID NO: 915641
uaguuugacugaguggcaa

SEQ ID NO: 1095209 - RNA, 19 nt, Artificial Sequence
  Description of Artificial Sequence: Synthetic oligonucleotide
  Antisense strand to SEQ ID NO: 1095208
uugccacucagucaaacua

SEQ ID NO: 1095210 - RNA, 19 nt, Artificial Sequence
  Description of Artificial Sequence: Synthetic oligonucleotide
  Sense strand starting at position 3375 of SEQ ID NO: 915641
gaaagcacuggguguauau

SEQ ID NO: 1095211 - RNA, 19 nt, Artificial Sequence
  Description of Artificial Sequence: Synthetic oligonucleotide
  Antisense strand to SEQ ID NO: 1095210
auauacacccagugcuuuc

SEQ ID NO: 1095212 - RNA, 19 nt, Artificial Sequence
  Description of Artificial Sequence: Synthetic oligonucleotide
  Sense strand starting at position 3386 of SEQ ID NO: 915641
guguauaugagaugcuuaa

SEQ ID NO: 1095213 - RNA, 19 nt, Artificial Sequence
  Description of Artificial Sequence: Synthetic oligonucleotide
  Antisense strand to SEQ ID NO: 1095212
uuaagcaucucauauacac

SEQ ID NO: 1095214 - RNA, 19 nt, Artificial Sequence
  Description of Artificial Sequence: Synthetic oligonucleotide
  Sense strand starting at position 3408 of SEQ ID NO: 915641
auguuaguuuccuucuuua

SEQ ID NO: 1095215 - RNA, 19 nt, Artificial Sequence
  Description of Artificial Sequence: Synthetic oligonucleotide
  Antisense strand to SEQ ID NO: 1095214
uaaagaaggaaacuaacau

SEQ ID NO: 1095216 - RNA, 19 nt, Artificial Sequence
  Description of Artificial Sequence: Synthetic oligonucleotide
  Sense strand starting at position 3459 of SEQ ID NO: 915641
gugucucucugaucuaaag

SEQ ID NO: 1095217 - RNA, 19 nt, Artificial Sequence
  Description of Artificial Sequence: Synthetic oligonucleotide
  Antisense strand to SEQ ID NO: 1095216
cuuuagaucagagagacac

SEQ ID NO: 1095218 - RNA, 19 nt, Artificial Sequence
  Description of Artificial Sequence: Synthetic oligonucleotide
  Sense strand starting at position 3469 of SEQ ID NO: 915641
gaucuaaaguagucaauga

SEQ ID NO: 1095219 - RNA, 19 nt, Artificial Sequence
  Description of Artificial Sequence: Synthetic oligonucleotide
  Antisense strand to SEQ ID NO: 1095218
ucauugacuacuuuagauc

SEQ ID NO: 1095220 - RNA, 19 nt, Artificial Sequence
  Description of Artificial Sequence: Synthetic oligonucleotide
  Sense strand starting at position 3513 of SEQ ID NO: 915641
ucacauaaaugugaaagga

SEQ ID NO: 1095221 - RNA, 19 nt, Artificial Sequence
  Description of Artificial Sequence: Synthetic oligonucleotide
  Antisense strand to SEQ ID NO: 1095220
uccuuucacauuuauguga

SEQ ID NO: 1095222 - RNA, 19 nt, Artificial Sequence
  Description of Artificial Sequence: Synthetic oligonucleotide
  Sense strand starting at position 3549 of SEQ ID NO: 915641
aaacucuucugugugguga

SEQ ID NO: 1095223 - RNA, 19 nt, Artificial Sequence
  Description of Artificial Sequence: Synthetic oligonucleotide
  Antisense strand to SEQ ID NO: 1095222
ucaccacacagaagaguuu

SEQ ID NO: 1095224 - RNA, 19 nt, Artificial Sequence
  Description of Artificial Sequence: Synthetic oligonucleotide
  Sense strand starting at position 3585 of SEQ ID NO: 915641
uugccauaugcugauuaua

SEQ ID NO: 1095225 - RNA, 19 nt, Artificial Sequence
  Description of Artificial Sequence: Synthetic oligonucleotide
  Antisense strand to SEQ ID NO: 1095224
uauaaucagcauauggcaa

SEQ ID NO: 1095226 - RNA, 19 nt, Artificial Sequence
  Description of Artificial Sequence: Synthetic oligonucleotide
  Sense strand starting at position 3587 of SEQ ID NO: 915641
gccauaugcugauuauaaa

SEQ ID NO: 1095227 - RNA, 19 nt, Artificial Sequence
  Description of Artificial Sequence: Synthetic oligonucleotide
  Antisense strand to SEQ ID NO: 1095226
uuuauaaucagcauauggc

SEQ ID NO: 1095228 - RNA, 19 nt, Artificial Sequence
  Description of Artificial Sequence: Synthetic oligonucleotide
  Sense strand starting at position 3739 of SEQ ID NO: 915641
ucuuuaugauaaguguaca

SEQ ID NO: 1095229 - RNA, 19 nt, Artificial Sequence
  Description of Artificial Sequence: Synthetic oligonucleotide
  Antisense strand to SEQ ID NO: 1095228
uguacacuuaucauaaaga

SEQ ID NO: 1095230 - RNA, 19 nt, Artificial Sequence
  Description of Artificial Sequence: Synthetic oligonucleotide
  Sense strand starting at position 3766 of SEQ ID NO: 915641
ugacaaagccucugagauu

SEQ ID NO: 1095231 - RNA, 19 nt, Artificial Sequence
  Description of Artificial Sequence: Synthetic oligonucleotide
  Antisense strand to SEQ ID NO: 1095230
aaucucagaggcuuuguca

SEQ ID NO: 1095232 - RNA, 19 nt, Artificial Sequence
  Description of Artificial Sequence: Synthetic oligonucleotide
  Sense strand starting at position 3795 of SEQ ID NO: 915641
ucaagucucugccuuugaa

SEQ ID NO: 1095233 - RNA, 19 nt, Artificial Sequence
  Description of Artificial Sequence: Synthetic oligonucleotide
  Antisense strand to SEQ ID NO: 1095232
uucaaaggcagagacuuga

SEQ ID NO: 1095234 - RNA, 19 nt, Artificial Sequence
  Description of Artificial Sequence: Synthetic oligonucleotide
  Sense strand starting at position 3805 of SEQ ID NO: 915641
gccuuugaauagcauuuau

SEQ ID NO: 1095235 - RNA, 19 nt, Artificial Sequence
  Description of Artificial Sequence: Synthetic oligonucleotide
  Antisense strand to SEQ ID NO: 1095234
auaaaugcuauucaaaggc

SEQ ID NO: 1095236 - RNA, 19 nt, Artificial Sequence
  Description of Artificial Sequence: Synthetic oligonucleotide
  Sense strand starting at position 3831 of SEQ ID NO: 915641
guguccucacugcagacau

SEQ ID NO: 1095237 - RNA, 19 nt, Artificial Sequence
  Description of Artificial Sequence: Synthetic oligonucleotide
  Antisense strand to SEQ ID NO: 1095236
augucugcagugaggacac

SEQ ID NO: 1095238 - RNA, 19 nt, Artificial Sequence
  Description of Artificial Sequence: Synthetic oligonucleotide
  Sense strand starting at position 3856 of SEQ ID NO: 915641
cugggcaucagcugugauu

SEQ ID NO: 1095239 - RNA, 19 nt, Artificial Sequence
  Description of Artificial Sequence: Synthetic oligonucleotide
  Antisense strand to SEQ ID NO: 1095238
aaucacagcugaugcccag

SEQ ID NO: 1095240 - RNA, 19 nt, Artificial Sequence
  Description of Artificial Sequence: Synthetic oligonucleotide
  Sense strand starting at position 3945 of SEQ ID NO: 915641
ucggcauucaguggugaga

SEQ ID NO: 1095241 - RNA, 19 nt, Artificial Sequence
  Description of Artificial Sequence: Synthetic oligonucleotide
  Antisense strand to SEQ ID NO: 1095240
ucucaccacugaaugccga

SEQ ID NO: 1095242 - RNA, 19 nt, Artificial Sequence
  Description of Artificial Sequence: Synthetic oligonucleotide
  Sense strand starting at position 3948 of SEQ ID NO: 915641
gcauucaguggugagacaa

SEQ ID NO: 1095243 - RNA, 19 nt, Artificial Sequence
  Description of Artificial Sequence: Synthetic oligonucleotide
  Antisense strand to SEQ ID NO: 1095242
uugucucaccacugaaugc

SEQ ID NO: 1095244 - RNA, 19 nt, Artificial Sequence
  Description of Artificial Sequence: Synthetic oligonucleotide
  Sense strand starting at position 130 of SEQ ID NO: 915642
uuagaacaaugccagauuu

SEQ ID NO: 1095245 - RNA, 19 nt, Artificial Sequence
  Description of Artificial Sequence: Synthetic oligonucleotide
  Antisense strand to SEQ ID NO: 1095244
aaaucuggcauuguucuaa

SEQ ID NO: 1095246 - RNA, 19 nt, Artificial Sequence
  Description of Artificial Sequence: Synthetic oligonucleotide
  Sense strand starting at position 165 of SEQ ID NO: 915642
cuacaagcucucuggaauc

SEQ ID NO: 1095247 - RNA, 19 nt, Artificial Sequence
  Description of Artificial Sequence: Synthetic oligonucleotide
  Antisense strand to SEQ ID NO: 1095246
gauuccagagagcuuguag

SEQ ID NO: 1095248 - RNA, 19 nt, Artificial Sequence
  Description of Artificial Sequence: Synthetic oligonucleotide
  Sense strand starting at position 198 of SEQ ID NO: 915642
acuccuacugcugauguua

SEQ ID NO: 1095249 - RNA, 19 nt, Artificial Sequence
  Description of Artificial Sequence: Synthetic oligonucleotide
  Antisense strand to SEQ ID NO: 1095248
uaacaucagcaguaggagu

SEQ ID NO: 1095250 - RNA, 19 nt, Artificial Sequence
  Description of Artificial Sequence: Synthetic oligonucleotide
  Sense strand starting at position 348 of SEQ ID NO: 915642
guuccagaauaaguugaaa

SEQ ID NO: 1095251 - RNA, 19 nt, Artificial Sequence
  Description of Artificial Sequence: Synthetic oligonucleotide
  Antisense strand to SEQ ID NO: 1095250
uuucaacuuauucuggaac

SEQ ID NO: 1095252 - RNA, 19 nt, Artificial Sequence
  Description of Artificial Sequence: Synthetic oligonucleotide
  Sense strand starting at position 360 of SEQ ID NO: 915642
guugaaauuccaugauaug

SEQ ID NO: 1095253 - RNA, 19 nt, Artificial Sequence
  Description of Artificial Sequence: Synthetic oligonucleotide
  Antisense strand to SEQ ID NO: 1095252
cauaucauggaauuucaac

SEQ ID NO: 1095254 - RNA, 19 nt, Artificial Sequence
  Description of Artificial Sequence: Synthetic oligonucleotide
  Sense strand starting at position 443 of SEQ ID NO: 915642
cuauguacuuagccaaaug

SEQ ID NO: 1095255 - RNA, 19 nt, Artificial Sequence
  Description of Artificial Sequence: Synthetic oligonucleotide
  Antisense strand to SEQ ID NO: 1095254
cauuuggcuaaguacauag

SEQ ID NO: 1095256 - RNA, 19 nt, Artificial Sequence
  Description of Artificial Sequence: Synthetic oligonucleotide
  Sense strand starting at position 457 of SEQ ID NO: 915642
aaaugagucucucuggcaa

SEQ ID NO: 1095257 - RNA, 19 nt, Artificial Sequence
  Description of Artificial Sequence: Synthetic oligonucleotide
  Antisense strand to SEQ ID NO: 1095256
uugccagagagacucauuu

SEQ ID NO: 1095258 - RNA, 19 nt, Artificial Sequence
  Description of Artificial Sequence: Synthetic oligonucleotide
  Sense strand starting at position 488 of SEQ ID NO: 915642
ucaggacuggcucaguuaa

SEQ ID NO: 1095259 - RNA, 19 nt, Artificial Sequence
  Description of Artificial Sequence: Synthetic oligonucleotide
  Antisense strand to SEQ ID NO: 1095258
uuaacugagccaguccuga

SEQ ID NO: 1095260 - RNA, 19 nt, Artificial Sequence
  Description of Artificial Sequence: Synthetic oligonucleotide
  Sense strand starting at position 490 of SEQ ID NO: 915642
aggacuggcucaguuaaga

SEQ ID NO: 1095261 - RNA, 19 nt, Artificial Sequence
  Description of Artificial Sequence: Synthetic oligonucleotide
  Antisense strand to SEQ ID NO: 1095260
ucuuaacugagccaguccu

SEQ ID NO: 1095262 - RNA, 19 nt, Artificial Sequence
  Description of Artificial Sequence: Synthetic oligonucleotide
  Sense strand starting at position 933 of SEQ ID NO: 915642
caguaagacugagcuaaau

SEQ ID NO: 1095263 - RNA, 19 nt, Artificial Sequence
  Description of Artificial Sequence: Synthetic oligonucleotide
  Antisense strand to SEQ ID NO: 1095262
auuuagcucagucuuacug

SEQ ID NO: 1095264 - RNA, 19 nt, Artificial Sequence
  Description of Artificial Sequence: Synthetic oligonucleotide
  Sense strand starting at position 1257 of SEQ ID NO: 915642
uuugaaugaugcuuguuaa

SEQ ID NO: 1095265 - RNA, 19 nt, Artificial Sequence
  Description of Artificial Sequence: Synthetic oligonucleotide
  Antisense strand to SEQ ID NO: 1095264
uuaacaagcaucauucaaa

SEQ ID NO: 1095266 - RNA, 19 nt, Artificial Sequence
  Description of Artificial Sequence: Synthetic oligonucleotide
  Sense strand starting at position 1258 of SEQ ID NO: 915642
uugaaugaugcuuguuaag

SEQ ID NO: 1095267 - RNA, 19 nt, Artificial Sequence
  Description of Artificial Sequence: Synthetic oligonucleotide
  Antisense strand to SEQ ID NO: 1095266
cuuaacaagcaucauucaa

SEQ ID NO: 1095268 - RNA, 19 nt, Artificial Sequence
  Description of Artificial Sequence: Synthetic oligonucleotide
  Sense strand starting at position 1260 of SEQ ID NO: 915642
gaaugaugcuuguuaagua

SEQ ID NO: 1095269 - RNA, 19 nt, Artificial Sequence
  Description of Artificial Sequence: Synthetic oligonucleotide
  Antisense strand to SEQ ID NO: 1095268
uacuuaacaagcaucauuc

SEQ ID NO: 1095270 - RNA, 19 nt, Artificial Sequence
  Description of Artificial Sequence: Synthetic oligonucleotide
  Sense strand starting at position 1274 of SEQ ID NO: 915642
aaguaaauucuguaucgua

SEQ ID NO: 1095271 - RNA, 19 nt, Artificial Sequence
  Description of Artificial Sequence: Synthetic oligonucleotide
  Antisense strand to SEQ ID NO: 1095270
uacgauacagaauuuacuu

SEQ ID NO: 1095272 - RNA, 19 nt, Artificial Sequence
  Description of Artificial Sequence: Synthetic oligonucleotide
  Sense strand starting at position 1325 of SEQ ID NO: 915642
guaaguuuacgugcuguaa

SEQ ID NO: 1095273 - RNA, 19 nt, Artificial Sequence
  Description of Artificial Sequence: Synthetic oligonucleotide
  Antisense strand to SEQ ID NO: 1095272
uuacagcacguaaacuuac

SEQ ID NO: 1095274 - RNA, 19 nt, Artificial Sequence
  Description of Artificial Sequence: Synthetic oligonucleotide
  Sense strand starting at position 1626 of SEQ ID NO: 915642
ggucuucgucgugugccaa

SEQ ID NO: 1095275 - RNA, 19 nt, Artificial Sequence
  Description of Artificial Sequence: Synthetic oligonucleotide
  Antisense strand to SEQ ID NO: 1095274
uuggcacacgacgaagacc

SEQ ID NO: 1095276 - RNA, 19 nt, Artificial Sequence
  Description of Artificial Sequence: Synthetic oligonucleotide
  Sense strand starting at position 1629 of SEQ ID NO: 915642
cuucgucgugugccaaaca

SEQ ID NO: 1095277 - RNA, 19 nt, Artificial Sequence
  Description of Artificial Sequence: Synthetic oligonucleotide
  Antisense strand to SEQ ID NO: 1095276
uguuuggcacacgacgaag

SEQ ID NO: 1095278 - RNA, 19 nt, Artificial Sequence
  Description of Artificial Sequence: Synthetic oligonucleotide
  Sense strand starting at position 2240 of SEQ ID NO: 915642
guguguuugaaccaggaaa

SEQ ID NO: 1095279 - RNA, 19 nt, Artificial Sequence
  Description of Artificial Sequence: Synthetic oligonucleotide
  Antisense strand to SEQ ID NO: 1095278
uuuccugguucaaacacac

SEQ ID NO: 1095280 - RNA, 19 nt, Artificial Sequence
  Description of Artificial Sequence: Synthetic oligonucleotide
  Sense strand starting at position 2442 of SEQ ID NO: 915642
gcaggaaggcuuuaaucac

SEQ ID NO: 1095281 - RNA, 19 nt, Artificial Sequence
  Description of Artificial Sequence: Synthetic oligonucleotide
  Antisense strand to SEQ ID NO: 1095280
gugauuaaagccuuccugc

SEQ ID NO: 1095282 - RNA, 19 nt, Artificial Sequence
  Description of Artificial Sequence: Synthetic oligonucleotide
  Sense strand starting at position 2581 of SEQ ID NO: 915642
gugucaauaaguuaagucu

SEQ ID NO: 1095283 - RNA, 19 nt, Artificial Sequence
  Description of Artificial Sequence: Synthetic oligonucleotide
  Antisense strand to SEQ ID NO: 1095282
agacuuaacuuauugacac

SEQ ID NO: 1095284 - RNA, 19 nt, Artificial Sequence
  Description of Artificial Sequence: Synthetic oligonucleotide
  Sense strand starting at position 2590 of SEQ ID NO: 915642
aguuaagucuaauuggcaa

SEQ ID NO: 1095285 - RNA, 19 nt, Artificial Sequence
  Description of Artificial Sequence: Synthetic oligonucleotide
  Antisense strand to SEQ ID NO: 1095284
uugccaauuagacuuaacu

SEQ ID NO: 1095286 - RNA, 19 nt, Artificial Sequence
  Description of Artificial Sequence: Synthetic oligonucleotide
  Sense strand starting at position 2730 of SEQ ID NO: 915642
ccaguuaguggauguggaa

SEQ ID NO: 1095287 - RNA, 19 nt, Artificial Sequence
  Description of Artificial Sequence: Synthetic oligonucleotide
  Antisense strand to SEQ ID NO: 1095286
uuccacauccacuaacugg

SEQ ID NO: 1095288 - RNA, 19 nt, Artificial Sequence
  Description of Artificial Sequence: Synthetic oligonucleotide
  Sense strand starting at position 2895 of SEQ ID NO: 915642
guuaguuaucauuaagucu

SEQ ID NO: 1095289 - RNA, 19 nt, Artificial Sequence
  Description of Artificial Sequence: Synthetic oligonucleotide
  Antisense strand to SEQ ID NO: 1095288
agacuuaaugauaacuaac

SEQ ID NO: 1095290 - RNA, 19 nt, Artificial Sequence
  Description of Artificial Sequence: Synthetic oligonucleotide
  Sense strand starting at position 2903 of SEQ ID NO: 915642
ucauuaagucuuggaagua

SEQ ID NO: 1095291 - RNA, 19 nt, Artificial Sequence
  Description of Artificial Sequence: Synthetic oligonucleotide
  Antisense strand to SEQ ID NO: 1095290
uacuuccaagacuuaauga

SEQ ID NO: 1095292 - RNA, 19 nt, Artificial Sequence
  Description of Artificial Sequence: Synthetic oligonucleotide
  Sense strand starting at position 2937 of SEQ ID NO: 915642
uuuauuugcuguuugugaa

SEQ ID NO: 1095293 - RNA, 19 nt, Artificial Sequence
  Description of Artificial Sequence: Synthetic oligonucleotide
  Antisense strand to SEQ ID NO: 1095292
uucacaaacagcaaauaaa

SEQ ID NO: 1095294 - RNA, 19 nt, Artificial Sequence
  Description of Artificial Sequence: Synthetic oligonucleotide
  Sense strand starting at position 2938 of SEQ ID NO: 915642
uuauuugcuguuugugaag

SEQ ID NO: 1095295 - RNA, 19 nt, Artificial Sequence
  Description of Artificial Sequence: Synthetic oligonucleotide
  Antisense strand to SEQ ID NO: 1095294
cuucacaaacagcaaauaa

SEQ ID NO: 1095296 - RNA, 19 nt, Artificial Sequence
  Description of Artificial Sequence: Synthetic oligonucleotide
  Sense strand starting at position 2992 of SEQ ID NO: 915642
gcgcucaauguguuuaauc

SEQ ID NO: 1095297 - RNA, 19 nt, Artificial Sequence
  Description of Artificial Sequence: Synthetic oligonucleotide
  Antisense strand to SEQ ID NO: 1095296
gauuaaacacauugagcgc

SEQ ID NO: 1095298 - RNA, 19 nt, Artificial Sequence
  Description of Artificial Sequence: Synthetic oligonucleotide
  Sense strand starting at position 3025 of SEQ ID NO: 915642
ugugaaauauaggccacau

SEQ ID NO: 1095299 - RNA, 19 nt, Artificial Sequence
  Description of Artificial Sequence: Synthetic oligonucleotide
  Antisense strand to SEQ ID NO: 1095298
auguggccuauauuucaca

SEQ ID NO: 1095300 - RNA, 19 nt, Artificial Sequence
  Description of Artificial Sequence: Synthetic oligonucleotide
  Sense strand starting at position 3052 of SEQ ID NO: 915642
ccuagauaacuauggcgaa

SEQ ID NO: 1095301 - RNA, 19 nt, Artificial Sequence
  Description of Artificial Sequence: Synthetic oligonucleotide
  Antisense strand to SEQ ID NO: 1095300
uucgccauaguuaucuagg

SEQ ID NO: 1095302 - RNA, 19 nt, Artificial Sequence
  Description of Artificial Sequence: Synthetic oligonucleotide
  Sense strand starting at position 3056 of SEQ ID NO: 915642
gauaacuauggcgaaguaa

SEQ ID NO: 1095303 - RNA, 19 nt, Artificial Sequence
  Description of Artificial Sequence: Synthetic oligonucleotide
  Antisense strand to SEQ ID NO: 1095302
uuacuucgccauaguuauc

SEQ ID NO: 1095304 - RNA, 19 nt, Artificial Sequence
  Description of Artificial Sequence: Synthetic oligonucleotide
  Sense strand starting at position 3090 of SEQ ID NO: 915642
gucccagaacaauagcaau

SEQ ID NO: 1095305 - RNA, 19 nt, Artificial Sequence
  Description of Artificial Sequence: Synthetic oligonucleotide
  Antisense strand to SEQ ID NO: 1095304
auugcuauuguucugggac

SEQ ID NO: 1095306 - RNA, 19 nt, Artificial Sequence
  Description of Artificial Sequence: Synthetic oligonucleotide
  Sense strand starting at position 3100 of SEQ ID NO: 915642
aauagcaaucuguguugaa

SEQ ID NO: 1095307 - RNA, 19 nt, Artificial Sequence
  Description of Artificial Sequence: Synthetic oligonucleotide
  Antisense strand to SEQ ID NO: 1095306
uucaacacagauugcuauu

SEQ ID NO: 1095308 - RNA, 19 nt, Artificial Sequence
  Description of Artificial Sequence: Synthetic oligonucleotide
  Sense strand starting at position 3659 of SEQ ID NO: 915642
aggaauaagugagaugaua

SEQ ID NO: 1095309 - RNA, 19 nt, Artificial Sequence
  Description of Artificial Sequence: Synthetic oligonucleotide
  Antisense strand to SEQ ID NO: 1095308
uaucaucucacuuauuccu

SEQ ID NO: 1095310 - RNA, 19 nt, Artificial Sequence
  Description of Artificial Sequence: Synthetic oligonucleotide
  Sense strand starting at position 3672 of SEQ ID NO: 915642
augauauuguuaucuagag

SEQ ID NO: 1095311 - RNA, 19 nt, Artificial Sequence
  Description of Artificial Sequence: Synthetic oligonucleotide
  Antisense strand to SEQ ID NO: 1095310
cucuagauaacaauaucau

SEQ ID NO: 1095312 - RNA, 19 nt, Artificial Sequence
  Description of Artificial Sequence: Synthetic oligonucleotide
  Sense strand starting at position 3708 of SEQ ID NO: 915642
ggcugucaucauuaucuca

SEQ ID NO: 1095313 - RNA, 19 nt, Artificial Sequence
  Description of Artificial Sequence: Synthetic oligonucleotide
  Antisense strand to SEQ ID NO: 1095312
ugagauaaugaugacagcc

SEQ ID NO: 1095314 - RNA, 19 nt, Artificial Sequence
  Description of Artificial Sequence: Synthetic oligonucleotide
  Sense strand starting at position 3844 of SEQ ID NO: 915642
aucuuuacagcuggagaaa

SEQ ID NO: 1095315 - RNA, 19 nt, Artificial Sequence
  Description of Artificial Sequence: Synthetic oligonucleotide
  Antisense strand to SEQ ID NO: 1095314
uuucuccagcuguaaagau

SEQ ID NO: 1095316 - RNA, 19 nt, Artificial Sequence
  Description of Artificial Sequence: Synthetic oligonucleotide
  Sense strand starting at position 3899 of SEQ ID NO: 915642
cuuagugugcugcuucuga

SEQ ID NO: 1095317 - RNA, 19 nt, Artificial Sequence
  Description of Artificial Sequence: Synthetic oligonucleotide
  Antisense strand to SEQ ID NO: 1095316
ucagaagcagcacacuaag

SEQ ID NO: 1095318 - RNA, 19 nt, Artificial Sequence
  Description of Artificial Sequence: Synthetic oligonucleotide
  Sense strand starting at position 3910 of SEQ ID NO: 915642
gcuucugaucacuacuuga

SEQ ID NO: 1095319 - RNA, 19 nt, Artificial Sequence
  Description of Artificial Sequence: Synthetic oligonucleotide
  Antisense strand to SEQ ID NO: 1095318
ucaaguagugaucagaagc

SEQ ID NO: 1095320 - RNA, 19 nt, Artificial Sequence
  Description of Artificial Sequence: Synthetic oligonucleotide
  Sense strand starting at position 3944 of SEQ ID NO: 915642
ucauguuaauuggcccaau

SEQ ID NO: 1095321 - RNA, 19 nt, Artificial Sequence
  Description of Artificial Sequence: Synthetic oligonucleotide
  Antisense strand to SEQ ID NO: 1095320
auugggccaauuaacauga

SEQ ID NO: 1095322 - RNA, 19 nt, Artificial Sequence
  Description of Artificial Sequence: Synthetic oligonucleotide
  Sense strand starting at position 3958 of SEQ ID NO: 915642
ccaauuggacucuacaguu

SEQ ID NO: 1095323 - RNA, 19 nt, Artificial Sequence
  Description of Artificial Sequence: Synthetic oligonucleotide
  Antisense strand to SEQ ID NO: 1095322
aacuguagaguccaauugg

SEQ ID NO: 1095324 - RNA, 19 nt, Artificial Sequence
  Description of Artificial Sequence: Synthetic oligonucleotide
  Sense strand starting at position 125 of SEQ ID NO: 915643
auaaauagcucuuuaugga

SEQ ID NO: 1095325 - RNA, 19 nt, Artificial Sequence
  Description of Artificial Sequence: Synthetic oligonucleotide
  Antisense strand to SEQ ID NO: 1095324
uccauaaagagcuauuuau

SEQ ID NO: 1095326 - RNA, 19 nt, Artificial Sequence
  Description of Artificial Sequence: Synthetic oligonucleotide
  Sense strand starting at position 144 of SEQ ID NO: 915643
gguugugaaguuugaaggu

SEQ ID NO: 1095327 - RNA, 19 nt, Artificial Sequence
  Description of Artificial Sequence: Synthetic oligonucleotide
  Antisense strand to SEQ ID NO: 1095326
accuucaaacuucacaacc

SEQ ID NO: 1095328 - RNA, 19 nt, Artificial Sequence
  Description of Artificial Sequence: Synthetic oligonucleotide
  Sense strand starting at position 197 of SEQ ID NO: 915643
gcaagugcucaauauguaa

SEQ ID NO: 1095329 - RNA, 19 nt, Artificial Sequence
  Description of Artificial Sequence: Synthetic oligonucleotide
  Antisense strand to SEQ ID NO: 1095328
uuacauauugagcacuugc

SEQ ID NO: 1095330 - RNA, 19 nt, Artificial Sequence
  Description of Artificial Sequence: Synthetic oligonucleotide
  Sense strand starting at position 210 of SEQ ID NO: 915643
auguaaccauuguuauacu

SEQ ID NO: 1095331 - RNA, 19 nt, Artificial Sequence
  Description of Artificial Sequence: Synthetic oligonucleotide
  Antisense strand to SEQ ID NO: 1095330
aguauaacaaugguuacau

SEQ ID NO: 1095332 - RNA, 19 nt, Artificial Sequence
  Description of Artificial Sequence: Synthetic oligonucleotide
  Sense strand starting at position 219 of SEQ ID NO: 915643
uuguuauacuguuauuggu

SEQ ID NO: 1095333 - RNA, 19 nt, Artificial Sequence
  Description of Artificial Sequence: Synthetic oligonucleotide
  Antisense strand to SEQ ID NO: 1095332
accaauaacaguauaacaa

SEQ ID NO: 1095334 - RNA, 19 nt, Artificial Sequence
  Description of Artificial Sequence: Synthetic oligonucleotide
  Sense strand starting at position 228 of SEQ ID NO: 915643
uguuauugguucuuacucu

SEQ ID NO: 1095335 - RNA, 19 nt, Artificial Sequence
  Description of Artificial Sequence: Synthetic oligonucleotide
  Antisense strand to SEQ ID NO: 1095334
agaguaagaaccaauaaca

SEQ ID NO: 1095336 - RNA, 19 nt, Artificial Sequence
  Description of Artificial Sequence: Synthetic oligonucleotide
  Sense strand starting at position 237 of SEQ ID NO: 915643
uucuuacucucugaugaag

SEQ ID NO: 1095337 - RNA, 19 nt, Artificial Sequence
  Description of Artificial Sequence: Synthetic oligonucleotide
  Antisense strand to SEQ ID NO: 1095336
cuucaucagagaguaagaa

SEQ ID NO: 1095338 - RNA, 19 nt, Artificial Sequence
  Description of Artificial Sequence: Synthetic oligonucleotide
  Sense strand starting at position 239 of SEQ ID NO: 915643
cuuacucucugaugaagua

SEQ ID NO: 1095339 - RNA, 19 nt, Artificial Sequence
  Description of Artificial Sequence: Synthetic oligonucleotide
  Antisense strand to SEQ ID NO: 1095338
uacuucaucagagaguaag

SEQ ID NO: 1095340 - RNA, 19 nt, Artificial Sequence
  Description of Artificial Sequence: Synthetic oligonucleotide
  Sense strand starting at position 316 of SEQ ID NO: 915643
gcaacugacuaauggaaag

SEQ ID NO: 1095341 - RNA, 19 nt, Artificial Sequence
  Description of Artificial Sequence: Synthetic oligonucleotide
  Antisense strand to SEQ ID NO: 1095340
cuuuccauuagucaguugc

SEQ ID NO: 1095342 - RNA, 19 nt, Artificial Sequence
  Description of Artificial Sequence: Synthetic oligonucleotide
  Sense strand starting at position 372 of SEQ ID NO: 915643
ggaguuaacucuugcaacu

SEQ ID NO: 1095343 - RNA, 19 nt, Artificial Sequence
  Description of Artificial Sequence: Synthetic oligonucleotide
  Antisense strand to SEQ ID NO: 1095342
aguugcaagaguuaacucc

SEQ ID NO: 1095344 - RNA, 19 nt, Artificial Sequence
  Description of Artificial Sequence: Synthetic oligonucleotide
  Sense strand starting at position 392 of SEQ ID NO: 915643
gugggaugauuccauuaaa

SEQ ID NO: 1095345 - RNA, 19 nt, Artificial Sequence
  Description of Artificial Sequence: Synthetic oligonucleotide
  Antisense strand to SEQ ID NO: 1095344
uuuaauggaaucaucccac

SEQ ID NO: 1095346 - RNA, 19 nt, Artificial Sequence
  Description of Artificial Sequence: Synthetic oligonucleotide
  Sense strand starting at position 1191 of SEQ ID NO: 915643
gaccgaaaggccuguuaca

SEQ ID NO: 1095347 - RNA, 19 nt, Artificial Sequence
  Description of Artificial Sequence: Synthetic oligonucleotide
  Antisense strand to SEQ ID NO: 1095346
uguaacaggccuuucgguc

SEQ ID NO: 1095348 - RNA, 19 nt, Artificial Sequence
  Description of Artificial Sequence: Synthetic oligonucleotide
  Sense strand starting at position 1233 of SEQ ID NO: 915643
ccaagaaugccuggcggau

SEQ ID NO: 1095349 - RNA, 19 nt, Artificial Sequence
  Description of Artificial Sequence: Synthetic oligonucleotide
  Antisense strand to SEQ ID NO: 1095348
auccgccaggcauucuugg

SEQ ID NO: 1095350 - RNA, 19 nt, Artificial Sequence
  Description of Artificial Sequence: Synthetic oligonucleotide
  Sense strand starting at position 1235 of SEQ ID NO: 915643
aagaaugccuggcggauuu

SEQ ID NO: 1095351 - RNA, 19 nt, Artificial Sequence
  Description of Artificial Sequence: Synthetic oligonucleotide
  Antisense strand to SEQ ID NO: 1095350
aaauccgccaggcauucuu

SEQ ID NO: 1095352 - RNA, 19 nt, Artificial Sequence
  Description of Artificial Sequence: Synthetic oligonucleotide
  Sense strand starting at position 1276 of SEQ ID NO: 915643
gcgccucucccagagaauc

SEQ ID NO: 1095353 - RNA, 19 nt, Artificial Sequence
  Description of Artificial Sequence: Synthetic oligonucleotide
  Antisense strand to SEQ ID NO: 1095352
gauucucugggagaggcgc

SEQ ID NO: 1095354 - RNA, 19 nt, Artificial Sequence
  Description of Artificial Sequence: Synthetic oligonucleotide
  Sense strand starting at position 1284 of SEQ ID NO: 915643
cccagagaauccuagaaac

SEQ ID NO: 1095355 - RNA, 19 nt, Artificial Sequence
  Description of Artificial Sequence: Synthetic oligonucleotide
  Antisense strand to SEQ ID NO: 1095354
guuucuaggauucucuggg

SEQ ID NO: 1095356 - RNA, 19 nt, Artificial Sequence
  Description of Artificial Sequence: Synthetic oligonucleotide
  Sense strand starting at position 1328 of SEQ ID NO: 915643
uuuacagcuccagaaauug

SEQ ID NO: 1095357 - RNA, 19 nt, Artificial Sequence
  Description of Artificial Sequence: Synthetic oligonucleotide
  Antisense strand to SEQ ID NO: 1095356
caauuucuggagcuguaaa

SEQ ID NO: 1095358 - RNA, 19 nt, Artificial Sequence
  Description of Artificial Sequence: Synthetic oligonucleotide
  Sense strand starting at position 1941 of SEQ ID NO: 915643
ggccuagggagacgucuua

SEQ ID NO: 1095359 - RNA, 19 nt, Artificial Sequence
  Description of Artificial Sequence: Synthetic oligonucleotide
  Antisense strand to SEQ ID NO: 1095358
uaagacgucucccuaggcc

SEQ ID NO: 1095360 - RNA, 19 nt, Artificial Sequence
  Description of Artificial Sequence: Synthetic oligonucleotide
  Sense strand starting at position 1948 of SEQ ID NO: 915643
ggagacgucuuacuuucga

SEQ ID NO: 1095361 - RNA, 19 nt, Artificial Sequence
  Description of Artificial Sequence: Synthetic oligonucleotide
  Antisense strand to SEQ ID NO: 1095360
ucgaaaguaagacgucucc

SEQ ID NO: 1095362 - RNA, 19 nt, Artificial Sequence
  Description of Artificial Sequence: Synthetic oligonucleotide
  Sense strand starting at position 3230 of SEQ ID NO: 915643
auacaaaucgccuggcuaa

SEQ ID NO: 1095363 - RNA, 19 nt, Artificial Sequence
  Description of Artificial Sequence: Synthetic oligonucleotide
  Antisense strand to SEQ ID NO: 1095362
uuagccaggcgauuuguau

SEQ ID NO: 1095364 - RNA, 19 nt, Artificial Sequence
  Description of Artificial Sequence: Synthetic oligonucleotide
  Sense strand starting at position 3286 of SEQ ID NO: 915643
auaaauauaucucgugcaa

SEQ ID NO: 1095365 - RNA, 19 nt, Artificial Sequence
  Description of Artificial Sequence: Synthetic oligonucleotide
  Antisense strand to SEQ ID NO: 1095364
uugcacgagauauauuuau

SEQ ID NO: 1095366 - RNA, 19 nt, Artificial Sequence
  Description of Artificial Sequence: Synthetic oligonucleotide
  Sense strand starting at position 3290 of SEQ ID NO: 915643
auauaucucgugcaauauu

SEQ ID NO: 1095367 - RNA, 19 nt, Artificial Sequence
  Description of Artificial Sequence: Synthetic oligonucleotide
  Antisense strand to SEQ ID NO: 1095366
aauauugcacgagauauau

SEQ ID NO: 1095368 - RNA, 19 nt, Artificial Sequence
  Description of Artificial Sequence: Synthetic oligonucleotide
  Sense strand starting at position 3689 of SEQ ID NO: 915643
guuguuaauguuuguuugu

SEQ ID NO: 1095369 - RNA, 19 nt, Artificial Sequence
  Description of Artificial Sequence: Synthetic oligonucleotide
  Antisense strand to SEQ ID NO: 1095368
acaaacaaacauuaacaac

SEQ ID NO: 1095370 - RNA, 19 nt, Artificial Sequence
  Description of Artificial Sequence: Synthetic oligonucleotide
  Sense strand starting at position 3926 of SEQ ID NO: 915643
ugcuaaauccggcaauccu

SEQ ID NO: 1095371 - RNA, 19 nt, Artificial Sequence
  Description of Artificial Sequence: Synthetic oligonucleotide
  Antisense strand to SEQ ID NO: 1095370
aggauugccggauuuagca

SEQ ID NO: 1095372 - RNA, 19 nt, Artificial Sequence
  Description of Artificial Sequence: Synthetic oligonucleotide
  Sense strand starting at position 3935 of SEQ ID NO: 915643
cggcaauccuacccaugaa

SEQ ID NO: 1095373 - RNA, 19 nt, Artificial Sequence
  Description of Artificial Sequence: Synthetic oligonucleotide
  Antisense strand to SEQ ID NO: 1095372
uucauggguaggauugccg

SEQ ID NO: 1095374 - RNA, 19 nt, Artificial Sequence
  Description of Artificial Sequence: Synthetic oligonucleotide
  Sense strand starting at position 389 of SEQ ID NO: 915644
cgcuaacuggauuagugau

SEQ ID NO: 1095375 - RNA, 19 nt, Artificial Sequence
  Description of Artificial Sequence: Synthetic oligonucleotide
  Antisense strand to SEQ ID NO: 1095374
aucacuaauccaguuagcg

SEQ ID NO: 1095376 - RNA, 19 nt, Artificial Sequence
  Description of Artificial Sequence: Synthetic oligonucleotide
  Sense strand starting at position 395 of SEQ ID NO: 915644
cuggauuagugaugggaag

SEQ ID NO: 1095377 - RNA, 19 nt, Artificial Sequence
  Description of Artificial Sequence: Synthetic oligonucleotide
  Antisense strand to SEQ ID NO: 1095376
cuucccaucacuaauccag

SEQ ID NO: 1095378 - RNA, 19 nt, Artificial Sequence
  Description of Artificial Sequence: Synthetic oligonucleotide
  Sense strand starting at position 415 of SEQ ID NO: 915644
gggcgaugucuugauggac

SEQ ID NO: 1095379 - RNA, 19 nt, Artificial Sequence
  Description of Artificial Sequence: Synthetic oligonucleotide
  Antisense strand to SEQ ID NO: 1095378
guccaucaagacaucgccc

SEQ ID NO: 1095380 - RNA, 19 nt, Artificial Sequence
  Description of Artificial Sequence: Synthetic oligonucleotide
  Sense strand starting at position 418 of SEQ ID NO: 915644
cgaugucuugauggacagu

SEQ ID NO: 1095381 - RNA, 19 nt, Artificial Sequence
  Description of Artificial Sequence: Synthetic oligonucleotide
  Antisense strand to SEQ ID NO: 1095380
acuguccaucaagacaucg

SEQ ID NO: 1095382 - RNA, 19 nt, Artificial Sequence
  Description of Artificial Sequence: Synthetic oligonucleotide
  Sense strand starting at position 1037 of SEQ ID NO: 915644
cgcccugugucccugagaa

SEQ ID NO: 1095383 - RNA, 19 nt, Artificial Sequence
  Description of Artificial Sequence: Synthetic oligonucleotide
  Antisense strand to SEQ ID NO: 1095382
uucucagggacacagggcg

SEQ ID NO: 1095384 - RNA, 19 nt, Artificial Sequence
  Description of Artificial Sequence: Synthetic oligonucleotide
  Sense strand starting at position 1041 of SEQ ID NO: 915644
cugugucccugagaaggua

SEQ ID NO: 1095385 - RNA, 19 nt, Artificial Sequence
  Description of Artificial Sequence: Synthetic oligonucleotide
  Antisense strand to SEQ ID NO: 1095384
uaccuucucagggacacag

SEQ ID NO: 1095386 - RNA, 19 nt, Artificial Sequence
  Description of Artificial Sequence: Synthetic oligonucleotide
  Sense strand starting at position 1062 of SEQ ID NO: 915644
uggaaaugacacugcuaca

SEQ ID NO: 1095387 - RNA, 19 nt, Artificial Sequence
  Description of Artificial Sequence: Synthetic oligonucleotide
  Antisense strand to SEQ ID NO: 1095386
uguagcagugucauuucca

SEQ ID NO: 1095388 - RNA, 19 nt, Artificial Sequence
  Description of Artificial Sequence: Synthetic oligonucleotide
  Sense strand starting at position 1144 of SEQ ID NO: 915644
caagguucugagugcccaa

SEQ ID NO: 1095389 - RNA, 19 nt, Artificial Sequence
  Description of Artificial Sequence: Synthetic oligonucleotide
  Antisense strand to SEQ ID NO: 1095388
uugggcacucagaaccuug

SEQ ID NO: 1095390 - RNA, 19 nt, Artificial Sequence
  Description of Artificial Sequence: Synthetic oligonucleotide
  Sense strand starting at position 1267 of SEQ ID NO: 915644
cacagacuccauggugaau

SEQ ID NO: 1095391 - RNA, 19 nt, Artificial Sequence
  Description of Artificial Sequence: Synthetic oligonucleotide
  Antisense strand to SEQ ID NO: 1095390
auucaccauggagucugug

SEQ ID NO: 1095392 - RNA, 19 nt, Artificial Sequence
  Description of Artificial Sequence: Synthetic oligonucleotide
  Sense strand starting at position 1273 of SEQ ID NO: 915644
cuccauggugaaugaauga

SEQ ID NO: 1095393 - RNA, 19 nt, Artificial Sequence
  Description of Artificial Sequence: Synthetic oligonucleotide
  Antisense strand to SEQ ID NO: 1095392
ucauucauucaccauggag

SEQ ID NO: 1095394 - RNA, 19 nt, Artificial Sequence
  Description of Artificial Sequence: Synthetic oligonucleotide
  Sense strand starting at position 1585 of SEQ ID NO: 915644
ccacauuccgaucguuaag

SEQ ID NO: 1095395 - RNA, 19 nt, Artificial Sequence
  Description of Artificial Sequence: Synthetic oligonucleotide
  Antisense strand to SEQ ID NO: 1095394
cuuaacgaucggaaugugg

SEQ ID NO: 1095396 - RNA, 19 nt, Artificial Sequence
  Description of Artificial Sequence: Synthetic oligonucleotide
  Sense strand starting at position 1587 of SEQ ID NO: 915644
acauuccgaucguuaagau

SEQ ID NO: 1095397 - RNA, 19 nt, Artificial Sequence
  Description of Artificial Sequence: Synthetic oligonucleotide
  Antisense strand to SEQ ID NO: 1095396
aucuuaacgaucggaaugu

SEQ ID NO: 1095398 - RNA, 19 nt, Artificial Sequence
  Description of Artificial Sequence: Synthetic oligonucleotide
  Sense strand starting at position 1588 of SEQ ID NO: 915644
cauuccgaucguuaagauu

SEQ ID NO: 1095399 - RNA, 19 nt, Artificial Sequence
  Description of Artificial Sequence: Synthetic oligonucleotide
  Antisense strand to SEQ ID NO: 1095398
aaucuuaacgaucggaaug

SEQ ID NO: 1095400 - RNA, 19 nt, Artificial Sequence
  Description of Artificial Sequence: Synthetic oligonucleotide
  Sense strand starting at position 2161 of SEQ ID NO: 915644
aagggcucguccguggaau

SEQ ID NO: 1095401 - RNA, 19 nt, Artificial Sequence
  Description of Artificial Sequence: Synthetic oligonucleotide
  Antisense strand to SEQ ID NO: 1095400
auuccacggacgagcccuu

SEQ ID NO: 1095402 - RNA, 19 nt, Artificial Sequence
  Description of Artificial Sequence: Synthetic oligonucleotide
  Sense strand starting at position 2172 of SEQ ID NO: 915644
cguggaaucuaauugccuu

SEQ ID NO: 1095403 - RNA, 19 nt, Artificial Sequence
  Description of Artificial Sequence: Synthetic oligonucleotide
  Antisense strand to SEQ ID NO: 1095402
aaggcaauuagauuccacg

SEQ ID NO: 1095404 - RNA, 19 nt, Artificial Sequence
  Description of Artificial Sequence: Synthetic oligonucleotide
  Sense strand starting at position 2197 of SEQ ID NO: 915644
ccagcccugucugaaucau

SEQ ID NO: 1095405 - RNA, 19 nt, Artificial Sequence
  Description of Artificial Sequence: Synthetic oligonucleotide
  Antisense strand to SEQ ID NO: 1095404
augauucagacagggcugg

SEQ ID NO: 1095406 - RNA, 19 nt, Artificial Sequence
  Description of Artificial Sequence: Synthetic oligonucleotide
  Sense strand starting at position 2429 of SEQ ID NO: 915644
ggaggcaauuuguuugcuu

SEQ ID NO: 1095407 - RNA, 19 nt, Artificial Sequence
  Description of Artificial Sequence: Synthetic oligonucleotide
  Antisense strand to SEQ ID NO: 1095406
aagcaaacaaauugccucc

SEQ ID NO: 1095408 - RNA, 19 nt, Artificial Sequence
  Description of Artificial Sequence: Synthetic oligonucleotide
  Sense strand starting at position 2438 of SEQ ID NO: 915644
uuguuugcuucuccagaag

SEQ ID NO: 1095409 - RNA, 19 nt, Artificial Sequence
  Description of Artificial Sequence: Synthetic oligonucleotide
  Antisense strand to SEQ ID NO: 1095408
cuucuggagaagcaaacaa

SEQ ID NO: 1095410 - RNA, 19 nt, Artificial Sequence
  Description of Artificial Sequence: Synthetic oligonucleotide
  Sense strand starting at position 2441 of SEQ ID NO: 915644
uuugcuucuccagaagauu

SEQ ID NO: 1095411 - RNA, 19 nt, Artificial Sequence
  Description of Artificial Sequence: Synthetic oligonucleotide
  Antisense strand to SEQ ID NO: 1095410
aaucuucuggagaagcaaa

SEQ ID NO: 1095412 - RNA, 19 nt, Artificial Sequence
  Description of Artificial Sequence: Synthetic oligonucleotide
  Sense strand starting at position 2463 of SEQ ID NO: 915644
ggccgugugucucauagac

SEQ ID NO: 1095413 - RNA, 19 nt, Artificial Sequence
  Description of Artificial Sequence: Synthetic oligonucleotide
  Antisense strand to SEQ ID NO: 1095412
gucuaugagacacacggcc

SEQ ID NO: 1095414 - RNA, 19 nt, Artificial Sequence
  Description of Artificial Sequence: Synthetic oligonucleotide
  Sense strand starting at position 2465 of SEQ ID NO: 915644
ccgugugucucauagacgu

SEQ ID NO: 1095415 - RNA, 19 nt, Artificial Sequence
  Description of Artificial Sequence: Synthetic oligonucleotide
  Antisense strand to SEQ ID NO: 1095414
acgucuaugagacacacgg

SEQ ID NO: 1095416 - RNA, 19 nt, Artificial Sequence
  Description of Artificial Sequence: Synthetic oligonucleotide
  Sense strand starting at position 2469 of SEQ ID NO: 915644
gugucucauagacgugguu

SEQ ID NO: 1095417 - RNA, 19 nt, Artificial Sequence
  Description of Artificial Sequence: Synthetic oligonucleotide
  Antisense strand to SEQ ID NO: 1095416
aaccacgucuaugagacac

SEQ ID NO: 1095418 - RNA, 19 nt, Artificial Sequence
  Description of Artificial Sequence: Synthetic oligonucleotide
  Sense strand starting at position 2478 of SEQ ID NO: 915644
agacgugguuccuaggagu

SEQ ID NO: 1095419 - RNA, 19 nt, Artificial Sequence
  Description of Artificial Sequence: Synthetic oligonucleotide
  Antisense strand to SEQ ID NO: 1095418
acuccuaggaaccacgucu

SEQ ID NO: 1095420 - RNA, 19 nt, Artificial Sequence
  Description of Artificial Sequence: Synthetic oligonucleotide
  Sense strand starting at position 2853 of SEQ ID NO: 915644
uggagagaccuuugcaguu

SEQ ID NO: 1095421 - RNA, 19 nt, Artificial Sequence
  Description of Artificial Sequence: Synthetic oligonucleotide
  Antisense strand to SEQ ID NO: 1095420
aacugcaaaggucucucca

SEQ ID NO: 1095422 - RNA, 19 nt, Artificial Sequence
  Description of Artificial Sequence: Synthetic oligonucleotide
  Sense strand starting at position 3144 of SEQ ID NO: 915644
uugacaaugcuggacugua

SEQ ID NO: 1095423 - RNA, 19 nt, Artificial Sequence
  Description of Artificial Sequence: Synthetic oligonucleotide
  Antisense strand to SEQ ID NO: 1095422
uacaguccagcauugucaa

SEQ ID NO: 1095424 - RNA, 19 nt, Artificial Sequence
  Description of Artificial Sequence: Synthetic oligonucleotide
  Sense strand starting at position 3216 of SEQ ID NO: 915644
cgcugucccuccuggagaa

SEQ ID NO: 1095425 - RNA, 19 nt, Artificial Sequence
  Description of Artificial Sequence: Synthetic oligonucleotide
  Antisense strand to SEQ ID NO: 1095424
uucuccaggagggacagcg

SEQ ID NO: 1095426 - RNA, 19 nt, Artificial Sequence
  Description of Artificial Sequence: Synthetic oligonucleotide
  Sense strand starting at position 3635 of SEQ ID NO: 915644
cccgguuugcagugucauu

SEQ ID NO: 1095427 - RNA, 19 nt, Artificial Sequence
  Description of Artificial Sequence: Synthetic oligonucleotide
  Antisense strand to SEQ ID NO: 1095426
aaugacacugcaaaccggg

SEQ ID NO: 1095428 - RNA, 19 nt, Artificial Sequence
  Description of Artificial Sequence: Synthetic oligonucleotide
  Sense strand starting at position 3661 of SEQ ID NO: 915644
caccucuuauccgggugaa

SEQ ID NO: 1095429 - RNA, 19 nt, Artificial Sequence
  Description of Artificial Sequence: Synthetic oligonucleotide
  Antisense strand to SEQ ID NO: 1095428
uucacccggauaagaggug

SEQ ID NO: 1095430 - RNA, 19 nt, Artificial Sequence
  Description of Artificial Sequence: Synthetic oligonucleotide
  Sense strand starting at position 3662 of SEQ ID NO: 915644
accucuuauccgggugaac

SEQ ID NO: 1095431 - RNA, 19 nt, Artificial Sequence
  Description of Artificial Sequence: Synthetic oligonucleotide
  Antisense strand to SEQ ID NO: 1095430
guucacccggauaagaggu

SEQ ID NO: 1095432 - RNA, 19 nt, Artificial Sequence
  Description of Artificial Sequence: Synthetic oligonucleotide
  Sense strand starting at position 3664 of SEQ ID NO: 915644
cucuuauccgggugaacuc

SEQ ID NO: 1095433 - RNA, 19 nt, Artificial Sequence
  Description of Artificial Sequence: Synthetic oligonucleotide
  Antisense strand to SEQ ID NO: 1095432
gaguucacccggauaagag

SEQ ID NO: 1095434 - RNA, 19 nt, Artificial Sequence
  Description of Artificial Sequence: Synthetic oligonucleotide
  Sense strand starting at position 3733 of SEQ ID NO: 915644
gcccuuucuugccacgaua

SEQ ID NO: 1095435 - RNA, 19 nt, Artificial Sequence
  Description of Artificial Sequence: Synthetic oligonucleotide
  Antisense strand to SEQ ID NO: 1095434
uaucguggcaagaaagggc

SEQ ID NO: 1095436 - RNA, 19 nt, Artificial Sequence
  Description of Artificial Sequence: Synthetic oligonucleotide
  Sense strand starting at position 3735 of SEQ ID NO: 915644
ccuuucuugccacgauauu

SEQ ID NO: 1095437 - RNA, 19 nt, Artificial Sequence
  Description of Artificial Sequence: Synthetic oligonucleotide
  Antisense strand to SEQ ID NO: 1095436
aauaucguggcaagaaagg

SEQ ID NO: 1095438 - RNA, 19 nt, Artificial Sequence
  Description of Artificial Sequence: Synthetic oligonucleotide
  Sense strand starting at position 3736 of SEQ ID NO: 915644
cuuucuugccacgauauua

SEQ ID NO: 1095439 - RNA, 19 nt, Artificial Sequence
  Description of Artificial Sequence: Synthetic oligonucleotide
  Antisense strand to SEQ ID NO: 1095438
uaauaucguggcaagaaag

SEQ ID NO: 1095440 - RNA, 19 nt, Artificial Sequence
  Description of Artificial Sequence: Synthetic oligonucleotide
  Sense strand starting at position 3845 of SEQ ID NO: 915644
ccuguccucucucggagau

SEQ ID NO: 1095441 - RNA, 19 nt, Artificial Sequence
  Description of Artificial Sequence: Synthetic oligonucleotide
  Antisense strand to SEQ ID NO: 1095440
aucuccgagagaggacagg

SEQ ID NO: 1095442 - RNA, 19 nt, Artificial Sequence
  Description of Artificial Sequence: Synthetic oligonucleotide
  Sense strand starting at position 53 of SEQ ID NO: 915645
auguuuauuccgcauaauu

SEQ ID NO: 1095443 - RNA, 19 nt, Artificial Sequence
  Description of Artificial Sequence: Synthetic oligonucleotide
  Antisense strand to SEQ ID NO: 1095442
aauuaugcggaauaaacau

SEQ ID NO: 1095444 - RNA, 19 nt, Artificial Sequence
  Description of Artificial Sequence: Synthetic oligonucleotide
  Sense strand starting at position 55 of SEQ ID NO: 915645
guuuauuccgcauaauuac

SEQ ID NO: 1095445 - RNA, 19 nt, Artificial Sequence
  Description of Artificial Sequence: Synthetic oligonucleotide
  Antisense strand to SEQ ID NO: 1095444
guaauuaugcggaauaaac

SEQ ID NO: 1095446 - RNA, 19 nt, Artificial Sequence
  Description of Artificial Sequence: Synthetic oligonucleotide
  Sense strand starting at position 176 of SEQ ID NO: 915645
cuccuuacugugugacuuu

SEQ ID NO: 1095447 - RNA, 19 nt, Artificial Sequence
  Description of Artificial Sequence: Synthetic oligonucleotide
  Antisense strand to SEQ ID NO: 1095446
aaagucacacaguaaggag

SEQ ID NO: 1095448 - RNA, 19 nt, Artificial Sequence
  Description of Artificial Sequence: Synthetic oligonucleotide
  Sense strand starting at position 284 of SEQ ID NO: 915645
uugagauugcaauggacgu

SEQ ID NO: 1095449 - RNA, 19 nt, Artificial Sequence
  Description of Artificial Sequence: Synthetic oligonucleotide
  Antisense strand to SEQ ID NO: 1095448
acguccauugcaaucucaa

SEQ ID NO: 1095450 - RNA, 19 nt, Artificial Sequence
  Description of Artificial Sequence: Synthetic oligonucleotide
  Sense strand starting at position 405 of SEQ ID NO: 915645
agucuuuauccaugaguga

SEQ ID NO: 1095451 - RNA, 19 nt, Artificial Sequence
  Description of Artificial Sequence: Synthetic oligonucleotide
  Antisense strand to SEQ ID NO: 1095450
ucacucauggauaaagacu

SEQ ID NO: 1095452 - RNA, 19 nt, Artificial Sequence
  Description of Artificial Sequence: Synthetic oligonucleotide
  Sense strand starting at position 406 of SEQ ID NO: 915645
gucuuuauccaugagugaa

SEQ ID NO: 1095453 - RNA, 19 nt, Artificial Sequence
  Description of Artificial Sequence: Synthetic oligonucleotide
  Antisense strand to SEQ ID NO: 1095452
uucacucauggauaaagac

SEQ ID NO: 1095454 - RNA, 19 nt, Artificial Sequence
  Description of Artificial Sequence: Synthetic oligonucleotide
  Sense strand starting at position 408 of SEQ ID NO: 915645
cuuuauccaugagugaacu

SEQ ID NO: 1095455 - RNA, 19 nt, Artificial Sequence
  Description of Artificial Sequence: Synthetic oligonucleotide
  Antisense strand to SEQ ID NO: 1095454
aguucacucauggauaaag

SEQ ID NO: 1095456 - RNA, 19 nt, Artificial Sequence
  Description of Artificial Sequence: Synthetic oligonucleotide
  Sense strand starting at position 409 of SEQ ID NO: 915645
uuuauccaugagugaacua

SEQ ID NO: 1095457 - RNA, 19 nt, Artificial Sequence
  Description of Artificial Sequence: Synthetic oligonucleotide
  Antisense strand to SEQ ID NO: 1095456
uaguucacucauggauaaa

SEQ ID NO: 1095458 - RNA, 19 nt, Artificial Sequence
  Description of Artificial Sequence: Synthetic oligonucleotide
  Sense strand starting at position 538 of SEQ ID NO: 915645
guaggcuuagacuggaaca

SEQ ID NO: 1095459 - RNA, 19 nt, Artificial Sequence
  Description of Artificial Sequence: Synthetic oligonucleotide
  Antisense strand to SEQ ID NO: 1095458
uguuccagucuaagccuac

SEQ ID NO: 1095460 - RNA, 19 nt, Artificial Sequence
  Description of Artificial Sequence: Synthetic oligonucleotide
  Sense strand starting at position 606 of SEQ ID NO: 915645
acuccaguuugccuggaau

SEQ ID NO: 1095461 - RNA, 19 nt, Artificial Sequence
  Description of Artificial Sequence: Synthetic oligonucleotide
  Antisense strand to SEQ ID NO: 1095460
auuccaggcaaacuggagu

SEQ ID NO: 1095462 - RNA, 19 nt, Artificial Sequence
  Description of Artificial Sequence: Synthetic oligonucleotide
  Sense strand starting at position 609 of SEQ ID NO: 915645
ccaguuugccuggaaugga

SEQ ID NO: 1095463 - RNA, 19 nt, Artificial Sequence
  Description of Artificial Sequence: Synthetic oligonucleotide
  Antisense strand to SEQ ID NO: 1095462
uccauuccaggcaaacugg

SEQ ID NO: 1095464 - RNA, 19 nt, Artificial Sequence
  Description of Artificial Sequence: Synthetic oligonucleotide
  Sense strand starting at position 761 of SEQ ID NO: 915645
uuuccauguucugugacuu

SEQ ID NO: 1095465 - RNA, 19 nt, Artificial Sequence
  Description of Artificial Sequence: Synthetic oligonucleotide
  Antisense strand to SEQ ID NO: 1095464
aagucacagaacauggaaa

SEQ ID NO: 1095466 - RNA, 19 nt, Artificial Sequence
  Description of Artificial Sequence: Synthetic oligonucleotide
  Sense strand starting at position 765 of SEQ ID NO: 915645
cauguucugugacuugaaa

SEQ ID NO: 1095467 - RNA, 19 nt, Artificial Sequence
  Description of Artificial Sequence: Synthetic oligonucleotide
  Antisense strand to SEQ ID NO: 1095466
uuucaagucacagaacaug

SEQ ID NO: 1095468 - RNA, 19 nt, Artificial Sequence
  Description of Artificial Sequence: Synthetic oligonucleotide
  Sense strand starting at position 838 of SEQ ID NO: 915645
augugcaugccuuagguaa

SEQ ID NO: 1095469 - RNA, 19 nt, Artificial Sequence
  Description of Artificial Sequence: Synthetic oligonucleotide
  Antisense strand to SEQ ID NO: 1095468
uuaccuaaggcaugcacau

SEQ ID NO: 1095470 - RNA, 19 nt, Artificial Sequence
  Description of Artificial Sequence: Synthetic oligonucleotide
  Sense strand starting at position 842 of SEQ ID NO: 915645
gcaugccuuagguaaguuu

SEQ ID NO: 1095471 - RNA, 19 nt, Artificial Sequence
  Description of Artificial Sequence: Synthetic oligonucleotide
  Antisense strand to SEQ ID NO: 1095470
aaacuuaccuaaggcaugc

SEQ ID NO: 1095472 - RNA, 19 nt, Artificial Sequence
  Description of Artificial Sequence: Synthetic oligonucleotide
  Sense strand starting at position 1252 of SEQ ID NO: 915645
cauauaugugcauaugaga

SEQ ID NO: 1095473 - RNA, 19 nt, Artificial Sequence
  Description of Artificial Sequence: Synthetic oligonucleotide
  Antisense strand to SEQ ID NO: 1095472
ucucauaugcacauauaug

SEQ ID NO: 1095474 - RNA, 19 nt, Artificial Sequence
  Description of Artificial Sequence: Synthetic oligonucleotide
  Sense strand starting at position 1471 of SEQ ID NO: 915645
ccuggaaugucccuuugua

SEQ ID NO: 1095475 - RNA, 19 nt, Artificial Sequence
  Description of Artificial Sequence: Synthetic oligonucleotide
  Antisense strand to SEQ ID NO: 1095474
uacaaagggacauuccagg

SEQ ID NO: 1095476 - RNA, 19 nt, Artificial Sequence
  Description of Artificial Sequence: Synthetic oligonucleotide
  Sense strand starting at position 1475 of SEQ ID NO: 915645
gaaugucccuuuguagacu

SEQ ID NO: 1095477 - RNA, 19 nt, Artificial Sequence
  Description of Artificial Sequence: Synthetic oligonucleotide
  Antisense strand to SEQ ID NO: 1095476
agucuacaaagggacauuc

SEQ ID NO: 1095478 - RNA, 19 nt, Artificial Sequence
  Description of Artificial Sequence: Synthetic oligonucleotide
  Sense strand starting at position 2124 of SEQ ID NO: 915645
ucuguaucaggugauccau

SEQ ID NO: 1095479 - RNA, 19 nt, Artificial Sequence
  Description of Artificial Sequence: Synthetic oligonucleotide
  Antisense strand to SEQ ID NO: 1095478
auggaucaccugauacaga

SEQ ID NO: 1095480 - RNA, 19 nt, Artificial Sequence
  Description of Artificial Sequence: Synthetic oligonucleotide
  Sense strand starting at position 2135 of SEQ ID NO: 915645
ugauccaucugcccagaga

SEQ ID NO: 1095481 - RNA, 19 nt, Artificial Sequence
  Description of Artificial Sequence: Synthetic oligonucleotide
  Antisense strand to SEQ ID NO: 1095480
ucucugggcagauggauca

SEQ ID NO: 1095482 - RNA, 19 nt, Artificial Sequence
  Description of Artificial Sequence: Synthetic oligonucleotide
  Sense strand starting at position 2387 of SEQ ID NO: 915645
gggugacuccauugugaaa

SEQ ID NO: 1095483 - RNA, 19 nt, Artificial Sequence
  Description of Artificial Sequence: Synthetic oligonucleotide
  Antisense strand to SEQ ID NO: 1095482
uuucacaauggagucaccc

SEQ ID NO: 1095484 - RNA, 19 nt, Artificial Sequence
  Description of Artificial Sequence: Synthetic oligonucleotide
  Sense strand starting at position 2406 of SEQ ID NO: 915645
uggagaggauuugaaguga

SEQ ID NO: 1095485 - RNA, 19 nt, Artificial Sequence
  Description of Artificial Sequence: Synthetic oligonucleotide
  Antisense strand to SEQ ID NO: 1095484
ucacuucaaauccucucca

SEQ ID NO: 1095486 - RNA, 19 nt, Artificial Sequence
  Description of Artificial Sequence: Synthetic oligonucleotide
  Sense strand starting at position 2479 of SEQ ID NO: 915645
gcaauuuccuagcugaguu

SEQ ID NO: 1095487 - RNA, 19 nt, Artificial Sequence
  Description of Artificial Sequence: Synthetic oligonucleotide
  Antisense strand to SEQ ID NO: 1095486
aacucagcuaggaaauugc

SEQ ID NO: 1095488 - RNA, 19 nt, Artificial Sequence
  Description of Artificial Sequence: Synthetic oligonucleotide
  Sense strand starting at position 2567 of SEQ ID NO: 915645
uuucgugagugaucucauu

SEQ ID NO: 1095489 - RNA, 19 nt, Artificial Sequence
  Description of Artificial Sequence: Synthetic oligonucleotide
  Antisense strand to SEQ ID NO: 1095488
aaugagaucacucacgaaa

SEQ ID NO: 1095490 - RNA, 19 nt, Artificial Sequence
  Description of Artificial Sequence: Synthetic oligonucleotide
  Sense strand starting at position 2770 of SEQ ID NO: 915645
ggugcagacagcuaaagua

SEQ ID NO: 1095491 - RNA, 19 nt, Artificial Sequence
  Description of Artificial Sequence: Synthetic oligonucleotide
  Antisense strand to SEQ ID NO: 1095490
uacuuuagcugucugcacc

SEQ ID NO: 1095492 - RNA, 19 nt, Artificial Sequence
  Description of Artificial Sequence: Synthetic oligonucleotide
  Sense strand starting at position 2858 of SEQ ID NO: 915645
uguggacugacaugagguu

SEQ ID NO: 1095493 - RNA, 19 nt, Artificial Sequence
  Description of Artificial Sequence: Synthetic oligonucleotide
  Antisense strand to SEQ ID NO: 1095492
aaccucaugucaguccaca

SEQ ID NO: 1095494 - RNA, 19 nt, Artificial Sequence
  Description of Artificial Sequence: Synthetic oligonucleotide
  Sense strand starting at position 2871 of SEQ ID NO: 915645
gagguuacauagucauaca

SEQ ID NO: 1095495 - RNA, 19 nt, Artificial Sequence
  Description of Artificial Sequence: Synthetic oligonucleotide
  Antisense strand to SEQ ID NO: 1095494
uguaugacuauguaaccuc

SEQ ID NO: 1095496 - RNA, 19 nt, Artificial Sequence
  Description of Artificial Sequence: Synthetic oligonucleotide
  Sense strand starting at position 2922 of SEQ ID NO: 915645
agguggugugaggauugaa

SEQ ID NO: 1095497 - RNA, 19 nt, Artificial Sequence
  Description of Artificial Sequence: Synthetic oligonucleotide
  Antisense strand to SEQ ID NO: 1095496
uucaauccucacaccaccu

SEQ ID NO: 1095498 - RNA, 19 nt, Artificial Sequence
  Description of Artificial Sequence: Synthetic oligonucleotide
  Sense strand starting at position 2960 of SEQ ID NO: 915645
ugcuuuguaucaguccaga

SEQ ID NO: 1095499 - RNA, 19 nt, Artificial Sequence
  Description of Artificial Sequence: Synthetic oligonucleotide
  Antisense strand to SEQ ID NO: 1095498
ucuggacugauacaaagca

SEQ ID NO: 1095500 - RNA, 19 nt, Artificial Sequence
  Description of Artificial Sequence: Synthetic oligonucleotide
  Sense strand starting at position 2963 of SEQ ID NO: 915645
uuuguaucaguccagacaa

SEQ ID NO: 1095501 - RNA, 19 nt, Artificial Sequence
  Description of Artificial Sequence: Synthetic oligonucleotide
  Antisense strand to SEQ ID NO: 1095500
uugucuggacugauacaaa

SEQ ID NO: 1095502 - RNA, 19 nt, Artificial Sequence
  Description of Artificial Sequence: Synthetic oligonucleotide
  Sense strand starting at position 3041 of SEQ ID NO: 915645
auguauuaucuaugcagau

SEQ ID NO: 1095503 - RNA, 19 nt, Artificial Sequence
  Description of Artificial Sequence: Synthetic oligonucleotide
  Antisense strand to SEQ ID NO: 1095502
aucugcauagauaauacau

SEQ ID NO: 1095504 - RNA, 19 nt, Artificial Sequence
  Description of Artificial Sequence: Synthetic oligonucleotide
  Sense strand starting at position 3042 of SEQ ID NO: 915645
uguauuaucuaugcagauu

SEQ ID NO: 1095505 - RNA, 19 nt, Artificial Sequence
  Description of Artificial Sequence: Synthetic oligonucleotide
  Antisense strand to SEQ ID NO: 1095504
aaucugcauagauaauaca

SEQ ID NO: 1095506 - RNA, 19 nt, Artificial Sequence
  Description of Artificial Sequence: Synthetic oligonucleotide
  Sense strand starting at position 3070 of SEQ ID NO: 915645
ugcuaaggcuucucccaaa

SEQ ID NO: 1095507 - RNA, 19 nt, Artificial Sequence
  Description of Artificial Sequence: Synthetic oligonucleotide
  Antisense strand to SEQ ID NO: 1095506
uuugggagaagccuuagca

SEQ ID NO: 1095508 - RNA, 19 nt, Artificial Sequence
  Description of Artificial Sequence: Synthetic oligonucleotide
  Sense strand starting at position 3147 of SEQ ID NO: 915645
accagcagucuuggaagau

SEQ ID NO: 1095509 - RNA, 19 nt, Artificial Sequence
  Description of Artificial Sequence: Synthetic oligonucleotide
  Antisense strand to SEQ ID NO: 1095508
aucuuccaagacugcuggu

SEQ ID NO: 1095510 - RNA, 19 nt, Artificial Sequence
  Description of Artificial Sequence: Synthetic oligonucleotide
  Sense strand starting at position 3156 of SEQ ID NO: 915645
cuuggaagauaauaaucuu

SEQ ID NO: 1095511 - RNA, 19 nt, Artificial Sequence
  Description of Artificial Sequence: Synthetic oligonucleotide
  Antisense strand to SEQ ID NO: 1095510
aagauuauuaucuuccaag

SEQ ID NO: 1095512 - RNA, 19 nt, Artificial Sequence
  Description of Artificial Sequence: Synthetic oligonucleotide
  Sense strand starting at position 3600 of SEQ ID NO: 915645
aaguuaguggcagagucaa

SEQ ID NO: 1095513 - RNA, 19 nt, Artificial Sequence
  Description of Artificial Sequence: Synthetic oligonucleotide
  Antisense strand to SEQ ID NO: 1095512
uugacucugccacuaacuu

SEQ ID NO: 1095514 - RNA, 19 nt, Artificial Sequence
  Description of Artificial Sequence: Synthetic oligonucleotide
  Sense strand starting at position 3608 of SEQ ID NO: 915645
ggcagagucaaguggagaa

SEQ ID NO: 1095515 - RNA, 19 nt, Artificial Sequence
  Description of Artificial Sequence: Synthetic oligonucleotide
  Antisense strand to SEQ ID NO: 1095514
uucuccacuugacucugcc

SEQ ID NO: 1095516 - RNA, 19 nt, Artificial Sequence
  Description of Artificial Sequence: Synthetic oligonucleotide
  Sense strand starting at position 3635 of SEQ ID NO: 915645
ucugaauucuggcucaggu

SEQ ID NO: 1095517 - RNA, 19 nt, Artificial Sequence
  Description of Artificial Sequence: Synthetic oligonucleotide
  Antisense strand to SEQ ID NO: 1095516
accugagccagaauucaga

SEQ ID NO: 1095518 - RNA, 19 nt, Artificial Sequence
  Description of Artificial Sequence: Synthetic oligonucleotide
  Sense strand starting at position 3673 of SEQ ID NO: 915645
ucuggugaaaucugcugaa

SEQ ID NO: 1095519 - RNA, 19 nt, Artificial Sequence
  Description of Artificial Sequence: Synthetic oligonucleotide
  Antisense strand to SEQ ID NO: 1095518
uucagcagauuucaccaga

SEQ ID NO: 1095520 - RNA, 19 nt, Artificial Sequence
  Description of Artificial Sequence: Synthetic oligonucleotide
  Sense strand starting at position 3677 of SEQ ID NO: 915645
gugaaaucugcugaaugau

SEQ ID NO: 1095521 - RNA, 19 nt, Artificial Sequence
  Description of Artificial Sequence: Synthetic oligonucleotide
  Antisense strand to SEQ ID NO: 1095520
aucauucagcagauuucac

SEQ ID NO: 1095522 - RNA, 19 nt, Artificial Sequence
  Description of Artificial Sequence: Synthetic oligonucleotide
  Sense strand starting at position 104 of SEQ ID NO: 915646
ccaacaucuggcgaugacu

SEQ ID NO: 1095523 - RNA, 19 nt, Artificial Sequence
  Description of Artificial Sequence: Synthetic oligonucleotide
  Antisense strand to SEQ ID NO: 1095522
agucaucgccagauguugg

SEQ ID NO: 1095524 - RNA, 19 nt, Artificial Sequence
  Description of Artificial Sequence: Synthetic oligonucleotide
  Sense strand starting at position 166 of SEQ ID NO: 915646
cccaguggauggcuagaua

SEQ ID NO: 1095525 - RNA, 19 nt, Artificial Sequence
  Description of Artificial Sequence: Synthetic oligonucleotide
  Antisense strand to SEQ ID NO: 1095524
uaucuagccauccacuggg

SEQ ID NO: 1095526 - RNA, 19 nt, Artificial Sequence
  Description of Artificial Sequence: Synthetic oligonucleotide
  Sense strand starting at position 253 of SEQ ID NO: 915646
aaucguguuccuggaggag

SEQ ID NO: 1095527 - RNA, 19 nt, Artificial Sequence
  Description of Artificial Sequence: Synthetic oligonucleotide
  Antisense strand to SEQ ID NO: 1095526
cuccuccaggaacacgauu

SEQ ID NO: 1095528 - RNA, 19 nt, Artificial Sequence
  Description of Artificial Sequence: Synthetic oligonucleotide
  Sense strand starting at position 256 of SEQ ID NO: 915646
cguguuccuggaggagaga

SEQ ID NO: 1095529 - RNA, 19 nt, Artificial Sequence
  Description of Artificial Sequence: Synthetic oligonucleotide
  Antisense strand to SEQ ID NO: 1095528
ucucuccuccaggaacacg

SEQ ID NO: 1095530 - RNA, 19 nt, Artificial Sequence
  Description of Artificial Sequence: Synthetic oligonucleotide
  Sense strand starting at position 275 of SEQ ID NO: 915646
aagacauagugaucuccga

SEQ ID NO: 1095531 - RNA, 19 nt, Artificial Sequence
  Description of Artificial Sequence: Synthetic oligonucleotide
  Antisense strand to SEQ ID NO: 1095530
ucggagaucacuaugucuu

SEQ ID NO: 1095532 - RNA, 19 nt, Artificial Sequence
  Description of Artificial Sequence: Synthetic oligonucleotide
  Sense strand starting at position 279 of SEQ ID NO: 915646
cauagugaucuccgauugu

SEQ ID NO: 1095533 - RNA, 19 nt, Artificial Sequence
  Description of Artificial Sequence: Synthetic oligonucleotide
  Antisense strand to SEQ ID NO: 1095532
acaaucggagaucacuaug

SEQ ID NO: 1095534 - RNA, 19 nt, Artificial Sequence
  Description of Artificial Sequence: Synthetic oligonucleotide
  Sense strand starting at position 294 of SEQ ID NO: 915646
uuguaugugagccaaggau

SEQ ID NO: 1095535 - RNA, 19 nt, Artificial Sequence
  Description of Artificial Sequence: Synthetic oligonucleotide
  Antisense strand to SEQ ID NO: 1095534
auccuuggcucacauacaa

SEQ ID NO: 1095536 - RNA, 19 nt, Artificial Sequence
  Description of Artificial Sequence: Synthetic oligonucleotide
  Sense strand starting at position 306 of SEQ ID NO: 915646
caaggaugcuucccaaugu

SEQ ID NO: 1095537 - RNA, 19 nt, Artificial Sequence
  Description of Artificial Sequence: Synthetic oligonucleotide
  Antisense strand to SEQ ID NO: 1095536
acauugggaagcauccuug

SEQ ID NO: 1095538 - RNA, 19 nt, Artificial Sequence
  Description of Artificial Sequence: Synthetic oligonucleotide
  Sense strand starting at position 469 of SEQ ID NO: 915646
agccuaucugcagagcagu

SEQ ID NO: 1095539 - RNA, 19 nt, Artificial Sequence
  Description of Artificial Sequence: Synthetic oligonucleotide
  Antisense strand to SEQ ID NO: 1095538
acugcucugcagauaggcu

SEQ ID NO: 1095540 - RNA, 19 nt, Artificial Sequence
  Description of Artificial Sequence: Synthetic oligonucleotide
  Sense strand starting at position 742 of SEQ ID NO: 915646
cgaggacucuuguuugaga

SEQ ID NO: 1095541 - RNA, 19 nt, Artificial Sequence
  Description of Artificial Sequence: Synthetic oligonucleotide
  Antisense strand to SEQ ID NO: 1095540
ucucaaacaagaguccucg

SEQ ID NO: 1095542 - RNA, 19 nt, Artificial Sequence
  Description of Artificial Sequence: Synthetic oligonucleotide
  Sense strand starting at position 743 of SEQ ID NO: 915646
gaggacucuuguuugagau

SEQ ID NO: 1095543 - RNA, 19 nt, Artificial Sequence
  Description of Artificial Sequence: Synthetic oligonucleotide
  Antisense strand to SEQ ID NO: 1095542
aucucaaacaagaguccuc

SEQ ID NO: 1095544 - RNA, 19 nt, Artificial Sequence
  Description of Artificial Sequence: Synthetic oligonucleotide
  Sense strand starting at position 744 of SEQ ID NO: 915646
aggacucuuguuugagaug

SEQ ID NO: 1095545 - RNA, 19 nt, Artificial Sequence
  Description of Artificial Sequence: Synthetic oligonucleotide
  Antisense strand to SEQ ID NO: 1095544
caucucaaacaagaguccu

SEQ ID NO: 1095546 - RNA, 19 nt, Artificial Sequence
  Description of Artificial Sequence: Synthetic oligonucleotide
  Sense strand starting at position 749 of SEQ ID NO: 915646
ucuuguuugagauguugug

SEQ ID NO: 1095547 - RNA, 19 nt, Artificial Sequence
  Description of Artificial Sequence: Synthetic oligonucleotide
  Antisense strand to SEQ ID NO: 1095546
cacaacaucucaaacaaga

SEQ ID NO: 1095548 - RNA, 19 nt, Artificial Sequence
  Description of Artificial Sequence: Synthetic oligonucleotide
  Sense strand starting at position 977 of SEQ ID NO: 915646
gggccucauccuuaaucca

SEQ ID NO: 1095549 - RNA, 19 nt, Artificial Sequence
  Description of Artificial Sequence: Synthetic oligonucleotide
  Antisense strand to SEQ ID NO: 1095548
uggauuaaggaugaggccc

SEQ ID NO: 1095550 - RNA, 19 nt, Artificial Sequence
  Description of Artificial Sequence: Synthetic oligonucleotide
  Sense strand starting at position 2077 of SEQ ID NO: 915646
ggagccuccagugagaagu

SEQ ID NO: 1095551 - RNA, 19 nt, Artificial Sequence
  Description of Artificial Sequence: Synthetic oligonucleotide
  Antisense strand to SEQ ID NO: 1095550
acuucucacuggaggcucc

SEQ ID NO: 1095552 - RNA, 19 nt, Artificial Sequence
  Description of Artificial Sequence: Synthetic oligonucleotide
  Sense strand starting at position 2104 of SEQ ID NO: 915646
auuccagucuuucugaaag

SEQ ID NO: 1095553 - RNA, 19 nt, Artificial Sequence
  Description of Artificial Sequence: Synthetic oligonucleotide
  Antisense strand to SEQ ID NO: 1095552
cuuucagaaagacuggaau

SEQ ID NO: 1095554 - RNA, 19 nt, Artificial Sequence
  Description of Artificial Sequence: Synthetic oligonucleotide
  Sense strand starting at position 2343 of SEQ ID NO: 915646
ucuggcuuuccugaguaca

SEQ ID NO: 1095555 - RNA, 19 nt, Artificial Sequence
  Description of Artificial Sequence: Synthetic oligonucleotide
  Antisense strand to SEQ ID NO: 1095554
uguacucaggaaagccaga

SEQ ID NO: 1095556 - RNA, 19 nt, Artificial Sequence
  Description of Artificial Sequence: Synthetic oligonucleotide
  Sense strand starting at position 2345 of SEQ ID NO: 915646
uggcuuuccugaguacagu

SEQ ID NO: 1095557 - RNA, 19 nt, Artificial Sequence
  Description of Artificial Sequence: Synthetic oligonucleotide
  Antisense strand to SEQ ID NO: 1095556
acuguacucaggaaagcca

SEQ ID NO: 1095558 - RNA, 19 nt, Artificial Sequence
  Description of Artificial Sequence: Synthetic oligonucleotide
  Sense strand starting at position 2522 of SEQ ID NO: 915646
ggagaacugaccugggcua

SEQ ID NO: 1095559 - RNA, 19 nt, Artificial Sequence
  Description of Artificial Sequence: Synthetic oligonucleotide
  Antisense strand to SEQ ID NO: 1095558
uagcccaggucaguucucc

SEQ ID NO: 1095560 - RNA, 19 nt, Artificial Sequence
  Description of Artificial Sequence: Synthetic oligonucleotide
  Sense strand starting at position 2606 of SEQ ID NO: 915646
gaggaacucugggaaagag

SEQ ID NO: 1095561 - RNA, 19 nt, Artificial Sequence
  Description of Artificial Sequence: Synthetic oligonucleotide
  Antisense strand to SEQ ID NO: 1095560
cucuuucccagaguuccuc

SEQ ID NO: 1095562 - RNA, 19 nt, Artificial Sequence
  Description of Artificial Sequence: Synthetic oligonucleotide
  Sense strand starting at position 2812 of SEQ ID NO: 915646
cugccagccucuuuaugaa

SEQ ID NO: 1095563 - RNA, 19 nt, Artificial Sequence
  Description of Artificial Sequence: Synthetic oligonucleotide
  Antisense strand to SEQ ID NO: 1095562
uucauaaagaggcuggcag

SEQ ID NO: 1095564 - RNA, 19 nt, Artificial Sequence
  Description of Artificial Sequence: Synthetic oligonucleotide
  Sense strand starting at position 2976 of SEQ ID NO: 915646
ggaggagauucgcuugguu

SEQ ID NO: 1095565 - RNA, 19 nt, Artificial Sequence
  Description of Artificial Sequence: Synthetic oligonucleotide
  Antisense strand to SEQ ID NO: 1095564
aaccaagcgaaucuccucc

SEQ ID NO: 1095566 - RNA, 19 nt, Artificial Sequence
  Description of Artificial Sequence: Synthetic oligonucleotide
  Sense strand starting at position 2978 of SEQ ID NO: 915646
aggagauucgcuugguuuc

SEQ ID NO: 1095567 - RNA, 19 nt, Artificial Sequence
  Description of Artificial Sequence: Synthetic oligonucleotide
  Antisense strand to SEQ ID NO: 1095566
gaaaccaagcgaaucuccu

SEQ ID NO: 1095568 - RNA, 19 nt, Artificial Sequence
  Description of Artificial Sequence: Synthetic oligonucleotide
  Sense strand starting at position 3001 of SEQ ID NO: 915646
cauuuagggugauggaaca

SEQ ID NO: 1095569 - RNA, 19 nt, Artificial Sequence
  Description of Artificial Sequence: Synthetic oligonucleotide
  Antisense strand to SEQ ID NO: 1095568
uguuccaucacccuaaaug

SEQ ID NO: 1095570 - RNA, 19 nt, Artificial Sequence
  Description of Artificial Sequence: Synthetic oligonucleotide
  Sense strand starting at position 3027 of SEQ ID NO: 915646
uggaaugagccuugcagau

SEQ ID NO: 1095571 - RNA, 19 nt, Artificial Sequence
  Description of Artificial Sequence: Synthetic oligonucleotide
  Antisense strand to SEQ ID NO: 1095570
aucugcaaggcucauucca

SEQ ID NO: 1095572 - RNA, 19 nt, Artificial Sequence
  Description of Artificial Sequence: Synthetic oligonucleotide
  Sense strand starting at position 3040 of SEQ ID NO: 915646
gcagaugguuaaguccaaa

SEQ ID NO: 1095573 - RNA, 19 nt, Artificial Sequence
  Description of Artificial Sequence: Synthetic oligonucleotide
  Antisense strand to SEQ ID NO: 1095572
uuuggacuuaaccaucugc

SEQ ID NO: 1095574 - RNA, 19 nt, Artificial Sequence
  Description of Artificial Sequence: Synthetic oligonucleotide
  Sense strand starting at position 3073 of SEQ ID NO: 915646
ugguaaacugcagagguuu

SEQ ID NO: 1095575 - RNA, 19 nt, Artificial Sequence
  Description of Artificial Sequence: Synthetic oligonucleotide
  Antisense strand to SEQ ID NO: 1095574
aaaccucugcaguuuacca

SEQ ID NO: 1095576 - RNA, 19 nt, Artificial Sequence
  Description of Artificial Sequence: Synthetic oligonucleotide
  Sense strand starting at position 3134 of SEQ ID NO: 915646
ggaccuccuuaaucuagua

SEQ ID NO: 1095577 - RNA, 19 nt, Artificial Sequence
  Description of Artificial Sequence: Synthetic oligonucleotide
  Antisense strand to SEQ ID NO: 1095576
uacuagauuaaggaggucc

SEQ ID NO: 1095578 - RNA, 19 nt, Artificial Sequence
  Description of Artificial Sequence: Synthetic oligonucleotide
  Sense strand starting at position 3253 of SEQ ID NO: 915646
uggcuucuuguuuguagga

SEQ ID NO: 1095579 - RNA, 19 nt, Artificial Sequence
  Description of Artificial Sequence: Synthetic oligonucleotide
  Antisense strand to SEQ ID NO: 1095578
uccuacaaacaagaagcca

SEQ ID NO: 1095580 - RNA, 19 nt, Artificial Sequence
  Description of Artificial Sequence: Synthetic oligonucleotide
  Sense strand starting at position 3254 of SEQ ID NO: 915646
ggcuucuuguuuguaggau

SEQ ID NO: 1095581 - RNA, 19 nt, Artificial Sequence
  Description of Artificial Sequence: Synthetic oligonucleotide
  Antisense strand to SEQ ID NO: 1095580
auccuacaaacaagaagcc

SEQ ID NO: 1095582 - RNA, 19 nt, Artificial Sequence
  Description of Artificial Sequence: Synthetic oligonucleotide
  Sense strand starting at position 3445 of SEQ ID NO: 915646
uucugaguccagggaucuu

SEQ ID NO: 1095583 - RNA, 19 nt, Artificial Sequence
  Description of Artificial Sequence: Synthetic oligonucleotide
  Antisense strand to SEQ ID NO: 1095582
aagaucccuggacucagaa

SEQ ID NO: 1095584 - RNA, 19 nt, Artificial Sequence
  Description of Artificial Sequence: Synthetic oligonucleotide
  Sense strand starting at position 3454 of SEQ ID NO: 915646
cagggaucuuaacugcaga

SEQ ID NO: 1095585 - RNA, 19 nt, Artificial Sequence
  Description of Artificial Sequence: Synthetic oligonucleotide
  Antisense strand to SEQ ID NO: 1095584
ucugcaguuaagaucccug

SEQ ID NO: 1095586 - RNA, 19 nt, Artificial Sequence
  Description of Artificial Sequence: Synthetic oligonucleotide
  Sense strand starting at position 3537 of SEQ ID NO: 915646
ugaguguugcuggguggaa

SEQ ID NO: 1095587 - RNA, 19 nt, Artificial Sequence
  Description of Artificial Sequence: Synthetic oligonucleotide
  Antisense strand to SEQ ID NO: 1095586
uuccacccagcaacacuca

SEQ ID NO: 1095588 - RNA, 19 nt, Artificial Sequence
  Description of Artificial Sequence: Synthetic oligonucleotide
  Sense strand starting at position 3538 of SEQ ID NO: 915646
gaguguugcuggguggaag

SEQ ID NO: 1095589 - RNA, 19 nt, Artificial Sequence
  Description of Artificial Sequence: Synthetic oligonucleotide
  Antisense strand to SEQ ID NO: 1095588
cuuccacccagcaacacuc

SEQ ID NO: 1095590 - RNA, 19 nt, Artificial Sequence
  Description of Artificial Sequence: Synthetic oligonucleotide
  Sense strand starting at position 3640 of SEQ ID NO: 915646
gggaguauagacuguagaa

SEQ ID NO: 1095591 - RNA, 19 nt, Artificial Sequence
  Description of Artificial Sequence: Synthetic oligonucleotide
  Antisense strand to SEQ ID NO: 1095590
uucuacagucuauacuccc

SEQ ID NO: 1095592 - RNA, 19 nt, Artificial Sequence
  Description of Artificial Sequence: Synthetic oligonucleotide
  Sense strand starting at position 3702 of SEQ ID NO: 915646
uggaauuaauggcucugau

SEQ ID NO: 1095593 - RNA, 19 nt, Artificial Sequence
  Description of Artificial Sequence: Synthetic oligonucleotide
  Antisense strand to SEQ ID NO: 1095592
aucagagccauuaauucca

SEQ ID NO: 1095594 - RNA, 19 nt, Artificial Sequence
  Description of Artificial Sequence: Synthetic oligonucleotide
  Sense strand starting at position 3717 of SEQ ID NO: 915646
ugauuagacaucugagguc

SEQ ID NO: 1095595 - RNA, 19 nt, Artificial Sequence
  Description of Artificial Sequence: Synthetic oligonucleotide
  Antisense strand to SEQ ID NO: 1095594
gaccucagaugucuaauca

SEQ ID NO: 1095596 - RNA, 19 nt, Artificial Sequence
  Description of Artificial Sequence: Synthetic oligonucleotide
  Sense strand starting at position 3793 of SEQ ID NO: 915646
auaggaucggagugcugaa

SEQ ID NO: 1095597 - RNA, 19 nt, Artificial Sequence
  Description of Artificial Sequence: Synthetic oligonucleotide
  Antisense strand to SEQ ID NO: 1095596
uucagcacuccgauccuau

SEQ ID NO: 1095598 - RNA, 19 nt, Artificial Sequence
  Description of Artificial Sequence: Synthetic oligonucleotide
  Sense strand starting at position 3873 of SEQ ID NO: 915646
cccuguuggucucuuagau

SEQ ID NO: 1095599 - RNA, 19 nt, Artificial Sequence
  Description of Artificial Sequence: Synthetic oligonucleotide
  Antisense strand to SEQ ID NO: 1095598
aucuaagagaccaacaggg

SEQ ID NO: 1095600 - RNA, 19 nt, Artificial Sequence
  Description of Artificial Sequence: Synthetic oligonucleotide
  Sense strand starting at position 3964 of SEQ ID NO: 915646
aguccuuuagcaugaccua

SEQ ID NO: 1095601 - RNA, 19 nt, Artificial Sequence
  Description of Artificial Sequence: Synthetic oligonucleotide
  Antisense strand to SEQ ID NO: 1095600
uaggucaugcuaaaggacu

SEQ ID NO: 1095602 - RNA, 19 nt, Artificial Sequence
  Description of Artificial Sequence: Synthetic oligonucleotide
  Sense strand starting at position 59 of SEQ ID NO: 915647
guaggaacuuaaucuuacu

SEQ ID NO: 1095603 - RNA, 19 nt, Artificial Sequence
  Description of Artificial Sequence: Synthetic oligonucleotide
  Antisense strand to SEQ ID NO: 1095602
aguaagauuaaguuccuac

SEQ ID NO: 1095604 - RNA, 19 nt, Artificial Sequence
  Description of Artificial Sequence: Synthetic oligonucleotide
  Sense strand starting at position 130 of SEQ ID NO: 915647
ggguaucuucuggauuauc

SEQ ID NO: 1095605 - RNA, 19 nt, Artificial Sequence
  Description of Artificial Sequence: Synthetic oligonucleotide
  Antisense strand to SEQ ID NO: 1095604
gauaauccagaagauaccc

SEQ ID NO: 1095606 - RNA, 19 nt, Artificial Sequence
  Description of Artificial Sequence: Synthetic oligonucleotide
  Sense strand starting at position 178 of SEQ ID NO: 915647
guuguucaggauuaaaggu

SEQ ID NO: 1095607 - RNA, 19 nt, Artificial Sequence
  Description of Artificial Sequence: Synthetic oligonucleotide
  Antisense strand to SEQ ID NO: 1095606
accuuuaauccugaacaac

SEQ ID NO: 1095608 - RNA, 19 nt, Artificial Sequence
  Description of Artificial Sequence: Synthetic oligonucleotide
  Sense strand starting at position 188 of SEQ ID NO: 915647
auuaaagguccggacagua

SEQ ID NO: 1095609 - RNA, 19 nt, Artificial Sequence
  Description of Artificial Sequence: Synthetic oligonucleotide
  Antisense strand to SEQ ID NO: 1095608
uacuguccggaccuuuaau

SEQ ID NO: 1095610 - RNA, 19 nt, Artificial Sequence
  Description of Artificial Sequence: Synthetic oligonucleotide
  Sense strand starting at position 200 of SEQ ID NO: 915647
gacaguagucaauacaugu

SEQ ID NO: 1095611 - RNA, 19 nt, Artificial Sequence
  Description of Artificial Sequence: Synthetic oligonucleotide
  Antisense strand to SEQ ID NO: 1095610
acauguauugacuacuguc

SEQ ID NO: 1095612 - RNA, 19 nt, Artificial Sequence
  Description of Artificial Sequence: Synthetic oligonucleotide
  Sense strand starting at position 244 of SEQ ID NO: 915647
ugccuuugcauaggaaaga

SEQ ID NO: 1095613 - RNA, 19 nt, Artificial Sequence
  Description of Artificial Sequence: Synthetic oligonucleotide
  Antisense strand to SEQ ID NO: 1095612
ucuuuccuaugcaaaggca

SEQ ID NO: 1095614 - RNA, 19 nt, Artificial Sequence
  Description of Artificial Sequence: Synthetic oligonucleotide
  Sense strand starting at position 519 of SEQ ID NO: 915647
ucagaaugugccuggaaca

SEQ ID NO: 1095615 - RNA, 19 nt, Artificial Sequence
  Description of Artificial Sequence: Synthetic oligonucleotide
  Antisense strand to SEQ ID NO: 1095614
uguuccaggcacauucuga

SEQ ID NO: 1095616 - RNA, 19 nt, Artificial Sequence
  Description of Artificial Sequence: Synthetic oligonucleotide
  Sense strand starting at position 608 of SEQ ID NO: 915647
cccuaacucgguuaaucua

SEQ ID NO: 1095617 - RNA, 19 nt, Artificial Sequence
  Description of Artificial Sequence: Synthetic oligonucleotide
  Antisense strand to SEQ ID NO: 1095616
uagauuaaccgaguuaggg

SEQ ID NO: 1095618 - RNA, 19 nt, Artificial Sequence
  Description of Artificial Sequence: Synthetic oligonucleotide
  Sense strand starting at position 624 of SEQ ID NO: 915647
cuacauaaccugugagaug

SEQ ID NO: 1095619 - RNA, 19 nt, Artificial Sequence
  Description of Artificial Sequence: Synthetic oligonucleotide
  Antisense strand to SEQ ID NO: 1095618
caucucacagguuauguag

SEQ ID NO: 1095620 - RNA, 19 nt, Artificial Sequence
  Description of Artificial Sequence: Synthetic oligonucleotide
  Sense strand starting at position 659 of SEQ ID NO: 915647
ggaagcaugcuccagauca

SEQ ID NO: 1095621 - RNA, 19 nt, Artificial Sequence
  Description of Artificial Sequence: Synthetic oligonucleotide
  Antisense strand to SEQ ID NO: 1095620
ugaucuggagcaugcuucc

SEQ ID NO: 1095622 - RNA, 19 nt, Artificial Sequence
  Description of Artificial Sequence: Synthetic oligonucleotide
  Sense strand starting at position 682 of SEQ ID NO: 915647
uccaguaaugguggaauca

SEQ ID NO: 1095623 - RNA, 19 nt, Artificial Sequence
  Description of Artificial Sequence: Synthetic oligonucleotide
  Antisense strand to SEQ ID NO: 1095622
ugauuccaccauuacugga

SEQ ID NO: 1095624 - RNA, 19 nt, Artificial Sequence
  Description of Artificial Sequence: Synthetic oligonucleotide
  Sense strand starting at position 733 of SEQ ID NO: 915647
aucugaagcuacuuaauga

SEQ ID NO: 1095625 - RNA, 19 nt, Artificial Sequence
  Description of Artificial Sequence: Synthetic oligonucleotide
  Antisense strand to SEQ ID NO: 1095624
ucauuaaguagcuucagau

SEQ ID NO: 1095626 - RNA, 19 nt, Artificial Sequence
  Description of Artificial Sequence: Synthetic oligonucleotide
  Sense strand starting at position 749 of SEQ ID NO: 915647
ugacuauacugccucugaa

SEQ ID NO: 1095627 - RNA, 19 nt, Artificial Sequence
  Description of Artificial Sequence: Synthetic oligonucleotide
  Antisense strand to SEQ ID NO: 1095626
uucagaggcaguauaguca

SEQ ID NO: 1095628 - RNA, 19 nt, Artificial Sequence
  Description of Artificial Sequence: Synthetic oligonucleotide
  Sense strand starting at position 771 of SEQ ID NO: 915647
agucaaagucccuacauca

SEQ ID NO: 1095629 - RNA, 19 nt, Artificial Sequence
  Description of Artificial Sequence: Synthetic oligonucleotide
  Antisense strand to SEQ ID NO: 1095628
ugauguagggacuuugacu

SEQ ID NO: 1095630 - RNA, 19 nt, Artificial Sequence
  Description of Artificial Sequence: Synthetic oligonucleotide
  Sense strand starting at position 915 of SEQ ID NO: 915647
cugcaaugugcuguaguau

SEQ ID NO: 1095631 - RNA, 19 nt, Artificial Sequence
  Description of Artificial Sequence: Synthetic oligonucleotide
  Antisense strand to SEQ ID NO: 1095630
auacuacagcacauugcag

SEQ ID NO: 1095632 - RNA, 19 nt, Artificial Sequence
  Description of Artificial Sequence: Synthetic oligonucleotide
  Sense strand starting at position 1204 of SEQ ID NO: 915647
gcaagcaggcgcuuuauau

SEQ ID NO: 1095633 - RNA, 19 nt, Artificial Sequence
  Description of Artificial Sequence: Synthetic oligonucleotide
  Antisense strand to SEQ ID NO: 1095632
auauaaagcgccugcuugc

SEQ ID NO: 1095634 - RNA, 19 nt, Artificial Sequence
  Description of Artificial Sequence: Synthetic oligonucleotide
  Sense strand starting at position 1250 of SEQ ID NO: 915647
agagucuuugugcacaaca

SEQ ID NO: 1095635 - RNA, 19 nt, Artificial Sequence
  Description of Artificial Sequence: Synthetic oligonucleotide
  Antisense strand to SEQ ID NO: 1095634
uguugugcacaaagacucu

SEQ ID NO: 1095636 - RNA, 19 nt, Artificial Sequence
  Description of Artificial Sequence: Synthetic oligonucleotide
  Sense strand starting at position 1410 of SEQ ID NO: 915647
uaaacaggcucuucgagaa

SEQ ID NO: 1095637 - RNA, 19 nt, Artificial Sequence
  Description of Artificial Sequence: Synthetic oligonucleotide
  Antisense strand to SEQ ID NO: 1095636
uucucgaagagccuguuua

SEQ ID NO: 1095638 - RNA, 19 nt, Artificial Sequence
  Description of Artificial Sequence: Synthetic oligonucleotide
  Sense strand starting at position 1633 of SEQ ID NO: 915647
cuagaacgucuccaacuuu

SEQ ID NO: 1095639 - RNA, 19 nt, Artificial Sequence
  Description of Artificial Sequence: Synthetic oligonucleotide
  Antisense strand to SEQ ID NO: 1095638
aaaguuggagacguucuag

SEQ ID NO: 1095640 - RNA, 19 nt, Artificial Sequence
  Description of Artificial Sequence: Synthetic oligonucleotide
  Sense strand starting at position 1834 of SEQ ID NO: 915647
ggugaauauaaguaagccu

SEQ ID NO: 1095641 - RNA, 19 nt, Artificial Sequence
  Description of Artificial Sequence: Synthetic oligonucleotide
  Antisense strand to SEQ ID NO: 1095640
aggcuuacuuauauucacc

SEQ ID NO: 1095642 - RNA, 19 nt, Artificial Sequence
  Description of Artificial Sequence: Synthetic oligonucleotide
  Sense strand starting at position 1909 of SEQ ID NO: 915647
ugaaguaauuugcuggcua

SEQ ID NO: 1095643 - RNA, 19 nt, Artificial Sequence
  Description of Artificial Sequence: Synthetic oligonucleotide
  Antisense strand to SEQ ID NO: 1095642
uagccagcaaauuacuuca

SEQ ID NO: 1095644 - RNA, 19 nt, Artificial Sequence
  Description of Artificial Sequence: Synthetic oligonucleotide
  Sense strand starting at position 1911 of SEQ ID NO: 915647
aaguaauuugcuggcuaca

SEQ ID NO: 1095645 - RNA, 19 nt, Artificial Sequence
  Description of Artificial Sequence: Synthetic oligonucleotide
  Antisense strand to SEQ ID NO: 1095644
uguagccagcaaauuacuu

SEQ ID NO: 1095646 - RNA, 19 nt, Artificial Sequence
  Description of Artificial Sequence: Synthetic oligonucleotide
  Sense strand starting at position 1913 of SEQ ID NO: 915647
guaauuugcuggcuacaga

SEQ ID NO: 1095647 - RNA, 19 nt, Artificial Sequence
  Description of Artificial Sequence: Synthetic oligonucleotide
  Antisense strand to SEQ ID NO: 1095646
ucuguagccagcaaauuac

SEQ ID NO: 1095648 - RNA, 19 nt, Artificial Sequence
  Description of Artificial Sequence: Synthetic oligonucleotide
  Sense strand starting at position 2041 of SEQ ID NO: 915647
cgaggacuucugggaauug

SEQ ID NO: 1095649 - RNA, 19 nt, Artificial Sequence
  Description of Artificial Sequence: Synthetic oligonucleotide
  Antisense strand to SEQ ID NO: 1095648
caauucccagaaguccucg

SEQ ID NO: 1095650 - RNA, 19 nt, Artificial Sequence
  Description of Artificial Sequence: Synthetic oligonucleotide
  Sense strand starting at position 2739 of SEQ ID NO: 915647
ugcuuagagaagugaagaa

SEQ ID NO: 1095651 - RNA, 19 nt, Artificial Sequence
  Description of Artificial Sequence: Synthetic oligonucleotide
  Antisense strand to SEQ ID NO: 1095650
uucuucacuucucuaagca

SEQ ID NO: 1095652 - RNA, 19 nt, Artificial Sequence
  Description of Artificial Sequence: Synthetic oligonucleotide
  Sense strand starting at position 2796 of SEQ ID NO: 915647
aucauaacaguaggucaua

SEQ ID NO: 1095653 - RNA, 19 nt, Artificial Sequence
  Description of Artificial Sequence: Synthetic oligonucleotide
  Antisense strand to SEQ ID NO: 1095652
uaugaccuacuguuaugau

SEQ ID NO: 1095654 - RNA, 19 nt, Artificial Sequence
  Description of Artificial Sequence: Synthetic oligonucleotide
  Sense strand starting at position 2973 of SEQ ID NO: 915647
uauuauugccagugggaaa

SEQ ID NO: 1095655 - RNA, 19 nt, Artificial Sequence
  Description of Artificial Sequence: Synthetic oligonucleotide
  Antisense strand to SEQ ID NO: 1095654
uuucccacuggcaauaaua

SEQ ID NO: 1095656 - RNA, 19 nt, Artificial Sequence
  Description of Artificial Sequence: Synthetic oligonucleotide
  Sense strand starting at position 2974 of SEQ ID NO: 915647
auuauugccagugggaaac

SEQ ID NO: 1095657 - RNA, 19 nt, Artificial Sequence
  Description of Artificial Sequence: Synthetic oligonucleotide
  Antisense strand to SEQ ID NO: 1095656
guuucccacuggcaauaau

SEQ ID NO: 1095658 - RNA, 19 nt, Artificial Sequence
  Description of Artificial Sequence: Synthetic oligonucleotide
  Sense strand starting at position 3004 of SEQ ID NO: 915647
ugacaaacuugagugucuu

SEQ ID NO: 1095659 - RNA, 19 nt, Artificial Sequence
  Description of Artificial Sequence: Synthetic oligonucleotide
  Antisense strand to SEQ ID NO: 1095658
aagacacucaaguuuguca

SEQ ID NO: 1095660 - RNA, 19 nt, Artificial Sequence
  Description of Artificial Sequence: Synthetic oligonucleotide
  Sense strand starting at position 3022 of SEQ ID NO: 915647
uuaggcucugaacaguaau

SEQ ID NO: 1095661 - RNA, 19 nt, Artificial Sequence
  Description of Artificial Sequence: Synthetic oligonucleotide
  Antisense strand to SEQ ID NO: 1095660
auuacuguucagagccuaa

SEQ ID NO: 1095662 - RNA, 19 nt, Artificial Sequence
  Description of Artificial Sequence: Synthetic oligonucleotide
  Sense strand starting at position 3040 of SEQ ID NO: 915647
uuugaauguagcgaggagu

SEQ ID NO: 1095663 - RNA, 19 nt, Artificial Sequence
  Description of Artificial Sequence: Synthetic oligonucleotide
  Antisense strand to SEQ ID NO: 1095662
acuccucgcuacauucaaa

SEQ ID NO: 1095664 - RNA, 19 nt, Artificial Sequence
  Description of Artificial Sequence: Synthetic oligonucleotide
  Sense strand starting at position 3083 of SEQ ID NO: 915647
cuucucugccaagaauguu

SEQ ID NO: 1095665 - RNA, 19 nt, Artificial Sequence
  Description of Artificial Sequence: Synthetic oligonucleotide
  Antisense strand to SEQ ID NO: 1095664
aacauucuuggcagagaag

SEQ ID NO: 1095666 - RNA, 19 nt, Artificial Sequence
  Description of Artificial Sequence: Synthetic oligonucleotide
  Sense strand starting at position 3089 of SEQ ID NO: 915647
ugccaagaauguuuauaaa

SEQ ID NO: 1095667 - RNA, 19 nt, Artificial Sequence
  Description of Artificial Sequence: Synthetic oligonucleotide
  Antisense strand to SEQ ID NO: 1095666
uuuauaaacauucuuggca

SEQ ID NO: 1095668 - RNA, 19 nt, Artificial Sequence
  Description of Artificial Sequence: Synthetic oligonucleotide
  Sense strand starting at position 3293 of SEQ ID NO: 915647
cccagauuacccugguuga

SEQ ID NO: 1095669 - RNA, 19 nt, Artificial Sequence
  Description of Artificial Sequence: Synthetic oligonucleotide
  Antisense strand to SEQ ID NO: 1095668
ucaaccaggguaaucuggg

SEQ ID NO: 1095670 - RNA, 19 nt, Artificial Sequence
  Description of Artificial Sequence: Synthetic oligonucleotide
  Sense strand starting at position 3294 of SEQ ID NO: 915647
ccagauuacccugguugau

SEQ ID NO: 1095671 - RNA, 19 nt, Artificial Sequence
  Description of Artificial Sequence: Synthetic oligonucleotide
  Antisense strand to SEQ ID NO: 1095670
aucaaccaggguaaucugg

SEQ ID NO: 1095672 - RNA, 19 nt, Artificial Sequence
  Description of Artificial Sequence: Synthetic oligonucleotide
  Sense strand starting at position 3296 of SEQ ID NO: 915647
agauuacccugguugauac

SEQ ID NO: 1095673 - RNA, 19 nt, Artificial Sequence
  Description of Artificial Sequence: Synthetic oligonucleotide
  Antisense strand to SEQ ID NO: 1095672
guaucaaccaggguaaucu

SEQ ID NO: 1095674 - RNA, 19 nt, Artificial Sequence
  Description of Artificial Sequence: Synthetic oligonucleotide
  Sense strand starting at position 3517 of SEQ ID NO: 915647
ggcaaaguucaugaguggu

SEQ ID NO: 1095675 - RNA, 19 nt, Artificial Sequence
  Description of Artificial Sequence: Synthetic oligonucleotide
  Antisense strand to SEQ ID NO: 1095674
accacucaugaacuuugcc

SEQ ID NO: 1095676 - RNA, 19 nt, Artificial Sequence
  Description of Artificial Sequence: Synthetic oligonucleotide
  Sense strand starting at position 3572 of SEQ ID NO: 915647
ggaacuuguguuuacuuau

SEQ ID NO: 1095677 - RNA, 19 nt, Artificial Sequence
  Description of Artificial Sequence: Synthetic oligonucleotide
  Antisense strand to SEQ ID NO: 1095676
auaaguaaacacaaguucc

SEQ ID NO: 1095678 - RNA, 19 nt, Artificial Sequence
  Description of Artificial Sequence: Synthetic oligonucleotide
  Sense strand starting at position 3729 of SEQ ID NO: 915647
ucuugcuaggauugaaaua

SEQ ID NO: 1095679 - RNA, 19 nt, Artificial Sequence
  Description of Artificial Sequence: Synthetic oligonucleotide
  Antisense strand to SEQ ID NO: 1095678
uauuucaauccuagcaaga

SEQ ID NO: 1095680 - RNA, 19 nt, Artificial Sequence
  Description of Artificial Sequence: Synthetic oligonucleotide
  Sense strand starting at position 3740 of SEQ ID NO: 915647
uugaaauagucauccuuug

SEQ ID NO: 1095681 - RNA, 19 nt, Artificial Sequence
  Description of Artificial Sequence: Synthetic oligonucleotide
  Antisense strand to SEQ ID NO: 1095680
caaaggaugacuauuucaa

SEQ ID NO: 1095682 - RNA, 19 nt, Artificial Sequence
  Description of Artificial Sequence: Synthetic oligonucleotide
  Sense strand starting at position 1032 of SEQ ID NO: 915648
gaaagauugagcggguaga

SEQ ID NO: 1095683 - RNA, 19 nt, Artificial Sequence
  Description of Artificial Sequence: Synthetic oligonucleotide
  Antisense strand to SEQ ID NO: 1095682
ucuacccgcucaaucuuuc

SEQ ID NO: 1095684 - RNA, 19 nt, Artificial Sequence
  Description of Artificial Sequence: Synthetic oligonucleotide
  Sense strand starting at position 1035 of SEQ ID NO: 915648
agauugagcggguagagua

SEQ ID NO: 1095685 - RNA, 19 nt, Artificial Sequence
  Description of Artificial Sequence: Synthetic oligonucleotide
  Antisense strand to SEQ ID NO: 1095684
uacucuacccgcucaaucu

SEQ ID NO: 1095686 - RNA, 19 nt, Artificial Sequence
  Description of Artificial Sequence: Synthetic oligonucleotide
  Sense strand starting at position 1048 of SEQ ID NO: 915648
agaguaaucugaggccgga

SEQ ID NO: 1095687 - RNA, 19 nt, Artificial Sequence
  Description of Artificial Sequence: Synthetic oligonucleotide
  Antisense strand to SEQ ID NO: 1095686
uccggccucagauuacucu

SEQ ID NO: 1095688 - RNA, 19 nt, Artificial Sequence
  Description of Artificial Sequence: Synthetic oligonucleotide
  Sense strand starting at position 1264 of SEQ ID NO: 915648
uggccucacucgggaagaa

SEQ ID NO: 1095689 - RNA, 19 nt, Artificial Sequence
  Description of Artificial Sequence: Synthetic oligonucleotide
  Antisense strand to SEQ ID NO: 1095688
uucuucccgagugaggcca

SEQ ID NO: 1095690 - RNA, 19 nt, Artificial Sequence
  Description of Artificial Sequence: Synthetic oligonucleotide
  Sense strand starting at position 1462 of SEQ ID NO: 915648
gguggaugcacacagaguu

SEQ ID NO: 1095691 - RNA, 19 nt, Artificial Sequence
  Description of Artificial Sequence: Synthetic oligonucleotide
  Antisense strand to SEQ ID NO: 1095690
aacucugugugcauccacc

SEQ ID NO: 1095692 - RNA, 19 nt, Artificial Sequence
  Description of Artificial Sequence: Synthetic oligonucleotide
  Sense strand starting at position 2152 of SEQ ID NO: 915648
ccggcuaaguuucauugga

SEQ ID NO: 1095693 - RNA, 19 nt, Artificial Sequence
  Description of Artificial Sequence: Synthetic oligonucleotide
  Antisense strand to SEQ ID NO: 1095692
uccaaugaaacuuagccgg

SEQ ID NO: 1095694 - RNA, 19 nt, Artificial Sequence
  Description of Artificial Sequence: Synthetic oligonucleotide
  Sense strand starting at position 2455 of SEQ ID NO: 915648
ggaugcaagcuuuaagcca

SEQ ID NO: 1095695 - RNA, 19 nt, Artificial Sequence
  Description of Artificial Sequence: Synthetic oligonucleotide
  Antisense strand to SEQ ID NO: 1095694
uggcuuaaagcuugcaucc

SEQ ID NO: 1095696 - RNA, 19 nt, Artificial Sequence
  Description of Artificial Sequence: Synthetic oligonucleotide
  Sense strand starting at position 2532 of SEQ ID NO: 915648
gcaugcuugggccaguaau

SEQ ID NO: 1095697 - RNA, 19 nt, Artificial Sequence
  Description of Artificial Sequence: Synthetic oligonucleotide
  Antisense strand to SEQ ID NO: 1095696
auuacuggcccaagcaugc

SEQ ID NO: 1095698 - RNA, 19 nt, Artificial Sequence
  Description of Artificial Sequence: Synthetic oligonucleotide
  Sense strand starting at position 2576 of SEQ ID NO: 915648
uuugguacuuuacaagauu

SEQ ID NO: 1095699 - RNA, 19 nt, Artificial Sequence
  Description of Artificial Sequence: Synthetic oligonucleotide
  Antisense strand to SEQ ID NO: 1095698
aaucuuguaaaguaccaaa

SEQ ID NO: 1095700 - RNA, 19 nt, Artificial Sequence
  Description of Artificial Sequence: Synthetic oligonucleotide
  Sense strand starting at position 2651 of SEQ ID NO: 915648
gaauuaaacgcagacgucu

SEQ ID NO: 1095701 - RNA, 19 nt, Artificial Sequence
  Description of Artificial Sequence: Synthetic oligonucleotide
  Antisense strand to SEQ ID NO: 1095700
agacgucugcguuuaauuc

SEQ ID NO: 1095702 - RNA, 19 nt, Artificial Sequence
  Description of Artificial Sequence: Synthetic oligonucleotide
  Sense strand starting at position 2851 of SEQ ID NO: 915648
cugcuacagcguucuuauu

SEQ ID NO: 1095703 - RNA, 19 nt, Artificial Sequence
  Description of Artificial Sequence: Synthetic oligonucleotide
  Antisense strand to SEQ ID NO: 1095702
aauaagaacgcuguagcag

SEQ ID NO: 1095704 - RNA, 19 nt, Artificial Sequence
  Description of Artificial Sequence: Synthetic oligonucleotide
  Sense strand starting at position 3051 of SEQ ID NO: 915648
cuaggcuucccauaggcaa

SEQ ID NO: 1095705 - RNA, 19 nt, Artificial Sequence
  Description of Artificial Sequence: Synthetic oligonucleotide
  Antisense strand to SEQ ID NO: 1095704
uugccuaugggaagccuag

SEQ ID NO: 1095706 - RNA, 19 nt, Artificial Sequence
  Description of Artificial Sequence: Synthetic oligonucleotide
  Sense strand starting at position 3113 of SEQ ID NO: 915648
gcccauaacugcuugauuc

SEQ ID NO: 1095707 - RNA, 19 nt, Artificial Sequence
  Description of Artificial Sequence: Synthetic oligonucleotide
  Antisense strand to SEQ ID NO: 1095706
gaaucaagcaguuaugggc

SEQ ID NO: 1095708 - RNA, 19 nt, Artificial Sequence
  Description of Artificial Sequence: Synthetic oligonucleotide
  Sense strand starting at position 3203 of SEQ ID NO: 915648
cacguaagcucuccacaug

SEQ ID NO: 1095709 - RNA, 19 nt, Artificial Sequence
  Description of Artificial Sequence: Synthetic oligonucleotide
  Antisense strand to SEQ ID NO: 1095708
cauguggagagcuuacgug

SEQ ID NO: 1095710 - RNA, 19 nt, Artificial Sequence
  Description of Artificial Sequence: Synthetic oligonucleotide
  Sense strand starting at position 3236 of SEQ ID NO: 915648
agggaaacugugugcacau

SEQ ID NO: 1095711 - RNA, 19 nt, Artificial Sequence
  Description of Artificial Sequence: Synthetic oligonucleotide
  Antisense strand to SEQ ID NO: 1095710
augugcacacaguuucccu

SEQ ID NO: 1095712 - RNA, 19 nt, Artificial Sequence
  Description of Artificial Sequence: Synthetic oligonucleotide
  Sense strand starting at position 3386 of SEQ ID NO: 915648
gucccauggugaugucauu

SEQ ID NO: 1095713 - RNA, 19 nt, Artificial Sequence
  Description of Artificial Sequence: Synthetic oligonucleotide
  Antisense strand to SEQ ID NO: 1095712
aaugacaucaccaugggac

SEQ ID NO: 1095714 - RNA, 19 nt, Artificial Sequence
  Description of Artificial Sequence: Synthetic oligonucleotide
  Sense strand starting at position 3392 of SEQ ID NO: 915648
uggugaugucauuaguuug

SEQ ID NO: 1095715 - RNA, 19 nt, Artificial Sequence
  Description of Artificial Sequence: Synthetic oligonucleotide
  Antisense strand to SEQ ID NO: 1095714
caaacuaaugacaucacca

SEQ ID NO: 1095716 - RNA, 19 nt, Artificial Sequence
  Description of Artificial Sequence: Synthetic oligonucleotide
  Sense strand starting at position 3395 of SEQ ID NO: 915648
ugaugucauuaguuugcuu

SEQ ID NO: 1095717 - RNA, 19 nt, Artificial Sequence
  Description of Artificial Sequence: Synthetic oligonucleotide
  Antisense strand to SEQ ID NO: 1095716
aagcaaacuaaugacauca

SEQ ID NO: 1095718 - RNA, 19 nt, Artificial Sequence
  Description of Artificial Sequence: Synthetic oligonucleotide
  Sense strand starting at position 3397 of SEQ ID NO: 915648
augucauuaguuugcuuau

SEQ ID NO: 1095719 - RNA, 19 nt, Artificial Sequence
  Description of Artificial Sequence: Synthetic oligonucleotide
  Antisense strand to SEQ ID NO: 1095718
auaagcaaacuaaugacau

SEQ ID NO: 1095720 - RNA, 19 nt, Artificial Sequence
  Description of Artificial Sequence: Synthetic oligonucleotide
  Sense strand starting at position 3398 of SEQ ID NO: 915648
ugucauuaguuugcuuauu

SEQ ID NO: 1095721 - RNA, 19 nt, Artificial Sequence
  Description of Artificial Sequence: Synthetic oligonucleotide
  Antisense strand to SEQ ID NO: 1095720
aauaagcaaacuaaugaca

SEQ ID NO: 1095722 - RNA, 19 nt, Artificial Sequence
  Description of Artificial Sequence: Synthetic oligonucleotide
  Sense strand starting at position 3399 of SEQ ID NO: 915648
gucauuaguuugcuuauua

SEQ ID NO: 1095723 - RNA, 19 nt, Artificial Sequence
  Description of Artificial Sequence: Synthetic oligonucleotide
  Antisense strand to SEQ ID NO: 1095722
uaauaagcaaacuaaugac

SEQ ID NO: 1095724 - RNA, 19 nt, Artificial Sequence
  Description of Artificial Sequence: Synthetic oligonucleotide
  Sense strand starting at position 3448 of SEQ ID NO: 915648
uuaaaugucugagauugca

SEQ ID NO: 1095725 - RNA, 19 nt, Artificial Sequence
  Description of Artificial Sequence: Synthetic oligonucleotide
  Antisense strand to SEQ ID NO: 1095724
ugcaaucucagacauuuaa

SEQ ID NO: 1095726 - RNA, 19 nt, Artificial Sequence
  Description of Artificial Sequence: Synthetic oligonucleotide
  Sense strand starting at position 3456 of SEQ ID NO: 915648
cugagauugcaaggucaac

SEQ ID NO: 1095727 - RNA, 19 nt, Artificial Sequence
  Description of Artificial Sequence: Synthetic oligonucleotide
  Antisense strand to SEQ ID NO: 1095726
guugaccuugcaaucucag

SEQ ID NO: 1095728 - RNA, 19 nt, Artificial Sequence
  Description of Artificial Sequence: Synthetic oligonucleotide
  Sense strand starting at position 3468 of SEQ ID NO: 915648
ggucaacuguuauaaaccu

SEQ ID NO: 1095729 - RNA, 19 nt, Artificial Sequence
  Description of Artificial Sequence: Synthetic oligonucleotide
  Antisense strand to SEQ ID NO: 1095728
agguuuauaacaguugacc

SEQ ID NO: 1095730 - RNA, 19 nt, Artificial Sequence
  Description of Artificial Sequence: Synthetic oligonucleotide
  Sense strand starting at position 3507 of SEQ ID NO: 915648
auccaagacuaggagaauu

SEQ ID NO: 1095731 - RNA, 19 nt, Artificial Sequence
  Description of Artificial Sequence: Synthetic oligonucleotide
  Antisense strand to SEQ ID NO: 1095730
aauucuccuagucuuggau

SEQ ID NO: 1095732 - RNA, 19 nt, Artificial Sequence
  Description of Artificial Sequence: Synthetic oligonucleotide
  Sense strand starting at position 3763 of SEQ ID NO: 915648
auggaaaucuuaggaugaa

SEQ ID NO: 1095733 - RNA, 19 nt, Artificial Sequence
  Description of Artificial Sequence: Synthetic oligonucleotide
  Antisense strand to SEQ ID NO: 1095732
uucauccuaagauuuccau

SEQ ID NO: 1095734 - RNA, 19 nt, Artificial Sequence
  Description of Artificial Sequence: Synthetic oligonucleotide
  Sense strand starting at position 3764 of SEQ ID NO: 915648
uggaaaucuuaggaugaaa

SEQ ID NO: 1095735 - RNA, 19 nt, Artificial Sequence
  Description of Artificial Sequence: Synthetic oligonucleotide
  Antisense strand to SEQ ID NO: 1095734
uuucauccuaagauuucca

SEQ ID NO: 1095736 - RNA, 19 nt, Artificial Sequence
  Description of Artificial Sequence: Synthetic oligonucleotide
  Sense strand starting at position 3783 of SEQ ID NO: 915648
uggccuucuuaauggagaa

SEQ ID NO: 1095737 - RNA, 19 nt, Artificial Sequence
  Description of Artificial Sequence: Synthetic oligonucleotide
  Antisense strand to SEQ ID NO: 1095736
uucuccauuaagaaggcca

SEQ ID NO: 1095738 - RNA, 19 nt, Artificial Sequence
  Description of Artificial Sequence: Synthetic oligonucleotide
  Sense strand starting at position 3822 of SEQ ID NO: 915648
agcagagggcucuguguaa

SEQ ID NO: 1095739 - RNA, 19 nt, Artificial Sequence
  Description of Artificial Sequence: Synthetic oligonucleotide
  Antisense strand to SEQ ID NO: 1095738
uuacacagagcccucugcu

SEQ ID NO: 1095740 - RNA, 19 nt, Artificial Sequence
  Description of Artificial Sequence: Synthetic oligonucleotide
  Sense strand starting at position 44 of SEQ ID NO: 915649
cauggauguccagguacuu

SEQ ID NO: 1095741 - RNA, 19 nt, Artificial Sequence
  Description of Artificial Sequence: Synthetic oligonucleotide
  Antisense strand to SEQ ID NO: 1095740
aaguaccuggacauccaug

SEQ ID NO: 1095742 - RNA, 19 nt, Artificial Sequence
  Description of Artificial Sequence: Synthetic oligonucleotide
  Sense strand starting at position 255 of SEQ ID NO: 915649
ccaagaaagcaguguaaau

SEQ ID NO: 1095743 - RNA, 19 nt, Artificial Sequence
  Description of Artificial Sequence: Synthetic oligonucleotide
  Antisense strand to SEQ ID NO: 1095742
auuuacacugcuuucuugg

SEQ ID NO: 1095744 - RNA, 19 nt, Artificial Sequence
  Description of Artificial Sequence: Synthetic oligonucleotide
  Sense strand starting at position 265 of SEQ ID NO: 915649
aguguaaauccucaguuua

SEQ ID NO: 1095745 - RNA, 19 nt, Artificial Sequence
  Description of Artificial Sequence: Synthetic oligonucleotide
  Antisense strand to SEQ ID NO: 1095744
uaaacugaggauuuacacu

SEQ ID NO: 1095746 - RNA, 19 nt, Artificial Sequence
  Description of Artificial Sequence: Synthetic oligonucleotide
  Sense strand starting at position 267 of SEQ ID NO: 915649
uguaaauccucaguuuaca

SEQ ID NO: 1095747 - RNA, 19 nt, Artificial Sequence
  Description of Artificial Sequence: Synthetic oligonucleotide
  Antisense strand to SEQ ID NO: 1095746
uguaaacugaggauuuaca

SEQ ID NO: 1095748 - RNA, 19 nt, Artificial Sequence
  Description of Artificial Sequence: Synthetic oligonucleotide
  Sense strand starting at position 301 of SEQ ID NO: 915649
gguccuugcaaguaggaaa

SEQ ID NO: 1095749 - RNA, 19 nt, Artificial Sequence
  Description of Artificial Sequence: Synthetic oligonucleotide
  Antisense strand to SEQ ID NO: 1095748
uuuccuacuugcaaggacc

SEQ ID NO: 1095750 - RNA, 19 nt, Artificial Sequence
  Description of Artificial Sequence: Synthetic oligonucleotide
  Sense strand starting at position 312 of SEQ ID NO: 915649
guaggaaacuugucuaagu

SEQ ID NO: 1095751 - RNA, 19 nt, Artificial Sequence
  Description of Artificial Sequence: Synthetic oligonucleotide
  Antisense strand to SEQ ID NO: 1095750
acuuagacaaguuuccuac

SEQ ID NO: 1095752 - RNA, 19 nt, Artificial Sequence
  Description of Artificial Sequence: Synthetic oligonucleotide
  Sense strand starting at position 313 of SEQ ID NO: 915649
uaggaaacuugucuaaguc

SEQ ID NO: 1095753 - RNA, 19 nt, Artificial Sequence
  Description of Artificial Sequence: Synthetic oligonucleotide
  Antisense strand to SEQ ID NO: 1095752
gacuuagacaaguuuccua

SEQ ID NO: 1095754 - RNA, 19 nt, Artificial Sequence
  Description of Artificial Sequence: Synthetic oligonucleotide
  Sense strand starting at position 335 of SEQ ID NO: 915649
guauaugacuaacuaagua

SEQ ID NO: 1095755 - RNA, 19 nt, Artificial Sequence
  Description of Artificial Sequence: Synthetic oligonucleotide
  Antisense strand to SEQ ID NO: 1095754
uacuuaguuagucauauac

SEQ ID NO: 1095756 - RNA, 19 nt, Artificial Sequence
  Description of Artificial Sequence: Synthetic oligonucleotide
  Sense strand starting at position 524 of SEQ ID NO: 915649
ggguuaugaagccagguca

SEQ ID NO: 1095757 - RNA, 19 nt, Artificial Sequence
  Description of Artificial Sequence: Synthetic oligonucleotide
  Antisense strand to SEQ ID NO: 1095756
ugaccuggcuucauaaccc

SEQ ID NO: 1095758 - RNA, 19 nt, Artificial Sequence
  Description of Artificial Sequence: Synthetic oligonucleotide
  Sense strand starting at position 699 of SEQ ID NO: 915649
uaugauguccuaugaggua

SEQ ID NO: 1095759 - RNA, 19 nt, Artificial Sequence
  Description of Artificial Sequence: Synthetic oligonucleotide
  Antisense strand to SEQ ID NO: 1095758
uaccucauaggacaucaua

SEQ ID NO: 1095760 - RNA, 19 nt, Artificial Sequence
  Description of Artificial Sequence: Synthetic oligonucleotide
  Sense strand starting at position 704 of SEQ ID NO: 915649
uguccuaugagguagguau

SEQ ID NO: 1095761 - RNA, 19 nt, Artificial Sequence
  Description of Artificial Sequence: Synthetic oligonucleotide
  Antisense strand to SEQ ID NO: 1095760
auaccuaccucauaggaca

SEQ ID NO: 1095762 - RNA, 19 nt, Artificial Sequence
  Description of Artificial Sequence: Synthetic oligonucleotide
  Sense strand starting at position 781 of SEQ ID NO: 915649
aauuauacugcuggugauu

SEQ ID NO: 1095763 - RNA, 19 nt, Artificial Sequence
  Description of Artificial Sequence: Synthetic oligonucleotide
  Antisense strand to SEQ ID NO: 1095762
aaucaccagcaguauaauu

SEQ ID NO: 1095764 - RNA, 19 nt, Artificial Sequence
  Description of Artificial Sequence: Synthetic oligonucleotide
  Sense strand starting at position 832 of SEQ ID NO: 915649
aaugguuaugagcacuagu

SEQ ID NO: 1095765 - RNA, 19 nt, Artificial Sequence
  Description of Artificial Sequence: Synthetic oligonucleotide
  Antisense strand to SEQ ID NO: 1095764
acuagugcucauaaccauu

SEQ ID NO: 1095766 - RNA, 19 nt, Artificial Sequence
  Description of Artificial Sequence: Synthetic oligonucleotide
  Sense strand starting at position 839 of SEQ ID NO: 915649
augagcacuaguugcagaa

SEQ ID NO: 1095767 - RNA, 19 nt, Artificial Sequence
  Description of Artificial Sequence: Synthetic oligonucleotide
  Antisense strand to SEQ ID NO: 1095766
uucugcaacuagugcucau

SEQ ID NO: 1095768 - RNA, 19 nt, Artificial Sequence
  Description of Artificial Sequence: Synthetic oligonucleotide
  Sense strand starting at position 843 of SEQ ID NO: 915649
gcacuaguugcagaaucag

SEQ ID NO: 1095769 - RNA, 19 nt, Artificial Sequence
  Description of Artificial Sequence: Synthetic oligonucleotide
  Antisense strand to SEQ ID NO: 1095768
cugauucugcaacuagugc

SEQ ID NO: 1095770 - RNA, 19 nt, Artificial Sequence
  Description of Artificial Sequence: Synthetic oligonucleotide
  Sense strand starting at position 868 of SEQ ID NO: 915649
gugcuaguucuggcauugu

SEQ ID NO: 1095771 - RNA, 19 nt, Artificial Sequence
  Description of Artificial Sequence: Synthetic oligonucleotide
  Antisense strand to SEQ ID NO: 1095770
acaaugccagaacuagcac

SEQ ID NO: 1095772 - RNA, 19 nt, Artificial Sequence
  Description of Artificial Sequence: Synthetic oligonucleotide
  Sense strand starting at position 994 of SEQ ID NO: 915649
uuaacaagugccugacaca

SEQ ID NO: 1095773 - RNA, 19 nt, Artificial Sequence
  Description of Artificial Sequence: Synthetic oligonucleotide
  Antisense strand to SEQ ID NO: 1095772
ugugucaggcacuuguuaa

SEQ ID NO: 1095774 - RNA, 19 nt, Artificial Sequence
  Description of Artificial Sequence: Synthetic oligonucleotide
  Sense strand starting at position 1178 of SEQ ID NO: 915649
ucauucuagugacccuuua

SEQ ID NO: 1095775 - RNA, 19 nt, Artificial Sequence
  Description of Artificial Sequence: Synthetic oligonucleotide
  Antisense strand to SEQ ID NO: 1095774
uaaagggucacuagaauga

SEQ ID NO: 1095776 - RNA, 19 nt, Artificial Sequence
  Description of Artificial Sequence: Synthetic oligonucleotide
  Sense strand starting at position 1274 of SEQ ID NO: 915649
gaaggaauuugucauaagu

SEQ ID NO: 1095777 - RNA, 19 nt, Artificial Sequence
  Description of Artificial Sequence: Synthetic oligonucleotide
  Antisense strand to SEQ ID NO: 1095776
acuuaugacaaauuccuuc

SEQ ID NO: 1095778 - RNA, 19 nt, Artificial Sequence
  Description of Artificial Sequence: Synthetic oligonucleotide
  Sense strand starting at position 1276 of SEQ ID NO: 915649
aggaauuugucauaaguca

SEQ ID NO: 1095779 - RNA, 19 nt, Artificial Sequence
  Description of Artificial Sequence: Synthetic oligonucleotide
  Antisense strand to SEQ ID NO: 1095778
ugacuuaugacaaauuccu

SEQ ID NO: 1095780 - RNA, 19 nt, Artificial Sequence
  Description of Artificial Sequence: Synthetic oligonucleotide
  Sense strand starting at position 1300 of SEQ ID NO: 915649
cuucgauaagggugaccaa

SEQ ID NO: 1095781 - RNA, 19 nt, Artificial Sequence
  Description of Artificial Sequence: Synthetic oligonucleotide
  Antisense strand to SEQ ID NO: 1095780
uuggucacccuuaucgaag

SEQ ID NO: 1095782 - RNA, 19 nt, Artificial Sequence
  Description of Artificial Sequence: Synthetic oligonucleotide
  Sense strand starting at position 1365 of SEQ ID NO: 915649
guacauaucggccaucauc

SEQ ID NO: 1095783 - RNA, 19 nt, Artificial Sequence
  Description of Artificial Sequence: Synthetic oligonucleotide
  Antisense strand to SEQ ID NO: 1095782
gaugauggccgauauguac

SEQ ID NO: 1095784 - RNA, 19 nt, Artificial Sequence
  Description of Artificial Sequence: Synthetic oligonucleotide
  Sense strand starting at position 1466 of SEQ ID NO: 915649
ccuccuaauccugggagca

SEQ ID NO: 1095785 - RNA, 19 nt, Artificial Sequence
  Description of Artificial Sequence: Synthetic oligonucleotide
  Antisense strand to SEQ ID NO: 1095784
ugcucccaggauuaggagg

SEQ ID NO: 1095786 - RNA, 19 nt, Artificial Sequence
  Description of Artificial Sequence: Synthetic oligonucleotide
  Sense strand starting at position 1829 of SEQ ID NO: 915649
aggcuacaccucugaaaug

SEQ ID NO: 1095787 - RNA, 19 nt, Artificial Sequence
  Description of Artificial Sequence: Synthetic oligonucleotide
  Antisense strand to SEQ ID NO: 1095786
cauuucagagguguagccu

SEQ ID NO: 1095788 - RNA, 19 nt, Artificial Sequence
  Description of Artificial Sequence: Synthetic oligonucleotide
  Sense strand starting at position 1996 of SEQ ID NO: 915649
ggguuacuuccgggaggaa

SEQ ID NO: 1095789 - RNA, 19 nt, Artificial Sequence
  Description of Artificial Sequence: Synthetic oligonucleotide
  Antisense strand to SEQ ID NO: 1095788
uuccucccggaaguaaccc

SEQ ID NO: 1095790 - RNA, 19 nt, Artificial Sequence
  Description of Artificial Sequence: Synthetic oligonucleotide
  Sense strand starting at position 2075 of SEQ ID NO: 915649
cgggaacucggcgaucaua

SEQ ID NO: 1095791 - RNA, 19 nt, Artificial Sequence
  Description of Artificial Sequence: Synthetic oligonucleotide
  Antisense strand to SEQ ID NO: 1095790
uaugaucgccgaguucccg

SEQ ID NO: 1095792 - RNA, 19 nt, Artificial Sequence
  Description of Artificial Sequence: Synthetic oligonucleotide
  Sense strand starting at position 2244 of SEQ ID NO: 915649
uuuauugguucuguaggaa

SEQ ID NO: 1095793 - RNA, 19 nt, Artificial Sequence
  Description of Artificial Sequence: Synthetic oligonucleotide
  Antisense strand to SEQ ID NO: 1095792
uuccuacagaaccaauaaa

SEQ ID NO: 1095794 - RNA, 19 nt, Artificial Sequence
  Description of Artificial Sequence: Synthetic oligonucleotide
  Sense strand starting at position 2561 of SEQ ID NO: 915649
gcgauuacugcugugugua

SEQ ID NO: 1095795 - RNA, 19 nt, Artificial Sequence
  Description of Artificial Sequence: Synthetic oligonucleotide
  Antisense strand to SEQ ID NO: 1095794
uacacacagcaguaaucgc

SEQ ID NO: 1095796 - RNA, 19 nt, Artificial Sequence
  Description of Artificial Sequence: Synthetic oligonucleotide
  Sense strand starting at position 2605 of SEQ ID NO: 915649
ugcaaagauaagcgagaua

SEQ ID NO: 1095797 - RNA, 19 nt, Artificial Sequence
  Description of Artificial Sequence: Synthetic oligonucleotide
  Antisense strand to SEQ ID NO: 1095796
uaucucgcuuaucuuugca

SEQ ID NO: 1095798 - RNA, 19 nt, Artificial Sequence
  Description of Artificial Sequence: Synthetic oligonucleotide
  Sense strand starting at position 2610 of SEQ ID NO: 915649
agauaagcgagauaggcuu

SEQ ID NO: 1095799 - RNA, 19 nt, Artificial Sequence
  Description of Artificial Sequence: Synthetic oligonucleotide
  Antisense strand to SEQ ID NO: 1095798
aagccuaucucgcuuaucu

SEQ ID NO: 1095800 - RNA, 19 nt, Artificial Sequence
  Description of Artificial Sequence: Synthetic oligonucleotide
  Sense strand starting at position 2730 of SEQ ID NO: 915649
gcuaaucuugggugaggga

SEQ ID NO: 1095801 - RNA, 19 nt, Artificial Sequence
  Description of Artificial Sequence: Synthetic oligonucleotide
  Antisense strand to SEQ ID NO: 1095800
ucccucacccaagauuagc

SEQ ID NO: 1095802 - RNA, 19 nt, Artificial Sequence
  Description of Artificial Sequence: Synthetic oligonucleotide
  Sense strand starting at position 3023 of SEQ ID NO: 915649
uuucuacugcuuugaagac

SEQ ID NO: 1095803 - RNA, 19 nt, Artificial Sequence
  Description of Artificial Sequence: Synthetic oligonucleotide
  Antisense strand to SEQ ID NO: 1095802
gucuucaaagcaguagaaa

SEQ ID NO: 1095804 - RNA, 19 nt, Artificial Sequence
  Description of Artificial Sequence: Synthetic oligonucleotide
  Sense strand starting at position 3168 of SEQ ID NO: 915649
cgccauccagaucaagaua

SEQ ID NO: 1095805 - RNA, 19 nt, Artificial Sequence
  Description of Artificial Sequence: Synthetic oligonucleotide
  Antisense strand to SEQ ID NO: 1095804
uaucuugaucuggauggcg

SEQ ID NO: 1095806 - RNA, 19 nt, Artificial Sequence
  Description of Artificial Sequence: Synthetic oligonucleotide
  Sense strand starting at position 3348 of SEQ ID NO: 915649
ugacuucuuuagcucaaug

SEQ ID NO: 1095807 - RNA, 19 nt, Artificial Sequence
  Description of Artificial Sequence: Synthetic oligonucleotide
  Antisense strand to SEQ ID NO: 1095806
cauugagcuaaagaaguca

SEQ ID NO: 1095808 - RNA, 19 nt, Artificial Sequence
  Description of Artificial Sequence: Synthetic oligonucleotide
  Sense strand starting at position 3390 of SEQ ID NO: 915649
uguugugugcaucuguuau

SEQ ID NO: 1095809 - RNA, 19 nt, Artificial Sequence
  Description of Artificial Sequence: Synthetic oligonucleotide
  Antisense strand to SEQ ID NO: 1095808
auaacagaugcacacaaca

SEQ ID NO: 1095810 - RNA, 19 nt, Artificial Sequence
  Description of Artificial Sequence: Synthetic oligonucleotide
  Sense strand starting at position 3540 of SEQ ID NO: 915649
ucuuguacagauggacaua

SEQ ID NO: 1095811 - RNA, 19 nt, Artificial Sequence
  Description of Artificial Sequence: Synthetic oligonucleotide
  Antisense strand to SEQ ID NO: 1095810
uauguccaucuguacaaga

SEQ ID NO: 1095812 - RNA, 19 nt, Artificial Sequence
  Description of Artificial Sequence: Synthetic oligonucleotide
  Sense strand starting at position 3930 of SEQ ID NO: 915649
uaagaaacugcgugggaaa

SEQ ID NO: 1095813 - RNA, 19 nt, Artificial Sequence
  Description of Artificial Sequence: Synthetic oligonucleotide
  Antisense strand to SEQ ID NO: 1095812
uuucccacgcaguuucuua

SEQ ID NO: 1095814 - RNA, 19 nt, Artificial Sequence
  Description of Artificial Sequence: Synthetic oligonucleotide
  Sense strand starting at position 3949 of SEQ ID NO: 915649
aggagaugguuucuuacaa

SEQ ID NO: 1095815 - RNA, 19 nt, Artificial Sequence
  Description of Artificial Sequence: Synthetic oligonucleotide
  Antisense strand to SEQ ID NO: 1095814
uuguaagaaaccaucuccu

SEQ ID NO: 1095816 - RNA, 19 nt, Artificial Sequence
  Description of Artificial Sequence: Synthetic oligonucleotide
  Sense strand starting at position 3950 of SEQ ID NO: 915649
ggagaugguuucuuacaag

SEQ ID NO: 1095817 - RNA, 19 nt, Artificial Sequence
  Description of Artificial Sequence: Synthetic oligonucleotide
  Antisense strand to SEQ ID NO: 1095816
cuuguaagaaaccaucucc

SEQ ID NO: 1095818 - RNA, 19 nt, Artificial Sequence
  Description of Artificial Sequence: Synthetic oligonucleotide
  Sense strand starting at position 3970 of SEQ ID NO: 915649
ggaaucuugcaauaucuac

SEQ ID NO: 1095819 - RNA, 19 nt, Artificial Sequence
  Description of Artificial Sequence: Synthetic oligonucleotide
  Antisense strand to SEQ ID NO: 1095818
guagauauugcaagauucc

SEQ ID NO: 1095820 - RNA, 19 nt, Artificial Sequence
  Description of Artificial Sequence: Synthetic oligonucleotide
  Sense strand starting at position 1407 of SEQ ID NO: 915650
gaaggaagauaggguuuaa

SEQ ID NO: 1095821 - RNA, 19 nt, Artificial Sequence
  Description of Artificial Sequence: Synthetic oligonucleotide
  Antisense strand to SEQ ID NO: 1095820
uuaaacccuaucuuccuuc

SEQ ID NO: 1095822 - RNA, 19 nt, Artificial Sequence
  Description of Artificial Sequence: Synthetic oligonucleotide
  Sense strand starting at position 1416 of SEQ ID NO: 915650
uaggguuuaaguggaggau

SEQ ID NO: 1095823 - RNA, 19 nt, Artificial Sequence
  Description of Artificial Sequence: Synthetic oligonucleotide
  Antisense strand to SEQ ID NO: 1095822
auccuccacuuaaacccua

SEQ ID NO: 1095824 - RNA, 19 nt, Artificial Sequence
  Description of Artificial Sequence: Synthetic oligonucleotide
  Sense strand starting at position 1418 of SEQ ID NO: 915650
ggguuuaaguggaggauaa

SEQ ID NO: 1095825 - RNA, 19 nt, Artificial Sequence
  Description of Artificial Sequence: Synthetic oligonucleotide
  Antisense strand to SEQ ID NO: 1095824
uuauccuccacuuaaaccc

SEQ ID NO: 1095826 - RNA, 19 nt, Artificial Sequence
  Description of Artificial Sequence: Synthetic oligonucleotide
  Sense strand starting at position 1419 of SEQ ID NO: 915650
gguuuaaguggaggauaaa

SEQ ID NO: 1095827 - RNA, 19 nt, Artificial Sequence
  Description of Artificial Sequence: Synthetic oligonucleotide
  Antisense strand to SEQ ID NO: 1095826
uuuauccuccacuuaaacc

SEQ ID NO: 1095828 - RNA, 19 nt, Artificial Sequence
  Description of Artificial Sequence: Synthetic oligonucleotide
  Sense strand starting at position 1550 of SEQ ID NO: 915650
ccgcuaaacucuucuugca

SEQ ID NO: 1095829 - RNA, 19 nt, Artificial Sequence
  Description of Artificial Sequence: Synthetic oligonucleotide
  Antisense strand to SEQ ID NO: 1095828
ugcaagaagaguuuagcgg

SEQ ID NO: 1095830 - RNA, 19 nt, Artificial Sequence
  Description of Artificial Sequence: Synthetic oligonucleotide
  Sense strand starting at position 1708 of SEQ ID NO: 915650
accacaaacucagcgauaa

SEQ ID NO: 1095831 - RNA, 19 nt, Artificial Sequence
  Description of Artificial Sequence: Synthetic oligonucleotide
  Antisense strand to SEQ ID NO: 1095830
uuaucgcugaguuuguggu

SEQ ID NO: 1095832 - RNA, 19 nt, Artificial Sequence
  Description of Artificial Sequence: Synthetic oligonucleotide
  Sense strand starting at position 1709 of SEQ ID NO: 915650
ccacaaacucagcgauaag

SEQ ID NO: 1095833 - RNA, 19 nt, Artificial Sequence
  Description of Artificial Sequence: Synthetic oligonucleotide
  Antisense strand to SEQ ID NO: 1095832
cuuaucgcugaguuugugg

SEQ ID NO: 1095834 - RNA, 19 nt, Artificial Sequence
  Description of Artificial Sequence: Synthetic oligonucleotide
  Sense strand starting at position 1830 of SEQ ID NO: 915650
ccgcgaugugugcaggaau

SEQ ID NO: 1095835 - RNA, 19 nt, Artificial Sequence
  Description of Artificial Sequence: Synthetic oligonucleotide
  Antisense strand to SEQ ID NO: 1095834
auuccugcacacaucgcgg

SEQ ID NO: 1095836 - RNA, 19 nt, Artificial Sequence
  Description of Artificial Sequence: Synthetic oligonucleotide
  Sense strand starting at position 1867 of SEQ ID NO: 915650
cucgaaacgacuuaguucu

SEQ ID NO: 1095837 - RNA, 19 nt, Artificial Sequence
  Description of Artificial Sequence: Synthetic oligonucleotide
  Antisense strand to SEQ ID NO: 1095836
agaacuaagucguuucgag

SEQ ID NO: 1095838 - RNA, 19 nt, Artificial Sequence
  Description of Artificial Sequence: Synthetic oligonucleotide
  Sense strand starting at position 1873 of SEQ ID NO: 915650
acgacuuaguucucacuua

SEQ ID NO: 1095839 - RNA, 19 nt, Artificial Sequence
  Description of Artificial Sequence: Synthetic oligonucleotide
  Antisense strand to SEQ ID NO: 1095838
uaagugagaacuaagucgu

SEQ ID NO: 1095840 - RNA, 19 nt, Artificial Sequence
  Description of Artificial Sequence: Synthetic oligonucleotide
  Sense strand starting at position 2001 of SEQ ID NO: 915650
cgcugaucucgagagcuag

SEQ ID NO: 1095841 - RNA, 19 nt, Artificial Sequence
  Description of Artificial Sequence: Synthetic oligonucleotide
  Antisense strand to SEQ ID NO: 1095840
cuagcucucgagaucagcg

SEQ ID NO: 1095842 - RNA, 19 nt, Artificial Sequence
  Description of Artificial Sequence: Synthetic oligonucleotide
  Sense strand starting at position 2082 of SEQ ID NO: 915650
ggcuucuucugcccggaga

SEQ ID NO: 1095843 - RNA, 19 nt, Artificial Sequence
  Description of Artificial Sequence: Synthetic oligonucleotide
  Antisense strand to SEQ ID NO: 1095842
ucuccgggcagaagaagcc

SEQ ID NO: 1095844 - RNA, 19 nt, Artificial Sequence
  Description of Artificial Sequence: Synthetic oligonucleotide
  Sense strand starting at position 2310 of SEQ ID NO: 915650
accugauguccagguguau

SEQ ID NO: 1095845 - RNA, 19 nt, Artificial Sequence
  Description of Artificial Sequence: Synthetic oligonucleotide
  Antisense strand to SEQ ID NO: 1095844
auacaccuggacaucaggu

SEQ ID NO: 1095846 - RNA, 19 nt, Artificial Sequence
  Description of Artificial Sequence: Synthetic oligonucleotide
  Sense strand starting at position 2374 of SEQ ID NO: 915650
guggaagggucaccgauau

SEQ ID NO: 1095847 - RNA, 19 nt, Artificial Sequence
  Description of Artificial Sequence: Synthetic oligonucleotide
  Antisense strand to SEQ ID NO: 1095846
auaucggugacccuuccac

SEQ ID NO: 1095848 - RNA, 19 nt, Artificial Sequence
  Description of Artificial Sequence: Synthetic oligonucleotide
  Sense strand starting at position 2384 of SEQ ID NO: 915650
caccgauauccugggagag

SEQ ID NO: 1095849 - RNA, 19 nt, Artificial Sequence
  Description of Artificial Sequence: Synthetic oligonucleotide
  Antisense strand to SEQ ID NO: 1095848
cucucccaggauaucggug

SEQ ID NO: 1095850 - RNA, 19 nt, Artificial Sequence
  Description of Artificial Sequence: Synthetic oligonucleotide
  Sense strand starting at position 2386 of SEQ ID NO: 915650
ccgauauccugggagagag

SEQ ID NO: 1095851 - RNA, 19 nt, Artificial Sequence
  Description of Artificial Sequence: Synthetic oligonucleotide
  Antisense strand to SEQ ID NO: 1095850
cucucucccaggauaucgg

SEQ ID NO: 1095852 - RNA, 19 nt, Artificial Sequence
  Description of Artificial Sequence: Synthetic oligonucleotide
  Sense strand starting at position 2413 of SEQ ID NO: 915650
accagagacugggaacaua

SEQ ID NO: 1095853 - RNA, 19 nt, Artificial Sequence
  Description of Artificial Sequence: Synthetic oligonucleotide
  Antisense strand to SEQ ID NO: 1095852
uauguucccagucucuggu

SEQ ID NO: 1095854 - RNA, 19 nt, Artificial Sequence
  Description of Artificial Sequence: Synthetic oligonucleotide
  Sense strand starting at position 2469 of SEQ ID NO: 915650
cgaggaagacgagguguau

SEQ ID NO: 1095855 - RNA, 19 nt, Artificial Sequence
  Description of Artificial Sequence: Synthetic oligonucleotide
  Antisense strand to SEQ ID NO: 1095854
auacaccucgucuuccucg

SEQ ID NO: 1095856 - RNA, 19 nt, Artificial Sequence
  Description of Artificial Sequence: Synthetic oligonucleotide
  Sense strand starting at position 2529 of SEQ ID NO: 915650
acgcuaaaggaaugugaaa

SEQ ID NO: 1095857 - RNA, 19 nt, Artificial Sequence
  Description of Artificial Sequence: Synthetic oligonucleotide
  Antisense strand to SEQ ID NO: 1095856
uuucacauuccuuuagcgu

SEQ ID NO: 1095858 - RNA, 19 nt, Artificial Sequence
  Description of Artificial Sequence: Synthetic oligonucleotide
  Sense strand starting at position 2637 of SEQ ID NO: 915650
ggagauaaguucuaagaga

SEQ ID NO: 1095859 - RNA, 19 nt, Artificial Sequence
  Description of Artificial Sequence: Synthetic oligonucleotide
  Antisense strand to SEQ ID NO: 1095858
ucucuuagaacuuaucucc

SEQ ID NO: 1095860 - RNA, 19 nt, Artificial Sequence
  Description of Artificial Sequence: Synthetic oligonucleotide
  Sense strand starting at position 2693 of SEQ ID NO: 915650
acaaauagugccugacaca

SEQ ID NO: 1095861 - RNA, 19 nt, Artificial Sequence
  Description of Artificial Sequence: Synthetic oligonucleotide
  Antisense strand to SEQ ID NO: 1095860
ugugucaggcacuauuugu

SEQ ID NO: 1095862 - RNA, 19 nt, Artificial Sequence
  Description of Artificial Sequence: Synthetic oligonucleotide
  Sense strand starting at position 2735 of SEQ ID NO: 915650
gcugaaugaguguagaaau

SEQ ID NO: 1095863 - RNA, 19 nt, Artificial Sequence
  Description of Artificial Sequence: Synthetic oligonucleotide
  Antisense strand to SEQ ID NO: 1095862
auuucuacacucauucagc

SEQ ID NO: 1095864 - RNA, 19 nt, Artificial Sequence
  Description of Artificial Sequence: Synthetic oligonucleotide
  Sense strand starting at position 2925 of SEQ ID NO: 915650
gaggccuccuucuucuaga

SEQ ID NO: 1095865 - RNA, 19 nt, Artificial Sequence
  Description of Artificial Sequence: Synthetic oligonucleotide
  Antisense strand to SEQ ID NO: 1095864
ucuagaagaaggaggccuc

SEQ ID NO: 1095866 - RNA, 19 nt, Artificial Sequence
  Description of Artificial Sequence: Synthetic oligonucleotide
  Sense strand starting at position 3122 of SEQ ID NO: 915650
gcaggugcuucuguuugau

SEQ ID NO: 1095867 - RNA, 19 nt, Artificial Sequence
  Description of Artificial Sequence: Synthetic oligonucleotide
  Antisense strand to SEQ ID NO: 1095866
aucaaacagaagcaccugc

SEQ ID NO: 1095868 - RNA, 19 nt, Artificial Sequence
  Description of Artificial Sequence: Synthetic oligonucleotide
  Sense strand starting at position 3125 of SEQ ID NO: 915650
ggugcuucuguuugauucu

SEQ ID NO: 1095869 - RNA, 19 nt, Artificial Sequence
  Description of Artificial Sequence: Synthetic oligonucleotide
  Antisense strand to SEQ ID NO: 1095868
agaaucaaacagaagcacc

SEQ ID NO: 1095870 - RNA, 19 nt, Artificial Sequence
  Description of Artificial Sequence: Synthetic oligonucleotide
  Sense strand starting at position 3254 of SEQ ID NO: 915650
uuugauucugugcagacuu

SEQ ID NO: 1095871 - RNA, 19 nt, Artificial Sequence
  Description of Artificial Sequence: Synthetic oligonucleotide
  Antisense strand to SEQ ID NO: 1095870
aagucugcacagaaucaaa

SEQ ID NO: 1095872 - RNA, 19 nt, Artificial Sequence
  Description of Artificial Sequence: Synthetic oligonucleotide
  Sense strand starting at position 3265 of SEQ ID NO: 915650
gcagacuucccuuguguac

SEQ ID NO: 1095873 - RNA, 19 nt, Artificial Sequence
  Description of Artificial Sequence: Synthetic oligonucleotide
  Antisense strand to SEQ ID NO: 1095872
guacacaagggaagucugc

SEQ ID NO: 1095874 - RNA, 19 nt, Artificial Sequence
  Description of Artificial Sequence: Synthetic oligonucleotide
  Sense strand starting at position 3277 of SEQ ID NO: 915650
uguguacuaucuuuaugau

SEQ ID NO: 1095875 - RNA, 19 nt, Artificial Sequence
  Description of Artificial Sequence: Synthetic oligonucleotide
  Antisense strand to SEQ ID NO: 1095874
aucauaaagauaguacaca

SEQ ID NO: 1095876 - RNA, 19 nt, Artificial Sequence
  Description of Artificial Sequence: Synthetic oligonucleotide
  Sense strand starting at position 3278 of SEQ ID NO: 915650
guguacuaucuuuaugaug

SEQ ID NO: 1095877 - RNA, 19 nt, Artificial Sequence
  Description of Artificial Sequence: Synthetic oligonucleotide
  Antisense strand to SEQ ID NO: 1095876
caucauaaagauaguacac

SEQ ID NO: 1095878 - RNA, 19 nt, Artificial Sequence
  Description of Artificial Sequence: Synthetic oligonucleotide
  Sense strand starting at position 3286 of SEQ ID NO: 915650
ucuuuaugaugcuugaauc

SEQ ID NO: 1095879 - RNA, 19 nt, Artificial Sequence
  Description of Artificial Sequence: Synthetic oligonucleotide
  Antisense strand to SEQ ID NO: 1095878
gauucaagcaucauaaaga

SEQ ID NO: 1095880 - RNA, 19 nt, Artificial Sequence
  Description of Artificial Sequence: Synthetic oligonucleotide
  Sense strand starting at position 3340 of SEQ ID NO: 915650
cccuauguuccugaagcaa

SEQ ID NO: 1095881 - RNA, 19 nt, Artificial Sequence
  Description of Artificial Sequence: Synthetic oligonucleotide
  Antisense strand to SEQ ID NO: 1095880
uugcuucaggaacauaggg

SEQ ID NO: 1095882 - RNA, 19 nt, Artificial Sequence
  Description of Artificial Sequence: Synthetic oligonucleotide
  Sense strand starting at position 3541 of SEQ ID NO: 915650
aggauaugucuaggaaagc

SEQ ID NO: 1095883 - RNA, 19 nt, Artificial Sequence
  Description of Artificial Sequence: Synthetic oligonucleotide
  Antisense strand to SEQ ID NO: 1095882
gcuuuccuagacauauccu

SEQ ID NO: 1095884 - RNA, 19 nt, Artificial Sequence
  Description of Artificial Sequence: Synthetic oligonucleotide
  Sense strand starting at position 3559 of SEQ ID NO: 915650
cuugaauuaugucuggaga

SEQ ID NO: 1095885 - RNA, 19 nt, Artificial Sequence
  Description of Artificial Sequence: Synthetic oligonucleotide
  Antisense strand to SEQ ID NO: 1095884
ucuccagacauaauucaag

SEQ ID NO: 1095886 - RNA, 19 nt, Artificial Sequence
  Description of Artificial Sequence: Synthetic oligonucleotide
  Sense strand starting at position 3560 of SEQ ID NO: 915650
uugaauuaugucuggagau

SEQ ID NO: 1095887 - RNA, 19 nt, Artificial Sequence
  Description of Artificial Sequence: Synthetic oligonucleotide
  Antisense strand to SEQ ID NO: 1095886
aucuccagacauaauucaa

SEQ ID NO: 1095888 - RNA, 19 nt, Artificial Sequence
  Description of Artificial Sequence: Synthetic oligonucleotide
  Sense strand starting at position 3580 of SEQ ID NO: 915650
uugggaacuucugcuugua

SEQ ID NO: 1095889 - RNA, 19 nt, Artificial Sequence
  Description of Artificial Sequence: Synthetic oligonucleotide
  Antisense strand to SEQ ID NO: 1095888
uacaagcagaaguucccaa

SEQ ID NO: 1095890 - RNA, 19 nt, Artificial Sequence
  Description of Artificial Sequence: Synthetic oligonucleotide
  Sense strand starting at position 3583 of SEQ ID NO: 915650
ggaacuucugcuuguagga

SEQ ID NO: 1095891 - RNA, 19 nt, Artificial Sequence
  Description of Artificial Sequence: Synthetic oligonucleotide
  Antisense strand to SEQ ID NO: 1095890
uccuacaagcagaaguucc

SEQ ID NO: 1095892 - RNA, 19 nt, Artificial Sequence
  Description of Artificial Sequence: Synthetic oligonucleotide
  Sense strand starting at position 3777 of SEQ ID NO: 915650
uugugaagcuucucagaau

SEQ ID NO: 1095893 - RNA, 19 nt, Artificial Sequence
  Description of Artificial Sequence: Synthetic oligonucleotide
  Antisense strand to SEQ ID NO: 1095892
auucugagaagcuucacaa

SEQ ID NO: 1095894 - RNA, 19 nt, Artificial Sequence
  Description of Artificial Sequence: Synthetic oligonucleotide
  Sense strand starting at position 3862 of SEQ ID NO: 915650
gcaaccagguuucuuguua

SEQ ID NO: 1095895 - RNA, 19 nt, Artificial Sequence
  Description of Artificial Sequence: Synthetic oligonucleotide
  Antisense strand to SEQ ID NO: 1095894
uaacaagaaaccugguugc

SEQ ID NO: 1095896 - RNA, 19 nt, Artificial Sequence
  Description of Artificial Sequence: Synthetic oligonucleotide
  Sense strand starting at position 3866 of SEQ ID NO: 915650
ccagguuucuuguuaucau

SEQ ID NO: 1095897 - RNA, 19 nt, Artificial Sequence
  Description of Artificial Sequence: Synthetic oligonucleotide
  Antisense strand to SEQ ID NO: 1095896
augauaacaagaaaccugg

SEQ ID NO: 1095898 - RNA, 19 nt, Artificial Sequence
  Description of Artificial Sequence: Synthetic oligonucleotide
  Sense strand starting at position 3869 of SEQ ID NO: 915650
gguuucuuguuaucaugac

SEQ ID NO: 1095899 - RNA, 19 nt, Artificial Sequence
  Description of Artificial Sequence: Synthetic oligonucleotide
  Antisense strand to SEQ ID NO: 1095898
gucaugauaacaagaaacc

SEQ ID NO: 1095900 - RNA, 19 nt, Artificial Sequence
  Description of Artificial Sequence: Synthetic oligonucleotide
  Sense strand starting at position 395 of SEQ ID NO: 915651
gccugaugcugaucugaca

SEQ ID NO: 1095901 - RNA, 19 nt, Artificial Sequence
  Description of Artificial Sequence: Synthetic oligonucleotide
  Antisense strand to SEQ ID NO: 1095900
ugucagaucagcaucaggc

SEQ ID NO: 1095902 - RNA, 19 nt, Artificial Sequence
  Description of Artificial Sequence: Synthetic oligonucleotide
  Sense strand starting at position 406 of SEQ ID NO: 915651
aucugacaauggguugaua

SEQ ID NO: 1095903 - RNA, 19 nt, Artificial Sequence
  Description of Artificial Sequence: Synthetic oligonucleotide
  Antisense strand to SEQ ID NO: 1095902
uaucaacccauugucagau

SEQ ID NO: 1095904 - RNA, 19 nt, Artificial Sequence
  Description of Artificial Sequence: Synthetic oligonucleotide
  Sense strand starting at position 523 of SEQ ID NO: 915651
gggcaaaccgacuggugau

SEQ ID NO: 1095905 - RNA, 19 nt, Artificial Sequence
  Description of Artificial Sequence: Synthetic oligonucleotide
  Antisense strand to SEQ ID NO: 1095904
aucaccagucgguuugccc

SEQ ID NO: 1095906 - RNA, 19 nt, Artificial Sequence
  Description of Artificial Sequence: Synthetic oligonucleotide
  Sense strand starting at position 699 of SEQ ID NO: 915651
ugcagauaggccuaacucu

SEQ ID NO: 1095907 - RNA, 19 nt, Artificial Sequence
  Description of Artificial Sequence: Synthetic oligonucleotide
  Antisense strand to SEQ ID NO: 1095906
agaguuaggccuaucugca

SEQ ID NO: 1095908 - RNA, 19 nt, Artificial Sequence
  Description of Artificial Sequence: Synthetic oligonucleotide
  Sense strand starting at position 834 of SEQ ID NO: 915651
gauccucgucccuacagau

SEQ ID NO: 1095909 - RNA, 19 nt, Artificial Sequence
  Description of Artificial Sequence: Synthetic oligonucleotide
  Antisense strand to SEQ ID NO: 1095908
aucuguagggacgaggauc

SEQ ID NO: 1095910 - RNA, 19 nt, Artificial Sequence
  Description of Artificial Sequence: Synthetic oligonucleotide
  Sense strand starting at position 841 of SEQ ID NO: 915651
gucccuacagauuguacau

SEQ ID NO: 1095911 - RNA, 19 nt, Artificial Sequence
  Description of Artificial Sequence: Synthetic oligonucleotide
  Antisense strand to SEQ ID NO: 1095910
auguacaaucuguagggac

SEQ ID NO: 1095912 - RNA, 19 nt, Artificial Sequence
  Description of Artificial Sequence: Synthetic oligonucleotide
  Sense strand starting at position 850 of SEQ ID NO: 915651
gauuguacauucucaggua

SEQ ID NO: 1095913 - RNA, 19 nt, Artificial Sequence
  Description of Artificial Sequence: Synthetic oligonucleotide
  Antisense strand to SEQ ID NO: 1095912
uaccugagaauguacaauc

SEQ ID NO: 1095914 - RNA, 19 nt, Artificial Sequence
  Description of Artificial Sequence: Synthetic oligonucleotide
  Sense strand starting at position 1053 of SEQ ID NO: 915651
cagaaauuaugugcacugu

SEQ ID NO: 1095915 - RNA, 19 nt, Artificial Sequence
  Description of Artificial Sequence: Synthetic oligonucleotide
  Antisense strand to SEQ ID NO: 1095914
acagugcacauaauuucug

SEQ ID NO: 1095916 - RNA, 19 nt, Artificial Sequence
  Description of Artificial Sequence: Synthetic oligonucleotide
  Sense strand starting at position 1063 of SEQ ID NO: 915651
gugcacugucauuagaaug

SEQ ID NO: 1095917 - RNA, 19 nt, Artificial Sequence
  Description of Artificial Sequence: Synthetic oligonucleotide
  Antisense strand to SEQ ID NO: 1095916
cauucuaaugacagugcac

SEQ ID NO: 1095918 - RNA, 19 nt, Artificial Sequence
  Description of Artificial Sequence: Synthetic oligonucleotide
  Sense strand starting at position 1213 of SEQ ID NO: 915651
ucucuaagguccucaagga

SEQ ID NO: 1095919 - RNA, 19 nt, Artificial Sequence
  Description of Artificial Sequence: Synthetic oligonucleotide
  Antisense strand to SEQ ID NO: 1095918
uccuugaggaccuuagaga

SEQ ID NO: 1095920 - RNA, 19 nt, Artificial Sequence
  Description of Artificial Sequence: Synthetic oligonucleotide
  Sense strand starting at position 1341 of SEQ ID NO: 915651
guucuacauccauagucua

SEQ ID NO: 1095921 - RNA, 19 nt, Artificial Sequence
  Description of Artificial Sequence: Synthetic oligonucleotide
  Antisense strand to SEQ ID NO: 1095920
uagacuauggauguagaac

SEQ ID NO: 1095922 - RNA, 19 nt, Artificial Sequence
  Description of Artificial Sequence: Synthetic oligonucleotide
  Sense strand starting at position 1380 of SEQ ID NO: 915651
accuuccuccgauaauguu

SEQ ID NO: 1095923 - RNA, 19 nt, Artificial Sequence
  Description of Artificial Sequence: Synthetic oligonucleotide
  Antisense strand to SEQ ID NO: 1095922
aacauuaucggaggaaggu

SEQ ID NO: 1095924 - RNA, 19 nt, Artificial Sequence
  Description of Artificial Sequence: Synthetic oligonucleotide
  Sense strand starting at position 1414 of SEQ ID NO: 915651
uacauugucgcauaugauc

SEQ ID NO: 1095925 - RNA, 19 nt, Artificial Sequence
  Description of Artificial Sequence: Synthetic oligonucleotide
  Antisense strand to SEQ ID NO: 1095924
gaucauaugcgacaaugua

SEQ ID NO: 1095926 - RNA, 19 nt, Artificial Sequence
  Description of Artificial Sequence: Synthetic oligonucleotide
  Sense strand starting at position 1422 of SEQ ID NO: 915651
cgcauaugauccucacaau

SEQ ID NO: 1095927 - RNA, 19 nt, Artificial Sequence
  Description of Artificial Sequence: Synthetic oligonucleotide
  Antisense strand to SEQ ID NO: 1095926
auugugaggaucauaugcg

SEQ ID NO: 1095928 - RNA, 19 nt, Artificial Sequence
  Description of Artificial Sequence: Synthetic oligonucleotide
  Sense strand starting at position 1433 of SEQ ID NO: 915651
cucacaauccagugaggca

SEQ ID NO: 1095929 - RNA, 19 nt, Artificial Sequence
  Description of Artificial Sequence: Synthetic oligonucleotide
  Antisense strand to SEQ ID NO: 1095928
ugccucacuggauugugag

SEQ ID NO: 1095930 - RNA, 19 nt, Artificial Sequence
  Description of Artificial Sequence: Synthetic oligonucleotide
  Sense strand starting at position 1566 of SEQ ID NO: 915651
ucaugucgccggcuaacua

SEQ ID NO: 1095931 - RNA, 19 nt, Artificial Sequence
  Description of Artificial Sequence: Synthetic oligonucleotide
  Antisense strand to SEQ ID NO: 1095930
uaguuagccggcgacauga

SEQ ID NO: 1095932 - RNA, 19 nt, Artificial Sequence
  Description of Artificial Sequence: Synthetic oligonucleotide
  Sense strand starting at position 1802 of SEQ ID NO: 915651
ggugaaacuuccuuucccu

SEQ ID NO: 1095933 - RNA, 19 nt, Artificial Sequence
  Description of Artificial Sequence: Synthetic oligonucleotide
  Antisense strand to SEQ ID NO: 1095932
agggaaaggaaguuucacc

SEQ ID NO: 1095934 - RNA, 19 nt, Artificial Sequence
  Description of Artificial Sequence: Synthetic oligonucleotide
  Sense strand starting at position 2309 of SEQ ID NO: 915651
agauguuuacccgaaggua

SEQ ID NO: 1095935 - RNA, 19 nt, Artificial Sequence
  Description of Artificial Sequence: Synthetic oligonucleotide
  Antisense strand to SEQ ID NO: 1095934
uaccuucggguaaacaucu

SEQ ID NO: 1095936 - RNA, 19 nt, Artificial Sequence
  Description of Artificial Sequence: Synthetic oligonucleotide
  Sense strand starting at position 2347 of SEQ ID NO: 915651
ugacgaguugagggaauaa

SEQ ID NO: 1095937 - RNA, 19 nt, Artificial Sequence
  Description of Artificial Sequence: Synthetic oligonucleotide
  Antisense strand to SEQ ID NO: 1095936
uuauucccucaacucguca

SEQ ID NO: 1095938 - RNA, 19 nt, Artificial Sequence
  Description of Artificial Sequence: Synthetic oligonucleotide
  Sense strand starting at position 2357 of SEQ ID NO: 915651
agggaauaaucagaaagag

SEQ ID NO: 1095939 - RNA, 19 nt, Artificial Sequence
  Description of Artificial Sequence: Synthetic oligonucleotide
  Antisense strand to SEQ ID NO: 1095938
cucuuucugauuauucccu

SEQ ID NO: 1095940 - RNA, 19 nt, Artificial Sequence
  Description of Artificial Sequence: Synthetic oligonucleotide
  Sense strand starting at position 2373 of SEQ ID NO: 915651
gagagcucccucuggaagu

SEQ ID NO: 1095941 - RNA, 19 nt, Artificial Sequence
  Description of Artificial Sequence: Synthetic oligonucleotide
  Antisense strand to SEQ ID NO: 1095940
acuuccagagggagcucuc

SEQ ID NO: 1095942 - RNA, 19 nt, Artificial Sequence
  Description of Artificial Sequence: Synthetic oligonucleotide
  Sense strand starting at position 2400 of SEQ ID NO: 915651
ugaugaggcuaauccacau

SEQ ID NO: 1095943 - RNA, 19 nt, Artificial Sequence
  Description of Artificial Sequence: Synthetic oligonucleotide
  Antisense strand to SEQ ID NO: 1095942
auguggauuagccucauca

SEQ ID NO: 1095944 - RNA, 19 nt, Artificial Sequence
  Description of Artificial Sequence: Synthetic oligonucleotide
  Sense strand starting at position 2603 of SEQ ID NO: 915651
guaguaaugcuaggauaca

SEQ ID NO: 1095945 - RNA, 19 nt, Artificial Sequence
  Description of Artificial Sequence: Synthetic oligonucleotide
  Antisense strand to SEQ ID NO: 1095944
uguauccuagcauuacuac

SEQ ID NO: 1095946 - RNA, 19 nt, Artificial Sequence
  Description of Artificial Sequence: Synthetic oligonucleotide
  Sense strand starting at position 2615 of SEQ ID NO: 915651
ggauacaaaugugaagaaa

SEQ ID NO: 1095947 - RNA, 19 nt, Artificial Sequence
  Description of Artificial Sequence: Synthetic oligonucleotide
  Antisense strand to SEQ ID NO: 1095946
uuucuucacauuuguaucc

SEQ ID NO: 1095948 - RNA, 19 nt, Artificial Sequence
  Description of Artificial Sequence: Synthetic oligonucleotide
  Sense strand starting at position 2757 of SEQ ID NO: 915651
guuaaagagauacgccaau

SEQ ID NO: 1095949 - RNA, 19 nt, Artificial Sequence
  Description of Artificial Sequence: Synthetic oligonucleotide
  Antisense strand to SEQ ID NO: 1095948
auuggcguaucucuuuaac

SEQ ID NO: 1095950 - RNA, 19 nt, Artificial Sequence
  Description of Artificial Sequence: Synthetic oligonucleotide
  Sense strand starting at position 2819 of SEQ ID NO: 915651
ccagauuacugaguuaggu

SEQ ID NO: 1095951 - RNA, 19 nt, Artificial Sequence
  Description of Artificial Sequence: Synthetic oligonucleotide
  Antisense strand to SEQ ID NO: 1095950
accuaacucaguaaucugg

SEQ ID NO: 1095952 - RNA, 19 nt, Artificial Sequence
  Description of Artificial Sequence: Synthetic oligonucleotide
  Sense strand starting at position 2838 of SEQ ID NO: 915651
uaaagaaugccugaggugu

SEQ ID NO: 1095953 - RNA, 19 nt, Artificial Sequence
  Description of Artificial Sequence: Synthetic oligonucleotide
  Antisense strand to SEQ ID NO: 1095952
acaccucaggcauucuuua

SEQ ID NO: 1095954 - RNA, 19 nt, Artificial Sequence
  Description of Artificial Sequence: Synthetic oligonucleotide
  Sense strand starting at position 2968 of SEQ ID NO: 915651
uguuaaguagcuuaccuau

SEQ ID NO: 1095955 - RNA, 19 nt, Artificial Sequence
  Description of Artificial Sequence: Synthetic oligonucleotide
  Antisense strand to SEQ ID NO: 1095954
auagguaagcuacuuaaca

SEQ ID NO: 1095956 - RNA, 19 nt, Artificial Sequence
  Description of Artificial Sequence: Synthetic oligonucleotide
  Sense strand starting at position 2977 of SEQ ID NO: 915651
gcuuaccuauggucauuua

SEQ ID NO: 1095957 - RNA, 19 nt, Artificial Sequence
  Description of Artificial Sequence: Synthetic oligonucleotide
  Antisense strand to SEQ ID NO: 1095956
uaaaugaccauagguaagc

SEQ ID NO: 1095958 - RNA, 19 nt, Artificial Sequence
  Description of Artificial Sequence: Synthetic oligonucleotide
  Sense strand starting at position 2984 of SEQ ID NO: 915651
uauggucauuuagaaaguu

SEQ ID NO: 1095959 - RNA, 19 nt, Artificial Sequence
  Description of Artificial Sequence: Synthetic oligonucleotide
  Antisense strand to SEQ ID NO: 1095958
aacuuucuaaaugaccaua

SEQ ID NO: 1095960 - RNA, 19 nt, Artificial Sequence
  Description of Artificial Sequence: Synthetic oligonucleotide
  Sense strand starting at position 3024 of SEQ ID NO: 915651
gguucuuaugaucauccua

SEQ ID NO: 1095961 - RNA, 19 nt, Artificial Sequence
  Description of Artificial Sequence: Synthetic oligonucleotide
  Antisense strand to SEQ ID NO: 1095960
uaggaugaucauaagaacc

SEQ ID NO: 1095962 - RNA, 19 nt, Artificial Sequence
  Description of Artificial Sequence: Synthetic oligonucleotide
  Sense strand starting at position 3279 of SEQ ID NO: 915651
uguccaacuuugucaaaug

SEQ ID NO: 1095963 - RNA, 19 nt, Artificial Sequence
  Description of Artificial Sequence: Synthetic oligonucleotide
  Antisense strand to SEQ ID NO: 1095962
cauuugacaaaguuggaca

SEQ ID NO: 1095964 - RNA, 19 nt, Artificial Sequence
  Description of Artificial Sequence: Synthetic oligonucleotide
  Sense strand starting at position 3328 of SEQ ID NO: 915651
ugccauuaugguugaauga

SEQ ID NO: 1095965 - RNA, 19 nt, Artificial Sequence
  Description of Artificial Sequence: Synthetic oligonucleotide
  Antisense strand to SEQ ID NO: 1095964
ucauucaaccauaauggca

SEQ ID NO: 1095966 - RNA, 19 nt, Artificial Sequence
  Description of Artificial Sequence: Synthetic oligonucleotide
  Sense strand starting at position 3329 of SEQ ID NO: 915651
gccauuaugguugaaugau

SEQ ID NO: 1095967 - RNA, 19 nt, Artificial Sequence
  Description of Artificial Sequence: Synthetic oligonucleotide
  Antisense strand to SEQ ID NO: 1095966
aucauucaaccauaauggc

SEQ ID NO: 1095968 - RNA, 19 nt, Artificial Sequence
  Description of Artificial Sequence: Synthetic oligonucleotide
  Sense strand starting at position 3759 of SEQ ID NO: 915651
ccaagacuggcuuaauucu

SEQ ID NO: 1095969 - RNA, 19 nt, Artificial Sequence
  Description of Artificial Sequence: Synthetic oligonucleotide
  Antisense strand to SEQ ID NO: 1095968
agaauuaagccagucuugg

SEQ ID NO: 1095970 - RNA, 19 nt, Artificial Sequence
  Description of Artificial Sequence: Synthetic oligonucleotide
  Sense strand starting at position 3767 of SEQ ID NO: 915651
ggcuuaauucuguagcaau

SEQ ID NO: 1095971 - RNA, 19 nt, Artificial Sequence
  Description of Artificial Sequence: Synthetic oligonucleotide
  Antisense strand to SEQ ID NO: 1095970
auugcuacagaauuaagcc

SEQ ID NO: 1095972 - RNA, 19 nt, Artificial Sequence
  Description of Artificial Sequence: Synthetic oligonucleotide
  Sense strand starting at position 3814 of SEQ ID NO: 915651
uuggaucugucuucuaauc

SEQ ID NO: 1095973 - RNA, 19 nt, Artificial Sequence
  Description of Artificial Sequence: Synthetic oligonucleotide
  Antisense strand to SEQ ID NO: 1095972
gauuagaagacagauccaa

SEQ ID NO: 1095974 - RNA, 19 nt, Artificial Sequence
  Description of Artificial Sequence: Synthetic oligonucleotide
  Sense strand starting at position 3834 of SEQ ID NO: 915651
auauguaggcauugagaua

SEQ ID NO: 1095975 - RNA, 19 nt, Artificial Sequence
  Description of Artificial Sequence: Synthetic oligonucleotide
  Antisense strand to SEQ ID NO: 1095974
uaucucaaugccuacauau

SEQ ID NO: 1095976 - RNA, 19 nt, Artificial Sequence
  Description of Artificial Sequence: Synthetic oligonucleotide
  Sense strand starting at position 3902 of SEQ ID NO: 915651
agagauagcuucucucaac

SEQ ID NO: 1095977 - RNA, 19 nt, Artificial Sequence
  Description of Artificial Sequence: Synthetic oligonucleotide
  Antisense strand to SEQ ID NO: 1095976
guugagagaagcuaucucu

SEQ ID NO: 1095978 - RNA, 19 nt, Artificial Sequence
  Description of Artificial Sequence: Synthetic oligonucleotide
  Sense strand starting at position 3955 of SEQ ID NO: 915651
aguuauauccuauauguac

SEQ ID NO: 1095979 - RNA, 19 nt, Artificial Sequence
  Description of Artificial Sequence: Synthetic oligonucleotide
  Antisense strand to SEQ ID NO: 1095978
guacauauaggauauaacu

SEQ ID NO: 1095980 - RNA, 19 nt, Artificial Sequence
  Description of Artificial Sequence: Synthetic oligonucleotide
  Sense strand starting at position 77 of SEQ ID NO: 915652
cuaucaaguagugguaaga

SEQ ID NO: 1095981 - RNA, 19 nt, Artificial Sequence
  Description of Artificial Sequence: Synthetic oligonucleotide
  Antisense strand to SEQ ID NO: 1095980
ucuuaccacuacuugauag

SEQ ID NO: 1095982 - RNA, 19 nt, Artificial Sequence
  Description of Artificial Sequence: Synthetic oligonucleotide
  Sense strand starting at position 128 of SEQ ID NO: 915652
uggagaaguguuuggccau

SEQ ID NO: 1095983 - RNA, 19 nt, Artificial Sequence
  Description of Artificial Sequence: Synthetic oligonucleotide
  Antisense strand to SEQ ID NO: 1095982
auggccaaacacuucucca

SEQ ID NO: 1095984 - RNA, 19 nt, Artificial Sequence
  Description of Artificial Sequence: Synthetic oligonucleotide
  Sense strand starting at position 131 of SEQ ID NO: 915652
agaaguguuuggccauaga

SEQ ID NO: 1095985 - RNA, 19 nt, Artificial Sequence
  Description of Artificial Sequence: Synthetic oligonucleotide
  Antisense strand to SEQ ID NO: 1095984
ucuauggccaaacacuucu

SEQ ID NO: 1095986 - RNA, 19 nt, Artificial Sequence
  Description of Artificial Sequence: Synthetic oligonucleotide
  Sense strand starting at position 134 of SEQ ID NO: 915652
aguguuuggccauagacua

SEQ ID NO: 1095987 - RNA, 19 nt, Artificial Sequence
  Description of Artificial Sequence: Synthetic oligonucleotide
  Antisense strand to SEQ ID NO: 1095986
uagucuauggccaaacacu

SEQ ID NO: 1095988 - RNA, 19 nt, Artificial Sequence
  Description of Artificial Sequence: Synthetic oligonucleotide
  Sense strand starting at position 516 of SEQ ID NO: 915652
gcuuacagauguuuaccaa

SEQ ID NO: 1095989 - RNA, 19 nt, Artificial Sequence
  Description of Artificial Sequence: Synthetic oligonucleotide
  Antisense strand to SEQ ID NO: 1095988
uugguaaacaucuguaagc

SEQ ID NO: 1095990 - RNA, 19 nt, Artificial Sequence
  Description of Artificial Sequence: Synthetic oligonucleotide
  Sense strand starting at position 544 of SEQ ID NO: 915652
acaagaaugucuguagcag

SEQ ID NO: 1095991 - RNA, 19 nt, Artificial Sequence
  Description of Artificial Sequence: Synthetic oligonucleotide
  Antisense strand to SEQ ID NO: 1095990
cugcuacagacauucuugu

SEQ ID NO: 1095992 - RNA, 19 nt, Artificial Sequence
  Description of Artificial Sequence: Synthetic oligonucleotide
  Sense strand starting at position 584 of SEQ ID NO: 915652
aguggaaacgacuguccau

SEQ ID NO: 1095993 - RNA, 19 nt, Artificial Sequence
  Description of Artificial Sequence: Synthetic oligonucleotide
  Antisense strand to SEQ ID NO: 1095992
auggacagucguuuccacu

SEQ ID NO: 1095994 - RNA, 19 nt, Artificial Sequence
  Description of Artificial Sequence: Synthetic oligonucleotide
  Sense strand starting at position 605 of SEQ ID NO: 915652
acccguguccaguagaaug

SEQ ID NO: 1095995 - RNA, 19 nt, Artificial Sequence
  Description of Artificial Sequence: Synthetic oligonucleotide
  Antisense strand to SEQ ID NO: 1095994
cauucuacuggacacgggu

SEQ ID NO: 1095996 - RNA, 19 nt, Artificial Sequence
  Description of Artificial Sequence: Synthetic oligonucleotide
  Sense strand starting at position 610 of SEQ ID NO: 915652
uguccaguagaauggauaa

SEQ ID NO: 1095997 - RNA, 19 nt, Artificial Sequence
  Description of Artificial Sequence: Synthetic oligonucleotide
  Antisense strand to SEQ ID NO: 1095996
uuauccauucuacuggaca

SEQ ID NO: 1095998 - RNA, 19 nt, Artificial Sequence
  Description of Artificial Sequence: Synthetic oligonucleotide
  Sense strand starting at position 630 of SEQ ID NO: 915652
uaaauuguggucuagccau

SEQ ID NO: 1095999 - RNA, 19 nt, Artificial Sequence
  Description of Artificial Sequence: Synthetic oligonucleotide
  Antisense strand to SEQ ID NO: 1095998
auggcuagaccacaauuua

SEQ ID NO: 1096000 - RNA, 19 nt, Artificial Sequence
  Description of Artificial Sequence: Synthetic oligonucleotide
  Sense strand starting at position 717 of SEQ ID NO: 915652
cugaaugucagacgucaca

SEQ ID NO: 1096001 - RNA, 19 nt, Artificial Sequence
  Description of Artificial Sequence: Synthetic oligonucleotide
  Antisense strand to SEQ ID NO: 1096000
ugugacgucugacauucag

SEQ ID NO: 1096002 - RNA, 19 nt, Artificial Sequence
  Description of Artificial Sequence: Synthetic oligonucleotide
  Sense strand starting at position 726 of SEQ ID NO: 915652
agacgucacacacguaaga

SEQ ID NO: 1096003 - RNA, 19 nt, Artificial Sequence
  Description of Artificial Sequence: Synthetic oligonucleotide
  Antisense strand to SEQ ID NO: 1096002
ucuuacgugugugacgucu

SEQ ID NO: 1096004 - RNA, 19 nt, Artificial Sequence
  Description of Artificial Sequence: Synthetic oligonucleotide
  Sense strand starting at position 728 of SEQ ID NO: 915652
acgucacacacguaagagu

SEQ ID NO: 1096005 - RNA, 19 nt, Artificial Sequence
  Description of Artificial Sequence: Synthetic oligonucleotide
  Antisense strand to SEQ ID NO: 1096004
acucuuacgugugugacgu

SEQ ID NO: 1096006 - RNA, 19 nt, Artificial Sequence
  Description of Artificial Sequence: Synthetic oligonucleotide
  Sense strand starting at position 1117 of SEQ ID NO: 915652
guuagaagccagggaugua

SEQ ID NO: 1096007 - RNA, 19 nt, Artificial Sequence
  Description of Artificial Sequence: Synthetic oligonucleotide
  Antisense strand to SEQ ID NO: 1096006
uacaucccuggcuucuaac

SEQ ID NO: 1096008 - RNA, 19 nt, Artificial Sequence
  Description of Artificial Sequence: Synthetic oligonucleotide
  Sense strand starting at position 1126 of SEQ ID NO: 915652
cagggauguagucauguuu

SEQ ID NO: 1096009 - RNA, 19 nt, Artificial Sequence
  Description of Artificial Sequence: Synthetic oligonucleotide
  Antisense strand to SEQ ID NO: 1096008
aaacaugacuacaucccug

SEQ ID NO: 1096010 - RNA, 19 nt, Artificial Sequence
  Description of Artificial Sequence: Synthetic oligonucleotide
  Sense strand starting at position 1143 of SEQ ID NO: 915652
uuuauugauugcucugaau

SEQ ID NO: 1096011 - RNA, 19 nt, Artificial Sequence
  Description of Artificial Sequence: Synthetic oligonucleotide
  Antisense strand to SEQ ID NO: 1096010
auucagagcaaucaauaaa

SEQ ID NO: 1096012 - RNA, 19 nt, Artificial Sequence
  Description of Artificial Sequence: Synthetic oligonucleotide
  Sense strand starting at position 1186 of SEQ ID NO: 915652
augguugagcuguacacuu

SEQ ID NO: 1096013 - RNA, 19 nt, Artificial Sequence
  Description of Artificial Sequence: Synthetic oligonucleotide
  Antisense strand to SEQ ID NO: 1096012
aaguguacagcucaaccau

SEQ ID NO: 1096014 - RNA, 19 nt, Artificial Sequence
  Description of Artificial Sequence: Synthetic oligonucleotide
  Sense strand starting at position 1203 of SEQ ID NO: 915652
uuaggauuugugugccuac

SEQ ID NO: 1096015 - RNA, 19 nt, Artificial Sequence
  Description of Artificial Sequence: Synthetic oligonucleotide
  Antisense strand to SEQ ID NO: 1096014
guaggcacacaaauccuaa

SEQ ID NO: 1096016 - RNA, 19 nt, Artificial Sequence
  Description of Artificial Sequence: Synthetic oligonucleotide
  Sense strand starting at position 1206 of SEQ ID NO: 915652
ggauuugugugccuacgua

SEQ ID NO: 1096017 - RNA, 19 nt, Artificial Sequence
  Description of Artificial Sequence: Synthetic oligonucleotide
  Antisense strand to SEQ ID NO: 1096016
uacguaggcacacaaaucc

SEQ ID NO: 1096018 - RNA, 19 nt, Artificial Sequence
  Description of Artificial Sequence: Synthetic oligonucleotide
  Sense strand starting at position 1263 of SEQ ID NO: 915652
cccucugagucauuccuga

SEQ ID NO: 1096019 - RNA, 19 nt, Artificial Sequence
  Description of Artificial Sequence: Synthetic oligonucleotide
  Antisense strand to SEQ ID NO: 1096018
ucaggaaugacucagaggg

SEQ ID NO: 1096020 - RNA, 19 nt, Artificial Sequence
  Description of Artificial Sequence: Synthetic oligonucleotide
  Sense strand starting at position 1311 of SEQ ID NO: 915652
acgggaguucuccacacuu

SEQ ID NO: 1096021 - RNA, 19 nt, Artificial Sequence
  Description of Artificial Sequence: Synthetic oligonucleotide
  Antisense strand to SEQ ID NO: 1096020
aaguguggagaacucccgu

SEQ ID NO: 1096022 - RNA, 19 nt, Artificial Sequence
  Description of Artificial Sequence: Synthetic oligonucleotide
  Sense strand starting at position 1747 of SEQ ID NO: 915652
gugccagaaaggugaagaa

SEQ ID NO: 1096023 - RNA, 19 nt, Artificial Sequence
  Description of Artificial Sequence: Synthetic oligonucleotide
  Antisense strand to SEQ ID NO: 1096022
uucuucaccuuucuggcac

SEQ ID NO: 1096024 - RNA, 19 nt, Artificial Sequence
  Description of Artificial Sequence: Synthetic oligonucleotide
  Sense strand starting at position 2521 of SEQ ID NO: 915652
gucccagacacugguugau

SEQ ID NO: 1096025 - RNA, 19 nt, Artificial Sequence
  Description of Artificial Sequence: Synthetic oligonucleotide
  Antisense strand to SEQ ID NO: 1096024
aucaaccagugucugggac

SEQ ID NO: 1096026 - RNA, 19 nt, Artificial Sequence
  Description of Artificial Sequence: Synthetic oligonucleotide
  Sense strand starting at position 2604 of SEQ ID NO: 915652
ccacaugggcguuaugaac

SEQ ID NO: 1096027 - RNA, 19 nt, Artificial Sequence
  Description of Artificial Sequence: Synthetic oligonucleotide
  Antisense strand to SEQ ID NO: 1096026
guucauaacgcccaugugg

SEQ ID NO: 1096028 - RNA, 19 nt, Artificial Sequence
  Description of Artificial Sequence: Synthetic oligonucleotide
  Sense strand starting at position 2675 of SEQ ID NO: 915652
gcuggaaguccugggugaa

SEQ ID NO: 1096029 - RNA, 19 nt, Artificial Sequence
  Description of Artificial Sequence: Synthetic oligonucleotide
  Antisense strand to SEQ ID NO: 1096028
uucacccaggacuuccagc

SEQ ID NO: 1096030 - RNA, 19 nt, Artificial Sequence
  Description of Artificial Sequence: Synthetic oligonucleotide
  Sense strand starting at position 2676 of SEQ ID NO: 915652
cuggaaguccugggugaaa

SEQ ID NO: 1096031 - RNA, 19 nt, Artificial Sequence
  Description of Artificial Sequence: Synthetic oligonucleotide
  Antisense strand to SEQ ID NO: 1096030
uuucacccaggacuuccag

SEQ ID NO: 1096032 - RNA, 19 nt, Artificial Sequence
  Description of Artificial Sequence: Synthetic oligonucleotide
  Sense strand starting at position 2678 of SEQ ID NO: 915652
ggaaguccugggugaaaga

SEQ ID NO: 1096033 - RNA, 19 nt, Artificial Sequence
  Description of Artificial Sequence: Synthetic oligonucleotide
  Antisense strand to SEQ ID NO: 1096032
ucuuucacccaggacuucc

SEQ ID NO: 1096034 - RNA, 19 nt, Artificial Sequence
  Description of Artificial Sequence: Synthetic oligonucleotide
  Sense strand starting at position 2687 of SEQ ID NO: 915652
gggugaaagagaugccuuu

SEQ ID NO: 1096035 - RNA, 19 nt, Artificial Sequence
  Description of Artificial Sequence: Synthetic oligonucleotide
  Antisense strand to SEQ ID NO: 1096034
aaaggcaucucuuucaccc

SEQ ID NO: 1096036 - RNA, 19 nt, Artificial Sequence
  Description of Artificial Sequence: Synthetic oligonucleotide
  Sense strand starting at position 2733 of SEQ ID NO: 915652
uguucgugagcgcugugaa

SEQ ID NO: 1096037 - RNA, 19 nt, Artificial Sequence
  Description of Artificial Sequence: Synthetic oligonucleotide
  Antisense strand to SEQ ID NO: 1096036
uucacagcgcucacgaaca

SEQ ID NO: 1096038 - RNA, 19 nt, Artificial Sequence
  Description of Artificial Sequence: Synthetic oligonucleotide
  Sense strand starting at position 2803 of SEQ ID NO: 915652
aagaaaugugaaugucuuc

SEQ ID NO: 1096039 - RNA, 19 nt, Artificial Sequence
  Description of Artificial Sequence: Synthetic oligonucleotide
  Antisense strand to SEQ ID NO: 1096038
gaagacauucacauuucuu

SEQ ID NO: 1096040 - RNA, 19 nt, Artificial Sequence
  Description of Artificial Sequence: Synthetic oligonucleotide
  Sense strand starting at position 2808 of SEQ ID NO: 915652
augugaaugucuuccugag

SEQ ID NO: 1096041 - RNA, 19 nt, Artificial Sequence
  Description of Artificial Sequence: Synthetic oligonucleotide
  Antisense strand to SEQ ID NO: 1096040
cucaggaagacauucacau

SEQ ID NO: 1096042 - RNA, 19 nt, Artificial Sequence
  Description of Artificial Sequence: Synthetic oligonucleotide
  Sense strand starting at position 2869 of SEQ ID NO: 915652
aaacuaugugcacgaaaug

SEQ ID NO: 1096043 - RNA, 19 nt, Artificial Sequence
  Description of Artificial Sequence: Synthetic oligonucleotide
  Antisense strand to SEQ ID NO: 1096042
cauuucgugcacauaguuu

SEQ ID NO: 1096044 - RNA, 19 nt, Artificial Sequence
  Description of Artificial Sequence: Synthetic oligonucleotide
  Sense strand starting at position 2904 of SEQ ID NO: 915652
guuuaauuaggccauguaa

SEQ ID NO: 1096045 - RNA, 19 nt, Artificial Sequence
  Description of Artificial Sequence: Synthetic oligonucleotide
  Antisense strand to SEQ ID NO: 1096044
uuacauggccuaauuaaac

SEQ ID NO: 1096046 - RNA, 19 nt, Artificial Sequence
  Description of Artificial Sequence: Synthetic oligonucleotide
  Sense strand starting at position 2906 of SEQ ID NO: 915652
uuaauuaggccauguaaga

SEQ ID NO: 1096047 - RNA, 19 nt, Artificial Sequence
  Description of Artificial Sequence: Synthetic oligonucleotide
  Antisense strand to SEQ ID NO: 1096046
ucuuacauggccuaauuaa

SEQ ID NO: 1096048 - RNA, 19 nt, Artificial Sequence
  Description of Artificial Sequence: Synthetic oligonucleotide
  Sense strand starting at position 3067 of SEQ ID NO: 915652
ggugaagucacgcaacuuu

SEQ ID NO: 1096049 - RNA, 19 nt, Artificial Sequence
  Description of Artificial Sequence: Synthetic oligonucleotide
  Antisense strand to SEQ ID NO: 1096048
aaaguugcgugacuucacc

SEQ ID NO: 1096050 - RNA, 19 nt, Artificial Sequence
  Description of Artificial Sequence: Synthetic oligonucleotide
  Sense strand starting at position 3130 of SEQ ID NO: 915652
uguucuugcaaggauuagu

SEQ ID NO: 1096051 - RNA, 19 nt, Artificial Sequence
  Description of Artificial Sequence: Synthetic oligonucleotide
  Antisense strand to SEQ ID NO: 1096050
acuaauccuugcaagaaca

SEQ ID NO: 1096052 - RNA, 19 nt, Artificial Sequence
  Description of Artificial Sequence: Synthetic oligonucleotide
  Sense strand starting at position 3133 of SEQ ID NO: 915652
ucuugcaaggauuagucua

SEQ ID NO: 1096053 - RNA, 19 nt, Artificial Sequence
  Description of Artificial Sequence: Synthetic oligonucleotide
  Antisense strand to SEQ ID NO: 1096052
uagacuaauccuugcaaga

SEQ ID NO: 1096054 - RNA, 19 nt, Artificial Sequence
  Description of Artificial Sequence: Synthetic oligonucleotide
  Sense strand starting at position 3196 of SEQ ID NO: 915652
uugcuuugacucuaccuga

SEQ ID NO: 1096055 - RNA, 19 nt, Artificial Sequence
  Description of Artificial Sequence: Synthetic oligonucleotide
  Antisense strand to SEQ ID NO: 1096054
ucagguagagucaaagcaa

SEQ ID NO: 1096056 - RNA, 19 nt, Artificial Sequence
  Description of Artificial Sequence: Synthetic oligonucleotide
  Sense strand starting at position 3401 of SEQ ID NO: 915652
cagucaucuugcuuaugag

SEQ ID NO: 1096057 - RNA, 19 nt, Artificial Sequence
  Description of Artificial Sequence: Synthetic oligonucleotide
  Antisense strand to SEQ ID NO: 1096056
cucauaagcaagaugacug

SEQ ID NO: 1096058 - RNA, 19 nt, Artificial Sequence
  Description of Artificial Sequence: Synthetic oligonucleotide
  Sense strand starting at position 3455 of SEQ ID NO: 915652
ucaggaaagcuuugcuuaa

SEQ ID NO: 1096059 - RNA, 19 nt, Artificial Sequence
  Description of Artificial Sequence: Synthetic oligonucleotide
  Antisense strand to SEQ ID NO: 1096058
uuaagcaaagcuuuccuga

SEQ ID NO: 1096060 - RNA, 19 nt, Artificial Sequence
  Description of Artificial Sequence: Synthetic oligonucleotide
  Sense strand starting at position 30 of SEQ ID NO: 915653
uucugucuuucccaccaga

SEQ ID NO: 1096061 - RNA, 19 nt, Artificial Sequence
  Description of Artificial Sequence: Synthetic oligonucleotide
  Antisense strand to SEQ ID NO: 1096060
ucuggugggaaagacagaa

SEQ ID NO: 1096062 - RNA, 19 nt, Artificial Sequence
  Description of Artificial Sequence: Synthetic oligonucleotide
  Sense strand starting at position 51 of SEQ ID NO: 915653
guaggcucucugcagcaaa

SEQ ID NO: 1096063 - RNA, 19 nt, Artificial Sequence
  Description of Artificial Sequence: Synthetic oligonucleotide
  Antisense strand to SEQ ID NO: 1096062
uuugcugcagagagccuac

SEQ ID NO: 1096064 - RNA, 19 nt, Artificial Sequence
  Description of Artificial Sequence: Synthetic oligonucleotide
  Sense strand starting at position 127 of SEQ ID NO: 915653
ugaacaaauguuuguggaa

SEQ ID NO: 1096065 - RNA, 19 nt, Artificial Sequence
  Description of Artificial Sequence: Synthetic oligonucleotide
  Antisense strand to SEQ ID NO: 1096064
uuccacaaacauuuguuca

SEQ ID NO: 1096066 - RNA, 19 nt, Artificial Sequence
  Description of Artificial Sequence: Synthetic oligonucleotide
  Sense strand starting at position 128 of SEQ ID NO: 915653
gaacaaauguuuguggaau

SEQ ID NO: 1096067 - RNA, 19 nt, Artificial Sequence
  Description of Artificial Sequence: Synthetic oligonucleotide
  Antisense strand to SEQ ID NO: 1096066
auuccacaaacauuuguuc

SEQ ID NO: 1096068 - RNA, 19 nt, Artificial Sequence
  Description of Artificial Sequence: Synthetic oligonucleotide
  Sense strand starting at position 130 of SEQ ID NO: 915653
acaaauguuuguggaauau

SEQ ID NO: 1096069 - RNA, 19 nt, Artificial Sequence
  Description of Artificial Sequence: Synthetic oligonucleotide
  Antisense strand to SEQ ID NO: 1096068
auauuccacaaacauuugu

SEQ ID NO: 1096070 - RNA, 19 nt, Artificial Sequence
  Description of Artificial Sequence: Synthetic oligonucleotide
  Sense strand starting at position 140 of SEQ ID NO: 915653
guggaauaugaaugguuaa

SEQ ID NO: 1096071 - RNA, 19 nt, Artificial Sequence
  Description of Artificial Sequence: Synthetic oligonucleotide
  Antisense strand to SEQ ID NO: 1096070
uuaaccauucauauuccac

SEQ ID NO: 1096072 - RNA, 19 nt, Artificial Sequence
  Description of Artificial Sequence: Synthetic oligonucleotide
  Sense strand starting at position 152 of SEQ ID NO: 915653
ugguuaaugacucgcaucu

SEQ ID NO: 1096073 - RNA, 19 nt, Artificial Sequence
  Description of Artificial Sequence: Synthetic oligonucleotide
  Antisense strand to SEQ ID NO: 1096072
agaugcgagucauuaacca

SEQ ID NO: 1096074 - RNA, 19 nt, Artificial Sequence
  Description of Artificial Sequence: Synthetic oligonucleotide
  Sense strand starting at position 355 of SEQ ID NO: 915653
aucggauugccuggagaau

SEQ ID NO: 1096075 - RNA, 19 nt, Artificial Sequence
  Description of Artificial Sequence: Synthetic oligonucleotide
  Antisense strand to SEQ ID NO: 1096074
auucuccaggcaauccgau

SEQ ID NO: 1096076 - RNA, 19 nt, Artificial Sequence
  Description of Artificial Sequence: Synthetic oligonucleotide
  Sense strand starting at position 356 of SEQ ID NO: 915653
ucggauugccuggagaaua

SEQ ID NO: 1096077 - RNA, 19 nt, Artificial Sequence
  Description of Artificial Sequence: Synthetic oligonucleotide
  Antisense strand to SEQ ID NO: 1096076
uauucuccaggcaauccga

SEQ ID NO: 1096078 - RNA, 19 nt, Artificial Sequence
  Description of Artificial Sequence: Synthetic oligonucleotide
  Sense strand starting at position 367 of SEQ ID NO: 915653
ggagaauauuggagaguga

SEQ ID NO: 1096079 - RNA, 19 nt, Artificial Sequence
  Description of Artificial Sequence: Synthetic oligonucleotide
  Antisense strand to SEQ ID NO: 1096078
ucacucuccaauauucucc

SEQ ID NO: 1096080 - RNA, 19 nt, Artificial Sequence
  Description of Artificial Sequence: Synthetic oligonucleotide
  Sense strand starting at position 371 of SEQ ID NO: 915653
aauauuggagagugaaugu

SEQ ID NO: 1096081 - RNA, 19 nt, Artificial Sequence
  Description of Artificial Sequence: Synthetic oligonucleotide
  Antisense strand to SEQ ID NO: 1096080
acauucacucuccaauauu

SEQ ID NO: 1096082 - RNA, 19 nt, Artificial Sequence
  Description of Artificial Sequence: Synthetic oligonucleotide
  Sense strand starting at position 856 of SEQ ID NO: 915653
gcgucuguccugggcguaa

SEQ ID NO: 1096083 - RNA, 19 nt, Artificial Sequence
  Description of Artificial Sequence: Synthetic oligonucleotide
  Antisense strand to SEQ ID NO: 1096082
uuacgcccaggacagacgc

SEQ ID NO: 1096084 - RNA, 19 nt, Artificial Sequence
  Description of Artificial Sequence: Synthetic oligonucleotide
  Sense strand starting at position 858 of SEQ ID NO: 915653
gucuguccugggcguaaca

SEQ ID NO: 1096085 - RNA, 19 nt, Artificial Sequence
  Description of Artificial Sequence: Synthetic oligonucleotide
  Antisense strand to SEQ ID NO: 1096084
uguuacgcccaggacagac

SEQ ID NO: 1096086 - RNA, 19 nt, Artificial Sequence
  Description of Artificial Sequence: Synthetic oligonucleotide
  Sense strand starting at position 1570 of SEQ ID NO: 915653
cccagucgacaccauaaau

SEQ ID NO: 1096087 - RNA, 19 nt, Artificial Sequence
  Description of Artificial Sequence: Synthetic oligonucleotide
  Antisense strand to SEQ ID NO: 1096086
auuuauggugucgacuggg

SEQ ID NO: 1096088 - RNA, 19 nt, Artificial Sequence
  Description of Artificial Sequence: Synthetic oligonucleotide
  Sense strand starting at position 2608 of SEQ ID NO: 915653
ggagacauacgauggaagu

SEQ ID NO: 1096089 - RNA, 19 nt, Artificial Sequence
  Description of Artificial Sequence: Synthetic oligonucleotide
  Antisense strand to SEQ ID NO: 1096088
acuuccaucguaugucucc

SEQ ID NO: 1096090 - RNA, 19 nt, Artificial Sequence
  Description of Artificial Sequence: Synthetic oligonucleotide
  Sense strand starting at position 2677 of SEQ ID NO: 915653
caauauuagcgccgucauc

SEQ ID NO: 1096091 - RNA, 19 nt, Artificial Sequence
  Description of Artificial Sequence: Synthetic oligonucleotide
  Antisense strand to SEQ ID NO: 1096090
gaugacggcgcuaauauug

SEQ ID NO: 1096092 - RNA, 19 nt, Artificial Sequence
  Description of Artificial Sequence: Synthetic oligonucleotide
  Sense strand starting at position 2883 of SEQ ID NO: 915653
ggacaagggcugugggauu

SEQ ID NO: 1096093 - RNA, 19 nt, Artificial Sequence
  Description of Artificial Sequence: Synthetic oligonucleotide
  Antisense strand to SEQ ID NO: 1096092
aaucccacagcccuugucc

SEQ ID NO: 1096094 - RNA, 19 nt, Artificial Sequence
  Description of Artificial Sequence: Synthetic oligonucleotide
  Sense strand starting at position 3034 of SEQ ID NO: 915653
ccgggaucccuggaagucu

SEQ ID NO: 1096095 - RNA, 19 nt, Artificial Sequence
  Description of Artificial Sequence: Synthetic oligonucleotide
  Antisense strand to SEQ ID NO: 1096094
agacuuccagggaucccgg

SEQ ID NO: 1096096 - RNA, 19 nt, Artificial Sequence
  Description of Artificial Sequence: Synthetic oligonucleotide
  Sense strand starting at position 3064 of SEQ ID NO: 915653
gaagucggaccuuguugaa

SEQ ID NO: 1096097 - RNA, 19 nt, Artificial Sequence
  Description of Artificial Sequence: Synthetic oligonucleotide
  Antisense strand to SEQ ID NO: 1096096
uucaacaagguccgacuuc

SEQ ID NO: 1096098 - RNA, 19 nt, Artificial Sequence
  Description of Artificial Sequence: Synthetic oligonucleotide
  Sense strand starting at position 3498 of SEQ ID NO: 915653
gcccgcuauuuaguaggua

SEQ ID NO: 1096099 - RNA, 19 nt, Artificial Sequence
  Description of Artificial Sequence: Synthetic oligonucleotide
  Antisense strand to SEQ ID NO: 1096098
uaccuacuaaauagcgggc

SEQ ID NO: 1096100 - RNA, 19 nt, Artificial Sequence
  Description of Artificial Sequence: Synthetic oligonucleotide
  Sense strand starting at position 3501 of SEQ ID NO: 915653
cgcuauuuaguagguacau

SEQ ID NO: 1096101 - RNA, 19 nt, Artificial Sequence
  Description of Artificial Sequence: Synthetic oligonucleotide
  Antisense strand to SEQ ID NO: 1096100
auguaccuacuaaauagcg

SEQ ID NO: 1096102 - RNA, 19 nt, Artificial Sequence
  Description of Artificial Sequence: Synthetic oligonucleotide
  Sense strand starting at position 3513 of SEQ ID NO: 915653
gguacauggucgcuauuua

SEQ ID NO: 1096103 - RNA, 19 nt, Artificial Sequence
  Description of Artificial Sequence: Synthetic oligonucleotide
  Antisense strand to SEQ ID NO: 1096102
uaaauagcgaccauguacc

SEQ ID NO: 1096104 - RNA, 19 nt, Artificial Sequence
  Description of Artificial Sequence: Synthetic oligonucleotide
  Sense strand starting at position 3514 of SEQ ID NO: 915653
guacauggucgcuauuuau

SEQ ID NO: 1096105 - RNA, 19 nt, Artificial Sequence
  Description of Artificial Sequence: Synthetic oligonucleotide
  Antisense strand to SEQ ID NO: 1096104
auaaauagcgaccauguac

SEQ ID NO: 1096106 - RNA, 19 nt, Artificial Sequence
  Description of Artificial Sequence: Synthetic oligonucleotide
  Sense strand starting at position 3517 of SEQ ID NO: 915653
cauggucgcuauuuauaga

SEQ ID NO: 1096107 - RNA, 19 nt, Artificial Sequence
  Description of Artificial Sequence: Synthetic oligonucleotide
  Antisense strand to SEQ ID NO: 1096106
ucuauaaauagcgaccaug

SEQ ID NO: 1096108 - RNA, 19 nt, Artificial Sequence
  Description of Artificial Sequence: Synthetic oligonucleotide
  Sense strand starting at position 3560 of SEQ ID NO: 915653
gauacaagaguuggucuga

SEQ ID NO: 1096109 - RNA, 19 nt, Artificial Sequence
  Description of Artificial Sequence: Synthetic oligonucleotide
  Antisense strand to SEQ ID NO: 1096108
ucagaccaacucuuguauc

SEQ ID NO: 1096110 - RNA, 19 nt, Artificial Sequence
  Description of Artificial Sequence: Synthetic oligonucleotide
  Sense strand starting at position 3565 of SEQ ID NO: 915653
aagaguuggucugaggucu

SEQ ID NO: 1096111 - RNA, 19 nt, Artificial Sequence
  Description of Artificial Sequence: Synthetic oligonucleotide
  Antisense strand to SEQ ID NO: 1096110
agaccucagaccaacucuu

SEQ ID NO: 1096112 - RNA, 19 nt, Artificial Sequence
  Description of Artificial Sequence: Synthetic oligonucleotide
  Sense strand starting at position 3571 of SEQ ID NO: 915653
uggucugaggucuaaucuu

SEQ ID NO: 1096113 - RNA, 19 nt, Artificial Sequence
  Description of Artificial Sequence: Synthetic oligonucleotide
  Antisense strand to SEQ ID NO: 1096112
aagauuagaccucagacca

SEQ ID NO: 1096114 - RNA, 19 nt, Artificial Sequence
  Description of Artificial Sequence: Synthetic oligonucleotide
  Sense strand starting at position 3610 of SEQ ID NO: 915653
cccugacuuccuggguaac

SEQ ID NO: 1096115 - RNA, 19 nt, Artificial Sequence
  Description of Artificial Sequence: Synthetic oligonucleotide
  Antisense strand to SEQ ID NO: 1096114
guuacccaggaagucaggg

SEQ ID NO: 1096116 - RNA, 19 nt, Artificial Sequence
  Description of Artificial Sequence: Synthetic oligonucleotide
  Sense strand starting at position 3637 of SEQ ID NO: 915653
ucugcuucuccacagguaa

SEQ ID NO: 1096117 - RNA, 19 nt, Artificial Sequence
  Description of Artificial Sequence: Synthetic oligonucleotide
  Antisense strand to SEQ ID NO: 1096116
uuaccuguggagaagcaga

SEQ ID NO: 1096118 - RNA, 19 nt, Artificial Sequence
  Description of Artificial Sequence: Synthetic oligonucleotide
  Sense strand starting at position 3661 of SEQ ID NO: 915653
gggcgaagaugucauaauc

SEQ ID NO: 1096119 - RNA, 19 nt, Artificial Sequence
  Description of Artificial Sequence: Synthetic oligonucleotide
  Antisense strand to SEQ ID NO: 1096118
gauuaugacaucuucgccc

SEQ ID NO: 1096120 - RNA, 19 nt, Artificial Sequence
  Description of Artificial Sequence: Synthetic oligonucleotide
  Sense strand starting at position 3670 of SEQ ID NO: 915653
ugucauaauccugggcuga

SEQ ID NO: 1096121 - RNA, 19 nt, Artificial Sequence
  Description of Artificial Sequence: Synthetic oligonucleotide
  Antisense strand to SEQ ID NO: 1096120
ucagcccaggauuaugaca

SEQ ID NO: 1096122 - RNA, 19 nt, Artificial Sequence
  Description of Artificial Sequence: Synthetic oligonucleotide
  Sense strand starting at position 3671 of SEQ ID NO: 915653
gucauaauccugggcugag

SEQ ID NO: 1096123 - RNA, 19 nt, Artificial Sequence
  Description of Artificial Sequence: Synthetic oligonucleotide
  Antisense strand to SEQ ID NO: 1096122
cucagcccaggauuaugac

SEQ ID NO: 1096124 - RNA, 19 nt, Artificial Sequence
  Description of Artificial Sequence: Synthetic oligonucleotide
  Sense strand starting at position 3672 of SEQ ID NO: 915653
ucauaauccugggcugaga

SEQ ID NO: 1096125 - RNA, 19 nt, Artificial Sequence
  Description of Artificial Sequence: Synthetic oligonucleotide
  Antisense strand to SEQ ID NO: 1096124
ucucagcccaggauuauga

SEQ ID NO: 1096126 - RNA, 19 nt, Artificial Sequence
  Description of Artificial Sequence: Synthetic oligonucleotide
  Sense strand starting at position 3692 of SEQ ID NO: 915653
ggaacaagaccguggacau

SEQ ID NO: 1096127 - RNA, 19 nt, Artificial Sequence
  Description of Artificial Sequence: Synthetic oligonucleotide
  Antisense strand to SEQ ID NO: 1096126
auguccacggucuuguucc

SEQ ID NO: 1096128 - RNA, 19 nt, Artificial Sequence
  Description of Artificial Sequence: Synthetic oligonucleotide
  Sense strand starting at position 3693 of SEQ ID NO: 915653
gaacaagaccguggacaua

SEQ ID NO: 1096129 - RNA, 19 nt, Artificial Sequence
  Description of Artificial Sequence: Synthetic oligonucleotide
  Antisense strand to SEQ ID NO: 1096128
uauguccacggucuuguuc

SEQ ID NO: 1096130 - RNA, 19 nt, Artificial Sequence
  Description of Artificial Sequence: Synthetic oligonucleotide
  Sense strand starting at position 65 of SEQ ID NO: 915654
cuuauuguguuagugagaa

SEQ ID NO: 1096131 - RNA, 19 nt, Artificial Sequence
  Description of Artificial Sequence: Synthetic oligonucleotide
  Antisense strand to SEQ ID NO: 1096130
uucucacuaacacaauaag

SEQ ID NO: 1096132 - RNA, 19 nt, Artificial Sequence
  Description of Artificial Sequence: Synthetic oligonucleotide
  Sense strand starting at position 418 of SEQ ID NO: 915654
uugcaaagcuccucaggaa

SEQ ID NO: 1096133 - RNA, 19 nt, Artificial Sequence
  Description of Artificial Sequence: Synthetic oligonucleotide
  Antisense strand to SEQ ID NO: 1096132
uuccugaggagcuuugcaa

SEQ ID NO: 1096134 - RNA, 19 nt, Artificial Sequence
  Description of Artificial Sequence: Synthetic oligonucleotide
  Sense strand starting at position 419 of SEQ ID NO: 915654
ugcaaagcuccucaggaau

SEQ ID NO: 1096135 - RNA, 19 nt, Artificial Sequence
  Description of Artificial Sequence: Synthetic oligonucleotide
  Antisense strand to SEQ ID NO: 1096134
auuccugaggagcuuugca

SEQ ID NO: 1096136 - RNA, 19 nt, Artificial Sequence
  Description of Artificial Sequence: Synthetic oligonucleotide
  Sense strand starting at position 631 of SEQ ID NO: 915654
aguugcuguaaggaguuaa

SEQ ID NO: 1096137 - RNA, 19 nt, Artificial Sequence
  Description of Artificial Sequence: Synthetic oligonucleotide
  Antisense strand to SEQ ID NO: 1096136
uuaacuccuuacagcaacu

SEQ ID NO: 1096138 - RNA, 19 nt, Artificial Sequence
  Description of Artificial Sequence: Synthetic oligonucleotide
  Sense strand starting at position 635 of SEQ ID NO: 915654
gcuguaaggaguuaagaua

SEQ ID NO: 1096139 - RNA, 19 nt, Artificial Sequence
  Description of Artificial Sequence: Synthetic oligonucleotide
  Antisense strand to SEQ ID NO: 1096138
uaucuuaacuccuuacagc

SEQ ID NO: 1096140 - RNA, 19 nt, Artificial Sequence
  Description of Artificial Sequence: Synthetic oligonucleotide
  Sense strand starting at position 658 of SEQ ID NO: 915654
ugcagcaagcgcuuuguaa

SEQ ID NO: 1096141 - RNA, 19 nt, Artificial Sequence
  Description of Artificial Sequence: Synthetic oligonucleotide
  Antisense strand to SEQ ID NO: 1096140
uuacaaagcgcuugcugca

SEQ ID NO: 1096142 - RNA, 19 nt, Artificial Sequence
  Description of Artificial Sequence: Synthetic oligonucleotide
  Sense strand starting at position 659 of SEQ ID NO: 915654
gcagcaagcgcuuuguaaa

SEQ ID NO: 1096143 - RNA, 19 nt, Artificial Sequence
  Description of Artificial Sequence: Synthetic oligonucleotide
  Antisense strand to SEQ ID NO: 1096142
uuuacaaagcgcuugcugc

SEQ ID NO: 1096144 - RNA, 19 nt, Artificial Sequence
  Description of Artificial Sequence: Synthetic oligonucleotide
  Sense strand starting at position 783 of SEQ ID NO: 915654
cccgguuagacuugacaug

SEQ ID NO: 1096145 - RNA, 19 nt, Artificial Sequence
  Description of Artificial Sequence: Synthetic oligonucleotide
  Antisense strand to SEQ ID NO: 1096144
caugucaagucuaaccggg

SEQ ID NO: 1096146 - RNA, 19 nt, Artificial Sequence
  Description of Artificial Sequence: Synthetic oligonucleotide
  Sense strand starting at position 784 of SEQ ID NO: 915654
ccgguuagacuugacaugu

SEQ ID NO: 1096147 - RNA, 19 nt, Artificial Sequence
  Description of Artificial Sequence: Synthetic oligonucleotide
  Antisense strand to SEQ ID NO: 1096146
acaugucaagucuaaccgg

SEQ ID NO: 1096148 - RNA, 19 nt, Artificial Sequence
  Description of Artificial Sequence: Synthetic oligonucleotide
  Sense strand starting at position 788 of SEQ ID NO: 915654
uuagacuugacauguugga

SEQ ID NO: 1096149 - RNA, 19 nt, Artificial Sequence
  Description of Artificial Sequence: Synthetic oligonucleotide
  Antisense strand to SEQ ID NO: 1096148
uccaacaugucaagucuaa

SEQ ID NO: 1096150 - RNA, 19 nt, Artificial Sequence
  Description of Artificial Sequence: Synthetic oligonucleotide
  Sense strand starting at position 1434 of SEQ ID NO: 915654
ccggguugccuggaaacga

SEQ ID NO: 1096151 - RNA, 19 nt, Artificial Sequence
  Description of Artificial Sequence: Synthetic oligonucleotide
  Antisense strand to SEQ ID NO: 1096150
ucguuuccaggcaacccgg

SEQ ID NO: 1096152 - RNA, 19 nt, Artificial Sequence
  Description of Artificial Sequence: Synthetic oligonucleotide
  Sense strand starting at position 2008 of SEQ ID NO: 915654
cauguaguucuagagcuac

SEQ ID NO: 1096153 - RNA, 19 nt, Artificial Sequence
  Description of Artificial Sequence: Synthetic oligonucleotide
  Antisense strand to SEQ ID NO: 1096152
guagcucuagaacuacaug

SEQ ID NO: 1096154 - RNA, 19 nt, Artificial Sequence
  Description of Artificial Sequence: Synthetic oligonucleotide
  Sense strand starting at position 2014 of SEQ ID NO: 915654
guucuagagcuacaaaugu

SEQ ID NO: 1096155 - RNA, 19 nt, Artificial Sequence
  Description of Artificial Sequence: Synthetic oligonucleotide
  Antisense strand to SEQ ID NO: 1096154
acauuuguagcucuagaac

SEQ ID NO: 1096156 - RNA, 19 nt, Artificial Sequence
  Description of Artificial Sequence: Synthetic oligonucleotide
  Sense strand starting at position 2039 of SEQ ID NO: 915654
gggcauugugggcaaugua

SEQ ID NO: 1096157 - RNA, 19 nt, Artificial Sequence
  Description of Artificial Sequence: Synthetic oligonucleotide
  Antisense strand to SEQ ID NO: 1096156
uacauugcccacaaugccc

SEQ ID NO: 1096158 - RNA, 19 nt, Artificial Sequence
  Description of Artificial Sequence: Synthetic oligonucleotide
  Sense strand starting at position 2124 of SEQ ID NO: 915654
agagaaagauauuaaagga

SEQ ID NO: 1096159 - RNA, 19 nt, Artificial Sequence
  Description of Artificial Sequence: Synthetic oligonucleotide
  Antisense strand to SEQ ID NO: 1096158
uccuuuaauaucuuucucu

SEQ ID NO: 1096160 - RNA, 19 nt, Artificial Sequence
  Description of Artificial Sequence: Synthetic oligonucleotide
  Sense strand starting at position 2152 of SEQ ID NO: 915654
agcacacugcucuaggaaa

SEQ ID NO: 1096161 - RNA, 19 nt, Artificial Sequence
  Description of Artificial Sequence: Synthetic oligonucleotide
  Antisense strand to SEQ ID NO: 1096160
uuuccuagagcagugugcu

SEQ ID NO: 1096162 - RNA, 19 nt, Artificial Sequence
  Description of Artificial Sequence: Synthetic oligonucleotide
  Sense strand starting at position 2222 of SEQ ID NO: 915654
ucccaaauguuagcucaga

SEQ ID NO: 1096163 - RNA, 19 nt, Artificial Sequence
  Description of Artificial Sequence: Synthetic oligonucleotide
  Antisense strand to SEQ ID NO: 1096162
ucugagcuaacauuuggga

SEQ ID NO: 1096164 - RNA, 19 nt, Artificial Sequence
  Description of Artificial Sequence: Synthetic oligonucleotide
  Sense strand starting at position 2223 of SEQ ID NO: 915654
cccaaauguuagcucagaa

SEQ ID NO: 1096165 - RNA, 19 nt, Artificial Sequence
  Description of Artificial Sequence: Synthetic oligonucleotide
  Antisense strand to SEQ ID NO: 1096164
uucugagcuaacauuuggg

SEQ ID NO: 1096166 - RNA, 19 nt, Artificial Sequence
  Description of Artificial Sequence: Synthetic oligonucleotide
  Sense strand starting at position 2315 of SEQ ID NO: 915654
agauaaaugcuagguagaa

SEQ ID NO: 1096167 - RNA, 19 nt, Artificial Sequence
  Description of Artificial Sequence: Synthetic oligonucleotide
  Antisense strand to SEQ ID NO: 1096166
uucuaccuagcauuuaucu

SEQ ID NO: 1096168 - RNA, 19 nt, Artificial Sequence
  Description of Artificial Sequence: Synthetic oligonucleotide
  Sense strand starting at position 2316 of SEQ ID NO: 915654
gauaaaugcuagguagaaa

SEQ ID NO: 1096169 - RNA, 19 nt, Artificial Sequence
  Description of Artificial Sequence: Synthetic oligonucleotide
  Antisense strand to SEQ ID NO: 1096168
uuucuaccuagcauuuauc

SEQ ID NO: 1096170 - RNA, 19 nt, Artificial Sequence
  Description of Artificial Sequence: Synthetic oligonucleotide
  Sense strand starting at position 2599 of SEQ ID NO: 915654
agacgaaucuggcuggaga

SEQ ID NO: 1096171 - RNA, 19 nt, Artificial Sequence
  Description of Artificial Sequence: Synthetic oligonucleotide
  Antisense strand to SEQ ID NO: 1096170
ucuccagccagauucgucu

SEQ ID NO: 1096172 - RNA, 19 nt, Artificial Sequence
  Description of Artificial Sequence: Synthetic oligonucleotide
  Sense strand starting at position 2600 of SEQ ID NO: 915654
gacgaaucuggcuggagau

SEQ ID NO: 1096173 - RNA, 19 nt, Artificial Sequence
  Description of Artificial Sequence: Synthetic oligonucleotide
  Antisense strand to SEQ ID NO: 1096172
aucuccagccagauucguc

SEQ ID NO: 1096174 - RNA, 19 nt, Artificial Sequence
  Description of Artificial Sequence: Synthetic oligonucleotide
  Sense strand starting at position 2601 of SEQ ID NO: 915654
acgaaucuggcuggagaua

SEQ ID NO: 1096175 - RNA, 19 nt, Artificial Sequence
  Description of Artificial Sequence: Synthetic oligonucleotide
  Antisense strand to SEQ ID NO: 1096174
uaucuccagccagauucgu

SEQ ID NO: 1096176 - RNA, 19 nt, Artificial Sequence
  Description of Artificial Sequence: Synthetic oligonucleotide
  Sense strand starting at position 2610 of SEQ ID NO: 915654
gcuggagauagcuggacuu

SEQ ID NO: 1096177 - RNA, 19 nt, Artificial Sequence
  Description of Artificial Sequence: Synthetic oligonucleotide
  Antisense strand to SEQ ID NO: 1096176
aaguccagcuaucuccagc

SEQ ID NO: 1096178 - RNA, 19 nt, Artificial Sequence
  Description of Artificial Sequence: Synthetic oligonucleotide
  Sense strand starting at position 2716 of SEQ ID NO: 915654
ccaggcauuuguccuuuaa

SEQ ID NO: 1096179 - RNA, 19 nt, Artificial Sequence
  Description of Artificial Sequence: Synthetic oligonucleotide
  Antisense strand to SEQ ID NO: 1096178
uuaaaggacaaaugccugg

SEQ ID NO: 1096180 - RNA, 19 nt, Artificial Sequence
  Description of Artificial Sequence: Synthetic oligonucleotide
  Sense strand starting at position 2718 of SEQ ID NO: 915654
aggcauuuguccuuuaauu

SEQ ID NO: 1096181 - RNA, 19 nt, Artificial Sequence
  Description of Artificial Sequence: Synthetic oligonucleotide
  Antisense strand to SEQ ID NO: 1096180
aauuaaaggacaaaugccu

SEQ ID NO: 1096182 - RNA, 19 nt, Artificial Sequence
  Description of Artificial Sequence: Synthetic oligonucleotide
  Sense strand starting at position 2728 of SEQ ID NO: 915654
ccuuuaauuuguucgugca

SEQ ID NO: 1096183 - RNA, 19 nt, Artificial Sequence
  Description of Artificial Sequence: Synthetic oligonucleotide
  Antisense strand to SEQ ID NO: 1096182
ugcacgaacaaauuaaagg

SEQ ID NO: 1096184 - RNA, 19 nt, Artificial Sequence
  Description of Artificial Sequence: Synthetic oligonucleotide
  Sense strand starting at position 3064 of SEQ ID NO: 915654
ggugaaucuugagugagug

SEQ ID NO: 1096185 - RNA, 19 nt, Artificial Sequence
  Description of Artificial Sequence: Synthetic oligonucleotide
  Antisense strand to SEQ ID NO: 1096184
cacucacucaagauucacc

SEQ ID NO: 1096186 - RNA, 19 nt, Artificial Sequence
  Description of Artificial Sequence: Synthetic oligonucleotide
  Sense strand starting at position 3147 of SEQ ID NO: 915654
cgccuuguucacuugcgua

SEQ ID NO: 1096187 - RNA, 19 nt, Artificial Sequence
  Description of Artificial Sequence: Synthetic oligonucleotide
  Antisense strand to SEQ ID NO: 1096186
uacgcaagugaacaaggcg

SEQ ID NO: 1096188 - RNA, 19 nt, Artificial Sequence
  Description of Artificial Sequence: Synthetic oligonucleotide
  Sense strand starting at position 3219 of SEQ ID NO: 915654
uugugaguccugugaaagg

SEQ ID NO: 1096189 - RNA, 19 nt, Artificial Sequence
  Description of Artificial Sequence: Synthetic oligonucleotide
  Antisense strand to SEQ ID NO: 1096188
ccuuucacaggacucacaa

SEQ ID NO: 1096190 - RNA, 19 nt, Artificial Sequence
  Description of Artificial Sequence: Synthetic oligonucleotide
  Sense strand starting at position 3230 of SEQ ID NO: 915654
gugaaaggucagggcaaua

SEQ ID NO: 1096191 - RNA, 19 nt, Artificial Sequence
  Description of Artificial Sequence: Synthetic oligonucleotide
  Antisense strand to SEQ ID NO: 1096190
uauugcccugaccuuucac

SEQ ID NO: 1096192 - RNA, 19 nt, Artificial Sequence
  Description of Artificial Sequence: Synthetic oligonucleotide
  Sense strand starting at position 3607 of SEQ ID NO: 915654
gccuuccuccuagaguaca

SEQ ID NO: 1096193 - RNA, 19 nt, Artificial Sequence
  Description of Artificial Sequence: Synthetic oligonucleotide
  Antisense strand to SEQ ID NO: 1096192
uguacucuaggaggaaggc

SEQ ID NO: 1096194 - RNA, 19 nt, Artificial Sequence
  Description of Artificial Sequence: Synthetic oligonucleotide
  Sense strand starting at position 3663 of SEQ ID NO: 915654
guuucuuuccaucagaugu

SEQ ID NO: 1096195 - RNA, 19 nt, Artificial Sequence
  Description of Artificial Sequence: Synthetic oligonucleotide
  Antisense strand to SEQ ID NO: 1096194
acaucugauggaaagaaac

SEQ ID NO: 1096196 - RNA, 19 nt, Artificial Sequence
  Description of Artificial Sequence: Synthetic oligonucleotide
  Sense strand starting at position 3673 of SEQ ID NO: 915654
aucagauguuccucagaca

SEQ ID NO: 1096197 - RNA, 19 nt, Artificial Sequence
  Description of Artificial Sequence: Synthetic oligonucleotide
  Antisense strand to SEQ ID NO: 1096196
ugucugaggaacaucugau

SEQ ID NO: 1096198 - RNA, 19 nt, Artificial Sequence
  Description of Artificial Sequence: Synthetic oligonucleotide
  Sense strand starting at position 3674 of SEQ ID NO: 915654
ucagauguuccucagacac

SEQ ID NO: 1096199 - RNA, 19 nt, Artificial Sequence
  Description of Artificial Sequence: Synthetic oligonucleotide
  Antisense strand to SEQ ID NO: 1096198
gugucugaggaacaucuga

SEQ ID NO: 1096200 - RNA, 19 nt, Artificial Sequence
  Description of Artificial Sequence: Synthetic oligonucleotide
  Sense strand starting at position 3736 of SEQ ID NO: 915654
aagaguccuucuuccagga

SEQ ID NO: 1096201 - RNA, 19 nt, Artificial Sequence
  Description of Artificial Sequence: Synthetic oligonucleotide
  Antisense strand to SEQ ID NO: 1096200
uccuggaagaaggacucuu

SEQ ID NO: 1096202 - RNA, 19 nt, Artificial Sequence
  Description of Artificial Sequence: Synthetic oligonucleotide
  Sense strand starting at position 3809 of SEQ ID NO: 915654
uuuacauuugcuugugcga

SEQ ID NO: 1096203 - RNA, 19 nt, Artificial Sequence
  Description of Artificial Sequence: Synthetic oligonucleotide
  Antisense strand to SEQ ID NO: 1096202
ucgcacaagcaaauguaaa

SEQ ID NO: 1096204 - RNA, 19 nt, Artificial Sequence
  Description of Artificial Sequence: Synthetic oligonucleotide
  Sense strand starting at position 3829 of SEQ ID NO: 915654
ccuuucugaugucuaagau

SEQ ID NO: 1096205 - RNA, 19 nt, Artificial Sequence
  Description of Artificial Sequence: Synthetic oligonucleotide
  Antisense strand to SEQ ID NO: 1096204
aucuuagacaucagaaagg

SEQ ID NO: 1096206 - RNA, 19 nt, Artificial Sequence
  Description of Artificial Sequence: Synthetic oligonucleotide
  Sense strand starting at position 3830 of SEQ ID NO: 915654
cuuucugaugucuaagauu

SEQ ID NO: 1096207 - RNA, 19 nt, Artificial Sequence
  Description of Artificial Sequence: Synthetic oligonucleotide
  Antisense strand to SEQ ID NO: 1096206
aaucuuagacaucagaaag

SEQ ID NO: 1096208 - RNA, 19 nt, Artificial Sequence
  Description of Artificial Sequence: Synthetic oligonucleotide
  Sense strand starting at position 3934 of SEQ ID NO: 915654
uuuccauguggguaguaga

SEQ ID NO: 1096209 - RNA, 19 nt, Artificial Sequence
  Description of Artificial Sequence: Synthetic oligonucleotide
  Antisense strand to SEQ ID NO: 1096208
ucuacuacccacauggaaa

SEQ ID NO: 1096210 - RNA, 19 nt, Artificial Sequence
  Description of Artificial Sequence: Synthetic oligonucleotide
  Sense strand starting at position 332 of SEQ ID NO: 915655
cugcgaagccaguuuguca

SEQ ID NO: 1096211 - RNA, 19 nt, Artificial Sequence
  Description of Artificial Sequence: Synthetic oligonucleotide
  Antisense strand to SEQ ID NO: 1096210
ugacaaacuggcuucgcag

SEQ ID NO: 1096212 - RNA, 19 nt, Artificial Sequence
  Description of Artificial Sequence: Synthetic oligonucleotide
  Sense strand starting at position 587 of SEQ ID NO: 915655
ggaccugacuucucuaaca

SEQ ID NO: 1096213 - RNA, 19 nt, Artificial Sequence
  Description of Artificial Sequence: Synthetic oligonucleotide
  Antisense strand to SEQ ID NO: 1096212
uguuagagaagucaggucc

SEQ ID NO: 1096214 - RNA, 19 nt, Artificial Sequence
  Description of Artificial Sequence: Synthetic oligonucleotide
  Sense strand starting at position 975 of SEQ ID NO: 915655
ggaccuaaagauuguaauu

SEQ ID NO: 1096215 - RNA, 19 nt, Artificial Sequence
  Description of Artificial Sequence: Synthetic oligonucleotide
  Antisense strand to SEQ ID NO: 1096214
aauuacaaucuuuaggucc

SEQ ID NO: 1096216 - RNA, 19 nt, Artificial Sequence
  Description of Artificial Sequence: Synthetic oligonucleotide
  Sense strand starting at position 1013 of SEQ ID NO: 915655
aauauuagacgcugaaaug

SEQ ID NO: 1096217 - RNA, 19 nt, Artificial Sequence
  Description of Artificial Sequence: Synthetic oligonucleotide
  Antisense strand to SEQ ID NO: 1096216
cauuucagcgucuaauauu

SEQ ID NO: 1096218 - RNA, 19 nt, Artificial Sequence
  Description of Artificial Sequence: Synthetic oligonucleotide
  Sense strand starting at position 1058 of SEQ ID NO: 915655
gacuaacugggagacguuu

SEQ ID NO: 1096219 - RNA, 19 nt, Artificial Sequence
  Description of Artificial Sequence: Synthetic oligonucleotide
  Antisense strand to SEQ ID NO: 1096218
aaacgucucccaguuaguc

SEQ ID NO: 1096220 - RNA, 19 nt, Artificial Sequence
  Description of Artificial Sequence: Synthetic oligonucleotide
  Sense strand starting at position 1143 of SEQ ID NO: 915655
cucuaaccucggcaaacau

SEQ ID NO: 1096221 - RNA, 19 nt, Artificial Sequence
  Description of Artificial Sequence: Synthetic oligonucleotide
  Antisense strand to SEQ ID NO: 1096220
auguuugccgagguuagag

SEQ ID NO: 1096222 - RNA, 19 nt, Artificial Sequence
  Description of Artificial Sequence: Synthetic oligonucleotide
  Sense strand starting at position 1194 of SEQ ID NO: 915655
gcgguaacucaacagguua

SEQ ID NO: 1096223 - RNA, 19 nt, Artificial Sequence
  Description of Artificial Sequence: Synthetic oligonucleotide
  Antisense strand to SEQ ID NO: 1096222
uaaccuguugaguuaccgc

SEQ ID NO: 1096224 - RNA, 19 nt, Artificial Sequence
  Description of Artificial Sequence: Synthetic oligonucleotide
  Sense strand starting at position 1304 of SEQ ID NO: 915655
gggugacugguccaaaccu

SEQ ID NO: 1096225 - RNA, 19 nt, Artificial Sequence
  Description of Artificial Sequence: Synthetic oligonucleotide
  Antisense strand to SEQ ID NO: 1096224
agguuuggaccagucaccc

SEQ ID NO: 1096226 - RNA, 19 nt, Artificial Sequence
  Description of Artificial Sequence: Synthetic oligonucleotide
  Sense strand starting at position 1385 of SEQ ID NO: 915655
cggaacuuucuguaccaga

SEQ ID NO: 1096227 - RNA, 19 nt, Artificial Sequence
  Description of Artificial Sequence: Synthetic oligonucleotide
  Antisense strand to SEQ ID NO: 1096226
ucugguacagaaaguuccg

SEQ ID NO: 1096228 - RNA, 19 nt, Artificial Sequence
  Description of Artificial Sequence: Synthetic oligonucleotide
  Sense strand starting at position 1891 of SEQ ID NO: 915655
uuuccuuucucuucggaaa

SEQ ID NO: 1096229 - RNA, 19 nt, Artificial Sequence
  Description of Artificial Sequence: Synthetic oligonucleotide
  Antisense strand to SEQ ID NO: 1096228
uuuccgaagagaaaggaaa

SEQ ID NO: 1096230 - RNA, 19 nt, Artificial Sequence
  Description of Artificial Sequence: Synthetic oligonucleotide
  Sense strand starting at position 1917 of SEQ ID NO: 915655
uuuguuguccuggaugaag

SEQ ID NO: 1096231 - RNA, 19 nt, Artificial Sequence
  Description of Artificial Sequence: Synthetic oligonucleotide
  Antisense strand to SEQ ID NO: 1096230
cuucauccaggacaacaaa

SEQ ID NO: 1096232 - RNA, 19 nt, Artificial Sequence
  Description of Artificial Sequence: Synthetic oligonucleotide
  Sense strand starting at position 1992 of SEQ ID NO: 915655
gaagccuuugaagaguagu

SEQ ID NO: 1096233 - RNA, 19 nt, Artificial Sequence
  Description of Artificial Sequence: Synthetic oligonucleotide
  Antisense strand to SEQ ID NO: 1096232
acuacucuucaaaggcuuc

SEQ ID NO: 1096234 - RNA, 19 nt, Artificial Sequence
  Description of Artificial Sequence: Synthetic oligonucleotide
  Sense strand starting at position 2058 of SEQ ID NO: 915655
ggaggaguugcagggcaaa

SEQ ID NO: 1096235 - RNA, 19 nt, Artificial Sequence
  Description of Artificial Sequence: Synthetic oligonucleotide
  Antisense strand to SEQ ID NO: 1096234
uuugcccugcaacuccucc

SEQ ID NO: 1096236 - RNA, 19 nt, Artificial Sequence
  Description of Artificial Sequence: Synthetic oligonucleotide
  Sense strand starting at position 2201 of SEQ ID NO: 915655
ucgacagauuuguugcuua

SEQ ID NO: 1096237 - RNA, 19 nt, Artificial Sequence
  Description of Artificial Sequence: Synthetic oligonucleotide
  Antisense strand to SEQ ID NO: 1096236
uaagcaacaaaucugucga

SEQ ID NO: 1096238 - RNA, 19 nt, Artificial Sequence
  Description of Artificial Sequence: Synthetic oligonucleotide
  Sense strand starting at position 2281 of SEQ ID NO: 915655
uucccuguaucucugauua

SEQ ID NO: 1096239 - RNA, 19 nt, Artificial Sequence
  Description of Artificial Sequence: Synthetic oligonucleotide
  Antisense strand to SEQ ID NO: 1096238
uaaucagagauacagggaa

SEQ ID NO: 1096240 - RNA, 19 nt, Artificial Sequence
  Description of Artificial Sequence: Synthetic oligonucleotide
  Sense strand starting at position 2285 of SEQ ID NO: 915655
cuguaucucugauuaagac

SEQ ID NO: 1096241 - RNA, 19 nt, Artificial Sequence
  Description of Artificial Sequence: Synthetic oligonucleotide
  Antisense strand to SEQ ID NO: 1096240
gucuuaaucagagauacag

SEQ ID NO: 1096242 - RNA, 19 nt, Artificial Sequence
  Description of Artificial Sequence: Synthetic oligonucleotide
  Sense strand starting at position 2293 of SEQ ID NO: 915655
cugauuaagacacgagauu

SEQ ID NO: 1096243 - RNA, 19 nt, Artificial Sequence
  Description of Artificial Sequence: Synthetic oligonucleotide
  Antisense strand to SEQ ID NO: 1096242
aaucucgugucuuaaucag

SEQ ID NO: 1096244 - RNA, 19 nt, Artificial Sequence
  Description of Artificial Sequence: Synthetic oligonucleotide
  Sense strand starting at position 2368 of SEQ ID NO: 915655
acaguagagccauggaaag

SEQ ID NO: 1096245 - RNA, 19 nt, Artificial Sequence
  Description of Artificial Sequence: Synthetic oligonucleotide
  Antisense strand to SEQ ID NO: 1096244
cuuuccauggcucuacugu

SEQ ID NO: 1096246 - RNA, 19 nt, Artificial Sequence
  Description of Artificial Sequence: Synthetic oligonucleotide
  Sense strand starting at position 2524 of SEQ ID NO: 915655
acuugaagugcuuguaaag

SEQ ID NO: 1096247 - RNA, 19 nt, Artificial Sequence
  Description of Artificial Sequence: Synthetic oligonucleotide
  Antisense strand to SEQ ID NO: 1096246
cuuuacaagcacuucaagu

SEQ ID NO: 1096248 - RNA, 19 nt, Artificial Sequence
  Description of Artificial Sequence: Synthetic oligonucleotide
  Sense strand starting at position 2533 of SEQ ID NO: 915655
gcuuguaaagucugcauuu

SEQ ID NO: 1096249 - RNA, 19 nt, Artificial Sequence
  Description of Artificial Sequence: Synthetic oligonucleotide
  Antisense strand to SEQ ID NO: 1096248
aaaugcagacuuuacaagc

SEQ ID NO: 1096250 - RNA, 19 nt, Artificial Sequence
  Description of Artificial Sequence: Synthetic oligonucleotide
  Sense strand starting at position 2590 of SEQ ID NO: 915655
uggcuaaugcaugagaaua

SEQ ID NO: 1096251 - RNA, 19 nt, Artificial Sequence
  Description of Artificial Sequence: Synthetic oligonucleotide
  Antisense strand to SEQ ID NO: 1096250
uauucucaugcauuagcca

SEQ ID NO: 1096252 - RNA, 19 nt, Artificial Sequence
  Description of Artificial Sequence: Synthetic oligonucleotide
  Sense strand starting at position 2710 of SEQ ID NO: 915655
cuuaauguugcagaucuuu

SEQ ID NO: 1096253 - RNA, 19 nt, Artificial Sequence
  Description of Artificial Sequence: Synthetic oligonucleotide
  Antisense strand to SEQ ID NO: 1096252
aaagaucugcaacauuaag

SEQ ID NO: 1096254 - RNA, 19 nt, Artificial Sequence
  Description of Artificial Sequence: Synthetic oligonucleotide
  Sense strand starting at position 2786 of SEQ ID NO: 915655
uguguuaugagagguagaa

SEQ ID NO: 1096255 - RNA, 19 nt, Artificial Sequence
  Description of Artificial Sequence: Synthetic oligonucleotide
  Antisense strand to SEQ ID NO: 1096254
uucuaccucucauaacaca

SEQ ID NO: 1096256 - RNA, 19 nt, Artificial Sequence
  Description of Artificial Sequence: Synthetic oligonucleotide
  Sense strand starting at position 2798 of SEQ ID NO: 915655
gguagaacuuucucauguc

SEQ ID NO: 1096257 - RNA, 19 nt, Artificial Sequence
  Description of Artificial Sequence: Synthetic oligonucleotide
  Antisense strand to SEQ ID NO: 1096256
gacaugagaaaguucuacc

SEQ ID NO: 1096258 - RNA, 19 nt, Artificial Sequence
  Description of Artificial Sequence: Synthetic oligonucleotide
  Sense strand starting at position 2835 of SEQ ID NO: 915655
agaggucugacugguccua

SEQ ID NO: 1096259 - RNA, 19 nt, Artificial Sequence
  Description of Artificial Sequence: Synthetic oligonucleotide
  Antisense strand to SEQ ID NO: 1096258
uaggaccagucagaccucu

SEQ ID NO: 1096260 - RNA, 19 nt, Artificial Sequence
  Description of Artificial Sequence: Synthetic oligonucleotide
  Sense strand starting at position 2837 of SEQ ID NO: 915655
aggucugacugguccuaga

SEQ ID NO: 1096261 - RNA, 19 nt, Artificial Sequence
  Description of Artificial Sequence: Synthetic oligonucleotide
  Antisense strand to SEQ ID NO: 1096260
ucuaggaccagucagaccu

SEQ ID NO: 1096262 - RNA, 19 nt, Artificial Sequence
  Description of Artificial Sequence: Synthetic oligonucleotide
  Sense strand starting at position 2862 of SEQ ID NO: 915655
cugagacaaucuguccuaa

SEQ ID NO: 1096263 - RNA, 19 nt, Artificial Sequence
  Description of Artificial Sequence: Synthetic oligonucleotide
  Antisense strand to SEQ ID NO: 1096262
uuaggacagauugucucag

SEQ ID NO: 1096264 - RNA, 19 nt, Artificial Sequence
  Description of Artificial Sequence: Synthetic oligonucleotide
  Sense strand starting at position 2937 of SEQ ID NO: 915655
gcagcuuaucauggacaaa

SEQ ID NO: 1096265 - RNA, 19 nt, Artificial Sequence
  Description of Artificial Sequence: Synthetic oligonucleotide
  Antisense strand to SEQ ID NO: 1096264
uuuguccaugauaagcugc

SEQ ID NO: 1096266 - RNA, 19 nt, Artificial Sequence
  Description of Artificial Sequence: Synthetic oligonucleotide
  Sense strand starting at position 3091 of SEQ ID NO: 915655
uucuguugcccauggagaa

SEQ ID NO: 1096267 - RNA, 19 nt, Artificial Sequence
  Description of Artificial Sequence: Synthetic oligonucleotide
  Antisense strand to SEQ ID NO: 1096266
uucuccaugggcaacagaa

SEQ ID NO: 1096268 - RNA, 19 nt, Artificial Sequence
  Description of Artificial Sequence: Synthetic oligonucleotide
  Sense strand starting at position 3180 of SEQ ID NO: 915655
gcuaauacuuccuuuaagg

SEQ ID NO: 1096269 - RNA, 19 nt, Artificial Sequence
  Description of Artificial Sequence: Synthetic oligonucleotide
  Antisense strand to SEQ ID NO: 1096268
ccuuaaaggaaguauuagc

SEQ ID NO: 1096270 - RNA, 19 nt, Artificial Sequence
  Description of Artificial Sequence: Synthetic oligonucleotide
  Sense strand starting at position 3189 of SEQ ID NO: 915655
uccuuuaaggcucagugua

SEQ ID NO: 1096271 - RNA, 19 nt, Artificial Sequence
  Description of Artificial Sequence: Synthetic oligonucleotide
  Antisense strand to SEQ ID NO: 1096270
uacacugagccuuaaagga

SEQ ID NO: 1096272 - RNA, 19 nt, Artificial Sequence
  Description of Artificial Sequence: Synthetic oligonucleotide
  Sense strand starting at position 3205 of SEQ ID NO: 915655
guacuuauagccugggaau

SEQ ID NO: 1096273 - RNA, 19 nt, Artificial Sequence
  Description of Artificial Sequence: Synthetic oligonucleotide
  Antisense strand to SEQ ID NO: 1096272
auucccaggcuauaaguac

SEQ ID NO: 1096274 - RNA, 19 nt, Artificial Sequence
  Description of Artificial Sequence: Synthetic oligonucleotide
  Sense strand starting at position 3207 of SEQ ID NO: 915655
acuuauagccugggaaucu

SEQ ID NO: 1096275 - RNA, 19 nt, Artificial Sequence
  Description of Artificial Sequence: Synthetic oligonucleotide
  Antisense strand to SEQ ID NO: 1096274
agauucccaggcuauaagu

SEQ ID NO: 1096276 - RNA, 19 nt, Artificial Sequence
  Description of Artificial Sequence: Synthetic oligonucleotide
  Sense strand starting at position 3232 of SEQ ID NO: 915655
gaauaagaggucuggaugu

SEQ ID NO: 1096277 - RNA, 19 nt, Artificial Sequence
  Description of Artificial Sequence: Synthetic oligonucleotide
  Antisense strand to SEQ ID NO: 1096276
acauccagaccucuuauuc

SEQ ID NO: 1096278 - RNA, 19 nt, Artificial Sequence
  Description of Artificial Sequence: Synthetic oligonucleotide
  Sense strand starting at position 3234 of SEQ ID NO: 915655
auaagaggucuggauguuu

SEQ ID NO: 1096279 - RNA, 19 nt, Artificial Sequence
  Description of Artificial Sequence: Synthetic oligonucleotide
  Antisense strand to SEQ ID NO: 1096278
aaacauccagaccucuuau

SEQ ID NO: 1096280 - RNA, 19 nt, Artificial Sequence
  Description of Artificial Sequence: Synthetic oligonucleotide
  Sense strand starting at position 3381 of SEQ ID NO: 915655
guuugaggucaggaguuga

SEQ ID NO: 1096281 - RNA, 19 nt, Artificial Sequence
  Description of Artificial Sequence: Synthetic oligonucleotide
  Antisense strand to SEQ ID NO: 1096280
ucaacuccugaccucaaac

SEQ ID NO: 1096282 - RNA, 19 nt, Artificial Sequence
  Description of Artificial Sequence: Synthetic oligonucleotide
  Sense strand starting at position 3636 of SEQ ID NO: 915655
ugaggcuuuccggagguga

SEQ ID NO: 1096283 - RNA, 19 nt, Artificial Sequence
  Description of Artificial Sequence: Synthetic oligonucleotide
  Antisense strand to SEQ ID NO: 1096282
ucaccuccggaaagccuca

SEQ ID NO: 1096284 - RNA, 19 nt, Artificial Sequence
  Description of Artificial Sequence: Synthetic oligonucleotide
  Sense strand starting at position 3649 of SEQ ID NO: 915655
aggugauuugguugcuaau

SEQ ID NO: 1096285 - RNA, 19 nt, Artificial Sequence
  Description of Artificial Sequence: Synthetic oligonucleotide
  Antisense strand to SEQ ID NO: 1096284
auuagcaaccaaaucaccu

SEQ ID NO: 1096286 - RNA, 19 nt, Artificial Sequence
  Description of Artificial Sequence: Synthetic oligonucleotide
  Sense strand starting at position 3659 of SEQ ID NO: 915655
guugcuaaugaaugggauu

SEQ ID NO: 1096287 - RNA, 19 nt, Artificial Sequence
  Description of Artificial Sequence: Synthetic oligonucleotide
  Antisense strand to SEQ ID NO: 1096286
aaucccauucauuagcaac

SEQ ID NO: 1096288 - RNA, 19 nt, Artificial Sequence
  Description of Artificial Sequence: Synthetic oligonucleotide
  Sense strand starting at position 3891 of SEQ ID NO: 915655
guguuauagcagcagaaac

SEQ ID NO: 1096289 - RNA, 19 nt, Artificial Sequence
  Description of Artificial Sequence: Synthetic oligonucleotide
  Antisense strand to SEQ ID NO: 1096288
guuucugcugcuauaacac

SEQ ID NO: 1096290 - RNA, 19 nt, Artificial Sequence
  Description of Artificial Sequence: Synthetic oligonucleotide
  Sense strand starting at position 26 of SEQ ID NO: 915656
guaguuaguacccagaaca

SEQ ID NO: 1096291 - RNA, 19 nt, Artificial Sequence
  Description of Artificial Sequence: Synthetic oligonucleotide
  Antisense strand to SEQ ID NO: 1096290
uguucuggguacuaacuac

SEQ ID NO: 1096292 - RNA, 19 nt, Artificial Sequence
  Description of Artificial Sequence: Synthetic oligonucleotide
  Sense strand starting at position 248 of SEQ ID NO: 915656
uuccaauuauuggcaagaa

SEQ ID NO: 1096293 - RNA, 19 nt, Artificial Sequence
  Description of Artificial Sequence: Synthetic oligonucleotide
  Antisense strand to SEQ ID NO: 1096292
uucuugccaauaauuggaa

SEQ ID NO: 1096294 - RNA, 19 nt, Artificial Sequence
  Description of Artificial Sequence: Synthetic oligonucleotide
  Sense strand starting at position 338 of SEQ ID NO: 915656
gggaaagaauuugguauua

SEQ ID NO: 1096295 - RNA, 19 nt, Artificial Sequence
  Description of Artificial Sequence: Synthetic oligonucleotide
  Antisense strand to SEQ ID NO: 1096294
uaauaccaaauucuuuccc

SEQ ID NO: 1096296 - RNA, 19 nt, Artificial Sequence
  Description of Artificial Sequence: Synthetic oligonucleotide
  Sense strand starting at position 455 of SEQ ID NO: 915656
aggcuuugcagguaacaua

SEQ ID NO: 1096297 - RNA, 19 nt, Artificial Sequence
  Description of Artificial Sequence: Synthetic oligonucleotide
  Antisense strand to SEQ ID NO: 1096296
uauguuaccugcaaagccu

SEQ ID NO: 1096298 - RNA, 19 nt, Artificial Sequence
  Description of Artificial Sequence: Synthetic oligonucleotide
  Sense strand starting at position 469 of SEQ ID NO: 915656
acauacagccuuuguugaa

SEQ ID NO: 1096299 - RNA, 19 nt, Artificial Sequence
  Description of Artificial Sequence: Synthetic oligonucleotide
  Antisense strand to SEQ ID NO: 1096298
uucaacaaaggcuguaugu

SEQ ID NO: 1096300 - RNA, 19 nt, Artificial Sequence
  Description of Artificial Sequence: Synthetic oligonucleotide
  Sense strand starting at position 473 of SEQ ID NO: 915656
acagccuuuguugaauauu

SEQ ID NO: 1096301 - RNA, 19 nt, Artificial Sequence
  Description of Artificial Sequence: Synthetic oligonucleotide
  Antisense strand to SEQ ID NO: 1096300
aauauucaacaaaggcugu

SEQ ID NO: 1096302 - RNA, 19 nt, Artificial Sequence
  Description of Artificial Sequence: Synthetic oligonucleotide
  Sense strand starting at position 1054 of SEQ ID NO: 915656
caggcacucguuuaaauau

SEQ ID NO: 1096303 - RNA, 19 nt, Artificial Sequence
  Description of Artificial Sequence: Synthetic oligonucleotide
  Antisense strand to SEQ ID NO: 1096302
auauuuaaacgagugccug

SEQ ID NO: 1096304 - RNA, 19 nt, Artificial Sequence
  Description of Artificial Sequence: Synthetic oligonucleotide
  Sense strand starting at position 1099 of SEQ ID NO: 915656
agaggucauuuggaaaugu

SEQ ID NO: 1096305 - RNA, 19 nt, Artificial Sequence
  Description of Artificial Sequence: Synthetic oligonucleotide
  Antisense strand to SEQ ID NO: 1096304
acauuuccaaaugaccucu

SEQ ID NO: 1096306 - RNA, 19 nt, Artificial Sequence
  Description of Artificial Sequence: Synthetic oligonucleotide
  Sense strand starting at position 1109 of SEQ ID NO: 915656
uggaaauguugauuaccuu

SEQ ID NO: 1096307 - RNA, 19 nt, Artificial Sequence
  Description of Artificial Sequence: Synthetic oligonucleotide
  Antisense strand to SEQ ID NO: 1096306
aagguaaucaacauuucca

SEQ ID NO: 1096308 - RNA, 19 nt, Artificial Sequence
  Description of Artificial Sequence: Synthetic oligonucleotide
  Sense strand starting at position 1115 of SEQ ID NO: 915656
uguugauuaccuugacauu

SEQ ID NO: 1096309 - RNA, 19 nt, Artificial Sequence
  Description of Artificial Sequence: Synthetic oligonucleotide
  Antisense strand to SEQ ID NO: 1096308
aaugucaagguaaucaaca

SEQ ID NO: 1096310 - RNA, 19 nt, Artificial Sequence
  Description of Artificial Sequence: Synthetic oligonucleotide
  Sense strand starting at position 1116 of SEQ ID NO: 915656
guugauuaccuugacauuc

SEQ ID NO: 1096311 - RNA, 19 nt, Artificial Sequence
  Description of Artificial Sequence: Synthetic oligonucleotide
  Antisense strand to SEQ ID NO: 1096310
gaaugucaagguaaucaac

SEQ ID NO: 1096312 - RNA, 19 nt, Artificial Sequence
  Description of Artificial Sequence: Synthetic oligonucleotide
  Sense strand starting at position 1245 of SEQ ID NO: 915656
agacacaaucucugcugua

SEQ ID NO: 1096313 - RNA, 19 nt, Artificial Sequence
  Description of Artificial Sequence: Synthetic oligonucleotide
  Antisense strand to SEQ ID NO: 1096312
uacagcagagauugugucu

SEQ ID NO: 1096314 - RNA, 19 nt, Artificial Sequence
  Description of Artificial Sequence: Synthetic oligonucleotide
  Sense strand starting at position 1327 of SEQ ID NO: 915656
uauuguacugagggcaauu

SEQ ID NO: 1096315 - RNA, 19 nt, Artificial Sequence
  Description of Artificial Sequence: Synthetic oligonucleotide
  Antisense strand to SEQ ID NO: 1096314
aauugcccucaguacaaua

SEQ ID NO: 1096316 - RNA, 19 nt, Artificial Sequence
  Description of Artificial Sequence: Synthetic oligonucleotide
  Sense strand starting at position 1450 of SEQ ID NO: 915656
cuacaaauauuucgaaaga

SEQ ID NO: 1096317 - RNA, 19 nt, Artificial Sequence
  Description of Artificial Sequence: Synthetic oligonucleotide
  Antisense strand to SEQ ID NO: 1096316
ucuuucgaaauauuuguag

SEQ ID NO: 1096318 - RNA, 19 nt, Artificial Sequence
  Description of Artificial Sequence: Synthetic oligonucleotide
  Sense strand starting at position 1487 of SEQ ID NO: 915656
caugucauucuuggaagag

SEQ ID NO: 1096319 - RNA, 19 nt, Artificial Sequence
  Description of Artificial Sequence: Synthetic oligonucleotide
  Antisense strand to SEQ ID NO: 1096318
cucuuccaagaaugacaug

SEQ ID NO: 1096320 - RNA, 19 nt, Artificial Sequence
  Description of Artificial Sequence: Synthetic oligonucleotide
  Sense strand starting at position 1497 of SEQ ID NO: 915656
uuggaagagcucugagaga

SEQ ID NO: 1096321 - RNA, 19 nt, Artificial Sequence
  Description of Artificial Sequence: Synthetic oligonucleotide
  Antisense strand to SEQ ID NO: 1096320
ucucucagagcucuuccaa

SEQ ID NO: 1096322 - RNA, 19 nt, Artificial Sequence
  Description of Artificial Sequence: Synthetic oligonucleotide
  Sense strand starting at position 1816 of SEQ ID NO: 915656
ccggaauaccaguaccuua

SEQ ID NO: 1096323 - RNA, 19 nt, Artificial Sequence
  Description of Artificial Sequence: Synthetic oligonucleotide
  Antisense strand to SEQ ID NO: 1096322
uaagguacugguauuccgg

SEQ ID NO: 1096324 - RNA, 19 nt, Artificial Sequence
  Description of Artificial Sequence: Synthetic oligonucleotide
  Sense strand starting at position 2071 of SEQ ID NO: 915656
uuuguuugccuggcguaga

SEQ ID NO: 1096325 - RNA, 19 nt, Artificial Sequence
  Description of Artificial Sequence: Synthetic oligonucleotide
  Antisense strand to SEQ ID NO: 1096324
ucuacgccaggcaaacaaa

SEQ ID NO: 1096326 - RNA, 19 nt, Artificial Sequence
  Description of Artificial Sequence: Synthetic oligonucleotide
  Sense strand starting at position 2150 of SEQ ID NO: 915656
cgagauauaaguuggguga

SEQ ID NO: 1096327 - RNA, 19 nt, Artificial Sequence
  Description of Artificial Sequence: Synthetic oligonucleotide
  Antisense strand to SEQ ID NO: 1096326
ucacccaacuuauaucucg

SEQ ID NO: 1096328 - RNA, 19 nt, Artificial Sequence
  Description of Artificial Sequence: Synthetic oligonucleotide
  Sense strand starting at position 2216 of SEQ ID NO: 915656
uaacuuccuggucaguaga

SEQ ID NO: 1096329 - RNA, 19 nt, Artificial Sequence
  Description of Artificial Sequence: Synthetic oligonucleotide
  Antisense strand to SEQ ID NO: 1096328
ucuacugaccaggaaguua

SEQ ID NO: 1096330 - RNA, 19 nt, Artificial Sequence
  Description of Artificial Sequence: Synthetic oligonucleotide
  Sense strand starting at position 2275 of SEQ ID NO: 915656
cagcucuuggcauaugaua

SEQ ID NO: 1096331 - RNA, 19 nt, Artificial Sequence
  Description of Artificial Sequence: Synthetic oligonucleotide
  Antisense strand to SEQ ID NO: 1096330
uaucauaugccaagagcug

SEQ ID NO: 1096332 - RNA, 19 nt, Artificial Sequence
  Description of Artificial Sequence: Synthetic oligonucleotide
  Sense strand starting at position 2283 of SEQ ID NO: 915656
ggcauaugauagcuacuca

SEQ ID NO: 1096333 - RNA, 19 nt, Artificial Sequence
  Description of Artificial Sequence: Synthetic oligonucleotide
  Antisense strand to SEQ ID NO: 1096332
ugaguagcuaucauaugcc

SEQ ID NO: 1096334 - RNA, 19 nt, Artificial Sequence
  Description of Artificial Sequence: Synthetic oligonucleotide
  Sense strand starting at position 2287 of SEQ ID NO: 915656
uaugauagcuacucagguu

SEQ ID NO: 1096335 - RNA, 19 nt, Artificial Sequence
  Description of Artificial Sequence: Synthetic oligonucleotide
  Antisense strand to SEQ ID NO: 1096334
aaccugaguagcuaucaua

SEQ ID NO: 1096336 - RNA, 19 nt, Artificial Sequence
  Description of Artificial Sequence: Synthetic oligonucleotide
  Sense strand starting at position 2310 of SEQ ID NO: 915656
auaagucaaaggugagcua

SEQ ID NO: 1096337 - RNA, 19 nt, Artificial Sequence
  Description of Artificial Sequence: Synthetic oligonucleotide
  Antisense strand to SEQ ID NO: 1096336
uagcucaccuuugacuuau

SEQ ID NO: 1096338 - RNA, 19 nt, Artificial Sequence
  Description of Artificial Sequence: Synthetic oligonucleotide
  Sense strand starting at position 2323 of SEQ ID NO: 915656
gagcuauuucuuggcucua

SEQ ID NO: 1096339 - RNA, 19 nt, Artificial Sequence
  Description of Artificial Sequence: Synthetic oligonucleotide
  Antisense strand to SEQ ID NO: 1096338
uagagccaagaaauagcuc

SEQ ID NO: 1096340 - RNA, 19 nt, Artificial Sequence
  Description of Artificial Sequence: Synthetic oligonucleotide
  Sense strand starting at position 2324 of SEQ ID NO: 915656
agcuauuucuuggcucuau

SEQ ID NO: 1096341 - RNA, 19 nt, Artificial Sequence
  Description of Artificial Sequence: Synthetic oligonucleotide
  Antisense strand to SEQ ID NO: 1096340
auagagccaagaaauagcu

SEQ ID NO: 1096342 - RNA, 19 nt, Artificial Sequence
  Description of Artificial Sequence: Synthetic oligonucleotide
  Sense strand starting at position 2493 of SEQ ID NO: 915656
uugggugaaagucaucuua

SEQ ID NO: 1096343 - RNA, 19 nt, Artificial Sequence
  Description of Artificial Sequence: Synthetic oligonucleotide
  Antisense strand to SEQ ID NO: 1096342
uaagaugacuuucacccaa

SEQ ID NO: 1096344 - RNA, 19 nt, Artificial Sequence
  Description of Artificial Sequence: Synthetic oligonucleotide
  Sense strand starting at position 2495 of SEQ ID NO: 915656
gggugaaagucaucuuauu

SEQ ID NO: 1096345 - RNA, 19 nt, Artificial Sequence
  Description of Artificial Sequence: Synthetic oligonucleotide
  Antisense strand to SEQ ID NO: 1096344
aauaagaugacuuucaccc

SEQ ID NO: 1096346 - RNA, 19 nt, Artificial Sequence
  Description of Artificial Sequence: Synthetic oligonucleotide
  Sense strand starting at position 2550 of SEQ ID NO: 915656
agaauuauauauguggcuu

SEQ ID NO: 1096347 - RNA, 19 nt, Artificial Sequence
  Description of Artificial Sequence: Synthetic oligonucleotide
  Antisense strand to SEQ ID NO: 1096346
aagccacauauauaauucu

SEQ ID NO: 1096348 - RNA, 19 nt, Artificial Sequence
  Description of Artificial Sequence: Synthetic oligonucleotide
  Sense strand starting at position 2692 of SEQ ID NO: 915656
guucgcuuggacuaauuaa

SEQ ID NO: 1096349 - RNA, 19 nt, Artificial Sequence
  Description of Artificial Sequence: Synthetic oligonucleotide
  Antisense strand to SEQ ID NO: 1096348
uuaauuaguccaagcgaac

SEQ ID NO: 1096350 - RNA, 19 nt, Artificial Sequence
  Description of Artificial Sequence: Synthetic oligonucleotide
  Sense strand starting at position 2756 of SEQ ID NO: 915656
ccauuaagauuagcaggua

SEQ ID NO: 1096351 - RNA, 19 nt, Artificial Sequence
  Description of Artificial Sequence: Synthetic oligonucleotide
  Antisense strand to SEQ ID NO: 1096350
uaccugcuaaucuuaaugg

SEQ ID NO: 1096352 - RNA, 19 nt, Artificial Sequence
  Description of Artificial Sequence: Synthetic oligonucleotide
  Sense strand starting at position 2759 of SEQ ID NO: 915656
uuaagauuagcagguaaac

SEQ ID NO: 1096353 - RNA, 19 nt, Artificial Sequence
  Description of Artificial Sequence: Synthetic oligonucleotide
  Antisense strand to SEQ ID NO: 1096352
guuuaccugcuaaucuuaa

SEQ ID NO: 1096354 - RNA, 19 nt, Artificial Sequence
  Description of Artificial Sequence: Synthetic oligonucleotide
  Sense strand starting at position 2888 of SEQ ID NO: 915656
uguugcauuguccagauaa

SEQ ID NO: 1096355 - RNA, 19 nt, Artificial Sequence
  Description of Artificial Sequence: Synthetic oligonucleotide
  Antisense strand to SEQ ID NO: 1096354
uuaucuggacaaugcaaca

SEQ ID NO: 1096356 - RNA, 19 nt, Artificial Sequence
  Description of Artificial Sequence: Synthetic oligonucleotide
  Sense strand starting at position 2890 of SEQ ID NO: 915656
uugcauuguccagauaauu

SEQ ID NO: 1096357 - RNA, 19 nt, Artificial Sequence
  Description of Artificial Sequence: Synthetic oligonucleotide
  Antisense strand to SEQ ID NO: 1096356
aauuaucuggacaaugcaa

SEQ ID NO: 1096358 - RNA, 19 nt, Artificial Sequence
  Description of Artificial Sequence: Synthetic oligonucleotide
  Sense strand starting at position 2960 of SEQ ID NO: 915656
ccaagaagucuguaauugc

SEQ ID NO: 1096359 - RNA, 19 nt, Artificial Sequence
  Description of Artificial Sequence: Synthetic oligonucleotide
  Antisense strand to SEQ ID NO: 1096358
gcaauuacagacuucuugg

SEQ ID NO: 1096360 - RNA, 19 nt, Artificial Sequence
  Description of Artificial Sequence: Synthetic oligonucleotide
  Sense strand starting at position 3735 of SEQ ID NO: 915656
cuaccuuugccuuaaugga

SEQ ID NO: 1096361 - RNA, 19 nt, Artificial Sequence
  Description of Artificial Sequence: Synthetic oligonucleotide
  Antisense strand to SEQ ID NO: 1096360
uccauuaaggcaaagguag

SEQ ID NO: 1096362 - RNA, 19 nt, Artificial Sequence
  Description of Artificial Sequence: Synthetic oligonucleotide
  Sense strand starting at position 3783 of SEQ ID NO: 915656
guguuuccuaauuauguag

SEQ ID NO: 1096363 - RNA, 19 nt, Artificial Sequence
  Description of Artificial Sequence: Synthetic oligonucleotide
  Antisense strand to SEQ ID NO: 1096362
cuacauaauuaggaaacac

SEQ ID NO: 1096364 - RNA, 19 nt, Artificial Sequence
  Description of Artificial Sequence: Synthetic oligonucleotide
  Sense strand starting at position 3940 of SEQ ID NO: 915656
ugggaaacguuaguuauua

SEQ ID NO: 1096365 - RNA, 19 nt, Artificial Sequence
  Description of Artificial Sequence: Synthetic oligonucleotide
  Antisense strand to SEQ ID NO: 1096364
uaauaacuaacguuuccca

SEQ ID NO: 1096366 - RNA, 19 nt, Artificial Sequence
  Description of Artificial Sequence: Synthetic oligonucleotide
  Sense strand starting at position 3941 of SEQ ID NO: 915656
gggaaacguuaguuauuaa

SEQ ID NO: 1096367 - RNA, 19 nt, Artificial Sequence
  Description of Artificial Sequence: Synthetic oligonucleotide
  Antisense strand to SEQ ID NO: 1096366
uuaauaacuaacguuuccc

SEQ ID NO: 1096368 - RNA, 19 nt, Artificial Sequence
  Description of Artificial Sequence: Synthetic oligonucleotide
  Sense strand starting at position 3942 of SEQ ID NO: 915656
ggaaacguuaguuauuaaa

SEQ ID NO: 1096369 - RNA, 19 nt, Artificial Sequence
  Description of Artificial Sequence: Synthetic oligonucleotide
  Antisense strand to SEQ ID NO: 1096368
uuuaauaacuaacguuucc

SEQ ID NO: 1096370 - RNA, 19 nt, Artificial Sequence
  Description of Artificial Sequence: Synthetic oligonucleotide
  Sense strand starting at position 10 of SEQ ID NO: 915657
acucuagagucucugugaa

SEQ ID NO: 1096371 - RNA, 19 nt, Artificial Sequence
  Description of Artificial Sequence: Synthetic oligonucleotide
  Antisense strand to SEQ ID NO: 1096370
uucacagagacucuagagu

SEQ ID NO: 1096372 - RNA, 19 nt, Artificial Sequence
  Description of Artificial Sequence: Synthetic oligonucleotide
  Sense strand starting at position 287 of SEQ ID NO: 915657
uuaauaaaucagugguucu

SEQ ID NO: 1096373 - RNA, 19 nt, Artificial Sequence
  Description of Artificial Sequence: Synthetic oligonucleotide
  Antisense strand to SEQ ID NO: 1096372
agaaccacugauuuauuaa

SEQ ID NO: 1096374 - RNA, 19 nt, Artificial Sequence
  Description of Artificial Sequence: Synthetic oligonucleotide
  Sense strand starting at position 446 of SEQ ID NO: 915657
gcuguagucaauggacaca

SEQ ID NO: 1096375 - RNA, 19 nt, Artificial Sequence
  Description of Artificial Sequence: Synthetic oligonucleotide
  Antisense strand to SEQ ID NO: 1096374
uguguccauugacuacagc

SEQ ID NO: 1096376 - RNA, 19 nt, Artificial Sequence
  Description of Artificial Sequence: Synthetic oligonucleotide
  Sense strand starting at position 466 of SEQ ID NO: 915657
guugaauaucacuguaaua

SEQ ID NO: 1096377 - RNA, 19 nt, Artificial Sequence
  Description of Artificial Sequence: Synthetic oligonucleotide
  Antisense strand to SEQ ID NO: 1096376
uauuacagugauauucaac

SEQ ID NO: 1096378 - RNA, 19 nt, Artificial Sequence
  Description of Artificial Sequence: Synthetic oligonucleotide
  Sense strand starting at position 477 of SEQ ID NO: 915657
cuguaauacucauuugcug

SEQ ID NO: 1096379 - RNA, 19 nt, Artificial Sequence
  Description of Artificial Sequence: Synthetic oligonucleotide
  Antisense strand to SEQ ID NO: 1096378
cagcaaaugaguauuacag

SEQ ID NO: 1096380 - RNA, 19 nt, Artificial Sequence
  Description of Artificial Sequence: Synthetic oligonucleotide
  Sense strand starting at position 547 of SEQ ID NO: 915657
aguuccuggcaucaacaua

SEQ ID NO: 1096381 - RNA, 19 nt, Artificial Sequence
  Description of Artificial Sequence: Synthetic oligonucleotide
  Antisense strand to SEQ ID NO: 1096380
uauguugaugccaggaacu

SEQ ID NO: 1096382 - RNA, 19 nt, Artificial Sequence
  Description of Artificial Sequence: Synthetic oligonucleotide
  Sense strand starting at position 582 of SEQ ID NO: 915657
cuuugaaccuucuuauggu

SEQ ID NO: 1096383 - RNA, 19 nt, Artificial Sequence
  Description of Artificial Sequence: Synthetic oligonucleotide
  Antisense strand to SEQ ID NO: 1096382
accauaagaagguucaaag

SEQ ID NO: 1096384 - RNA, 19 nt, Artificial Sequence
  Description of Artificial Sequence: Synthetic oligonucleotide
  Sense strand starting at position 598 of SEQ ID NO: 915657
gguguuacacaaugaguaa

SEQ ID NO: 1096385 - RNA, 19 nt, Artificial Sequence
  Description of Artificial Sequence: Synthetic oligonucleotide
  Antisense strand to SEQ ID NO: 1096384
uuacucauuguguaacacc

SEQ ID NO: 1096386 - RNA, 19 nt, Artificial Sequence
  Description of Artificial Sequence: Synthetic oligonucleotide
  Sense strand starting at position 601 of SEQ ID NO: 915657
guuacacaaugaguaauaa

SEQ ID NO: 1096387 - RNA, 19 nt, Artificial Sequence
  Description of Artificial Sequence: Synthetic oligonucleotide
  Antisense strand to SEQ ID NO: 1096386
uuauuacucauuguguaac

SEQ ID NO: 1096388 - RNA, 19 nt, Artificial Sequence
  Description of Artificial Sequence: Synthetic oligonucleotide
  Sense strand starting at position 638 of SEQ ID NO: 915657
ugcaucauggcagaaaugu

SEQ ID NO: 1096389 - RNA, 19 nt, Artificial Sequence
  Description of Artificial Sequence: Synthetic oligonucleotide
  Antisense strand to SEQ ID NO: 1096388
acauuucugccaugaugca

SEQ ID NO: 1096390 - RNA, 19 nt, Artificial Sequence
  Description of Artificial Sequence: Synthetic oligonucleotide
  Sense strand starting at position 647 of SEQ ID NO: 915657
gcagaaauguacucaaucu

SEQ ID NO: 1096391 - RNA, 19 nt, Artificial Sequence
  Description of Artificial Sequence: Synthetic oligonucleotide
  Antisense strand to SEQ ID NO: 1096390
agauugaguacauuucugc

SEQ ID NO: 1096392 - RNA, 19 nt, Artificial Sequence
  Description of Artificial Sequence: Synthetic oligonucleotide
  Sense strand starting at position 856 of SEQ ID NO: 915657
ggcagacgucaauaacaug

SEQ ID NO: 1096393 - RNA, 19 nt, Artificial Sequence
  Description of Artificial Sequence: Synthetic oligonucleotide
  Antisense strand to SEQ ID NO: 1096392
cauguuauugacgucugcc

SEQ ID NO: 1096394 - RNA, 19 nt, Artificial Sequence
  Description of Artificial Sequence: Synthetic oligonucleotide
  Sense strand starting at position 862 of SEQ ID NO: 915657
cgucaauaacaugaguaac

SEQ ID NO: 1096395 - RNA, 19 nt, Artificial Sequence
  Description of Artificial Sequence: Synthetic oligonucleotide
  Antisense strand to SEQ ID NO: 1096394
guuacucauguuauugacg

SEQ ID NO: 1096396 - RNA, 19 nt, Artificial Sequence
  Description of Artificial Sequence: Synthetic oligonucleotide
  Sense strand starting at position 1094 of SEQ ID NO: 915657
auauuugagugcuuaagcu

SEQ ID NO: 1096397 - RNA, 19 nt, Artificial Sequence
  Description of Artificial Sequence: Synthetic oligonucleotide
  Antisense strand to SEQ ID NO: 1096396
agcuuaagcacucaaauau

SEQ ID NO: 1096398 - RNA, 19 nt, Artificial Sequence
  Description of Artificial Sequence: Synthetic oligonucleotide
  Sense strand starting at position 1187 of SEQ ID NO: 915657
cgcuuauaccaguaagagu

SEQ ID NO: 1096399 - RNA, 19 nt, Artificial Sequence
  Description of Artificial Sequence: Synthetic oligonucleotide
  Antisense strand to SEQ ID NO: 1096398
acucuuacugguauaagcg

SEQ ID NO: 1096400 - RNA, 19 nt, Artificial Sequence
  Description of Artificial Sequence: Synthetic oligonucleotide
  Sense strand starting at position 1202 of SEQ ID NO: 915657
gagugcauuuauguagguu

SEQ ID NO: 1096401 - RNA, 19 nt, Artificial Sequence
  Description of Artificial Sequence: Synthetic oligonucleotide
  Antisense strand to SEQ ID NO: 1096400
aaccuacauaaaugcacuc

SEQ ID NO: 1096402 - RNA, 19 nt, Artificial Sequence
  Description of Artificial Sequence: Synthetic oligonucleotide
  Sense strand starting at position 1203 of SEQ ID NO: 915657
agugcauuuauguagguuu

SEQ ID NO: 1096403 - RNA, 19 nt, Artificial Sequence
  Description of Artificial Sequence: Synthetic oligonucleotide
  Antisense strand to SEQ ID NO: 1096402
aaaccuacauaaaugcacu

SEQ ID NO: 1096404 - RNA, 19 nt, Artificial Sequence
  Description of Artificial Sequence: Synthetic oligonucleotide
  Sense strand starting at position 1205 of SEQ ID NO: 915657
ugcauuuauguagguuuau

SEQ ID NO: 1096405 - RNA, 19 nt, Artificial Sequence
  Description of Artificial Sequence: Synthetic oligonucleotide
  Antisense strand to SEQ ID NO: 1096404
auaaaccuacauaaaugca

SEQ ID NO: 1096406 - RNA, 19 nt, Artificial Sequence
  Description of Artificial Sequence: Synthetic oligonucleotide
  Sense strand starting at position 1206 of SEQ ID NO: 915657
gcauuuauguagguuuaua

SEQ ID NO: 1096407 - RNA, 19 nt, Artificial Sequence
  Description of Artificial Sequence: Synthetic oligonucleotide
  Antisense strand to SEQ ID NO: 1096406
uauaaaccuacauaaaugc

SEQ ID NO: 1096408 - RNA, 19 nt, Artificial Sequence
  Description of Artificial Sequence: Synthetic oligonucleotide
  Sense strand starting at position 1593 of SEQ ID NO: 915657
gggaguugggacggauaga

SEQ ID NO: 1096409 - RNA, 19 nt, Artificial Sequence
  Description of Artificial Sequence: Synthetic oligonucleotide
  Antisense strand to SEQ ID NO: 1096408
ucuauccgucccaacuccc

SEQ ID NO: 1096410 - RNA, 19 nt, Artificial Sequence
  Description of Artificial Sequence: Synthetic oligonucleotide
  Sense strand starting at position 1817 of SEQ ID NO: 915657
uuagaagagucugccaaca

SEQ ID NO: 1096411 - RNA, 19 nt, Artificial Sequence
  Description of Artificial Sequence: Synthetic oligonucleotide
  Antisense strand to SEQ ID NO: 1096410
uguuggcagacucuucuaa

SEQ ID NO: 1096412 - RNA, 19 nt, Artificial Sequence
  Description of Artificial Sequence: Synthetic oligonucleotide
  Sense strand starting at position 2039 of SEQ ID NO: 915657
ggcucaacgccucucgauu

SEQ ID NO: 1096413 - RNA, 19 nt, Artificial Sequence
  Description of Artificial Sequence: Synthetic oligonucleotide
  Antisense strand to SEQ ID NO: 1096412
aaucgagaggcguugagcc

SEQ ID NO: 1096414 - RNA, 19 nt, Artificial Sequence
  Description of Artificial Sequence: Synthetic oligonucleotide
  Sense strand starting at position 2096 of SEQ ID NO: 915657
ccuccauccugacugugau

SEQ ID NO: 1096415 - RNA, 19 nt, Artificial Sequence
  Description of Artificial Sequence: Synthetic oligonucleotide
  Antisense strand to SEQ ID NO: 1096414
aucacagucaggauggagg

SEQ ID NO: 1096416 - RNA, 19 nt, Artificial Sequence
  Description of Artificial Sequence: Synthetic oligonucleotide
  Sense strand starting at position 2097 of SEQ ID NO: 915657
cuccauccugacugugauu

SEQ ID NO: 1096417 - RNA, 19 nt, Artificial Sequence
  Description of Artificial Sequence: Synthetic oligonucleotide
  Antisense strand to SEQ ID NO: 1096416
aaucacagucaggauggag

SEQ ID NO: 1096418 - RNA, 19 nt, Artificial Sequence
  Description of Artificial Sequence: Synthetic oligonucleotide
  Sense strand starting at position 2129 of SEQ ID NO: 915657
agaaauuacggccacuuau

SEQ ID NO: 1096419 - RNA, 19 nt, Artificial Sequence
  Description of Artificial Sequence: Synthetic oligonucleotide
  Antisense strand to SEQ ID NO: 1096418
auaaguggccguaauuucu

SEQ ID NO: 1096420 - RNA, 19 nt, Artificial Sequence
  Description of Artificial Sequence: Synthetic oligonucleotide
  Sense strand starting at position 2141 of SEQ ID NO: 915657
cacuuauucgcuuagagga

SEQ ID NO: 1096421 - RNA, 19 nt, Artificial Sequence
  Description of Artificial Sequence: Synthetic oligonucleotide
  Antisense strand to SEQ ID NO: 1096420
uccucuaagcgaauaagug

SEQ ID NO: 1096422 - RNA, 19 nt, Artificial Sequence
  Description of Artificial Sequence: Synthetic oligonucleotide
  Sense strand starting at position 2713 of SEQ ID NO: 915657
agccaaauucgagaguuau

SEQ ID NO: 1096423 - RNA, 19 nt, Artificial Sequence
  Description of Artificial Sequence: Synthetic oligonucleotide
  Antisense strand to SEQ ID NO: 1096422
auaacucucgaauuuggcu

SEQ ID NO: 1096424 - RNA, 19 nt, Artificial Sequence
  Description of Artificial Sequence: Synthetic oligonucleotide
  Sense strand starting at position 2887 of SEQ ID NO: 915657
uggguaguuugaagagaga

SEQ ID NO: 1096425 - RNA, 19 nt, Artificial Sequence
  Description of Artificial Sequence: Synthetic oligonucleotide
  Antisense strand to SEQ ID NO: 1096424
ucucucuucaaacuaccca

SEQ ID NO: 1096426 - RNA, 19 nt, Artificial Sequence
  Description of Artificial Sequence: Synthetic oligonucleotide
  Sense strand starting at position 3102 of SEQ ID NO: 915657
gauggcaugaugugaauga

SEQ ID NO: 1096427 - RNA, 19 nt, Artificial Sequence
  Description of Artificial Sequence: Synthetic oligonucleotide
  Antisense strand to SEQ ID NO: 1096426
ucauucacaucaugccauc

SEQ ID NO: 1096428 - RNA, 19 nt, Artificial Sequence
  Description of Artificial Sequence: Synthetic oligonucleotide
  Sense strand starting at position 3115 of SEQ ID NO: 915657
gaaugacuccagugugaag

SEQ ID NO: 1096429 - RNA, 19 nt, Artificial Sequence
  Description of Artificial Sequence: Synthetic oligonucleotide
  Antisense strand to SEQ ID NO: 1096428
cuucacacuggagucauuc

SEQ ID NO: 1096430 - RNA, 19 nt, Artificial Sequence
  Description of Artificial Sequence: Synthetic oligonucleotide
  Sense strand starting at position 3117 of SEQ ID NO: 915657
augacuccagugugaagaa

SEQ ID NO: 1096431 - RNA, 19 nt, Artificial Sequence
  Description of Artificial Sequence: Synthetic oligonucleotide
  Antisense strand to SEQ ID NO: 1096430
uucuucacacuggagucau

SEQ ID NO: 1096432 - RNA, 19 nt, Artificial Sequence
  Description of Artificial Sequence: Synthetic oligonucleotide
  Sense strand starting at position 3228 of SEQ ID NO: 915657
ucaauccucucgguuaaua

SEQ ID NO: 1096433 - RNA, 19 nt, Artificial Sequence
  Description of Artificial Sequence: Synthetic oligonucleotide
  Antisense strand to SEQ ID NO: 1096432
uauuaaccgagaggauuga

SEQ ID NO: 1096434 - RNA, 19 nt, Artificial Sequence
  Description of Artificial Sequence: Synthetic oligonucleotide
  Sense strand starting at position 3238 of SEQ ID NO: 915657
cgguuaauacaugggagga

SEQ ID NO: 1096435 - RNA, 19 nt, Artificial Sequence
  Description of Artificial Sequence: Synthetic oligonucleotide
  Antisense strand to SEQ ID NO: 1096434
uccucccauguauuaaccg

SEQ ID NO: 1096436 - RNA, 19 nt, Artificial Sequence
  Description of Artificial Sequence: Synthetic oligonucleotide
  Sense strand starting at position 3333 of SEQ ID NO: 915657
gcuggauucugaguuacug

SEQ ID NO: 1096437 - RNA, 19 nt, Artificial Sequence
  Description of Artificial Sequence: Synthetic oligonucleotide
  Antisense strand to SEQ ID NO: 1096436
caguaacucagaauccagc

SEQ ID NO: 1096438 - RNA, 19 nt, Artificial Sequence
  Description of Artificial Sequence: Synthetic oligonucleotide
  Sense strand starting at position 3355 of SEQ ID NO: 915657
gggugagauccggaacuuc

SEQ ID NO: 1096439 - RNA, 19 nt, Artificial Sequence
  Description of Artificial Sequence: Synthetic oligonucleotide
  Antisense strand to SEQ ID NO: 1096438
gaaguuccggaucucaccc

SEQ ID NO: 1096440 - RNA, 19 nt, Artificial Sequence
  Description of Artificial Sequence: Synthetic oligonucleotide
  Sense strand starting at position 3365 of SEQ ID NO: 915657
cggaacuucugaucaguaa

SEQ ID NO: 1096441 - RNA, 19 nt, Artificial Sequence
  Description of Artificial Sequence: Synthetic oligonucleotide
  Antisense strand to SEQ ID NO: 1096440
uuacugaucagaaguuccg

SEQ ID NO: 1096442 - RNA, 19 nt, Artificial Sequence
  Description of Artificial Sequence: Synthetic oligonucleotide
  Sense strand starting at position 3518 of SEQ ID NO: 915657
ugaguaucuuuaucaucau

SEQ ID NO: 1096443 - RNA, 19 nt, Artificial Sequence
  Description of Artificial Sequence: Synthetic oligonucleotide
  Antisense strand to SEQ ID NO: 1096442
augaugauaaagauacuca

SEQ ID NO: 1096444 - RNA, 19 nt, Artificial Sequence
  Description of Artificial Sequence: Synthetic oligonucleotide
  Sense strand starting at position 3596 of SEQ ID NO: 915657
uugaguuagucauugaacu

SEQ ID NO: 1096445 - RNA, 19 nt, Artificial Sequence
  Description of Artificial Sequence: Synthetic oligonucleotide
  Antisense strand to SEQ ID NO: 1096444
aguucaaugacuaacucaa

SEQ ID NO: 1096446 - RNA, 19 nt, Artificial Sequence
  Description of Artificial Sequence: Synthetic oligonucleotide
  Sense strand starting at position 3850 of SEQ ID NO: 915657
acugaagugguuugcaaca

SEQ ID NO: 1096447 - RNA, 19 nt, Artificial Sequence
  Description of Artificial Sequence: Synthetic oligonucleotide
  Antisense strand to SEQ ID NO: 1096446
uguugcaaaccacuucagu

SEQ ID NO: 1096448 - RNA, 19 nt, Artificial Sequence
  Description of Artificial Sequence: Synthetic oligonucleotide
  Sense strand starting at position 3918 of SEQ ID NO: 915657
aagagauauugacuccugu

SEQ ID NO: 1096449 - RNA, 19 nt, Artificial Sequence
  Description of Artificial Sequence: Synthetic oligonucleotide
  Antisense strand to SEQ ID NO: 1096448
acaggagucaauaucucuu

SEQ ID NO: 1096450 - RNA, 19 nt, Artificial Sequence
  Description of Artificial Sequence: Synthetic oligonucleotide
  Sense strand starting at position 8 of SEQ ID NO: 915658
auaugaacucuuugagucu

SEQ ID NO: 1096451 - RNA, 19 nt, Artificial Sequence
  Description of Artificial Sequence: Synthetic oligonucleotide
  Antisense strand to SEQ ID NO: 1096450
agacucaaagaguucauau

SEQ ID NO: 1096452 - RNA, 19 nt, Artificial Sequence
  Description of Artificial Sequence: Synthetic oligonucleotide
  Sense strand starting at position 15 of SEQ ID NO: 915658
cucuuugagucuuuguaau

SEQ ID NO: 1096453 - RNA, 19 nt, Artificial Sequence
  Description of Artificial Sequence: Synthetic oligonucleotide
  Antisense strand to SEQ ID NO: 1096452
auuacaaagacucaaagag

SEQ ID NO: 1096454 - RNA, 19 nt, Artificial Sequence
  Description of Artificial Sequence: Synthetic oligonucleotide
  Sense strand starting at position 17 of SEQ ID NO: 915658
cuuugagucuuuguaauaa

SEQ ID NO: 1096455 - RNA, 19 nt, Artificial Sequence
  Description of Artificial Sequence: Synthetic oligonucleotide
  Antisense strand to SEQ ID NO: 1096454
uuauuacaaagacucaaag

SEQ ID NO: 1096456 - RNA, 19 nt, Artificial Sequence
  Description of Artificial Sequence: Synthetic oligonucleotide
  Sense strand starting at position 27 of SEQ ID NO: 915658
uuguaauaauucugugaac

SEQ ID NO: 1096457 - RNA, 19 nt, Artificial Sequence
  Description of Artificial Sequence: Synthetic oligonucleotide
  Antisense strand to SEQ ID NO: 1096456
guucacagaauuauuacaa

SEQ ID NO: 1096458 - RNA, 19 nt, Artificial Sequence
  Description of Artificial Sequence: Synthetic oligonucleotide
  Sense strand starting at position 28 of SEQ ID NO: 915658
uguaauaauucugugaacc

SEQ ID NO: 1096459 - RNA, 19 nt, Artificial Sequence
  Description of Artificial Sequence: Synthetic oligonucleotide
  Antisense strand to SEQ ID NO: 1096458
gguucacagaauuauuaca

SEQ ID NO: 1096460 - RNA, 19 nt, Artificial Sequence
  Description of Artificial Sequence: Synthetic oligonucleotide
  Sense strand starting at position 29 of SEQ ID NO: 915658
guaauaauucugugaacca

SEQ ID NO: 1096461 - RNA, 19 nt, Artificial Sequence
  Description of Artificial Sequence: Synthetic oligonucleotide
  Antisense strand to SEQ ID NO: 1096460
ugguucacagaauuauuac

SEQ ID NO: 1096462 - RNA, 19 nt, Artificial Sequence
  Description of Artificial Sequence: Synthetic oligonucleotide
  Sense strand starting at position 36 of SEQ ID NO: 915658
uucugugaaccagguucua

SEQ ID NO: 1096463 - RNA, 19 nt, Artificial Sequence
  Description of Artificial Sequence: Synthetic oligonucleotide
  Antisense strand to SEQ ID NO: 1096462
uagaaccugguucacagaa

SEQ ID NO: 1096464 - RNA, 19 nt, Artificial Sequence
  Description of Artificial Sequence: Synthetic oligonucleotide
  Sense strand starting at position 46 of SEQ ID NO: 915658
cagguucuauuaugaugaa

SEQ ID NO: 1096465 - RNA, 19 nt, Artificial Sequence
  Description of Artificial Sequence: Synthetic oligonucleotide
  Antisense strand to SEQ ID NO: 1096464
uucaucauaauagaaccug

SEQ ID NO: 1096466 - RNA, 19 nt, Artificial Sequence
  Description of Artificial Sequence: Synthetic oligonucleotide
  Sense strand starting at position 47 of SEQ ID NO: 915658
agguucuauuaugaugaau

SEQ ID NO: 1096467 - RNA, 19 nt, Artificial Sequence
  Description of Artificial Sequence: Synthetic oligonucleotide
  Antisense strand to SEQ ID NO: 1096466
auucaucauaauagaaccu

SEQ ID NO: 1096468 - RNA, 19 nt, Artificial Sequence
  Description of Artificial Sequence: Synthetic oligonucleotide
  Sense strand starting at position 85 of SEQ ID NO: 915658
aaaugaggccgagagguua

SEQ ID NO: 1096469 - RNA, 19 nt, Artificial Sequence
  Description of Artificial Sequence: Synthetic oligonucleotide
  Antisense strand to SEQ ID NO: 1096468
uaaccucucggccucauuu

SEQ ID NO: 1096470 - RNA, 19 nt, Artificial Sequence
  Description of Artificial Sequence: Synthetic oligonucleotide
  Sense strand starting at position 93 of SEQ ID NO: 915658
ccgagagguuaagguauuu

SEQ ID NO: 1096471 - RNA, 19 nt, Artificial Sequence
  Description of Artificial Sequence: Synthetic oligonucleotide
  Antisense strand to SEQ ID NO: 1096470
aaauaccuuaaccucucgg

SEQ ID NO: 1096472 - RNA, 19 nt, Artificial Sequence
  Description of Artificial Sequence: Synthetic oligonucleotide
  Sense strand starting at position 103 of SEQ ID NO: 915658
aagguauuugccugugguu

SEQ ID NO: 1096473 - RNA, 19 nt, Artificial Sequence
  Description of Artificial Sequence: Synthetic oligonucleotide
  Antisense strand to SEQ ID NO: 1096472
aaccacaggcaaauaccuu

SEQ ID NO: 1096474 - RNA, 19 nt, Artificial Sequence
  Description of Artificial Sequence: Synthetic oligonucleotide
  Sense strand starting at position 160 of SEQ ID NO: 915658
gguauuagccacuagacca

SEQ ID NO: 1096475 - RNA, 19 nt, Artificial Sequence
  Description of Artificial Sequence: Synthetic oligonucleotide
  Antisense strand to SEQ ID NO: 1096474
uggucuaguggcuaauacc

SEQ ID NO: 1096476 - RNA, 19 nt, Artificial Sequence
  Description of Artificial Sequence: Synthetic oligonucleotide
  Sense strand starting at position 320 of SEQ ID NO: 915658
cugccuccuucugaaggaa

SEQ ID NO: 1096477 - RNA, 19 nt, Artificial Sequence
  Description of Artificial Sequence: Synthetic oligonucleotide
  Antisense strand to SEQ ID NO: 1096476
uuccuucagaaggaggcag

SEQ ID NO: 1096478 - RNA, 19 nt, Artificial Sequence
  Description of Artificial Sequence: Synthetic oligonucleotide
  Sense strand starting at position 362 of SEQ ID NO: 915658
ccaccagucuccugucuuu

SEQ ID NO: 1096479 - RNA, 19 nt, Artificial Sequence
  Description of Artificial Sequence: Synthetic oligonucleotide
  Antisense strand to SEQ ID NO: 1096478
aaagacaggagacuggugg

SEQ ID NO: 1096480 - RNA, 19 nt, Artificial Sequence
  Description of Artificial Sequence: Synthetic oligonucleotide
  Sense strand starting at position 388 of SEQ ID NO: 915658
cugggugccuccucugaau

SEQ ID NO: 1096481 - RNA, 19 nt, Artificial Sequence
  Description of Artificial Sequence: Synthetic oligonucleotide
  Antisense strand to SEQ ID NO: 1096480
auucagaggaggcacccag

SEQ ID NO: 1096482 - RNA, 19 nt, Artificial Sequence
  Description of Artificial Sequence: Synthetic oligonucleotide
  Sense strand starting at position 390 of SEQ ID NO: 915658
gggugccuccucugaauua

SEQ ID NO: 1096483 - RNA, 19 nt, Artificial Sequence
  Description of Artificial Sequence: Synthetic oligonucleotide
  Antisense strand to SEQ ID NO: 1096482
uaauucagaggaggcaccc

SEQ ID NO: 1096484 - RNA, 19 nt, Artificial Sequence
  Description of Artificial Sequence: Synthetic oligonucleotide
  Sense strand starting at position 437 of SEQ ID NO: 915658
ucuugcucauccuggaauu

SEQ ID NO: 1096485 - RNA, 19 nt, Artificial Sequence
  Description of Artificial Sequence: Synthetic oligonucleotide
  Antisense strand to SEQ ID NO: 1096484
aauuccaggaugagcaaga

SEQ ID NO: 1096486 - RNA, 19 nt, Artificial Sequence
  Description of Artificial Sequence: Synthetic oligonucleotide
  Sense strand starting at position 525 of SEQ ID NO: 915658
aaacuugggucaggcauua

SEQ ID NO: 1096487 - RNA, 19 nt, Artificial Sequence
  Description of Artificial Sequence: Synthetic oligonucleotide
  Antisense strand to SEQ ID NO: 1096486
uaaugccugacccaaguuu

SEQ ID NO: 1096488 - RNA, 19 nt, Artificial Sequence
  Description of Artificial Sequence: Synthetic oligonucleotide
  Sense strand starting at position 530 of SEQ ID NO: 915658
ugggucaggcauuaacauu

SEQ ID NO: 1096489 - RNA, 19 nt, Artificial Sequence
  Description of Artificial Sequence: Synthetic oligonucleotide
  Antisense strand to SEQ ID NO: 1096488
aauguuaaugccugaccca

SEQ ID NO: 1096490 - RNA, 19 nt, Artificial Sequence
  Description of Artificial Sequence: Synthetic oligonucleotide
  Sense strand starting at position 555 of SEQ ID NO: 915658
ccuguuuccucacuuguaa

SEQ ID NO: 1096491 - RNA, 19 nt, Artificial Sequence
  Description of Artificial Sequence: Synthetic oligonucleotide
  Antisense strand to SEQ ID NO: 1096490
uuacaagugaggaaacagg

SEQ ID NO: 1096492 - RNA, 19 nt, Artificial Sequence
  Description of Artificial Sequence: Synthetic oligonucleotide
  Sense strand starting at position 651 of SEQ ID NO: 915658
gcauuauugcugcugcaua

SEQ ID NO: 1096493 - RNA, 19 nt, Artificial Sequence
  Description of Artificial Sequence: Synthetic oligonucleotide
  Antisense strand to SEQ ID NO: 1096492
uaugcagcagcaauaaugc

SEQ ID NO: 1096494 - RNA, 19 nt, Artificial Sequence
  Description of Artificial Sequence: Synthetic oligonucleotide
  Sense strand starting at position 1165 of SEQ ID NO: 915658
caggaauccucucaaaggu

SEQ ID NO: 1096495 - RNA, 19 nt, Artificial Sequence
  Description of Artificial Sequence: Synthetic oligonucleotide
  Antisense strand to SEQ ID NO: 1096494
accuuugagaggauuccug

SEQ ID NO: 1096496 - RNA, 19 nt, Artificial Sequence
  Description of Artificial Sequence: Synthetic oligonucleotide
  Sense strand starting at position 1560 of SEQ ID NO: 915658
gcaagaacucuccgaccuu

SEQ ID NO: 1096497 - RNA, 19 nt, Artificial Sequence
  Description of Artificial Sequence: Synthetic oligonucleotide
  Antisense strand to SEQ ID NO: 1096496
aaggucggagaguucuugc

SEQ ID NO: 1096498 - RNA, 19 nt, Artificial Sequence
  Description of Artificial Sequence: Synthetic oligonucleotide
  Sense strand starting at position 1607 of SEQ ID NO: 915658
gguucaguccgagaaccca

SEQ ID NO: 1096499 - RNA, 19 nt, Artificial Sequence
  Description of Artificial Sequence: Synthetic oligonucleotide
  Antisense strand to SEQ ID NO: 1096498
uggguucucggacugaacc

SEQ ID NO: 1096500 - RNA, 19 nt, Artificial Sequence
  Description of Artificial Sequence: Synthetic oligonucleotide
  Sense strand starting at position 2036 of SEQ ID NO: 915658
guccuagugcccuacggau

SEQ ID NO: 1096501 - RNA, 19 nt, Artificial Sequence
  Description of Artificial Sequence: Synthetic oligonucleotide
  Antisense strand to SEQ ID NO: 1096500
auccguagggcacuaggac

SEQ ID NO: 1096502 - RNA, 19 nt, Artificial Sequence
  Description of Artificial Sequence: Synthetic oligonucleotide
  Sense strand starting at position 2147 of SEQ ID NO: 915658
cggugaguucuguguggcu

SEQ ID NO: 1096503 - RNA, 19 nt, Artificial Sequence
  Description of Artificial Sequence: Synthetic oligonucleotide
  Antisense strand to SEQ ID NO: 1096502
agccacacagaacucaccg

SEQ ID NO: 1096504 - RNA, 19 nt, Artificial Sequence
  Description of Artificial Sequence: Synthetic oligonucleotide
  Sense strand starting at position 2173 of SEQ ID NO: 915658
ggaagcuucugaucaggga

SEQ ID NO: 1096505 - RNA, 19 nt, Artificial Sequence
  Description of Artificial Sequence: Synthetic oligonucleotide
  Antisense strand to SEQ ID NO: 1096504
ucccugaucagaagcuucc

SEQ ID NO: 1096506 - RNA, 19 nt, Artificial Sequence
  Description of Artificial Sequence: Synthetic oligonucleotide
  Sense strand starting at position 2177 of SEQ ID NO: 915658
gcuucugaucagggaagaa

SEQ ID NO: 1096507 - RNA, 19 nt, Artificial Sequence
  Description of Artificial Sequence: Synthetic oligonucleotide
  Antisense strand to SEQ ID NO: 1096506
uucuucccugaucagaagc

SEQ ID NO: 1096508 - RNA, 19 nt, Artificial Sequence
  Description of Artificial Sequence: Synthetic oligonucleotide
  Sense strand starting at position 2411 of SEQ ID NO: 915658
gcucuagucucuugaccag

SEQ ID NO: 1096509 - RNA, 19 nt, Artificial Sequence
  Description of Artificial Sequence: Synthetic oligonucleotide
  Antisense strand to SEQ ID NO: 1096508
cuggucaagagacuagagc

SEQ ID NO: 1096510 - RNA, 19 nt, Artificial Sequence
  Description of Artificial Sequence: Synthetic oligonucleotide
  Sense strand starting at position 2797 of SEQ ID NO: 915658
gccagucguuccuacguuu

SEQ ID NO: 1096511 - RNA, 19 nt, Artificial Sequence
  Description of Artificial Sequence: Synthetic oligonucleotide
  Antisense strand to SEQ ID NO: 1096510
aaacguaggaacgacuggc

SEQ ID NO: 1096512 - RNA, 19 nt, Artificial Sequence
  Description of Artificial Sequence: Synthetic oligonucleotide
  Sense strand starting at position 2842 of SEQ ID NO: 915658
ccuugugcuccuggaggga

SEQ ID NO: 1096513 - RNA, 19 nt, Artificial Sequence
  Description of Artificial Sequence: Synthetic oligonucleotide
  Antisense strand to SEQ ID NO: 1096512
ucccuccaggagcacaagg

SEQ ID NO: 1096514 - RNA, 19 nt, Artificial Sequence
  Description of Artificial Sequence: Synthetic oligonucleotide
  Sense strand starting at position 2942 of SEQ ID NO: 915658
ggagcugcacuacagaaau

SEQ ID NO: 1096515 - RNA, 19 nt, Artificial Sequence
  Description of Artificial Sequence: Synthetic oligonucleotide
  Antisense strand to SEQ ID NO: 1096514
auuucuguagugcagcucc

SEQ ID NO: 1096516 - RNA, 19 nt, Artificial Sequence
  Description of Artificial Sequence: Synthetic oligonucleotide
  Sense strand starting at position 2948 of SEQ ID NO: 915658
gcacuacagaaauggguuu

SEQ ID NO: 1096517 - RNA, 19 nt, Artificial Sequence
  Description of Artificial Sequence: Synthetic oligonucleotide
  Antisense strand to SEQ ID NO: 1096516
aaacccauuucuguagugc

SEQ ID NO: 1096518 - RNA, 19 nt, Artificial Sequence
  Description of Artificial Sequence: Synthetic oligonucleotide
  Sense strand starting at position 2954 of SEQ ID NO: 915658
cagaaauggguuuagcagu

SEQ ID NO: 1096519 - RNA, 19 nt, Artificial Sequence
  Description of Artificial Sequence: Synthetic oligonucleotide
  Antisense strand to SEQ ID NO: 1096518
acugcuaaacccauuucug

SEQ ID NO: 1096520 - RNA, 19 nt, Artificial Sequence
  Description of Artificial Sequence: Synthetic oligonucleotide
  Sense strand starting at position 2960 of SEQ ID NO: 915658
uggguuuagcaguagagga

SEQ ID NO: 1096521 - RNA, 19 nt, Artificial Sequence
  Description of Artificial Sequence: Synthetic oligonucleotide
  Antisense strand to SEQ ID NO: 1096520
uccucuacugcuaaaccca

SEQ ID NO: 1096522 - RNA, 19 nt, Artificial Sequence
  Description of Artificial Sequence: Synthetic oligonucleotide
  Sense strand starting at position 2988 of SEQ ID NO: 915658
gcaauccagacuuggagua

SEQ ID NO: 1096523 - RNA, 19 nt, Artificial Sequence
  Description of Artificial Sequence: Synthetic oligonucleotide
  Antisense strand to SEQ ID NO: 1096522
uacuccaagucuggauugc

SEQ ID NO: 1096524 - RNA, 19 nt, Artificial Sequence
  Description of Artificial Sequence: Synthetic oligonucleotide
  Sense strand starting at position 2989 of SEQ ID NO: 915658
caauccagacuuggaguaa

SEQ ID NO: 1096525 - RNA, 19 nt, Artificial Sequence
  Description of Artificial Sequence: Synthetic oligonucleotide
  Antisense strand to SEQ ID NO: 1096524
uuacuccaagucuggauug

SEQ ID NO: 1096526 - RNA, 19 nt, Artificial Sequence
  Description of Artificial Sequence: Synthetic oligonucleotide
  Sense strand starting at position 2990 of SEQ ID NO: 915658
aauccagacuuggaguaaa

SEQ ID NO: 1096527 - RNA, 19 nt, Artificial Sequence
  Description of Artificial Sequence: Synthetic oligonucleotide
  Antisense strand to SEQ ID NO: 1096526
uuuacuccaagucuggauu

SEQ ID NO: 1096528 - RNA, 19 nt, Artificial Sequence
  Description of Artificial Sequence: Synthetic oligonucleotide
  Sense strand starting at position 2043 of SEQ ID NO: 915659
ggguacacuggaugauagu

SEQ ID NO: 1096529 - RNA, 19 nt, Artificial Sequence
  Description of Artificial Sequence: Synthetic oligonucleotide
  Antisense strand to SEQ ID NO: 1096528
acuaucauccaguguaccc

SEQ ID NO: 1096530 - RNA, 19 nt, Artificial Sequence
  Description of Artificial Sequence: Synthetic oligonucleotide
  Sense strand starting at position 2049 of SEQ ID NO: 915659
acuggaugauagugagaaa

SEQ ID NO: 1096531 - RNA, 19 nt, Artificial Sequence
  Description of Artificial Sequence: Synthetic oligonucleotide
  Antisense strand to SEQ ID NO: 1096530
uuucucacuaucauccagu

SEQ ID NO: 1096532 - RNA, 19 nt, Artificial Sequence
  Description of Artificial Sequence: Synthetic oligonucleotide
  Sense strand starting at position 2052 of SEQ ID NO: 915659
ggaugauagugagaaaucu

SEQ ID NO: 1096533 - RNA, 19 nt, Artificial Sequence
  Description of Artificial Sequence: Synthetic oligonucleotide
  Antisense strand to SEQ ID NO: 1096532
agauuucucacuaucaucc

SEQ ID NO: 1096534 - RNA, 19 nt, Artificial Sequence
  Description of Artificial Sequence: Synthetic oligonucleotide
  Sense strand starting at position 2061 of SEQ ID NO: 915659
ugagaaaucuguuugccuc

SEQ ID NO: 1096535 - RNA, 19 nt, Artificial Sequence
  Description of Artificial Sequence: Synthetic oligonucleotide
  Antisense strand to SEQ ID NO: 1096534
gaggcaaacagauuucuca

SEQ ID NO: 1096536 - RNA, 19 nt, Artificial Sequence
  Description of Artificial Sequence: Synthetic oligonucleotide
  Sense strand starting at position 2062 of SEQ ID NO: 915659
gagaaaucuguuugccuca

SEQ ID NO: 1096537 - RNA, 19 nt, Artificial Sequence
  Description of Artificial Sequence: Synthetic oligonucleotide
  Antisense strand to SEQ ID NO: 1096536
ugaggcaaacagauuucuc

SEQ ID NO: 1096538 - RNA, 19 nt, Artificial Sequence
  Description of Artificial Sequence: Synthetic oligonucleotide
  Sense strand starting at position 2121 of SEQ ID NO: 915659
agcuaauuaucaucgaaua

SEQ ID NO: 1096539 - RNA, 19 nt, Artificial Sequence
  Description of Artificial Sequence: Synthetic oligonucleotide
  Antisense strand to SEQ ID NO: 1096538
uauucgaugauaauuagcu

SEQ ID NO: 1096540 - RNA, 19 nt, Artificial Sequence
  Description of Artificial Sequence: Synthetic oligonucleotide
  Sense strand starting at position 2122 of SEQ ID NO: 915659
gcuaauuaucaucgaauaa

SEQ ID NO: 1096541 - RNA, 19 nt, Artificial Sequence
  Description of Artificial Sequence: Synthetic oligonucleotide
  Antisense strand to SEQ ID NO: 1096540
uuauucgaugauaauuagc

SEQ ID NO: 1096542 - RNA, 19 nt, Artificial Sequence
  Description of Artificial Sequence: Synthetic oligonucleotide
  Sense strand starting at position 2241 of SEQ ID NO: 915659
gcagacaaaucauuguuga

SEQ ID NO: 1096543 - RNA, 19 nt, Artificial Sequence
  Description of Artificial Sequence: Synthetic oligonucleotide
  Antisense strand to SEQ ID NO: 1096542
ucaacaaugauuugucugc

SEQ ID NO: 1096544 - RNA, 19 nt, Artificial Sequence
  Description of Artificial Sequence: Synthetic oligonucleotide
  Sense strand starting at position 2242 of SEQ ID NO: 915659
cagacaaaucauuguugag

SEQ ID NO: 1096545 - RNA, 19 nt, Artificial Sequence
  Description of Artificial Sequence: Synthetic oligonucleotide
  Antisense strand to SEQ ID NO: 1096544
cucaacaaugauuugucug

SEQ ID NO: 1096546 - RNA, 19 nt, Artificial Sequence
  Description of Artificial Sequence: Synthetic oligonucleotide
  Sense strand starting at position 2245 of SEQ ID NO: 915659
acaaaucauuguugagaaa

SEQ ID NO: 1096547 - RNA, 19 nt, Artificial Sequence
  Description of Artificial Sequence: Synthetic oligonucleotide
  Antisense strand to SEQ ID NO: 1096546
uuucucaacaaugauuugu

SEQ ID NO: 1096548 - RNA, 19 nt, Artificial Sequence
  Description of Artificial Sequence: Synthetic oligonucleotide
  Sense strand starting at position 2257 of SEQ ID NO: 915659
ugagaaaccugguuguguu

SEQ ID NO: 1096549 - RNA, 19 nt, Artificial Sequence
  Description of Artificial Sequence: Synthetic oligonucleotide
  Antisense strand to SEQ ID NO: 1096548
aacacaaccagguuucuca

SEQ ID NO: 1096550 - RNA, 19 nt, Artificial Sequence
  Description of Artificial Sequence: Synthetic oligonucleotide
  Sense strand starting at position 2258 of SEQ ID NO: 915659
gagaaaccugguuguguuc

SEQ ID NO: 1096551 - RNA, 19 nt, Artificial Sequence
  Description of Artificial Sequence: Synthetic oligonucleotide
  Antisense strand to SEQ ID NO: 1096550
gaacacaaccagguuucuc

SEQ ID NO: 1096552 - RNA, 19 nt, Artificial Sequence
  Description of Artificial Sequence: Synthetic oligonucleotide
  Sense strand starting at position 2348 of SEQ ID NO: 915659
uuccucauacuucgugaau

SEQ ID NO: 1096553 - RNA, 19 nt, Artificial Sequence
  Description of Artificial Sequence: Synthetic oligonucleotide
  Antisense strand to SEQ ID NO: 1096552
auucacgaaguaugaggaa

SEQ ID NO: 1096554 - RNA, 19 nt, Artificial Sequence
  Description of Artificial Sequence: Synthetic oligonucleotide
  Sense strand starting at position 2349 of SEQ ID NO: 915659
uccucauacuucgugaaug

SEQ ID NO: 1096555 - RNA, 19 nt, Artificial Sequence
  Description of Artificial Sequence: Synthetic oligonucleotide
  Antisense strand to SEQ ID NO: 1096554
cauucacgaaguaugagga

SEQ ID NO: 1096556 - RNA, 19 nt, Artificial Sequence
  Description of Artificial Sequence: Synthetic oligonucleotide
  Sense strand starting at position 2351 of SEQ ID NO: 915659
cucauacuucgugaauguu

SEQ ID NO: 1096557 - RNA, 19 nt, Artificial Sequence
  Description of Artificial Sequence: Synthetic oligonucleotide
  Antisense strand to SEQ ID NO: 1096556
aacauucacgaaguaugag

SEQ ID NO: 1096558 - RNA, 19 nt, Artificial Sequence
  Description of Artificial Sequence: Synthetic oligonucleotide
  Sense strand starting at position 2354 of SEQ ID NO: 915659
auacuucgugaauguuaca

SEQ ID NO: 1096559 - RNA, 19 nt, Artificial Sequence
  Description of Artificial Sequence: Synthetic oligonucleotide
  Antisense strand to SEQ ID NO: 1096558
uguaacauucacgaaguau

SEQ ID NO: 1096560 - RNA, 19 nt, Artificial Sequence
  Description of Artificial Sequence: Synthetic oligonucleotide
  Sense strand starting at position 2359 of SEQ ID NO: 915659
ucgugaauguuacaggaau

SEQ ID NO: 1096561 - RNA, 19 nt, Artificial Sequence
  Description of Artificial Sequence: Synthetic oligonucleotide
  Antisense strand to SEQ ID NO: 1096560
auuccuguaacauucacga

SEQ ID NO: 1096562 - RNA, 19 nt, Artificial Sequence
  Description of Artificial Sequence: Synthetic oligonucleotide
  Sense strand starting at position 2361 of SEQ ID NO: 915659
gugaauguuacaggaauac

SEQ ID NO: 1096563 - RNA, 19 nt, Artificial Sequence
  Description of Artificial Sequence: Synthetic oligonucleotide
  Antisense strand to SEQ ID NO: 1096562
guauuccuguaacauucac

SEQ ID NO: 1096564 - RNA, 19 nt, Artificial Sequence
  Description of Artificial Sequence: Synthetic oligonucleotide
  Sense strand starting at position 2446 of SEQ ID NO: 915659
uccauaaacuugguagcau

SEQ ID NO: 1096565 - RNA, 19 nt, Artificial Sequence
  Description of Artificial Sequence: Synthetic oligonucleotide
  Antisense strand to SEQ ID NO: 1096564
augcuaccaaguuuaugga

SEQ ID NO: 1096566 - RNA, 19 nt, Artificial Sequence
  Description of Artificial Sequence: Synthetic oligonucleotide
  Sense strand starting at position 2447 of SEQ ID NO: 915659
ccauaaacuugguagcauu

SEQ ID NO: 1096567 - RNA, 19 nt, Artificial Sequence
  Description of Artificial Sequence: Synthetic oligonucleotide
  Antisense strand to SEQ ID NO: 1096566
aaugcuaccaaguuuaugg

SEQ ID NO: 1096568 - RNA, 19 nt, Artificial Sequence
  Description of Artificial Sequence: Synthetic oligonucleotide
  Sense strand starting at position 2474 of SEQ ID NO: 915659
acaagagagucaucuguga

SEQ ID NO: 1096569 - RNA, 19 nt, Artificial Sequence
  Description of Artificial Sequence: Synthetic oligonucleotide
  Antisense strand to SEQ ID NO: 1096568
ucacagaugacucucuugu

SEQ ID NO: 1096570 - RNA, 19 nt, Artificial Sequence
  Description of Artificial Sequence: Synthetic oligonucleotide
  Sense strand starting at position 2478 of SEQ ID NO: 915659
gagagucaucugugaaaca

SEQ ID NO: 1096571 - RNA, 19 nt, Artificial Sequence
  Description of Artificial Sequence: Synthetic oligonucleotide
  Antisense strand to SEQ ID NO: 1096570
uguuucacagaugacucuc

SEQ ID NO: 1096572 - RNA, 19 nt, Artificial Sequence
  Description of Artificial Sequence: Synthetic oligonucleotide
  Sense strand starting at position 2479 of SEQ ID NO: 915659
agagucaucugugaaacac

SEQ ID NO: 1096573 - RNA, 19 nt, Artificial Sequence
  Description of Artificial Sequence: Synthetic oligonucleotide
  Antisense strand to SEQ ID NO: 1096572
guguuucacagaugacucu

SEQ ID NO: 1096574 - RNA, 19 nt, Artificial Sequence
  Description of Artificial Sequence: Synthetic oligonucleotide
  Sense strand starting at position 2525 of SEQ ID NO: 915659
ucacauaacucaggagaua

SEQ ID NO: 1096575 - RNA, 19 nt, Artificial Sequence
  Description of Artificial Sequence: Synthetic oligonucleotide
  Antisense strand to SEQ ID NO: 1096574
uaucuccugaguuauguga

SEQ ID NO: 1096576 - RNA, 19 nt, Artificial Sequence
  Description of Artificial Sequence: Synthetic oligonucleotide
  Sense strand starting at position 2583 of SEQ ID NO: 915659
cugauuauaccguaagcag

SEQ ID NO: 1096577 - RNA, 19 nt, Artificial Sequence
  Description of Artificial Sequence: Synthetic oligonucleotide
  Antisense strand to SEQ ID NO: 1096576
cugcuuacgguauaaucag

SEQ ID NO: 1096578 - RNA, 19 nt, Artificial Sequence
  Description of Artificial Sequence: Synthetic oligonucleotide
  Sense strand starting at position 2599 of SEQ ID NO: 915659
caguuauuagggugcagag

SEQ ID NO: 1096579 - RNA, 19 nt, Artificial Sequence
  Description of Artificial Sequence: Synthetic oligonucleotide
  Antisense strand to SEQ ID NO: 1096578
cucugcacccuaauaacug

SEQ ID NO: 1096580 - RNA, 19 nt, Artificial Sequence
  Description of Artificial Sequence: Synthetic oligonucleotide
  Sense strand starting at position 2629 of SEQ ID NO: 915659
ugaagauauggauguggca

SEQ ID NO: 1096581 - RNA, 19 nt, Artificial Sequence
  Description of Artificial Sequence: Synthetic oligonucleotide
  Antisense strand to SEQ ID NO: 1096580
ugccacauccauaucuuca

SEQ ID NO: 1096582 - RNA, 19 nt, Artificial Sequence
  Description of Artificial Sequence: Synthetic oligonucleotide
  Sense strand starting at position 2632 of SEQ ID NO: 915659
agauauggauguggcaauu

SEQ ID NO: 1096583 - RNA, 19 nt, Artificial Sequence
  Description of Artificial Sequence: Synthetic oligonucleotide
  Antisense strand to SEQ ID NO: 1096582
aauugccacauccauaucu

SEQ ID NO: 1096584 - RNA, 19 nt, Artificial Sequence
  Description of Artificial Sequence: Synthetic oligonucleotide
  Sense strand starting at position 2777 of SEQ ID NO: 915659
uagaguacauguccugacu

SEQ ID NO: 1096585 - RNA, 19 nt, Artificial Sequence
  Description of Artificial Sequence: Synthetic oligonucleotide
  Antisense strand to SEQ ID NO: 1096584
agucaggacauguacucua

SEQ ID NO: 1096586 - RNA, 19 nt, Artificial Sequence
  Description of Artificial Sequence: Synthetic oligonucleotide
  Sense strand starting at position 2790 of SEQ ID NO: 915659
cugacuuucucagugcuca

SEQ ID NO: 1096587 - RNA, 19 nt, Artificial Sequence
  Description of Artificial Sequence: Synthetic oligonucleotide
  Antisense strand to SEQ ID NO: 1096586
ugagcacugagaaagucag

SEQ ID NO: 1096588 - RNA, 19 nt, Artificial Sequence
  Description of Artificial Sequence: Synthetic oligonucleotide
  Sense strand starting at position 2791 of SEQ ID NO: 915659
ugacuuucucagugcucau

SEQ ID NO: 1096589 - RNA, 19 nt, Artificial Sequence
  Description of Artificial Sequence: Synthetic oligonucleotide
  Antisense strand to SEQ ID NO: 1096588
augagcacugagaaaguca

SEQ ID NO: 1096590 - RNA, 19 nt, Artificial Sequence
  Description of Artificial Sequence: Synthetic oligonucleotide
  Sense strand starting at position 2823 of SEQ ID NO: 915659
guaggaaacuuacuuuaag

SEQ ID NO: 1096591 - RNA, 19 nt, Artificial Sequence
  Description of Artificial Sequence: Synthetic oligonucleotide
  Antisense strand to SEQ ID NO: 1096590
cuuaaaguaaguuuccuac

SEQ ID NO: 1096592 - RNA, 19 nt, Artificial Sequence
  Description of Artificial Sequence: Synthetic oligonucleotide
  Sense strand starting at position 2865 of SEQ ID NO: 915659
ccaguauauggccaugacu

SEQ ID NO: 1096593 - RNA, 19 nt, Artificial Sequence
  Description of Artificial Sequence: Synthetic oligonucleotide
  Antisense strand to SEQ ID NO: 1096592
agucauggccauauacugg

SEQ ID NO: 1096594 - RNA, 19 nt, Artificial Sequence
  Description of Artificial Sequence: Synthetic oligonucleotide
  Sense strand starting at position 2867 of SEQ ID NO: 915659
aguauauggccaugacuug

SEQ ID NO: 1096595 - RNA, 19 nt, Artificial Sequence
  Description of Artificial Sequence: Synthetic oligonucleotide
  Antisense strand to SEQ ID NO: 1096594
caagucauggccauauacu

SEQ ID NO: 1096596 - RNA, 19 nt, Artificial Sequence
  Description of Artificial Sequence: Synthetic oligonucleotide
  Sense strand starting at position 2874 of SEQ ID NO: 915659
ggccaugacuugcuuacau

SEQ ID NO: 1096597 - RNA, 19 nt, Artificial Sequence
  Description of Artificial Sequence: Synthetic oligonucleotide
  Antisense strand to SEQ ID NO: 1096596
auguaagcaagucauggcc

SEQ ID NO: 1096598 - RNA, 19 nt, Artificial Sequence
  Description of Artificial Sequence: Synthetic oligonucleotide
  Sense strand starting at position 2893 of SEQ ID NO: 915659
uguaauccauuaugaagga

SEQ ID NO: 1096599 - RNA, 19 nt, Artificial Sequence
  Description of Artificial Sequence: Synthetic oligonucleotide
  Antisense strand to SEQ ID NO: 1096598
uccuucauaauggauuaca

SEQ ID NO: 1096600 - RNA, 19 nt, Artificial Sequence
  Description of Artificial Sequence: Synthetic oligonucleotide
  Sense strand starting at position 2894 of SEQ ID NO: 915659
guaauccauuaugaaggaa

SEQ ID NO: 1096601 - RNA, 19 nt, Artificial Sequence
  Description of Artificial Sequence: Synthetic oligonucleotide
  Antisense strand to SEQ ID NO: 1096600
uuccuucauaauggauuac

SEQ ID NO: 1096602 - RNA, 19 nt, Artificial Sequence
  Description of Artificial Sequence: Synthetic oligonucleotide
  Sense strand starting at position 3114 of SEQ ID NO: 915659
gcagaauuagcuuacagac

SEQ ID NO: 1096603 - RNA, 19 nt, Artificial Sequence
  Description of Artificial Sequence: Synthetic oligonucleotide
  Antisense strand to SEQ ID NO: 1096602
gucuguaagcuaauucugc

SEQ ID NO: 1096604 - RNA, 19 nt, Artificial Sequence
  Description of Artificial Sequence: Synthetic oligonucleotide
  Sense strand starting at position 3116 of SEQ ID NO: 915659
agaauuagcuuacagacaa

SEQ ID NO: 1096605 - RNA, 19 nt, Artificial Sequence
  Description of Artificial Sequence: Synthetic oligonucleotide
  Antisense strand to SEQ ID NO: 1096604
uugucuguaagcuaauucu

SEQ ID NO: 1096606 - RNA, 19 nt, Artificial Sequence
  Description of Artificial Sequence: Synthetic oligonucleotide
  Sense strand starting at position 3148 of SEQ ID NO: 915659
acacuuugguccguguuca

SEQ ID NO: 1096607 - RNA, 19 nt, Artificial Sequence
  Description of Artificial Sequence: Synthetic oligonucleotide
  Antisense strand to SEQ ID NO: 1096606
ugaacacggaccaaagugu

SEQ ID NO: 1096608 - RNA, 19 nt, Artificial Sequence
  Description of Artificial Sequence: Synthetic oligonucleotide
  Sense strand starting at position 77 of SEQ ID NO: 915660
ggcgguucuucuggaucaa

SEQ ID NO: 1096609 - RNA, 19 nt, Artificial Sequence
  Description of Artificial Sequence: Synthetic oligonucleotide
  Antisense strand to SEQ ID NO: 1096608
uugauccagaagaaccgcc

SEQ ID NO: 1096610 - RNA, 19 nt, Artificial Sequence
  Description of Artificial Sequence: Synthetic oligonucleotide
  Sense strand starting at position 78 of SEQ ID NO: 915660
gcgguucuucuggaucaaa

SEQ ID NO: 1096611 - RNA, 19 nt, Artificial Sequence
  Description of Artificial Sequence: Synthetic oligonucleotide
  Antisense strand to SEQ ID NO: 1096610
uuugauccagaagaaccgc

SEQ ID NO: 1096612 - RNA, 19 nt, Artificial Sequence
  Description of Artificial Sequence: Synthetic oligonucleotide
  Sense strand starting at position 292 of SEQ ID NO: 915660
gauggaaguucggcuggaa

SEQ ID NO: 1096613 - RNA, 19 nt, Artificial Sequence
  Description of Artificial Sequence: Synthetic oligonucleotide
  Antisense strand to SEQ ID NO: 1096612
uuccagccgaacuuccauc

SEQ ID NO: 1096614 - RNA, 19 nt, Artificial Sequence
  Description of Artificial Sequence: Synthetic oligonucleotide
  Sense strand starting at position 452 of SEQ ID NO: 915660
gugggugagcaugaauuca

SEQ ID NO: 1096615 - RNA, 19 nt, Artificial Sequence
  Description of Artificial Sequence: Synthetic oligonucleotide
  Antisense strand to SEQ ID NO: 1096614
ugaauucaugcucacccac

SEQ ID NO: 1096616 - RNA, 19 nt, Artificial Sequence
  Description of Artificial Sequence: Synthetic oligonucleotide
  Sense strand starting at position 810 of SEQ ID NO: 915660
cagguucuguugcagaaca

SEQ ID NO: 1096617 - RNA, 19 nt, Artificial Sequence
  Description of Artificial Sequence: Synthetic oligonucleotide
  Antisense strand to SEQ ID NO: 1096616
uguucugcaacagaaccug

SEQ ID NO: 1096618 - RNA, 19 nt, Artificial Sequence
  Description of Artificial Sequence: Synthetic oligonucleotide
  Sense strand starting at position 812 of SEQ ID NO: 915660
gguucuguugcagaacaca

SEQ ID NO: 1096619 - RNA, 19 nt, Artificial Sequence
  Description of Artificial Sequence: Synthetic oligonucleotide
  Antisense strand to SEQ ID NO: 1096618
uguguucugcaacagaacc

SEQ ID NO: 1096620 - RNA, 19 nt, Artificial Sequence
  Description of Artificial Sequence: Synthetic oligonucleotide
  Sense strand starting at position 953 of SEQ ID NO: 915660
gcagaacggguuuggugau

SEQ ID NO: 1096621 - RNA, 19 nt, Artificial Sequence
  Description of Artificial Sequence: Synthetic oligonucleotide
  Antisense strand to SEQ ID NO: 1096620
aucaccaaacccguucugc

SEQ ID NO: 1096622 - RNA, 19 nt, Artificial Sequence
  Description of Artificial Sequence: Synthetic oligonucleotide
  Sense strand starting at position 1026 of SEQ ID NO: 915660
cugcauagaucccagggaa

SEQ ID NO: 1096623 - RNA, 19 nt, Artificial Sequence
  Description of Artificial Sequence: Synthetic oligonucleotide
  Antisense strand to SEQ ID NO: 1096622
uucccugggaucuaugcag

SEQ ID NO: 1096624 - RNA, 19 nt, Artificial Sequence
  Description of Artificial Sequence: Synthetic oligonucleotide
  Sense strand starting at position 1231 of SEQ ID NO: 915660
cugguuuagugggagccaa

SEQ ID NO: 1096625 - RNA, 19 nt, Artificial Sequence
  Description of Artificial Sequence: Synthetic oligonucleotide
  Antisense strand to SEQ ID NO: 1096624
uuggcucccacuaaaccag

SEQ ID NO: 1096626 - RNA, 19 nt, Artificial Sequence
  Description of Artificial Sequence: Synthetic oligonucleotide
  Sense strand starting at position 1259 of SEQ ID NO: 915660
aaggacuggucaugugaga

SEQ ID NO: 1096627 - RNA, 19 nt, Artificial Sequence
  Description of Artificial Sequence: Synthetic oligonucleotide
  Antisense strand to SEQ ID NO: 1096626
ucucacaugaccaguccuu

SEQ ID NO: 1096628 - RNA, 19 nt, Artificial Sequence
  Description of Artificial Sequence: Synthetic oligonucleotide
  Sense strand starting at position 1343 of SEQ ID NO: 915660
gcggguucccaucagcuua

SEQ ID NO: 1096629 - RNA, 19 nt, Artificial Sequence
  Description of Artificial Sequence: Synthetic oligonucleotide
  Antisense strand to SEQ ID NO: 1096628
uaagcugaugggaacccgc

SEQ ID NO: 1096630 - RNA, 19 nt, Artificial Sequence
  Description of Artificial Sequence: Synthetic oligonucleotide
  Sense strand starting at position 1452 of SEQ ID NO: 915660
gcgaguagccaggaugagu

SEQ ID NO: 1096631 - RNA, 19 nt, Artificial Sequence
  Description of Artificial Sequence: Synthetic oligonucleotide
  Antisense strand to SEQ ID NO: 1096630
acucauccuggcuacucgc

SEQ ID NO: 1096632 - RNA, 19 nt, Artificial Sequence
  Description of Artificial Sequence: Synthetic oligonucleotide
  Sense strand starting at position 1870 of SEQ ID NO: 915660
gcucgaaggcaucaucaau

SEQ ID NO: 1096633 - RNA, 19 nt, Artificial Sequence
  Description of Artificial Sequence: Synthetic oligonucleotide
  Antisense strand to SEQ ID NO: 1096632
auugaugaugccuucgagc

SEQ ID NO: 1096634 - RNA, 19 nt, Artificial Sequence
  Description of Artificial Sequence: Synthetic oligonucleotide
  Sense strand starting at position 1876 of SEQ ID NO: 915660
aggcaucaucaaugcugaa

SEQ ID NO: 1096635 - RNA, 19 nt, Artificial Sequence
  Description of Artificial Sequence: Synthetic oligonucleotide
  Antisense strand to SEQ ID NO: 1096634
uucagcauugaugaugccu

SEQ ID NO: 1096636 - RNA, 19 nt, Artificial Sequence
  Description of Artificial Sequence: Synthetic oligonucleotide
  Sense strand starting at position 2285 of SEQ ID NO: 915660
caaggagacuccugggaac

SEQ ID NO: 1096637 - RNA, 19 nt, Artificial Sequence
  Description of Artificial Sequence: Synthetic oligonucleotide
  Antisense strand to SEQ ID NO: 1096636
guucccaggagucuccuug

SEQ ID NO: 1096638 - RNA, 19 nt, Artificial Sequence
  Description of Artificial Sequence: Synthetic oligonucleotide
  Sense strand starting at position 2382 of SEQ ID NO: 915660
cagagagcuuaugugucuu

SEQ ID NO: 1096639 - RNA, 19 nt, Artificial Sequence
  Description of Artificial Sequence: Synthetic oligonucleotide
  Antisense strand to SEQ ID NO: 1096638
aagacacauaagcucucug

SEQ ID NO: 1096640 - RNA, 19 nt, Artificial Sequence
  Description of Artificial Sequence: Synthetic oligonucleotide
  Sense strand starting at position 2386 of SEQ ID NO: 915660
gagcuuaugugucuuccaa

SEQ ID NO: 1096641 - RNA, 19 nt, Artificial Sequence
  Description of Artificial Sequence: Synthetic oligonucleotide
  Antisense strand to SEQ ID NO: 1096640
uuggaagacacauaagcuc

SEQ ID NO: 1096642 - RNA, 19 nt, Artificial Sequence
  Description of Artificial Sequence: Synthetic oligonucleotide
  Sense strand starting at position 2388 of SEQ ID NO: 915660
gcuuaugugucuuccaauu

SEQ ID NO: 1096643 - RNA, 19 nt, Artificial Sequence
  Description of Artificial Sequence: Synthetic oligonucleotide
  Antisense strand to SEQ ID NO: 1096642
aauuggaagacacauaagc

SEQ ID NO: 1096644 - RNA, 19 nt, Artificial Sequence
  Description of Artificial Sequence: Synthetic oligonucleotide
  Sense strand starting at position 2390 of SEQ ID NO: 915660
uuaugugucuuccaauuuc

SEQ ID NO: 1096645 - RNA, 19 nt, Artificial Sequence
  Description of Artificial Sequence: Synthetic oligonucleotide
  Antisense strand to SEQ ID NO: 1096644
gaaauuggaagacacauaa

SEQ ID NO: 1096646 - RNA, 19 nt, Artificial Sequence
  Description of Artificial Sequence: Synthetic oligonucleotide
  Sense strand starting at position 2457 of SEQ ID NO: 915660
uuuaucugcguguguuauu

SEQ ID NO: 1096647 - RNA, 19 nt, Artificial Sequence
  Description of Artificial Sequence: Synthetic oligonucleotide
  Antisense strand to SEQ ID NO: 1096646
aauaacacacgcagauaaa

SEQ ID NO: 1096648 - RNA, 19 nt, Artificial Sequence
  Description of Artificial Sequence: Synthetic oligonucleotide
  Sense strand starting at position 2462 of SEQ ID NO: 915660
cugcguguguuauucugaa

SEQ ID NO: 1096649 - RNA, 19 nt, Artificial Sequence
  Description of Artificial Sequence: Synthetic oligonucleotide
  Antisense strand to SEQ ID NO: 1096648
uucagaauaacacacgcag

SEQ ID NO: 1096650 - RNA, 19 nt, Artificial Sequence
  Description of Artificial Sequence: Synthetic oligonucleotide
  Sense strand starting at position 3168 of SEQ ID NO: 915660
gcagaaguacucuaugaau

SEQ ID NO: 1096651 - RNA, 19 nt, Artificial Sequence
  Description of Artificial Sequence: Synthetic oligonucleotide
  Antisense strand to SEQ ID NO: 1096650
auucauagaguacuucugc

SEQ ID NO: 1096652 - RNA, 19 nt, Artificial Sequence
  Description of Artificial Sequence: Synthetic oligonucleotide
  Sense strand starting at position 3171 of SEQ ID NO: 915660
gaaguacucuaugaauuag

SEQ ID NO: 1096653 - RNA, 19 nt, Artificial Sequence
  Description of Artificial Sequence: Synthetic oligonucleotide
  Antisense strand to SEQ ID NO: 1096652
cuaauucauagaguacuuc

SEQ ID NO: 1096654 - RNA, 19 nt, Artificial Sequence
  Description of Artificial Sequence: Synthetic oligonucleotide
  Sense strand starting at position 3221 of SEQ ID NO: 915660
cuuguaaguacuugggacu

SEQ ID NO: 1096655 - RNA, 19 nt, Artificial Sequence
  Description of Artificial Sequence: Synthetic oligonucleotide
  Antisense strand to SEQ ID NO: 1096654
agucccaaguacuuacaag

SEQ ID NO: 1096656 - RNA, 19 nt, Artificial Sequence
  Description of Artificial Sequence: Synthetic oligonucleotide
  Sense strand starting at position 3222 of SEQ ID NO: 915660
uuguaaguacuugggacuu

SEQ ID NO: 1096657 - RNA, 19 nt, Artificial Sequence
  Description of Artificial Sequence: Synthetic oligonucleotide
  Antisense strand to SEQ ID NO: 1096656
aagucccaaguacuuacaa

SEQ ID NO: 1096658 - RNA, 19 nt, Artificial Sequence
  Description of Artificial Sequence: Synthetic oligonucleotide
  Sense strand starting at position 3282 of SEQ ID NO: 915660
gcaucuauuuagggccaaa

SEQ ID NO: 1096659 - RNA, 19 nt, Artificial Sequence
  Description of Artificial Sequence: Synthetic oligonucleotide
  Antisense strand to SEQ ID NO: 1096658
uuuggcccuaaauagaugc

SEQ ID NO: 1096660 - RNA, 19 nt, Artificial Sequence
  Description of Artificial Sequence: Synthetic oligonucleotide
  Sense strand starting at position 3318 of SEQ ID NO: 915660
uagauacaguggugaauaa

SEQ ID NO: 1096661 - RNA, 19 nt, Artificial Sequence
  Description of Artificial Sequence: Synthetic oligonucleotide
  Antisense strand to SEQ ID NO: 1096660
uuauucaccacuguaucua

SEQ ID NO: 1096662 - RNA, 19 nt, Artificial Sequence
  Description of Artificial Sequence: Synthetic oligonucleotide
  Sense strand starting at position 3355 of SEQ ID NO: 915660
aguuucaagugcuguguga

SEQ ID NO: 1096663 - RNA, 19 nt, Artificial Sequence
  Description of Artificial Sequence: Synthetic oligonucleotide
  Antisense strand to SEQ ID NO: 1096662
ucacacagcacuugaaacu

SEQ ID NO: 1096664 - RNA, 19 nt, Artificial Sequence
  Description of Artificial Sequence: Synthetic oligonucleotide
  Sense strand starting at position 3357 of SEQ ID NO: 915660
uuucaagugcugugugaug

SEQ ID NO: 1096665 - RNA, 19 nt, Artificial Sequence
  Description of Artificial Sequence: Synthetic oligonucleotide
  Antisense strand to SEQ ID NO: 1096664
caucacacagcacuugaaa

SEQ ID NO: 1096666 - RNA, 19 nt, Artificial Sequence
  Description of Artificial Sequence: Synthetic oligonucleotide
  Sense strand starting at position 3359 of SEQ ID NO: 915660
ucaagugcugugugaugca

SEQ ID NO: 1096667 - RNA, 19 nt, Artificial Sequence
  Description of Artificial Sequence: Synthetic oligonucleotide
  Antisense strand to SEQ ID NO: 1096666
ugcaucacacagcacuuga

SEQ ID NO: 1096668 - RNA, 19 nt, Artificial Sequence
  Description of Artificial Sequence: Synthetic oligonucleotide
  Sense strand starting at position 3434 of SEQ ID NO: 915660
caggaaugccgaugaugaa

SEQ ID NO: 1096669 - RNA, 19 nt, Artificial Sequence
  Description of Artificial Sequence: Synthetic oligonucleotide
  Antisense strand to SEQ ID NO: 1096668
uucaucaucggcauuccug

SEQ ID NO: 1096670 - RNA, 19 nt, Artificial Sequence
  Description of Artificial Sequence: Synthetic oligonucleotide
  Sense strand starting at position 3640 of SEQ ID NO: 915660
ccuugagagcuuuauggac

SEQ ID NO: 1096671 - RNA, 19 nt, Artificial Sequence
  Description of Artificial Sequence: Synthetic oligonucleotide
  Antisense strand to SEQ ID NO: 1096670
guccauaaagcucucaagg

SEQ ID NO: 1096672 - RNA, 19 nt, Artificial Sequence
  Description of Artificial Sequence: Synthetic oligonucleotide
  Sense strand starting at position 3649 of SEQ ID NO: 915660
cuuuauggaccuuagucaa

SEQ ID NO: 1096673 - RNA, 19 nt, Artificial Sequence
  Description of Artificial Sequence: Synthetic oligonucleotide
  Antisense strand to SEQ ID NO: 1096672
uugacuaagguccauaaag

SEQ ID NO: 1096674 - RNA, 19 nt, Artificial Sequence
  Description of Artificial Sequence: Synthetic oligonucleotide
  Sense strand starting at position 3656 of SEQ ID NO: 915660
gaccuuagucaagaguucu

SEQ ID NO: 1096675 - RNA, 19 nt, Artificial Sequence
  Description of Artificial Sequence: Synthetic oligonucleotide
  Antisense strand to SEQ ID NO: 1096674
agaacucuugacuaagguc

SEQ ID NO: 1096676 - RNA, 19 nt, Artificial Sequence
  Description of Artificial Sequence: Synthetic oligonucleotide
  Sense strand starting at position 3824 of SEQ ID NO: 915660
agugcccugccuuauuauu

SEQ ID NO: 1096677 - RNA, 19 nt, Artificial Sequence
  Description of Artificial Sequence: Synthetic oligonucleotide
  Antisense strand to SEQ ID NO: 1096676
aauaauaaggcagggcacu

SEQ ID NO: 1096678 - RNA, 19 nt, Artificial Sequence
  Description of Artificial Sequence: Synthetic oligonucleotide
  Sense strand starting at position 128 of SEQ ID NO: 915661
ucuauaguuguauaucaag

SEQ ID NO: 1096679 - RNA, 19 nt, Artificial Sequence
  Description of Artificial Sequence: Synthetic oligonucleotide
  Antisense strand to SEQ ID NO: 1096678
cuugauauacaacuauaga

SEQ ID NO: 1096680 - RNA, 19 nt, Artificial Sequence
  Description of Artificial Sequence: Synthetic oligonucleotide
  Sense strand starting at position 134 of SEQ ID NO: 915661
guuguauaucaagagcuca

SEQ ID NO: 1096681 - RNA, 19 nt, Artificial Sequence
  Description of Artificial Sequence: Synthetic oligonucleotide
  Antisense strand to SEQ ID NO: 1096680
ugagcucuugauauacaac

SEQ ID NO: 1096682 - RNA, 19 nt, Artificial Sequence
  Description of Artificial Sequence: Synthetic oligonucleotide
  Sense strand starting at position 142 of SEQ ID NO: 915661
ucaagagcucaauaauguu

SEQ ID NO: 1096683 - RNA, 19 nt, Artificial Sequence
  Description of Artificial Sequence: Synthetic oligonucleotide
  Antisense strand to SEQ ID NO: 1096682
aacauuauugagcucuuga

SEQ ID NO: 1096684 - RNA, 19 nt, Artificial Sequence
  Description of Artificial Sequence: Synthetic oligonucleotide
  Sense strand starting at position 150 of SEQ ID NO: 915661
ucaauaauguuuguagaug

SEQ ID NO: 1096685 - RNA, 19 nt, Artificial Sequence
  Description of Artificial Sequence: Synthetic oligonucleotide
  Antisense strand to SEQ ID NO: 1096684
caucuacaaacauuauuga

SEQ ID NO: 1096686 - RNA, 19 nt, Artificial Sequence
  Description of Artificial Sequence: Synthetic oligonucleotide
  Sense strand starting at position 324 of SEQ ID NO: 915661
acaugaaucuuugccaaag

SEQ ID NO: 1096687 - RNA, 19 nt, Artificial Sequence
  Description of Artificial Sequence: Synthetic oligonucleotide
  Antisense strand to SEQ ID NO: 1096686
cuuuggcaaagauucaugu

SEQ ID NO: 1096688 - RNA, 19 nt, Artificial Sequence
  Description of Artificial Sequence: Synthetic oligonucleotide
  Sense strand starting at position 544 of SEQ ID NO: 915661
ugagaagcaucagucuaua

SEQ ID NO: 1096689 - RNA, 19 nt, Artificial Sequence
  Description of Artificial Sequence: Synthetic oligonucleotide
  Antisense strand to SEQ ID NO: 1096688
uauagacugaugcuucuca

SEQ ID NO: 1096690 - RNA, 19 nt, Artificial Sequence
  Description of Artificial Sequence: Synthetic oligonucleotide
  Sense strand starting at position 615 of SEQ ID NO: 915661
cuguguuaucucugaaaua

SEQ ID NO: 1096691 - RNA, 19 nt, Artificial Sequence
  Description of Artificial Sequence: Synthetic oligonucleotide
  Antisense strand to SEQ ID NO: 1096690
uauuucagagauaacacag

SEQ ID NO: 1096692 - RNA, 19 nt, Artificial Sequence
  Description of Artificial Sequence: Synthetic oligonucleotide
  Sense strand starting at position 733 of SEQ ID NO: 915661
ugaucaucugcugaauauu

SEQ ID NO: 1096693 - RNA, 19 nt, Artificial Sequence
  Description of Artificial Sequence: Synthetic oligonucleotide
  Antisense strand to SEQ ID NO: 1096692
aauauucagcagaugauca

SEQ ID NO: 1096694 - RNA, 19 nt, Artificial Sequence
  Description of Artificial Sequence: Synthetic oligonucleotide
  Sense strand starting at position 736 of SEQ ID NO: 915661
ucaucugcugaauauugaa

SEQ ID NO: 1096695 - RNA, 19 nt, Artificial Sequence
  Description of Artificial Sequence: Synthetic oligonucleotide
  Antisense strand to SEQ ID NO: 1096694
uucaauauucagcagauga

SEQ ID NO: 1096696 - RNA, 19 nt, Artificial Sequence
  Description of Artificial Sequence: Synthetic oligonucleotide
  Sense strand starting at position 780 of SEQ ID NO: 915661
ugaucugucuucuuaggac

SEQ ID NO: 1096697 - RNA, 19 nt, Artificial Sequence
  Description of Artificial Sequence: Synthetic oligonucleotide
  Antisense strand to SEQ ID NO: 1096696
guccuaagaagacagauca

SEQ ID NO: 1096698 - RNA, 19 nt, Artificial Sequence
  Description of Artificial Sequence: Synthetic oligonucleotide
  Sense strand starting at position 919 of SEQ ID NO: 915661
uuuaauaguccucaguguu

SEQ ID NO: 1096699 - RNA, 19 nt, Artificial Sequence
  Description of Artificial Sequence: Synthetic oligonucleotide
  Antisense strand to SEQ ID NO: 1096698
aacacugaggacuauuaaa

SEQ ID NO: 1096700 - RNA, 19 nt, Artificial Sequence
  Description of Artificial Sequence: Synthetic oligonucleotide
  Sense strand starting at position 966 of SEQ ID NO: 915661
uuaauugcccuguauguaa

SEQ ID NO: 1096701 - RNA, 19 nt, Artificial Sequence
  Description of Artificial Sequence: Synthetic oligonucleotide
  Antisense strand to SEQ ID NO: 1096700
uuacauacagggcaauuaa

SEQ ID NO: 1096702 - RNA, 19 nt, Artificial Sequence
  Description of Artificial Sequence: Synthetic oligonucleotide
  Sense strand starting at position 980 of SEQ ID NO: 915661
uguaaaguuguguaacaga

SEQ ID NO: 1096703 - RNA, 19 nt, Artificial Sequence
  Description of Artificial Sequence: Synthetic oligonucleotide
  Antisense strand to SEQ ID NO: 1096702
ucuguuacacaacuuuaca

SEQ ID NO: 1096704 - RNA, 19 nt, Artificial Sequence
  Description of Artificial Sequence: Synthetic oligonucleotide
  Sense strand starting at position 1337 of SEQ ID NO: 915661
aaauaaggcuggucuuuga

SEQ ID NO: 1096705 - RNA, 19 nt, Artificial Sequence
  Description of Artificial Sequence: Synthetic oligonucleotide
  Antisense strand to SEQ ID NO: 1096704
ucaaagaccagccuuauuu

SEQ ID NO: 1096706 - RNA, 19 nt, Artificial Sequence
  Description of Artificial Sequence: Synthetic oligonucleotide
  Sense strand starting at position 1340 of SEQ ID NO: 915661
uaaggcuggucuuugaauu

SEQ ID NO: 1096707 - RNA, 19 nt, Artificial Sequence
  Description of Artificial Sequence: Synthetic oligonucleotide
  Antisense strand to SEQ ID NO: 1096706
aauucaaagaccagccuua

SEQ ID NO: 1096708 - RNA, 19 nt, Artificial Sequence
  Description of Artificial Sequence: Synthetic oligonucleotide
  Sense strand starting at position 1341 of SEQ ID NO: 915661
aaggcuggucuuugaauua

SEQ ID NO: 1096709 - RNA, 19 nt, Artificial Sequence
  Description of Artificial Sequence: Synthetic oligonucleotide
  Antisense strand to SEQ ID NO: 1096708
uaauucaaagaccagccuu

SEQ ID NO: 1096710 - RNA, 19 nt, Artificial Sequence
  Description of Artificial Sequence: Synthetic oligonucleotide
  Sense strand starting at position 1346 of SEQ ID NO: 915661
uggucuuugaauuaacguu

SEQ ID NO: 1096711 - RNA, 19 nt, Artificial Sequence
  Description of Artificial Sequence: Synthetic oligonucleotide
  Antisense strand to SEQ ID NO: 1096710
aacguuaauucaaagacca

SEQ ID NO: 1096712 - RNA, 19 nt, Artificial Sequence
  Description of Artificial Sequence: Synthetic oligonucleotide
  Sense strand starting at position 1466 of SEQ ID NO: 915661
ccuugcaggaauugguaua

SEQ ID NO: 1096713 - RNA, 19 nt, Artificial Sequence
  Description of Artificial Sequence: Synthetic oligonucleotide
  Antisense strand to SEQ ID NO: 1096712
uauaccaauuccugcaagg

SEQ ID NO: 1096714 - RNA, 19 nt, Artificial Sequence
  Description of Artificial Sequence: Synthetic oligonucleotide
  Sense strand starting at position 1476 of SEQ ID NO: 915661
auugguauauccuucccuu

SEQ ID NO: 1096715 - RNA, 19 nt, Artificial Sequence
  Description of Artificial Sequence: Synthetic oligonucleotide
  Antisense strand to SEQ ID NO: 1096714
aagggaaggauauaccaau

SEQ ID NO: 1096716 - RNA, 19 nt, Artificial Sequence
  Description of Artificial Sequence: Synthetic oligonucleotide
  Sense strand starting at position 2305 of SEQ ID NO: 915661
gggauuaaaugucuuuguu

SEQ ID NO: 1096717 - RNA, 19 nt, Artificial Sequence
  Description of Artificial Sequence: Synthetic oligonucleotide
  Antisense strand to SEQ ID NO: 1096716
aacaaagacauuuaauccc

SEQ ID NO: 1096718 - RNA, 19 nt, Artificial Sequence
  Description of Artificial Sequence: Synthetic oligonucleotide
  Sense strand starting at position 2309 of SEQ ID NO: 915661
uuaaaugucuuuguuggga

SEQ ID NO: 1096719 - RNA, 19 nt, Artificial Sequence
  Description of Artificial Sequence: Synthetic oligonucleotide
  Antisense strand to SEQ ID NO: 1096718
ucccaacaaagacauuuaa

SEQ ID NO: 1096720 - RNA, 19 nt, Artificial Sequence
  Description of Artificial Sequence: Synthetic oligonucleotide
  Sense strand starting at position 2401 of SEQ ID NO: 915661
ccgagagucccagguaaua

SEQ ID NO: 1096721 - RNA, 19 nt, Artificial Sequence
  Description of Artificial Sequence: Synthetic oligonucleotide
  Antisense strand to SEQ ID NO: 1096720
uauuaccugggacucucgg

SEQ ID NO: 1096722 - RNA, 19 nt, Artificial Sequence
  Description of Artificial Sequence: Synthetic oligonucleotide
  Sense strand starting at position 2603 of SEQ ID NO: 915661
uuugauaggugcuuaucaa

SEQ ID NO: 1096723 - RNA, 19 nt, Artificial Sequence
  Description of Artificial Sequence: Synthetic oligonucleotide
  Antisense strand to SEQ ID NO: 1096722
uugauaagcaccuaucaaa

SEQ ID NO: 1096724 - RNA, 19 nt, Artificial Sequence
  Description of Artificial Sequence: Synthetic oligonucleotide
  Sense strand starting at position 2604 of SEQ ID NO: 915661
uugauaggugcuuaucaac

SEQ ID NO: 1096725 - RNA, 19 nt, Artificial Sequence
  Description of Artificial Sequence: Synthetic oligonucleotide
  Antisense strand to SEQ ID NO: 1096724
guugauaagcaccuaucaa

SEQ ID NO: 1096726 - RNA, 19 nt, Artificial Sequence
  Description of Artificial Sequence: Synthetic oligonucleotide
  Sense strand starting at position 2646 of SEQ ID NO: 915661
ggcagucguguguuagaac

SEQ ID NO: 1096727 - RNA, 19 nt, Artificial Sequence
  Description of Artificial Sequence: Synthetic oligonucleotide
  Antisense strand to SEQ ID NO: 1096726
guucuaacacacgacugcc

SEQ ID NO: 1096728 - RNA, 19 nt, Artificial Sequence
  Description of Artificial Sequence: Synthetic oligonucleotide
  Sense strand starting at position 2740 of SEQ ID NO: 915661
ugucaaucuccucacaugu

SEQ ID NO: 1096729 - RNA, 19 nt, Artificial Sequence
  Description of Artificial Sequence: Synthetic oligonucleotide
  Antisense strand to SEQ ID NO: 1096728
acaugugaggagauugaca

SEQ ID NO: 1096730 - RNA, 19 nt, Artificial Sequence
  Description of Artificial Sequence: Synthetic oligonucleotide
  Sense strand starting at position 2877 of SEQ ID NO: 915661
uuuacugagucauuacuau

SEQ ID NO: 1096731 - RNA, 19 nt, Artificial Sequence
  Description of Artificial Sequence: Synthetic oligonucleotide
  Antisense strand to SEQ ID NO: 1096730
auaguaaugacucaguaaa

SEQ ID NO: 1096732 - RNA, 19 nt, Artificial Sequence
  Description of Artificial Sequence: Synthetic oligonucleotide
  Sense strand starting at position 2960 of SEQ ID NO: 915661
gcuaguauucuagagggag

SEQ ID NO: 1096733 - RNA, 19 nt, Artificial Sequence
  Description of Artificial Sequence: Synthetic oligonucleotide
  Antisense strand to SEQ ID NO: 1096732
cucccucuagaauacuagc

SEQ ID NO: 1096734 - RNA, 19 nt, Artificial Sequence
  Description of Artificial Sequence: Synthetic oligonucleotide
  Sense strand starting at position 3003 of SEQ ID NO: 915661
ugaacaagauaauaucaga

SEQ ID NO: 1096735 - RNA, 19 nt, Artificial Sequence
  Description of Artificial Sequence: Synthetic oligonucleotide
  Antisense strand to SEQ ID NO: 1096734
ucugauauuaucuuguuca

SEQ ID NO: 1096736 - RNA, 19 nt, Artificial Sequence
  Description of Artificial Sequence: Synthetic oligonucleotide
  Sense strand starting at position 3014 of SEQ ID NO: 915661
auaucagauagguguaguu

SEQ ID NO: 1096737 - RNA, 19 nt, Artificial Sequence
  Description of Artificial Sequence: Synthetic oligonucleotide
  Antisense strand to SEQ ID NO: 1096736
aacuacaccuaucugauau

SEQ ID NO: 1096738 - RNA, 19 nt, Artificial Sequence
  Description of Artificial Sequence: Synthetic oligonucleotide
  Sense strand starting at position 3016 of SEQ ID NO: 915661
aucagauagguguaguugu

SEQ ID NO: 1096739 - RNA, 19 nt, Artificial Sequence
  Description of Artificial Sequence: Synthetic oligonucleotide
  Antisense strand to SEQ ID NO: 1096738
acaacuacaccuaucugau

SEQ ID NO: 1096740 - RNA, 19 nt, Artificial Sequence
  Description of Artificial Sequence: Synthetic oligonucleotide
  Sense strand starting at position 3023 of SEQ ID NO: 915661
agguguaguuguuugaaga

SEQ ID NO: 1096741 - RNA, 19 nt, Artificial Sequence
  Description of Artificial Sequence: Synthetic oligonucleotide
  Antisense strand to SEQ ID NO: 1096740
ucuucaaacaacuacaccu

SEQ ID NO: 1096742 - RNA, 19 nt, Artificial Sequence
  Description of Artificial Sequence: Synthetic oligonucleotide
  Sense strand starting at position 3436 of SEQ ID NO: 915661
gcuccuguaaucguagcua

SEQ ID NO: 1096743 - RNA, 19 nt, Artificial Sequence
  Description of Artificial Sequence: Synthetic oligonucleotide
  Antisense strand to SEQ ID NO: 1096742
uagcuacgauuacaggagc

SEQ ID NO: 1096744 - RNA, 19 nt, Artificial Sequence
  Description of Artificial Sequence: Synthetic oligonucleotide
  Sense strand starting at position 3661 of SEQ ID NO: 915661
aacuuacguuccuuggaca

SEQ ID NO: 1096745 - RNA, 19 nt, Artificial Sequence
  Description of Artificial Sequence: Synthetic oligonucleotide
  Antisense strand to SEQ ID NO: 1096744
uguccaaggaacguaaguu

SEQ ID NO: 1096746 - RNA, 19 nt, Artificial Sequence
  Description of Artificial Sequence: Synthetic oligonucleotide
  Sense strand starting at position 3662 of SEQ ID NO: 915661
acuuacguuccuuggacaa

SEQ ID NO: 1096747 - RNA, 19 nt, Artificial Sequence
  Description of Artificial Sequence: Synthetic oligonucleotide
  Antisense strand to SEQ ID NO: 1096746
uuguccaaggaacguaagu

SEQ ID NO: 1096748 - RNA, 19 nt, Artificial Sequence
  Description of Artificial Sequence: Synthetic oligonucleotide
  Sense strand starting at position 3682 of SEQ ID NO: 915661
gcuuaaucacauggccaca

SEQ ID NO: 1096749 - RNA, 19 nt, Artificial Sequence
  Description of Artificial Sequence: Synthetic oligonucleotide
  Antisense strand to SEQ ID NO: 1096748
uguggccaugugauuaagc

SEQ ID NO: 1096750 - RNA, 19 nt, Artificial Sequence
  Description of Artificial Sequence: Synthetic oligonucleotide
  Sense strand starting at position 3708 of SEQ ID NO: 915661
gcaagagaggauggugaau

SEQ ID NO: 1096751 - RNA, 19 nt, Artificial Sequence
  Description of Artificial Sequence: Synthetic oligonucleotide
  Antisense strand to SEQ ID NO: 1096750
auucaccauccucucuugc

SEQ ID NO: 1096752 - RNA, 19 nt, Artificial Sequence
  Description of Artificial Sequence: Synthetic oligonucleotide
  Sense strand starting at position 3746 of SEQ ID NO: 915661
gggacaaaugcccagcuaa

SEQ ID NO: 1096753 - RNA, 19 nt, Artificial Sequence
  Description of Artificial Sequence: Synthetic oligonucleotide
  Antisense strand to SEQ ID NO: 1096752
uuagcugggcauuuguccc

SEQ ID NO: 1096754 - RNA, 19 nt, Artificial Sequence
  Description of Artificial Sequence: Synthetic oligonucleotide
  Sense strand starting at position 3842 of SEQ ID NO: 915661
gucucuggcuacccaaaua

SEQ ID NO: 1096755 - RNA, 19 nt, Artificial Sequence
  Description of Artificial Sequence: Synthetic oligonucleotide
  Antisense strand to SEQ ID NO: 1096754
uauuuggguagccagagac

SEQ ID NO: 1096756 - RNA, 19 nt, Artificial Sequence
  Description of Artificial Sequence: Synthetic oligonucleotide
  Sense strand starting at position 3948 of SEQ ID NO: 915661
agccaaaguccagaauauu

SEQ ID NO: 1096757 - RNA, 19 nt, Artificial Sequence
  Description of Artificial Sequence: Synthetic oligonucleotide
  Antisense strand to SEQ ID NO: 1096756
aauauucuggacuuuggcu

SEQ ID NO: 1096758 - RNA, 19 nt, Artificial Sequence
  Description of Artificial Sequence: Synthetic oligonucleotide
  Sense strand starting at position 2 of SEQ ID NO: 915662
gacugaccuugggcaauaa

SEQ ID NO: 1096759 - RNA, 19 nt, Artificial Sequence
  Description of Artificial Sequence: Synthetic oligonucleotide
  Antisense strand to SEQ ID NO: 1096758
uuauugcccaaggucaguc

SEQ ID NO: 1096760 - RNA, 19 nt, Artificial Sequence
  Description of Artificial Sequence: Synthetic oligonucleotide
  Sense strand starting at position 263 of SEQ ID NO: 915662
uccagacaucuuggagguu

SEQ ID NO: 1096761 - RNA, 19 nt, Artificial Sequence
  Description of Artificial Sequence: Synthetic oligonucleotide
  Antisense strand to SEQ ID NO: 1096760
aaccuccaagaugucugga

SEQ ID NO: 1096762 - RNA, 19 nt, Artificial Sequence
  Description of Artificial Sequence: Synthetic oligonucleotide
  Sense strand starting at position 285 of SEQ ID NO: 915662
gggaaauccuggcuuuauu

SEQ ID NO: 1096763 - RNA, 19 nt, Artificial Sequence
  Description of Artificial Sequence: Synthetic oligonucleotide
  Antisense strand to SEQ ID NO: 1096762
aauaaagccaggauuuccc

SEQ ID NO: 1096764 - RNA, 19 nt, Artificial Sequence
  Description of Artificial Sequence: Synthetic oligonucleotide
  Sense strand starting at position 461 of SEQ ID NO: 915662
acuggugacaaauacguua

SEQ ID NO: 1096765 - RNA, 19 nt, Artificial Sequence
  Description of Artificial Sequence: Synthetic oligonucleotide
  Antisense strand to SEQ ID NO: 1096764
uaacguauuugucaccagu

SEQ ID NO: 1096766 - RNA, 19 nt, Artificial Sequence
  Description of Artificial Sequence: Synthetic oligonucleotide
  Sense strand starting at position 503 of SEQ ID NO: 915662
ucaauuuagucacacagga

SEQ ID NO: 1096767 - RNA, 19 nt, Artificial Sequence
  Description of Artificial Sequence: Synthetic oligonucleotide
  Antisense strand to SEQ ID NO: 1096766
uccugugugacuaaauuga

SEQ ID NO: 1096768 - RNA, 19 nt, Artificial Sequence
  Description of Artificial Sequence: Synthetic oligonucleotide
  Sense strand starting at position 665 of SEQ ID NO: 915662
accuuauucugaccaguga

SEQ ID NO: 1096769 - RNA, 19 nt, Artificial Sequence
  Description of Artificial Sequence: Synthetic oligonucleotide
  Antisense strand to SEQ ID NO: 1096768
ucacuggucagaauaaggu

SEQ ID NO: 1096770 - RNA, 19 nt, Artificial Sequence
  Description of Artificial Sequence: Synthetic oligonucleotide
  Sense strand starting at position 666 of SEQ ID NO: 915662
ccuuauucugaccagugaa

SEQ ID NO: 1096771 - RNA, 19 nt, Artificial Sequence
  Description of Artificial Sequence: Synthetic oligonucleotide
  Antisense strand to SEQ ID NO: 1096770
uucacuggucagaauaagg

SEQ ID NO: 1096772 - RNA, 19 nt, Artificial Sequence
  Description of Artificial Sequence: Synthetic oligonucleotide
  Sense strand starting at position 681 of SEQ ID NO: 915662
ugaaauaguuaucugugga

SEQ ID NO: 1096773 - RNA, 19 nt, Artificial Sequence
  Description of Artificial Sequence: Synthetic oligonucleotide
  Antisense strand to SEQ ID NO: 1096772
uccacagauaacuauuuca

SEQ ID NO: 1096774 - RNA, 19 nt, Artificial Sequence
  Description of Artificial Sequence: Synthetic oligonucleotide
  Sense strand starting at position 691 of SEQ ID NO: 915662
aucuguggacgucaauaca

SEQ ID NO: 1096775 - RNA, 19 nt, Artificial Sequence
  Description of Artificial Sequence: Synthetic oligonucleotide
  Antisense strand to SEQ ID NO: 1096774
uguauugacguccacagau

SEQ ID NO: 1096776 - RNA, 19 nt, Artificial Sequence
  Description of Artificial Sequence: Synthetic oligonucleotide
  Sense strand starting at position 1137 of SEQ ID NO: 915662
agggucacuggccaguaau

SEQ ID NO: 1096777 - RNA, 19 nt, Artificial Sequence
  Description of Artificial Sequence: Synthetic oligonucleotide
  Antisense strand to SEQ ID NO: 1096776
auuacuggccagugacccu

SEQ ID NO: 1096778 - RNA, 19 nt, Artificial Sequence
  Description of Artificial Sequence: Synthetic oligonucleotide
  Sense strand starting at position 1169 of SEQ ID NO: 915662
uuuggauaugccuauuagu

SEQ ID NO: 1096779 - RNA, 19 nt, Artificial Sequence
  Description of Artificial Sequence: Synthetic oligonucleotide
  Antisense strand to SEQ ID NO: 1096778
acuaauaggcauauccaaa

SEQ ID NO: 1096780 - RNA, 19 nt, Artificial Sequence
  Description of Artificial Sequence: Synthetic oligonucleotide
  Sense strand starting at position 1213 of SEQ ID NO: 915662
ccuaauuccuuggcagaac

SEQ ID NO: 1096781 - RNA, 19 nt, Artificial Sequence
  Description of Artificial Sequence: Synthetic oligonucleotide
  Antisense strand to SEQ ID NO: 1096780
guucugccaaggaauuagg

SEQ ID NO: 1096782 - RNA, 19 nt, Artificial Sequence
  Description of Artificial Sequence: Synthetic oligonucleotide
  Sense strand starting at position 1300 of SEQ ID NO: 915662
cucugugaccuugggaacu

SEQ ID NO: 1096783 - RNA, 19 nt, Artificial Sequence
  Description of Artificial Sequence: Synthetic oligonucleotide
  Antisense strand to SEQ ID NO: 1096782
aguucccaaggucacagag

SEQ ID NO: 1096784 - RNA, 19 nt, Artificial Sequence
  Description of Artificial Sequence: Synthetic oligonucleotide
  Sense strand starting at position 2184 of SEQ ID NO: 915662
gcccucgugcuugaauuua

SEQ ID NO: 1096785 - RNA, 19 nt, Artificial Sequence
  Description of Artificial Sequence: Synthetic oligonucleotide
  Antisense strand to SEQ ID NO: 1096784
uaaauucaagcacgagggc

SEQ ID NO: 1096786 - RNA, 19 nt, Artificial Sequence
  Description of Artificial Sequence: Synthetic oligonucleotide
  Sense strand starting at position 2192 of SEQ ID NO: 915662
gcuugaauuuaagucguga

SEQ ID NO: 1096787 - RNA, 19 nt, Artificial Sequence
  Description of Artificial Sequence: Synthetic oligonucleotide
  Antisense strand to SEQ ID NO: 1096786
ucacgacuuaaauucaagc

SEQ ID NO: 1096788 - RNA, 19 nt, Artificial Sequence
  Description of Artificial Sequence: Synthetic oligonucleotide
  Sense strand starting at position 2217 of SEQ ID NO: 915662
aauugaugagcaggaaagu

SEQ ID NO: 1096789 - RNA, 19 nt, Artificial Sequence
  Description of Artificial Sequence: Synthetic oligonucleotide
  Antisense strand to SEQ ID NO: 1096788
acuuuccugcucaucaauu

SEQ ID NO: 1096790 - RNA, 19 nt, Artificial Sequence
  Description of Artificial Sequence: Synthetic oligonucleotide
  Sense strand starting at position 2330 of SEQ ID NO: 915662
uaccucuuugggcaaguua

SEQ ID NO: 1096791 - RNA, 19 nt, Artificial Sequence
  Description of Artificial Sequence: Synthetic oligonucleotide
  Antisense strand to SEQ ID NO: 1096790
uaacuugcccaaagaggua

SEQ ID NO: 1096792 - RNA, 19 nt, Artificial Sequence
  Description of Artificial Sequence: Synthetic oligonucleotide
  Sense strand starting at position 2434 of SEQ ID NO: 915662
auauuacauguguaaagug

SEQ ID NO: 1096793 - RNA, 19 nt, Artificial Sequence
  Description of Artificial Sequence: Synthetic oligonucleotide
  Antisense strand to SEQ ID NO: 1096792
cacuuuacacauguaauau

SEQ ID NO: 1096794 - RNA, 19 nt, Artificial Sequence
  Description of Artificial Sequence: Synthetic oligonucleotide
  Sense strand starting at position 2560 of SEQ ID NO: 915662
guaaguuugagcgauaaga

SEQ ID NO: 1096795 - RNA, 19 nt, Artificial Sequence
  Description of Artificial Sequence: Synthetic oligonucleotide
  Antisense strand to SEQ ID NO: 1096794
ucuuaucgcucaaacuuac

SEQ ID NO: 1096796 - RNA, 19 nt, Artificial Sequence
  Description of Artificial Sequence: Synthetic oligonucleotide
  Sense strand starting at position 2562 of SEQ ID NO: 915662
aaguuugagcgauaagaau

SEQ ID NO: 1096797 - RNA, 19 nt, Artificial Sequence
  Description of Artificial Sequence: Synthetic oligonucleotide
  Antisense strand to SEQ ID NO: 1096796
auucuuaucgcucaaacuu

SEQ ID NO: 1096798 - RNA, 19 nt, Artificial Sequence
  Description of Artificial Sequence: Synthetic oligonucleotide
  Sense strand starting at position 2610 of SEQ ID NO: 915662
ugucuugauugaucaggac

SEQ ID NO: 1096799 - RNA, 19 nt, Artificial Sequence
  Description of Artificial Sequence: Synthetic oligonucleotide
  Antisense strand to SEQ ID NO: 1096798
guccugaucaaucaagaca

SEQ ID NO: 1096800 - RNA, 19 nt, Artificial Sequence
  Description of Artificial Sequence: Synthetic oligonucleotide
  Sense strand starting at position 2668 of SEQ ID NO: 915662
ggagaagaccguuagcaga

SEQ ID NO: 1096801 - RNA, 19 nt, Artificial Sequence
  Description of Artificial Sequence: Synthetic oligonucleotide
  Antisense strand to SEQ ID NO: 1096800
ucugcuaacggucuucucc

SEQ ID NO: 1096802 - RNA, 19 nt, Artificial Sequence
  Description of Artificial Sequence: Synthetic oligonucleotide
  Sense strand starting at position 2681 of SEQ ID NO: 915662
agcagaggugugaguguuu

SEQ ID NO: 1096803 - RNA, 19 nt, Artificial Sequence
  Description of Artificial Sequence: Synthetic oligonucleotide
  Antisense strand to SEQ ID NO: 1096802
aaacacucacaccucugcu

SEQ ID NO: 1096804 - RNA, 19 nt, Artificial Sequence
  Description of Artificial Sequence: Synthetic oligonucleotide
  Sense strand starting at position 2806 of SEQ ID NO: 915662
gcaugaggcagguacaaua

SEQ ID NO: 1096805 - RNA, 19 nt, Artificial Sequence
  Description of Artificial Sequence: Synthetic oligonucleotide
  Antisense strand to SEQ ID NO: 1096804
uauuguaccugccucaugc

SEQ ID NO: 1096806 - RNA, 19 nt, Artificial Sequence
  Description of Artificial Sequence: Synthetic oligonucleotide
  Sense strand starting at position 2836 of SEQ ID NO: 915662
guugaauuaaugugaaaug

SEQ ID NO: 1096807 - RNA, 19 nt, Artificial Sequence
  Description of Artificial Sequence: Synthetic oligonucleotide
  Antisense strand to SEQ ID NO: 1096806
cauuucacauuaauucaac

SEQ ID NO: 1096808 - RNA, 19 nt, Artificial Sequence
  Description of Artificial Sequence: Synthetic oligonucleotide
  Sense strand starting at position 2847 of SEQ ID NO: 915662
gugaaaugagccugggaaa

SEQ ID NO: 1096809 - RNA, 19 nt, Artificial Sequence
  Description of Artificial Sequence: Synthetic oligonucleotide
  Antisense strand to SEQ ID NO: 1096808
uuucccaggcucauuucac

SEQ ID NO: 1096810 - RNA, 19 nt, Artificial Sequence
  Description of Artificial Sequence: Synthetic oligonucleotide
  Sense strand starting at position 2861 of SEQ ID NO: 915662
ggaaacuaucuuggaagca

SEQ ID NO: 1096811 - RNA, 19 nt, Artificial Sequence
  Description of Artificial Sequence: Synthetic oligonucleotide
  Antisense strand to SEQ ID NO: 1096810
ugcuuccaagauaguuucc

SEQ ID NO: 1096812 - RNA, 19 nt, Artificial Sequence
  Description of Artificial Sequence: Synthetic oligonucleotide
  Sense strand starting at position 2879 of SEQ ID NO: 915662
auaucacaguuccuaaagu

SEQ ID NO: 1096813 - RNA, 19 nt, Artificial Sequence
  Description of Artificial Sequence: Synthetic oligonucleotide
  Antisense strand to SEQ ID NO: 1096812
acuuuaggaacugugauau

SEQ ID NO: 1096814 - RNA, 19 nt, Artificial Sequence
  Description of Artificial Sequence: Synthetic oligonucleotide
  Sense strand starting at position 2894 of SEQ ID NO: 915662
aaguguguugaucaacuau

SEQ ID NO: 1096815 - RNA, 19 nt, Artificial Sequence
  Description of Artificial Sequence: Synthetic oligonucleotide
  Antisense strand to SEQ ID NO: 1096814
auaguugaucaacacacuu

SEQ ID NO: 1096816 - RNA, 19 nt, Artificial Sequence
  Description of Artificial Sequence: Synthetic oligonucleotide
  Sense strand starting at position 3120 of SEQ ID NO: 915662
guggaagcucaugauguua

SEQ ID NO: 1096817 - RNA, 19 nt, Artificial Sequence
  Description of Artificial Sequence: Synthetic oligonucleotide
  Antisense strand to SEQ ID NO: 1096816
uaacaucaugagcuuccac

SEQ ID NO: 1096818 - RNA, 19 nt, Artificial Sequence
  Description of Artificial Sequence: Synthetic oligonucleotide
  Sense strand starting at position 3148 of SEQ ID NO: 915662
ggaaucauauuaucaugcu

SEQ ID NO: 1096819 - RNA, 19 nt, Artificial Sequence
  Description of Artificial Sequence: Synthetic oligonucleotide
  Antisense strand to SEQ ID NO: 1096818
agcaugauaauaugauucc

SEQ ID NO: 1096820 - RNA, 19 nt, Artificial Sequence
  Description of Artificial Sequence: Synthetic oligonucleotide
  Sense strand starting at position 3303 of SEQ ID NO: 915662
cagugauucguauacacau

SEQ ID NO: 1096821 - RNA, 19 nt, Artificial Sequence
  Description of Artificial Sequence: Synthetic oligonucleotide
  Antisense strand to SEQ ID NO: 1096820
auguguauacgaaucacug

SEQ ID NO: 1096822 - RNA, 19 nt, Artificial Sequence
  Description of Artificial Sequence: Synthetic oligonucleotide
  Sense strand starting at position 3316 of SEQ ID NO: 915662
acacauuugggucguaguu

SEQ ID NO: 1096823 - RNA, 19 nt, Artificial Sequence
  Description of Artificial Sequence: Synthetic oligonucleotide
  Antisense strand to SEQ ID NO: 1096822
aacuacgacccaaaugugu

SEQ ID NO: 1096824 - RNA, 19 nt, Artificial Sequence
  Description of Artificial Sequence: Synthetic oligonucleotide
  Sense strand starting at position 3332 of SEQ ID NO: 915662
guucuuaaucuugauagca

SEQ ID NO: 1096825 - RNA, 19 nt, Artificial Sequence
  Description of Artificial Sequence: Synthetic oligonucleotide
  Antisense strand to SEQ ID NO: 1096824
ugcuaucaagauuaagaac

SEQ ID NO: 1096826 - RNA, 19 nt, Artificial Sequence
  Description of Artificial Sequence: Synthetic oligonucleotide
  Sense strand starting at position 3414 of SEQ ID NO: 915662
aucagaaucucuguguaga

SEQ ID NO: 1096827 - RNA, 19 nt, Artificial Sequence
  Description of Artificial Sequence: Synthetic oligonucleotide
  Antisense strand to SEQ ID NO: 1096826
ucuacacagagauucugau

SEQ ID NO: 1096828 - RNA, 19 nt, Artificial Sequence
  Description of Artificial Sequence: Synthetic oligonucleotide
  Sense strand starting at position 3416 of SEQ ID NO: 915662
cagaaucucuguguagaua

SEQ ID NO: 1096829 - RNA, 19 nt, Artificial Sequence
  Description of Artificial Sequence: Synthetic oligonucleotide
  Antisense strand to SEQ ID NO: 1096828
uaucuacacagagauucug

SEQ ID NO: 1096830 - RNA, 19 nt, Artificial Sequence
  Description of Artificial Sequence: Synthetic oligonucleotide
  Sense strand starting at position 3417 of SEQ ID NO: 915662
agaaucucuguguagauau

SEQ ID NO: 1096831 - RNA, 19 nt, Artificial Sequence
  Description of Artificial Sequence: Synthetic oligonucleotide
  Antisense strand to SEQ ID NO: 1096830
auaucuacacagagauucu

SEQ ID NO: 1096832 - RNA, 19 nt, Artificial Sequence
  Description of Artificial Sequence: Synthetic oligonucleotide
  Sense strand starting at position 3516 of SEQ ID NO: 915662
aucaguguaagaugaauug

SEQ ID NO: 1096833 - RNA, 19 nt, Artificial Sequence
  Description of Artificial Sequence: Synthetic oligonucleotide
  Antisense strand to SEQ ID NO: 1096832
caauucaucuuacacugau

SEQ ID NO: 1096834 - RNA, 19 nt, Artificial Sequence
  Description of Artificial Sequence: Synthetic oligonucleotide
  Sense strand starting at position 3834 of SEQ ID NO: 915662
cugggauucuagguucaag

SEQ ID NO: 1096835 - RNA, 19 nt, Artificial Sequence
  Description of Artificial Sequence: Synthetic oligonucleotide
  Antisense strand to SEQ ID NO: 1096834
cuugaaccuagaaucccag

SEQ ID NO: 1096836 - RNA, 19 nt, Artificial Sequence
  Description of Artificial Sequence: Synthetic oligonucleotide
  Sense strand starting at position 3949 of SEQ ID NO: 915662
gaaauucugggcuguuaag

SEQ ID NO: 1096837 - RNA, 19 nt, Artificial Sequence
  Description of Artificial Sequence: Synthetic oligonucleotide
  Antisense strand to SEQ ID NO: 1096836
cuuaacagcccagaauuuc

SEQ ID NO: 1096838 - RNA, 19 nt, Artificial Sequence
  Description of Artificial Sequence: Synthetic oligonucleotide
  Sense strand starting at position 32 of SEQ ID NO: 915663
ggcagcaaauccuuauaca

SEQ ID NO: 1096839 - RNA, 19 nt, Artificial Sequence
  Description of Artificial Sequence: Synthetic oligonucleotide
  Antisense strand to SEQ ID NO: 1096838
uguauaaggauuugcugcc

SEQ ID NO: 1096840 - RNA, 19 nt, Artificial Sequence
  Description of Artificial Sequence: Synthetic oligonucleotide
  Sense strand starting at position 68 of SEQ ID NO: 915663
gggaguguucuacaagcac

SEQ ID NO: 1096841 - RNA, 19 nt, Artificial Sequence
  Description of Artificial Sequence: Synthetic oligonucleotide
  Antisense strand to SEQ ID NO: 1096840
gugcuuguagaacacuccc

SEQ ID NO: 1096842 - RNA, 19 nt, Artificial Sequence
  Description of Artificial Sequence: Synthetic oligonucleotide
  Sense strand starting at position 151 of SEQ ID NO: 915663
ugagaaauuugaggccaag

SEQ ID NO: 1096843 - RNA, 19 nt, Artificial Sequence
  Description of Artificial Sequence: Synthetic oligonucleotide
  Antisense strand to SEQ ID NO: 1096842
cuuggccucaaauuucuca

SEQ ID NO: 1096844 - RNA, 19 nt, Artificial Sequence
  Description of Artificial Sequence: Synthetic oligonucleotide
  Sense strand starting at position 192 of SEQ ID NO: 915663
ggucacgucguuaguaagu

SEQ ID NO: 1096845 - RNA, 19 nt, Artificial Sequence
  Description of Artificial Sequence: Synthetic oligonucleotide
  Antisense strand to SEQ ID NO: 1096844
acuuacuaacgacgugacc

SEQ ID NO: 1096846 - RNA, 19 nt, Artificial Sequence
  Description of Artificial Sequence: Synthetic oligonucleotide
  Sense strand starting at position 270 of SEQ ID NO: 915663
ggacuaagcugucucuuac

SEQ ID NO: 1096847 - RNA, 19 nt, Artificial Sequence
  Description of Artificial Sequence: Synthetic oligonucleotide
  Antisense strand to SEQ ID NO: 1096846
guaagagacagcuuagucc

SEQ ID NO: 1096848 - RNA, 19 nt, Artificial Sequence
  Description of Artificial Sequence: Synthetic oligonucleotide
  Sense strand starting at position 335 of SEQ ID NO: 915663
agaagugugaagugcccua

SEQ ID NO: 1096849 - RNA, 19 nt, Artificial Sequence
  Description of Artificial Sequence: Synthetic oligonucleotide
  Antisense strand to SEQ ID NO: 1096848
uagggcacuucacacuucu

SEQ ID NO: 1096850 - RNA, 19 nt, Artificial Sequence
  Description of Artificial Sequence: Synthetic oligonucleotide
  Sense strand starting at position 385 of SEQ ID NO: 915663
ccuggaaagcuuuaucuuu

SEQ ID NO: 1096851 - RNA, 19 nt, Artificial Sequence
  Description of Artificial Sequence: Synthetic oligonucleotide
  Antisense strand to SEQ ID NO: 1096850
aaagauaaagcuuuccagg

SEQ ID NO: 1096852 - RNA, 19 nt, Artificial Sequence
  Description of Artificial Sequence: Synthetic oligonucleotide
  Sense strand starting at position 387 of SEQ ID NO: 915663
uggaaagcuuuaucuuuag

SEQ ID NO: 1096853 - RNA, 19 nt, Artificial Sequence
  Description of Artificial Sequence: Synthetic oligonucleotide
  Antisense strand to SEQ ID NO: 1096852
cuaaagauaaagcuuucca

SEQ ID NO: 1096854 - RNA, 19 nt, Artificial Sequence
  Description of Artificial Sequence: Synthetic oligonucleotide
  Sense strand starting at position 390 of SEQ ID NO: 915663
aaagcuuuaucuuuagggu

SEQ ID NO: 1096855 - RNA, 19 nt, Artificial Sequence
  Description of Artificial Sequence: Synthetic oligonucleotide
  Antisense strand to SEQ ID NO: 1096854
acccuaaagauaaagcuuu

SEQ ID NO: 1096856 - RNA, 19 nt, Artificial Sequence
  Description of Artificial Sequence: Synthetic oligonucleotide
  Sense strand starting at position 391 of SEQ ID NO: 915663
aagcuuuaucuuuaggguu

SEQ ID NO: 1096857 - RNA, 19 nt, Artificial Sequence
  Description of Artificial Sequence: Synthetic oligonucleotide
  Antisense strand to SEQ ID NO: 1096856
aacccuaaagauaaagcuu

SEQ ID NO: 1096858 - RNA, 19 nt, Artificial Sequence
  Description of Artificial Sequence: Synthetic oligonucleotide
  Sense strand starting at position 397 of SEQ ID NO: 915663
uaucuuuaggguuaugguu

SEQ ID NO: 1096859 - RNA, 19 nt, Artificial Sequence
  Description of Artificial Sequence: Synthetic oligonucleotide
  Antisense strand to SEQ ID NO: 1096858
aaccauaacccuaaagaua

SEQ ID NO: 1096860 - RNA, 19 nt, Artificial Sequence
  Description of Artificial Sequence: Synthetic oligonucleotide
  Sense strand starting at position 403 of SEQ ID NO: 915663
uaggguuaugguugcaaca

SEQ ID NO: 1096861 - RNA, 19 nt, Artificial Sequence
  Description of Artificial Sequence: Synthetic oligonucleotide
  Antisense strand to SEQ ID NO: 1096860
uguugcaaccauaacccua

SEQ ID NO: 1096862 - RNA, 19 nt, Artificial Sequence
  Description of Artificial Sequence: Synthetic oligonucleotide
  Sense strand starting at position 528 of SEQ ID NO: 915663
uggaguguuagcgauuaaa

SEQ ID NO: 1096863 - RNA, 19 nt, Artificial Sequence
  Description of Artificial Sequence: Synthetic oligonucleotide
  Antisense strand to SEQ ID NO: 1096862
uuuaaucgcuaacacucca

SEQ ID NO: 1096864 - RNA, 19 nt, Artificial Sequence
  Description of Artificial Sequence: Synthetic oligonucleotide
  Sense strand starting at position 531 of SEQ ID NO: 915663
aguguuagcgauuaaauua

SEQ ID NO: 1096865 - RNA, 19 nt, Artificial Sequence
  Description of Artificial Sequence: Synthetic oligonucleotide
  Antisense strand to SEQ ID NO: 1096864
uaauuuaaucgcuaacacu

SEQ ID NO: 1096866 - RNA, 19 nt, Artificial Sequence
  Description of Artificial Sequence: Synthetic oligonucleotide
  Sense strand starting at position 542 of SEQ ID NO: 915663
uuaaauuagcaucgguaaa

SEQ ID NO: 1096867 - RNA, 19 nt, Artificial Sequence
  Description of Artificial Sequence: Synthetic oligonucleotide
  Antisense strand to SEQ ID NO: 1096866
uuuaccgaugcuaauuuaa

SEQ ID NO: 1096868 - RNA, 19 nt, Artificial Sequence
  Description of Artificial Sequence: Synthetic oligonucleotide
  Sense strand starting at position 1078 of SEQ ID NO: 915663
guacucacaccacgauaaa

SEQ ID NO: 1096869 - RNA, 19 nt, Artificial Sequence
  Description of Artificial Sequence: Synthetic oligonucleotide
  Antisense strand to SEQ ID NO: 1096868
uuuaucguggugugaguac

SEQ ID NO: 1096870 - RNA, 19 nt, Artificial Sequence
  Description of Artificial Sequence: Synthetic oligonucleotide
  Sense strand starting at position 1089 of SEQ ID NO: 915663
acgauaaacuugucaacca

SEQ ID NO: 1096871 - RNA, 19 nt, Artificial Sequence
  Description of Artificial Sequence: Synthetic oligonucleotide
  Antisense strand to SEQ ID NO: 1096870
ugguugacaaguuuaucgu

SEQ ID NO: 1096872 - RNA, 19 nt, Artificial Sequence
  Description of Artificial Sequence: Synthetic oligonucleotide
  Sense strand starting at position 1105 of SEQ ID NO: 915663
ccaagaucguuuccuuuaa

SEQ ID NO: 1096873 - RNA, 19 nt, Artificial Sequence
  Description of Artificial Sequence: Synthetic oligonucleotide
  Antisense strand to SEQ ID NO: 1096872
uuaaaggaaacgaucuugg

SEQ ID NO: 1096874 - RNA, 19 nt, Artificial Sequence
  Description of Artificial Sequence: Synthetic oligonucleotide
  Sense strand starting at position 1146 of SEQ ID NO: 915663
ugggaauuauuccuauucu

SEQ ID NO: 1096875 - RNA, 19 nt, Artificial Sequence
  Description of Artificial Sequence: Synthetic oligonucleotide
  Antisense strand to SEQ ID NO: 1096874
agaauaggaauaauuccca

SEQ ID NO: 1096876 - RNA, 19 nt, Artificial Sequence
  Description of Artificial Sequence: Synthetic oligonucleotide
  Sense strand starting at position 1244 of SEQ ID NO: 915663
cgccaaacccgugcucuua

SEQ ID NO: 1096877 - RNA, 19 nt, Artificial Sequence
  Description of Artificial Sequence: Synthetic oligonucleotide
  Antisense strand to SEQ ID NO: 1096876
uaagagcacggguuuggcg

SEQ ID NO: 1096878 - RNA, 19 nt, Artificial Sequence
  Description of Artificial Sequence: Synthetic oligonucleotide
  Sense strand starting at position 1299 of SEQ ID NO: 915663
aggauccguuaugcagaaa

SEQ ID NO: 1096879 - RNA, 19 nt, Artificial Sequence
  Description of Artificial Sequence: Synthetic oligonucleotide
  Antisense strand to SEQ ID NO: 1096878
uuucugcauaacggauccu

SEQ ID NO: 1096880 - RNA, 19 nt, Artificial Sequence
  Description of Artificial Sequence: Synthetic oligonucleotide
  Sense strand starting at position 1473 of SEQ ID NO: 915663
gaggcuuccuuggcaaaca

SEQ ID NO: 1096881 - RNA, 19 nt, Artificial Sequence
  Description of Artificial Sequence: Synthetic oligonucleotide
  Antisense strand to SEQ ID NO: 1096880
uguuugccaaggaagccuc

SEQ ID NO: 1096882 - RNA, 19 nt, Artificial Sequence
  Description of Artificial Sequence: Synthetic oligonucleotide
  Sense strand starting at position 1537 of SEQ ID NO: 915663
ucugacuucuggucacuua

SEQ ID NO: 1096883 - RNA, 19 nt, Artificial Sequence
  Description of Artificial Sequence: Synthetic oligonucleotide
  Antisense strand to SEQ ID NO: 1096882
uaagugaccagaagucaga

SEQ ID NO: 1096884 - RNA, 19 nt, Artificial Sequence
  Description of Artificial Sequence: Synthetic oligonucleotide
  Sense strand starting at position 1538 of SEQ ID NO: 915663
cugacuucuggucacuuaa

SEQ ID NO: 1096885 - RNA, 19 nt, Artificial Sequence
  Description of Artificial Sequence: Synthetic oligonucleotide
  Antisense strand to SEQ ID NO: 1096884
uuaagugaccagaagucag

SEQ ID NO: 1096886 - RNA, 19 nt, Artificial Sequence
  Description of Artificial Sequence: Synthetic oligonucleotide
  Sense strand starting at position 2073 of SEQ ID NO: 915663
ggaagugcugcgagccuau

SEQ ID NO: 1096887 - RNA, 19 nt, Artificial Sequence
  Description of Artificial Sequence: Synthetic oligonucleotide
  Antisense strand to SEQ ID NO: 1096886
auaggcucgcagcacuucc

SEQ ID NO: 1096888 - RNA, 19 nt, Artificial Sequence
  Description of Artificial Sequence: Synthetic oligonucleotide
  Sense strand starting at position 2425 of SEQ ID NO: 915663
ugguuauaaaggcacgaaa

SEQ ID NO: 1096889 - RNA, 19 nt, Artificial Sequence
  Description of Artificial Sequence: Synthetic oligonucleotide
  Antisense strand to SEQ ID NO: 1096888
uuucgugccuuuauaacca

SEQ ID NO: 1096890 - RNA, 19 nt, Artificial Sequence
  Description of Artificial Sequence: Synthetic oligonucleotide
  Sense strand starting at position 2647 of SEQ ID NO: 915663
accuccuuggcaggaauau

SEQ ID NO: 1096891 - RNA, 19 nt, Artificial Sequence
  Description of Artificial Sequence: Synthetic oligonucleotide
  Antisense strand to SEQ ID NO: 1096890
auauuccugccaaggaggu

SEQ ID NO: 1096892 - RNA, 19 nt, Artificial Sequence
  Description of Artificial Sequence: Synthetic oligonucleotide
  Sense strand starting at position 2648 of SEQ ID NO: 915663
ccuccuuggcaggaauauu

SEQ ID NO: 1096893 - RNA, 19 nt, Artificial Sequence
  Description of Artificial Sequence: Synthetic oligonucleotide
  Antisense strand to SEQ ID NO: 1096892
aauauuccugccaaggagg

SEQ ID NO: 1096894 - RNA, 19 nt, Artificial Sequence
  Description of Artificial Sequence: Synthetic oligonucleotide
  Sense strand starting at position 2683 of SEQ ID NO: 915663
auguuccgacuuuaacaga

SEQ ID NO: 1096895 - RNA, 19 nt, Artificial Sequence
  Description of Artificial Sequence: Synthetic oligonucleotide
  Antisense strand to SEQ ID NO: 1096894
ucuguuaaagucggaacau

SEQ ID NO: 1096896 - RNA, 19 nt, Artificial Sequence
  Description of Artificial Sequence: Synthetic oligonucleotide
  Sense strand starting at position 2699 of SEQ ID NO: 915663
agaagcuaccuuugagaau

SEQ ID NO: 1096897 - RNA, 19 nt, Artificial Sequence
  Description of Artificial Sequence: Synthetic oligonucleotide
  Antisense strand to SEQ ID NO: 1096896
auucucaaagguagcuucu

SEQ ID NO: 1096898 - RNA, 19 nt, Artificial Sequence
  Description of Artificial Sequence: Synthetic oligonucleotide
  Sense strand starting at position 2847 of SEQ ID NO: 915663
uagggcuuguauccuaaau

SEQ ID NO: 1096899 - RNA, 19 nt, Artificial Sequence
  Description of Artificial Sequence: Synthetic oligonucleotide
  Antisense strand to SEQ ID NO: 1096898
auuuaggauacaagcccua

SEQ ID NO: 1096900 - RNA, 19 nt, Artificial Sequence
  Description of Artificial Sequence: Synthetic oligonucleotide
  Sense strand starting at position 2865 of SEQ ID NO: 915663
ucugguccucaagauucuu

SEQ ID NO: 1096901 - RNA, 19 nt, Artificial Sequence
  Description of Artificial Sequence: Synthetic oligonucleotide
  Antisense strand to SEQ ID NO: 1096900
aagaaucuugaggaccaga

SEQ ID NO: 1096902 - RNA, 19 nt, Artificial Sequence
  Description of Artificial Sequence: Synthetic oligonucleotide
  Sense strand starting at position 2971 of SEQ ID NO: 915663
acugcaagaguuuggagua

SEQ ID NO: 1096903 - RNA, 19 nt, Artificial Sequence
  Description of Artificial Sequence: Synthetic oligonucleotide
  Antisense strand to SEQ ID NO: 1096902
uacuccaaacucuugcagu

SEQ ID NO: 1096904 - RNA, 19 nt, Artificial Sequence
  Description of Artificial Sequence: Synthetic oligonucleotide
  Sense strand starting at position 3379 of SEQ ID NO: 915663
uuagcucagccgggagaau

SEQ ID NO: 1096905 - RNA, 19 nt, Artificial Sequence
  Description of Artificial Sequence: Synthetic oligonucleotide
  Antisense strand to SEQ ID NO: 1096904
auucucccggcugagcuaa

SEQ ID NO: 1096906 - RNA, 19 nt, Artificial Sequence
  Description of Artificial Sequence: Synthetic oligonucleotide
  Sense strand starting at position 3494 of SEQ ID NO: 915663
uggugcucauuuguuaaga

SEQ ID NO: 1096907 - RNA, 19 nt, Artificial Sequence
  Description of Artificial Sequence: Synthetic oligonucleotide
  Antisense strand to SEQ ID NO: 1096906
ucuuaacaaaugagcacca

SEQ ID NO: 1096908 - RNA, 19 nt, Artificial Sequence
  Description of Artificial Sequence: Synthetic oligonucleotide
  Sense strand starting at position 3495 of SEQ ID NO: 915663
ggugcucauuuguuaagau

SEQ ID NO: 1096909 - RNA, 19 nt, Artificial Sequence
  Description of Artificial Sequence: Synthetic oligonucleotide
  Antisense strand to SEQ ID NO: 1096908
aucuuaacaaaugagcacc

SEQ ID NO: 1096910 - RNA, 19 nt, Artificial Sequence
  Description of Artificial Sequence: Synthetic oligonucleotide
  Sense strand starting at position 3545 of SEQ ID NO: 915663
ugaugacauaguugugaca

SEQ ID NO: 1096911 - RNA, 19 nt, Artificial Sequence
  Description of Artificial Sequence: Synthetic oligonucleotide
  Antisense strand to SEQ ID NO: 1096910
ugucacaacuaugucauca

SEQ ID NO: 1096912 - RNA, 19 nt, Artificial Sequence
  Description of Artificial Sequence: Synthetic oligonucleotide
  Sense strand starting at position 3564 of SEQ ID NO: 915663
gaccaugugcucuacaaag

SEQ ID NO: 1096913 - RNA, 19 nt, Artificial Sequence
  Description of Artificial Sequence: Synthetic oligonucleotide
  Antisense strand to SEQ ID NO: 1096912
cuuuguagagcacaugguc

SEQ ID NO: 1096914 - RNA, 19 nt, Artificial Sequence
  Description of Artificial Sequence: Synthetic oligonucleotide
  Sense strand starting at position 3622 of SEQ ID NO: 915663
gcugacugcucccuuagaa

SEQ ID NO: 1096915 - RNA, 19 nt, Artificial Sequence
  Description of Artificial Sequence: Synthetic oligonucleotide
  Antisense strand to SEQ ID NO: 1096914
uucuaagggagcagucagc

SEQ ID NO: 1096916 - RNA, 19 nt, Artificial Sequence
  Description of Artificial Sequence: Synthetic oligonucleotide
  Sense strand starting at position 3957 of SEQ ID NO: 915663
ucuggaacuccuggguauu

SEQ ID NO: 1096917 - RNA, 19 nt, Artificial Sequence
  Description of Artificial Sequence: Synthetic oligonucleotide
  Antisense strand to SEQ ID NO: 1096916
aauacccaggaguuccaga

SEQ ID NO: 1096918 - RNA, 19 nt, Artificial Sequence
  Description of Artificial Sequence: Synthetic oligonucleotide
  Sense strand starting at position 56 of SEQ ID NO: 915664
gccagugcuggcuccacua

SEQ ID NO: 1096919 - RNA, 19 nt, Artificial Sequence
  Description of Artificial Sequence: Synthetic oligonucleotide
  Antisense strand to SEQ ID NO: 1096918
uaguggagccagcacuggc

SEQ ID NO: 1096920 - RNA, 19 nt, Artificial Sequence
  Description of Artificial Sequence: Synthetic oligonucleotide
  Sense strand starting at position 129 of SEQ ID NO: 915664
ucuguaaacugguucuauu

SEQ ID NO: 1096921 - RNA, 19 nt, Artificial Sequence
  Description of Artificial Sequence: Synthetic oligonucleotide
  Antisense strand to SEQ ID NO: 1096920
aauagaaccaguuuacaga

SEQ ID NO: 1096922 - RNA, 19 nt, Artificial Sequence
  Description of Artificial Sequence: Synthetic oligonucleotide
  Sense strand starting at position 156 of SEQ ID NO: 915664
ucaacaagaucauaugugu

SEQ ID NO: 1096923 - RNA, 19 nt, Artificial Sequence
  Description of Artificial Sequence: Synthetic oligonucleotide
  Antisense strand to SEQ ID NO: 1096922
acacauaugaucuuguuga

SEQ ID NO: 1096924 - RNA, 19 nt, Artificial Sequence
  Description of Artificial Sequence: Synthetic oligonucleotide
  Sense strand starting at position 159 of SEQ ID NO: 915664
acaagaucauaugugugaa

SEQ ID NO: 1096925 - RNA, 19 nt, Artificial Sequence
  Description of Artificial Sequence: Synthetic oligonucleotide
  Antisense strand to SEQ ID NO: 1096924
uucacacauaugaucuugu

SEQ ID NO: 1096926 - RNA, 19 nt, Artificial Sequence
  Description of Artificial Sequence: Synthetic oligonucleotide
  Sense strand starting at position 161 of SEQ ID NO: 915664
aagaucauaugugugaaga

SEQ ID NO: 1096927 - RNA, 19 nt, Artificial Sequence
  Description of Artificial Sequence: Synthetic oligonucleotide
  Antisense strand to SEQ ID NO: 1096926
ucuucacacauaugaucuu

SEQ ID NO: 1096928 - RNA, 19 nt, Artificial Sequence
  Description of Artificial Sequence: Synthetic oligonucleotide
  Sense strand starting at position 162 of SEQ ID NO: 915664
agaucauaugugugaagaa

SEQ ID NO: 1096929 - RNA, 19 nt, Artificial Sequence
  Description of Artificial Sequence: Synthetic oligonucleotide
  Antisense strand to SEQ ID NO: 1096928
uucuucacacauaugaucu

SEQ ID NO: 1096930 - RNA, 19 nt, Artificial Sequence
  Description of Artificial Sequence: Synthetic oligonucleotide
  Sense strand starting at position 163 of SEQ ID NO: 915664
gaucauaugugugaagaag

SEQ ID NO: 1096931 - RNA, 19 nt, Artificial Sequence
  Description of Artificial Sequence: Synthetic oligonucleotide
  Antisense strand to SEQ ID NO: 1096930
cuucuucacacauaugauc

SEQ ID NO: 1096932 - RNA, 19 nt, Artificial Sequence
  Description of Artificial Sequence: Synthetic oligonucleotide
  Sense strand starting at position 189 of SEQ ID NO: 915664
agggucuggccaugggaau

SEQ ID NO: 1096933 - RNA, 19 nt, Artificial Sequence
  Description of Artificial Sequence: Synthetic oligonucleotide
  Antisense strand to SEQ ID NO: 1096932
auucccauggccagacccu

SEQ ID NO: 1096934 - RNA, 19 nt, Artificial Sequence
  Description of Artificial Sequence: Synthetic oligonucleotide
  Sense strand starting at position 190 of SEQ ID NO: 915664
gggucuggccaugggaaua

SEQ ID NO: 1096935 - RNA, 19 nt, Artificial Sequence
  Description of Artificial Sequence: Synthetic oligonucleotide
  Antisense strand to SEQ ID NO: 1096934
uauucccauggccagaccc

SEQ ID NO: 1096936 - RNA, 19 nt, Artificial Sequence
  Description of Artificial Sequence: Synthetic oligonucleotide
  Sense strand starting at position 238 of SEQ ID NO: 915664
ucuggucccuuguuccaua

SEQ ID NO: 1096937 - RNA, 19 nt, Artificial Sequence
  Description of Artificial Sequence: Synthetic oligonucleotide
  Antisense strand to SEQ ID NO: 1096936
uauggaacaagggaccaga

SEQ ID NO: 1096938 - RNA, 19 nt, Artificial Sequence
  Description of Artificial Sequence: Synthetic oligonucleotide
  Sense strand starting at position 800 of SEQ ID NO: 915664
gccugucacccaggaaacu

SEQ ID NO: 1096939 - RNA, 19 nt, Artificial Sequence
  Description of Artificial Sequence: Synthetic oligonucleotide
  Antisense strand to SEQ ID NO: 1096938
aguuuccugggugacaggc

SEQ ID NO: 1096940 - RNA, 19 nt, Artificial Sequence
  Description of Artificial Sequence: Synthetic oligonucleotide
  Sense strand starting at position 2217 of SEQ ID NO: 915664
cgaccuugagcuggucuaa

SEQ ID NO: 1096941 - RNA, 19 nt, Artificial Sequence
  Description of Artificial Sequence: Synthetic oligonucleotide
  Antisense strand to SEQ ID NO: 1096940
uuagaccagcucaaggucg

SEQ ID NO: 1096942 - RNA, 19 nt, Artificial Sequence
  Description of Artificial Sequence: Synthetic oligonucleotide
  Sense strand starting at position 2326 of SEQ ID NO: 915664
ggaguaggcccagaguuaa

SEQ ID NO: 1096943 - RNA, 19 nt, Artificial Sequence
  Description of Artificial Sequence: Synthetic oligonucleotide
  Antisense strand to SEQ ID NO: 1096942
uuaacucugggccuacucc

SEQ ID NO: 1096944 - RNA, 19 nt, Artificial Sequence
  Description of Artificial Sequence: Synthetic oligonucleotide
  Sense strand starting at position 2387 of SEQ ID NO: 915664
gguaguuacagcugagaaa

SEQ ID NO: 1096945 - RNA, 19 nt, Artificial Sequence
  Description of Artificial Sequence: Synthetic oligonucleotide
  Antisense strand to SEQ ID NO: 1096944
uuucucagcuguaacuacc

SEQ ID NO: 1096946 - RNA, 19 nt, Artificial Sequence
  Description of Artificial Sequence: Synthetic oligonucleotide
  Sense strand starting at position 2659 of SEQ ID NO: 915664
gcgaaacccugccuauaca

SEQ ID NO: 1096947 - RNA, 19 nt, Artificial Sequence
  Description of Artificial Sequence: Synthetic oligonucleotide
  Antisense strand to SEQ ID NO: 1096946
uguauaggcaggguuucgc

SEQ ID NO: 1096948 - RNA, 19 nt, Artificial Sequence
  Description of Artificial Sequence: Synthetic oligonucleotide
  Sense strand starting at position 2708 of SEQ ID NO: 915664
uguggugugcaccuguauu

SEQ ID NO: 1096949 - RNA, 19 nt, Artificial Sequence
  Description of Artificial Sequence: Synthetic oligonucleotide
  Antisense strand to SEQ ID NO: 1096948
aauacaggugcacaccaca

SEQ ID NO: 1096950 - RNA, 19 nt, Artificial Sequence
  Description of Artificial Sequence: Synthetic oligonucleotide
  Sense strand starting at position 2760 of SEQ ID NO: 915664
aauugagucugggaguaag

SEQ ID NO: 1096951 - RNA, 19 nt, Artificial Sequence
  Description of Artificial Sequence: Synthetic oligonucleotide
  Antisense strand to SEQ ID NO: 1096950
cuuacucccagacucaauu

SEQ ID NO: 1096952 - RNA, 19 nt, Artificial Sequence
  Description of Artificial Sequence: Synthetic oligonucleotide
  Sense strand starting at position 2810 of SEQ ID NO: 915664
ucuccagcugcgugauaaa

SEQ ID NO: 1096953 - RNA, 19 nt, Artificial Sequence
  Description of Artificial Sequence: Synthetic oligonucleotide
  Antisense strand to SEQ ID NO: 1096952
uuuaucacgcagcuggaga

SEQ ID NO: 1096954 - RNA, 19 nt, Artificial Sequence
  Description of Artificial Sequence: Synthetic oligonucleotide
  Sense strand starting at position 2994 of SEQ ID NO: 915664
ugggaacugacuugcauua

SEQ ID NO: 1096955 - RNA, 19 nt, Artificial Sequence
  Description of Artificial Sequence: Synthetic oligonucleotide
  Antisense strand to SEQ ID NO: 1096954
uaaugcaagucaguuccca

SEQ ID NO: 1096956 - RNA, 19 nt, Artificial Sequence
  Description of Artificial Sequence: Synthetic oligonucleotide
  Sense strand starting at position 2996 of SEQ ID NO: 915664
ggaacugacuugcauuaga

SEQ ID NO: 1096957 - RNA, 19 nt, Artificial Sequence
  Description of Artificial Sequence: Synthetic oligonucleotide
  Antisense strand to SEQ ID NO: 1096956
ucuaaugcaagucaguucc

SEQ ID NO: 1096958 - RNA, 19 nt, Artificial Sequence
  Description of Artificial Sequence: Synthetic oligonucleotide
  Sense strand starting at position 3139 of SEQ ID NO: 915664
ugcaauacugguggguuaa

SEQ ID NO: 1096959 - RNA, 19 nt, Artificial Sequence
  Description of Artificial Sequence: Synthetic oligonucleotide
  Antisense strand to SEQ ID NO: 1096958
uuaacccaccaguauugca

SEQ ID NO: 1096960 - RNA, 19 nt, Artificial Sequence
  Description of Artificial Sequence: Synthetic oligonucleotide
  Sense strand starting at position 3140 of SEQ ID NO: 915664
gcaauacugguggguuaau

SEQ ID NO: 1096961 - RNA, 19 nt, Artificial Sequence
  Description of Artificial Sequence: Synthetic oligonucleotide
  Antisense strand to SEQ ID NO: 1096960
auuaacccaccaguauugc

SEQ ID NO: 1096962 - RNA, 19 nt, Artificial Sequence
  Description of Artificial Sequence: Synthetic oligonucleotide
  Sense strand starting at position 3141 of SEQ ID NO: 915664
caauacugguggguuaauu

SEQ ID NO: 1096963 - RNA, 19 nt, Artificial Sequence
  Description of Artificial Sequence: Synthetic oligonucleotide
  Antisense strand to SEQ ID NO: 1096962
aauuaacccaccaguauug

SEQ ID NO: 1096964 - RNA, 19 nt, Artificial Sequence
  Description of Artificial Sequence: Synthetic oligonucleotide
  Sense strand starting at position 3239 of SEQ ID NO: 915664
agguaauugagauguggac

SEQ ID NO: 1096965 - RNA, 19 nt, Artificial Sequence
  Description of Artificial Sequence: Synthetic oligonucleotide
  Antisense strand to SEQ ID NO: 1096964
guccacaucucaauuaccu

SEQ ID NO: 1096966 - RNA, 19 nt, Artificial Sequence
  Description of Artificial Sequence: Synthetic oligonucleotide
  Sense strand starting at position 3241 of SEQ ID NO: 915664
guaauugagauguggacac

SEQ ID NO: 1096967 - RNA, 19 nt, Artificial Sequence
  Description of Artificial Sequence: Synthetic oligonucleotide
  Antisense strand to SEQ ID NO: 1096966
guguccacaucucaauuac

SEQ ID NO: 1096968 - RNA, 19 nt, Artificial Sequence
  Description of Artificial Sequence: Synthetic oligonucleotide
  Sense strand starting at position 3293 of SEQ ID NO: 915664
uuaugaauuucuuggacac

SEQ ID NO: 1096969 - RNA, 19 nt, Artificial Sequence
  Description of Artificial Sequence: Synthetic oligonucleotide
  Antisense strand to SEQ ID NO: 1096968
guguccaagaaauucauaa

SEQ ID NO: 1096970 - RNA, 19 nt, Artificial Sequence
  Description of Artificial Sequence: Synthetic oligonucleotide
  Sense strand starting at position 3313 of SEQ ID NO: 915664
gauguuuauugggugucuu

SEQ ID NO: 1096971 - RNA, 19 nt, Artificial Sequence
  Description of Artificial Sequence: Synthetic oligonucleotide
  Antisense strand to SEQ ID NO: 1096970
aagacacccaauaaacauc

SEQ ID NO: 1096972 - RNA, 19 nt, Artificial Sequence
  Description of Artificial Sequence: Synthetic oligonucleotide
  Sense strand starting at position 3323 of SEQ ID NO: 915664
gggugucuuccauaugcaa

SEQ ID NO: 1096973 - RNA, 19 nt, Artificial Sequence
  Description of Artificial Sequence: Synthetic oligonucleotide
  Antisense strand to SEQ ID NO: 1096972
uugcauauggaagacaccc

SEQ ID NO: 1096974 - RNA, 19 nt, Artificial Sequence
  Description of Artificial Sequence: Synthetic oligonucleotide
  Sense strand starting at position 3325 of SEQ ID NO: 915664
gugucuuccauaugcaagu

SEQ ID NO: 1096975 - RNA, 19 nt, Artificial Sequence
  Description of Artificial Sequence: Synthetic oligonucleotide
  Antisense strand to SEQ ID NO: 1096974
acuugcauauggaagacac

SEQ ID NO: 1096976 - RNA, 19 nt, Artificial Sequence
  Description of Artificial Sequence: Synthetic oligonucleotide
  Sense strand starting at position 3326 of SEQ ID NO: 915664
ugucuuccauaugcaagua

SEQ ID NO: 1096977 - RNA, 19 nt, Artificial Sequence
  Description of Artificial Sequence: Synthetic oligonucleotide
  Antisense strand to SEQ ID NO: 1096976
uacuugcauauggaagaca

SEQ ID NO: 1096978 - RNA, 19 nt, Artificial Sequence
  Description of Artificial Sequence: Synthetic oligonucleotide
  Sense strand starting at position 3338 of SEQ ID NO: 915664
gcaaguauugugcuuggca

SEQ ID NO: 1096979 - RNA, 19 nt, Artificial Sequence
  Description of Artificial Sequence: Synthetic oligonucleotide
  Antisense strand to SEQ ID NO: 1096978
ugccaagcacaauacuugc

SEQ ID NO: 1096980 - RNA, 19 nt, Artificial Sequence
  Description of Artificial Sequence: Synthetic oligonucleotide
  Sense strand starting at position 3339 of SEQ ID NO: 915664
caaguauugugcuuggcac

SEQ ID NO: 1096981 - RNA, 19 nt, Artificial Sequence
  Description of Artificial Sequence: Synthetic oligonucleotide
  Antisense strand to SEQ ID NO: 1096980
gugccaagcacaauacuug

SEQ ID NO: 1096982 - RNA, 19 nt, Artificial Sequence
  Description of Artificial Sequence: Synthetic oligonucleotide
  Sense strand starting at position 3340 of SEQ ID NO: 915664
aaguauugugcuuggcacu

SEQ ID NO: 1096983 - RNA, 19 nt, Artificial Sequence
  Description of Artificial Sequence: Synthetic oligonucleotide
  Antisense strand to SEQ ID NO: 1096982
agugccaagcacaauacuu

SEQ ID NO: 1096984 - RNA, 19 nt, Artificial Sequence
  Description of Artificial Sequence: Synthetic oligonucleotide
  Sense strand starting at position 3392 of SEQ ID NO: 915664
agggccuguccucauggaa

SEQ ID NO: 1096985 - RNA, 19 nt, Artificial Sequence
  Description of Artificial Sequence: Synthetic oligonucleotide
  Antisense strand to SEQ ID NO: 1096984
uuccaugaggacaggcccu

SEQ ID NO: 1096986 - RNA, 19 nt, Artificial Sequence
  Description of Artificial Sequence: Synthetic oligonucleotide
  Sense strand starting at position 3395 of SEQ ID NO: 915664
gccuguccucauggaacuu

SEQ ID NO: 1096987 - RNA, 19 nt, Artificial Sequence
  Description of Artificial Sequence: Synthetic oligonucleotide
  Antisense strand to SEQ ID NO: 1096986
aaguuccaugaggacaggc

SEQ ID NO: 1096988 - RNA, 19 nt, Artificial Sequence
  Description of Artificial Sequence: Synthetic oligonucleotide
  Sense strand starting at position 3674 of SEQ ID NO: 915664
gauaccugguagcuaauua

SEQ ID NO: 1096989 - RNA, 19 nt, Artificial Sequence
  Description of Artificial Sequence: Synthetic oligonucleotide
  Antisense strand to SEQ ID NO: 1096988
uaauuagcuaccagguauc

SEQ ID NO: 1096990 - RNA, 19 nt, Artificial Sequence
  Description of Artificial Sequence: Synthetic oligonucleotide
  Sense strand starting at position 3678 of SEQ ID NO: 915664
ccugguagcuaauuagaga

SEQ ID NO: 1096991 - RNA, 19 nt, Artificial Sequence
  Description of Artificial Sequence: Synthetic oligonucleotide
  Antisense strand to SEQ ID NO: 1096990
ucucuaauuagcuaccagg

SEQ ID NO: 1096992 - RNA, 19 nt, Artificial Sequence
  Description of Artificial Sequence: Synthetic oligonucleotide
  Sense strand starting at position 3685 of SEQ ID NO: 915664
gcuaauuagagaggucgca

SEQ ID NO: 1096993 - RNA, 19 nt, Artificial Sequence
  Description of Artificial Sequence: Synthetic oligonucleotide
  Antisense strand to SEQ ID NO: 1096992
ugcgaccucucuaauuagc

SEQ ID NO: 1096994 - RNA, 19 nt, Artificial Sequence
  Description of Artificial Sequence: Synthetic oligonucleotide
  Sense strand starting at position 3711 of SEQ ID NO: 915664
ugcucaugcucucuagaaa

SEQ ID NO: 1096995 - RNA, 19 nt, Artificial Sequence
  Description of Artificial Sequence: Synthetic oligonucleotide
  Antisense strand to SEQ ID NO: 1096994
uuucuagagagcaugagca

SEQ ID NO: 1096996 - RNA, 19 nt, Artificial Sequence
  Description of Artificial Sequence: Synthetic oligonucleotide
  Sense strand starting at position 3712 of SEQ ID NO: 915664
gcucaugcucucuagaaag

SEQ ID NO: 1096997 - RNA, 19 nt, Artificial Sequence
  Description of Artificial Sequence: Synthetic oligonucleotide
  Antisense strand to SEQ ID NO: 1096996
cuuucuagagagcaugagc

SEQ ID NO: 1096998 - RNA, 19 nt, Artificial Sequence
  Description of Artificial Sequence: Synthetic oligonucleotide
  Sense strand starting at position 140 of SEQ ID NO: 915665
ggaggugaggcucauccua

SEQ ID NO: 1096999 - RNA, 19 nt, Artificial Sequence
  Description of Artificial Sequence: Synthetic oligonucleotide
  Antisense strand to SEQ ID NO: 1096998
uaggaugagccucaccucc

SEQ ID NO: 1097000 - RNA, 19 nt, Artificial Sequence
  Description of Artificial Sequence: Synthetic oligonucleotide
  Sense strand starting at position 393 of SEQ ID NO: 915665
gcugcugaguccuagauuu

SEQ ID NO: 1097001 - RNA, 19 nt, Artificial Sequence
  Description of Artificial Sequence: Synthetic oligonucleotide
  Antisense strand to SEQ ID NO: 1097000
aaaucuaggacucagcagc

SEQ ID NO: 1097002 - RNA, 19 nt, Artificial Sequence
  Description of Artificial Sequence: Synthetic oligonucleotide
  Sense strand starting at position 411 of SEQ ID NO: 915665
ucagguuaaugucucuaga

SEQ ID NO: 1097003 - RNA, 19 nt, Artificial Sequence
  Description of Artificial Sequence: Synthetic oligonucleotide
  Antisense strand to SEQ ID NO: 1097002
ucuagagacauuaaccuga

SEQ ID NO: 1097004 - RNA, 19 nt, Artificial Sequence
  Description of Artificial Sequence: Synthetic oligonucleotide
  Sense strand starting at position 413 of SEQ ID NO: 915665
agguuaaugucucuagaua

SEQ ID NO: 1097005 - RNA, 19 nt, Artificial Sequence
  Description of Artificial Sequence: Synthetic oligonucleotide
  Antisense strand to SEQ ID NO: 1097004
uaucuagagacauuaaccu

SEQ ID NO: 1097006 - RNA, 19 nt, Artificial Sequence
  Description of Artificial Sequence: Synthetic oligonucleotide
  Sense strand starting at position 414 of SEQ ID NO: 915665
gguuaaugucucuagauac

SEQ ID NO: 1097007 - RNA, 19 nt, Artificial Sequence
  Description of Artificial Sequence: Synthetic oligonucleotide
  Antisense strand to SEQ ID NO: 1097006
guaucuagagacauuaacc

SEQ ID NO: 1097008 - RNA, 19 nt, Artificial Sequence
  Description of Artificial Sequence: Synthetic oligonucleotide
  Sense strand starting at position 426 of SEQ ID NO: 915665
uagauacagucucuuggua

SEQ ID NO: 1097009 - RNA, 19 nt, Artificial Sequence
  Description of Artificial Sequence: Synthetic oligonucleotide
  Antisense strand to SEQ ID NO: 1097008
uaccaagagacuguaucua

SEQ ID NO: 1097010 - RNA, 19 nt, Artificial Sequence
  Description of Artificial Sequence: Synthetic oligonucleotide
  Sense strand starting at position 443 of SEQ ID NO: 915665
uaggguguuagugauaacu

SEQ ID NO: 1097011 - RNA, 19 nt, Artificial Sequence
  Description of Artificial Sequence: Synthetic oligonucleotide
  Antisense strand to SEQ ID NO: 1097010
aguuaucacuaacacccua

SEQ ID NO: 1097012 - RNA, 19 nt, Artificial Sequence
  Description of Artificial Sequence: Synthetic oligonucleotide
  Sense strand starting at position 453 of SEQ ID NO: 915665
gugauaacuuaggaauggu

SEQ ID NO: 1097013 - RNA, 19 nt, Artificial Sequence
  Description of Artificial Sequence: Synthetic oligonucleotide
  Antisense strand to SEQ ID NO: 1097012
accauuccuaaguuaucac

SEQ ID NO: 1097014 - RNA, 19 nt, Artificial Sequence
  Description of Artificial Sequence: Synthetic oligonucleotide
  Sense strand starting at position 471 of SEQ ID NO: 915665
uccugcauuccaggaaguu

SEQ ID NO: 1097015 - RNA, 19 nt, Artificial Sequence
  Description of Artificial Sequence: Synthetic oligonucleotide
  Antisense strand to SEQ ID NO: 1097014
aacuuccuggaaugcagga

SEQ ID NO: 1097016 - RNA, 19 nt, Artificial Sequence
  Description of Artificial Sequence: Synthetic oligonucleotide
  Sense strand starting at position 484 of SEQ ID NO: 915665
gaaguuauuugugcaccgu

SEQ ID NO: 1097017 - RNA, 19 nt, Artificial Sequence
  Description of Artificial Sequence: Synthetic oligonucleotide
  Antisense strand to SEQ ID NO: 1097016
acggugcacaaauaacuuc

SEQ ID NO: 1097018 - RNA, 19 nt, Artificial Sequence
  Description of Artificial Sequence: Synthetic oligonucleotide
  Sense strand starting at position 488 of SEQ ID NO: 915665
uuauuugugcaccgucaau

SEQ ID NO: 1097019 - RNA, 19 nt, Artificial Sequence
  Description of Artificial Sequence: Synthetic oligonucleotide
  Antisense strand to SEQ ID NO: 1097018
auugacggugcacaaauaa

SEQ ID NO: 1097020 - RNA, 19 nt, Artificial Sequence
  Description of Artificial Sequence: Synthetic oligonucleotide
  Sense strand starting at position 521 of SEQ ID NO: 915665
cagggauauugauggagag

SEQ ID NO: 1097021 - RNA, 19 nt, Artificial Sequence
  Description of Artificial Sequence: Synthetic oligonucleotide
  Antisense strand to SEQ ID NO: 1097020
cucuccaucaauaucccug

SEQ ID NO: 1097022 - RNA, 19 nt, Artificial Sequence
  Description of Artificial Sequence: Synthetic oligonucleotide
  Sense strand starting at position 617 of SEQ ID NO: 915665
agagaagccucacaaguua

SEQ ID NO: 1097023 - RNA, 19 nt, Artificial Sequence
  Description of Artificial Sequence: Synthetic oligonucleotide
  Antisense strand to SEQ ID NO: 1097022
uaacuugugaggcuucucu

SEQ ID NO: 1097024 - RNA, 19 nt, Artificial Sequence
  Description of Artificial Sequence: Synthetic oligonucleotide
  Sense strand starting at position 630 of SEQ ID NO: 915665
aaguuauggucucugugca

SEQ ID NO: 1097025 - RNA, 19 nt, Artificial Sequence
  Description of Artificial Sequence: Synthetic oligonucleotide
  Antisense strand to SEQ ID NO: 1097024
ugcacagagaccauaacuu

SEQ ID NO: 1097026 - RNA, 19 nt, Artificial Sequence
  Description of Artificial Sequence: Synthetic oligonucleotide
  Sense strand starting at position 634 of SEQ ID NO: 915665
uauggucucugugcagaaa

SEQ ID NO: 1097027 - RNA, 19 nt, Artificial Sequence
  Description of Artificial Sequence: Synthetic oligonucleotide
  Antisense strand to SEQ ID NO: 1097026
uuucugcacagagaccaua

SEQ ID NO: 1097028 - RNA, 19 nt, Artificial Sequence
  Description of Artificial Sequence: Synthetic oligonucleotide
  Sense strand starting at position 646 of SEQ ID NO: 915665
gcagaaaccuuagaguaaa

SEQ ID NO: 1097029 - RNA, 19 nt, Artificial Sequence
  Description of Artificial Sequence: Synthetic oligonucleotide
  Antisense strand to SEQ ID NO: 1097028
uuuacucuaagguuucugc

SEQ ID NO: 1097030 - RNA, 19 nt, Artificial Sequence
  Description of Artificial Sequence: Synthetic oligonucleotide
  Sense strand starting at position 1004 of SEQ ID NO: 915665
gauggagauucgcucguca

SEQ ID NO: 1097031 - RNA, 19 nt, Artificial Sequence
  Description of Artificial Sequence: Synthetic oligonucleotide
  Antisense strand to SEQ ID NO: 1097030
ugacgagcgaaucuccauc

SEQ ID NO: 1097032 - RNA, 19 nt, Artificial Sequence
  Description of Artificial Sequence: Synthetic oligonucleotide
  Sense strand starting at position 1008 of SEQ ID NO: 915665
gagauucgcucgucaccca

SEQ ID NO: 1097033 - RNA, 19 nt, Artificial Sequence
  Description of Artificial Sequence: Synthetic oligonucleotide
  Antisense strand to SEQ ID NO: 1097032
ugggugacgagcgaaucuc

SEQ ID NO: 1097034 - RNA, 19 nt, Artificial Sequence
  Description of Artificial Sequence: Synthetic oligonucleotide
  Sense strand starting at position 1387 of SEQ ID NO: 915665
cgauguaaauuauuggcuu

SEQ ID NO: 1097035 - RNA, 19 nt, Artificial Sequence
  Description of Artificial Sequence: Synthetic oligonucleotide
  Antisense strand to SEQ ID NO: 1097034
aagccaauaauuuacaucg

SEQ ID NO: 1097036 - RNA, 19 nt, Artificial Sequence
  Description of Artificial Sequence: Synthetic oligonucleotide
  Sense strand starting at position 1390 of SEQ ID NO: 915665
uguaaauuauuggcuucua

SEQ ID NO: 1097037 - RNA, 19 nt, Artificial Sequence
  Description of Artificial Sequence: Synthetic oligonucleotide
  Antisense strand to SEQ ID NO: 1097036
uagaagccaauaauuuaca

SEQ ID NO: 1097038 - RNA, 19 nt, Artificial Sequence
  Description of Artificial Sequence: Synthetic oligonucleotide
  Sense strand starting at position 1391 of SEQ ID NO: 915665
guaaauuauuggcuucuac

SEQ ID NO: 1097039 - RNA, 19 nt, Artificial Sequence
  Description of Artificial Sequence: Synthetic oligonucleotide
  Antisense strand to SEQ ID NO: 1097038
guagaagccaauaauuuac

SEQ ID NO: 1097040 - RNA, 19 nt, Artificial Sequence
  Description of Artificial Sequence: Synthetic oligonucleotide
  Sense strand starting at position 1401 of SEQ ID NO: 915665
ggcuucuaccuuuacguca

SEQ ID NO: 1097041 - RNA, 19 nt, Artificial Sequence
  Description of Artificial Sequence: Synthetic oligonucleotide
  Antisense strand to SEQ ID NO: 1097040
ugacguaaagguagaagcc

SEQ ID NO: 1097042 - RNA, 19 nt, Artificial Sequence
  Description of Artificial Sequence: Synthetic oligonucleotide
  Sense strand starting at position 1512 of SEQ ID NO: 915665
cgacaaagcucagcacaaa

SEQ ID NO: 1097043 - RNA, 19 nt, Artificial Sequence
  Description of Artificial Sequence: Synthetic oligonucleotide
  Antisense strand to SEQ ID NO: 1097042
uuugugcugagcuuugucg

SEQ ID NO: 1097044 - RNA, 19 nt, Artificial Sequence
  Description of Artificial Sequence: Synthetic oligonucleotide
  Sense strand starting at position 1526 of SEQ ID NO: 915665
acaaauggcuucugauuua

SEQ ID NO: 1097045 - RNA, 19 nt, Artificial Sequence
  Description of Artificial Sequence: Synthetic oligonucleotide
  Antisense strand to SEQ ID NO: 1097044
uaaaucagaagccauuugu

SEQ ID NO: 1097046 - RNA, 19 nt, Artificial Sequence
  Description of Artificial Sequence: Synthetic oligonucleotide
  Sense strand starting at position 1566 of SEQ ID NO: 915665
acugacuucuguuucggaa

SEQ ID NO: 1097047 - RNA, 19 nt, Artificial Sequence
  Description of Artificial Sequence: Synthetic oligonucleotide
  Antisense strand to SEQ ID NO: 1097046
uuccgaaacagaagucagu

SEQ ID NO: 1097048 - RNA, 19 nt, Artificial Sequence
  Description of Artificial Sequence: Synthetic oligonucleotide
  Sense strand starting at position 1624 of SEQ ID NO: 915665
uccaccuagugcuuuaaga

SEQ ID NO: 1097049 - RNA, 19 nt, Artificial Sequence
  Description of Artificial Sequence: Synthetic oligonucleotide
  Antisense strand to SEQ ID NO: 1097048
ucuuaaagcacuaggugga

SEQ ID NO: 1097050 - RNA, 19 nt, Artificial Sequence
  Description of Artificial Sequence: Synthetic oligonucleotide
  Sense strand starting at position 1713 of SEQ ID NO: 915665
gcgauuagccucgcugcau

SEQ ID NO: 1097051 - RNA, 19 nt, Artificial Sequence
  Description of Artificial Sequence: Synthetic oligonucleotide
  Antisense strand to SEQ ID NO: 1097050
augcagcgaggcuaaucgc

SEQ ID NO: 1097052 - RNA, 19 nt, Artificial Sequence
  Description of Artificial Sequence: Synthetic oligonucleotide
  Sense strand starting at position 1806 of SEQ ID NO: 915665
gcgaaaguggccucgccau

SEQ ID NO: 1097053 - RNA, 19 nt, Artificial Sequence
  Description of Artificial Sequence: Synthetic oligonucleotide
  Antisense strand to SEQ ID NO: 1097052
auggcgaggccacuuucgc

SEQ ID NO: 1097054 - RNA, 19 nt, Artificial Sequence
  Description of Artificial Sequence: Synthetic oligonucleotide
  Sense strand starting at position 3134 of SEQ ID NO: 915665
guucuacugccuggaagga

SEQ ID NO: 1097055 - RNA, 19 nt, Artificial Sequence
  Description of Artificial Sequence: Synthetic oligonucleotide
  Antisense strand to SEQ ID NO: 1097054
uccuuccaggcaguagaac

SEQ ID NO: 1097056 - RNA, 19 nt, Artificial Sequence
  Description of Artificial Sequence: Synthetic oligonucleotide
  Sense strand starting at position 3165 of SEQ ID NO: 915665
caguuagcaugucuuugau

SEQ ID NO: 1097057 - RNA, 19 nt, Artificial Sequence
  Description of Artificial Sequence: Synthetic oligonucleotide
  Antisense strand to SEQ ID NO: 1097056
aucaaagacaugcuaacug

SEQ ID NO: 1097058 - RNA, 19 nt, Artificial Sequence
  Description of Artificial Sequence: Synthetic oligonucleotide
  Sense strand starting at position 3167 of SEQ ID NO: 915665
guuagcaugucuuugauac

SEQ ID NO: 1097059 - RNA, 19 nt, Artificial Sequence
  Description of Artificial Sequence: Synthetic oligonucleotide
  Antisense strand to SEQ ID NO: 1097058
guaucaaagacaugcuaac

SEQ ID NO: 1097060 - RNA, 19 nt, Artificial Sequence
  Description of Artificial Sequence: Synthetic oligonucleotide
  Sense strand starting at position 3168 of SEQ ID NO: 915665
uuagcaugucuuugauacu

SEQ ID NO: 1097061 - RNA, 19 nt, Artificial Sequence
  Description of Artificial Sequence: Synthetic oligonucleotide
  Antisense strand to SEQ ID NO: 1097060
aguaucaaagacaugcuaa

SEQ ID NO: 1097062 - RNA, 19 nt, Artificial Sequence
  Description of Artificial Sequence: Synthetic oligonucleotide
  Sense strand starting at position 3199 of SEQ ID NO: 915665
aggacccuuucccaugaaa

SEQ ID NO: 1097063 - RNA, 19 nt, Artificial Sequence
  Description of Artificial Sequence: Synthetic oligonucleotide
  Antisense strand to SEQ ID NO: 1097062
uuucaugggaaaggguccu

SEQ ID NO: 1097064 - RNA, 19 nt, Artificial Sequence
  Description of Artificial Sequence: Synthetic oligonucleotide
  Sense strand starting at position 3245 of SEQ ID NO: 915665
agggcucaauccuccuaaa

SEQ ID NO: 1097065 - RNA, 19 nt, Artificial Sequence
  Description of Artificial Sequence: Synthetic oligonucleotide
  Antisense strand to SEQ ID NO: 1097064
uuuaggaggauugagcccu

SEQ ID NO: 1097066 - RNA, 19 nt, Artificial Sequence
  Description of Artificial Sequence: Synthetic oligonucleotide
  Sense strand starting at position 3316 of SEQ ID NO: 915665
uaagcuaggcauugggaau

SEQ ID NO: 1097067 - RNA, 19 nt, Artificial Sequence
  Description of Artificial Sequence: Synthetic oligonucleotide
  Antisense strand to SEQ ID NO: 1097066
auucccaaugccuagcuua

SEQ ID NO: 1097068 - RNA, 19 nt, Artificial Sequence
  Description of Artificial Sequence: Synthetic oligonucleotide
  Sense strand starting at position 3529 of SEQ ID NO: 915665
agacuuggacucugauuau

SEQ ID NO: 1097069 - RNA, 19 nt, Artificial Sequence
  Description of Artificial Sequence: Synthetic oligonucleotide
  Antisense strand to SEQ ID NO: 1097068
auaaucagaguccaagucu

SEQ ID NO: 1097070 - RNA, 19 nt, Artificial Sequence
  Description of Artificial Sequence: Synthetic oligonucleotide
  Sense strand starting at position 3532 of SEQ ID NO: 915665
cuuggacucugauuauaca

SEQ ID NO: 1097071 - RNA, 19 nt, Artificial Sequence
  Description of Artificial Sequence: Synthetic oligonucleotide
  Antisense strand to SEQ ID NO: 1097070
uguauaaucagaguccaag

SEQ ID NO: 1097072 - RNA, 19 nt, Artificial Sequence
  Description of Artificial Sequence: Synthetic oligonucleotide
  Sense strand starting at position 3535 of SEQ ID NO: 915665
ggacucugauuauacaauu

SEQ ID NO: 1097073 - RNA, 19 nt, Artificial Sequence
  Description of Artificial Sequence: Synthetic oligonucleotide
  Antisense strand to SEQ ID NO: 1097072
aauuguauaaucagagucc

SEQ ID NO: 1097074 - RNA, 19 nt, Artificial Sequence
  Description of Artificial Sequence: Synthetic oligonucleotide
  Sense strand starting at position 3714 of SEQ ID NO: 915665
aguagcaguugccuguaau

SEQ ID NO: 1097075 - RNA, 19 nt, Artificial Sequence
  Description of Artificial Sequence: Synthetic oligonucleotide
  Antisense strand to SEQ ID NO: 1097074
auuacaggcaacugcuacu

SEQ ID NO: 1097076 - RNA, 19 nt, Artificial Sequence
  Description of Artificial Sequence: Synthetic oligonucleotide
  Sense strand starting at position 3717 of SEQ ID NO: 915665
agcaguugccuguaaucuc

SEQ ID NO: 1097077 - RNA, 19 nt, Artificial Sequence
  Description of Artificial Sequence: Synthetic oligonucleotide
  Antisense strand to SEQ ID NO: 1097076
gagauuacaggcaacugcu

SEQ ID NO: 1097078 - RNA, 19 nt, Artificial Sequence
  Description of Artificial Sequence: Synthetic oligonucleotide
  Sense strand starting at position 210 of SEQ ID NO: 915666
gguaaaucuugacccaaug

SEQ ID NO: 1097079 - RNA, 19 nt, Artificial Sequence
  Description of Artificial Sequence: Synthetic oligonucleotide
  Antisense strand to SEQ ID NO: 1097078
cauugggucaagauuuacc

SEQ ID NO: 1097080 - RNA, 19 nt, Artificial Sequence
  Description of Artificial Sequence: Synthetic oligonucleotide
  Sense strand starting at position 276 of SEQ ID NO: 915666
agauccagucuaugauagu

SEQ ID NO: 1097081 - RNA, 19 nt, Artificial Sequence
  Description of Artificial Sequence: Synthetic oligonucleotide
  Antisense strand to SEQ ID NO: 1097080
acuaucauagacuggaucu

SEQ ID NO: 1097082 - RNA, 19 nt, Artificial Sequence
  Description of Artificial Sequence: Synthetic oligonucleotide
  Sense strand starting at position 282 of SEQ ID NO: 915666
agucuaugauagucaaccu

SEQ ID NO: 1097083 - RNA, 19 nt, Artificial Sequence
  Description of Artificial Sequence: Synthetic oligonucleotide
  Antisense strand to SEQ ID NO: 1097082
agguugacuaucauagacu

SEQ ID NO: 1097084 - RNA, 19 nt, Artificial Sequence
  Description of Artificial Sequence: Synthetic oligonucleotide
  Sense strand starting at position 357 of SEQ ID NO: 915666
guggaaauauucucuggac

SEQ ID NO: 1097085 - RNA, 19 nt, Artificial Sequence
  Description of Artificial Sequence: Synthetic oligonucleotide
  Antisense strand to SEQ ID NO: 1097084
guccagagaauauuuccac

SEQ ID NO: 1097086 - RNA, 19 nt, Artificial Sequence
  Description of Artificial Sequence: Synthetic oligonucleotide
  Sense strand starting at position 563 of SEQ ID NO: 915666
agucucagcuuuccaugaa

SEQ ID NO: 1097087 - RNA, 19 nt, Artificial Sequence
  Description of Artificial Sequence: Synthetic oligonucleotide
  Antisense strand to SEQ ID NO: 1097086
uucauggaaagcugagacu

SEQ ID NO: 1097088 - RNA, 19 nt, Artificial Sequence
  Description of Artificial Sequence: Synthetic oligonucleotide
  Sense strand starting at position 577 of SEQ ID NO: 915666
augaacuaguuagugagau

SEQ ID NO: 1097089 - RNA, 19 nt, Artificial Sequence
  Description of Artificial Sequence: Synthetic oligonucleotide
  Antisense strand to SEQ ID NO: 1097088
aucucacuaacuaguucau

SEQ ID NO: 1097090 - RNA, 19 nt, Artificial Sequence
  Description of Artificial Sequence: Synthetic oligonucleotide
  Sense strand starting at position 579 of SEQ ID NO: 915666
gaacuaguuagugagaugu

SEQ ID NO: 1097091 - RNA, 19 nt, Artificial Sequence
  Description of Artificial Sequence: Synthetic oligonucleotide
  Antisense strand to SEQ ID NO: 1097090
acaucucacuaacuaguuc

SEQ ID NO: 1097092 - RNA, 19 nt, Artificial Sequence
  Description of Artificial Sequence: Synthetic oligonucleotide
  Sense strand starting at position 587 of SEQ ID NO: 915666
uagugagaugugggcauua

SEQ ID NO: 1097093 - RNA, 19 nt, Artificial Sequence
  Description of Artificial Sequence: Synthetic oligonucleotide
  Antisense strand to SEQ ID NO: 1097092
uaaugcccacaucucacua

SEQ ID NO: 1097094 - RNA, 19 nt, Artificial Sequence
  Description of Artificial Sequence: Synthetic oligonucleotide
  Sense strand starting at position 589 of SEQ ID NO: 915666
gugagaugugggcauuauu

SEQ ID NO: 1097095 - RNA, 19 nt, Artificial Sequence
  Description of Artificial Sequence: Synthetic oligonucleotide
  Antisense strand to SEQ ID NO: 1097094
aauaaugcccacaucucac

SEQ ID NO: 1097096 - RNA, 19 nt, Artificial Sequence
  Description of Artificial Sequence: Synthetic oligonucleotide
  Sense strand starting at position 592 of SEQ ID NO: 915666
agaugugggcauuauuaca

SEQ ID NO: 1097097 - RNA, 19 nt, Artificial Sequence
  Description of Artificial Sequence: Synthetic oligonucleotide
  Antisense strand to SEQ ID NO: 1097096
uguaauaaugcccacaucu

SEQ ID NO: 1097098 - RNA, 19 nt, Artificial Sequence
  Description of Artificial Sequence: Synthetic oligonucleotide
  Sense strand starting at position 732 of SEQ ID NO: 915666
gccacugaauaguuucuaa

SEQ ID NO: 1097099 - RNA, 19 nt, Artificial Sequence
  Description of Artificial Sequence: Synthetic oligonucleotide
  Antisense strand to SEQ ID NO: 1097098
uuagaaacuauucaguggc

SEQ ID NO: 1097100 - RNA, 19 nt, Artificial Sequence
  Description of Artificial Sequence: Synthetic oligonucleotide
  Sense strand starting at position 949 of SEQ ID NO: 915666
auaagaagguucuugguag

SEQ ID NO: 1097101 - RNA, 19 nt, Artificial Sequence
  Description of Artificial Sequence: Synthetic oligonucleotide
  Antisense strand to SEQ ID NO: 1097100
cuaccaagaaccuucuuau

SEQ ID NO: 1097102 - RNA, 19 nt, Artificial Sequence
  Description of Artificial Sequence: Synthetic oligonucleotide
  Sense strand starting at position 1190 of SEQ ID NO: 915666
uggguuggugucuaacuuu

SEQ ID NO: 1097103 - RNA, 19 nt, Artificial Sequence
  Description of Artificial Sequence: Synthetic oligonucleotide
  Antisense strand to SEQ ID NO: 1097102
aaaguuagacaccaaccca

SEQ ID NO: 1097104 - RNA, 19 nt, Artificial Sequence
  Description of Artificial Sequence: Synthetic oligonucleotide
  Sense strand starting at position 1253 of SEQ ID NO: 915666
cacuucugguugcugauaa

SEQ ID NO: 1097105 - RNA, 19 nt, Artificial Sequence
  Description of Artificial Sequence: Synthetic oligonucleotide
  Antisense strand to SEQ ID NO: 1097104
uuaucagcaaccagaagug

SEQ ID NO: 1097106 - RNA, 19 nt, Artificial Sequence
  Description of Artificial Sequence: Synthetic oligonucleotide
  Sense strand starting at position 1323 of SEQ ID NO: 915666
uaggaaucaccgugaaacu

SEQ ID NO: 1097107 - RNA, 19 nt, Artificial Sequence
  Description of Artificial Sequence: Synthetic oligonucleotide
  Antisense strand to SEQ ID NO: 1097106
aguuucacggugauuccua

SEQ ID NO: 1097108 - RNA, 19 nt, Artificial Sequence
  Description of Artificial Sequence: Synthetic oligonucleotide
  Sense strand starting at position 1402 of SEQ ID NO: 915666
agaucucacucugucacua

SEQ ID NO: 1097109 - RNA, 19 nt, Artificial Sequence
  Description of Artificial Sequence: Synthetic oligonucleotide
  Antisense strand to SEQ ID NO: 1097108
uagugacagagugagaucu

SEQ ID NO: 1097110 - RNA, 19 nt, Artificial Sequence
  Description of Artificial Sequence: Synthetic oligonucleotide
  Sense strand starting at position 1501 of SEQ ID NO: 915666
guuuauuugagcugugcac

SEQ ID NO: 1097111 - RNA, 19 nt, Artificial Sequence
  Description of Artificial Sequence: Synthetic oligonucleotide
  Antisense strand to SEQ ID NO: 1097110
gugcacagcucaaauaaac

SEQ ID NO: 1097112 - RNA, 19 nt, Artificial Sequence
  Description of Artificial Sequence: Synthetic oligonucleotide
  Sense strand starting at position 1587 of SEQ ID NO: 915666
cgucccuaacgcuagagaa

SEQ ID NO: 1097113 - RNA, 19 nt, Artificial Sequence
  Description of Artificial Sequence: Synthetic oligonucleotide
  Antisense strand to SEQ ID NO: 1097112
uucucuagcguuagggacg

SEQ ID NO: 1097114 - RNA, 19 nt, Artificial Sequence
  Description of Artificial Sequence: Synthetic oligonucleotide
  Sense strand starting at position 1617 of SEQ ID NO: 915666
ggucaagcucugggacaga

SEQ ID NO: 1097115 - RNA, 19 nt, Artificial Sequence
  Description of Artificial Sequence: Synthetic oligonucleotide
  Antisense strand to SEQ ID NO: 1097114
ucugucccagagcuugacc

SEQ ID NO: 1097116 - RNA, 19 nt, Artificial Sequence
  Description of Artificial Sequence: Synthetic oligonucleotide
  Sense strand starting at position 2014 of SEQ ID NO: 915666
uaguguuaccaggagauug

SEQ ID NO: 1097117 - RNA, 19 nt, Artificial Sequence
  Description of Artificial Sequence: Synthetic oligonucleotide
  Antisense strand to SEQ ID NO: 1097116
caaucuccugguaacacua

SEQ ID NO: 1097118 - RNA, 19 nt, Artificial Sequence
  Description of Artificial Sequence: Synthetic oligonucleotide
  Sense strand starting at position 2183 of SEQ ID NO: 915666
cguccuuuccaggaacaca

SEQ ID NO: 1097119 - RNA, 19 nt, Artificial Sequence
  Description of Artificial Sequence: Synthetic oligonucleotide
  Antisense strand to SEQ ID NO: 1097118
uguguuccuggaaaggacg

SEQ ID NO: 1097120 - RNA, 19 nt, Artificial Sequence
  Description of Artificial Sequence: Synthetic oligonucleotide
  Sense strand starting at position 2268 of SEQ ID NO: 915666
agugcucccagguggaaau

SEQ ID NO: 1097121 - RNA, 19 nt, Artificial Sequence
  Description of Artificial Sequence: Synthetic oligonucleotide
  Antisense strand to SEQ ID NO: 1097120
auuuccaccugggagcacu

SEQ ID NO: 1097122 - RNA, 19 nt, Artificial Sequence
  Description of Artificial Sequence: Synthetic oligonucleotide
  Sense strand starting at position 2279 of SEQ ID NO: 915666
guggaaaucuaaguuaguu

SEQ ID NO: 1097123 - RNA, 19 nt, Artificial Sequence
  Description of Artificial Sequence: Synthetic oligonucleotide
  Antisense strand to SEQ ID NO: 1097122
aacuaacuuagauuuccac

SEQ ID NO: 1097124 - RNA, 19 nt, Artificial Sequence
  Description of Artificial Sequence: Synthetic oligonucleotide
  Sense strand starting at position 2287 of SEQ ID NO: 915666
cuaaguuaguuuccaagag

SEQ ID NO: 1097125 - RNA, 19 nt, Artificial Sequence
  Description of Artificial Sequence: Synthetic oligonucleotide
  Antisense strand to SEQ ID NO: 1097124
cucuuggaaacuaacuuag

SEQ ID NO: 1097126 - RNA, 19 nt, Artificial Sequence
  Description of Artificial Sequence: Synthetic oligonucleotide
  Sense strand starting at position 2341 of SEQ ID NO: 915666
ccggauuugcagcgguaaa

SEQ ID NO: 1097127 - RNA, 19 nt, Artificial Sequence
  Description of Artificial Sequence: Synthetic oligonucleotide
  Antisense strand to SEQ ID NO: 1097126
uuuaccgcugcaaauccgg

SEQ ID NO: 1097128 - RNA, 19 nt, Artificial Sequence
  Description of Artificial Sequence: Synthetic oligonucleotide
  Sense strand starting at position 2738 of SEQ ID NO: 915666
ggcuguuagcccguuguca

SEQ ID NO: 1097129 - RNA, 19 nt, Artificial Sequence
  Description of Artificial Sequence: Synthetic oligonucleotide
  Antisense strand to SEQ ID NO: 1097128
ugacaacgggcuaacagcc

SEQ ID NO: 1097130 - RNA, 19 nt, Artificial Sequence
  Description of Artificial Sequence: Synthetic oligonucleotide
  Sense strand starting at position 2739 of SEQ ID NO: 915666
gcuguuagcccguugucaa

SEQ ID NO: 1097131 - RNA, 19 nt, Artificial Sequence
  Description of Artificial Sequence: Synthetic oligonucleotide
  Antisense strand to SEQ ID NO: 1097130
uugacaacgggcuaacagc

SEQ ID NO: 1097132 - RNA, 19 nt, Artificial Sequence
  Description of Artificial Sequence: Synthetic oligonucleotide
  Sense strand starting at position 2747 of SEQ ID NO: 915666
cccguugucaaucagggua

SEQ ID NO: 1097133 - RNA, 19 nt, Artificial Sequence
  Description of Artificial Sequence: Synthetic oligonucleotide
  Antisense strand to SEQ ID NO: 1097132
uacccugauugacaacggg

SEQ ID NO: 1097134 - RNA, 19 nt, Artificial Sequence
  Description of Artificial Sequence: Synthetic oligonucleotide
  Sense strand starting at position 2750 of SEQ ID NO: 915666
guugucaaucaggguaaag

SEQ ID NO: 1097135 - RNA, 19 nt, Artificial Sequence
  Description of Artificial Sequence: Synthetic oligonucleotide
  Antisense strand to SEQ ID NO: 1097134
cuuuacccugauugacaac

SEQ ID NO: 1097136 - RNA, 19 nt, Artificial Sequence
  Description of Artificial Sequence: Synthetic oligonucleotide
  Sense strand starting at position 2752 of SEQ ID NO: 915666
ugucaaucaggguaaagca

SEQ ID NO: 1097137 - RNA, 19 nt, Artificial Sequence
  Description of Artificial Sequence: Synthetic oligonucleotide
  Antisense strand to SEQ ID NO: 1097136
ugcuuuacccugauugaca

SEQ ID NO: 1097138 - RNA, 19 nt, Artificial Sequence
  Description of Artificial Sequence: Synthetic oligonucleotide
  Sense strand starting at position 2807 of SEQ ID NO: 915666
gaaggugacuaagcuuuau

SEQ ID NO: 1097139 - RNA, 19 nt, Artificial Sequence
  Description of Artificial Sequence: Synthetic oligonucleotide
  Antisense strand to SEQ ID NO: 1097138
auaaagcuuagucaccuuc

SEQ ID NO: 1097140 - RNA, 19 nt, Artificial Sequence
  Description of Artificial Sequence: Synthetic oligonucleotide
  Sense strand starting at position 3159 of SEQ ID NO: 915666
gugacuaagcuuuaagcaa

SEQ ID NO: 1097141 - RNA, 19 nt, Artificial Sequence
  Description of Artificial Sequence: Synthetic oligonucleotide
  Antisense strand to SEQ ID NO: 1097140
uugcuuaaagcuuagucac

SEQ ID NO: 1097142 - RNA, 19 nt, Artificial Sequence
  Description of Artificial Sequence: Synthetic oligonucleotide
  Sense strand starting at position 3221 of SEQ ID NO: 915666
uguuacuucuaggcuuaaa

SEQ ID NO: 1097143 - RNA, 19 nt, Artificial Sequence
  Description of Artificial Sequence: Synthetic oligonucleotide
  Antisense strand to SEQ ID NO: 1097142
uuuaagccuagaaguaaca

SEQ ID NO: 1097144 - RNA, 19 nt, Artificial Sequence
  Description of Artificial Sequence: Synthetic oligonucleotide
  Sense strand starting at position 3270 of SEQ ID NO: 915666
uggagaguaauaugugcau

SEQ ID NO: 1097145 - RNA, 19 nt, Artificial Sequence
  Description of Artificial Sequence: Synthetic oligonucleotide
  Antisense strand to SEQ ID NO: 1097144
augcacauauuacucucca

SEQ ID NO: 1097146 - RNA, 19 nt, Artificial Sequence
  Description of Artificial Sequence: Synthetic oligonucleotide
  Sense strand starting at position 3272 of SEQ ID NO: 915666
gagaguaauaugugcauag

SEQ ID NO: 1097147 - RNA, 19 nt, Artificial Sequence
  Description of Artificial Sequence: Synthetic oligonucleotide
  Antisense strand to SEQ ID NO: 1097146
cuaugcacauauuacucuc

SEQ ID NO: 1097148 - RNA, 19 nt, Artificial Sequence
  Description of Artificial Sequence: Synthetic oligonucleotide
  Sense strand starting at position 3273 of SEQ ID NO: 915666
agaguaauaugugcauaga

SEQ ID NO: 1097149 - RNA, 19 nt, Artificial Sequence
  Description of Artificial Sequence: Synthetic oligonucleotide
  Antisense strand to SEQ ID NO: 1097148
ucuaugcacauauuacucu

SEQ ID NO: 1097150 - RNA, 19 nt, Artificial Sequence
  Description of Artificial Sequence: Synthetic oligonucleotide
  Sense strand starting at position 3274 of SEQ ID NO: 915666
gaguaauaugugcauagaa

SEQ ID NO: 1097151 - RNA, 19 nt, Artificial Sequence
  Description of Artificial Sequence: Synthetic oligonucleotide
  Antisense strand to SEQ ID NO: 1097150
uucuaugcacauauuacuc

SEQ ID NO: 1097152 - RNA, 19 nt, Artificial Sequence
  Description of Artificial Sequence: Synthetic oligonucleotide
  Sense strand starting at position 3276 of SEQ ID NO: 915666
guaauaugugcauagaagg

SEQ ID NO: 1097153 - RNA, 19 nt, Artificial Sequence
  Description of Artificial Sequence: Synthetic oligonucleotide
  Antisense strand to SEQ ID NO: 1097152
ccuucuaugcacauauuac

SEQ ID NO: 1097154 - RNA, 19 nt, Artificial Sequence
  Description of Artificial Sequence: Synthetic oligonucleotide
  Sense strand starting at position 3920 of SEQ ID NO: 915666
uggagaacgucaucauggu

SEQ ID NO: 1097155 - RNA, 19 nt, Artificial Sequence
  Description of Artificial Sequence: Synthetic oligonucleotide
  Antisense strand to SEQ ID NO: 1097154
accaugaugacguucucca

SEQ ID NO: 1097156 - RNA, 19 nt, Artificial Sequence
  Description of Artificial Sequence: Synthetic oligonucleotide
  Sense strand starting at position 3977 of SEQ ID NO: 915666
cuauuauggcaauguuaag

SEQ ID NO: 1097157 - RNA, 19 nt, Artificial Sequence
  Description of Artificial Sequence: Synthetic oligonucleotide
  Antisense strand to SEQ ID NO: 1097156
cuuaacauugccauaauag

SEQ ID NO: 1097158 - RNA, 19 nt, Artificial Sequence
  Description of Artificial Sequence: Synthetic oligonucleotide
  Sense strand starting at position 243 of SEQ ID NO: 915667
gguaaaucuugacccaaug

SEQ ID NO: 1097159 - RNA, 19 nt, Artificial Sequence
  Description of Artificial Sequence: Synthetic oligonucleotide
  Antisense strand to SEQ ID NO: 1097158
cauugggucaagauuuacc

SEQ ID NO: 1097160 - RNA, 19 nt, Artificial Sequence
  Description of Artificial Sequence: Synthetic oligonucleotide
  Sense strand starting at position 309 of SEQ ID NO: 915667
agauccagucuaugauagu

SEQ ID NO: 1097161 - RNA, 19 nt, Artificial Sequence
  Description of Artificial Sequence: Synthetic oligonucleotide
  Antisense strand to SEQ ID NO: 1097160
acuaucauagacuggaucu

SEQ ID NO: 1097162 - RNA, 19 nt, Artificial Sequence
  Description of Artificial Sequence: Synthetic oligonucleotide
  Sense strand starting at position 315 of SEQ ID NO: 915667
agucuaugauagucaaccu

SEQ ID NO: 1097163 - RNA, 19 nt, Artificial Sequence
  Description of Artificial Sequence: Synthetic oligonucleotide
  Antisense strand to SEQ ID NO: 1097162
agguugacuaucauagacu

SEQ ID NO: 1097164 - RNA, 19 nt, Artificial Sequence
  Description of Artificial Sequence: Synthetic oligonucleotide
  Sense strand starting at position 390 of SEQ ID NO: 915667
guggaaauauucucuggac

SEQ ID NO: 1097165 - RNA, 19 nt, Artificial Sequence
  Description of Artificial Sequence: Synthetic oligonucleotide
  Antisense strand to SEQ ID NO: 1097164
guccagagaauauuuccac

SEQ ID NO: 1097166 - RNA, 19 nt, Artificial Sequence
  Description of Artificial Sequence: Synthetic oligonucleotide
  Sense strand starting at position 596 of SEQ ID NO: 915667
agucucagcuuuccaugaa

SEQ ID NO: 1097167 - RNA, 19 nt, Artificial Sequence
  Description of Artificial Sequence: Synthetic oligonucleotide
  Antisense strand to SEQ ID NO: 1097166
uucauggaaagcugagacu

SEQ ID NO: 1097168 - RNA, 19 nt, Artificial Sequence
  Description of Artificial Sequence: Synthetic oligonucleotide
  Sense strand starting at position 610 of SEQ ID NO: 915667
augaacuaguuagugagau

SEQ ID NO: 1097169 - RNA, 19 nt, Artificial Sequence
  Description of Artificial Sequence: Synthetic oligonucleotide
  Antisense strand to SEQ ID NO: 1097168
aucucacuaacuaguucau

SEQ ID NO: 1097170 - RNA, 19 nt, Artificial Sequence
  Description of Artificial Sequence: Synthetic oligonucleotide
  Sense strand starting at position 612 of SEQ ID NO: 915667
gaacuaguuagugagaugu

SEQ ID NO: 1097171 - RNA, 19 nt, Artificial Sequence
  Description of Artificial Sequence: Synthetic oligonucleotide
  Antisense strand to SEQ ID NO: 1097170
acaucucacuaacuaguuc

SEQ ID NO: 1097172 - RNA, 19 nt, Artificial Sequence
  Description of Artificial Sequence: Synthetic oligonucleotide
  Sense strand starting at position 620 of SEQ ID NO: 915667
uagugagaugugggcauua

SEQ ID NO: 1097173 - RNA, 19 nt, Artificial Sequence
  Description of Artificial Sequence: Synthetic oligonucleotide
  Antisense strand to SEQ ID NO: 1097172
uaaugcccacaucucacua

SEQ ID NO: 1097174 - RNA, 19 nt, Artificial Sequence
  Description of Artificial Sequence: Synthetic oligonucleotide
  Sense strand starting at position 622 of SEQ ID NO: 915667
gugagaugugggcauuauu

SEQ ID NO: 1097175 - RNA, 19 nt, Artificial Sequence
  Description of Artificial Sequence: Synthetic oligonucleotide
  Antisense strand to SEQ ID NO: 1097174
aauaaugcccacaucucac

SEQ ID NO: 1097176 - RNA, 19 nt, Artificial Sequence
  Description of Artificial Sequence: Synthetic oligonucleotide
  Sense strand starting at position 625 of SEQ ID NO: 915667
agaugugggcauuauuaca

SEQ ID NO: 1097177 - RNA, 19 nt, Artificial Sequence
  Description of Artificial Sequence: Synthetic oligonucleotide
  Antisense strand to SEQ ID NO: 1097176
uguaauaaugcccacaucu

SEQ ID NO: 1097178 - RNA, 19 nt, Artificial Sequence
  Description of Artificial Sequence: Synthetic oligonucleotide
  Sense strand starting at position 669 of SEQ ID NO: 915667
gcgacucaggcucauuauu

SEQ ID NO: 1097179 - RNA, 19 nt, Artificial Sequence
  Description of Artificial Sequence: Synthetic oligonucleotide
  Antisense strand to SEQ ID NO: 1097178
aauaaugagccugagucgc

SEQ ID NO: 1097180 - RNA, 19 nt, Artificial Sequence
  Description of Artificial Sequence: Synthetic oligonucleotide
  Sense strand starting at position 765 of SEQ ID NO: 915667
gccacugaauaguuucuaa

SEQ ID NO: 1097181 - RNA, 19 nt, Artificial Sequence
  Description of Artificial Sequence: Synthetic oligonucleotide
  Antisense strand to SEQ ID NO: 1097180
uuagaaacuauucaguggc

SEQ ID NO: 1097182 - RNA, 19 nt, Artificial Sequence
  Description of Artificial Sequence: Synthetic oligonucleotide
  Sense strand starting at position 982 of SEQ ID NO: 915667
auaagaagguucuugguag

SEQ ID NO: 1097183 - RNA, 19 nt, Artificial Sequence
  Description of Artificial Sequence: Synthetic oligonucleotide
  Antisense strand to SEQ ID NO: 1097182
cuaccaagaaccuucuuau

SEQ ID NO: 1097184 - RNA, 19 nt, Artificial Sequence
  Description of Artificial Sequence: Synthetic oligonucleotide
  Sense strand starting at position 1223 of SEQ ID NO: 915667
uggguuggugucuaacuuu

SEQ ID NO: 1097185 - RNA, 19 nt, Artificial Sequence
  Description of Artificial Sequence: Synthetic oligonucleotide
  Antisense strand to SEQ ID NO: 1097184
aaaguuagacaccaaccca

SEQ ID NO: 1097186 - RNA, 19 nt, Artificial Sequence
  Description of Artificial Sequence: Synthetic oligonucleotide
  Sense strand starting at position 1286 of SEQ ID NO: 915667
cacuucugguugcugauaa

SEQ ID NO: 1097187 - RNA, 19 nt, Artificial Sequence
  Description of Artificial Sequence: Synthetic oligonucleotide
  Antisense strand to SEQ ID NO: 1097186
uuaucagcaaccagaagug

SEQ ID NO: 1097188 - RNA, 19 nt, Artificial Sequence
  Description of Artificial Sequence: Synthetic oligonucleotide
  Sense strand starting at position 1356 of SEQ ID NO: 915667
uaggaaucaccgugaaacu

SEQ ID NO: 1097189 - RNA, 19 nt, Artificial Sequence
  Description of Artificial Sequence: Synthetic oligonucleotide
  Antisense strand to SEQ ID NO: 1097188
aguuucacggugauuccua

SEQ ID NO: 1097190 - RNA, 19 nt, Artificial Sequence
  Description of Artificial Sequence: Synthetic oligonucleotide
  Sense strand starting at position 1435 of SEQ ID NO: 915667
agaucucacucugucacua

SEQ ID NO: 1097191 - RNA, 19 nt, Artificial Sequence
  Description of Artificial Sequence: Synthetic oligonucleotide
  Antisense strand to SEQ ID NO: 1097190
uagugacagagugagaucu

SEQ ID NO: 1097192 - RNA, 19 nt, Artificial Sequence
  Description of Artificial Sequence: Synthetic oligonucleotide
  Sense strand starting at position 1534 of SEQ ID NO: 915667
guuuauuugagcugugcac

SEQ ID NO: 1097193 - RNA, 19 nt, Artificial Sequence
  Description of Artificial Sequence: Synthetic oligonucleotide
  Antisense strand to SEQ ID NO: 1097192
gugcacagcucaaauaaac

SEQ ID NO: 1097194 - RNA, 19 nt, Artificial Sequence
  Description of Artificial Sequence: Synthetic oligonucleotide
  Sense strand starting at position 1620 of SEQ ID NO: 915667
cgucccuaacgcuagagaa

SEQ ID NO: 1097195 - RNA, 19 nt, Artificial Sequence
  Description of Artificial Sequence: Synthetic oligonucleotide
  Antisense strand to SEQ ID NO: 1097194
uucucuagcguuagggacg

SEQ ID NO: 1097196 - RNA, 19 nt, Artificial Sequence
  Description of Artificial Sequence: Synthetic oligonucleotide
  Sense strand starting at position 1650 of SEQ ID NO: 915667
ggucaagcucugggacaga

SEQ ID NO: 1097197 - RNA, 19 nt, Artificial Sequence
  Description of Artificial Sequence: Synthetic oligonucleotide
  Antisense strand to SEQ ID NO: 1097196
ucugucccagagcuugacc

SEQ ID NO: 1097198 - RNA, 19 nt, Artificial Sequence
  Description of Artificial Sequence: Synthetic oligonucleotide
  Sense strand starting at position 2047 of SEQ ID NO: 915667
uaguguuaccaggagauug

SEQ ID NO: 1097199 - RNA, 19 nt, Artificial Sequence
  Description of Artificial Sequence: Synthetic oligonucleotide
  Antisense strand to SEQ ID NO: 1097198
caaucuccugguaacacua

SEQ ID NO: 1097200 - RNA, 19 nt, Artificial Sequence
  Description of Artificial Sequence: Synthetic oligonucleotide
  Sense strand starting at position 2216 of SEQ ID NO: 915667
cguccuuuccaggaacaca

SEQ ID NO: 1097201 - RNA, 19 nt, Artificial Sequence
  Description of Artificial Sequence: Synthetic oligonucleotide
  Antisense strand to SEQ ID NO: 1097200
uguguuccuggaaaggacg

SEQ ID NO: 1097202 - RNA, 19 nt, Artificial Sequence
  Description of Artificial Sequence: Synthetic oligonucleotide
  Sense strand starting at position 2301 of SEQ ID NO: 915667
agugcucccagguggaaau

SEQ ID NO: 1097203 - RNA, 19 nt, Artificial Sequence
  Description of Artificial Sequence: Synthetic oligonucleotide
  Antisense strand to SEQ ID NO: 1097202
auuuccaccugggagcacu

SEQ ID NO: 1097204 - RNA, 19 nt, Artificial Sequence
  Description of Artificial Sequence: Synthetic oligonucleotide
  Sense strand starting at position 2312 of SEQ ID NO: 915667
guggaaaucuaaguuaguu

SEQ ID NO: 1097205 - RNA, 19 nt, Artificial Sequence
  Description of Artificial Sequence: Synthetic oligonucleotide
  Antisense strand to SEQ ID NO: 1097204
aacuaacuuagauuuccac

SEQ ID NO: 1097206 - RNA, 19 nt, Artificial Sequence
  Description of Artificial Sequence: Synthetic oligonucleotide
  Sense strand starting at position 2320 of SEQ ID NO: 915667
cuaaguuaguuuccaagag

SEQ ID NO: 1097207 - RNA, 19 nt, Artificial Sequence
  Description of Artificial Sequence: Synthetic oligonucleotide
  Antisense strand to SEQ ID NO: 1097206
cucuuggaaacuaacuuag

SEQ ID NO: 1097208 - RNA, 19 nt, Artificial Sequence
  Description of Artificial Sequence: Synthetic oligonucleotide
  Sense strand starting at position 2374 of SEQ ID NO: 915667
ccggauuugcagcgguaaa

SEQ ID NO: 1097209 - RNA, 19 nt, Artificial Sequence
  Description of Artificial Sequence: Synthetic oligonucleotide
  Antisense strand to SEQ ID NO: 1097208
uuuaccgcugcaaauccgg

SEQ ID NO: 1097210 - RNA, 19 nt, Artificial Sequence
  Description of Artificial Sequence: Synthetic oligonucleotide
  Sense strand starting at position 2771 of SEQ ID NO: 915667
ggcuguuagcccguuguca

SEQ ID NO: 1097211 - RNA, 19 nt, Artificial Sequence
  Description of Artificial Sequence: Synthetic oligonucleotide
  Antisense strand to SEQ ID NO: 1097210
ugacaacgggcuaacagcc

SEQ ID NO: 1097212 - RNA, 19 nt, Artificial Sequence
  Description of Artificial Sequence: Synthetic oligonucleotide
  Sense strand starting at position 2772 of SEQ ID NO: 915667
gcuguuagcccguugucaa

SEQ ID NO: 1097213 - RNA, 19 nt, Artificial Sequence
  Description of Artificial Sequence: Synthetic oligonucleotide
  Antisense strand to SEQ ID NO: 1097212
uugacaacgggcuaacagc

SEQ ID NO: 1097214 - RNA, 19 nt, Artificial Sequence
  Description of Artificial Sequence: Synthetic oligonucleotide
  Sense strand starting at position 2780 of SEQ ID NO: 915667
cccguugucaaucagggua

SEQ ID NO: 1097215 - RNA, 19 nt, Artificial Sequence
  Description of Artificial Sequence: Synthetic oligonucleotide
  Antisense strand to SEQ ID NO: 1097214
uacccugauugacaacggg

SEQ ID NO: 1097216 - RNA, 19 nt, Artificial Sequence
  Description of Artificial Sequence: Synthetic oligonucleotide
  Sense strand starting at position 2783 of SEQ ID NO: 915667
guugucaaucaggguaaag

SEQ ID NO: 1097217 - RNA, 19 nt, Artificial Sequence
  Description of Artificial Sequence: Synthetic oligonucleotide
  Antisense strand to SEQ ID NO: 1097216
cuuuacccugauugacaac

SEQ ID NO: 1097218 - RNA, 19 nt, Artificial Sequence
  Description of Artificial Sequence: Synthetic oligonucleotide
  Sense strand starting at position 2785 of SEQ ID NO: 915667
ugucaaucaggguaaagca

SEQ ID NO: 1097219 - RNA, 19 nt, Artificial Sequence
  Description of Artificial Sequence: Synthetic oligonucleotide
  Antisense strand to SEQ ID NO: 1097218
ugcuuuacccugauugaca

SEQ ID NO: 1097220 - RNA, 19 nt, Artificial Sequence
  Description of Artificial Sequence: Synthetic oligonucleotide
  Sense strand starting at position 2840 of SEQ ID NO: 915667
gaaggugacuaagcuuuau

SEQ ID NO: 1097221 - RNA, 19 nt, Artificial Sequence
  Description of Artificial Sequence: Synthetic oligonucleotide
  Antisense strand to SEQ ID NO: 1097220
auaaagcuuagucaccuuc

SEQ ID NO: 1097222 - RNA, 19 nt, Artificial Sequence
  Description of Artificial Sequence: Synthetic oligonucleotide
  Sense strand starting at position 3192 of SEQ ID NO: 915667
gugacuaagcuuuaagcaa

SEQ ID NO: 1097223 - RNA, 19 nt, Artificial Sequence
  Description of Artificial Sequence: Synthetic oligonucleotide
  Antisense strand to SEQ ID NO: 1097222
uugcuuaaagcuuagucac

SEQ ID NO: 1097224 - RNA, 19 nt, Artificial Sequence
  Description of Artificial Sequence: Synthetic oligonucleotide
  Sense strand starting at position 3254 of SEQ ID NO: 915667
uguuacuucuaggcuuaaa

SEQ ID NO: 1097225 - RNA, 19 nt, Artificial Sequence
  Description of Artificial Sequence: Synthetic oligonucleotide
  Antisense strand to SEQ ID NO: 1097224
uuuaagccuagaaguaaca

SEQ ID NO: 1097226 - RNA, 19 nt, Artificial Sequence
  Description of Artificial Sequence: Synthetic oligonucleotide
  Sense strand starting at position 3303 of SEQ ID NO: 915667
uggagaguaauaugugcau

SEQ ID NO: 1097227 - RNA, 19 nt, Artificial Sequence
  Description of Artificial Sequence: Synthetic oligonucleotide
  Antisense strand to SEQ ID NO: 1097226
augcacauauuacucucca

SEQ ID NO: 1097228 - RNA, 19 nt, Artificial Sequence
  Description of Artificial Sequence: Synthetic oligonucleotide
  Sense strand starting at position 3305 of SEQ ID NO: 915667
gagaguaauaugugcauag

SEQ ID NO: 1097229 - RNA, 19 nt, Artificial Sequence
  Description of Artificial Sequence: Synthetic oligonucleotide
  Antisense strand to SEQ ID NO: 1097228
cuaugcacauauuacucuc

SEQ ID NO: 1097230 - RNA, 19 nt, Artificial Sequence
  Description of Artificial Sequence: Synthetic oligonucleotide
  Sense strand starting at position 3306 of SEQ ID NO: 915667
agaguaauaugugcauaga

SEQ ID NO: 1097231 - RNA, 19 nt, Artificial Sequence
  Description of Artificial Sequence: Synthetic oligonucleotide
  Antisense strand to SEQ ID NO: 1097230
ucuaugcacauauuacucu

SEQ ID NO: 1097232 - RNA, 19 nt, Artificial Sequence
  Description of Artificial Sequence: Synthetic oligonucleotide
  Sense strand starting at position 3307 of SEQ ID NO: 915667
gaguaauaugugcauagaa

SEQ ID NO: 1097233 - RNA, 19 nt, Artificial Sequence
  Description of Artificial Sequence: Synthetic oligonucleotide
  Antisense strand to SEQ ID NO: 1097232
uucuaugcacauauuacuc

SEQ ID NO: 1097234 - RNA, 19 nt, Artificial Sequence
  Description of Artificial Sequence: Synthetic oligonucleotide
  Sense strand starting at position 3309 of SEQ ID NO: 915667
guaauaugugcauagaagg

SEQ ID NO: 1097235 - RNA, 19 nt, Artificial Sequence
  Description of Artificial Sequence: Synthetic oligonucleotide
  Antisense strand to SEQ ID NO: 1097234
ccuucuaugcacauauuac

SEQ ID NO: 1097236 - RNA, 19 nt, Artificial Sequence
  Description of Artificial Sequence: Synthetic oligonucleotide
  Sense strand starting at position 3953 of SEQ ID NO: 915667
uggagaacgucaucauggu

SEQ ID NO: 1097237 - RNA, 19 nt, Artificial Sequence
  Description of Artificial Sequence: Synthetic oligonucleotide
  Antisense strand to SEQ ID NO: 1097236
accaugaugacguucucca

SEQ ID NO: 1097238 - RNA, 19 nt, Artificial Sequence
  Description of Artificial Sequence: Synthetic oligonucleotide
  Sense strand starting at position 16 of SEQ ID NO: 915668
aaguuucuagcuuaguuga

SEQ ID NO: 1097239 - RNA, 19 nt, Artificial Sequence
  Description of Artificial Sequence: Synthetic oligonucleotide
  Antisense strand to SEQ ID NO: 1097238
ucaacuaagcuagaaacuu

SEQ ID NO: 1097240 - RNA, 19 nt, Artificial Sequence
  Description of Artificial Sequence: Synthetic oligonucleotide
  Sense strand starting at position 83 of SEQ ID NO: 915668
ugugcuauucuggauauua

SEQ ID NO: 1097241 - RNA, 19 nt, Artificial Sequence
  Description of Artificial Sequence: Synthetic oligonucleotide
  Antisense strand to SEQ ID NO: 1097240
uaauauccagaauagcaca

SEQ ID NO: 1097242 - RNA, 19 nt, Artificial Sequence
  Description of Artificial Sequence: Synthetic oligonucleotide
  Sense strand starting at position 85 of SEQ ID NO: 915668
ugcuauucuggauauuaca

SEQ ID NO: 1097243 - RNA, 19 nt, Artificial Sequence
  Description of Artificial Sequence: Synthetic oligonucleotide
  Antisense strand to SEQ ID NO: 1097242
uguaauauccagaauagca

SEQ ID NO: 1097244 - RNA, 19 nt, Artificial Sequence
  Description of Artificial Sequence: Synthetic oligonucleotide
  Sense strand starting at position 138 of SEQ ID NO: 915668
guuagaauagagggcaaau

SEQ ID NO: 1097245 - RNA, 19 nt, Artificial Sequence
  Description of Artificial Sequence: Synthetic oligonucleotide
  Antisense strand to SEQ ID NO: 1097244
auuugcccucuauucuaac

SEQ ID NO: 1097246 - RNA, 19 nt, Artificial Sequence
  Description of Artificial Sequence: Synthetic oligonucleotide
  Sense strand starting at position 204 of SEQ ID NO: 915668
cccuuaguagcuuaagagu

SEQ ID NO: 1097247 - RNA, 19 nt, Artificial Sequence
  Description of Artificial Sequence: Synthetic oligonucleotide
  Antisense strand to SEQ ID NO: 1097246
acucuuaagcuacuaaggg

SEQ ID NO: 1097248 - RNA, 19 nt, Artificial Sequence
  Description of Artificial Sequence: Synthetic oligonucleotide
  Sense strand starting at position 215 of SEQ ID NO: 915668
uuaagaguucgugagacau

SEQ ID NO: 1097249 - RNA, 19 nt, Artificial Sequence
  Description of Artificial Sequence: Synthetic oligonucleotide
  Antisense strand to SEQ ID NO: 1097248
augucucacgaacucuuaa

SEQ ID NO: 1097250 - RNA, 19 nt, Artificial Sequence
  Description of Artificial Sequence: Synthetic oligonucleotide
  Sense strand starting at position 219 of SEQ ID NO: 915668
gaguucgugagacauugga

SEQ ID NO: 1097251 - RNA, 19 nt, Artificial Sequence
  Description of Artificial Sequence: Synthetic oligonucleotide
  Antisense strand to SEQ ID NO: 1097250
uccaaugucucacgaacuc

SEQ ID NO: 1097252 - RNA, 19 nt, Artificial Sequence
  Description of Artificial Sequence: Synthetic oligonucleotide
  Sense strand starting at position 245 of SEQ ID NO: 915668
augguauggcuuuaaagua

SEQ ID NO: 1097253 - RNA, 19 nt, Artificial Sequence
  Description of Artificial Sequence: Synthetic oligonucleotide
  Antisense strand to SEQ ID NO: 1097252
uacuuuaaagccauaccau

SEQ ID NO: 1097254 - RNA, 19 nt, Artificial Sequence
  Description of Artificial Sequence: Synthetic oligonucleotide
  Sense strand starting at position 425 of SEQ ID NO: 915668
ugagaauaauaucugugau

SEQ ID NO: 1097255 - RNA, 19 nt, Artificial Sequence
  Description of Artificial Sequence: Synthetic oligonucleotide
  Antisense strand to SEQ ID NO: 1097254
aucacagauauuauucuca

SEQ ID NO: 1097256 - RNA, 19 nt, Artificial Sequence
  Description of Artificial Sequence: Synthetic oligonucleotide
  Sense strand starting at position 473 of SEQ ID NO: 915668
uguuauugaguacaauaca

SEQ ID NO: 1097257 - RNA, 19 nt, Artificial Sequence
  Description of Artificial Sequence: Synthetic oligonucleotide
  Antisense strand to SEQ ID NO: 1097256
uguauuguacucaauaaca

SEQ ID NO: 1097258 - RNA, 19 nt, Artificial Sequence
  Description of Artificial Sequence: Synthetic oligonucleotide
  Sense strand starting at position 522 of SEQ ID NO: 915668
uuaaaccuucuuugagaag

SEQ ID NO: 1097259 - RNA, 19 nt, Artificial Sequence
  Description of Artificial Sequence: Synthetic oligonucleotide
  Antisense strand to SEQ ID NO: 1097258
cuucucaaagaagguuuaa

SEQ ID NO: 1097260 - RNA, 19 nt, Artificial Sequence
  Description of Artificial Sequence: Synthetic oligonucleotide
  Sense strand starting at position 581 of SEQ ID NO: 915668
acuuaauaucuguggcauu

SEQ ID NO: 1097261 - RNA, 19 nt, Artificial Sequence
  Description of Artificial Sequence: Synthetic oligonucleotide
  Antisense strand to SEQ ID NO: 1097260
aaugccacagauauuaagu

SEQ ID NO: 1097262 - RNA, 19 nt, Artificial Sequence
  Description of Artificial Sequence: Synthetic oligonucleotide
  Sense strand starting at position 761 of SEQ ID NO: 915668
uuuaaugguuguuucuaca

SEQ ID NO: 1097263 - RNA, 19 nt, Artificial Sequence
  Description of Artificial Sequence: Synthetic oligonucleotide
  Antisense strand to SEQ ID NO: 1097262
uguagaaacaaccauuaaa

SEQ ID NO: 1097264 - RNA, 19 nt, Artificial Sequence
  Description of Artificial Sequence: Synthetic oligonucleotide
  Sense strand starting at position 820 of SEQ ID NO: 915668
gacugaucccugcacaggu

SEQ ID NO: 1097265 - RNA, 19 nt, Artificial Sequence
  Description of Artificial Sequence: Synthetic oligonucleotide
  Antisense strand to SEQ ID NO: 1097264
accugugcagggaucaguc

SEQ ID NO: 1097266 - RNA, 19 nt, Artificial Sequence
  Description of Artificial Sequence: Synthetic oligonucleotide
  Sense strand starting at position 877 of SEQ ID NO: 915668
ugaucaucaugagcgagaa

SEQ ID NO: 1097267 - RNA, 19 nt, Artificial Sequence
  Description of Artificial Sequence: Synthetic oligonucleotide
  Antisense strand to SEQ ID NO: 1097266
uucucgcucaugaugauca

SEQ ID NO: 1097268 - RNA, 19 nt, Artificial Sequence
  Description of Artificial Sequence: Synthetic oligonucleotide
  Sense strand starting at position 878 of SEQ ID NO: 915668
gaucaucaugagcgagaau

SEQ ID NO: 1097269 - RNA, 19 nt, Artificial Sequence
  Description of Artificial Sequence: Synthetic oligonucleotide
  Antisense strand to SEQ ID NO: 1097268
auucucgcucaugaugauc

SEQ ID NO: 1097270 - RNA, 19 nt, Artificial Sequence
  Description of Artificial Sequence: Synthetic oligonucleotide
  Sense strand starting at position 881 of SEQ ID NO: 915668
caucaugagcgagaauacu

SEQ ID NO: 1097271 - RNA, 19 nt, Artificial Sequence
  Description of Artificial Sequence: Synthetic oligonucleotide
  Antisense strand to SEQ ID NO: 1097270
aguauucucgcucaugaug

SEQ ID NO: 1097272 - RNA, 19 nt, Artificial Sequence
  Description of Artificial Sequence: Synthetic oligonucleotide
  Sense strand starting at position 890 of SEQ ID NO: 915668
cgagaauacuaacugccau

SEQ ID NO: 1097273 - RNA, 19 nt, Artificial Sequence
  Description of Artificial Sequence: Synthetic oligonucleotide
  Antisense strand to SEQ ID NO: 1097272
auggcaguuaguauucucg

SEQ ID NO: 1097274 - RNA, 19 nt, Artificial Sequence
  Description of Artificial Sequence: Synthetic oligonucleotide
  Sense strand starting at position 952 of SEQ ID NO: 915668
ggauuccucagaggguaau

SEQ ID NO: 1097275 - RNA, 19 nt, Artificial Sequence
  Description of Artificial Sequence: Synthetic oligonucleotide
  Antisense strand to SEQ ID NO: 1097274
auuacccucugaggaaucc

SEQ ID NO: 1097276 - RNA, 19 nt, Artificial Sequence
  Description of Artificial Sequence: Synthetic oligonucleotide
  Sense strand starting at position 1077 of SEQ ID NO: 915668
agugcuccucuggaagagu

SEQ ID NO: 1097277 - RNA, 19 nt, Artificial Sequence
  Description of Artificial Sequence: Synthetic oligonucleotide
  Antisense strand to SEQ ID NO: 1097276
acucuuccagaggagcacu

SEQ ID NO: 1097278 - RNA, 19 nt, Artificial Sequence
  Description of Artificial Sequence: Synthetic oligonucleotide
  Sense strand starting at position 1312 of SEQ ID NO: 915668
cucuuaacacguugauaga

SEQ ID NO: 1097279 - RNA, 19 nt, Artificial Sequence
  Description of Artificial Sequence: Synthetic oligonucleotide
  Antisense strand to SEQ ID NO: 1097278
ucuaucaacguguuaagag

SEQ ID NO: 1097280 - RNA, 19 nt, Artificial Sequence
  Description of Artificial Sequence: Synthetic oligonucleotide
  Sense strand starting at position 1313 of SEQ ID NO: 915668
ucuuaacacguugauagaa

SEQ ID NO: 1097281 - RNA, 19 nt, Artificial Sequence
  Description of Artificial Sequence: Synthetic oligonucleotide
  Antisense strand to SEQ ID NO: 1097280
uucuaucaacguguuaaga

SEQ ID NO: 1097282 - RNA, 19 nt, Artificial Sequence
  Description of Artificial Sequence: Synthetic oligonucleotide
  Sense strand starting at position 1583 of SEQ ID NO: 915668
gauuaaggucucggucaua

SEQ ID NO: 1097283 - RNA, 19 nt, Artificial Sequence
  Description of Artificial Sequence: Synthetic oligonucleotide
  Antisense strand to SEQ ID NO: 1097282
uaugaccgagaccuuaauc

SEQ ID NO: 1097284 - RNA, 19 nt, Artificial Sequence
  Description of Artificial Sequence: Synthetic oligonucleotide
  Sense strand starting at position 1586 of SEQ ID NO: 915668
uaaggucucggucauaaga

SEQ ID NO: 1097285 - RNA, 19 nt, Artificial Sequence
  Description of Artificial Sequence: Synthetic oligonucleotide
  Antisense strand to SEQ ID NO: 1097284
ucuuaugaccgagaccuua

SEQ ID NO: 1097286 - RNA, 19 nt, Artificial Sequence
  Description of Artificial Sequence: Synthetic oligonucleotide
  Sense strand starting at position 1633 of SEQ ID NO: 915668
uucuuaagagcaugaaaca

SEQ ID NO: 1097287 - RNA, 19 nt, Artificial Sequence
  Description of Artificial Sequence: Synthetic oligonucleotide
  Antisense strand to SEQ ID NO: 1097286
uguuucaugcucuuaagaa

SEQ ID NO: 1097288 - RNA, 19 nt, Artificial Sequence
  Description of Artificial Sequence: Synthetic oligonucleotide
  Sense strand starting at position 2235 of SEQ ID NO: 915668
gguuguugggcggaagaga

SEQ ID NO: 1097289 - RNA, 19 nt, Artificial Sequence
  Description of Artificial Sequence: Synthetic oligonucleotide
  Antisense strand to SEQ ID NO: 1097288
ucucuuccgcccaacaacc

SEQ ID NO: 1097290 - RNA, 19 nt, Artificial Sequence
  Description of Artificial Sequence: Synthetic oligonucleotide
  Sense strand starting at position 2345 of SEQ ID NO: 915668
cagagaacugcacagucau

SEQ ID NO: 1097291 - RNA, 19 nt, Artificial Sequence
  Description of Artificial Sequence: Synthetic oligonucleotide
  Antisense strand to SEQ ID NO: 1097290
augacugugcaguucucug

SEQ ID NO: 1097292 - RNA, 19 nt, Artificial Sequence
  Description of Artificial Sequence: Synthetic oligonucleotide
  Sense strand starting at position 2433 of SEQ ID NO: 915668
gcaagaugugguggacaag

SEQ ID NO: 1097293 - RNA, 19 nt, Artificial Sequence
  Description of Artificial Sequence: Synthetic oligonucleotide
  Antisense strand to SEQ ID NO: 1097292
cuuguccaccacaucuugc

SEQ ID NO: 1097294 - RNA, 19 nt, Artificial Sequence
  Description of Artificial Sequence: Synthetic oligonucleotide
  Sense strand starting at position 2958 of SEQ ID NO: 915668
aucuuagagcacugaaucu

SEQ ID NO: 1097295 - RNA, 19 nt, Artificial Sequence
  Description of Artificial Sequence: Synthetic oligonucleotide
  Antisense strand to SEQ ID NO: 1097294
agauucagugcucuaagau

SEQ ID NO: 1097296 - RNA, 19 nt, Artificial Sequence
  Description of Artificial Sequence: Synthetic oligonucleotide
  Sense strand starting at position 3107 of SEQ ID NO: 915668
augauuuguugugcguuua

SEQ ID NO: 1097297 - RNA, 19 nt, Artificial Sequence
  Description of Artificial Sequence: Synthetic oligonucleotide
  Antisense strand to SEQ ID NO: 1097296
uaaacgcacaacaaaucau

SEQ ID NO: 1097298 - RNA, 19 nt, Artificial Sequence
  Description of Artificial Sequence: Synthetic oligonucleotide
  Sense strand starting at position 3111 of SEQ ID NO: 915668
uuuguugugcguuuagcaa

SEQ ID NO: 1097299 - RNA, 19 nt, Artificial Sequence
  Description of Artificial Sequence: Synthetic oligonucleotide
  Antisense strand to SEQ ID NO: 1097298
uugcuaaacgcacaacaaa

SEQ ID NO: 1097300 - RNA, 19 nt, Artificial Sequence
  Description of Artificial Sequence: Synthetic oligonucleotide
  Sense strand starting at position 3153 of SEQ ID NO: 915668
gaagcucuguggcuaagaa

SEQ ID NO: 1097301 - RNA, 19 nt, Artificial Sequence
  Description of Artificial Sequence: Synthetic oligonucleotide
  Antisense strand to SEQ ID NO: 1097300
uucuuagccacagagcuuc

SEQ ID NO: 1097302 - RNA, 19 nt, Artificial Sequence
  Description of Artificial Sequence: Synthetic oligonucleotide
  Sense strand starting at position 3154 of SEQ ID NO: 915668
aagcucuguggcuaagaaa

SEQ ID NO: 1097303 - RNA, 19 nt, Artificial Sequence
  Description of Artificial Sequence: Synthetic oligonucleotide
  Antisense strand to SEQ ID NO: 1097302
uuucuuagccacagagcuu

SEQ ID NO: 1097304 - RNA, 19 nt, Artificial Sequence
  Description of Artificial Sequence: Synthetic oligonucleotide
  Sense strand starting at position 3293 of SEQ ID NO: 915668
uuguaauguuaggucaaca

SEQ ID NO: 1097305 - RNA, 19 nt, Artificial Sequence
  Description of Artificial Sequence: Synthetic oligonucleotide
  Antisense strand to SEQ ID NO: 1097304
uguugaccuaacauuacaa

SEQ ID NO: 1097306 - RNA, 19 nt, Artificial Sequence
  Description of Artificial Sequence: Synthetic oligonucleotide
  Sense strand starting at position 3412 of SEQ ID NO: 915668
gcagaacauuucguaguuu

SEQ ID NO: 1097307 - RNA, 19 nt, Artificial Sequence
  Description of Artificial Sequence: Synthetic oligonucleotide
  Antisense strand to SEQ ID NO: 1097306
aaacuacgaaauguucugc

SEQ ID NO: 1097308 - RNA, 19 nt, Artificial Sequence
  Description of Artificial Sequence: Synthetic oligonucleotide
  Sense strand starting at position 3468 of SEQ ID NO: 915668
uuuguuauggcuggaauua

SEQ ID NO: 1097309 - RNA, 19 nt, Artificial Sequence
  Description of Artificial Sequence: Synthetic oligonucleotide
  Antisense strand to SEQ ID NO: 1097308
uaauuccagccauaacaaa

SEQ ID NO: 1097310 - RNA, 19 nt, Artificial Sequence
  Description of Artificial Sequence: Synthetic oligonucleotide
  Sense strand starting at position 3513 of SEQ ID NO: 915668
gaacuaaugcuggguccua

SEQ ID NO: 1097311 - RNA, 19 nt, Artificial Sequence
  Description of Artificial Sequence: Synthetic oligonucleotide
  Antisense strand to SEQ ID NO: 1097310
uaggacccagcauuaguuc

SEQ ID NO: 1097312 - RNA, 19 nt, Artificial Sequence
  Description of Artificial Sequence: Synthetic oligonucleotide
  Sense strand starting at position 3574 of SEQ ID NO: 915668
gagaaaguaguuugagcaa

SEQ ID NO: 1097313 - RNA, 19 nt, Artificial Sequence
  Description of Artificial Sequence: Synthetic oligonucleotide
  Antisense strand to SEQ ID NO: 1097312
uugcucaaacuacuuucuc

SEQ ID NO: 1097314 - RNA, 19 nt, Artificial Sequence
  Description of Artificial Sequence: Synthetic oligonucleotide
  Sense strand starting at position 3577 of SEQ ID NO: 915668
aaaguaguuugagcaaaga

SEQ ID NO: 1097315 - RNA, 19 nt, Artificial Sequence
  Description of Artificial Sequence: Synthetic oligonucleotide
  Antisense strand to SEQ ID NO: 1097314
ucuuugcucaaacuacuuu

SEQ ID NO: 1097316 - RNA, 19 nt, Artificial Sequence
  Description of Artificial Sequence: Synthetic oligonucleotide
  Sense strand starting at position 3605 of SEQ ID NO: 915668
aagaaugagcacugaguau

SEQ ID NO: 1097317 - RNA, 19 nt, Artificial Sequence
  Description of Artificial Sequence: Synthetic oligonucleotide
  Antisense strand to SEQ ID NO: 1097316
auacucagugcucauucuu

SEQ ID NO: 1097318 - RNA, 19 nt, Artificial Sequence
  Description of Artificial Sequence: Synthetic oligonucleotide
  Sense strand starting at position 28 of SEQ ID NO: 915669
ugugcuauucuggauauua

SEQ ID NO: 1097319 - RNA, 19 nt, Artificial Sequence
  Description of Artificial Sequence: Synthetic oligonucleotide
  Antisense strand to SEQ ID NO: 1097318
uaauauccagaauagcaca

SEQ ID NO: 1097320 - RNA, 19 nt, Artificial Sequence
  Description of Artificial Sequence: Synthetic oligonucleotide
  Sense strand starting at position 30 of SEQ ID NO: 915669
ugcuauucuggauauuaca

SEQ ID NO: 1097321 - RNA, 19 nt, Artificial Sequence
  Description of Artificial Sequence: Synthetic oligonucleotide
  Antisense strand to SEQ ID NO: 1097320
uguaauauccagaauagca

SEQ ID NO: 1097322 - RNA, 19 nt, Artificial Sequence
  Description of Artificial Sequence: Synthetic oligonucleotide
  Sense strand starting at position 83 of SEQ ID NO: 915669
guuagaauagagggcaaau

SEQ ID NO: 1097323 - RNA, 19 nt, Artificial Sequence
  Description of Artificial Sequence: Synthetic oligonucleotide
  Antisense strand to SEQ ID NO: 1097322
auuugcccucuauucuaac

SEQ ID NO: 1097324 - RNA, 19 nt, Artificial Sequence
  Description of Artificial Sequence: Synthetic oligonucleotide
  Sense strand starting at position 149 of SEQ ID NO: 915669
cccuuaguagcuuaagagu

SEQ ID NO: 1097325 - RNA, 19 nt, Artificial Sequence
  Description of Artificial Sequence: Synthetic oligonucleotide
  Antisense strand to SEQ ID NO: 1097324
acucuuaagcuacuaaggg

SEQ ID NO: 1097326 - RNA, 19 nt, Artificial Sequence
  Description of Artificial Sequence: Synthetic oligonucleotide
  Sense strand starting at position 160 of SEQ ID NO: 915669
uuaagaguucgugagacau

SEQ ID NO: 1097327 - RNA, 19 nt, Artificial Sequence
  Description of Artificial Sequence: Synthetic oligonucleotide
  Antisense strand to SEQ ID NO: 1097326
augucucacgaacucuuaa

SEQ ID NO: 1097328 - RNA, 19 nt, Artificial Sequence
  Description of Artificial Sequence: Synthetic oligonucleotide
  Sense strand starting at position 164 of SEQ ID NO: 915669
gaguucgugagacauugga

SEQ ID NO: 1097329 - RNA, 19 nt, Artificial Sequence
  Description of Artificial Sequence: Synthetic oligonucleotide
  Antisense strand to SEQ ID NO: 1097328
uccaaugucucacgaacuc

SEQ ID NO: 1097330 - RNA, 19 nt, Artificial Sequence
  Description of Artificial Sequence: Synthetic oligonucleotide
  Sense strand starting at position 190 of SEQ ID NO: 915669
augguauggcuuuaaagua

SEQ ID NO: 1097331 - RNA, 19 nt, Artificial Sequence
  Description of Artificial Sequence: Synthetic oligonucleotide
  Antisense strand to SEQ ID NO: 1097330
uacuuuaaagccauaccau

SEQ ID NO: 1097332 - RNA, 19 nt, Artificial Sequence
  Description of Artificial Sequence: Synthetic oligonucleotide
  Sense strand starting at position 370 of SEQ ID NO: 915669
ugagaauaauaucugugau

SEQ ID NO: 1097333 - RNA, 19 nt, Artificial Sequence
  Description of Artificial Sequence: Synthetic oligonucleotide
  Antisense strand to SEQ ID NO: 1097332
aucacagauauuauucuca

SEQ ID NO: 1097334 - RNA, 19 nt, Artificial Sequence
  Description of Artificial Sequence: Synthetic oligonucleotide
  Sense strand starting at position 418 of SEQ ID NO: 915669
uguuauugaguacaauaca

SEQ ID NO: 1097335 - RNA, 19 nt, Artificial Sequence
  Description of Artificial Sequence: Synthetic oligonucleotide
  Antisense strand to SEQ ID NO: 1097334
uguauuguacucaauaaca

SEQ ID NO: 1097336 - RNA, 19 nt, Artificial Sequence
  Description of Artificial Sequence: Synthetic oligonucleotide
  Sense strand starting at position 467 of SEQ ID NO: 915669
uuaaaccuucuuugagaag

SEQ ID NO: 1097337 - RNA, 19 nt, Artificial Sequence
  Description of Artificial Sequence: Synthetic oligonucleotide
  Antisense strand to SEQ ID NO: 1097336
cuucucaaagaagguuuaa

SEQ ID NO: 1097338 - RNA, 19 nt, Artificial Sequence
  Description of Artificial Sequence: Synthetic oligonucleotide
  Sense strand starting at position 526 of SEQ ID NO: 915669
acuuaauaucuguggcauu

SEQ ID NO: 1097339 - RNA, 19 nt, Artificial Sequence
  Description of Artificial Sequence: Synthetic oligonucleotide
  Antisense strand to SEQ ID NO: 1097338
aaugccacagauauuaagu

SEQ ID NO: 1097340 - RNA, 19 nt, Artificial Sequence
  Description of Artificial Sequence: Synthetic oligonucleotide
  Sense strand starting at position 706 of SEQ ID NO: 915669
uuuaaugguuguuucuaca

SEQ ID NO: 1097341 - RNA, 19 nt, Artificial Sequence
  Description of Artificial Sequence: Synthetic oligonucleotide
  Antisense strand to SEQ ID NO: 1097340
uguagaaacaaccauuaaa

SEQ ID NO: 1097342 - RNA, 19 nt, Artificial Sequence
  Description of Artificial Sequence: Synthetic oligonucleotide
  Sense strand starting at position 765 of SEQ ID NO: 915669
gacugaucccugcacaggu

SEQ ID NO: 1097343 - RNA, 19 nt, Artificial Sequence
  Description of Artificial Sequence: Synthetic oligonucleotide
  Antisense strand to SEQ ID NO: 1097342
accugugcagggaucaguc

SEQ ID NO: 1097344 - RNA, 19 nt, Artificial Sequence
  Description of Artificial Sequence: Synthetic oligonucleotide
  Sense strand starting at position 822 of SEQ ID NO: 915669
ugaucaucaugagcgagaa

SEQ ID NO: 1097345 - RNA, 19 nt, Artificial Sequence
  Description of Artificial Sequence: Synthetic oligonucleotide
  Antisense strand to SEQ ID NO: 1097344
uucucgcucaugaugauca

SEQ ID NO: 1097346 - RNA, 19 nt, Artificial Sequence
  Description of Artificial Sequence: Synthetic oligonucleotide
  Sense strand starting at position 823 of SEQ ID NO: 915669
gaucaucaugagcgagaau

SEQ ID NO: 1097347 - RNA, 19 nt, Artificial Sequence
  Description of Artificial Sequence: Synthetic oligonucleotide
  Antisense strand to SEQ ID NO: 1097346
auucucgcucaugaugauc

SEQ ID NO: 1097348 - RNA, 19 nt, Artificial Sequence
  Description of Artificial Sequence: Synthetic oligonucleotide
  Sense strand starting at position 826 of SEQ ID NO: 915669
caucaugagcgagaauacu

SEQ ID NO: 1097349 - RNA, 19 nt, Artificial Sequence
  Description of Artificial Sequence: Synthetic oligonucleotide
  Antisense strand to SEQ ID NO: 1097348
aguauucucgcucaugaug

SEQ ID NO: 1097350 - RNA, 19 nt, Artificial Sequence
  Description of Artificial Sequence: Synthetic oligonucleotide
  Sense strand starting at position 835 of SEQ ID NO: 915669
cgagaauacuaacugccau

SEQ ID NO: 1097351 - RNA, 19 nt, Artificial Sequence
  Description of Artificial Sequence: Synthetic oligonucleotide
  Antisense strand to SEQ ID NO: 1097350
auggcaguuaguauucucg

SEQ ID NO: 1097352 - RNA, 19 nt, Artificial Sequence
  Description of Artificial Sequence: Synthetic oligonucleotide
  Sense strand starting at position 897 of SEQ ID NO: 915669
ggauuccucagaggguaau

SEQ ID NO: 1097353 - RNA, 19 nt, Artificial Sequence
  Description of Artificial Sequence: Synthetic oligonucleotide
  Antisense strand to SEQ ID NO: 1097352
auuacccucugaggaaucc

SEQ ID NO: 1097354 - RNA, 19 nt, Artificial Sequence
  Description of Artificial Sequence: Synthetic oligonucleotide
  Sense strand starting at position 1022 of SEQ ID NO: 915669
agugcuccucuggaagagu

SEQ ID NO: 1097355 - RNA, 19 nt, Artificial Sequence
  Description of Artificial Sequence: Synthetic oligonucleotide
  Antisense strand to SEQ ID NO: 1097354
acucuuccagaggagcacu

SEQ ID NO: 1097356 - RNA, 19 nt, Artificial Sequence
  Description of Artificial Sequence: Synthetic oligonucleotide
  Sense strand starting at position 1257 of SEQ ID NO: 915669
cucuuaacacguugauaga

SEQ ID NO: 1097357 - RNA, 19 nt, Artificial Sequence
  Description of Artificial Sequence: Synthetic oligonucleotide
  Antisense strand to SEQ ID NO: 1097356
ucuaucaacguguuaagag

SEQ ID NO: 1097358 - RNA, 19 nt, Artificial Sequence
  Description of Artificial Sequence: Synthetic oligonucleotide
  Sense strand starting at position 1258 of SEQ ID NO: 915669
ucuuaacacguugauagaa

SEQ ID NO: 1097359 - RNA, 19 nt, Artificial Sequence
  Description of Artificial Sequence: Synthetic oligonucleotide
  Antisense strand to SEQ ID NO: 1097358
uucuaucaacguguuaaga

SEQ ID NO: 1097360 - RNA, 19 nt, Artificial Sequence
  Description of Artificial Sequence: Synthetic oligonucleotide
  Sense strand starting at position 1528 of SEQ ID NO: 915669
gauuaaggucucggucaua

SEQ ID NO: 1097361 - RNA, 19 nt, Artificial Sequence
  Description of Artificial Sequence: Synthetic oligonucleotide
  Antisense strand to SEQ ID NO: 1097360
uaugaccgagaccuuaauc

SEQ ID NO: 1097362 - RNA, 19 nt, Artificial Sequence
  Description of Artificial Sequence: Synthetic oligonucleotide
  Sense strand starting at position 1531 of SEQ ID NO: 915669
uaaggucucggucauaaga

SEQ ID NO: 1097363 - RNA, 19 nt, Artificial Sequence
  Description of Artificial Sequence: Synthetic oligonucleotide
  Antisense strand to SEQ ID NO: 1097362
ucuuaugaccgagaccuua

SEQ ID NO: 1097364 - RNA, 19 nt, Artificial Sequence
  Description of Artificial Sequence: Synthetic oligonucleotide
  Sense strand starting at position 1578 of SEQ ID NO: 915669
uucuuaagagcaugaaaca

SEQ ID NO: 1097365 - RNA, 19 nt, Artificial Sequence
  Description of Artificial Sequence: Synthetic oligonucleotide
  Antisense strand to SEQ ID NO: 1097364
uguuucaugcucuuaagaa

SEQ ID NO: 1097366 - RNA, 19 nt, Artificial Sequence
  Description of Artificial Sequence: Synthetic oligonucleotide
  Sense strand starting at position 1860 of SEQ ID NO: 915669
guuuacuuagggcgaauca

SEQ ID NO: 1097367 - RNA, 19 nt, Artificial Sequence
  Description of Artificial Sequence: Synthetic oligonucleotide
  Antisense strand to SEQ ID NO: 1097366
ugauucgcccuaaguaaac

SEQ ID NO: 1097368 - RNA, 19 nt, Artificial Sequence
  Description of Artificial Sequence: Synthetic oligonucleotide
  Sense strand starting at position 2180 of SEQ ID NO: 915669
gguuguugggcggaagaga

SEQ ID NO: 1097369 - RNA, 19 nt, Artificial Sequence
  Description of Artificial Sequence: Synthetic oligonucleotide
  Antisense strand to SEQ ID NO: 1097368
ucucuuccgcccaacaacc

SEQ ID NO: 1097370 - RNA, 19 nt, Artificial Sequence
  Description of Artificial Sequence: Synthetic oligonucleotide
  Sense strand starting at position 2290 of SEQ ID NO: 915669
cagagaacugcacagucau

SEQ ID NO: 1097371 - RNA, 19 nt, Artificial Sequence
  Description of Artificial Sequence: Synthetic oligonucleotide
  Antisense strand to SEQ ID NO: 1097370
augacugugcaguucucug

SEQ ID NO: 1097372 - RNA, 19 nt, Artificial Sequence
  Description of Artificial Sequence: Synthetic oligonucleotide
  Sense strand starting at position 2378 of SEQ ID NO: 915669
gcaagaugugguggacaag

SEQ ID NO: 1097373 - RNA, 19 nt, Artificial Sequence
  Description of Artificial Sequence: Synthetic oligonucleotide
  Antisense strand to SEQ ID NO: 1097372
cuuguccaccacaucuugc

SEQ ID NO: 1097374 - RNA, 19 nt, Artificial Sequence
  Description of Artificial Sequence: Synthetic oligonucleotide
  Sense strand starting at position 2903 of SEQ ID NO: 915669
aucuuagagcacugaaucu

SEQ ID NO: 1097375 - RNA, 19 nt, Artificial Sequence
  Description of Artificial Sequence: Synthetic oligonucleotide
  Antisense strand to SEQ ID NO: 1097374
agauucagugcucuaagau

SEQ ID NO: 1097376 - RNA, 19 nt, Artificial Sequence
  Description of Artificial Sequence: Synthetic oligonucleotide
  Sense strand starting at position 3052 of SEQ ID NO: 915669
augauuuguugugcguuua

SEQ ID NO: 1097377 - RNA, 19 nt, Artificial Sequence
  Description of Artificial Sequence: Synthetic oligonucleotide
  Antisense strand to SEQ ID NO: 1097376
uaaacgcacaacaaaucau

SEQ ID NO: 1097378 - RNA, 19 nt, Artificial Sequence
  Description of Artificial Sequence: Synthetic oligonucleotide
  Sense strand starting at position 3056 of SEQ ID NO: 915669
uuuguugugcguuuagcaa

SEQ ID NO: 1097379 - RNA, 19 nt, Artificial Sequence
  Description of Artificial Sequence: Synthetic oligonucleotide
  Antisense strand to SEQ ID NO: 1097378
uugcuaaacgcacaacaaa

SEQ ID NO: 1097380 - RNA, 19 nt, Artificial Sequence
  Description of Artificial Sequence: Synthetic oligonucleotide
  Sense strand starting at position 3098 of SEQ ID NO: 915669
gaagcucuguggcuaagaa

SEQ ID NO: 1097381 - RNA, 19 nt, Artificial Sequence
  Description of Artificial Sequence: Synthetic oligonucleotide
  Antisense strand to SEQ ID NO: 1097380
uucuuagccacagagcuuc

SEQ ID NO: 1097382 - RNA, 19 nt, Artificial Sequence
  Description of Artificial Sequence: Synthetic oligonucleotide
  Sense strand starting at position 3099 of SEQ ID NO: 915669
aagcucuguggcuaagaaa

SEQ ID NO: 1097383 - RNA, 19 nt, Artificial Sequence
  Description of Artificial Sequence: Synthetic oligonucleotide
  Antisense strand to SEQ ID NO: 1097382
uuucuuagccacagagcuu

SEQ ID NO: 1097384 - RNA, 19 nt, Artificial Sequence
  Description of Artificial Sequence: Synthetic oligonucleotide
  Sense strand starting at position 3238 of SEQ ID NO: 915669
uuguaauguuaggucaaca

SEQ ID NO: 1097385 - RNA, 19 nt, Artificial Sequence
  Description of Artificial Sequence: Synthetic oligonucleotide
  Antisense strand to SEQ ID NO: 1097384
uguugaccuaacauuacaa

SEQ ID NO: 1097386 - RNA, 19 nt, Artificial Sequence
  Description of Artificial Sequence: Synthetic oligonucleotide
  Sense strand starting at position 3357 of SEQ ID NO: 915669
gcagaacauuucguaguuu

SEQ ID NO: 1097387 - RNA, 19 nt, Artificial Sequence
  Description of Artificial Sequence: Synthetic oligonucleotide
  Antisense strand to SEQ ID NO: 1097386
aaacuacgaaauguucugc

SEQ ID NO: 1097388 - RNA, 19 nt, Artificial Sequence
  Description of Artificial Sequence: Synthetic oligonucleotide
  Sense strand starting at position 3413 of SEQ ID NO: 915669
uuuguuauggcuggaauua

SEQ ID NO: 1097389 - RNA, 19 nt, Artificial Sequence
  Description of Artificial Sequence: Synthetic oligonucleotide
  Antisense strand to SEQ ID NO: 1097388
uaauuccagccauaacaaa

SEQ ID NO: 1097390 - RNA, 19 nt, Artificial Sequence
  Description of Artificial Sequence: Synthetic oligonucleotide
  Sense strand starting at position 3458 of SEQ ID NO: 915669
gaacuaaugcuggguccua

SEQ ID NO: 1097391 - RNA, 19 nt, Artificial Sequence
  Description of Artificial Sequence: Synthetic oligonucleotide
  Antisense strand to SEQ ID NO: 1097390
uaggacccagcauuaguuc

SEQ ID NO: 1097392 - RNA, 19 nt, Artificial Sequence
  Description of Artificial Sequence: Synthetic oligonucleotide
  Sense strand starting at position 3519 of SEQ ID NO: 915669
gagaaaguaguuugagcaa

SEQ ID NO: 1097393 - RNA, 19 nt, Artificial Sequence
  Description of Artificial Sequence: Synthetic oligonucleotide
  Antisense strand to SEQ ID NO: 1097392
uugcucaaacuacuuucuc

SEQ ID NO: 1097394 - RNA, 19 nt, Artificial Sequence
  Description of Artificial Sequence: Synthetic oligonucleotide
  Sense strand starting at position 3522 of SEQ ID NO: 915669
aaaguaguuugagcaaaga

SEQ ID NO: 1097395 - RNA, 19 nt, Artificial Sequence
  Description of Artificial Sequence: Synthetic oligonucleotide
  Antisense strand to SEQ ID NO: 1097394
ucuuugcucaaacuacuuu

SEQ ID NO: 1097396 - RNA, 19 nt, Artificial Sequence
  Description of Artificial Sequence: Synthetic oligonucleotide
  Sense strand starting at position 3550 of SEQ ID NO: 915669
aagaaugagcacugaguau

SEQ ID NO: 1097397 - RNA, 19 nt, Artificial Sequence
  Description of Artificial Sequence: Synthetic oligonucleotide
  Antisense strand to SEQ ID NO: 1097396
auacucagugcucauucuu

SEQ ID NO: 1097398 - RNA, 19 nt, Artificial Sequence
  Description of Artificial Sequence: Synthetic oligonucleotide
  Sense strand starting at position 962 of SEQ ID NO: 915670
uccagugcccucugaauaa

SEQ ID NO: 1097399 - RNA, 19 nt, Artificial Sequence
  Description of Artificial Sequence: Synthetic oligonucleotide
  Antisense strand to SEQ ID NO: 1097398
uuauucagagggcacugga

SEQ ID NO: 1097400 - RNA, 19 nt, Artificial Sequence
  Description of Artificial Sequence: Synthetic oligonucleotide
  Sense strand starting at position 966 of SEQ ID NO: 915670
gugcccucugaauaagaaa

SEQ ID NO: 1097401 - RNA, 19 nt, Artificial Sequence
  Description of Artificial Sequence: Synthetic oligonucleotide
  Antisense strand to SEQ ID NO: 1097400
uuucuuauucagagggcac

SEQ ID NO: 1097402 - RNA, 19 nt, Artificial Sequence
  Description of Artificial Sequence: Synthetic oligonucleotide
  Sense strand starting at position 977 of SEQ ID NO: 915670
auaagaaauuugugggaug

SEQ ID NO: 1097403 - RNA, 19 nt, Artificial Sequence
  Description of Artificial Sequence: Synthetic oligonucleotide
  Antisense strand to SEQ ID NO: 1097402
caucccacaaauuucuuau

SEQ ID NO: 1097404 - RNA, 19 nt, Artificial Sequence
  Description of Artificial Sequence: Synthetic oligonucleotide
  Sense strand starting at position 978 of SEQ ID NO: 915670
uaagaaauuugugggauga

SEQ ID NO: 1097405 - RNA, 19 nt, Artificial Sequence
  Description of Artificial Sequence: Synthetic oligonucleotide
  Antisense strand to SEQ ID NO: 1097404
ucaucccacaaauuucuua

SEQ ID NO: 1097406 - RNA, 19 nt, Artificial Sequence
  Description of Artificial Sequence: Synthetic oligonucleotide
  Sense strand starting at position 980 of SEQ ID NO: 915670
agaaauuugugggaugaaa

SEQ ID NO: 1097407 - RNA, 19 nt, Artificial Sequence
  Description of Artificial Sequence: Synthetic oligonucleotide
  Antisense strand to SEQ ID NO: 1097406
uuucaucccacaaauuucu

SEQ ID NO: 1097408 - RNA, 19 nt, Artificial Sequence
  Description of Artificial Sequence: Synthetic oligonucleotide
  Sense strand starting at position 988 of SEQ ID NO: 915670
gugggaugaaaguaguauu

SEQ ID NO: 1097409 - RNA, 19 nt, Artificial Sequence
  Description of Artificial Sequence: Synthetic oligonucleotide
  Antisense strand to SEQ ID NO: 1097408
aauacuacuuucaucccac

SEQ ID NO: 1097410 - RNA, 19 nt, Artificial Sequence
  Description of Artificial Sequence: Synthetic oligonucleotide
  Sense strand starting at position 991 of SEQ ID NO: 915670
ggaugaaaguaguauuuac

SEQ ID NO: 1097411 - RNA, 19 nt, Artificial Sequence
  Description of Artificial Sequence: Synthetic oligonucleotide
  Antisense strand to SEQ ID NO: 1097410
guaaauacuacuuucaucc

SEQ ID NO: 1097412 - RNA, 19 nt, Artificial Sequence
  Description of Artificial Sequence: Synthetic oligonucleotide
  Sense strand starting at position 999 of SEQ ID NO: 915670
guaguauuuacugagcgcu

SEQ ID NO: 1097413 - RNA, 19 nt, Artificial Sequence
  Description of Artificial Sequence: Synthetic oligonucleotide
  Antisense strand to SEQ ID NO: 1097412
agcgcucaguaaauacuac

SEQ ID NO: 1097414 - RNA, 19 nt, Artificial Sequence
  Description of Artificial Sequence: Synthetic oligonucleotide
  Sense strand starting at position 1001 of SEQ ID NO: 915670
aguauuuacugagcgcuuu

SEQ ID NO: 1097415 - RNA, 19 nt, Artificial Sequence
  Description of Artificial Sequence: Synthetic oligonucleotide
  Antisense strand to SEQ ID NO: 1097414
aaagcgcucaguaaauacu

SEQ ID NO: 1097416 - RNA, 19 nt, Artificial Sequence
  Description of Artificial Sequence: Synthetic oligonucleotide
  Sense strand starting at position 1077 of SEQ ID NO: 915670
uguuauacccaguaaucuu

SEQ ID NO: 1097417 - RNA, 19 nt, Artificial Sequence
  Description of Artificial Sequence: Synthetic oligonucleotide
  Antisense strand to SEQ ID NO: 1097416
aagauuacuggguauaaca

SEQ ID NO: 1097418 - RNA, 19 nt, Artificial Sequence
  Description of Artificial Sequence: Synthetic oligonucleotide
  Sense strand starting at position 1085 of SEQ ID NO: 915670
ccaguaaucuuguuauucc

SEQ ID NO: 1097419 - RNA, 19 nt, Artificial Sequence
  Description of Artificial Sequence: Synthetic oligonucleotide
  Antisense strand to SEQ ID NO: 1097418
ggaauaacaagauuacugg

SEQ ID NO: 1097420 - RNA, 19 nt, Artificial Sequence
  Description of Artificial Sequence: Synthetic oligonucleotide
  Sense strand starting at position 2219 of SEQ ID NO: 915670
aaguccuucggguaguuua

SEQ ID NO: 1097421 - RNA, 19 nt, Artificial Sequence
  Description of Artificial Sequence: Synthetic oligonucleotide
  Antisense strand to SEQ ID NO: 1097420
uaaacuacccgaaggacuu

SEQ ID NO: 1097422 - RNA, 19 nt, Artificial Sequence
  Description of Artificial Sequence: Synthetic oligonucleotide
  Sense strand starting at position 2230 of SEQ ID NO: 915670
guaguuuagugucaguucu

SEQ ID NO: 1097423 - RNA, 19 nt, Artificial Sequence
  Description of Artificial Sequence: Synthetic oligonucleotide
  Antisense strand to SEQ ID NO: 1097422
agaacugacacuaaacuac

SEQ ID NO: 1097424 - RNA, 19 nt, Artificial Sequence
  Description of Artificial Sequence: Synthetic oligonucleotide
  Sense strand starting at position 2232 of SEQ ID NO: 915670
aguuuagugucaguucuac

SEQ ID NO: 1097425 - RNA, 19 nt, Artificial Sequence
  Description of Artificial Sequence: Synthetic oligonucleotide
  Antisense strand to SEQ ID NO: 1097424
guagaacugacacuaaacu

SEQ ID NO: 1097426 - RNA, 19 nt, Artificial Sequence
  Description of Artificial Sequence: Synthetic oligonucleotide
  Sense strand starting at position 2236 of SEQ ID NO: 915670
uagugucaguucuacaaag

SEQ ID NO: 1097427 - RNA, 19 nt, Artificial Sequence
  Description of Artificial Sequence: Synthetic oligonucleotide
  Antisense strand to SEQ ID NO: 1097426
cuuuguagaacugacacua

SEQ ID NO: 1097428 - RNA, 19 nt, Artificial Sequence
  Description of Artificial Sequence: Synthetic oligonucleotide
  Sense strand starting at position 2238 of SEQ ID NO: 915670
gugucaguucuacaaagua

SEQ ID NO: 1097429 - RNA, 19 nt, Artificial Sequence
  Description of Artificial Sequence: Synthetic oligonucleotide
  Antisense strand to SEQ ID NO: 1097428
uacuuuguagaacugacac

SEQ ID NO: 1097430 - RNA, 19 nt, Artificial Sequence
  Description of Artificial Sequence: Synthetic oligonucleotide
  Sense strand starting at position 2274 of SEQ ID NO: 915670
accagugaggcucaaucuu

SEQ ID NO: 1097431 - RNA, 19 nt, Artificial Sequence
  Description of Artificial Sequence: Synthetic oligonucleotide
  Antisense strand to SEQ ID NO: 1097430
aagauugagccucacuggu

SEQ ID NO: 1097432 - RNA, 19 nt, Artificial Sequence
  Description of Artificial Sequence: Synthetic oligonucleotide
  Sense strand starting at position 2280 of SEQ ID NO: 915670
gaggcucaaucuucugaag

SEQ ID NO: 1097433 - RNA, 19 nt, Artificial Sequence
  Description of Artificial Sequence: Synthetic oligonucleotide
  Antisense strand to SEQ ID NO: 1097432
cuucagaagauugagccuc

SEQ ID NO: 1097434 - RNA, 19 nt, Artificial Sequence
  Description of Artificial Sequence: Synthetic oligonucleotide
  Sense strand starting at position 2282 of SEQ ID NO: 915670
ggcucaaucuucugaaguc

SEQ ID NO: 1097435 - RNA, 19 nt, Artificial Sequence
  Description of Artificial Sequence: Synthetic oligonucleotide
  Antisense strand to SEQ ID NO: 1097434
gacuucagaagauugagcc

SEQ ID NO: 1097436 - RNA, 19 nt, Artificial Sequence
  Description of Artificial Sequence: Synthetic oligonucleotide
  Sense strand starting at position 2283 of SEQ ID NO: 915670
gcucaaucuucugaagucu

SEQ ID NO: 1097437 - RNA, 19 nt, Artificial Sequence
  Description of Artificial Sequence: Synthetic oligonucleotide
  Antisense strand to SEQ ID NO: 1097436
agacuucagaagauugagc

SEQ ID NO: 1097438 - RNA, 19 nt, Artificial Sequence
  Description of Artificial Sequence: Synthetic oligonucleotide
  Sense strand starting at position 2294 of SEQ ID NO: 915670
ugaagucuuccagaaggca

SEQ ID NO: 1097439 - RNA, 19 nt, Artificial Sequence
  Description of Artificial Sequence: Synthetic oligonucleotide
  Antisense strand to SEQ ID NO: 1097438
ugccuucuggaagacuuca

SEQ ID NO: 1097440 - RNA, 19 nt, Artificial Sequence
  Description of Artificial Sequence: Synthetic oligonucleotide
  Sense strand starting at position 2408 of SEQ ID NO: 915670
gguaauauccaaggacuau

SEQ ID NO: 1097441 - RNA, 19 nt, Artificial Sequence
  Description of Artificial Sequence: Synthetic oligonucleotide
  Antisense strand to SEQ ID NO: 1097440
auaguccuuggauauuacc

SEQ ID NO: 1097442 - RNA, 19 nt, Artificial Sequence
  Description of Artificial Sequence: Synthetic oligonucleotide
  Sense strand starting at position 2435 of SEQ ID NO: 915670
gggacugcuucugaggcau

SEQ ID NO: 1097443 - RNA, 19 nt, Artificial Sequence
  Description of Artificial Sequence: Synthetic oligonucleotide
  Antisense strand to SEQ ID NO: 1097442
augccucagaagcaguccc

SEQ ID NO: 1097444 - RNA, 19 nt, Artificial Sequence
  Description of Artificial Sequence: Synthetic oligonucleotide
  Sense strand starting at position 2437 of SEQ ID NO: 915670
gacugcuucugaggcauga

SEQ ID NO: 1097445 - RNA, 19 nt, Artificial Sequence
  Description of Artificial Sequence: Synthetic oligonucleotide
  Antisense strand to SEQ ID NO: 1097444
ucaugccucagaagcaguc

SEQ ID NO: 1097446 - RNA, 19 nt, Artificial Sequence
  Description of Artificial Sequence: Synthetic oligonucleotide
  Sense strand starting at position 2491 of SEQ ID NO: 915670
cgcccuuggccuggagaaa

SEQ ID NO: 1097447 - RNA, 19 nt, Artificial Sequence
  Description of Artificial Sequence: Synthetic oligonucleotide
  Antisense strand to SEQ ID NO: 1097446
uuucuccaggccaagggcg

SEQ ID NO: 1097448 - RNA, 19 nt, Artificial Sequence
  Description of Artificial Sequence: Synthetic oligonucleotide
  Sense strand starting at position 2617 of SEQ ID NO: 915670
cagaccuuaccuugagaug

SEQ ID NO: 1097449 - RNA, 19 nt, Artificial Sequence
  Description of Artificial Sequence: Synthetic oligonucleotide
  Antisense strand to SEQ ID NO: 1097448
caucucaagguaaggucug

SEQ ID NO: 1097450 - RNA, 19 nt, Artificial Sequence
  Description of Artificial Sequence: Synthetic oligonucleotide
  Sense strand starting at position 2622 of SEQ ID NO: 915670
cuuaccuugagaugaguga

SEQ ID NO: 1097451 - RNA, 19 nt, Artificial Sequence
  Description of Artificial Sequence: Synthetic oligonucleotide
  Antisense strand to SEQ ID NO: 1097450
ucacucaucucaagguaag

SEQ ID NO: 1097452 - RNA, 19 nt, Artificial Sequence
  Description of Artificial Sequence: Synthetic oligonucleotide
  Sense strand starting at position 2668 of SEQ ID NO: 915670
aguuguuguccugaaggca

SEQ ID NO: 1097453 - RNA, 19 nt, Artificial Sequence
  Description of Artificial Sequence: Synthetic oligonucleotide
  Antisense strand to SEQ ID NO: 1097452
ugccuucaggacaacaacu

SEQ ID NO: 1097454 - RNA, 19 nt, Artificial Sequence
  Description of Artificial Sequence: Synthetic oligonucleotide
  Sense strand starting at position 2701 of SEQ ID NO: 915670
acaggcagcucuguaagaa

SEQ ID NO: 1097455 - RNA, 19 nt, Artificial Sequence
  Description of Artificial Sequence: Synthetic oligonucleotide
  Antisense strand to SEQ ID NO: 1097454
uucuuacagagcugccugu

SEQ ID NO: 1097456 - RNA, 19 nt, Artificial Sequence
  Description of Artificial Sequence: Synthetic oligonucleotide
  Sense strand starting at position 2729 of SEQ ID NO: 915670
guaaaugccagcugaaagu

SEQ ID NO: 1097457 - RNA, 19 nt, Artificial Sequence
  Description of Artificial Sequence: Synthetic oligonucleotide
  Antisense strand to SEQ ID NO: 1097456
acuuucagcuggcauuuac

SEQ ID NO: 1097458 - RNA, 19 nt, Artificial Sequence
  Description of Artificial Sequence: Synthetic oligonucleotide
  Sense strand starting at position 2850 of SEQ ID NO: 915670
accaauggcuucucaaaga

SEQ ID NO: 1097459 - RNA, 19 nt, Artificial Sequence
  Description of Artificial Sequence: Synthetic oligonucleotide
  Antisense strand to SEQ ID NO: 1097458
ucuuugagaagccauuggu

SEQ ID NO: 1097460 - RNA, 19 nt, Artificial Sequence
  Description of Artificial Sequence: Synthetic oligonucleotide
  Sense strand starting at position 2860 of SEQ ID NO: 915670
ucucaaagauaaggaauau

SEQ ID NO: 1097461 - RNA, 19 nt, Artificial Sequence
  Description of Artificial Sequence: Synthetic oligonucleotide
  Antisense strand to SEQ ID NO: 1097460
auauuccuuaucuuugaga

SEQ ID NO: 1097462 - RNA, 19 nt, Artificial Sequence
  Description of Artificial Sequence: Synthetic oligonucleotide
  Sense strand starting at position 2878 of SEQ ID NO: 915670
uuaaauagcugucaagaag

SEQ ID NO: 1097463 - RNA, 19 nt, Artificial Sequence
  Description of Artificial Sequence: Synthetic oligonucleotide
  Antisense strand to SEQ ID NO: 1097462
cuucuugacagcuauuuaa

SEQ ID NO: 1097464 - RNA, 19 nt, Artificial Sequence
  Description of Artificial Sequence: Synthetic oligonucleotide
  Sense strand starting at position 2920 of SEQ ID NO: 915670
agggaaagauguucauggu

SEQ ID NO: 1097465 - RNA, 19 nt, Artificial Sequence
  Description of Artificial Sequence: Synthetic oligonucleotide
  Antisense strand to SEQ ID NO: 1097464
accaugaacaucuuucccu

SEQ ID NO: 1097466 - RNA, 19 nt, Artificial Sequence
  Description of Artificial Sequence: Synthetic oligonucleotide
  Sense strand starting at position 2928 of SEQ ID NO: 915670
auguucaugguguaaguaa

SEQ ID NO: 1097467 - RNA, 19 nt, Artificial Sequence
  Description of Artificial Sequence: Synthetic oligonucleotide
  Antisense strand to SEQ ID NO: 1097466
uuacuuacaccaugaacau

SEQ ID NO: 1097468 - RNA, 19 nt, Artificial Sequence
  Description of Artificial Sequence: Synthetic oligonucleotide
  Sense strand starting at position 2950 of SEQ ID NO: 915670
aacuaaguugcagaacagu

SEQ ID NO: 1097469 - RNA, 19 nt, Artificial Sequence
  Description of Artificial Sequence: Synthetic oligonucleotide
  Antisense strand to SEQ ID NO: 1097468
acuguucugcaacuuaguu

SEQ ID NO: 1097470 - RNA, 19 nt, Artificial Sequence
  Description of Artificial Sequence: Synthetic oligonucleotide
  Sense strand starting at position 2953 of SEQ ID NO: 915670
uaaguugcagaacaguaua

SEQ ID NO: 1097471 - RNA, 19 nt, Artificial Sequence
  Description of Artificial Sequence: Synthetic oligonucleotide
  Antisense strand to SEQ ID NO: 1097470
uauacuguucugcaacuua

SEQ ID NO: 1097472 - RNA, 19 nt, Artificial Sequence
  Description of Artificial Sequence: Synthetic oligonucleotide
  Sense strand starting at position 2956 of SEQ ID NO: 915670
guugcagaacaguauauga

SEQ ID NO: 1097473 - RNA, 19 nt, Artificial Sequence
  Description of Artificial Sequence: Synthetic oligonucleotide
  Antisense strand to SEQ ID NO: 1097472
ucauauacuguucugcaac

SEQ ID NO: 1097474 - RNA, 19 nt, Artificial Sequence
  Description of Artificial Sequence: Synthetic oligonucleotide
  Sense strand starting at position 3034 of SEQ ID NO: 915670
uuuauagacuaucagguuu

SEQ ID NO: 1097475 - RNA, 19 nt, Artificial Sequence
  Description of Artificial Sequence: Synthetic oligonucleotide
  Antisense strand to SEQ ID NO: 1097474
aaaccugauagucuauaaa

SEQ ID NO: 1097476 - RNA, 19 nt, Artificial Sequence
  Description of Artificial Sequence: Synthetic oligonucleotide
  Sense strand starting at position 3040 of SEQ ID NO: 915670
gacuaucagguuuguguuu

SEQ ID NO: 1097477 - RNA, 19 nt, Artificial Sequence
  Description of Artificial Sequence: Synthetic oligonucleotide
  Antisense strand to SEQ ID NO: 1097476
aaacacaaaccugauaguc

SEQ ID NO: 1097478 - RNA, 19 nt, Artificial Sequence
  Description of Artificial Sequence: Synthetic oligonucleotide
  Sense strand starting at position 267 of SEQ ID NO: 915671
cccacucuucuuggaggaa

SEQ ID NO: 1097479 - RNA, 19 nt, Artificial Sequence
  Description of Artificial Sequence: Synthetic oligonucleotide
  Antisense strand to SEQ ID NO: 1097478
uuccuccaagaagaguggg

SEQ ID NO: 1097480 - RNA, 19 nt, Artificial Sequence
  Description of Artificial Sequence: Synthetic oligonucleotide
  Sense strand starting at position 388 of SEQ ID NO: 915671
auggauugguucuuaacac

SEQ ID NO: 1097481 - RNA, 19 nt, Artificial Sequence
  Description of Artificial Sequence: Synthetic oligonucleotide
  Antisense strand to SEQ ID NO: 1097480
guguuaagaaccaauccau

SEQ ID NO: 1097482 - RNA, 19 nt, Artificial Sequence
  Description of Artificial Sequence: Synthetic oligonucleotide
  Sense strand starting at position 457 of SEQ ID NO: 915671
uuaaguaagcaguauacau

SEQ ID NO: 1097483 - RNA, 19 nt, Artificial Sequence
  Description of Artificial Sequence: Synthetic oligonucleotide
  Antisense strand to SEQ ID NO: 1097482
auguauacugcuuacuuaa

SEQ ID NO: 1097484 - RNA, 19 nt, Artificial Sequence
  Description of Artificial Sequence: Synthetic oligonucleotide
  Sense strand starting at position 470 of SEQ ID NO: 915671
auacaugauccaggugauc

SEQ ID NO: 1097485 - RNA, 19 nt, Artificial Sequence
  Description of Artificial Sequence: Synthetic oligonucleotide
  Antisense strand to SEQ ID NO: 1097484
gaucaccuggaucauguau

SEQ ID NO: 1097486 - RNA, 19 nt, Artificial Sequence
  Description of Artificial Sequence: Synthetic oligonucleotide
  Sense strand starting at position 475 of SEQ ID NO: 915671
ugauccaggugauccuaua

SEQ ID NO: 1097487 - RNA, 19 nt, Artificial Sequence
  Description of Artificial Sequence: Synthetic oligonucleotide
  Antisense strand to SEQ ID NO: 1097486
uauaggaucaccuggauca

SEQ ID NO: 1097488 - RNA, 19 nt, Artificial Sequence
  Description of Artificial Sequence: Synthetic oligonucleotide
  Sense strand starting at position 483 of SEQ ID NO: 915671
gugauccuauaacuagaga

SEQ ID NO: 1097489 - RNA, 19 nt, Artificial Sequence
  Description of Artificial Sequence: Synthetic oligonucleotide
  Antisense strand to SEQ ID NO: 1097488
ucucuaguuauaggaucac

SEQ ID NO: 1097490 - RNA, 19 nt, Artificial Sequence
  Description of Artificial Sequence: Synthetic oligonucleotide
  Sense strand starting at position 497 of SEQ ID NO: 915671
agagaagugcauggauuga

SEQ ID NO: 1097491 - RNA, 19 nt, Artificial Sequence
  Description of Artificial Sequence: Synthetic oligonucleotide
  Antisense strand to SEQ ID NO: 1097490
ucaauccaugcacuucucu

SEQ ID NO: 1097492 - RNA, 19 nt, Artificial Sequence
  Description of Artificial Sequence: Synthetic oligonucleotide
  Sense strand starting at position 563 of SEQ ID NO: 915671
gauaccugauguccagaca

SEQ ID NO: 1097493 - RNA, 19 nt, Artificial Sequence
  Description of Artificial Sequence: Synthetic oligonucleotide
  Antisense strand to SEQ ID NO: 1097492
ugucuggacaucagguauc

SEQ ID NO: 1097494 - RNA, 19 nt, Artificial Sequence
  Description of Artificial Sequence: Synthetic oligonucleotide
  Sense strand starting at position 613 of SEQ ID NO: 915671
gucccuucugaggaacuuu

SEQ ID NO: 1097495 - RNA, 19 nt, Artificial Sequence
  Description of Artificial Sequence: Synthetic oligonucleotide
  Antisense strand to SEQ ID NO: 1097494
aaaguuccucagaagggac

SEQ ID NO: 1097496 - RNA, 19 nt, Artificial Sequence
  Description of Artificial Sequence: Synthetic oligonucleotide
  Sense strand starting at position 1060 of SEQ ID NO: 915671
uccagaagucucuagguga

SEQ ID NO: 1097497 - RNA, 19 nt, Artificial Sequence
  Description of Artificial Sequence: Synthetic oligonucleotide
  Antisense strand to SEQ ID NO: 1097496
ucaccuagagacuucugga

SEQ ID NO: 1097498 - RNA, 19 nt, Artificial Sequence
  Description of Artificial Sequence: Synthetic oligonucleotide
  Sense strand starting at position 1091 of SEQ ID NO: 915671
ggugaaagauuugauuaaa

SEQ ID NO: 1097499 - RNA, 19 nt, Artificial Sequence
  Description of Artificial Sequence: Synthetic oligonucleotide
  Antisense strand to SEQ ID NO: 1097498
uuuaaucaaaucuuucacc

SEQ ID NO: 1097500 - RNA, 19 nt, Artificial Sequence
  Description of Artificial Sequence: Synthetic oligonucleotide
  Sense strand starting at position 1294 of SEQ ID NO: 915671
gccaguuacguuucuuucu

SEQ ID NO: 1097501 - RNA, 19 nt, Artificial Sequence
  Description of Artificial Sequence: Synthetic oligonucleotide
  Antisense strand to SEQ ID NO: 1097500
agaaagaaacguaacuggc

SEQ ID NO: 1097502 - RNA, 19 nt, Artificial Sequence
  Description of Artificial Sequence: Synthetic oligonucleotide
  Sense strand starting at position 1352 of SEQ ID NO: 915671
ugcugagacuucucaaaug

SEQ ID NO: 1097503 - RNA, 19 nt, Artificial Sequence
  Description of Artificial Sequence: Synthetic oligonucleotide
  Antisense strand to SEQ ID NO: 1097502
cauuugagaagucucagca

SEQ ID NO: 1097504 - RNA, 19 nt, Artificial Sequence
  Description of Artificial Sequence: Synthetic oligonucleotide
  Sense strand starting at position 1519 of SEQ ID NO: 915671
gugagauuaaugcaaguua

SEQ ID NO: 1097505 - RNA, 19 nt, Artificial Sequence
  Description of Artificial Sequence: Synthetic oligonucleotide
  Antisense strand to SEQ ID NO: 1097504
uaacuugcauuaaucucac

SEQ ID NO: 1097506 - RNA, 19 nt, Artificial Sequence
  Description of Artificial Sequence: Synthetic oligonucleotide
  Sense strand starting at position 1579 of SEQ ID NO: 915671
cucuuucuagaguacaguu

SEQ ID NO: 1097507 - RNA, 19 nt, Artificial Sequence
  Description of Artificial Sequence: Synthetic oligonucleotide
  Antisense strand to SEQ ID NO: 1097506
aacuguacucuagaaagag

SEQ ID NO: 1097508 - RNA, 19 nt, Artificial Sequence
  Description of Artificial Sequence: Synthetic oligonucleotide
  Sense strand starting at position 1697 of SEQ ID NO: 915671
ggugauucccaucaccauu

SEQ ID NO: 1097509 - RNA, 19 nt, Artificial Sequence
  Description of Artificial Sequence: Synthetic oligonucleotide
  Antisense strand to SEQ ID NO: 1097508
aauggugaugggaaucacc

SEQ ID NO: 1097510 - RNA, 19 nt, Artificial Sequence
  Description of Artificial Sequence: Synthetic oligonucleotide
  Sense strand starting at position 2044 of SEQ ID NO: 915671
ggccuaguggagugaaaga

SEQ ID NO: 1097511 - RNA, 19 nt, Artificial Sequence
  Description of Artificial Sequence: Synthetic oligonucleotide
  Antisense strand to SEQ ID NO: 1097510
ucuuucacuccacuaggcc

SEQ ID NO: 1097512 - RNA, 19 nt, Artificial Sequence
  Description of Artificial Sequence: Synthetic oligonucleotide
  Sense strand starting at position 2157 of SEQ ID NO: 915671
cuugaauuaaguuagacgu

SEQ ID NO: 1097513 - RNA, 19 nt, Artificial Sequence
  Description of Artificial Sequence: Synthetic oligonucleotide
  Antisense strand to SEQ ID NO: 1097512
acgucuaacuuaauucaag

SEQ ID NO: 1097514 - RNA, 19 nt, Artificial Sequence
  Description of Artificial Sequence: Synthetic oligonucleotide
  Sense strand starting at position 2168 of SEQ ID NO: 915671
uuagacgugcaugacuaaa

SEQ ID NO: 1097515 - RNA, 19 nt, Artificial Sequence
  Description of Artificial Sequence: Synthetic oligonucleotide
  Antisense strand to SEQ ID NO: 1097514
uuuagucaugcacgucuaa

SEQ ID NO: 1097516 - RNA, 19 nt, Artificial Sequence
  Description of Artificial Sequence: Synthetic oligonucleotide
  Sense strand starting at position 2170 of SEQ ID NO: 915671
agacgugcaugacuaaaga

SEQ ID NO: 1097517 - RNA, 19 nt, Artificial Sequence
  Description of Artificial Sequence: Synthetic oligonucleotide
  Antisense strand to SEQ ID NO: 1097516
ucuuuagucaugcacgucu

SEQ ID NO: 1097518 - RNA, 19 nt, Artificial Sequence
  Description of Artificial Sequence: Synthetic oligonucleotide
  Sense strand starting at position 2216 of SEQ ID NO: 915671
gcuccaagauuaguuaaca

SEQ ID NO: 1097519 - RNA, 19 nt, Artificial Sequence
  Description of Artificial Sequence: Synthetic oligonucleotide
  Antisense strand to SEQ ID NO: 1097518
uguuaacuaaucuuggagc

SEQ ID NO: 1097520 - RNA, 19 nt, Artificial Sequence
  Description of Artificial Sequence: Synthetic oligonucleotide
  Sense strand starting at position 2277 of SEQ ID NO: 915671
ugagauaaauaguuagcua

SEQ ID NO: 1097521 - RNA, 19 nt, Artificial Sequence
  Description of Artificial Sequence: Synthetic oligonucleotide
  Antisense strand to SEQ ID NO: 1097520
uagcuaacuauuuaucuca

SEQ ID NO: 1097522 - RNA, 19 nt, Artificial Sequence
  Description of Artificial Sequence: Synthetic oligonucleotide
  Sense strand starting at position 2422 of SEQ ID NO: 915671
ccaaacuacuggccugaua

SEQ ID NO: 1097523 - RNA, 19 nt, Artificial Sequence
  Description of Artificial Sequence: Synthetic oligonucleotide
  Antisense strand to SEQ ID NO: 1097522
uaucaggccaguaguuugg

SEQ ID NO: 1097524 - RNA, 19 nt, Artificial Sequence
  Description of Artificial Sequence: Synthetic oligonucleotide
  Sense strand starting at position 2471 of SEQ ID NO: 915671
uuuauaaggcauggacaau

SEQ ID NO: 1097525 - RNA, 19 nt, Artificial Sequence
  Description of Artificial Sequence: Synthetic oligonucleotide
  Antisense strand to SEQ ID NO: 1097524
auuguccaugccuuauaaa

SEQ ID NO: 1097526 - RNA, 19 nt, Artificial Sequence
  Description of Artificial Sequence: Synthetic oligonucleotide
  Sense strand starting at position 2496 of SEQ ID NO: 915671
uugacagaauugccucuaa

SEQ ID NO: 1097527 - RNA, 19 nt, Artificial Sequence
  Description of Artificial Sequence: Synthetic oligonucleotide
  Antisense strand to SEQ ID NO: 1097526
uuagaggcaauucugucaa

SEQ ID NO: 1097528 - RNA, 19 nt, Artificial Sequence
  Description of Artificial Sequence: Synthetic oligonucleotide
  Sense strand starting at position 2536 of SEQ ID NO: 915671
cgauuccuugaguaggcaa

SEQ ID NO: 1097529 - RNA, 19 nt, Artificial Sequence
  Description of Artificial Sequence: Synthetic oligonucleotide
  Antisense strand to SEQ ID NO: 1097528
uugccuacucaaggaaucg

SEQ ID NO: 1097530 - RNA, 19 nt, Artificial Sequence
  Description of Artificial Sequence: Synthetic oligonucleotide
  Sense strand starting at position 2585 of SEQ ID NO: 915671
ggacuucugcuacaaucca

SEQ ID NO: 1097531 - RNA, 19 nt, Artificial Sequence
  Description of Artificial Sequence: Synthetic oligonucleotide
  Antisense strand to SEQ ID NO: 1097530
uggauuguagcagaagucc

SEQ ID NO: 1097532 - RNA, 19 nt, Artificial Sequence
  Description of Artificial Sequence: Synthetic oligonucleotide
  Sense strand starting at position 2844 of SEQ ID NO: 915671
ucuuaugaggaaggcuuua

SEQ ID NO: 1097533 - RNA, 19 nt, Artificial Sequence
  Description of Artificial Sequence: Synthetic oligonucleotide
  Antisense strand to SEQ ID NO: 1097532
uaaagccuuccucauaaga

SEQ ID NO: 1097534 - RNA, 19 nt, Artificial Sequence
  Description of Artificial Sequence: Synthetic oligonucleotide
  Sense strand starting at position 2982 of SEQ ID NO: 915671
cguuuagagacauaaagca

SEQ ID NO: 1097535 - RNA, 19 nt, Artificial Sequence
  Description of Artificial Sequence: Synthetic oligonucleotide
  Antisense strand to SEQ ID NO: 1097534
ugcuuuaugucucuaaacg

SEQ ID NO: 1097536 - RNA, 19 nt, Artificial Sequence
  Description of Artificial Sequence: Synthetic oligonucleotide
  Sense strand starting at position 3004 of SEQ ID NO: 915671
gaaagaguccuuggcacau

SEQ ID NO: 1097537 - RNA, 19 nt, Artificial Sequence
  Description of Artificial Sequence: Synthetic oligonucleotide
  Antisense strand to SEQ ID NO: 1097536
augugccaaggacucuuuc

SEQ ID NO: 1097538 - RNA, 19 nt, Artificial Sequence
  Description of Artificial Sequence: Synthetic oligonucleotide
  Sense strand starting at position 3028 of SEQ ID NO: 915671
augaucugucagcaauuac

SEQ ID NO: 1097539 - RNA, 19 nt, Artificial Sequence
  Description of Artificial Sequence: Synthetic oligonucleotide
  Antisense strand to SEQ ID NO: 1097538
guaauugcugacagaucau

SEQ ID NO: 1097540 - RNA, 19 nt, Artificial Sequence
  Description of Artificial Sequence: Synthetic oligonucleotide
  Sense strand starting at position 3138 of SEQ ID NO: 915671
ccuguaauuguuuaaggga

SEQ ID NO: 1097541 - RNA, 19 nt, Artificial Sequence
  Description of Artificial Sequence: Synthetic oligonucleotide
  Antisense strand to SEQ ID NO: 1097540
ucccuuaaacaauuacagg

SEQ ID NO: 1097542 - RNA, 19 nt, Artificial Sequence
  Description of Artificial Sequence: Synthetic oligonucleotide
  Sense strand starting at position 3313 of SEQ ID NO: 915671
gggugugauuucccuucuu

SEQ ID NO: 1097543 - RNA, 19 nt, Artificial Sequence
  Description of Artificial Sequence: Synthetic oligonucleotide
  Antisense strand to SEQ ID NO: 1097542
aagaagggaaaucacaccc

SEQ ID NO: 1097544 - RNA, 19 nt, Artificial Sequence
  Description of Artificial Sequence: Synthetic oligonucleotide
  Sense strand starting at position 3854 of SEQ ID NO: 915671
gcugaaggugcuuagaaca

SEQ ID NO: 1097545 - RNA, 19 nt, Artificial Sequence
  Description of Artificial Sequence: Synthetic oligonucleotide
  Antisense strand to SEQ ID NO: 1097544
uguucuaagcaccuucagc

SEQ ID NO: 1097546 - RNA, 19 nt, Artificial Sequence
  Description of Artificial Sequence: Synthetic oligonucleotide
  Sense strand starting at position 3915 of SEQ ID NO: 915671
auuagaggguuaucaaccu

SEQ ID NO: 1097547 - RNA, 19 nt, Artificial Sequence
  Description of Artificial Sequence: Synthetic oligonucleotide
  Antisense strand to SEQ ID NO: 1097546
agguugauaacccucuaau

SEQ ID NO: 1097548 - RNA, 19 nt, Artificial Sequence
  Description of Artificial Sequence: Synthetic oligonucleotide
  Sense strand starting at position 3922 of SEQ ID NO: 915671
gguuaucaaccuugaauga

SEQ ID NO: 1097549 - RNA, 19 nt, Artificial Sequence
  Description of Artificial Sequence: Synthetic oligonucleotide
  Antisense strand to SEQ ID NO: 1097548
ucauucaagguugauaacc

SEQ ID NO: 1097550 - RNA, 19 nt, Artificial Sequence
  Description of Artificial Sequence: Synthetic oligonucleotide
  Sense strand starting at position 3935 of SEQ ID NO: 915671
gaaugagauugggugcauu

SEQ ID NO: 1097551 - RNA, 19 nt, Artificial Sequence
  Description of Artificial Sequence: Synthetic oligonucleotide
  Antisense strand to SEQ ID NO: 1097550
aaugcacccaaucucauuc

SEQ ID NO: 1097552 - RNA, 19 nt, Artificial Sequence
  Description of Artificial Sequence: Synthetic oligonucleotide
  Sense strand starting at position 3959 of SEQ ID NO: 915671
aguaauagacaacggguua

SEQ ID NO: 1097553 - RNA, 19 nt, Artificial Sequence
  Description of Artificial Sequence: Synthetic oligonucleotide
  Antisense strand to SEQ ID NO: 1097552
uaacccguugucuauuacu

SEQ ID NO: 1097554 - RNA, 19 nt, Artificial Sequence
  Description of Artificial Sequence: Synthetic oligonucleotide
  Sense strand starting at position 3960 of SEQ ID NO: 915671
guaauagacaacggguuau

SEQ ID NO: 1097555 - RNA, 19 nt, Artificial Sequence
  Description of Artificial Sequence: Synthetic oligonucleotide
  Antisense strand to SEQ ID NO: 1097554
auaacccguugucuauuac

SEQ ID NO: 1097556 - RNA, 19 nt, Artificial Sequence
  Description of Artificial Sequence: Synthetic oligonucleotide
  Sense strand starting at position 3973 of SEQ ID NO: 915671
gguuaucagacuugagaua

SEQ ID NO: 1097557 - RNA, 19 nt, Artificial Sequence
  Description of Artificial Sequence: Synthetic oligonucleotide
  Antisense strand to SEQ ID NO: 1097556
uaucucaagucugauaacc

SEQ ID NO: 1097558 - RNA, 19 nt, Artificial Sequence
  Description of Artificial Sequence: Synthetic oligonucleotide
  Sense strand starting at position 163 of SEQ ID NO: 915672
ucuggcuugacugguacaa

SEQ ID NO: 1097559 - RNA, 19 nt, Artificial Sequence
  Description of Artificial Sequence: Synthetic oligonucleotide
  Antisense strand to SEQ ID NO: 1097558
uuguaccagucaagccaga

SEQ ID NO: 1097560 - RNA, 19 nt, Artificial Sequence
  Description of Artificial Sequence: Synthetic oligonucleotide
  Sense strand starting at position 329 of SEQ ID NO: 915672
gagugauuaugaguguaaa

SEQ ID NO: 1097561 - RNA, 19 nt, Artificial Sequence
  Description of Artificial Sequence: Synthetic oligonucleotide
  Antisense strand to SEQ ID NO: 1097560
uuuacacucauaaucacuc

SEQ ID NO: 1097562 - RNA, 19 nt, Artificial Sequence
  Description of Artificial Sequence: Synthetic oligonucleotide
  Sense strand starting at position 330 of SEQ ID NO: 915672
agugauuaugaguguaaau

SEQ ID NO: 1097563 - RNA, 19 nt, Artificial Sequence
  Description of Artificial Sequence: Synthetic oligonucleotide
  Antisense strand to SEQ ID NO: 1097562
auuuacacucauaaucacu

SEQ ID NO: 1097564 - RNA, 19 nt, Artificial Sequence
  Description of Artificial Sequence: Synthetic oligonucleotide
  Sense strand starting at position 341 of SEQ ID NO: 915672
guguaaauacuagagccaa

SEQ ID NO: 1097565 - RNA, 19 nt, Artificial Sequence
  Description of Artificial Sequence: Synthetic oligonucleotide
  Antisense strand to SEQ ID NO: 1097564
uuggcucuaguauuuacac

SEQ ID NO: 1097566 - RNA, 19 nt, Artificial Sequence
  Description of Artificial Sequence: Synthetic oligonucleotide
  Sense strand starting at position 355 of SEQ ID NO: 915672
gccaaaugcccagauguga

SEQ ID NO: 1097567 - RNA, 19 nt, Artificial Sequence
  Description of Artificial Sequence: Synthetic oligonucleotide
  Antisense strand to SEQ ID NO: 1097566
ucacaucugggcauuuggc

SEQ ID NO: 1097568 - RNA, 19 nt, Artificial Sequence
  Description of Artificial Sequence: Synthetic oligonucleotide
  Sense strand starting at position 386 of SEQ ID NO: 915672
cuucuuaccagcgggauca

SEQ ID NO: 1097569 - RNA, 19 nt, Artificial Sequence
  Description of Artificial Sequence: Synthetic oligonucleotide
  Antisense strand to SEQ ID NO: 1097568
ugaucccgcugguaagaag

SEQ ID NO: 1097570 - RNA, 19 nt, Artificial Sequence
  Description of Artificial Sequence: Synthetic oligonucleotide
  Sense strand starting at position 387 of SEQ ID NO: 915672
uucuuaccagcgggaucau

SEQ ID NO: 1097571 - RNA, 19 nt, Artificial Sequence
  Description of Artificial Sequence: Synthetic oligonucleotide
  Antisense strand to SEQ ID NO: 1097570
augaucccgcugguaagaa

SEQ ID NO: 1097572 - RNA, 19 nt, Artificial Sequence
  Description of Artificial Sequence: Synthetic oligonucleotide
  Sense strand starting at position 414 of SEQ ID NO: 915672
gcagauugcuuaccucuuu

SEQ ID NO: 1097573 - RNA, 19 nt, Artificial Sequence
  Description of Artificial Sequence: Synthetic oligonucleotide
  Antisense strand to SEQ ID NO: 1097572
aaagagguaagcaaucugc

SEQ ID NO: 1097574 - RNA, 19 nt, Artificial Sequence
  Description of Artificial Sequence: Synthetic oligonucleotide
  Sense strand starting at position 459 of SEQ ID NO: 915672
uggugacgacaauaguaau

SEQ ID NO: 1097575 - RNA, 19 nt, Artificial Sequence
  Description of Artificial Sequence: Synthetic oligonucleotide
  Antisense strand to SEQ ID NO: 1097574
auuacuauugucgucacca

SEQ ID NO: 1097576 - RNA, 19 nt, Artificial Sequence
  Description of Artificial Sequence: Synthetic oligonucleotide
  Sense strand starting at position 524 of SEQ ID NO: 915672
agugcuuaagugucugcua

SEQ ID NO: 1097577 - RNA, 19 nt, Artificial Sequence
  Description of Artificial Sequence: Synthetic oligonucleotide
  Antisense strand to SEQ ID NO: 1097576
uagcagacacuuaagcacu

SEQ ID NO: 1097578 - RNA, 19 nt, Artificial Sequence
  Description of Artificial Sequence: Synthetic oligonucleotide
  Sense strand starting at position 988 of SEQ ID NO: 915672
cugugcugugaccaggaau

SEQ ID NO: 1097579 - RNA, 19 nt, Artificial Sequence
  Description of Artificial Sequence: Synthetic oligonucleotide
  Antisense strand to SEQ ID NO: 1097578
auuccuggucacagcacag

SEQ ID NO: 1097580 - RNA, 19 nt, Artificial Sequence
  Description of Artificial Sequence: Synthetic oligonucleotide
  Sense strand starting at position 1180 of SEQ ID NO: 915672
cccagaaggacuuggucaa

SEQ ID NO: 1097581 - RNA, 19 nt, Artificial Sequence
  Description of Artificial Sequence: Synthetic oligonucleotide
  Antisense strand to SEQ ID NO: 1097580
uugaccaaguccuucuggg

SEQ ID NO: 1097582 - RNA, 19 nt, Artificial Sequence
  Description of Artificial Sequence: Synthetic oligonucleotide
  Sense strand starting at position 1187 of SEQ ID NO: 915672
ggacuuggucaacgacuga

SEQ ID NO: 1097583 - RNA, 19 nt, Artificial Sequence
  Description of Artificial Sequence: Synthetic oligonucleotide
  Antisense strand to SEQ ID NO: 1097582
ucagucguugaccaagucc

SEQ ID NO: 1097584 - RNA, 19 nt, Artificial Sequence
  Description of Artificial Sequence: Synthetic oligonucleotide
  Sense strand starting at position 1210 of SEQ ID NO: 915672
ggguguaccugagcucaga

SEQ ID NO: 1097585 - RNA, 19 nt, Artificial Sequence
  Description of Artificial Sequence: Synthetic oligonucleotide
  Antisense strand to SEQ ID NO: 1097584
ucugagcucagguacaccc

SEQ ID NO: 1097586 - RNA, 19 nt, Artificial Sequence
  Description of Artificial Sequence: Synthetic oligonucleotide
  Sense strand starting at position 1770 of SEQ ID NO: 915672
gguggaugucggcggaaga

SEQ ID NO: 1097587 - RNA, 19 nt, Artificial Sequence
  Description of Artificial Sequence: Synthetic oligonucleotide
  Antisense strand to SEQ ID NO: 1097586
ucuuccgccgacauccacc

SEQ ID NO: 1097588 - RNA, 19 nt, Artificial Sequence
  Description of Artificial Sequence: Synthetic oligonucleotide
  Sense strand starting at position 2582 of SEQ ID NO: 915672
agagguacggaucguuauu

SEQ ID NO: 1097589 - RNA, 19 nt, Artificial Sequence
  Description of Artificial Sequence: Synthetic oligonucleotide
  Antisense strand to SEQ ID NO: 1097588
aauaacgauccguaccucu

SEQ ID NO: 1097590 - RNA, 19 nt, Artificial Sequence
  Description of Artificial Sequence: Synthetic oligonucleotide
  Sense strand starting at position 2587 of SEQ ID NO: 915672
uacggaucguuauucccau

SEQ ID NO: 1097591 - RNA, 19 nt, Artificial Sequence
  Description of Artificial Sequence: Synthetic oligonucleotide
  Antisense strand to SEQ ID NO: 1097590
augggaauaacgauccgua

SEQ ID NO: 1097592 - RNA, 19 nt, Artificial Sequence
  Description of Artificial Sequence: Synthetic oligonucleotide
  Sense strand starting at position 2588 of SEQ ID NO: 915672
acggaucguuauucccauu

SEQ ID NO: 1097593 - RNA, 19 nt, Artificial Sequence
  Description of Artificial Sequence: Synthetic oligonucleotide
  Antisense strand to SEQ ID NO: 1097592
aaugggaauaacgauccgu

SEQ ID NO: 1097594 - RNA, 19 nt, Artificial Sequence
  Description of Artificial Sequence: Synthetic oligonucleotide
  Sense strand starting at position 2744 of SEQ ID NO: 915672
cugaauggccacuauguuu

SEQ ID NO: 1097595 - RNA, 19 nt, Artificial Sequence
  Description of Artificial Sequence: Synthetic oligonucleotide
  Antisense strand to SEQ ID NO: 1097594
aaacauaguggccauucag

SEQ ID NO: 1097596 - RNA, 19 nt, Artificial Sequence
  Description of Artificial Sequence: Synthetic oligonucleotide
  Sense strand starting at position 2750 of SEQ ID NO: 915672
ggccacuauguuuaugagu

SEQ ID NO: 1097597 - RNA, 19 nt, Artificial Sequence
  Description of Artificial Sequence: Synthetic oligonucleotide
  Antisense strand to SEQ ID NO: 1097596
acucauaaacauaguggcc

SEQ ID NO: 1097598 - RNA, 19 nt, Artificial Sequence
  Description of Artificial Sequence: Synthetic oligonucleotide
  Sense strand starting at position 2839 of SEQ ID NO: 915672
ggugacugacucugaaugu

SEQ ID NO: 1097599 - RNA, 19 nt, Artificial Sequence
  Description of Artificial Sequence: Synthetic oligonucleotide
  Antisense strand to SEQ ID NO: 1097598
acauucagagucagucacc

SEQ ID NO: 1097600 - RNA, 19 nt, Artificial Sequence
  Description of Artificial Sequence: Synthetic oligonucleotide
  Sense strand starting at position 2987 of SEQ ID NO: 915672
cccuguauccuggacugau

SEQ ID NO: 1097601 - RNA, 19 nt, Artificial Sequence
  Description of Artificial Sequence: Synthetic oligonucleotide
  Antisense strand to SEQ ID NO: 1097600
aucaguccaggauacaggg

SEQ ID NO: 1097602 - RNA, 19 nt, Artificial Sequence
  Description of Artificial Sequence: Synthetic oligonucleotide
  Sense strand starting at position 3021 of SEQ ID NO: 915672
uuugguuaucuccauguau

SEQ ID NO: 1097603 - RNA, 19 nt, Artificial Sequence
  Description of Artificial Sequence: Synthetic oligonucleotide
  Antisense strand to SEQ ID NO: 1097602
auacauggagauaaccaaa

SEQ ID NO: 1097604 - RNA, 19 nt, Artificial Sequence
  Description of Artificial Sequence: Synthetic oligonucleotide
  Sense strand starting at position 3023 of SEQ ID NO: 915672
ugguuaucuccauguaucu

SEQ ID NO: 1097605 - RNA, 19 nt, Artificial Sequence
  Description of Artificial Sequence: Synthetic oligonucleotide
  Antisense strand to SEQ ID NO: 1097604
agauacauggagauaacca

SEQ ID NO: 1097606 - RNA, 19 nt, Artificial Sequence
  Description of Artificial Sequence: Synthetic oligonucleotide
  Sense strand starting at position 3244 of SEQ ID NO: 915672
cggagaagcgcucagaaug

SEQ ID NO: 1097607 - RNA, 19 nt, Artificial Sequence
  Description of Artificial Sequence: Synthetic oligonucleotide
  Antisense strand to SEQ ID NO: 1097606
cauucugagcgcuucuccg

SEQ ID NO: 1097608 - RNA, 19 nt, Artificial Sequence
  Description of Artificial Sequence: Synthetic oligonucleotide
  Sense strand starting at position 3271 of SEQ ID NO: 915672
cuugguuucccucggagga

SEQ ID NO: 1097609 - RNA, 19 nt, Artificial Sequence
  Description of Artificial Sequence: Synthetic oligonucleotide
  Antisense strand to SEQ ID NO: 1097608
uccuccgagggaaaccaag

SEQ ID NO: 1097610 - RNA, 19 nt, Artificial Sequence
  Description of Artificial Sequence: Synthetic oligonucleotide
  Sense strand starting at position 3301 of SEQ ID NO: 915672
ggaaucuccaguuggaauc

SEQ ID NO: 1097611 - RNA, 19 nt, Artificial Sequence
  Description of Artificial Sequence: Synthetic oligonucleotide
  Antisense strand to SEQ ID NO: 1097610
gauuccaacuggagauucc

SEQ ID NO: 1097612 - RNA, 19 nt, Artificial Sequence
  Description of Artificial Sequence: Synthetic oligonucleotide
  Sense strand starting at position 3352 of SEQ ID NO: 915672
ggcugucuccagugaucug

SEQ ID NO: 1097613 - RNA, 19 nt, Artificial Sequence
  Description of Artificial Sequence: Synthetic oligonucleotide
  Antisense strand to SEQ ID NO: 1097612
cagaucacuggagacagcc

SEQ ID NO: 1097614 - RNA, 19 nt, Artificial Sequence
  Description of Artificial Sequence: Synthetic oligonucleotide
  Sense strand starting at position 3372 of SEQ ID NO: 915672
ggcagauaagccuggauaa

SEQ ID NO: 1097615 - RNA, 19 nt, Artificial Sequence
  Description of Artificial Sequence: Synthetic oligonucleotide
  Antisense strand to SEQ ID NO: 1097614
uuauccaggcuuaucugcc

SEQ ID NO: 1097616 - RNA, 19 nt, Artificial Sequence
  Description of Artificial Sequence: Synthetic oligonucleotide
  Sense strand starting at position 3373 of SEQ ID NO: 915672
gcagauaagccuggauaag

SEQ ID NO: 1097617 - RNA, 19 nt, Artificial Sequence
  Description of Artificial Sequence: Synthetic oligonucleotide
  Antisense strand to SEQ ID NO: 1097616
cuuauccaggcuuaucugc

SEQ ID NO: 1097618 - RNA, 19 nt, Artificial Sequence
  Description of Artificial Sequence: Synthetic oligonucleotide
  Sense strand starting at position 3401 of SEQ ID NO: 915672
ggagguucccauuguuccu

SEQ ID NO: 1097619 - RNA, 19 nt, Artificial Sequence
  Description of Artificial Sequence: Synthetic oligonucleotide
  Antisense strand to SEQ ID NO: 1097618
aggaacaaugggaaccucc

SEQ ID NO: 1097620 - RNA, 19 nt, Artificial Sequence
  Description of Artificial Sequence: Synthetic oligonucleotide
  Sense strand starting at position 3406 of SEQ ID NO: 915672
uucccauuguuccuggagu

SEQ ID NO: 1097621 - RNA, 19 nt, Artificial Sequence
  Description of Artificial Sequence: Synthetic oligonucleotide
  Antisense strand to SEQ ID NO: 1097620
acuccaggaacaaugggaa

SEQ ID NO: 1097622 - RNA, 19 nt, Artificial Sequence
  Description of Artificial Sequence: Synthetic oligonucleotide
  Sense strand starting at position 3726 of SEQ ID NO: 915672
gaauuaugugucugcccug

SEQ ID NO: 1097623 - RNA, 19 nt, Artificial Sequence
  Description of Artificial Sequence: Synthetic oligonucleotide
  Antisense strand to SEQ ID NO: 1097622
cagggcagacacauaauuc

SEQ ID NO: 1097624 - RNA, 19 nt, Artificial Sequence
  Description of Artificial Sequence: Synthetic oligonucleotide
  Sense strand starting at position 3840 of SEQ ID NO: 915672
gcugccugacuguaugaua

SEQ ID NO: 1097625 - RNA, 19 nt, Artificial Sequence
  Description of Artificial Sequence: Synthetic oligonucleotide
  Antisense strand to SEQ ID NO: 1097624
uaucauacagucaggcagc

SEQ ID NO: 1097626 - RNA, 19 nt, Artificial Sequence
  Description of Artificial Sequence: Synthetic oligonucleotide
  Sense strand starting at position 3852 of SEQ ID NO: 915672
uaugauagugggcaaguua

SEQ ID NO: 1097627 - RNA, 19 nt, Artificial Sequence
  Description of Artificial Sequence: Synthetic oligonucleotide
  Antisense strand to SEQ ID NO: 1097626
uaacuugcccacuaucaua

SEQ ID NO: 1097628 - RNA, 19 nt, Artificial Sequence
  Description of Artificial Sequence: Synthetic oligonucleotide
  Sense strand starting at position 3954 of SEQ ID NO: 915672
gauuuacuaguuuguaugu

SEQ ID NO: 1097629 - RNA, 19 nt, Artificial Sequence
  Description of Artificial Sequence: Synthetic oligonucleotide
  Antisense strand to SEQ ID NO: 1097628
acauacaaacuaguaaauc

SEQ ID NO: 1097630 - RNA, 19 nt, Artificial Sequence
  Description of Artificial Sequence: Synthetic oligonucleotide
  Sense strand starting at position 3959 of SEQ ID NO: 915672
acuaguuuguauguaaagu

SEQ ID NO: 1097631 - RNA, 19 nt, Artificial Sequence
  Description of Artificial Sequence: Synthetic oligonucleotide
  Antisense strand to SEQ ID NO: 1097630
acuuuacauacaaacuagu

SEQ ID NO: 1097632 - RNA, 19 nt, Artificial Sequence
  Description of Artificial Sequence: Synthetic oligonucleotide
  Sense strand starting at position 3960 of SEQ ID NO: 915672
cuaguuuguauguaaagug

SEQ ID NO: 1097633 - RNA, 19 nt, Artificial Sequence
  Description of Artificial Sequence: Synthetic oligonucleotide
  Antisense strand to SEQ ID NO: 1097632
cacuuuacauacaaacuag

SEQ ID NO: 1097634 - RNA, 19 nt, Artificial Sequence
  Description of Artificial Sequence: Synthetic oligonucleotide
  Sense strand starting at position 3976 of SEQ ID NO: 915672
gugauuaaugccugguaca

SEQ ID NO: 1097635 - RNA, 19 nt, Artificial Sequence
  Description of Artificial Sequence: Synthetic oligonucleotide
  Antisense strand to SEQ ID NO: 1097634
uguaccaggcauuaaucac

SEQ ID NO: 1097636 - RNA, 19 nt, Artificial Sequence
  Description of Artificial Sequence: Synthetic oligonucleotide
  Sense strand starting at position 3977 of SEQ ID NO: 915672
ugauuaaugccugguacau

SEQ ID NO: 1097637 - RNA, 19 nt, Artificial Sequence
  Description of Artificial Sequence: Synthetic oligonucleotide
  Antisense strand to SEQ ID NO: 1097636
auguaccaggcauuaauca

SEQ ID NO: 1097638 - RNA, 19 nt, Artificial Sequence
  Description of Artificial Sequence: Synthetic oligonucleotide
  Sense strand starting at position 46 of SEQ ID NO: 915673
agaacaugcgguuaucaag

SEQ ID NO: 1097639 - RNA, 19 nt, Artificial Sequence
  Description of Artificial Sequence: Synthetic oligonucleotide
  Antisense strand to SEQ ID NO: 1097638
cuugauaaccgcauguucu

SEQ ID NO: 1097640 - RNA, 19 nt, Artificial Sequence
  Description of Artificial Sequence: Synthetic oligonucleotide
  Sense strand starting at position 103 of SEQ ID NO: 915673
ccggaaauguagcugcaga

SEQ ID NO: 1097641 - RNA, 19 nt, Artificial Sequence
  Description of Artificial Sequence: Synthetic oligonucleotide
  Antisense strand to SEQ ID NO: 1097640
ucugcagcuacauuuccgg

SEQ ID NO: 1097642 - RNA, 19 nt, Artificial Sequence
  Description of Artificial Sequence: Synthetic oligonucleotide
  Sense strand starting at position 108 of SEQ ID NO: 915673
aauguagcugcagaucaau

SEQ ID NO: 1097643 - RNA, 19 nt, Artificial Sequence
  Description of Artificial Sequence: Synthetic oligonucleotide
  Antisense strand to SEQ ID NO: 1097642
auugaucugcagcuacauu

SEQ ID NO: 1097644 - RNA, 19 nt, Artificial Sequence
  Description of Artificial Sequence: Synthetic oligonucleotide
  Sense strand starting at position 1001 of SEQ ID NO: 915673
gugagcuauggucaagaca

SEQ ID NO: 1097645 - RNA, 19 nt, Artificial Sequence
  Description of Artificial Sequence: Synthetic oligonucleotide
  Antisense strand to SEQ ID NO: 1097644
ugucuugaccauagcucac

SEQ ID NO: 1097646 - RNA, 19 nt, Artificial Sequence
  Description of Artificial Sequence: Synthetic oligonucleotide
  Sense strand starting at position 1027 of SEQ ID NO: 915673
ucugguucugaguaaucug

SEQ ID NO: 1097647 - RNA, 19 nt, Artificial Sequence
  Description of Artificial Sequence: Synthetic oligonucleotide
  Antisense strand to SEQ ID NO: 1097646
cagauuacucagaaccaga

SEQ ID NO: 1097648 - RNA, 19 nt, Artificial Sequence
  Description of Artificial Sequence: Synthetic oligonucleotide
  Sense strand starting at position 1030 of SEQ ID NO: 915673
gguucugaguaaucugagu

SEQ ID NO: 1097649 - RNA, 19 nt, Artificial Sequence
  Description of Artificial Sequence: Synthetic oligonucleotide
  Antisense strand to SEQ ID NO: 1097648
acucagauuacucagaacc

SEQ ID NO: 1097650 - RNA, 19 nt, Artificial Sequence
  Description of Artificial Sequence: Synthetic oligonucleotide
  Sense strand starting at position 1035 of SEQ ID NO: 915673
ugaguaaucugagucugag

SEQ ID NO: 1097651 - RNA, 19 nt, Artificial Sequence
  Description of Artificial Sequence: Synthetic oligonucleotide
  Antisense strand to SEQ ID NO: 1097650
cucagacucagauuacuca

SEQ ID NO: 1097652 - RNA, 19 nt, Artificial Sequence
  Description of Artificial Sequence: Synthetic oligonucleotide
  Sense strand starting at position 1038 of SEQ ID NO: 915673
guaaucugagucugaguaa

SEQ ID NO: 1097653 - RNA, 19 nt, Artificial Sequence
  Description of Artificial Sequence: Synthetic oligonucleotide
  Antisense strand to SEQ ID NO: 1097652
uuacucagacucagauuac

SEQ ID NO: 1097654 - RNA, 19 nt, Artificial Sequence
  Description of Artificial Sequence: Synthetic oligonucleotide
  Sense strand starting at position 1051 of SEQ ID NO: 915673
gaguaaagcgacuguaaua

SEQ ID NO: 1097655 - RNA, 19 nt, Artificial Sequence
  Description of Artificial Sequence: Synthetic oligonucleotide
  Antisense strand to SEQ ID NO: 1097654
uauuacagucgcuuuacuc

SEQ ID NO: 1097656 - RNA, 19 nt, Artificial Sequence
  Description of Artificial Sequence: Synthetic oligonucleotide
  Sense strand starting at position 1120 of SEQ ID NO: 915673
gugccuagcagggaguauu

SEQ ID NO: 1097657 - RNA, 19 nt, Artificial Sequence
  Description of Artificial Sequence: Synthetic oligonucleotide
  Antisense strand to SEQ ID NO: 1097656
aauacucccugcuaggcac

SEQ ID NO: 1097658 - RNA, 19 nt, Artificial Sequence
  Description of Artificial Sequence: Synthetic oligonucleotide
  Sense strand starting at position 1149 of SEQ ID NO: 915673
gguauuugcuuccuuccua

SEQ ID NO: 1097659 - RNA, 19 nt, Artificial Sequence
  Description of Artificial Sequence: Synthetic oligonucleotide
  Antisense strand to SEQ ID NO: 1097658
uaggaaggaagcaaauacc

SEQ ID NO: 1097660 - RNA, 19 nt, Artificial Sequence
  Description of Artificial Sequence: Synthetic oligonucleotide
  Sense strand starting at position 1174 of SEQ ID NO: 915673
uagggaagaugaugagaua

SEQ ID NO: 1097661 - RNA, 19 nt, Artificial Sequence
  Description of Artificial Sequence: Synthetic oligonucleotide
  Antisense strand to SEQ ID NO: 1097660
uaucucaucaucuucccua

SEQ ID NO: 1097662 - RNA, 19 nt, Artificial Sequence
  Description of Artificial Sequence: Synthetic oligonucleotide
  Sense strand starting at position 1177 of SEQ ID NO: 915673
ggaagaugaugagauaaug

SEQ ID NO: 1097663 - RNA, 19 nt, Artificial Sequence
  Description of Artificial Sequence: Synthetic oligonucleotide
  Antisense strand to SEQ ID NO: 1097662
cauuaucucaucaucuucc

SEQ ID NO: 1097664 - RNA, 19 nt, Artificial Sequence
  Description of Artificial Sequence: Synthetic oligonucleotide
  Sense strand starting at position 1204 of SEQ ID NO: 915673
gaaagagggcuguaaacgu

SEQ ID NO: 1097665 - RNA, 19 nt, Artificial Sequence
  Description of Artificial Sequence: Synthetic oligonucleotide
  Antisense strand to SEQ ID NO: 1097664
acguuuacagcccucuuuc

SEQ ID NO: 1097666 - RNA, 19 nt, Artificial Sequence
  Description of Artificial Sequence: Synthetic oligonucleotide
  Sense strand starting at position 1219 of SEQ ID NO: 915673
acguaaagaucuguacaaa

SEQ ID NO: 1097667 - RNA, 19 nt, Artificial Sequence
  Description of Artificial Sequence: Synthetic oligonucleotide
  Antisense strand to SEQ ID NO: 1097666
uuuguacagaucuuuacgu

SEQ ID NO: 1097668 - RNA, 19 nt, Artificial Sequence
  Description of Artificial Sequence: Synthetic oligonucleotide
  Sense strand starting at position 1220 of SEQ ID NO: 915673
cguaaagaucuguacaaau

SEQ ID NO: 1097669 - RNA, 19 nt, Artificial Sequence
  Description of Artificial Sequence: Synthetic oligonucleotide
  Antisense strand to SEQ ID NO: 1097668
auuuguacagaucuuuacg

SEQ ID NO: 1097670 - RNA, 19 nt, Artificial Sequence
  Description of Artificial Sequence: Synthetic oligonucleotide
  Sense strand starting at position 1392 of SEQ ID NO: 915673
gccauuuauugagcuucca

SEQ ID NO: 1097671 - RNA, 19 nt, Artificial Sequence
  Description of Artificial Sequence: Synthetic oligonucleotide
  Antisense strand to SEQ ID NO: 1097670
uggaagcucaauaaauggc

SEQ ID NO: 1097672 - RNA, 19 nt, Artificial Sequence
  Description of Artificial Sequence: Synthetic oligonucleotide
  Sense strand starting at position 1422 of SEQ ID NO: 915673
ucuguuuggcacugagaau

SEQ ID NO: 1097673 - RNA, 19 nt, Artificial Sequence
  Description of Artificial Sequence: Synthetic oligonucleotide
  Antisense strand to SEQ ID NO: 1097672
auucucagugccaaacaga

SEQ ID NO: 1097674 - RNA, 19 nt, Artificial Sequence
  Description of Artificial Sequence: Synthetic oligonucleotide
  Sense strand starting at position 1423 of SEQ ID NO: 915673
cuguuuggcacugagaaua

SEQ ID NO: 1097675 - RNA, 19 nt, Artificial Sequence
  Description of Artificial Sequence: Synthetic oligonucleotide
  Antisense strand to SEQ ID NO: 1097674
uauucucagugccaaacag

SEQ ID NO: 1097676 - RNA, 19 nt, Artificial Sequence
  Description of Artificial Sequence: Synthetic oligonucleotide
  Sense strand starting at position 1579 of SEQ ID NO: 915673
ggccaagugccugagaguu

SEQ ID NO: 1097677 - RNA, 19 nt, Artificial Sequence
  Description of Artificial Sequence: Synthetic oligonucleotide
  Antisense strand to SEQ ID NO: 1097676
aacucucaggcacuuggcc

SEQ ID NO: 1097678 - RNA, 19 nt, Artificial Sequence
  Description of Artificial Sequence: Synthetic oligonucleotide
  Sense strand starting at position 1644 of SEQ ID NO: 915673
gcacggguucggcagaaga

SEQ ID NO: 1097679 - RNA, 19 nt, Artificial Sequence
  Description of Artificial Sequence: Synthetic oligonucleotide
  Antisense strand to SEQ ID NO: 1097678
ucuucugccgaacccgugc

SEQ ID NO: 1097680 - RNA, 19 nt, Artificial Sequence
  Description of Artificial Sequence: Synthetic oligonucleotide
  Sense strand starting at position 1737 of SEQ ID NO: 915673
gccucucgcccuuagaaau

SEQ ID NO: 1097681 - RNA, 19 nt, Artificial Sequence
  Description of Artificial Sequence: Synthetic oligonucleotide
  Antisense strand to SEQ ID NO: 1097680
auuucuaagggcgagaggc

SEQ ID NO: 1097682 - RNA, 19 nt, Artificial Sequence
  Description of Artificial Sequence: Synthetic oligonucleotide
  Sense strand starting at position 1747 of SEQ ID NO: 915673
cuuagaaaucgcgagcuga

SEQ ID NO: 1097683 - RNA, 19 nt, Artificial Sequence
  Description of Artificial Sequence: Synthetic oligonucleotide
  Antisense strand to SEQ ID NO: 1097682
ucagcucgcgauuucuaag

SEQ ID NO: 1097684 - RNA, 19 nt, Artificial Sequence
  Description of Artificial Sequence: Synthetic oligonucleotide
  Sense strand starting at position 1751 of SEQ ID NO: 915673
gaaaucgcgagcugagaaa

SEQ ID NO: 1097685 - RNA, 19 nt, Artificial Sequence
  Description of Artificial Sequence: Synthetic oligonucleotide
  Antisense strand to SEQ ID NO: 1097684
uuucucagcucgcgauuuc

SEQ ID NO: 1097686 - RNA, 19 nt, Artificial Sequence
  Description of Artificial Sequence: Synthetic oligonucleotide
  Sense strand starting at position 2866 of SEQ ID NO: 915673
gagagacaggcaugguaau

SEQ ID NO: 1097687 - RNA, 19 nt, Artificial Sequence
  Description of Artificial Sequence: Synthetic oligonucleotide
  Antisense strand to SEQ ID NO: 1097686
auuaccaugccugucucuc

SEQ ID NO: 1097688 - RNA, 19 nt, Artificial Sequence
  Description of Artificial Sequence: Synthetic oligonucleotide
  Sense strand starting at position 2886 of SEQ ID NO: 915673
guucuucuucuguagacga

SEQ ID NO: 1097689 - RNA, 19 nt, Artificial Sequence
  Description of Artificial Sequence: Synthetic oligonucleotide
  Antisense strand to SEQ ID NO: 1097688
ucgucuacagaagaagaac

SEQ ID NO: 1097690 - RNA, 19 nt, Artificial Sequence
  Description of Artificial Sequence: Synthetic oligonucleotide
  Sense strand starting at position 2888 of SEQ ID NO: 915673
ucuucuucuguagacgaga

SEQ ID NO: 1097691 - RNA, 19 nt, Artificial Sequence
  Description of Artificial Sequence: Synthetic oligonucleotide
  Antisense strand to SEQ ID NO: 1097690
ucucgucuacagaagaaga

SEQ ID NO: 1097692 - RNA, 19 nt, Artificial Sequence
  Description of Artificial Sequence: Synthetic oligonucleotide
  Sense strand starting at position 2890 of SEQ ID NO: 915673
uucuucuguagacgagaaa

SEQ ID NO: 1097693 - RNA, 19 nt, Artificial Sequence
  Description of Artificial Sequence: Synthetic oligonucleotide
  Antisense strand to SEQ ID NO: 1097692
uuucucgucuacagaagaa

SEQ ID NO: 1097694 - RNA, 19 nt, Artificial Sequence
  Description of Artificial Sequence: Synthetic oligonucleotide
  Sense strand starting at position 2928 of SEQ ID NO: 915673
uaaugucacacggauggua

SEQ ID NO: 1097695 - RNA, 19 nt, Artificial Sequence
  Description of Artificial Sequence: Synthetic oligonucleotide
  Antisense strand to SEQ ID NO: 1097694
uaccauccgugugacauua

SEQ ID NO: 1097696 - RNA, 19 nt, Artificial Sequence
  Description of Artificial Sequence: Synthetic oligonucleotide
  Sense strand starting at position 2930 of SEQ ID NO: 915673
augucacacggaugguaaa

SEQ ID NO: 1097697 - RNA, 19 nt, Artificial Sequence
  Description of Artificial Sequence: Synthetic oligonucleotide
  Antisense strand to SEQ ID NO: 1097696
uuuaccauccgugugacau

SEQ ID NO: 1097698 - RNA, 19 nt, Artificial Sequence
  Description of Artificial Sequence: Synthetic oligonucleotide
  Sense strand starting at position 3196 of SEQ ID NO: 915673
augaaagaucgugaugcca

SEQ ID NO: 1097699 - RNA, 19 nt, Artificial Sequence
  Description of Artificial Sequence: Synthetic oligonucleotide
  Antisense strand to SEQ ID NO: 1097698
uggcaucacgaucuuucau

SEQ ID NO: 1097700 - RNA, 19 nt, Artificial Sequence
  Description of Artificial Sequence: Synthetic oligonucleotide
  Sense strand starting at position 3220 of SEQ ID NO: 915673
aaguguuuggacugaauua

SEQ ID NO: 1097701 - RNA, 19 nt, Artificial Sequence
  Description of Artificial Sequence: Synthetic oligonucleotide
  Antisense strand to SEQ ID NO: 1097700
uaauucaguccaaacacuu

SEQ ID NO: 1097702 - RNA, 19 nt, Artificial Sequence
  Description of Artificial Sequence: Synthetic oligonucleotide
  Sense strand starting at position 3221 of SEQ ID NO: 915673
aguguuuggacugaauuag

SEQ ID NO: 1097703 - RNA, 19 nt, Artificial Sequence
  Description of Artificial Sequence: Synthetic oligonucleotide
  Antisense strand to SEQ ID NO: 1097702
cuaauucaguccaaacacu

SEQ ID NO: 1097704 - RNA, 19 nt, Artificial Sequence
  Description of Artificial Sequence: Synthetic oligonucleotide
  Sense strand starting at position 3255 of SEQ ID NO: 915673
agucauugaugcucuagaa

SEQ ID NO: 1097705 - RNA, 19 nt, Artificial Sequence
  Description of Artificial Sequence: Synthetic oligonucleotide
  Antisense strand to SEQ ID NO: 1097704
uucuagagcaucaaugacu

SEQ ID NO: 1097706 - RNA, 19 nt, Artificial Sequence
  Description of Artificial Sequence: Synthetic oligonucleotide
  Sense strand starting at position 3285 of SEQ ID NO: 915673
aagaaagagugggaacaau

SEQ ID NO: 1097707 - RNA, 19 nt, Artificial Sequence
  Description of Artificial Sequence: Synthetic oligonucleotide
  Antisense strand to SEQ ID NO: 1097706
auuguucccacucuuucuu

SEQ ID NO: 1097708 - RNA, 19 nt, Artificial Sequence
  Description of Artificial Sequence: Synthetic oligonucleotide
  Sense strand starting at position 3517 of SEQ ID NO: 915673
uagaauauuucuuggagua

SEQ ID NO: 1097709 - RNA, 19 nt, Artificial Sequence
  Description of Artificial Sequence: Synthetic oligonucleotide
  Antisense strand to SEQ ID NO: 1097708
uacuccaagaaauauucua

SEQ ID NO: 1097710 - RNA, 19 nt, Artificial Sequence
  Description of Artificial Sequence: Synthetic oligonucleotide
  Sense strand starting at position 3519 of SEQ ID NO: 915673
gaauauuucuuggaguauu

SEQ ID NO: 1097711 - RNA, 19 nt, Artificial Sequence
  Description of Artificial Sequence: Synthetic oligonucleotide
  Antisense strand to SEQ ID NO: 1097710
aauacuccaagaaauauuc

SEQ ID NO: 1097712 - RNA, 19 nt, Artificial Sequence
  Description of Artificial Sequence: Synthetic oligonucleotide
  Sense strand starting at position 3919 of SEQ ID NO: 915673
auucuaagugaaugaaagu

SEQ ID NO: 1097713 - RNA, 19 nt, Artificial Sequence
  Description of Artificial Sequence: Synthetic oligonucleotide
  Antisense strand to SEQ ID NO: 1097712
acuuucauucacuuagaau

SEQ ID NO: 1097714 - RNA, 19 nt, Artificial Sequence
  Description of Artificial Sequence: Synthetic oligonucleotide
  Sense strand starting at position 3944 of SEQ ID NO: 915673
uuuaguuggaaguagcaaa

SEQ ID NO: 1097715 - RNA, 19 nt, Artificial Sequence
  Description of Artificial Sequence: Synthetic oligonucleotide
  Antisense strand to SEQ ID NO: 1097714
uuugcuacuuccaacuaaa

SEQ ID NO: 1097716 - RNA, 19 nt, Artificial Sequence
  Description of Artificial Sequence: Synthetic oligonucleotide
  Sense strand starting at position 3969 of SEQ ID NO: 915673
gagggugauuugggaaaca

SEQ ID NO: 1097717 - RNA, 19 nt, Artificial Sequence
  Description of Artificial Sequence: Synthetic oligonucleotide
  Antisense strand to SEQ ID NO: 1097716
uguuucccaaaucacccuc

SEQ ID NO: 1097718 - RNA, 19 nt, Artificial Sequence
  Description of Artificial Sequence: Synthetic oligonucleotide
  Sense strand starting at position 56 of SEQ ID NO: 915674
ggaggaaccuuuccuuaau

SEQ ID NO: 1097719 - RNA, 19 nt, Artificial Sequence
  Description of Artificial Sequence: Synthetic oligonucleotide
  Antisense strand to SEQ ID NO: 1097718
auuaaggaaagguuccucc

SEQ ID NO: 1097720 - RNA, 19 nt, Artificial Sequence
  Description of Artificial Sequence: Synthetic oligonucleotide
  Sense strand starting at position 93 of SEQ ID NO: 915674
uccucacaauucugagaug

SEQ ID NO: 1097721 - RNA, 19 nt, Artificial Sequence
  Description of Artificial Sequence: Synthetic oligonucleotide
  Antisense strand to SEQ ID NO: 1097720
caucucagaauugugagga

SEQ ID NO: 1097722 - RNA, 19 nt, Artificial Sequence
  Description of Artificial Sequence: Synthetic oligonucleotide
  Sense strand starting at position 94 of SEQ ID NO: 915674
ccucacaauucugagaugu

SEQ ID NO: 1097723 - RNA, 19 nt, Artificial Sequence
  Description of Artificial Sequence: Synthetic oligonucleotide
  Antisense strand to SEQ ID NO: 1097722
acaucucagaauugugagg

SEQ ID NO: 1097724 - RNA, 19 nt, Artificial Sequence
  Description of Artificial Sequence: Synthetic oligonucleotide
  Sense strand starting at position 96 of SEQ ID NO: 915674
ucacaauucugagauguuc

SEQ ID NO: 1097725 - RNA, 19 nt, Artificial Sequence
  Description of Artificial Sequence: Synthetic oligonucleotide
  Antisense strand to SEQ ID NO: 1097724
gaacaucucagaauuguga

SEQ ID NO: 1097726 - RNA, 19 nt, Artificial Sequence
  Description of Artificial Sequence: Synthetic oligonucleotide
  Sense strand starting at position 104 of SEQ ID NO: 915674
cugagauguucugucagac

SEQ ID NO: 1097727 - RNA, 19 nt, Artificial Sequence
  Description of Artificial Sequence: Synthetic oligonucleotide
  Antisense strand to SEQ ID NO: 1097726
gucugacagaacaucucag

SEQ ID NO: 1097728 - RNA, 19 nt, Artificial Sequence
  Description of Artificial Sequence: Synthetic oligonucleotide
  Sense strand starting at position 108 of SEQ ID NO: 915674
gauguucugucagacugag

SEQ ID NO: 1097729 - RNA, 19 nt, Artificial Sequence
  Description of Artificial Sequence: Synthetic oligonucleotide
  Antisense strand to SEQ ID NO: 1097728
cucagucugacagaacauc

SEQ ID NO: 1097730 - RNA, 19 nt, Artificial Sequence
  Description of Artificial Sequence: Synthetic oligonucleotide
  Sense strand starting at position 647 of SEQ ID NO: 915674
gcugguuugagcugcacaa

SEQ ID NO: 1097731 - RNA, 19 nt, Artificial Sequence
  Description of Artificial Sequence: Synthetic oligonucleotide
  Antisense strand to SEQ ID NO: 1097730
uugugcagcucaaaccagc

SEQ ID NO: 1097732 - RNA, 19 nt, Artificial Sequence
  Description of Artificial Sequence: Synthetic oligonucleotide
  Sense strand starting at position 649 of SEQ ID NO: 915674
ugguuugagcugcacaaua

SEQ ID NO: 1097733 - RNA, 19 nt, Artificial Sequence
  Description of Artificial Sequence: Synthetic oligonucleotide
  Antisense strand to SEQ ID NO: 1097732
uauugugcagcucaaacca

SEQ ID NO: 1097734 - RNA, 19 nt, Artificial Sequence
  Description of Artificial Sequence: Synthetic oligonucleotide
  Sense strand starting at position 692 of SEQ ID NO: 915674
agugaucaucccugaggca

SEQ ID NO: 1097735 - RNA, 19 nt, Artificial Sequence
  Description of Artificial Sequence: Synthetic oligonucleotide
  Antisense strand to SEQ ID NO: 1097734
ugccucagggaugaucacu

SEQ ID NO: 1097736 - RNA, 19 nt, Artificial Sequence
  Description of Artificial Sequence: Synthetic oligonucleotide
  Sense strand starting at position 1363 of SEQ ID NO: 915674
gguacucgauggccagaaa

SEQ ID NO: 1097737 - RNA, 19 nt, Artificial Sequence
  Description of Artificial Sequence: Synthetic oligonucleotide
  Antisense strand to SEQ ID NO: 1097736
uuucuggccaucgaguacc

SEQ ID NO: 1097738 - RNA, 19 nt, Artificial Sequence
  Description of Artificial Sequence: Synthetic oligonucleotide
  Sense strand starting at position 1581 of SEQ ID NO: 915674
cugucaucucagcauagag

SEQ ID NO: 1097739 - RNA, 19 nt, Artificial Sequence
  Description of Artificial Sequence: Synthetic oligonucleotide
  Antisense strand to SEQ ID NO: 1097738
cucuaugcugagaugacag

SEQ ID NO: 1097740 - RNA, 19 nt, Artificial Sequence
  Description of Artificial Sequence: Synthetic oligonucleotide
  Sense strand starting at position 1623 of SEQ ID NO: 915674
ugcugaucaccugggagaa

SEQ ID NO: 1097741 - RNA, 19 nt, Artificial Sequence
  Description of Artificial Sequence: Synthetic oligonucleotide
  Antisense strand to SEQ ID NO: 1097740
uucucccaggugaucagca

SEQ ID NO: 1097742 - RNA, 19 nt, Artificial Sequence
  Description of Artificial Sequence: Synthetic oligonucleotide
  Sense strand starting at position 1754 of SEQ ID NO: 915674
ggacgaccguguagugaaa

SEQ ID NO: 1097743 - RNA, 19 nt, Artificial Sequence
  Description of Artificial Sequence: Synthetic oligonucleotide
  Antisense strand to SEQ ID NO: 1097742
uuucacuacacggucgucc

SEQ ID NO: 1097744 - RNA, 19 nt, Artificial Sequence
  Description of Artificial Sequence: Synthetic oligonucleotide
  Sense strand starting at position 1771 of SEQ ID NO: 915674
aagcucauguggucauagu

SEQ ID NO: 1097745 - RNA, 19 nt, Artificial Sequence
  Description of Artificial Sequence: Synthetic oligonucleotide
  Antisense strand to SEQ ID NO: 1097744
acuaugaccacaugagcuu

SEQ ID NO: 1097746 - RNA, 19 nt, Artificial Sequence
  Description of Artificial Sequence: Synthetic oligonucleotide
  Sense strand starting at position 1808 of SEQ ID NO: 915674
ugugcacgucucugaugaa

SEQ ID NO: 1097747 - RNA, 19 nt, Artificial Sequence
  Description of Artificial Sequence: Synthetic oligonucleotide
  Antisense strand to SEQ ID NO: 1097746
uucaucagagacgugcaca

SEQ ID NO: 1097748 - RNA, 19 nt, Artificial Sequence
  Description of Artificial Sequence: Synthetic oligonucleotide
  Sense strand starting at position 1823 of SEQ ID NO: 915674
ugaagaugcccagguguaa

SEQ ID NO: 1097749 - RNA, 19 nt, Artificial Sequence
  Description of Artificial Sequence: Synthetic oligonucleotide
  Antisense strand to SEQ ID NO: 1097748
uuacaccugggcaucuuca

SEQ ID NO: 1097750 - RNA, 19 nt, Artificial Sequence
  Description of Artificial Sequence: Synthetic oligonucleotide
  Sense strand starting at position 1935 of SEQ ID NO: 915674
guagaugcaagucagacuu

SEQ ID NO: 1097751 - RNA, 19 nt, Artificial Sequence
  Description of Artificial Sequence: Synthetic oligonucleotide
  Antisense strand to SEQ ID NO: 1097750
aagucugacuugcaucuac

SEQ ID NO: 1097752 - RNA, 19 nt, Artificial Sequence
  Description of Artificial Sequence: Synthetic oligonucleotide
  Sense strand starting at position 1992 of SEQ ID NO: 915674
cagagucucugguucuaaa

SEQ ID NO: 1097753 - RNA, 19 nt, Artificial Sequence
  Description of Artificial Sequence: Synthetic oligonucleotide
  Antisense strand to SEQ ID NO: 1097752
uuuagaaccagagacucug

SEQ ID NO: 1097754 - RNA, 19 nt, Artificial Sequence
  Description of Artificial Sequence: Synthetic oligonucleotide
  Sense strand starting at position 2020 of SEQ ID NO: 915674
auggaauagcagugggauu

SEQ ID NO: 1097755 - RNA, 19 nt, Artificial Sequence
  Description of Artificial Sequence: Synthetic oligonucleotide
  Antisense strand to SEQ ID NO: 1097754
aaucccacugcuauuccau

SEQ ID NO: 1097756 - RNA, 19 nt, Artificial Sequence
  Description of Artificial Sequence: Synthetic oligonucleotide
  Sense strand starting at position 2062 of SEQ ID NO: 915674
gggacaagauucuagaaca

SEQ ID NO: 1097757 - RNA, 19 nt, Artificial Sequence
  Description of Artificial Sequence: Synthetic oligonucleotide
  Antisense strand to SEQ ID NO: 1097756
uguucuagaaucuuguccc

SEQ ID NO: 1097758 - RNA, 19 nt, Artificial Sequence
  Description of Artificial Sequence: Synthetic oligonucleotide
  Sense strand starting at position 2125 of SEQ ID NO: 915674
ggugcuuugaauugugaga

SEQ ID NO: 1097759 - RNA, 19 nt, Artificial Sequence
  Description of Artificial Sequence: Synthetic oligonucleotide
  Antisense strand to SEQ ID NO: 1097758
ucucacaauucaaagcacc

SEQ ID NO: 1097760 - RNA, 19 nt, Artificial Sequence
  Description of Artificial Sequence: Synthetic oligonucleotide
  Sense strand starting at position 2130 of SEQ ID NO: 915674
uuugaauugugagaucagu

SEQ ID NO: 1097761 - RNA, 19 nt, Artificial Sequence
  Description of Artificial Sequence: Synthetic oligonucleotide
  Antisense strand to SEQ ID NO: 1097760
acugaucucacaauucaaa

SEQ ID NO: 1097762 - RNA, 19 nt, Artificial Sequence
  Description of Artificial Sequence: Synthetic oligonucleotide
  Sense strand starting at position 2315 of SEQ ID NO: 915674
gcaagucuuaggcagauga

SEQ ID NO: 1097763 - RNA, 19 nt, Artificial Sequence
  Description of Artificial Sequence: Synthetic oligonucleotide
  Antisense strand to SEQ ID NO: 1097762
ucaucugccuaagacuugc

SEQ ID NO: 1097764 - RNA, 19 nt, Artificial Sequence
  Description of Artificial Sequence: Synthetic oligonucleotide
  Sense strand starting at position 2319 of SEQ ID NO: 915674
gucuuaggcagaugagaga

SEQ ID NO: 1097765 - RNA, 19 nt, Artificial Sequence
  Description of Artificial Sequence: Synthetic oligonucleotide
  Antisense strand to SEQ ID NO: 1097764
ucucucaucugccuaagac

SEQ ID NO: 1097766 - RNA, 19 nt, Artificial Sequence
  Description of Artificial Sequence: Synthetic oligonucleotide
  Sense strand starting at position 2522 of SEQ ID NO: 915674
ccaagauguucuuacagga

SEQ ID NO: 1097767 - RNA, 19 nt, Artificial Sequence
  Description of Artificial Sequence: Synthetic oligonucleotide
  Antisense strand to SEQ ID NO: 1097766
uccuguaagaacaucuugg

SEQ ID NO: 1097768 - RNA, 19 nt, Artificial Sequence
  Description of Artificial Sequence: Synthetic oligonucleotide
  Sense strand starting at position 2605 of SEQ ID NO: 915674
gucuaagagucccaugaga

SEQ ID NO: 1097769 - RNA, 19 nt, Artificial Sequence
  Description of Artificial Sequence: Synthetic oligonucleotide
  Antisense strand to SEQ ID NO: 1097768
ucucaugggacucuuagac

SEQ ID NO: 1097770 - RNA, 19 nt, Artificial Sequence
  Description of Artificial Sequence: Synthetic oligonucleotide
  Sense strand starting at position 2607 of SEQ ID NO: 915674
cuaagagucccaugagaca

SEQ ID NO: 1097771 - RNA, 19 nt, Artificial Sequence
  Description of Artificial Sequence: Synthetic oligonucleotide
  Antisense strand to SEQ ID NO: 1097770
ugucucaugggacucuuag

SEQ ID NO: 1097772 - RNA, 19 nt, Artificial Sequence
  Description of Artificial Sequence: Synthetic oligonucleotide
  Sense strand starting at position 2637 of SEQ ID NO: 915674
uggcauaaguccuauuuga

SEQ ID NO: 1097773 - RNA, 19 nt, Artificial Sequence
  Description of Artificial Sequence: Synthetic oligonucleotide
  Antisense strand to SEQ ID NO: 1097772
ucaaauaggacuuaugcca

SEQ ID NO: 1097774 - RNA, 19 nt, Artificial Sequence
  Description of Artificial Sequence: Synthetic oligonucleotide
  Sense strand starting at position 2644 of SEQ ID NO: 915674
aguccuauuugacacuuga

SEQ ID NO: 1097775 - RNA, 19 nt, Artificial Sequence
  Description of Artificial Sequence: Synthetic oligonucleotide
  Antisense strand to SEQ ID NO: 1097774
ucaagugucaaauaggacu

SEQ ID NO: 1097776 - RNA, 19 nt, Artificial Sequence
  Description of Artificial Sequence: Synthetic oligonucleotide
  Sense strand starting at position 2676 of SEQ ID NO: 915674
ggaggauggucuuccucaa

SEQ ID NO: 1097777 - RNA, 19 nt, Artificial Sequence
  Description of Artificial Sequence: Synthetic oligonucleotide
  Antisense strand to SEQ ID NO: 1097776
uugaggaagaccauccucc

SEQ ID NO: 1097778 - RNA, 19 nt, Artificial Sequence
  Description of Artificial Sequence: Synthetic oligonucleotide
  Sense strand starting at position 2697 of SEQ ID NO: 915674
uguuauagccagugaggga

SEQ ID NO: 1097779 - RNA, 19 nt, Artificial Sequence
  Description of Artificial Sequence: Synthetic oligonucleotide
  Antisense strand to SEQ ID NO: 1097778
ucccucacuggcuauaaca

SEQ ID NO: 1097780 - RNA, 19 nt, Artificial Sequence
  Description of Artificial Sequence: Synthetic oligonucleotide
  Sense strand starting at position 2730 of SEQ ID NO: 915674
aaacgaagauccgauacua

SEQ ID NO: 1097781 - RNA, 19 nt, Artificial Sequence
  Description of Artificial Sequence: Synthetic oligonucleotide
  Antisense strand to SEQ ID NO: 1097780
uaguaucggaucuucguuu

SEQ ID NO: 1097782 - RNA, 19 nt, Artificial Sequence
  Description of Artificial Sequence: Synthetic oligonucleotide
  Sense strand starting at position 2803 of SEQ ID NO: 915674
ccuccaugcaugugagaga

SEQ ID NO: 1097783 - RNA, 19 nt, Artificial Sequence
  Description of Artificial Sequence: Synthetic oligonucleotide
  Antisense strand to SEQ ID NO: 1097782
ucucucacaugcauggagg

SEQ ID NO: 1097784 - RNA, 19 nt, Artificial Sequence
  Description of Artificial Sequence: Synthetic oligonucleotide
  Sense strand starting at position 2806 of SEQ ID NO: 915674
ccaugcaugugagagauga

SEQ ID NO: 1097785 - RNA, 19 nt, Artificial Sequence
  Description of Artificial Sequence: Synthetic oligonucleotide
  Antisense strand to SEQ ID NO: 1097784
ucaucucucacaugcaugg

SEQ ID NO: 1097786 - RNA, 19 nt, Artificial Sequence
  Description of Artificial Sequence: Synthetic oligonucleotide
  Sense strand starting at position 2810 of SEQ ID NO: 915674
gcaugugagagaugagaac

SEQ ID NO: 1097787 - RNA, 19 nt, Artificial Sequence
  Description of Artificial Sequence: Synthetic oligonucleotide
  Antisense strand to SEQ ID NO: 1097786
guucucaucucucacaugc

SEQ ID NO: 1097788 - RNA, 19 nt, Artificial Sequence
  Description of Artificial Sequence: Synthetic oligonucleotide
  Sense strand starting at position 3491 of SEQ ID NO: 915674
caugaaagcucccagggau

SEQ ID NO: 1097789 - RNA, 19 nt, Artificial Sequence
  Description of Artificial Sequence: Synthetic oligonucleotide
  Antisense strand to SEQ ID NO: 1097788
aucccugggagcuuucaug

SEQ ID NO: 1097790 - RNA, 19 nt, Artificial Sequence
  Description of Artificial Sequence: Synthetic oligonucleotide
  Sense strand starting at position 3494 of SEQ ID NO: 915674
gaaagcucccagggauuga

SEQ ID NO: 1097791 - RNA, 19 nt, Artificial Sequence
  Description of Artificial Sequence: Synthetic oligonucleotide
  Antisense strand to SEQ ID NO: 1097790
ucaaucccugggagcuuuc

SEQ ID NO: 1097792 - RNA, 19 nt, Artificial Sequence
  Description of Artificial Sequence: Synthetic oligonucleotide
  Sense strand starting at position 3540 of SEQ ID NO: 915674
ggacuugauuucgaacuca

SEQ ID NO: 1097793 - RNA, 19 nt, Artificial Sequence
  Description of Artificial Sequence: Synthetic oligonucleotide
  Antisense strand to SEQ ID NO: 1097792
ugaguucgaaaucaagucc

SEQ ID NO: 1097794 - RNA, 19 nt, Artificial Sequence
  Description of Artificial Sequence: Synthetic oligonucleotide
  Sense strand starting at position 3763 of SEQ ID NO: 915674
ggucccacuguugaaacaa

SEQ ID NO: 1097795 - RNA, 19 nt, Artificial Sequence
  Description of Artificial Sequence: Synthetic oligonucleotide
  Antisense strand to SEQ ID NO: 1097794
uuguuucaacagugggacc

SEQ ID NO: 1097796 - RNA, 19 nt, Artificial Sequence
  Description of Artificial Sequence: Synthetic oligonucleotide
  Sense strand starting at position 3775 of SEQ ID NO: 915674
gaaacaauuguuuggaccu

SEQ ID NO: 1097797 - RNA, 19 nt, Artificial Sequence
  Description of Artificial Sequence: Synthetic oligonucleotide
  Antisense strand to SEQ ID NO: 1097796
agguccaaacaauuguuuc

SEQ ID NO: 1097798 - RNA, 19 nt, Artificial Sequence
  Description of Artificial Sequence: Synthetic oligonucleotide
  Sense strand starting at position 205 of SEQ ID NO: 915675
guaagagcacuuuggaagu

SEQ ID NO: 1097799 - RNA, 19 nt, Artificial Sequence
  Description of Artificial Sequence: Synthetic oligonucleotide
  Antisense strand to SEQ ID NO: 1097798
acuuccaaagugcucuuac

SEQ ID NO: 1097800 - RNA, 19 nt, Artificial Sequence
  Description of Artificial Sequence: Synthetic oligonucleotide
  Sense strand starting at position 239 of SEQ ID NO: 915675
uuugaauagcuuuagguaa

SEQ ID NO: 1097801 - RNA, 19 nt, Artificial Sequence
  Description of Artificial Sequence: Synthetic oligonucleotide
  Antisense strand to SEQ ID NO: 1097800
uuaccuaaagcuauucaaa

SEQ ID NO: 1097802 - RNA, 19 nt, Artificial Sequence
  Description of Artificial Sequence: Synthetic oligonucleotide
  Sense strand starting at position 350 of SEQ ID NO: 915675
ggaauauugucacccucag

SEQ ID NO: 1097803 - RNA, 19 nt, Artificial Sequence
  Description of Artificial Sequence: Synthetic oligonucleotide
  Antisense strand to SEQ ID NO: 1097802
cugagggugacaauauucc

SEQ ID NO: 1097804 - RNA, 19 nt, Artificial Sequence
  Description of Artificial Sequence: Synthetic oligonucleotide
  Sense strand starting at position 354 of SEQ ID NO: 915675
uauugucacccucaguagu

SEQ ID NO: 1097805 - RNA, 19 nt, Artificial Sequence
  Description of Artificial Sequence: Synthetic oligonucleotide
  Antisense strand to SEQ ID NO: 1097804
acuacugagggugacaaua

SEQ ID NO: 1097806 - RNA, 19 nt, Artificial Sequence
  Description of Artificial Sequence: Synthetic oligonucleotide
  Sense strand starting at position 403 of SEQ ID NO: 915675
agagcugauuuauacauua

SEQ ID NO: 1097807 - RNA, 19 nt, Artificial Sequence
  Description of Artificial Sequence: Synthetic oligonucleotide
  Antisense strand to SEQ ID NO: 1097806
uaauguauaaaucagcucu

SEQ ID NO: 1097808 - RNA, 19 nt, Artificial Sequence
  Description of Artificial Sequence: Synthetic oligonucleotide
  Sense strand starting at position 464 of SEQ ID NO: 915675
cuggauccaguguauauaa

SEQ ID NO: 1097809 - RNA, 19 nt, Artificial Sequence
  Description of Artificial Sequence: Synthetic oligonucleotide
  Antisense strand to SEQ ID NO: 1097808
uuauauacacuggauccag

SEQ ID NO: 1097810 - RNA, 19 nt, Artificial Sequence
  Description of Artificial Sequence: Synthetic oligonucleotide
  Sense strand starting at position 508 of SEQ ID NO: 915675
ggcugacagagccaaauua

SEQ ID NO: 1097811 - RNA, 19 nt, Artificial Sequence
  Description of Artificial Sequence: Synthetic oligonucleotide
  Antisense strand to SEQ ID NO: 1097810
uaauuuggcucugucagcc

SEQ ID NO: 1097812 - RNA, 19 nt, Artificial Sequence
  Description of Artificial Sequence: Synthetic oligonucleotide
  Sense strand starting at position 518 of SEQ ID NO: 915675
gccaaauuagacuguugga

SEQ ID NO: 1097813 - RNA, 19 nt, Artificial Sequence
  Description of Artificial Sequence: Synthetic oligonucleotide
  Antisense strand to SEQ ID NO: 1097812
uccaacagucuaauuuggc

SEQ ID NO: 1097814 - RNA, 19 nt, Artificial Sequence
  Description of Artificial Sequence: Synthetic oligonucleotide
  Sense strand starting at position 625 of SEQ ID NO: 915675
cuaugugagcuacagacaa

SEQ ID NO: 1097815 - RNA, 19 nt, Artificial Sequence
  Description of Artificial Sequence: Synthetic oligonucleotide
  Antisense strand to SEQ ID NO: 1097814
uugucuguagcucacauag

SEQ ID NO: 1097816 - RNA, 19 nt, Artificial Sequence
  Description of Artificial Sequence: Synthetic oligonucleotide
  Sense strand starting at position 637 of SEQ ID NO: 915675
cagacaaacuuguuaggau

SEQ ID NO: 1097817 - RNA, 19 nt, Artificial Sequence
  Description of Artificial Sequence: Synthetic oligonucleotide
  Antisense strand to SEQ ID NO: 1097816
auccuaacaaguuugucug

SEQ ID NO: 1097818 - RNA, 19 nt, Artificial Sequence
  Description of Artificial Sequence: Synthetic oligonucleotide
  Sense strand starting at position 644 of SEQ ID NO: 915675
acuuguuaggaucacuuua

SEQ ID NO: 1097819 - RNA, 19 nt, Artificial Sequence
  Description of Artificial Sequence: Synthetic oligonucleotide
  Antisense strand to SEQ ID NO: 1097818
uaaagugauccuaacaagu

SEQ ID NO: 1097820 - RNA, 19 nt, Artificial Sequence
  Description of Artificial Sequence: Synthetic oligonucleotide
  Sense strand starting at position 646 of SEQ ID NO: 915675
uuguuaggaucacuuuaag

SEQ ID NO: 1097821 - RNA, 19 nt, Artificial Sequence
  Description of Artificial Sequence: Synthetic oligonucleotide
  Antisense strand to SEQ ID NO: 1097820
cuuaaagugauccuaacaa

SEQ ID NO: 1097822 - RNA, 19 nt, Artificial Sequence
  Description of Artificial Sequence: Synthetic oligonucleotide
  Sense strand starting at position 649 of SEQ ID NO: 915675
uuaggaucacuuuaaguuu

SEQ ID NO: 1097823 - RNA, 19 nt, Artificial Sequence
  Description of Artificial Sequence: Synthetic oligonucleotide
  Antisense strand to SEQ ID NO: 1097822
aaacuuaaagugauccuaa

SEQ ID NO: 1097824 - RNA, 19 nt, Artificial Sequence
  Description of Artificial Sequence: Synthetic oligonucleotide
  Sense strand starting at position 718 of SEQ ID NO: 915675
aguauuuaguuucuacgua

SEQ ID NO: 1097825 - RNA, 19 nt, Artificial Sequence
  Description of Artificial Sequence: Synthetic oligonucleotide
  Antisense strand to SEQ ID NO: 1097824
uacguagaaacuaaauacu

SEQ ID NO: 1097826 - RNA, 19 nt, Artificial Sequence
  Description of Artificial Sequence: Synthetic oligonucleotide
  Sense strand starting at position 879 of SEQ ID NO: 915675
ugaccuuagcuguaacuaa

SEQ ID NO: 1097827 - RNA, 19 nt, Artificial Sequence
  Description of Artificial Sequence: Synthetic oligonucleotide
  Antisense strand to SEQ ID NO: 1097826
uuaguuacagcuaagguca

SEQ ID NO: 1097828 - RNA, 19 nt, Artificial Sequence
  Description of Artificial Sequence: Synthetic oligonucleotide
  Sense strand starting at position 890 of SEQ ID NO: 915675
guaacuaaguaauugcuaa

SEQ ID NO: 1097829 - RNA, 19 nt, Artificial Sequence
  Description of Artificial Sequence: Synthetic oligonucleotide
  Antisense strand to SEQ ID NO: 1097828
uuagcaauuacuuaguuac

SEQ ID NO: 1097830 - RNA, 19 nt, Artificial Sequence
  Description of Artificial Sequence: Synthetic oligonucleotide
  Sense strand starting at position 955 of SEQ ID NO: 915675
uuacgugaauuauuucguu

SEQ ID NO: 1097831 - RNA, 19 nt, Artificial Sequence
  Description of Artificial Sequence: Synthetic oligonucleotide
  Antisense strand to SEQ ID NO: 1097830
aacgaaauaauucacguaa

SEQ ID NO: 1097832 - RNA, 19 nt, Artificial Sequence
  Description of Artificial Sequence: Synthetic oligonucleotide
  Sense strand starting at position 959 of SEQ ID NO: 915675
gugaauuauuucguuuaac

SEQ ID NO: 1097833 - RNA, 19 nt, Artificial Sequence
  Description of Artificial Sequence: Synthetic oligonucleotide
  Antisense strand to SEQ ID NO: 1097832
guuaaacgaaauaauucac

SEQ ID NO: 1097834 - RNA, 19 nt, Artificial Sequence
  Description of Artificial Sequence: Synthetic oligonucleotide
  Sense strand starting at position 1153 of SEQ ID NO: 915675
cugaucuggcuuuaugacu

SEQ ID NO: 1097835 - RNA, 19 nt, Artificial Sequence
  Description of Artificial Sequence: Synthetic oligonucleotide
  Antisense strand to SEQ ID NO: 1097834
agucauaaagccagaucag

SEQ ID NO: 1097836 - RNA, 19 nt, Artificial Sequence
  Description of Artificial Sequence: Synthetic oligonucleotide
  Sense strand starting at position 1258 of SEQ ID NO: 915675
cugccuagcgucguuauca

SEQ ID NO: 1097837 - RNA, 19 nt, Artificial Sequence
  Description of Artificial Sequence: Synthetic oligonucleotide
  Antisense strand to SEQ ID NO: 1097836
ugauaacgacgcuaggcag

SEQ ID NO: 1097838 - RNA, 19 nt, Artificial Sequence
  Description of Artificial Sequence: Synthetic oligonucleotide
  Sense strand starting at position 1908 of SEQ ID NO: 915675
cccaguaaccgcgagacaa

SEQ ID NO: 1097839 - RNA, 19 nt, Artificial Sequence
  Description of Artificial Sequence: Synthetic oligonucleotide
  Antisense strand to SEQ ID NO: 1097838
uugucucgcgguuacuggg

SEQ ID NO: 1097840 - RNA, 19 nt, Artificial Sequence
  Description of Artificial Sequence: Synthetic oligonucleotide
  Sense strand starting at position 2140 of SEQ ID NO: 915675
cugugauuagucggcauuu

SEQ ID NO: 1097841 - RNA, 19 nt, Artificial Sequence
  Description of Artificial Sequence: Synthetic oligonucleotide
  Antisense strand to SEQ ID NO: 1097840
aaaugccgacuaaucacag

SEQ ID NO: 1097842 - RNA, 19 nt, Artificial Sequence
  Description of Artificial Sequence: Synthetic oligonucleotide
  Sense strand starting at position 2141 of SEQ ID NO: 915675
ugugauuagucggcauuuc

SEQ ID NO: 1097843 - RNA, 19 nt, Artificial Sequence
  Description of Artificial Sequence: Synthetic oligonucleotide
  Antisense strand to SEQ ID NO: 1097842
gaaaugccgacuaaucaca

SEQ ID NO: 1097844 - RNA, 19 nt, Artificial Sequence
  Description of Artificial Sequence: Synthetic oligonucleotide
  Sense strand starting at position 2224 of SEQ ID NO: 915675
cagagagugcuugaucuaa

SEQ ID NO: 1097845 - RNA, 19 nt, Artificial Sequence
  Description of Artificial Sequence: Synthetic oligonucleotide
  Antisense strand to SEQ ID NO: 1097844
uuagaucaagcacucucug

SEQ ID NO: 1097846 - RNA, 19 nt, Artificial Sequence
  Description of Artificial Sequence: Synthetic oligonucleotide
  Sense strand starting at position 2314 of SEQ ID NO: 915675
acguacaaccugugaagau

SEQ ID NO: 1097847 - RNA, 19 nt, Artificial Sequence
  Description of Artificial Sequence: Synthetic oligonucleotide
  Antisense strand to SEQ ID NO: 1097846
aucuucacagguuguacgu

SEQ ID NO: 1097848 - RNA, 19 nt, Artificial Sequence
  Description of Artificial Sequence: Synthetic oligonucleotide
  Sense strand starting at position 2701 of SEQ ID NO: 915675
uggacaugauggcuuguaa

SEQ ID NO: 1097849 - RNA, 19 nt, Artificial Sequence
  Description of Artificial Sequence: Synthetic oligonucleotide
  Antisense strand to SEQ ID NO: 1097848
uuacaagccaucaugucca

SEQ ID NO: 1097850 - RNA, 19 nt, Artificial Sequence
  Description of Artificial Sequence: Synthetic oligonucleotide
  Sense strand starting at position 2771 of SEQ ID NO: 915675
ugagguugcggugagaaau

SEQ ID NO: 1097851 - RNA, 19 nt, Artificial Sequence
  Description of Artificial Sequence: Synthetic oligonucleotide
  Antisense strand to SEQ ID NO: 1097850
auuucucaccgcaaccuca

SEQ ID NO: 1097852 - RNA, 19 nt, Artificial Sequence
  Description of Artificial Sequence: Synthetic oligonucleotide
  Sense strand starting at position 2885 of SEQ ID NO: 915675
guaggaaauuauuccauga

SEQ ID NO: 1097853 - RNA, 19 nt, Artificial Sequence
  Description of Artificial Sequence: Synthetic oligonucleotide
  Antisense strand to SEQ ID NO: 1097852
ucauggaauaauuuccuac

SEQ ID NO: 1097854 - RNA, 19 nt, Artificial Sequence
  Description of Artificial Sequence: Synthetic oligonucleotide
  Sense strand starting at position 2887 of SEQ ID NO: 915675
aggaaauuauuccaugaaa

SEQ ID NO: 1097855 - RNA, 19 nt, Artificial Sequence
  Description of Artificial Sequence: Synthetic oligonucleotide
  Antisense strand to SEQ ID NO: 1097854
uuucauggaauaauuuccu

SEQ ID NO: 1097856 - RNA, 19 nt, Artificial Sequence
  Description of Artificial Sequence: Synthetic oligonucleotide
  Sense strand starting at position 2916 of SEQ ID NO: 915675
auaauuccucuguauuagu

SEQ ID NO: 1097857 - RNA, 19 nt, Artificial Sequence
  Description of Artificial Sequence: Synthetic oligonucleotide
  Antisense strand to SEQ ID NO: 1097856
acuaauacagaggaauuau

SEQ ID NO: 1097858 - RNA, 19 nt, Artificial Sequence
  Description of Artificial Sequence: Synthetic oligonucleotide
  Sense strand starting at position 2924 of SEQ ID NO: 915675
ucuguauuaguauaacagu

SEQ ID NO: 1097859 - RNA, 19 nt, Artificial Sequence
  Description of Artificial Sequence: Synthetic oligonucleotide
  Antisense strand to SEQ ID NO: 1097858
acuguuauacuaauacaga

SEQ ID NO: 1097860 - RNA, 19 nt, Artificial Sequence
  Description of Artificial Sequence: Synthetic oligonucleotide
  Sense strand starting at position 3087 of SEQ ID NO: 915675
gcaauuaauucugugaacu

SEQ ID NO: 1097861 - RNA, 19 nt, Artificial Sequence
  Description of Artificial Sequence: Synthetic oligonucleotide
  Antisense strand to SEQ ID NO: 1097860
aguucacagaauuaauugc

SEQ ID NO: 1097862 - RNA, 19 nt, Artificial Sequence
  Description of Artificial Sequence: Synthetic oligonucleotide
  Sense strand starting at position 3632 of SEQ ID NO: 915675
ugagaaguauuugacacau

SEQ ID NO: 1097863 - RNA, 19 nt, Artificial Sequence
  Description of Artificial Sequence: Synthetic oligonucleotide
  Antisense strand to SEQ ID NO: 1097862
augugucaaauacuucuca

SEQ ID NO: 1097864 - RNA, 19 nt, Artificial Sequence
  Description of Artificial Sequence: Synthetic oligonucleotide
  Sense strand starting at position 3634 of SEQ ID NO: 915675
agaaguauuugacacauaa

SEQ ID NO: 1097865 - RNA, 19 nt, Artificial Sequence
  Description of Artificial Sequence: Synthetic oligonucleotide
  Antisense strand to SEQ ID NO: 1097864
uuaugugucaaauacuucu

SEQ ID NO: 1097866 - RNA, 19 nt, Artificial Sequence
  Description of Artificial Sequence: Synthetic oligonucleotide
  Sense strand starting at position 3736 of SEQ ID NO: 915675
auuaaaugugcuuaagaca

SEQ ID NO: 1097867 - RNA, 19 nt, Artificial Sequence
  Description of Artificial Sequence: Synthetic oligonucleotide
  Antisense strand to SEQ ID NO: 1097866
ugucuuaagcacauuuaau

SEQ ID NO: 1097868 - RNA, 19 nt, Artificial Sequence
  Description of Artificial Sequence: Synthetic oligonucleotide
  Sense strand starting at position 3835 of SEQ ID NO: 915675
gugugauaagagugacuga

SEQ ID NO: 1097869 - RNA, 19 nt, Artificial Sequence
  Description of Artificial Sequence: Synthetic oligonucleotide
  Antisense strand to SEQ ID NO: 1097868
ucagucacucuuaucacac

SEQ ID NO: 1097870 - RNA, 19 nt, Artificial Sequence
  Description of Artificial Sequence: Synthetic oligonucleotide
  Sense strand starting at position 3860 of SEQ ID NO: 915675
cgcagauugcaauagcaga

SEQ ID NO: 1097871 - RNA, 19 nt, Artificial Sequence
  Description of Artificial Sequence: Synthetic oligonucleotide
  Antisense strand to SEQ ID NO: 1097870
ucugcuauugcaaucugcg

SEQ ID NO: 1097872 - RNA, 19 nt, Artificial Sequence
  Description of Artificial Sequence: Synthetic oligonucleotide
  Sense strand starting at position 3906 of SEQ ID NO: 915675
gcuguaaagucucccagga

SEQ ID NO: 1097873 - RNA, 19 nt, Artificial Sequence
  Description of Artificial Sequence: Synthetic oligonucleotide
  Antisense strand to SEQ ID NO: 1097872
uccugggagacuuuacagc

SEQ ID NO: 1097874 - RNA, 19 nt, Artificial Sequence
  Description of Artificial Sequence: Synthetic oligonucleotide
  Sense strand starting at position 3910 of SEQ ID NO: 915675
uaaagucucccaggaagca

SEQ ID NO: 1097875 - RNA, 19 nt, Artificial Sequence
  Description of Artificial Sequence: Synthetic oligonucleotide
  Antisense strand to SEQ ID NO: 1097874
ugcuuccugggagacuuua

SEQ ID NO: 1097876 - RNA, 19 nt, Artificial Sequence
  Description of Artificial Sequence: Synthetic oligonucleotide
  Sense strand starting at position 3948 of SEQ ID NO: 915675
gaggaugaauaggaauuaa

SEQ ID NO: 1097877 - RNA, 19 nt, Artificial Sequence
  Description of Artificial Sequence: Synthetic oligonucleotide
  Antisense strand to SEQ ID NO: 1097876
uuaauuccuauucauccuc

SEQ ID NO: 1097878 - RNA, 19 nt, Artificial Sequence
  Description of Artificial Sequence: Synthetic oligonucleotide
  Sense strand starting at position 35 of SEQ ID NO: 915676
cuguacuuugaacaguuaa

SEQ ID NO: 1097879 - RNA, 19 nt, Artificial Sequence
  Description of Artificial Sequence: Synthetic oligonucleotide
  Antisense strand to SEQ ID NO: 1097878
uuaacuguucaaaguacag

SEQ ID NO: 1097880 - RNA, 19 nt, Artificial Sequence
  Description of Artificial Sequence: Synthetic oligonucleotide
  Sense strand starting at position 100 of SEQ ID NO: 915676
agaaauaacuggugccaaa

SEQ ID NO: 1097881 - RNA, 19 nt, Artificial Sequence
  Description of Artificial Sequence: Synthetic oligonucleotide
  Antisense strand to SEQ ID NO: 1097880
uuuggcaccaguuauuucu

SEQ ID NO: 1097882 - RNA, 19 nt, Artificial Sequence
  Description of Artificial Sequence: Synthetic oligonucleotide
  Sense strand starting at position 535 of SEQ ID NO: 915676
guguccugauucuuuccau

SEQ ID NO: 1097883 - RNA, 19 nt, Artificial Sequence
  Description of Artificial Sequence: Synthetic oligonucleotide
  Antisense strand to SEQ ID NO: 1097882
auggaaagaaucaggacac

SEQ ID NO: 1097884 - RNA, 19 nt, Artificial Sequence
  Description of Artificial Sequence: Synthetic oligonucleotide
  Sense strand starting at position 536 of SEQ ID NO: 915676
uguccugauucuuuccaua

SEQ ID NO: 1097885 - RNA, 19 nt, Artificial Sequence
  Description of Artificial Sequence: Synthetic oligonucleotide
  Antisense strand to SEQ ID NO: 1097884
uauggaaagaaucaggaca

SEQ ID NO: 1097886 - RNA, 19 nt, Artificial Sequence
  Description of Artificial Sequence: Synthetic oligonucleotide
  Sense strand starting at position 565 of SEQ ID NO: 915676
gcacaacauccagguuaua

SEQ ID NO: 1097887 - RNA, 19 nt, Artificial Sequence
  Description of Artificial Sequence: Synthetic oligonucleotide
  Antisense strand to SEQ ID NO: 1097886
uauaaccuggauguugugc

SEQ ID NO: 1097888 - RNA, 19 nt, Artificial Sequence
  Description of Artificial Sequence: Synthetic oligonucleotide
  Sense strand starting at position 616 of SEQ ID NO: 915676
acacgucucucaugaacaa

SEQ ID NO: 1097889 - RNA, 19 nt, Artificial Sequence
  Description of Artificial Sequence: Synthetic oligonucleotide
  Antisense strand to SEQ ID NO: 1097888
uuguucaugagagacgugu

SEQ ID NO: 1097890 - RNA, 19 nt, Artificial Sequence
  Description of Artificial Sequence: Synthetic oligonucleotide
  Sense strand starting at position 768 of SEQ ID NO: 915676
ggucgaagagaacgugaaa

SEQ ID NO: 1097891 - RNA, 19 nt, Artificial Sequence
  Description of Artificial Sequence: Synthetic oligonucleotide
  Antisense strand to SEQ ID NO: 1097890
uuucacguucucuucgacc

SEQ ID NO: 1097892 - RNA, 19 nt, Artificial Sequence
  Description of Artificial Sequence: Synthetic oligonucleotide
  Sense strand starting at position 1179 of SEQ ID NO: 915676
uucuuaaagugcuacguuu

SEQ ID NO: 1097893 - RNA, 19 nt, Artificial Sequence
  Description of Artificial Sequence: Synthetic oligonucleotide
  Antisense strand to SEQ ID NO: 1097892
aaacguagcacuuuaagaa

SEQ ID NO: 1097894 - RNA, 19 nt, Artificial Sequence
  Description of Artificial Sequence: Synthetic oligonucleotide
  Sense strand starting at position 1190 of SEQ ID NO: 915676
cuacguuucccuggcugaa

SEQ ID NO: 1097895 - RNA, 19 nt, Artificial Sequence
  Description of Artificial Sequence: Synthetic oligonucleotide
  Antisense strand to SEQ ID NO: 1097894
uucagccagggaaacguag

SEQ ID NO: 1097896 - RNA, 19 nt, Artificial Sequence
  Description of Artificial Sequence: Synthetic oligonucleotide
  Sense strand starting at position 1416 of SEQ ID NO: 915676
aaggaucuggcucguguau

SEQ ID NO: 1097897 - RNA, 19 nt, Artificial Sequence
  Description of Artificial Sequence: Synthetic oligonucleotide
  Antisense strand to SEQ ID NO: 1097896
auacacgagccagauccuu

SEQ ID NO: 1097898 - RNA, 19 nt, Artificial Sequence
  Description of Artificial Sequence: Synthetic oligonucleotide
  Sense strand starting at position 1418 of SEQ ID NO: 915676
ggaucuggcucguguauuu

SEQ ID NO: 1097899 - RNA, 19 nt, Artificial Sequence
  Description of Artificial Sequence: Synthetic oligonucleotide
  Antisense strand to SEQ ID NO: 1097898
aaauacacgagccagaucc

SEQ ID NO: 1097900 - RNA, 19 nt, Artificial Sequence
  Description of Artificial Sequence: Synthetic oligonucleotide
  Sense strand starting at position 1423 of SEQ ID NO: 915676
uggcucguguauuugugua

SEQ ID NO: 1097901 - RNA, 19 nt, Artificial Sequence
  Description of Artificial Sequence: Synthetic oligonucleotide
  Antisense strand to SEQ ID NO: 1097900
uacacaaauacacgagcca

SEQ ID NO: 1097902 - RNA, 19 nt, Artificial Sequence
  Description of Artificial Sequence: Synthetic oligonucleotide
  Sense strand starting at position 1428 of SEQ ID NO: 915676
cguguauuuguguaucgca

SEQ ID NO: 1097903 - RNA, 19 nt, Artificial Sequence
  Description of Artificial Sequence: Synthetic oligonucleotide
  Antisense strand to SEQ ID NO: 1097902
ugcgauacacaaauacacg

SEQ ID NO: 1097904 - RNA, 19 nt, Artificial Sequence
  Description of Artificial Sequence: Synthetic oligonucleotide
  Sense strand starting at position 1489 of SEQ ID NO: 915676
ugagcugugacuggucaca

SEQ ID NO: 1097905 - RNA, 19 nt, Artificial Sequence
  Description of Artificial Sequence: Synthetic oligonucleotide
  Antisense strand to SEQ ID NO: 1097904
ugugaccagucacagcuca

SEQ ID NO: 1097906 - RNA, 19 nt, Artificial Sequence
  Description of Artificial Sequence: Synthetic oligonucleotide
  Sense strand starting at position 1624 of SEQ ID NO: 915676
gggacugagcaauauucgu

SEQ ID NO: 1097907 - RNA, 19 nt, Artificial Sequence
  Description of Artificial Sequence: Synthetic oligonucleotide
  Antisense strand to SEQ ID NO: 1097906
acgaauauugcucaguccc

SEQ ID NO: 1097908 - RNA, 19 nt, Artificial Sequence
  Description of Artificial Sequence: Synthetic oligonucleotide
  Sense strand starting at position 1630 of SEQ ID NO: 915676
gagcaauauucguuccagg

SEQ ID NO: 1097909 - RNA, 19 nt, Artificial Sequence
  Description of Artificial Sequence: Synthetic oligonucleotide
  Antisense strand to SEQ ID NO: 1097908
ccuggaacgaauauugcuc

SEQ ID NO: 1097910 - RNA, 19 nt, Artificial Sequence
  Description of Artificial Sequence: Synthetic oligonucleotide
  Sense strand starting at position 2171 of SEQ ID NO: 915676
uugacuuucccguggagau

SEQ ID NO: 1097911 - RNA, 19 nt, Artificial Sequence
  Description of Artificial Sequence: Synthetic oligonucleotide
  Antisense strand to SEQ ID NO: 1097910
aucuccacgggaaagucaa

SEQ ID NO: 1097912 - RNA, 19 nt, Artificial Sequence
  Description of Artificial Sequence: Synthetic oligonucleotide
  Sense strand starting at position 2172 of SEQ ID NO: 915676
ugacuuucccguggagaug

SEQ ID NO: 1097913 - RNA, 19 nt, Artificial Sequence
  Description of Artificial Sequence: Synthetic oligonucleotide
  Antisense strand to SEQ ID NO: 1097912
caucuccacgggaaaguca

SEQ ID NO: 1097914 - RNA, 19 nt, Artificial Sequence
  Description of Artificial Sequence: Synthetic oligonucleotide
  Sense strand starting at position 2173 of SEQ ID NO: 915676
gacuuucccguggagaugu

SEQ ID NO: 1097915 - RNA, 19 nt, Artificial Sequence
  Description of Artificial Sequence: Synthetic oligonucleotide
  Antisense strand to SEQ ID NO: 1097914
acaucuccacgggaaaguc

SEQ ID NO: 1097916 - RNA, 19 nt, Artificial Sequence
  Description of Artificial Sequence: Synthetic oligonucleotide
  Sense strand starting at position 2214 of SEQ ID NO: 915676
agcugugugcuucaggaga

SEQ ID NO: 1097917 - RNA, 19 nt, Artificial Sequence
  Description of Artificial Sequence: Synthetic oligonucleotide
  Antisense strand to SEQ ID NO: 1097916
ucuccugaagcacacagcu

SEQ ID NO: 1097918 - RNA, 19 nt, Artificial Sequence
  Description of Artificial Sequence: Synthetic oligonucleotide
  Sense strand starting at position 2238 of SEQ ID NO: 915676
guuccugagucacccaaga

SEQ ID NO: 1097919 - RNA, 19 nt, Artificial Sequence
  Description of Artificial Sequence: Synthetic oligonucleotide
  Antisense strand to SEQ ID NO: 1097918
ucuugggugacucaggaac

SEQ ID NO: 1097920 - RNA, 19 nt, Artificial Sequence
  Description of Artificial Sequence: Synthetic oligonucleotide
  Sense strand starting at position 2333 of SEQ ID NO: 915676
ggcuguggcuccgaagagu

SEQ ID NO: 1097921 - RNA, 19 nt, Artificial Sequence
  Description of Artificial Sequence: Synthetic oligonucleotide
  Antisense strand to SEQ ID NO: 1097920
acucuucggagccacagcc

SEQ ID NO: 1097922 - RNA, 19 nt, Artificial Sequence
  Description of Artificial Sequence: Synthetic oligonucleotide
  Sense strand starting at position 2342 of SEQ ID NO: 915676
uccgaagaguguuuguuac

SEQ ID NO: 1097923 - RNA, 19 nt, Artificial Sequence
  Description of Artificial Sequence: Synthetic oligonucleotide
  Antisense strand to SEQ ID NO: 1097922
guaacaaacacucuucgga

SEQ ID NO: 1097924 - RNA, 19 nt, Artificial Sequence
  Description of Artificial Sequence: Synthetic oligonucleotide
  Sense strand starting at position 2344 of SEQ ID NO: 915676
cgaagaguguuuguuacca

SEQ ID NO: 1097925 - RNA, 19 nt, Artificial Sequence
  Description of Artificial Sequence: Synthetic oligonucleotide
  Antisense strand to SEQ ID NO: 1097924
ugguaacaaacacucuucg

SEQ ID NO: 1097926 - RNA, 19 nt, Artificial Sequence
  Description of Artificial Sequence: Synthetic oligonucleotide
  Sense strand starting at position 2578 of SEQ ID NO: 915676
guucuaggugcuggcgaua

SEQ ID NO: 1097927 - RNA, 19 nt, Artificial Sequence
  Description of Artificial Sequence: Synthetic oligonucleotide
  Antisense strand to SEQ ID NO: 1097926
uaucgccagcaccuagaac

SEQ ID NO: 1097928 - RNA, 19 nt, Artificial Sequence
  Description of Artificial Sequence: Synthetic oligonucleotide
  Sense strand starting at position 2589 of SEQ ID NO: 915676
uggcgauagagcuaagaag

SEQ ID NO: 1097929 - RNA, 19 nt, Artificial Sequence
  Description of Artificial Sequence: Synthetic oligonucleotide
  Antisense strand to SEQ ID NO: 1097928
cuucuuagcucuaucgcca

SEQ ID NO: 1097930 - RNA, 19 nt, Artificial Sequence
  Description of Artificial Sequence: Synthetic oligonucleotide
  Sense strand starting at position 2614 of SEQ ID NO: 915676
aaguuccugucccggagaa

SEQ ID NO: 1097931 - RNA, 19 nt, Artificial Sequence
  Description of Artificial Sequence: Synthetic oligonucleotide
  Antisense strand to SEQ ID NO: 1097930
uucuccgggacaggaacuu

SEQ ID NO: 1097932 - RNA, 19 nt, Artificial Sequence
  Description of Artificial Sequence: Synthetic oligonucleotide
  Sense strand starting at position 3467 of SEQ ID NO: 915676
guguaacacucccugcgaa

SEQ ID NO: 1097933 - RNA, 19 nt, Artificial Sequence
  Description of Artificial Sequence: Synthetic oligonucleotide
  Antisense strand to SEQ ID NO: 1097932
uucgcagggaguguuacac

SEQ ID NO: 1097934 - RNA, 19 nt, Artificial Sequence
  Description of Artificial Sequence: Synthetic oligonucleotide
  Sense strand starting at position 3501 of SEQ ID NO: 915676
uccugaggucggcgaaacu

SEQ ID NO: 1097935 - RNA, 19 nt, Artificial Sequence
  Description of Artificial Sequence: Synthetic oligonucleotide
  Antisense strand to SEQ ID NO: 1097934
aguuucgccgaccucagga

SEQ ID NO: 1097936 - RNA, 19 nt, Artificial Sequence
  Description of Artificial Sequence: Synthetic oligonucleotide
  Sense strand starting at position 3701 of SEQ ID NO: 915676
gaacuauaaugccgugaag

SEQ ID NO: 1097937 - RNA, 19 nt, Artificial Sequence
  Description of Artificial Sequence: Synthetic oligonucleotide
  Antisense strand to SEQ ID NO: 1097936
cuucacggcauuauaguuc

SEQ ID NO: 1097938 - RNA, 19 nt, Artificial Sequence
  Description of Artificial Sequence: Synthetic oligonucleotide
  Sense strand starting at position 3703 of SEQ ID NO: 915676
acuauaaugccgugaaggu

SEQ ID NO: 1097939 - RNA, 19 nt, Artificial Sequence
  Description of Artificial Sequence: Synthetic oligonucleotide
  Antisense strand to SEQ ID NO: 1097938
accuucacggcauuauagu

SEQ ID NO: 1097940 - RNA, 19 nt, Artificial Sequence
  Description of Artificial Sequence: Synthetic oligonucleotide
  Sense strand starting at position 3704 of SEQ ID NO: 915676
cuauaaugccgugaagguc

SEQ ID NO: 1097941 - RNA, 19 nt, Artificial Sequence
  Description of Artificial Sequence: Synthetic oligonucleotide
  Antisense strand to SEQ ID NO: 1097940
gaccuucacggcauuauag

SEQ ID NO: 1097942 - RNA, 19 nt, Artificial Sequence
  Description of Artificial Sequence: Synthetic oligonucleotide
  Sense strand starting at position 3782 of SEQ ID NO: 915676
guggaaugguucugcacug

SEQ ID NO: 1097943 - RNA, 19 nt, Artificial Sequence
  Description of Artificial Sequence: Synthetic oligonucleotide
  Antisense strand to SEQ ID NO: 1097942
cagugcagaaccauuccac

SEQ ID NO: 1097944 - RNA, 19 nt, Artificial Sequence
  Description of Artificial Sequence: Synthetic oligonucleotide
  Sense strand starting at position 3824 of SEQ ID NO: 915676
cccugugcacacuauuaga

SEQ ID NO: 1097945 - RNA, 19 nt, Artificial Sequence
  Description of Artificial Sequence: Synthetic oligonucleotide
  Antisense strand to SEQ ID NO: 1097944
ucuaauagugugcacaggg

SEQ ID NO: 1097946 - RNA, 19 nt, Artificial Sequence
  Description of Artificial Sequence: Synthetic oligonucleotide
  Sense strand starting at position 3827 of SEQ ID NO: 915676
ugugcacacuauuagaaga

SEQ ID NO: 1097947 - RNA, 19 nt, Artificial Sequence
  Description of Artificial Sequence: Synthetic oligonucleotide
  Antisense strand to SEQ ID NO: 1097946
ucuucuaauagugugcaca

SEQ ID NO: 1097948 - RNA, 19 nt, Artificial Sequence
  Description of Artificial Sequence: Synthetic oligonucleotide
  Sense strand starting at position 3852 of SEQ ID NO: 915676
gcguuaaggcucccucuca

SEQ ID NO: 1097949 - RNA, 19 nt, Artificial Sequence
  Description of Artificial Sequence: Synthetic oligonucleotide
  Antisense strand to SEQ ID NO: 1097948
ugagagggagccuuaacgc

SEQ ID NO: 1097950 - RNA, 19 nt, Artificial Sequence
  Description of Artificial Sequence: Synthetic oligonucleotide
  Sense strand starting at position 3867 of SEQ ID NO: 915676
cucaguccugccgguaaga

SEQ ID NO: 1097951 - RNA, 19 nt, Artificial Sequence
  Description of Artificial Sequence: Synthetic oligonucleotide
  Antisense strand to SEQ ID NO: 1097950
ucuuaccggcaggacugag

SEQ ID NO: 1097952 - RNA, 19 nt, Artificial Sequence
  Description of Artificial Sequence: Synthetic oligonucleotide
  Sense strand starting at position 3869 of SEQ ID NO: 915676
caguccugccgguaagaau

SEQ ID NO: 1097953 - RNA, 19 nt, Artificial Sequence
  Description of Artificial Sequence: Synthetic oligonucleotide
  Antisense strand to SEQ ID NO: 1097952
auucuuaccggcaggacug

SEQ ID NO: 1097954 - RNA, 19 nt, Artificial Sequence
  Description of Artificial Sequence: Synthetic oligonucleotide
  Sense strand starting at position 3952 of SEQ ID NO: 915676
gggucuagaucucuaagau

SEQ ID NO: 1097955 - RNA, 19 nt, Artificial Sequence
  Description of Artificial Sequence: Synthetic oligonucleotide
  Antisense strand to SEQ ID NO: 1097954
aucuuagagaucuagaccc

SEQ ID NO: 1097956 - RNA, 19 nt, Artificial Sequence
  Description of Artificial Sequence: Synthetic oligonucleotide
  Sense strand starting at position 3978 of SEQ ID NO: 915676
agcuuauuccacuguugag

SEQ ID NO: 1097957 - RNA, 19 nt, Artificial Sequence
  Description of Artificial Sequence: Synthetic oligonucleotide
  Antisense strand to SEQ ID NO: 1097956
cucaacaguggaauaagcu

SEQ ID NO: 1097958 - RNA, 19 nt, Artificial Sequence
  Description of Artificial Sequence: Synthetic oligonucleotide
  Sense strand starting at position 1 of SEQ ID NO: 915677
guugcucacuguuauagau

SEQ ID NO: 1097959 - RNA, 19 nt, Artificial Sequence
  Description of Artificial Sequence: Synthetic oligonucleotide
  Antisense strand to SEQ ID NO: 1097958
aucuauaacagugagcaac

SEQ ID NO: 1097960 - RNA, 19 nt, Artificial Sequence
  Description of Artificial Sequence: Synthetic oligonucleotide
  Sense strand starting at position 8 of SEQ ID NO: 915677
acuguuauagauugaaguu

SEQ ID NO: 1097961 - RNA, 19 nt, Artificial Sequence
  Description of Artificial Sequence: Synthetic oligonucleotide
  Antisense strand to SEQ ID NO: 1097960
aacuucaaucuauaacagu

SEQ ID NO: 1097962 - RNA, 19 nt, Artificial Sequence
  Description of Artificial Sequence: Synthetic oligonucleotide
  Sense strand starting at position 55 of SEQ ID NO: 915677
agccuuaagugauguaaca

SEQ ID NO: 1097963 - RNA, 19 nt, Artificial Sequence
  Description of Artificial Sequence: Synthetic oligonucleotide
  Antisense strand to SEQ ID NO: 1097962
uguuacaucacuuaaggcu

SEQ ID NO: 1097964 - RNA, 19 nt, Artificial Sequence
  Description of Artificial Sequence: Synthetic oligonucleotide
  Sense strand starting at position 106 of SEQ ID NO: 915677
cagauacgcuguucuaaca

SEQ ID NO: 1097965 - RNA, 19 nt, Artificial Sequence
  Description of Artificial Sequence: Synthetic oligonucleotide
  Antisense strand to SEQ ID NO: 1097964
uguuagaacagcguaucug

SEQ ID NO: 1097966 - RNA, 19 nt, Artificial Sequence
  Description of Artificial Sequence: Synthetic oligonucleotide
  Sense strand starting at position 139 of SEQ ID NO: 915677
ggagcucauucugaccgaa

SEQ ID NO: 1097967 - RNA, 19 nt, Artificial Sequence
  Description of Artificial Sequence: Synthetic oligonucleotide
  Antisense strand to SEQ ID NO: 1097966
uucggucagaaugagcucc

SEQ ID NO: 1097968 - RNA, 19 nt, Artificial Sequence
  Description of Artificial Sequence: Synthetic oligonucleotide
  Sense strand starting at position 143 of SEQ ID NO: 915677
cucauucugaccgaacgua

SEQ ID NO: 1097969 - RNA, 19 nt, Artificial Sequence
  Description of Artificial Sequence: Synthetic oligonucleotide
  Antisense strand to SEQ ID NO: 1097968
uacguucggucagaaugag

SEQ ID NO: 1097970 - RNA, 19 nt, Artificial Sequence
  Description of Artificial Sequence: Synthetic oligonucleotide
  Sense strand starting at position 189 of SEQ ID NO: 915677
gucagugacuuacuauaau

SEQ ID NO: 1097971 - RNA, 19 nt, Artificial Sequence
  Description of Artificial Sequence: Synthetic oligonucleotide
  Antisense strand to SEQ ID NO: 1097970
auuauaguaagucacugac

SEQ ID NO: 1097972 - RNA, 19 nt, Artificial Sequence
  Description of Artificial Sequence: Synthetic oligonucleotide
  Sense strand starting at position 207 of SEQ ID NO: 915677
ucacaauguggcuacgaau

SEQ ID NO: 1097973 - RNA, 19 nt, Artificial Sequence
  Description of Artificial Sequence: Synthetic oligonucleotide
  Antisense strand to SEQ ID NO: 1097972
auucguagccacauuguga

SEQ ID NO: 1097974 - RNA, 19 nt, Artificial Sequence
  Description of Artificial Sequence: Synthetic oligonucleotide
  Sense strand starting at position 224 of SEQ ID NO: 915677
auagcugugucaggcagaa

SEQ ID NO: 1097975 - RNA, 19 nt, Artificial Sequence
  Description of Artificial Sequence: Synthetic oligonucleotide
  Antisense strand to SEQ ID NO: 1097974
uucugccugacacagcuau

SEQ ID NO: 1097976 - RNA, 19 nt, Artificial Sequence
  Description of Artificial Sequence: Synthetic oligonucleotide
  Sense strand starting at position 226 of SEQ ID NO: 915677
agcugugucaggcagaagu

SEQ ID NO: 1097977 - RNA, 19 nt, Artificial Sequence
  Description of Artificial Sequence: Synthetic oligonucleotide
  Antisense strand to SEQ ID NO: 1097976
acuucugccugacacagcu

SEQ ID NO: 1097978 - RNA, 19 nt, Artificial Sequence
  Description of Artificial Sequence: Synthetic oligonucleotide
  Sense strand starting at position 228 of SEQ ID NO: 915677
cugugucaggcagaaguua

SEQ ID NO: 1097979 - RNA, 19 nt, Artificial Sequence
  Description of Artificial Sequence: Synthetic oligonucleotide
  Antisense strand to SEQ ID NO: 1097978
uaacuucugccugacacag

SEQ ID NO: 1097980 - RNA, 19 nt, Artificial Sequence
  Description of Artificial Sequence: Synthetic oligonucleotide
  Sense strand starting at position 277 of SEQ ID NO: 915677
cccugauguaauggacaag

SEQ ID NO: 1097981 - RNA, 19 nt, Artificial Sequence
  Description of Artificial Sequence: Synthetic oligonucleotide
  Antisense strand to SEQ ID NO: 1097980
cuuguccauuacaucaggg

SEQ ID NO: 1097982 - RNA, 19 nt, Artificial Sequence
  Description of Artificial Sequence: Synthetic oligonucleotide
  Sense strand starting at position 288 of SEQ ID NO: 915677
uggacaagauguguuaaga

SEQ ID NO: 1097983 - RNA, 19 nt, Artificial Sequence
  Description of Artificial Sequence: Synthetic oligonucleotide
  Antisense strand to SEQ ID NO: 1097982
ucuuaacacaucuugucca

SEQ ID NO: 1097984 - RNA, 19 nt, Artificial Sequence
  Description of Artificial Sequence: Synthetic oligonucleotide
  Sense strand starting at position 461 of SEQ ID NO: 915677
caggcucccugagguaauu

SEQ ID NO: 1097985 - RNA, 19 nt, Artificial Sequence
  Description of Artificial Sequence: Synthetic oligonucleotide
  Antisense strand to SEQ ID NO: 1097984
aauuaccucagggagccug

SEQ ID NO: 1097986 - RNA, 19 nt, Artificial Sequence
  Description of Artificial Sequence: Synthetic oligonucleotide
  Sense strand starting at position 1151 of SEQ ID NO: 915677
cuguccugccuauggagua

SEQ ID NO: 1097987 - RNA, 19 nt, Artificial Sequence
  Description of Artificial Sequence: Synthetic oligonucleotide
  Antisense strand to SEQ ID NO: 1097986
uacuccauaggcaggacag

SEQ ID NO: 1097988 - RNA, 19 nt, Artificial Sequence
  Description of Artificial Sequence: Synthetic oligonucleotide
  Sense strand starting at position 1196 of SEQ ID NO: 915677
gcaccuaauuacuagagaa

SEQ ID NO: 1097989 - RNA, 19 nt, Artificial Sequence
  Description of Artificial Sequence: Synthetic oligonucleotide
  Antisense strand to SEQ ID NO: 1097988
uucucuaguaauuaggugc

SEQ ID NO: 1097990 - RNA, 19 nt, Artificial Sequence
  Description of Artificial Sequence: Synthetic oligonucleotide
  Sense strand starting at position 2109 of SEQ ID NO: 915677
cggcgagaaucugccuaga

SEQ ID NO: 1097991 - RNA, 19 nt, Artificial Sequence
  Description of Artificial Sequence: Synthetic oligonucleotide
  Antisense strand to SEQ ID NO: 1097990
ucuaggcagauucucgccg

SEQ ID NO: 1097992 - RNA, 19 nt, Artificial Sequence
  Description of Artificial Sequence: Synthetic oligonucleotide
  Sense strand starting at position 2226 of SEQ ID NO: 915677
cggaccuauucggacugau

SEQ ID NO: 1097993 - RNA, 19 nt, Artificial Sequence
  Description of Artificial Sequence: Synthetic oligonucleotide
  Antisense strand to SEQ ID NO: 1097992
aucaguccgaauagguccg

SEQ ID NO: 1097994 - RNA, 19 nt, Artificial Sequence
  Description of Artificial Sequence: Synthetic oligonucleotide
  Sense strand starting at position 3768 of SEQ ID NO: 915677
auauaagcugcuuauaguu

SEQ ID NO: 1097995 - RNA, 19 nt, Artificial Sequence
  Description of Artificial Sequence: Synthetic oligonucleotide
  Antisense strand to SEQ ID NO: 1097994
aacuauaagcagcuuauau

SEQ ID NO: 1097996 - RNA, 19 nt, Artificial Sequence
  Description of Artificial Sequence: Synthetic oligonucleotide
  Sense strand starting at position 3778 of SEQ ID NO: 915677
cuuauaguuucuugccaca

SEQ ID NO: 1097997 - RNA, 19 nt, Artificial Sequence
  Description of Artificial Sequence: Synthetic oligonucleotide
  Antisense strand to SEQ ID NO: 1097996
uguggcaagaaacuauaag

SEQ ID NO: 1097998 - RNA, 19 nt, Artificial Sequence
  Description of Artificial Sequence: Synthetic oligonucleotide
  Sense strand starting at position 68 of SEQ ID NO: 915678
ugcccugaggcucaguaua

SEQ ID NO: 1097999 - RNA, 19 nt, Artificial Sequence
  Description of Artificial Sequence: Synthetic oligonucleotide
  Antisense strand to SEQ ID NO: 1097998
uauacugagccucagggca

SEQ ID NO: 1098000 - RNA, 19 nt, Artificial Sequence
  Description of Artificial Sequence: Synthetic oligonucleotide
  Sense strand starting at position 70 of SEQ ID NO: 915678
cccugaggcucaguauauu

SEQ ID NO: 1098001 - RNA, 19 nt, Artificial Sequence
  Description of Artificial Sequence: Synthetic oligonucleotide
  Antisense strand to SEQ ID NO: 1098000
aauauacugagccucaggg

SEQ ID NO: 1098002 - RNA, 19 nt, Artificial Sequence
  Description of Artificial Sequence: Synthetic oligonucleotide
  Sense strand starting at position 212 of SEQ ID NO: 915678
ggagugaagucagugggaa

SEQ ID NO: 1098003 - RNA, 19 nt, Artificial Sequence
  Description of Artificial Sequence: Synthetic oligonucleotide
  Antisense strand to SEQ ID NO: 1098002
uucccacugacuucacucc

SEQ ID NO: 1098004 - RNA, 19 nt, Artificial Sequence
  Description of Artificial Sequence: Synthetic oligonucleotide
  Sense strand starting at position 213 of SEQ ID NO: 915678
gagugaagucagugggaaa

SEQ ID NO: 1098005 - RNA, 19 nt, Artificial Sequence
  Description of Artificial Sequence: Synthetic oligonucleotide
  Antisense strand to SEQ ID NO: 1098004
uuucccacugacuucacuc

SEQ ID NO: 1098006 - RNA, 19 nt, Artificial Sequence
  Description of Artificial Sequence: Synthetic oligonucleotide
  Sense strand starting at position 214 of SEQ ID NO: 915678
agugaagucagugggaaac

SEQ ID NO: 1098007 - RNA, 19 nt, Artificial Sequence
  Description of Artificial Sequence: Synthetic oligonucleotide
  Antisense strand to SEQ ID NO: 1098006
guuucccacugacuucacu

SEQ ID NO: 1098008 - RNA, 19 nt, Artificial Sequence
  Description of Artificial Sequence: Synthetic oligonucleotide
  Sense strand starting at position 316 of SEQ ID NO: 915678
gugccaggaaugugggaaa

SEQ ID NO: 1098009 - RNA, 19 nt, Artificial Sequence
  Description of Artificial Sequence: Synthetic oligonucleotide
  Antisense strand to SEQ ID NO: 1098008
uuucccacauuccuggcac

SEQ ID NO: 1098010 - RNA, 19 nt, Artificial Sequence
  Description of Artificial Sequence: Synthetic oligonucleotide
  Sense strand starting at position 455 of SEQ ID NO: 915678
uagggaugcuggcuagaua

SEQ ID NO: 1098011 - RNA, 19 nt, Artificial Sequence
  Description of Artificial Sequence: Synthetic oligonucleotide
  Antisense strand to SEQ ID NO: 1098010
uaucuagccagcaucccua

SEQ ID NO: 1098012 - RNA, 19 nt, Artificial Sequence
  Description of Artificial Sequence: Synthetic oligonucleotide
  Sense strand starting at position 458 of SEQ ID NO: 915678
ggaugcuggcuagauaaau

SEQ ID NO: 1098013 - RNA, 19 nt, Artificial Sequence
  Description of Artificial Sequence: Synthetic oligonucleotide
  Antisense strand to SEQ ID NO: 1098012
auuuaucuagccagcaucc

SEQ ID NO: 1098014 - RNA, 19 nt, Artificial Sequence
  Description of Artificial Sequence: Synthetic oligonucleotide
  Sense strand starting at position 561 of SEQ ID NO: 915678
agccucauuucccagagaa

SEQ ID NO: 1098015 - RNA, 19 nt, Artificial Sequence
  Description of Artificial Sequence: Synthetic oligonucleotide
  Antisense strand to SEQ ID NO: 1098014
uucucugggaaaugaggcu

SEQ ID NO: 1098016 - RNA, 19 nt, Artificial Sequence
  Description of Artificial Sequence: Synthetic oligonucleotide
  Sense strand starting at position 795 of SEQ ID NO: 915678
gcugcagcgauguucugaa

SEQ ID NO: 1098017 - RNA, 19 nt, Artificial Sequence
  Description of Artificial Sequence: Synthetic oligonucleotide
  Antisense strand to SEQ ID NO: 1098016
uucagaacaucgcugcagc

SEQ ID NO: 1098018 - RNA, 19 nt, Artificial Sequence
  Description of Artificial Sequence: Synthetic oligonucleotide
  Sense strand starting at position 809 of SEQ ID NO: 915678
cugaaucugugauccuuga

SEQ ID NO: 1098019 - RNA, 19 nt, Artificial Sequence
  Description of Artificial Sequence: Synthetic oligonucleotide
  Antisense strand to SEQ ID NO: 1098018
ucaaggaucacagauucag

SEQ ID NO: 1098020 - RNA, 19 nt, Artificial Sequence
  Description of Artificial Sequence: Synthetic oligonucleotide
  Sense strand starting at position 813 of SEQ ID NO: 915678
aucugugauccuugaaacu

SEQ ID NO: 1098021 - RNA, 19 nt, Artificial Sequence
  Description of Artificial Sequence: Synthetic oligonucleotide
  Antisense strand to SEQ ID NO: 1098020
aguuucaaggaucacagau

SEQ ID NO: 1098022 - RNA, 19 nt, Artificial Sequence
  Description of Artificial Sequence: Synthetic oligonucleotide
  Sense strand starting at position 854 of SEQ ID NO: 915678
auccauugagggugauaug

SEQ ID NO: 1098023 - RNA, 19 nt, Artificial Sequence
  Description of Artificial Sequence: Synthetic oligonucleotide
  Antisense strand to SEQ ID NO: 1098022
cauaucacccucaauggau

SEQ ID NO: 1098024 - RNA, 19 nt, Artificial Sequence
  Description of Artificial Sequence: Synthetic oligonucleotide
  Sense strand starting at position 993 of SEQ ID NO: 915678
gacugaucagacugugaug

SEQ ID NO: 1098025 - RNA, 19 nt, Artificial Sequence
  Description of Artificial Sequence: Synthetic oligonucleotide
  Antisense strand to SEQ ID NO: 1098024
caucacagucugaucaguc

SEQ ID NO: 1098026 - RNA, 19 nt, Artificial Sequence
  Description of Artificial Sequence: Synthetic oligonucleotide
  Sense strand starting at position 1061 of SEQ ID NO: 915678
cuuguucugccagagguaa

SEQ ID NO: 1098027 - RNA, 19 nt, Artificial Sequence
  Description of Artificial Sequence: Synthetic oligonucleotide
  Antisense strand to SEQ ID NO: 1098026
uuaccucuggcagaacaag

SEQ ID NO: 1098028 - RNA, 19 nt, Artificial Sequence
  Description of Artificial Sequence: Synthetic oligonucleotide
  Sense strand starting at position 1063 of SEQ ID NO: 915678
uguucugccagagguaaga

SEQ ID NO: 1098029 - RNA, 19 nt, Artificial Sequence
  Description of Artificial Sequence: Synthetic oligonucleotide
  Antisense strand to SEQ ID NO: 1098028
ucuuaccucuggcagaaca

SEQ ID NO: 1098030 - RNA, 19 nt, Artificial Sequence
  Description of Artificial Sequence: Synthetic oligonucleotide
  Sense strand starting at position 1410 of SEQ ID NO: 915678
gcguuaucagcgcuucuua

SEQ ID NO: 1098031 - RNA, 19 nt, Artificial Sequence
  Description of Artificial Sequence: Synthetic oligonucleotide
  Antisense strand to SEQ ID NO: 1098030
uaagaagcgcugauaacgc

SEQ ID NO: 1098032 - RNA, 19 nt, Artificial Sequence
  Description of Artificial Sequence: Synthetic oligonucleotide
  Sense strand starting at position 1498 of SEQ ID NO: 915678
ccaggaggucccuguuauc

SEQ ID NO: 1098033 - RNA, 19 nt, Artificial Sequence
  Description of Artificial Sequence: Synthetic oligonucleotide
  Antisense strand to SEQ ID NO: 1098032
gauaacagggaccuccugg

SEQ ID NO: 1098034 - RNA, 19 nt, Artificial Sequence
  Description of Artificial Sequence: Synthetic oligonucleotide
  Sense strand starting at position 1621 of SEQ ID NO: 915678
gcgccaaauacauggagau

SEQ ID NO: 1098035 - RNA, 19 nt, Artificial Sequence
  Description of Artificial Sequence: Synthetic oligonucleotide
  Antisense strand to SEQ ID NO: 1098034
aucuccauguauuuggcgc

SEQ ID NO: 1098036 - RNA, 19 nt, Artificial Sequence
  Description of Artificial Sequence: Synthetic oligonucleotide
  Sense strand starting at position 2344 of SEQ ID NO: 915678
ucucauaacccgggagcaa

SEQ ID NO: 1098037 - RNA, 19 nt, Artificial Sequence
  Description of Artificial Sequence: Synthetic oligonucleotide
  Antisense strand to SEQ ID NO: 1098036
uugcucccggguuaugaga

SEQ ID NO: 1098038 - RNA, 19 nt, Artificial Sequence
  Description of Artificial Sequence: Synthetic oligonucleotide
  Sense strand starting at position 2533 of SEQ ID NO: 915678
auaaucguagcauauacau

SEQ ID NO: 1098039 - RNA, 19 nt, Artificial Sequence
  Description of Artificial Sequence: Synthetic oligonucleotide
  Antisense strand to SEQ ID NO: 1098038
auguauaugcuacgauuau

SEQ ID NO: 1098040 - RNA, 19 nt, Artificial Sequence
  Description of Artificial Sequence: Synthetic oligonucleotide
  Sense strand starting at position 2623 of SEQ ID NO: 915678
ugacauauaugcuccaugu

SEQ ID NO: 1098041 - RNA, 19 nt, Artificial Sequence
  Description of Artificial Sequence: Synthetic oligonucleotide
  Antisense strand to SEQ ID NO: 1098040
acauggagcauauauguca

SEQ ID NO: 1098042 - RNA, 19 nt, Artificial Sequence
  Description of Artificial Sequence: Synthetic oligonucleotide
  Sense strand starting at position 2627 of SEQ ID NO: 915678
auauaugcuccauguaaga

SEQ ID NO: 1098043 - RNA, 19 nt, Artificial Sequence
  Description of Artificial Sequence: Synthetic oligonucleotide
  Antisense strand to SEQ ID NO: 1098042
ucuuacauggagcauauau

SEQ ID NO: 1098044 - RNA, 19 nt, Artificial Sequence
  Description of Artificial Sequence: Synthetic oligonucleotide
  Sense strand starting at position 2805 of SEQ ID NO: 915678
agaagcgugagcuaacuuu

SEQ ID NO: 1098045 - RNA, 19 nt, Artificial Sequence
  Description of Artificial Sequence: Synthetic oligonucleotide
  Antisense strand to SEQ ID NO: 1098044
aaaguuagcucacgcuucu

SEQ ID NO: 1098046 - RNA, 19 nt, Artificial Sequence
  Description of Artificial Sequence: Synthetic oligonucleotide
  Sense strand starting at position 2809 of SEQ ID NO: 915678
gcgugagcuaacuuugcca

SEQ ID NO: 1098047 - RNA, 19 nt, Artificial Sequence
  Description of Artificial Sequence: Synthetic oligonucleotide
  Antisense strand to SEQ ID NO: 1098046
uggcaaaguuagcucacgc

SEQ ID NO: 1098048 - RNA, 19 nt, Artificial Sequence
  Description of Artificial Sequence: Synthetic oligonucleotide
  Sense strand starting at position 2948 of SEQ ID NO: 915678
acugaaaucuagucccagu

SEQ ID NO: 1098049 - RNA, 19 nt, Artificial Sequence
  Description of Artificial Sequence: Synthetic oligonucleotide
  Antisense strand to SEQ ID NO: 1098048
acugggacuagauuucagu

SEQ ID NO: 1098050 - RNA, 19 nt, Artificial Sequence
  Description of Artificial Sequence: Synthetic oligonucleotide
  Sense strand starting at position 2980 of SEQ ID NO: 915678
ugcuguuagauugggugaa

SEQ ID NO: 1098051 - RNA, 19 nt, Artificial Sequence
  Description of Artificial Sequence: Synthetic oligonucleotide
  Antisense strand to SEQ ID NO: 1098050
uucacccaaucuaacagca

SEQ ID NO: 1098052 - RNA, 19 nt, Artificial Sequence
  Description of Artificial Sequence: Synthetic oligonucleotide
  Sense strand starting at position 2982 of SEQ ID NO: 915678
cuguuagauugggugaauc

SEQ ID NO: 1098053 - RNA, 19 nt, Artificial Sequence
  Description of Artificial Sequence: Synthetic oligonucleotide
  Antisense strand to SEQ ID NO: 1098052
gauucacccaaucuaacag

SEQ ID NO: 1098054 - RNA, 19 nt, Artificial Sequence
  Description of Artificial Sequence: Synthetic oligonucleotide
  Sense strand starting at position 2984 of SEQ ID NO: 915678
guuagauugggugaaucac

SEQ ID NO: 1098055 - RNA, 19 nt, Artificial Sequence
  Description of Artificial Sequence: Synthetic oligonucleotide
  Antisense strand to SEQ ID NO: 1098054
gugauucacccaaucuaac

SEQ ID NO: 1098056 - RNA, 19 nt, Artificial Sequence
  Description of Artificial Sequence: Synthetic oligonucleotide
  Sense strand starting at position 3448 of SEQ ID NO: 915678
gggugauaguccucuucug

SEQ ID NO: 1098057 - RNA, 19 nt, Artificial Sequence
  Description of Artificial Sequence: Synthetic oligonucleotide
  Antisense strand to SEQ ID NO: 1098056
cagaagaggacuaucaccc

SEQ ID NO: 1098058 - RNA, 19 nt, Artificial Sequence
  Description of Artificial Sequence: Synthetic oligonucleotide
  Sense strand starting at position 3457 of SEQ ID NO: 915678
uccucuucuggugacagaa

SEQ ID NO: 1098059 - RNA, 19 nt, Artificial Sequence
  Description of Artificial Sequence: Synthetic oligonucleotide
  Antisense strand to SEQ ID NO: 1098058
uucugucaccagaagagga

SEQ ID NO: 1098060 - RNA, 19 nt, Artificial Sequence
  Description of Artificial Sequence: Synthetic oligonucleotide
  Sense strand starting at position 3727 of SEQ ID NO: 915678
gugugcugccuagagagaa

SEQ ID NO: 1098061 - RNA, 19 nt, Artificial Sequence
  Description of Artificial Sequence: Synthetic oligonucleotide
  Antisense strand to SEQ ID NO: 1098060
uucucucuaggcagcacac

SEQ ID NO: 1098062 - RNA, 19 nt, Artificial Sequence
  Description of Artificial Sequence: Synthetic oligonucleotide
  Sense strand starting at position 3742 of SEQ ID NO: 915678
agaacacuggcuugagagu

SEQ ID NO: 1098063 - RNA, 19 nt, Artificial Sequence
  Description of Artificial Sequence: Synthetic oligonucleotide
  Antisense strand to SEQ ID NO: 1098062
acucucaagccaguguucu

SEQ ID NO: 1098064 - RNA, 19 nt, Artificial Sequence
  Description of Artificial Sequence: Synthetic oligonucleotide
  Sense strand starting at position 3743 of SEQ ID NO: 915678
gaacacuggcuugagaguu

SEQ ID NO: 1098065 - RNA, 19 nt, Artificial Sequence
  Description of Artificial Sequence: Synthetic oligonucleotide
  Antisense strand to SEQ ID NO: 1098064
aacucucaagccaguguuc

SEQ ID NO: 1098066 - RNA, 19 nt, Artificial Sequence
  Description of Artificial Sequence: Synthetic oligonucleotide
  Sense strand starting at position 3805 of SEQ ID NO: 915678
acuacugugguguauaauu

SEQ ID NO: 1098067 - RNA, 19 nt, Artificial Sequence
  Description of Artificial Sequence: Synthetic oligonucleotide
  Antisense strand to SEQ ID NO: 1098066
aauuauacaccacaguagu

SEQ ID NO: 1098068 - RNA, 19 nt, Artificial Sequence
  Description of Artificial Sequence: Synthetic oligonucleotide
  Sense strand starting at position 3807 of SEQ ID NO: 915678
uacugugguguauaauuga

SEQ ID NO: 1098069 - RNA, 19 nt, Artificial Sequence
  Description of Artificial Sequence: Synthetic oligonucleotide
  Antisense strand to SEQ ID NO: 1098068
ucaauuauacaccacagua

SEQ ID NO: 1098070 - RNA, 19 nt, Artificial Sequence
  Description of Artificial Sequence: Synthetic oligonucleotide
  Sense strand starting at position 3814 of SEQ ID NO: 915678
guguauaauugagcacauc

SEQ ID NO: 1098071 - RNA, 19 nt, Artificial Sequence
  Description of Artificial Sequence: Synthetic oligonucleotide
  Antisense strand to SEQ ID NO: 1098070
gaugugcucaauuauacac

SEQ ID NO: 1098072 - RNA, 19 nt, Artificial Sequence
  Description of Artificial Sequence: Synthetic oligonucleotide
  Sense strand starting at position 3815 of SEQ ID NO: 915678
uguauaauugagcacauca

SEQ ID NO: 1098073 - RNA, 19 nt, Artificial Sequence
  Description of Artificial Sequence: Synthetic oligonucleotide
  Antisense strand to SEQ ID NO: 1098072
ugaugugcucaauuauaca

SEQ ID NO: 1098074 - RNA, 19 nt, Artificial Sequence
  Description of Artificial Sequence: Synthetic oligonucleotide
  Sense strand starting at position 3929 of SEQ ID NO: 915678
acaucaccugagggauagu

SEQ ID NO: 1098075 - RNA, 19 nt, Artificial Sequence
  Description of Artificial Sequence: Synthetic oligonucleotide
  Antisense strand to SEQ ID NO: 1098074
acuaucccucaggugaugu

SEQ ID NO: 1098076 - RNA, 19 nt, Artificial Sequence
  Description of Artificial Sequence: Synthetic oligonucleotide
  Sense strand starting at position 3954 of SEQ ID NO: 915678
acagaaauuugccaaguca

SEQ ID NO: 1098077 - RNA, 19 nt, Artificial Sequence
  Description of Artificial Sequence: Synthetic oligonucleotide
  Antisense strand to SEQ ID NO: 1098076
ugacuuggcaaauuucugu

SEQ ID NO: 1098078 - RNA, 19 nt, Artificial Sequence
  Description of Artificial Sequence: Synthetic oligonucleotide
  Sense strand starting at position 1 of SEQ ID NO: 915679
cuucuaauuccugguugac

SEQ ID NO: 1098079 - RNA, 19 nt, Artificial Sequence
  Description of Artificial Sequence: Synthetic oligonucleotide
  Antisense strand to SEQ ID NO: 1098078
gucaaccaggaauuagaag

SEQ ID NO: 1098080 - RNA, 19 nt, Artificial Sequence
  Description of Artificial Sequence: Synthetic oligonucleotide
  Sense strand starting at position 3 of SEQ ID NO: 915679
ucuaauuccugguugacag

SEQ ID NO: 1098081 - RNA, 19 nt, Artificial Sequence
  Description of Artificial Sequence: Synthetic oligonucleotide
  Antisense strand to SEQ ID NO: 1098080
cugucaaccaggaauuaga

SEQ ID NO: 1098082 - RNA, 19 nt, Artificial Sequence
  Description of Artificial Sequence: Synthetic oligonucleotide
  Sense strand starting at position 4 of SEQ ID NO: 915679
cuaauuccugguugacaga

SEQ ID NO: 1098083 - RNA, 19 nt, Artificial Sequence
  Description of Artificial Sequence: Synthetic oligonucleotide
  Antisense strand to SEQ ID NO: 1098082
ucugucaaccaggaauuag

SEQ ID NO: 1098084 - RNA, 19 nt, Artificial Sequence
  Description of Artificial Sequence: Synthetic oligonucleotide
  Sense strand starting at position 68 of SEQ ID NO: 915679
gugacuaaguaucuggaua

SEQ ID NO: 1098085 - RNA, 19 nt, Artificial Sequence
  Description of Artificial Sequence: Synthetic oligonucleotide
  Antisense strand to SEQ ID NO: 1098084
uauccagauacuuagucac

SEQ ID NO: 1098086 - RNA, 19 nt, Artificial Sequence
  Description of Artificial Sequence: Synthetic oligonucleotide
  Sense strand starting at position 69 of SEQ ID NO: 915679
ugacuaaguaucuggauag

SEQ ID NO: 1098087 - RNA, 19 nt, Artificial Sequence
  Description of Artificial Sequence: Synthetic oligonucleotide
  Antisense strand to SEQ ID NO: 1098086
cuauccagauacuuaguca

SEQ ID NO: 1098088 - RNA, 19 nt, Artificial Sequence
  Description of Artificial Sequence: Synthetic oligonucleotide
  Sense strand starting at position 132 of SEQ ID NO: 915679
aaggaaguggcuuaucauu

SEQ ID NO: 1098089 - RNA, 19 nt, Artificial Sequence
  Description of Artificial Sequence: Synthetic oligonucleotide
  Antisense strand to SEQ ID NO: 1098088
aaugauaagccacuuccuu

SEQ ID NO: 1098090 - RNA, 19 nt, Artificial Sequence
  Description of Artificial Sequence: Synthetic oligonucleotide
  Sense strand starting at position 174 of SEQ ID NO: 915679
uccuauauacagugauaug

SEQ ID NO: 1098091 - RNA, 19 nt, Artificial Sequence
  Description of Artificial Sequence: Synthetic oligonucleotide
  Antisense strand to SEQ ID NO: 1098090
cauaucacuguauauagga

SEQ ID NO: 1098092 - RNA, 19 nt, Artificial Sequence
  Description of Artificial Sequence: Synthetic oligonucleotide
  Sense strand starting at position 183 of SEQ ID NO: 915679
cagugauaugucuggcaga

SEQ ID NO: 1098093 - RNA, 19 nt, Artificial Sequence
  Description of Artificial Sequence: Synthetic oligonucleotide
  Antisense strand to SEQ ID NO: 1098092
ucugccagacauaucacug

SEQ ID NO: 1098094 - RNA, 19 nt, Artificial Sequence
  Description of Artificial Sequence: Synthetic oligonucleotide
  Sense strand starting at position 188 of SEQ ID NO: 915679
auaugucuggcagagcuau

SEQ ID NO: 1098095 - RNA, 19 nt, Artificial Sequence
  Description of Artificial Sequence: Synthetic oligonucleotide
  Antisense strand to SEQ ID NO: 1098094
auagcucugccagacauau

SEQ ID NO: 1098096 - RNA, 19 nt, Artificial Sequence
  Description of Artificial Sequence: Synthetic oligonucleotide
  Sense strand starting at position 196 of SEQ ID NO: 915679
ggcagagcuauugacaauu

SEQ ID NO: 1098097 - RNA, 19 nt, Artificial Sequence
  Description of Artificial Sequence: Synthetic oligonucleotide
  Antisense strand to SEQ ID NO: 1098096
aauugucaauagcucugcc

SEQ ID NO: 1098098 - RNA, 19 nt, Artificial Sequence
  Description of Artificial Sequence: Synthetic oligonucleotide
  Sense strand starting at position 242 of SEQ ID NO: 915679
gagcauuugcucuguguua

SEQ ID NO: 1098099 - RNA, 19 nt, Artificial Sequence
  Description of Artificial Sequence: Synthetic oligonucleotide
  Antisense strand to SEQ ID NO: 1098098
uaacacagagcaaaugcuc

SEQ ID NO: 1098100 - RNA, 19 nt, Artificial Sequence
  Description of Artificial Sequence: Synthetic oligonucleotide
  Sense strand starting at position 244 of SEQ ID NO: 915679
gcauuugcucuguguuaga

SEQ ID NO: 1098101 - RNA, 19 nt, Artificial Sequence
  Description of Artificial Sequence: Synthetic oligonucleotide
  Antisense strand to SEQ ID NO: 1098100
ucuaacacagagcaaaugc

SEQ ID NO: 1098102 - RNA, 19 nt, Artificial Sequence
  Description of Artificial Sequence: Synthetic oligonucleotide
  Sense strand starting at position 260 of SEQ ID NO: 915679
agaucuugugcucaauaag

SEQ ID NO: 1098103 - RNA, 19 nt, Artificial Sequence
  Description of Artificial Sequence: Synthetic oligonucleotide
  Antisense strand to SEQ ID NO: 1098102
cuuauugagcacaagaucu

SEQ ID NO: 1098104 - RNA, 19 nt, Artificial Sequence
  Description of Artificial Sequence: Synthetic oligonucleotide
  Sense strand starting at position 292 of SEQ ID NO: 915679
agcauaagacaugguuucu

SEQ ID NO: 1098105 - RNA, 19 nt, Artificial Sequence
  Description of Artificial Sequence: Synthetic oligonucleotide
  Antisense strand to SEQ ID NO: 1098104
agaaaccaugucuuaugcu

SEQ ID NO: 1098106 - RNA, 19 nt, Artificial Sequence
  Description of Artificial Sequence: Synthetic oligonucleotide
  Sense strand starting at position 455 of SEQ ID NO: 915679
ggagguagagaugguuuca

SEQ ID NO: 1098107 - RNA, 19 nt, Artificial Sequence
  Description of Artificial Sequence: Synthetic oligonucleotide
  Antisense strand to SEQ ID NO: 1098106
ugaaaccaucucuaccucc

SEQ ID NO: 1098108 - RNA, 19 nt, Artificial Sequence
  Description of Artificial Sequence: Synthetic oligonucleotide
  Sense strand starting at position 631 of SEQ ID NO: 915679
ugagcuagcucaucaaaga

SEQ ID NO: 1098109 - RNA, 19 nt, Artificial Sequence
  Description of Artificial Sequence: Synthetic oligonucleotide
  Antisense strand to SEQ ID NO: 1098108
ucuuugaugagcuagcuca

SEQ ID NO: 1098110 - RNA, 19 nt, Artificial Sequence
  Description of Artificial Sequence: Synthetic oligonucleotide
  Sense strand starting at position 632 of SEQ ID NO: 915679
gagcuagcucaucaaagag

SEQ ID NO: 1098111 - RNA, 19 nt, Artificial Sequence
  Description of Artificial Sequence: Synthetic oligonucleotide
  Antisense strand to SEQ ID NO: 1098110
cucuuugaugagcuagcuc

SEQ ID NO: 1098112 - RNA, 19 nt, Artificial Sequence
  Description of Artificial Sequence: Synthetic oligonucleotide
  Sense strand starting at position 656 of SEQ ID NO: 915679
acagguaugcauggagcua

SEQ ID NO: 1098113 - RNA, 19 nt, Artificial Sequence
  Description of Artificial Sequence: Synthetic oligonucleotide
  Antisense strand to SEQ ID NO: 1098112
uagcuccaugcauaccugu

SEQ ID NO: 1098114 - RNA, 19 nt, Artificial Sequence
  Description of Artificial Sequence: Synthetic oligonucleotide
  Sense strand starting at position 833 of SEQ ID NO: 915679
ggacucguggagggaguua

SEQ ID NO: 1098115 - RNA, 19 nt, Artificial Sequence
  Description of Artificial Sequence: Synthetic oligonucleotide
  Antisense strand to SEQ ID NO: 1098114
uaacucccuccacgagucc

SEQ ID NO: 1098116 - RNA, 19 nt, Artificial Sequence
  Description of Artificial Sequence: Synthetic oligonucleotide
  Sense strand starting at position 888 of SEQ ID NO: 915679
gcccuauugggagggaagu

SEQ ID NO: 1098117 - RNA, 19 nt, Artificial Sequence
  Description of Artificial Sequence: Synthetic oligonucleotide
  Antisense strand to SEQ ID NO: 1098116
acuucccucccaauagggc

SEQ ID NO: 1098118 - RNA, 19 nt, Artificial Sequence
  Description of Artificial Sequence: Synthetic oligonucleotide
  Sense strand starting at position 889 of SEQ ID NO: 915679
cccuauugggagggaagua

SEQ ID NO: 1098119 - RNA, 19 nt, Artificial Sequence
  Description of Artificial Sequence: Synthetic oligonucleotide
  Antisense strand to SEQ ID NO: 1098118
uacuucccucccaauaggg

SEQ ID NO: 1098120 - RNA, 19 nt, Artificial Sequence
  Description of Artificial Sequence: Synthetic oligonucleotide
  Sense strand starting at position 980 of SEQ ID NO: 915679
cagggaaggcucugucaga

SEQ ID NO: 1098121 - RNA, 19 nt, Artificial Sequence
  Description of Artificial Sequence: Synthetic oligonucleotide
  Antisense strand to SEQ ID NO: 1098120
ucugacagagccuucccug

SEQ ID NO: 1098122 - RNA, 19 nt, Artificial Sequence
  Description of Artificial Sequence: Synthetic oligonucleotide
  Sense strand starting at position 981 of SEQ ID NO: 915679
agggaaggcucugucagau

SEQ ID NO: 1098123 - RNA, 19 nt, Artificial Sequence
  Description of Artificial Sequence: Synthetic oligonucleotide
  Antisense strand to SEQ ID NO: 1098122
aucugacagagccuucccu

SEQ ID NO: 1098124 - RNA, 19 nt, Artificial Sequence
  Description of Artificial Sequence: Synthetic oligonucleotide
  Sense strand starting at position 1074 of SEQ ID NO: 915679
gagcuuaggguggaaaguu

SEQ ID NO: 1098125 - RNA, 19 nt, Artificial Sequence
  Description of Artificial Sequence: Synthetic oligonucleotide
  Antisense strand to SEQ ID NO: 1098124
aacuuuccacccuaagcuc

SEQ ID NO: 1098126 - RNA, 19 nt, Artificial Sequence
  Description of Artificial Sequence: Synthetic oligonucleotide
  Sense strand starting at position 1094 of SEQ ID NO: 915679
aaggcucucggaggugaaa

SEQ ID NO: 1098127 - RNA, 19 nt, Artificial Sequence
  Description of Artificial Sequence: Synthetic oligonucleotide
  Antisense strand to SEQ ID NO: 1098126
uuucaccuccgagagccuu

SEQ ID NO: 1098128 - RNA, 19 nt, Artificial Sequence
  Description of Artificial Sequence: Synthetic oligonucleotide
  Sense strand starting at position 1112 of SEQ ID NO: 915679
aagguugucaaguguaaga

SEQ ID NO: 1098129 - RNA, 19 nt, Artificial Sequence
  Description of Artificial Sequence: Synthetic oligonucleotide
  Antisense strand to SEQ ID NO: 1098128
ucuuacacuugacaaccuu

SEQ ID NO: 1098130 - RNA, 19 nt, Artificial Sequence
  Description of Artificial Sequence: Synthetic oligonucleotide
  Sense strand starting at position 1114 of SEQ ID NO: 915679
gguugucaaguguaagaug

SEQ ID NO: 1098131 - RNA, 19 nt, Artificial Sequence
  Description of Artificial Sequence: Synthetic oligonucleotide
  Antisense strand to SEQ ID NO: 1098130
caucuuacacuugacaacc

SEQ ID NO: 1098132 - RNA, 19 nt, Artificial Sequence
  Description of Artificial Sequence: Synthetic oligonucleotide
  Sense strand starting at position 1843 of SEQ ID NO: 915679
uuugcaucucuuggauauc

SEQ ID NO: 1098133 - RNA, 19 nt, Artificial Sequence
  Description of Artificial Sequence: Synthetic oligonucleotide
  Antisense strand to SEQ ID NO: 1098132
gauauccaagagaugcaaa

SEQ ID NO: 1098134 - RNA, 19 nt, Artificial Sequence
  Description of Artificial Sequence: Synthetic oligonucleotide
  Sense strand starting at position 1846 of SEQ ID NO: 915679
gcaucucuuggauaucuuu

SEQ ID NO: 1098135 - RNA, 19 nt, Artificial Sequence
  Description of Artificial Sequence: Synthetic oligonucleotide
  Antisense strand to SEQ ID NO: 1098134
aaagauauccaagagaugc

SEQ ID NO: 1098136 - RNA, 19 nt, Artificial Sequence
  Description of Artificial Sequence: Synthetic oligonucleotide
  Sense strand starting at position 1895 of SEQ ID NO: 915679
gucgccauugcgcuggaaa

SEQ ID NO: 1098137 - RNA, 19 nt, Artificial Sequence
  Description of Artificial Sequence: Synthetic oligonucleotide
  Antisense strand to SEQ ID NO: 1098136
uuuccagcgcaauggcgac

SEQ ID NO: 1098138 - RNA, 19 nt, Artificial Sequence
  Description of Artificial Sequence: Synthetic oligonucleotide
  Sense strand starting at position 2430 of SEQ ID NO: 915679
cagcaaguacuuuaggagu

SEQ ID NO: 1098139 - RNA, 19 nt, Artificial Sequence
  Description of Artificial Sequence: Synthetic oligonucleotide
  Antisense strand to SEQ ID NO: 1098138
acuccuaaaguacuugcug

SEQ ID NO: 1098140 - RNA, 19 nt, Artificial Sequence
  Description of Artificial Sequence: Synthetic oligonucleotide
  Sense strand starting at position 2547 of SEQ ID NO: 915679
uugaaugaccuuuggcaaa

SEQ ID NO: 1098141 - RNA, 19 nt, Artificial Sequence
  Description of Artificial Sequence: Synthetic oligonucleotide
  Antisense strand to SEQ ID NO: 1098140
uuugccaaaggucauucaa

SEQ ID NO: 1098142 - RNA, 19 nt, Artificial Sequence
  Description of Artificial Sequence: Synthetic oligonucleotide
  Sense strand starting at position 2588 of SEQ ID NO: 915679
uaguucuuggcugaauaug

SEQ ID NO: 1098143 - RNA, 19 nt, Artificial Sequence
  Description of Artificial Sequence: Synthetic oligonucleotide
  Antisense strand to SEQ ID NO: 1098142
cauauucagccaagaacua

SEQ ID NO: 1098144 - RNA, 19 nt, Artificial Sequence
  Description of Artificial Sequence: Synthetic oligonucleotide
  Sense strand starting at position 3279 of SEQ ID NO: 915679
acugaaucugauugcugaa

SEQ ID NO: 1098145 - RNA, 19 nt, Artificial Sequence
  Description of Artificial Sequence: Synthetic oligonucleotide
  Antisense strand to SEQ ID NO: 1098144
uucagcaaucagauucagu

SEQ ID NO: 1098146 - RNA, 19 nt, Artificial Sequence
  Description of Artificial Sequence: Synthetic oligonucleotide
  Sense strand starting at position 3312 of SEQ ID NO: 915679
caaguuaggcaucaguuua

SEQ ID NO: 1098147 - RNA, 19 nt, Artificial Sequence
  Description of Artificial Sequence: Synthetic oligonucleotide
  Antisense strand to SEQ ID NO: 1098146
uaaacugaugccuaacuug

SEQ ID NO: 1098148 - RNA, 19 nt, Artificial Sequence
  Description of Artificial Sequence: Synthetic oligonucleotide
  Sense strand starting at position 3472 of SEQ ID NO: 915679
gccucaucuguuuaaugga

SEQ ID NO: 1098149 - RNA, 19 nt, Artificial Sequence
  Description of Artificial Sequence: Synthetic oligonucleotide
  Antisense strand to SEQ ID NO: 1098148
uccauuaaacagaugaggc

SEQ ID NO: 1098150 - RNA, 19 nt, Artificial Sequence
  Description of Artificial Sequence: Synthetic oligonucleotide
  Sense strand starting at position 3506 of SEQ ID NO: 915679
cucagucugggcggaauuu

SEQ ID NO: 1098151 - RNA, 19 nt, Artificial Sequence
  Description of Artificial Sequence: Synthetic oligonucleotide
  Antisense strand to SEQ ID NO: 1098150
aaauuccgcccagacugag

SEQ ID NO: 1098152 - RNA, 19 nt, Artificial Sequence
  Description of Artificial Sequence: Synthetic oligonucleotide
  Sense strand starting at position 3523 of SEQ ID NO: 915679
uuuagagcuccauaguaua

SEQ ID NO: 1098153 - RNA, 19 nt, Artificial Sequence
  Description of Artificial Sequence: Synthetic oligonucleotide
  Antisense strand to SEQ ID NO: 1098152
uauacuauggagcucuaaa

SEQ ID NO: 1098154 - RNA, 19 nt, Artificial Sequence
  Description of Artificial Sequence: Synthetic oligonucleotide
  Sense strand starting at position 3935 of SEQ ID NO: 915679
ggagguauaugucugccaa

SEQ ID NO: 1098155 - RNA, 19 nt, Artificial Sequence
  Description of Artificial Sequence: Synthetic oligonucleotide
  Antisense strand to SEQ ID NO: 1098154
uuggcagacauauaccucc

SEQ ID NO: 1098156 - RNA, 19 nt, Artificial Sequence
  Description of Artificial Sequence: Synthetic oligonucleotide
  Sense strand starting at position 3936 of SEQ ID NO: 915679
gagguauaugucugccaaa

SEQ ID NO: 1098157 - RNA, 19 nt, Artificial Sequence
  Description of Artificial Sequence: Synthetic oligonucleotide
  Antisense strand to SEQ ID NO: 1098156
uuuggcagacauauaccuc

SEQ ID NO: 1098158 - RNA, 19 nt, Artificial Sequence
  Description of Artificial Sequence: Synthetic oligonucleotide
  Sense strand starting at position 2 of SEQ ID NO: 915680
gugagcauuugcucugugu

SEQ ID NO: 1098159 - RNA, 19 nt, Artificial Sequence
  Description of Artificial Sequence: Synthetic oligonucleotide
  Antisense strand to SEQ ID NO: 1098158
acacagagcaaaugcucac

SEQ ID NO: 1098160 - RNA, 19 nt, Artificial Sequence
  Description of Artificial Sequence: Synthetic oligonucleotide
  Sense strand starting at position 4 of SEQ ID NO: 915680
gagcauuugcucuguguua

SEQ ID NO: 1098161 - RNA, 19 nt, Artificial Sequence
  Description of Artificial Sequence: Synthetic oligonucleotide
  Antisense strand to SEQ ID NO: 1098160
uaacacagagcaaaugcuc

SEQ ID NO: 1098162 - RNA, 19 nt, Artificial Sequence
  Description of Artificial Sequence: Synthetic oligonucleotide
  Sense strand starting at position 6 of SEQ ID NO: 915680
gcauuugcucuguguuaga

SEQ ID NO: 1098163 - RNA, 19 nt, Artificial Sequence
  Description of Artificial Sequence: Synthetic oligonucleotide
  Antisense strand to SEQ ID NO: 1098162
ucuaacacagagcaaaugc

SEQ ID NO: 1098164 - RNA, 19 nt, Artificial Sequence
  Description of Artificial Sequence: Synthetic oligonucleotide
  Sense strand starting at position 22 of SEQ ID NO: 915680
agaucuugugcucaauaag

SEQ ID NO: 1098165 - RNA, 19 nt, Artificial Sequence
  Description of Artificial Sequence: Synthetic oligonucleotide
  Antisense strand to SEQ ID NO: 1098164
cuuauugagcacaagaucu

SEQ ID NO: 1098166 - RNA, 19 nt, Artificial Sequence
  Description of Artificial Sequence: Synthetic oligonucleotide
  Sense strand starting at position 54 of SEQ ID NO: 915680
agcauaagacaugguuucu

SEQ ID NO: 1098167 - RNA, 19 nt, Artificial Sequence
  Description of Artificial Sequence: Synthetic oligonucleotide
  Antisense strand to SEQ ID NO: 1098166
agaaaccaugucuuaugcu

SEQ ID NO: 1098168 - RNA, 19 nt, Artificial Sequence
  Description of Artificial Sequence: Synthetic oligonucleotide
  Sense strand starting at position 205 of SEQ ID NO: 915680
cuguuucugguaggaggua

SEQ ID NO: 1098169 - RNA, 19 nt, Artificial Sequence
  Description of Artificial Sequence: Synthetic oligonucleotide
  Antisense strand to SEQ ID NO: 1098168
uaccuccuaccagaaacag

SEQ ID NO: 1098170 - RNA, 19 nt, Artificial Sequence
  Description of Artificial Sequence: Synthetic oligonucleotide
  Sense strand starting at position 217 of SEQ ID NO: 915680
ggagguagagaugguuuca

SEQ ID NO: 1098171 - RNA, 19 nt, Artificial Sequence
  Description of Artificial Sequence: Synthetic oligonucleotide
  Antisense strand to SEQ ID NO: 1098170
ugaaaccaucucuaccucc

SEQ ID NO: 1098172 - RNA, 19 nt, Artificial Sequence
  Description of Artificial Sequence: Synthetic oligonucleotide
  Sense strand starting at position 393 of SEQ ID NO: 915680
ugagcuagcucaucaaaga

SEQ ID NO: 1098173 - RNA, 19 nt, Artificial Sequence
  Description of Artificial Sequence: Synthetic oligonucleotide
  Antisense strand to SEQ ID NO: 1098172
ucuuugaugagcuagcuca

SEQ ID NO: 1098174 - RNA, 19 nt, Artificial Sequence
  Description of Artificial Sequence: Synthetic oligonucleotide
  Sense strand starting at position 394 of SEQ ID NO: 915680
gagcuagcucaucaaagag

SEQ ID NO: 1098175 - RNA, 19 nt, Artificial Sequence
  Description of Artificial Sequence: Synthetic oligonucleotide
  Antisense strand to SEQ ID NO: 1098174
cucuuugaugagcuagcuc

SEQ ID NO: 1098176 - RNA, 19 nt, Artificial Sequence
  Description of Artificial Sequence: Synthetic oligonucleotide
  Sense strand starting at position 418 of SEQ ID NO: 915680
acagguaugcauggagcua

SEQ ID NO: 1098177 - RNA, 19 nt, Artificial Sequence
  Description of Artificial Sequence: Synthetic oligonucleotide
  Antisense strand to SEQ ID NO: 1098176
uagcuccaugcauaccugu

SEQ ID NO: 1098178 - RNA, 19 nt, Artificial Sequence
  Description of Artificial Sequence: Synthetic oligonucleotide
  Sense strand starting at position 595 of SEQ ID NO: 915680
ggacucguggagggaguua

SEQ ID NO: 1098179 - RNA, 19 nt, Artificial Sequence
  Description of Artificial Sequence: Synthetic oligonucleotide
  Antisense strand to SEQ ID NO: 1098178
uaacucccuccacgagucc

SEQ ID NO: 1098180 - RNA, 19 nt, Artificial Sequence
  Description of Artificial Sequence: Synthetic oligonucleotide
  Sense strand starting at position 650 of SEQ ID NO: 915680
gcccuauugggagggaagu

SEQ ID NO: 1098181 - RNA, 19 nt, Artificial Sequence
  Description of Artificial Sequence: Synthetic oligonucleotide
  Antisense strand to SEQ ID NO: 1098180
acuucccucccaauagggc

SEQ ID NO: 1098182 - RNA, 19 nt, Artificial Sequence
  Description of Artificial Sequence: Synthetic oligonucleotide
  Sense strand starting at position 651 of SEQ ID NO: 915680
cccuauugggagggaagua

SEQ ID NO: 1098183 - RNA, 19 nt, Artificial Sequence
  Description of Artificial Sequence: Synthetic oligonucleotide
  Antisense strand to SEQ ID NO: 1098182
uacuucccucccaauaggg

SEQ ID NO: 1098184 - RNA, 19 nt, Artificial Sequence
  Description of Artificial Sequence: Synthetic oligonucleotide
  Sense strand starting at position 742 of SEQ ID NO: 915680
cagggaaggcucugucaga

SEQ ID NO: 1098185 - RNA, 19 nt, Artificial Sequence
  Description of Artificial Sequence: Synthetic oligonucleotide
  Antisense strand to SEQ ID NO: 1098184
ucugacagagccuucccug

SEQ ID NO: 1098186 - RNA, 19 nt, Artificial Sequence
  Description of Artificial Sequence: Synthetic oligonucleotide
  Sense strand starting at position 743 of SEQ ID NO: 915680
agggaaggcucugucagau

SEQ ID NO: 1098187 - RNA, 19 nt, Artificial Sequence
  Description of Artificial Sequence: Synthetic oligonucleotide
  Antisense strand to SEQ ID NO: 1098186
aucugacagagccuucccu

SEQ ID NO: 1098188 - RNA, 19 nt, Artificial Sequence
  Description of Artificial Sequence: Synthetic oligonucleotide
  Sense strand starting at position 824 of SEQ ID NO: 915680
gugggcugucaagagcuua

SEQ ID NO: 1098189 - RNA, 19 nt, Artificial Sequence
  Description of Artificial Sequence: Synthetic oligonucleotide
  Antisense strand to SEQ ID NO: 1098188
uaagcucuugacagcccac

SEQ ID NO: 1098190 - RNA, 19 nt, Artificial Sequence
  Description of Artificial Sequence: Synthetic oligonucleotide
  Sense strand starting at position 836 of SEQ ID NO: 915680
gagcuuaggguggaaaguu

SEQ ID NO: 1098191 - RNA, 19 nt, Artificial Sequence
  Description of Artificial Sequence: Synthetic oligonucleotide
  Antisense strand to SEQ ID NO: 1098190
aacuuuccacccuaagcuc

SEQ ID NO: 1098192 - RNA, 19 nt, Artificial Sequence
  Description of Artificial Sequence: Synthetic oligonucleotide
  Sense strand starting at position 856 of SEQ ID NO: 915680
aaggcucucggaggugaaa

SEQ ID NO: 1098193 - RNA, 19 nt, Artificial Sequence
  Description of Artificial Sequence: Synthetic oligonucleotide
  Antisense strand to SEQ ID NO: 1098192
uuucaccuccgagagccuu

SEQ ID NO: 1098194 - RNA, 19 nt, Artificial Sequence
  Description of Artificial Sequence: Synthetic oligonucleotide
  Sense strand starting at position 874 of SEQ ID NO: 915680
aagguugucaaguguaaga

SEQ ID NO: 1098195 - RNA, 19 nt, Artificial Sequence
  Description of Artificial Sequence: Synthetic oligonucleotide
  Antisense strand to SEQ ID NO: 1098194
ucuuacacuugacaaccuu

SEQ ID NO: 1098196 - RNA, 19 nt, Artificial Sequence
  Description of Artificial Sequence: Synthetic oligonucleotide
  Sense strand starting at position 876 of SEQ ID NO: 915680
gguugucaaguguaagaug

SEQ ID NO: 1098197 - RNA, 19 nt, Artificial Sequence
  Description of Artificial Sequence: Synthetic oligonucleotide
  Antisense strand to SEQ ID NO: 1098196
caucuuacacuugacaacc

SEQ ID NO: 1098198 - RNA, 19 nt, Artificial Sequence
  Description of Artificial Sequence: Synthetic oligonucleotide
  Sense strand starting at position 1605 of SEQ ID NO: 915680
uuugcaucucuuggauauc

SEQ ID NO: 1098199 - RNA, 19 nt, Artificial Sequence
  Description of Artificial Sequence: Synthetic oligonucleotide
  Antisense strand to SEQ ID NO: 1098198
gauauccaagagaugcaaa

SEQ ID NO: 1098200 - RNA, 19 nt, Artificial Sequence
  Description of Artificial Sequence: Synthetic oligonucleotide
  Sense strand starting at position 1608 of SEQ ID NO: 915680
gcaucucuuggauaucuuu

SEQ ID NO: 1098201 - RNA, 19 nt, Artificial Sequence
  Description of Artificial Sequence: Synthetic oligonucleotide
  Antisense strand to SEQ ID NO: 1098200
aaagauauccaagagaugc

SEQ ID NO: 1098202 - RNA, 19 nt, Artificial Sequence
  Description of Artificial Sequence: Synthetic oligonucleotide
  Sense strand starting at position 1657 of SEQ ID NO: 915680
gucgccauugcgcuggaaa

SEQ ID NO: 1098203 - RNA, 19 nt, Artificial Sequence
  Description of Artificial Sequence: Synthetic oligonucleotide
  Antisense strand to SEQ ID NO: 1098202
uuuccagcgcaauggcgac

SEQ ID NO: 1098204 - RNA, 19 nt, Artificial Sequence
  Description of Artificial Sequence: Synthetic oligonucleotide
  Sense strand starting at position 2192 of SEQ ID NO: 915680
cagcaaguacuuuaggagu

SEQ ID NO: 1098205 - RNA, 19 nt, Artificial Sequence
  Description of Artificial Sequence: Synthetic oligonucleotide
  Antisense strand to SEQ ID NO: 1098204
acuccuaaaguacuugcug

SEQ ID NO: 1098206 - RNA, 19 nt, Artificial Sequence
  Description of Artificial Sequence: Synthetic oligonucleotide
  Sense strand starting at position 2309 of SEQ ID NO: 915680
uugaaugaccuuuggcaaa

SEQ ID NO: 1098207 - RNA, 19 nt, Artificial Sequence
  Description of Artificial Sequence: Synthetic oligonucleotide
  Antisense strand to SEQ ID NO: 1098206
uuugccaaaggucauucaa

SEQ ID NO: 1098208 - RNA, 19 nt, Artificial Sequence
  Description of Artificial Sequence: Synthetic oligonucleotide
  Sense strand starting at position 2350 of SEQ ID NO: 915680
uaguucuuggcugaauaug

SEQ ID NO: 1098209 - RNA, 19 nt, Artificial Sequence
  Description of Artificial Sequence: Synthetic oligonucleotide
  Antisense strand to SEQ ID NO: 1098208
cauauucagccaagaacua

SEQ ID NO: 1098210 - RNA, 19 nt, Artificial Sequence
  Description of Artificial Sequence: Synthetic oligonucleotide
  Sense strand starting at position 3041 of SEQ ID NO: 915680
acugaaucugauugcugaa

SEQ ID NO: 1098211 - RNA, 19 nt, Artificial Sequence
  Description of Artificial Sequence: Synthetic oligonucleotide
  Antisense strand to SEQ ID NO: 1098210
uucagcaaucagauucagu

SEQ ID NO: 1098212 - RNA, 19 nt, Artificial Sequence
  Description of Artificial Sequence: Synthetic oligonucleotide
  Sense strand starting at position 3054 of SEQ ID NO: 915680
gcugaaaggugauucagcu

SEQ ID NO: 1098213 - RNA, 19 nt, Artificial Sequence
  Description of Artificial Sequence: Synthetic oligonucleotide
  Antisense strand to SEQ ID NO: 1098212
agcugaaucaccuuucagc

SEQ ID NO: 1098214 - RNA, 19 nt, Artificial Sequence
  Description of Artificial Sequence: Synthetic oligonucleotide
  Sense strand starting at position 3071 of SEQ ID NO: 915680
cugcaaguuaggcaucagu

SEQ ID NO: 1098215 - RNA, 19 nt, Artificial Sequence
  Description of Artificial Sequence: Synthetic oligonucleotide
  Antisense strand to SEQ ID NO: 1098214
acugaugccuaacuugcag

SEQ ID NO: 1098216 - RNA, 19 nt, Artificial Sequence
  Description of Artificial Sequence: Synthetic oligonucleotide
  Sense strand starting at position 3074 of SEQ ID NO: 915680
caaguuaggcaucaguuua

SEQ ID NO: 1098217 - RNA, 19 nt, Artificial Sequence
  Description of Artificial Sequence: Synthetic oligonucleotide
  Antisense strand to SEQ ID NO: 1098216
uaaacugaugccuaacuug

SEQ ID NO: 1098218 - RNA, 19 nt, Artificial Sequence
  Description of Artificial Sequence: Synthetic oligonucleotide
  Sense strand starting at position 3234 of SEQ ID NO: 915680
gccucaucuguuuaaugga

SEQ ID NO: 1098219 - RNA, 19 nt, Artificial Sequence
  Description of Artificial Sequence: Synthetic oligonucleotide
  Antisense strand to SEQ ID NO: 1098218
uccauuaaacagaugaggc

SEQ ID NO: 1098220 - RNA, 19 nt, Artificial Sequence
  Description of Artificial Sequence: Synthetic oligonucleotide
  Sense strand starting at position 3266 of SEQ ID NO: 915680
cacucagucugggcggaau

SEQ ID NO: 1098221 - RNA, 19 nt, Artificial Sequence
  Description of Artificial Sequence: Synthetic oligonucleotide
  Antisense strand to SEQ ID NO: 1098220
auuccgcccagacugagug

SEQ ID NO: 1098222 - RNA, 19 nt, Artificial Sequence
  Description of Artificial Sequence: Synthetic oligonucleotide
  Sense strand starting at position 3268 of SEQ ID NO: 915680
cucagucugggcggaauuu

SEQ ID NO: 1098223 - RNA, 19 nt, Artificial Sequence
  Description of Artificial Sequence: Synthetic oligonucleotide
  Antisense strand to SEQ ID NO: 1098222
aaauuccgcccagacugag

SEQ ID NO: 1098224 - RNA, 19 nt, Artificial Sequence
  Description of Artificial Sequence: Synthetic oligonucleotide
  Sense strand starting at position 3285 of SEQ ID NO: 915680
uuuagagcuccauaguaua

SEQ ID NO: 1098225 - RNA, 19 nt, Artificial Sequence
  Description of Artificial Sequence: Synthetic oligonucleotide
  Antisense strand to SEQ ID NO: 1098224
uauacuauggagcucuaaa

SEQ ID NO: 1098226 - RNA, 19 nt, Artificial Sequence
  Description of Artificial Sequence: Synthetic oligonucleotide
  Sense strand starting at position 3697 of SEQ ID NO: 915680
ggagguauaugucugccaa

SEQ ID NO: 1098227 - RNA, 19 nt, Artificial Sequence
  Description of Artificial Sequence: Synthetic oligonucleotide
  Antisense strand to SEQ ID NO: 1098226
uuggcagacauauaccucc

SEQ ID NO: 1098228 - RNA, 19 nt, Artificial Sequence
  Description of Artificial Sequence: Synthetic oligonucleotide
  Sense strand starting at position 3698 of SEQ ID NO: 915680
gagguauaugucugccaaa

SEQ ID NO: 1098229 - RNA, 19 nt, Artificial Sequence
  Description of Artificial Sequence: Synthetic oligonucleotide
  Antisense strand to SEQ ID NO: 1098228
uuuggcagacauauaccuc

SEQ ID NO: 1098230 - RNA, 19 nt, Artificial Sequence
  Description of Artificial Sequence: Synthetic oligonucleotide
  Sense strand starting at position 3754 of SEQ ID NO: 915680
gggaucaguuucucuuguu

SEQ ID NO: 1098231 - RNA, 19 nt, Artificial Sequence
  Description of Artificial Sequence: Synthetic oligonucleotide
  Antisense strand to SEQ ID NO: 1098230
aacaagagaaacugauccc

SEQ ID NO: 1098232 - RNA, 19 nt, Artificial Sequence
  Description of Artificial Sequence: Synthetic oligonucleotide
  Sense strand starting at position 3780 of SEQ ID NO: 915680
gcucuuaucuagguaacuc

SEQ ID NO: 1098233 - RNA, 19 nt, Artificial Sequence
  Description of Artificial Sequence: Synthetic oligonucleotide
  Antisense strand to SEQ ID NO: 1098232
gaguuaccuagauaagagc

SEQ ID NO: 1098234 - RNA, 19 nt, Artificial Sequence
  Description of Artificial Sequence: Synthetic oligonucleotide
  Sense strand starting at position 3818 of SEQ ID NO: 915680
ggguucuucuaagccagaa

SEQ ID NO: 1098235 - RNA, 19 nt, Artificial Sequence
  Description of Artificial Sequence: Synthetic oligonucleotide
  Antisense strand to SEQ ID NO: 1098234
uucuggcuuagaagaaccc

SEQ ID NO: 1098236 - RNA, 19 nt, Artificial Sequence
  Description of Artificial Sequence: Synthetic oligonucleotide
  Sense strand starting at position 3862 of SEQ ID NO: 915680
cuuucuauguuugcauaga

SEQ ID NO: 1098237 - RNA, 19 nt, Artificial Sequence
  Description of Artificial Sequence: Synthetic oligonucleotide
  Antisense strand to SEQ ID NO: 1098236
ucuaugcaaacauagaaag

SEQ ID NO: 1098238 - RNA, 19 nt, Artificial Sequence
  Description of Artificial Sequence: Synthetic oligonucleotide
  Sense strand starting at position 48 of SEQ ID NO: 915681
ccaagaucccucugaagau

SEQ ID NO: 1098239 - RNA, 19 nt, Artificial Sequence
  Description of Artificial Sequence: Synthetic oligonucleotide
  Antisense strand to SEQ ID NO: 1098238
aucuucagagggaucuugg

SEQ ID NO: 1098240 - RNA, 19 nt, Artificial Sequence
  Description of Artificial Sequence: Synthetic oligonucleotide
  Sense strand starting at position 362 of SEQ ID NO: 915681
cuuccauuccaagguaagu

SEQ ID NO: 1098241 - RNA, 19 nt, Artificial Sequence
  Description of Artificial Sequence: Synthetic oligonucleotide
  Antisense strand to SEQ ID NO: 1098240
acuuaccuuggaauggaag

SEQ ID NO: 1098242 - RNA, 19 nt, Artificial Sequence
  Description of Artificial Sequence: Synthetic oligonucleotide
  Sense strand starting at position 469 of SEQ ID NO: 915681
gucuguucucuguccugua

SEQ ID NO: 1098243 - RNA, 19 nt, Artificial Sequence
  Description of Artificial Sequence: Synthetic oligonucleotide
  Antisense strand to SEQ ID NO: 1098242
uacaggacagagaacagac

SEQ ID NO: 1098244 - RNA, 19 nt, Artificial Sequence
  Description of Artificial Sequence: Synthetic oligonucleotide
  Sense strand starting at position 507 of SEQ ID NO: 915681
guugaucccugacucugaa

SEQ ID NO: 1098245 - RNA, 19 nt, Artificial Sequence
  Description of Artificial Sequence: Synthetic oligonucleotide
  Antisense strand to SEQ ID NO: 1098244
uucagagucagggaucaac

SEQ ID NO: 1098246 - RNA, 19 nt, Artificial Sequence
  Description of Artificial Sequence: Synthetic oligonucleotide
  Sense strand starting at position 529 of SEQ ID NO: 915681
augagcuuccugggaagau

SEQ ID NO: 1098247 - RNA, 19 nt, Artificial Sequence
  Description of Artificial Sequence: Synthetic oligonucleotide
  Antisense strand to SEQ ID NO: 1098246
aucuucccaggaagcucau

SEQ ID NO: 1098248 - RNA, 19 nt, Artificial Sequence
  Description of Artificial Sequence: Synthetic oligonucleotide
  Sense strand starting at position 562 of SEQ ID NO: 915681
cugucucagggauggacua

SEQ ID NO: 1098249 - RNA, 19 nt, Artificial Sequence
  Description of Artificial Sequence: Synthetic oligonucleotide
  Antisense strand to SEQ ID NO: 1098248
uaguccaucccugagacag

SEQ ID NO: 1098250 - RNA, 19 nt, Artificial Sequence
  Description of Artificial Sequence: Synthetic oligonucleotide
  Sense strand starting at position 668 of SEQ ID NO: 915681
gcauauugccaaggaggau

SEQ ID NO: 1098251 - RNA, 19 nt, Artificial Sequence
  Description of Artificial Sequence: Synthetic oligonucleotide
  Antisense strand to SEQ ID NO: 1098250
auccuccuuggcaauaugc

SEQ ID NO: 1098252 - RNA, 19 nt, Artificial Sequence
  Description of Artificial Sequence: Synthetic oligonucleotide
  Sense strand starting at position 902 of SEQ ID NO: 915681
gaugguaaaguuugcagaa

SEQ ID NO: 1098253 - RNA, 19 nt, Artificial Sequence
  Description of Artificial Sequence: Synthetic oligonucleotide
  Antisense strand to SEQ ID NO: 1098252
uucugcaaacuuuaccauc

SEQ ID NO: 1098254 - RNA, 19 nt, Artificial Sequence
  Description of Artificial Sequence: Synthetic oligonucleotide
  Sense strand starting at position 903 of SEQ ID NO: 915681
augguaaaguuugcagaaa

SEQ ID NO: 1098255 - RNA, 19 nt, Artificial Sequence
  Description of Artificial Sequence: Synthetic oligonucleotide
  Antisense strand to SEQ ID NO: 1098254
uuucugcaaacuuuaccau

SEQ ID NO: 1098256 - RNA, 19 nt, Artificial Sequence
  Description of Artificial Sequence: Synthetic oligonucleotide
  Sense strand starting at position 974 of SEQ ID NO: 915681
augagcugaucuuucccaa

SEQ ID NO: 1098257 - RNA, 19 nt, Artificial Sequence
  Description of Artificial Sequence: Synthetic oligonucleotide
  Antisense strand to SEQ ID NO: 1098256
uugggaaagaucagcucau

SEQ ID NO: 1098258 - RNA, 19 nt, Artificial Sequence
  Description of Artificial Sequence: Synthetic oligonucleotide
  Sense strand starting at position 1030 of SEQ ID NO: 915681
cuaccaugucgguaaggua

SEQ ID NO: 1098259 - RNA, 19 nt, Artificial Sequence
  Description of Artificial Sequence: Synthetic oligonucleotide
  Antisense strand to SEQ ID NO: 1098258
uaccuuaccgacaugguag

SEQ ID NO: 1098260 - RNA, 19 nt, Artificial Sequence
  Description of Artificial Sequence: Synthetic oligonucleotide
  Sense strand starting at position 1039 of SEQ ID NO: 915681
cgguaagguacagagaauu

SEQ ID NO: 1098261 - RNA, 19 nt, Artificial Sequence
  Description of Artificial Sequence: Synthetic oligonucleotide
  Antisense strand to SEQ ID NO: 1098260
aauucucuguaccuuaccg

SEQ ID NO: 1098262 - RNA, 19 nt, Artificial Sequence
  Description of Artificial Sequence: Synthetic oligonucleotide
  Sense strand starting at position 1177 of SEQ ID NO: 915681
cuggcuuucccacagagga

SEQ ID NO: 1098263 - RNA, 19 nt, Artificial Sequence
  Description of Artificial Sequence: Synthetic oligonucleotide
  Antisense strand to SEQ ID NO: 1098262
uccucugugggaaagccag

SEQ ID NO: 1098264 - RNA, 19 nt, Artificial Sequence
  Description of Artificial Sequence: Synthetic oligonucleotide
  Sense strand starting at position 1254 of SEQ ID NO: 915681
caggacuugugguuaaaca

SEQ ID NO: 1098265 - RNA, 19 nt, Artificial Sequence
  Description of Artificial Sequence: Synthetic oligonucleotide
  Antisense strand to SEQ ID NO: 1098264
uguuuaaccacaaguccug

SEQ ID NO: 1098266 - RNA, 19 nt, Artificial Sequence
  Description of Artificial Sequence: Synthetic oligonucleotide
  Sense strand starting at position 1291 of SEQ ID NO: 915681
gcaugaaaguuauuaaguc

SEQ ID NO: 1098267 - RNA, 19 nt, Artificial Sequence
  Description of Artificial Sequence: Synthetic oligonucleotide
  Antisense strand to SEQ ID NO: 1098266
gacuuaauaacuuucaugc

SEQ ID NO: 1098268 - RNA, 19 nt, Artificial Sequence
  Description of Artificial Sequence: Synthetic oligonucleotide
  Sense strand starting at position 1428 of SEQ ID NO: 915681
cugaauugcaguuagaaug

SEQ ID NO: 1098269 - RNA, 19 nt, Artificial Sequence
  Description of Artificial Sequence: Synthetic oligonucleotide
  Antisense strand to SEQ ID NO: 1098268
cauucuaacugcaauucag

SEQ ID NO: 1098270 - RNA, 19 nt, Artificial Sequence
  Description of Artificial Sequence: Synthetic oligonucleotide
  Sense strand starting at position 1479 of SEQ ID NO: 915681
aaaguagauuagccuggau

SEQ ID NO: 1098271 - RNA, 19 nt, Artificial Sequence
  Description of Artificial Sequence: Synthetic oligonucleotide
  Antisense strand to SEQ ID NO: 1098270
auccaggcuaaucuacuuu

SEQ ID NO: 1098272 - RNA, 19 nt, Artificial Sequence
  Description of Artificial Sequence: Synthetic oligonucleotide
  Sense strand starting at position 1481 of SEQ ID NO: 915681
aguagauuagccuggauuc

SEQ ID NO: 1098273 - RNA, 19 nt, Artificial Sequence
  Description of Artificial Sequence: Synthetic oligonucleotide
  Antisense strand to SEQ ID NO: 1098272
gaauccaggcuaaucuacu

SEQ ID NO: 1098274 - RNA, 19 nt, Artificial Sequence
  Description of Artificial Sequence: Synthetic oligonucleotide
  Sense strand starting at position 1650 of SEQ ID NO: 915681
uuucuagaaccacguuaaa

SEQ ID NO: 1098275 - RNA, 19 nt, Artificial Sequence
  Description of Artificial Sequence: Synthetic oligonucleotide
  Antisense strand to SEQ ID NO: 1098274
uuuaacgugguucuagaaa

SEQ ID NO: 1098276 - RNA, 19 nt, Artificial Sequence
  Description of Artificial Sequence: Synthetic oligonucleotide
  Sense strand starting at position 1675 of SEQ ID NO: 915681
ccaagagaucuugaucgua

SEQ ID NO: 1098277 - RNA, 19 nt, Artificial Sequence
  Description of Artificial Sequence: Synthetic oligonucleotide
  Antisense strand to SEQ ID NO: 1098276
uacgaucaagaucucuugg

SEQ ID NO: 1098278 - RNA, 19 nt, Artificial Sequence
  Description of Artificial Sequence: Synthetic oligonucleotide
  Sense strand starting at position 1677 of SEQ ID NO: 915681
aagagaucuugaucguaag

SEQ ID NO: 1098279 - RNA, 19 nt, Artificial Sequence
  Description of Artificial Sequence: Synthetic oligonucleotide
  Antisense strand to SEQ ID NO: 1098278
cuuacgaucaagaucucuu

SEQ ID NO: 1098280 - RNA, 19 nt, Artificial Sequence
  Description of Artificial Sequence: Synthetic oligonucleotide
  Sense strand starting at position 1678 of SEQ ID NO: 915681
agagaucuugaucguaagu

SEQ ID NO: 1098281 - RNA, 19 nt, Artificial Sequence
  Description of Artificial Sequence: Synthetic oligonucleotide
  Antisense strand to SEQ ID NO: 1098280
acuuacgaucaagaucucu

SEQ ID NO: 1098282 - RNA, 19 nt, Artificial Sequence
  Description of Artificial Sequence: Synthetic oligonucleotide
  Sense strand starting at position 1866 of SEQ ID NO: 915681
ggaagaguccuccaggcuu

SEQ ID NO: 1098283 - RNA, 19 nt, Artificial Sequence
  Description of Artificial Sequence: Synthetic oligonucleotide
  Antisense strand to SEQ ID NO: 1098282
aagccuggaggacucuucc

SEQ ID NO: 1098284 - RNA, 19 nt, Artificial Sequence
  Description of Artificial Sequence: Synthetic oligonucleotide
  Sense strand starting at position 1883 of SEQ ID NO: 915681
uuagcugaugucgaggaga

SEQ ID NO: 1098285 - RNA, 19 nt, Artificial Sequence
  Description of Artificial Sequence: Synthetic oligonucleotide
  Antisense strand to SEQ ID NO: 1098284
ucuccucgacaucagcuaa

SEQ ID NO: 1098286 - RNA, 19 nt, Artificial Sequence
  Description of Artificial Sequence: Synthetic oligonucleotide
  Sense strand starting at position 1885 of SEQ ID NO: 915681
agcugaugucgaggagaag

SEQ ID NO: 1098287 - RNA, 19 nt, Artificial Sequence
  Description of Artificial Sequence: Synthetic oligonucleotide
  Antisense strand to SEQ ID NO: 1098286
cuucuccucgacaucagcu

SEQ ID NO: 1098288 - RNA, 19 nt, Artificial Sequence
  Description of Artificial Sequence: Synthetic oligonucleotide
  Sense strand starting at position 1886 of SEQ ID NO: 915681
gcugaugucgaggagaaga

SEQ ID NO: 1098289 - RNA, 19 nt, Artificial Sequence
  Description of Artificial Sequence: Synthetic oligonucleotide
  Antisense strand to SEQ ID NO: 1098288
ucuucuccucgacaucagc

SEQ ID NO: 1098290 - RNA, 19 nt, Artificial Sequence
  Description of Artificial Sequence: Synthetic oligonucleotide
  Sense strand starting at position 2501 of SEQ ID NO: 915681
ugaauugcccucuauugaa

SEQ ID NO: 1098291 - RNA, 19 nt, Artificial Sequence
  Description of Artificial Sequence: Synthetic oligonucleotide
  Antisense strand to SEQ ID NO: 1098290
uucaauagagggcaauuca

SEQ ID NO: 1098292 - RNA, 19 nt, Artificial Sequence
  Description of Artificial Sequence: Synthetic oligonucleotide
  Sense strand starting at position 2632 of SEQ ID NO: 915681
cuauucugauccucagagu

SEQ ID NO: 1098293 - RNA, 19 nt, Artificial Sequence
  Description of Artificial Sequence: Synthetic oligonucleotide
  Antisense strand to SEQ ID NO: 1098292
acucugaggaucagaauag

SEQ ID NO: 1098294 - RNA, 19 nt, Artificial Sequence
  Description of Artificial Sequence: Synthetic oligonucleotide
  Sense strand starting at position 2755 of SEQ ID NO: 915681
ggaguuccuguugagguuu

SEQ ID NO: 1098295 - RNA, 19 nt, Artificial Sequence
  Description of Artificial Sequence: Synthetic oligonucleotide
  Antisense strand to SEQ ID NO: 1098294
aaaccucaacaggaacucc

SEQ ID NO: 1098296 - RNA, 19 nt, Artificial Sequence
  Description of Artificial Sequence: Synthetic oligonucleotide
  Sense strand starting at position 2892 of SEQ ID NO: 915681
ggcuaaggaaugugcucaa

SEQ ID NO: 1098297 - RNA, 19 nt, Artificial Sequence
  Description of Artificial Sequence: Synthetic oligonucleotide
  Antisense strand to SEQ ID NO: 1098296
uugagcacauuccuuagcc

SEQ ID NO: 1098298 - RNA, 19 nt, Artificial Sequence
  Description of Artificial Sequence: Synthetic oligonucleotide
  Sense strand starting at position 2895 of SEQ ID NO: 915681
uaaggaaugugcucaaguc

SEQ ID NO: 1098299 - RNA, 19 nt, Artificial Sequence
  Description of Artificial Sequence: Synthetic oligonucleotide
  Antisense strand to SEQ ID NO: 1098298
gacuugagcacauuccuua

SEQ ID NO: 1098300 - RNA, 19 nt, Artificial Sequence
  Description of Artificial Sequence: Synthetic oligonucleotide
  Sense strand starting at position 2896 of SEQ ID NO: 915681
aaggaaugugcucaaguca

SEQ ID NO: 1098301 - RNA, 19 nt, Artificial Sequence
  Description of Artificial Sequence: Synthetic oligonucleotide
  Antisense strand to SEQ ID NO: 1098300
ugacuugagcacauuccuu

SEQ ID NO: 1098302 - RNA, 19 nt, Artificial Sequence
  Description of Artificial Sequence: Synthetic oligonucleotide
  Sense strand starting at position 2952 of SEQ ID NO: 915681
ccaagaauccugcgaaaca

SEQ ID NO: 1098303 - RNA, 19 nt, Artificial Sequence
  Description of Artificial Sequence: Synthetic oligonucleotide
  Antisense strand to SEQ ID NO: 1098302
uguuucgcaggauucuugg

SEQ ID NO: 1098304 - RNA, 19 nt, Artificial Sequence
  Description of Artificial Sequence: Synthetic oligonucleotide
  Sense strand starting at position 3072 of SEQ ID NO: 915681
ugcccuguggcucuaguau

SEQ ID NO: 1098305 - RNA, 19 nt, Artificial Sequence
  Description of Artificial Sequence: Synthetic oligonucleotide
  Antisense strand to SEQ ID NO: 1098304
auacuagagccacagggca

SEQ ID NO: 1098306 - RNA, 19 nt, Artificial Sequence
  Description of Artificial Sequence: Synthetic oligonucleotide
  Sense strand starting at position 3248 of SEQ ID NO: 915681
gcucucuguggugacauau

SEQ ID NO: 1098307 - RNA, 19 nt, Artificial Sequence
  Description of Artificial Sequence: Synthetic oligonucleotide
  Antisense strand to SEQ ID NO: 1098306
auaugucaccacagagagc

SEQ ID NO: 1098308 - RNA, 19 nt, Artificial Sequence
  Description of Artificial Sequence: Synthetic oligonucleotide
  Sense strand starting at position 3257 of SEQ ID NO: 915681
ggugacauauuugagcaaa

SEQ ID NO: 1098309 - RNA, 19 nt, Artificial Sequence
  Description of Artificial Sequence: Synthetic oligonucleotide
  Antisense strand to SEQ ID NO: 1098308
uuugcucaaauaugucacc

SEQ ID NO: 1098310 - RNA, 19 nt, Artificial Sequence
  Description of Artificial Sequence: Synthetic oligonucleotide
  Sense strand starting at position 3365 of SEQ ID NO: 915681
gggugucuugagggaaauc

SEQ ID NO: 1098311 - RNA, 19 nt, Artificial Sequence
  Description of Artificial Sequence: Synthetic oligonucleotide
  Antisense strand to SEQ ID NO: 1098310
gauuucccucaagacaccc

SEQ ID NO: 1098312 - RNA, 19 nt, Artificial Sequence
  Description of Artificial Sequence: Synthetic oligonucleotide
  Sense strand starting at position 3366 of SEQ ID NO: 915681
ggugucuugagggaaaucu

SEQ ID NO: 1098313 - RNA, 19 nt, Artificial Sequence
  Description of Artificial Sequence: Synthetic oligonucleotide
  Antisense strand to SEQ ID NO: 1098312
agauuucccucaagacacc

SEQ ID NO: 1098314 - RNA, 19 nt, Artificial Sequence
  Description of Artificial Sequence: Synthetic oligonucleotide
  Sense strand starting at position 3436 of SEQ ID NO: 915681
acccuagaguucucucauc

SEQ ID NO: 1098315 - RNA, 19 nt, Artificial Sequence
  Description of Artificial Sequence: Synthetic oligonucleotide
  Antisense strand to SEQ ID NO: 1098314
gaugagagaacucuagggu

SEQ ID NO: 1098316 - RNA, 19 nt, Artificial Sequence
  Description of Artificial Sequence: Synthetic oligonucleotide
  Sense strand starting at position 3970 of SEQ ID NO: 915681
cuugguuugcaucagagac

SEQ ID NO: 1098317 - RNA, 19 nt, Artificial Sequence
  Description of Artificial Sequence: Synthetic oligonucleotide
  Antisense strand to SEQ ID NO: 1098316
gucucugaugcaaaccaag

SEQ ID NO: 1098318 - RNA, 19 nt, Artificial Sequence
  Description of Artificial Sequence: Synthetic oligonucleotide
  Sense strand starting at position 52 of SEQ ID NO: 915682
guccuaaguccuuacaucu

SEQ ID NO: 1098319 - RNA, 19 nt, Artificial Sequence
  Description of Artificial Sequence: Synthetic oligonucleotide
  Antisense strand to SEQ ID NO: 1098318
agauguaaggacuuaggac

SEQ ID NO: 1098320 - RNA, 19 nt, Artificial Sequence
  Description of Artificial Sequence: Synthetic oligonucleotide
  Sense strand starting at position 112 of SEQ ID NO: 915682
agcuguguaaucucugcga

SEQ ID NO: 1098321 - RNA, 19 nt, Artificial Sequence
  Description of Artificial Sequence: Synthetic oligonucleotide
  Antisense strand to SEQ ID NO: 1098320
ucgcagagauuacacagcu

SEQ ID NO: 1098322 - RNA, 19 nt, Artificial Sequence
  Description of Artificial Sequence: Synthetic oligonucleotide
  Sense strand starting at position 159 of SEQ ID NO: 915682
gggucauaucguuuccgug

SEQ ID NO: 1098323 - RNA, 19 nt, Artificial Sequence
  Description of Artificial Sequence: Synthetic oligonucleotide
  Antisense strand to SEQ ID NO: 1098322
cacggaaacgauaugaccc

SEQ ID NO: 1098324 - RNA, 19 nt, Artificial Sequence
  Description of Artificial Sequence: Synthetic oligonucleotide
  Sense strand starting at position 190 of SEQ ID NO: 915682
ggugagucucgggaagaug

SEQ ID NO: 1098325 - RNA, 19 nt, Artificial Sequence
  Description of Artificial Sequence: Synthetic oligonucleotide
  Antisense strand to SEQ ID NO: 1098324
caucuucccgagacucacc

SEQ ID NO: 1098326 - RNA, 19 nt, Artificial Sequence
  Description of Artificial Sequence: Synthetic oligonucleotide
  Sense strand starting at position 269 of SEQ ID NO: 915682
agugaccugcccuagaaau

SEQ ID NO: 1098327 - RNA, 19 nt, Artificial Sequence
  Description of Artificial Sequence: Synthetic oligonucleotide
  Antisense strand to SEQ ID NO: 1098326
auuucuagggcaggucacu

SEQ ID NO: 1098328 - RNA, 19 nt, Artificial Sequence
  Description of Artificial Sequence: Synthetic oligonucleotide
  Sense strand starting at position 477 of SEQ ID NO: 915682
cuuugauccuggcucaaag

SEQ ID NO: 1098329 - RNA, 19 nt, Artificial Sequence
  Description of Artificial Sequence: Synthetic oligonucleotide
  Antisense strand to SEQ ID NO: 1098328
cuuugagccaggaucaaag

SEQ ID NO: 1098330 - RNA, 19 nt, Artificial Sequence
  Description of Artificial Sequence: Synthetic oligonucleotide
  Sense strand starting at position 525 of SEQ ID NO: 915682
cuacaaccgcacuaagaau

SEQ ID NO: 1098331 - RNA, 19 nt, Artificial Sequence
  Description of Artificial Sequence: Synthetic oligonucleotide
  Antisense strand to SEQ ID NO: 1098330
auucuuagugcgguuguag

SEQ ID NO: 1098332 - RNA, 19 nt, Artificial Sequence
  Description of Artificial Sequence: Synthetic oligonucleotide
  Sense strand starting at position 537 of SEQ ID NO: 915682
uaagaauuguucuugccag

SEQ ID NO: 1098333 - RNA, 19 nt, Artificial Sequence
  Description of Artificial Sequence: Synthetic oligonucleotide
  Antisense strand to SEQ ID NO: 1098332
cuggcaagaacaauucuua

SEQ ID NO: 1098334 - RNA, 19 nt, Artificial Sequence
  Description of Artificial Sequence: Synthetic oligonucleotide
  Sense strand starting at position 579 of SEQ ID NO: 915682
aagugcucagguugggaau

SEQ ID NO: 1098335 - RNA, 19 nt, Artificial Sequence
  Description of Artificial Sequence: Synthetic oligonucleotide
  Antisense strand to SEQ ID NO: 1098334
auucccaaccugagcacuu

SEQ ID NO: 1098336 - RNA, 19 nt, Artificial Sequence
  Description of Artificial Sequence: Synthetic oligonucleotide
  Sense strand starting at position 580 of SEQ ID NO: 915682
agugcucagguugggaaua

SEQ ID NO: 1098337 - RNA, 19 nt, Artificial Sequence
  Description of Artificial Sequence: Synthetic oligonucleotide
  Antisense strand to SEQ ID NO: 1098336
uauucccaaccugagcacu

SEQ ID NO: 1098338 - RNA, 19 nt, Artificial Sequence
  Description of Artificial Sequence: Synthetic oligonucleotide
  Sense strand starting at position 791 of SEQ ID NO: 915682
agcuguccuccuugaaaga

SEQ ID NO: 1098339 - RNA, 19 nt, Artificial Sequence
  Description of Artificial Sequence: Synthetic oligonucleotide
  Antisense strand to SEQ ID NO: 1098338
ucuuucaaggaggacagcu

SEQ ID NO: 1098340 - RNA, 19 nt, Artificial Sequence
  Description of Artificial Sequence: Synthetic oligonucleotide
  Sense strand starting at position 792 of SEQ ID NO: 915682
gcuguccuccuugaaagau

SEQ ID NO: 1098341 - RNA, 19 nt, Artificial Sequence
  Description of Artificial Sequence: Synthetic oligonucleotide
  Antisense strand to SEQ ID NO: 1098340
aucuuucaaggaggacagc

SEQ ID NO: 1098342 - RNA, 19 nt, Artificial Sequence
  Description of Artificial Sequence: Synthetic oligonucleotide
  Sense strand starting at position 1400 of SEQ ID NO: 915682
ccuggagacauugggcaaa

SEQ ID NO: 1098343 - RNA, 19 nt, Artificial Sequence
  Description of Artificial Sequence: Synthetic oligonucleotide
  Antisense strand to SEQ ID NO: 1098342
uuugcccaaugucuccagg

SEQ ID NO: 1098344 - RNA, 19 nt, Artificial Sequence
  Description of Artificial Sequence: Synthetic oligonucleotide
  Sense strand starting at position 1609 of SEQ ID NO: 915682
acagaauucucagcugaug

SEQ ID NO: 1098345 - RNA, 19 nt, Artificial Sequence
  Description of Artificial Sequence: Synthetic oligonucleotide
  Antisense strand to SEQ ID NO: 1098344
caucagcugagaauucugu

SEQ ID NO: 1098346 - RNA, 19 nt, Artificial Sequence
  Description of Artificial Sequence: Synthetic oligonucleotide
  Sense strand starting at position 1611 of SEQ ID NO: 915682
agaauucucagcugaugga

SEQ ID NO: 1098347 - RNA, 19 nt, Artificial Sequence
  Description of Artificial Sequence: Synthetic oligonucleotide
  Antisense strand to SEQ ID NO: 1098346
uccaucagcugagaauucu

SEQ ID NO: 1098348 - RNA, 19 nt, Artificial Sequence
  Description of Artificial Sequence: Synthetic oligonucleotide
  Sense strand starting at position 1986 of SEQ ID NO: 915682
gccaaacuggaaugauuau

SEQ ID NO: 1098349 - RNA, 19 nt, Artificial Sequence
  Description of Artificial Sequence: Synthetic oligonucleotide
  Antisense strand to SEQ ID NO: 1098348
auaaucauuccaguuuggc

SEQ ID NO: 1098350 - RNA, 19 nt, Artificial Sequence
  Description of Artificial Sequence: Synthetic oligonucleotide
  Sense strand starting at position 1993 of SEQ ID NO: 915682
uggaaugauuaugugucuu

SEQ ID NO: 1098351 - RNA, 19 nt, Artificial Sequence
  Description of Artificial Sequence: Synthetic oligonucleotide
  Antisense strand to SEQ ID NO: 1098350
aagacacauaaucauucca

SEQ ID NO: 1098352 - RNA, 19 nt, Artificial Sequence
  Description of Artificial Sequence: Synthetic oligonucleotide
  Sense strand starting at position 2089 of SEQ ID NO: 915682
acaccuaaggcguaacaaa

SEQ ID NO: 1098353 - RNA, 19 nt, Artificial Sequence
  Description of Artificial Sequence: Synthetic oligonucleotide
  Antisense strand to SEQ ID NO: 1098352
uuuguuacgccuuaggugu

SEQ ID NO: 1098354 - RNA, 19 nt, Artificial Sequence
  Description of Artificial Sequence: Synthetic oligonucleotide
  Sense strand starting at position 2314 of SEQ ID NO: 915682
agcaauaggauuggaaagu

SEQ ID NO: 1098355 - RNA, 19 nt, Artificial Sequence
  Description of Artificial Sequence: Synthetic oligonucleotide
  Antisense strand to SEQ ID NO: 1098354
acuuuccaauccuauugcu

SEQ ID NO: 1098356 - RNA, 19 nt, Artificial Sequence
  Description of Artificial Sequence: Synthetic oligonucleotide
  Sense strand starting at position 2344 of SEQ ID NO: 915682
gagggaguuucuucucuua

SEQ ID NO: 1098357 - RNA, 19 nt, Artificial Sequence
  Description of Artificial Sequence: Synthetic oligonucleotide
  Antisense strand to SEQ ID NO: 1098356
uaagagaagaaacucccuc

SEQ ID NO: 1098358 - RNA, 19 nt, Artificial Sequence
  Description of Artificial Sequence: Synthetic oligonucleotide
  Sense strand starting at position 2346 of SEQ ID NO: 915682
gggaguuucuucucuuagg

SEQ ID NO: 1098359 - RNA, 19 nt, Artificial Sequence
  Description of Artificial Sequence: Synthetic oligonucleotide
  Antisense strand to SEQ ID NO: 1098358
ccuaagagaagaaacuccc

SEQ ID NO: 1098360 - RNA, 19 nt, Artificial Sequence
  Description of Artificial Sequence: Synthetic oligonucleotide
  Sense strand starting at position 2355 of SEQ ID NO: 915682
uucucuuagggagguaaga

SEQ ID NO: 1098361 - RNA, 19 nt, Artificial Sequence
  Description of Artificial Sequence: Synthetic oligonucleotide
  Antisense strand to SEQ ID NO: 1098360
ucuuaccucccuaagagaa

SEQ ID NO: 1098362 - RNA, 19 nt, Artificial Sequence
  Description of Artificial Sequence: Synthetic oligonucleotide
  Sense strand starting at position 2519 of SEQ ID NO: 915682
cggagucauuuccuucuuu

SEQ ID NO: 1098363 - RNA, 19 nt, Artificial Sequence
  Description of Artificial Sequence: Synthetic oligonucleotide
  Antisense strand to SEQ ID NO: 1098362
aaagaaggaaaugacuccg

SEQ ID NO: 1098364 - RNA, 19 nt, Artificial Sequence
  Description of Artificial Sequence: Synthetic oligonucleotide
  Sense strand starting at position 2868 of SEQ ID NO: 915682
agguguugugcgccaccau

SEQ ID NO: 1098365 - RNA, 19 nt, Artificial Sequence
  Description of Artificial Sequence: Synthetic oligonucleotide
  Antisense strand to SEQ ID NO: 1098364
augguggcgcacaacaccu

SEQ ID NO: 1098366 - RNA, 19 nt, Artificial Sequence
  Description of Artificial Sequence: Synthetic oligonucleotide
  Sense strand starting at position 3141 of SEQ ID NO: 915682
cuuggauaauuguccacau

SEQ ID NO: 1098367 - RNA, 19 nt, Artificial Sequence
  Description of Artificial Sequence: Synthetic oligonucleotide
  Antisense strand to SEQ ID NO: 1098366
auguggacaauuauccaag

SEQ ID NO: 1098368 - RNA, 19 nt, Artificial Sequence
  Description of Artificial Sequence: Synthetic oligonucleotide
  Sense strand starting at position 3142 of SEQ ID NO: 915682
uuggauaauuguccacauu

SEQ ID NO: 1098369 - RNA, 19 nt, Artificial Sequence
  Description of Artificial Sequence: Synthetic oligonucleotide
  Antisense strand to SEQ ID NO: 1098368
aauguggacaauuauccaa

SEQ ID NO: 1098370 - RNA, 19 nt, Artificial Sequence
  Description of Artificial Sequence: Synthetic oligonucleotide
  Sense strand starting at position 3306 of SEQ ID NO: 915682
ggguuagacguguguauuu

SEQ ID NO: 1098371 - RNA, 19 nt, Artificial Sequence
  Description of Artificial Sequence: Synthetic oligonucleotide
  Antisense strand to SEQ ID NO: 1098370
aaauacacacgucuaaccc

SEQ ID NO: 1098372 - RNA, 19 nt, Artificial Sequence
  Description of Artificial Sequence: Synthetic oligonucleotide
  Sense strand starting at position 3308 of SEQ ID NO: 915682
guuagacguguguauuugu

SEQ ID NO: 1098373 - RNA, 19 nt, Artificial Sequence
  Description of Artificial Sequence: Synthetic oligonucleotide
  Antisense strand to SEQ ID NO: 1098372
acaaauacacacgucuaac

SEQ ID NO: 1098374 - RNA, 19 nt, Artificial Sequence
  Description of Artificial Sequence: Synthetic oligonucleotide
  Sense strand starting at position 3321 of SEQ ID NO: 915682
auuuguccuucuguugaua

SEQ ID NO: 1098375 - RNA, 19 nt, Artificial Sequence
  Description of Artificial Sequence: Synthetic oligonucleotide
  Antisense strand to SEQ ID NO: 1098374
uaucaacagaaggacaaau

SEQ ID NO: 1098376 - RNA, 19 nt, Artificial Sequence
  Description of Artificial Sequence: Synthetic oligonucleotide
  Sense strand starting at position 3421 of SEQ ID NO: 915682
agccuauggacaugaagua

SEQ ID NO: 1098377 - RNA, 19 nt, Artificial Sequence
  Description of Artificial Sequence: Synthetic oligonucleotide
  Antisense strand to SEQ ID NO: 1098376
uacuucauguccauaggcu

SEQ ID NO: 1098378 - RNA, 19 nt, Artificial Sequence
  Description of Artificial Sequence: Synthetic oligonucleotide
  Sense strand starting at position 3437 of SEQ ID NO: 915682
guaguuucgggcagaguug

SEQ ID NO: 1098379 - RNA, 19 nt, Artificial Sequence
  Description of Artificial Sequence: Synthetic oligonucleotide
  Antisense strand to SEQ ID NO: 1098378
caacucugcccgaaacuac

SEQ ID NO: 1098380 - RNA, 19 nt, Artificial Sequence
  Description of Artificial Sequence: Synthetic oligonucleotide
  Sense strand starting at position 3515 of SEQ ID NO: 915682
gaacacaaguguuugaaag

SEQ ID NO: 1098381 - RNA, 19 nt, Artificial Sequence
  Description of Artificial Sequence: Synthetic oligonucleotide
  Antisense strand to SEQ ID NO: 1098380
cuuucaaacacuuguguuc

SEQ ID NO: 1098382 - RNA, 19 nt, Artificial Sequence
  Description of Artificial Sequence: Synthetic oligonucleotide
  Sense strand starting at position 3536 of SEQ ID NO: 915682
ccagguucaugguuuggga

SEQ ID NO: 1098383 - RNA, 19 nt, Artificial Sequence
  Description of Artificial Sequence: Synthetic oligonucleotide
  Antisense strand to SEQ ID NO: 1098382
ucccaaaccaugaaccugg

SEQ ID NO: 1098384 - RNA, 19 nt, Artificial Sequence
  Description of Artificial Sequence: Synthetic oligonucleotide
  Sense strand starting at position 3538 of SEQ ID NO: 915682
agguucaugguuugggaua

SEQ ID NO: 1098385 - RNA, 19 nt, Artificial Sequence
  Description of Artificial Sequence: Synthetic oligonucleotide
  Antisense strand to SEQ ID NO: 1098384
uaucccaaaccaugaaccu

SEQ ID NO: 1098386 - RNA, 19 nt, Artificial Sequence
  Description of Artificial Sequence: Synthetic oligonucleotide
  Sense strand starting at position 3598 of SEQ ID NO: 915682
aauaccggaucuguguaau

SEQ ID NO: 1098387 - RNA, 19 nt, Artificial Sequence
  Description of Artificial Sequence: Synthetic oligonucleotide
  Antisense strand to SEQ ID NO: 1098386
auuacacagauccgguauu

SEQ ID NO: 1098388 - RNA, 19 nt, Artificial Sequence
  Description of Artificial Sequence: Synthetic oligonucleotide
  Sense strand starting at position 3601 of SEQ ID NO: 915682
accggaucuguguaaugga

SEQ ID NO: 1098389 - RNA, 19 nt, Artificial Sequence
  Description of Artificial Sequence: Synthetic oligonucleotide
  Antisense strand to SEQ ID NO: 1098388
uccauuacacagauccggu

SEQ ID NO: 1098390 - RNA, 19 nt, Artificial Sequence
  Description of Artificial Sequence: Synthetic oligonucleotide
  Sense strand starting at position 3615 of SEQ ID NO: 915682
auggauuauuggccaaauc

SEQ ID NO: 1098391 - RNA, 19 nt, Artificial Sequence
  Description of Artificial Sequence: Synthetic oligonucleotide
  Antisense strand to SEQ ID NO: 1098390
gauuuggccaauaauccau

SEQ ID NO: 1098392 - RNA, 19 nt, Artificial Sequence
  Description of Artificial Sequence: Synthetic oligonucleotide
  Sense strand starting at position 3616 of SEQ ID NO: 915682
uggauuauuggccaaaucu

SEQ ID NO: 1098393 - RNA, 19 nt, Artificial Sequence
  Description of Artificial Sequence: Synthetic oligonucleotide
  Antisense strand to SEQ ID NO: 1098392
agauuuggccaauaaucca

SEQ ID NO: 1098394 - RNA, 19 nt, Artificial Sequence
  Description of Artificial Sequence: Synthetic oligonucleotide
  Sense strand starting at position 3625 of SEQ ID NO: 915682
ggccaaaucucagcugaug

SEQ ID NO: 1098395 - RNA, 19 nt, Artificial Sequence
  Description of Artificial Sequence: Synthetic oligonucleotide
  Antisense strand to SEQ ID NO: 1098394
caucagcugagauuuggcc

SEQ ID NO: 1098396 - RNA, 19 nt, Artificial Sequence
  Description of Artificial Sequence: Synthetic oligonucleotide
  Sense strand starting at position 3666 of SEQ ID NO: 915682
gucucugagcagcagagau

SEQ ID NO: 1098397 - RNA, 19 nt, Artificial Sequence
  Description of Artificial Sequence: Synthetic oligonucleotide
  Antisense strand to SEQ ID NO: 1098396
aucucugcugcucagagac

SEQ ID NO: 1098398 - RNA, 19 nt, Artificial Sequence
  Description of Artificial Sequence: Synthetic oligonucleotide
  Sense strand starting at position 37 of SEQ ID NO: 915683
ugcaaauaugagcauguga

SEQ ID NO: 1098399 - RNA, 19 nt, Artificial Sequence
  Description of Artificial Sequence: Synthetic oligonucleotide
  Antisense strand to SEQ ID NO: 1098398
ucacaugcucauauuugca

SEQ ID NO: 1098400 - RNA, 19 nt, Artificial Sequence
  Description of Artificial Sequence: Synthetic oligonucleotide
  Sense strand starting at position 328 of SEQ ID NO: 915683
aucacuucuccaggaagcu

SEQ ID NO: 1098401 - RNA, 19 nt, Artificial Sequence
  Description of Artificial Sequence: Synthetic oligonucleotide
  Antisense strand to SEQ ID NO: 1098400
agcuuccuggagaagugau

SEQ ID NO: 1098402 - RNA, 19 nt, Artificial Sequence
  Description of Artificial Sequence: Synthetic oligonucleotide
  Sense strand starting at position 329 of SEQ ID NO: 915683
ucacuucuccaggaagcuu

SEQ ID NO: 1098403 - RNA, 19 nt, Artificial Sequence
  Description of Artificial Sequence: Synthetic oligonucleotide
  Antisense strand to SEQ ID NO: 1098402
aagcuuccuggagaaguga

SEQ ID NO: 1098404 - RNA, 19 nt, Artificial Sequence
  Description of Artificial Sequence: Synthetic oligonucleotide
  Sense strand starting at position 337 of SEQ ID NO: 915683
ccaggaagcuuccuucuau

SEQ ID NO: 1098405 - RNA, 19 nt, Artificial Sequence
  Description of Artificial Sequence: Synthetic oligonucleotide
  Antisense strand to SEQ ID NO: 1098404
auagaaggaagcuuccugg

SEQ ID NO: 1098406 - RNA, 19 nt, Artificial Sequence
  Description of Artificial Sequence: Synthetic oligonucleotide
  Sense strand starting at position 376 of SEQ ID NO: 915683
ccuauauugugcucauuua

SEQ ID NO: 1098407 - RNA, 19 nt, Artificial Sequence
  Description of Artificial Sequence: Synthetic oligonucleotide
  Antisense strand to SEQ ID NO: 1098406
uaaaugagcacaauauagg

SEQ ID NO: 1098408 - RNA, 19 nt, Artificial Sequence
  Description of Artificial Sequence: Synthetic oligonucleotide
  Sense strand starting at position 651 of SEQ ID NO: 915683
uuuauaauccaguagggua

SEQ ID NO: 1098409 - RNA, 19 nt, Artificial Sequence
  Description of Artificial Sequence: Synthetic oligonucleotide
  Antisense strand to SEQ ID NO: 1098408
uacccuacuggauuauaaa

SEQ ID NO: 1098410 - RNA, 19 nt, Artificial Sequence
  Description of Artificial Sequence: Synthetic oligonucleotide
  Sense strand starting at position 753 of SEQ ID NO: 915683
gguuguacccaaugaggau

SEQ ID NO: 1098411 - RNA, 19 nt, Artificial Sequence
  Description of Artificial Sequence: Synthetic oligonucleotide
  Antisense strand to SEQ ID NO: 1098410
auccucauuggguacaacc

SEQ ID NO: 1098412 - RNA, 19 nt, Artificial Sequence
  Description of Artificial Sequence: Synthetic oligonucleotide
  Sense strand starting at position 776 of SEQ ID NO: 915683
gccugaaaugcugacucca

SEQ ID NO: 1098413 - RNA, 19 nt, Artificial Sequence
  Description of Artificial Sequence: Synthetic oligonucleotide
  Antisense strand to SEQ ID NO: 1098412
uggagucagcauuucaggc

SEQ ID NO: 1098414 - RNA, 19 nt, Artificial Sequence
  Description of Artificial Sequence: Synthetic oligonucleotide
  Sense strand starting at position 794 of SEQ ID NO: 915683
aggacaguauuggcuuaaa

SEQ ID NO: 1098415 - RNA, 19 nt, Artificial Sequence
  Description of Artificial Sequence: Synthetic oligonucleotide
  Antisense strand to SEQ ID NO: 1098414
uuuaagccaauacuguccu

SEQ ID NO: 1098416 - RNA, 19 nt, Artificial Sequence
  Description of Artificial Sequence: Synthetic oligonucleotide
  Sense strand starting at position 797 of SEQ ID NO: 915683
acaguauuggcuuaaaugu

SEQ ID NO: 1098417 - RNA, 19 nt, Artificial Sequence
  Description of Artificial Sequence: Synthetic oligonucleotide
  Antisense strand to SEQ ID NO: 1098416
acauuuaagccaauacugu

SEQ ID NO: 1098418 - RNA, 19 nt, Artificial Sequence
  Description of Artificial Sequence: Synthetic oligonucleotide
  Sense strand starting at position 1382 of SEQ ID NO: 915683
gagagaauuccagggcaug

SEQ ID NO: 1098419 - RNA, 19 nt, Artificial Sequence
  Description of Artificial Sequence: Synthetic oligonucleotide
  Antisense strand to SEQ ID NO: 1098418
caugcccuggaauucucuc

SEQ ID NO: 1098420 - RNA, 19 nt, Artificial Sequence
  Description of Artificial Sequence: Synthetic oligonucleotide
  Sense strand starting at position 1427 of SEQ ID NO: 915683
caaggaagcuuggcuuuaa

SEQ ID NO: 1098421 - RNA, 19 nt, Artificial Sequence
  Description of Artificial Sequence: Synthetic oligonucleotide
  Antisense strand to SEQ ID NO: 1098420
uuaaagccaagcuuccuug

SEQ ID NO: 1098422 - RNA, 19 nt, Artificial Sequence
  Description of Artificial Sequence: Synthetic oligonucleotide
  Sense strand starting at position 1428 of SEQ ID NO: 915683
aaggaagcuuggcuuuaaa

SEQ ID NO: 1098423 - RNA, 19 nt, Artificial Sequence
  Description of Artificial Sequence: Synthetic oligonucleotide
  Antisense strand to SEQ ID NO: 1098422
uuuaaagccaagcuuccuu

SEQ ID NO: 1098424 - RNA, 19 nt, Artificial Sequence
  Description of Artificial Sequence: Synthetic oligonucleotide
  Sense strand starting at position 1601 of SEQ ID NO: 915683
uuuguugagcaccacauau

SEQ ID NO: 1098425 - RNA, 19 nt, Artificial Sequence
  Description of Artificial Sequence: Synthetic oligonucleotide
  Antisense strand to SEQ ID NO: 1098424
auauguggugcucaacaaa

SEQ ID NO: 1098426 - RNA, 19 nt, Artificial Sequence
  Description of Artificial Sequence: Synthetic oligonucleotide
  Sense strand starting at position 1621 of SEQ ID NO: 915683
ugcaaagcacuugauagau

SEQ ID NO: 1098427 - RNA, 19 nt, Artificial Sequence
  Description of Artificial Sequence: Synthetic oligonucleotide
  Antisense strand to SEQ ID NO: 1098426
aucuaucaagugcuuugca

SEQ ID NO: 1098428 - RNA, 19 nt, Artificial Sequence
  Description of Artificial Sequence: Synthetic oligonucleotide
  Sense strand starting at position 1828 of SEQ ID NO: 915683
ggcacagagacguaaccuu

SEQ ID NO: 1098429 - RNA, 19 nt, Artificial Sequence
  Description of Artificial Sequence: Synthetic oligonucleotide
  Antisense strand to SEQ ID NO: 1098428
aagguuacgucucugugcc

SEQ ID NO: 1098430 - RNA, 19 nt, Artificial Sequence
  Description of Artificial Sequence: Synthetic oligonucleotide
  Sense strand starting at position 1882 of SEQ ID NO: 915683
gggucuacuaggcaauguu

SEQ ID NO: 1098431 - RNA, 19 nt, Artificial Sequence
  Description of Artificial Sequence: Synthetic oligonucleotide
  Antisense strand to SEQ ID NO: 1098430
aacauugccuaguagaccc

SEQ ID NO: 1098432 - RNA, 19 nt, Artificial Sequence
  Description of Artificial Sequence: Synthetic oligonucleotide
  Sense strand starting at position 1913 of SEQ ID NO: 915683
ucaggccagcauugauuaa

SEQ ID NO: 1098433 - RNA, 19 nt, Artificial Sequence
  Description of Artificial Sequence: Synthetic oligonucleotide
  Antisense strand to SEQ ID NO: 1098432
uuaaucaaugcuggccuga

SEQ ID NO: 1098434 - RNA, 19 nt, Artificial Sequence
  Description of Artificial Sequence: Synthetic oligonucleotide
  Sense strand starting at position 1917 of SEQ ID NO: 915683
gccagcauugauuaaagcu

SEQ ID NO: 1098435 - RNA, 19 nt, Artificial Sequence
  Description of Artificial Sequence: Synthetic oligonucleotide
  Antisense strand to SEQ ID NO: 1098434
agcuuuaaucaaugcuggc

SEQ ID NO: 1098436 - RNA, 19 nt, Artificial Sequence
  Description of Artificial Sequence: Synthetic oligonucleotide
  Sense strand starting at position 2267 of SEQ ID NO: 915683
cugacagagcuguauugga

SEQ ID NO: 1098437 - RNA, 19 nt, Artificial Sequence
  Description of Artificial Sequence: Synthetic oligonucleotide
  Antisense strand to SEQ ID NO: 1098436
uccaauacagcucugucag

SEQ ID NO: 1098438 - RNA, 19 nt, Artificial Sequence
  Description of Artificial Sequence: Synthetic oligonucleotide
  Sense strand starting at position 2271 of SEQ ID NO: 915683
cagagcuguauuggagaga

SEQ ID NO: 1098439 - RNA, 19 nt, Artificial Sequence
  Description of Artificial Sequence: Synthetic oligonucleotide
  Antisense strand to SEQ ID NO: 1098438
ucucuccaauacagcucug

SEQ ID NO: 1098440 - RNA, 19 nt, Artificial Sequence
  Description of Artificial Sequence: Synthetic oligonucleotide
  Sense strand starting at position 2276 of SEQ ID NO: 915683
cuguauuggagagaccgau

SEQ ID NO: 1098441 - RNA, 19 nt, Artificial Sequence
  Description of Artificial Sequence: Synthetic oligonucleotide
  Antisense strand to SEQ ID NO: 1098440
aucggucucuccaauacag

SEQ ID NO: 1098442 - RNA, 19 nt, Artificial Sequence
  Description of Artificial Sequence: Synthetic oligonucleotide
  Sense strand starting at position 2399 of SEQ ID NO: 915683
gggugaugauggaagaucu

SEQ ID NO: 1098443 - RNA, 19 nt, Artificial Sequence
  Description of Artificial Sequence: Synthetic oligonucleotide
  Antisense strand to SEQ ID NO: 1098442
agaucuuccaucaucaccc

SEQ ID NO: 1098444 - RNA, 19 nt, Artificial Sequence
  Description of Artificial Sequence: Synthetic oligonucleotide
  Sense strand starting at position 2406 of SEQ ID NO: 915683
gauggaagaucuuugucac

SEQ ID NO: 1098445 - RNA, 19 nt, Artificial Sequence
  Description of Artificial Sequence: Synthetic oligonucleotide
  Antisense strand to SEQ ID NO: 1098444
gugacaaagaucuuccauc

SEQ ID NO: 1098446 - RNA, 19 nt, Artificial Sequence
  Description of Artificial Sequence: Synthetic oligonucleotide
  Sense strand starting at position 2588 of SEQ ID NO: 915683
aggcacaucucuuuagaca

SEQ ID NO: 1098447 - RNA, 19 nt, Artificial Sequence
  Description of Artificial Sequence: Synthetic oligonucleotide
  Antisense strand to SEQ ID NO: 1098446
ugucuaaagagaugugccu

SEQ ID NO: 1098448 - RNA, 19 nt, Artificial Sequence
  Description of Artificial Sequence: Synthetic oligonucleotide
  Sense strand starting at position 2589 of SEQ ID NO: 915683
ggcacaucucuuuagacaa

SEQ ID NO: 1098449 - RNA, 19 nt, Artificial Sequence
  Description of Artificial Sequence: Synthetic oligonucleotide
  Antisense strand to SEQ ID NO: 1098448
uugucuaaagagaugugcc

SEQ ID NO: 1098450 - RNA, 19 nt, Artificial Sequence
  Description of Artificial Sequence: Synthetic oligonucleotide
  Sense strand starting at position 2819 of SEQ ID NO: 915683
uugagauauugccuauaaa

SEQ ID NO: 1098451 - RNA, 19 nt, Artificial Sequence
  Description of Artificial Sequence: Synthetic oligonucleotide
  Antisense strand to SEQ ID NO: 1098450
uuuauaggcaauaucucaa

SEQ ID NO: 1098452 - RNA, 19 nt, Artificial Sequence
  Description of Artificial Sequence: Synthetic oligonucleotide
  Sense strand starting at position 2967 of SEQ ID NO: 915683
ccucauacacuguauuagu

SEQ ID NO: 1098453 - RNA, 19 nt, Artificial Sequence
  Description of Artificial Sequence: Synthetic oligonucleotide
  Antisense strand to SEQ ID NO: 1098452
acuaauacaguguaugagg

SEQ ID NO: 1098454 - RNA, 19 nt, Artificial Sequence
  Description of Artificial Sequence: Synthetic oligonucleotide
  Sense strand starting at position 3040 of SEQ ID NO: 915683
agaaguucucacuguucca

SEQ ID NO: 1098455 - RNA, 19 nt, Artificial Sequence
  Description of Artificial Sequence: Synthetic oligonucleotide
  Antisense strand to SEQ ID NO: 1098454
uggaacagugagaacuucu

SEQ ID NO: 1098456 - RNA, 19 nt, Artificial Sequence
  Description of Artificial Sequence: Synthetic oligonucleotide
  Sense strand starting at position 3139 of SEQ ID NO: 915683
gagcaaggccucuaacaug

SEQ ID NO: 1098457 - RNA, 19 nt, Artificial Sequence
  Description of Artificial Sequence: Synthetic oligonucleotide
  Antisense strand to SEQ ID NO: 1098456
cauguuagaggccuugcuc

SEQ ID NO: 1098458 - RNA, 19 nt, Artificial Sequence
  Description of Artificial Sequence: Synthetic oligonucleotide
  Sense strand starting at position 3262 of SEQ ID NO: 915683
ucaugaagguuucuugauc

SEQ ID NO: 1098459 - RNA, 19 nt, Artificial Sequence
  Description of Artificial Sequence: Synthetic oligonucleotide
  Antisense strand to SEQ ID NO: 1098458
gaucaagaaaccuucauga

SEQ ID NO: 1098460 - RNA, 19 nt, Artificial Sequence
  Description of Artificial Sequence: Synthetic oligonucleotide
  Sense strand starting at position 3263 of SEQ ID NO: 915683
caugaagguuucuugauca

SEQ ID NO: 1098461 - RNA, 19 nt, Artificial Sequence
  Description of Artificial Sequence: Synthetic oligonucleotide
  Antisense strand to SEQ ID NO: 1098460
ugaucaagaaaccuucaug

SEQ ID NO: 1098462 - RNA, 19 nt, Artificial Sequence
  Description of Artificial Sequence: Synthetic oligonucleotide
  Sense strand starting at position 3267 of SEQ ID NO: 915683
aagguuucuugaucaugaa

SEQ ID NO: 1098463 - RNA, 19 nt, Artificial Sequence
  Description of Artificial Sequence: Synthetic oligonucleotide
  Antisense strand to SEQ ID NO: 1098462
uucaugaucaagaaaccuu

SEQ ID NO: 1098464 - RNA, 19 nt, Artificial Sequence
  Description of Artificial Sequence: Synthetic oligonucleotide
  Sense strand starting at position 3461 of SEQ ID NO: 915683
agaggucagcugugaauua

SEQ ID NO: 1098465 - RNA, 19 nt, Artificial Sequence
  Description of Artificial Sequence: Synthetic oligonucleotide
  Antisense strand to SEQ ID NO: 1098464
uaauucacagcugaccucu

SEQ ID NO: 1098466 - RNA, 19 nt, Artificial Sequence
  Description of Artificial Sequence: Synthetic oligonucleotide
  Sense strand starting at position 3532 of SEQ ID NO: 915683
ugaggucuccuaggacaau

SEQ ID NO: 1098467 - RNA, 19 nt, Artificial Sequence
  Description of Artificial Sequence: Synthetic oligonucleotide
  Antisense strand to SEQ ID NO: 1098466
auuguccuaggagaccuca

SEQ ID NO: 1098468 - RNA, 19 nt, Artificial Sequence
  Description of Artificial Sequence: Synthetic oligonucleotide
  Sense strand starting at position 3663 of SEQ ID NO: 915683
agauguaaguaacuguuau

SEQ ID NO: 1098469 - RNA, 19 nt, Artificial Sequence
  Description of Artificial Sequence: Synthetic oligonucleotide
  Antisense strand to SEQ ID NO: 1098468
auaacaguuacuuacaucu

SEQ ID NO: 1098470 - RNA, 19 nt, Artificial Sequence
  Description of Artificial Sequence: Synthetic oligonucleotide
  Sense strand starting at position 3735 of SEQ ID NO: 915683
aauagcugcccugaggaua

SEQ ID NO: 1098471 - RNA, 19 nt, Artificial Sequence
  Description of Artificial Sequence: Synthetic oligonucleotide
  Antisense strand to SEQ ID NO: 1098470
uauccucagggcagcuauu

SEQ ID NO: 1098472 - RNA, 19 nt, Artificial Sequence
  Description of Artificial Sequence: Synthetic oligonucleotide
  Sense strand starting at position 3757 of SEQ ID NO: 915683
agaagagggcuuugcaaug

SEQ ID NO: 1098473 - RNA, 19 nt, Artificial Sequence
  Description of Artificial Sequence: Synthetic oligonucleotide
  Antisense strand to SEQ ID NO: 1098472
cauugcaaagcccucuucu

SEQ ID NO: 1098474 - RNA, 19 nt, Artificial Sequence
  Description of Artificial Sequence: Synthetic oligonucleotide
  Sense strand starting at position 3762 of SEQ ID NO: 915683
agggcuuugcaauggagga

SEQ ID NO: 1098475 - RNA, 19 nt, Artificial Sequence
  Description of Artificial Sequence: Synthetic oligonucleotide
  Antisense strand to SEQ ID NO: 1098474
uccuccauugcaaagcccu

SEQ ID NO: 1098476 - RNA, 19 nt, Artificial Sequence
  Description of Artificial Sequence: Synthetic oligonucleotide
  Sense strand starting at position 3836 of SEQ ID NO: 915683
aaauauauugcacguaaug

SEQ ID NO: 1098477 - RNA, 19 nt, Artificial Sequence
  Description of Artificial Sequence: Synthetic oligonucleotide
  Antisense strand to SEQ ID NO: 1098476
cauuacgugcaauauauuu

SEQ ID NO: 1098478 - RNA, 19 nt, Artificial Sequence
  Description of Artificial Sequence: Synthetic oligonucleotide
  Sense strand starting at position 122 of SEQ ID NO: 915684
accagauauuaagcuuugu

SEQ ID NO: 1098479 - RNA, 19 nt, Artificial Sequence
  Description of Artificial Sequence: Synthetic oligonucleotide
  Antisense strand to SEQ ID NO: 1098478
acaaagcuuaauaucuggu

SEQ ID NO: 1098480 - RNA, 19 nt, Artificial Sequence
  Description of Artificial Sequence: Synthetic oligonucleotide
  Sense strand starting at position 142 of SEQ ID NO: 915684
ugucuuguuccauagaaau

SEQ ID NO: 1098481 - RNA, 19 nt, Artificial Sequence
  Description of Artificial Sequence: Synthetic oligonucleotide
  Antisense strand to SEQ ID NO: 1098480
auuucuauggaacaagaca

SEQ ID NO: 1098482 - RNA, 19 nt, Artificial Sequence
  Description of Artificial Sequence: Synthetic oligonucleotide
  Sense strand starting at position 178 of SEQ ID NO: 915684
ccuguuugccuacaucaua

SEQ ID NO: 1098483 - RNA, 19 nt, Artificial Sequence
  Description of Artificial Sequence: Synthetic oligonucleotide
  Antisense strand to SEQ ID NO: 1098482
uaugauguaggcaaacagg

SEQ ID NO: 1098484 - RNA, 19 nt, Artificial Sequence
  Description of Artificial Sequence: Synthetic oligonucleotide
  Sense strand starting at position 201 of SEQ ID NO: 915684
gaggccuagcuuugagaac

SEQ ID NO: 1098485 - RNA, 19 nt, Artificial Sequence
  Description of Artificial Sequence: Synthetic oligonucleotide
  Antisense strand to SEQ ID NO: 1098484
guucucaaagcuaggccuc

SEQ ID NO: 1098486 - RNA, 19 nt, Artificial Sequence
  Description of Artificial Sequence: Synthetic oligonucleotide
  Sense strand starting at position 283 of SEQ ID NO: 915684
aaaugagaggcugguuuaa

SEQ ID NO: 1098487 - RNA, 19 nt, Artificial Sequence
  Description of Artificial Sequence: Synthetic oligonucleotide
  Antisense strand to SEQ ID NO: 1098486
uuaaaccagccucucauuu

SEQ ID NO: 1098488 - RNA, 19 nt, Artificial Sequence
  Description of Artificial Sequence: Synthetic oligonucleotide
  Sense strand starting at position 285 of SEQ ID NO: 915684
augagaggcugguuuaaug

SEQ ID NO: 1098489 - RNA, 19 nt, Artificial Sequence
  Description of Artificial Sequence: Synthetic oligonucleotide
  Antisense strand to SEQ ID NO: 1098488
cauuaaaccagccucucau

SEQ ID NO: 1098490 - RNA, 19 nt, Artificial Sequence
  Description of Artificial Sequence: Synthetic oligonucleotide
  Sense strand starting at position 317 of SEQ ID NO: 915684
cucaauuacuagcccgauu

SEQ ID NO: 1098491 - RNA, 19 nt, Artificial Sequence
  Description of Artificial Sequence: Synthetic oligonucleotide
  Antisense strand to SEQ ID NO: 1098490
aaucgggcuaguaauugag

SEQ ID NO: 1098492 - RNA, 19 nt, Artificial Sequence
  Description of Artificial Sequence: Synthetic oligonucleotide
  Sense strand starting at position 431 of SEQ ID NO: 915684
uauggcauccuguaugcua

SEQ ID NO: 1098493 - RNA, 19 nt, Artificial Sequence
  Description of Artificial Sequence: Synthetic oligonucleotide
  Antisense strand to SEQ ID NO: 1098492
uagcauacaggaugccaua

SEQ ID NO: 1098494 - RNA, 19 nt, Artificial Sequence
  Description of Artificial Sequence: Synthetic oligonucleotide
  Sense strand starting at position 460 of SEQ ID NO: 915684
auuaaaggucccuggaaac

SEQ ID NO: 1098495 - RNA, 19 nt, Artificial Sequence
  Description of Artificial Sequence: Synthetic oligonucleotide
  Antisense strand to SEQ ID NO: 1098494
guuuccagggaccuuuaau

SEQ ID NO: 1098496 - RNA, 19 nt, Artificial Sequence
  Description of Artificial Sequence: Synthetic oligonucleotide
  Sense strand starting at position 494 of SEQ ID NO: 915684
gcagcuuuacucugauaac

SEQ ID NO: 1098497 - RNA, 19 nt, Artificial Sequence
  Description of Artificial Sequence: Synthetic oligonucleotide
  Antisense strand to SEQ ID NO: 1098496
guuaucagaguaaagcugc

SEQ ID NO: 1098498 - RNA, 19 nt, Artificial Sequence
  Description of Artificial Sequence: Synthetic oligonucleotide
  Sense strand starting at position 976 of SEQ ID NO: 915684
aagggaaagugcuuuaagu

SEQ ID NO: 1098499 - RNA, 19 nt, Artificial Sequence
  Description of Artificial Sequence: Synthetic oligonucleotide
  Antisense strand to SEQ ID NO: 1098498
acuuaaagcacuuucccuu

SEQ ID NO: 1098500 - RNA, 19 nt, Artificial Sequence
  Description of Artificial Sequence: Synthetic oligonucleotide
  Sense strand starting at position 978 of SEQ ID NO: 915684
gggaaagugcuuuaaguuu

SEQ ID NO: 1098501 - RNA, 19 nt, Artificial Sequence
  Description of Artificial Sequence: Synthetic oligonucleotide
  Antisense strand to SEQ ID NO: 1098500
aaacuuaaagcacuuuccc

SEQ ID NO: 1098502 - RNA, 19 nt, Artificial Sequence
  Description of Artificial Sequence: Synthetic oligonucleotide
  Sense strand starting at position 1167 of SEQ ID NO: 915684
guguacacucuagaaaugu

SEQ ID NO: 1098503 - RNA, 19 nt, Artificial Sequence
  Description of Artificial Sequence: Synthetic oligonucleotide
  Antisense strand to SEQ ID NO: 1098502
acauuucuagaguguacac

SEQ ID NO: 1098504 - RNA, 19 nt, Artificial Sequence
  Description of Artificial Sequence: Synthetic oligonucleotide
  Sense strand starting at position 1401 of SEQ ID NO: 915684
cguuauacacguguaugua

SEQ ID NO: 1098505 - RNA, 19 nt, Artificial Sequence
  Description of Artificial Sequence: Synthetic oligonucleotide
  Antisense strand to SEQ ID NO: 1098504
uacauacacguguauaacg

SEQ ID NO: 1098506 - RNA, 19 nt, Artificial Sequence
  Description of Artificial Sequence: Synthetic oligonucleotide
  Sense strand starting at position 1553 of SEQ ID NO: 915684
uuuagacucgaugaugguu

SEQ ID NO: 1098507 - RNA, 19 nt, Artificial Sequence
  Description of Artificial Sequence: Synthetic oligonucleotide
  Antisense strand to SEQ ID NO: 1098506
aaccaucaucgagucuaaa

SEQ ID NO: 1098508 - RNA, 19 nt, Artificial Sequence
  Description of Artificial Sequence: Synthetic oligonucleotide
  Sense strand starting at position 1582 of SEQ ID NO: 915684
acuuaauagucucuaaguc

SEQ ID NO: 1098509 - RNA, 19 nt, Artificial Sequence
  Description of Artificial Sequence: Synthetic oligonucleotide
  Antisense strand to SEQ ID NO: 1098508
gacuuagagacuauuaagu

SEQ ID NO: 1098510 - RNA, 19 nt, Artificial Sequence
  Description of Artificial Sequence: Synthetic oligonucleotide
  Sense strand starting at position 1622 of SEQ ID NO: 915684
gguguccucagagagguaa

SEQ ID NO: 1098511 - RNA, 19 nt, Artificial Sequence
  Description of Artificial Sequence: Synthetic oligonucleotide
  Antisense strand to SEQ ID NO: 1098510
uuaccucucugaggacacc

SEQ ID NO: 1098512 - RNA, 19 nt, Artificial Sequence
  Description of Artificial Sequence: Synthetic oligonucleotide
  Sense strand starting at position 2080 of SEQ ID NO: 915684
agucuaguugucgcuuuau

SEQ ID NO: 1098513 - RNA, 19 nt, Artificial Sequence
  Description of Artificial Sequence: Synthetic oligonucleotide
  Antisense strand to SEQ ID NO: 1098512
auaaagcgacaacuagacu

SEQ ID NO: 1098514 - RNA, 19 nt, Artificial Sequence
  Description of Artificial Sequence: Synthetic oligonucleotide
  Sense strand starting at position 2090 of SEQ ID NO: 915684
ucgcuuuauccgccuaagu

SEQ ID NO: 1098515 - RNA, 19 nt, Artificial Sequence
  Description of Artificial Sequence: Synthetic oligonucleotide
  Antisense strand to SEQ ID NO: 1098514
acuuaggcggauaaagcga

SEQ ID NO: 1098516 - RNA, 19 nt, Artificial Sequence
  Description of Artificial Sequence: Synthetic oligonucleotide
  Sense strand starting at position 2162 of SEQ ID NO: 915684
auagcacuuccugaacguu

SEQ ID NO: 1098517 - RNA, 19 nt, Artificial Sequence
  Description of Artificial Sequence: Synthetic oligonucleotide
  Antisense strand to SEQ ID NO: 1098516
aacguucaggaagugcuau

SEQ ID NO: 1098518 - RNA, 19 nt, Artificial Sequence
  Description of Artificial Sequence: Synthetic oligonucleotide
  Sense strand starting at position 2170 of SEQ ID NO: 915684
uccugaacguucucauaag

SEQ ID NO: 1098519 - RNA, 19 nt, Artificial Sequence
  Description of Artificial Sequence: Synthetic oligonucleotide
  Antisense strand to SEQ ID NO: 1098518
cuuaugagaacguucagga

SEQ ID NO: 1098520 - RNA, 19 nt, Artificial Sequence
  Description of Artificial Sequence: Synthetic oligonucleotide
  Sense strand starting at position 2191 of SEQ ID NO: 915684
gacggaaguaguuguugaa

SEQ ID NO: 1098521 - RNA, 19 nt, Artificial Sequence
  Description of Artificial Sequence: Synthetic oligonucleotide
  Antisense strand to SEQ ID NO: 1098520
uucaacaacuacuuccguc

SEQ ID NO: 1098522 - RNA, 19 nt, Artificial Sequence
  Description of Artificial Sequence: Synthetic oligonucleotide
  Sense strand starting at position 2276 of SEQ ID NO: 915684
ccuugaaagcauuguccaa

SEQ ID NO: 1098523 - RNA, 19 nt, Artificial Sequence
  Description of Artificial Sequence: Synthetic oligonucleotide
  Antisense strand to SEQ ID NO: 1098522
uuggacaaugcuuucaagg

SEQ ID NO: 1098524 - RNA, 19 nt, Artificial Sequence
  Description of Artificial Sequence: Synthetic oligonucleotide
  Sense strand starting at position 2278 of SEQ ID NO: 915684
uugaaagcauuguccaaug

SEQ ID NO: 1098525 - RNA, 19 nt, Artificial Sequence
  Description of Artificial Sequence: Synthetic oligonucleotide
  Antisense strand to SEQ ID NO: 1098524
cauuggacaaugcuuucaa

SEQ ID NO: 1098526 - RNA, 19 nt, Artificial Sequence
  Description of Artificial Sequence: Synthetic oligonucleotide
  Sense strand starting at position 2788 of SEQ ID NO: 915684
agugcaucuccguuacugu

SEQ ID NO: 1098527 - RNA, 19 nt, Artificial Sequence
  Description of Artificial Sequence: Synthetic oligonucleotide
  Antisense strand to SEQ ID NO: 1098526
acaguaacggagaugcacu

SEQ ID NO: 1098528 - RNA, 19 nt, Artificial Sequence
  Description of Artificial Sequence: Synthetic oligonucleotide
  Sense strand starting at position 2839 of SEQ ID NO: 915684
acugguuuaugucucucua

SEQ ID NO: 1098529 - RNA, 19 nt, Artificial Sequence
  Description of Artificial Sequence: Synthetic oligonucleotide
  Antisense strand to SEQ ID NO: 1098528
uagagagacauaaaccagu

SEQ ID NO: 1098530 - RNA, 19 nt, Artificial Sequence
  Description of Artificial Sequence: Synthetic oligonucleotide
  Sense strand starting at position 2841 of SEQ ID NO: 915684
ugguuuaugucucucuaaa

SEQ ID NO: 1098531 - RNA, 19 nt, Artificial Sequence
  Description of Artificial Sequence: Synthetic oligonucleotide
  Antisense strand to SEQ ID NO: 1098530
uuuagagagacauaaacca

SEQ ID NO: 1098532 - RNA, 19 nt, Artificial Sequence
  Description of Artificial Sequence: Synthetic oligonucleotide
  Sense strand starting at position 3166 of SEQ ID NO: 915684
aggguuugaguuuggaacu

SEQ ID NO: 1098533 - RNA, 19 nt, Artificial Sequence
  Description of Artificial Sequence: Synthetic oligonucleotide
  Antisense strand to SEQ ID NO: 1098532
aguuccaaacucaaacccu

SEQ ID NO: 1098534 - RNA, 19 nt, Artificial Sequence
  Description of Artificial Sequence: Synthetic oligonucleotide
  Sense strand starting at position 3229 of SEQ ID NO: 915684
acaggucucccacagacuu

SEQ ID NO: 1098535 - RNA, 19 nt, Artificial Sequence
  Description of Artificial Sequence: Synthetic oligonucleotide
  Antisense strand to SEQ ID NO: 1098534
aagucugugggagaccugu

SEQ ID NO: 1098536 - RNA, 19 nt, Artificial Sequence
  Description of Artificial Sequence: Synthetic oligonucleotide
  Sense strand starting at position 3290 of SEQ ID NO: 915684
ccggcauuuccuggucuga

SEQ ID NO: 1098537 - RNA, 19 nt, Artificial Sequence
  Description of Artificial Sequence: Synthetic oligonucleotide
  Antisense strand to SEQ ID NO: 1098536
ucagaccaggaaaugccgg

SEQ ID NO: 1098538 - RNA, 19 nt, Artificial Sequence
  Description of Artificial Sequence: Synthetic oligonucleotide
  Sense strand starting at position 3292 of SEQ ID NO: 915684
ggcauuuccuggucugauc

SEQ ID NO: 1098539 - RNA, 19 nt, Artificial Sequence
  Description of Artificial Sequence: Synthetic oligonucleotide
  Antisense strand to SEQ ID NO: 1098538
gaucagaccaggaaaugcc

SEQ ID NO: 1098540 - RNA, 19 nt, Artificial Sequence
  Description of Artificial Sequence: Synthetic oligonucleotide
  Sense strand starting at position 3295 of SEQ ID NO: 915684
auuuccuggucugaucaaa

SEQ ID NO: 1098541 - RNA, 19 nt, Artificial Sequence
  Description of Artificial Sequence: Synthetic oligonucleotide
  Antisense strand to SEQ ID NO: 1098540
uuugaucagaccaggaaau

SEQ ID NO: 1098542 - RNA, 19 nt, Artificial Sequence
  Description of Artificial Sequence: Synthetic oligonucleotide
  Sense strand starting at position 3361 of SEQ ID NO: 915684
uugaguaccuauguaccaa

SEQ ID NO: 1098543 - RNA, 19 nt, Artificial Sequence
  Description of Artificial Sequence: Synthetic oligonucleotide
  Antisense strand to SEQ ID NO: 1098542
uugguacauagguacucaa

SEQ ID NO: 1098544 - RNA, 19 nt, Artificial Sequence
  Description of Artificial Sequence: Synthetic oligonucleotide
  Sense strand starting at position 3394 of SEQ ID NO: 915684
gcuggagacaguugugaac

SEQ ID NO: 1098545 - RNA, 19 nt, Artificial Sequence
  Description of Artificial Sequence: Synthetic oligonucleotide
  Antisense strand to SEQ ID NO: 1098544
guucacaacugucuccagc

SEQ ID NO: 1098546 - RNA, 19 nt, Artificial Sequence
  Description of Artificial Sequence: Synthetic oligonucleotide
  Sense strand starting at position 3409 of SEQ ID NO: 915684
gaacaagacugacaagaug

SEQ ID NO: 1098547 - RNA, 19 nt, Artificial Sequence
  Description of Artificial Sequence: Synthetic oligonucleotide
  Antisense strand to SEQ ID NO: 1098546
caucuugucagucuuguuc

SEQ ID NO: 1098548 - RNA, 19 nt, Artificial Sequence
  Description of Artificial Sequence: Synthetic oligonucleotide
  Sense strand starting at position 3441 of SEQ ID NO: 915684
ggauguacauuucagugga

SEQ ID NO: 1098549 - RNA, 19 nt, Artificial Sequence
  Description of Artificial Sequence: Synthetic oligonucleotide
  Antisense strand to SEQ ID NO: 1098548
uccacugaaauguacaucc

SEQ ID NO: 1098550 - RNA, 19 nt, Artificial Sequence
  Description of Artificial Sequence: Synthetic oligonucleotide
  Sense strand starting at position 3473 of SEQ ID NO: 915684
acaagauaaugucagaaag

SEQ ID NO: 1098551 - RNA, 19 nt, Artificial Sequence
  Description of Artificial Sequence: Synthetic oligonucleotide
  Antisense strand to SEQ ID NO: 1098550
cuuucugacauuaucuugu

SEQ ID NO: 1098552 - RNA, 19 nt, Artificial Sequence
  Description of Artificial Sequence: Synthetic oligonucleotide
  Sense strand starting at position 3481 of SEQ ID NO: 915684
augucagaaagugguuaau

SEQ ID NO: 1098553 - RNA, 19 nt, Artificial Sequence
  Description of Artificial Sequence: Synthetic oligonucleotide
  Antisense strand to SEQ ID NO: 1098552
auuaaccacuuucugacau

SEQ ID NO: 1098554 - RNA, 19 nt, Artificial Sequence
  Description of Artificial Sequence: Synthetic oligonucleotide
  Sense strand starting at position 3484 of SEQ ID NO: 915684
ucagaaagugguuaaugcu

SEQ ID NO: 1098555 - RNA, 19 nt, Artificial Sequence
  Description of Artificial Sequence: Synthetic oligonucleotide
  Antisense strand to SEQ ID NO: 1098554
agcauuaaccacuuucuga

SEQ ID NO: 1098556 - RNA, 19 nt, Artificial Sequence
  Description of Artificial Sequence: Synthetic oligonucleotide
  Sense strand starting at position 3834 of SEQ ID NO: 915684
gaacuacuuuagcuagagu

SEQ ID NO: 1098557 - RNA, 19 nt, Artificial Sequence
  Description of Artificial Sequence: Synthetic oligonucleotide
  Antisense strand to SEQ ID NO: 1098556
acucuagcuaaaguaguuc

SEQ ID NO: 1098558 - RNA, 19 nt, Artificial Sequence
  Description of Artificial Sequence: Synthetic oligonucleotide
  Sense strand starting at position 71 of SEQ ID NO: 915685
cugugacuucuccaagccu

SEQ ID NO: 1098559 - RNA, 19 nt, Artificial Sequence
  Description of Artificial Sequence: Synthetic oligonucleotide
  Antisense strand to SEQ ID NO: 1098558
aggcuuggagaagucacag

SEQ ID NO: 1098560 - RNA, 19 nt, Artificial Sequence
  Description of Artificial Sequence: Synthetic oligonucleotide
  Sense strand starting at position 152 of SEQ ID NO: 915685
augaaauaggcuuagcaca

SEQ ID NO: 1098561 - RNA, 19 nt, Artificial Sequence
  Description of Artificial Sequence: Synthetic oligonucleotide
  Antisense strand to SEQ ID NO: 1098560
ugugcuaagccuauuucau

SEQ ID NO: 1098562 - RNA, 19 nt, Artificial Sequence
  Description of Artificial Sequence: Synthetic oligonucleotide
  Sense strand starting at position 204 of SEQ ID NO: 915685
ugccuauuauuacugugau

SEQ ID NO: 1098563 - RNA, 19 nt, Artificial Sequence
  Description of Artificial Sequence: Synthetic oligonucleotide
  Antisense strand to SEQ ID NO: 1098562
aucacaguaauaauaggca

SEQ ID NO: 1098564 - RNA, 19 nt, Artificial Sequence
  Description of Artificial Sequence: Synthetic oligonucleotide
  Sense strand starting at position 210 of SEQ ID NO: 915685
uuauuacugugauuccauu

SEQ ID NO: 1098565 - RNA, 19 nt, Artificial Sequence
  Description of Artificial Sequence: Synthetic oligonucleotide
  Antisense strand to SEQ ID NO: 1098564
aauggaaucacaguaauaa

SEQ ID NO: 1098566 - RNA, 19 nt, Artificial Sequence
  Description of Artificial Sequence: Synthetic oligonucleotide
  Sense strand starting at position 229 of SEQ ID NO: 915685
cagugucaccaaugagcua

SEQ ID NO: 1098567 - RNA, 19 nt, Artificial Sequence
  Description of Artificial Sequence: Synthetic oligonucleotide
  Antisense strand to SEQ ID NO: 1098566
uagcucauuggugacacug

SEQ ID NO: 1098568 - RNA, 19 nt, Artificial Sequence
  Description of Artificial Sequence: Synthetic oligonucleotide
  Sense strand starting at position 458 of SEQ ID NO: 915685
gcggaaguuucccucaccu

SEQ ID NO: 1098569 - RNA, 19 nt, Artificial Sequence
  Description of Artificial Sequence: Synthetic oligonucleotide
  Antisense strand to SEQ ID NO: 1098568
aggugagggaaacuuccgc

SEQ ID NO: 1098570 - RNA, 19 nt, Artificial Sequence
  Description of Artificial Sequence: Synthetic oligonucleotide
  Sense strand starting at position 524 of SEQ ID NO: 915685
ggcauugccucacuuaaag

SEQ ID NO: 1098571 - RNA, 19 nt, Artificial Sequence
  Description of Artificial Sequence: Synthetic oligonucleotide
  Antisense strand to SEQ ID NO: 1098570
cuuuaagugaggcaaugcc

SEQ ID NO: 1098572 - RNA, 19 nt, Artificial Sequence
  Description of Artificial Sequence: Synthetic oligonucleotide
  Sense strand starting at position 743 of SEQ ID NO: 915685
cacugugggugggugaaua

SEQ ID NO: 1098573 - RNA, 19 nt, Artificial Sequence
  Description of Artificial Sequence: Synthetic oligonucleotide
  Antisense strand to SEQ ID NO: 1098572
uauucacccacccacagug

SEQ ID NO: 1098574 - RNA, 19 nt, Artificial Sequence
  Description of Artificial Sequence: Synthetic oligonucleotide
  Sense strand starting at position 754 of SEQ ID NO: 915685
ggugaauaacugugcagag

SEQ ID NO: 1098575 - RNA, 19 nt, Artificial Sequence
  Description of Artificial Sequence: Synthetic oligonucleotide
  Antisense strand to SEQ ID NO: 1098574
cucugcacaguuauucacc

SEQ ID NO: 1098576 - RNA, 19 nt, Artificial Sequence
  Description of Artificial Sequence: Synthetic oligonucleotide
  Sense strand starting at position 834 of SEQ ID NO: 915685
uuguuuccuuguccuugaa

SEQ ID NO: 1098577 - RNA, 19 nt, Artificial Sequence
  Description of Artificial Sequence: Synthetic oligonucleotide
  Antisense strand to SEQ ID NO: 1098576
uucaaggacaaggaaacaa

SEQ ID NO: 1098578 - RNA, 19 nt, Artificial Sequence
  Description of Artificial Sequence: Synthetic oligonucleotide
  Sense strand starting at position 836 of SEQ ID NO: 915685
guuuccuuguccuugaaca

SEQ ID NO: 1098579 - RNA, 19 nt, Artificial Sequence
  Description of Artificial Sequence: Synthetic oligonucleotide
  Antisense strand to SEQ ID NO: 1098578
uguucaaggacaaggaaac

SEQ ID NO: 1098580 - RNA, 19 nt, Artificial Sequence
  Description of Artificial Sequence: Synthetic oligonucleotide
  Sense strand starting at position 877 of SEQ ID NO: 915685
ggugguuggagauggaaau

SEQ ID NO: 1098581 - RNA, 19 nt, Artificial Sequence
  Description of Artificial Sequence: Synthetic oligonucleotide
  Antisense strand to SEQ ID NO: 1098580
auuuccaucuccaaccacc

SEQ ID NO: 1098582 - RNA, 19 nt, Artificial Sequence
  Description of Artificial Sequence: Synthetic oligonucleotide
  Sense strand starting at position 878 of SEQ ID NO: 915685
gugguuggagauggaaauu

SEQ ID NO: 1098583 - RNA, 19 nt, Artificial Sequence
  Description of Artificial Sequence: Synthetic oligonucleotide
  Antisense strand to SEQ ID NO: 1098582
aauuuccaucuccaaccac

SEQ ID NO: 1098584 - RNA, 19 nt, Artificial Sequence
  Description of Artificial Sequence: Synthetic oligonucleotide
  Sense strand starting at position 890 of SEQ ID NO: 915685
ggaaauuaauuggcucaga

SEQ ID NO: 1098585 - RNA, 19 nt, Artificial Sequence
  Description of Artificial Sequence: Synthetic oligonucleotide
  Antisense strand to SEQ ID NO: 1098584
ucugagccaauuaauuucc

SEQ ID NO: 1098586 - RNA, 19 nt, Artificial Sequence
  Description of Artificial Sequence: Synthetic oligonucleotide
  Sense strand starting at position 895 of SEQ ID NO: 915685
uuaauuggcucagaaccaa

SEQ ID NO: 1098587 - RNA, 19 nt, Artificial Sequence
  Description of Artificial Sequence: Synthetic oligonucleotide
  Antisense strand to SEQ ID NO: 1098586
uugguucugagccaauuaa

SEQ ID NO: 1098588 - RNA, 19 nt, Artificial Sequence
  Description of Artificial Sequence: Synthetic oligonucleotide
  Sense strand starting at position 1290 of SEQ ID NO: 915685
acguaaacugcuggaaaga

SEQ ID NO: 1098589 - RNA, 19 nt, Artificial Sequence
  Description of Artificial Sequence: Synthetic oligonucleotide
  Antisense strand to SEQ ID NO: 1098588
ucuuuccagcaguuuacgu

SEQ ID NO: 1098590 - RNA, 19 nt, Artificial Sequence
  Description of Artificial Sequence: Synthetic oligonucleotide
  Sense strand starting at position 1758 of SEQ ID NO: 915685
cugcaaacuuuccugguga

SEQ ID NO: 1098591 - RNA, 19 nt, Artificial Sequence
  Description of Artificial Sequence: Synthetic oligonucleotide
  Antisense strand to SEQ ID NO: 1098590
ucaccaggaaaguuugcag

SEQ ID NO: 1098592 - RNA, 19 nt, Artificial Sequence
  Description of Artificial Sequence: Synthetic oligonucleotide
  Sense strand starting at position 1802 of SEQ ID NO: 915685
cgaggugucggcuggaaag

SEQ ID NO: 1098593 - RNA, 19 nt, Artificial Sequence
  Description of Artificial Sequence: Synthetic oligonucleotide
  Antisense strand to SEQ ID NO: 1098592
cuuuccagccgacaccucg

SEQ ID NO: 1098594 - RNA, 19 nt, Artificial Sequence
  Description of Artificial Sequence: Synthetic oligonucleotide
  Sense strand starting at position 2116 of SEQ ID NO: 915685
gcagaauucgucccaccgu

SEQ ID NO: 1098595 - RNA, 19 nt, Artificial Sequence
  Description of Artificial Sequence: Synthetic oligonucleotide
  Antisense strand to SEQ ID NO: 1098594
acggugggacgaauucugc

SEQ ID NO: 1098596 - RNA, 19 nt, Artificial Sequence
  Description of Artificial Sequence: Synthetic oligonucleotide
  Sense strand starting at position 2421 of SEQ ID NO: 915685
gccacccuccugugucaau

SEQ ID NO: 1098597 - RNA, 19 nt, Artificial Sequence
  Description of Artificial Sequence: Synthetic oligonucleotide
  Antisense strand to SEQ ID NO: 1098596
auugacacaggaggguggc

SEQ ID NO: 1098598 - RNA, 19 nt, Artificial Sequence
  Description of Artificial Sequence: Synthetic oligonucleotide
  Sense strand starting at position 2474 of SEQ ID NO: 915685
cucugcauuccucauuagu

SEQ ID NO: 1098599 - RNA, 19 nt, Artificial Sequence
  Description of Artificial Sequence: Synthetic oligonucleotide
  Antisense strand to SEQ ID NO: 1098598
acuaaugaggaaugcagag

SEQ ID NO: 1098600 - RNA, 19 nt, Artificial Sequence
  Description of Artificial Sequence: Synthetic oligonucleotide
  Sense strand starting at position 2476 of SEQ ID NO: 915685
cugcauuccucauuaguga

SEQ ID NO: 1098601 - RNA, 19 nt, Artificial Sequence
  Description of Artificial Sequence: Synthetic oligonucleotide
  Antisense strand to SEQ ID NO: 1098600
ucacuaaugaggaaugcag

SEQ ID NO: 1098602 - RNA, 19 nt, Artificial Sequence
  Description of Artificial Sequence: Synthetic oligonucleotide
  Sense strand starting at position 2483 of SEQ ID NO: 915685
ccucauuagugaccuuuau

SEQ ID NO: 1098603 - RNA, 19 nt, Artificial Sequence
  Description of Artificial Sequence: Synthetic oligonucleotide
  Antisense strand to SEQ ID NO: 1098602
auaaaggucacuaaugagg

SEQ ID NO: 1098604 - RNA, 19 nt, Artificial Sequence
  Description of Artificial Sequence: Synthetic oligonucleotide
  Sense strand starting at position 2559 of SEQ ID NO: 915685
cccuucuucccguaagaac

SEQ ID NO: 1098605 - RNA, 19 nt, Artificial Sequence
  Description of Artificial Sequence: Synthetic oligonucleotide
  Antisense strand to SEQ ID NO: 1098604
guucuuacgggaagaaggg

SEQ ID NO: 1098606 - RNA, 19 nt, Artificial Sequence
  Description of Artificial Sequence: Synthetic oligonucleotide
  Sense strand starting at position 2726 of SEQ ID NO: 915685
uaucgaaagccuuggaaga

SEQ ID NO: 1098607 - RNA, 19 nt, Artificial Sequence
  Description of Artificial Sequence: Synthetic oligonucleotide
  Antisense strand to SEQ ID NO: 1098606
ucuuccaaggcuuucgaua

SEQ ID NO: 1098608 - RNA, 19 nt, Artificial Sequence
  Description of Artificial Sequence: Synthetic oligonucleotide
  Sense strand starting at position 2737 of SEQ ID NO: 915685
uuggaagacccuugacuca

SEQ ID NO: 1098609 - RNA, 19 nt, Artificial Sequence
  Description of Artificial Sequence: Synthetic oligonucleotide
  Antisense strand to SEQ ID NO: 1098608
ugagucaagggucuuccaa

SEQ ID NO: 1098610 - RNA, 19 nt, Artificial Sequence
  Description of Artificial Sequence: Synthetic oligonucleotide
  Sense strand starting at position 2798 of SEQ ID NO: 915685
uggcuaauggaguguaacu

SEQ ID NO: 1098611 - RNA, 19 nt, Artificial Sequence
  Description of Artificial Sequence: Synthetic oligonucleotide
  Antisense strand to SEQ ID NO: 1098610
aguuacacuccauuagcca

SEQ ID NO: 1098612 - RNA, 19 nt, Artificial Sequence
  Description of Artificial Sequence: Synthetic oligonucleotide
  Sense strand starting at position 2805 of SEQ ID NO: 915685
uggaguguaacugggagaa

SEQ ID NO: 1098613 - RNA, 19 nt, Artificial Sequence
  Description of Artificial Sequence: Synthetic oligonucleotide
  Antisense strand to SEQ ID NO: 1098612
uucucccaguuacacucca

SEQ ID NO: 1098614 - RNA, 19 nt, Artificial Sequence
  Description of Artificial Sequence: Synthetic oligonucleotide
  Sense strand starting at position 2818 of SEQ ID NO: 915685
ggagaaacuuccuaaucag

SEQ ID NO: 1098615 - RNA, 19 nt, Artificial Sequence
  Description of Artificial Sequence: Synthetic oligonucleotide
  Antisense strand to SEQ ID NO: 1098614
cugauuaggaaguuucucc

SEQ ID NO: 1098616 - RNA, 19 nt, Artificial Sequence
  Description of Artificial Sequence: Synthetic oligonucleotide
  Sense strand starting at position 2920 of SEQ ID NO: 915685
caggauguaccucgagacu

SEQ ID NO: 1098617 - RNA, 19 nt, Artificial Sequence
  Description of Artificial Sequence: Synthetic oligonucleotide
  Antisense strand to SEQ ID NO: 1098616
agucucgagguacauccug

SEQ ID NO: 1098618 - RNA, 19 nt, Artificial Sequence
  Description of Artificial Sequence: Synthetic oligonucleotide
  Sense strand starting at position 3057 of SEQ ID NO: 915685
gucaguucccuuuauuaaa

SEQ ID NO: 1098619 - RNA, 19 nt, Artificial Sequence
  Description of Artificial Sequence: Synthetic oligonucleotide
  Antisense strand to SEQ ID NO: 1098618
uuuaauaaagggaacugac

SEQ ID NO: 1098620 - RNA, 19 nt, Artificial Sequence
  Description of Artificial Sequence: Synthetic oligonucleotide
  Sense strand starting at position 3186 of SEQ ID NO: 915685
gcagcuacauccuuaaggu

SEQ ID NO: 1098621 - RNA, 19 nt, Artificial Sequence
  Description of Artificial Sequence: Synthetic oligonucleotide
  Antisense strand to SEQ ID NO: 1098620
accuuaaggauguagcugc

SEQ ID NO: 1098622 - RNA, 19 nt, Artificial Sequence
  Description of Artificial Sequence: Synthetic oligonucleotide
  Sense strand starting at position 3193 of SEQ ID NO: 915685
cauccuuaaggucgggaaa

SEQ ID NO: 1098623 - RNA, 19 nt, Artificial Sequence
  Description of Artificial Sequence: Synthetic oligonucleotide
  Antisense strand to SEQ ID NO: 1098622
uuucccgaccuuaaggaug

SEQ ID NO: 1098624 - RNA, 19 nt, Artificial Sequence
  Description of Artificial Sequence: Synthetic oligonucleotide
  Sense strand starting at position 3196 of SEQ ID NO: 915685
ccuuaaggucgggaaagua

SEQ ID NO: 1098625 - RNA, 19 nt, Artificial Sequence
  Description of Artificial Sequence: Synthetic oligonucleotide
  Antisense strand to SEQ ID NO: 1098624
uacuuucccgaccuuaagg

SEQ ID NO: 1098626 - RNA, 19 nt, Artificial Sequence
  Description of Artificial Sequence: Synthetic oligonucleotide
  Sense strand starting at position 3389 of SEQ ID NO: 915685
aggagaaacugguaccaaa

SEQ ID NO: 1098627 - RNA, 19 nt, Artificial Sequence
  Description of Artificial Sequence: Synthetic oligonucleotide
  Antisense strand to SEQ ID NO: 1098626
uuugguaccaguuucuccu

SEQ ID NO: 1098628 - RNA, 19 nt, Artificial Sequence
  Description of Artificial Sequence: Synthetic oligonucleotide
  Sense strand starting at position 3449 of SEQ ID NO: 915685
agagaaccuuccuccguuu

SEQ ID NO: 1098629 - RNA, 19 nt, Artificial Sequence
  Description of Artificial Sequence: Synthetic oligonucleotide
  Antisense strand to SEQ ID NO: 1098628
aaacggaggaagguucucu

SEQ ID NO: 1098630 - RNA, 19 nt, Artificial Sequence
  Description of Artificial Sequence: Synthetic oligonucleotide
  Sense strand starting at position 3507 of SEQ ID NO: 915685
gggaguacuggcuaguucu

SEQ ID NO: 1098631 - RNA, 19 nt, Artificial Sequence
  Description of Artificial Sequence: Synthetic oligonucleotide
  Antisense strand to SEQ ID NO: 1098630
agaacuagccaguacuccc

SEQ ID NO: 1098632 - RNA, 19 nt, Artificial Sequence
  Description of Artificial Sequence: Synthetic oligonucleotide
  Sense strand starting at position 3863 of SEQ ID NO: 915685
ugaggacgacuuggaugau

SEQ ID NO: 1098633 - RNA, 19 nt, Artificial Sequence
  Description of Artificial Sequence: Synthetic oligonucleotide
  Antisense strand to SEQ ID NO: 1098632
aucauccaagucguccuca

SEQ ID NO: 1098634 - RNA, 19 nt, Artificial Sequence
  Description of Artificial Sequence: Synthetic oligonucleotide
  Sense strand starting at position 3939 of SEQ ID NO: 915685
uuugacuugucccuguauu

SEQ ID NO: 1098635 - RNA, 19 nt, Artificial Sequence
  Description of Artificial Sequence: Synthetic oligonucleotide
  Antisense strand to SEQ ID NO: 1098634
aauacagggacaagucaaa

SEQ ID NO: 1098636 - RNA, 19 nt, Artificial Sequence
  Description of Artificial Sequence: Synthetic oligonucleotide
  Sense strand starting at position 3940 of SEQ ID NO: 915685
uugacuugucccuguauug

SEQ ID NO: 1098637 - RNA, 19 nt, Artificial Sequence
  Description of Artificial Sequence: Synthetic oligonucleotide
  Antisense strand to SEQ ID NO: 1098636
caauacagggacaagucaa

SEQ ID NO: 1098638 - RNA, 19 nt, Artificial Sequence
  Description of Artificial Sequence: Synthetic oligonucleotide
  Sense strand starting at position 1559 of SEQ ID NO: 915686
ggcugugaccuaugaccua

SEQ ID NO: 1098639 - RNA, 19 nt, Artificial Sequence
  Description of Artificial Sequence: Synthetic oligonucleotide
  Antisense strand to SEQ ID NO: 1098638
uaggucauaggucacagcc

SEQ ID NO: 1098640 - RNA, 19 nt, Artificial Sequence
  Description of Artificial Sequence: Synthetic oligonucleotide
  Sense strand starting at position 1859 of SEQ ID NO: 915686
ccgugaugccugugcccau

SEQ ID NO: 1098641 - RNA, 19 nt, Artificial Sequence
  Description of Artificial Sequence: Synthetic oligonucleotide
  Antisense strand to SEQ ID NO: 1098640
augggcacaggcaucacgg

SEQ ID NO: 1098642 - RNA, 19 nt, Artificial Sequence
  Description of Artificial Sequence: Synthetic oligonucleotide
  Sense strand starting at position 2099 of SEQ ID NO: 915686
gccugagugacgcuguuau

SEQ ID NO: 1098643 - RNA, 19 nt, Artificial Sequence
  Description of Artificial Sequence: Synthetic oligonucleotide
  Antisense strand to SEQ ID NO: 1098642
auaacagcgucacucaggc

SEQ ID NO: 1098644 - RNA, 19 nt, Artificial Sequence
  Description of Artificial Sequence: Synthetic oligonucleotide
  Sense strand starting at position 2143 of SEQ ID NO: 915686
ggccuaagugcauggaaga

SEQ ID NO: 1098645 - RNA, 19 nt, Artificial Sequence
  Description of Artificial Sequence: Synthetic oligonucleotide
  Antisense strand to SEQ ID NO: 1098644
ucuuccaugcacuuaggcc

SEQ ID NO: 1098646 - RNA, 19 nt, Artificial Sequence
  Description of Artificial Sequence: Synthetic oligonucleotide
  Sense strand starting at position 2144 of SEQ ID NO: 915686
gccuaagugcauggaagaa

SEQ ID NO: 1098647 - RNA, 19 nt, Artificial Sequence
  Description of Artificial Sequence: Synthetic oligonucleotide
  Antisense strand to SEQ ID NO: 1098646
uucuuccaugcacuuaggc

SEQ ID NO: 1098648 - RNA, 19 nt, Artificial Sequence
  Description of Artificial Sequence: Synthetic oligonucleotide
  Sense strand starting at position 2251 of SEQ ID NO: 915686
guggucagggagugucuaa

SEQ ID NO: 1098649 - RNA, 19 nt, Artificial Sequence
  Description of Artificial Sequence: Synthetic oligonucleotide
  Antisense strand to SEQ ID NO: 1098648
uuagacacucccugaccac

SEQ ID NO: 1098650 - RNA, 19 nt, Artificial Sequence
  Description of Artificial Sequence: Synthetic oligonucleotide
  Sense strand starting at position 2734 of SEQ ID NO: 915686
uggagaugccucugucguu

SEQ ID NO: 1098651 - RNA, 19 nt, Artificial Sequence
  Description of Artificial Sequence: Synthetic oligonucleotide
  Antisense strand to SEQ ID NO: 1098650
aacgacagaggcaucucca

SEQ ID NO: 1098652 - RNA, 19 nt, Artificial Sequence
  Description of Artificial Sequence: Synthetic oligonucleotide
  Sense strand starting at position 2741 of SEQ ID NO: 915686
gccucugucguucucguaa

SEQ ID NO: 1098653 - RNA, 19 nt, Artificial Sequence
  Description of Artificial Sequence: Synthetic oligonucleotide
  Antisense strand to SEQ ID NO: 1098652
uuacgagaacgacagaggc

SEQ ID NO: 1098654 - RNA, 19 nt, Artificial Sequence
  Description of Artificial Sequence: Synthetic oligonucleotide
  Sense strand starting at position 116 of SEQ ID NO: 915687
gugugucacauguguggau

SEQ ID NO: 1098655 - RNA, 19 nt, Artificial Sequence
  Description of Artificial Sequence: Synthetic oligonucleotide
  Antisense strand to SEQ ID NO: 1098654
auccacacaugugacacac

SEQ ID NO: 1098656 - RNA, 19 nt, Artificial Sequence
  Description of Artificial Sequence: Synthetic oligonucleotide
  Sense strand starting at position 2272 of SEQ ID NO: 915687
ggcugugaccuaugaccua

SEQ ID NO: 1098657 - RNA, 19 nt, Artificial Sequence
  Description of Artificial Sequence: Synthetic oligonucleotide
  Antisense strand to SEQ ID NO: 1098656
uaggucauaggucacagcc

SEQ ID NO: 1098658 - RNA, 19 nt, Artificial Sequence
  Description of Artificial Sequence: Synthetic oligonucleotide
  Sense strand starting at position 2572 of SEQ ID NO: 915687
ccgugaugccugugcccau

SEQ ID NO: 1098659 - RNA, 19 nt, Artificial Sequence
  Description of Artificial Sequence: Synthetic oligonucleotide
  Antisense strand to SEQ ID NO: 1098658
augggcacaggcaucacgg

SEQ ID NO: 1098660 - RNA, 19 nt, Artificial Sequence
  Description of Artificial Sequence: Synthetic oligonucleotide
  Sense strand starting at position 2812 of SEQ ID NO: 915687
gccugagugacgcuguuau

SEQ ID NO: 1098661 - RNA, 19 nt, Artificial Sequence
  Description of Artificial Sequence: Synthetic oligonucleotide
  Antisense strand to SEQ ID NO: 1098660
auaacagcgucacucaggc

SEQ ID NO: 1098662 - RNA, 19 nt, Artificial Sequence
  Description of Artificial Sequence: Synthetic oligonucleotide
  Sense strand starting at position 2856 of SEQ ID NO: 915687
ggccuaagugcauggaaga

SEQ ID NO: 1098663 - RNA, 19 nt, Artificial Sequence
  Description of Artificial Sequence: Synthetic oligonucleotide
  Antisense strand to SEQ ID NO: 1098662
ucuuccaugcacuuaggcc

SEQ ID NO: 1098664 - RNA, 19 nt, Artificial Sequence
  Description of Artificial Sequence: Synthetic oligonucleotide
  Sense strand starting at position 2857 of SEQ ID NO: 915687
gccuaagugcauggaagaa

SEQ ID NO: 1098665 - RNA, 19 nt, Artificial Sequence
  Description of Artificial Sequence: Synthetic oligonucleotide
  Antisense strand to SEQ ID NO: 1098664
uucuuccaugcacuuaggc

SEQ ID NO: 1098666 - RNA, 19 nt, Artificial Sequence
  Description of Artificial Sequence: Synthetic oligonucleotide
  Sense strand starting at position 2964 of SEQ ID NO: 915687
guggucagggagugucuaa

SEQ ID NO: 1098667 - RNA, 19 nt, Artificial Sequence
  Description of Artificial Sequence: Synthetic oligonucleotide
  Antisense strand to SEQ ID NO: 1098666
uuagacacucccugaccac

SEQ ID NO: 1098668 - RNA, 19 nt, Artificial Sequence
  Description of Artificial Sequence: Synthetic oligonucleotide
  Sense strand starting at position 3447 of SEQ ID NO: 915687
uggagaugccucugucguu

SEQ ID NO: 1098669 - RNA, 19 nt, Artificial Sequence
  Description of Artificial Sequence: Synthetic oligonucleotide
  Antisense strand to SEQ ID NO: 1098668
aacgacagaggcaucucca

SEQ ID NO: 1098670 - RNA, 19 nt, Artificial Sequence
  Description of Artificial Sequence: Synthetic oligonucleotide
  Sense strand starting at position 3454 of SEQ ID NO: 915687
gccucugucguucucguaa

SEQ ID NO: 1098671 - RNA, 19 nt, Artificial Sequence
  Description of Artificial Sequence: Synthetic oligonucleotide
  Antisense strand to SEQ ID NO: 1098670
uuacgagaacgacagaggc

SEQ ID NO: 1098672 - RNA, 19 nt, Artificial Sequence
  Description of Artificial Sequence: Synthetic oligonucleotide
  Sense strand starting at position 1073 of SEQ ID NO: 915688
ggcugugaccuaugaccua

SEQ ID NO: 1098673 - RNA, 19 nt, Artificial Sequence
  Description of Artificial Sequence: Synthetic oligonucleotide
  Antisense strand to SEQ ID NO: 1098672
uaggucauaggucacagcc

SEQ ID NO: 1098674 - RNA, 19 nt, Artificial Sequence
  Description of Artificial Sequence: Synthetic oligonucleotide
  Sense strand starting at position 1373 of SEQ ID NO: 915688
ccgugaugccugugcccau

SEQ ID NO: 1098675 - RNA, 19 nt, Artificial Sequence
  Description of Artificial Sequence: Synthetic oligonucleotide
  Antisense strand to SEQ ID NO: 1098674
augggcacaggcaucacgg

SEQ ID NO: 1098676 - RNA, 19 nt, Artificial Sequence
  Description of Artificial Sequence: Synthetic oligonucleotide
  Sense strand starting at position 1613 of SEQ ID NO: 915688
gccugagugacgcuguuau

SEQ ID NO: 1098677 - RNA, 19 nt, Artificial Sequence
  Description of Artificial Sequence: Synthetic oligonucleotide
  Antisense strand to SEQ ID NO: 1098676
auaacagcgucacucaggc

SEQ ID NO: 1098678 - RNA, 19 nt, Artificial Sequence
  Description of Artificial Sequence: Synthetic oligonucleotide
  Sense strand starting at position 1657 of SEQ ID NO: 915688
ggccuaagugcauggaaga

SEQ ID NO: 1098679 - RNA, 19 nt, Artificial Sequence
  Description of Artificial Sequence: Synthetic oligonucleotide
  Antisense strand to SEQ ID NO: 1098678
ucuuccaugcacuuaggcc

SEQ ID NO: 1098680 - RNA, 19 nt, Artificial Sequence
  Description of Artificial Sequence: Synthetic oligonucleotide
  Sense strand starting at position 1658 of SEQ ID NO: 915688
gccuaagugcauggaagaa

SEQ ID NO: 1098681 - RNA, 19 nt, Artificial Sequence
  Description of Artificial Sequence: Synthetic oligonucleotide
  Antisense strand to SEQ ID NO: 1098680
uucuuccaugcacuuaggc

SEQ ID NO: 1098682 - RNA, 19 nt, Artificial Sequence
  Description of Artificial Sequence: Synthetic oligonucleotide
  Sense strand starting at position 1765 of SEQ ID NO: 915688
guggucagggagugucuaa

SEQ ID NO: 1098683 - RNA, 19 nt, Artificial Sequence
  Description of Artificial Sequence: Synthetic oligonucleotide
  Antisense strand to SEQ ID NO: 1098682
uuagacacucccugaccac

SEQ ID NO: 1098684 - RNA, 19 nt, Artificial Sequence
  Description of Artificial Sequence: Synthetic oligonucleotide
  Sense strand starting at position 2248 of SEQ ID NO: 915688
uggagaugccucugucguu

SEQ ID NO: 1098685 - RNA, 19 nt, Artificial Sequence
  Description of Artificial Sequence: Synthetic oligonucleotide
  Antisense strand to SEQ ID NO: 1098684
aacgacagaggcaucucca

SEQ ID NO: 1098686 - RNA, 19 nt, Artificial Sequence
  Description of Artificial Sequence: Synthetic oligonucleotide
  Sense strand starting at position 2255 of SEQ ID NO: 915688
gccucugucguucucguaa

SEQ ID NO: 1098687 - RNA, 19 nt, Artificial Sequence
  Description of Artificial Sequence: Synthetic oligonucleotide
  Antisense strand to SEQ ID NO: 1098686
uuacgagaacgacagaggc

SEQ ID NO: 1098688 - RNA, 19 nt, Artificial Sequence
  Description of Artificial Sequence: Synthetic oligonucleotide
  Sense strand starting at position 3805 of SEQ ID NO: 915688
uccacauucugugcagaga

SEQ ID NO: 1098689 - RNA, 19 nt, Artificial Sequence
  Description of Artificial Sequence: Synthetic oligonucleotide
  Antisense strand to SEQ ID NO: 1098688
ucucugcacagaaugugga

SEQ ID NO: 1098690 - RNA, 19 nt, Artificial Sequence
  Description of Artificial Sequence: Synthetic oligonucleotide
  Sense strand starting at position 3858 of SEQ ID NO: 915688
cagucaucguggucuggca

SEQ ID NO: 1098691 - RNA, 19 nt, Artificial Sequence
  Description of Artificial Sequence: Synthetic oligonucleotide
  Antisense strand to SEQ ID NO: 1098690
ugccagaccacgaugacug

SEQ ID NO: 1098692 - RNA, 19 nt, Artificial Sequence
  Description of Artificial Sequence: Synthetic oligonucleotide
  Sense strand starting at position 199 of SEQ ID NO: 915689
gggccauccucuguaagga

SEQ ID NO: 1098693 - RNA, 19 nt, Artificial Sequence
  Description of Artificial Sequence: Synthetic oligonucleotide
  Antisense strand to SEQ ID NO: 1098692
uccuuacagaggauggccc

SEQ ID NO: 1098694 - RNA, 19 nt, Artificial Sequence
  Description of Artificial Sequence: Synthetic oligonucleotide
  Sense strand starting at position 341 of SEQ ID NO: 915689
guggguuauuuauaaggag

SEQ ID NO: 1098695 - RNA, 19 nt, Artificial Sequence
  Description of Artificial Sequence: Synthetic oligonucleotide
  Antisense strand to SEQ ID NO: 1098694
cuccuuauaaauaacccac

SEQ ID NO: 1098696 - RNA, 19 nt, Artificial Sequence
  Description of Artificial Sequence: Synthetic oligonucleotide
  Sense strand starting at position 344 of SEQ ID NO: 915689
gguuauuuauaaggagcca

SEQ ID NO: 1098697 - RNA, 19 nt, Artificial Sequence
  Description of Artificial Sequence: Synthetic oligonucleotide
  Antisense strand to SEQ ID NO: 1098696
uggcuccuuauaaauaacc

SEQ ID NO: 1098698 - RNA, 19 nt, Artificial Sequence
  Description of Artificial Sequence: Synthetic oligonucleotide
  Sense strand starting at position 368 of SEQ ID NO: 915689
agcugagguguccagaaau

SEQ ID NO: 1098699 - RNA, 19 nt, Artificial Sequence
  Description of Artificial Sequence: Synthetic oligonucleotide
  Antisense strand to SEQ ID NO: 1098698
auuucuggacaccucagcu

SEQ ID NO: 1098700 - RNA, 19 nt, Artificial Sequence
  Description of Artificial Sequence: Synthetic oligonucleotide
  Sense strand starting at position 392 of SEQ ID NO: 915689
agacguuucugcccagaaa

SEQ ID NO: 1098701 - RNA, 19 nt, Artificial Sequence
  Description of Artificial Sequence: Synthetic oligonucleotide
  Antisense strand to SEQ ID NO: 1098700
uuucugggcagaaacgucu

SEQ ID NO: 1098702 - RNA, 19 nt, Artificial Sequence
  Description of Artificial Sequence: Synthetic oligonucleotide
  Sense strand starting at position 393 of SEQ ID NO: 915689
gacguuucugcccagaaac

SEQ ID NO: 1098703 - RNA, 19 nt, Artificial Sequence
  Description of Artificial Sequence: Synthetic oligonucleotide
  Antisense strand to SEQ ID NO: 1098702
guuucugggcagaaacguc

SEQ ID NO: 1098704 - RNA, 19 nt, Artificial Sequence
  Description of Artificial Sequence: Synthetic oligonucleotide
  Sense strand starting at position 681 of SEQ ID NO: 915689
cccaguauggccuguguca

SEQ ID NO: 1098705 - RNA, 19 nt, Artificial Sequence
  Description of Artificial Sequence: Synthetic oligonucleotide
  Antisense strand to SEQ ID NO: 1098704
ugacacaggccauacuggg

SEQ ID NO: 1098706 - RNA, 19 nt, Artificial Sequence
  Description of Artificial Sequence: Synthetic oligonucleotide
  Sense strand starting at position 683 of SEQ ID NO: 915689
caguauggccugugucauu

SEQ ID NO: 1098707 - RNA, 19 nt, Artificial Sequence
  Description of Artificial Sequence: Synthetic oligonucleotide
  Antisense strand to SEQ ID NO: 1098706
aaugacacaggccauacug

SEQ ID NO: 1098708 - RNA, 19 nt, Artificial Sequence
  Description of Artificial Sequence: Synthetic oligonucleotide
  Sense strand starting at position 853 of SEQ ID NO: 915689
caguuucuucgggcacgua

SEQ ID NO: 1098709 - RNA, 19 nt, Artificial Sequence
  Description of Artificial Sequence: Synthetic oligonucleotide
  Antisense strand to SEQ ID NO: 1098708
uacgugcccgaagaaacug

SEQ ID NO: 1098710 - RNA, 19 nt, Artificial Sequence
  Description of Artificial Sequence: Synthetic oligonucleotide
  Sense strand starting at position 854 of SEQ ID NO: 915689
aguuucuucgggcacguau

SEQ ID NO: 1098711 - RNA, 19 nt, Artificial Sequence
  Description of Artificial Sequence: Synthetic oligonucleotide
  Antisense strand to SEQ ID NO: 1098710
auacgugcccgaagaaacu

SEQ ID NO: 1098712 - RNA, 19 nt, Artificial Sequence
  Description of Artificial Sequence: Synthetic oligonucleotide
  Sense strand starting at position 865 of SEQ ID NO: 915689
gcacguaugcaucaccuuu

SEQ ID NO: 1098713 - RNA, 19 nt, Artificial Sequence
  Description of Artificial Sequence: Synthetic oligonucleotide
  Antisense strand to SEQ ID NO: 1098712
aaaggugaugcauacgugc

SEQ ID NO: 1098714 - RNA, 19 nt, Artificial Sequence
  Description of Artificial Sequence: Synthetic oligonucleotide
  Sense strand starting at position 1035 of SEQ ID NO: 915689
cagccaaggccugaucaga

SEQ ID NO: 1098715 - RNA, 19 nt, Artificial Sequence
  Description of Artificial Sequence: Synthetic oligonucleotide
  Antisense strand to SEQ ID NO: 1098714
ucugaucaggccuuggcug

SEQ ID NO: 1098716 - RNA, 19 nt, Artificial Sequence
  Description of Artificial Sequence: Synthetic oligonucleotide
  Sense strand starting at position 1655 of SEQ ID NO: 915689
gagccaugaugcuucgaga

SEQ ID NO: 1098717 - RNA, 19 nt, Artificial Sequence
  Description of Artificial Sequence: Synthetic oligonucleotide
  Antisense strand to SEQ ID NO: 1098716
ucucgaagcaucauggcuc

SEQ ID NO: 1098718 - RNA, 19 nt, Artificial Sequence
  Description of Artificial Sequence: Synthetic oligonucleotide
  Sense strand starting at position 1718 of SEQ ID NO: 915689
cagagugucccuggaacga

SEQ ID NO: 1098719 - RNA, 19 nt, Artificial Sequence
  Description of Artificial Sequence: Synthetic oligonucleotide
  Antisense strand to SEQ ID NO: 1098718
ucguuccagggacacucug

SEQ ID NO: 1098720 - RNA, 19 nt, Artificial Sequence
  Description of Artificial Sequence: Synthetic oligonucleotide
  Sense strand starting at position 2044 of SEQ ID NO: 915689
agaggacgugcuuggagaa

SEQ ID NO: 1098721 - RNA, 19 nt, Artificial Sequence
  Description of Artificial Sequence: Synthetic oligonucleotide
  Antisense strand to SEQ ID NO: 1098720
uucuccaagcacguccucu

SEQ ID NO: 1098722 - RNA, 19 nt, Artificial Sequence
  Description of Artificial Sequence: Synthetic oligonucleotide
  Sense strand starting at position 2090 of SEQ ID NO: 915689
ggaggugucagcugcuauu

SEQ ID NO: 1098723 - RNA, 19 nt, Artificial Sequence
  Description of Artificial Sequence: Synthetic oligonucleotide
  Antisense strand to SEQ ID NO: 1098722
aauagcagcugacaccucc

SEQ ID NO: 1098724 - RNA, 19 nt, Artificial Sequence
  Description of Artificial Sequence: Synthetic oligonucleotide
  Sense strand starting at position 2193 of SEQ ID NO: 915689
cucucuuugggccaaacua

SEQ ID NO: 1098725 - RNA, 19 nt, Artificial Sequence
  Description of Artificial Sequence: Synthetic oligonucleotide
  Antisense strand to SEQ ID NO: 1098724
uaguuuggcccaaagagag

SEQ ID NO: 1098726 - RNA, 19 nt, Artificial Sequence
  Description of Artificial Sequence: Synthetic oligonucleotide
  Sense strand starting at position 2260 of SEQ ID NO: 915689
ccuucucucugagauguuc

SEQ ID NO: 1098727 - RNA, 19 nt, Artificial Sequence
  Description of Artificial Sequence: Synthetic oligonucleotide
  Antisense strand to SEQ ID NO: 1098726
gaacaucucagagagaagg

SEQ ID NO: 1098728 - RNA, 19 nt, Artificial Sequence
  Description of Artificial Sequence: Synthetic oligonucleotide
  Sense strand starting at position 2268 of SEQ ID NO: 915689
cugagauguucugugggag

SEQ ID NO: 1098729 - RNA, 19 nt, Artificial Sequence
  Description of Artificial Sequence: Synthetic oligonucleotide
  Antisense strand to SEQ ID NO: 1098728
cucccacagaacaucucag

SEQ ID NO: 1098730 - RNA, 19 nt, Artificial Sequence
  Description of Artificial Sequence: Synthetic oligonucleotide
  Sense strand starting at position 2269 of SEQ ID NO: 915689
ugagauguucugugggagu

SEQ ID NO: 1098731 - RNA, 19 nt, Artificial Sequence
  Description of Artificial Sequence: Synthetic oligonucleotide
  Antisense strand to SEQ ID NO: 1098730
acucccacagaacaucuca

SEQ ID NO: 1098732 - RNA, 19 nt, Artificial Sequence
  Description of Artificial Sequence: Synthetic oligonucleotide
  Sense strand starting at position 2271 of SEQ ID NO: 915689
agauguucugugggaguaa

SEQ ID NO: 1098733 - RNA, 19 nt, Artificial Sequence
  Description of Artificial Sequence: Synthetic oligonucleotide
  Antisense strand to SEQ ID NO: 1098732
uuacucccacagaacaucu

SEQ ID NO: 1098734 - RNA, 19 nt, Artificial Sequence
  Description of Artificial Sequence: Synthetic oligonucleotide
  Sense strand starting at position 2272 of SEQ ID NO: 915689
gauguucugugggaguaaa

SEQ ID NO: 1098735 - RNA, 19 nt, Artificial Sequence
  Description of Artificial Sequence: Synthetic oligonucleotide
  Antisense strand to SEQ ID NO: 1098734
uuuacucccacagaacauc

SEQ ID NO: 1098736 - RNA, 19 nt, Artificial Sequence
  Description of Artificial Sequence: Synthetic oligonucleotide
  Sense strand starting at position 2461 of SEQ ID NO: 915689
cucugcuuuccuggcuaga

SEQ ID NO: 1098737 - RNA, 19 nt, Artificial Sequence
  Description of Artificial Sequence: Synthetic oligonucleotide
  Antisense strand to SEQ ID NO: 1098736
ucuagccaggaaagcagag

SEQ ID NO: 1098738 - RNA, 19 nt, Artificial Sequence
  Description of Artificial Sequence: Synthetic oligonucleotide
  Sense strand starting at position 2463 of SEQ ID NO: 915689
cugcuuuccuggcuagaca

SEQ ID NO: 1098739 - RNA, 19 nt, Artificial Sequence
  Description of Artificial Sequence: Synthetic oligonucleotide
  Antisense strand to SEQ ID NO: 1098738
ugucuagccaggaaagcag

SEQ ID NO: 1098740 - RNA, 19 nt, Artificial Sequence
  Description of Artificial Sequence: Synthetic oligonucleotide
  Sense strand starting at position 2591 of SEQ ID NO: 915689
gaguuugcuggguaagggu

SEQ ID NO: 1098741 - RNA, 19 nt, Artificial Sequence
  Description of Artificial Sequence: Synthetic oligonucleotide
  Antisense strand to SEQ ID NO: 1098740
acccuuacccagcaaacuc

SEQ ID NO: 1098742 - RNA, 19 nt, Artificial Sequence
  Description of Artificial Sequence: Synthetic oligonucleotide
  Sense strand starting at position 2792 of SEQ ID NO: 915689
ccuguaugcuggccaguga

SEQ ID NO: 1098743 - RNA, 19 nt, Artificial Sequence
  Description of Artificial Sequence: Synthetic oligonucleotide
  Antisense strand to SEQ ID NO: 1098742
ucacuggccagcauacagg

SEQ ID NO: 1098744 - RNA, 19 nt, Artificial Sequence
  Description of Artificial Sequence: Synthetic oligonucleotide
  Sense strand starting at position 2944 of SEQ ID NO: 915689
ugcggaacucuucgguuca

SEQ ID NO: 1098745 - RNA, 19 nt, Artificial Sequence
  Description of Artificial Sequence: Synthetic oligonucleotide
  Antisense strand to SEQ ID NO: 1098744
ugaaccgaagaguuccgca

SEQ ID NO: 1098746 - RNA, 19 nt, Artificial Sequence
  Description of Artificial Sequence: Synthetic oligonucleotide
  Sense strand starting at position 3045 of SEQ ID NO: 915689
ggcuuagagucagggacaa

SEQ ID NO: 1098747 - RNA, 19 nt, Artificial Sequence
  Description of Artificial Sequence: Synthetic oligonucleotide
  Antisense strand to SEQ ID NO: 1098746
uugucccugacucuaagcc

SEQ ID NO: 1098748 - RNA, 19 nt, Artificial Sequence
  Description of Artificial Sequence: Synthetic oligonucleotide
  Sense strand starting at position 3385 of SEQ ID NO: 915689
ccauguccucgaugggcaa

SEQ ID NO: 1098749 - RNA, 19 nt, Artificial Sequence
  Description of Artificial Sequence: Synthetic oligonucleotide
  Antisense strand to SEQ ID NO: 1098748
uugcccaucgaggacaugg

SEQ ID NO: 1098750 - RNA, 19 nt, Artificial Sequence
  Description of Artificial Sequence: Synthetic oligonucleotide
  Sense strand starting at position 3433 of SEQ ID NO: 915689
ccuggauaucugugaccag

SEQ ID NO: 1098751 - RNA, 19 nt, Artificial Sequence
  Description of Artificial Sequence: Synthetic oligonucleotide
  Antisense strand to SEQ ID NO: 1098750
cuggucacagauauccagg

SEQ ID NO: 1098752 - RNA, 19 nt, Artificial Sequence
  Description of Artificial Sequence: Synthetic oligonucleotide
  Sense strand starting at position 3436 of SEQ ID NO: 915689
ggauaucugugaccagcuu

SEQ ID NO: 1098753 - RNA, 19 nt, Artificial Sequence
  Description of Artificial Sequence: Synthetic oligonucleotide
  Antisense strand to SEQ ID NO: 1098752
aagcuggucacagauaucc

SEQ ID NO: 1098754 - RNA, 19 nt, Artificial Sequence
  Description of Artificial Sequence: Synthetic oligonucleotide
  Sense strand starting at position 3963 of SEQ ID NO: 915689
ccgggaugguccaaggaga

SEQ ID NO: 1098755 - RNA, 19 nt, Artificial Sequence
  Description of Artificial Sequence: Synthetic oligonucleotide
  Antisense strand to SEQ ID NO: 1098754
ucuccuuggaccaucccgg

SEQ ID NO: 1098756 - RNA, 19 nt, Artificial Sequence
  Description of Artificial Sequence: Synthetic oligonucleotide
  Sense strand starting at position 1 of SEQ ID NO: 915690
ugcucugagucuccuguua

SEQ ID NO: 1098757 - RNA, 19 nt, Artificial Sequence
  Description of Artificial Sequence: Synthetic oligonucleotide
  Antisense strand to SEQ ID NO: 1098756
uaacaggagacucagagca

SEQ ID NO: 1098758 - RNA, 19 nt, Artificial Sequence
  Description of Artificial Sequence: Synthetic oligonucleotide
  Sense strand starting at position 9 of SEQ ID NO: 915690
gucuccuguuaggcagaaa

SEQ ID NO: 1098759 - RNA, 19 nt, Artificial Sequence
  Description of Artificial Sequence: Synthetic oligonucleotide
  Antisense strand to SEQ ID NO: 1098758
uuucugccuaacaggagac

SEQ ID NO: 1098760 - RNA, 19 nt, Artificial Sequence
  Description of Artificial Sequence: Synthetic oligonucleotide
  Sense strand starting at position 59 of SEQ ID NO: 915690
gacucacugugguggagua

SEQ ID NO: 1098761 - RNA, 19 nt, Artificial Sequence
  Description of Artificial Sequence: Synthetic oligonucleotide
  Antisense strand to SEQ ID NO: 1098760
uacuccaccacagugaguc

SEQ ID NO: 1098762 - RNA, 19 nt, Artificial Sequence
  Description of Artificial Sequence: Synthetic oligonucleotide
  Sense strand starting at position 61 of SEQ ID NO: 915690
cucacugugguggaguaaa

SEQ ID NO: 1098763 - RNA, 19 nt, Artificial Sequence
  Description of Artificial Sequence: Synthetic oligonucleotide
  Antisense strand to SEQ ID NO: 1098762
uuuacuccaccacagugag

SEQ ID NO: 1098764 - RNA, 19 nt, Artificial Sequence
  Description of Artificial Sequence: Synthetic oligonucleotide
  Sense strand starting at position 143 of SEQ ID NO: 915690
acaccugagucucauaagu

SEQ ID NO: 1098765 - RNA, 19 nt, Artificial Sequence
  Description of Artificial Sequence: Synthetic oligonucleotide
  Antisense strand to SEQ ID NO: 1098764
acuuaugagacucaggugu

SEQ ID NO: 1098766 - RNA, 19 nt, Artificial Sequence
  Description of Artificial Sequence: Synthetic oligonucleotide
  Sense strand starting at position 145 of SEQ ID NO: 915690
accugagucucauaagugu

SEQ ID NO: 1098767 - RNA, 19 nt, Artificial Sequence
  Description of Artificial Sequence: Synthetic oligonucleotide
  Antisense strand to SEQ ID NO: 1098766
acacuuaugagacucaggu

SEQ ID NO: 1098768 - RNA, 19 nt, Artificial Sequence
  Description of Artificial Sequence: Synthetic oligonucleotide
  Sense strand starting at position 154 of SEQ ID NO: 915690
ucauaagugucaggagguu

SEQ ID NO: 1098769 - RNA, 19 nt, Artificial Sequence
  Description of Artificial Sequence: Synthetic oligonucleotide
  Antisense strand to SEQ ID NO: 1098768
aaccuccugacacuuauga

SEQ ID NO: 1098770 - RNA, 19 nt, Artificial Sequence
  Description of Artificial Sequence: Synthetic oligonucleotide
  Sense strand starting at position 253 of SEQ ID NO: 915690
agaauuaucuccucgggag

SEQ ID NO: 1098771 - RNA, 19 nt, Artificial Sequence
  Description of Artificial Sequence: Synthetic oligonucleotide
  Antisense strand to SEQ ID NO: 1098770
cucccgaggagauaauucu

SEQ ID NO: 1098772 - RNA, 19 nt, Artificial Sequence
  Description of Artificial Sequence: Synthetic oligonucleotide
  Sense strand starting at position 254 of SEQ ID NO: 915690
gaauuaucuccucgggaga

SEQ ID NO: 1098773 - RNA, 19 nt, Artificial Sequence
  Description of Artificial Sequence: Synthetic oligonucleotide
  Antisense strand to SEQ ID NO: 1098772
ucucccgaggagauaauuc

SEQ ID NO: 1098774 - RNA, 19 nt, Artificial Sequence
  Description of Artificial Sequence: Synthetic oligonucleotide
  Sense strand starting at position 255 of SEQ ID NO: 915690
aauuaucuccucgggagaa

SEQ ID NO: 1098775 - RNA, 19 nt, Artificial Sequence
  Description of Artificial Sequence: Synthetic oligonucleotide
  Antisense strand to SEQ ID NO: 1098774
uucucccgaggagauaauu

SEQ ID NO: 1098776 - RNA, 19 nt, Artificial Sequence
  Description of Artificial Sequence: Synthetic oligonucleotide
  Sense strand starting at position 256 of SEQ ID NO: 915690
auuaucuccucgggagaaa

SEQ ID NO: 1098777 - RNA, 19 nt, Artificial Sequence
  Description of Artificial Sequence: Synthetic oligonucleotide
  Antisense strand to SEQ ID NO: 1098776
uuucucccgaggagauaau

SEQ ID NO: 1098778 - RNA, 19 nt, Artificial Sequence
  Description of Artificial Sequence: Synthetic oligonucleotide
  Sense strand starting at position 589 of SEQ ID NO: 915690
uggugcugucccggugaua

SEQ ID NO: 1098779 - RNA, 19 nt, Artificial Sequence
  Description of Artificial Sequence: Synthetic oligonucleotide
  Antisense strand to SEQ ID NO: 1098778
uaucaccgggacagcacca

SEQ ID NO: 1098780 - RNA, 19 nt, Artificial Sequence
  Description of Artificial Sequence: Synthetic oligonucleotide
  Sense strand starting at position 600 of SEQ ID NO: 915690
cggugauagugaguucuca

SEQ ID NO: 1098781 - RNA, 19 nt, Artificial Sequence
  Description of Artificial Sequence: Synthetic oligonucleotide
  Antisense strand to SEQ ID NO: 1098780
ugagaacucacuaucaccg

SEQ ID NO: 1098782 - RNA, 19 nt, Artificial Sequence
  Description of Artificial Sequence: Synthetic oligonucleotide
  Sense strand starting at position 828 of SEQ ID NO: 915690
ucgguauuccuuuacagca

SEQ ID NO: 1098783 - RNA, 19 nt, Artificial Sequence
  Description of Artificial Sequence: Synthetic oligonucleotide
  Antisense strand to SEQ ID NO: 1098782
ugcuguaaaggaauaccga

SEQ ID NO: 1098784 - RNA, 19 nt, Artificial Sequence
  Description of Artificial Sequence: Synthetic oligonucleotide
  Sense strand starting at position 849 of SEQ ID NO: 915690
gcaagaaggcccuaacagu

SEQ ID NO: 1098785 - RNA, 19 nt, Artificial Sequence
  Description of Artificial Sequence: Synthetic oligonucleotide
  Antisense strand to SEQ ID NO: 1098784
acuguuagggccuucuugc

SEQ ID NO: 1098786 - RNA, 19 nt, Artificial Sequence
  Description of Artificial Sequence: Synthetic oligonucleotide
  Sense strand starting at position 894 of SEQ ID NO: 915690
gcccaucaucucugaguca

SEQ ID NO: 1098787 - RNA, 19 nt, Artificial Sequence
  Description of Artificial Sequence: Synthetic oligonucleotide
  Antisense strand to SEQ ID NO: 1098786
ugacucagagaugaugggc

SEQ ID NO: 1098788 - RNA, 19 nt, Artificial Sequence
  Description of Artificial Sequence: Synthetic oligonucleotide
  Sense strand starting at position 901 of SEQ ID NO: 915690
aucucugagucagucuaca

SEQ ID NO: 1098789 - RNA, 19 nt, Artificial Sequence
  Description of Artificial Sequence: Synthetic oligonucleotide
  Antisense strand to SEQ ID NO: 1098788
uguagacugacucagagau

SEQ ID NO: 1098790 - RNA, 19 nt, Artificial Sequence
  Description of Artificial Sequence: Synthetic oligonucleotide
  Sense strand starting at position 960 of SEQ ID NO: 915690
aggcaacucucaggagaga

SEQ ID NO: 1098791 - RNA, 19 nt, Artificial Sequence
  Description of Artificial Sequence: Synthetic oligonucleotide
  Antisense strand to SEQ ID NO: 1098790
ucucuccugagaguugccu

SEQ ID NO: 1098792 - RNA, 19 nt, Artificial Sequence
  Description of Artificial Sequence: Synthetic oligonucleotide
  Sense strand starting at position 988 of SEQ ID NO: 915690
aggaaagguucucugaagu

SEQ ID NO: 1098793 - RNA, 19 nt, Artificial Sequence
  Description of Artificial Sequence: Synthetic oligonucleotide
  Antisense strand to SEQ ID NO: 1098792
acuucagagaaccuuuccu

SEQ ID NO: 1098794 - RNA, 19 nt, Artificial Sequence
  Description of Artificial Sequence: Synthetic oligonucleotide
  Sense strand starting at position 1087 of SEQ ID NO: 915690
ccaagaaguggucaccacu

SEQ ID NO: 1098795 - RNA, 19 nt, Artificial Sequence
  Description of Artificial Sequence: Synthetic oligonucleotide
  Antisense strand to SEQ ID NO: 1098794
aguggugaccacuucuugg

SEQ ID NO: 1098796 - RNA, 19 nt, Artificial Sequence
  Description of Artificial Sequence: Synthetic oligonucleotide
  Sense strand starting at position 1105 of SEQ ID NO: 915690
ugcccucacucuguguaaa

SEQ ID NO: 1098797 - RNA, 19 nt, Artificial Sequence
  Description of Artificial Sequence: Synthetic oligonucleotide
  Antisense strand to SEQ ID NO: 1098796
uuuacacagagugagggca

SEQ ID NO: 1098798 - RNA, 19 nt, Artificial Sequence
  Description of Artificial Sequence: Synthetic oligonucleotide
  Sense strand starting at position 1106 of SEQ ID NO: 915690
gcccucacucuguguaaau

SEQ ID NO: 1098799 - RNA, 19 nt, Artificial Sequence
  Description of Artificial Sequence: Synthetic oligonucleotide
  Antisense strand to SEQ ID NO: 1098798
auuuacacagagugagggc

SEQ ID NO: 1098800 - RNA, 19 nt, Artificial Sequence
  Description of Artificial Sequence: Synthetic oligonucleotide
  Sense strand starting at position 1107 of SEQ ID NO: 915690
cccucacucuguguaaaug

SEQ ID NO: 1098801 - RNA, 19 nt, Artificial Sequence
  Description of Artificial Sequence: Synthetic oligonucleotide
  Antisense strand to SEQ ID NO: 1098800
cauuuacacagagugaggg

SEQ ID NO: 1098802 - RNA, 19 nt, Artificial Sequence
  Description of Artificial Sequence: Synthetic oligonucleotide
  Sense strand starting at position 1108 of SEQ ID NO: 915690
ccucacucuguguaaauga

SEQ ID NO: 1098803 - RNA, 19 nt, Artificial Sequence
  Description of Artificial Sequence: Synthetic oligonucleotide
  Antisense strand to SEQ ID NO: 1098802
ucauuuacacagagugagg

SEQ ID NO: 1098804 - RNA, 19 nt, Artificial Sequence
  Description of Artificial Sequence: Synthetic oligonucleotide
  Sense strand starting at position 3049 of SEQ ID NO: 915690
uguggacuggccuggaauu

SEQ ID NO: 1098805 - RNA, 19 nt, Artificial Sequence
  Description of Artificial Sequence: Synthetic oligonucleotide
  Antisense strand to SEQ ID NO: 1098804
aauuccaggccaguccaca

SEQ ID NO: 1098806 - RNA, 19 nt, Artificial Sequence
  Description of Artificial Sequence: Synthetic oligonucleotide
  Sense strand starting at position 3149 of SEQ ID NO: 915690
acucuuugucagugaucuc

SEQ ID NO: 1098807 - RNA, 19 nt, Artificial Sequence
  Description of Artificial Sequence: Synthetic oligonucleotide
  Antisense strand to SEQ ID NO: 1098806
gagaucacugacaaagagu

SEQ ID NO: 1098808 - RNA, 19 nt, Artificial Sequence
  Description of Artificial Sequence: Synthetic oligonucleotide
  Sense strand starting at position 3152 of SEQ ID NO: 915690
cuuugucagugaucucuau

SEQ ID NO: 1098809 - RNA, 19 nt, Artificial Sequence
  Description of Artificial Sequence: Synthetic oligonucleotide
  Antisense strand to SEQ ID NO: 1098808
auagagaucacugacaaag

SEQ ID NO: 1098810 - RNA, 19 nt, Artificial Sequence
  Description of Artificial Sequence: Synthetic oligonucleotide
  Sense strand starting at position 3156 of SEQ ID NO: 915690
gucagugaucucuauauug

SEQ ID NO: 1098811 - RNA, 19 nt, Artificial Sequence
  Description of Artificial Sequence: Synthetic oligonucleotide
  Antisense strand to SEQ ID NO: 1098810
caauauagagaucacugac

SEQ ID NO: 1098812 - RNA, 19 nt, Artificial Sequence
  Description of Artificial Sequence: Synthetic oligonucleotide
  Sense strand starting at position 3161 of SEQ ID NO: 915690
ugaucucuauauuguuagu

SEQ ID NO: 1098813 - RNA, 19 nt, Artificial Sequence
  Description of Artificial Sequence: Synthetic oligonucleotide
  Antisense strand to SEQ ID NO: 1098812
acuaacaauauagagauca

SEQ ID NO: 1098814 - RNA, 19 nt, Artificial Sequence
  Description of Artificial Sequence: Synthetic oligonucleotide
  Sense strand starting at position 3166 of SEQ ID NO: 915690
ucuauauuguuagugguca

SEQ ID NO: 1098815 - RNA, 19 nt, Artificial Sequence
  Description of Artificial Sequence: Synthetic oligonucleotide
  Antisense strand to SEQ ID NO: 1098814
ugaccacuaacaauauaga

SEQ ID NO: 1098816 - RNA, 19 nt, Artificial Sequence
  Description of Artificial Sequence: Synthetic oligonucleotide
  Sense strand starting at position 3170 of SEQ ID NO: 915690
uauuguuaguggucaguuc

SEQ ID NO: 1098817 - RNA, 19 nt, Artificial Sequence
  Description of Artificial Sequence: Synthetic oligonucleotide
  Antisense strand to SEQ ID NO: 1098816
gaacugaccacuaacaaua

SEQ ID NO: 1098818 - RNA, 19 nt, Artificial Sequence
  Description of Artificial Sequence: Synthetic oligonucleotide
  Sense strand starting at position 3194 of SEQ ID NO: 915690
ccucguccuccgggaacua

SEQ ID NO: 1098819 - RNA, 19 nt, Artificial Sequence
  Description of Artificial Sequence: Synthetic oligonucleotide
  Antisense strand to SEQ ID NO: 1098818
uaguucccggaggacgagg

SEQ ID NO: 1098820 - RNA, 19 nt, Artificial Sequence
  Description of Artificial Sequence: Synthetic oligonucleotide
  Sense strand starting at position 3226 of SEQ ID NO: 915690
agucauucuugcuacacau

SEQ ID NO: 1098821 - RNA, 19 nt, Artificial Sequence
  Description of Artificial Sequence: Synthetic oligonucleotide
  Antisense strand to SEQ ID NO: 1098820
auguguagcaagaaugacu

SEQ ID NO: 1098822 - RNA, 19 nt, Artificial Sequence
  Description of Artificial Sequence: Synthetic oligonucleotide
  Sense strand starting at position 3596 of SEQ ID NO: 915690
augugaauguugcaugcaa

SEQ ID NO: 1098823 - RNA, 19 nt, Artificial Sequence
  Description of Artificial Sequence: Synthetic oligonucleotide
  Antisense strand to SEQ ID NO: 1098822
uugcaugcaacauucacau

SEQ ID NO: 1098824 - RNA, 19 nt, Artificial Sequence
  Description of Artificial Sequence: Synthetic oligonucleotide
  Sense strand starting at position 3598 of SEQ ID NO: 915690
gugaauguugcaugcaaug

SEQ ID NO: 1098825 - RNA, 19 nt, Artificial Sequence
  Description of Artificial Sequence: Synthetic oligonucleotide
  Antisense strand to SEQ ID NO: 1098824
cauugcaugcaacauucac

SEQ ID NO: 1098826 - RNA, 19 nt, Artificial Sequence
  Description of Artificial Sequence: Synthetic oligonucleotide
  Sense strand starting at position 3607 of SEQ ID NO: 915690
gcaugcaaugcaugaagaa

SEQ ID NO: 1098827 - RNA, 19 nt, Artificial Sequence
  Description of Artificial Sequence: Synthetic oligonucleotide
  Antisense strand to SEQ ID NO: 1098826
uucuucaugcauugcaugc

SEQ ID NO: 1098828 - RNA, 19 nt, Artificial Sequence
  Description of Artificial Sequence: Synthetic oligonucleotide
  Sense strand starting at position 3801 of SEQ ID NO: 915690
cgcugcuaugucugcugau

SEQ ID NO: 1098829 - RNA, 19 nt, Artificial Sequence
  Description of Artificial Sequence: Synthetic oligonucleotide
  Antisense strand to SEQ ID NO: 1098828
aucagcagacauagcagcg

SEQ ID NO: 1098830 - RNA, 19 nt, Artificial Sequence
  Description of Artificial Sequence: Synthetic oligonucleotide
  Sense strand starting at position 3810 of SEQ ID NO: 915690
gucugcugaucucucuuua

SEQ ID NO: 1098831 - RNA, 19 nt, Artificial Sequence
  Description of Artificial Sequence: Synthetic oligonucleotide
  Antisense strand to SEQ ID NO: 1098830
uaaagagagaucagcagac

SEQ ID NO: 1098832 - RNA, 19 nt, Artificial Sequence
  Description of Artificial Sequence: Synthetic oligonucleotide
  Sense strand starting at position 3932 of SEQ ID NO: 915690
cuaucuacauccucaguga

SEQ ID NO: 1098833 - RNA, 19 nt, Artificial Sequence
  Description of Artificial Sequence: Synthetic oligonucleotide
  Antisense strand to SEQ ID NO: 1098832
ucacugaggauguagauag

SEQ ID NO: 1098834 - RNA, 19 nt, Artificial Sequence
  Description of Artificial Sequence: Synthetic oligonucleotide
  Sense strand starting at position 3978 of SEQ ID NO: 915690
ccauccauaugcugaugau

SEQ ID NO: 1098835 - RNA, 19 nt, Artificial Sequence
  Description of Artificial Sequence: Synthetic oligonucleotide
  Antisense strand to SEQ ID NO: 1098834
aucaucagcauauggaugg

SEQ ID NO: 1098836 - RNA, 19 nt, Artificial Sequence
  Description of Artificial Sequence: Synthetic oligonucleotide
  Sense strand starting at position 128 of SEQ ID NO: 915691
guaagauauguaggacaua

SEQ ID NO: 1098837 - RNA, 19 nt, Artificial Sequence
  Description of Artificial Sequence: Synthetic oligonucleotide
  Antisense strand to SEQ ID NO: 1098836
uauguccuacauaucuuac

SEQ ID NO: 1098838 - RNA, 19 nt, Artificial Sequence
  Description of Artificial Sequence: Synthetic oligonucleotide
  Sense strand starting at position 195 of SEQ ID NO: 915691
cacagugaaucugugagau

SEQ ID NO: 1098839 - RNA, 19 nt, Artificial Sequence
  Description of Artificial Sequence: Synthetic oligonucleotide
  Antisense strand to SEQ ID NO: 1098838
aucucacagauucacugug

SEQ ID NO: 1098840 - RNA, 19 nt, Artificial Sequence
  Description of Artificial Sequence: Synthetic oligonucleotide
  Sense strand starting at position 348 of SEQ ID NO: 915691
ucucaacagcuuugcagaa

SEQ ID NO: 1098841 - RNA, 19 nt, Artificial Sequence
  Description of Artificial Sequence: Synthetic oligonucleotide
  Antisense strand to SEQ ID NO: 1098840
uucugcaaagcuguugaga

SEQ ID NO: 1098842 - RNA, 19 nt, Artificial Sequence
  Description of Artificial Sequence: Synthetic oligonucleotide
  Sense strand starting at position 406 of SEQ ID NO: 915691
ccuauuguccagcauccua

SEQ ID NO: 1098843 - RNA, 19 nt, Artificial Sequence
  Description of Artificial Sequence: Synthetic oligonucleotide
  Antisense strand to SEQ ID NO: 1098842
uaggaugcuggacaauagg

SEQ ID NO: 1098844 - RNA, 19 nt, Artificial Sequence
  Description of Artificial Sequence: Synthetic oligonucleotide
  Sense strand starting at position 425 of SEQ ID NO: 915691
uggcccauuccagaaaguu

SEQ ID NO: 1098845 - RNA, 19 nt, Artificial Sequence
  Description of Artificial Sequence: Synthetic oligonucleotide
  Antisense strand to SEQ ID NO: 1098844
aacuuucuggaaugggcca

SEQ ID NO: 1098846 - RNA, 19 nt, Artificial Sequence
  Description of Artificial Sequence: Synthetic oligonucleotide
  Sense strand starting at position 435 of SEQ ID NO: 915691
cagaaaguucagugggugu

SEQ ID NO: 1098847 - RNA, 19 nt, Artificial Sequence
  Description of Artificial Sequence: Synthetic oligonucleotide
  Antisense strand to SEQ ID NO: 1098846
acacccacugaacuuucug

SEQ ID NO: 1098848 - RNA, 19 nt, Artificial Sequence
  Description of Artificial Sequence: Synthetic oligonucleotide
  Sense strand starting at position 437 of SEQ ID NO: 915691
gaaaguucaguggguguca

SEQ ID NO: 1098849 - RNA, 19 nt, Artificial Sequence
  Description of Artificial Sequence: Synthetic oligonucleotide
  Antisense strand to SEQ ID NO: 1098848
ugacacccacugaacuuuc

SEQ ID NO: 1098850 - RNA, 19 nt, Artificial Sequence
  Description of Artificial Sequence: Synthetic oligonucleotide
  Sense strand starting at position 732 of SEQ ID NO: 915691
ccaagauccagacgagacu

SEQ ID NO: 1098851 - RNA, 19 nt, Artificial Sequence
  Description of Artificial Sequence: Synthetic oligonucleotide
  Antisense strand to SEQ ID NO: 1098850
agucucgucuggaucuugg

SEQ ID NO: 1098852 - RNA, 19 nt, Artificial Sequence
  Description of Artificial Sequence: Synthetic oligonucleotide
  Sense strand starting at position 808 of SEQ ID NO: 915691
ucugaaaccugagaggaaa

SEQ ID NO: 1098853 - RNA, 19 nt, Artificial Sequence
  Description of Artificial Sequence: Synthetic oligonucleotide
  Antisense strand to SEQ ID NO: 1098852
uuuccucucagguuucaga

SEQ ID NO: 1098854 - RNA, 19 nt, Artificial Sequence
  Description of Artificial Sequence: Synthetic oligonucleotide
  Sense strand starting at position 1360 of SEQ ID NO: 915691
ggaaacgacuucuuggagu

SEQ ID NO: 1098855 - RNA, 19 nt, Artificial Sequence
  Description of Artificial Sequence: Synthetic oligonucleotide
  Antisense strand to SEQ ID NO: 1098854
acuccaagaagucguuucc

SEQ ID NO: 1098856 - RNA, 19 nt, Artificial Sequence
  Description of Artificial Sequence: Synthetic oligonucleotide
  Sense strand starting at position 1362 of SEQ ID NO: 915691
aaacgacuucuuggaguaa

SEQ ID NO: 1098857 - RNA, 19 nt, Artificial Sequence
  Description of Artificial Sequence: Synthetic oligonucleotide
  Antisense strand to SEQ ID NO: 1098856
uuacuccaagaagucguuu

SEQ ID NO: 1098858 - RNA, 19 nt, Artificial Sequence
  Description of Artificial Sequence: Synthetic oligonucleotide
  Sense strand starting at position 1366 of SEQ ID NO: 915691
gacuucuuggaguaaguga

SEQ ID NO: 1098859 - RNA, 19 nt, Artificial Sequence
  Description of Artificial Sequence: Synthetic oligonucleotide
  Antisense strand to SEQ ID NO: 1098858
ucacuuacuccaagaaguc

SEQ ID NO: 1098860 - RNA, 19 nt, Artificial Sequence
  Description of Artificial Sequence: Synthetic oligonucleotide
  Sense strand starting at position 1626 of SEQ ID NO: 915691
ggccuuccucuugggacua

SEQ ID NO: 1098861 - RNA, 19 nt, Artificial Sequence
  Description of Artificial Sequence: Synthetic oligonucleotide
  Antisense strand to SEQ ID NO: 1098860
uagucccaagaggaaggcc

SEQ ID NO: 1098862 - RNA, 19 nt, Artificial Sequence
  Description of Artificial Sequence: Synthetic oligonucleotide
  Sense strand starting at position 1941 of SEQ ID NO: 915691
gaagcuugagcagaucuga

SEQ ID NO: 1098863 - RNA, 19 nt, Artificial Sequence
  Description of Artificial Sequence: Synthetic oligonucleotide
  Antisense strand to SEQ ID NO: 1098862
ucagaucugcucaagcuuc

SEQ ID NO: 1098864 - RNA, 19 nt, Artificial Sequence
  Description of Artificial Sequence: Synthetic oligonucleotide
  Sense strand starting at position 2121 of SEQ ID NO: 915691
gaugauuucuacuguuagg

SEQ ID NO: 1098865 - RNA, 19 nt, Artificial Sequence
  Description of Artificial Sequence: Synthetic oligonucleotide
  Antisense strand to SEQ ID NO: 1098864
ccuaacaguagaaaucauc

SEQ ID NO: 1098866 - RNA, 19 nt, Artificial Sequence
  Description of Artificial Sequence: Synthetic oligonucleotide
  Sense strand starting at position 2245 of SEQ ID NO: 915691
gaagccauuugugcugaau

SEQ ID NO: 1098867 - RNA, 19 nt, Artificial Sequence
  Description of Artificial Sequence: Synthetic oligonucleotide
  Antisense strand to SEQ ID NO: 1098866
auucagcacaaauggcuuc

SEQ ID NO: 1098868 - RNA, 19 nt, Artificial Sequence
  Description of Artificial Sequence: Synthetic oligonucleotide
  Sense strand starting at position 2247 of SEQ ID NO: 915691
agccauuugugcugaauuu

SEQ ID NO: 1098869 - RNA, 19 nt, Artificial Sequence
  Description of Artificial Sequence: Synthetic oligonucleotide
  Antisense strand to SEQ ID NO: 1098868
aaauucagcacaaauggcu

SEQ ID NO: 1098870 - RNA, 19 nt, Artificial Sequence
  Description of Artificial Sequence: Synthetic oligonucleotide
  Sense strand starting at position 2275 of SEQ ID NO: 915691
gggugggaugauggaguua

SEQ ID NO: 1098871 - RNA, 19 nt, Artificial Sequence
  Description of Artificial Sequence: Synthetic oligonucleotide
  Antisense strand to SEQ ID NO: 1098870
uaacuccaucaucccaccc

SEQ ID NO: 1098872 - RNA, 19 nt, Artificial Sequence
  Description of Artificial Sequence: Synthetic oligonucleotide
  Sense strand starting at position 2290 of SEQ ID NO: 915691
guuaggagcguugucguua

SEQ ID NO: 1098873 - RNA, 19 nt, Artificial Sequence
  Description of Artificial Sequence: Synthetic oligonucleotide
  Antisense strand to SEQ ID NO: 1098872
uaacgacaacgcuccuaac

SEQ ID NO: 1098874 - RNA, 19 nt, Artificial Sequence
  Description of Artificial Sequence: Synthetic oligonucleotide
  Sense strand starting at position 2293 of SEQ ID NO: 915691
aggagcguugucguuaacu

SEQ ID NO: 1098875 - RNA, 19 nt, Artificial Sequence
  Description of Artificial Sequence: Synthetic oligonucleotide
  Antisense strand to SEQ ID NO: 1098874
aguuaacgacaacgcuccu

SEQ ID NO: 1098876 - RNA, 19 nt, Artificial Sequence
  Description of Artificial Sequence: Synthetic oligonucleotide
  Sense strand starting at position 2303 of SEQ ID NO: 915691
ucguuaacuggucauuaau

SEQ ID NO: 1098877 - RNA, 19 nt, Artificial Sequence
  Description of Artificial Sequence: Synthetic oligonucleotide
  Antisense strand to SEQ ID NO: 1098876
auuaaugaccaguuaacga

SEQ ID NO: 1098878 - RNA, 19 nt, Artificial Sequence
  Description of Artificial Sequence: Synthetic oligonucleotide
  Sense strand starting at position 2305 of SEQ ID NO: 915691
guuaacuggucauuaauua

SEQ ID NO: 1098879 - RNA, 19 nt, Artificial Sequence
  Description of Artificial Sequence: Synthetic oligonucleotide
  Antisense strand to SEQ ID NO: 1098878
uaauuaaugaccaguuaac

SEQ ID NO: 1098880 - RNA, 19 nt, Artificial Sequence
  Description of Artificial Sequence: Synthetic oligonucleotide
  Sense strand starting at position 2309 of SEQ ID NO: 915691
acuggucauuaauuagaua

SEQ ID NO: 1098881 - RNA, 19 nt, Artificial Sequence
  Description of Artificial Sequence: Synthetic oligonucleotide
  Antisense strand to SEQ ID NO: 1098880
uaucuaauuaaugaccagu

SEQ ID NO: 1098882 - RNA, 19 nt, Artificial Sequence
  Description of Artificial Sequence: Synthetic oligonucleotide
  Sense strand starting at position 2320 of SEQ ID NO: 915691
auuagauauuaacuaggca

SEQ ID NO: 1098883 - RNA, 19 nt, Artificial Sequence
  Description of Artificial Sequence: Synthetic oligonucleotide
  Antisense strand to SEQ ID NO: 1098882
ugccuaguuaauaucuaau

SEQ ID NO: 1098884 - RNA, 19 nt, Artificial Sequence
  Description of Artificial Sequence: Synthetic oligonucleotide
  Sense strand starting at position 2323 of SEQ ID NO: 915691
agauauuaacuaggcauua

SEQ ID NO: 1098885 - RNA, 19 nt, Artificial Sequence
  Description of Artificial Sequence: Synthetic oligonucleotide
  Antisense strand to SEQ ID NO: 1098884
uaaugccuaguuaauaucu

SEQ ID NO: 1098886 - RNA, 19 nt, Artificial Sequence
  Description of Artificial Sequence: Synthetic oligonucleotide
  Sense strand starting at position 2509 of SEQ ID NO: 915691
aaaggagucucagagaacu

SEQ ID NO: 1098887 - RNA, 19 nt, Artificial Sequence
  Description of Artificial Sequence: Synthetic oligonucleotide
  Antisense strand to SEQ ID NO: 1098886
aguucucugagacuccuuu

SEQ ID NO: 1098888 - RNA, 19 nt, Artificial Sequence
  Description of Artificial Sequence: Synthetic oligonucleotide
  Sense strand starting at position 2519 of SEQ ID NO: 915691
cagagaacuccacauccgu

SEQ ID NO: 1098889 - RNA, 19 nt, Artificial Sequence
  Description of Artificial Sequence: Synthetic oligonucleotide
  Antisense strand to SEQ ID NO: 1098888
acggauguggaguucucug

SEQ ID NO: 1098890 - RNA, 19 nt, Artificial Sequence
  Description of Artificial Sequence: Synthetic oligonucleotide
  Sense strand starting at position 3197 of SEQ ID NO: 915691
cguguaccauuucucggaa

SEQ ID NO: 1098891 - RNA, 19 nt, Artificial Sequence
  Description of Artificial Sequence: Synthetic oligonucleotide
  Antisense strand to SEQ ID NO: 1098890
uuccgagaaaugguacacg

SEQ ID NO: 1098892 - RNA, 19 nt, Artificial Sequence
  Description of Artificial Sequence: Synthetic oligonucleotide
  Sense strand starting at position 3198 of SEQ ID NO: 915691
guguaccauuucucggaau

SEQ ID NO: 1098893 - RNA, 19 nt, Artificial Sequence
  Description of Artificial Sequence: Synthetic oligonucleotide
  Antisense strand to SEQ ID NO: 1098892
auuccgagaaaugguacac

SEQ ID NO: 1098894 - RNA, 19 nt, Artificial Sequence
  Description of Artificial Sequence: Synthetic oligonucleotide
  Sense strand starting at position 3210 of SEQ ID NO: 915691
ucggaauacuuccugcaac

SEQ ID NO: 1098895 - RNA, 19 nt, Artificial Sequence
  Description of Artificial Sequence: Synthetic oligonucleotide
  Antisense strand to SEQ ID NO: 1098894
guugcaggaaguauuccga

SEQ ID NO: 1098896 - RNA, 19 nt, Artificial Sequence
  Description of Artificial Sequence: Synthetic oligonucleotide
  Sense strand starting at position 3277 of SEQ ID NO: 915691
gcauuuacccaaugcugca

SEQ ID NO: 1098897 - RNA, 19 nt, Artificial Sequence
  Description of Artificial Sequence: Synthetic oligonucleotide
  Antisense strand to SEQ ID NO: 1098896
ugcagcauuggguaaaugc

SEQ ID NO: 1098898 - RNA, 19 nt, Artificial Sequence
  Description of Artificial Sequence: Synthetic oligonucleotide
  Sense strand starting at position 3695 of SEQ ID NO: 915691
gguucaaugcugggcauuu

SEQ ID NO: 1098899 - RNA, 19 nt, Artificial Sequence
  Description of Artificial Sequence: Synthetic oligonucleotide
  Antisense strand to SEQ ID NO: 1098898
aaaugcccagcauugaacc

SEQ ID NO: 1098900 - RNA, 19 nt, Artificial Sequence
  Description of Artificial Sequence: Synthetic oligonucleotide
  Sense strand starting at position 3766 of SEQ ID NO: 915691
cugccuuacuguccagaca

SEQ ID NO: 1098901 - RNA, 19 nt, Artificial Sequence
  Description of Artificial Sequence: Synthetic oligonucleotide
  Antisense strand to SEQ ID NO: 1098900
ugucuggacaguaaggcag

SEQ ID NO: 1098902 - RNA, 19 nt, Artificial Sequence
  Description of Artificial Sequence: Synthetic oligonucleotide
  Sense strand starting at position 3809 of SEQ ID NO: 915691
cccgaaacugucggauucu

SEQ ID NO: 1098903 - RNA, 19 nt, Artificial Sequence
  Description of Artificial Sequence: Synthetic oligonucleotide
  Antisense strand to SEQ ID NO: 1098902
agaauccgacaguuucggg

SEQ ID NO: 1098904 - RNA, 19 nt, Artificial Sequence
  Description of Artificial Sequence: Synthetic oligonucleotide
  Sense strand starting at position 3815 of SEQ ID NO: 915691
acugucggauucucuaaga

SEQ ID NO: 1098905 - RNA, 19 nt, Artificial Sequence
  Description of Artificial Sequence: Synthetic oligonucleotide
  Antisense strand to SEQ ID NO: 1098904
ucuuagagaauccgacagu

SEQ ID NO: 1098906 - RNA, 19 nt, Artificial Sequence
  Description of Artificial Sequence: Synthetic oligonucleotide
  Sense strand starting at position 3826 of SEQ ID NO: 915691
cucuaagagguccgucaca

SEQ ID NO: 1098907 - RNA, 19 nt, Artificial Sequence
  Description of Artificial Sequence: Synthetic oligonucleotide
  Antisense strand to SEQ ID NO: 1098906
ugugacggaccucuuagag

SEQ ID NO: 1098908 - RNA, 19 nt, Artificial Sequence
  Description of Artificial Sequence: Synthetic oligonucleotide
  Sense strand starting at position 3865 of SEQ ID NO: 915691
gacuguggcucuucuggaa

SEQ ID NO: 1098909 - RNA, 19 nt, Artificial Sequence
  Description of Artificial Sequence: Synthetic oligonucleotide
  Antisense strand to SEQ ID NO: 1098908
uuccagaagagccacaguc

SEQ ID NO: 1098910 - RNA, 19 nt, Artificial Sequence
  Description of Artificial Sequence: Synthetic oligonucleotide
  Sense strand starting at position 3922 of SEQ ID NO: 915691
uuugaagaacugggcuauu

SEQ ID NO: 1098911 - RNA, 19 nt, Artificial Sequence
  Description of Artificial Sequence: Synthetic oligonucleotide
  Antisense strand to SEQ ID NO: 1098910
aauagcccaguucuucaaa

SEQ ID NO: 1098912 - RNA, 19 nt, Artificial Sequence
  Description of Artificial Sequence: Synthetic oligonucleotide
  Sense strand starting at position 3933 of SEQ ID NO: 915691
gggcuauucccauguaaag

SEQ ID NO: 1098913 - RNA, 19 nt, Artificial Sequence
  Description of Artificial Sequence: Synthetic oligonucleotide
  Antisense strand to SEQ ID NO: 1098912
cuuuacaugggaauagccc

SEQ ID NO: 1098914 - RNA, 19 nt, Artificial Sequence
  Description of Artificial Sequence: Synthetic oligonucleotide
  Sense strand starting at position 3966 of SEQ ID NO: 915691
ugauguuucugacucauac

SEQ ID NO: 1098915 - RNA, 19 nt, Artificial Sequence
  Description of Artificial Sequence: Synthetic oligonucleotide
  Antisense strand to SEQ ID NO: 1098914
guaugagucagaaacauca

SEQ ID NO: 1098916 - RNA, 19 nt, Artificial Sequence
  Description of Artificial Sequence: Synthetic oligonucleotide
  Sense strand starting at position 71 of SEQ ID NO: 915692
guuauaauggguugccuca

SEQ ID NO: 1098917 - RNA, 19 nt, Artificial Sequence
  Description of Artificial Sequence: Synthetic oligonucleotide
  Antisense strand to SEQ ID NO: 1098916
ugaggcaacccauuauaac

SEQ ID NO: 1098918 - RNA, 19 nt, Artificial Sequence
  Description of Artificial Sequence: Synthetic oligonucleotide
  Sense strand starting at position 109 of SEQ ID NO: 915692
uugccuucuucugugauaa

SEQ ID NO: 1098919 - RNA, 19 nt, Artificial Sequence
  Description of Artificial Sequence: Synthetic oligonucleotide
  Antisense strand to SEQ ID NO: 1098918
uuaucacagaagaaggcaa

SEQ ID NO: 1098920 - RNA, 19 nt, Artificial Sequence
  Description of Artificial Sequence: Synthetic oligonucleotide
  Sense strand starting at position 110 of SEQ ID NO: 915692
ugccuucuucugugauaau

SEQ ID NO: 1098921 - RNA, 19 nt, Artificial Sequence
  Description of Artificial Sequence: Synthetic oligonucleotide
  Antisense strand to SEQ ID NO: 1098920
auuaucacagaagaaggca

SEQ ID NO: 1098922 - RNA, 19 nt, Artificial Sequence
  Description of Artificial Sequence: Synthetic oligonucleotide
  Sense strand starting at position 605 of SEQ ID NO: 915692
gggugcuaucaucaaucuu

SEQ ID NO: 1098923 - RNA, 19 nt, Artificial Sequence
  Description of Artificial Sequence: Synthetic oligonucleotide
  Antisense strand to SEQ ID NO: 1098922
aagauugaugauagcaccc

SEQ ID NO: 1098924 - RNA, 19 nt, Artificial Sequence
  Description of Artificial Sequence: Synthetic oligonucleotide
  Sense strand starting at position 678 of SEQ ID NO: 915692
guaagcucucaguaagugu

SEQ ID NO: 1098925 - RNA, 19 nt, Artificial Sequence
  Description of Artificial Sequence: Synthetic oligonucleotide
  Antisense strand to SEQ ID NO: 1098924
acacuuacugagagcuuac

SEQ ID NO: 1098926 - RNA, 19 nt, Artificial Sequence
  Description of Artificial Sequence: Synthetic oligonucleotide
  Sense strand starting at position 689 of SEQ ID NO: 915692
guaaguguggugagucacu

SEQ ID NO: 1098927 - RNA, 19 nt, Artificial Sequence
  Description of Artificial Sequence: Synthetic oligonucleotide
  Antisense strand to SEQ ID NO: 1098926
agugacucaccacacuuac

SEQ ID NO: 1098928 - RNA, 19 nt, Artificial Sequence
  Description of Artificial Sequence: Synthetic oligonucleotide
  Sense strand starting at position 1143 of SEQ ID NO: 915692
ucagaaauucugcagugug

SEQ ID NO: 1098929 - RNA, 19 nt, Artificial Sequence
  Description of Artificial Sequence: Synthetic oligonucleotide
  Antisense strand to SEQ ID NO: 1098928
cacacugcagaauuucuga

SEQ ID NO: 1098930 - RNA, 19 nt, Artificial Sequence
  Description of Artificial Sequence: Synthetic oligonucleotide
  Sense strand starting at position 1167 of SEQ ID NO: 915692
ucguaaguccuccagguga

SEQ ID NO: 1098931 - RNA, 19 nt, Artificial Sequence
  Description of Artificial Sequence: Synthetic oligonucleotide
  Antisense strand to SEQ ID NO: 1098930
ucaccuggaggacuuacga

SEQ ID NO: 1098932 - RNA, 19 nt, Artificial Sequence
  Description of Artificial Sequence: Synthetic oligonucleotide
  Sense strand starting at position 1169 of SEQ ID NO: 915692
guaaguccuccaggugacu

SEQ ID NO: 1098933 - RNA, 19 nt, Artificial Sequence
  Description of Artificial Sequence: Synthetic oligonucleotide
  Antisense strand to SEQ ID NO: 1098932
agucaccuggaggacuuac

SEQ ID NO: 1098934 - RNA, 19 nt, Artificial Sequence
  Description of Artificial Sequence: Synthetic oligonucleotide
  Sense strand starting at position 1409 of SEQ ID NO: 915692
ucggaggguccguggaaau

SEQ ID NO: 1098935 - RNA, 19 nt, Artificial Sequence
  Description of Artificial Sequence: Synthetic oligonucleotide
  Antisense strand to SEQ ID NO: 1098934
auuuccacggacccuccga

SEQ ID NO: 1098936 - RNA, 19 nt, Artificial Sequence
  Description of Artificial Sequence: Synthetic oligonucleotide
  Sense strand starting at position 1750 of SEQ ID NO: 915692
caucguuuccaugugugca

SEQ ID NO: 1098937 - RNA, 19 nt, Artificial Sequence
  Description of Artificial Sequence: Synthetic oligonucleotide
  Antisense strand to SEQ ID NO: 1098936
ugcacacauggaaacgaug

SEQ ID NO: 1098938 - RNA, 19 nt, Artificial Sequence
  Description of Artificial Sequence: Synthetic oligonucleotide
  Sense strand starting at position 1758 of SEQ ID NO: 915692
ccaugugugcagcagaaau

SEQ ID NO: 1098939 - RNA, 19 nt, Artificial Sequence
  Description of Artificial Sequence: Synthetic oligonucleotide
  Antisense strand to SEQ ID NO: 1098938
auuucugcugcacacaugg

SEQ ID NO: 1098940 - RNA, 19 nt, Artificial Sequence
  Description of Artificial Sequence: Synthetic oligonucleotide
  Sense strand starting at position 1850 of SEQ ID NO: 915692
gggacaagguggccuuaua

SEQ ID NO: 1098941 - RNA, 19 nt, Artificial Sequence
  Description of Artificial Sequence: Synthetic oligonucleotide
  Antisense strand to SEQ ID NO: 1098940
uauaaggccaccuuguccc

SEQ ID NO: 1098942 - RNA, 19 nt, Artificial Sequence
  Description of Artificial Sequence: Synthetic oligonucleotide
  Sense strand starting at position 1947 of SEQ ID NO: 915692
uugaaauugacuugaaggu

SEQ ID NO: 1098943 - RNA, 19 nt, Artificial Sequence
  Description of Artificial Sequence: Synthetic oligonucleotide
  Antisense strand to SEQ ID NO: 1098942
accuucaagucaauuucaa

SEQ ID NO: 1098944 - RNA, 19 nt, Artificial Sequence
  Description of Artificial Sequence: Synthetic oligonucleotide
  Sense strand starting at position 1951 of SEQ ID NO: 915692
aauugacuugaagguguuu

SEQ ID NO: 1098945 - RNA, 19 nt, Artificial Sequence
  Description of Artificial Sequence: Synthetic oligonucleotide
  Antisense strand to SEQ ID NO: 1098944
aaacaccuucaagucaauu

SEQ ID NO: 1098946 - RNA, 19 nt, Artificial Sequence
  Description of Artificial Sequence: Synthetic oligonucleotide
  Sense strand starting at position 1962 of SEQ ID NO: 915692
agguguuuaccuugcagau

SEQ ID NO: 1098947 - RNA, 19 nt, Artificial Sequence
  Description of Artificial Sequence: Synthetic oligonucleotide
  Antisense strand to SEQ ID NO: 1098946
aucugcaagguaaacaccu

SEQ ID NO: 1098948 - RNA, 19 nt, Artificial Sequence
  Description of Artificial Sequence: Synthetic oligonucleotide
  Sense strand starting at position 1966 of SEQ ID NO: 915692
guuuaccuugcagauuauu

SEQ ID NO: 1098949 - RNA, 19 nt, Artificial Sequence
  Description of Artificial Sequence: Synthetic oligonucleotide
  Antisense strand to SEQ ID NO: 1098948
aauaaucugcaagguaaac

SEQ ID NO: 1098950 - RNA, 19 nt, Artificial Sequence
  Description of Artificial Sequence: Synthetic oligonucleotide
  Sense strand starting at position 2128 of SEQ ID NO: 915692
aaagcugaugccuguaaga

SEQ ID NO: 1098951 - RNA, 19 nt, Artificial Sequence
  Description of Artificial Sequence: Synthetic oligonucleotide
  Antisense strand to SEQ ID NO: 1098950
ucuuacaggcaucagcuuu

SEQ ID NO: 1098952 - RNA, 19 nt, Artificial Sequence
  Description of Artificial Sequence: Synthetic oligonucleotide
  Sense strand starting at position 2207 of SEQ ID NO: 915692
ucgaguugacccugagucu

SEQ ID NO: 1098953 - RNA, 19 nt, Artificial Sequence
  Description of Artificial Sequence: Synthetic oligonucleotide
  Antisense strand to SEQ ID NO: 1098952
agacucagggucaacucga

SEQ ID NO: 1098954 - RNA, 19 nt, Artificial Sequence
  Description of Artificial Sequence: Synthetic oligonucleotide
  Sense strand starting at position 2220 of SEQ ID NO: 915692
gagucugcaucagcucaaa

SEQ ID NO: 1098955 - RNA, 19 nt, Artificial Sequence
  Description of Artificial Sequence: Synthetic oligonucleotide
  Antisense strand to SEQ ID NO: 1098954
uuugagcugaugcagacuc

SEQ ID NO: 1098956 - RNA, 19 nt, Artificial Sequence
  Description of Artificial Sequence: Synthetic oligonucleotide
  Sense strand starting at position 2309 of SEQ ID NO: 915692
agcguugcacacuagacau

SEQ ID NO: 1098957 - RNA, 19 nt, Artificial Sequence
  Description of Artificial Sequence: Synthetic oligonucleotide
  Antisense strand to SEQ ID NO: 1098956
augucuagugugcaacgcu

SEQ ID NO: 1098958 - RNA, 19 nt, Artificial Sequence
  Description of Artificial Sequence: Synthetic oligonucleotide
  Sense strand starting at position 2458 of SEQ ID NO: 915692
gguaauuucucccuagcca

SEQ ID NO: 1098959 - RNA, 19 nt, Artificial Sequence
  Description of Artificial Sequence: Synthetic oligonucleotide
  Antisense strand to SEQ ID NO: 1098958
uggcuagggagaaauuacc

SEQ ID NO: 1098960 - RNA, 19 nt, Artificial Sequence
  Description of Artificial Sequence: Synthetic oligonucleotide
  Sense strand starting at position 2508 of SEQ ID NO: 915692
ugaugaacacucugaguag

SEQ ID NO: 1098961 - RNA, 19 nt, Artificial Sequence
  Description of Artificial Sequence: Synthetic oligonucleotide
  Antisense strand to SEQ ID NO: 1098960
cuacucagaguguucauca

SEQ ID NO: 1098962 - RNA, 19 nt, Artificial Sequence
  Description of Artificial Sequence: Synthetic oligonucleotide
  Sense strand starting at position 2542 of SEQ ID NO: 915692
cgcaguuaaccggauaaga

SEQ ID NO: 1098963 - RNA, 19 nt, Artificial Sequence
  Description of Artificial Sequence: Synthetic oligonucleotide
  Antisense strand to SEQ ID NO: 1098962
ucuuauccgguuaacugcg

SEQ ID NO: 1098964 - RNA, 19 nt, Artificial Sequence
  Description of Artificial Sequence: Synthetic oligonucleotide
  Sense strand starting at position 2572 of SEQ ID NO: 915692
gagaaacggucccaauuuc

SEQ ID NO: 1098965 - RNA, 19 nt, Artificial Sequence
  Description of Artificial Sequence: Synthetic oligonucleotide
  Antisense strand to SEQ ID NO: 1098964
gaaauugggaccguuucuc

SEQ ID NO: 1098966 - RNA, 19 nt, Artificial Sequence
  Description of Artificial Sequence: Synthetic oligonucleotide
  Sense strand starting at position 2701 of SEQ ID NO: 915692
ccugguguuccagagaguc

SEQ ID NO: 1098967 - RNA, 19 nt, Artificial Sequence
  Description of Artificial Sequence: Synthetic oligonucleotide
  Antisense strand to SEQ ID NO: 1098966
gacucucuggaacaccagg

SEQ ID NO: 1098968 - RNA, 19 nt, Artificial Sequence
  Description of Artificial Sequence: Synthetic oligonucleotide
  Sense strand starting at position 2753 of SEQ ID NO: 915692
gggugacucugauuccauc

SEQ ID NO: 1098969 - RNA, 19 nt, Artificial Sequence
  Description of Artificial Sequence: Synthetic oligonucleotide
  Antisense strand to SEQ ID NO: 1098968
gauggaaucagagucaccc

SEQ ID NO: 1098970 - RNA, 19 nt, Artificial Sequence
  Description of Artificial Sequence: Synthetic oligonucleotide
  Sense strand starting at position 3267 of SEQ ID NO: 915692
guuacuguggcuugaacau

SEQ ID NO: 1098971 - RNA, 19 nt, Artificial Sequence
  Description of Artificial Sequence: Synthetic oligonucleotide
  Antisense strand to SEQ ID NO: 1098970
auguucaagccacaguaac

SEQ ID NO: 1098972 - RNA, 19 nt, Artificial Sequence
  Description of Artificial Sequence: Synthetic oligonucleotide
  Sense strand starting at position 3274 of SEQ ID NO: 915692
uggcuugaacauuguuauc

SEQ ID NO: 1098973 - RNA, 19 nt, Artificial Sequence
  Description of Artificial Sequence: Synthetic oligonucleotide
  Antisense strand to SEQ ID NO: 1098972
gauaacaauguucaagcca

SEQ ID NO: 1098974 - RNA, 19 nt, Artificial Sequence
  Description of Artificial Sequence: Synthetic oligonucleotide
  Sense strand starting at position 3276 of SEQ ID NO: 915692
gcuugaacauuguuaucca

SEQ ID NO: 1098975 - RNA, 19 nt, Artificial Sequence
  Description of Artificial Sequence: Synthetic oligonucleotide
  Antisense strand to SEQ ID NO: 1098974
uggauaacaauguucaagc

SEQ ID NO: 1098976 - RNA, 19 nt, Artificial Sequence
  Description of Artificial Sequence: Synthetic oligonucleotide
  Sense strand starting at position 3479 of SEQ ID NO: 915692
uuuguagacuuggccuauu

SEQ ID NO: 1098977 - RNA, 19 nt, Artificial Sequence
  Description of Artificial Sequence: Synthetic oligonucleotide
  Antisense strand to SEQ ID NO: 1098976
aauaggccaagucuacaaa

SEQ ID NO: 1098978 - RNA, 19 nt, Artificial Sequence
  Description of Artificial Sequence: Synthetic oligonucleotide
  Sense strand starting at position 3516 of SEQ ID NO: 915692
gggaaagucuugcuuccug

SEQ ID NO: 1098979 - RNA, 19 nt, Artificial Sequence
  Description of Artificial Sequence: Synthetic oligonucleotide
  Antisense strand to SEQ ID NO: 1098978
caggaagcaagacuuuccc

SEQ ID NO: 1098980 - RNA, 19 nt, Artificial Sequence
  Description of Artificial Sequence: Synthetic oligonucleotide
  Sense strand starting at position 3606 of SEQ ID NO: 915692
ggcuuagucugagcuacua

SEQ ID NO: 1098981 - RNA, 19 nt, Artificial Sequence
  Description of Artificial Sequence: Synthetic oligonucleotide
  Antisense strand to SEQ ID NO: 1098980
uaguagcucagacuaagcc

SEQ ID NO: 1098982 - RNA, 19 nt, Artificial Sequence
  Description of Artificial Sequence: Synthetic oligonucleotide
  Sense strand starting at position 3743 of SEQ ID NO: 915692
ggccuaaugucacccuagu

SEQ ID NO: 1098983 - RNA, 19 nt, Artificial Sequence
  Description of Artificial Sequence: Synthetic oligonucleotide
  Antisense strand to SEQ ID NO: 1098982
acuagggugacauuaggcc

SEQ ID NO: 1098984 - RNA, 19 nt, Artificial Sequence
  Description of Artificial Sequence: Synthetic oligonucleotide
  Sense strand starting at position 3799 of SEQ ID NO: 915692
guuagacauggaugagguu

SEQ ID NO: 1098985 - RNA, 19 nt, Artificial Sequence
  Description of Artificial Sequence: Synthetic oligonucleotide
  Antisense strand to SEQ ID NO: 1098984
aaccucauccaugucuaac

SEQ ID NO: 1098986 - RNA, 19 nt, Artificial Sequence
  Description of Artificial Sequence: Synthetic oligonucleotide
  Sense strand starting at position 3811 of SEQ ID NO: 915692
ugagguuagagagguguuu

SEQ ID NO: 1098987 - RNA, 19 nt, Artificial Sequence
  Description of Artificial Sequence: Synthetic oligonucleotide
  Antisense strand to SEQ ID NO: 1098986
aaacaccucucuaaccuca

SEQ ID NO: 1098988 - RNA, 19 nt, Artificial Sequence
  Description of Artificial Sequence: Synthetic oligonucleotide
  Sense strand starting at position 3884 of SEQ ID NO: 915692
cagugcugugcgucuuaga

SEQ ID NO: 1098989 - RNA, 19 nt, Artificial Sequence
  Description of Artificial Sequence: Synthetic oligonucleotide
  Antisense strand to SEQ ID NO: 1098988
ucuaagacgcacagcacug

SEQ ID NO: 1098990 - RNA, 19 nt, Artificial Sequence
  Description of Artificial Sequence: Synthetic oligonucleotide
  Sense strand starting at position 3885 of SEQ ID NO: 915692
agugcugugcgucuuagaa

SEQ ID NO: 1098991 - RNA, 19 nt, Artificial Sequence
  Description of Artificial Sequence: Synthetic oligonucleotide
  Antisense strand to SEQ ID NO: 1098990
uucuaagacgcacagcacu

SEQ ID NO: 1098992 - RNA, 19 nt, Artificial Sequence
  Description of Artificial Sequence: Synthetic oligonucleotide
  Sense strand starting at position 3927 of SEQ ID NO: 915692
agagcagucugaguguuaa

SEQ ID NO: 1098993 - RNA, 19 nt, Artificial Sequence
  Description of Artificial Sequence: Synthetic oligonucleotide
  Antisense strand to SEQ ID NO: 1098992
uuaacacucagacugcucu

SEQ ID NO: 1098994 - RNA, 19 nt, Artificial Sequence
  Description of Artificial Sequence: Synthetic oligonucleotide
  Sense strand starting at position 3970 of SEQ ID NO: 915692
ccgggucugcuggaucaga

SEQ ID NO: 1098995 - RNA, 19 nt, Artificial Sequence
  Description of Artificial Sequence: Synthetic oligonucleotide
  Antisense strand to SEQ ID NO: 1098994
ucugauccagcagacccgg

SEQ ID NO: 1098996 - RNA, 19 nt, Artificial Sequence
  Description of Artificial Sequence: Synthetic oligonucleotide
  Sense strand starting at position 174 of SEQ ID NO: 915693
ugcucuagcugucuacaca

SEQ ID NO: 1098997 - RNA, 19 nt, Artificial Sequence
  Description of Artificial Sequence: Synthetic oligonucleotide
  Antisense strand to SEQ ID NO: 1098996
uguguagacagcuagagca

SEQ ID NO: 1098998 - RNA, 19 nt, Artificial Sequence
  Description of Artificial Sequence: Synthetic oligonucleotide
  Sense strand starting at position 454 of SEQ ID NO: 915693
gaaacugucccuggcacuu

SEQ ID NO: 1098999 - RNA, 19 nt, Artificial Sequence
  Description of Artificial Sequence: Synthetic oligonucleotide
  Antisense strand to SEQ ID NO: 1098998
aagugccagggacaguuuc

SEQ ID NO: 1099000 - RNA, 19 nt, Artificial Sequence
  Description of Artificial Sequence: Synthetic oligonucleotide
  Sense strand starting at position 464 of SEQ ID NO: 915693
cuggcacuuugcuccauaa

SEQ ID NO: 1099001 - RNA, 19 nt, Artificial Sequence
  Description of Artificial Sequence: Synthetic oligonucleotide
  Antisense strand to SEQ ID NO: 1099000
uuauggagcaaagugccag

SEQ ID NO: 1099002 - RNA, 19 nt, Artificial Sequence
  Description of Artificial Sequence: Synthetic oligonucleotide
  Sense strand starting at position 491 of SEQ ID NO: 915693
ugguguaaugcucacaaac

SEQ ID NO: 1099003 - RNA, 19 nt, Artificial Sequence
  Description of Artificial Sequence: Synthetic oligonucleotide
  Antisense strand to SEQ ID NO: 1099002
guuugugagcauuacacca

SEQ ID NO: 1099004 - RNA, 19 nt, Artificial Sequence
  Description of Artificial Sequence: Synthetic oligonucleotide
  Sense strand starting at position 659 of SEQ ID NO: 915693
cugggugugagcuggagaa

SEQ ID NO: 1099005 - RNA, 19 nt, Artificial Sequence
  Description of Artificial Sequence: Synthetic oligonucleotide
  Antisense strand to SEQ ID NO: 1099004
uucuccagcucacacccag

SEQ ID NO: 1099006 - RNA, 19 nt, Artificial Sequence
  Description of Artificial Sequence: Synthetic oligonucleotide
  Sense strand starting at position 738 of SEQ ID NO: 915693
ggucaugacagcuggacau

SEQ ID NO: 1099007 - RNA, 19 nt, Artificial Sequence
  Description of Artificial Sequence: Synthetic oligonucleotide
  Antisense strand to SEQ ID NO: 1099006
auguccagcugucaugacc

SEQ ID NO: 1099008 - RNA, 19 nt, Artificial Sequence
  Description of Artificial Sequence: Synthetic oligonucleotide
  Sense strand starting at position 809 of SEQ ID NO: 915693
ggaaguugacgacauguga

SEQ ID NO: 1099009 - RNA, 19 nt, Artificial Sequence
  Description of Artificial Sequence: Synthetic oligonucleotide
  Antisense strand to SEQ ID NO: 1099008
ucacaugucgucaacuucc

SEQ ID NO: 1099010 - RNA, 19 nt, Artificial Sequence
  Description of Artificial Sequence: Synthetic oligonucleotide
  Sense strand starting at position 817 of SEQ ID NO: 915693
acgacaugugacugggaaa

SEQ ID NO: 1099011 - RNA, 19 nt, Artificial Sequence
  Description of Artificial Sequence: Synthetic oligonucleotide
  Antisense strand to SEQ ID NO: 1099010
uuucccagucacaugucgu

SEQ ID NO: 1099012 - RNA, 19 nt, Artificial Sequence
  Description of Artificial Sequence: Synthetic oligonucleotide
  Sense strand starting at position 818 of SEQ ID NO: 915693
cgacaugugacugggaaag

SEQ ID NO: 1099013 - RNA, 19 nt, Artificial Sequence
  Description of Artificial Sequence: Synthetic oligonucleotide
  Antisense strand to SEQ ID NO: 1099012
cuuucccagucacaugucg

SEQ ID NO: 1099014 - RNA, 19 nt, Artificial Sequence
  Description of Artificial Sequence: Synthetic oligonucleotide
  Sense strand starting at position 820 of SEQ ID NO: 915693
acaugugacugggaaagaa

SEQ ID NO: 1099015 - RNA, 19 nt, Artificial Sequence
  Description of Artificial Sequence: Synthetic oligonucleotide
  Antisense strand to SEQ ID NO: 1099014
uucuuucccagucacaugu

SEQ ID NO: 1099016 - RNA, 19 nt, Artificial Sequence
  Description of Artificial Sequence: Synthetic oligonucleotide
  Sense strand starting at position 930 of SEQ ID NO: 915693
ggagaauagucuuauuucc

SEQ ID NO: 1099017 - RNA, 19 nt, Artificial Sequence
  Description of Artificial Sequence: Synthetic oligonucleotide
  Antisense strand to SEQ ID NO: 1099016
ggaaauaagacuauucucc

SEQ ID NO: 1099018 - RNA, 19 nt, Artificial Sequence
  Description of Artificial Sequence: Synthetic oligonucleotide
  Sense strand starting at position 1177 of SEQ ID NO: 915693
cgucaagaaguuuguuuga

SEQ ID NO: 1099019 - RNA, 19 nt, Artificial Sequence
  Description of Artificial Sequence: Synthetic oligonucleotide
  Antisense strand to SEQ ID NO: 1099018
ucaaacaaacuucuugacg

SEQ ID NO: 1099020 - RNA, 19 nt, Artificial Sequence
  Description of Artificial Sequence: Synthetic oligonucleotide
  Sense strand starting at position 1179 of SEQ ID NO: 915693
ucaagaaguuuguuugaaa

SEQ ID NO: 1099021 - RNA, 19 nt, Artificial Sequence
  Description of Artificial Sequence: Synthetic oligonucleotide
  Antisense strand to SEQ ID NO: 1099020
uuucaaacaaacuucuuga

SEQ ID NO: 1099022 - RNA, 19 nt, Artificial Sequence
  Description of Artificial Sequence: Synthetic oligonucleotide
  Sense strand starting at position 1180 of SEQ ID NO: 915693
caagaaguuuguuugaaag

SEQ ID NO: 1099023 - RNA, 19 nt, Artificial Sequence
  Description of Artificial Sequence: Synthetic oligonucleotide
  Antisense strand to SEQ ID NO: 1099022
cuuucaaacaaacuucuug

SEQ ID NO: 1099024 - RNA, 19 nt, Artificial Sequence
  Description of Artificial Sequence: Synthetic oligonucleotide
  Sense strand starting at position 1182 of SEQ ID NO: 915693
agaaguuuguuugaaagaa

SEQ ID NO: 1099025 - RNA, 19 nt, Artificial Sequence
  Description of Artificial Sequence: Synthetic oligonucleotide
  Antisense strand to SEQ ID NO: 1099024
uucuuucaaacaaacuucu

SEQ ID NO: 1099026 - RNA, 19 nt, Artificial Sequence
  Description of Artificial Sequence: Synthetic oligonucleotide
  Sense strand starting at position 1312 of SEQ ID NO: 915693
ccaucucuccggcggagaa

SEQ ID NO: 1099027 - RNA, 19 nt, Artificial Sequence
  Description of Artificial Sequence: Synthetic oligonucleotide
  Antisense strand to SEQ ID NO: 1099026
uucuccgccggagagaugg

SEQ ID NO: 1099028 - RNA, 19 nt, Artificial Sequence
  Description of Artificial Sequence: Synthetic oligonucleotide
  Sense strand starting at position 1313 of SEQ ID NO: 915693
caucucuccggcggagaaa

SEQ ID NO: 1099029 - RNA, 19 nt, Artificial Sequence
  Description of Artificial Sequence: Synthetic oligonucleotide
  Antisense strand to SEQ ID NO: 1099028
uuucuccgccggagagaug

SEQ ID NO: 1099030 - RNA, 19 nt, Artificial Sequence
  Description of Artificial Sequence: Synthetic oligonucleotide
  Sense strand starting at position 1506 of SEQ ID NO: 915693
gaguguucugcccacggca

SEQ ID NO: 1099031 - RNA, 19 nt, Artificial Sequence
  Description of Artificial Sequence: Synthetic oligonucleotide
  Antisense strand to SEQ ID NO: 1099030
ugccgugggcagaacacuc

SEQ ID NO: 1099032 - RNA, 19 nt, Artificial Sequence
  Description of Artificial Sequence: Synthetic oligonucleotide
  Sense strand starting at position 1725 of SEQ ID NO: 915693
ccugcaaucugucccugau

SEQ ID NO: 1099033 - RNA, 19 nt, Artificial Sequence
  Description of Artificial Sequence: Synthetic oligonucleotide
  Antisense strand to SEQ ID NO: 1099032
aucagggacagauugcagg

SEQ ID NO: 1099034 - RNA, 19 nt, Artificial Sequence
  Description of Artificial Sequence: Synthetic oligonucleotide
  Sense strand starting at position 1727 of SEQ ID NO: 915693
ugcaaucugucccugaugu

SEQ ID NO: 1099035 - RNA, 19 nt, Artificial Sequence
  Description of Artificial Sequence: Synthetic oligonucleotide
  Antisense strand to SEQ ID NO: 1099034
acaucagggacagauugca

SEQ ID NO: 1099036 - RNA, 19 nt, Artificial Sequence
  Description of Artificial Sequence: Synthetic oligonucleotide
  Sense strand starting at position 1728 of SEQ ID NO: 915693
gcaaucugucccugauguc

SEQ ID NO: 1099037 - RNA, 19 nt, Artificial Sequence
  Description of Artificial Sequence: Synthetic oligonucleotide
  Antisense strand to SEQ ID NO: 1099036
gacaucagggacagauugc

SEQ ID NO: 1099038 - RNA, 19 nt, Artificial Sequence
  Description of Artificial Sequence: Synthetic oligonucleotide
  Sense strand starting at position 2059 of SEQ ID NO: 915693
gacagaaacugcuuucgcu

SEQ ID NO: 1099039 - RNA, 19 nt, Artificial Sequence
  Description of Artificial Sequence: Synthetic oligonucleotide
  Antisense strand to SEQ ID NO: 1099038
agcgaaagcaguuucuguc

SEQ ID NO: 1099040 - RNA, 19 nt, Artificial Sequence
  Description of Artificial Sequence: Synthetic oligonucleotide
  Sense strand starting at position 2932 of SEQ ID NO: 915693
gaugacuuuccuggcaagu

SEQ ID NO: 1099041 - RNA, 19 nt, Artificial Sequence
  Description of Artificial Sequence: Synthetic oligonucleotide
  Antisense strand to SEQ ID NO: 1099040
acuugccaggaaagucauc

SEQ ID NO: 1099042 - RNA, 19 nt, Artificial Sequence
  Description of Artificial Sequence: Synthetic oligonucleotide
  Sense strand starting at position 2966 of SEQ ID NO: 915693
ccuuucuugggacgaucaa

SEQ ID NO: 1099043 - RNA, 19 nt, Artificial Sequence
  Description of Artificial Sequence: Synthetic oligonucleotide
  Antisense strand to SEQ ID NO: 1099042
uugaucgucccaagaaagg

SEQ ID NO: 1099044 - RNA, 19 nt, Artificial Sequence
  Description of Artificial Sequence: Synthetic oligonucleotide
  Sense strand starting at position 3077 of SEQ ID NO: 915693
cggugauacccaagugugu

SEQ ID NO: 1099045 - RNA, 19 nt, Artificial Sequence
  Description of Artificial Sequence: Synthetic oligonucleotide
  Antisense strand to SEQ ID NO: 1099044
acacacuuggguaucaccg

SEQ ID NO: 1099046 - RNA, 19 nt, Artificial Sequence
  Description of Artificial Sequence: Synthetic oligonucleotide
  Sense strand starting at position 3079 of SEQ ID NO: 915693
gugauacccaaguguguaa

SEQ ID NO: 1099047 - RNA, 19 nt, Artificial Sequence
  Description of Artificial Sequence: Synthetic oligonucleotide
  Antisense strand to SEQ ID NO: 1099046
uuacacacuuggguaucac

SEQ ID NO: 1099048 - RNA, 19 nt, Artificial Sequence
  Description of Artificial Sequence: Synthetic oligonucleotide
  Sense strand starting at position 3081 of SEQ ID NO: 915693
gauacccaaguguguaaua

SEQ ID NO: 1099049 - RNA, 19 nt, Artificial Sequence
  Description of Artificial Sequence: Synthetic oligonucleotide
  Antisense strand to SEQ ID NO: 1099048
uauuacacacuuggguauc

SEQ ID NO: 1099050 - RNA, 19 nt, Artificial Sequence
  Description of Artificial Sequence: Synthetic oligonucleotide
  Sense strand starting at position 3082 of SEQ ID NO: 915693
auacccaaguguguaauaa

SEQ ID NO: 1099051 - RNA, 19 nt, Artificial Sequence
  Description of Artificial Sequence: Synthetic oligonucleotide
  Antisense strand to SEQ ID NO: 1099050
uuauuacacacuuggguau

SEQ ID NO: 1099052 - RNA, 19 nt, Artificial Sequence
  Description of Artificial Sequence: Synthetic oligonucleotide
  Sense strand starting at position 3157 of SEQ ID NO: 915693
ugcuaaaggaguuacaagu

SEQ ID NO: 1099053 - RNA, 19 nt, Artificial Sequence
  Description of Artificial Sequence: Synthetic oligonucleotide
  Antisense strand to SEQ ID NO: 1099052
acuuguaacuccuuuagca

SEQ ID NO: 1099054 - RNA, 19 nt, Artificial Sequence
  Description of Artificial Sequence: Synthetic oligonucleotide
  Sense strand starting at position 3235 of SEQ ID NO: 915693
aggccauggucguuaaagu

SEQ ID NO: 1099055 - RNA, 19 nt, Artificial Sequence
  Description of Artificial Sequence: Synthetic oligonucleotide
  Antisense strand to SEQ ID NO: 1099054
acuuuaacgaccauggccu

SEQ ID NO: 1099056 - RNA, 19 nt, Artificial Sequence
  Description of Artificial Sequence: Synthetic oligonucleotide
  Sense strand starting at position 3236 of SEQ ID NO: 915693
ggccauggucguuaaaguu

SEQ ID NO: 1099057 - RNA, 19 nt, Artificial Sequence
  Description of Artificial Sequence: Synthetic oligonucleotide
  Antisense strand to SEQ ID NO: 1099056
aacuuuaacgaccauggcc

SEQ ID NO: 1099058 - RNA, 19 nt, Artificial Sequence
  Description of Artificial Sequence: Synthetic oligonucleotide
  Sense strand starting at position 3309 of SEQ ID NO: 915693
cuuggugugacuuggccaa

SEQ ID NO: 1099059 - RNA, 19 nt, Artificial Sequence
  Description of Artificial Sequence: Synthetic oligonucleotide
  Antisense strand to SEQ ID NO: 1099058
uuggccaagucacaccaag

SEQ ID NO: 1099060 - RNA, 19 nt, Artificial Sequence
  Description of Artificial Sequence: Synthetic oligonucleotide
  Sense strand starting at position 3311 of SEQ ID NO: 915693
uggugugacuuggccaaau

SEQ ID NO: 1099061 - RNA, 19 nt, Artificial Sequence
  Description of Artificial Sequence: Synthetic oligonucleotide
  Antisense strand to SEQ ID NO: 1099060
auuuggccaagucacacca

SEQ ID NO: 1099062 - RNA, 19 nt, Artificial Sequence
  Description of Artificial Sequence: Synthetic oligonucleotide
  Sense strand starting at position 3313 of SEQ ID NO: 915693
gugugacuuggccaaauaa

SEQ ID NO: 1099063 - RNA, 19 nt, Artificial Sequence
  Description of Artificial Sequence: Synthetic oligonucleotide
  Antisense strand to SEQ ID NO: 1099062
uuauuuggccaagucacac

SEQ ID NO: 1099064 - RNA, 19 nt, Artificial Sequence
  Description of Artificial Sequence: Synthetic oligonucleotide
  Sense strand starting at position 3548 of SEQ ID NO: 915693
gcgugucaaccugagagaa

SEQ ID NO: 1099065 - RNA, 19 nt, Artificial Sequence
  Description of Artificial Sequence: Synthetic oligonucleotide
  Antisense strand to SEQ ID NO: 1099064
uucucucagguugacacgc

SEQ ID NO: 1099066 - RNA, 19 nt, Artificial Sequence
  Description of Artificial Sequence: Synthetic oligonucleotide
  Sense strand starting at position 3668 of SEQ ID NO: 915693
cugugcucuccuuagagaa

SEQ ID NO: 1099067 - RNA, 19 nt, Artificial Sequence
  Description of Artificial Sequence: Synthetic oligonucleotide
  Antisense strand to SEQ ID NO: 1099066
uucucuaaggagagcacag

SEQ ID NO: 1099068 - RNA, 19 nt, Artificial Sequence
  Description of Artificial Sequence: Synthetic oligonucleotide
  Sense strand starting at position 3704 of SEQ ID NO: 915693
aucugaucugauggucaca

SEQ ID NO: 1099069 - RNA, 19 nt, Artificial Sequence
  Description of Artificial Sequence: Synthetic oligonucleotide
  Antisense strand to SEQ ID NO: 1099068
ugugaccaucagaucagau

SEQ ID NO: 1099070 - RNA, 19 nt, Artificial Sequence
  Description of Artificial Sequence: Synthetic oligonucleotide
  Sense strand starting at position 3706 of SEQ ID NO: 915693
cugaucugauggucacagu

SEQ ID NO: 1099071 - RNA, 19 nt, Artificial Sequence
  Description of Artificial Sequence: Synthetic oligonucleotide
  Antisense strand to SEQ ID NO: 1099070
acugugaccaucagaucag

SEQ ID NO: 1099072 - RNA, 19 nt, Artificial Sequence
  Description of Artificial Sequence: Synthetic oligonucleotide
  Sense strand starting at position 3876 of SEQ ID NO: 915693
gcaccaguuccuuaacggu

SEQ ID NO: 1099073 - RNA, 19 nt, Artificial Sequence
  Description of Artificial Sequence: Synthetic oligonucleotide
  Antisense strand to SEQ ID NO: 1099072
accguuaaggaacuggugc

SEQ ID NO: 1099074 - RNA, 19 nt, Artificial Sequence
  Description of Artificial Sequence: Synthetic oligonucleotide
  Sense strand starting at position 3883 of SEQ ID NO: 915693
uuccuuaacgguuaauaga

SEQ ID NO: 1099075 - RNA, 19 nt, Artificial Sequence
  Description of Artificial Sequence: Synthetic oligonucleotide
  Antisense strand to SEQ ID NO: 1099074
ucuauuaaccguuaaggaa

SEQ ID NO: 1099076 - RNA, 19 nt, Artificial Sequence
  Description of Artificial Sequence: Synthetic oligonucleotide
  Sense strand starting at position 79 of SEQ ID NO: 915694
cgucaagaaguuuguuuga

SEQ ID NO: 1099077 - RNA, 19 nt, Artificial Sequence
  Description of Artificial Sequence: Synthetic oligonucleotide
  Antisense strand to SEQ ID NO: 1099076
ucaaacaaacuucuugacg

SEQ ID NO: 1099078 - RNA, 19 nt, Artificial Sequence
  Description of Artificial Sequence: Synthetic oligonucleotide
  Sense strand starting at position 81 of SEQ ID NO: 915694
ucaagaaguuuguuugaaa

SEQ ID NO: 1099079 - RNA, 19 nt, Artificial Sequence
  Description of Artificial Sequence: Synthetic oligonucleotide
  Antisense strand to SEQ ID NO: 1099078
uuucaaacaaacuucuuga

SEQ ID NO: 1099080 - RNA, 19 nt, Artificial Sequence
  Description of Artificial Sequence: Synthetic oligonucleotide
  Sense strand starting at position 82 of SEQ ID NO: 915694
caagaaguuuguuugaaag

SEQ ID NO: 1099081 - RNA, 19 nt, Artificial Sequence
  Description of Artificial Sequence: Synthetic oligonucleotide
  Antisense strand to SEQ ID NO: 1099080
cuuucaaacaaacuucuug

SEQ ID NO: 1099082 - RNA, 19 nt, Artificial Sequence
  Description of Artificial Sequence: Synthetic oligonucleotide
  Sense strand starting at position 214 of SEQ ID NO: 915694
ccaucucuccggcggagaa

SEQ ID NO: 1099083 - RNA, 19 nt, Artificial Sequence
  Description of Artificial Sequence: Synthetic oligonucleotide
  Antisense strand to SEQ ID NO: 1099082
uucuccgccggagagaugg

SEQ ID NO: 1099084 - RNA, 19 nt, Artificial Sequence
  Description of Artificial Sequence: Synthetic oligonucleotide
  Sense strand starting at position 215 of SEQ ID NO: 915694
caucucuccggcggagaaa

SEQ ID NO: 1099085 - RNA, 19 nt, Artificial Sequence
  Description of Artificial Sequence: Synthetic oligonucleotide
  Antisense strand to SEQ ID NO: 1099084
uuucuccgccggagagaug

SEQ ID NO: 1099086 - RNA, 19 nt, Artificial Sequence
  Description of Artificial Sequence: Synthetic oligonucleotide
  Sense strand starting at position 627 of SEQ ID NO: 915694
ccugcaaucugucccugau

SEQ ID NO: 1099087 - RNA, 19 nt, Artificial Sequence
  Description of Artificial Sequence: Synthetic oligonucleotide
  Antisense strand to SEQ ID NO: 1099086
aucagggacagauugcagg

SEQ ID NO: 1099088 - RNA, 19 nt, Artificial Sequence
  Description of Artificial Sequence: Synthetic oligonucleotide
  Sense strand starting at position 961 of SEQ ID NO: 915694
gacagaaacugcuuucgcu

SEQ ID NO: 1099089 - RNA, 19 nt, Artificial Sequence
  Description of Artificial Sequence: Synthetic oligonucleotide
  Antisense strand to SEQ ID NO: 1099088
agcgaaagcaguuucuguc

SEQ ID NO: 1099090 - RNA, 19 nt, Artificial Sequence
  Description of Artificial Sequence: Synthetic oligonucleotide
  Sense strand starting at position 1834 of SEQ ID NO: 915694
gaugacuuuccuggcaagu

SEQ ID NO: 1099091 - RNA, 19 nt, Artificial Sequence
  Description of Artificial Sequence: Synthetic oligonucleotide
  Antisense strand to SEQ ID NO: 1099090
acuugccaggaaagucauc

SEQ ID NO: 1099092 - RNA, 19 nt, Artificial Sequence
  Description of Artificial Sequence: Synthetic oligonucleotide
  Sense strand starting at position 1868 of SEQ ID NO: 915694
ccuuucuugggacgaucaa

SEQ ID NO: 1099093 - RNA, 19 nt, Artificial Sequence
  Description of Artificial Sequence: Synthetic oligonucleotide
  Antisense strand to SEQ ID NO: 1099092
uugaucgucccaagaaagg

SEQ ID NO: 1099094 - RNA, 19 nt, Artificial Sequence
  Description of Artificial Sequence: Synthetic oligonucleotide
  Sense strand starting at position 1979 of SEQ ID NO: 915694
cggugauacccaagugugu

SEQ ID NO: 1099095 - RNA, 19 nt, Artificial Sequence
  Description of Artificial Sequence: Synthetic oligonucleotide
  Antisense strand to SEQ ID NO: 1099094
acacacuuggguaucaccg

SEQ ID NO: 1099096 - RNA, 19 nt, Artificial Sequence
  Description of Artificial Sequence: Synthetic oligonucleotide
  Sense strand starting at position 1981 of SEQ ID NO: 915694
gugauacccaaguguguaa

SEQ ID NO: 1099097 - RNA, 19 nt, Artificial Sequence
  Description of Artificial Sequence: Synthetic oligonucleotide
  Antisense strand to SEQ ID NO: 1099096
uuacacacuuggguaucac

SEQ ID NO: 1099098 - RNA, 19 nt, Artificial Sequence
  Description of Artificial Sequence: Synthetic oligonucleotide
  Sense strand starting at position 1983 of SEQ ID NO: 915694
gauacccaaguguguaaua

SEQ ID NO: 1099099 - RNA, 19 nt, Artificial Sequence
  Description of Artificial Sequence: Synthetic oligonucleotide
  Antisense strand to SEQ ID NO: 1099098
uauuacacacuuggguauc

SEQ ID NO: 1099100 - RNA, 19 nt, Artificial Sequence
  Description of Artificial Sequence: Synthetic oligonucleotide
  Sense strand starting at position 1984 of SEQ ID NO: 915694
auacccaaguguguaauaa

SEQ ID NO: 1099101 - RNA, 19 nt, Artificial Sequence
  Description of Artificial Sequence: Synthetic oligonucleotide
  Antisense strand to SEQ ID NO: 1099100
uuauuacacacuuggguau

SEQ ID NO: 1099102 - RNA, 19 nt, Artificial Sequence
  Description of Artificial Sequence: Synthetic oligonucleotide
  Sense strand starting at position 2059 of SEQ ID NO: 915694
ugcuaaaggaguuacaagu

SEQ ID NO: 1099103 - RNA, 19 nt, Artificial Sequence
  Description of Artificial Sequence: Synthetic oligonucleotide
  Antisense strand to SEQ ID NO: 1099102
acuuguaacuccuuuagca

SEQ ID NO: 1099104 - RNA, 19 nt, Artificial Sequence
  Description of Artificial Sequence: Synthetic oligonucleotide
  Sense strand starting at position 2211 of SEQ ID NO: 915694
cuuggugugacuuggccaa

SEQ ID NO: 1099105 - RNA, 19 nt, Artificial Sequence
  Description of Artificial Sequence: Synthetic oligonucleotide
  Antisense strand to SEQ ID NO: 1099104
uuggccaagucacaccaag

SEQ ID NO: 1099106 - RNA, 19 nt, Artificial Sequence
  Description of Artificial Sequence: Synthetic oligonucleotide
  Sense strand starting at position 2213 of SEQ ID NO: 915694
uggugugacuuggccaaau

SEQ ID NO: 1099107 - RNA, 19 nt, Artificial Sequence
  Description of Artificial Sequence: Synthetic oligonucleotide
  Antisense strand to SEQ ID NO: 1099106
auuuggccaagucacacca

SEQ ID NO: 1099108 - RNA, 19 nt, Artificial Sequence
  Description of Artificial Sequence: Synthetic oligonucleotide
  Sense strand starting at position 2215 of SEQ ID NO: 915694
gugugacuuggccaaauaa

SEQ ID NO: 1099109 - RNA, 19 nt, Artificial Sequence
  Description of Artificial Sequence: Synthetic oligonucleotide
  Antisense strand to SEQ ID NO: 1099108
uuauuuggccaagucacac

SEQ ID NO: 1099110 - RNA, 19 nt, Artificial Sequence
  Description of Artificial Sequence: Synthetic oligonucleotide
  Sense strand starting at position 2450 of SEQ ID NO: 915694
gcgugucaaccugagagaa

SEQ ID NO: 1099111 - RNA, 19 nt, Artificial Sequence
  Description of Artificial Sequence: Synthetic oligonucleotide
  Antisense strand to SEQ ID NO: 1099110
uucucucagguugacacgc

SEQ ID NO: 1099112 - RNA, 19 nt, Artificial Sequence
  Description of Artificial Sequence: Synthetic oligonucleotide
  Sense strand starting at position 2570 of SEQ ID NO: 915694
cugugcucuccuuagagaa

SEQ ID NO: 1099113 - RNA, 19 nt, Artificial Sequence
  Description of Artificial Sequence: Synthetic oligonucleotide
  Antisense strand to SEQ ID NO: 1099112
uucucuaaggagagcacag

SEQ ID NO: 1099114 - RNA, 19 nt, Artificial Sequence
  Description of Artificial Sequence: Synthetic oligonucleotide
  Sense strand starting at position 2606 of SEQ ID NO: 915694
aucugaucugauggucaca

SEQ ID NO: 1099115 - RNA, 19 nt, Artificial Sequence
  Description of Artificial Sequence: Synthetic oligonucleotide
  Antisense strand to SEQ ID NO: 1099114
ugugaccaucagaucagau

SEQ ID NO: 1099116 - RNA, 19 nt, Artificial Sequence
  Description of Artificial Sequence: Synthetic oligonucleotide
  Sense strand starting at position 2608 of SEQ ID NO: 915694
cugaucugauggucacagu

SEQ ID NO: 1099117 - RNA, 19 nt, Artificial Sequence
  Description of Artificial Sequence: Synthetic oligonucleotide
  Antisense strand to SEQ ID NO: 1099116
acugugaccaucagaucag

SEQ ID NO: 1099118 - RNA, 19 nt, Artificial Sequence
  Description of Artificial Sequence: Synthetic oligonucleotide
  Sense strand starting at position 2778 of SEQ ID NO: 915694
gcaccaguuccuuaacggu

SEQ ID NO: 1099119 - RNA, 19 nt, Artificial Sequence
  Description of Artificial Sequence: Synthetic oligonucleotide
  Antisense strand to SEQ ID NO: 1099118
accguuaaggaacuggugc

SEQ ID NO: 1099120 - RNA, 19 nt, Artificial Sequence
  Description of Artificial Sequence: Synthetic oligonucleotide
  Sense strand starting at position 2785 of SEQ ID NO: 915694
uuccuuaacgguuaauaga

SEQ ID NO: 1099121 - RNA, 19 nt, Artificial Sequence
  Description of Artificial Sequence: Synthetic oligonucleotide
  Antisense strand to SEQ ID NO: 1099120
ucuauuaaccguuaaggaa

SEQ ID NO: 1099122 - RNA, 19 nt, Artificial Sequence
  Description of Artificial Sequence: Synthetic oligonucleotide
  Sense strand starting at position 2902 of SEQ ID NO: 915694
guaagaaccggcuaugguu

SEQ ID NO: 1099123 - RNA, 19 nt, Artificial Sequence
  Description of Artificial Sequence: Synthetic oligonucleotide
  Antisense strand to SEQ ID NO: 1099122
aaccauagccgguucuuac

SEQ ID NO: 1099124 - RNA, 19 nt, Artificial Sequence
  Description of Artificial Sequence: Synthetic oligonucleotide
  Sense strand starting at position 2923 of SEQ ID NO: 915694
uguagagauuuagaguuaa

SEQ ID NO: 1099125 - RNA, 19 nt, Artificial Sequence
  Description of Artificial Sequence: Synthetic oligonucleotide
  Antisense strand to SEQ ID NO: 1099124
uuaacucuaaaucucuaca

SEQ ID NO: 1099126 - RNA, 19 nt, Artificial Sequence
  Description of Artificial Sequence: Synthetic oligonucleotide
  Sense strand starting at position 2941 of SEQ ID NO: 915694
auaggagcugcucauguuu

SEQ ID NO: 1099127 - RNA, 19 nt, Artificial Sequence
  Description of Artificial Sequence: Synthetic oligonucleotide
  Antisense strand to SEQ ID NO: 1099126
aaacaugagcagcuccuau

SEQ ID NO: 1099128 - RNA, 19 nt, Artificial Sequence
  Description of Artificial Sequence: Synthetic oligonucleotide
  Sense strand starting at position 2953 of SEQ ID NO: 915694
cauguuuacugugcaugga

SEQ ID NO: 1099129 - RNA, 19 nt, Artificial Sequence
  Description of Artificial Sequence: Synthetic oligonucleotide
  Antisense strand to SEQ ID NO: 1099128
uccaugcacaguaaacaug

SEQ ID NO: 1099130 - RNA, 19 nt, Artificial Sequence
  Description of Artificial Sequence: Synthetic oligonucleotide
  Sense strand starting at position 3078 of SEQ ID NO: 915694
gugcucagugaauauaaac

SEQ ID NO: 1099131 - RNA, 19 nt, Artificial Sequence
  Description of Artificial Sequence: Synthetic oligonucleotide
  Antisense strand to SEQ ID NO: 1099130
guuuauauucacugagcac

SEQ ID NO: 1099132 - RNA, 19 nt, Artificial Sequence
  Description of Artificial Sequence: Synthetic oligonucleotide
  Sense strand starting at position 3214 of SEQ ID NO: 915694
ugugacucuagaugaggau

SEQ ID NO: 1099133 - RNA, 19 nt, Artificial Sequence
  Description of Artificial Sequence: Synthetic oligonucleotide
  Antisense strand to SEQ ID NO: 1099132
auccucaucuagagucaca

SEQ ID NO: 1099134 - RNA, 19 nt, Artificial Sequence
  Description of Artificial Sequence: Synthetic oligonucleotide
  Sense strand starting at position 3264 of SEQ ID NO: 915694
gacucaaggcucuauagua

SEQ ID NO: 1099135 - RNA, 19 nt, Artificial Sequence
  Description of Artificial Sequence: Synthetic oligonucleotide
  Antisense strand to SEQ ID NO: 1099134
uacuauagagccuugaguc

SEQ ID NO: 1099136 - RNA, 19 nt, Artificial Sequence
  Description of Artificial Sequence: Synthetic oligonucleotide
  Sense strand starting at position 3330 of SEQ ID NO: 915694
ccaagcuggguugaugaau

SEQ ID NO: 1099137 - RNA, 19 nt, Artificial Sequence
  Description of Artificial Sequence: Synthetic oligonucleotide
  Antisense strand to SEQ ID NO: 1099136
auucaucaacccagcuugg

SEQ ID NO: 1099138 - RNA, 19 nt, Artificial Sequence
  Description of Artificial Sequence: Synthetic oligonucleotide
  Sense strand starting at position 3427 of SEQ ID NO: 915694
ugugcaauguccucccaga

SEQ ID NO: 1099139 - RNA, 19 nt, Artificial Sequence
  Description of Artificial Sequence: Synthetic oligonucleotide
  Antisense strand to SEQ ID NO: 1099138
ucugggaggacauugcaca

SEQ ID NO: 1099140 - RNA, 19 nt, Artificial Sequence
  Description of Artificial Sequence: Synthetic oligonucleotide
  Sense strand starting at position 3540 of SEQ ID NO: 915694
gugggaggccuuugucaca

SEQ ID NO: 1099141 - RNA, 19 nt, Artificial Sequence
  Description of Artificial Sequence: Synthetic oligonucleotide
  Antisense strand to SEQ ID NO: 1099140
ugugacaaaggccucccac

SEQ ID NO: 1099142 - RNA, 19 nt, Artificial Sequence
  Description of Artificial Sequence: Synthetic oligonucleotide
  Sense strand starting at position 3581 of SEQ ID NO: 915694
ggaagaggcugccuuaguu

SEQ ID NO: 1099143 - RNA, 19 nt, Artificial Sequence
  Description of Artificial Sequence: Synthetic oligonucleotide
  Antisense strand to SEQ ID NO: 1099142
aacuaaggcagccucuucc

SEQ ID NO: 1099144 - RNA, 19 nt, Artificial Sequence
  Description of Artificial Sequence: Synthetic oligonucleotide
  Sense strand starting at position 3589 of SEQ ID NO: 915694
cugccuuaguugucaugaa

SEQ ID NO: 1099145 - RNA, 19 nt, Artificial Sequence
  Description of Artificial Sequence: Synthetic oligonucleotide
  Antisense strand to SEQ ID NO: 1099144
uucaugacaacuaaggcag

SEQ ID NO: 1099146 - RNA, 19 nt, Artificial Sequence
  Description of Artificial Sequence: Synthetic oligonucleotide
  Sense strand starting at position 3593 of SEQ ID NO: 915694
cuuaguugucaugaaugag

SEQ ID NO: 1099147 - RNA, 19 nt, Artificial Sequence
  Description of Artificial Sequence: Synthetic oligonucleotide
  Antisense strand to SEQ ID NO: 1099146
cucauucaugacaacuaag

SEQ ID NO: 1099148 - RNA, 19 nt, Artificial Sequence
  Description of Artificial Sequence: Synthetic oligonucleotide
  Sense strand starting at position 3605 of SEQ ID NO: 915694
gaaugagugcccugucacu

SEQ ID NO: 1099149 - RNA, 19 nt, Artificial Sequence
  Description of Artificial Sequence: Synthetic oligonucleotide
  Antisense strand to SEQ ID NO: 1099148
agugacagggcacucauuc

SEQ ID NO: 1099150 - RNA, 19 nt, Artificial Sequence
  Description of Artificial Sequence: Synthetic oligonucleotide
  Sense strand starting at position 3689 of SEQ ID NO: 915694
agugguauuuggaguggau

SEQ ID NO: 1099151 - RNA, 19 nt, Artificial Sequence
  Description of Artificial Sequence: Synthetic oligonucleotide
  Antisense strand to SEQ ID NO: 1099150
auccacuccaaauaccacu

SEQ ID NO: 1099152 - RNA, 19 nt, Artificial Sequence
  Description of Artificial Sequence: Synthetic oligonucleotide
  Sense strand starting at position 3927 of SEQ ID NO: 915694
uguagaugacugcacagau

SEQ ID NO: 1099153 - RNA, 19 nt, Artificial Sequence
  Description of Artificial Sequence: Synthetic oligonucleotide
  Antisense strand to SEQ ID NO: 1099152
aucugugcagucaucuaca

SEQ ID NO: 1099154 - RNA, 19 nt, Artificial Sequence
  Description of Artificial Sequence: Synthetic oligonucleotide
  Sense strand starting at position 3960 of SEQ ID NO: 915694
acaguaaccgcucaagaua

SEQ ID NO: 1099155 - RNA, 19 nt, Artificial Sequence
  Description of Artificial Sequence: Synthetic oligonucleotide
  Antisense strand to SEQ ID NO: 1099154
uaucuugagcgguuacugu

SEQ ID NO: 1099156 - RNA, 19 nt, Artificial Sequence
  Description of Artificial Sequence: Synthetic oligonucleotide
  Sense strand starting at position 81 of SEQ ID NO: 915695
ggagaauagucuuauuucc

SEQ ID NO: 1099157 - RNA, 19 nt, Artificial Sequence
  Description of Artificial Sequence: Synthetic oligonucleotide
  Antisense strand to SEQ ID NO: 1099156
ggaaauaagacuauucucc

SEQ ID NO: 1099158 - RNA, 19 nt, Artificial Sequence
  Description of Artificial Sequence: Synthetic oligonucleotide
  Sense strand starting at position 328 of SEQ ID NO: 915695
cgucaagaaguuuguuuga

SEQ ID NO: 1099159 - RNA, 19 nt, Artificial Sequence
  Description of Artificial Sequence: Synthetic oligonucleotide
  Antisense strand to SEQ ID NO: 1099158
ucaaacaaacuucuugacg

SEQ ID NO: 1099160 - RNA, 19 nt, Artificial Sequence
  Description of Artificial Sequence: Synthetic oligonucleotide
  Sense strand starting at position 330 of SEQ ID NO: 915695
ucaagaaguuuguuugaaa

SEQ ID NO: 1099161 - RNA, 19 nt, Artificial Sequence
  Description of Artificial Sequence: Synthetic oligonucleotide
  Antisense strand to SEQ ID NO: 1099160
uuucaaacaaacuucuuga

SEQ ID NO: 1099162 - RNA, 19 nt, Artificial Sequence
  Description of Artificial Sequence: Synthetic oligonucleotide
  Sense strand starting at position 331 of SEQ ID NO: 915695
caagaaguuuguuugaaag

SEQ ID NO: 1099163 - RNA, 19 nt, Artificial Sequence
  Description of Artificial Sequence: Synthetic oligonucleotide
  Antisense strand to SEQ ID NO: 1099162
cuuucaaacaaacuucuug

SEQ ID NO: 1099164 - RNA, 19 nt, Artificial Sequence
  Description of Artificial Sequence: Synthetic oligonucleotide
  Sense strand starting at position 463 of SEQ ID NO: 915695
ccaucucuccggcggagaa

SEQ ID NO: 1099165 - RNA, 19 nt, Artificial Sequence
  Description of Artificial Sequence: Synthetic oligonucleotide
  Antisense strand to SEQ ID NO: 1099164
uucuccgccggagagaugg

SEQ ID NO: 1099166 - RNA, 19 nt, Artificial Sequence
  Description of Artificial Sequence: Synthetic oligonucleotide
  Sense strand starting at position 464 of SEQ ID NO: 915695
caucucuccggcggagaaa

SEQ ID NO: 1099167 - RNA, 19 nt, Artificial Sequence
  Description of Artificial Sequence: Synthetic oligonucleotide
  Antisense strand to SEQ ID NO: 1099166
uuucuccgccggagagaug

SEQ ID NO: 1099168 - RNA, 19 nt, Artificial Sequence
  Description of Artificial Sequence: Synthetic oligonucleotide
  Sense strand starting at position 876 of SEQ ID NO: 915695
ccugcaaucugucccugau

SEQ ID NO: 1099169 - RNA, 19 nt, Artificial Sequence
  Description of Artificial Sequence: Synthetic oligonucleotide
  Antisense strand to SEQ ID NO: 1099168
aucagggacagauugcagg

SEQ ID NO: 1099170 - RNA, 19 nt, Artificial Sequence
  Description of Artificial Sequence: Synthetic oligonucleotide
  Sense strand starting at position 1210 of SEQ ID NO: 915695
gacagaaacugcuuucgcu

SEQ ID NO: 1099171 - RNA, 19 nt, Artificial Sequence
  Description of Artificial Sequence: Synthetic oligonucleotide
  Antisense strand to SEQ ID NO: 1099170
agcgaaagcaguuucuguc

SEQ ID NO: 1099172 - RNA, 19 nt, Artificial Sequence
  Description of Artificial Sequence: Synthetic oligonucleotide
  Sense strand starting at position 2083 of SEQ ID NO: 915695
gaugacuuuccuggcaagu

SEQ ID NO: 1099173 - RNA, 19 nt, Artificial Sequence
  Description of Artificial Sequence: Synthetic oligonucleotide
  Antisense strand to SEQ ID NO: 1099172
acuugccaggaaagucauc

SEQ ID NO: 1099174 - RNA, 19 nt, Artificial Sequence
  Description of Artificial Sequence: Synthetic oligonucleotide
  Sense strand starting at position 2117 of SEQ ID NO: 915695
ccuuucuugggacgaucaa

SEQ ID NO: 1099175 - RNA, 19 nt, Artificial Sequence
  Description of Artificial Sequence: Synthetic oligonucleotide
  Antisense strand to SEQ ID NO: 1099174
uugaucgucccaagaaagg

SEQ ID NO: 1099176 - RNA, 19 nt, Artificial Sequence
  Description of Artificial Sequence: Synthetic oligonucleotide
  Sense strand starting at position 2228 of SEQ ID NO: 915695
cggugauacccaagugugu

SEQ ID NO: 1099177 - RNA, 19 nt, Artificial Sequence
  Description of Artificial Sequence: Synthetic oligonucleotide
  Antisense strand to SEQ ID NO: 1099176
acacacuuggguaucaccg

SEQ ID NO: 1099178 - RNA, 19 nt, Artificial Sequence
  Description of Artificial Sequence: Synthetic oligonucleotide
  Sense strand starting at position 2230 of SEQ ID NO: 915695
gugauacccaaguguguaa

SEQ ID NO: 1099179 - RNA, 19 nt, Artificial Sequence
  Description of Artificial Sequence: Synthetic oligonucleotide
  Antisense strand to SEQ ID NO: 1099178
uuacacacuuggguaucac

SEQ ID NO: 1099180 - RNA, 19 nt, Artificial Sequence
  Description of Artificial Sequence: Synthetic oligonucleotide
  Sense strand starting at position 2232 of SEQ ID NO: 915695
gauacccaaguguguaaua

SEQ ID NO: 1099181 - RNA, 19 nt, Artificial Sequence
  Description of Artificial Sequence: Synthetic oligonucleotide
  Antisense strand to SEQ ID NO: 1099180
uauuacacacuuggguauc

SEQ ID NO: 1099182 - RNA, 19 nt, Artificial Sequence
  Description of Artificial Sequence: Synthetic oligonucleotide
  Sense strand starting at position 2233 of SEQ ID NO: 915695
auacccaaguguguaauaa

SEQ ID NO: 1099183 - RNA, 19 nt, Artificial Sequence
  Description of Artificial Sequence: Synthetic oligonucleotide
  Antisense strand to SEQ ID NO: 1099182
uuauuacacacuuggguau

SEQ ID NO: 1099184 - RNA, 19 nt, Artificial Sequence
  Description of Artificial Sequence: Synthetic oligonucleotide
  Sense strand starting at position 2308 of SEQ ID NO: 915695
ugcuaaaggaguuacaagu

SEQ ID NO: 1099185 - RNA, 19 nt, Artificial Sequence
  Description of Artificial Sequence: Synthetic oligonucleotide
  Antisense strand to SEQ ID NO: 1099184
acuuguaacuccuuuagca

SEQ ID NO: 1099186 - RNA, 19 nt, Artificial Sequence
  Description of Artificial Sequence: Synthetic oligonucleotide
  Sense strand starting at position 2387 of SEQ ID NO: 915695
ggccauggucguuaaaguu

SEQ ID NO: 1099187 - RNA, 19 nt, Artificial Sequence
  Description of Artificial Sequence: Synthetic oligonucleotide
  Antisense strand to SEQ ID NO: 1099186
aacuuuaacgaccauggcc

SEQ ID NO: 1099188 - RNA, 19 nt, Artificial Sequence
  Description of Artificial Sequence: Synthetic oligonucleotide
  Sense strand starting at position 2460 of SEQ ID NO: 915695
cuuggugugacuuggccaa

SEQ ID NO: 1099189 - RNA, 19 nt, Artificial Sequence
  Description of Artificial Sequence: Synthetic oligonucleotide
  Antisense strand to SEQ ID NO: 1099188
uuggccaagucacaccaag

SEQ ID NO: 1099190 - RNA, 19 nt, Artificial Sequence
  Description of Artificial Sequence: Synthetic oligonucleotide
  Sense strand starting at position 2462 of SEQ ID NO: 915695
uggugugacuuggccaaau

SEQ ID NO: 1099191 - RNA, 19 nt, Artificial Sequence
  Description of Artificial Sequence: Synthetic oligonucleotide
  Antisense strand to SEQ ID NO: 1099190
auuuggccaagucacacca

SEQ ID NO: 1099192 - RNA, 19 nt, Artificial Sequence
  Description of Artificial Sequence: Synthetic oligonucleotide
  Sense strand starting at position 2464 of SEQ ID NO: 915695
gugugacuuggccaaauaa

SEQ ID NO: 1099193 - RNA, 19 nt, Artificial Sequence
  Description of Artificial Sequence: Synthetic oligonucleotide
  Antisense strand to SEQ ID NO: 1099192
uuauuuggccaagucacac

SEQ ID NO: 1099194 - RNA, 19 nt, Artificial Sequence
  Description of Artificial Sequence: Synthetic oligonucleotide
  Sense strand starting at position 2699 of SEQ ID NO: 915695
gcgugucaaccugagagaa

SEQ ID NO: 1099195 - RNA, 19 nt, Artificial Sequence
  Description of Artificial Sequence: Synthetic oligonucleotide
  Antisense strand to SEQ ID NO: 1099194
uucucucagguugacacgc

SEQ ID NO: 1099196 - RNA, 19 nt, Artificial Sequence
  Description of Artificial Sequence: Synthetic oligonucleotide
  Sense strand starting at position 2819 of SEQ ID NO: 915695
cugugcucuccuuagagaa

SEQ ID NO: 1099197 - RNA, 19 nt, Artificial Sequence
  Description of Artificial Sequence: Synthetic oligonucleotide
  Antisense strand to SEQ ID NO: 1099196
uucucuaaggagagcacag

SEQ ID NO: 1099198 - RNA, 19 nt, Artificial Sequence
  Description of Artificial Sequence: Synthetic oligonucleotide
  Sense strand starting at position 2855 of SEQ ID NO: 915695
aucugaucugauggucaca

SEQ ID NO: 1099199 - RNA, 19 nt, Artificial Sequence
  Description of Artificial Sequence: Synthetic oligonucleotide
  Antisense strand to SEQ ID NO: 1099198
ugugaccaucagaucagau

SEQ ID NO: 1099200 - RNA, 19 nt, Artificial Sequence
  Description of Artificial Sequence: Synthetic oligonucleotide
  Sense strand starting at position 2857 of SEQ ID NO: 915695
cugaucugauggucacagu

SEQ ID NO: 1099201 - RNA, 19 nt, Artificial Sequence
  Description of Artificial Sequence: Synthetic oligonucleotide
  Antisense strand to SEQ ID NO: 1099200
acugugaccaucagaucag

SEQ ID NO: 1099202 - RNA, 19 nt, Artificial Sequence
  Description of Artificial Sequence: Synthetic oligonucleotide
  Sense strand starting at position 3027 of SEQ ID NO: 915695
gcaccaguuccuuaacggu

SEQ ID NO: 1099203 - RNA, 19 nt, Artificial Sequence
  Description of Artificial Sequence: Synthetic oligonucleotide
  Antisense strand to SEQ ID NO: 1099202
accguuaaggaacuggugc

SEQ ID NO: 1099204 - RNA, 19 nt, Artificial Sequence
  Description of Artificial Sequence: Synthetic oligonucleotide
  Sense strand starting at position 3034 of SEQ ID NO: 915695
uuccuuaacgguuaauaga

SEQ ID NO: 1099205 - RNA, 19 nt, Artificial Sequence
  Description of Artificial Sequence: Synthetic oligonucleotide
  Antisense strand to SEQ ID NO: 1099204
ucuauuaaccguuaaggaa

SEQ ID NO: 1099206 - RNA, 19 nt, Artificial Sequence
  Description of Artificial Sequence: Synthetic oligonucleotide
  Sense strand starting at position 3151 of SEQ ID NO: 915695
guaagaaccggcuaugguu

SEQ ID NO: 1099207 - RNA, 19 nt, Artificial Sequence
  Description of Artificial Sequence: Synthetic oligonucleotide
  Antisense strand to SEQ ID NO: 1099206
aaccauagccgguucuuac

SEQ ID NO: 1099208 - RNA, 19 nt, Artificial Sequence
  Description of Artificial Sequence: Synthetic oligonucleotide
  Sense strand starting at position 3172 of SEQ ID NO: 915695
uguagagauuuagaguuaa

SEQ ID NO: 1099209 - RNA, 19 nt, Artificial Sequence
  Description of Artificial Sequence: Synthetic oligonucleotide
  Antisense strand to SEQ ID NO: 1099208
uuaacucuaaaucucuaca

SEQ ID NO: 1099210 - RNA, 19 nt, Artificial Sequence
  Description of Artificial Sequence: Synthetic oligonucleotide
  Sense strand starting at position 3190 of SEQ ID NO: 915695
auaggagcugcucauguuu

SEQ ID NO: 1099211 - RNA, 19 nt, Artificial Sequence
  Description of Artificial Sequence: Synthetic oligonucleotide
  Antisense strand to SEQ ID NO: 1099210
aaacaugagcagcuccuau

SEQ ID NO: 1099212 - RNA, 19 nt, Artificial Sequence
  Description of Artificial Sequence: Synthetic oligonucleotide
  Sense strand starting at position 3202 of SEQ ID NO: 915695
cauguuuacugugcaugga

SEQ ID NO: 1099213 - RNA, 19 nt, Artificial Sequence
  Description of Artificial Sequence: Synthetic oligonucleotide
  Antisense strand to SEQ ID NO: 1099212
uccaugcacaguaaacaug

SEQ ID NO: 1099214 - RNA, 19 nt, Artificial Sequence
  Description of Artificial Sequence: Synthetic oligonucleotide
  Sense strand starting at position 3327 of SEQ ID NO: 915695
gugcucagugaauauaaac

SEQ ID NO: 1099215 - RNA, 19 nt, Artificial Sequence
  Description of Artificial Sequence: Synthetic oligonucleotide
  Antisense strand to SEQ ID NO: 1099214
guuuauauucacugagcac

SEQ ID NO: 1099216 - RNA, 19 nt, Artificial Sequence
  Description of Artificial Sequence: Synthetic oligonucleotide
  Sense strand starting at position 3463 of SEQ ID NO: 915695
ugugacucuagaugaggau

SEQ ID NO: 1099217 - RNA, 19 nt, Artificial Sequence
  Description of Artificial Sequence: Synthetic oligonucleotide
  Antisense strand to SEQ ID NO: 1099216
auccucaucuagagucaca

SEQ ID NO: 1099218 - RNA, 19 nt, Artificial Sequence
  Description of Artificial Sequence: Synthetic oligonucleotide
  Sense strand starting at position 3513 of SEQ ID NO: 915695
gacucaaggcucuauagua

SEQ ID NO: 1099219 - RNA, 19 nt, Artificial Sequence
  Description of Artificial Sequence: Synthetic oligonucleotide
  Antisense strand to SEQ ID NO: 1099218
uacuauagagccuugaguc

SEQ ID NO: 1099220 - RNA, 19 nt, Artificial Sequence
  Description of Artificial Sequence: Synthetic oligonucleotide
  Sense strand starting at position 3579 of SEQ ID NO: 915695
ccaagcuggguugaugaau

SEQ ID NO: 1099221 - RNA, 19 nt, Artificial Sequence
  Description of Artificial Sequence: Synthetic oligonucleotide
  Antisense strand to SEQ ID NO: 1099220
auucaucaacccagcuugg

SEQ ID NO: 1099222 - RNA, 19 nt, Artificial Sequence
  Description of Artificial Sequence: Synthetic oligonucleotide
  Sense strand starting at position 3676 of SEQ ID NO: 915695
ugugcaauguccucccaga

SEQ ID NO: 1099223 - RNA, 19 nt, Artificial Sequence
  Description of Artificial Sequence: Synthetic oligonucleotide
  Antisense strand to SEQ ID NO: 1099222
ucugggaggacauugcaca

SEQ ID NO: 1099224 - RNA, 19 nt, Artificial Sequence
  Description of Artificial Sequence: Synthetic oligonucleotide
  Sense strand starting at position 3789 of SEQ ID NO: 915695
gugggaggccuuugucaca

SEQ ID NO: 1099225 - RNA, 19 nt, Artificial Sequence
  Description of Artificial Sequence: Synthetic oligonucleotide
  Antisense strand to SEQ ID NO: 1099224
ugugacaaaggccucccac

SEQ ID NO: 1099226 - RNA, 19 nt, Artificial Sequence
  Description of Artificial Sequence: Synthetic oligonucleotide
  Sense strand starting at position 3830 of SEQ ID NO: 915695
ggaagaggcugccuuaguu

SEQ ID NO: 1099227 - RNA, 19 nt, Artificial Sequence
  Description of Artificial Sequence: Synthetic oligonucleotide
  Antisense strand to SEQ ID NO: 1099226
aacuaaggcagccucuucc

SEQ ID NO: 1099228 - RNA, 19 nt, Artificial Sequence
  Description of Artificial Sequence: Synthetic oligonucleotide
  Sense strand starting at position 3838 of SEQ ID NO: 915695
cugccuuaguugucaugaa

SEQ ID NO: 1099229 - RNA, 19 nt, Artificial Sequence
  Description of Artificial Sequence: Synthetic oligonucleotide
  Antisense strand to SEQ ID NO: 1099228
uucaugacaacuaaggcag

SEQ ID NO: 1099230 - RNA, 19 nt, Artificial Sequence
  Description of Artificial Sequence: Synthetic oligonucleotide
  Sense strand starting at position 3842 of SEQ ID NO: 915695
cuuaguugucaugaaugag

SEQ ID NO: 1099231 - RNA, 19 nt, Artificial Sequence
  Description of Artificial Sequence: Synthetic oligonucleotide
  Antisense strand to SEQ ID NO: 1099230
cucauucaugacaacuaag

SEQ ID NO: 1099232 - RNA, 19 nt, Artificial Sequence
  Description of Artificial Sequence: Synthetic oligonucleotide
  Sense strand starting at position 3854 of SEQ ID NO: 915695
gaaugagugcccugucacu

SEQ ID NO: 1099233 - RNA, 19 nt, Artificial Sequence
  Description of Artificial Sequence: Synthetic oligonucleotide
  Antisense strand to SEQ ID NO: 1099232
agugacagggcacucauuc

SEQ ID NO: 1099234 - RNA, 19 nt, Artificial Sequence
  Description of Artificial Sequence: Synthetic oligonucleotide
  Sense strand starting at position 3938 of SEQ ID NO: 915695
agugguauuuggaguggau

SEQ ID NO: 1099235 - RNA, 19 nt, Artificial Sequence
  Description of Artificial Sequence: Synthetic oligonucleotide
  Antisense strand to SEQ ID NO: 1099234
auccacuccaaauaccacu

SEQ ID NO: 1099236 - RNA, 19 nt, Artificial Sequence
  Description of Artificial Sequence: Synthetic oligonucleotide
  Sense strand starting at position 2223 of SEQ ID NO: 915696
gugggaggcucccgagaau

SEQ ID NO: 1099237 - RNA, 19 nt, Artificial Sequence
  Description of Artificial Sequence: Synthetic oligonucleotide
  Antisense strand to SEQ ID NO: 1099236
auucucgggagccucccac

SEQ ID NO: 1099238 - RNA, 19 nt, Artificial Sequence
  Description of Artificial Sequence: Synthetic oligonucleotide
  Sense strand starting at position 2511 of SEQ ID NO: 915696
ggcugagaaaguuacucau

SEQ ID NO: 1099239 - RNA, 19 nt, Artificial Sequence
  Description of Artificial Sequence: Synthetic oligonucleotide
  Antisense strand to SEQ ID NO: 1099238
augaguaacuuucucagcc

SEQ ID NO: 1099240 - RNA, 19 nt, Artificial Sequence
  Description of Artificial Sequence: Synthetic oligonucleotide
  Sense strand starting at position 2591 of SEQ ID NO: 915696
cgacccuaguuccauuaga

SEQ ID NO: 1099241 - RNA, 19 nt, Artificial Sequence
  Description of Artificial Sequence: Synthetic oligonucleotide
  Antisense strand to SEQ ID NO: 1099240
ucuaauggaacuagggucg

SEQ ID NO: 1099242 - RNA, 19 nt, Artificial Sequence
  Description of Artificial Sequence: Synthetic oligonucleotide
  Sense strand starting at position 2670 of SEQ ID NO: 915696
aucccauucucaggagaag

SEQ ID NO: 1099243 - RNA, 19 nt, Artificial Sequence
  Description of Artificial Sequence: Synthetic oligonucleotide
  Antisense strand to SEQ ID NO: 1099242
cuucuccugagaaugggau

SEQ ID NO: 1099244 - RNA, 19 nt, Artificial Sequence
  Description of Artificial Sequence: Synthetic oligonucleotide
  Sense strand starting at position 2821 of SEQ ID NO: 915696
uguagugauucugcucuuu

SEQ ID NO: 1099245 - RNA, 19 nt, Artificial Sequence
  Description of Artificial Sequence: Synthetic oligonucleotide
  Antisense strand to SEQ ID NO: 1099244
aaagagcagaaucacuaca

SEQ ID NO: 1099246 - RNA, 19 nt, Artificial Sequence
  Description of Artificial Sequence: Synthetic oligonucleotide
  Sense strand starting at position 2825 of SEQ ID NO: 915696
gugauucugcucuuugcuu

SEQ ID NO: 1099247 - RNA, 19 nt, Artificial Sequence
  Description of Artificial Sequence: Synthetic oligonucleotide
  Antisense strand to SEQ ID NO: 1099246
aagcaaagagcagaaucac

SEQ ID NO: 1099248 - RNA, 19 nt, Artificial Sequence
  Description of Artificial Sequence: Synthetic oligonucleotide
  Sense strand starting at position 2912 of SEQ ID NO: 915696
ggcuucuccgccugugagu

SEQ ID NO: 1099249 - RNA, 19 nt, Artificial Sequence
  Description of Artificial Sequence: Synthetic oligonucleotide
  Antisense strand to SEQ ID NO: 1099248
acucacaggcggagaagcc

SEQ ID NO: 1099250 - RNA, 19 nt, Artificial Sequence
  Description of Artificial Sequence: Synthetic oligonucleotide
  Sense strand starting at position 3023 of SEQ ID NO: 915696
ggcugagcuguuuacagau

SEQ ID NO: 1099251 - RNA, 19 nt, Artificial Sequence
  Description of Artificial Sequence: Synthetic oligonucleotide
  Antisense strand to SEQ ID NO: 1099250
aucuguaaacagcucagcc

SEQ ID NO: 1099252 - RNA, 19 nt, Artificial Sequence
  Description of Artificial Sequence: Synthetic oligonucleotide
  Sense strand starting at position 3025 of SEQ ID NO: 915696
cugagcuguuuacagauuu

SEQ ID NO: 1099253 - RNA, 19 nt, Artificial Sequence
  Description of Artificial Sequence: Synthetic oligonucleotide
  Antisense strand to SEQ ID NO: 1099252
aaaucuguaaacagcucag

SEQ ID NO: 1099254 - RNA, 19 nt, Artificial Sequence
  Description of Artificial Sequence: Synthetic oligonucleotide
  Sense strand starting at position 3100 of SEQ ID NO: 915696
gagacaggcuccugagaag

SEQ ID NO: 1099255 - RNA, 19 nt, Artificial Sequence
  Description of Artificial Sequence: Synthetic oligonucleotide
  Antisense strand to SEQ ID NO: 1099254
cuucucaggagccugucuc

SEQ ID NO: 1099256 - RNA, 19 nt, Artificial Sequence
  Description of Artificial Sequence: Synthetic oligonucleotide
  Sense strand starting at position 3128 of SEQ ID NO: 915696
cuggccuuagcaugaauua

SEQ ID NO: 1099257 - RNA, 19 nt, Artificial Sequence
  Description of Artificial Sequence: Synthetic oligonucleotide
  Antisense strand to SEQ ID NO: 1099256
uaauucaugcuaaggccag

SEQ ID NO: 1099258 - RNA, 19 nt, Artificial Sequence
  Description of Artificial Sequence: Synthetic oligonucleotide
  Sense strand starting at position 3129 of SEQ ID NO: 915696
uggccuuagcaugaauuau

SEQ ID NO: 1099259 - RNA, 19 nt, Artificial Sequence
  Description of Artificial Sequence: Synthetic oligonucleotide
  Antisense strand to SEQ ID NO: 1099258
auaauucaugcuaaggcca

SEQ ID NO: 1099260 - RNA, 19 nt, Artificial Sequence
  Description of Artificial Sequence: Synthetic oligonucleotide
  Sense strand starting at position 3194 of SEQ ID NO: 915696
agcagagcugguuggaaua

SEQ ID NO: 1099261 - RNA, 19 nt, Artificial Sequence
  Description of Artificial Sequence: Synthetic oligonucleotide
  Antisense strand to SEQ ID NO: 1099260
uauuccaaccagcucugcu

SEQ ID NO: 1099262 - RNA, 19 nt, Artificial Sequence
  Description of Artificial Sequence: Synthetic oligonucleotide
  Sense strand starting at position 3241 of SEQ ID NO: 915696
gucucuuucuccugaauug

SEQ ID NO: 1099263 - RNA, 19 nt, Artificial Sequence
  Description of Artificial Sequence: Synthetic oligonucleotide
  Antisense strand to SEQ ID NO: 1099262
caauucaggagaaagagac

SEQ ID NO: 1099264 - RNA, 19 nt, Artificial Sequence
  Description of Artificial Sequence: Synthetic oligonucleotide
  Sense strand starting at position 3258 of SEQ ID NO: 915696
uggguacgguuguuauguu

SEQ ID NO: 1099265 - RNA, 19 nt, Artificial Sequence
  Description of Artificial Sequence: Synthetic oligonucleotide
  Antisense strand to SEQ ID NO: 1099264
aacauaacaaccguaccca

SEQ ID NO: 1099266 - RNA, 19 nt, Artificial Sequence
  Description of Artificial Sequence: Synthetic oligonucleotide
  Sense strand starting at position 3276 of SEQ ID NO: 915696
ugacuccuucccugagguu

SEQ ID NO: 1099267 - RNA, 19 nt, Artificial Sequence
  Description of Artificial Sequence: Synthetic oligonucleotide
  Antisense strand to SEQ ID NO: 1099266
aaccucagggaaggaguca

SEQ ID NO: 1099268 - RNA, 19 nt, Artificial Sequence
  Description of Artificial Sequence: Synthetic oligonucleotide
  Sense strand starting at position 3277 of SEQ ID NO: 915696
gacuccuucccugagguua

SEQ ID NO: 1099269 - RNA, 19 nt, Artificial Sequence
  Description of Artificial Sequence: Synthetic oligonucleotide
  Antisense strand to SEQ ID NO: 1099268
uaaccucagggaaggaguc

SEQ ID NO: 1099270 - RNA, 19 nt, Artificial Sequence
  Description of Artificial Sequence: Synthetic oligonucleotide
  Sense strand starting at position 3279 of SEQ ID NO: 915696
cuccuucccugagguuaua

SEQ ID NO: 1099271 - RNA, 19 nt, Artificial Sequence
  Description of Artificial Sequence: Synthetic oligonucleotide
  Antisense strand to SEQ ID NO: 1099270
uauaaccucagggaaggag

SEQ ID NO: 1099272 - RNA, 19 nt, Artificial Sequence
  Description of Artificial Sequence: Synthetic oligonucleotide
  Sense strand starting at position 3463 of SEQ ID NO: 915696
uuaacucucccagguauga

SEQ ID NO: 1099273 - RNA, 19 nt, Artificial Sequence
  Description of Artificial Sequence: Synthetic oligonucleotide
  Antisense strand to SEQ ID NO: 1099272
ucauaccugggagaguuaa

SEQ ID NO: 1099274 - RNA, 19 nt, Artificial Sequence
  Description of Artificial Sequence: Synthetic oligonucleotide
  Sense strand starting at position 3482 of SEQ ID NO: 915696
gagcucagaugugucucau

SEQ ID NO: 1099275 - RNA, 19 nt, Artificial Sequence
  Description of Artificial Sequence: Synthetic oligonucleotide
  Antisense strand to SEQ ID NO: 1099274
augagacacaucugagcuc

SEQ ID NO: 1099276 - RNA, 19 nt, Artificial Sequence
  Description of Artificial Sequence: Synthetic oligonucleotide
  Sense strand starting at position 3486 of SEQ ID NO: 915696
ucagaugugucucaugcaa

SEQ ID NO: 1099277 - RNA, 19 nt, Artificial Sequence
  Description of Artificial Sequence: Synthetic oligonucleotide
  Antisense strand to SEQ ID NO: 1099276
uugcaugagacacaucuga

SEQ ID NO: 1099278 - RNA, 19 nt, Artificial Sequence
  Description of Artificial Sequence: Synthetic oligonucleotide
  Sense strand starting at position 3488 of SEQ ID NO: 915696
agaugugucucaugcaagu

SEQ ID NO: 1099279 - RNA, 19 nt, Artificial Sequence
  Description of Artificial Sequence: Synthetic oligonucleotide
  Antisense strand to SEQ ID NO: 1099278
acuugcaugagacacaucu

SEQ ID NO: 1099280 - RNA, 19 nt, Artificial Sequence
  Description of Artificial Sequence: Synthetic oligonucleotide
  Sense strand starting at position 3530 of SEQ ID NO: 915696
gacauaggaucguagguuu

SEQ ID NO: 1099281 - RNA, 19 nt, Artificial Sequence
  Description of Artificial Sequence: Synthetic oligonucleotide
  Antisense strand to SEQ ID NO: 1099280
aaaccuacgauccuauguc

SEQ ID NO: 1099282 - RNA, 19 nt, Artificial Sequence
  Description of Artificial Sequence: Synthetic oligonucleotide
  Sense strand starting at position 3557 of SEQ ID NO: 915696
ccuggcauguguccauaaa

SEQ ID NO: 1099283 - RNA, 19 nt, Artificial Sequence
  Description of Artificial Sequence: Synthetic oligonucleotide
  Antisense strand to SEQ ID NO: 1099282
uuuauggacacaugccagg

SEQ ID NO: 1099284 - RNA, 19 nt, Artificial Sequence
  Description of Artificial Sequence: Synthetic oligonucleotide
  Sense strand starting at position 3558 of SEQ ID NO: 915696
cuggcauguguccauaaau

SEQ ID NO: 1099285 - RNA, 19 nt, Artificial Sequence
  Description of Artificial Sequence: Synthetic oligonucleotide
  Antisense strand to SEQ ID NO: 1099284
auuuauggacacaugccag

SEQ ID NO: 1099286 - RNA, 19 nt, Artificial Sequence
  Description of Artificial Sequence: Synthetic oligonucleotide
  Sense strand starting at position 3632 of SEQ ID NO: 915696
gauacauucucagagggca

SEQ ID NO: 1099287 - RNA, 19 nt, Artificial Sequence
  Description of Artificial Sequence: Synthetic oligonucleotide
  Antisense strand to SEQ ID NO: 1099286
ugcccucugagaauguauc

SEQ ID NO: 1099288 - RNA, 19 nt, Artificial Sequence
  Description of Artificial Sequence: Synthetic oligonucleotide
  Sense strand starting at position 3789 of SEQ ID NO: 915696
gggcacacgugcucaagua

SEQ ID NO: 1099289 - RNA, 19 nt, Artificial Sequence
  Description of Artificial Sequence: Synthetic oligonucleotide
  Antisense strand to SEQ ID NO: 1099288
uacuugagcacgugugccc

SEQ ID NO: 1099290 - RNA, 19 nt, Artificial Sequence
  Description of Artificial Sequence: Synthetic oligonucleotide
  Sense strand starting at position 3923 of SEQ ID NO: 915696
uucuguuuccaguauagag

SEQ ID NO: 1099291 - RNA, 19 nt, Artificial Sequence
  Description of Artificial Sequence: Synthetic oligonucleotide
  Antisense strand to SEQ ID NO: 1099290
cucuauacuggaaacagaa

SEQ ID NO: 1099292 - RNA, 19 nt, Artificial Sequence
  Description of Artificial Sequence: Synthetic oligonucleotide
  Sense strand starting at position 3937 of SEQ ID NO: 915696
uagagacuaucucaggaga

SEQ ID NO: 1099293 - RNA, 19 nt, Artificial Sequence
  Description of Artificial Sequence: Synthetic oligonucleotide
  Antisense strand to SEQ ID NO: 1099292
ucuccugagauagucucua

SEQ ID NO: 1099294 - RNA, 19 nt, Artificial Sequence
  Description of Artificial Sequence: Synthetic oligonucleotide
  Sense strand starting at position 3939 of SEQ ID NO: 915696
gagacuaucucaggagagu

SEQ ID NO: 1099295 - RNA, 19 nt, Artificial Sequence
  Description of Artificial Sequence: Synthetic oligonucleotide
  Antisense strand to SEQ ID NO: 1099294
acucuccugagauagucuc

SEQ ID NO: 1099296 - RNA, 19 nt, Artificial Sequence
  Description of Artificial Sequence: Synthetic oligonucleotide
  Sense strand starting at position 3952 of SEQ ID NO: 915696
gagaguguguggugcaaau

SEQ ID NO: 1099297 - RNA, 19 nt, Artificial Sequence
  Description of Artificial Sequence: Synthetic oligonucleotide
  Antisense strand to SEQ ID NO: 1099296
auuugcaccacacacucuc

SEQ ID NO: 1099298 - RNA, 19 nt, Artificial Sequence
  Description of Artificial Sequence: Synthetic oligonucleotide
  Sense strand starting at position 3954 of SEQ ID NO: 915696
gaguguguggugcaaauga

SEQ ID NO: 1099299 - RNA, 19 nt, Artificial Sequence
  Description of Artificial Sequence: Synthetic oligonucleotide
  Antisense strand to SEQ ID NO: 1099298
ucauuugcaccacacacuc

SEQ ID NO: 1099300 - RNA, 19 nt, Artificial Sequence
  Description of Artificial Sequence: Synthetic oligonucleotide
  Sense strand starting at position 110 of SEQ ID NO: 915697
aggacaaacucuggauucu

SEQ ID NO: 1099301 - RNA, 19 nt, Artificial Sequence
  Description of Artificial Sequence: Synthetic oligonucleotide
  Antisense strand to SEQ ID NO: 1099300
agaauccagaguuuguccu

SEQ ID NO: 1099302 - RNA, 19 nt, Artificial Sequence
  Description of Artificial Sequence: Synthetic oligonucleotide
  Sense strand starting at position 119 of SEQ ID NO: 915697
ucuggauucucucugaauc

SEQ ID NO: 1099303 - RNA, 19 nt, Artificial Sequence
  Description of Artificial Sequence: Synthetic oligonucleotide
  Antisense strand to SEQ ID NO: 1099302
gauucagagagaauccaga

SEQ ID NO: 1099304 - RNA, 19 nt, Artificial Sequence
  Description of Artificial Sequence: Synthetic oligonucleotide
  Sense strand starting at position 121 of SEQ ID NO: 915697
uggauucucucugaauccu

SEQ ID NO: 1099305 - RNA, 19 nt, Artificial Sequence
  Description of Artificial Sequence: Synthetic oligonucleotide
  Antisense strand to SEQ ID NO: 1099304
aggauucagagagaaucca

SEQ ID NO: 1099306 - RNA, 19 nt, Artificial Sequence
  Description of Artificial Sequence: Synthetic oligonucleotide
  Sense strand starting at position 151 of SEQ ID NO: 915697
ccaggcaguccuuaguauu

SEQ ID NO: 1099307 - RNA, 19 nt, Artificial Sequence
  Description of Artificial Sequence: Synthetic oligonucleotide
  Antisense strand to SEQ ID NO: 1099306
aauacuaaggacugccugg

SEQ ID NO: 1099308 - RNA, 19 nt, Artificial Sequence
  Description of Artificial Sequence: Synthetic oligonucleotide
  Sense strand starting at position 180 of SEQ ID NO: 915697
uacugagauucggaaaggu

SEQ ID NO: 1099309 - RNA, 19 nt, Artificial Sequence
  Description of Artificial Sequence: Synthetic oligonucleotide
  Antisense strand to SEQ ID NO: 1099308
accuuuccgaaucucagua

SEQ ID NO: 1099310 - RNA, 19 nt, Artificial Sequence
  Description of Artificial Sequence: Synthetic oligonucleotide
  Sense strand starting at position 572 of SEQ ID NO: 915697
caaagucuguguucccuga

SEQ ID NO: 1099311 - RNA, 19 nt, Artificial Sequence
  Description of Artificial Sequence: Synthetic oligonucleotide
  Antisense strand to SEQ ID NO: 1099310
ucagggaacacagacuuug

SEQ ID NO: 1099312 - RNA, 19 nt, Artificial Sequence
  Description of Artificial Sequence: Synthetic oligonucleotide
  Sense strand starting at position 885 of SEQ ID NO: 915697
gaaggagccaggugugaau

SEQ ID NO: 1099313 - RNA, 19 nt, Artificial Sequence
  Description of Artificial Sequence: Synthetic oligonucleotide
  Antisense strand to SEQ ID NO: 1099312
auucacaccuggcuccuuc

SEQ ID NO: 1099314 - RNA, 19 nt, Artificial Sequence
  Description of Artificial Sequence: Synthetic oligonucleotide
  Sense strand starting at position 894 of SEQ ID NO: 915697
aggugugaauucucagagu

SEQ ID NO: 1099315 - RNA, 19 nt, Artificial Sequence
  Description of Artificial Sequence: Synthetic oligonucleotide
  Antisense strand to SEQ ID NO: 1099314
acucugagaauucacaccu

SEQ ID NO: 1099316 - RNA, 19 nt, Artificial Sequence
  Description of Artificial Sequence: Synthetic oligonucleotide
  Sense strand starting at position 1261 of SEQ ID NO: 915697
gcucccaacugguucgaau

SEQ ID NO: 1099317 - RNA, 19 nt, Artificial Sequence
  Description of Artificial Sequence: Synthetic oligonucleotide
  Antisense strand to SEQ ID NO: 1099316
auucgaaccaguugggagc

SEQ ID NO: 1099318 - RNA, 19 nt, Artificial Sequence
  Description of Artificial Sequence: Synthetic oligonucleotide
  Sense strand starting at position 1375 of SEQ ID NO: 915697
ugcugccuucucugaguca

SEQ ID NO: 1099319 - RNA, 19 nt, Artificial Sequence
  Description of Artificial Sequence: Synthetic oligonucleotide
  Antisense strand to SEQ ID NO: 1099318
ugacucagagaaggcagca

SEQ ID NO: 1099320 - RNA, 19 nt, Artificial Sequence
  Description of Artificial Sequence: Synthetic oligonucleotide
  Sense strand starting at position 1378 of SEQ ID NO: 915697
ugccuucucugagucaauu

SEQ ID NO: 1099321 - RNA, 19 nt, Artificial Sequence
  Description of Artificial Sequence: Synthetic oligonucleotide
  Antisense strand to SEQ ID NO: 1099320
aauugacucagagaaggca

SEQ ID NO: 1099322 - RNA, 19 nt, Artificial Sequence
  Description of Artificial Sequence: Synthetic oligonucleotide
  Sense strand starting at position 1403 of SEQ ID NO: 915697
cccucauuacggcgacagu

SEQ ID NO: 1099323 - RNA, 19 nt, Artificial Sequence
  Description of Artificial Sequence: Synthetic oligonucleotide
  Antisense strand to SEQ ID NO: 1099322
acugucgccguaaugaggg

SEQ ID NO: 1099324 - RNA, 19 nt, Artificial Sequence
  Description of Artificial Sequence: Synthetic oligonucleotide
  Sense strand starting at position 1413 of SEQ ID NO: 915697
ggcgacagucgggaaguau

SEQ ID NO: 1099325 - RNA, 19 nt, Artificial Sequence
  Description of Artificial Sequence: Synthetic oligonucleotide
  Antisense strand to SEQ ID NO: 1099324
auacuucccgacugucgcc

SEQ ID NO: 1099326 - RNA, 19 nt, Artificial Sequence
  Description of Artificial Sequence: Synthetic oligonucleotide
  Sense strand starting at position 2173 of SEQ ID NO: 915697
gaaauauguucucaaagga

SEQ ID NO: 1099327 - RNA, 19 nt, Artificial Sequence
  Description of Artificial Sequence: Synthetic oligonucleotide
  Antisense strand to SEQ ID NO: 1099326
uccuuugagaacauauuuc

SEQ ID NO: 1099328 - RNA, 19 nt, Artificial Sequence
  Description of Artificial Sequence: Synthetic oligonucleotide
  Sense strand starting at position 2180 of SEQ ID NO: 915697
guucucaaaggaugucuuu

SEQ ID NO: 1099329 - RNA, 19 nt, Artificial Sequence
  Description of Artificial Sequence: Synthetic oligonucleotide
  Antisense strand to SEQ ID NO: 1099328
aaagacauccuuugagaac

SEQ ID NO: 1099330 - RNA, 19 nt, Artificial Sequence
  Description of Artificial Sequence: Synthetic oligonucleotide
  Sense strand starting at position 2241 of SEQ ID NO: 915697
gcaaauucuugggcccuua

SEQ ID NO: 1099331 - RNA, 19 nt, Artificial Sequence
  Description of Artificial Sequence: Synthetic oligonucleotide
  Antisense strand to SEQ ID NO: 1099330
uaagggcccaagaauuugc

SEQ ID NO: 1099332 - RNA, 19 nt, Artificial Sequence
  Description of Artificial Sequence: Synthetic oligonucleotide
  Sense strand starting at position 2324 of SEQ ID NO: 915697
gugauucugaugcauguga

SEQ ID NO: 1099333 - RNA, 19 nt, Artificial Sequence
  Description of Artificial Sequence: Synthetic oligonucleotide
  Antisense strand to SEQ ID NO: 1099332
ucacaugcaucagaaucac

SEQ ID NO: 1099334 - RNA, 19 nt, Artificial Sequence
  Description of Artificial Sequence: Synthetic oligonucleotide
  Sense strand starting at position 2326 of SEQ ID NO: 915697
gauucugaugcaugugagu

SEQ ID NO: 1099335 - RNA, 19 nt, Artificial Sequence
  Description of Artificial Sequence: Synthetic oligonucleotide
  Antisense strand to SEQ ID NO: 1099334
acucacaugcaucagaauc

SEQ ID NO: 1099336 - RNA, 19 nt, Artificial Sequence
  Description of Artificial Sequence: Synthetic oligonucleotide
  Sense strand starting at position 2328 of SEQ ID NO: 915697
uucugaugcaugugaguau

SEQ ID NO: 1099337 - RNA, 19 nt, Artificial Sequence
  Description of Artificial Sequence: Synthetic oligonucleotide
  Antisense strand to SEQ ID NO: 1099336
auacucacaugcaucagaa

SEQ ID NO: 1099338 - RNA, 19 nt, Artificial Sequence
  Description of Artificial Sequence: Synthetic oligonucleotide
  Sense strand starting at position 2331 of SEQ ID NO: 915697
ugaugcaugugaguauuga

SEQ ID NO: 1099339 - RNA, 19 nt, Artificial Sequence
  Description of Artificial Sequence: Synthetic oligonucleotide
  Antisense strand to SEQ ID NO: 1099338
ucaauacucacaugcauca

SEQ ID NO: 1099340 - RNA, 19 nt, Artificial Sequence
  Description of Artificial Sequence: Synthetic oligonucleotide
  Sense strand starting at position 2332 of SEQ ID NO: 915697
gaugcaugugaguauugag

SEQ ID NO: 1099341 - RNA, 19 nt, Artificial Sequence
  Description of Artificial Sequence: Synthetic oligonucleotide
  Antisense strand to SEQ ID NO: 1099340
cucaauacucacaugcauc

SEQ ID NO: 1099342 - RNA, 19 nt, Artificial Sequence
  Description of Artificial Sequence: Synthetic oligonucleotide
  Sense strand starting at position 2393 of SEQ ID NO: 915697
gaguuuacccucugauggu

SEQ ID NO: 1099343 - RNA, 19 nt, Artificial Sequence
  Description of Artificial Sequence: Synthetic oligonucleotide
  Antisense strand to SEQ ID NO: 1099342
accaucagaggguaaacuc

SEQ ID NO: 1099344 - RNA, 19 nt, Artificial Sequence
  Description of Artificial Sequence: Synthetic oligonucleotide
  Sense strand starting at position 2397 of SEQ ID NO: 915697
uuacccucugauggugaaa

SEQ ID NO: 1099345 - RNA, 19 nt, Artificial Sequence
  Description of Artificial Sequence: Synthetic oligonucleotide
  Antisense strand to SEQ ID NO: 1099344
uuucaccaucagaggguaa

SEQ ID NO: 1099346 - RNA, 19 nt, Artificial Sequence
  Description of Artificial Sequence: Synthetic oligonucleotide
  Sense strand starting at position 2408 of SEQ ID NO: 915697
uggugaaauuaggaggauu

SEQ ID NO: 1099347 - RNA, 19 nt, Artificial Sequence
  Description of Artificial Sequence: Synthetic oligonucleotide
  Antisense strand to SEQ ID NO: 1099346
aauccuccuaauuucacca

SEQ ID NO: 1099348 - RNA, 19 nt, Artificial Sequence
  Description of Artificial Sequence: Synthetic oligonucleotide
  Sense strand starting at position 2513 of SEQ ID NO: 915697
gcauaaagaccuuguauuc

SEQ ID NO: 1099349 - RNA, 19 nt, Artificial Sequence
  Description of Artificial Sequence: Synthetic oligonucleotide
  Antisense strand to SEQ ID NO: 1099348
gaauacaaggucuuuaugc

SEQ ID NO: 1099350 - RNA, 19 nt, Artificial Sequence
  Description of Artificial Sequence: Synthetic oligonucleotide
  Sense strand starting at position 2540 of SEQ ID NO: 915697
uugcuacagugacuaauua

SEQ ID NO: 1099351 - RNA, 19 nt, Artificial Sequence
  Description of Artificial Sequence: Synthetic oligonucleotide
  Antisense strand to SEQ ID NO: 1099350
uaauuagucacuguagcaa

SEQ ID NO: 1099352 - RNA, 19 nt, Artificial Sequence
  Description of Artificial Sequence: Synthetic oligonucleotide
  Sense strand starting at position 2671 of SEQ ID NO: 915697
gggcucuuaucugcagacu

SEQ ID NO: 1099353 - RNA, 19 nt, Artificial Sequence
  Description of Artificial Sequence: Synthetic oligonucleotide
  Antisense strand to SEQ ID NO: 1099352
agucugcagauaagagccc

SEQ ID NO: 1099354 - RNA, 19 nt, Artificial Sequence
  Description of Artificial Sequence: Synthetic oligonucleotide
  Sense strand starting at position 2709 of SEQ ID NO: 915697
aggcucauccaggauguua

SEQ ID NO: 1099355 - RNA, 19 nt, Artificial Sequence
  Description of Artificial Sequence: Synthetic oligonucleotide
  Antisense strand to SEQ ID NO: 1099354
uaacauccuggaugagccu

SEQ ID NO: 1099356 - RNA, 19 nt, Artificial Sequence
  Description of Artificial Sequence: Synthetic oligonucleotide
  Sense strand starting at position 2714 of SEQ ID NO: 915697
cauccaggauguuaacaga

SEQ ID NO: 1099357 - RNA, 19 nt, Artificial Sequence
  Description of Artificial Sequence: Synthetic oligonucleotide
  Antisense strand to SEQ ID NO: 1099356
ucuguuaacauccuggaug

SEQ ID NO: 1099358 - RNA, 19 nt, Artificial Sequence
  Description of Artificial Sequence: Synthetic oligonucleotide
  Sense strand starting at position 2717 of SEQ ID NO: 915697
ccaggauguuaacagaauu

SEQ ID NO: 1099359 - RNA, 19 nt, Artificial Sequence
  Description of Artificial Sequence: Synthetic oligonucleotide
  Antisense strand to SEQ ID NO: 1099358
aauucuguuaacauccugg

SEQ ID NO: 1099360 - RNA, 19 nt, Artificial Sequence
  Description of Artificial Sequence: Synthetic oligonucleotide
  Sense strand starting at position 2788 of SEQ ID NO: 915697
gugucauucucacuccuag

SEQ ID NO: 1099361 - RNA, 19 nt, Artificial Sequence
  Description of Artificial Sequence: Synthetic oligonucleotide
  Antisense strand to SEQ ID NO: 1099360
cuaggagugagaaugacac

SEQ ID NO: 1099362 - RNA, 19 nt, Artificial Sequence
  Description of Artificial Sequence: Synthetic oligonucleotide
  Sense strand starting at position 2893 of SEQ ID NO: 915697
cagcaagacgccuguaauc

SEQ ID NO: 1099363 - RNA, 19 nt, Artificial Sequence
  Description of Artificial Sequence: Synthetic oligonucleotide
  Antisense strand to SEQ ID NO: 1099362
gauuacaggcgucuugcug

SEQ ID NO: 1099364 - RNA, 19 nt, Artificial Sequence
  Description of Artificial Sequence: Synthetic oligonucleotide
  Sense strand starting at position 3182 of SEQ ID NO: 915697
gcuuccaaucucugugacu

SEQ ID NO: 1099365 - RNA, 19 nt, Artificial Sequence
  Description of Artificial Sequence: Synthetic oligonucleotide
  Antisense strand to SEQ ID NO: 1099364
agucacagagauuggaagc

SEQ ID NO: 1099366 - RNA, 19 nt, Artificial Sequence
  Description of Artificial Sequence: Synthetic oligonucleotide
  Sense strand starting at position 3278 of SEQ ID NO: 915697
ccaucauaacugugaaagg

SEQ ID NO: 1099367 - RNA, 19 nt, Artificial Sequence
  Description of Artificial Sequence: Synthetic oligonucleotide
  Antisense strand to SEQ ID NO: 1099366
ccuuucacaguuaugaugg

SEQ ID NO: 1099368 - RNA, 19 nt, Artificial Sequence
  Description of Artificial Sequence: Synthetic oligonucleotide
  Sense strand starting at position 3279 of SEQ ID NO: 915697
caucauaacugugaaagga

SEQ ID NO: 1099369 - RNA, 19 nt, Artificial Sequence
  Description of Artificial Sequence: Synthetic oligonucleotide
  Antisense strand to SEQ ID NO: 1099368
uccuuucacaguuaugaug

SEQ ID NO: 1099370 - RNA, 19 nt, Artificial Sequence
  Description of Artificial Sequence: Synthetic oligonucleotide
  Sense strand starting at position 3582 of SEQ ID NO: 915697
cugauugcuuccucuggua

SEQ ID NO: 1099371 - RNA, 19 nt, Artificial Sequence
  Description of Artificial Sequence: Synthetic oligonucleotide
  Antisense strand to SEQ ID NO: 1099370
uaccagaggaagcaaucag

SEQ ID NO: 1099372 - RNA, 19 nt, Artificial Sequence
  Description of Artificial Sequence: Synthetic oligonucleotide
  Sense strand starting at position 3584 of SEQ ID NO: 915697
gauugcuuccucugguaua

SEQ ID NO: 1099373 - RNA, 19 nt, Artificial Sequence
  Description of Artificial Sequence: Synthetic oligonucleotide
  Antisense strand to SEQ ID NO: 1099372
uauaccagaggaagcaauc

SEQ ID NO: 1099374 - RNA, 19 nt, Artificial Sequence
  Description of Artificial Sequence: Synthetic oligonucleotide
  Sense strand starting at position 3671 of SEQ ID NO: 915697
uguguauuucagugaaagu

SEQ ID NO: 1099375 - RNA, 19 nt, Artificial Sequence
  Description of Artificial Sequence: Synthetic oligonucleotide
  Antisense strand to SEQ ID NO: 1099374
acuuucacugaaauacaca

SEQ ID NO: 1099376 - RNA, 19 nt, Artificial Sequence
  Description of Artificial Sequence: Synthetic oligonucleotide
  Sense strand starting at position 3680 of SEQ ID NO: 915697
cagugaaagucugaucaaa

SEQ ID NO: 1099377 - RNA, 19 nt, Artificial Sequence
  Description of Artificial Sequence: Synthetic oligonucleotide
  Antisense strand to SEQ ID NO: 1099376
uuugaucagacuuucacug

SEQ ID NO: 1099378 - RNA, 19 nt, Artificial Sequence
  Description of Artificial Sequence: Synthetic oligonucleotide
  Sense strand starting at position 3682 of SEQ ID NO: 915697
gugaaagucugaucaaaga

SEQ ID NO: 1099379 - RNA, 19 nt, Artificial Sequence
  Description of Artificial Sequence: Synthetic oligonucleotide
  Antisense strand to SEQ ID NO: 1099378
ucuuugaucagacuuucac

SEQ ID NO: 1099380 - RNA, 19 nt, Artificial Sequence
  Description of Artificial Sequence: Synthetic oligonucleotide
  Sense strand starting at position 95 of SEQ ID NO: 915698
aguaucagauuuggaagga

SEQ ID NO: 1099381 - RNA, 19 nt, Artificial Sequence
  Description of Artificial Sequence: Synthetic oligonucleotide
  Antisense strand to SEQ ID NO: 1099380
uccuuccaaaucugauacu

SEQ ID NO: 1099382 - RNA, 19 nt, Artificial Sequence
  Description of Artificial Sequence: Synthetic oligonucleotide
  Sense strand starting at position 171 of SEQ ID NO: 915698
augaauauagugugaaguu

SEQ ID NO: 1099383 - RNA, 19 nt, Artificial Sequence
  Description of Artificial Sequence: Synthetic oligonucleotide
  Antisense strand to SEQ ID NO: 1099382
aacuucacacuauauucau

SEQ ID NO: 1099384 - RNA, 19 nt, Artificial Sequence
  Description of Artificial Sequence: Synthetic oligonucleotide
  Sense strand starting at position 178 of SEQ ID NO: 915698
uagugugaaguugauaacu

SEQ ID NO: 1099385 - RNA, 19 nt, Artificial Sequence
  Description of Artificial Sequence: Synthetic oligonucleotide
  Antisense strand to SEQ ID NO: 1099384
aguuaucaacuucacacua

SEQ ID NO: 1099386 - RNA, 19 nt, Artificial Sequence
  Description of Artificial Sequence: Synthetic oligonucleotide
  Sense strand starting at position 206 of SEQ ID NO: 915698
auauaagagcaauguuuag

SEQ ID NO: 1099387 - RNA, 19 nt, Artificial Sequence
  Description of Artificial Sequence: Synthetic oligonucleotide
  Antisense strand to SEQ ID NO: 1099386
cuaaacauugcucuuauau

SEQ ID NO: 1099388 - RNA, 19 nt, Artificial Sequence
  Description of Artificial Sequence: Synthetic oligonucleotide
  Sense strand starting at position 299 of SEQ ID NO: 915698
gagaauaugguauguguua

SEQ ID NO: 1099389 - RNA, 19 nt, Artificial Sequence
  Description of Artificial Sequence: Synthetic oligonucleotide
  Antisense strand to SEQ ID NO: 1099388
uaacacauaccauauucuc

SEQ ID NO: 1099390 - RNA, 19 nt, Artificial Sequence
  Description of Artificial Sequence: Synthetic oligonucleotide
  Sense strand starting at position 308 of SEQ ID NO: 915698
guauguguuagguaagaaa

SEQ ID NO: 1099391 - RNA, 19 nt, Artificial Sequence
  Description of Artificial Sequence: Synthetic oligonucleotide
  Antisense strand to SEQ ID NO: 1099390
uuucuuaccuaacacauac

SEQ ID NO: 1099392 - RNA, 19 nt, Artificial Sequence
  Description of Artificial Sequence: Synthetic oligonucleotide
  Sense strand starting at position 525 of SEQ ID NO: 915698
cuaugagguagguagaguu

SEQ ID NO: 1099393 - RNA, 19 nt, Artificial Sequence
  Description of Artificial Sequence: Synthetic oligonucleotide
  Antisense strand to SEQ ID NO: 1099392
aacucuaccuaccucauag

SEQ ID NO: 1099394 - RNA, 19 nt, Artificial Sequence
  Description of Artificial Sequence: Synthetic oligonucleotide
  Sense strand starting at position 595 of SEQ ID NO: 915698
cacgaucacccagguaaua

SEQ ID NO: 1099395 - RNA, 19 nt, Artificial Sequence
  Description of Artificial Sequence: Synthetic oligonucleotide
  Antisense strand to SEQ ID NO: 1099394
uauuaccugggugaucgug

SEQ ID NO: 1099396 - RNA, 19 nt, Artificial Sequence
  Description of Artificial Sequence: Synthetic oligonucleotide
  Sense strand starting at position 811 of SEQ ID NO: 915698
cugucagaauaucugguau

SEQ ID NO: 1099397 - RNA, 19 nt, Artificial Sequence
  Description of Artificial Sequence: Synthetic oligonucleotide
  Antisense strand to SEQ ID NO: 1099396
auaccagauauucugacag

SEQ ID NO: 1099398 - RNA, 19 nt, Artificial Sequence
  Description of Artificial Sequence: Synthetic oligonucleotide
  Sense strand starting at position 907 of SEQ ID NO: 915698
auuacauacucugugagga

SEQ ID NO: 1099399 - RNA, 19 nt, Artificial Sequence
  Description of Artificial Sequence: Synthetic oligonucleotide
  Antisense strand to SEQ ID NO: 1099398
uccucacagaguauguaau

SEQ ID NO: 1099400 - RNA, 19 nt, Artificial Sequence
  Description of Artificial Sequence: Synthetic oligonucleotide
  Sense strand starting at position 908 of SEQ ID NO: 915698
uuacauacucugugaggac

SEQ ID NO: 1099401 - RNA, 19 nt, Artificial Sequence
  Description of Artificial Sequence: Synthetic oligonucleotide
  Antisense strand to SEQ ID NO: 1099400
guccucacagaguauguaa

SEQ ID NO: 1099402 - RNA, 19 nt, Artificial Sequence
  Description of Artificial Sequence: Synthetic oligonucleotide
  Sense strand starting at position 1007 of SEQ ID NO: 915698
auucguguucugccugacu

SEQ ID NO: 1099403 - RNA, 19 nt, Artificial Sequence
  Description of Artificial Sequence: Synthetic oligonucleotide
  Antisense strand to SEQ ID NO: 1099402
agucaggcagaacacgaau

SEQ ID NO: 1099404 - RNA, 19 nt, Artificial Sequence
  Description of Artificial Sequence: Synthetic oligonucleotide
  Sense strand starting at position 1016 of SEQ ID NO: 915698
cugccugacugauccauau

SEQ ID NO: 1099405 - RNA, 19 nt, Artificial Sequence
  Description of Artificial Sequence: Synthetic oligonucleotide
  Antisense strand to SEQ ID NO: 1099404
auauggaucagucaggcag

SEQ ID NO: 1099406 - RNA, 19 nt, Artificial Sequence
  Description of Artificial Sequence: Synthetic oligonucleotide
  Sense strand starting at position 1107 of SEQ ID NO: 915698
accagauaguuucccuaca

SEQ ID NO: 1099407 - RNA, 19 nt, Artificial Sequence
  Description of Artificial Sequence: Synthetic oligonucleotide
  Antisense strand to SEQ ID NO: 1099406
uguagggaaacuaucuggu

SEQ ID NO: 1099408 - RNA, 19 nt, Artificial Sequence
  Description of Artificial Sequence: Synthetic oligonucleotide
  Sense strand starting at position 1108 of SEQ ID NO: 915698
ccagauaguuucccuacau

SEQ ID NO: 1099409 - RNA, 19 nt, Artificial Sequence
  Description of Artificial Sequence: Synthetic oligonucleotide
  Antisense strand to SEQ ID NO: 1099408
auguagggaaacuaucugg

SEQ ID NO: 1099410 - RNA, 19 nt, Artificial Sequence
  Description of Artificial Sequence: Synthetic oligonucleotide
  Sense strand starting at position 1112 of SEQ ID NO: 915698
auaguuucccuacauggua

SEQ ID NO: 1099411 - RNA, 19 nt, Artificial Sequence
  Description of Artificial Sequence: Synthetic oligonucleotide
  Antisense strand to SEQ ID NO: 1099410
uaccauguagggaaacuau

SEQ ID NO: 1099412 - RNA, 19 nt, Artificial Sequence
  Description of Artificial Sequence: Synthetic oligonucleotide
  Sense strand starting at position 1156 of SEQ ID NO: 915698
ugcauuggaggguaaugua

SEQ ID NO: 1099413 - RNA, 19 nt, Artificial Sequence
  Description of Artificial Sequence: Synthetic oligonucleotide
  Antisense strand to SEQ ID NO: 1099412
uacauuacccuccaaugca

SEQ ID NO: 1099414 - RNA, 19 nt, Artificial Sequence
  Description of Artificial Sequence: Synthetic oligonucleotide
  Sense strand starting at position 1164 of SEQ ID NO: 915698
aggguaauguaccuccaau

SEQ ID NO: 1099415 - RNA, 19 nt, Artificial Sequence
  Description of Artificial Sequence: Synthetic oligonucleotide
  Antisense strand to SEQ ID NO: 1099414
auuggagguacauuacccu

SEQ ID NO: 1099416 - RNA, 19 nt, Artificial Sequence
  Description of Artificial Sequence: Synthetic oligonucleotide
  Sense strand starting at position 1204 of SEQ ID NO: 915698
gagacacugucauuauaga

SEQ ID NO: 1099417 - RNA, 19 nt, Artificial Sequence
  Description of Artificial Sequence: Synthetic oligonucleotide
  Antisense strand to SEQ ID NO: 1099416
ucuauaaugacagugucuc

SEQ ID NO: 1099418 - RNA, 19 nt, Artificial Sequence
  Description of Artificial Sequence: Synthetic oligonucleotide
  Sense strand starting at position 1218 of SEQ ID NO: 915698
auagaaucuuugcuacaug

SEQ ID NO: 1099419 - RNA, 19 nt, Artificial Sequence
  Description of Artificial Sequence: Synthetic oligonucleotide
  Antisense strand to SEQ ID NO: 1099418
cauguagcaaagauucuau

SEQ ID NO: 1099420 - RNA, 19 nt, Artificial Sequence
  Description of Artificial Sequence: Synthetic oligonucleotide
  Sense strand starting at position 1398 of SEQ ID NO: 915698
cgaaguagcuauuuguauc

SEQ ID NO: 1099421 - RNA, 19 nt, Artificial Sequence
  Description of Artificial Sequence: Synthetic oligonucleotide
  Antisense strand to SEQ ID NO: 1099420
gauacaaauagcuacuucg

SEQ ID NO: 1099422 - RNA, 19 nt, Artificial Sequence
  Description of Artificial Sequence: Synthetic oligonucleotide
  Sense strand starting at position 1493 of SEQ ID NO: 915698
uguacuccaucucugaaga

SEQ ID NO: 1099423 - RNA, 19 nt, Artificial Sequence
  Description of Artificial Sequence: Synthetic oligonucleotide
  Antisense strand to SEQ ID NO: 1099422
ucuucagagauggaguaca

SEQ ID NO: 1099424 - RNA, 19 nt, Artificial Sequence
  Description of Artificial Sequence: Synthetic oligonucleotide
  Sense strand starting at position 1498 of SEQ ID NO: 915698
uccaucucugaagaguuua

SEQ ID NO: 1099425 - RNA, 19 nt, Artificial Sequence
  Description of Artificial Sequence: Synthetic oligonucleotide
  Antisense strand to SEQ ID NO: 1099424
uaaacucuucagagaugga

SEQ ID NO: 1099426 - RNA, 19 nt, Artificial Sequence
  Description of Artificial Sequence: Synthetic oligonucleotide
  Sense strand starting at position 1608 of SEQ ID NO: 915698
cucugauaccuaggcuaga

SEQ ID NO: 1099427 - RNA, 19 nt, Artificial Sequence
  Description of Artificial Sequence: Synthetic oligonucleotide
  Antisense strand to SEQ ID NO: 1099426
ucuagccuagguaucagag

SEQ ID NO: 1099428 - RNA, 19 nt, Artificial Sequence
  Description of Artificial Sequence: Synthetic oligonucleotide
  Sense strand starting at position 1937 of SEQ ID NO: 915698
aaggaauggucuuuguucu

SEQ ID NO: 1099429 - RNA, 19 nt, Artificial Sequence
  Description of Artificial Sequence: Synthetic oligonucleotide
  Antisense strand to SEQ ID NO: 1099428
agaacaaagaccauuccuu

SEQ ID NO: 1099430 - RNA, 19 nt, Artificial Sequence
  Description of Artificial Sequence: Synthetic oligonucleotide
  Sense strand starting at position 1972 of SEQ ID NO: 915698
caugaugaauuuggaguaa

SEQ ID NO: 1099431 - RNA, 19 nt, Artificial Sequence
  Description of Artificial Sequence: Synthetic oligonucleotide
  Antisense strand to SEQ ID NO: 1099430
uuacuccaaauucaucaug

SEQ ID NO: 1099432 - RNA, 19 nt, Artificial Sequence
  Description of Artificial Sequence: Synthetic oligonucleotide
  Sense strand starting at position 2120 of SEQ ID NO: 915698
uggauaugcagauaagcuu

SEQ ID NO: 1099433 - RNA, 19 nt, Artificial Sequence
  Description of Artificial Sequence: Synthetic oligonucleotide
  Antisense strand to SEQ ID NO: 1099432
aagcuuaucugcauaucca

SEQ ID NO: 1099434 - RNA, 19 nt, Artificial Sequence
  Description of Artificial Sequence: Synthetic oligonucleotide
  Sense strand starting at position 2178 of SEQ ID NO: 915698
ccugacaccugccuagaau

SEQ ID NO: 1099435 - RNA, 19 nt, Artificial Sequence
  Description of Artificial Sequence: Synthetic oligonucleotide
  Antisense strand to SEQ ID NO: 1099434
auucuaggcaggugucagg

SEQ ID NO: 1099436 - RNA, 19 nt, Artificial Sequence
  Description of Artificial Sequence: Synthetic oligonucleotide
  Sense strand starting at position 2179 of SEQ ID NO: 915698
cugacaccugccuagaaua

SEQ ID NO: 1099437 - RNA, 19 nt, Artificial Sequence
  Description of Artificial Sequence: Synthetic oligonucleotide
  Antisense strand to SEQ ID NO: 1099436
uauucuaggcaggugucag

SEQ ID NO: 1099438 - RNA, 19 nt, Artificial Sequence
  Description of Artificial Sequence: Synthetic oligonucleotide
  Sense strand starting at position 2300 of SEQ ID NO: 915698
agccuaaacuagucaggaa

SEQ ID NO: 1099439 - RNA, 19 nt, Artificial Sequence
  Description of Artificial Sequence: Synthetic oligonucleotide
  Antisense strand to SEQ ID NO: 1099438
uuccugacuaguuuaggcu

SEQ ID NO: 1099440 - RNA, 19 nt, Artificial Sequence
  Description of Artificial Sequence: Synthetic oligonucleotide
  Sense strand starting at position 2392 of SEQ ID NO: 915698
guucuauucgaacauaucu

SEQ ID NO: 1099441 - RNA, 19 nt, Artificial Sequence
  Description of Artificial Sequence: Synthetic oligonucleotide
  Antisense strand to SEQ ID NO: 1099440
agauauguucgaauagaac

SEQ ID NO: 1099442 - RNA, 19 nt, Artificial Sequence
  Description of Artificial Sequence: Synthetic oligonucleotide
  Sense strand starting at position 2484 of SEQ ID NO: 915698
uggccagcucuagauacau

SEQ ID NO: 1099443 - RNA, 19 nt, Artificial Sequence
  Description of Artificial Sequence: Synthetic oligonucleotide
  Antisense strand to SEQ ID NO: 1099442
auguaucuagagcuggcca

SEQ ID NO: 1099444 - RNA, 19 nt, Artificial Sequence
  Description of Artificial Sequence: Synthetic oligonucleotide
  Sense strand starting at position 2518 of SEQ ID NO: 915698
aacugcuagccaggagaau

SEQ ID NO: 1099445 - RNA, 19 nt, Artificial Sequence
  Description of Artificial Sequence: Synthetic oligonucleotide
  Antisense strand to SEQ ID NO: 1099444
auucuccuggcuagcaguu

SEQ ID NO: 1099446 - RNA, 19 nt, Artificial Sequence
  Description of Artificial Sequence: Synthetic oligonucleotide
  Sense strand starting at position 2519 of SEQ ID NO: 915698
acugcuagccaggagaauu

SEQ ID NO: 1099447 - RNA, 19 nt, Artificial Sequence
  Description of Artificial Sequence: Synthetic oligonucleotide
  Antisense strand to SEQ ID NO: 1099446
aauucuccuggcuagcagu

SEQ ID NO: 1099448 - RNA, 19 nt, Artificial Sequence
  Description of Artificial Sequence: Synthetic oligonucleotide
  Sense strand starting at position 2565 of SEQ ID NO: 915698
agagaucuacuuugguauc

SEQ ID NO: 1099449 - RNA, 19 nt, Artificial Sequence
  Description of Artificial Sequence: Synthetic oligonucleotide
  Antisense strand to SEQ ID NO: 1099448
gauaccaaaguagaucucu

SEQ ID NO: 1099450 - RNA, 19 nt, Artificial Sequence
  Description of Artificial Sequence: Synthetic oligonucleotide
  Sense strand starting at position 3005 of SEQ ID NO: 915698
cugaauaauuauguggauu

SEQ ID NO: 1099451 - RNA, 19 nt, Artificial Sequence
  Description of Artificial Sequence: Synthetic oligonucleotide
  Antisense strand to SEQ ID NO: 1099450
aauccacauaauuauucag

SEQ ID NO: 1099452 - RNA, 19 nt, Artificial Sequence
  Description of Artificial Sequence: Synthetic oligonucleotide
  Sense strand starting at position 3363 of SEQ ID NO: 915698
ugagucucugcugagaaag

SEQ ID NO: 1099453 - RNA, 19 nt, Artificial Sequence
  Description of Artificial Sequence: Synthetic oligonucleotide
  Antisense strand to SEQ ID NO: 1099452
cuuucucagcagagacuca

SEQ ID NO: 1099454 - RNA, 19 nt, Artificial Sequence
  Description of Artificial Sequence: Synthetic oligonucleotide
  Sense strand starting at position 3448 of SEQ ID NO: 915698
agguaaacuuaaguauaca

SEQ ID NO: 1099455 - RNA, 19 nt, Artificial Sequence
  Description of Artificial Sequence: Synthetic oligonucleotide
  Antisense strand to SEQ ID NO: 1099454
uguauacuuaaguuuaccu

SEQ ID NO: 1099456 - RNA, 19 nt, Artificial Sequence
  Description of Artificial Sequence: Synthetic oligonucleotide
  Sense strand starting at position 3629 of SEQ ID NO: 915698
cgacguuguccuaaagcgu

SEQ ID NO: 1099457 - RNA, 19 nt, Artificial Sequence
  Description of Artificial Sequence: Synthetic oligonucleotide
  Antisense strand to SEQ ID NO: 1099456
acgcuuuaggacaacgucg

SEQ ID NO: 1099458 - RNA, 19 nt, Artificial Sequence
  Description of Artificial Sequence: Synthetic oligonucleotide
  Sense strand starting at position 3922 of SEQ ID NO: 915698
gggaauaugucccaaauuu

SEQ ID NO: 1099459 - RNA, 19 nt, Artificial Sequence
  Description of Artificial Sequence: Synthetic oligonucleotide
  Antisense strand to SEQ ID NO: 1099458
aaauuugggacauauuccc

SEQ ID NO: 1099460 - RNA, 19 nt, Artificial Sequence
  Description of Artificial Sequence: Synthetic oligonucleotide
  Sense strand starting at position 13 of SEQ ID NO: 915699
agaagcuaccucugagcau

SEQ ID NO: 1099461 - RNA, 19 nt, Artificial Sequence
  Description of Artificial Sequence: Synthetic oligonucleotide
  Antisense strand to SEQ ID NO: 1099460
augcucagagguagcuucu

SEQ ID NO: 1099462 - RNA, 19 nt, Artificial Sequence
  Description of Artificial Sequence: Synthetic oligonucleotide
  Sense strand starting at position 185 of SEQ ID NO: 915699
cagaaaguccugugugauc

SEQ ID NO: 1099463 - RNA, 19 nt, Artificial Sequence
  Description of Artificial Sequence: Synthetic oligonucleotide
  Antisense strand to SEQ ID NO: 1099462
gaucacacaggacuuucug

SEQ ID NO: 1099464 - RNA, 19 nt, Artificial Sequence
  Description of Artificial Sequence: Synthetic oligonucleotide
  Sense strand starting at position 187 of SEQ ID NO: 915699
gaaaguccugugugaucac

SEQ ID NO: 1099465 - RNA, 19 nt, Artificial Sequence
  Description of Artificial Sequence: Synthetic oligonucleotide
  Antisense strand to SEQ ID NO: 1099464
gugaucacacaggacuuuc

SEQ ID NO: 1099466 - RNA, 19 nt, Artificial Sequence
  Description of Artificial Sequence: Synthetic oligonucleotide
  Sense strand starting at position 190 of SEQ ID NO: 915699
aguccugugugaucacaga

SEQ ID NO: 1099467 - RNA, 19 nt, Artificial Sequence
  Description of Artificial Sequence: Synthetic oligonucleotide
  Antisense strand to SEQ ID NO: 1099466
ucugugaucacacaggacu

SEQ ID NO: 1099468 - RNA, 19 nt, Artificial Sequence
  Description of Artificial Sequence: Synthetic oligonucleotide
  Sense strand starting at position 480 of SEQ ID NO: 915699
gcuggagagacuugaaaug

SEQ ID NO: 1099469 - RNA, 19 nt, Artificial Sequence
  Description of Artificial Sequence: Synthetic oligonucleotide
  Antisense strand to SEQ ID NO: 1099468
cauuucaagucucuccagc

SEQ ID NO: 1099470 - RNA, 19 nt, Artificial Sequence
  Description of Artificial Sequence: Synthetic oligonucleotide
  Sense strand starting at position 490 of SEQ ID NO: 915699
cuugaaaugccauggccaa

SEQ ID NO: 1099471 - RNA, 19 nt, Artificial Sequence
  Description of Artificial Sequence: Synthetic oligonucleotide
  Antisense strand to SEQ ID NO: 1099470
uuggccauggcauuucaag

SEQ ID NO: 1099472 - RNA, 19 nt, Artificial Sequence
  Description of Artificial Sequence: Synthetic oligonucleotide
  Sense strand starting at position 491 of SEQ ID NO: 915699
uugaaaugccauggccaau

SEQ ID NO: 1099473 - RNA, 19 nt, Artificial Sequence
  Description of Artificial Sequence: Synthetic oligonucleotide
  Antisense strand to SEQ ID NO: 1099472
auuggccauggcauuucaa

SEQ ID NO: 1099474 - RNA, 19 nt, Artificial Sequence
  Description of Artificial Sequence: Synthetic oligonucleotide
  Sense strand starting at position 503 of SEQ ID NO: 915699
ggccaauaauauggauuua

SEQ ID NO: 1099475 - RNA, 19 nt, Artificial Sequence
  Description of Artificial Sequence: Synthetic oligonucleotide
  Antisense strand to SEQ ID NO: 1099474
uaaauccauauuauuggcc

SEQ ID NO: 1099476 - RNA, 19 nt, Artificial Sequence
  Description of Artificial Sequence: Synthetic oligonucleotide
  Sense strand starting at position 560 of SEQ ID NO: 915699
auguauugccaugaucaug

SEQ ID NO: 1099477 - RNA, 19 nt, Artificial Sequence
  Description of Artificial Sequence: Synthetic oligonucleotide
  Antisense strand to SEQ ID NO: 1099476
caugaucauggcaauacau

SEQ ID NO: 1099478 - RNA, 19 nt, Artificial Sequence
  Description of Artificial Sequence: Synthetic oligonucleotide
  Sense strand starting at position 647 of SEQ ID NO: 915699
caaaucuuucgguaccagu

SEQ ID NO: 1099479 - RNA, 19 nt, Artificial Sequence
  Description of Artificial Sequence: Synthetic oligonucleotide
  Antisense strand to SEQ ID NO: 1099478
acugguaccgaaagauuug

SEQ ID NO: 1099480 - RNA, 19 nt, Artificial Sequence
  Description of Artificial Sequence: Synthetic oligonucleotide
  Sense strand starting at position 684 of SEQ ID NO: 915699
uuugcauacuuguugauuu

SEQ ID NO: 1099481 - RNA, 19 nt, Artificial Sequence
  Description of Artificial Sequence: Synthetic oligonucleotide
  Antisense strand to SEQ ID NO: 1099480
aaaucaacaaguaugcaaa

SEQ ID NO: 1099482 - RNA, 19 nt, Artificial Sequence
  Description of Artificial Sequence: Synthetic oligonucleotide
  Sense strand starting at position 811 of SEQ ID NO: 915699
gggcuuuaaccaggagaag

SEQ ID NO: 1099483 - RNA, 19 nt, Artificial Sequence
  Description of Artificial Sequence: Synthetic oligonucleotide
  Antisense strand to SEQ ID NO: 1099482
cuucuccugguuaaagccc

SEQ ID NO: 1099484 - RNA, 19 nt, Artificial Sequence
  Description of Artificial Sequence: Synthetic oligonucleotide
  Sense strand starting at position 1033 of SEQ ID NO: 915699
cagccuuaguaugugaaca

SEQ ID NO: 1099485 - RNA, 19 nt, Artificial Sequence
  Description of Artificial Sequence: Synthetic oligonucleotide
  Antisense strand to SEQ ID NO: 1099484
uguucacauacuaaggcug

SEQ ID NO: 1099486 - RNA, 19 nt, Artificial Sequence
  Description of Artificial Sequence: Synthetic oligonucleotide
  Sense strand starting at position 1133 of SEQ ID NO: 915699
gucagaauuugaguucgua

SEQ ID NO: 1099487 - RNA, 19 nt, Artificial Sequence
  Description of Artificial Sequence: Synthetic oligonucleotide
  Antisense strand to SEQ ID NO: 1099486
uacgaacucaaauucugac

SEQ ID NO: 1099488 - RNA, 19 nt, Artificial Sequence
  Description of Artificial Sequence: Synthetic oligonucleotide
  Sense strand starting at position 1141 of SEQ ID NO: 915699
uugaguucguauuugauca

SEQ ID NO: 1099489 - RNA, 19 nt, Artificial Sequence
  Description of Artificial Sequence: Synthetic oligonucleotide
  Antisense strand to SEQ ID NO: 1099488
ugaucaaauacgaacucaa

SEQ ID NO: 1099490 - RNA, 19 nt, Artificial Sequence
  Description of Artificial Sequence: Synthetic oligonucleotide
  Sense strand starting at position 1142 of SEQ ID NO: 915699
ugaguucguauuugaucau

SEQ ID NO: 1099491 - RNA, 19 nt, Artificial Sequence
  Description of Artificial Sequence: Synthetic oligonucleotide
  Antisense strand to SEQ ID NO: 1099490
augaucaaauacgaacuca

SEQ ID NO: 1099492 - RNA, 19 nt, Artificial Sequence
  Description of Artificial Sequence: Synthetic oligonucleotide
  Sense strand starting at position 1192 of SEQ ID NO: 915699
agguuucuagccugaggaa

SEQ ID NO: 1099493 - RNA, 19 nt, Artificial Sequence
  Description of Artificial Sequence: Synthetic oligonucleotide
  Antisense strand to SEQ ID NO: 1099492
uuccucaggcuagaaaccu

SEQ ID NO: 1099494 - RNA, 19 nt, Artificial Sequence
  Description of Artificial Sequence: Synthetic oligonucleotide
  Sense strand starting at position 1193 of SEQ ID NO: 915699
gguuucuagccugaggaac

SEQ ID NO: 1099495 - RNA, 19 nt, Artificial Sequence
  Description of Artificial Sequence: Synthetic oligonucleotide
  Antisense strand to SEQ ID NO: 1099494
guuccucaggcuagaaacc

SEQ ID NO: 1099496 - RNA, 19 nt, Artificial Sequence
  Description of Artificial Sequence: Synthetic oligonucleotide
  Sense strand starting at position 1355 of SEQ ID NO: 915699
cuccgagagucuuuccaca

SEQ ID NO: 1099497 - RNA, 19 nt, Artificial Sequence
  Description of Artificial Sequence: Synthetic oligonucleotide
  Antisense strand to SEQ ID NO: 1099496
uguggaaagacucucggag

SEQ ID NO: 1099498 - RNA, 19 nt, Artificial Sequence
  Description of Artificial Sequence: Synthetic oligonucleotide
  Sense strand starting at position 1357 of SEQ ID NO: 915699
ccgagagucuuuccacauu

SEQ ID NO: 1099499 - RNA, 19 nt, Artificial Sequence
  Description of Artificial Sequence: Synthetic oligonucleotide
  Antisense strand to SEQ ID NO: 1099498
aauguggaaagacucucgg

SEQ ID NO: 1099500 - RNA, 19 nt, Artificial Sequence
  Description of Artificial Sequence: Synthetic oligonucleotide
  Sense strand starting at position 1505 of SEQ ID NO: 915699
aauauuggucauggaaggu

SEQ ID NO: 1099501 - RNA, 19 nt, Artificial Sequence
  Description of Artificial Sequence: Synthetic oligonucleotide
  Antisense strand to SEQ ID NO: 1099500
accuuccaugaccaauauu

SEQ ID NO: 1099502 - RNA, 19 nt, Artificial Sequence
  Description of Artificial Sequence: Synthetic oligonucleotide
  Sense strand starting at position 1961 of SEQ ID NO: 915699
ugucaugugacggaucaca

SEQ ID NO: 1099503 - RNA, 19 nt, Artificial Sequence
  Description of Artificial Sequence: Synthetic oligonucleotide
  Antisense strand to SEQ ID NO: 1099502
ugugauccgucacaugaca

SEQ ID NO: 1099504 - RNA, 19 nt, Artificial Sequence
  Description of Artificial Sequence: Synthetic oligonucleotide
  Sense strand starting at position 2107 of SEQ ID NO: 915699
ccagucaagcacugaguaa

SEQ ID NO: 1099505 - RNA, 19 nt, Artificial Sequence
  Description of Artificial Sequence: Synthetic oligonucleotide
  Antisense strand to SEQ ID NO: 1099504
uuacucagugcuugacugg

SEQ ID NO: 1099506 - RNA, 19 nt, Artificial Sequence
  Description of Artificial Sequence: Synthetic oligonucleotide
  Sense strand starting at position 2212 of SEQ ID NO: 915699
ucuuccuagcuguaugaca

SEQ ID NO: 1099507 - RNA, 19 nt, Artificial Sequence
  Description of Artificial Sequence: Synthetic oligonucleotide
  Antisense strand to SEQ ID NO: 1099506
ugucauacagcuaggaaga

SEQ ID NO: 1099508 - RNA, 19 nt, Artificial Sequence
  Description of Artificial Sequence: Synthetic oligonucleotide
  Sense strand starting at position 2220 of SEQ ID NO: 915699
gcuguaugacaucagcaaa

SEQ ID NO: 1099509 - RNA, 19 nt, Artificial Sequence
  Description of Artificial Sequence: Synthetic oligonucleotide
  Antisense strand to SEQ ID NO: 1099508
uuugcugaugucauacagc

SEQ ID NO: 1099510 - RNA, 19 nt, Artificial Sequence
  Description of Artificial Sequence: Synthetic oligonucleotide
  Sense strand starting at position 2292 of SEQ ID NO: 915699
agugaucugccucgaaaga

SEQ ID NO: 1099511 - RNA, 19 nt, Artificial Sequence
  Description of Artificial Sequence: Synthetic oligonucleotide
  Antisense strand to SEQ ID NO: 1099510
ucuuucgaggcagaucacu

SEQ ID NO: 1099512 - RNA, 19 nt, Artificial Sequence
  Description of Artificial Sequence: Synthetic oligonucleotide
  Sense strand starting at position 2293 of SEQ ID NO: 915699
gugaucugccucgaaagau

SEQ ID NO: 1099513 - RNA, 19 nt, Artificial Sequence
  Description of Artificial Sequence: Synthetic oligonucleotide
  Antisense strand to SEQ ID NO: 1099512
aucuuucgaggcagaucac

SEQ ID NO: 1099514 - RNA, 19 nt, Artificial Sequence
  Description of Artificial Sequence: Synthetic oligonucleotide
  Sense strand starting at position 2433 of SEQ ID NO: 915699
ucaaaucaguuuccaguuu

SEQ ID NO: 1099515 - RNA, 19 nt, Artificial Sequence
  Description of Artificial Sequence: Synthetic oligonucleotide
  Antisense strand to SEQ ID NO: 1099514
aaacuggaaacugauuuga

SEQ ID NO: 1099516 - RNA, 19 nt, Artificial Sequence
  Description of Artificial Sequence: Synthetic oligonucleotide
  Sense strand starting at position 2455 of SEQ ID NO: 915699
guagcuucccaggagaucu

SEQ ID NO: 1099517 - RNA, 19 nt, Artificial Sequence
  Description of Artificial Sequence: Synthetic oligonucleotide
  Antisense strand to SEQ ID NO: 1099516
agaucuccugggaagcuac

SEQ ID NO: 1099518 - RNA, 19 nt, Artificial Sequence
  Description of Artificial Sequence: Synthetic oligonucleotide
  Sense strand starting at position 2491 of SEQ ID NO: 915699
uguuuauuauggguuccca

SEQ ID NO: 1099519 - RNA, 19 nt, Artificial Sequence
  Description of Artificial Sequence: Synthetic oligonucleotide
  Antisense strand to SEQ ID NO: 1099518
ugggaacccauaauaaaca

SEQ ID NO: 1099520 - RNA, 19 nt, Artificial Sequence
  Description of Artificial Sequence: Synthetic oligonucleotide
  Sense strand starting at position 2520 of SEQ ID NO: 915699
ggaaaucaacuuuguucua

SEQ ID NO: 1099521 - RNA, 19 nt, Artificial Sequence
  Description of Artificial Sequence: Synthetic oligonucleotide
  Antisense strand to SEQ ID NO: 1099520
uagaacaaaguugauuucc

SEQ ID NO: 1099522 - RNA, 19 nt, Artificial Sequence
  Description of Artificial Sequence: Synthetic oligonucleotide
  Sense strand starting at position 2637 of SEQ ID NO: 915699
gaggucugaguuuacuacu

SEQ ID NO: 1099523 - RNA, 19 nt, Artificial Sequence
  Description of Artificial Sequence: Synthetic oligonucleotide
  Antisense strand to SEQ ID NO: 1099522
aguaguaaacucagaccuc

SEQ ID NO: 1099524 - RNA, 19 nt, Artificial Sequence
  Description of Artificial Sequence: Synthetic oligonucleotide
  Sense strand starting at position 2812 of SEQ ID NO: 915699
ugugaaaucccuuguucug

SEQ ID NO: 1099525 - RNA, 19 nt, Artificial Sequence
  Description of Artificial Sequence: Synthetic oligonucleotide
  Antisense strand to SEQ ID NO: 1099524
cagaacaagggauuucaca

SEQ ID NO: 1099526 - RNA, 19 nt, Artificial Sequence
  Description of Artificial Sequence: Synthetic oligonucleotide
  Sense strand starting at position 3093 of SEQ ID NO: 915699
gcugcauugggcuugcuau

SEQ ID NO: 1099527 - RNA, 19 nt, Artificial Sequence
  Description of Artificial Sequence: Synthetic oligonucleotide
  Antisense strand to SEQ ID NO: 1099526
auagcaagcccaaugcagc

SEQ ID NO: 1099528 - RNA, 19 nt, Artificial Sequence
  Description of Artificial Sequence: Synthetic oligonucleotide
  Sense strand starting at position 3146 of SEQ ID NO: 915699
auagaaugcuuucuuagac

SEQ ID NO: 1099529 - RNA, 19 nt, Artificial Sequence
  Description of Artificial Sequence: Synthetic oligonucleotide
  Antisense strand to SEQ ID NO: 1099528
gucuaagaaagcauucuau

SEQ ID NO: 1099530 - RNA, 19 nt, Artificial Sequence
  Description of Artificial Sequence: Synthetic oligonucleotide
  Sense strand starting at position 3280 of SEQ ID NO: 915699
cuagcaucaugcucagaaa

SEQ ID NO: 1099531 - RNA, 19 nt, Artificial Sequence
  Description of Artificial Sequence: Synthetic oligonucleotide
  Antisense strand to SEQ ID NO: 1099530
uuucugagcaugaugcuag

SEQ ID NO: 1099532 - RNA, 19 nt, Artificial Sequence
  Description of Artificial Sequence: Synthetic oligonucleotide
  Sense strand starting at position 3433 of SEQ ID NO: 915699
cccuuuguaugacugugaa

SEQ ID NO: 1099533 - RNA, 19 nt, Artificial Sequence
  Description of Artificial Sequence: Synthetic oligonucleotide
  Antisense strand to SEQ ID NO: 1099532
uucacagucauacaaaggg

SEQ ID NO: 1099534 - RNA, 19 nt, Artificial Sequence
  Description of Artificial Sequence: Synthetic oligonucleotide
  Sense strand starting at position 3684 of SEQ ID NO: 915699
ggccucuuugcccauauua

SEQ ID NO: 1099535 - RNA, 19 nt, Artificial Sequence
  Description of Artificial Sequence: Synthetic oligonucleotide
  Antisense strand to SEQ ID NO: 1099534
uaauaugggcaaagaggcc

SEQ ID NO: 1099536 - RNA, 19 nt, Artificial Sequence
  Description of Artificial Sequence: Synthetic oligonucleotide
  Sense strand starting at position 3719 of SEQ ID NO: 915699
ugcagagagaugugaucau

SEQ ID NO: 1099537 - RNA, 19 nt, Artificial Sequence
  Description of Artificial Sequence: Synthetic oligonucleotide
  Antisense strand to SEQ ID NO: 1099536
augaucacaucucucugca

SEQ ID NO: 1099538 - RNA, 19 nt, Artificial Sequence
  Description of Artificial Sequence: Synthetic oligonucleotide
  Sense strand starting at position 3887 of SEQ ID NO: 915699
aaggcuccagagugagaaa

SEQ ID NO: 1099539 - RNA, 19 nt, Artificial Sequence
  Description of Artificial Sequence: Synthetic oligonucleotide
  Antisense strand to SEQ ID NO: 1099538
uuucucacucuggagccuu

SEQ ID NO: 1099540 - RNA, 19 nt, Artificial Sequence
  Description of Artificial Sequence: Synthetic oligonucleotide
  Sense strand starting at position 47 of SEQ ID NO: 915700
augaguaguauugaaagca

SEQ ID NO: 1099541 - RNA, 19 nt, Artificial Sequence
  Description of Artificial Sequence: Synthetic oligonucleotide
  Antisense strand to SEQ ID NO: 1099540
ugcuuucaauacuacucau

SEQ ID NO: 1099542 - RNA, 19 nt, Artificial Sequence
  Description of Artificial Sequence: Synthetic oligonucleotide
  Sense strand starting at position 95 of SEQ ID NO: 915700
cgaauuaguaucugggugu

SEQ ID NO: 1099543 - RNA, 19 nt, Artificial Sequence
  Description of Artificial Sequence: Synthetic oligonucleotide
  Antisense strand to SEQ ID NO: 1099542
acacccagauacuaauucg

SEQ ID NO: 1099544 - RNA, 19 nt, Artificial Sequence
  Description of Artificial Sequence: Synthetic oligonucleotide
  Sense strand starting at position 98 of SEQ ID NO: 915700
auuaguaucuggguguaca

SEQ ID NO: 1099545 - RNA, 19 nt, Artificial Sequence
  Description of Artificial Sequence: Synthetic oligonucleotide
  Antisense strand to SEQ ID NO: 1099544
uguacacccagauacuaau

SEQ ID NO: 1099546 - RNA, 19 nt, Artificial Sequence
  Description of Artificial Sequence: Synthetic oligonucleotide
  Sense strand starting at position 99 of SEQ ID NO: 915700
uuaguaucuggguguacau

SEQ ID NO: 1099547 - RNA, 19 nt, Artificial Sequence
  Description of Artificial Sequence: Synthetic oligonucleotide
  Antisense strand to SEQ ID NO: 1099546
auguacacccagauacuaa

SEQ ID NO: 1099548 - RNA, 19 nt, Artificial Sequence
  Description of Artificial Sequence: Synthetic oligonucleotide
  Sense strand starting at position 101 of SEQ ID NO: 915700
aguaucuggguguacauua

SEQ ID NO: 1099549 - RNA, 19 nt, Artificial Sequence
  Description of Artificial Sequence: Synthetic oligonucleotide
  Antisense strand to SEQ ID NO: 1099548
uaauguacacccagauacu

SEQ ID NO: 1099550 - RNA, 19 nt, Artificial Sequence
  Description of Artificial Sequence: Synthetic oligonucleotide
  Sense strand starting at position 106 of SEQ ID NO: 915700
cuggguguacauuauaauc

SEQ ID NO: 1099551 - RNA, 19 nt, Artificial Sequence
  Description of Artificial Sequence: Synthetic oligonucleotide
  Antisense strand to SEQ ID NO: 1099550
gauuauaauguacacccag

SEQ ID NO: 1099552 - RNA, 19 nt, Artificial Sequence
  Description of Artificial Sequence: Synthetic oligonucleotide
  Sense strand starting at position 180 of SEQ ID NO: 915700
aaguuuguccuccaaggca

SEQ ID NO: 1099553 - RNA, 19 nt, Artificial Sequence
  Description of Artificial Sequence: Synthetic oligonucleotide
  Antisense strand to SEQ ID NO: 1099552
ugccuuggaggacaaacuu

SEQ ID NO: 1099554 - RNA, 19 nt, Artificial Sequence
  Description of Artificial Sequence: Synthetic oligonucleotide
  Sense strand starting at position 244 of SEQ ID NO: 915700
ugucuuaaaugagucaauu

SEQ ID NO: 1099555 - RNA, 19 nt, Artificial Sequence
  Description of Artificial Sequence: Synthetic oligonucleotide
  Antisense strand to SEQ ID NO: 1099554
aauugacucauuuaagaca

SEQ ID NO: 1099556 - RNA, 19 nt, Artificial Sequence
  Description of Artificial Sequence: Synthetic oligonucleotide
  Sense strand starting at position 291 of SEQ ID NO: 915700
acauguaacuuauugaagu

SEQ ID NO: 1099557 - RNA, 19 nt, Artificial Sequence
  Description of Artificial Sequence: Synthetic oligonucleotide
  Antisense strand to SEQ ID NO: 1099556
acuucaauaaguuacaugu

SEQ ID NO: 1099558 - RNA, 19 nt, Artificial Sequence
  Description of Artificial Sequence: Synthetic oligonucleotide
  Sense strand starting at position 346 of SEQ ID NO: 915700
augugcuacuagcuuuaga

SEQ ID NO: 1099559 - RNA, 19 nt, Artificial Sequence
  Description of Artificial Sequence: Synthetic oligonucleotide
  Antisense strand to SEQ ID NO: 1099558
ucuaaagcuaguagcacau

SEQ ID NO: 1099560 - RNA, 19 nt, Artificial Sequence
  Description of Artificial Sequence: Synthetic oligonucleotide
  Sense strand starting at position 349 of SEQ ID NO: 915700
ugcuacuagcuuuagaaac

SEQ ID NO: 1099561 - RNA, 19 nt, Artificial Sequence
  Description of Artificial Sequence: Synthetic oligonucleotide
  Antisense strand to SEQ ID NO: 1099560
guuucuaaagcuaguagca

SEQ ID NO: 1099562 - RNA, 19 nt, Artificial Sequence
  Description of Artificial Sequence: Synthetic oligonucleotide
  Sense strand starting at position 455 of SEQ ID NO: 915700
acuguugugccuuaacuuu

SEQ ID NO: 1099563 - RNA, 19 nt, Artificial Sequence
  Description of Artificial Sequence: Synthetic oligonucleotide
  Antisense strand to SEQ ID NO: 1099562
aaaguuaaggcacaacagu

SEQ ID NO: 1099564 - RNA, 19 nt, Artificial Sequence
  Description of Artificial Sequence: Synthetic oligonucleotide
  Sense strand starting at position 568 of SEQ ID NO: 915700
aaaguuuaccggcaucaca

SEQ ID NO: 1099565 - RNA, 19 nt, Artificial Sequence
  Description of Artificial Sequence: Synthetic oligonucleotide
  Antisense strand to SEQ ID NO: 1099564
ugugaugccgguaaacuuu

SEQ ID NO: 1099566 - RNA, 19 nt, Artificial Sequence
  Description of Artificial Sequence: Synthetic oligonucleotide
  Sense strand starting at position 588 of SEQ ID NO: 915700
gcccaaauuuaucacagag

SEQ ID NO: 1099567 - RNA, 19 nt, Artificial Sequence
  Description of Artificial Sequence: Synthetic oligonucleotide
  Antisense strand to SEQ ID NO: 1099566
cucugugauaaauuugggc

SEQ ID NO: 1099568 - RNA, 19 nt, Artificial Sequence
  Description of Artificial Sequence: Synthetic oligonucleotide
  Sense strand starting at position 685 of SEQ ID NO: 915700
ccggacuccuuccuagagu

SEQ ID NO: 1099569 - RNA, 19 nt, Artificial Sequence
  Description of Artificial Sequence: Synthetic oligonucleotide
  Antisense strand to SEQ ID NO: 1099568
acucuaggaaggaguccgg

SEQ ID NO: 1099570 - RNA, 19 nt, Artificial Sequence
  Description of Artificial Sequence: Synthetic oligonucleotide
  Sense strand starting at position 861 of SEQ ID NO: 915700
cauggaaccuguguaacaa

SEQ ID NO: 1099571 - RNA, 19 nt, Artificial Sequence
  Description of Artificial Sequence: Synthetic oligonucleotide
  Antisense strand to SEQ ID NO: 1099570
uuguuacacagguuccaug

SEQ ID NO: 1099572 - RNA, 19 nt, Artificial Sequence
  Description of Artificial Sequence: Synthetic oligonucleotide
  Sense strand starting at position 891 of SEQ ID NO: 915700
auaguaaucugcucucaga

SEQ ID NO: 1099573 - RNA, 19 nt, Artificial Sequence
  Description of Artificial Sequence: Synthetic oligonucleotide
  Antisense strand to SEQ ID NO: 1099572
ucugagagcagauuacuau

SEQ ID NO: 1099574 - RNA, 19 nt, Artificial Sequence
  Description of Artificial Sequence: Synthetic oligonucleotide
  Sense strand starting at position 1050 of SEQ ID NO: 915700
ggaacaaucgcucgaacua

SEQ ID NO: 1099575 - RNA, 19 nt, Artificial Sequence
  Description of Artificial Sequence: Synthetic oligonucleotide
  Antisense strand to SEQ ID NO: 1099574
uaguucgagcgauuguucc

SEQ ID NO: 1099576 - RNA, 19 nt, Artificial Sequence
  Description of Artificial Sequence: Synthetic oligonucleotide
  Sense strand starting at position 1051 of SEQ ID NO: 915700
gaacaaucgcucgaacuac

SEQ ID NO: 1099577 - RNA, 19 nt, Artificial Sequence
  Description of Artificial Sequence: Synthetic oligonucleotide
  Antisense strand to SEQ ID NO: 1099576
guaguucgagcgauuguuc

SEQ ID NO: 1099578 - RNA, 19 nt, Artificial Sequence
  Description of Artificial Sequence: Synthetic oligonucleotide
  Sense strand starting at position 1059 of SEQ ID NO: 915700
gcucgaacuaccgaguuua

SEQ ID NO: 1099579 - RNA, 19 nt, Artificial Sequence
  Description of Artificial Sequence: Synthetic oligonucleotide
  Antisense strand to SEQ ID NO: 1099578
uaaacucgguaguucgagc

SEQ ID NO: 1099580 - RNA, 19 nt, Artificial Sequence
  Description of Artificial Sequence: Synthetic oligonucleotide
  Sense strand starting at position 1173 of SEQ ID NO: 915700
auagcuuucccaugacagu

SEQ ID NO: 1099581 - RNA, 19 nt, Artificial Sequence
  Description of Artificial Sequence: Synthetic oligonucleotide
  Antisense strand to SEQ ID NO: 1099580
acugucaugggaaagcuau

SEQ ID NO: 1099582 - RNA, 19 nt, Artificial Sequence
  Description of Artificial Sequence: Synthetic oligonucleotide
  Sense strand starting at position 1240 of SEQ ID NO: 915700
agguguuugcuccaaggag

SEQ ID NO: 1099583 - RNA, 19 nt, Artificial Sequence
  Description of Artificial Sequence: Synthetic oligonucleotide
  Antisense strand to SEQ ID NO: 1099582
cuccuuggagcaaacaccu

SEQ ID NO: 1099584 - RNA, 19 nt, Artificial Sequence
  Description of Artificial Sequence: Synthetic oligonucleotide
  Sense strand starting at position 2008 of SEQ ID NO: 915700
ggccgaguucggagagagu

SEQ ID NO: 1099585 - RNA, 19 nt, Artificial Sequence
  Description of Artificial Sequence: Synthetic oligonucleotide
  Antisense strand to SEQ ID NO: 1099584
acucucuccgaacucggcc

SEQ ID NO: 1099586 - RNA, 19 nt, Artificial Sequence
  Description of Artificial Sequence: Synthetic oligonucleotide
  Sense strand starting at position 2111 of SEQ ID NO: 915700
gggugucccaccugggaau

SEQ ID NO: 1099587 - RNA, 19 nt, Artificial Sequence
  Description of Artificial Sequence: Synthetic oligonucleotide
  Antisense strand to SEQ ID NO: 1099586
auucccaggugggacaccc

SEQ ID NO: 1099588 - RNA, 19 nt, Artificial Sequence
  Description of Artificial Sequence: Synthetic oligonucleotide
  Sense strand starting at position 2368 of SEQ ID NO: 915700
guuucugcgauccauagaa

SEQ ID NO: 1099589 - RNA, 19 nt, Artificial Sequence
  Description of Artificial Sequence: Synthetic oligonucleotide
  Antisense strand to SEQ ID NO: 1099588
uucuauggaucgcagaaac

SEQ ID NO: 1099590 - RNA, 19 nt, Artificial Sequence
  Description of Artificial Sequence: Synthetic oligonucleotide
  Sense strand starting at position 2457 of SEQ ID NO: 915700
ugaauuuccugccaagaac

SEQ ID NO: 1099591 - RNA, 19 nt, Artificial Sequence
  Description of Artificial Sequence: Synthetic oligonucleotide
  Antisense strand to SEQ ID NO: 1099590
guucuuggcaggaaauuca

SEQ ID NO: 1099592 - RNA, 19 nt, Artificial Sequence
  Description of Artificial Sequence: Synthetic oligonucleotide
  Sense strand starting at position 2523 of SEQ ID NO: 915700
cuguuuaacuggucauaaa

SEQ ID NO: 1099593 - RNA, 19 nt, Artificial Sequence
  Description of Artificial Sequence: Synthetic oligonucleotide
  Antisense strand to SEQ ID NO: 1099592
uuuaugaccaguuaaacag

SEQ ID NO: 1099594 - RNA, 19 nt, Artificial Sequence
  Description of Artificial Sequence: Synthetic oligonucleotide
  Sense strand starting at position 2524 of SEQ ID NO: 915700
uguuuaacuggucauaaac

SEQ ID NO: 1099595 - RNA, 19 nt, Artificial Sequence
  Description of Artificial Sequence: Synthetic oligonucleotide
  Antisense strand to SEQ ID NO: 1099594
guuuaugaccaguuaaaca

SEQ ID NO: 1099596 - RNA, 19 nt, Artificial Sequence
  Description of Artificial Sequence: Synthetic oligonucleotide
  Sense strand starting at position 2534 of SEQ ID NO: 915700
gucauaaacgucuagagaa

SEQ ID NO: 1099597 - RNA, 19 nt, Artificial Sequence
  Description of Artificial Sequence: Synthetic oligonucleotide
  Antisense strand to SEQ ID NO: 1099596
uucucuagacguuuaugac

SEQ ID NO: 1099598 - RNA, 19 nt, Artificial Sequence
  Description of Artificial Sequence: Synthetic oligonucleotide
  Sense strand starting at position 2673 of SEQ ID NO: 915700
gccagaaugcuugguucca

SEQ ID NO: 1099599 - RNA, 19 nt, Artificial Sequence
  Description of Artificial Sequence: Synthetic oligonucleotide
  Antisense strand to SEQ ID NO: 1099598
uggaaccaagcauucuggc

SEQ ID NO: 1099600 - RNA, 19 nt, Artificial Sequence
  Description of Artificial Sequence: Synthetic oligonucleotide
  Sense strand starting at position 2674 of SEQ ID NO: 915700
ccagaaugcuugguuccaa

SEQ ID NO: 1099601 - RNA, 19 nt, Artificial Sequence
  Description of Artificial Sequence: Synthetic oligonucleotide
  Antisense strand to SEQ ID NO: 1099600
uuggaaccaagcauucugg

SEQ ID NO: 1099602 - RNA, 19 nt, Artificial Sequence
  Description of Artificial Sequence: Synthetic oligonucleotide
  Sense strand starting at position 2675 of SEQ ID NO: 915700
cagaaugcuugguuccaau

SEQ ID NO: 1099603 - RNA, 19 nt, Artificial Sequence
  Description of Artificial Sequence: Synthetic oligonucleotide
  Antisense strand to SEQ ID NO: 1099602
auuggaaccaagcauucug

SEQ ID NO: 1099604 - RNA, 19 nt, Artificial Sequence
  Description of Artificial Sequence: Synthetic oligonucleotide
  Sense strand starting at position 2731 of SEQ ID NO: 915700
auacuuaaucuguacuugu

SEQ ID NO: 1099605 - RNA, 19 nt, Artificial Sequence
  Description of Artificial Sequence: Synthetic oligonucleotide
  Antisense strand to SEQ ID NO: 1099604
acaaguacagauuaaguau

SEQ ID NO: 1099606 - RNA, 19 nt, Artificial Sequence
  Description of Artificial Sequence: Synthetic oligonucleotide
  Sense strand starting at position 3177 of SEQ ID NO: 915700
ggacauaguaugggcucaa

SEQ ID NO: 1099607 - RNA, 19 nt, Artificial Sequence
  Description of Artificial Sequence: Synthetic oligonucleotide
  Antisense strand to SEQ ID NO: 1099606
uugagcccauacuaugucc

SEQ ID NO: 1099608 - RNA, 19 nt, Artificial Sequence
  Description of Artificial Sequence: Synthetic oligonucleotide
  Sense strand starting at position 3178 of SEQ ID NO: 915700
gacauaguaugggcucaau

SEQ ID NO: 1099609 - RNA, 19 nt, Artificial Sequence
  Description of Artificial Sequence: Synthetic oligonucleotide
  Antisense strand to SEQ ID NO: 1099608
auugagcccauacuauguc

SEQ ID NO: 1099610 - RNA, 19 nt, Artificial Sequence
  Description of Artificial Sequence: Synthetic oligonucleotide
  Sense strand starting at position 3265 of SEQ ID NO: 915700
agaagaauuuaucacuggu

SEQ ID NO: 1099611 - RNA, 19 nt, Artificial Sequence
  Description of Artificial Sequence: Synthetic oligonucleotide
  Antisense strand to SEQ ID NO: 1099610
accagugauaaauucuucu

SEQ ID NO: 1099612 - RNA, 19 nt, Artificial Sequence
  Description of Artificial Sequence: Synthetic oligonucleotide
  Sense strand starting at position 3405 of SEQ ID NO: 915700
guguaucccucccuagaag

SEQ ID NO: 1099613 - RNA, 19 nt, Artificial Sequence
  Description of Artificial Sequence: Synthetic oligonucleotide
  Antisense strand to SEQ ID NO: 1099612
cuucuagggagggauacac

SEQ ID NO: 1099614 - RNA, 19 nt, Artificial Sequence
  Description of Artificial Sequence: Synthetic oligonucleotide
  Sense strand starting at position 3440 of SEQ ID NO: 915700
aaucucuuaugggauggaa

SEQ ID NO: 1099615 - RNA, 19 nt, Artificial Sequence
  Description of Artificial Sequence: Synthetic oligonucleotide
  Antisense strand to SEQ ID NO: 1099614
uuccaucccauaagagauu

SEQ ID NO: 1099616 - RNA, 19 nt, Artificial Sequence
  Description of Artificial Sequence: Synthetic oligonucleotide
  Sense strand starting at position 3681 of SEQ ID NO: 915700
aagauuagguguucugugu

SEQ ID NO: 1099617 - RNA, 19 nt, Artificial Sequence
  Description of Artificial Sequence: Synthetic oligonucleotide
  Antisense strand to SEQ ID NO: 1099616
acacagaacaccuaaucuu

SEQ ID NO: 1099618 - RNA, 19 nt, Artificial Sequence
  Description of Artificial Sequence: Synthetic oligonucleotide
  Sense strand starting at position 3886 of SEQ ID NO: 915700
ugacgagaaggaugcauau

SEQ ID NO: 1099619 - RNA, 19 nt, Artificial Sequence
  Description of Artificial Sequence: Synthetic oligonucleotide
  Antisense strand to SEQ ID NO: 1099618
auaugcauccuucucguca

SEQ ID NO: 1099620 - RNA, 19 nt, Artificial Sequence
  Description of Artificial Sequence: Synthetic oligonucleotide
  Sense strand starting at position 100 of SEQ ID NO: 915701
aaagaauugugccaggaaa

SEQ ID NO: 1099621 - RNA, 19 nt, Artificial Sequence
  Description of Artificial Sequence: Synthetic oligonucleotide
  Antisense strand to SEQ ID NO: 1099620
uuuccuggcacaauucuuu

SEQ ID NO: 1099622 - RNA, 19 nt, Artificial Sequence
  Description of Artificial Sequence: Synthetic oligonucleotide
  Sense strand starting at position 489 of SEQ ID NO: 915701
ggagaaguagugugaacug

SEQ ID NO: 1099623 - RNA, 19 nt, Artificial Sequence
  Description of Artificial Sequence: Synthetic oligonucleotide
  Antisense strand to SEQ ID NO: 1099622
caguucacacuacuucucc

SEQ ID NO: 1099624 - RNA, 19 nt, Artificial Sequence
  Description of Artificial Sequence: Synthetic oligonucleotide
  Sense strand starting at position 610 of SEQ ID NO: 915701
ugaauacucuaggaauaug

SEQ ID NO: 1099625 - RNA, 19 nt, Artificial Sequence
  Description of Artificial Sequence: Synthetic oligonucleotide
  Antisense strand to SEQ ID NO: 1099624
cauauuccuagaguauuca

SEQ ID NO: 1099626 - RNA, 19 nt, Artificial Sequence
  Description of Artificial Sequence: Synthetic oligonucleotide
  Sense strand starting at position 638 of SEQ ID NO: 915701
uacuaagcuuguguuuaag

SEQ ID NO: 1099627 - RNA, 19 nt, Artificial Sequence
  Description of Artificial Sequence: Synthetic oligonucleotide
  Antisense strand to SEQ ID NO: 1099626
cuuaaacacaagcuuagua

SEQ ID NO: 1099628 - RNA, 19 nt, Artificial Sequence
  Description of Artificial Sequence: Synthetic oligonucleotide
  Sense strand starting at position 641 of SEQ ID NO: 915701
uaagcuuguguuuaagcaa

SEQ ID NO: 1099629 - RNA, 19 nt, Artificial Sequence
  Description of Artificial Sequence: Synthetic oligonucleotide
  Antisense strand to SEQ ID NO: 1099628
uugcuuaaacacaagcuua

SEQ ID NO: 1099630 - RNA, 19 nt, Artificial Sequence
  Description of Artificial Sequence: Synthetic oligonucleotide
  Sense strand starting at position 765 of SEQ ID NO: 915701
aguugacuuuaaguaagau

SEQ ID NO: 1099631 - RNA, 19 nt, Artificial Sequence
  Description of Artificial Sequence: Synthetic oligonucleotide
  Antisense strand to SEQ ID NO: 1099630
aucuuacuuaaagucaacu

SEQ ID NO: 1099632 - RNA, 19 nt, Artificial Sequence
  Description of Artificial Sequence: Synthetic oligonucleotide
  Sense strand starting at position 1206 of SEQ ID NO: 915701
gggacuuacgaguggaaca

SEQ ID NO: 1099633 - RNA, 19 nt, Artificial Sequence
  Description of Artificial Sequence: Synthetic oligonucleotide
  Antisense strand to SEQ ID NO: 1099632
uguuccacucguaaguccc

SEQ ID NO: 1099634 - RNA, 19 nt, Artificial Sequence
  Description of Artificial Sequence: Synthetic oligonucleotide
  Sense strand starting at position 1207 of SEQ ID NO: 915701
ggacuuacgaguggaacau

SEQ ID NO: 1099635 - RNA, 19 nt, Artificial Sequence
  Description of Artificial Sequence: Synthetic oligonucleotide
  Antisense strand to SEQ ID NO: 1099634
auguuccacucguaagucc

SEQ ID NO: 1099636 - RNA, 19 nt, Artificial Sequence
  Description of Artificial Sequence: Synthetic oligonucleotide
  Sense strand starting at position 1988 of SEQ ID NO: 915701
uauaguaugcgucacaacu

SEQ ID NO: 1099637 - RNA, 19 nt, Artificial Sequence
  Description of Artificial Sequence: Synthetic oligonucleotide
  Antisense strand to SEQ ID NO: 1099636
aguugugacgcauacuaua

SEQ ID NO: 1099638 - RNA, 19 nt, Artificial Sequence
  Description of Artificial Sequence: Synthetic oligonucleotide
  Sense strand starting at position 2009 of SEQ ID NO: 915701
cgcagacuccggcaguauu

SEQ ID NO: 1099639 - RNA, 19 nt, Artificial Sequence
  Description of Artificial Sequence: Synthetic oligonucleotide
  Antisense strand to SEQ ID NO: 1099638
aauacugccggagucugcg

SEQ ID NO: 1099640 - RNA, 19 nt, Artificial Sequence
  Description of Artificial Sequence: Synthetic oligonucleotide
  Sense strand starting at position 2406 of SEQ ID NO: 915701
ggcugagggcgcaguauua

SEQ ID NO: 1099641 - RNA, 19 nt, Artificial Sequence
  Description of Artificial Sequence: Synthetic oligonucleotide
  Antisense strand to SEQ ID NO: 1099640
uaauacugcgcccucagcc

SEQ ID NO: 1099642 - RNA, 19 nt, Artificial Sequence
  Description of Artificial Sequence: Synthetic oligonucleotide
  Sense strand starting at position 2616 of SEQ ID NO: 915701
cucguaauccucuaguaau

SEQ ID NO: 1099643 - RNA, 19 nt, Artificial Sequence
  Description of Artificial Sequence: Synthetic oligonucleotide
  Antisense strand to SEQ ID NO: 1099642
auuacuagaggauuacgag

SEQ ID NO: 1099644 - RNA, 19 nt, Artificial Sequence
  Description of Artificial Sequence: Synthetic oligonucleotide
  Sense strand starting at position 2629 of SEQ ID NO: 915701
aguaauagguaacuuguau

SEQ ID NO: 1099645 - RNA, 19 nt, Artificial Sequence
  Description of Artificial Sequence: Synthetic oligonucleotide
  Antisense strand to SEQ ID NO: 1099644
auacaaguuaccuauuacu

SEQ ID NO: 1099646 - RNA, 19 nt, Artificial Sequence
  Description of Artificial Sequence: Synthetic oligonucleotide
  Sense strand starting at position 2635 of SEQ ID NO: 915701
agguaacuuguauaguaag

SEQ ID NO: 1099647 - RNA, 19 nt, Artificial Sequence
  Description of Artificial Sequence: Synthetic oligonucleotide
  Antisense strand to SEQ ID NO: 1099646
cuuacuauacaaguuaccu

SEQ ID NO: 1099648 - RNA, 19 nt, Artificial Sequence
  Description of Artificial Sequence: Synthetic oligonucleotide
  Sense strand starting at position 2664 of SEQ ID NO: 915701
gguguagauuucuagaguc

SEQ ID NO: 1099649 - RNA, 19 nt, Artificial Sequence
  Description of Artificial Sequence: Synthetic oligonucleotide
  Antisense strand to SEQ ID NO: 1099648
gacucuagaaaucuacacc

SEQ ID NO: 1099650 - RNA, 19 nt, Artificial Sequence
  Description of Artificial Sequence: Synthetic oligonucleotide
  Sense strand starting at position 2690 of SEQ ID NO: 915701
gagaguuuaucuucccguc

SEQ ID NO: 1099651 - RNA, 19 nt, Artificial Sequence
  Description of Artificial Sequence: Synthetic oligonucleotide
  Antisense strand to SEQ ID NO: 1099650
gacgggaagauaaacucuc

SEQ ID NO: 1099652 - RNA, 19 nt, Artificial Sequence
  Description of Artificial Sequence: Synthetic oligonucleotide
  Sense strand starting at position 2881 of SEQ ID NO: 915701
auccuugauaacgguggaa

SEQ ID NO: 1099653 - RNA, 19 nt, Artificial Sequence
  Description of Artificial Sequence: Synthetic oligonucleotide
  Antisense strand to SEQ ID NO: 1099652
uuccaccguuaucaaggau

SEQ ID NO: 1099654 - RNA, 19 nt, Artificial Sequence
  Description of Artificial Sequence: Synthetic oligonucleotide
  Sense strand starting at position 2883 of SEQ ID NO: 915701
ccuugauaacgguggaaca

SEQ ID NO: 1099655 - RNA, 19 nt, Artificial Sequence
  Description of Artificial Sequence: Synthetic oligonucleotide
  Antisense strand to SEQ ID NO: 1099654
uguuccaccguuaucaagg

SEQ ID NO: 1099656 - RNA, 19 nt, Artificial Sequence
  Description of Artificial Sequence: Synthetic oligonucleotide
  Sense strand starting at position 2899 of SEQ ID NO: 915701
acagauuucucugacgcag

SEQ ID NO: 1099657 - RNA, 19 nt, Artificial Sequence
  Description of Artificial Sequence: Synthetic oligonucleotide
  Antisense strand to SEQ ID NO: 1099656
cugcgucagagaaaucugu

SEQ ID NO: 1099658 - RNA, 19 nt, Artificial Sequence
  Description of Artificial Sequence: Synthetic oligonucleotide
  Sense strand starting at position 2933 of SEQ ID NO: 915701
aagggugcuucugccagaa

SEQ ID NO: 1099659 - RNA, 19 nt, Artificial Sequence
  Description of Artificial Sequence: Synthetic oligonucleotide
  Antisense strand to SEQ ID NO: 1099658
uucuggcagaagcacccuu

SEQ ID NO: 1099660 - RNA, 19 nt, Artificial Sequence
  Description of Artificial Sequence: Synthetic oligonucleotide
  Sense strand starting at position 2937 of SEQ ID NO: 915701
gugcuucugccagaaauac

SEQ ID NO: 1099661 - RNA, 19 nt, Artificial Sequence
  Description of Artificial Sequence: Synthetic oligonucleotide
  Antisense strand to SEQ ID NO: 1099660
guauuucuggcagaagcac

SEQ ID NO: 1099662 - RNA, 19 nt, Artificial Sequence
  Description of Artificial Sequence: Synthetic oligonucleotide
  Sense strand starting at position 3037 of SEQ ID NO: 915701
ugacaaagcuaccuaugau

SEQ ID NO: 1099663 - RNA, 19 nt, Artificial Sequence
  Description of Artificial Sequence: Synthetic oligonucleotide
  Antisense strand to SEQ ID NO: 1099662
aucauagguagcuuuguca

SEQ ID NO: 1099664 - RNA, 19 nt, Artificial Sequence
  Description of Artificial Sequence: Synthetic oligonucleotide
  Sense strand starting at position 3176 of SEQ ID NO: 915701
ggguguauccuacaugugu

SEQ ID NO: 1099665 - RNA, 19 nt, Artificial Sequence
  Description of Artificial Sequence: Synthetic oligonucleotide
  Antisense strand to SEQ ID NO: 1099664
acacauguaggauacaccc

SEQ ID NO: 1099666 - RNA, 19 nt, Artificial Sequence
  Description of Artificial Sequence: Synthetic oligonucleotide
  Sense strand starting at position 3206 of SEQ ID NO: 915701
uuaaauugucuugaccaug

SEQ ID NO: 1099667 - RNA, 19 nt, Artificial Sequence
  Description of Artificial Sequence: Synthetic oligonucleotide
  Antisense strand to SEQ ID NO: 1099666
cauggucaagacaauuuaa

SEQ ID NO: 1099668 - RNA, 19 nt, Artificial Sequence
  Description of Artificial Sequence: Synthetic oligonucleotide
  Sense strand starting at position 3211 of SEQ ID NO: 915701
uugucuugaccauguuaag

SEQ ID NO: 1099669 - RNA, 19 nt, Artificial Sequence
  Description of Artificial Sequence: Synthetic oligonucleotide
  Antisense strand to SEQ ID NO: 1099668
cuuaacauggucaagacaa

SEQ ID NO: 1099670 - RNA, 19 nt, Artificial Sequence
  Description of Artificial Sequence: Synthetic oligonucleotide
  Sense strand starting at position 3321 of SEQ ID NO: 915701
uccugauccugagaugaau

SEQ ID NO: 1099671 - RNA, 19 nt, Artificial Sequence
  Description of Artificial Sequence: Synthetic oligonucleotide
  Antisense strand to SEQ ID NO: 1099670
auucaucucaggaucagga

SEQ ID NO: 1099672 - RNA, 19 nt, Artificial Sequence
  Description of Artificial Sequence: Synthetic oligonucleotide
  Sense strand starting at position 3334 of SEQ ID NO: 915701
augaauucucaggguucuu

SEQ ID NO: 1099673 - RNA, 19 nt, Artificial Sequence
  Description of Artificial Sequence: Synthetic oligonucleotide
  Antisense strand to SEQ ID NO: 1099672
aagaacccugagaauucau

SEQ ID NO: 1099674 - RNA, 19 nt, Artificial Sequence
  Description of Artificial Sequence: Synthetic oligonucleotide
  Sense strand starting at position 3384 of SEQ ID NO: 915701
uuuagugaagcccaaggau

SEQ ID NO: 1099675 - RNA, 19 nt, Artificial Sequence
  Description of Artificial Sequence: Synthetic oligonucleotide
  Antisense strand to SEQ ID NO: 1099674
auccuugggcuucacuaaa

SEQ ID NO: 1099676 - RNA, 19 nt, Artificial Sequence
  Description of Artificial Sequence: Synthetic oligonucleotide
  Sense strand starting at position 3406 of SEQ ID NO: 915701
uuauguuucgaguaaaugg

SEQ ID NO: 1099677 - RNA, 19 nt, Artificial Sequence
  Description of Artificial Sequence: Synthetic oligonucleotide
  Antisense strand to SEQ ID NO: 1099676
ccauuuacucgaaacauaa

SEQ ID NO: 1099678 - RNA, 19 nt, Artificial Sequence
  Description of Artificial Sequence: Synthetic oligonucleotide
  Sense strand starting at position 3414 of SEQ ID NO: 915701
cgaguaaauggaugcauag

SEQ ID NO: 1099679 - RNA, 19 nt, Artificial Sequence
  Description of Artificial Sequence: Synthetic oligonucleotide
  Antisense strand to SEQ ID NO: 1099678
cuaugcauccauuuacucg

SEQ ID NO: 1099680 - RNA, 19 nt, Artificial Sequence
  Description of Artificial Sequence: Synthetic oligonucleotide
  Sense strand starting at position 3556 of SEQ ID NO: 915701
acggucuacucaguaguau

SEQ ID NO: 1099681 - RNA, 19 nt, Artificial Sequence
  Description of Artificial Sequence: Synthetic oligonucleotide
  Antisense strand to SEQ ID NO: 1099680
auacuacugaguagaccgu

SEQ ID NO: 1099682 - RNA, 19 nt, Artificial Sequence
  Description of Artificial Sequence: Synthetic oligonucleotide
  Sense strand starting at position 3557 of SEQ ID NO: 915701
cggucuacucaguaguaug

SEQ ID NO: 1099683 - RNA, 19 nt, Artificial Sequence
  Description of Artificial Sequence: Synthetic oligonucleotide
  Antisense strand to SEQ ID NO: 1099682
cauacuacugaguagaccg

SEQ ID NO: 1099684 - RNA, 19 nt, Artificial Sequence
  Description of Artificial Sequence: Synthetic oligonucleotide
  Sense strand starting at position 3565 of SEQ ID NO: 915701
ucaguaguauggucugauu

SEQ ID NO: 1099685 - RNA, 19 nt, Artificial Sequence
  Description of Artificial Sequence: Synthetic oligonucleotide
  Antisense strand to SEQ ID NO: 1099684
aaucagaccauacuacuga

SEQ ID NO: 1099686 - RNA, 19 nt, Artificial Sequence
  Description of Artificial Sequence: Synthetic oligonucleotide
  Sense strand starting at position 3567 of SEQ ID NO: 915701
aguaguauggucugauuac

SEQ ID NO: 1099687 - RNA, 19 nt, Artificial Sequence
  Description of Artificial Sequence: Synthetic oligonucleotide
  Antisense strand to SEQ ID NO: 1099686
guaaucagaccauacuacu

SEQ ID NO: 1099688 - RNA, 19 nt, Artificial Sequence
  Description of Artificial Sequence: Synthetic oligonucleotide
  Sense strand starting at position 3573 of SEQ ID NO: 915701
auggucugauuaccauaau

SEQ ID NO: 1099689 - RNA, 19 nt, Artificial Sequence
  Description of Artificial Sequence: Synthetic oligonucleotide
  Antisense strand to SEQ ID NO: 1099688
auuaugguaaucagaccau

SEQ ID NO: 1099690 - RNA, 19 nt, Artificial Sequence
  Description of Artificial Sequence: Synthetic oligonucleotide
  Sense strand starting at position 3933 of SEQ ID NO: 915701
aaggauagaugaucguuaa

SEQ ID NO: 1099691 - RNA, 19 nt, Artificial Sequence
  Description of Artificial Sequence: Synthetic oligonucleotide
  Antisense strand to SEQ ID NO: 1099690
uuaacgaucaucuauccuu

SEQ ID NO: 1099692 - RNA, 19 nt, Artificial Sequence
  Description of Artificial Sequence: Synthetic oligonucleotide
  Sense strand starting at position 3934 of SEQ ID NO: 915701
aggauagaugaucguuaaa

SEQ ID NO: 1099693 - RNA, 19 nt, Artificial Sequence
  Description of Artificial Sequence: Synthetic oligonucleotide
  Antisense strand to SEQ ID NO: 1099692
uuuaacgaucaucuauccu

SEQ ID NO: 1099694 - RNA, 19 nt, Artificial Sequence
  Description of Artificial Sequence: Synthetic oligonucleotide
  Sense strand starting at position 3952 of SEQ ID NO: 915701
aaacuaggauucucgguua

SEQ ID NO: 1099695 - RNA, 19 nt, Artificial Sequence
  Description of Artificial Sequence: Synthetic oligonucleotide
  Antisense strand to SEQ ID NO: 1099694
uaaccgagaauccuaguuu

SEQ ID NO: 1099696 - RNA, 19 nt, Artificial Sequence
  Description of Artificial Sequence: Synthetic oligonucleotide
  Sense strand starting at position 3957 of SEQ ID NO: 915701
aggauucucgguuaccgaa

SEQ ID NO: 1099697 - RNA, 19 nt, Artificial Sequence
  Description of Artificial Sequence: Synthetic oligonucleotide
  Antisense strand to SEQ ID NO: 1099696
uucgguaaccgagaauccu

SEQ ID NO: 1099698 - RNA, 19 nt, Artificial Sequence
  Description of Artificial Sequence: Synthetic oligonucleotide
  Sense strand starting at position 3967 of SEQ ID NO: 915701
guuaccgaacgucagauua

SEQ ID NO: 1099699 - RNA, 19 nt, Artificial Sequence
  Description of Artificial Sequence: Synthetic oligonucleotide
  Antisense strand to SEQ ID NO: 1099698
uaaucugacguucgguaac

SEQ ID NO: 1099700 - RNA, 19 nt, Artificial Sequence
  Description of Artificial Sequence: Synthetic oligonucleotide
  Sense strand starting at position 94 of SEQ ID NO: 915702
uuggaaguguuagugaauc

SEQ ID NO: 1099701 - RNA, 19 nt, Artificial Sequence
  Description of Artificial Sequence: Synthetic oligonucleotide
  Antisense strand to SEQ ID NO: 1099700
gauucacuaacacuuccaa

SEQ ID NO: 1099702 - RNA, 19 nt, Artificial Sequence
  Description of Artificial Sequence: Synthetic oligonucleotide
  Sense strand starting at position 96 of SEQ ID NO: 915702
ggaaguguuagugaaucac

SEQ ID NO: 1099703 - RNA, 19 nt, Artificial Sequence
  Description of Artificial Sequence: Synthetic oligonucleotide
  Antisense strand to SEQ ID NO: 1099702
gugauucacuaacacuucc

SEQ ID NO: 1099704 - RNA, 19 nt, Artificial Sequence
  Description of Artificial Sequence: Synthetic oligonucleotide
  Sense strand starting at position 120 of SEQ ID NO: 915702
ugagguuggucuuagggaa

SEQ ID NO: 1099705 - RNA, 19 nt, Artificial Sequence
  Description of Artificial Sequence: Synthetic oligonucleotide
  Antisense strand to SEQ ID NO: 1099704
uucccuaagaccaaccuca

SEQ ID NO: 1099706 - RNA, 19 nt, Artificial Sequence
  Description of Artificial Sequence: Synthetic oligonucleotide
  Sense strand starting at position 173 of SEQ ID NO: 915702
acagccuaaugcuugacaa

SEQ ID NO: 1099707 - RNA, 19 nt, Artificial Sequence
  Description of Artificial Sequence: Synthetic oligonucleotide
  Antisense strand to SEQ ID NO: 1099706
uugucaagcauuaggcugu

SEQ ID NO: 1099708 - RNA, 19 nt, Artificial Sequence
  Description of Artificial Sequence: Synthetic oligonucleotide
  Sense strand starting at position 175 of SEQ ID NO: 915702
agccuaaugcuugacaaag

SEQ ID NO: 1099709 - RNA, 19 nt, Artificial Sequence
  Description of Artificial Sequence: Synthetic oligonucleotide
  Antisense strand to SEQ ID NO: 1099708
cuuugucaagcauuaggcu

SEQ ID NO: 1099710 - RNA, 19 nt, Artificial Sequence
  Description of Artificial Sequence: Synthetic oligonucleotide
  Sense strand starting at position 177 of SEQ ID NO: 915702
ccuaaugcuugacaaagca

SEQ ID NO: 1099711 - RNA, 19 nt, Artificial Sequence
  Description of Artificial Sequence: Synthetic oligonucleotide
  Antisense strand to SEQ ID NO: 1099710
ugcuuugucaagcauuagg

SEQ ID NO: 1099712 - RNA, 19 nt, Artificial Sequence
  Description of Artificial Sequence: Synthetic oligonucleotide
  Sense strand starting at position 310 of SEQ ID NO: 915702
gucaacucucccuguaaca

SEQ ID NO: 1099713 - RNA, 19 nt, Artificial Sequence
  Description of Artificial Sequence: Synthetic oligonucleotide
  Antisense strand to SEQ ID NO: 1099712
uguuacagggagaguugac

SEQ ID NO: 1099714 - RNA, 19 nt, Artificial Sequence
  Description of Artificial Sequence: Synthetic oligonucleotide
  Sense strand starting at position 457 of SEQ ID NO: 915702
gucccaaucccugaacagu

SEQ ID NO: 1099715 - RNA, 19 nt, Artificial Sequence
  Description of Artificial Sequence: Synthetic oligonucleotide
  Antisense strand to SEQ ID NO: 1099714
acuguucagggauugggac

SEQ ID NO: 1099716 - RNA, 19 nt, Artificial Sequence
  Description of Artificial Sequence: Synthetic oligonucleotide
  Sense strand starting at position 1646 of SEQ ID NO: 915702
cgagcaagacucuaacaac

SEQ ID NO: 1099717 - RNA, 19 nt, Artificial Sequence
  Description of Artificial Sequence: Synthetic oligonucleotide
  Antisense strand to SEQ ID NO: 1099716
guuguuagagucuugcucg

SEQ ID NO: 1099718 - RNA, 19 nt, Artificial Sequence
  Description of Artificial Sequence: Synthetic oligonucleotide
  Sense strand starting at position 1962 of SEQ ID NO: 915702
ugugacugugacugaauga

SEQ ID NO: 1099719 - RNA, 19 nt, Artificial Sequence
  Description of Artificial Sequence: Synthetic oligonucleotide
  Antisense strand to SEQ ID NO: 1099718
ucauucagucacagucaca

SEQ ID NO: 1099720 - RNA, 19 nt, Artificial Sequence
  Description of Artificial Sequence: Synthetic oligonucleotide
  Sense strand starting at position 2315 of SEQ ID NO: 915702
ccaccaaccucagagaguu

SEQ ID NO: 1099721 - RNA, 19 nt, Artificial Sequence
  Description of Artificial Sequence: Synthetic oligonucleotide
  Antisense strand to SEQ ID NO: 1099720
aacucucugagguuggugg

SEQ ID NO: 1099722 - RNA, 19 nt, Artificial Sequence
  Description of Artificial Sequence: Synthetic oligonucleotide
  Sense strand starting at position 2379 of SEQ ID NO: 915702
ccugguguggugugaaauu

SEQ ID NO: 1099723 - RNA, 19 nt, Artificial Sequence
  Description of Artificial Sequence: Synthetic oligonucleotide
  Antisense strand to SEQ ID NO: 1099722
aauuucacaccacaccagg

SEQ ID NO: 1099724 - RNA, 19 nt, Artificial Sequence
  Description of Artificial Sequence: Synthetic oligonucleotide
  Sense strand starting at position 2408 of SEQ ID NO: 915702
cacuguuaucugcaagaga

SEQ ID NO: 1099725 - RNA, 19 nt, Artificial Sequence
  Description of Artificial Sequence: Synthetic oligonucleotide
  Antisense strand to SEQ ID NO: 1099724
ucucuugcagauaacagug

SEQ ID NO: 1099726 - RNA, 19 nt, Artificial Sequence
  Description of Artificial Sequence: Synthetic oligonucleotide
  Sense strand starting at position 2411 of SEQ ID NO: 915702
uguuaucugcaagagauac

SEQ ID NO: 1099727 - RNA, 19 nt, Artificial Sequence
  Description of Artificial Sequence: Synthetic oligonucleotide
  Antisense strand to SEQ ID NO: 1099726
guaucucuugcagauaaca

SEQ ID NO: 1099728 - RNA, 19 nt, Artificial Sequence
  Description of Artificial Sequence: Synthetic oligonucleotide
  Sense strand starting at position 2482 of SEQ ID NO: 915702
cccacaauagugugucauu

SEQ ID NO: 1099729 - RNA, 19 nt, Artificial Sequence
  Description of Artificial Sequence: Synthetic oligonucleotide
  Antisense strand to SEQ ID NO: 1099728
aaugacacacuauuguggg

SEQ ID NO: 1099730 - RNA, 19 nt, Artificial Sequence
  Description of Artificial Sequence: Synthetic oligonucleotide
  Sense strand starting at position 2483 of SEQ ID NO: 915702
ccacaauagugugucauuu

SEQ ID NO: 1099731 - RNA, 19 nt, Artificial Sequence
  Description of Artificial Sequence: Synthetic oligonucleotide
  Antisense strand to SEQ ID NO: 1099730
aaaugacacacuauugugg

SEQ ID NO: 1099732 - RNA, 19 nt, Artificial Sequence
  Description of Artificial Sequence: Synthetic oligonucleotide
  Sense strand starting at position 2485 of SEQ ID NO: 915702
acaauagugugucauuugu

SEQ ID NO: 1099733 - RNA, 19 nt, Artificial Sequence
  Description of Artificial Sequence: Synthetic oligonucleotide
  Antisense strand to SEQ ID NO: 1099732
acaaaugacacacuauugu

SEQ ID NO: 1099734 - RNA, 19 nt, Artificial Sequence
  Description of Artificial Sequence: Synthetic oligonucleotide
  Sense strand starting at position 2491 of SEQ ID NO: 915702
gugugucauuuguaaugag

SEQ ID NO: 1099735 - RNA, 19 nt, Artificial Sequence
  Description of Artificial Sequence: Synthetic oligonucleotide
  Antisense strand to SEQ ID NO: 1099734
cucauuacaaaugacacac

SEQ ID NO: 1099736 - RNA, 19 nt, Artificial Sequence
  Description of Artificial Sequence: Synthetic oligonucleotide
  Sense strand starting at position 2494 of SEQ ID NO: 915702
ugucauuuguaaugagucu

SEQ ID NO: 1099737 - RNA, 19 nt, Artificial Sequence
  Description of Artificial Sequence: Synthetic oligonucleotide
  Antisense strand to SEQ ID NO: 1099736
agacucauuacaaaugaca

SEQ ID NO: 1099738 - RNA, 19 nt, Artificial Sequence
  Description of Artificial Sequence: Synthetic oligonucleotide
  Sense strand starting at position 2806 of SEQ ID NO: 915702
ccuaaugagucuugaugac

SEQ ID NO: 1099739 - RNA, 19 nt, Artificial Sequence
  Description of Artificial Sequence: Synthetic oligonucleotide
  Antisense strand to SEQ ID NO: 1099738
gucaucaagacucauuagg

SEQ ID NO: 1099740 - RNA, 19 nt, Artificial Sequence
  Description of Artificial Sequence: Synthetic oligonucleotide
  Sense strand starting at position 2812 of SEQ ID NO: 915702
gagucuugaugaccgcaua

SEQ ID NO: 1099741 - RNA, 19 nt, Artificial Sequence
  Description of Artificial Sequence: Synthetic oligonucleotide
  Antisense strand to SEQ ID NO: 1099740
uaugcggucaucaagacuc

SEQ ID NO: 1099742 - RNA, 19 nt, Artificial Sequence
  Description of Artificial Sequence: Synthetic oligonucleotide
  Sense strand starting at position 2815 of SEQ ID NO: 915702
ucuugaugaccgcauagga

SEQ ID NO: 1099743 - RNA, 19 nt, Artificial Sequence
  Description of Artificial Sequence: Synthetic oligonucleotide
  Antisense strand to SEQ ID NO: 1099742
uccuaugcggucaucaaga

SEQ ID NO: 1099744 - RNA, 19 nt, Artificial Sequence
  Description of Artificial Sequence: Synthetic oligonucleotide
  Sense strand starting at position 2828 of SEQ ID NO: 915702
auaggaguuugccaaggga

SEQ ID NO: 1099745 - RNA, 19 nt, Artificial Sequence
  Description of Artificial Sequence: Synthetic oligonucleotide
  Antisense strand to SEQ ID NO: 1099744
ucccuuggcaaacuccuau

SEQ ID NO: 1099746 - RNA, 19 nt, Artificial Sequence
  Description of Artificial Sequence: Synthetic oligonucleotide
  Sense strand starting at position 2831 of SEQ ID NO: 915702
ggaguuugccaagggaaau

SEQ ID NO: 1099747 - RNA, 19 nt, Artificial Sequence
  Description of Artificial Sequence: Synthetic oligonucleotide
  Antisense strand to SEQ ID NO: 1099746
auuucccuuggcaaacucc

SEQ ID NO: 1099748 - RNA, 19 nt, Artificial Sequence
  Description of Artificial Sequence: Synthetic oligonucleotide
  Sense strand starting at position 2832 of SEQ ID NO: 915702
gaguuugccaagggaaaug

SEQ ID NO: 1099749 - RNA, 19 nt, Artificial Sequence
  Description of Artificial Sequence: Synthetic oligonucleotide
  Antisense strand to SEQ ID NO: 1099748
cauuucccuuggcaaacuc

SEQ ID NO: 1099750 - RNA, 19 nt, Artificial Sequence
  Description of Artificial Sequence: Synthetic oligonucleotide
  Sense strand starting at position 2971 of SEQ ID NO: 915702
uuggcaccagucuggaaau

SEQ ID NO: 1099751 - RNA, 19 nt, Artificial Sequence
  Description of Artificial Sequence: Synthetic oligonucleotide
  Antisense strand to SEQ ID NO: 1099750
auuuccagacuggugccaa

SEQ ID NO: 1099752 - RNA, 19 nt, Artificial Sequence
  Description of Artificial Sequence: Synthetic oligonucleotide
  Sense strand starting at position 2983 of SEQ ID NO: 915702
uggaaauggucuuugccaa

SEQ ID NO: 1099753 - RNA, 19 nt, Artificial Sequence
  Description of Artificial Sequence: Synthetic oligonucleotide
  Antisense strand to SEQ ID NO: 1099752
uuggcaaagaccauuucca

SEQ ID NO: 1099754 - RNA, 19 nt, Artificial Sequence
  Description of Artificial Sequence: Synthetic oligonucleotide
  Sense strand starting at position 2984 of SEQ ID NO: 915702
ggaaauggucuuugccaag

SEQ ID NO: 1099755 - RNA, 19 nt, Artificial Sequence
  Description of Artificial Sequence: Synthetic oligonucleotide
  Antisense strand to SEQ ID NO: 1099754
cuuggcaaagaccauuucc

SEQ ID NO: 1099756 - RNA, 19 nt, Artificial Sequence
  Description of Artificial Sequence: Synthetic oligonucleotide
  Sense strand starting at position 3046 of SEQ ID NO: 915702
agagaaguuugugagcuua

SEQ ID NO: 1099757 - RNA, 19 nt, Artificial Sequence
  Description of Artificial Sequence: Synthetic oligonucleotide
  Antisense strand to SEQ ID NO: 1099756
uaagcucacaaacuucucu

SEQ ID NO: 1099758 - RNA, 19 nt, Artificial Sequence
  Description of Artificial Sequence: Synthetic oligonucleotide
  Sense strand starting at position 3048 of SEQ ID NO: 915702
agaaguuugugagcuuaag

SEQ ID NO: 1099759 - RNA, 19 nt, Artificial Sequence
  Description of Artificial Sequence: Synthetic oligonucleotide
  Antisense strand to SEQ ID NO: 1099758
cuuaagcucacaaacuucu

SEQ ID NO: 1099760 - RNA, 19 nt, Artificial Sequence
  Description of Artificial Sequence: Synthetic oligonucleotide
  Sense strand starting at position 3380 of SEQ ID NO: 915702
aaagcagauucgguuacuu

SEQ ID NO: 1099761 - RNA, 19 nt, Artificial Sequence
  Description of Artificial Sequence: Synthetic oligonucleotide
  Antisense strand to SEQ ID NO: 1099760
aaguaaccgaaucugcuuu

SEQ ID NO: 1099762 - RNA, 19 nt, Artificial Sequence
  Description of Artificial Sequence: Synthetic oligonucleotide
  Sense strand starting at position 3382 of SEQ ID NO: 915702
agcagauucgguuacuuua

SEQ ID NO: 1099763 - RNA, 19 nt, Artificial Sequence
  Description of Artificial Sequence: Synthetic oligonucleotide
  Antisense strand to SEQ ID NO: 1099762
uaaaguaaccgaaucugcu

SEQ ID NO: 1099764 - RNA, 19 nt, Artificial Sequence
  Description of Artificial Sequence: Synthetic oligonucleotide
  Sense strand starting at position 3465 of SEQ ID NO: 915702
gcacauggaguuuaaugau

SEQ ID NO: 1099765 - RNA, 19 nt, Artificial Sequence
  Description of Artificial Sequence: Synthetic oligonucleotide
  Antisense strand to SEQ ID NO: 1099764
aucauuaaacuccaugugc

SEQ ID NO: 1099766 - RNA, 19 nt, Artificial Sequence
  Description of Artificial Sequence: Synthetic oligonucleotide
  Sense strand starting at position 3471 of SEQ ID NO: 915702
ggaguuuaaugauaggcau

SEQ ID NO: 1099767 - RNA, 19 nt, Artificial Sequence
  Description of Artificial Sequence: Synthetic oligonucleotide
  Antisense strand to SEQ ID NO: 1099766
augccuaucauuaaacucc

SEQ ID NO: 1099768 - RNA, 19 nt, Artificial Sequence
  Description of Artificial Sequence: Synthetic oligonucleotide
  Sense strand starting at position 3473 of SEQ ID NO: 915702
aguuuaaugauaggcauga

SEQ ID NO: 1099769 - RNA, 19 nt, Artificial Sequence
  Description of Artificial Sequence: Synthetic oligonucleotide
  Antisense strand to SEQ ID NO: 1099768
ucaugccuaucauuaaacu

SEQ ID NO: 1099770 - RNA, 19 nt, Artificial Sequence
  Description of Artificial Sequence: Synthetic oligonucleotide
  Sense strand starting at position 3503 of SEQ ID NO: 915702
ggacuuagguuugcaguua

SEQ ID NO: 1099771 - RNA, 19 nt, Artificial Sequence
  Description of Artificial Sequence: Synthetic oligonucleotide
  Antisense strand to SEQ ID NO: 1099770
uaacugcaaaccuaagucc

SEQ ID NO: 1099772 - RNA, 19 nt, Artificial Sequence
  Description of Artificial Sequence: Synthetic oligonucleotide
  Sense strand starting at position 3508 of SEQ ID NO: 915702
uagguuugcaguuaaggau

SEQ ID NO: 1099773 - RNA, 19 nt, Artificial Sequence
  Description of Artificial Sequence: Synthetic oligonucleotide
  Antisense strand to SEQ ID NO: 1099772
auccuuaacugcaaaccua

SEQ ID NO: 1099774 - RNA, 19 nt, Artificial Sequence
  Description of Artificial Sequence: Synthetic oligonucleotide
  Sense strand starting at position 3514 of SEQ ID NO: 915702
ugcaguuaaggaugucagu

SEQ ID NO: 1099775 - RNA, 19 nt, Artificial Sequence
  Description of Artificial Sequence: Synthetic oligonucleotide
  Antisense strand to SEQ ID NO: 1099774
acugacauccuuaacugca

SEQ ID NO: 1099776 - RNA, 19 nt, Artificial Sequence
  Description of Artificial Sequence: Synthetic oligonucleotide
  Sense strand starting at position 3521 of SEQ ID NO: 915702
aaggaugucaguuguggca

SEQ ID NO: 1099777 - RNA, 19 nt, Artificial Sequence
  Description of Artificial Sequence: Synthetic oligonucleotide
  Antisense strand to SEQ ID NO: 1099776
ugccacaacugacauccuu

SEQ ID NO: 1099778 - RNA, 19 nt, Artificial Sequence
  Description of Artificial Sequence: Synthetic oligonucleotide
  Sense strand starting at position 3611 of SEQ ID NO: 915702
agaaaugacucaugaauca

SEQ ID NO: 1099779 - RNA, 19 nt, Artificial Sequence
  Description of Artificial Sequence: Synthetic oligonucleotide
  Antisense strand to SEQ ID NO: 1099778
ugauucaugagucauuucu

SEQ ID NO: 1099780 - RNA, 19 nt, Artificial Sequence
  Description of Artificial Sequence: Synthetic oligonucleotide
  Sense strand starting at position 196 of SEQ ID NO: 915703
ggaguuagauaauagaaag

SEQ ID NO: 1099781 - RNA, 19 nt, Artificial Sequence
  Description of Artificial Sequence: Synthetic oligonucleotide
  Antisense strand to SEQ ID NO: 1099780
cuuucuauuaucuaacucc

SEQ ID NO: 1099782 - RNA, 19 nt, Artificial Sequence
  Description of Artificial Sequence: Synthetic oligonucleotide
  Sense strand starting at position 396 of SEQ ID NO: 915703
acagaugaucaaugcuuga

SEQ ID NO: 1099783 - RNA, 19 nt, Artificial Sequence
  Description of Artificial Sequence: Synthetic oligonucleotide
  Antisense strand to SEQ ID NO: 1099782
ucaagcauugaucaucugu

SEQ ID NO: 1099784 - RNA, 19 nt, Artificial Sequence
  Description of Artificial Sequence: Synthetic oligonucleotide
  Sense strand starting at position 399 of SEQ ID NO: 915703
gaugaucaaugcuugaggu

SEQ ID NO: 1099785 - RNA, 19 nt, Artificial Sequence
  Description of Artificial Sequence: Synthetic oligonucleotide
  Antisense strand to SEQ ID NO: 1099784
accucaagcauugaucauc

SEQ ID NO: 1099786 - RNA, 19 nt, Artificial Sequence
  Description of Artificial Sequence: Synthetic oligonucleotide
  Sense strand starting at position 950 of SEQ ID NO: 915703
gaucaaacaguuuguugaa

SEQ ID NO: 1099787 - RNA, 19 nt, Artificial Sequence
  Description of Artificial Sequence: Synthetic oligonucleotide
  Antisense strand to SEQ ID NO: 1099786
uucaacaaacuguuugauc

SEQ ID NO: 1099788 - RNA, 19 nt, Artificial Sequence
  Description of Artificial Sequence: Synthetic oligonucleotide
  Sense strand starting at position 951 of SEQ ID NO: 915703
aucaaacaguuuguugaau

SEQ ID NO: 1099789 - RNA, 19 nt, Artificial Sequence
  Description of Artificial Sequence: Synthetic oligonucleotide
  Antisense strand to SEQ ID NO: 1099788
auucaacaaacuguuugau

SEQ ID NO: 1099790 - RNA, 19 nt, Artificial Sequence
  Description of Artificial Sequence: Synthetic oligonucleotide
  Sense strand starting at position 952 of SEQ ID NO: 915703
ucaaacaguuuguugaaua

SEQ ID NO: 1099791 - RNA, 19 nt, Artificial Sequence
  Description of Artificial Sequence: Synthetic oligonucleotide
  Antisense strand to SEQ ID NO: 1099790
uauucaacaaacuguuuga

SEQ ID NO: 1099792 - RNA, 19 nt, Artificial Sequence
  Description of Artificial Sequence: Synthetic oligonucleotide
  Sense strand starting at position 957 of SEQ ID NO: 915703
caguuuguugaauaaguuu

SEQ ID NO: 1099793 - RNA, 19 nt, Artificial Sequence
  Description of Artificial Sequence: Synthetic oligonucleotide
  Antisense strand to SEQ ID NO: 1099792
aaacuuauucaacaaacug

SEQ ID NO: 1099794 - RNA, 19 nt, Artificial Sequence
  Description of Artificial Sequence: Synthetic oligonucleotide
  Sense strand starting at position 963 of SEQ ID NO: 915703
guugaauaaguuuauuccu

SEQ ID NO: 1099795 - RNA, 19 nt, Artificial Sequence
  Description of Artificial Sequence: Synthetic oligonucleotide
  Antisense strand to SEQ ID NO: 1099794
aggaauaaacuuauucaac

SEQ ID NO: 1099796 - RNA, 19 nt, Artificial Sequence
  Description of Artificial Sequence: Synthetic oligonucleotide
  Sense strand starting at position 972 of SEQ ID NO: 915703
guuuauuccuguucugaau

SEQ ID NO: 1099797 - RNA, 19 nt, Artificial Sequence
  Description of Artificial Sequence: Synthetic oligonucleotide
  Antisense strand to SEQ ID NO: 1099796
auucagaacaggaauaaac

SEQ ID NO: 1099798 - RNA, 19 nt, Artificial Sequence
  Description of Artificial Sequence: Synthetic oligonucleotide
  Sense strand starting at position 1005 of SEQ ID NO: 915703
cauuguuugguccauugau

SEQ ID NO: 1099799 - RNA, 19 nt, Artificial Sequence
  Description of Artificial Sequence: Synthetic oligonucleotide
  Antisense strand to SEQ ID NO: 1099798
aucaauggaccaaacaaug

SEQ ID NO: 1099800 - RNA, 19 nt, Artificial Sequence
  Description of Artificial Sequence: Synthetic oligonucleotide
  Sense strand starting at position 1174 of SEQ ID NO: 915703
cuccauguugcugagaaau

SEQ ID NO: 1099801 - RNA, 19 nt, Artificial Sequence
  Description of Artificial Sequence: Synthetic oligonucleotide
  Antisense strand to SEQ ID NO: 1099800
auuucucagcaacauggag

SEQ ID NO: 1099802 - RNA, 19 nt, Artificial Sequence
  Description of Artificial Sequence: Synthetic oligonucleotide
  Sense strand starting at position 1217 of SEQ ID NO: 915703
uuccaugugccagagauac

SEQ ID NO: 1099803 - RNA, 19 nt, Artificial Sequence
  Description of Artificial Sequence: Synthetic oligonucleotide
  Antisense strand to SEQ ID NO: 1099802
guaucucuggcacauggaa

SEQ ID NO: 1099804 - RNA, 19 nt, Artificial Sequence
  Description of Artificial Sequence: Synthetic oligonucleotide
  Sense strand starting at position 1281 of SEQ ID NO: 915703
aagucaguugcauauaugu

SEQ ID NO: 1099805 - RNA, 19 nt, Artificial Sequence
  Description of Artificial Sequence: Synthetic oligonucleotide
  Antisense strand to SEQ ID NO: 1099804
acauauaugcaacugacuu

SEQ ID NO: 1099806 - RNA, 19 nt, Artificial Sequence
  Description of Artificial Sequence: Synthetic oligonucleotide
  Sense strand starting at position 1283 of SEQ ID NO: 915703
gucaguugcauauauguau

SEQ ID NO: 1099807 - RNA, 19 nt, Artificial Sequence
  Description of Artificial Sequence: Synthetic oligonucleotide
  Antisense strand to SEQ ID NO: 1099806
auacauauaugcaacugac

SEQ ID NO: 1099808 - RNA, 19 nt, Artificial Sequence
  Description of Artificial Sequence: Synthetic oligonucleotide
  Sense strand starting at position 1377 of SEQ ID NO: 915703
cuccaaacuuaguuuaguu

SEQ ID NO: 1099809 - RNA, 19 nt, Artificial Sequence
  Description of Artificial Sequence: Synthetic oligonucleotide
  Antisense strand to SEQ ID NO: 1099808
aacuaaacuaaguuuggag

SEQ ID NO: 1099810 - RNA, 19 nt, Artificial Sequence
  Description of Artificial Sequence: Synthetic oligonucleotide
  Sense strand starting at position 1385 of SEQ ID NO: 915703
uuaguuuaguuccugacaa

SEQ ID NO: 1099811 - RNA, 19 nt, Artificial Sequence
  Description of Artificial Sequence: Synthetic oligonucleotide
  Antisense strand to SEQ ID NO: 1099810
uugucaggaacuaaacuaa

SEQ ID NO: 1099812 - RNA, 19 nt, Artificial Sequence
  Description of Artificial Sequence: Synthetic oligonucleotide
  Sense strand starting at position 1387 of SEQ ID NO: 915703
aguuuaguuccugacaaca

SEQ ID NO: 1099813 - RNA, 19 nt, Artificial Sequence
  Description of Artificial Sequence: Synthetic oligonucleotide
  Antisense strand to SEQ ID NO: 1099812
uguugucaggaacuaaacu

SEQ ID NO: 1099814 - RNA, 19 nt, Artificial Sequence
  Description of Artificial Sequence: Synthetic oligonucleotide
  Sense strand starting at position 2093 of SEQ ID NO: 915703
agaaaugcggcugagaaga

SEQ ID NO: 1099815 - RNA, 19 nt, Artificial Sequence
  Description of Artificial Sequence: Synthetic oligonucleotide
  Antisense strand to SEQ ID NO: 1099814
ucuucucagccgcauuucu

SEQ ID NO: 1099816 - RNA, 19 nt, Artificial Sequence
  Description of Artificial Sequence: Synthetic oligonucleotide
  Sense strand starting at position 2156 of SEQ ID NO: 915703
ccaggaggcuucucugaga

SEQ ID NO: 1099817 - RNA, 19 nt, Artificial Sequence
  Description of Artificial Sequence: Synthetic oligonucleotide
  Antisense strand to SEQ ID NO: 1099816
ucucagagaagccuccugg

SEQ ID NO: 1099818 - RNA, 19 nt, Artificial Sequence
  Description of Artificial Sequence: Synthetic oligonucleotide
  Sense strand starting at position 2285 of SEQ ID NO: 915703
uuucuuugacacuggucau

SEQ ID NO: 1099819 - RNA, 19 nt, Artificial Sequence
  Description of Artificial Sequence: Synthetic oligonucleotide
  Antisense strand to SEQ ID NO: 1099818
augaccagugucaaagaaa

SEQ ID NO: 1099820 - RNA, 19 nt, Artificial Sequence
  Description of Artificial Sequence: Synthetic oligonucleotide
  Sense strand starting at position 2322 of SEQ ID NO: 915703
uauguccaugucuggaaga

SEQ ID NO: 1099821 - RNA, 19 nt, Artificial Sequence
  Description of Artificial Sequence: Synthetic oligonucleotide
  Antisense strand to SEQ ID NO: 1099820
ucuuccagacauggacaua

SEQ ID NO: 1099822 - RNA, 19 nt, Artificial Sequence
  Description of Artificial Sequence: Synthetic oligonucleotide
  Sense strand starting at position 2324 of SEQ ID NO: 915703
uguccaugucuggaagaug

SEQ ID NO: 1099823 - RNA, 19 nt, Artificial Sequence
  Description of Artificial Sequence: Synthetic oligonucleotide
  Antisense strand to SEQ ID NO: 1099822
caucuuccagacauggaca

SEQ ID NO: 1099824 - RNA, 19 nt, Artificial Sequence
  Description of Artificial Sequence: Synthetic oligonucleotide
  Sense strand starting at position 2404 of SEQ ID NO: 915703
ugcuuacuuccagaagcua

SEQ ID NO: 1099825 - RNA, 19 nt, Artificial Sequence
  Description of Artificial Sequence: Synthetic oligonucleotide
  Antisense strand to SEQ ID NO: 1099824
uagcuucuggaaguaagca

SEQ ID NO: 1099826 - RNA, 19 nt, Artificial Sequence
  Description of Artificial Sequence: Synthetic oligonucleotide
  Sense strand starting at position 2463 of SEQ ID NO: 915703
ccugcaggugagugauuua

SEQ ID NO: 1099827 - RNA, 19 nt, Artificial Sequence
  Description of Artificial Sequence: Synthetic oligonucleotide
  Antisense strand to SEQ ID NO: 1099826
uaaaucacucaccugcagg

SEQ ID NO: 1099828 - RNA, 19 nt, Artificial Sequence
  Description of Artificial Sequence: Synthetic oligonucleotide
  Sense strand starting at position 2473 of SEQ ID NO: 915703
agugauuuauuucgcauga

SEQ ID NO: 1099829 - RNA, 19 nt, Artificial Sequence
  Description of Artificial Sequence: Synthetic oligonucleotide
  Antisense strand to SEQ ID NO: 1099828
ucaugcgaaauaaaucacu

SEQ ID NO: 1099830 - RNA, 19 nt, Artificial Sequence
  Description of Artificial Sequence: Synthetic oligonucleotide
  Sense strand starting at position 2667 of SEQ ID NO: 915703
ugucuauaguagguguaua

SEQ ID NO: 1099831 - RNA, 19 nt, Artificial Sequence
  Description of Artificial Sequence: Synthetic oligonucleotide
  Antisense strand to SEQ ID NO: 1099830
uauacaccuacuauagaca

SEQ ID NO: 1099832 - RNA, 19 nt, Artificial Sequence
  Description of Artificial Sequence: Synthetic oligonucleotide
  Sense strand starting at position 2723 of SEQ ID NO: 915703
agcauacaauccguaauaa

SEQ ID NO: 1099833 - RNA, 19 nt, Artificial Sequence
  Description of Artificial Sequence: Synthetic oligonucleotide
  Antisense strand to SEQ ID NO: 1099832
uuauuacggauuguaugcu

SEQ ID NO: 1099834 - RNA, 19 nt, Artificial Sequence
  Description of Artificial Sequence: Synthetic oligonucleotide
  Sense strand starting at position 2724 of SEQ ID NO: 915703
gcauacaauccguaauaau

SEQ ID NO: 1099835 - RNA, 19 nt, Artificial Sequence
  Description of Artificial Sequence: Synthetic oligonucleotide
  Antisense strand to SEQ ID NO: 1099834
auuauuacggauuguaugc

SEQ ID NO: 1099836 - RNA, 19 nt, Artificial Sequence
  Description of Artificial Sequence: Synthetic oligonucleotide
  Sense strand starting at position 3045 of SEQ ID NO: 915703
gccuguguuugguuuauuu

SEQ ID NO: 1099837 - RNA, 19 nt, Artificial Sequence
  Description of Artificial Sequence: Synthetic oligonucleotide
  Antisense strand to SEQ ID NO: 1099836
aaauaaaccaaacacaggc

SEQ ID NO: 1099838 - RNA, 19 nt, Artificial Sequence
  Description of Artificial Sequence: Synthetic oligonucleotide
  Sense strand starting at position 3106 of SEQ ID NO: 915703
augaaagguucuccuucuu

SEQ ID NO: 1099839 - RNA, 19 nt, Artificial Sequence
  Description of Artificial Sequence: Synthetic oligonucleotide
  Antisense strand to SEQ ID NO: 1099838
aagaaggagaaccuuucau

SEQ ID NO: 1099840 - RNA, 19 nt, Artificial Sequence
  Description of Artificial Sequence: Synthetic oligonucleotide
  Sense strand starting at position 3329 of SEQ ID NO: 915703
agcaguauccaguaggauu

SEQ ID NO: 1099841 - RNA, 19 nt, Artificial Sequence
  Description of Artificial Sequence: Synthetic oligonucleotide
  Antisense strand to SEQ ID NO: 1099840
aauccuacuggauacugcu

SEQ ID NO: 1099842 - RNA, 19 nt, Artificial Sequence
  Description of Artificial Sequence: Synthetic oligonucleotide
  Sense strand starting at position 3337 of SEQ ID NO: 915703
ccaguaggauugcuagauu

SEQ ID NO: 1099843 - RNA, 19 nt, Artificial Sequence
  Description of Artificial Sequence: Synthetic oligonucleotide
  Antisense strand to SEQ ID NO: 1099842
aaucuagcaauccuacugg

SEQ ID NO: 1099844 - RNA, 19 nt, Artificial Sequence
  Description of Artificial Sequence: Synthetic oligonucleotide
  Sense strand starting at position 3340 of SEQ ID NO: 915703
guaggauugcuagauuaca

SEQ ID NO: 1099845 - RNA, 19 nt, Artificial Sequence
  Description of Artificial Sequence: Synthetic oligonucleotide
  Antisense strand to SEQ ID NO: 1099844
uguaaucuagcaauccuac

SEQ ID NO: 1099846 - RNA, 19 nt, Artificial Sequence
  Description of Artificial Sequence: Synthetic oligonucleotide
  Sense strand starting at position 3405 of SEQ ID NO: 915703
aauuguuugccauaguguu

SEQ ID NO: 1099847 - RNA, 19 nt, Artificial Sequence
  Description of Artificial Sequence: Synthetic oligonucleotide
  Antisense strand to SEQ ID NO: 1099846
aacacuauggcaaacaauu

SEQ ID NO: 1099848 - RNA, 19 nt, Artificial Sequence
  Description of Artificial Sequence: Synthetic oligonucleotide
  Sense strand starting at position 3409 of SEQ ID NO: 915703
guuugccauaguguuugua

SEQ ID NO: 1099849 - RNA, 19 nt, Artificial Sequence
  Description of Artificial Sequence: Synthetic oligonucleotide
  Antisense strand to SEQ ID NO: 1099848
uacaaacacuauggcaaac

SEQ ID NO: 1099850 - RNA, 19 nt, Artificial Sequence
  Description of Artificial Sequence: Synthetic oligonucleotide
  Sense strand starting at position 3433 of SEQ ID NO: 915703
uuccauucccauugacagu

SEQ ID NO: 1099851 - RNA, 19 nt, Artificial Sequence
  Description of Artificial Sequence: Synthetic oligonucleotide
  Antisense strand to SEQ ID NO: 1099850
acugucaaugggaauggaa

SEQ ID NO: 1099852 - RNA, 19 nt, Artificial Sequence
  Description of Artificial Sequence: Synthetic oligonucleotide
  Sense strand starting at position 3439 of SEQ ID NO: 915703
ucccauugacaguguauga

SEQ ID NO: 1099853 - RNA, 19 nt, Artificial Sequence
  Description of Artificial Sequence: Synthetic oligonucleotide
  Antisense strand to SEQ ID NO: 1099852
ucauacacugucaauggga

SEQ ID NO: 1099854 - RNA, 19 nt, Artificial Sequence
  Description of Artificial Sequence: Synthetic oligonucleotide
  Sense strand starting at position 3762 of SEQ ID NO: 915703
acuccaauucuguggguua

SEQ ID NO: 1099855 - RNA, 19 nt, Artificial Sequence
  Description of Artificial Sequence: Synthetic oligonucleotide
  Antisense strand to SEQ ID NO: 1099854
uaacccacagaauuggagu

SEQ ID NO: 1099856 - RNA, 19 nt, Artificial Sequence
  Description of Artificial Sequence: Synthetic oligonucleotide
  Sense strand starting at position 3774 of SEQ ID NO: 915703
uggguuaucucucuacuuc

SEQ ID NO: 1099857 - RNA, 19 nt, Artificial Sequence
  Description of Artificial Sequence: Synthetic oligonucleotide
  Antisense strand to SEQ ID NO: 1099856
gaaguagagagauaaccca

SEQ ID NO: 1099858 - RNA, 19 nt, Artificial Sequence
  Description of Artificial Sequence: Synthetic oligonucleotide
  Sense strand starting at position 3831 of SEQ ID NO: 915703
gugaucucauuuguccagu

SEQ ID NO: 1099859 - RNA, 19 nt, Artificial Sequence
  Description of Artificial Sequence: Synthetic oligonucleotide
  Antisense strand to SEQ ID NO: 1099858
acuggacaaaugagaucac

SEQ ID NO: 1099860 - RNA, 19 nt, Artificial Sequence
  Description of Artificial Sequence: Synthetic oligonucleotide
  Sense strand starting at position 139 of SEQ ID NO: 915704
ugaccuaauugguuuguua

SEQ ID NO: 1099861 - RNA, 19 nt, Artificial Sequence
  Description of Artificial Sequence: Synthetic oligonucleotide
  Antisense strand to SEQ ID NO: 1099860
uaacaaaccaauuagguca

SEQ ID NO: 1099862 - RNA, 19 nt, Artificial Sequence
  Description of Artificial Sequence: Synthetic oligonucleotide
  Sense strand starting at position 143 of SEQ ID NO: 915704
cuaauugguuuguuaucua

SEQ ID NO: 1099863 - RNA, 19 nt, Artificial Sequence
  Description of Artificial Sequence: Synthetic oligonucleotide
  Antisense strand to SEQ ID NO: 1099862
uagauaacaaaccaauuag

SEQ ID NO: 1099864 - RNA, 19 nt, Artificial Sequence
  Description of Artificial Sequence: Synthetic oligonucleotide
  Sense strand starting at position 146 of SEQ ID NO: 915704
auugguuuguuaucuauag

SEQ ID NO: 1099865 - RNA, 19 nt, Artificial Sequence
  Description of Artificial Sequence: Synthetic oligonucleotide
  Antisense strand to SEQ ID NO: 1099864
cuauagauaacaaaccaau

SEQ ID NO: 1099866 - RNA, 19 nt, Artificial Sequence
  Description of Artificial Sequence: Synthetic oligonucleotide
  Sense strand starting at position 147 of SEQ ID NO: 915704
uugguuuguuaucuauaga

SEQ ID NO: 1099867 - RNA, 19 nt, Artificial Sequence
  Description of Artificial Sequence: Synthetic oligonucleotide
  Antisense strand to SEQ ID NO: 1099866
ucuauagauaacaaaccaa

SEQ ID NO: 1099868 - RNA, 19 nt, Artificial Sequence
  Description of Artificial Sequence: Synthetic oligonucleotide
  Sense strand starting at position 150 of SEQ ID NO: 915704
guuuguuaucuauagauuc

SEQ ID NO: 1099869 - RNA, 19 nt, Artificial Sequence
  Description of Artificial Sequence: Synthetic oligonucleotide
  Antisense strand to SEQ ID NO: 1099868
gaaucuauagauaacaaac

SEQ ID NO: 1099870 - RNA, 19 nt, Artificial Sequence
  Description of Artificial Sequence: Synthetic oligonucleotide
  Sense strand starting at position 483 of SEQ ID NO: 915704
gaacaaguucccugugacu

SEQ ID NO: 1099871 - RNA, 19 nt, Artificial Sequence
  Description of Artificial Sequence: Synthetic oligonucleotide
  Antisense strand to SEQ ID NO: 1099870
agucacagggaacuuguuc

SEQ ID NO: 1099872 - RNA, 19 nt, Artificial Sequence
  Description of Artificial Sequence: Synthetic oligonucleotide
  Sense strand starting at position 583 of SEQ ID NO: 915704
uaaccagagggcugcuaau

SEQ ID NO: 1099873 - RNA, 19 nt, Artificial Sequence
  Description of Artificial Sequence: Synthetic oligonucleotide
  Antisense strand to SEQ ID NO: 1099872
auuagcagcccucugguua

SEQ ID NO: 1099874 - RNA, 19 nt, Artificial Sequence
  Description of Artificial Sequence: Synthetic oligonucleotide
  Sense strand starting at position 594 of SEQ ID NO: 915704
cugcuaauuuaucaggaaa

SEQ ID NO: 1099875 - RNA, 19 nt, Artificial Sequence
  Description of Artificial Sequence: Synthetic oligonucleotide
  Antisense strand to SEQ ID NO: 1099874
uuuccugauaaauuagcag

SEQ ID NO: 1099876 - RNA, 19 nt, Artificial Sequence
  Description of Artificial Sequence: Synthetic oligonucleotide
  Sense strand starting at position 757 of SEQ ID NO: 915704
ucaugagguugcuuuauga

SEQ ID NO: 1099877 - RNA, 19 nt, Artificial Sequence
  Description of Artificial Sequence: Synthetic oligonucleotide
  Antisense strand to SEQ ID NO: 1099876
ucauaaagcaaccucauga

SEQ ID NO: 1099878 - RNA, 19 nt, Artificial Sequence
  Description of Artificial Sequence: Synthetic oligonucleotide
  Sense strand starting at position 802 of SEQ ID NO: 915704
aggcuucuucgggagaaag

SEQ ID NO: 1099879 - RNA, 19 nt, Artificial Sequence
  Description of Artificial Sequence: Synthetic oligonucleotide
  Antisense strand to SEQ ID NO: 1099878
cuuucucccgaagaagccu

SEQ ID NO: 1099880 - RNA, 19 nt, Artificial Sequence
  Description of Artificial Sequence: Synthetic oligonucleotide
  Sense strand starting at position 804 of SEQ ID NO: 915704
gcuucuucgggagaaagga

SEQ ID NO: 1099881 - RNA, 19 nt, Artificial Sequence
  Description of Artificial Sequence: Synthetic oligonucleotide
  Antisense strand to SEQ ID NO: 1099880
uccuuucucccgaagaagc

SEQ ID NO: 1099882 - RNA, 19 nt, Artificial Sequence
  Description of Artificial Sequence: Synthetic oligonucleotide
  Sense strand starting at position 830 of SEQ ID NO: 915704
auuugcugccucugaauaa

SEQ ID NO: 1099883 - RNA, 19 nt, Artificial Sequence
  Description of Artificial Sequence: Synthetic oligonucleotide
  Antisense strand to SEQ ID NO: 1099882
uuauucagaggcagcaaau

SEQ ID NO: 1099884 - RNA, 19 nt, Artificial Sequence
  Description of Artificial Sequence: Synthetic oligonucleotide
  Sense strand starting at position 1015 of SEQ ID NO: 915704
uugcuacaugccuagacau

SEQ ID NO: 1099885 - RNA, 19 nt, Artificial Sequence
  Description of Artificial Sequence: Synthetic oligonucleotide
  Antisense strand to SEQ ID NO: 1099884
augucuaggcauguagcaa

SEQ ID NO: 1099886 - RNA, 19 nt, Artificial Sequence
  Description of Artificial Sequence: Synthetic oligonucleotide
  Sense strand starting at position 1017 of SEQ ID NO: 915704
gcuacaugccuagacaugu

SEQ ID NO: 1099887 - RNA, 19 nt, Artificial Sequence
  Description of Artificial Sequence: Synthetic oligonucleotide
  Antisense strand to SEQ ID NO: 1099886
acaugucuaggcauguagc

SEQ ID NO: 1099888 - RNA, 19 nt, Artificial Sequence
  Description of Artificial Sequence: Synthetic oligonucleotide
  Sense strand starting at position 1089 of SEQ ID NO: 915704
gaagauuaguuaucuagcu

SEQ ID NO: 1099889 - RNA, 19 nt, Artificial Sequence
  Description of Artificial Sequence: Synthetic oligonucleotide
  Antisense strand to SEQ ID NO: 1099888
agcuagauaacuaaucuuc

SEQ ID NO: 1099890 - RNA, 19 nt, Artificial Sequence
  Description of Artificial Sequence: Synthetic oligonucleotide
  Sense strand starting at position 1096 of SEQ ID NO: 915704
aguuaucuagcucaucaca

SEQ ID NO: 1099891 - RNA, 19 nt, Artificial Sequence
  Description of Artificial Sequence: Synthetic oligonucleotide
  Antisense strand to SEQ ID NO: 1099890
ugugaugagcuagauaacu

SEQ ID NO: 1099892 - RNA, 19 nt, Artificial Sequence
  Description of Artificial Sequence: Synthetic oligonucleotide
  Sense strand starting at position 1184 of SEQ ID NO: 915704
gccaacugagucuaguuua

SEQ ID NO: 1099893 - RNA, 19 nt, Artificial Sequence
  Description of Artificial Sequence: Synthetic oligonucleotide
  Antisense strand to SEQ ID NO: 1099892
uaaacuagacucaguuggc

SEQ ID NO: 1099894 - RNA, 19 nt, Artificial Sequence
  Description of Artificial Sequence: Synthetic oligonucleotide
  Sense strand starting at position 1187 of SEQ ID NO: 915704
aacugagucuaguuuagau

SEQ ID NO: 1099895 - RNA, 19 nt, Artificial Sequence
  Description of Artificial Sequence: Synthetic oligonucleotide
  Antisense strand to SEQ ID NO: 1099894
aucuaaacuagacucaguu

SEQ ID NO: 1099896 - RNA, 19 nt, Artificial Sequence
  Description of Artificial Sequence: Synthetic oligonucleotide
  Sense strand starting at position 1244 of SEQ ID NO: 915704
gguaggauuugcgucagga

SEQ ID NO: 1099897 - RNA, 19 nt, Artificial Sequence
  Description of Artificial Sequence: Synthetic oligonucleotide
  Antisense strand to SEQ ID NO: 1099896
uccugacgcaaauccuacc

SEQ ID NO: 1099898 - RNA, 19 nt, Artificial Sequence
  Description of Artificial Sequence: Synthetic oligonucleotide
  Sense strand starting at position 2047 of SEQ ID NO: 915704
uuagaauuccaaugcaguc

SEQ ID NO: 1099899 - RNA, 19 nt, Artificial Sequence
  Description of Artificial Sequence: Synthetic oligonucleotide
  Antisense strand to SEQ ID NO: 1099898
gacugcauuggaauucuaa

SEQ ID NO: 1099900 - RNA, 19 nt, Artificial Sequence
  Description of Artificial Sequence: Synthetic oligonucleotide
  Sense strand starting at position 2135 of SEQ ID NO: 915704
ggaccuagcuucuugaaau

SEQ ID NO: 1099901 - RNA, 19 nt, Artificial Sequence
  Description of Artificial Sequence: Synthetic oligonucleotide
  Antisense strand to SEQ ID NO: 1099900
auuucaagaagcuaggucc

SEQ ID NO: 1099902 - RNA, 19 nt, Artificial Sequence
  Description of Artificial Sequence: Synthetic oligonucleotide
  Sense strand starting at position 2154 of SEQ ID NO: 915704
gcagucugacgaggaagau

SEQ ID NO: 1099903 - RNA, 19 nt, Artificial Sequence
  Description of Artificial Sequence: Synthetic oligonucleotide
  Antisense strand to SEQ ID NO: 1099902
aucuuccucgucagacugc

SEQ ID NO: 1099904 - RNA, 19 nt, Artificial Sequence
  Description of Artificial Sequence: Synthetic oligonucleotide
  Sense strand starting at position 2163 of SEQ ID NO: 915704
cgaggaagauacucaguua

SEQ ID NO: 1099905 - RNA, 19 nt, Artificial Sequence
  Description of Artificial Sequence: Synthetic oligonucleotide
  Antisense strand to SEQ ID NO: 1099904
uaacugaguaucuuccucg

SEQ ID NO: 1099906 - RNA, 19 nt, Artificial Sequence
  Description of Artificial Sequence: Synthetic oligonucleotide
  Sense strand starting at position 2225 of SEQ ID NO: 915704
ugacauugugaaugguaaa

SEQ ID NO: 1099907 - RNA, 19 nt, Artificial Sequence
  Description of Artificial Sequence: Synthetic oligonucleotide
  Antisense strand to SEQ ID NO: 1099906
uuuaccauucacaauguca

SEQ ID NO: 1099908 - RNA, 19 nt, Artificial Sequence
  Description of Artificial Sequence: Synthetic oligonucleotide
  Sense strand starting at position 2441 of SEQ ID NO: 915704
aggugagaacauggaaguu

SEQ ID NO: 1099909 - RNA, 19 nt, Artificial Sequence
  Description of Artificial Sequence: Synthetic oligonucleotide
  Antisense strand to SEQ ID NO: 1099908
aacuuccauguucucaccu

SEQ ID NO: 1099910 - RNA, 19 nt, Artificial Sequence
  Description of Artificial Sequence: Synthetic oligonucleotide
  Sense strand starting at position 2463 of SEQ ID NO: 915704
agaugaugcuguuuaauua

SEQ ID NO: 1099911 - RNA, 19 nt, Artificial Sequence
  Description of Artificial Sequence: Synthetic oligonucleotide
  Antisense strand to SEQ ID NO: 1099910
uaauuaaacagcaucaucu

SEQ ID NO: 1099912 - RNA, 19 nt, Artificial Sequence
  Description of Artificial Sequence: Synthetic oligonucleotide
  Sense strand starting at position 2464 of SEQ ID NO: 915704
gaugaugcuguuuaauuau

SEQ ID NO: 1099913 - RNA, 19 nt, Artificial Sequence
  Description of Artificial Sequence: Synthetic oligonucleotide
  Antisense strand to SEQ ID NO: 1099912
auaauuaaacagcaucauc

SEQ ID NO: 1099914 - RNA, 19 nt, Artificial Sequence
  Description of Artificial Sequence: Synthetic oligonucleotide
  Sense strand starting at position 2650 of SEQ ID NO: 915704
cugcaugugccagauaaug

SEQ ID NO: 1099915 - RNA, 19 nt, Artificial Sequence
  Description of Artificial Sequence: Synthetic oligonucleotide
  Antisense strand to SEQ ID NO: 1099914
cauuaucuggcacaugcag

SEQ ID NO: 1099916 - RNA, 19 nt, Artificial Sequence
  Description of Artificial Sequence: Synthetic oligonucleotide
  Sense strand starting at position 3136 of SEQ ID NO: 915704
uaggaugacugagaaauca

SEQ ID NO: 1099917 - RNA, 19 nt, Artificial Sequence
  Description of Artificial Sequence: Synthetic oligonucleotide
  Antisense strand to SEQ ID NO: 1099916
ugauuucucagucauccua

SEQ ID NO: 1099918 - RNA, 19 nt, Artificial Sequence
  Description of Artificial Sequence: Synthetic oligonucleotide
  Sense strand starting at position 3183 of SEQ ID NO: 915704
ugguauuauuuguugcuca

SEQ ID NO: 1099919 - RNA, 19 nt, Artificial Sequence
  Description of Artificial Sequence: Synthetic oligonucleotide
  Antisense strand to SEQ ID NO: 1099918
ugagcaacaaauaauacca

SEQ ID NO: 1099920 - RNA, 19 nt, Artificial Sequence
  Description of Artificial Sequence: Synthetic oligonucleotide
  Sense strand starting at position 3212 of SEQ ID NO: 915704
agcuaauccuggcuauaaa

SEQ ID NO: 1099921 - RNA, 19 nt, Artificial Sequence
  Description of Artificial Sequence: Synthetic oligonucleotide
  Antisense strand to SEQ ID NO: 1099920
uuuauagccaggauuagcu

SEQ ID NO: 1099922 - RNA, 19 nt, Artificial Sequence
  Description of Artificial Sequence: Synthetic oligonucleotide
  Sense strand starting at position 3213 of SEQ ID NO: 915704
gcuaauccuggcuauaaau

SEQ ID NO: 1099923 - RNA, 19 nt, Artificial Sequence
  Description of Artificial Sequence: Synthetic oligonucleotide
  Antisense strand to SEQ ID NO: 1099922
auuuauagccaggauuagc

SEQ ID NO: 1099924 - RNA, 19 nt, Artificial Sequence
  Description of Artificial Sequence: Synthetic oligonucleotide
  Sense strand starting at position 3436 of SEQ ID NO: 915704
ugagacauuucucaaguuu

SEQ ID NO: 1099925 - RNA, 19 nt, Artificial Sequence
  Description of Artificial Sequence: Synthetic oligonucleotide
  Antisense strand to SEQ ID NO: 1099924
aaacuugagaaaugucuca

SEQ ID NO: 1099926 - RNA, 19 nt, Artificial Sequence
  Description of Artificial Sequence: Synthetic oligonucleotide
  Sense strand starting at position 3482 of SEQ ID NO: 915704
guucuauugcuaugaugaa

SEQ ID NO: 1099927 - RNA, 19 nt, Artificial Sequence
  Description of Artificial Sequence: Synthetic oligonucleotide
  Antisense strand to SEQ ID NO: 1099926
uucaucauagcaauagaac

SEQ ID NO: 1099928 - RNA, 19 nt, Artificial Sequence
  Description of Artificial Sequence: Synthetic oligonucleotide
  Sense strand starting at position 3505 of SEQ ID NO: 915704
gacuaagacaggcgugaaa

SEQ ID NO: 1099929 - RNA, 19 nt, Artificial Sequence
  Description of Artificial Sequence: Synthetic oligonucleotide
  Antisense strand to SEQ ID NO: 1099928
uuucacgccugucuuaguc

SEQ ID NO: 1099930 - RNA, 19 nt, Artificial Sequence
  Description of Artificial Sequence: Synthetic oligonucleotide
  Sense strand starting at position 3507 of SEQ ID NO: 915704
cuaagacaggcgugaaauu

SEQ ID NO: 1099931 - RNA, 19 nt, Artificial Sequence
  Description of Artificial Sequence: Synthetic oligonucleotide
  Antisense strand to SEQ ID NO: 1099930
aauuucacgccugucuuag

SEQ ID NO: 1099932 - RNA, 19 nt, Artificial Sequence
  Description of Artificial Sequence: Synthetic oligonucleotide
  Sense strand starting at position 3570 of SEQ ID NO: 915704
agguauauuccauguuuga

SEQ ID NO: 1099933 - RNA, 19 nt, Artificial Sequence
  Description of Artificial Sequence: Synthetic oligonucleotide
  Antisense strand to SEQ ID NO: 1099932
ucaaacauggaauauaccu

SEQ ID NO: 1099934 - RNA, 19 nt, Artificial Sequence
  Description of Artificial Sequence: Synthetic oligonucleotide
  Sense strand starting at position 3617 of SEQ ID NO: 915704
gagugagcgcucagugagu

SEQ ID NO: 1099935 - RNA, 19 nt, Artificial Sequence
  Description of Artificial Sequence: Synthetic oligonucleotide
  Antisense strand to SEQ ID NO: 1099934
acucacugagcgcucacuc

SEQ ID NO: 1099936 - RNA, 19 nt, Artificial Sequence
  Description of Artificial Sequence: Synthetic oligonucleotide
  Sense strand starting at position 3873 of SEQ ID NO: 915704
uaguaauauuagguccuga

SEQ ID NO: 1099937 - RNA, 19 nt, Artificial Sequence
  Description of Artificial Sequence: Synthetic oligonucleotide
  Antisense strand to SEQ ID NO: 1099936
ucaggaccuaauauuacua

SEQ ID NO: 1099938 - RNA, 19 nt, Artificial Sequence
  Description of Artificial Sequence: Synthetic oligonucleotide
  Sense strand starting at position 3940 of SEQ ID NO: 915704
acaguuuaucaccagagua

SEQ ID NO: 1099939 - RNA, 19 nt, Artificial Sequence
  Description of Artificial Sequence: Synthetic oligonucleotide
  Antisense strand to SEQ ID NO: 1099938
uacucuggugauaaacugu

SEQ ID NO: 1099940 - RNA, 19 nt, Artificial Sequence
  Description of Artificial Sequence: Synthetic oligonucleotide
  Sense strand starting at position 164 of SEQ ID NO: 915705
cuuacauuagccgacaguu

SEQ ID NO: 1099941 - RNA, 19 nt, Artificial Sequence
  Description of Artificial Sequence: Synthetic oligonucleotide
  Antisense strand to SEQ ID NO: 1099940
aacugucggcuaauguaag

SEQ ID NO: 1099942 - RNA, 19 nt, Artificial Sequence
  Description of Artificial Sequence: Synthetic oligonucleotide
  Sense strand starting at position 214 of SEQ ID NO: 915705
guaauaaaguguuggauuu

SEQ ID NO: 1099943 - RNA, 19 nt, Artificial Sequence
  Description of Artificial Sequence: Synthetic oligonucleotide
  Antisense strand to SEQ ID NO: 1099942
aaauccaacacuuuauuac

SEQ ID NO: 1099944 - RNA, 19 nt, Artificial Sequence
  Description of Artificial Sequence: Synthetic oligonucleotide
  Sense strand starting at position 363 of SEQ ID NO: 915705
gcaggaauaugugugucca

SEQ ID NO: 1099945 - RNA, 19 nt, Artificial Sequence
  Description of Artificial Sequence: Synthetic oligonucleotide
  Antisense strand to SEQ ID NO: 1099944
uggacacacauauuccugc

SEQ ID NO: 1099946 - RNA, 19 nt, Artificial Sequence
  Description of Artificial Sequence: Synthetic oligonucleotide
  Sense strand starting at position 364 of SEQ ID NO: 915705
caggaauauguguguccac

SEQ ID NO: 1099947 - RNA, 19 nt, Artificial Sequence
  Description of Artificial Sequence: Synthetic oligonucleotide
  Antisense strand to SEQ ID NO: 1099946
guggacacacauauuccug

SEQ ID NO: 1099948 - RNA, 19 nt, Artificial Sequence
  Description of Artificial Sequence: Synthetic oligonucleotide
  Sense strand starting at position 365 of SEQ ID NO: 915705
aggaauauguguguccaca

SEQ ID NO: 1099949 - RNA, 19 nt, Artificial Sequence
  Description of Artificial Sequence: Synthetic oligonucleotide
  Antisense strand to SEQ ID NO: 1099948
uguggacacacauauuccu

SEQ ID NO: 1099950 - RNA, 19 nt, Artificial Sequence
  Description of Artificial Sequence: Synthetic oligonucleotide
  Sense strand starting at position 367 of SEQ ID NO: 915705
gaauauguguguccacaca

SEQ ID NO: 1099951 - RNA, 19 nt, Artificial Sequence
  Description of Artificial Sequence: Synthetic oligonucleotide
  Antisense strand to SEQ ID NO: 1099950
uguguggacacacauauuc

SEQ ID NO: 1099952 - RNA, 19 nt, Artificial Sequence
  Description of Artificial Sequence: Synthetic oligonucleotide
  Sense strand starting at position 483 of SEQ ID NO: 915705
gccacuguacgacaauaaa

SEQ ID NO: 1099953 - RNA, 19 nt, Artificial Sequence
  Description of Artificial Sequence: Synthetic oligonucleotide
  Antisense strand to SEQ ID NO: 1099952
uuuauugucguacaguggc

SEQ ID NO: 1099954 - RNA, 19 nt, Artificial Sequence
  Description of Artificial Sequence: Synthetic oligonucleotide
  Sense strand starting at position 736 of SEQ ID NO: 915705
aagugaggucuaugcaguu

SEQ ID NO: 1099955 - RNA, 19 nt, Artificial Sequence
  Description of Artificial Sequence: Synthetic oligonucleotide
  Antisense strand to SEQ ID NO: 1099954
aacugcauagaccucacuu

SEQ ID NO: 1099956 - RNA, 19 nt, Artificial Sequence
  Description of Artificial Sequence: Synthetic oligonucleotide
  Sense strand starting at position 755 of SEQ ID NO: 915705
gggucauacucucuaaccu

SEQ ID NO: 1099957 - RNA, 19 nt, Artificial Sequence
  Description of Artificial Sequence: Synthetic oligonucleotide
  Antisense strand to SEQ ID NO: 1099956
agguuagagaguaugaccc

SEQ ID NO: 1099958 - RNA, 19 nt, Artificial Sequence
  Description of Artificial Sequence: Synthetic oligonucleotide
  Sense strand starting at position 764 of SEQ ID NO: 915705
ucucuaaccugacucgaau

SEQ ID NO: 1099959 - RNA, 19 nt, Artificial Sequence
  Description of Artificial Sequence: Synthetic oligonucleotide
  Antisense strand to SEQ ID NO: 1099958
auucgagucagguuagaga

SEQ ID NO: 1099960 - RNA, 19 nt, Artificial Sequence
  Description of Artificial Sequence: Synthetic oligonucleotide
  Sense strand starting at position 777 of SEQ ID NO: 915705
ucgaauuuauccuaugacu

SEQ ID NO: 1099961 - RNA, 19 nt, Artificial Sequence
  Description of Artificial Sequence: Synthetic oligonucleotide
  Antisense strand to SEQ ID NO: 1099960
agucauaggauaaauucga

SEQ ID NO: 1099962 - RNA, 19 nt, Artificial Sequence
  Description of Artificial Sequence: Synthetic oligonucleotide
  Sense strand starting at position 1107 of SEQ ID NO: 915705
gugcuaugauucuugugcu

SEQ ID NO: 1099963 - RNA, 19 nt, Artificial Sequence
  Description of Artificial Sequence: Synthetic oligonucleotide
  Antisense strand to SEQ ID NO: 1099962
agcacaagaaucauagcac

SEQ ID NO: 1099964 - RNA, 19 nt, Artificial Sequence
  Description of Artificial Sequence: Synthetic oligonucleotide
  Sense strand starting at position 1117 of SEQ ID NO: 915705
ucuugugcuccuggaacau

SEQ ID NO: 1099965 - RNA, 19 nt, Artificial Sequence
  Description of Artificial Sequence: Synthetic oligonucleotide
  Antisense strand to SEQ ID NO: 1099964
auguuccaggagcacaaga

SEQ ID NO: 1099966 - RNA, 19 nt, Artificial Sequence
  Description of Artificial Sequence: Synthetic oligonucleotide
  Sense strand starting at position 1336 of SEQ ID NO: 915705
gcuuguugccgaugcagga

SEQ ID NO: 1099967 - RNA, 19 nt, Artificial Sequence
  Description of Artificial Sequence: Synthetic oligonucleotide
  Antisense strand to SEQ ID NO: 1099966
uccugcaucggcaacaagc

SEQ ID NO: 1099968 - RNA, 19 nt, Artificial Sequence
  Description of Artificial Sequence: Synthetic oligonucleotide
  Sense strand starting at position 1377 of SEQ ID NO: 915705
ccggacuuggaccgugaaa

SEQ ID NO: 1099969 - RNA, 19 nt, Artificial Sequence
  Description of Artificial Sequence: Synthetic oligonucleotide
  Antisense strand to SEQ ID NO: 1099968
uuucacgguccaaguccgg

SEQ ID NO: 1099970 - RNA, 19 nt, Artificial Sequence
  Description of Artificial Sequence: Synthetic oligonucleotide
  Sense strand starting at position 1591 of SEQ ID NO: 915705
ugcugaaguaguuggaguu

SEQ ID NO: 1099971 - RNA, 19 nt, Artificial Sequence
  Description of Artificial Sequence: Synthetic oligonucleotide
  Antisense strand to SEQ ID NO: 1099970
aacuccaacuacuucagca

SEQ ID NO: 1099972 - RNA, 19 nt, Artificial Sequence
  Description of Artificial Sequence: Synthetic oligonucleotide
  Sense strand starting at position 2357 of SEQ ID NO: 915705
ggcuguuaacugggucaca

SEQ ID NO: 1099973 - RNA, 19 nt, Artificial Sequence
  Description of Artificial Sequence: Synthetic oligonucleotide
  Antisense strand to SEQ ID NO: 1099972
ugugacccaguuaacagcc

SEQ ID NO: 1099974 - RNA, 19 nt, Artificial Sequence
  Description of Artificial Sequence: Synthetic oligonucleotide
  Sense strand starting at position 2379 of SEQ ID NO: 915705
gccaaauagccuuguaauu

SEQ ID NO: 1099975 - RNA, 19 nt, Artificial Sequence
  Description of Artificial Sequence: Synthetic oligonucleotide
  Antisense strand to SEQ ID NO: 1099974
aauuacaaggcuauuuggc

SEQ ID NO: 1099976 - RNA, 19 nt, Artificial Sequence
  Description of Artificial Sequence: Synthetic oligonucleotide
  Sense strand starting at position 2390 of SEQ ID NO: 915705
uuguaauuugcaggccuga

SEQ ID NO: 1099977 - RNA, 19 nt, Artificial Sequence
  Description of Artificial Sequence: Synthetic oligonucleotide
  Antisense strand to SEQ ID NO: 1099976
ucaggccugcaaauuacaa

SEQ ID NO: 1099978 - RNA, 19 nt, Artificial Sequence
  Description of Artificial Sequence: Synthetic oligonucleotide
  Sense strand starting at position 2403 of SEQ ID NO: 915705
gccugaguuucagaggaaa

SEQ ID NO: 1099979 - RNA, 19 nt, Artificial Sequence
  Description of Artificial Sequence: Synthetic oligonucleotide
  Antisense strand to SEQ ID NO: 1099978
uuuccucugaaacucaggc

SEQ ID NO: 1099980 - RNA, 19 nt, Artificial Sequence
  Description of Artificial Sequence: Synthetic oligonucleotide
  Sense strand starting at position 2468 of SEQ ID NO: 915705
aaggauggguuccauuuga

SEQ ID NO: 1099981 - RNA, 19 nt, Artificial Sequence
  Description of Artificial Sequence: Synthetic oligonucleotide
  Antisense strand to SEQ ID NO: 1099980
ucaaauggaacccauccuu

SEQ ID NO: 1099982 - RNA, 19 nt, Artificial Sequence
  Description of Artificial Sequence: Synthetic oligonucleotide
  Sense strand starting at position 2484 of SEQ ID NO: 915705
ugauuuggcuacugaguau

SEQ ID NO: 1099983 - RNA, 19 nt, Artificial Sequence
  Description of Artificial Sequence: Synthetic oligonucleotide
  Antisense strand to SEQ ID NO: 1099982
auacucaguagccaaauca

SEQ ID NO: 1099984 - RNA, 19 nt, Artificial Sequence
  Description of Artificial Sequence: Synthetic oligonucleotide
  Sense strand starting at position 2488 of SEQ ID NO: 915705
uuggcuacugaguauugaa

SEQ ID NO: 1099985 - RNA, 19 nt, Artificial Sequence
  Description of Artificial Sequence: Synthetic oligonucleotide
  Antisense strand to SEQ ID NO: 1099984
uucaauacucaguagccaa

SEQ ID NO: 1099986 - RNA, 19 nt, Artificial Sequence
  Description of Artificial Sequence: Synthetic oligonucleotide
  Sense strand starting at position 2526 of SEQ ID NO: 915705
ggcacuuuccuagguauug

SEQ ID NO: 1099987 - RNA, 19 nt, Artificial Sequence
  Description of Artificial Sequence: Synthetic oligonucleotide
  Antisense strand to SEQ ID NO: 1099986
caauaccuaggaaagugcc

SEQ ID NO: 1099988 - RNA, 19 nt, Artificial Sequence
  Description of Artificial Sequence: Synthetic oligonucleotide
  Sense strand starting at position 2535 of SEQ ID NO: 915705
cuagguauugcauauauua

SEQ ID NO: 1099989 - RNA, 19 nt, Artificial Sequence
  Description of Artificial Sequence: Synthetic oligonucleotide
  Antisense strand to SEQ ID NO: 1099988
uaauauaugcaauaccuag

SEQ ID NO: 1099990 - RNA, 19 nt, Artificial Sequence
  Description of Artificial Sequence: Synthetic oligonucleotide
  Sense strand starting at position 2751 of SEQ ID NO: 915705
uucugagagucuguccuau

SEQ ID NO: 1099991 - RNA, 19 nt, Artificial Sequence
  Description of Artificial Sequence: Synthetic oligonucleotide
  Antisense strand to SEQ ID NO: 1099990
auaggacagacucucagaa

SEQ ID NO: 1099992 - RNA, 19 nt, Artificial Sequence
  Description of Artificial Sequence: Synthetic oligonucleotide
  Sense strand starting at position 2931 of SEQ ID NO: 915705
ucugcugugugacucagaa

SEQ ID NO: 1099993 - RNA, 19 nt, Artificial Sequence
  Description of Artificial Sequence: Synthetic oligonucleotide
  Antisense strand to SEQ ID NO: 1099992
uucugagucacacagcaga

SEQ ID NO: 1099994 - RNA, 19 nt, Artificial Sequence
  Description of Artificial Sequence: Synthetic oligonucleotide
  Sense strand starting at position 3004 of SEQ ID NO: 915705
gucagcaaagugugagauu

SEQ ID NO: 1099995 - RNA, 19 nt, Artificial Sequence
  Description of Artificial Sequence: Synthetic oligonucleotide
  Antisense strand to SEQ ID NO: 1099994
aaucucacacuuugcugac

SEQ ID NO: 1099996 - RNA, 19 nt, Artificial Sequence
  Description of Artificial Sequence: Synthetic oligonucleotide
  Sense strand starting at position 3396 of SEQ ID NO: 915705
agcagcuaauccuuugcaa

SEQ ID NO: 1099997 - RNA, 19 nt, Artificial Sequence
  Description of Artificial Sequence: Synthetic oligonucleotide
  Antisense strand to SEQ ID NO: 1099996
uugcaaaggauuagcugcu

SEQ ID NO: 1099998 - RNA, 19 nt, Artificial Sequence
  Description of Artificial Sequence: Synthetic oligonucleotide
  Sense strand starting at position 3465 of SEQ ID NO: 915705
ucacuuaugagaggaugua

SEQ ID NO: 1099999 - RNA, 19 nt, Artificial Sequence
  Description of Artificial Sequence: Synthetic oligonucleotide
  Antisense strand to SEQ ID NO: 1099998
uacauccucucauaaguga

SEQ ID NO: 1100000 - RNA, 19 nt, Artificial Sequence
  Description of Artificial Sequence: Synthetic oligonucleotide
  Sense strand starting at position 3539 of SEQ ID NO: 915705
gccugaggucucugucugu

SEQ ID NO: 1100001 - RNA, 19 nt, Artificial Sequence
  Description of Artificial Sequence: Synthetic oligonucleotide
  Antisense strand to SEQ ID NO: 1100000
acagacagagaccucaggc

SEQ ID NO: 1100002 - RNA, 19 nt, Artificial Sequence
  Description of Artificial Sequence: Synthetic oligonucleotide
  Sense strand starting at position 3581 of SEQ ID NO: 915705
guuugaacucacuggugaa

SEQ ID NO: 1100003 - RNA, 19 nt, Artificial Sequence
  Description of Artificial Sequence: Synthetic oligonucleotide
  Antisense strand to SEQ ID NO: 1100002
uucaccagugaguucaaac

SEQ ID NO: 1100004 - RNA, 19 nt, Artificial Sequence
  Description of Artificial Sequence: Synthetic oligonucleotide
  Sense strand starting at position 3591 of SEQ ID NO: 915705
acuggugaauuggcuaaga

SEQ ID NO: 1100005 - RNA, 19 nt, Artificial Sequence
  Description of Artificial Sequence: Synthetic oligonucleotide
  Antisense strand to SEQ ID NO: 1100004
ucuuagccaauucaccagu

SEQ ID NO: 1100006 - RNA, 19 nt, Artificial Sequence
  Description of Artificial Sequence: Synthetic oligonucleotide
  Sense strand starting at position 3668 of SEQ ID NO: 915705
ugggcucuugccugaggua

SEQ ID NO: 1100007 - RNA, 19 nt, Artificial Sequence
  Description of Artificial Sequence: Synthetic oligonucleotide
  Antisense strand to SEQ ID NO: 1100006
uaccucaggcaagagccca

SEQ ID NO: 1100008 - RNA, 19 nt, Artificial Sequence
  Description of Artificial Sequence: Synthetic oligonucleotide
  Sense strand starting at position 3828 of SEQ ID NO: 915705
agaggaaagucauuggguu

SEQ ID NO: 1100009 - RNA, 19 nt, Artificial Sequence
  Description of Artificial Sequence: Synthetic oligonucleotide
  Antisense strand to SEQ ID NO: 1100008
aacccaaugacuuuccucu

SEQ ID NO: 1100010 - RNA, 19 nt, Artificial Sequence
  Description of Artificial Sequence: Synthetic oligonucleotide
  Sense strand starting at position 3829 of SEQ ID NO: 915705
gaggaaagucauuggguuc

SEQ ID NO: 1100011 - RNA, 19 nt, Artificial Sequence
  Description of Artificial Sequence: Synthetic oligonucleotide
  Antisense strand to SEQ ID NO: 1100010
gaacccaaugacuuuccuc

SEQ ID NO: 1100012 - RNA, 19 nt, Artificial Sequence
  Description of Artificial Sequence: Synthetic oligonucleotide
  Sense strand starting at position 3830 of SEQ ID NO: 915705
aggaaagucauuggguucu

SEQ ID NO: 1100013 - RNA, 19 nt, Artificial Sequence
  Description of Artificial Sequence: Synthetic oligonucleotide
  Antisense strand to SEQ ID NO: 1100012
agaacccaaugacuuuccu

SEQ ID NO: 1100014 - RNA, 19 nt, Artificial Sequence
  Description of Artificial Sequence: Synthetic oligonucleotide
  Sense strand starting at position 3899 of SEQ ID NO: 915705
cuccgcuaguucuuacagu

SEQ ID NO: 1100015 - RNA, 19 nt, Artificial Sequence
  Description of Artificial Sequence: Synthetic oligonucleotide
  Antisense strand to SEQ ID NO: 1100014
acuguaagaacuagcggag

SEQ ID NO: 1100016 - RNA, 19 nt, Artificial Sequence
  Description of Artificial Sequence: Synthetic oligonucleotide
  Sense strand starting at position 3944 of SEQ ID NO: 915705
gggaaagauucugaaccuu

SEQ ID NO: 1100017 - RNA, 19 nt, Artificial Sequence
  Description of Artificial Sequence: Synthetic oligonucleotide
  Antisense strand to SEQ ID NO: 1100016
aagguucagaaucuuuccc

SEQ ID NO: 1100018 - RNA, 19 nt, Artificial Sequence
  Description of Artificial Sequence: Synthetic oligonucleotide
  Sense strand starting at position 3961 of SEQ ID NO: 915705
uuaggaauaggcugacaca

SEQ ID NO: 1100019 - RNA, 19 nt, Artificial Sequence
  Description of Artificial Sequence: Synthetic oligonucleotide
  Antisense strand to SEQ ID NO: 1100018
ugugucagccuauuccuaa

SEQ ID NO: 1100020 - RNA, 19 nt, Artificial Sequence
  Description of Artificial Sequence: Synthetic oligonucleotide
  Sense strand starting at position 30 of SEQ ID NO: 915706
augaacgcucucuauucua

SEQ ID NO: 1100021 - RNA, 19 nt, Artificial Sequence
  Description of Artificial Sequence: Synthetic oligonucleotide
  Antisense strand to SEQ ID NO: 1100020
uagaauagagagcguucau

SEQ ID NO: 1100022 - RNA, 19 nt, Artificial Sequence
  Description of Artificial Sequence: Synthetic oligonucleotide
  Sense strand starting at position 84 of SEQ ID NO: 915706
auacuaucccaacgaugga

SEQ ID NO: 1100023 - RNA, 19 nt, Artificial Sequence
  Description of Artificial Sequence: Synthetic oligonucleotide
  Antisense strand to SEQ ID NO: 1100022
uccaucguugggauaguau

SEQ ID NO: 1100024 - RNA, 19 nt, Artificial Sequence
  Description of Artificial Sequence: Synthetic oligonucleotide
  Sense strand starting at position 97 of SEQ ID NO: 915706
gauggacucuuugcucaag

SEQ ID NO: 1100025 - RNA, 19 nt, Artificial Sequence
  Description of Artificial Sequence: Synthetic oligonucleotide
  Antisense strand to SEQ ID NO: 1100024
cuugagcaaagaguccauc

SEQ ID NO: 1100026 - RNA, 19 nt, Artificial Sequence
  Description of Artificial Sequence: Synthetic oligonucleotide
  Sense strand starting at position 99 of SEQ ID NO: 915706
uggacucuuugcucaaguu

SEQ ID NO: 1100027 - RNA, 19 nt, Artificial Sequence
  Description of Artificial Sequence: Synthetic oligonucleotide
  Antisense strand to SEQ ID NO: 1100026
aacuugagcaaagagucca

SEQ ID NO: 1100028 - RNA, 19 nt, Artificial Sequence
  Description of Artificial Sequence: Synthetic oligonucleotide
  Sense strand starting at position 111 of SEQ ID NO: 915706
ucaaguucucucggcaaga

SEQ ID NO: 1100029 - RNA, 19 nt, Artificial Sequence
  Description of Artificial Sequence: Synthetic oligonucleotide
  Antisense strand to SEQ ID NO: 1100028
ucuugccgagagaacuuga

SEQ ID NO: 1100030 - RNA, 19 nt, Artificial Sequence
  Description of Artificial Sequence: Synthetic oligonucleotide
  Sense strand starting at position 112 of SEQ ID NO: 915706
caaguucucucggcaagaa

SEQ ID NO: 1100031 - RNA, 19 nt, Artificial Sequence
  Description of Artificial Sequence: Synthetic oligonucleotide
  Antisense strand to SEQ ID NO: 1100030
uucuugccgagagaacuug

SEQ ID NO: 1100032 - RNA, 19 nt, Artificial Sequence
  Description of Artificial Sequence: Synthetic oligonucleotide
  Sense strand starting at position 113 of SEQ ID NO: 915706
aaguucucucggcaagaau

SEQ ID NO: 1100033 - RNA, 19 nt, Artificial Sequence
  Description of Artificial Sequence: Synthetic oligonucleotide
  Antisense strand to SEQ ID NO: 1100032
auucuugccgagagaacuu

SEQ ID NO: 1100034 - RNA, 19 nt, Artificial Sequence
  Description of Artificial Sequence: Synthetic oligonucleotide
  Sense strand starting at position 173 of SEQ ID NO: 915706
ggaaguacucaguauaugu

SEQ ID NO: 1100035 - RNA, 19 nt, Artificial Sequence
  Description of Artificial Sequence: Synthetic oligonucleotide
  Antisense strand to SEQ ID NO: 1100034
acauauacugaguacuucc

SEQ ID NO: 1100036 - RNA, 19 nt, Artificial Sequence
  Description of Artificial Sequence: Synthetic oligonucleotide
  Sense strand starting at position 181 of SEQ ID NO: 915706
ucaguauauguugguuaca

SEQ ID NO: 1100037 - RNA, 19 nt, Artificial Sequence
  Description of Artificial Sequence: Synthetic oligonucleotide
  Antisense strand to SEQ ID NO: 1100036
uguaaccaacauauacuga

SEQ ID NO: 1100038 - RNA, 19 nt, Artificial Sequence
  Description of Artificial Sequence: Synthetic oligonucleotide
  Sense strand starting at position 184 of SEQ ID NO: 915706
guauauguugguuacagga

SEQ ID NO: 1100039 - RNA, 19 nt, Artificial Sequence
  Description of Artificial Sequence: Synthetic oligonucleotide
  Antisense strand to SEQ ID NO: 1100038
uccuguaaccaacauauac

SEQ ID NO: 1100040 - RNA, 19 nt, Artificial Sequence
  Description of Artificial Sequence: Synthetic oligonucleotide
  Sense strand starting at position 197 of SEQ ID NO: 915706
acaggagagcucuguuuaa

SEQ ID NO: 1100041 - RNA, 19 nt, Artificial Sequence
  Description of Artificial Sequence: Synthetic oligonucleotide
  Antisense strand to SEQ ID NO: 1100040
uuaaacagagcucuccugu

SEQ ID NO: 1100042 - RNA, 19 nt, Artificial Sequence
  Description of Artificial Sequence: Synthetic oligonucleotide
  Sense strand starting at position 201 of SEQ ID NO: 915706
gagagcucuguuuaaaucu

SEQ ID NO: 1100043 - RNA, 19 nt, Artificial Sequence
  Description of Artificial Sequence: Synthetic oligonucleotide
  Antisense strand to SEQ ID NO: 1100042
agauuuaaacagagcucuc

SEQ ID NO: 1100044 - RNA, 19 nt, Artificial Sequence
  Description of Artificial Sequence: Synthetic oligonucleotide
  Sense strand starting at position 295 of SEQ ID NO: 915706
agagaccucugcuuaauau

SEQ ID NO: 1100045 - RNA, 19 nt, Artificial Sequence
  Description of Artificial Sequence: Synthetic oligonucleotide
  Antisense strand to SEQ ID NO: 1100044
auauuaagcagaggucucu

SEQ ID NO: 1100046 - RNA, 19 nt, Artificial Sequence
  Description of Artificial Sequence: Synthetic oligonucleotide
  Sense strand starting at position 480 of SEQ ID NO: 915706
aagggagaccugugauguu

SEQ ID NO: 1100047 - RNA, 19 nt, Artificial Sequence
  Description of Artificial Sequence: Synthetic oligonucleotide
  Antisense strand to SEQ ID NO: 1100046
aacaucacaggucucccuu

SEQ ID NO: 1100048 - RNA, 19 nt, Artificial Sequence
  Description of Artificial Sequence: Synthetic oligonucleotide
  Sense strand starting at position 554 of SEQ ID NO: 915706
guuucuguuguccacauca

SEQ ID NO: 1100049 - RNA, 19 nt, Artificial Sequence
  Description of Artificial Sequence: Synthetic oligonucleotide
  Antisense strand to SEQ ID NO: 1100048
ugauguggacaacagaaac

SEQ ID NO: 1100050 - RNA, 19 nt, Artificial Sequence
  Description of Artificial Sequence: Synthetic oligonucleotide
  Sense strand starting at position 556 of SEQ ID NO: 915706
uucuguuguccacaucaga

SEQ ID NO: 1100051 - RNA, 19 nt, Artificial Sequence
  Description of Artificial Sequence: Synthetic oligonucleotide
  Antisense strand to SEQ ID NO: 1100050
ucugauguggacaacagaa

SEQ ID NO: 1100052 - RNA, 19 nt, Artificial Sequence
  Description of Artificial Sequence: Synthetic oligonucleotide
  Sense strand starting at position 559 of SEQ ID NO: 915706
uguuguccacaucagagaa

SEQ ID NO: 1100053 - RNA, 19 nt, Artificial Sequence
  Description of Artificial Sequence: Synthetic oligonucleotide
  Antisense strand to SEQ ID NO: 1100052
uucucugauguggacaaca

SEQ ID NO: 1100054 - RNA, 19 nt, Artificial Sequence
  Description of Artificial Sequence: Synthetic oligonucleotide
  Sense strand starting at position 813 of SEQ ID NO: 915706
gaggcuuucuguccacaga

SEQ ID NO: 1100055 - RNA, 19 nt, Artificial Sequence
  Description of Artificial Sequence: Synthetic oligonucleotide
  Antisense strand to SEQ ID NO: 1100054
ucuguggacagaaagccuc

SEQ ID NO: 1100056 - RNA, 19 nt, Artificial Sequence
  Description of Artificial Sequence: Synthetic oligonucleotide
  Sense strand starting at position 816 of SEQ ID NO: 915706
gcuuucuguccacagagca

SEQ ID NO: 1100057 - RNA, 19 nt, Artificial Sequence
  Description of Artificial Sequence: Synthetic oligonucleotide
  Antisense strand to SEQ ID NO: 1100056
ugcucuguggacagaaagc

SEQ ID NO: 1100058 - RNA, 19 nt, Artificial Sequence
  Description of Artificial Sequence: Synthetic oligonucleotide
  Sense strand starting at position 1157 of SEQ ID NO: 915706
cagccacagcccgaagaau

SEQ ID NO: 1100059 - RNA, 19 nt, Artificial Sequence
  Description of Artificial Sequence: Synthetic oligonucleotide
  Antisense strand to SEQ ID NO: 1100058
auucuucgggcuguggcug

SEQ ID NO: 1100060 - RNA, 19 nt, Artificial Sequence
  Description of Artificial Sequence: Synthetic oligonucleotide
  Sense strand starting at position 1758 of SEQ ID NO: 915706
guagucggucucagggauu

SEQ ID NO: 1100061 - RNA, 19 nt, Artificial Sequence
  Description of Artificial Sequence: Synthetic oligonucleotide
  Antisense strand to SEQ ID NO: 1100060
aaucccugagaccgacuac

SEQ ID NO: 1100062 - RNA, 19 nt, Artificial Sequence
  Description of Artificial Sequence: Synthetic oligonucleotide
  Sense strand starting at position 1778 of SEQ ID NO: 915706
agaugagacuccgucaaga

SEQ ID NO: 1100063 - RNA, 19 nt, Artificial Sequence
  Description of Artificial Sequence: Synthetic oligonucleotide
  Antisense strand to SEQ ID NO: 1100062
ucuugacggagucucaucu

SEQ ID NO: 1100064 - RNA, 19 nt, Artificial Sequence
  Description of Artificial Sequence: Synthetic oligonucleotide
  Sense strand starting at position 1888 of SEQ ID NO: 915706
gcuccuauggaauaugcua

SEQ ID NO: 1100065 - RNA, 19 nt, Artificial Sequence
  Description of Artificial Sequence: Synthetic oligonucleotide
  Antisense strand to SEQ ID NO: 1100064
uagcauauuccauaggagc

SEQ ID NO: 1100066 - RNA, 19 nt, Artificial Sequence
  Description of Artificial Sequence: Synthetic oligonucleotide
  Sense strand starting at position 2186 of SEQ ID NO: 915706
cagggacugagugguuauu

SEQ ID NO: 1100067 - RNA, 19 nt, Artificial Sequence
  Description of Artificial Sequence: Synthetic oligonucleotide
  Antisense strand to SEQ ID NO: 1100066
aauaaccacucagucccug

SEQ ID NO: 1100068 - RNA, 19 nt, Artificial Sequence
  Description of Artificial Sequence: Synthetic oligonucleotide
  Sense strand starting at position 2188 of SEQ ID NO: 915706
gggacugagugguuauuau

SEQ ID NO: 1100069 - RNA, 19 nt, Artificial Sequence
  Description of Artificial Sequence: Synthetic oligonucleotide
  Antisense strand to SEQ ID NO: 1100068
auaauaaccacucaguccc

SEQ ID NO: 1100070 - RNA, 19 nt, Artificial Sequence
  Description of Artificial Sequence: Synthetic oligonucleotide
  Sense strand starting at position 2315 of SEQ ID NO: 915706
gacguuagcccucaucacu

SEQ ID NO: 1100071 - RNA, 19 nt, Artificial Sequence
  Description of Artificial Sequence: Synthetic oligonucleotide
  Antisense strand to SEQ ID NO: 1100070
agugaugagggcuaacguc

SEQ ID NO: 1100072 - RNA, 19 nt, Artificial Sequence
  Description of Artificial Sequence: Synthetic oligonucleotide
  Sense strand starting at position 2497 of SEQ ID NO: 915706
augauugcaggcugaucaa

SEQ ID NO: 1100073 - RNA, 19 nt, Artificial Sequence
  Description of Artificial Sequence: Synthetic oligonucleotide
  Antisense strand to SEQ ID NO: 1100072
uugaucagccugcaaucau

SEQ ID NO: 1100074 - RNA, 19 nt, Artificial Sequence
  Description of Artificial Sequence: Synthetic oligonucleotide
  Sense strand starting at position 2539 of SEQ ID NO: 915706
ugcaguauccaugacaaag

SEQ ID NO: 1100075 - RNA, 19 nt, Artificial Sequence
  Description of Artificial Sequence: Synthetic oligonucleotide
  Antisense strand to SEQ ID NO: 1100074
cuuugucauggauacugca

SEQ ID NO: 1100076 - RNA, 19 nt, Artificial Sequence
  Description of Artificial Sequence: Synthetic oligonucleotide
  Sense strand starting at position 2562 of SEQ ID NO: 915706
aagucaugccugugaggau

SEQ ID NO: 1100077 - RNA, 19 nt, Artificial Sequence
  Description of Artificial Sequence: Synthetic oligonucleotide
  Antisense strand to SEQ ID NO: 1100076
auccucacaggcaugacuu

SEQ ID NO: 1100078 - RNA, 19 nt, Artificial Sequence
  Description of Artificial Sequence: Synthetic oligonucleotide
  Sense strand starting at position 2574 of SEQ ID NO: 915706
ugaggaucccugcacuaug

SEQ ID NO: 1100079 - RNA, 19 nt, Artificial Sequence
  Description of Artificial Sequence: Synthetic oligonucleotide
  Antisense strand to SEQ ID NO: 1100078
cauagugcagggauccuca

SEQ ID NO: 1100080 - RNA, 19 nt, Artificial Sequence
  Description of Artificial Sequence: Synthetic oligonucleotide
  Sense strand starting at position 2658 of SEQ ID NO: 915706
ucugguuuccuuggccaaa

SEQ ID NO: 1100081 - RNA, 19 nt, Artificial Sequence
  Description of Artificial Sequence: Synthetic oligonucleotide
  Antisense strand to SEQ ID NO: 1100080
uuuggccaaggaaaccaga

SEQ ID NO: 1100082 - RNA, 19 nt, Artificial Sequence
  Description of Artificial Sequence: Synthetic oligonucleotide
  Sense strand starting at position 2724 of SEQ ID NO: 915706
uagggaucuuucuugugac

SEQ ID NO: 1100083 - RNA, 19 nt, Artificial Sequence
  Description of Artificial Sequence: Synthetic oligonucleotide
  Antisense strand to SEQ ID NO: 1100082
gucacaagaaagaucccua

SEQ ID NO: 1100084 - RNA, 19 nt, Artificial Sequence
  Description of Artificial Sequence: Synthetic oligonucleotide
  Sense strand starting at position 2738 of SEQ ID NO: 915706
gugaccucuccacaagguu

SEQ ID NO: 1100085 - RNA, 19 nt, Artificial Sequence
  Description of Artificial Sequence: Synthetic oligonucleotide
  Antisense strand to SEQ ID NO: 1100084
aaccuuguggagaggucac

SEQ ID NO: 1100086 - RNA, 19 nt, Artificial Sequence
  Description of Artificial Sequence: Synthetic oligonucleotide
  Sense strand starting at position 2998 of SEQ ID NO: 915706
gcagucaaauuucugcuua

SEQ ID NO: 1100087 - RNA, 19 nt, Artificial Sequence
  Description of Artificial Sequence: Synthetic oligonucleotide
  Antisense strand to SEQ ID NO: 1100086
uaagcagaaauuugacugc

SEQ ID NO: 1100088 - RNA, 19 nt, Artificial Sequence
  Description of Artificial Sequence: Synthetic oligonucleotide
  Sense strand starting at position 3611 of SEQ ID NO: 915706
ucuguacuucuguauccua

SEQ ID NO: 1100089 - RNA, 19 nt, Artificial Sequence
  Description of Artificial Sequence: Synthetic oligonucleotide
  Antisense strand to SEQ ID NO: 1100088
uaggauacagaaguacaga

SEQ ID NO: 1100090 - RNA, 19 nt, Artificial Sequence
  Description of Artificial Sequence: Synthetic oligonucleotide
  Sense strand starting at position 3614 of SEQ ID NO: 915706
guacuucuguauccuaaua

SEQ ID NO: 1100091 - RNA, 19 nt, Artificial Sequence
  Description of Artificial Sequence: Synthetic oligonucleotide
  Antisense strand to SEQ ID NO: 1100090
uauuaggauacagaaguac

SEQ ID NO: 1100092 - RNA, 19 nt, Artificial Sequence
  Description of Artificial Sequence: Synthetic oligonucleotide
  Sense strand starting at position 3926 of SEQ ID NO: 915706
cucugaaaccugugacuuc

SEQ ID NO: 1100093 - RNA, 19 nt, Artificial Sequence
  Description of Artificial Sequence: Synthetic oligonucleotide
  Antisense strand to SEQ ID NO: 1100092
gaagucacagguuucagag

SEQ ID NO: 1100094 - RNA, 19 nt, Artificial Sequence
  Description of Artificial Sequence: Synthetic oligonucleotide
  Sense strand starting at position 3977 of SEQ ID NO: 915706
ggguucugguguuugauua

SEQ ID NO: 1100095 - RNA, 19 nt, Artificial Sequence
  Description of Artificial Sequence: Synthetic oligonucleotide
  Antisense strand to SEQ ID NO: 1100094
uaaucaaacaccagaaccc

SEQ ID NO: 1100096 - RNA, 19 nt, Artificial Sequence
  Description of Artificial Sequence: Synthetic oligonucleotide
  Sense strand starting at position 3978 of SEQ ID NO: 915706
gguucugguguuugauuag

SEQ ID NO: 1100097 - RNA, 19 nt, Artificial Sequence
  Description of Artificial Sequence: Synthetic oligonucleotide
  Antisense strand to SEQ ID NO: 1100096
cuaaucaaacaccagaacc

SEQ ID NO: 1100098 - RNA, 19 nt, Artificial Sequence
  Description of Artificial Sequence: Synthetic oligonucleotide
  Sense strand starting at position 3981 of SEQ ID NO: 915706
ucugguguuugauuagacu

SEQ ID NO: 1100099 - RNA, 19 nt, Artificial Sequence
  Description of Artificial Sequence: Synthetic oligonucleotide
  Antisense strand to SEQ ID NO: 1100098
agucuaaucaaacaccaga

SEQ ID NO: 1100100 - RNA, 19 nt, Artificial Sequence
  Description of Artificial Sequence: Synthetic oligonucleotide
  Sense strand starting at position 55 of SEQ ID NO: 915707
cugguagucuucucaauua

SEQ ID NO: 1100101 - RNA, 19 nt, Artificial Sequence
  Description of Artificial Sequence: Synthetic oligonucleotide
  Antisense strand to SEQ ID NO: 1100100
uaauugagaagacuaccag

SEQ ID NO: 1100102 - RNA, 19 nt, Artificial Sequence
  Description of Artificial Sequence: Synthetic oligonucleotide
  Sense strand starting at position 173 of SEQ ID NO: 915707
guccuaaugcuguaacuaa

SEQ ID NO: 1100103 - RNA, 19 nt, Artificial Sequence
  Description of Artificial Sequence: Synthetic oligonucleotide
  Antisense strand to SEQ ID NO: 1100102
uuaguuacagcauuaggac

SEQ ID NO: 1100104 - RNA, 19 nt, Artificial Sequence
  Description of Artificial Sequence: Synthetic oligonucleotide
  Sense strand starting at position 206 of SEQ ID NO: 915707
ggugaaacucuagguaagu

SEQ ID NO: 1100105 - RNA, 19 nt, Artificial Sequence
  Description of Artificial Sequence: Synthetic oligonucleotide
  Antisense strand to SEQ ID NO: 1100104
acuuaccuagaguuucacc

SEQ ID NO: 1100106 - RNA, 19 nt, Artificial Sequence
  Description of Artificial Sequence: Synthetic oligonucleotide
  Sense strand starting at position 207 of SEQ ID NO: 915707
gugaaacucuagguaaguu

SEQ ID NO: 1100107 - RNA, 19 nt, Artificial Sequence
  Description of Artificial Sequence: Synthetic oligonucleotide
  Antisense strand to SEQ ID NO: 1100106
aacuuaccuagaguuucac

SEQ ID NO: 1100108 - RNA, 19 nt, Artificial Sequence
  Description of Artificial Sequence: Synthetic oligonucleotide
  Sense strand starting at position 310 of SEQ ID NO: 915707
agggcuuccacagauugua

SEQ ID NO: 1100109 - RNA, 19 nt, Artificial Sequence
  Description of Artificial Sequence: Synthetic oligonucleotide
  Antisense strand to SEQ ID NO: 1100108
uacaaucuguggaagcccu

SEQ ID NO: 1100110 - RNA, 19 nt, Artificial Sequence
  Description of Artificial Sequence: Synthetic oligonucleotide
  Sense strand starting at position 326 of SEQ ID NO: 915707
guaccaugagcccaugauu

SEQ ID NO: 1100111 - RNA, 19 nt, Artificial Sequence
  Description of Artificial Sequence: Synthetic oligonucleotide
  Antisense strand to SEQ ID NO: 1100110
aaucaugggcucaugguac

SEQ ID NO: 1100112 - RNA, 19 nt, Artificial Sequence
  Description of Artificial Sequence: Synthetic oligonucleotide
  Sense strand starting at position 355 of SEQ ID NO: 915707
uuguacuaccucgaugauu

SEQ ID NO: 1100113 - RNA, 19 nt, Artificial Sequence
  Description of Artificial Sequence: Synthetic oligonucleotide
  Antisense strand to SEQ ID NO: 1100112
aaucaucgagguaguacaa

SEQ ID NO: 1100114 - RNA, 19 nt, Artificial Sequence
  Description of Artificial Sequence: Synthetic oligonucleotide
  Sense strand starting at position 385 of SEQ ID NO: 915707
uuccacuguuaggcuaaau

SEQ ID NO: 1100115 - RNA, 19 nt, Artificial Sequence
  Description of Artificial Sequence: Synthetic oligonucleotide
  Antisense strand to SEQ ID NO: 1100114
auuuagccuaacaguggaa

SEQ ID NO: 1100116 - RNA, 19 nt, Artificial Sequence
  Description of Artificial Sequence: Synthetic oligonucleotide
  Sense strand starting at position 393 of SEQ ID NO: 915707
uuaggcuaaauguguuaga

SEQ ID NO: 1100117 - RNA, 19 nt, Artificial Sequence
  Description of Artificial Sequence: Synthetic oligonucleotide
  Antisense strand to SEQ ID NO: 1100116
ucuaacacauuuagccuaa

SEQ ID NO: 1100118 - RNA, 19 nt, Artificial Sequence
  Description of Artificial Sequence: Synthetic oligonucleotide
  Sense strand starting at position 400 of SEQ ID NO: 915707
aaauguguuagaggauggu

SEQ ID NO: 1100119 - RNA, 19 nt, Artificial Sequence
  Description of Artificial Sequence: Synthetic oligonucleotide
  Antisense strand to SEQ ID NO: 1100118
accauccucuaacacauuu

SEQ ID NO: 1100120 - RNA, 19 nt, Artificial Sequence
  Description of Artificial Sequence: Synthetic oligonucleotide
  Sense strand starting at position 404 of SEQ ID NO: 915707
guguuagaggauggucuua

SEQ ID NO: 1100121 - RNA, 19 nt, Artificial Sequence
  Description of Artificial Sequence: Synthetic oligonucleotide
  Antisense strand to SEQ ID NO: 1100120
uaagaccauccucuaacac

SEQ ID NO: 1100122 - RNA, 19 nt, Artificial Sequence
  Description of Artificial Sequence: Synthetic oligonucleotide
  Sense strand starting at position 406 of SEQ ID NO: 915707
guuagaggauggucuuagu

SEQ ID NO: 1100123 - RNA, 19 nt, Artificial Sequence
  Description of Artificial Sequence: Synthetic oligonucleotide
  Antisense strand to SEQ ID NO: 1100122
acuaagaccauccucuaac

SEQ ID NO: 1100124 - RNA, 19 nt, Artificial Sequence
  Description of Artificial Sequence: Synthetic oligonucleotide
  Sense strand starting at position 462 of SEQ ID NO: 915707
guaaauaaauguuugcuga

SEQ ID NO: 1100125 - RNA, 19 nt, Artificial Sequence
  Description of Artificial Sequence: Synthetic oligonucleotide
  Antisense strand to SEQ ID NO: 1100124
ucagcaaacauuuauuuac

SEQ ID NO: 1100126 - RNA, 19 nt, Artificial Sequence
  Description of Artificial Sequence: Synthetic oligonucleotide
  Sense strand starting at position 465 of SEQ ID NO: 915707
aauaaauguuugcugaguu

SEQ ID NO: 1100127 - RNA, 19 nt, Artificial Sequence
  Description of Artificial Sequence: Synthetic oligonucleotide
  Antisense strand to SEQ ID NO: 1100126
aacucagcaaacauuuauu

SEQ ID NO: 1100128 - RNA, 19 nt, Artificial Sequence
  Description of Artificial Sequence: Synthetic oligonucleotide
  Sense strand starting at position 505 of SEQ ID NO: 915707
augaacgcucucuauucua

SEQ ID NO: 1100129 - RNA, 19 nt, Artificial Sequence
  Description of Artificial Sequence: Synthetic oligonucleotide
  Antisense strand to SEQ ID NO: 1100128
uagaauagagagcguucau

SEQ ID NO: 1100130 - RNA, 19 nt, Artificial Sequence
  Description of Artificial Sequence: Synthetic oligonucleotide
  Sense strand starting at position 559 of SEQ ID NO: 915707
auacuaucccaacgaugga

SEQ ID NO: 1100131 - RNA, 19 nt, Artificial Sequence
  Description of Artificial Sequence: Synthetic oligonucleotide
  Antisense strand to SEQ ID NO: 1100130
uccaucguugggauaguau

SEQ ID NO: 1100132 - RNA, 19 nt, Artificial Sequence
  Description of Artificial Sequence: Synthetic oligonucleotide
  Sense strand starting at position 572 of SEQ ID NO: 915707
gauggacucuuugcucaag

SEQ ID NO: 1100133 - RNA, 19 nt, Artificial Sequence
  Description of Artificial Sequence: Synthetic oligonucleotide
  Antisense strand to SEQ ID NO: 1100132
cuugagcaaagaguccauc

SEQ ID NO: 1100134 - RNA, 19 nt, Artificial Sequence
  Description of Artificial Sequence: Synthetic oligonucleotide
  Sense strand starting at position 588 of SEQ ID NO: 915707
aaguucucucggcaagaau

SEQ ID NO: 1100135 - RNA, 19 nt, Artificial Sequence
  Description of Artificial Sequence: Synthetic oligonucleotide
  Antisense strand to SEQ ID NO: 1100134
auucuugccgagagaacuu

SEQ ID NO: 1100136 - RNA, 19 nt, Artificial Sequence
  Description of Artificial Sequence: Synthetic oligonucleotide
  Sense strand starting at position 648 of SEQ ID NO: 915707
ggaaguacucaguauaugu

SEQ ID NO: 1100137 - RNA, 19 nt, Artificial Sequence
  Description of Artificial Sequence: Synthetic oligonucleotide
  Antisense strand to SEQ ID NO: 1100136
acauauacugaguacuucc

SEQ ID NO: 1100138 - RNA, 19 nt, Artificial Sequence
  Description of Artificial Sequence: Synthetic oligonucleotide
  Sense strand starting at position 659 of SEQ ID NO: 915707
guauauguugguuacagga

SEQ ID NO: 1100139 - RNA, 19 nt, Artificial Sequence
  Description of Artificial Sequence: Synthetic oligonucleotide
  Antisense strand to SEQ ID NO: 1100138
uccuguaaccaacauauac

SEQ ID NO: 1100140 - RNA, 19 nt, Artificial Sequence
  Description of Artificial Sequence: Synthetic oligonucleotide
  Sense strand starting at position 672 of SEQ ID NO: 915707
acaggagagcucuguuuaa

SEQ ID NO: 1100141 - RNA, 19 nt, Artificial Sequence
  Description of Artificial Sequence: Synthetic oligonucleotide
  Antisense strand to SEQ ID NO: 1100140
uuaaacagagcucuccugu

SEQ ID NO: 1100142 - RNA, 19 nt, Artificial Sequence
  Description of Artificial Sequence: Synthetic oligonucleotide
  Sense strand starting at position 676 of SEQ ID NO: 915707
gagagcucuguuuaaaucu

SEQ ID NO: 1100143 - RNA, 19 nt, Artificial Sequence
  Description of Artificial Sequence: Synthetic oligonucleotide
  Antisense strand to SEQ ID NO: 1100142
agauuuaaacagagcucuc

SEQ ID NO: 1100144 - RNA, 19 nt, Artificial Sequence
  Description of Artificial Sequence: Synthetic oligonucleotide
  Sense strand starting at position 770 of SEQ ID NO: 915707
agagaccucugcuuaauau

SEQ ID NO: 1100145 - RNA, 19 nt, Artificial Sequence
  Description of Artificial Sequence: Synthetic oligonucleotide
  Antisense strand to SEQ ID NO: 1100144
auauuaagcagaggucucu

SEQ ID NO: 1100146 - RNA, 19 nt, Artificial Sequence
  Description of Artificial Sequence: Synthetic oligonucleotide
  Sense strand starting at position 955 of SEQ ID NO: 915707
aagggagaccugugauguu

SEQ ID NO: 1100147 - RNA, 19 nt, Artificial Sequence
  Description of Artificial Sequence: Synthetic oligonucleotide
  Antisense strand to SEQ ID NO: 1100146
aacaucacaggucucccuu

SEQ ID NO: 1100148 - RNA, 19 nt, Artificial Sequence
  Description of Artificial Sequence: Synthetic oligonucleotide
  Sense strand starting at position 1031 of SEQ ID NO: 915707
uucuguuguccacaucaga

SEQ ID NO: 1100149 - RNA, 19 nt, Artificial Sequence
  Description of Artificial Sequence: Synthetic oligonucleotide
  Antisense strand to SEQ ID NO: 1100148
ucugauguggacaacagaa

SEQ ID NO: 1100150 - RNA, 19 nt, Artificial Sequence
  Description of Artificial Sequence: Synthetic oligonucleotide
  Sense strand starting at position 1034 of SEQ ID NO: 915707
uguuguccacaucagagaa

SEQ ID NO: 1100151 - RNA, 19 nt, Artificial Sequence
  Description of Artificial Sequence: Synthetic oligonucleotide
  Antisense strand to SEQ ID NO: 1100150
uucucugauguggacaaca

SEQ ID NO: 1100152 - RNA, 19 nt, Artificial Sequence
  Description of Artificial Sequence: Synthetic oligonucleotide
  Sense strand starting at position 1288 of SEQ ID NO: 915707
gaggcuuucuguccacaga

SEQ ID NO: 1100153 - RNA, 19 nt, Artificial Sequence
  Description of Artificial Sequence: Synthetic oligonucleotide
  Antisense strand to SEQ ID NO: 1100152
ucuguggacagaaagccuc

SEQ ID NO: 1100154 - RNA, 19 nt, Artificial Sequence
  Description of Artificial Sequence: Synthetic oligonucleotide
  Sense strand starting at position 1632 of SEQ ID NO: 915707
cagccacagcccgaagaau

SEQ ID NO: 1100155 - RNA, 19 nt, Artificial Sequence
  Description of Artificial Sequence: Synthetic oligonucleotide
  Antisense strand to SEQ ID NO: 1100154
auucuucgggcuguggcug

SEQ ID NO: 1100156 - RNA, 19 nt, Artificial Sequence
  Description of Artificial Sequence: Synthetic oligonucleotide
  Sense strand starting at position 2233 of SEQ ID NO: 915707
guagucggucucagggauu

SEQ ID NO: 1100157 - RNA, 19 nt, Artificial Sequence
  Description of Artificial Sequence: Synthetic oligonucleotide
  Antisense strand to SEQ ID NO: 1100156
aaucccugagaccgacuac

SEQ ID NO: 1100158 - RNA, 19 nt, Artificial Sequence
  Description of Artificial Sequence: Synthetic oligonucleotide
  Sense strand starting at position 2253 of SEQ ID NO: 915707
agaugagacuccgucaaga

SEQ ID NO: 1100159 - RNA, 19 nt, Artificial Sequence
  Description of Artificial Sequence: Synthetic oligonucleotide
  Antisense strand to SEQ ID NO: 1100158
ucuugacggagucucaucu

SEQ ID NO: 1100160 - RNA, 19 nt, Artificial Sequence
  Description of Artificial Sequence: Synthetic oligonucleotide
  Sense strand starting at position 2363 of SEQ ID NO: 915707
gcuccuauggaauaugcua

SEQ ID NO: 1100161 - RNA, 19 nt, Artificial Sequence
  Description of Artificial Sequence: Synthetic oligonucleotide
  Antisense strand to SEQ ID NO: 1100160
uagcauauuccauaggagc

SEQ ID NO: 1100162 - RNA, 19 nt, Artificial Sequence
  Description of Artificial Sequence: Synthetic oligonucleotide
  Sense strand starting at position 2661 of SEQ ID NO: 915707
cagggacugagugguuauu

SEQ ID NO: 1100163 - RNA, 19 nt, Artificial Sequence
  Description of Artificial Sequence: Synthetic oligonucleotide
  Antisense strand to SEQ ID NO: 1100162
aauaaccacucagucccug

SEQ ID NO: 1100164 - RNA, 19 nt, Artificial Sequence
  Description of Artificial Sequence: Synthetic oligonucleotide
  Sense strand starting at position 2663 of SEQ ID NO: 915707
gggacugagugguuauuau

SEQ ID NO: 1100165 - RNA, 19 nt, Artificial Sequence
  Description of Artificial Sequence: Synthetic oligonucleotide
  Antisense strand to SEQ ID NO: 1100164
auaauaaccacucaguccc

SEQ ID NO: 1100166 - RNA, 19 nt, Artificial Sequence
  Description of Artificial Sequence: Synthetic oligonucleotide
  Sense strand starting at position 2972 of SEQ ID NO: 915707
augauugcaggcugaucaa

SEQ ID NO: 1100167 - RNA, 19 nt, Artificial Sequence
  Description of Artificial Sequence: Synthetic oligonucleotide
  Antisense strand to SEQ ID NO: 1100166
uugaucagccugcaaucau

SEQ ID NO: 1100168 - RNA, 19 nt, Artificial Sequence
  Description of Artificial Sequence: Synthetic oligonucleotide
  Sense strand starting at position 3014 of SEQ ID NO: 915707
ugcaguauccaugacaaag

SEQ ID NO: 1100169 - RNA, 19 nt, Artificial Sequence
  Description of Artificial Sequence: Synthetic oligonucleotide
  Antisense strand to SEQ ID NO: 1100168
cuuugucauggauacugca

SEQ ID NO: 1100170 - RNA, 19 nt, Artificial Sequence
  Description of Artificial Sequence: Synthetic oligonucleotide
  Sense strand starting at position 3037 of SEQ ID NO: 915707
aagucaugccugugaggau

SEQ ID NO: 1100171 - RNA, 19 nt, Artificial Sequence
  Description of Artificial Sequence: Synthetic oligonucleotide
  Antisense strand to SEQ ID NO: 1100170
auccucacaggcaugacuu

SEQ ID NO: 1100172 - RNA, 19 nt, Artificial Sequence
  Description of Artificial Sequence: Synthetic oligonucleotide
  Sense strand starting at position 3049 of SEQ ID NO: 915707
ugaggaucccugcacuaug

SEQ ID NO: 1100173 - RNA, 19 nt, Artificial Sequence
  Description of Artificial Sequence: Synthetic oligonucleotide
  Antisense strand to SEQ ID NO: 1100172
cauagugcagggauccuca

SEQ ID NO: 1100174 - RNA, 19 nt, Artificial Sequence
  Description of Artificial Sequence: Synthetic oligonucleotide
  Sense strand starting at position 3199 of SEQ ID NO: 915707
uagggaucuuucuugugac

SEQ ID NO: 1100175 - RNA, 19 nt, Artificial Sequence
  Description of Artificial Sequence: Synthetic oligonucleotide
  Antisense strand to SEQ ID NO: 1100174
gucacaagaaagaucccua

SEQ ID NO: 1100176 - RNA, 19 nt, Artificial Sequence
  Description of Artificial Sequence: Synthetic oligonucleotide
  Sense strand starting at position 3213 of SEQ ID NO: 915707
gugaccucuccacaagguu

SEQ ID NO: 1100177 - RNA, 19 nt, Artificial Sequence
  Description of Artificial Sequence: Synthetic oligonucleotide
  Antisense strand to SEQ ID NO: 1100176
aaccuuguggagaggucac

SEQ ID NO: 1100178 - RNA, 19 nt, Artificial Sequence
  Description of Artificial Sequence: Synthetic oligonucleotide
  Sense strand starting at position 3473 of SEQ ID NO: 915707
gcagucaaauuucugcuua

SEQ ID NO: 1100179 - RNA, 19 nt, Artificial Sequence
  Description of Artificial Sequence: Synthetic oligonucleotide
  Antisense strand to SEQ ID NO: 1100178
uaagcagaaauuugacugc

SEQ ID NO: 1100180 - RNA, 19 nt, Artificial Sequence
  Description of Artificial Sequence: Synthetic oligonucleotide
  Sense strand starting at position 420 of SEQ ID NO: 915708
ugugcuucuggauagcaga

SEQ ID NO: 1100181 - RNA, 19 nt, Artificial Sequence
  Description of Artificial Sequence: Synthetic oligonucleotide
  Antisense strand to SEQ ID NO: 1100180
ucugcuauccagaagcaca

SEQ ID NO: 1100182 - RNA, 19 nt, Artificial Sequence
  Description of Artificial Sequence: Synthetic oligonucleotide
  Sense strand starting at position 486 of SEQ ID NO: 915708
cagcuauuuccaugggcau

SEQ ID NO: 1100183 - RNA, 19 nt, Artificial Sequence
  Description of Artificial Sequence: Synthetic oligonucleotide
  Antisense strand to SEQ ID NO: 1100182
augcccauggaaauagcug

SEQ ID NO: 1100184 - RNA, 19 nt, Artificial Sequence
  Description of Artificial Sequence: Synthetic oligonucleotide
  Sense strand starting at position 508 of SEQ ID NO: 915708
cuuagagcucuauguaaac

SEQ ID NO: 1100185 - RNA, 19 nt, Artificial Sequence
  Description of Artificial Sequence: Synthetic oligonucleotide
  Antisense strand to SEQ ID NO: 1100184
guuuacauagagcucuaag

SEQ ID NO: 1100186 - RNA, 19 nt, Artificial Sequence
  Description of Artificial Sequence: Synthetic oligonucleotide
  Sense strand starting at position 514 of SEQ ID NO: 915708
gcucuauguaaacaggagu

SEQ ID NO: 1100187 - RNA, 19 nt, Artificial Sequence
  Description of Artificial Sequence: Synthetic oligonucleotide
  Antisense strand to SEQ ID NO: 1100186
acuccuguuuacauagagc

SEQ ID NO: 1100188 - RNA, 19 nt, Artificial Sequence
  Description of Artificial Sequence: Synthetic oligonucleotide
  Sense strand starting at position 540 of SEQ ID NO: 915708
aagaguuggcaagggucau

SEQ ID NO: 1100189 - RNA, 19 nt, Artificial Sequence
  Description of Artificial Sequence: Synthetic oligonucleotide
  Antisense strand to SEQ ID NO: 1100188
augacccuugccaacucuu

SEQ ID NO: 1100190 - RNA, 19 nt, Artificial Sequence
  Description of Artificial Sequence: Synthetic oligonucleotide
  Sense strand starting at position 541 of SEQ ID NO: 915708
agaguuggcaagggucaua

SEQ ID NO: 1100191 - RNA, 19 nt, Artificial Sequence
  Description of Artificial Sequence: Synthetic oligonucleotide
  Antisense strand to SEQ ID NO: 1100190
uaugacccuugccaacucu

SEQ ID NO: 1100192 - RNA, 19 nt, Artificial Sequence
  Description of Artificial Sequence: Synthetic oligonucleotide
  Sense strand starting at position 552 of SEQ ID NO: 915708
gggucauauccucaaggcu

SEQ ID NO: 1100193 - RNA, 19 nt, Artificial Sequence
  Description of Artificial Sequence: Synthetic oligonucleotide
  Antisense strand to SEQ ID NO: 1100192
agccuugaggauaugaccc

SEQ ID NO: 1100194 - RNA, 19 nt, Artificial Sequence
  Description of Artificial Sequence: Synthetic oligonucleotide
  Sense strand starting at position 622 of SEQ ID NO: 915708
gcaggaguaaaguaucugu

SEQ ID NO: 1100195 - RNA, 19 nt, Artificial Sequence
  Description of Artificial Sequence: Synthetic oligonucleotide
  Antisense strand to SEQ ID NO: 1100194
acagauacuuuacuccugc

SEQ ID NO: 1100196 - RNA, 19 nt, Artificial Sequence
  Description of Artificial Sequence: Synthetic oligonucleotide
  Sense strand starting at position 842 of SEQ ID NO: 915708
ccaguugcuauggaugagu

SEQ ID NO: 1100197 - RNA, 19 nt, Artificial Sequence
  Description of Artificial Sequence: Synthetic oligonucleotide
  Antisense strand to SEQ ID NO: 1100196
acucauccauagcaacugg

SEQ ID NO: 1100198 - RNA, 19 nt, Artificial Sequence
  Description of Artificial Sequence: Synthetic oligonucleotide
  Sense strand starting at position 863 of SEQ ID NO: 915708
uggagauaggaaugugugu

SEQ ID NO: 1100199 - RNA, 19 nt, Artificial Sequence
  Description of Artificial Sequence: Synthetic oligonucleotide
  Antisense strand to SEQ ID NO: 1100198
acacacauuccuaucucca

SEQ ID NO: 1100200 - RNA, 19 nt, Artificial Sequence
  Description of Artificial Sequence: Synthetic oligonucleotide
  Sense strand starting at position 868 of SEQ ID NO: 915708
auaggaaugugugucuaca

SEQ ID NO: 1100201 - RNA, 19 nt, Artificial Sequence
  Description of Artificial Sequence: Synthetic oligonucleotide
  Antisense strand to SEQ ID NO: 1100200
uguagacacacauuccuau

SEQ ID NO: 1100202 - RNA, 19 nt, Artificial Sequence
  Description of Artificial Sequence: Synthetic oligonucleotide
  Sense strand starting at position 890 of SEQ ID NO: 915708
agagaaacugccuguaucu

SEQ ID NO: 1100203 - RNA, 19 nt, Artificial Sequence
  Description of Artificial Sequence: Synthetic oligonucleotide
  Antisense strand to SEQ ID NO: 1100202
agauacaggcaguuucucu

SEQ ID NO: 1100204 - RNA, 19 nt, Artificial Sequence
  Description of Artificial Sequence: Synthetic oligonucleotide
  Sense strand starting at position 892 of SEQ ID NO: 915708
agaaacugccuguaucuaa

SEQ ID NO: 1100205 - RNA, 19 nt, Artificial Sequence
  Description of Artificial Sequence: Synthetic oligonucleotide
  Antisense strand to SEQ ID NO: 1100204
uuagauacaggcaguuucu

SEQ ID NO: 1100206 - RNA, 19 nt, Artificial Sequence
  Description of Artificial Sequence: Synthetic oligonucleotide
  Sense strand starting at position 899 of SEQ ID NO: 915708
gccuguaucuaacuuggaa

SEQ ID NO: 1100207 - RNA, 19 nt, Artificial Sequence
  Description of Artificial Sequence: Synthetic oligonucleotide
  Antisense strand to SEQ ID NO: 1100206
uuccaaguuagauacaggc

SEQ ID NO: 1100208 - RNA, 19 nt, Artificial Sequence
  Description of Artificial Sequence: Synthetic oligonucleotide
  Sense strand starting at position 1017 of SEQ ID NO: 915708
aaaggauaguuggcaacaa

SEQ ID NO: 1100209 - RNA, 19 nt, Artificial Sequence
  Description of Artificial Sequence: Synthetic oligonucleotide
  Antisense strand to SEQ ID NO: 1100208
uuguugccaacuauccuuu

SEQ ID NO: 1100210 - RNA, 19 nt, Artificial Sequence
  Description of Artificial Sequence: Synthetic oligonucleotide
  Sense strand starting at position 1295 of SEQ ID NO: 915708
agacuuagcugggcagaca

SEQ ID NO: 1100211 - RNA, 19 nt, Artificial Sequence
  Description of Artificial Sequence: Synthetic oligonucleotide
  Antisense strand to SEQ ID NO: 1100210
ugucugcccagcuaagucu

SEQ ID NO: 1100212 - RNA, 19 nt, Artificial Sequence
  Description of Artificial Sequence: Synthetic oligonucleotide
  Sense strand starting at position 1392 of SEQ ID NO: 915708
auguaaagagcuugagacu

SEQ ID NO: 1100213 - RNA, 19 nt, Artificial Sequence
  Description of Artificial Sequence: Synthetic oligonucleotide
  Antisense strand to SEQ ID NO: 1100212
agucucaagcucuuuacau

SEQ ID NO: 1100214 - RNA, 19 nt, Artificial Sequence
  Description of Artificial Sequence: Synthetic oligonucleotide
  Sense strand starting at position 2047 of SEQ ID NO: 915708
ucgaaacccugucuacaaa

SEQ ID NO: 1100215 - RNA, 19 nt, Artificial Sequence
  Description of Artificial Sequence: Synthetic oligonucleotide
  Antisense strand to SEQ ID NO: 1100214
uuuguagacaggguuucga

SEQ ID NO: 1100216 - RNA, 19 nt, Artificial Sequence
  Description of Artificial Sequence: Synthetic oligonucleotide
  Sense strand starting at position 2272 of SEQ ID NO: 915708
gccugagucauauacuggu

SEQ ID NO: 1100217 - RNA, 19 nt, Artificial Sequence
  Description of Artificial Sequence: Synthetic oligonucleotide
  Antisense strand to SEQ ID NO: 1100216
accaguauaugacucaggc

SEQ ID NO: 1100218 - RNA, 19 nt, Artificial Sequence
  Description of Artificial Sequence: Synthetic oligonucleotide
  Sense strand starting at position 2276 of SEQ ID NO: 915708
gagucauauacugguagga

SEQ ID NO: 1100219 - RNA, 19 nt, Artificial Sequence
  Description of Artificial Sequence: Synthetic oligonucleotide
  Antisense strand to SEQ ID NO: 1100218
uccuaccaguauaugacuc

SEQ ID NO: 1100220 - RNA, 19 nt, Artificial Sequence
  Description of Artificial Sequence: Synthetic oligonucleotide
  Sense strand starting at position 2335 of SEQ ID NO: 915708
uauggacuagcuugagaga

SEQ ID NO: 1100221 - RNA, 19 nt, Artificial Sequence
  Description of Artificial Sequence: Synthetic oligonucleotide
  Antisense strand to SEQ ID NO: 1100220
ucucucaagcuaguccaua

SEQ ID NO: 1100222 - RNA, 19 nt, Artificial Sequence
  Description of Artificial Sequence: Synthetic oligonucleotide
  Sense strand starting at position 2595 of SEQ ID NO: 915708
ugaagauuccuguacuucu

SEQ ID NO: 1100223 - RNA, 19 nt, Artificial Sequence
  Description of Artificial Sequence: Synthetic oligonucleotide
  Antisense strand to SEQ ID NO: 1100222
agaaguacaggaaucuuca

SEQ ID NO: 1100224 - RNA, 19 nt, Artificial Sequence
  Description of Artificial Sequence: Synthetic oligonucleotide
  Sense strand starting at position 2647 of SEQ ID NO: 915708
cgaucaugugguuaccacu

SEQ ID NO: 1100225 - RNA, 19 nt, Artificial Sequence
  Description of Artificial Sequence: Synthetic oligonucleotide
  Antisense strand to SEQ ID NO: 1100224
agugguaaccacaugaucg

SEQ ID NO: 1100226 - RNA, 19 nt, Artificial Sequence
  Description of Artificial Sequence: Synthetic oligonucleotide
  Sense strand starting at position 2653 of SEQ ID NO: 915708
ugugguuaccacugaaacu

SEQ ID NO: 1100227 - RNA, 19 nt, Artificial Sequence
  Description of Artificial Sequence: Synthetic oligonucleotide
  Antisense strand to SEQ ID NO: 1100226
aguuucagugguaaccaca

SEQ ID NO: 1100228 - RNA, 19 nt, Artificial Sequence
  Description of Artificial Sequence: Synthetic oligonucleotide
  Sense strand starting at position 2741 of SEQ ID NO: 915708
agggacagcuauuccauau

SEQ ID NO: 1100229 - RNA, 19 nt, Artificial Sequence
  Description of Artificial Sequence: Synthetic oligonucleotide
  Antisense strand to SEQ ID NO: 1100228
auauggaauagcugucccu

SEQ ID NO: 1100230 - RNA, 19 nt, Artificial Sequence
  Description of Artificial Sequence: Synthetic oligonucleotide
  Sense strand starting at position 2781 of SEQ ID NO: 915708
gucaauaaguacuugcaga

SEQ ID NO: 1100231 - RNA, 19 nt, Artificial Sequence
  Description of Artificial Sequence: Synthetic oligonucleotide
  Antisense strand to SEQ ID NO: 1100230
ucugcaaguacuuauugac

SEQ ID NO: 1100232 - RNA, 19 nt, Artificial Sequence
  Description of Artificial Sequence: Synthetic oligonucleotide
  Sense strand starting at position 2984 of SEQ ID NO: 915708
gcucaugugagugauauaa

SEQ ID NO: 1100233 - RNA, 19 nt, Artificial Sequence
  Description of Artificial Sequence: Synthetic oligonucleotide
  Antisense strand to SEQ ID NO: 1100232
uuauaucacucacaugagc

SEQ ID NO: 1100234 - RNA, 19 nt, Artificial Sequence
  Description of Artificial Sequence: Synthetic oligonucleotide
  Sense strand starting at position 3004 of SEQ ID NO: 915708
auggcuuguccuuaucaug

SEQ ID NO: 1100235 - RNA, 19 nt, Artificial Sequence
  Description of Artificial Sequence: Synthetic oligonucleotide
  Antisense strand to SEQ ID NO: 1100234
caugauaaggacaagccau

SEQ ID NO: 1100236 - RNA, 19 nt, Artificial Sequence
  Description of Artificial Sequence: Synthetic oligonucleotide
  Sense strand starting at position 3094 of SEQ ID NO: 915708
ugagauuuguguccuccuu

SEQ ID NO: 1100237 - RNA, 19 nt, Artificial Sequence
  Description of Artificial Sequence: Synthetic oligonucleotide
  Antisense strand to SEQ ID NO: 1100236
aaggaggacacaaaucuca

SEQ ID NO: 1100238 - RNA, 19 nt, Artificial Sequence
  Description of Artificial Sequence: Synthetic oligonucleotide
  Sense strand starting at position 3096 of SEQ ID NO: 915708
agauuuguguccuccuuau

SEQ ID NO: 1100239 - RNA, 19 nt, Artificial Sequence
  Description of Artificial Sequence: Synthetic oligonucleotide
  Antisense strand to SEQ ID NO: 1100238
auaaggaggacacaaaucu

SEQ ID NO: 1100240 - RNA, 19 nt, Artificial Sequence
  Description of Artificial Sequence: Synthetic oligonucleotide
  Sense strand starting at position 3281 of SEQ ID NO: 915708
guauacaguuuaucaucua

SEQ ID NO: 1100241 - RNA, 19 nt, Artificial Sequence
  Description of Artificial Sequence: Synthetic oligonucleotide
  Antisense strand to SEQ ID NO: 1100240
uagaugauaaacuguauac

SEQ ID NO: 1100242 - RNA, 19 nt, Artificial Sequence
  Description of Artificial Sequence: Synthetic oligonucleotide
  Sense strand starting at position 3325 of SEQ ID NO: 915708
cuguauauccauugacauu

SEQ ID NO: 1100243 - RNA, 19 nt, Artificial Sequence
  Description of Artificial Sequence: Synthetic oligonucleotide
  Antisense strand to SEQ ID NO: 1100242
aaugucaauggauauacag

SEQ ID NO: 1100244 - RNA, 19 nt, Artificial Sequence
  Description of Artificial Sequence: Synthetic oligonucleotide
  Sense strand starting at position 3424 of SEQ ID NO: 915708
cauuaucuuggucacguaa

SEQ ID NO: 1100245 - RNA, 19 nt, Artificial Sequence
  Description of Artificial Sequence: Synthetic oligonucleotide
  Antisense strand to SEQ ID NO: 1100244
uuacgugaccaagauaaug

SEQ ID NO: 1100246 - RNA, 19 nt, Artificial Sequence
  Description of Artificial Sequence: Synthetic oligonucleotide
  Sense strand starting at position 3478 of SEQ ID NO: 915708
augaguaauauaggagucu

SEQ ID NO: 1100247 - RNA, 19 nt, Artificial Sequence
  Description of Artificial Sequence: Synthetic oligonucleotide
  Antisense strand to SEQ ID NO: 1100246
agacuccuauauuacucau

SEQ ID NO: 1100248 - RNA, 19 nt, Artificial Sequence
  Description of Artificial Sequence: Synthetic oligonucleotide
  Sense strand starting at position 3545 of SEQ ID NO: 915708
ugacuauuuguuuguuugu

SEQ ID NO: 1100249 - RNA, 19 nt, Artificial Sequence
  Description of Artificial Sequence: Synthetic oligonucleotide
  Antisense strand to SEQ ID NO: 1100248
acaaacaaacaaauaguca

SEQ ID NO: 1100250 - RNA, 19 nt, Artificial Sequence
  Description of Artificial Sequence: Synthetic oligonucleotide
  Sense strand starting at position 3869 of SEQ ID NO: 915708
cauaaauaagcauggugau

SEQ ID NO: 1100251 - RNA, 19 nt, Artificial Sequence
  Description of Artificial Sequence: Synthetic oligonucleotide
  Antisense strand to SEQ ID NO: 1100250
aucaccaugcuuauuuaug

SEQ ID NO: 1100252 - RNA, 19 nt, Artificial Sequence
  Description of Artificial Sequence: Synthetic oligonucleotide
  Sense strand starting at position 3870 of SEQ ID NO: 915708
auaaauaagcauggugaua

SEQ ID NO: 1100253 - RNA, 19 nt, Artificial Sequence
  Description of Artificial Sequence: Synthetic oligonucleotide
  Antisense strand to SEQ ID NO: 1100252
uaucaccaugcuuauuuau

SEQ ID NO: 1100254 - RNA, 19 nt, Artificial Sequence
  Description of Artificial Sequence: Synthetic oligonucleotide
  Sense strand starting at position 3917 of SEQ ID NO: 915708
guaucaaaguaggauuuga

SEQ ID NO: 1100255 - RNA, 19 nt, Artificial Sequence
  Description of Artificial Sequence: Synthetic oligonucleotide
  Antisense strand to SEQ ID NO: 1100254
ucaaauccuacuuugauac

SEQ ID NO: 1100256 - RNA, 19 nt, Artificial Sequence
  Description of Artificial Sequence: Synthetic oligonucleotide
  Sense strand starting at position 3928 of SEQ ID NO: 915708
ggauuugacucacacacug

SEQ ID NO: 1100257 - RNA, 19 nt, Artificial Sequence
  Description of Artificial Sequence: Synthetic oligonucleotide
  Antisense strand to SEQ ID NO: 1100256
cagugugugagucaaaucc

SEQ ID NO: 1100258 - RNA, 19 nt, Artificial Sequence
  Description of Artificial Sequence: Synthetic oligonucleotide
  Sense strand starting at position 3953 of SEQ ID NO: 915708
ucagauuucuaacagacag

SEQ ID NO: 1100259 - RNA, 19 nt, Artificial Sequence
  Description of Artificial Sequence: Synthetic oligonucleotide
  Antisense strand to SEQ ID NO: 1100258
cugucuguuagaaaucuga

SEQ ID NO: 1100260 - RNA, 19 nt, Artificial Sequence
  Description of Artificial Sequence: Synthetic oligonucleotide
  Sense strand starting at position 21 of SEQ ID NO: 915709
uccaguuagguccacauca

SEQ ID NO: 1100261 - RNA, 19 nt, Artificial Sequence
  Description of Artificial Sequence: Synthetic oligonucleotide
  Antisense strand to SEQ ID NO: 1100260
ugauguggaccuaacugga

SEQ ID NO: 1100262 - RNA, 19 nt, Artificial Sequence
  Description of Artificial Sequence: Synthetic oligonucleotide
  Sense strand starting at position 470 of SEQ ID NO: 915709
gccuuuaauuuccucgcau

SEQ ID NO: 1100263 - RNA, 19 nt, Artificial Sequence
  Description of Artificial Sequence: Synthetic oligonucleotide
  Antisense strand to SEQ ID NO: 1100262
augcgaggaaauuaaaggc

SEQ ID NO: 1100264 - RNA, 19 nt, Artificial Sequence
  Description of Artificial Sequence: Synthetic oligonucleotide
  Sense strand starting at position 501 of SEQ ID NO: 915709
acucaaauguguucuuaca

SEQ ID NO: 1100265 - RNA, 19 nt, Artificial Sequence
  Description of Artificial Sequence: Synthetic oligonucleotide
  Antisense strand to SEQ ID NO: 1100264
uguaagaacacauuugagu

SEQ ID NO: 1100266 - RNA, 19 nt, Artificial Sequence
  Description of Artificial Sequence: Synthetic oligonucleotide
  Sense strand starting at position 611 of SEQ ID NO: 915709
ugaagauguuacuccauag

SEQ ID NO: 1100267 - RNA, 19 nt, Artificial Sequence
  Description of Artificial Sequence: Synthetic oligonucleotide
  Antisense strand to SEQ ID NO: 1100266
cuauggaguaacaucuuca

SEQ ID NO: 1100268 - RNA, 19 nt, Artificial Sequence
  Description of Artificial Sequence: Synthetic oligonucleotide
  Sense strand starting at position 642 of SEQ ID NO: 915709
ucuuguguacucuaacauu

SEQ ID NO: 1100269 - RNA, 19 nt, Artificial Sequence
  Description of Artificial Sequence: Synthetic oligonucleotide
  Antisense strand to SEQ ID NO: 1100268
aauguuagaguacacaaga

SEQ ID NO: 1100270 - RNA, 19 nt, Artificial Sequence
  Description of Artificial Sequence: Synthetic oligonucleotide
  Sense strand starting at position 662 of SEQ ID NO: 915709
aucgauauggucuaugauc

SEQ ID NO: 1100271 - RNA, 19 nt, Artificial Sequence
  Description of Artificial Sequence: Synthetic oligonucleotide
  Antisense strand to SEQ ID NO: 1100270
gaucauagaccauaucgau

SEQ ID NO: 1100272 - RNA, 19 nt, Artificial Sequence
  Description of Artificial Sequence: Synthetic oligonucleotide
  Sense strand starting at position 664 of SEQ ID NO: 915709
cgauauggucuaugaucac

SEQ ID NO: 1100273 - RNA, 19 nt, Artificial Sequence
  Description of Artificial Sequence: Synthetic oligonucleotide
  Antisense strand to SEQ ID NO: 1100272
gugaucauagaccauaucg

SEQ ID NO: 1100274 - RNA, 19 nt, Artificial Sequence
  Description of Artificial Sequence: Synthetic oligonucleotide
  Sense strand starting at position 670 of SEQ ID NO: 915709
ggucuaugaucacuuucua

SEQ ID NO: 1100275 - RNA, 19 nt, Artificial Sequence
  Description of Artificial Sequence: Synthetic oligonucleotide
  Antisense strand to SEQ ID NO: 1100274
uagaaagugaucauagacc

SEQ ID NO: 1100276 - RNA, 19 nt, Artificial Sequence
  Description of Artificial Sequence: Synthetic oligonucleotide
  Sense strand starting at position 728 of SEQ ID NO: 915709
auguuaaauggaugcuaau

SEQ ID NO: 1100277 - RNA, 19 nt, Artificial Sequence
  Description of Artificial Sequence: Synthetic oligonucleotide
  Antisense strand to SEQ ID NO: 1100276
auuagcauccauuuaacau

SEQ ID NO: 1100278 - RNA, 19 nt, Artificial Sequence
  Description of Artificial Sequence: Synthetic oligonucleotide
  Sense strand starting at position 801 of SEQ ID NO: 915709
ggucuugugccugacuaga

SEQ ID NO: 1100279 - RNA, 19 nt, Artificial Sequence
  Description of Artificial Sequence: Synthetic oligonucleotide
  Antisense strand to SEQ ID NO: 1100278
ucuagucaggcacaagacc

SEQ ID NO: 1100280 - RNA, 19 nt, Artificial Sequence
  Description of Artificial Sequence: Synthetic oligonucleotide
  Sense strand starting at position 827 of SEQ ID NO: 915709
gggagacagucaguaugua

SEQ ID NO: 1100281 - RNA, 19 nt, Artificial Sequence
  Description of Artificial Sequence: Synthetic oligonucleotide
  Antisense strand to SEQ ID NO: 1100280
uacauacugacugucuccc

SEQ ID NO: 1100282 - RNA, 19 nt, Artificial Sequence
  Description of Artificial Sequence: Synthetic oligonucleotide
  Sense strand starting at position 836 of SEQ ID NO: 915709
ucaguauguaggcagacau

SEQ ID NO: 1100283 - RNA, 19 nt, Artificial Sequence
  Description of Artificial Sequence: Synthetic oligonucleotide
  Antisense strand to SEQ ID NO: 1100282
augucugccuacauacuga

SEQ ID NO: 1100284 - RNA, 19 nt, Artificial Sequence
  Description of Artificial Sequence: Synthetic oligonucleotide
  Sense strand starting at position 855 of SEQ ID NO: 915709
ggauucuacccaggaguaa

SEQ ID NO: 1100285 - RNA, 19 nt, Artificial Sequence
  Description of Artificial Sequence: Synthetic oligonucleotide
  Antisense strand to SEQ ID NO: 1100284
uuacuccuggguagaaucc

SEQ ID NO: 1100286 - RNA, 19 nt, Artificial Sequence
  Description of Artificial Sequence: Synthetic oligonucleotide
  Sense strand starting at position 928 of SEQ ID NO: 915709
cagaauggcaugugucaga

SEQ ID NO: 1100287 - RNA, 19 nt, Artificial Sequence
  Description of Artificial Sequence: Synthetic oligonucleotide
  Antisense strand to SEQ ID NO: 1100286
ucugacacaugccauucug

SEQ ID NO: 1100288 - RNA, 19 nt, Artificial Sequence
  Description of Artificial Sequence: Synthetic oligonucleotide
  Sense strand starting at position 939 of SEQ ID NO: 915709
gugucagaauaucuguaac

SEQ ID NO: 1100289 - RNA, 19 nt, Artificial Sequence
  Description of Artificial Sequence: Synthetic oligonucleotide
  Antisense strand to SEQ ID NO: 1100288
guuacagauauucugacac

SEQ ID NO: 1100290 - RNA, 19 nt, Artificial Sequence
  Description of Artificial Sequence: Synthetic oligonucleotide
  Sense strand starting at position 941 of SEQ ID NO: 915709
gucagaauaucuguaacau

SEQ ID NO: 1100291 - RNA, 19 nt, Artificial Sequence
  Description of Artificial Sequence: Synthetic oligonucleotide
  Antisense strand to SEQ ID NO: 1100290
auguuacagauauucugac

SEQ ID NO: 1100292 - RNA, 19 nt, Artificial Sequence
  Description of Artificial Sequence: Synthetic oligonucleotide
  Sense strand starting at position 1066 of SEQ ID NO: 915709
ugaacaacuucuguuaagu

SEQ ID NO: 1100293 - RNA, 19 nt, Artificial Sequence
  Description of Artificial Sequence: Synthetic oligonucleotide
  Antisense strand to SEQ ID NO: 1100292
acuuaacagaaguuguuca

SEQ ID NO: 1100294 - RNA, 19 nt, Artificial Sequence
  Description of Artificial Sequence: Synthetic oligonucleotide
  Sense strand starting at position 1081 of SEQ ID NO: 915709
aaguaauugugagcaaaga

SEQ ID NO: 1100295 - RNA, 19 nt, Artificial Sequence
  Description of Artificial Sequence: Synthetic oligonucleotide
  Antisense strand to SEQ ID NO: 1100294
ucuuugcucacaauuacuu

SEQ ID NO: 1100296 - RNA, 19 nt, Artificial Sequence
  Description of Artificial Sequence: Synthetic oligonucleotide
  Sense strand starting at position 1138 of SEQ ID NO: 915709
gugugucuaagaggaagaa

SEQ ID NO: 1100297 - RNA, 19 nt, Artificial Sequence
  Description of Artificial Sequence: Synthetic oligonucleotide
  Antisense strand to SEQ ID NO: 1100296
uucuuccucuuagacacac

SEQ ID NO: 1100298 - RNA, 19 nt, Artificial Sequence
  Description of Artificial Sequence: Synthetic oligonucleotide
  Sense strand starting at position 1252 of SEQ ID NO: 915709
agcccugagaccugcagaa

SEQ ID NO: 1100299 - RNA, 19 nt, Artificial Sequence
  Description of Artificial Sequence: Synthetic oligonucleotide
  Antisense strand to SEQ ID NO: 1100298
uucugcaggucucagggcu

SEQ ID NO: 1100300 - RNA, 19 nt, Artificial Sequence
  Description of Artificial Sequence: Synthetic oligonucleotide
  Sense strand starting at position 2101 of SEQ ID NO: 915709
gagcgucuaggugaaauga

SEQ ID NO: 1100301 - RNA, 19 nt, Artificial Sequence
  Description of Artificial Sequence: Synthetic oligonucleotide
  Antisense strand to SEQ ID NO: 1100300
ucauuucaccuagacgcuc

SEQ ID NO: 1100302 - RNA, 19 nt, Artificial Sequence
  Description of Artificial Sequence: Synthetic oligonucleotide
  Sense strand starting at position 2273 of SEQ ID NO: 915709
guggguacaggucacagau

SEQ ID NO: 1100303 - RNA, 19 nt, Artificial Sequence
  Description of Artificial Sequence: Synthetic oligonucleotide
  Antisense strand to SEQ ID NO: 1100302
aucugugaccuguacccac

SEQ ID NO: 1100304 - RNA, 19 nt, Artificial Sequence
  Description of Artificial Sequence: Synthetic oligonucleotide
  Sense strand starting at position 2305 of SEQ ID NO: 915709
cuacaauguaugggacagu

SEQ ID NO: 1100305 - RNA, 19 nt, Artificial Sequence
  Description of Artificial Sequence: Synthetic oligonucleotide
  Antisense strand to SEQ ID NO: 1100304
acugucccauacauuguag

SEQ ID NO: 1100306 - RNA, 19 nt, Artificial Sequence
  Description of Artificial Sequence: Synthetic oligonucleotide
  Sense strand starting at position 2458 of SEQ ID NO: 915709
ggucccucgaaucaguuua

SEQ ID NO: 1100307 - RNA, 19 nt, Artificial Sequence
  Description of Artificial Sequence: Synthetic oligonucleotide
  Antisense strand to SEQ ID NO: 1100306
uaaacugauucgagggacc

SEQ ID NO: 1100308 - RNA, 19 nt, Artificial Sequence
  Description of Artificial Sequence: Synthetic oligonucleotide
  Sense strand starting at position 2463 of SEQ ID NO: 915709
cucgaaucaguuuaccaau

SEQ ID NO: 1100309 - RNA, 19 nt, Artificial Sequence
  Description of Artificial Sequence: Synthetic oligonucleotide
  Antisense strand to SEQ ID NO: 1100308
auugguaaacugauucgag

SEQ ID NO: 1100310 - RNA, 19 nt, Artificial Sequence
  Description of Artificial Sequence: Synthetic oligonucleotide
  Sense strand starting at position 2679 of SEQ ID NO: 915709
ucaaacugugcacaguaaa

SEQ ID NO: 1100311 - RNA, 19 nt, Artificial Sequence
  Description of Artificial Sequence: Synthetic oligonucleotide
  Antisense strand to SEQ ID NO: 1100310
uuuacugugcacaguuuga

SEQ ID NO: 1100312 - RNA, 19 nt, Artificial Sequence
  Description of Artificial Sequence: Synthetic oligonucleotide
  Sense strand starting at position 2690 of SEQ ID NO: 915709
acaguaaaugggugcauau

SEQ ID NO: 1100313 - RNA, 19 nt, Artificial Sequence
  Description of Artificial Sequence: Synthetic oligonucleotide
  Antisense strand to SEQ ID NO: 1100312
auaugcacccauuuacugu

SEQ ID NO: 1100314 - RNA, 19 nt, Artificial Sequence
  Description of Artificial Sequence: Synthetic oligonucleotide
  Sense strand starting at position 2692 of SEQ ID NO: 915709
aguaaaugggugcauauua

SEQ ID NO: 1100315 - RNA, 19 nt, Artificial Sequence
  Description of Artificial Sequence: Synthetic oligonucleotide
  Antisense strand to SEQ ID NO: 1100314
uaauaugcacccauuuacu

SEQ ID NO: 1100316 - RNA, 19 nt, Artificial Sequence
  Description of Artificial Sequence: Synthetic oligonucleotide
  Sense strand starting at position 2796 of SEQ ID NO: 915709
acuaguuguaaguaguaaa

SEQ ID NO: 1100317 - RNA, 19 nt, Artificial Sequence
  Description of Artificial Sequence: Synthetic oligonucleotide
  Antisense strand to SEQ ID NO: 1100316
uuuacuacuuacaacuagu

SEQ ID NO: 1100318 - RNA, 19 nt, Artificial Sequence
  Description of Artificial Sequence: Synthetic oligonucleotide
  Sense strand starting at position 2845 of SEQ ID NO: 915709
cugcuuugaaacugaggua

SEQ ID NO: 1100319 - RNA, 19 nt, Artificial Sequence
  Description of Artificial Sequence: Synthetic oligonucleotide
  Antisense strand to SEQ ID NO: 1100318
uaccucaguuucaaagcag

SEQ ID NO: 1100320 - RNA, 19 nt, Artificial Sequence
  Description of Artificial Sequence: Synthetic oligonucleotide
  Sense strand starting at position 2846 of SEQ ID NO: 915709
ugcuuugaaacugagguaa

SEQ ID NO: 1100321 - RNA, 19 nt, Artificial Sequence
  Description of Artificial Sequence: Synthetic oligonucleotide
  Antisense strand to SEQ ID NO: 1100320
uuaccucaguuucaaagca

SEQ ID NO: 1100322 - RNA, 19 nt, Artificial Sequence
  Description of Artificial Sequence: Synthetic oligonucleotide
  Sense strand starting at position 3039 of SEQ ID NO: 915709
uguagagcacauuacauaa

SEQ ID NO: 1100323 - RNA, 19 nt, Artificial Sequence
  Description of Artificial Sequence: Synthetic oligonucleotide
  Antisense strand to SEQ ID NO: 1100322
uuauguaaugugcucuaca

SEQ ID NO: 1100324 - RNA, 19 nt, Artificial Sequence
  Description of Artificial Sequence: Synthetic oligonucleotide
  Sense strand starting at position 3126 of SEQ ID NO: 915709
caugcauggugaucaagga

SEQ ID NO: 1100325 - RNA, 19 nt, Artificial Sequence
  Description of Artificial Sequence: Synthetic oligonucleotide
  Antisense strand to SEQ ID NO: 1100324
uccuugaucaccaugcaug

SEQ ID NO: 1100326 - RNA, 19 nt, Artificial Sequence
  Description of Artificial Sequence: Synthetic oligonucleotide
  Sense strand starting at position 3147 of SEQ ID NO: 915709
auuauaaacuuguuggaag

SEQ ID NO: 1100327 - RNA, 19 nt, Artificial Sequence
  Description of Artificial Sequence: Synthetic oligonucleotide
  Antisense strand to SEQ ID NO: 1100326
cuuccaacaaguuuauaau

SEQ ID NO: 1100328 - RNA, 19 nt, Artificial Sequence
  Description of Artificial Sequence: Synthetic oligonucleotide
  Sense strand starting at position 3149 of SEQ ID NO: 915709
uauaaacuuguuggaaguu

SEQ ID NO: 1100329 - RNA, 19 nt, Artificial Sequence
  Description of Artificial Sequence: Synthetic oligonucleotide
  Antisense strand to SEQ ID NO: 1100328
aacuuccaacaaguuuaua

SEQ ID NO: 1100330 - RNA, 19 nt, Artificial Sequence
  Description of Artificial Sequence: Synthetic oligonucleotide
  Sense strand starting at position 3207 of SEQ ID NO: 915709
uugggaauaugcuuugacu

SEQ ID NO: 1100331 - RNA, 19 nt, Artificial Sequence
  Description of Artificial Sequence: Synthetic oligonucleotide
  Antisense strand to SEQ ID NO: 1100330
agucaaagcauauucccaa

SEQ ID NO: 1100332 - RNA, 19 nt, Artificial Sequence
  Description of Artificial Sequence: Synthetic oligonucleotide
  Sense strand starting at position 3209 of SEQ ID NO: 915709
gggaauaugcuuugacuac

SEQ ID NO: 1100333 - RNA, 19 nt, Artificial Sequence
  Description of Artificial Sequence: Synthetic oligonucleotide
  Antisense strand to SEQ ID NO: 1100332
guagucaaagcauauuccc

SEQ ID NO: 1100334 - RNA, 19 nt, Artificial Sequence
  Description of Artificial Sequence: Synthetic oligonucleotide
  Sense strand starting at position 3789 of SEQ ID NO: 915709
uugagaacugguuagggca

SEQ ID NO: 1100335 - RNA, 19 nt, Artificial Sequence
  Description of Artificial Sequence: Synthetic oligonucleotide
  Antisense strand to SEQ ID NO: 1100334
ugcccuaaccaguucucaa

SEQ ID NO: 1100336 - RNA, 19 nt, Artificial Sequence
  Description of Artificial Sequence: Synthetic oligonucleotide
  Sense strand starting at position 3899 of SEQ ID NO: 915709
cuuugcucaggugagauaa

SEQ ID NO: 1100337 - RNA, 19 nt, Artificial Sequence
  Description of Artificial Sequence: Synthetic oligonucleotide
  Antisense strand to SEQ ID NO: 1100336
uuaucucaccugagcaaag

SEQ ID NO: 1100338 - RNA, 19 nt, Artificial Sequence
  Description of Artificial Sequence: Synthetic oligonucleotide
  Sense strand starting at position 3918 of SEQ ID NO: 915709
augaauaucugguuacuuc

SEQ ID NO: 1100339 - RNA, 19 nt, Artificial Sequence
  Description of Artificial Sequence: Synthetic oligonucleotide
  Antisense strand to SEQ ID NO: 1100338
gaaguaaccagauauucau

SEQ ID NO: 1100340 - RNA, 19 nt, Artificial Sequence
  Description of Artificial Sequence: Synthetic oligonucleotide
  Sense strand starting at position 47 of SEQ ID NO: 915710
accauaguccuuuauguag

SEQ ID NO: 1100341 - RNA, 19 nt, Artificial Sequence
  Description of Artificial Sequence: Synthetic oligonucleotide
  Antisense strand to SEQ ID NO: 1100340
cuacauaaaggacuauggu

SEQ ID NO: 1100342 - RNA, 19 nt, Artificial Sequence
  Description of Artificial Sequence: Synthetic oligonucleotide
  Sense strand starting at position 64 of SEQ ID NO: 915710
agugucuuccaccagaagu

SEQ ID NO: 1100343 - RNA, 19 nt, Artificial Sequence
  Description of Artificial Sequence: Synthetic oligonucleotide
  Antisense strand to SEQ ID NO: 1100342
acuucugguggaagacacu

SEQ ID NO: 1100344 - RNA, 19 nt, Artificial Sequence
  Description of Artificial Sequence: Synthetic oligonucleotide
  Sense strand starting at position 258 of SEQ ID NO: 915710
ggacucaugcaaugucaag

SEQ ID NO: 1100345 - RNA, 19 nt, Artificial Sequence
  Description of Artificial Sequence: Synthetic oligonucleotide
  Antisense strand to SEQ ID NO: 1100344
cuugacauugcaugagucc

SEQ ID NO: 1100346 - RNA, 19 nt, Artificial Sequence
  Description of Artificial Sequence: Synthetic oligonucleotide
  Sense strand starting at position 264 of SEQ ID NO: 915710
augcaaugucaaggaauaa

SEQ ID NO: 1100347 - RNA, 19 nt, Artificial Sequence
  Description of Artificial Sequence: Synthetic oligonucleotide
  Antisense strand to SEQ ID NO: 1100346
uuauuccuugacauugcau

SEQ ID NO: 1100348 - RNA, 19 nt, Artificial Sequence
  Description of Artificial Sequence: Synthetic oligonucleotide
  Sense strand starting at position 444 of SEQ ID NO: 915710
gaguuucuccuaugagaag

SEQ ID NO: 1100349 - RNA, 19 nt, Artificial Sequence
  Description of Artificial Sequence: Synthetic oligonucleotide
  Antisense strand to SEQ ID NO: 1100348
cuucucauaggagaaacuc

SEQ ID NO: 1100350 - RNA, 19 nt, Artificial Sequence
  Description of Artificial Sequence: Synthetic oligonucleotide
  Sense strand starting at position 565 of SEQ ID NO: 915710
ugugaagcuggugauuaga

SEQ ID NO: 1100351 - RNA, 19 nt, Artificial Sequence
  Description of Artificial Sequence: Synthetic oligonucleotide
  Antisense strand to SEQ ID NO: 1100350
ucuaaucaccagcuucaca

SEQ ID NO: 1100352 - RNA, 19 nt, Artificial Sequence
  Description of Artificial Sequence: Synthetic oligonucleotide
  Sense strand starting at position 567 of SEQ ID NO: 915710
ugaagcuggugauuagaau

SEQ ID NO: 1100353 - RNA, 19 nt, Artificial Sequence
  Description of Artificial Sequence: Synthetic oligonucleotide
  Antisense strand to SEQ ID NO: 1100352
auucuaaucaccagcuuca

SEQ ID NO: 1100354 - RNA, 19 nt, Artificial Sequence
  Description of Artificial Sequence: Synthetic oligonucleotide
  Sense strand starting at position 658 of SEQ ID NO: 915710
aaaggaguagccugauucu

SEQ ID NO: 1100355 - RNA, 19 nt, Artificial Sequence
  Description of Artificial Sequence: Synthetic oligonucleotide
  Antisense strand to SEQ ID NO: 1100354
agaaucaggcuacuccuuu

SEQ ID NO: 1100356 - RNA, 19 nt, Artificial Sequence
  Description of Artificial Sequence: Synthetic oligonucleotide
  Sense strand starting at position 856 of SEQ ID NO: 915710
cucauucuuggcuaagaga

SEQ ID NO: 1100357 - RNA, 19 nt, Artificial Sequence
  Description of Artificial Sequence: Synthetic oligonucleotide
  Antisense strand to SEQ ID NO: 1100356
ucucuuagccaagaaugag

SEQ ID NO: 1100358 - RNA, 19 nt, Artificial Sequence
  Description of Artificial Sequence: Synthetic oligonucleotide
  Sense strand starting at position 873 of SEQ ID NO: 915710
gacuguacucuaggaucau

SEQ ID NO: 1100359 - RNA, 19 nt, Artificial Sequence
  Description of Artificial Sequence: Synthetic oligonucleotide
  Antisense strand to SEQ ID NO: 1100358
augauccuagaguacaguc

SEQ ID NO: 1100360 - RNA, 19 nt, Artificial Sequence
  Description of Artificial Sequence: Synthetic oligonucleotide
  Sense strand starting at position 879 of SEQ ID NO: 915710
acucuaggaucaucuguua

SEQ ID NO: 1100361 - RNA, 19 nt, Artificial Sequence
  Description of Artificial Sequence: Synthetic oligonucleotide
  Antisense strand to SEQ ID NO: 1100360
uaacagaugauccuagagu

SEQ ID NO: 1100362 - RNA, 19 nt, Artificial Sequence
  Description of Artificial Sequence: Synthetic oligonucleotide
  Sense strand starting at position 986 of SEQ ID NO: 915710
ucagaauuaugguuccaca

SEQ ID NO: 1100363 - RNA, 19 nt, Artificial Sequence
  Description of Artificial Sequence: Synthetic oligonucleotide
  Antisense strand to SEQ ID NO: 1100362
uguggaaccauaauucuga

SEQ ID NO: 1100364 - RNA, 19 nt, Artificial Sequence
  Description of Artificial Sequence: Synthetic oligonucleotide
  Sense strand starting at position 2021 of SEQ ID NO: 915710
augguauaagaaugguaca

SEQ ID NO: 1100365 - RNA, 19 nt, Artificial Sequence
  Description of Artificial Sequence: Synthetic oligonucleotide
  Antisense strand to SEQ ID NO: 1100364
uguaccauucuuauaccau

SEQ ID NO: 1100366 - RNA, 19 nt, Artificial Sequence
  Description of Artificial Sequence: Synthetic oligonucleotide
  Sense strand starting at position 2022 of SEQ ID NO: 915710
ugguauaagaaugguacaa

SEQ ID NO: 1100367 - RNA, 19 nt, Artificial Sequence
  Description of Artificial Sequence: Synthetic oligonucleotide
  Antisense strand to SEQ ID NO: 1100366
uuguaccauucuuauacca

SEQ ID NO: 1100368 - RNA, 19 nt, Artificial Sequence
  Description of Artificial Sequence: Synthetic oligonucleotide
  Sense strand starting at position 2079 of SEQ ID NO: 915710
ccgagacugcaauaucaaa

SEQ ID NO: 1100369 - RNA, 19 nt, Artificial Sequence
  Description of Artificial Sequence: Synthetic oligonucleotide
  Antisense strand to SEQ ID NO: 1100368
uuugauauugcagucucgg

SEQ ID NO: 1100370 - RNA, 19 nt, Artificial Sequence
  Description of Artificial Sequence: Synthetic oligonucleotide
  Sense strand starting at position 2212 of SEQ ID NO: 915710
uugcuauuugcaugacuuu

SEQ ID NO: 1100371 - RNA, 19 nt, Artificial Sequence
  Description of Artificial Sequence: Synthetic oligonucleotide
  Antisense strand to SEQ ID NO: 1100370
aaagucaugcaaauagcaa

SEQ ID NO: 1100372 - RNA, 19 nt, Artificial Sequence
  Description of Artificial Sequence: Synthetic oligonucleotide
  Sense strand starting at position 2441 of SEQ ID NO: 915710
agccucaguguuuagaaca

SEQ ID NO: 1100373 - RNA, 19 nt, Artificial Sequence
  Description of Artificial Sequence: Synthetic oligonucleotide
  Antisense strand to SEQ ID NO: 1100372
uguucuaaacacugaggcu

SEQ ID NO: 1100374 - RNA, 19 nt, Artificial Sequence
  Description of Artificial Sequence: Synthetic oligonucleotide
  Sense strand starting at position 2461 of SEQ ID NO: 915710
agagaagcacaauguuuga

SEQ ID NO: 1100375 - RNA, 19 nt, Artificial Sequence
  Description of Artificial Sequence: Synthetic oligonucleotide
  Antisense strand to SEQ ID NO: 1100374
ucaaacauugugcuucucu

SEQ ID NO: 1100376 - RNA, 19 nt, Artificial Sequence
  Description of Artificial Sequence: Synthetic oligonucleotide
  Sense strand starting at position 2599 of SEQ ID NO: 915710
gugguuuccagugaagaag

SEQ ID NO: 1100377 - RNA, 19 nt, Artificial Sequence
  Description of Artificial Sequence: Synthetic oligonucleotide
  Antisense strand to SEQ ID NO: 1100376
cuucuucacuggaaaccac

SEQ ID NO: 1100378 - RNA, 19 nt, Artificial Sequence
  Description of Artificial Sequence: Synthetic oligonucleotide
  Sense strand starting at position 2841 of SEQ ID NO: 915710
cacccaauucgaugguaga

SEQ ID NO: 1100379 - RNA, 19 nt, Artificial Sequence
  Description of Artificial Sequence: Synthetic oligonucleotide
  Antisense strand to SEQ ID NO: 1100378
ucuaccaucgaauugggug

SEQ ID NO: 1100380 - RNA, 19 nt, Artificial Sequence
  Description of Artificial Sequence: Synthetic oligonucleotide
  Sense strand starting at position 2842 of SEQ ID NO: 915710
acccaauucgaugguagaa

SEQ ID NO: 1100381 - RNA, 19 nt, Artificial Sequence
  Description of Artificial Sequence: Synthetic oligonucleotide
  Antisense strand to SEQ ID NO: 1100380
uucuaccaucgaauugggu

SEQ ID NO: 1100382 - RNA, 19 nt, Artificial Sequence
  Description of Artificial Sequence: Synthetic oligonucleotide
  Sense strand starting at position 2851 of SEQ ID NO: 915710
gaugguagaauuggaguga

SEQ ID NO: 1100383 - RNA, 19 nt, Artificial Sequence
  Description of Artificial Sequence: Synthetic oligonucleotide
  Antisense strand to SEQ ID NO: 1100382
ucacuccaauucuaccauc

SEQ ID NO: 1100384 - RNA, 19 nt, Artificial Sequence
  Description of Artificial Sequence: Synthetic oligonucleotide
  Sense strand starting at position 2855 of SEQ ID NO: 915710
guagaauuggagugaacau

SEQ ID NO: 1100385 - RNA, 19 nt, Artificial Sequence
  Description of Artificial Sequence: Synthetic oligonucleotide
  Antisense strand to SEQ ID NO: 1100384
auguucacuccaauucuac

SEQ ID NO: 1100386 - RNA, 19 nt, Artificial Sequence
  Description of Artificial Sequence: Synthetic oligonucleotide
  Sense strand starting at position 2938 of SEQ ID NO: 915710
cgagguaaagccugaaaga

SEQ ID NO: 1100387 - RNA, 19 nt, Artificial Sequence
  Description of Artificial Sequence: Synthetic oligonucleotide
  Antisense strand to SEQ ID NO: 1100386
ucuuucaggcuuuaccucg

SEQ ID NO: 1100388 - RNA, 19 nt, Artificial Sequence
  Description of Artificial Sequence: Synthetic oligonucleotide
  Sense strand starting at position 2973 of SEQ ID NO: 915710
ggguuaugagaguguagaa

SEQ ID NO: 1100389 - RNA, 19 nt, Artificial Sequence
  Description of Artificial Sequence: Synthetic oligonucleotide
  Antisense strand to SEQ ID NO: 1100388
uucuacacucucauaaccc

SEQ ID NO: 1100390 - RNA, 19 nt, Artificial Sequence
  Description of Artificial Sequence: Synthetic oligonucleotide
  Sense strand starting at position 3001 of SEQ ID NO: 915710
accacauaaguugggaauu

SEQ ID NO: 1100391 - RNA, 19 nt, Artificial Sequence
  Description of Artificial Sequence: Synthetic oligonucleotide
  Antisense strand to SEQ ID NO: 1100390
aauucccaacuuauguggu

SEQ ID NO: 1100392 - RNA, 19 nt, Artificial Sequence
  Description of Artificial Sequence: Synthetic oligonucleotide
  Sense strand starting at position 3055 of SEQ ID NO: 915710
ucuucuuggccugaaggau

SEQ ID NO: 1100393 - RNA, 19 nt, Artificial Sequence
  Description of Artificial Sequence: Synthetic oligonucleotide
  Antisense strand to SEQ ID NO: 1100392
auccuucaggccaagaaga

SEQ ID NO: 1100394 - RNA, 19 nt, Artificial Sequence
  Description of Artificial Sequence: Synthetic oligonucleotide
  Sense strand starting at position 3061 of SEQ ID NO: 915710
uggccugaaggauguuaca

SEQ ID NO: 1100395 - RNA, 19 nt, Artificial Sequence
  Description of Artificial Sequence: Synthetic oligonucleotide
  Antisense strand to SEQ ID NO: 1100394
uguaacauccuucaggcca

SEQ ID NO: 1100396 - RNA, 19 nt, Artificial Sequence
  Description of Artificial Sequence: Synthetic oligonucleotide
  Sense strand starting at position 3070 of SEQ ID NO: 915710
ggauguuacagagguugau

SEQ ID NO: 1100397 - RNA, 19 nt, Artificial Sequence
  Description of Artificial Sequence: Synthetic oligonucleotide
  Antisense strand to SEQ ID NO: 1100396
aucaaccucuguaacaucc

SEQ ID NO: 1100398 - RNA, 19 nt, Artificial Sequence
  Description of Artificial Sequence: Synthetic oligonucleotide
  Sense strand starting at position 3165 of SEQ ID NO: 915710
augucagaucaucgaggaa

SEQ ID NO: 1100399 - RNA, 19 nt, Artificial Sequence
  Description of Artificial Sequence: Synthetic oligonucleotide
  Antisense strand to SEQ ID NO: 1100398
uuccucgaugaucugacau

SEQ ID NO: 1100400 - RNA, 19 nt, Artificial Sequence
  Description of Artificial Sequence: Synthetic oligonucleotide
  Sense strand starting at position 3274 of SEQ ID NO: 915710
guguuaaauccacauccac

SEQ ID NO: 1100401 - RNA, 19 nt, Artificial Sequence
  Description of Artificial Sequence: Synthetic oligonucleotide
  Antisense strand to SEQ ID NO: 1100400
guggauguggauuuaacac

SEQ ID NO: 1100402 - RNA, 19 nt, Artificial Sequence
  Description of Artificial Sequence: Synthetic oligonucleotide
  Sense strand starting at position 3347 of SEQ ID NO: 915710
auuaucuuccgugauuaaa

SEQ ID NO: 1100403 - RNA, 19 nt, Artificial Sequence
  Description of Artificial Sequence: Synthetic oligonucleotide
  Antisense strand to SEQ ID NO: 1100402
uuuaaucacggaagauaau

SEQ ID NO: 1100404 - RNA, 19 nt, Artificial Sequence
  Description of Artificial Sequence: Synthetic oligonucleotide
  Sense strand starting at position 3385 of SEQ ID NO: 915710
auccaaaguugaguaauga

SEQ ID NO: 1100405 - RNA, 19 nt, Artificial Sequence
  Description of Artificial Sequence: Synthetic oligonucleotide
  Antisense strand to SEQ ID NO: 1100404
ucauuacucaacuuuggau

SEQ ID NO: 1100406 - RNA, 19 nt, Artificial Sequence
  Description of Artificial Sequence: Synthetic oligonucleotide
  Sense strand starting at position 3427 of SEQ ID NO: 915710
aguaaacagucaccuaaga

SEQ ID NO: 1100407 - RNA, 19 nt, Artificial Sequence
  Description of Artificial Sequence: Synthetic oligonucleotide
  Antisense strand to SEQ ID NO: 1100406
ucuuaggugacuguuuacu

SEQ ID NO: 1100408 - RNA, 19 nt, Artificial Sequence
  Description of Artificial Sequence: Synthetic oligonucleotide
  Sense strand starting at position 3566 of SEQ ID NO: 915710
agauaucuugcuuggauaa

SEQ ID NO: 1100409 - RNA, 19 nt, Artificial Sequence
  Description of Artificial Sequence: Synthetic oligonucleotide
  Antisense strand to SEQ ID NO: 1100408
uuauccaagcaagauaucu

SEQ ID NO: 1100410 - RNA, 19 nt, Artificial Sequence
  Description of Artificial Sequence: Synthetic oligonucleotide
  Sense strand starting at position 3567 of SEQ ID NO: 915710
gauaucuugcuuggauaag

SEQ ID NO: 1100411 - RNA, 19 nt, Artificial Sequence
  Description of Artificial Sequence: Synthetic oligonucleotide
  Antisense strand to SEQ ID NO: 1100410
cuuauccaagcaagauauc

SEQ ID NO: 1100412 - RNA, 19 nt, Artificial Sequence
  Description of Artificial Sequence: Synthetic oligonucleotide
  Sense strand starting at position 3679 of SEQ ID NO: 915710
cccguucauggaggacaua

SEQ ID NO: 1100413 - RNA, 19 nt, Artificial Sequence
  Description of Artificial Sequence: Synthetic oligonucleotide
  Antisense strand to SEQ ID NO: 1100412
uauguccuccaugaacggg

SEQ ID NO: 1100414 - RNA, 19 nt, Artificial Sequence
  Description of Artificial Sequence: Synthetic oligonucleotide
  Sense strand starting at position 3700 of SEQ ID NO: 915710
aucauaacauguucgaaag

SEQ ID NO: 1100415 - RNA, 19 nt, Artificial Sequence
  Description of Artificial Sequence: Synthetic oligonucleotide
  Antisense strand to SEQ ID NO: 1100414
cuuucgaacauguuaugau

SEQ ID NO: 1100416 - RNA, 19 nt, Artificial Sequence
  Description of Artificial Sequence: Synthetic oligonucleotide
  Sense strand starting at position 3790 of SEQ ID NO: 915710
augugacacuuccuaaaug

SEQ ID NO: 1100417 - RNA, 19 nt, Artificial Sequence
  Description of Artificial Sequence: Synthetic oligonucleotide
  Antisense strand to SEQ ID NO: 1100416
cauuuaggaagugucacau

SEQ ID NO: 1100418 - RNA, 19 nt, Artificial Sequence
  Description of Artificial Sequence: Synthetic oligonucleotide
  Sense strand starting at position 3963 of SEQ ID NO: 915710
aaagguuaucauuaggcuu

SEQ ID NO: 1100419 - RNA, 19 nt, Artificial Sequence
  Description of Artificial Sequence: Synthetic oligonucleotide
  Antisense strand to SEQ ID NO: 1100418
aagccuaaugauaaccuuu

SEQ ID NO: 1100420 - RNA, 19 nt, Artificial Sequence
  Description of Artificial Sequence: Synthetic oligonucleotide
  Sense strand starting at position 26 of SEQ ID NO: 915711
acacuuucugaaugugcau

SEQ ID NO: 1100421 - RNA, 19 nt, Artificial Sequence
  Description of Artificial Sequence: Synthetic oligonucleotide
  Antisense strand to SEQ ID NO: 1100420
augcacauucagaaagugu

SEQ ID NO: 1100422 - RNA, 19 nt, Artificial Sequence
  Description of Artificial Sequence: Synthetic oligonucleotide
  Sense strand starting at position 245 of SEQ ID NO: 915711
ccagcaguuucucucaaug

SEQ ID NO: 1100423 - RNA, 19 nt, Artificial Sequence
  Description of Artificial Sequence: Synthetic oligonucleotide
  Antisense strand to SEQ ID NO: 1100422
cauugagagaaacugcugg

SEQ ID NO: 1100424 - RNA, 19 nt, Artificial Sequence
  Description of Artificial Sequence: Synthetic oligonucleotide
  Sense strand starting at position 250 of SEQ ID NO: 915711
aguuucucucaaugauagu

SEQ ID NO: 1100425 - RNA, 19 nt, Artificial Sequence
  Description of Artificial Sequence: Synthetic oligonucleotide
  Antisense strand to SEQ ID NO: 1100424
acuaucauugagagaaacu

SEQ ID NO: 1100426 - RNA, 19 nt, Artificial Sequence
  Description of Artificial Sequence: Synthetic oligonucleotide
  Sense strand starting at position 289 of SEQ ID NO: 915711
aaaggugcaucgucugcaa

SEQ ID NO: 1100427 - RNA, 19 nt, Artificial Sequence
  Description of Artificial Sequence: Synthetic oligonucleotide
  Antisense strand to SEQ ID NO: 1100426
uugcagacgaugcaccuuu

SEQ ID NO: 1100428 - RNA, 19 nt, Artificial Sequence
  Description of Artificial Sequence: Synthetic oligonucleotide
  Sense strand starting at position 291 of SEQ ID NO: 915711
aggugcaucgucugcaaau

SEQ ID NO: 1100429 - RNA, 19 nt, Artificial Sequence
  Description of Artificial Sequence: Synthetic oligonucleotide
  Antisense strand to SEQ ID NO: 1100428
auuugcagacgaugcaccu

SEQ ID NO: 1100430 - RNA, 19 nt, Artificial Sequence
  Description of Artificial Sequence: Synthetic oligonucleotide
  Sense strand starting at position 321 of SEQ ID NO: 915711
acaaauauuuccgaagugu

SEQ ID NO: 1100431 - RNA, 19 nt, Artificial Sequence
  Description of Artificial Sequence: Synthetic oligonucleotide
  Antisense strand to SEQ ID NO: 1100430
acacuucggaaauauuugu

SEQ ID NO: 1100432 - RNA, 19 nt, Artificial Sequence
  Description of Artificial Sequence: Synthetic oligonucleotide
  Sense strand starting at position 357 of SEQ ID NO: 915711
caguaagguccacgacaga

SEQ ID NO: 1100433 - RNA, 19 nt, Artificial Sequence
  Description of Artificial Sequence: Synthetic oligonucleotide
  Antisense strand to SEQ ID NO: 1100432
ucugucguggaccuuacug

SEQ ID NO: 1100434 - RNA, 19 nt, Artificial Sequence
  Description of Artificial Sequence: Synthetic oligonucleotide
  Sense strand starting at position 542 of SEQ ID NO: 915711
cguaucacuugcuuggauu

SEQ ID NO: 1100435 - RNA, 19 nt, Artificial Sequence
  Description of Artificial Sequence: Synthetic oligonucleotide
  Antisense strand to SEQ ID NO: 1100434
aauccaagcaagugauacg

SEQ ID NO: 1100436 - RNA, 19 nt, Artificial Sequence
  Description of Artificial Sequence: Synthetic oligonucleotide
  Sense strand starting at position 659 of SEQ ID NO: 915711
uguggaaauuggccuaagu

SEQ ID NO: 1100437 - RNA, 19 nt, Artificial Sequence
  Description of Artificial Sequence: Synthetic oligonucleotide
  Antisense strand to SEQ ID NO: 1100436
acuuaggccaauuuccaca

SEQ ID NO: 1100438 - RNA, 19 nt, Artificial Sequence
  Description of Artificial Sequence: Synthetic oligonucleotide
  Sense strand starting at position 698 of SEQ ID NO: 915711
augcuuuaccugggaucca

SEQ ID NO: 1100439 - RNA, 19 nt, Artificial Sequence
  Description of Artificial Sequence: Synthetic oligonucleotide
  Antisense strand to SEQ ID NO: 1100438
uggaucccagguaaagcau

SEQ ID NO: 1100440 - RNA, 19 nt, Artificial Sequence
  Description of Artificial Sequence: Synthetic oligonucleotide
  Sense strand starting at position 855 of SEQ ID NO: 915711
uggaaagacuagcuucuua

SEQ ID NO: 1100441 - RNA, 19 nt, Artificial Sequence
  Description of Artificial Sequence: Synthetic oligonucleotide
  Antisense strand to SEQ ID NO: 1100440
uaagaagcuagucuuucca

SEQ ID NO: 1100442 - RNA, 19 nt, Artificial Sequence
  Description of Artificial Sequence: Synthetic oligonucleotide
  Sense strand starting at position 859 of SEQ ID NO: 915711
aagacuagcuucuuaggga

SEQ ID NO: 1100443 - RNA, 19 nt, Artificial Sequence
  Description of Artificial Sequence: Synthetic oligonucleotide
  Antisense strand to SEQ ID NO: 1100442
ucccuaagaagcuagucuu

SEQ ID NO: 1100444 - RNA, 19 nt, Artificial Sequence
  Description of Artificial Sequence: Synthetic oligonucleotide
  Sense strand starting at position 905 of SEQ ID NO: 915711
caggccaccugaguugaaa

SEQ ID NO: 1100445 - RNA, 19 nt, Artificial Sequence
  Description of Artificial Sequence: Synthetic oligonucleotide
  Antisense strand to SEQ ID NO: 1100444
uuucaacucagguggccug

SEQ ID NO: 1100446 - RNA, 19 nt, Artificial Sequence
  Description of Artificial Sequence: Synthetic oligonucleotide
  Sense strand starting at position 941 of SEQ ID NO: 915711
cuagguuuaugcucugaag

SEQ ID NO: 1100447 - RNA, 19 nt, Artificial Sequence
  Description of Artificial Sequence: Synthetic oligonucleotide
  Antisense strand to SEQ ID NO: 1100446
cuucagagcauaaaccuag

SEQ ID NO: 1100448 - RNA, 19 nt, Artificial Sequence
  Description of Artificial Sequence: Synthetic oligonucleotide
  Sense strand starting at position 2155 of SEQ ID NO: 915711
gucucuuacucucuccaga

SEQ ID NO: 1100449 - RNA, 19 nt, Artificial Sequence
  Description of Artificial Sequence: Synthetic oligonucleotide
  Antisense strand to SEQ ID NO: 1100448
ucuggagagaguaagagac

SEQ ID NO: 1100450 - RNA, 19 nt, Artificial Sequence
  Description of Artificial Sequence: Synthetic oligonucleotide
  Sense strand starting at position 2244 of SEQ ID NO: 915711
gcuggugucccugugcauu

SEQ ID NO: 1100451 - RNA, 19 nt, Artificial Sequence
  Description of Artificial Sequence: Synthetic oligonucleotide
  Antisense strand to SEQ ID NO: 1100450
aaugcacagggacaccagc

SEQ ID NO: 1100452 - RNA, 19 nt, Artificial Sequence
  Description of Artificial Sequence: Synthetic oligonucleotide
  Sense strand starting at position 2325 of SEQ ID NO: 915711
cggacaguguuguuuacca

SEQ ID NO: 1100453 - RNA, 19 nt, Artificial Sequence
  Description of Artificial Sequence: Synthetic oligonucleotide
  Antisense strand to SEQ ID NO: 1100452
ugguaaacaacacuguccg

SEQ ID NO: 1100454 - RNA, 19 nt, Artificial Sequence
  Description of Artificial Sequence: Synthetic oligonucleotide
  Sense strand starting at position 2327 of SEQ ID NO: 915711
gacaguguuguuuaccaga

SEQ ID NO: 1100455 - RNA, 19 nt, Artificial Sequence
  Description of Artificial Sequence: Synthetic oligonucleotide
  Antisense strand to SEQ ID NO: 1100454
ucugguaaacaacacuguc

SEQ ID NO: 1100456 - RNA, 19 nt, Artificial Sequence
  Description of Artificial Sequence: Synthetic oligonucleotide
  Sense strand starting at position 2329 of SEQ ID NO: 915711
caguguuguuuaccagacu

SEQ ID NO: 1100457 - RNA, 19 nt, Artificial Sequence
  Description of Artificial Sequence: Synthetic oligonucleotide
  Antisense strand to SEQ ID NO: 1100456
agucugguaaacaacacug

SEQ ID NO: 1100458 - RNA, 19 nt, Artificial Sequence
  Description of Artificial Sequence: Synthetic oligonucleotide
  Sense strand starting at position 2332 of SEQ ID NO: 915711
uguuguuuaccagacugaa

SEQ ID NO: 1100459 - RNA, 19 nt, Artificial Sequence
  Description of Artificial Sequence: Synthetic oligonucleotide
  Antisense strand to SEQ ID NO: 1100458
uucagucugguaaacaaca

SEQ ID NO: 1100460 - RNA, 19 nt, Artificial Sequence
  Description of Artificial Sequence: Synthetic oligonucleotide
  Sense strand starting at position 2374 of SEQ ID NO: 915711
gugcggaagggcuauguuu

SEQ ID NO: 1100461 - RNA, 19 nt, Artificial Sequence
  Description of Artificial Sequence: Synthetic oligonucleotide
  Antisense strand to SEQ ID NO: 1100460
aaacauagcccuuccgcac

SEQ ID NO: 1100462 - RNA, 19 nt, Artificial Sequence
  Description of Artificial Sequence: Synthetic oligonucleotide
  Sense strand starting at position 2376 of SEQ ID NO: 915711
gcggaagggcuauguuugu

SEQ ID NO: 1100463 - RNA, 19 nt, Artificial Sequence
  Description of Artificial Sequence: Synthetic oligonucleotide
  Antisense strand to SEQ ID NO: 1100462
acaaacauagcccuuccgc

SEQ ID NO: 1100464 - RNA, 19 nt, Artificial Sequence
  Description of Artificial Sequence: Synthetic oligonucleotide
  Sense strand starting at position 2380 of SEQ ID NO: 915711
aagggcuauguuuguucua

SEQ ID NO: 1100465 - RNA, 19 nt, Artificial Sequence
  Description of Artificial Sequence: Synthetic oligonucleotide
  Antisense strand to SEQ ID NO: 1100464
uagaacaaacauagcccuu

SEQ ID NO: 1100466 - RNA, 19 nt, Artificial Sequence
  Description of Artificial Sequence: Synthetic oligonucleotide
  Sense strand starting at position 2458 of SEQ ID NO: 915711
ugcuuugucuauuugcauu

SEQ ID NO: 1100467 - RNA, 19 nt, Artificial Sequence
  Description of Artificial Sequence: Synthetic oligonucleotide
  Antisense strand to SEQ ID NO: 1100466
aaugcaaauagacaaagca

SEQ ID NO: 1100468 - RNA, 19 nt, Artificial Sequence
  Description of Artificial Sequence: Synthetic oligonucleotide
  Sense strand starting at position 2482 of SEQ ID NO: 915711
cuccuaggaucucagaauu

SEQ ID NO: 1100469 - RNA, 19 nt, Artificial Sequence
  Description of Artificial Sequence: Synthetic oligonucleotide
  Antisense strand to SEQ ID NO: 1100468
aauucugagauccuaggag

SEQ ID NO: 1100470 - RNA, 19 nt, Artificial Sequence
  Description of Artificial Sequence: Synthetic oligonucleotide
  Sense strand starting at position 2580 of SEQ ID NO: 915711
gaggcaguauuugucgagu

SEQ ID NO: 1100471 - RNA, 19 nt, Artificial Sequence
  Description of Artificial Sequence: Synthetic oligonucleotide
  Antisense strand to SEQ ID NO: 1100470
acucgacaaauacugccuc

SEQ ID NO: 1100472 - RNA, 19 nt, Artificial Sequence
  Description of Artificial Sequence: Synthetic oligonucleotide
  Sense strand starting at position 2583 of SEQ ID NO: 915711
gcaguauuugucgagugac

SEQ ID NO: 1100473 - RNA, 19 nt, Artificial Sequence
  Description of Artificial Sequence: Synthetic oligonucleotide
  Antisense strand to SEQ ID NO: 1100472
gucacucgacaaauacugc

SEQ ID NO: 1100474 - RNA, 19 nt, Artificial Sequence
  Description of Artificial Sequence: Synthetic oligonucleotide
  Sense strand starting at position 2586 of SEQ ID NO: 915711
guauuugucgagugacagg

SEQ ID NO: 1100475 - RNA, 19 nt, Artificial Sequence
  Description of Artificial Sequence: Synthetic oligonucleotide
  Antisense strand to SEQ ID NO: 1100474
ccugucacucgacaaauac

SEQ ID NO: 1100476 - RNA, 19 nt, Artificial Sequence
  Description of Artificial Sequence: Synthetic oligonucleotide
  Sense strand starting at position 2628 of SEQ ID NO: 915711
uauguaaggugucccucua

SEQ ID NO: 1100477 - RNA, 19 nt, Artificial Sequence
  Description of Artificial Sequence: Synthetic oligonucleotide
  Antisense strand to SEQ ID NO: 1100476
uagagggacaccuuacaua

SEQ ID NO: 1100478 - RNA, 19 nt, Artificial Sequence
  Description of Artificial Sequence: Synthetic oligonucleotide
  Sense strand starting at position 2909 of SEQ ID NO: 915711
guggauuaaauguaacgau

SEQ ID NO: 1100479 - RNA, 19 nt, Artificial Sequence
  Description of Artificial Sequence: Synthetic oligonucleotide
  Antisense strand to SEQ ID NO: 1100478
aucguuacauuuaauccac

SEQ ID NO: 1100480 - RNA, 19 nt, Artificial Sequence
  Description of Artificial Sequence: Synthetic oligonucleotide
  Sense strand starting at position 3170 of SEQ ID NO: 915711
gaggcugagguguauuaag

SEQ ID NO: 1100481 - RNA, 19 nt, Artificial Sequence
  Description of Artificial Sequence: Synthetic oligonucleotide
  Antisense strand to SEQ ID NO: 1100480
cuuaauacaccucagccuc

SEQ ID NO: 1100482 - RNA, 19 nt, Artificial Sequence
  Description of Artificial Sequence: Synthetic oligonucleotide
  Sense strand starting at position 3225 of SEQ ID NO: 915711
uugauucccuuagaugauu

SEQ ID NO: 1100483 - RNA, 19 nt, Artificial Sequence
  Description of Artificial Sequence: Synthetic oligonucleotide
  Antisense strand to SEQ ID NO: 1100482
aaucaucuaagggaaucaa

SEQ ID NO: 1100484 - RNA, 19 nt, Artificial Sequence
  Description of Artificial Sequence: Synthetic oligonucleotide
  Sense strand starting at position 3325 of SEQ ID NO: 915711
ugucuccauggauaaugua

SEQ ID NO: 1100485 - RNA, 19 nt, Artificial Sequence
  Description of Artificial Sequence: Synthetic oligonucleotide
  Antisense strand to SEQ ID NO: 1100484
uacauuauccauggagaca

SEQ ID NO: 1100486 - RNA, 19 nt, Artificial Sequence
  Description of Artificial Sequence: Synthetic oligonucleotide
  Sense strand starting at position 3332 of SEQ ID NO: 915711
auggauaauguaugccuaa

SEQ ID NO: 1100487 - RNA, 19 nt, Artificial Sequence
  Description of Artificial Sequence: Synthetic oligonucleotide
  Antisense strand to SEQ ID NO: 1100486
uuaggcauacauuauccau

SEQ ID NO: 1100488 - RNA, 19 nt, Artificial Sequence
  Description of Artificial Sequence: Synthetic oligonucleotide
  Sense strand starting at position 3333 of SEQ ID NO: 915711
uggauaauguaugccuaau

SEQ ID NO: 1100489 - RNA, 19 nt, Artificial Sequence
  Description of Artificial Sequence: Synthetic oligonucleotide
  Antisense strand to SEQ ID NO: 1100488
auuaggcauacauuaucca

SEQ ID NO: 1100490 - RNA, 19 nt, Artificial Sequence
  Description of Artificial Sequence: Synthetic oligonucleotide
  Sense strand starting at position 3483 of SEQ ID NO: 915711
gcucauuucucuggaaauu

SEQ ID NO: 1100491 - RNA, 19 nt, Artificial Sequence
  Description of Artificial Sequence: Synthetic oligonucleotide
  Antisense strand to SEQ ID NO: 1100490
aauuuccagagaaaugagc

SEQ ID NO: 1100492 - RNA, 19 nt, Artificial Sequence
  Description of Artificial Sequence: Synthetic oligonucleotide
  Sense strand starting at position 3582 of SEQ ID NO: 915711
acguuaauauaccuaauga

SEQ ID NO: 1100493 - RNA, 19 nt, Artificial Sequence
  Description of Artificial Sequence: Synthetic oligonucleotide
  Antisense strand to SEQ ID NO: 1100492
ucauuagguauauuaacgu

SEQ ID NO: 1100494 - RNA, 19 nt, Artificial Sequence
  Description of Artificial Sequence: Synthetic oligonucleotide
  Sense strand starting at position 3598 of SEQ ID NO: 915711
ugagaagugugccuugcuu

SEQ ID NO: 1100495 - RNA, 19 nt, Artificial Sequence
  Description of Artificial Sequence: Synthetic oligonucleotide
  Antisense strand to SEQ ID NO: 1100494
aagcaaggcacacuucuca

SEQ ID NO: 1100496 - RNA, 19 nt, Artificial Sequence
  Description of Artificial Sequence: Synthetic oligonucleotide
  Sense strand starting at position 3606 of SEQ ID NO: 915711
gugccuugcuugguuauuu

SEQ ID NO: 1100497 - RNA, 19 nt, Artificial Sequence
  Description of Artificial Sequence: Synthetic oligonucleotide
  Antisense strand to SEQ ID NO: 1100496
aaauaaccaagcaaggcac

SEQ ID NO: 1100498 - RNA, 19 nt, Artificial Sequence
  Description of Artificial Sequence: Synthetic oligonucleotide
  Sense strand starting at position 3653 of SEQ ID NO: 915711
ggaaacaacuuagccuuua

SEQ ID NO: 1100499 - RNA, 19 nt, Artificial Sequence
  Description of Artificial Sequence: Synthetic oligonucleotide
  Antisense strand to SEQ ID NO: 1100498
uaaaggcuaaguuguuucc

SEQ ID NO: 1100500 - RNA, 19 nt, Artificial Sequence
  Description of Artificial Sequence: Synthetic oligonucleotide
  Sense strand starting at position 121 of SEQ ID NO: 915712
agggaaauggugcagcauu

SEQ ID NO: 1100501 - RNA, 19 nt, Artificial Sequence
  Description of Artificial Sequence: Synthetic oligonucleotide
  Antisense strand to SEQ ID NO: 1100500
aaugcugcaccauuucccu

SEQ ID NO: 1100502 - RNA, 19 nt, Artificial Sequence
  Description of Artificial Sequence: Synthetic oligonucleotide
  Sense strand starting at position 161 of SEQ ID NO: 915712
gguguuuccggaggagaga

SEQ ID NO: 1100503 - RNA, 19 nt, Artificial Sequence
  Description of Artificial Sequence: Synthetic oligonucleotide
  Antisense strand to SEQ ID NO: 1100502
ucucuccuccggaaacacc

SEQ ID NO: 1100504 - RNA, 19 nt, Artificial Sequence
  Description of Artificial Sequence: Synthetic oligonucleotide
  Sense strand starting at position 205 of SEQ ID NO: 915712
ggaccaucaucccucaguu

SEQ ID NO: 1100505 - RNA, 19 nt, Artificial Sequence
  Description of Artificial Sequence: Synthetic oligonucleotide
  Antisense strand to SEQ ID NO: 1100504
aacugagggaugauggucc

SEQ ID NO: 1100506 - RNA, 19 nt, Artificial Sequence
  Description of Artificial Sequence: Synthetic oligonucleotide
  Sense strand starting at position 243 of SEQ ID NO: 915712
cagcuuguagcucagauaa

SEQ ID NO: 1100507 - RNA, 19 nt, Artificial Sequence
  Description of Artificial Sequence: Synthetic oligonucleotide
  Antisense strand to SEQ ID NO: 1100506
uuaucugagcuacaagcug

SEQ ID NO: 1100508 - RNA, 19 nt, Artificial Sequence
  Description of Artificial Sequence: Synthetic oligonucleotide
  Sense strand starting at position 326 of SEQ ID NO: 915712
cagccuugagaucagucaa

SEQ ID NO: 1100509 - RNA, 19 nt, Artificial Sequence
  Description of Artificial Sequence: Synthetic oligonucleotide
  Antisense strand to SEQ ID NO: 1100508
uugacugaucucaaggcug

SEQ ID NO: 1100510 - RNA, 19 nt, Artificial Sequence
  Description of Artificial Sequence: Synthetic oligonucleotide
  Sense strand starting at position 875 of SEQ ID NO: 915712
gcuacaaaccuaugguaua

SEQ ID NO: 1100511 - RNA, 19 nt, Artificial Sequence
  Description of Artificial Sequence: Synthetic oligonucleotide
  Antisense strand to SEQ ID NO: 1100510
uauaccauagguuuguagc

SEQ ID NO: 1100512 - RNA, 19 nt, Artificial Sequence
  Description of Artificial Sequence: Synthetic oligonucleotide
  Sense strand starting at position 924 of SEQ ID NO: 915712
acuguacagcguguucuau

SEQ ID NO: 1100513 - RNA, 19 nt, Artificial Sequence
  Description of Artificial Sequence: Synthetic oligonucleotide
  Antisense strand to SEQ ID NO: 1100512
auagaacacgcuguacagu

SEQ ID NO: 1100514 - RNA, 19 nt, Artificial Sequence
  Description of Artificial Sequence: Synthetic oligonucleotide
  Sense strand starting at position 925 of SEQ ID NO: 915712
cuguacagcguguucuaua

SEQ ID NO: 1100515 - RNA, 19 nt, Artificial Sequence
  Description of Artificial Sequence: Synthetic oligonucleotide
  Antisense strand to SEQ ID NO: 1100514
uauagaacacgcuguacag

SEQ ID NO: 1100516 - RNA, 19 nt, Artificial Sequence
  Description of Artificial Sequence: Synthetic oligonucleotide
  Sense strand starting at position 932 of SEQ ID NO: 915712
gcguguucuauacuguaua

SEQ ID NO: 1100517 - RNA, 19 nt, Artificial Sequence
  Description of Artificial Sequence: Synthetic oligonucleotide
  Antisense strand to SEQ ID NO: 1100516
uauacaguauagaacacgc

SEQ ID NO: 1100518 - RNA, 19 nt, Artificial Sequence
  Description of Artificial Sequence: Synthetic oligonucleotide
  Sense strand starting at position 1188 of SEQ ID NO: 915712
ucguuacucuccuuuauuu

SEQ ID NO: 1100519 - RNA, 19 nt, Artificial Sequence
  Description of Artificial Sequence: Synthetic oligonucleotide
  Antisense strand to SEQ ID NO: 1100518
aaauaaaggagaguaacga

SEQ ID NO: 1100520 - RNA, 19 nt, Artificial Sequence
  Description of Artificial Sequence: Synthetic oligonucleotide
  Sense strand starting at position 1203 of SEQ ID NO: 915712
auuugauaacgcugcugaa

SEQ ID NO: 1100521 - RNA, 19 nt, Artificial Sequence
  Description of Artificial Sequence: Synthetic oligonucleotide
  Antisense strand to SEQ ID NO: 1100520
uucagcagcguuaucaaau

SEQ ID NO: 1100522 - RNA, 19 nt, Artificial Sequence
  Description of Artificial Sequence: Synthetic oligonucleotide
  Sense strand starting at position 1270 of SEQ ID NO: 915712
ggucaucuaagucauugua

SEQ ID NO: 1100523 - RNA, 19 nt, Artificial Sequence
  Description of Artificial Sequence: Synthetic oligonucleotide
  Antisense strand to SEQ ID NO: 1100522
uacaaugacuuagaugacc

SEQ ID NO: 1100524 - RNA, 19 nt, Artificial Sequence
  Description of Artificial Sequence: Synthetic oligonucleotide
  Sense strand starting at position 1272 of SEQ ID NO: 915712
ucaucuaagucauuguaag

SEQ ID NO: 1100525 - RNA, 19 nt, Artificial Sequence
  Description of Artificial Sequence: Synthetic oligonucleotide
  Antisense strand to SEQ ID NO: 1100524
cuuacaaugacuuagauga

SEQ ID NO: 1100526 - RNA, 19 nt, Artificial Sequence
  Description of Artificial Sequence: Synthetic oligonucleotide
  Sense strand starting at position 1273 of SEQ ID NO: 915712
caucuaagucauuguaagg

SEQ ID NO: 1100527 - RNA, 19 nt, Artificial Sequence
  Description of Artificial Sequence: Synthetic oligonucleotide
  Antisense strand to SEQ ID NO: 1100526
ccuuacaaugacuuagaug

SEQ ID NO: 1100528 - RNA, 19 nt, Artificial Sequence
  Description of Artificial Sequence: Synthetic oligonucleotide
  Sense strand starting at position 1486 of SEQ ID NO: 915712
uguguaaaugcugaaugaa

SEQ ID NO: 1100529 - RNA, 19 nt, Artificial Sequence
  Description of Artificial Sequence: Synthetic oligonucleotide
  Antisense strand to SEQ ID NO: 1100528
uucauucagcauuuacaca

SEQ ID NO: 1100530 - RNA, 19 nt, Artificial Sequence
  Description of Artificial Sequence: Synthetic oligonucleotide
  Sense strand starting at position 1756 of SEQ ID NO: 915712
ugaauuacagaugguauca

SEQ ID NO: 1100531 - RNA, 19 nt, Artificial Sequence
  Description of Artificial Sequence: Synthetic oligonucleotide
  Antisense strand to SEQ ID NO: 1100530
ugauaccaucuguaauuca

SEQ ID NO: 1100532 - RNA, 19 nt, Artificial Sequence
  Description of Artificial Sequence: Synthetic oligonucleotide
  Sense strand starting at position 2153 of SEQ ID NO: 915712
cuuugcacggcugauuaaa

SEQ ID NO: 1100533 - RNA, 19 nt, Artificial Sequence
  Description of Artificial Sequence: Synthetic oligonucleotide
  Antisense strand to SEQ ID NO: 1100532
uuuaaucagccgugcaaag

SEQ ID NO: 1100534 - RNA, 19 nt, Artificial Sequence
  Description of Artificial Sequence: Synthetic oligonucleotide
  Sense strand starting at position 2766 of SEQ ID NO: 915712
ccaaucucgugggugaaau

SEQ ID NO: 1100535 - RNA, 19 nt, Artificial Sequence
  Description of Artificial Sequence: Synthetic oligonucleotide
  Antisense strand to SEQ ID NO: 1100534
auuucacccacgagauugg

SEQ ID NO: 1100536 - RNA, 19 nt, Artificial Sequence
  Description of Artificial Sequence: Synthetic oligonucleotide
  Sense strand starting at position 2767 of SEQ ID NO: 915712
caaucucgugggugaaaua

SEQ ID NO: 1100537 - RNA, 19 nt, Artificial Sequence
  Description of Artificial Sequence: Synthetic oligonucleotide
  Antisense strand to SEQ ID NO: 1100536
uauuucacccacgagauug

SEQ ID NO: 1100538 - RNA, 19 nt, Artificial Sequence
  Description of Artificial Sequence: Synthetic oligonucleotide
  Sense strand starting at position 2774 of SEQ ID NO: 915712
gugggugaaauacgaguua

SEQ ID NO: 1100539 - RNA, 19 nt, Artificial Sequence
  Description of Artificial Sequence: Synthetic oligonucleotide
  Antisense strand to SEQ ID NO: 1100538
uaacucguauuucacccac

SEQ ID NO: 1100540 - RNA, 19 nt, Artificial Sequence
  Description of Artificial Sequence: Synthetic oligonucleotide
  Sense strand starting at position 2824 of SEQ ID NO: 915712
gauguucugccaugacuag

SEQ ID NO: 1100541 - RNA, 19 nt, Artificial Sequence
  Description of Artificial Sequence: Synthetic oligonucleotide
  Antisense strand to SEQ ID NO: 1100540
cuagucauggcagaacauc

SEQ ID NO: 1100542 - RNA, 19 nt, Artificial Sequence
  Description of Artificial Sequence: Synthetic oligonucleotide
  Sense strand starting at position 2825 of SEQ ID NO: 915712
auguucugccaugacuaga

SEQ ID NO: 1100543 - RNA, 19 nt, Artificial Sequence
  Description of Artificial Sequence: Synthetic oligonucleotide
  Antisense strand to SEQ ID NO: 1100542
ucuagucauggcagaacau

SEQ ID NO: 1100544 - RNA, 19 nt, Artificial Sequence
  Description of Artificial Sequence: Synthetic oligonucleotide
  Sense strand starting at position 2828 of SEQ ID NO: 915712
uucugccaugacuagaaau

SEQ ID NO: 1100545 - RNA, 19 nt, Artificial Sequence
  Description of Artificial Sequence: Synthetic oligonucleotide
  Antisense strand to SEQ ID NO: 1100544
auuucuagucauggcagaa

SEQ ID NO: 1100546 - RNA, 19 nt, Artificial Sequence
  Description of Artificial Sequence: Synthetic oligonucleotide
  Sense strand starting at position 3002 of SEQ ID NO: 915712
agaagcggcuacucaaaua

SEQ ID NO: 1100547 - RNA, 19 nt, Artificial Sequence
  Description of Artificial Sequence: Synthetic oligonucleotide
  Antisense strand to SEQ ID NO: 1100546
uauuugaguagccgcuucu

SEQ ID NO: 1100548 - RNA, 19 nt, Artificial Sequence
  Description of Artificial Sequence: Synthetic oligonucleotide
  Sense strand starting at position 3104 of SEQ ID NO: 915712
gcccuaugucugucgaggu

SEQ ID NO: 1100549 - RNA, 19 nt, Artificial Sequence
  Description of Artificial Sequence: Synthetic oligonucleotide
  Antisense strand to SEQ ID NO: 1100548
accucgacagacauagggc

SEQ ID NO: 1100550 - RNA, 19 nt, Artificial Sequence
  Description of Artificial Sequence: Synthetic oligonucleotide
  Sense strand starting at position 3168 of SEQ ID NO: 915712
auauauguauacuuaggga

SEQ ID NO: 1100551 - RNA, 19 nt, Artificial Sequence
  Description of Artificial Sequence: Synthetic oligonucleotide
  Antisense strand to SEQ ID NO: 1100550
ucccuaaguauacauauau

SEQ ID NO: 1100552 - RNA, 19 nt, Artificial Sequence
  Description of Artificial Sequence: Synthetic oligonucleotide
  Sense strand starting at position 3248 of SEQ ID NO: 915712
guaugagaucccuguuaaa

SEQ ID NO: 1100553 - RNA, 19 nt, Artificial Sequence
  Description of Artificial Sequence: Synthetic oligonucleotide
  Antisense strand to SEQ ID NO: 1100552
uuuaacagggaucucauac

SEQ ID NO: 1100554 - RNA, 19 nt, Artificial Sequence
  Description of Artificial Sequence: Synthetic oligonucleotide
  Sense strand starting at position 3259 of SEQ ID NO: 915712
cuguuaaagucaguuagga

SEQ ID NO: 1100555 - RNA, 19 nt, Artificial Sequence
  Description of Artificial Sequence: Synthetic oligonucleotide
  Antisense strand to SEQ ID NO: 1100554
uccuaacugacuuuaacag

SEQ ID NO: 1100556 - RNA, 19 nt, Artificial Sequence
  Description of Artificial Sequence: Synthetic oligonucleotide
  Sense strand starting at position 3261 of SEQ ID NO: 915712
guuaaagucaguuaggaag

SEQ ID NO: 1100557 - RNA, 19 nt, Artificial Sequence
  Description of Artificial Sequence: Synthetic oligonucleotide
  Antisense strand to SEQ ID NO: 1100556
cuuccuaacugacuuuaac

SEQ ID NO: 1100558 - RNA, 19 nt, Artificial Sequence
  Description of Artificial Sequence: Synthetic oligonucleotide
  Sense strand starting at position 3298 of SEQ ID NO: 915712
ggaucccagugaucaugau

SEQ ID NO: 1100559 - RNA, 19 nt, Artificial Sequence
  Description of Artificial Sequence: Synthetic oligonucleotide
  Antisense strand to SEQ ID NO: 1100558
aucaugaucacugggaucc

SEQ ID NO: 1100560 - RNA, 19 nt, Artificial Sequence
  Description of Artificial Sequence: Synthetic oligonucleotide
  Sense strand starting at position 3391 of SEQ ID NO: 915712
aaggaaugccuaugucuuu

SEQ ID NO: 1100561 - RNA, 19 nt, Artificial Sequence
  Description of Artificial Sequence: Synthetic oligonucleotide
  Antisense strand to SEQ ID NO: 1100560
aaagacauaggcauuccuu

SEQ ID NO: 1100562 - RNA, 19 nt, Artificial Sequence
  Description of Artificial Sequence: Synthetic oligonucleotide
  Sense strand starting at position 3401 of SEQ ID NO: 915712
uaugucuuucuuuaaggga

SEQ ID NO: 1100563 - RNA, 19 nt, Artificial Sequence
  Description of Artificial Sequence: Synthetic oligonucleotide
  Antisense strand to SEQ ID NO: 1100562
ucccuuaaagaaagacaua

SEQ ID NO: 1100564 - RNA, 19 nt, Artificial Sequence
  Description of Artificial Sequence: Synthetic oligonucleotide
  Sense strand starting at position 3432 of SEQ ID NO: 915712
aagucaggcuuaccugaau

SEQ ID NO: 1100565 - RNA, 19 nt, Artificial Sequence
  Description of Artificial Sequence: Synthetic oligonucleotide
  Antisense strand to SEQ ID NO: 1100564
auucagguaagccugacuu

SEQ ID NO: 1100566 - RNA, 19 nt, Artificial Sequence
  Description of Artificial Sequence: Synthetic oligonucleotide
  Sense strand starting at position 3435 of SEQ ID NO: 915712
ucaggcuuaccugaauaca

SEQ ID NO: 1100567 - RNA, 19 nt, Artificial Sequence
  Description of Artificial Sequence: Synthetic oligonucleotide
  Antisense strand to SEQ ID NO: 1100566
uguauucagguaagccuga

SEQ ID NO: 1100568 - RNA, 19 nt, Artificial Sequence
  Description of Artificial Sequence: Synthetic oligonucleotide
  Sense strand starting at position 3438 of SEQ ID NO: 915712
ggcuuaccugaauacacuu

SEQ ID NO: 1100569 - RNA, 19 nt, Artificial Sequence
  Description of Artificial Sequence: Synthetic oligonucleotide
  Antisense strand to SEQ ID NO: 1100568
aaguguauucagguaagcc

SEQ ID NO: 1100570 - RNA, 19 nt, Artificial Sequence
  Description of Artificial Sequence: Synthetic oligonucleotide
  Sense strand starting at position 3446 of SEQ ID NO: 915712
ugaauacacuugcuaguua

SEQ ID NO: 1100571 - RNA, 19 nt, Artificial Sequence
  Description of Artificial Sequence: Synthetic oligonucleotide
  Antisense strand to SEQ ID NO: 1100570
uaacuagcaaguguauuca

SEQ ID NO: 1100572 - RNA, 19 nt, Artificial Sequence
  Description of Artificial Sequence: Synthetic oligonucleotide
  Sense strand starting at position 3509 of SEQ ID NO: 915712
agguccuacgugaguguuu

SEQ ID NO: 1100573 - RNA, 19 nt, Artificial Sequence
  Description of Artificial Sequence: Synthetic oligonucleotide
  Antisense strand to SEQ ID NO: 1100572
aaacacucacguaggaccu

SEQ ID NO: 1100574 - RNA, 19 nt, Artificial Sequence
  Description of Artificial Sequence: Synthetic oligonucleotide
  Sense strand starting at position 3540 of SEQ ID NO: 915712
auaagaaaguuugucuaug

SEQ ID NO: 1100575 - RNA, 19 nt, Artificial Sequence
  Description of Artificial Sequence: Synthetic oligonucleotide
  Antisense strand to SEQ ID NO: 1100574
cauagacaaacuuucuuau

SEQ ID NO: 1100576 - RNA, 19 nt, Artificial Sequence
  Description of Artificial Sequence: Synthetic oligonucleotide
  Sense strand starting at position 3769 of SEQ ID NO: 915712
ugaauaaaggccuggagua

SEQ ID NO: 1100577 - RNA, 19 nt, Artificial Sequence
  Description of Artificial Sequence: Synthetic oligonucleotide
  Antisense strand to SEQ ID NO: 1100576
uacuccaggccuuuauuca

SEQ ID NO: 1100578 - RNA, 19 nt, Artificial Sequence
  Description of Artificial Sequence: Synthetic oligonucleotide
  Sense strand starting at position 3882 of SEQ ID NO: 915712
agacuagaggcagguuuau

SEQ ID NO: 1100579 - RNA, 19 nt, Artificial Sequence
  Description of Artificial Sequence: Synthetic oligonucleotide
  Antisense strand to SEQ ID NO: 1100578
auaaaccugccucuagucu

SEQ ID NO: 1100580 - RNA, 19 nt, Artificial Sequence
  Description of Artificial Sequence: Synthetic oligonucleotide
  Sense strand starting at position 807 of SEQ ID NO: 915713
ugcagcucugauuaaauua

SEQ ID NO: 1100581 - RNA, 19 nt, Artificial Sequence
  Description of Artificial Sequence: Synthetic oligonucleotide
  Antisense strand to SEQ ID NO: 1100580
uaauuuaaucagagcugca

SEQ ID NO: 1100582 - RNA, 19 nt, Artificial Sequence
  Description of Artificial Sequence: Synthetic oligonucleotide
  Sense strand starting at position 846 of SEQ ID NO: 915713
acaccagugccugaaugaa

SEQ ID NO: 1100583 - RNA, 19 nt, Artificial Sequence
  Description of Artificial Sequence: Synthetic oligonucleotide
  Antisense strand to SEQ ID NO: 1100582
uucauucaggcacuggugu

SEQ ID NO: 1100584 - RNA, 19 nt, Artificial Sequence
  Description of Artificial Sequence: Synthetic oligonucleotide
  Sense strand starting at position 889 of SEQ ID NO: 915713
gagcauacauaggcuagaa

SEQ ID NO: 1100585 - RNA, 19 nt, Artificial Sequence
  Description of Artificial Sequence: Synthetic oligonucleotide
  Antisense strand to SEQ ID NO: 1100584
uucuagccuauguaugcuc

SEQ ID NO: 1100586 - RNA, 19 nt, Artificial Sequence
  Description of Artificial Sequence: Synthetic oligonucleotide
  Sense strand starting at position 891 of SEQ ID NO: 915713
gcauacauaggcuagaaau

SEQ ID NO: 1100587 - RNA, 19 nt, Artificial Sequence
  Description of Artificial Sequence: Synthetic oligonucleotide
  Antisense strand to SEQ ID NO: 1100586
auuucuagccuauguaugc

SEQ ID NO: 1100588 - RNA, 19 nt, Artificial Sequence
  Description of Artificial Sequence: Synthetic oligonucleotide
  Sense strand starting at position 940 of SEQ ID NO: 915713
aguuucuuccaugauacag

SEQ ID NO: 1100589 - RNA, 19 nt, Artificial Sequence
  Description of Artificial Sequence: Synthetic oligonucleotide
  Antisense strand to SEQ ID NO: 1100588
cuguaucauggaagaaacu

SEQ ID NO: 1100590 - RNA, 19 nt, Artificial Sequence
  Description of Artificial Sequence: Synthetic oligonucleotide
  Sense strand starting at position 1088 of SEQ ID NO: 915713
cgacuuuaggcucacacua

SEQ ID NO: 1100591 - RNA, 19 nt, Artificial Sequence
  Description of Artificial Sequence: Synthetic oligonucleotide
  Antisense strand to SEQ ID NO: 1100590
uagugugagccuaaagucg

SEQ ID NO: 1100592 - RNA, 19 nt, Artificial Sequence
  Description of Artificial Sequence: Synthetic oligonucleotide
  Sense strand starting at position 1421 of SEQ ID NO: 915713
accagucucaugggugaaa

SEQ ID NO: 1100593 - RNA, 19 nt, Artificial Sequence
  Description of Artificial Sequence: Synthetic oligonucleotide
  Antisense strand to SEQ ID NO: 1100592
uuucacccaugagacuggu

SEQ ID NO: 1100594 - RNA, 19 nt, Artificial Sequence
  Description of Artificial Sequence: Synthetic oligonucleotide
  Sense strand starting at position 1423 of SEQ ID NO: 915713
cagucucaugggugaaaga

SEQ ID NO: 1100595 - RNA, 19 nt, Artificial Sequence
  Description of Artificial Sequence: Synthetic oligonucleotide
  Antisense strand to SEQ ID NO: 1100594
ucuuucacccaugagacug

SEQ ID NO: 1100596 - RNA, 19 nt, Artificial Sequence
  Description of Artificial Sequence: Synthetic oligonucleotide
  Sense strand starting at position 1430 of SEQ ID NO: 915713
augggugaaagaugaguua

SEQ ID NO: 1100597 - RNA, 19 nt, Artificial Sequence
  Description of Artificial Sequence: Synthetic oligonucleotide
  Antisense strand to SEQ ID NO: 1100596
uaacucaucuuucacccau

SEQ ID NO: 1100598 - RNA, 19 nt, Artificial Sequence
  Description of Artificial Sequence: Synthetic oligonucleotide
  Sense strand starting at position 1690 of SEQ ID NO: 915713
gaggaauucuuugccaaug

SEQ ID NO: 1100599 - RNA, 19 nt, Artificial Sequence
  Description of Artificial Sequence: Synthetic oligonucleotide
  Antisense strand to SEQ ID NO: 1100598
cauuggcaaagaauuccuc

SEQ ID NO: 1100600 - RNA, 19 nt, Artificial Sequence
  Description of Artificial Sequence: Synthetic oligonucleotide
  Sense strand starting at position 1700 of SEQ ID NO: 915713
uugccaaugguccagaaga

SEQ ID NO: 1100601 - RNA, 19 nt, Artificial Sequence
  Description of Artificial Sequence: Synthetic oligonucleotide
  Antisense strand to SEQ ID NO: 1100600
ucuucuggaccauuggcaa

SEQ ID NO: 1100602 - RNA, 19 nt, Artificial Sequence
  Description of Artificial Sequence: Synthetic oligonucleotide
  Sense strand starting at position 1721 of SEQ ID NO: 915713
uauggucaagacugucaaa

SEQ ID NO: 1100603 - RNA, 19 nt, Artificial Sequence
  Description of Artificial Sequence: Synthetic oligonucleotide
  Antisense strand to SEQ ID NO: 1100602
uuugacagucuugaccaua

SEQ ID NO: 1100604 - RNA, 19 nt, Artificial Sequence
  Description of Artificial Sequence: Synthetic oligonucleotide
  Sense strand starting at position 1806 of SEQ ID NO: 915713
auauauguauaguuaggga

SEQ ID NO: 1100605 - RNA, 19 nt, Artificial Sequence
  Description of Artificial Sequence: Synthetic oligonucleotide
  Antisense strand to SEQ ID NO: 1100604
ucccuaacuauacauauau

SEQ ID NO: 1100606 - RNA, 19 nt, Artificial Sequence
  Description of Artificial Sequence: Synthetic oligonucleotide
  Sense strand starting at position 1811 of SEQ ID NO: 915713
uguauaguuagggagauuc

SEQ ID NO: 1100607 - RNA, 19 nt, Artificial Sequence
  Description of Artificial Sequence: Synthetic oligonucleotide
  Antisense strand to SEQ ID NO: 1100606
gaaucucccuaacuauaca

SEQ ID NO: 1100608 - RNA, 19 nt, Artificial Sequence
  Description of Artificial Sequence: Synthetic oligonucleotide
  Sense strand starting at position 1887 of SEQ ID NO: 915713
augugagauccuggguaca

SEQ ID NO: 1100609 - RNA, 19 nt, Artificial Sequence
  Description of Artificial Sequence: Synthetic oligonucleotide
  Antisense strand to SEQ ID NO: 1100608
uguacccaggaucucacau

SEQ ID NO: 1100610 - RNA, 19 nt, Artificial Sequence
  Description of Artificial Sequence: Synthetic oligonucleotide
  Sense strand starting at position 1937 of SEQ ID NO: 915713
ggaucccaguggucaugaa

SEQ ID NO: 1100611 - RNA, 19 nt, Artificial Sequence
  Description of Artificial Sequence: Synthetic oligonucleotide
  Antisense strand to SEQ ID NO: 1100610
uucaugaccacugggaucc

SEQ ID NO: 1100612 - RNA, 19 nt, Artificial Sequence
  Description of Artificial Sequence: Synthetic oligonucleotide
  Sense strand starting at position 1938 of SEQ ID NO: 915713
gaucccaguggucaugaau

SEQ ID NO: 1100613 - RNA, 19 nt, Artificial Sequence
  Description of Artificial Sequence: Synthetic oligonucleotide
  Antisense strand to SEQ ID NO: 1100612
auucaugaccacugggauc

SEQ ID NO: 1100614 - RNA, 19 nt, Artificial Sequence
  Description of Artificial Sequence: Synthetic oligonucleotide
  Sense strand starting at position 1941 of SEQ ID NO: 915713
cccaguggucaugaaucaa

SEQ ID NO: 1100615 - RNA, 19 nt, Artificial Sequence
  Description of Artificial Sequence: Synthetic oligonucleotide
  Antisense strand to SEQ ID NO: 1100614
uugauucaugaccacuggg

SEQ ID NO: 1100616 - RNA, 19 nt, Artificial Sequence
  Description of Artificial Sequence: Synthetic oligonucleotide
  Sense strand starting at position 1955 of SEQ ID NO: 915713
aucaaagcuuugguuuaaa

SEQ ID NO: 1100617 - RNA, 19 nt, Artificial Sequence
  Description of Artificial Sequence: Synthetic oligonucleotide
  Antisense strand to SEQ ID NO: 1100616
uuuaaaccaaagcuuugau

SEQ ID NO: 1100618 - RNA, 19 nt, Artificial Sequence
  Description of Artificial Sequence: Synthetic oligonucleotide
  Sense strand starting at position 2231 of SEQ ID NO: 915713
acauacauguacucaaguu

SEQ ID NO: 1100619 - RNA, 19 nt, Artificial Sequence
  Description of Artificial Sequence: Synthetic oligonucleotide
  Antisense strand to SEQ ID NO: 1100618
aacuugaguacauguaugu

SEQ ID NO: 1100620 - RNA, 19 nt, Artificial Sequence
  Description of Artificial Sequence: Synthetic oligonucleotide
  Sense strand starting at position 2492 of SEQ ID NO: 915713
ugugaaacccugggucaug

SEQ ID NO: 1100621 - RNA, 19 nt, Artificial Sequence
  Description of Artificial Sequence: Synthetic oligonucleotide
  Antisense strand to SEQ ID NO: 1100620
caugacccaggguuucaca

SEQ ID NO: 1100622 - RNA, 19 nt, Artificial Sequence
  Description of Artificial Sequence: Synthetic oligonucleotide
  Sense strand starting at position 2503 of SEQ ID NO: 915713
gggucauggacuugauccu

SEQ ID NO: 1100623 - RNA, 19 nt, Artificial Sequence
  Description of Artificial Sequence: Synthetic oligonucleotide
  Antisense strand to SEQ ID NO: 1100622
aggaucaaguccaugaccc

SEQ ID NO: 1100624 - RNA, 19 nt, Artificial Sequence
  Description of Artificial Sequence: Synthetic oligonucleotide
  Sense strand starting at position 2523 of SEQ ID NO: 915713
uggacauucucugcuuaaa

SEQ ID NO: 1100625 - RNA, 19 nt, Artificial Sequence
  Description of Artificial Sequence: Synthetic oligonucleotide
  Antisense strand to SEQ ID NO: 1100624
uuuaagcagagaaugucca

SEQ ID NO: 1100626 - RNA, 19 nt, Artificial Sequence
  Description of Artificial Sequence: Synthetic oligonucleotide
  Sense strand starting at position 2574 of SEQ ID NO: 915713
cauuacaaggucugaugau

SEQ ID NO: 1100627 - RNA, 19 nt, Artificial Sequence
  Description of Artificial Sequence: Synthetic oligonucleotide
  Antisense strand to SEQ ID NO: 1100626
aucaucagaccuuguaaug

SEQ ID NO: 1100628 - RNA, 19 nt, Artificial Sequence
  Description of Artificial Sequence: Synthetic oligonucleotide
  Sense strand starting at position 2596 of SEQ ID NO: 915713
guguaucaggaaggaauua

SEQ ID NO: 1100629 - RNA, 19 nt, Artificial Sequence
  Description of Artificial Sequence: Synthetic oligonucleotide
  Antisense strand to SEQ ID NO: 1100628
uaauuccuuccugauacac

SEQ ID NO: 1100630 - RNA, 19 nt, Artificial Sequence
  Description of Artificial Sequence: Synthetic oligonucleotide
  Sense strand starting at position 2716 of SEQ ID NO: 915713
agccuagagcacuggaaau

SEQ ID NO: 1100631 - RNA, 19 nt, Artificial Sequence
  Description of Artificial Sequence: Synthetic oligonucleotide
  Antisense strand to SEQ ID NO: 1100630
auuuccagugcucuaggcu

SEQ ID NO: 1100632 - RNA, 19 nt, Artificial Sequence
  Description of Artificial Sequence: Synthetic oligonucleotide
  Sense strand starting at position 2897 of SEQ ID NO: 915713
gagaguagagguggguaua

SEQ ID NO: 1100633 - RNA, 19 nt, Artificial Sequence
  Description of Artificial Sequence: Synthetic oligonucleotide
  Antisense strand to SEQ ID NO: 1100632
uauacccaccucuacucuc

SEQ ID NO: 1100634 - RNA, 19 nt, Artificial Sequence
  Description of Artificial Sequence: Synthetic oligonucleotide
  Sense strand starting at position 2918 of SEQ ID NO: 915713
caagaacaauccgugaugu

SEQ ID NO: 1100635 - RNA, 19 nt, Artificial Sequence
  Description of Artificial Sequence: Synthetic oligonucleotide
  Antisense strand to SEQ ID NO: 1100634
acaucacggauuguucuug

SEQ ID NO: 1100636 - RNA, 19 nt, Artificial Sequence
  Description of Artificial Sequence: Synthetic oligonucleotide
  Sense strand starting at position 2926 of SEQ ID NO: 915713
auccgugauguggauaaag

SEQ ID NO: 1100637 - RNA, 19 nt, Artificial Sequence
  Description of Artificial Sequence: Synthetic oligonucleotide
  Antisense strand to SEQ ID NO: 1100636
cuuuauccacaucacggau

SEQ ID NO: 1100638 - RNA, 19 nt, Artificial Sequence
  Description of Artificial Sequence: Synthetic oligonucleotide
  Sense strand starting at position 2928 of SEQ ID NO: 915713
ccgugauguggauaaagga

SEQ ID NO: 1100639 - RNA, 19 nt, Artificial Sequence
  Description of Artificial Sequence: Synthetic oligonucleotide
  Antisense strand to SEQ ID NO: 1100638
uccuuuauccacaucacgg

SEQ ID NO: 1100640 - RNA, 19 nt, Artificial Sequence
  Description of Artificial Sequence: Synthetic oligonucleotide
  Sense strand starting at position 3019 of SEQ ID NO: 915713
acaugagacuguuuccauu

SEQ ID NO: 1100641 - RNA, 19 nt, Artificial Sequence
  Description of Artificial Sequence: Synthetic oligonucleotide
  Antisense strand to SEQ ID NO: 1100640
aauggaaacagucucaugu

SEQ ID NO: 1100642 - RNA, 19 nt, Artificial Sequence
  Description of Artificial Sequence: Synthetic oligonucleotide
  Sense strand starting at position 3021 of SEQ ID NO: 915713
augagacuguuuccauucu

SEQ ID NO: 1100643 - RNA, 19 nt, Artificial Sequence
  Description of Artificial Sequence: Synthetic oligonucleotide
  Antisense strand to SEQ ID NO: 1100642
agaauggaaacagucucau

SEQ ID NO: 1100644 - RNA, 19 nt, Artificial Sequence
  Description of Artificial Sequence: Synthetic oligonucleotide
  Sense strand starting at position 3172 of SEQ ID NO: 915713
aucuauuucucguuccuua

SEQ ID NO: 1100645 - RNA, 19 nt, Artificial Sequence
  Description of Artificial Sequence: Synthetic oligonucleotide
  Antisense strand to SEQ ID NO: 1100644
uaaggaacgagaaauagau

SEQ ID NO: 1100646 - RNA, 19 nt, Artificial Sequence
  Description of Artificial Sequence: Synthetic oligonucleotide
  Sense strand starting at position 3197 of SEQ ID NO: 915713
guagaaaucugacuuuauu

SEQ ID NO: 1100647 - RNA, 19 nt, Artificial Sequence
  Description of Artificial Sequence: Synthetic oligonucleotide
  Antisense strand to SEQ ID NO: 1100646
aauaaagucagauuucuac

SEQ ID NO: 1100648 - RNA, 19 nt, Artificial Sequence
  Description of Artificial Sequence: Synthetic oligonucleotide
  Sense strand starting at position 3473 of SEQ ID NO: 915713
acccguuuauugucuauuu

SEQ ID NO: 1100649 - RNA, 19 nt, Artificial Sequence
  Description of Artificial Sequence: Synthetic oligonucleotide
  Antisense strand to SEQ ID NO: 1100648
aaauagacaauaaacgggu

SEQ ID NO: 1100650 - RNA, 19 nt, Artificial Sequence
  Description of Artificial Sequence: Synthetic oligonucleotide
  Sense strand starting at position 3574 of SEQ ID NO: 915713
augugauacaugggcuaug

SEQ ID NO: 1100651 - RNA, 19 nt, Artificial Sequence
  Description of Artificial Sequence: Synthetic oligonucleotide
  Antisense strand to SEQ ID NO: 1100650
cauagcccauguaucacau

SEQ ID NO: 1100652 - RNA, 19 nt, Artificial Sequence
  Description of Artificial Sequence: Synthetic oligonucleotide
  Sense strand starting at position 3575 of SEQ ID NO: 915713
ugugauacaugggcuauga

SEQ ID NO: 1100653 - RNA, 19 nt, Artificial Sequence
  Description of Artificial Sequence: Synthetic oligonucleotide
  Antisense strand to SEQ ID NO: 1100652
ucauagcccauguaucaca

SEQ ID NO: 1100654 - RNA, 19 nt, Artificial Sequence
  Description of Artificial Sequence: Synthetic oligonucleotide
  Sense strand starting at position 3579 of SEQ ID NO: 915713
auacaugggcuaugaugua

SEQ ID NO: 1100655 - RNA, 19 nt, Artificial Sequence
  Description of Artificial Sequence: Synthetic oligonucleotide
  Antisense strand to SEQ ID NO: 1100654
uacaucauagcccauguau

SEQ ID NO: 1100656 - RNA, 19 nt, Artificial Sequence
  Description of Artificial Sequence: Synthetic oligonucleotide
  Sense strand starting at position 3601 of SEQ ID NO: 915713
guuacugugcugucuccau

SEQ ID NO: 1100657 - RNA, 19 nt, Artificial Sequence
  Description of Artificial Sequence: Synthetic oligonucleotide
  Antisense strand to SEQ ID NO: 1100656
auggagacagcacaguaac

SEQ ID NO: 1100658 - RNA, 19 nt, Artificial Sequence
  Description of Artificial Sequence: Synthetic oligonucleotide
  Sense strand starting at position 3714 of SEQ ID NO: 915713
guuguuguugaguccgagu

SEQ ID NO: 1100659 - RNA, 19 nt, Artificial Sequence
  Description of Artificial Sequence: Synthetic oligonucleotide
  Antisense strand to SEQ ID NO: 1100658
acucggacucaacaacaac

SEQ ID NO: 1100660 - RNA, 19 nt, Artificial Sequence
  Description of Artificial Sequence: Synthetic oligonucleotide
  Sense strand starting at position 682 of SEQ ID NO: 915714
ccguauuucucaccacuuu

SEQ ID NO: 1100661 - RNA, 19 nt, Artificial Sequence
  Description of Artificial Sequence: Synthetic oligonucleotide
  Antisense strand to SEQ ID NO: 1100660
aaaguggugagaaauacgg

SEQ ID NO: 1100662 - RNA, 19 nt, Artificial Sequence
  Description of Artificial Sequence: Synthetic oligonucleotide
  Sense strand starting at position 704 of SEQ ID NO: 915714
caucguauguuauguauuu

SEQ ID NO: 1100663 - RNA, 19 nt, Artificial Sequence
  Description of Artificial Sequence: Synthetic oligonucleotide
  Antisense strand to SEQ ID NO: 1100662
aaauacauaacauacgaug

SEQ ID NO: 1100664 - RNA, 19 nt, Artificial Sequence
  Description of Artificial Sequence: Synthetic oligonucleotide
  Sense strand starting at position 836 of SEQ ID NO: 915714
ucagauuaaugcugacuga

SEQ ID NO: 1100665 - RNA, 19 nt, Artificial Sequence
  Description of Artificial Sequence: Synthetic oligonucleotide
  Antisense strand to SEQ ID NO: 1100664
ucagucagcauuaaucuga

SEQ ID NO: 1100666 - RNA, 19 nt, Artificial Sequence
  Description of Artificial Sequence: Synthetic oligonucleotide
  Sense strand starting at position 849 of SEQ ID NO: 915714
gacugacacucagaaguuu

SEQ ID NO: 1100667 - RNA, 19 nt, Artificial Sequence
  Description of Artificial Sequence: Synthetic oligonucleotide
  Antisense strand to SEQ ID NO: 1100666
aaacuucugagugucaguc

SEQ ID NO: 1100668 - RNA, 19 nt, Artificial Sequence
  Description of Artificial Sequence: Synthetic oligonucleotide
  Sense strand starting at position 869 of SEQ ID NO: 915714
agcugagcauuccaugacu

SEQ ID NO: 1100669 - RNA, 19 nt, Artificial Sequence
  Description of Artificial Sequence: Synthetic oligonucleotide
  Antisense strand to SEQ ID NO: 1100668
agucauggaaugcucagcu

SEQ ID NO: 1100670 - RNA, 19 nt, Artificial Sequence
  Description of Artificial Sequence: Synthetic oligonucleotide
  Sense strand starting at position 929 of SEQ ID NO: 915714
uauagaaugcugugcgaug

SEQ ID NO: 1100671 - RNA, 19 nt, Artificial Sequence
  Description of Artificial Sequence: Synthetic oligonucleotide
  Antisense strand to SEQ ID NO: 1100670
caucgcacagcauucuaua

SEQ ID NO: 1100672 - RNA, 19 nt, Artificial Sequence
  Description of Artificial Sequence: Synthetic oligonucleotide
  Sense strand starting at position 2277 of SEQ ID NO: 915714
gaacguagaucuggaaauu

SEQ ID NO: 1100673 - RNA, 19 nt, Artificial Sequence
  Description of Artificial Sequence: Synthetic oligonucleotide
  Antisense strand to SEQ ID NO: 1100672
aauuuccagaucuacguuc

SEQ ID NO: 1100674 - RNA, 19 nt, Artificial Sequence
  Description of Artificial Sequence: Synthetic oligonucleotide
  Sense strand starting at position 2493 of SEQ ID NO: 915714
ggcacaaguuuaccuacau

SEQ ID NO: 1100675 - RNA, 19 nt, Artificial Sequence
  Description of Artificial Sequence: Synthetic oligonucleotide
  Antisense strand to SEQ ID NO: 1100674
auguagguaaacuugugcc

SEQ ID NO: 1100676 - RNA, 19 nt, Artificial Sequence
  Description of Artificial Sequence: Synthetic oligonucleotide
  Sense strand starting at position 2735 of SEQ ID NO: 915714
cugugcaaacucugaacua

SEQ ID NO: 1100677 - RNA, 19 nt, Artificial Sequence
  Description of Artificial Sequence: Synthetic oligonucleotide
  Antisense strand to SEQ ID NO: 1100676
uaguucagaguuugcacag

SEQ ID NO: 1100678 - RNA, 19 nt, Artificial Sequence
  Description of Artificial Sequence: Synthetic oligonucleotide
  Sense strand starting at position 2736 of SEQ ID NO: 915714
ugugcaaacucugaacuaa

SEQ ID NO: 1100679 - RNA, 19 nt, Artificial Sequence
  Description of Artificial Sequence: Synthetic oligonucleotide
  Antisense strand to SEQ ID NO: 1100678
uuaguucagaguuugcaca

SEQ ID NO: 1100680 - RNA, 19 nt, Artificial Sequence
  Description of Artificial Sequence: Synthetic oligonucleotide
  Sense strand starting at position 2844 of SEQ ID NO: 915714
accaauaccuagggaacua

SEQ ID NO: 1100681 - RNA, 19 nt, Artificial Sequence
  Description of Artificial Sequence: Synthetic oligonucleotide
  Antisense strand to SEQ ID NO: 1100680
uaguucccuagguauuggu

SEQ ID NO: 1100682 - RNA, 19 nt, Artificial Sequence
  Description of Artificial Sequence: Synthetic oligonucleotide
  Sense strand starting at position 2907 of SEQ ID NO: 915714
aagagagauaugugaguug

SEQ ID NO: 1100683 - RNA, 19 nt, Artificial Sequence
  Description of Artificial Sequence: Synthetic oligonucleotide
  Antisense strand to SEQ ID NO: 1100682
caacucacauaucucucuu

SEQ ID NO: 1100684 - RNA, 19 nt, Artificial Sequence
  Description of Artificial Sequence: Synthetic oligonucleotide
  Sense strand starting at position 3107 of SEQ ID NO: 915714
gagacagccuauguuggaa

SEQ ID NO: 1100685 - RNA, 19 nt, Artificial Sequence
  Description of Artificial Sequence: Synthetic oligonucleotide
  Antisense strand to SEQ ID NO: 1100684
uuccaacauaggcugucuc

SEQ ID NO: 1100686 - RNA, 19 nt, Artificial Sequence
  Description of Artificial Sequence: Synthetic oligonucleotide
  Sense strand starting at position 3119 of SEQ ID NO: 915714
guuggaacucucuagacuc

SEQ ID NO: 1100687 - RNA, 19 nt, Artificial Sequence
  Description of Artificial Sequence: Synthetic oligonucleotide
  Antisense strand to SEQ ID NO: 1100686
gagucuagagaguuccaac

SEQ ID NO: 1100688 - RNA, 19 nt, Artificial Sequence
  Description of Artificial Sequence: Synthetic oligonucleotide
  Sense strand starting at position 3217 of SEQ ID NO: 915714
ugagaaaugugucaggugu

SEQ ID NO: 1100689 - RNA, 19 nt, Artificial Sequence
  Description of Artificial Sequence: Synthetic oligonucleotide
  Antisense strand to SEQ ID NO: 1100688
acaccugacacauuucuca

SEQ ID NO: 1100690 - RNA, 19 nt, Artificial Sequence
  Description of Artificial Sequence: Synthetic oligonucleotide
  Sense strand starting at position 3219 of SEQ ID NO: 915714
agaaaugugucagguguuu

SEQ ID NO: 1100691 - RNA, 19 nt, Artificial Sequence
  Description of Artificial Sequence: Synthetic oligonucleotide
  Antisense strand to SEQ ID NO: 1100690
aaacaccugacacauuucu

SEQ ID NO: 1100692 - RNA, 19 nt, Artificial Sequence
  Description of Artificial Sequence: Synthetic oligonucleotide
  Sense strand starting at position 3270 of SEQ ID NO: 915714
agaguauccuucugucaca

SEQ ID NO: 1100693 - RNA, 19 nt, Artificial Sequence
  Description of Artificial Sequence: Synthetic oligonucleotide
  Antisense strand to SEQ ID NO: 1100692
ugugacagaaggauacucu

SEQ ID NO: 1100694 - RNA, 19 nt, Artificial Sequence
  Description of Artificial Sequence: Synthetic oligonucleotide
  Sense strand starting at position 3800 of SEQ ID NO: 915714
gugguuuguggcugacuca

SEQ ID NO: 1100695 - RNA, 19 nt, Artificial Sequence
  Description of Artificial Sequence: Synthetic oligonucleotide
  Antisense strand to SEQ ID NO: 1100694
ugagucagccacaaaccac

SEQ ID NO: 1100696 - RNA, 19 nt, Artificial Sequence
  Description of Artificial Sequence: Synthetic oligonucleotide
  Sense strand starting at position 3801 of SEQ ID NO: 915714
ugguuuguggcugacucaa

SEQ ID NO: 1100697 - RNA, 19 nt, Artificial Sequence
  Description of Artificial Sequence: Synthetic oligonucleotide
  Antisense strand to SEQ ID NO: 1100696
uugagucagccacaaacca

SEQ ID NO: 1100698 - RNA, 19 nt, Artificial Sequence
  Description of Artificial Sequence: Synthetic oligonucleotide
  Sense strand starting at position 3803 of SEQ ID NO: 915714
guuuguggcugacucaaau

SEQ ID NO: 1100699 - RNA, 19 nt, Artificial Sequence
  Description of Artificial Sequence: Synthetic oligonucleotide
  Antisense strand to SEQ ID NO: 1100698
auuugagucagccacaaac

SEQ ID NO: 1100700 - RNA, 19 nt, Artificial Sequence
  Description of Artificial Sequence: Synthetic oligonucleotide
  Sense strand starting at position 3813 of SEQ ID NO: 915714
gacucaaauggccgauaaa

SEQ ID NO: 1100701 - RNA, 19 nt, Artificial Sequence
  Description of Artificial Sequence: Synthetic oligonucleotide
  Antisense strand to SEQ ID NO: 1100700
uuuaucggccauuugaguc

SEQ ID NO: 1100702 - RNA, 19 nt, Artificial Sequence
  Description of Artificial Sequence: Synthetic oligonucleotide
  Sense strand starting at position 3814 of SEQ ID NO: 915714
acucaaauggccgauaaau

SEQ ID NO: 1100703 - RNA, 19 nt, Artificial Sequence
  Description of Artificial Sequence: Synthetic oligonucleotide
  Antisense strand to SEQ ID NO: 1100702
auuuaucggccauuugagu

SEQ ID NO: 1100704 - RNA, 19 nt, Artificial Sequence
  Description of Artificial Sequence: Synthetic oligonucleotide
  Sense strand starting at position 3816 of SEQ ID NO: 915714
ucaaauggccgauaaaugu

SEQ ID NO: 1100705 - RNA, 19 nt, Artificial Sequence
  Description of Artificial Sequence: Synthetic oligonucleotide
  Antisense strand to SEQ ID NO: 1100704
acauuuaucggccauuuga

SEQ ID NO: 1100706 - RNA, 19 nt, Artificial Sequence
  Description of Artificial Sequence: Synthetic oligonucleotide
  Sense strand starting at position 3825 of SEQ ID NO: 915714
cgauaaauguaucagcaca

SEQ ID NO: 1100707 - RNA, 19 nt, Artificial Sequence
  Description of Artificial Sequence: Synthetic oligonucleotide
  Antisense strand to SEQ ID NO: 1100706
ugugcugauacauuuaucg

SEQ ID NO: 1100708 - RNA, 19 nt, Artificial Sequence
  Description of Artificial Sequence: Synthetic oligonucleotide
  Sense strand starting at position 3849 of SEQ ID NO: 915714
acguauacauccuaugguu

SEQ ID NO: 1100709 - RNA, 19 nt, Artificial Sequence
  Description of Artificial Sequence: Synthetic oligonucleotide
  Antisense strand to SEQ ID NO: 1100708
aaccauaggauguauacgu

SEQ ID NO: 1100710 - RNA, 19 nt, Artificial Sequence
  Description of Artificial Sequence: Synthetic oligonucleotide
  Sense strand starting at position 3924 of SEQ ID NO: 915714
aguccuuuagcauaaagca

SEQ ID NO: 1100711 - RNA, 19 nt, Artificial Sequence
  Description of Artificial Sequence: Synthetic oligonucleotide
  Antisense strand to SEQ ID NO: 1100710
ugcuuuaugcuaaaggacu

SEQ ID NO: 1100712 - RNA, 19 nt, Artificial Sequence
  Description of Artificial Sequence: Synthetic oligonucleotide
  Sense strand starting at position 3943 of SEQ ID NO: 915714
gcauaaagcugcuaguuua

SEQ ID NO: 1100713 - RNA, 19 nt, Artificial Sequence
  Description of Artificial Sequence: Synthetic oligonucleotide
  Antisense strand to SEQ ID NO: 1100712
uaaacuagcagcuuuaugc

SEQ ID NO: 1100714 - RNA, 19 nt, Artificial Sequence
  Description of Artificial Sequence: Synthetic oligonucleotide
  Sense strand starting at position 857 of SEQ ID NO: 915715
cugaaugaaucacauguaa

SEQ ID NO: 1100715 - RNA, 19 nt, Artificial Sequence
  Description of Artificial Sequence: Synthetic oligonucleotide
  Antisense strand to SEQ ID NO: 1100714
uuacaugugauucauucag

SEQ ID NO: 1100716 - RNA, 19 nt, Artificial Sequence
  Description of Artificial Sequence: Synthetic oligonucleotide
  Sense strand starting at position 1041 of SEQ ID NO: 915715
agccuugaauuccaaguaa

SEQ ID NO: 1100717 - RNA, 19 nt, Artificial Sequence
  Description of Artificial Sequence: Synthetic oligonucleotide
  Antisense strand to SEQ ID NO: 1100716
uuacuuggaauucaaggcu

SEQ ID NO: 1100718 - RNA, 19 nt, Artificial Sequence
  Description of Artificial Sequence: Synthetic oligonucleotide
  Sense strand starting at position 1141 of SEQ ID NO: 915715
ugguaacgucaguguauga

SEQ ID NO: 1100719 - RNA, 19 nt, Artificial Sequence
  Description of Artificial Sequence: Synthetic oligonucleotide
  Antisense strand to SEQ ID NO: 1100718
ucauacacugacguuacca

SEQ ID NO: 1100720 - RNA, 19 nt, Artificial Sequence
  Description of Artificial Sequence: Synthetic oligonucleotide
  Sense strand starting at position 1420 of SEQ ID NO: 915715
ucaccagucucauggguga

SEQ ID NO: 1100721 - RNA, 19 nt, Artificial Sequence
  Description of Artificial Sequence: Synthetic oligonucleotide
  Antisense strand to SEQ ID NO: 1100720
ucacccaugagacugguga

SEQ ID NO: 1100722 - RNA, 19 nt, Artificial Sequence
  Description of Artificial Sequence: Synthetic oligonucleotide
  Sense strand starting at position 1422 of SEQ ID NO: 915715
accagucucaugggugaaa

SEQ ID NO: 1100723 - RNA, 19 nt, Artificial Sequence
  Description of Artificial Sequence: Synthetic oligonucleotide
  Antisense strand to SEQ ID NO: 1100722
uuucacccaugagacuggu

SEQ ID NO: 1100724 - RNA, 19 nt, Artificial Sequence
  Description of Artificial Sequence: Synthetic oligonucleotide
  Sense strand starting at position 1424 of SEQ ID NO: 915715
cagucucaugggugaaaga

SEQ ID NO: 1100725 - RNA, 19 nt, Artificial Sequence
  Description of Artificial Sequence: Synthetic oligonucleotide
  Antisense strand to SEQ ID NO: 1100724
ucuuucacccaugagacug

SEQ ID NO: 1100726 - RNA, 19 nt, Artificial Sequence
  Description of Artificial Sequence: Synthetic oligonucleotide
  Sense strand starting at position 1431 of SEQ ID NO: 915715
augggugaaagaugaguua

SEQ ID NO: 1100727 - RNA, 19 nt, Artificial Sequence
  Description of Artificial Sequence: Synthetic oligonucleotide
  Antisense strand to SEQ ID NO: 1100726
uaacucaucuuucacccau

SEQ ID NO: 1100728 - RNA, 19 nt, Artificial Sequence
  Description of Artificial Sequence: Synthetic oligonucleotide
  Sense strand starting at position 1434 of SEQ ID NO: 915715
ggugaaagaugaguuauua

SEQ ID NO: 1100729 - RNA, 19 nt, Artificial Sequence
  Description of Artificial Sequence: Synthetic oligonucleotide
  Antisense strand to SEQ ID NO: 1100728
uaauaacucaucuuucacc

SEQ ID NO: 1100730 - RNA, 19 nt, Artificial Sequence
  Description of Artificial Sequence: Synthetic oligonucleotide
  Sense strand starting at position 1500 of SEQ ID NO: 915715
gagugcaccacgggaauua

SEQ ID NO: 1100731 - RNA, 19 nt, Artificial Sequence
  Description of Artificial Sequence: Synthetic oligonucleotide
  Antisense strand to SEQ ID NO: 1100730
uaauucccguggugcacuc

SEQ ID NO: 1100732 - RNA, 19 nt, Artificial Sequence
  Description of Artificial Sequence: Synthetic oligonucleotide
  Sense strand starting at position 2086 of SEQ ID NO: 915715
uggguacacuuccuaguua

SEQ ID NO: 1100733 - RNA, 19 nt, Artificial Sequence
  Description of Artificial Sequence: Synthetic oligonucleotide
  Antisense strand to SEQ ID NO: 1100732
uaacuaggaaguguaccca

SEQ ID NO: 1100734 - RNA, 19 nt, Artificial Sequence
  Description of Artificial Sequence: Synthetic oligonucleotide
  Sense strand starting at position 2143 of SEQ ID NO: 915715
uccagcaggucuuaaguaa

SEQ ID NO: 1100735 - RNA, 19 nt, Artificial Sequence
  Description of Artificial Sequence: Synthetic oligonucleotide
  Antisense strand to SEQ ID NO: 1100734
uuacuuaagaccugcugga

SEQ ID NO: 1100736 - RNA, 19 nt, Artificial Sequence
  Description of Artificial Sequence: Synthetic oligonucleotide
  Sense strand starting at position 2147 of SEQ ID NO: 915715
gcaggucuuaaguaagugu

SEQ ID NO: 1100737 - RNA, 19 nt, Artificial Sequence
  Description of Artificial Sequence: Synthetic oligonucleotide
  Antisense strand to SEQ ID NO: 1100736
acacuuacuuaagaccugc

SEQ ID NO: 1100738 - RNA, 19 nt, Artificial Sequence
  Description of Artificial Sequence: Synthetic oligonucleotide
  Sense strand starting at position 2325 of SEQ ID NO: 915715
uugucaguuuacuauccaa

SEQ ID NO: 1100739 - RNA, 19 nt, Artificial Sequence
  Description of Artificial Sequence: Synthetic oligonucleotide
  Antisense strand to SEQ ID NO: 1100738
uuggauaguaaacugacaa

SEQ ID NO: 1100740 - RNA, 19 nt, Artificial Sequence
  Description of Artificial Sequence: Synthetic oligonucleotide
  Sense strand starting at position 2424 of SEQ ID NO: 915715
aaguaagaucugugcuggu

SEQ ID NO: 1100741 - RNA, 19 nt, Artificial Sequence
  Description of Artificial Sequence: Synthetic oligonucleotide
  Antisense strand to SEQ ID NO: 1100740
accagcacagaucuuacuu

SEQ ID NO: 1100742 - RNA, 19 nt, Artificial Sequence
  Description of Artificial Sequence: Synthetic oligonucleotide
  Sense strand starting at position 2492 of SEQ ID NO: 915715
uugugaaacccugggucau

SEQ ID NO: 1100743 - RNA, 19 nt, Artificial Sequence
  Description of Artificial Sequence: Synthetic oligonucleotide
  Antisense strand to SEQ ID NO: 1100742
augacccaggguuucacaa

SEQ ID NO: 1100744 - RNA, 19 nt, Artificial Sequence
  Description of Artificial Sequence: Synthetic oligonucleotide
  Sense strand starting at position 2493 of SEQ ID NO: 915715
ugugaaacccugggucaug

SEQ ID NO: 1100745 - RNA, 19 nt, Artificial Sequence
  Description of Artificial Sequence: Synthetic oligonucleotide
  Antisense strand to SEQ ID NO: 1100744
caugacccaggguuucaca

SEQ ID NO: 1100746 - RNA, 19 nt, Artificial Sequence
  Description of Artificial Sequence: Synthetic oligonucleotide
  Sense strand starting at position 2504 of SEQ ID NO: 915715
gggucauggacuugauccu

SEQ ID NO: 1100747 - RNA, 19 nt, Artificial Sequence
  Description of Artificial Sequence: Synthetic oligonucleotide
  Antisense strand to SEQ ID NO: 1100746
aggaucaaguccaugaccc

SEQ ID NO: 1100748 - RNA, 19 nt, Artificial Sequence
  Description of Artificial Sequence: Synthetic oligonucleotide
  Sense strand starting at position 2513 of SEQ ID NO: 915715
acuugauccuguggacauu

SEQ ID NO: 1100749 - RNA, 19 nt, Artificial Sequence
  Description of Artificial Sequence: Synthetic oligonucleotide
  Antisense strand to SEQ ID NO: 1100748
aauguccacaggaucaagu

SEQ ID NO: 1100750 - RNA, 19 nt, Artificial Sequence
  Description of Artificial Sequence: Synthetic oligonucleotide
  Sense strand starting at position 2522 of SEQ ID NO: 915715
uguggacauucucugcuua

SEQ ID NO: 1100751 - RNA, 19 nt, Artificial Sequence
  Description of Artificial Sequence: Synthetic oligonucleotide
  Antisense strand to SEQ ID NO: 1100750
uaagcagagaauguccaca

SEQ ID NO: 1100752 - RNA, 19 nt, Artificial Sequence
  Description of Artificial Sequence: Synthetic oligonucleotide
  Sense strand starting at position 2523 of SEQ ID NO: 915715
guggacauucucugcuuaa

SEQ ID NO: 1100753 - RNA, 19 nt, Artificial Sequence
  Description of Artificial Sequence: Synthetic oligonucleotide
  Antisense strand to SEQ ID NO: 1100752
uuaagcagagaauguccac

SEQ ID NO: 1100754 - RNA, 19 nt, Artificial Sequence
  Description of Artificial Sequence: Synthetic oligonucleotide
  Sense strand starting at position 2524 of SEQ ID NO: 915715
uggacauucucugcuuaaa

SEQ ID NO: 1100755 - RNA, 19 nt, Artificial Sequence
  Description of Artificial Sequence: Synthetic oligonucleotide
  Antisense strand to SEQ ID NO: 1100754
uuuaagcagagaaugucca

SEQ ID NO: 1100756 - RNA, 19 nt, Artificial Sequence
  Description of Artificial Sequence: Synthetic oligonucleotide
  Sense strand starting at position 2575 of SEQ ID NO: 915715
cauuacaaggucugaugau

SEQ ID NO: 1100757 - RNA, 19 nt, Artificial Sequence
  Description of Artificial Sequence: Synthetic oligonucleotide
  Antisense strand to SEQ ID NO: 1100756
aucaucagaccuuguaaug

SEQ ID NO: 1100758 - RNA, 19 nt, Artificial Sequence
  Description of Artificial Sequence: Synthetic oligonucleotide
  Sense strand starting at position 2584 of SEQ ID NO: 915715
gucugaugaugcuguguau

SEQ ID NO: 1100759 - RNA, 19 nt, Artificial Sequence
  Description of Artificial Sequence: Synthetic oligonucleotide
  Antisense strand to SEQ ID NO: 1100758
auacacagcaucaucagac

SEQ ID NO: 1100760 - RNA, 19 nt, Artificial Sequence
  Description of Artificial Sequence: Synthetic oligonucleotide
  Sense strand starting at position 2838 of SEQ ID NO: 915715
aguaauucucuuuagaguu

SEQ ID NO: 1100761 - RNA, 19 nt, Artificial Sequence
  Description of Artificial Sequence: Synthetic oligonucleotide
  Antisense strand to SEQ ID NO: 1100760
aacucuaaagagaauuacu

SEQ ID NO: 1100762 - RNA, 19 nt, Artificial Sequence
  Description of Artificial Sequence: Synthetic oligonucleotide
  Sense strand starting at position 3020 of SEQ ID NO: 915715
acaugagacuguuuccauu

SEQ ID NO: 1100763 - RNA, 19 nt, Artificial Sequence
  Description of Artificial Sequence: Synthetic oligonucleotide
  Antisense strand to SEQ ID NO: 1100762
aauggaaacagucucaugu

SEQ ID NO: 1100764 - RNA, 19 nt, Artificial Sequence
  Description of Artificial Sequence: Synthetic oligonucleotide
  Sense strand starting at position 3022 of SEQ ID NO: 915715
augagacuguuuccauucu

SEQ ID NO: 1100765 - RNA, 19 nt, Artificial Sequence
  Description of Artificial Sequence: Synthetic oligonucleotide
  Antisense strand to SEQ ID NO: 1100764
agaauggaaacagucucau

SEQ ID NO: 1100766 - RNA, 19 nt, Artificial Sequence
  Description of Artificial Sequence: Synthetic oligonucleotide
  Sense strand starting at position 3023 of SEQ ID NO: 915715
ugagacuguuuccauucua

SEQ ID NO: 1100767 - RNA, 19 nt, Artificial Sequence
  Description of Artificial Sequence: Synthetic oligonucleotide
  Antisense strand to SEQ ID NO: 1100766
uagaauggaaacagucuca

SEQ ID NO: 1100768 - RNA, 19 nt, Artificial Sequence
  Description of Artificial Sequence: Synthetic oligonucleotide
  Sense strand starting at position 3156 of SEQ ID NO: 915715
uuguaugaaaguuggugau

SEQ ID NO: 1100769 - RNA, 19 nt, Artificial Sequence
  Description of Artificial Sequence: Synthetic oligonucleotide
  Antisense strand to SEQ ID NO: 1100768
aucaccaacuuucauacaa

SEQ ID NO: 1100770 - RNA, 19 nt, Artificial Sequence
  Description of Artificial Sequence: Synthetic oligonucleotide
  Sense strand starting at position 3158 of SEQ ID NO: 915715
guaugaaaguuggugaucu

SEQ ID NO: 1100771 - RNA, 19 nt, Artificial Sequence
  Description of Artificial Sequence: Synthetic oligonucleotide
  Antisense strand to SEQ ID NO: 1100770
agaucaccaacuuucauac

SEQ ID NO: 1100772 - RNA, 19 nt, Artificial Sequence
  Description of Artificial Sequence: Synthetic oligonucleotide
  Sense strand starting at position 3159 of SEQ ID NO: 915715
uaugaaaguuggugaucua

SEQ ID NO: 1100773 - RNA, 19 nt, Artificial Sequence
  Description of Artificial Sequence: Synthetic oligonucleotide
  Antisense strand to SEQ ID NO: 1100772
uagaucaccaacuuucaua

SEQ ID NO: 1100774 - RNA, 19 nt, Artificial Sequence
  Description of Artificial Sequence: Synthetic oligonucleotide
  Sense strand starting at position 3173 of SEQ ID NO: 915715
aucuauuucucguuccuua

SEQ ID NO: 1100775 - RNA, 19 nt, Artificial Sequence
  Description of Artificial Sequence: Synthetic oligonucleotide
  Antisense strand to SEQ ID NO: 1100774
uaaggaacgagaaauagau

SEQ ID NO: 1100776 - RNA, 19 nt, Artificial Sequence
  Description of Artificial Sequence: Synthetic oligonucleotide
  Sense strand starting at position 3473 of SEQ ID NO: 915715
acccguuuauugucuauuu

SEQ ID NO: 1100777 - RNA, 19 nt, Artificial Sequence
  Description of Artificial Sequence: Synthetic oligonucleotide
  Antisense strand to SEQ ID NO: 1100776
aaauagacaauaaacgggu

SEQ ID NO: 1100778 - RNA, 19 nt, Artificial Sequence
  Description of Artificial Sequence: Synthetic oligonucleotide
  Sense strand starting at position 3650 of SEQ ID NO: 915715
caugcaauauguguagcau

SEQ ID NO: 1100779 - RNA, 19 nt, Artificial Sequence
  Description of Artificial Sequence: Synthetic oligonucleotide
  Antisense strand to SEQ ID NO: 1100778
augcuacacauauugcaug

SEQ ID NO: 1100780 - RNA, 19 nt, Artificial Sequence
  Description of Artificial Sequence: Synthetic oligonucleotide
  Sense strand starting at position 3717 of SEQ ID NO: 915715
guuguuguugaguccgagu

SEQ ID NO: 1100781 - RNA, 19 nt, Artificial Sequence
  Description of Artificial Sequence: Synthetic oligonucleotide
  Antisense strand to SEQ ID NO: 1100780
acucggacucaacaacaac

SEQ ID NO: 1100782 - RNA, 19 nt, Artificial Sequence
  Description of Artificial Sequence: Synthetic oligonucleotide
  Sense strand starting at position 389 of SEQ ID NO: 915716
gccucucauuuggauugua

SEQ ID NO: 1100783 - RNA, 19 nt, Artificial Sequence
  Description of Artificial Sequence: Synthetic oligonucleotide
  Antisense strand to SEQ ID NO: 1100782
uacaauccaaaugagaggc

SEQ ID NO: 1100784 - RNA, 19 nt, Artificial Sequence
  Description of Artificial Sequence: Synthetic oligonucleotide
  Sense strand starting at position 521 of SEQ ID NO: 915716
aucauacccucagaguaua

SEQ ID NO: 1100785 - RNA, 19 nt, Artificial Sequence
  Description of Artificial Sequence: Synthetic oligonucleotide
  Antisense strand to SEQ ID NO: 1100784
uauacucugaggguaugau

SEQ ID NO: 1100786 - RNA, 19 nt, Artificial Sequence
  Description of Artificial Sequence: Synthetic oligonucleotide
  Sense strand starting at position 933 of SEQ ID NO: 915716
cuuguaucuguugguguau

SEQ ID NO: 1100787 - RNA, 19 nt, Artificial Sequence
  Description of Artificial Sequence: Synthetic oligonucleotide
  Antisense strand to SEQ ID NO: 1100786
auacaccaacagauacaag

SEQ ID NO: 1100788 - RNA, 19 nt, Artificial Sequence
  Description of Artificial Sequence: Synthetic oligonucleotide
  Sense strand starting at position 934 of SEQ ID NO: 915716
uuguaucuguugguguaua

SEQ ID NO: 1100789 - RNA, 19 nt, Artificial Sequence
  Description of Artificial Sequence: Synthetic oligonucleotide
  Antisense strand to SEQ ID NO: 1100788
uauacaccaacagauacaa

SEQ ID NO: 1100790 - RNA, 19 nt, Artificial Sequence
  Description of Artificial Sequence: Synthetic oligonucleotide
  Sense strand starting at position 1113 of SEQ ID NO: 915716
cagaaacauuacgguuuga

SEQ ID NO: 1100791 - RNA, 19 nt, Artificial Sequence
  Description of Artificial Sequence: Synthetic oligonucleotide
  Antisense strand to SEQ ID NO: 1100790
ucaaaccguaauguuucug

SEQ ID NO: 1100792 - RNA, 19 nt, Artificial Sequence
  Description of Artificial Sequence: Synthetic oligonucleotide
  Sense strand starting at position 1117 of SEQ ID NO: 915716
aacauuacgguuugauauc

SEQ ID NO: 1100793 - RNA, 19 nt, Artificial Sequence
  Description of Artificial Sequence: Synthetic oligonucleotide
  Antisense strand to SEQ ID NO: 1100792
gauaucaaaccguaauguu

SEQ ID NO: 1100794 - RNA, 19 nt, Artificial Sequence
  Description of Artificial Sequence: Synthetic oligonucleotide
  Sense strand starting at position 1118 of SEQ ID NO: 915716
acauuacgguuugauauca

SEQ ID NO: 1100795 - RNA, 19 nt, Artificial Sequence
  Description of Artificial Sequence: Synthetic oligonucleotide
  Antisense strand to SEQ ID NO: 1100794
ugauaucaaaccguaaugu

SEQ ID NO: 1100796 - RNA, 19 nt, Artificial Sequence
  Description of Artificial Sequence: Synthetic oligonucleotide
  Sense strand starting at position 1428 of SEQ ID NO: 915716
ucccuucugcuucgucaaa

SEQ ID NO: 1100797 - RNA, 19 nt, Artificial Sequence
  Description of Artificial Sequence: Synthetic oligonucleotide
  Antisense strand to SEQ ID NO: 1100796
uuugacgaagcagaaggga

SEQ ID NO: 1100798 - RNA, 19 nt, Artificial Sequence
  Description of Artificial Sequence: Synthetic oligonucleotide
  Sense strand starting at position 1429 of SEQ ID NO: 915716
cccuucugcuucgucaaau

SEQ ID NO: 1100799 - RNA, 19 nt, Artificial Sequence
  Description of Artificial Sequence: Synthetic oligonucleotide
  Antisense strand to SEQ ID NO: 1100798
auuugacgaagcagaaggg

SEQ ID NO: 1100800 - RNA, 19 nt, Artificial Sequence
  Description of Artificial Sequence: Synthetic oligonucleotide
  Sense strand starting at position 1430 of SEQ ID NO: 915716
ccuucugcuucgucaaauc

SEQ ID NO: 1100801 - RNA, 19 nt, Artificial Sequence
  Description of Artificial Sequence: Synthetic oligonucleotide
  Antisense strand to SEQ ID NO: 1100800
gauuugacgaagcagaagg

SEQ ID NO: 1100802 - RNA, 19 nt, Artificial Sequence
  Description of Artificial Sequence: Synthetic oligonucleotide
  Sense strand starting at position 1439 of SEQ ID NO: 915716
ucgucaaaucucggagguu

SEQ ID NO: 1100803 - RNA, 19 nt, Artificial Sequence
  Description of Artificial Sequence: Synthetic oligonucleotide
  Antisense strand to SEQ ID NO: 1100802
aaccuccgagauuugacga

SEQ ID NO: 1100804 - RNA, 19 nt, Artificial Sequence
  Description of Artificial Sequence: Synthetic oligonucleotide
  Sense strand starting at position 1442 of SEQ ID NO: 915716
ucaaaucucggagguuuga

SEQ ID NO: 1100805 - RNA, 19 nt, Artificial Sequence
  Description of Artificial Sequence: Synthetic oligonucleotide
  Antisense strand to SEQ ID NO: 1100804
ucaaaccuccgagauuuga

SEQ ID NO: 1100806 - RNA, 19 nt, Artificial Sequence
  Description of Artificial Sequence: Synthetic oligonucleotide
  Sense strand starting at position 1510 of SEQ ID NO: 915716
uuacccaaucuccgagaaa

SEQ ID NO: 1100807 - RNA, 19 nt, Artificial Sequence
  Description of Artificial Sequence: Synthetic oligonucleotide
  Antisense strand to SEQ ID NO: 1100806
uuucucggagauuggguaa

SEQ ID NO: 1100808 - RNA, 19 nt, Artificial Sequence
  Description of Artificial Sequence: Synthetic oligonucleotide
  Sense strand starting at position 1546 of SEQ ID NO: 915716
ucauguguccuuuacagaa

SEQ ID NO: 1100809 - RNA, 19 nt, Artificial Sequence
  Description of Artificial Sequence: Synthetic oligonucleotide
  Antisense strand to SEQ ID NO: 1100808
uucuguaaaggacacauga

SEQ ID NO: 1100810 - RNA, 19 nt, Artificial Sequence
  Description of Artificial Sequence: Synthetic oligonucleotide
  Sense strand starting at position 1615 of SEQ ID NO: 915716
gcgggacagugucugugau

SEQ ID NO: 1100811 - RNA, 19 nt, Artificial Sequence
  Description of Artificial Sequence: Synthetic oligonucleotide
  Antisense strand to SEQ ID NO: 1100810
aucacagacacugucccgc

SEQ ID NO: 1100812 - RNA, 19 nt, Artificial Sequence
  Description of Artificial Sequence: Synthetic oligonucleotide
  Sense strand starting at position 1616 of SEQ ID NO: 915716
cgggacagugucugugaua

SEQ ID NO: 1100813 - RNA, 19 nt, Artificial Sequence
  Description of Artificial Sequence: Synthetic oligonucleotide
  Antisense strand to SEQ ID NO: 1100812
uaucacagacacugucccg

SEQ ID NO: 1100814 - RNA, 19 nt, Artificial Sequence
  Description of Artificial Sequence: Synthetic oligonucleotide
  Sense strand starting at position 1617 of SEQ ID NO: 915716
gggacagugucugugauac

SEQ ID NO: 1100815 - RNA, 19 nt, Artificial Sequence
  Description of Artificial Sequence: Synthetic oligonucleotide
  Antisense strand to SEQ ID NO: 1100814
guaucacagacacuguccc

SEQ ID NO: 1100816 - RNA, 19 nt, Artificial Sequence
  Description of Artificial Sequence: Synthetic oligonucleotide
  Sense strand starting at position 1627 of SEQ ID NO: 915716
cugugauaccggugcucca

SEQ ID NO: 1100817 - RNA, 19 nt, Artificial Sequence
  Description of Artificial Sequence: Synthetic oligonucleotide
  Antisense strand to SEQ ID NO: 1100816
uggagcaccgguaucacag

SEQ ID NO: 1100818 - RNA, 19 nt, Artificial Sequence
  Description of Artificial Sequence: Synthetic oligonucleotide
  Sense strand starting at position 1808 of SEQ ID NO: 915716
ugagguuucucugcugugu

SEQ ID NO: 1100819 - RNA, 19 nt, Artificial Sequence
  Description of Artificial Sequence: Synthetic oligonucleotide
  Antisense strand to SEQ ID NO: 1100818
acacagcagagaaaccuca

SEQ ID NO: 1100820 - RNA, 19 nt, Artificial Sequence
  Description of Artificial Sequence: Synthetic oligonucleotide
  Sense strand starting at position 1821 of SEQ ID NO: 915716
cuguguugucuuuaggcau

SEQ ID NO: 1100821 - RNA, 19 nt, Artificial Sequence
  Description of Artificial Sequence: Synthetic oligonucleotide
  Antisense strand to SEQ ID NO: 1100820
augccuaaagacaacacag

SEQ ID NO: 1100822 - RNA, 19 nt, Artificial Sequence
  Description of Artificial Sequence: Synthetic oligonucleotide
  Sense strand starting at position 1971 of SEQ ID NO: 915716
cuggaagacuugcgagauu

SEQ ID NO: 1100823 - RNA, 19 nt, Artificial Sequence
  Description of Artificial Sequence: Synthetic oligonucleotide
  Antisense strand to SEQ ID NO: 1100822
aaucucgcaagucuuccag

SEQ ID NO: 1100824 - RNA, 19 nt, Artificial Sequence
  Description of Artificial Sequence: Synthetic oligonucleotide
  Sense strand starting at position 1974 of SEQ ID NO: 915716
gaagacuugcgagauucca

SEQ ID NO: 1100825 - RNA, 19 nt, Artificial Sequence
  Description of Artificial Sequence: Synthetic oligonucleotide
  Antisense strand to SEQ ID NO: 1100824
uggaaucucgcaagucuuc

SEQ ID NO: 1100826 - RNA, 19 nt, Artificial Sequence
  Description of Artificial Sequence: Synthetic oligonucleotide
  Sense strand starting at position 2068 of SEQ ID NO: 915716
ggagauaagugauagcuau

SEQ ID NO: 1100827 - RNA, 19 nt, Artificial Sequence
  Description of Artificial Sequence: Synthetic oligonucleotide
  Antisense strand to SEQ ID NO: 1100826
auagcuaucacuuaucucc

SEQ ID NO: 1100828 - RNA, 19 nt, Artificial Sequence
  Description of Artificial Sequence: Synthetic oligonucleotide
  Sense strand starting at position 2074 of SEQ ID NO: 915716
aagugauagcuauaguuuc

SEQ ID NO: 1100829 - RNA, 19 nt, Artificial Sequence
  Description of Artificial Sequence: Synthetic oligonucleotide
  Antisense strand to SEQ ID NO: 1100828
gaaacuauagcuaucacuu

SEQ ID NO: 1100830 - RNA, 19 nt, Artificial Sequence
  Description of Artificial Sequence: Synthetic oligonucleotide
  Sense strand starting at position 2085 of SEQ ID NO: 915716
auaguuucuucucuugaca

SEQ ID NO: 1100831 - RNA, 19 nt, Artificial Sequence
  Description of Artificial Sequence: Synthetic oligonucleotide
  Antisense strand to SEQ ID NO: 1100830
ugucaagagaagaaacuau

SEQ ID NO: 1100832 - RNA, 19 nt, Artificial Sequence
  Description of Artificial Sequence: Synthetic oligonucleotide
  Sense strand starting at position 2173 of SEQ ID NO: 915716
ggcuuuauaguagauauua

SEQ ID NO: 1100833 - RNA, 19 nt, Artificial Sequence
  Description of Artificial Sequence: Synthetic oligonucleotide
  Antisense strand to SEQ ID NO: 1100832
uaauaucuacuauaaagcc

SEQ ID NO: 1100834 - RNA, 19 nt, Artificial Sequence
  Description of Artificial Sequence: Synthetic oligonucleotide
  Sense strand starting at position 2274 of SEQ ID NO: 915716
gaauguggaucuggaaauu

SEQ ID NO: 1100835 - RNA, 19 nt, Artificial Sequence
  Description of Artificial Sequence: Synthetic oligonucleotide
  Antisense strand to SEQ ID NO: 1100834
aauuuccagauccacauuc

SEQ ID NO: 1100836 - RNA, 19 nt, Artificial Sequence
  Description of Artificial Sequence: Synthetic oligonucleotide
  Sense strand starting at position 2349 of SEQ ID NO: 915716
guaacugccgaaugaguau

SEQ ID NO: 1100837 - RNA, 19 nt, Artificial Sequence
  Description of Artificial Sequence: Synthetic oligonucleotide
  Antisense strand to SEQ ID NO: 1100836
auacucauucggcaguuac

SEQ ID NO: 1100838 - RNA, 19 nt, Artificial Sequence
  Description of Artificial Sequence: Synthetic oligonucleotide
  Sense strand starting at position 2414 of SEQ ID NO: 915716
gcuagaggguccuaugaua

SEQ ID NO: 1100839 - RNA, 19 nt, Artificial Sequence
  Description of Artificial Sequence: Synthetic oligonucleotide
  Antisense strand to SEQ ID NO: 1100838
uaucauaggacccucuagc

SEQ ID NO: 1100840 - RNA, 19 nt, Artificial Sequence
  Description of Artificial Sequence: Synthetic oligonucleotide
  Sense strand starting at position 2419 of SEQ ID NO: 915716
aggguccuaugauauauuu

SEQ ID NO: 1100841 - RNA, 19 nt, Artificial Sequence
  Description of Artificial Sequence: Synthetic oligonucleotide
  Antisense strand to SEQ ID NO: 1100840
aaauauaucauaggacccu

SEQ ID NO: 1100842 - RNA, 19 nt, Artificial Sequence
  Description of Artificial Sequence: Synthetic oligonucleotide
  Sense strand starting at position 2500 of SEQ ID NO: 915716
gcacguccugcacauuuau

SEQ ID NO: 1100843 - RNA, 19 nt, Artificial Sequence
  Description of Artificial Sequence: Synthetic oligonucleotide
  Antisense strand to SEQ ID NO: 1100842
auaaaugugcaggacgugc

SEQ ID NO: 1100844 - RNA, 19 nt, Artificial Sequence
  Description of Artificial Sequence: Synthetic oligonucleotide
  Sense strand starting at position 2509 of SEQ ID NO: 915716
gcacauuuaucucaggacu

SEQ ID NO: 1100845 - RNA, 19 nt, Artificial Sequence
  Description of Artificial Sequence: Synthetic oligonucleotide
  Antisense strand to SEQ ID NO: 1100844
aguccugagauaaaugugc

SEQ ID NO: 1100846 - RNA, 19 nt, Artificial Sequence
  Description of Artificial Sequence: Synthetic oligonucleotide
  Sense strand starting at position 2684 of SEQ ID NO: 915716
uuucucguggguuaaauua

SEQ ID NO: 1100847 - RNA, 19 nt, Artificial Sequence
  Description of Artificial Sequence: Synthetic oligonucleotide
  Antisense strand to SEQ ID NO: 1100846
uaauuuaacccacgagaaa

SEQ ID NO: 1100848 - RNA, 19 nt, Artificial Sequence
  Description of Artificial Sequence: Synthetic oligonucleotide
  Sense strand starting at position 3151 of SEQ ID NO: 915716
uucccucucguguagaauc

SEQ ID NO: 1100849 - RNA, 19 nt, Artificial Sequence
  Description of Artificial Sequence: Synthetic oligonucleotide
  Antisense strand to SEQ ID NO: 1100848
gauucuacacgagagggaa

SEQ ID NO: 1100850 - RNA, 19 nt, Artificial Sequence
  Description of Artificial Sequence: Synthetic oligonucleotide
  Sense strand starting at position 3153 of SEQ ID NO: 915716
cccucucguguagaaucau

SEQ ID NO: 1100851 - RNA, 19 nt, Artificial Sequence
  Description of Artificial Sequence: Synthetic oligonucleotide
  Antisense strand to SEQ ID NO: 1100850
augauucuacacgagaggg

SEQ ID NO: 1100852 - RNA, 19 nt, Artificial Sequence
  Description of Artificial Sequence: Synthetic oligonucleotide
  Sense strand starting at position 3657 of SEQ ID NO: 915716
cuguauacucuaggcaauu

SEQ ID NO: 1100853 - RNA, 19 nt, Artificial Sequence
  Description of Artificial Sequence: Synthetic oligonucleotide
  Antisense strand to SEQ ID NO: 1100852
aauugccuagaguauacag

SEQ ID NO: 1100854 - RNA, 19 nt, Artificial Sequence
  Description of Artificial Sequence: Synthetic oligonucleotide
  Sense strand starting at position 3766 of SEQ ID NO: 915716
ccaugugugguuuaugguu

SEQ ID NO: 1100855 - RNA, 19 nt, Artificial Sequence
  Description of Artificial Sequence: Synthetic oligonucleotide
  Antisense strand to SEQ ID NO: 1100854
aaccauaaaccacacaugg

SEQ ID NO: 1100856 - RNA, 19 nt, Artificial Sequence
  Description of Artificial Sequence: Synthetic oligonucleotide
  Sense strand starting at position 3772 of SEQ ID NO: 915716
gugguuuaugguugacuga

SEQ ID NO: 1100857 - RNA, 19 nt, Artificial Sequence
  Description of Artificial Sequence: Synthetic oligonucleotide
  Antisense strand to SEQ ID NO: 1100856
ucagucaaccauaaaccac

SEQ ID NO: 1100858 - RNA, 19 nt, Artificial Sequence
  Description of Artificial Sequence: Synthetic oligonucleotide
  Sense strand starting at position 3773 of SEQ ID NO: 915716
ugguuuaugguugacugaa

SEQ ID NO: 1100859 - RNA, 19 nt, Artificial Sequence
  Description of Artificial Sequence: Synthetic oligonucleotide
  Antisense strand to SEQ ID NO: 1100858
uucagucaaccauaaacca

SEQ ID NO: 1100860 - RNA, 19 nt, Artificial Sequence
  Description of Artificial Sequence: Synthetic oligonucleotide
  Sense strand starting at position 3775 of SEQ ID NO: 915716
guuuaugguugacugaauu

SEQ ID NO: 1100861 - RNA, 19 nt, Artificial Sequence
  Description of Artificial Sequence: Synthetic oligonucleotide
  Antisense strand to SEQ ID NO: 1100860
aauucagucaaccauaaac

SEQ ID NO: 1100862 - RNA, 19 nt, Artificial Sequence
  Description of Artificial Sequence: Synthetic oligonucleotide
  Sense strand starting at position 390 of SEQ ID NO: 915717
gccucucauuuggauugua

SEQ ID NO: 1100863 - RNA, 19 nt, Artificial Sequence
  Description of Artificial Sequence: Synthetic oligonucleotide
  Antisense strand to SEQ ID NO: 1100862
uacaauccaaaugagaggc

SEQ ID NO: 1100864 - RNA, 19 nt, Artificial Sequence
  Description of Artificial Sequence: Synthetic oligonucleotide
  Sense strand starting at position 614 of SEQ ID NO: 915717
ucccauauuucgggcaugu

SEQ ID NO: 1100865 - RNA, 19 nt, Artificial Sequence
  Description of Artificial Sequence: Synthetic oligonucleotide
  Antisense strand to SEQ ID NO: 1100864
acaugcccgaaauauggga

SEQ ID NO: 1100866 - RNA, 19 nt, Artificial Sequence
  Description of Artificial Sequence: Synthetic oligonucleotide
  Sense strand starting at position 926 of SEQ ID NO: 915717
cccaguaucuuguaucugu

SEQ ID NO: 1100867 - RNA, 19 nt, Artificial Sequence
  Description of Artificial Sequence: Synthetic oligonucleotide
  Antisense strand to SEQ ID NO: 1100866
acagauacaagauacuggg

SEQ ID NO: 1100868 - RNA, 19 nt, Artificial Sequence
  Description of Artificial Sequence: Synthetic oligonucleotide
  Sense strand starting at position 977 of SEQ ID NO: 915717
accagcaugcuuuggguaa

SEQ ID NO: 1100869 - RNA, 19 nt, Artificial Sequence
  Description of Artificial Sequence: Synthetic oligonucleotide
  Antisense strand to SEQ ID NO: 1100868
uuacccaaagcaugcuggu

SEQ ID NO: 1100870 - RNA, 19 nt, Artificial Sequence
  Description of Artificial Sequence: Synthetic oligonucleotide
  Sense strand starting at position 1429 of SEQ ID NO: 915717
ucccuucugcuucgucaaa

SEQ ID NO: 1100871 - RNA, 19 nt, Artificial Sequence
  Description of Artificial Sequence: Synthetic oligonucleotide
  Antisense strand to SEQ ID NO: 1100870
uuugacgaagcagaaggga

SEQ ID NO: 1100872 - RNA, 19 nt, Artificial Sequence
  Description of Artificial Sequence: Synthetic oligonucleotide
  Sense strand starting at position 1430 of SEQ ID NO: 915717
cccuucugcuucgucaaau

SEQ ID NO: 1100873 - RNA, 19 nt, Artificial Sequence
  Description of Artificial Sequence: Synthetic oligonucleotide
  Antisense strand to SEQ ID NO: 1100872
auuugacgaagcagaaggg

SEQ ID NO: 1100874 - RNA, 19 nt, Artificial Sequence
  Description of Artificial Sequence: Synthetic oligonucleotide
  Sense strand starting at position 1431 of SEQ ID NO: 915717
ccuucugcuucgucaaauc

SEQ ID NO: 1100875 - RNA, 19 nt, Artificial Sequence
  Description of Artificial Sequence: Synthetic oligonucleotide
  Antisense strand to SEQ ID NO: 1100874
gauuugacgaagcagaagg

SEQ ID NO: 1100876 - RNA, 19 nt, Artificial Sequence
  Description of Artificial Sequence: Synthetic oligonucleotide
  Sense strand starting at position 1440 of SEQ ID NO: 915717
ucgucaaaucucggagguu

SEQ ID NO: 1100877 - RNA, 19 nt, Artificial Sequence
  Description of Artificial Sequence: Synthetic oligonucleotide
  Antisense strand to SEQ ID NO: 1100876
aaccuccgagauuugacga

SEQ ID NO: 1100878 - RNA, 19 nt, Artificial Sequence
  Description of Artificial Sequence: Synthetic oligonucleotide
  Sense strand starting at position 1441 of SEQ ID NO: 915717
cgucaaaucucggagguuu

SEQ ID NO: 1100879 - RNA, 19 nt, Artificial Sequence
  Description of Artificial Sequence: Synthetic oligonucleotide
  Antisense strand to SEQ ID NO: 1100878
aaaccuccgagauuugacg

SEQ ID NO: 1100880 - RNA, 19 nt, Artificial Sequence
  Description of Artificial Sequence: Synthetic oligonucleotide
  Sense strand starting at position 1443 of SEQ ID NO: 915717
ucaaaucucggagguuuga

SEQ ID NO: 1100881 - RNA, 19 nt, Artificial Sequence
  Description of Artificial Sequence: Synthetic oligonucleotide
  Antisense strand to SEQ ID NO: 1100880
ucaaaccuccgagauuuga

SEQ ID NO: 1100882 - RNA, 19 nt, Artificial Sequence
  Description of Artificial Sequence: Synthetic oligonucleotide
  Sense strand starting at position 1511 of SEQ ID NO: 915717
uuacccaaucuccgagaaa

SEQ ID NO: 1100883 - RNA, 19 nt, Artificial Sequence
  Description of Artificial Sequence: Synthetic oligonucleotide
  Antisense strand to SEQ ID NO: 1100882
uuucucggagauuggguaa

SEQ ID NO: 1100884 - RNA, 19 nt, Artificial Sequence
  Description of Artificial Sequence: Synthetic oligonucleotide
  Sense strand starting at position 1547 of SEQ ID NO: 915717
ucauguguccuuuacagaa

SEQ ID NO: 1100885 - RNA, 19 nt, Artificial Sequence
  Description of Artificial Sequence: Synthetic oligonucleotide
  Antisense strand to SEQ ID NO: 1100884
uucuguaaaggacacauga

SEQ ID NO: 1100886 - RNA, 19 nt, Artificial Sequence
  Description of Artificial Sequence: Synthetic oligonucleotide
  Sense strand starting at position 1549 of SEQ ID NO: 915717
auguguccuuuacagaaau

SEQ ID NO: 1100887 - RNA, 19 nt, Artificial Sequence
  Description of Artificial Sequence: Synthetic oligonucleotide
  Antisense strand to SEQ ID NO: 1100886
auuucuguaaaggacacau

SEQ ID NO: 1100888 - RNA, 19 nt, Artificial Sequence
  Description of Artificial Sequence: Synthetic oligonucleotide
  Sense strand starting at position 2172 of SEQ ID NO: 915717
ccggcuuuauaguagauau

SEQ ID NO: 1100889 - RNA, 19 nt, Artificial Sequence
  Description of Artificial Sequence: Synthetic oligonucleotide
  Antisense strand to SEQ ID NO: 1100888
auaucuacuauaaagccgg

SEQ ID NO: 1100890 - RNA, 19 nt, Artificial Sequence
  Description of Artificial Sequence: Synthetic oligonucleotide
  Sense strand starting at position 2174 of SEQ ID NO: 915717
ggcuuuauaguagauauua

SEQ ID NO: 1100891 - RNA, 19 nt, Artificial Sequence
  Description of Artificial Sequence: Synthetic oligonucleotide
  Antisense strand to SEQ ID NO: 1100890
uaauaucuacuauaaagcc

SEQ ID NO: 1100892 - RNA, 19 nt, Artificial Sequence
  Description of Artificial Sequence: Synthetic oligonucleotide
  Sense strand starting at position 2229 of SEQ ID NO: 915717
gccugucuguaacacaaua

SEQ ID NO: 1100893 - RNA, 19 nt, Artificial Sequence
  Description of Artificial Sequence: Synthetic oligonucleotide
  Antisense strand to SEQ ID NO: 1100892
uauuguguuacagacaggc

SEQ ID NO: 1100894 - RNA, 19 nt, Artificial Sequence
  Description of Artificial Sequence: Synthetic oligonucleotide
  Sense strand starting at position 2346 of SEQ ID NO: 915717
ucauguaacugccgaauga

SEQ ID NO: 1100895 - RNA, 19 nt, Artificial Sequence
  Description of Artificial Sequence: Synthetic oligonucleotide
  Antisense strand to SEQ ID NO: 1100894
ucauucggcaguuacauga

SEQ ID NO: 1100896 - RNA, 19 nt, Artificial Sequence
  Description of Artificial Sequence: Synthetic oligonucleotide
  Sense strand starting at position 2350 of SEQ ID NO: 915717
guaacugccgaaugaguau

SEQ ID NO: 1100897 - RNA, 19 nt, Artificial Sequence
  Description of Artificial Sequence: Synthetic oligonucleotide
  Antisense strand to SEQ ID NO: 1100896
auacucauucggcaguuac

SEQ ID NO: 1100898 - RNA, 19 nt, Artificial Sequence
  Description of Artificial Sequence: Synthetic oligonucleotide
  Sense strand starting at position 2501 of SEQ ID NO: 915717
gcacguccugcacauuuau

SEQ ID NO: 1100899 - RNA, 19 nt, Artificial Sequence
  Description of Artificial Sequence: Synthetic oligonucleotide
  Antisense strand to SEQ ID NO: 1100898
auaaaugugcaggacgugc

SEQ ID NO: 1100900 - RNA, 19 nt, Artificial Sequence
  Description of Artificial Sequence: Synthetic oligonucleotide
  Sense strand starting at position 2510 of SEQ ID NO: 915717
gcacauuuaucucaggacu

SEQ ID NO: 1100901 - RNA, 19 nt, Artificial Sequence
  Description of Artificial Sequence: Synthetic oligonucleotide
  Antisense strand to SEQ ID NO: 1100900
aguccugagauaaaugugc

SEQ ID NO: 1100902 - RNA, 19 nt, Artificial Sequence
  Description of Artificial Sequence: Synthetic oligonucleotide
  Sense strand starting at position 2685 of SEQ ID NO: 915717
uuucucguggguuaaauua

SEQ ID NO: 1100903 - RNA, 19 nt, Artificial Sequence
  Description of Artificial Sequence: Synthetic oligonucleotide
  Antisense strand to SEQ ID NO: 1100902
uaauuuaacccacgagaaa

SEQ ID NO: 1100904 - RNA, 19 nt, Artificial Sequence
  Description of Artificial Sequence: Synthetic oligonucleotide
  Sense strand starting at position 2775 of SEQ ID NO: 915717
uuauauuucuaugguguga

SEQ ID NO: 1100905 - RNA, 19 nt, Artificial Sequence
  Description of Artificial Sequence: Synthetic oligonucleotide
  Antisense strand to SEQ ID NO: 1100904
ucacaccauagaaauauaa

SEQ ID NO: 1100906 - RNA, 19 nt, Artificial Sequence
  Description of Artificial Sequence: Synthetic oligonucleotide
  Sense strand starting at position 2777 of SEQ ID NO: 915717
auauuucuauggugugaug

SEQ ID NO: 1100907 - RNA, 19 nt, Artificial Sequence
  Description of Artificial Sequence: Synthetic oligonucleotide
  Antisense strand to SEQ ID NO: 1100906
caucacaccauagaaauau

SEQ ID NO: 1100908 - RNA, 19 nt, Artificial Sequence
  Description of Artificial Sequence: Synthetic oligonucleotide
  Sense strand starting at position 2779 of SEQ ID NO: 915717
auuucuauggugugauggu

SEQ ID NO: 1100909 - RNA, 19 nt, Artificial Sequence
  Description of Artificial Sequence: Synthetic oligonucleotide
  Antisense strand to SEQ ID NO: 1100908
accaucacaccauagaaau

SEQ ID NO: 1100910 - RNA, 19 nt, Artificial Sequence
  Description of Artificial Sequence: Synthetic oligonucleotide
  Sense strand starting at position 3022 of SEQ ID NO: 915717
gaagcuaguucugaggcuu

SEQ ID NO: 1100911 - RNA, 19 nt, Artificial Sequence
  Description of Artificial Sequence: Synthetic oligonucleotide
  Antisense strand to SEQ ID NO: 1100910
aagccucagaacuagcuuc

SEQ ID NO: 1100912 - RNA, 19 nt, Artificial Sequence
  Description of Artificial Sequence: Synthetic oligonucleotide
  Sense strand starting at position 3150 of SEQ ID NO: 915717
aauucccucucguguagaa

SEQ ID NO: 1100913 - RNA, 19 nt, Artificial Sequence
  Description of Artificial Sequence: Synthetic oligonucleotide
  Antisense strand to SEQ ID NO: 1100912
uucuacacgagagggaauu

SEQ ID NO: 1100914 - RNA, 19 nt, Artificial Sequence
  Description of Artificial Sequence: Synthetic oligonucleotide
  Sense strand starting at position 3152 of SEQ ID NO: 915717
uucccucucguguagaauc

SEQ ID NO: 1100915 - RNA, 19 nt, Artificial Sequence
  Description of Artificial Sequence: Synthetic oligonucleotide
  Antisense strand to SEQ ID NO: 1100914
gauucuacacgagagggaa

SEQ ID NO: 1100916 - RNA, 19 nt, Artificial Sequence
  Description of Artificial Sequence: Synthetic oligonucleotide
  Sense strand starting at position 3154 of SEQ ID NO: 915717
cccucucguguagaaucau

SEQ ID NO: 1100917 - RNA, 19 nt, Artificial Sequence
  Description of Artificial Sequence: Synthetic oligonucleotide
  Antisense strand to SEQ ID NO: 1100916
augauucuacacgagaggg

SEQ ID NO: 1100918 - RNA, 19 nt, Artificial Sequence
  Description of Artificial Sequence: Synthetic oligonucleotide
  Sense strand starting at position 3644 of SEQ ID NO: 915717
cagcauguucuguacugua

SEQ ID NO: 1100919 - RNA, 19 nt, Artificial Sequence
  Description of Artificial Sequence: Synthetic oligonucleotide
  Antisense strand to SEQ ID NO: 1100918
uacaguacagaacaugcug

SEQ ID NO: 1100920 - RNA, 19 nt, Artificial Sequence
  Description of Artificial Sequence: Synthetic oligonucleotide
  Sense strand starting at position 453 of SEQ ID NO: 915718
uucccucucguguagaauc

SEQ ID NO: 1100921 - RNA, 19 nt, Artificial Sequence
  Description of Artificial Sequence: Synthetic oligonucleotide
  Antisense strand to SEQ ID NO: 1100920
gauucuacacgagagggaa

SEQ ID NO: 1100922 - RNA, 19 nt, Artificial Sequence
  Description of Artificial Sequence: Synthetic oligonucleotide
  Sense strand starting at position 455 of SEQ ID NO: 915718
cccucucguguagaaucau

SEQ ID NO: 1100923 - RNA, 19 nt, Artificial Sequence
  Description of Artificial Sequence: Synthetic oligonucleotide
  Antisense strand to SEQ ID NO: 1100922
augauucuacacgagaggg

SEQ ID NO: 1100924 - RNA, 19 nt, Artificial Sequence
  Description of Artificial Sequence: Synthetic oligonucleotide
  Sense strand starting at position 959 of SEQ ID NO: 915718
cuguauacucuaggcaauu

SEQ ID NO: 1100925 - RNA, 19 nt, Artificial Sequence
  Description of Artificial Sequence: Synthetic oligonucleotide
  Antisense strand to SEQ ID NO: 1100924
aauugccuagaguauacag

SEQ ID NO: 1100926 - RNA, 19 nt, Artificial Sequence
  Description of Artificial Sequence: Synthetic oligonucleotide
  Sense strand starting at position 1068 of SEQ ID NO: 915718
ccaugugugguuuaugguu

SEQ ID NO: 1100927 - RNA, 19 nt, Artificial Sequence
  Description of Artificial Sequence: Synthetic oligonucleotide
  Antisense strand to SEQ ID NO: 1100926
aaccauaaaccacacaugg

SEQ ID NO: 1100928 - RNA, 19 nt, Artificial Sequence
  Description of Artificial Sequence: Synthetic oligonucleotide
  Sense strand starting at position 1074 of SEQ ID NO: 915718
gugguuuaugguugacuga

SEQ ID NO: 1100929 - RNA, 19 nt, Artificial Sequence
  Description of Artificial Sequence: Synthetic oligonucleotide
  Antisense strand to SEQ ID NO: 1100928
ucagucaaccauaaaccac

SEQ ID NO: 1100930 - RNA, 19 nt, Artificial Sequence
  Description of Artificial Sequence: Synthetic oligonucleotide
  Sense strand starting at position 1075 of SEQ ID NO: 915718
ugguuuaugguugacugaa

SEQ ID NO: 1100931 - RNA, 19 nt, Artificial Sequence
  Description of Artificial Sequence: Synthetic oligonucleotide
  Antisense strand to SEQ ID NO: 1100930
uucagucaaccauaaacca

SEQ ID NO: 1100932 - RNA, 19 nt, Artificial Sequence
  Description of Artificial Sequence: Synthetic oligonucleotide
  Sense strand starting at position 1077 of SEQ ID NO: 915718
guuuaugguugacugaauu

SEQ ID NO: 1100933 - RNA, 19 nt, Artificial Sequence
  Description of Artificial Sequence: Synthetic oligonucleotide
  Antisense strand to SEQ ID NO: 1100932
aauucagucaaccauaaac

SEQ ID NO: 1100934 - RNA, 19 nt, Artificial Sequence
  Description of Artificial Sequence: Synthetic oligonucleotide
  Sense strand starting at position 1505 of SEQ ID NO: 915718
uguguaaaugccgaaugaa

SEQ ID NO: 1100935 - RNA, 19 nt, Artificial Sequence
  Description of Artificial Sequence: Synthetic oligonucleotide
  Antisense strand to SEQ ID NO: 1100934
uucauucggcauuuacaca

SEQ ID NO: 1100936 - RNA, 19 nt, Artificial Sequence
  Description of Artificial Sequence: Synthetic oligonucleotide
  Sense strand starting at position 1513 of SEQ ID NO: 915718
ugccgaaugaauggauuaa

SEQ ID NO: 1100937 - RNA, 19 nt, Artificial Sequence
  Description of Artificial Sequence: Synthetic oligonucleotide
  Antisense strand to SEQ ID NO: 1100936
uuaauccauucauucggca

SEQ ID NO: 1100938 - RNA, 19 nt, Artificial Sequence
  Description of Artificial Sequence: Synthetic oligonucleotide
  Sense strand starting at position 1901 of SEQ ID NO: 915718
uuugaaggguucccacaau

SEQ ID NO: 1100939 - RNA, 19 nt, Artificial Sequence
  Description of Artificial Sequence: Synthetic oligonucleotide
  Antisense strand to SEQ ID NO: 1100938
auugugggaacccuucaaa

SEQ ID NO: 1100940 - RNA, 19 nt, Artificial Sequence
  Description of Artificial Sequence: Synthetic oligonucleotide
  Sense strand starting at position 2122 of SEQ ID NO: 915718
gagaaagguugagaauaag

SEQ ID NO: 1100941 - RNA, 19 nt, Artificial Sequence
  Description of Artificial Sequence: Synthetic oligonucleotide
  Antisense strand to SEQ ID NO: 1100940
cuuauucucaaccuuucuc

SEQ ID NO: 1100942 - RNA, 19 nt, Artificial Sequence
  Description of Artificial Sequence: Synthetic oligonucleotide
  Sense strand starting at position 2354 of SEQ ID NO: 915718
agagaaacugucugcuugu

SEQ ID NO: 1100943 - RNA, 19 nt, Artificial Sequence
  Description of Artificial Sequence: Synthetic oligonucleotide
  Antisense strand to SEQ ID NO: 1100942
acaagcagacaguuucucu

SEQ ID NO: 1100944 - RNA, 19 nt, Artificial Sequence
  Description of Artificial Sequence: Synthetic oligonucleotide
  Sense strand starting at position 2355 of SEQ ID NO: 915718
gagaaacugucugcuugug

SEQ ID NO: 1100945 - RNA, 19 nt, Artificial Sequence
  Description of Artificial Sequence: Synthetic oligonucleotide
  Antisense strand to SEQ ID NO: 1100944
cacaagcagacaguuucuc

SEQ ID NO: 1100946 - RNA, 19 nt, Artificial Sequence
  Description of Artificial Sequence: Synthetic oligonucleotide
  Sense strand starting at position 2357 of SEQ ID NO: 915718
gaaacugucugcuugugga

SEQ ID NO: 1100947 - RNA, 19 nt, Artificial Sequence
  Description of Artificial Sequence: Synthetic oligonucleotide
  Antisense strand to SEQ ID NO: 1100946
uccacaagcagacaguuuc

SEQ ID NO: 1100948 - RNA, 19 nt, Artificial Sequence
  Description of Artificial Sequence: Synthetic oligonucleotide
  Sense strand starting at position 2566 of SEQ ID NO: 915718
guaauccucuggucuugga

SEQ ID NO: 1100949 - RNA, 19 nt, Artificial Sequence
  Description of Artificial Sequence: Synthetic oligonucleotide
  Antisense strand to SEQ ID NO: 1100948
uccaagaccagaggauuac

SEQ ID NO: 1100950 - RNA, 19 nt, Artificial Sequence
  Description of Artificial Sequence: Synthetic oligonucleotide
  Sense strand starting at position 2651 of SEQ ID NO: 915718
uuuauaggauauucgaaga

SEQ ID NO: 1100951 - RNA, 19 nt, Artificial Sequence
  Description of Artificial Sequence: Synthetic oligonucleotide
  Antisense strand to SEQ ID NO: 1100950
ucuucgaauauccuauaaa

SEQ ID NO: 1100952 - RNA, 19 nt, Artificial Sequence
  Description of Artificial Sequence: Synthetic oligonucleotide
  Sense strand starting at position 2753 of SEQ ID NO: 915718
ugaggucucuuacugaauu

SEQ ID NO: 1100953 - RNA, 19 nt, Artificial Sequence
  Description of Artificial Sequence: Synthetic oligonucleotide
  Antisense strand to SEQ ID NO: 1100952
aauucaguaagagaccuca

SEQ ID NO: 1100954 - RNA, 19 nt, Artificial Sequence
  Description of Artificial Sequence: Synthetic oligonucleotide
  Sense strand starting at position 2784 of SEQ ID NO: 915718
ccaaucucgugggugaaau

SEQ ID NO: 1100955 - RNA, 19 nt, Artificial Sequence
  Description of Artificial Sequence: Synthetic oligonucleotide
  Antisense strand to SEQ ID NO: 1100954
auuucacccacgagauugg

SEQ ID NO: 1100956 - RNA, 19 nt, Artificial Sequence
  Description of Artificial Sequence: Synthetic oligonucleotide
  Sense strand starting at position 2785 of SEQ ID NO: 915718
caaucucgugggugaaaua

SEQ ID NO: 1100957 - RNA, 19 nt, Artificial Sequence
  Description of Artificial Sequence: Synthetic oligonucleotide
  Antisense strand to SEQ ID NO: 1100956
uauuucacccacgagauug

SEQ ID NO: 1100958 - RNA, 19 nt, Artificial Sequence
  Description of Artificial Sequence: Synthetic oligonucleotide
  Sense strand starting at position 2792 of SEQ ID NO: 915718
gugggugaaauacgaguua

SEQ ID NO: 1100959 - RNA, 19 nt, Artificial Sequence
  Description of Artificial Sequence: Synthetic oligonucleotide
  Antisense strand to SEQ ID NO: 1100958
uaacucguauuucacccac

SEQ ID NO: 1100960 - RNA, 19 nt, Artificial Sequence
  Description of Artificial Sequence: Synthetic oligonucleotide
  Sense strand starting at position 2842 of SEQ ID NO: 915718
gauguucugccaugacuag

SEQ ID NO: 1100961 - RNA, 19 nt, Artificial Sequence
  Description of Artificial Sequence: Synthetic oligonucleotide
  Antisense strand to SEQ ID NO: 1100960
cuagucauggcagaacauc

SEQ ID NO: 1100962 - RNA, 19 nt, Artificial Sequence
  Description of Artificial Sequence: Synthetic oligonucleotide
  Sense strand starting at position 2843 of SEQ ID NO: 915718
auguucugccaugacuaga

SEQ ID NO: 1100963 - RNA, 19 nt, Artificial Sequence
  Description of Artificial Sequence: Synthetic oligonucleotide
  Antisense strand to SEQ ID NO: 1100962
ucuagucauggcagaacau

SEQ ID NO: 1100964 - RNA, 19 nt, Artificial Sequence
  Description of Artificial Sequence: Synthetic oligonucleotide
  Sense strand starting at position 2846 of SEQ ID NO: 915718
uucugccaugacuagaaau

SEQ ID NO: 1100965 - RNA, 19 nt, Artificial Sequence
  Description of Artificial Sequence: Synthetic oligonucleotide
  Antisense strand to SEQ ID NO: 1100964
auuucuagucauggcagaa

SEQ ID NO: 1100966 - RNA, 19 nt, Artificial Sequence
  Description of Artificial Sequence: Synthetic oligonucleotide
  Sense strand starting at position 3020 of SEQ ID NO: 915718
agaagcggcuacucaaaua

SEQ ID NO: 1100967 - RNA, 19 nt, Artificial Sequence
  Description of Artificial Sequence: Synthetic oligonucleotide
  Antisense strand to SEQ ID NO: 1100966
uauuugaguagccgcuucu

SEQ ID NO: 1100968 - RNA, 19 nt, Artificial Sequence
  Description of Artificial Sequence: Synthetic oligonucleotide
  Sense strand starting at position 3247 of SEQ ID NO: 915718
guaugagaucccuguuaaa

SEQ ID NO: 1100969 - RNA, 19 nt, Artificial Sequence
  Description of Artificial Sequence: Synthetic oligonucleotide
  Antisense strand to SEQ ID NO: 1100968
uuuaacagggaucucauac

SEQ ID NO: 1100970 - RNA, 19 nt, Artificial Sequence
  Description of Artificial Sequence: Synthetic oligonucleotide
  Sense strand starting at position 3258 of SEQ ID NO: 915718
cuguuaaagucaguuagga

SEQ ID NO: 1100971 - RNA, 19 nt, Artificial Sequence
  Description of Artificial Sequence: Synthetic oligonucleotide
  Antisense strand to SEQ ID NO: 1100970
uccuaacugacuuuaacag

SEQ ID NO: 1100972 - RNA, 19 nt, Artificial Sequence
  Description of Artificial Sequence: Synthetic oligonucleotide
  Sense strand starting at position 3260 of SEQ ID NO: 915718
guuaaagucaguuaggaag

SEQ ID NO: 1100973 - RNA, 19 nt, Artificial Sequence
  Description of Artificial Sequence: Synthetic oligonucleotide
  Antisense strand to SEQ ID NO: 1100972
cuuccuaacugacuuuaac

SEQ ID NO: 1100974 - RNA, 19 nt, Artificial Sequence
  Description of Artificial Sequence: Synthetic oligonucleotide
  Sense strand starting at position 3263 of SEQ ID NO: 915718
aaagucaguuaggaagaaa

SEQ ID NO: 1100975 - RNA, 19 nt, Artificial Sequence
  Description of Artificial Sequence: Synthetic oligonucleotide
  Antisense strand to SEQ ID NO: 1100974
uuucuuccuaacugacuuu

SEQ ID NO: 1100976 - RNA, 19 nt, Artificial Sequence
  Description of Artificial Sequence: Synthetic oligonucleotide
  Sense strand starting at position 3390 of SEQ ID NO: 915718
aaggaaugccuaugucuuu

SEQ ID NO: 1100977 - RNA, 19 nt, Artificial Sequence
  Description of Artificial Sequence: Synthetic oligonucleotide
  Antisense strand to SEQ ID NO: 1100976
aaagacauaggcauuccuu

SEQ ID NO: 1100978 - RNA, 19 nt, Artificial Sequence
  Description of Artificial Sequence: Synthetic oligonucleotide
  Sense strand starting at position 3400 of SEQ ID NO: 915718
uaugucuuucuuuaaggga

SEQ ID NO: 1100979 - RNA, 19 nt, Artificial Sequence
  Description of Artificial Sequence: Synthetic oligonucleotide
  Antisense strand to SEQ ID NO: 1100978
ucccuuaaagaaagacaua

SEQ ID NO: 1100980 - RNA, 19 nt, Artificial Sequence
  Description of Artificial Sequence: Synthetic oligonucleotide
  Sense strand starting at position 3434 of SEQ ID NO: 915718
ucaggcuuaccugaguaca

SEQ ID NO: 1100981 - RNA, 19 nt, Artificial Sequence
  Description of Artificial Sequence: Synthetic oligonucleotide
  Antisense strand to SEQ ID NO: 1100980
uguacucagguaagccuga

SEQ ID NO: 1100982 - RNA, 19 nt, Artificial Sequence
  Description of Artificial Sequence: Synthetic oligonucleotide
  Sense strand starting at position 3436 of SEQ ID NO: 915718
aggcuuaccugaguacacu

SEQ ID NO: 1100983 - RNA, 19 nt, Artificial Sequence
  Description of Artificial Sequence: Synthetic oligonucleotide
  Antisense strand to SEQ ID NO: 1100982
aguguacucagguaagccu

SEQ ID NO: 1100984 - RNA, 19 nt, Artificial Sequence
  Description of Artificial Sequence: Synthetic oligonucleotide
  Sense strand starting at position 3437 of SEQ ID NO: 915718
ggcuuaccugaguacacuu

SEQ ID NO: 1100985 - RNA, 19 nt, Artificial Sequence
  Description of Artificial Sequence: Synthetic oligonucleotide
  Antisense strand to SEQ ID NO: 1100984
aaguguacucagguaagcc

SEQ ID NO: 1100986 - RNA, 19 nt, Artificial Sequence
  Description of Artificial Sequence: Synthetic oligonucleotide
  Sense strand starting at position 3445 of SEQ ID NO: 915718
ugaguacacuugcuaguua

SEQ ID NO: 1100987 - RNA, 19 nt, Artificial Sequence
  Description of Artificial Sequence: Synthetic oligonucleotide
  Antisense strand to SEQ ID NO: 1100986
uaacuagcaaguguacuca

SEQ ID NO: 1100988 - RNA, 19 nt, Artificial Sequence
  Description of Artificial Sequence: Synthetic oligonucleotide
  Sense strand starting at position 3508 of SEQ ID NO: 915718
agguccuacgugaguguuu

SEQ ID NO: 1100989 - RNA, 19 nt, Artificial Sequence
  Description of Artificial Sequence: Synthetic oligonucleotide
  Antisense strand to SEQ ID NO: 1100988
aaacacucacguaggaccu

SEQ ID NO: 1100990 - RNA, 19 nt, Artificial Sequence
  Description of Artificial Sequence: Synthetic oligonucleotide
  Sense strand starting at position 3539 of SEQ ID NO: 915718
auaagaaaguuugucuaug

SEQ ID NO: 1100991 - RNA, 19 nt, Artificial Sequence
  Description of Artificial Sequence: Synthetic oligonucleotide
  Antisense strand to SEQ ID NO: 1100990
cauagacaaacuuucuuau

SEQ ID NO: 1100992 - RNA, 19 nt, Artificial Sequence
  Description of Artificial Sequence: Synthetic oligonucleotide
  Sense strand starting at position 3676 of SEQ ID NO: 915718
guuguuaaguauuuggguu

SEQ ID NO: 1100993 - RNA, 19 nt, Artificial Sequence
  Description of Artificial Sequence: Synthetic oligonucleotide
  Antisense strand to SEQ ID NO: 1100992
aacccaaauacuuaacaac

SEQ ID NO: 1100994 - RNA, 19 nt, Artificial Sequence
  Description of Artificial Sequence: Synthetic oligonucleotide
  Sense strand starting at position 3770 of SEQ ID NO: 915718
gaauaaaggccuggaguau

SEQ ID NO: 1100995 - RNA, 19 nt, Artificial Sequence
  Description of Artificial Sequence: Synthetic oligonucleotide
  Antisense strand to SEQ ID NO: 1100994
auacuccaggccuuuauuc

SEQ ID NO: 1100996 - RNA, 19 nt, Artificial Sequence
  Description of Artificial Sequence: Synthetic oligonucleotide
  Sense strand starting at position 3882 of SEQ ID NO: 915718
agacuagaggcagguuuau

SEQ ID NO: 1100997 - RNA, 19 nt, Artificial Sequence
  Description of Artificial Sequence: Synthetic oligonucleotide
  Antisense strand to SEQ ID NO: 1100996
auaaaccugccucuagucu

SEQ ID NO: 1100998 - RNA, 19 nt, Artificial Sequence
  Description of Artificial Sequence: Synthetic oligonucleotide
  Sense strand starting at position 3957 of SEQ ID NO: 915718
ugucuucugcagcaugaau

SEQ ID NO: 1100999 - RNA, 19 nt, Artificial Sequence
  Description of Artificial Sequence: Synthetic oligonucleotide
  Antisense strand to SEQ ID NO: 1100998
auucaugcugcagaagaca

SEQ ID NO: 1101000 - RNA, 19 nt, Artificial Sequence
  Description of Artificial Sequence: Synthetic oligonucleotide
  Sense strand starting at position 77 of SEQ ID NO: 915719
uuauauuucuaugguguga

SEQ ID NO: 1101001 - RNA, 19 nt, Artificial Sequence
  Description of Artificial Sequence: Synthetic oligonucleotide
  Antisense strand to SEQ ID NO: 1101000
ucacaccauagaaauauaa

SEQ ID NO: 1101002 - RNA, 19 nt, Artificial Sequence
  Description of Artificial Sequence: Synthetic oligonucleotide
  Sense strand starting at position 79 of SEQ ID NO: 915719
auauuucuauggugugaug

SEQ ID NO: 1101003 - RNA, 19 nt, Artificial Sequence
  Description of Artificial Sequence: Synthetic oligonucleotide
  Antisense strand to SEQ ID NO: 1101002
caucacaccauagaaauau

SEQ ID NO: 1101004 - RNA, 19 nt, Artificial Sequence
  Description of Artificial Sequence: Synthetic oligonucleotide
  Sense strand starting at position 81 of SEQ ID NO: 915719
auuucuauggugugauggu

SEQ ID NO: 1101005 - RNA, 19 nt, Artificial Sequence
  Description of Artificial Sequence: Synthetic oligonucleotide
  Antisense strand to SEQ ID NO: 1101004
accaucacaccauagaaau

SEQ ID NO: 1101006 - RNA, 19 nt, Artificial Sequence
  Description of Artificial Sequence: Synthetic oligonucleotide
  Sense strand starting at position 324 of SEQ ID NO: 915719
gaagcuaguucugaggcuu

SEQ ID NO: 1101007 - RNA, 19 nt, Artificial Sequence
  Description of Artificial Sequence: Synthetic oligonucleotide
  Antisense strand to SEQ ID NO: 1101006
aagccucagaacuagcuuc

SEQ ID NO: 1101008 - RNA, 19 nt, Artificial Sequence
  Description of Artificial Sequence: Synthetic oligonucleotide
  Sense strand starting at position 454 of SEQ ID NO: 915719
uucccucucguguagaauc

SEQ ID NO: 1101009 - RNA, 19 nt, Artificial Sequence
  Description of Artificial Sequence: Synthetic oligonucleotide
  Antisense strand to SEQ ID NO: 1101008
gauucuacacgagagggaa

SEQ ID NO: 1101010 - RNA, 19 nt, Artificial Sequence
  Description of Artificial Sequence: Synthetic oligonucleotide
  Sense strand starting at position 456 of SEQ ID NO: 915719
cccucucguguagaaucau

SEQ ID NO: 1101011 - RNA, 19 nt, Artificial Sequence
  Description of Artificial Sequence: Synthetic oligonucleotide
  Antisense strand to SEQ ID NO: 1101010
augauucuacacgagaggg

SEQ ID NO: 1101012 - RNA, 19 nt, Artificial Sequence
  Description of Artificial Sequence: Synthetic oligonucleotide
  Sense strand starting at position 946 of SEQ ID NO: 915719
cagcauguucuguacugua

SEQ ID NO: 1101013 - RNA, 19 nt, Artificial Sequence
  Description of Artificial Sequence: Synthetic oligonucleotide
  Antisense strand to SEQ ID NO: 1101012
uacaguacagaacaugcug

SEQ ID NO: 1101014 - RNA, 19 nt, Artificial Sequence
  Description of Artificial Sequence: Synthetic oligonucleotide
  Sense strand starting at position 1382 of SEQ ID NO: 915719
auauauguauuuggccaaa

SEQ ID NO: 1101015 - RNA, 19 nt, Artificial Sequence
  Description of Artificial Sequence: Synthetic oligonucleotide
  Antisense strand to SEQ ID NO: 1101014
uuuggccaaauacauauau

SEQ ID NO: 1101016 - RNA, 19 nt, Artificial Sequence
  Description of Artificial Sequence: Synthetic oligonucleotide
  Sense strand starting at position 1506 of SEQ ID NO: 915719
uguguaaaugccgaaugaa

SEQ ID NO: 1101017 - RNA, 19 nt, Artificial Sequence
  Description of Artificial Sequence: Synthetic oligonucleotide
  Antisense strand to SEQ ID NO: 1101016
uucauucggcauuuacaca

SEQ ID NO: 1101018 - RNA, 19 nt, Artificial Sequence
  Description of Artificial Sequence: Synthetic oligonucleotide
  Sense strand starting at position 1514 of SEQ ID NO: 915719
ugccgaaugaauggauuaa

SEQ ID NO: 1101019 - RNA, 19 nt, Artificial Sequence
  Description of Artificial Sequence: Synthetic oligonucleotide
  Antisense strand to SEQ ID NO: 1101018
uuaauccauucauucggca

SEQ ID NO: 1101020 - RNA, 19 nt, Artificial Sequence
  Description of Artificial Sequence: Synthetic oligonucleotide
  Sense strand starting at position 2159 of SEQ ID NO: 915719
guauuuagaucgcaccuuu

SEQ ID NO: 1101021 - RNA, 19 nt, Artificial Sequence
  Description of Artificial Sequence: Synthetic oligonucleotide
  Antisense strand to SEQ ID NO: 1101020
aaaggugcgaucuaaauac

SEQ ID NO: 1101022 - RNA, 19 nt, Artificial Sequence
  Description of Artificial Sequence: Synthetic oligonucleotide
  Sense strand starting at position 2235 of SEQ ID NO: 915719
cucuccugugacugacauu

SEQ ID NO: 1101023 - RNA, 19 nt, Artificial Sequence
  Description of Artificial Sequence: Synthetic oligonucleotide
  Antisense strand to SEQ ID NO: 1101022
aaugucagucacaggagag

SEQ ID NO: 1101024 - RNA, 19 nt, Artificial Sequence
  Description of Artificial Sequence: Synthetic oligonucleotide
  Sense strand starting at position 2244 of SEQ ID NO: 915719
gacugacauucuugguuau

SEQ ID NO: 1101025 - RNA, 19 nt, Artificial Sequence
  Description of Artificial Sequence: Synthetic oligonucleotide
  Antisense strand to SEQ ID NO: 1101024
auaaccaagaaugucaguc

SEQ ID NO: 1101026 - RNA, 19 nt, Artificial Sequence
  Description of Artificial Sequence: Synthetic oligonucleotide
  Sense strand starting at position 2245 of SEQ ID NO: 915719
acugacauucuugguuauu

SEQ ID NO: 1101027 - RNA, 19 nt, Artificial Sequence
  Description of Artificial Sequence: Synthetic oligonucleotide
  Antisense strand to SEQ ID NO: 1101026
aauaaccaagaaugucagu

SEQ ID NO: 1101028 - RNA, 19 nt, Artificial Sequence
  Description of Artificial Sequence: Synthetic oligonucleotide
  Sense strand starting at position 2370 of SEQ ID NO: 915719
gaagcagaccaaugguuaa

SEQ ID NO: 1101029 - RNA, 19 nt, Artificial Sequence
  Description of Artificial Sequence: Synthetic oligonucleotide
  Antisense strand to SEQ ID NO: 1101028
uuaaccauuggucugcuuc

SEQ ID NO: 1101030 - RNA, 19 nt, Artificial Sequence
  Description of Artificial Sequence: Synthetic oligonucleotide
  Sense strand starting at position 2451 of SEQ ID NO: 915719
cuggauuucucccaacaga

SEQ ID NO: 1101031 - RNA, 19 nt, Artificial Sequence
  Description of Artificial Sequence: Synthetic oligonucleotide
  Antisense strand to SEQ ID NO: 1101030
ucuguugggagaaauccag

SEQ ID NO: 1101032 - RNA, 19 nt, Artificial Sequence
  Description of Artificial Sequence: Synthetic oligonucleotide
  Sense strand starting at position 2483 of SEQ ID NO: 915719
guuauucuucucugcuaag

SEQ ID NO: 1101033 - RNA, 19 nt, Artificial Sequence
  Description of Artificial Sequence: Synthetic oligonucleotide
  Antisense strand to SEQ ID NO: 1101032
cuuagcagagaagaauaac

SEQ ID NO: 1101034 - RNA, 19 nt, Artificial Sequence
  Description of Artificial Sequence: Synthetic oligonucleotide
  Sense strand starting at position 2486 of SEQ ID NO: 915719
auucuucucugcuaagaga

SEQ ID NO: 1101035 - RNA, 19 nt, Artificial Sequence
  Description of Artificial Sequence: Synthetic oligonucleotide
  Antisense strand to SEQ ID NO: 1101034
ucucuuagcagagaagaau

SEQ ID NO: 1101036 - RNA, 19 nt, Artificial Sequence
  Description of Artificial Sequence: Synthetic oligonucleotide
  Sense strand starting at position 2528 of SEQ ID NO: 915719
cucuguaugucugaggaac

SEQ ID NO: 1101037 - RNA, 19 nt, Artificial Sequence
  Description of Artificial Sequence: Synthetic oligonucleotide
  Antisense strand to SEQ ID NO: 1101036
guuccucagacauacagag

SEQ ID NO: 1101038 - RNA, 19 nt, Artificial Sequence
  Description of Artificial Sequence: Synthetic oligonucleotide
  Sense strand starting at position 2684 of SEQ ID NO: 915719
ggaagaggauaucagugaa

SEQ ID NO: 1101039 - RNA, 19 nt, Artificial Sequence
  Description of Artificial Sequence: Synthetic oligonucleotide
  Antisense strand to SEQ ID NO: 1101038
uucacugauauccucuucc

SEQ ID NO: 1101040 - RNA, 19 nt, Artificial Sequence
  Description of Artificial Sequence: Synthetic oligonucleotide
  Sense strand starting at position 2954 of SEQ ID NO: 915719
aagggauccuccgaucucu

SEQ ID NO: 1101041 - RNA, 19 nt, Artificial Sequence
  Description of Artificial Sequence: Synthetic oligonucleotide
  Antisense strand to SEQ ID NO: 1101040
agagaucggaggaucccuu

SEQ ID NO: 1101042 - RNA, 19 nt, Artificial Sequence
  Description of Artificial Sequence: Synthetic oligonucleotide
  Sense strand starting at position 2986 of SEQ ID NO: 915719
ugaaauuacuugcuuagcu

SEQ ID NO: 1101043 - RNA, 19 nt, Artificial Sequence
  Description of Artificial Sequence: Synthetic oligonucleotide
  Antisense strand to SEQ ID NO: 1101042
agcuaagcaaguaauuuca

SEQ ID NO: 1101044 - RNA, 19 nt, Artificial Sequence
  Description of Artificial Sequence: Synthetic oligonucleotide
  Sense strand starting at position 2995 of SEQ ID NO: 915719
uugcuuagcucuuacugga

SEQ ID NO: 1101045 - RNA, 19 nt, Artificial Sequence
  Description of Artificial Sequence: Synthetic oligonucleotide
  Antisense strand to SEQ ID NO: 1101044
uccaguaagagcuaagcaa

SEQ ID NO: 1101046 - RNA, 19 nt, Artificial Sequence
  Description of Artificial Sequence: Synthetic oligonucleotide
  Sense strand starting at position 3349 of SEQ ID NO: 915719
agauaugacagccgugaac

SEQ ID NO: 1101047 - RNA, 19 nt, Artificial Sequence
  Description of Artificial Sequence: Synthetic oligonucleotide
  Antisense strand to SEQ ID NO: 1101046
guucacggcugucauaucu

SEQ ID NO: 1101048 - RNA, 19 nt, Artificial Sequence
  Description of Artificial Sequence: Synthetic oligonucleotide
  Sense strand starting at position 3360 of SEQ ID NO: 915719
ccgugaacacuuuagggua

SEQ ID NO: 1101049 - RNA, 19 nt, Artificial Sequence
  Description of Artificial Sequence: Synthetic oligonucleotide
  Antisense strand to SEQ ID NO: 1101048
uacccuaaaguguucacgg

SEQ ID NO: 1101050 - RNA, 19 nt, Artificial Sequence
  Description of Artificial Sequence: Synthetic oligonucleotide
  Sense strand starting at position 3391 of SEQ ID NO: 915719
uuugucuauucucagguua

SEQ ID NO: 1101051 - RNA, 19 nt, Artificial Sequence
  Description of Artificial Sequence: Synthetic oligonucleotide
  Antisense strand to SEQ ID NO: 1101050
uaaccugagaauagacaaa

SEQ ID NO: 1101052 - RNA, 19 nt, Artificial Sequence
  Description of Artificial Sequence: Synthetic oligonucleotide
  Sense strand starting at position 3396 of SEQ ID NO: 915719
cuauucucagguuagagca

SEQ ID NO: 1101053 - RNA, 19 nt, Artificial Sequence
  Description of Artificial Sequence: Synthetic oligonucleotide
  Antisense strand to SEQ ID NO: 1101052
ugcucuaaccugagaauag

SEQ ID NO: 1101054 - RNA, 19 nt, Artificial Sequence
  Description of Artificial Sequence: Synthetic oligonucleotide
  Sense strand starting at position 3443 of SEQ ID NO: 915719
acaugacaaugccaagaaa

SEQ ID NO: 1101055 - RNA, 19 nt, Artificial Sequence
  Description of Artificial Sequence: Synthetic oligonucleotide
  Antisense strand to SEQ ID NO: 1101054
uuucuuggcauugucaugu

SEQ ID NO: 1101056 - RNA, 19 nt, Artificial Sequence
  Description of Artificial Sequence: Synthetic oligonucleotide
  Sense strand starting at position 3454 of SEQ ID NO: 915719
ccaagaaaucugggccaca

SEQ ID NO: 1101057 - RNA, 19 nt, Artificial Sequence
  Description of Artificial Sequence: Synthetic oligonucleotide
  Antisense strand to SEQ ID NO: 1101056
uguggcccagauuucuugg

SEQ ID NO: 1101058 - RNA, 19 nt, Artificial Sequence
  Description of Artificial Sequence: Synthetic oligonucleotide
  Sense strand starting at position 3500 of SEQ ID NO: 915719
uguagcuuccuuggagcua

SEQ ID NO: 1101059 - RNA, 19 nt, Artificial Sequence
  Description of Artificial Sequence: Synthetic oligonucleotide
  Antisense strand to SEQ ID NO: 1101058
uagcuccaaggaagcuaca

SEQ ID NO: 1101060 - RNA, 19 nt, Artificial Sequence
  Description of Artificial Sequence: Synthetic oligonucleotide
  Sense strand starting at position 3522 of SEQ ID NO: 915719
agccaagauucccaacagu

SEQ ID NO: 1101061 - RNA, 19 nt, Artificial Sequence
  Description of Artificial Sequence: Synthetic oligonucleotide
  Antisense strand to SEQ ID NO: 1101060
acuguugggaaucuuggcu

SEQ ID NO: 1101062 - RNA, 19 nt, Artificial Sequence
  Description of Artificial Sequence: Synthetic oligonucleotide
  Sense strand starting at position 3558 of SEQ ID NO: 915719
uuagguaccuggucaguua

SEQ ID NO: 1101063 - RNA, 19 nt, Artificial Sequence
  Description of Artificial Sequence: Synthetic oligonucleotide
  Antisense strand to SEQ ID NO: 1101062
uaacugaccagguaccuaa

SEQ ID NO: 1101064 - RNA, 19 nt, Artificial Sequence
  Description of Artificial Sequence: Synthetic oligonucleotide
  Sense strand starting at position 3617 of SEQ ID NO: 915719
ccaagaaucucagucacag

SEQ ID NO: 1101065 - RNA, 19 nt, Artificial Sequence
  Description of Artificial Sequence: Synthetic oligonucleotide
  Antisense strand to SEQ ID NO: 1101064
cugugacugagauucuugg

SEQ ID NO: 1101066 - RNA, 19 nt, Artificial Sequence
  Description of Artificial Sequence: Synthetic oligonucleotide
  Sense strand starting at position 3621 of SEQ ID NO: 915719
gaaucucagucacaggaga

SEQ ID NO: 1101067 - RNA, 19 nt, Artificial Sequence
  Description of Artificial Sequence: Synthetic oligonucleotide
  Antisense strand to SEQ ID NO: 1101066
ucuccugugacugagauuc

SEQ ID NO: 1101068 - RNA, 19 nt, Artificial Sequence
  Description of Artificial Sequence: Synthetic oligonucleotide
  Sense strand starting at position 3636 of SEQ ID NO: 915719
gagagcuguuguguauaga

SEQ ID NO: 1101069 - RNA, 19 nt, Artificial Sequence
  Description of Artificial Sequence: Synthetic oligonucleotide
  Antisense strand to SEQ ID NO: 1101068
ucuauacacaacagcucuc

SEQ ID NO: 1101070 - RNA, 19 nt, Artificial Sequence
  Description of Artificial Sequence: Synthetic oligonucleotide
  Sense strand starting at position 3637 of SEQ ID NO: 915719
agagcuguuguguauagau

SEQ ID NO: 1101071 - RNA, 19 nt, Artificial Sequence
  Description of Artificial Sequence: Synthetic oligonucleotide
  Antisense strand to SEQ ID NO: 1101070
aucuauacacaacagcucu

SEQ ID NO: 1101072 - RNA, 19 nt, Artificial Sequence
  Description of Artificial Sequence: Synthetic oligonucleotide
  Sense strand starting at position 3639 of SEQ ID NO: 915719
agcuguuguguauagaugu

SEQ ID NO: 1101073 - RNA, 19 nt, Artificial Sequence
  Description of Artificial Sequence: Synthetic oligonucleotide
  Antisense strand to SEQ ID NO: 1101072
acaucuauacacaacagcu

SEQ ID NO: 1101074 - RNA, 19 nt, Artificial Sequence
  Description of Artificial Sequence: Synthetic oligonucleotide
  Sense strand starting at position 3672 of SEQ ID NO: 915719
gggucaagguauucaugcu

SEQ ID NO: 1101075 - RNA, 19 nt, Artificial Sequence
  Description of Artificial Sequence: Synthetic oligonucleotide
  Antisense strand to SEQ ID NO: 1101074
agcaugaauaccuugaccc

SEQ ID NO: 1101076 - RNA, 19 nt, Artificial Sequence
  Description of Artificial Sequence: Synthetic oligonucleotide
  Sense strand starting at position 3802 of SEQ ID NO: 915719
cucucuaauugcuggauga

SEQ ID NO: 1101077 - RNA, 19 nt, Artificial Sequence
  Description of Artificial Sequence: Synthetic oligonucleotide
  Antisense strand to SEQ ID NO: 1101076
ucauccagcaauuagagag

SEQ ID NO: 1101078 - RNA, 19 nt, Artificial Sequence
  Description of Artificial Sequence: Synthetic oligonucleotide
  Sense strand starting at position 3803 of SEQ ID NO: 915719
ucucuaauugcuggaugag

SEQ ID NO: 1101079 - RNA, 19 nt, Artificial Sequence
  Description of Artificial Sequence: Synthetic oligonucleotide
  Antisense strand to SEQ ID NO: 1101078
cucauccagcaauuagaga

SEQ ID NO: 1101080 - RNA, 19 nt, Artificial Sequence
  Description of Artificial Sequence: Synthetic oligonucleotide
  Sense strand starting at position 401 of SEQ ID NO: 915720
gaaacuuuaugucuagcga

SEQ ID NO: 1101081 - RNA, 19 nt, Artificial Sequence
  Description of Artificial Sequence: Synthetic oligonucleotide
  Antisense strand to SEQ ID NO: 1101080
ucgcuagacauaaaguuuc

SEQ ID NO: 1101082 - RNA, 19 nt, Artificial Sequence
  Description of Artificial Sequence: Synthetic oligonucleotide
  Sense strand starting at position 402 of SEQ ID NO: 915720
aaacuuuaugucuagcgaa

SEQ ID NO: 1101083 - RNA, 19 nt, Artificial Sequence
  Description of Artificial Sequence: Synthetic oligonucleotide
  Antisense strand to SEQ ID NO: 1101082
uucgcuagacauaaaguuu

SEQ ID NO: 1101084 - RNA, 19 nt, Artificial Sequence
  Description of Artificial Sequence: Synthetic oligonucleotide
  Sense strand starting at position 559 of SEQ ID NO: 915720
gagaaucuuugugucuaca

SEQ ID NO: 1101085 - RNA, 19 nt, Artificial Sequence
  Description of Artificial Sequence: Synthetic oligonucleotide
  Antisense strand to SEQ ID NO: 1101084
uguagacacaaagauucuc

SEQ ID NO: 1101086 - RNA, 19 nt, Artificial Sequence
  Description of Artificial Sequence: Synthetic oligonucleotide
  Sense strand starting at position 786 of SEQ ID NO: 915720
uauggacgcuuuguuauuu

SEQ ID NO: 1101087 - RNA, 19 nt, Artificial Sequence
  Description of Artificial Sequence: Synthetic oligonucleotide
  Antisense strand to SEQ ID NO: 1101086
aaauaacaaagcguccaua

SEQ ID NO: 1101088 - RNA, 19 nt, Artificial Sequence
  Description of Artificial Sequence: Synthetic oligonucleotide
  Sense strand starting at position 1077 of SEQ ID NO: 915720
gaagacauguguuuauaaa

SEQ ID NO: 1101089 - RNA, 19 nt, Artificial Sequence
  Description of Artificial Sequence: Synthetic oligonucleotide
  Antisense strand to SEQ ID NO: 1101088
uuuauaaacacaugucuuc

SEQ ID NO: 1101090 - RNA, 19 nt, Artificial Sequence
  Description of Artificial Sequence: Synthetic oligonucleotide
  Sense strand starting at position 1084 of SEQ ID NO: 915720
uguguuuauaaacagaggu

SEQ ID NO: 1101091 - RNA, 19 nt, Artificial Sequence
  Description of Artificial Sequence: Synthetic oligonucleotide
  Antisense strand to SEQ ID NO: 1101090
accucuguuuauaaacaca

SEQ ID NO: 1101092 - RNA, 19 nt, Artificial Sequence
  Description of Artificial Sequence: Synthetic oligonucleotide
  Sense strand starting at position 1394 of SEQ ID NO: 915720
aacugaccuguagaguuau

SEQ ID NO: 1101093 - RNA, 19 nt, Artificial Sequence
  Description of Artificial Sequence: Synthetic oligonucleotide
  Antisense strand to SEQ ID NO: 1101092
auaacucuacaggucaguu

SEQ ID NO: 1101094 - RNA, 19 nt, Artificial Sequence
  Description of Artificial Sequence: Synthetic oligonucleotide
  Sense strand starting at position 1402 of SEQ ID NO: 915720
uguagaguuaugcagaaac

SEQ ID NO: 1101095 - RNA, 19 nt, Artificial Sequence
  Description of Artificial Sequence: Synthetic oligonucleotide
  Antisense strand to SEQ ID NO: 1101094
guuucugcauaacucuaca

SEQ ID NO: 1101096 - RNA, 19 nt, Artificial Sequence
  Description of Artificial Sequence: Synthetic oligonucleotide
  Sense strand starting at position 1413 of SEQ ID NO: 915720
gcagaaacacuacauuagu

SEQ ID NO: 1101097 - RNA, 19 nt, Artificial Sequence
  Description of Artificial Sequence: Synthetic oligonucleotide
  Antisense strand to SEQ ID NO: 1101096
acuaauguaguguuucugc

SEQ ID NO: 1101098 - RNA, 19 nt, Artificial Sequence
  Description of Artificial Sequence: Synthetic oligonucleotide
  Sense strand starting at position 1430 of SEQ ID NO: 915720
guaaacuaauaggcauuaa

SEQ ID NO: 1101099 - RNA, 19 nt, Artificial Sequence
  Description of Artificial Sequence: Synthetic oligonucleotide
  Antisense strand to SEQ ID NO: 1101098
uuaaugccuauuaguuuac

SEQ ID NO: 1101100 - RNA, 19 nt, Artificial Sequence
  Description of Artificial Sequence: Synthetic oligonucleotide
  Sense strand starting at position 1441 of SEQ ID NO: 915720
ggcauuaaaucauuaggau

SEQ ID NO: 1101101 - RNA, 19 nt, Artificial Sequence
  Description of Artificial Sequence: Synthetic oligonucleotide
  Antisense strand to SEQ ID NO: 1101100
auccuaaugauuuaaugcc

SEQ ID NO: 1101102 - RNA, 19 nt, Artificial Sequence
  Description of Artificial Sequence: Synthetic oligonucleotide
  Sense strand starting at position 1478 of SEQ ID NO: 915720
gcccuuguuguugggagaa

SEQ ID NO: 1101103 - RNA, 19 nt, Artificial Sequence
  Description of Artificial Sequence: Synthetic oligonucleotide
  Antisense strand to SEQ ID NO: 1101102
uucucccaacaacaagggc

SEQ ID NO: 1101104 - RNA, 19 nt, Artificial Sequence
  Description of Artificial Sequence: Synthetic oligonucleotide
  Sense strand starting at position 1508 of SEQ ID NO: 915720
agagaauucuggcucucua

SEQ ID NO: 1101105 - RNA, 19 nt, Artificial Sequence
  Description of Artificial Sequence: Synthetic oligonucleotide
  Antisense strand to SEQ ID NO: 1101104
uagagagccagaauucucu

SEQ ID NO: 1101106 - RNA, 19 nt, Artificial Sequence
  Description of Artificial Sequence: Synthetic oligonucleotide
  Sense strand starting at position 1518 of SEQ ID NO: 915720
ggcucucuacagcaaaguu

SEQ ID NO: 1101107 - RNA, 19 nt, Artificial Sequence
  Description of Artificial Sequence: Synthetic oligonucleotide
  Antisense strand to SEQ ID NO: 1101106
aacuuugcuguagagagcc

SEQ ID NO: 1101108 - RNA, 19 nt, Artificial Sequence
  Description of Artificial Sequence: Synthetic oligonucleotide
  Sense strand starting at position 1691 of SEQ ID NO: 915720
cagcaagaagucugugaac

SEQ ID NO: 1101109 - RNA, 19 nt, Artificial Sequence
  Description of Artificial Sequence: Synthetic oligonucleotide
  Antisense strand to SEQ ID NO: 1101108
guucacagacuucuugcug

SEQ ID NO: 1101110 - RNA, 19 nt, Artificial Sequence
  Description of Artificial Sequence: Synthetic oligonucleotide
  Sense strand starting at position 1693 of SEQ ID NO: 915720
gcaagaagucugugaacug

SEQ ID NO: 1101111 - RNA, 19 nt, Artificial Sequence
  Description of Artificial Sequence: Synthetic oligonucleotide
  Antisense strand to SEQ ID NO: 1101110
caguucacagacuucuugc

SEQ ID NO: 1101112 - RNA, 19 nt, Artificial Sequence
  Description of Artificial Sequence: Synthetic oligonucleotide
  Sense strand starting at position 1880 of SEQ ID NO: 915720
gggaagacgugguuaggau

SEQ ID NO: 1101113 - RNA, 19 nt, Artificial Sequence
  Description of Artificial Sequence: Synthetic oligonucleotide
  Antisense strand to SEQ ID NO: 1101112
auccuaaccacgucuuccc

SEQ ID NO: 1101114 - RNA, 19 nt, Artificial Sequence
  Description of Artificial Sequence: Synthetic oligonucleotide
  Sense strand starting at position 1881 of SEQ ID NO: 915720
ggaagacgugguuaggauu

SEQ ID NO: 1101115 - RNA, 19 nt, Artificial Sequence
  Description of Artificial Sequence: Synthetic oligonucleotide
  Antisense strand to SEQ ID NO: 1101114
aauccuaaccacgucuucc

SEQ ID NO: 1101116 - RNA, 19 nt, Artificial Sequence
  Description of Artificial Sequence: Synthetic oligonucleotide
  Sense strand starting at position 1914 of SEQ ID NO: 915720
cgggccugaucugcacaaa

SEQ ID NO: 1101117 - RNA, 19 nt, Artificial Sequence
  Description of Artificial Sequence: Synthetic oligonucleotide
  Antisense strand to SEQ ID NO: 1101116
uuugugcagaucaggcccg

SEQ ID NO: 1101118 - RNA, 19 nt, Artificial Sequence
  Description of Artificial Sequence: Synthetic oligonucleotide
  Sense strand starting at position 1917 of SEQ ID NO: 915720
gccugaucugcacaaagga

SEQ ID NO: 1101119 - RNA, 19 nt, Artificial Sequence
  Description of Artificial Sequence: Synthetic oligonucleotide
  Antisense strand to SEQ ID NO: 1101118
uccuuugugcagaucaggc

SEQ ID NO: 1101120 - RNA, 19 nt, Artificial Sequence
  Description of Artificial Sequence: Synthetic oligonucleotide
  Sense strand starting at position 1944 of SEQ ID NO: 915720
agaggaaccgcaggaaauu

SEQ ID NO: 1101121 - RNA, 19 nt, Artificial Sequence
  Description of Artificial Sequence: Synthetic oligonucleotide
  Antisense strand to SEQ ID NO: 1101120
aauuuccugcgguuccucu

SEQ ID NO: 1101122 - RNA, 19 nt, Artificial Sequence
  Description of Artificial Sequence: Synthetic oligonucleotide
  Sense strand starting at position 1955 of SEQ ID NO: 915720
aggaaauucuugcucacac

SEQ ID NO: 1101123 - RNA, 19 nt, Artificial Sequence
  Description of Artificial Sequence: Synthetic oligonucleotide
  Antisense strand to SEQ ID NO: 1101122
gugugagcaagaauuuccu

SEQ ID NO: 1101124 - RNA, 19 nt, Artificial Sequence
  Description of Artificial Sequence: Synthetic oligonucleotide
  Sense strand starting at position 1956 of SEQ ID NO: 915720
ggaaauucuugcucacacu

SEQ ID NO: 1101125 - RNA, 19 nt, Artificial Sequence
  Description of Artificial Sequence: Synthetic oligonucleotide
  Antisense strand to SEQ ID NO: 1101124
agugugagcaagaauuucc

SEQ ID NO: 1101126 - RNA, 19 nt, Artificial Sequence
  Description of Artificial Sequence: Synthetic oligonucleotide
  Sense strand starting at position 2008 of SEQ ID NO: 915720
aauggcauuucuccacgua

SEQ ID NO: 1101127 - RNA, 19 nt, Artificial Sequence
  Description of Artificial Sequence: Synthetic oligonucleotide
  Antisense strand to SEQ ID NO: 1101126
uacguggagaaaugccauu

SEQ ID NO: 1101128 - RNA, 19 nt, Artificial Sequence
  Description of Artificial Sequence: Synthetic oligonucleotide
  Sense strand starting at position 2228 of SEQ ID NO: 915720
uuucgaaauucuuccaaug

SEQ ID NO: 1101129 - RNA, 19 nt, Artificial Sequence
  Description of Artificial Sequence: Synthetic oligonucleotide
  Antisense strand to SEQ ID NO: 1101128
cauuggaagaauuucgaaa

SEQ ID NO: 1101130 - RNA, 19 nt, Artificial Sequence
  Description of Artificial Sequence: Synthetic oligonucleotide
  Sense strand starting at position 2279 of SEQ ID NO: 915720
ucugcuucugggugacaga

SEQ ID NO: 1101131 - RNA, 19 nt, Artificial Sequence
  Description of Artificial Sequence: Synthetic oligonucleotide
  Antisense strand to SEQ ID NO: 1101130
ucugucacccagaagcaga

SEQ ID NO: 1101132 - RNA, 19 nt, Artificial Sequence
  Description of Artificial Sequence: Synthetic oligonucleotide
  Sense strand starting at position 2280 of SEQ ID NO: 915720
cugcuucugggugacagau

SEQ ID NO: 1101133 - RNA, 19 nt, Artificial Sequence
  Description of Artificial Sequence: Synthetic oligonucleotide
  Antisense strand to SEQ ID NO: 1101132
aucugucacccagaagcag

SEQ ID NO: 1101134 - RNA, 19 nt, Artificial Sequence
  Description of Artificial Sequence: Synthetic oligonucleotide
  Sense strand starting at position 2811 of SEQ ID NO: 915720
aguuuaucuggagagcgau

SEQ ID NO: 1101135 - RNA, 19 nt, Artificial Sequence
  Description of Artificial Sequence: Synthetic oligonucleotide
  Antisense strand to SEQ ID NO: 1101134
aucgcucuccagauaaacu

SEQ ID NO: 1101136 - RNA, 19 nt, Artificial Sequence
  Description of Artificial Sequence: Synthetic oligonucleotide
  Sense strand starting at position 2814 of SEQ ID NO: 915720
uuaucuggagagcgauaaa

SEQ ID NO: 1101137 - RNA, 19 nt, Artificial Sequence
  Description of Artificial Sequence: Synthetic oligonucleotide
  Antisense strand to SEQ ID NO: 1101136
uuuaucgcucuccagauaa

SEQ ID NO: 1101138 - RNA, 19 nt, Artificial Sequence
  Description of Artificial Sequence: Synthetic oligonucleotide
  Sense strand starting at position 2948 of SEQ ID NO: 915720
cuucucuucugguuacuau

SEQ ID NO: 1101139 - RNA, 19 nt, Artificial Sequence
  Description of Artificial Sequence: Synthetic oligonucleotide
  Antisense strand to SEQ ID NO: 1101138
auaguaaccagaagagaag

SEQ ID NO: 1101140 - RNA, 19 nt, Artificial Sequence
  Description of Artificial Sequence: Synthetic oligonucleotide
  Sense strand starting at position 2989 of SEQ ID NO: 915720
aacugugguccauguacca

SEQ ID NO: 1101141 - RNA, 19 nt, Artificial Sequence
  Description of Artificial Sequence: Synthetic oligonucleotide
  Antisense strand to SEQ ID NO: 1101140
ugguacauggaccacaguu

SEQ ID NO: 1101142 - RNA, 19 nt, Artificial Sequence
  Description of Artificial Sequence: Synthetic oligonucleotide
  Sense strand starting at position 3250 of SEQ ID NO: 915720
uguucuuuauugucucaga

SEQ ID NO: 1101143 - RNA, 19 nt, Artificial Sequence
  Description of Artificial Sequence: Synthetic oligonucleotide
  Antisense strand to SEQ ID NO: 1101142
ucugagacaauaaagaaca

SEQ ID NO: 1101144 - RNA, 19 nt, Artificial Sequence
  Description of Artificial Sequence: Synthetic oligonucleotide
  Sense strand starting at position 3251 of SEQ ID NO: 915720
guucuuuauugucucagau

SEQ ID NO: 1101145 - RNA, 19 nt, Artificial Sequence
  Description of Artificial Sequence: Synthetic oligonucleotide
  Antisense strand to SEQ ID NO: 1101144
aucugagacaauaaagaac

SEQ ID NO: 1101146 - RNA, 19 nt, Artificial Sequence
  Description of Artificial Sequence: Synthetic oligonucleotide
  Sense strand starting at position 3255 of SEQ ID NO: 915720
uuuauugucucagauuuac

SEQ ID NO: 1101147 - RNA, 19 nt, Artificial Sequence
  Description of Artificial Sequence: Synthetic oligonucleotide
  Antisense strand to SEQ ID NO: 1101146
guaaaucugagacaauaaa

SEQ ID NO: 1101148 - RNA, 19 nt, Artificial Sequence
  Description of Artificial Sequence: Synthetic oligonucleotide
  Sense strand starting at position 3282 of SEQ ID NO: 915720
gguguauauaaggaguaau

SEQ ID NO: 1101149 - RNA, 19 nt, Artificial Sequence
  Description of Artificial Sequence: Synthetic oligonucleotide
  Antisense strand to SEQ ID NO: 1101148
auuacuccuuauauacacc

SEQ ID NO: 1101150 - RNA, 19 nt, Artificial Sequence
  Description of Artificial Sequence: Synthetic oligonucleotide
  Sense strand starting at position 3349 of SEQ ID NO: 915720
auaucuugaugucacauuu

SEQ ID NO: 1101151 - RNA, 19 nt, Artificial Sequence
  Description of Artificial Sequence: Synthetic oligonucleotide
  Antisense strand to SEQ ID NO: 1101150
aaaugugacaucaagauau

SEQ ID NO: 1101152 - RNA, 19 nt, Artificial Sequence
  Description of Artificial Sequence: Synthetic oligonucleotide
  Sense strand starting at position 3358 of SEQ ID NO: 915720
ugucacauuucuguucuau

SEQ ID NO: 1101153 - RNA, 19 nt, Artificial Sequence
  Description of Artificial Sequence: Synthetic oligonucleotide
  Antisense strand to SEQ ID NO: 1101152
auagaacagaaaugugaca

SEQ ID NO: 1101154 - RNA, 19 nt, Artificial Sequence
  Description of Artificial Sequence: Synthetic oligonucleotide
  Sense strand starting at position 3373 of SEQ ID NO: 915720
cuauucuugcuguaaagau

SEQ ID NO: 1101155 - RNA, 19 nt, Artificial Sequence
  Description of Artificial Sequence: Synthetic oligonucleotide
  Antisense strand to SEQ ID NO: 1101154
aucuuuacagcaagaauag

SEQ ID NO: 1101156 - RNA, 19 nt, Artificial Sequence
  Description of Artificial Sequence: Synthetic oligonucleotide
  Sense strand starting at position 3423 of SEQ ID NO: 915720
uucuucuggcauuaguaau

SEQ ID NO: 1101157 - RNA, 19 nt, Artificial Sequence
  Description of Artificial Sequence: Synthetic oligonucleotide
  Antisense strand to SEQ ID NO: 1101156
auuacuaaugccagaagaa

SEQ ID NO: 1101158 - RNA, 19 nt, Artificial Sequence
  Description of Artificial Sequence: Synthetic oligonucleotide
  Sense strand starting at position 3437 of SEQ ID NO: 915720
guaauaauuauguggcagu

SEQ ID NO: 1101159 - RNA, 19 nt, Artificial Sequence
  Description of Artificial Sequence: Synthetic oligonucleotide
  Antisense strand to SEQ ID NO: 1101158
acugccacauaauuauuac

SEQ ID NO: 1101160 - RNA, 19 nt, Artificial Sequence
  Description of Artificial Sequence: Synthetic oligonucleotide
  Sense strand starting at position 95 of SEQ ID NO: 915721
gguuccugcccauagcaua

SEQ ID NO: 1101161 - RNA, 19 nt, Artificial Sequence
  Description of Artificial Sequence: Synthetic oligonucleotide
  Antisense strand to SEQ ID NO: 1101160
uaugcuaugggcaggaacc

SEQ ID NO: 1101162 - RNA, 19 nt, Artificial Sequence
  Description of Artificial Sequence: Synthetic oligonucleotide
  Sense strand starting at position 171 of SEQ ID NO: 915721
ucuuaaguggucuagaaug

SEQ ID NO: 1101163 - RNA, 19 nt, Artificial Sequence
  Description of Artificial Sequence: Synthetic oligonucleotide
  Antisense strand to SEQ ID NO: 1101162
cauucuagaccacuuaaga

SEQ ID NO: 1101164 - RNA, 19 nt, Artificial Sequence
  Description of Artificial Sequence: Synthetic oligonucleotide
  Sense strand starting at position 176 of SEQ ID NO: 915721
aguggucuagaaugaaaca

SEQ ID NO: 1101165 - RNA, 19 nt, Artificial Sequence
  Description of Artificial Sequence: Synthetic oligonucleotide
  Antisense strand to SEQ ID NO: 1101164
uguuucauucuagaccacu

SEQ ID NO: 1101166 - RNA, 19 nt, Artificial Sequence
  Description of Artificial Sequence: Synthetic oligonucleotide
  Sense strand starting at position 289 of SEQ ID NO: 915721
agagguugcuaugacauau

SEQ ID NO: 1101167 - RNA, 19 nt, Artificial Sequence
  Description of Artificial Sequence: Synthetic oligonucleotide
  Antisense strand to SEQ ID NO: 1101166
auaugucauagcaaccucu

SEQ ID NO: 1101168 - RNA, 19 nt, Artificial Sequence
  Description of Artificial Sequence: Synthetic oligonucleotide
  Sense strand starting at position 481 of SEQ ID NO: 915721
ucuucuuugggcuacucaa

SEQ ID NO: 1101169 - RNA, 19 nt, Artificial Sequence
  Description of Artificial Sequence: Synthetic oligonucleotide
  Antisense strand to SEQ ID NO: 1101168
uugaguagcccaaagaaga

SEQ ID NO: 1101170 - RNA, 19 nt, Artificial Sequence
  Description of Artificial Sequence: Synthetic oligonucleotide
  Sense strand starting at position 569 of SEQ ID NO: 915721
gguuaauuauagguguuga

SEQ ID NO: 1101171 - RNA, 19 nt, Artificial Sequence
  Description of Artificial Sequence: Synthetic oligonucleotide
  Antisense strand to SEQ ID NO: 1101170
ucaacaccuauaauuaacc

SEQ ID NO: 1101172 - RNA, 19 nt, Artificial Sequence
  Description of Artificial Sequence: Synthetic oligonucleotide
  Sense strand starting at position 570 of SEQ ID NO: 915721
guuaauuauagguguugac

SEQ ID NO: 1101173 - RNA, 19 nt, Artificial Sequence
  Description of Artificial Sequence: Synthetic oligonucleotide
  Antisense strand to SEQ ID NO: 1101172
gucaacaccuauaauuaac

SEQ ID NO: 1101174 - RNA, 19 nt, Artificial Sequence
  Description of Artificial Sequence: Synthetic oligonucleotide
  Sense strand starting at position 623 of SEQ ID NO: 915721
aagcaugauuucuggguga

SEQ ID NO: 1101175 - RNA, 19 nt, Artificial Sequence
  Description of Artificial Sequence: Synthetic oligonucleotide
  Antisense strand to SEQ ID NO: 1101174
ucacccagaaaucaugcuu

SEQ ID NO: 1101176 - RNA, 19 nt, Artificial Sequence
  Description of Artificial Sequence: Synthetic oligonucleotide
  Sense strand starting at position 625 of SEQ ID NO: 915721
gcaugauuucugggugagu

SEQ ID NO: 1101177 - RNA, 19 nt, Artificial Sequence
  Description of Artificial Sequence: Synthetic oligonucleotide
  Antisense strand to SEQ ID NO: 1101176
acucacccagaaaucaugc

SEQ ID NO: 1101178 - RNA, 19 nt, Artificial Sequence
  Description of Artificial Sequence: Synthetic oligonucleotide
  Sense strand starting at position 646 of SEQ ID NO: 915721
gugaagguguuuccggaga

SEQ ID NO: 1101179 - RNA, 19 nt, Artificial Sequence
  Description of Artificial Sequence: Synthetic oligonucleotide
  Antisense strand to SEQ ID NO: 1101178
ucuccggaaacaccuucac

SEQ ID NO: 1101180 - RNA, 19 nt, Artificial Sequence
  Description of Artificial Sequence: Synthetic oligonucleotide
  Sense strand starting at position 651 of SEQ ID NO: 915721
gguguuuccggagagucau

SEQ ID NO: 1101181 - RNA, 19 nt, Artificial Sequence
  Description of Artificial Sequence: Synthetic oligonucleotide
  Antisense strand to SEQ ID NO: 1101180
augacucuccggaaacacc

SEQ ID NO: 1101182 - RNA, 19 nt, Artificial Sequence
  Description of Artificial Sequence: Synthetic oligonucleotide
  Sense strand starting at position 652 of SEQ ID NO: 915721
guguuuccggagagucaug

SEQ ID NO: 1101183 - RNA, 19 nt, Artificial Sequence
  Description of Artificial Sequence: Synthetic oligonucleotide
  Antisense strand to SEQ ID NO: 1101182
caugacucuccggaaacac

SEQ ID NO: 1101184 - RNA, 19 nt, Artificial Sequence
  Description of Artificial Sequence: Synthetic oligonucleotide
  Sense strand starting at position 659 of SEQ ID NO: 915721
cggagagucauguaaguug

SEQ ID NO: 1101185 - RNA, 19 nt, Artificial Sequence
  Description of Artificial Sequence: Synthetic oligonucleotide
  Antisense strand to SEQ ID NO: 1101184
caacuuacaugacucuccg

SEQ ID NO: 1101186 - RNA, 19 nt, Artificial Sequence
  Description of Artificial Sequence: Synthetic oligonucleotide
  Sense strand starting at position 961 of SEQ ID NO: 915721
gcguuagacagucucguua

SEQ ID NO: 1101187 - RNA, 19 nt, Artificial Sequence
  Description of Artificial Sequence: Synthetic oligonucleotide
  Antisense strand to SEQ ID NO: 1101186
uaacgagacugucuaacgc

SEQ ID NO: 1101188 - RNA, 19 nt, Artificial Sequence
  Description of Artificial Sequence: Synthetic oligonucleotide
  Sense strand starting at position 1140 of SEQ ID NO: 915721
aguuauaguuauguacaca

SEQ ID NO: 1101189 - RNA, 19 nt, Artificial Sequence
  Description of Artificial Sequence: Synthetic oligonucleotide
  Antisense strand to SEQ ID NO: 1101188
uguguacauaacuauaacu

SEQ ID NO: 1101190 - RNA, 19 nt, Artificial Sequence
  Description of Artificial Sequence: Synthetic oligonucleotide
  Sense strand starting at position 1202 of SEQ ID NO: 915721
uguaaucuuugccuuggca

SEQ ID NO: 1101191 - RNA, 19 nt, Artificial Sequence
  Description of Artificial Sequence: Synthetic oligonucleotide
  Antisense strand to SEQ ID NO: 1101190
ugccaaggcaaagauuaca

SEQ ID NO: 1101192 - RNA, 19 nt, Artificial Sequence
  Description of Artificial Sequence: Synthetic oligonucleotide
  Sense strand starting at position 1204 of SEQ ID NO: 915721
uaaucuuugccuuggcagu

SEQ ID NO: 1101193 - RNA, 19 nt, Artificial Sequence
  Description of Artificial Sequence: Synthetic oligonucleotide
  Antisense strand to SEQ ID NO: 1101192
acugccaaggcaaagauua

SEQ ID NO: 1101194 - RNA, 19 nt, Artificial Sequence
  Description of Artificial Sequence: Synthetic oligonucleotide
  Sense strand starting at position 1263 of SEQ ID NO: 915721
gaauuuaagugccaagagu

SEQ ID NO: 1101195 - RNA, 19 nt, Artificial Sequence
  Description of Artificial Sequence: Synthetic oligonucleotide
  Antisense strand to SEQ ID NO: 1101194
acucuuggcacuuaaauuc

SEQ ID NO: 1101196 - RNA, 19 nt, Artificial Sequence
  Description of Artificial Sequence: Synthetic oligonucleotide
  Sense strand starting at position 1376 of SEQ ID NO: 915721
gacagcuaguaucaaguau

SEQ ID NO: 1101197 - RNA, 19 nt, Artificial Sequence
  Description of Artificial Sequence: Synthetic oligonucleotide
  Antisense strand to SEQ ID NO: 1101196
auacuugauacuagcuguc

SEQ ID NO: 1101198 - RNA, 19 nt, Artificial Sequence
  Description of Artificial Sequence: Synthetic oligonucleotide
  Sense strand starting at position 1762 of SEQ ID NO: 915721
augucauaaccucauguca

SEQ ID NO: 1101199 - RNA, 19 nt, Artificial Sequence
  Description of Artificial Sequence: Synthetic oligonucleotide
  Antisense strand to SEQ ID NO: 1101198
ugacaugagguuaugacau

SEQ ID NO: 1101200 - RNA, 19 nt, Artificial Sequence
  Description of Artificial Sequence: Synthetic oligonucleotide
  Sense strand starting at position 1808 of SEQ ID NO: 915721
caaauaagaucauucggua

SEQ ID NO: 1101201 - RNA, 19 nt, Artificial Sequence
  Description of Artificial Sequence: Synthetic oligonucleotide
  Antisense strand to SEQ ID NO: 1101200
uaccgaaugaucuuauuug

SEQ ID NO: 1101202 - RNA, 19 nt, Artificial Sequence
  Description of Artificial Sequence: Synthetic oligonucleotide
  Sense strand starting at position 1812 of SEQ ID NO: 915721
uaagaucauucgguaaguu

SEQ ID NO: 1101203 - RNA, 19 nt, Artificial Sequence
  Description of Artificial Sequence: Synthetic oligonucleotide
  Antisense strand to SEQ ID NO: 1101202
aacuuaccgaaugaucuua

SEQ ID NO: 1101204 - RNA, 19 nt, Artificial Sequence
  Description of Artificial Sequence: Synthetic oligonucleotide
  Sense strand starting at position 1813 of SEQ ID NO: 915721
aagaucauucgguaaguuu

SEQ ID NO: 1101205 - RNA, 19 nt, Artificial Sequence
  Description of Artificial Sequence: Synthetic oligonucleotide
  Antisense strand to SEQ ID NO: 1101204
aaacuuaccgaaugaucuu

SEQ ID NO: 1101206 - RNA, 19 nt, Artificial Sequence
  Description of Artificial Sequence: Synthetic oligonucleotide
  Sense strand starting at position 1816 of SEQ ID NO: 915721
aucauucgguaaguuuaga

SEQ ID NO: 1101207 - RNA, 19 nt, Artificial Sequence
  Description of Artificial Sequence: Synthetic oligonucleotide
  Antisense strand to SEQ ID NO: 1101206
ucuaaacuuaccgaaugau

SEQ ID NO: 1101208 - RNA, 19 nt, Artificial Sequence
  Description of Artificial Sequence: Synthetic oligonucleotide
  Sense strand starting at position 1989 of SEQ ID NO: 915721
gcucauucccugcagaguu

SEQ ID NO: 1101209 - RNA, 19 nt, Artificial Sequence
  Description of Artificial Sequence: Synthetic oligonucleotide
  Antisense strand to SEQ ID NO: 1101208
aacucugcagggaaugagc

SEQ ID NO: 1101210 - RNA, 19 nt, Artificial Sequence
  Description of Artificial Sequence: Synthetic oligonucleotide
  Sense strand starting at position 2017 of SEQ ID NO: 915721
aggucaucacuugaaugca

SEQ ID NO: 1101211 - RNA, 19 nt, Artificial Sequence
  Description of Artificial Sequence: Synthetic oligonucleotide
  Antisense strand to SEQ ID NO: 1101210
ugcauucaagugaugaccu

SEQ ID NO: 1101212 - RNA, 19 nt, Artificial Sequence
  Description of Artificial Sequence: Synthetic oligonucleotide
  Sense strand starting at position 2095 of SEQ ID NO: 915721
uuaggugaaucuuugaaga

SEQ ID NO: 1101213 - RNA, 19 nt, Artificial Sequence
  Description of Artificial Sequence: Synthetic oligonucleotide
  Antisense strand to SEQ ID NO: 1101212
ucuucaaagauucaccuaa

SEQ ID NO: 1101214 - RNA, 19 nt, Artificial Sequence
  Description of Artificial Sequence: Synthetic oligonucleotide
  Sense strand starting at position 2120 of SEQ ID NO: 915721
ccaccuauuuagugauauu

SEQ ID NO: 1101215 - RNA, 19 nt, Artificial Sequence
  Description of Artificial Sequence: Synthetic oligonucleotide
  Antisense strand to SEQ ID NO: 1101214
aauaucacuaaauaggugg

SEQ ID NO: 1101216 - RNA, 19 nt, Artificial Sequence
  Description of Artificial Sequence: Synthetic oligonucleotide
  Sense strand starting at position 2296 of SEQ ID NO: 915721
gcuagaaauuaacuaaguu

SEQ ID NO: 1101217 - RNA, 19 nt, Artificial Sequence
  Description of Artificial Sequence: Synthetic oligonucleotide
  Antisense strand to SEQ ID NO: 1101216
aacuuaguuaauuucuagc

SEQ ID NO: 1101218 - RNA, 19 nt, Artificial Sequence
  Description of Artificial Sequence: Synthetic oligonucleotide
  Sense strand starting at position 2314 of SEQ ID NO: 915721
ugauuaaacuguuucuuga

SEQ ID NO: 1101219 - RNA, 19 nt, Artificial Sequence
  Description of Artificial Sequence: Synthetic oligonucleotide
  Antisense strand to SEQ ID NO: 1101218
ucaagaaacaguuuaauca

SEQ ID NO: 1101220 - RNA, 19 nt, Artificial Sequence
  Description of Artificial Sequence: Synthetic oligonucleotide
  Sense strand starting at position 2316 of SEQ ID NO: 915721
auuaaacuguuucuugagu

SEQ ID NO: 1101221 - RNA, 19 nt, Artificial Sequence
  Description of Artificial Sequence: Synthetic oligonucleotide
  Antisense strand to SEQ ID NO: 1101220
acucaagaaacaguuuaau

SEQ ID NO: 1101222 - RNA, 19 nt, Artificial Sequence
  Description of Artificial Sequence: Synthetic oligonucleotide
  Sense strand starting at position 2317 of SEQ ID NO: 915721
uuaaacuguuucuugaguu

SEQ ID NO: 1101223 - RNA, 19 nt, Artificial Sequence
  Description of Artificial Sequence: Synthetic oligonucleotide
  Antisense strand to SEQ ID NO: 1101222
aacucaagaaacaguuuaa

SEQ ID NO: 1101224 - RNA, 19 nt, Artificial Sequence
  Description of Artificial Sequence: Synthetic oligonucleotide
  Sense strand starting at position 2744 of SEQ ID NO: 915721
ugguaaaucucuuuacugu

SEQ ID NO: 1101225 - RNA, 19 nt, Artificial Sequence
  Description of Artificial Sequence: Synthetic oligonucleotide
  Antisense strand to SEQ ID NO: 1101224
acaguaaagagauuuacca

SEQ ID NO: 1101226 - RNA, 19 nt, Artificial Sequence
  Description of Artificial Sequence: Synthetic oligonucleotide
  Sense strand starting at position 2745 of SEQ ID NO: 915721
gguaaaucucuuuacugug

SEQ ID NO: 1101227 - RNA, 19 nt, Artificial Sequence
  Description of Artificial Sequence: Synthetic oligonucleotide
  Antisense strand to SEQ ID NO: 1101226
cacaguaaagagauuuacc

SEQ ID NO: 1101228 - RNA, 19 nt, Artificial Sequence
  Description of Artificial Sequence: Synthetic oligonucleotide
  Sense strand starting at position 2925 of SEQ ID NO: 915721
ggagaacauuaguagaaug

SEQ ID NO: 1101229 - RNA, 19 nt, Artificial Sequence
  Description of Artificial Sequence: Synthetic oligonucleotide
  Antisense strand to SEQ ID NO: 1101228
cauucuacuaauguucucc

SEQ ID NO: 1101230 - RNA, 19 nt, Artificial Sequence
  Description of Artificial Sequence: Synthetic oligonucleotide
  Sense strand starting at position 3123 of SEQ ID NO: 915721
ugugccacucuggaagaau

SEQ ID NO: 1101231 - RNA, 19 nt, Artificial Sequence
  Description of Artificial Sequence: Synthetic oligonucleotide
  Antisense strand to SEQ ID NO: 1101230
auucuuccagaguggcaca

SEQ ID NO: 1101232 - RNA, 19 nt, Artificial Sequence
  Description of Artificial Sequence: Synthetic oligonucleotide
  Sense strand starting at position 3214 of SEQ ID NO: 915721
aggugaauaucuuucucca

SEQ ID NO: 1101233 - RNA, 19 nt, Artificial Sequence
  Description of Artificial Sequence: Synthetic oligonucleotide
  Antisense strand to SEQ ID NO: 1101232
uggagaaagauauucaccu

SEQ ID NO: 1101234 - RNA, 19 nt, Artificial Sequence
  Description of Artificial Sequence: Synthetic oligonucleotide
  Sense strand starting at position 3386 of SEQ ID NO: 915721
uggaaucuauuuggaaaug

SEQ ID NO: 1101235 - RNA, 19 nt, Artificial Sequence
  Description of Artificial Sequence: Synthetic oligonucleotide
  Antisense strand to SEQ ID NO: 1101234
cauuuccaaauagauucca

SEQ ID NO: 1101236 - RNA, 19 nt, Artificial Sequence
  Description of Artificial Sequence: Synthetic oligonucleotide
  Sense strand starting at position 3607 of SEQ ID NO: 915721
aaugaaaugugauggagaa

SEQ ID NO: 1101237 - RNA, 19 nt, Artificial Sequence
  Description of Artificial Sequence: Synthetic oligonucleotide
  Antisense strand to SEQ ID NO: 1101236
uucuccaucacauuucauu

SEQ ID NO: 1101238 - RNA, 19 nt, Artificial Sequence
  Description of Artificial Sequence: Synthetic oligonucleotide
  Sense strand starting at position 3620 of SEQ ID NO: 915721
ggagaagugcaauauaguu

SEQ ID NO: 1101239 - RNA, 19 nt, Artificial Sequence
  Description of Artificial Sequence: Synthetic oligonucleotide
  Antisense strand to SEQ ID NO: 1101238
aacuauauugcacuucucc

SEQ ID NO: 1101240 - RNA, 19 nt, Artificial Sequence
  Description of Artificial Sequence: Synthetic oligonucleotide
  Sense strand starting at position 127 of SEQ ID NO: 915722
uaaugaggcuacuugagua

SEQ ID NO: 1101241 - RNA, 19 nt, Artificial Sequence
  Description of Artificial Sequence: Synthetic oligonucleotide
  Antisense strand to SEQ ID NO: 1101240
uacucaaguagccucauua

SEQ ID NO: 1101242 - RNA, 19 nt, Artificial Sequence
  Description of Artificial Sequence: Synthetic oligonucleotide
  Sense strand starting at position 132 of SEQ ID NO: 915722
aggcuacuugaguauguaa

SEQ ID NO: 1101243 - RNA, 19 nt, Artificial Sequence
  Description of Artificial Sequence: Synthetic oligonucleotide
  Antisense strand to SEQ ID NO: 1101242
uuacauacucaaguagccu

SEQ ID NO: 1101244 - RNA, 19 nt, Artificial Sequence
  Description of Artificial Sequence: Synthetic oligonucleotide
  Sense strand starting at position 135 of SEQ ID NO: 915722
cuacuugaguauguaacau

SEQ ID NO: 1101245 - RNA, 19 nt, Artificial Sequence
  Description of Artificial Sequence: Synthetic oligonucleotide
  Antisense strand to SEQ ID NO: 1101244
auguuacauacucaaguag

SEQ ID NO: 1101246 - RNA, 19 nt, Artificial Sequence
  Description of Artificial Sequence: Synthetic oligonucleotide
  Sense strand starting at position 270 of SEQ ID NO: 915722
aaagauuuguaagaguuga

SEQ ID NO: 1101247 - RNA, 19 nt, Artificial Sequence
  Description of Artificial Sequence: Synthetic oligonucleotide
  Antisense strand to SEQ ID NO: 1101246
ucaacucuuacaaaucuuu

SEQ ID NO: 1101248 - RNA, 19 nt, Artificial Sequence
  Description of Artificial Sequence: Synthetic oligonucleotide
  Sense strand starting at position 300 of SEQ ID NO: 915722
aaagcugaggcuugggaaa

SEQ ID NO: 1101249 - RNA, 19 nt, Artificial Sequence
  Description of Artificial Sequence: Synthetic oligonucleotide
  Antisense strand to SEQ ID NO: 1101248
uuucccaagccucagcuuu

SEQ ID NO: 1101250 - RNA, 19 nt, Artificial Sequence
  Description of Artificial Sequence: Synthetic oligonucleotide
  Sense strand starting at position 335 of SEQ ID NO: 915722
ggagcauacaguuagcaua

SEQ ID NO: 1101251 - RNA, 19 nt, Artificial Sequence
  Description of Artificial Sequence: Synthetic oligonucleotide
  Antisense strand to SEQ ID NO: 1101250
uaugcuaacuguaugcucc

SEQ ID NO: 1101252 - RNA, 19 nt, Artificial Sequence
  Description of Artificial Sequence: Synthetic oligonucleotide
  Sense strand starting at position 534 of SEQ ID NO: 915722
agcccagugcaucaaauua

SEQ ID NO: 1101253 - RNA, 19 nt, Artificial Sequence
  Description of Artificial Sequence: Synthetic oligonucleotide
  Antisense strand to SEQ ID NO: 1101252
uaauuugaugcacugggcu

SEQ ID NO: 1101254 - RNA, 19 nt, Artificial Sequence
  Description of Artificial Sequence: Synthetic oligonucleotide
  Sense strand starting at position 648 of SEQ ID NO: 915722
cuuggaguucuuuaugcag

SEQ ID NO: 1101255 - RNA, 19 nt, Artificial Sequence
  Description of Artificial Sequence: Synthetic oligonucleotide
  Antisense strand to SEQ ID NO: 1101254
cugcauaaagaacuccaag

SEQ ID NO: 1101256 - RNA, 19 nt, Artificial Sequence
  Description of Artificial Sequence: Synthetic oligonucleotide
  Sense strand starting at position 651 of SEQ ID NO: 915722
ggaguucuuuaugcagaau

SEQ ID NO: 1101257 - RNA, 19 nt, Artificial Sequence
  Description of Artificial Sequence: Synthetic oligonucleotide
  Antisense strand to SEQ ID NO: 1101256
auucugcauaaagaacucc

SEQ ID NO: 1101258 - RNA, 19 nt, Artificial Sequence
  Description of Artificial Sequence: Synthetic oligonucleotide
  Sense strand starting at position 668 of SEQ ID NO: 915722
aucucagucuuuccuggaa

SEQ ID NO: 1101259 - RNA, 19 nt, Artificial Sequence
  Description of Artificial Sequence: Synthetic oligonucleotide
  Antisense strand to SEQ ID NO: 1101258
uuccaggaaagacugagau

SEQ ID NO: 1101260 - RNA, 19 nt, Artificial Sequence
  Description of Artificial Sequence: Synthetic oligonucleotide
  Sense strand starting at position 671 of SEQ ID NO: 915722
ucagucuuuccuggaauga

SEQ ID NO: 1101261 - RNA, 19 nt, Artificial Sequence
  Description of Artificial Sequence: Synthetic oligonucleotide
  Antisense strand to SEQ ID NO: 1101260
ucauuccaggaaagacuga

SEQ ID NO: 1101262 - RNA, 19 nt, Artificial Sequence
  Description of Artificial Sequence: Synthetic oligonucleotide
  Sense strand starting at position 708 of SEQ ID NO: 915722
auauuaaaguucucuaggu

SEQ ID NO: 1101263 - RNA, 19 nt, Artificial Sequence
  Description of Artificial Sequence: Synthetic oligonucleotide
  Antisense strand to SEQ ID NO: 1101262
accuagagaacuuuaauau

SEQ ID NO: 1101264 - RNA, 19 nt, Artificial Sequence
  Description of Artificial Sequence: Synthetic oligonucleotide
  Sense strand starting at position 709 of SEQ ID NO: 915722
uauuaaaguucucuaggug

SEQ ID NO: 1101265 - RNA, 19 nt, Artificial Sequence
  Description of Artificial Sequence: Synthetic oligonucleotide
  Antisense strand to SEQ ID NO: 1101264
caccuagagaacuuuaaua

SEQ ID NO: 1101266 - RNA, 19 nt, Artificial Sequence
  Description of Artificial Sequence: Synthetic oligonucleotide
  Sense strand starting at position 710 of SEQ ID NO: 915722
auuaaaguucucuagguga

SEQ ID NO: 1101267 - RNA, 19 nt, Artificial Sequence
  Description of Artificial Sequence: Synthetic oligonucleotide
  Antisense strand to SEQ ID NO: 1101266
ucaccuagagaacuuuaau

SEQ ID NO: 1101268 - RNA, 19 nt, Artificial Sequence
  Description of Artificial Sequence: Synthetic oligonucleotide
  Sense strand starting at position 1007 of SEQ ID NO: 915722
ccuagugaaaguggaauaa

SEQ ID NO: 1101269 - RNA, 19 nt, Artificial Sequence
  Description of Artificial Sequence: Synthetic oligonucleotide
  Antisense strand to SEQ ID NO: 1101268
uuauuccacuuucacuagg

SEQ ID NO: 1101270 - RNA, 19 nt, Artificial Sequence
  Description of Artificial Sequence: Synthetic oligonucleotide
  Sense strand starting at position 1038 of SEQ ID NO: 915722
uugcauuuauaagugaguu

SEQ ID NO: 1101271 - RNA, 19 nt, Artificial Sequence
  Description of Artificial Sequence: Synthetic oligonucleotide
  Antisense strand to SEQ ID NO: 1101270
aacucacuuauaaaugcaa

SEQ ID NO: 1101272 - RNA, 19 nt, Artificial Sequence
  Description of Artificial Sequence: Synthetic oligonucleotide
  Sense strand starting at position 1048 of SEQ ID NO: 915722
aagugaguugggcaugagu

SEQ ID NO: 1101273 - RNA, 19 nt, Artificial Sequence
  Description of Artificial Sequence: Synthetic oligonucleotide
  Antisense strand to SEQ ID NO: 1101272
acucaugcccaacucacuu

SEQ ID NO: 1101274 - RNA, 19 nt, Artificial Sequence
  Description of Artificial Sequence: Synthetic oligonucleotide
  Sense strand starting at position 1065 of SEQ ID NO: 915722
guucuugcacuuuaggaau

SEQ ID NO: 1101275 - RNA, 19 nt, Artificial Sequence
  Description of Artificial Sequence: Synthetic oligonucleotide
  Antisense strand to SEQ ID NO: 1101274
auuccuaaagugcaagaac

SEQ ID NO: 1101276 - RNA, 19 nt, Artificial Sequence
  Description of Artificial Sequence: Synthetic oligonucleotide
  Sense strand starting at position 1131 of SEQ ID NO: 915722
gcaauugauuaucuaacag

SEQ ID NO: 1101277 - RNA, 19 nt, Artificial Sequence
  Description of Artificial Sequence: Synthetic oligonucleotide
  Antisense strand to SEQ ID NO: 1101276
cuguuagauaaucaauugc

SEQ ID NO: 1101278 - RNA, 19 nt, Artificial Sequence
  Description of Artificial Sequence: Synthetic oligonucleotide
  Sense strand starting at position 1168 of SEQ ID NO: 915722
auuggaacauaaucaguuu

SEQ ID NO: 1101279 - RNA, 19 nt, Artificial Sequence
  Description of Artificial Sequence: Synthetic oligonucleotide
  Antisense strand to SEQ ID NO: 1101278
aaacugauuauguuccaau

SEQ ID NO: 1101280 - RNA, 19 nt, Artificial Sequence
  Description of Artificial Sequence: Synthetic oligonucleotide
  Sense strand starting at position 1295 of SEQ ID NO: 915722
ggaguuugccaguaauaau

SEQ ID NO: 1101281 - RNA, 19 nt, Artificial Sequence
  Description of Artificial Sequence: Synthetic oligonucleotide
  Antisense strand to SEQ ID NO: 1101280
auuauuacuggcaaacucc

SEQ ID NO: 1101282 - RNA, 19 nt, Artificial Sequence
  Description of Artificial Sequence: Synthetic oligonucleotide
  Sense strand starting at position 1473 of SEQ ID NO: 915722
gucugucagagucaggauu

SEQ ID NO: 1101283 - RNA, 19 nt, Artificial Sequence
  Description of Artificial Sequence: Synthetic oligonucleotide
  Antisense strand to SEQ ID NO: 1101282
aauccugacucugacagac

SEQ ID NO: 1101284 - RNA, 19 nt, Artificial Sequence
  Description of Artificial Sequence: Synthetic oligonucleotide
  Sense strand starting at position 1543 of SEQ ID NO: 915722
gucucuauugacugacuga

SEQ ID NO: 1101285 - RNA, 19 nt, Artificial Sequence
  Description of Artificial Sequence: Synthetic oligonucleotide
  Antisense strand to SEQ ID NO: 1101284
ucagucagucaauagagac

SEQ ID NO: 1101286 - RNA, 19 nt, Artificial Sequence
  Description of Artificial Sequence: Synthetic oligonucleotide
  Sense strand starting at position 1546 of SEQ ID NO: 915722
ucuauugacugacugauua

SEQ ID NO: 1101287 - RNA, 19 nt, Artificial Sequence
  Description of Artificial Sequence: Synthetic oligonucleotide
  Antisense strand to SEQ ID NO: 1101286
uaaucagucagucaauaga

SEQ ID NO: 1101288 - RNA, 19 nt, Artificial Sequence
  Description of Artificial Sequence: Synthetic oligonucleotide
  Sense strand starting at position 1617 of SEQ ID NO: 915722
aagauauaaugaguuccga

SEQ ID NO: 1101289 - RNA, 19 nt, Artificial Sequence
  Description of Artificial Sequence: Synthetic oligonucleotide
  Antisense strand to SEQ ID NO: 1101288
ucggaacucauuauaucuu

SEQ ID NO: 1101290 - RNA, 19 nt, Artificial Sequence
  Description of Artificial Sequence: Synthetic oligonucleotide
  Sense strand starting at position 1669 of SEQ ID NO: 915722
ucaccucugccagaaguga

SEQ ID NO: 1101291 - RNA, 19 nt, Artificial Sequence
  Description of Artificial Sequence: Synthetic oligonucleotide
  Antisense strand to SEQ ID NO: 1101290
ucacuucuggcagagguga

SEQ ID NO: 1101292 - RNA, 19 nt, Artificial Sequence
  Description of Artificial Sequence: Synthetic oligonucleotide
  Sense strand starting at position 2139 of SEQ ID NO: 915722
aagggaugcugacucugaa

SEQ ID NO: 1101293 - RNA, 19 nt, Artificial Sequence
  Description of Artificial Sequence: Synthetic oligonucleotide
  Antisense strand to SEQ ID NO: 1101292
uucagagucagcaucccuu

SEQ ID NO: 1101294 - RNA, 19 nt, Artificial Sequence
  Description of Artificial Sequence: Synthetic oligonucleotide
  Sense strand starting at position 2154 of SEQ ID NO: 915722
ugaauccacgccugacaaa

SEQ ID NO: 1101295 - RNA, 19 nt, Artificial Sequence
  Description of Artificial Sequence: Synthetic oligonucleotide
  Antisense strand to SEQ ID NO: 1101294
uuugucaggcguggauuca

SEQ ID NO: 1101296 - RNA, 19 nt, Artificial Sequence
  Description of Artificial Sequence: Synthetic oligonucleotide
  Sense strand starting at position 2230 of SEQ ID NO: 915722
gcuuguagaauagagguuu

SEQ ID NO: 1101297 - RNA, 19 nt, Artificial Sequence
  Description of Artificial Sequence: Synthetic oligonucleotide
  Antisense strand to SEQ ID NO: 1101296
aaaccucuauucuacaagc

SEQ ID NO: 1101298 - RNA, 19 nt, Artificial Sequence
  Description of Artificial Sequence: Synthetic oligonucleotide
  Sense strand starting at position 2390 of SEQ ID NO: 915722
gggucaaacucuccagaca

SEQ ID NO: 1101299 - RNA, 19 nt, Artificial Sequence
  Description of Artificial Sequence: Synthetic oligonucleotide
  Antisense strand to SEQ ID NO: 1101298
ugucuggagaguuugaccc

SEQ ID NO: 1101300 - RNA, 19 nt, Artificial Sequence
  Description of Artificial Sequence: Synthetic oligonucleotide
  Sense strand starting at position 2997 of SEQ ID NO: 915722
agagaugacccuuguaaau

SEQ ID NO: 1101301 - RNA, 19 nt, Artificial Sequence
  Description of Artificial Sequence: Synthetic oligonucleotide
  Antisense strand to SEQ ID NO: 1101300
auuuacaagggucaucucu

SEQ ID NO: 1101302 - RNA, 19 nt, Artificial Sequence
  Description of Artificial Sequence: Synthetic oligonucleotide
  Sense strand starting at position 3166 of SEQ ID NO: 915722
uugccaaacgaucauuaaa

SEQ ID NO: 1101303 - RNA, 19 nt, Artificial Sequence
  Description of Artificial Sequence: Synthetic oligonucleotide
  Antisense strand to SEQ ID NO: 1101302
uuuaaugaucguuuggcaa

SEQ ID NO: 1101304 - RNA, 19 nt, Artificial Sequence
  Description of Artificial Sequence: Synthetic oligonucleotide
  Sense strand starting at position 3278 of SEQ ID NO: 915722
uuauuuaggucugaugaau

SEQ ID NO: 1101305 - RNA, 19 nt, Artificial Sequence
  Description of Artificial Sequence: Synthetic oligonucleotide
  Antisense strand to SEQ ID NO: 1101304
auucaucagaccuaaauaa

SEQ ID NO: 1101306 - RNA, 19 nt, Artificial Sequence
  Description of Artificial Sequence: Synthetic oligonucleotide
  Sense strand starting at position 3307 of SEQ ID NO: 915722
cuuauugagccucagaacu

SEQ ID NO: 1101307 - RNA, 19 nt, Artificial Sequence
  Description of Artificial Sequence: Synthetic oligonucleotide
  Antisense strand to SEQ ID NO: 1101306
aguucugaggcucaauaag

SEQ ID NO: 1101308 - RNA, 19 nt, Artificial Sequence
  Description of Artificial Sequence: Synthetic oligonucleotide
  Sense strand starting at position 3393 of SEQ ID NO: 915722
gagacugauuaggugagua

SEQ ID NO: 1101309 - RNA, 19 nt, Artificial Sequence
  Description of Artificial Sequence: Synthetic oligonucleotide
  Antisense strand to SEQ ID NO: 1101308
uacucaccuaaucagucuc

SEQ ID NO: 1101310 - RNA, 19 nt, Artificial Sequence
  Description of Artificial Sequence: Synthetic oligonucleotide
  Sense strand starting at position 3395 of SEQ ID NO: 915722
gacugauuaggugaguauc

SEQ ID NO: 1101311 - RNA, 19 nt, Artificial Sequence
  Description of Artificial Sequence: Synthetic oligonucleotide
  Antisense strand to SEQ ID NO: 1101310
gauacucaccuaaucaguc

SEQ ID NO: 1101312 - RNA, 19 nt, Artificial Sequence
  Description of Artificial Sequence: Synthetic oligonucleotide
  Sense strand starting at position 3508 of SEQ ID NO: 915722
ggagagagcuggguuaagu

SEQ ID NO: 1101313 - RNA, 19 nt, Artificial Sequence
  Description of Artificial Sequence: Synthetic oligonucleotide
  Antisense strand to SEQ ID NO: 1101312
acuuaacccagcucucucc

SEQ ID NO: 1101314 - RNA, 19 nt, Artificial Sequence
  Description of Artificial Sequence: Synthetic oligonucleotide
  Sense strand starting at position 3554 of SEQ ID NO: 915722
aggcaaaugaaaggucauu

SEQ ID NO: 1101315 - RNA, 19 nt, Artificial Sequence
  Description of Artificial Sequence: Synthetic oligonucleotide
  Antisense strand to SEQ ID NO: 1101314
aaugaccuuucauuugccu

SEQ ID NO: 1101316 - RNA, 19 nt, Artificial Sequence
  Description of Artificial Sequence: Synthetic oligonucleotide
  Sense strand starting at position 3934 of SEQ ID NO: 915722
agcugauauaaauggaagu

SEQ ID NO: 1101317 - RNA, 19 nt, Artificial Sequence
  Description of Artificial Sequence: Synthetic oligonucleotide
  Antisense strand to SEQ ID NO: 1101316
acuuccauuuauaucagcu

SEQ ID NO: 1101318 - RNA, 19 nt, Artificial Sequence
  Description of Artificial Sequence: Synthetic oligonucleotide
  Sense strand starting at position 3935 of SEQ ID NO: 915722
gcugauauaaauggaagua

SEQ ID NO: 1101319 - RNA, 19 nt, Artificial Sequence
  Description of Artificial Sequence: Synthetic oligonucleotide
  Antisense strand to SEQ ID NO: 1101318
uacuuccauuuauaucagc

SEQ ID NO: 1101320 - RNA, 19 nt, Artificial Sequence
  Description of Artificial Sequence: Synthetic oligonucleotide
  Sense strand starting at position 114 of SEQ ID NO: 915723
cuuggaguucuuuaugcag

SEQ ID NO: 1101321 - RNA, 19 nt, Artificial Sequence
  Description of Artificial Sequence: Synthetic oligonucleotide
  Antisense strand to SEQ ID NO: 1101320
cugcauaaagaacuccaag

SEQ ID NO: 1101322 - RNA, 19 nt, Artificial Sequence
  Description of Artificial Sequence: Synthetic oligonucleotide
  Sense strand starting at position 117 of SEQ ID NO: 915723
ggaguucuuuaugcagaau

SEQ ID NO: 1101323 - RNA, 19 nt, Artificial Sequence
  Description of Artificial Sequence: Synthetic oligonucleotide
  Antisense strand to SEQ ID NO: 1101322
auucugcauaaagaacucc

SEQ ID NO: 1101324 - RNA, 19 nt, Artificial Sequence
  Description of Artificial Sequence: Synthetic oligonucleotide
  Sense strand starting at position 134 of SEQ ID NO: 915723
aucucagucuuuccuggaa

SEQ ID NO: 1101325 - RNA, 19 nt, Artificial Sequence
  Description of Artificial Sequence: Synthetic oligonucleotide
  Antisense strand to SEQ ID NO: 1101324
uuccaggaaagacugagau

SEQ ID NO: 1101326 - RNA, 19 nt, Artificial Sequence
  Description of Artificial Sequence: Synthetic oligonucleotide
  Sense strand starting at position 137 of SEQ ID NO: 915723
ucagucuuuccuggaauga

SEQ ID NO: 1101327 - RNA, 19 nt, Artificial Sequence
  Description of Artificial Sequence: Synthetic oligonucleotide
  Antisense strand to SEQ ID NO: 1101326
ucauuccaggaaagacuga

SEQ ID NO: 1101328 - RNA, 19 nt, Artificial Sequence
  Description of Artificial Sequence: Synthetic oligonucleotide
  Sense strand starting at position 174 of SEQ ID NO: 915723
auauuaaaguucucuaggu

SEQ ID NO: 1101329 - RNA, 19 nt, Artificial Sequence
  Description of Artificial Sequence: Synthetic oligonucleotide
  Antisense strand to SEQ ID NO: 1101328
accuagagaacuuuaauau

SEQ ID NO: 1101330 - RNA, 19 nt, Artificial Sequence
  Description of Artificial Sequence: Synthetic oligonucleotide
  Sense strand starting at position 175 of SEQ ID NO: 915723
uauuaaaguucucuaggug

SEQ ID NO: 1101331 - RNA, 19 nt, Artificial Sequence
  Description of Artificial Sequence: Synthetic oligonucleotide
  Antisense strand to SEQ ID NO: 1101330
caccuagagaacuuuaaua

SEQ ID NO: 1101332 - RNA, 19 nt, Artificial Sequence
  Description of Artificial Sequence: Synthetic oligonucleotide
  Sense strand starting at position 176 of SEQ ID NO: 915723
auuaaaguucucuagguga

SEQ ID NO: 1101333 - RNA, 19 nt, Artificial Sequence
  Description of Artificial Sequence: Synthetic oligonucleotide
  Antisense strand to SEQ ID NO: 1101332
ucaccuagagaacuuuaau

SEQ ID NO: 1101334 - RNA, 19 nt, Artificial Sequence
  Description of Artificial Sequence: Synthetic oligonucleotide
  Sense strand starting at position 473 of SEQ ID NO: 915723
ccuagugaaaguggaauaa

SEQ ID NO: 1101335 - RNA, 19 nt, Artificial Sequence
  Description of Artificial Sequence: Synthetic oligonucleotide
  Antisense strand to SEQ ID NO: 1101334
uuauuccacuuucacuagg

SEQ ID NO: 1101336 - RNA, 19 nt, Artificial Sequence
  Description of Artificial Sequence: Synthetic oligonucleotide
  Sense strand starting at position 504 of SEQ ID NO: 915723
uugcauuuauaagugaguu

SEQ ID NO: 1101337 - RNA, 19 nt, Artificial Sequence
  Description of Artificial Sequence: Synthetic oligonucleotide
  Antisense strand to SEQ ID NO: 1101336
aacucacuuauaaaugcaa

SEQ ID NO: 1101338 - RNA, 19 nt, Artificial Sequence
  Description of Artificial Sequence: Synthetic oligonucleotide
  Sense strand starting at position 514 of SEQ ID NO: 915723
aagugaguugggcaugagu

SEQ ID NO: 1101339 - RNA, 19 nt, Artificial Sequence
  Description of Artificial Sequence: Synthetic oligonucleotide
  Antisense strand to SEQ ID NO: 1101338
acucaugcccaacucacuu

SEQ ID NO: 1101340 - RNA, 19 nt, Artificial Sequence
  Description of Artificial Sequence: Synthetic oligonucleotide
  Sense strand starting at position 531 of SEQ ID NO: 915723
guucuugcacuuuaggaau

SEQ ID NO: 1101341 - RNA, 19 nt, Artificial Sequence
  Description of Artificial Sequence: Synthetic oligonucleotide
  Antisense strand to SEQ ID NO: 1101340
auuccuaaagugcaagaac

SEQ ID NO: 1101342 - RNA, 19 nt, Artificial Sequence
  Description of Artificial Sequence: Synthetic oligonucleotide
  Sense strand starting at position 597 of SEQ ID NO: 915723
gcaauugauuaucuaacag

SEQ ID NO: 1101343 - RNA, 19 nt, Artificial Sequence
  Description of Artificial Sequence: Synthetic oligonucleotide
  Antisense strand to SEQ ID NO: 1101342
cuguuagauaaucaauugc

SEQ ID NO: 1101344 - RNA, 19 nt, Artificial Sequence
  Description of Artificial Sequence: Synthetic oligonucleotide
  Sense strand starting at position 634 of SEQ ID NO: 915723
auuggaacauaaucaguuu

SEQ ID NO: 1101345 - RNA, 19 nt, Artificial Sequence
  Description of Artificial Sequence: Synthetic oligonucleotide
  Antisense strand to SEQ ID NO: 1101344
aaacugauuauguuccaau

SEQ ID NO: 1101346 - RNA, 19 nt, Artificial Sequence
  Description of Artificial Sequence: Synthetic oligonucleotide
  Sense strand starting at position 761 of SEQ ID NO: 915723
ggaguuugccaguaauaau

SEQ ID NO: 1101347 - RNA, 19 nt, Artificial Sequence
  Description of Artificial Sequence: Synthetic oligonucleotide
  Antisense strand to SEQ ID NO: 1101346
auuauuacuggcaaacucc

SEQ ID NO: 1101348 - RNA, 19 nt, Artificial Sequence
  Description of Artificial Sequence: Synthetic oligonucleotide
  Sense strand starting at position 939 of SEQ ID NO: 915723
gucugucagagucaggauu

SEQ ID NO: 1101349 - RNA, 19 nt, Artificial Sequence
  Description of Artificial Sequence: Synthetic oligonucleotide
  Antisense strand to SEQ ID NO: 1101348
aauccugacucugacagac

SEQ ID NO: 1101350 - RNA, 19 nt, Artificial Sequence
  Description of Artificial Sequence: Synthetic oligonucleotide
  Sense strand starting at position 1009 of SEQ ID NO: 915723
gucucuauugacugacuga

SEQ ID NO: 1101351 - RNA, 19 nt, Artificial Sequence
  Description of Artificial Sequence: Synthetic oligonucleotide
  Antisense strand to SEQ ID NO: 1101350
ucagucagucaauagagac

SEQ ID NO: 1101352 - RNA, 19 nt, Artificial Sequence
  Description of Artificial Sequence: Synthetic oligonucleotide
  Sense strand starting at position 1012 of SEQ ID NO: 915723
ucuauugacugacugauua

SEQ ID NO: 1101353 - RNA, 19 nt, Artificial Sequence
  Description of Artificial Sequence: Synthetic oligonucleotide
  Antisense strand to SEQ ID NO: 1101352
uaaucagucagucaauaga

SEQ ID NO: 1101354 - RNA, 19 nt, Artificial Sequence
  Description of Artificial Sequence: Synthetic oligonucleotide
  Sense strand starting at position 1083 of SEQ ID NO: 915723
aagauauaaugaguuccga

SEQ ID NO: 1101355 - RNA, 19 nt, Artificial Sequence
  Description of Artificial Sequence: Synthetic oligonucleotide
  Antisense strand to SEQ ID NO: 1101354
ucggaacucauuauaucuu

SEQ ID NO: 1101356 - RNA, 19 nt, Artificial Sequence
  Description of Artificial Sequence: Synthetic oligonucleotide
  Sense strand starting at position 1135 of SEQ ID NO: 915723
ucaccucugccagaaguga

SEQ ID NO: 1101357 - RNA, 19 nt, Artificial Sequence
  Description of Artificial Sequence: Synthetic oligonucleotide
  Antisense strand to SEQ ID NO: 1101356
ucacuucuggcagagguga

SEQ ID NO: 1101358 - RNA, 19 nt, Artificial Sequence
  Description of Artificial Sequence: Synthetic oligonucleotide
  Sense strand starting at position 1605 of SEQ ID NO: 915723
aagggaugcugacucugaa

SEQ ID NO: 1101359 - RNA, 19 nt, Artificial Sequence
  Description of Artificial Sequence: Synthetic oligonucleotide
  Antisense strand to SEQ ID NO: 1101358
uucagagucagcaucccuu

SEQ ID NO: 1101360 - RNA, 19 nt, Artificial Sequence
  Description of Artificial Sequence: Synthetic oligonucleotide
  Sense strand starting at position 1620 of SEQ ID NO: 915723
ugaauccacgccugacaaa

SEQ ID NO: 1101361 - RNA, 19 nt, Artificial Sequence
  Description of Artificial Sequence: Synthetic oligonucleotide
  Antisense strand to SEQ ID NO: 1101360
uuugucaggcguggauuca

SEQ ID NO: 1101362 - RNA, 19 nt, Artificial Sequence
  Description of Artificial Sequence: Synthetic oligonucleotide
  Sense strand starting at position 1696 of SEQ ID NO: 915723
gcuuguagaauagagguuu

SEQ ID NO: 1101363 - RNA, 19 nt, Artificial Sequence
  Description of Artificial Sequence: Synthetic oligonucleotide
  Antisense strand to SEQ ID NO: 1101362
aaaccucuauucuacaagc

SEQ ID NO: 1101364 - RNA, 19 nt, Artificial Sequence
  Description of Artificial Sequence: Synthetic oligonucleotide
  Sense strand starting at position 1856 of SEQ ID NO: 915723
gggucaaacucuccagaca

SEQ ID NO: 1101365 - RNA, 19 nt, Artificial Sequence
  Description of Artificial Sequence: Synthetic oligonucleotide
  Antisense strand to SEQ ID NO: 1101364
ugucuggagaguuugaccc

SEQ ID NO: 1101366 - RNA, 19 nt, Artificial Sequence
  Description of Artificial Sequence: Synthetic oligonucleotide
  Sense strand starting at position 2436 of SEQ ID NO: 915723
uccggaggccuuugagaac

SEQ ID NO: 1101367 - RNA, 19 nt, Artificial Sequence
  Description of Artificial Sequence: Synthetic oligonucleotide
  Antisense strand to SEQ ID NO: 1101366
guucucaaaggccuccgga

SEQ ID NO: 1101368 - RNA, 19 nt, Artificial Sequence
  Description of Artificial Sequence: Synthetic oligonucleotide
  Sense strand starting at position 2463 of SEQ ID NO: 915723
agagaugacccuuguaaau

SEQ ID NO: 1101369 - RNA, 19 nt, Artificial Sequence
  Description of Artificial Sequence: Synthetic oligonucleotide
  Antisense strand to SEQ ID NO: 1101368
auuuacaagggucaucucu

SEQ ID NO: 1101370 - RNA, 19 nt, Artificial Sequence
  Description of Artificial Sequence: Synthetic oligonucleotide
  Sense strand starting at position 2632 of SEQ ID NO: 915723
uugccaaacgaucauuaaa

SEQ ID NO: 1101371 - RNA, 19 nt, Artificial Sequence
  Description of Artificial Sequence: Synthetic oligonucleotide
  Antisense strand to SEQ ID NO: 1101370
uuuaaugaucguuuggcaa

SEQ ID NO: 1101372 - RNA, 19 nt, Artificial Sequence
  Description of Artificial Sequence: Synthetic oligonucleotide
  Sense strand starting at position 2744 of SEQ ID NO: 915723
uuauuuaggucugaugaau

SEQ ID NO: 1101373 - RNA, 19 nt, Artificial Sequence
  Description of Artificial Sequence: Synthetic oligonucleotide
  Antisense strand to SEQ ID NO: 1101372
auucaucagaccuaaauaa

SEQ ID NO: 1101374 - RNA, 19 nt, Artificial Sequence
  Description of Artificial Sequence: Synthetic oligonucleotide
  Sense strand starting at position 2773 of SEQ ID NO: 915723
cuuauugagccucagaacu

SEQ ID NO: 1101375 - RNA, 19 nt, Artificial Sequence
  Description of Artificial Sequence: Synthetic oligonucleotide
  Antisense strand to SEQ ID NO: 1101374
aguucugaggcucaauaag

SEQ ID NO: 1101376 - RNA, 19 nt, Artificial Sequence
  Description of Artificial Sequence: Synthetic oligonucleotide
  Sense strand starting at position 2859 of SEQ ID NO: 915723
gagacugauuaggugagua

SEQ ID NO: 1101377 - RNA, 19 nt, Artificial Sequence
  Description of Artificial Sequence: Synthetic oligonucleotide
  Antisense strand to SEQ ID NO: 1101376
uacucaccuaaucagucuc

SEQ ID NO: 1101378 - RNA, 19 nt, Artificial Sequence
  Description of Artificial Sequence: Synthetic oligonucleotide
  Sense strand starting at position 2861 of SEQ ID NO: 915723
gacugauuaggugaguauc

SEQ ID NO: 1101379 - RNA, 19 nt, Artificial Sequence
  Description of Artificial Sequence: Synthetic oligonucleotide
  Antisense strand to SEQ ID NO: 1101378
gauacucaccuaaucaguc

SEQ ID NO: 1101380 - RNA, 19 nt, Artificial Sequence
  Description of Artificial Sequence: Synthetic oligonucleotide
  Sense strand starting at position 2974 of SEQ ID NO: 915723
ggagagagcuggguuaagu

SEQ ID NO: 1101381 - RNA, 19 nt, Artificial Sequence
  Description of Artificial Sequence: Synthetic oligonucleotide
  Antisense strand to SEQ ID NO: 1101380
acuuaacccagcucucucc

SEQ ID NO: 1101382 - RNA, 19 nt, Artificial Sequence
  Description of Artificial Sequence: Synthetic oligonucleotide
  Sense strand starting at position 3020 of SEQ ID NO: 915723
aggcaaaugaaaggucauu

SEQ ID NO: 1101383 - RNA, 19 nt, Artificial Sequence
  Description of Artificial Sequence: Synthetic oligonucleotide
  Antisense strand to SEQ ID NO: 1101382
aaugaccuuucauuugccu

SEQ ID NO: 1101384 - RNA, 19 nt, Artificial Sequence
  Description of Artificial Sequence: Synthetic oligonucleotide
  Sense strand starting at position 3400 of SEQ ID NO: 915723
agcugauauaaauggaagu

SEQ ID NO: 1101385 - RNA, 19 nt, Artificial Sequence
  Description of Artificial Sequence: Synthetic oligonucleotide
  Antisense strand to SEQ ID NO: 1101384
acuuccauuuauaucagcu

SEQ ID NO: 1101386 - RNA, 19 nt, Artificial Sequence
  Description of Artificial Sequence: Synthetic oligonucleotide
  Sense strand starting at position 3401 of SEQ ID NO: 915723
gcugauauaaauggaagua

SEQ ID NO: 1101387 - RNA, 19 nt, Artificial Sequence
  Description of Artificial Sequence: Synthetic oligonucleotide
  Antisense strand to SEQ ID NO: 1101386
uacuuccauuuauaucagc

SEQ ID NO: 1101388 - RNA, 19 nt, Artificial Sequence
  Description of Artificial Sequence: Synthetic oligonucleotide
  Sense strand starting at position 3504 of SEQ ID NO: 915723
gcauguuggcucgcuugua

SEQ ID NO: 1101389 - RNA, 19 nt, Artificial Sequence
  Description of Artificial Sequence: Synthetic oligonucleotide
  Antisense strand to SEQ ID NO: 1101388
uacaagcgagccaacaugc

SEQ ID NO: 1101390 - RNA, 19 nt, Artificial Sequence
  Description of Artificial Sequence: Synthetic oligonucleotide
  Sense strand starting at position 3594 of SEQ ID NO: 915723
auaguaagacccugucuaa

SEQ ID NO: 1101391 - RNA, 19 nt, Artificial Sequence
  Description of Artificial Sequence: Synthetic oligonucleotide
  Antisense strand to SEQ ID NO: 1101390
uuagacagggucuuacuau

SEQ ID NO: 1101392 - RNA, 19 nt, Artificial Sequence
  Description of Artificial Sequence: Synthetic oligonucleotide
  Sense strand starting at position 3621 of SEQ ID NO: 915723
aguaaauugccaggcauag

SEQ ID NO: 1101393 - RNA, 19 nt, Artificial Sequence
  Description of Artificial Sequence: Synthetic oligonucleotide
  Antisense strand to SEQ ID NO: 1101392
cuaugccuggcaauuuacu

SEQ ID NO: 1101394 - RNA, 19 nt, Artificial Sequence
  Description of Artificial Sequence: Synthetic oligonucleotide
  Sense strand starting at position 3751 of SEQ ID NO: 915723
ugggcaacacagugauaau

SEQ ID NO: 1101395 - RNA, 19 nt, Artificial Sequence
  Description of Artificial Sequence: Synthetic oligonucleotide
  Antisense strand to SEQ ID NO: 1101394
auuaucacuguguugccca

SEQ ID NO: 1101396 - RNA, 19 nt, Artificial Sequence
  Description of Artificial Sequence: Synthetic oligonucleotide
  Sense strand starting at position 3806 of SEQ ID NO: 915723
gaaagacuguuucucagug

SEQ ID NO: 1101397 - RNA, 19 nt, Artificial Sequence
  Description of Artificial Sequence: Synthetic oligonucleotide
  Antisense strand to SEQ ID NO: 1101396
cacugagaaacagucuuuc

SEQ ID NO: 1101398 - RNA, 19 nt, Artificial Sequence
  Description of Artificial Sequence: Synthetic oligonucleotide
  Sense strand starting at position 3907 of SEQ ID NO: 915723
cauucugacgguugagaag

SEQ ID NO: 1101399 - RNA, 19 nt, Artificial Sequence
  Description of Artificial Sequence: Synthetic oligonucleotide
  Antisense strand to SEQ ID NO: 1101398
cuucucaaccgucagaaug

SEQ ID NO: 1101400 - RNA, 19 nt, Artificial Sequence
  Description of Artificial Sequence: Synthetic oligonucleotide
  Sense strand starting at position 394 of SEQ ID NO: 915724
gcuaucuucuucuguccau

SEQ ID NO: 1101401 - RNA, 19 nt, Artificial Sequence
  Description of Artificial Sequence: Synthetic oligonucleotide
  Antisense strand to SEQ ID NO: 1101400
auggacagaagaagauagc

SEQ ID NO: 1101402 - RNA, 19 nt, Artificial Sequence
  Description of Artificial Sequence: Synthetic oligonucleotide
  Sense strand starting at position 470 of SEQ ID NO: 915724
ugguuucugucacugugau

SEQ ID NO: 1101403 - RNA, 19 nt, Artificial Sequence
  Description of Artificial Sequence: Synthetic oligonucleotide
  Antisense strand to SEQ ID NO: 1101402
aucacagugacagaaacca

SEQ ID NO: 1101404 - RNA, 19 nt, Artificial Sequence
  Description of Artificial Sequence: Synthetic oligonucleotide
  Sense strand starting at position 471 of SEQ ID NO: 915724
gguuucugucacugugaug

SEQ ID NO: 1101405 - RNA, 19 nt, Artificial Sequence
  Description of Artificial Sequence: Synthetic oligonucleotide
  Antisense strand to SEQ ID NO: 1101404
caucacagugacagaaacc

SEQ ID NO: 1101406 - RNA, 19 nt, Artificial Sequence
  Description of Artificial Sequence: Synthetic oligonucleotide
  Sense strand starting at position 496 of SEQ ID NO: 915724
cacaguuguuacugaguca

SEQ ID NO: 1101407 - RNA, 19 nt, Artificial Sequence
  Description of Artificial Sequence: Synthetic oligonucleotide
  Antisense strand to SEQ ID NO: 1101406
ugacucaguaacaacugug

SEQ ID NO: 1101408 - RNA, 19 nt, Artificial Sequence
  Description of Artificial Sequence: Synthetic oligonucleotide
  Sense strand starting at position 497 of SEQ ID NO: 915724
acaguuguuacugagucaa

SEQ ID NO: 1101409 - RNA, 19 nt, Artificial Sequence
  Description of Artificial Sequence: Synthetic oligonucleotide
  Antisense strand to SEQ ID NO: 1101408
uugacucaguaacaacugu

SEQ ID NO: 1101410 - RNA, 19 nt, Artificial Sequence
  Description of Artificial Sequence: Synthetic oligonucleotide
  Sense strand starting at position 499 of SEQ ID NO: 915724
aguuguuacugagucaauu

SEQ ID NO: 1101411 - RNA, 19 nt, Artificial Sequence
  Description of Artificial Sequence: Synthetic oligonucleotide
  Antisense strand to SEQ ID NO: 1101410
aauugacucaguaacaacu

SEQ ID NO: 1101412 - RNA, 19 nt, Artificial Sequence
  Description of Artificial Sequence: Synthetic oligonucleotide
  Sense strand starting at position 511 of SEQ ID NO: 915724
gucaauuguuuccucuacu

SEQ ID NO: 1101413 - RNA, 19 nt, Artificial Sequence
  Description of Artificial Sequence: Synthetic oligonucleotide
  Antisense strand to SEQ ID NO: 1101412
aguagaggaaacaauugac

SEQ ID NO: 1101414 - RNA, 19 nt, Artificial Sequence
  Description of Artificial Sequence: Synthetic oligonucleotide
  Sense strand starting at position 671 of SEQ ID NO: 915724
acccaaacuuagugaaaug

SEQ ID NO: 1101415 - RNA, 19 nt, Artificial Sequence
  Description of Artificial Sequence: Synthetic oligonucleotide
  Antisense strand to SEQ ID NO: 1101414
cauuucacuaaguuugggu

SEQ ID NO: 1101416 - RNA, 19 nt, Artificial Sequence
  Description of Artificial Sequence: Synthetic oligonucleotide
  Sense strand starting at position 904 of SEQ ID NO: 915724
auaagcuaacauuguguuu

SEQ ID NO: 1101417 - RNA, 19 nt, Artificial Sequence
  Description of Artificial Sequence: Synthetic oligonucleotide
  Antisense strand to SEQ ID NO: 1101416
aaacacaauguuagcuuau

SEQ ID NO: 1101418 - RNA, 19 nt, Artificial Sequence
  Description of Artificial Sequence: Synthetic oligonucleotide
  Sense strand starting at position 907 of SEQ ID NO: 915724
agcuaacauuguguuuauu

SEQ ID NO: 1101419 - RNA, 19 nt, Artificial Sequence
  Description of Artificial Sequence: Synthetic oligonucleotide
  Antisense strand to SEQ ID NO: 1101418
aauaaacacaauguuagcu

SEQ ID NO: 1101420 - RNA, 19 nt, Artificial Sequence
  Description of Artificial Sequence: Synthetic oligonucleotide
  Sense strand starting at position 1151 of SEQ ID NO: 915724
auaaauuaaguuggaguga

SEQ ID NO: 1101421 - RNA, 19 nt, Artificial Sequence
  Description of Artificial Sequence: Synthetic oligonucleotide
  Antisense strand to SEQ ID NO: 1101420
ucacuccaacuuaauuuau

SEQ ID NO: 1101422 - RNA, 19 nt, Artificial Sequence
  Description of Artificial Sequence: Synthetic oligonucleotide
  Sense strand starting at position 1152 of SEQ ID NO: 915724
uaaauuaaguuggagugaa

SEQ ID NO: 1101423 - RNA, 19 nt, Artificial Sequence
  Description of Artificial Sequence: Synthetic oligonucleotide
  Antisense strand to SEQ ID NO: 1101422
uucacuccaacuuaauuua

SEQ ID NO: 1101424 - RNA, 19 nt, Artificial Sequence
  Description of Artificial Sequence: Synthetic oligonucleotide
  Sense strand starting at position 1276 of SEQ ID NO: 915724
ucaauauucugagaaacug

SEQ ID NO: 1101425 - RNA, 19 nt, Artificial Sequence
  Description of Artificial Sequence: Synthetic oligonucleotide
  Antisense strand to SEQ ID NO: 1101424
caguuucucagaauauuga

SEQ ID NO: 1101426 - RNA, 19 nt, Artificial Sequence
  Description of Artificial Sequence: Synthetic oligonucleotide
  Sense strand starting at position 1368 of SEQ ID NO: 915724
ugaacaauguuucuaagga

SEQ ID NO: 1101427 - RNA, 19 nt, Artificial Sequence
  Description of Artificial Sequence: Synthetic oligonucleotide
  Antisense strand to SEQ ID NO: 1101426
uccuuagaaacauuguuca

SEQ ID NO: 1101428 - RNA, 19 nt, Artificial Sequence
  Description of Artificial Sequence: Synthetic oligonucleotide
  Sense strand starting at position 1987 of SEQ ID NO: 915724
gucgucugaauccauguuu

SEQ ID NO: 1101429 - RNA, 19 nt, Artificial Sequence
  Description of Artificial Sequence: Synthetic oligonucleotide
  Antisense strand to SEQ ID NO: 1101428
aaacauggauucagacgac

SEQ ID NO: 1101430 - RNA, 19 nt, Artificial Sequence
  Description of Artificial Sequence: Synthetic oligonucleotide
  Sense strand starting at position 2130 of SEQ ID NO: 915724
auaaguuagcuccagcaca

SEQ ID NO: 1101431 - RNA, 19 nt, Artificial Sequence
  Description of Artificial Sequence: Synthetic oligonucleotide
  Antisense strand to SEQ ID NO: 1101430
ugugcuggagcuaacuuau

SEQ ID NO: 1101432 - RNA, 19 nt, Artificial Sequence
  Description of Artificial Sequence: Synthetic oligonucleotide
  Sense strand starting at position 2196 of SEQ ID NO: 915724
cucaauagccaucgaagau

SEQ ID NO: 1101433 - RNA, 19 nt, Artificial Sequence
  Description of Artificial Sequence: Synthetic oligonucleotide
  Antisense strand to SEQ ID NO: 1101432
aucuucgauggcuauugag

SEQ ID NO: 1101434 - RNA, 19 nt, Artificial Sequence
  Description of Artificial Sequence: Synthetic oligonucleotide
  Sense strand starting at position 2208 of SEQ ID NO: 915724
cgaagauucggucaaggac

SEQ ID NO: 1101435 - RNA, 19 nt, Artificial Sequence
  Description of Artificial Sequence: Synthetic oligonucleotide
  Antisense strand to SEQ ID NO: 1101434
guccuugaccgaaucuucg

SEQ ID NO: 1101436 - RNA, 19 nt, Artificial Sequence
  Description of Artificial Sequence: Synthetic oligonucleotide
  Sense strand starting at position 2263 of SEQ ID NO: 915724
uuauuaguaaaugguguga

SEQ ID NO: 1101437 - RNA, 19 nt, Artificial Sequence
  Description of Artificial Sequence: Synthetic oligonucleotide
  Antisense strand to SEQ ID NO: 1101436
ucacaccauuuacuaauaa

SEQ ID NO: 1101438 - RNA, 19 nt, Artificial Sequence
  Description of Artificial Sequence: Synthetic oligonucleotide
  Sense strand starting at position 2265 of SEQ ID NO: 915724
auuaguaaauggugugaau

SEQ ID NO: 1101439 - RNA, 19 nt, Artificial Sequence
  Description of Artificial Sequence: Synthetic oligonucleotide
  Antisense strand to SEQ ID NO: 1101438
auucacaccauuuacuaau

SEQ ID NO: 1101440 - RNA, 19 nt, Artificial Sequence
  Description of Artificial Sequence: Synthetic oligonucleotide
  Sense strand starting at position 2274 of SEQ ID NO: 915724
uggugugaauuuguaugua

SEQ ID NO: 1101441 - RNA, 19 nt, Artificial Sequence
  Description of Artificial Sequence: Synthetic oligonucleotide
  Antisense strand to SEQ ID NO: 1101440
uacauacaaauucacacca

SEQ ID NO: 1101442 - RNA, 19 nt, Artificial Sequence
  Description of Artificial Sequence: Synthetic oligonucleotide
  Sense strand starting at position 2310 of SEQ ID NO: 915724
ugaauacuuuaugucuaga

SEQ ID NO: 1101443 - RNA, 19 nt, Artificial Sequence
  Description of Artificial Sequence: Synthetic oligonucleotide
  Antisense strand to SEQ ID NO: 1101442
ucuagacauaaaguauuca

SEQ ID NO: 1101444 - RNA, 19 nt, Artificial Sequence
  Description of Artificial Sequence: Synthetic oligonucleotide
  Sense strand starting at position 2315 of SEQ ID NO: 915724
acuuuaugucuagauuacu

SEQ ID NO: 1101445 - RNA, 19 nt, Artificial Sequence
  Description of Artificial Sequence: Synthetic oligonucleotide
  Antisense strand to SEQ ID NO: 1101444
aguaaucuagacauaaagu

SEQ ID NO: 1101446 - RNA, 19 nt, Artificial Sequence
  Description of Artificial Sequence: Synthetic oligonucleotide
  Sense strand starting at position 2815 of SEQ ID NO: 915724
acgaacaacugugaugcaa

SEQ ID NO: 1101447 - RNA, 19 nt, Artificial Sequence
  Description of Artificial Sequence: Synthetic oligonucleotide
  Antisense strand to SEQ ID NO: 1101446
uugcaucacaguuguucgu

SEQ ID NO: 1101448 - RNA, 19 nt, Artificial Sequence
  Description of Artificial Sequence: Synthetic oligonucleotide
  Sense strand starting at position 2823 of SEQ ID NO: 915724
cugugaugcaaaugagaaa

SEQ ID NO: 1101449 - RNA, 19 nt, Artificial Sequence
  Description of Artificial Sequence: Synthetic oligonucleotide
  Antisense strand to SEQ ID NO: 1101448
uuucucauuugcaucacag

SEQ ID NO: 1101450 - RNA, 19 nt, Artificial Sequence
  Description of Artificial Sequence: Synthetic oligonucleotide
  Sense strand starting at position 3003 of SEQ ID NO: 915724
uccuguuucugucauucua

SEQ ID NO: 1101451 - RNA, 19 nt, Artificial Sequence
  Description of Artificial Sequence: Synthetic oligonucleotide
  Antisense strand to SEQ ID NO: 1101450
uagaaugacagaaacagga

SEQ ID NO: 1101452 - RNA, 19 nt, Artificial Sequence
  Description of Artificial Sequence: Synthetic oligonucleotide
  Sense strand starting at position 3109 of SEQ ID NO: 915724
uaugaaguuugcucagaca

SEQ ID NO: 1101453 - RNA, 19 nt, Artificial Sequence
  Description of Artificial Sequence: Synthetic oligonucleotide
  Antisense strand to SEQ ID NO: 1101452
ugucugagcaaacuucaua

SEQ ID NO: 1101454 - RNA, 19 nt, Artificial Sequence
  Description of Artificial Sequence: Synthetic oligonucleotide
  Sense strand starting at position 3153 of SEQ ID NO: 915724
aagauugaguaaucacagu

SEQ ID NO: 1101455 - RNA, 19 nt, Artificial Sequence
  Description of Artificial Sequence: Synthetic oligonucleotide
  Antisense strand to SEQ ID NO: 1101454
acugugauuacucaaucuu

SEQ ID NO: 1101456 - RNA, 19 nt, Artificial Sequence
  Description of Artificial Sequence: Synthetic oligonucleotide
  Sense strand starting at position 3159 of SEQ ID NO: 915724
gaguaaucacaguggacug

SEQ ID NO: 1101457 - RNA, 19 nt, Artificial Sequence
  Description of Artificial Sequence: Synthetic oligonucleotide
  Antisense strand to SEQ ID NO: 1101456
caguccacugugauuacuc

SEQ ID NO: 1101458 - RNA, 19 nt, Artificial Sequence
  Description of Artificial Sequence: Synthetic oligonucleotide
  Sense strand starting at position 3298 of SEQ ID NO: 915724
auugucaauucugaugauu

SEQ ID NO: 1101459 - RNA, 19 nt, Artificial Sequence
  Description of Artificial Sequence: Synthetic oligonucleotide
  Antisense strand to SEQ ID NO: 1101458
aaucaucagaauugacaau

SEQ ID NO: 1101460 - RNA, 19 nt, Artificial Sequence
  Description of Artificial Sequence: Synthetic oligonucleotide
  Sense strand starting at position 3300 of SEQ ID NO: 915724
ugucaauucugaugauuag

SEQ ID NO: 1101461 - RNA, 19 nt, Artificial Sequence
  Description of Artificial Sequence: Synthetic oligonucleotide
  Antisense strand to SEQ ID NO: 1101460
cuaaucaucagaauugaca

SEQ ID NO: 1101462 - RNA, 19 nt, Artificial Sequence
  Description of Artificial Sequence: Synthetic oligonucleotide
  Sense strand starting at position 3306 of SEQ ID NO: 915724
uucugaugauuagagagaa

SEQ ID NO: 1101463 - RNA, 19 nt, Artificial Sequence
  Description of Artificial Sequence: Synthetic oligonucleotide
  Antisense strand to SEQ ID NO: 1101462
uucucucuaaucaucagaa

SEQ ID NO: 1101464 - RNA, 19 nt, Artificial Sequence
  Description of Artificial Sequence: Synthetic oligonucleotide
  Sense strand starting at position 3497 of SEQ ID NO: 915724
uucgcuuagugacuuggaa

SEQ ID NO: 1101465 - RNA, 19 nt, Artificial Sequence
  Description of Artificial Sequence: Synthetic oligonucleotide
  Antisense strand to SEQ ID NO: 1101464
uuccaagucacuaagcgaa

SEQ ID NO: 1101466 - RNA, 19 nt, Artificial Sequence
  Description of Artificial Sequence: Synthetic oligonucleotide
  Sense strand starting at position 3499 of SEQ ID NO: 915724
cgcuuagugacuuggaagu

SEQ ID NO: 1101467 - RNA, 19 nt, Artificial Sequence
  Description of Artificial Sequence: Synthetic oligonucleotide
  Antisense strand to SEQ ID NO: 1101466
acuuccaagucacuaagcg

SEQ ID NO: 1101468 - RNA, 19 nt, Artificial Sequence
  Description of Artificial Sequence: Synthetic oligonucleotide
  Sense strand starting at position 3539 of SEQ ID NO: 915724
gccaguugguuagaucuau

SEQ ID NO: 1101469 - RNA, 19 nt, Artificial Sequence
  Description of Artificial Sequence: Synthetic oligonucleotide
  Antisense strand to SEQ ID NO: 1101468
auagaucuaaccaacuggc

SEQ ID NO: 1101470 - RNA, 19 nt, Artificial Sequence
  Description of Artificial Sequence: Synthetic oligonucleotide
  Sense strand starting at position 3543 of SEQ ID NO: 915724
guugguuagaucuauugau

SEQ ID NO: 1101471 - RNA, 19 nt, Artificial Sequence
  Description of Artificial Sequence: Synthetic oligonucleotide
  Antisense strand to SEQ ID NO: 1101470
aucaauagaucuaaccaac

SEQ ID NO: 1101472 - RNA, 19 nt, Artificial Sequence
  Description of Artificial Sequence: Synthetic oligonucleotide
  Sense strand starting at position 198 of SEQ ID NO: 915725
ucgagaaauauaggcaucu

SEQ ID NO: 1101473 - RNA, 19 nt, Artificial Sequence
  Description of Artificial Sequence: Synthetic oligonucleotide
  Antisense strand to SEQ ID NO: 1101472
agaugccuauauuucucga

SEQ ID NO: 1101474 - RNA, 19 nt, Artificial Sequence
  Description of Artificial Sequence: Synthetic oligonucleotide
  Sense strand starting at position 199 of SEQ ID NO: 915725
cgagaaauauaggcaucuu

SEQ ID NO: 1101475 - RNA, 19 nt, Artificial Sequence
  Description of Artificial Sequence: Synthetic oligonucleotide
  Antisense strand to SEQ ID NO: 1101474
aagaugccuauauuucucg

SEQ ID NO: 1101476 - RNA, 19 nt, Artificial Sequence
  Description of Artificial Sequence: Synthetic oligonucleotide
  Sense strand starting at position 223 of SEQ ID NO: 915725
auugaauagugauuauccu

SEQ ID NO: 1101477 - RNA, 19 nt, Artificial Sequence
  Description of Artificial Sequence: Synthetic oligonucleotide
  Antisense strand to SEQ ID NO: 1101476
aggauaaucacuauucaau

SEQ ID NO: 1101478 - RNA, 19 nt, Artificial Sequence
  Description of Artificial Sequence: Synthetic oligonucleotide
  Sense strand starting at position 471 of SEQ ID NO: 915725
ugguuucugucacugugau

SEQ ID NO: 1101479 - RNA, 19 nt, Artificial Sequence
  Description of Artificial Sequence: Synthetic oligonucleotide
  Antisense strand to SEQ ID NO: 1101478
aucacagugacagaaacca

SEQ ID NO: 1101480 - RNA, 19 nt, Artificial Sequence
  Description of Artificial Sequence: Synthetic oligonucleotide
  Sense strand starting at position 472 of SEQ ID NO: 915725
gguuucugucacugugaug

SEQ ID NO: 1101481 - RNA, 19 nt, Artificial Sequence
  Description of Artificial Sequence: Synthetic oligonucleotide
  Antisense strand to SEQ ID NO: 1101480
caucacagugacagaaacc

SEQ ID NO: 1101482 - RNA, 19 nt, Artificial Sequence
  Description of Artificial Sequence: Synthetic oligonucleotide
  Sense strand starting at position 498 of SEQ ID NO: 915725
acaguuguuacugagucaa

SEQ ID NO: 1101483 - RNA, 19 nt, Artificial Sequence
  Description of Artificial Sequence: Synthetic oligonucleotide
  Antisense strand to SEQ ID NO: 1101482
uugacucaguaacaacugu

SEQ ID NO: 1101484 - RNA, 19 nt, Artificial Sequence
  Description of Artificial Sequence: Synthetic oligonucleotide
  Sense strand starting at position 500 of SEQ ID NO: 915725
aguuguuacugagucaauu

SEQ ID NO: 1101485 - RNA, 19 nt, Artificial Sequence
  Description of Artificial Sequence: Synthetic oligonucleotide
  Antisense strand to SEQ ID NO: 1101484
aauugacucaguaacaacu

SEQ ID NO: 1101486 - RNA, 19 nt, Artificial Sequence
  Description of Artificial Sequence: Synthetic oligonucleotide
  Sense strand starting at position 502 of SEQ ID NO: 915725
uuguuacugagucaauugu

SEQ ID NO: 1101487 - RNA, 19 nt, Artificial Sequence
  Description of Artificial Sequence: Synthetic oligonucleotide
  Antisense strand to SEQ ID NO: 1101486
acaauugacucaguaacaa

SEQ ID NO: 1101488 - RNA, 19 nt, Artificial Sequence
  Description of Artificial Sequence: Synthetic oligonucleotide
  Sense strand starting at position 512 of SEQ ID NO: 915725
gucaauuguuuccucuacu

SEQ ID NO: 1101489 - RNA, 19 nt, Artificial Sequence
  Description of Artificial Sequence: Synthetic oligonucleotide
  Antisense strand to SEQ ID NO: 1101488
aguagaggaaacaauugac

SEQ ID NO: 1101490 - RNA, 19 nt, Artificial Sequence
  Description of Artificial Sequence: Synthetic oligonucleotide
  Sense strand starting at position 905 of SEQ ID NO: 915725
auaagcuaacauuguguuu

SEQ ID NO: 1101491 - RNA, 19 nt, Artificial Sequence
  Description of Artificial Sequence: Synthetic oligonucleotide
  Antisense strand to SEQ ID NO: 1101490
aaacacaauguuagcuuau

SEQ ID NO: 1101492 - RNA, 19 nt, Artificial Sequence
  Description of Artificial Sequence: Synthetic oligonucleotide
  Sense strand starting at position 908 of SEQ ID NO: 915725
agcuaacauuguguuuauu

SEQ ID NO: 1101493 - RNA, 19 nt, Artificial Sequence
  Description of Artificial Sequence: Synthetic oligonucleotide
  Antisense strand to SEQ ID NO: 1101492
aauaaacacaauguuagcu

SEQ ID NO: 1101494 - RNA, 19 nt, Artificial Sequence
  Description of Artificial Sequence: Synthetic oligonucleotide
  Sense strand starting at position 966 of SEQ ID NO: 915725
acgaaugaaaugugcuagu

SEQ ID NO: 1101495 - RNA, 19 nt, Artificial Sequence
  Description of Artificial Sequence: Synthetic oligonucleotide
  Antisense strand to SEQ ID NO: 1101494
acuagcacauuucauucgu

SEQ ID NO: 1101496 - RNA, 19 nt, Artificial Sequence
  Description of Artificial Sequence: Synthetic oligonucleotide
  Sense strand starting at position 976 of SEQ ID NO: 915725
ugugcuaguuuccugauuu

SEQ ID NO: 1101497 - RNA, 19 nt, Artificial Sequence
  Description of Artificial Sequence: Synthetic oligonucleotide
  Antisense strand to SEQ ID NO: 1101496
aaaucaggaaacuagcaca

SEQ ID NO: 1101498 - RNA, 19 nt, Artificial Sequence
  Description of Artificial Sequence: Synthetic oligonucleotide
  Sense strand starting at position 1068 of SEQ ID NO: 915725
gcaagaagcuuagcaauaa

SEQ ID NO: 1101499 - RNA, 19 nt, Artificial Sequence
  Description of Artificial Sequence: Synthetic oligonucleotide
  Antisense strand to SEQ ID NO: 1101498
uuauugcuaagcuucuugc

SEQ ID NO: 1101500 - RNA, 19 nt, Artificial Sequence
  Description of Artificial Sequence: Synthetic oligonucleotide
  Sense strand starting at position 1089 of SEQ ID NO: 915725
aagacaguauaguagauuu

SEQ ID NO: 1101501 - RNA, 19 nt, Artificial Sequence
  Description of Artificial Sequence: Synthetic oligonucleotide
  Antisense strand to SEQ ID NO: 1101500
aaaucuacuauacugucuu

SEQ ID NO: 1101502 - RNA, 19 nt, Artificial Sequence
  Description of Artificial Sequence: Synthetic oligonucleotide
  Sense strand starting at position 1150 of SEQ ID NO: 915725
auaaauuaaguuggaguga

SEQ ID NO: 1101503 - RNA, 19 nt, Artificial Sequence
  Description of Artificial Sequence: Synthetic oligonucleotide
  Antisense strand to SEQ ID NO: 1101502
ucacuccaacuuaauuuau

SEQ ID NO: 1101504 - RNA, 19 nt, Artificial Sequence
  Description of Artificial Sequence: Synthetic oligonucleotide
  Sense strand starting at position 1275 of SEQ ID NO: 915725
ucaauauucugagaaacug

SEQ ID NO: 1101505 - RNA, 19 nt, Artificial Sequence
  Description of Artificial Sequence: Synthetic oligonucleotide
  Antisense strand to SEQ ID NO: 1101504
caguuucucagaauauuga

SEQ ID NO: 1101506 - RNA, 19 nt, Artificial Sequence
  Description of Artificial Sequence: Synthetic oligonucleotide
  Sense strand starting at position 1355 of SEQ ID NO: 915725
auucuacacguuugaacaa

SEQ ID NO: 1101507 - RNA, 19 nt, Artificial Sequence
  Description of Artificial Sequence: Synthetic oligonucleotide
  Antisense strand to SEQ ID NO: 1101506
uuguucaaacguguagaau

SEQ ID NO: 1101508 - RNA, 19 nt, Artificial Sequence
  Description of Artificial Sequence: Synthetic oligonucleotide
  Sense strand starting at position 1385 of SEQ ID NO: 915725
agaccuccuuuagugaagu

SEQ ID NO: 1101509 - RNA, 19 nt, Artificial Sequence
  Description of Artificial Sequence: Synthetic oligonucleotide
  Antisense strand to SEQ ID NO: 1101508
acuucacuaaaggaggucu

SEQ ID NO: 1101510 - RNA, 19 nt, Artificial Sequence
  Description of Artificial Sequence: Synthetic oligonucleotide
  Sense strand starting at position 1790 of SEQ ID NO: 915725
ugaguaccagauugguguu

SEQ ID NO: 1101511 - RNA, 19 nt, Artificial Sequence
  Description of Artificial Sequence: Synthetic oligonucleotide
  Antisense strand to SEQ ID NO: 1101510
aacaccaaucugguacuca

SEQ ID NO: 1101512 - RNA, 19 nt, Artificial Sequence
  Description of Artificial Sequence: Synthetic oligonucleotide
  Sense strand starting at position 1986 of SEQ ID NO: 915725
gucgucugaauccauguuu

SEQ ID NO: 1101513 - RNA, 19 nt, Artificial Sequence
  Description of Artificial Sequence: Synthetic oligonucleotide
  Antisense strand to SEQ ID NO: 1101512
aaacauggauucagacgac

SEQ ID NO: 1101514 - RNA, 19 nt, Artificial Sequence
  Description of Artificial Sequence: Synthetic oligonucleotide
  Sense strand starting at position 2114 of SEQ ID NO: 915725
uguccagcaugucuaauaa

SEQ ID NO: 1101515 - RNA, 19 nt, Artificial Sequence
  Description of Artificial Sequence: Synthetic oligonucleotide
  Antisense strand to SEQ ID NO: 1101514
uuauuagacaugcuggaca

SEQ ID NO: 1101516 - RNA, 19 nt, Artificial Sequence
  Description of Artificial Sequence: Synthetic oligonucleotide
  Sense strand starting at position 2195 of SEQ ID NO: 915725
cucaauagccaucgaagau

SEQ ID NO: 1101517 - RNA, 19 nt, Artificial Sequence
  Description of Artificial Sequence: Synthetic oligonucleotide
  Antisense strand to SEQ ID NO: 1101516
aucuucgauggcuauugag

SEQ ID NO: 1101518 - RNA, 19 nt, Artificial Sequence
  Description of Artificial Sequence: Synthetic oligonucleotide
  Sense strand starting at position 2207 of SEQ ID NO: 915725
cgaagauucggucaaggac

SEQ ID NO: 1101519 - RNA, 19 nt, Artificial Sequence
  Description of Artificial Sequence: Synthetic oligonucleotide
  Antisense strand to SEQ ID NO: 1101518
guccuugaccgaaucuucg

SEQ ID NO: 1101520 - RNA, 19 nt, Artificial Sequence
  Description of Artificial Sequence: Synthetic oligonucleotide
  Sense strand starting at position 2262 of SEQ ID NO: 915725
uuauuaguaaaugguguga

SEQ ID NO: 1101521 - RNA, 19 nt, Artificial Sequence
  Description of Artificial Sequence: Synthetic oligonucleotide
  Antisense strand to SEQ ID NO: 1101520
ucacaccauuuacuaauaa

SEQ ID NO: 1101522 - RNA, 19 nt, Artificial Sequence
  Description of Artificial Sequence: Synthetic oligonucleotide
  Sense strand starting at position 2273 of SEQ ID NO: 915725
uggugugaauuuguaugua

SEQ ID NO: 1101523 - RNA, 19 nt, Artificial Sequence
  Description of Artificial Sequence: Synthetic oligonucleotide
  Antisense strand to SEQ ID NO: 1101522
uacauacaaauucacacca

SEQ ID NO: 1101524 - RNA, 19 nt, Artificial Sequence
  Description of Artificial Sequence: Synthetic oligonucleotide
  Sense strand starting at position 2309 of SEQ ID NO: 915725
ugaauacuuuaugucuaga

SEQ ID NO: 1101525 - RNA, 19 nt, Artificial Sequence
  Description of Artificial Sequence: Synthetic oligonucleotide
  Antisense strand to SEQ ID NO: 1101524
ucuagacauaaaguauuca

SEQ ID NO: 1101526 - RNA, 19 nt, Artificial Sequence
  Description of Artificial Sequence: Synthetic oligonucleotide
  Sense strand starting at position 2314 of SEQ ID NO: 915725
acuuuaugucuagauuacu

SEQ ID NO: 1101527 - RNA, 19 nt, Artificial Sequence
  Description of Artificial Sequence: Synthetic oligonucleotide
  Antisense strand to SEQ ID NO: 1101526
aguaaucuagacauaaagu

SEQ ID NO: 1101528 - RNA, 19 nt, Artificial Sequence
  Description of Artificial Sequence: Synthetic oligonucleotide
  Sense strand starting at position 2319 of SEQ ID NO: 915725
augucuagauuacuuugaa

SEQ ID NO: 1101529 - RNA, 19 nt, Artificial Sequence
  Description of Artificial Sequence: Synthetic oligonucleotide
  Antisense strand to SEQ ID NO: 1101528
uucaaaguaaucuagacau

SEQ ID NO: 1101530 - RNA, 19 nt, Artificial Sequence
  Description of Artificial Sequence: Synthetic oligonucleotide
  Sense strand starting at position 2320 of SEQ ID NO: 915725
ugucuagauuacuuugaau

SEQ ID NO: 1101531 - RNA, 19 nt, Artificial Sequence
  Description of Artificial Sequence: Synthetic oligonucleotide
  Antisense strand to SEQ ID NO: 1101530
auucaaaguaaucuagaca

SEQ ID NO: 1101532 - RNA, 19 nt, Artificial Sequence
  Description of Artificial Sequence: Synthetic oligonucleotide
  Sense strand starting at position 2818 of SEQ ID NO: 915725
acgaacaaccgugaugcaa

SEQ ID NO: 1101533 - RNA, 19 nt, Artificial Sequence
  Description of Artificial Sequence: Synthetic oligonucleotide
  Antisense strand to SEQ ID NO: 1101532
uugcaucacgguuguucgu

SEQ ID NO: 1101534 - RNA, 19 nt, Artificial Sequence
  Description of Artificial Sequence: Synthetic oligonucleotide
  Sense strand starting at position 2826 of SEQ ID NO: 915725
ccgugaugcaaaugagaaa

SEQ ID NO: 1101535 - RNA, 19 nt, Artificial Sequence
  Description of Artificial Sequence: Synthetic oligonucleotide
  Antisense strand to SEQ ID NO: 1101534
uuucucauuugcaucacgg

SEQ ID NO: 1101536 - RNA, 19 nt, Artificial Sequence
  Description of Artificial Sequence: Synthetic oligonucleotide
  Sense strand starting at position 2994 of SEQ ID NO: 915725
uucugaaugucauccuguu

SEQ ID NO: 1101537 - RNA, 19 nt, Artificial Sequence
  Description of Artificial Sequence: Synthetic oligonucleotide
  Antisense strand to SEQ ID NO: 1101536
aacaggaugacauucagaa

SEQ ID NO: 1101538 - RNA, 19 nt, Artificial Sequence
  Description of Artificial Sequence: Synthetic oligonucleotide
  Sense strand starting at position 3156 of SEQ ID NO: 915725
aagauugaguaaucacagu

SEQ ID NO: 1101539 - RNA, 19 nt, Artificial Sequence
  Description of Artificial Sequence: Synthetic oligonucleotide
  Antisense strand to SEQ ID NO: 1101538
acugugauuacucaaucuu

SEQ ID NO: 1101540 - RNA, 19 nt, Artificial Sequence
  Description of Artificial Sequence: Synthetic oligonucleotide
  Sense strand starting at position 3162 of SEQ ID NO: 915725
gaguaaucacaguggacug

SEQ ID NO: 1101541 - RNA, 19 nt, Artificial Sequence
  Description of Artificial Sequence: Synthetic oligonucleotide
  Antisense strand to SEQ ID NO: 1101540
caguccacugugauuacuc

SEQ ID NO: 1101542 - RNA, 19 nt, Artificial Sequence
  Description of Artificial Sequence: Synthetic oligonucleotide
  Sense strand starting at position 3309 of SEQ ID NO: 915725
uucugaugauuagagagaa

SEQ ID NO: 1101543 - RNA, 19 nt, Artificial Sequence
  Description of Artificial Sequence: Synthetic oligonucleotide
  Antisense strand to SEQ ID NO: 1101542
uucucucuaaucaucagaa

SEQ ID NO: 1101544 - RNA, 19 nt, Artificial Sequence
  Description of Artificial Sequence: Synthetic oligonucleotide
  Sense strand starting at position 3500 of SEQ ID NO: 915725
uucgcuuagugacuuggaa

SEQ ID NO: 1101545 - RNA, 19 nt, Artificial Sequence
  Description of Artificial Sequence: Synthetic oligonucleotide
  Antisense strand to SEQ ID NO: 1101544
uuccaagucacuaagcgaa

SEQ ID NO: 1101546 - RNA, 19 nt, Artificial Sequence
  Description of Artificial Sequence: Synthetic oligonucleotide
  Sense strand starting at position 3546 of SEQ ID NO: 915725
guugguuagaucuauugau

SEQ ID NO: 1101547 - RNA, 19 nt, Artificial Sequence
  Description of Artificial Sequence: Synthetic oligonucleotide
  Antisense strand to SEQ ID NO: 1101546
aucaauagaucuaaccaac

SEQ ID NO: 1101548 - RNA, 19 nt, Artificial Sequence
  Description of Artificial Sequence: Synthetic oligonucleotide
  Sense strand starting at position 3928 of SEQ ID NO: 915725
ucagaucuagucugcaaau

SEQ ID NO: 1101549 - RNA, 19 nt, Artificial Sequence
  Description of Artificial Sequence: Synthetic oligonucleotide
  Antisense strand to SEQ ID NO: 1101548
auuugcagacuagaucuga

SEQ ID NO: 1101550 - RNA, 19 nt, Artificial Sequence
  Description of Artificial Sequence: Synthetic oligonucleotide
  Sense strand starting at position 3930 of SEQ ID NO: 915725
agaucuagucugcaaauug

SEQ ID NO: 1101551 - RNA, 19 nt, Artificial Sequence
  Description of Artificial Sequence: Synthetic oligonucleotide
  Antisense strand to SEQ ID NO: 1101550
caauuugcagacuagaucu

SEQ ID NO: 1101552 - RNA, 19 nt, Artificial Sequence
  Description of Artificial Sequence: Synthetic oligonucleotide
  Sense strand starting at position 101 of SEQ ID NO: 915726
cuucuaaauguugggucau

SEQ ID NO: 1101553 - RNA, 19 nt, Artificial Sequence
  Description of Artificial Sequence: Synthetic oligonucleotide
  Antisense strand to SEQ ID NO: 1101552
augacccaacauuuagaag

SEQ ID NO: 1101554 - RNA, 19 nt, Artificial Sequence
  Description of Artificial Sequence: Synthetic oligonucleotide
  Sense strand starting at position 203 of SEQ ID NO: 915726
cgagaaauauaugcaucuu

SEQ ID NO: 1101555 - RNA, 19 nt, Artificial Sequence
  Description of Artificial Sequence: Synthetic oligonucleotide
  Antisense strand to SEQ ID NO: 1101554
aagaugcauauauuucucg

SEQ ID NO: 1101556 - RNA, 19 nt, Artificial Sequence
  Description of Artificial Sequence: Synthetic oligonucleotide
  Sense strand starting at position 227 of SEQ ID NO: 915726
acugaauagugauuaucac

SEQ ID NO: 1101557 - RNA, 19 nt, Artificial Sequence
  Description of Artificial Sequence: Synthetic oligonucleotide
  Antisense strand to SEQ ID NO: 1101556
gugauaaucacuauucagu

SEQ ID NO: 1101558 - RNA, 19 nt, Artificial Sequence
  Description of Artificial Sequence: Synthetic oligonucleotide
  Sense strand starting at position 268 of SEQ ID NO: 915726
ugcagagacguuugguuaa

SEQ ID NO: 1101559 - RNA, 19 nt, Artificial Sequence
  Description of Artificial Sequence: Synthetic oligonucleotide
  Antisense strand to SEQ ID NO: 1101558
uuaaccaaacgucucugca

SEQ ID NO: 1101560 - RNA, 19 nt, Artificial Sequence
  Description of Artificial Sequence: Synthetic oligonucleotide
  Sense strand starting at position 473 of SEQ ID NO: 915726
ccugguuuccgucacugua

SEQ ID NO: 1101561 - RNA, 19 nt, Artificial Sequence
  Description of Artificial Sequence: Synthetic oligonucleotide
  Antisense strand to SEQ ID NO: 1101560
uacagugacggaaaccagg

SEQ ID NO: 1101562 - RNA, 19 nt, Artificial Sequence
  Description of Artificial Sequence: Synthetic oligonucleotide
  Sense strand starting at position 475 of SEQ ID NO: 915726
ugguuuccgucacuguaau

SEQ ID NO: 1101563 - RNA, 19 nt, Artificial Sequence
  Description of Artificial Sequence: Synthetic oligonucleotide
  Antisense strand to SEQ ID NO: 1101562
auuacagugacggaaacca

SEQ ID NO: 1101564 - RNA, 19 nt, Artificial Sequence
  Description of Artificial Sequence: Synthetic oligonucleotide
  Sense strand starting at position 476 of SEQ ID NO: 915726
gguuuccgucacuguaaug

SEQ ID NO: 1101565 - RNA, 19 nt, Artificial Sequence
  Description of Artificial Sequence: Synthetic oligonucleotide
  Antisense strand to SEQ ID NO: 1101564
cauuacagugacggaaacc

SEQ ID NO: 1101566 - RNA, 19 nt, Artificial Sequence
  Description of Artificial Sequence: Synthetic oligonucleotide
  Sense strand starting at position 504 of SEQ ID NO: 915726
aguucuuacugagucaauu

SEQ ID NO: 1101567 - RNA, 19 nt, Artificial Sequence
  Description of Artificial Sequence: Synthetic oligonucleotide
  Antisense strand to SEQ ID NO: 1101566
aauugacucaguaagaacu

SEQ ID NO: 1101568 - RNA, 19 nt, Artificial Sequence
  Description of Artificial Sequence: Synthetic oligonucleotide
  Sense strand starting at position 597 of SEQ ID NO: 915726
gcaccauauuaugcaguau

SEQ ID NO: 1101569 - RNA, 19 nt, Artificial Sequence
  Description of Artificial Sequence: Synthetic oligonucleotide
  Antisense strand to SEQ ID NO: 1101568
auacugcauaauauggugc

SEQ ID NO: 1101570 - RNA, 19 nt, Artificial Sequence
  Description of Artificial Sequence: Synthetic oligonucleotide
  Sense strand starting at position 673 of SEQ ID NO: 915726
gacacccagucuuagugaa

SEQ ID NO: 1101571 - RNA, 19 nt, Artificial Sequence
  Description of Artificial Sequence: Synthetic oligonucleotide
  Antisense strand to SEQ ID NO: 1101570
uucacuaagacuggguguc

SEQ ID NO: 1101572 - RNA, 19 nt, Artificial Sequence
  Description of Artificial Sequence: Synthetic oligonucleotide
  Sense strand starting at position 675 of SEQ ID NO: 915726
cacccagucuuagugaaag

SEQ ID NO: 1101573 - RNA, 19 nt, Artificial Sequence
  Description of Artificial Sequence: Synthetic oligonucleotide
  Antisense strand to SEQ ID NO: 1101572
cuuucacuaagacugggug

SEQ ID NO: 1101574 - RNA, 19 nt, Artificial Sequence
  Description of Artificial Sequence: Synthetic oligonucleotide
  Sense strand starting at position 677 of SEQ ID NO: 915726
cccagucuuagugaaaggu

SEQ ID NO: 1101575 - RNA, 19 nt, Artificial Sequence
  Description of Artificial Sequence: Synthetic oligonucleotide
  Antisense strand to SEQ ID NO: 1101574
accuuucacuaagacuggg

SEQ ID NO: 1101576 - RNA, 19 nt, Artificial Sequence
  Description of Artificial Sequence: Synthetic oligonucleotide
  Sense strand starting at position 681 of SEQ ID NO: 915726
gucuuagugaaagguuguc

SEQ ID NO: 1101577 - RNA, 19 nt, Artificial Sequence
  Description of Artificial Sequence: Synthetic oligonucleotide
  Antisense strand to SEQ ID NO: 1101576
gacaaccuuucacuaagac

SEQ ID NO: 1101578 - RNA, 19 nt, Artificial Sequence
  Description of Artificial Sequence: Synthetic oligonucleotide
  Sense strand starting at position 686 of SEQ ID NO: 915726
agugaaagguugucucauc

SEQ ID NO: 1101579 - RNA, 19 nt, Artificial Sequence
  Description of Artificial Sequence: Synthetic oligonucleotide
  Antisense strand to SEQ ID NO: 1101578
gaugagacaaccuuucacu

SEQ ID NO: 1101580 - RNA, 19 nt, Artificial Sequence
  Description of Artificial Sequence: Synthetic oligonucleotide
  Sense strand starting at position 687 of SEQ ID NO: 915726
gugaaagguugucucaucu

SEQ ID NO: 1101581 - RNA, 19 nt, Artificial Sequence
  Description of Artificial Sequence: Synthetic oligonucleotide
  Antisense strand to SEQ ID NO: 1101580
agaugagacaaccuuucac

SEQ ID NO: 1101582 - RNA, 19 nt, Artificial Sequence
  Description of Artificial Sequence: Synthetic oligonucleotide
  Sense strand starting at position 918 of SEQ ID NO: 915726
cuuuguguuuauuugcaua

SEQ ID NO: 1101583 - RNA, 19 nt, Artificial Sequence
  Description of Artificial Sequence: Synthetic oligonucleotide
  Antisense strand to SEQ ID NO: 1101582
uaugcaaauaaacacaaag

SEQ ID NO: 1101584 - RNA, 19 nt, Artificial Sequence
  Description of Artificial Sequence: Synthetic oligonucleotide
  Sense strand starting at position 1009 of SEQ ID NO: 915726
ugugucucuugauugauuu

SEQ ID NO: 1101585 - RNA, 19 nt, Artificial Sequence
  Description of Artificial Sequence: Synthetic oligonucleotide
  Antisense strand to SEQ ID NO: 1101584
aaaucaaucaagagacaca

SEQ ID NO: 1101586 - RNA, 19 nt, Artificial Sequence
  Description of Artificial Sequence: Synthetic oligonucleotide
  Sense strand starting at position 1099 of SEQ ID NO: 915726
aguagaucuuaucccuuua

SEQ ID NO: 1101587 - RNA, 19 nt, Artificial Sequence
  Description of Artificial Sequence: Synthetic oligonucleotide
  Antisense strand to SEQ ID NO: 1101586
uaaagggauaagaucuacu

SEQ ID NO: 1101588 - RNA, 19 nt, Artificial Sequence
  Description of Artificial Sequence: Synthetic oligonucleotide
  Sense strand starting at position 1151 of SEQ ID NO: 915726
uaaauuaaguuagagugga

SEQ ID NO: 1101589 - RNA, 19 nt, Artificial Sequence
  Description of Artificial Sequence: Synthetic oligonucleotide
  Antisense strand to SEQ ID NO: 1101588
uccacucuaacuuaauuua

SEQ ID NO: 1101590 - RNA, 19 nt, Artificial Sequence
  Description of Artificial Sequence: Synthetic oligonucleotide
  Sense strand starting at position 1349 of SEQ ID NO: 915726
agcuccauccuauauguuu

SEQ ID NO: 1101591 - RNA, 19 nt, Artificial Sequence
  Description of Artificial Sequence: Synthetic oligonucleotide
  Antisense strand to SEQ ID NO: 1101590
aaacauauaggauggagcu

SEQ ID NO: 1101592 - RNA, 19 nt, Artificial Sequence
  Description of Artificial Sequence: Synthetic oligonucleotide
  Sense strand starting at position 1381 of SEQ ID NO: 915726
aaggaaaccuccuuuagug

SEQ ID NO: 1101593 - RNA, 19 nt, Artificial Sequence
  Description of Artificial Sequence: Synthetic oligonucleotide
  Antisense strand to SEQ ID NO: 1101592
cacuaaaggagguuuccuu

SEQ ID NO: 1101594 - RNA, 19 nt, Artificial Sequence
  Description of Artificial Sequence: Synthetic oligonucleotide
  Sense strand starting at position 1425 of SEQ ID NO: 915726
gugccaaauuagucagcaa

SEQ ID NO: 1101595 - RNA, 19 nt, Artificial Sequence
  Description of Artificial Sequence: Synthetic oligonucleotide
  Antisense strand to SEQ ID NO: 1101594
uugcugacuaauuuggcac

SEQ ID NO: 1101596 - RNA, 19 nt, Artificial Sequence
  Description of Artificial Sequence: Synthetic oligonucleotide
  Sense strand starting at position 1432 of SEQ ID NO: 915726
auuagucagcaacauugaa

SEQ ID NO: 1101597 - RNA, 19 nt, Artificial Sequence
  Description of Artificial Sequence: Synthetic oligonucleotide
  Antisense strand to SEQ ID NO: 1101596
uucaauguugcugacuaau

SEQ ID NO: 1101598 - RNA, 19 nt, Artificial Sequence
  Description of Artificial Sequence: Synthetic oligonucleotide
  Sense strand starting at position 1451 of SEQ ID NO: 915726
aggacacauuuauguguua

SEQ ID NO: 1101599 - RNA, 19 nt, Artificial Sequence
  Description of Artificial Sequence: Synthetic oligonucleotide
  Antisense strand to SEQ ID NO: 1101598
uaacacauaaauguguccu

SEQ ID NO: 1101600 - RNA, 19 nt, Artificial Sequence
  Description of Artificial Sequence: Synthetic oligonucleotide
  Sense strand starting at position 1986 of SEQ ID NO: 915726
ggugucugaauccauguuu

SEQ ID NO: 1101601 - RNA, 19 nt, Artificial Sequence
  Description of Artificial Sequence: Synthetic oligonucleotide
  Antisense strand to SEQ ID NO: 1101600
aaacauggauucagacacc

SEQ ID NO: 1101602 - RNA, 19 nt, Artificial Sequence
  Description of Artificial Sequence: Synthetic oligonucleotide
  Sense strand starting at position 2114 of SEQ ID NO: 915726
guccaauaugucuaauaag

SEQ ID NO: 1101603 - RNA, 19 nt, Artificial Sequence
  Description of Artificial Sequence: Synthetic oligonucleotide
  Antisense strand to SEQ ID NO: 1101602
cuuauuagacauauuggac

SEQ ID NO: 1101604 - RNA, 19 nt, Artificial Sequence
  Description of Artificial Sequence: Synthetic oligonucleotide
  Sense strand starting at position 2194 of SEQ ID NO: 915726
cucaauagccauugaaggu

SEQ ID NO: 1101605 - RNA, 19 nt, Artificial Sequence
  Description of Artificial Sequence: Synthetic oligonucleotide
  Antisense strand to SEQ ID NO: 1101604
accuucaauggcuauugag

SEQ ID NO: 1101606 - RNA, 19 nt, Artificial Sequence
  Description of Artificial Sequence: Synthetic oligonucleotide
  Sense strand starting at position 2207 of SEQ ID NO: 915726
gaagguucgguccaggacu

SEQ ID NO: 1101607 - RNA, 19 nt, Artificial Sequence
  Description of Artificial Sequence: Synthetic oligonucleotide
  Antisense strand to SEQ ID NO: 1101606
aguccuggaccgaaccuuc

SEQ ID NO: 1101608 - RNA, 19 nt, Artificial Sequence
  Description of Artificial Sequence: Synthetic oligonucleotide
  Sense strand starting at position 2265 of SEQ ID NO: 915726
uaguaaauggugugggauu

SEQ ID NO: 1101609 - RNA, 19 nt, Artificial Sequence
  Description of Artificial Sequence: Synthetic oligonucleotide
  Antisense strand to SEQ ID NO: 1101608
aaucccacaccauuuacua

SEQ ID NO: 1101610 - RNA, 19 nt, Artificial Sequence
  Description of Artificial Sequence: Synthetic oligonucleotide
  Sense strand starting at position 2266 of SEQ ID NO: 915726
aguaaauggugugggauuu

SEQ ID NO: 1101611 - RNA, 19 nt, Artificial Sequence
  Description of Artificial Sequence: Synthetic oligonucleotide
  Antisense strand to SEQ ID NO: 1101610
aaaucccacaccauuuacu

SEQ ID NO: 1101612 - RNA, 19 nt, Artificial Sequence
  Description of Artificial Sequence: Synthetic oligonucleotide
  Sense strand starting at position 2276 of SEQ ID NO: 915726
gugggauuugcauguaacc

SEQ ID NO: 1101613 - RNA, 19 nt, Artificial Sequence
  Description of Artificial Sequence: Synthetic oligonucleotide
  Antisense strand to SEQ ID NO: 1101612
gguuacaugcaaaucccac

SEQ ID NO: 1101614 - RNA, 19 nt, Artificial Sequence
  Description of Artificial Sequence: Synthetic oligonucleotide
  Sense strand starting at position 2937 of SEQ ID NO: 915726
ugagaugauuucugaguca

SEQ ID NO: 1101615 - RNA, 19 nt, Artificial Sequence
  Description of Artificial Sequence: Synthetic oligonucleotide
  Antisense strand to SEQ ID NO: 1101614
ugacucagaaaucaucuca

SEQ ID NO: 1101616 - RNA, 19 nt, Artificial Sequence
  Description of Artificial Sequence: Synthetic oligonucleotide
  Sense strand starting at position 3026 of SEQ ID NO: 915726
gugauuccaugaugauaau

SEQ ID NO: 1101617 - RNA, 19 nt, Artificial Sequence
  Description of Artificial Sequence: Synthetic oligonucleotide
  Antisense strand to SEQ ID NO: 1101616
auuaucaucauggaaucac

SEQ ID NO: 1101618 - RNA, 19 nt, Artificial Sequence
  Description of Artificial Sequence: Synthetic oligonucleotide
  Sense strand starting at position 3032 of SEQ ID NO: 915726
ccaugaugauaauauacga

SEQ ID NO: 1101619 - RNA, 19 nt, Artificial Sequence
  Description of Artificial Sequence: Synthetic oligonucleotide
  Antisense strand to SEQ ID NO: 1101618
ucguauauuaucaucaugg

SEQ ID NO: 1101620 - RNA, 19 nt, Artificial Sequence
  Description of Artificial Sequence: Synthetic oligonucleotide
  Sense strand starting at position 3104 of SEQ ID NO: 915726
uaugaaguuugcucaggca

SEQ ID NO: 1101621 - RNA, 19 nt, Artificial Sequence
  Description of Artificial Sequence: Synthetic oligonucleotide
  Antisense strand to SEQ ID NO: 1101620
ugccugagcaaacuucaua

SEQ ID NO: 1101622 - RNA, 19 nt, Artificial Sequence
  Description of Artificial Sequence: Synthetic oligonucleotide
  Sense strand starting at position 3154 of SEQ ID NO: 915726
gaguaaucagaguggacug

SEQ ID NO: 1101623 - RNA, 19 nt, Artificial Sequence
  Description of Artificial Sequence: Synthetic oligonucleotide
  Antisense strand to SEQ ID NO: 1101622
caguccacucugauuacuc

SEQ ID NO: 1101624 - RNA, 19 nt, Artificial Sequence
  Description of Artificial Sequence: Synthetic oligonucleotide
  Sense strand starting at position 3526 of SEQ ID NO: 915726
gggagcucuugccaguuga

SEQ ID NO: 1101625 - RNA, 19 nt, Artificial Sequence
  Description of Artificial Sequence: Synthetic oligonucleotide
  Antisense strand to SEQ ID NO: 1101624
ucaacuggcaagagcuccc

SEQ ID NO: 1101626 - RNA, 19 nt, Artificial Sequence
  Description of Artificial Sequence: Synthetic oligonucleotide
  Sense strand starting at position 3530 of SEQ ID NO: 915726
gcucuugccaguugauuag

SEQ ID NO: 1101627 - RNA, 19 nt, Artificial Sequence
  Description of Artificial Sequence: Synthetic oligonucleotide
  Antisense strand to SEQ ID NO: 1101626
cuaaucaacuggcaagagc

SEQ ID NO: 1101628 - RNA, 19 nt, Artificial Sequence
  Description of Artificial Sequence: Synthetic oligonucleotide
  Sense strand starting at position 3536 of SEQ ID NO: 915726
gccaguugauuagaucuau

SEQ ID NO: 1101629 - RNA, 19 nt, Artificial Sequence
  Description of Artificial Sequence: Synthetic oligonucleotide
  Antisense strand to SEQ ID NO: 1101628
auagaucuaaucaacuggc

SEQ ID NO: 1101630 - RNA, 19 nt, Artificial Sequence
  Description of Artificial Sequence: Synthetic oligonucleotide
  Sense strand starting at position 3815 of SEQ ID NO: 915726
gcugaugucuaacuccaga

SEQ ID NO: 1101631 - RNA, 19 nt, Artificial Sequence
  Description of Artificial Sequence: Synthetic oligonucleotide
  Antisense strand to SEQ ID NO: 1101630
ucuggaguuagacaucagc

SEQ ID NO: 1101632 - RNA, 19 nt, Artificial Sequence
  Description of Artificial Sequence: Synthetic oligonucleotide
  Sense strand starting at position 200 of SEQ ID NO: 915727
augugcugagccuaagacu

SEQ ID NO: 1101633 - RNA, 19 nt, Artificial Sequence
  Description of Artificial Sequence: Synthetic oligonucleotide
  Antisense strand to SEQ ID NO: 1101632
agucuuaggcucagcacau

SEQ ID NO: 1101634 - RNA, 19 nt, Artificial Sequence
  Description of Artificial Sequence: Synthetic oligonucleotide
  Sense strand starting at position 340 of SEQ ID NO: 915727
gcugguaucgggucagcuu

SEQ ID NO: 1101635 - RNA, 19 nt, Artificial Sequence
  Description of Artificial Sequence: Synthetic oligonucleotide
  Antisense strand to SEQ ID NO: 1101634
aagcugacccgauaccagc

SEQ ID NO: 1101636 - RNA, 19 nt, Artificial Sequence
  Description of Artificial Sequence: Synthetic oligonucleotide
  Sense strand starting at position 372 of SEQ ID NO: 915727
aggacacacucguugcaua

SEQ ID NO: 1101637 - RNA, 19 nt, Artificial Sequence
  Description of Artificial Sequence: Synthetic oligonucleotide
  Antisense strand to SEQ ID NO: 1101636
uaugcaacgaguguguccu

SEQ ID NO: 1101638 - RNA, 19 nt, Artificial Sequence
  Description of Artificial Sequence: Synthetic oligonucleotide
  Sense strand starting at position 373 of SEQ ID NO: 915727
ggacacacucguugcauaa

SEQ ID NO: 1101639 - RNA, 19 nt, Artificial Sequence
  Description of Artificial Sequence: Synthetic oligonucleotide
  Antisense strand to SEQ ID NO: 1101638
uuaugcaacgagugugucc

SEQ ID NO: 1101640 - RNA, 19 nt, Artificial Sequence
  Description of Artificial Sequence: Synthetic oligonucleotide
  Sense strand starting at position 407 of SEQ ID NO: 915727
uaagcaauccucugagggu

SEQ ID NO: 1101641 - RNA, 19 nt, Artificial Sequence
  Description of Artificial Sequence: Synthetic oligonucleotide
  Antisense strand to SEQ ID NO: 1101640
acccucagaggauugcuua

SEQ ID NO: 1101642 - RNA, 19 nt, Artificial Sequence
  Description of Artificial Sequence: Synthetic oligonucleotide
  Sense strand starting at position 657 of SEQ ID NO: 915727
ucacauggcccuuguauaa

SEQ ID NO: 1101643 - RNA, 19 nt, Artificial Sequence
  Description of Artificial Sequence: Synthetic oligonucleotide
  Antisense strand to SEQ ID NO: 1101642
uuauacaagggccauguga

SEQ ID NO: 1101644 - RNA, 19 nt, Artificial Sequence
  Description of Artificial Sequence: Synthetic oligonucleotide
  Sense strand starting at position 679 of SEQ ID NO: 915727
aggugauaccgugaacuac

SEQ ID NO: 1101645 - RNA, 19 nt, Artificial Sequence
  Description of Artificial Sequence: Synthetic oligonucleotide
  Antisense strand to SEQ ID NO: 1101644
guaguucacgguaucaccu

SEQ ID NO: 1101646 - RNA, 19 nt, Artificial Sequence
  Description of Artificial Sequence: Synthetic oligonucleotide
  Sense strand starting at position 762 of SEQ ID NO: 915727
gacacuaagcaacgagaaa

SEQ ID NO: 1101647 - RNA, 19 nt, Artificial Sequence
  Description of Artificial Sequence: Synthetic oligonucleotide
  Antisense strand to SEQ ID NO: 1101646
uuucucguugcuuaguguc

SEQ ID NO: 1101648 - RNA, 19 nt, Artificial Sequence
  Description of Artificial Sequence: Synthetic oligonucleotide
  Sense strand starting at position 1069 of SEQ ID NO: 915727
ggcccugcugccgugauua

SEQ ID NO: 1101649 - RNA, 19 nt, Artificial Sequence
  Description of Artificial Sequence: Synthetic oligonucleotide
  Antisense strand to SEQ ID NO: 1101648
uaaucacggcagcagggcc

SEQ ID NO: 1101650 - RNA, 19 nt, Artificial Sequence
  Description of Artificial Sequence: Synthetic oligonucleotide
  Sense strand starting at position 1079 of SEQ ID NO: 915727
ccgugauuagggcaacacu

SEQ ID NO: 1101651 - RNA, 19 nt, Artificial Sequence
  Description of Artificial Sequence: Synthetic oligonucleotide
  Antisense strand to SEQ ID NO: 1101650
aguguugcccuaaucacgg

SEQ ID NO: 1101652 - RNA, 19 nt, Artificial Sequence
  Description of Artificial Sequence: Synthetic oligonucleotide
  Sense strand starting at position 1297 of SEQ ID NO: 915727
gcugcauuucucuagcuca

SEQ ID NO: 1101653 - RNA, 19 nt, Artificial Sequence
  Description of Artificial Sequence: Synthetic oligonucleotide
  Antisense strand to SEQ ID NO: 1101652
ugagcuagagaaaugcagc

SEQ ID NO: 1101654 - RNA, 19 nt, Artificial Sequence
  Description of Artificial Sequence: Synthetic oligonucleotide
  Sense strand starting at position 1304 of SEQ ID NO: 915727
uucucuagcucaccugaga

SEQ ID NO: 1101655 - RNA, 19 nt, Artificial Sequence
  Description of Artificial Sequence: Synthetic oligonucleotide
  Antisense strand to SEQ ID NO: 1101654
ucucaggugagcuagagaa

SEQ ID NO: 1101656 - RNA, 19 nt, Artificial Sequence
  Description of Artificial Sequence: Synthetic oligonucleotide
  Sense strand starting at position 1331 of SEQ ID NO: 915727
caagaaagagcuugguuga

SEQ ID NO: 1101657 - RNA, 19 nt, Artificial Sequence
  Description of Artificial Sequence: Synthetic oligonucleotide
  Antisense strand to SEQ ID NO: 1101656
ucaaccaagcucuuucuug

SEQ ID NO: 1101658 - RNA, 19 nt, Artificial Sequence
  Description of Artificial Sequence: Synthetic oligonucleotide
  Sense strand starting at position 1478 of SEQ ID NO: 915727
aauagaagcucagaaggaa

SEQ ID NO: 1101659 - RNA, 19 nt, Artificial Sequence
  Description of Artificial Sequence: Synthetic oligonucleotide
  Antisense strand to SEQ ID NO: 1101658
uuccuucugagcuucuauu

SEQ ID NO: 1101660 - RNA, 19 nt, Artificial Sequence
  Description of Artificial Sequence: Synthetic oligonucleotide
  Sense strand starting at position 1654 of SEQ ID NO: 915727
uccggcagcucauuuaaau

SEQ ID NO: 1101661 - RNA, 19 nt, Artificial Sequence
  Description of Artificial Sequence: Synthetic oligonucleotide
  Antisense strand to SEQ ID NO: 1101660
auuuaaaugagcugccgga

SEQ ID NO: 1101662 - RNA, 19 nt, Artificial Sequence
  Description of Artificial Sequence: Synthetic oligonucleotide
  Sense strand starting at position 1733 of SEQ ID NO: 915727
cccuguuuauacguaggaa

SEQ ID NO: 1101663 - RNA, 19 nt, Artificial Sequence
  Description of Artificial Sequence: Synthetic oligonucleotide
  Antisense strand to SEQ ID NO: 1101662
uuccuacguauaaacaggg

SEQ ID NO: 1101664 - RNA, 19 nt, Artificial Sequence
  Description of Artificial Sequence: Synthetic oligonucleotide
  Sense strand starting at position 1734 of SEQ ID NO: 915727
ccuguuuauacguaggaag

SEQ ID NO: 1101665 - RNA, 19 nt, Artificial Sequence
  Description of Artificial Sequence: Synthetic oligonucleotide
  Antisense strand to SEQ ID NO: 1101664
cuuccuacguauaaacagg

SEQ ID NO: 1101666 - RNA, 19 nt, Artificial Sequence
  Description of Artificial Sequence: Synthetic oligonucleotide
  Sense strand starting at position 1736 of SEQ ID NO: 915727
uguuuauacguaggaagaa

SEQ ID NO: 1101667 - RNA, 19 nt, Artificial Sequence
  Description of Artificial Sequence: Synthetic oligonucleotide
  Antisense strand to SEQ ID NO: 1101666
uucuuccuacguauaaaca

SEQ ID NO: 1101668 - RNA, 19 nt, Artificial Sequence
  Description of Artificial Sequence: Synthetic oligonucleotide
  Sense strand starting at position 1755 of SEQ ID NO: 915727
ugaugcaaucuggguauca

SEQ ID NO: 1101669 - RNA, 19 nt, Artificial Sequence
  Description of Artificial Sequence: Synthetic oligonucleotide
  Antisense strand to SEQ ID NO: 1101668
ugauacccagauugcauca

SEQ ID NO: 1101670 - RNA, 19 nt, Artificial Sequence
  Description of Artificial Sequence: Synthetic oligonucleotide
  Sense strand starting at position 1756 of SEQ ID NO: 915727
gaugcaaucuggguaucaa

SEQ ID NO: 1101671 - RNA, 19 nt, Artificial Sequence
  Description of Artificial Sequence: Synthetic oligonucleotide
  Antisense strand to SEQ ID NO: 1101670
uugauacccagauugcauc

SEQ ID NO: 1101672 - RNA, 19 nt, Artificial Sequence
  Description of Artificial Sequence: Synthetic oligonucleotide
  Sense strand starting at position 1757 of SEQ ID NO: 915727
augcaaucuggguaucaaa

SEQ ID NO: 1101673 - RNA, 19 nt, Artificial Sequence
  Description of Artificial Sequence: Synthetic oligonucleotide
  Antisense strand to SEQ ID NO: 1101672
uuugauacccagauugcau

SEQ ID NO: 1101674 - RNA, 19 nt, Artificial Sequence
  Description of Artificial Sequence: Synthetic oligonucleotide
  Sense strand starting at position 2075 of SEQ ID NO: 915727
gaccaauuguccgucacaa

SEQ ID NO: 1101675 - RNA, 19 nt, Artificial Sequence
  Description of Artificial Sequence: Synthetic oligonucleotide
  Antisense strand to SEQ ID NO: 1101674
uugugacggacaauugguc

SEQ ID NO: 1101676 - RNA, 19 nt, Artificial Sequence
  Description of Artificial Sequence: Synthetic oligonucleotide
  Sense strand starting at position 2325 of SEQ ID NO: 915727
cagggaugugcuuggaaag

SEQ ID NO: 1101677 - RNA, 19 nt, Artificial Sequence
  Description of Artificial Sequence: Synthetic oligonucleotide
  Antisense strand to SEQ ID NO: 1101676
cuuuccaagcacaucccug

SEQ ID NO: 1101678 - RNA, 19 nt, Artificial Sequence
  Description of Artificial Sequence: Synthetic oligonucleotide
  Sense strand starting at position 2326 of SEQ ID NO: 915727
agggaugugcuuggaaaga

SEQ ID NO: 1101679 - RNA, 19 nt, Artificial Sequence
  Description of Artificial Sequence: Synthetic oligonucleotide
  Antisense strand to SEQ ID NO: 1101678
ucuuuccaagcacaucccu

SEQ ID NO: 1101680 - RNA, 19 nt, Artificial Sequence
  Description of Artificial Sequence: Synthetic oligonucleotide
  Sense strand starting at position 2447 of SEQ ID NO: 915727
ugagcugggcuuuaugauu

SEQ ID NO: 1101681 - RNA, 19 nt, Artificial Sequence
  Description of Artificial Sequence: Synthetic oligonucleotide
  Antisense strand to SEQ ID NO: 1101680
aaucauaaagcccagcuca

SEQ ID NO: 1101682 - RNA, 19 nt, Artificial Sequence
  Description of Artificial Sequence: Synthetic oligonucleotide
  Sense strand starting at position 2452 of SEQ ID NO: 915727
ugggcuuuaugauuaucuu

SEQ ID NO: 1101683 - RNA, 19 nt, Artificial Sequence
  Description of Artificial Sequence: Synthetic oligonucleotide
  Antisense strand to SEQ ID NO: 1101682
aagauaaucauaaagccca

SEQ ID NO: 1101684 - RNA, 19 nt, Artificial Sequence
  Description of Artificial Sequence: Synthetic oligonucleotide
  Sense strand starting at position 2453 of SEQ ID NO: 915727
gggcuuuaugauuaucuug

SEQ ID NO: 1101685 - RNA, 19 nt, Artificial Sequence
  Description of Artificial Sequence: Synthetic oligonucleotide
  Antisense strand to SEQ ID NO: 1101684
caagauaaucauaaagccc

SEQ ID NO: 1101686 - RNA, 19 nt, Artificial Sequence
  Description of Artificial Sequence: Synthetic oligonucleotide
  Sense strand starting at position 2455 of SEQ ID NO: 915727
gcuuuaugauuaucuugau

SEQ ID NO: 1101687 - RNA, 19 nt, Artificial Sequence
  Description of Artificial Sequence: Synthetic oligonucleotide
  Antisense strand to SEQ ID NO: 1101686
aucaagauaaucauaaagc

SEQ ID NO: 1101688 - RNA, 19 nt, Artificial Sequence
  Description of Artificial Sequence: Synthetic oligonucleotide
  Sense strand starting at position 2456 of SEQ ID NO: 915727
cuuuaugauuaucuugaug

SEQ ID NO: 1101689 - RNA, 19 nt, Artificial Sequence
  Description of Artificial Sequence: Synthetic oligonucleotide
  Antisense strand to SEQ ID NO: 1101688
caucaagauaaucauaaag

SEQ ID NO: 1101690 - RNA, 19 nt, Artificial Sequence
  Description of Artificial Sequence: Synthetic oligonucleotide
  Sense strand starting at position 2493 of SEQ ID NO: 915727
caggguaguugagcauuaa

SEQ ID NO: 1101691 - RNA, 19 nt, Artificial Sequence
  Description of Artificial Sequence: Synthetic oligonucleotide
  Antisense strand to SEQ ID NO: 1101690
uuaaugcucaacuacccug

SEQ ID NO: 1101692 - RNA, 19 nt, Artificial Sequence
  Description of Artificial Sequence: Synthetic oligonucleotide
  Sense strand starting at position 2494 of SEQ ID NO: 915727
aggguaguugagcauuaau

SEQ ID NO: 1101693 - RNA, 19 nt, Artificial Sequence
  Description of Artificial Sequence: Synthetic oligonucleotide
  Antisense strand to SEQ ID NO: 1101692
auuaaugcucaacuacccu

SEQ ID NO: 1101694 - RNA, 19 nt, Artificial Sequence
  Description of Artificial Sequence: Synthetic oligonucleotide
  Sense strand starting at position 3268 of SEQ ID NO: 915727
uccugaccucaggauaugu

SEQ ID NO: 1101695 - RNA, 19 nt, Artificial Sequence
  Description of Artificial Sequence: Synthetic oligonucleotide
  Antisense strand to SEQ ID NO: 1101694
acauauccugaggucagga

SEQ ID NO: 1101696 - RNA, 19 nt, Artificial Sequence
  Description of Artificial Sequence: Synthetic oligonucleotide
  Sense strand starting at position 3277 of SEQ ID NO: 915727
caggauaugugaccauauu

SEQ ID NO: 1101697 - RNA, 19 nt, Artificial Sequence
  Description of Artificial Sequence: Synthetic oligonucleotide
  Antisense strand to SEQ ID NO: 1101696
aauauggucacauauccug

SEQ ID NO: 1101698 - RNA, 19 nt, Artificial Sequence
  Description of Artificial Sequence: Synthetic oligonucleotide
  Sense strand starting at position 3566 of SEQ ID NO: 915727
uggugucaccuacagauuc

SEQ ID NO: 1101699 - RNA, 19 nt, Artificial Sequence
  Description of Artificial Sequence: Synthetic oligonucleotide
  Antisense strand to SEQ ID NO: 1101698
gaaucuguaggugacacca

SEQ ID NO: 1101700 - RNA, 19 nt, Artificial Sequence
  Description of Artificial Sequence: Synthetic oligonucleotide
  Sense strand starting at position 3807 of SEQ ID NO: 915727
ugacaucuggccuaaagca

SEQ ID NO: 1101701 - RNA, 19 nt, Artificial Sequence
  Description of Artificial Sequence: Synthetic oligonucleotide
  Antisense strand to SEQ ID NO: 1101700
ugcuuuaggccagauguca

SEQ ID NO: 1101702 - RNA, 19 nt, Artificial Sequence
  Description of Artificial Sequence: Synthetic oligonucleotide
  Sense strand starting at position 3823 of SEQ ID NO: 915727
gcaacagcuccuuaaauug

SEQ ID NO: 1101703 - RNA, 19 nt, Artificial Sequence
  Description of Artificial Sequence: Synthetic oligonucleotide
  Antisense strand to SEQ ID NO: 1101702
caauuuaaggagcuguugc

SEQ ID NO: 1101704 - RNA, 19 nt, Artificial Sequence
  Description of Artificial Sequence: Synthetic oligonucleotide
  Sense strand starting at position 3856 of SEQ ID NO: 915727
uuuggaguuuaauucugau

SEQ ID NO: 1101705 - RNA, 19 nt, Artificial Sequence
  Description of Artificial Sequence: Synthetic oligonucleotide
  Antisense strand to SEQ ID NO: 1101704
aucagaauuaaacuccaaa

SEQ ID NO: 1101706 - RNA, 19 nt, Artificial Sequence
  Description of Artificial Sequence: Synthetic oligonucleotide
  Sense strand starting at position 3913 of SEQ ID NO: 915727
ugugaacucuaauucugau

SEQ ID NO: 1101707 - RNA, 19 nt, Artificial Sequence
  Description of Artificial Sequence: Synthetic oligonucleotide
  Antisense strand to SEQ ID NO: 1101706
aucagaauuagaguucaca

SEQ ID NO: 1101708 - RNA, 19 nt, Artificial Sequence
  Description of Artificial Sequence: Synthetic oligonucleotide
  Sense strand starting at position 3925 of SEQ ID NO: 915727
uucugauaacugggucaca

SEQ ID NO: 1101709 - RNA, 19 nt, Artificial Sequence
  Description of Artificial Sequence: Synthetic oligonucleotide
  Antisense strand to SEQ ID NO: 1101708
ugugacccaguuaucagaa

SEQ ID NO: 1101710 - RNA, 19 nt, Artificial Sequence
  Description of Artificial Sequence: Synthetic oligonucleotide
  Sense strand starting at position 3926 of SEQ ID NO: 915727
ucugauaacugggucacau

SEQ ID NO: 1101711 - RNA, 19 nt, Artificial Sequence
  Description of Artificial Sequence: Synthetic oligonucleotide
  Antisense strand to SEQ ID NO: 1101710
augugacccaguuaucaga

SEQ ID NO: 1101712 - RNA, 19 nt, Artificial Sequence
  Description of Artificial Sequence: Synthetic oligonucleotide
  Sense strand starting at position 66 of SEQ ID NO: 915728
gccacauaugggcauggaa

SEQ ID NO: 1101713 - RNA, 19 nt, Artificial Sequence
  Description of Artificial Sequence: Synthetic oligonucleotide
  Antisense strand to SEQ ID NO: 1101712
uuccaugcccauauguggc

SEQ ID NO: 1101714 - RNA, 19 nt, Artificial Sequence
  Description of Artificial Sequence: Synthetic oligonucleotide
  Sense strand starting at position 175 of SEQ ID NO: 915728
gggacauguugauccuagu

SEQ ID NO: 1101715 - RNA, 19 nt, Artificial Sequence
  Description of Artificial Sequence: Synthetic oligonucleotide
  Antisense strand to SEQ ID NO: 1101714
acuaggaucaacauguccc

SEQ ID NO: 1101716 - RNA, 19 nt, Artificial Sequence
  Description of Artificial Sequence: Synthetic oligonucleotide
  Sense strand starting at position 232 of SEQ ID NO: 915728
gcagauauugcugaguaaa

SEQ ID NO: 1101717 - RNA, 19 nt, Artificial Sequence
  Description of Artificial Sequence: Synthetic oligonucleotide
  Antisense strand to SEQ ID NO: 1101716
uuuacucagcaauaucugc

SEQ ID NO: 1101718 - RNA, 19 nt, Artificial Sequence
  Description of Artificial Sequence: Synthetic oligonucleotide
  Sense strand starting at position 234 of SEQ ID NO: 915728
agauauugcugaguaaaua

SEQ ID NO: 1101719 - RNA, 19 nt, Artificial Sequence
  Description of Artificial Sequence: Synthetic oligonucleotide
  Antisense strand to SEQ ID NO: 1101718
uauuuacucagcaauaucu

SEQ ID NO: 1101720 - RNA, 19 nt, Artificial Sequence
  Description of Artificial Sequence: Synthetic oligonucleotide
  Sense strand starting at position 235 of SEQ ID NO: 915728
gauauugcugaguaaauau

SEQ ID NO: 1101721 - RNA, 19 nt, Artificial Sequence
  Description of Artificial Sequence: Synthetic oligonucleotide
  Antisense strand to SEQ ID NO: 1101720
auauuuacucagcaauauc

SEQ ID NO: 1101722 - RNA, 19 nt, Artificial Sequence
  Description of Artificial Sequence: Synthetic oligonucleotide
  Sense strand starting at position 396 of SEQ ID NO: 915728
uucugagcacuuuacauga

SEQ ID NO: 1101723 - RNA, 19 nt, Artificial Sequence
  Description of Artificial Sequence: Synthetic oligonucleotide
  Antisense strand to SEQ ID NO: 1101722
ucauguaaagugcucagaa

SEQ ID NO: 1101724 - RNA, 19 nt, Artificial Sequence
  Description of Artificial Sequence: Synthetic oligonucleotide
  Sense strand starting at position 519 of SEQ ID NO: 915728
ccucuuuagcuuuaaggua

SEQ ID NO: 1101725 - RNA, 19 nt, Artificial Sequence
  Description of Artificial Sequence: Synthetic oligonucleotide
  Antisense strand to SEQ ID NO: 1101724
uaccuuaaagcuaaagagg

SEQ ID NO: 1101726 - RNA, 19 nt, Artificial Sequence
  Description of Artificial Sequence: Synthetic oligonucleotide
  Sense strand starting at position 526 of SEQ ID NO: 915728
agcuuuaagguauaauaca

SEQ ID NO: 1101727 - RNA, 19 nt, Artificial Sequence
  Description of Artificial Sequence: Synthetic oligonucleotide
  Antisense strand to SEQ ID NO: 1101726
uguauuauaccuuaaagcu

SEQ ID NO: 1101728 - RNA, 19 nt, Artificial Sequence
  Description of Artificial Sequence: Synthetic oligonucleotide
  Sense strand starting at position 572 of SEQ ID NO: 915728
gguuuagcgcaguccagua

SEQ ID NO: 1101729 - RNA, 19 nt, Artificial Sequence
  Description of Artificial Sequence: Synthetic oligonucleotide
  Antisense strand to SEQ ID NO: 1101728
uacuggacugcgcuaaacc

SEQ ID NO: 1101730 - RNA, 19 nt, Artificial Sequence
  Description of Artificial Sequence: Synthetic oligonucleotide
  Sense strand starting at position 602 of SEQ ID NO: 915728
gaagcagagcaguaaaucu

SEQ ID NO: 1101731 - RNA, 19 nt, Artificial Sequence
  Description of Artificial Sequence: Synthetic oligonucleotide
  Antisense strand to SEQ ID NO: 1101730
agauuuacugcucugcuuc

SEQ ID NO: 1101732 - RNA, 19 nt, Artificial Sequence
  Description of Artificial Sequence: Synthetic oligonucleotide
  Sense strand starting at position 619 of SEQ ID NO: 915728
cuugcaggacucugauaug

SEQ ID NO: 1101733 - RNA, 19 nt, Artificial Sequence
  Description of Artificial Sequence: Synthetic oligonucleotide
  Antisense strand to SEQ ID NO: 1101732
cauaucagaguccugcaag

SEQ ID NO: 1101734 - RNA, 19 nt, Artificial Sequence
  Description of Artificial Sequence: Synthetic oligonucleotide
  Sense strand starting at position 938 of SEQ ID NO: 915728
ugacgucauuugccaugua

SEQ ID NO: 1101735 - RNA, 19 nt, Artificial Sequence
  Description of Artificial Sequence: Synthetic oligonucleotide
  Antisense strand to SEQ ID NO: 1101734
uacauggcaaaugacguca

SEQ ID NO: 1101736 - RNA, 19 nt, Artificial Sequence
  Description of Artificial Sequence: Synthetic oligonucleotide
  Sense strand starting at position 1046 of SEQ ID NO: 915728
agaacagugccucaaauac

SEQ ID NO: 1101737 - RNA, 19 nt, Artificial Sequence
  Description of Artificial Sequence: Synthetic oligonucleotide
  Antisense strand to SEQ ID NO: 1101736
guauuugaggcacuguucu

SEQ ID NO: 1101738 - RNA, 19 nt, Artificial Sequence
  Description of Artificial Sequence: Synthetic oligonucleotide
  Sense strand starting at position 1061 of SEQ ID NO: 915728
auacuuguugaauacguga

SEQ ID NO: 1101739 - RNA, 19 nt, Artificial Sequence
  Description of Artificial Sequence: Synthetic oligonucleotide
  Antisense strand to SEQ ID NO: 1101738
ucacguauucaacaaguau

SEQ ID NO: 1101740 - RNA, 19 nt, Artificial Sequence
  Description of Artificial Sequence: Synthetic oligonucleotide
  Sense strand starting at position 1097 of SEQ ID NO: 915728
ugaguuccaaccgauagua

SEQ ID NO: 1101741 - RNA, 19 nt, Artificial Sequence
  Description of Artificial Sequence: Synthetic oligonucleotide
  Antisense strand to SEQ ID NO: 1101740
uacuaucgguuggaacuca

SEQ ID NO: 1101742 - RNA, 19 nt, Artificial Sequence
  Description of Artificial Sequence: Synthetic oligonucleotide
  Sense strand starting at position 1099 of SEQ ID NO: 915728
aguuccaaccgauaguaga

SEQ ID NO: 1101743 - RNA, 19 nt, Artificial Sequence
  Description of Artificial Sequence: Synthetic oligonucleotide
  Antisense strand to SEQ ID NO: 1101742
ucuacuaucgguuggaacu

SEQ ID NO: 1101744 - RNA, 19 nt, Artificial Sequence
  Description of Artificial Sequence: Synthetic oligonucleotide
  Sense strand starting at position 1107 of SEQ ID NO: 915728
ccgauaguagauugaaagu

SEQ ID NO: 1101745 - RNA, 19 nt, Artificial Sequence
  Description of Artificial Sequence: Synthetic oligonucleotide
  Antisense strand to SEQ ID NO: 1101744
acuuucaaucuacuaucgg

SEQ ID NO: 1101746 - RNA, 19 nt, Artificial Sequence
  Description of Artificial Sequence: Synthetic oligonucleotide
  Sense strand starting at position 1120 of SEQ ID NO: 915728
gaaaguggaggauguguua

SEQ ID NO: 1101747 - RNA, 19 nt, Artificial Sequence
  Description of Artificial Sequence: Synthetic oligonucleotide
  Antisense strand to SEQ ID NO: 1101746
uaacacauccuccacuuuc

SEQ ID NO: 1101748 - RNA, 19 nt, Artificial Sequence
  Description of Artificial Sequence: Synthetic oligonucleotide
  Sense strand starting at position 1123 of SEQ ID NO: 915728
aguggaggauguguuaaua

SEQ ID NO: 1101749 - RNA, 19 nt, Artificial Sequence
  Description of Artificial Sequence: Synthetic oligonucleotide
  Antisense strand to SEQ ID NO: 1101748
uauuaacacauccuccacu

SEQ ID NO: 1101750 - RNA, 19 nt, Artificial Sequence
  Description of Artificial Sequence: Synthetic oligonucleotide
  Sense strand starting at position 1145 of SEQ ID NO: 915728
uuagcuaagucaguagaga

SEQ ID NO: 1101751 - RNA, 19 nt, Artificial Sequence
  Description of Artificial Sequence: Synthetic oligonucleotide
  Antisense strand to SEQ ID NO: 1101750
ucucuacugacuuagcuaa

SEQ ID NO: 1101752 - RNA, 19 nt, Artificial Sequence
  Description of Artificial Sequence: Synthetic oligonucleotide
  Sense strand starting at position 1203 of SEQ ID NO: 915728
ggaaguugauacccauuau

SEQ ID NO: 1101753 - RNA, 19 nt, Artificial Sequence
  Description of Artificial Sequence: Synthetic oligonucleotide
  Antisense strand to SEQ ID NO: 1101752
auaauggguaucaacuucc

SEQ ID NO: 1101754 - RNA, 19 nt, Artificial Sequence
  Description of Artificial Sequence: Synthetic oligonucleotide
  Sense strand starting at position 2178 of SEQ ID NO: 915728
cgacucagauucccuuaaa

SEQ ID NO: 1101755 - RNA, 19 nt, Artificial Sequence
  Description of Artificial Sequence: Synthetic oligonucleotide
  Antisense strand to SEQ ID NO: 1101754
uuuaagggaaucugagucg

SEQ ID NO: 1101756 - RNA, 19 nt, Artificial Sequence
  Description of Artificial Sequence: Synthetic oligonucleotide
  Sense strand starting at position 2213 of SEQ ID NO: 915728
gaguuaguucuaggauagg

SEQ ID NO: 1101757 - RNA, 19 nt, Artificial Sequence
  Description of Artificial Sequence: Synthetic oligonucleotide
  Antisense strand to SEQ ID NO: 1101756
ccuauccuagaacuaacuc

SEQ ID NO: 1101758 - RNA, 19 nt, Artificial Sequence
  Description of Artificial Sequence: Synthetic oligonucleotide
  Sense strand starting at position 2216 of SEQ ID NO: 915728
uuaguucuaggauagguca

SEQ ID NO: 1101759 - RNA, 19 nt, Artificial Sequence
  Description of Artificial Sequence: Synthetic oligonucleotide
  Antisense strand to SEQ ID NO: 1101758
ugaccuauccuagaacuaa

SEQ ID NO: 1101760 - RNA, 19 nt, Artificial Sequence
  Description of Artificial Sequence: Synthetic oligonucleotide
  Sense strand starting at position 2218 of SEQ ID NO: 915728
aguucuaggauaggucaaa

SEQ ID NO: 1101761 - RNA, 19 nt, Artificial Sequence
  Description of Artificial Sequence: Synthetic oligonucleotide
  Antisense strand to SEQ ID NO: 1101760
uuugaccuauccuagaacu

SEQ ID NO: 1101762 - RNA, 19 nt, Artificial Sequence
  Description of Artificial Sequence: Synthetic oligonucleotide
  Sense strand starting at position 2444 of SEQ ID NO: 915728
uuuaaauacuggguucuua

SEQ ID NO: 1101763 - RNA, 19 nt, Artificial Sequence
  Description of Artificial Sequence: Synthetic oligonucleotide
  Antisense strand to SEQ ID NO: 1101762
uaagaacccaguauuuaaa

SEQ ID NO: 1101764 - RNA, 19 nt, Artificial Sequence
  Description of Artificial Sequence: Synthetic oligonucleotide
  Sense strand starting at position 2579 of SEQ ID NO: 915728
ccgggaguugauggagaaa

SEQ ID NO: 1101765 - RNA, 19 nt, Artificial Sequence
  Description of Artificial Sequence: Synthetic oligonucleotide
  Antisense strand to SEQ ID NO: 1101764
uuucuccaucaacucccgg

SEQ ID NO: 1101766 - RNA, 19 nt, Artificial Sequence
  Description of Artificial Sequence: Synthetic oligonucleotide
  Sense strand starting at position 2581 of SEQ ID NO: 915728
gggaguugauggagaaaug

SEQ ID NO: 1101767 - RNA, 19 nt, Artificial Sequence
  Description of Artificial Sequence: Synthetic oligonucleotide
  Antisense strand to SEQ ID NO: 1101766
cauuucuccaucaacuccc

SEQ ID NO: 1101768 - RNA, 19 nt, Artificial Sequence
  Description of Artificial Sequence: Synthetic oligonucleotide
  Sense strand starting at position 2707 of SEQ ID NO: 915728
uacuuaagacagugauaug

SEQ ID NO: 1101769 - RNA, 19 nt, Artificial Sequence
  Description of Artificial Sequence: Synthetic oligonucleotide
  Antisense strand to SEQ ID NO: 1101768
cauaucacugucuuaagua

SEQ ID NO: 1101770 - RNA, 19 nt, Artificial Sequence
  Description of Artificial Sequence: Synthetic oligonucleotide
  Sense strand starting at position 2795 of SEQ ID NO: 915728
accuccuauccgcauagaa

SEQ ID NO: 1101771 - RNA, 19 nt, Artificial Sequence
  Description of Artificial Sequence: Synthetic oligonucleotide
  Antisense strand to SEQ ID NO: 1101770
uucuaugcggauaggaggu

SEQ ID NO: 1101772 - RNA, 19 nt, Artificial Sequence
  Description of Artificial Sequence: Synthetic oligonucleotide
  Sense strand starting at position 3034 of SEQ ID NO: 915728
agaaauggcugcucuaaua

SEQ ID NO: 1101773 - RNA, 19 nt, Artificial Sequence
  Description of Artificial Sequence: Synthetic oligonucleotide
  Antisense strand to SEQ ID NO: 1101772
uauuagagcagccauuucu

SEQ ID NO: 1101774 - RNA, 19 nt, Artificial Sequence
  Description of Artificial Sequence: Synthetic oligonucleotide
  Sense strand starting at position 3434 of SEQ ID NO: 915728
cuuuauuuguuugcuguga

SEQ ID NO: 1101775 - RNA, 19 nt, Artificial Sequence
  Description of Artificial Sequence: Synthetic oligonucleotide
  Antisense strand to SEQ ID NO: 1101774
ucacagcaaacaaauaaag

SEQ ID NO: 1101776 - RNA, 19 nt, Artificial Sequence
  Description of Artificial Sequence: Synthetic oligonucleotide
  Sense strand starting at position 3438 of SEQ ID NO: 915728
auuuguuugcugugagaca

SEQ ID NO: 1101777 - RNA, 19 nt, Artificial Sequence
  Description of Artificial Sequence: Synthetic oligonucleotide
  Antisense strand to SEQ ID NO: 1101776
ugucucacagcaaacaaau

SEQ ID NO: 1101778 - RNA, 19 nt, Artificial Sequence
  Description of Artificial Sequence: Synthetic oligonucleotide
  Sense strand starting at position 3483 of SEQ ID NO: 915728
ggacaaauuccacagcugu

SEQ ID NO: 1101779 - RNA, 19 nt, Artificial Sequence
  Description of Artificial Sequence: Synthetic oligonucleotide
  Antisense strand to SEQ ID NO: 1101778
acagcuguggaauuugucc

SEQ ID NO: 1101780 - RNA, 19 nt, Artificial Sequence
  Description of Artificial Sequence: Synthetic oligonucleotide
  Sense strand starting at position 3548 of SEQ ID NO: 915728
caacaagaugaguggcuaa

SEQ ID NO: 1101781 - RNA, 19 nt, Artificial Sequence
  Description of Artificial Sequence: Synthetic oligonucleotide
  Antisense strand to SEQ ID NO: 1101780
uuagccacucaucuuguug

SEQ ID NO: 1101782 - RNA, 19 nt, Artificial Sequence
  Description of Artificial Sequence: Synthetic oligonucleotide
  Sense strand starting at position 3781 of SEQ ID NO: 915728
cucuuacucuuucugagga

SEQ ID NO: 1101783 - RNA, 19 nt, Artificial Sequence
  Description of Artificial Sequence: Synthetic oligonucleotide
  Antisense strand to SEQ ID NO: 1101782
uccucagaaagaguaagag

SEQ ID NO: 1101784 - RNA, 19 nt, Artificial Sequence
  Description of Artificial Sequence: Synthetic oligonucleotide
  Sense strand starting at position 3786 of SEQ ID NO: 915728
acucuuucugaggaagcau

SEQ ID NO: 1101785 - RNA, 19 nt, Artificial Sequence
  Description of Artificial Sequence: Synthetic oligonucleotide
  Antisense strand to SEQ ID NO: 1101784
augcuuccucagaaagagu

SEQ ID NO: 1101786 - RNA, 19 nt, Artificial Sequence
  Description of Artificial Sequence: Synthetic oligonucleotide
  Sense strand starting at position 3831 of SEQ ID NO: 915728
uaaucuuaggcuugaugag

SEQ ID NO: 1101787 - RNA, 19 nt, Artificial Sequence
  Description of Artificial Sequence: Synthetic oligonucleotide
  Antisense strand to SEQ ID NO: 1101786
cucaucaagccuaagauua

SEQ ID NO: 1101788 - RNA, 19 nt, Artificial Sequence
  Description of Artificial Sequence: Synthetic oligonucleotide
  Sense strand starting at position 3900 of SEQ ID NO: 915728
guuaguggugugucaguca

SEQ ID NO: 1101789 - RNA, 19 nt, Artificial Sequence
  Description of Artificial Sequence: Synthetic oligonucleotide
  Antisense strand to SEQ ID NO: 1101788
ugacugacacaccacuaac

SEQ ID NO: 1101790 - RNA, 19 nt, Artificial Sequence
  Description of Artificial Sequence: Synthetic oligonucleotide
  Sense strand starting at position 3964 of SEQ ID NO: 915728
ccuagaccaugaguagaua

SEQ ID NO: 1101791 - RNA, 19 nt, Artificial Sequence
  Description of Artificial Sequence: Synthetic oligonucleotide
  Antisense strand to SEQ ID NO: 1101790
uaucuacucauggucuagg

SEQ ID NO: 1101792 - RNA, 19 nt, Artificial Sequence
  Description of Artificial Sequence: Synthetic oligonucleotide
  Sense strand starting at position 127 of SEQ ID NO: 915729
uaaugaggcuacuugagua

SEQ ID NO: 1101793 - RNA, 19 nt, Artificial Sequence
  Description of Artificial Sequence: Synthetic oligonucleotide
  Antisense strand to SEQ ID NO: 1101792
uacucaaguagccucauua

SEQ ID NO: 1101794 - RNA, 19 nt, Artificial Sequence
  Description of Artificial Sequence: Synthetic oligonucleotide
  Sense strand starting at position 132 of SEQ ID NO: 915729
aggcuacuugaguauguaa

SEQ ID NO: 1101795 - RNA, 19 nt, Artificial Sequence
  Description of Artificial Sequence: Synthetic oligonucleotide
  Antisense strand to SEQ ID NO: 1101794
uuacauacucaaguagccu

SEQ ID NO: 1101796 - RNA, 19 nt, Artificial Sequence
  Description of Artificial Sequence: Synthetic oligonucleotide
  Sense strand starting at position 135 of SEQ ID NO: 915729
cuacuugaguauguaacau

SEQ ID NO: 1101797 - RNA, 19 nt, Artificial Sequence
  Description of Artificial Sequence: Synthetic oligonucleotide
  Antisense strand to SEQ ID NO: 1101796
auguuacauacucaaguag

SEQ ID NO: 1101798 - RNA, 19 nt, Artificial Sequence
  Description of Artificial Sequence: Synthetic oligonucleotide
  Sense strand starting at position 270 of SEQ ID NO: 915729
aaagauuuguaagaguuga

SEQ ID NO: 1101799 - RNA, 19 nt, Artificial Sequence
  Description of Artificial Sequence: Synthetic oligonucleotide
  Antisense strand to SEQ ID NO: 1101798
ucaacucuuacaaaucuuu

SEQ ID NO: 1101800 - RNA, 19 nt, Artificial Sequence
  Description of Artificial Sequence: Synthetic oligonucleotide
  Sense strand starting at position 300 of SEQ ID NO: 915729
aaagcugaggcuugggaaa

SEQ ID NO: 1101801 - RNA, 19 nt, Artificial Sequence
  Description of Artificial Sequence: Synthetic oligonucleotide
  Antisense strand to SEQ ID NO: 1101800
uuucccaagccucagcuuu

SEQ ID NO: 1101802 - RNA, 19 nt, Artificial Sequence
  Description of Artificial Sequence: Synthetic oligonucleotide
  Sense strand starting at position 335 of SEQ ID NO: 915729
ggagcauacaguuagcaua

SEQ ID NO: 1101803 - RNA, 19 nt, Artificial Sequence
  Description of Artificial Sequence: Synthetic oligonucleotide
  Antisense strand to SEQ ID NO: 1101802
uaugcuaacuguaugcucc

SEQ ID NO: 1101804 - RNA, 19 nt, Artificial Sequence
  Description of Artificial Sequence: Synthetic oligonucleotide
  Sense strand starting at position 534 of SEQ ID NO: 915729
agcccagugcaucaaauua

SEQ ID NO: 1101805 - RNA, 19 nt, Artificial Sequence
  Description of Artificial Sequence: Synthetic oligonucleotide
  Antisense strand to SEQ ID NO: 1101804
uaauuugaugcacugggcu

SEQ ID NO: 1101806 - RNA, 19 nt, Artificial Sequence
  Description of Artificial Sequence: Synthetic oligonucleotide
  Sense strand starting at position 648 of SEQ ID NO: 915729
cuuggaguucuuuaugcag

SEQ ID NO: 1101807 - RNA, 19 nt, Artificial Sequence
  Description of Artificial Sequence: Synthetic oligonucleotide
  Antisense strand to SEQ ID NO: 1101806
cugcauaaagaacuccaag

SEQ ID NO: 1101808 - RNA, 19 nt, Artificial Sequence
  Description of Artificial Sequence: Synthetic oligonucleotide
  Sense strand starting at position 651 of SEQ ID NO: 915729
ggaguucuuuaugcagaau

SEQ ID NO: 1101809 - RNA, 19 nt, Artificial Sequence
  Description of Artificial Sequence: Synthetic oligonucleotide
  Antisense strand to SEQ ID NO: 1101808
auucugcauaaagaacucc

SEQ ID NO: 1101810 - RNA, 19 nt, Artificial Sequence
  Description of Artificial Sequence: Synthetic oligonucleotide
  Sense strand starting at position 668 of SEQ ID NO: 915729
aucucagucuuuccuggaa

SEQ ID NO: 1101811 - RNA, 19 nt, Artificial Sequence
  Description of Artificial Sequence: Synthetic oligonucleotide
  Antisense strand to SEQ ID NO: 1101810
uuccaggaaagacugagau

SEQ ID NO: 1101812 - RNA, 19 nt, Artificial Sequence
  Description of Artificial Sequence: Synthetic oligonucleotide
  Sense strand starting at position 671 of SEQ ID NO: 915729
ucagucuuuccuggaauga

SEQ ID NO: 1101813 - RNA, 19 nt, Artificial Sequence
  Description of Artificial Sequence: Synthetic oligonucleotide
  Antisense strand to SEQ ID NO: 1101812
ucauuccaggaaagacuga

SEQ ID NO: 1101814 - RNA, 19 nt, Artificial Sequence
  Description of Artificial Sequence: Synthetic oligonucleotide
  Sense strand starting at position 708 of SEQ ID NO: 915729
auauuaaaguucucuaggu

SEQ ID NO: 1101815 - RNA, 19 nt, Artificial Sequence
  Description of Artificial Sequence: Synthetic oligonucleotide
  Antisense strand to SEQ ID NO: 1101814
accuagagaacuuuaauau

SEQ ID NO: 1101816 - RNA, 19 nt, Artificial Sequence
  Description of Artificial Sequence: Synthetic oligonucleotide
  Sense strand starting at position 709 of SEQ ID NO: 915729
uauuaaaguucucuaggug

SEQ ID NO: 1101817 - RNA, 19 nt, Artificial Sequence
  Description of Artificial Sequence: Synthetic oligonucleotide
  Antisense strand to SEQ ID NO: 1101816
caccuagagaacuuuaaua

SEQ ID NO: 1101818 - RNA, 19 nt, Artificial Sequence
  Description of Artificial Sequence: Synthetic oligonucleotide
  Sense strand starting at position 710 of SEQ ID NO: 915729
auuaaaguucucuagguga

SEQ ID NO: 1101819 - RNA, 19 nt, Artificial Sequence
  Description of Artificial Sequence: Synthetic oligonucleotide
  Antisense strand to SEQ ID NO: 1101818
ucaccuagagaacuuuaau

SEQ ID NO: 1101820 - RNA, 19 nt, Artificial Sequence
  Description of Artificial Sequence: Synthetic oligonucleotide
  Sense strand starting at position 1007 of SEQ ID NO: 915729
ccuagugaaaguggaauaa

SEQ ID NO: 1101821 - RNA, 19 nt, Artificial Sequence
  Description of Artificial Sequence: Synthetic oligonucleotide
  Antisense strand to SEQ ID NO: 1101820
uuauuccacuuucacuagg

SEQ ID NO: 1101822 - RNA, 19 nt, Artificial Sequence
  Description of Artificial Sequence: Synthetic oligonucleotide
  Sense strand starting at position 1038 of SEQ ID NO: 915729
uugcauuuauaagugaguu

SEQ ID NO: 1101823 - RNA, 19 nt, Artificial Sequence
  Description of Artificial Sequence: Synthetic oligonucleotide
  Antisense strand to SEQ ID NO: 1101822
aacucacuuauaaaugcaa

SEQ ID NO: 1101824 - RNA, 19 nt, Artificial Sequence
  Description of Artificial Sequence: Synthetic oligonucleotide
  Sense strand starting at position 1048 of SEQ ID NO: 915729
aagugaguugggcaugagu

SEQ ID NO: 1101825 - RNA, 19 nt, Artificial Sequence
  Description of Artificial Sequence: Synthetic oligonucleotide
  Antisense strand to SEQ ID NO: 1101824
acucaugcccaacucacuu

SEQ ID NO: 1101826 - RNA, 19 nt, Artificial Sequence
  Description of Artificial Sequence: Synthetic oligonucleotide
  Sense strand starting at position 1065 of SEQ ID NO: 915729
guucuugcacuuuaggaau

SEQ ID NO: 1101827 - RNA, 19 nt, Artificial Sequence
  Description of Artificial Sequence: Synthetic oligonucleotide
  Antisense strand to SEQ ID NO: 1101826
auuccuaaagugcaagaac

SEQ ID NO: 1101828 - RNA, 19 nt, Artificial Sequence
  Description of Artificial Sequence: Synthetic oligonucleotide
  Sense strand starting at position 1131 of SEQ ID NO: 915729
gcaauugauuaucuaacag

SEQ ID NO: 1101829 - RNA, 19 nt, Artificial Sequence
  Description of Artificial Sequence: Synthetic oligonucleotide
  Antisense strand to SEQ ID NO: 1101828
cuguuagauaaucaauugc

SEQ ID NO: 1101830 - RNA, 19 nt, Artificial Sequence
  Description of Artificial Sequence: Synthetic oligonucleotide
  Sense strand starting at position 1168 of SEQ ID NO: 915729
auuggaacauaaucaguuu

SEQ ID NO: 1101831 - RNA, 19 nt, Artificial Sequence
  Description of Artificial Sequence: Synthetic oligonucleotide
  Antisense strand to SEQ ID NO: 1101830
aaacugauuauguuccaau

SEQ ID NO: 1101832 - RNA, 19 nt, Artificial Sequence
  Description of Artificial Sequence: Synthetic oligonucleotide
  Sense strand starting at position 1295 of SEQ ID NO: 915729
ggaguuugccaguaauaau

SEQ ID NO: 1101833 - RNA, 19 nt, Artificial Sequence
  Description of Artificial Sequence: Synthetic oligonucleotide
  Antisense strand to SEQ ID NO: 1101832
auuauuacuggcaaacucc

SEQ ID NO: 1101834 - RNA, 19 nt, Artificial Sequence
  Description of Artificial Sequence: Synthetic oligonucleotide
  Sense strand starting at position 1473 of SEQ ID NO: 915729
gucugucagagucaggauu

SEQ ID NO: 1101835 - RNA, 19 nt, Artificial Sequence
  Description of Artificial Sequence: Synthetic oligonucleotide
  Antisense strand to SEQ ID NO: 1101834
aauccugacucugacagac

SEQ ID NO: 1101836 - RNA, 19 nt, Artificial Sequence
  Description of Artificial Sequence: Synthetic oligonucleotide
  Sense strand starting at position 1543 of SEQ ID NO: 915729
gucucuauugacugacuga

SEQ ID NO: 1101837 - RNA, 19 nt, Artificial Sequence
  Description of Artificial Sequence: Synthetic oligonucleotide
  Antisense strand to SEQ ID NO: 1101836
ucagucagucaauagagac

SEQ ID NO: 1101838 - RNA, 19 nt, Artificial Sequence
  Description of Artificial Sequence: Synthetic oligonucleotide
  Sense strand starting at position 1546 of SEQ ID NO: 915729
ucuauugacugacugauua

SEQ ID NO: 1101839 - RNA, 19 nt, Artificial Sequence
  Description of Artificial Sequence: Synthetic oligonucleotide
  Antisense strand to SEQ ID NO: 1101838
uaaucagucagucaauaga

SEQ ID NO: 1101840 - RNA, 19 nt, Artificial Sequence
  Description of Artificial Sequence: Synthetic oligonucleotide
  Sense strand starting at position 1617 of SEQ ID NO: 915729
aagauauaaugaguuccga

SEQ ID NO: 1101841 - RNA, 19 nt, Artificial Sequence
  Description of Artificial Sequence: Synthetic oligonucleotide
  Antisense strand to SEQ ID NO: 1101840
ucggaacucauuauaucuu

SEQ ID NO: 1101842 - RNA, 19 nt, Artificial Sequence
  Description of Artificial Sequence: Synthetic oligonucleotide
  Sense strand starting at position 1669 of SEQ ID NO: 915729
ucaccucugccagaaguga

SEQ ID NO: 1101843 - RNA, 19 nt, Artificial Sequence
  Description of Artificial Sequence: Synthetic oligonucleotide
  Antisense strand to SEQ ID NO: 1101842
ucacuucuggcagagguga

SEQ ID NO: 1101844 - RNA, 19 nt, Artificial Sequence
  Description of Artificial Sequence: Synthetic oligonucleotide
  Sense strand starting at position 2139 of SEQ ID NO: 915729
aagggaugcugacucugaa

SEQ ID NO: 1101845 - RNA, 19 nt, Artificial Sequence
  Description of Artificial Sequence: Synthetic oligonucleotide
  Antisense strand to SEQ ID NO: 1101844
uucagagucagcaucccuu

SEQ ID NO: 1101846 - RNA, 19 nt, Artificial Sequence
  Description of Artificial Sequence: Synthetic oligonucleotide
  Sense strand starting at position 2154 of SEQ ID NO: 915729
ugaauccacgccugacaaa

SEQ ID NO: 1101847 - RNA, 19 nt, Artificial Sequence
  Description of Artificial Sequence: Synthetic oligonucleotide
  Antisense strand to SEQ ID NO: 1101846
uuugucaggcguggauuca

SEQ ID NO: 1101848 - RNA, 19 nt, Artificial Sequence
  Description of Artificial Sequence: Synthetic oligonucleotide
  Sense strand starting at position 2230 of SEQ ID NO: 915729
gcuuguagaauagagguuu

SEQ ID NO: 1101849 - RNA, 19 nt, Artificial Sequence
  Description of Artificial Sequence: Synthetic oligonucleotide
  Antisense strand to SEQ ID NO: 1101848
aaaccucuauucuacaagc

SEQ ID NO: 1101850 - RNA, 19 nt, Artificial Sequence
  Description of Artificial Sequence: Synthetic oligonucleotide
  Sense strand starting at position 2390 of SEQ ID NO: 915729
gggucaaacucuccagaca

SEQ ID NO: 1101851 - RNA, 19 nt, Artificial Sequence
  Description of Artificial Sequence: Synthetic oligonucleotide
  Antisense strand to SEQ ID NO: 1101850
ugucuggagaguuugaccc

SEQ ID NO: 1101852 - RNA, 19 nt, Artificial Sequence
  Description of Artificial Sequence: Synthetic oligonucleotide
  Sense strand starting at position 2997 of SEQ ID NO: 915729
agagaugacccuuguaaau

SEQ ID NO: 1101853 - RNA, 19 nt, Artificial Sequence
  Description of Artificial Sequence: Synthetic oligonucleotide
  Antisense strand to SEQ ID NO: 1101852
auuuacaagggucaucucu

SEQ ID NO: 1101854 - RNA, 19 nt, Artificial Sequence
  Description of Artificial Sequence: Synthetic oligonucleotide
  Sense strand starting at position 3166 of SEQ ID NO: 915729
uugccaaacgaucauuaaa

SEQ ID NO: 1101855 - RNA, 19 nt, Artificial Sequence
  Description of Artificial Sequence: Synthetic oligonucleotide
  Antisense strand to SEQ ID NO: 1101854
uuuaaugaucguuuggcaa

SEQ ID NO: 1101856 - RNA, 19 nt, Artificial Sequence
  Description of Artificial Sequence: Synthetic oligonucleotide
  Sense strand starting at position 3278 of SEQ ID NO: 915729
uuauuuaggucugaugaau

SEQ ID NO: 1101857 - RNA, 19 nt, Artificial Sequence
  Description of Artificial Sequence: Synthetic oligonucleotide
  Antisense strand to SEQ ID NO: 1101856
auucaucagaccuaaauaa

SEQ ID NO: 1101858 - RNA, 19 nt, Artificial Sequence
  Description of Artificial Sequence: Synthetic oligonucleotide
  Sense strand starting at position 3307 of SEQ ID NO: 915729
cuuauugagccucagaacu

SEQ ID NO: 1101859 - RNA, 19 nt, Artificial Sequence
  Description of Artificial Sequence: Synthetic oligonucleotide
  Antisense strand to SEQ ID NO: 1101858
aguucugaggcucaauaag

SEQ ID NO: 1101860 - RNA, 19 nt, Artificial Sequence
  Description of Artificial Sequence: Synthetic oligonucleotide
  Sense strand starting at position 3393 of SEQ ID NO: 915729
gagacugauuaggugagua

SEQ ID NO: 1101861 - RNA, 19 nt, Artificial Sequence
  Description of Artificial Sequence: Synthetic oligonucleotide
  Antisense strand to SEQ ID NO: 1101860
uacucaccuaaucagucuc

SEQ ID NO: 1101862 - RNA, 19 nt, Artificial Sequence
  Description of Artificial Sequence: Synthetic oligonucleotide
  Sense strand starting at position 3395 of SEQ ID NO: 915729
gacugauuaggugaguauc

SEQ ID NO: 1101863 - RNA, 19 nt, Artificial Sequence
  Description of Artificial Sequence: Synthetic oligonucleotide
  Antisense strand to SEQ ID NO: 1101862
gauacucaccuaaucaguc

SEQ ID NO: 1101864 - RNA, 19 nt, Artificial Sequence
  Description of Artificial Sequence: Synthetic oligonucleotide
  Sense strand starting at position 3508 of SEQ ID NO: 915729
ggagagagcuggguuaagu

SEQ ID NO: 1101865 - RNA, 19 nt, Artificial Sequence
  Description of Artificial Sequence: Synthetic oligonucleotide
  Antisense strand to SEQ ID NO: 1101864
acuuaacccagcucucucc

SEQ ID NO: 1101866 - RNA, 19 nt, Artificial Sequence
  Description of Artificial Sequence: Synthetic oligonucleotide
  Sense strand starting at position 3554 of SEQ ID NO: 915729
aggcaaaugaaaggucauu

SEQ ID NO: 1101867 - RNA, 19 nt, Artificial Sequence
  Description of Artificial Sequence: Synthetic oligonucleotide
  Antisense strand to SEQ ID NO: 1101866
aaugaccuuucauuugccu

SEQ ID NO: 1101868 - RNA, 19 nt, Artificial Sequence
  Description of Artificial Sequence: Synthetic oligonucleotide
  Sense strand starting at position 3934 of SEQ ID NO: 915729
agcugauauaaauggaagu

SEQ ID NO: 1101869 - RNA, 19 nt, Artificial Sequence
  Description of Artificial Sequence: Synthetic oligonucleotide
  Antisense strand to SEQ ID NO: 1101868
acuuccauuuauaucagcu

SEQ ID NO: 1101870 - RNA, 19 nt, Artificial Sequence
  Description of Artificial Sequence: Synthetic oligonucleotide
  Sense strand starting at position 3935 of SEQ ID NO: 915729
gcugauauaaauggaagua

SEQ ID NO: 1101871 - RNA, 19 nt, Artificial Sequence
  Description of Artificial Sequence: Synthetic oligonucleotide
  Antisense strand to SEQ ID NO: 1101870
uacuuccauuuauaucagc

SEQ ID NO: 1101872 - RNA, 19 nt, Artificial Sequence
  Description of Artificial Sequence: Synthetic oligonucleotide
  Sense strand starting at position 52 of SEQ ID NO: 915730
gcauucucacaguaucaca

SEQ ID NO: 1101873 - RNA, 19 nt, Artificial Sequence
  Description of Artificial Sequence: Synthetic oligonucleotide
  Antisense strand to SEQ ID NO: 1101872
ugugauacugugagaaugc

SEQ ID NO: 1101874 - RNA, 19 nt, Artificial Sequence
  Description of Artificial Sequence: Synthetic oligonucleotide
  Sense strand starting at position 79 of SEQ ID NO: 915730
auuauuauucucuacuggu

SEQ ID NO: 1101875 - RNA, 19 nt, Artificial Sequence
  Description of Artificial Sequence: Synthetic oligonucleotide
  Antisense strand to SEQ ID NO: 1101874
accaguagagaauaauaau

SEQ ID NO: 1101876 - RNA, 19 nt, Artificial Sequence
  Description of Artificial Sequence: Synthetic oligonucleotide
  Sense strand starting at position 117 of SEQ ID NO: 915730
ucagaagugcuugagaucu

SEQ ID NO: 1101877 - RNA, 19 nt, Artificial Sequence
  Description of Artificial Sequence: Synthetic oligonucleotide
  Antisense strand to SEQ ID NO: 1101876
agaucucaagcacuucuga

SEQ ID NO: 1101878 - RNA, 19 nt, Artificial Sequence
  Description of Artificial Sequence: Synthetic oligonucleotide
  Sense strand starting at position 240 of SEQ ID NO: 915730
ucuagaccuggccauaagu

SEQ ID NO: 1101879 - RNA, 19 nt, Artificial Sequence
  Description of Artificial Sequence: Synthetic oligonucleotide
  Antisense strand to SEQ ID NO: 1101878
acuuauggccaggucuaga

SEQ ID NO: 1101880 - RNA, 19 nt, Artificial Sequence
  Description of Artificial Sequence: Synthetic oligonucleotide
  Sense strand starting at position 385 of SEQ ID NO: 915730
ccaacauuaucaucgguaa

SEQ ID NO: 1101881 - RNA, 19 nt, Artificial Sequence
  Description of Artificial Sequence: Synthetic oligonucleotide
  Antisense strand to SEQ ID NO: 1101880
uuaccgaugauaauguugg

SEQ ID NO: 1101882 - RNA, 19 nt, Artificial Sequence
  Description of Artificial Sequence: Synthetic oligonucleotide
  Sense strand starting at position 388 of SEQ ID NO: 915730
acauuaucaucgguaaauu

SEQ ID NO: 1101883 - RNA, 19 nt, Artificial Sequence
  Description of Artificial Sequence: Synthetic oligonucleotide
  Antisense strand to SEQ ID NO: 1101882
aauuuaccgaugauaaugu

SEQ ID NO: 1101884 - RNA, 19 nt, Artificial Sequence
  Description of Artificial Sequence: Synthetic oligonucleotide
  Sense strand starting at position 512 of SEQ ID NO: 915730
ucauucuagugaucuuaca

SEQ ID NO: 1101885 - RNA, 19 nt, Artificial Sequence
  Description of Artificial Sequence: Synthetic oligonucleotide
  Antisense strand to SEQ ID NO: 1101884
uguaagaucacuagaauga

SEQ ID NO: 1101886 - RNA, 19 nt, Artificial Sequence
  Description of Artificial Sequence: Synthetic oligonucleotide
  Sense strand starting at position 546 of SEQ ID NO: 915730
auuucuugucacugcugau

SEQ ID NO: 1101887 - RNA, 19 nt, Artificial Sequence
  Description of Artificial Sequence: Synthetic oligonucleotide
  Antisense strand to SEQ ID NO: 1101886
aucagcagugacaagaaau

SEQ ID NO: 1101888 - RNA, 19 nt, Artificial Sequence
  Description of Artificial Sequence: Synthetic oligonucleotide
  Sense strand starting at position 561 of SEQ ID NO: 915730
ugauguauuauugguagau

SEQ ID NO: 1101889 - RNA, 19 nt, Artificial Sequence
  Description of Artificial Sequence: Synthetic oligonucleotide
  Antisense strand to SEQ ID NO: 1101888
aucuaccaauaauacauca

SEQ ID NO: 1101890 - RNA, 19 nt, Artificial Sequence
  Description of Artificial Sequence: Synthetic oligonucleotide
  Sense strand starting at position 562 of SEQ ID NO: 915730
gauguauuauugguagaua

SEQ ID NO: 1101891 - RNA, 19 nt, Artificial Sequence
  Description of Artificial Sequence: Synthetic oligonucleotide
  Antisense strand to SEQ ID NO: 1101890
uaucuaccaauaauacauc

SEQ ID NO: 1101892 - RNA, 19 nt, Artificial Sequence
  Description of Artificial Sequence: Synthetic oligonucleotide
  Sense strand starting at position 565 of SEQ ID NO: 915730
guauuauugguagauacug

SEQ ID NO: 1101893 - RNA, 19 nt, Artificial Sequence
  Description of Artificial Sequence: Synthetic oligonucleotide
  Antisense strand to SEQ ID NO: 1101892
caguaucuaccaauaauac

SEQ ID NO: 1101894 - RNA, 19 nt, Artificial Sequence
  Description of Artificial Sequence: Synthetic oligonucleotide
  Sense strand starting at position 767 of SEQ ID NO: 915730
uucugagagaaaugagcuu

SEQ ID NO: 1101895 - RNA, 19 nt, Artificial Sequence
  Description of Artificial Sequence: Synthetic oligonucleotide
  Antisense strand to SEQ ID NO: 1101894
aagcucauuucucucagaa

SEQ ID NO: 1101896 - RNA, 19 nt, Artificial Sequence
  Description of Artificial Sequence: Synthetic oligonucleotide
  Sense strand starting at position 773 of SEQ ID NO: 915730
gagaaaugagcuuacugcu

SEQ ID NO: 1101897 - RNA, 19 nt, Artificial Sequence
  Description of Artificial Sequence: Synthetic oligonucleotide
  Antisense strand to SEQ ID NO: 1101896
agcaguaagcucauuucuc

SEQ ID NO: 1101898 - RNA, 19 nt, Artificial Sequence
  Description of Artificial Sequence: Synthetic oligonucleotide
  Sense strand starting at position 878 of SEQ ID NO: 915730
ucaggaguuucuucugaaa

SEQ ID NO: 1101899 - RNA, 19 nt, Artificial Sequence
  Description of Artificial Sequence: Synthetic oligonucleotide
  Antisense strand to SEQ ID NO: 1101898
uuucagaagaaacuccuga

SEQ ID NO: 1101900 - RNA, 19 nt, Artificial Sequence
  Description of Artificial Sequence: Synthetic oligonucleotide
  Sense strand starting at position 904 of SEQ ID NO: 915730
cuauaaaucugagcacuag

SEQ ID NO: 1101901 - RNA, 19 nt, Artificial Sequence
  Description of Artificial Sequence: Synthetic oligonucleotide
  Antisense strand to SEQ ID NO: 1101900
cuagugcucagauuuauag

SEQ ID NO: 1101902 - RNA, 19 nt, Artificial Sequence
  Description of Artificial Sequence: Synthetic oligonucleotide
  Sense strand starting at position 1101 of SEQ ID NO: 915730
gaagucuggcacugaaacu

SEQ ID NO: 1101903 - RNA, 19 nt, Artificial Sequence
  Description of Artificial Sequence: Synthetic oligonucleotide
  Antisense strand to SEQ ID NO: 1101902
aguuucagugccagacuuc

SEQ ID NO: 1101904 - RNA, 19 nt, Artificial Sequence
  Description of Artificial Sequence: Synthetic oligonucleotide
  Sense strand starting at position 1206 of SEQ ID NO: 915730
ggagcauacugaccaguau

SEQ ID NO: 1101905 - RNA, 19 nt, Artificial Sequence
  Description of Artificial Sequence: Synthetic oligonucleotide
  Antisense strand to SEQ ID NO: 1101904
auacuggucaguaugcucc

SEQ ID NO: 1101906 - RNA, 19 nt, Artificial Sequence
  Description of Artificial Sequence: Synthetic oligonucleotide
  Sense strand starting at position 1207 of SEQ ID NO: 915730
gagcauacugaccaguauu

SEQ ID NO: 1101907 - RNA, 19 nt, Artificial Sequence
  Description of Artificial Sequence: Synthetic oligonucleotide
  Antisense strand to SEQ ID NO: 1101906
aauacuggucaguaugcuc

SEQ ID NO: 1101908 - RNA, 19 nt, Artificial Sequence
  Description of Artificial Sequence: Synthetic oligonucleotide
  Sense strand starting at position 1367 of SEQ ID NO: 915730
cccucagcccaagagaauu

SEQ ID NO: 1101909 - RNA, 19 nt, Artificial Sequence
  Description of Artificial Sequence: Synthetic oligonucleotide
  Antisense strand to SEQ ID NO: 1101908
aauucucuugggcugaggg

SEQ ID NO: 1101910 - RNA, 19 nt, Artificial Sequence
  Description of Artificial Sequence: Synthetic oligonucleotide
  Sense strand starting at position 1994 of SEQ ID NO: 915730
gaagccauguuucugagga

SEQ ID NO: 1101911 - RNA, 19 nt, Artificial Sequence
  Description of Artificial Sequence: Synthetic oligonucleotide
  Antisense strand to SEQ ID NO: 1101910
uccucagaaacauggcuuc

SEQ ID NO: 1101912 - RNA, 19 nt, Artificial Sequence
  Description of Artificial Sequence: Synthetic oligonucleotide
  Sense strand starting at position 2044 of SEQ ID NO: 915730
ggcauaugaaaugagcuua

SEQ ID NO: 1101913 - RNA, 19 nt, Artificial Sequence
  Description of Artificial Sequence: Synthetic oligonucleotide
  Antisense strand to SEQ ID NO: 1101912
uaagcucauuucauaugcc

SEQ ID NO: 1101914 - RNA, 19 nt, Artificial Sequence
  Description of Artificial Sequence: Synthetic oligonucleotide
  Sense strand starting at position 2073 of SEQ ID NO: 915730
uuacuaauuuguguaugca

SEQ ID NO: 1101915 - RNA, 19 nt, Artificial Sequence
  Description of Artificial Sequence: Synthetic oligonucleotide
  Antisense strand to SEQ ID NO: 1101914
ugcauacacaaauuaguaa

SEQ ID NO: 1101916 - RNA, 19 nt, Artificial Sequence
  Description of Artificial Sequence: Synthetic oligonucleotide
  Sense strand starting at position 2082 of SEQ ID NO: 915730
uguguaugcauuguagcau

SEQ ID NO: 1101917 - RNA, 19 nt, Artificial Sequence
  Description of Artificial Sequence: Synthetic oligonucleotide
  Antisense strand to SEQ ID NO: 1101916
augcuacaaugcauacaca

SEQ ID NO: 1101918 - RNA, 19 nt, Artificial Sequence
  Description of Artificial Sequence: Synthetic oligonucleotide
  Sense strand starting at position 2153 of SEQ ID NO: 915730
gcaacagauugaucacaug

SEQ ID NO: 1101919 - RNA, 19 nt, Artificial Sequence
  Description of Artificial Sequence: Synthetic oligonucleotide
  Antisense strand to SEQ ID NO: 1101918
caugugaucaaucuguugc

SEQ ID NO: 1101920 - RNA, 19 nt, Artificial Sequence
  Description of Artificial Sequence: Synthetic oligonucleotide
  Sense strand starting at position 2302 of SEQ ID NO: 915730
caggcaguggaucauuauu

SEQ ID NO: 1101921 - RNA, 19 nt, Artificial Sequence
  Description of Artificial Sequence: Synthetic oligonucleotide
  Antisense strand to SEQ ID NO: 1101920
aauaaugauccacugccug

SEQ ID NO: 1101922 - RNA, 19 nt, Artificial Sequence
  Description of Artificial Sequence: Synthetic oligonucleotide
  Sense strand starting at position 2360 of SEQ ID NO: 915730
ucucuuauuggucaucaua

SEQ ID NO: 1101923 - RNA, 19 nt, Artificial Sequence
  Description of Artificial Sequence: Synthetic oligonucleotide
  Antisense strand to SEQ ID NO: 1101922
uaugaugaccaauaagaga

SEQ ID NO: 1101924 - RNA, 19 nt, Artificial Sequence
  Description of Artificial Sequence: Synthetic oligonucleotide
  Sense strand starting at position 2362 of SEQ ID NO: 915730
ucuuauuggucaucauaag

SEQ ID NO: 1101925 - RNA, 19 nt, Artificial Sequence
  Description of Artificial Sequence: Synthetic oligonucleotide
  Antisense strand to SEQ ID NO: 1101924
cuuaugaugaccaauaaga

SEQ ID NO: 1101926 - RNA, 19 nt, Artificial Sequence
  Description of Artificial Sequence: Synthetic oligonucleotide
  Sense strand starting at position 2444 of SEQ ID NO: 915730
guguucuugcuacagaaga

SEQ ID NO: 1101927 - RNA, 19 nt, Artificial Sequence
  Description of Artificial Sequence: Synthetic oligonucleotide
  Antisense strand to SEQ ID NO: 1101926
ucuucuguagcaagaacac

SEQ ID NO: 1101928 - RNA, 19 nt, Artificial Sequence
  Description of Artificial Sequence: Synthetic oligonucleotide
  Sense strand starting at position 2446 of SEQ ID NO: 915730
guucuugcuacagaagaga

SEQ ID NO: 1101929 - RNA, 19 nt, Artificial Sequence
  Description of Artificial Sequence: Synthetic oligonucleotide
  Antisense strand to SEQ ID NO: 1101928
ucucuucuguagcaagaac

SEQ ID NO: 1101930 - RNA, 19 nt, Artificial Sequence
  Description of Artificial Sequence: Synthetic oligonucleotide
  Sense strand starting at position 2509 of SEQ ID NO: 915730
ggaugcaauauuuguuugu

SEQ ID NO: 1101931 - RNA, 19 nt, Artificial Sequence
  Description of Artificial Sequence: Synthetic oligonucleotide
  Antisense strand to SEQ ID NO: 1101930
acaaacaaauauugcaucc

SEQ ID NO: 1101932 - RNA, 19 nt, Artificial Sequence
  Description of Artificial Sequence: Synthetic oligonucleotide
  Sense strand starting at position 2511 of SEQ ID NO: 915730
augcaauauuuguuugugu

SEQ ID NO: 1101933 - RNA, 19 nt, Artificial Sequence
  Description of Artificial Sequence: Synthetic oligonucleotide
  Antisense strand to SEQ ID NO: 1101932
acacaaacaaauauugcau

SEQ ID NO: 1101934 - RNA, 19 nt, Artificial Sequence
  Description of Artificial Sequence: Synthetic oligonucleotide
  Sense strand starting at position 2512 of SEQ ID NO: 915730
ugcaauauuuguuugugua

SEQ ID NO: 1101935 - RNA, 19 nt, Artificial Sequence
  Description of Artificial Sequence: Synthetic oligonucleotide
  Antisense strand to SEQ ID NO: 1101934
uacacaaacaaauauugca

SEQ ID NO: 1101936 - RNA, 19 nt, Artificial Sequence
  Description of Artificial Sequence: Synthetic oligonucleotide
  Sense strand starting at position 2513 of SEQ ID NO: 915730
gcaauauuuguuuguguaa

SEQ ID NO: 1101937 - RNA, 19 nt, Artificial Sequence
  Description of Artificial Sequence: Synthetic oligonucleotide
  Antisense strand to SEQ ID NO: 1101936
uuacacaaacaaauauugc

SEQ ID NO: 1101938 - RNA, 19 nt, Artificial Sequence
  Description of Artificial Sequence: Synthetic oligonucleotide
  Sense strand starting at position 2516 of SEQ ID NO: 915730
auauuuguuuguguaacca

SEQ ID NO: 1101939 - RNA, 19 nt, Artificial Sequence
  Description of Artificial Sequence: Synthetic oligonucleotide
  Antisense strand to SEQ ID NO: 1101938
ugguuacacaaacaaauau

SEQ ID NO: 1101940 - RNA, 19 nt, Artificial Sequence
  Description of Artificial Sequence: Synthetic oligonucleotide
  Sense strand starting at position 2828 of SEQ ID NO: 915730
guguuauugaggcauaaua

SEQ ID NO: 1101941 - RNA, 19 nt, Artificial Sequence
  Description of Artificial Sequence: Synthetic oligonucleotide
  Antisense strand to SEQ ID NO: 1101940
uauuaugccucaauaacac

SEQ ID NO: 1101942 - RNA, 19 nt, Artificial Sequence
  Description of Artificial Sequence: Synthetic oligonucleotide
  Sense strand starting at position 2944 of SEQ ID NO: 915730
gcauguaaccaugggagga

SEQ ID NO: 1101943 - RNA, 19 nt, Artificial Sequence
  Description of Artificial Sequence: Synthetic oligonucleotide
  Antisense strand to SEQ ID NO: 1101942
uccucccaugguuacaugc

SEQ ID NO: 1101944 - RNA, 19 nt, Artificial Sequence
  Description of Artificial Sequence: Synthetic oligonucleotide
  Sense strand starting at position 3211 of SEQ ID NO: 915730
gcagcucagaaauggagaa

SEQ ID NO: 1101945 - RNA, 19 nt, Artificial Sequence
  Description of Artificial Sequence: Synthetic oligonucleotide
  Antisense strand to SEQ ID NO: 1101944
uucuccauuucugagcugc

SEQ ID NO: 1101946 - RNA, 19 nt, Artificial Sequence
  Description of Artificial Sequence: Synthetic oligonucleotide
  Sense strand starting at position 3246 of SEQ ID NO: 915730
gccaccucccugcaagaaa

SEQ ID NO: 1101947 - RNA, 19 nt, Artificial Sequence
  Description of Artificial Sequence: Synthetic oligonucleotide
  Antisense strand to SEQ ID NO: 1101946
uuucuugcagggagguggc

SEQ ID NO: 1101948 - RNA, 19 nt, Artificial Sequence
  Description of Artificial Sequence: Synthetic oligonucleotide
  Sense strand starting at position 3373 of SEQ ID NO: 915730
cagguacagcacugagaaa

SEQ ID NO: 1101949 - RNA, 19 nt, Artificial Sequence
  Description of Artificial Sequence: Synthetic oligonucleotide
  Antisense strand to SEQ ID NO: 1101948
uuucucagugcuguaccug

SEQ ID NO: 1101950 - RNA, 19 nt, Artificial Sequence
  Description of Artificial Sequence: Synthetic oligonucleotide
  Sense strand starting at position 3865 of SEQ ID NO: 915730
guggaagcugagugaugaa

SEQ ID NO: 1101951 - RNA, 19 nt, Artificial Sequence
  Description of Artificial Sequence: Synthetic oligonucleotide
  Antisense strand to SEQ ID NO: 1101950
uucaucacucagcuuccac

SEQ ID NO: 1101952 - RNA, 19 nt, Artificial Sequence
  Description of Artificial Sequence: Synthetic oligonucleotide
  Sense strand starting at position 660 of SEQ ID NO: 915731
cacuguguuuggugucauu

SEQ ID NO: 1101953 - RNA, 19 nt, Artificial Sequence
  Description of Artificial Sequence: Synthetic oligonucleotide
  Antisense strand to SEQ ID NO: 1101952
aaugacaccaaacacagug

SEQ ID NO: 1101954 - RNA, 19 nt, Artificial Sequence
  Description of Artificial Sequence: Synthetic oligonucleotide
  Sense strand starting at position 701 of SEQ ID NO: 915731
acggcagaauucggaaaca

SEQ ID NO: 1101955 - RNA, 19 nt, Artificial Sequence
  Description of Artificial Sequence: Synthetic oligonucleotide
  Antisense strand to SEQ ID NO: 1101954
uguuuccgaauucugccgu

SEQ ID NO: 1101956 - RNA, 19 nt, Artificial Sequence
  Description of Artificial Sequence: Synthetic oligonucleotide
  Sense strand starting at position 1164 of SEQ ID NO: 915731
ggguaaggauccucacguu

SEQ ID NO: 1101957 - RNA, 19 nt, Artificial Sequence
  Description of Artificial Sequence: Synthetic oligonucleotide
  Antisense strand to SEQ ID NO: 1101956
aacgugaggauccuuaccc

SEQ ID NO: 1101958 - RNA, 19 nt, Artificial Sequence
  Description of Artificial Sequence: Synthetic oligonucleotide
  Sense strand starting at position 1167 of SEQ ID NO: 915731
uaaggauccucacguuauc

SEQ ID NO: 1101959 - RNA, 19 nt, Artificial Sequence
  Description of Artificial Sequence: Synthetic oligonucleotide
  Antisense strand to SEQ ID NO: 1101958
gauaacgugaggauccuua

SEQ ID NO: 1101960 - RNA, 19 nt, Artificial Sequence
  Description of Artificial Sequence: Synthetic oligonucleotide
  Sense strand starting at position 1221 of SEQ ID NO: 915731
guaucauacgcgccacgaa

SEQ ID NO: 1101961 - RNA, 19 nt, Artificial Sequence
  Description of Artificial Sequence: Synthetic oligonucleotide
  Antisense strand to SEQ ID NO: 1101960
uucguggcgcguaugauac

SEQ ID NO: 1101962 - RNA, 19 nt, Artificial Sequence
  Description of Artificial Sequence: Synthetic oligonucleotide
  Sense strand starting at position 1245 of SEQ ID NO: 915731
gguugaauuccacagggca

SEQ ID NO: 1101963 - RNA, 19 nt, Artificial Sequence
  Description of Artificial Sequence: Synthetic oligonucleotide
  Antisense strand to SEQ ID NO: 1101962
ugcccuguggaauucaacc

SEQ ID NO: 1101964 - RNA, 19 nt, Artificial Sequence
  Description of Artificial Sequence: Synthetic oligonucleotide
  Sense strand starting at position 1247 of SEQ ID NO: 915731
uugaauuccacagggcaga

SEQ ID NO: 1101965 - RNA, 19 nt, Artificial Sequence
  Description of Artificial Sequence: Synthetic oligonucleotide
  Antisense strand to SEQ ID NO: 1101964
ucugcccuguggaauucaa

SEQ ID NO: 1101966 - RNA, 19 nt, Artificial Sequence
  Description of Artificial Sequence: Synthetic oligonucleotide
  Sense strand starting at position 1417 of SEQ ID NO: 915731
agcagauuguggguaagca

SEQ ID NO: 1101967 - RNA, 19 nt, Artificial Sequence
  Description of Artificial Sequence: Synthetic oligonucleotide
  Antisense strand to SEQ ID NO: 1101966
ugcuuacccacaaucugcu

SEQ ID NO: 1101968 - RNA, 19 nt, Artificial Sequence
  Description of Artificial Sequence: Synthetic oligonucleotide
  Sense strand starting at position 1436 of SEQ ID NO: 915731
guuucaugucgccgcacaa

SEQ ID NO: 1101969 - RNA, 19 nt, Artificial Sequence
  Description of Artificial Sequence: Synthetic oligonucleotide
  Antisense strand to SEQ ID NO: 1101968
uugugcggcgacaugaaac

SEQ ID NO: 1101970 - RNA, 19 nt, Artificial Sequence
  Description of Artificial Sequence: Synthetic oligonucleotide
  Sense strand starting at position 1554 of SEQ ID NO: 915731
ggcgaacuugcuggaacuu

SEQ ID NO: 1101971 - RNA, 19 nt, Artificial Sequence
  Description of Artificial Sequence: Synthetic oligonucleotide
  Antisense strand to SEQ ID NO: 1101970
aaguuccagcaaguucgcc

SEQ ID NO: 1101972 - RNA, 19 nt, Artificial Sequence
  Description of Artificial Sequence: Synthetic oligonucleotide
  Sense strand starting at position 1563 of SEQ ID NO: 915731
gcuggaacuucucguguuu

SEQ ID NO: 1101973 - RNA, 19 nt, Artificial Sequence
  Description of Artificial Sequence: Synthetic oligonucleotide
  Antisense strand to SEQ ID NO: 1101972
aaacacgagaaguuccagc

SEQ ID NO: 1101974 - RNA, 19 nt, Artificial Sequence
  Description of Artificial Sequence: Synthetic oligonucleotide
  Sense strand starting at position 1565 of SEQ ID NO: 915731
uggaacuucucguguuugu

SEQ ID NO: 1101975 - RNA, 19 nt, Artificial Sequence
  Description of Artificial Sequence: Synthetic oligonucleotide
  Antisense strand to SEQ ID NO: 1101974
acaaacacgagaaguucca

SEQ ID NO: 1101976 - RNA, 19 nt, Artificial Sequence
  Description of Artificial Sequence: Synthetic oligonucleotide
  Sense strand starting at position 1574 of SEQ ID NO: 915731
ucguguuugugggagcuga

SEQ ID NO: 1101977 - RNA, 19 nt, Artificial Sequence
  Description of Artificial Sequence: Synthetic oligonucleotide
  Antisense strand to SEQ ID NO: 1101976
ucagcucccacaaacacga

SEQ ID NO: 1101978 - RNA, 19 nt, Artificial Sequence
  Description of Artificial Sequence: Synthetic oligonucleotide
  Sense strand starting at position 1682 of SEQ ID NO: 915731
ugccacaaauucuucguaa

SEQ ID NO: 1101979 - RNA, 19 nt, Artificial Sequence
  Description of Artificial Sequence: Synthetic oligonucleotide
  Antisense strand to SEQ ID NO: 1101978
uuacgaagaauuuguggca

SEQ ID NO: 1101980 - RNA, 19 nt, Artificial Sequence
  Description of Artificial Sequence: Synthetic oligonucleotide
  Sense strand starting at position 1683 of SEQ ID NO: 915731
gccacaaauucuucguaag

SEQ ID NO: 1101981 - RNA, 19 nt, Artificial Sequence
  Description of Artificial Sequence: Synthetic oligonucleotide
  Antisense strand to SEQ ID NO: 1101980
cuuacgaagaauuuguggc

SEQ ID NO: 1101982 - RNA, 19 nt, Artificial Sequence
  Description of Artificial Sequence: Synthetic oligonucleotide
  Sense strand starting at position 1684 of SEQ ID NO: 915731
ccacaaauucuucguaaga

SEQ ID NO: 1101983 - RNA, 19 nt, Artificial Sequence
  Description of Artificial Sequence: Synthetic oligonucleotide
  Antisense strand to SEQ ID NO: 1101982
ucuuacgaagaauuugugg

SEQ ID NO: 1101984 - RNA, 19 nt, Artificial Sequence
  Description of Artificial Sequence: Synthetic oligonucleotide
  Sense strand starting at position 1686 of SEQ ID NO: 915731
acaaauucuucguaagaug

SEQ ID NO: 1101985 - RNA, 19 nt, Artificial Sequence
  Description of Artificial Sequence: Synthetic oligonucleotide
  Antisense strand to SEQ ID NO: 1101984
caucuuacgaagaauuugu

SEQ ID NO: 1101986 - RNA, 19 nt, Artificial Sequence
  Description of Artificial Sequence: Synthetic oligonucleotide
  Sense strand starting at position 1700 of SEQ ID NO: 915731
agaugcaaaucauaugcaa

SEQ ID NO: 1101987 - RNA, 19 nt, Artificial Sequence
  Description of Artificial Sequence: Synthetic oligonucleotide
  Antisense strand to SEQ ID NO: 1101986
uugcauaugauuugcaucu

SEQ ID NO: 1101988 - RNA, 19 nt, Artificial Sequence
  Description of Artificial Sequence: Synthetic oligonucleotide
  Sense strand starting at position 1734 of SEQ ID NO: 915731
ggagcucucguugaaugca

SEQ ID NO: 1101989 - RNA, 19 nt, Artificial Sequence
  Description of Artificial Sequence: Synthetic oligonucleotide
  Antisense strand to SEQ ID NO: 1101988
ugcauucaacgagagcucc

SEQ ID NO: 1101990 - RNA, 19 nt, Artificial Sequence
  Description of Artificial Sequence: Synthetic oligonucleotide
  Sense strand starting at position 1827 of SEQ ID NO: 915731
gaaauaccgcccuaucugu

SEQ ID NO: 1101991 - RNA, 19 nt, Artificial Sequence
  Description of Artificial Sequence: Synthetic oligonucleotide
  Antisense strand to SEQ ID NO: 1101990
acagauagggcgguauuuc

SEQ ID NO: 1101992 - RNA, 19 nt, Artificial Sequence
  Description of Artificial Sequence: Synthetic oligonucleotide
  Sense strand starting at position 1832 of SEQ ID NO: 915731
accgcccuaucuguaaauu

SEQ ID NO: 1101993 - RNA, 19 nt, Artificial Sequence
  Description of Artificial Sequence: Synthetic oligonucleotide
  Antisense strand to SEQ ID NO: 1101992
aauuuacagauagggcggu

SEQ ID NO: 1101994 - RNA, 19 nt, Artificial Sequence
  Description of Artificial Sequence: Synthetic oligonucleotide
  Sense strand starting at position 1833 of SEQ ID NO: 915731
ccgcccuaucuguaaauua

SEQ ID NO: 1101995 - RNA, 19 nt, Artificial Sequence
  Description of Artificial Sequence: Synthetic oligonucleotide
  Antisense strand to SEQ ID NO: 1101994
uaauuuacagauagggcgg

SEQ ID NO: 1101996 - RNA, 19 nt, Artificial Sequence
  Description of Artificial Sequence: Synthetic oligonucleotide
  Sense strand starting at position 2359 of SEQ ID NO: 915731
ucccgcuagucugagagua

SEQ ID NO: 1101997 - RNA, 19 nt, Artificial Sequence
  Description of Artificial Sequence: Synthetic oligonucleotide
  Antisense strand to SEQ ID NO: 1101996
uacucucagacuagcggga

SEQ ID NO: 1101998 - RNA, 19 nt, Artificial Sequence
  Description of Artificial Sequence: Synthetic oligonucleotide
  Sense strand starting at position 2361 of SEQ ID NO: 915731
ccgcuagucugagaguauc

SEQ ID NO: 1101999 - RNA, 19 nt, Artificial Sequence
  Description of Artificial Sequence: Synthetic oligonucleotide
  Antisense strand to SEQ ID NO: 1101998
gauacucucagacuagcgg

SEQ ID NO: 1102000 - RNA, 19 nt, Artificial Sequence
  Description of Artificial Sequence: Synthetic oligonucleotide
  Sense strand starting at position 2367 of SEQ ID NO: 915731
gucugagaguaucgcuuua

SEQ ID NO: 1102001 - RNA, 19 nt, Artificial Sequence
  Description of Artificial Sequence: Synthetic oligonucleotide
  Antisense strand to SEQ ID NO: 1102000
uaaagcgauacucucagac

SEQ ID NO: 1102002 - RNA, 19 nt, Artificial Sequence
  Description of Artificial Sequence: Synthetic oligonucleotide
  Sense strand starting at position 2369 of SEQ ID NO: 915731
cugagaguaucgcuuuauu

SEQ ID NO: 1102003 - RNA, 19 nt, Artificial Sequence
  Description of Artificial Sequence: Synthetic oligonucleotide
  Antisense strand to SEQ ID NO: 1102002
aauaaagcgauacucucag

SEQ ID NO: 1102004 - RNA, 19 nt, Artificial Sequence
  Description of Artificial Sequence: Synthetic oligonucleotide
  Sense strand starting at position 2383 of SEQ ID NO: 915731
uuauuuccugccugccaga

SEQ ID NO: 1102005 - RNA, 19 nt, Artificial Sequence
  Description of Artificial Sequence: Synthetic oligonucleotide
  Antisense strand to SEQ ID NO: 1102004
ucuggcaggcaggaaauaa

SEQ ID NO: 1102006 - RNA, 19 nt, Artificial Sequence
  Description of Artificial Sequence: Synthetic oligonucleotide
  Sense strand starting at position 2717 of SEQ ID NO: 915731
uguucagauuggucucgaa

SEQ ID NO: 1102007 - RNA, 19 nt, Artificial Sequence
  Description of Artificial Sequence: Synthetic oligonucleotide
  Antisense strand to SEQ ID NO: 1102006
uucgagaccaaucugaaca

SEQ ID NO: 1102008 - RNA, 19 nt, Artificial Sequence
  Description of Artificial Sequence: Synthetic oligonucleotide
  Sense strand starting at position 2986 of SEQ ID NO: 915731
ccucccaaaccuugugaga

SEQ ID NO: 1102009 - RNA, 19 nt, Artificial Sequence
  Description of Artificial Sequence: Synthetic oligonucleotide
  Antisense strand to SEQ ID NO: 1102008
ucucacaagguuugggagg

SEQ ID NO: 1102010 - RNA, 19 nt, Artificial Sequence
  Description of Artificial Sequence: Synthetic oligonucleotide
  Sense strand starting at position 3409 of SEQ ID NO: 915731
cuuucucuguugucaccaa

SEQ ID NO: 1102011 - RNA, 19 nt, Artificial Sequence
  Description of Artificial Sequence: Synthetic oligonucleotide
  Antisense strand to SEQ ID NO: 1102010
uuggugacaacagagaaag

SEQ ID NO: 1102012 - RNA, 19 nt, Artificial Sequence
  Description of Artificial Sequence: Synthetic oligonucleotide
  Sense strand starting at position 3410 of SEQ ID NO: 915731
uuucucuguugucaccaau

SEQ ID NO: 1102013 - RNA, 19 nt, Artificial Sequence
  Description of Artificial Sequence: Synthetic oligonucleotide
  Antisense strand to SEQ ID NO: 1102012
auuggugacaacagagaaa

SEQ ID NO: 1102014 - RNA, 19 nt, Artificial Sequence
  Description of Artificial Sequence: Synthetic oligonucleotide
  Sense strand starting at position 3453 of SEQ ID NO: 915731
ccuugaaacuuggaggaua

SEQ ID NO: 1102015 - RNA, 19 nt, Artificial Sequence
  Description of Artificial Sequence: Synthetic oligonucleotide
  Antisense strand to SEQ ID NO: 1102014
uauccuccaaguuucaagg

SEQ ID NO: 1102016 - RNA, 19 nt, Artificial Sequence
  Description of Artificial Sequence: Synthetic oligonucleotide
  Sense strand starting at position 3525 of SEQ ID NO: 915731
ggaguauccugcuggguuu

SEQ ID NO: 1102017 - RNA, 19 nt, Artificial Sequence
  Description of Artificial Sequence: Synthetic oligonucleotide
  Antisense strand to SEQ ID NO: 1102016
aaacccagcaggauacucc

SEQ ID NO: 1102018 - RNA, 19 nt, Artificial Sequence
  Description of Artificial Sequence: Synthetic oligonucleotide
  Sense strand starting at position 3639 of SEQ ID NO: 915731
cuuccuucuaggugggaga

SEQ ID NO: 1102019 - RNA, 19 nt, Artificial Sequence
  Description of Artificial Sequence: Synthetic oligonucleotide
  Antisense strand to SEQ ID NO: 1102018
ucucccaccuagaaggaag

SEQ ID NO: 1102020 - RNA, 19 nt, Artificial Sequence
  Description of Artificial Sequence: Synthetic oligonucleotide
  Sense strand starting at position 36 of SEQ ID NO: 915732
uaagauuucuuugagggau

SEQ ID NO: 1102021 - RNA, 19 nt, Artificial Sequence
  Description of Artificial Sequence: Synthetic oligonucleotide
  Antisense strand to SEQ ID NO: 1102020
aucccucaaagaaaucuua

SEQ ID NO: 1102022 - RNA, 19 nt, Artificial Sequence
  Description of Artificial Sequence: Synthetic oligonucleotide
  Sense strand starting at position 38 of SEQ ID NO: 915732
agauuucuuugagggauga

SEQ ID NO: 1102023 - RNA, 19 nt, Artificial Sequence
  Description of Artificial Sequence: Synthetic oligonucleotide
  Antisense strand to SEQ ID NO: 1102022
ucaucccucaaagaaaucu

SEQ ID NO: 1102024 - RNA, 19 nt, Artificial Sequence
  Description of Artificial Sequence: Synthetic oligonucleotide
  Sense strand starting at position 57 of SEQ ID NO: 915732
ugaaauuguccuggaauua

SEQ ID NO: 1102025 - RNA, 19 nt, Artificial Sequence
  Description of Artificial Sequence: Synthetic oligonucleotide
  Antisense strand to SEQ ID NO: 1102024
uaauuccaggacaauuuca

SEQ ID NO: 1102026 - RNA, 19 nt, Artificial Sequence
  Description of Artificial Sequence: Synthetic oligonucleotide
  Sense strand starting at position 118 of SEQ ID NO: 915732
uagugcauuguacaaguua

SEQ ID NO: 1102027 - RNA, 19 nt, Artificial Sequence
  Description of Artificial Sequence: Synthetic oligonucleotide
  Antisense strand to SEQ ID NO: 1102026
uaacuuguacaaugcacua

SEQ ID NO: 1102028 - RNA, 19 nt, Artificial Sequence
  Description of Artificial Sequence: Synthetic oligonucleotide
  Sense strand starting at position 145 of SEQ ID NO: 915732
aauuacgugguaugggaau

SEQ ID NO: 1102029 - RNA, 19 nt, Artificial Sequence
  Description of Artificial Sequence: Synthetic oligonucleotide
  Antisense strand to SEQ ID NO: 1102028
auucccauaccacguaauu

SEQ ID NO: 1102030 - RNA, 19 nt, Artificial Sequence
  Description of Artificial Sequence: Synthetic oligonucleotide
  Sense strand starting at position 147 of SEQ ID NO: 915732
uuacgugguaugggaauua

SEQ ID NO: 1102031 - RNA, 19 nt, Artificial Sequence
  Description of Artificial Sequence: Synthetic oligonucleotide
  Antisense strand to SEQ ID NO: 1102030
uaauucccauaccacguaa

SEQ ID NO: 1102032 - RNA, 19 nt, Artificial Sequence
  Description of Artificial Sequence: Synthetic oligonucleotide
  Sense strand starting at position 157 of SEQ ID NO: 915732
ugggaauuaugucuugaac

SEQ ID NO: 1102033 - RNA, 19 nt, Artificial Sequence
  Description of Artificial Sequence: Synthetic oligonucleotide
  Antisense strand to SEQ ID NO: 1102032
guucaagacauaauuccca

SEQ ID NO: 1102034 - RNA, 19 nt, Artificial Sequence
  Description of Artificial Sequence: Synthetic oligonucleotide
  Sense strand starting at position 401 of SEQ ID NO: 915732
guggaauccucccuccaac

SEQ ID NO: 1102035 - RNA, 19 nt, Artificial Sequence
  Description of Artificial Sequence: Synthetic oligonucleotide
  Antisense strand to SEQ ID NO: 1102034
guuggagggaggauuccac

SEQ ID NO: 1102036 - RNA, 19 nt, Artificial Sequence
  Description of Artificial Sequence: Synthetic oligonucleotide
  Sense strand starting at position 426 of SEQ ID NO: 915732
uguuuauagagcugagaac

SEQ ID NO: 1102037 - RNA, 19 nt, Artificial Sequence
  Description of Artificial Sequence: Synthetic oligonucleotide
  Antisense strand to SEQ ID NO: 1102036
guucucagcucuauaaaca

SEQ ID NO: 1102038 - RNA, 19 nt, Artificial Sequence
  Description of Artificial Sequence: Synthetic oligonucleotide
  Sense strand starting at position 435 of SEQ ID NO: 915732
agcugagaaccucgggaaa

SEQ ID NO: 1102039 - RNA, 19 nt, Artificial Sequence
  Description of Artificial Sequence: Synthetic oligonucleotide
  Antisense strand to SEQ ID NO: 1102038
uuucccgagguucucagcu

SEQ ID NO: 1102040 - RNA, 19 nt, Artificial Sequence
  Description of Artificial Sequence: Synthetic oligonucleotide
  Sense strand starting at position 798 of SEQ ID NO: 915732
agaguccuauugguucuau

SEQ ID NO: 1102041 - RNA, 19 nt, Artificial Sequence
  Description of Artificial Sequence: Synthetic oligonucleotide
  Antisense strand to SEQ ID NO: 1102040
auagaaccaauaggacucu

SEQ ID NO: 1102042 - RNA, 19 nt, Artificial Sequence
  Description of Artificial Sequence: Synthetic oligonucleotide
  Sense strand starting at position 799 of SEQ ID NO: 915732
gaguccuauugguucuauu

SEQ ID NO: 1102043 - RNA, 19 nt, Artificial Sequence
  Description of Artificial Sequence: Synthetic oligonucleotide
  Antisense strand to SEQ ID NO: 1102042
aauagaaccaauaggacuc

SEQ ID NO: 1102044 - RNA, 19 nt, Artificial Sequence
  Description of Artificial Sequence: Synthetic oligonucleotide
  Sense strand starting at position 847 of SEQ ID NO: 915732
gggagagguccuggucuaa

SEQ ID NO: 1102045 - RNA, 19 nt, Artificial Sequence
  Description of Artificial Sequence: Synthetic oligonucleotide
  Antisense strand to SEQ ID NO: 1102044
uuagaccaggaccucuccc

SEQ ID NO: 1102046 - RNA, 19 nt, Artificial Sequence
  Description of Artificial Sequence: Synthetic oligonucleotide
  Sense strand starting at position 851 of SEQ ID NO: 915732
gagguccuggucuaacuuu

SEQ ID NO: 1102047 - RNA, 19 nt, Artificial Sequence
  Description of Artificial Sequence: Synthetic oligonucleotide
  Antisense strand to SEQ ID NO: 1102046
aaaguuagaccaggaccuc

SEQ ID NO: 1102048 - RNA, 19 nt, Artificial Sequence
  Description of Artificial Sequence: Synthetic oligonucleotide
  Sense strand starting at position 1467 of SEQ ID NO: 915732
ccgaguccaugagcagaua

SEQ ID NO: 1102049 - RNA, 19 nt, Artificial Sequence
  Description of Artificial Sequence: Synthetic oligonucleotide
  Antisense strand to SEQ ID NO: 1102048
uaucugcucauggacucgg

SEQ ID NO: 1102050 - RNA, 19 nt, Artificial Sequence
  Description of Artificial Sequence: Synthetic oligonucleotide
  Sense strand starting at position 2127 of SEQ ID NO: 915732
acuauuuaguuggcucauu

SEQ ID NO: 1102051 - RNA, 19 nt, Artificial Sequence
  Description of Artificial Sequence: Synthetic oligonucleotide
  Antisense strand to SEQ ID NO: 1102050
aaugagccaacuaaauagu

SEQ ID NO: 1102052 - RNA, 19 nt, Artificial Sequence
  Description of Artificial Sequence: Synthetic oligonucleotide
  Sense strand starting at position 2132 of SEQ ID NO: 915732
uuaguuggcucauuuagua

SEQ ID NO: 1102053 - RNA, 19 nt, Artificial Sequence
  Description of Artificial Sequence: Synthetic oligonucleotide
  Antisense strand to SEQ ID NO: 1102052
uacuaaaugagccaacuaa

SEQ ID NO: 1102054 - RNA, 19 nt, Artificial Sequence
  Description of Artificial Sequence: Synthetic oligonucleotide
  Sense strand starting at position 2137 of SEQ ID NO: 915732
uggcucauuuaguaaggau

SEQ ID NO: 1102055 - RNA, 19 nt, Artificial Sequence
  Description of Artificial Sequence: Synthetic oligonucleotide
  Antisense strand to SEQ ID NO: 1102054
auccuuacuaaaugagcca

SEQ ID NO: 1102056 - RNA, 19 nt, Artificial Sequence
  Description of Artificial Sequence: Synthetic oligonucleotide
  Sense strand starting at position 2172 of SEQ ID NO: 915732
guaggaagcuuccuuuaag

SEQ ID NO: 1102057 - RNA, 19 nt, Artificial Sequence
  Description of Artificial Sequence: Synthetic oligonucleotide
  Antisense strand to SEQ ID NO: 1102056
cuuaaaggaagcuuccuac

SEQ ID NO: 1102058 - RNA, 19 nt, Artificial Sequence
  Description of Artificial Sequence: Synthetic oligonucleotide
  Sense strand starting at position 2469 of SEQ ID NO: 915732
cugcgaaugcaagaaugau

SEQ ID NO: 1102059 - RNA, 19 nt, Artificial Sequence
  Description of Artificial Sequence: Synthetic oligonucleotide
  Antisense strand to SEQ ID NO: 1102058
aucauucuugcauucgcag

SEQ ID NO: 1102060 - RNA, 19 nt, Artificial Sequence
  Description of Artificial Sequence: Synthetic oligonucleotide
  Sense strand starting at position 2552 of SEQ ID NO: 915732
gauuaauaugcauacgugu

SEQ ID NO: 1102061 - RNA, 19 nt, Artificial Sequence
  Description of Artificial Sequence: Synthetic oligonucleotide
  Antisense strand to SEQ ID NO: 1102060
acacguaugcauauuaauc

SEQ ID NO: 1102062 - RNA, 19 nt, Artificial Sequence
  Description of Artificial Sequence: Synthetic oligonucleotide
  Sense strand starting at position 2558 of SEQ ID NO: 915732
uaugcauacgugugagaag

SEQ ID NO: 1102063 - RNA, 19 nt, Artificial Sequence
  Description of Artificial Sequence: Synthetic oligonucleotide
  Antisense strand to SEQ ID NO: 1102062
cuucucacacguaugcaua

SEQ ID NO: 1102064 - RNA, 19 nt, Artificial Sequence
  Description of Artificial Sequence: Synthetic oligonucleotide
  Sense strand starting at position 2698 of SEQ ID NO: 915732
ucagaauucggaggcaaag

SEQ ID NO: 1102065 - RNA, 19 nt, Artificial Sequence
  Description of Artificial Sequence: Synthetic oligonucleotide
  Antisense strand to SEQ ID NO: 1102064
cuuugccuccgaauucuga

SEQ ID NO: 1102066 - RNA, 19 nt, Artificial Sequence
  Description of Artificial Sequence: Synthetic oligonucleotide
  Sense strand starting at position 2901 of SEQ ID NO: 915732
gcucguuaaguugagacau

SEQ ID NO: 1102067 - RNA, 19 nt, Artificial Sequence
  Description of Artificial Sequence: Synthetic oligonucleotide
  Antisense strand to SEQ ID NO: 1102066
augucucaacuuaacgagc

SEQ ID NO: 1102068 - RNA, 19 nt, Artificial Sequence
  Description of Artificial Sequence: Synthetic oligonucleotide
  Sense strand starting at position 2954 of SEQ ID NO: 915732
gcccauugcaauuggauga

SEQ ID NO: 1102069 - RNA, 19 nt, Artificial Sequence
  Description of Artificial Sequence: Synthetic oligonucleotide
  Antisense strand to SEQ ID NO: 1102068
ucauccaauugcaaugggc

SEQ ID NO: 1102070 - RNA, 19 nt, Artificial Sequence
  Description of Artificial Sequence: Synthetic oligonucleotide
  Sense strand starting at position 2984 of SEQ ID NO: 915732
acugaaaucugucugcaaa

SEQ ID NO: 1102071 - RNA, 19 nt, Artificial Sequence
  Description of Artificial Sequence: Synthetic oligonucleotide
  Antisense strand to SEQ ID NO: 1102070
uuugcagacagauuucagu

SEQ ID NO: 1102072 - RNA, 19 nt, Artificial Sequence
  Description of Artificial Sequence: Synthetic oligonucleotide
  Sense strand starting at position 2985 of SEQ ID NO: 915732
cugaaaucugucugcaaag

SEQ ID NO: 1102073 - RNA, 19 nt, Artificial Sequence
  Description of Artificial Sequence: Synthetic oligonucleotide
  Antisense strand to SEQ ID NO: 1102072
cuuugcagacagauuucag

SEQ ID NO: 1102074 - RNA, 19 nt, Artificial Sequence
  Description of Artificial Sequence: Synthetic oligonucleotide
  Sense strand starting at position 2987 of SEQ ID NO: 915732
gaaaucugucugcaaaggu

SEQ ID NO: 1102075 - RNA, 19 nt, Artificial Sequence
  Description of Artificial Sequence: Synthetic oligonucleotide
  Antisense strand to SEQ ID NO: 1102074
accuuugcagacagauuuc

SEQ ID NO: 1102076 - RNA, 19 nt, Artificial Sequence
  Description of Artificial Sequence: Synthetic oligonucleotide
  Sense strand starting at position 3041 of SEQ ID NO: 915732
gaauguuggaaguguggga

SEQ ID NO: 1102077 - RNA, 19 nt, Artificial Sequence
  Description of Artificial Sequence: Synthetic oligonucleotide
  Antisense strand to SEQ ID NO: 1102076
ucccacacuuccaacauuc

SEQ ID NO: 1102078 - RNA, 19 nt, Artificial Sequence
  Description of Artificial Sequence: Synthetic oligonucleotide
  Sense strand starting at position 3063 of SEQ ID NO: 915732
ugcaauugauuugauagaa

SEQ ID NO: 1102079 - RNA, 19 nt, Artificial Sequence
  Description of Artificial Sequence: Synthetic oligonucleotide
  Antisense strand to SEQ ID NO: 1102078
uucuaucaaaucaauugca

SEQ ID NO: 1102080 - RNA, 19 nt, Artificial Sequence
  Description of Artificial Sequence: Synthetic oligonucleotide
  Sense strand starting at position 3109 of SEQ ID NO: 915732
uucugaguuugccuuuaaa

SEQ ID NO: 1102081 - RNA, 19 nt, Artificial Sequence
  Description of Artificial Sequence: Synthetic oligonucleotide
  Antisense strand to SEQ ID NO: 1102080
uuuaaaggcaaacucagaa

SEQ ID NO: 1102082 - RNA, 19 nt, Artificial Sequence
  Description of Artificial Sequence: Synthetic oligonucleotide
  Sense strand starting at position 3316 of SEQ ID NO: 915732
gcucuuggcccuggaaaga

SEQ ID NO: 1102083 - RNA, 19 nt, Artificial Sequence
  Description of Artificial Sequence: Synthetic oligonucleotide
  Antisense strand to SEQ ID NO: 1102082
ucuuuccagggccaagagc

SEQ ID NO: 1102084 - RNA, 19 nt, Artificial Sequence
  Description of Artificial Sequence: Synthetic oligonucleotide
  Sense strand starting at position 3373 of SEQ ID NO: 915732
gaagucuguucuuucugau

SEQ ID NO: 1102085 - RNA, 19 nt, Artificial Sequence
  Description of Artificial Sequence: Synthetic oligonucleotide
  Antisense strand to SEQ ID NO: 1102084
aucagaaagaacagacuuc

SEQ ID NO: 1102086 - RNA, 19 nt, Artificial Sequence
  Description of Artificial Sequence: Synthetic oligonucleotide
  Sense strand starting at position 3529 of SEQ ID NO: 915732
uagcuuugaugcuugaaug

SEQ ID NO: 1102087 - RNA, 19 nt, Artificial Sequence
  Description of Artificial Sequence: Synthetic oligonucleotide
  Antisense strand to SEQ ID NO: 1102086
cauucaagcaucaaagcua

SEQ ID NO: 1102088 - RNA, 19 nt, Artificial Sequence
  Description of Artificial Sequence: Synthetic oligonucleotide
  Sense strand starting at position 3530 of SEQ ID NO: 915732
agcuuugaugcuugaauga

SEQ ID NO: 1102089 - RNA, 19 nt, Artificial Sequence
  Description of Artificial Sequence: Synthetic oligonucleotide
  Antisense strand to SEQ ID NO: 1102088
ucauucaagcaucaaagcu

SEQ ID NO: 1102090 - RNA, 19 nt, Artificial Sequence
  Description of Artificial Sequence: Synthetic oligonucleotide
  Sense strand starting at position 3582 of SEQ ID NO: 915732
agguaaucucuuuggcaac

SEQ ID NO: 1102091 - RNA, 19 nt, Artificial Sequence
  Description of Artificial Sequence: Synthetic oligonucleotide
  Antisense strand to SEQ ID NO: 1102090
guugccaaagagauuaccu

SEQ ID NO: 1102092 - RNA, 19 nt, Artificial Sequence
  Description of Artificial Sequence: Synthetic oligonucleotide
  Sense strand starting at position 3660 of SEQ ID NO: 915732
caaauucugugaguuaaag

SEQ ID NO: 1102093 - RNA, 19 nt, Artificial Sequence
  Description of Artificial Sequence: Synthetic oligonucleotide
  Antisense strand to SEQ ID NO: 1102092
cuuuaacucacagaauuug

SEQ ID NO: 1102094 - RNA, 19 nt, Artificial Sequence
  Description of Artificial Sequence: Synthetic oligonucleotide
  Sense strand starting at position 3898 of SEQ ID NO: 915732
gaauuauugugaguacuag

SEQ ID NO: 1102095 - RNA, 19 nt, Artificial Sequence
  Description of Artificial Sequence: Synthetic oligonucleotide
  Antisense strand to SEQ ID NO: 1102094
cuaguacucacaauaauuc

SEQ ID NO: 1102096 - RNA, 19 nt, Artificial Sequence
  Description of Artificial Sequence: Synthetic oligonucleotide
  Sense strand starting at position 3949 of SEQ ID NO: 915732
gaaggaauaagguggugua

SEQ ID NO: 1102097 - RNA, 19 nt, Artificial Sequence
  Description of Artificial Sequence: Synthetic oligonucleotide
  Antisense strand to SEQ ID NO: 1102096
uacaccaccuuauuccuuc

SEQ ID NO: 1102098 - RNA, 19 nt, Artificial Sequence
  Description of Artificial Sequence: Synthetic oligonucleotide
  Sense strand starting at position 3974 of SEQ ID NO: 915732
uuagaagauucugaaagag

SEQ ID NO: 1102099 - RNA, 19 nt, Artificial Sequence
  Description of Artificial Sequence: Synthetic oligonucleotide
  Antisense strand to SEQ ID NO: 1102098
cucuuucagaaucuucuaa

SEQ ID NO: 1102100 - RNA, 19 nt, Artificial Sequence
  Description of Artificial Sequence: Synthetic oligonucleotide
  Sense strand starting at position 472 of SEQ ID NO: 915733
gccucugcugggugagaau

SEQ ID NO: 1102101 - RNA, 19 nt, Artificial Sequence
  Description of Artificial Sequence: Synthetic oligonucleotide
  Antisense strand to SEQ ID NO: 1102100
auucucacccagcagaggc

SEQ ID NO: 1102102 - RNA, 19 nt, Artificial Sequence
  Description of Artificial Sequence: Synthetic oligonucleotide
  Sense strand starting at position 481 of SEQ ID NO: 915733
gggugagaaucccaggaug

SEQ ID NO: 1102103 - RNA, 19 nt, Artificial Sequence
  Description of Artificial Sequence: Synthetic oligonucleotide
  Antisense strand to SEQ ID NO: 1102102
cauccugggauucucaccc

SEQ ID NO: 1102104 - RNA, 19 nt, Artificial Sequence
  Description of Artificial Sequence: Synthetic oligonucleotide
  Sense strand starting at position 483 of SEQ ID NO: 915733
gugagaaucccaggauguu

SEQ ID NO: 1102105 - RNA, 19 nt, Artificial Sequence
  Description of Artificial Sequence: Synthetic oligonucleotide
  Antisense strand to SEQ ID NO: 1102104
aacauccugggauucucac

SEQ ID NO: 1102106 - RNA, 19 nt, Artificial Sequence
  Description of Artificial Sequence: Synthetic oligonucleotide
  Sense strand starting at position 526 of SEQ ID NO: 915733
ccuugucuggcuggaagau

SEQ ID NO: 1102107 - RNA, 19 nt, Artificial Sequence
  Description of Artificial Sequence: Synthetic oligonucleotide
  Antisense strand to SEQ ID NO: 1102106
aucuuccagccagacaagg

SEQ ID NO: 1102108 - RNA, 19 nt, Artificial Sequence
  Description of Artificial Sequence: Synthetic oligonucleotide
  Sense strand starting at position 538 of SEQ ID NO: 915733
ggaagaucucuuuggguuu

SEQ ID NO: 1102109 - RNA, 19 nt, Artificial Sequence
  Description of Artificial Sequence: Synthetic oligonucleotide
  Antisense strand to SEQ ID NO: 1102108
aaacccaaagagaucuucc

SEQ ID NO: 1102110 - RNA, 19 nt, Artificial Sequence
  Description of Artificial Sequence: Synthetic oligonucleotide
  Sense strand starting at position 549 of SEQ ID NO: 915733
uuggguuugccacagucau

SEQ ID NO: 1102111 - RNA, 19 nt, Artificial Sequence
  Description of Artificial Sequence: Synthetic oligonucleotide
  Antisense strand to SEQ ID NO: 1102110
augacuguggcaaacccaa

SEQ ID NO: 1102112 - RNA, 19 nt, Artificial Sequence
  Description of Artificial Sequence: Synthetic oligonucleotide
  Sense strand starting at position 560 of SEQ ID NO: 915733
acagucauuuagugaggga

SEQ ID NO: 1102113 - RNA, 19 nt, Artificial Sequence
  Description of Artificial Sequence: Synthetic oligonucleotide
  Antisense strand to SEQ ID NO: 1102112
ucccucacuaaaugacugu

SEQ ID NO: 1102114 - RNA, 19 nt, Artificial Sequence
  Description of Artificial Sequence: Synthetic oligonucleotide
  Sense strand starting at position 876 of SEQ ID NO: 915733
ggcugagaguuucgggaaa

SEQ ID NO: 1102115 - RNA, 19 nt, Artificial Sequence
  Description of Artificial Sequence: Synthetic oligonucleotide
  Antisense strand to SEQ ID NO: 1102114
uuucccgaaacucucagcc

SEQ ID NO: 1102116 - RNA, 19 nt, Artificial Sequence
  Description of Artificial Sequence: Synthetic oligonucleotide
  Sense strand starting at position 878 of SEQ ID NO: 915733
cugagaguuucgggaaaug

SEQ ID NO: 1102117 - RNA, 19 nt, Artificial Sequence
  Description of Artificial Sequence: Synthetic oligonucleotide
  Antisense strand to SEQ ID NO: 1102116
cauuucccgaaacucucag

SEQ ID NO: 1102118 - RNA, 19 nt, Artificial Sequence
  Description of Artificial Sequence: Synthetic oligonucleotide
  Sense strand starting at position 888 of SEQ ID NO: 915733
cgggaaauguucucgugau

SEQ ID NO: 1102119 - RNA, 19 nt, Artificial Sequence
  Description of Artificial Sequence: Synthetic oligonucleotide
  Antisense strand to SEQ ID NO: 1102118
aucacgagaacauuucccg

SEQ ID NO: 1102120 - RNA, 19 nt, Artificial Sequence
  Description of Artificial Sequence: Synthetic oligonucleotide
  Sense strand starting at position 889 of SEQ ID NO: 915733
gggaaauguucucgugaug

SEQ ID NO: 1102121 - RNA, 19 nt, Artificial Sequence
  Description of Artificial Sequence: Synthetic oligonucleotide
  Antisense strand to SEQ ID NO: 1102120
caucacgagaacauuuccc

SEQ ID NO: 1102122 - RNA, 19 nt, Artificial Sequence
  Description of Artificial Sequence: Synthetic oligonucleotide
  Sense strand starting at position 900 of SEQ ID NO: 915733
ucgugauggccuggagagu

SEQ ID NO: 1102123 - RNA, 19 nt, Artificial Sequence
  Description of Artificial Sequence: Synthetic oligonucleotide
  Antisense strand to SEQ ID NO: 1102122
acucuccaggccaucacga

SEQ ID NO: 1102124 - RNA, 19 nt, Artificial Sequence
  Description of Artificial Sequence: Synthetic oligonucleotide
  Sense strand starting at position 1668 of SEQ ID NO: 915733
cgguuauugcagggaggua

SEQ ID NO: 1102125 - RNA, 19 nt, Artificial Sequence
  Description of Artificial Sequence: Synthetic oligonucleotide
  Antisense strand to SEQ ID NO: 1102124
uaccucccugcaauaaccg

SEQ ID NO: 1102126 - RNA, 19 nt, Artificial Sequence
  Description of Artificial Sequence: Synthetic oligonucleotide
  Sense strand starting at position 2373 of SEQ ID NO: 915733
cuccgaaagacucagcaga

SEQ ID NO: 1102127 - RNA, 19 nt, Artificial Sequence
  Description of Artificial Sequence: Synthetic oligonucleotide
  Antisense strand to SEQ ID NO: 1102126
ucugcugagucuuucggag

SEQ ID NO: 1102128 - RNA, 19 nt, Artificial Sequence
  Description of Artificial Sequence: Synthetic oligonucleotide
  Sense strand starting at position 2614 of SEQ ID NO: 915733
gagcuauucccguggcgcu

SEQ ID NO: 1102129 - RNA, 19 nt, Artificial Sequence
  Description of Artificial Sequence: Synthetic oligonucleotide
  Antisense strand to SEQ ID NO: 1102128
agcgccacgggaauagcuc

SEQ ID NO: 1102130 - RNA, 19 nt, Artificial Sequence
  Description of Artificial Sequence: Synthetic oligonucleotide
  Sense strand starting at position 2878 of SEQ ID NO: 915733
uccgauugcuccucugaaa

SEQ ID NO: 1102131 - RNA, 19 nt, Artificial Sequence
  Description of Artificial Sequence: Synthetic oligonucleotide
  Antisense strand to SEQ ID NO: 1102130
uuucagaggagcaaucgga

SEQ ID NO: 1102132 - RNA, 19 nt, Artificial Sequence
  Description of Artificial Sequence: Synthetic oligonucleotide
  Sense strand starting at position 3137 of SEQ ID NO: 915733
acagaagcccuuugugaga

SEQ ID NO: 1102133 - RNA, 19 nt, Artificial Sequence
  Description of Artificial Sequence: Synthetic oligonucleotide
  Antisense strand to SEQ ID NO: 1102132
ucucacaaagggcuucugu

SEQ ID NO: 1102134 - RNA, 19 nt, Artificial Sequence
  Description of Artificial Sequence: Synthetic oligonucleotide
  Sense strand starting at position 3142 of SEQ ID NO: 915733
agcccuuugugagaagaca

SEQ ID NO: 1102135 - RNA, 19 nt, Artificial Sequence
  Description of Artificial Sequence: Synthetic oligonucleotide
  Antisense strand to SEQ ID NO: 1102134
ugucuucucacaaagggcu

SEQ ID NO: 1102136 - RNA, 19 nt, Artificial Sequence
  Description of Artificial Sequence: Synthetic oligonucleotide
  Sense strand starting at position 3395 of SEQ ID NO: 915733
gaaugugaccuuuggaaac

SEQ ID NO: 1102137 - RNA, 19 nt, Artificial Sequence
  Description of Artificial Sequence: Synthetic oligonucleotide
  Antisense strand to SEQ ID NO: 1102136
guuuccaaaggucacauuc

SEQ ID NO: 1102138 - RNA, 19 nt, Artificial Sequence
  Description of Artificial Sequence: Synthetic oligonucleotide
  Sense strand starting at position 3414 of SEQ ID NO: 915733
aggcccuuugcagauguau

SEQ ID NO: 1102139 - RNA, 19 nt, Artificial Sequence
  Description of Artificial Sequence: Synthetic oligonucleotide
  Antisense strand to SEQ ID NO: 1102138
auacaucugcaaagggccu

SEQ ID NO: 1102140 - RNA, 19 nt, Artificial Sequence
  Description of Artificial Sequence: Synthetic oligonucleotide
  Sense strand starting at position 3480 of SEQ ID NO: 915733
auucccagguucugauaga

SEQ ID NO: 1102141 - RNA, 19 nt, Artificial Sequence
  Description of Artificial Sequence: Synthetic oligonucleotide
  Antisense strand to SEQ ID NO: 1102140
ucuaucagaaccugggaau

SEQ ID NO: 1102142 - RNA, 19 nt, Artificial Sequence
  Description of Artificial Sequence: Synthetic oligonucleotide
  Sense strand starting at position 3666 of SEQ ID NO: 915733
ccgacaguuugacuuagga

SEQ ID NO: 1102143 - RNA, 19 nt, Artificial Sequence
  Description of Artificial Sequence: Synthetic oligonucleotide
  Antisense strand to SEQ ID NO: 1102142
uccuaagucaaacugucgg

SEQ ID NO: 1102144 - RNA, 19 nt, Artificial Sequence
  Description of Artificial Sequence: Synthetic oligonucleotide
  Sense strand starting at position 3670 of SEQ ID NO: 915733
caguuugacuuaggacuca

SEQ ID NO: 1102145 - RNA, 19 nt, Artificial Sequence
  Description of Artificial Sequence: Synthetic oligonucleotide
  Antisense strand to SEQ ID NO: 1102144
ugaguccuaagucaaacug

SEQ ID NO: 1102146 - RNA, 19 nt, Artificial Sequence
  Description of Artificial Sequence: Synthetic oligonucleotide
  Sense strand starting at position 3715 of SEQ ID NO: 915733
agaaucaauugccauuguu

SEQ ID NO: 1102147 - RNA, 19 nt, Artificial Sequence
  Description of Artificial Sequence: Synthetic oligonucleotide
  Antisense strand to SEQ ID NO: 1102146
aacaauggcaauugauucu

SEQ ID NO: 1102148 - RNA, 19 nt, Artificial Sequence
  Description of Artificial Sequence: Synthetic oligonucleotide
  Sense strand starting at position 209 of SEQ ID NO: 915734
agacaaguguuguaaccuu

SEQ ID NO: 1102149 - RNA, 19 nt, Artificial Sequence
  Description of Artificial Sequence: Synthetic oligonucleotide
  Antisense strand to SEQ ID NO: 1102148
aagguuacaacacuugucu

SEQ ID NO: 1102150 - RNA, 19 nt, Artificial Sequence
  Description of Artificial Sequence: Synthetic oligonucleotide
  Sense strand starting at position 280 of SEQ ID NO: 915734
ggcacugaccacugaugau

SEQ ID NO: 1102151 - RNA, 19 nt, Artificial Sequence
  Description of Artificial Sequence: Synthetic oligonucleotide
  Antisense strand to SEQ ID NO: 1102150
aucaucaguggucagugcc

SEQ ID NO: 1102152 - RNA, 19 nt, Artificial Sequence
  Description of Artificial Sequence: Synthetic oligonucleotide
  Sense strand starting at position 358 of SEQ ID NO: 915734
ggccuuugaguaggaugga

SEQ ID NO: 1102153 - RNA, 19 nt, Artificial Sequence
  Description of Artificial Sequence: Synthetic oligonucleotide
  Antisense strand to SEQ ID NO: 1102152
uccauccuacucaaaggcc

SEQ ID NO: 1102154 - RNA, 19 nt, Artificial Sequence
  Description of Artificial Sequence: Synthetic oligonucleotide
  Sense strand starting at position 359 of SEQ ID NO: 915734
gccuuugaguaggauggau

SEQ ID NO: 1102155 - RNA, 19 nt, Artificial Sequence
  Description of Artificial Sequence: Synthetic oligonucleotide
  Antisense strand to SEQ ID NO: 1102154
auccauccuacucaaaggc

SEQ ID NO: 1102156 - RNA, 19 nt, Artificial Sequence
  Description of Artificial Sequence: Synthetic oligonucleotide
  Sense strand starting at position 390 of SEQ ID NO: 915734
cagaauguaccauggacua

SEQ ID NO: 1102157 - RNA, 19 nt, Artificial Sequence
  Description of Artificial Sequence: Synthetic oligonucleotide
  Antisense strand to SEQ ID NO: 1102156
uaguccaugguacauucug

SEQ ID NO: 1102158 - RNA, 19 nt, Artificial Sequence
  Description of Artificial Sequence: Synthetic oligonucleotide
  Sense strand starting at position 440 of SEQ ID NO: 915734
gggcaucagcuccaacuua

SEQ ID NO: 1102159 - RNA, 19 nt, Artificial Sequence
  Description of Artificial Sequence: Synthetic oligonucleotide
  Antisense strand to SEQ ID NO: 1102158
uaaguuggagcugaugccc

SEQ ID NO: 1102160 - RNA, 19 nt, Artificial Sequence
  Description of Artificial Sequence: Synthetic oligonucleotide
  Sense strand starting at position 562 of SEQ ID NO: 915734
cugguuggcccggaugaga

SEQ ID NO: 1102161 - RNA, 19 nt, Artificial Sequence
  Description of Artificial Sequence: Synthetic oligonucleotide
  Antisense strand to SEQ ID NO: 1102160
ucucauccgggccaaccag

SEQ ID NO: 1102162 - RNA, 19 nt, Artificial Sequence
  Description of Artificial Sequence: Synthetic oligonucleotide
  Sense strand starting at position 798 of SEQ ID NO: 915734
aaagucugggcuuggagau

SEQ ID NO: 1102163 - RNA, 19 nt, Artificial Sequence
  Description of Artificial Sequence: Synthetic oligonucleotide
  Antisense strand to SEQ ID NO: 1102162
aucuccaagcccagacuuu

SEQ ID NO: 1102164 - RNA, 19 nt, Artificial Sequence
  Description of Artificial Sequence: Synthetic oligonucleotide
  Sense strand starting at position 1069 of SEQ ID NO: 915734
cucagucugcuguggacau

SEQ ID NO: 1102165 - RNA, 19 nt, Artificial Sequence
  Description of Artificial Sequence: Synthetic oligonucleotide
  Antisense strand to SEQ ID NO: 1102164
auguccacagcagacugag

SEQ ID NO: 1102166 - RNA, 19 nt, Artificial Sequence
  Description of Artificial Sequence: Synthetic oligonucleotide
  Sense strand starting at position 1316 of SEQ ID NO: 915734
acgucucgguccugaaaga

SEQ ID NO: 1102167 - RNA, 19 nt, Artificial Sequence
  Description of Artificial Sequence: Synthetic oligonucleotide
  Antisense strand to SEQ ID NO: 1102166
ucuuucaggaccgagacgu

SEQ ID NO: 1102168 - RNA, 19 nt, Artificial Sequence
  Description of Artificial Sequence: Synthetic oligonucleotide
  Sense strand starting at position 1317 of SEQ ID NO: 915734
cgucucgguccugaaagaa

SEQ ID NO: 1102169 - RNA, 19 nt, Artificial Sequence
  Description of Artificial Sequence: Synthetic oligonucleotide
  Antisense strand to SEQ ID NO: 1102168
uucuuucaggaccgagacg

SEQ ID NO: 1102170 - RNA, 19 nt, Artificial Sequence
  Description of Artificial Sequence: Synthetic oligonucleotide
  Sense strand starting at position 1433 of SEQ ID NO: 915734
gccaguggucuccaggaau

SEQ ID NO: 1102171 - RNA, 19 nt, Artificial Sequence
  Description of Artificial Sequence: Synthetic oligonucleotide
  Antisense strand to SEQ ID NO: 1102170
auuccuggagaccacuggc

SEQ ID NO: 1102172 - RNA, 19 nt, Artificial Sequence
  Description of Artificial Sequence: Synthetic oligonucleotide
  Sense strand starting at position 1436 of SEQ ID NO: 915734
aguggucuccaggaauagu

SEQ ID NO: 1102173 - RNA, 19 nt, Artificial Sequence
  Description of Artificial Sequence: Synthetic oligonucleotide
  Antisense strand to SEQ ID NO: 1102172
acuauuccuggagaccacu

SEQ ID NO: 1102174 - RNA, 19 nt, Artificial Sequence
  Description of Artificial Sequence: Synthetic oligonucleotide
  Sense strand starting at position 1584 of SEQ ID NO: 915734
cucccuccuccagagaagu

SEQ ID NO: 1102175 - RNA, 19 nt, Artificial Sequence
  Description of Artificial Sequence: Synthetic oligonucleotide
  Antisense strand to SEQ ID NO: 1102174
acuucucuggaggagggag

SEQ ID NO: 1102176 - RNA, 19 nt, Artificial Sequence
  Description of Artificial Sequence: Synthetic oligonucleotide
  Sense strand starting at position 1595 of SEQ ID NO: 915734
agagaaguucaugguuaag

SEQ ID NO: 1102177 - RNA, 19 nt, Artificial Sequence
  Description of Artificial Sequence: Synthetic oligonucleotide
  Antisense strand to SEQ ID NO: 1102176
cuuaaccaugaacuucucu

SEQ ID NO: 1102178 - RNA, 19 nt, Artificial Sequence
  Description of Artificial Sequence: Synthetic oligonucleotide
  Sense strand starting at position 1716 of SEQ ID NO: 915734
gaguauacggcucauuaag

SEQ ID NO: 1102179 - RNA, 19 nt, Artificial Sequence
  Description of Artificial Sequence: Synthetic oligonucleotide
  Antisense strand to SEQ ID NO: 1102178
cuuaaugagccguauacuc

SEQ ID NO: 1102180 - RNA, 19 nt, Artificial Sequence
  Description of Artificial Sequence: Synthetic oligonucleotide
  Sense strand starting at position 1718 of SEQ ID NO: 915734
guauacggcucauuaaguu

SEQ ID NO: 1102181 - RNA, 19 nt, Artificial Sequence
  Description of Artificial Sequence: Synthetic oligonucleotide
  Antisense strand to SEQ ID NO: 1102180
aacuuaaugagccguauac

SEQ ID NO: 1102182 - RNA, 19 nt, Artificial Sequence
  Description of Artificial Sequence: Synthetic oligonucleotide
  Sense strand starting at position 2290 of SEQ ID NO: 915734
ucaggaggucugcgacaga

SEQ ID NO: 1102183 - RNA, 19 nt, Artificial Sequence
  Description of Artificial Sequence: Synthetic oligonucleotide
  Antisense strand to SEQ ID NO: 1102182
ucugucgcagaccuccuga

SEQ ID NO: 1102184 - RNA, 19 nt, Artificial Sequence
  Description of Artificial Sequence: Synthetic oligonucleotide
  Sense strand starting at position 2957 of SEQ ID NO: 915734
uugguuuccucauuccuua

SEQ ID NO: 1102185 - RNA, 19 nt, Artificial Sequence
  Description of Artificial Sequence: Synthetic oligonucleotide
  Antisense strand to SEQ ID NO: 1102184
uaaggaaugaggaaaccaa

SEQ ID NO: 1102186 - RNA, 19 nt, Artificial Sequence
  Description of Artificial Sequence: Synthetic oligonucleotide
  Sense strand starting at position 2991 of SEQ ID NO: 915734
ugguauuucucuggaaguu

SEQ ID NO: 1102187 - RNA, 19 nt, Artificial Sequence
  Description of Artificial Sequence: Synthetic oligonucleotide
  Antisense strand to SEQ ID NO: 1102186
aacuuccagagaaauacca

SEQ ID NO: 1102188 - RNA, 19 nt, Artificial Sequence
  Description of Artificial Sequence: Synthetic oligonucleotide
  Sense strand starting at position 3004 of SEQ ID NO: 915734
gaaguuugcucagggcagu

SEQ ID NO: 1102189 - RNA, 19 nt, Artificial Sequence
  Description of Artificial Sequence: Synthetic oligonucleotide
  Antisense strand to SEQ ID NO: 1102188
acugcccugagcaaacuuc

SEQ ID NO: 1102190 - RNA, 19 nt, Artificial Sequence
  Description of Artificial Sequence: Synthetic oligonucleotide
  Sense strand starting at position 3050 of SEQ ID NO: 915734
ccaguccugugagaaacua

SEQ ID NO: 1102191 - RNA, 19 nt, Artificial Sequence
  Description of Artificial Sequence: Synthetic oligonucleotide
  Antisense strand to SEQ ID NO: 1102190
uaguuucucacaggacugg

SEQ ID NO: 1102192 - RNA, 19 nt, Artificial Sequence
  Description of Artificial Sequence: Synthetic oligonucleotide
  Sense strand starting at position 3128 of SEQ ID NO: 915734
cuguguaucuccuuugaag

SEQ ID NO: 1102193 - RNA, 19 nt, Artificial Sequence
  Description of Artificial Sequence: Synthetic oligonucleotide
  Antisense strand to SEQ ID NO: 1102192
cuucaaaggagauacacag

SEQ ID NO: 1102194 - RNA, 19 nt, Artificial Sequence
  Description of Artificial Sequence: Synthetic oligonucleotide
  Sense strand starting at position 3130 of SEQ ID NO: 915734
guguaucuccuuugaagcu

SEQ ID NO: 1102195 - RNA, 19 nt, Artificial Sequence
  Description of Artificial Sequence: Synthetic oligonucleotide
  Antisense strand to SEQ ID NO: 1102194
agcuucaaaggagauacac

SEQ ID NO: 1102196 - RNA, 19 nt, Artificial Sequence
  Description of Artificial Sequence: Synthetic oligonucleotide
  Sense strand starting at position 3155 of SEQ ID NO: 915734
cugguugucugucagggaa

SEQ ID NO: 1102197 - RNA, 19 nt, Artificial Sequence
  Description of Artificial Sequence: Synthetic oligonucleotide
  Antisense strand to SEQ ID NO: 1102196
uucccugacagacaaccag

SEQ ID NO: 1102198 - RNA, 19 nt, Artificial Sequence
  Description of Artificial Sequence: Synthetic oligonucleotide
  Sense strand starting at position 3157 of SEQ ID NO: 915734
gguugucugucagggaaag

SEQ ID NO: 1102199 - RNA, 19 nt, Artificial Sequence
  Description of Artificial Sequence: Synthetic oligonucleotide
  Antisense strand to SEQ ID NO: 1102198
cuuucccugacagacaacc

SEQ ID NO: 1102200 - RNA, 19 nt, Artificial Sequence
  Description of Artificial Sequence: Synthetic oligonucleotide
  Sense strand starting at position 3246 of SEQ ID NO: 915734
gcuugcugguccugagaug

SEQ ID NO: 1102201 - RNA, 19 nt, Artificial Sequence
  Description of Artificial Sequence: Synthetic oligonucleotide
  Antisense strand to SEQ ID NO: 1102200
caucucaggaccagcaagc

SEQ ID NO: 1102202 - RNA, 19 nt, Artificial Sequence
  Description of Artificial Sequence: Synthetic oligonucleotide
  Sense strand starting at position 3468 of SEQ ID NO: 915734
gccagaauucuacaggucu

SEQ ID NO: 1102203 - RNA, 19 nt, Artificial Sequence
  Description of Artificial Sequence: Synthetic oligonucleotide
  Antisense strand to SEQ ID NO: 1102202
agaccuguagaauucuggc

SEQ ID NO: 1102204 - RNA, 19 nt, Artificial Sequence
  Description of Artificial Sequence: Synthetic oligonucleotide
  Sense strand starting at position 3505 of SEQ ID NO: 915734
caggcaucuggccagcaau

SEQ ID NO: 1102205 - RNA, 19 nt, Artificial Sequence
  Description of Artificial Sequence: Synthetic oligonucleotide
  Antisense strand to SEQ ID NO: 1102204
auugcuggccagaugccug

SEQ ID NO: 1102206 - RNA, 19 nt, Artificial Sequence
  Description of Artificial Sequence: Synthetic oligonucleotide
  Sense strand starting at position 3527 of SEQ ID NO: 915734
ggaagaaguuggcuuugca

SEQ ID NO: 1102207 - RNA, 19 nt, Artificial Sequence
  Description of Artificial Sequence: Synthetic oligonucleotide
  Antisense strand to SEQ ID NO: 1102206
ugcaaagccaacuucuucc

SEQ ID NO: 1102208 - RNA, 19 nt, Artificial Sequence
  Description of Artificial Sequence: Synthetic oligonucleotide
  Sense strand starting at position 3551 of SEQ ID NO: 915734
acauacuuggaguggaauu

SEQ ID NO: 1102209 - RNA, 19 nt, Artificial Sequence
  Description of Artificial Sequence: Synthetic oligonucleotide
  Antisense strand to SEQ ID NO: 1102208
aauuccacuccaaguaugu

SEQ ID NO: 1102210 - RNA, 19 nt, Artificial Sequence
  Description of Artificial Sequence: Synthetic oligonucleotide
  Sense strand starting at position 91 of SEQ ID NO: 915735
gggcuuuccugauaaagac

SEQ ID NO: 1102211 - RNA, 19 nt, Artificial Sequence
  Description of Artificial Sequence: Synthetic oligonucleotide
  Antisense strand to SEQ ID NO: 1102210
gucuuuaucaggaaagccc

SEQ ID NO: 1102212 - RNA, 19 nt, Artificial Sequence
  Description of Artificial Sequence: Synthetic oligonucleotide
  Sense strand starting at position 110 of SEQ ID NO: 915735
aagaguugguuagagaaag

SEQ ID NO: 1102213 - RNA, 19 nt, Artificial Sequence
  Description of Artificial Sequence: Synthetic oligonucleotide
  Antisense strand to SEQ ID NO: 1102212
cuuucucuaaccaacucuu

SEQ ID NO: 1102214 - RNA, 19 nt, Artificial Sequence
  Description of Artificial Sequence: Synthetic oligonucleotide
  Sense strand starting at position 255 of SEQ ID NO: 915735
ccuugaaguacuugggaag

SEQ ID NO: 1102215 - RNA, 19 nt, Artificial Sequence
  Description of Artificial Sequence: Synthetic oligonucleotide
  Antisense strand to SEQ ID NO: 1102214
cuucccaaguacuucaagg

SEQ ID NO: 1102216 - RNA, 19 nt, Artificial Sequence
  Description of Artificial Sequence: Synthetic oligonucleotide
  Sense strand starting at position 283 of SEQ ID NO: 915735
aucaguauucccuggaguc

SEQ ID NO: 1102217 - RNA, 19 nt, Artificial Sequence
  Description of Artificial Sequence: Synthetic oligonucleotide
  Antisense strand to SEQ ID NO: 1102216
gacuccagggaauacugau

SEQ ID NO: 1102218 - RNA, 19 nt, Artificial Sequence
  Description of Artificial Sequence: Synthetic oligonucleotide
  Sense strand starting at position 284 of SEQ ID NO: 915735
ucaguauucccuggaguca

SEQ ID NO: 1102219 - RNA, 19 nt, Artificial Sequence
  Description of Artificial Sequence: Synthetic oligonucleotide
  Antisense strand to SEQ ID NO: 1102218
ugacuccagggaauacuga

SEQ ID NO: 1102220 - RNA, 19 nt, Artificial Sequence
  Description of Artificial Sequence: Synthetic oligonucleotide
  Sense strand starting at position 325 of SEQ ID NO: 915735
gaagaaggguauuccaucu

SEQ ID NO: 1102221 - RNA, 19 nt, Artificial Sequence
  Description of Artificial Sequence: Synthetic oligonucleotide
  Antisense strand to SEQ ID NO: 1102220
agauggaauacccuucuuc

SEQ ID NO: 1102222 - RNA, 19 nt, Artificial Sequence
  Description of Artificial Sequence: Synthetic oligonucleotide
  Sense strand starting at position 332 of SEQ ID NO: 915735
gguauuccaucugcugaca

SEQ ID NO: 1102223 - RNA, 19 nt, Artificial Sequence
  Description of Artificial Sequence: Synthetic oligonucleotide
  Antisense strand to SEQ ID NO: 1102222
ugucagcagauggaauacc

SEQ ID NO: 1102224 - RNA, 19 nt, Artificial Sequence
  Description of Artificial Sequence: Synthetic oligonucleotide
  Sense strand starting at position 594 of SEQ ID NO: 915735
agacaaguguuguaaccuu

SEQ ID NO: 1102225 - RNA, 19 nt, Artificial Sequence
  Description of Artificial Sequence: Synthetic oligonucleotide
  Antisense strand to SEQ ID NO: 1102224
aagguuacaacacuugucu

SEQ ID NO: 1102226 - RNA, 19 nt, Artificial Sequence
  Description of Artificial Sequence: Synthetic oligonucleotide
  Sense strand starting at position 665 of SEQ ID NO: 915735
ggcacugaccacugaugau

SEQ ID NO: 1102227 - RNA, 19 nt, Artificial Sequence
  Description of Artificial Sequence: Synthetic oligonucleotide
  Antisense strand to SEQ ID NO: 1102226
aucaucaguggucagugcc

SEQ ID NO: 1102228 - RNA, 19 nt, Artificial Sequence
  Description of Artificial Sequence: Synthetic oligonucleotide
  Sense strand starting at position 743 of SEQ ID NO: 915735
ggccuuugaguaggaugga

SEQ ID NO: 1102229 - RNA, 19 nt, Artificial Sequence
  Description of Artificial Sequence: Synthetic oligonucleotide
  Antisense strand to SEQ ID NO: 1102228
uccauccuacucaaaggcc

SEQ ID NO: 1102230 - RNA, 19 nt, Artificial Sequence
  Description of Artificial Sequence: Synthetic oligonucleotide
  Sense strand starting at position 744 of SEQ ID NO: 915735
gccuuugaguaggauggau

SEQ ID NO: 1102231 - RNA, 19 nt, Artificial Sequence
  Description of Artificial Sequence: Synthetic oligonucleotide
  Antisense strand to SEQ ID NO: 1102230
auccauccuacucaaaggc

SEQ ID NO: 1102232 - RNA, 19 nt, Artificial Sequence
  Description of Artificial Sequence: Synthetic oligonucleotide
  Sense strand starting at position 775 of SEQ ID NO: 915735
cagaauguaccauggacua

SEQ ID NO: 1102233 - RNA, 19 nt, Artificial Sequence
  Description of Artificial Sequence: Synthetic oligonucleotide
  Antisense strand to SEQ ID NO: 1102232
uaguccaugguacauucug

SEQ ID NO: 1102234 - RNA, 19 nt, Artificial Sequence
  Description of Artificial Sequence: Synthetic oligonucleotide
  Sense strand starting at position 825 of SEQ ID NO: 915735
gggcaucagcuccaacuua

SEQ ID NO: 1102235 - RNA, 19 nt, Artificial Sequence
  Description of Artificial Sequence: Synthetic oligonucleotide
  Antisense strand to SEQ ID NO: 1102234
uaaguuggagcugaugccc

SEQ ID NO: 1102236 - RNA, 19 nt, Artificial Sequence
  Description of Artificial Sequence: Synthetic oligonucleotide
  Sense strand starting at position 947 of SEQ ID NO: 915735
cugguuggcccggaugaga

SEQ ID NO: 1102237 - RNA, 19 nt, Artificial Sequence
  Description of Artificial Sequence: Synthetic oligonucleotide
  Antisense strand to SEQ ID NO: 1102236
ucucauccgggccaaccag

SEQ ID NO: 1102238 - RNA, 19 nt, Artificial Sequence
  Description of Artificial Sequence: Synthetic oligonucleotide
  Sense strand starting at position 1183 of SEQ ID NO: 915735
aaagucugggcuuggagau

SEQ ID NO: 1102239 - RNA, 19 nt, Artificial Sequence
  Description of Artificial Sequence: Synthetic oligonucleotide
  Antisense strand to SEQ ID NO: 1102238
aucuccaagcccagacuuu

SEQ ID NO: 1102240 - RNA, 19 nt, Artificial Sequence
  Description of Artificial Sequence: Synthetic oligonucleotide
  Sense strand starting at position 1454 of SEQ ID NO: 915735
cucagucugcuguggacau

SEQ ID NO: 1102241 - RNA, 19 nt, Artificial Sequence
  Description of Artificial Sequence: Synthetic oligonucleotide
  Antisense strand to SEQ ID NO: 1102240
auguccacagcagacugag

SEQ ID NO: 1102242 - RNA, 19 nt, Artificial Sequence
  Description of Artificial Sequence: Synthetic oligonucleotide
  Sense strand starting at position 1701 of SEQ ID NO: 915735
acgucucgguccugaaaga

SEQ ID NO: 1102243 - RNA, 19 nt, Artificial Sequence
  Description of Artificial Sequence: Synthetic oligonucleotide
  Antisense strand to SEQ ID NO: 1102242
ucuuucaggaccgagacgu

SEQ ID NO: 1102244 - RNA, 19 nt, Artificial Sequence
  Description of Artificial Sequence: Synthetic oligonucleotide
  Sense strand starting at position 1702 of SEQ ID NO: 915735
cgucucgguccugaaagaa

SEQ ID NO: 1102245 - RNA, 19 nt, Artificial Sequence
  Description of Artificial Sequence: Synthetic oligonucleotide
  Antisense strand to SEQ ID NO: 1102244
uucuuucaggaccgagacg

SEQ ID NO: 1102246 - RNA, 19 nt, Artificial Sequence
  Description of Artificial Sequence: Synthetic oligonucleotide
  Sense strand starting at position 1818 of SEQ ID NO: 915735
gccaguggucuccaggaau

SEQ ID NO: 1102247 - RNA, 19 nt, Artificial Sequence
  Description of Artificial Sequence: Synthetic oligonucleotide
  Antisense strand to SEQ ID NO: 1102246
auuccuggagaccacuggc

SEQ ID NO: 1102248 - RNA, 19 nt, Artificial Sequence
  Description of Artificial Sequence: Synthetic oligonucleotide
  Sense strand starting at position 1821 of SEQ ID NO: 915735
aguggucuccaggaauagu

SEQ ID NO: 1102249 - RNA, 19 nt, Artificial Sequence
  Description of Artificial Sequence: Synthetic oligonucleotide
  Antisense strand to SEQ ID NO: 1102248
acuauuccuggagaccacu

SEQ ID NO: 1102250 - RNA, 19 nt, Artificial Sequence
  Description of Artificial Sequence: Synthetic oligonucleotide
  Sense strand starting at position 1969 of SEQ ID NO: 915735
cucccuccuccagagaagu

SEQ ID NO: 1102251 - RNA, 19 nt, Artificial Sequence
  Description of Artificial Sequence: Synthetic oligonucleotide
  Antisense strand to SEQ ID NO: 1102250
acuucucuggaggagggag

SEQ ID NO: 1102252 - RNA, 19 nt, Artificial Sequence
  Description of Artificial Sequence: Synthetic oligonucleotide
  Sense strand starting at position 1980 of SEQ ID NO: 915735
agagaaguucaugguuaag

SEQ ID NO: 1102253 - RNA, 19 nt, Artificial Sequence
  Description of Artificial Sequence: Synthetic oligonucleotide
  Antisense strand to SEQ ID NO: 1102252
cuuaaccaugaacuucucu

SEQ ID NO: 1102254 - RNA, 19 nt, Artificial Sequence
  Description of Artificial Sequence: Synthetic oligonucleotide
  Sense strand starting at position 2101 of SEQ ID NO: 915735
gaguauacggcucauuaag

SEQ ID NO: 1102255 - RNA, 19 nt, Artificial Sequence
  Description of Artificial Sequence: Synthetic oligonucleotide
  Antisense strand to SEQ ID NO: 1102254
cuuaaugagccguauacuc

SEQ ID NO: 1102256 - RNA, 19 nt, Artificial Sequence
  Description of Artificial Sequence: Synthetic oligonucleotide
  Sense strand starting at position 2103 of SEQ ID NO: 915735
guauacggcucauuaaguu

SEQ ID NO: 1102257 - RNA, 19 nt, Artificial Sequence
  Description of Artificial Sequence: Synthetic oligonucleotide
  Antisense strand to SEQ ID NO: 1102256
aacuuaaugagccguauac

SEQ ID NO: 1102258 - RNA, 19 nt, Artificial Sequence
  Description of Artificial Sequence: Synthetic oligonucleotide
  Sense strand starting at position 2675 of SEQ ID NO: 915735
ucaggaggucugcgacaga

SEQ ID NO: 1102259 - RNA, 19 nt, Artificial Sequence
  Description of Artificial Sequence: Synthetic oligonucleotide
  Antisense strand to SEQ ID NO: 1102258
ucugucgcagaccuccuga

SEQ ID NO: 1102260 - RNA, 19 nt, Artificial Sequence
  Description of Artificial Sequence: Synthetic oligonucleotide
  Sense strand starting at position 3342 of SEQ ID NO: 915735
uugguuuccucauuccuua

SEQ ID NO: 1102261 - RNA, 19 nt, Artificial Sequence
  Description of Artificial Sequence: Synthetic oligonucleotide
  Antisense strand to SEQ ID NO: 1102260
uaaggaaugaggaaaccaa

SEQ ID NO: 1102262 - RNA, 19 nt, Artificial Sequence
  Description of Artificial Sequence: Synthetic oligonucleotide
  Sense strand starting at position 3376 of SEQ ID NO: 915735
ugguauuucucuggaaguu

SEQ ID NO: 1102263 - RNA, 19 nt, Artificial Sequence
  Description of Artificial Sequence: Synthetic oligonucleotide
  Antisense strand to SEQ ID NO: 1102262
aacuuccagagaaauacca

SEQ ID NO: 1102264 - RNA, 19 nt, Artificial Sequence
  Description of Artificial Sequence: Synthetic oligonucleotide
  Sense strand starting at position 3389 of SEQ ID NO: 915735
gaaguuugcucagggcagu

SEQ ID NO: 1102265 - RNA, 19 nt, Artificial Sequence
  Description of Artificial Sequence: Synthetic oligonucleotide
  Antisense strand to SEQ ID NO: 1102264
acugcccugagcaaacuuc

SEQ ID NO: 1102266 - RNA, 19 nt, Artificial Sequence
  Description of Artificial Sequence: Synthetic oligonucleotide
  Sense strand starting at position 3435 of SEQ ID NO: 915735
ccaguccugugagaaacua

SEQ ID NO: 1102267 - RNA, 19 nt, Artificial Sequence
  Description of Artificial Sequence: Synthetic oligonucleotide
  Antisense strand to SEQ ID NO: 1102266
uaguuucucacaggacugg

SEQ ID NO: 1102268 - RNA, 19 nt, Artificial Sequence
  Description of Artificial Sequence: Synthetic oligonucleotide
  Sense strand starting at position 3513 of SEQ ID NO: 915735
cuguguaucuccuuugaag

SEQ ID NO: 1102269 - RNA, 19 nt, Artificial Sequence
  Description of Artificial Sequence: Synthetic oligonucleotide
  Antisense strand to SEQ ID NO: 1102268
cuucaaaggagauacacag

SEQ ID NO: 1102270 - RNA, 19 nt, Artificial Sequence
  Description of Artificial Sequence: Synthetic oligonucleotide
  Sense strand starting at position 3515 of SEQ ID NO: 915735
guguaucuccuuugaagcu

SEQ ID NO: 1102271 - RNA, 19 nt, Artificial Sequence
  Description of Artificial Sequence: Synthetic oligonucleotide
  Antisense strand to SEQ ID NO: 1102270
agcuucaaaggagauacac

SEQ ID NO: 1102272 - RNA, 19 nt, Artificial Sequence
  Description of Artificial Sequence: Synthetic oligonucleotide
  Sense strand starting at position 3540 of SEQ ID NO: 915735
cugguugucugucagggaa

SEQ ID NO: 1102273 - RNA, 19 nt, Artificial Sequence
  Description of Artificial Sequence: Synthetic oligonucleotide
  Antisense strand to SEQ ID NO: 1102272
uucccugacagacaaccag

SEQ ID NO: 1102274 - RNA, 19 nt, Artificial Sequence
  Description of Artificial Sequence: Synthetic oligonucleotide
  Sense strand starting at position 3542 of SEQ ID NO: 915735
gguugucugucagggaaag

SEQ ID NO: 1102275 - RNA, 19 nt, Artificial Sequence
  Description of Artificial Sequence: Synthetic oligonucleotide
  Antisense strand to SEQ ID NO: 1102274
cuuucccugacagacaacc

SEQ ID NO: 1102276 - RNA, 19 nt, Artificial Sequence
  Description of Artificial Sequence: Synthetic oligonucleotide
  Sense strand starting at position 3631 of SEQ ID NO: 915735
gcuugcugguccugagaug

SEQ ID NO: 1102277 - RNA, 19 nt, Artificial Sequence
  Description of Artificial Sequence: Synthetic oligonucleotide
  Antisense strand to SEQ ID NO: 1102276
caucucaggaccagcaagc

SEQ ID NO: 1102278 - RNA, 19 nt, Artificial Sequence
  Description of Artificial Sequence: Synthetic oligonucleotide
  Sense strand starting at position 3853 of SEQ ID NO: 915735
gccagaauucuacaggucu

SEQ ID NO: 1102279 - RNA, 19 nt, Artificial Sequence
  Description of Artificial Sequence: Synthetic oligonucleotide
  Antisense strand to SEQ ID NO: 1102278
agaccuguagaauucuggc

SEQ ID NO: 1102280 - RNA, 19 nt, Artificial Sequence
  Description of Artificial Sequence: Synthetic oligonucleotide
  Sense strand starting at position 3890 of SEQ ID NO: 915735
caggcaucuggccagcaau

SEQ ID NO: 1102281 - RNA, 19 nt, Artificial Sequence
  Description of Artificial Sequence: Synthetic oligonucleotide
  Antisense strand to SEQ ID NO: 1102280
auugcuggccagaugccug

SEQ ID NO: 1102282 - RNA, 19 nt, Artificial Sequence
  Description of Artificial Sequence: Synthetic oligonucleotide
  Sense strand starting at position 3912 of SEQ ID NO: 915735
ggaagaaguuggcuuugca

SEQ ID NO: 1102283 - RNA, 19 nt, Artificial Sequence
  Description of Artificial Sequence: Synthetic oligonucleotide
  Antisense strand to SEQ ID NO: 1102282
ugcaaagccaacuucuucc

SEQ ID NO: 1102284 - RNA, 19 nt, Artificial Sequence
  Description of Artificial Sequence: Synthetic oligonucleotide
  Sense strand starting at position 3936 of SEQ ID NO: 915735
acauacuuggaguggaauu

SEQ ID NO: 1102285 - RNA, 19 nt, Artificial Sequence
  Description of Artificial Sequence: Synthetic oligonucleotide
  Antisense strand to SEQ ID NO: 1102284
aauuccacuccaaguaugu

SEQ ID NO: 1102286 - RNA, 19 nt, Artificial Sequence
  Description of Artificial Sequence: Synthetic oligonucleotide
  Sense strand starting at position 255 of SEQ ID NO: 915736
aggacuaaaucuuaaugac

SEQ ID NO: 1102287 - RNA, 19 nt, Artificial Sequence
  Description of Artificial Sequence: Synthetic oligonucleotide
  Antisense strand to SEQ ID NO: 1102286
gucauuaagauuuaguccu

SEQ ID NO: 1102288 - RNA, 19 nt, Artificial Sequence
  Description of Artificial Sequence: Synthetic oligonucleotide
  Sense strand starting at position 369 of SEQ ID NO: 915736
cacugaggucuggaguuua

SEQ ID NO: 1102289 - RNA, 19 nt, Artificial Sequence
  Description of Artificial Sequence: Synthetic oligonucleotide
  Antisense strand to SEQ ID NO: 1102288
uaaacuccagaccucagug

SEQ ID NO: 1102290 - RNA, 19 nt, Artificial Sequence
  Description of Artificial Sequence: Synthetic oligonucleotide
  Sense strand starting at position 435 of SEQ ID NO: 915736
aacaaucagcugugugaag

SEQ ID NO: 1102291 - RNA, 19 nt, Artificial Sequence
  Description of Artificial Sequence: Synthetic oligonucleotide
  Antisense strand to SEQ ID NO: 1102290
cuucacacagcugauuguu

SEQ ID NO: 1102292 - RNA, 19 nt, Artificial Sequence
  Description of Artificial Sequence: Synthetic oligonucleotide
  Sense strand starting at position 436 of SEQ ID NO: 915736
acaaucagcugugugaagu

SEQ ID NO: 1102293 - RNA, 19 nt, Artificial Sequence
  Description of Artificial Sequence: Synthetic oligonucleotide
  Antisense strand to SEQ ID NO: 1102292
acuucacacagcugauugu

SEQ ID NO: 1102294 - RNA, 19 nt, Artificial Sequence
  Description of Artificial Sequence: Synthetic oligonucleotide
  Sense strand starting at position 694 of SEQ ID NO: 915736
uggaucuuuaccuggguca

SEQ ID NO: 1102295 - RNA, 19 nt, Artificial Sequence
  Description of Artificial Sequence: Synthetic oligonucleotide
  Antisense strand to SEQ ID NO: 1102294
ugacccagguaaagaucca

SEQ ID NO: 1102296 - RNA, 19 nt, Artificial Sequence
  Description of Artificial Sequence: Synthetic oligonucleotide
  Sense strand starting at position 696 of SEQ ID NO: 915736
gaucuuuaccugggucaca

SEQ ID NO: 1102297 - RNA, 19 nt, Artificial Sequence
  Description of Artificial Sequence: Synthetic oligonucleotide
  Antisense strand to SEQ ID NO: 1102296
ugugacccagguaaagauc

SEQ ID NO: 1102298 - RNA, 19 nt, Artificial Sequence
  Description of Artificial Sequence: Synthetic oligonucleotide
  Sense strand starting at position 697 of SEQ ID NO: 915736
aucuuuaccugggucacaa

SEQ ID NO: 1102299 - RNA, 19 nt, Artificial Sequence
  Description of Artificial Sequence: Synthetic oligonucleotide
  Antisense strand to SEQ ID NO: 1102298
uugugacccagguaaagau

SEQ ID NO: 1102300 - RNA, 19 nt, Artificial Sequence
  Description of Artificial Sequence: Synthetic oligonucleotide
  Sense strand starting at position 735 of SEQ ID NO: 915736
ugucuucuauaacuaagga

SEQ ID NO: 1102301 - RNA, 19 nt, Artificial Sequence
  Description of Artificial Sequence: Synthetic oligonucleotide
  Antisense strand to SEQ ID NO: 1102300
uccuuaguuauagaagaca

SEQ ID NO: 1102302 - RNA, 19 nt, Artificial Sequence
  Description of Artificial Sequence: Synthetic oligonucleotide
  Sense strand starting at position 1011 of SEQ ID NO: 915736
cguugaacuggucaagacu

SEQ ID NO: 1102303 - RNA, 19 nt, Artificial Sequence
  Description of Artificial Sequence: Synthetic oligonucleotide
  Antisense strand to SEQ ID NO: 1102302
agucuugaccaguucaacg

SEQ ID NO: 1102304 - RNA, 19 nt, Artificial Sequence
  Description of Artificial Sequence: Synthetic oligonucleotide
  Sense strand starting at position 1196 of SEQ ID NO: 915736
agucuugagccgugaagau

SEQ ID NO: 1102305 - RNA, 19 nt, Artificial Sequence
  Description of Artificial Sequence: Synthetic oligonucleotide
  Antisense strand to SEQ ID NO: 1102304
aucuucacggcucaagacu

SEQ ID NO: 1102306 - RNA, 19 nt, Artificial Sequence
  Description of Artificial Sequence: Synthetic oligonucleotide
  Sense strand starting at position 1203 of SEQ ID NO: 915736
agccgugaagaucauaaau

SEQ ID NO: 1102307 - RNA, 19 nt, Artificial Sequence
  Description of Artificial Sequence: Synthetic oligonucleotide
  Antisense strand to SEQ ID NO: 1102306
auuuaugaucuucacggcu

SEQ ID NO: 1102308 - RNA, 19 nt, Artificial Sequence
  Description of Artificial Sequence: Synthetic oligonucleotide
  Sense strand starting at position 1236 of SEQ ID NO: 915736
auaaauacgcguuauaaga

SEQ ID NO: 1102309 - RNA, 19 nt, Artificial Sequence
  Description of Artificial Sequence: Synthetic oligonucleotide
  Antisense strand to SEQ ID NO: 1102308
ucuuauaacgcguauuuau

SEQ ID NO: 1102310 - RNA, 19 nt, Artificial Sequence
  Description of Artificial Sequence: Synthetic oligonucleotide
  Sense strand starting at position 1323 of SEQ ID NO: 915736
gcaguaagggacugguauu

SEQ ID NO: 1102311 - RNA, 19 nt, Artificial Sequence
  Description of Artificial Sequence: Synthetic oligonucleotide
  Antisense strand to SEQ ID NO: 1102310
aauaccagucccuuacugc

SEQ ID NO: 1102312 - RNA, 19 nt, Artificial Sequence
  Description of Artificial Sequence: Synthetic oligonucleotide
  Sense strand starting at position 1441 of SEQ ID NO: 915736
aguagaggauugccucaga

SEQ ID NO: 1102313 - RNA, 19 nt, Artificial Sequence
  Description of Artificial Sequence: Synthetic oligonucleotide
  Antisense strand to SEQ ID NO: 1102312
ucugaggcaauccucuacu

SEQ ID NO: 1102314 - RNA, 19 nt, Artificial Sequence
  Description of Artificial Sequence: Synthetic oligonucleotide
  Sense strand starting at position 1531 of SEQ ID NO: 915736
cuccaaacucaguggaaga

SEQ ID NO: 1102315 - RNA, 19 nt, Artificial Sequence
  Description of Artificial Sequence: Synthetic oligonucleotide
  Antisense strand to SEQ ID NO: 1102314
ucuuccacugaguuuggag

SEQ ID NO: 1102316 - RNA, 19 nt, Artificial Sequence
  Description of Artificial Sequence: Synthetic oligonucleotide
  Sense strand starting at position 2147 of SEQ ID NO: 915736
gacuguuccgagggucgaa

SEQ ID NO: 1102317 - RNA, 19 nt, Artificial Sequence
  Description of Artificial Sequence: Synthetic oligonucleotide
  Antisense strand to SEQ ID NO: 1102316
uucgacccucggaacaguc

SEQ ID NO: 1102318 - RNA, 19 nt, Artificial Sequence
  Description of Artificial Sequence: Synthetic oligonucleotide
  Sense strand starting at position 2253 of SEQ ID NO: 915736
gccagugagccuuaaugac

SEQ ID NO: 1102319 - RNA, 19 nt, Artificial Sequence
  Description of Artificial Sequence: Synthetic oligonucleotide
  Antisense strand to SEQ ID NO: 1102318
gucauuaaggcucacuggc

SEQ ID NO: 1102320 - RNA, 19 nt, Artificial Sequence
  Description of Artificial Sequence: Synthetic oligonucleotide
  Sense strand starting at position 2260 of SEQ ID NO: 915736
agccuuaaugacugauuga

SEQ ID NO: 1102321 - RNA, 19 nt, Artificial Sequence
  Description of Artificial Sequence: Synthetic oligonucleotide
  Antisense strand to SEQ ID NO: 1102320
ucaaucagucauuaaggcu

SEQ ID NO: 1102322 - RNA, 19 nt, Artificial Sequence
  Description of Artificial Sequence: Synthetic oligonucleotide
  Sense strand starting at position 2313 of SEQ ID NO: 915736
acuguucugucacugacuu

SEQ ID NO: 1102323 - RNA, 19 nt, Artificial Sequence
  Description of Artificial Sequence: Synthetic oligonucleotide
  Antisense strand to SEQ ID NO: 1102322
aagucagugacagaacagu

SEQ ID NO: 1102324 - RNA, 19 nt, Artificial Sequence
  Description of Artificial Sequence: Synthetic oligonucleotide
  Sense strand starting at position 2338 of SEQ ID NO: 915736
gugauaaugguaggcuagu

SEQ ID NO: 1102325 - RNA, 19 nt, Artificial Sequence
  Description of Artificial Sequence: Synthetic oligonucleotide
  Antisense strand to SEQ ID NO: 1102324
acuagccuaccauuaucac

SEQ ID NO: 1102326 - RNA, 19 nt, Artificial Sequence
  Description of Artificial Sequence: Synthetic oligonucleotide
  Sense strand starting at position 2372 of SEQ ID NO: 915736
gcgcaaauuucucccgacu

SEQ ID NO: 1102327 - RNA, 19 nt, Artificial Sequence
  Description of Artificial Sequence: Synthetic oligonucleotide
  Antisense strand to SEQ ID NO: 1102326
agucgggagaaauuugcgc

SEQ ID NO: 1102328 - RNA, 19 nt, Artificial Sequence
  Description of Artificial Sequence: Synthetic oligonucleotide
  Sense strand starting at position 2396 of SEQ ID NO: 915736
gucauacacuugccuuaga

SEQ ID NO: 1102329 - RNA, 19 nt, Artificial Sequence
  Description of Artificial Sequence: Synthetic oligonucleotide
  Antisense strand to SEQ ID NO: 1102328
ucuaaggcaaguguaugac

SEQ ID NO: 1102330 - RNA, 19 nt, Artificial Sequence
  Description of Artificial Sequence: Synthetic oligonucleotide
  Sense strand starting at position 2399 of SEQ ID NO: 915736
auacacuugccuuagauga

SEQ ID NO: 1102331 - RNA, 19 nt, Artificial Sequence
  Description of Artificial Sequence: Synthetic oligonucleotide
  Antisense strand to SEQ ID NO: 1102330
ucaucuaaggcaaguguau

SEQ ID NO: 1102332 - RNA, 19 nt, Artificial Sequence
  Description of Artificial Sequence: Synthetic oligonucleotide
  Sense strand starting at position 2424 of SEQ ID NO: 915736
gugguccucuaauuaauga

SEQ ID NO: 1102333 - RNA, 19 nt, Artificial Sequence
  Description of Artificial Sequence: Synthetic oligonucleotide
  Antisense strand to SEQ ID NO: 1102332
ucauuaauuagaggaccac

SEQ ID NO: 1102334 - RNA, 19 nt, Artificial Sequence
  Description of Artificial Sequence: Synthetic oligonucleotide
  Sense strand starting at position 2472 of SEQ ID NO: 915736
auacguuggcaaggguaaa

SEQ ID NO: 1102335 - RNA, 19 nt, Artificial Sequence
  Description of Artificial Sequence: Synthetic oligonucleotide
  Antisense strand to SEQ ID NO: 1102334
uuuacccuugccaacguau

SEQ ID NO: 1102336 - RNA, 19 nt, Artificial Sequence
  Description of Artificial Sequence: Synthetic oligonucleotide
  Sense strand starting at position 2539 of SEQ ID NO: 915736
ggaaaucauuccguaaguc

SEQ ID NO: 1102337 - RNA, 19 nt, Artificial Sequence
  Description of Artificial Sequence: Synthetic oligonucleotide
  Antisense strand to SEQ ID NO: 1102336
gacuuacggaaugauuucc

SEQ ID NO: 1102338 - RNA, 19 nt, Artificial Sequence
  Description of Artificial Sequence: Synthetic oligonucleotide
  Sense strand starting at position 2540 of SEQ ID NO: 915736
gaaaucauuccguaaguca

SEQ ID NO: 1102339 - RNA, 19 nt, Artificial Sequence
  Description of Artificial Sequence: Synthetic oligonucleotide
  Antisense strand to SEQ ID NO: 1102338
ugacuuacggaaugauuuc

SEQ ID NO: 1102340 - RNA, 19 nt, Artificial Sequence
  Description of Artificial Sequence: Synthetic oligonucleotide
  Sense strand starting at position 2543 of SEQ ID NO: 915736
aucauuccguaagucagaa

SEQ ID NO: 1102341 - RNA, 19 nt, Artificial Sequence
  Description of Artificial Sequence: Synthetic oligonucleotide
  Antisense strand to SEQ ID NO: 1102340
uucugacuuacggaaugau

SEQ ID NO: 1102342 - RNA, 19 nt, Artificial Sequence
  Description of Artificial Sequence: Synthetic oligonucleotide
  Sense strand starting at position 2555 of SEQ ID NO: 915736
gucagaauuucuccucugu

SEQ ID NO: 1102343 - RNA, 19 nt, Artificial Sequence
  Description of Artificial Sequence: Synthetic oligonucleotide
  Antisense strand to SEQ ID NO: 1102342
acagaggagaaauucugac

SEQ ID NO: 1102344 - RNA, 19 nt, Artificial Sequence
  Description of Artificial Sequence: Synthetic oligonucleotide
  Sense strand starting at position 2615 of SEQ ID NO: 915736
gcuguauuuguguaccugu

SEQ ID NO: 1102345 - RNA, 19 nt, Artificial Sequence
  Description of Artificial Sequence: Synthetic oligonucleotide
  Antisense strand to SEQ ID NO: 1102344
acagguacacaaauacagc

SEQ ID NO: 1102346 - RNA, 19 nt, Artificial Sequence
  Description of Artificial Sequence: Synthetic oligonucleotide
  Sense strand starting at position 2754 of SEQ ID NO: 915736
ggugacuuacauuagucau

SEQ ID NO: 1102347 - RNA, 19 nt, Artificial Sequence
  Description of Artificial Sequence: Synthetic oligonucleotide
  Antisense strand to SEQ ID NO: 1102346
augacuaauguaagucacc

SEQ ID NO: 1102348 - RNA, 19 nt, Artificial Sequence
  Description of Artificial Sequence: Synthetic oligonucleotide
  Sense strand starting at position 2756 of SEQ ID NO: 915736
ugacuuacauuagucauca

SEQ ID NO: 1102349 - RNA, 19 nt, Artificial Sequence
  Description of Artificial Sequence: Synthetic oligonucleotide
  Antisense strand to SEQ ID NO: 1102348
ugaugacuaauguaaguca

SEQ ID NO: 1102350 - RNA, 19 nt, Artificial Sequence
  Description of Artificial Sequence: Synthetic oligonucleotide
  Sense strand starting at position 2835 of SEQ ID NO: 915736
uuugaugaugugugacagu

SEQ ID NO: 1102351 - RNA, 19 nt, Artificial Sequence
  Description of Artificial Sequence: Synthetic oligonucleotide
  Antisense strand to SEQ ID NO: 1102350
acugucacacaucaucaaa

SEQ ID NO: 1102352 - RNA, 19 nt, Artificial Sequence
  Description of Artificial Sequence: Synthetic oligonucleotide
  Sense strand starting at position 2881 of SEQ ID NO: 915736
agaacaaggccguaguauu

SEQ ID NO: 1102353 - RNA, 19 nt, Artificial Sequence
  Description of Artificial Sequence: Synthetic oligonucleotide
  Antisense strand to SEQ ID NO: 1102352
aauacuacggccuuguucu

SEQ ID NO: 1102354 - RNA, 19 nt, Artificial Sequence
  Description of Artificial Sequence: Synthetic oligonucleotide
  Sense strand starting at position 2910 of SEQ ID NO: 915736
aaaguuggcgucuaaguga

SEQ ID NO: 1102355 - RNA, 19 nt, Artificial Sequence
  Description of Artificial Sequence: Synthetic oligonucleotide
  Antisense strand to SEQ ID NO: 1102354
ucacuuagacgccaacuuu

SEQ ID NO: 1102356 - RNA, 19 nt, Artificial Sequence
  Description of Artificial Sequence: Synthetic oligonucleotide
  Sense strand starting at position 2965 of SEQ ID NO: 915736
guggaagcaucauuauaaa

SEQ ID NO: 1102357 - RNA, 19 nt, Artificial Sequence
  Description of Artificial Sequence: Synthetic oligonucleotide
  Antisense strand to SEQ ID NO: 1102356
uuuauaaugaugcuuccac

SEQ ID NO: 1102358 - RNA, 19 nt, Artificial Sequence
  Description of Artificial Sequence: Synthetic oligonucleotide
  Sense strand starting at position 3279 of SEQ ID NO: 915736
cuuuaauuagagcaacugu

SEQ ID NO: 1102359 - RNA, 19 nt, Artificial Sequence
  Description of Artificial Sequence: Synthetic oligonucleotide
  Antisense strand to SEQ ID NO: 1102358
acaguugcucuaauuaaag

SEQ ID NO: 1102360 - RNA, 19 nt, Artificial Sequence
  Description of Artificial Sequence: Synthetic oligonucleotide
  Sense strand starting at position 3292 of SEQ ID NO: 915736
aacuguaccuuugugaguu

SEQ ID NO: 1102361 - RNA, 19 nt, Artificial Sequence
  Description of Artificial Sequence: Synthetic oligonucleotide
  Antisense strand to SEQ ID NO: 1102360
aacucacaaagguacaguu

SEQ ID NO: 1102362 - RNA, 19 nt, Artificial Sequence
  Description of Artificial Sequence: Synthetic oligonucleotide
  Sense strand starting at position 3298 of SEQ ID NO: 915736
accuuugugaguuggagga

SEQ ID NO: 1102363 - RNA, 19 nt, Artificial Sequence
  Description of Artificial Sequence: Synthetic oligonucleotide
  Antisense strand to SEQ ID NO: 1102362
uccuccaacucacaaaggu

SEQ ID NO: 1102364 - RNA, 19 nt, Artificial Sequence
  Description of Artificial Sequence: Synthetic oligonucleotide
  Sense strand starting at position 3311 of SEQ ID NO: 915736
ggaggaaugccagguaaua

SEQ ID NO: 1102365 - RNA, 19 nt, Artificial Sequence
  Description of Artificial Sequence: Synthetic oligonucleotide
  Antisense strand to SEQ ID NO: 1102364
uauuaccuggcauuccucc

SEQ ID NO: 1102366 - RNA, 19 nt, Artificial Sequence
  Description of Artificial Sequence: Synthetic oligonucleotide
  Sense strand starting at position 525 of SEQ ID NO: 915737
gcgggaagugacugaagaa

SEQ ID NO: 1102367 - RNA, 19 nt, Artificial Sequence
  Description of Artificial Sequence: Synthetic oligonucleotide
  Antisense strand to SEQ ID NO: 1102366
uucuucagucacuucccgc

SEQ ID NO: 1102368 - RNA, 19 nt, Artificial Sequence
  Description of Artificial Sequence: Synthetic oligonucleotide
  Sense strand starting at position 879 of SEQ ID NO: 915737
gggcccucguuaccauaaa

SEQ ID NO: 1102369 - RNA, 19 nt, Artificial Sequence
  Description of Artificial Sequence: Synthetic oligonucleotide
  Antisense strand to SEQ ID NO: 1102368
uuuaugguaacgagggccc

SEQ ID NO: 1102370 - RNA, 19 nt, Artificial Sequence
  Description of Artificial Sequence: Synthetic oligonucleotide
  Sense strand starting at position 1234 of SEQ ID NO: 915737
accuccguucugcauauua

SEQ ID NO: 1102371 - RNA, 19 nt, Artificial Sequence
  Description of Artificial Sequence: Synthetic oligonucleotide
  Antisense strand to SEQ ID NO: 1102370
uaauaugcagaacggaggu

SEQ ID NO: 1102372 - RNA, 19 nt, Artificial Sequence
  Description of Artificial Sequence: Synthetic oligonucleotide
  Sense strand starting at position 1236 of SEQ ID NO: 915737
cuccguucugcauauuaaa

SEQ ID NO: 1102373 - RNA, 19 nt, Artificial Sequence
  Description of Artificial Sequence: Synthetic oligonucleotide
  Antisense strand to SEQ ID NO: 1102372
uuuaauaugcagaacggag

SEQ ID NO: 1102374 - RNA, 19 nt, Artificial Sequence
  Description of Artificial Sequence: Synthetic oligonucleotide
  Sense strand starting at position 1443 of SEQ ID NO: 915737
auuugucaccauugcgcua

SEQ ID NO: 1102375 - RNA, 19 nt, Artificial Sequence
  Description of Artificial Sequence: Synthetic oligonucleotide
  Antisense strand to SEQ ID NO: 1102374
uagcgcaauggugacaaau

SEQ ID NO: 1102376 - RNA, 19 nt, Artificial Sequence
  Description of Artificial Sequence: Synthetic oligonucleotide
  Sense strand starting at position 1587 of SEQ ID NO: 915737
uccgcaguguucccugaau

SEQ ID NO: 1102377 - RNA, 19 nt, Artificial Sequence
  Description of Artificial Sequence: Synthetic oligonucleotide
  Antisense strand to SEQ ID NO: 1102376
auucagggaacacugcgga

SEQ ID NO: 1102378 - RNA, 19 nt, Artificial Sequence
  Description of Artificial Sequence: Synthetic oligonucleotide
  Sense strand starting at position 1610 of SEQ ID NO: 915737
ccaucaucccugggaguca

SEQ ID NO: 1102379 - RNA, 19 nt, Artificial Sequence
  Description of Artificial Sequence: Synthetic oligonucleotide
  Antisense strand to SEQ ID NO: 1102378
ugacucccagggaugaugg

SEQ ID NO: 1102380 - RNA, 19 nt, Artificial Sequence
  Description of Artificial Sequence: Synthetic oligonucleotide
  Sense strand starting at position 1819 of SEQ ID NO: 915737
ucaccugcuuguccugaga

SEQ ID NO: 1102381 - RNA, 19 nt, Artificial Sequence
  Description of Artificial Sequence: Synthetic oligonucleotide
  Antisense strand to SEQ ID NO: 1102380
ucucaggacaagcagguga

SEQ ID NO: 1102382 - RNA, 19 nt, Artificial Sequence
  Description of Artificial Sequence: Synthetic oligonucleotide
  Sense strand starting at position 2042 of SEQ ID NO: 915737
ucucaaugggucuggcaaa

SEQ ID NO: 1102383 - RNA, 19 nt, Artificial Sequence
  Description of Artificial Sequence: Synthetic oligonucleotide
  Antisense strand to SEQ ID NO: 1102382
uuugccagacccauugaga

SEQ ID NO: 1102384 - RNA, 19 nt, Artificial Sequence
  Description of Artificial Sequence: Synthetic oligonucleotide
  Sense strand starting at position 2102 of SEQ ID NO: 915737
cuccuucugggagagaguu

SEQ ID NO: 1102385 - RNA, 19 nt, Artificial Sequence
  Description of Artificial Sequence: Synthetic oligonucleotide
  Antisense strand to SEQ ID NO: 1102384
aacucucucccagaaggag

SEQ ID NO: 1102386 - RNA, 19 nt, Artificial Sequence
  Description of Artificial Sequence: Synthetic oligonucleotide
  Sense strand starting at position 2123 of SEQ ID NO: 915737
gcaggaugcccaggaguca

SEQ ID NO: 1102387 - RNA, 19 nt, Artificial Sequence
  Description of Artificial Sequence: Synthetic oligonucleotide
  Antisense strand to SEQ ID NO: 1102386
ugacuccugggcauccugc

SEQ ID NO: 1102388 - RNA, 19 nt, Artificial Sequence
  Description of Artificial Sequence: Synthetic oligonucleotide
  Sense strand starting at position 2134 of SEQ ID NO: 915737
aggagucauuuagcgcaga

SEQ ID NO: 1102389 - RNA, 19 nt, Artificial Sequence
  Description of Artificial Sequence: Synthetic oligonucleotide
  Antisense strand to SEQ ID NO: 1102388
ucugcgcuaaaugacuccu

SEQ ID NO: 1102390 - RNA, 19 nt, Artificial Sequence
  Description of Artificial Sequence: Synthetic oligonucleotide
  Sense strand starting at position 2196 of SEQ ID NO: 915737
cgugugaccugguguaagu

SEQ ID NO: 1102391 - RNA, 19 nt, Artificial Sequence
  Description of Artificial Sequence: Synthetic oligonucleotide
  Antisense strand to SEQ ID NO: 1102390
acuuacaccaggucacacg

SEQ ID NO: 1102392 - RNA, 19 nt, Artificial Sequence
  Description of Artificial Sequence: Synthetic oligonucleotide
  Sense strand starting at position 2694 of SEQ ID NO: 915737
aguugaaugcuguguccag

SEQ ID NO: 1102393 - RNA, 19 nt, Artificial Sequence
  Description of Artificial Sequence: Synthetic oligonucleotide
  Antisense strand to SEQ ID NO: 1102392
cuggacacagcauucaacu

SEQ ID NO: 1102394 - RNA, 19 nt, Artificial Sequence
  Description of Artificial Sequence: Synthetic oligonucleotide
  Sense strand starting at position 2698 of SEQ ID NO: 915737
gaaugcuguguccaggaga

SEQ ID NO: 1102395 - RNA, 19 nt, Artificial Sequence
  Description of Artificial Sequence: Synthetic oligonucleotide
  Antisense strand to SEQ ID NO: 1102394
ucuccuggacacagcauuc

SEQ ID NO: 1102396 - RNA, 19 nt, Artificial Sequence
  Description of Artificial Sequence: Synthetic oligonucleotide
  Sense strand starting at position 2776 of SEQ ID NO: 915737
gagguucuggagggaguua

SEQ ID NO: 1102397 - RNA, 19 nt, Artificial Sequence
  Description of Artificial Sequence: Synthetic oligonucleotide
  Antisense strand to SEQ ID NO: 1102396
uaacucccuccagaaccuc

SEQ ID NO: 1102398 - RNA, 19 nt, Artificial Sequence
  Description of Artificial Sequence: Synthetic oligonucleotide
  Sense strand starting at position 2818 of SEQ ID NO: 915737
ccgggcaguggcuguaauu

SEQ ID NO: 1102399 - RNA, 19 nt, Artificial Sequence
  Description of Artificial Sequence: Synthetic oligonucleotide
  Antisense strand to SEQ ID NO: 1102398
aauuacagccacugcccgg

SEQ ID NO: 1102400 - RNA, 19 nt, Artificial Sequence
  Description of Artificial Sequence: Synthetic oligonucleotide
  Sense strand starting at position 3229 of SEQ ID NO: 915737
accacugaggcuugcagua

SEQ ID NO: 1102401 - RNA, 19 nt, Artificial Sequence
  Description of Artificial Sequence: Synthetic oligonucleotide
  Antisense strand to SEQ ID NO: 1102400
uacugcaagccucaguggu

SEQ ID NO: 1102402 - RNA, 19 nt, Artificial Sequence
  Description of Artificial Sequence: Synthetic oligonucleotide
  Sense strand starting at position 3308 of SEQ ID NO: 915737
ucacuagcucugugaccaa

SEQ ID NO: 1102403 - RNA, 19 nt, Artificial Sequence
  Description of Artificial Sequence: Synthetic oligonucleotide
  Antisense strand to SEQ ID NO: 1102402
uuggucacagagcuaguga

SEQ ID NO: 1102404 - RNA, 19 nt, Artificial Sequence
  Description of Artificial Sequence: Synthetic oligonucleotide
  Sense strand starting at position 3361 of SEQ ID NO: 915737
gcucauagguuuguugcaa

SEQ ID NO: 1102405 - RNA, 19 nt, Artificial Sequence
  Description of Artificial Sequence: Synthetic oligonucleotide
  Antisense strand to SEQ ID NO: 1102404
uugcaacaaaccuaugagc

SEQ ID NO: 1102406 - RNA, 19 nt, Artificial Sequence
  Description of Artificial Sequence: Synthetic oligonucleotide
  Sense strand starting at position 3369 of SEQ ID NO: 915737
guuuguugcaaggacuaca

SEQ ID NO: 1102407 - RNA, 19 nt, Artificial Sequence
  Description of Artificial Sequence: Synthetic oligonucleotide
  Antisense strand to SEQ ID NO: 1102406
uguaguccuugcaacaaac

SEQ ID NO: 1102408 - RNA, 19 nt, Artificial Sequence
  Description of Artificial Sequence: Synthetic oligonucleotide
  Sense strand starting at position 3397 of SEQ ID NO: 915737
aaacgaugacaucgguaaa

SEQ ID NO: 1102409 - RNA, 19 nt, Artificial Sequence
  Description of Artificial Sequence: Synthetic oligonucleotide
  Antisense strand to SEQ ID NO: 1102408
uuuaccgaugucaucguuu

SEQ ID NO: 1102410 - RNA, 19 nt, Artificial Sequence
  Description of Artificial Sequence: Synthetic oligonucleotide
  Sense strand starting at position 3400 of SEQ ID NO: 915737
cgaugacaucgguaaaugu

SEQ ID NO: 1102411 - RNA, 19 nt, Artificial Sequence
  Description of Artificial Sequence: Synthetic oligonucleotide
  Antisense strand to SEQ ID NO: 1102410
acauuuaccgaugucaucg

SEQ ID NO: 1102412 - RNA, 19 nt, Artificial Sequence
  Description of Artificial Sequence: Synthetic oligonucleotide
  Sense strand starting at position 3409 of SEQ ID NO: 915737
cgguaaauguuauuauuac

SEQ ID NO: 1102413 - RNA, 19 nt, Artificial Sequence
  Description of Artificial Sequence: Synthetic oligonucleotide
  Antisense strand to SEQ ID NO: 1102412
guaauaauaacauuuaccg

SEQ ID NO: 1102414 - RNA, 19 nt, Artificial Sequence
  Description of Artificial Sequence: Synthetic oligonucleotide
  Sense strand starting at position 3456 of SEQ ID NO: 915737
agcagagcaucauggcuaa

SEQ ID NO: 1102415 - RNA, 19 nt, Artificial Sequence
  Description of Artificial Sequence: Synthetic oligonucleotide
  Antisense strand to SEQ ID NO: 1102414
uuagccaugaugcucugcu

SEQ ID NO: 1102416 - RNA, 19 nt, Artificial Sequence
  Description of Artificial Sequence: Synthetic oligonucleotide
  Sense strand starting at position 3568 of SEQ ID NO: 915737
augguuauaaucggaucua

SEQ ID NO: 1102417 - RNA, 19 nt, Artificial Sequence
  Description of Artificial Sequence: Synthetic oligonucleotide
  Antisense strand to SEQ ID NO: 1102416
uagauccgauuauaaccau

SEQ ID NO: 1102418 - RNA, 19 nt, Artificial Sequence
  Description of Artificial Sequence: Synthetic oligonucleotide
  Sense strand starting at position 3569 of SEQ ID NO: 915737
ugguuauaaucggaucuac

SEQ ID NO: 1102419 - RNA, 19 nt, Artificial Sequence
  Description of Artificial Sequence: Synthetic oligonucleotide
  Antisense strand to SEQ ID NO: 1102418
guagauccgauuauaacca

SEQ ID NO: 1102420 - RNA, 19 nt, Artificial Sequence
  Description of Artificial Sequence: Synthetic oligonucleotide
  Sense strand starting at position 3604 of SEQ ID NO: 915737
aggauuaaaucacuaugca

SEQ ID NO: 1102421 - RNA, 19 nt, Artificial Sequence
  Description of Artificial Sequence: Synthetic oligonucleotide
  Antisense strand to SEQ ID NO: 1102420
ugcauagugauuuaauccu

SEQ ID NO: 1102422 - RNA, 19 nt, Artificial Sequence
  Description of Artificial Sequence: Synthetic oligonucleotide
  Sense strand starting at position 3652 of SEQ ID NO: 915737
gggaacugcuauguuagca

SEQ ID NO: 1102423 - RNA, 19 nt, Artificial Sequence
  Description of Artificial Sequence: Synthetic oligonucleotide
  Antisense strand to SEQ ID NO: 1102422
ugcuaacauagcaguuccc

SEQ ID NO: 1102424 - RNA, 19 nt, Artificial Sequence
  Description of Artificial Sequence: Synthetic oligonucleotide
  Sense strand starting at position 3660 of SEQ ID NO: 915737
cuauguuagcauugcuguu

SEQ ID NO: 1102425 - RNA, 19 nt, Artificial Sequence
  Description of Artificial Sequence: Synthetic oligonucleotide
  Antisense strand to SEQ ID NO: 1102424
aacagcaaugcuaacauag

SEQ ID NO: 1102426 - RNA, 19 nt, Artificial Sequence
  Description of Artificial Sequence: Synthetic oligonucleotide
  Sense strand starting at position 3662 of SEQ ID NO: 915737
auguuagcauugcuguuau

SEQ ID NO: 1102427 - RNA, 19 nt, Artificial Sequence
  Description of Artificial Sequence: Synthetic oligonucleotide
  Antisense strand to SEQ ID NO: 1102426
auaacagcaaugcuaacau

SEQ ID NO: 1102428 - RNA, 19 nt, Artificial Sequence
  Description of Artificial Sequence: Synthetic oligonucleotide
  Sense strand starting at position 46 of SEQ ID NO: 915738
ggaucacacucuuuccaag

SEQ ID NO: 1102429 - RNA, 19 nt, Artificial Sequence
  Description of Artificial Sequence: Synthetic oligonucleotide
  Antisense strand to SEQ ID NO: 1102428
cuuggaaagagugugaucc

SEQ ID NO: 1102430 - RNA, 19 nt, Artificial Sequence
  Description of Artificial Sequence: Synthetic oligonucleotide
  Sense strand starting at position 1365 of SEQ ID NO: 915738
gagggaauuaguugcuagu

SEQ ID NO: 1102431 - RNA, 19 nt, Artificial Sequence
  Description of Artificial Sequence: Synthetic oligonucleotide
  Antisense strand to SEQ ID NO: 1102430
acuagcaacuaauucccuc

SEQ ID NO: 1102432 - RNA, 19 nt, Artificial Sequence
  Description of Artificial Sequence: Synthetic oligonucleotide
  Sense strand starting at position 1367 of SEQ ID NO: 915738
gggaauuaguugcuaguaa

SEQ ID NO: 1102433 - RNA, 19 nt, Artificial Sequence
  Description of Artificial Sequence: Synthetic oligonucleotide
  Antisense strand to SEQ ID NO: 1102432
uuacuagcaacuaauuccc

SEQ ID NO: 1102434 - RNA, 19 nt, Artificial Sequence
  Description of Artificial Sequence: Synthetic oligonucleotide
  Sense strand starting at position 1591 of SEQ ID NO: 915738
aagucaacagauugaguuu

SEQ ID NO: 1102435 - RNA, 19 nt, Artificial Sequence
  Description of Artificial Sequence: Synthetic oligonucleotide
  Antisense strand to SEQ ID NO: 1102434
aaacucaaucuguugacuu

SEQ ID NO: 1102436 - RNA, 19 nt, Artificial Sequence
  Description of Artificial Sequence: Synthetic oligonucleotide
  Sense strand starting at position 1628 of SEQ ID NO: 915738
auuggcuucugguuagagu

SEQ ID NO: 1102437 - RNA, 19 nt, Artificial Sequence
  Description of Artificial Sequence: Synthetic oligonucleotide
  Antisense strand to SEQ ID NO: 1102436
acucuaaccagaagccaau

SEQ ID NO: 1102438 - RNA, 19 nt, Artificial Sequence
  Description of Artificial Sequence: Synthetic oligonucleotide
  Sense strand starting at position 1629 of SEQ ID NO: 915738
uuggcuucugguuagaguu

SEQ ID NO: 1102439 - RNA, 19 nt, Artificial Sequence
  Description of Artificial Sequence: Synthetic oligonucleotide
  Antisense strand to SEQ ID NO: 1102438
aacucuaaccagaagccaa

SEQ ID NO: 1102440 - RNA, 19 nt, Artificial Sequence
  Description of Artificial Sequence: Synthetic oligonucleotide
  Sense strand starting at position 1984 of SEQ ID NO: 915738
gcagaaauugggcaaugua

SEQ ID NO: 1102441 - RNA, 19 nt, Artificial Sequence
  Description of Artificial Sequence: Synthetic oligonucleotide
  Antisense strand to SEQ ID NO: 1102440
uacauugcccaauuucugc

SEQ ID NO: 1102442 - RNA, 19 nt, Artificial Sequence
  Description of Artificial Sequence: Synthetic oligonucleotide
  Sense strand starting at position 2014 of SEQ ID NO: 915738
ggcccagacuuguuaacac

SEQ ID NO: 1102443 - RNA, 19 nt, Artificial Sequence
  Description of Artificial Sequence: Synthetic oligonucleotide
  Antisense strand to SEQ ID NO: 1102442
guguuaacaagucugggcc

SEQ ID NO: 1102444 - RNA, 19 nt, Artificial Sequence
  Description of Artificial Sequence: Synthetic oligonucleotide
  Sense strand starting at position 2216 of SEQ ID NO: 915738
aucaucugcugcccagaaa

SEQ ID NO: 1102445 - RNA, 19 nt, Artificial Sequence
  Description of Artificial Sequence: Synthetic oligonucleotide
  Antisense strand to SEQ ID NO: 1102444
uuucugggcagcagaugau

SEQ ID NO: 1102446 - RNA, 19 nt, Artificial Sequence
  Description of Artificial Sequence: Synthetic oligonucleotide
  Sense strand starting at position 2346 of SEQ ID NO: 915738
cuaggagccuggucucaua

SEQ ID NO: 1102447 - RNA, 19 nt, Artificial Sequence
  Description of Artificial Sequence: Synthetic oligonucleotide
  Antisense strand to SEQ ID NO: 1102446
uaugagaccaggcuccuag

SEQ ID NO: 1102448 - RNA, 19 nt, Artificial Sequence
  Description of Artificial Sequence: Synthetic oligonucleotide
  Sense strand starting at position 2355 of SEQ ID NO: 915738
uggucucauauguguggaa

SEQ ID NO: 1102449 - RNA, 19 nt, Artificial Sequence
  Description of Artificial Sequence: Synthetic oligonucleotide
  Antisense strand to SEQ ID NO: 1102448
uuccacacauaugagacca

SEQ ID NO: 1102450 - RNA, 19 nt, Artificial Sequence
  Description of Artificial Sequence: Synthetic oligonucleotide
  Sense strand starting at position 2407 of SEQ ID NO: 915738
uuguccucuccugauuaga

SEQ ID NO: 1102451 - RNA, 19 nt, Artificial Sequence
  Description of Artificial Sequence: Synthetic oligonucleotide
  Antisense strand to SEQ ID NO: 1102450
ucuaaucaggagaggacaa

SEQ ID NO: 1102452 - RNA, 19 nt, Artificial Sequence
  Description of Artificial Sequence: Synthetic oligonucleotide
  Sense strand starting at position 2409 of SEQ ID NO: 915738
guccucuccugauuagaau

SEQ ID NO: 1102453 - RNA, 19 nt, Artificial Sequence
  Description of Artificial Sequence: Synthetic oligonucleotide
  Antisense strand to SEQ ID NO: 1102452
auucuaaucaggagaggac

SEQ ID NO: 1102454 - RNA, 19 nt, Artificial Sequence
  Description of Artificial Sequence: Synthetic oligonucleotide
  Sense strand starting at position 2444 of SEQ ID NO: 915738
aggaguccuucugugauca

SEQ ID NO: 1102455 - RNA, 19 nt, Artificial Sequence
  Description of Artificial Sequence: Synthetic oligonucleotide
  Antisense strand to SEQ ID NO: 1102454
ugaucacagaaggacuccu

SEQ ID NO: 1102456 - RNA, 19 nt, Artificial Sequence
  Description of Artificial Sequence: Synthetic oligonucleotide
  Sense strand starting at position 2445 of SEQ ID NO: 915738
ggaguccuucugugaucau

SEQ ID NO: 1102457 - RNA, 19 nt, Artificial Sequence
  Description of Artificial Sequence: Synthetic oligonucleotide
  Antisense strand to SEQ ID NO: 1102456
augaucacagaaggacucc

SEQ ID NO: 1102458 - RNA, 19 nt, Artificial Sequence
  Description of Artificial Sequence: Synthetic oligonucleotide
  Sense strand starting at position 2448 of SEQ ID NO: 915738
guccuucugugaucaucca

SEQ ID NO: 1102459 - RNA, 19 nt, Artificial Sequence
  Description of Artificial Sequence: Synthetic oligonucleotide
  Antisense strand to SEQ ID NO: 1102458
uggaugaucacagaaggac

SEQ ID NO: 1102460 - RNA, 19 nt, Artificial Sequence
  Description of Artificial Sequence: Synthetic oligonucleotide
  Sense strand starting at position 2467 of SEQ ID NO: 915738
gcucacacuccuuaucagu

SEQ ID NO: 1102461 - RNA, 19 nt, Artificial Sequence
  Description of Artificial Sequence: Synthetic oligonucleotide
  Antisense strand to SEQ ID NO: 1102460
acugauaaggagugugagc

SEQ ID NO: 1102462 - RNA, 19 nt, Artificial Sequence
  Description of Artificial Sequence: Synthetic oligonucleotide
  Sense strand starting at position 2476 of SEQ ID NO: 915738
ccuuaucagucuuugggau

SEQ ID NO: 1102463 - RNA, 19 nt, Artificial Sequence
  Description of Artificial Sequence: Synthetic oligonucleotide
  Antisense strand to SEQ ID NO: 1102462
aucccaaagacugauaagg

SEQ ID NO: 1102464 - RNA, 19 nt, Artificial Sequence
  Description of Artificial Sequence: Synthetic oligonucleotide
  Sense strand starting at position 2477 of SEQ ID NO: 915738
cuuaucagucuuugggaug

SEQ ID NO: 1102465 - RNA, 19 nt, Artificial Sequence
  Description of Artificial Sequence: Synthetic oligonucleotide
  Antisense strand to SEQ ID NO: 1102464
caucccaaagacugauaag

SEQ ID NO: 1102466 - RNA, 19 nt, Artificial Sequence
  Description of Artificial Sequence: Synthetic oligonucleotide
  Sense strand starting at position 2518 of SEQ ID NO: 915738
cagugucuuccucacuguu

SEQ ID NO: 1102467 - RNA, 19 nt, Artificial Sequence
  Description of Artificial Sequence: Synthetic oligonucleotide
  Antisense strand to SEQ ID NO: 1102466
aacagugaggaagacacug

SEQ ID NO: 1102468 - RNA, 19 nt, Artificial Sequence
  Description of Artificial Sequence: Synthetic oligonucleotide
  Sense strand starting at position 2527 of SEQ ID NO: 915738
ccucacuguugggcuuaaa

SEQ ID NO: 1102469 - RNA, 19 nt, Artificial Sequence
  Description of Artificial Sequence: Synthetic oligonucleotide
  Antisense strand to SEQ ID NO: 1102468
uuuaagcccaacagugagg

SEQ ID NO: 1102470 - RNA, 19 nt, Artificial Sequence
  Description of Artificial Sequence: Synthetic oligonucleotide
  Sense strand starting at position 2690 of SEQ ID NO: 915738
ggccaagcuuggucaggau

SEQ ID NO: 1102471 - RNA, 19 nt, Artificial Sequence
  Description of Artificial Sequence: Synthetic oligonucleotide
  Antisense strand to SEQ ID NO: 1102470
auccugaccaagcuuggcc

SEQ ID NO: 1102472 - RNA, 19 nt, Artificial Sequence
  Description of Artificial Sequence: Synthetic oligonucleotide
  Sense strand starting at position 2740 of SEQ ID NO: 915738
ggguaacuuuaggcaaguu

SEQ ID NO: 1102473 - RNA, 19 nt, Artificial Sequence
  Description of Artificial Sequence: Synthetic oligonucleotide
  Antisense strand to SEQ ID NO: 1102472
aacuugccuaaaguuaccc

SEQ ID NO: 1102474 - RNA, 19 nt, Artificial Sequence
  Description of Artificial Sequence: Synthetic oligonucleotide
  Sense strand starting at position 2741 of SEQ ID NO: 915738
gguaacuuuaggcaaguua

SEQ ID NO: 1102475 - RNA, 19 nt, Artificial Sequence
  Description of Artificial Sequence: Synthetic oligonucleotide
  Antisense strand to SEQ ID NO: 1102474
uaacuugccuaaaguuacc

SEQ ID NO: 1102476 - RNA, 19 nt, Artificial Sequence
  Description of Artificial Sequence: Synthetic oligonucleotide
  Sense strand starting at position 2779 of SEQ ID NO: 915738
agugucugcaacuguagaa

SEQ ID NO: 1102477 - RNA, 19 nt, Artificial Sequence
  Description of Artificial Sequence: Synthetic oligonucleotide
  Antisense strand to SEQ ID NO: 1102476
uucuacaguugcagacacu

SEQ ID NO: 1102478 - RNA, 19 nt, Artificial Sequence
  Description of Artificial Sequence: Synthetic oligonucleotide
  Sense strand starting at position 2819 of SEQ ID NO: 915738
caagguaauuuagguaaag

SEQ ID NO: 1102479 - RNA, 19 nt, Artificial Sequence
  Description of Artificial Sequence: Synthetic oligonucleotide
  Antisense strand to SEQ ID NO: 1102478
cuuuaccuaaauuaccuug

SEQ ID NO: 1102480 - RNA, 19 nt, Artificial Sequence
  Description of Artificial Sequence: Synthetic oligonucleotide
  Sense strand starting at position 2834 of SEQ ID NO: 915738
aaagcauuagucuggcuca

SEQ ID NO: 1102481 - RNA, 19 nt, Artificial Sequence
  Description of Artificial Sequence: Synthetic oligonucleotide
  Antisense strand to SEQ ID NO: 1102480
ugagccagacuaaugcuuu

SEQ ID NO: 1102482 - RNA, 19 nt, Artificial Sequence
  Description of Artificial Sequence: Synthetic oligonucleotide
  Sense strand starting at position 2852 of SEQ ID NO: 915738
acaggaagcuccuuugugu

SEQ ID NO: 1102483 - RNA, 19 nt, Artificial Sequence
  Description of Artificial Sequence: Synthetic oligonucleotide
  Antisense strand to SEQ ID NO: 1102482
acacaaaggagcuuccugu

SEQ ID NO: 1102484 - RNA, 19 nt, Artificial Sequence
  Description of Artificial Sequence: Synthetic oligonucleotide
  Sense strand starting at position 3112 of SEQ ID NO: 915738
gcaucugagaacuggagau

SEQ ID NO: 1102485 - RNA, 19 nt, Artificial Sequence
  Description of Artificial Sequence: Synthetic oligonucleotide
  Antisense strand to SEQ ID NO: 1102484
aucuccaguucucagaugc

SEQ ID NO: 1102486 - RNA, 19 nt, Artificial Sequence
  Description of Artificial Sequence: Synthetic oligonucleotide
  Sense strand starting at position 3352 of SEQ ID NO: 915738
gcugguggaucuccaugaa

SEQ ID NO: 1102487 - RNA, 19 nt, Artificial Sequence
  Description of Artificial Sequence: Synthetic oligonucleotide
  Antisense strand to SEQ ID NO: 1102486
uucauggagauccaccagc

SEQ ID NO: 1102488 - RNA, 19 nt, Artificial Sequence
  Description of Artificial Sequence: Synthetic oligonucleotide
  Sense strand starting at position 3355 of SEQ ID NO: 915738
gguggaucuccaugaacuu

SEQ ID NO: 1102489 - RNA, 19 nt, Artificial Sequence
  Description of Artificial Sequence: Synthetic oligonucleotide
  Antisense strand to SEQ ID NO: 1102488
aaguucauggagauccacc

SEQ ID NO: 1102490 - RNA, 19 nt, Artificial Sequence
  Description of Artificial Sequence: Synthetic oligonucleotide
  Sense strand starting at position 3448 of SEQ ID NO: 915738
uccacauuccagcaagagu

SEQ ID NO: 1102491 - RNA, 19 nt, Artificial Sequence
  Description of Artificial Sequence: Synthetic oligonucleotide
  Antisense strand to SEQ ID NO: 1102490
acucuugcuggaaugugga

SEQ ID NO: 1102492 - RNA, 19 nt, Artificial Sequence
  Description of Artificial Sequence: Synthetic oligonucleotide
  Sense strand starting at position 3480 of SEQ ID NO: 915738
ugcagaucugcagaaugga

SEQ ID NO: 1102493 - RNA, 19 nt, Artificial Sequence
  Description of Artificial Sequence: Synthetic oligonucleotide
  Antisense strand to SEQ ID NO: 1102492
uccauucugcagaucugca

SEQ ID NO: 1102494 - RNA, 19 nt, Artificial Sequence
  Description of Artificial Sequence: Synthetic oligonucleotide
  Sense strand starting at position 3501 of SEQ ID NO: 915738
augacacuugccugcuuaa

SEQ ID NO: 1102495 - RNA, 19 nt, Artificial Sequence
  Description of Artificial Sequence: Synthetic oligonucleotide
  Antisense strand to SEQ ID NO: 1102494
uuaagcaggcaagugucau

SEQ ID NO: 1102496 - RNA, 19 nt, Artificial Sequence
  Description of Artificial Sequence: Synthetic oligonucleotide
  Sense strand starting at position 3649 of SEQ ID NO: 915738
ccuagucaccuagaaguaa

SEQ ID NO: 1102497 - RNA, 19 nt, Artificial Sequence
  Description of Artificial Sequence: Synthetic oligonucleotide
  Antisense strand to SEQ ID NO: 1102496
uuacuucuaggugacuagg

SEQ ID NO: 1102498 - RNA, 19 nt, Artificial Sequence
  Description of Artificial Sequence: Synthetic oligonucleotide
  Sense strand starting at position 3749 of SEQ ID NO: 915738
gccucuccaucugugauau

SEQ ID NO: 1102499 - RNA, 19 nt, Artificial Sequence
  Description of Artificial Sequence: Synthetic oligonucleotide
  Antisense strand to SEQ ID NO: 1102498
auaucacagauggagaggc

SEQ ID NO: 1102500 - RNA, 19 nt, Artificial Sequence
  Description of Artificial Sequence: Synthetic oligonucleotide
  Sense strand starting at position 3750 of SEQ ID NO: 915738
ccucuccaucugugauauu

SEQ ID NO: 1102501 - RNA, 19 nt, Artificial Sequence
  Description of Artificial Sequence: Synthetic oligonucleotide
  Antisense strand to SEQ ID NO: 1102500
aauaucacagauggagagg

SEQ ID NO: 1102502 - RNA, 19 nt, Artificial Sequence
  Description of Artificial Sequence: Synthetic oligonucleotide
  Sense strand starting at position 3815 of SEQ ID NO: 915738
cccuucuugugaucaucuu

SEQ ID NO: 1102503 - RNA, 19 nt, Artificial Sequence
  Description of Artificial Sequence: Synthetic oligonucleotide
  Antisense strand to SEQ ID NO: 1102502
aagaugaucacaagaaggg

SEQ ID NO: 1102504 - RNA, 19 nt, Artificial Sequence
  Description of Artificial Sequence: Synthetic oligonucleotide
  Sense strand starting at position 3841 of SEQ ID NO: 915738
gugacaugucagggacugu

SEQ ID NO: 1102505 - RNA, 19 nt, Artificial Sequence
  Description of Artificial Sequence: Synthetic oligonucleotide
  Antisense strand to SEQ ID NO: 1102504
acagucccugacaugucac

SEQ ID NO: 1102506 - RNA, 19 nt, Artificial Sequence
  Description of Artificial Sequence: Synthetic oligonucleotide
  Sense strand starting at position 3852 of SEQ ID NO: 915738
gggacugugcuggauacuu

SEQ ID NO: 1102507 - RNA, 19 nt, Artificial Sequence
  Description of Artificial Sequence: Synthetic oligonucleotide
  Antisense strand to SEQ ID NO: 1102506
aaguauccagcacaguccc

SEQ ID NO: 1102508 - RNA, 19 nt, Artificial Sequence
  Description of Artificial Sequence: Synthetic oligonucleotide
  Sense strand starting at position 153 of SEQ ID NO: 915739
aaaguagugccucggaaua

SEQ ID NO: 1102509 - RNA, 19 nt, Artificial Sequence
  Description of Artificial Sequence: Synthetic oligonucleotide
  Antisense strand to SEQ ID NO: 1102508
uauuccgaggcacuacuuu

SEQ ID NO: 1102510 - RNA, 19 nt, Artificial Sequence
  Description of Artificial Sequence: Synthetic oligonucleotide
  Sense strand starting at position 183 of SEQ ID NO: 915739
aauggagguguagguuaaa

SEQ ID NO: 1102511 - RNA, 19 nt, Artificial Sequence
  Description of Artificial Sequence: Synthetic oligonucleotide
  Antisense strand to SEQ ID NO: 1102510
uuuaaccuacaccuccauu

SEQ ID NO: 1102512 - RNA, 19 nt, Artificial Sequence
  Description of Artificial Sequence: Synthetic oligonucleotide
  Sense strand starting at position 186 of SEQ ID NO: 915739
ggagguguagguuaaacau

SEQ ID NO: 1102513 - RNA, 19 nt, Artificial Sequence
  Description of Artificial Sequence: Synthetic oligonucleotide
  Antisense strand to SEQ ID NO: 1102512
auguuuaaccuacaccucc

SEQ ID NO: 1102514 - RNA, 19 nt, Artificial Sequence
  Description of Artificial Sequence: Synthetic oligonucleotide
  Sense strand starting at position 203 of SEQ ID NO: 915739
aucaaaguguuucuggguu

SEQ ID NO: 1102515 - RNA, 19 nt, Artificial Sequence
  Description of Artificial Sequence: Synthetic oligonucleotide
  Antisense strand to SEQ ID NO: 1102514
aacccagaaacacuuugau

SEQ ID NO: 1102516 - RNA, 19 nt, Artificial Sequence
  Description of Artificial Sequence: Synthetic oligonucleotide
  Sense strand starting at position 218 of SEQ ID NO: 915739
gguucugggaucugaagca

SEQ ID NO: 1102517 - RNA, 19 nt, Artificial Sequence
  Description of Artificial Sequence: Synthetic oligonucleotide
  Antisense strand to SEQ ID NO: 1102516
ugcuucagaucccagaacc

SEQ ID NO: 1102518 - RNA, 19 nt, Artificial Sequence
  Description of Artificial Sequence: Synthetic oligonucleotide
  Sense strand starting at position 233 of SEQ ID NO: 915739
agcagucagccagaacaga

SEQ ID NO: 1102519 - RNA, 19 nt, Artificial Sequence
  Description of Artificial Sequence: Synthetic oligonucleotide
  Antisense strand to SEQ ID NO: 1102518
ucuguucuggcugacugcu

SEQ ID NO: 1102520 - RNA, 19 nt, Artificial Sequence
  Description of Artificial Sequence: Synthetic oligonucleotide
  Sense strand starting at position 365 of SEQ ID NO: 915739
ugcagcauccgacaaaguu

SEQ ID NO: 1102521 - RNA, 19 nt, Artificial Sequence
  Description of Artificial Sequence: Synthetic oligonucleotide
  Antisense strand to SEQ ID NO: 1102520
aacuuugucggaugcugca

SEQ ID NO: 1102522 - RNA, 19 nt, Artificial Sequence
  Description of Artificial Sequence: Synthetic oligonucleotide
  Sense strand starting at position 375 of SEQ ID NO: 915739
gacaaaguucuagguuaaa

SEQ ID NO: 1102523 - RNA, 19 nt, Artificial Sequence
  Description of Artificial Sequence: Synthetic oligonucleotide
  Antisense strand to SEQ ID NO: 1102522
uuuaaccuagaacuuuguc

SEQ ID NO: 1102524 - RNA, 19 nt, Artificial Sequence
  Description of Artificial Sequence: Synthetic oligonucleotide
  Sense strand starting at position 386 of SEQ ID NO: 915739
agguuaaagacuggaguga

SEQ ID NO: 1102525 - RNA, 19 nt, Artificial Sequence
  Description of Artificial Sequence: Synthetic oligonucleotide
  Antisense strand to SEQ ID NO: 1102524
ucacuccagucuuuaaccu

SEQ ID NO: 1102526 - RNA, 19 nt, Artificial Sequence
  Description of Artificial Sequence: Synthetic oligonucleotide
  Sense strand starting at position 516 of SEQ ID NO: 915739
acugcaagucuagacuuau

SEQ ID NO: 1102527 - RNA, 19 nt, Artificial Sequence
  Description of Artificial Sequence: Synthetic oligonucleotide
  Antisense strand to SEQ ID NO: 1102526
auaagucuagacuugcagu

SEQ ID NO: 1102528 - RNA, 19 nt, Artificial Sequence
  Description of Artificial Sequence: Synthetic oligonucleotide
  Sense strand starting at position 522 of SEQ ID NO: 915739
agucuagacuuauccgaag

SEQ ID NO: 1102529 - RNA, 19 nt, Artificial Sequence
  Description of Artificial Sequence: Synthetic oligonucleotide
  Antisense strand to SEQ ID NO: 1102528
cuucggauaagucuagacu

SEQ ID NO: 1102530 - RNA, 19 nt, Artificial Sequence
  Description of Artificial Sequence: Synthetic oligonucleotide
  Sense strand starting at position 763 of SEQ ID NO: 915739
ccaguugaaaccuguguau

SEQ ID NO: 1102531 - RNA, 19 nt, Artificial Sequence
  Description of Artificial Sequence: Synthetic oligonucleotide
  Antisense strand to SEQ ID NO: 1102530
auacacagguuucaacugg

SEQ ID NO: 1102532 - RNA, 19 nt, Artificial Sequence
  Description of Artificial Sequence: Synthetic oligonucleotide
  Sense strand starting at position 767 of SEQ ID NO: 915739
uugaaaccuguguauguga

SEQ ID NO: 1102533 - RNA, 19 nt, Artificial Sequence
  Description of Artificial Sequence: Synthetic oligonucleotide
  Antisense strand to SEQ ID NO: 1102532
ucacauacacagguuucaa

SEQ ID NO: 1102534 - RNA, 19 nt, Artificial Sequence
  Description of Artificial Sequence: Synthetic oligonucleotide
  Sense strand starting at position 974 of SEQ ID NO: 915739
ggaucacacucuuuccaag

SEQ ID NO: 1102535 - RNA, 19 nt, Artificial Sequence
  Description of Artificial Sequence: Synthetic oligonucleotide
  Antisense strand to SEQ ID NO: 1102534
cuuggaaagagugugaucc

SEQ ID NO: 1102536 - RNA, 19 nt, Artificial Sequence
  Description of Artificial Sequence: Synthetic oligonucleotide
  Sense strand starting at position 2293 of SEQ ID NO: 915739
gagggaauuaguugcuagu

SEQ ID NO: 1102537 - RNA, 19 nt, Artificial Sequence
  Description of Artificial Sequence: Synthetic oligonucleotide
  Antisense strand to SEQ ID NO: 1102536
acuagcaacuaauucccuc

SEQ ID NO: 1102538 - RNA, 19 nt, Artificial Sequence
  Description of Artificial Sequence: Synthetic oligonucleotide
  Sense strand starting at position 2295 of SEQ ID NO: 915739
gggaauuaguugcuaguaa

SEQ ID NO: 1102539 - RNA, 19 nt, Artificial Sequence
  Description of Artificial Sequence: Synthetic oligonucleotide
  Antisense strand to SEQ ID NO: 1102538
uuacuagcaacuaauuccc

SEQ ID NO: 1102540 - RNA, 19 nt, Artificial Sequence
  Description of Artificial Sequence: Synthetic oligonucleotide
  Sense strand starting at position 2519 of SEQ ID NO: 915739
aagucaacagauugaguuu

SEQ ID NO: 1102541 - RNA, 19 nt, Artificial Sequence
  Description of Artificial Sequence: Synthetic oligonucleotide
  Antisense strand to SEQ ID NO: 1102540
aaacucaaucuguugacuu

SEQ ID NO: 1102542 - RNA, 19 nt, Artificial Sequence
  Description of Artificial Sequence: Synthetic oligonucleotide
  Sense strand starting at position 2557 of SEQ ID NO: 915739
uuggcuucugguuagaguu

SEQ ID NO: 1102543 - RNA, 19 nt, Artificial Sequence
  Description of Artificial Sequence: Synthetic oligonucleotide
  Antisense strand to SEQ ID NO: 1102542
aacucuaaccagaagccaa

SEQ ID NO: 1102544 - RNA, 19 nt, Artificial Sequence
  Description of Artificial Sequence: Synthetic oligonucleotide
  Sense strand starting at position 2912 of SEQ ID NO: 915739
gcagaaauugggcaaugua

SEQ ID NO: 1102545 - RNA, 19 nt, Artificial Sequence
  Description of Artificial Sequence: Synthetic oligonucleotide
  Antisense strand to SEQ ID NO: 1102544
uacauugcccaauuucugc

SEQ ID NO: 1102546 - RNA, 19 nt, Artificial Sequence
  Description of Artificial Sequence: Synthetic oligonucleotide
  Sense strand starting at position 2942 of SEQ ID NO: 915739
ggcccagacuuguuaacac

SEQ ID NO: 1102547 - RNA, 19 nt, Artificial Sequence
  Description of Artificial Sequence: Synthetic oligonucleotide
  Antisense strand to SEQ ID NO: 1102546
guguuaacaagucugggcc

SEQ ID NO: 1102548 - RNA, 19 nt, Artificial Sequence
  Description of Artificial Sequence: Synthetic oligonucleotide
  Sense strand starting at position 3144 of SEQ ID NO: 915739
aucaucugcugcccagaaa

SEQ ID NO: 1102549 - RNA, 19 nt, Artificial Sequence
  Description of Artificial Sequence: Synthetic oligonucleotide
  Antisense strand to SEQ ID NO: 1102548
uuucugggcagcagaugau

SEQ ID NO: 1102550 - RNA, 19 nt, Artificial Sequence
  Description of Artificial Sequence: Synthetic oligonucleotide
  Sense strand starting at position 3274 of SEQ ID NO: 915739
cuaggagccuggucucaua

SEQ ID NO: 1102551 - RNA, 19 nt, Artificial Sequence
  Description of Artificial Sequence: Synthetic oligonucleotide
  Antisense strand to SEQ ID NO: 1102550
uaugagaccaggcuccuag

SEQ ID NO: 1102552 - RNA, 19 nt, Artificial Sequence
  Description of Artificial Sequence: Synthetic oligonucleotide
  Sense strand starting at position 3283 of SEQ ID NO: 915739
uggucucauauguguggaa

SEQ ID NO: 1102553 - RNA, 19 nt, Artificial Sequence
  Description of Artificial Sequence: Synthetic oligonucleotide
  Antisense strand to SEQ ID NO: 1102552
uuccacacauaugagacca

SEQ ID NO: 1102554 - RNA, 19 nt, Artificial Sequence
  Description of Artificial Sequence: Synthetic oligonucleotide
  Sense strand starting at position 3335 of SEQ ID NO: 915739
uuguccucuccugauuaga

SEQ ID NO: 1102555 - RNA, 19 nt, Artificial Sequence
  Description of Artificial Sequence: Synthetic oligonucleotide
  Antisense strand to SEQ ID NO: 1102554
ucuaaucaggagaggacaa

SEQ ID NO: 1102556 - RNA, 19 nt, Artificial Sequence
  Description of Artificial Sequence: Synthetic oligonucleotide
  Sense strand starting at position 3337 of SEQ ID NO: 915739
guccucuccugauuagaau

SEQ ID NO: 1102557 - RNA, 19 nt, Artificial Sequence
  Description of Artificial Sequence: Synthetic oligonucleotide
  Antisense strand to SEQ ID NO: 1102556
auucuaaucaggagaggac

SEQ ID NO: 1102558 - RNA, 19 nt, Artificial Sequence
  Description of Artificial Sequence: Synthetic oligonucleotide
  Sense strand starting at position 3372 of SEQ ID NO: 915739
aggaguccuucugugauca

SEQ ID NO: 1102559 - RNA, 19 nt, Artificial Sequence
  Description of Artificial Sequence: Synthetic oligonucleotide
  Antisense strand to SEQ ID NO: 1102558
ugaucacagaaggacuccu

SEQ ID NO: 1102560 - RNA, 19 nt, Artificial Sequence
  Description of Artificial Sequence: Synthetic oligonucleotide
  Sense strand starting at position 3373 of SEQ ID NO: 915739
ggaguccuucugugaucau

SEQ ID NO: 1102561 - RNA, 19 nt, Artificial Sequence
  Description of Artificial Sequence: Synthetic oligonucleotide
  Antisense strand to SEQ ID NO: 1102560
augaucacagaaggacucc

SEQ ID NO: 1102562 - RNA, 19 nt, Artificial Sequence
  Description of Artificial Sequence: Synthetic oligonucleotide
  Sense strand starting at position 3376 of SEQ ID NO: 915739
guccuucugugaucaucca

SEQ ID NO: 1102563 - RNA, 19 nt, Artificial Sequence
  Description of Artificial Sequence: Synthetic oligonucleotide
  Antisense strand to SEQ ID NO: 1102562
uggaugaucacagaaggac

SEQ ID NO: 1102564 - RNA, 19 nt, Artificial Sequence
  Description of Artificial Sequence: Synthetic oligonucleotide
  Sense strand starting at position 3395 of SEQ ID NO: 915739
gcucacacuccuuaucagu

SEQ ID NO: 1102565 - RNA, 19 nt, Artificial Sequence
  Description of Artificial Sequence: Synthetic oligonucleotide
  Antisense strand to SEQ ID NO: 1102564
acugauaaggagugugagc

SEQ ID NO: 1102566 - RNA, 19 nt, Artificial Sequence
  Description of Artificial Sequence: Synthetic oligonucleotide
  Sense strand starting at position 3404 of SEQ ID NO: 915739
ccuuaucagucuuugggau

SEQ ID NO: 1102567 - RNA, 19 nt, Artificial Sequence
  Description of Artificial Sequence: Synthetic oligonucleotide
  Antisense strand to SEQ ID NO: 1102566
aucccaaagacugauaagg

SEQ ID NO: 1102568 - RNA, 19 nt, Artificial Sequence
  Description of Artificial Sequence: Synthetic oligonucleotide
  Sense strand starting at position 3405 of SEQ ID NO: 915739
cuuaucagucuuugggaug

SEQ ID NO: 1102569 - RNA, 19 nt, Artificial Sequence
  Description of Artificial Sequence: Synthetic oligonucleotide
  Antisense strand to SEQ ID NO: 1102568
caucccaaagacugauaag

SEQ ID NO: 1102570 - RNA, 19 nt, Artificial Sequence
  Description of Artificial Sequence: Synthetic oligonucleotide
  Sense strand starting at position 3446 of SEQ ID NO: 915739
cagugucuuccucacuguu

SEQ ID NO: 1102571 - RNA, 19 nt, Artificial Sequence
  Description of Artificial Sequence: Synthetic oligonucleotide
  Antisense strand to SEQ ID NO: 1102570
aacagugaggaagacacug

SEQ ID NO: 1102572 - RNA, 19 nt, Artificial Sequence
  Description of Artificial Sequence: Synthetic oligonucleotide
  Sense strand starting at position 3455 of SEQ ID NO: 915739
ccucacuguugggcuuaaa

SEQ ID NO: 1102573 - RNA, 19 nt, Artificial Sequence
  Description of Artificial Sequence: Synthetic oligonucleotide
  Antisense strand to SEQ ID NO: 1102572
uuuaagcccaacagugagg

SEQ ID NO: 1102574 - RNA, 19 nt, Artificial Sequence
  Description of Artificial Sequence: Synthetic oligonucleotide
  Sense strand starting at position 3618 of SEQ ID NO: 915739
ggccaagcuuggucaggau

SEQ ID NO: 1102575 - RNA, 19 nt, Artificial Sequence
  Description of Artificial Sequence: Synthetic oligonucleotide
  Antisense strand to SEQ ID NO: 1102574
auccugaccaagcuuggcc

SEQ ID NO: 1102576 - RNA, 19 nt, Artificial Sequence
  Description of Artificial Sequence: Synthetic oligonucleotide
  Sense strand starting at position 3668 of SEQ ID NO: 915739
ggguaacuuuaggcaaguu

SEQ ID NO: 1102577 - RNA, 19 nt, Artificial Sequence
  Description of Artificial Sequence: Synthetic oligonucleotide
  Antisense strand to SEQ ID NO: 1102576
aacuugccuaaaguuaccc

SEQ ID NO: 1102578 - RNA, 19 nt, Artificial Sequence
  Description of Artificial Sequence: Synthetic oligonucleotide
  Sense strand starting at position 3669 of SEQ ID NO: 915739
gguaacuuuaggcaaguua

SEQ ID NO: 1102579 - RNA, 19 nt, Artificial Sequence
  Description of Artificial Sequence: Synthetic oligonucleotide
  Antisense strand to SEQ ID NO: 1102578
uaacuugccuaaaguuacc

SEQ ID NO: 1102580 - RNA, 19 nt, Artificial Sequence
  Description of Artificial Sequence: Synthetic oligonucleotide
  Sense strand starting at position 3707 of SEQ ID NO: 915739
agugucugcaacuguagaa

SEQ ID NO: 1102581 - RNA, 19 nt, Artificial Sequence
  Description of Artificial Sequence: Synthetic oligonucleotide
  Antisense strand to SEQ ID NO: 1102580
uucuacaguugcagacacu

SEQ ID NO: 1102582 - RNA, 19 nt, Artificial Sequence
  Description of Artificial Sequence: Synthetic oligonucleotide
  Sense strand starting at position 3747 of SEQ ID NO: 915739
caagguaauuuagguaaag

SEQ ID NO: 1102583 - RNA, 19 nt, Artificial Sequence
  Description of Artificial Sequence: Synthetic oligonucleotide
  Antisense strand to SEQ ID NO: 1102582
cuuuaccuaaauuaccuug

SEQ ID NO: 1102584 - RNA, 19 nt, Artificial Sequence
  Description of Artificial Sequence: Synthetic oligonucleotide
  Sense strand starting at position 3762 of SEQ ID NO: 915739
aaagcauuagucuggcuca

SEQ ID NO: 1102585 - RNA, 19 nt, Artificial Sequence
  Description of Artificial Sequence: Synthetic oligonucleotide
  Antisense strand to SEQ ID NO: 1102584
ugagccagacuaaugcuuu

SEQ ID NO: 1102586 - RNA, 19 nt, Artificial Sequence
  Description of Artificial Sequence: Synthetic oligonucleotide
  Sense strand starting at position 3780 of SEQ ID NO: 915739
acaggaagcuccuuugugu

SEQ ID NO: 1102587 - RNA, 19 nt, Artificial Sequence
  Description of Artificial Sequence: Synthetic oligonucleotide
  Antisense strand to SEQ ID NO: 1102586
acacaaaggagcuuccugu

SEQ ID NO: 1102588 - RNA, 19 nt, Artificial Sequence
  Description of Artificial Sequence: Synthetic oligonucleotide
  Sense strand starting at position 271 of SEQ ID NO: 915740
gaacuaucagauuggugac

SEQ ID NO: 1102589 - RNA, 19 nt, Artificial Sequence
  Description of Artificial Sequence: Synthetic oligonucleotide
  Antisense strand to SEQ ID NO: 1102588
gucaccaaucugauaguuc

SEQ ID NO: 1102590 - RNA, 19 nt, Artificial Sequence
  Description of Artificial Sequence: Synthetic oligonucleotide
  Sense strand starting at position 273 of SEQ ID NO: 915740
acuaucagauuggugacua

SEQ ID NO: 1102591 - RNA, 19 nt, Artificial Sequence
  Description of Artificial Sequence: Synthetic oligonucleotide
  Antisense strand to SEQ ID NO: 1102590
uagucaccaaucugauagu

SEQ ID NO: 1102592 - RNA, 19 nt, Artificial Sequence
  Description of Artificial Sequence: Synthetic oligonucleotide
  Sense strand starting at position 655 of SEQ ID NO: 915740
gagagaugauuuggcuaau

SEQ ID NO: 1102593 - RNA, 19 nt, Artificial Sequence
  Description of Artificial Sequence: Synthetic oligonucleotide
  Antisense strand to SEQ ID NO: 1102592
auuagccaaaucaucucuc

SEQ ID NO: 1102594 - RNA, 19 nt, Artificial Sequence
  Description of Artificial Sequence: Synthetic oligonucleotide
  Sense strand starting at position 722 of SEQ ID NO: 915740
acaagaauuguauggcagu

SEQ ID NO: 1102595 - RNA, 19 nt, Artificial Sequence
  Description of Artificial Sequence: Synthetic oligonucleotide
  Antisense strand to SEQ ID NO: 1102594
acugccauacaauucuugu

SEQ ID NO: 1102596 - RNA, 19 nt, Artificial Sequence
  Description of Artificial Sequence: Synthetic oligonucleotide
  Sense strand starting at position 765 of SEQ ID NO: 915740
ugacauuacucagugcuau

SEQ ID NO: 1102597 - RNA, 19 nt, Artificial Sequence
  Description of Artificial Sequence: Synthetic oligonucleotide
  Antisense strand to SEQ ID NO: 1102596
auagcacugaguaauguca

SEQ ID NO: 1102598 - RNA, 19 nt, Artificial Sequence
  Description of Artificial Sequence: Synthetic oligonucleotide
  Sense strand starting at position 766 of SEQ ID NO: 915740
gacauuacucagugcuaug

SEQ ID NO: 1102599 - RNA, 19 nt, Artificial Sequence
  Description of Artificial Sequence: Synthetic oligonucleotide
  Antisense strand to SEQ ID NO: 1102598
cauagcacugaguaauguc

SEQ ID NO: 1102600 - RNA, 19 nt, Artificial Sequence
  Description of Artificial Sequence: Synthetic oligonucleotide
  Sense strand starting at position 830 of SEQ ID NO: 915740
uucuguaauguggagguga

SEQ ID NO: 1102601 - RNA, 19 nt, Artificial Sequence
  Description of Artificial Sequence: Synthetic oligonucleotide
  Antisense strand to SEQ ID NO: 1102600
ucaccuccacauuacagaa

SEQ ID NO: 1102602 - RNA, 19 nt, Artificial Sequence
  Description of Artificial Sequence: Synthetic oligonucleotide
  Sense strand starting at position 832 of SEQ ID NO: 915740
cuguaauguggaggugauc

SEQ ID NO: 1102603 - RNA, 19 nt, Artificial Sequence
  Description of Artificial Sequence: Synthetic oligonucleotide
  Antisense strand to SEQ ID NO: 1102602
gaucaccuccacauuacag

SEQ ID NO: 1102604 - RNA, 19 nt, Artificial Sequence
  Description of Artificial Sequence: Synthetic oligonucleotide
  Sense strand starting at position 844 of SEQ ID NO: 915740
ggugaucauaguggcaaga

SEQ ID NO: 1102605 - RNA, 19 nt, Artificial Sequence
  Description of Artificial Sequence: Synthetic oligonucleotide
  Antisense strand to SEQ ID NO: 1102604
ucuugccacuaugaucacc

SEQ ID NO: 1102606 - RNA, 19 nt, Artificial Sequence
  Description of Artificial Sequence: Synthetic oligonucleotide
  Sense strand starting at position 1359 of SEQ ID NO: 915740
gaaucauggucagcucaag

SEQ ID NO: 1102607 - RNA, 19 nt, Artificial Sequence
  Description of Artificial Sequence: Synthetic oligonucleotide
  Antisense strand to SEQ ID NO: 1102606
cuugagcugaccaugauuc

SEQ ID NO: 1102608 - RNA, 19 nt, Artificial Sequence
  Description of Artificial Sequence: Synthetic oligonucleotide
  Sense strand starting at position 1437 of SEQ ID NO: 915740
gaauguggugauugauccu

SEQ ID NO: 1102609 - RNA, 19 nt, Artificial Sequence
  Description of Artificial Sequence: Synthetic oligonucleotide
  Antisense strand to SEQ ID NO: 1102608
aggaucaaucaccacauuc

SEQ ID NO: 1102610 - RNA, 19 nt, Artificial Sequence
  Description of Artificial Sequence: Synthetic oligonucleotide
  Sense strand starting at position 1483 of SEQ ID NO: 915740
aaagauuaucgagggcaga

SEQ ID NO: 1102611 - RNA, 19 nt, Artificial Sequence
  Description of Artificial Sequence: Synthetic oligonucleotide
  Antisense strand to SEQ ID NO: 1102610
ucugcccucgauaaucuuu

SEQ ID NO: 1102612 - RNA, 19 nt, Artificial Sequence
  Description of Artificial Sequence: Synthetic oligonucleotide
  Sense strand starting at position 1640 of SEQ ID NO: 915740
gcucuacucuuccuugaag

SEQ ID NO: 1102613 - RNA, 19 nt, Artificial Sequence
  Description of Artificial Sequence: Synthetic oligonucleotide
  Antisense strand to SEQ ID NO: 1102612
cuucaaggaagaguagagc

SEQ ID NO: 1102614 - RNA, 19 nt, Artificial Sequence
  Description of Artificial Sequence: Synthetic oligonucleotide
  Sense strand starting at position 1713 of SEQ ID NO: 915740
ugcccucacccaugaguaa

SEQ ID NO: 1102615 - RNA, 19 nt, Artificial Sequence
  Description of Artificial Sequence: Synthetic oligonucleotide
  Antisense strand to SEQ ID NO: 1102614
uuacucaugggugagggca

SEQ ID NO: 1102616 - RNA, 19 nt, Artificial Sequence
  Description of Artificial Sequence: Synthetic oligonucleotide
  Sense strand starting at position 1714 of SEQ ID NO: 915740
gcccucacccaugaguaaa

SEQ ID NO: 1102617 - RNA, 19 nt, Artificial Sequence
  Description of Artificial Sequence: Synthetic oligonucleotide
  Antisense strand to SEQ ID NO: 1102616
uuuacucaugggugagggc

SEQ ID NO: 1102618 - RNA, 19 nt, Artificial Sequence
  Description of Artificial Sequence: Synthetic oligonucleotide
  Sense strand starting at position 1869 of SEQ ID NO: 915740
guucgaguaagugaagaug

SEQ ID NO: 1102619 - RNA, 19 nt, Artificial Sequence
  Description of Artificial Sequence: Synthetic oligonucleotide
  Antisense strand to SEQ ID NO: 1102618
caucuucacuuacucgaac

SEQ ID NO: 1102620 - RNA, 19 nt, Artificial Sequence
  Description of Artificial Sequence: Synthetic oligonucleotide
  Sense strand starting at position 2137 of SEQ ID NO: 915740
gcacccaugacuggugaua

SEQ ID NO: 1102621 - RNA, 19 nt, Artificial Sequence
  Description of Artificial Sequence: Synthetic oligonucleotide
  Antisense strand to SEQ ID NO: 1102620
uaucaccagucaugggugc

SEQ ID NO: 1102622 - RNA, 19 nt, Artificial Sequence
  Description of Artificial Sequence: Synthetic oligonucleotide
  Sense strand starting at position 2260 of SEQ ID NO: 915740
uggagauaguuucucauga

SEQ ID NO: 1102623 - RNA, 19 nt, Artificial Sequence
  Description of Artificial Sequence: Synthetic oligonucleotide
  Antisense strand to SEQ ID NO: 1102622
ucaugagaaacuaucucca

SEQ ID NO: 1102624 - RNA, 19 nt, Artificial Sequence
  Description of Artificial Sequence: Synthetic oligonucleotide
  Sense strand starting at position 2261 of SEQ ID NO: 915740
ggagauaguuucucaugaa

SEQ ID NO: 1102625 - RNA, 19 nt, Artificial Sequence
  Description of Artificial Sequence: Synthetic oligonucleotide
  Antisense strand to SEQ ID NO: 1102624
uucaugagaaacuaucucc

SEQ ID NO: 1102626 - RNA, 19 nt, Artificial Sequence
  Description of Artificial Sequence: Synthetic oligonucleotide
  Sense strand starting at position 2311 of SEQ ID NO: 915740
caugauagugagugagaua

SEQ ID NO: 1102627 - RNA, 19 nt, Artificial Sequence
  Description of Artificial Sequence: Synthetic oligonucleotide
  Antisense strand to SEQ ID NO: 1102626
uaucucacucacuaucaug

SEQ ID NO: 1102628 - RNA, 19 nt, Artificial Sequence
  Description of Artificial Sequence: Synthetic oligonucleotide
  Sense strand starting at position 2322 of SEQ ID NO: 915740
gugagauaccgugagaucu

SEQ ID NO: 1102629 - RNA, 19 nt, Artificial Sequence
  Description of Artificial Sequence: Synthetic oligonucleotide
  Antisense strand to SEQ ID NO: 1102628
agaucucacgguaucucac

SEQ ID NO: 1102630 - RNA, 19 nt, Artificial Sequence
  Description of Artificial Sequence: Synthetic oligonucleotide
  Sense strand starting at position 2685 of SEQ ID NO: 915740
ccuauauauccaugugaug

SEQ ID NO: 1102631 - RNA, 19 nt, Artificial Sequence
  Description of Artificial Sequence: Synthetic oligonucleotide
  Antisense strand to SEQ ID NO: 1102630
caucacauggauauauagg

SEQ ID NO: 1102632 - RNA, 19 nt, Artificial Sequence
  Description of Artificial Sequence: Synthetic oligonucleotide
  Sense strand starting at position 2744 of SEQ ID NO: 915740
ugcuuccagcuagaauauu

SEQ ID NO: 1102633 - RNA, 19 nt, Artificial Sequence
  Description of Artificial Sequence: Synthetic oligonucleotide
  Antisense strand to SEQ ID NO: 1102632
aauauucuagcuggaagca

SEQ ID NO: 1102634 - RNA, 19 nt, Artificial Sequence
  Description of Artificial Sequence: Synthetic oligonucleotide
  Sense strand starting at position 2895 of SEQ ID NO: 915740
aucugcuauccaugaagag

SEQ ID NO: 1102635 - RNA, 19 nt, Artificial Sequence
  Description of Artificial Sequence: Synthetic oligonucleotide
  Antisense strand to SEQ ID NO: 1102634
cucuucauggauagcagau

SEQ ID NO: 1102636 - RNA, 19 nt, Artificial Sequence
  Description of Artificial Sequence: Synthetic oligonucleotide
  Sense strand starting at position 2929 of SEQ ID NO: 915740
gaaagucuccggugguaaa

SEQ ID NO: 1102637 - RNA, 19 nt, Artificial Sequence
  Description of Artificial Sequence: Synthetic oligonucleotide
  Antisense strand to SEQ ID NO: 1102636
uuuaccaccggagacuuuc

SEQ ID NO: 1102638 - RNA, 19 nt, Artificial Sequence
  Description of Artificial Sequence: Synthetic oligonucleotide
  Sense strand starting at position 3104 of SEQ ID NO: 915740
aagagauuggcucagucac

SEQ ID NO: 1102639 - RNA, 19 nt, Artificial Sequence
  Description of Artificial Sequence: Synthetic oligonucleotide
  Antisense strand to SEQ ID NO: 1102638
gugacugagccaaucucuu

SEQ ID NO: 1102640 - RNA, 19 nt, Artificial Sequence
  Description of Artificial Sequence: Synthetic oligonucleotide
  Sense strand starting at position 3106 of SEQ ID NO: 915740
gagauuggcucagucacau

SEQ ID NO: 1102641 - RNA, 19 nt, Artificial Sequence
  Description of Artificial Sequence: Synthetic oligonucleotide
  Antisense strand to SEQ ID NO: 1102640
augugacugagccaaucuc

SEQ ID NO: 1102642 - RNA, 19 nt, Artificial Sequence
  Description of Artificial Sequence: Synthetic oligonucleotide
  Sense strand starting at position 3121 of SEQ ID NO: 915740
acaugcacagcugagaaau

SEQ ID NO: 1102643 - RNA, 19 nt, Artificial Sequence
  Description of Artificial Sequence: Synthetic oligonucleotide
  Antisense strand to SEQ ID NO: 1102642
auuucucagcugugcaugu

SEQ ID NO: 1102644 - RNA, 19 nt, Artificial Sequence
  Description of Artificial Sequence: Synthetic oligonucleotide
  Sense strand starting at position 3240 of SEQ ID NO: 915740
uggaaacccugaucaaguu

SEQ ID NO: 1102645 - RNA, 19 nt, Artificial Sequence
  Description of Artificial Sequence: Synthetic oligonucleotide
  Antisense strand to SEQ ID NO: 1102644
aacuugaucaggguuucca

SEQ ID NO: 1102646 - RNA, 19 nt, Artificial Sequence
  Description of Artificial Sequence: Synthetic oligonucleotide
  Sense strand starting at position 3261 of SEQ ID NO: 915740
aggucucucgaaugauaau

SEQ ID NO: 1102647 - RNA, 19 nt, Artificial Sequence
  Description of Artificial Sequence: Synthetic oligonucleotide
  Antisense strand to SEQ ID NO: 1102646
auuaucauucgagagaccu

SEQ ID NO: 1102648 - RNA, 19 nt, Artificial Sequence
  Description of Artificial Sequence: Synthetic oligonucleotide
  Sense strand starting at position 3262 of SEQ ID NO: 915740
ggucucucgaaugauaaug

SEQ ID NO: 1102649 - RNA, 19 nt, Artificial Sequence
  Description of Artificial Sequence: Synthetic oligonucleotide
  Antisense strand to SEQ ID NO: 1102648
cauuaucauucgagagacc

SEQ ID NO: 1102650 - RNA, 19 nt, Artificial Sequence
  Description of Artificial Sequence: Synthetic oligonucleotide
  Sense strand starting at position 3312 of SEQ ID NO: 915740
gagaaagugucaccacuuc

SEQ ID NO: 1102651 - RNA, 19 nt, Artificial Sequence
  Description of Artificial Sequence: Synthetic oligonucleotide
  Antisense strand to SEQ ID NO: 1102650
gaaguggugacacuuucuc

SEQ ID NO: 1102652 - RNA, 19 nt, Artificial Sequence
  Description of Artificial Sequence: Synthetic oligonucleotide
  Sense strand starting at position 3344 of SEQ ID NO: 915740
gugagcucagaggaguuaa

SEQ ID NO: 1102653 - RNA, 19 nt, Artificial Sequence
  Description of Artificial Sequence: Synthetic oligonucleotide
  Antisense strand to SEQ ID NO: 1102652
uuaacuccucugagcucac

SEQ ID NO: 1102654 - RNA, 19 nt, Artificial Sequence
  Description of Artificial Sequence: Synthetic oligonucleotide
  Sense strand starting at position 3375 of SEQ ID NO: 915740
agguuacaccacugaaaug

SEQ ID NO: 1102655 - RNA, 19 nt, Artificial Sequence
  Description of Artificial Sequence: Synthetic oligonucleotide
  Antisense strand to SEQ ID NO: 1102654
cauuucagugguguaaccu

SEQ ID NO: 1102656 - RNA, 19 nt, Artificial Sequence
  Description of Artificial Sequence: Synthetic oligonucleotide
  Sense strand starting at position 3411 of SEQ ID NO: 915740
gaacuuuggcugugggaag

SEQ ID NO: 1102657 - RNA, 19 nt, Artificial Sequence
  Description of Artificial Sequence: Synthetic oligonucleotide
  Antisense strand to SEQ ID NO: 1102656
cuucccacagccaaaguuc

SEQ ID NO: 1102658 - RNA, 19 nt, Artificial Sequence
  Description of Artificial Sequence: Synthetic oligonucleotide
  Sense strand starting at position 3535 of SEQ ID NO: 915740
ugaugaguucgaggucuac

SEQ ID NO: 1102659 - RNA, 19 nt, Artificial Sequence
  Description of Artificial Sequence: Synthetic oligonucleotide
  Antisense strand to SEQ ID NO: 1102658
guagaccucgaacucauca

SEQ ID NO: 1102660 - RNA, 19 nt, Artificial Sequence
  Description of Artificial Sequence: Synthetic oligonucleotide
  Sense strand starting at position 3626 of SEQ ID NO: 915740
uagggauuggcuggaggau

SEQ ID NO: 1102661 - RNA, 19 nt, Artificial Sequence
  Description of Artificial Sequence: Synthetic oligonucleotide
  Antisense strand to SEQ ID NO: 1102660
auccuccagccaaucccua

SEQ ID NO: 1102662 - RNA, 19 nt, Artificial Sequence
  Description of Artificial Sequence: Synthetic oligonucleotide
  Sense strand starting at position 3824 of SEQ ID NO: 915740
uagguaugaccuugggcaa

SEQ ID NO: 1102663 - RNA, 19 nt, Artificial Sequence
  Description of Artificial Sequence: Synthetic oligonucleotide
  Antisense strand to SEQ ID NO: 1102662
uugcccaaggucauaccua

SEQ ID NO: 1102664 - RNA, 19 nt, Artificial Sequence
  Description of Artificial Sequence: Synthetic oligonucleotide
  Sense strand starting at position 3904 of SEQ ID NO: 915740
agccauccuguuuaacaga

SEQ ID NO: 1102665 - RNA, 19 nt, Artificial Sequence
  Description of Artificial Sequence: Synthetic oligonucleotide
  Antisense strand to SEQ ID NO: 1102664
ucuguuaaacaggauggcu

SEQ ID NO: 1102666 - RNA, 19 nt, Artificial Sequence
  Description of Artificial Sequence: Synthetic oligonucleotide
  Sense strand starting at position 3976 of SEQ ID NO: 915740
aucaaauacguguaugcau

SEQ ID NO: 1102667 - RNA, 19 nt, Artificial Sequence
  Description of Artificial Sequence: Synthetic oligonucleotide
  Antisense strand to SEQ ID NO: 1102666
augcauacacguauuugau

SEQ ID NO: 1102668 - RNA, 19 nt, Artificial Sequence
  Description of Artificial Sequence: Synthetic oligonucleotide
  Sense strand starting at position 205 of SEQ ID NO: 915741
gcuguaaucuuaucagucu

SEQ ID NO: 1102669 - RNA, 19 nt, Artificial Sequence
  Description of Artificial Sequence: Synthetic oligonucleotide
  Antisense strand to SEQ ID NO: 1102668
agacugauaagauuacagc

SEQ ID NO: 1102670 - RNA, 19 nt, Artificial Sequence
  Description of Artificial Sequence: Synthetic oligonucleotide
  Sense strand starting at position 208 of SEQ ID NO: 915741
guaaucuuaucagucugga

SEQ ID NO: 1102671 - RNA, 19 nt, Artificial Sequence
  Description of Artificial Sequence: Synthetic oligonucleotide
  Antisense strand to SEQ ID NO: 1102670
uccagacugauaagauuac

SEQ ID NO: 1102672 - RNA, 19 nt, Artificial Sequence
  Description of Artificial Sequence: Synthetic oligonucleotide
  Sense strand starting at position 256 of SEQ ID NO: 915741
ccauguccuagugacaagu

SEQ ID NO: 1102673 - RNA, 19 nt, Artificial Sequence
  Description of Artificial Sequence: Synthetic oligonucleotide
  Antisense strand to SEQ ID NO: 1102672
acuugucacuaggacaugg

SEQ ID NO: 1102674 - RNA, 19 nt, Artificial Sequence
  Description of Artificial Sequence: Synthetic oligonucleotide
  Sense strand starting at position 290 of SEQ ID NO: 915741
guaaucuuaucaguccgga

SEQ ID NO: 1102675 - RNA, 19 nt, Artificial Sequence
  Description of Artificial Sequence: Synthetic oligonucleotide
  Antisense strand to SEQ ID NO: 1102674
uccggacugauaagauuac

SEQ ID NO: 1102676 - RNA, 19 nt, Artificial Sequence
  Description of Artificial Sequence: Synthetic oligonucleotide
  Sense strand starting at position 458 of SEQ ID NO: 915741
ugagcuccugccugagagu

SEQ ID NO: 1102677 - RNA, 19 nt, Artificial Sequence
  Description of Artificial Sequence: Synthetic oligonucleotide
  Antisense strand to SEQ ID NO: 1102676
acucucaggcaggagcuca

SEQ ID NO: 1102678 - RNA, 19 nt, Artificial Sequence
  Description of Artificial Sequence: Synthetic oligonucleotide
  Sense strand starting at position 571 of SEQ ID NO: 915741
cucucuggauguuggauaa

SEQ ID NO: 1102679 - RNA, 19 nt, Artificial Sequence
  Description of Artificial Sequence: Synthetic oligonucleotide
  Antisense strand to SEQ ID NO: 1102678
uuauccaacauccagagag

SEQ ID NO: 1102680 - RNA, 19 nt, Artificial Sequence
  Description of Artificial Sequence: Synthetic oligonucleotide
  Sense strand starting at position 582 of SEQ ID NO: 915741
uuggauaagucgcugcuga

SEQ ID NO: 1102681 - RNA, 19 nt, Artificial Sequence
  Description of Artificial Sequence: Synthetic oligonucleotide
  Antisense strand to SEQ ID NO: 1102680
ucagcagcgacuuauccaa

SEQ ID NO: 1102682 - RNA, 19 nt, Artificial Sequence
  Description of Artificial Sequence: Synthetic oligonucleotide
  Sense strand starting at position 1306 of SEQ ID NO: 915741
gguguuuccguggaguggu

SEQ ID NO: 1102683 - RNA, 19 nt, Artificial Sequence
  Description of Artificial Sequence: Synthetic oligonucleotide
  Antisense strand to SEQ ID NO: 1102682
accacuccacggaaacacc

SEQ ID NO: 1102684 - RNA, 19 nt, Artificial Sequence
  Description of Artificial Sequence: Synthetic oligonucleotide
  Sense strand starting at position 1424 of SEQ ID NO: 915741
cucugaucauugugucuac

SEQ ID NO: 1102685 - RNA, 19 nt, Artificial Sequence
  Description of Artificial Sequence: Synthetic oligonucleotide
  Antisense strand to SEQ ID NO: 1102684
guagacacaaugaucagag

SEQ ID NO: 1102686 - RNA, 19 nt, Artificial Sequence
  Description of Artificial Sequence: Synthetic oligonucleotide
  Sense strand starting at position 1427 of SEQ ID NO: 915741
ugaucauugugucuacgga

SEQ ID NO: 1102687 - RNA, 19 nt, Artificial Sequence
  Description of Artificial Sequence: Synthetic oligonucleotide
  Antisense strand to SEQ ID NO: 1102686
uccguagacacaaugauca

SEQ ID NO: 1102688 - RNA, 19 nt, Artificial Sequence
  Description of Artificial Sequence: Synthetic oligonucleotide
  Sense strand starting at position 1711 of SEQ ID NO: 915741
gagggauaaucccugugcu

SEQ ID NO: 1102689 - RNA, 19 nt, Artificial Sequence
  Description of Artificial Sequence: Synthetic oligonucleotide
  Antisense strand to SEQ ID NO: 1102688
agcacagggauuaucccuc

SEQ ID NO: 1102690 - RNA, 19 nt, Artificial Sequence
  Description of Artificial Sequence: Synthetic oligonucleotide
  Sense strand starting at position 1712 of SEQ ID NO: 915741
agggauaaucccugugcug

SEQ ID NO: 1102691 - RNA, 19 nt, Artificial Sequence
  Description of Artificial Sequence: Synthetic oligonucleotide
  Antisense strand to SEQ ID NO: 1102690
cagcacagggauuaucccu

SEQ ID NO: 1102692 - RNA, 19 nt, Artificial Sequence
  Description of Artificial Sequence: Synthetic oligonucleotide
  Sense strand starting at position 1714 of SEQ ID NO: 915741
ggauaaucccugugcugag

SEQ ID NO: 1102693 - RNA, 19 nt, Artificial Sequence
  Description of Artificial Sequence: Synthetic oligonucleotide
  Antisense strand to SEQ ID NO: 1102692
cucagcacagggauuaucc

SEQ ID NO: 1102694 - RNA, 19 nt, Artificial Sequence
  Description of Artificial Sequence: Synthetic oligonucleotide
  Sense strand starting at position 1790 of SEQ ID NO: 915741
gccuguuaccaagauaaag

SEQ ID NO: 1102695 - RNA, 19 nt, Artificial Sequence
  Description of Artificial Sequence: Synthetic oligonucleotide
  Antisense strand to SEQ ID NO: 1102694
cuuuaucuugguaacaggc

SEQ ID NO: 1102696 - RNA, 19 nt, Artificial Sequence
  Description of Artificial Sequence: Synthetic oligonucleotide
  Sense strand starting at position 2116 of SEQ ID NO: 915741
ggcauuugcugacaucuga

SEQ ID NO: 1102697 - RNA, 19 nt, Artificial Sequence
  Description of Artificial Sequence: Synthetic oligonucleotide
  Antisense strand to SEQ ID NO: 1102696
ucagaugucagcaaaugcc

SEQ ID NO: 1102698 - RNA, 19 nt, Artificial Sequence
  Description of Artificial Sequence: Synthetic oligonucleotide
  Sense strand starting at position 2148 of SEQ ID NO: 915741
aagacauggccucguucuu

SEQ ID NO: 1102699 - RNA, 19 nt, Artificial Sequence
  Description of Artificial Sequence: Synthetic oligonucleotide
  Antisense strand to SEQ ID NO: 1102698
aagaacgaggccaugucuu

SEQ ID NO: 1102700 - RNA, 19 nt, Artificial Sequence
  Description of Artificial Sequence: Synthetic oligonucleotide
  Sense strand starting at position 2305 of SEQ ID NO: 915741
gggcguaauccuuggagga

SEQ ID NO: 1102701 - RNA, 19 nt, Artificial Sequence
  Description of Artificial Sequence: Synthetic oligonucleotide
  Antisense strand to SEQ ID NO: 1102700
uccuccaaggauuacgccc

SEQ ID NO: 1102702 - RNA, 19 nt, Artificial Sequence
  Description of Artificial Sequence: Synthetic oligonucleotide
  Sense strand starting at position 2306 of SEQ ID NO: 915741
ggcguaauccuuggaggaa

SEQ ID NO: 1102703 - RNA, 19 nt, Artificial Sequence
  Description of Artificial Sequence: Synthetic oligonucleotide
  Antisense strand to SEQ ID NO: 1102702
uuccuccaaggauuacgcc

SEQ ID NO: 1102704 - RNA, 19 nt, Artificial Sequence
  Description of Artificial Sequence: Synthetic oligonucleotide
  Sense strand starting at position 2307 of SEQ ID NO: 915741
gcguaauccuuggaggaau

SEQ ID NO: 1102705 - RNA, 19 nt, Artificial Sequence
  Description of Artificial Sequence: Synthetic oligonucleotide
  Antisense strand to SEQ ID NO: 1102704
auuccuccaaggauuacgc

SEQ ID NO: 1102706 - RNA, 19 nt, Artificial Sequence
  Description of Artificial Sequence: Synthetic oligonucleotide
  Sense strand starting at position 2335 of SEQ ID NO: 915741
gucuccuuggaacaucauu

SEQ ID NO: 1102707 - RNA, 19 nt, Artificial Sequence
  Description of Artificial Sequence: Synthetic oligonucleotide
  Antisense strand to SEQ ID NO: 1102706
aaugauguuccaaggagac

SEQ ID NO: 1102708 - RNA, 19 nt, Artificial Sequence
  Description of Artificial Sequence: Synthetic oligonucleotide
  Sense strand starting at position 2343 of SEQ ID NO: 915741
ggaacaucauuauugaggu

SEQ ID NO: 1102709 - RNA, 19 nt, Artificial Sequence
  Description of Artificial Sequence: Synthetic oligonucleotide
  Antisense strand to SEQ ID NO: 1102708
accucaauaaugauguucc

SEQ ID NO: 1102710 - RNA, 19 nt, Artificial Sequence
  Description of Artificial Sequence: Synthetic oligonucleotide
  Sense strand starting at position 2381 of SEQ ID NO: 915741
ugaaauguccugugacagc

SEQ ID NO: 1102711 - RNA, 19 nt, Artificial Sequence
  Description of Artificial Sequence: Synthetic oligonucleotide
  Antisense strand to SEQ ID NO: 1102710
gcugucacaggacauuuca

SEQ ID NO: 1102712 - RNA, 19 nt, Artificial Sequence
  Description of Artificial Sequence: Synthetic oligonucleotide
  Sense strand starting at position 2407 of SEQ ID NO: 915741
uugagaaggucguugguuu

SEQ ID NO: 1102713 - RNA, 19 nt, Artificial Sequence
  Description of Artificial Sequence: Synthetic oligonucleotide
  Antisense strand to SEQ ID NO: 1102712
aaaccaacgaccuucucaa

SEQ ID NO: 1102714 - RNA, 19 nt, Artificial Sequence
  Description of Artificial Sequence: Synthetic oligonucleotide
  Sense strand starting at position 2439 of SEQ ID NO: 915741
ggcggcacucauggauauu

SEQ ID NO: 1102715 - RNA, 19 nt, Artificial Sequence
  Description of Artificial Sequence: Synthetic oligonucleotide
  Antisense strand to SEQ ID NO: 1102714
aauauccaugagugccgcc

SEQ ID NO: 1102716 - RNA, 19 nt, Artificial Sequence
  Description of Artificial Sequence: Synthetic oligonucleotide
  Sense strand starting at position 2559 of SEQ ID NO: 915741
uacaccgagccguguaauu

SEQ ID NO: 1102717 - RNA, 19 nt, Artificial Sequence
  Description of Artificial Sequence: Synthetic oligonucleotide
  Antisense strand to SEQ ID NO: 1102716
aauuacacggcucggugua

SEQ ID NO: 1102718 - RNA, 19 nt, Artificial Sequence
  Description of Artificial Sequence: Synthetic oligonucleotide
  Sense strand starting at position 2561 of SEQ ID NO: 915741
caccgagccguguaauuac

SEQ ID NO: 1102719 - RNA, 19 nt, Artificial Sequence
  Description of Artificial Sequence: Synthetic oligonucleotide
  Antisense strand to SEQ ID NO: 1102718
guaauuacacggcucggug

SEQ ID NO: 1102720 - RNA, 19 nt, Artificial Sequence
  Description of Artificial Sequence: Synthetic oligonucleotide
  Sense strand starting at position 2564 of SEQ ID NO: 915741
cgagccguguaauuacgua

SEQ ID NO: 1102721 - RNA, 19 nt, Artificial Sequence
  Description of Artificial Sequence: Synthetic oligonucleotide
  Antisense strand to SEQ ID NO: 1102720
uacguaauuacacggcucg

SEQ ID NO: 1102722 - RNA, 19 nt, Artificial Sequence
  Description of Artificial Sequence: Synthetic oligonucleotide
  Sense strand starting at position 2569 of SEQ ID NO: 915741
cguguaauuacguaugggu

SEQ ID NO: 1102723 - RNA, 19 nt, Artificial Sequence
  Description of Artificial Sequence: Synthetic oligonucleotide
  Antisense strand to SEQ ID NO: 1102722
acccauacguaauuacacg

SEQ ID NO: 1102724 - RNA, 19 nt, Artificial Sequence
  Description of Artificial Sequence: Synthetic oligonucleotide
  Sense strand starting at position 2749 of SEQ ID NO: 915741
uggaauugcuccuccugca

SEQ ID NO: 1102725 - RNA, 19 nt, Artificial Sequence
  Description of Artificial Sequence: Synthetic oligonucleotide
  Antisense strand to SEQ ID NO: 1102724
ugcaggaggagcaauucca

SEQ ID NO: 1102726 - RNA, 19 nt, Artificial Sequence
  Description of Artificial Sequence: Synthetic oligonucleotide
  Sense strand starting at position 3192 of SEQ ID NO: 915741
ccguccucuccagggaaga

SEQ ID NO: 1102727 - RNA, 19 nt, Artificial Sequence
  Description of Artificial Sequence: Synthetic oligonucleotide
  Antisense strand to SEQ ID NO: 1102726
ucuucccuggagaggacgg

SEQ ID NO: 1102728 - RNA, 19 nt, Artificial Sequence
  Description of Artificial Sequence: Synthetic oligonucleotide
  Sense strand starting at position 3193 of SEQ ID NO: 915741
cguccucuccagggaagau

SEQ ID NO: 1102729 - RNA, 19 nt, Artificial Sequence
  Description of Artificial Sequence: Synthetic oligonucleotide
  Antisense strand to SEQ ID NO: 1102728
aucuucccuggagaggacg

SEQ ID NO: 1102730 - RNA, 19 nt, Artificial Sequence
  Description of Artificial Sequence: Synthetic oligonucleotide
  Sense strand starting at position 3605 of SEQ ID NO: 915741
gaggaaguggcuuguugag

SEQ ID NO: 1102731 - RNA, 19 nt, Artificial Sequence
  Description of Artificial Sequence: Synthetic oligonucleotide
  Antisense strand to SEQ ID NO: 1102730
cucaacaagccacuuccuc

SEQ ID NO: 1102732 - RNA, 19 nt, Artificial Sequence
  Description of Artificial Sequence: Synthetic oligonucleotide
  Sense strand starting at position 333 of SEQ ID NO: 915742
aggccuucccuguaauccu

SEQ ID NO: 1102733 - RNA, 19 nt, Artificial Sequence
  Description of Artificial Sequence: Synthetic oligonucleotide
  Antisense strand to SEQ ID NO: 1102732
aggauuacagggaaggccu

SEQ ID NO: 1102734 - RNA, 19 nt, Artificial Sequence
  Description of Artificial Sequence: Synthetic oligonucleotide
  Sense strand starting at position 355 of SEQ ID NO: 915742
cugcacuguuggguauuua

SEQ ID NO: 1102735 - RNA, 19 nt, Artificial Sequence
  Description of Artificial Sequence: Synthetic oligonucleotide
  Antisense strand to SEQ ID NO: 1102734
uaaauacccaacagugcag

SEQ ID NO: 1102736 - RNA, 19 nt, Artificial Sequence
  Description of Artificial Sequence: Synthetic oligonucleotide
  Sense strand starting at position 367 of SEQ ID NO: 915742
guauuuaucugcugggagu

SEQ ID NO: 1102737 - RNA, 19 nt, Artificial Sequence
  Description of Artificial Sequence: Synthetic oligonucleotide
  Antisense strand to SEQ ID NO: 1102736
acucccagcagauaaauac

SEQ ID NO: 1102738 - RNA, 19 nt, Artificial Sequence
  Description of Artificial Sequence: Synthetic oligonucleotide
  Sense strand starting at position 1147 of SEQ ID NO: 915742
gccuguuuccagggcaaca

SEQ ID NO: 1102739 - RNA, 19 nt, Artificial Sequence
  Description of Artificial Sequence: Synthetic oligonucleotide
  Antisense strand to SEQ ID NO: 1102738
uguugcccuggaaacaggc

SEQ ID NO: 1102740 - RNA, 19 nt, Artificial Sequence
  Description of Artificial Sequence: Synthetic oligonucleotide
  Sense strand starting at position 1216 of SEQ ID NO: 915742
gguccuuugcccugaagug

SEQ ID NO: 1102741 - RNA, 19 nt, Artificial Sequence
  Description of Artificial Sequence: Synthetic oligonucleotide
  Antisense strand to SEQ ID NO: 1102740
cacuucagggcaaaggacc

SEQ ID NO: 1102742 - RNA, 19 nt, Artificial Sequence
  Description of Artificial Sequence: Synthetic oligonucleotide
  Sense strand starting at position 1217 of SEQ ID NO: 915742
guccuuugcccugaaguga

SEQ ID NO: 1102743 - RNA, 19 nt, Artificial Sequence
  Description of Artificial Sequence: Synthetic oligonucleotide
  Antisense strand to SEQ ID NO: 1102742
ucacuucagggcaaaggac

SEQ ID NO: 1102744 - RNA, 19 nt, Artificial Sequence
  Description of Artificial Sequence: Synthetic oligonucleotide
  Sense strand starting at position 1231 of SEQ ID NO: 915742
agugaucccuccucuagca

SEQ ID NO: 1102745 - RNA, 19 nt, Artificial Sequence
  Description of Artificial Sequence: Synthetic oligonucleotide
  Antisense strand to SEQ ID NO: 1102744
ugcuagaggagggaucacu

SEQ ID NO: 1102746 - RNA, 19 nt, Artificial Sequence
  Description of Artificial Sequence: Synthetic oligonucleotide
  Sense strand starting at position 1690 of SEQ ID NO: 915742
ucggaauuccaagaauguc

SEQ ID NO: 1102747 - RNA, 19 nt, Artificial Sequence
  Description of Artificial Sequence: Synthetic oligonucleotide
  Antisense strand to SEQ ID NO: 1102746
gacauucuuggaauuccga

SEQ ID NO: 1102748 - RNA, 19 nt, Artificial Sequence
  Description of Artificial Sequence: Synthetic oligonucleotide
  Sense strand starting at position 1756 of SEQ ID NO: 915742
ccuugcucugaguaaacaa

SEQ ID NO: 1102749 - RNA, 19 nt, Artificial Sequence
  Description of Artificial Sequence: Synthetic oligonucleotide
  Antisense strand to SEQ ID NO: 1102748
uuguuuacucagagcaagg

SEQ ID NO: 1102750 - RNA, 19 nt, Artificial Sequence
  Description of Artificial Sequence: Synthetic oligonucleotide
  Sense strand starting at position 2213 of SEQ ID NO: 915742
gcagcauugcccugagaaa

SEQ ID NO: 1102751 - RNA, 19 nt, Artificial Sequence
  Description of Artificial Sequence: Synthetic oligonucleotide
  Antisense strand to SEQ ID NO: 1102750
uuucucagggcaaugcugc

SEQ ID NO: 1102752 - RNA, 19 nt, Artificial Sequence
  Description of Artificial Sequence: Synthetic oligonucleotide
  Sense strand starting at position 2214 of SEQ ID NO: 915742
cagcauugcccugagaaag

SEQ ID NO: 1102753 - RNA, 19 nt, Artificial Sequence
  Description of Artificial Sequence: Synthetic oligonucleotide
  Antisense strand to SEQ ID NO: 1102752
cuuucucagggcaaugcug

SEQ ID NO: 1102754 - RNA, 19 nt, Artificial Sequence
  Description of Artificial Sequence: Synthetic oligonucleotide
  Sense strand starting at position 3473 of SEQ ID NO: 915742
agccgauucucccgcaaca

SEQ ID NO: 1102755 - RNA, 19 nt, Artificial Sequence
  Description of Artificial Sequence: Synthetic oligonucleotide
  Antisense strand to SEQ ID NO: 1102754
uguugcgggagaaucggcu

SEQ ID NO: 1102756 - RNA, 19 nt, Artificial Sequence
  Description of Artificial Sequence: Synthetic oligonucleotide
  Sense strand starting at position 3602 of SEQ ID NO: 915742
guggcaagaucgucggcaa

SEQ ID NO: 1102757 - RNA, 19 nt, Artificial Sequence
  Description of Artificial Sequence: Synthetic oligonucleotide
  Antisense strand to SEQ ID NO: 1102756
uugccgacgaucuugccac

SEQ ID NO: 1102758 - RNA, 19 nt, Artificial Sequence
  Description of Artificial Sequence: Synthetic oligonucleotide
  Sense strand starting at position 3605 of SEQ ID NO: 915742
gcaagaucgucggcaacaa

SEQ ID NO: 1102759 - RNA, 19 nt, Artificial Sequence
  Description of Artificial Sequence: Synthetic oligonucleotide
  Antisense strand to SEQ ID NO: 1102758
uuguugccgacgaucuugc

SEQ ID NO: 1102760 - RNA, 19 nt, Artificial Sequence
  Description of Artificial Sequence: Synthetic oligonucleotide
  Sense strand starting at position 3831 of SEQ ID NO: 915742
gugaucugcuuucgggaga

SEQ ID NO: 1102761 - RNA, 19 nt, Artificial Sequence
  Description of Artificial Sequence: Synthetic oligonucleotide
  Antisense strand to SEQ ID NO: 1102760
ucucccgaaagcagaucac

SEQ ID NO: 1102762 - RNA, 19 nt, Artificial Sequence
  Description of Artificial Sequence: Synthetic oligonucleotide
  Sense strand starting at position 3832 of SEQ ID NO: 915742
ugaucugcuuucgggagaa

SEQ ID NO: 1102763 - RNA, 19 nt, Artificial Sequence
  Description of Artificial Sequence: Synthetic oligonucleotide
  Antisense strand to SEQ ID NO: 1102762
uucucccgaaagcagauca

SEQ ID NO: 1102764 - RNA, 19 nt, Artificial Sequence
  Description of Artificial Sequence: Synthetic oligonucleotide
  Sense strand starting at position 3836 of SEQ ID NO: 915742
cugcuuucgggagaaccuu

SEQ ID NO: 1102765 - RNA, 19 nt, Artificial Sequence
  Description of Artificial Sequence: Synthetic oligonucleotide
  Antisense strand to SEQ ID NO: 1102764
aagguucucccgaaagcag

SEQ ID NO: 1102766 - RNA, 19 nt, Artificial Sequence
  Description of Artificial Sequence: Synthetic oligonucleotide
  Sense strand starting at position 3881 of SEQ ID NO: 915742
ggaguugggcuucaaacca

SEQ ID NO: 1102767 - RNA, 19 nt, Artificial Sequence
  Description of Artificial Sequence: Synthetic oligonucleotide
  Antisense strand to SEQ ID NO: 1102766
ugguuugaagcccaacucc

SEQ ID NO: 1102768 - RNA, 19 nt, Artificial Sequence
  Description of Artificial Sequence: Synthetic oligonucleotide
  Sense strand starting at position 3941 of SEQ ID NO: 915742
cgucuugucacccgcagua

SEQ ID NO: 1102769 - RNA, 19 nt, Artificial Sequence
  Description of Artificial Sequence: Synthetic oligonucleotide
  Antisense strand to SEQ ID NO: 1102768
uacugcgggugacaagacg

SEQ ID NO: 1102770 - RNA, 19 nt, Artificial Sequence
  Description of Artificial Sequence: Synthetic oligonucleotide
  Sense strand starting at position 3943 of SEQ ID NO: 915742
ucuugucacccgcaguaaa

SEQ ID NO: 1102771 - RNA, 19 nt, Artificial Sequence
  Description of Artificial Sequence: Synthetic oligonucleotide
  Antisense strand to SEQ ID NO: 1102770
uuuacugcgggugacaaga

SEQ ID NO: 1102772 - RNA, 19 nt, Artificial Sequence
  Description of Artificial Sequence: Synthetic oligonucleotide
  Sense strand starting at position 7 of SEQ ID NO: 915743
gccuguuuccagggcaaca

SEQ ID NO: 1102773 - RNA, 19 nt, Artificial Sequence
  Description of Artificial Sequence: Synthetic oligonucleotide
  Antisense strand to SEQ ID NO: 1102772
uguugcccuggaaacaggc

SEQ ID NO: 1102774 - RNA, 19 nt, Artificial Sequence
  Description of Artificial Sequence: Synthetic oligonucleotide
  Sense strand starting at position 76 of SEQ ID NO: 915743
gguccuuugcccugaagug

SEQ ID NO: 1102775 - RNA, 19 nt, Artificial Sequence
  Description of Artificial Sequence: Synthetic oligonucleotide
  Antisense strand to SEQ ID NO: 1102774
cacuucagggcaaaggacc

SEQ ID NO: 1102776 - RNA, 19 nt, Artificial Sequence
  Description of Artificial Sequence: Synthetic oligonucleotide
  Sense strand starting at position 77 of SEQ ID NO: 915743
guccuuugcccugaaguga

SEQ ID NO: 1102777 - RNA, 19 nt, Artificial Sequence
  Description of Artificial Sequence: Synthetic oligonucleotide
  Antisense strand to SEQ ID NO: 1102776
ucacuucagggcaaaggac

SEQ ID NO: 1102778 - RNA, 19 nt, Artificial Sequence
  Description of Artificial Sequence: Synthetic oligonucleotide
  Sense strand starting at position 91 of SEQ ID NO: 915743
agugaucccuccucuagca

SEQ ID NO: 1102779 - RNA, 19 nt, Artificial Sequence
  Description of Artificial Sequence: Synthetic oligonucleotide
  Antisense strand to SEQ ID NO: 1102778
ugcuagaggagggaucacu

SEQ ID NO: 1102780 - RNA, 19 nt, Artificial Sequence
  Description of Artificial Sequence: Synthetic oligonucleotide
  Sense strand starting at position 550 of SEQ ID NO: 915743
ucggaauuccaagaauguc

SEQ ID NO: 1102781 - RNA, 19 nt, Artificial Sequence
  Description of Artificial Sequence: Synthetic oligonucleotide
  Antisense strand to SEQ ID NO: 1102780
gacauucuuggaauuccga

SEQ ID NO: 1102782 - RNA, 19 nt, Artificial Sequence
  Description of Artificial Sequence: Synthetic oligonucleotide
  Sense strand starting at position 616 of SEQ ID NO: 915743
ccuugcucugaguaaacaa

SEQ ID NO: 1102783 - RNA, 19 nt, Artificial Sequence
  Description of Artificial Sequence: Synthetic oligonucleotide
  Antisense strand to SEQ ID NO: 1102782
uuguuuacucagagcaagg

SEQ ID NO: 1102784 - RNA, 19 nt, Artificial Sequence
  Description of Artificial Sequence: Synthetic oligonucleotide
  Sense strand starting at position 1073 of SEQ ID NO: 915743
gcagcauugcccugagaaa

SEQ ID NO: 1102785 - RNA, 19 nt, Artificial Sequence
  Description of Artificial Sequence: Synthetic oligonucleotide
  Antisense strand to SEQ ID NO: 1102784
uuucucagggcaaugcugc

SEQ ID NO: 1102786 - RNA, 19 nt, Artificial Sequence
  Description of Artificial Sequence: Synthetic oligonucleotide
  Sense strand starting at position 1074 of SEQ ID NO: 915743
cagcauugcccugagaaag

SEQ ID NO: 1102787 - RNA, 19 nt, Artificial Sequence
  Description of Artificial Sequence: Synthetic oligonucleotide
  Antisense strand to SEQ ID NO: 1102786
cuuucucagggcaaugcug

SEQ ID NO: 1102788 - RNA, 19 nt, Artificial Sequence
  Description of Artificial Sequence: Synthetic oligonucleotide
  Sense strand starting at position 2333 of SEQ ID NO: 915743
agccgauucucccgcaaca

SEQ ID NO: 1102789 - RNA, 19 nt, Artificial Sequence
  Description of Artificial Sequence: Synthetic oligonucleotide
  Antisense strand to SEQ ID NO: 1102788
uguugcgggagaaucggcu

SEQ ID NO: 1102790 - RNA, 19 nt, Artificial Sequence
  Description of Artificial Sequence: Synthetic oligonucleotide
  Sense strand starting at position 2462 of SEQ ID NO: 915743
guggcaagaucgucggcaa

SEQ ID NO: 1102791 - RNA, 19 nt, Artificial Sequence
  Description of Artificial Sequence: Synthetic oligonucleotide
  Antisense strand to SEQ ID NO: 1102790
uugccgacgaucuugccac

SEQ ID NO: 1102792 - RNA, 19 nt, Artificial Sequence
  Description of Artificial Sequence: Synthetic oligonucleotide
  Sense strand starting at position 2465 of SEQ ID NO: 915743
gcaagaucgucggcaacaa

SEQ ID NO: 1102793 - RNA, 19 nt, Artificial Sequence
  Description of Artificial Sequence: Synthetic oligonucleotide
  Antisense strand to SEQ ID NO: 1102792
uuguugccgacgaucuugc

SEQ ID NO: 1102794 - RNA, 19 nt, Artificial Sequence
  Description of Artificial Sequence: Synthetic oligonucleotide
  Sense strand starting at position 2691 of SEQ ID NO: 915743
gugaucugcuuucgggaga

SEQ ID NO: 1102795 - RNA, 19 nt, Artificial Sequence
  Description of Artificial Sequence: Synthetic oligonucleotide
  Antisense strand to SEQ ID NO: 1102794
ucucccgaaagcagaucac

SEQ ID NO: 1102796 - RNA, 19 nt, Artificial Sequence
  Description of Artificial Sequence: Synthetic oligonucleotide
  Sense strand starting at position 2692 of SEQ ID NO: 915743
ugaucugcuuucgggagaa

SEQ ID NO: 1102797 - RNA, 19 nt, Artificial Sequence
  Description of Artificial Sequence: Synthetic oligonucleotide
  Antisense strand to SEQ ID NO: 1102796
uucucccgaaagcagauca

SEQ ID NO: 1102798 - RNA, 19 nt, Artificial Sequence
  Description of Artificial Sequence: Synthetic oligonucleotide
  Sense strand starting at position 2696 of SEQ ID NO: 915743
cugcuuucgggagaaccuu

SEQ ID NO: 1102799 - RNA, 19 nt, Artificial Sequence
  Description of Artificial Sequence: Synthetic oligonucleotide
  Antisense strand to SEQ ID NO: 1102798
aagguucucccgaaagcag

SEQ ID NO: 1102800 - RNA, 19 nt, Artificial Sequence
  Description of Artificial Sequence: Synthetic oligonucleotide
  Sense strand starting at position 2741 of SEQ ID NO: 915743
ggaguugggcuucaaacca

SEQ ID NO: 1102801 - RNA, 19 nt, Artificial Sequence
  Description of Artificial Sequence: Synthetic oligonucleotide
  Antisense strand to SEQ ID NO: 1102800
ugguuugaagcccaacucc

SEQ ID NO: 1102802 - RNA, 19 nt, Artificial Sequence
  Description of Artificial Sequence: Synthetic oligonucleotide
  Sense strand starting at position 2801 of SEQ ID NO: 915743
cgucuugucacccgcagua

SEQ ID NO: 1102803 - RNA, 19 nt, Artificial Sequence
  Description of Artificial Sequence: Synthetic oligonucleotide
  Antisense strand to SEQ ID NO: 1102802
uacugcgggugacaagacg

SEQ ID NO: 1102804 - RNA, 19 nt, Artificial Sequence
  Description of Artificial Sequence: Synthetic oligonucleotide
  Sense strand starting at position 2803 of SEQ ID NO: 915743
ucuugucacccgcaguaaa

SEQ ID NO: 1102805 - RNA, 19 nt, Artificial Sequence
  Description of Artificial Sequence: Synthetic oligonucleotide
  Antisense strand to SEQ ID NO: 1102804
uuuacugcgggugacaaga

SEQ ID NO: 1102806 - RNA, 19 nt, Artificial Sequence
  Description of Artificial Sequence: Synthetic oligonucleotide
  Sense strand starting at position 3564 of SEQ ID NO: 915743
gcgucuuucuccugugcuu

SEQ ID NO: 1102807 - RNA, 19 nt, Artificial Sequence
  Description of Artificial Sequence: Synthetic oligonucleotide
  Antisense strand to SEQ ID NO: 1102806
aagcacaggagaaagacgc

SEQ ID NO: 1102808 - RNA, 19 nt, Artificial Sequence
  Description of Artificial Sequence: Synthetic oligonucleotide
  Sense strand starting at position 3650 of SEQ ID NO: 915743
cacugagucuucgucacau

SEQ ID NO: 1102809 - RNA, 19 nt, Artificial Sequence
  Description of Artificial Sequence: Synthetic oligonucleotide
  Antisense strand to SEQ ID NO: 1102808
augugacgaagacucagug

SEQ ID NO: 1102810 - RNA, 19 nt, Artificial Sequence
  Description of Artificial Sequence: Synthetic oligonucleotide
  Sense strand starting at position 3652 of SEQ ID NO: 915743
cugagucuucgucacaugu

SEQ ID NO: 1102811 - RNA, 19 nt, Artificial Sequence
  Description of Artificial Sequence: Synthetic oligonucleotide
  Antisense strand to SEQ ID NO: 1102810
acaugugacgaagacucag

SEQ ID NO: 1102812 - RNA, 19 nt, Artificial Sequence
  Description of Artificial Sequence: Synthetic oligonucleotide
  Sense strand starting at position 3654 of SEQ ID NO: 915743
gagucuucgucacauguga

SEQ ID NO: 1102813 - RNA, 19 nt, Artificial Sequence
  Description of Artificial Sequence: Synthetic oligonucleotide
  Antisense strand to SEQ ID NO: 1102812
ucacaugugacgaagacuc

SEQ ID NO: 1102814 - RNA, 19 nt, Artificial Sequence
  Description of Artificial Sequence: Synthetic oligonucleotide
  Sense strand starting at position 3656 of SEQ ID NO: 915743
gucuucgucacaugugaag

SEQ ID NO: 1102815 - RNA, 19 nt, Artificial Sequence
  Description of Artificial Sequence: Synthetic oligonucleotide
  Antisense strand to SEQ ID NO: 1102814
cuucacaugugacgaagac

SEQ ID NO: 1102816 - RNA, 19 nt, Artificial Sequence
  Description of Artificial Sequence: Synthetic oligonucleotide
  Sense strand starting at position 3859 of SEQ ID NO: 915743
gagccaucggugugggagu

SEQ ID NO: 1102817 - RNA, 19 nt, Artificial Sequence
  Description of Artificial Sequence: Synthetic oligonucleotide
  Antisense strand to SEQ ID NO: 1102816
acucccacaccgauggcuc

SEQ ID NO: 1102818 - RNA, 19 nt, Artificial Sequence
  Description of Artificial Sequence: Synthetic oligonucleotide
  Sense strand starting at position 3902 of SEQ ID NO: 915743
ggagcuaggucccagggaa

SEQ ID NO: 1102819 - RNA, 19 nt, Artificial Sequence
  Description of Artificial Sequence: Synthetic oligonucleotide
  Antisense strand to SEQ ID NO: 1102818
uucccugggaccuagcucc

SEQ ID NO: 1102820 - RNA, 19 nt, Artificial Sequence
  Description of Artificial Sequence: Synthetic oligonucleotide
  Sense strand starting at position 3927 of SEQ ID NO: 915743
gcuucuaauuggcuuggga

SEQ ID NO: 1102821 - RNA, 19 nt, Artificial Sequence
  Description of Artificial Sequence: Synthetic oligonucleotide
  Antisense strand to SEQ ID NO: 1102820
ucccaagccaauuagaagc

SEQ ID NO: 1102822 - RNA, 19 nt, Artificial Sequence
  Description of Artificial Sequence: Synthetic oligonucleotide
  Sense strand starting at position 698 of SEQ ID NO: 915744
aggccuucccuguaauccu

SEQ ID NO: 1102823 - RNA, 19 nt, Artificial Sequence
  Description of Artificial Sequence: Synthetic oligonucleotide
  Antisense strand to SEQ ID NO: 1102822
aggauuacagggaaggccu

SEQ ID NO: 1102824 - RNA, 19 nt, Artificial Sequence
  Description of Artificial Sequence: Synthetic oligonucleotide
  Sense strand starting at position 720 of SEQ ID NO: 915744
cugcacuguuggguauuua

SEQ ID NO: 1102825 - RNA, 19 nt, Artificial Sequence
  Description of Artificial Sequence: Synthetic oligonucleotide
  Antisense strand to SEQ ID NO: 1102824
uaaauacccaacagugcag

SEQ ID NO: 1102826 - RNA, 19 nt, Artificial Sequence
  Description of Artificial Sequence: Synthetic oligonucleotide
  Sense strand starting at position 732 of SEQ ID NO: 915744
guauuuaucugcugggagu

SEQ ID NO: 1102827 - RNA, 19 nt, Artificial Sequence
  Description of Artificial Sequence: Synthetic oligonucleotide
  Antisense strand to SEQ ID NO: 1102826
acucccagcagauaaauac

SEQ ID NO: 1102828 - RNA, 19 nt, Artificial Sequence
  Description of Artificial Sequence: Synthetic oligonucleotide
  Sense strand starting at position 1512 of SEQ ID NO: 915744
gccuguuuccagggcaaca

SEQ ID NO: 1102829 - RNA, 19 nt, Artificial Sequence
  Description of Artificial Sequence: Synthetic oligonucleotide
  Antisense strand to SEQ ID NO: 1102828
uguugcccuggaaacaggc

SEQ ID NO: 1102830 - RNA, 19 nt, Artificial Sequence
  Description of Artificial Sequence: Synthetic oligonucleotide
  Sense strand starting at position 1581 of SEQ ID NO: 915744
gguccuuugcccugaagug

SEQ ID NO: 1102831 - RNA, 19 nt, Artificial Sequence
  Description of Artificial Sequence: Synthetic oligonucleotide
  Antisense strand to SEQ ID NO: 1102830
cacuucagggcaaaggacc

SEQ ID NO: 1102832 - RNA, 19 nt, Artificial Sequence
  Description of Artificial Sequence: Synthetic oligonucleotide
  Sense strand starting at position 1582 of SEQ ID NO: 915744
guccuuugcccugaaguga

SEQ ID NO: 1102833 - RNA, 19 nt, Artificial Sequence
  Description of Artificial Sequence: Synthetic oligonucleotide
  Antisense strand to SEQ ID NO: 1102832
ucacuucagggcaaaggac

SEQ ID NO: 1102834 - RNA, 19 nt, Artificial Sequence
  Description of Artificial Sequence: Synthetic oligonucleotide
  Sense strand starting at position 1596 of SEQ ID NO: 915744
agugaucccuccucuagca

SEQ ID NO: 1102835 - RNA, 19 nt, Artificial Sequence
  Description of Artificial Sequence: Synthetic oligonucleotide
  Antisense strand to SEQ ID NO: 1102834
ugcuagaggagggaucacu

SEQ ID NO: 1102836 - RNA, 19 nt, Artificial Sequence
  Description of Artificial Sequence: Synthetic oligonucleotide
  Sense strand starting at position 2055 of SEQ ID NO: 915744
ucggaauuccaagaauguc

SEQ ID NO: 1102837 - RNA, 19 nt, Artificial Sequence
  Description of Artificial Sequence: Synthetic oligonucleotide
  Antisense strand to SEQ ID NO: 1102836
gacauucuuggaauuccga

SEQ ID NO: 1102838 - RNA, 19 nt, Artificial Sequence
  Description of Artificial Sequence: Synthetic oligonucleotide
  Sense strand starting at position 2121 of SEQ ID NO: 915744
ccuugcucugaguaaacaa

SEQ ID NO: 1102839 - RNA, 19 nt, Artificial Sequence
  Description of Artificial Sequence: Synthetic oligonucleotide
  Antisense strand to SEQ ID NO: 1102838
uuguuuacucagagcaagg

SEQ ID NO: 1102840 - RNA, 19 nt, Artificial Sequence
  Description of Artificial Sequence: Synthetic oligonucleotide
  Sense strand starting at position 2578 of SEQ ID NO: 915744
gcagcauugcccugagaaa

SEQ ID NO: 1102841 - RNA, 19 nt, Artificial Sequence
  Description of Artificial Sequence: Synthetic oligonucleotide
  Antisense strand to SEQ ID NO: 1102840
uuucucagggcaaugcugc

SEQ ID NO: 1102842 - RNA, 19 nt, Artificial Sequence
  Description of Artificial Sequence: Synthetic oligonucleotide
  Sense strand starting at position 2579 of SEQ ID NO: 915744
cagcauugcccugagaaag

SEQ ID NO: 1102843 - RNA, 19 nt, Artificial Sequence
  Description of Artificial Sequence: Synthetic oligonucleotide
  Antisense strand to SEQ ID NO: 1102842
cuuucucagggcaaugcug

SEQ ID NO: 1102844 - RNA, 19 nt, Artificial Sequence
  Description of Artificial Sequence: Synthetic oligonucleotide
  Sense strand starting at position 3838 of SEQ ID NO: 915744
agccgauucucccgcaaca

SEQ ID NO: 1102845 - RNA, 19 nt, Artificial Sequence
  Description of Artificial Sequence: Synthetic oligonucleotide
  Antisense strand to SEQ ID NO: 1102844
uguugcgggagaaucggcu

SEQ ID NO: 1102846 - RNA, 19 nt, Artificial Sequence
  Description of Artificial Sequence: Synthetic oligonucleotide
  Sense strand starting at position 3967 of SEQ ID NO: 915744
guggcaagaucgucggcaa

SEQ ID NO: 1102847 - RNA, 19 nt, Artificial Sequence
  Description of Artificial Sequence: Synthetic oligonucleotide
  Antisense strand to SEQ ID NO: 1102846
uugccgacgaucuugccac

SEQ ID NO: 1102848 - RNA, 19 nt, Artificial Sequence
  Description of Artificial Sequence: Synthetic oligonucleotide
  Sense strand starting at position 3970 of SEQ ID NO: 915744
gcaagaucgucggcaacaa

SEQ ID NO: 1102849 - RNA, 19 nt, Artificial Sequence
  Description of Artificial Sequence: Synthetic oligonucleotide
  Antisense strand to SEQ ID NO: 1102848
uuguugccgacgaucuugc

SEQ ID NO: 1102850 - RNA, 19 nt, Artificial Sequence
  Description of Artificial Sequence: Synthetic oligonucleotide
  Sense strand starting at position 433 of SEQ ID NO: 915745
ucggaauuccaagaauguc

SEQ ID NO: 1102851 - RNA, 19 nt, Artificial Sequence
  Description of Artificial Sequence: Synthetic oligonucleotide
  Antisense strand to SEQ ID NO: 1102850
gacauucuuggaauuccga

SEQ ID NO: 1102852 - RNA, 19 nt, Artificial Sequence
  Description of Artificial Sequence: Synthetic oligonucleotide
  Sense strand starting at position 499 of SEQ ID NO: 915745
ccuugcucugaguaaacaa

SEQ ID NO: 1102853 - RNA, 19 nt, Artificial Sequence
  Description of Artificial Sequence: Synthetic oligonucleotide
  Antisense strand to SEQ ID NO: 1102852
uuguuuacucagagcaagg

SEQ ID NO: 1102854 - RNA, 19 nt, Artificial Sequence
  Description of Artificial Sequence: Synthetic oligonucleotide
  Sense strand starting at position 956 of SEQ ID NO: 915745
gcagcauugcccugagaaa

SEQ ID NO: 1102855 - RNA, 19 nt, Artificial Sequence
  Description of Artificial Sequence: Synthetic oligonucleotide
  Antisense strand to SEQ ID NO: 1102854
uuucucagggcaaugcugc

SEQ ID NO: 1102856 - RNA, 19 nt, Artificial Sequence
  Description of Artificial Sequence: Synthetic oligonucleotide
  Sense strand starting at position 957 of SEQ ID NO: 915745
cagcauugcccugagaaag

SEQ ID NO: 1102857 - RNA, 19 nt, Artificial Sequence
  Description of Artificial Sequence: Synthetic oligonucleotide
  Antisense strand to SEQ ID NO: 1102856
cuuucucagggcaaugcug

SEQ ID NO: 1102858 - RNA, 19 nt, Artificial Sequence
  Description of Artificial Sequence: Synthetic oligonucleotide
  Sense strand starting at position 2216 of SEQ ID NO: 915745
agccgauucucccgcaaca

SEQ ID NO: 1102859 - RNA, 19 nt, Artificial Sequence
  Description of Artificial Sequence: Synthetic oligonucleotide
  Antisense strand to SEQ ID NO: 1102858
uguugcgggagaaucggcu

SEQ ID NO: 1102860 - RNA, 19 nt, Artificial Sequence
  Description of Artificial Sequence: Synthetic oligonucleotide
  Sense strand starting at position 2345 of SEQ ID NO: 915745
guggcaagaucgucggcaa

SEQ ID NO: 1102861 - RNA, 19 nt, Artificial Sequence
  Description of Artificial Sequence: Synthetic oligonucleotide
  Antisense strand to SEQ ID NO: 1102860
uugccgacgaucuugccac

SEQ ID NO: 1102862 - RNA, 19 nt, Artificial Sequence
  Description of Artificial Sequence: Synthetic oligonucleotide
  Sense strand starting at position 2348 of SEQ ID NO: 915745
gcaagaucgucggcaacaa

SEQ ID NO: 1102863 - RNA, 19 nt, Artificial Sequence
  Description of Artificial Sequence: Synthetic oligonucleotide
  Antisense strand to SEQ ID NO: 1102862
uuguugccgacgaucuugc

SEQ ID NO: 1102864 - RNA, 19 nt, Artificial Sequence
  Description of Artificial Sequence: Synthetic oligonucleotide
  Sense strand starting at position 2574 of SEQ ID NO: 915745
gugaucugcuuucgggaga

SEQ ID NO: 1102865 - RNA, 19 nt, Artificial Sequence
  Description of Artificial Sequence: Synthetic oligonucleotide
  Antisense strand to SEQ ID NO: 1102864
ucucccgaaagcagaucac

SEQ ID NO: 1102866 - RNA, 19 nt, Artificial Sequence
  Description of Artificial Sequence: Synthetic oligonucleotide
  Sense strand starting at position 2575 of SEQ ID NO: 915745
ugaucugcuuucgggagaa

SEQ ID NO: 1102867 - RNA, 19 nt, Artificial Sequence
  Description of Artificial Sequence: Synthetic oligonucleotide
  Antisense strand to SEQ ID NO: 1102866
uucucccgaaagcagauca

SEQ ID NO: 1102868 - RNA, 19 nt, Artificial Sequence
  Description of Artificial Sequence: Synthetic oligonucleotide
  Sense strand starting at position 2579 of SEQ ID NO: 915745
cugcuuucgggagaaccuu

SEQ ID NO: 1102869 - RNA, 19 nt, Artificial Sequence
  Description of Artificial Sequence: Synthetic oligonucleotide
  Antisense strand to SEQ ID NO: 1102868
aagguucucccgaaagcag

SEQ ID NO: 1102870 - RNA, 19 nt, Artificial Sequence
  Description of Artificial Sequence: Synthetic oligonucleotide
  Sense strand starting at position 2624 of SEQ ID NO: 915745
ggaguugggcuucaaacca

SEQ ID NO: 1102871 - RNA, 19 nt, Artificial Sequence
  Description of Artificial Sequence: Synthetic oligonucleotide
  Antisense strand to SEQ ID NO: 1102870
ugguuugaagcccaacucc

SEQ ID NO: 1102872 - RNA, 19 nt, Artificial Sequence
  Description of Artificial Sequence: Synthetic oligonucleotide
  Sense strand starting at position 2684 of SEQ ID NO: 915745
cgucuugucacccgcagua

SEQ ID NO: 1102873 - RNA, 19 nt, Artificial Sequence
  Description of Artificial Sequence: Synthetic oligonucleotide
  Antisense strand to SEQ ID NO: 1102872
uacugcgggugacaagacg

SEQ ID NO: 1102874 - RNA, 19 nt, Artificial Sequence
  Description of Artificial Sequence: Synthetic oligonucleotide
  Sense strand starting at position 2686 of SEQ ID NO: 915745
ucuugucacccgcaguaaa

SEQ ID NO: 1102875 - RNA, 19 nt, Artificial Sequence
  Description of Artificial Sequence: Synthetic oligonucleotide
  Antisense strand to SEQ ID NO: 1102874
uuuacugcgggugacaaga

SEQ ID NO: 1102876 - RNA, 19 nt, Artificial Sequence
  Description of Artificial Sequence: Synthetic oligonucleotide
  Sense strand starting at position 3447 of SEQ ID NO: 915745
gcgucuuucuccugugcuu

SEQ ID NO: 1102877 - RNA, 19 nt, Artificial Sequence
  Description of Artificial Sequence: Synthetic oligonucleotide
  Antisense strand to SEQ ID NO: 1102876
aagcacaggagaaagacgc

SEQ ID NO: 1102878 - RNA, 19 nt, Artificial Sequence
  Description of Artificial Sequence: Synthetic oligonucleotide
  Sense strand starting at position 3533 of SEQ ID NO: 915745
cacugagucuucgucacau

SEQ ID NO: 1102879 - RNA, 19 nt, Artificial Sequence
  Description of Artificial Sequence: Synthetic oligonucleotide
  Antisense strand to SEQ ID NO: 1102878
augugacgaagacucagug

SEQ ID NO: 1102880 - RNA, 19 nt, Artificial Sequence
  Description of Artificial Sequence: Synthetic oligonucleotide
  Sense strand starting at position 3535 of SEQ ID NO: 915745
cugagucuucgucacaugu

SEQ ID NO: 1102881 - RNA, 19 nt, Artificial Sequence
  Description of Artificial Sequence: Synthetic oligonucleotide
  Antisense strand to SEQ ID NO: 1102880
acaugugacgaagacucag

SEQ ID NO: 1102882 - RNA, 19 nt, Artificial Sequence
  Description of Artificial Sequence: Synthetic oligonucleotide
  Sense strand starting at position 3537 of SEQ ID NO: 915745
gagucuucgucacauguga

SEQ ID NO: 1102883 - RNA, 19 nt, Artificial Sequence
  Description of Artificial Sequence: Synthetic oligonucleotide
  Antisense strand to SEQ ID NO: 1102882
ucacaugugacgaagacuc

SEQ ID NO: 1102884 - RNA, 19 nt, Artificial Sequence
  Description of Artificial Sequence: Synthetic oligonucleotide
  Sense strand starting at position 3539 of SEQ ID NO: 915745
gucuucgucacaugugaag

SEQ ID NO: 1102885 - RNA, 19 nt, Artificial Sequence
  Description of Artificial Sequence: Synthetic oligonucleotide
  Antisense strand to SEQ ID NO: 1102884
cuucacaugugacgaagac

SEQ ID NO: 1102886 - RNA, 19 nt, Artificial Sequence
  Description of Artificial Sequence: Synthetic oligonucleotide
  Sense strand starting at position 3742 of SEQ ID NO: 915745
gagccaucggugugggagu

SEQ ID NO: 1102887 - RNA, 19 nt, Artificial Sequence
  Description of Artificial Sequence: Synthetic oligonucleotide
  Antisense strand to SEQ ID NO: 1102886
acucccacaccgauggcuc

SEQ ID NO: 1102888 - RNA, 19 nt, Artificial Sequence
  Description of Artificial Sequence: Synthetic oligonucleotide
  Sense strand starting at position 3785 of SEQ ID NO: 915745
ggagcuaggucccagggaa

SEQ ID NO: 1102889 - RNA, 19 nt, Artificial Sequence
  Description of Artificial Sequence: Synthetic oligonucleotide
  Antisense strand to SEQ ID NO: 1102888
uucccugggaccuagcucc

SEQ ID NO: 1102890 - RNA, 19 nt, Artificial Sequence
  Description of Artificial Sequence: Synthetic oligonucleotide
  Sense strand starting at position 3810 of SEQ ID NO: 915745
gcuucuaauuggcuuggga

SEQ ID NO: 1102891 - RNA, 19 nt, Artificial Sequence
  Description of Artificial Sequence: Synthetic oligonucleotide
  Antisense strand to SEQ ID NO: 1102890
ucccaagccaauuagaagc

SEQ ID NO: 1102892 - RNA, 19 nt, Artificial Sequence
  Description of Artificial Sequence: Synthetic oligonucleotide
  Sense strand starting at position 238 of SEQ ID NO: 915746
gaguguacaugugugaaac

SEQ ID NO: 1102893 - RNA, 19 nt, Artificial Sequence
  Description of Artificial Sequence: Synthetic oligonucleotide
  Antisense strand to SEQ ID NO: 1102892
guuucacacauguacacuc

SEQ ID NO: 1102894 - RNA, 19 nt, Artificial Sequence
  Description of Artificial Sequence: Synthetic oligonucleotide
  Sense strand starting at position 239 of SEQ ID NO: 915746
aguguacaugugugaaaca

SEQ ID NO: 1102895 - RNA, 19 nt, Artificial Sequence
  Description of Artificial Sequence: Synthetic oligonucleotide
  Antisense strand to SEQ ID NO: 1102894
uguuucacacauguacacu

SEQ ID NO: 1102896 - RNA, 19 nt, Artificial Sequence
  Description of Artificial Sequence: Synthetic oligonucleotide
  Sense strand starting at position 649 of SEQ ID NO: 915746
cccuguuaggcagagguaa

SEQ ID NO: 1102897 - RNA, 19 nt, Artificial Sequence
  Description of Artificial Sequence: Synthetic oligonucleotide
  Antisense strand to SEQ ID NO: 1102896
uuaccucugccuaacaggg

SEQ ID NO: 1102898 - RNA, 19 nt, Artificial Sequence
  Description of Artificial Sequence: Synthetic oligonucleotide
  Sense strand starting at position 651 of SEQ ID NO: 915746
cuguuaggcagagguaaau

SEQ ID NO: 1102899 - RNA, 19 nt, Artificial Sequence
  Description of Artificial Sequence: Synthetic oligonucleotide
  Antisense strand to SEQ ID NO: 1102898
auuuaccucugccuaacag

SEQ ID NO: 1102900 - RNA, 19 nt, Artificial Sequence
  Description of Artificial Sequence: Synthetic oligonucleotide
  Sense strand starting at position 769 of SEQ ID NO: 915746
ccauuuagugcuggaguga

SEQ ID NO: 1102901 - RNA, 19 nt, Artificial Sequence
  Description of Artificial Sequence: Synthetic oligonucleotide
  Antisense strand to SEQ ID NO: 1102900
ucacuccagcacuaaaugg

SEQ ID NO: 1102902 - RNA, 19 nt, Artificial Sequence
  Description of Artificial Sequence: Synthetic oligonucleotide
  Sense strand starting at position 2009 of SEQ ID NO: 915746
cugcaauucccagaaugcu

SEQ ID NO: 1102903 - RNA, 19 nt, Artificial Sequence
  Description of Artificial Sequence: Synthetic oligonucleotide
  Antisense strand to SEQ ID NO: 1102902
agcauucugggaauugcag

SEQ ID NO: 1102904 - RNA, 19 nt, Artificial Sequence
  Description of Artificial Sequence: Synthetic oligonucleotide
  Sense strand starting at position 2019 of SEQ ID NO: 915746
cagaaugcucgagggcuaa

SEQ ID NO: 1102905 - RNA, 19 nt, Artificial Sequence
  Description of Artificial Sequence: Synthetic oligonucleotide
  Antisense strand to SEQ ID NO: 1102904
uuagcccucgagcauucug

SEQ ID NO: 1102906 - RNA, 19 nt, Artificial Sequence
  Description of Artificial Sequence: Synthetic oligonucleotide
  Sense strand starting at position 2113 of SEQ ID NO: 915746
ggaagugcgucaucucgca

SEQ ID NO: 1102907 - RNA, 19 nt, Artificial Sequence
  Description of Artificial Sequence: Synthetic oligonucleotide
  Antisense strand to SEQ ID NO: 1102906
ugcgagaugacgcacuucc

SEQ ID NO: 1102908 - RNA, 19 nt, Artificial Sequence
  Description of Artificial Sequence: Synthetic oligonucleotide
  Sense strand starting at position 2117 of SEQ ID NO: 915746
gugcgucaucucgcacgga

SEQ ID NO: 1102909 - RNA, 19 nt, Artificial Sequence
  Description of Artificial Sequence: Synthetic oligonucleotide
  Antisense strand to SEQ ID NO: 1102908
uccgugcgagaugacgcac

SEQ ID NO: 1102910 - RNA, 19 nt, Artificial Sequence
  Description of Artificial Sequence: Synthetic oligonucleotide
  Sense strand starting at position 2726 of SEQ ID NO: 915746
ccagauucucccugcgaca

SEQ ID NO: 1102911 - RNA, 19 nt, Artificial Sequence
  Description of Artificial Sequence: Synthetic oligonucleotide
  Antisense strand to SEQ ID NO: 1102910
ugucgcagggagaaucugg

SEQ ID NO: 1102912 - RNA, 19 nt, Artificial Sequence
  Description of Artificial Sequence: Synthetic oligonucleotide
  Sense strand starting at position 2840 of SEQ ID NO: 915746
gaguucuccuuggcugcua

SEQ ID NO: 1102913 - RNA, 19 nt, Artificial Sequence
  Description of Artificial Sequence: Synthetic oligonucleotide
  Antisense strand to SEQ ID NO: 1102912
uagcagccaaggagaacuc

SEQ ID NO: 1102914 - RNA, 19 nt, Artificial Sequence
  Description of Artificial Sequence: Synthetic oligonucleotide
  Sense strand starting at position 2871 of SEQ ID NO: 915746
cucugaaaggcucgagaga

SEQ ID NO: 1102915 - RNA, 19 nt, Artificial Sequence
  Description of Artificial Sequence: Synthetic oligonucleotide
  Antisense strand to SEQ ID NO: 1102914
ucucucgagccuuucagag

SEQ ID NO: 1102916 - RNA, 19 nt, Artificial Sequence
  Description of Artificial Sequence: Synthetic oligonucleotide
  Sense strand starting at position 2912 of SEQ ID NO: 915746
ccuggcauccgcugggaaa

SEQ ID NO: 1102917 - RNA, 19 nt, Artificial Sequence
  Description of Artificial Sequence: Synthetic oligonucleotide
  Antisense strand to SEQ ID NO: 1102916
uuucccagcggaugccagg

SEQ ID NO: 1102918 - RNA, 19 nt, Artificial Sequence
  Description of Artificial Sequence: Synthetic oligonucleotide
  Sense strand starting at position 2913 of SEQ ID NO: 915746
cuggcauccgcugggaaau

SEQ ID NO: 1102919 - RNA, 19 nt, Artificial Sequence
  Description of Artificial Sequence: Synthetic oligonucleotide
  Antisense strand to SEQ ID NO: 1102918
auuucccagcggaugccag

SEQ ID NO: 1102920 - RNA, 19 nt, Artificial Sequence
  Description of Artificial Sequence: Synthetic oligonucleotide
  Sense strand starting at position 2914 of SEQ ID NO: 915746
uggcauccgcugggaaaua

SEQ ID NO: 1102921 - RNA, 19 nt, Artificial Sequence
  Description of Artificial Sequence: Synthetic oligonucleotide
  Antisense strand to SEQ ID NO: 1102920
uauuucccagcggaugcca

SEQ ID NO: 1102922 - RNA, 19 nt, Artificial Sequence
  Description of Artificial Sequence: Synthetic oligonucleotide
  Sense strand starting at position 3093 of SEQ ID NO: 915746
ggaccauuauguucuccca

SEQ ID NO: 1102923 - RNA, 19 nt, Artificial Sequence
  Description of Artificial Sequence: Synthetic oligonucleotide
  Antisense strand to SEQ ID NO: 1102922
ugggagaacauaauggucc

SEQ ID NO: 1102924 - RNA, 19 nt, Artificial Sequence
  Description of Artificial Sequence: Synthetic oligonucleotide
  Sense strand starting at position 3239 of SEQ ID NO: 915746
agauaugaauucccaggca

SEQ ID NO: 1102925 - RNA, 19 nt, Artificial Sequence
  Description of Artificial Sequence: Synthetic oligonucleotide
  Antisense strand to SEQ ID NO: 1102924
ugccugggaauucauaucu

SEQ ID NO: 1102926 - RNA, 19 nt, Artificial Sequence
  Description of Artificial Sequence: Synthetic oligonucleotide
  Sense strand starting at position 3633 of SEQ ID NO: 915746
guguguccauccuuuacca

SEQ ID NO: 1102927 - RNA, 19 nt, Artificial Sequence
  Description of Artificial Sequence: Synthetic oligonucleotide
  Antisense strand to SEQ ID NO: 1102926
ugguaaaggauggacacac

SEQ ID NO: 1102928 - RNA, 19 nt, Artificial Sequence
  Description of Artificial Sequence: Synthetic oligonucleotide
  Sense strand starting at position 3866 of SEQ ID NO: 915746
ggaguugcucccugguuua

SEQ ID NO: 1102929 - RNA, 19 nt, Artificial Sequence
  Description of Artificial Sequence: Synthetic oligonucleotide
  Antisense strand to SEQ ID NO: 1102928
uaaaccagggagcaacucc

SEQ ID NO: 1102930 - RNA, 19 nt, Artificial Sequence
  Description of Artificial Sequence: Synthetic oligonucleotide
  Sense strand starting at position 3869 of SEQ ID NO: 915746
guugcucccugguuuaaac

SEQ ID NO: 1102931 - RNA, 19 nt, Artificial Sequence
  Description of Artificial Sequence: Synthetic oligonucleotide
  Antisense strand to SEQ ID NO: 1102930
guuuaaaccagggagcaac

SEQ ID NO: 1102932 - RNA, 19 nt, Artificial Sequence
  Description of Artificial Sequence: Synthetic oligonucleotide
  Sense strand starting at position 3970 of SEQ ID NO: 915746
cguugaggccaugaugacu

SEQ ID NO: 1102933 - RNA, 19 nt, Artificial Sequence
  Description of Artificial Sequence: Synthetic oligonucleotide
  Antisense strand to SEQ ID NO: 1102932
agucaucauggccucaacg

SEQ ID NO: 1102934 - RNA, 19 nt, Artificial Sequence
  Description of Artificial Sequence: Synthetic oligonucleotide
  Sense strand starting at position 431 of SEQ ID NO: 915747
auuuguuucucaggaggaa

SEQ ID NO: 1102935 - RNA, 19 nt, Artificial Sequence
  Description of Artificial Sequence: Synthetic oligonucleotide
  Antisense strand to SEQ ID NO: 1102934
uuccuccugagaaacaaau

SEQ ID NO: 1102936 - RNA, 19 nt, Artificial Sequence
  Description of Artificial Sequence: Synthetic oligonucleotide
  Sense strand starting at position 444 of SEQ ID NO: 915747
gaggaacaguauugagaau

SEQ ID NO: 1102937 - RNA, 19 nt, Artificial Sequence
  Description of Artificial Sequence: Synthetic oligonucleotide
  Antisense strand to SEQ ID NO: 1102936
auucucaauacuguuccuc

SEQ ID NO: 1102938 - RNA, 19 nt, Artificial Sequence
  Description of Artificial Sequence: Synthetic oligonucleotide
  Sense strand starting at position 450 of SEQ ID NO: 915747
caguauugagaaugaguuc

SEQ ID NO: 1102939 - RNA, 19 nt, Artificial Sequence
  Description of Artificial Sequence: Synthetic oligonucleotide
  Antisense strand to SEQ ID NO: 1102938
gaacucauucucaauacug

SEQ ID NO: 1102940 - RNA, 19 nt, Artificial Sequence
  Description of Artificial Sequence: Synthetic oligonucleotide
  Sense strand starting at position 768 of SEQ ID NO: 915747
gaguguacaugugugaaac

SEQ ID NO: 1102941 - RNA, 19 nt, Artificial Sequence
  Description of Artificial Sequence: Synthetic oligonucleotide
  Antisense strand to SEQ ID NO: 1102940
guuucacacauguacacuc

SEQ ID NO: 1102942 - RNA, 19 nt, Artificial Sequence
  Description of Artificial Sequence: Synthetic oligonucleotide
  Sense strand starting at position 769 of SEQ ID NO: 915747
aguguacaugugugaaaca

SEQ ID NO: 1102943 - RNA, 19 nt, Artificial Sequence
  Description of Artificial Sequence: Synthetic oligonucleotide
  Antisense strand to SEQ ID NO: 1102942
uguuucacacauguacacu

SEQ ID NO: 1102944 - RNA, 19 nt, Artificial Sequence
  Description of Artificial Sequence: Synthetic oligonucleotide
  Sense strand starting at position 1179 of SEQ ID NO: 915747
cccuguuaggcagagguaa

SEQ ID NO: 1102945 - RNA, 19 nt, Artificial Sequence
  Description of Artificial Sequence: Synthetic oligonucleotide
  Antisense strand to SEQ ID NO: 1102944
uuaccucugccuaacaggg

SEQ ID NO: 1102946 - RNA, 19 nt, Artificial Sequence
  Description of Artificial Sequence: Synthetic oligonucleotide
  Sense strand starting at position 1181 of SEQ ID NO: 915747
cuguuaggcagagguaaau

SEQ ID NO: 1102947 - RNA, 19 nt, Artificial Sequence
  Description of Artificial Sequence: Synthetic oligonucleotide
  Antisense strand to SEQ ID NO: 1102946
auuuaccucugccuaacag

SEQ ID NO: 1102948 - RNA, 19 nt, Artificial Sequence
  Description of Artificial Sequence: Synthetic oligonucleotide
  Sense strand starting at position 1299 of SEQ ID NO: 915747
ccauuuagugcuggaguga

SEQ ID NO: 1102949 - RNA, 19 nt, Artificial Sequence
  Description of Artificial Sequence: Synthetic oligonucleotide
  Antisense strand to SEQ ID NO: 1102948
ucacuccagcacuaaaugg

SEQ ID NO: 1102950 - RNA, 19 nt, Artificial Sequence
  Description of Artificial Sequence: Synthetic oligonucleotide
  Sense strand starting at position 2539 of SEQ ID NO: 915747
cugcaauucccagaaugcu

SEQ ID NO: 1102951 - RNA, 19 nt, Artificial Sequence
  Description of Artificial Sequence: Synthetic oligonucleotide
  Antisense strand to SEQ ID NO: 1102950
agcauucugggaauugcag

SEQ ID NO: 1102952 - RNA, 19 nt, Artificial Sequence
  Description of Artificial Sequence: Synthetic oligonucleotide
  Sense strand starting at position 2549 of SEQ ID NO: 915747
cagaaugcucgagggcuaa

SEQ ID NO: 1102953 - RNA, 19 nt, Artificial Sequence
  Description of Artificial Sequence: Synthetic oligonucleotide
  Antisense strand to SEQ ID NO: 1102952
uuagcccucgagcauucug

SEQ ID NO: 1102954 - RNA, 19 nt, Artificial Sequence
  Description of Artificial Sequence: Synthetic oligonucleotide
  Sense strand starting at position 2643 of SEQ ID NO: 915747
ggaagugcgucaucucgca

SEQ ID NO: 1102955 - RNA, 19 nt, Artificial Sequence
  Description of Artificial Sequence: Synthetic oligonucleotide
  Antisense strand to SEQ ID NO: 1102954
ugcgagaugacgcacuucc

SEQ ID NO: 1102956 - RNA, 19 nt, Artificial Sequence
  Description of Artificial Sequence: Synthetic oligonucleotide
  Sense strand starting at position 2647 of SEQ ID NO: 915747
gugcgucaucucgcacgga

SEQ ID NO: 1102957 - RNA, 19 nt, Artificial Sequence
  Description of Artificial Sequence: Synthetic oligonucleotide
  Antisense strand to SEQ ID NO: 1102956
uccgugcgagaugacgcac

SEQ ID NO: 1102958 - RNA, 19 nt, Artificial Sequence
  Description of Artificial Sequence: Synthetic oligonucleotide
  Sense strand starting at position 3256 of SEQ ID NO: 915747
ccagauucucccugcgaca

SEQ ID NO: 1102959 - RNA, 19 nt, Artificial Sequence
  Description of Artificial Sequence: Synthetic oligonucleotide
  Antisense strand to SEQ ID NO: 1102958
ugucgcagggagaaucugg

SEQ ID NO: 1102960 - RNA, 19 nt, Artificial Sequence
  Description of Artificial Sequence: Synthetic oligonucleotide
  Sense strand starting at position 3370 of SEQ ID NO: 915747
gaguucuccuuggcugcua

SEQ ID NO: 1102961 - RNA, 19 nt, Artificial Sequence
  Description of Artificial Sequence: Synthetic oligonucleotide
  Antisense strand to SEQ ID NO: 1102960
uagcagccaaggagaacuc

SEQ ID NO: 1102962 - RNA, 19 nt, Artificial Sequence
  Description of Artificial Sequence: Synthetic oligonucleotide
  Sense strand starting at position 3401 of SEQ ID NO: 915747
cucugaaaggcucgagaga

SEQ ID NO: 1102963 - RNA, 19 nt, Artificial Sequence
  Description of Artificial Sequence: Synthetic oligonucleotide
  Antisense strand to SEQ ID NO: 1102962
ucucucgagccuuucagag

SEQ ID NO: 1102964 - RNA, 19 nt, Artificial Sequence
  Description of Artificial Sequence: Synthetic oligonucleotide
  Sense strand starting at position 3442 of SEQ ID NO: 915747
ccuggcauccgcugggaaa

SEQ ID NO: 1102965 - RNA, 19 nt, Artificial Sequence
  Description of Artificial Sequence: Synthetic oligonucleotide
  Antisense strand to SEQ ID NO: 1102964
uuucccagcggaugccagg

SEQ ID NO: 1102966 - RNA, 19 nt, Artificial Sequence
  Description of Artificial Sequence: Synthetic oligonucleotide
  Sense strand starting at position 3443 of SEQ ID NO: 915747
cuggcauccgcugggaaau

SEQ ID NO: 1102967 - RNA, 19 nt, Artificial Sequence
  Description of Artificial Sequence: Synthetic oligonucleotide
  Antisense strand to SEQ ID NO: 1102966
auuucccagcggaugccag

SEQ ID NO: 1102968 - RNA, 19 nt, Artificial Sequence
  Description of Artificial Sequence: Synthetic oligonucleotide
  Sense strand starting at position 3444 of SEQ ID NO: 915747
uggcauccgcugggaaaua

SEQ ID NO: 1102969 - RNA, 19 nt, Artificial Sequence
  Description of Artificial Sequence: Synthetic oligonucleotide
  Antisense strand to SEQ ID NO: 1102968
uauuucccagcggaugcca

SEQ ID NO: 1102970 - RNA, 19 nt, Artificial Sequence
  Description of Artificial Sequence: Synthetic oligonucleotide
  Sense strand starting at position 3623 of SEQ ID NO: 915747
ggaccauuauguucuccca

SEQ ID NO: 1102971 - RNA, 19 nt, Artificial Sequence
  Description of Artificial Sequence: Synthetic oligonucleotide
  Antisense strand to SEQ ID NO: 1102970
ugggagaacauaauggucc

SEQ ID NO: 1102972 - RNA, 19 nt, Artificial Sequence
  Description of Artificial Sequence: Synthetic oligonucleotide
  Sense strand starting at position 3769 of SEQ ID NO: 915747
agauaugaauucccaggca

SEQ ID NO: 1102973 - RNA, 19 nt, Artificial Sequence
  Description of Artificial Sequence: Synthetic oligonucleotide
  Antisense strand to SEQ ID NO: 1102972
ugccugggaauucauaucu

SEQ ID NO: 1102974 - RNA, 19 nt, Artificial Sequence
  Description of Artificial Sequence: Synthetic oligonucleotide
  Sense strand starting at position 9 of SEQ ID NO: 915748
guuaacaguuucucugaua

SEQ ID NO: 1102975 - RNA, 19 nt, Artificial Sequence
  Description of Artificial Sequence: Synthetic oligonucleotide
  Antisense strand to SEQ ID NO: 1102974
uaucagagaaacuguuaac

SEQ ID NO: 1102976 - RNA, 19 nt, Artificial Sequence
  Description of Artificial Sequence: Synthetic oligonucleotide
  Sense strand starting at position 533 of SEQ ID NO: 915748
gcaaauaguucuuccaaag

SEQ ID NO: 1102977 - RNA, 19 nt, Artificial Sequence
  Description of Artificial Sequence: Synthetic oligonucleotide
  Antisense strand to SEQ ID NO: 1102976
cuuuggaagaacuauuugc

SEQ ID NO: 1102978 - RNA, 19 nt, Artificial Sequence
  Description of Artificial Sequence: Synthetic oligonucleotide
  Sense strand starting at position 609 of SEQ ID NO: 915748
acagguugccaaggauaga

SEQ ID NO: 1102979 - RNA, 19 nt, Artificial Sequence
  Description of Artificial Sequence: Synthetic oligonucleotide
  Antisense strand to SEQ ID NO: 1102978
ucuauccuuggcaaccugu

SEQ ID NO: 1102980 - RNA, 19 nt, Artificial Sequence
  Description of Artificial Sequence: Synthetic oligonucleotide
  Sense strand starting at position 669 of SEQ ID NO: 915748
uagucagaagcuuaaaugu

SEQ ID NO: 1102981 - RNA, 19 nt, Artificial Sequence
  Description of Artificial Sequence: Synthetic oligonucleotide
  Antisense strand to SEQ ID NO: 1102980
acauuuaagcuucugacua

SEQ ID NO: 1102982 - RNA, 19 nt, Artificial Sequence
  Description of Artificial Sequence: Synthetic oligonucleotide
  Sense strand starting at position 679 of SEQ ID NO: 915748
cuuaaauguggauguguga

SEQ ID NO: 1102983 - RNA, 19 nt, Artificial Sequence
  Description of Artificial Sequence: Synthetic oligonucleotide
  Antisense strand to SEQ ID NO: 1102982
ucacacauccacauuuaag

SEQ ID NO: 1102984 - RNA, 19 nt, Artificial Sequence
  Description of Artificial Sequence: Synthetic oligonucleotide
  Sense strand starting at position 688 of SEQ ID NO: 915748
ggaugugugacagguaaca

SEQ ID NO: 1102985 - RNA, 19 nt, Artificial Sequence
  Description of Artificial Sequence: Synthetic oligonucleotide
  Antisense strand to SEQ ID NO: 1102984
uguuaccugucacacaucc

SEQ ID NO: 1102986 - RNA, 19 nt, Artificial Sequence
  Description of Artificial Sequence: Synthetic oligonucleotide
  Sense strand starting at position 725 of SEQ ID NO: 915748
ucuaaauguccauacuugu

SEQ ID NO: 1102987 - RNA, 19 nt, Artificial Sequence
  Description of Artificial Sequence: Synthetic oligonucleotide
  Antisense strand to SEQ ID NO: 1102986
acaaguauggacauuuaga

SEQ ID NO: 1102988 - RNA, 19 nt, Artificial Sequence
  Description of Artificial Sequence: Synthetic oligonucleotide
  Sense strand starting at position 764 of SEQ ID NO: 915748
guuucugaagagugaagaa

SEQ ID NO: 1102989 - RNA, 19 nt, Artificial Sequence
  Description of Artificial Sequence: Synthetic oligonucleotide
  Antisense strand to SEQ ID NO: 1102988
uucuucacucuucagaaac

SEQ ID NO: 1102990 - RNA, 19 nt, Artificial Sequence
  Description of Artificial Sequence: Synthetic oligonucleotide
  Sense strand starting at position 897 of SEQ ID NO: 915748
cgugguguacccagcagua

SEQ ID NO: 1102991 - RNA, 19 nt, Artificial Sequence
  Description of Artificial Sequence: Synthetic oligonucleotide
  Antisense strand to SEQ ID NO: 1102990
uacugcuggguacaccacg

SEQ ID NO: 1102992 - RNA, 19 nt, Artificial Sequence
  Description of Artificial Sequence: Synthetic oligonucleotide
  Sense strand starting at position 948 of SEQ ID NO: 915748
ucgggaagauuguuaaaua

SEQ ID NO: 1102993 - RNA, 19 nt, Artificial Sequence
  Description of Artificial Sequence: Synthetic oligonucleotide
  Antisense strand to SEQ ID NO: 1102992
uauuuaacaaucuucccga

SEQ ID NO: 1102994 - RNA, 19 nt, Artificial Sequence
  Description of Artificial Sequence: Synthetic oligonucleotide
  Sense strand starting at position 980 of SEQ ID NO: 915748
gccguagcccgagauuuca

SEQ ID NO: 1102995 - RNA, 19 nt, Artificial Sequence
  Description of Artificial Sequence: Synthetic oligonucleotide
  Antisense strand to SEQ ID NO: 1102994
ugaaaucucgggcuacggc

SEQ ID NO: 1102996 - RNA, 19 nt, Artificial Sequence
  Description of Artificial Sequence: Synthetic oligonucleotide
  Sense strand starting at position 1000 of SEQ ID NO: 915748
gucaguaaacccgggacau

SEQ ID NO: 1102997 - RNA, 19 nt, Artificial Sequence
  Description of Artificial Sequence: Synthetic oligonucleotide
  Antisense strand to SEQ ID NO: 1102996
augucccggguuuacugac

SEQ ID NO: 1102998 - RNA, 19 nt, Artificial Sequence
  Description of Artificial Sequence: Synthetic oligonucleotide
  Sense strand starting at position 1001 of SEQ ID NO: 915748
ucaguaaacccgggacauu

SEQ ID NO: 1102999 - RNA, 19 nt, Artificial Sequence
  Description of Artificial Sequence: Synthetic oligonucleotide
  Antisense strand to SEQ ID NO: 1102998
aaugucccggguuuacuga

SEQ ID NO: 1103000 - RNA, 19 nt, Artificial Sequence
  Description of Artificial Sequence: Synthetic oligonucleotide
  Sense strand starting at position 1013 of SEQ ID NO: 915748
ggacauugcccagacacga

SEQ ID NO: 1103001 - RNA, 19 nt, Artificial Sequence
  Description of Artificial Sequence: Synthetic oligonucleotide
  Antisense strand to SEQ ID NO: 1103000
ucgugucugggcaaugucc

SEQ ID NO: 1103002 - RNA, 19 nt, Artificial Sequence
  Description of Artificial Sequence: Synthetic oligonucleotide
  Sense strand starting at position 1108 of SEQ ID NO: 915748
guaaucugccacgaacaaa

SEQ ID NO: 1103003 - RNA, 19 nt, Artificial Sequence
  Description of Artificial Sequence: Synthetic oligonucleotide
  Antisense strand to SEQ ID NO: 1103002
uuuguucguggcagauuac

SEQ ID NO: 1103004 - RNA, 19 nt, Artificial Sequence
  Description of Artificial Sequence: Synthetic oligonucleotide
  Sense strand starting at position 1363 of SEQ ID NO: 915748
cugaauaaucgcuaggguu

SEQ ID NO: 1103005 - RNA, 19 nt, Artificial Sequence
  Description of Artificial Sequence: Synthetic oligonucleotide
  Antisense strand to SEQ ID NO: 1103004
aacccuagcgauuauucag

SEQ ID NO: 1103006 - RNA, 19 nt, Artificial Sequence
  Description of Artificial Sequence: Synthetic oligonucleotide
  Sense strand starting at position 1377 of SEQ ID NO: 915748
ggguuucuuccaggucaaa

SEQ ID NO: 1103007 - RNA, 19 nt, Artificial Sequence
  Description of Artificial Sequence: Synthetic oligonucleotide
  Antisense strand to SEQ ID NO: 1103006
uuugaccuggaagaaaccc

SEQ ID NO: 1103008 - RNA, 19 nt, Artificial Sequence
  Description of Artificial Sequence: Synthetic oligonucleotide
  Sense strand starting at position 1431 of SEQ ID NO: 915748
gugaauuaaucugcccaac

SEQ ID NO: 1103009 - RNA, 19 nt, Artificial Sequence
  Description of Artificial Sequence: Synthetic oligonucleotide
  Antisense strand to SEQ ID NO: 1103008
guugggcagauuaauucac

SEQ ID NO: 1103010 - RNA, 19 nt, Artificial Sequence
  Description of Artificial Sequence: Synthetic oligonucleotide
  Sense strand starting at position 2240 of SEQ ID NO: 915748
gaagaaggguugucucacu

SEQ ID NO: 1103011 - RNA, 19 nt, Artificial Sequence
  Description of Artificial Sequence: Synthetic oligonucleotide
  Antisense strand to SEQ ID NO: 1103010
agugagacaacccuucuuc

SEQ ID NO: 1103012 - RNA, 19 nt, Artificial Sequence
  Description of Artificial Sequence: Synthetic oligonucleotide
  Sense strand starting at position 2251 of SEQ ID NO: 915748
gucucacucccguuagcuu

SEQ ID NO: 1103013 - RNA, 19 nt, Artificial Sequence
  Description of Artificial Sequence: Synthetic oligonucleotide
  Antisense strand to SEQ ID NO: 1103012
aagcuaacgggagugagac

SEQ ID NO: 1103014 - RNA, 19 nt, Artificial Sequence
  Description of Artificial Sequence: Synthetic oligonucleotide
  Sense strand starting at position 2286 of SEQ ID NO: 915748
auguaaagucuccagugua

SEQ ID NO: 1103015 - RNA, 19 nt, Artificial Sequence
  Description of Artificial Sequence: Synthetic oligonucleotide
  Antisense strand to SEQ ID NO: 1103014
uacacuggagacuuuacau

SEQ ID NO: 1103016 - RNA, 19 nt, Artificial Sequence
  Description of Artificial Sequence: Synthetic oligonucleotide
  Sense strand starting at position 2326 of SEQ ID NO: 915748
auugauaaaugugugaguu

SEQ ID NO: 1103017 - RNA, 19 nt, Artificial Sequence
  Description of Artificial Sequence: Synthetic oligonucleotide
  Antisense strand to SEQ ID NO: 1103016
aacucacacauuuaucaau

SEQ ID NO: 1103018 - RNA, 19 nt, Artificial Sequence
  Description of Artificial Sequence: Synthetic oligonucleotide
  Sense strand starting at position 2327 of SEQ ID NO: 915748
uugauaaaugugugaguua

SEQ ID NO: 1103019 - RNA, 19 nt, Artificial Sequence
  Description of Artificial Sequence: Synthetic oligonucleotide
  Antisense strand to SEQ ID NO: 1103018
uaacucacacauuuaucaa

SEQ ID NO: 1103020 - RNA, 19 nt, Artificial Sequence
  Description of Artificial Sequence: Synthetic oligonucleotide
  Sense strand starting at position 2330 of SEQ ID NO: 915748
auaaaugugugaguuagaa

SEQ ID NO: 1103021 - RNA, 19 nt, Artificial Sequence
  Description of Artificial Sequence: Synthetic oligonucleotide
  Antisense strand to SEQ ID NO: 1103020
uucuaacucacacauuuau

SEQ ID NO: 1103022 - RNA, 19 nt, Artificial Sequence
  Description of Artificial Sequence: Synthetic oligonucleotide
  Sense strand starting at position 2358 of SEQ ID NO: 915748
auuuauccuuaggaaaguu

SEQ ID NO: 1103023 - RNA, 19 nt, Artificial Sequence
  Description of Artificial Sequence: Synthetic oligonucleotide
  Antisense strand to SEQ ID NO: 1103022
aacuuuccuaaggauaaau

SEQ ID NO: 1103024 - RNA, 19 nt, Artificial Sequence
  Description of Artificial Sequence: Synthetic oligonucleotide
  Sense strand starting at position 2436 of SEQ ID NO: 915748
ucucauaagguuuaugguu

SEQ ID NO: 1103025 - RNA, 19 nt, Artificial Sequence
  Description of Artificial Sequence: Synthetic oligonucleotide
  Antisense strand to SEQ ID NO: 1103024
aaccauaaaccuuaugaga

SEQ ID NO: 1103026 - RNA, 19 nt, Artificial Sequence
  Description of Artificial Sequence: Synthetic oligonucleotide
  Sense strand starting at position 2441 of SEQ ID NO: 915748
uaagguuuaugguuaaagu

SEQ ID NO: 1103027 - RNA, 19 nt, Artificial Sequence
  Description of Artificial Sequence: Synthetic oligonucleotide
  Antisense strand to SEQ ID NO: 1103026
acuuuaaccauaaaccuua

SEQ ID NO: 1103028 - RNA, 19 nt, Artificial Sequence
  Description of Artificial Sequence: Synthetic oligonucleotide
  Sense strand starting at position 2442 of SEQ ID NO: 915748
aagguuuaugguuaaagug

SEQ ID NO: 1103029 - RNA, 19 nt, Artificial Sequence
  Description of Artificial Sequence: Synthetic oligonucleotide
  Antisense strand to SEQ ID NO: 1103028
cacuuuaaccauaaaccuu

SEQ ID NO: 1103030 - RNA, 19 nt, Artificial Sequence
  Description of Artificial Sequence: Synthetic oligonucleotide
  Sense strand starting at position 2610 of SEQ ID NO: 915748
gcuuucagggaucagaguu

SEQ ID NO: 1103031 - RNA, 19 nt, Artificial Sequence
  Description of Artificial Sequence: Synthetic oligonucleotide
  Antisense strand to SEQ ID NO: 1103030
aacucugaucccugaaagc

SEQ ID NO: 1103032 - RNA, 19 nt, Artificial Sequence
  Description of Artificial Sequence: Synthetic oligonucleotide
  Sense strand starting at position 2810 of SEQ ID NO: 915748
gugucugugaaauaucuua

SEQ ID NO: 1103033 - RNA, 19 nt, Artificial Sequence
  Description of Artificial Sequence: Synthetic oligonucleotide
  Antisense strand to SEQ ID NO: 1103032
uaagauauuucacagacac

SEQ ID NO: 1103034 - RNA, 19 nt, Artificial Sequence
  Description of Artificial Sequence: Synthetic oligonucleotide
  Sense strand starting at position 2998 of SEQ ID NO: 915748
uugggaaagggcugguauu

SEQ ID NO: 1103035 - RNA, 19 nt, Artificial Sequence
  Description of Artificial Sequence: Synthetic oligonucleotide
  Antisense strand to SEQ ID NO: 1103034
aauaccagcccuuucccaa

SEQ ID NO: 1103036 - RNA, 19 nt, Artificial Sequence
  Description of Artificial Sequence: Synthetic oligonucleotide
  Sense strand starting at position 3185 of SEQ ID NO: 915748
gguaccuagucaguaggaa

SEQ ID NO: 1103037 - RNA, 19 nt, Artificial Sequence
  Description of Artificial Sequence: Synthetic oligonucleotide
  Antisense strand to SEQ ID NO: 1103036
uuccuacugacuagguacc

SEQ ID NO: 1103038 - RNA, 19 nt, Artificial Sequence
  Description of Artificial Sequence: Synthetic oligonucleotide
  Sense strand starting at position 3382 of SEQ ID NO: 915748
gaaacuugagcuuaaguuc

SEQ ID NO: 1103039 - RNA, 19 nt, Artificial Sequence
  Description of Artificial Sequence: Synthetic oligonucleotide
  Antisense strand to SEQ ID NO: 1103038
gaacuuaagcucaaguuuc

SEQ ID NO: 1103040 - RNA, 19 nt, Artificial Sequence
  Description of Artificial Sequence: Synthetic oligonucleotide
  Sense strand starting at position 3416 of SEQ ID NO: 915748
cggaacuucuuggcaaaug

SEQ ID NO: 1103041 - RNA, 19 nt, Artificial Sequence
  Description of Artificial Sequence: Synthetic oligonucleotide
  Antisense strand to SEQ ID NO: 1103040
cauuugccaagaaguuccg

SEQ ID NO: 1103042 - RNA, 19 nt, Artificial Sequence
  Description of Artificial Sequence: Synthetic oligonucleotide
  Sense strand starting at position 3449 of SEQ ID NO: 915748
accuguuuggcagggaaca

SEQ ID NO: 1103043 - RNA, 19 nt, Artificial Sequence
  Description of Artificial Sequence: Synthetic oligonucleotide
  Antisense strand to SEQ ID NO: 1103042
uguucccugccaaacaggu

SEQ ID NO: 1103044 - RNA, 19 nt, Artificial Sequence
  Description of Artificial Sequence: Synthetic oligonucleotide
  Sense strand starting at position 3450 of SEQ ID NO: 915748
ccuguuuggcagggaacaa

SEQ ID NO: 1103045 - RNA, 19 nt, Artificial Sequence
  Description of Artificial Sequence: Synthetic oligonucleotide
  Antisense strand to SEQ ID NO: 1103044
uuguucccugccaaacagg

SEQ ID NO: 1103046 - RNA, 19 nt, Artificial Sequence
  Description of Artificial Sequence: Synthetic oligonucleotide
  Sense strand starting at position 3593 of SEQ ID NO: 915748
cuguguccuguagagaaca

SEQ ID NO: 1103047 - RNA, 19 nt, Artificial Sequence
  Description of Artificial Sequence: Synthetic oligonucleotide
  Antisense strand to SEQ ID NO: 1103046
uguucucuacaggacacag

SEQ ID NO: 1103048 - RNA, 19 nt, Artificial Sequence
  Description of Artificial Sequence: Synthetic oligonucleotide
  Sense strand starting at position 3595 of SEQ ID NO: 915748
guguccuguagagaacaga

SEQ ID NO: 1103049 - RNA, 19 nt, Artificial Sequence
  Description of Artificial Sequence: Synthetic oligonucleotide
  Antisense strand to SEQ ID NO: 1103048
ucuguucucuacaggacac

SEQ ID NO: 1103050 - RNA, 19 nt, Artificial Sequence
  Description of Artificial Sequence: Synthetic oligonucleotide
  Sense strand starting at position 3624 of SEQ ID NO: 915748
ggcugaagucucuaugaug

SEQ ID NO: 1103051 - RNA, 19 nt, Artificial Sequence
  Description of Artificial Sequence: Synthetic oligonucleotide
  Antisense strand to SEQ ID NO: 1103050
caucauagagacuucagcc

SEQ ID NO: 1103052 - RNA, 19 nt, Artificial Sequence
  Description of Artificial Sequence: Synthetic oligonucleotide
  Sense strand starting at position 3961 of SEQ ID NO: 915748
gccugugggaauugaugga

SEQ ID NO: 1103053 - RNA, 19 nt, Artificial Sequence
  Description of Artificial Sequence: Synthetic oligonucleotide
  Antisense strand to SEQ ID NO: 1103052
uccaucaauucccacaggc

SEQ ID NO: 1103054 - RNA, 19 nt, Artificial Sequence
  Description of Artificial Sequence: Synthetic oligonucleotide
  Sense strand starting at position 32 of SEQ ID NO: 915749
agcagugacuuggcagaga

SEQ ID NO: 1103055 - RNA, 19 nt, Artificial Sequence
  Description of Artificial Sequence: Synthetic oligonucleotide
  Antisense strand to SEQ ID NO: 1103054
ucucugccaagucacugcu

SEQ ID NO: 1103056 - RNA, 19 nt, Artificial Sequence
  Description of Artificial Sequence: Synthetic oligonucleotide
  Sense strand starting at position 122 of SEQ ID NO: 915749
auacauauguauccaaagu

SEQ ID NO: 1103057 - RNA, 19 nt, Artificial Sequence
  Description of Artificial Sequence: Synthetic oligonucleotide
  Antisense strand to SEQ ID NO: 1103056
acuuuggauacauauguau

SEQ ID NO: 1103058 - RNA, 19 nt, Artificial Sequence
  Description of Artificial Sequence: Synthetic oligonucleotide
  Sense strand starting at position 290 of SEQ ID NO: 915749
aggagaagucaaugucaua

SEQ ID NO: 1103059 - RNA, 19 nt, Artificial Sequence
  Description of Artificial Sequence: Synthetic oligonucleotide
  Antisense strand to SEQ ID NO: 1103058
uaugacauugacuucuccu

SEQ ID NO: 1103060 - RNA, 19 nt, Artificial Sequence
  Description of Artificial Sequence: Synthetic oligonucleotide
  Sense strand starting at position 297 of SEQ ID NO: 915749
gucaaugucauagaguaua

SEQ ID NO: 1103061 - RNA, 19 nt, Artificial Sequence
  Description of Artificial Sequence: Synthetic oligonucleotide
  Antisense strand to SEQ ID NO: 1103060
uauacucuaugacauugac

SEQ ID NO: 1103062 - RNA, 19 nt, Artificial Sequence
  Description of Artificial Sequence: Synthetic oligonucleotide
  Sense strand starting at position 464 of SEQ ID NO: 915749
acucacauauggucuuaca

SEQ ID NO: 1103063 - RNA, 19 nt, Artificial Sequence
  Description of Artificial Sequence: Synthetic oligonucleotide
  Antisense strand to SEQ ID NO: 1103062
uguaagaccauaugugagu

SEQ ID NO: 1103064 - RNA, 19 nt, Artificial Sequence
  Description of Artificial Sequence: Synthetic oligonucleotide
  Sense strand starting at position 549 of SEQ ID NO: 915749
aggaaacuguucuuuaugu

SEQ ID NO: 1103065 - RNA, 19 nt, Artificial Sequence
  Description of Artificial Sequence: Synthetic oligonucleotide
  Antisense strand to SEQ ID NO: 1103064
acauaaagaacaguuuccu

SEQ ID NO: 1103066 - RNA, 19 nt, Artificial Sequence
  Description of Artificial Sequence: Synthetic oligonucleotide
  Sense strand starting at position 550 of SEQ ID NO: 915749
ggaaacuguucuuuaugua

SEQ ID NO: 1103067 - RNA, 19 nt, Artificial Sequence
  Description of Artificial Sequence: Synthetic oligonucleotide
  Antisense strand to SEQ ID NO: 1103066
uacauaaagaacaguuucc

SEQ ID NO: 1103068 - RNA, 19 nt, Artificial Sequence
  Description of Artificial Sequence: Synthetic oligonucleotide
  Sense strand starting at position 607 of SEQ ID NO: 915749
uuucuuagauaugcugaaa

SEQ ID NO: 1103069 - RNA, 19 nt, Artificial Sequence
  Description of Artificial Sequence: Synthetic oligonucleotide
  Antisense strand to SEQ ID NO: 1103068
uuucagcauaucuaagaaa

SEQ ID NO: 1103070 - RNA, 19 nt, Artificial Sequence
  Description of Artificial Sequence: Synthetic oligonucleotide
  Sense strand starting at position 632 of SEQ ID NO: 915749
caugaauaccuaggcggau

SEQ ID NO: 1103071 - RNA, 19 nt, Artificial Sequence
  Description of Artificial Sequence: Synthetic oligonucleotide
  Antisense strand to SEQ ID NO: 1103070
auccgccuagguauucaug

SEQ ID NO: 1103072 - RNA, 19 nt, Artificial Sequence
  Description of Artificial Sequence: Synthetic oligonucleotide
  Sense strand starting at position 633 of SEQ ID NO: 915749
augaauaccuaggcggauu

SEQ ID NO: 1103073 - RNA, 19 nt, Artificial Sequence
  Description of Artificial Sequence: Synthetic oligonucleotide
  Antisense strand to SEQ ID NO: 1103072
aauccgccuagguauucau

SEQ ID NO: 1103074 - RNA, 19 nt, Artificial Sequence
  Description of Artificial Sequence: Synthetic oligonucleotide
  Sense strand starting at position 689 of SEQ ID NO: 915749
auuacauuacacggcaaau

SEQ ID NO: 1103075 - RNA, 19 nt, Artificial Sequence
  Description of Artificial Sequence: Synthetic oligonucleotide
  Antisense strand to SEQ ID NO: 1103074
auuugccguguaauguaau

SEQ ID NO: 1103076 - RNA, 19 nt, Artificial Sequence
  Description of Artificial Sequence: Synthetic oligonucleotide
  Sense strand starting at position 810 of SEQ ID NO: 915749
uuuagaucagugggcuaaa

SEQ ID NO: 1103077 - RNA, 19 nt, Artificial Sequence
  Description of Artificial Sequence: Synthetic oligonucleotide
  Antisense strand to SEQ ID NO: 1103076
uuuagcccacugaucuaaa

SEQ ID NO: 1103078 - RNA, 19 nt, Artificial Sequence
  Description of Artificial Sequence: Synthetic oligonucleotide
  Sense strand starting at position 811 of SEQ ID NO: 915749
uuagaucagugggcuaaau

SEQ ID NO: 1103079 - RNA, 19 nt, Artificial Sequence
  Description of Artificial Sequence: Synthetic oligonucleotide
  Antisense strand to SEQ ID NO: 1103078
auuuagcccacugaucuaa

SEQ ID NO: 1103080 - RNA, 19 nt, Artificial Sequence
  Description of Artificial Sequence: Synthetic oligonucleotide
  Sense strand starting at position 853 of SEQ ID NO: 915749
ucuaaauguuugcuagaca

SEQ ID NO: 1103081 - RNA, 19 nt, Artificial Sequence
  Description of Artificial Sequence: Synthetic oligonucleotide
  Antisense strand to SEQ ID NO: 1103080
ugucuagcaaacauuuaga

SEQ ID NO: 1103082 - RNA, 19 nt, Artificial Sequence
  Description of Artificial Sequence: Synthetic oligonucleotide
  Sense strand starting at position 874 of SEQ ID NO: 915749
ucaagauuguccucaagug

SEQ ID NO: 1103083 - RNA, 19 nt, Artificial Sequence
  Description of Artificial Sequence: Synthetic oligonucleotide
  Antisense strand to SEQ ID NO: 1103082
cacuugaggacaaucuuga

SEQ ID NO: 1103084 - RNA, 19 nt, Artificial Sequence
  Description of Artificial Sequence: Synthetic oligonucleotide
  Sense strand starting at position 875 of SEQ ID NO: 915749
caagauuguccucaagugu

SEQ ID NO: 1103085 - RNA, 19 nt, Artificial Sequence
  Description of Artificial Sequence: Synthetic oligonucleotide
  Antisense strand to SEQ ID NO: 1103084
acacuugaggacaaucuug

SEQ ID NO: 1103086 - RNA, 19 nt, Artificial Sequence
  Description of Artificial Sequence: Synthetic oligonucleotide
  Sense strand starting at position 890 of SEQ ID NO: 915749
guguucgaagucaguaagu

SEQ ID NO: 1103087 - RNA, 19 nt, Artificial Sequence
  Description of Artificial Sequence: Synthetic oligonucleotide
  Antisense strand to SEQ ID NO: 1103086
acuuacugacuucgaacac

SEQ ID NO: 1103088 - RNA, 19 nt, Artificial Sequence
  Description of Artificial Sequence: Synthetic oligonucleotide
  Sense strand starting at position 900 of SEQ ID NO: 915749
ucaguaaguuuaccaauau

SEQ ID NO: 1103089 - RNA, 19 nt, Artificial Sequence
  Description of Artificial Sequence: Synthetic oligonucleotide
  Antisense strand to SEQ ID NO: 1103088
auauugguaaacuuacuga

SEQ ID NO: 1103090 - RNA, 19 nt, Artificial Sequence
  Description of Artificial Sequence: Synthetic oligonucleotide
  Sense strand starting at position 911 of SEQ ID NO: 915749
accaauauucuguagcgga

SEQ ID NO: 1103091 - RNA, 19 nt, Artificial Sequence
  Description of Artificial Sequence: Synthetic oligonucleotide
  Antisense strand to SEQ ID NO: 1103090
uccgcuacagaauauuggu

SEQ ID NO: 1103092 - RNA, 19 nt, Artificial Sequence
  Description of Artificial Sequence: Synthetic oligonucleotide
  Sense strand starting at position 1190 of SEQ ID NO: 915749
gggaguguuucuauguugu

SEQ ID NO: 1103093 - RNA, 19 nt, Artificial Sequence
  Description of Artificial Sequence: Synthetic oligonucleotide
  Antisense strand to SEQ ID NO: 1103092
acaacauagaaacacuccc

SEQ ID NO: 1103094 - RNA, 19 nt, Artificial Sequence
  Description of Artificial Sequence: Synthetic oligonucleotide
  Sense strand starting at position 1308 of SEQ ID NO: 915749
acgaaugguccacaggcua

SEQ ID NO: 1103095 - RNA, 19 nt, Artificial Sequence
  Description of Artificial Sequence: Synthetic oligonucleotide
  Antisense strand to SEQ ID NO: 1103094
uagccuguggaccauucgu

SEQ ID NO: 1103096 - RNA, 19 nt, Artificial Sequence
  Description of Artificial Sequence: Synthetic oligonucleotide
  Sense strand starting at position 2526 of SEQ ID NO: 915749
caauguggucuguacaaau

SEQ ID NO: 1103097 - RNA, 19 nt, Artificial Sequence
  Description of Artificial Sequence: Synthetic oligonucleotide
  Antisense strand to SEQ ID NO: 1103096
auuuguacagaccacauug

SEQ ID NO: 1103098 - RNA, 19 nt, Artificial Sequence
  Description of Artificial Sequence: Synthetic oligonucleotide
  Sense strand starting at position 2535 of SEQ ID NO: 915749
cuguacaaaucauugagau

SEQ ID NO: 1103099 - RNA, 19 nt, Artificial Sequence
  Description of Artificial Sequence: Synthetic oligonucleotide
  Antisense strand to SEQ ID NO: 1103098
aucucaaugauuuguacag

SEQ ID NO: 1103100 - RNA, 19 nt, Artificial Sequence
  Description of Artificial Sequence: Synthetic oligonucleotide
  Sense strand starting at position 2582 of SEQ ID NO: 915749
cuuggaaaucggcauguua

SEQ ID NO: 1103101 - RNA, 19 nt, Artificial Sequence
  Description of Artificial Sequence: Synthetic oligonucleotide
  Antisense strand to SEQ ID NO: 1103100
uaacaugccgauuuccaag

SEQ ID NO: 1103102 - RNA, 19 nt, Artificial Sequence
  Description of Artificial Sequence: Synthetic oligonucleotide
  Sense strand starting at position 2794 of SEQ ID NO: 915749
uaacaauagccucagguga

SEQ ID NO: 1103103 - RNA, 19 nt, Artificial Sequence
  Description of Artificial Sequence: Synthetic oligonucleotide
  Antisense strand to SEQ ID NO: 1103102
ucaccugaggcuauuguua

SEQ ID NO: 1103104 - RNA, 19 nt, Artificial Sequence
  Description of Artificial Sequence: Synthetic oligonucleotide
  Sense strand starting at position 2899 of SEQ ID NO: 915749
cuugcuagauaugucauuu

SEQ ID NO: 1103105 - RNA, 19 nt, Artificial Sequence
  Description of Artificial Sequence: Synthetic oligonucleotide
  Antisense strand to SEQ ID NO: 1103104
aaaugacauaucuagcaag

SEQ ID NO: 1103106 - RNA, 19 nt, Artificial Sequence
  Description of Artificial Sequence: Synthetic oligonucleotide
  Sense strand starting at position 2995 of SEQ ID NO: 915749
augagaauauuguuuaacc

SEQ ID NO: 1103107 - RNA, 19 nt, Artificial Sequence
  Description of Artificial Sequence: Synthetic oligonucleotide
  Antisense strand to SEQ ID NO: 1103106
gguuaaacaauauucucau

SEQ ID NO: 1103108 - RNA, 19 nt, Artificial Sequence
  Description of Artificial Sequence: Synthetic oligonucleotide
  Sense strand starting at position 2996 of SEQ ID NO: 915749
ugagaauauuguuuaacca

SEQ ID NO: 1103109 - RNA, 19 nt, Artificial Sequence
  Description of Artificial Sequence: Synthetic oligonucleotide
  Antisense strand to SEQ ID NO: 1103108
ugguuaaacaauauucuca

SEQ ID NO: 1103110 - RNA, 19 nt, Artificial Sequence
  Description of Artificial Sequence: Synthetic oligonucleotide
  Sense strand starting at position 3046 of SEQ ID NO: 915749
uugcuaaguguuuaaacac

SEQ ID NO: 1103111 - RNA, 19 nt, Artificial Sequence
  Description of Artificial Sequence: Synthetic oligonucleotide
  Antisense strand to SEQ ID NO: 1103110
guguuuaaacacuuagcaa

SEQ ID NO: 1103112 - RNA, 19 nt, Artificial Sequence
  Description of Artificial Sequence: Synthetic oligonucleotide
  Sense strand starting at position 3066 of SEQ ID NO: 915749
acgcuauagaaauguagaa

SEQ ID NO: 1103113 - RNA, 19 nt, Artificial Sequence
  Description of Artificial Sequence: Synthetic oligonucleotide
  Antisense strand to SEQ ID NO: 1103112
uucuacauuucuauagcgu

SEQ ID NO: 1103114 - RNA, 19 nt, Artificial Sequence
  Description of Artificial Sequence: Synthetic oligonucleotide
  Sense strand starting at position 3207 of SEQ ID NO: 915749
gauagucucuggguaugga

SEQ ID NO: 1103115 - RNA, 19 nt, Artificial Sequence
  Description of Artificial Sequence: Synthetic oligonucleotide
  Antisense strand to SEQ ID NO: 1103114
uccauacccagagacuauc

SEQ ID NO: 1103116 - RNA, 19 nt, Artificial Sequence
  Description of Artificial Sequence: Synthetic oligonucleotide
  Sense strand starting at position 3208 of SEQ ID NO: 915749
auagucucuggguauggaa

SEQ ID NO: 1103117 - RNA, 19 nt, Artificial Sequence
  Description of Artificial Sequence: Synthetic oligonucleotide
  Antisense strand to SEQ ID NO: 1103116
uuccauacccagagacuau

SEQ ID NO: 1103118 - RNA, 19 nt, Artificial Sequence
  Description of Artificial Sequence: Synthetic oligonucleotide
  Sense strand starting at position 3210 of SEQ ID NO: 915749
agucucuggguauggaaau

SEQ ID NO: 1103119 - RNA, 19 nt, Artificial Sequence
  Description of Artificial Sequence: Synthetic oligonucleotide
  Antisense strand to SEQ ID NO: 1103118
auuuccauacccagagacu

SEQ ID NO: 1103120 - RNA, 19 nt, Artificial Sequence
  Description of Artificial Sequence: Synthetic oligonucleotide
  Sense strand starting at position 3256 of SEQ ID NO: 915749
ugagauauuauuggcaggu

SEQ ID NO: 1103121 - RNA, 19 nt, Artificial Sequence
  Description of Artificial Sequence: Synthetic oligonucleotide
  Antisense strand to SEQ ID NO: 1103120
accugccaauaauaucuca

SEQ ID NO: 1103122 - RNA, 19 nt, Artificial Sequence
  Description of Artificial Sequence: Synthetic oligonucleotide
  Sense strand starting at position 3257 of SEQ ID NO: 915749
gagauauuauuggcagguu

SEQ ID NO: 1103123 - RNA, 19 nt, Artificial Sequence
  Description of Artificial Sequence: Synthetic oligonucleotide
  Antisense strand to SEQ ID NO: 1103122
aaccugccaauaauaucuc

SEQ ID NO: 1103124 - RNA, 19 nt, Artificial Sequence
  Description of Artificial Sequence: Synthetic oligonucleotide
  Sense strand starting at position 3260 of SEQ ID NO: 915749
auauuauuggcagguuaac

SEQ ID NO: 1103125 - RNA, 19 nt, Artificial Sequence
  Description of Artificial Sequence: Synthetic oligonucleotide
  Antisense strand to SEQ ID NO: 1103124
guuaaccugccaauaauau

SEQ ID NO: 1103126 - RNA, 19 nt, Artificial Sequence
  Description of Artificial Sequence: Synthetic oligonucleotide
  Sense strand starting at position 3311 of SEQ ID NO: 915749
ugcauauguacaggagaga

SEQ ID NO: 1103127 - RNA, 19 nt, Artificial Sequence
  Description of Artificial Sequence: Synthetic oligonucleotide
  Antisense strand to SEQ ID NO: 1103126
ucucuccuguacauaugca

SEQ ID NO: 1103128 - RNA, 19 nt, Artificial Sequence
  Description of Artificial Sequence: Synthetic oligonucleotide
  Sense strand starting at position 3725 of SEQ ID NO: 915749
uuucuuggaguuuagacau

SEQ ID NO: 1103129 - RNA, 19 nt, Artificial Sequence
  Description of Artificial Sequence: Synthetic oligonucleotide
  Antisense strand to SEQ ID NO: 1103128
augucuaaacuccaagaaa

SEQ ID NO: 1103130 - RNA, 19 nt, Artificial Sequence
  Description of Artificial Sequence: Synthetic oligonucleotide
  Sense strand starting at position 3852 of SEQ ID NO: 915749
guguauaaagcugacauca

SEQ ID NO: 1103131 - RNA, 19 nt, Artificial Sequence
  Description of Artificial Sequence: Synthetic oligonucleotide
  Antisense strand to SEQ ID NO: 1103130
ugaugucagcuuuauacac

SEQ ID NO: 1103132 - RNA, 19 nt, Artificial Sequence
  Description of Artificial Sequence: Synthetic oligonucleotide
  Sense strand starting at position 3970 of SEQ ID NO: 915749
uaaguuggccaagaucaua

SEQ ID NO: 1103133 - RNA, 19 nt, Artificial Sequence
  Description of Artificial Sequence: Synthetic oligonucleotide
  Antisense strand to SEQ ID NO: 1103132
uaugaucuuggccaacuua

SEQ ID NO: 1103134 - RNA, 19 nt, Artificial Sequence
  Description of Artificial Sequence: Synthetic oligonucleotide
  Sense strand starting at position 247 of SEQ ID NO: 915750
gcugccugacuguaugaua

SEQ ID NO: 1103135 - RNA, 19 nt, Artificial Sequence
  Description of Artificial Sequence: Synthetic oligonucleotide
  Antisense strand to SEQ ID NO: 1103134
uaucauacagucaggcagc

SEQ ID NO: 1103136 - RNA, 19 nt, Artificial Sequence
  Description of Artificial Sequence: Synthetic oligonucleotide
  Sense strand starting at position 259 of SEQ ID NO: 915750
uaugauagugggcaaguua

SEQ ID NO: 1103137 - RNA, 19 nt, Artificial Sequence
  Description of Artificial Sequence: Synthetic oligonucleotide
  Antisense strand to SEQ ID NO: 1103136
uaacuugcccacuaucaua

SEQ ID NO: 1103138 - RNA, 19 nt, Artificial Sequence
  Description of Artificial Sequence: Synthetic oligonucleotide
  Sense strand starting at position 361 of SEQ ID NO: 915750
gauuuacuaguuuguaugu

SEQ ID NO: 1103139 - RNA, 19 nt, Artificial Sequence
  Description of Artificial Sequence: Synthetic oligonucleotide
  Antisense strand to SEQ ID NO: 1103138
acauacaaacuaguaaauc

SEQ ID NO: 1103140 - RNA, 19 nt, Artificial Sequence
  Description of Artificial Sequence: Synthetic oligonucleotide
  Sense strand starting at position 366 of SEQ ID NO: 915750
acuaguuuguauguaaagu

SEQ ID NO: 1103141 - RNA, 19 nt, Artificial Sequence
  Description of Artificial Sequence: Synthetic oligonucleotide
  Antisense strand to SEQ ID NO: 1103140
acuuuacauacaaacuagu

SEQ ID NO: 1103142 - RNA, 19 nt, Artificial Sequence
  Description of Artificial Sequence: Synthetic oligonucleotide
  Sense strand starting at position 367 of SEQ ID NO: 915750
cuaguuuguauguaaagug

SEQ ID NO: 1103143 - RNA, 19 nt, Artificial Sequence
  Description of Artificial Sequence: Synthetic oligonucleotide
  Antisense strand to SEQ ID NO: 1103142
cacuuuacauacaaacuag

SEQ ID NO: 1103144 - RNA, 19 nt, Artificial Sequence
  Description of Artificial Sequence: Synthetic oligonucleotide
  Sense strand starting at position 383 of SEQ ID NO: 915750
gugauuaaugccugguaca

SEQ ID NO: 1103145 - RNA, 19 nt, Artificial Sequence
  Description of Artificial Sequence: Synthetic oligonucleotide
  Antisense strand to SEQ ID NO: 1103144
uguaccaggcauuaaucac

SEQ ID NO: 1103146 - RNA, 19 nt, Artificial Sequence
  Description of Artificial Sequence: Synthetic oligonucleotide
  Sense strand starting at position 384 of SEQ ID NO: 915750
ugauuaaugccugguacau

SEQ ID NO: 1103147 - RNA, 19 nt, Artificial Sequence
  Description of Artificial Sequence: Synthetic oligonucleotide
  Antisense strand to SEQ ID NO: 1103146
auguaccaggcauuaauca

SEQ ID NO: 1103148 - RNA, 19 nt, Artificial Sequence
  Description of Artificial Sequence: Synthetic oligonucleotide
  Sense strand starting at position 396 of SEQ ID NO: 915750
gguacauagugacugcuau

SEQ ID NO: 1103149 - RNA, 19 nt, Artificial Sequence
  Description of Artificial Sequence: Synthetic oligonucleotide
  Antisense strand to SEQ ID NO: 1103148
auagcagucacuauguacc

SEQ ID NO: 1103150 - RNA, 19 nt, Artificial Sequence
  Description of Artificial Sequence: Synthetic oligonucleotide
  Sense strand starting at position 397 of SEQ ID NO: 915750
guacauagugacugcuaua

SEQ ID NO: 1103151 - RNA, 19 nt, Artificial Sequence
  Description of Artificial Sequence: Synthetic oligonucleotide
  Antisense strand to SEQ ID NO: 1103150
uauagcagucacuauguac

SEQ ID NO: 1103152 - RNA, 19 nt, Artificial Sequence
  Description of Artificial Sequence: Synthetic oligonucleotide
  Sense strand starting at position 415 of SEQ ID NO: 915750
auaaauguuggugauccau

SEQ ID NO: 1103153 - RNA, 19 nt, Artificial Sequence
  Description of Artificial Sequence: Synthetic oligonucleotide
  Antisense strand to SEQ ID NO: 1103152
auggaucaccaacauuuau

SEQ ID NO: 1103154 - RNA, 19 nt, Artificial Sequence
  Description of Artificial Sequence: Synthetic oligonucleotide
  Sense strand starting at position 417 of SEQ ID NO: 915750
aaauguuggugauccauau

SEQ ID NO: 1103155 - RNA, 19 nt, Artificial Sequence
  Description of Artificial Sequence: Synthetic oligonucleotide
  Antisense strand to SEQ ID NO: 1103154
auauggaucaccaacauuu

SEQ ID NO: 1103156 - RNA, 19 nt, Artificial Sequence
  Description of Artificial Sequence: Synthetic oligonucleotide
  Sense strand starting at position 421 of SEQ ID NO: 915750
guuggugauccauauaccu

SEQ ID NO: 1103157 - RNA, 19 nt, Artificial Sequence
  Description of Artificial Sequence: Synthetic oligonucleotide
  Antisense strand to SEQ ID NO: 1103156
agguauauggaucaccaac

SEQ ID NO: 1103158 - RNA, 19 nt, Artificial Sequence
  Description of Artificial Sequence: Synthetic oligonucleotide
  Sense strand starting at position 463 of SEQ ID NO: 915750
agccuacugccacauagua

SEQ ID NO: 1103159 - RNA, 19 nt, Artificial Sequence
  Description of Artificial Sequence: Synthetic oligonucleotide
  Antisense strand to SEQ ID NO: 1103158
uacuauguggcaguaggcu

SEQ ID NO: 1103160 - RNA, 19 nt, Artificial Sequence
  Description of Artificial Sequence: Synthetic oligonucleotide
  Sense strand starting at position 479 of SEQ ID NO: 915750
guaggcucucauuaacugu

SEQ ID NO: 1103161 - RNA, 19 nt, Artificial Sequence
  Description of Artificial Sequence: Synthetic oligonucleotide
  Antisense strand to SEQ ID NO: 1103160
acaguuaaugagagccuac

SEQ ID NO: 1103162 - RNA, 19 nt, Artificial Sequence
  Description of Artificial Sequence: Synthetic oligonucleotide
  Sense strand starting at position 497 of SEQ ID NO: 915750
uuccuuaaucaauggaaug

SEQ ID NO: 1103163 - RNA, 19 nt, Artificial Sequence
  Description of Artificial Sequence: Synthetic oligonucleotide
  Antisense strand to SEQ ID NO: 1103162
cauuccauugauuaaggaa

SEQ ID NO: 1103164 - RNA, 19 nt, Artificial Sequence
  Description of Artificial Sequence: Synthetic oligonucleotide
  Sense strand starting at position 574 of SEQ ID NO: 915750
ccuaccuuauagguaagaa

SEQ ID NO: 1103165 - RNA, 19 nt, Artificial Sequence
  Description of Artificial Sequence: Synthetic oligonucleotide
  Antisense strand to SEQ ID NO: 1103164
uucuuaccuauaagguagg

SEQ ID NO: 1103166 - RNA, 19 nt, Artificial Sequence
  Description of Artificial Sequence: Synthetic oligonucleotide
  Sense strand starting at position 984 of SEQ ID NO: 915750
gccagagcugacuggguau

SEQ ID NO: 1103167 - RNA, 19 nt, Artificial Sequence
  Description of Artificial Sequence: Synthetic oligonucleotide
  Antisense strand to SEQ ID NO: 1103166
auacccagucagcucuggc

SEQ ID NO: 1103168 - RNA, 19 nt, Artificial Sequence
  Description of Artificial Sequence: Synthetic oligonucleotide
  Sense strand starting at position 1158 of SEQ ID NO: 915750
uaaagaaguugcucaaguu

SEQ ID NO: 1103169 - RNA, 19 nt, Artificial Sequence
  Description of Artificial Sequence: Synthetic oligonucleotide
  Antisense strand to SEQ ID NO: 1103168
aacuugagcaacuucuuua

SEQ ID NO: 1103170 - RNA, 19 nt, Artificial Sequence
  Description of Artificial Sequence: Synthetic oligonucleotide
  Sense strand starting at position 1159 of SEQ ID NO: 915750
aaagaaguugcucaaguuc

SEQ ID NO: 1103171 - RNA, 19 nt, Artificial Sequence
  Description of Artificial Sequence: Synthetic oligonucleotide
  Antisense strand to SEQ ID NO: 1103170
gaacuugagcaacuucuuu

SEQ ID NO: 1103172 - RNA, 19 nt, Artificial Sequence
  Description of Artificial Sequence: Synthetic oligonucleotide
  Sense strand starting at position 1333 of SEQ ID NO: 915750
cuguguuucggccugaguu

SEQ ID NO: 1103173 - RNA, 19 nt, Artificial Sequence
  Description of Artificial Sequence: Synthetic oligonucleotide
  Antisense strand to SEQ ID NO: 1103172
aacucaggccgaaacacag

SEQ ID NO: 1103174 - RNA, 19 nt, Artificial Sequence
  Description of Artificial Sequence: Synthetic oligonucleotide
  Sense strand starting at position 1362 of SEQ ID NO: 915750
aggcuuuacuccucuagaa

SEQ ID NO: 1103175 - RNA, 19 nt, Artificial Sequence
  Description of Artificial Sequence: Synthetic oligonucleotide
  Antisense strand to SEQ ID NO: 1103174
uucuagaggaguaaagccu

SEQ ID NO: 1103176 - RNA, 19 nt, Artificial Sequence
  Description of Artificial Sequence: Synthetic oligonucleotide
  Sense strand starting at position 1432 of SEQ ID NO: 915750
gcacucacugcggaagagu

SEQ ID NO: 1103177 - RNA, 19 nt, Artificial Sequence
  Description of Artificial Sequence: Synthetic oligonucleotide
  Antisense strand to SEQ ID NO: 1103176
acucuuccgcagugagugc

SEQ ID NO: 1103178 - RNA, 19 nt, Artificial Sequence
  Description of Artificial Sequence: Synthetic oligonucleotide
  Sense strand starting at position 1441 of SEQ ID NO: 915750
gcggaagaguuaguuugga

SEQ ID NO: 1103179 - RNA, 19 nt, Artificial Sequence
  Description of Artificial Sequence: Synthetic oligonucleotide
  Antisense strand to SEQ ID NO: 1103178
uccaaacuaacucuuccgc

SEQ ID NO: 1103180 - RNA, 19 nt, Artificial Sequence
  Description of Artificial Sequence: Synthetic oligonucleotide
  Sense strand starting at position 1489 of SEQ ID NO: 915750
cugguugugcuugcuauau

SEQ ID NO: 1103181 - RNA, 19 nt, Artificial Sequence
  Description of Artificial Sequence: Synthetic oligonucleotide
  Antisense strand to SEQ ID NO: 1103180
auauagcaagcacaaccag

SEQ ID NO: 1103182 - RNA, 19 nt, Artificial Sequence
  Description of Artificial Sequence: Synthetic oligonucleotide
  Sense strand starting at position 1611 of SEQ ID NO: 915750
ggcaguuaagcuuggauca

SEQ ID NO: 1103183 - RNA, 19 nt, Artificial Sequence
  Description of Artificial Sequence: Synthetic oligonucleotide
  Antisense strand to SEQ ID NO: 1103182
ugauccaagcuuaacugcc

SEQ ID NO: 1103184 - RNA, 19 nt, Artificial Sequence
  Description of Artificial Sequence: Synthetic oligonucleotide
  Sense strand starting at position 1612 of SEQ ID NO: 915750
gcaguuaagcuuggaucau

SEQ ID NO: 1103185 - RNA, 19 nt, Artificial Sequence
  Description of Artificial Sequence: Synthetic oligonucleotide
  Antisense strand to SEQ ID NO: 1103184
augauccaagcuuaacugc

SEQ ID NO: 1103186 - RNA, 19 nt, Artificial Sequence
  Description of Artificial Sequence: Synthetic oligonucleotide
  Sense strand starting at position 1631 of SEQ ID NO: 915750
acagucaauuaagugguaa

SEQ ID NO: 1103187 - RNA, 19 nt, Artificial Sequence
  Description of Artificial Sequence: Synthetic oligonucleotide
  Antisense strand to SEQ ID NO: 1103186
uuaccacuuaauugacugu

SEQ ID NO: 1103188 - RNA, 19 nt, Artificial Sequence
  Description of Artificial Sequence: Synthetic oligonucleotide
  Sense strand starting at position 1633 of SEQ ID NO: 915750
agucaauuaagugguaagu

SEQ ID NO: 1103189 - RNA, 19 nt, Artificial Sequence
  Description of Artificial Sequence: Synthetic oligonucleotide
  Antisense strand to SEQ ID NO: 1103188
acuuaccacuuaauugacu

SEQ ID NO: 1103190 - RNA, 19 nt, Artificial Sequence
  Description of Artificial Sequence: Synthetic oligonucleotide
  Sense strand starting at position 2079 of SEQ ID NO: 915750
gcaggaaguugaucugaaa

SEQ ID NO: 1103191 - RNA, 19 nt, Artificial Sequence
  Description of Artificial Sequence: Synthetic oligonucleotide
  Antisense strand to SEQ ID NO: 1103190
uuucagaucaacuuccugc

SEQ ID NO: 1103192 - RNA, 19 nt, Artificial Sequence
  Description of Artificial Sequence: Synthetic oligonucleotide
  Sense strand starting at position 2082 of SEQ ID NO: 915750
ggaaguugaucugaaagga

SEQ ID NO: 1103193 - RNA, 19 nt, Artificial Sequence
  Description of Artificial Sequence: Synthetic oligonucleotide
  Antisense strand to SEQ ID NO: 1103192
uccuuucagaucaacuucc

SEQ ID NO: 1103194 - RNA, 19 nt, Artificial Sequence
  Description of Artificial Sequence: Synthetic oligonucleotide
  Sense strand starting at position 2140 of SEQ ID NO: 915750
ggcuguagcauuugcucaa

SEQ ID NO: 1103195 - RNA, 19 nt, Artificial Sequence
  Description of Artificial Sequence: Synthetic oligonucleotide
  Antisense strand to SEQ ID NO: 1103194
uugagcaaaugcuacagcc

SEQ ID NO: 1103196 - RNA, 19 nt, Artificial Sequence
  Description of Artificial Sequence: Synthetic oligonucleotide
  Sense strand starting at position 2186 of SEQ ID NO: 915750
uuggcagacuacuugguua

SEQ ID NO: 1103197 - RNA, 19 nt, Artificial Sequence
  Description of Artificial Sequence: Synthetic oligonucleotide
  Antisense strand to SEQ ID NO: 1103196
uaaccaaguagucugccaa

SEQ ID NO: 1103198 - RNA, 19 nt, Artificial Sequence
  Description of Artificial Sequence: Synthetic oligonucleotide
  Sense strand starting at position 2188 of SEQ ID NO: 915750
ggcagacuacuugguuauu

SEQ ID NO: 1103199 - RNA, 19 nt, Artificial Sequence
  Description of Artificial Sequence: Synthetic oligonucleotide
  Antisense strand to SEQ ID NO: 1103198
aauaaccaaguagucugcc

SEQ ID NO: 1103200 - RNA, 19 nt, Artificial Sequence
  Description of Artificial Sequence: Synthetic oligonucleotide
  Sense strand starting at position 2291 of SEQ ID NO: 915750
ccagcuucucccugaaaug

SEQ ID NO: 1103201 - RNA, 19 nt, Artificial Sequence
  Description of Artificial Sequence: Synthetic oligonucleotide
  Antisense strand to SEQ ID NO: 1103200
cauuucagggagaagcugg

SEQ ID NO: 1103202 - RNA, 19 nt, Artificial Sequence
  Description of Artificial Sequence: Synthetic oligonucleotide
  Sense strand starting at position 2357 of SEQ ID NO: 915750
acuuaaccuccuuggauga

SEQ ID NO: 1103203 - RNA, 19 nt, Artificial Sequence
  Description of Artificial Sequence: Synthetic oligonucleotide
  Antisense strand to SEQ ID NO: 1103202
ucauccaaggagguuaagu

SEQ ID NO: 1103204 - RNA, 19 nt, Artificial Sequence
  Description of Artificial Sequence: Synthetic oligonucleotide
  Sense strand starting at position 2381 of SEQ ID NO: 915750
gggagcuauguagaaggua

SEQ ID NO: 1103205 - RNA, 19 nt, Artificial Sequence
  Description of Artificial Sequence: Synthetic oligonucleotide
  Antisense strand to SEQ ID NO: 1103204
uaccuucuacauagcuccc

SEQ ID NO: 1103206 - RNA, 19 nt, Artificial Sequence
  Description of Artificial Sequence: Synthetic oligonucleotide
  Sense strand starting at position 2441 of SEQ ID NO: 915750
acaauuaauuagguccuga

SEQ ID NO: 1103207 - RNA, 19 nt, Artificial Sequence
  Description of Artificial Sequence: Synthetic oligonucleotide
  Antisense strand to SEQ ID NO: 1103206
ucaggaccuaauuaauugu

SEQ ID NO: 1103208 - RNA, 19 nt, Artificial Sequence
  Description of Artificial Sequence: Synthetic oligonucleotide
  Sense strand starting at position 2572 of SEQ ID NO: 915750
uguggaagguacuuuguga

SEQ ID NO: 1103209 - RNA, 19 nt, Artificial Sequence
  Description of Artificial Sequence: Synthetic oligonucleotide
  Antisense strand to SEQ ID NO: 1103208
ucacaaaguaccuuccaca

SEQ ID NO: 1103210 - RNA, 19 nt, Artificial Sequence
  Description of Artificial Sequence: Synthetic oligonucleotide
  Sense strand starting at position 2580 of SEQ ID NO: 915750
guacuuugugaccagguca

SEQ ID NO: 1103211 - RNA, 19 nt, Artificial Sequence
  Description of Artificial Sequence: Synthetic oligonucleotide
  Antisense strand to SEQ ID NO: 1103210
ugaccuggucacaaaguac

SEQ ID NO: 1103212 - RNA, 19 nt, Artificial Sequence
  Description of Artificial Sequence: Synthetic oligonucleotide
  Sense strand starting at position 2667 of SEQ ID NO: 915750
agcaauaaacuugacaugu

SEQ ID NO: 1103213 - RNA, 19 nt, Artificial Sequence
  Description of Artificial Sequence: Synthetic oligonucleotide
  Antisense strand to SEQ ID NO: 1103212
acaugucaaguuuauugcu

SEQ ID NO: 1103214 - RNA, 19 nt, Artificial Sequence
  Description of Artificial Sequence: Synthetic oligonucleotide
  Sense strand starting at position 16 of SEQ ID NO: 915751
uggugauaauccuugcagu

SEQ ID NO: 1103215 - RNA, 19 nt, Artificial Sequence
  Description of Artificial Sequence: Synthetic oligonucleotide
  Antisense strand to SEQ ID NO: 1103214
acugcaaggauuaucacca

SEQ ID NO: 1103216 - RNA, 19 nt, Artificial Sequence
  Description of Artificial Sequence: Synthetic oligonucleotide
  Sense strand starting at position 17 of SEQ ID NO: 915751
ggugauaauccuugcaguu

SEQ ID NO: 1103217 - RNA, 19 nt, Artificial Sequence
  Description of Artificial Sequence: Synthetic oligonucleotide
  Antisense strand to SEQ ID NO: 1103216
aacugcaaggauuaucacc

SEQ ID NO: 1103218 - RNA, 19 nt, Artificial Sequence
  Description of Artificial Sequence: Synthetic oligonucleotide
  Sense strand starting at position 36 of SEQ ID NO: 915751
uugugaagauggcagauau

SEQ ID NO: 1103219 - RNA, 19 nt, Artificial Sequence
  Description of Artificial Sequence: Synthetic oligonucleotide
  Antisense strand to SEQ ID NO: 1103218
auaucugccaucuucacaa

SEQ ID NO: 1103220 - RNA, 19 nt, Artificial Sequence
  Description of Artificial Sequence: Synthetic oligonucleotide
  Sense strand starting at position 43 of SEQ ID NO: 915751
gauggcagauaucuguaaa

SEQ ID NO: 1103221 - RNA, 19 nt, Artificial Sequence
  Description of Artificial Sequence: Synthetic oligonucleotide
  Antisense strand to SEQ ID NO: 1103220
uuuacagauaucugccauc

SEQ ID NO: 1103222 - RNA, 19 nt, Artificial Sequence
  Description of Artificial Sequence: Synthetic oligonucleotide
  Sense strand starting at position 57 of SEQ ID NO: 915751
guaaaugacugcccaacau

SEQ ID NO: 1103223 - RNA, 19 nt, Artificial Sequence
  Description of Artificial Sequence: Synthetic oligonucleotide
  Antisense strand to SEQ ID NO: 1103222
auguugggcagucauuuac

SEQ ID NO: 1103224 - RNA, 19 nt, Artificial Sequence
  Description of Artificial Sequence: Synthetic oligonucleotide
  Sense strand starting at position 372 of SEQ ID NO: 915751
gagcgaagcucuucucaaa

SEQ ID NO: 1103225 - RNA, 19 nt, Artificial Sequence
  Description of Artificial Sequence: Synthetic oligonucleotide
  Antisense strand to SEQ ID NO: 1103224
uuugagaagagcuucgcuc

SEQ ID NO: 1103226 - RNA, 19 nt, Artificial Sequence
  Description of Artificial Sequence: Synthetic oligonucleotide
  Sense strand starting at position 463 of SEQ ID NO: 915751
uaaagaaaugaacguguuu

SEQ ID NO: 1103227 - RNA, 19 nt, Artificial Sequence
  Description of Artificial Sequence: Synthetic oligonucleotide
  Antisense strand to SEQ ID NO: 1103226
aaacacguucauuucuuua

SEQ ID NO: 1103228 - RNA, 19 nt, Artificial Sequence
  Description of Artificial Sequence: Synthetic oligonucleotide
  Sense strand starting at position 512 of SEQ ID NO: 915751
auggccugaccuuaaguau

SEQ ID NO: 1103229 - RNA, 19 nt, Artificial Sequence
  Description of Artificial Sequence: Synthetic oligonucleotide
  Antisense strand to SEQ ID NO: 1103228
auacuuaaggucaggccau

SEQ ID NO: 1103230 - RNA, 19 nt, Artificial Sequence
  Description of Artificial Sequence: Synthetic oligonucleotide
  Sense strand starting at position 515 of SEQ ID NO: 915751
gccugaccuuaaguauagu

SEQ ID NO: 1103231 - RNA, 19 nt, Artificial Sequence
  Description of Artificial Sequence: Synthetic oligonucleotide
  Antisense strand to SEQ ID NO: 1103230
acuauacuuaaggucaggc

SEQ ID NO: 1103232 - RNA, 19 nt, Artificial Sequence
  Description of Artificial Sequence: Synthetic oligonucleotide
  Sense strand starting at position 578 of SEQ ID NO: 915751
ccagaaggcuguuagaaau

SEQ ID NO: 1103233 - RNA, 19 nt, Artificial Sequence
  Description of Artificial Sequence: Synthetic oligonucleotide
  Antisense strand to SEQ ID NO: 1103232
auuucuaacagccuucugg

SEQ ID NO: 1103234 - RNA, 19 nt, Artificial Sequence
  Description of Artificial Sequence: Synthetic oligonucleotide
  Sense strand starting at position 650 of SEQ ID NO: 915751
gguagaggcgcguggauua

SEQ ID NO: 1103235 - RNA, 19 nt, Artificial Sequence
  Description of Artificial Sequence: Synthetic oligonucleotide
  Antisense strand to SEQ ID NO: 1103234
uaauccacgcgccucuacc

SEQ ID NO: 1103236 - RNA, 19 nt, Artificial Sequence
  Description of Artificial Sequence: Synthetic oligonucleotide
  Sense strand starting at position 1169 of SEQ ID NO: 915751
ggccgaggagguuguguuu

SEQ ID NO: 1103237 - RNA, 19 nt, Artificial Sequence
  Description of Artificial Sequence: Synthetic oligonucleotide
  Antisense strand to SEQ ID NO: 1103236
aaacacaaccuccucggcc

SEQ ID NO: 1103238 - RNA, 19 nt, Artificial Sequence
  Description of Artificial Sequence: Synthetic oligonucleotide
  Sense strand starting at position 1199 of SEQ ID NO: 915751
ccaggugaagucugagaag

SEQ ID NO: 1103239 - RNA, 19 nt, Artificial Sequence
  Description of Artificial Sequence: Synthetic oligonucleotide
  Antisense strand to SEQ ID NO: 1103238
cuucucagacuucaccugg

SEQ ID NO: 1103240 - RNA, 19 nt, Artificial Sequence
  Description of Artificial Sequence: Synthetic oligonucleotide
  Sense strand starting at position 1246 of SEQ ID NO: 915751
cgcacagauugacagguua

SEQ ID NO: 1103241 - RNA, 19 nt, Artificial Sequence
  Description of Artificial Sequence: Synthetic oligonucleotide
  Antisense strand to SEQ ID NO: 1103240
uaaccugucaaucugugcg

SEQ ID NO: 1103242 - RNA, 19 nt, Artificial Sequence
  Description of Artificial Sequence: Synthetic oligonucleotide
  Sense strand starting at position 1253 of SEQ ID NO: 915751
auugacagguuauuccaau

SEQ ID NO: 1103243 - RNA, 19 nt, Artificial Sequence
  Description of Artificial Sequence: Synthetic oligonucleotide
  Antisense strand to SEQ ID NO: 1103242
auuggaauaaccugucaau

SEQ ID NO: 1103244 - RNA, 19 nt, Artificial Sequence
  Description of Artificial Sequence: Synthetic oligonucleotide
  Sense strand starting at position 1254 of SEQ ID NO: 915751
uugacagguuauuccaauu

SEQ ID NO: 1103245 - RNA, 19 nt, Artificial Sequence
  Description of Artificial Sequence: Synthetic oligonucleotide
  Antisense strand to SEQ ID NO: 1103244
aauuggaauaaccugucaa

SEQ ID NO: 1103246 - RNA, 19 nt, Artificial Sequence
  Description of Artificial Sequence: Synthetic oligonucleotide
  Sense strand starting at position 1282 of SEQ ID NO: 915751
auaaauggaugacaguaaa

SEQ ID NO: 1103247 - RNA, 19 nt, Artificial Sequence
  Description of Artificial Sequence: Synthetic oligonucleotide
  Antisense strand to SEQ ID NO: 1103246
uuuacugucauccauuuau

SEQ ID NO: 1103248 - RNA, 19 nt, Artificial Sequence
  Description of Artificial Sequence: Synthetic oligonucleotide
  Sense strand starting at position 1345 of SEQ ID NO: 915751
ucauguuccugucuuaaug

SEQ ID NO: 1103249 - RNA, 19 nt, Artificial Sequence
  Description of Artificial Sequence: Synthetic oligonucleotide
  Antisense strand to SEQ ID NO: 1103248
cauuaagacaggaacauga

SEQ ID NO: 1103250 - RNA, 19 nt, Artificial Sequence
  Description of Artificial Sequence: Synthetic oligonucleotide
  Sense strand starting at position 2117 of SEQ ID NO: 915751
uuuauuuguugacgucaau

SEQ ID NO: 1103251 - RNA, 19 nt, Artificial Sequence
  Description of Artificial Sequence: Synthetic oligonucleotide
  Antisense strand to SEQ ID NO: 1103250
auugacgucaacaaauaaa

SEQ ID NO: 1103252 - RNA, 19 nt, Artificial Sequence
  Description of Artificial Sequence: Synthetic oligonucleotide
  Sense strand starting at position 2123 of SEQ ID NO: 915751
uguugacgucaauaaauaa

SEQ ID NO: 1103253 - RNA, 19 nt, Artificial Sequence
  Description of Artificial Sequence: Synthetic oligonucleotide
  Antisense strand to SEQ ID NO: 1103252
uuauuuauugacgucaaca

SEQ ID NO: 1103254 - RNA, 19 nt, Artificial Sequence
  Description of Artificial Sequence: Synthetic oligonucleotide
  Sense strand starting at position 2171 of SEQ ID NO: 915751
cacugagguguccacauaa

SEQ ID NO: 1103255 - RNA, 19 nt, Artificial Sequence
  Description of Artificial Sequence: Synthetic oligonucleotide
  Antisense strand to SEQ ID NO: 1103254
uuauguggacaccucagug

SEQ ID NO: 1103256 - RNA, 19 nt, Artificial Sequence
  Description of Artificial Sequence: Synthetic oligonucleotide
  Sense strand starting at position 2305 of SEQ ID NO: 915751
gucagagaugcguacaguu

SEQ ID NO: 1103257 - RNA, 19 nt, Artificial Sequence
  Description of Artificial Sequence: Synthetic oligonucleotide
  Antisense strand to SEQ ID NO: 1103256
aacuguacgcaucucugac

SEQ ID NO: 1103258 - RNA, 19 nt, Artificial Sequence
  Description of Artificial Sequence: Synthetic oligonucleotide
  Sense strand starting at position 2560 of SEQ ID NO: 915751
gccucuguugcuggguaga

SEQ ID NO: 1103259 - RNA, 19 nt, Artificial Sequence
  Description of Artificial Sequence: Synthetic oligonucleotide
  Antisense strand to SEQ ID NO: 1103258
ucuacccagcaacagaggc

SEQ ID NO: 1103260 - RNA, 19 nt, Artificial Sequence
  Description of Artificial Sequence: Synthetic oligonucleotide
  Sense strand starting at position 2563 of SEQ ID NO: 915751
ucuguugcuggguagaagu

SEQ ID NO: 1103261 - RNA, 19 nt, Artificial Sequence
  Description of Artificial Sequence: Synthetic oligonucleotide
  Antisense strand to SEQ ID NO: 1103260
acuucuacccagcaacaga

SEQ ID NO: 1103262 - RNA, 19 nt, Artificial Sequence
  Description of Artificial Sequence: Synthetic oligonucleotide
  Sense strand starting at position 2579 of SEQ ID NO: 915751
aguugaggcguugaggaaa

SEQ ID NO: 1103263 - RNA, 19 nt, Artificial Sequence
  Description of Artificial Sequence: Synthetic oligonucleotide
  Antisense strand to SEQ ID NO: 1103262
uuuccucaacgccucaacu

SEQ ID NO: 1103264 - RNA, 19 nt, Artificial Sequence
  Description of Artificial Sequence: Synthetic oligonucleotide
  Sense strand starting at position 2642 of SEQ ID NO: 915751
uuugcuuccuagccagaaa

SEQ ID NO: 1103265 - RNA, 19 nt, Artificial Sequence
  Description of Artificial Sequence: Synthetic oligonucleotide
  Antisense strand to SEQ ID NO: 1103264
uuucuggcuaggaagcaaa

SEQ ID NO: 1103266 - RNA, 19 nt, Artificial Sequence
  Description of Artificial Sequence: Synthetic oligonucleotide
  Sense strand starting at position 2674 of SEQ ID NO: 915751
aggcuuacauguugcaaca

SEQ ID NO: 1103267 - RNA, 19 nt, Artificial Sequence
  Description of Artificial Sequence: Synthetic oligonucleotide
  Antisense strand to SEQ ID NO: 1103266
uguugcaacauguaagccu

SEQ ID NO: 1103268 - RNA, 19 nt, Artificial Sequence
  Description of Artificial Sequence: Synthetic oligonucleotide
  Sense strand starting at position 2676 of SEQ ID NO: 915751
gcuuacauguugcaacaca

SEQ ID NO: 1103269 - RNA, 19 nt, Artificial Sequence
  Description of Artificial Sequence: Synthetic oligonucleotide
  Antisense strand to SEQ ID NO: 1103268
uguguugcaacauguaagc

SEQ ID NO: 1103270 - RNA, 19 nt, Artificial Sequence
  Description of Artificial Sequence: Synthetic oligonucleotide
  Sense strand starting at position 3440 of SEQ ID NO: 915751
ccgagaugcucgaggacga

SEQ ID NO: 1103271 - RNA, 19 nt, Artificial Sequence
  Description of Artificial Sequence: Synthetic oligonucleotide
  Antisense strand to SEQ ID NO: 1103270
ucguccucgagcaucucgg

SEQ ID NO: 1103272 - RNA, 19 nt, Artificial Sequence
  Description of Artificial Sequence: Synthetic oligonucleotide
  Sense strand starting at position 3696 of SEQ ID NO: 915751
gccagaugcuuccgagaag

SEQ ID NO: 1103273 - RNA, 19 nt, Artificial Sequence
  Description of Artificial Sequence: Synthetic oligonucleotide
  Antisense strand to SEQ ID NO: 1103272
cuucucggaagcaucuggc

SEQ ID NO: 1103274 - RNA, 19 nt, Artificial Sequence
  Description of Artificial Sequence: Synthetic oligonucleotide
  Sense strand starting at position 3951 of SEQ ID NO: 915751
uguucucgcuugccucaaa

SEQ ID NO: 1103275 - RNA, 19 nt, Artificial Sequence
  Description of Artificial Sequence: Synthetic oligonucleotide
  Antisense strand to SEQ ID NO: 1103274
uuugaggcaagcgagaaca

SEQ ID NO: 1103276 - RNA, 19 nt, Artificial Sequence
  Description of Artificial Sequence: Synthetic oligonucleotide
  Sense strand starting at position 3962 of SEQ ID NO: 915751
gccucaaagugccauuuga

SEQ ID NO: 1103277 - RNA, 19 nt, Artificial Sequence
  Description of Artificial Sequence: Synthetic oligonucleotide
  Antisense strand to SEQ ID NO: 1103276
ucaaauggcacuuugaggc

SEQ ID NO: 1103278 - RNA, 19 nt, Artificial Sequence
  Description of Artificial Sequence: Synthetic oligonucleotide
  Sense strand starting at position 299 of SEQ ID NO: 915752
gccucaucuguacacaaga

SEQ ID NO: 1103279 - RNA, 19 nt, Artificial Sequence
  Description of Artificial Sequence: Synthetic oligonucleotide
  Antisense strand to SEQ ID NO: 1103278
ucuuguguacagaugaggc

SEQ ID NO: 1103280 - RNA, 19 nt, Artificial Sequence
  Description of Artificial Sequence: Synthetic oligonucleotide
  Sense strand starting at position 354 of SEQ ID NO: 915752
cauucugugggccaagaaa

SEQ ID NO: 1103281 - RNA, 19 nt, Artificial Sequence
  Description of Artificial Sequence: Synthetic oligonucleotide
  Antisense strand to SEQ ID NO: 1103280
uuucuuggcccacagaaug

SEQ ID NO: 1103282 - RNA, 19 nt, Artificial Sequence
  Description of Artificial Sequence: Synthetic oligonucleotide
  Sense strand starting at position 537 of SEQ ID NO: 915752
aggcucugccaccaugauu

SEQ ID NO: 1103283 - RNA, 19 nt, Artificial Sequence
  Description of Artificial Sequence: Synthetic oligonucleotide
  Antisense strand to SEQ ID NO: 1103282
aaucaugguggcagagccu

SEQ ID NO: 1103284 - RNA, 19 nt, Artificial Sequence
  Description of Artificial Sequence: Synthetic oligonucleotide
  Sense strand starting at position 593 of SEQ ID NO: 915752
gaggacaccuccuuucuga

SEQ ID NO: 1103285 - RNA, 19 nt, Artificial Sequence
  Description of Artificial Sequence: Synthetic oligonucleotide
  Antisense strand to SEQ ID NO: 1103284
ucagaaaggagguguccuc

SEQ ID NO: 1103286 - RNA, 19 nt, Artificial Sequence
  Description of Artificial Sequence: Synthetic oligonucleotide
  Sense strand starting at position 609 of SEQ ID NO: 915752
ugagaaggcuuggcugaga

SEQ ID NO: 1103287 - RNA, 19 nt, Artificial Sequence
  Description of Artificial Sequence: Synthetic oligonucleotide
  Antisense strand to SEQ ID NO: 1103286
ucucagccaagccuucuca

SEQ ID NO: 1103288 - RNA, 19 nt, Artificial Sequence
  Description of Artificial Sequence: Synthetic oligonucleotide
  Sense strand starting at position 676 of SEQ ID NO: 915752
ucagcaucacccgguuaga

SEQ ID NO: 1103289 - RNA, 19 nt, Artificial Sequence
  Description of Artificial Sequence: Synthetic oligonucleotide
  Antisense strand to SEQ ID NO: 1103288
ucuaaccgggugaugcuga

SEQ ID NO: 1103290 - RNA, 19 nt, Artificial Sequence
  Description of Artificial Sequence: Synthetic oligonucleotide
  Sense strand starting at position 770 of SEQ ID NO: 915752
ggcuuuguccaguggucac

SEQ ID NO: 1103291 - RNA, 19 nt, Artificial Sequence
  Description of Artificial Sequence: Synthetic oligonucleotide
  Antisense strand to SEQ ID NO: 1103290
gugaccacuggacaaagcc

SEQ ID NO: 1103292 - RNA, 19 nt, Artificial Sequence
  Description of Artificial Sequence: Synthetic oligonucleotide
  Sense strand starting at position 1107 of SEQ ID NO: 915752
ugccucaguaggugaguua

SEQ ID NO: 1103293 - RNA, 19 nt, Artificial Sequence
  Description of Artificial Sequence: Synthetic oligonucleotide
  Antisense strand to SEQ ID NO: 1103292
uaacucaccuacugaggca

SEQ ID NO: 1103294 - RNA, 19 nt, Artificial Sequence
  Description of Artificial Sequence: Synthetic oligonucleotide
  Sense strand starting at position 1116 of SEQ ID NO: 915752
aggugaguuacgugaugga

SEQ ID NO: 1103295 - RNA, 19 nt, Artificial Sequence
  Description of Artificial Sequence: Synthetic oligonucleotide
  Antisense strand to SEQ ID NO: 1103294
uccaucacguaacucaccu

SEQ ID NO: 1103296 - RNA, 19 nt, Artificial Sequence
  Description of Artificial Sequence: Synthetic oligonucleotide
  Sense strand starting at position 1117 of SEQ ID NO: 915752
ggugaguuacgugauggau

SEQ ID NO: 1103297 - RNA, 19 nt, Artificial Sequence
  Description of Artificial Sequence: Synthetic oligonucleotide
  Antisense strand to SEQ ID NO: 1103296
auccaucacguaacucacc

SEQ ID NO: 1103298 - RNA, 19 nt, Artificial Sequence
  Description of Artificial Sequence: Synthetic oligonucleotide
  Sense strand starting at position 1216 of SEQ ID NO: 915752
cagugaugaccugagccau

SEQ ID NO: 1103299 - RNA, 19 nt, Artificial Sequence
  Description of Artificial Sequence: Synthetic oligonucleotide
  Antisense strand to SEQ ID NO: 1103298
auggcucaggucaucacug

SEQ ID NO: 1103300 - RNA, 19 nt, Artificial Sequence
  Description of Artificial Sequence: Synthetic oligonucleotide
  Sense strand starting at position 1222 of SEQ ID NO: 915752
ugaccugagccaugggaau

SEQ ID NO: 1103301 - RNA, 19 nt, Artificial Sequence
  Description of Artificial Sequence: Synthetic oligonucleotide
  Antisense strand to SEQ ID NO: 1103300
auucccauggcucagguca

SEQ ID NO: 1103302 - RNA, 19 nt, Artificial Sequence
  Description of Artificial Sequence: Synthetic oligonucleotide
  Sense strand starting at position 1386 of SEQ ID NO: 915752
ugggcagcuccuggaguaa

SEQ ID NO: 1103303 - RNA, 19 nt, Artificial Sequence
  Description of Artificial Sequence: Synthetic oligonucleotide
  Antisense strand to SEQ ID NO: 1103302
uuacuccaggagcugccca

SEQ ID NO: 1103304 - RNA, 19 nt, Artificial Sequence
  Description of Artificial Sequence: Synthetic oligonucleotide
  Sense strand starting at position 1390 of SEQ ID NO: 915752
cagcuccuggaguaaugaa

SEQ ID NO: 1103305 - RNA, 19 nt, Artificial Sequence
  Description of Artificial Sequence: Synthetic oligonucleotide
  Antisense strand to SEQ ID NO: 1103304
uucauuacuccaggagcug

SEQ ID NO: 1103306 - RNA, 19 nt, Artificial Sequence
  Description of Artificial Sequence: Synthetic oligonucleotide
  Sense strand starting at position 1593 of SEQ ID NO: 915752
guugaaagcuuaccgaucu

SEQ ID NO: 1103307 - RNA, 19 nt, Artificial Sequence
  Description of Artificial Sequence: Synthetic oligonucleotide
  Antisense strand to SEQ ID NO: 1103306
agaucgguaagcuuucaac

SEQ ID NO: 1103308 - RNA, 19 nt, Artificial Sequence
  Description of Artificial Sequence: Synthetic oligonucleotide
  Sense strand starting at position 1985 of SEQ ID NO: 915752
cagacugaauccucaaggu

SEQ ID NO: 1103309 - RNA, 19 nt, Artificial Sequence
  Description of Artificial Sequence: Synthetic oligonucleotide
  Antisense strand to SEQ ID NO: 1103308
accuugaggauucagucug

SEQ ID NO: 1103310 - RNA, 19 nt, Artificial Sequence
  Description of Artificial Sequence: Synthetic oligonucleotide
  Sense strand starting at position 2030 of SEQ ID NO: 915752
cccaauugcugguuuccau

SEQ ID NO: 1103311 - RNA, 19 nt, Artificial Sequence
  Description of Artificial Sequence: Synthetic oligonucleotide
  Antisense strand to SEQ ID NO: 1103310
auggaaaccagcaauuggg

SEQ ID NO: 1103312 - RNA, 19 nt, Artificial Sequence
  Description of Artificial Sequence: Synthetic oligonucleotide
  Sense strand starting at position 2072 of SEQ ID NO: 915752
cugcaucuguggguuacua

SEQ ID NO: 1103313 - RNA, 19 nt, Artificial Sequence
  Description of Artificial Sequence: Synthetic oligonucleotide
  Antisense strand to SEQ ID NO: 1103312
uaguaacccacagaugcag

SEQ ID NO: 1103314 - RNA, 19 nt, Artificial Sequence
  Description of Artificial Sequence: Synthetic oligonucleotide
  Sense strand starting at position 2074 of SEQ ID NO: 915752
gcaucuguggguuacuaua

SEQ ID NO: 1103315 - RNA, 19 nt, Artificial Sequence
  Description of Artificial Sequence: Synthetic oligonucleotide
  Antisense strand to SEQ ID NO: 1103314
uauaguaacccacagaugc

SEQ ID NO: 1103316 - RNA, 19 nt, Artificial Sequence
  Description of Artificial Sequence: Synthetic oligonucleotide
  Sense strand starting at position 2229 of SEQ ID NO: 915752
gugccuucuagggacugau

SEQ ID NO: 1103317 - RNA, 19 nt, Artificial Sequence
  Description of Artificial Sequence: Synthetic oligonucleotide
  Antisense strand to SEQ ID NO: 1103316
aucagucccuagaaggcac

SEQ ID NO: 1103318 - RNA, 19 nt, Artificial Sequence
  Description of Artificial Sequence: Synthetic oligonucleotide
  Sense strand starting at position 2255 of SEQ ID NO: 915752
cuaggauuugcuugucugu

SEQ ID NO: 1103319 - RNA, 19 nt, Artificial Sequence
  Description of Artificial Sequence: Synthetic oligonucleotide
  Antisense strand to SEQ ID NO: 1103318
acagacaagcaaauccuag

SEQ ID NO: 1103320 - RNA, 19 nt, Artificial Sequence
  Description of Artificial Sequence: Synthetic oligonucleotide
  Sense strand starting at position 2257 of SEQ ID NO: 915752
aggauuugcuugucugugu

SEQ ID NO: 1103321 - RNA, 19 nt, Artificial Sequence
  Description of Artificial Sequence: Synthetic oligonucleotide
  Antisense strand to SEQ ID NO: 1103320
acacagacaagcaaauccu

SEQ ID NO: 1103322 - RNA, 19 nt, Artificial Sequence
  Description of Artificial Sequence: Synthetic oligonucleotide
  Sense strand starting at position 2478 of SEQ ID NO: 915752
uuggacuuccugugagucu

SEQ ID NO: 1103323 - RNA, 19 nt, Artificial Sequence
  Description of Artificial Sequence: Synthetic oligonucleotide
  Antisense strand to SEQ ID NO: 1103322
agacucacaggaaguccaa

SEQ ID NO: 1103324 - RNA, 19 nt, Artificial Sequence
  Description of Artificial Sequence: Synthetic oligonucleotide
  Sense strand starting at position 2512 of SEQ ID NO: 915752
acauucugucucugugagu

SEQ ID NO: 1103325 - RNA, 19 nt, Artificial Sequence
  Description of Artificial Sequence: Synthetic oligonucleotide
  Antisense strand to SEQ ID NO: 1103324
acucacagagacagaaugu

SEQ ID NO: 1103326 - RNA, 19 nt, Artificial Sequence
  Description of Artificial Sequence: Synthetic oligonucleotide
  Sense strand starting at position 2519 of SEQ ID NO: 915752
gucucugugagugacauca

SEQ ID NO: 1103327 - RNA, 19 nt, Artificial Sequence
  Description of Artificial Sequence: Synthetic oligonucleotide
  Antisense strand to SEQ ID NO: 1103326
ugaugucacucacagagac

SEQ ID NO: 1103328 - RNA, 19 nt, Artificial Sequence
  Description of Artificial Sequence: Synthetic oligonucleotide
  Sense strand starting at position 2780 of SEQ ID NO: 915752
gagugagcuuccuaagauc

SEQ ID NO: 1103329 - RNA, 19 nt, Artificial Sequence
  Description of Artificial Sequence: Synthetic oligonucleotide
  Antisense strand to SEQ ID NO: 1103328
gaucuuaggaagcucacuc

SEQ ID NO: 1103330 - RNA, 19 nt, Artificial Sequence
  Description of Artificial Sequence: Synthetic oligonucleotide
  Sense strand starting at position 2783 of SEQ ID NO: 915752
ugagcuuccuaagaucaug

SEQ ID NO: 1103331 - RNA, 19 nt, Artificial Sequence
  Description of Artificial Sequence: Synthetic oligonucleotide
  Antisense strand to SEQ ID NO: 1103330
caugaucuuaggaagcuca

SEQ ID NO: 1103332 - RNA, 19 nt, Artificial Sequence
  Description of Artificial Sequence: Synthetic oligonucleotide
  Sense strand starting at position 2892 of SEQ ID NO: 915752
uguccagccuuaucuacua

SEQ ID NO: 1103333 - RNA, 19 nt, Artificial Sequence
  Description of Artificial Sequence: Synthetic oligonucleotide
  Antisense strand to SEQ ID NO: 1103332
uaguagauaaggcuggaca

SEQ ID NO: 1103334 - RNA, 19 nt, Artificial Sequence
  Description of Artificial Sequence: Synthetic oligonucleotide
  Sense strand starting at position 2920 of SEQ ID NO: 915752
ggcuuuaacuccuaaugac

SEQ ID NO: 1103335 - RNA, 19 nt, Artificial Sequence
  Description of Artificial Sequence: Synthetic oligonucleotide
  Antisense strand to SEQ ID NO: 1103334
gucauuaggaguuaaagcc

SEQ ID NO: 1103336 - RNA, 19 nt, Artificial Sequence
  Description of Artificial Sequence: Synthetic oligonucleotide
  Sense strand starting at position 3103 of SEQ ID NO: 915752
gugauacccagaugcaaag

SEQ ID NO: 1103337 - RNA, 19 nt, Artificial Sequence
  Description of Artificial Sequence: Synthetic oligonucleotide
  Antisense strand to SEQ ID NO: 1103336
cuuugcaucuggguaucac

SEQ ID NO: 1103338 - RNA, 19 nt, Artificial Sequence
  Description of Artificial Sequence: Synthetic oligonucleotide
  Sense strand starting at position 3189 of SEQ ID NO: 915752
gacuguaaguggucaugga

SEQ ID NO: 1103339 - RNA, 19 nt, Artificial Sequence
  Description of Artificial Sequence: Synthetic oligonucleotide
  Antisense strand to SEQ ID NO: 1103338
uccaugaccacuuacaguc

SEQ ID NO: 1103340 - RNA, 19 nt, Artificial Sequence
  Description of Artificial Sequence: Synthetic oligonucleotide
  Sense strand starting at position 3190 of SEQ ID NO: 915752
acuguaaguggucauggaa

SEQ ID NO: 1103341 - RNA, 19 nt, Artificial Sequence
  Description of Artificial Sequence: Synthetic oligonucleotide
  Antisense strand to SEQ ID NO: 1103340
uuccaugaccacuuacagu

SEQ ID NO: 1103342 - RNA, 19 nt, Artificial Sequence
  Description of Artificial Sequence: Synthetic oligonucleotide
  Sense strand starting at position 3193 of SEQ ID NO: 915752
guaaguggucauggaagaa

SEQ ID NO: 1103343 - RNA, 19 nt, Artificial Sequence
  Description of Artificial Sequence: Synthetic oligonucleotide
  Antisense strand to SEQ ID NO: 1103342
uucuuccaugaccacuuac

SEQ ID NO: 1103344 - RNA, 19 nt, Artificial Sequence
  Description of Artificial Sequence: Synthetic oligonucleotide
  Sense strand starting at position 3259 of SEQ ID NO: 915752
acagaagaaucacggacau

SEQ ID NO: 1103345 - RNA, 19 nt, Artificial Sequence
  Description of Artificial Sequence: Synthetic oligonucleotide
  Antisense strand to SEQ ID NO: 1103344
auguccgugauucuucugu

SEQ ID NO: 1103346 - RNA, 19 nt, Artificial Sequence
  Description of Artificial Sequence: Synthetic oligonucleotide
  Sense strand starting at position 3590 of SEQ ID NO: 915752
acccuccagucagaguaaa

SEQ ID NO: 1103347 - RNA, 19 nt, Artificial Sequence
  Description of Artificial Sequence: Synthetic oligonucleotide
  Antisense strand to SEQ ID NO: 1103346
uuuacucugacuggagggu

SEQ ID NO: 1103348 - RNA, 19 nt, Artificial Sequence
  Description of Artificial Sequence: Synthetic oligonucleotide
  Sense strand starting at position 3735 of SEQ ID NO: 915752
aggugaacuuaucaacugu

SEQ ID NO: 1103349 - RNA, 19 nt, Artificial Sequence
  Description of Artificial Sequence: Synthetic oligonucleotide
  Antisense strand to SEQ ID NO: 1103348
acaguugauaaguucaccu

SEQ ID NO: 1103350 - RNA, 19 nt, Artificial Sequence
  Description of Artificial Sequence: Synthetic oligonucleotide
  Sense strand starting at position 3779 of SEQ ID NO: 915752
gguccauucuuaccuuaag

SEQ ID NO: 1103351 - RNA, 19 nt, Artificial Sequence
  Description of Artificial Sequence: Synthetic oligonucleotide
  Antisense strand to SEQ ID NO: 1103350
cuuaagguaagaauggacc

SEQ ID NO: 1103352 - RNA, 19 nt, Artificial Sequence
  Description of Artificial Sequence: Synthetic oligonucleotide
  Sense strand starting at position 3811 of SEQ ID NO: 915752
gcccgugcuacugagacuu

SEQ ID NO: 1103353 - RNA, 19 nt, Artificial Sequence
  Description of Artificial Sequence: Synthetic oligonucleotide
  Antisense strand to SEQ ID NO: 1103352
aagucucaguagcacgggc

SEQ ID NO: 1103354 - RNA, 19 nt, Artificial Sequence
  Description of Artificial Sequence: Synthetic oligonucleotide
  Sense strand starting at position 3817 of SEQ ID NO: 915752
gcuacugagacuugugcca

SEQ ID NO: 1103355 - RNA, 19 nt, Artificial Sequence
  Description of Artificial Sequence: Synthetic oligonucleotide
  Antisense strand to SEQ ID NO: 1103354
uggcacaagucucaguagc

SEQ ID NO: 1103356 - RNA, 19 nt, Artificial Sequence
  Description of Artificial Sequence: Synthetic oligonucleotide
  Sense strand starting at position 3952 of SEQ ID NO: 915752
gcuggauggugauuaugaa

SEQ ID NO: 1103357 - RNA, 19 nt, Artificial Sequence
  Description of Artificial Sequence: Synthetic oligonucleotide
  Antisense strand to SEQ ID NO: 1103356
uucauaaucaccauccagc

SEQ ID NO: 1103358 - RNA, 19 nt, Artificial Sequence
  Description of Artificial Sequence: Synthetic oligonucleotide
  Sense strand starting at position 18 of SEQ ID NO: 915753
uccaguuugccagauccua

SEQ ID NO: 1103359 - RNA, 19 nt, Artificial Sequence
  Description of Artificial Sequence: Synthetic oligonucleotide
  Antisense strand to SEQ ID NO: 1103358
uaggaucuggcaaacugga

SEQ ID NO: 1103360 - RNA, 19 nt, Artificial Sequence
  Description of Artificial Sequence: Synthetic oligonucleotide
  Sense strand starting at position 29 of SEQ ID NO: 915753
agauccuaaccacgucaua

SEQ ID NO: 1103361 - RNA, 19 nt, Artificial Sequence
  Description of Artificial Sequence: Synthetic oligonucleotide
  Antisense strand to SEQ ID NO: 1103360
uaugacgugguuaggaucu

SEQ ID NO: 1103362 - RNA, 19 nt, Artificial Sequence
  Description of Artificial Sequence: Synthetic oligonucleotide
  Sense strand starting at position 375 of SEQ ID NO: 915753
cucccuaauccaugugaga

SEQ ID NO: 1103363 - RNA, 19 nt, Artificial Sequence
  Description of Artificial Sequence: Synthetic oligonucleotide
  Antisense strand to SEQ ID NO: 1103362
ucucacauggauuagggag

SEQ ID NO: 1103364 - RNA, 19 nt, Artificial Sequence
  Description of Artificial Sequence: Synthetic oligonucleotide
  Sense strand starting at position 388 of SEQ ID NO: 915753
gugagacugaagugugacu

SEQ ID NO: 1103365 - RNA, 19 nt, Artificial Sequence
  Description of Artificial Sequence: Synthetic oligonucleotide
  Antisense strand to SEQ ID NO: 1103364
agucacacuucagucucac

SEQ ID NO: 1103366 - RNA, 19 nt, Artificial Sequence
  Description of Artificial Sequence: Synthetic oligonucleotide
  Sense strand starting at position 661 of SEQ ID NO: 915753
agagaagagcccugucaga

SEQ ID NO: 1103367 - RNA, 19 nt, Artificial Sequence
  Description of Artificial Sequence: Synthetic oligonucleotide
  Antisense strand to SEQ ID NO: 1103366
ucugacagggcucuucucu

SEQ ID NO: 1103368 - RNA, 19 nt, Artificial Sequence
  Description of Artificial Sequence: Synthetic oligonucleotide
  Sense strand starting at position 686 of SEQ ID NO: 915753
uucuaucagugacugguau

SEQ ID NO: 1103369 - RNA, 19 nt, Artificial Sequence
  Description of Artificial Sequence: Synthetic oligonucleotide
  Antisense strand to SEQ ID NO: 1103368
auaccagucacugauagaa

SEQ ID NO: 1103370 - RNA, 19 nt, Artificial Sequence
  Description of Artificial Sequence: Synthetic oligonucleotide
  Sense strand starting at position 688 of SEQ ID NO: 915753
cuaucagugacugguauga

SEQ ID NO: 1103371 - RNA, 19 nt, Artificial Sequence
  Description of Artificial Sequence: Synthetic oligonucleotide
  Antisense strand to SEQ ID NO: 1103370
ucauaccagucacugauag

SEQ ID NO: 1103372 - RNA, 19 nt, Artificial Sequence
  Description of Artificial Sequence: Synthetic oligonucleotide
  Sense strand starting at position 718 of SEQ ID NO: 915753
agagcaagcuguguuacaa

SEQ ID NO: 1103373 - RNA, 19 nt, Artificial Sequence
  Description of Artificial Sequence: Synthetic oligonucleotide
  Antisense strand to SEQ ID NO: 1103372
uuguaacacagcuugcucu

SEQ ID NO: 1103374 - RNA, 19 nt, Artificial Sequence
  Description of Artificial Sequence: Synthetic oligonucleotide
  Sense strand starting at position 918 of SEQ ID NO: 915753
cugguaauagaauggagua

SEQ ID NO: 1103375 - RNA, 19 nt, Artificial Sequence
  Description of Artificial Sequence: Synthetic oligonucleotide
  Antisense strand to SEQ ID NO: 1103374
uacuccauucuauuaccag

SEQ ID NO: 1103376 - RNA, 19 nt, Artificial Sequence
  Description of Artificial Sequence: Synthetic oligonucleotide
  Sense strand starting at position 1018 of SEQ ID NO: 915753
cccagccauccuugagaua

SEQ ID NO: 1103377 - RNA, 19 nt, Artificial Sequence
  Description of Artificial Sequence: Synthetic oligonucleotide
  Antisense strand to SEQ ID NO: 1103376
uaucucaaggauggcuggg

SEQ ID NO: 1103378 - RNA, 19 nt, Artificial Sequence
  Description of Artificial Sequence: Synthetic oligonucleotide
  Sense strand starting at position 1200 of SEQ ID NO: 915753
uagcacuugugagugagaa

SEQ ID NO: 1103379 - RNA, 19 nt, Artificial Sequence
  Description of Artificial Sequence: Synthetic oligonucleotide
  Antisense strand to SEQ ID NO: 1103378
uucucacucacaagugcua

SEQ ID NO: 1103380 - RNA, 19 nt, Artificial Sequence
  Description of Artificial Sequence: Synthetic oligonucleotide
  Sense strand starting at position 1201 of SEQ ID NO: 915753
agcacuugugagugagaag

SEQ ID NO: 1103381 - RNA, 19 nt, Artificial Sequence
  Description of Artificial Sequence: Synthetic oligonucleotide
  Antisense strand to SEQ ID NO: 1103380
cuucucacucacaagugcu

SEQ ID NO: 1103382 - RNA, 19 nt, Artificial Sequence
  Description of Artificial Sequence: Synthetic oligonucleotide
  Sense strand starting at position 1225 of SEQ ID NO: 915753
gucaguuauucuccagaua

SEQ ID NO: 1103383 - RNA, 19 nt, Artificial Sequence
  Description of Artificial Sequence: Synthetic oligonucleotide
  Antisense strand to SEQ ID NO: 1103382
uaucuggagaauaacugac

SEQ ID NO: 1103384 - RNA, 19 nt, Artificial Sequence
  Description of Artificial Sequence: Synthetic oligonucleotide
  Sense strand starting at position 1226 of SEQ ID NO: 915753
ucaguuauucuccagauac

SEQ ID NO: 1103385 - RNA, 19 nt, Artificial Sequence
  Description of Artificial Sequence: Synthetic oligonucleotide
  Antisense strand to SEQ ID NO: 1103384
guaucuggagaauaacuga

SEQ ID NO: 1103386 - RNA, 19 nt, Artificial Sequence
  Description of Artificial Sequence: Synthetic oligonucleotide
  Sense strand starting at position 1249 of SEQ ID NO: 915753
gguggacgugcacagauau

SEQ ID NO: 1103387 - RNA, 19 nt, Artificial Sequence
  Description of Artificial Sequence: Synthetic oligonucleotide
  Antisense strand to SEQ ID NO: 1103386
auaucugugcacguccacc

SEQ ID NO: 1103388 - RNA, 19 nt, Artificial Sequence
  Description of Artificial Sequence: Synthetic oligonucleotide
  Sense strand starting at position 1293 of SEQ ID NO: 915753
agaauucuuguguguagaa

SEQ ID NO: 1103389 - RNA, 19 nt, Artificial Sequence
  Description of Artificial Sequence: Synthetic oligonucleotide
  Antisense strand to SEQ ID NO: 1103388
uucuacacacaagaauucu

SEQ ID NO: 1103390 - RNA, 19 nt, Artificial Sequence
  Description of Artificial Sequence: Synthetic oligonucleotide
  Sense strand starting at position 1294 of SEQ ID NO: 915753
gaauucuuguguguagaau

SEQ ID NO: 1103391 - RNA, 19 nt, Artificial Sequence
  Description of Artificial Sequence: Synthetic oligonucleotide
  Antisense strand to SEQ ID NO: 1103390
auucuacacacaagaauuc

SEQ ID NO: 1103392 - RNA, 19 nt, Artificial Sequence
  Description of Artificial Sequence: Synthetic oligonucleotide
  Sense strand starting at position 1295 of SEQ ID NO: 915753
aauucuuguguguagaaua

SEQ ID NO: 1103393 - RNA, 19 nt, Artificial Sequence
  Description of Artificial Sequence: Synthetic oligonucleotide
  Antisense strand to SEQ ID NO: 1103392
uauucuacacacaagaauu

SEQ ID NO: 1103394 - RNA, 19 nt, Artificial Sequence
  Description of Artificial Sequence: Synthetic oligonucleotide
  Sense strand starting at position 1306 of SEQ ID NO: 915753
guagaauauacgggugcau

SEQ ID NO: 1103395 - RNA, 19 nt, Artificial Sequence
  Description of Artificial Sequence: Synthetic oligonucleotide
  Antisense strand to SEQ ID NO: 1103394
augcacccguauauucuac

SEQ ID NO: 1103396 - RNA, 19 nt, Artificial Sequence
  Description of Artificial Sequence: Synthetic oligonucleotide
  Sense strand starting at position 1308 of SEQ ID NO: 915753
agaauauacgggugcaugu

SEQ ID NO: 1103397 - RNA, 19 nt, Artificial Sequence
  Description of Artificial Sequence: Synthetic oligonucleotide
  Antisense strand to SEQ ID NO: 1103396
acaugcacccguauauucu

SEQ ID NO: 1103398 - RNA, 19 nt, Artificial Sequence
  Description of Artificial Sequence: Synthetic oligonucleotide
  Sense strand starting at position 1371 of SEQ ID NO: 915753
acggauccaugcuuugaga

SEQ ID NO: 1103399 - RNA, 19 nt, Artificial Sequence
  Description of Artificial Sequence: Synthetic oligonucleotide
  Antisense strand to SEQ ID NO: 1103398
ucucaaagcauggauccgu

SEQ ID NO: 1103400 - RNA, 19 nt, Artificial Sequence
  Description of Artificial Sequence: Synthetic oligonucleotide
  Sense strand starting at position 1373 of SEQ ID NO: 915753
ggauccaugcuuugagagu

SEQ ID NO: 1103401 - RNA, 19 nt, Artificial Sequence
  Description of Artificial Sequence: Synthetic oligonucleotide
  Antisense strand to SEQ ID NO: 1103400
acucucaaagcauggaucc

SEQ ID NO: 1103402 - RNA, 19 nt, Artificial Sequence
  Description of Artificial Sequence: Synthetic oligonucleotide
  Sense strand starting at position 1379 of SEQ ID NO: 915753
augcuuugagagugugaac

SEQ ID NO: 1103403 - RNA, 19 nt, Artificial Sequence
  Description of Artificial Sequence: Synthetic oligonucleotide
  Antisense strand to SEQ ID NO: 1103402
guucacacucucaaagcau

SEQ ID NO: 1103404 - RNA, 19 nt, Artificial Sequence
  Description of Artificial Sequence: Synthetic oligonucleotide
  Sense strand starting at position 2432 of SEQ ID NO: 915753
ugcgcuaugggaugggaaa

SEQ ID NO: 1103405 - RNA, 19 nt, Artificial Sequence
  Description of Artificial Sequence: Synthetic oligonucleotide
  Antisense strand to SEQ ID NO: 1103404
uuucccaucccauagcgca

SEQ ID NO: 1103406 - RNA, 19 nt, Artificial Sequence
  Description of Artificial Sequence: Synthetic oligonucleotide
  Sense strand starting at position 2628 of SEQ ID NO: 915753
ggagguguuuccucagcag

SEQ ID NO: 1103407 - RNA, 19 nt, Artificial Sequence
  Description of Artificial Sequence: Synthetic oligonucleotide
  Antisense strand to SEQ ID NO: 1103406
cugcugaggaaacaccucc

SEQ ID NO: 1103408 - RNA, 19 nt, Artificial Sequence
  Description of Artificial Sequence: Synthetic oligonucleotide
  Sense strand starting at position 2663 of SEQ ID NO: 915753
aagcuauagcgucaaggga

SEQ ID NO: 1103409 - RNA, 19 nt, Artificial Sequence
  Description of Artificial Sequence: Synthetic oligonucleotide
  Antisense strand to SEQ ID NO: 1103408
ucccuugacgcuauagcuu

SEQ ID NO: 1103410 - RNA, 19 nt, Artificial Sequence
  Description of Artificial Sequence: Synthetic oligonucleotide
  Sense strand starting at position 2730 of SEQ ID NO: 915753
guauguaaucuccacagua

SEQ ID NO: 1103411 - RNA, 19 nt, Artificial Sequence
  Description of Artificial Sequence: Synthetic oligonucleotide
  Antisense strand to SEQ ID NO: 1103410
uacuguggagauuacauac

SEQ ID NO: 1103412 - RNA, 19 nt, Artificial Sequence
  Description of Artificial Sequence: Synthetic oligonucleotide
  Sense strand starting at position 2810 of SEQ ID NO: 915753
ggccguaaagcuaggaagu

SEQ ID NO: 1103413 - RNA, 19 nt, Artificial Sequence
  Description of Artificial Sequence: Synthetic oligonucleotide
  Antisense strand to SEQ ID NO: 1103412
acuuccuagcuuuacggcc

SEQ ID NO: 1103414 - RNA, 19 nt, Artificial Sequence
  Description of Artificial Sequence: Synthetic oligonucleotide
  Sense strand starting at position 2837 of SEQ ID NO: 915753
ugaaacuguucugugaucu

SEQ ID NO: 1103415 - RNA, 19 nt, Artificial Sequence
  Description of Artificial Sequence: Synthetic oligonucleotide
  Antisense strand to SEQ ID NO: 1103414
agaucacagaacaguuuca

SEQ ID NO: 1103416 - RNA, 19 nt, Artificial Sequence
  Description of Artificial Sequence: Synthetic oligonucleotide
  Sense strand starting at position 2838 of SEQ ID NO: 915753
gaaacuguucugugaucug

SEQ ID NO: 1103417 - RNA, 19 nt, Artificial Sequence
  Description of Artificial Sequence: Synthetic oligonucleotide
  Antisense strand to SEQ ID NO: 1103416
cagaucacagaacaguuuc

SEQ ID NO: 1103418 - RNA, 19 nt, Artificial Sequence
  Description of Artificial Sequence: Synthetic oligonucleotide
  Sense strand starting at position 2850 of SEQ ID NO: 915753
ugaucuguguccuccaaag

SEQ ID NO: 1103419 - RNA, 19 nt, Artificial Sequence
  Description of Artificial Sequence: Synthetic oligonucleotide
  Antisense strand to SEQ ID NO: 1103418
cuuuggaggacacagauca

SEQ ID NO: 1103420 - RNA, 19 nt, Artificial Sequence
  Description of Artificial Sequence: Synthetic oligonucleotide
  Sense strand starting at position 3379 of SEQ ID NO: 915753
gauuauuugcugggcguca

SEQ ID NO: 1103421 - RNA, 19 nt, Artificial Sequence
  Description of Artificial Sequence: Synthetic oligonucleotide
  Antisense strand to SEQ ID NO: 1103420
ugacgcccagcaaauaauc

SEQ ID NO: 1103422 - RNA, 19 nt, Artificial Sequence
  Description of Artificial Sequence: Synthetic oligonucleotide
  Sense strand starting at position 3402 of SEQ ID NO: 915753
cuguguuaggugcuacgua

SEQ ID NO: 1103423 - RNA, 19 nt, Artificial Sequence
  Description of Artificial Sequence: Synthetic oligonucleotide
  Antisense strand to SEQ ID NO: 1103422
uacguagcaccuaacacag

SEQ ID NO: 1103424 - RNA, 19 nt, Artificial Sequence
  Description of Artificial Sequence: Synthetic oligonucleotide
  Sense strand starting at position 3407 of SEQ ID NO: 915753
uuaggugcuacguacauau

SEQ ID NO: 1103425 - RNA, 19 nt, Artificial Sequence
  Description of Artificial Sequence: Synthetic oligonucleotide
  Antisense strand to SEQ ID NO: 1103424
auauguacguagcaccuaa

SEQ ID NO: 1103426 - RNA, 19 nt, Artificial Sequence
  Description of Artificial Sequence: Synthetic oligonucleotide
  Sense strand starting at position 3409 of SEQ ID NO: 915753
aggugcuacguacauauua

SEQ ID NO: 1103427 - RNA, 19 nt, Artificial Sequence
  Description of Artificial Sequence: Synthetic oligonucleotide
  Antisense strand to SEQ ID NO: 1103426
uaauauguacguagcaccu

SEQ ID NO: 1103428 - RNA, 19 nt, Artificial Sequence
  Description of Artificial Sequence: Synthetic oligonucleotide
  Sense strand starting at position 3516 of SEQ ID NO: 915753
caaggaucuugcccaaagu

SEQ ID NO: 1103429 - RNA, 19 nt, Artificial Sequence
  Description of Artificial Sequence: Synthetic oligonucleotide
  Antisense strand to SEQ ID NO: 1103428
acuuugggcaagauccuug

SEQ ID NO: 1103430 - RNA, 19 nt, Artificial Sequence
  Description of Artificial Sequence: Synthetic oligonucleotide
  Sense strand starting at position 3535 of SEQ ID NO: 915753
cacacagcuggucaaugau

SEQ ID NO: 1103431 - RNA, 19 nt, Artificial Sequence
  Description of Artificial Sequence: Synthetic oligonucleotide
  Antisense strand to SEQ ID NO: 1103430
aucauugaccagcugugug

SEQ ID NO: 1103432 - RNA, 19 nt, Artificial Sequence
  Description of Artificial Sequence: Synthetic oligonucleotide
  Sense strand starting at position 3538 of SEQ ID NO: 915753
acagcuggucaaugaugaa

SEQ ID NO: 1103433 - RNA, 19 nt, Artificial Sequence
  Description of Artificial Sequence: Synthetic oligonucleotide
  Antisense strand to SEQ ID NO: 1103432
uucaucauugaccagcugu

SEQ ID NO: 1103434 - RNA, 19 nt, Artificial Sequence
  Description of Artificial Sequence: Synthetic oligonucleotide
  Sense strand starting at position 3825 of SEQ ID NO: 915753
aagagcugucacugucacu

SEQ ID NO: 1103435 - RNA, 19 nt, Artificial Sequence
  Description of Artificial Sequence: Synthetic oligonucleotide
  Antisense strand to SEQ ID NO: 1103434
agugacagugacagcucuu

SEQ ID NO: 1103436 - RNA, 19 nt, Artificial Sequence
  Description of Artificial Sequence: Synthetic oligonucleotide
  Sense strand starting at position 3967 of SEQ ID NO: 915753
agagauuggucccuacccu

SEQ ID NO: 1103437 - RNA, 19 nt, Artificial Sequence
  Description of Artificial Sequence: Synthetic oligonucleotide
  Antisense strand to SEQ ID NO: 1103436
aggguagggaccaaucucu

SEQ ID NO: 1103438 - RNA, 19 nt, Artificial Sequence
  Description of Artificial Sequence: Synthetic oligonucleotide
  Sense strand starting at position 46 of SEQ ID NO: 915754
cuauuugugcuagguagag

SEQ ID NO: 1103439 - RNA, 19 nt, Artificial Sequence
  Description of Artificial Sequence: Synthetic oligonucleotide
  Antisense strand to SEQ ID NO: 1103438
cucuaccuagcacaaauag

SEQ ID NO: 1103440 - RNA, 19 nt, Artificial Sequence
  Description of Artificial Sequence: Synthetic oligonucleotide
  Sense strand starting at position 55 of SEQ ID NO: 915754
cuagguagaguuggaaaca

SEQ ID NO: 1103441 - RNA, 19 nt, Artificial Sequence
  Description of Artificial Sequence: Synthetic oligonucleotide
  Antisense strand to SEQ ID NO: 1103440
uguuuccaacucuaccuag

SEQ ID NO: 1103442 - RNA, 19 nt, Artificial Sequence
  Description of Artificial Sequence: Synthetic oligonucleotide
  Sense strand starting at position 128 of SEQ ID NO: 915754
cauggaauacuuuguggau

SEQ ID NO: 1103443 - RNA, 19 nt, Artificial Sequence
  Description of Artificial Sequence: Synthetic oligonucleotide
  Antisense strand to SEQ ID NO: 1103442
auccacaaaguauuccaug

SEQ ID NO: 1103444 - RNA, 19 nt, Artificial Sequence
  Description of Artificial Sequence: Synthetic oligonucleotide
  Sense strand starting at position 129 of SEQ ID NO: 915754
auggaauacuuuguggauc

SEQ ID NO: 1103445 - RNA, 19 nt, Artificial Sequence
  Description of Artificial Sequence: Synthetic oligonucleotide
  Antisense strand to SEQ ID NO: 1103444
gauccacaaaguauuccau

SEQ ID NO: 1103446 - RNA, 19 nt, Artificial Sequence
  Description of Artificial Sequence: Synthetic oligonucleotide
  Sense strand starting at position 140 of SEQ ID NO: 915754
uguggaucaucuuuggaca

SEQ ID NO: 1103447 - RNA, 19 nt, Artificial Sequence
  Description of Artificial Sequence: Synthetic oligonucleotide
  Antisense strand to SEQ ID NO: 1103446
uguccaaagaugauccaca

SEQ ID NO: 1103448 - RNA, 19 nt, Artificial Sequence
  Description of Artificial Sequence: Synthetic oligonucleotide
  Sense strand starting at position 141 of SEQ ID NO: 915754
guggaucaucuuuggacau

SEQ ID NO: 1103449 - RNA, 19 nt, Artificial Sequence
  Description of Artificial Sequence: Synthetic oligonucleotide
  Antisense strand to SEQ ID NO: 1103448
auguccaaagaugauccac

SEQ ID NO: 1103450 - RNA, 19 nt, Artificial Sequence
  Description of Artificial Sequence: Synthetic oligonucleotide
  Sense strand starting at position 148 of SEQ ID NO: 915754
aucuuuggacaugguauaa

SEQ ID NO: 1103451 - RNA, 19 nt, Artificial Sequence
  Description of Artificial Sequence: Synthetic oligonucleotide
  Antisense strand to SEQ ID NO: 1103450
uuauaccauguccaaagau

SEQ ID NO: 1103452 - RNA, 19 nt, Artificial Sequence
  Description of Artificial Sequence: Synthetic oligonucleotide
  Sense strand starting at position 161 of SEQ ID NO: 915754
guauaauauagugauguca

SEQ ID NO: 1103453 - RNA, 19 nt, Artificial Sequence
  Description of Artificial Sequence: Synthetic oligonucleotide
  Antisense strand to SEQ ID NO: 1103452
ugacaucacuauauuauac

SEQ ID NO: 1103454 - RNA, 19 nt, Artificial Sequence
  Description of Artificial Sequence: Synthetic oligonucleotide
  Sense strand starting at position 334 of SEQ ID NO: 915754
ucagauauaucacuuggca

SEQ ID NO: 1103455 - RNA, 19 nt, Artificial Sequence
  Description of Artificial Sequence: Synthetic oligonucleotide
  Antisense strand to SEQ ID NO: 1103454
ugccaagugauauaucuga

SEQ ID NO: 1103456 - RNA, 19 nt, Artificial Sequence
  Description of Artificial Sequence: Synthetic oligonucleotide
  Sense strand starting at position 337 of SEQ ID NO: 915754
gauauaucacuuggcagag

SEQ ID NO: 1103457 - RNA, 19 nt, Artificial Sequence
  Description of Artificial Sequence: Synthetic oligonucleotide
  Antisense strand to SEQ ID NO: 1103456
cucugccaagugauauauc

SEQ ID NO: 1103458 - RNA, 19 nt, Artificial Sequence
  Description of Artificial Sequence: Synthetic oligonucleotide
  Sense strand starting at position 338 of SEQ ID NO: 915754
auauaucacuuggcagaga

SEQ ID NO: 1103459 - RNA, 19 nt, Artificial Sequence
  Description of Artificial Sequence: Synthetic oligonucleotide
  Antisense strand to SEQ ID NO: 1103458
ucucugccaagugauauau

SEQ ID NO: 1103460 - RNA, 19 nt, Artificial Sequence
  Description of Artificial Sequence: Synthetic oligonucleotide
  Sense strand starting at position 418 of SEQ ID NO: 915754
gcuugaugucaccaaagua

SEQ ID NO: 1103461 - RNA, 19 nt, Artificial Sequence
  Description of Artificial Sequence: Synthetic oligonucleotide
  Antisense strand to SEQ ID NO: 1103460
uacuuuggugacaucaagc

SEQ ID NO: 1103462 - RNA, 19 nt, Artificial Sequence
  Description of Artificial Sequence: Synthetic oligonucleotide
  Sense strand starting at position 450 of SEQ ID NO: 915754
agaagacuccuagguuucu

SEQ ID NO: 1103463 - RNA, 19 nt, Artificial Sequence
  Description of Artificial Sequence: Synthetic oligonucleotide
  Antisense strand to SEQ ID NO: 1103462
agaaaccuaggagucuucu

SEQ ID NO: 1103464 - RNA, 19 nt, Artificial Sequence
  Description of Artificial Sequence: Synthetic oligonucleotide
  Sense strand starting at position 480 of SEQ ID NO: 915754
cuggaugaacagugauagu

SEQ ID NO: 1103465 - RNA, 19 nt, Artificial Sequence
  Description of Artificial Sequence: Synthetic oligonucleotide
  Antisense strand to SEQ ID NO: 1103464
acuaucacuguucauccag

SEQ ID NO: 1103466 - RNA, 19 nt, Artificial Sequence
  Description of Artificial Sequence: Synthetic oligonucleotide
  Sense strand starting at position 524 of SEQ ID NO: 915754
ggaaguaaacccuguuuag

SEQ ID NO: 1103467 - RNA, 19 nt, Artificial Sequence
  Description of Artificial Sequence: Synthetic oligonucleotide
  Antisense strand to SEQ ID NO: 1103466
cuaaacaggguuuacuucc

SEQ ID NO: 1103468 - RNA, 19 nt, Artificial Sequence
  Description of Artificial Sequence: Synthetic oligonucleotide
  Sense strand starting at position 543 of SEQ ID NO: 915754
ggaacacugugauuccaga

SEQ ID NO: 1103469 - RNA, 19 nt, Artificial Sequence
  Description of Artificial Sequence: Synthetic oligonucleotide
  Antisense strand to SEQ ID NO: 1103468
ucuggaaucacaguguucc

SEQ ID NO: 1103470 - RNA, 19 nt, Artificial Sequence
  Description of Artificial Sequence: Synthetic oligonucleotide
  Sense strand starting at position 1349 of SEQ ID NO: 915754
gggcuucucugauuuaguu

SEQ ID NO: 1103471 - RNA, 19 nt, Artificial Sequence
  Description of Artificial Sequence: Synthetic oligonucleotide
  Antisense strand to SEQ ID NO: 1103470
aacuaaaucagagaagccc

SEQ ID NO: 1103472 - RNA, 19 nt, Artificial Sequence
  Description of Artificial Sequence: Synthetic oligonucleotide
  Sense strand starting at position 1474 of SEQ ID NO: 915754
cccuaaagaucagcagaau

SEQ ID NO: 1103473 - RNA, 19 nt, Artificial Sequence
  Description of Artificial Sequence: Synthetic oligonucleotide
  Antisense strand to SEQ ID NO: 1103472
auucugcugaucuuuaggg

SEQ ID NO: 1103474 - RNA, 19 nt, Artificial Sequence
  Description of Artificial Sequence: Synthetic oligonucleotide
  Sense strand starting at position 1505 of SEQ ID NO: 915754
gcauauguccaauagauga

SEQ ID NO: 1103475 - RNA, 19 nt, Artificial Sequence
  Description of Artificial Sequence: Synthetic oligonucleotide
  Antisense strand to SEQ ID NO: 1103474
ucaucuauuggacauaugc

SEQ ID NO: 1103476 - RNA, 19 nt, Artificial Sequence
  Description of Artificial Sequence: Synthetic oligonucleotide
  Sense strand starting at position 1551 of SEQ ID NO: 915754
acuugcguuguggagauuu

SEQ ID NO: 1103477 - RNA, 19 nt, Artificial Sequence
  Description of Artificial Sequence: Synthetic oligonucleotide
  Antisense strand to SEQ ID NO: 1103476
aaaucuccacaacgcaagu

SEQ ID NO: 1103478 - RNA, 19 nt, Artificial Sequence
  Description of Artificial Sequence: Synthetic oligonucleotide
  Sense strand starting at position 1553 of SEQ ID NO: 915754
uugcguuguggagauuuca

SEQ ID NO: 1103479 - RNA, 19 nt, Artificial Sequence
  Description of Artificial Sequence: Synthetic oligonucleotide
  Antisense strand to SEQ ID NO: 1103478
ugaaaucuccacaacgcaa

SEQ ID NO: 1103480 - RNA, 19 nt, Artificial Sequence
  Description of Artificial Sequence: Synthetic oligonucleotide
  Sense strand starting at position 1584 of SEQ ID NO: 915754
uguaaugugguggaacuuu

SEQ ID NO: 1103481 - RNA, 19 nt, Artificial Sequence
  Description of Artificial Sequence: Synthetic oligonucleotide
  Antisense strand to SEQ ID NO: 1103480
aaaguuccaccacauuaca

SEQ ID NO: 1103482 - RNA, 19 nt, Artificial Sequence
  Description of Artificial Sequence: Synthetic oligonucleotide
  Sense strand starting at position 1939 of SEQ ID NO: 915754
cgccgauccgauaggaagu

SEQ ID NO: 1103483 - RNA, 19 nt, Artificial Sequence
  Description of Artificial Sequence: Synthetic oligonucleotide
  Antisense strand to SEQ ID NO: 1103482
acuuccuaucggaucggcg

SEQ ID NO: 1103484 - RNA, 19 nt, Artificial Sequence
  Description of Artificial Sequence: Synthetic oligonucleotide
  Sense strand starting at position 1945 of SEQ ID NO: 915754
uccgauaggaagugacaua

SEQ ID NO: 1103485 - RNA, 19 nt, Artificial Sequence
  Description of Artificial Sequence: Synthetic oligonucleotide
  Antisense strand to SEQ ID NO: 1103484
uaugucacuuccuaucgga

SEQ ID NO: 1103486 - RNA, 19 nt, Artificial Sequence
  Description of Artificial Sequence: Synthetic oligonucleotide
  Sense strand starting at position 2080 of SEQ ID NO: 915754
gcuuaucugcaugcgguaa

SEQ ID NO: 1103487 - RNA, 19 nt, Artificial Sequence
  Description of Artificial Sequence: Synthetic oligonucleotide
  Antisense strand to SEQ ID NO: 1103486
uuaccgcaugcagauaagc

SEQ ID NO: 1103488 - RNA, 19 nt, Artificial Sequence
  Description of Artificial Sequence: Synthetic oligonucleotide
  Sense strand starting at position 2092 of SEQ ID NO: 915754
gcgguaagccgauuggugu

SEQ ID NO: 1103489 - RNA, 19 nt, Artificial Sequence
  Description of Artificial Sequence: Synthetic oligonucleotide
  Antisense strand to SEQ ID NO: 1103488
acaccaaucggcuuaccgc

SEQ ID NO: 1103490 - RNA, 19 nt, Artificial Sequence
  Description of Artificial Sequence: Synthetic oligonucleotide
  Sense strand starting at position 2750 of SEQ ID NO: 915754
gcagcuugugcugugguua

SEQ ID NO: 1103491 - RNA, 19 nt, Artificial Sequence
  Description of Artificial Sequence: Synthetic oligonucleotide
  Antisense strand to SEQ ID NO: 1103490
uaaccacagcacaagcugc

SEQ ID NO: 1103492 - RNA, 19 nt, Artificial Sequence
  Description of Artificial Sequence: Synthetic oligonucleotide
  Sense strand starting at position 2753 of SEQ ID NO: 915754
gcuugugcugugguuauca

SEQ ID NO: 1103493 - RNA, 19 nt, Artificial Sequence
  Description of Artificial Sequence: Synthetic oligonucleotide
  Antisense strand to SEQ ID NO: 1103492
ugauaaccacagcacaagc

SEQ ID NO: 1103494 - RNA, 19 nt, Artificial Sequence
  Description of Artificial Sequence: Synthetic oligonucleotide
  Sense strand starting at position 2820 of SEQ ID NO: 915754
caaggucuuugaccuugaa

SEQ ID NO: 1103495 - RNA, 19 nt, Artificial Sequence
  Description of Artificial Sequence: Synthetic oligonucleotide
  Antisense strand to SEQ ID NO: 1103494
uucaaggucaaagaccuug

SEQ ID NO: 1103496 - RNA, 19 nt, Artificial Sequence
  Description of Artificial Sequence: Synthetic oligonucleotide
  Sense strand starting at position 2823 of SEQ ID NO: 915754
ggucuuugaccuugaacaa

SEQ ID NO: 1103497 - RNA, 19 nt, Artificial Sequence
  Description of Artificial Sequence: Synthetic oligonucleotide
  Antisense strand to SEQ ID NO: 1103496
uuguucaaggucaaagacc

SEQ ID NO: 1103498 - RNA, 19 nt, Artificial Sequence
  Description of Artificial Sequence: Synthetic oligonucleotide
  Sense strand starting at position 2860 of SEQ ID NO: 915754
guuucccaucucuaaagga

SEQ ID NO: 1103499 - RNA, 19 nt, Artificial Sequence
  Description of Artificial Sequence: Synthetic oligonucleotide
  Antisense strand to SEQ ID NO: 1103498
uccuuuagagaugggaaac

SEQ ID NO: 1103500 - RNA, 19 nt, Artificial Sequence
  Description of Artificial Sequence: Synthetic oligonucleotide
  Sense strand starting at position 3004 of SEQ ID NO: 915754
aguggaucgggauaucauc

SEQ ID NO: 1103501 - RNA, 19 nt, Artificial Sequence
  Description of Artificial Sequence: Synthetic oligonucleotide
  Antisense strand to SEQ ID NO: 1103500
gaugauaucccgauccacu

SEQ ID NO: 1103502 - RNA, 19 nt, Artificial Sequence
  Description of Artificial Sequence: Synthetic oligonucleotide
  Sense strand starting at position 3010 of SEQ ID NO: 915754
ucgggauaucaucgagacu

SEQ ID NO: 1103503 - RNA, 19 nt, Artificial Sequence
  Description of Artificial Sequence: Synthetic oligonucleotide
  Antisense strand to SEQ ID NO: 1103502
agucucgaugauaucccga

SEQ ID NO: 1103504 - RNA, 19 nt, Artificial Sequence
  Description of Artificial Sequence: Synthetic oligonucleotide
  Sense strand starting at position 3011 of SEQ ID NO: 915754
cgggauaucaucgagacug

SEQ ID NO: 1103505 - RNA, 19 nt, Artificial Sequence
  Description of Artificial Sequence: Synthetic oligonucleotide
  Antisense strand to SEQ ID NO: 1103504
cagucucgaugauaucccg

SEQ ID NO: 1103506 - RNA, 19 nt, Artificial Sequence
  Description of Artificial Sequence: Synthetic oligonucleotide
  Sense strand starting at position 3291 of SEQ ID NO: 915754
accagucauccagaaagcu

SEQ ID NO: 1103507 - RNA, 19 nt, Artificial Sequence
  Description of Artificial Sequence: Synthetic oligonucleotide
  Antisense strand to SEQ ID NO: 1103506
agcuuucuggaugacuggu

SEQ ID NO: 1103508 - RNA, 19 nt, Artificial Sequence
  Description of Artificial Sequence: Synthetic oligonucleotide
  Sense strand starting at position 3335 of SEQ ID NO: 915754
gggccaagaugguucuuga

SEQ ID NO: 1103509 - RNA, 19 nt, Artificial Sequence
  Description of Artificial Sequence: Synthetic oligonucleotide
  Antisense strand to SEQ ID NO: 1103508
ucaagaaccaucuuggccc

SEQ ID NO: 1103510 - RNA, 19 nt, Artificial Sequence
  Description of Artificial Sequence: Synthetic oligonucleotide
  Sense strand starting at position 3486 of SEQ ID NO: 915754
uguccuuuguccuuuauuu

SEQ ID NO: 1103511 - RNA, 19 nt, Artificial Sequence
  Description of Artificial Sequence: Synthetic oligonucleotide
  Antisense strand to SEQ ID NO: 1103510
aaauaaaggacaaaggaca

SEQ ID NO: 1103512 - RNA, 19 nt, Artificial Sequence
  Description of Artificial Sequence: Synthetic oligonucleotide
  Sense strand starting at position 3617 of SEQ ID NO: 915754
uacagaauccgagguuaaa

SEQ ID NO: 1103513 - RNA, 19 nt, Artificial Sequence
  Description of Artificial Sequence: Synthetic oligonucleotide
  Antisense strand to SEQ ID NO: 1103512
uuuaaccucggauucugua

SEQ ID NO: 1103514 - RNA, 19 nt, Artificial Sequence
  Description of Artificial Sequence: Synthetic oligonucleotide
  Sense strand starting at position 3652 of SEQ ID NO: 915754
cuuuauuucugagaacugg

SEQ ID NO: 1103515 - RNA, 19 nt, Artificial Sequence
  Description of Artificial Sequence: Synthetic oligonucleotide
  Antisense strand to SEQ ID NO: 1103514
ccaguucucagaaauaaag

SEQ ID NO: 1103516 - RNA, 19 nt, Artificial Sequence
  Description of Artificial Sequence: Synthetic oligonucleotide
  Sense strand starting at position 3967 of SEQ ID NO: 915754
aagacaucuguggguccua

SEQ ID NO: 1103517 - RNA, 19 nt, Artificial Sequence
  Description of Artificial Sequence: Synthetic oligonucleotide
  Antisense strand to SEQ ID NO: 1103516
uaggacccacagaugucuu

SEQ ID NO: 1103518 - RNA, 19 nt, Artificial Sequence
  Description of Artificial Sequence: Synthetic oligonucleotide
  Sense strand starting at position 45 of SEQ ID NO: 915755
gcacauauuucuuugguua

SEQ ID NO: 1103519 - RNA, 19 nt, Artificial Sequence
  Description of Artificial Sequence: Synthetic oligonucleotide
  Antisense strand to SEQ ID NO: 1103518
uaaccaaagaaauaugugc

SEQ ID NO: 1103520 - RNA, 19 nt, Artificial Sequence
  Description of Artificial Sequence: Synthetic oligonucleotide
  Sense strand starting at position 182 of SEQ ID NO: 915755
ucuaaugcagccuaaagaa

SEQ ID NO: 1103521 - RNA, 19 nt, Artificial Sequence
  Description of Artificial Sequence: Synthetic oligonucleotide
  Antisense strand to SEQ ID NO: 1103520
uucuuuaggcugcauuaga

SEQ ID NO: 1103522 - RNA, 19 nt, Artificial Sequence
  Description of Artificial Sequence: Synthetic oligonucleotide
  Sense strand starting at position 248 of SEQ ID NO: 915755
agucacauccuuggaaaua

SEQ ID NO: 1103523 - RNA, 19 nt, Artificial Sequence
  Description of Artificial Sequence: Synthetic oligonucleotide
  Antisense strand to SEQ ID NO: 1103522
uauuuccaaggaugugacu

SEQ ID NO: 1103524 - RNA, 19 nt, Artificial Sequence
  Description of Artificial Sequence: Synthetic oligonucleotide
  Sense strand starting at position 264 of SEQ ID NO: 915755
auaggauacaguggucaua

SEQ ID NO: 1103525 - RNA, 19 nt, Artificial Sequence
  Description of Artificial Sequence: Synthetic oligonucleotide
  Antisense strand to SEQ ID NO: 1103524
uaugaccacuguauccuau

SEQ ID NO: 1103526 - RNA, 19 nt, Artificial Sequence
  Description of Artificial Sequence: Synthetic oligonucleotide
  Sense strand starting at position 266 of SEQ ID NO: 915755
aggauacaguggucauaca

SEQ ID NO: 1103527 - RNA, 19 nt, Artificial Sequence
  Description of Artificial Sequence: Synthetic oligonucleotide
  Antisense strand to SEQ ID NO: 1103526
uguaugaccacuguauccu

SEQ ID NO: 1103528 - RNA, 19 nt, Artificial Sequence
  Description of Artificial Sequence: Synthetic oligonucleotide
  Sense strand starting at position 277 of SEQ ID NO: 915755
gucauacagcuggacuauu

SEQ ID NO: 1103529 - RNA, 19 nt, Artificial Sequence
  Description of Artificial Sequence: Synthetic oligonucleotide
  Antisense strand to SEQ ID NO: 1103528
aauaguccagcuguaugac

SEQ ID NO: 1103530 - RNA, 19 nt, Artificial Sequence
  Description of Artificial Sequence: Synthetic oligonucleotide
  Sense strand starting at position 351 of SEQ ID NO: 915755
guuaccugauaccuuuaua

SEQ ID NO: 1103531 - RNA, 19 nt, Artificial Sequence
  Description of Artificial Sequence: Synthetic oligonucleotide
  Antisense strand to SEQ ID NO: 1103530
uauaaagguaucagguaac

SEQ ID NO: 1103532 - RNA, 19 nt, Artificial Sequence
  Description of Artificial Sequence: Synthetic oligonucleotide
  Sense strand starting at position 488 of SEQ ID NO: 915755
cuguuuaagccucaggauc

SEQ ID NO: 1103533 - RNA, 19 nt, Artificial Sequence
  Description of Artificial Sequence: Synthetic oligonucleotide
  Antisense strand to SEQ ID NO: 1103532
gauccugaggcuuaaacag

SEQ ID NO: 1103534 - RNA, 19 nt, Artificial Sequence
  Description of Artificial Sequence: Synthetic oligonucleotide
  Sense strand starting at position 627 of SEQ ID NO: 915755
gaccaauuagucugggaua

SEQ ID NO: 1103535 - RNA, 19 nt, Artificial Sequence
  Description of Artificial Sequence: Synthetic oligonucleotide
  Antisense strand to SEQ ID NO: 1103534
uaucccagacuaauugguc

SEQ ID NO: 1103536 - RNA, 19 nt, Artificial Sequence
  Description of Artificial Sequence: Synthetic oligonucleotide
  Sense strand starting at position 629 of SEQ ID NO: 915755
ccaauuagucugggauaag

SEQ ID NO: 1103537 - RNA, 19 nt, Artificial Sequence
  Description of Artificial Sequence: Synthetic oligonucleotide
  Antisense strand to SEQ ID NO: 1103536
cuuaucccagacuaauugg

SEQ ID NO: 1103538 - RNA, 19 nt, Artificial Sequence
  Description of Artificial Sequence: Synthetic oligonucleotide
  Sense strand starting at position 686 of SEQ ID NO: 915755
uccuguugugaauaauaau

SEQ ID NO: 1103539 - RNA, 19 nt, Artificial Sequence
  Description of Artificial Sequence: Synthetic oligonucleotide
  Antisense strand to SEQ ID NO: 1103538
auuauuauucacaacagga

SEQ ID NO: 1103540 - RNA, 19 nt, Artificial Sequence
  Description of Artificial Sequence: Synthetic oligonucleotide
  Sense strand starting at position 828 of SEQ ID NO: 915755
uacuauguucugggaaaug

SEQ ID NO: 1103541 - RNA, 19 nt, Artificial Sequence
  Description of Artificial Sequence: Synthetic oligonucleotide
  Antisense strand to SEQ ID NO: 1103540
cauuucccagaacauagua

SEQ ID NO: 1103542 - RNA, 19 nt, Artificial Sequence
  Description of Artificial Sequence: Synthetic oligonucleotide
  Sense strand starting at position 833 of SEQ ID NO: 915755
uguucugggaaaugcaaua

SEQ ID NO: 1103543 - RNA, 19 nt, Artificial Sequence
  Description of Artificial Sequence: Synthetic oligonucleotide
  Antisense strand to SEQ ID NO: 1103542
uauugcauuucccagaaca

SEQ ID NO: 1103544 - RNA, 19 nt, Artificial Sequence
  Description of Artificial Sequence: Synthetic oligonucleotide
  Sense strand starting at position 926 of SEQ ID NO: 915755
uaaagugugcuauaaagga

SEQ ID NO: 1103545 - RNA, 19 nt, Artificial Sequence
  Description of Artificial Sequence: Synthetic oligonucleotide
  Antisense strand to SEQ ID NO: 1103544
uccuuuauagcacacuuua

SEQ ID NO: 1103546 - RNA, 19 nt, Artificial Sequence
  Description of Artificial Sequence: Synthetic oligonucleotide
  Sense strand starting at position 958 of SEQ ID NO: 915755
cauugagaguucuuaacag

SEQ ID NO: 1103547 - RNA, 19 nt, Artificial Sequence
  Description of Artificial Sequence: Synthetic oligonucleotide
  Antisense strand to SEQ ID NO: 1103546
cuguuaagaacucucaaug

SEQ ID NO: 1103548 - RNA, 19 nt, Artificial Sequence
  Description of Artificial Sequence: Synthetic oligonucleotide
  Sense strand starting at position 1028 of SEQ ID NO: 915755
uuuauacccugccugaaga

SEQ ID NO: 1103549 - RNA, 19 nt, Artificial Sequence
  Description of Artificial Sequence: Synthetic oligonucleotide
  Antisense strand to SEQ ID NO: 1103548
ucuucaggcaggguauaaa

SEQ ID NO: 1103550 - RNA, 19 nt, Artificial Sequence
  Description of Artificial Sequence: Synthetic oligonucleotide
  Sense strand starting at position 1029 of SEQ ID NO: 915755
uuauacccugccugaagaa

SEQ ID NO: 1103551 - RNA, 19 nt, Artificial Sequence
  Description of Artificial Sequence: Synthetic oligonucleotide
  Antisense strand to SEQ ID NO: 1103550
uucuucaggcaggguauaa

SEQ ID NO: 1103552 - RNA, 19 nt, Artificial Sequence
  Description of Artificial Sequence: Synthetic oligonucleotide
  Sense strand starting at position 1041 of SEQ ID NO: 915755
ugaagaagugauuguuaag

SEQ ID NO: 1103553 - RNA, 19 nt, Artificial Sequence
  Description of Artificial Sequence: Synthetic oligonucleotide
  Antisense strand to SEQ ID NO: 1103552
cuuaacaaucacuucuuca

SEQ ID NO: 1103554 - RNA, 19 nt, Artificial Sequence
  Description of Artificial Sequence: Synthetic oligonucleotide
  Sense strand starting at position 1081 of SEQ ID NO: 915755
guauaucuagcauaucuua

SEQ ID NO: 1103555 - RNA, 19 nt, Artificial Sequence
  Description of Artificial Sequence: Synthetic oligonucleotide
  Antisense strand to SEQ ID NO: 1103554
uaagauaugcuagauauac

SEQ ID NO: 1103556 - RNA, 19 nt, Artificial Sequence
  Description of Artificial Sequence: Synthetic oligonucleotide
  Sense strand starting at position 1986 of SEQ ID NO: 915755
cuacuacuacagugauuau

SEQ ID NO: 1103557 - RNA, 19 nt, Artificial Sequence
  Description of Artificial Sequence: Synthetic oligonucleotide
  Antisense strand to SEQ ID NO: 1103556
auaaucacuguaguaguag

SEQ ID NO: 1103558 - RNA, 19 nt, Artificial Sequence
  Description of Artificial Sequence: Synthetic oligonucleotide
  Sense strand starting at position 2128 of SEQ ID NO: 915755
guaucccaccagugggaua

SEQ ID NO: 1103559 - RNA, 19 nt, Artificial Sequence
  Description of Artificial Sequence: Synthetic oligonucleotide
  Antisense strand to SEQ ID NO: 1103558
uaucccacuggugggauac

SEQ ID NO: 1103560 - RNA, 19 nt, Artificial Sequence
  Description of Artificial Sequence: Synthetic oligonucleotide
  Sense strand starting at position 2139 of SEQ ID NO: 915755
gugggauaggccuauguua

SEQ ID NO: 1103561 - RNA, 19 nt, Artificial Sequence
  Description of Artificial Sequence: Synthetic oligonucleotide
  Antisense strand to SEQ ID NO: 1103560
uaacauaggccuaucccac

SEQ ID NO: 1103562 - RNA, 19 nt, Artificial Sequence
  Description of Artificial Sequence: Synthetic oligonucleotide
  Sense strand starting at position 2141 of SEQ ID NO: 915755
gggauaggccuauguuaaa

SEQ ID NO: 1103563 - RNA, 19 nt, Artificial Sequence
  Description of Artificial Sequence: Synthetic oligonucleotide
  Antisense strand to SEQ ID NO: 1103562
uuuaacauaggccuauccc

SEQ ID NO: 1103564 - RNA, 19 nt, Artificial Sequence
  Description of Artificial Sequence: Synthetic oligonucleotide
  Sense strand starting at position 2358 of SEQ ID NO: 915755
auggguuuaagguaguuau

SEQ ID NO: 1103565 - RNA, 19 nt, Artificial Sequence
  Description of Artificial Sequence: Synthetic oligonucleotide
  Antisense strand to SEQ ID NO: 1103564
auaacuaccuuaaacccau

SEQ ID NO: 1103566 - RNA, 19 nt, Artificial Sequence
  Description of Artificial Sequence: Synthetic oligonucleotide
  Sense strand starting at position 2395 of SEQ ID NO: 915755
aggcuacaauguuugaaga

SEQ ID NO: 1103567 - RNA, 19 nt, Artificial Sequence
  Description of Artificial Sequence: Synthetic oligonucleotide
  Antisense strand to SEQ ID NO: 1103566
ucuucaaacauuguagccu

SEQ ID NO: 1103568 - RNA, 19 nt, Artificial Sequence
  Description of Artificial Sequence: Synthetic oligonucleotide
  Sense strand starting at position 2396 of SEQ ID NO: 915755
ggcuacaauguuugaagaa

SEQ ID NO: 1103569 - RNA, 19 nt, Artificial Sequence
  Description of Artificial Sequence: Synthetic oligonucleotide
  Antisense strand to SEQ ID NO: 1103568
uucuucaaacauuguagcc

SEQ ID NO: 1103570 - RNA, 19 nt, Artificial Sequence
  Description of Artificial Sequence: Synthetic oligonucleotide
  Sense strand starting at position 2534 of SEQ ID NO: 915755
ucugauaauccugaugcau

SEQ ID NO: 1103571 - RNA, 19 nt, Artificial Sequence
  Description of Artificial Sequence: Synthetic oligonucleotide
  Antisense strand to SEQ ID NO: 1103570
augcaucaggauuaucaga

SEQ ID NO: 1103572 - RNA, 19 nt, Artificial Sequence
  Description of Artificial Sequence: Synthetic oligonucleotide
  Sense strand starting at position 2592 of SEQ ID NO: 915755
ggcgauuugcuucauugug

SEQ ID NO: 1103573 - RNA, 19 nt, Artificial Sequence
  Description of Artificial Sequence: Synthetic oligonucleotide
  Antisense strand to SEQ ID NO: 1103572
cacaaugaagcaaaucgcc

SEQ ID NO: 1103574 - RNA, 19 nt, Artificial Sequence
  Description of Artificial Sequence: Synthetic oligonucleotide
  Sense strand starting at position 2959 of SEQ ID NO: 915755
cucaauuagugagugaaug

SEQ ID NO: 1103575 - RNA, 19 nt, Artificial Sequence
  Description of Artificial Sequence: Synthetic oligonucleotide
  Antisense strand to SEQ ID NO: 1103574
cauucacucacuaauugag

SEQ ID NO: 1103576 - RNA, 19 nt, Artificial Sequence
  Description of Artificial Sequence: Synthetic oligonucleotide
  Sense strand starting at position 2960 of SEQ ID NO: 915755
ucaauuagugagugaauga

SEQ ID NO: 1103577 - RNA, 19 nt, Artificial Sequence
  Description of Artificial Sequence: Synthetic oligonucleotide
  Antisense strand to SEQ ID NO: 1103576
ucauucacucacuaauuga

SEQ ID NO: 1103578 - RNA, 19 nt, Artificial Sequence
  Description of Artificial Sequence: Synthetic oligonucleotide
  Sense strand starting at position 3048 of SEQ ID NO: 915755
uguauagugagcuagggaa

SEQ ID NO: 1103579 - RNA, 19 nt, Artificial Sequence
  Description of Artificial Sequence: Synthetic oligonucleotide
  Antisense strand to SEQ ID NO: 1103578
uucccuagcucacuauaca

SEQ ID NO: 1103580 - RNA, 19 nt, Artificial Sequence
  Description of Artificial Sequence: Synthetic oligonucleotide
  Sense strand starting at position 3155 of SEQ ID NO: 915755
gauguauuugugggcugau

SEQ ID NO: 1103581 - RNA, 19 nt, Artificial Sequence
  Description of Artificial Sequence: Synthetic oligonucleotide
  Antisense strand to SEQ ID NO: 1103580
aucagcccacaaauacauc

SEQ ID NO: 1103582 - RNA, 19 nt, Artificial Sequence
  Description of Artificial Sequence: Synthetic oligonucleotide
  Sense strand starting at position 3158 of SEQ ID NO: 915755
guauuugugggcugauauu

SEQ ID NO: 1103583 - RNA, 19 nt, Artificial Sequence
  Description of Artificial Sequence: Synthetic oligonucleotide
  Antisense strand to SEQ ID NO: 1103582
aauaucagcccacaaauac

SEQ ID NO: 1103584 - RNA, 19 nt, Artificial Sequence
  Description of Artificial Sequence: Synthetic oligonucleotide
  Sense strand starting at position 3210 of SEQ ID NO: 915755
aaguguuaucaagggagug

SEQ ID NO: 1103585 - RNA, 19 nt, Artificial Sequence
  Description of Artificial Sequence: Synthetic oligonucleotide
  Antisense strand to SEQ ID NO: 1103584
cacucccuugauaacacuu

SEQ ID NO: 1103586 - RNA, 19 nt, Artificial Sequence
  Description of Artificial Sequence: Synthetic oligonucleotide
  Sense strand starting at position 3220 of SEQ ID NO: 915755
aagggagugccuugauuaa

SEQ ID NO: 1103587 - RNA, 19 nt, Artificial Sequence
  Description of Artificial Sequence: Synthetic oligonucleotide
  Antisense strand to SEQ ID NO: 1103586
uuaaucaaggcacucccuu

SEQ ID NO: 1103588 - RNA, 19 nt, Artificial Sequence
  Description of Artificial Sequence: Synthetic oligonucleotide
  Sense strand starting at position 3224 of SEQ ID NO: 915755
gagugccuugauuaauauc

SEQ ID NO: 1103589 - RNA, 19 nt, Artificial Sequence
  Description of Artificial Sequence: Synthetic oligonucleotide
  Antisense strand to SEQ ID NO: 1103588
gauauuaaucaaggcacuc

SEQ ID NO: 1103590 - RNA, 19 nt, Artificial Sequence
  Description of Artificial Sequence: Synthetic oligonucleotide
  Sense strand starting at position 3240 of SEQ ID NO: 915755
aucucaaagagugggcaua

SEQ ID NO: 1103591 - RNA, 19 nt, Artificial Sequence
  Description of Artificial Sequence: Synthetic oligonucleotide
  Antisense strand to SEQ ID NO: 1103590
uaugcccacucuuugagau

SEQ ID NO: 1103592 - RNA, 19 nt, Artificial Sequence
  Description of Artificial Sequence: Synthetic oligonucleotide
  Sense strand starting at position 3241 of SEQ ID NO: 915755
ucucaaagagugggcauaa

SEQ ID NO: 1103593 - RNA, 19 nt, Artificial Sequence
  Description of Artificial Sequence: Synthetic oligonucleotide
  Antisense strand to SEQ ID NO: 1103592
uuaugcccacucuuugaga

SEQ ID NO: 1103594 - RNA, 19 nt, Artificial Sequence
  Description of Artificial Sequence: Synthetic oligonucleotide
  Sense strand starting at position 3449 of SEQ ID NO: 915755
ugagcugaagagugacaaa

SEQ ID NO: 1103595 - RNA, 19 nt, Artificial Sequence
  Description of Artificial Sequence: Synthetic oligonucleotide
  Antisense strand to SEQ ID NO: 1103594
uuugucacucuucagcuca

SEQ ID NO: 1103596 - RNA, 19 nt, Artificial Sequence
  Description of Artificial Sequence: Synthetic oligonucleotide
  Sense strand starting at position 3569 of SEQ ID NO: 915755
aagugaaagcuuugaggag

SEQ ID NO: 1103597 - RNA, 19 nt, Artificial Sequence
  Description of Artificial Sequence: Synthetic oligonucleotide
  Antisense strand to SEQ ID NO: 1103596
cuccucaaagcuuucacuu

SEQ ID NO: 1103598 - RNA, 19 nt, Artificial Sequence
  Description of Artificial Sequence: Synthetic oligonucleotide
  Sense strand starting at position 31 of SEQ ID NO: 915756
aagggucuacuuugauuaa

SEQ ID NO: 1103599 - RNA, 19 nt, Artificial Sequence
  Description of Artificial Sequence: Synthetic oligonucleotide
  Antisense strand to SEQ ID NO: 1103598
uuaaucaaaguagacccuu

SEQ ID NO: 1103600 - RNA, 19 nt, Artificial Sequence
  Description of Artificial Sequence: Synthetic oligonucleotide
  Sense strand starting at position 34 of SEQ ID NO: 915756
ggucuacuuugauuaacag

SEQ ID NO: 1103601 - RNA, 19 nt, Artificial Sequence
  Description of Artificial Sequence: Synthetic oligonucleotide
  Antisense strand to SEQ ID NO: 1103600
cuguuaaucaaaguagacc

SEQ ID NO: 1103602 - RNA, 19 nt, Artificial Sequence
  Description of Artificial Sequence: Synthetic oligonucleotide
  Sense strand starting at position 315 of SEQ ID NO: 915756
gcggaaguuacagagauug

SEQ ID NO: 1103603 - RNA, 19 nt, Artificial Sequence
  Description of Artificial Sequence: Synthetic oligonucleotide
  Antisense strand to SEQ ID NO: 1103602
caaucucuguaacuuccgc

SEQ ID NO: 1103604 - RNA, 19 nt, Artificial Sequence
  Description of Artificial Sequence: Synthetic oligonucleotide
  Sense strand starting at position 454 of SEQ ID NO: 915756
uuacuuggcccucacugau

SEQ ID NO: 1103605 - RNA, 19 nt, Artificial Sequence
  Description of Artificial Sequence: Synthetic oligonucleotide
  Antisense strand to SEQ ID NO: 1103604
aucagugagggccaaguaa

SEQ ID NO: 1103606 - RNA, 19 nt, Artificial Sequence
  Description of Artificial Sequence: Synthetic oligonucleotide
  Sense strand starting at position 457 of SEQ ID NO: 915756
cuuggcccucacugauuaa

SEQ ID NO: 1103607 - RNA, 19 nt, Artificial Sequence
  Description of Artificial Sequence: Synthetic oligonucleotide
  Antisense strand to SEQ ID NO: 1103606
uuaaucagugagggccaag

SEQ ID NO: 1103608 - RNA, 19 nt, Artificial Sequence
  Description of Artificial Sequence: Synthetic oligonucleotide
  Sense strand starting at position 460 of SEQ ID NO: 915756
ggcccucacugauuaaguu

SEQ ID NO: 1103609 - RNA, 19 nt, Artificial Sequence
  Description of Artificial Sequence: Synthetic oligonucleotide
  Antisense strand to SEQ ID NO: 1103608
aacuuaaucagugagggcc

SEQ ID NO: 1103610 - RNA, 19 nt, Artificial Sequence
  Description of Artificial Sequence: Synthetic oligonucleotide
  Sense strand starting at position 461 of SEQ ID NO: 915756
gcccucacugauuaaguuu

SEQ ID NO: 1103611 - RNA, 19 nt, Artificial Sequence
  Description of Artificial Sequence: Synthetic oligonucleotide
  Antisense strand to SEQ ID NO: 1103610
aaacuuaaucagugagggc

SEQ ID NO: 1103612 - RNA, 19 nt, Artificial Sequence
  Description of Artificial Sequence: Synthetic oligonucleotide
  Sense strand starting at position 467 of SEQ ID NO: 915756
acugauuaaguuuggccaa

SEQ ID NO: 1103613 - RNA, 19 nt, Artificial Sequence
  Description of Artificial Sequence: Synthetic oligonucleotide
  Antisense strand to SEQ ID NO: 1103612
uuggccaaacuuaaucagu

SEQ ID NO: 1103614 - RNA, 19 nt, Artificial Sequence
  Description of Artificial Sequence: Synthetic oligonucleotide
  Sense strand starting at position 469 of SEQ ID NO: 915756
ugauuaaguuuggccaacu

SEQ ID NO: 1103615 - RNA, 19 nt, Artificial Sequence
  Description of Artificial Sequence: Synthetic oligonucleotide
  Antisense strand to SEQ ID NO: 1103614
aguuggccaaacuuaauca

SEQ ID NO: 1103616 - RNA, 19 nt, Artificial Sequence
  Description of Artificial Sequence: Synthetic oligonucleotide
  Sense strand starting at position 563 of SEQ ID NO: 915756
cuaagaaaucugcacggca

SEQ ID NO: 1103617 - RNA, 19 nt, Artificial Sequence
  Description of Artificial Sequence: Synthetic oligonucleotide
  Antisense strand to SEQ ID NO: 1103616
ugccgugcagauuucuuag

SEQ ID NO: 1103618 - RNA, 19 nt, Artificial Sequence
  Description of Artificial Sequence: Synthetic oligonucleotide
  Sense strand starting at position 1075 of SEQ ID NO: 915756
caguauuccagacggagag

SEQ ID NO: 1103619 - RNA, 19 nt, Artificial Sequence
  Description of Artificial Sequence: Synthetic oligonucleotide
  Antisense strand to SEQ ID NO: 1103618
cucuccgucuggaauacug

SEQ ID NO: 1103620 - RNA, 19 nt, Artificial Sequence
  Description of Artificial Sequence: Synthetic oligonucleotide
  Sense strand starting at position 2261 of SEQ ID NO: 915756
ucuagaugcgguuauuaau

SEQ ID NO: 1103621 - RNA, 19 nt, Artificial Sequence
  Description of Artificial Sequence: Synthetic oligonucleotide
  Antisense strand to SEQ ID NO: 1103620
auuaauaaccgcaucuaga

SEQ ID NO: 1103622 - RNA, 19 nt, Artificial Sequence
  Description of Artificial Sequence: Synthetic oligonucleotide
  Sense strand starting at position 2268 of SEQ ID NO: 915756
gcgguuauuaauggaaauu

SEQ ID NO: 1103623 - RNA, 19 nt, Artificial Sequence
  Description of Artificial Sequence: Synthetic oligonucleotide
  Antisense strand to SEQ ID NO: 1103622
aauuuccauuaauaaccgc

SEQ ID NO: 1103624 - RNA, 19 nt, Artificial Sequence
  Description of Artificial Sequence: Synthetic oligonucleotide
  Sense strand starting at position 2287 of SEQ ID NO: 915756
gggugaacugguggaugau

SEQ ID NO: 1103625 - RNA, 19 nt, Artificial Sequence
  Description of Artificial Sequence: Synthetic oligonucleotide
  Antisense strand to SEQ ID NO: 1103624
aucauccaccaguucaccc

SEQ ID NO: 1103626 - RNA, 19 nt, Artificial Sequence
  Description of Artificial Sequence: Synthetic oligonucleotide
  Sense strand starting at position 2399 of SEQ ID NO: 915756
gaaguugaguucccaauca

SEQ ID NO: 1103627 - RNA, 19 nt, Artificial Sequence
  Description of Artificial Sequence: Synthetic oligonucleotide
  Antisense strand to SEQ ID NO: 1103626
ugauugggaacucaacuuc

SEQ ID NO: 1103628 - RNA, 19 nt, Artificial Sequence
  Description of Artificial Sequence: Synthetic oligonucleotide
  Sense strand starting at position 2460 of SEQ ID NO: 915756
gguuauggucagugacuga

SEQ ID NO: 1103629 - RNA, 19 nt, Artificial Sequence
  Description of Artificial Sequence: Synthetic oligonucleotide
  Antisense strand to SEQ ID NO: 1103628
ucagucacugaccauaacc

SEQ ID NO: 1103630 - RNA, 19 nt, Artificial Sequence
  Description of Artificial Sequence: Synthetic oligonucleotide
  Sense strand starting at position 2463 of SEQ ID NO: 915756
uauggucagugacugaaua

SEQ ID NO: 1103631 - RNA, 19 nt, Artificial Sequence
  Description of Artificial Sequence: Synthetic oligonucleotide
  Antisense strand to SEQ ID NO: 1103630
uauucagucacugaccaua

SEQ ID NO: 1103632 - RNA, 19 nt, Artificial Sequence
  Description of Artificial Sequence: Synthetic oligonucleotide
  Sense strand starting at position 2465 of SEQ ID NO: 915756
uggucagugacugaauagu

SEQ ID NO: 1103633 - RNA, 19 nt, Artificial Sequence
  Description of Artificial Sequence: Synthetic oligonucleotide
  Antisense strand to SEQ ID NO: 1103632
acuauucagucacugacca

SEQ ID NO: 1103634 - RNA, 19 nt, Artificial Sequence
  Description of Artificial Sequence: Synthetic oligonucleotide
  Sense strand starting at position 2711 of SEQ ID NO: 915756
uucauuagggaguggauau

SEQ ID NO: 1103635 - RNA, 19 nt, Artificial Sequence
  Description of Artificial Sequence: Synthetic oligonucleotide
  Antisense strand to SEQ ID NO: 1103634
auauccacucccuaaugaa

SEQ ID NO: 1103636 - RNA, 19 nt, Artificial Sequence
  Description of Artificial Sequence: Synthetic oligonucleotide
  Sense strand starting at position 2771 of SEQ ID NO: 915756
gcacaauaauaagugaauu

SEQ ID NO: 1103637 - RNA, 19 nt, Artificial Sequence
  Description of Artificial Sequence: Synthetic oligonucleotide
  Antisense strand to SEQ ID NO: 1103636
aauucacuuauuauugugc

SEQ ID NO: 1103638 - RNA, 19 nt, Artificial Sequence
  Description of Artificial Sequence: Synthetic oligonucleotide
  Sense strand starting at position 2789 of SEQ ID NO: 915756
uguaucauaggcuggacaa

SEQ ID NO: 1103639 - RNA, 19 nt, Artificial Sequence
  Description of Artificial Sequence: Synthetic oligonucleotide
  Antisense strand to SEQ ID NO: 1103638
uuguccagccuaugauaca

SEQ ID NO: 1103640 - RNA, 19 nt, Artificial Sequence
  Description of Artificial Sequence: Synthetic oligonucleotide
  Sense strand starting at position 2790 of SEQ ID NO: 915756
guaucauaggcuggacaaa

SEQ ID NO: 1103641 - RNA, 19 nt, Artificial Sequence
  Description of Artificial Sequence: Synthetic oligonucleotide
  Antisense strand to SEQ ID NO: 1103640
uuuguccagccuaugauac

SEQ ID NO: 1103642 - RNA, 19 nt, Artificial Sequence
  Description of Artificial Sequence: Synthetic oligonucleotide
  Sense strand starting at position 2892 of SEQ ID NO: 915756
aacccucuuucguuuggaa

SEQ ID NO: 1103643 - RNA, 19 nt, Artificial Sequence
  Description of Artificial Sequence: Synthetic oligonucleotide
  Antisense strand to SEQ ID NO: 1103642
uuccaaacgaaagaggguu

SEQ ID NO: 1103644 - RNA, 19 nt, Artificial Sequence
  Description of Artificial Sequence: Synthetic oligonucleotide
  Sense strand starting at position 2940 of SEQ ID NO: 915756
gggucccacuugcuauaau

SEQ ID NO: 1103645 - RNA, 19 nt, Artificial Sequence
  Description of Artificial Sequence: Synthetic oligonucleotide
  Antisense strand to SEQ ID NO: 1103644
auuauagcaagugggaccc

SEQ ID NO: 1103646 - RNA, 19 nt, Artificial Sequence
  Description of Artificial Sequence: Synthetic oligonucleotide
  Sense strand starting at position 3097 of SEQ ID NO: 915756
acccuaggaguguguuuaa

SEQ ID NO: 1103647 - RNA, 19 nt, Artificial Sequence
  Description of Artificial Sequence: Synthetic oligonucleotide
  Antisense strand to SEQ ID NO: 1103646
uuaaacacacuccuagggu

SEQ ID NO: 1103648 - RNA, 19 nt, Artificial Sequence
  Description of Artificial Sequence: Synthetic oligonucleotide
  Sense strand starting at position 3100 of SEQ ID NO: 915756
cuaggaguguguuuaauca

SEQ ID NO: 1103649 - RNA, 19 nt, Artificial Sequence
  Description of Artificial Sequence: Synthetic oligonucleotide
  Antisense strand to SEQ ID NO: 1103648
ugauuaaacacacuccuag

SEQ ID NO: 1103650 - RNA, 19 nt, Artificial Sequence
  Description of Artificial Sequence: Synthetic oligonucleotide
  Sense strand starting at position 3108 of SEQ ID NO: 915756
guguuuaaucauuauccca

SEQ ID NO: 1103651 - RNA, 19 nt, Artificial Sequence
  Description of Artificial Sequence: Synthetic oligonucleotide
  Antisense strand to SEQ ID NO: 1103650
ugggauaaugauuaaacac

SEQ ID NO: 1103652 - RNA, 19 nt, Artificial Sequence
  Description of Artificial Sequence: Synthetic oligonucleotide
  Sense strand starting at position 3110 of SEQ ID NO: 915756
guuuaaucauuaucccagu

SEQ ID NO: 1103653 - RNA, 19 nt, Artificial Sequence
  Description of Artificial Sequence: Synthetic oligonucleotide
  Antisense strand to SEQ ID NO: 1103652
acugggauaaugauuaaac

SEQ ID NO: 1103654 - RNA, 19 nt, Artificial Sequence
  Description of Artificial Sequence: Synthetic oligonucleotide
  Sense strand starting at position 3214 of SEQ ID NO: 915756
cggugccuuagacaaguua

SEQ ID NO: 1103655 - RNA, 19 nt, Artificial Sequence
  Description of Artificial Sequence: Synthetic oligonucleotide
  Antisense strand to SEQ ID NO: 1103654
uaacuugucuaaggcaccg

SEQ ID NO: 1103656 - RNA, 19 nt, Artificial Sequence
  Description of Artificial Sequence: Synthetic oligonucleotide
  Sense strand starting at position 3389 of SEQ ID NO: 915756
cuuuauaaggccugugaag

SEQ ID NO: 1103657 - RNA, 19 nt, Artificial Sequence
  Description of Artificial Sequence: Synthetic oligonucleotide
  Antisense strand to SEQ ID NO: 1103656
cuucacaggccuuauaaag

SEQ ID NO: 1103658 - RNA, 19 nt, Artificial Sequence
  Description of Artificial Sequence: Synthetic oligonucleotide
  Sense strand starting at position 3391 of SEQ ID NO: 915756
uuauaaggccugugaaggu

SEQ ID NO: 1103659 - RNA, 19 nt, Artificial Sequence
  Description of Artificial Sequence: Synthetic oligonucleotide
  Antisense strand to SEQ ID NO: 1103658
accuucacaggccuuauaa

SEQ ID NO: 1103660 - RNA, 19 nt, Artificial Sequence
  Description of Artificial Sequence: Synthetic oligonucleotide
  Sense strand starting at position 3448 of SEQ ID NO: 915756
cggaauugguuuccuaaag

SEQ ID NO: 1103661 - RNA, 19 nt, Artificial Sequence
  Description of Artificial Sequence: Synthetic oligonucleotide
  Antisense strand to SEQ ID NO: 1103660
cuuuaggaaaccaauuccg

SEQ ID NO: 1103662 - RNA, 19 nt, Artificial Sequence
  Description of Artificial Sequence: Synthetic oligonucleotide
  Sense strand starting at position 3449 of SEQ ID NO: 915756
ggaauugguuuccuaaaga

SEQ ID NO: 1103663 - RNA, 19 nt, Artificial Sequence
  Description of Artificial Sequence: Synthetic oligonucleotide
  Antisense strand to SEQ ID NO: 1103662
ucuuuaggaaaccaauucc

SEQ ID NO: 1103664 - RNA, 19 nt, Artificial Sequence
  Description of Artificial Sequence: Synthetic oligonucleotide
  Sense strand starting at position 3515 of SEQ ID NO: 915756
agcaacaauguguauuaau

SEQ ID NO: 1103665 - RNA, 19 nt, Artificial Sequence
  Description of Artificial Sequence: Synthetic oligonucleotide
  Antisense strand to SEQ ID NO: 1103664
auuaauacacauuguugcu

SEQ ID NO: 1103666 - RNA, 19 nt, Artificial Sequence
  Description of Artificial Sequence: Synthetic oligonucleotide
  Sense strand starting at position 3565 of SEQ ID NO: 915756
aauuaaugcuuccugggua

SEQ ID NO: 1103667 - RNA, 19 nt, Artificial Sequence
  Description of Artificial Sequence: Synthetic oligonucleotide
  Antisense strand to SEQ ID NO: 1103666
uacccaggaagcauuaauu

SEQ ID NO: 1103668 - RNA, 19 nt, Artificial Sequence
  Description of Artificial Sequence: Synthetic oligonucleotide
  Sense strand starting at position 3624 of SEQ ID NO: 915756
gcagaaugcucuuccagga

SEQ ID NO: 1103669 - RNA, 19 nt, Artificial Sequence
  Description of Artificial Sequence: Synthetic oligonucleotide
  Antisense strand to SEQ ID NO: 1103668
uccuggaagagcauucugc

SEQ ID NO: 1103670 - RNA, 19 nt, Artificial Sequence
  Description of Artificial Sequence: Synthetic oligonucleotide
  Sense strand starting at position 3739 of SEQ ID NO: 915756
ucugaauuguuuccaaaug

SEQ ID NO: 1103671 - RNA, 19 nt, Artificial Sequence
  Description of Artificial Sequence: Synthetic oligonucleotide
  Antisense strand to SEQ ID NO: 1103670
cauuuggaaacaauucaga

SEQ ID NO: 1103672 - RNA, 19 nt, Artificial Sequence
  Description of Artificial Sequence: Synthetic oligonucleotide
  Sense strand starting at position 3751 of SEQ ID NO: 915756
ccaaaugccugggcugaaa

SEQ ID NO: 1103673 - RNA, 19 nt, Artificial Sequence
  Description of Artificial Sequence: Synthetic oligonucleotide
  Antisense strand to SEQ ID NO: 1103672
uuucagcccaggcauuugg

SEQ ID NO: 1103674 - RNA, 19 nt, Artificial Sequence
  Description of Artificial Sequence: Synthetic oligonucleotide
  Sense strand starting at position 3779 of SEQ ID NO: 915756
ucuggaucuuagucaagag

SEQ ID NO: 1103675 - RNA, 19 nt, Artificial Sequence
  Description of Artificial Sequence: Synthetic oligonucleotide
  Antisense strand to SEQ ID NO: 1103674
cucuugacuaagauccaga

SEQ ID NO: 1103676 - RNA, 19 nt, Artificial Sequence
  Description of Artificial Sequence: Synthetic oligonucleotide
  Sense strand starting at position 3827 of SEQ ID NO: 915756
accauaaagcgcuacauaa

SEQ ID NO: 1103677 - RNA, 19 nt, Artificial Sequence
  Description of Artificial Sequence: Synthetic oligonucleotide
  Antisense strand to SEQ ID NO: 1103676
uuauguagcgcuuuauggu

SEQ ID NO: 1103678 - RNA, 19 nt, Artificial Sequence
  Description of Artificial Sequence: Synthetic oligonucleotide
  Sense strand starting at position 376 of SEQ ID NO: 915757
guaagaguuucucuaucau

SEQ ID NO: 1103679 - RNA, 19 nt, Artificial Sequence
  Description of Artificial Sequence: Synthetic oligonucleotide
  Antisense strand to SEQ ID NO: 1103678
augauagagaaacucuuac

SEQ ID NO: 1103680 - RNA, 19 nt, Artificial Sequence
  Description of Artificial Sequence: Synthetic oligonucleotide
  Sense strand starting at position 396 of SEQ ID NO: 915757
ugugacucuuuggcaagaa

SEQ ID NO: 1103681 - RNA, 19 nt, Artificial Sequence
  Description of Artificial Sequence: Synthetic oligonucleotide
  Antisense strand to SEQ ID NO: 1103680
uucuugccaaagagucaca

SEQ ID NO: 1103682 - RNA, 19 nt, Artificial Sequence
  Description of Artificial Sequence: Synthetic oligonucleotide
  Sense strand starting at position 455 of SEQ ID NO: 915757
uuuccaggucuuggaaaga

SEQ ID NO: 1103683 - RNA, 19 nt, Artificial Sequence
  Description of Artificial Sequence: Synthetic oligonucleotide
  Antisense strand to SEQ ID NO: 1103682
ucuuuccaagaccuggaaa

SEQ ID NO: 1103684 - RNA, 19 nt, Artificial Sequence
  Description of Artificial Sequence: Synthetic oligonucleotide
  Sense strand starting at position 487 of SEQ ID NO: 915757
acuuuaucuguuuaggaug

SEQ ID NO: 1103685 - RNA, 19 nt, Artificial Sequence
  Description of Artificial Sequence: Synthetic oligonucleotide
  Antisense strand to SEQ ID NO: 1103684
cauccuaaacagauaaagu

SEQ ID NO: 1103686 - RNA, 19 nt, Artificial Sequence
  Description of Artificial Sequence: Synthetic oligonucleotide
  Sense strand starting at position 504 of SEQ ID NO: 915757
ugaguucugccagaacuuu

SEQ ID NO: 1103687 - RNA, 19 nt, Artificial Sequence
  Description of Artificial Sequence: Synthetic oligonucleotide
  Antisense strand to SEQ ID NO: 1103686
aaaguucuggcagaacuca

SEQ ID NO: 1103688 - RNA, 19 nt, Artificial Sequence
  Description of Artificial Sequence: Synthetic oligonucleotide
  Sense strand starting at position 718 of SEQ ID NO: 915757
aguuauuuccucugugccu

SEQ ID NO: 1103689 - RNA, 19 nt, Artificial Sequence
  Description of Artificial Sequence: Synthetic oligonucleotide
  Antisense strand to SEQ ID NO: 1103688
aggcacagaggaaauaacu

SEQ ID NO: 1103690 - RNA, 19 nt, Artificial Sequence
  Description of Artificial Sequence: Synthetic oligonucleotide
  Sense strand starting at position 760 of SEQ ID NO: 915757
ggguauauauuacuuaucu

SEQ ID NO: 1103691 - RNA, 19 nt, Artificial Sequence
  Description of Artificial Sequence: Synthetic oligonucleotide
  Antisense strand to SEQ ID NO: 1103690
agauaaguaauauauaccc

SEQ ID NO: 1103692 - RNA, 19 nt, Artificial Sequence
  Description of Artificial Sequence: Synthetic oligonucleotide
  Sense strand starting at position 761 of SEQ ID NO: 915757
gguauauauuacuuaucuc

SEQ ID NO: 1103693 - RNA, 19 nt, Artificial Sequence
  Description of Artificial Sequence: Synthetic oligonucleotide
  Antisense strand to SEQ ID NO: 1103692
gagauaaguaauauauacc

SEQ ID NO: 1103694 - RNA, 19 nt, Artificial Sequence
  Description of Artificial Sequence: Synthetic oligonucleotide
  Sense strand starting at position 791 of SEQ ID NO: 915757
gugcgaauuagaugaaaua

SEQ ID NO: 1103695 - RNA, 19 nt, Artificial Sequence
  Description of Artificial Sequence: Synthetic oligonucleotide
  Antisense strand to SEQ ID NO: 1103694
uauuucaucuaauucgcac

SEQ ID NO: 1103696 - RNA, 19 nt, Artificial Sequence
  Description of Artificial Sequence: Synthetic oligonucleotide
  Sense strand starting at position 1178 of SEQ ID NO: 915757
caaauugugucccugauag

SEQ ID NO: 1103697 - RNA, 19 nt, Artificial Sequence
  Description of Artificial Sequence: Synthetic oligonucleotide
  Antisense strand to SEQ ID NO: 1103696
cuaucagggacacaauuug

SEQ ID NO: 1103698 - RNA, 19 nt, Artificial Sequence
  Description of Artificial Sequence: Synthetic oligonucleotide
  Sense strand starting at position 1180 of SEQ ID NO: 915757
aauugugucccugauagga

SEQ ID NO: 1103699 - RNA, 19 nt, Artificial Sequence
  Description of Artificial Sequence: Synthetic oligonucleotide
  Antisense strand to SEQ ID NO: 1103698
uccuaucagggacacaauu

SEQ ID NO: 1103700 - RNA, 19 nt, Artificial Sequence
  Description of Artificial Sequence: Synthetic oligonucleotide
  Sense strand starting at position 1371 of SEQ ID NO: 915757
cagggaacuuugucccaaa

SEQ ID NO: 1103701 - RNA, 19 nt, Artificial Sequence
  Description of Artificial Sequence: Synthetic oligonucleotide
  Antisense strand to SEQ ID NO: 1103700
uuugggacaaaguucccug

SEQ ID NO: 1103702 - RNA, 19 nt, Artificial Sequence
  Description of Artificial Sequence: Synthetic oligonucleotide
  Sense strand starting at position 1372 of SEQ ID NO: 915757
agggaacuuugucccaaau

SEQ ID NO: 1103703 - RNA, 19 nt, Artificial Sequence
  Description of Artificial Sequence: Synthetic oligonucleotide
  Antisense strand to SEQ ID NO: 1103702
auuugggacaaaguucccu

SEQ ID NO: 1103704 - RNA, 19 nt, Artificial Sequence
  Description of Artificial Sequence: Synthetic oligonucleotide
  Sense strand starting at position 1410 of SEQ ID NO: 915757
uucucaggacucuaguaau

SEQ ID NO: 1103705 - RNA, 19 nt, Artificial Sequence
  Description of Artificial Sequence: Synthetic oligonucleotide
  Antisense strand to SEQ ID NO: 1103704
auuacuagaguccugagaa

SEQ ID NO: 1103706 - RNA, 19 nt, Artificial Sequence
  Description of Artificial Sequence: Synthetic oligonucleotide
  Sense strand starting at position 1437 of SEQ ID NO: 915757
caaauuaugggaugggcua

SEQ ID NO: 1103707 - RNA, 19 nt, Artificial Sequence
  Description of Artificial Sequence: Synthetic oligonucleotide
  Antisense strand to SEQ ID NO: 1103706
uagcccaucccauaauuug

SEQ ID NO: 1103708 - RNA, 19 nt, Artificial Sequence
  Description of Artificial Sequence: Synthetic oligonucleotide
  Sense strand starting at position 1438 of SEQ ID NO: 915757
aaauuaugggaugggcuau

SEQ ID NO: 1103709 - RNA, 19 nt, Artificial Sequence
  Description of Artificial Sequence: Synthetic oligonucleotide
  Antisense strand to SEQ ID NO: 1103708
auagcccaucccauaauuu

SEQ ID NO: 1103710 - RNA, 19 nt, Artificial Sequence
  Description of Artificial Sequence: Synthetic oligonucleotide
  Sense strand starting at position 1450 of SEQ ID NO: 915757
gggcuaugggcuuauucca

SEQ ID NO: 1103711 - RNA, 19 nt, Artificial Sequence
  Description of Artificial Sequence: Synthetic oligonucleotide
  Antisense strand to SEQ ID NO: 1103710
uggaauaagcccauagccc

SEQ ID NO: 1103712 - RNA, 19 nt, Artificial Sequence
  Description of Artificial Sequence: Synthetic oligonucleotide
  Sense strand starting at position 1536 of SEQ ID NO: 915757
ccaagaugccaaggacuuu

SEQ ID NO: 1103713 - RNA, 19 nt, Artificial Sequence
  Description of Artificial Sequence: Synthetic oligonucleotide
  Antisense strand to SEQ ID NO: 1103712
aaaguccuuggcaucuugg

SEQ ID NO: 1103714 - RNA, 19 nt, Artificial Sequence
  Description of Artificial Sequence: Synthetic oligonucleotide
  Sense strand starting at position 1779 of SEQ ID NO: 915757
aaauaaaugugcucggaga

SEQ ID NO: 1103715 - RNA, 19 nt, Artificial Sequence
  Description of Artificial Sequence: Synthetic oligonucleotide
  Antisense strand to SEQ ID NO: 1103714
ucuccgagcacauuuauuu

SEQ ID NO: 1103716 - RNA, 19 nt, Artificial Sequence
  Description of Artificial Sequence: Synthetic oligonucleotide
  Sense strand starting at position 1780 of SEQ ID NO: 915757
aauaaaugugcucggagag

SEQ ID NO: 1103717 - RNA, 19 nt, Artificial Sequence
  Description of Artificial Sequence: Synthetic oligonucleotide
  Antisense strand to SEQ ID NO: 1103716
cucuccgagcacauuuauu

SEQ ID NO: 1103718 - RNA, 19 nt, Artificial Sequence
  Description of Artificial Sequence: Synthetic oligonucleotide
  Sense strand starting at position 2340 of SEQ ID NO: 915757
acacacucgcccugaauaa

SEQ ID NO: 1103719 - RNA, 19 nt, Artificial Sequence
  Description of Artificial Sequence: Synthetic oligonucleotide
  Antisense strand to SEQ ID NO: 1103718
uuauucagggcgagugugu

SEQ ID NO: 1103720 - RNA, 19 nt, Artificial Sequence
  Description of Artificial Sequence: Synthetic oligonucleotide
  Sense strand starting at position 2344 of SEQ ID NO: 915757
acucgcccugaauaaauaa

SEQ ID NO: 1103721 - RNA, 19 nt, Artificial Sequence
  Description of Artificial Sequence: Synthetic oligonucleotide
  Antisense strand to SEQ ID NO: 1103720
uuauuuauucagggcgagu

SEQ ID NO: 1103722 - RNA, 19 nt, Artificial Sequence
  Description of Artificial Sequence: Synthetic oligonucleotide
  Sense strand starting at position 2701 of SEQ ID NO: 915757
cuuuacuagguuuaguauu

SEQ ID NO: 1103723 - RNA, 19 nt, Artificial Sequence
  Description of Artificial Sequence: Synthetic oligonucleotide
  Antisense strand to SEQ ID NO: 1103722
aauacuaaaccuaguaaag

SEQ ID NO: 1103724 - RNA, 19 nt, Artificial Sequence
  Description of Artificial Sequence: Synthetic oligonucleotide
  Sense strand starting at position 2782 of SEQ ID NO: 915757
ucaggagccuccuuuccaa

SEQ ID NO: 1103725 - RNA, 19 nt, Artificial Sequence
  Description of Artificial Sequence: Synthetic oligonucleotide
  Antisense strand to SEQ ID NO: 1103724
uuggaaaggaggcuccuga

SEQ ID NO: 1103726 - RNA, 19 nt, Artificial Sequence
  Description of Artificial Sequence: Synthetic oligonucleotide
  Sense strand starting at position 2826 of SEQ ID NO: 915757
cuuuacuacugguccauua

SEQ ID NO: 1103727 - RNA, 19 nt, Artificial Sequence
  Description of Artificial Sequence: Synthetic oligonucleotide
  Antisense strand to SEQ ID NO: 1103726
uaauggaccaguaguaaag

SEQ ID NO: 1103728 - RNA, 19 nt, Artificial Sequence
  Description of Artificial Sequence: Synthetic oligonucleotide
  Sense strand starting at position 2828 of SEQ ID NO: 915757
uuacuacugguccauuaca

SEQ ID NO: 1103729 - RNA, 19 nt, Artificial Sequence
  Description of Artificial Sequence: Synthetic oligonucleotide
  Antisense strand to SEQ ID NO: 1103728
uguaauggaccaguaguaa

SEQ ID NO: 1103730 - RNA, 19 nt, Artificial Sequence
  Description of Artificial Sequence: Synthetic oligonucleotide
  Sense strand starting at position 3002 of SEQ ID NO: 915757
ccguuuaguccagacgaga

SEQ ID NO: 1103731 - RNA, 19 nt, Artificial Sequence
  Description of Artificial Sequence: Synthetic oligonucleotide
  Antisense strand to SEQ ID NO: 1103730
ucucgucuggacuaaacgg

SEQ ID NO: 1103732 - RNA, 19 nt, Artificial Sequence
  Description of Artificial Sequence: Synthetic oligonucleotide
  Sense strand starting at position 3050 of SEQ ID NO: 915757
uugugaucucaguaccuca

SEQ ID NO: 1103733 - RNA, 19 nt, Artificial Sequence
  Description of Artificial Sequence: Synthetic oligonucleotide
  Antisense strand to SEQ ID NO: 1103732
ugagguacugagaucacaa

SEQ ID NO: 1103734 - RNA, 19 nt, Artificial Sequence
  Description of Artificial Sequence: Synthetic oligonucleotide
  Sense strand starting at position 3439 of SEQ ID NO: 915757
uucuauaugcccgaaauga

SEQ ID NO: 1103735 - RNA, 19 nt, Artificial Sequence
  Description of Artificial Sequence: Synthetic oligonucleotide
  Antisense strand to SEQ ID NO: 1103734
ucauuucgggcauauagaa

SEQ ID NO: 1103736 - RNA, 19 nt, Artificial Sequence
  Description of Artificial Sequence: Synthetic oligonucleotide
  Sense strand starting at position 3527 of SEQ ID NO: 915757
ucaauagucucagucaaca

SEQ ID NO: 1103737 - RNA, 19 nt, Artificial Sequence
  Description of Artificial Sequence: Synthetic oligonucleotide
  Antisense strand to SEQ ID NO: 1103736
uguugacugagacuauuga

SEQ ID NO: 1103738 - RNA, 19 nt, Artificial Sequence
  Description of Artificial Sequence: Synthetic oligonucleotide
  Sense strand starting at position 3618 of SEQ ID NO: 915757
aggaguuaguucccagacu

SEQ ID NO: 1103739 - RNA, 19 nt, Artificial Sequence
  Description of Artificial Sequence: Synthetic oligonucleotide
  Antisense strand to SEQ ID NO: 1103738
agucugggaacuaacuccu

SEQ ID NO: 1103740 - RNA, 19 nt, Artificial Sequence
  Description of Artificial Sequence: Synthetic oligonucleotide
  Sense strand starting at position 3685 of SEQ ID NO: 915757
uauagagaaucaccuggua

SEQ ID NO: 1103741 - RNA, 19 nt, Artificial Sequence
  Description of Artificial Sequence: Synthetic oligonucleotide
  Antisense strand to SEQ ID NO: 1103740
uaccaggugauucucuaua

SEQ ID NO: 1103742 - RNA, 19 nt, Artificial Sequence
  Description of Artificial Sequence: Synthetic oligonucleotide
  Sense strand starting at position 3688 of SEQ ID NO: 915757
agagaaucaccugguacuc

SEQ ID NO: 1103743 - RNA, 19 nt, Artificial Sequence
  Description of Artificial Sequence: Synthetic oligonucleotide
  Antisense strand to SEQ ID NO: 1103742
gaguaccaggugauucucu

SEQ ID NO: 1103744 - RNA, 19 nt, Artificial Sequence
  Description of Artificial Sequence: Synthetic oligonucleotide
  Sense strand starting at position 3794 of SEQ ID NO: 915757
caugaugagucagcgagaa

SEQ ID NO: 1103745 - RNA, 19 nt, Artificial Sequence
  Description of Artificial Sequence: Synthetic oligonucleotide
  Antisense strand to SEQ ID NO: 1103744
uucucgcugacucaucaug

SEQ ID NO: 1103746 - RNA, 19 nt, Artificial Sequence
  Description of Artificial Sequence: Synthetic oligonucleotide
  Sense strand starting at position 3796 of SEQ ID NO: 915757
ugaugagucagcgagaagu

SEQ ID NO: 1103747 - RNA, 19 nt, Artificial Sequence
  Description of Artificial Sequence: Synthetic oligonucleotide
  Antisense strand to SEQ ID NO: 1103746
acuucucgcugacucauca

SEQ ID NO: 1103748 - RNA, 19 nt, Artificial Sequence
  Description of Artificial Sequence: Synthetic oligonucleotide
  Sense strand starting at position 3798 of SEQ ID NO: 915757
augagucagcgagaaguaa

SEQ ID NO: 1103749 - RNA, 19 nt, Artificial Sequence
  Description of Artificial Sequence: Synthetic oligonucleotide
  Antisense strand to SEQ ID NO: 1103748
uuacuucucgcugacucau

SEQ ID NO: 1103750 - RNA, 19 nt, Artificial Sequence
  Description of Artificial Sequence: Synthetic oligonucleotide
  Sense strand starting at position 3821 of SEQ ID NO: 915757
gugggaugaagauguucua

SEQ ID NO: 1103751 - RNA, 19 nt, Artificial Sequence
  Description of Artificial Sequence: Synthetic oligonucleotide
  Antisense strand to SEQ ID NO: 1103750
uagaacaucuucaucccac

SEQ ID NO: 1103752 - RNA, 19 nt, Artificial Sequence
  Description of Artificial Sequence: Synthetic oligonucleotide
  Sense strand starting at position 3941 of SEQ ID NO: 915757
cgcugcaucccgaggugaa

SEQ ID NO: 1103753 - RNA, 19 nt, Artificial Sequence
  Description of Artificial Sequence: Synthetic oligonucleotide
  Antisense strand to SEQ ID NO: 1103752
uucaccucgggaugcagcg

SEQ ID NO: 1103754 - RNA, 19 nt, Artificial Sequence
  Description of Artificial Sequence: Synthetic oligonucleotide
  Sense strand starting at position 3970 of SEQ ID NO: 915757
uggauauagcuggguccua

SEQ ID NO: 1103755 - RNA, 19 nt, Artificial Sequence
  Description of Artificial Sequence: Synthetic oligonucleotide
  Antisense strand to SEQ ID NO: 1103754
uaggacccagcuauaucca

SEQ ID NO: 1103756 - RNA, 19 nt, Artificial Sequence
  Description of Artificial Sequence: Synthetic oligonucleotide
  Sense strand starting at position 3971 of SEQ ID NO: 915757
ggauauagcuggguccuaa

SEQ ID NO: 1103757 - RNA, 19 nt, Artificial Sequence
  Description of Artificial Sequence: Synthetic oligonucleotide
  Antisense strand to SEQ ID NO: 1103756
uuaggacccagcuauaucc

SEQ ID NO: 1103758 - RNA, 19 nt, Artificial Sequence
  Description of Artificial Sequence: Synthetic oligonucleotide
  Sense strand starting at position 95 of SEQ ID NO: 915758
aguuauuuccucugugccu

SEQ ID NO: 1103759 - RNA, 19 nt, Artificial Sequence
  Description of Artificial Sequence: Synthetic oligonucleotide
  Antisense strand to SEQ ID NO: 1103758
aggcacagaggaaauaacu

SEQ ID NO: 1103760 - RNA, 19 nt, Artificial Sequence
  Description of Artificial Sequence: Synthetic oligonucleotide
  Sense strand starting at position 137 of SEQ ID NO: 915758
ggguauauauuacuuaucu

SEQ ID NO: 1103761 - RNA, 19 nt, Artificial Sequence
  Description of Artificial Sequence: Synthetic oligonucleotide
  Antisense strand to SEQ ID NO: 1103760
agauaaguaauauauaccc

SEQ ID NO: 1103762 - RNA, 19 nt, Artificial Sequence
  Description of Artificial Sequence: Synthetic oligonucleotide
  Sense strand starting at position 138 of SEQ ID NO: 915758
gguauauauuacuuaucuc

SEQ ID NO: 1103763 - RNA, 19 nt, Artificial Sequence
  Description of Artificial Sequence: Synthetic oligonucleotide
  Antisense strand to SEQ ID NO: 1103762
gagauaaguaauauauacc

SEQ ID NO: 1103764 - RNA, 19 nt, Artificial Sequence
  Description of Artificial Sequence: Synthetic oligonucleotide
  Sense strand starting at position 168 of SEQ ID NO: 915758
gugcgaauuagaugaaaua

SEQ ID NO: 1103765 - RNA, 19 nt, Artificial Sequence
  Description of Artificial Sequence: Synthetic oligonucleotide
  Antisense strand to SEQ ID NO: 1103764
uauuucaucuaauucgcac

SEQ ID NO: 1103766 - RNA, 19 nt, Artificial Sequence
  Description of Artificial Sequence: Synthetic oligonucleotide
  Sense strand starting at position 555 of SEQ ID NO: 915758
caaauugugucccugauag

SEQ ID NO: 1103767 - RNA, 19 nt, Artificial Sequence
  Description of Artificial Sequence: Synthetic oligonucleotide
  Antisense strand to SEQ ID NO: 1103766
cuaucagggacacaauuug

SEQ ID NO: 1103768 - RNA, 19 nt, Artificial Sequence
  Description of Artificial Sequence: Synthetic oligonucleotide
  Sense strand starting at position 557 of SEQ ID NO: 915758
aauugugucccugauagga

SEQ ID NO: 1103769 - RNA, 19 nt, Artificial Sequence
  Description of Artificial Sequence: Synthetic oligonucleotide
  Antisense strand to SEQ ID NO: 1103768
uccuaucagggacacaauu

SEQ ID NO: 1103770 - RNA, 19 nt, Artificial Sequence
  Description of Artificial Sequence: Synthetic oligonucleotide
  Sense strand starting at position 748 of SEQ ID NO: 915758
cagggaacuuugucccaaa

SEQ ID NO: 1103771 - RNA, 19 nt, Artificial Sequence
  Description of Artificial Sequence: Synthetic oligonucleotide
  Antisense strand to SEQ ID NO: 1103770
uuugggacaaaguucccug

SEQ ID NO: 1103772 - RNA, 19 nt, Artificial Sequence
  Description of Artificial Sequence: Synthetic oligonucleotide
  Sense strand starting at position 749 of SEQ ID NO: 915758
agggaacuuugucccaaau

SEQ ID NO: 1103773 - RNA, 19 nt, Artificial Sequence
  Description of Artificial Sequence: Synthetic oligonucleotide
  Antisense strand to SEQ ID NO: 1103772
auuugggacaaaguucccu

SEQ ID NO: 1103774 - RNA, 19 nt, Artificial Sequence
  Description of Artificial Sequence: Synthetic oligonucleotide
  Sense strand starting at position 787 of SEQ ID NO: 915758
uucucaggacucuaguaau

SEQ ID NO: 1103775 - RNA, 19 nt, Artificial Sequence
  Description of Artificial Sequence: Synthetic oligonucleotide
  Antisense strand to SEQ ID NO: 1103774
auuacuagaguccugagaa

SEQ ID NO: 1103776 - RNA, 19 nt, Artificial Sequence
  Description of Artificial Sequence: Synthetic oligonucleotide
  Sense strand starting at position 814 of SEQ ID NO: 915758
caaauuaugggaugggcua

SEQ ID NO: 1103777 - RNA, 19 nt, Artificial Sequence
  Description of Artificial Sequence: Synthetic oligonucleotide
  Antisense strand to SEQ ID NO: 1103776
uagcccaucccauaauuug

SEQ ID NO: 1103778 - RNA, 19 nt, Artificial Sequence
  Description of Artificial Sequence: Synthetic oligonucleotide
  Sense strand starting at position 815 of SEQ ID NO: 915758
aaauuaugggaugggcuau

SEQ ID NO: 1103779 - RNA, 19 nt, Artificial Sequence
  Description of Artificial Sequence: Synthetic oligonucleotide
  Antisense strand to SEQ ID NO: 1103778
auagcccaucccauaauuu

SEQ ID NO: 1103780 - RNA, 19 nt, Artificial Sequence
  Description of Artificial Sequence: Synthetic oligonucleotide
  Sense strand starting at position 827 of SEQ ID NO: 915758
gggcuaugggcuuauucca

SEQ ID NO: 1103781 - RNA, 19 nt, Artificial Sequence
  Description of Artificial Sequence: Synthetic oligonucleotide
  Antisense strand to SEQ ID NO: 1103780
uggaauaagcccauagccc

SEQ ID NO: 1103782 - RNA, 19 nt, Artificial Sequence
  Description of Artificial Sequence: Synthetic oligonucleotide
  Sense strand starting at position 913 of SEQ ID NO: 915758
ccaagaugccaaggacuuu

SEQ ID NO: 1103783 - RNA, 19 nt, Artificial Sequence
  Description of Artificial Sequence: Synthetic oligonucleotide
  Antisense strand to SEQ ID NO: 1103782
aaaguccuuggcaucuugg

SEQ ID NO: 1103784 - RNA, 19 nt, Artificial Sequence
  Description of Artificial Sequence: Synthetic oligonucleotide
  Sense strand starting at position 1156 of SEQ ID NO: 915758
aaauaaaugugcucggaga

SEQ ID NO: 1103785 - RNA, 19 nt, Artificial Sequence
  Description of Artificial Sequence: Synthetic oligonucleotide
  Antisense strand to SEQ ID NO: 1103784
ucuccgagcacauuuauuu

SEQ ID NO: 1103786 - RNA, 19 nt, Artificial Sequence
  Description of Artificial Sequence: Synthetic oligonucleotide
  Sense strand starting at position 1157 of SEQ ID NO: 915758
aauaaaugugcucggagag

SEQ ID NO: 1103787 - RNA, 19 nt, Artificial Sequence
  Description of Artificial Sequence: Synthetic oligonucleotide
  Antisense strand to SEQ ID NO: 1103786
cucuccgagcacauuuauu

SEQ ID NO: 1103788 - RNA, 19 nt, Artificial Sequence
  Description of Artificial Sequence: Synthetic oligonucleotide
  Sense strand starting at position 1717 of SEQ ID NO: 915758
acacacucgcccugaauaa

SEQ ID NO: 1103789 - RNA, 19 nt, Artificial Sequence
  Description of Artificial Sequence: Synthetic oligonucleotide
  Antisense strand to SEQ ID NO: 1103788
uuauucagggcgagugugu

SEQ ID NO: 1103790 - RNA, 19 nt, Artificial Sequence
  Description of Artificial Sequence: Synthetic oligonucleotide
  Sense strand starting at position 1721 of SEQ ID NO: 915758
acucgcccugaauaaauaa

SEQ ID NO: 1103791 - RNA, 19 nt, Artificial Sequence
  Description of Artificial Sequence: Synthetic oligonucleotide
  Antisense strand to SEQ ID NO: 1103790
uuauuuauucagggcgagu

SEQ ID NO: 1103792 - RNA, 19 nt, Artificial Sequence
  Description of Artificial Sequence: Synthetic oligonucleotide
  Sense strand starting at position 2078 of SEQ ID NO: 915758
cuuuacuagguuuaguauu

SEQ ID NO: 1103793 - RNA, 19 nt, Artificial Sequence
  Description of Artificial Sequence: Synthetic oligonucleotide
  Antisense strand to SEQ ID NO: 1103792
aauacuaaaccuaguaaag

SEQ ID NO: 1103794 - RNA, 19 nt, Artificial Sequence
  Description of Artificial Sequence: Synthetic oligonucleotide
  Sense strand starting at position 2096 of SEQ ID NO: 915758
uuacuaagugccuacugua

SEQ ID NO: 1103795 - RNA, 19 nt, Artificial Sequence
  Description of Artificial Sequence: Synthetic oligonucleotide
  Antisense strand to SEQ ID NO: 1103794
uacaguaggcacuuaguaa

SEQ ID NO: 1103796 - RNA, 19 nt, Artificial Sequence
  Description of Artificial Sequence: Synthetic oligonucleotide
  Sense strand starting at position 2159 of SEQ ID NO: 915758
ucaggagccuccuuuccaa

SEQ ID NO: 1103797 - RNA, 19 nt, Artificial Sequence
  Description of Artificial Sequence: Synthetic oligonucleotide
  Antisense strand to SEQ ID NO: 1103796
uuggaaaggaggcuccuga

SEQ ID NO: 1103798 - RNA, 19 nt, Artificial Sequence
  Description of Artificial Sequence: Synthetic oligonucleotide
  Sense strand starting at position 2203 of SEQ ID NO: 915758
cuuuacuacugguccauua

SEQ ID NO: 1103799 - RNA, 19 nt, Artificial Sequence
  Description of Artificial Sequence: Synthetic oligonucleotide
  Antisense strand to SEQ ID NO: 1103798
uaauggaccaguaguaaag

SEQ ID NO: 1103800 - RNA, 19 nt, Artificial Sequence
  Description of Artificial Sequence: Synthetic oligonucleotide
  Sense strand starting at position 2205 of SEQ ID NO: 915758
uuacuacugguccauuaca

SEQ ID NO: 1103801 - RNA, 19 nt, Artificial Sequence
  Description of Artificial Sequence: Synthetic oligonucleotide
  Antisense strand to SEQ ID NO: 1103800
uguaauggaccaguaguaa

SEQ ID NO: 1103802 - RNA, 19 nt, Artificial Sequence
  Description of Artificial Sequence: Synthetic oligonucleotide
  Sense strand starting at position 2379 of SEQ ID NO: 915758
ccguuuaguccagacgaga

SEQ ID NO: 1103803 - RNA, 19 nt, Artificial Sequence
  Description of Artificial Sequence: Synthetic oligonucleotide
  Antisense strand to SEQ ID NO: 1103802
ucucgucuggacuaaacgg

SEQ ID NO: 1103804 - RNA, 19 nt, Artificial Sequence
  Description of Artificial Sequence: Synthetic oligonucleotide
  Sense strand starting at position 2427 of SEQ ID NO: 915758
uugugaucucaguaccuca

SEQ ID NO: 1103805 - RNA, 19 nt, Artificial Sequence
  Description of Artificial Sequence: Synthetic oligonucleotide
  Antisense strand to SEQ ID NO: 1103804
ugagguacugagaucacaa

SEQ ID NO: 1103806 - RNA, 19 nt, Artificial Sequence
  Description of Artificial Sequence: Synthetic oligonucleotide
  Sense strand starting at position 2816 of SEQ ID NO: 915758
uucuauaugcccgaaauga

SEQ ID NO: 1103807 - RNA, 19 nt, Artificial Sequence
  Description of Artificial Sequence: Synthetic oligonucleotide
  Antisense strand to SEQ ID NO: 1103806
ucauuucgggcauauagaa

SEQ ID NO: 1103808 - RNA, 19 nt, Artificial Sequence
  Description of Artificial Sequence: Synthetic oligonucleotide
  Sense strand starting at position 2893 of SEQ ID NO: 915758
ccugccugugaucaauagu

SEQ ID NO: 1103809 - RNA, 19 nt, Artificial Sequence
  Description of Artificial Sequence: Synthetic oligonucleotide
  Antisense strand to SEQ ID NO: 1103808
acuauugaucacaggcagg

SEQ ID NO: 1103810 - RNA, 19 nt, Artificial Sequence
  Description of Artificial Sequence: Synthetic oligonucleotide
  Sense strand starting at position 2904 of SEQ ID NO: 915758
ucaauagucucagucaaca

SEQ ID NO: 1103811 - RNA, 19 nt, Artificial Sequence
  Description of Artificial Sequence: Synthetic oligonucleotide
  Antisense strand to SEQ ID NO: 1103810
uguugacugagacuauuga

SEQ ID NO: 1103812 - RNA, 19 nt, Artificial Sequence
  Description of Artificial Sequence: Synthetic oligonucleotide
  Sense strand starting at position 2995 of SEQ ID NO: 915758
aggaguuaguucccagacu

SEQ ID NO: 1103813 - RNA, 19 nt, Artificial Sequence
  Description of Artificial Sequence: Synthetic oligonucleotide
  Antisense strand to SEQ ID NO: 1103812
agucugggaacuaacuccu

SEQ ID NO: 1103814 - RNA, 19 nt, Artificial Sequence
  Description of Artificial Sequence: Synthetic oligonucleotide
  Sense strand starting at position 3062 of SEQ ID NO: 915758
uauagagaaucaccuggua

SEQ ID NO: 1103815 - RNA, 19 nt, Artificial Sequence
  Description of Artificial Sequence: Synthetic oligonucleotide
  Antisense strand to SEQ ID NO: 1103814
uaccaggugauucucuaua

SEQ ID NO: 1103816 - RNA, 19 nt, Artificial Sequence
  Description of Artificial Sequence: Synthetic oligonucleotide
  Sense strand starting at position 3065 of SEQ ID NO: 915758
agagaaucaccugguacuc

SEQ ID NO: 1103817 - RNA, 19 nt, Artificial Sequence
  Description of Artificial Sequence: Synthetic oligonucleotide
  Antisense strand to SEQ ID NO: 1103816
gaguaccaggugauucucu

SEQ ID NO: 1103818 - RNA, 19 nt, Artificial Sequence
  Description of Artificial Sequence: Synthetic oligonucleotide
  Sense strand starting at position 3074 of SEQ ID NO: 915758
ccugguacucugggaguau

SEQ ID NO: 1103819 - RNA, 19 nt, Artificial Sequence
  Description of Artificial Sequence: Synthetic oligonucleotide
  Antisense strand to SEQ ID NO: 1103818
auacucccagaguaccagg

SEQ ID NO: 1103820 - RNA, 19 nt, Artificial Sequence
  Description of Artificial Sequence: Synthetic oligonucleotide
  Sense strand starting at position 3171 of SEQ ID NO: 915758
caugaugagucagcgagaa

SEQ ID NO: 1103821 - RNA, 19 nt, Artificial Sequence
  Description of Artificial Sequence: Synthetic oligonucleotide
  Antisense strand to SEQ ID NO: 1103820
uucucgcugacucaucaug

SEQ ID NO: 1103822 - RNA, 19 nt, Artificial Sequence
  Description of Artificial Sequence: Synthetic oligonucleotide
  Sense strand starting at position 3173 of SEQ ID NO: 915758
ugaugagucagcgagaagu

SEQ ID NO: 1103823 - RNA, 19 nt, Artificial Sequence
  Description of Artificial Sequence: Synthetic oligonucleotide
  Antisense strand to SEQ ID NO: 1103822
acuucucgcugacucauca

SEQ ID NO: 1103824 - RNA, 19 nt, Artificial Sequence
  Description of Artificial Sequence: Synthetic oligonucleotide
  Sense strand starting at position 3175 of SEQ ID NO: 915758
augagucagcgagaaguaa

SEQ ID NO: 1103825 - RNA, 19 nt, Artificial Sequence
  Description of Artificial Sequence: Synthetic oligonucleotide
  Antisense strand to SEQ ID NO: 1103824
uuacuucucgcugacucau

SEQ ID NO: 1103826 - RNA, 19 nt, Artificial Sequence
  Description of Artificial Sequence: Synthetic oligonucleotide
  Sense strand starting at position 3198 of SEQ ID NO: 915758
gugggaugaagauguucua

SEQ ID NO: 1103827 - RNA, 19 nt, Artificial Sequence
  Description of Artificial Sequence: Synthetic oligonucleotide
  Antisense strand to SEQ ID NO: 1103826
uagaacaucuucaucccac

SEQ ID NO: 1103828 - RNA, 19 nt, Artificial Sequence
  Description of Artificial Sequence: Synthetic oligonucleotide
  Sense strand starting at position 3318 of SEQ ID NO: 915758
cgcugcaucccgaggugaa

SEQ ID NO: 1103829 - RNA, 19 nt, Artificial Sequence
  Description of Artificial Sequence: Synthetic oligonucleotide
  Antisense strand to SEQ ID NO: 1103828
uucaccucgggaugcagcg

SEQ ID NO: 1103830 - RNA, 19 nt, Artificial Sequence
  Description of Artificial Sequence: Synthetic oligonucleotide
  Sense strand starting at position 3347 of SEQ ID NO: 915758
uggauauagcuggguccua

SEQ ID NO: 1103831 - RNA, 19 nt, Artificial Sequence
  Description of Artificial Sequence: Synthetic oligonucleotide
  Antisense strand to SEQ ID NO: 1103830
uaggacccagcuauaucca

SEQ ID NO: 1103832 - RNA, 19 nt, Artificial Sequence
  Description of Artificial Sequence: Synthetic oligonucleotide
  Sense strand starting at position 3348 of SEQ ID NO: 915758
ggauauagcuggguccuaa

SEQ ID NO: 1103833 - RNA, 19 nt, Artificial Sequence
  Description of Artificial Sequence: Synthetic oligonucleotide
  Antisense strand to SEQ ID NO: 1103832
uuaggacccagcuauaucc

SEQ ID NO: 1103834 - RNA, 19 nt, Artificial Sequence
  Description of Artificial Sequence: Synthetic oligonucleotide
  Sense strand starting at position 3422 of SEQ ID NO: 915758
agaccuuugugugucagaa

SEQ ID NO: 1103835 - RNA, 19 nt, Artificial Sequence
  Description of Artificial Sequence: Synthetic oligonucleotide
  Antisense strand to SEQ ID NO: 1103834
uucugacacacaaaggucu

SEQ ID NO: 1103836 - RNA, 19 nt, Artificial Sequence
  Description of Artificial Sequence: Synthetic oligonucleotide
  Sense strand starting at position 3448 of SEQ ID NO: 915758
cagggagaccuggguucua

SEQ ID NO: 1103837 - RNA, 19 nt, Artificial Sequence
  Description of Artificial Sequence: Synthetic oligonucleotide
  Antisense strand to SEQ ID NO: 1103836
uagaacccaggucucccug

SEQ ID NO: 1103838 - RNA, 19 nt, Artificial Sequence
  Description of Artificial Sequence: Synthetic oligonucleotide
  Sense strand starting at position 1 of SEQ ID NO: 915759
gucaaaucugugcacaaac

SEQ ID NO: 1103839 - RNA, 19 nt, Artificial Sequence
  Description of Artificial Sequence: Synthetic oligonucleotide
  Antisense strand to SEQ ID NO: 1103838
guuugugcacagauuugac

SEQ ID NO: 1103840 - RNA, 19 nt, Artificial Sequence
  Description of Artificial Sequence: Synthetic oligonucleotide
  Sense strand starting at position 47 of SEQ ID NO: 915759
uguguagucacuuauagaa

SEQ ID NO: 1103841 - RNA, 19 nt, Artificial Sequence
  Description of Artificial Sequence: Synthetic oligonucleotide
  Antisense strand to SEQ ID NO: 1103840
uucuauaagugacuacaca

SEQ ID NO: 1103842 - RNA, 19 nt, Artificial Sequence
  Description of Artificial Sequence: Synthetic oligonucleotide
  Sense strand starting at position 177 of SEQ ID NO: 915759
acucuaaagguccgauaaa

SEQ ID NO: 1103843 - RNA, 19 nt, Artificial Sequence
  Description of Artificial Sequence: Synthetic oligonucleotide
  Antisense strand to SEQ ID NO: 1103842
uuuaucggaccuuuagagu

SEQ ID NO: 1103844 - RNA, 19 nt, Artificial Sequence
  Description of Artificial Sequence: Synthetic oligonucleotide
  Sense strand starting at position 223 of SEQ ID NO: 915759
ucaauaaugucauucggga

SEQ ID NO: 1103845 - RNA, 19 nt, Artificial Sequence
  Description of Artificial Sequence: Synthetic oligonucleotide
  Antisense strand to SEQ ID NO: 1103844
ucccgaaugacauuauuga

SEQ ID NO: 1103846 - RNA, 19 nt, Artificial Sequence
  Description of Artificial Sequence: Synthetic oligonucleotide
  Sense strand starting at position 674 of SEQ ID NO: 915759
gacacuuugggaugguaca

SEQ ID NO: 1103847 - RNA, 19 nt, Artificial Sequence
  Description of Artificial Sequence: Synthetic oligonucleotide
  Antisense strand to SEQ ID NO: 1103846
uguaccaucccaaaguguc

SEQ ID NO: 1103848 - RNA, 19 nt, Artificial Sequence
  Description of Artificial Sequence: Synthetic oligonucleotide
  Sense strand starting at position 765 of SEQ ID NO: 915759
auacacuugcugcaaagau

SEQ ID NO: 1103849 - RNA, 19 nt, Artificial Sequence
  Description of Artificial Sequence: Synthetic oligonucleotide
  Antisense strand to SEQ ID NO: 1103848
aucuuugcagcaaguguau

SEQ ID NO: 1103850 - RNA, 19 nt, Artificial Sequence
  Description of Artificial Sequence: Synthetic oligonucleotide
  Sense strand starting at position 878 of SEQ ID NO: 915759
gucagcucucaugaacaca

SEQ ID NO: 1103851 - RNA, 19 nt, Artificial Sequence
  Description of Artificial Sequence: Synthetic oligonucleotide
  Antisense strand to SEQ ID NO: 1103850
uguguucaugagagcugac

SEQ ID NO: 1103852 - RNA, 19 nt, Artificial Sequence
  Description of Artificial Sequence: Synthetic oligonucleotide
  Sense strand starting at position 892 of SEQ ID NO: 915759
acacacaaguguguuaaca

SEQ ID NO: 1103853 - RNA, 19 nt, Artificial Sequence
  Description of Artificial Sequence: Synthetic oligonucleotide
  Antisense strand to SEQ ID NO: 1103852
uguuaacacacuugugugu

SEQ ID NO: 1103854 - RNA, 19 nt, Artificial Sequence
  Description of Artificial Sequence: Synthetic oligonucleotide
  Sense strand starting at position 900 of SEQ ID NO: 915759
guguguuaacaucagacuu

SEQ ID NO: 1103855 - RNA, 19 nt, Artificial Sequence
  Description of Artificial Sequence: Synthetic oligonucleotide
  Antisense strand to SEQ ID NO: 1103854
aagucugauguuaacacac

SEQ ID NO: 1103856 - RNA, 19 nt, Artificial Sequence
  Description of Artificial Sequence: Synthetic oligonucleotide
  Sense strand starting at position 1255 of SEQ ID NO: 915759
aguaaaugacagcgagacu

SEQ ID NO: 1103857 - RNA, 19 nt, Artificial Sequence
  Description of Artificial Sequence: Synthetic oligonucleotide
  Antisense strand to SEQ ID NO: 1103856
agucucgcugucauuuacu

SEQ ID NO: 1103858 - RNA, 19 nt, Artificial Sequence
  Description of Artificial Sequence: Synthetic oligonucleotide
  Sense strand starting at position 1256 of SEQ ID NO: 915759
guaaaugacagcgagacua

SEQ ID NO: 1103859 - RNA, 19 nt, Artificial Sequence
  Description of Artificial Sequence: Synthetic oligonucleotide
  Antisense strand to SEQ ID NO: 1103858
uagucucgcugucauuuac

SEQ ID NO: 1103860 - RNA, 19 nt, Artificial Sequence
  Description of Artificial Sequence: Synthetic oligonucleotide
  Sense strand starting at position 1360 of SEQ ID NO: 915759
uuagaagugucuucuaaac

SEQ ID NO: 1103861 - RNA, 19 nt, Artificial Sequence
  Description of Artificial Sequence: Synthetic oligonucleotide
  Antisense strand to SEQ ID NO: 1103860
guuuagaagacacuucuaa

SEQ ID NO: 1103862 - RNA, 19 nt, Artificial Sequence
  Description of Artificial Sequence: Synthetic oligonucleotide
  Sense strand starting at position 1406 of SEQ ID NO: 915759
aagaguuaucuguggugaa

SEQ ID NO: 1103863 - RNA, 19 nt, Artificial Sequence
  Description of Artificial Sequence: Synthetic oligonucleotide
  Antisense strand to SEQ ID NO: 1103862
uucaccacagauaacucuu

SEQ ID NO: 1103864 - RNA, 19 nt, Artificial Sequence
  Description of Artificial Sequence: Synthetic oligonucleotide
  Sense strand starting at position 1410 of SEQ ID NO: 915759
guuaucuguggugaacuca

SEQ ID NO: 1103865 - RNA, 19 nt, Artificial Sequence
  Description of Artificial Sequence: Synthetic oligonucleotide
  Antisense strand to SEQ ID NO: 1103864
ugaguucaccacagauaac

SEQ ID NO: 1103866 - RNA, 19 nt, Artificial Sequence
  Description of Artificial Sequence: Synthetic oligonucleotide
  Sense strand starting at position 1484 of SEQ ID NO: 915759
acgacucacgauuaaucuu

SEQ ID NO: 1103867 - RNA, 19 nt, Artificial Sequence
  Description of Artificial Sequence: Synthetic oligonucleotide
  Antisense strand to SEQ ID NO: 1103866
aagauuaaucgugagucgu

SEQ ID NO: 1103868 - RNA, 19 nt, Artificial Sequence
  Description of Artificial Sequence: Synthetic oligonucleotide
  Sense strand starting at position 1512 of SEQ ID NO: 915759
gcaucugccuauuuguuau

SEQ ID NO: 1103869 - RNA, 19 nt, Artificial Sequence
  Description of Artificial Sequence: Synthetic oligonucleotide
  Antisense strand to SEQ ID NO: 1103868
auaacaaauaggcagaugc

SEQ ID NO: 1103870 - RNA, 19 nt, Artificial Sequence
  Description of Artificial Sequence: Synthetic oligonucleotide
  Sense strand starting at position 1515 of SEQ ID NO: 915759
ucugccuauuuguuaucua

SEQ ID NO: 1103871 - RNA, 19 nt, Artificial Sequence
  Description of Artificial Sequence: Synthetic oligonucleotide
  Antisense strand to SEQ ID NO: 1103870
uagauaacaaauaggcaga

SEQ ID NO: 1103872 - RNA, 19 nt, Artificial Sequence
  Description of Artificial Sequence: Synthetic oligonucleotide
  Sense strand starting at position 1518 of SEQ ID NO: 915759
gccuauuuguuaucuacuc

SEQ ID NO: 1103873 - RNA, 19 nt, Artificial Sequence
  Description of Artificial Sequence: Synthetic oligonucleotide
  Antisense strand to SEQ ID NO: 1103872
gaguagauaacaaauaggc

SEQ ID NO: 1103874 - RNA, 19 nt, Artificial Sequence
  Description of Artificial Sequence: Synthetic oligonucleotide
  Sense strand starting at position 1551 of SEQ ID NO: 915759
uuccaugcuccauaaggga

SEQ ID NO: 1103875 - RNA, 19 nt, Artificial Sequence
  Description of Artificial Sequence: Synthetic oligonucleotide
  Antisense strand to SEQ ID NO: 1103874
ucccuuauggagcauggaa

SEQ ID NO: 1103876 - RNA, 19 nt, Artificial Sequence
  Description of Artificial Sequence: Synthetic oligonucleotide
  Sense strand starting at position 1564 of SEQ ID NO: 915759
aagggauucgcgggaagga

SEQ ID NO: 1103877 - RNA, 19 nt, Artificial Sequence
  Description of Artificial Sequence: Synthetic oligonucleotide
  Antisense strand to SEQ ID NO: 1103876
uccuucccgcgaaucccuu

SEQ ID NO: 1103878 - RNA, 19 nt, Artificial Sequence
  Description of Artificial Sequence: Synthetic oligonucleotide
  Sense strand starting at position 1601 of SEQ ID NO: 915759
gggcacguucuagagaaag

SEQ ID NO: 1103879 - RNA, 19 nt, Artificial Sequence
  Description of Artificial Sequence: Synthetic oligonucleotide
  Antisense strand to SEQ ID NO: 1103878
cuuucucuagaacgugccc

SEQ ID NO: 1103880 - RNA, 19 nt, Artificial Sequence
  Description of Artificial Sequence: Synthetic oligonucleotide
  Sense strand starting at position 1763 of SEQ ID NO: 915759
aggagaaggucccugguua

SEQ ID NO: 1103881 - RNA, 19 nt, Artificial Sequence
  Description of Artificial Sequence: Synthetic oligonucleotide
  Antisense strand to SEQ ID NO: 1103880
uaaccagggaccuucuccu

SEQ ID NO: 1103882 - RNA, 19 nt, Artificial Sequence
  Description of Artificial Sequence: Synthetic oligonucleotide
  Sense strand starting at position 1764 of SEQ ID NO: 915759
ggagaaggucccugguuag

SEQ ID NO: 1103883 - RNA, 19 nt, Artificial Sequence
  Description of Artificial Sequence: Synthetic oligonucleotide
  Antisense strand to SEQ ID NO: 1103882
cuaaccagggaccuucucc

SEQ ID NO: 1103884 - RNA, 19 nt, Artificial Sequence
  Description of Artificial Sequence: Synthetic oligonucleotide
  Sense strand starting at position 1991 of SEQ ID NO: 915759
gaaguuacgucaucaacaa

SEQ ID NO: 1103885 - RNA, 19 nt, Artificial Sequence
  Description of Artificial Sequence: Synthetic oligonucleotide
  Antisense strand to SEQ ID NO: 1103884
uuguugaugacguaacuuc

SEQ ID NO: 1103886 - RNA, 19 nt, Artificial Sequence
  Description of Artificial Sequence: Synthetic oligonucleotide
  Sense strand starting at position 2201 of SEQ ID NO: 915759
cgcuuuggaguauagaaua

SEQ ID NO: 1103887 - RNA, 19 nt, Artificial Sequence
  Description of Artificial Sequence: Synthetic oligonucleotide
  Antisense strand to SEQ ID NO: 1103886
uauucuauacuccaaagcg

SEQ ID NO: 1103888 - RNA, 19 nt, Artificial Sequence
  Description of Artificial Sequence: Synthetic oligonucleotide
  Sense strand starting at position 2214 of SEQ ID NO: 915759
agaauaugaggcuggguuu

SEQ ID NO: 1103889 - RNA, 19 nt, Artificial Sequence
  Description of Artificial Sequence: Synthetic oligonucleotide
  Antisense strand to SEQ ID NO: 1103888
aaacccagccucauauucu

SEQ ID NO: 1103890 - RNA, 19 nt, Artificial Sequence
  Description of Artificial Sequence: Synthetic oligonucleotide
  Sense strand starting at position 2494 of SEQ ID NO: 915759
guauacauccuacaagguu

SEQ ID NO: 1103891 - RNA, 19 nt, Artificial Sequence
  Description of Artificial Sequence: Synthetic oligonucleotide
  Antisense strand to SEQ ID NO: 1103890
aaccuuguaggauguauac

SEQ ID NO: 1103892 - RNA, 19 nt, Artificial Sequence
  Description of Artificial Sequence: Synthetic oligonucleotide
  Sense strand starting at position 2599 of SEQ ID NO: 915759
agggcaagagaucgggaua

SEQ ID NO: 1103893 - RNA, 19 nt, Artificial Sequence
  Description of Artificial Sequence: Synthetic oligonucleotide
  Antisense strand to SEQ ID NO: 1103892
uaucccgaucucuugcccu

SEQ ID NO: 1103894 - RNA, 19 nt, Artificial Sequence
  Description of Artificial Sequence: Synthetic oligonucleotide
  Sense strand starting at position 2967 of SEQ ID NO: 915759
ugugucauccuagagauga

SEQ ID NO: 1103895 - RNA, 19 nt, Artificial Sequence
  Description of Artificial Sequence: Synthetic oligonucleotide
  Antisense strand to SEQ ID NO: 1103894
ucaucucuaggaugacaca

SEQ ID NO: 1103896 - RNA, 19 nt, Artificial Sequence
  Description of Artificial Sequence: Synthetic oligonucleotide
  Sense strand starting at position 2982 of SEQ ID NO: 915759
augacuaagucaucucuag

SEQ ID NO: 1103897 - RNA, 19 nt, Artificial Sequence
  Description of Artificial Sequence: Synthetic oligonucleotide
  Antisense strand to SEQ ID NO: 1103896
cuagagaugacuuagucau

SEQ ID NO: 1103898 - RNA, 19 nt, Artificial Sequence
  Description of Artificial Sequence: Synthetic oligonucleotide
  Sense strand starting at position 3193 of SEQ ID NO: 915759
augaaagagugcucaacac

SEQ ID NO: 1103899 - RNA, 19 nt, Artificial Sequence
  Description of Artificial Sequence: Synthetic oligonucleotide
  Antisense strand to SEQ ID NO: 1103898
guguugagcacucuuucau

SEQ ID NO: 1103900 - RNA, 19 nt, Artificial Sequence
  Description of Artificial Sequence: Synthetic oligonucleotide
  Sense strand starting at position 3209 of SEQ ID NO: 915759
caccacuagucuuuaggga

SEQ ID NO: 1103901 - RNA, 19 nt, Artificial Sequence
  Description of Artificial Sequence: Synthetic oligonucleotide
  Antisense strand to SEQ ID NO: 1103900
ucccuaaagacuaguggug

SEQ ID NO: 1103902 - RNA, 19 nt, Artificial Sequence
  Description of Artificial Sequence: Synthetic oligonucleotide
  Sense strand starting at position 3349 of SEQ ID NO: 915759
uguuaaauaguccagacuu

SEQ ID NO: 1103903 - RNA, 19 nt, Artificial Sequence
  Description of Artificial Sequence: Synthetic oligonucleotide
  Antisense strand to SEQ ID NO: 1103902
aagucuggacuauuuaaca

SEQ ID NO: 1103904 - RNA, 19 nt, Artificial Sequence
  Description of Artificial Sequence: Synthetic oligonucleotide
  Sense strand starting at position 3576 of SEQ ID NO: 915759
uaugguauauagcuacaga

SEQ ID NO: 1103905 - RNA, 19 nt, Artificial Sequence
  Description of Artificial Sequence: Synthetic oligonucleotide
  Antisense strand to SEQ ID NO: 1103904
ucuguagcuauauaccaua

SEQ ID NO: 1103906 - RNA, 19 nt, Artificial Sequence
  Description of Artificial Sequence: Synthetic oligonucleotide
  Sense strand starting at position 3738 of SEQ ID NO: 915759
aggcacauuccuugagaga

SEQ ID NO: 1103907 - RNA, 19 nt, Artificial Sequence
  Description of Artificial Sequence: Synthetic oligonucleotide
  Antisense strand to SEQ ID NO: 1103906
ucucucaaggaaugugccu

SEQ ID NO: 1103908 - RNA, 19 nt, Artificial Sequence
  Description of Artificial Sequence: Synthetic oligonucleotide
  Sense strand starting at position 3801 of SEQ ID NO: 915759
gggaguuauugucuaaugg

SEQ ID NO: 1103909 - RNA, 19 nt, Artificial Sequence
  Description of Artificial Sequence: Synthetic oligonucleotide
  Antisense strand to SEQ ID NO: 1103908
ccauuagacaauaacuccc

SEQ ID NO: 1103910 - RNA, 19 nt, Artificial Sequence
  Description of Artificial Sequence: Synthetic oligonucleotide
  Sense strand starting at position 3802 of SEQ ID NO: 915759
ggaguuauugucuaauggg

SEQ ID NO: 1103911 - RNA, 19 nt, Artificial Sequence
  Description of Artificial Sequence: Synthetic oligonucleotide
  Antisense strand to SEQ ID NO: 1103910
cccauuagacaauaacucc

SEQ ID NO: 1103912 - RNA, 19 nt, Artificial Sequence
  Description of Artificial Sequence: Synthetic oligonucleotide
  Sense strand starting at position 3829 of SEQ ID NO: 915759
uucuguuuaggaggaugaa

SEQ ID NO: 1103913 - RNA, 19 nt, Artificial Sequence
  Description of Artificial Sequence: Synthetic oligonucleotide
  Antisense strand to SEQ ID NO: 1103912
uucauccuccuaaacagaa

SEQ ID NO: 1103914 - RNA, 19 nt, Artificial Sequence
  Description of Artificial Sequence: Synthetic oligonucleotide
  Sense strand starting at position 3852 of SEQ ID NO: 915759
uucugaaauggguagugau

SEQ ID NO: 1103915 - RNA, 19 nt, Artificial Sequence
  Description of Artificial Sequence: Synthetic oligonucleotide
  Antisense strand to SEQ ID NO: 1103914
aucacuacccauuucagaa

SEQ ID NO: 1103916 - RNA, 19 nt, Artificial Sequence
  Description of Artificial Sequence: Synthetic oligonucleotide
  Sense strand starting at position 3865 of SEQ ID NO: 915759
agugaugauggcuacacau

SEQ ID NO: 1103917 - RNA, 19 nt, Artificial Sequence
  Description of Artificial Sequence: Synthetic oligonucleotide
  Antisense strand to SEQ ID NO: 1103916
auguguagccaucaucacu

SEQ ID NO: 1103918 - RNA, 19 nt, Artificial Sequence
  Description of Artificial Sequence: Synthetic oligonucleotide
  Sense strand starting at position 166 of SEQ ID NO: 915760
gccaucuggccucagagau

SEQ ID NO: 1103919 - RNA, 19 nt, Artificial Sequence
  Description of Artificial Sequence: Synthetic oligonucleotide
  Antisense strand to SEQ ID NO: 1103918
aucucugaggccagauggc

SEQ ID NO: 1103920 - RNA, 19 nt, Artificial Sequence
  Description of Artificial Sequence: Synthetic oligonucleotide
  Sense strand starting at position 316 of SEQ ID NO: 915760
guuugugcuauguccagua

SEQ ID NO: 1103921 - RNA, 19 nt, Artificial Sequence
  Description of Artificial Sequence: Synthetic oligonucleotide
  Antisense strand to SEQ ID NO: 1103920
uacuggacauagcacaaac

SEQ ID NO: 1103922 - RNA, 19 nt, Artificial Sequence
  Description of Artificial Sequence: Synthetic oligonucleotide
  Sense strand starting at position 412 of SEQ ID NO: 915760
ggaggaccuucccuugauu

SEQ ID NO: 1103923 - RNA, 19 nt, Artificial Sequence
  Description of Artificial Sequence: Synthetic oligonucleotide
  Antisense strand to SEQ ID NO: 1103922
aaucaagggaagguccucc

SEQ ID NO: 1103924 - RNA, 19 nt, Artificial Sequence
  Description of Artificial Sequence: Synthetic oligonucleotide
  Sense strand starting at position 555 of SEQ ID NO: 915760
guagauaaguuccuaggga

SEQ ID NO: 1103925 - RNA, 19 nt, Artificial Sequence
  Description of Artificial Sequence: Synthetic oligonucleotide
  Antisense strand to SEQ ID NO: 1103924
ucccuaggaacuuaucuac

SEQ ID NO: 1103926 - RNA, 19 nt, Artificial Sequence
  Description of Artificial Sequence: Synthetic oligonucleotide
  Sense strand starting at position 586 of SEQ ID NO: 915760
guguaauugcuggagauag

SEQ ID NO: 1103927 - RNA, 19 nt, Artificial Sequence
  Description of Artificial Sequence: Synthetic oligonucleotide
  Antisense strand to SEQ ID NO: 1103926
cuaucuccagcaauuacac

SEQ ID NO: 1103928 - RNA, 19 nt, Artificial Sequence
  Description of Artificial Sequence: Synthetic oligonucleotide
  Sense strand starting at position 588 of SEQ ID NO: 915760
guaauugcuggagauaguc

SEQ ID NO: 1103929 - RNA, 19 nt, Artificial Sequence
  Description of Artificial Sequence: Synthetic oligonucleotide
  Antisense strand to SEQ ID NO: 1103928
gacuaucuccagcaauuac

SEQ ID NO: 1103930 - RNA, 19 nt, Artificial Sequence
  Description of Artificial Sequence: Synthetic oligonucleotide
  Sense strand starting at position 604 of SEQ ID NO: 915760
gucauagagccuuauaaua

SEQ ID NO: 1103931 - RNA, 19 nt, Artificial Sequence
  Description of Artificial Sequence: Synthetic oligonucleotide
  Antisense strand to SEQ ID NO: 1103930
uauuauaaggcucuaugac

SEQ ID NO: 1103932 - RNA, 19 nt, Artificial Sequence
  Description of Artificial Sequence: Synthetic oligonucleotide
  Sense strand starting at position 838 of SEQ ID NO: 915760
aagcauuggguccauaaua

SEQ ID NO: 1103933 - RNA, 19 nt, Artificial Sequence
  Description of Artificial Sequence: Synthetic oligonucleotide
  Antisense strand to SEQ ID NO: 1103932
uauuauggacccaaugcuu

SEQ ID NO: 1103934 - RNA, 19 nt, Artificial Sequence
  Description of Artificial Sequence: Synthetic oligonucleotide
  Sense strand starting at position 851 of SEQ ID NO: 915760
auaauaucuguguacauag

SEQ ID NO: 1103935 - RNA, 19 nt, Artificial Sequence
  Description of Artificial Sequence: Synthetic oligonucleotide
  Antisense strand to SEQ ID NO: 1103934
cuauguacacagauauuau

SEQ ID NO: 1103936 - RNA, 19 nt, Artificial Sequence
  Description of Artificial Sequence: Synthetic oligonucleotide
  Sense strand starting at position 892 of SEQ ID NO: 915760
aggaaugcucuccaaguua

SEQ ID NO: 1103937 - RNA, 19 nt, Artificial Sequence
  Description of Artificial Sequence: Synthetic oligonucleotide
  Antisense strand to SEQ ID NO: 1103936
uaacuuggagagcauuccu

SEQ ID NO: 1103938 - RNA, 19 nt, Artificial Sequence
  Description of Artificial Sequence: Synthetic oligonucleotide
  Sense strand starting at position 987 of SEQ ID NO: 915760
uaauuuccggguuguuaag

SEQ ID NO: 1103939 - RNA, 19 nt, Artificial Sequence
  Description of Artificial Sequence: Synthetic oligonucleotide
  Antisense strand to SEQ ID NO: 1103938
cuuaacaacccggaaauua

SEQ ID NO: 1103940 - RNA, 19 nt, Artificial Sequence
  Description of Artificial Sequence: Synthetic oligonucleotide
  Sense strand starting at position 999 of SEQ ID NO: 915760
uguuaagaauaugcccaau

SEQ ID NO: 1103941 - RNA, 19 nt, Artificial Sequence
  Description of Artificial Sequence: Synthetic oligonucleotide
  Antisense strand to SEQ ID NO: 1103940
auugggcauauucuuaaca

SEQ ID NO: 1103942 - RNA, 19 nt, Artificial Sequence
  Description of Artificial Sequence: Synthetic oligonucleotide
  Sense strand starting at position 1283 of SEQ ID NO: 915760
gggagugauccaggacuug

SEQ ID NO: 1103943 - RNA, 19 nt, Artificial Sequence
  Description of Artificial Sequence: Synthetic oligonucleotide
  Antisense strand to SEQ ID NO: 1103942
caaguccuggaucacuccc

SEQ ID NO: 1103944 - RNA, 19 nt, Artificial Sequence
  Description of Artificial Sequence: Synthetic oligonucleotide
  Sense strand starting at position 1517 of SEQ ID NO: 915760
gugucuguaacugagaaau

SEQ ID NO: 1103945 - RNA, 19 nt, Artificial Sequence
  Description of Artificial Sequence: Synthetic oligonucleotide
  Antisense strand to SEQ ID NO: 1103944
auuucucaguuacagacac

SEQ ID NO: 1103946 - RNA, 19 nt, Artificial Sequence
  Description of Artificial Sequence: Synthetic oligonucleotide
  Sense strand starting at position 1766 of SEQ ID NO: 915760
gggaaaucugcagggucua

SEQ ID NO: 1103947 - RNA, 19 nt, Artificial Sequence
  Description of Artificial Sequence: Synthetic oligonucleotide
  Antisense strand to SEQ ID NO: 1103946
uagacccugcagauuuccc

SEQ ID NO: 1103948 - RNA, 19 nt, Artificial Sequence
  Description of Artificial Sequence: Synthetic oligonucleotide
  Sense strand starting at position 1829 of SEQ ID NO: 915760
gauugcgggauugagauau

SEQ ID NO: 1103949 - RNA, 19 nt, Artificial Sequence
  Description of Artificial Sequence: Synthetic oligonucleotide
  Antisense strand to SEQ ID NO: 1103948
auaucucaaucccgcaauc

SEQ ID NO: 1103950 - RNA, 19 nt, Artificial Sequence
  Description of Artificial Sequence: Synthetic oligonucleotide
  Sense strand starting at position 1833 of SEQ ID NO: 915760
gcgggauugagauauguug

SEQ ID NO: 1103951 - RNA, 19 nt, Artificial Sequence
  Description of Artificial Sequence: Synthetic oligonucleotide
  Antisense strand to SEQ ID NO: 1103950
caacauaucucaaucccgc

SEQ ID NO: 1103952 - RNA, 19 nt, Artificial Sequence
  Description of Artificial Sequence: Synthetic oligonucleotide
  Sense strand starting at position 1839 of SEQ ID NO: 915760
uugagauauguuggaauca

SEQ ID NO: 1103953 - RNA, 19 nt, Artificial Sequence
  Description of Artificial Sequence: Synthetic oligonucleotide
  Antisense strand to SEQ ID NO: 1103952
ugauuccaacauaucucaa

SEQ ID NO: 1103954 - RNA, 19 nt, Artificial Sequence
  Description of Artificial Sequence: Synthetic oligonucleotide
  Sense strand starting at position 1880 of SEQ ID NO: 915760
gggaaagaggucuguaguu

SEQ ID NO: 1103955 - RNA, 19 nt, Artificial Sequence
  Description of Artificial Sequence: Synthetic oligonucleotide
  Antisense strand to SEQ ID NO: 1103954
aacuacagaccucuuuccc

SEQ ID NO: 1103956 - RNA, 19 nt, Artificial Sequence
  Description of Artificial Sequence: Synthetic oligonucleotide
  Sense strand starting at position 1882 of SEQ ID NO: 915760
gaaagaggucuguaguuga

SEQ ID NO: 1103957 - RNA, 19 nt, Artificial Sequence
  Description of Artificial Sequence: Synthetic oligonucleotide
  Antisense strand to SEQ ID NO: 1103956
ucaacuacagaccucuuuc

SEQ ID NO: 1103958 - RNA, 19 nt, Artificial Sequence
  Description of Artificial Sequence: Synthetic oligonucleotide
  Sense strand starting at position 1887 of SEQ ID NO: 915760
aggucuguaguugaugaau

SEQ ID NO: 1103959 - RNA, 19 nt, Artificial Sequence
  Description of Artificial Sequence: Synthetic oligonucleotide
  Antisense strand to SEQ ID NO: 1103958
auucaucaacuacagaccu

SEQ ID NO: 1103960 - RNA, 19 nt, Artificial Sequence
  Description of Artificial Sequence: Synthetic oligonucleotide
  Sense strand starting at position 1890 of SEQ ID NO: 915760
ucuguaguugaugaauaca

SEQ ID NO: 1103961 - RNA, 19 nt, Artificial Sequence
  Description of Artificial Sequence: Synthetic oligonucleotide
  Antisense strand to SEQ ID NO: 1103960
uguauucaucaacuacaga

SEQ ID NO: 1103962 - RNA, 19 nt, Artificial Sequence
  Description of Artificial Sequence: Synthetic oligonucleotide
  Sense strand starting at position 2107 of SEQ ID NO: 915760
ucuugagacuucucuaagg

SEQ ID NO: 1103963 - RNA, 19 nt, Artificial Sequence
  Description of Artificial Sequence: Synthetic oligonucleotide
  Antisense strand to SEQ ID NO: 1103962
ccuuagagaagucucaaga

SEQ ID NO: 1103964 - RNA, 19 nt, Artificial Sequence
  Description of Artificial Sequence: Synthetic oligonucleotide
  Sense strand starting at position 2225 of SEQ ID NO: 915760
cugggauuggaauguuaua

SEQ ID NO: 1103965 - RNA, 19 nt, Artificial Sequence
  Description of Artificial Sequence: Synthetic oligonucleotide
  Antisense strand to SEQ ID NO: 1103964
uauaacauuccaaucccag

SEQ ID NO: 1103966 - RNA, 19 nt, Artificial Sequence
  Description of Artificial Sequence: Synthetic oligonucleotide
  Sense strand starting at position 2357 of SEQ ID NO: 915760
ccaugaauucuuuacguau

SEQ ID NO: 1103967 - RNA, 19 nt, Artificial Sequence
  Description of Artificial Sequence: Synthetic oligonucleotide
  Antisense strand to SEQ ID NO: 1103966
auacguaaagaauucaugg

SEQ ID NO: 1103968 - RNA, 19 nt, Artificial Sequence
  Description of Artificial Sequence: Synthetic oligonucleotide
  Sense strand starting at position 2384 of SEQ ID NO: 915760
uauugauucgcugauggau

SEQ ID NO: 1103969 - RNA, 19 nt, Artificial Sequence
  Description of Artificial Sequence: Synthetic oligonucleotide
  Antisense strand to SEQ ID NO: 1103968
auccaucagcgaaucaaua

SEQ ID NO: 1103970 - RNA, 19 nt, Artificial Sequence
  Description of Artificial Sequence: Synthetic oligonucleotide
  Sense strand starting at position 2390 of SEQ ID NO: 915760
uucgcugauggauaggauu

SEQ ID NO: 1103971 - RNA, 19 nt, Artificial Sequence
  Description of Artificial Sequence: Synthetic oligonucleotide
  Antisense strand to SEQ ID NO: 1103970
aauccuauccaucagcgaa

SEQ ID NO: 1103972 - RNA, 19 nt, Artificial Sequence
  Description of Artificial Sequence: Synthetic oligonucleotide
  Sense strand starting at position 2422 of SEQ ID NO: 915760
aggagucaagcaugagaua

SEQ ID NO: 1103973 - RNA, 19 nt, Artificial Sequence
  Description of Artificial Sequence: Synthetic oligonucleotide
  Antisense strand to SEQ ID NO: 1103972
uaucucaugcuugacuccu

SEQ ID NO: 1103974 - RNA, 19 nt, Artificial Sequence
  Description of Artificial Sequence: Synthetic oligonucleotide
  Sense strand starting at position 2618 of SEQ ID NO: 915760
auauuauaaguccagaguu

SEQ ID NO: 1103975 - RNA, 19 nt, Artificial Sequence
  Description of Artificial Sequence: Synthetic oligonucleotide
  Antisense strand to SEQ ID NO: 1103974
aacucuggacuuauaauau

SEQ ID NO: 1103976 - RNA, 19 nt, Artificial Sequence
  Description of Artificial Sequence: Synthetic oligonucleotide
  Sense strand starting at position 2620 of SEQ ID NO: 915760
auuauaaguccagaguuua

SEQ ID NO: 1103977 - RNA, 19 nt, Artificial Sequence
  Description of Artificial Sequence: Synthetic oligonucleotide
  Antisense strand to SEQ ID NO: 1103976
uaaacucuggacuuauaau

SEQ ID NO: 1103978 - RNA, 19 nt, Artificial Sequence
  Description of Artificial Sequence: Synthetic oligonucleotide
  Sense strand starting at position 2659 of SEQ ID NO: 915760
aacaucauggacugguuua

SEQ ID NO: 1103979 - RNA, 19 nt, Artificial Sequence
  Description of Artificial Sequence: Synthetic oligonucleotide
  Antisense strand to SEQ ID NO: 1103978
uaaaccaguccaugauguu

SEQ ID NO: 1103980 - RNA, 19 nt, Artificial Sequence
  Description of Artificial Sequence: Synthetic oligonucleotide
  Sense strand starting at position 2961 of SEQ ID NO: 915760
ccaugaugagacuagcuuu

SEQ ID NO: 1103981 - RNA, 19 nt, Artificial Sequence
  Description of Artificial Sequence: Synthetic oligonucleotide
  Antisense strand to SEQ ID NO: 1103980
aaagcuagucucaucaugg

SEQ ID NO: 1103982 - RNA, 19 nt, Artificial Sequence
  Description of Artificial Sequence: Synthetic oligonucleotide
  Sense strand starting at position 2964 of SEQ ID NO: 915760
ugaugagacuagcuuugga

SEQ ID NO: 1103983 - RNA, 19 nt, Artificial Sequence
  Description of Artificial Sequence: Synthetic oligonucleotide
  Antisense strand to SEQ ID NO: 1103982
uccaaagcuagucucauca

SEQ ID NO: 1103984 - RNA, 19 nt, Artificial Sequence
  Description of Artificial Sequence: Synthetic oligonucleotide
  Sense strand starting at position 2996 of SEQ ID NO: 915760
caggaagccuaaucagagu

SEQ ID NO: 1103985 - RNA, 19 nt, Artificial Sequence
  Description of Artificial Sequence: Synthetic oligonucleotide
  Antisense strand to SEQ ID NO: 1103984
acucugauuaggcuuccug

SEQ ID NO: 1103986 - RNA, 19 nt, Artificial Sequence
  Description of Artificial Sequence: Synthetic oligonucleotide
  Sense strand starting at position 3023 of SEQ ID NO: 915760
aagcaaaugguuugggaaa

SEQ ID NO: 1103987 - RNA, 19 nt, Artificial Sequence
  Description of Artificial Sequence: Synthetic oligonucleotide
  Antisense strand to SEQ ID NO: 1103986
uuucccaaaccauuugcuu

SEQ ID NO: 1103988 - RNA, 19 nt, Artificial Sequence
  Description of Artificial Sequence: Synthetic oligonucleotide
  Sense strand starting at position 3165 of SEQ ID NO: 915760
gaaacaauccagugaguag

SEQ ID NO: 1103989 - RNA, 19 nt, Artificial Sequence
  Description of Artificial Sequence: Synthetic oligonucleotide
  Antisense strand to SEQ ID NO: 1103988
cuacucacuggauuguuuc

SEQ ID NO: 1103990 - RNA, 19 nt, Artificial Sequence
  Description of Artificial Sequence: Synthetic oligonucleotide
  Sense strand starting at position 3381 of SEQ ID NO: 915760
gucccuucugauuauuacu

SEQ ID NO: 1103991 - RNA, 19 nt, Artificial Sequence
  Description of Artificial Sequence: Synthetic oligonucleotide
  Antisense strand to SEQ ID NO: 1103990
aguaauaaucagaagggac

SEQ ID NO: 1103992 - RNA, 19 nt, Artificial Sequence
  Description of Artificial Sequence: Synthetic oligonucleotide
  Sense strand starting at position 3400 of SEQ ID NO: 915760
gucuuucuuguugaaauaa

SEQ ID NO: 1103993 - RNA, 19 nt, Artificial Sequence
  Description of Artificial Sequence: Synthetic oligonucleotide
  Antisense strand to SEQ ID NO: 1103992
uuauuucaacaagaaagac

SEQ ID NO: 1103994 - RNA, 19 nt, Artificial Sequence
  Description of Artificial Sequence: Synthetic oligonucleotide
  Sense strand starting at position 3705 of SEQ ID NO: 915760
auaagaugugcucaugaug

SEQ ID NO: 1103995 - RNA, 19 nt, Artificial Sequence
  Description of Artificial Sequence: Synthetic oligonucleotide
  Antisense strand to SEQ ID NO: 1103994
caucaugagcacaucuuau

SEQ ID NO: 1103996 - RNA, 19 nt, Artificial Sequence
  Description of Artificial Sequence: Synthetic oligonucleotide
  Sense strand starting at position 3957 of SEQ ID NO: 915760
gugaauuaacuaggauagu

SEQ ID NO: 1103997 - RNA, 19 nt, Artificial Sequence
  Description of Artificial Sequence: Synthetic oligonucleotide
  Antisense strand to SEQ ID NO: 1103996
acuauccuaguuaauucac

SEQ ID NO: 1103998 - RNA, 19 nt, Artificial Sequence
  Description of Artificial Sequence: Synthetic oligonucleotide
  Sense strand starting at position 267 of SEQ ID NO: 915761
cuuggaaugcuuuaggguu

SEQ ID NO: 1103999 - RNA, 19 nt, Artificial Sequence
  Description of Artificial Sequence: Synthetic oligonucleotide
  Antisense strand to SEQ ID NO: 1103998
aacccuaaagcauuccaag

SEQ ID NO: 1104000 - RNA, 19 nt, Artificial Sequence
  Description of Artificial Sequence: Synthetic oligonucleotide
  Sense strand starting at position 460 of SEQ ID NO: 915761
ucaucugacagcuggagau

SEQ ID NO: 1104001 - RNA, 19 nt, Artificial Sequence
  Description of Artificial Sequence: Synthetic oligonucleotide
  Antisense strand to SEQ ID NO: 1104000
aucuccagcugucagauga

SEQ ID NO: 1104002 - RNA, 19 nt, Artificial Sequence
  Description of Artificial Sequence: Synthetic oligonucleotide
  Sense strand starting at position 832 of SEQ ID NO: 915761
gugaaaggguuuccuccaa

SEQ ID NO: 1104003 - RNA, 19 nt, Artificial Sequence
  Description of Artificial Sequence: Synthetic oligonucleotide
  Antisense strand to SEQ ID NO: 1104002
uuggaggaaacccuuucac

SEQ ID NO: 1104004 - RNA, 19 nt, Artificial Sequence
  Description of Artificial Sequence: Synthetic oligonucleotide
  Sense strand starting at position 883 of SEQ ID NO: 915761
uugauaucagcauaguucu

SEQ ID NO: 1104005 - RNA, 19 nt, Artificial Sequence
  Description of Artificial Sequence: Synthetic oligonucleotide
  Antisense strand to SEQ ID NO: 1104004
agaacuaugcugauaucaa

SEQ ID NO: 1104006 - RNA, 19 nt, Artificial Sequence
  Description of Artificial Sequence: Synthetic oligonucleotide
  Sense strand starting at position 930 of SEQ ID NO: 915761
ugucucuaagcccagauau

SEQ ID NO: 1104007 - RNA, 19 nt, Artificial Sequence
  Description of Artificial Sequence: Synthetic oligonucleotide
  Antisense strand to SEQ ID NO: 1104006
auaucugggcuuagagaca

SEQ ID NO: 1104008 - RNA, 19 nt, Artificial Sequence
  Description of Artificial Sequence: Synthetic oligonucleotide
  Sense strand starting at position 955 of SEQ ID NO: 915761
ggguucaguggauacucaa

SEQ ID NO: 1104009 - RNA, 19 nt, Artificial Sequence
  Description of Artificial Sequence: Synthetic oligonucleotide
  Antisense strand to SEQ ID NO: 1104008
uugaguauccacugaaccc

SEQ ID NO: 1104010 - RNA, 19 nt, Artificial Sequence
  Description of Artificial Sequence: Synthetic oligonucleotide
  Sense strand starting at position 1142 of SEQ ID NO: 915761
acaugaacuccauguugga

SEQ ID NO: 1104011 - RNA, 19 nt, Artificial Sequence
  Description of Artificial Sequence: Synthetic oligonucleotide
  Antisense strand to SEQ ID NO: 1104010
uccaacauggaguucaugu

SEQ ID NO: 1104012 - RNA, 19 nt, Artificial Sequence
  Description of Artificial Sequence: Synthetic oligonucleotide
  Sense strand starting at position 1409 of SEQ ID NO: 915761
uggacuugaugaccaagua

SEQ ID NO: 1104013 - RNA, 19 nt, Artificial Sequence
  Description of Artificial Sequence: Synthetic oligonucleotide
  Antisense strand to SEQ ID NO: 1104012
uacuuggucaucaagucca

SEQ ID NO: 1104014 - RNA, 19 nt, Artificial Sequence
  Description of Artificial Sequence: Synthetic oligonucleotide
  Sense strand starting at position 1466 of SEQ ID NO: 915761
ugucauggucuuugagaag

SEQ ID NO: 1104015 - RNA, 19 nt, Artificial Sequence
  Description of Artificial Sequence: Synthetic oligonucleotide
  Antisense strand to SEQ ID NO: 1104014
cuucucaaagaccaugaca

SEQ ID NO: 1104016 - RNA, 19 nt, Artificial Sequence
  Description of Artificial Sequence: Synthetic oligonucleotide
  Sense strand starting at position 1562 of SEQ ID NO: 915761
ccgagaugucaucagcuac

SEQ ID NO: 1104017 - RNA, 19 nt, Artificial Sequence
  Description of Artificial Sequence: Synthetic oligonucleotide
  Antisense strand to SEQ ID NO: 1104016
guagcugaugacaucucgg

SEQ ID NO: 1104018 - RNA, 19 nt, Artificial Sequence
  Description of Artificial Sequence: Synthetic oligonucleotide
  Sense strand starting at position 1579 of SEQ ID NO: 915761
accauaaagucuuucuggu

SEQ ID NO: 1104019 - RNA, 19 nt, Artificial Sequence
  Description of Artificial Sequence: Synthetic oligonucleotide
  Antisense strand to SEQ ID NO: 1104018
accagaaagacuuuauggu

SEQ ID NO: 1104020 - RNA, 19 nt, Artificial Sequence
  Description of Artificial Sequence: Synthetic oligonucleotide
  Sense strand starting at position 1677 of SEQ ID NO: 915761
cugggacauccuggauguu

SEQ ID NO: 1104021 - RNA, 19 nt, Artificial Sequence
  Description of Artificial Sequence: Synthetic oligonucleotide
  Antisense strand to SEQ ID NO: 1104020
aacauccaggaugucccag

SEQ ID NO: 1104022 - RNA, 19 nt, Artificial Sequence
  Description of Artificial Sequence: Synthetic oligonucleotide
  Sense strand starting at position 1689 of SEQ ID NO: 915761
ggauguucgagagauggca

SEQ ID NO: 1104023 - RNA, 19 nt, Artificial Sequence
  Description of Artificial Sequence: Synthetic oligonucleotide
  Antisense strand to SEQ ID NO: 1104022
ugccaucucucgaacaucc

SEQ ID NO: 1104024 - RNA, 19 nt, Artificial Sequence
  Description of Artificial Sequence: Synthetic oligonucleotide
  Sense strand starting at position 2027 of SEQ ID NO: 915761
gggcaugaauccucagaaa

SEQ ID NO: 1104025 - RNA, 19 nt, Artificial Sequence
  Description of Artificial Sequence: Synthetic oligonucleotide
  Antisense strand to SEQ ID NO: 1104024
uuucugaggauucaugccc

SEQ ID NO: 1104026 - RNA, 19 nt, Artificial Sequence
  Description of Artificial Sequence: Synthetic oligonucleotide
  Sense strand starting at position 2117 of SEQ ID NO: 915761
gguccagggcucuacaaua

SEQ ID NO: 1104027 - RNA, 19 nt, Artificial Sequence
  Description of Artificial Sequence: Synthetic oligonucleotide
  Antisense strand to SEQ ID NO: 1104026
uauuguagagcccuggacc

SEQ ID NO: 1104028 - RNA, 19 nt, Artificial Sequence
  Description of Artificial Sequence: Synthetic oligonucleotide
  Sense strand starting at position 2161 of SEQ ID NO: 915761
gggacaaaguucucuggau

SEQ ID NO: 1104029 - RNA, 19 nt, Artificial Sequence
  Description of Artificial Sequence: Synthetic oligonucleotide
  Antisense strand to SEQ ID NO: 1104028
auccagagaacuuuguccc

SEQ ID NO: 1104030 - RNA, 19 nt, Artificial Sequence
  Description of Artificial Sequence: Synthetic oligonucleotide
  Sense strand starting at position 2162 of SEQ ID NO: 915761
ggacaaaguucucuggaug

SEQ ID NO: 1104031 - RNA, 19 nt, Artificial Sequence
  Description of Artificial Sequence: Synthetic oligonucleotide
  Antisense strand to SEQ ID NO: 1104030
cauccagagaacuuugucc

SEQ ID NO: 1104032 - RNA, 19 nt, Artificial Sequence
  Description of Artificial Sequence: Synthetic oligonucleotide
  Sense strand starting at position 2167 of SEQ ID NO: 915761
aaguucucuggauggaacu

SEQ ID NO: 1104033 - RNA, 19 nt, Artificial Sequence
  Description of Artificial Sequence: Synthetic oligonucleotide
  Antisense strand to SEQ ID NO: 1104032
aguuccauccagagaacuu

SEQ ID NO: 1104034 - RNA, 19 nt, Artificial Sequence
  Description of Artificial Sequence: Synthetic oligonucleotide
  Sense strand starting at position 2168 of SEQ ID NO: 915761
aguucucuggauggaacua

SEQ ID NO: 1104035 - RNA, 19 nt, Artificial Sequence
  Description of Artificial Sequence: Synthetic oligonucleotide
  Antisense strand to SEQ ID NO: 1104034
uaguuccauccagagaacu

SEQ ID NO: 1104036 - RNA, 19 nt, Artificial Sequence
  Description of Artificial Sequence: Synthetic oligonucleotide
  Sense strand starting at position 2228 of SEQ ID NO: 915761
gugggauguguguuuccgu

SEQ ID NO: 1104037 - RNA, 19 nt, Artificial Sequence
  Description of Artificial Sequence: Synthetic oligonucleotide
  Antisense strand to SEQ ID NO: 1104036
acggaaacacacaucccac

SEQ ID NO: 1104038 - RNA, 19 nt, Artificial Sequence
  Description of Artificial Sequence: Synthetic oligonucleotide
  Sense strand starting at position 2230 of SEQ ID NO: 915761
gggauguguguuuccgugu

SEQ ID NO: 1104039 - RNA, 19 nt, Artificial Sequence
  Description of Artificial Sequence: Synthetic oligonucleotide
  Antisense strand to SEQ ID NO: 1104038
acacggaaacacacauccc

SEQ ID NO: 1104040 - RNA, 19 nt, Artificial Sequence
  Description of Artificial Sequence: Synthetic oligonucleotide
  Sense strand starting at position 2235 of SEQ ID NO: 915761
guguguuuccgugugauac

SEQ ID NO: 1104041 - RNA, 19 nt, Artificial Sequence
  Description of Artificial Sequence: Synthetic oligonucleotide
  Antisense strand to SEQ ID NO: 1104040
guaucacacggaaacacac

SEQ ID NO: 1104042 - RNA, 19 nt, Artificial Sequence
  Description of Artificial Sequence: Synthetic oligonucleotide
  Sense strand starting at position 2243 of SEQ ID NO: 915761
ccgugugauacugugugua

SEQ ID NO: 1104043 - RNA, 19 nt, Artificial Sequence
  Description of Artificial Sequence: Synthetic oligonucleotide
  Antisense strand to SEQ ID NO: 1104042
uacacacaguaucacacgg

SEQ ID NO: 1104044 - RNA, 19 nt, Artificial Sequence
  Description of Artificial Sequence: Synthetic oligonucleotide
  Sense strand starting at position 2263 of SEQ ID NO: 915761
guuccuuauagggauguua

SEQ ID NO: 1104045 - RNA, 19 nt, Artificial Sequence
  Description of Artificial Sequence: Synthetic oligonucleotide
  Antisense strand to SEQ ID NO: 1104044
uaacaucccuauaaggaac

SEQ ID NO: 1104046 - RNA, 19 nt, Artificial Sequence
  Description of Artificial Sequence: Synthetic oligonucleotide
  Sense strand starting at position 2265 of SEQ ID NO: 915761
uccuuauagggauguuaga

SEQ ID NO: 1104047 - RNA, 19 nt, Artificial Sequence
  Description of Artificial Sequence: Synthetic oligonucleotide
  Antisense strand to SEQ ID NO: 1104046
ucuaacaucccuauaagga

SEQ ID NO: 1104048 - RNA, 19 nt, Artificial Sequence
  Description of Artificial Sequence: Synthetic oligonucleotide
  Sense strand starting at position 2274 of SEQ ID NO: 915761
ggauguuagacuuguauga

SEQ ID NO: 1104049 - RNA, 19 nt, Artificial Sequence
  Description of Artificial Sequence: Synthetic oligonucleotide
  Antisense strand to SEQ ID NO: 1104048
ucauacaagucuaacaucc

SEQ ID NO: 1104050 - RNA, 19 nt, Artificial Sequence
  Description of Artificial Sequence: Synthetic oligonucleotide
  Sense strand starting at position 2355 of SEQ ID NO: 915761
uaggaaggagcgcauuaau

SEQ ID NO: 1104051 - RNA, 19 nt, Artificial Sequence
  Description of Artificial Sequence: Synthetic oligonucleotide
  Antisense strand to SEQ ID NO: 1104050
auuaaugcgcuccuuccua

SEQ ID NO: 1104052 - RNA, 19 nt, Artificial Sequence
  Description of Artificial Sequence: Synthetic oligonucleotide
  Sense strand starting at position 2390 of SEQ ID NO: 915761
aaauuugggucuuauauag

SEQ ID NO: 1104053 - RNA, 19 nt, Artificial Sequence
  Description of Artificial Sequence: Synthetic oligonucleotide
  Antisense strand to SEQ ID NO: 1104052
cuauauaagacccaaauuu

SEQ ID NO: 1104054 - RNA, 19 nt, Artificial Sequence
  Description of Artificial Sequence: Synthetic oligonucleotide
  Sense strand starting at position 2396 of SEQ ID NO: 915761
gggucuuauauagagucua

SEQ ID NO: 1104055 - RNA, 19 nt, Artificial Sequence
  Description of Artificial Sequence: Synthetic oligonucleotide
  Antisense strand to SEQ ID NO: 1104054
uagacucuauauaagaccc

SEQ ID NO: 1104056 - RNA, 19 nt, Artificial Sequence
  Description of Artificial Sequence: Synthetic oligonucleotide
  Sense strand starting at position 2431 of SEQ ID NO: 915761
auuuaauugugcucccaug

SEQ ID NO: 1104057 - RNA, 19 nt, Artificial Sequence
  Description of Artificial Sequence: Synthetic oligonucleotide
  Antisense strand to SEQ ID NO: 1104056
caugggagcacaauuaaau

SEQ ID NO: 1104058 - RNA, 19 nt, Artificial Sequence
  Description of Artificial Sequence: Synthetic oligonucleotide
  Sense strand starting at position 2580 of SEQ ID NO: 915761
uggucucuucuacauguca

SEQ ID NO: 1104059 - RNA, 19 nt, Artificial Sequence
  Description of Artificial Sequence: Synthetic oligonucleotide
  Antisense strand to SEQ ID NO: 1104058
ugacauguagaagagacca

SEQ ID NO: 1104060 - RNA, 19 nt, Artificial Sequence
  Description of Artificial Sequence: Synthetic oligonucleotide
  Sense strand starting at position 2682 of SEQ ID NO: 915761
gaaugucgucuguaaauca

SEQ ID NO: 1104061 - RNA, 19 nt, Artificial Sequence
  Description of Artificial Sequence: Synthetic oligonucleotide
  Antisense strand to SEQ ID NO: 1104060
ugauuuacagacgacauuc

SEQ ID NO: 1104062 - RNA, 19 nt, Artificial Sequence
  Description of Artificial Sequence: Synthetic oligonucleotide
  Sense strand starting at position 2781 of SEQ ID NO: 915761
cauguaaauuuggagaauu

SEQ ID NO: 1104063 - RNA, 19 nt, Artificial Sequence
  Description of Artificial Sequence: Synthetic oligonucleotide
  Antisense strand to SEQ ID NO: 1104062
aauucuccaaauuuacaug

SEQ ID NO: 1104064 - RNA, 19 nt, Artificial Sequence
  Description of Artificial Sequence: Synthetic oligonucleotide
  Sense strand starting at position 2814 of SEQ ID NO: 915761
uuuagaugcagauggaaau

SEQ ID NO: 1104065 - RNA, 19 nt, Artificial Sequence
  Description of Artificial Sequence: Synthetic oligonucleotide
  Antisense strand to SEQ ID NO: 1104064
auuuccaucugcaucuaaa

SEQ ID NO: 1104066 - RNA, 19 nt, Artificial Sequence
  Description of Artificial Sequence: Synthetic oligonucleotide
  Sense strand starting at position 2894 of SEQ ID NO: 915761
uauucuguguuacuaggaa

SEQ ID NO: 1104067 - RNA, 19 nt, Artificial Sequence
  Description of Artificial Sequence: Synthetic oligonucleotide
  Antisense strand to SEQ ID NO: 1104066
uuccuaguaacacagaaua

SEQ ID NO: 1104068 - RNA, 19 nt, Artificial Sequence
  Description of Artificial Sequence: Synthetic oligonucleotide
  Sense strand starting at position 3020 of SEQ ID NO: 915761
guguguugaagacaagcaa

SEQ ID NO: 1104069 - RNA, 19 nt, Artificial Sequence
  Description of Artificial Sequence: Synthetic oligonucleotide
  Antisense strand to SEQ ID NO: 1104068
uugcuugucuucaacacac

SEQ ID NO: 1104070 - RNA, 19 nt, Artificial Sequence
  Description of Artificial Sequence: Synthetic oligonucleotide
  Sense strand starting at position 3060 of SEQ ID NO: 915761
aggagaccuucugcuauca

SEQ ID NO: 1104071 - RNA, 19 nt, Artificial Sequence
  Description of Artificial Sequence: Synthetic oligonucleotide
  Antisense strand to SEQ ID NO: 1104070
ugauagcagaaggucuccu

SEQ ID NO: 1104072 - RNA, 19 nt, Artificial Sequence
  Description of Artificial Sequence: Synthetic oligonucleotide
  Sense strand starting at position 3125 of SEQ ID NO: 915761
augucagauccucaucaug

SEQ ID NO: 1104073 - RNA, 19 nt, Artificial Sequence
  Description of Artificial Sequence: Synthetic oligonucleotide
  Antisense strand to SEQ ID NO: 1104072
caugaugaggaucugacau

SEQ ID NO: 1104074 - RNA, 19 nt, Artificial Sequence
  Description of Artificial Sequence: Synthetic oligonucleotide
  Sense strand starting at position 3544 of SEQ ID NO: 915761
uaauguacugauugagaua

SEQ ID NO: 1104075 - RNA, 19 nt, Artificial Sequence
  Description of Artificial Sequence: Synthetic oligonucleotide
  Antisense strand to SEQ ID NO: 1104074
uaucucaaucaguacauua

SEQ ID NO: 1104076 - RNA, 19 nt, Artificial Sequence
  Description of Artificial Sequence: Synthetic oligonucleotide
  Sense strand starting at position 3980 of SEQ ID NO: 915761
gaguguaaggcauagagca

SEQ ID NO: 1104077 - RNA, 19 nt, Artificial Sequence
  Description of Artificial Sequence: Synthetic oligonucleotide
  Antisense strand to SEQ ID NO: 1104076
ugcucuaugccuuacacuc

SEQ ID NO: 1104078 - RNA, 19 nt, Artificial Sequence
  Description of Artificial Sequence: Synthetic oligonucleotide
  Sense strand starting at position 226 of SEQ ID NO: 915762
agaacugagucagauauac

SEQ ID NO: 1104079 - RNA, 19 nt, Artificial Sequence
  Description of Artificial Sequence: Synthetic oligonucleotide
  Antisense strand to SEQ ID NO: 1104078
guauaucugacucaguucu

SEQ ID NO: 1104080 - RNA, 19 nt, Artificial Sequence
  Description of Artificial Sequence: Synthetic oligonucleotide
  Sense strand starting at position 571 of SEQ ID NO: 915762
gcauaaaguuccucgggaa

SEQ ID NO: 1104081 - RNA, 19 nt, Artificial Sequence
  Description of Artificial Sequence: Synthetic oligonucleotide
  Antisense strand to SEQ ID NO: 1104080
uucccgaggaacuuuaugc

SEQ ID NO: 1104082 - RNA, 19 nt, Artificial Sequence
  Description of Artificial Sequence: Synthetic oligonucleotide
  Sense strand starting at position 572 of SEQ ID NO: 915762
cauaaaguuccucgggaaa

SEQ ID NO: 1104083 - RNA, 19 nt, Artificial Sequence
  Description of Artificial Sequence: Synthetic oligonucleotide
  Antisense strand to SEQ ID NO: 1104082
uuucccgaggaacuuuaug

SEQ ID NO: 1104084 - RNA, 19 nt, Artificial Sequence
  Description of Artificial Sequence: Synthetic oligonucleotide
  Sense strand starting at position 681 of SEQ ID NO: 915762
ucauaaucuugauguagga

SEQ ID NO: 1104085 - RNA, 19 nt, Artificial Sequence
  Description of Artificial Sequence: Synthetic oligonucleotide
  Antisense strand to SEQ ID NO: 1104084
uccuacaucaagauuauga

SEQ ID NO: 1104086 - RNA, 19 nt, Artificial Sequence
  Description of Artificial Sequence: Synthetic oligonucleotide
  Sense strand starting at position 737 of SEQ ID NO: 915762
uccuacuuugcgggaggaa

SEQ ID NO: 1104087 - RNA, 19 nt, Artificial Sequence
  Description of Artificial Sequence: Synthetic oligonucleotide
  Antisense strand to SEQ ID NO: 1104086
uuccucccgcaaaguagga

SEQ ID NO: 1104088 - RNA, 19 nt, Artificial Sequence
  Description of Artificial Sequence: Synthetic oligonucleotide
  Sense strand starting at position 2004 of SEQ ID NO: 915762
agaugucuuuggcuuacuu

SEQ ID NO: 1104089 - RNA, 19 nt, Artificial Sequence
  Description of Artificial Sequence: Synthetic oligonucleotide
  Antisense strand to SEQ ID NO: 1104088
aaguaagccaaagacaucu

SEQ ID NO: 1104090 - RNA, 19 nt, Artificial Sequence
  Description of Artificial Sequence: Synthetic oligonucleotide
  Sense strand starting at position 2194 of SEQ ID NO: 915762
ugucauaugucccuuguau

SEQ ID NO: 1104091 - RNA, 19 nt, Artificial Sequence
  Description of Artificial Sequence: Synthetic oligonucleotide
  Antisense strand to SEQ ID NO: 1104090
auacaagggacauaugaca

SEQ ID NO: 1104092 - RNA, 19 nt, Artificial Sequence
  Description of Artificial Sequence: Synthetic oligonucleotide
  Sense strand starting at position 2196 of SEQ ID NO: 915762
ucauaugucccuuguauaa

SEQ ID NO: 1104093 - RNA, 19 nt, Artificial Sequence
  Description of Artificial Sequence: Synthetic oligonucleotide
  Antisense strand to SEQ ID NO: 1104092
uuauacaagggacauauga

SEQ ID NO: 1104094 - RNA, 19 nt, Artificial Sequence
  Description of Artificial Sequence: Synthetic oligonucleotide
  Sense strand starting at position 2198 of SEQ ID NO: 915762
auaugucccuuguauaauu

SEQ ID NO: 1104095 - RNA, 19 nt, Artificial Sequence
  Description of Artificial Sequence: Synthetic oligonucleotide
  Antisense strand to SEQ ID NO: 1104094
aauuauacaagggacauau

SEQ ID NO: 1104096 - RNA, 19 nt, Artificial Sequence
  Description of Artificial Sequence: Synthetic oligonucleotide
  Sense strand starting at position 2674 of SEQ ID NO: 915762
ggaccagugcaugggaauu

SEQ ID NO: 1104097 - RNA, 19 nt, Artificial Sequence
  Description of Artificial Sequence: Synthetic oligonucleotide
  Antisense strand to SEQ ID NO: 1104096
aauucccaugcacuggucc

SEQ ID NO: 1104098 - RNA, 19 nt, Artificial Sequence
  Description of Artificial Sequence: Synthetic oligonucleotide
  Sense strand starting at position 2676 of SEQ ID NO: 915762
accagugcaugggaauuaa

SEQ ID NO: 1104099 - RNA, 19 nt, Artificial Sequence
  Description of Artificial Sequence: Synthetic oligonucleotide
  Antisense strand to SEQ ID NO: 1104098
uuaauucccaugcacuggu

SEQ ID NO: 1104100 - RNA, 19 nt, Artificial Sequence
  Description of Artificial Sequence: Synthetic oligonucleotide
  Sense strand starting at position 2686 of SEQ ID NO: 915762
gggaauuaaugcuuucuug

SEQ ID NO: 1104101 - RNA, 19 nt, Artificial Sequence
  Description of Artificial Sequence: Synthetic oligonucleotide
  Antisense strand to SEQ ID NO: 1104100
caagaaagcauuaauuccc

SEQ ID NO: 1104102 - RNA, 19 nt, Artificial Sequence
  Description of Artificial Sequence: Synthetic oligonucleotide
  Sense strand starting at position 2750 of SEQ ID NO: 915762
acucuugucgcccggguua

SEQ ID NO: 1104103 - RNA, 19 nt, Artificial Sequence
  Description of Artificial Sequence: Synthetic oligonucleotide
  Antisense strand to SEQ ID NO: 1104102
uaacccgggcgacaagagu

SEQ ID NO: 1104104 - RNA, 19 nt, Artificial Sequence
  Description of Artificial Sequence: Synthetic oligonucleotide
  Sense strand starting at position 2752 of SEQ ID NO: 915762
ucuugucgcccggguuaga

SEQ ID NO: 1104105 - RNA, 19 nt, Artificial Sequence
  Description of Artificial Sequence: Synthetic oligonucleotide
  Antisense strand to SEQ ID NO: 1104104
ucuaacccgggcgacaaga

SEQ ID NO: 1104106 - RNA, 19 nt, Artificial Sequence
  Description of Artificial Sequence: Synthetic oligonucleotide
  Sense strand starting at position 3254 of SEQ ID NO: 915762
gcaauucugucuugccuga

SEQ ID NO: 1104107 - RNA, 19 nt, Artificial Sequence
  Description of Artificial Sequence: Synthetic oligonucleotide
  Antisense strand to SEQ ID NO: 1104106
ucaggcaagacagaauugc

SEQ ID NO: 1104108 - RNA, 19 nt, Artificial Sequence
  Description of Artificial Sequence: Synthetic oligonucleotide
  Sense strand starting at position 3256 of SEQ ID NO: 915762
aauucugucuugccugaag

SEQ ID NO: 1104109 - RNA, 19 nt, Artificial Sequence
  Description of Artificial Sequence: Synthetic oligonucleotide
  Antisense strand to SEQ ID NO: 1104108
cuucaggcaagacagaauu

SEQ ID NO: 1104110 - RNA, 19 nt, Artificial Sequence
  Description of Artificial Sequence: Synthetic oligonucleotide
  Sense strand starting at position 3258 of SEQ ID NO: 915762
uucugucuugccugaagua

SEQ ID NO: 1104111 - RNA, 19 nt, Artificial Sequence
  Description of Artificial Sequence: Synthetic oligonucleotide
  Antisense strand to SEQ ID NO: 1104110
uacuucaggcaagacagaa

SEQ ID NO: 1104112 - RNA, 19 nt, Artificial Sequence
  Description of Artificial Sequence: Synthetic oligonucleotide
  Sense strand starting at position 3270 of SEQ ID NO: 915762
ugaaguaauucuucuggca

SEQ ID NO: 1104113 - RNA, 19 nt, Artificial Sequence
  Description of Artificial Sequence: Synthetic oligonucleotide
  Antisense strand to SEQ ID NO: 1104112
ugccagaagaauuacuuca

SEQ ID NO: 1104114 - RNA, 19 nt, Artificial Sequence
  Description of Artificial Sequence: Synthetic oligonucleotide
  Sense strand starting at position 3275 of SEQ ID NO: 915762
uaauucuucuggcacguga

SEQ ID NO: 1104115 - RNA, 19 nt, Artificial Sequence
  Description of Artificial Sequence: Synthetic oligonucleotide
  Antisense strand to SEQ ID NO: 1104114
ucacgugccagaagaauua

SEQ ID NO: 1104116 - RNA, 19 nt, Artificial Sequence
  Description of Artificial Sequence: Synthetic oligonucleotide
  Sense strand starting at position 3277 of SEQ ID NO: 915762
auucuucuggcacgugauu

SEQ ID NO: 1104117 - RNA, 19 nt, Artificial Sequence
  Description of Artificial Sequence: Synthetic oligonucleotide
  Antisense strand to SEQ ID NO: 1104116
aaucacgugccagaagaau

SEQ ID NO: 1104118 - RNA, 19 nt, Artificial Sequence
  Description of Artificial Sequence: Synthetic oligonucleotide
  Sense strand starting at position 3286 of SEQ ID NO: 915762
gcacgugauuucuggauuc

SEQ ID NO: 1104119 - RNA, 19 nt, Artificial Sequence
  Description of Artificial Sequence: Synthetic oligonucleotide
  Antisense strand to SEQ ID NO: 1104118
gaauccagaaaucacgugc

SEQ ID NO: 1104120 - RNA, 19 nt, Artificial Sequence
  Description of Artificial Sequence: Synthetic oligonucleotide
  Sense strand starting at position 3341 of SEQ ID NO: 915762
uuaggaugaucuucuauuc

SEQ ID NO: 1104121 - RNA, 19 nt, Artificial Sequence
  Description of Artificial Sequence: Synthetic oligonucleotide
  Antisense strand to SEQ ID NO: 1104120
gaauagaagaucauccuaa

SEQ ID NO: 1104122 - RNA, 19 nt, Artificial Sequence
  Description of Artificial Sequence: Synthetic oligonucleotide
  Sense strand starting at position 3510 of SEQ ID NO: 915762
acugguggaaguugaaauu

SEQ ID NO: 1104123 - RNA, 19 nt, Artificial Sequence
  Description of Artificial Sequence: Synthetic oligonucleotide
  Antisense strand to SEQ ID NO: 1104122
aauuucaacuuccaccagu

SEQ ID NO: 1104124 - RNA, 19 nt, Artificial Sequence
  Description of Artificial Sequence: Synthetic oligonucleotide
  Sense strand starting at position 3519 of SEQ ID NO: 915762
aguugaaauucugagaaug

SEQ ID NO: 1104125 - RNA, 19 nt, Artificial Sequence
  Description of Artificial Sequence: Synthetic oligonucleotide
  Antisense strand to SEQ ID NO: 1104124
cauucucagaauuucaacu

SEQ ID NO: 1104126 - RNA, 19 nt, Artificial Sequence
  Description of Artificial Sequence: Synthetic oligonucleotide
  Sense strand starting at position 3531 of SEQ ID NO: 915762
gagaaugaguucugaauau

SEQ ID NO: 1104127 - RNA, 19 nt, Artificial Sequence
  Description of Artificial Sequence: Synthetic oligonucleotide
  Antisense strand to SEQ ID NO: 1104126
auauucagaacucauucuc

SEQ ID NO: 1104128 - RNA, 19 nt, Artificial Sequence
  Description of Artificial Sequence: Synthetic oligonucleotide
  Sense strand starting at position 3538 of SEQ ID NO: 915762
aguucugaauaucugagaa

SEQ ID NO: 1104129 - RNA, 19 nt, Artificial Sequence
  Description of Artificial Sequence: Synthetic oligonucleotide
  Antisense strand to SEQ ID NO: 1104128
uucucagauauucagaacu

SEQ ID NO: 1104130 - RNA, 19 nt, Artificial Sequence
  Description of Artificial Sequence: Synthetic oligonucleotide
  Sense strand starting at position 3540 of SEQ ID NO: 915762
uucugaauaucugagaaua

SEQ ID NO: 1104131 - RNA, 19 nt, Artificial Sequence
  Description of Artificial Sequence: Synthetic oligonucleotide
  Antisense strand to SEQ ID NO: 1104130
uauucucagauauucagaa

SEQ ID NO: 1104132 - RNA, 19 nt, Artificial Sequence
  Description of Artificial Sequence: Synthetic oligonucleotide
  Sense strand starting at position 3542 of SEQ ID NO: 915762
cugaauaucugagaauaau

SEQ ID NO: 1104133 - RNA, 19 nt, Artificial Sequence
  Description of Artificial Sequence: Synthetic oligonucleotide
  Antisense strand to SEQ ID NO: 1104132
auuauucucagauauucag

SEQ ID NO: 1104134 - RNA, 19 nt, Artificial Sequence
  Description of Artificial Sequence: Synthetic oligonucleotide
  Sense strand starting at position 3729 of SEQ ID NO: 915762
guccauauuugagacagaa

SEQ ID NO: 1104135 - RNA, 19 nt, Artificial Sequence
  Description of Artificial Sequence: Synthetic oligonucleotide
  Antisense strand to SEQ ID NO: 1104134
uucugucucaaauauggac

SEQ ID NO: 1104136 - RNA, 19 nt, Artificial Sequence
  Description of Artificial Sequence: Synthetic oligonucleotide
  Sense strand starting at position 44 of SEQ ID NO: 915763
uuacuaagugcggaugaga

SEQ ID NO: 1104137 - RNA, 19 nt, Artificial Sequence
  Description of Artificial Sequence: Synthetic oligonucleotide
  Antisense strand to SEQ ID NO: 1104136
ucucauccgcacuuaguaa

SEQ ID NO: 1104138 - RNA, 19 nt, Artificial Sequence
  Description of Artificial Sequence: Synthetic oligonucleotide
  Sense strand starting at position 91 of SEQ ID NO: 915763
agacaaggauaagauuaua

SEQ ID NO: 1104139 - RNA, 19 nt, Artificial Sequence
  Description of Artificial Sequence: Synthetic oligonucleotide
  Antisense strand to SEQ ID NO: 1104138
uauaaucuuauccuugucu

SEQ ID NO: 1104140 - RNA, 19 nt, Artificial Sequence
  Description of Artificial Sequence: Synthetic oligonucleotide
  Sense strand starting at position 186 of SEQ ID NO: 915763
guaacugcugaguaagaga

SEQ ID NO: 1104141 - RNA, 19 nt, Artificial Sequence
  Description of Artificial Sequence: Synthetic oligonucleotide
  Antisense strand to SEQ ID NO: 1104140
ucucuuacucagcaguuac

SEQ ID NO: 1104142 - RNA, 19 nt, Artificial Sequence
  Description of Artificial Sequence: Synthetic oligonucleotide
  Sense strand starting at position 201 of SEQ ID NO: 915763
gagagagguauggguuuaa

SEQ ID NO: 1104143 - RNA, 19 nt, Artificial Sequence
  Description of Artificial Sequence: Synthetic oligonucleotide
  Antisense strand to SEQ ID NO: 1104142
uuaaacccauaccucucuc

SEQ ID NO: 1104144 - RNA, 19 nt, Artificial Sequence
  Description of Artificial Sequence: Synthetic oligonucleotide
  Sense strand starting at position 234 of SEQ ID NO: 915763
ggugaaauuugauaccuuu

SEQ ID NO: 1104145 - RNA, 19 nt, Artificial Sequence
  Description of Artificial Sequence: Synthetic oligonucleotide
  Antisense strand to SEQ ID NO: 1104144
aaagguaucaaauuucacc

SEQ ID NO: 1104146 - RNA, 19 nt, Artificial Sequence
  Description of Artificial Sequence: Synthetic oligonucleotide
  Sense strand starting at position 243 of SEQ ID NO: 915763
ugauaccuuucccaagagu

SEQ ID NO: 1104147 - RNA, 19 nt, Artificial Sequence
  Description of Artificial Sequence: Synthetic oligonucleotide
  Antisense strand to SEQ ID NO: 1104146
acucuugggaaagguauca

SEQ ID NO: 1104148 - RNA, 19 nt, Artificial Sequence
  Description of Artificial Sequence: Synthetic oligonucleotide
  Sense strand starting at position 403 of SEQ ID NO: 915763
guaugcgacacuggucaua

SEQ ID NO: 1104149 - RNA, 19 nt, Artificial Sequence
  Description of Artificial Sequence: Synthetic oligonucleotide
  Antisense strand to SEQ ID NO: 1104148
uaugaccagugucgcauac

SEQ ID NO: 1104150 - RNA, 19 nt, Artificial Sequence
  Description of Artificial Sequence: Synthetic oligonucleotide
  Sense strand starting at position 405 of SEQ ID NO: 915763
augcgacacuggucauacu

SEQ ID NO: 1104151 - RNA, 19 nt, Artificial Sequence
  Description of Artificial Sequence: Synthetic oligonucleotide
  Antisense strand to SEQ ID NO: 1104150
aguaugaccagugucgcau

SEQ ID NO: 1104152 - RNA, 19 nt, Artificial Sequence
  Description of Artificial Sequence: Synthetic oligonucleotide
  Sense strand starting at position 678 of SEQ ID NO: 915763
cugcuuugucccucucgau

SEQ ID NO: 1104153 - RNA, 19 nt, Artificial Sequence
  Description of Artificial Sequence: Synthetic oligonucleotide
  Antisense strand to SEQ ID NO: 1104152
aucgagagggacaaagcag

SEQ ID NO: 1104154 - RNA, 19 nt, Artificial Sequence
  Description of Artificial Sequence: Synthetic oligonucleotide
  Sense strand starting at position 734 of SEQ ID NO: 915763
gaaauuaggucagacauca

SEQ ID NO: 1104155 - RNA, 19 nt, Artificial Sequence
  Description of Artificial Sequence: Synthetic oligonucleotide
  Antisense strand to SEQ ID NO: 1104154
ugaugucugaccuaauuuc

SEQ ID NO: 1104156 - RNA, 19 nt, Artificial Sequence
  Description of Artificial Sequence: Synthetic oligonucleotide
  Sense strand starting at position 1000 of SEQ ID NO: 915763
uccuguguugccgagggaa

SEQ ID NO: 1104157 - RNA, 19 nt, Artificial Sequence
  Description of Artificial Sequence: Synthetic oligonucleotide
  Antisense strand to SEQ ID NO: 1104156
uucccucggcaacacagga

SEQ ID NO: 1104158 - RNA, 19 nt, Artificial Sequence
  Description of Artificial Sequence: Synthetic oligonucleotide
  Sense strand starting at position 1043 of SEQ ID NO: 915763
gugggaagguguaaaguuu

SEQ ID NO: 1104159 - RNA, 19 nt, Artificial Sequence
  Description of Artificial Sequence: Synthetic oligonucleotide
  Antisense strand to SEQ ID NO: 1104158
aaacuuuacaccuucccac

SEQ ID NO: 1104160 - RNA, 19 nt, Artificial Sequence
  Description of Artificial Sequence: Synthetic oligonucleotide
  Sense strand starting at position 1080 of SEQ ID NO: 915763
cgacauauaucccaaagua

SEQ ID NO: 1104161 - RNA, 19 nt, Artificial Sequence
  Description of Artificial Sequence: Synthetic oligonucleotide
  Antisense strand to SEQ ID NO: 1104160
uacuuugggauauaugucg

SEQ ID NO: 1104162 - RNA, 19 nt, Artificial Sequence
  Description of Artificial Sequence: Synthetic oligonucleotide
  Sense strand starting at position 1136 of SEQ ID NO: 915763
uggaaaggucaagguucuu

SEQ ID NO: 1104163 - RNA, 19 nt, Artificial Sequence
  Description of Artificial Sequence: Synthetic oligonucleotide
  Antisense strand to SEQ ID NO: 1104162
aagaaccuugaccuuucca

SEQ ID NO: 1104164 - RNA, 19 nt, Artificial Sequence
  Description of Artificial Sequence: Synthetic oligonucleotide
  Sense strand starting at position 1142 of SEQ ID NO: 915763
ggucaagguucuuugacca

SEQ ID NO: 1104165 - RNA, 19 nt, Artificial Sequence
  Description of Artificial Sequence: Synthetic oligonucleotide
  Antisense strand to SEQ ID NO: 1104164
uggucaaagaaccuugacc

SEQ ID NO: 1104166 - RNA, 19 nt, Artificial Sequence
  Description of Artificial Sequence: Synthetic oligonucleotide
  Sense strand starting at position 1149 of SEQ ID NO: 915763
guucuuugaccagacgugu

SEQ ID NO: 1104167 - RNA, 19 nt, Artificial Sequence
  Description of Artificial Sequence: Synthetic oligonucleotide
  Antisense strand to SEQ ID NO: 1104166
acacgucuggucaaagaac

SEQ ID NO: 1104168 - RNA, 19 nt, Artificial Sequence
  Description of Artificial Sequence: Synthetic oligonucleotide
  Sense strand starting at position 1190 of SEQ ID NO: 915763
cccucagacacgugagauu

SEQ ID NO: 1104169 - RNA, 19 nt, Artificial Sequence
  Description of Artificial Sequence: Synthetic oligonucleotide
  Antisense strand to SEQ ID NO: 1104168
aaucucacgugucugaggg

SEQ ID NO: 1104170 - RNA, 19 nt, Artificial Sequence
  Description of Artificial Sequence: Synthetic oligonucleotide
  Sense strand starting at position 1201 of SEQ ID NO: 915763
gugagauuguuguuacugu

SEQ ID NO: 1104171 - RNA, 19 nt, Artificial Sequence
  Description of Artificial Sequence: Synthetic oligonucleotide
  Antisense strand to SEQ ID NO: 1104170
acaguaacaacaaucucac

SEQ ID NO: 1104172 - RNA, 19 nt, Artificial Sequence
  Description of Artificial Sequence: Synthetic oligonucleotide
  Sense strand starting at position 1334 of SEQ ID NO: 915763
ucggacccuccugaauaau

SEQ ID NO: 1104173 - RNA, 19 nt, Artificial Sequence
  Description of Artificial Sequence: Synthetic oligonucleotide
  Antisense strand to SEQ ID NO: 1104172
auuauucaggaggguccga

SEQ ID NO: 1104174 - RNA, 19 nt, Artificial Sequence
  Description of Artificial Sequence: Synthetic oligonucleotide
  Sense strand starting at position 1385 of SEQ ID NO: 915763
gccgccuugcucugaggaa

SEQ ID NO: 1104175 - RNA, 19 nt, Artificial Sequence
  Description of Artificial Sequence: Synthetic oligonucleotide
  Antisense strand to SEQ ID NO: 1104174
uuccucagagcaaggcggc

SEQ ID NO: 1104176 - RNA, 19 nt, Artificial Sequence
  Description of Artificial Sequence: Synthetic oligonucleotide
  Sense strand starting at position 1440 of SEQ ID NO: 915763
ucuaaaggcucguccacau

SEQ ID NO: 1104177 - RNA, 19 nt, Artificial Sequence
  Description of Artificial Sequence: Synthetic oligonucleotide
  Antisense strand to SEQ ID NO: 1104176
auguggacgagccuuuaga

SEQ ID NO: 1104178 - RNA, 19 nt, Artificial Sequence
  Description of Artificial Sequence: Synthetic oligonucleotide
  Sense strand starting at position 1505 of SEQ ID NO: 915763
ggagguuagcuuugaggcu

SEQ ID NO: 1104179 - RNA, 19 nt, Artificial Sequence
  Description of Artificial Sequence: Synthetic oligonucleotide
  Antisense strand to SEQ ID NO: 1104178
agccucaaagcuaaccucc

SEQ ID NO: 1104180 - RNA, 19 nt, Artificial Sequence
  Description of Artificial Sequence: Synthetic oligonucleotide
  Sense strand starting at position 1764 of SEQ ID NO: 915763
agcccaucucgaugagacu

SEQ ID NO: 1104181 - RNA, 19 nt, Artificial Sequence
  Description of Artificial Sequence: Synthetic oligonucleotide
  Antisense strand to SEQ ID NO: 1104180
agucucaucgagaugggcu

SEQ ID NO: 1104182 - RNA, 19 nt, Artificial Sequence
  Description of Artificial Sequence: Synthetic oligonucleotide
  Sense strand starting at position 1979 of SEQ ID NO: 915763
gccggaucuguuuggguca

SEQ ID NO: 1104183 - RNA, 19 nt, Artificial Sequence
  Description of Artificial Sequence: Synthetic oligonucleotide
  Antisense strand to SEQ ID NO: 1104182
ugacccaaacagauccggc

SEQ ID NO: 1104184 - RNA, 19 nt, Artificial Sequence
  Description of Artificial Sequence: Synthetic oligonucleotide
  Sense strand starting at position 2208 of SEQ ID NO: 915763
gaaggaauauggucccuua

SEQ ID NO: 1104185 - RNA, 19 nt, Artificial Sequence
  Description of Artificial Sequence: Synthetic oligonucleotide
  Antisense strand to SEQ ID NO: 1104184
uaagggaccauauuccuuc

SEQ ID NO: 1104186 - RNA, 19 nt, Artificial Sequence
  Description of Artificial Sequence: Synthetic oligonucleotide
  Sense strand starting at position 2226 of SEQ ID NO: 915763
agcgcaaugcuuugggaag

SEQ ID NO: 1104187 - RNA, 19 nt, Artificial Sequence
  Description of Artificial Sequence: Synthetic oligonucleotide
  Antisense strand to SEQ ID NO: 1104186
cuucccaaagcauugcgcu

SEQ ID NO: 1104188 - RNA, 19 nt, Artificial Sequence
  Description of Artificial Sequence: Synthetic oligonucleotide
  Sense strand starting at position 2237 of SEQ ID NO: 915763
uugggaaguucuuuggcaa

SEQ ID NO: 1104189 - RNA, 19 nt, Artificial Sequence
  Description of Artificial Sequence: Synthetic oligonucleotide
  Antisense strand to SEQ ID NO: 1104188
uugccaaagaacuucccaa

SEQ ID NO: 1104190 - RNA, 19 nt, Artificial Sequence
  Description of Artificial Sequence: Synthetic oligonucleotide
  Sense strand starting at position 2238 of SEQ ID NO: 915763
ugggaaguucuuuggcaau

SEQ ID NO: 1104191 - RNA, 19 nt, Artificial Sequence
  Description of Artificial Sequence: Synthetic oligonucleotide
  Antisense strand to SEQ ID NO: 1104190
auugccaaagaacuuccca

SEQ ID NO: 1104192 - RNA, 19 nt, Artificial Sequence
  Description of Artificial Sequence: Synthetic oligonucleotide
  Sense strand starting at position 2240 of SEQ ID NO: 915763
ggaaguucuuuggcaaugu

SEQ ID NO: 1104193 - RNA, 19 nt, Artificial Sequence
  Description of Artificial Sequence: Synthetic oligonucleotide
  Antisense strand to SEQ ID NO: 1104192
acauugccaaagaacuucc

SEQ ID NO: 1104194 - RNA, 19 nt, Artificial Sequence
  Description of Artificial Sequence: Synthetic oligonucleotide
  Sense strand starting at position 2254 of SEQ ID NO: 915763
aauguuugccaggagcaga

SEQ ID NO: 1104195 - RNA, 19 nt, Artificial Sequence
  Description of Artificial Sequence: Synthetic oligonucleotide
  Antisense strand to SEQ ID NO: 1104194
ucugcuccuggcaaacauu

SEQ ID NO: 1104196 - RNA, 19 nt, Artificial Sequence
  Description of Artificial Sequence: Synthetic oligonucleotide
  Sense strand starting at position 2298 of SEQ ID NO: 915763
ucauucuccuuagggaauu

SEQ ID NO: 1104197 - RNA, 19 nt, Artificial Sequence
  Description of Artificial Sequence: Synthetic oligonucleotide
  Antisense strand to SEQ ID NO: 1104196
aauucccuaaggagaauga

SEQ ID NO: 1104198 - RNA, 19 nt, Artificial Sequence
  Description of Artificial Sequence: Synthetic oligonucleotide
  Sense strand starting at position 2567 of SEQ ID NO: 915763
ccggauagcugagauaaca

SEQ ID NO: 1104199 - RNA, 19 nt, Artificial Sequence
  Description of Artificial Sequence: Synthetic oligonucleotide
  Antisense strand to SEQ ID NO: 1104198
uguuaucucagcuauccgg

SEQ ID NO: 1104200 - RNA, 19 nt, Artificial Sequence
  Description of Artificial Sequence: Synthetic oligonucleotide
  Sense strand starting at position 3102 of SEQ ID NO: 915763
gugcaaucuugacauacug

SEQ ID NO: 1104201 - RNA, 19 nt, Artificial Sequence
  Description of Artificial Sequence: Synthetic oligonucleotide
  Antisense strand to SEQ ID NO: 1104200
caguaugucaagauugcac

SEQ ID NO: 1104202 - RNA, 19 nt, Artificial Sequence
  Description of Artificial Sequence: Synthetic oligonucleotide
  Sense strand starting at position 3689 of SEQ ID NO: 915763
aaaugcuaguggucugacu

SEQ ID NO: 1104203 - RNA, 19 nt, Artificial Sequence
  Description of Artificial Sequence: Synthetic oligonucleotide
  Antisense strand to SEQ ID NO: 1104202
agucagaccacuagcauuu

SEQ ID NO: 1104204 - RNA, 19 nt, Artificial Sequence
  Description of Artificial Sequence: Synthetic oligonucleotide
  Sense strand starting at position 3801 of SEQ ID NO: 915763
caaggcagaguauguaaau

SEQ ID NO: 1104205 - RNA, 19 nt, Artificial Sequence
  Description of Artificial Sequence: Synthetic oligonucleotide
  Antisense strand to SEQ ID NO: 1104204
auuuacauacucugccuug

SEQ ID NO: 1104206 - RNA, 19 nt, Artificial Sequence
  Description of Artificial Sequence: Synthetic oligonucleotide
  Sense strand starting at position 3811 of SEQ ID NO: 915763
uauguaaaugcugguaguu

SEQ ID NO: 1104207 - RNA, 19 nt, Artificial Sequence
  Description of Artificial Sequence: Synthetic oligonucleotide
  Antisense strand to SEQ ID NO: 1104206
aacuaccagcauuuacaua

SEQ ID NO: 1104208 - RNA, 19 nt, Artificial Sequence
  Description of Artificial Sequence: Synthetic oligonucleotide
  Sense strand starting at position 3823 of SEQ ID NO: 915763
gguaguuauugugcaguuu

SEQ ID NO: 1104209 - RNA, 19 nt, Artificial Sequence
  Description of Artificial Sequence: Synthetic oligonucleotide
  Antisense strand to SEQ ID NO: 1104208
aaacugcacaauaacuacc

SEQ ID NO: 1104210 - RNA, 19 nt, Artificial Sequence
  Description of Artificial Sequence: Synthetic oligonucleotide
  Sense strand starting at position 3857 of SEQ ID NO: 915763
gaggguaagcugugcauau

SEQ ID NO: 1104211 - RNA, 19 nt, Artificial Sequence
  Description of Artificial Sequence: Synthetic oligonucleotide
  Antisense strand to SEQ ID NO: 1104210
auaugcacagcuuacccuc

SEQ ID NO: 1104212 - RNA, 19 nt, Artificial Sequence
  Description of Artificial Sequence: Synthetic oligonucleotide
  Sense strand starting at position 3858 of SEQ ID NO: 915763
aggguaagcugugcauauu

SEQ ID NO: 1104213 - RNA, 19 nt, Artificial Sequence
  Description of Artificial Sequence: Synthetic oligonucleotide
  Antisense strand to SEQ ID NO: 1104212
aauaugcacagcuuacccu

SEQ ID NO: 1104214 - RNA, 19 nt, Artificial Sequence
  Description of Artificial Sequence: Synthetic oligonucleotide
  Sense strand starting at position 3861 of SEQ ID NO: 915763
guaagcugugcauauugca

SEQ ID NO: 1104215 - RNA, 19 nt, Artificial Sequence
  Description of Artificial Sequence: Synthetic oligonucleotide
  Antisense strand to SEQ ID NO: 1104214
ugcaauaugcacagcuuac

SEQ ID NO: 1104216 - RNA, 19 nt, Artificial Sequence
  Description of Artificial Sequence: Synthetic oligonucleotide
  Sense strand starting at position 8 of SEQ ID NO: 915764
augacaugagucugucaca

SEQ ID NO: 1104217 - RNA, 19 nt, Artificial Sequence
  Description of Artificial Sequence: Synthetic oligonucleotide
  Antisense strand to SEQ ID NO: 1104216
ugugacagacucaugucau

SEQ ID NO: 1104218 - RNA, 19 nt, Artificial Sequence
  Description of Artificial Sequence: Synthetic oligonucleotide
  Sense strand starting at position 9 of SEQ ID NO: 915764
ugacaugagucugucacau

SEQ ID NO: 1104219 - RNA, 19 nt, Artificial Sequence
  Description of Artificial Sequence: Synthetic oligonucleotide
  Antisense strand to SEQ ID NO: 1104218
augugacagacucauguca

SEQ ID NO: 1104220 - RNA, 19 nt, Artificial Sequence
  Description of Artificial Sequence: Synthetic oligonucleotide
  Sense strand starting at position 51 of SEQ ID NO: 915764
ggauguugugaaggccaga

SEQ ID NO: 1104221 - RNA, 19 nt, Artificial Sequence
  Description of Artificial Sequence: Synthetic oligonucleotide
  Antisense strand to SEQ ID NO: 1104220
ucuggccuucacaacaucc

SEQ ID NO: 1104222 - RNA, 19 nt, Artificial Sequence
  Description of Artificial Sequence: Synthetic oligonucleotide
  Sense strand starting at position 175 of SEQ ID NO: 915764
guaagauggcccuacuaac

SEQ ID NO: 1104223 - RNA, 19 nt, Artificial Sequence
  Description of Artificial Sequence: Synthetic oligonucleotide
  Antisense strand to SEQ ID NO: 1104222
guuaguagggccaucuuac

SEQ ID NO: 1104224 - RNA, 19 nt, Artificial Sequence
  Description of Artificial Sequence: Synthetic oligonucleotide
  Sense strand starting at position 284 of SEQ ID NO: 915764
cgguuucagggauagucaa

SEQ ID NO: 1104225 - RNA, 19 nt, Artificial Sequence
  Description of Artificial Sequence: Synthetic oligonucleotide
  Antisense strand to SEQ ID NO: 1104224
uugacuaucccugaaaccg

SEQ ID NO: 1104226 - RNA, 19 nt, Artificial Sequence
  Description of Artificial Sequence: Synthetic oligonucleotide
  Sense strand starting at position 426 of SEQ ID NO: 915764
ggaccaagauccuuggcuu

SEQ ID NO: 1104227 - RNA, 19 nt, Artificial Sequence
  Description of Artificial Sequence: Synthetic oligonucleotide
  Antisense strand to SEQ ID NO: 1104226
aagccaaggaucuuggucc

SEQ ID NO: 1104228 - RNA, 19 nt, Artificial Sequence
  Description of Artificial Sequence: Synthetic oligonucleotide
  Sense strand starting at position 487 of SEQ ID NO: 915764
gagagugcucugugaacug

SEQ ID NO: 1104229 - RNA, 19 nt, Artificial Sequence
  Description of Artificial Sequence: Synthetic oligonucleotide
  Antisense strand to SEQ ID NO: 1104228
caguucacagagcacucuc

SEQ ID NO: 1104230 - RNA, 19 nt, Artificial Sequence
  Description of Artificial Sequence: Synthetic oligonucleotide
  Sense strand starting at position 603 of SEQ ID NO: 915764
gagaccucuuccuuggacu

SEQ ID NO: 1104231 - RNA, 19 nt, Artificial Sequence
  Description of Artificial Sequence: Synthetic oligonucleotide
  Antisense strand to SEQ ID NO: 1104230
aguccaaggaagaggucuc

SEQ ID NO: 1104232 - RNA, 19 nt, Artificial Sequence
  Description of Artificial Sequence: Synthetic oligonucleotide
  Sense strand starting at position 651 of SEQ ID NO: 915764
cggugaggccuccaagauc

SEQ ID NO: 1104233 - RNA, 19 nt, Artificial Sequence
  Description of Artificial Sequence: Synthetic oligonucleotide
  Antisense strand to SEQ ID NO: 1104232
gaucuuggaggccucaccg

SEQ ID NO: 1104234 - RNA, 19 nt, Artificial Sequence
  Description of Artificial Sequence: Synthetic oligonucleotide
  Sense strand starting at position 665 of SEQ ID NO: 915764
agaucaagcuucucuaaag

SEQ ID NO: 1104235 - RNA, 19 nt, Artificial Sequence
  Description of Artificial Sequence: Synthetic oligonucleotide
  Antisense strand to SEQ ID NO: 1104234
cuuuagagaagcuugaucu

SEQ ID NO: 1104236 - RNA, 19 nt, Artificial Sequence
  Description of Artificial Sequence: Synthetic oligonucleotide
  Sense strand starting at position 780 of SEQ ID NO: 915764
cuauguguccuguggguga

SEQ ID NO: 1104237 - RNA, 19 nt, Artificial Sequence
  Description of Artificial Sequence: Synthetic oligonucleotide
  Antisense strand to SEQ ID NO: 1104236
ucacccacaggacacauag

SEQ ID NO: 1104238 - RNA, 19 nt, Artificial Sequence
  Description of Artificial Sequence: Synthetic oligonucleotide
  Sense strand starting at position 784 of SEQ ID NO: 915764
guguccugugggugagcaa

SEQ ID NO: 1104239 - RNA, 19 nt, Artificial Sequence
  Description of Artificial Sequence: Synthetic oligonucleotide
  Antisense strand to SEQ ID NO: 1104238
uugcucacccacaggacac

SEQ ID NO: 1104240 - RNA, 19 nt, Artificial Sequence
  Description of Artificial Sequence: Synthetic oligonucleotide
  Sense strand starting at position 785 of SEQ ID NO: 915764
uguccugugggugagcaaa

SEQ ID NO: 1104241 - RNA, 19 nt, Artificial Sequence
  Description of Artificial Sequence: Synthetic oligonucleotide
  Antisense strand to SEQ ID NO: 1104240
uuugcucacccacaggaca

SEQ ID NO: 1104242 - RNA, 19 nt, Artificial Sequence
  Description of Artificial Sequence: Synthetic oligonucleotide
  Sense strand starting at position 1016 of SEQ ID NO: 915764
uguaacacucaguacucua

SEQ ID NO: 1104243 - RNA, 19 nt, Artificial Sequence
  Description of Artificial Sequence: Synthetic oligonucleotide
  Antisense strand to SEQ ID NO: 1104242
uagaguacugaguguuaca

SEQ ID NO: 1104244 - RNA, 19 nt, Artificial Sequence
  Description of Artificial Sequence: Synthetic oligonucleotide
  Sense strand starting at position 1047 of SEQ ID NO: 915764
cuagcacagucaucagacu

SEQ ID NO: 1104245 - RNA, 19 nt, Artificial Sequence
  Description of Artificial Sequence: Synthetic oligonucleotide
  Antisense strand to SEQ ID NO: 1104244
agucugaugacugugcuag

SEQ ID NO: 1104246 - RNA, 19 nt, Artificial Sequence
  Description of Artificial Sequence: Synthetic oligonucleotide
  Sense strand starting at position 1062 of SEQ ID NO: 915764
gacuuuggugagugggaga

SEQ ID NO: 1104247 - RNA, 19 nt, Artificial Sequence
  Description of Artificial Sequence: Synthetic oligonucleotide
  Antisense strand to SEQ ID NO: 1104246
ucucccacucaccaaaguc

SEQ ID NO: 1104248 - RNA, 19 nt, Artificial Sequence
  Description of Artificial Sequence: Synthetic oligonucleotide
  Sense strand starting at position 1266 of SEQ ID NO: 915764
ugguaagggagaggucauu

SEQ ID NO: 1104249 - RNA, 19 nt, Artificial Sequence
  Description of Artificial Sequence: Synthetic oligonucleotide
  Antisense strand to SEQ ID NO: 1104248
aaugaccucucccuuacca

SEQ ID NO: 1104250 - RNA, 19 nt, Artificial Sequence
  Description of Artificial Sequence: Synthetic oligonucleotide
  Sense strand starting at position 1272 of SEQ ID NO: 915764
gggagaggucauugugguc

SEQ ID NO: 1104251 - RNA, 19 nt, Artificial Sequence
  Description of Artificial Sequence: Synthetic oligonucleotide
  Antisense strand to SEQ ID NO: 1104250
gaccacaaugaccucuccc

SEQ ID NO: 1104252 - RNA, 19 nt, Artificial Sequence
  Description of Artificial Sequence: Synthetic oligonucleotide
  Sense strand starting at position 1716 of SEQ ID NO: 915764
gcgaaagccugucucaaac

SEQ ID NO: 1104253 - RNA, 19 nt, Artificial Sequence
  Description of Artificial Sequence: Synthetic oligonucleotide
  Antisense strand to SEQ ID NO: 1104252
guuugagacaggcuuucgc

SEQ ID NO: 1104254 - RNA, 19 nt, Artificial Sequence
  Description of Artificial Sequence: Synthetic oligonucleotide
  Sense strand starting at position 2143 of SEQ ID NO: 915764
uaggguucucuccaugacu

SEQ ID NO: 1104255 - RNA, 19 nt, Artificial Sequence
  Description of Artificial Sequence: Synthetic oligonucleotide
  Antisense strand to SEQ ID NO: 1104254
agucauggagagaacccua

SEQ ID NO: 1104256 - RNA, 19 nt, Artificial Sequence
  Description of Artificial Sequence: Synthetic oligonucleotide
  Sense strand starting at position 2145 of SEQ ID NO: 915764
ggguucucuccaugacuuu

SEQ ID NO: 1104257 - RNA, 19 nt, Artificial Sequence
  Description of Artificial Sequence: Synthetic oligonucleotide
  Antisense strand to SEQ ID NO: 1104256
aaagucauggagagaaccc

SEQ ID NO: 1104258 - RNA, 19 nt, Artificial Sequence
  Description of Artificial Sequence: Synthetic oligonucleotide
  Sense strand starting at position 2268 of SEQ ID NO: 915764
cgccaaccucugugaggau

SEQ ID NO: 1104259 - RNA, 19 nt, Artificial Sequence
  Description of Artificial Sequence: Synthetic oligonucleotide
  Antisense strand to SEQ ID NO: 1104258
auccucacagagguuggcg

SEQ ID NO: 1104260 - RNA, 19 nt, Artificial Sequence
  Description of Artificial Sequence: Synthetic oligonucleotide
  Sense strand starting at position 2500 of SEQ ID NO: 915764
ccucgcugucgauugguua

SEQ ID NO: 1104261 - RNA, 19 nt, Artificial Sequence
  Description of Artificial Sequence: Synthetic oligonucleotide
  Antisense strand to SEQ ID NO: 1104260
uaaccaaucgacagcgagg

SEQ ID NO: 1104262 - RNA, 19 nt, Artificial Sequence
  Description of Artificial Sequence: Synthetic oligonucleotide
  Sense strand starting at position 2922 of SEQ ID NO: 915764
guagaagaaggcugguauu

SEQ ID NO: 1104263 - RNA, 19 nt, Artificial Sequence
  Description of Artificial Sequence: Synthetic oligonucleotide
  Antisense strand to SEQ ID NO: 1104262
aauaccagccuucuucuac

SEQ ID NO: 1104264 - RNA, 19 nt, Artificial Sequence
  Description of Artificial Sequence: Synthetic oligonucleotide
  Sense strand starting at position 2982 of SEQ ID NO: 915764
ucagucaucuuccugauau

SEQ ID NO: 1104265 - RNA, 19 nt, Artificial Sequence
  Description of Artificial Sequence: Synthetic oligonucleotide
  Antisense strand to SEQ ID NO: 1104264
auaucaggaagaugacuga

SEQ ID NO: 1104266 - RNA, 19 nt, Artificial Sequence
  Description of Artificial Sequence: Synthetic oligonucleotide
  Sense strand starting at position 2984 of SEQ ID NO: 915764
agucaucuuccugauauuc

SEQ ID NO: 1104267 - RNA, 19 nt, Artificial Sequence
  Description of Artificial Sequence: Synthetic oligonucleotide
  Antisense strand to SEQ ID NO: 1104266
gaauaucaggaagaugacu

SEQ ID NO: 1104268 - RNA, 19 nt, Artificial Sequence
  Description of Artificial Sequence: Synthetic oligonucleotide
  Sense strand starting at position 3088 of SEQ ID NO: 915764
cugggaugggccuggauaa

SEQ ID NO: 1104269 - RNA, 19 nt, Artificial Sequence
  Description of Artificial Sequence: Synthetic oligonucleotide
  Antisense strand to SEQ ID NO: 1104268
uuauccaggcccaucccag

SEQ ID NO: 1104270 - RNA, 19 nt, Artificial Sequence
  Description of Artificial Sequence: Synthetic oligonucleotide
  Sense strand starting at position 3089 of SEQ ID NO: 915764
ugggaugggccuggauaau

SEQ ID NO: 1104271 - RNA, 19 nt, Artificial Sequence
  Description of Artificial Sequence: Synthetic oligonucleotide
  Antisense strand to SEQ ID NO: 1104270
auuauccaggcccauccca

SEQ ID NO: 1104272 - RNA, 19 nt, Artificial Sequence
  Description of Artificial Sequence: Synthetic oligonucleotide
  Sense strand starting at position 3162 of SEQ ID NO: 915764
aacagaagucaaggcagau

SEQ ID NO: 1104273 - RNA, 19 nt, Artificial Sequence
  Description of Artificial Sequence: Synthetic oligonucleotide
  Antisense strand to SEQ ID NO: 1104272
aucugccuugacuucuguu

SEQ ID NO: 1104274 - RNA, 19 nt, Artificial Sequence
  Description of Artificial Sequence: Synthetic oligonucleotide
  Sense strand starting at position 3174 of SEQ ID NO: 915764
ggcagauuauuucugccau

SEQ ID NO: 1104275 - RNA, 19 nt, Artificial Sequence
  Description of Artificial Sequence: Synthetic oligonucleotide
  Antisense strand to SEQ ID NO: 1104274
auggcagaaauaaucugcc

SEQ ID NO: 1104276 - RNA, 19 nt, Artificial Sequence
  Description of Artificial Sequence: Synthetic oligonucleotide
  Sense strand starting at position 3178 of SEQ ID NO: 915764
gauuauuucugccaugagg

SEQ ID NO: 1104277 - RNA, 19 nt, Artificial Sequence
  Description of Artificial Sequence: Synthetic oligonucleotide
  Antisense strand to SEQ ID NO: 1104276
ccucauggcagaaauaauc

SEQ ID NO: 1104278 - RNA, 19 nt, Artificial Sequence
  Description of Artificial Sequence: Synthetic oligonucleotide
  Sense strand starting at position 3196 of SEQ ID NO: 915764
gagaucuugccauguagga

SEQ ID NO: 1104279 - RNA, 19 nt, Artificial Sequence
  Description of Artificial Sequence: Synthetic oligonucleotide
  Antisense strand to SEQ ID NO: 1104278
uccuacauggcaagaucuc

SEQ ID NO: 1104280 - RNA, 19 nt, Artificial Sequence
  Description of Artificial Sequence: Synthetic oligonucleotide
  Sense strand starting at position 3389 of SEQ ID NO: 915764
ugugcauuccggagaggcu

SEQ ID NO: 1104281 - RNA, 19 nt, Artificial Sequence
  Description of Artificial Sequence: Synthetic oligonucleotide
  Antisense strand to SEQ ID NO: 1104280
agccucuccggaaugcaca

SEQ ID NO: 1104282 - RNA, 19 nt, Artificial Sequence
  Description of Artificial Sequence: Synthetic oligonucleotide
  Sense strand starting at position 3398 of SEQ ID NO: 915764
cggagaggcucggcaaauu

SEQ ID NO: 1104283 - RNA, 19 nt, Artificial Sequence
  Description of Artificial Sequence: Synthetic oligonucleotide
  Antisense strand to SEQ ID NO: 1104282
aauuugccgagccucuccg

SEQ ID NO: 1104284 - RNA, 19 nt, Artificial Sequence
  Description of Artificial Sequence: Synthetic oligonucleotide
  Sense strand starting at position 3410 of SEQ ID NO: 915764
gcaaauuugcugugagauu

SEQ ID NO: 1104285 - RNA, 19 nt, Artificial Sequence
  Description of Artificial Sequence: Synthetic oligonucleotide
  Antisense strand to SEQ ID NO: 1104284
aaucucacagcaaauuugc

SEQ ID NO: 1104286 - RNA, 19 nt, Artificial Sequence
  Description of Artificial Sequence: Synthetic oligonucleotide
  Sense strand starting at position 3411 of SEQ ID NO: 915764
caaauuugcugugagauug

SEQ ID NO: 1104287 - RNA, 19 nt, Artificial Sequence
  Description of Artificial Sequence: Synthetic oligonucleotide
  Antisense strand to SEQ ID NO: 1104286
caaucucacagcaaauuug

SEQ ID NO: 1104288 - RNA, 19 nt, Artificial Sequence
  Description of Artificial Sequence: Synthetic oligonucleotide
  Sense strand starting at position 3632 of SEQ ID NO: 915764
agaagauguguuuaggguu

SEQ ID NO: 1104289 - RNA, 19 nt, Artificial Sequence
  Description of Artificial Sequence: Synthetic oligonucleotide
  Antisense strand to SEQ ID NO: 1104288
aacccuaaacacaucuucu

SEQ ID NO: 1104290 - RNA, 19 nt, Artificial Sequence
  Description of Artificial Sequence: Synthetic oligonucleotide
  Sense strand starting at position 3639 of SEQ ID NO: 915764
guguuuaggguuuaaacua

SEQ ID NO: 1104291 - RNA, 19 nt, Artificial Sequence
  Description of Artificial Sequence: Synthetic oligonucleotide
  Antisense strand to SEQ ID NO: 1104290
uaguuuaaacccuaaacac

SEQ ID NO: 1104292 - RNA, 19 nt, Artificial Sequence
  Description of Artificial Sequence: Synthetic oligonucleotide
  Sense strand starting at position 3754 of SEQ ID NO: 915764
ucuugaccuccugggacaa

SEQ ID NO: 1104293 - RNA, 19 nt, Artificial Sequence
  Description of Artificial Sequence: Synthetic oligonucleotide
  Antisense strand to SEQ ID NO: 1104292
uugucccaggaggucaaga

SEQ ID NO: 1104294 - RNA, 19 nt, Artificial Sequence
  Description of Artificial Sequence: Synthetic oligonucleotide
  Sense strand starting at position 3957 of SEQ ID NO: 915764
ugugccuggccucaagaaa

SEQ ID NO: 1104295 - RNA, 19 nt, Artificial Sequence
  Description of Artificial Sequence: Synthetic oligonucleotide
  Antisense strand to SEQ ID NO: 1104294
uuucuugaggccaggcaca

SEQ ID NO: 1104296 - RNA, 19 nt, Artificial Sequence
  Description of Artificial Sequence: Synthetic oligonucleotide
  Sense strand starting at position 10 of SEQ ID NO: 915765
auacuuaagcugcaugaau

SEQ ID NO: 1104297 - RNA, 19 nt, Artificial Sequence
  Description of Artificial Sequence: Synthetic oligonucleotide
  Antisense strand to SEQ ID NO: 1104296
auucaugcagcuuaaguau

SEQ ID NO: 1104298 - RNA, 19 nt, Artificial Sequence
  Description of Artificial Sequence: Synthetic oligonucleotide
  Sense strand starting at position 49 of SEQ ID NO: 915765
acguuccuaucccuugaau

SEQ ID NO: 1104299 - RNA, 19 nt, Artificial Sequence
  Description of Artificial Sequence: Synthetic oligonucleotide
  Antisense strand to SEQ ID NO: 1104298
auucaagggauaggaacgu

SEQ ID NO: 1104300 - RNA, 19 nt, Artificial Sequence
  Description of Artificial Sequence: Synthetic oligonucleotide
  Sense strand starting at position 132 of SEQ ID NO: 915765
guaccugcacuguauacau

SEQ ID NO: 1104301 - RNA, 19 nt, Artificial Sequence
  Description of Artificial Sequence: Synthetic oligonucleotide
  Antisense strand to SEQ ID NO: 1104300
auguauacagugcagguac

SEQ ID NO: 1104302 - RNA, 19 nt, Artificial Sequence
  Description of Artificial Sequence: Synthetic oligonucleotide
  Sense strand starting at position 430 of SEQ ID NO: 915765
gcgugaucacuugacaaga

SEQ ID NO: 1104303 - RNA, 19 nt, Artificial Sequence
  Description of Artificial Sequence: Synthetic oligonucleotide
  Antisense strand to SEQ ID NO: 1104302
ucuugucaagugaucacgc

SEQ ID NO: 1104304 - RNA, 19 nt, Artificial Sequence
  Description of Artificial Sequence: Synthetic oligonucleotide
  Sense strand starting at position 451 of SEQ ID NO: 915765
ggcaguucuuagccacuca

SEQ ID NO: 1104305 - RNA, 19 nt, Artificial Sequence
  Description of Artificial Sequence: Synthetic oligonucleotide
  Antisense strand to SEQ ID NO: 1104304
ugaguggcuaagaacugcc

SEQ ID NO: 1104306 - RNA, 19 nt, Artificial Sequence
  Description of Artificial Sequence: Synthetic oligonucleotide
  Sense strand starting at position 488 of SEQ ID NO: 915765
gacacagacucaggucaaa

SEQ ID NO: 1104307 - RNA, 19 nt, Artificial Sequence
  Description of Artificial Sequence: Synthetic oligonucleotide
  Antisense strand to SEQ ID NO: 1104306
uuugaccugagucuguguc

SEQ ID NO: 1104308 - RNA, 19 nt, Artificial Sequence
  Description of Artificial Sequence: Synthetic oligonucleotide
  Sense strand starting at position 698 of SEQ ID NO: 915765
guggaacccucauuacugu

SEQ ID NO: 1104309 - RNA, 19 nt, Artificial Sequence
  Description of Artificial Sequence: Synthetic oligonucleotide
  Antisense strand to SEQ ID NO: 1104308
acaguaaugaggguuccac

SEQ ID NO: 1104310 - RNA, 19 nt, Artificial Sequence
  Description of Artificial Sequence: Synthetic oligonucleotide
  Sense strand starting at position 753 of SEQ ID NO: 915765
gucagcaugguccauuaau

SEQ ID NO: 1104311 - RNA, 19 nt, Artificial Sequence
  Description of Artificial Sequence: Synthetic oligonucleotide
  Antisense strand to SEQ ID NO: 1104310
auuaauggaccaugcugac

SEQ ID NO: 1104312 - RNA, 19 nt, Artificial Sequence
  Description of Artificial Sequence: Synthetic oligonucleotide
  Sense strand starting at position 764 of SEQ ID NO: 915765
ccauuaauguuugcugguu

SEQ ID NO: 1104313 - RNA, 19 nt, Artificial Sequence
  Description of Artificial Sequence: Synthetic oligonucleotide
  Antisense strand to SEQ ID NO: 1104312
aaccagcaaacauuaaugg

SEQ ID NO: 1104314 - RNA, 19 nt, Artificial Sequence
  Description of Artificial Sequence: Synthetic oligonucleotide
  Sense strand starting at position 943 of SEQ ID NO: 915765
gagauuggugcccacguuu

SEQ ID NO: 1104315 - RNA, 19 nt, Artificial Sequence
  Description of Artificial Sequence: Synthetic oligonucleotide
  Antisense strand to SEQ ID NO: 1104314
aaacgugggcaccaaucuc

SEQ ID NO: 1104316 - RNA, 19 nt, Artificial Sequence
  Description of Artificial Sequence: Synthetic oligonucleotide
  Sense strand starting at position 952 of SEQ ID NO: 915765
gcccacguuugucugacau

SEQ ID NO: 1104317 - RNA, 19 nt, Artificial Sequence
  Description of Artificial Sequence: Synthetic oligonucleotide
  Antisense strand to SEQ ID NO: 1104316
augucagacaaacgugggc

SEQ ID NO: 1104318 - RNA, 19 nt, Artificial Sequence
  Description of Artificial Sequence: Synthetic oligonucleotide
  Sense strand starting at position 994 of SEQ ID NO: 915765
cccagagagucucagacuu

SEQ ID NO: 1104319 - RNA, 19 nt, Artificial Sequence
  Description of Artificial Sequence: Synthetic oligonucleotide
  Antisense strand to SEQ ID NO: 1104318
aagucugagacucucuggg

SEQ ID NO: 1104320 - RNA, 19 nt, Artificial Sequence
  Description of Artificial Sequence: Synthetic oligonucleotide
  Sense strand starting at position 1034 of SEQ ID NO: 915765
ugagcugcuuguuuacaga

SEQ ID NO: 1104321 - RNA, 19 nt, Artificial Sequence
  Description of Artificial Sequence: Synthetic oligonucleotide
  Antisense strand to SEQ ID NO: 1104320
ucuguaaacaagcagcuca

SEQ ID NO: 1104322 - RNA, 19 nt, Artificial Sequence
  Description of Artificial Sequence: Synthetic oligonucleotide
  Sense strand starting at position 1052 of SEQ ID NO: 915765
agcagauucucagcucuca

SEQ ID NO: 1104323 - RNA, 19 nt, Artificial Sequence
  Description of Artificial Sequence: Synthetic oligonucleotide
  Antisense strand to SEQ ID NO: 1104322
ugagagcugagaaucugcu

SEQ ID NO: 1104324 - RNA, 19 nt, Artificial Sequence
  Description of Artificial Sequence: Synthetic oligonucleotide
  Sense strand starting at position 1267 of SEQ ID NO: 915765
gaccaugggcucuguaaag

SEQ ID NO: 1104325 - RNA, 19 nt, Artificial Sequence
  Description of Artificial Sequence: Synthetic oligonucleotide
  Antisense strand to SEQ ID NO: 1104324
cuuuacagagcccaugguc

SEQ ID NO: 1104326 - RNA, 19 nt, Artificial Sequence
  Description of Artificial Sequence: Synthetic oligonucleotide
  Sense strand starting at position 1331 of SEQ ID NO: 915765
ugucaucccuacucaggaa

SEQ ID NO: 1104327 - RNA, 19 nt, Artificial Sequence
  Description of Artificial Sequence: Synthetic oligonucleotide
  Antisense strand to SEQ ID NO: 1104326
uuccugaguagggaugaca

SEQ ID NO: 1104328 - RNA, 19 nt, Artificial Sequence
  Description of Artificial Sequence: Synthetic oligonucleotide
  Sense strand starting at position 1381 of SEQ ID NO: 915765
gauuuaugcucuggaggaa

SEQ ID NO: 1104329 - RNA, 19 nt, Artificial Sequence
  Description of Artificial Sequence: Synthetic oligonucleotide
  Antisense strand to SEQ ID NO: 1104328
uuccuccagagcauaaauc

SEQ ID NO: 1104330 - RNA, 19 nt, Artificial Sequence
  Description of Artificial Sequence: Synthetic oligonucleotide
  Sense strand starting at position 1496 of SEQ ID NO: 915765
gugagucuugagugaguga

SEQ ID NO: 1104331 - RNA, 19 nt, Artificial Sequence
  Description of Artificial Sequence: Synthetic oligonucleotide
  Antisense strand to SEQ ID NO: 1104330
ucacucacucaagacucac

SEQ ID NO: 1104332 - RNA, 19 nt, Artificial Sequence
  Description of Artificial Sequence: Synthetic oligonucleotide
  Sense strand starting at position 1915 of SEQ ID NO: 915765
gguugacagccugaucacu

SEQ ID NO: 1104333 - RNA, 19 nt, Artificial Sequence
  Description of Artificial Sequence: Synthetic oligonucleotide
  Antisense strand to SEQ ID NO: 1104332
agugaucaggcugucaacc

SEQ ID NO: 1104334 - RNA, 19 nt, Artificial Sequence
  Description of Artificial Sequence: Synthetic oligonucleotide
  Sense strand starting at position 1920 of SEQ ID NO: 915765
acagccugaucacuugaca

SEQ ID NO: 1104335 - RNA, 19 nt, Artificial Sequence
  Description of Artificial Sequence: Synthetic oligonucleotide
  Antisense strand to SEQ ID NO: 1104334
ugucaagugaucaggcugu

SEQ ID NO: 1104336 - RNA, 19 nt, Artificial Sequence
  Description of Artificial Sequence: Synthetic oligonucleotide
  Sense strand starting at position 2046 of SEQ ID NO: 915765
ggacgcuuccuuggugaca

SEQ ID NO: 1104337 - RNA, 19 nt, Artificial Sequence
  Description of Artificial Sequence: Synthetic oligonucleotide
  Antisense strand to SEQ ID NO: 1104336
ugucaccaaggaagcgucc

SEQ ID NO: 1104338 - RNA, 19 nt, Artificial Sequence
  Description of Artificial Sequence: Synthetic oligonucleotide
  Sense strand starting at position 2047 of SEQ ID NO: 915765
gacgcuuccuuggugacaa

SEQ ID NO: 1104339 - RNA, 19 nt, Artificial Sequence
  Description of Artificial Sequence: Synthetic oligonucleotide
  Antisense strand to SEQ ID NO: 1104338
uugucaccaaggaagcguc

SEQ ID NO: 1104340 - RNA, 19 nt, Artificial Sequence
  Description of Artificial Sequence: Synthetic oligonucleotide
  Sense strand starting at position 2165 of SEQ ID NO: 915765
ugucauuucuuugugccua

SEQ ID NO: 1104341 - RNA, 19 nt, Artificial Sequence
  Description of Artificial Sequence: Synthetic oligonucleotide
  Antisense strand to SEQ ID NO: 1104340
uaggcacaaagaaaugaca

SEQ ID NO: 1104342 - RNA, 19 nt, Artificial Sequence
  Description of Artificial Sequence: Synthetic oligonucleotide
  Sense strand starting at position 2169 of SEQ ID NO: 915765
auuucuuugugccuacuau

SEQ ID NO: 1104343 - RNA, 19 nt, Artificial Sequence
  Description of Artificial Sequence: Synthetic oligonucleotide
  Antisense strand to SEQ ID NO: 1104342
auaguaggcacaaagaaau

SEQ ID NO: 1104344 - RNA, 19 nt, Artificial Sequence
  Description of Artificial Sequence: Synthetic oligonucleotide
  Sense strand starting at position 2239 of SEQ ID NO: 915765
agguacuauuaggauucua

SEQ ID NO: 1104345 - RNA, 19 nt, Artificial Sequence
  Description of Artificial Sequence: Synthetic oligonucleotide
  Antisense strand to SEQ ID NO: 1104344
uagaauccuaauaguaccu

SEQ ID NO: 1104346 - RNA, 19 nt, Artificial Sequence
  Description of Artificial Sequence: Synthetic oligonucleotide
  Sense strand starting at position 2508 of SEQ ID NO: 915765
aguauauucugaguggcac

SEQ ID NO: 1104347 - RNA, 19 nt, Artificial Sequence
  Description of Artificial Sequence: Synthetic oligonucleotide
  Antisense strand to SEQ ID NO: 1104346
gugccacucagaauauacu

SEQ ID NO: 1104348 - RNA, 19 nt, Artificial Sequence
  Description of Artificial Sequence: Synthetic oligonucleotide
  Sense strand starting at position 2509 of SEQ ID NO: 915765
guauauucugaguggcaca

SEQ ID NO: 1104349 - RNA, 19 nt, Artificial Sequence
  Description of Artificial Sequence: Synthetic oligonucleotide
  Antisense strand to SEQ ID NO: 1104348
ugugccacucagaauauac

SEQ ID NO: 1104350 - RNA, 19 nt, Artificial Sequence
  Description of Artificial Sequence: Synthetic oligonucleotide
  Sense strand starting at position 2705 of SEQ ID NO: 915765
ccaauaugugcuuguuugu

SEQ ID NO: 1104351 - RNA, 19 nt, Artificial Sequence
  Description of Artificial Sequence: Synthetic oligonucleotide
  Antisense strand to SEQ ID NO: 1104350
acaaacaagcacauauugg

SEQ ID NO: 1104352 - RNA, 19 nt, Artificial Sequence
  Description of Artificial Sequence: Synthetic oligonucleotide
  Sense strand starting at position 2784 of SEQ ID NO: 915765
aucaguauuucguuucuuu

SEQ ID NO: 1104353 - RNA, 19 nt, Artificial Sequence
  Description of Artificial Sequence: Synthetic oligonucleotide
  Antisense strand to SEQ ID NO: 1104352
aaagaaacgaaauacugau

SEQ ID NO: 1104354 - RNA, 19 nt, Artificial Sequence
  Description of Artificial Sequence: Synthetic oligonucleotide
  Sense strand starting at position 2851 of SEQ ID NO: 915765
aauggaaucucagggaagu

SEQ ID NO: 1104355 - RNA, 19 nt, Artificial Sequence
  Description of Artificial Sequence: Synthetic oligonucleotide
  Antisense strand to SEQ ID NO: 1104354
acuucccugagauuccauu

SEQ ID NO: 1104356 - RNA, 19 nt, Artificial Sequence
  Description of Artificial Sequence: Synthetic oligonucleotide
  Sense strand starting at position 2903 of SEQ ID NO: 915765
gccuguaaacuguaaggca

SEQ ID NO: 1104357 - RNA, 19 nt, Artificial Sequence
  Description of Artificial Sequence: Synthetic oligonucleotide
  Antisense strand to SEQ ID NO: 1104356
ugccuuacaguuuacaggc

SEQ ID NO: 1104358 - RNA, 19 nt, Artificial Sequence
  Description of Artificial Sequence: Synthetic oligonucleotide
  Sense strand starting at position 3324 of SEQ ID NO: 915765
accuuaaugucagcagaau

SEQ ID NO: 1104359 - RNA, 19 nt, Artificial Sequence
  Description of Artificial Sequence: Synthetic oligonucleotide
  Antisense strand to SEQ ID NO: 1104358
auucugcugacauuaaggu

SEQ ID NO: 1104360 - RNA, 19 nt, Artificial Sequence
  Description of Artificial Sequence: Synthetic oligonucleotide
  Sense strand starting at position 3325 of SEQ ID NO: 915765
ccuuaaugucagcagaaua

SEQ ID NO: 1104361 - RNA, 19 nt, Artificial Sequence
  Description of Artificial Sequence: Synthetic oligonucleotide
  Antisense strand to SEQ ID NO: 1104360
uauucugcugacauuaagg

SEQ ID NO: 1104362 - RNA, 19 nt, Artificial Sequence
  Description of Artificial Sequence: Synthetic oligonucleotide
  Sense strand starting at position 3345 of SEQ ID NO: 915765
gcagcugcauuaguguuaa

SEQ ID NO: 1104363 - RNA, 19 nt, Artificial Sequence
  Description of Artificial Sequence: Synthetic oligonucleotide
  Antisense strand to SEQ ID NO: 1104362
uuaacacuaaugcagcugc

SEQ ID NO: 1104364 - RNA, 19 nt, Artificial Sequence
  Description of Artificial Sequence: Synthetic oligonucleotide
  Sense strand starting at position 3429 of SEQ ID NO: 915765
uguaauugcuagucuagag

SEQ ID NO: 1104365 - RNA, 19 nt, Artificial Sequence
  Description of Artificial Sequence: Synthetic oligonucleotide
  Antisense strand to SEQ ID NO: 1104364
cucuagacuagcaauuaca

SEQ ID NO: 1104366 - RNA, 19 nt, Artificial Sequence
  Description of Artificial Sequence: Synthetic oligonucleotide
  Sense strand starting at position 3433 of SEQ ID NO: 915765
auugcuagucuagagguga

SEQ ID NO: 1104367 - RNA, 19 nt, Artificial Sequence
  Description of Artificial Sequence: Synthetic oligonucleotide
  Antisense strand to SEQ ID NO: 1104366
ucaccucuagacuagcaau

SEQ ID NO: 1104368 - RNA, 19 nt, Artificial Sequence
  Description of Artificial Sequence: Synthetic oligonucleotide
  Sense strand starting at position 3803 of SEQ ID NO: 915765
gucauuuaucucggaguug

SEQ ID NO: 1104369 - RNA, 19 nt, Artificial Sequence
  Description of Artificial Sequence: Synthetic oligonucleotide
  Antisense strand to SEQ ID NO: 1104368
caacuccgagauaaaugac

SEQ ID NO: 1104370 - RNA, 19 nt, Artificial Sequence
  Description of Artificial Sequence: Synthetic oligonucleotide
  Sense strand starting at position 3814 of SEQ ID NO: 915765
cggaguuggcacugggaga

SEQ ID NO: 1104371 - RNA, 19 nt, Artificial Sequence
  Description of Artificial Sequence: Synthetic oligonucleotide
  Antisense strand to SEQ ID NO: 1104370
ucucccagugccaacuccg

SEQ ID NO: 1104372 - RNA, 19 nt, Artificial Sequence
  Description of Artificial Sequence: Synthetic oligonucleotide
  Sense strand starting at position 3815 of SEQ ID NO: 915765
ggaguuggcacugggagau

SEQ ID NO: 1104373 - RNA, 19 nt, Artificial Sequence
  Description of Artificial Sequence: Synthetic oligonucleotide
  Antisense strand to SEQ ID NO: 1104372
aucucccagugccaacucc

SEQ ID NO: 1104374 - RNA, 19 nt, Artificial Sequence
  Description of Artificial Sequence: Synthetic oligonucleotide
  Sense strand starting at position 3848 of SEQ ID NO: 915765
gggauaagauauugauaaa

SEQ ID NO: 1104375 - RNA, 19 nt, Artificial Sequence
  Description of Artificial Sequence: Synthetic oligonucleotide
  Antisense strand to SEQ ID NO: 1104374
uuuaucaauaucuuauccc

SEQ ID NO: 1104376 - RNA, 19 nt, Artificial Sequence
  Description of Artificial Sequence: Synthetic oligonucleotide
  Sense strand starting at position 28 of SEQ ID NO: 915766
ucugauugguuuccuuaau

SEQ ID NO: 1104377 - RNA, 19 nt, Artificial Sequence
  Description of Artificial Sequence: Synthetic oligonucleotide
  Antisense strand to SEQ ID NO: 1104376
auuaaggaaaccaaucaga

SEQ ID NO: 1104378 - RNA, 19 nt, Artificial Sequence
  Description of Artificial Sequence: Synthetic oligonucleotide
  Sense strand starting at position 29 of SEQ ID NO: 915766
cugauugguuuccuuaauu

SEQ ID NO: 1104379 - RNA, 19 nt, Artificial Sequence
  Description of Artificial Sequence: Synthetic oligonucleotide
  Antisense strand to SEQ ID NO: 1104378
aauuaaggaaaccaaucag

SEQ ID NO: 1104380 - RNA, 19 nt, Artificial Sequence
  Description of Artificial Sequence: Synthetic oligonucleotide
  Sense strand starting at position 315 of SEQ ID NO: 915766
accuaugugccagacucua

SEQ ID NO: 1104381 - RNA, 19 nt, Artificial Sequence
  Description of Artificial Sequence: Synthetic oligonucleotide
  Antisense strand to SEQ ID NO: 1104380
uagagucuggcacauaggu

SEQ ID NO: 1104382 - RNA, 19 nt, Artificial Sequence
  Description of Artificial Sequence: Synthetic oligonucleotide
  Sense strand starting at position 1325 of SEQ ID NO: 915766
gguguugucaaacauagug

SEQ ID NO: 1104383 - RNA, 19 nt, Artificial Sequence
  Description of Artificial Sequence: Synthetic oligonucleotide
  Antisense strand to SEQ ID NO: 1104382
cacuauguuugacaacacc

SEQ ID NO: 1104384 - RNA, 19 nt, Artificial Sequence
  Description of Artificial Sequence: Synthetic oligonucleotide
  Sense strand starting at position 1398 of SEQ ID NO: 915766
aagauuacgguuuguaaau

SEQ ID NO: 1104385 - RNA, 19 nt, Artificial Sequence
  Description of Artificial Sequence: Synthetic oligonucleotide
  Antisense strand to SEQ ID NO: 1104384
auuuacaaaccguaaucuu

SEQ ID NO: 1104386 - RNA, 19 nt, Artificial Sequence
  Description of Artificial Sequence: Synthetic oligonucleotide
  Sense strand starting at position 1399 of SEQ ID NO: 915766
agauuacgguuuguaaaua

SEQ ID NO: 1104387 - RNA, 19 nt, Artificial Sequence
  Description of Artificial Sequence: Synthetic oligonucleotide
  Antisense strand to SEQ ID NO: 1104386
uauuuacaaaccguaaucu

SEQ ID NO: 1104388 - RNA, 19 nt, Artificial Sequence
  Description of Artificial Sequence: Synthetic oligonucleotide
  Sense strand starting at position 1434 of SEQ ID NO: 915766
ugugauaaucgauaucuuu

SEQ ID NO: 1104389 - RNA, 19 nt, Artificial Sequence
  Description of Artificial Sequence: Synthetic oligonucleotide
  Antisense strand to SEQ ID NO: 1104388
aaagauaucgauuaucaca

SEQ ID NO: 1104390 - RNA, 19 nt, Artificial Sequence
  Description of Artificial Sequence: Synthetic oligonucleotide
  Sense strand starting at position 1471 of SEQ ID NO: 915766
ucaaucuuacagggaguga

SEQ ID NO: 1104391 - RNA, 19 nt, Artificial Sequence
  Description of Artificial Sequence: Synthetic oligonucleotide
  Antisense strand to SEQ ID NO: 1104390
ucacucccuguaagauuga

SEQ ID NO: 1104392 - RNA, 19 nt, Artificial Sequence
  Description of Artificial Sequence: Synthetic oligonucleotide
  Sense strand starting at position 1602 of SEQ ID NO: 915766
gcuguuugaggucagugaa

SEQ ID NO: 1104393 - RNA, 19 nt, Artificial Sequence
  Description of Artificial Sequence: Synthetic oligonucleotide
  Antisense strand to SEQ ID NO: 1104392
uucacugaccucaaacagc

SEQ ID NO: 1104394 - RNA, 19 nt, Artificial Sequence
  Description of Artificial Sequence: Synthetic oligonucleotide
  Sense strand starting at position 1666 of SEQ ID NO: 915766
cucagaguugcgggagaaa

SEQ ID NO: 1104395 - RNA, 19 nt, Artificial Sequence
  Description of Artificial Sequence: Synthetic oligonucleotide
  Antisense strand to SEQ ID NO: 1104394
uuucucccgcaacucugag

SEQ ID NO: 1104396 - RNA, 19 nt, Artificial Sequence
  Description of Artificial Sequence: Synthetic oligonucleotide
  Sense strand starting at position 1669 of SEQ ID NO: 915766
agaguugcgggagaaauca

SEQ ID NO: 1104397 - RNA, 19 nt, Artificial Sequence
  Description of Artificial Sequence: Synthetic oligonucleotide
  Antisense strand to SEQ ID NO: 1104396
ugauuucucccgcaacucu

SEQ ID NO: 1104398 - RNA, 19 nt, Artificial Sequence
  Description of Artificial Sequence: Synthetic oligonucleotide
  Sense strand starting at position 2171 of SEQ ID NO: 915766
acccaucuuccuggaagga

SEQ ID NO: 1104399 - RNA, 19 nt, Artificial Sequence
  Description of Artificial Sequence: Synthetic oligonucleotide
  Antisense strand to SEQ ID NO: 1104398
uccuuccaggaagaugggu

SEQ ID NO: 1104400 - RNA, 19 nt, Artificial Sequence
  Description of Artificial Sequence: Synthetic oligonucleotide
  Sense strand starting at position 2265 of SEQ ID NO: 915766
gguguucuugaagaguuuc

SEQ ID NO: 1104401 - RNA, 19 nt, Artificial Sequence
  Description of Artificial Sequence: Synthetic oligonucleotide
  Antisense strand to SEQ ID NO: 1104400
gaaacucuucaagaacacc

SEQ ID NO: 1104402 - RNA, 19 nt, Artificial Sequence
  Description of Artificial Sequence: Synthetic oligonucleotide
  Sense strand starting at position 2271 of SEQ ID NO: 915766
cuugaagaguuuccagaca

SEQ ID NO: 1104403 - RNA, 19 nt, Artificial Sequence
  Description of Artificial Sequence: Synthetic oligonucleotide
  Antisense strand to SEQ ID NO: 1104402
ugucuggaaacucuucaag

SEQ ID NO: 1104404 - RNA, 19 nt, Artificial Sequence
  Description of Artificial Sequence: Synthetic oligonucleotide
  Sense strand starting at position 2727 of SEQ ID NO: 915766
gucccaggagcuggauauu

SEQ ID NO: 1104405 - RNA, 19 nt, Artificial Sequence
  Description of Artificial Sequence: Synthetic oligonucleotide
  Antisense strand to SEQ ID NO: 1104404
aauauccagcuccugggac

SEQ ID NO: 1104406 - RNA, 19 nt, Artificial Sequence
  Description of Artificial Sequence: Synthetic oligonucleotide
  Sense strand starting at position 2730 of SEQ ID NO: 915766
ccaggagcuggauauugua

SEQ ID NO: 1104407 - RNA, 19 nt, Artificial Sequence
  Description of Artificial Sequence: Synthetic oligonucleotide
  Antisense strand to SEQ ID NO: 1104406
uacaauauccagcuccugg

SEQ ID NO: 1104408 - RNA, 19 nt, Artificial Sequence
  Description of Artificial Sequence: Synthetic oligonucleotide
  Sense strand starting at position 2738 of SEQ ID NO: 915766
uggauauuguaauugucaa

SEQ ID NO: 1104409 - RNA, 19 nt, Artificial Sequence
  Description of Artificial Sequence: Synthetic oligonucleotide
  Antisense strand to SEQ ID NO: 1104408
uugacaauuacaauaucca

SEQ ID NO: 1104410 - RNA, 19 nt, Artificial Sequence
  Description of Artificial Sequence: Synthetic oligonucleotide
  Sense strand starting at position 2739 of SEQ ID NO: 915766
ggauauuguaauugucaag

SEQ ID NO: 1104411 - RNA, 19 nt, Artificial Sequence
  Description of Artificial Sequence: Synthetic oligonucleotide
  Antisense strand to SEQ ID NO: 1104410
cuugacaauuacaauaucc

SEQ ID NO: 1104412 - RNA, 19 nt, Artificial Sequence
  Description of Artificial Sequence: Synthetic oligonucleotide
  Sense strand starting at position 2745 of SEQ ID NO: 915766
uguaauugucaagagguug

SEQ ID NO: 1104413 - RNA, 19 nt, Artificial Sequence
  Description of Artificial Sequence: Synthetic oligonucleotide
  Antisense strand to SEQ ID NO: 1104412
caaccucuugacaauuaca

SEQ ID NO: 1104414 - RNA, 19 nt, Artificial Sequence
  Description of Artificial Sequence: Synthetic oligonucleotide
  Sense strand starting at position 2750 of SEQ ID NO: 915766
uugucaagagguuggacau

SEQ ID NO: 1104415 - RNA, 19 nt, Artificial Sequence
  Description of Artificial Sequence: Synthetic oligonucleotide
  Antisense strand to SEQ ID NO: 1104414
auguccaaccucuugacaa

SEQ ID NO: 1104416 - RNA, 19 nt, Artificial Sequence
  Description of Artificial Sequence: Synthetic oligonucleotide
  Sense strand starting at position 2751 of SEQ ID NO: 915766
ugucaagagguuggacaua

SEQ ID NO: 1104417 - RNA, 19 nt, Artificial Sequence
  Description of Artificial Sequence: Synthetic oligonucleotide
  Antisense strand to SEQ ID NO: 1104416
uauguccaaccucuugaca

SEQ ID NO: 1104418 - RNA, 19 nt, Artificial Sequence
  Description of Artificial Sequence: Synthetic oligonucleotide
  Sense strand starting at position 2781 of SEQ ID NO: 915766
uuguauuuauaggaagauc

SEQ ID NO: 1104419 - RNA, 19 nt, Artificial Sequence
  Description of Artificial Sequence: Synthetic oligonucleotide
  Antisense strand to SEQ ID NO: 1104418
gaucuuccuauaaauacaa

SEQ ID NO: 1104420 - RNA, 19 nt, Artificial Sequence
  Description of Artificial Sequence: Synthetic oligonucleotide
  Sense strand starting at position 2789 of SEQ ID NO: 915766
auaggaagaucugaaggga

SEQ ID NO: 1104421 - RNA, 19 nt, Artificial Sequence
  Description of Artificial Sequence: Synthetic oligonucleotide
  Antisense strand to SEQ ID NO: 1104420
ucccuucagaucuuccuau

SEQ ID NO: 1104422 - RNA, 19 nt, Artificial Sequence
  Description of Artificial Sequence: Synthetic oligonucleotide
  Sense strand starting at position 2913 of SEQ ID NO: 915766
ggauacagccgugaacaaa

SEQ ID NO: 1104423 - RNA, 19 nt, Artificial Sequence
  Description of Artificial Sequence: Synthetic oligonucleotide
  Antisense strand to SEQ ID NO: 1104422
uuuguucacggcuguaucc

SEQ ID NO: 1104424 - RNA, 19 nt, Artificial Sequence
  Description of Artificial Sequence: Synthetic oligonucleotide
  Sense strand starting at position 2965 of SEQ ID NO: 915766
auuccuuuauuagcagaga

SEQ ID NO: 1104425 - RNA, 19 nt, Artificial Sequence
  Description of Artificial Sequence: Synthetic oligonucleotide
  Antisense strand to SEQ ID NO: 1104424
ucucugcuaauaaaggaau

SEQ ID NO: 1104426 - RNA, 19 nt, Artificial Sequence
  Description of Artificial Sequence: Synthetic oligonucleotide
  Sense strand starting at position 3038 of SEQ ID NO: 915766
uuacguguuguggagaaua

SEQ ID NO: 1104427 - RNA, 19 nt, Artificial Sequence
  Description of Artificial Sequence: Synthetic oligonucleotide
  Antisense strand to SEQ ID NO: 1104426
uauucuccacaacacguaa

SEQ ID NO: 1104428 - RNA, 19 nt, Artificial Sequence
  Description of Artificial Sequence: Synthetic oligonucleotide
  Sense strand starting at position 3040 of SEQ ID NO: 915766
acguguuguggagaauaaa

SEQ ID NO: 1104429 - RNA, 19 nt, Artificial Sequence
  Description of Artificial Sequence: Synthetic oligonucleotide
  Antisense strand to SEQ ID NO: 1104428
uuuauucuccacaacacgu

SEQ ID NO: 1104430 - RNA, 19 nt, Artificial Sequence
  Description of Artificial Sequence: Synthetic oligonucleotide
  Sense strand starting at position 3195 of SEQ ID NO: 915766
gcuggaguagaaugaagua

SEQ ID NO: 1104431 - RNA, 19 nt, Artificial Sequence
  Description of Artificial Sequence: Synthetic oligonucleotide
  Antisense strand to SEQ ID NO: 1104430
uacuucauucuacuccagc

SEQ ID NO: 1104432 - RNA, 19 nt, Artificial Sequence
  Description of Artificial Sequence: Synthetic oligonucleotide
  Sense strand starting at position 3234 of SEQ ID NO: 915766
aggcuaagucagggaaaua

SEQ ID NO: 1104433 - RNA, 19 nt, Artificial Sequence
  Description of Artificial Sequence: Synthetic oligonucleotide
  Antisense strand to SEQ ID NO: 1104432
uauuucccugacuuagccu

SEQ ID NO: 1104434 - RNA, 19 nt, Artificial Sequence
  Description of Artificial Sequence: Synthetic oligonucleotide
  Sense strand starting at position 3269 of SEQ ID NO: 915766
gguuuagagaagugagucu

SEQ ID NO: 1104435 - RNA, 19 nt, Artificial Sequence
  Description of Artificial Sequence: Synthetic oligonucleotide
  Antisense strand to SEQ ID NO: 1104434
agacucacuucucuaaacc

SEQ ID NO: 1104436 - RNA, 19 nt, Artificial Sequence
  Description of Artificial Sequence: Synthetic oligonucleotide
  Sense strand starting at position 3276 of SEQ ID NO: 915766
agaagugagucuucuagug

SEQ ID NO: 1104437 - RNA, 19 nt, Artificial Sequence
  Description of Artificial Sequence: Synthetic oligonucleotide
  Antisense strand to SEQ ID NO: 1104436
cacuagaagacucacuucu

SEQ ID NO: 1104438 - RNA, 19 nt, Artificial Sequence
  Description of Artificial Sequence: Synthetic oligonucleotide
  Sense strand starting at position 3331 of SEQ ID NO: 915766
guuagaaaugcagaugcua

SEQ ID NO: 1104439 - RNA, 19 nt, Artificial Sequence
  Description of Artificial Sequence: Synthetic oligonucleotide
  Antisense strand to SEQ ID NO: 1104438
uagcaucugcauuucuaac

SEQ ID NO: 1104440 - RNA, 19 nt, Artificial Sequence
  Description of Artificial Sequence: Synthetic oligonucleotide
  Sense strand starting at position 3426 of SEQ ID NO: 915766
gaugauucugaugggugau

SEQ ID NO: 1104441 - RNA, 19 nt, Artificial Sequence
  Description of Artificial Sequence: Synthetic oligonucleotide
  Antisense strand to SEQ ID NO: 1104440
aucacccaucagaaucauc

SEQ ID NO: 1104442 - RNA, 19 nt, Artificial Sequence
  Description of Artificial Sequence: Synthetic oligonucleotide
  Sense strand starting at position 3428 of SEQ ID NO: 915766
ugauucugaugggugauga

SEQ ID NO: 1104443 - RNA, 19 nt, Artificial Sequence
  Description of Artificial Sequence: Synthetic oligonucleotide
  Antisense strand to SEQ ID NO: 1104442
ucaucacccaucagaauca

SEQ ID NO: 1104444 - RNA, 19 nt, Artificial Sequence
  Description of Artificial Sequence: Synthetic oligonucleotide
  Sense strand starting at position 3429 of SEQ ID NO: 915766
gauucugaugggugaugaa

SEQ ID NO: 1104445 - RNA, 19 nt, Artificial Sequence
  Description of Artificial Sequence: Synthetic oligonucleotide
  Antisense strand to SEQ ID NO: 1104444
uucaucacccaucagaauc

SEQ ID NO: 1104446 - RNA, 19 nt, Artificial Sequence
  Description of Artificial Sequence: Synthetic oligonucleotide
  Sense strand starting at position 3465 of SEQ ID NO: 915766
ggacuuuguagacaauugu

SEQ ID NO: 1104447 - RNA, 19 nt, Artificial Sequence
  Description of Artificial Sequence: Synthetic oligonucleotide
  Antisense strand to SEQ ID NO: 1104446
acaauugucuacaaagucc

SEQ ID NO: 1104448 - RNA, 19 nt, Artificial Sequence
  Description of Artificial Sequence: Synthetic oligonucleotide
  Sense strand starting at position 3526 of SEQ ID NO: 915766
ggaacacaccugugcuuaa

SEQ ID NO: 1104449 - RNA, 19 nt, Artificial Sequence
  Description of Artificial Sequence: Synthetic oligonucleotide
  Antisense strand to SEQ ID NO: 1104448
uuaagcacagguguguucc

SEQ ID NO: 1104450 - RNA, 19 nt, Artificial Sequence
  Description of Artificial Sequence: Synthetic oligonucleotide
  Sense strand starting at position 3588 of SEQ ID NO: 915766
gguguuguggaggaccauu

SEQ ID NO: 1104451 - RNA, 19 nt, Artificial Sequence
  Description of Artificial Sequence: Synthetic oligonucleotide
  Antisense strand to SEQ ID NO: 1104450
aaugguccuccacaacacc

SEQ ID NO: 1104452 - RNA, 19 nt, Artificial Sequence
  Description of Artificial Sequence: Synthetic oligonucleotide
  Sense strand starting at position 3724 of SEQ ID NO: 915766
gugacuagguaucugaaua

SEQ ID NO: 1104453 - RNA, 19 nt, Artificial Sequence
  Description of Artificial Sequence: Synthetic oligonucleotide
  Antisense strand to SEQ ID NO: 1104452
uauucagauaccuagucac

SEQ ID NO: 1104454 - RNA, 19 nt, Artificial Sequence
  Description of Artificial Sequence: Synthetic oligonucleotide
  Sense strand starting at position 3959 of SEQ ID NO: 915766
gugagauuaugucccacag

SEQ ID NO: 1104455 - RNA, 19 nt, Artificial Sequence
  Description of Artificial Sequence: Synthetic oligonucleotide
  Antisense strand to SEQ ID NO: 1104454
cugugggacauaaucucac

SEQ ID NO: 1104456 - RNA, 19 nt, Artificial Sequence
  Description of Artificial Sequence: Synthetic oligonucleotide
  Sense strand starting at position 28 of SEQ ID NO: 915767
ggcccucaugaaugagacu

SEQ ID NO: 1104457 - RNA, 19 nt, Artificial Sequence
  Description of Artificial Sequence: Synthetic oligonucleotide
  Antisense strand to SEQ ID NO: 1104456
agucucauucaugagggcc

SEQ ID NO: 1104458 - RNA, 19 nt, Artificial Sequence
  Description of Artificial Sequence: Synthetic oligonucleotide
  Sense strand starting at position 123 of SEQ ID NO: 915767
ggauguaucaauugagguc

SEQ ID NO: 1104459 - RNA, 19 nt, Artificial Sequence
  Description of Artificial Sequence: Synthetic oligonucleotide
  Antisense strand to SEQ ID NO: 1104458
gaccucaauugauacaucc

SEQ ID NO: 1104460 - RNA, 19 nt, Artificial Sequence
  Description of Artificial Sequence: Synthetic oligonucleotide
  Sense strand starting at position 418 of SEQ ID NO: 915767
ucuuacuauuaggugaaca

SEQ ID NO: 1104461 - RNA, 19 nt, Artificial Sequence
  Description of Artificial Sequence: Synthetic oligonucleotide
  Antisense strand to SEQ ID NO: 1104460
uguucaccuaauaguaaga

SEQ ID NO: 1104462 - RNA, 19 nt, Artificial Sequence
  Description of Artificial Sequence: Synthetic oligonucleotide
  Sense strand starting at position 475 of SEQ ID NO: 915767
uacauaugauaggccgaau

SEQ ID NO: 1104463 - RNA, 19 nt, Artificial Sequence
  Description of Artificial Sequence: Synthetic oligonucleotide
  Antisense strand to SEQ ID NO: 1104462
auucggccuaucauaugua

SEQ ID NO: 1104464 - RNA, 19 nt, Artificial Sequence
  Description of Artificial Sequence: Synthetic oligonucleotide
  Sense strand starting at position 568 of SEQ ID NO: 915767
uuuagaugugauuagugac

SEQ ID NO: 1104465 - RNA, 19 nt, Artificial Sequence
  Description of Artificial Sequence: Synthetic oligonucleotide
  Antisense strand to SEQ ID NO: 1104464
gucacuaaucacaucuaaa

SEQ ID NO: 1104466 - RNA, 19 nt, Artificial Sequence
  Description of Artificial Sequence: Synthetic oligonucleotide
  Sense strand starting at position 574 of SEQ ID NO: 915767
ugugauuagugacucugau

SEQ ID NO: 1104467 - RNA, 19 nt, Artificial Sequence
  Description of Artificial Sequence: Synthetic oligonucleotide
  Antisense strand to SEQ ID NO: 1104466
aucagagucacuaaucaca

SEQ ID NO: 1104468 - RNA, 19 nt, Artificial Sequence
  Description of Artificial Sequence: Synthetic oligonucleotide
  Sense strand starting at position 580 of SEQ ID NO: 915767
uagugacucugaucacuug

SEQ ID NO: 1104469 - RNA, 19 nt, Artificial Sequence
  Description of Artificial Sequence: Synthetic oligonucleotide
  Antisense strand to SEQ ID NO: 1104468
caagugaucagagucacua

SEQ ID NO: 1104470 - RNA, 19 nt, Artificial Sequence
  Description of Artificial Sequence: Synthetic oligonucleotide
  Sense strand starting at position 630 of SEQ ID NO: 915767
ugaagaaauuauccuguau

SEQ ID NO: 1104471 - RNA, 19 nt, Artificial Sequence
  Description of Artificial Sequence: Synthetic oligonucleotide
  Antisense strand to SEQ ID NO: 1104470
auacaggauaauuucuuca

SEQ ID NO: 1104472 - RNA, 19 nt, Artificial Sequence
  Description of Artificial Sequence: Synthetic oligonucleotide
  Sense strand starting at position 740 of SEQ ID NO: 915767
ugguuagagacaugcaaca

SEQ ID NO: 1104473 - RNA, 19 nt, Artificial Sequence
  Description of Artificial Sequence: Synthetic oligonucleotide
  Antisense strand to SEQ ID NO: 1104472
uguugcaugucucuaacca

SEQ ID NO: 1104474 - RNA, 19 nt, Artificial Sequence
  Description of Artificial Sequence: Synthetic oligonucleotide
  Sense strand starting at position 938 of SEQ ID NO: 915767
uggacuucuugccuacaga

SEQ ID NO: 1104475 - RNA, 19 nt, Artificial Sequence
  Description of Artificial Sequence: Synthetic oligonucleotide
  Antisense strand to SEQ ID NO: 1104474
ucuguaggcaagaagucca

SEQ ID NO: 1104476 - RNA, 19 nt, Artificial Sequence
  Description of Artificial Sequence: Synthetic oligonucleotide
  Sense strand starting at position 939 of SEQ ID NO: 915767
ggacuucuugccuacagaa

SEQ ID NO: 1104477 - RNA, 19 nt, Artificial Sequence
  Description of Artificial Sequence: Synthetic oligonucleotide
  Antisense strand to SEQ ID NO: 1104476
uucuguaggcaagaagucc

SEQ ID NO: 1104478 - RNA, 19 nt, Artificial Sequence
  Description of Artificial Sequence: Synthetic oligonucleotide
  Sense strand starting at position 1065 of SEQ ID NO: 915767
ucagaaauugcaggucaua

SEQ ID NO: 1104479 - RNA, 19 nt, Artificial Sequence
  Description of Artificial Sequence: Synthetic oligonucleotide
  Antisense strand to SEQ ID NO: 1104478
uaugaccugcaauuucuga

SEQ ID NO: 1104480 - RNA, 19 nt, Artificial Sequence
  Description of Artificial Sequence: Synthetic oligonucleotide
  Sense strand starting at position 1077 of SEQ ID NO: 915767
ggucauaaaguauagcuga

SEQ ID NO: 1104481 - RNA, 19 nt, Artificial Sequence
  Description of Artificial Sequence: Synthetic oligonucleotide
  Antisense strand to SEQ ID NO: 1104480
ucagcuauacuuuaugacc

SEQ ID NO: 1104482 - RNA, 19 nt, Artificial Sequence
  Description of Artificial Sequence: Synthetic oligonucleotide
  Sense strand starting at position 1196 of SEQ ID NO: 915767
ugauucuuaccauaggugu

SEQ ID NO: 1104483 - RNA, 19 nt, Artificial Sequence
  Description of Artificial Sequence: Synthetic oligonucleotide
  Antisense strand to SEQ ID NO: 1104482
acaccuaugguaagaauca

SEQ ID NO: 1104484 - RNA, 19 nt, Artificial Sequence
  Description of Artificial Sequence: Synthetic oligonucleotide
  Sense strand starting at position 1207 of SEQ ID NO: 915767
auagguguccauggaauau

SEQ ID NO: 1104485 - RNA, 19 nt, Artificial Sequence
  Description of Artificial Sequence: Synthetic oligonucleotide
  Antisense strand to SEQ ID NO: 1104484
auauuccauggacaccuau

SEQ ID NO: 1104486 - RNA, 19 nt, Artificial Sequence
  Description of Artificial Sequence: Synthetic oligonucleotide
  Sense strand starting at position 1216 of SEQ ID NO: 915767
cauggaauauuugaaaugu

SEQ ID NO: 1104487 - RNA, 19 nt, Artificial Sequence
  Description of Artificial Sequence: Synthetic oligonucleotide
  Antisense strand to SEQ ID NO: 1104486
acauuucaaauauuccaug

SEQ ID NO: 1104488 - RNA, 19 nt, Artificial Sequence
  Description of Artificial Sequence: Synthetic oligonucleotide
  Sense strand starting at position 1257 of SEQ ID NO: 915767
uuaguucuuccacaguuag

SEQ ID NO: 1104489 - RNA, 19 nt, Artificial Sequence
  Description of Artificial Sequence: Synthetic oligonucleotide
  Antisense strand to SEQ ID NO: 1104488
cuaacuguggaagaacuaa

SEQ ID NO: 1104490 - RNA, 19 nt, Artificial Sequence
  Description of Artificial Sequence: Synthetic oligonucleotide
  Sense strand starting at position 1268 of SEQ ID NO: 915767
acaguuaggucccugaacu

SEQ ID NO: 1104491 - RNA, 19 nt, Artificial Sequence
  Description of Artificial Sequence: Synthetic oligonucleotide
  Antisense strand to SEQ ID NO: 1104490
aguucagggaccuaacugu

SEQ ID NO: 1104492 - RNA, 19 nt, Artificial Sequence
  Description of Artificial Sequence: Synthetic oligonucleotide
  Sense strand starting at position 1319 of SEQ ID NO: 915767
agaauaaagcuguaagcaa

SEQ ID NO: 1104493 - RNA, 19 nt, Artificial Sequence
  Description of Artificial Sequence: Synthetic oligonucleotide
  Antisense strand to SEQ ID NO: 1104492
uugcuuacagcuuuauucu

SEQ ID NO: 1104494 - RNA, 19 nt, Artificial Sequence
  Description of Artificial Sequence: Synthetic oligonucleotide
  Sense strand starting at position 1667 of SEQ ID NO: 915767
gacaauuuacgguguggua

SEQ ID NO: 1104495 - RNA, 19 nt, Artificial Sequence
  Description of Artificial Sequence: Synthetic oligonucleotide
  Antisense strand to SEQ ID NO: 1104494
uaccacaccguaaauuguc

SEQ ID NO: 1104496 - RNA, 19 nt, Artificial Sequence
  Description of Artificial Sequence: Synthetic oligonucleotide
  Sense strand starting at position 1688 of SEQ ID NO: 915767
cccugagcucugcaaacaa

SEQ ID NO: 1104497 - RNA, 19 nt, Artificial Sequence
  Description of Artificial Sequence: Synthetic oligonucleotide
  Antisense strand to SEQ ID NO: 1104496
uuguuugcagagcucaggg

SEQ ID NO: 1104498 - RNA, 19 nt, Artificial Sequence
  Description of Artificial Sequence: Synthetic oligonucleotide
  Sense strand starting at position 1698 of SEQ ID NO: 915767
ugcaaacaagaaugguauu

SEQ ID NO: 1104499 - RNA, 19 nt, Artificial Sequence
  Description of Artificial Sequence: Synthetic oligonucleotide
  Antisense strand to SEQ ID NO: 1104498
aauaccauucuuguuugca

SEQ ID NO: 1104500 - RNA, 19 nt, Artificial Sequence
  Description of Artificial Sequence: Synthetic oligonucleotide
  Sense strand starting at position 1761 of SEQ ID NO: 915767
uuacaacugcucuauagga

SEQ ID NO: 1104501 - RNA, 19 nt, Artificial Sequence
  Description of Artificial Sequence: Synthetic oligonucleotide
  Antisense strand to SEQ ID NO: 1104500
uccuauagagcaguuguaa

SEQ ID NO: 1104502 - RNA, 19 nt, Artificial Sequence
  Description of Artificial Sequence: Synthetic oligonucleotide
  Sense strand starting at position 1811 of SEQ ID NO: 915767
aaguaacuugcugagucau

SEQ ID NO: 1104503 - RNA, 19 nt, Artificial Sequence
  Description of Artificial Sequence: Synthetic oligonucleotide
  Antisense strand to SEQ ID NO: 1104502
augacucagcaaguuacuu

SEQ ID NO: 1104504 - RNA, 19 nt, Artificial Sequence
  Description of Artificial Sequence: Synthetic oligonucleotide
  Sense strand starting at position 1819 of SEQ ID NO: 915767
ugcugagucauauagcaag

SEQ ID NO: 1104505 - RNA, 19 nt, Artificial Sequence
  Description of Artificial Sequence: Synthetic oligonucleotide
  Antisense strand to SEQ ID NO: 1104504
cuugcuauaugacucagca

SEQ ID NO: 1104506 - RNA, 19 nt, Artificial Sequence
  Description of Artificial Sequence: Synthetic oligonucleotide
  Sense strand starting at position 1867 of SEQ ID NO: 915767
ggaccagagucuuuaaucu

SEQ ID NO: 1104507 - RNA, 19 nt, Artificial Sequence
  Description of Artificial Sequence: Synthetic oligonucleotide
  Antisense strand to SEQ ID NO: 1104506
agauuaaagacucuggucc

SEQ ID NO: 1104508 - RNA, 19 nt, Artificial Sequence
  Description of Artificial Sequence: Synthetic oligonucleotide
  Sense strand starting at position 1999 of SEQ ID NO: 915767
uugagauaccucgacuuuc

SEQ ID NO: 1104509 - RNA, 19 nt, Artificial Sequence
  Description of Artificial Sequence: Synthetic oligonucleotide
  Antisense strand to SEQ ID NO: 1104508
gaaagucgagguaucucaa

SEQ ID NO: 1104510 - RNA, 19 nt, Artificial Sequence
  Description of Artificial Sequence: Synthetic oligonucleotide
  Sense strand starting at position 2114 of SEQ ID NO: 915767
ccagaugucuucucagaga

SEQ ID NO: 1104511 - RNA, 19 nt, Artificial Sequence
  Description of Artificial Sequence: Synthetic oligonucleotide
  Antisense strand to SEQ ID NO: 1104510
ucucugagaagacaucugg

SEQ ID NO: 1104512 - RNA, 19 nt, Artificial Sequence
  Description of Artificial Sequence: Synthetic oligonucleotide
  Sense strand starting at position 2127 of SEQ ID NO: 915767
cagagauacugacuugguu

SEQ ID NO: 1104513 - RNA, 19 nt, Artificial Sequence
  Description of Artificial Sequence: Synthetic oligonucleotide
  Antisense strand to SEQ ID NO: 1104512
aaccaagucaguaucucug

SEQ ID NO: 1104514 - RNA, 19 nt, Artificial Sequence
  Description of Artificial Sequence: Synthetic oligonucleotide
  Sense strand starting at position 2129 of SEQ ID NO: 915767
gagauacugacuugguugu

SEQ ID NO: 1104515 - RNA, 19 nt, Artificial Sequence
  Description of Artificial Sequence: Synthetic oligonucleotide
  Antisense strand to SEQ ID NO: 1104514
acaaccaagucaguaucuc

SEQ ID NO: 1104516 - RNA, 19 nt, Artificial Sequence
  Description of Artificial Sequence: Synthetic oligonucleotide
  Sense strand starting at position 2222 of SEQ ID NO: 915767
acuagugguuagguuuaaa

SEQ ID NO: 1104517 - RNA, 19 nt, Artificial Sequence
  Description of Artificial Sequence: Synthetic oligonucleotide
  Antisense strand to SEQ ID NO: 1104516
uuuaaaccuaaccacuagu

SEQ ID NO: 1104518 - RNA, 19 nt, Artificial Sequence
  Description of Artificial Sequence: Synthetic oligonucleotide
  Sense strand starting at position 2225 of SEQ ID NO: 915767
agugguuagguuuaaauga

SEQ ID NO: 1104519 - RNA, 19 nt, Artificial Sequence
  Description of Artificial Sequence: Synthetic oligonucleotide
  Antisense strand to SEQ ID NO: 1104518
ucauuuaaaccuaaccacu

SEQ ID NO: 1104520 - RNA, 19 nt, Artificial Sequence
  Description of Artificial Sequence: Synthetic oligonucleotide
  Sense strand starting at position 2440 of SEQ ID NO: 915767
ggacuugaagacuguauug

SEQ ID NO: 1104521 - RNA, 19 nt, Artificial Sequence
  Description of Artificial Sequence: Synthetic oligonucleotide
  Antisense strand to SEQ ID NO: 1104520
caauacagucuucaagucc

SEQ ID NO: 1104522 - RNA, 19 nt, Artificial Sequence
  Description of Artificial Sequence: Synthetic oligonucleotide
  Sense strand starting at position 2442 of SEQ ID NO: 915767
acuugaagacuguauuguu

SEQ ID NO: 1104523 - RNA, 19 nt, Artificial Sequence
  Description of Artificial Sequence: Synthetic oligonucleotide
  Antisense strand to SEQ ID NO: 1104522
aacaauacagucuucaagu

SEQ ID NO: 1104524 - RNA, 19 nt, Artificial Sequence
  Description of Artificial Sequence: Synthetic oligonucleotide
  Sense strand starting at position 2447 of SEQ ID NO: 915767
aagacuguauuguuaagau

SEQ ID NO: 1104525 - RNA, 19 nt, Artificial Sequence
  Description of Artificial Sequence: Synthetic oligonucleotide
  Antisense strand to SEQ ID NO: 1104524
aucuuaacaauacagucuu

SEQ ID NO: 1104526 - RNA, 19 nt, Artificial Sequence
  Description of Artificial Sequence: Synthetic oligonucleotide
  Sense strand starting at position 2803 of SEQ ID NO: 915767
aggguuacuacaugacuga

SEQ ID NO: 1104527 - RNA, 19 nt, Artificial Sequence
  Description of Artificial Sequence: Synthetic oligonucleotide
  Antisense strand to SEQ ID NO: 1104526
ucagucauguaguaacccu

SEQ ID NO: 1104528 - RNA, 19 nt, Artificial Sequence
  Description of Artificial Sequence: Synthetic oligonucleotide
  Sense strand starting at position 2807 of SEQ ID NO: 915767
uuacuacaugacugagcaa

SEQ ID NO: 1104529 - RNA, 19 nt, Artificial Sequence
  Description of Artificial Sequence: Synthetic oligonucleotide
  Antisense strand to SEQ ID NO: 1104528
uugcucagucauguaguaa

SEQ ID NO: 1104530 - RNA, 19 nt, Artificial Sequence
  Description of Artificial Sequence: Synthetic oligonucleotide
  Sense strand starting at position 2810 of SEQ ID NO: 915767
cuacaugacugagcaauua

SEQ ID NO: 1104531 - RNA, 19 nt, Artificial Sequence
  Description of Artificial Sequence: Synthetic oligonucleotide
  Antisense strand to SEQ ID NO: 1104530
uaauugcucagucauguag

SEQ ID NO: 1104532 - RNA, 19 nt, Artificial Sequence
  Description of Artificial Sequence: Synthetic oligonucleotide
  Sense strand starting at position 3193 of SEQ ID NO: 915767
ugauuccauguauaugcaa

SEQ ID NO: 1104533 - RNA, 19 nt, Artificial Sequence
  Description of Artificial Sequence: Synthetic oligonucleotide
  Antisense strand to SEQ ID NO: 1104532
uugcauauacauggaauca

SEQ ID NO: 1104534 - RNA, 19 nt, Artificial Sequence
  Description of Artificial Sequence: Synthetic oligonucleotide
  Sense strand starting at position 3252 of SEQ ID NO: 915767
aguggaaaccuaggauugu

SEQ ID NO: 1104535 - RNA, 19 nt, Artificial Sequence
  Description of Artificial Sequence: Synthetic oligonucleotide
  Antisense strand to SEQ ID NO: 1104534
acaauccuagguuuccacu

SEQ ID NO: 1104536 - RNA, 19 nt, Artificial Sequence
  Description of Artificial Sequence: Synthetic oligonucleotide
  Sense strand starting at position 121 of SEQ ID NO: 915768
gggacaaggaugugaaugu

SEQ ID NO: 1104537 - RNA, 19 nt, Artificial Sequence
  Description of Artificial Sequence: Synthetic oligonucleotide
  Antisense strand to SEQ ID NO: 1104536
acauucacauccuuguccc

SEQ ID NO: 1104538 - RNA, 19 nt, Artificial Sequence
  Description of Artificial Sequence: Synthetic oligonucleotide
  Sense strand starting at position 122 of SEQ ID NO: 915768
ggacaaggaugugaaugua

SEQ ID NO: 1104539 - RNA, 19 nt, Artificial Sequence
  Description of Artificial Sequence: Synthetic oligonucleotide
  Antisense strand to SEQ ID NO: 1104538
uacauucacauccuugucc

SEQ ID NO: 1104540 - RNA, 19 nt, Artificial Sequence
  Description of Artificial Sequence: Synthetic oligonucleotide
  Sense strand starting at position 125 of SEQ ID NO: 915768
caaggaugugaauguaauc

SEQ ID NO: 1104541 - RNA, 19 nt, Artificial Sequence
  Description of Artificial Sequence: Synthetic oligonucleotide
  Antisense strand to SEQ ID NO: 1104540
gauuacauucacauccuug

SEQ ID NO: 1104542 - RNA, 19 nt, Artificial Sequence
  Description of Artificial Sequence: Synthetic oligonucleotide
  Sense strand starting at position 224 of SEQ ID NO: 915768
ucuaauccugccugugcaa

SEQ ID NO: 1104543 - RNA, 19 nt, Artificial Sequence
  Description of Artificial Sequence: Synthetic oligonucleotide
  Antisense strand to SEQ ID NO: 1104542
uugcacaggcaggauuaga

SEQ ID NO: 1104544 - RNA, 19 nt, Artificial Sequence
  Description of Artificial Sequence: Synthetic oligonucleotide
  Sense strand starting at position 463 of SEQ ID NO: 915768
ccaugccugucugugagaa

SEQ ID NO: 1104545 - RNA, 19 nt, Artificial Sequence
  Description of Artificial Sequence: Synthetic oligonucleotide
  Antisense strand to SEQ ID NO: 1104544
uucucacagacaggcaugg

SEQ ID NO: 1104546 - RNA, 19 nt, Artificial Sequence
  Description of Artificial Sequence: Synthetic oligonucleotide
  Sense strand starting at position 464 of SEQ ID NO: 915768
caugccugucugugagaaa

SEQ ID NO: 1104547 - RNA, 19 nt, Artificial Sequence
  Description of Artificial Sequence: Synthetic oligonucleotide
  Antisense strand to SEQ ID NO: 1104546
uuucucacagacaggcaug

SEQ ID NO: 1104548 - RNA, 19 nt, Artificial Sequence
  Description of Artificial Sequence: Synthetic oligonucleotide
  Sense strand starting at position 465 of SEQ ID NO: 915768
augccugucugugagaaac

SEQ ID NO: 1104549 - RNA, 19 nt, Artificial Sequence
  Description of Artificial Sequence: Synthetic oligonucleotide
  Antisense strand to SEQ ID NO: 1104548
guuucucacagacaggcau

SEQ ID NO: 1104550 - RNA, 19 nt, Artificial Sequence
  Description of Artificial Sequence: Synthetic oligonucleotide
  Sense strand starting at position 530 of SEQ ID NO: 915768
ggacuuugcugaccgauca

SEQ ID NO: 1104551 - RNA, 19 nt, Artificial Sequence
  Description of Artificial Sequence: Synthetic oligonucleotide
  Antisense strand to SEQ ID NO: 1104550
ugaucggucagcaaagucc

SEQ ID NO: 1104552 - RNA, 19 nt, Artificial Sequence
  Description of Artificial Sequence: Synthetic oligonucleotide
  Sense strand starting at position 656 of SEQ ID NO: 915768
gagcucagcccgugugaau

SEQ ID NO: 1104553 - RNA, 19 nt, Artificial Sequence
  Description of Artificial Sequence: Synthetic oligonucleotide
  Antisense strand to SEQ ID NO: 1104552
auucacacgggcugagcuc

SEQ ID NO: 1104554 - RNA, 19 nt, Artificial Sequence
  Description of Artificial Sequence: Synthetic oligonucleotide
  Sense strand starting at position 667 of SEQ ID NO: 915768
gugugaaucuguugcugga

SEQ ID NO: 1104555 - RNA, 19 nt, Artificial Sequence
  Description of Artificial Sequence: Synthetic oligonucleotide
  Antisense strand to SEQ ID NO: 1104554
uccagcaacagauucacac

SEQ ID NO: 1104556 - RNA, 19 nt, Artificial Sequence
  Description of Artificial Sequence: Synthetic oligonucleotide
  Sense strand starting at position 669 of SEQ ID NO: 915768
gugaaucuguugcuggaaa

SEQ ID NO: 1104557 - RNA, 19 nt, Artificial Sequence
  Description of Artificial Sequence: Synthetic oligonucleotide
  Antisense strand to SEQ ID NO: 1104556
uuuccagcaacagauucac

SEQ ID NO: 1104558 - RNA, 19 nt, Artificial Sequence
  Description of Artificial Sequence: Synthetic oligonucleotide
  Sense strand starting at position 670 of SEQ ID NO: 915768
ugaaucuguugcuggaaac

SEQ ID NO: 1104559 - RNA, 19 nt, Artificial Sequence
  Description of Artificial Sequence: Synthetic oligonucleotide
  Antisense strand to SEQ ID NO: 1104558
guuuccagcaacagauuca

SEQ ID NO: 1104560 - RNA, 19 nt, Artificial Sequence
  Description of Artificial Sequence: Synthetic oligonucleotide
  Sense strand starting at position 688 of SEQ ID NO: 915768
ccaaaugugcccugaggca

SEQ ID NO: 1104561 - RNA, 19 nt, Artificial Sequence
  Description of Artificial Sequence: Synthetic oligonucleotide
  Antisense strand to SEQ ID NO: 1104560
ugccucagggcacauuugg

SEQ ID NO: 1104562 - RNA, 19 nt, Artificial Sequence
  Description of Artificial Sequence: Synthetic oligonucleotide
  Sense strand starting at position 928 of SEQ ID NO: 915768
cgaugggagucacguugau

SEQ ID NO: 1104563 - RNA, 19 nt, Artificial Sequence
  Description of Artificial Sequence: Synthetic oligonucleotide
  Antisense strand to SEQ ID NO: 1104562
aucaacgugacucccaucg

SEQ ID NO: 1104564 - RNA, 19 nt, Artificial Sequence
  Description of Artificial Sequence: Synthetic oligonucleotide
  Sense strand starting at position 941 of SEQ ID NO: 915768
guugaugcccaucagcauu

SEQ ID NO: 1104565 - RNA, 19 nt, Artificial Sequence
  Description of Artificial Sequence: Synthetic oligonucleotide
  Antisense strand to SEQ ID NO: 1104564
aaugcugaugggcaucaac

SEQ ID NO: 1104566 - RNA, 19 nt, Artificial Sequence
  Description of Artificial Sequence: Synthetic oligonucleotide
  Sense strand starting at position 1003 of SEQ ID NO: 915768
cgcgguaggucucgucgua

SEQ ID NO: 1104567 - RNA, 19 nt, Artificial Sequence
  Description of Artificial Sequence: Synthetic oligonucleotide
  Antisense strand to SEQ ID NO: 1104566
uacgacgagaccuaccgcg

SEQ ID NO: 1104568 - RNA, 19 nt, Artificial Sequence
  Description of Artificial Sequence: Synthetic oligonucleotide
  Sense strand starting at position 2159 of SEQ ID NO: 915768
cugugacuuuaggaauuaa

SEQ ID NO: 1104569 - RNA, 19 nt, Artificial Sequence
  Description of Artificial Sequence: Synthetic oligonucleotide
  Antisense strand to SEQ ID NO: 1104568
uuaauuccuaaagucacag

SEQ ID NO: 1104570 - RNA, 19 nt, Artificial Sequence
  Description of Artificial Sequence: Synthetic oligonucleotide
  Sense strand starting at position 2203 of SEQ ID NO: 915768
cuccguuuccucgacggua

SEQ ID NO: 1104571 - RNA, 19 nt, Artificial Sequence
  Description of Artificial Sequence: Synthetic oligonucleotide
  Antisense strand to SEQ ID NO: 1104570
uaccgucgaggaaacggag

SEQ ID NO: 1104572 - RNA, 19 nt, Artificial Sequence
  Description of Artificial Sequence: Synthetic oligonucleotide
  Sense strand starting at position 2205 of SEQ ID NO: 915768
ccguuuccucgacgguaaa

SEQ ID NO: 1104573 - RNA, 19 nt, Artificial Sequence
  Description of Artificial Sequence: Synthetic oligonucleotide
  Antisense strand to SEQ ID NO: 1104572
uuuaccgucgaggaaacgg

SEQ ID NO: 1104574 - RNA, 19 nt, Artificial Sequence
  Description of Artificial Sequence: Synthetic oligonucleotide
  Sense strand starting at position 2256 of SEQ ID NO: 915768
ggcggaacuauugaguuaa

SEQ ID NO: 1104575 - RNA, 19 nt, Artificial Sequence
  Description of Artificial Sequence: Synthetic oligonucleotide
  Antisense strand to SEQ ID NO: 1104574
uuaacucaauaguuccgcc

SEQ ID NO: 1104576 - RNA, 19 nt, Artificial Sequence
  Description of Artificial Sequence: Synthetic oligonucleotide
  Sense strand starting at position 2258 of SEQ ID NO: 915768
cggaacuauugaguuaaug

SEQ ID NO: 1104577 - RNA, 19 nt, Artificial Sequence
  Description of Artificial Sequence: Synthetic oligonucleotide
  Antisense strand to SEQ ID NO: 1104576
cauuaacucaauaguuccg

SEQ ID NO: 1104578 - RNA, 19 nt, Artificial Sequence
  Description of Artificial Sequence: Synthetic oligonucleotide
  Sense strand starting at position 2366 of SEQ ID NO: 915768
gcuguuacagcucaucaaa

SEQ ID NO: 1104579 - RNA, 19 nt, Artificial Sequence
  Description of Artificial Sequence: Synthetic oligonucleotide
  Antisense strand to SEQ ID NO: 1104578
uuugaugagcuguaacagc

SEQ ID NO: 1104580 - RNA, 19 nt, Artificial Sequence
  Description of Artificial Sequence: Synthetic oligonucleotide
  Sense strand starting at position 2368 of SEQ ID NO: 915768
uguuacagcucaucaaaga

SEQ ID NO: 1104581 - RNA, 19 nt, Artificial Sequence
  Description of Artificial Sequence: Synthetic oligonucleotide
  Antisense strand to SEQ ID NO: 1104580
ucuuugaugagcuguaaca

SEQ ID NO: 1104582 - RNA, 19 nt, Artificial Sequence
  Description of Artificial Sequence: Synthetic oligonucleotide
  Sense strand starting at position 2478 of SEQ ID NO: 915768
uccaguuugggcugugcaa

SEQ ID NO: 1104583 - RNA, 19 nt, Artificial Sequence
  Description of Artificial Sequence: Synthetic oligonucleotide
  Antisense strand to SEQ ID NO: 1104582
uugcacagcccaaacugga

SEQ ID NO: 1104584 - RNA, 19 nt, Artificial Sequence
  Description of Artificial Sequence: Synthetic oligonucleotide
  Sense strand starting at position 2733 of SEQ ID NO: 915768
gguuccuucugguuugaau

SEQ ID NO: 1104585 - RNA, 19 nt, Artificial Sequence
  Description of Artificial Sequence: Synthetic oligonucleotide
  Antisense strand to SEQ ID NO: 1104584
auucaaaccagaaggaacc

SEQ ID NO: 1104586 - RNA, 19 nt, Artificial Sequence
  Description of Artificial Sequence: Synthetic oligonucleotide
  Sense strand starting at position 2883 of SEQ ID NO: 915768
acccacugcucuuuaggua

SEQ ID NO: 1104587 - RNA, 19 nt, Artificial Sequence
  Description of Artificial Sequence: Synthetic oligonucleotide
  Antisense strand to SEQ ID NO: 1104586
uaccuaaagagcagugggu

SEQ ID NO: 1104588 - RNA, 19 nt, Artificial Sequence
  Description of Artificial Sequence: Synthetic oligonucleotide
  Sense strand starting at position 2933 of SEQ ID NO: 915768
ggcaccuacugagugauca

SEQ ID NO: 1104589 - RNA, 19 nt, Artificial Sequence
  Description of Artificial Sequence: Synthetic oligonucleotide
  Antisense strand to SEQ ID NO: 1104588
ugaucacucaguaggugcc

SEQ ID NO: 1104590 - RNA, 19 nt, Artificial Sequence
  Description of Artificial Sequence: Synthetic oligonucleotide
  Sense strand starting at position 2934 of SEQ ID NO: 915768
gcaccuacugagugaucaa

SEQ ID NO: 1104591 - RNA, 19 nt, Artificial Sequence
  Description of Artificial Sequence: Synthetic oligonucleotide
  Antisense strand to SEQ ID NO: 1104590
uugaucacucaguaggugc

SEQ ID NO: 1104592 - RNA, 19 nt, Artificial Sequence
  Description of Artificial Sequence: Synthetic oligonucleotide
  Sense strand starting at position 2937 of SEQ ID NO: 915768
ccuacugagugaucaauac

SEQ ID NO: 1104593 - RNA, 19 nt, Artificial Sequence
  Description of Artificial Sequence: Synthetic oligonucleotide
  Antisense strand to SEQ ID NO: 1104592
guauugaucacucaguagg

SEQ ID NO: 1104594 - RNA, 19 nt, Artificial Sequence
  Description of Artificial Sequence: Synthetic oligonucleotide
  Sense strand starting at position 2941 of SEQ ID NO: 915768
cugagugaucaauacuugu

SEQ ID NO: 1104595 - RNA, 19 nt, Artificial Sequence
  Description of Artificial Sequence: Synthetic oligonucleotide
  Antisense strand to SEQ ID NO: 1104594
acaaguauugaucacucag

SEQ ID NO: 1104596 - RNA, 19 nt, Artificial Sequence
  Description of Artificial Sequence: Synthetic oligonucleotide
  Sense strand starting at position 3008 of SEQ ID NO: 915768
caaggauugcugggaaggu

SEQ ID NO: 1104597 - RNA, 19 nt, Artificial Sequence
  Description of Artificial Sequence: Synthetic oligonucleotide
  Antisense strand to SEQ ID NO: 1104596
accuucccagcaauccuug

SEQ ID NO: 1104598 - RNA, 19 nt, Artificial Sequence
  Description of Artificial Sequence: Synthetic oligonucleotide
  Sense strand starting at position 3035 of SEQ ID NO: 915768
gcgugaaucugcaguggcu

SEQ ID NO: 1104599 - RNA, 19 nt, Artificial Sequence
  Description of Artificial Sequence: Synthetic oligonucleotide
  Antisense strand to SEQ ID NO: 1104598
agccacugcagauucacgc

SEQ ID NO: 1104600 - RNA, 19 nt, Artificial Sequence
  Description of Artificial Sequence: Synthetic oligonucleotide
  Sense strand starting at position 3068 of SEQ ID NO: 915768
gguagaacuuucuccaggu

SEQ ID NO: 1104601 - RNA, 19 nt, Artificial Sequence
  Description of Artificial Sequence: Synthetic oligonucleotide
  Antisense strand to SEQ ID NO: 1104600
accuggagaaaguucuacc

SEQ ID NO: 1104602 - RNA, 19 nt, Artificial Sequence
  Description of Artificial Sequence: Synthetic oligonucleotide
  Sense strand starting at position 3069 of SEQ ID NO: 915768
guagaacuuucuccaggug

SEQ ID NO: 1104603 - RNA, 19 nt, Artificial Sequence
  Description of Artificial Sequence: Synthetic oligonucleotide
  Antisense strand to SEQ ID NO: 1104602
caccuggagaaaguucuac

SEQ ID NO: 1104604 - RNA, 19 nt, Artificial Sequence
  Description of Artificial Sequence: Synthetic oligonucleotide
  Sense strand starting at position 3074 of SEQ ID NO: 915768
acuuucuccaggugacgau

SEQ ID NO: 1104605 - RNA, 19 nt, Artificial Sequence
  Description of Artificial Sequence: Synthetic oligonucleotide
  Antisense strand to SEQ ID NO: 1104604
aucgucaccuggagaaagu

SEQ ID NO: 1104606 - RNA, 19 nt, Artificial Sequence
  Description of Artificial Sequence: Synthetic oligonucleotide
  Sense strand starting at position 3236 of SEQ ID NO: 915768
gccguucucagauggcaga

SEQ ID NO: 1104607 - RNA, 19 nt, Artificial Sequence
  Description of Artificial Sequence: Synthetic oligonucleotide
  Antisense strand to SEQ ID NO: 1104606
ucugccaucugagaacggc

SEQ ID NO: 1104608 - RNA, 19 nt, Artificial Sequence
  Description of Artificial Sequence: Synthetic oligonucleotide
  Sense strand starting at position 3249 of SEQ ID NO: 915768
ggcagacaccagcaucauu

SEQ ID NO: 1104609 - RNA, 19 nt, Artificial Sequence
  Description of Artificial Sequence: Synthetic oligonucleotide
  Antisense strand to SEQ ID NO: 1104608
aaugaugcuggugucugcc

SEQ ID NO: 1104610 - RNA, 19 nt, Artificial Sequence
  Description of Artificial Sequence: Synthetic oligonucleotide
  Sense strand starting at position 3267 of SEQ ID NO: 915768
uacacaguaugaugagaaa

SEQ ID NO: 1104611 - RNA, 19 nt, Artificial Sequence
  Description of Artificial Sequence: Synthetic oligonucleotide
  Antisense strand to SEQ ID NO: 1104610
uuucucaucauacugugua

SEQ ID NO: 1104612 - RNA, 19 nt, Artificial Sequence
  Description of Artificial Sequence: Synthetic oligonucleotide
  Sense strand starting at position 3286 of SEQ ID NO: 915768
gugcaauucuccugacuca

SEQ ID NO: 1104613 - RNA, 19 nt, Artificial Sequence
  Description of Artificial Sequence: Synthetic oligonucleotide
  Antisense strand to SEQ ID NO: 1104612
ugagucaggagaauugcac

SEQ ID NO: 1104614 - RNA, 19 nt, Artificial Sequence
  Description of Artificial Sequence: Synthetic oligonucleotide
  Sense strand starting at position 191 of SEQ ID NO: 915769
ccauguuccuuccugucaa

SEQ ID NO: 1104615 - RNA, 19 nt, Artificial Sequence
  Description of Artificial Sequence: Synthetic oligonucleotide
  Antisense strand to SEQ ID NO: 1104614
uugacaggaaggaacaugg

SEQ ID NO: 1104616 - RNA, 19 nt, Artificial Sequence
  Description of Artificial Sequence: Synthetic oligonucleotide
  Sense strand starting at position 379 of SEQ ID NO: 915769
auagacauuuaugaagcau

SEQ ID NO: 1104617 - RNA, 19 nt, Artificial Sequence
  Description of Artificial Sequence: Synthetic oligonucleotide
  Antisense strand to SEQ ID NO: 1104616
augcuucauaaaugucuau

SEQ ID NO: 1104618 - RNA, 19 nt, Artificial Sequence
  Description of Artificial Sequence: Synthetic oligonucleotide
  Sense strand starting at position 451 of SEQ ID NO: 915769
ggaaccuuuagcugagugu

SEQ ID NO: 1104619 - RNA, 19 nt, Artificial Sequence
  Description of Artificial Sequence: Synthetic oligonucleotide
  Antisense strand to SEQ ID NO: 1104618
acacucagcuaaagguucc

SEQ ID NO: 1104620 - RNA, 19 nt, Artificial Sequence
  Description of Artificial Sequence: Synthetic oligonucleotide
  Sense strand starting at position 487 of SEQ ID NO: 915769
gguuccgugcuaggauaga

SEQ ID NO: 1104621 - RNA, 19 nt, Artificial Sequence
  Description of Artificial Sequence: Synthetic oligonucleotide
  Antisense strand to SEQ ID NO: 1104620
ucuauccuagcacggaacc

SEQ ID NO: 1104622 - RNA, 19 nt, Artificial Sequence
  Description of Artificial Sequence: Synthetic oligonucleotide
  Sense strand starting at position 583 of SEQ ID NO: 915769
gcguuuguggccgcugaga

SEQ ID NO: 1104623 - RNA, 19 nt, Artificial Sequence
  Description of Artificial Sequence: Synthetic oligonucleotide
  Antisense strand to SEQ ID NO: 1104622
ucucagcggccacaaacgc

SEQ ID NO: 1104624 - RNA, 19 nt, Artificial Sequence
  Description of Artificial Sequence: Synthetic oligonucleotide
  Sense strand starting at position 584 of SEQ ID NO: 915769
cguuuguggccgcugagau

SEQ ID NO: 1104625 - RNA, 19 nt, Artificial Sequence
  Description of Artificial Sequence: Synthetic oligonucleotide
  Antisense strand to SEQ ID NO: 1104624
aucucagcggccacaaacg

SEQ ID NO: 1104626 - RNA, 19 nt, Artificial Sequence
  Description of Artificial Sequence: Synthetic oligonucleotide
  Sense strand starting at position 614 of SEQ ID NO: 915769
gcgggaguguuacuuacga

SEQ ID NO: 1104627 - RNA, 19 nt, Artificial Sequence
  Description of Artificial Sequence: Synthetic oligonucleotide
  Antisense strand to SEQ ID NO: 1104626
ucguaaguaacacucccgc

SEQ ID NO: 1104628 - RNA, 19 nt, Artificial Sequence
  Description of Artificial Sequence: Synthetic oligonucleotide
  Sense strand starting at position 724 of SEQ ID NO: 915769
agagaacccucagugagua

SEQ ID NO: 1104629 - RNA, 19 nt, Artificial Sequence
  Description of Artificial Sequence: Synthetic oligonucleotide
  Antisense strand to SEQ ID NO: 1104628
uacucacugaggguucucu

SEQ ID NO: 1104630 - RNA, 19 nt, Artificial Sequence
  Description of Artificial Sequence: Synthetic oligonucleotide
  Sense strand starting at position 725 of SEQ ID NO: 915769
gagaacccucagugaguau

SEQ ID NO: 1104631 - RNA, 19 nt, Artificial Sequence
  Description of Artificial Sequence: Synthetic oligonucleotide
  Antisense strand to SEQ ID NO: 1104630
auacucacugaggguucuc

SEQ ID NO: 1104632 - RNA, 19 nt, Artificial Sequence
  Description of Artificial Sequence: Synthetic oligonucleotide
  Sense strand starting at position 1510 of SEQ ID NO: 915769
cugugaacccugggcagaa

SEQ ID NO: 1104633 - RNA, 19 nt, Artificial Sequence
  Description of Artificial Sequence: Synthetic oligonucleotide
  Antisense strand to SEQ ID NO: 1104632
uucugcccaggguucacag

SEQ ID NO: 1104634 - RNA, 19 nt, Artificial Sequence
  Description of Artificial Sequence: Synthetic oligonucleotide
  Sense strand starting at position 2170 of SEQ ID NO: 915769
cugggucuugaugguguaa

SEQ ID NO: 1104635 - RNA, 19 nt, Artificial Sequence
  Description of Artificial Sequence: Synthetic oligonucleotide
  Antisense strand to SEQ ID NO: 1104634
uuacaccaucaagacccag

SEQ ID NO: 1104636 - RNA, 19 nt, Artificial Sequence
  Description of Artificial Sequence: Synthetic oligonucleotide
  Sense strand starting at position 2219 of SEQ ID NO: 915769
cugggacucccgugcauaa

SEQ ID NO: 1104637 - RNA, 19 nt, Artificial Sequence
  Description of Artificial Sequence: Synthetic oligonucleotide
  Antisense strand to SEQ ID NO: 1104636
uuaugcacgggagucccag

SEQ ID NO: 1104638 - RNA, 19 nt, Artificial Sequence
  Description of Artificial Sequence: Synthetic oligonucleotide
  Sense strand starting at position 2238 of SEQ ID NO: 915769
ggcaguguuccugugugca

SEQ ID NO: 1104639 - RNA, 19 nt, Artificial Sequence
  Description of Artificial Sequence: Synthetic oligonucleotide
  Antisense strand to SEQ ID NO: 1104638
ugcacacaggaacacugcc

SEQ ID NO: 1104640 - RNA, 19 nt, Artificial Sequence
  Description of Artificial Sequence: Synthetic oligonucleotide
  Sense strand starting at position 2334 of SEQ ID NO: 915769
gggugaugaguuuggaagu

SEQ ID NO: 1104641 - RNA, 19 nt, Artificial Sequence
  Description of Artificial Sequence: Synthetic oligonucleotide
  Antisense strand to SEQ ID NO: 1104640
acuuccaaacucaucaccc

SEQ ID NO: 1104642 - RNA, 19 nt, Artificial Sequence
  Description of Artificial Sequence: Synthetic oligonucleotide
  Sense strand starting at position 2344 of SEQ ID NO: 915769
uuuggaaguugcccugaua

SEQ ID NO: 1104643 - RNA, 19 nt, Artificial Sequence
  Description of Artificial Sequence: Synthetic oligonucleotide
  Antisense strand to SEQ ID NO: 1104642
uaucagggcaacuuccaaa

SEQ ID NO: 1104644 - RNA, 19 nt, Artificial Sequence
  Description of Artificial Sequence: Synthetic oligonucleotide
  Sense strand starting at position 2347 of SEQ ID NO: 915769
ggaaguugcccugauaugu

SEQ ID NO: 1104645 - RNA, 19 nt, Artificial Sequence
  Description of Artificial Sequence: Synthetic oligonucleotide
  Antisense strand to SEQ ID NO: 1104644
acauaucagggcaacuucc

SEQ ID NO: 1104646 - RNA, 19 nt, Artificial Sequence
  Description of Artificial Sequence: Synthetic oligonucleotide
  Sense strand starting at position 2356 of SEQ ID NO: 915769
ccugauauguaggaagaga

SEQ ID NO: 1104647 - RNA, 19 nt, Artificial Sequence
  Description of Artificial Sequence: Synthetic oligonucleotide
  Antisense strand to SEQ ID NO: 1104646
ucucuuccuacauaucagg

SEQ ID NO: 1104648 - RNA, 19 nt, Artificial Sequence
  Description of Artificial Sequence: Synthetic oligonucleotide
  Sense strand starting at position 2397 of SEQ ID NO: 915769
gggccuugaguggguaaga

SEQ ID NO: 1104649 - RNA, 19 nt, Artificial Sequence
  Description of Artificial Sequence: Synthetic oligonucleotide
  Antisense strand to SEQ ID NO: 1104648
ucuuacccacucaaggccc

SEQ ID NO: 1104650 - RNA, 19 nt, Artificial Sequence
  Description of Artificial Sequence: Synthetic oligonucleotide
  Sense strand starting at position 2398 of SEQ ID NO: 915769
ggccuugaguggguaagaa

SEQ ID NO: 1104651 - RNA, 19 nt, Artificial Sequence
  Description of Artificial Sequence: Synthetic oligonucleotide
  Antisense strand to SEQ ID NO: 1104650
uucuuacccacucaaggcc

SEQ ID NO: 1104652 - RNA, 19 nt, Artificial Sequence
  Description of Artificial Sequence: Synthetic oligonucleotide
  Sense strand starting at position 2457 of SEQ ID NO: 915769
ggguuucaauucuuggagu

SEQ ID NO: 1104653 - RNA, 19 nt, Artificial Sequence
  Description of Artificial Sequence: Synthetic oligonucleotide
  Antisense strand to SEQ ID NO: 1104652
acuccaagaauugaaaccc

SEQ ID NO: 1104654 - RNA, 19 nt, Artificial Sequence
  Description of Artificial Sequence: Synthetic oligonucleotide
  Sense strand starting at position 2696 of SEQ ID NO: 915769
gagaccucguaagauaaca

SEQ ID NO: 1104655 - RNA, 19 nt, Artificial Sequence
  Description of Artificial Sequence: Synthetic oligonucleotide
  Antisense strand to SEQ ID NO: 1104654
uguuaucuuacgaggucuc

SEQ ID NO: 1104656 - RNA, 19 nt, Artificial Sequence
  Description of Artificial Sequence: Synthetic oligonucleotide
  Sense strand starting at position 2701 of SEQ ID NO: 915769
cucguaagauaacaugaaa

SEQ ID NO: 1104657 - RNA, 19 nt, Artificial Sequence
  Description of Artificial Sequence: Synthetic oligonucleotide
  Antisense strand to SEQ ID NO: 1104656
uuucauguuaucuuacgag

SEQ ID NO: 1104658 - RNA, 19 nt, Artificial Sequence
  Description of Artificial Sequence: Synthetic oligonucleotide
  Sense strand starting at position 2756 of SEQ ID NO: 915769
ugggcuacaucagaaagaa

SEQ ID NO: 1104659 - RNA, 19 nt, Artificial Sequence
  Description of Artificial Sequence: Synthetic oligonucleotide
  Antisense strand to SEQ ID NO: 1104658
uucuuucugauguagccca

SEQ ID NO: 1104660 - RNA, 19 nt, Artificial Sequence
  Description of Artificial Sequence: Synthetic oligonucleotide
  Sense strand starting at position 2840 of SEQ ID NO: 915769
uucugugugcuccauugua

SEQ ID NO: 1104661 - RNA, 19 nt, Artificial Sequence
  Description of Artificial Sequence: Synthetic oligonucleotide
  Antisense strand to SEQ ID NO: 1104660
uacaauggagcacacagaa

SEQ ID NO: 1104662 - RNA, 19 nt, Artificial Sequence
  Description of Artificial Sequence: Synthetic oligonucleotide
  Sense strand starting at position 3015 of SEQ ID NO: 915769
cagagaguuugaucucuau

SEQ ID NO: 1104663 - RNA, 19 nt, Artificial Sequence
  Description of Artificial Sequence: Synthetic oligonucleotide
  Antisense strand to SEQ ID NO: 1104662
auagagaucaaacucucug

SEQ ID NO: 1104664 - RNA, 19 nt, Artificial Sequence
  Description of Artificial Sequence: Synthetic oligonucleotide
  Sense strand starting at position 3018 of SEQ ID NO: 915769
agaguuugaucucuauuaa

SEQ ID NO: 1104665 - RNA, 19 nt, Artificial Sequence
  Description of Artificial Sequence: Synthetic oligonucleotide
  Antisense strand to SEQ ID NO: 1104664
uuaauagagaucaaacucu

SEQ ID NO: 1104666 - RNA, 19 nt, Artificial Sequence
  Description of Artificial Sequence: Synthetic oligonucleotide
  Sense strand starting at position 3385 of SEQ ID NO: 915769
gaguuacuuguggaaagug

SEQ ID NO: 1104667 - RNA, 19 nt, Artificial Sequence
  Description of Artificial Sequence: Synthetic oligonucleotide
  Antisense strand to SEQ ID NO: 1104666
cacuuuccacaaguaacuc

SEQ ID NO: 1104668 - RNA, 19 nt, Artificial Sequence
  Description of Artificial Sequence: Synthetic oligonucleotide
  Sense strand starting at position 3390 of SEQ ID NO: 915769
acuuguggaaaguggaaua

SEQ ID NO: 1104669 - RNA, 19 nt, Artificial Sequence
  Description of Artificial Sequence: Synthetic oligonucleotide
  Antisense strand to SEQ ID NO: 1104668
uauuccacuuuccacaagu

SEQ ID NO: 1104670 - RNA, 19 nt, Artificial Sequence
  Description of Artificial Sequence: Synthetic oligonucleotide
  Sense strand starting at position 3401 of SEQ ID NO: 915769
guggaauacuuugucggga

SEQ ID NO: 1104671 - RNA, 19 nt, Artificial Sequence
  Description of Artificial Sequence: Synthetic oligonucleotide
  Antisense strand to SEQ ID NO: 1104670
ucccgacaaaguauuccac

SEQ ID NO: 1104672 - RNA, 19 nt, Artificial Sequence
  Description of Artificial Sequence: Synthetic oligonucleotide
  Sense strand starting at position 3416 of SEQ ID NO: 915769
gggagaggcuguagaacuu

SEQ ID NO: 1104673 - RNA, 19 nt, Artificial Sequence
  Description of Artificial Sequence: Synthetic oligonucleotide
  Antisense strand to SEQ ID NO: 1104672
aaguucuacagccucuccc

SEQ ID NO: 1104674 - RNA, 19 nt, Artificial Sequence
  Description of Artificial Sequence: Synthetic oligonucleotide
  Sense strand starting at position 3455 of SEQ ID NO: 915769
cagagacuguugcuguaua

SEQ ID NO: 1104675 - RNA, 19 nt, Artificial Sequence
  Description of Artificial Sequence: Synthetic oligonucleotide
  Antisense strand to SEQ ID NO: 1104674
uauacagcaacagucucug

SEQ ID NO: 1104676 - RNA, 19 nt, Artificial Sequence
  Description of Artificial Sequence: Synthetic oligonucleotide
  Sense strand starting at position 3468 of SEQ ID NO: 915769
uguauaucuguuugcucca

SEQ ID NO: 1104677 - RNA, 19 nt, Artificial Sequence
  Description of Artificial Sequence: Synthetic oligonucleotide
  Antisense strand to SEQ ID NO: 1104676
uggagcaaacagauauaca

SEQ ID NO: 1104678 - RNA, 19 nt, Artificial Sequence
  Description of Artificial Sequence: Synthetic oligonucleotide
  Sense strand starting at position 3471 of SEQ ID NO: 915769
auaucuguuugcuccacga

SEQ ID NO: 1104679 - RNA, 19 nt, Artificial Sequence
  Description of Artificial Sequence: Synthetic oligonucleotide
  Antisense strand to SEQ ID NO: 1104678
ucguggagcaaacagauau

SEQ ID NO: 1104680 - RNA, 19 nt, Artificial Sequence
  Description of Artificial Sequence: Synthetic oligonucleotide
  Sense strand starting at position 3473 of SEQ ID NO: 915769
aucuguuugcuccacgaac

SEQ ID NO: 1104681 - RNA, 19 nt, Artificial Sequence
  Description of Artificial Sequence: Synthetic oligonucleotide
  Antisense strand to SEQ ID NO: 1104680
guucguggagcaaacagau

SEQ ID NO: 1104682 - RNA, 19 nt, Artificial Sequence
  Description of Artificial Sequence: Synthetic oligonucleotide
  Sense strand starting at position 3475 of SEQ ID NO: 915769
cuguuugcuccacgaacua

SEQ ID NO: 1104683 - RNA, 19 nt, Artificial Sequence
  Description of Artificial Sequence: Synthetic oligonucleotide
  Antisense strand to SEQ ID NO: 1104682
uaguucguggagcaaacag

SEQ ID NO: 1104684 - RNA, 19 nt, Artificial Sequence
  Description of Artificial Sequence: Synthetic oligonucleotide
  Sense strand starting at position 3542 of SEQ ID NO: 915769
gagggagguuguguccuua

SEQ ID NO: 1104685 - RNA, 19 nt, Artificial Sequence
  Description of Artificial Sequence: Synthetic oligonucleotide
  Antisense strand to SEQ ID NO: 1104684
uaaggacacaaccucccuc

SEQ ID NO: 1104686 - RNA, 19 nt, Artificial Sequence
  Description of Artificial Sequence: Synthetic oligonucleotide
  Sense strand starting at position 3599 of SEQ ID NO: 915769
aguggagaaugacaguaaa

SEQ ID NO: 1104687 - RNA, 19 nt, Artificial Sequence
  Description of Artificial Sequence: Synthetic oligonucleotide
  Antisense strand to SEQ ID NO: 1104686
uuuacugucauucuccacu

SEQ ID NO: 1104688 - RNA, 19 nt, Artificial Sequence
  Description of Artificial Sequence: Synthetic oligonucleotide
  Sense strand starting at position 3618 of SEQ ID NO: 915769
ggaagaacucaugggccua

SEQ ID NO: 1104689 - RNA, 19 nt, Artificial Sequence
  Description of Artificial Sequence: Synthetic oligonucleotide
  Antisense strand to SEQ ID NO: 1104688
uaggcccaugaguucuucc

SEQ ID NO: 1104690 - RNA, 19 nt, Artificial Sequence
  Description of Artificial Sequence: Synthetic oligonucleotide
  Sense strand starting at position 3660 of SEQ ID NO: 915769
gccagugcaucuccaaauu

SEQ ID NO: 1104691 - RNA, 19 nt, Artificial Sequence
  Description of Artificial Sequence: Synthetic oligonucleotide
  Antisense strand to SEQ ID NO: 1104690
aauuuggagaugcacuggc

SEQ ID NO: 1104692 - RNA, 19 nt, Artificial Sequence
  Description of Artificial Sequence: Synthetic oligonucleotide
  Sense strand starting at position 3698 of SEQ ID NO: 915769
cagggaucuuguuaagaug

SEQ ID NO: 1104693 - RNA, 19 nt, Artificial Sequence
  Description of Artificial Sequence: Synthetic oligonucleotide
  Antisense strand to SEQ ID NO: 1104692
caucuuaacaagaucccug

SEQ ID NO: 1104694 - RNA, 19 nt, Artificial Sequence
  Description of Artificial Sequence: Synthetic oligonucleotide
  Sense strand starting at position 2054 of SEQ ID NO: 915770
cgaggaaacguuuggaauc

SEQ ID NO: 1104695 - RNA, 19 nt, Artificial Sequence
  Description of Artificial Sequence: Synthetic oligonucleotide
  Antisense strand to SEQ ID NO: 1104694
gauuccaaacguuuccucg

SEQ ID NO: 1104696 - RNA, 19 nt, Artificial Sequence
  Description of Artificial Sequence: Synthetic oligonucleotide
  Sense strand starting at position 2105 of SEQ ID NO: 915770
gguugagguguccaagaag

SEQ ID NO: 1104697 - RNA, 19 nt, Artificial Sequence
  Description of Artificial Sequence: Synthetic oligonucleotide
  Antisense strand to SEQ ID NO: 1104696
cuucuuggacaccucaacc

SEQ ID NO: 1104698 - RNA, 19 nt, Artificial Sequence
  Description of Artificial Sequence: Synthetic oligonucleotide
  Sense strand starting at position 2189 of SEQ ID NO: 915770
gagagugcgugucuucaug

SEQ ID NO: 1104699 - RNA, 19 nt, Artificial Sequence
  Description of Artificial Sequence: Synthetic oligonucleotide
  Antisense strand to SEQ ID NO: 1104698
caugaagacacgcacucuc

SEQ ID NO: 1104700 - RNA, 19 nt, Artificial Sequence
  Description of Artificial Sequence: Synthetic oligonucleotide
  Sense strand starting at position 2249 of SEQ ID NO: 915770
acguuucccgaucaguaga

SEQ ID NO: 1104701 - RNA, 19 nt, Artificial Sequence
  Description of Artificial Sequence: Synthetic oligonucleotide
  Antisense strand to SEQ ID NO: 1104700
ucuacugaucgggaaacgu

SEQ ID NO: 1104702 - RNA, 19 nt, Artificial Sequence
  Description of Artificial Sequence: Synthetic oligonucleotide
  Sense strand starting at position 2272 of SEQ ID NO: 915770
cgagcugugcucugugguu

SEQ ID NO: 1104703 - RNA, 19 nt, Artificial Sequence
  Description of Artificial Sequence: Synthetic oligonucleotide
  Antisense strand to SEQ ID NO: 1104702
aaccacagagcacagcucg

SEQ ID NO: 1104704 - RNA, 19 nt, Artificial Sequence
  Description of Artificial Sequence: Synthetic oligonucleotide
  Sense strand starting at position 2392 of SEQ ID NO: 915770
caaguauacugguuggaga

SEQ ID NO: 1104705 - RNA, 19 nt, Artificial Sequence
  Description of Artificial Sequence: Synthetic oligonucleotide
  Antisense strand to SEQ ID NO: 1104704
ucuccaaccaguauacuug

SEQ ID NO: 1104706 - RNA, 19 nt, Artificial Sequence
  Description of Artificial Sequence: Synthetic oligonucleotide
  Sense strand starting at position 2393 of SEQ ID NO: 915770
aaguauacugguuggagaa

SEQ ID NO: 1104707 - RNA, 19 nt, Artificial Sequence
  Description of Artificial Sequence: Synthetic oligonucleotide
  Antisense strand to SEQ ID NO: 1104706
uucuccaaccaguauacuu

SEQ ID NO: 1104708 - RNA, 19 nt, Artificial Sequence
  Description of Artificial Sequence: Synthetic oligonucleotide
  Sense strand starting at position 2394 of SEQ ID NO: 915770
aguauacugguuggagaaa
